United States Patent Application Publication US 2022/0162320 A1 - sequence listing, part 2

SEQ ID NO: 17100 - protein, 9 aa, Homo sapiens
  misc_feature: Table A; Target 17100; HLA-A*24:02; COX7B2; ENSG00000170516; TAA
HSPDFHDKY

SEQ ID NO: 17101 - protein, 9 aa, Homo sapiens
  misc_feature: Table A; Target 17101; HLA-A*26:01; COX7B2; ENSG00000170516; TAA
HSPDFHDKY

SEQ ID NO: 17102 - protein, 9 aa, Homo sapiens
  misc_feature: Table A; Target 17102; HLA-A*29:02; COX7B2; ENSG00000170516; TAA
HSPDFHDKY

SEQ ID NO: 17103 - protein, 9 aa, Homo sapiens
  misc_feature: Table A; Target 17103; HLA-A*30:02; COX7B2; ENSG00000170516; TAA
HSPDFHDKY

SEQ ID NO: 17104 - protein, 9 aa, Homo sapiens
  misc_feature: Table A; Target 17104; HLA-B*35:01; COX7B2; ENSG00000170516; TAA
HSPDFHDKY

SEQ ID NO: 17105 - protein, 8 aa, Homo sapiens
  misc_feature: Table A; Target 17105; HLA-B*18:01; COX7B2; ENSG00000170516; TAA
IEWNLSPV

SEQ ID NO: 17106 - protein, 8 aa, Homo sapiens
  misc_feature: Table A; Target 17106; HLA-B*49:01; COX7B2; ENSG00000170516; TAA
IEWNLSPV

SEQ ID NO: 17107 - protein, 9 aa, Homo sapiens
  misc_feature: Table A; Target 17107; HLA-B*18:01; COX7B2; ENSG00000170516; TAA
IEWNLSPVG

SEQ ID NO: 17108 - protein, 9 aa, Homo sapiens
  misc_feature: Table A; Target 17108; HLA-B*40:02; COX7B2; ENSG00000170516; TAA
IEWNLSPVG

SEQ ID NO: 17109 - protein, 9 aa, Homo sapiens
  misc_feature: Table A; Target 17109; HLA-B*49:01; COX7B2; ENSG00000170516; TAA
IEWNLSPVG

SEQ ID NO: 17110 - protein, 8 aa, Homo sapiens
  misc_feature: Table A; Target 17110; HLA-A*30:01; COX7B2; ENSG00000170516; TAA
IQSILQSM

SEQ ID NO: 17111 - protein, 8 aa, Homo sapiens
  misc_feature: Table A; Target 17111; HLA-B*08:01; COX7B2; ENSG00000170516; TAA
IQSILQSM

SEQ ID NO: 17112 - protein, 8 aa, Homo sapiens
  misc_feature: Table A; Target 17112; HLA-B*13:02; COX7B2; ENSG00000170516; TAA
IQSILQSM

SEQ ID NO: 17113 - protein, 8 aa, Homo sapiens
  misc_feature: Table A; Target 17113; HLA-B*15:01; COX7B2; ENSG00000170516; TAA
IQSILQSM

SEQ ID NO: 17114 - protein, 8 aa, Homo sapiens
  misc_feature: Table A; Target 17114; HLA-B*15:03; COX7B2; ENSG00000170516; TAA
IQSILQSM

SEQ ID NO: 17115 - protein, 8 aa, Homo sapiens
  misc_feature: Table A; Target 17115; HLA-B*18:01; COX7B2; ENSG00000170516; TAA
IQSILQSM

SEQ ID NO: 17116 - protein, 8 aa, Homo sapiens
  misc_feature: Table A; Target 17116; HLA-B*27:05; COX7B2; ENSG00000170516; TAA
IQSILQSM

SEQ ID NO: 17117 - protein, 8 aa, Homo sapiens
  misc_feature: Table A; Target 17117; HLA-B*37:01; COX7B2; ENSG00000170516; TAA
IQSILQSM

SEQ ID NO: 17118 - protein, 8 aa, Homo sapiens
  misc_feature: Table A; Target 17118; HLA-B*38:01; COX7B2; ENSG00000170516; TAA
IQSILQSM

SEQ ID NO: 17119 - protein, 8 aa, Homo sapiens
  misc_feature: Table A; Target 17119; HLA-B*39:01; COX7B2; ENSG00000170516; TAA
IQSILQSM

SEQ ID NO: 17120 - protein, 8 aa, Homo sapiens
  misc_feature: Table A; Target 17120; HLA-B*40:02; COX7B2; ENSG00000170516; TAA
IQSILQSM

SEQ ID NO: 17121 - protein, 8 aa, Homo sapiens
  misc_feature: Table A; Target 17121; HLA-B*46:01; COX7B2; ENSG00000170516; TAA
IQSILQSM

SEQ ID NO: 17122 - protein, 8 aa, Homo sapiens
  misc_feature: Table A; Target 17122; HLA-C*04:01; COX7B2; ENSG00000170516; TAA
IQSILQSM

SEQ ID NO: 17123 - protein, 8 aa, Homo sapiens
  misc_feature: Table A; Target 17123; HLA-C*06:02; COX7B2; ENSG00000170516; TAA
IQSILQSM

SEQ ID NO: 17124 - protein, 8 aa, Homo sapiens
  misc_feature: Table A; Target 17124; HLA-C*07:01; COX7B2; ENSG00000170516; TAA
IQSILQSM

SEQ ID NO: 17125 - protein, 8 aa, Homo sapiens
  misc_feature: Table A; Target 17125; HLA-C*07:04; COX7B2; ENSG00000170516; TAA
IQSILQSM

SEQ ID NO: 17126 - protein, 8 aa, Homo sapiens
  misc_feature: Table A; Target 17126; HLA-C*14:02; COX7B2; ENSG00000170516; TAA
IQSILQSM

SEQ ID NO: 17127 - protein, 8 aa, Homo sapiens
  misc_feature: Table A; Target 17127; HLA-C*16:02; COX7B2; ENSG00000170516; TAA
IQSILQSM

SEQ ID NO: 17128 - protein, 9 aa, Homo sapiens
  misc_feature: Table A; Target 17128; HLA-B*13:02; COX7B2; ENSG00000170516; TAA
IQSILQSMA

SEQ ID NO: 17129 - protein, 9 aa, Homo sapiens
  misc_feature: Table A; Target 17129; HLA-B*27:05; COX7B2; ENSG00000170516; TAA
IQSILQSMA

SEQ ID NO: 17130 - protein, 9 aa, Homo sapiens
  misc_feature: Table A; Target 17130; HLA-C*06:02; COX7B2; ENSG00000170516; TAA
IQSILQSMA

SEQ ID NO: 17131 - protein, 10 aa, Homo sapiens
  misc_feature: Table A; Target 17131; HLA-A*31:01; COX7B2; ENSG00000170516; TAA
IQSILQSMAR

SEQ ID NO: 17132 - protein, 10 aa, Homo sapiens
  misc_feature: Table A; Target 17132; HLA-B*27:02; COX7B2; ENSG00000170516; TAA
IQSILQSMAR

SEQ ID NO: 17133 - protein, 10 aa, Homo sapiens
  misc_feature: Table A; Target 17133; HLA-C*04:01; COX7B2; ENSG00000170516; TAA
IQSILQSMAR

SEQ ID NO: 17134 - protein, 10 aa, Homo sapiens
  misc_feature: Table A; Target 17134; HLA-C*06:02; COX7B2; ENSG00000170516; TAA
IQSILQSMAR

SEQ ID NO: 17135 - protein, 10 aa, Homo sapiens
  misc_feature: Table A; Target 17135; HLA-A*30:02; COX7B2; ENSG00000170516; TAA
KHSPDFHDKY

SEQ ID NO: 17136 - protein, 9 aa, Homo sapiens
  misc_feature: Table A; Target 17136; HLA-A*02:01; COX7B2; ENSG00000170516; TAA
KIQSILQSM

SEQ ID NO: 17137 - protein, 9 aa, Homo sapiens
  misc_feature: Table A; Target 17137; HLA-A*02:03; COX7B2; ENSG00000170516; TAA
KIQSILQSM

SEQ ID NO: 17138 - protein, 9 aa, Homo sapiens
  misc_feature: Table A; Target 17138; HLA-A*02:04; COX7B2; ENSG00000170516; TAA
KIQSILQSM

SEQ ID NO: 17139 - protein, 9 aa, Homo sapiens
  misc_feature: Table A; Target 17139; HLA-A*02:07; COX7B2; ENSG00000170516; TAA
KIQSILQSM

SEQ ID NO: 17140 - protein, 9 aa, Homo sapiens
  misc_feature: Table A; Target 17140; HLA-A*03:01; COX7B2; ENSG00000170516; TAA
KIQSILQSM

SEQ ID NO: 17141 - protein, 9 aa, Homo sapiens
  misc_feature: Table A; Target 17141; HLA-A*03:02; COX7B2; ENSG00000170516; TAA
KIQSILQSM

SEQ ID NO: 17142 - protein, 9 aa, Homo sapiens
  misc_feature: Table A; Target 17142; HLA-A*23:01; COX7B2; ENSG00000170516; TAA
KIQSILQSM

SEQ ID NO: 17143 - protein, 9 aa, Homo sapiens
  misc_feature: Table A; Target 17143; HLA-A*24:02; COX7B2; ENSG00000170516; TAA
KIQSILQSM

SEQ ID NO: 17144 - protein, 9 aa, Homo sapiens
  misc_feature: Table A; Target 17144; HLA-A*26:01; COX7B2; ENSG00000170516; TAA
KIQSILQSM

SEQ ID NO: 17145 - protein, 9 aa, Homo sapiens
  misc_feature: Table A; Target 17145; HLA-A*29:02; COX7B2; ENSG00000170516; TAA
KIQSILQSM

SEQ ID NO: 17146 - protein, 9 aa, Homo sapiens
  misc_feature: Table A; Target 17146; HLA-A*30:01; COX7B2; ENSG00000170516; TAA
KIQSILQSM

SEQ ID NO: 17147 - protein, 9 aa, Homo sapiens
  misc_feature: Table A; Target 17147; HLA-A*30:02; COX7B2; ENSG00000170516; TAA
KIQSILQSM

SEQ ID NO: 17148 - protein, 9 aa, Homo sapiens
  misc_feature: Table A; Target 17148; HLA-A*31:01; COX7B2; ENSG00000170516; TAA
KIQSILQSM

SEQ ID NO: 17149 - protein, 9 aa, Homo sapiens
  misc_feature: Table A; Target 17149; HLA-A*32:01; COX7B2; ENSG00000170516; TAA
KIQSILQSM

SEQ ID NO: 17150 - protein, 9 aa, Homo sapiens
  misc_feature: Table A; Target 17150; HLA-B*07:02; COX7B2; ENSG00000170516; TAA
KIQSILQSM

SEQ ID NO: 17151 - protein, 9 aa, Homo sapiens
  misc_feature: Table A; Target 17151; HLA-B*08:01; COX7B2; ENSG00000170516; TAA
KIQSILQSM

SEQ ID NO: 17152 - protein, 9 aa, Homo sapiens
  misc_feature: Table A; Target 17152; HLA-B*13:02; COX7B2; ENSG00000170516; TAA
KIQSILQSM

SEQ ID NO: 17153 - protein, 9 aa, Homo sapiens
  misc_feature: Table A; Target 17153; HLA-B*15:01; COX7B2; ENSG00000170516; TAA
KIQSILQSM

SEQ ID NO: 17154 - protein, 9 aa, Homo sapiens
  misc_feature: Table A; Target 17154; HLA-B*15:03; COX7B2; ENSG00000170516; TAA
KIQSILQSM

SEQ ID NO: 17155 - protein, 9 aa, Homo sapiens
  misc_feature: Table A; Target 17155; HLA-B*27:05; COX7B2; ENSG00000170516; TAA
KIQSILQSM

SEQ ID NO: 17156 - protein, 9 aa, Homo sapiens
  misc_feature: Table A; Target 17156; HLA-B*37:01; COX7B2; ENSG00000170516; TAA
KIQSILQSM

SEQ ID NO: 17157 - protein, 9 aa, Homo sapiens
  misc_feature: Table A; Target 17157; HLA-B*40:01; COX7B2; ENSG00000170516; TAA
KIQSILQSM

SEQ ID NO: 17158 - protein, 9 aa, Homo sapiens
  misc_feature: Table A; Target 17158; HLA-B*40:02; COX7B2; ENSG00000170516; TAA
KIQSILQSM

SEQ ID NO: 17159 - protein, 9 aa, Homo sapiens
  misc_feature: Table A; Target 17159; HLA-B*44:03; COX7B2; ENSG00000170516; TAA
KIQSILQSM

SEQ ID NO: 17160 - protein, 9 aa, Homo sapiens
  misc_feature: Table A; Target 17160; HLA-B*46:01; COX7B2; ENSG00000170516; TAA
KIQSILQSM

SEQ ID NO: 17161 - protein, 9 aa, Homo sapiens
  misc_feature: Table A; Target 17161; HLA-B*55:01; COX7B2; ENSG00000170516; TAA
KIQSILQSM

SEQ ID NO: 17162 - protein, 9 aa, Homo sapiens
  misc_feature: Table A; Target 17162; HLA-B*56:01; COX7B2; ENSG00000170516; TAA
KIQSILQSM

SEQ ID NO: 17163 - protein, 9 aa, Homo sapiens
  misc_feature: Table A; Target 17163; HLA-B*57:01; COX7B2; ENSG00000170516; TAA
KIQSILQSM

SEQ ID NO: 17164 - protein, 9 aa, Homo sapiens
  misc_feature: Table A; Target 17164; HLA-B*58:01; COX7B2; ENSG00000170516; TAA
KIQSILQSM

SEQ ID NO: 17165 - protein, 9 aa, Homo sapiens
  misc_feature: Table A; Target 17165; HLA-C*01:02; COX7B2; ENSG00000170516; TAA
KIQSILQSM

SEQ ID NO: 17166 - protein, 9 aa, Homo sapiens
  misc_feature: Table A; Target 17166; HLA-C*02:02; COX7B2; ENSG00000170516; TAA
KIQSILQSM

SEQ ID NO: 17167 - protein, 9 aa, Homo sapiens
  misc_feature: Table A; Target 17167; HLA-C*03:03; COX7B2; ENSG00000170516; TAA
KIQSILQSM

SEQ ID NO: 17168 - protein, 9 aa, Homo sapiens
  misc_feature: Table A; Target 17168; HLA-C*03:04; COX7B2; ENSG00000170516; TAA
KIQSILQSM

SEQ ID NO: 17169 - protein, 9 aa, Homo sapiens
  misc_feature: Table A; Target 17169; HLA-C*04:01; COX7B2; ENSG00000170516; TAA
KIQSILQSM

SEQ ID NO: 17170 - protein, 9 aa, Homo sapiens
  misc_feature: Table A; Target 17170; HLA-C*05:01; COX7B2; ENSG00000170516; TAA
KIQSILQSM

SEQ ID NO: 17171 - protein, 9 aa, Homo sapiens
  misc_feature: Table A; Target 17171; HLA-C*06:02; COX7B2; ENSG00000170516; TAA
KIQSILQSM

SEQ ID NO: 17172 - protein, 9 aa, Homo sapiens
  misc_feature: Table A; Target 17172; HLA-C*07:01; COX7B2; ENSG00000170516; TAA
KIQSILQSM

SEQ ID NO: 17173 - protein, 9 aa, Homo sapiens
  misc_feature: Table A; Target 17173; HLA-C*07:02; COX7B2; ENSG00000170516; TAA
KIQSILQSM

SEQ ID NO: 17174 - protein, 9 aa, Homo sapiens
  misc_feature: Table A; Target 17174; HLA-C*07:04; COX7B2; ENSG00000170516; TAA
KIQSILQSM

SEQ ID NO: 17175 - protein, 9 aa, Homo sapiens
  misc_feature: Table A; Target 17175; HLA-C*12:03; COX7B2; ENSG00000170516; TAA
KIQSILQSM

SEQ ID NO: 17176 - protein, 9 aa, Homo sapiens
  misc_feature: Table A; Target 17176; HLA-C*14:02; COX7B2; ENSG00000170516; TAA
KIQSILQSM

SEQ ID NO: 17177 - protein, 9 aa, Homo sapiens
  misc_feature: Table A; Target 17177; HLA-C*16:01; COX7B2; ENSG00000170516; TAA
KIQSILQSM

SEQ ID NO: 17178 - protein, 9 aa, Homo sapiens
  misc_feature: Table A; Target 17178; HLA-C*16:02; COX7B2; ENSG00000170516; TAA
KIQSILQSM

SEQ ID NO: 17179 - protein, 9 aa, Homo sapiens
  misc_feature: Table A; Target 17179; HLA-C*16:04; COX7B2; ENSG00000170516; TAA
KIQSILQSM

SEQ ID NO: 17180 - protein, 11 aa, Homo sapiens
  misc_feature: Table A; Target 17180; HLA-A*03:01; COX7B2; ENSG00000170516; TAA
KIQSILQSMAR

SEQ ID NO: 17181 - protein, 11 aa, Homo sapiens
  misc_feature: Table A; Target 17181; HLA-A*03:02; COX7B2; ENSG00000170516; TAA
KIQSILQSMAR

SEQ ID NO: 17182 - protein, 11 aa, Homo sapiens
  misc_feature: Table A; Target 17182; HLA-A*11:01; COX7B2; ENSG00000170516; TAA
KIQSILQSMAR

SEQ ID NO: 17183 - protein, 11 aa, Homo sapiens
  misc_feature: Table A; Target 17183; HLA-A*31:01; COX7B2; ENSG00000170516; TAA
KIQSILQSMAR

SEQ ID NO: 17184 - protein, 11 aa, Homo sapiens
  misc_feature: Table A; Target 17184; HLA-C*06:02; COX7B2; ENSG00000170516; TAA
KIQSILQSMAR

SEQ ID NO: 17185 - protein, 8 aa, Homo sapiens
  misc_feature: Table A; Target 17185; HLA-C*14:02; COX7B2; ENSG00000170516; TAA
KYGNAVLA

SEQ ID NO: 17186 - protein, 9 aa, Homo sapiens
  misc_feature: Table A; Target 17186; HLA-C*07:01; COX7B2; ENSG00000170516; TAA
KYGNAVLAS

SEQ ID NO: 17187 - protein, 9 aa, Homo sapiens
  misc_feature: Table A; Target 17187; HLA-C*07:02; COX7B2; ENSG00000170516; TAA
KYGNAVLAS

SEQ ID NO: 17188 - protein, 10 aa, Homo sapiens
  misc_feature: Table A; Target 17188; HLA-C*07:02; COX7B2; ENSG00000170516; TAA
KYGNAVLASG

SEQ ID NO: 17189 - protein, 9 aa, Homo sapiens
  misc_feature: Table A; Target 17189; HLA-A*02:03; COX7B2; ENSG00000170516; TAA
LARNALSSL

SEQ ID NO: 17190 - protein, 9 aa, Homo sapiens
  misc_feature: Table A; Target 17190; HLA-A*32:01; COX7B2; ENSG00000170516; TAA
LARNALSSL

SEQ ID NO: 17191 - protein, 9 aa, Homo sapiens
  misc_feature: Table A; Target 17191; HLA-B*07:02; COX7B2; ENSG00000170516; TAA
LARNALSSL

SEQ ID NO: 17192 - protein, 9 aa, Homo sapiens
  misc_feature: Table A; Target 17192; HLA-B*08:01; COX7B2; ENSG00000170516; TAA
LARNALSSL

SEQ ID NO: 17193 - protein, 9 aa, Homo sapiens
  misc_feature: Table A; Target 17193; HLA-B*15:01; COX7B2; ENSG00000170516; TAA
LARNALSSL

SEQ ID NO: 17194 - protein, 9 aa, Homo sapiens
  misc_feature: Table A; Target 17194; HLA-B*15:03; COX7B2; ENSG00000170516; TAA
LARNALSSL

SEQ ID NO: 17195 - protein, 9 aa, Homo sapiens
  misc_feature: Table A; Target 17195; HLA-B*40:02; COX7B2; ENSG00000170516; TAA
LARNALSSL

SEQ ID NO: 17196 - protein, 9 aa, Homo sapiens
  misc_feature: Table A; Target 17196; HLA-B*46:01; COX7B2; ENSG00000170516; TAA
LARNALSSL

SEQ ID NO: 17197 - protein, 9 aa, Homo sapiens
  misc_feature: Table A; Target 17197; HLA-B*51:01; COX7B2; ENSG00000170516; TAA
LARNALSSL

SEQ ID NO: 17198 - protein, 9 aa, Homo sapiens
  misc_feature: Table A; Target 17198; HLA-B*54:01; COX7B2; ENSG00000170516; TAA
LARNALSSL

SEQ ID NO: 17199 - protein, 9 aa, Homo sapiens
  misc_feature: Table A; Target 17199; HLA-C*01:02; COX7B2; ENSG00000170516; TAA
LARNALSSL

SEQ ID NO: 17200 - protein, 9 aa, Homo sapiens
  misc_feature: Table A; Target 17200; HLA-C*03:03; COX7B2; ENSG00000170516; TAA
LARNALSSL

SEQ ID NO: 17201 - protein, 9 aa, Homo sapiens
  misc_feature: Table A; Target 17201; HLA-C*03:04; COX7B2; ENSG00000170516; TAA
LARNALSSL

SEQ ID NO: 17202 - protein, 9 aa, Homo sapiens
  misc_feature: Table A; Target 17202; HLA-C*06:02; COX7B2; ENSG00000170516; TAA
LARNALSSL

SEQ ID NO: 17203 - protein, 9 aa, Homo sapiens
  misc_feature: Table A; Target 17203; HLA-C*07:02; COX7B2; ENSG00000170516; TAA
LARNALSSL

SEQ ID NO: 17204 - protein, 9 aa, Homo sapiens
  misc_feature: Table A; Target 17204; HLA-C*07:04; COX7B2; ENSG00000170516; TAA
LARNALSSL

SEQ ID NO: 17205 - protein, 9 aa, Homo sapiens
  misc_feature: Table A; Target 17205; HLA-C*12:03; COX7B2; ENSG00000170516; TAA
LARNALSSL

SEQ ID NO: 17206 - protein, 9 aa, Homo sapiens
  misc_feature: Table A; Target 17206; HLA-C*14:02; COX7B2; ENSG00000170516; TAA
LARNALSSL

SEQ ID NO: 17207 - protein, 9 aa, Homo sapiens
  misc_feature: Table A; Target 17207; HLA-C*16:01; COX7B2; ENSG00000170516; TAA
LARNALSSL

SEQ ID NO: 17208 - protein, 9 aa, Homo sapiens
  misc_feature: Table A; Target 17208; HLA-C*16:02; COX7B2; ENSG00000170516; TAA
LARNALSSL

SEQ ID NO: 17209 - protein, 9 aa, Homo sapiens
  misc_feature: Table A; Target 17209; HLA-A*68:02; COX7B2; ENSG00000170516; TAA
LASGTAFCV

SEQ ID NO: 17210 - protein, 9 aa, Homo sapiens
  misc_feature: Table A; Target 17210; HLA-B*07:02; COX7B2; ENSG00000170516; TAA
LASGTAFCV

SEQ ID NO: 17211 - protein, 9 aa, Homo sapiens
  misc_feature: Table A; Target 17211; HLA-B*13:02; COX7B2; ENSG00000170516; TAA
LASGTAFCV

SEQ ID NO: 17212 - protein, 9 aa, Homo sapiens
  misc_feature: Table A; Target 17212; HLA-B*35:03; COX7B2; ENSG00000170516; TAA
LASGTAFCV

SEQ ID NO: 17213 - protein, 9 aa, Homo sapiens
  misc_feature: Table A; Target 17213; HLA-B*51:01; COX7B2; ENSG00000170516; TAA
LASGTAFCV

SEQ ID NO: 17214 - protein, 9 aa, Homo sapiens
  misc_feature: Table A; Target 17214; HLA-B*54:01; COX7B2; ENSG00000170516; TAA
LASGTAFCV

SEQ ID NO: 17215 - protein, 9 aa, Homo sapiens
  misc_feature: Table A; Target 17215; HLA-B*56:01; COX7B2; ENSG00000170516; TAA
LASGTAFCV

SEQ ID NO: 17216 - protein, 9 aa, Homo sapiens
  misc_feature: Table A; Target 17216; HLA-C*02:02; COX7B2; ENSG00000170516; TAA
LASGTAFCV

SEQ ID NO: 17217 - protein, 9 aa, Homo sapiens
  misc_feature: Table A; Target 17217; HLA-C*03:04; COX7B2; ENSG00000170516; TAA
LASGTAFCV

SEQ ID NO: 17218 - protein, 9 aa, Homo sapiens
  misc_feature: Table A; Target 17218; HLA-C*04:01; COX7B2; ENSG00000170516; TAA
LASGTAFCV

SEQ ID NO: 17219 - protein, 9 aa, Homo sapiens
  misc_feature: Table A; Target 17219; HLA-C*06:02; COX7B2; ENSG00000170516; TAA
LASGTAFCV

SEQ ID NO: 17220 - protein, 9 aa, Homo sapiens
  misc_feature: Table A; Target 17220; HLA-C*07:01; COX7B2; ENSG00000170516; TAA
LASGTAFCV

SEQ ID NO: 17221 - protein, 9 aa, Homo sapiens
  misc_feature: Table A; Target 17221; HLA-C*07:02; COX7B2; ENSG00000170516; TAA
LASGTAFCV

SEQ ID NO: 17222 - protein, 9 aa, Homo sapiens
  misc_feature: Table A; Target 17222; HLA-C*07:04; COX7B2; ENSG00000170516; TAA
LASGTAFCV

SEQ ID NO: 17223 - protein, 9 aa, Homo sapiens
  misc_feature: Table A; Target 17223; HLA-C*12:03; COX7B2; ENSG00000170516; TAA
LASGTAFCV

SEQ ID NO: 17224 - protein, 9 aa, Homo sapiens
  misc_feature: Table A; Target 17224; HLA-C*16:01; COX7B2; ENSG00000170516; TAA
LASGTAFCV

SEQ ID NO: 17225 - protein, 9 aa, Homo sapiens
  misc_feature: Table A; Target 17225; HLA-C*16:02; COX7B2; ENSG00000170516; TAA
LASGTAFCV

SEQ ID NO: 17226 - protein, 9 aa, Homo sapiens
  misc_feature: Table A; Target 17226; HLA-C*16:04; COX7B2; ENSG00000170516; TAA
LASGTAFCV

SEQ ID NO: 17227 - protein, 10 aa, Homo sapiens
  misc_feature: Table A; Target 17227; HLA-B*54:01; COX7B2; ENSG00000170516; TAA
LASGTAFCVA

SEQ ID NO: 17228 - protein, 10 aa, Homo sapiens
  misc_feature: Table A; Target 17228; HLA-B*15:03; COX7B2; ENSG00000170516; TAA
LKIQSILQSM

SEQ ID NO: 17229 - protein, 8 aa, Homo sapiens
  misc_feature: Table A; Target 17229; HLA-C*16:01; COX7B2; ENSG00000170516; TAA
LSPVGRVT

SEQ ID NO: 17230 - protein, 10 aa, Homo sapiens
  misc_feature: Table A; Target 17230; HLA-A*03:01; COX7B2; ENSG00000170516; TAA
LSPVGRVTPK

SEQ ID NO: 17231 - protein, 10 aa, Homo sapiens
  misc_feature: Table A; Target 17231; HLA-C*01:02; COX7B2; ENSG00000170516; TAA
LSPVGRVTPK

SEQ ID NO: 17232 - protein, 10 aa, Homo sapiens
  misc_feature: Table A; Target 17232; HLA-C*07:02; COX7B2; ENSG00000170516; TAA
LSPVGRVTPK

SEQ ID NO: 17233 - protein, 9 aa, Homo sapiens
  misc_feature: Table A; Target 17233; HLA-A*02:03; COX7B2; ENSG00000170516; TAA
LSSLKIQSI

SEQ ID NO: 17234 - protein, 9 aa, Homo sapiens
  misc_feature: Table A; Target 17234; HLA-B*08:01; COX7B2; ENSG00000170516; TAA
LSSLKIQSI

SEQ ID NO: 17235 - protein, 9 aa, Homo sapiens
  misc_feature: Table A; Target 17235; HLA-B*13:02; COX7B2; ENSG00000170516; TAA
LSSLKIQSI

SEQ ID NO: 17236 - protein, 9 aa, Homo sapiens
  misc_feature: Table A; Target 17236; HLA-B*37:01; COX7B2; ENSG00000170516; TAA
LSSLKIQSI

SEQ ID NO: 17237 - protein, 9 aa, Homo sapiens
  misc_feature: Table A; Target 17237; HLA-B*54:01; COX7B2; ENSG00000170516; TAA
LSSLKIQSI

SEQ ID NO: 17238 - protein, 9 aa, Homo sapiens
  misc_feature: Table A; Target 17238; HLA-B*58:01; COX7B2; ENSG00000170516; TAA
LSSLKIQSI

SEQ ID NO: 17239 - protein, 9 aa, Homo sapiens
  misc_feature: Table A; Target 17239; HLA-C*06:02; COX7B2; ENSG00000170516; TAA
LSSLKIQSI

SEQ ID NO: 17240 - protein, 9 aa, Homo sapiens
  misc_feature: Table A; Target 17240; HLA-C*16:02; COX7B2; ENSG00000170516; TAA
LSSLKIQSI

SEQ ID NO: 17241 - protein, 10 aa, Homo sapiens
  misc_feature: Table A; Target 17241; HLA-C*07:02; COX7B2; ENSG00000170516; TAA
LSSLKIQSIL

SEQ ID NO: 17242 - protein, 8 aa, Homo sapiens
  misc_feature: Table A; Target 17242; HLA-C*07:01; COX7B2; ENSG00000170516; TAA
MARHSHVK

SEQ ID NO: 17243 - protein, 9 aa, Homo sapiens
  misc_feature: Table A; Target 17243; HLA-A*24:02; COX7B2; ENSG00000170516; TAA
MFPLARNAL

SEQ ID NO: 17244 - protein, 9 aa, Homo sapiens
  misc_feature: Table A; Target 17244; HLA-B*07:02; COX7B2; ENSG00000170516; TAA
MFPLARNAL

SEQ ID NO: 17245 - protein, 9 aa, Homo sapiens
  misc_feature: Table A; Target 17245; HLA-B*08:01; COX7B2; ENSG00000170516; TAA
MFPLARNAL

SEQ ID NO: 17246 - protein, 9 aa, Homo sapiens
  misc_feature: Table A; Target 17246; HLA-C*01:02; COX7B2; ENSG00000170516; TAA
MFPLARNAL

SEQ ID NO: 17247 - protein, 9 aa, Homo sapiens
  misc_feature: Table A; Target 17247; HLA-C*07:02; COX7B2; ENSG00000170516; TAA
MFPLARNAL

SEQ ID NO: 17248 - protein, 9 aa, Homo sapiens
  misc_feature: Table A; Target 17248; HLA-C*14:02; COX7B2; ENSG00000170516; TAA
MFPLARNAL

SEQ ID NO: 17249 - protein, 9 aa, Homo sapiens
  misc_feature: Table A; Target 17249; HLA-A*02:03; COX7B2; ENSG00000170516; TAA
MMFPLARNA

SEQ ID NO: 17250 - protein, 9 aa, Homo sapiens
  misc_feature: Table A; Target 17250; HLA-B*54:01; COX7B2; ENSG00000170516; TAA
MMFPLARNA

SEQ ID NO: 17251 - protein, 10 aa, Homo sapiens
  misc_feature: Table A; Target 17251; HLA-A*02:03; COX7B2; ENSG00000170516; TAA
MMFPLARNAL

SEQ ID NO: 17252 - protein, 10 aa, Homo sapiens
  misc_feature: Table A; Target 17252; HLA-A*02:04; COX7B2; ENSG00000170516; TAA
MMFPLARNAL

SEQ ID NO: 17253 - protein, 10 aa, Homo sapiens
  misc_feature: Table A; Target 17253; HLA-A*02:07; COX7B2; ENSG00000170516; TAA
MMFPLARNAL

SEQ ID NO: 17254 - protein, 10 aa, Homo sapiens
  misc_feature: Table A; Target 17254; HLA-A*31:01; COX7B2; ENSG00000170516; TAA
MMFPLARNAL

SEQ ID NO: 17255 - protein, 10 aa, Homo sapiens
  misc_feature: Table A; Target 17255; HLA-A*68:02; COX7B2; ENSG00000170516; TAA
MMFPLARNAL

SEQ ID NO: 17256 - protein, 10 aa, Homo sapiens
  misc_feature: Table A; Target 17256; HLA-B*54:01; COX7B2; ENSG00000170516; TAA
MMFPLARNAL

SEQ ID NO: 17257 - protein, 10 aa, Homo sapiens
  misc_feature: Table A; Target 17257; HLA-C*07:02; COX7B2; ENSG00000170516; TAA
MMFPLARNAL

SEQ ID NO: 17258 - protein, 9 aa, Homo sapiens
  misc_feature: Table A; Target 17258; HLA-C*07:01; COX7B2; ENSG00000170516; TAA
NALSSLKIQ

SEQ ID NO: 17259 - protein, 9 aa, Homo sapiens
  misc_feature: Table A; Target 17259; HLA-C*12:03; COX7B2; ENSG00000170516; TAA
NALSSLKIQ

SEQ ID NO: 17260 - protein, 9 aa, Homo sapiens
  misc_feature: Table A; Target 17260; HLA-B*54:01; COX7B2; ENSG00000170516; TAA
NAVLASGTA

SEQ ID NO: 17261 - protein, 9 aa, Homo sapiens
  misc_feature: Table A; Target 17261; HLA-B*56:01; COX7B2; ENSG00000170516; TAA
NAVLASGTA

SEQ ID NO: 17262 - protein, 9 aa, Homo sapiens
  misc_feature: Table A; Target 17262; HLA-C*03:04; COX7B2; ENSG00000170516; TAA
NAVLASGTA

SEQ ID NO: 17263 - protein, 10 aa, Homo sapiens
  misc_feature: Table A; Target 17263; HLA-A*23:01; COX7B2; ENSG00000170516; TAA
NAVLASGTAF

SEQ ID NO: 17264 - protein, 10 aa, Homo sapiens
  misc_feature: Table A; Target 17264; HLA-A*25:01; COX7B2; ENSG00000170516; TAA
NAVLASGTAF

SEQ ID NO: 17265 - protein, 10 aa, Homo sapiens
  misc_feature: Table A; Target 17265; HLA-B*07:02; COX7B2; ENSG00000170516; TAA
NAVLASGTAF

SEQ ID NO: 17266 - protein, 10 aa, Homo sapiens
  misc_feature: Table A; Target 17266; HLA-B*15:01; COX7B2; ENSG00000170516; TAA
NAVLASGTAF

SEQ ID NO: 17267 - protein, 10 aa, Homo sapiens
  misc_feature: Table A; Target 17267; HLA-B*15:03; COX7B2; ENSG00000170516; TAA
NAVLASGTAF

SEQ ID NO: 17268 - protein, 10 aa, Homo sapiens
  misc_feature: Table A; Target 17268; HLA-B*27:02; COX7B2; ENSG00000170516; TAA
NAVLASGTAF

SEQ ID NO: 17269 - protein, 10 aa, Homo sapiens
  misc_feature: Table A; Target 17269; HLA-B*35:01; COX7B2; ENSG00000170516; TAA
NAVLASGTAF

SEQ ID NO: 17270 - protein, 10 aa, Homo sapiens
  misc_feature: Table A; Target 17270; HLA-B*35:03; COX7B2; ENSG00000170516; TAA
NAVLASGTAF

SEQ ID NO: 17271 - protein, 10 aa, Homo sapiens
  misc_feature: Table A; Target 17271; HLA-B*38:01; COX7B2; ENSG00000170516; TAA
NAVLASGTAF

SEQ ID NO: 17272 - protein, 10 aa, Homo sapiens
  misc_feature: Table A; Target 17272; HLA-B*39:01; COX7B2; ENSG00000170516; TAA
NAVLASGTAF

SEQ ID NO: 17273 - protein, 10 aa, Homo sapiens
  misc_feature: Table A; Target 17273; HLA-B*40:01; COX7B2; ENSG00000170516; TAA
NAVLASGTAF

SEQ ID NO: 17274 - protein, 10 aa, Homo sapiens
  misc_feature: Table A; Target 17274; HLA-B*46:01; COX7B2; ENSG00000170516; TAA
NAVLASGTAF

SEQ ID NO: 17275 - protein, 10 aa, Homo sapiens
  misc_feature: Table A; Target 17275; HLA-B*55:01; COX7B2; ENSG00000170516; TAA
NAVLASGTAF

SEQ ID NO: 17276 - protein, 10 aa, Homo sapiens
  misc_feature: Table A; Target 17276; HLA-B*58:01; COX7B2; ENSG00000170516; TAA
NAVLASGTAF

SEQ ID NO: 17277 - protein, 10 aa, Homo sapiens
  misc_feature: Table A; Target 17277; HLA-C*01:02; COX7B2; ENSG00000170516; TAA
NAVLASGTAF

SEQ ID NO: 17278 - protein, 10 aa, Homo sapiens
  misc_feature: Table A; Target 17278; HLA-C*02:02; COX7B2; ENSG00000170516; TAA
NAVLASGTAF

SEQ ID NO: 17279 - protein, 10 aa, Homo sapiens
  misc_feature: Table A; Target 17279; HLA-C*03:03; COX7B2; ENSG00000170516; TAA
NAVLASGTAF

SEQ ID NO: 17280 - protein, 10 aa, Homo sapiens
  misc_feature: Table A; Target 17280; HLA-C*03:04; COX7B2; ENSG00000170516; TAA
NAVLASGTAF

SEQ ID NO: 17281 - protein, 10 aa, Homo sapiens
  misc_feature: Table A; Target 17281; HLA-C*04:01; COX7B2; ENSG00000170516; TAA
NAVLASGTAF

SEQ ID NO: 17282 - protein, 10 aa, Homo sapiens
  misc_feature: Table A; Target 17282; HLA-C*05:01; COX7B2; ENSG00000170516; TAA
NAVLASGTAF

SEQ ID NO: 17283 - protein, 10 aa, Homo sapiens
  misc_feature: Table A; Target 17283; HLA-C*07:04; COX7B2; ENSG00000170516; TAA
NAVLASGTAF

SEQ ID NO: 17284 - protein, 10 aa, Homo sapiens
  misc_feature: Table A; Target 17284; HLA-C*07:06; COX7B2; ENSG00000170516; TAA
NAVLASGTAF

SEQ ID NO: 17285 - protein, 10 aa, Homo sapiens
  misc_feature: Table A; Target 17285; HLA-C*14:02; COX7B2; ENSG00000170516; TAA
NAVLASGTAF

SEQ ID NO: 17286 - protein, 10 aa, Homo sapiens
  misc_feature: Table A; Target 17286; HLA-C*16:01; COX7B2; ENSG00000170516; TAA
NAVLASGTAF

SEQ ID NO: 17287 - protein, 10 aa, Homo sapiens
  misc_feature: Table A; Target 17287; HLA-C*16:04; COX7B2; ENSG00000170516; TAA
NAVLASGTAF

SEQ ID NO: 17288 - protein, 8 aa, Homo sapiens
  misc_feature: Table A; Target 17288; HLA-A*02:03; COX7B2; ENSG00000170516; TAA
NLSPVGRV

SEQ ID NO: 17289 - protein, 9 aa, Homo sapiens
  misc_feature: Table A; Target 17289; HLA-C*06:02; COX7B2; ENSG00000170516; TAA
NLSPVGRVT

SEQ ID NO: 17290 - protein, 9 aa, Homo sapiens
  misc_feature: Table A; Target 17290; HLA-C*16:01; COX7B2; ENSG00000170516; TAA
NLSPVGRVT

SEQ ID NO: 17291 - protein, 9 aa, Homo sapiens
  misc_feature: Table A; Target 17291; HLA-C*16:02; COX7B2; ENSG00000170516; TAA
NLSPVGRVT

SEQ ID NO: 17292 - protein, 11 aa, Homo sapiens
  misc_feature: Table A; Target 17292; HLA-A*03:01; COX7B2; ENSG00000170516; TAA
NLSPVGRVTPK

SEQ ID NO: 17293 - protein, 11 aa, Homo sapiens
  misc_feature: Table A; Target 17293; HLA-A*03:02; COX7B2; ENSG00000170516; TAA
NLSPVGRVTPK

SEQ ID NO: 17294 - protein, 11 aa, Homo sapiens
  misc_feature: Table A; Target 17294; HLA-A*31:01; COX7B2; ENSG00000170516; TAA
NLSPVGRVTPK

SEQ ID NO: 17295 - protein, 10 aa, Homo sapiens
  misc_feature: Table A; Target 17295; HLA-C*07:02; COX7B2; ENSG00000170516; TAA
PLARNALSSL

SEQ ID NO: 17296 - protein, 8 aa, Homo sapiens
  misc_feature: Table A; Target 17296; HLA-A*03:02; COX7B2; ENSG00000170516; TAA
PVGRVTPK

SEQ ID NO: 17297 - protein, 8 aa, Homo sapiens
  misc_feature: Table A; Target 17297; HLA-A*11:01; COX7B2; ENSG00000170516; TAA
PVGRVTPK

SEQ ID NO: 17298 - protein, 8 aa, Homo sapiens
  misc_feature: Table A; Target 17298; HLA-C*04:01; COX7B2; ENSG00000170516; TAA
PVGRVTPK

SEQ ID NO: 17299 - protein, 8 aa, Homo sapiens
  misc_feature: Table A; Target 17299; HLA-C*06:02; COX7B2; ENSG00000170516; TAA
PVGRVTPK

SEQ ID NO: 17300 - protein, 8 aa, Homo sapiens
  misc_feature: Table A; Target 17300; HLA-C*07:01; COX7B2; ENSG00000170516; TAA
PVGRVTPK

SEQ ID NO: 17301 - protein, 8 aa, Homo sapiens
  misc_feature: Table A; Target 17301; HLA-C*07:02; COX7B2; ENSG00000170516; TAA
PVGRVTPK

SEQ ID NO: 17302 - protein, 9 aa, Homo sapiens
  misc_feature: Table A; Target 17302; HLA-A*01:01; COX7B2; ENSG00000170516; TAA
QSILQSMAR

SEQ ID NO: 17303 - protein, 9 aa, Homo sapiens
  misc_feature: Table A; Target 17303; HLA-A*11:01; COX7B2; ENSG00000170516; TAA
QSILQSMAR

SEQ ID NO: 17304 - protein, 9 aa, Homo sapiens
  misc_feature: Table A; Target 17304; HLA-A*31:01; COX7B2; ENSG00000170516; TAA
QSILQSMAR

SEQ ID NO: 17305 - protein, 9 aa, Homo sapiens
  misc_feature: Table A; Target 17305; HLA-A*33:03; COX7B2; ENSG00000170516; TAA
QSILQSMAR

SEQ ID NO: 17306 - protein, 9 aa, Homo sapiens
  misc_feature: Table A; Target 17306; HLA-A*68:01; COX7B2; ENSG00000170516; TAA
QSILQSMAR

SEQ ID NO: 17307 - protein, 9 aa, Homo sapiens
  misc_feature: Table A; Target 17307; HLA-C*07:06; COX7B2; ENSG00000170516; TAA
QSILQSMAR

SEQ ID NO: 17308 - protein, 11 aa, Homo sapiens
  misc_feature: Table A; Target 17308; HLA-C*06:02; COX7B2; ENSG00000170516; TAA
QSILQSMARHS

SEQ ID NO: 17309 - protein, 9 aa, Homo sapiens
  misc_feature: Table A; Target 17309; HLA-B*38:01; COX7B2; ENSG00000170516; TAA
SHVKHSPDF

SEQ ID NO: 17310 - protein, 8 aa, Homo sapiens
  misc_feature: Table A; Target 17310; HLA-A*31:01; COX7B2; ENSG00000170516; TAA
SILQSMAR

SEQ ID NO: 17311 - protein, 8 aa, Homo sapiens
  misc_feature: Table A; Target 17311; HLA-B*08:01; COX7B2; ENSG00000170516; TAA
SLKIQSIL

SEQ ID NO: 17312 - protein, 9 aa, Homo sapiens
  misc_feature: Table A; Target 17312; HLA-B*07:02; COX7B2; ENSG00000170516; TAA
SLKIQSILQ

SEQ ID NO: 17313 - protein, 9 aa, Homo sapiens
  misc_feature: Table A; Target 17313; HLA-C*04:01; COX7B2; ENSG00000170516; TAA
SLKIQSILQ

SEQ ID NO: 17314 - protein, 9 aa, Homo sapiens
  misc_feature: Table A; Target 17314; HLA-C*06:02; COX7B2; ENSG00000170516; TAA
SLKIQSILQ

SEQ ID NO: 17315 - protein, 9 aa, Homo sapiens
  misc_feature: Table A; Target 17315; HLA-C*07:01; COX7B2; ENSG00000170516; TAA
SLKIQSILQ

SEQ ID NO: 17316 - protein, 11 aa, Homo sapiens
  misc_feature: Table A; Target 17316; HLA-A*02:03; COX7B2; ENSG00000170516; TAA
SLKIQSILQSM

SEQ ID NO: 17317 - protein, 11 aa, Homo sapiens
  misc_feature: Table A; Target 17317; HLA-A*31:01; COX7B2; ENSG00000170516; TAA
SLKIQSILQSM

SEQ ID NO: 17318 - protein, 11 aa, Homo sapiens
  misc_feature: Table A; Target 17318; HLA-C*06:02; COX7B2; ENSG00000170516; TAA
SLKIQSILQSM

SEQ ID NO: 17319 - protein, 9 aa, Homo sapiens
  misc_feature: Table A; Target 17319; HLA-A*03:01; COX7B2; ENSG00000170516; TAA
SMARHSHVK

SEQ ID NO: 17320 - protein, 9 aa, Homo sapiens
  misc_feature: Table A; Target 17320; HLA-A*03:02; COX7B2; ENSG00000170516; TAA
SMARHSHVK

SEQ ID NO: 17321 - protein, 8 aa, Homo sapiens
  misc_feature: Table A; Target 17321; HLA-A*01:01; COX7B2; ENSG00000170516; TAA
SPDFHDKY

SEQ ID NO: 17322 - protein, 8 aa, Homo sapiens
  misc_feature: Table A; Target 17322; HLA-B*35:01; COX7B2; ENSG00000170516; TAA
SPDFHDKY

SEQ ID NO: 17323 - protein, 8 aa, Homo sapiens
  misc_feature: Table A; Target 17323; HLA-B*55:01; COX7B2; ENSG00000170516; TAA
SPDFHDKY

SEQ ID NO: 17324 - protein, 8 aa, Homo sapiens
  misc_feature: Table A; Target 17324; HLA-C*03:03; COX7B2; ENSG00000170516; TAA
SPDFHDKY

SEQ ID NO: 17325 - protein, 8 aa, Homo sapiens
  misc_feature: Table A; Target 17325; HLA-C*04:01; COX7B2; ENSG00000170516; TAA
SPDFHDKY

SEQ ID NO: 17326 - protein, 8 aa, Homo sapiens
  misc_feature: Table A; Target 17326; HLA-C*07:01; COX7B2; ENSG00000170516; TAA
SPDFHDKY

SEQ ID NO: 17327 - protein, 8 aa, Homo sapiens
  misc_feature: Table A; Target 17327; HLA-B*07:02; COX7B2; ENSG00000170516; TAA
SPVGRVTP

SEQ ID NO: 17328 - protein, 8 aa, Homo sapiens
  misc_feature: Table A; Target 17328; HLA-B*08:01; COX7B2; ENSG00000170516; TAA
SPVGRVTP

SEQ ID NO: 17329 - protein, 8 aa, Homo sapiens
  misc_feature: Table A; Target 17329; HLA-B*56:01; COX7B2; ENSG00000170516; TAA
SPVGRVTP

SEQ ID NO: 17330 - protein, 9 aa, Homo sapiens
  misc_feature: Table A; Target 17330; HLA-A*03:01; COX7B2; ENSG00000170516; TAA
SPVGRVTPK

SEQ ID NO: 17331 - protein, 9 aa, Homo sapiens
  misc_feature: Table A; Target 17331; HLA-A*03:02; COX7B2; ENSG00000170516; TAA
SPVGRVTPK

SEQ ID NO: 17332 - protein, 9 aa, Homo sapiens
  misc_feature: Table A; Target 17332; HLA-A*11:01; COX7B2; ENSG00000170516; TAA
SPVGRVTPK

SEQ ID NO: 17333 - protein, 9 aa, Homo sapiens
  misc_feature: Table A; Target 17333; HLA-A*31:01; COX7B2; ENSG00000170516; TAA
SPVGRVTPK

SEQ ID NO: 17334 - protein, 9 aa, Homo sapiens
  misc_feature: Table A; Target 17334; HLA-A*68:01; COX7B2; ENSG00000170516; TAA
SPVGRVTPK

SEQ ID NO: 17335 - protein, 9 aa, Homo sapiens
  misc_feature: Table A; Target 17335; HLA-B*07:02; COX7B2; ENSG00000170516; TAA
SPVGRVTPK

SEQ ID NO: 17336 - protein, 9 aa, Homo sapiens
  misc_feature: Table A; Target 17336; HLA-B*08:01; COX7B2; ENSG00000170516; TAA
SPVGRVTPK

SEQ ID NO: 17337 - protein, 9 aa, Homo sapiens
  misc_feature: Table A; Target 17337; HLA-B*35:01; COX7B2; ENSG00000170516; TAA
SPVGRVTPK

SEQ ID NO: 17338 - protein, 9 aa, Homo sapiens
  misc_feature: Table A; Target 17338; HLA-B*55:01; COX7B2; ENSG00000170516; TAA
SPVGRVTPK

SEQ ID NO: 17339 - protein, 9 aa, Homo sapiens
  misc_feature: Table A; Target 17339; HLA-B*56:01; COX7B2; ENSG00000170516; TAA
SPVGRVTPK

SEQ ID NO: 17340 - protein, 9 aa, Homo sapiens
  misc_feature: Table A; Target 17340; HLA-C*04:01; COX7B2; ENSG00000170516; TAA
SPVGRVTPK

SEQ ID NO: 17341 - protein, 9 aa, Homo sapiens
  misc_feature: Table A; Target 17341; HLA-C*06:02; COX7B2; ENSG00000170516; TAA
SPVGRVTPK

SEQ ID NO: 17342 - protein, 9 aa, Homo sapiens
  misc_feature: Table A; Target 17342; HLA-C*07:02; COX7B2; ENSG00000170516; TAA
SPVGRVTPK

SEQ ID NO: 17343 - protein, 9 aa, Homo sapiens
  misc_feature: Table A; Target 17343; HLA-C*07:06; COX7B2; ENSG00000170516; TAA
SPVGRVTPK

SEQ ID NO: 17344 - protein, 9 aa, Homo sapiens
  misc_feature: Table A; Target 17344; HLA-C*16:01; COX7B2; ENSG00000170516; TAA
SPVGRVTPK

SEQ ID NO: 17345 - protein, 8 aa, Homo sapiens
  misc_feature: Table A; Target 17345; HLA-B*08:01; COX7B2; ENSG00000170516; TAA
SSLKIQSI

SEQ ID NO: 17346 - protein, 8 aa, Homo sapiens
  misc_feature: Table A; Target 17346; HLA-B*13:02; COX7B2; ENSG00000170516; TAA
SSLKIQSI

SEQ ID NO: 17347 - protein, 8 aa, Homo sapiens
  misc_feature: Table A; Target 17347; HLA-B*51:01; COX7B2; ENSG00000170516; TAA
SSLKIQSI

SEQ ID NO: 17348 - protein, 8 aa, Homo sapiens
  misc_feature: Table A; Target 17348; HLA-B*58:01; COX7B2; ENSG00000170516; TAA
SSLKIQSI

SEQ ID NO: 17349 - protein, 9 aa, Homo sapiens
  misc_feature: Table A; Target 17349; HLA-B*08:01; COX7B2; ENSG00000170516; TAA
SSLKIQSIL

SEQ ID NO: 17350 - protein, 9 aa, Homo sapiens
  misc_feature: Table A; Target 17350; HLA-B*40:02; COX7B2; ENSG00000170516; TAA
SSLKIQSIL

SEQ ID NO: 17351 - protein, 9 aa, Homo sapiens
  misc_feature: Table A; Target 17351; HLA-B*57:01; COX7B2; ENSG00000170516; TAA
SSLKIQSIL

SEQ ID NO: 17352 - protein, 9 aa, Homo sapiens
  misc_feature: Table A; Target 17352; HLA-B*58:01; COX7B2; ENSG00000170516; TAA
SSLKIQSIL

SEQ ID NO: 17353 - protein, 9 aa, Homo sapiens
  misc_feature: Table A; Target 17353; HLA-C*02:02; COX7B2; ENSG00000170516; TAA
SSLKIQSIL

SEQ ID NO: 17354 - protein, 9 aa, Homo sapiens
  misc_feature: Table A; Target 17354; HLA-C*03:04; COX7B2; ENSG00000170516; TAA
SSLKIQSIL

SEQ ID NO: 17355 - protein, 9 aa, Homo sapiens
  misc_feature: Table A; Target 17355; HLA-C*06:02; COX7B2; ENSG00000170516; TAA
SSLKIQSIL

SEQ ID NO: 17356 - protein, 9 aa, Homo sapiens
  misc_feature: Table A; Target 17356; HLA-C*07:02; COX7B2; ENSG00000170516; TAA
SSLKIQSIL

SEQ ID NO: 17357 - protein, 9 aa, Homo sapiens
  misc_feature: Table A; Target 17357; HLA-C*12:03; COX7B2; ENSG00000170516; TAA
SSLKIQSIL

SEQ ID NO: 17358 - protein, 9 aa, Homo sapiens
  misc_feature: Table A; Target 17358; HLA-C*16:01; COX7B2; ENSG00000170516; TAA
SSLKIQSIL

SEQ ID NO: 17359 - protein, 8 aa, Homo sapiens
  misc_feature: Table A; Target 17359; HLA-A*25:01; COX7B2; ENSG00000170516; TAA
TAFCVATW

SEQ ID NO: 17360 - protein, 8 aa, Homo sapiens
  misc_feature: Table A; Target 17360; HLA-B*51:01; COX7B2; ENSG00000170516; TAA
TAFCVATW

SEQ ID NO: 17361 - protein, 8 aa, Homo sapiens
  misc_feature: Table A; Target 17361; HLA-B*57:01; COX7B2; ENSG00000170516; TAA
TAFCVATW

SEQ ID NO: 17362 - protein, 8 aa, Homo sapiens
  misc_feature: Table A; Target 17362; HLA-B*58:01; COX7B2; ENSG00000170516; TAA
TAFCVATW

SEQ ID NO: 17363 - protein, 9 aa, Homo sapiens
  misc_feature: Table A; Target 17363; HLA-A*68:02; COX7B2; ENSG00000170516; TAA
TAFCVATWV

SEQ ID NO: 17364 - protein, 9 aa, Homo sapiens
  misc_feature: Table A; Target 17364; HLA-A*23:01; COX7B2; ENSG00000170516; TAA
TATQIGIEW

SEQ ID NO: 17365 - protein, 9 aa, Homo sapiens
  misc_feature: Table A; Target 17365; HLA-A*24:02; COX7B2; ENSG00000170516; TAA
TATQIGIEW

SEQ ID NO: 17366 - protein, 9 aa, Homo sapiens
  misc_feature: Table A; Target 17366; HLA-A*25:01; COX7B2; ENSG00000170516; TAA
TATQIGIEW

SEQ ID NO: 17367 - protein, 9 aa, Homo sapiens
  misc_feature: Table A; Target 17367; HLA-A*26:01; COX7B2; ENSG00000170516; TAA
TATQIGIEW

SEQ ID NO: 17368 - protein, 9 aa, Homo sapiens
  misc_feature: Table A; Target 17368; HLA-A*29:02; COX7B2; ENSG00000170516; TAA
TATQIGIEW

SEQ ID NO: 17369 - protein, 9 aa, Homo sapiens
  misc_feature: Table A; Target 17369; HLA-A*31:01; COX7B2; ENSG00000170516; TAA
TATQIGIEW

SEQ ID NO: 17370 - protein, 9 aa, Homo sapiens
  misc_feature: Table A; Target 17370; HLA-A*32:01; COX7B2; ENSG00000170516; TAA
TATQIGIEW

SEQ ID NO: 17371 - protein, 9 aa, Homo sapiens
  misc_feature: Table A; Target 17371; HLA-A*33:01; COX7B2; ENSG00000170516; TAA
TATQIGIEW

SEQ ID NO: 17372 - protein, 9 aa, Homo sapiens
  misc_feature: Table A; Target 17372; HLA-A*33:03; COX7B2; ENSG00000170516; TAA
TATQIGIEW

SEQ ID NO: 17373 - protein, 9 aa, Homo sapiens
  misc_feature: Table A; Target 17373; HLA-A*68:01; COX7B2; ENSG00000170516; TAA
TATQIGIEW

SEQ ID NO: 17374 - protein, 9 aa, Homo sapiens
  misc_feature: Table A; Target 17374; HLA-A*68:02; COX7B2; ENSG00000170516; TAA
TATQIGIEW

SEQ ID NO: 17375 - protein, 9 aa, Homo sapiens
  misc_feature: Table A; Target 17375; HLA-B*27:02; COX7B2; ENSG00000170516; TAA
TATQIGIEW

SEQ ID NO: 17376 - protein, 9 aa, Homo sapiens
  misc_feature: Table A; Target 17376; HLA-B*27:05; COX7B2; ENSG00000170516; TAA
TATQIGIEW

SEQ ID NO: 17377 - protein, 9 aa, Homo sapiens
  misc_feature: Table A; Target 17377; HLA-B*35:03; COX7B2; ENSG00000170516; TAA
TATQIGIEW

SEQ ID NO: 17378 - protein, 9 aa, Homo sapiens
  misc_feature: Table A; Target 17378; HLA-B*38:01; COX7B2; ENSG00000170516; TAA
TATQIGIEW

SEQ ID NO: 17379 - protein, 9 aa, Homo sapiens
  misc_feature: Table A; Target 17379; HLA-B*39:01; COX7B2; ENSG00000170516; TAA
TATQIGIEW

SEQ ID NO: 17380 - protein, 9 aa, Homo sapiens
  misc_feature: Table A; Target 17380; HLA-B*44:02; COX7B2; ENSG00000170516; TAA
TATQIGIEW

SEQ ID NO: 17381 - protein, 9 aa, Homo sapiens
  misc_feature: Table A; Target 17381; HLA-B*44:03; COX7B2; ENSG00000170516; TAA
TATQIGIEW

SEQ ID NO: 17382 - protein, 9 aa, Homo sapiens
  misc_feature: Table A; Target 17382; HLA-B*46:01; COX7B2; ENSG00000170516; TAA
TATQIGIEW

SEQ ID NO: 17383 - protein, 9 aa, Homo sapiens
  misc_feature: Table A; Target 17383; HLA-B*54:01; COX7B2; ENSG00000170516; TAA
TATQIGIEW

SEQ ID NO: 17384 - protein, 9 aa, Homo sapiens
  misc_feature: Table A; Target 17384; HLA-B*55:01; COX7B2; ENSG00000170516; TAA
TATQIGIEW

SEQ ID NO: 17385 - protein, 9 aa, Homo sapiens
  misc_feature: Table A; Target 17385; HLA-B*58:01; COX7B2; ENSG00000170516; TAA
TATQIGIEW

SEQ ID NO: 17386 - protein, 9 aa, Homo sapiens
  misc_feature: Table A; Target 17386; HLA-C*02:02; COX7B2; ENSG00000170516; TAA
TATQIGIEW

SEQ ID NO: 17387 - protein, 9 aa, Homo sapiens
  misc_feature: Table A; Target 17387; HLA-C*03:03; COX7B2; ENSG00000170516; TAA
TATQIGIEW

SEQ ID NO: 17388 - protein, 9 aa, Homo sapiens
  misc_feature: Table A; Target 17388; HLA-C*03:04; COX7B2; ENSG00000170516; TAA
TATQIGIEW

SEQ ID NO: 17389 - protein, 9 aa, Homo sapiens
  misc_feature: Table A; Target 17389; HLA-C*04:01; COX7B2; ENSG00000170516; TAA
TATQIGIEW

SEQ ID NO: 17390 - protein, 9 aa, Homo sapiens
  misc_feature: Table A; Target 17390; HLA-C*07:04; COX7B2; ENSG00000170516; TAA
TATQIGIEW

SEQ ID NO: 17391 - protein, 9 aa, Homo sapiens
  misc_feature: Table A; Target 17391; HLA-C*07:06; COX7B2; ENSG00000170516; TAA
TATQIGIEW

SEQ ID NO: 17392 - protein, 9 aa, Homo sapiens
  misc_feature: Table A; Target 17392; HLA-C*12:03; COX7B2; ENSG00000170516; TAA
TATQIGIEW

SEQ ID NO: 17393 - protein, 9 aa, Homo sapiens
  misc_feature: Table A; Target 17393; HLA-C*16:01; COX7B2; ENSG00000170516; TAA
TATQIGIEW

SEQ ID NO: 17394 - protein, 9 aa, Homo sapiens
  misc_feature: Table A; Target 17394; HLA-C*16:02; COX7B2; ENSG00000170516; TAA
TATQIGIEW

SEQ ID NO: 17395 - protein, 9 aa, Homo sapiens
  misc_feature: Table A; Target 17395; HLA-C*16:04; COX7B2; ENSG00000170516; TAA
TATQIGIEW

SEQ ID NO: 17396 - protein, 9 aa, Homo sapiens
  misc_feature: Table A; Target 17396; HLA-A*02:01; COX7B2; ENSG00000170516; TAA
TQIGIEWNL

SEQ ID NO: 17397 - protein, 9 aa, Homo sapiens
  misc_feature: Table A; Target 17397; HLA-A*02:04; COX7B2; ENSG00000170516; TAA
TQIGIEWNL

SEQ ID NO: 17398 - protein, 9 aa, Homo sapiens
  misc_feature: Table A; Target 17398; HLA-A*02:07; COX7B2; ENSG00000170516; TAA
TQIGIEWNL

SEQ ID NO: 17399 - protein, 9 aa, Homo sapiens
  misc_feature: Table A; Target 17399; HLA-A*23:01; COX7B2; ENSG00000170516; TAA
TQIGIEWNL

SEQ ID NO: 17400 - protein, 9 aa, Homo sapiens
  misc_feature: Table A; Target 17400; HLA-A*24:02; COX7B2; ENSG00000170516; TAA
TQIGIEWNL

SEQ ID NO: 17401 - protein, 9 aa, Homo sapiens
  misc_feature: Table A; Target 17401; HLA-A*30:01; COX7B2; ENSG00000170516; TAA
TQIGIEWNL

SEQ ID NO: 17402 - protein, 9 aa, Homo sapiens
  misc_feature: Table A; Target 17402; HLA-A*31:01; COX7B2; ENSG00000170516; TAA
TQIGIEWNL

SEQ ID NO: 17403 - protein, 9 aa, Homo sapiens
  misc_feature: Table A; Target 17403; HLA-A*68:02; COX7B2; ENSG00000170516; TAA
TQIGIEWNL

SEQ ID NO: 17404 - protein, 9 aa, Homo sapiens
  misc_feature: Table A; Target 17404; HLA-B*27:05; COX7B2; ENSG00000170516; TAA
TQIGIEWNL

SEQ ID NO: 17405 - protein, 9 aa, Homo sapiens
  misc_feature: Table A; Target 17405; HLA-B*35:03; COX7B2; ENSG00000170516; TAA
TQIGIEWNL

SEQ ID NO: 17406 - protein, 9 aa, Homo sapiens
  misc_feature: Table A; Target 17406; HLA-B*39:01; COX7B2; ENSG00000170516; TAA
TQIGIEWNL

SEQ ID NO: 17407 - protein, 9 aa, Homo sapiens
  misc_feature: Table A; Target 17407; HLA-B*40:02; COX7B2; ENSG00000170516; TAA
TQIGIEWNL

SEQ ID NO: 17408 - protein, 9 aa, Homo sapiens
  misc_feature: Table A; Target 17408; HLA-C*06:02; COX7B2; ENSG00000170516; TAA
TQIGIEWNL

SEQ ID NO: 17409 - protein, 9 aa, Homo sapiens
  misc_feature: Table A; Target 17409; HLA-A*23:01; COX7B2; ENSG00000170516; TAA
TWVFTATQI

SEQ ID NO: 17410 - protein, 9 aa, Homo sapiens
  misc_feature: Table A; Target 17410; HLA-A*24:02; COX7B2; ENSG00000170516; TAA
TWVFTATQI

SEQ ID NO: 17411 - protein, 9 aa, Homo sapiens
  misc_feature: Table A; Target 17411; HLA-C*04:01; COX7B2; ENSG00000170516; TAA
TWVFTATQI

SEQ ID NO: 17412 - protein, 9 aa, Homo sapiens
  misc_feature: Table A; Target 17412; HLA-C*06:02; COX7B2; ENSG00000170516; TAA
TWVFTATQI

SEQ ID NO: 17413 - protein, 8 aa, Homo sapiens
  misc_feature: Table A; Target 17413; HLA-B*54:01; COX7B2; ENSG00000170516; TAA
VATWVFTA

SEQ ID NO: 17414 - protein, 8 aa, Homo sapiens
  misc_feature: Table A; Target 17414; HLA-B*56:01; COX7B2; ENSG00000170516; TAA
VATWVFTA

SEQ ID NO: 17415 - protein, 9 aa, Homo sapiens
  misc_feature: Table A; Target 17415; HLA-B*54:01; COX7B2; ENSG00000170516; TAA
VATWVFTAT

SEQ ID NO: 17416 - protein, 9 aa, Homo sapiens
  misc_feature: Table A; Target 17416; HLA-A*23:01; COX7B2; ENSG00000170516; TAA
VFTATQIGI

SEQ ID NO: 17417 - protein, 9 aa, Homo sapiens
  misc_feature: Table A; Target 17417; HLA-A*24:02; COX7B2; ENSG00000170516; TAA
VFTATQIGI

SEQ ID NO: 17418 - protein, 9 aa, Homo sapiens
  misc_feature: Table A; Target 17418; HLA-A*30:01; COX7B2; ENSG00000170516; TAA
VFTATQIGI

SEQ ID NO: 17419 - protein, 9 aa, Homo sapiens
  misc_feature: Table A; Target 17419; HLA-B*13:02; COX7B2; ENSG00000170516; TAA
VFTATQIGI

SEQ ID NO: 17420 - protein, 9 aa, Homo sapiens
  misc_feature: Table A; Target 17420; HLA-C*04:01; COX7B2; ENSG00000170516; TAA
VFTATQIGI

SEQ ID NO: 17421 - protein, 9 aa, Homo sapiens
  misc_feature: Table A; Target 17421; HLA-C*07:01; COX7B2; ENSG00000170516; TAA
VFTATQIGI

SEQ ID NO: 17422 - protein, 9 aa, Homo sapiens
  misc_feature: Table A; Target 17422; HLA-C*14:02; COX7B2; ENSG00000170516; TAA
VFTATQIGI

SEQ ID NO: 17423 - protein, 11 aa, Homo sapiens
  misc_feature: Table A; Target 17423; HLA-A*23:01; COX7B2; ENSG00000170516; TAA
VFTATQIGIEW

SEQ ID NO: 17424 - protein, 11 aa, Homo sapiens
  misc_feature: Table A; Target 17424; HLA-A*24:02; COX7B2; ENSG00000170516; TAA
VFTATQIGIEW

SEQ ID NO: 17425 - protein, 9 aa, Homo sapiens
  misc_feature: Table A; Target 17425; HLA-B*57:01; COX7B2; ENSG00000170516; TAA
VGRVTPKEW

SEQ ID NO: 17426 - protein, 8 aa, Homo sapiens
  misc_feature: Table A; Target 17426; HLA-A*23:01; COX7B2; ENSG00000170516; TAA
VLASGTAF

SEQ ID NO: 17427 - protein, 8 aa, Homo sapiens
  misc_feature: Table A; Target 17427; HLA-A*32:01; COX7B2; ENSG00000170516; TAA
VLASGTAF

SEQ ID NO: 17428 - protein, 8 aa, Homo sapiens
  misc_feature: Table A; Target 17428; HLA-B*07:02; COX7B2; ENSG00000170516; TAA
VLASGTAF

SEQ ID NO: 17429 - protein, 8 aa, Homo sapiens
  misc_feature: Table A; Target 17429; HLA-B*08:01; COX7B2; ENSG00000170516; TAA
VLASGTAF

SEQ ID NO: 17430 - protein, 8 aa, Homo sapiens
  misc_feature: Table A; Target 17430; HLA-B*15:01; COX7B2; ENSG00000170516; TAA
VLASGTAF

SEQ ID NO: 17431 - protein, 8 aa, Homo sapiens
  misc_feature: Table A; Target 17431; HLA-B*15:03; COX7B2; ENSG00000170516; TAA
VLASGTAF

SEQ ID NO: 17432 - protein, 8 aa, Homo sapiens
  misc_feature: Table A; Target 17432; HLA-B*37:01; COX7B2; ENSG00000170516; TAA
VLASGTAF

SEQ ID NO: 17433 - protein, 8 aa, Homo sapiens
  misc_feature: Table A; Target 17433; HLA-B*39:01; COX7B2; ENSG00000170516; TAA
VLASGTAF

SEQ ID NO: 17434 - protein, 8 aa, Homo sapiens
  misc_feature: Table A; Target 17434; HLA-B*46:01; COX7B2; ENSG00000170516; TAA
VLASGTAF

SEQ ID NO: 17435 - protein, 8 aa, Homo sapiens
  misc_feature: Table A; Target 17435; HLA-C*01:02; COX7B2; ENSG00000170516; TAA
VLASGTAF

SEQ ID NO: 17436 - protein, 8 aa, Homo sapiens
  misc_feature: Table A; Target 17436; HLA-C*02:02; COX7B2; ENSG00000170516; TAA
VLASGTAF

SEQ ID NO: 17437 - protein, 8 aa, Homo sapiens
  misc_feature: Table A; Target 17437; HLA-C*03:03; COX7B2; ENSG00000170516; TAA
VLASGTAF

SEQ ID NO: 17438 - protein, 8 aa, Homo sapiens
  misc_feature: Table A; Target 17438; HLA-C*03:04; COX7B2; ENSG00000170516; TAA
VLASGTAF

SEQ ID NO: 17439 - protein, 8 aa, Homo sapiens
  misc_feature: Table A; Target 17439; HLA-C*04:01; COX7B2; ENSG00000170516; TAA
VLASGTAF

SEQ ID NO: 17440 - protein, 8 aa, Homo sapiens
  misc_feature: Table A; Target 17440; HLA-C*05:01; COX7B2; ENSG00000170516; TAA
VLASGTAF

SEQ ID NO: 17441 - protein, 8 aa, Homo sapiens
  misc_feature: Table A; Target 17441; HLA-C*07:04; COX7B2; ENSG00000170516; TAA
VLASGTAF

SEQ ID NO: 17442 - protein, 8 aa, Homo sapiens
  misc_feature: Table A; Target 17442; HLA-C*14:02; COX7B2; ENSG00000170516; TAA
VLASGTAF

SEQ ID NO: 17443 - protein, 8 aa, Homo sapiens
  misc_feature: Table A; Target 17443; HLA-C*16:01; COX7B2; ENSG00000170516; TAA
VLASGTAF

SEQ ID NO: 17444 - protein, 9 aa, Homo sapiens
  misc_feature: Table A; Target 17444; HLA-A*02:01; COX7B2; ENSG00000170516; TAA
VLASGTAFC

SEQ ID NO: 17445 - protein, 9 aa, Homo sapiens
  misc_feature: Table A; Target 17445; HLA-A*02:03; COX7B2; ENSG00000170516; TAA
VLASGTAFC

SEQ ID NO: 17446 - protein, 10 aa, Homo sapiens
  misc_feature: Table A; Target 17446; HLA-A*02:01; COX7B2; ENSG00000170516; TAA
VLASGTAFCV

SEQ ID NO: 17447 - protein, 10 aa, Homo sapiens
  misc_feature: Table A; Target 17447; HLA-A*02:03; COX7B2; ENSG00000170516; TAA
VLASGTAFCV

SEQ ID NO: 17448 - protein, 10 aa, Homo sapiens
  misc_feature: Table A; Target 17448; HLA-A*02:04; COX7B2; ENSG00000170516; TAA
VLASGTAFCV

SEQ ID NO: 17449 - protein, 10 aa, Homo sapiens
  misc_feature: Table A; Target 17449; HLA-B*13:02; COX7B2; ENSG00000170516; TAA
VLASGTAFCV

SEQ ID NO: 17450 - protein, 10 aa, Homo sapiens
  misc_feature: Table A; Target 17450; HLA-B*55:01; COX7B2; ENSG00000170516; TAA
VLASGTAFCV

SEQ ID NO: 17451 - protein, 10 aa, Homo sapiens
  misc_feature: Table A; Target 17451; HLA-C*06:02; COX7B2; ENSG00000170516; TAA
VLASGTAFCV

SEQ ID NO: 17452 - protein, 11 aa, Homo sapiens
  misc_feature: Table A; Target 17452; HLA-A*02:01; COX7B2; ENSG00000170516; TAA
VLASGTAFCVA

SEQ ID NO: 17453 - protein, 11 aa, Homo sapiens
  misc_feature: Table A; Target 17453; HLA-A*02:03; COX7B2; ENSG00000170516; TAA
VLASGTAFCVA

SEQ ID NO: 17454 - protein, 11 aa, Homo sapiens
  misc_feature: Table A; Target 17454; HLA-C*06:02; COX7B2; ENSG00000170516; TAA
VLASGTAFCVA

SEQ ID NO: 17455 - protein, 8 aa, Homo sapiens
  misc_feature: Table A; Target 17455; HLA-A*33:03; COX7B2; ENSG00000170516; TAA
WNLSPVGR

SEQ ID NO: 17456 - protein, 8 aa, Homo sapiens
  misc_feature: Table A; Target 17456; HLA-B*51:01; COX7B2; ENSG00000170516; TAA
WVFTATQI

SEQ ID NO: 17457 - protein, 9 aa, Homo sapiens
  misc_feature: Table A; Target 17457; HLA-B*27:05; COX7B2; ENSG00000170516; TAA
YGNAVLASG

SEQ ID NO: 17458 - protein, 9 aa, Homo sapiens
  misc_feature: Table A; Target 17458; HLA-B*46:01; COX7B2; ENSG00000170516; TAA
YGNAVLASG

SEQ ID NO: 17459 - protein, 9 aa, Homo sapiens
  misc_feature: Table A; Target 17459; HLA-B*54:01; COX7B2; ENSG00000170516; TAA
YGNAVLASG

SEQ ID NO: 17460 - protein, 9 aa, Homo sapiens
  misc_feature: Table A; Target 17460; HLA-B*56:01; COX7B2; ENSG00000170516; TAA
YGNAVLASG

SEQ ID NO: 17461 - protein, 9 aa, Homo sapiens
  misc_feature: Table A; Target 17461; HLA-C*07:02; COX7B2; ENSG00000170516; TAA
YGNAVLASG

SEQ ID NO: 17462 - protein, 9 aa, Homo sapiens
  misc_feature: Table A; Target 17462; HLA-C*14:02; COX7B2; ENSG00000170516; TAA
YGNAVLASG

SEQ ID NO: 17463 - protein, 10 aa, Homo sapiens
  misc_feature: Table A; Target 17463; HLA-C*06:02; COX7B2; ENSG00000170516; TAA
YGNAVLASGT

SEQ ID NO: 17464 - protein, 8 aa, Homo sapiens
  misc_feature: Table A; Target 17464; HLA-B*08:01; CRYGC; ENSG00000163254; CTA
AGSLRRVV

SEQ ID NO: 17465 - protein, 8 aa, Homo sapiens
  misc_feature: Table A; Target 17465; HLA-C*16:01; CRYGC; ENSG00000163254; CTA
AGSLRRVV

SEQ ID NO: 17466 - protein, 11 aa, Homo sapiens
  misc_feature: Table A; Target 17466; HLA-A*30:02; CRYGC; ENSG00000163254; CTA
AGSLRRVVDLY

SEQ ID NO: 17467 - protein, 11 aa, Homo sapiens
  misc_feature: Table A; Target 17467; HLA-C*07:01; CRYGC; ENSG00000163254; CTA
AGSLRRVVDLY

SEQ ID NO: 17468 - protein, 9 aa, Homo sapiens
  misc_feature: Table A; Target 17468; HLA-A*02:01; CRYGC; ENSG00000163254; CTA
AMDAKAGSL

SEQ ID NO: 17469 - protein, 9 aa, Homo sapiens
  misc_feature: Table A; Target 17469; HLA-A*02:03; CRYGC; ENSG00000163254; CTA
AMDAKAGSL

SEQ ID NO: 17470 - protein, 9 aa, Homo sapiens
  misc_feature: Table A; Target 17470; HLA-A*02:07; CRYGC; ENSG00000163254; CTA
AMDAKAGSL

SEQ ID NO: 17471 - protein, 9 aa, Homo sapiens
  misc_feature: Table A; Target 17471; HLA-A*03:01; CRYGC; ENSG00000163254; CTA
AMDAKAGSL

SEQ ID NO: 17472 - protein, 9 aa, Homo sapiens
  misc_feature: Table A; Target 17472; HLA-A*03:02; CRYGC; ENSG00000163254; CTA
AMDAKAGSL

SEQ ID NO: 17473 - protein, 9 aa, Homo sapiens
  misc_feature: Table A; Target 17473; HLA-B*07:02; CRYGC; ENSG00000163254; CTA
AMDAKAGSL

SEQ ID NO: 17474 - protein, 9 aa, Homo sapiens
  misc_feature: Table A; Target 17474; HLA-B*08:01; CRYGC; ENSG00000163254; CTA
AMDAKAGSL

SEQ ID NO: 17475 - protein, 9 aa, Homo sapiens
  misc_feature: Table A; Target 17475; HLA-B*37:01; CRYGC; ENSG00000163254; CTA
AMDAKAGSL

SEQ ID NO: 17476 - protein, 9 aa, Homo sapiens
  misc_feature: Table A; Target 17476; HLA-B*38:01; CRYGC; ENSG00000163254; CTA
AMDAKAGSL

SEQ ID NO: 17477 - protein, 9 aa, Homo sapiens
  misc_feature: Table A; Target 17477; HLA-B*40:01; CRYGC; ENSG00000163254; CTA
AMDAKAGSL

SEQ ID NO: 17478 - protein, 9 aa, Homo sapiens
  misc_feature: Table A; Target 17478; HLA-B*55:01; CRYGC; ENSG00000163254; CTA
AMDAKAGSL

SEQ ID NO: 17479 - protein, 9 aa, Homo sapiens
  misc_feature: Table A; Target 17479; HLA-C*01:02; CRYGC; ENSG00000163254; CTA
AMDAKAGSL

SEQ ID NO: 17480 - protein, 9 aa, Homo sapiens
  misc_feature: Table A; Target 17480; HLA-C*03:04; CRYGC; ENSG00000163254; CTA
AMDAKAGSL

SEQ ID NO: 17481 - protein, 9 aa, Homo sapiens
  misc_feature: Table A; Target 17481; HLA-C*04:01; CRYGC; ENSG00000163254; CTA
AMDAKAGSL

SEQ ID NO: 17482 - protein, 9 aa, Homo sapiens
  misc_feature: Table A; Target 17482; HLA-C*05:01; CRYGC; ENSG00000163254; CTA
AMDAKAGSL

SEQ ID NO: 17483 - protein, 9 aa, Homo sapiens
  misc_feature: Table A; Target 17483; HLA-C*07:02; CRYGC; ENSG00000163254; CTA
AMDAKAGSL

SEQ ID NO: 17484 - protein, 9 aa, Homo sapiens
  misc_feature: Table A; Target 17484; HLA-C*14:02; CRYGC; ENSG00000163254; CTA
AMDAKAGSL

SEQ ID NO: 17485 - protein, 10 aa, Homo sapiens
  misc_feature: Table A; Target 17485; HLA-A*03:01; CRYGC; ENSG00000163254; CTA
AMDAKAGSLR

SEQ ID NO: 17486 - protein, 10 aa, Homo sapiens
  misc_feature: Table A; Target 17486; HLA-A*31:01; CRYGC; ENSG00000163254; CTA
AMDAKAGSLR

SEQ ID NO: 17487 - protein, 9 aa, Homo sapiens
  misc_feature: Table A; Target 17487; HLA-A*03:01; CRYGC; ENSG00000163254; CTA
CLIPQTVSH

SEQ ID NO: 17488 - protein, 9 aa, Homo sapiens
  misc_feature: Table A; Target 17488; HLA-A*03:02; CRYGC; ENSG00000163254; CTA
CLIPQTVSH

SEQ ID NO: 17489 - protein, 9 aa, Homo sapiens
  misc_feature: Table A; Target 17489; HLA-A*32:01; CRYGC; ENSG00000163254; CTA
CLIPQTVSH

SEQ ID NO: 17490 - protein, 9 aa, Homo sapiens
  misc_feature: Table A; Target 17490; HLA-B*15:01; CRYGC; ENSG00000163254; CTA
CLIPQTVSH

SEQ ID NO: 17491 - protein, 9 aa, Homo sapiens
  misc_feature: Table A; Target 17491; HLA-B*15:03; CRYGC; ENSG00000163254; CTA
CLIPQTVSH

SEQ ID NO: 17492 - protein, 9 aa, Homo sapiens
  misc_feature: Table A; Target 17492; HLA-B*46:01; CRYGC; ENSG00000163254; CTA
CLIPQTVSH

SEQ ID NO: 17493 - protein, 9 aa, Homo sapiens
  misc_feature: Table A; Target 17493; HLA-C*01:02; CRYGC; ENSG00000163254; CTA
CLIPQTVSH

SEQ ID NO: 17494 - protein, 9 aa, Homo sapiens
  misc_feature: Table A; Target 17494; HLA-C*14:02; CRYGC; ENSG00000163254; CTA
CLIPQTVSH

SEQ ID NO: 17495 - protein, 10 aa, Homo sapiens
  misc_feature: Table A; Target 17495; HLA-A*31:01; CRYGC; ENSG00000163254; CTA
CLIPQTVSHR

SEQ ID NO: 17496 - protein, 11 aa, Homo sapiens
  misc_feature: Table A; Target 17496; HLA-A*02:01; CRYGC; ENSG00000163254; CTA
CLIPQTVSHRL

SEQ ID NO: 17497 - protein, 11 aa, Homo sapiens
  misc_feature: Table A; Target 17497; HLA-A*02:04; CRYGC; ENSG00000163254; CTA
CLIPQTVSHRL

SEQ ID NO: 17498 - protein, 8 aa, Homo sapiens
  misc_feature: Table A; Target 17498; HLA-A*33:01; CRYGC; ENSG00000163254; CTA
DAKAGSLR

SEQ ID NO: 17499 - protein, 8 aa, Homo sapiens
  misc_feature: Table A; Target 17499; HLA-A*33:03; CRYGC; ENSG00000163254; CTA
DAKAGSLR

SEQ ID NO: 17500 - protein, 8 aa, Homo sapiens
  misc_feature: Table A; Target 17500; HLA-A*68:01; CRYGC; ENSG00000163254; CTA
DAKAGSLR

SEQ ID NO: 17501 - protein, 8 aa, Homo sapiens
  misc_feature: Table A; Target 17501; HLA-C*07:06; CRYGC; ENSG00000163254; CTA
DAKAGSLR

SEQ ID NO: 17502 - protein, 9 aa, Homo sapiens
  misc_feature: Table A; Target 17502; HLA-A*33:01; CRYGC; ENSG00000163254; CTA
DAKAGSLRR

SEQ ID NO: 17503 - protein, 9 aa, Homo sapiens
  misc_feature: Table A; Target 17503; HLA-A*33:03; CRYGC; ENSG00000163254; CTA
DAKAGSLRR

SEQ ID NO: 17504 - protein, 9 aa, Homo sapiens
  misc_feature: Table A; Target 17504; HLA-A*68:01; CRYGC; ENSG00000163254; CTA
DAKAGSLRR

SEQ ID NO: 17505 - protein, 9 aa, Homo sapiens
  misc_feature: Table A; Target 17505; HLA-A*26:01; CRYGC; ENSG00000163254; CTA
DCPNLQPYF

SEQ ID NO: 17506 - protein, 9 aa, Homo sapiens
  misc_feature: Table A; Target 17506; HLA-A*33:01; CRYGC; ENSG00000163254; CTA
DCPNLQPYF

SEQ ID NO: 17507 - protein, 9 aa, Homo sapiens
  misc_feature: Table A; Target 17507; HLA-C*07:01; CRYGC; ENSG00000163254; CTA
DCPNLQPYF

SEQ ID NO: 17508 - protein, 11 aa, Homo sapiens
  misc_feature: Table A; Target 17508; HLA-A*33:01; CRYGC; ENSG00000163254; CTA
DCPNLQPYFSR

SEQ ID NO: 17509 - protein, 9 aa, Homo sapiens
  misc_feature: Table A; Target 17509; HLA-C*07:01; CRYGC; ENSG00000163254; CTA
DRAFQGRSY

SEQ ID NO: 17510 - protein, 9 aa, Homo sapiens
  misc_feature: Table A; Target 17510; HLA-A*33:01; CRYGC; ENSG00000163254; CTA
EDCPSIQDR

SEQ ID NO: 17511 - protein, 9 aa, Homo sapiens
  misc_feature: Table A; Target 17511; HLA-A*33:03; CRYGC; ENSG00000163254; CTA
EDCPSIQDR

SEQ ID NO: 17512 - protein, 8 aa, Homo sapiens
  misc_feature: Table A; Target 17512; HLA-B*37:01; CRYGC; ENSG00000163254; CTA
EDHKGLMM

SEQ ID NO: 17513 - protein, 8 aa, Homo sapiens
  misc_feature: Table A; Target 17513; HLA-A*33:01; CRYGC; ENSG00000163254; CTA
EDRAFQGR

SEQ ID NO: 17514 - protein, 8 aa, Homo sapiens
  misc_feature: Table A; Target 17514; HLA-A*33:03; CRYGC; ENSG00000163254; CTA
EDRAFQGR

SEQ ID NO: 17515 - protein, 10 aa, Homo sapiens
  misc_feature: Table A; Target 17515; HLA-A*25:01; CRYGC; ENSG00000163254; CTA
EDRAFQGRSY

SEQ ID NO: 17516 - protein, 10 aa, Homo sapiens
  misc_feature: Table A; Target 17516; HLA-B*44:02; CRYGC; ENSG00000163254; CTA
EDRAFQGRSY

SEQ ID NO: 17517 - protein, 8 aa, Homo sapiens
  misc_feature: Table A; Target 17517; HLA-B*08:01; CRYGC; ENSG00000163254; CTA
EIRSLHVL

SEQ ID NO: 17518 - protein, 10 aa, Homo sapiens
  misc_feature: Table A; Target 17518; HLA-A*26:01; CRYGC; ENSG00000163254; CTA
ELPNYRGRQY

SEQ ID NO: 17519 - protein, 9 aa, Homo sapiens
  misc_feature: Table A; Target 17519; HLA-A*26:01; CRYGC; ENSG00000163254; CTA
ELSEDCPSI

SEQ ID NO: 17520 - protein, 9 aa, Homo sapiens
  misc_feature: Table A; Target 17520; HLA-B*38:01; CRYGC; ENSG00000163254; CTA
ELSEDCPSI

SEQ ID NO: 17521 - protein, 9 aa, Homo sapiens
  misc_feature: Table A; Target 17521; HLA-B*39:01; CRYGC; ENSG00000163254; CTA
ELSEDCPSI

SEQ ID NO: 17522 - protein, 10 aa, Homo sapiens
  misc_feature: Table A; Target 17522; HLA-B*07:02; CRYGC; ENSG00000163254; CTA
ERPNYQGQQY

SEQ ID NO: 17523 - protein, 10 aa, Homo sapiens
  misc_feature: Table A; Target 17523; HLA-B*27:02; CRYGC; ENSG00000163254; CTA
ERPNYQGQQY

SEQ ID NO: 17524 - protein, 10 aa, Homo sapiens
  misc_feature: Table A; Target 17524; HLA-B*27:05; CRYGC; ENSG00000163254; CTA
ERPNYQGQQY

SEQ ID NO: 17525 - protein, 10 aa, Homo sapiens
  misc_feature: Table A; Target 17525; HLA-C*07:01; CRYGC; ENSG00000163254; CTA
ERPNYQGQQY

SEQ ID NO: 17526 - protein, 10 aa, Homo sapiens
  misc_feature: Table A; Target 17526; HLA-C*16:04; CRYGC; ENSG00000163254; CTA
ERPNYQGQQY

SEQ ID NO: 17527 - protein, 9 aa, Homo sapiens
  misc_feature: Table A; Target 17527; HLA-A*25:01; CRYGC; ENSG00000163254; CTA
ETTTDCPNL

SEQ ID NO: 17528 - protein, 9 aa, Homo sapiens
  misc_feature: Table A; Target 17528; HLA-A*26:01; CRYGC; ENSG00000163254; CTA
ETTTDCPNL

SEQ ID NO: 17529 - protein, 9 aa, Homo sapiens
  misc_feature: Table A; Target 17529; HLA-C*06:02; CRYGC; ENSG00000163254; CTA
ETTTDCPNL

SEQ ID NO: 17530 - protein, 8 aa, Homo sapiens
  misc_feature: Table A; Target 17530; HLA-A*33:03; CRYGC; ENSG00000163254; CTA
EYPDYQQW

SEQ ID NO: 17531 - protein, 11 aa, Homo sapiens
  misc_feature: Table A; Target 17531; HLA-A*24:02; CRYGC; ENSG00000163254; CTA
EYPDYQQWMGL

SEQ ID NO: 17532 - protein, 9 aa, Homo sapiens
  misc_feature: Table A; Target 17532; HLA-A*02:04; CRYGC; ENSG00000163254; CTA
FHLSEIRSL

SEQ ID NO: 17533 - protein, 9 aa, Homo sapiens
  misc_feature: Table A; Target 17533; HLA-B*38:01; CRYGC; ENSG00000163254; CTA
FHLSEIRSL

SEQ ID NO: 17534 - protein, 9 aa, Homo sapiens
  misc_feature: Table A; Target 17534; HLA-C*12:03; CRYGC; ENSG00000163254; CTA
FHLSEIRSL

SEQ ID NO: 17535 - protein, 8 aa, Homo sapiens
  misc_feature: Table A; Target 17535; HLA-C*07:04; CRYGC; ENSG00000163254; CTA
FQGRSYET

SEQ ID NO: 17536 - protein, 10 aa, Homo sapiens
  misc_feature: Table A; Target 17536; HLA-A*31:01; CRYGC; ENSG00000163254; CTA
FYEDRAFQGR

SEQ ID NO: 17537 - protein, 10 aa, Homo sapiens
  misc_feature: Table A; Target 17537; HLA-A*33:01; CRYGC; ENSG00000163254; CTA
FYEDRAFQGR

SEQ ID NO: 17538 - protein, 10 aa, Homo sapiens
  misc_feature: Table A; Target 17538; HLA-A*33:03; CRYGC; ENSG00000163254; CTA
FYEDRAFQGR

SEQ ID NO: 17539 - protein, 9 aa, Homo sapiens
  misc_feature: Table A; Target 17539; HLA-B*27:05; CRYGC; ENSG00000163254; CTA
GAMDAKAGS

SEQ ID NO: 17540 - protein, 10 aa, Homo sapiens
  misc_feature: Table A; Target 17540; HLA-A*02:03; CRYGC; ENSG00000163254; CTA
GAMDAKAGSL

SEQ ID NO: 17541 - protein, 10 aa, Homo sapiens
  misc_feature: Table A; Target 17541; HLA-A*03:01; CRYGC; ENSG00000163254; CTA
GAMDAKAGSL

SEQ ID NO: 17542 - protein, 10 aa, Homo sapiens
  misc_feature: Table A; Target 17542; HLA-A*25:01; CRYGC; ENSG00000163254; CTA
GAMDAKAGSL

SEQ ID NO: 17543 - protein, 10 aa, Homo sapiens
  misc_feature: Table A; Target 17543; HLA-A*26:01; CRYGC; ENSG00000163254; CTA
GAMDAKAGSL

SEQ ID NO: 17544 - protein, 10 aa, Homo sapiens
  misc_feature: Table A; Target 17544; HLA-A*30:01; CRYGC; ENSG00000163254; CTA
GAMDAKAGSL

SEQ ID NO: 17545 - protein, 10 aa, Homo sapiens
  misc_feature: Table A; Target 17545; HLA-B*07:02; CRYGC; ENSG00000163254; CTA
GAMDAKAGSL

SEQ ID NO: 17546 - protein, 10 aa, Homo sapiens
  misc_feature: Table A; Target 17546; HLA-B*08:01; CRYGC; ENSG00000163254; CTA
GAMDAKAGSL

SEQ ID NO: 17547 - protein, 10 aa, Homo sapiens
  misc_feature: Table A; Target 17547; HLA-B*15:01; CRYGC; ENSG00000163254; CTA
GAMDAKAGSL

SEQ ID NO: 17548 - protein, 10 aa, Homo sapiens
  misc_feature: Table A; Target 17548; HLA-B*15:03; CRYGC; ENSG00000163254; CTA
GAMDAKAGSL

SEQ ID NO: 17549 - protein, 10 aa, Homo sapiens
  misc_feature: Table A; Target 17549; HLA-B*27:05; CRYGC; ENSG00000163254; CTA
GAMDAKAGSL

SEQ ID NO: 17550 - protein, 10 aa, Homo sapiens
  misc_feature: Table A; Target 17550; HLA-B*39:01; CRYGC; ENSG00000163254; CTA
GAMDAKAGSL

SEQ ID NO: 17551 - protein, 10 aa, Homo sapiens
  misc_feature: Table A; Target 17551; HLA-B*40:01; CRYGC; ENSG00000163254; CTA
GAMDAKAGSL

SEQ ID NO: 17552 - protein, 10 aa, Homo sapiens
  misc_feature: Table A; Target 17552; HLA-B*40:02; CRYGC; ENSG00000163254; CTA
GAMDAKAGSL

SEQ ID NO: 17553 - protein, 10 aa, Homo sapiens
  misc_feature: Table A; Target 17553; HLA-B*46:01; CRYGC; ENSG00000163254; CTA
GAMDAKAGSL

SEQ ID NO: 17554 - protein, 10 aa, Homo sapiens
  misc_feature: Table A; Target 17554; HLA-B*55:01; CRYGC; ENSG00000163254; CTA
GAMDAKAGSL

SEQ ID NO: 17555 - protein, 10 aa, Homo sapiens
  misc_feature: Table A; Target 17555; HLA-B*58:01; CRYGC; ENSG00000163254; CTA
GAMDAKAGSL

SEQ ID NO: 17556 - protein, 10 aa, Homo sapiens
  misc_feature: Table A; Target 17556; HLA-C*01:02; CRYGC; ENSG00000163254; CTA
GAMDAKAGSL

SEQ ID NO: 17557 - protein, 10 aa, Homo sapiens
  misc_feature: Table A; Target 17557; HLA-C*02:02; CRYGC; ENSG00000163254; CTA
GAMDAKAGSL

SEQ ID NO: 17558 - protein, 10 aa, Homo sapiens
  misc_feature: Table A; Target 17558; HLA-C*03:03; CRYGC; ENSG00000163254; CTA
GAMDAKAGSL

SEQ ID NO: 17559 - protein, 10 aa, Homo sapiens
  misc_feature: Table A; Target 17559; HLA-C*03:04; CRYGC; ENSG00000163254; CTA
GAMDAKAGSL

SEQ ID NO: 17560 - protein, 10 aa, Homo sapiens
  misc_feature: Table A; Target 17560; HLA-C*05:01; CRYGC; ENSG00000163254; CTA
GAMDAKAGSL

SEQ ID NO: 17561 - protein, 10 aa, Homo sapiens
  misc_feature: Table A; Target 17561; HLA-C*06:02; CRYGC; ENSG00000163254; CTA
GAMDAKAGSL

SEQ ID NO: 17562 - protein, 10 aa, Homo sapiens
  misc_feature: Table A; Target 17562; HLA-C*07:01; CRYGC; ENSG00000163254; CTA
GAMDAKAGSL

SEQ ID NO: 17563 - protein, 10 aa, Homo sapiens
  misc_feature: Table A; Target 17563; HLA-C*07:02; CRYGC; ENSG00000163254; CTA
GAMDAKAGSL

SEQ ID NO: 17564 - protein, 10 aa, Homo sapiens
  misc_feature: Table A; Target 17564; HLA-C*12:03; CRYGC; ENSG00000163254; CTA
GAMDAKAGSL

SEQ ID NO: 17565 - protein, 10 aa, Homo sapiens
  misc_feature: Table A; Target 17565; HLA-C*14:02; CRYGC; ENSG00000163254; CTA
GAMDAKAGSL

SEQ ID NO: 17566 - protein, 10 aa, Homo sapiens
  misc_feature: Table A; Target 17566; HLA-C*16:01; CRYGC; ENSG00000163254; CTA
GAMDAKAGSL

SEQ ID NO: 17567 - protein, 10 aa, Homo sapiens
  misc_feature: Table A; Target 17567; HLA-C*16:02; CRYGC; ENSG00000163254; CTA
GAMDAKAGSL

SEQ ID NO: 17568 - protein, 10 aa, Homo sapiens
  misc_feature: Table A; Target 17568; HLA-C*16:04; CRYGC; ENSG00000163254; CTA
GAMDAKAGSL

SEQ ID NO: 17569 - protein, 11 aa, Homo sapiens
  misc_feature: Table A; Target 17569; HLA-A*03:01; CRYGC; ENSG00000163254; CTA
GAMDAKAGSLR

SEQ ID NO: 17570 - protein, 11 aa, Homo sapiens
  misc_feature: Table A; Target 17570; HLA-A*03:02; CRYGC; ENSG00000163254; CTA
GAMDAKAGSLR

SEQ ID NO: 17571 - protein, 11 aa, Homo sapiens
  misc_feature: Table A; Target 17571; HLA-A*11:01; CRYGC; ENSG00000163254; CTA
GAMDAKAGSLR

SEQ ID NO: 17572 - protein, 11 aa, Homo sapiens
  misc_feature: Table A; Target 17572; HLA-A*31:01; CRYGC; ENSG00000163254; CTA
GAMDAKAGSLR

SEQ ID NO: 17573 - protein, 11 aa, Homo sapiens
  misc_feature: Table A; Target 17573; HLA-A*33:01; CRYGC; ENSG00000163254; CTA
GAMDAKAGSLR

SEQ ID NO: 17574 - protein, 11 aa, Homo sapiens
  misc_feature: Table A; Target 17574; HLA-A*33:03; CRYGC; ENSG00000163254; CTA
GAMDAKAGSLR

SEQ ID NO: 17575 - protein, 11 aa, Homo sapiens
  misc_feature: Table A; Target 17575; HLA-A*68:01; CRYGC; ENSG00000163254; CTA
GAMDAKAGSLR

SEQ ID NO: 17576 - protein, 11 aa, Homo sapiens
  misc_feature: Table A; Target 17576; HLA-C*07:06; CRYGC; ENSG00000163254; CTA
GAMDAKAGSLR

SEQ ID NO: 17577 - protein, 8 aa, Homo sapiens
  misc_feature: Table A; Target 17577; HLA-B*27:05; CRYGC; ENSG00000163254; CTA
GEYPDYQQ

SEQ ID NO: 17578 - protein, 9 aa, Homo sapiens
  misc_feature: Table A; Target 17578; HLA-A*23:01; CRYGC; ENSG00000163254; CTA
GEYPDYQQW

SEQ ID NO: 17579 - protein, 9 aa, Homo sapiens
  misc_feature: Table A; Target 17579; HLA-A*25:01; CRYGC; ENSG00000163254; CTA
GEYPDYQQW

SEQ ID NO: 17580 - protein, 9 aa, Homo sapiens
  misc_feature: Table A; Target 17580; HLA-A*30:01; CRYGC; ENSG00000163254; CTA
GEYPDYQQW

SEQ ID NO: 17581 - protein, 9 aa, Homo sapiens
  misc_feature: Table A; Target 17581; HLA-B*15:03; CRYGC; ENSG00000163254; CTA
GEYPDYQQW

SEQ ID NO: 17582 - protein, 9 aa, Homo sapiens
  misc_feature: Table A; Target 17582; HLA-B*18:01; CRYGC; ENSG00000163254; CTA
GEYPDYQQW

SEQ ID NO: 17583 - protein, 9 aa, Homo sapiens
  misc_feature: Table A; Target 17583; HLA-B*27:02; CRYGC; ENSG00000163254; CTA
GEYPDYQQW

SEQ ID NO: 17584 - protein, 9 aa, Homo sapiens
  misc_feature: Table A; Target 17584; HLA-B*27:05; CRYGC; ENSG00000163254; CTA
GEYPDYQQW

SEQ ID NO: 17585 - protein, 9 aa, Homo sapiens
  misc_feature: Table A; Target 17585; HLA-B*37:01; CRYGC; ENSG00000163254; CTA
GEYPDYQQW

SEQ ID NO: 17586 - protein, 9 aa, Homo sapiens
  misc_feature: Table A; Target 17586; HLA-B*38:01; CRYGC; ENSG00000163254; CTA
GEYPDYQQW

SEQ ID NO: 17587 - protein, 9 aa, Homo sapiens
  misc_feature: Table A; Target 17587; HLA-B*40:01; CRYGC; ENSG00000163254; CTA
GEYPDYQQW

SEQ ID NO: 17588 - protein, 9 aa, Homo sapiens
  misc_feature: Table A; Target 17588; HLA-B*40:02; CRYGC; ENSG00000163254; CTA
GEYPDYQQW

SEQ ID NO: 17589 - protein, 9 aa, Homo sapiens
  misc_feature: Table A; Target 17589; HLA-B*49:01; CRYGC; ENSG00000163254; CTA
GEYPDYQQW

SEQ ID NO: 17590 - protein, 9 aa, Homo sapiens
  misc_feature: Table A; Target 17590; HLA-B*57:01; CRYGC; ENSG00000163254; CTA
GEYPDYQQW

SEQ ID NO: 17591 - protein, 9 aa, Homo sapiens
  misc_feature: Table A; Target 17591; HLA-B*58:01; CRYGC; ENSG00000163254; CTA
GEYPDYQQW

SEQ ID NO: 17592 - protein, 9 aa, Homo sapiens
  misc_feature: Table A; Target 17592; HLA-C*02:02; CRYGC; ENSG00000163254; CTA
GEYPDYQQW

SEQ ID NO: 17593 - protein, 9 aa, Homo sapiens
  misc_feature: Table A; Target 17593; HLA-C*16:04; CRYGC; ENSG00000163254; CTA
GEYPDYQQW

SEQ ID NO: 17594 - protein, 10 aa, Homo sapiens
  misc_feature: Table A; Target 17594; HLA-A*30:01; CRYGC; ENSG00000163254; CTA
GEYPDYQQWM

SEQ ID NO: 17595 - protein, 10 aa, Homo sapiens
  misc_feature: Table A; Target 17595; HLA-B*40:01; CRYGC; ENSG00000163254; CTA
GEYPDYQQWM

SEQ ID NO: 17596 - protein, 10 aa, Homo sapiens
  misc_feature: Table A; Target 17596; HLA-B*40:02; CRYGC; ENSG00000163254; CTA
GEYPDYQQWM

SEQ ID NO: 17597 - protein, 10 aa, Homo sapiens
  misc_feature: Table A; Target 17597; HLA-B*44:02; CRYGC; ENSG00000163254; CTA
GEYPDYQQWM

SEQ ID NO: 17598 - protein, 10 aa, Homo sapiens
  misc_feature: Table A; Target 17598; HLA-B*44:03; CRYGC; ENSG00000163254; CTA
GEYPDYQQWM

SEQ ID NO: 17599 - protein, 10 aa, Homo sapiens
  misc_feature: Table A; Target 17599; HLA-B*49:01; CRYGC; ENSG00000163254; CTA
GEYPDYQQWM

SEQ ID NO: 17600 - protein, 9 aa, Homo sapiens
  misc_feature: Table A; Target 17600; HLA-A*02:01; CRYGC; ENSG00000163254; CTA
GLSDSIRSC

SEQ ID NO: 17601 - protein, 9 aa, Homo sapiens
  misc_feature: Table A; Target 17601; HLA-A*02:03; CRYGC; ENSG00000163254; CTA
GLSDSIRSC

SEQ ID NO: 17602 - protein, 9 aa, Homo sapiens
  misc_feature: Table A; Target 17602; HLA-A*02:04; CRYGC; ENSG00000163254; CTA
GLSDSIRSC

SEQ ID NO: 17603 - protein, 9 aa, Homo sapiens
  misc_feature: Table A; Target 17603; HLA-A*03:01; CRYGC; ENSG00000163254; CTA
GLSDSIRSC

SEQ ID NO: 17604 - protein, 9 aa, Homo sapiens
  misc_feature: Table A; Target 17604; HLA-A*32:01; CRYGC; ENSG00000163254; CTA
GLSDSIRSC

SEQ ID NO: 17605 - protein, 9 aa, Homo sapiens
  misc_feature: Table A; Target 17605; HLA-B*13:02; CRYGC; ENSG00000163254; CTA
GLSDSIRSC

SEQ ID NO: 17606 - protein, 9 aa, Homo sapiens
  misc_feature: Table A; Target 17606; HLA-B*55:01; CRYGC; ENSG00000163254; CTA
GLSDSIRSC

SEQ ID NO: 17607 - protein, 9 aa, Homo sapiens
  misc_feature: Table A; Target 17607; HLA-C*06:02; CRYGC; ENSG00000163254; CTA
GLSDSIRSC

SEQ ID NO: 17608 - protein, 10 aa, Homo sapiens
  misc_feature: Table A; Target 17608; HLA-A*01:01; CRYGC; ENSG00000163254; CTA
GSLRRVVDLY

SEQ ID NO: 17609 - protein, 10 aa, Homo sapiens
  misc_feature: Table A; Target 17609; HLA-A*29:02; CRYGC; ENSG00000163254; CTA
GSLRRVVDLY

SEQ ID NO: 17610 - protein, 10 aa, Homo sapiens
  misc_feature: Table A; Target 17610; HLA-A*30:02; CRYGC; ENSG00000163254; CTA
GSLRRVVDLY

SEQ ID NO: 17611 - protein, 10 aa, Homo sapiens
  misc_feature: Table A; Target 17611; HLA-B*57:01; CRYGC; ENSG00000163254; CTA
GSLRRVVDLY

SEQ ID NO: 17612 - protein, 10 aa, Homo sapiens
  misc_feature: Table A; Target 17612; HLA-C*07:01; CRYGC; ENSG00000163254; CTA
GSLRRVVDLY

SEQ ID NO: 17613 - protein, 8 aa, Homo sapiens
  misc_feature: Table A; Target 17613; HLA-A*02:03; CRYGC; ENSG00000163254; CTA
HLSEIRSL

SEQ ID NO: 17614 - protein, 8 aa, Homo sapiens
  misc_feature: Table A; Target 17614; HLA-A*02:04; CRYGC; ENSG00000163254; CTA
HLSEIRSL

SEQ ID NO: 17615 - protein, 8 aa, Homo sapiens
  misc_feature: Table A; Target 17615; HLA-B*08:01; CRYGC; ENSG00000163254; CTA
HLSEIRSL

SEQ ID NO: 17616 - protein, 8 aa, Homo sapiens
  misc_feature: Table A; Target 17616; HLA-B*37:01; CRYGC; ENSG00000163254; CTA
HLSEIRSL

SEQ ID NO: 17617 - protein, 8 aa, Homo sapiens
  misc_feature: Table A; Target 17617; HLA-C*16:01; CRYGC; ENSG00000163254; CTA
HLSEIRSL

SEQ ID NO: 17618 - protein, 8 aa, Homo sapiens
  misc_feature: Table A; Target 17618; HLA-C*16:02; CRYGC; ENSG00000163254; CTA
HLSEIRSL

SEQ ID NO: 17619 - protein, 10 aa, Homo sapiens
  misc_feature: Table A; Target 17619; HLA-A*02:03; CRYGC; ENSG00000163254; CTA
HLSEIRSLHV

SEQ ID NO: 17620 - protein, 11 aa, Homo sapiens
  misc_feature: Table A; Target 17620; HLA-A*02:03; CRYGC; ENSG00000163254; CTA
HLSEIRSLHVL

SEQ ID NO: 17621 - protein, 11 aa, Homo sapiens
  misc_feature: Table A; Target 17621; HLA-A*02:04; CRYGC; ENSG00000163254; CTA
HLSEIRSLHVL

SEQ ID NO: 17622 - protein, 9 aa, Homo sapiens
  misc_feature: Table A; Target 17622; HLA-A*02:04; CRYGC; ENSG00000163254; CTA
HVLEGCWVL

SEQ ID NO: 17623 - protein, 10 aa, Homo sapiens
  misc_feature: Table A; Target 17623; HLA-A*29:02; CRYGC; ENSG00000163254; CTA
HVLEGCWVLY

SEQ ID NO: 17624 - protein, 8 aa, Homo sapiens
  misc_feature: Table A; Target 17624; HLA-A*33:01; CRYGC; ENSG00000163254; CTA
IPQTVSHR

SEQ ID NO: 17625 - protein, 8 aa, Homo sapiens
  misc_feature: Table A; Target 17625; HLA-A*33:03; CRYGC; ENSG00000163254; CTA
IPQTVSHR

SEQ ID NO: 17626 - protein, 8 aa, Homo sapiens
  misc_feature: Table A; Target 17626; HLA-C*07:06; CRYGC; ENSG00000163254; CTA
IPQTVSHR

SEQ ID NO: 17627 - protein, 9 aa, Homo sapiens
  misc_feature: Table A; Target 17627; HLA-A*23:01; CRYGC; ENSG00000163254; CTA
IPQTVSHRL

SEQ ID NO: 17628 - protein, 9 aa, Homo sapiens
  misc_feature: Table A; Target 17628; HLA-A*24:02; CRYGC; ENSG00000163254; CTA
IPQTVSHRL

SEQ ID NO: 17629 - protein, 9 aa, Homo sapiens
  misc_feature: Table A; Target 17629; HLA-A*33:03; CRYGC; ENSG00000163254; CTA
IPQTVSHRL

SEQ ID NO: 17630 - protein, 9 aa, Homo sapiens
  misc_feature: Table A; Target 17630; HLA-B*07:02; CRYGC; ENSG00000163254; CTA
IPQTVSHRL

SEQ ID NO: 17631 - protein, 9 aa, Homo sapiens
  misc_feature: Table A; Target 17631; HLA-B*08:01; CRYGC; ENSG00000163254; CTA
IPQTVSHRL

SEQ ID NO: 17632 - protein, 9 aa, Homo sapiens
  misc_feature: Table A; Target 17632; HLA-B*27:05; CRYGC; ENSG00000163254; CTA
IPQTVSHRL

SEQ ID NO: 17633 - protein, 9 aa, Homo sapiens
  misc_feature: Table A; Target 17633; HLA-B*35:01; CRYGC; ENSG00000163254; CTA
IPQTVSHRL

SEQ ID NO: 17634 - protein, 9 aa, Homo sapiens
  misc_feature: Table A; Target 17634; HLA-B*35:03; CRYGC; ENSG00000163254; CTA
IPQTVSHRL

SEQ ID NO: 17635 - protein, 9 aa, Homo sapiens
  misc_feature: Table A; Target 17635; HLA-B*38:01; CRYGC; ENSG00000163254; CTA
IPQTVSHRL

SEQ ID NO: 17636 - protein, 9 aa, Homo sapiens
  misc_feature: Table A; Target 17636; HLA-B*51:01; CRYGC; ENSG00000163254; CTA
IPQTVSHRL

SEQ ID NO: 17637 - protein, 9 aa, Homo sapiens
  misc_feature: Table A; Target 17637; HLA-B*55:01; CRYGC; ENSG00000163254; CTA
IPQTVSHRL

SEQ ID NO: 17638 - protein, 9 aa, Homo sapiens
  misc_feature: Table A; Target 17638; HLA-B*56:01; CRYGC; ENSG00000163254; CTA
IPQTVSHRL

SEQ ID NO: 17639 - protein, 9 aa, Homo sapiens
  misc_feature: Table A; Target 17639; HLA-C*03:03; CRYGC; ENSG00000163254; CTA
IPQTVSHRL

SEQ ID NO: 17640 - protein, 9 aa, Homo sapiens
  misc_feature: Table A; Target 17640; HLA-C*04:01; CRYGC; ENSG00000163254; CTA
IPQTVSHRL

SEQ ID NO: 17641 - protein, 9 aa, Homo sapiens
  misc_feature: Table A; Target 17641; HLA-C*06:02; CRYGC; ENSG00000163254; CTA
IPQTVSHRL

SEQ ID NO: 17642 - protein, 9 aa, Homo sapiens
  misc_feature: Table A; Target 17642; HLA-C*07:02; CRYGC; ENSG00000163254; CTA
IPQTVSHRL

SEQ ID NO: 17643 - protein, 9 aa, Homo sapiens
  misc_feature: Table A; Target 17643; HLA-C*07:06; CRYGC; ENSG00000163254; CTA
IPQTVSHRL

SEQ ID NO: 17644 - protein, 9 aa, Homo sapiens
  misc_feature: Table A; Target 17644; HLA-C*16:01; CRYGC; ENSG00000163254; CTA
IPQTVSHRL

SEQ ID NO: 17645 - protein, 9 aa, Homo sapiens
  misc_feature: Table A; Target 17645; HLA-C*16:02; CRYGC; ENSG00000163254; CTA
IPQTVSHRL

SEQ ID NO: 17646 - protein, 9 aa, Homo sapiens
  misc_feature: Table A; Target 17646; HLA-B*57:01; CRYGC; ENSG00000163254; CTA
ITFYEDRAF

SEQ ID NO: 17647 - protein, 9 aa, Homo sapiens
  misc_feature: Table A; Target 17647; HLA-C*06:02; CRYGC; ENSG00000163254; CTA
KAGSLRRVV

SEQ ID NO: 17648 - protein, 9 aa, Homo sapiens
  misc_feature: Table A; Target 17648; HLA-C*16:01; CRYGC; ENSG00000163254; CTA
KAGSLRRVV

SEQ ID NO: 17649 - protein, 9 aa, Homo sapiens
  misc_feature: Table A; Target 17649; HLA-C*16:02; CRYGC; ENSG00000163254; CTA
KAGSLRRVV

SEQ ID NO: 17650 - protein, 10 aa, Homo sapiens
  misc_feature: Table A; Target 17650; HLA-A*02:07; CRYGC; ENSG00000163254; CTA
LIPQTVSHRL

SEQ ID NO: 17651 - protein, 9 aa, Homo sapiens
  misc_feature: Table A; Target 17651; HLA-C*16:01; CRYGC; ENSG00000163254; CTA
LPNYRGRQY

SEQ ID NO: 17652 - protein, 8 aa, Homo sapiens
  misc_feature: Table A; Target 17652; HLA-C*07:01; CRYGC; ENSG00000163254; CTA
LRRVVDLY

SEQ ID NO: 17653 - protein, 8 aa, Homo sapiens
  misc_feature: Table A; Target 17653; HLA-C*07:02; CRYGC; ENSG00000163254; CTA
LRRVVDLY

SEQ ID NO: 17654 - protein, 9 aa, Homo sapiens
  misc_feature: Table A; Target 17654; HLA-A*01:01; CRYGC; ENSG00000163254; CTA
LSEIRSLHV

SEQ ID NO: 17655 - protein, 8 aa, Homo sapiens
  misc_feature: Table A; Target 17655; HLA-A*33:01; CRYGC; ENSG00000163254; CTA
LYELPNYR

SEQ ID NO: 17656 - protein, 8 aa, Homo sapiens
  misc_feature: Table A; Target 17656; HLA-A*30:01; CRYGC; ENSG00000163254; CTA
MDAKAGSL

SEQ ID NO: 17657 - protein, 8 aa, Homo sapiens
  misc_feature: Table A; Target 17657; HLA-B*07:02; CRYGC; ENSG00000163254; CTA
MDAKAGSL

SEQ ID NO: 17658 - protein, 8 aa, Homo sapiens
  misc_feature: Table A; Target 17658; HLA-B*18:01; CRYGC; ENSG00000163254; CTA
MDAKAGSL

SEQ ID NO: 17659 - protein, 8 aa, Homo sapiens
  misc_feature: Table A; Target 17659; HLA-B*37:01; CRYGC; ENSG00000163254; CTA
MDAKAGSL

SEQ ID NO: 17660 - protein, 8 aa, Homo sapiens
  misc_feature: Table A; Target 17660; HLA-B*40:01; CRYGC; ENSG00000163254; CTA
MDAKAGSL

SEQ ID NO: 17661 - protein, 8 aa, Homo sapiens
  misc_feature: Table A; Target 17661; HLA-B*40:02; CRYGC; ENSG00000163254; CTA
MDAKAGSL

SEQ ID NO: 17662 - protein, 8 aa, Homo sapiens
  misc_feature: Table A; Target 17662; HLA-B*51:01; CRYGC; ENSG00000163254; CTA
MDAKAGSL

SEQ ID NO: 17663 - protein, 8 aa, Homo sapiens
  misc_feature: Table A; Target 17663; HLA-C*03:03; CRYGC; ENSG00000163254; CTA
MDAKAGSL

SEQ ID NO: 17664 - protein, 8 aa, Homo sapiens
  misc_feature: Table A; Target 17664; HLA-C*03:04; CRYGC; ENSG00000163254; CTA
MDAKAGSL

SEQ ID NO: 17665 - protein, 8 aa, Homo sapiens
  misc_feature: Table A; Target 17665; HLA-C*04:01; CRYGC; ENSG00000163254; CTA
MDAKAGSL

SEQ ID NO: 17666 - protein, 8 aa, Homo sapiens
  misc_feature: Table A; Target 17666; HLA-C*06:02; CRYGC; ENSG00000163254; CTA
MDAKAGSL

SEQ ID NO: 17667 - protein, 8 aa, Homo sapiens
  misc_feature: Table A; Target 17667; HLA-C*07:01; CRYGC; ENSG00000163254; CTA
MDAKAGSL

SEQ ID NO: 17668 - protein, 8 aa, Homo sapiens
  misc_feature: Table A; Target 17668; HLA-C*07:02; CRYGC; ENSG00000163254; CTA
MDAKAGSL

SEQ ID NO: 17669 - protein, 8 aa, Homo sapiens
  misc_feature: Table A; Target 17669; HLA-C*07:04; CRYGC; ENSG00000163254; CTA
MDAKAGSL

SEQ ID NO: 17670 - protein, 8 aa, Homo sapiens
  misc_feature: Table A; Target 17670; HLA-C*12:03; CRYGC; ENSG00000163254; CTA
MDAKAGSL

SEQ ID NO: 17671 - protein, 8 aa, Homo sapiens
  misc_feature: Table A; Target 17671; HLA-C*16:02; CRYGC; ENSG00000163254; CTA
MDAKAGSL

SEQ ID NO: 17672 - protein, 9 aa, Homo sapiens
  misc_feature: Table A; Target 17672; HLA-A*33:01; CRYGC; ENSG00000163254; CTA
MDAKAGSLR

SEQ ID NO: 17673 - protein, 9 aa, Homo sapiens
  misc_feature: Table A; Target 17673; HLA-A*33:03; CRYGC; ENSG00000163254; CTA
MDAKAGSLR

SEQ ID NO: 17674 - protein, 9 aa, Homo sapiens
  misc_feature: Table A; Target 17674; HLA-A*68:01; CRYGC; ENSG00000163254; CTA
MDAKAGSLR

SEQ ID NO: 17675 - protein, 9 aa, Homo sapiens
  misc_feature: Table A; Target 17675; HLA-C*04:01; CRYGC; ENSG00000163254; CTA
MDAKAGSLR

SEQ ID NO: 17676 - protein, 9 aa, Homo sapiens
  misc_feature: Table A; Target 17676; HLA-C*07:01; CRYGC; ENSG00000163254; CTA
MDAKAGSLR

SEQ ID NO: 17677 - protein, 9 aa, Homo sapiens
  misc_feature: Table A; Target 17677; HLA-C*07:06; CRYGC; ENSG00000163254; CTA
MDAKAGSLR

SEQ ID NO: 17678 - protein, 10 aa, Homo sapiens
  misc_feature: Table A; Target 17678; HLA-B*49:01; CRYGC; ENSG00000163254; CTA
MELSEDCPSI

SEQ ID NO: 17679 - protein, 10 aa, Homo sapiens
  misc_feature: Table A; Target 17679; HLA-C*07:01; CRYGC; ENSG00000163254; CTA
MELSEDCPSI

SEQ ID NO: 17680 - protein, 8 aa, Homo sapiens
  misc_feature: Table A; Target 17680; HLA-A*03:01; CRYGC; ENSG00000163254; CTA
MLYERPNY

SEQ ID NO: 17681 - protein, 8 aa, Homo sapiens
  misc_feature: Table A; Target 17681; HLA-A*29:02; CRYGC; ENSG00000163254; CTA
MLYERPNY

SEQ ID NO: 17682 - protein, 8 aa, Homo sapiens
  misc_feature: Table A; Target 17682; HLA-B*08:01; CRYGC; ENSG00000163254; CTA
MLYERPNY

SEQ ID NO: 17683 - protein, 8 aa, Homo sapiens
  misc_feature: Table A; Target 17683; HLA-B*15:03; CRYGC; ENSG00000163254; CTA
MLYERPNY

SEQ ID NO: 17684 - protein, 8 aa, Homo sapiens
  misc_feature: Table A; Target 17684; HLA-C*16:01; CRYGC; ENSG00000163254; CTA
MLYERPNY

SEQ ID NO: 17685 - protein, 9 aa, Homo sapiens
  misc_feature: Table A; Target 17685; HLA-A*02:03; CRYGC; ENSG00000163254; CTA
MLYERPNYQ

SEQ ID NO: 17686 - protein, 9 aa, Homo sapiens
  misc_feature: Table A; Target 17686; HLA-A*03:01; CRYGC; ENSG00000163254; CTA
MLYERPNYQ

SEQ ID NO: 17687 - protein, 10 aa, Homo sapiens
  misc_feature: Table A; Target 17687; HLA-A*25:01; CRYGC; ENSG00000163254; CTA
NSIRVESGCW

SEQ ID NO: 17688 - protein, 10 aa, Homo sapiens
  misc_feature: Table A; Target 17688; HLA-B*57:01; CRYGC; ENSG00000163254; CTA
NSIRVESGCW

SEQ ID NO: 17689 - protein, 10 aa, Homo sapiens
  misc_feature: Table A; Target 17689; HLA-B*58:01; CRYGC; ENSG00000163254; CTA
NSIRVESGCW

SEQ ID NO: 17690 - protein, 8 aa, Homo sapiens
  misc_feature: Table A; Target 17690; HLA-C*04:01; CRYGC; ENSG00000163254; CTA
NYQGQQYL

SEQ ID NO: 17691 - protein, 8 aa, Homo sapiens
  misc_feature: Table A; Target 17691; HLA-C*14:02; CRYGC; ENSG00000163254; CTA
NYQGQQYL

SEQ ID NO: 17692 - protein, 9 aa, Homo sapiens
  misc_feature: Table A; Target 17692; HLA-A*23:01; CRYGC; ENSG00000163254; CTA
NYQGQQYLL

SEQ ID NO: 17693 - protein, 9 aa, Homo sapiens
  misc_feature: Table A; Target 17693; HLA-A*24:02; CRYGC; ENSG00000163254; CTA
NYQGQQYLL

SEQ ID NO: 17694 - protein, 9 aa, Homo sapiens
  misc_feature: Table A; Target 17694; HLA-A*29:02; CRYGC; ENSG00000163254; CTA
NYQGQQYLL

SEQ ID NO: 17695 - protein, 9 aa, Homo sapiens
  misc_feature: Table A; Target 17695; HLA-A*33:03; CRYGC; ENSG00000163254; CTA
NYQGQQYLL

SEQ ID NO: 17696 - protein, 9 aa, Homo sapiens
  misc_feature: Table A; Target 17696; HLA-B*35:03; CRYGC; ENSG00000163254; CTA
NYQGQQYLL

SEQ ID NO: 17697 - protein, 9 aa, Homo sapiens
  misc_feature: Table A; Target 17697; HLA-C*04:01; CRYGC; ENSG00000163254; CTA
NYQGQQYLL

SEQ ID NO: 17698 - protein, 9 aa, Homo sapiens
  misc_feature: Table A; Target 17698; HLA-C*14:02; CRYGC; ENSG00000163254; CTA
NYQGQQYLL

SEQ ID NO: 17699 - protein, 9 aa, Homo sapiens
  misc_feature: Table A; Target 17699; HLA-C*16:02; CRYGC; ENSG00000163254; CTA
NYQGQQYLL

SEQ ID NO: 17700 - protein, 10 aa, Homo sapiens
  misc_feature: Table A; Target 17700; HLA-A*31:01; CRYGC; ENSG00000163254; CTA
NYQGQQYLLR

SEQ ID NO: 17701 - protein, 10 aa, Homo sapiens
  misc_feature: Table A; Target 17701; HLA-A*33:01; CRYGC; ENSG00000163254; CTA
NYQGQQYLLR

SEQ ID NO: 17702 - protein, 10 aa, Homo sapiens
  misc_feature: Table A; Target 17702; HLA-A*33:03; CRYGC; ENSG00000163254; CTA
NYQGQQYLLR

SEQ ID NO: 17703 - protein, 11 aa, Homo sapiens
  misc_feature: Table A; Target 17703; HLA-A*31:01; CRYGC; ENSG00000163254; CTA
NYQGQQYLLRR

SEQ ID NO: 17704 - protein, 11 aa, Homo sapiens
  misc_feature: Table A; Target 17704; HLA-A*33:01; CRYGC; ENSG00000163254; CTA
NYQGQQYLLRR

SEQ ID NO: 17705 - protein, 9 aa, Homo sapiens
  misc_feature: Table A; Target 17705; HLA-A*33:01; CRYGC; ENSG00000163254; CTA
PNLQPYFSR

SEQ ID NO: 17706 - protein, 8 aa, Homo sapiens
  misc_feature: Table A; Target 17706; HLA-B*15:01; CRYGC; ENSG00000163254; CTA
PNYQGQQY

SEQ ID NO: 17707 - protein, 8 aa, Homo sapiens
  misc_feature: Table A; Target 17707; HLA-B*15:03; CRYGC; ENSG00000163254; CTA
PNYQGQQY

SEQ ID NO: 17708 - protein, 8 aa, Homo sapiens
  misc_feature: Table A; Target 17708; HLA-B*27:05; CRYGC; ENSG00000163254; CTA
PNYQGQQY

SEQ ID NO: 17709 - protein, 8 aa, Homo sapiens
  misc_feature: Table A; Target 17709; HLA-B*39:01; CRYGC; ENSG00000163254; CTA
PNYQGQQY

SEQ ID NO: 17710 - protein, 8 aa, Homo sapiens
  misc_feature: Table A; Target 17710; HLA-C*04:01; CRYGC; ENSG00000163254; CTA
PNYQGQQY

SEQ ID NO: 17711 - protein, 8 aa, Homo sapiens
  misc_feature: Table A; Target 17711; HLA-C*06:02; CRYGC; ENSG00000163254; CTA
PNYQGQQY

SEQ ID NO: 17712 - protein, 8 aa, Homo sapiens
  misc_feature: Table A; Target 17712; HLA-C*07:01; CRYGC; ENSG00000163254; CTA
PNYQGQQY

SEQ ID NO: 17713 - protein, 8 aa, Homo sapiens
  misc_feature: Table A; Target 17713; HLA-C*07:02; CRYGC; ENSG00000163254; CTA
PNYQGQQY

SEQ ID NO: 17714 - protein, 8 aa, Homo sapiens
  misc_feature: Table A; Target 17714; HLA-C*07:04; CRYGC; ENSG00000163254; CTA
PNYQGQQY

SEQ ID NO: 17715 - protein, 8 aa, Homo sapiens
  misc_feature: Table A; Target 17715; HLA-C*12:03; CRYGC; ENSG00000163254; CTA
PNYQGQQY

SEQ ID NO: 17716 - protein, 8 aa, Homo sapiens
  misc_feature: Table A; Target 17716; HLA-C*14:02; CRYGC; ENSG00000163254; CTA
PNYQGQQY

SEQ ID NO: 17717 - protein, 8 aa, Homo sapiens
  misc_feature: Table A; Target 17717; HLA-C*16:02; CRYGC; ENSG00000163254; CTA
PNYQGQQY

SEQ ID NO: 17718 - protein, 9 aa, Homo sapiens
  misc_feature: Table A; Target 17718; HLA-C*07:02; CRYGC; ENSG00000163254; CTA
PNYQGQQYL

SEQ ID NO: 17719 - protein, 10 aa, Homo sapiens
  misc_feature: Table A; Target 17719; HLA-C*07:02; CRYGC; ENSG00000163254; CTA
PNYQGQQYLL

SEQ ID NO: 17720 - protein, 11 aa, Homo sapiens
  misc_feature: Table A; Target 17720; HLA-A*33:01; CRYGC; ENSG00000163254; CTA
PNYQGQQYLLR

SEQ ID NO: 17721 - protein, 8 aa, Homo sapiens
  misc_feature: Table A; Target 17721; HLA-C*04:01; CRYGC; ENSG00000163254; CTA
PQTVSHRL

SEQ ID NO: 17722 - protein, 9 aa, Homo sapiens
  misc_feature: Table A; Target 17722; HLA-A*24:02; CRYGC; ENSG00000163254; CTA
PYFSRCNSI

SEQ ID NO: 17723 - protein, 9 aa, Homo sapiens
  misc_feature: Table A; Target 17723; HLA-B*27:02; CRYGC; ENSG00000163254; CTA
QDWGAMDAK

SEQ ID NO: 17724 - protein, 9 aa, Homo sapiens
  misc_feature: Table A; Target 17724; HLA-A*31:01; CRYGC; ENSG00000163254; CTA
QGQQYLLRR

SEQ ID NO: 17725 - protein, 10 aa, Homo sapiens
  misc_feature: Table A; Target 17725; HLA-B*51:01; CRYGC; ENSG00000163254; CTA
QPYFSRCNSI

SEQ ID NO: 17726 - protein, 10 aa, Homo sapiens
  misc_feature: Table A; Target 17726; HLA-B*13:02; CRYGC; ENSG00000163254; CTA
QQWMGLSDSI

SEQ ID NO: 17727 - protein, 10 aa, Homo sapiens
  misc_feature: Table A; Target 17727; HLA-B*38:01; CRYGC; ENSG00000163254; CTA
QQWMGLSDSI

SEQ ID NO: 17728 - protein, 9 aa, Homo sapiens
  misc_feature: Table A; Target 17728; HLA-A*23:01; CRYGC; ENSG00000163254; CTA
QYLLRPQEY

SEQ ID NO: 17729 - protein, 9 aa, Homo sapiens
  misc_feature: Table A; Target 17729; HLA-A*24:02; CRYGC; ENSG00000163254; CTA
QYLLRPQEY

SEQ ID NO: 17730 - protein, 9 aa, Homo sapiens
  misc_feature: Table A; Target 17730; HLA-A*29:02; CRYGC; ENSG00000163254; CTA
QYLLRPQEY

SEQ ID NO: 17731 - protein, 9 aa, Homo sapiens
  misc_feature: Table A; Target 17731; HLA-A*30:02; CRYGC; ENSG00000163254; CTA
QYLLRPQEY

SEQ ID NO: 17732 - protein, 9 aa, Homo sapiens
  misc_feature: Table A; Target 17732; HLA-A*31:01; CRYGC; ENSG00000163254; CTA
QYLLRPQEY

SEQ ID NO: 17733 - protein, 9 aa, Homo sapiens
  misc_feature: Table A; Target 17733; HLA-A*32:01; CRYGC; ENSG00000163254; CTA
QYLLRPQEY

SEQ ID NO: 17734 - protein, 9 aa, Homo sapiens
  misc_feature: Table A; Target 17734; HLA-A*33:03; CRYGC; ENSG00000163254; CTA
QYLLRPQEY

SEQ ID NO: 17735 - protein, 9 aa, Homo sapiens
  misc_feature: Table A; Target 17735; HLA-B*15:03; CRYGC; ENSG00000163254; CTA
QYLLRPQEY

SEQ ID NO: 17736 - protein, 9 aa, Homo sapiens
  misc_feature: Table A; Target 17736; HLA-B*57:01; CRYGC; ENSG00000163254; CTA
QYLLRPQEY

SEQ ID NO: 17737 - protein, 9 aa, Homo sapiens
  misc_feature: Table A; Target 17737; HLA-C*04:01; CRYGC; ENSG00000163254; CTA
QYLLRPQEY

SEQ ID NO: 17738 - protein, 9 aa, Homo sapiens
  misc_feature: Table A; Target 17738; HLA-C*07:01; CRYGC; ENSG00000163254; CTA
QYLLRPQEY

SEQ ID NO: 17739 - protein, 9 aa, Homo sapiens
  misc_feature: Table A; Target 17739; HLA-C*07:02; CRYGC; ENSG00000163254; CTA
QYLLRPQEY

SEQ ID NO: 17740 - protein, 9 aa, Homo sapiens
  misc_feature: Table A; Target 17740; HLA-C*14:02; CRYGC; ENSG00000163254; CTA
QYLLRPQEY

SEQ ID NO: 17741 - protein, 9 aa, Homo sapiens
  misc_feature: Table A; Target 17741; HLA-C*16:01; CRYGC; ENSG00000163254; CTA
QYLLRPQEY

SEQ ID NO: 17742 - protein, 10 aa, Homo sapiens
  misc_feature: Table A; Target 17742; HLA-A*31:01; CRYGC; ENSG00000163254; CTA
QYLLRPQEYR

SEQ ID NO: 17743 - protein, 8 aa, Homo sapiens
  misc_feature: Table A; Target 17743; HLA-A*30:02; CRYGC; ENSG00000163254; CTA
RAFQGRSY

SEQ ID NO: 17744 - protein, 8 aa, Homo sapiens
  misc_feature: Table A; Target 17744; HLA-A*32:01; CRYGC; ENSG00000163254; CTA
RAFQGRSY

SEQ ID NO: 17745 - protein, 8 aa, Homo sapiens
  misc_feature: Table A; Target 17745; HLA-B*15:01; CRYGC; ENSG00000163254; CTA
RAFQGRSY

SEQ ID NO: 17746 - protein, 8 aa, Homo sapiens
  misc_feature: Table A; Target 17746; HLA-B*15:03; CRYGC; ENSG00000163254; CTA
RAFQGRSY

SEQ ID NO: 17747 - protein, 8 aa, Homo sapiens
  misc_feature: Table A; Target 17747; HLA-B*46:01; CRYGC; ENSG00000163254; CTA
RAFQGRSY

SEQ ID NO: 17748 - protein, 8 aa, Homo sapiens
  misc_feature: Table A; Target 17748; HLA-B*57:01; CRYGC; ENSG00000163254; CTA
RAFQGRSY

SEQ ID NO: 17749 - protein, 8 aa, Homo sapiens
  misc_feature: Table A; Target 17749; HLA-B*58:01; CRYGC; ENSG00000163254; CTA
RAFQGRSY

SEQ ID NO: 17750 - protein, 8 aa, Homo sapiens
  misc_feature: Table A; Target 17750; HLA-C*01:02; CRYGC; ENSG00000163254; CTA
RAFQGRSY

SEQ ID NO: 17751 - protein, 8 aa, Homo sapiens
  misc_feature: Table A; Target 17751; HLA-C*02:02; CRYGC; ENSG00000163254; CTA
RAFQGRSY

SEQ ID NO: 17752 - protein, 8 aa, Homo sapiens
  misc_feature: Table A; Target 17752; HLA-C*03:04; CRYGC; ENSG00000163254; CTA
RAFQGRSY

SEQ ID NO: 17753 - protein, 8 aa, Homo sapiens
  misc_feature: Table A; Target 17753; HLA-C*16:01; CRYGC; ENSG00000163254; CTA
RAFQGRSY

SEQ ID NO: 17754 - protein, 8 aa, Homo sapiens
  misc_feature: Table A; Target 17754; HLA-C*16:02; CRYGC; ENSG00000163254; CTA
RAFQGRSY

SEQ ID NO: 17755 - protein, 11 aa, Homo sapiens
  misc_feature: Table A; Target 17755; HLA-A*03:02; CRYGC; ENSG00000163254; CTA
RCQDWGAMDAK

SEQ ID NO: 17756 - protein, 10 aa, Homo sapiens
  misc_feature: Table A; Target 17756; HLA-B*57:01; CRYGC; ENSG00000163254; CTA
RGEYPDYQQW

SEQ ID NO: 17757 - protein, 9 aa, Homo sapiens
  misc_feature: Table A; Target 17757; HLA-A*03:01; CRYGC; ENSG00000163254; CTA
RLYEREDHK

SEQ ID NO: 17758 - protein, 9 aa, Homo sapiens
  misc_feature: Table A; Target 17758; HLA-A*03:02; CRYGC; ENSG00000163254; CTA
RPNYQGQQY

SEQ ID NO: 17759 - protein, 9 aa, Homo sapiens
  misc_feature: Table A; Target 17759; HLA-A*26:01; CRYGC; ENSG00000163254; CTA
RPNYQGQQY

SEQ ID NO: 17760 - protein, 9 aa, Homo sapiens
  misc_feature: Table A; Target 17760; HLA-A*30:02; CRYGC; ENSG00000163254; CTA
RPNYQGQQY

SEQ ID NO: 17761 - protein, 9 aa, Homo sapiens
  misc_feature: Table A; Target 17761; HLA-A*32:01; CRYGC; ENSG00000163254; CTA
RPNYQGQQY

SEQ ID NO: 17762 - protein, 9 aa, Homo sapiens
  misc_feature: Table A; Target 17762; HLA-B*07:02; CRYGC; ENSG00000163254; CTA
RPNYQGQQY

SEQ ID NO: 17763 - protein, 9 aa, Homo sapiens
  misc_feature: Table A; Target 17763; HLA-B*15:01; CRYGC; ENSG00000163254; CTA
RPNYQGQQY

SEQ ID NO: 17764 - protein, 9 aa, Homo sapiens
  misc_feature: Table A; Target 17764; HLA-B*15:03; CRYGC; ENSG00000163254; CTA
RPNYQGQQY

SEQ ID NO: 17765 - protein, 9 aa, Homo sapiens
  misc_feature: Table A; Target 17765; HLA-B*35:01; CRYGC; ENSG00000163254; CTA
RPNYQGQQY

SEQ ID NO: 17766 - protein, 9 aa, Homo sapiens
  misc_feature: Table A; Target 17766; HLA-B*55:01; CRYGC; ENSG00000163254; CTA
RPNYQGQQY

SEQ ID NO: 17767 - protein, 9 aa, Homo sapiens
  misc_feature: Table A; Target 17767; HLA-B*56:01; CRYGC; ENSG00000163254; CTA
RPNYQGQQY

SEQ ID NO: 17768 - protein, 9 aa, Homo sapiens
  misc_feature: Table A; Target 17768; HLA-C*01:02; CRYGC; ENSG00000163254; CTA
RPNYQGQQY

SEQ ID NO: 17769 - protein, 9 aa, Homo sapiens
  misc_feature: Table A; Target 17769; HLA-C*04:01; CRYGC; ENSG00000163254; CTA
RPNYQGQQY

SEQ ID NO: 17770 - protein, 9 aa, Homo sapiens
  misc_feature: Table A; Target 17770; HLA-C*07:02; CRYGC; ENSG00000163254; CTA
RPNYQGQQY

SEQ ID NO: 17771 - protein, 9 aa, Homo sapiens
  misc_feature: Table A; Target 17771; HLA-C*07:06; CRYGC; ENSG00000163254; CTA
RPNYQGQQY

SEQ ID NO: 17772 - protein, 9 aa, Homo sapiens
  misc_feature: Table A; Target 17772; HLA-C*14:02; CRYGC; ENSG00000163254; CTA
RPNYQGQQY

SEQ ID NO: 17773 - protein, 9 aa, Homo sapiens
  misc_feature: Table A; Target 17773; HLA-C*16:01; CRYGC; ENSG00000163254; CTA
RPNYQGQQY

SEQ ID NO: 17774 - protein, 9 aa, Homo sapiens
  misc_feature: Table A; Target 17774; HLA-C*16:02; CRYGC; ENSG00000163254; CTA
RPNYQGQQY

SEQ ID NO: 17775 - protein, 10 aa, Homo sapiens
  misc_feature: Table A; Target 17775; HLA-B*07:02; CRYGC; ENSG00000163254; CTA
RPNYQGQQYL

SEQ ID NO: 17776 - protein, 10 aa, Homo sapiens
  misc_feature: Table A; Target 17776; HLA-B*56:01; CRYGC; ENSG00000163254; CTA
RPNYQGQQYL

SEQ ID NO: 17777 - protein, 10 aa, Homo sapiens
  misc_feature: Table A; Target 17777; HLA-C*07:02; CRYGC; ENSG00000163254; CTA
RPNYQGQQYL

SEQ ID NO: 17778 - protein, 11 aa, Homo sapiens
  misc_feature: Table A; Target 17778; HLA-B*07:02; CRYGC; ENSG00000163254; CTA
RPNYQGQQYLL

SEQ ID NO: 17779 - protein, 10 aa, Homo sapiens
  misc_feature: Table A; Target 17779; HLA-A*30:02; CRYGC; ENSG00000163254; CTA
RQYLLRPQEY

SEQ ID NO: 17780 - protein, 10 aa, Homo sapiens
  misc_feature: Table A; Target 17780; HLA-B*15:01; CRYGC; ENSG00000163254; CTA
RQYLLRPQEY

SEQ ID NO: 17781 - protein, 10 aa, Homo sapiens
  misc_feature: Table A; Target 17781; HLA-B*15:03; CRYGC; ENSG00000163254; CTA
RQYLLRPQEY

SEQ ID NO: 17782 - protein, 10 aa, Homo sapiens
  misc_feature: Table A; Target 17782; HLA-B*44:02; CRYGC; ENSG00000163254; CTA
RQYLLRPQEY

SEQ ID NO: 17783 - protein, 10 aa, Homo sapiens
  misc_feature: Table A; Target 17783; HLA-B*44:03; CRYGC; ENSG00000163254; CTA
RQYLLRPQEY

SEQ ID NO: 17784 - protein, 10 aa, Homo sapiens
  misc_feature: Table A; Target 17784; HLA-B*57:01; CRYGC; ENSG00000163254; CTA
RQYLLRPQEY

SEQ ID NO: 17785 - protein, 10 aa, Homo sapiens
  misc_feature: Table A; Target 17785; HLA-C*16:04; CRYGC; ENSG00000163254; CTA
RQYLLRPQEY

SEQ ID NO: 17786 - protein, 11 aa, Homo sapiens
  misc_feature: Table A; Target 17786; HLA-A*31:01; CRYGC; ENSG00000163254; CTA
RQYLLRPQEYR

SEQ ID NO: 17787 - protein, 10 aa, Homo sapiens
  misc_feature: Table A; Target 17787; HLA-B*57:01; CRYGC; ENSG00000163254; CTA
RSLHVLEGCW

SEQ ID NO: 17788 - protein, 10 aa, Homo sapiens
  misc_feature: Table A; Target 17788; HLA-A*01:01; CRYGC; ENSG00000163254; CTA
RVESGCWMLY

SEQ ID NO: 17789 - protein, 9 aa, Homo sapiens
  misc_feature: Table A; Target 17789; HLA-B*37:01; CRYGC; ENSG00000163254; CTA
SDSIRSCCL

SEQ ID NO: 17790 - protein, 11 aa, Homo sapiens
  misc_feature: Table A; Target 17790; HLA-B*38:01; CRYGC; ENSG00000163254; CTA
SEDCPSIQDRF

SEQ ID NO: 17791 - protein, 11 aa, Homo sapiens
  misc_feature: Table A; Target 17791; HLA-B*44:02; CRYGC; ENSG00000163254; CTA
SEDCPSIQDRF

SEQ ID NO: 17792 - protein, 11 aa, Homo sapiens
  misc_feature: Table A; Target 17792; HLA-B*44:03; CRYGC; ENSG00000163254; CTA
SEDCPSIQDRF

SEQ ID NO: 17793 - protein, 8 aa, Homo sapiens
  misc_feature: Table A; Target 17793; HLA-B*40:02; CRYGC; ENSG00000163254; CTA
SEIRSLHV

SEQ ID NO: 17794 - protein, 8 aa, Homo sapiens
  misc_feature: Table A; Target 17794; HLA-B*49:01; CRYGC; ENSG00000163254; CTA
SEIRSLHV

SEQ ID NO: 17795 - protein, 9 aa, Homo sapiens
  misc_feature: Table A; Target 17795; HLA-A*30:01; CRYGC; ENSG00000163254; CTA
SEIRSLHVL

SEQ ID NO: 17796 - protein, 9 aa, Homo sapiens
  misc_feature: Table A; Target 17796; HLA-B*18:01; CRYGC; ENSG00000163254; CTA
SEIRSLHVL

SEQ ID NO: 17797 - protein, 9 aa, Homo sapiens
  misc_feature: Table A; Target 17797; HLA-B*37:01; CRYGC; ENSG00000163254; CTA
SEIRSLHVL

SEQ ID NO: 17798 - protein, 9 aa, Homo sapiens
  misc_feature: Table A; Target 17798; HLA-B*40:01; CRYGC; ENSG00000163254; CTA
SEIRSLHVL

SEQ ID NO: 17799 - protein, 9 aa, Homo sapiens
  misc_feature: Table A; Target 17799; HLA-B*40:02; CRYGC; ENSG00000163254; CTA
SEIRSLHVL

SEQ ID NO: 17800 - protein, 9 aa, Homo sapiens
  misc_feature: Table A; Target 17800; HLA-B*44:02; CRYGC; ENSG00000163254; CTA
SEIRSLHVL

SEQ ID NO: 17801 - protein, 9 aa, Homo sapiens
  misc_feature: Table A; Target 17801; HLA-B*44:03; CRYGC; ENSG00000163254; CTA
SEIRSLHVL

SEQ ID NO: 17802 - protein, 9 aa, Homo sapiens
  misc_feature: Table A; Target 17802; HLA-B*49:01; CRYGC; ENSG00000163254; CTA
SEIRSLHVL

SEQ ID NO: 17803 - protein, 9 aa, Homo sapiens
  misc_feature: Table A; Target 17803; HLA-C*02:02; CRYGC; ENSG00000163254; CTA
SEIRSLHVL

SEQ ID NO: 17804 - protein, 9 aa, Homo sapiens
  misc_feature: Table A; Target 17804; HLA-C*16:04; CRYGC; ENSG00000163254; CTA
SEIRSLHVL

SEQ ID NO: 17805 - protein, 9 aa, Homo sapiens
  misc_feature: Table A; Target 17805; HLA-A*01:01; CRYGC; ENSG00000163254; CTA
SLRRVVDLY

SEQ ID NO: 17806 - protein, 9 aa, Homo sapiens
  misc_feature: Table A; Target 17806; HLA-A*29:02; CRYGC; ENSG00000163254; CTA
SLRRVVDLY

SEQ ID NO: 17807 - protein, 9 aa, Homo sapiens
  misc_feature: Table A; Target 17807; HLA-A*30:02; CRYGC; ENSG00000163254; CTA
SLRRVVDLY

SEQ ID NO: 17808 - protein, 9 aa, Homo sapiens
  misc_feature: Table A; Target 17808; HLA-B*15:03; CRYGC; ENSG00000163254; CTA
SLRRVVDLY

SEQ ID NO: 17809 - protein, 9 aa, Homo sapiens
  misc_feature: Table A; Target 17809; HLA-B*46:01; CRYGC; ENSG00000163254; CTA
SLRRVVDLY

SEQ ID NO: 17810 - protein, 9 aa, Homo sapiens
  misc_feature: Table A; Target 17810; HLA-B*57:01; CRYGC; ENSG00000163254; CTA
SLRRVVDLY

SEQ ID NO: 17811 - protein, 9 aa, Homo sapiens
  misc_feature: Table A; Target 17811; HLA-C*07:01; CRYGC; ENSG00000163254; CTA
SLRRVVDLY

SEQ ID NO: 17812 - protein, 9 aa, Homo sapiens
  misc_feature: Table A; Target 17812; HLA-B*18:01; CRYGC; ENSG00000163254; CTA
TDCPNLQPY

SEQ ID NO: 17813 - protein, 9 aa, Homo sapiens
  misc_feature: Table A; Target 17813; HLA-C*04:01; CRYGC; ENSG00000163254; CTA
TDCPNLQPY

SEQ ID NO: 17814 - protein, 9 aa, Homo sapiens
  misc_feature: Table A; Target 17814; HLA-C*07:01; CRYGC; ENSG00000163254; CTA
TDCPNLQPY

SEQ ID NO: 17815 - protein, 10 aa, Homo sapiens
  misc_feature: Table A; Target 17815; HLA-C*04:01; CRYGC; ENSG00000163254; CTA
TDCPNLQPYF

SEQ ID NO: 17816 - protein, 10 aa, Homo sapiens
  misc_feature: Table A; Target 17816; HLA-C*07:01; CRYGC; ENSG00000163254; CTA
TDCPNLQPYF

SEQ ID NO: 17817 - protein, 8 aa, Homo sapiens
  misc_feature: Table A; Target 17817; HLA-C*14:02; CRYGC; ENSG00000163254; CTA
TFYEDRAF

SEQ ID NO: 17818 - protein, 11 aa, Homo sapiens
  misc_feature: Table A; Target 17818; HLA-A*31:01; CRYGC; ENSG00000163254; CTA
TFYEDRAFQGR

SEQ ID NO: 17819 - protein, 11 aa, Homo sapiens
  misc_feature: Table A; Target 17819; HLA-A*33:03; CRYGC; ENSG00000163254; CTA
TFYEDRAFQGR

SEQ ID NO: 17820 - protein, 10 aa, Homo sapiens
  misc_feature: Table A; Target 17820; HLA-A*01:01; CRYGC; ENSG00000163254; CTA
TTDCPNLQPY

SEQ ID NO: 17821 - protein, 10 aa, Homo sapiens
  misc_feature: Table A; Target 17821; HLA-C*07:01; CRYGC; ENSG00000163254; CTA
TTDCPNLQPY

SEQ ID NO: 17822 - protein, 11 aa, Homo sapiens
  misc_feature: Table A; Target 17822; HLA-A*01:01; CRYGC; ENSG00000163254; CTA
TTDCPNLQPYF

SEQ ID NO: 17823 - protein, 9 aa, Homo sapiens
  misc_feature: Table A; Target 17823; HLA-B*57:01; CRYGC; ENSG00000163254; CTA
TVSHRLRLY

SEQ ID NO: 17824 - protein, 9 aa, Homo sapiens
  misc_feature: Table A; Target 17824; HLA-A*01:01; CRYGC; ENSG00000163254; CTA
VLEGCWVLY

SEQ ID NO: 17825 - protein, 9 aa, Homo sapiens
  misc_feature: Table A; Target 17825; HLA-A*29:02; CRYGC; ENSG00000163254; CTA
VLEGCWVLY

SEQ ID NO: 17826 - protein, 8 aa, Homo sapiens
  misc_feature: Table A; Target 17826; HLA-A*03:01; CRYGC; ENSG00000163254; CTA
VLYELPNY

SEQ ID NO: 17827 - protein, 8 aa, Homo sapiens
  misc_feature: Table A; Target 17827; HLA-A*29:02; CRYGC; ENSG00000163254; CTA
VLYELPNY

SEQ ID NO: 17828 - protein, 8 aa, Homo sapiens
  misc_feature: Table A; Target 17828; HLA-A*30:02; CRYGC; ENSG00000163254; CTA
VLYELPNY

SEQ ID NO: 17829 - protein, 8 aa, Homo sapiens
  misc_feature: Table A; Target 17829; HLA-A*32:01; CRYGC; ENSG00000163254; CTA
VLYELPNY

SEQ ID NO: 17830 - protein, 8 aa, Homo sapiens
  misc_feature: Table A; Target 17830; HLA-B*15:01; CRYGC; ENSG00000163254; CTA
VLYELPNY

SEQ ID NO: 17831 - protein, 8 aa, Homo sapiens
  misc_feature: Table A; Target 17831; HLA-B*15:03; CRYGC; ENSG00000163254; CTA
VLYELPNY

SEQ ID NO: 17832 - protein, 8 aa, Homo sapiens
  misc_feature: Table A; Target 17832; HLA-B*46:01; CRYGC; ENSG00000163254; CTA
VLYELPNY

SEQ ID NO: 17833 - protein, 8 aa, Homo sapiens
  misc_feature: Table A; Target 17833; HLA-C*02:02; CRYGC; ENSG00000163254; CTA
VLYELPNY

SEQ ID NO: 17834 - protein, 8 aa, Homo sapiens
  misc_feature: Table A; Target 17834; HLA-C*07:01; CRYGC; ENSG00000163254; CTA
VLYELPNY

SEQ ID NO: 17835 - protein, 8 aa, Homo sapiens
  misc_feature: Table A; Target 17835; HLA-C*12:03; CRYGC; ENSG00000163254; CTA
VLYELPNY

SEQ ID NO: 17836 - protein, 8 aa, Homo sapiens
  misc_feature: Table A; Target 17836; HLA-C*14:02; CRYGC; ENSG00000163254; CTA
VLYELPNY

SEQ ID NO: 17837 - protein, 8 aa, Homo sapiens
  misc_feature: Table A; Target 17837; HLA-C*16:01; CRYGC; ENSG00000163254; CTA
VLYELPNY

SEQ ID NO: 17838 - protein, 8 aa, Homo sapiens
  misc_feature: Table A; Target 17838; HLA-C*16:02; CRYGC; ENSG00000163254; CTA
VLYELPNY

SEQ ID NO: 17839 - protein, 8 aa, Homo sapiens
  misc_feature: Table A; Target 17839; HLA-C*16:04; CRYGC; ENSG00000163254; CTA
VLYELPNY

SEQ ID NO: 17840 - protein, 9 aa, Homo sapiens
  misc_feature: Table A; Target 17840; HLA-A*01:01; CRYGC; ENSG00000163254; CTA
VLYELPNYR

SEQ ID NO: 17841 - protein, 9 aa, Homo sapiens
  misc_feature: Table A; Target 17841; HLA-A*02:03; CRYGC; ENSG00000163254; CTA
VLYELPNYR

SEQ ID NO: 17842 - protein, 9 aa, Homo sapiens
  misc_feature: Table A; Target 17842; HLA-A*02:04; CRYGC; ENSG00000163254; CTA
VLYELPNYR

SEQ ID NO: 17843 - protein, 9 aa, Homo sapiens
  misc_feature: Table A; Target 17843; HLA-A*02:07; CRYGC; ENSG00000163254; CTA
VLYELPNYR

SEQ ID NO: 17844 - protein, 9 aa, Homo sapiens
  misc_feature: Table A; Target 17844; HLA-A*03:01; CRYGC; ENSG00000163254; CTA
VLYELPNYR

SEQ ID NO: 17845 - protein, 9 aa, Homo sapiens
  misc_feature: Table A; Target 17845; HLA-A*03:02; CRYGC; ENSG00000163254; CTA
VLYELPNYR

SEQ ID NO: 17846 - protein, 9 aa, Homo sapiens
  misc_feature: Table A; Target 17846; HLA-A*11:01; CRYGC; ENSG00000163254; CTA
VLYELPNYR

SEQ ID NO: 17847 - protein, 9 aa, Homo sapiens
  misc_feature: Table A; Target 17847; HLA-A*31:01; CRYGC; ENSG00000163254; CTA
VLYELPNYR

SEQ ID NO: 17848 - protein, 9 aa, Homo sapiens
  misc_feature: Table A; Target 17848; HLA-A*33:01; CRYGC; ENSG00000163254; CTA
VLYELPNYR

SEQ ID NO: 17849 - protein, 9 aa, Homo sapiens
  misc_feature: Table A; Target 17849; HLA-A*33:03; CRYGC; ENSG00000163254; CTA
VLYELPNYR

SEQ ID NO: 17850 - protein, 9 aa, Homo sapiens
  misc_feature: Table A; Target 17850; HLA-A*68:01; CRYGC; ENSG00000163254; CTA
VLYELPNYR

SEQ ID NO: 17851 - protein, 9 aa, Homo sapiens
  misc_feature: Table A; Target 17851; HLA-C*02:02; CRYGC; ENSG00000163254; CTA
VLYELPNYR

SEQ ID NO: 17852 - protein, 9 aa, Homo sapiens
  misc_feature: Table A; Target 17852; HLA-C*07:06; CRYGC; ENSG00000163254; CTA
VLYELPNYR

SEQ ID NO: 17853 - protein, 9 aa, Homo sapiens
  misc_feature: Table A; Target 17853; HLA-C*12:03; CRYGC; ENSG00000163254; CTA
VLYELPNYR

SEQ ID NO: 17854 - protein, 10 aa, Homo sapiens
  misc_feature: Table A; Target 17854; HLA-A*02:01; CRYGC; ENSG00000163254; CTA
VLYELPNYRG

SEQ ID NO: 17855 - protein, 11 aa, Homo sapiens
  misc_feature: Table A; Target 17855; HLA-A*03:01; CRYGC; ENSG00000163254; CTA
VLYELPNYRGR

SEQ ID NO: 17856 - protein, 11 aa, Homo sapiens
  misc_feature: Table A; Target 17856; HLA-A*31:01; CRYGC; ENSG00000163254; CTA
VLYELPNYRGR

SEQ ID NO: 17857 - protein, 8 aa, Homo sapiens
  misc_feature: Table A; Target 17857; HLA-B*57:01; CRYGC; ENSG00000163254; CTA
VSHRLRLY

SEQ ID NO: 17858 - protein, 9 aa, Homo sapiens
  misc_feature: Table A; Target 17858; HLA-A*29:02; CRYGC; ENSG00000163254; CTA
WMLYERPNY

SEQ ID NO: 17859 - protein, 9 aa, Homo sapiens
  misc_feature: Table A; Target 17859; HLA-A*29:02; CRYGC; ENSG00000163254; CTA
WVLYELPNY

SEQ ID NO: 17860 - protein, 9 aa, Homo sapiens
  misc_feature: Table A; Target 17860; HLA-A*01:01; CRYGC; ENSG00000163254; CTA
YEDRAFQGR

SEQ ID NO: 17861 - protein, 9 aa, Homo sapiens
  misc_feature: Table A; Target 17861; HLA-A*02:07; CRYGC; ENSG00000163254; CTA
YEDRAFQGR

SEQ ID NO: 17862 - protein, 9 aa, Homo sapiens
  misc_feature: Table A; Target 17862; HLA-A*31:01; CRYGC; ENSG00000163254; CTA
YEDRAFQGR

SEQ ID NO: 17863 - protein, 9 aa, Homo sapiens
  misc_feature: Table A; Target 17863; HLA-B*44:02; CRYGC; ENSG00000163254; CTA
YEDRAFQGR

SEQ ID NO: 17864 - protein, 9 aa, Homo sapiens
  misc_feature: Table A; Target 17864; HLA-B*44:03; CRYGC; ENSG00000163254; CTA
YEDRAFQGR

SEQ ID NO: 17865 - protein, 9 aa, Homo sapiens
  misc_feature: Table A; Target 17865; HLA-B*49:01; CRYGC; ENSG00000163254; CTA
YEDRAFQGR

SEQ ID NO: 17866 - protein, 11 aa, Homo sapiens
  misc_feature: Table A; Target 17866; HLA-A*01:01; CRYGC; ENSG00000163254; CTA
YEDRAFQGRSY

SEQ ID NO: 17867 - protein, 11 aa, Homo sapiens
  misc_feature: Table A; Target 17867; HLA-B*44:02; CRYGC; ENSG00000163254; CTA
YEDRAFQGRSY

SEQ ID NO: 17868 - protein, 11 aa, Homo sapiens
  misc_feature: Table A; Target 17868; HLA-B*44:03; CRYGC; ENSG00000163254; CTA
YEDRAFQGRSY

SEQ ID NO: 17869 - protein, 11 aa, Homo sapiens
  misc_feature: Table A; Target 17869; HLA-C*16:04; CRYGC; ENSG00000163254; CTA
YEDRAFQGRSY

SEQ ID NO: 17870 - protein, 11 aa, Homo sapiens
  misc_feature: Table A; Target 17870; HLA-B*44:02; CRYGC; ENSG00000163254; CTA
YELPNYRGRQY

SEQ ID NO: 17871 - protein, 11 aa, Homo sapiens
  misc_feature: Table A; Target 17871; HLA-B*44:03; CRYGC; ENSG00000163254; CTA
YELPNYRGRQY

SEQ ID NO: 17872 - protein, 9 aa, Homo sapiens
  misc_feature: Table A; Target 17872; HLA-B*37:01; CRYGC; ENSG00000163254; CTA
YEREDHKGL

SEQ ID NO: 17873 - protein, 9 aa, Homo sapiens
  misc_feature: Table A; Target 17873; HLA-B*40:01; CRYGC; ENSG00000163254; CTA
YEREDHKGL

SEQ ID NO: 17874 - protein, 9 aa, Homo sapiens
  misc_feature: Table A; Target 17874; HLA-B*40:02; CRYGC; ENSG00000163254; CTA
YEREDHKGL

SEQ ID NO: 17875 - protein, 9 aa, Homo sapiens
  misc_feature: Table A; Target 17875; HLA-B*44:02; CRYGC; ENSG00000163254; CTA
YEREDHKGL

SEQ ID NO: 17876 - protein, 9 aa, Homo sapiens
  misc_feature: Table A; Target 17876; HLA-B*49:01; CRYGC; ENSG00000163254; CTA
YEREDHKGL

SEQ ID NO: 17877 - protein, 8 aa, Homo sapiens
  misc_feature: Table A; Target 17877; HLA-B*40:02; CRYGC; ENSG00000163254; CTA
YERPNYQG

SEQ ID NO: 17878 - protein, 11 aa, Homo sapiens
  misc_feature: Table A; Target 17878; HLA-A*01:01; CRYGC; ENSG00000163254; CTA
YERPNYQGQQY

SEQ ID NO: 17879 - protein, 11 aa, Homo sapiens
  misc_feature: Table A; Target 17879; HLA-A*29:02; CRYGC; ENSG00000163254; CTA
YERPNYQGQQY

SEQ ID NO: 17880 - protein, 11 aa, Homo sapiens
  misc_feature: Table A; Target 17880; HLA-A*30:02; CRYGC; ENSG00000163254; CTA
YERPNYQGQQY

SEQ ID NO: 17881 - protein, 11 aa, Homo sapiens
  misc_feature: Table A; Target 17881; HLA-A*32:01; CRYGC; ENSG00000163254; CTA
YERPNYQGQQY

SEQ ID NO: 17882 - protein, 11 aa, Homo sapiens
  misc_feature: Table A; Target 17882; HLA-B*15:01; CRYGC; ENSG00000163254; CTA
YERPNYQGQQY

SEQ ID NO: 17883 - protein, 11 aa, Homo sapiens
  misc_feature: Table A; Target 17883; HLA-B*15:03; CRYGC; ENSG00000163254; CTA
YERPNYQGQQY

SEQ ID NO: 17884 - protein, 11 aa, Homo sapiens
  misc_feature: Table A; Target 17884; HLA-B*18:01; CRYGC; ENSG00000163254; CTA
YERPNYQGQQY

SEQ ID NO: 17885 - protein, 11 aa, Homo sapiens
  misc_feature: Table A; Target 17885; HLA-B*27:02; CRYGC; ENSG00000163254; CTA
YERPNYQGQQY

SEQ ID NO: 17886 - protein, 11 aa, Homo sapiens
  misc_feature: Table A; Target 17886; HLA-B*37:01; CRYGC; ENSG00000163254; CTA
YERPNYQGQQY

SEQ ID NO: 17887 - protein, 11 aa, Homo sapiens
  misc_feature: Table A; Target 17887; HLA-B*38:01; CRYGC; ENSG00000163254; CTA
YERPNYQGQQY

SEQ ID NO: 17888 - protein, 11 aa, Homo sapiens
  misc_feature: Table A; Target 17888; HLA-B*40:02; CRYGC; ENSG00000163254; CTA
YERPNYQGQQY

SEQ ID NO: 17889 - protein, 11 aa, Homo sapiens
  misc_feature: Table A; Target 17889; HLA-B*44:02; CRYGC; ENSG00000163254; CTA
YERPNYQGQQY

SEQ ID NO: 17890 - protein, 11 aa, Homo sapiens
  misc_feature: Table A; Target 17890; HLA-B*44:03; CRYGC; ENSG00000163254; CTA
YERPNYQGQQY

SEQ ID NO: 17891 - protein, 11 aa, Homo sapiens
  misc_feature: Table A; Target 17891; HLA-C*02:02; CRYGC; ENSG00000163254; CTA
YERPNYQGQQY

SEQ ID NO: 17892 - protein, 11 aa, Homo sapiens
  misc_feature: Table A; Target 17892; HLA-C*07:01; CRYGC; ENSG00000163254; CTA
YERPNYQGQQY

SEQ ID NO: 17893 - protein, 11 aa, Homo sapiens
  misc_feature: Table A; Target 17893; HLA-C*16:04; CRYGC; ENSG00000163254; CTA
YERPNYQGQQY

SEQ ID NO: 17894 - protein, 8 aa, Homo sapiens
  misc_feature: Table A; Target 17894; HLA-B*40:02; CRYGC; ENSG00000163254; CTA
YETTTDCP

SEQ ID NO: 17895 - protein, 8 aa, Homo sapiens
  misc_feature: Table A; Target 17895; HLA-B*49:01; CRYGC; ENSG00000163254; CTA
YETTTDCP

SEQ ID NO: 17896 - protein, 10 aa, Homo sapiens
  misc_feature: Table A; Target 17896; HLA-A*30:01; CRYGC; ENSG00000163254; CTA
YETTTDCPNL

SEQ ID NO: 17897 - protein, 10 aa, Homo sapiens
  misc_feature: Table A; Target 17897; HLA-B*27:05; CRYGC; ENSG00000163254; CTA
YETTTDCPNL

SEQ ID NO: 17898 - protein, 10 aa, Homo sapiens
  misc_feature: Table A; Target 17898; HLA-B*39:01; CRYGC; ENSG00000163254; CTA
YETTTDCPNL

SEQ ID NO: 17899 - protein, 10 aa, Homo sapiens
  misc_feature: Table A; Target 17899; HLA-B*40:01; CRYGC; ENSG00000163254; CTA
YETTTDCPNL

SEQ ID NO: 17900 - protein, 10 aa, Homo sapiens
  misc_feature: Table A; Target 17900; HLA-B*40:02; CRYGC; ENSG00000163254; CTA
YETTTDCPNL

SEQ ID NO: 17901 - protein, 10 aa, Homo sapiens
  misc_feature: Table A; Target 17901; HLA-C*07:01; CRYGC; ENSG00000163254; CTA
YETTTDCPNL

SEQ ID NO: 17902 - protein, 10 aa, Homo sapiens
  misc_feature: Table A; Target 17902; HLA-C*16:04; CRYGC; ENSG00000163254; CTA
YETTTDCPNL

SEQ ID NO: 17903 - protein, 8 aa, Homo sapiens
  misc_feature: Table A; Target 17903; HLA-A*01:01; CRYGC; ENSG00000163254; CTA
YLLRPQEY

SEQ ID NO: 17904 - protein, 8 aa, Homo sapiens
  misc_feature: Table A; Target 17904; HLA-A*29:02; CRYGC; ENSG00000163254; CTA
YLLRPQEY

SEQ ID NO: 17905 - protein, 8 aa, Homo sapiens
  misc_feature: Table A; Target 17905; HLA-A*32:01; CRYGC; ENSG00000163254; CTA
YLLRPQEY

SEQ ID NO: 17906 - protein, 8 aa, Homo sapiens
  misc_feature: Table A; Target 17906; HLA-B*08:01; CRYGC; ENSG00000163254; CTA
YLLRPQEY

SEQ ID NO: 17907 - protein, 8 aa, Homo sapiens
  misc_feature: Table A; Target 17907; HLA-B*15:01; CRYGC; ENSG00000163254; CTA
YLLRPQEY

SEQ ID NO: 17908 - protein, 8 aa, Homo sapiens
  misc_feature: Table A; Target 17908; HLA-B*15:03; CRYGC; ENSG00000163254; CTA
YLLRPQEY

SEQ ID NO: 17909 - protein, 8 aa, Homo sapiens
  misc_feature: Table A; Target 17909; HLA-B*46:01; CRYGC; ENSG00000163254; CTA
YLLRPQEY

SEQ ID NO: 17910 - protein, 8 aa, Homo sapiens
  misc_feature: Table A; Target 17910; HLA-B*57:01; CRYGC; ENSG00000163254; CTA
YLLRPQEY

SEQ ID NO: 17911 - protein, 8 aa, Homo sapiens
  misc_feature: Table A; Target 17911; HLA-B*58:01; CRYGC; ENSG00000163254; CTA
YLLRPQEY

SEQ ID NO: 17912 - protein, 8 aa, Homo sapiens
  misc_feature: Table A; Target 17912; HLA-C*07:01; CRYGC; ENSG00000163254; CTA
YLLRPQEY

SEQ ID NO: 17913 - protein, 8 aa, Homo sapiens
  misc_feature: Table A; Target 17913; HLA-C*07:02; CRYGC; ENSG00000163254; CTA
YLLRPQEY

SEQ ID NO: 17914 - protein, 8 aa, Homo sapiens
  misc_feature: Table A; Target 17914; HLA-C*07:04; CRYGC; ENSG00000163254; CTA
YLLRPQEY

SEQ ID NO: 17915 - protein, 8 aa, Homo sapiens
  misc_feature: Table A; Target 17915; HLA-C*16:01; CRYGC; ENSG00000163254; CTA
YLLRPQEY

SEQ ID NO: 17916 - protein, 9 aa, Homo sapiens
  misc_feature: Table A; Target 17916; HLA-A*33:01; CRYGC; ENSG00000163254; CTA
YLLRPQEYR

SEQ ID NO: 17917 - protein, 10 aa, Homo sapiens
  misc_feature: Table A; Target 17917; HLA-A*02:04; CRYGC; ENSG00000163254; CTA
YLLRPQEYRR

SEQ ID NO: 17918 - protein, 9 aa, Homo sapiens
  misc_feature: Table A; Target 17918; HLA-B*54:01; CRYGC; ENSG00000163254; CTA
YPDYQQWMG

SEQ ID NO: 17919 - protein, 10 aa, Homo sapiens
  misc_feature: Table A; Target 17919; HLA-B*35:03; CRYGC; ENSG00000163254; CTA
YPDYQQWMGL

SEQ ID NO: 17920 - protein, 8 aa, Homo sapiens
  misc_feature: Table A; Target 17920; HLA-A*02:01; CRYGC; ENSG00000163254; CTA
YQGQQYLL

SEQ ID NO: 17921 - protein, 8 aa, Homo sapiens
  misc_feature: Table A; Target 17921; HLA-A*02:04; CRYGC; ENSG00000163254; CTA
YQGQQYLL

SEQ ID NO: 17922 - protein, 8 aa, Homo sapiens
  misc_feature: Table A; Target 17922; HLA-A*23:01; CRYGC; ENSG00000163254; CTA
YQGQQYLL

SEQ ID NO: 17923 - protein, 8 aa, Homo sapiens
  misc_feature: Table A; Target 17923; HLA-A*30:01; CRYGC; ENSG00000163254; CTA
YQGQQYLL

SEQ ID NO: 17924 - protein, 8 aa, Homo sapiens
  misc_feature: Table A; Target 17924; HLA-B*13:02; CRYGC; ENSG00000163254; CTA
YQGQQYLL

SEQ ID NO: 17925 - protein, 8 aa, Homo sapiens
  misc_feature: Table A; Target 17925; HLA-B*15:01; CRYGC; ENSG00000163254; CTA
YQGQQYLL

SEQ ID NO: 17926 - protein, 8 aa, Homo sapiens
  misc_feature: Table A; Target 17926; HLA-B*27:05; CRYGC; ENSG00000163254; CTA
YQGQQYLL

SEQ ID NO: 17927 - protein, 8 aa, Homo sapiens
  misc_feature: Table A; Target 17927; HLA-B*38:01; CRYGC; ENSG00000163254; CTA
YQGQQYLL

SEQ ID NO: 17928 - protein, 8 aa, Homo sapiens
  misc_feature: Table A; Target 17928; HLA-B*39:01; CRYGC; ENSG00000163254; CTA
YQGQQYLL

SEQ ID NO: 17929 - protein, 8 aa, Homo sapiens
  misc_feature: Table A; Target 17929; HLA-C*06:02; CRYGC; ENSG00000163254; CTA
YQGQQYLL

SEQ ID NO: 17930 - protein, 8 aa, Homo sapiens
  misc_feature: Table A; Target 17930; HLA-C*07:02; CRYGC; ENSG00000163254; CTA
YQGQQYLL

SEQ ID NO: 17931 - protein, 8 aa, Homo sapiens
  misc_feature: Table A; Target 17931; HLA-C*07:04; CRYGC; ENSG00000163254; CTA
YQGQQYLL

SEQ ID NO: 17932 - protein, 8 aa, Homo sapiens
  misc_feature: Table A; Target 17932; HLA-C*12:03; CRYGC; ENSG00000163254; CTA
YQGQQYLL

SEQ ID NO: 17933 - protein, 9 aa, Homo sapiens
  misc_feature: Table A; Target 17933; HLA-A*29:02; CRYGC; ENSG00000163254; CTA
YQGQQYLLR

SEQ ID NO: 17934 - protein, 9 aa, Homo sapiens
  misc_feature: Table A; Target 17934; HLA-A*31:01; CRYGC; ENSG00000163254; CTA
YQGQQYLLR

SEQ ID NO: 17935 - protein, 9 aa, Homo sapiens
  misc_feature: Table A; Target 17935; HLA-C*07:06; CRYGC; ENSG00000163254; CTA
YQGQQYLLR

SEQ ID NO: 17936 - protein, 9 aa, Homo sapiens
  misc_feature: Table A; Target 17936; HLA-A*30:01; CSAG1; ENSG00000198930; TAA
ACWPAFTVL

SEQ ID NO: 17937 - protein, 9 aa, Homo sapiens
  misc_feature: Table A; Target 17937; HLA-B*15:03; CSAG1; ENSG00000198930; TAA
ACWPAFTVL

SEQ ID NO: 17938 - protein, 9 aa, Homo sapiens
  misc_feature: Table A; Target 17938; HLA-A*33:03; CSAG1; ENSG00000198930; TAA
AFTVLGEAR

SEQ ID NO: 17939 - protein, 9 aa, Homo sapiens
  misc_feature: Table A; Target 17939; HLA-C*14:02; CSAG1; ENSG00000198930; TAA
AFTVLGEAR

SEQ ID NO: 17940 - protein, 9 aa, Homo sapiens
  misc_feature: Table A; Target 17940; HLA-A*11:01; CSAG1; ENSG00000198930; TAA
ASSPFSNNH

SEQ ID NO: 17941 - protein, 9 aa, Homo sapiens
  misc_feature: Table A; Target 17941; HLA-A*30:02; CSAG1; ENSG00000198930; TAA
ASSPFSNNH

SEQ ID NO: 17942 - protein, 9 aa, Homo sapiens
  misc_feature: Table A; Target 17942; HLA-C*16:02; CSAG1; ENSG00000198930; TAA
ASSPFSNNH

SEQ ID NO: 17943 - protein, 9 aa, Homo sapiens
  misc_feature: Table A; Target 17943; HLA-C*16:01; CSAG1; ENSG00000198930; TAA
ATTACWPAF

SEQ ID NO: 17944 - protein, 9 aa, Homo sapiens
  misc_feature: Table A; Target 17944; HLA-A*25:01; CSAG1; ENSG00000198930; TAA
DQVDWSRLY

SEQ ID NO: 17945 - protein, 9 aa, Homo sapiens
  misc_feature: Table A; Target 17945; HLA-A*26:01; CSAG1; ENSG00000198930; TAA
DQVDWSRLY

SEQ ID NO: 17946 - protein, 9 aa, Homo sapiens
  misc_feature: Table A; Target 17946; HLA-A*29:02; CSAG1; ENSG00000198930; TAA
DQVDWSRLY

SEQ ID NO: 17947 - protein, 9 aa, Homo sapiens
  misc_feature: Table A; Target 17947; HLA-B*15:01; CSAG1; ENSG00000198930; TAA
DQVDWSRLY

SEQ ID NO: 17948 - protein, 9 aa, Homo sapiens
  misc_feature: Table A; Target 17948; HLA-B*15:03; CSAG1; ENSG00000198930; TAA
DQVDWSRLY

SEQ ID NO: 17949 - protein, 9 aa, Homo sapiens
  misc_feature: Table A; Target 17949; HLA-B*18:01; CSAG1; ENSG00000198930; TAA
DQVDWSRLY

SEQ ID NO: 17950 - protein, 9 aa, Homo sapiens
  misc_feature: Table A; Target 17950; HLA-B*44:02; CSAG1; ENSG00000198930; TAA
DQVDWSRLY

SEQ ID NO: 17951 - protein, 9 aa, Homo sapiens
  misc_feature: Table A; Target 17951; HLA-B*44:03; CSAG1; ENSG00000198930; TAA
DQVDWSRLY

SEQ ID NO: 17952 - protein, 9 aa, Homo sapiens
  misc_feature: Table A; Target 17952; HLA-C*07:01; CSAG1; ENSG00000198930; TAA
DQVDWSRLY

SEQ ID NO: 17953 - protein, 9 aa, Homo sapiens
  misc_feature: Table A; Target 17953; HLA-C*07:04; CSAG1; ENSG00000198930; TAA
DQVDWSRLY

SEQ ID NO: 17954 - protein, 9 aa, Homo sapiens
  misc_feature: Table A; Target 17954; HLA-C*12:03; CSAG1; ENSG00000198930; TAA
DQVDWSRLY

SEQ ID NO: 17955 - protein, 9 aa, Homo sapiens
  misc_feature: Table A; Target 17955; HLA-A*31:01; CSAG1; ENSG00000198930; TAA
DTGLVKMSR

SEQ ID NO: 17956 - protein, 9 aa, Homo sapiens
  misc_feature: Table A; Target 17956; HLA-A*33:01; CSAG1; ENSG00000198930; TAA
DTGLVKMSR

SEQ ID NO: 17957 - protein, 9 aa, Homo sapiens
  misc_feature: Table A; Target 17957; HLA-A*33:03; CSAG1; ENSG00000198930; TAA
DTGLVKMSR

SEQ ID NO: 17958 - protein, 9 aa, Homo sapiens
  misc_feature: Table A; Target 17958; HLA-A*68:01; CSAG1; ENSG00000198930; TAA
DTGLVKMSR

SEQ ID NO: 17959 - protein, 9 aa, Homo sapiens
  misc_feature: Table A; Target 17959; HLA-C*07:06; CSAG1; ENSG00000198930; TAA
DTGLVKMSR

SEQ ID NO: 17960 - protein, 9 aa, Homo sapiens
  misc_feature: Table A; Target 17960; HLA-A*25:01; CSAG1; ENSG00000198930; TAA
EARGDQVDW

SEQ ID NO: 17961 - protein, 9 aa, Homo sapiens
  misc_feature: Table A; Target 17961; HLA-A*33:03; CSAG1; ENSG00000198930; TAA
EARGDQVDW

SEQ ID NO: 17962 - protein, 9 aa, Homo sapiens
  misc_feature: Table A; Target 17962; HLA-B*57:01; CSAG1; ENSG00000198930; TAA
EARGDQVDW

SEQ ID NO: 17963 - protein, 9 aa, Homo sapiens
  misc_feature: Table A; Target 17963; HLA-C*07:06; CSAG1; ENSG00000198930; TAA
EARGDQVDW

SEQ ID NO: 17964 - protein, 11 aa, Homo sapiens
  misc_feature: Table A; Target 17964; HLA-A*33:01; CSAG1; ENSG00000198930; TAA
EARGDQVDWSR

SEQ ID NO: 17965 - protein, 11 aa, Homo sapiens
  misc_feature: Table A; Target 17965; HLA-A*33:03; CSAG1; ENSG00000198930; TAA
EARGDQVDWSR

SEQ ID NO: 17966 - protein, 8 aa, Homo sapiens
  misc_feature: Table A; Target 17966; HLA-C*16:01; CSAG1; ENSG00000198930; TAA
FSNNHPST

SEQ ID NO: 17967 - protein, 9 aa, Homo sapiens
  misc_feature: Table A; Target 17967; HLA-A*32:01; CSAG1; ENSG00000198930; TAA
FSNNHPSTP

SEQ ID NO: 17968 - protein, 9 aa, Homo sapiens
  misc_feature: Table A; Target 17968; HLA-C*16:01; CSAG1; ENSG00000198930; TAA
FSNNHPSTP

SEQ ID NO: 17969 - protein, 9 aa, Homo sapiens
  misc_feature: Table A; Target 17969; HLA-C*16:02; CSAG1; ENSG00000198930; TAA
FSNNHPSTP

SEQ ID NO: 17970 - protein, 10 aa, Homo sapiens
  misc_feature: Table A; Target 17970; HLA-A*03:01; CSAG1; ENSG00000198930; TAA
FSNNHPSTPK

SEQ ID NO: 17971 - protein, 10 aa, Homo sapiens
  misc_feature: Table A; Target 17971; HLA-A*03:02; CSAG1; ENSG00000198930; TAA
FSNNHPSTPK

SEQ ID NO: 17972 - protein, 10 aa, Homo sapiens
  misc_feature: Table A; Target 17972; HLA-A*11:01; CSAG1; ENSG00000198930; TAA
FSNNHPSTPK

SEQ ID NO: 17973 - protein, 10 aa, Homo sapiens
  misc_feature: Table A; Target 17973; HLA-A*68:01; CSAG1; ENSG00000198930; TAA
FSNNHPSTPK

SEQ ID NO: 17974 - protein, 10 aa, Homo sapiens
  misc_feature: Table A; Target 17974; HLA-B*44:02; CSAG1; ENSG00000198930; TAA
GDQVDWSRLY

SEQ ID NO: 17975 - protein, 10 aa, Homo sapiens
  misc_feature: Table A; Target 17975; HLA-C*07:01; CSAG1; ENSG00000198930; TAA
GDQVDWSRLY

SEQ ID NO: 17976 - protein, 8 aa, Homo sapiens
  misc_feature: Table A; Target 17976; HLA-B*49:01; CSAG1; ENSG00000198930; TAA
GEARGDQV

SEQ ID NO: 17977 - protein, 10 aa, Homo sapiens
  misc_feature: Table A; Target 17977; HLA-A*30:01; CSAG1; ENSG00000198930; TAA
GEARGDQVDW

SEQ ID NO: 17978 - protein, 10 aa, Homo sapiens
  misc_feature: Table A; Target 17978; HLA-B*27:02; CSAG1; ENSG00000198930; TAA
GEARGDQVDW

SEQ ID NO: 17979 - protein, 10 aa, Homo sapiens
  misc_feature: Table A; Target 17979; HLA-B*40:01; CSAG1; ENSG00000198930; TAA
GEARGDQVDW

SEQ ID NO: 17980 - protein, 10 aa, Homo sapiens
  misc_feature: Table A; Target 17980; HLA-B*44:02; CSAG1; ENSG00000198930; TAA
GEARGDQVDW

SEQ ID NO: 17981 - protein, 10 aa, Homo sapiens
  misc_feature: Table A; Target 17981; HLA-B*44:03; CSAG1; ENSG00000198930; TAA
GEARGDQVDW

SEQ ID NO: 17982 - protein, 10 aa, Homo sapiens
  misc_feature: Table A; Target 17982; HLA-B*57:01; CSAG1; ENSG00000198930; TAA
GEARGDQVDW

SEQ ID NO: 17983 - protein, 10 aa, Homo sapiens
  misc_feature: Table A; Target 17983; HLA-B*58:01; CSAG1; ENSG00000198930; TAA
GEARGDQVDW

SEQ ID NO: 17984 - protein, 10 aa, Homo sapiens
  misc_feature: Table A; Target 17984; HLA-C*16:04; CSAG1; ENSG00000198930; TAA
GEARGDQVDW

SEQ ID NO: 17985 - protein, 9 aa, Homo sapiens
  misc_feature: Table A; Target 17985; HLA-B*55:01; CSAG1; ENSG00000198930; TAA
GPVKEVPGT

SEQ ID NO: 17986 - protein, 9 aa, Homo sapiens
  misc_feature: Table A; Target 17986; HLA-B*56:01; CSAG1; ENSG00000198930; TAA
GPVKEVPGT

SEQ ID NO: 17987 - protein, 11 aa, Homo sapiens
  misc_feature: Table A; Target 17987; HLA-B*56:01; CSAG1; ENSG00000198930; TAA
GPVKEVPGTKG

SEQ ID NO: 17988 - protein, 10 aa, Homo sapiens
  misc_feature: Table A; Target 17988; HLA-B*40:02; CSAG1; ENSG00000198930; TAA
KEVPGTKGSP

SEQ ID NO: 17989 - protein, 11 aa, Homo sapiens
  misc_feature: Table A; Target 17989; HLA-C*07:02; CSAG1; ENSG00000198930; TAA
KGPVKEVPGTK

SEQ ID NO: 17990 - protein, 8 aa, Homo sapiens
  misc_feature: Table A; Target 17990; HLA-B*07:02; CSAG1; ENSG00000198930; TAA
KPRASSPF

SEQ ID NO: 17991 - protein, 8 aa, Homo sapiens
  misc_feature: Table A; Target 17991; HLA-C*07:02; CSAG1; ENSG00000198930; TAA
KPRASSPF

SEQ ID NO: 17992 - protein, 9 aa, Homo sapiens
  misc_feature: Table A; Target 17992; HLA-A*03:01; CSAG1; ENSG00000198930; TAA
LYRDTGLVK

SEQ ID NO: 17993 - protein, 9 aa, Homo sapiens
  misc_feature: Table A; Target 17993; HLA-A*33:01; CSAG1; ENSG00000198930; TAA
LYRDTGLVK

SEQ ID NO: 17994 - protein, 9 aa, Homo sapiens
  misc_feature: Table A; Target 17994; HLA-A*33:03; CSAG1; ENSG00000198930; TAA
LYRDTGLVK

SEQ ID NO: 17995 - protein, 9 aa, Homo sapiens
  misc_feature: Table A; Target 17995; HLA-C*14:02; CSAG1; ENSG00000198930; TAA
LYRDTGLVK

SEQ ID NO: 17996 - protein, 10 aa, Homo sapiens
  misc_feature: Table A; Target 17996; HLA-A*23:01; CSAG1; ENSG00000198930; TAA
LYRDTGLVKM

SEQ ID NO: 17997 - protein, 10 aa, Homo sapiens
  misc_feature: Table A; Target 17997; HLA-A*24:02; CSAG1; ENSG00000198930; TAA
LYRDTGLVKM

SEQ ID NO: 17998 - protein, 10 aa, Homo sapiens
  misc_feature: Table A; Target 17998; HLA-A*31:01; CSAG1; ENSG00000198930; TAA
LYRDTGLVKM

SEQ ID NO: 17999 - protein, 10 aa, Homo sapiens
  misc_feature: Table A; Target 17999; HLA-A*33:01; CSAG1; ENSG00000198930; TAA
LYRDTGLVKM

SEQ ID NO: 18000 - protein, 10 aa, Homo sapiens
  misc_feature: Table A; Target 18000; HLA-B*40:02; CSAG1; ENSG00000198930; TAA
LYRDTGLVKM

SEQ ID NO: 18001 - protein, 10 aa, Homo sapiens
  misc_feature: Table A; Target 18001; HLA-C*14:02; CSAG1; ENSG00000198930; TAA
LYRDTGLVKM

SEQ ID NO: 18002 - protein, 8 aa, Homo sapiens
  misc_feature: Table A; Target 18002; HLA-B*58:01; CSAG1; ENSG00000198930; TAA
MSATTACW

SEQ ID NO: 18003 - protein, 8 aa, Homo sapiens
  misc_feature: Table A; Target 18003; HLA-A*33:01; CSAG1; ENSG00000198930; TAA
NNHPSTPK

SEQ ID NO: 18004 - protein, 8 aa, Homo sapiens
  misc_feature: Table A; Target 18004; HLA-C*04:01; CSAG1; ENSG00000198930; TAA
NNHPSTPK

SEQ ID NO: 18005 - protein, 9 aa, Homo sapiens
  misc_feature: Table A; Target 18005; HLA-A*33:01; CSAG1; ENSG00000198930; TAA
NNHPSTPKR

SEQ ID NO: 18006 - protein, 9 aa, Homo sapiens
  misc_feature: Table A; Target 18006; HLA-A*33:03; CSAG1; ENSG00000198930; TAA
NNHPSTPKR

SEQ ID NO: 18007 - protein, 10 aa, Homo sapiens
  misc_feature: Table A; Target 18007; HLA-A*68:01; CSAG1; ENSG00000198930; TAA
PAFTVLGEAR

SEQ ID NO: 18008 - protein, 10 aa, Homo sapiens
  misc_feature: Table A; Target 18008; HLA-B*27:02; CSAG1; ENSG00000198930; TAA
PAFTVLGEAR

SEQ ID NO: 18009 - protein, 9 aa, Homo sapiens
  misc_feature: Table A; Target 18009; HLA-A*03:01; CSAG1; ENSG00000198930; TAA
QVDWSRLYR

SEQ ID NO: 18010 - protein, 9 aa, Homo sapiens
  misc_feature: Table A; Target 18010; HLA-A*31:01; CSAG1; ENSG00000198930; TAA
QVDWSRLYR

SEQ ID NO: 18011 - protein, 8 aa, Homo sapiens
  misc_feature: Table A; Target 18011; HLA-B*37:01; CSAG1; ENSG00000198930; TAA
RDTGLVKM

SEQ ID NO: 18012 - protein, 8 aa, Homo sapiens
  misc_feature: Table A; Target 18012; HLA-B*40:02; CSAG1; ENSG00000198930; TAA
RDTGLVKM

SEQ ID NO: 18013 - protein, 8 aa, Homo sapiens
  misc_feature: Table A; Target 18013; HLA-C*06:02; CSAG1; ENSG00000198930; TAA
RDTGLVKM

SEQ ID NO: 18014 - protein, 8 aa, Homo sapiens
  misc_feature: Table A; Target 18014; HLA-C*07:01; CSAG1; ENSG00000198930; TAA
RDTGLVKM

SEQ ID NO: 18015 - protein, 8 aa, Homo sapiens
  misc_feature: Table A; Target 18015; HLA-C*16:02; CSAG1; ENSG00000198930; TAA
RDTGLVKM

SEQ ID NO: 18016 - protein, 10 aa, Homo sapiens
  misc_feature: Table A; Target 18016; HLA-A*31:01; CSAG1; ENSG00000198930; TAA
RDTGLVKMSR

SEQ ID NO: 18017 - protein, 9 aa, Homo sapiens
  misc_feature: Table A; Target 18017; HLA-A*02:03; CSAG1; ENSG00000198930; TAA
REKGPVKEV

SEQ ID NO: 18018 - protein, 9 aa, Homo sapiens
  misc_feature: Table A; Target 18018; HLA-B*37:01; CSAG1; ENSG00000198930; TAA
REKGPVKEV

SEQ ID NO: 18019 - protein, 9 aa, Homo sapiens
  misc_feature: Table A; Target 18019; HLA-B*40:02; CSAG1; ENSG00000198930; TAA
REKGPVKEV

SEQ ID NO: 18020 - protein, 9 aa, Homo sapiens
  misc_feature: Table A; Target 18020; HLA-B*49:01; CSAG1; ENSG00000198930; TAA
REKGPVKEV

SEQ ID NO: 18021 - protein, 10 aa, Homo sapiens
  misc_feature: Table A; Target 18021; HLA-B*40:02; CSAG1; ENSG00000198930; TAA
REKGPVKEVP

SEQ ID NO: 18022 - protein, 9 aa, Homo sapiens
  misc_feature: Table A; Target 18022; HLA-B*15:03; CSAG1; ENSG00000198930; TAA
RKPRASSPF

SEQ ID NO: 18023 - protein, 9 aa, Homo sapiens
  misc_feature: Table A; Target 18023; HLA-A*02:03; CSAG1; ENSG00000198930; TAA
RLYRDTGLV

SEQ ID NO: 18024 - protein, 9 aa, Homo sapiens
  misc_feature: Table A; Target 18024; HLA-A*02:04; CSAG1; ENSG00000198930; TAA
RLYRDTGLV

SEQ ID NO: 18025 - protein, 10 aa, Homo sapiens
  misc_feature: Table A; Target 18025; HLA-A*03:01; CSAG1; ENSG00000198930; TAA
RLYRDTGLVK

SEQ ID NO: 18026 - protein, 10 aa, Homo sapiens
  misc_feature: Table A; Target 18026; HLA-A*03:02; CSAG1; ENSG00000198930; TAA
RLYRDTGLVK

SEQ ID NO: 18027 - protein, 10 aa, Homo sapiens
  misc_feature: Table A; Target 18027; HLA-A*11:01; CSAG1; ENSG00000198930; TAA
RLYRDTGLVK

SEQ ID NO: 18028 - protein, 10 aa, Homo sapiens
  misc_feature: Table A; Target 18028; HLA-A*31:01; CSAG1; ENSG00000198930; TAA
RLYRDTGLVK

SEQ ID NO: 18029 - protein, 11 aa, Homo sapiens
  misc_feature: Table A; Target 18029; HLA-A*02:01; CSAG1; ENSG00000198930; TAA
RLYRDTGLVKM

SEQ ID NO: 18030 - protein, 11 aa, Homo sapiens
  misc_feature: Table A; Target 18030; HLA-A*02:03; CSAG1; ENSG00000198930; TAA
RLYRDTGLVKM

SEQ ID NO: 18031 - protein, 11 aa, Homo sapiens
  misc_feature: Table A; Target 18031; HLA-A*02:04; CSAG1; ENSG00000198930; TAA
RLYRDTGLVKM

SEQ ID NO: 18032 - protein, 11 aa, Homo sapiens
  misc_feature: Table A; Target 18032; HLA-A*02:07; CSAG1; ENSG00000198930; TAA
RLYRDTGLVKM

SEQ ID NO: 18033 - protein, 11 aa, Homo sapiens
  misc_feature: Table A; Target 18033; HLA-A*03:01; CSAG1; ENSG00000198930; TAA
RLYRDTGLVKM

SEQ ID NO: 18034 - protein, 11 aa, Homo sapiens
  misc_feature: Table A; Target 18034; HLA-A*31:01; CSAG1; ENSG00000198930; TAA
RLYRDTGLVKM

SEQ ID NO: 18035 - protein, 11 aa, Homo sapiens
  misc_feature: Table A; Target 18035; HLA-B*57:01; CSAG1; ENSG00000198930; TAA
RLYRDTGLVKM

SEQ ID NO: 18036 - protein, 9 aa, Homo sapiens
  misc_feature: Table A; Target 18036; HLA-B*54:01; CSAG1; ENSG00000198930; TAA
SATTACWPA

SEQ ID NO: 18037 - protein, 9 aa, Homo sapiens
  misc_feature: Table A; Target 18037; HLA-A*03:01; CSAG1; ENSG00000198930; TAA
SNNHPSTPK

SEQ ID NO: 18038 - protein, 9 aa, Homo sapiens
  misc_feature: Table A; Target 18038; HLA-A*03:02; CSAG1; ENSG00000198930; TAA
SNNHPSTPK

SEQ ID NO: 18039 - protein, 9 aa, Homo sapiens
  misc_feature: Table A; Target 18039; HLA-A*11:01; CSAG1; ENSG00000198930; TAA
SNNHPSTPK

SEQ ID NO: 18040 - protein, 9 aa, Homo sapiens
  misc_feature: Table A; Target 18040; HLA-A*33:01; CSAG1; ENSG00000198930; TAA
SNNHPSTPK

SEQ ID NO: 18041 - protein, 9 aa, Homo sapiens
  misc_feature: Table A; Target 18041; HLA-A*33:03; CSAG1; ENSG00000198930; TAA
SNNHPSTPK

SEQ ID NO: 18042 - protein, 9 aa, Homo sapiens
  misc_feature: Table A; Target 18042; HLA-B*27:05; CSAG1; ENSG00000198930; TAA
SNNHPSTPK

SEQ ID NO: 18043 - protein, 9 aa, Homo sapiens
  misc_feature: Table A; Target 18043; HLA-C*07:06; CSAG1; ENSG00000198930; TAA
SNNHPSTPK

SEQ ID NO: 18044 - protein, 8 aa, Homo sapiens
  misc_feature: Table A; Target 18044; HLA-B*56:01; CSAG1; ENSG00000198930; TAA
SPFSNNHP

SEQ ID NO: 18045 - protein, 9 aa, Homo sapiens
  misc_feature: Table A; Target 18045; HLA-B*54:01; CSAG1; ENSG00000198930; TAA
SPFSNNHPS

SEQ ID NO: 18046 - protein, 9 aa, Homo sapiens
  misc_feature: Table A; Target 18046; HLA-B*55:01; CSAG1; ENSG00000198930; TAA
SPFSNNHPS

SEQ ID NO: 18047 - protein, 9 aa, Homo sapiens
  misc_feature: Table A; Target 18047; HLA-B*56:01; CSAG1; ENSG00000198930; TAA
SPFSNNHPS

SEQ ID NO: 18048 - protein, 9 aa, Homo sapiens
  misc_feature: Table A; Target 18048; HLA-C*04:01; CSAG1; ENSG00000198930; TAA
SPFSNNHPS

SEQ ID NO: 18049 - protein, 9 aa, Homo sapiens
  misc_feature: Table A; Target 18049; HLA-C*06:02; CSAG1; ENSG00000198930; TAA
SPFSNNHPS

SEQ ID NO: 18050 - protein, 9 aa, Homo sapiens
  misc_feature: Table A; Target 18050; HLA-C*07:01; CSAG1; ENSG00000198930; TAA
SPFSNNHPS

SEQ ID NO: 18051 - protein, 10 aa, Homo sapiens
  misc_feature: Table A; Target 18051; HLA-B*07:02; CSAG1; ENSG00000198930; TAA
SPFSNNHPST

SEQ ID NO: 18052 - protein, 10 aa, Homo sapiens
  misc_feature: Table A; Target 18052; HLA-B*54:01; CSAG1; ENSG00000198930; TAA
SPFSNNHPST

SEQ ID NO: 18053 - protein, 10 aa, Homo sapiens
  misc_feature: Table A; Target 18053; HLA-B*55:01; CSAG1; ENSG00000198930; TAA
SPFSNNHPST

SEQ ID NO: 18054 - protein, 10 aa, Homo sapiens
  misc_feature: Table A; Target 18054; HLA-B*56:01; CSAG1; ENSG00000198930; TAA
SPFSNNHPST

SEQ ID NO: 18055 - protein, 10 aa, Homo sapiens
  misc_feature: Table A; Target 18055; HLA-C*07:02; CSAG1; ENSG00000198930; TAA
SPFSNNHPST

SEQ ID NO: 18056 - protein, 11 aa, Homo sapiens
  misc_feature: Table A; Target 18056; HLA-B*07:02; CSAG1; ENSG00000198930; TAA
SPFSNNHPSTP

SEQ ID NO: 18057 - protein, 11 aa, Homo sapiens
  misc_feature: Table A; Target 18057; HLA-B*54:01; CSAG1; ENSG00000198930; TAA
SPFSNNHPSTP

SEQ ID NO: 18058 - protein, 11 aa, Homo sapiens
  misc_feature: Table A; Target 18058; HLA-B*55:01; CSAG1; ENSG00000198930; TAA
SPFSNNHPSTP

SEQ ID NO: 18059 - protein, 11 aa, Homo sapiens
  misc_feature: Table A; Target 18059; HLA-B*56:01; CSAG1; ENSG00000198930; TAA
SPFSNNHPSTP

SEQ ID NO: 18060 - protein, 11 aa, Homo sapiens
  misc_feature: Table A; Target 18060; HLA-C*07:02; CSAG1; ENSG00000198930; TAA
SPFSNNHPSTP

SEQ ID NO: 18061 - protein, 9 aa, Homo sapiens
  misc_feature: Table A; Target 18061; HLA-A*68:02; CSAG1; ENSG00000198930; TAA
TACWPAFTV

SEQ ID NO: 18062 - protein, 9 aa, Homo sapiens
  misc_feature: Table A; Target 18062; HLA-B*51:01; CSAG1; ENSG00000198930; TAA
TACWPAFTV

SEQ ID NO: 18063 - protein, 9 aa, Homo sapiens
  misc_feature: Table A; Target 18063; HLA-B*54:01; CSAG1; ENSG00000198930; TAA
TACWPAFTV

SEQ ID NO: 18064 - protein, 10 aa, Homo sapiens
  misc_feature: Table A; Target 18064; HLA-A*68:02; CSAG1; ENSG00000198930; TAA
TTACWPAFTV

SEQ ID NO: 18065 - protein, 10 aa, Homo sapiens
  misc_feature: Table A; Target 18065; HLA-A*02:01; CSAG1; ENSG00000198930; TAA
VLGEARGDQV

SEQ ID NO: 18066 - protein, 10 aa, Homo sapiens
  misc_feature: Table A; Target 18066; HLA-A*02:03; CSAG1; ENSG00000198930; TAA
VLGEARGDQV

SEQ ID NO: 18067 - protein, 10 aa, Homo sapiens
  misc_feature: Table A; Target 18067; HLA-A*02:07; CSAG1; ENSG00000198930; TAA
VLGEARGDQV

SEQ ID NO: 18068 - protein, 10 aa, Homo sapiens
  misc_feature: Table A; Target 18068; HLA-B*55:01; CSAG1; ENSG00000198930; TAA
VLGEARGDQV

SEQ ID NO: 18069 - protein, 10 aa, Homo sapiens
  misc_feature: Table A; Target 18069; HLA-B*54:01; CSAG1; ENSG00000198930; TAA
WPAFTVLGEA

SEQ ID NO: 18070 - protein, 10 aa, Homo sapiens
  misc_feature: Table A; Target 18070; HLA-B*56:01; CSAG1; ENSG00000198930; TAA
WPAFTVLGEA

SEQ ID NO: 18071 - protein, 9 aa, Homo sapiens
  misc_feature: Table A; Target 18071; HLA-A*01:01; CSAG1; ENSG00000198930; TAA
YRDTGLVKM

SEQ ID NO: 18072 - protein, 9 aa, Homo sapiens
  misc_feature: Table A; Target 18072; HLA-A*02:01; CSAG1; ENSG00000198930; TAA
YRDTGLVKM

SEQ ID NO: 18073 - protein, 9 aa, Homo sapiens
  misc_feature: Table A; Target 18073; HLA-A*02:07; CSAG1; ENSG00000198930; TAA
YRDTGLVKM

SEQ ID NO: 18074 - protein, 9 aa, Homo sapiens
  misc_feature: Table A; Target 18074; HLA-B*27:05; CSAG1; ENSG00000198930; TAA
YRDTGLVKM

SEQ ID NO: 18075 - protein, 9 aa, Homo sapiens
  misc_feature: Table A; Target 18075; HLA-B*38:01; CSAG1; ENSG00000198930; TAA
YRDTGLVKM

SEQ ID NO: 18076 - protein, 9 aa, Homo sapiens
  misc_feature: Table A; Target 18076; HLA-B*39:01; CSAG1; ENSG00000198930; TAA
YRDTGLVKM

SEQ ID NO: 18077 - protein, 9 aa, Homo sapiens
  misc_feature: Table A; Target 18077; HLA-B*40:01; CSAG1; ENSG00000198930; TAA
YRDTGLVKM

SEQ ID NO: 18078 - protein, 9 aa, Homo sapiens
  misc_feature: Table A; Target 18078; HLA-B*55:01; CSAG1; ENSG00000198930; TAA
YRDTGLVKM

SEQ ID NO: 18079 - protein, 9 aa, Homo sapiens
  misc_feature: Table A; Target 18079; HLA-C*02:02; CSAG1; ENSG00000198930; TAA
YRDTGLVKM

SEQ ID NO: 18080 - protein, 9 aa, Homo sapiens
  misc_feature: Table A; Target 18080; HLA-C*04:01; CSAG1; ENSG00000198930; TAA
YRDTGLVKM

SEQ ID NO: 18081 - protein, 9 aa, Homo sapiens
  misc_feature: Table A; Target 18081; HLA-C*05:01; CSAG1; ENSG00000198930; TAA
YRDTGLVKM

SEQ ID NO: 18082 - protein, 9 aa, Homo sapiens
  misc_feature: Table A; Target 18082; HLA-C*06:02; CSAG1; ENSG00000198930; TAA
YRDTGLVKM

SEQ ID NO: 18083 - protein, 9 aa, Homo sapiens
  misc_feature: Table A; Target 18083; HLA-C*07:02; CSAG1; ENSG00000198930; TAA
YRDTGLVKM

SEQ ID NO: 18084 - protein, 9 aa, Homo sapiens
  misc_feature: Table A; Target 18084; HLA-C*07:04; CSAG1; ENSG00000198930; TAA
YRDTGLVKM

SEQ ID NO: 18085 - protein, 9 aa, Homo sapiens
  misc_feature: Table A; Target 18085; HLA-C*12:03; CSAG1; ENSG00000198930; TAA
YRDTGLVKM

SEQ ID NO: 18086 - protein, 9 aa, Homo sapiens
  misc_feature: Table A; Target 18086; HLA-C*16:02; CSAG1; ENSG00000198930; TAA
YRDTGLVKM

SEQ ID NO: 18087 - protein, 9 aa, Homo sapiens
  misc_feature: Table A; Target 18087; HLA-C*16:04; CSAG1; ENSG00000198930; TAA
YRDTGLVKM

SEQ ID NO: 18088 - protein, 9 aa, Homo sapiens
  misc_feature: Table A; Target 18088; HLA-C*03:04; CT62; ENSG00000225362; TAA
AAQRLHVEL

SEQ ID NO: 18089 - protein, 9 aa, Homo sapiens
  misc_feature: Table A; Target 18089; HLA-C*12:03; CT62; ENSG00000225362; TAA
AAQRLHVEL

SEQ ID NO: 18090 - protein, 9 aa, Homo sapiens
  misc_feature: Table A; Target 18090; HLA-C*16:01; CT62; ENSG00000225362; TAA
AAQRLHVEL

SEQ ID NO: 18091 - protein, 9 aa, Homo sapiens
  misc_feature: Table A; Target 18091; HLA-C*16:02; CT62; ENSG00000225362; TAA
AAQRLHVEL

SEQ ID NO: 18092 - protein, 10 aa, Homo sapiens
  misc_feature: Table A; Target 18092; HLA-B*57:01; CT62; ENSG00000225362; TAA
AAQRLHVELW

SEQ ID NO: 18093 - protein, 8 aa, Homo sapiens
  misc_feature: Table A; Target 18093; HLA-B*37:01; CT62; ENSG00000225362; TAA
ADLQSEFL

SEQ ID NO: 18094 - protein, 8 aa, Homo sapiens
  misc_feature: Table A; Target 18094; HLA-B*08:01; CT62; ENSG00000225362; TAA
AQRLHVEL

SEQ ID NO: 18095 - protein, 8 aa, Homo sapiens
  misc_feature: Table A; Target 18095; HLA-B*37:01; CT62; ENSG00000225362; TAA
AQRLHVEL

SEQ ID NO: 18096 - protein, 9 aa, Homo sapiens
  misc_feature: Table A; Target 18096; HLA-B*44:02; CT62; ENSG00000225362; TAA
AQRLHVELW

SEQ ID NO: 18097 - protein, 9 aa, Homo sapiens
  misc_feature: Table A; Target 18097; HLA-B*44:03; CT62; ENSG00000225362; TAA
AQRLHVELW

SEQ ID NO: 18098 - protein, 9 aa, Homo sapiens
  misc_feature: Table A; Target 18098; HLA-B*57:01; CT62; ENSG00000225362; TAA
AQRLHVELW

SEQ ID NO: 18099 - protein, 8 aa, Homo sapiens
  misc_feature: Table A; Target 18099; HLA-A*32:01; CT62; ENSG00000225362; TAA
ATLQVISF

SEQ ID NO: 18100 - protein, 8 aa, Homo sapiens
  misc_feature: Table A; Target 18100; HLA-B*37:01; CT62; ENSG00000225362; TAA
ATLQVISF

SEQ ID NO: 18101 - protein, 8 aa, Homo sapiens
  misc_feature: Table A; Target 18101; HLA-B*57:01; CT62; ENSG00000225362; TAA
ATLQVISF

SEQ ID NO: 18102 - protein, 8 aa, Homo sapiens
  misc_feature: Table A; Target 18102; HLA-B*58:01; CT62; ENSG00000225362; TAA
ATLQVISF

SEQ ID NO: 18103 - protein, 10 aa, Homo sapiens
  misc_feature: Table A; Target 18103; HLA-A*30:02; CT62; ENSG00000225362; TAA
ATLQVISFSF

SEQ ID NO: 18104 - protein, 10 aa, Homo sapiens
  misc_feature: Table A; Target 18104; HLA-B*57:01; CT62; ENSG00000225362; TAA
ATLQVISFSF

SEQ ID NO: 18105 - protein, 9 aa, Homo sapiens
  misc_feature: Table A; Target 18105; HLA-A*23:01; CT62; ENSG00000225362; TAA
AYSHTHRTF

SEQ ID NO: 18106 - protein, 9 aa, Homo sapiens
  misc_feature: Table A; Target 18106; HLA-A*24:02; CT62; ENSG00000225362; TAA
AYSHTHRTF

SEQ ID NO: 18107 - protein, 9 aa, Homo sapiens
  misc_feature: Table A; Target 18107; HLA-C*14:02; CT62; ENSG00000225362; TAA
AYSHTHRTF

SEQ ID NO: 18108 - protein, 9 aa, Homo sapiens
  misc_feature: Table A; Target 18108; HLA-C*16:01; CT62; ENSG00000225362; TAA
AYSHTHRTF

SEQ ID NO: 18109 - protein, 9 aa, Homo sapiens
  misc_feature: Table A; Target 18109; HLA-C*16:02; CT62; ENSG00000225362; TAA
AYSHTHRTF

SEQ ID NO: 18110 - protein, 9 aa, Homo sapiens
  misc_feature: Table A; Target 18110; HLA-A*31:01; CT62; ENSG00000225362; TAA
CGSQPAAQR

SEQ ID NO: 18111 - protein, 9 aa, Homo sapiens
  misc_feature: Table A; Target 18111; HLA-A*33:01; CT62; ENSG00000225362; TAA
CGSQPAAQR

SEQ ID NO: 18112 - protein, 9 aa, Homo sapiens
  misc_feature: Table A; Target 18112; HLA-A*68:01; CT62; ENSG00000225362; TAA
CGSQPAAQR

SEQ ID NO: 18113 - protein, 9 aa, Homo sapiens
  misc_feature: Table A; Target 18113; HLA-C*07:06; CT62; ENSG00000225362; TAA
CGSQPAAQR

SEQ ID NO: 18114 - protein, 8 aa, Homo sapiens
  misc_feature: Table A; Target 18114; HLA-A*33:01; CT62; ENSG00000225362; TAA
DMSKMVSR

SEQ ID NO: 18115 - protein, 8 aa, Homo sapiens
  misc_feature: Table A; Target 18115; HLA-A*33:03; CT62; ENSG00000225362; TAA
DMSKMVSR

SEQ ID NO: 18116 - protein, 9 aa, Homo sapiens
  misc_feature: Table A; Target 18116; HLA-A*33:01; CT62; ENSG00000225362; TAA
DMSKMVSRR

SEQ ID NO: 18117 - protein, 9 aa, Homo sapiens
  misc_feature: Table A; Target 18117; HLA-A*33:03; CT62; ENSG00000225362; TAA
DMSKMVSRR

SEQ ID NO: 18118 - protein, 9 aa, Homo sapiens
  misc_feature: Table A; Target 18118; HLA-A*68:01; CT62; ENSG00000225362; TAA
DMSKMVSRR

SEQ ID NO: 18119 - protein, 9 aa, Homo sapiens
  misc_feature: Table A; Target 18119; HLA-A*25:01; CT62; ENSG00000225362; TAA
DSHEVSGSL

SEQ ID NO: 18120 - protein, 9 aa, Homo sapiens
  misc_feature: Table A; Target 18120; HLA-A*33:01; CT62; ENSG00000225362; TAA
DSHEVSGSL

SEQ ID NO: 18121 - protein, 9 aa, Homo sapiens
  misc_feature: Table A; Target 18121; HLA-B*35:03; CT62; ENSG00000225362; TAA
DSHEVSGSL

SEQ ID NO: 18122 - protein, 9 aa, Homo sapiens
  misc_feature: Table A; Target 18122; HLA-B*51:01; CT62; ENSG00000225362; TAA
DSHEVSGSL

SEQ ID NO: 18123 - protein, 9 aa, Homo sapiens
  misc_feature: Table A; Target 18123; HLA-C*01:02; CT62; ENSG00000225362; TAA
DSHEVSGSL

SEQ ID NO: 18124 - protein, 9 aa, Homo sapiens
  misc_feature: Table A; Target 18124; HLA-C*03:04; CT62; ENSG00000225362; TAA
DSHEVSGSL

SEQ ID NO: 18125 - protein, 11 aa, Homo sapiens
  misc_feature: Table A; Target 18125; HLA-A*33:01; CT62; ENSG00000225362; TAA
DSHEVSGSLQA

SEQ ID NO: 18126 - protein, 9 aa, Homo sapiens
  misc_feature: Table A; Target 18126; HLA-A*11:01; CT62; ENSG00000225362; TAA
EDMSKMVSR

SEQ ID NO: 18127 - protein, 9 aa, Homo sapiens
  misc_feature: Table A; Target 18127; HLA-A*25:01; CT62; ENSG00000225362; TAA
EDMSKMVSR

SEQ ID NO: 18128 - protein, 9 aa, Homo sapiens
  misc_feature: Table A; Target 18128; HLA-A*26:01; CT62; ENSG00000225362; TAA
EDMSKMVSR

SEQ ID NO: 18129 - protein, 9 aa, Homo sapiens
  misc_feature: Table A; Target 18129; HLA-A*31:01; CT62; ENSG00000225362; TAA
EDMSKMVSR

SEQ ID NO: 18130 - protein, 9 aa, Homo sapiens
  misc_feature: Table A; Target 18130; HLA-A*33:01; CT62; ENSG00000225362; TAA
EDMSKMVSR

SEQ ID NO: 18131 - protein, 9 aa, Homo sapiens
  misc_feature: Table A; Target 18131; HLA-A*68:02; CT62; ENSG00000225362; TAA
EDMSKMVSR

SEQ ID NO: 18132 - protein, 9 aa, Homo sapiens
  misc_feature: Table A; Target 18132; HLA-B*40:02; CT62; ENSG00000225362; TAA
EDMSKMVSR

SEQ ID NO: 18133 - protein, 9 aa, Homo sapiens
  misc_feature: Table A; Target 18133; HLA-C*07:01; CT62; ENSG00000225362; TAA
EDMSKMVSR

SEQ ID NO: 18134 - protein, 9 aa, Homo sapiens
  misc_feature: Table A; Target 18134; HLA-C*07:06; CT62; ENSG00000225362; TAA
EDMSKMVSR

SEQ ID NO: 18135 - protein, 10 aa, Homo sapiens
  misc_feature: Table A; Target 18135; HLA-A*33:01; CT62; ENSG00000225362; TAA
EDMSKMVSRR

SEQ ID NO: 18136 - protein, 10 aa, Homo sapiens
  misc_feature: Table A; Target 18136; HLA-A*33:03; CT62; ENSG00000225362; TAA
EDMSKMVSRR

SEQ ID NO: 18137 - protein, 10 aa, Homo sapiens
  misc_feature: Table A; Target 18137; HLA-A*68:01; CT62; ENSG00000225362; TAA
EDMSKMVSRR

SEQ ID NO: 18138 - protein, 10 aa, Homo sapiens
  misc_feature: Table A; Target 18138; HLA-A*25:01; CT62; ENSG00000225362; TAA
EVSGSLQATL

SEQ ID NO: 18139 - protein, 10 aa, Homo sapiens
  misc_feature: Table A; Target 18139; HLA-A*26:01; CT62; ENSG00000225362; TAA
EVSGSLQATL

SEQ ID NO: 18140 - protein, 10 aa, Homo sapiens
  misc_feature: Table A; Target 18140; HLA-A*33:03; CT62; ENSG00000225362; TAA
EVSGSLQATL

SEQ ID NO: 18141 - protein, 10 aa, Homo sapiens
  misc_feature: Table A; Target 18141; HLA-A*68:01; CT62; ENSG00000225362; TAA
EVSGSLQATL

SEQ ID NO: 18142 - protein, 10 aa, Homo sapiens
  misc_feature: Table A; Target 18142; HLA-A*68:02; CT62; ENSG00000225362; TAA
EVSGSLQATL

SEQ ID NO: 18143 - protein, 10 aa, Homo sapiens
  misc_feature: Table A; Target 18143; HLA-B*27:05; CT62; ENSG00000225362; TAA
EVSGSLQATL

SEQ ID NO: 18144 - protein, 10 aa, Homo sapiens
  misc_feature: Table A; Target 18144; HLA-C*07:06; CT62; ENSG00000225362; TAA
EVSGSLQATL

SEQ ID NO: 18145 - protein, 8 aa, Homo sapiens
  misc_feature: Table A; Target 18145; HLA-B*51:01; CT62; ENSG00000225362; TAA
FPFLLHTC

SEQ ID NO: 18146 - protein, 8 aa, Homo sapiens
  misc_feature: Table A; Target 18146; HLA-B*54:01; CT62; ENSG00000225362; TAA
FPFLLHTC

SEQ ID NO: 18147 - protein, 8 aa, Homo sapiens
  misc_feature: Table A; Target 18147; HLA-B*56:01; CT62; ENSG00000225362; TAA
FPFLLHTC

SEQ ID NO: 18148 - protein, 9 aa, Homo sapiens
  misc_feature: Table A; Target 18148; HLA-B*54:01; CT62; ENSG00000225362; TAA
FPFLLHTCS

SEQ ID NO: 18149 - protein, 9 aa, Homo sapiens
  misc_feature: Table A; Target 18149; HLA-B*54:01; CT62; ENSG00000225362; TAA
FSCGSQPAA

SEQ ID NO: 18150 - protein, 9 aa, Homo sapiens
  misc_feature: Table A; Target 18150; HLA-C*03:03; CT62; ENSG00000225362; TAA
FSCGSQPAA

SEQ ID NO: 18151 - protein, 10 aa, Homo sapiens
  misc_feature: Table A; Target 18151; HLA-C*07:01; CT62; ENSG00000225362; TAA
FSCGSQPAAQ

SEQ ID NO: 18152 - protein, 10 aa, Homo sapiens
  misc_feature: Table A; Target 18152; HLA-C*07:02; CT62; ENSG00000225362; TAA
FSCGSQPAAQ

SEQ ID NO: 18153 - protein, 11 aa, Homo sapiens
  misc_feature: Table A; Target 18153; HLA-A*68:01; CT62; ENSG00000225362; TAA
FSCGSQPAAQR

SEQ ID NO: 18154 - protein, 9 aa, Homo sapiens
  misc_feature: Table A; Target 18154; HLA-A*68:02; CT62; ENSG00000225362; TAA
FSFPFLLHT

SEQ ID NO: 18155 - protein, 9 aa, Homo sapiens
  misc_feature: Table A; Target 18155; HLA-B*54:01; CT62; ENSG00000225362; TAA
FSFPFLLHT

SEQ ID NO: 18156 - protein, 9 aa, Homo sapiens
  misc_feature: Table A; Target 18156; HLA-B*13:02; CT62; ENSG00000225362; TAA
GSLQATLQV

SEQ ID NO: 18157 - protein, 8 aa, Homo sapiens
  misc_feature: Table A; Target 18157; HLA-A*31:01; CT62; ENSG00000225362; TAA
GSQPAAQR

SEQ ID NO: 18158 - protein, 9 aa, Homo sapiens
  misc_feature: Table A; Target 18158; HLA-A*03:02; CT62; ENSG00000225362; TAA
GSQPAAQRL

SEQ ID NO: 18159 - protein, 9 aa, Homo sapiens
  misc_feature: Table A; Target 18159; HLA-A*11:01; CT62; ENSG00000225362; TAA
GSQPAAQRL

SEQ ID NO: 18160 - protein, 9 aa, Homo sapiens
  misc_feature: Table A; Target 18160; HLA-A*31:01; CT62; ENSG00000225362; TAA
GSQPAAQRL

SEQ ID NO: 18161 - protein, 9 aa, Homo sapiens
  misc_feature: Table A; Target 18161; HLA-B*07:02; CT62; ENSG00000225362; TAA
GSQPAAQRL

SEQ ID NO: 18162 - protein, 9 aa, Homo sapiens
  misc_feature: Table A; Target 18162; HLA-B*58:01; CT62; ENSG00000225362; TAA
GSQPAAQRL

SEQ ID NO: 18163 - protein, 9 aa, Homo sapiens
  misc_feature: Table A; Target 18163; HLA-C*01:02; CT62; ENSG00000225362; TAA
GSQPAAQRL

SEQ ID NO: 18164 - protein, 9 aa, Homo sapiens
  misc_feature: Table A; Target 18164; HLA-C*06:02; CT62; ENSG00000225362; TAA
GSQPAAQRL

SEQ ID NO: 18165 - protein, 9 aa, Homo sapiens
  misc_feature: Table A; Target 18165; HLA-C*07:06; CT62; ENSG00000225362; TAA
GSQPAAQRL

SEQ ID NO: 18166 - protein, 9 aa, Homo sapiens
  misc_feature: Table A; Target 18166; HLA-C*16:01; CT62; ENSG00000225362; TAA
GSQPAAQRL

SEQ ID NO: 18167 - protein, 9 aa, Homo sapiens
  misc_feature: Table A; Target 18167; HLA-C*16:02; CT62; ENSG00000225362; TAA
GSQPAAQRL

SEQ ID NO: 18168 - protein, 8 aa, Homo sapiens
  misc_feature: Table A; Target 18168; HLA-C*04:01; CT62; ENSG00000225362; TAA
HEVSGSLQ

SEQ ID NO: 18169 - protein, 8 aa, Homo sapiens
  misc_feature: Table A; Target 18169; HLA-C*07:01; CT62; ENSG00000225362; TAA
HEVSGSLQ

SEQ ID NO: 18170 - protein, 9 aa, Homo sapiens
  misc_feature: Table A; Target 18170; HLA-B*13:02; CT62; ENSG00000225362; TAA
HEVSGSLQA

SEQ ID NO: 18171 - protein, 9 aa, Homo sapiens
  misc_feature: Table A; Target 18171; HLA-B*18:01; CT62; ENSG00000225362; TAA
HEVSGSLQA

SEQ ID NO: 18172 - protein, 9 aa, Homo sapiens
  misc_feature: Table A; Target 18172; HLA-B*40:01; CT62; ENSG00000225362; TAA
HEVSGSLQA

SEQ ID NO: 18173 - protein, 9 aa, Homo sapiens
  misc_feature: Table A; Target 18173; HLA-B*40:02; CT62; ENSG00000225362; TAA
HEVSGSLQA

SEQ ID NO: 18174 - protein, 9 aa, Homo sapiens
  misc_feature: Table A; Target 18174; HLA-B*44:03; CT62; ENSG00000225362; TAA
HEVSGSLQA

SEQ ID NO: 18175 - protein, 9 aa, Homo sapiens
  misc_feature: Table A; Target 18175; HLA-B*54:01; CT62; ENSG00000225362; TAA
HEVSGSLQA

SEQ ID NO: 18176 - protein, 9 aa, Homo sapiens
  misc_feature: Table A; Target 18176; HLA-B*56:01; CT62; ENSG00000225362; TAA
HEVSGSLQA

SEQ ID NO: 18177 - protein, 10 aa, Homo sapiens
  misc_feature: Table A; Target 18177; HLA-A*30:01; CT62; ENSG00000225362; TAA
HEVSGSLQAT

SEQ ID NO: 18178 - protein, 10 aa, Homo sapiens
  misc_feature: Table A; Target 18178; HLA-B*40:01; CT62; ENSG00000225362; TAA
HEVSGSLQAT

SEQ ID NO: 18179 - protein, 10 aa, Homo sapiens
  misc_feature: Table A; Target 18179; HLA-B*40:02; CT62; ENSG00000225362; TAA
HEVSGSLQAT

SEQ ID NO: 18180 - protein, 10 aa, Homo sapiens
  misc_feature: Table A; Target 18180; HLA-B*49:01; CT62; ENSG00000225362; TAA
HEVSGSLQAT

SEQ ID NO: 18181 - protein, 10 aa, Homo sapiens
  misc_feature: Table A; Target 18181; HLA-C*07:01; CT62; ENSG00000225362; TAA
HEVSGSLQAT

SEQ ID NO: 18182 - protein, 11 aa, Homo sapiens
  misc_feature: Table A; Target 18182; HLA-A*23:01; CT62; ENSG00000225362; TAA
HEVSGSLQATL

SEQ ID NO: 18183 - protein, 11 aa, Homo sapiens
  misc_feature: Table A; Target 18183; HLA-B*18:01; CT62; ENSG00000225362; TAA
HEVSGSLQATL

SEQ ID NO: 18184 - protein, 11 aa, Homo sapiens
  misc_feature: Table A; Target 18184; HLA-B*38:01; CT62; ENSG00000225362; TAA
HEVSGSLQATL

SEQ ID NO: 18185 - protein, 11 aa, Homo sapiens
  misc_feature: Table A; Target 18185; HLA-B*39:01; CT62; ENSG00000225362; TAA
HEVSGSLQATL

SEQ ID NO: 18186 - protein, 11 aa, Homo sapiens
  misc_feature: Table A; Target 18186; HLA-B*40:02; CT62; ENSG00000225362; TAA
HEVSGSLQATL

SEQ ID NO: 18187 - protein, 11 aa, Homo sapiens
  misc_feature: Table A; Target 18187; HLA-B*44:02; CT62; ENSG00000225362; TAA
HEVSGSLQATL

SEQ ID NO: 18188 - protein, 11 aa, Homo sapiens
  misc_feature: Table A; Target 18188; HLA-B*44:03; CT62; ENSG00000225362; TAA
HEVSGSLQATL

SEQ ID NO: 18189 - protein, 11 aa, Homo sapiens
  misc_feature: Table A; Target 18189; HLA-B*49:01; CT62; ENSG00000225362; TAA
HEVSGSLQATL

SEQ ID NO: 18190 - protein, 11 aa, Homo sapiens
  misc_feature: Table A; Target 18190; HLA-C*16:04; CT62; ENSG00000225362; TAA
HEVSGSLQATL

SEQ ID NO: 18191 - protein, 9 aa, Homo sapiens
  misc_feature: Table A; Target 18191; HLA-A*01:01; CT62; ENSG00000225362; TAA
HLTDQPSAY

SEQ ID NO: 18192 - protein, 9 aa, Homo sapiens
  misc_feature: Table A; Target 18192; HLA-A*03:01; CT62; ENSG00000225362; TAA
HLTDQPSAY

SEQ ID NO: 18193 - protein, 9 aa, Homo sapiens
  misc_feature: Table A; Target 18193; HLA-A*25:01; CT62; ENSG00000225362; TAA
HLTDQPSAY

SEQ ID NO: 18194 - protein, 9 aa, Homo sapiens
  misc_feature: Table A; Target 18194; HLA-A*26:01; CT62; ENSG00000225362; TAA
HLTDQPSAY

SEQ ID NO: 18195 - protein, 9 aa, Homo sapiens
  misc_feature: Table A; Target 18195; HLA-A*29:02; CT62; ENSG00000225362; TAA
HLTDQPSAY

SEQ ID NO: 18196 - protein, 9 aa, Homo sapiens
  misc_feature: Table A; Target 18196; HLA-A*30:02; CT62; ENSG00000225362; TAA
HLTDQPSAY

SEQ ID NO: 18197 - protein, 9 aa, Homo sapiens
  misc_feature: Table A; Target 18197; HLA-A*32:01; CT62; ENSG00000225362; TAA
HLTDQPSAY

SEQ ID NO: 18198 - protein, 9 aa, Homo sapiens
  misc_feature: Table A; Target 18198; HLA-A*68:01; CT62; ENSG00000225362; TAA
HLTDQPSAY

SEQ ID NO: 18199 - protein, 9 aa, Homo sapiens
  misc_feature: Table A; Target 18199; HLA-B*15:01; CT62; ENSG00000225362; TAA
HLTDQPSAY

SEQ ID NO: 18200 - protein, 9 aa, Homo sapiens
  misc_feature: Table A; Target 18200; HLA-B*15:03; CT62; ENSG00000225362; TAA
HLTDQPSAY

SEQ ID NO: 18201 - protein, 9 aa, Homo sapiens
  misc_feature: Table A; Target 18201; HLA-B*18:01; CT62; ENSG00000225362; TAA
HLTDQPSAY

SEQ ID NO: 18202 - protein, 9 aa, Homo sapiens
  misc_feature: Table A; Target 18202; HLA-B*27:05; CT62; ENSG00000225362; TAA
HLTDQPSAY

SEQ ID NO: 18203 - protein, 9 aa, Homo sapiens
  misc_feature: Table A; Target 18203; HLA-B*35:01; CT62; ENSG00000225362; TAA
HLTDQPSAY

SEQ ID NO: 18204 - protein, 9 aa, Homo sapiens
  misc_feature: Table A; Target 18204; HLA-B*39:01; CT62; ENSG00000225362; TAA
HLTDQPSAY

SEQ ID NO: 18205 - protein, 9 aa, Homo sapiens
  misc_feature: Table A; Target 18205; HLA-B*44:03; CT62; ENSG00000225362; TAA
HLTDQPSAY

SEQ ID NO: 18206 - protein, 9 aa, Homo sapiens
  misc_feature: Table A; Target 18206; HLA-B*46:01; CT62; ENSG00000225362; TAA
HLTDQPSAY

SEQ ID NO: 18207 - protein, 9 aa, Homo sapiens
  misc_feature: Table A; Target 18207; HLA-B*55:01; CT62; ENSG00000225362; TAA
HLTDQPSAY

SEQ ID NO: 18208 - protein, 9 aa, Homo sapiens
  misc_feature: Table A; Target 18208; HLA-C*02:02; CT62; ENSG00000225362; TAA
HLTDQPSAY

SEQ ID NO: 18209 - protein, 9 aa, Homo sapiens
  misc_feature: Table A; Target 18209; HLA-C*07:04; CT62; ENSG00000225362; TAA
HLTDQPSAY

SEQ ID NO: 18210 - protein, 9 aa, Homo sapiens
  misc_feature: Table A; Target 18210; HLA-C*07:06; CT62; ENSG00000225362; TAA
HLTDQPSAY

SEQ ID NO: 18211 - protein, 9 aa, Homo sapiens
  misc_feature: Table A; Target 18211; HLA-C*14:02; CT62; ENSG00000225362; TAA
HLTDQPSAY

SEQ ID NO: 18212 - protein, 9 aa, Homo sapiens
  misc_feature: Table A; Target 18212; HLA-C*16:01; CT62; ENSG00000225362; TAA
HLTDQPSAY

SEQ ID NO: 18213 - protein, 9 aa, Homo sapiens
  misc_feature: Table A; Target 18213; HLA-C*16:02; CT62; ENSG00000225362; TAA
HLTDQPSAY

SEQ ID NO: 18214 - protein, 9 aa, Homo sapiens
  misc_feature: Table A; Target 18214; HLA-C*16:04; CT62; ENSG00000225362; TAA
HLTDQPSAY

SEQ ID NO: 18215 - protein, 10 aa, Homo sapiens
  misc_feature: Table A; Target 18215; HLA-B*27:05; CT62; ENSG00000225362; TAA
HLTDQPSAYS

SEQ ID NO: 18216 - protein, 8 aa, Homo sapiens
  misc_feature: Table A; Target 18216; HLA-B*54:01; CT62; ENSG00000225362; TAA
HPLSHPTS

SEQ ID NO: 18217 - protein, 9 aa, Homo sapiens
  misc_feature: Table A; Target 18217; HLA-B*07:02; CT62; ENSG00000225362; TAA
HPLSHPTSG

SEQ ID NO: 18218 - protein, 9 aa, Homo sapiens
  misc_feature: Table A; Target 18218; HLA-B*35:01; CT62; ENSG00000225362; TAA
HPLSHPTSG

SEQ ID NO: 18219 - protein, 9 aa, Homo sapiens
  misc_feature: Table A; Target 18219; HLA-B*35:03; CT62; ENSG00000225362; TAA
HPLSHPTSG

SEQ ID NO: 18220 - protein, 9 aa, Homo sapiens
  misc_feature: Table A; Target 18220; HLA-B*54:01; CT62; ENSG00000225362; TAA
HPLSHPTSG

SEQ ID NO: 18221 - protein, 9 aa, Homo sapiens
  misc_feature: Table A; Target 18221; HLA-B*55:01; CT62; ENSG00000225362; TAA
HPLSHPTSG

SEQ ID NO: 18222 - protein, 9 aa, Homo sapiens
  misc_feature: Table A; Target 18222; HLA-B*56:01; CT62; ENSG00000225362; TAA
HPLSHPTSG

SEQ ID NO: 18223 - protein, 11 aa, Homo sapiens
  misc_feature: Table A; Target 18223; HLA-A*33:01; CT62; ENSG00000225362; TAA
HPLSHPTSGQR

SEQ ID NO: 18224 - protein, 11 aa, Homo sapiens
  misc_feature: Table A; Target 18224; HLA-A*33:03; CT62; ENSG00000225362; TAA
HPLSHPTSGQR

SEQ ID NO: 18225 - protein, 8 aa, Homo sapiens
  misc_feature: Table A; Target 18225; HLA-B*27:02; CT62; ENSG00000225362; TAA
HSSEDMSK

SEQ ID NO: 18226 - protein, 9 aa, Homo sapiens
  misc_feature: Table A; Target 18226; HLA-A*26:01; CT62; ENSG00000225362; TAA
HSSEDMSKM

SEQ ID NO: 18227 - protein, 9 aa, Homo sapiens
  misc_feature: Table A; Target 18227; HLA-B*27:05; CT62; ENSG00000225362; TAA
HSSEDMSKM

SEQ ID NO: 18228 - protein, 9 aa, Homo sapiens
  misc_feature: Table A; Target 18228; HLA-B*35:01; CT62; ENSG00000225362; TAA
HSSEDMSKM

SEQ ID NO: 18229 - protein, 9 aa, Homo sapiens
  misc_feature: Table A; Target 18229; HLA-B*35:03; CT62; ENSG00000225362; TAA
HSSEDMSKM

SEQ ID NO: 18230 - protein, 9 aa, Homo sapiens
  misc_feature: Table A; Target 18230; HLA-C*02:02; CT62; ENSG00000225362; TAA
HSSEDMSKM

SEQ ID NO: 18231 - protein, 9 aa, Homo sapiens
  misc_feature: Table A; Target 18231; HLA-C*03:03; CT62; ENSG00000225362; TAA
HSSEDMSKM

SEQ ID NO: 18232 - protein, 9 aa, Homo sapiens
  misc_feature: Table A; Target 18232; HLA-C*03:04; CT62; ENSG00000225362; TAA
HSSEDMSKM

SEQ ID NO: 18233 - protein, 9 aa, Homo sapiens
  misc_feature: Table A; Target 18233; HLA-C*04:01; CT62; ENSG00000225362; TAA
HSSEDMSKM

SEQ ID NO: 18234 - protein, 9 aa, Homo sapiens
  misc_feature: Table A; Target 18234; HLA-C*05:01; CT62; ENSG00000225362; TAA
HSSEDMSKM

SEQ ID NO: 18235 - protein, 9 aa, Homo sapiens
  misc_feature: Table A; Target 18235; HLA-C*07:01; CT62; ENSG00000225362; TAA
HSSEDMSKM

SEQ ID NO: 18236 - protein, 9 aa, Homo sapiens
  misc_feature: Table A; Target 18236; HLA-C*07:04; CT62; ENSG00000225362; TAA
HSSEDMSKM

SEQ ID NO: 18237 - protein, 9 aa, Homo sapiens
  misc_feature: Table A; Target 18237; HLA-C*07:06; CT62; ENSG00000225362; TAA
HSSEDMSKM

SEQ ID NO: 18238 - protein, 9 aa, Homo sapiens
  misc_feature: Table A; Target 18238; HLA-C*12:03; CT62; ENSG00000225362; TAA
HSSEDMSKM

SEQ ID NO: 18239 - protein, 9 aa, Homo sapiens
  misc_feature: Table A; Target 18239; HLA-C*16:02; CT62; ENSG00000225362; TAA
HSSEDMSKM

SEQ ID NO: 18240 - protein, 10 aa, Homo sapiens
  misc_feature: Table A; Target 18240; HLA-C*04:01; CT62; ENSG00000225362; TAA
HSSEDMSKMV

SEQ ID NO: 18241 - protein, 10 aa, Homo sapiens
  misc_feature: Table A; Target 18241; HLA-C*06:02; CT62; ENSG00000225362; TAA
HSSEDMSKMV

SEQ ID NO: 18242 - protein, 10 aa, Homo sapiens
  misc_feature: Table A; Target 18242; HLA-C*07:01; CT62; ENSG00000225362; TAA
HSSEDMSKMV

SEQ ID NO: 18243 - protein, 9 aa, Homo sapiens
  misc_feature: Table A; Target 18243; HLA-A*03:01; CT62; ENSG00000225362; TAA
HTCSHPLSH

SEQ ID NO: 18244 - protein, 9 aa, Homo sapiens
  misc_feature: Table A; Target 18244; HLA-B*57:01; CT62; ENSG00000225362; TAA
HTHRTFSHF

SEQ ID NO: 18245 - protein, 9 aa, Homo sapiens
  misc_feature: Table A; Target 18245; HLA-A*02:01; CT62; ENSG00000225362; TAA
ISFSFPFLL

SEQ ID NO: 18246 - protein, 9 aa, Homo sapiens
  misc_feature: Table A; Target 18246; HLA-A*02:04; CT62; ENSG00000225362; TAA
ISFSFPFLL

SEQ ID NO: 18247 - protein, 9 aa, Homo sapiens
  misc_feature: Table A; Target 18247; HLA-A*02:07; CT62; ENSG00000225362; TAA
ISFSFPFLL

SEQ ID NO: 18248 - protein, 9 aa, Homo sapiens
  misc_feature: Table A; Target 18248; HLA-A*24:02; CT62; ENSG00000225362; TAA
ISFSFPFLL

SEQ ID NO: 18249 - protein, 9 aa, Homo sapiens
  misc_feature: Table A; Target 18249; HLA-A*29:02; CT62; ENSG00000225362; TAA
ISFSFPFLL

SEQ ID NO: 18250 - protein, 9 aa, Homo sapiens
  misc_feature: Table A; Target 18250; HLA-A*31:01; CT62; ENSG00000225362; TAA
ISFSFPFLL

SEQ ID NO: 18251 - protein, 9 aa, Homo sapiens
  misc_feature: Table A; Target 18251; HLA-A*68:02; CT62; ENSG00000225362; TAA
ISFSFPFLL

SEQ ID NO: 18252 - protein, 9 aa, Homo sapiens
  misc_feature: Table A; Target 18252; HLA-B*57:01; CT62; ENSG00000225362; TAA
ISFSFPFLL

SEQ ID NO: 18253 - protein, 9 aa, Homo sapiens
  misc_feature: Table A; Target 18253; HLA-C*02:02; CT62; ENSG00000225362; TAA
ISFSFPFLL

SEQ ID NO: 18254 - protein, 10 aa, Homo sapiens
  misc_feature: Table A; Target 18254; HLA-B*40:01; CT62; ENSG00000225362; TAA
KDSHEVSGSL

SEQ ID NO: 18255 - protein, 10 aa, Homo sapiens
  misc_feature: Table A; Target 18255; HLA-B*40:02; CT62; ENSG00000225362; TAA
KDSHEVSGSL

SEQ ID NO: 18256 - protein, 10 aa, Homo sapiens
  misc_feature: Table A; Target 18256; HLA-C*16:02; CT62; ENSG00000225362; TAA
KDSHEVSGSL

SEQ ID NO: 18257 - protein, 8 aa, Homo sapiens
  misc_feature: Table A; Target 18257; HLA-B*13:02; CT62; ENSG00000225362; TAA
LQATLQVI

SEQ ID NO: 18258 - protein, 8 aa, Homo sapiens
  misc_feature: Table A; Target 18258; HLA-B*51:01; CT62; ENSG00000225362; TAA
LQATLQVI

SEQ ID NO: 18259 - protein, 8 aa, Homo sapiens
  misc_feature: Table A; Target 18259; HLA-C*06:02; CT62; ENSG00000225362; TAA
LQATLQVI

SEQ ID NO: 18260 - protein, 10 aa, Homo sapiens
  misc_feature: Table A; Target 18260; HLA-B*15:01; CT62; ENSG00000225362; TAA
LQATLQVISF

SEQ ID NO: 18261 - protein, 10 aa, Homo sapiens
  misc_feature: Table A; Target 18261; HLA-C*07:04; CT62; ENSG00000225362; TAA
LQATLQVISF

SEQ ID NO: 18262 - protein, 8 aa, Homo sapiens
  misc_feature: Table A; Target 18262; HLA-B*15:01; CT62; ENSG00000225362; TAA
LQVISFSF

SEQ ID NO: 18263 - protein, 8 aa, Homo sapiens
  misc_feature: Table A; Target 18263; HLA-B*15:03; CT62; ENSG00000225362; TAA
LQVISFSF

SEQ ID NO: 18264 - protein, 9 aa, Homo sapiens
  misc_feature: Table A; Target 18264; HLA-A*03:01; CT62; ENSG00000225362; TAA
LTCNPQLGK

SEQ ID NO: 18265 - protein, 9 aa, Homo sapiens
  misc_feature: Table A; Target 18265; HLA-A*03:02; CT62; ENSG00000225362; TAA
LTCNPQLGK

SEQ ID NO: 18266 - protein, 9 aa, Homo sapiens
  misc_feature: Table A; Target 18266; HLA-A*11:01; CT62; ENSG00000225362; TAA
LTCNPQLGK

SEQ ID NO: 18267 - protein, 8 aa, Homo sapiens
  misc_feature: Table A; Target 18267; HLA-A*30:02; CT62; ENSG00000225362; TAA
LTDQPSAY

SEQ ID NO: 18268 - protein, 8 aa, Homo sapiens
  misc_feature: Table A; Target 18268; HLA-C*04:01; CT62; ENSG00000225362; TAA
LTDQPSAY

SEQ ID NO: 18269 - protein, 8 aa, Homo sapiens
  misc_feature: Table A; Target 18269; HLA-C*05:01; CT62; ENSG00000225362; TAA
LTDQPSAY

SEQ ID NO: 18270 - protein, 8 aa, Homo sapiens
  misc_feature: Table A; Target 18270; HLA-C*07:04; CT62; ENSG00000225362; TAA
LTDQPSAY

SEQ ID NO: 18271 - protein, 8 aa, Homo sapiens
  misc_feature: Table A; Target 18271; HLA-C*16:02; CT62; ENSG00000225362; TAA
LTDQPSAY

SEQ ID NO: 18272 - protein, 10 aa, Homo sapiens
  misc_feature: Table A; Target 18272; HLA-A*01:01; CT62; ENSG00000225362; TAA
LTDQPSAYSH

SEQ ID NO: 18273 - protein, 9 aa, Homo sapiens
  misc_feature: Table A; Target 18273; HLA-A*24:02; CT62; ENSG00000225362; TAA
LYLTCNPQL

SEQ ID NO: 18274 - protein, 9 aa, Homo sapiens
  misc_feature: Table A; Target 18274; HLA-C*04:01; CT62; ENSG00000225362; TAA
LYLTCNPQL

SEQ ID NO: 18275 - protein, 9 aa, Homo sapiens
  misc_feature: Table A; Target 18275; HLA-C*14:02; CT62; ENSG00000225362; TAA
LYLTCNPQL

SEQ ID NO: 18276 - protein, 8 aa, Homo sapiens
  misc_feature: Table A; Target 18276; HLA-A*31:01; CT62; ENSG00000225362; TAA
MMHTTSYR

SEQ ID NO: 18277 - protein, 8 aa, Homo sapiens
  misc_feature: Table A; Target 18277; HLA-A*33:01; CT62; ENSG00000225362; TAA
MMHTTSYR

SEQ ID NO: 18278 - protein, 8 aa, Homo sapiens
  misc_feature: Table A; Target 18278; HLA-A*33:03; CT62; ENSG00000225362; TAA
MMHTTSYR

SEQ ID NO: 18279 - protein, 8 aa, Homo sapiens
  misc_feature: Table A; Target 18279; HLA-C*04:01; CT62; ENSG00000225362; TAA
MMHTTSYR

SEQ ID NO: 18280 - protein, 8 aa, Homo sapiens
  misc_feature: Table A; Target 18280; HLA-C*07:01; CT62; ENSG00000225362; TAA
MMHTTSYR

SEQ ID NO: 18281 - protein, 8 aa, Homo sapiens
  misc_feature: Table A; Target 18281; HLA-B*35:01; CT62; ENSG00000225362; TAA
NADLQSEF

SEQ ID NO: 18282 - protein, 8 aa, Homo sapiens
  misc_feature: Table A; Target 18282; HLA-B*35:03; CT62; ENSG00000225362; TAA
NADLQSEF

SEQ ID NO: 18283 - protein, 8 aa, Homo sapiens
  misc_feature: Table A; Target 18283; HLA-B*55:01; CT62; ENSG00000225362; TAA
NADLQSEF

SEQ ID NO: 18284 - protein, 8 aa, Homo sapiens
  misc_feature: Table A; Target 18284; HLA-C*03:04; CT62; ENSG00000225362; TAA
NADLQSEF

SEQ ID NO: 18285 - protein, 8 aa, Homo sapiens
  misc_feature: Table A; Target 18285; HLA-C*04:01; CT62; ENSG00000225362; TAA
NADLQSEF

SEQ ID NO: 18286 - protein, 8 aa, Homo sapiens
  misc_feature: Table A; Target 18286; HLA-C*07:04; CT62; ENSG00000225362; TAA
NADLQSEF

SEQ ID NO: 18287 - protein, 9 aa, Homo sapiens
  misc_feature: Table A; Target 18287; HLA-A*01:01; CT62; ENSG00000225362; TAA
NADLQSEFL

SEQ ID NO: 18288 - protein, 9 aa, Homo sapiens
  misc_feature: Table A; Target 18288; HLA-A*02:07; CT62; ENSG00000225362; TAA
NADLQSEFL

SEQ ID NO: 18289 - protein, 9 aa, Homo sapiens
  misc_feature: Table A; Target 18289; HLA-B*35:01; CT62; ENSG00000225362; TAA
NADLQSEFL

SEQ ID NO: 18290 - protein, 9 aa, Homo sapiens
  misc_feature: Table A; Target 18290; HLA-B*35:03; CT62; ENSG00000225362; TAA
NADLQSEFL

SEQ ID NO: 18291 - protein, 9 aa, Homo sapiens
  misc_feature: Table A; Target 18291; HLA-B*38:01; CT62; ENSG00000225362; TAA
NADLQSEFL

SEQ ID NO: 18292 - protein, 9 aa, Homo sapiens
  misc_feature: Table A; Target 18292; HLA-B*39:01; CT62; ENSG00000225362; TAA
NADLQSEFL

SEQ ID NO: 18293 - protein, 9 aa, Homo sapiens
  misc_feature: Table A; Target 18293; HLA-B*55:01; CT62; ENSG00000225362; TAA
NADLQSEFL

SEQ ID NO: 18294 - protein, 9 aa, Homo sapiens
  misc_feature: Table A; Target 18294; HLA-C*04:01; CT62; ENSG00000225362; TAA
NADLQSEFL

SEQ ID NO: 18295 - protein, 9 aa, Homo sapiens
  misc_feature: Table A; Target 18295; HLA-C*07:04; CT62; ENSG00000225362; TAA
NADLQSEFL

SEQ ID NO: 18296 - protein, 8 aa, Homo sapiens
  misc_feature: Table A; Target 18296; HLA-B*08:01; CT62; ENSG00000225362; TAA
NVKDSHEV

SEQ ID NO: 18297 - protein, 8 aa, Homo sapiens
  misc_feature: Table A; Target 18297; HLA-B*46:01; CT62; ENSG00000225362; TAA
NVKDSHEV

SEQ ID NO: 18298 - protein, 8 aa, Homo sapiens
  misc_feature: Table A; Target 18298; HLA-C*01:02; CT62; ENSG00000225362; TAA
NVKDSHEV

SEQ ID NO: 18299 - protein, 8 aa, Homo sapiens
  misc_feature: Table A; Target 18299; HLA-C*06:02; CT62; ENSG00000225362; TAA
NVKDSHEV

SEQ ID NO: 18300 - protein, 8 aa, Homo sapiens
  misc_feature: Table A; Target 18300; HLA-C*12:03; CT62; ENSG00000225362; TAA
NVKDSHEV

SEQ ID NO: 18301 - protein, 8 aa, Homo sapiens
  misc_feature: Table A; Target 18301; HLA-C*16:02; CT62; ENSG00000225362; TAA
NVKDSHEV

SEQ ID NO: 18302 - protein, 9 aa, Homo sapiens
  misc_feature: Table A; Target 18302; HLA-C*04:01; CT62; ENSG00000225362; TAA
PPHLTDQPS

SEQ ID NO: 18303 - protein, 10 aa, Homo sapiens
  misc_feature: Table A; Target 18303; HLA-B*56:01; CT62; ENSG00000225362; TAA
PPHLTDQPSA

SEQ ID NO: 18304 - protein, 9 aa, Homo sapiens
  misc_feature: Table A; Target 18304; HLA-A*23:01; CT62; ENSG00000225362; TAA
QATLQVISF

SEQ ID NO: 18305 - protein, 9 aa, Homo sapiens
  misc_feature: Table A; Target 18305; HLA-A*24:02; CT62; ENSG00000225362; TAA
QATLQVISF

SEQ ID NO: 18306 - protein, 9 aa, Homo sapiens
  misc_feature: Table A; Target 18306; HLA-A*25:01; CT62; ENSG00000225362; TAA
QATLQVISF

SEQ ID NO: 18307 - protein, 9 aa, Homo sapiens
  misc_feature: Table A; Target 18307; HLA-A*32:01; CT62; ENSG00000225362; TAA
QATLQVISF

SEQ ID NO: 18308 - protein, 9 aa, Homo sapiens
  misc_feature: Table A; Target 18308; HLA-B*08:01; CT62; ENSG00000225362; TAA
QATLQVISF

SEQ ID NO: 18309 - protein, 9 aa, Homo sapiens
  misc_feature: Table A; Target 18309; HLA-B*15:01; CT62; ENSG00000225362; TAA
QATLQVISF

SEQ ID NO: 18310 - protein, 9 aa, Homo sapiens
  misc_feature: Table A; Target 18310; HLA-B*15:03; CT62; ENSG00000225362; TAA
QATLQVISF

SEQ ID NO: 18311 - protein, 9 aa, Homo sapiens
  misc_feature: Table A; Target 18311; HLA-B*18:01; CT62; ENSG00000225362; TAA
QATLQVISF

SEQ ID NO: 18312 - protein, 9 aa, Homo sapiens
  misc_feature: Table A; Target 18312; HLA-B*35:01; CT62; ENSG00000225362; TAA
QATLQVISF

SEQ ID NO: 18313 - protein, 9 aa, Homo sapiens
  misc_feature: Table A; Target 18313; HLA-B*35:03; CT62; ENSG00000225362; TAA
QATLQVISF

SEQ ID NO: 18314 - protein, 9 aa, Homo sapiens
  misc_feature: Table A; Target 18314; HLA-B*37:01; CT62; ENSG00000225362; TAA
QATLQVISF

SEQ ID NO: 18315 - protein, 9 aa, Homo sapiens
  misc_feature: Table A; Target 18315; HLA-B*38:01; CT62; ENSG00000225362; TAA
QATLQVISF

SEQ ID NO: 18316 - protein, 9 aa, Homo sapiens
  misc_feature: Table A; Target 18316; HLA-B*39:01; CT62; ENSG00000225362; TAA
QATLQVISF

SEQ ID NO: 18317 - protein, 9 aa, Homo sapiens
  misc_feature: Table A; Target 18317; HLA-B*44:03; CT62; ENSG00000225362; TAA
QATLQVISF

SEQ ID NO: 18318 - protein, 9 aa, Homo sapiens
  misc_feature: Table A; Target 18318; HLA-B*46:01; CT62; ENSG00000225362; TAA
QATLQVISF

SEQ ID NO: 18319 - protein, 9 aa, Homo sapiens
  misc_feature: Table A; Target 18319; HLA-B*51:01; CT62; ENSG00000225362; TAA
QATLQVISF

SEQ ID NO: 18320 - protein, 9 aa, Homo sapiens
  misc_feature: Table A; Target 18320; HLA-B*54:01; CT62; ENSG00000225362; TAA
QATLQVISF

SEQ ID NO: 18321 - protein, 9 aa, Homo sapiens
  misc_feature: Table A; Target 18321; HLA-B*55:01; CT62; ENSG00000225362; TAA
QATLQVISF

SEQ ID NO: 18322 - protein, 9 aa, Homo sapiens
  misc_feature: Table A; Target 18322; HLA-B*57:01; CT62; ENSG00000225362; TAA
QATLQVISF

SEQ ID NO: 18323 - protein, 9 aa, Homo sapiens
  misc_feature: Table A; Target 18323; HLA-B*58:01; CT62; ENSG00000225362; TAA
QATLQVISF

SEQ ID NO: 18324 - protein, 9 aa, Homo sapiens
  misc_feature: Table A; Target 18324; HLA-C*02:02; CT62; ENSG00000225362; TAA
QATLQVISF

SEQ ID NO: 18325 - protein, 9 aa, Homo sapiens
  misc_feature: Table A; Target 18325; HLA-C*03:03; CT62; ENSG00000225362; TAA
QATLQVISF

SEQ ID NO: 18326 - protein, 9 aa, Homo sapiens
  misc_feature: Table A; Target 18326; HLA-C*03:04; CT62; ENSG00000225362; TAA
QATLQVISF

SEQ ID NO: 18327 - protein, 9 aa, Homo sapiens
  misc_feature: Table A; Target 18327; HLA-C*07:04; CT62; ENSG00000225362; TAA
QATLQVISF

SEQ ID NO: 18328 - protein, 9 aa, Homo sapiens
  misc_feature: Table A; Target 18328; HLA-C*07:06; CT62; ENSG00000225362; TAA
QATLQVISF

SEQ ID NO: 18329 - protein, 9 aa, Homo sapiens
  misc_feature: Table A; Target 18329; HLA-C*12:03; CT62; ENSG00000225362; TAA
QATLQVISF

SEQ ID NO: 18330 - protein, 9 aa, Homo sapiens
  misc_feature: Table A; Target 18330; HLA-C*16:01; CT62; ENSG00000225362; TAA
QATLQVISF

SEQ ID NO: 18331 - protein, 9 aa, Homo sapiens
  misc_feature: Table A; Target 18331; HLA-C*16:02; CT62; ENSG00000225362; TAA
QATLQVISF

SEQ ID NO: 18332 - protein, 9 aa, Homo sapiens
  misc_feature: Table A; Target 18332; HLA-C*16:04; CT62; ENSG00000225362; TAA
QATLQVISF

SEQ ID NO: 18333 - protein, 9 aa, Homo sapiens
  misc_feature: Table A; Target 18333; HLA-B*07:02; CT62; ENSG00000225362; TAA
QPAAQRLHV

SEQ ID NO: 18334 - protein, 9 aa, Homo sapiens
  misc_feature: Table A; Target 18334; HLA-B*51:01; CT62; ENSG00000225362; TAA
QPAAQRLHV

SEQ ID NO: 18335 - protein, 9 aa, Homo sapiens
  misc_feature: Table A; Target 18335; HLA-B*56:01; CT62; ENSG00000225362; TAA
QPAAQRLHV

SEQ ID NO: 18336 - protein, 9 aa, Homo sapiens
  misc_feature: Table A; Target 18336; HLA-C*07:02; CT62; ENSG00000225362; TAA
QPAAQRLHV

SEQ ID NO: 18337 - protein, 11 aa, Homo sapiens
  misc_feature: Table A; Target 18337; HLA-B*07:02; CT62; ENSG00000225362; TAA
QPAAQRLHVEL

SEQ ID NO: 18338 - protein, 11 aa, Homo sapiens
  misc_feature: Table A; Target 18338; HLA-C*07:02; CT62; ENSG00000225362; TAA
QPAAQRLHVEL

SEQ ID NO: 18339 - protein, 9 aa, Homo sapiens
  misc_feature: Table A; Target 18339; HLA-B*35:01; CT62; ENSG00000225362; TAA
QPSAYSHTH

SEQ ID NO: 18340 - protein, 9 aa, Homo sapiens
  misc_feature: Table A; Target 18340; HLA-B*55:01; CT62; ENSG00000225362; TAA
QPSAYSHTH

SEQ ID NO: 18341 - protein, 9 aa, Homo sapiens
  misc_feature: Table A; Target 18341; HLA-A*03:01; CT62; ENSG00000225362; TAA
QVISFSFPF

SEQ ID NO: 18342 - protein, 9 aa, Homo sapiens
  misc_feature: Table A; Target 18342; HLA-A*26:01; CT62; ENSG00000225362; TAA
QVISFSFPF

SEQ ID NO: 18343 - protein, 9 aa, Homo sapiens
  misc_feature: Table A; Target 18343; HLA-A*29:02; CT62; ENSG00000225362; TAA
QVISFSFPF

SEQ ID NO: 18344 - protein, 9 aa, Homo sapiens
  misc_feature: Table A; Target 18344; HLA-A*31:01; CT62; ENSG00000225362; TAA
QVISFSFPF

SEQ ID NO: 18345 - protein, 9 aa, Homo sapiens
  misc_feature: Table A; Target 18345; HLA-B*57:01; CT62; ENSG00000225362; TAA
QVISFSFPF

SEQ ID NO: 18346 - protein, 10 aa, Homo sapiens
  misc_feature: Table A; Target 18346; HLA-A*68:02; CT62; ENSG00000225362; TAA
QVISFSFPFL

SEQ ID NO: 18347 - protein, 9 aa, Homo sapiens
  misc_feature: Table A; Target 18347; HLA-A*02:04; CT62; ENSG00000225362; TAA
RLHVELWNA

SEQ ID NO: 18348 - protein, 8 aa, Homo sapiens
  misc_feature: Table A; Target 18348; HLA-A*33:01; CT62; ENSG00000225362; TAA
SAYSHTHR

SEQ ID NO: 18349 - protein, 10 aa, Homo sapiens
  misc_feature: Table A; Target 18349; HLA-B*57:01; CT62; ENSG00000225362; TAA
SAYSHTHRTF

SEQ ID NO: 18350 - protein, 10 aa, Homo sapiens
  misc_feature: Table A; Target 18350; HLA-C*02:02; CT62; ENSG00000225362; TAA
SAYSHTHRTF

SEQ ID NO: 18351 - protein, 10 aa, Homo sapiens
  misc_feature: Table A; Target 18351; HLA-A*33:01; CT62; ENSG00000225362; TAA
SCGSQPAAQR

SEQ ID NO: 18352 - protein, 10 aa, Homo sapiens
  misc_feature: Table A; Target 18352; HLA-A*33:03; CT62; ENSG00000225362; TAA
SCGSQPAAQR

SEQ ID NO: 18353 - protein, 10 aa, Homo sapiens
  misc_feature: Table A; Target 18353; HLA-A*68:01; CT62; ENSG00000225362; TAA
SCGSQPAAQR

SEQ ID NO: 18354 - protein, 10 aa, Homo sapiens
  misc_feature: Table A; Target 18354; HLA-C*07:06; CT62; ENSG00000225362; TAA
SCGSQPAAQR

SEQ ID NO: 18355 - protein, 8 aa, Homo sapiens
  misc_feature: Table A; Target 18355; HLA-B*44:03; CT62; ENSG00000225362; TAA
SEDMSKMV

SEQ ID NO: 18356 - protein, 8 aa, Homo sapiens
  misc_feature: Table A; Target 18356; HLA-B*49:01; CT62; ENSG00000225362; TAA
SEDMSKMV

SEQ ID NO: 18357 - protein, 8 aa, Homo sapiens
  misc_feature: Table A; Target 18357; HLA-C*04:01; CT62; ENSG00000225362; TAA
SEDMSKMV

SEQ ID NO: 18358 - protein, 10 aa, Homo sapiens
  misc_feature: Table A; Target 18358; HLA-B*27:02; CT62; ENSG00000225362; TAA
SEDMSKMVSR

SEQ ID NO: 18359 - protein, 10 aa, Homo sapiens
  misc_feature: Table A; Target 18359; HLA-B*40:01; CT62; ENSG00000225362; TAA
SEDMSKMVSR

SEQ ID NO: 18360 - protein, 10 aa, Homo sapiens
  misc_feature: Table A; Target 18360; HLA-B*40:02; CT62; ENSG00000225362; TAA
SEDMSKMVSR

SEQ ID NO: 18361 - protein, 8 aa, Homo sapiens
  misc_feature: Table A; Target 18361; HLA-A*30:01; CT62; ENSG00000225362; TAA
SEFLCPCL

SEQ ID NO: 18362 - protein, 8 aa, Homo sapiens
  misc_feature: Table A; Target 18362; HLA-B*18:01; CT62; ENSG00000225362; TAA
SEFLCPCL

SEQ ID NO: 18363 - protein, 8 aa, Homo sapiens
  misc_feature: Table A; Target 18363; HLA-B*40:02; CT62; ENSG00000225362; TAA
SEFLCPCL

SEQ ID NO: 18364 - protein, 9 aa, Homo sapiens
  misc_feature: Table A; Target 18364; HLA-A*29:02; CT62; ENSG00000225362; TAA
SFSFPFLLH

SEQ ID NO: 18365 - protein, 8 aa, Homo sapiens
  misc_feature: Table A; Target 18365; HLA-B*38:01; CT62; ENSG00000225362; TAA
SHEVSGSL

SEQ ID NO: 18366 - protein, 8 aa, Homo sapiens
  misc_feature: Table A; Target 18366; HLA-B*39:01; CT62; ENSG00000225362; TAA
SHEVSGSL

SEQ ID NO: 18367 - protein, 9 aa, Homo sapiens
  misc_feature: Table A; Target 18367; HLA-B*38:01; CT62; ENSG00000225362; TAA
SHEVSGSLQ

SEQ ID NO: 18368 - protein, 10 aa, Homo sapiens
  misc_feature: Table A; Target 18368; HLA-B*38:01; CT62; ENSG00000225362; TAA
SHEVSGSLQA

SEQ ID NO: 18369 - protein, 10 aa, Homo sapiens
  misc_feature: Table A; Target 18369; HLA-B*39:01; CT62; ENSG00000225362; TAA
SHEVSGSLQA

SEQ ID NO: 18370 - protein, 10 aa, Homo sapiens
  misc_feature: Table A; Target 18370; HLA-B*27:05; CT62; ENSG00000225362; TAA
SHSSEDMSKM

SEQ ID NO: 18371 - protein, 10 aa, Homo sapiens
  misc_feature: Table A; Target 18371; HLA-B*38:01; CT62; ENSG00000225362; TAA
SHSSEDMSKM

SEQ ID NO: 18372 - protein, 10 aa, Homo sapiens
  misc_feature: Table A; Target 18372; HLA-B*39:01; CT62; ENSG00000225362; TAA
SHSSEDMSKM

SEQ ID NO: 18373 - protein, 9 aa, Homo sapiens
  misc_feature: Table A; Target 18373; HLA-A*02:01; CT62; ENSG00000225362; TAA
SLQATLQVI

SEQ ID NO: 18374 - protein, 9 aa, Homo sapiens
  misc_feature: Table A; Target 18374; HLA-A*02:03; CT62; ENSG00000225362; TAA
SLQATLQVI

SEQ ID NO: 18375 - protein, 9 aa, Homo sapiens
  misc_feature: Table A; Target 18375; HLA-A*02:04; CT62; ENSG00000225362; TAA
SLQATLQVI

SEQ ID NO: 18376 - protein, 9 aa, Homo sapiens
  misc_feature: Table A; Target 18376; HLA-A*02:07; CT62; ENSG00000225362; TAA
SLQATLQVI

SEQ ID NO: 18377 - protein, 9 aa, Homo sapiens
  misc_feature: Table A; Target 18377; HLA-A*30:01; CT62; ENSG00000225362; TAA
SLQATLQVI

SEQ ID NO: 18378 - protein, 9 aa, Homo sapiens
  misc_feature: Table A; Target 18378; HLA-A*32:01; CT62; ENSG00000225362; TAA
SLQATLQVI

SEQ ID NO: 18379 - protein, 9 aa, Homo sapiens
  misc_feature: Table A; Target 18379; HLA-B*13:02; CT62; ENSG00000225362; TAA
SLQATLQVI

SEQ ID NO: 18380 - protein, 9 aa, Homo sapiens
  misc_feature: Table A; Target 18380; HLA-B*15:01; CT62; ENSG00000225362; TAA
SLQATLQVI

SEQ ID NO: 18381 - protein, 9 aa, Homo sapiens
  misc_feature: Table A; Target 18381; HLA-B*55:01; CT62; ENSG00000225362; TAA
SLQATLQVI

SEQ ID NO: 18382 - protein, 9 aa, Homo sapiens
  misc_feature: Table A; Target 18382; HLA-C*06:02; CT62; ENSG00000225362; TAA
SLQATLQVI

SEQ ID NO: 18383 - protein, 11 aa, Homo sapiens
  misc_feature: Table A; Target 18383; HLA-B*54:01; CT62; ENSG00000225362; TAA
SPPHLTDQPSA

SEQ ID NO: 18384 - protein, 11 aa, Homo sapiens
  misc_feature: Table A; Target 18384; HLA-B*55:01; CT62; ENSG00000225362; TAA
SPPHLTDQPSA

SEQ ID NO: 18385 - protein, 11 aa, Homo sapiens
  misc_feature: Table A; Target 18385; HLA-B*56:01; CT62; ENSG00000225362; TAA
SPPHLTDQPSA

SEQ ID NO: 18386 - protein, 10 aa, Homo sapiens
  misc_feature: Table A; Target 18386; HLA-B*13:02; CT62; ENSG00000225362; TAA
SQPAAQRLHV

SEQ ID NO: 18387 - protein, 8 aa, Homo sapiens
  misc_feature: Table A; Target 18387; HLA-C*05:01; CT62; ENSG00000225362; TAA
SSEDMSKM

SEQ ID NO: 18388 - protein, 9 aa, Homo sapiens
  misc_feature: Table A; Target 18388; HLA-C*05:01; CT62; ENSG00000225362; TAA
SSEDMSKMV

SEQ ID NO: 18389 - protein, 9 aa, Homo sapiens
  misc_feature: Table A; Target 18389; HLA-C*06:02; CT62; ENSG00000225362; TAA
SSEDMSKMV

SEQ ID NO: 18390 - protein, 9 aa, Homo sapiens
  misc_feature: Table A; Target 18390; HLA-C*16:02; CT62; ENSG00000225362; TAA
SSEDMSKMV

SEQ ID NO: 18391 - protein, 11 aa, Homo sapiens
  misc_feature: Table A; Target 18391; HLA-A*03:02; CT62; ENSG00000225362; TAA
SSEDMSKMVSR

SEQ ID NO: 18392 - protein, 11 aa, Homo sapiens
  misc_feature: Table A; Target 18392; HLA-A*11:01; CT62; ENSG00000225362; TAA
SSEDMSKMVSR

SEQ ID NO: 18393 - protein, 11 aa, Homo sapiens
  misc_feature: Table A; Target 18393; HLA-A*31:01; CT62; ENSG00000225362; TAA
SSEDMSKMVSR

SEQ ID NO: 18394 - protein, 11 aa, Homo sapiens
  misc_feature: Table A; Target 18394; HLA-A*33:01; CT62; ENSG00000225362; TAA
SSEDMSKMVSR

SEQ ID NO: 18395 - protein, 11 aa, Homo sapiens
  misc_feature: Table A; Target 18395; HLA-A*33:03; CT62; ENSG00000225362; TAA
SSEDMSKMVSR

SEQ ID NO: 18396 - protein, 11 aa, Homo sapiens
  misc_feature: Table A; Target 18396; HLA-A*68:01; CT62; ENSG00000225362; TAA
SSEDMSKMVSR

SEQ ID NO: 18397 - protein, 11 aa, Homo sapiens
  misc_feature: Table A; Target 18397; HLA-C*07:06; CT62; ENSG00000225362; TAA
SSEDMSKMVSR

SEQ ID NO: 18398 - protein, 9 aa, Homo sapiens
  misc_feature: Table A; Target 18398; HLA-A*31:01; CT62; ENSG00000225362; TAA
TCNPQLGKR

SEQ ID NO: 18399 - protein, 9 aa, Homo sapiens
  misc_feature: Table A; Target 18399; HLA-A*33:01; CT62; ENSG00000225362; TAA
TCNPQLGKR

SEQ ID NO: 18400 - protein, 9 aa, Homo sapiens
  misc_feature: Table A; Target 18400; HLA-A*33:03; CT62; ENSG00000225362; TAA
TCNPQLGKR

SEQ ID NO: 18401 - protein, 9 aa, Homo sapiens
  misc_feature: Table A; Target 18401; HLA-A*03:02; CT62; ENSG00000225362; TAA
TDQPSAYSH

SEQ ID NO: 18402 - protein, 10 aa, Homo sapiens
  misc_feature: Table A; Target 18402; HLA-C*04:01; CT62; ENSG00000225362; TAA
TDQPSAYSHT

SEQ ID NO: 18403 - protein, 9 aa, Homo sapiens
  misc_feature: Table A; Target 18403; HLA-A*23:01; CT62; ENSG00000225362; TAA
TLQVISFSF

SEQ ID NO: 18404 - protein, 10 aa, Homo sapiens
  misc_feature: Table A; Target 18404; HLA-A*02:01; CT62; ENSG00000225362; TAA
TLYLTCNPQL

SEQ ID NO: 18405 - protein, 10 aa, Homo sapiens
  misc_feature: Table A; Target 18405; HLA-C*06:02; CT62; ENSG00000225362; TAA
TLYLTCNPQL

SEQ ID NO: 18406 - protein, 9 aa, Homo sapiens
  misc_feature: Table A; Target 18406; HLA-B*58:01; CT62; ENSG00000225362; TAA
VSGSLQATL

SEQ ID NO: 18407 - protein, 9 aa, Homo sapiens
  misc_feature: Table A; Target 18407; HLA-C*01:02; CT62; ENSG00000225362; TAA
VSGSLQATL

SEQ ID NO: 18408 - protein, 9 aa, Homo sapiens
  misc_feature: Table A; Target 18408; HLA-A*26:01; CT62; ENSG00000225362; TAA
WNADLQSEF

SEQ ID NO: 18409 - protein, 8 aa, Homo sapiens
  misc_feature: Table A; Target 18409; HLA-A*02:01; CT62; ENSG00000225362; TAA
YLTCNPQL

SEQ ID NO: 18410 - protein, 8 aa, Homo sapiens
  misc_feature: Table A; Target 18410; HLA-B*13:02; CT62; ENSG00000225362; TAA
YLTCNPQL

SEQ ID NO: 18411 - protein, 8 aa, Homo sapiens
  misc_feature: Table A; Target 18411; HLA-C*16:02; CT62; ENSG00000225362; TAA
YLTCNPQL

SEQ ID NO: 18412 - protein, 9 aa, Homo sapiens
  misc_feature: Table A; Target 18412; HLA-C*06:02; CT62; ENSG00000225362; TAA
YRRLSPPHL

SEQ ID NO: 18413 - protein, 8 aa, Homo sapiens
  misc_feature: Table A; Target 18413; HLA-B*08:01; CT62; ENSG00000225362; TAA
YSHTHRTF

SEQ ID NO: 18414 - protein, 8 aa, Homo sapiens
  misc_feature: Table A; Target 18414; HLA-B*57:01; CT62; ENSG00000225362; TAA
YSHTHRTF

SEQ ID NO: 18415 - protein, 8 aa, Homo sapiens
  misc_feature: Table A; Target 18415; HLA-C*16:01; CT62; ENSG00000225362; TAA
YSHTHRTF

SEQ ID NO: 18416 - protein, 10 aa, Homo sapiens
  misc_feature: Table A; Target 18416; HLA-C*07:02; CT83; ENSG00000204019; CTA
AVYDLSRDIL

SEQ ID NO: 18417 - protein, 9 aa, Homo sapiens
  misc_feature: Table A; Target 18417; HLA-B*44:03; CT83; ENSG00000204019; CTA
EHTLLSKGF

SEQ ID NO: 18418 - protein, 9 aa, Homo sapiens
  misc_feature: Table A; Target 18418; HLA-A*68:01; CT83; ENSG00000204019; CTA
ELEHTLLSK

SEQ ID NO: 18419 - protein, 9 aa, Homo sapiens
  misc_feature: Table A; Target 18419; HLA-B*15:01; CT83; ENSG00000204019; CTA
EMSSNSTAL

SEQ ID NO: 18420 - protein, 8 aa, Homo sapiens
  misc_feature: Table A; Target 18420; HLA-B*08:01; CT83; ENSG00000204019; CTA
FQRNTGEM

SEQ ID NO: 18421 - protein, 8 aa, Homo sapiens
  misc_feature: Table A; Target 18421; HLA-C*01:02; CT83; ENSG00000204019; CTA
FQRNTGEM

SEQ ID NO: 18422 - protein, 8 aa, Homo sapiens
  misc_feature: Table A; Target 18422; HLA-C*07:02; CT83; ENSG00000204019; CTA
FQRNTGEM

SEQ ID NO: 18423 - protein, 10 aa, Homo sapiens
  misc_feature: Table A; Target 18423; HLA-B*37:01; CT83; ENSG00000204019; CTA
GEMSSNSTAL

SEQ ID NO: 18424 - protein, 11 aa, Homo sapiens
  misc_feature: Table A; Target 18424; HLA-A*02:03; CT83; ENSG00000204019; CTA
GLINSNTDNNL

SEQ ID NO: 18425 - protein, 8 aa, Homo sapiens
  misc_feature: Table A; Target 18425; HLA-C*07:01; CT83; ENSG00000204019; CTA
HTLLSKGF

SEQ ID NO: 18426 - protein, 8 aa, Homo sapiens
  misc_feature: Table A; Target 18426; HLA-B*08:01; CT83; ENSG00000204019; CTA
IARQKRIL

SEQ ID NO: 18427 - protein, 9 aa, Homo sapiens
  misc_feature: Table A; Target 18427; HLA-B*58:01; CT83; ENSG00000204019; CTA
ILNNFPHSI

SEQ ID NO: 18428 - protein, 9 aa, Homo sapiens
  misc_feature: Table A; Target 18428; HLA-B*38:01; CT83; ENSG00000204019; CTA
INSNTDNNL

SEQ ID NO: 18429 - protein, 9 aa, Homo sapiens
  misc_feature: Table A; Target 18429; HLA-C*06:02; CT83; ENSG00000204019; CTA
KGFRGASPH

SEQ ID NO: 18430 - protein, 10 aa, Homo sapiens
  misc_feature: Table A; Target 18430; HLA-A*31:01; CT83; ENSG00000204019; CTA
KGFRGASPHR

SEQ ID NO: 18431 - protein, 9 aa, Homo sapiens
  misc_feature: Table A; Target 18431; HLA-C*16:01; CT83; ENSG00000204019; CTA
KLVELEHTL

SEQ ID NO: 18432 - protein, 9 aa, Homo sapiens
  misc_feature: Table A; Target 18432; HLA-C*06:02; CT83; ENSG00000204019; CTA
LASSILCAL

SEQ ID NO: 18433 - protein, 10 aa, Homo sapiens
  misc_feature: Table A; Target 18433; HLA-B*39:01; CT83; ENSG00000204019; CTA
LINSNTDNNL

SEQ ID NO: 18434 - protein, 9 aa, Homo sapiens
  misc_feature: Table A; Target 18434; HLA-A*31:01; CT83; ENSG00000204019; CTA
LSRDILNNF

SEQ ID NO: 18435 - protein, 9 aa, Homo sapiens
  misc_feature: Table A; Target 18435; HLA-C*04:01; CT83; ENSG00000204019; CTA
LVELEHTLL

SEQ ID NO: 18436 - protein, 9 aa, Homo sapiens
  misc_feature: Table A; Target 18436; HLA-C*07:04; CT83; ENSG00000204019; CTA
LVELEHTLL

SEQ ID NO: 18437 - protein, 10 aa, Homo sapiens
  misc_feature: Table A; Target 18437; HLA-A*03:01; CT83; ENSG00000204019; CTA
LVNLSMVENK

SEQ ID NO: 18438 - protein, 9 aa, Homo sapiens
  misc_feature: Table A; Target 18438; HLA-A*25:01; CT83; ENSG00000204019; CTA
LVRPSSSGL

SEQ ID NO: 18439 - protein, 9 aa, Homo sapiens
  misc_feature: Table A; Target 18439; HLA-B*40:01; CT83; ENSG00000204019; CTA
MVENKLVEL

SEQ ID NO: 18440 - protein, 9 aa, Homo sapiens
  misc_feature: Table A; Target 18440; HLA-C*03:03; CT83; ENSG00000204019; CTA
MVENKLVEL

SEQ ID NO: 18441 - protein, 9 aa, Homo sapiens
  misc_feature: Table A; Target 18441; HLA-B*38:01; CT83; ENSG00000204019; CTA
NLSMVENKL

SEQ ID NO: 18442 - protein, 8 aa, Homo sapiens
  misc_feature: Table A; Target 18442; HLA-C*12:03; CT83; ENSG00000204019; CTA
NNFPHSIA

SEQ ID NO: 18443 - protein, 9 aa, Homo sapiens
  misc_feature: Table A; Target 18443; HLA-A*29:02; CT83; ENSG00000204019; CTA
NNFPHSIAR

SEQ ID NO: 18444 - protein, 8 aa, Homo sapiens
  misc_feature: Table A; Target 18444; HLA-B*51:01; CT83; ENSG00000204019; CTA
NSTALALV

SEQ ID NO: 18445 - protein, 9 aa, Homo sapiens
  misc_feature: Table A; Target 18445; HLA-A*11:01; CT83; ENSG00000204019; CTA
NTDNNLAVY

SEQ ID NO: 18446 - protein, 11 aa, Homo sapiens
  misc_feature: Table A; Target 18446; HLA-B*38:01; CT83; ENSG00000204019; CTA
NTDNNLAVYDL

SEQ ID NO: 18447 - protein, 11 aa, Homo sapiens
  misc_feature: Table A; Target 18447; HLA-B*07:02; CT83; ENSG00000204019; CTA
RPSSSGLINSN

SEQ ID NO: 18448 - protein, 9 aa, Homo sapiens
  misc_feature: Table A; Target 18448; HLA-A*03:02; CT83; ENSG00000204019; CTA
SSNSTALAL

SEQ ID NO: 18449 - protein, 11 aa, Homo sapiens
  misc_feature: Table A; Target 18449; HLA-B*27:02; CT83; ENSG00000204019; CTA
SSNSTALALVR

SEQ ID NO: 18450 - protein, 8 aa, Homo sapiens
  misc_feature: Table A; Target 18450; HLA-A*11:01; CT83; ENSG00000204019; CTA
STALALVR

SEQ ID NO: 18451 - protein, 8 aa, Homo sapiens
  misc_feature: Table A; Target 18451; HLA-C*07:06; CT83; ENSG00000204019; CTA
STALALVR

SEQ ID NO: 18452 - protein, 10 aa, Homo sapiens
  misc_feature: Table A; Target 18452; HLA-B*07:02; CT83; ENSG00000204019; CTA
STALALVRPS

SEQ ID NO: 18453 - protein, 9 aa, Homo sapiens
  misc_feature: Table A; Target 18453; HLA-A*33:03; CT83; ENSG00000204019; CTA
TALALVRPS

SEQ ID NO: 18454 - protein, 9 aa, Homo sapiens
  misc_feature: Table A; Target 18454; HLA-B*27:05; CT83; ENSG00000204019; CTA
TALALVRPS

SEQ ID NO: 18455 - protein, 9 aa, Homo sapiens
  misc_feature: Table A; Target 18455; HLA-B*54:01; CT83; ENSG00000204019; CTA
TALALVRPS

SEQ ID NO: 18456 - protein, 8 aa, Homo sapiens
  misc_feature: Table A; Target 18456; HLA-B*44:02; CT83; ENSG00000204019; CTA
VELEHTLL

SEQ ID NO: 18457 - protein, 9 aa, Homo sapiens
  misc_feature: Table A; Target 18457; HLA-C*07:02; CT83; ENSG00000204019; CTA
VRPSSSGLI

SEQ ID NO: 18458 - protein, 9 aa, Homo sapiens
  misc_feature: Table A; Target 18458; HLA-A*02:07; CTAG2; ENSG00000126890; TAA
AAPLPRPGA

SEQ ID NO: 18459 - protein, 9 aa, Homo sapiens
  misc_feature: Table A; Target 18459; HLA-B*54:01; CTAG2; ENSG00000126890; TAA
AAPLPRPGA

SEQ ID NO: 18460 - protein, 9 aa, Homo sapiens
  misc_feature: Table A; Target 18460; HLA-B*56:01; CTAG2; ENSG00000126890; TAA
AAPLPRPGA

SEQ ID NO: 18461 - protein, 9 aa, Homo sapiens
  misc_feature: Table A; Target 18461; HLA-C*16:01; CTAG2; ENSG00000126890; TAA
AAPLPRPGA

SEQ ID NO: 18462 - protein, 11 aa, Homo sapiens
  misc_feature: Table A; Target 18462; HLA-B*07:02; CTAG2; ENSG00000126890; TAA
AAPLPRPGAVL

SEQ ID NO: 18463 - protein, 11 aa, Homo sapiens
  misc_feature: Table A; Target 18463; HLA-C*01:02; CTAG2; ENSG00000126890; TAA
AAPLPRPGAVL

SEQ ID NO: 18464 - protein, 11 aa, Homo sapiens
  misc_feature: Table A; Target 18464; HLA-C*03:04; CTAG2; ENSG00000126890; TAA
AAPLPRPGAVL

SEQ ID NO: 18465 - protein, 11 aa, Homo sapiens
  misc_feature: Table A; Target 18465; HLA-C*07:02; CTAG2; ENSG00000126890; TAA
AAPLPRPGAVL

SEQ ID NO: 18466 - protein, 11 aa, Homo sapiens
  misc_feature: Table A; Target 18466; HLA-C*16:01; CTAG2; ENSG00000126890; TAA
AAPLPRPGAVL

SEQ ID NO: 18467 - protein, 9 aa, Homo sapiens
  misc_feature: Table A; Target 18467; HLA-A*30:01; CTAG2; ENSG00000126890; TAA
ADGPGGPGI

SEQ ID NO: 18468 - protein, 9 aa, Homo sapiens
  misc_feature: Table A; Target 18468; HLA-B*13:02; CTAG2; ENSG00000126890; TAA
ADGPGGPGI

SEQ ID NO: 18469 - protein, 9 aa, Homo sapiens
  misc_feature: Table A; Target 18469; HLA-B*37:01; CTAG2; ENSG00000126890; TAA
ADGPGGPGI

SEQ ID NO: 18470 - protein, 9 aa, Homo sapiens
  misc_feature: Table A; Target 18470; HLA-B*38:01; CTAG2; ENSG00000126890; TAA
ADGPGGPGI

SEQ ID NO: 18471 - protein, 9 aa, Homo sapiens
  misc_feature: Table A; Target 18471; HLA-B*44:02; CTAG2; ENSG00000126890; TAA
ADGPGGPGI

SEQ ID NO: 18472 - protein, 9 aa, Homo sapiens
  misc_feature: Table A; Target 18472; HLA-B*44:03; CTAG2; ENSG00000126890; TAA
ADGPGGPGI

SEQ ID NO: 18473 - protein, 9 aa, Homo sapiens
  misc_feature: Table A; Target 18473; HLA-B*49:01; CTAG2; ENSG00000126890; TAA
ADGPGGPGI

SEQ ID NO: 18474 - protein, 10 aa, Homo sapiens
  misc_feature: Table A; Target 18474; HLA-B*40:01; CTAG2; ENSG00000126890; TAA
AEGQGTGGST

SEQ ID NO: 18475 - protein, 10 aa, Homo sapiens
  misc_feature: Table A; Target 18475; HLA-B*44:03; CTAG2; ENSG00000126890; TAA
AEGQGTGGST

SEQ ID NO: 18476 - protein, 10 aa, Homo sapiens
  misc_feature: Table A; Target 18476; HLA-C*16:02; CTAG2; ENSG00000126890; TAA
AEGQGTGGST

SEQ ID NO: 18477 - protein, 11 aa, Homo sapiens
  misc_feature: Table A; Target 18477; HLA-B*49:01; CTAG2; ENSG00000126890; TAA
AEGQGTGGSTG

SEQ ID NO: 18478 - protein, 9 aa, Homo sapiens
  misc_feature: Table A; Target 18478; HLA-A*32:01; CTAG2; ENSG00000126890; TAA
AGAARASGP

SEQ ID NO: 18479 - protein, 9 aa, Homo sapiens
  misc_feature: Table A; Target 18479; HLA-C*07:04; CTAG2; ENSG00000126890; TAA
AGAARASGP

SEQ ID NO: 18480 - protein, 9 aa, Homo sapiens
  misc_feature: Table A; Target 18480; HLA-C*16:01; CTAG2; ENSG00000126890; TAA
AGAARASGP

SEQ ID NO: 18481 - protein, 9 aa, Homo sapiens
  misc_feature: Table A; Target 18481; HLA-C*16:02; CTAG2; ENSG00000126890; TAA
AGAARASGP

SEQ ID NO: 18482 - protein, 9 aa, Homo sapiens
  misc_feature: Table A; Target 18482; HLA-C*16:01; CTAG2; ENSG00000126890; TAA
AGATGGRGP

SEQ ID NO: 18483 - protein, 8 aa, Homo sapiens
  misc_feature: Table A; Target 18483; HLA-B*54:01; CTAG2; ENSG00000126890; TAA
APLPRPGA

SEQ ID NO: 18484 - protein, 8 aa, Homo sapiens
  misc_feature: Table A; Target 18484; HLA-B*55:01; CTAG2; ENSG00000126890; TAA
APLPRPGA

SEQ ID NO: 18485 - protein, 8 aa, Homo sapiens
  misc_feature: Table A; Target 18485; HLA-B*56:01; CTAG2; ENSG00000126890; TAA
APLPRPGA

SEQ ID NO: 18486 - protein, 9 aa, Homo sapiens
  misc_feature: Table A; Target 18486; HLA-B*07:02; CTAG2; ENSG00000126890; TAA
APLPRPGAV

SEQ ID NO: 18487 - protein, 9 aa, Homo sapiens
  misc_feature: Table A; Target 18487; HLA-B*08:01; CTAG2; ENSG00000126890; TAA
APLPRPGAV

SEQ ID NO: 18488 - protein, 9 aa, Homo sapiens
  misc_feature: Table A; Target 18488; HLA-B*37:01; CTAG2; ENSG00000126890; TAA
APLPRPGAV

SEQ ID NO: 18489 - protein, 9 aa, Homo sapiens
  misc_feature: Table A; Target 18489; HLA-B*51:01; CTAG2; ENSG00000126890; TAA
APLPRPGAV

SEQ ID NO: 18490 - protein, 9 aa, Homo sapiens
  misc_feature: Table A; Target 18490; HLA-B*54:01; CTAG2; ENSG00000126890; TAA
APLPRPGAV

SEQ ID NO: 18491 - protein, 9 aa, Homo sapiens
  misc_feature: Table A; Target 18491; HLA-B*55:01; CTAG2; ENSG00000126890; TAA
APLPRPGAV

SEQ ID NO: 18492 - protein, 9 aa, Homo sapiens
  misc_feature: Table A; Target 18492; HLA-B*56:01; CTAG2; ENSG00000126890; TAA
APLPRPGAV

SEQ ID NO: 18493 - protein, 9 aa, Homo sapiens
  misc_feature: Table A; Target 18493; HLA-C*07:02; CTAG2; ENSG00000126890; TAA
APLPRPGAV

SEQ ID NO: 18494 - protein, 10 aa, Homo sapiens
  misc_feature: Table A; Target 18494; HLA-B*07:02; CTAG2; ENSG00000126890; TAA
APLPRPGAVL

SEQ ID NO: 18495 - protein, 10 aa, Homo sapiens
  misc_feature: Table A; Target 18495; HLA-B*35:01; CTAG2; ENSG00000126890; TAA
APLPRPGAVL

SEQ ID NO: 18496 - protein, 10 aa, Homo sapiens
  misc_feature: Table A; Target 18496; HLA-B*35:03; CTAG2; ENSG00000126890; TAA
APLPRPGAVL

SEQ ID NO: 18497 - protein, 10 aa, Homo sapiens
  misc_feature: Table A; Target 18497; HLA-B*55:01; CTAG2; ENSG00000126890; TAA
APLPRPGAVL

SEQ ID NO: 18498 - protein, 10 aa, Homo sapiens
  misc_feature: Table A; Target 18498; HLA-B*56:01; CTAG2; ENSG00000126890; TAA
APLPRPGAVL

SEQ ID NO: 18499 - protein, 10 aa, Homo sapiens
  misc_feature: Table A; Target 18499; HLA-C*07:02; CTAG2; ENSG00000126890; TAA
APLPRPGAVL

SEQ ID NO: 18500 - protein, 11 aa, Homo sapiens
  misc_feature: Table A; Target 18500; HLA-A*03:02; CTAG2; ENSG00000126890; TAA
APLPRPGAVLK

SEQ ID NO: 18501 - protein, 9 aa, Homo sapiens
  misc_feature: Table A; Target 18501; HLA-B*07:02; CTAG2; ENSG00000126890; TAA
APRGPHGGA

SEQ ID NO: 18502 - protein, 9 aa, Homo sapiens
  misc_feature: Table A; Target 18502; HLA-B*54:01; CTAG2; ENSG00000126890; TAA
APRGPHGGA

SEQ ID NO: 18503 - protein, 9 aa, Homo sapiens
  misc_feature: Table A; Target 18503; HLA-B*55:01; CTAG2; ENSG00000126890; TAA
APRGPHGGA

SEQ ID NO: 18504 - protein, 9 aa, Homo sapiens
  misc_feature: Table A; Target 18504; HLA-B*56:01; CTAG2; ENSG00000126890; TAA
APRGPHGGA

SEQ ID NO: 18505 - protein, 9 aa, Homo sapiens
  misc_feature: Table A; Target 18505; HLA-C*07:02; CTAG2; ENSG00000126890; TAA
APRGPHGGA

SEQ ID NO: 18506 - protein, 10 aa, Homo sapiens
  misc_feature: Table A; Target 18506; HLA-B*07:02; CTAG2; ENSG00000126890; TAA
APRGPHGGAA

SEQ ID NO: 18507 - protein, 10 aa, Homo sapiens
  misc_feature: Table A; Target 18507; HLA-B*54:01; CTAG2; ENSG00000126890; TAA
APRGPHGGAA

SEQ ID NO: 18508 - protein, 10 aa, Homo sapiens
  misc_feature: Table A; Target 18508; HLA-B*55:01; CTAG2; ENSG00000126890; TAA
APRGPHGGAA

SEQ ID NO: 18509 - protein, 10 aa, Homo sapiens
  misc_feature: Table A; Target 18509; HLA-B*56:01; CTAG2; ENSG00000126890; TAA
APRGPHGGAA

SEQ ID NO: 18510 - protein, 10 aa, Homo sapiens
  misc_feature: Table A; Target 18510; HLA-C*07:02; CTAG2; ENSG00000126890; TAA
APRGPHGGAA

SEQ ID NO: 18511 - protein, 11 aa, Homo sapiens
  misc_feature: Table A; Target 18511; HLA-B*07:02; CTAG2; ENSG00000126890; TAA
APRGPHGGAAS

SEQ ID NO: 18512 - protein, 11 aa, Homo sapiens
  misc_feature: Table A; Target 18512; HLA-C*07:02; CTAG2; ENSG00000126890; TAA
APRGPHGGAAS

SEQ ID NO: 18513 - protein, 11 aa, Homo sapiens
  misc_feature: Table A; Target 18513; HLA-B*15:01; CTAG2; ENSG00000126890; TAA
AQGDGCRGVAF

SEQ ID NO: 18514 - protein, 9 aa, Homo sapiens
  misc_feature: Table A; Target 18514; HLA-C*06:02; CTAG2; ENSG00000126890; TAA
ARRPDSRLL

SEQ ID NO: 18515 - protein, 9 aa, Homo sapiens
  misc_feature: Table A; Target 18515; HLA-C*16:01; CTAG2; ENSG00000126890; TAA
ASGPRGGAP

SEQ ID NO: 18516 - protein, 10 aa, Homo sapiens
  misc_feature: Table A; Target 18516; HLA-A*31:01; CTAG2; ENSG00000126890; TAA
ASGPRGGAPR

SEQ ID NO: 18517 - protein, 10 aa, Homo sapiens
  misc_feature: Table A; Target 18517; HLA-A*33:01; CTAG2; ENSG00000126890; TAA
ASGPRGGAPR

SEQ ID NO: 18518 - protein, 10 aa, Homo sapiens
  misc_feature: Table A; Target 18518; HLA-A*33:03; CTAG2; ENSG00000126890; TAA
ASGPRGGAPR

SEQ ID NO: 18519 - protein, 10 aa, Homo sapiens
  misc_feature: Table A; Target 18519; HLA-A*68:01; CTAG2; ENSG00000126890; TAA
ASGPRGGAPR

SEQ ID NO: 18520 - protein, 10 aa, Homo sapiens
  misc_feature: Table A; Target 18520; HLA-C*07:06; CTAG2; ENSG00000126890; TAA
ASGPRGGAPR

SEQ ID NO: 18521 - protein, 8 aa, Homo sapiens
  misc_feature: Table A; Target 18521; HLA-C*01:02; CTAG2; ENSG00000126890; TAA
ASPEGQKA

SEQ ID NO: 18522 - protein, 8 aa, Homo sapiens
  misc_feature: Table A; Target 18522; HLA-A*02:01; CTAG2; ENSG00000126890; TAA
AVLKDFTV

SEQ ID NO: 18523 - protein, 8 aa, Homo sapiens
  misc_feature: Table A; Target 18523; HLA-B*13:02; CTAG2; ENSG00000126890; TAA
AVLKDFTV

SEQ ID NO: 18524 - protein, 8 aa, Homo sapiens
  misc_feature: Table A; Target 18524; HLA-B*51:01; CTAG2; ENSG00000126890; TAA
DAAPLPRP

SEQ ID NO: 18525 - protein, 8 aa, Homo sapiens
  misc_feature: Table A; Target 18525; HLA-B*54:01; CTAG2; ENSG00000126890; TAA
DAAPLPRP

SEQ ID NO: 18526 - protein, 9 aa, Homo sapiens
  misc_feature: Table A; Target 18526; HLA-A*33:01; CTAG2; ENSG00000126890; TAA
DAAPLPRPG

SEQ ID NO: 18527 - protein, 9 aa, Homo sapiens
  misc_feature: Table A; Target 18527; HLA-C*04:01; CTAG2; ENSG00000126890; TAA
DAAPLPRPG

SEQ ID NO: 18528 - protein, 9 aa, Homo sapiens
  misc_feature: Table A; Target 18528; HLA-C*06:02; CTAG2; ENSG00000126890; TAA
DAAPLPRPG

SEQ ID NO: 18529 - protein, 9 aa, Homo sapiens
  misc_feature: Table A; Target 18529; HLA-C*07:01; CTAG2; ENSG00000126890; TAA
DAAPLPRPG

SEQ ID NO: 18530 - protein, 9 aa, Homo sapiens
  misc_feature: Table A; Target 18530; HLA-C*07:02; CTAG2; ENSG00000126890; TAA
DAAPLPRPG

SEQ ID NO: 18531 - protein, 9 aa, Homo sapiens
  misc_feature: Table A; Target 18531; HLA-C*12:03; CTAG2; ENSG00000126890; TAA
DAAPLPRPG

SEQ ID NO: 18532 - protein, 9 aa, Homo sapiens
  misc_feature: Table A; Target 18532; HLA-C*16:01; CTAG2; ENSG00000126890; TAA
DAAPLPRPG

SEQ ID NO: 18533 - protein, 9 aa, Homo sapiens
  misc_feature: Table A; Target 18533; HLA-C*16:02; CTAG2; ENSG00000126890; TAA
DAAPLPRPG

SEQ ID NO: 18534 - protein, 10 aa, Homo sapiens
  misc_feature: Table A; Target 18534; HLA-A*25:01; CTAG2; ENSG00000126890; TAA
DAAPLPRPGA

SEQ ID NO: 18535 - protein, 10 aa, Homo sapiens
  misc_feature: Table A; Target 18535; HLA-A*26:01; CTAG2; ENSG00000126890; TAA
DAAPLPRPGA

SEQ ID NO: 18536 - protein, 10 aa, Homo sapiens
  misc_feature: Table A; Target 18536; HLA-B*51:01; CTAG2; ENSG00000126890; TAA
DAAPLPRPGA

SEQ ID NO: 18537 - protein, 10 aa, Homo sapiens
  misc_feature: Table A; Target 18537; HLA-B*54:01; CTAG2; ENSG00000126890; TAA
DAAPLPRPGA

SEQ ID NO: 18538 - protein, 11 aa, Homo sapiens
  misc_feature: Table A; Target 18538; HLA-B*51:01; CTAG2; ENSG00000126890; TAA
DAAPLPRPGAV

SEQ ID NO: 18539 - protein, 10 aa, Homo sapiens
  misc_feature: Table A; Target 18539; HLA-B*38:01; CTAG2; ENSG00000126890; TAA
DADGPGGPGI

SEQ ID NO: 18540 - protein, 10 aa, Homo sapiens
  misc_feature: Table A; Target 18540; HLA-B*51:01; CTAG2; ENSG00000126890; TAA
DADGPGGPGI

SEQ ID NO: 18541 - protein, 10 aa, Homo sapiens
  misc_feature: Table A; Target 18541; HLA-C*05:01; CTAG2; ENSG00000126890; TAA
DADGPGGPGI

SEQ ID NO: 18542 - protein, 9 aa, Homo sapiens
  misc_feature: Table A; Target 18542; HLA-A*23:01; CTAG2; ENSG00000126890; TAA
DFTVSGNLL

SEQ ID NO: 18543 - protein, 9 aa, Homo sapiens
  misc_feature: Table A; Target 18543; HLA-A*24:02; CTAG2; ENSG00000126890; TAA
DFTVSGNLL

SEQ ID NO: 18544 - protein, 9 aa, Homo sapiens
  misc_feature: Table A; Target 18544; HLA-C*04:01; CTAG2; ENSG00000126890; TAA
DFTVSGNLL

SEQ ID NO: 18545 - protein, 9 aa, Homo sapiens
  misc_feature: Table A; Target 18545; HLA-C*14:02; CTAG2; ENSG00000126890; TAA
DFTVSGNLL

SEQ ID NO: 18546 - protein, 10 aa, Homo sapiens
  misc_feature: Table A; Target 18546; HLA-A*23:01; CTAG2; ENSG00000126890; TAA
DFTVSGNLLF

SEQ ID NO: 18547 - protein, 10 aa, Homo sapiens
  misc_feature: Table A; Target 18547; HLA-A*24:02; CTAG2; ENSG00000126890; TAA
DFTVSGNLLF

SEQ ID NO: 18548 - protein, 8 aa, Homo sapiens
  misc_feature: Table A; Target 18548; HLA-B*08:01; CTAG2; ENSG00000126890; TAA
DGCRGVAF

SEQ ID NO: 18549 - protein, 8 aa, Homo sapiens
  misc_feature: Table A; Target 18549; HLA-B*18:01; CTAG2; ENSG00000126890; TAA
DGCRGVAF

SEQ ID NO: 18550 - protein, 8 aa, Homo sapiens
  misc_feature: Table A; Target 18550; HLA-B*51:01; CTAG2; ENSG00000126890; TAA
DGPGGPGI

SEQ ID NO: 18551 - protein, 9 aa, Homo sapiens
  misc_feature: Table A; Target 18551; HLA-A*33:01; CTAG2; ENSG00000126890; TAA
DLRTPKHKV

SEQ ID NO: 18552 - protein, 9 aa, Homo sapiens
  misc_feature: Table A; Target 18552; HLA-B*08:01; CTAG2; ENSG00000126890; TAA
DLRTPKHKV

SEQ ID NO: 18553 - protein, 8 aa, Homo sapiens
  misc_feature: Table A; Target 18553; HLA-B*51:01; CTAG2; ENSG00000126890; TAA
EAELVRRI

SEQ ID NO: 18554 - protein, 9 aa, Homo sapiens
  misc_feature: Table A; Target 18554; HLA-B*08:01; CTAG2; ENSG00000126890; TAA
EAELVRRIL

SEQ ID NO: 18555 - protein, 9 aa, Homo sapiens
  misc_feature: Table A; Target 18555; HLA-B*08:01; CTAG2; ENSG00000126890; TAA
EGAGRMRVV

SEQ ID NO: 18556 - protein, 9 aa, Homo sapiens
  misc_feature: Table A; Target 18556; HLA-A*33:01; CTAG2; ENSG00000126890; TAA
ELVRRILSR

SEQ ID NO: 18557 - protein, 9 aa, Homo sapiens
  misc_feature: Table A; Target 18557; HLA-A*33:03; CTAG2; ENSG00000126890; TAA
ELVRRILSR

SEQ ID NO: 18558 - protein, 9 aa, Homo sapiens
  misc_feature: Table A; Target 18558; HLA-B*08:01; CTAG2; ENSG00000126890; TAA
ELVRRILSR

SEQ ID NO: 18559 - protein, 9 aa, Homo sapiens
  misc_feature: Table A; Target 18559; HLA-A*01:01; CTAG2; ENSG00000126890; TAA
FSSPMEAEL

SEQ ID NO: 18560 - protein, 9 aa, Homo sapiens
  misc_feature: Table A; Target 18560; HLA-A*02:01; CTAG2; ENSG00000126890; TAA
FSSPMEAEL

SEQ ID NO: 18561 - protein, 9 aa, Homo sapiens
  misc_feature: Table A; Target 18561; HLA-A*30:01; CTAG2; ENSG00000126890; TAA
FSSPMEAEL

SEQ ID NO: 18562 - protein, 9 aa, Homo sapiens
  misc_feature: Table A; Target 18562; HLA-A*68:02; CTAG2; ENSG00000126890; TAA
FSSPMEAEL

SEQ ID NO: 18563 - protein, 9 aa, Homo sapiens
  misc_feature: Table A; Target 18563; HLA-B*27:05; CTAG2; ENSG00000126890; TAA
FSSPMEAEL

SEQ ID NO: 18564 - protein, 9 aa, Homo sapiens
  misc_feature: Table A; Target 18564; HLA-B*35:01; CTAG2; ENSG00000126890; TAA
FSSPMEAEL

SEQ ID NO: 18565 - protein, 9 aa, Homo sapiens
  misc_feature: Table A; Target 18565; HLA-B*35:03; CTAG2; ENSG00000126890; TAA
FSSPMEAEL

SEQ ID NO: 18566 - protein, 9 aa, Homo sapiens
  misc_feature: Table A; Target 18566; HLA-B*38:01; CTAG2; ENSG00000126890; TAA
FSSPMEAEL

SEQ ID NO: 18567 - protein, 9 aa, Homo sapiens
  misc_feature: Table A; Target 18567; HLA-B*39:01; CTAG2; ENSG00000126890; TAA
FSSPMEAEL

SEQ ID NO: 18568 - protein, 9 aa, Homo sapiens
  misc_feature: Table A; Target 18568; HLA-B*40:01; CTAG2; ENSG00000126890; TAA
FSSPMEAEL

SEQ ID NO: 18569 - protein, 9 aa, Homo sapiens
  misc_feature: Table A; Target 18569; HLA-B*46:01; CTAG2; ENSG00000126890; TAA
FSSPMEAEL

SEQ ID NO: 18570 - protein, 9 aa, Homo sapiens
  misc_feature: Table A; Target 18570; HLA-B*55:01; CTAG2; ENSG00000126890; TAA
FSSPMEAEL

SEQ ID NO: 18571 - protein, 9 aa, Homo sapiens
  misc_feature: Table A; Target 18571; HLA-B*58:01; CTAG2; ENSG00000126890; TAA
FSSPMEAEL

SEQ ID NO: 18572 - protein, 9 aa, Homo sapiens
  misc_feature: Table A; Target 18572; HLA-C*01:02; CTAG2; ENSG00000126890; TAA
FSSPMEAEL

SEQ ID NO: 18573 - protein, 9 aa, Homo sapiens
  misc_feature: Table A; Target 18573; HLA-C*02:02; CTAG2; ENSG00000126890; TAA
FSSPMEAEL

SEQ ID NO: 18574 - protein, 9 aa, Homo sapiens
  misc_feature: Table A; Target 18574; HLA-C*03:03; CTAG2; ENSG00000126890; TAA
FSSPMEAEL

SEQ ID NO: 18575 - protein, 9 aa, Homo sapiens
  misc_feature: Table A; Target 18575; HLA-C*03:04; CTAG2; ENSG00000126890; TAA
FSSPMEAEL

SEQ ID NO: 18576 - protein, 9 aa, Homo sapiens
  misc_feature: Table A; Target 18576; HLA-C*05:01; CTAG2; ENSG00000126890; TAA
FSSPMEAEL

SEQ ID NO: 18577 - protein, 9 aa, Homo sapiens
  misc_feature: Table A; Target 18577; HLA-C*07:04; CTAG2; ENSG00000126890; TAA
FSSPMEAEL

SEQ ID NO: 18578 - protein, 9 aa, Homo sapiens
  misc_feature: Table A; Target 18578; HLA-C*07:06; CTAG2; ENSG00000126890; TAA
FSSPMEAEL

SEQ ID NO: 18579 - protein, 9 aa, Homo sapiens
  misc_feature: Table A; Target 18579; HLA-C*12:03; CTAG2; ENSG00000126890; TAA
FSSPMEAEL

SEQ ID NO: 18580 - protein, 9 aa, Homo sapiens
  misc_feature: Table A; Target 18580; HLA-C*14:02; CTAG2; ENSG00000126890; TAA
FSSPMEAEL

SEQ ID NO: 18581 - protein, 9 aa, Homo sapiens
  misc_feature: Table A; Target 18581; HLA-C*16:01; CTAG2; ENSG00000126890; TAA
FSSPMEAEL

SEQ ID NO: 18582 - protein, 9 aa, Homo sapiens
  misc_feature: Table A; Target 18582; HLA-C*16:02; CTAG2; ENSG00000126890; TAA
FSSPMEAEL

SEQ ID NO: 18583 - protein, 9 aa, Homo sapiens
  misc_feature: Table A; Target 18583; HLA-C*16:04; CTAG2; ENSG00000126890; TAA
FSSPMEAEL

SEQ ID NO: 18584 - protein, 8 aa, Homo sapiens
  misc_feature: Table A; Target 18584; HLA-B*39:01; CTAG2; ENSG00000126890; TAA
FTVSGNLL

SEQ ID NO: 18585 - protein, 8 aa, Homo sapiens
  misc_feature: Table A; Target 18585; HLA-B*46:01; CTAG2; ENSG00000126890; TAA
FTVSGNLL

SEQ ID NO: 18586 - protein, 8 aa, Homo sapiens
  misc_feature: Table A; Target 18586; HLA-C*01:02; CTAG2; ENSG00000126890; TAA
FTVSGNLL

SEQ ID NO: 18587 - protein, 8 aa, Homo sapiens
  misc_feature: Table A; Target 18587; HLA-C*02:02; CTAG2; ENSG00000126890; TAA
FTVSGNLL

SEQ ID NO: 18588 - protein, 8 aa, Homo sapiens
  misc_feature: Table A; Target 18588; HLA-C*03:03; CTAG2; ENSG00000126890; TAA
FTVSGNLL

SEQ ID NO: 18589 - protein, 8 aa, Homo sapiens
  misc_feature: Table A; Target 18589; HLA-C*03:04; CTAG2; ENSG00000126890; TAA
FTVSGNLL

SEQ ID NO: 18590 - protein, 8 aa, Homo sapiens
  misc_feature: Table A; Target 18590; HLA-C*04:01; CTAG2; ENSG00000126890; TAA
FTVSGNLL

SEQ ID NO: 18591 - protein, 8 aa, Homo sapiens
  misc_feature: Table A; Target 18591; HLA-C*07:04; CTAG2; ENSG00000126890; TAA
FTVSGNLL

SEQ ID NO: 18592 - protein, 8 aa, Homo sapiens
  misc_feature: Table A; Target 18592; HLA-C*12:03; CTAG2; ENSG00000126890; TAA
FTVSGNLL

SEQ ID NO: 18593 - protein, 8 aa, Homo sapiens
  misc_feature: Table A; Target 18593; HLA-C*14:02; CTAG2; ENSG00000126890; TAA
FTVSGNLL

SEQ ID NO: 18594 - protein, 9 aa, Homo sapiens
  misc_feature: Table A; Target 18594; HLA-A*01:01; CTAG2; ENSG00000126890; TAA
FTVSGNLLF

SEQ ID NO: 18595 - protein, 9 aa, Homo sapiens
  misc_feature: Table A; Target 18595; HLA-A*23:01; CTAG2; ENSG00000126890; TAA
FTVSGNLLF

SEQ ID NO: 18596 - protein, 9 aa, Homo sapiens
  misc_feature: Table A; Target 18596; HLA-A*24:02; CTAG2; ENSG00000126890; TAA
FTVSGNLLF

SEQ ID NO: 18597 - protein, 9 aa, Homo sapiens
  misc_feature: Table A; Target 18597; HLA-A*25:01; CTAG2; ENSG00000126890; TAA
FTVSGNLLF

SEQ ID NO: 18598 - protein, 9 aa, Homo sapiens
  misc_feature: Table A; Target 18598; HLA-A*26:01; CTAG2; ENSG00000126890; TAA
FTVSGNLLF

SEQ ID NO: 18599 - protein, 9 aa, Homo sapiens
  misc_feature: Table A; Target 18599; HLA-A*29:02; CTAG2; ENSG00000126890; TAA
FTVSGNLLF

SEQ ID NO: 18600 - protein, 9 aa, Homo sapiens
  misc_feature: Table A; Target 18600; HLA-B*57:01; CTAG2; ENSG00000126890; TAA
FTVSGNLLF

SEQ ID NO: 18601 - protein, 9 aa, Homo sapiens
  misc_feature: Table A; Target 18601; HLA-B*58:01; CTAG2; ENSG00000126890; TAA
FTVSGNLLF

SEQ ID NO: 18602 - protein, 9 aa, Homo sapiens
  misc_feature: Table A; Target 18602; HLA-C*02:02; CTAG2; ENSG00000126890; TAA
FTVSGNLLF

SEQ ID NO: 18603 - protein, 9 aa, Homo sapiens
  misc_feature: Table A; Target 18603; HLA-C*03:03; CTAG2; ENSG00000126890; TAA
FTVSGNLLF

SEQ ID NO: 18604 - protein, 9 aa, Homo sapiens
  misc_feature: Table A; Target 18604; HLA-C*03:04; CTAG2; ENSG00000126890; TAA
FTVSGNLLF

SEQ ID NO: 18605 - protein, 10 aa, Homo sapiens
  misc_feature: Table A; Target 18605; HLA-A*26:01; CTAG2; ENSG00000126890; TAA
FTVSGNLLFM

SEQ ID NO: 18606 - protein, 10 aa, Homo sapiens
  misc_feature: Table A; Target 18606; HLA-A*68:02; CTAG2; ENSG00000126890; TAA
FTVSGNLLFM

SEQ ID NO: 18607 - protein, 9 aa, Homo sapiens
  misc_feature: Table A; Target 18607; HLA-A*68:01; CTAG2; ENSG00000126890; TAA
GAARASGPR

SEQ ID NO: 18608 - protein, 9 aa, Homo sapiens
  misc_feature: Table A; Target 18608; HLA-C*07:06; CTAG2; ENSG00000126890; TAA
GAARASGPR

SEQ ID NO: 18609 - protein, 9 aa, Homo sapiens
  misc_feature: Table A; Target 18609; HLA-C*07:06; CTAG2; ENSG00000126890; TAA
GAASAQDGR

SEQ ID NO: 18610 - protein, 8 aa, Homo sapiens
  misc_feature: Table A; Target 18610; HLA-C*06:02; CTAG2; ENSG00000126890; TAA
GAGRMRVV

SEQ ID NO: 18611 - protein, 8 aa, Homo sapiens
  misc_feature: Table A; Target 18611; HLA-C*12:03; CTAG2; ENSG00000126890; TAA
GAGRMRVV

SEQ ID NO: 18612 - protein, 8 aa, Homo sapiens
  misc_feature: Table A; Target 18612; HLA-C*16:02; CTAG2; ENSG00000126890; TAA
GAGRMRVV

SEQ ID NO: 18613 - protein, 10 aa, Homo sapiens
  misc_feature: Table A; Target 18613; HLA-B*57:01; CTAG2; ENSG00000126890; TAA
GAGRMRVVGW

SEQ ID NO: 18614 - protein, 8 aa, Homo sapiens
  misc_feature: Table A; Target 18614; HLA-C*16:01; CTAG2; ENSG00000126890; TAA
GATGGRGP

SEQ ID NO: 18615 - protein, 8 aa, Homo sapiens
  misc_feature: Table A; Target 18615; HLA-C*16:02; CTAG2; ENSG00000126890; TAA
GATGGRGP

SEQ ID NO: 18616 - protein, 9 aa, Homo sapiens
  misc_feature: Table A; Target 18616; HLA-B*13:02; CTAG2; ENSG00000126890; TAA
GAVLKDFTV

SEQ ID NO: 18617 - protein, 9 aa, Homo sapiens
  misc_feature: Table A; Target 18617; HLA-C*16:04; CTAG2; ENSG00000126890; TAA
GAVLKDFTV

SEQ ID NO: 18618 - protein, 9 aa, Homo sapiens
  misc_feature: Table A; Target 18618; HLA-B*37:01; CTAG2; ENSG00000126890; TAA
GDGCRGVAF

SEQ ID NO: 18619 - protein, 11 aa, Homo sapiens
  misc_feature: Table A; Target 18619; HLA-B*44:02; CTAG2; ENSG00000126890; TAA
GEAGATGGRGP

SEQ ID NO: 18620 - protein, 11 aa, Homo sapiens
  misc_feature: Table A; Target 18620; HLA-B*44:03; CTAG2; ENSG00000126890; TAA
GEAGATGGRGP

SEQ ID NO: 18621 - protein, 11 aa, Homo sapiens
  misc_feature: Table A; Target 18621; HLA-C*06:02; CTAG2; ENSG00000126890; TAA
GEAGATGGRGP

SEQ ID NO: 18622 - protein, 11 aa, Homo sapiens
  misc_feature: Table A; Target 18622; HLA-C*16:04; CTAG2; ENSG00000126890; TAA
GEAGATGGRGP

SEQ ID NO: 18623 - protein, 10 aa, Homo sapiens
  misc_feature: Table A; Target 18623; HLA-B*39:01; CTAG2; ENSG00000126890; TAA
GIPDGPGGNA

SEQ ID NO: 18624 - protein, 10 aa, Homo sapiens
  misc_feature: Table A; Target 18624; HLA-C*01:02; CTAG2; ENSG00000126890; TAA
GIPDGPGGNA

SEQ ID NO: 18625 - protein, 11 aa, Homo sapiens
  misc_feature: Table A; Target 18625; HLA-A*03:02; CTAG2; ENSG00000126890; TAA
GLGSASPEGQK

SEQ ID NO: 18626 - protein, 11 aa, Homo sapiens
  misc_feature: Table A; Target 18626; HLA-A*68:01; CTAG2; ENSG00000126890; TAA
GPGEAGATGGR

SEQ ID NO: 18627 - protein, 9 aa, Homo sapiens
  misc_feature: Table A; Target 18627; HLA-B*07:02; CTAG2; ENSG00000126890; TAA
GPHGGAASA

SEQ ID NO: 18628 - protein, 9 aa, Homo sapiens
  misc_feature: Table A; Target 18628; HLA-B*54:01; CTAG2; ENSG00000126890; TAA
GPHGGAASA

SEQ ID NO: 18629 - protein, 9 aa, Homo sapiens
  misc_feature: Table A; Target 18629; HLA-B*55:01; CTAG2; ENSG00000126890; TAA
GPHGGAASA

SEQ ID NO: 18630 - protein, 9 aa, Homo sapiens
  misc_feature: Table A; Target 18630; HLA-B*56:01; CTAG2; ENSG00000126890; TAA
GPHGGAASA

SEQ ID NO: 18631 - protein, 9 aa, Homo sapiens
  misc_feature: Table A; Target 18631; HLA-C*07:02; CTAG2; ENSG00000126890; TAA
GPHGGAASA

SEQ ID NO: 18632 - protein, 9 aa, Homo sapiens
  misc_feature: Table A; Target 18632; HLA-A*33:01; CTAG2; ENSG00000126890; TAA
GPRGAGAAR

SEQ ID NO: 18633 - protein, 9 aa, Homo sapiens
  misc_feature: Table A; Target 18633; HLA-A*33:03; CTAG2; ENSG00000126890; TAA
GPRGAGAAR

SEQ ID NO: 18634 - protein, 9 aa, Homo sapiens
  misc_feature: Table A; Target 18634; HLA-B*07:02; CTAG2; ENSG00000126890; TAA
GPRGAGAAR

SEQ ID NO: 18635 - protein, 9 aa, Homo sapiens
  misc_feature: Table A; Target 18635; HLA-C*07:02; CTAG2; ENSG00000126890; TAA
GPRGAGAAR

SEQ ID NO: 18636 - protein, 10 aa, Homo sapiens
  misc_feature: Table A; Target 18636; HLA-B*07:02; CTAG2; ENSG00000126890; TAA
GPRGAGAARA

SEQ ID NO: 18637 - protein, 10 aa, Homo sapiens
  misc_feature: Table A; Target 18637; HLA-B*56:01; CTAG2; ENSG00000126890; TAA
GPRGAGAARA

SEQ ID NO: 18638 - protein, 10 aa, Homo sapiens
  misc_feature: Table A; Target 18638; HLA-C*07:02; CTAG2; ENSG00000126890; TAA
GPRGAGAARA

SEQ ID NO: 18639 - protein, 11 aa, Homo sapiens
  misc_feature: Table A; Target 18639; HLA-B*07:02; CTAG2; ENSG00000126890; TAA
GPRGAGAARAS

SEQ ID NO: 18640 - protein, 10 aa, Homo sapiens
  misc_feature: Table A; Target 18640; HLA-B*07:02; CTAG2; ENSG00000126890; TAA
GPRGGAPRGP

SEQ ID NO: 18641 - protein, 10 aa, Homo sapiens
  misc_feature: Table A; Target 18641; HLA-C*06:02; CTAG2; ENSG00000126890; TAA
GPRGGAPRGP

SEQ ID NO: 18642 - protein, 10 aa, Homo sapiens
  misc_feature: Table A; Target 18642; HLA-C*07:02; CTAG2; ENSG00000126890; TAA
GPRGGAPRGP

SEQ ID NO: 18643 - protein, 9 aa, Homo sapiens
  misc_feature: Table A; Target 18643; HLA-B*27:05; CTAG2; ENSG00000126890; TAA
GRGPRGAGA

SEQ ID NO: 18644 - protein, 11 aa, Homo sapiens
  misc_feature: Table A; Target 18644; HLA-B*27:05; CTAG2; ENSG00000126890; TAA
GRGPRGAGAAR

SEQ ID NO: 18645 - protein, 9 aa, Homo sapiens
  misc_feature: Table A; Target 18645; HLA-A*03:02; CTAG2; ENSG00000126890; TAA
GSASPEGQK

SEQ ID NO: 18646 - protein, 9 aa, Homo sapiens
  misc_feature: Table A; Target 18646; HLA-A*11:01; CTAG2; ENSG00000126890; TAA
GSASPEGQK

SEQ ID NO: 18647 - protein, 9 aa, Homo sapiens
  misc_feature: Table A; Target 18647; HLA-C*07:06; CTAG2; ENSG00000126890; TAA
GSASPEGQK

SEQ ID NO: 18648 - protein, 10 aa, Homo sapiens
  misc_feature: Table A; Target 18648; HLA-B*39:01; CTAG2; ENSG00000126890; TAA
GSASPEGQKA

SEQ ID NO: 18649 - protein, 11 aa, Homo sapiens
  misc_feature: Table A; Target 18649; HLA-A*31:01; CTAG2; ENSG00000126890; TAA
GSASPEGQKAR

SEQ ID NO: 18650 - protein, 11 aa, Homo sapiens
  misc_feature: Table A; Target 18650; HLA-A*68:01; CTAG2; ENSG00000126890; TAA
GSASPEGQKAR

SEQ ID NO: 18651 - protein, 11 aa, Homo sapiens
  misc_feature: Table A; Target 18651; HLA-C*07:06; CTAG2; ENSG00000126890; TAA
GSASPEGQKAR

SEQ ID NO: 18652 - protein, 11 aa, Homo sapiens
  misc_feature: Table A; Target 18652; HLA-A*31:01; CTAG2; ENSG00000126890; TAA
ILSRDAAPLPR

SEQ ID NO: 18653 - protein, 9 aa, Homo sapiens
  misc_feature: Table A; Target 18653; HLA-B*07:02; CTAG2; ENSG00000126890; TAA
IPDGPGGNA

SEQ ID NO: 18654 - protein, 9 aa, Homo sapiens
  misc_feature: Table A; Target 18654; HLA-B*55:01; CTAG2; ENSG00000126890; TAA
IPDGPGGNA

SEQ ID NO: 18655 - protein, 9 aa, Homo sapiens
  misc_feature: Table A; Target 18655; HLA-B*56:01; CTAG2; ENSG00000126890; TAA
IPDGPGGNA

SEQ ID NO: 18656 - protein, 9 aa, Homo sapiens
  misc_feature: Table A; Target 18656; HLA-C*05:01; CTAG2; ENSG00000126890; TAA
IPDGPGGNA

SEQ ID NO: 18657 - protein, 9 aa, Homo sapiens
  misc_feature: Table A; Target 18657; HLA-A*03:01; CTAG2; ENSG00000126890; TAA
ITMPFSSPM

SEQ ID NO: 18658 - protein, 9 aa, Homo sapiens
  misc_feature: Table A; Target 18658; HLA-A*11:01; CTAG2; ENSG00000126890; TAA
ITMPFSSPM

SEQ ID NO: 18659 - protein, 9 aa, Homo sapiens
  misc_feature: Table A; Target 18659; HLA-A*25:01; CTAG2; ENSG00000126890; TAA
ITMPFSSPM

SEQ ID NO: 18660 - protein, 9 aa, Homo sapiens
  misc_feature: Table A; Target 18660; HLA-A*26:01; CTAG2; ENSG00000126890; TAA
ITMPFSSPM

SEQ ID NO: 18661 - protein, 9 aa, Homo sapiens
  misc_feature: Table A; Target 18661; HLA-A*30:02; CTAG2; ENSG00000126890; TAA
ITMPFSSPM

SEQ ID NO: 18662 - protein, 9 aa, Homo sapiens
  misc_feature: Table A; Target 18662; HLA-A*31:01; CTAG2; ENSG00000126890; TAA
ITMPFSSPM

SEQ ID NO: 18663 - protein, 9 aa, Homo sapiens
  misc_feature: Table A; Target 18663; HLA-A*32:01; CTAG2; ENSG00000126890; TAA
ITMPFSSPM

SEQ ID NO: 18664 - protein, 9 aa, Homo sapiens
  misc_feature: Table A; Target 18664; HLA-B*07:02; CTAG2; ENSG00000126890; TAA
ITMPFSSPM

SEQ ID NO: 18665 - protein, 9 aa, Homo sapiens
  misc_feature: Table A; Target 18665; HLA-B*15:01; CTAG2; ENSG00000126890; TAA
ITMPFSSPM

SEQ ID NO: 18666 - protein, 9 aa, Homo sapiens
  misc_feature: Table A; Target 18666; HLA-B*15:03; CTAG2; ENSG00000126890; TAA
ITMPFSSPM

SEQ ID NO: 18667 - protein, 9 aa, Homo sapiens
  misc_feature: Table A; Target 18667; HLA-B*40:02; CTAG2; ENSG00000126890; TAA
ITMPFSSPM

SEQ ID NO: 18668 - protein, 9 aa, Homo sapiens
  misc_feature: Table A; Target 18668; HLA-B*46:01; CTAG2; ENSG00000126890; TAA
ITMPFSSPM

SEQ ID NO: 18669 - protein, 9 aa, Homo sapiens
  misc_feature: Table A; Target 18669; HLA-B*57:01; CTAG2; ENSG00000126890; TAA
ITMPFSSPM

SEQ ID NO: 18670 - protein, 9 aa, Homo sapiens
  misc_feature: Table A; Target 18670; HLA-B*58:01; CTAG2; ENSG00000126890; TAA
ITMPFSSPM

SEQ ID NO: 18671 - protein, 9 aa, Homo sapiens
  misc_feature: Table A; Target 18671; HLA-C*01:02; CTAG2; ENSG00000126890; TAA
ITMPFSSPM

SEQ ID NO: 18672 - protein, 9 aa, Homo sapiens
  misc_feature: Table A; Target 18672; HLA-C*02:02; CTAG2; ENSG00000126890; TAA
ITMPFSSPM

SEQ ID NO: 18673 - protein, 9 aa, Homo sapiens
  misc_feature: Table A; Target 18673; HLA-C*03:03; CTAG2; ENSG00000126890; TAA
ITMPFSSPM

SEQ ID NO: 18674 - protein, 9 aa, Homo sapiens
  misc_feature: Table A; Target 18674; HLA-C*03:04; CTAG2; ENSG00000126890; TAA
ITMPFSSPM

SEQ ID NO: 18675 - protein, 9 aa, Homo sapiens
  misc_feature: Table A; Target 18675; HLA-C*04:01; CTAG2; ENSG00000126890; TAA
ITMPFSSPM

SEQ ID NO: 18676 - protein, 9 aa, Homo sapiens
  misc_feature: Table A; Target 18676; HLA-C*06:02; CTAG2; ENSG00000126890; TAA
ITMPFSSPM

SEQ ID NO: 18677 - protein, 9 aa, Homo sapiens
  misc_feature: Table A; Target 18677; HLA-C*07:01; CTAG2; ENSG00000126890; TAA
ITMPFSSPM

SEQ ID NO: 18678 - protein, 9 aa, Homo sapiens
  misc_feature: Table A; Target 18678; HLA-C*07:02; CTAG2; ENSG00000126890; TAA
ITMPFSSPM

SEQ ID NO: 18679 - protein, 9 aa, Homo sapiens
  misc_feature: Table A; Target 18679; HLA-C*07:04; CTAG2; ENSG00000126890; TAA
ITMPFSSPM

SEQ ID NO: 18680 - protein, 9 aa, Homo sapiens
  misc_feature: Table A; Target 18680; HLA-C*12:03; CTAG2; ENSG00000126890; TAA
ITMPFSSPM

SEQ ID NO: 18681 - protein, 9 aa, Homo sapiens
  misc_feature: Table A; Target 18681; HLA-C*14:02; CTAG2; ENSG00000126890; TAA
ITMPFSSPM

SEQ ID NO: 18682 - protein, 9 aa, Homo sapiens
  misc_feature: Table A; Target 18682; HLA-C*16:01; CTAG2; ENSG00000126890; TAA
ITMPFSSPM

SEQ ID NO: 18683 - protein, 9 aa, Homo sapiens
  misc_feature: Table A; Target 18683; HLA-C*16:04; CTAG2; ENSG00000126890; TAA
ITMPFSSPM

SEQ ID NO: 18684 - protein, 9 aa, Homo sapiens
  misc_feature: Table A; Target 18684; HLA-A*30:01; CTAG2; ENSG00000126890; TAA
KDFTVSGNL

SEQ ID NO: 18685 - protein, 9 aa, Homo sapiens
  misc_feature: Table A; Target 18685; HLA-B*37:01; CTAG2; ENSG00000126890; TAA
KDFTVSGNL

SEQ ID NO: 18686 - protein, 9 aa, Homo sapiens
  misc_feature: Table A; Target 18686; HLA-B*40:01; CTAG2; ENSG00000126890; TAA
KDFTVSGNL

SEQ ID NO: 18687 - protein, 9 aa, Homo sapiens
  misc_feature: Table A; Target 18687; HLA-B*40:02; CTAG2; ENSG00000126890; TAA
KDFTVSGNL

SEQ ID NO: 18688 - protein, 9 aa, Homo sapiens
  misc_feature: Table A; Target 18688; HLA-C*06:02; CTAG2; ENSG00000126890; TAA
KDFTVSGNL

SEQ ID NO: 18689 - protein, 10 aa, Homo sapiens
  misc_feature: Table A; Target 18689; HLA-A*30:01; CTAG2; ENSG00000126890; TAA
KDFTVSGNLL

SEQ ID NO: 18690 - protein, 10 aa, Homo sapiens
  misc_feature: Table A; Target 18690; HLA-B*37:01; CTAG2; ENSG00000126890; TAA
KDFTVSGNLL

SEQ ID NO: 18691 - protein, 10 aa, Homo sapiens
  misc_feature: Table A; Target 18691; HLA-B*40:01; CTAG2; ENSG00000126890; TAA
KDFTVSGNLL

SEQ ID NO: 18692 - protein, 10 aa, Homo sapiens
  misc_feature: Table A; Target 18692; HLA-B*40:02; CTAG2; ENSG00000126890; TAA
KDFTVSGNLL

SEQ ID NO: 18693 - protein, 10 aa, Homo sapiens
  misc_feature: Table A; Target 18693; HLA-C*06:02; CTAG2; ENSG00000126890; TAA
KDFTVSGNLL

SEQ ID NO: 18694 - protein, 11 aa, Homo sapiens
  misc_feature: Table A; Target 18694; HLA-A*23:01; CTAG2; ENSG00000126890; TAA
KDFTVSGNLLF

SEQ ID NO: 18695 - protein, 11 aa, Homo sapiens
  misc_feature: Table A; Target 18695; HLA-B*57:01; CTAG2; ENSG00000126890; TAA
KDFTVSGNLLF

SEQ ID NO: 18696 - protein, 9 aa, Homo sapiens
  misc_feature: Table A; Target 18696; HLA-A*32:01; CTAG2; ENSG00000126890; TAA
KVSEQRPGT

SEQ ID NO: 18697 - protein, 10 aa, Homo sapiens
  misc_feature: Table A; Target 18697; HLA-C*07:02; CTAG2; ENSG00000126890; TAA
LGSASPEGQK

SEQ ID NO: 18698 - protein, 8 aa, Homo sapiens
  misc_feature: Table A; Target 18698; HLA-B*08:01; CTAG2; ENSG00000126890; TAA
LLQLHITM

SEQ ID NO: 18699 - protein, 8 aa, Homo sapiens
  misc_feature: Table A; Target 18699; HLA-C*07:04; CTAG2; ENSG00000126890; TAA
LLQLHITM

SEQ ID NO: 18700 - protein, 8 aa, Homo sapiens
  misc_feature: Table A; Target 18700; HLA-B*07:02; CTAG2; ENSG00000126890; TAA
LPRPGAVL

SEQ ID NO: 18701 - protein, 8 aa, Homo sapiens
  misc_feature: Table A; Target 18701; HLA-B*08:01; CTAG2; ENSG00000126890; TAA
LPRPGAVL

SEQ ID NO: 18702 - protein, 8 aa, Homo sapiens
  misc_feature: Table A; Target 18702; HLA-B*35:03; CTAG2; ENSG00000126890; TAA
LPRPGAVL

SEQ ID NO: 18703 - protein, 8 aa, Homo sapiens
  misc_feature: Table A; Target 18703; HLA-B*51:01; CTAG2; ENSG00000126890; TAA
LPRPGAVL

SEQ ID NO: 18704 - protein, 8 aa, Homo sapiens
  misc_feature: Table A; Target 18704; HLA-C*07:02; CTAG2; ENSG00000126890; TAA
LPRPGAVL

SEQ ID NO: 18705 - protein, 9 aa, Homo sapiens
  misc_feature: Table A; Target 18705; HLA-B*51:01; CTAG2; ENSG00000126890; TAA
LPRPGAVLK

SEQ ID NO: 18706 - protein, 9 aa, Homo sapiens
  misc_feature: Table A; Target 18706; HLA-B*56:01; CTAG2; ENSG00000126890; TAA
LPRPGAVLK

SEQ ID NO: 18707 - protein, 9 aa, Homo sapiens
  misc_feature: Table A; Target 18707; HLA-A*24:02; CTAG2; ENSG00000126890; TAA
LQLHITMPF

SEQ ID NO: 18708 - protein, 9 aa, Homo sapiens
  misc_feature: Table A; Target 18708; HLA-B*57:01; CTAG2; ENSG00000126890; TAA
LQLHITMPF

SEQ ID NO: 18709 - protein, 9 aa, Homo sapiens
  misc_feature: Table A; Target 18709; HLA-C*06:02; CTAG2; ENSG00000126890; TAA
LSRDAAPLP

SEQ ID NO: 18710 - protein, 10 aa, Homo sapiens
  misc_feature: Table A; Target 18710; HLA-A*31:01; CTAG2; ENSG00000126890; TAA
LSRDAAPLPR

SEQ ID NO: 18711 - protein, 10 aa, Homo sapiens
  misc_feature: Table A; Target 18711; HLA-A*33:03; CTAG2; ENSG00000126890; TAA
LSRDAAPLPR

SEQ ID NO: 18712 - protein, 10 aa, Homo sapiens
  misc_feature: Table A; Target 18712; HLA-A*68:01; CTAG2; ENSG00000126890; TAA
LSRDAAPLPR

SEQ ID NO: 18713 - protein, 10 aa, Homo sapiens
  misc_feature: Table A; Target 18713; HLA-B*57:01; CTAG2; ENSG00000126890; TAA
LSRDAAPLPR

SEQ ID NO: 18714 - protein, 9 aa, Homo sapiens
  misc_feature: Table A; Target 18714; HLA-B*44:02; CTAG2; ENSG00000126890; TAA
MEAELVRRI

SEQ ID NO: 18715 - protein, 9 aa, Homo sapiens
  misc_feature: Table A; Target 18715; HLA-B*44:03; CTAG2; ENSG00000126890; TAA
MEAELVRRI

SEQ ID NO: 18716 - protein, 9 aa, Homo sapiens
  misc_feature: Table A; Target 18716; HLA-B*49:01; CTAG2; ENSG00000126890; TAA
MEAELVRRI

SEQ ID NO: 18717 - protein, 8 aa, Homo sapiens
  misc_feature: Table A; Target 18717; HLA-B*51:01; CTAG2; ENSG00000126890; TAA
MPFSSPME

SEQ ID NO: 18718 - protein, 9 aa, Homo sapiens
  misc_feature: Table A; Target 18718; HLA-A*02:01; CTAG2; ENSG00000126890; TAA
MPFSSPMEA

SEQ ID NO: 18719 - protein, 9 aa, Homo sapiens
  misc_feature: Table A; Target 18719; HLA-A*02:03; CTAG2; ENSG00000126890; TAA
MPFSSPMEA

SEQ ID NO: 18720 - protein, 9 aa, Homo sapiens
  misc_feature: Table A; Target 18720; HLA-B*07:02; CTAG2; ENSG00000126890; TAA
MPFSSPMEA

SEQ ID NO: 18721 - protein, 9 aa, Homo sapiens
  misc_feature: Table A; Target 18721; HLA-B*35:01; CTAG2; ENSG00000126890; TAA
MPFSSPMEA

SEQ ID NO: 18722 - protein, 9 aa, Homo sapiens
  misc_feature: Table A; Target 18722; HLA-B*35:03; CTAG2; ENSG00000126890; TAA
MPFSSPMEA

SEQ ID NO: 18723 - protein, 9 aa, Homo sapiens
  misc_feature: Table A; Target 18723; HLA-B*51:01; CTAG2; ENSG00000126890; TAA
MPFSSPMEA

SEQ ID NO: 18724 - protein, 9 aa, Homo sapiens
  misc_feature: Table A; Target 18724; HLA-B*54:01; CTAG2; ENSG00000126890; TAA
MPFSSPMEA

SEQ ID NO: 18725 - protein, 9 aa, Homo sapiens
  misc_feature: Table A; Target 18725; HLA-B*55:01; CTAG2; ENSG00000126890; TAA
MPFSSPMEA

SEQ ID NO: 18726 - protein, 9 aa, Homo sapiens
  misc_feature: Table A; Target 18726; HLA-B*56:01; CTAG2; ENSG00000126890; TAA
MPFSSPMEA

SEQ ID NO: 18727 - protein, 9 aa, Homo sapiens
  misc_feature: Table A; Target 18727; HLA-C*04:01; CTAG2; ENSG00000126890; TAA
MPFSSPMEA

SEQ ID NO: 18728 - protein, 9 aa, Homo sapiens
  misc_feature: Table A; Target 18728; HLA-C*07:02; CTAG2; ENSG00000126890; TAA
MPFSSPMEA

SEQ ID NO: 18729 - protein, 9 aa, Homo sapiens
  misc_feature: Table A; Target 18729; HLA-C*12:03; CTAG2; ENSG00000126890; TAA
MPFSSPMEA

SEQ ID NO: 18730 - protein, 10 aa, Homo sapiens
  misc_feature: Table A; Target 18730; HLA-B*35:01; CTAG2; ENSG00000126890; TAA
MPFSSPMEAE

SEQ ID NO: 18731 - protein, 11 aa, Homo sapiens
  misc_feature: Table A; Target 18731; HLA-A*68:02; CTAG2; ENSG00000126890; TAA
MPFSSPMEAEL

SEQ ID NO: 18732 - protein, 11 aa, Homo sapiens
  misc_feature: Table A; Target 18732; HLA-B*07:02; CTAG2; ENSG00000126890; TAA
MPFSSPMEAEL

SEQ ID NO: 18733 - protein, 11 aa, Homo sapiens
  misc_feature: Table A; Target 18733; HLA-B*35:01; CTAG2; ENSG00000126890; TAA
MPFSSPMEAEL

SEQ ID NO: 18734 - protein, 11 aa, Homo sapiens
  misc_feature: Table A; Target 18734; HLA-B*35:03; CTAG2; ENSG00000126890; TAA
MPFSSPMEAEL

SEQ ID NO: 18735 - protein, 11 aa, Homo sapiens
  misc_feature: Table A; Target 18735; HLA-B*51:01; CTAG2; ENSG00000126890; TAA
MPFSSPMEAEL

SEQ ID NO: 18736 - protein, 11 aa, Homo sapiens
  misc_feature: Table A; Target 18736; HLA-B*54:01; CTAG2; ENSG00000126890; TAA
MPFSSPMEAEL

SEQ ID NO: 18737 - protein, 11 aa, Homo sapiens
  misc_feature: Table A; Target 18737; HLA-B*55:01; CTAG2; ENSG00000126890; TAA
MPFSSPMEAEL

SEQ ID NO: 18738 - protein, 11 aa, Homo sapiens
  misc_feature: Table A; Target 18738; HLA-B*56:01; CTAG2; ENSG00000126890; TAA
MPFSSPMEAEL

SEQ ID NO: 18739 - protein, 11 aa, Homo sapiens
  misc_feature: Table A; Target 18739; HLA-C*03:03; CTAG2; ENSG00000126890; TAA
MPFSSPMEAEL

SEQ ID NO: 18740 - protein, 9 aa, Homo sapiens
  misc_feature: Table A; Target 18740; HLA-A*02:01; CTAG2; ENSG00000126890; TAA
NVMFSAPHI

SEQ ID NO: 18741 - protein, 9 aa, Homo sapiens
  misc_feature: Table A; Target 18741; HLA-A*02:03; CTAG2; ENSG00000126890; TAA
NVMFSAPHI

SEQ ID NO: 18742 - protein, 9 aa, Homo sapiens
  misc_feature: Table A; Target 18742; HLA-A*02:04; CTAG2; ENSG00000126890; TAA
NVMFSAPHI

SEQ ID NO: 18743 - protein, 9 aa, Homo sapiens
  misc_feature: Table A; Target 18743; HLA-A*02:07; CTAG2; ENSG00000126890; TAA
NVMFSAPHI

SEQ ID NO: 18744 - protein, 9 aa, Homo sapiens
  misc_feature: Table A; Target 18744; HLA-A*23:01; CTAG2; ENSG00000126890; TAA
NVMFSAPHI

SEQ ID NO: 18745 - protein, 9 aa, Homo sapiens
  misc_feature: Table A; Target 18745; HLA-A*24:02; CTAG2; ENSG00000126890; TAA
NVMFSAPHI

SEQ ID NO: 18746 - protein, 9 aa, Homo sapiens
  misc_feature: Table A; Target 18746; HLA-A*25:01; CTAG2; ENSG00000126890; TAA
NVMFSAPHI

SEQ ID NO: 18747 - protein, 9 aa, Homo sapiens
  misc_feature: Table A; Target 18747; HLA-A*26:01; CTAG2; ENSG00000126890; TAA
NVMFSAPHI

SEQ ID NO: 18748 - protein, 9 aa, Homo sapiens
  misc_feature: Table A; Target 18748; HLA-A*68:02; CTAG2; ENSG00000126890; TAA
NVMFSAPHI

SEQ ID NO: 18749 - protein, 9 aa, Homo sapiens
  misc_feature: Table A; Target 18749; HLA-B*13:02; CTAG2; ENSG00000126890; TAA
NVMFSAPHI

SEQ ID NO: 18750 - protein, 9 aa, Homo sapiens
  misc_feature: Table A; Target 18750; HLA-B*35:03; CTAG2; ENSG00000126890; TAA
NVMFSAPHI

SEQ ID NO: 18751 - protein, 9 aa, Homo sapiens
  misc_feature: Table A; Target 18751; HLA-B*38:01; CTAG2; ENSG00000126890; TAA
NVMFSAPHI

SEQ ID NO: 18752 - protein, 9 aa, Homo sapiens
  misc_feature: Table A; Target 18752; HLA-B*44:03; CTAG2; ENSG00000126890; TAA
NVMFSAPHI

SEQ ID NO: 18753 - protein, 9 aa, Homo sapiens
  misc_feature: Table A; Target 18753; HLA-B*51:01; CTAG2; ENSG00000126890; TAA
NVMFSAPHI

SEQ ID NO: 18754 - protein, 9 aa, Homo sapiens
  misc_feature: Table A; Target 18754; HLA-B*54:01; CTAG2; ENSG00000126890; TAA
NVMFSAPHI

SEQ ID NO: 18755 - protein, 9 aa, Homo sapiens
  misc_feature: Table A; Target 18755; HLA-B*55:01; CTAG2; ENSG00000126890; TAA
NVMFSAPHI

SEQ ID NO: 18756 - protein, 9 aa, Homo sapiens
  misc_feature: Table A; Target 18756; HLA-C*04:01; CTAG2; ENSG00000126890; TAA
NVMFSAPHI

SEQ ID NO: 18757 - protein, 9 aa, Homo sapiens
  misc_feature: Table A; Target 18757; HLA-C*06:02; CTAG2; ENSG00000126890; TAA
NVMFSAPHI

SEQ ID NO: 18758 - protein, 9 aa, Homo sapiens
  misc_feature: Table A; Target 18758; HLA-C*07:01; CTAG2; ENSG00000126890; TAA
NVMFSAPHI

SEQ ID NO: 18759 - protein, 9 aa, Homo sapiens
  misc_feature: Table A; Target 18759; HLA-C*07:02; CTAG2; ENSG00000126890; TAA
NVMFSAPHI

SEQ ID NO: 18760 - protein, 9 aa, Homo sapiens
  misc_feature: Table A; Target 18760; HLA-A*24:02; CTAG2; ENSG00000126890; TAA
PLPRPGAVL

SEQ ID NO: 18761 - protein, 9 aa, Homo sapiens
  misc_feature: Table A; Target 18761; HLA-C*06:02; CTAG2; ENSG00000126890; TAA
PRGGAPRGP

SEQ ID NO: 18762 - protein, 9 aa, Homo sapiens
  misc_feature: Table A; Target 18762; HLA-C*07:02; CTAG2; ENSG00000126890; TAA
PRGGAPRGP

SEQ ID NO: 18763 - protein, 11 aa, Homo sapiens
  misc_feature: Table A; Target 18763; HLA-C*04:01; CTAG2; ENSG00000126890; TAA
QAEGQGTGGST

SEQ ID NO: 18764 - protein, 11 aa, Homo sapiens
  misc_feature: Table A; Target 18764; HLA-C*07:01; CTAG2; ENSG00000126890; TAA
QAEGQGTGGST

SEQ ID NO: 18765 - protein, 10 aa, Homo sapiens
  misc_feature: Table A; Target 18765; HLA-C*06:02; CTAG2; ENSG00000126890; TAA
QRPGTPGPPP

SEQ ID NO: 18766 - protein, 10 aa, Homo sapiens
  misc_feature: Table A; Target 18766; HLA-C*16:02; CTAG2; ENSG00000126890; TAA
RASGPRGGAP

SEQ ID NO: 18767 - protein, 11 aa, Homo sapiens
  misc_feature: Table A; Target 18767; HLA-A*31:01; CTAG2; ENSG00000126890; TAA
RASGPRGGAPR

SEQ ID NO: 18768 - protein, 8 aa, Homo sapiens
  misc_feature: Table A; Target 18768; HLA-A*03:01; CTAG2; ENSG00000126890; TAA
RDAAPLPR

SEQ ID NO: 18769 - protein, 11 aa, Homo sapiens
  misc_feature: Table A; Target 18769; HLA-A*32:01; CTAG2; ENSG00000126890; TAA
RGAGAARASGP

SEQ ID NO: 18770 - protein, 11 aa, Homo sapiens
  misc_feature: Table A; Target 18770; HLA-C*06:02; CTAG2; ENSG00000126890; TAA
RGAGAARASGP

SEQ ID NO: 18771 - protein, 10 aa, Homo sapiens
  misc_feature: Table A; Target 18771; HLA-A*31:01; CTAG2; ENSG00000126890; TAA
RGPRGAGAAR

SEQ ID NO: 18772 - protein, 10 aa, Homo sapiens
  misc_feature: Table A; Target 18772; HLA-C*01:02; CTAG2; ENSG00000126890; TAA
RGPRGAGAAR

SEQ ID NO: 18773 - protein, 9 aa, Homo sapiens
  misc_feature: Table A; Target 18773; HLA-B*57:01; CTAG2; ENSG00000126890; TAA
RGVAFNVMF

SEQ ID NO: 18774 - protein, 9 aa, Homo sapiens
  misc_feature: Table A; Target 18774; HLA-A*02:04; CTAG2; ENSG00000126890; TAA
RLLQLHITM

SEQ ID NO: 18775 - protein, 9 aa, Homo sapiens
  misc_feature: Table A; Target 18775; HLA-A*31:01; CTAG2; ENSG00000126890; TAA
RMRVVGWGL

SEQ ID NO: 18776 - protein, 9 aa, Homo sapiens
  misc_feature: Table A; Target 18776; HLA-B*07:02; CTAG2; ENSG00000126890; TAA
RPDSRLLQL

SEQ ID NO: 18777 - protein, 9 aa, Homo sapiens
  misc_feature: Table A; Target 18777; HLA-B*08:01; CTAG2; ENSG00000126890; TAA
RPDSRLLQL

SEQ ID NO: 18778 - protein, 9 aa, Homo sapiens
  misc_feature: Table A; Target 18778; HLA-C*07:02; CTAG2; ENSG00000126890; TAA
RPDSRLLQL

SEQ ID NO: 18779 - protein, 9 aa, Homo sapiens
  misc_feature: Table A; Target 18779; HLA-B*07:02; CTAG2; ENSG00000126890; TAA
RPGTPGPPP

SEQ ID NO: 18780 - protein, 9 aa, Homo sapiens
  misc_feature: Table A; Target 18780; HLA-B*55:01; CTAG2; ENSG00000126890; TAA
RPGTPGPPP

SEQ ID NO: 18781 - protein, 9 aa, Homo sapiens
  misc_feature: Table A; Target 18781; HLA-B*56:01; CTAG2; ENSG00000126890; TAA
RPGTPGPPP

SEQ ID NO: 18782 - protein, 9 aa, Homo sapiens
  misc_feature: Table A; Target 18782; HLA-C*07:02; CTAG2; ENSG00000126890; TAA
RPGTPGPPP

SEQ ID NO: 18783 - protein, 10 aa, Homo sapiens
  misc_feature: Table A; Target 18783; HLA-A*24:02; CTAG2; ENSG00000126890; TAA
RRPDSRLLQL

SEQ ID NO: 18784 - protein, 10 aa, Homo sapiens
  misc_feature: Table A; Target 18784; HLA-A*68:01; CTAG2; ENSG00000126890; TAA
SASPEGQKAR

SEQ ID NO: 18785 - protein, 10 aa, Homo sapiens
  misc_feature: Table A; Target 18785; HLA-C*07:06; CTAG2; ENSG00000126890; TAA
SASPEGQKAR

SEQ ID NO: 18786 - protein, 9 aa, Homo sapiens
  misc_feature: Table A; Target 18786; HLA-B*51:01; CTAG2; ENSG00000126890; TAA
SGNLLFMSV

SEQ ID NO: 18787 - protein, 9 aa, Homo sapiens
  misc_feature: Table A; Target 18787; HLA-B*54:01; CTAG2; ENSG00000126890; TAA
SGNLLFMSV

SEQ ID NO: 18788 - protein, 9 aa, Homo sapiens
  misc_feature: Table A; Target 18788; HLA-B*56:01; CTAG2; ENSG00000126890; TAA
SGNLLFMSV

SEQ ID NO: 18789 - protein, 9 aa, Homo sapiens
  misc_feature: Table A; Target 18789; HLA-C*06:02; CTAG2; ENSG00000126890; TAA
SGNLLFMSV

SEQ ID NO: 18790 - protein, 8 aa, Homo sapiens
  misc_feature: Table A; Target 18790; HLA-C*01:02; CTAG2; ENSG00000126890; TAA
SGPRGGAP

SEQ ID NO: 18791 - protein, 9 aa, Homo sapiens
  misc_feature: Table A; Target 18791; HLA-C*01:02; CTAG2; ENSG00000126890; TAA
SGPRGGAPR

SEQ ID NO: 18792 - protein, 11 aa, Homo sapiens
  misc_feature: Table A; Target 18792; HLA-C*06:02; CTAG2; ENSG00000126890; TAA
SGPRGGAPRGP

SEQ ID NO: 18793 - protein, 11 aa, Homo sapiens
  misc_feature: Table A; Target 18793; HLA-C*07:02; CTAG2; ENSG00000126890; TAA
SGPRGGAPRGP

SEQ ID NO: 18794 - protein, 10 aa, Homo sapiens
  misc_feature: Table A; Target 18794; HLA-B*07:02; CTAG2; ENSG00000126890; TAA
SPEGQKARDL

SEQ ID NO: 18795 - protein, 10 aa, Homo sapiens
  misc_feature: Table A; Target 18795; HLA-C*07:02; CTAG2; ENSG00000126890; TAA
SPEGQKARDL

SEQ ID NO: 18796 - protein, 8 aa, Homo sapiens
  misc_feature: Table A; Target 18796; HLA-B*51:01; CTAG2; ENSG00000126890; TAA
SPMEAELV

SEQ ID NO: 18797 - protein, 8 aa, Homo sapiens
  misc_feature: Table A; Target 18797; HLA-B*56:01; CTAG2; ENSG00000126890; TAA
SPMEAELV

SEQ ID NO: 18798 - protein, 9 aa, Homo sapiens
  misc_feature: Table A; Target 18798; HLA-A*33:03; CTAG2; ENSG00000126890; TAA
SPMEAELVR

SEQ ID NO: 18799 - protein, 9 aa, Homo sapiens
  misc_feature: Table A; Target 18799; HLA-A*68:01; CTAG2; ENSG00000126890; TAA
SPMEAELVR

SEQ ID NO: 18800 - protein, 9 aa, Homo sapiens
  misc_feature: Table A; Target 18800; HLA-B*35:01; CTAG2; ENSG00000126890; TAA
SPMEAELVR

SEQ ID NO: 18801 - protein, 9 aa, Homo sapiens
  misc_feature: Table A; Target 18801; HLA-B*35:03; CTAG2; ENSG00000126890; TAA
SPMEAELVR

SEQ ID NO: 18802 - protein, 9 aa, Homo sapiens
  misc_feature: Table A; Target 18802; HLA-B*54:01; CTAG2; ENSG00000126890; TAA
SPMEAELVR

SEQ ID NO: 18803 - protein, 9 aa, Homo sapiens
  misc_feature: Table A; Target 18803; HLA-B*55:01; CTAG2; ENSG00000126890; TAA
SPMEAELVR

SEQ ID NO: 18804 - protein, 9 aa, Homo sapiens
  misc_feature: Table A; Target 18804; HLA-B*56:01; CTAG2; ENSG00000126890; TAA
SPMEAELVR

SEQ ID NO: 18805 - protein, 9 aa, Homo sapiens
  misc_feature: Table A; Target 18805; HLA-C*03:03; CTAG2; ENSG00000126890; TAA
SPMEAELVR

SEQ ID NO: 18806 - protein, 9 aa, Homo sapiens
  misc_feature: Table A; Target 18806; HLA-C*07:06; CTAG2; ENSG00000126890; TAA
SPMEAELVR

SEQ ID NO: 18807 - protein, 10 aa, Homo sapiens
  misc_feature: Table A; Target 18807; HLA-A*33:03; CTAG2; ENSG00000126890; TAA
SPMEAELVRR

SEQ ID NO: 18808 - protein, 10 aa, Homo sapiens
  misc_feature: Table A; Target 18808; HLA-A*68:01; CTAG2; ENSG00000126890; TAA
SPMEAELVRR

SEQ ID NO: 18809 - protein, 10 aa, Homo sapiens
  misc_feature: Table A; Target 18809; HLA-B*55:01; CTAG2; ENSG00000126890; TAA
SPMEAELVRR

SEQ ID NO: 18810 - protein, 10 aa, Homo sapiens
  misc_feature: Table A; Target 18810; HLA-C*07:06; CTAG2; ENSG00000126890; TAA
SPMEAELVRR

SEQ ID NO: 18811 - protein, 9 aa, Homo sapiens
  misc_feature: Table A; Target 18811; HLA-B*27:02; CTAG2; ENSG00000126890; TAA
SRDAAPLPR

SEQ ID NO: 18812 - protein, 9 aa, Homo sapiens
  misc_feature: Table A; Target 18812; HLA-B*27:05; CTAG2; ENSG00000126890; TAA
SRDAAPLPR

SEQ ID NO: 18813 - protein, 8 aa, Homo sapiens
  misc_feature: Table A; Target 18813; HLA-C*01:02; CTAG2; ENSG00000126890; TAA
SSPMEAEL

SEQ ID NO: 18814 - protein, 10 aa, Homo sapiens
  misc_feature: Table A; Target 18814; HLA-C*07:06; CTAG2; ENSG00000126890; TAA
SSPMEAELVR

SEQ ID NO: 18815 - protein, 8 aa, Homo sapiens
  misc_feature: Table A; Target 18815; HLA-C*01:02; CTAG2; ENSG00000126890; TAA
TMPFSSPM

SEQ ID NO: 18816 - protein, 9 aa, Homo sapiens
  misc_feature: Table A; Target 18816; HLA-B*35:03; CTAG2; ENSG00000126890; TAA
TPGPPPPEG

SEQ ID NO: 18817 - protein, 9 aa, Homo sapiens
  misc_feature: Table A; Target 18817; HLA-B*54:01; CTAG2; ENSG00000126890; TAA
TPGPPPPEG

SEQ ID NO: 18818 - protein, 9 aa, Homo sapiens
  misc_feature: Table A; Target 18818; HLA-B*55:01; CTAG2; ENSG00000126890; TAA
TPGPPPPEG

SEQ ID NO: 18819 - protein, 9 aa, Homo sapiens
  misc_feature: Table A; Target 18819; HLA-B*56:01; CTAG2; ENSG00000126890; TAA
TPGPPPPEG

SEQ ID NO: 18820 - protein, 10 aa, Homo sapiens
  misc_feature: Table A; Target 18820; HLA-B*56:01; CTAG2; ENSG00000126890; TAA
TPGPPPPEGA

SEQ ID NO: 18821 - protein, 9 aa, Homo sapiens
  misc_feature: Table A; Target 18821; HLA-A*02:03; CTAG2; ENSG00000126890; TAA
TVSGNLLFM

SEQ ID NO: 18822 - protein, 9 aa, Homo sapiens
  misc_feature: Table A; Target 18822; HLA-A*03:01; CTAG2; ENSG00000126890; TAA
TVSGNLLFM

SEQ ID NO: 18823 - protein, 9 aa, Homo sapiens
  misc_feature: Table A; Target 18823; HLA-A*26:01; CTAG2; ENSG00000126890; TAA
TVSGNLLFM

SEQ ID NO: 18824 - protein, 9 aa, Homo sapiens
  misc_feature: Table A; Target 18824; HLA-A*29:02; CTAG2; ENSG00000126890; TAA
TVSGNLLFM

SEQ ID NO: 18825 - protein, 9 aa, Homo sapiens
  misc_feature: Table A; Target 18825; HLA-A*68:02; CTAG2; ENSG00000126890; TAA
TVSGNLLFM

SEQ ID NO: 18826 - protein, 9 aa, Homo sapiens
  misc_feature: Table A; Target 18826; HLA-B*13:02; CTAG2; ENSG00000126890; TAA
TVSGNLLFM

SEQ ID NO: 18827 - protein, 9 aa, Homo sapiens
  misc_feature: Table A; Target 18827; HLA-C*07:04; CTAG2; ENSG00000126890; TAA
TVSGNLLFM

SEQ ID NO: 18828 - protein, 9 aa, Homo sapiens
  misc_feature: Table A; Target 18828; HLA-C*07:06; CTAG2; ENSG00000126890; TAA
TVSGNLLFM

SEQ ID NO: 18829 - protein, 11 aa, Homo sapiens
  misc_feature: Table A; Target 18829; HLA-A*68:02; CTAG2; ENSG00000126890; TAA
TVSGNLLFMSV

SEQ ID NO: 18830 - protein, 9 aa, Homo sapiens
  misc_feature: Table A; Target 18830; HLA-B*54:01; CTAG2; ENSG00000126890; TAA
VAFNVMFSA

SEQ ID NO: 18831 - protein, 9 aa, Homo sapiens
  misc_feature: Table A; Target 18831; HLA-B*56:01; CTAG2; ENSG00000126890; TAA
VAFNVMFSA

SEQ ID NO: 18832 - protein, 9 aa, Homo sapiens
  misc_feature: Table A; Target 18832; HLA-A*02:03; CTAG2; ENSG00000126890; TAA
VLKDFTVSG

SEQ ID NO: 18833 - protein, 9 aa, Homo sapiens
  misc_feature: Table A; Target 18833; HLA-A*31:01; CTAG2; ENSG00000126890; TAA
VLKDFTVSG

SEQ ID NO: 18834 - protein, 9 aa, Homo sapiens
  misc_feature: Table A; Target 18834; HLA-B*46:01; CTAG2; ENSG00000126890; TAA
VLKDFTVSG

SEQ ID NO: 18835 - protein, 10 aa, Homo sapiens
  misc_feature: Table A; Target 18835; HLA-A*02:03; CTAG2; ENSG00000126890; TAA
VLKDFTVSGN

SEQ ID NO: 18836 - protein, 11 aa, Homo sapiens
  misc_feature: Table A; Target 18836; HLA-A*02:03; CTAG2; ENSG00000126890; TAA
VLKDFTVSGNL

SEQ ID NO: 18837 - protein, 8 aa, Homo sapiens
  misc_feature: Table A; Target 18837; HLA-A*02:01; CTAG2; ENSG00000126890; TAA
VMFSAPHI

SEQ ID NO: 18838 - protein, 8 aa, Homo sapiens
  misc_feature: Table A; Target 18838; HLA-A*02:03; CTAG2; ENSG00000126890; TAA
VMFSAPHI

SEQ ID NO: 18839 - protein, 8 aa, Homo sapiens
  misc_feature: Table A; Target 18839; HLA-A*02:04; CTAG2; ENSG00000126890; TAA
VMFSAPHI

SEQ ID NO: 18840 - protein, 8 aa, Homo sapiens
  misc_feature: Table A; Target 18840; HLA-A*02:07; CTAG2; ENSG00000126890; TAA
VMFSAPHI

SEQ ID NO: 18841 - protein, 8 aa, Homo sapiens
  misc_feature: Table A; Target 18841; HLA-A*23:01; CTAG2; ENSG00000126890; TAA
VMFSAPHI

SEQ ID NO: 18842 - protein, 8 aa, Homo sapiens
  misc_feature: Table A; Target 18842; HLA-A*24:02; CTAG2; ENSG00000126890; TAA
VMFSAPHI

SEQ ID NO: 18843 - protein, 8 aa, Homo sapiens
  misc_feature: Table A; Target 18843; HLA-B*07:02; CTAG2; ENSG00000126890; TAA
VMFSAPHI

SEQ ID NO: 18844 - protein, 8 aa, Homo sapiens
  misc_feature: Table A; Target 18844; HLA-B*13:02; CTAG2; ENSG00000126890; TAA
VMFSAPHI

SEQ ID NO: 18845 - protein, 8 aa, Homo sapiens
  misc_feature: Table A; Target 18845; HLA-B*37:01; CTAG2; ENSG00000126890; TAA
VMFSAPHI

SEQ ID NO: 18846 - protein, 8 aa, Homo sapiens
  misc_feature: Table A; Target 18846; HLA-B*40:02; CTAG2; ENSG00000126890; TAA
VMFSAPHI

SEQ ID NO: 18847 - protein, 8 aa, Homo sapiens
  misc_feature: Table A; Target 18847; HLA-B*46:01; CTAG2; ENSG00000126890; TAA
VMFSAPHI

SEQ ID NO: 18848 - protein, 8 aa, Homo sapiens
  misc_feature: Table A; Target 18848; HLA-B*49:01; CTAG2; ENSG00000126890; TAA
VMFSAPHI

SEQ ID NO: 18849 - protein, 8 aa, Homo sapiens
  misc_feature: Table A; Target 18849; HLA-B*51:01; CTAG2; ENSG00000126890; TAA
VMFSAPHI

SEQ ID NO: 18850 - protein, 8 aa, Homo sapiens
  misc_feature: Table A; Target 18850; HLA-B*55:01; CTAG2; ENSG00000126890; TAA
VMFSAPHI

SEQ ID NO: 18851 - protein, 8 aa, Homo sapiens
  misc_feature: Table A; Target 18851; HLA-B*58:01; CTAG2; ENSG00000126890; TAA
VMFSAPHI

SEQ ID NO: 18852 - protein, 8 aa, Homo sapiens
  misc_feature: Table A; Target 18852; HLA-C*02:02; CTAG2; ENSG00000126890; TAA
VMFSAPHI

SEQ ID NO: 18853 - protein, 8 aa, Homo sapiens
  misc_feature: Table A; Target 18853; HLA-C*04:01; CTAG2; ENSG00000126890; TAA
VMFSAPHI

SEQ ID NO: 18854 - protein, 8 aa, Homo sapiens
  misc_feature: Table A; Target 18854; HLA-C*06:02; CTAG2; ENSG00000126890; TAA
VMFSAPHI

SEQ ID NO: 18855 - protein, 8 aa, Homo sapiens
  misc_feature: Table A; Target 18855; HLA-C*07:01; CTAG2; ENSG00000126890; TAA
VMFSAPHI

SEQ ID NO: 18856 - protein, 8 aa, Homo sapiens
  misc_feature: Table A; Target 18856; HLA-C*07:02; CTAG2; ENSG00000126890; TAA
VMFSAPHI

SEQ ID NO: 18857 - protein, 8 aa, Homo sapiens
  misc_feature: Table A; Target 18857; HLA-C*07:04; CTAG2; ENSG00000126890; TAA
VMFSAPHI

SEQ ID NO: 18858 - protein, 8 aa, Homo sapiens
  misc_feature: Table A; Target 18858; HLA-C*12:03; CTAG2; ENSG00000126890; TAA
VMFSAPHI

SEQ ID NO: 18859 - protein, 8 aa, Homo sapiens
  misc_feature: Table A; Target 18859; HLA-C*16:02; CTAG2; ENSG00000126890; TAA
VMFSAPHI

SEQ ID NO: 18860 - protein, 8 aa, Homo sapiens
  misc_feature: Table A; Target 18860; HLA-C*16:04; CTAG2; ENSG00000126890; TAA
VMFSAPHI

SEQ ID NO: 18861 - protein, 10 aa, Homo sapiens
  misc_feature: Table A; Target 18861; HLA-A*03:02; CTCFL; ENSG00000124092; CTA
AAAEEASTTK

SEQ ID NO: 18862 - protein, 10 aa, Homo sapiens
  misc_feature: Table A; Target 18862; HLA-A*11:01; CTCFL; ENSG00000124092; CTA
AAAEEASTTK

SEQ ID NO: 18863 - protein, 10 aa, Homo sapiens
  misc_feature: Table A; Target 18863; HLA-B*27:02; CTCFL; ENSG00000124092; CTA
AAAEEASTTK

SEQ ID NO: 18864 - protein, 10 aa, Homo sapiens
  misc_feature: Table A; Target 18864; HLA-C*07:06; CTCFL; ENSG00000124092; CTA
AAAEEASTTK

SEQ ID NO: 18865 - protein, 9 aa, Homo sapiens
  misc_feature: Table A; Target 18865; HLA-A*03:02; CTCFL; ENSG00000124092; CTA
AAEEASTTK

SEQ ID NO: 18866 - protein, 9 aa, Homo sapiens
  misc_feature: Table A; Target 18866; HLA-A*11:01; CTCFL; ENSG00000124092; CTA
AAEEASTTK

SEQ ID NO: 18867 - protein, 9 aa, Homo sapiens
  misc_feature: Table A; Target 18867; HLA-C*05:01; CTCFL; ENSG00000124092; CTA
AAEEASTTK

SEQ ID NO: 18868 - protein, 9 aa, Homo sapiens
  misc_feature: Table A; Target 18868; HLA-C*07:06; CTCFL; ENSG00000124092; CTA
AAEEASTTK

SEQ ID NO: 18869 - protein, 10 aa, Homo sapiens
  misc_feature: Table A; Target 18869; HLA-C*05:01; CTCFL; ENSG00000124092; CTA
AAEEASTTKG

SEQ ID NO: 18870 - protein, 8 aa, Homo sapiens
  misc_feature: Table A; Target 18870; HLA-B*08:01; CTCFL; ENSG00000124092; CTA
AAELKCRY

SEQ ID NO: 18871 - protein, 8 aa, Homo sapiens
  misc_feature: Table A; Target 18871; HLA-C*16:01; CTCFL; ENSG00000124092; CTA
AAELKCRY

SEQ ID NO: 18872 - protein, 8 aa, Homo sapiens
  misc_feature: Table A; Target 18872; HLA-B*58:01; CTCFL; ENSG00000124092; CTA
AATEISVL

SEQ ID NO: 18873 - protein, 8 aa, Homo sapiens
  misc_feature: Table A; Target 18873; HLA-C*01:02; CTCFL; ENSG00000124092; CTA
AATEISVL

SEQ ID NO: 18874 - protein, 8 aa, Homo sapiens
  misc_feature: Table A; Target 18874; HLA-C*03:03; CTCFL; ENSG00000124092; CTA
AATEISVL

SEQ ID NO: 18875 - protein, 8 aa, Homo sapiens
  misc_feature: Table A; Target 18875; HLA-C*03:04; CTCFL; ENSG00000124092; CTA
AATEISVL

SEQ ID NO: 18876 - protein, 8 aa, Homo sapiens
  misc_feature: Table A; Target 18876; HLA-C*05:01; CTCFL; ENSG00000124092; CTA
AATEISVL

SEQ ID NO: 18877 - protein, 8 aa, Homo sapiens
  misc_feature: Table A; Target 18877; HLA-C*12:03; CTCFL; ENSG00000124092; CTA
AATEISVL

SEQ ID NO: 18878 - protein, 8 aa, Homo sapiens
  misc_feature: Table A; Target 18878; HLA-C*16:01; CTCFL; ENSG00000124092; CTA
AATEISVL

SEQ ID NO: 18879 - protein, 8 aa, Homo sapiens
  misc_feature: Table A; Target 18879; HLA-C*16:02; CTCFL; ENSG00000124092; CTA
AATEISVL

SEQ ID NO: 18880 - protein, 9 aa, Homo sapiens
  misc_feature: Table A; Target 18880; HLA-C*16:02; CTCFL; ENSG00000124092; CTA
ADAEKAKST

SEQ ID NO: 18881 - protein, 9 aa, Homo sapiens
  misc_feature: Table A; Target 18881; HLA-B*49:01; CTCFL; ENSG00000124092; CTA
AEEASTTKG

SEQ ID NO: 18882 - protein, 8 aa, Homo sapiens
  misc_feature: Table A; Target 18882; HLA-B*08:01; CTCFL; ENSG00000124092; CTA
AERTKEQL

SEQ ID NO: 18883 - protein, 8 aa, Homo sapiens
  misc_feature: Table A; Target 18883; HLA-B*37:01; CTCFL; ENSG00000124092; CTA
AERTKEQL

SEQ ID NO: 18884 - protein, 9 aa, Homo sapiens
  misc_feature: Table A; Target 18884; HLA-B*37:01; CTCFL; ENSG00000124092; CTA
AERTKEQLF

SEQ ID NO: 18885 - protein, 9 aa, Homo sapiens
  misc_feature: Table A; Target 18885; HLA-B*40:02; CTCFL; ENSG00000124092; CTA
AERTKEQLF

SEQ ID NO: 18886 - protein, 9 aa, Homo sapiens
  misc_feature: Table A; Target 18886; HLA-B*44:02; CTCFL; ENSG00000124092; CTA
AERTKEQLF

SEQ ID NO: 18887 - protein, 9 aa, Homo sapiens
  misc_feature: Table A; Target 18887; HLA-B*44:03; CTCFL; ENSG00000124092; CTA
AERTKEQLF

SEQ ID NO: 18888 - protein, 9 aa, Homo sapiens
  misc_feature: Table A; Target 18888; HLA-C*16:04; CTCFL; ENSG00000124092; CTA
AERTKEQLF

SEQ ID NO: 18889 - protein, 8 aa, Homo sapiens
  misc_feature: Table A; Target 18889; HLA-B*37:01; CTCFL; ENSG00000124092; CTA
AERTSGAF

SEQ ID NO: 18890 - protein, 9 aa, Homo sapiens
  misc_feature: Table A; Target 18890; HLA-B*27:02; CTCFL; ENSG00000124092; CTA
AETTGLIKL

SEQ ID NO: 18891 - protein, 9 aa, Homo sapiens
  misc_feature: Table A; Target 18891; HLA-B*37:01; CTCFL; ENSG00000124092; CTA
AETTGLIKL

SEQ ID NO: 18892 - protein, 9 aa, Homo sapiens
  misc_feature: Table A; Target 18892; HLA-B*40:02; CTCFL; ENSG00000124092; CTA
AETTGLIKL

SEQ ID NO: 18893 - protein, 9 aa, Homo sapiens
  misc_feature: Table A; Target 18893; HLA-B*44:02; CTCFL; ENSG00000124092; CTA
AETTGLIKL

SEQ ID NO: 18894 - protein, 9 aa, Homo sapiens
  misc_feature: Table A; Target 18894; HLA-B*49:01; CTCFL; ENSG00000124092; CTA
AETTGLIKL

SEQ ID NO: 18895 - protein, 9 aa, Homo sapiens
  misc_feature: Table A; Target 18895; HLA-C*02:02; CTCFL; ENSG00000124092; CTA
AETTGLIKL

SEQ ID NO: 18896 - protein, 9 aa, Homo sapiens
  misc_feature: Table A; Target 18896; HLA-C*16:04; CTCFL; ENSG00000124092; CTA
AETTGLIKL

SEQ ID NO: 18897 - protein, 8 aa, Homo sapiens
  misc_feature: Table A; Target 18897; HLA-C*01:02; CTCFL; ENSG00000124092; CTA
AFVTSGEL

SEQ ID NO: 18898 - protein, 8 aa, Homo sapiens
  misc_feature: Table A; Target 18898; HLA-C*14:02; CTCFL; ENSG00000124092; CTA
AFVTSGEL

SEQ ID NO: 18899 - protein, 8 aa, Homo sapiens
  misc_feature: Table A; Target 18899; HLA-C*16:01; CTCFL; ENSG00000124092; CTA
AFVTSGEL

SEQ ID NO: 18900 - protein, 9 aa, Homo sapiens
  misc_feature: Table A; Target 18900; HLA-C*14:02; CTCFL; ENSG00000124092; CTA
AFVTSGELV

SEQ ID NO: 18901 - protein, 8 aa, Homo sapiens
  misc_feature: Table A; Target 18901; HLA-B*37:01; CTCFL; ENSG00000124092; CTA
AISIQQEL

SEQ ID NO: 18902 - protein, 8 aa, Homo sapiens
  misc_feature: Table A; Target 18902; HLA-C*16:01; CTCFL; ENSG00000124092; CTA
AISIQQEL

SEQ ID NO: 18903 - protein, 9 aa, Homo sapiens
  misc_feature: Table A; Target 18903; HLA-A*01:01; CTCFL; ENSG00000124092; CTA
AISIQQELY

SEQ ID NO: 18904 - protein, 9 aa, Homo sapiens
  misc_feature: Table A; Target 18904; HLA-A*29:02; CTCFL; ENSG00000124092; CTA
AISIQQELY

SEQ ID NO: 18905 - protein, 9 aa, Homo sapiens
  misc_feature: Table A; Target 18905; HLA-A*30:02; CTCFL; ENSG00000124092; CTA
AISIQQELY

SEQ ID NO: 18906 - protein, 9 aa, Homo sapiens
  misc_feature: Table A; Target 18906; HLA-A*32:01; CTCFL; ENSG00000124092; CTA
AISIQQELY

SEQ ID NO: 18907 - protein, 9 aa, Homo sapiens
  misc_feature: Table A; Target 18907; HLA-B*15:01; CTCFL; ENSG00000124092; CTA
AISIQQELY

SEQ ID NO: 18908 - protein, 9 aa, Homo sapiens
  misc_feature: Table A; Target 18908; HLA-B*15:03; CTCFL; ENSG00000124092; CTA
AISIQQELY

SEQ ID NO: 18909 - protein, 9 aa, Homo sapiens
  misc_feature: Table A; Target 18909; HLA-B*58:01; CTCFL; ENSG00000124092; CTA
AISIQQELY

SEQ ID NO: 18910 - protein, 9 aa, Homo sapiens
  misc_feature: Table A; Target 18910; HLA-C*07:04; CTCFL; ENSG00000124092; CTA
AISIQQELY

SEQ ID NO: 18911 - protein, 9 aa, Homo sapiens
  misc_feature: Table A; Target 18911; HLA-C*16:04; CTCFL; ENSG00000124092; CTA
AISIQQELY

SEQ ID NO: 18912 - protein, 8 aa, Homo sapiens
  misc_feature: Table A; Target 18912; HLA-A*02:01; CTCFL; ENSG00000124092; CTA
ALEENVMV

SEQ ID NO: 18913 - protein, 9 aa, Homo sapiens
  misc_feature: Table A; Target 18913; HLA-A*02:01; CTCFL; ENSG00000124092; CTA
ALEENVMVA

SEQ ID NO: 18914 - protein, 9 aa, Homo sapiens
  misc_feature: Table A; Target 18914; HLA-A*02:03; CTCFL; ENSG00000124092; CTA
ALEENVMVA

SEQ ID NO: 18915 - protein, 9 aa, Homo sapiens
  misc_feature: Table A; Target 18915; HLA-B*55:01; CTCFL; ENSG00000124092; CTA
ALEENVMVA

SEQ ID NO: 18916 - protein, 8 aa, Homo sapiens
  misc_feature: Table A; Target 18916; HLA-A*29:02; CTCFL; ENSG00000124092; CTA
ANFIPTVY

SEQ ID NO: 18917 - protein, 8 aa, Homo sapiens
  misc_feature: Table A; Target 18917; HLA-A*30:02; CTCFL; ENSG00000124092; CTA
ANFIPTVY

SEQ ID NO: 18918 - protein, 8 aa, Homo sapiens
  misc_feature: Table A; Target 18918; HLA-B*15:01; CTCFL; ENSG00000124092; CTA
ANFIPTVY

SEQ ID NO: 18919 - protein, 8 aa, Homo sapiens
  misc_feature: Table A; Target 18919; HLA-B*15:03; CTCFL; ENSG00000124092; CTA
ANFIPTVY

SEQ ID NO: 18920 - protein, 8 aa, Homo sapiens
  misc_feature: Table A; Target 18920; HLA-B*18:01; CTCFL; ENSG00000124092; CTA
ANFIPTVY

SEQ ID NO: 18921 - protein, 8 aa, Homo sapiens
  misc_feature: Table A; Target 18921; HLA-B*39:01; CTCFL; ENSG00000124092; CTA
ANFIPTVY

SEQ ID NO: 18922 - protein, 8 aa, Homo sapiens
  misc_feature: Table A; Target 18922; HLA-B*46:01; CTCFL; ENSG00000124092; CTA
ANFIPTVY

SEQ ID NO: 18923 - protein, 8 aa, Homo sapiens
  misc_feature: Table A; Target 18923; HLA-C*07:01; CTCFL; ENSG00000124092; CTA
ANFIPTVY

SEQ ID NO: 18924 - protein, 8 aa, Homo sapiens
  misc_feature: Table A; Target 18924; HLA-C*12:03; CTCFL; ENSG00000124092; CTA
ANFIPTVY

SEQ ID NO: 18925 - protein, 9 aa, Homo sapiens
  misc_feature: Table A; Target 18925; HLA-A*03:01; CTCFL; ENSG00000124092; CTA
ANFIPTVYK

SEQ ID NO: 18926 - protein, 9 aa, Homo sapiens
  misc_feature: Table A; Target 18926; HLA-A*03:02; CTCFL; ENSG00000124092; CTA
ANFIPTVYK

SEQ ID NO: 18927 - protein, 9 aa, Homo sapiens
  misc_feature: Table A; Target 18927; HLA-A*11:01; CTCFL; ENSG00000124092; CTA
ANFIPTVYK

SEQ ID NO: 18928 - protein, 9 aa, Homo sapiens
  misc_feature: Table A; Target 18928; HLA-B*27:05; CTCFL; ENSG00000124092; CTA
ANFIPTVYK

SEQ ID NO: 18929 - protein, 9 aa, Homo sapiens
  misc_feature: Table A; Target 18929; HLA-C*04:01; CTCFL; ENSG00000124092; CTA
ANFIPTVYK

SEQ ID NO: 18930 - protein, 9 aa, Homo sapiens
  misc_feature: Table A; Target 18930; HLA-A*30:02; CTCFL; ENSG00000124092; CTA
APSEESEKY

SEQ ID NO: 18931 - protein, 9 aa, Homo sapiens
  misc_feature: Table A; Target 18931; HLA-B*15:01; CTCFL; ENSG00000124092; CTA
APSEESEKY

SEQ ID NO: 18932 - protein, 9 aa, Homo sapiens
  misc_feature: Table A; Target 18932; HLA-B*15:03; CTCFL; ENSG00000124092; CTA
APSEESEKY

SEQ ID NO: 18933 - protein, 9 aa, Homo sapiens
  misc_feature: Table A; Target 18933; HLA-B*35:01; CTCFL; ENSG00000124092; CTA
APSEESEKY

SEQ ID NO: 18934 - protein, 9 aa, Homo sapiens
  misc_feature: Table A; Target 18934; HLA-C*03:03; CTCFL; ENSG00000124092; CTA
APSEESEKY

SEQ ID NO: 18935 - protein, 11 aa, Homo sapiens
  misc_feature: Table A; Target 18935; HLA-B*07:02; CTCFL; ENSG00000124092; CTA
APSEESEKYIL

SEQ ID NO: 18936 - protein, 11 aa, Homo sapiens
  misc_feature: Table A; Target 18936; HLA-B*35:01; CTCFL; ENSG00000124092; CTA
APSEESEKYIL

SEQ ID NO: 18937 - protein, 11 aa, Homo sapiens
  misc_feature: Table A; Target 18937; HLA-B*35:03; CTCFL; ENSG00000124092; CTA
APSEESEKYIL

SEQ ID NO: 18938 - protein, 11 aa, Homo sapiens
  misc_feature: Table A; Target 18938; HLA-B*55:01; CTCFL; ENSG00000124092; CTA
APSEESEKYIL

SEQ ID NO: 18939 - protein, 9 aa, Homo sapiens
  misc_feature: Table A; Target 18939; HLA-A*01:01; CTCFL; ENSG00000124092; CTA
ASEDSKLAV

SEQ ID NO: 18940 - protein, 9 aa, Homo sapiens
  misc_feature: Table A; Target 18940; HLA-C*01:02; CTCFL; ENSG00000124092; CTA
ASEDSKLAV

SEQ ID NO: 18941 - protein, 9 aa, Homo sapiens
  misc_feature: Table A; Target 18941; HLA-C*05:01; CTCFL; ENSG00000124092; CTA
ASEDSKLAV

SEQ ID NO: 18942 - protein, 9 aa, Homo sapiens
  misc_feature: Table A; Target 18942; HLA-C*16:02; CTCFL; ENSG00000124092; CTA
ASEDSKLAV

SEQ ID NO: 18943 - protein, 8 aa, Homo sapiens
  misc_feature: Table A; Target 18943; HLA-A*23:01; CTCFL; ENSG00000124092; CTA
ASRDTYKL

SEQ ID NO: 18944 - protein, 9 aa, Homo sapiens
  misc_feature: Table A; Target 18944; HLA-C*06:02; CTCFL; ENSG00000124092; CTA
ASRDTYKLK

SEQ ID NO: 18945 - protein, 9 aa, Homo sapiens
  misc_feature: Table A; Target 18945; HLA-B*58:01; CTCFL; ENSG00000124092; CTA
ASTTKGEQF

SEQ ID NO: 18946 - protein, 9 aa, Homo sapiens
  misc_feature: Table A; Target 18946; HLA-C*16:01; CTCFL; ENSG00000124092; CTA
ASTTKGEQF

SEQ ID NO: 18947 - protein, 9 aa, Homo sapiens
  misc_feature: Table A; Target 18947; HLA-C*16:02; CTCFL; ENSG00000124092; CTA
ASTTKGEQF

SEQ ID NO: 18948 - protein, 8 aa, Homo sapiens
  misc_feature: Table A; Target 18948; HLA-B*40:02; CTCFL; ENSG00000124092; CTA
ASVEASKL

SEQ ID NO: 18949 - protein, 8 aa, Homo sapiens
  misc_feature: Table A; Target 18949; HLA-B*58:01; CTCFL; ENSG00000124092; CTA
ASVEASKL

SEQ ID NO: 18950 - protein, 8 aa, Homo sapiens
  misc_feature: Table A; Target 18950; HLA-C*01:02; CTCFL; ENSG00000124092; CTA
ASVEASKL

SEQ ID NO: 18951 - protein, 8 aa, Homo sapiens
  misc_feature: Table A; Target 18951; HLA-C*03:03; CTCFL; ENSG00000124092; CTA
ASVEASKL

SEQ ID NO: 18952 - protein, 8 aa, Homo sapiens
  misc_feature: Table A; Target 18952; HLA-C*03:04; CTCFL; ENSG00000124092; CTA
ASVEASKL

SEQ ID NO: 18953 - protein, 8 aa, Homo sapiens
  misc_feature: Table A; Target 18953; HLA-C*05:01; CTCFL; ENSG00000124092; CTA
ASVEASKL

SEQ ID NO: 18954 - protein, 8 aa, Homo sapiens
  misc_feature: Table A; Target 18954; HLA-C*06:02; CTCFL; ENSG00000124092; CTA
ASVEASKL

SEQ ID NO: 18955 - protein, 8 aa, Homo sapiens
  misc_feature: Table A; Target 18955; HLA-C*12:03; CTCFL; ENSG00000124092; CTA
ASVEASKL

SEQ ID NO: 18956 - protein, 8 aa, Homo sapiens
  misc_feature: Table A; Target 18956; HLA-C*16:01; CTCFL; ENSG00000124092; CTA
ASVEASKL

SEQ ID NO: 18957 - protein, 8 aa, Homo sapiens
  misc_feature: Table A; Target 18957; HLA-C*16:02; CTCFL; ENSG00000124092; CTA
ASVEASKL

SEQ ID NO: 18958 - protein, 9 aa, Homo sapiens
  misc_feature: Table A; Target 18958; HLA-A*03:01; CTCFL; ENSG00000124092; CTA
ASVEASKLK

SEQ ID NO: 18959 - protein, 9 aa, Homo sapiens
  misc_feature: Table A; Target 18959; HLA-A*03:02; CTCFL; ENSG00000124092; CTA
ASVEASKLK

SEQ ID NO: 18960 - protein, 9 aa, Homo sapiens
  misc_feature: Table A; Target 18960; HLA-C*06:02; CTCFL; ENSG00000124092; CTA
ASVEASKLK

SEQ ID NO: 18961 - protein, 9 aa, Homo sapiens
  misc_feature: Table A; Target 18961; HLA-C*07:06; CTCFL; ENSG00000124092; CTA
ASVEASKLK

SEQ ID NO: 18962 - protein, 9 aa, Homo sapiens
  misc_feature: Table A; Target 18962; HLA-C*16:02; CTCFL; ENSG00000124092; CTA
ASVEASKLK

SEQ ID NO: 18963 - protein, 10 aa, Homo sapiens
  misc_feature: Table A; Target 18963; HLA-A*01:01; CTCFL; ENSG00000124092; CTA
ATEISVLSEQ

SEQ ID NO: 18964 - protein, 11 aa, Homo sapiens
  misc_feature: Table A; Target 18964; HLA-A*01:01; CTCFL; ENSG00000124092; CTA
ATEISVLSEQF

SEQ ID NO: 18965 - protein, 10 aa, Homo sapiens
  misc_feature: Table A; Target 18965; HLA-A*33:03; CTCFL; ENSG00000124092; CTA
ATKGQKEAAK

SEQ ID NO: 18966 - protein, 9 aa, Homo sapiens
  misc_feature: Table A; Target 18966; HLA-C*01:02; CTCFL; ENSG00000124092; CTA
AVELQDMSL

SEQ ID NO: 18967 - protein, 9 aa, Homo sapiens
  misc_feature: Table A; Target 18967; HLA-A*02:04; CTCFL; ENSG00000124092; CTA
AVFHERYAL

SEQ ID NO: 18968 - protein, 11 aa, Homo sapiens
  misc_feature: Table A; Target 18968; HLA-A*29:02; CTCFL; ENSG00000124092; CTA
AYSAAELKCRY

SEQ ID NO: 18969 - protein, 9 aa, Homo sapiens
  misc_feature: Table A; Target 18969; HLA-C*16:02; CTCFL; ENSG00000124092; CTA
CATIIARKS

SEQ ID NO: 18970 - protein, 8 aa, Homo sapiens
  misc_feature: Table A; Target 18970; HLA-A*30:01; CTCFL; ENSG00000124092; CTA
CEMLLNTM

SEQ ID NO: 18971 - protein, 8 aa, Homo sapiens
  misc_feature: Table A; Target 18971; HLA-B*18:01; CTCFL; ENSG00000124092; CTA
CEMLLNTM

SEQ ID NO: 18972 - protein, 8 aa, Homo sapiens
  misc_feature: Table A; Target 18972; HLA-B*37:01; CTCFL; ENSG00000124092; CTA
CEMLLNTM

SEQ ID NO: 18973 - protein, 8 aa, Homo sapiens
  misc_feature: Table A; Target 18973; HLA-B*49:01; CTCFL; ENSG00000124092; CTA
CEMLLNTM

SEQ ID NO: 18974 - protein, 9 aa, Homo sapiens
  misc_feature: Table A; Target 18974; HLA-A*01:01; CTCFL; ENSG00000124092; CTA
CSAVFHERY

SEQ ID NO: 18975 - protein, 9 aa, Homo sapiens
  misc_feature: Table A; Target 18975; HLA-A*29:02; CTCFL; ENSG00000124092; CTA
CSAVFHERY

SEQ ID NO: 18976 - protein, 9 aa, Homo sapiens
  misc_feature: Table A; Target 18976; HLA-A*30:02; CTCFL; ENSG00000124092; CTA
CSAVFHERY

SEQ ID NO: 18977 - protein, 9 aa, Homo sapiens
  misc_feature: Table A; Target 18977; HLA-C*16:01; CTCFL; ENSG00000124092; CTA
CSAVFHERY

SEQ ID NO: 18978 - protein, 9 aa, Homo sapiens
  misc_feature: Table A; Target 18978; HLA-A*01:01; CTCFL; ENSG00000124092; CTA
CSYASRDTY

SEQ ID NO: 18979 - protein, 9 aa, Homo sapiens
  misc_feature: Table A; Target 18979; HLA-A*30:02; CTCFL; ENSG00000124092; CTA
CSYASRDTY

SEQ ID NO: 18980 - protein, 9 aa, Homo sapiens
  misc_feature: Table A; Target 18980; HLA-A*32:01; CTCFL; ENSG00000124092; CTA
CSYASRDTY

SEQ ID NO: 18981 - protein, 9 aa, Homo sapiens
  misc_feature: Table A; Target 18981; HLA-B*15:01; CTCFL; ENSG00000124092; CTA
CSYASRDTY

SEQ ID NO: 18982 - protein, 9 aa, Homo sapiens
  misc_feature: Table A; Target 18982; HLA-B*15:03; CTCFL; ENSG00000124092; CTA
CSYASRDTY

SEQ ID NO: 18983 - protein, 9 aa, Homo sapiens
  misc_feature: Table A; Target 18983; HLA-B*46:01; CTCFL; ENSG00000124092; CTA
CSYASRDTY

SEQ ID NO: 18984 - protein, 9 aa, Homo sapiens
  misc_feature: Table A; Target 18984; HLA-B*58:01; CTCFL; ENSG00000124092; CTA
CSYASRDTY

SEQ ID NO: 18985 - protein, 9 aa, Homo sapiens
  misc_feature: Table A; Target 18985; HLA-C*01:02; CTCFL; ENSG00000124092; CTA
CSYASRDTY

SEQ ID NO: 18986 - protein, 9 aa, Homo sapiens
  misc_feature: Table A; Target 18986; HLA-C*02:02; CTCFL; ENSG00000124092; CTA
CSYASRDTY

SEQ ID NO: 18987 - protein, 9 aa, Homo sapiens
  misc_feature: Table A; Target 18987; HLA-C*12:03; CTCFL; ENSG00000124092; CTA
CSYASRDTY

SEQ ID NO: 18988 - protein, 9 aa, Homo sapiens
  misc_feature: Table A; Target 18988; HLA-C*16:01; CTCFL; ENSG00000124092; CTA
CSYASRDTY

SEQ ID NO: 18989 - protein, 9 aa, Homo sapiens
  misc_feature: Table A; Target 18989; HLA-C*16:02; CTCFL; ENSG00000124092; CTA
CSYASRDTY

SEQ ID NO: 18990 - protein, 9 aa, Homo sapiens
  misc_feature: Table A; Target 18990; HLA-C*16:04; CTCFL; ENSG00000124092; CTA
CSYASRDTY

SEQ ID NO: 18991 - protein, 10 aa, Homo sapiens
  misc_feature: Table A; Target 18991; HLA-A*03:01; CTCFL; ENSG00000124092; CTA
CSYASRDTYK

SEQ ID NO: 18992 - protein, 11 aa, Homo sapiens
  misc_feature: Table A; Target 18992; HLA-A*30:02; CTCFL; ENSG00000124092; CTA
CVAISIQQELY

SEQ ID NO: 18993 - protein, 8 aa, Homo sapiens
  misc_feature: Table A; Target 18993; HLA-B*18:01; CTCFL; ENSG00000124092; CTA
DANFIPTV

SEQ ID NO: 18994 - protein, 8 aa, Homo sapiens
  misc_feature: Table A; Target 18994; HLA-B*54:01; CTCFL; ENSG00000124092; CTA
DANFIPTV

SEQ ID NO: 18995 - protein, 9 aa, Homo sapiens
  misc_feature: Table A; Target 18995; HLA-A*01:01; CTCFL; ENSG00000124092; CTA
DANFIPTVY

SEQ ID NO: 18996 - protein, 9 aa, Homo sapiens
  misc_feature: Table A; Target 18996; HLA-A*25:01; CTCFL; ENSG00000124092; CTA
DANFIPTVY

SEQ ID NO: 18997 - protein, 9 aa, Homo sapiens
  misc_feature: Table A; Target 18997; HLA-A*26:01; CTCFL; ENSG00000124092; CTA
DANFIPTVY

SEQ ID NO: 18998 - protein, 9 aa, Homo sapiens
  misc_feature: Table A; Target 18998; HLA-A*29:02; CTCFL; ENSG00000124092; CTA
DANFIPTVY

SEQ ID NO: 18999 - protein, 9 aa, Homo sapiens
  misc_feature: Table A; Target 18999; HLA-A*33:01; CTCFL; ENSG00000124092; CTA
DANFIPTVY

SEQ ID NO: 19000 - protein, 9 aa, Homo sapiens
  misc_feature: Table A; Target 19000; HLA-A*33:03; CTCFL; ENSG00000124092; CTA
DANFIPTVY

SEQ ID NO: 19001 - protein, 9 aa, Homo sapiens
  misc_feature: Table A; Target 19001; HLA-A*68:01; CTCFL; ENSG00000124092; CTA
DANFIPTVY

SEQ ID NO: 19002 - protein, 9 aa, Homo sapiens
  misc_feature: Table A; Target 19002; HLA-B*15:01; CTCFL; ENSG00000124092; CTA
DANFIPTVY

SEQ ID NO: 19003 - protein, 9 aa, Homo sapiens
  misc_feature: Table A; Target 19003; HLA-B*15:03; CTCFL; ENSG00000124092; CTA
DANFIPTVY

SEQ ID NO: 19004 - protein, 9 aa, Homo sapiens
  misc_feature: Table A; Target 19004; HLA-B*18:01; CTCFL; ENSG00000124092; CTA
DANFIPTVY

SEQ ID NO: 19005 - protein, 9 aa, Homo sapiens
  misc_feature: Table A; Target 19005; HLA-B*35:03; CTCFL; ENSG00000124092; CTA
DANFIPTVY

SEQ ID NO: 19006 - protein, 9 aa, Homo sapiens
  misc_feature: Table A; Target 19006; HLA-B*39:01; CTCFL; ENSG00000124092; CTA
DANFIPTVY

SEQ ID NO: 19007 - protein, 9 aa, Homo sapiens
  misc_feature: Table A; Target 19007; HLA-B*46:01; CTCFL; ENSG00000124092; CTA
DANFIPTVY

SEQ ID NO: 19008 - protein, 9 aa, Homo sapiens
  misc_feature: Table A; Target 19008; HLA-B*51:01; CTCFL; ENSG00000124092; CTA
DANFIPTVY

SEQ ID NO: 19009 - protein, 9 aa, Homo sapiens
  misc_feature: Table A; Target 19009; HLA-B*54:01; CTCFL; ENSG00000124092; CTA
DANFIPTVY

SEQ ID NO: 19010 - protein, 9 aa, Homo sapiens
  misc_feature: Table A; Target 19010; HLA-B*55:01; CTCFL; ENSG00000124092; CTA
DANFIPTVY

SEQ ID NO: 19011 - protein, 9 aa, Homo sapiens
  misc_feature: Table A; Target 19011; HLA-C*01:02; CTCFL; ENSG00000124092; CTA
DANFIPTVY

SEQ ID NO: 19012 - protein, 9 aa, Homo sapiens
  misc_feature: Table A; Target 19012; HLA-C*02:02; CTCFL; ENSG00000124092; CTA
DANFIPTVY

SEQ ID NO: 19013 - protein, 9 aa, Homo sapiens
  misc_feature: Table A; Target 19013; HLA-C*03:03; CTCFL; ENSG00000124092; CTA
DANFIPTVY

SEQ ID NO: 19014 - protein, 9 aa, Homo sapiens
  misc_feature: Table A; Target 19014; HLA-C*07:01; CTCFL; ENSG00000124092; CTA
DANFIPTVY

SEQ ID NO: 19015 - protein, 9 aa, Homo sapiens
  misc_feature: Table A; Target 19015; HLA-C*07:04; CTCFL; ENSG00000124092; CTA
DANFIPTVY

SEQ ID NO: 19016 - protein, 9 aa, Homo sapiens
  misc_feature: Table A; Target 19016; HLA-C*07:06; CTCFL; ENSG00000124092; CTA
DANFIPTVY

SEQ ID NO: 19017 - protein, 9 aa, Homo sapiens
  misc_feature: Table A; Target 19017; HLA-C*12:03; CTCFL; ENSG00000124092; CTA
DANFIPTVY

SEQ ID NO: 19018 - protein, 9 aa, Homo sapiens
  misc_feature: Table A; Target 19018; HLA-C*16:04; CTCFL; ENSG00000124092; CTA
DANFIPTVY

SEQ ID NO: 19019 - protein, 10 aa, Homo sapiens
  misc_feature: Table A; Target 19019; HLA-A*11:01; CTCFL; ENSG00000124092; CTA
DANFIPTVYK

SEQ ID NO: 19020 - protein, 10 aa, Homo sapiens
  misc_feature: Table A; Target 19020; HLA-A*33:01; CTCFL; ENSG00000124092; CTA
DANFIPTVYK

SEQ ID NO: 19021 - protein, 10 aa, Homo sapiens
  misc_feature: Table A; Target 19021; HLA-A*33:03; CTCFL; ENSG00000124092; CTA
DANFIPTVYK

SEQ ID NO: 19022 - protein, 10 aa, Homo sapiens
  misc_feature: Table A; Target 19022; HLA-A*68:01; CTCFL; ENSG00000124092; CTA
DANFIPTVYK

SEQ ID NO: 19023 - protein, 10 aa, Homo sapiens
  misc_feature: Table A; Target 19023; HLA-A*68:02; CTCFL; ENSG00000124092; CTA
DANFIPTVYK

SEQ ID NO: 19024 - protein, 10 aa, Homo sapiens
  misc_feature: Table A; Target 19024; HLA-B*27:02; CTCFL; ENSG00000124092; CTA
DANFIPTVYK

SEQ ID NO: 19025 - protein, 8 aa, Homo sapiens
  misc_feature: Table A; Target 19025; HLA-B*18:01; CTCFL; ENSG00000124092; CTA
DEAAAEEA

SEQ ID NO: 19026 - protein, 8 aa, Homo sapiens
  misc_feature: Table A; Target 19026; HLA-B*18:01; CTCFL; ENSG00000124092; CTA
DEGVTCEM

SEQ ID NO: 19027 - protein, 8 aa, Homo sapiens
  misc_feature: Table A; Target 19027; HLA-B*18:01; CTCFL; ENSG00000124092; CTA
DEIVLTVS

SEQ ID NO: 19028 - protein, 9 aa, Homo sapiens
  misc_feature: Table A; Target 19028; HLA-B*18:01; CTCFL; ENSG00000124092; CTA
DEIVLTVSN

SEQ ID NO: 19029 - protein, 9 aa, Homo sapiens
  misc_feature: Table A; Target 19029; HLA-B*18:01; CTCFL; ENSG00000124092; CTA
DERSDEIVL

SEQ ID NO: 19030 - protein, 9 aa, Homo sapiens
  misc_feature: Table A; Target 19030; HLA-B*40:01; CTCFL; ENSG00000124092; CTA
DERSDEIVL

SEQ ID NO: 19031 - protein, 9 aa, Homo sapiens
  misc_feature: Table A; Target 19031; HLA-B*40:02; CTCFL; ENSG00000124092; CTA
DERSDEIVL

SEQ ID NO: 19032 - protein, 8 aa, Homo sapiens
  misc_feature: Table A; Target 19032; HLA-A*33:01; CTCFL; ENSG00000124092; CTA
DSKLAVSL

SEQ ID NO: 19033 - protein, 8 aa, Homo sapiens
  misc_feature: Table A; Target 19033; HLA-B*18:01; CTCFL; ENSG00000124092; CTA
DSKLAVSL

SEQ ID NO: 19034 - protein, 8 aa, Homo sapiens
  misc_feature: Table A; Target 19034; HLA-B*40:02; CTCFL; ENSG00000124092; CTA
DSKLAVSL

SEQ ID NO: 19035 - protein, 8 aa, Homo sapiens
  misc_feature: Table A; Target 19035; HLA-B*51:01; CTCFL; ENSG00000124092; CTA
DSKLAVSL

SEQ ID NO: 19036 - protein, 10 aa, Homo sapiens
  misc_feature: Table A; Target 19036; HLA-A*33:01; CTCFL; ENSG00000124092; CTA
DTYKLKRHMR

SEQ ID NO: 19037 - protein, 9 aa, Homo sapiens
  misc_feature: Table A; Target 19037; HLA-A*33:01; CTCFL; ENSG00000124092; CTA
DVCMFTSSR

SEQ ID NO: 19038 - protein, 9 aa, Homo sapiens
  misc_feature: Table A; Target 19038; HLA-A*33:03; CTCFL; ENSG00000124092; CTA
DVCMFTSSR

SEQ ID NO: 19039 - protein, 9 aa, Homo sapiens
  misc_feature: Table A; Target 19039; HLA-A*68:01; CTCFL; ENSG00000124092; CTA
DVCMFTSSR

SEQ ID NO: 19040 - protein, 11 aa, Homo sapiens
  misc_feature: Table A; Target 19040; HLA-A*26:01; CTCFL; ENSG00000124092; CTA
EAAAEEASTTK

SEQ ID NO: 19041 - protein, 11 aa, Homo sapiens
  misc_feature: Table A; Target 19041; HLA-A*33:03; CTCFL; ENSG00000124092; CTA
EAAAEEASTTK

SEQ ID NO: 19042 - protein, 11 aa, Homo sapiens
  misc_feature: Table A; Target 19042; HLA-A*68:01; CTCFL; ENSG00000124092; CTA
EAAAEEASTTK

SEQ ID NO: 19043 - protein, 11 aa, Homo sapiens
  misc_feature: Table A; Target 19043; HLA-B*27:02; CTCFL; ENSG00000124092; CTA
EAAAEEASTTK

SEQ ID NO: 19044 - protein, 11 aa, Homo sapiens
  misc_feature: Table A; Target 19044; HLA-B*39:01; CTCFL; ENSG00000124092; CTA
EAAAEEASTTK

SEQ ID NO: 19045 - protein, 11 aa, Homo sapiens
  misc_feature: Table A; Target 19045; HLA-C*07:06; CTCFL; ENSG00000124092; CTA
EAAAEEASTTK

SEQ ID NO: 19046 - protein, 9 aa, Homo sapiens
  misc_feature: Table A; Target 19046; HLA-B*55:01; CTCFL; ENSG00000124092; CTA
EAERTSGAF

SEQ ID NO: 19047 - protein, 9 aa, Homo sapiens
  misc_feature: Table A; Target 19047; HLA-C*05:01; CTCFL; ENSG00000124092; CTA
EAERTSGAF

SEQ ID NO: 19048 - protein, 9 aa, Homo sapiens
  misc_feature: Table A; Target 19048; HLA-A*33:03; CTCFL; ENSG00000124092; CTA
EAKSAASGK

SEQ ID NO: 19049 - protein, 11 aa, Homo sapiens
  misc_feature: Table A; Target 19049; HLA-A*33:01; CTCFL; ENSG00000124092; CTA
EAKSAASGKGR

SEQ ID NO: 19050 - protein, 11 aa, Homo sapiens
  misc_feature: Table A; Target 19050; HLA-A*33:03; CTCFL; ENSG00000124092; CTA
EAKSAASGKGR

SEQ ID NO: 19051 - protein, 11 aa, Homo sapiens
  misc_feature: Table A; Target 19051; HLA-A*68:01; CTCFL; ENSG00000124092; CTA
EAKSAASGKGR

SEQ ID NO: 19052 - protein, 10 aa, Homo sapiens
  misc_feature: Table A; Target 19052; HLA-A*25:01; CTCFL; ENSG00000124092; CTA
EASTTKGEQF

SEQ ID NO: 19053 - protein, 10 aa, Homo sapiens
  misc_feature: Table A; Target 19053; HLA-A*25:01; CTCFL; ENSG00000124092; CTA
EAVELQDMSL

SEQ ID NO: 19054 - protein, 10 aa, Homo sapiens
  misc_feature: Table A; Target 19054; HLA-A*68:01; CTCFL; ENSG00000124092; CTA
EAVELQDMSL

SEQ ID NO: 19055 - protein, 10 aa, Homo sapiens
  misc_feature: Table A; Target 19055; HLA-A*68:02; CTCFL; ENSG00000124092; CTA
EAVELQDMSL

SEQ ID NO: 19056 - protein, 10 aa, Homo sapiens
  misc_feature: Table A; Target 19056; HLA-B*35:01; CTCFL; ENSG00000124092; CTA
EAVELQDMSL

SEQ ID NO: 19057 - protein, 10 aa, Homo sapiens
  misc_feature: Table A; Target 19057; HLA-B*35:03; CTCFL; ENSG00000124092; CTA
EAVELQDMSL

SEQ ID NO: 19058 - protein, 10 aa, Homo sapiens
  misc_feature: Table A; Target 19058; HLA-C*07:06; CTCFL; ENSG00000124092; CTA
EAVELQDMSL

SEQ ID NO: 19059 - protein, 11 aa, Homo sapiens
  misc_feature: Table A; Target 19059; HLA-A*25:01; CTCFL; ENSG00000124092; CTA
EAVELQDMSLL

SEQ ID NO: 19060 - protein, 11 aa, Homo sapiens
  misc_feature: Table A; Target 19060; HLA-A*26:01; CTCFL; ENSG00000124092; CTA
EAVELQDMSLL

SEQ ID NO: 19061 - protein, 11 aa, Homo sapiens
  misc_feature: Table A; Target 19061; HLA-A*68:02; CTCFL; ENSG00000124092; CTA
EAVELQDMSLL

SEQ ID NO: 19062 - protein, 11 aa, Homo sapiens
  misc_feature: Table A; Target 19062; HLA-C*04:01; CTCFL; ENSG00000124092; CTA
EDQPTAGQADA

SEQ ID NO: 19063 - protein, 9 aa, Homo sapiens
  misc_feature: Table A; Target 19063; HLA-A*30:01; CTCFL; ENSG00000124092; CTA
EDSKLAVSL

SEQ ID NO: 19064 - protein, 9 aa, Homo sapiens
  misc_feature: Table A; Target 19064; HLA-A*68:02; CTCFL; ENSG00000124092; CTA
EDSKLAVSL

SEQ ID NO: 19065 - protein, 9 aa, Homo sapiens
  misc_feature: Table A; Target 19065; HLA-B*18:01; CTCFL; ENSG00000124092; CTA
EDSKLAVSL

SEQ ID NO: 19066 - protein, 9 aa, Homo sapiens
  misc_feature: Table A; Target 19066; HLA-B*27:05; CTCFL; ENSG00000124092; CTA
EDSKLAVSL

SEQ ID NO: 19067 - protein, 9 aa, Homo sapiens
  misc_feature: Table A; Target 19067; HLA-B*37:01; CTCFL; ENSG00000124092; CTA
EDSKLAVSL

SEQ ID NO: 19068 - protein, 9 aa, Homo sapiens
  misc_feature: Table A; Target 19068; HLA-B*38:01; CTCFL; ENSG00000124092; CTA
EDSKLAVSL

SEQ ID NO: 19069 - protein, 9 aa, Homo sapiens
  misc_feature: Table A; Target 19069; HLA-B*39:01; CTCFL; ENSG00000124092; CTA
EDSKLAVSL

SEQ ID NO: 19070 - protein, 9 aa, Homo sapiens
  misc_feature: Table A; Target 19070; HLA-B*40:01; CTCFL; ENSG00000124092; CTA
EDSKLAVSL

SEQ ID NO: 19071 - protein, 9 aa, Homo sapiens
  misc_feature: Table A; Target 19071; HLA-B*40:02; CTCFL; ENSG00000124092; CTA
EDSKLAVSL

SEQ ID NO: 19072 - protein, 9 aa, Homo sapiens
  misc_feature: Table A; Target 19072; HLA-B*44:02; CTCFL; ENSG00000124092; CTA
EDSKLAVSL

SEQ ID NO: 19073 - protein, 9 aa, Homo sapiens
  misc_feature: Table A; Target 19073; HLA-B*44:03; CTCFL; ENSG00000124092; CTA
EDSKLAVSL

SEQ ID NO: 19074 - protein, 9 aa, Homo sapiens
  misc_feature: Table A; Target 19074; HLA-C*07:01; CTCFL; ENSG00000124092; CTA
EDSKLAVSL

SEQ ID NO: 19075 - protein, 11 aa, Homo sapiens
  misc_feature: Table A; Target 19075; HLA-A*25:01; CTCFL; ENSG00000124092; CTA
EEASTTKGEQF

SEQ ID NO: 19076 - protein, 11 aa, Homo sapiens
  misc_feature: Table A; Target 19076; HLA-A*26:01; CTCFL; ENSG00000124092; CTA
EEASTTKGEQF

SEQ ID NO: 19077 - protein, 11 aa, Homo sapiens
  misc_feature: Table A; Target 19077; HLA-B*18:01; CTCFL; ENSG00000124092; CTA
EEASTTKGEQF

SEQ ID NO: 19078 - protein, 11 aa, Homo sapiens
  misc_feature: Table A; Target 19078; HLA-B*27:02; CTCFL; ENSG00000124092; CTA
EEASTTKGEQF

SEQ ID NO: 19079 - protein, 11 aa, Homo sapiens
  misc_feature: Table A; Target 19079; HLA-B*38:01; CTCFL; ENSG00000124092; CTA
EEASTTKGEQF

SEQ ID NO: 19080 - protein, 11 aa, Homo sapiens
  misc_feature: Table A; Target 19080; HLA-B*40:01; CTCFL; ENSG00000124092; CTA
EEASTTKGEQF

SEQ ID NO: 19081 - protein, 11 aa, Homo sapiens
  misc_feature: Table A; Target 19081; HLA-B*44:02; CTCFL; ENSG00000124092; CTA
EEASTTKGEQF

SEQ ID NO: 19082 - protein, 11 aa, Homo sapiens
  misc_feature: Table A; Target 19082; HLA-C*16:04; CTCFL; ENSG00000124092; CTA
EEASTTKGEQF

SEQ ID NO: 19083 - protein, 9 aa, Homo sapiens
  misc_feature: Table A; Target 19083; HLA-B*40:01; CTCFL; ENSG00000124092; CTA
EEEQEKNQL

SEQ ID NO: 19084 - protein, 9 aa, Homo sapiens
  misc_feature: Table A; Target 19084; HLA-B*44:02; CTCFL; ENSG00000124092; CTA
EEEQEKNQL

SEQ ID NO: 19085 - protein, 9 aa, Homo sapiens
  misc_feature: Table A; Target 19085; HLA-B*44:03; CTCFL; ENSG00000124092; CTA
EEEQEKNQL

SEQ ID NO: 19086 - protein, 10 aa, Homo sapiens
  misc_feature: Table A; Target 19086; HLA-B*40:01; CTCFL; ENSG00000124092; CTA
EEEQEKNQLL

SEQ ID NO: 19087 - protein, 10 aa, Homo sapiens
  misc_feature: Table A; Target 19087; HLA-B*44:02; CTCFL; ENSG00000124092; CTA
EEEQEKNQLL

SEQ ID NO: 19088 - protein, 10 aa, Homo sapiens
  misc_feature: Table A; Target 19088; HLA-B*44:03; CTCFL; ENSG00000124092; CTA
EEEQEKNQLL

SEQ ID NO: 19089 - protein, 8 aa, Homo sapiens
  misc_feature: Table A; Target 19089; HLA-B*18:01; CTCFL; ENSG00000124092; CTA
EEGPRQSL

SEQ ID NO: 19090 - protein, 8 aa, Homo sapiens
  misc_feature: Table A; Target 19090; HLA-B*37:01; CTCFL; ENSG00000124092; CTA
EEGPRQSL

SEQ ID NO: 19091 - protein, 8 aa, Homo sapiens
  misc_feature: Table A; Target 19091; HLA-B*40:01; CTCFL; ENSG00000124092; CTA
EEGPRQSL

SEQ ID NO: 19092 - protein, 8 aa, Homo sapiens
  misc_feature: Table A; Target 19092; HLA-B*44:02; CTCFL; ENSG00000124092; CTA
EEGPRQSL

SEQ ID NO: 19093 - protein, 8 aa, Homo sapiens
  misc_feature: Table A; Target 19093; HLA-B*44:03; CTCFL; ENSG00000124092; CTA
EEGPRQSL

SEQ ID NO: 19094 - protein, 8 aa, Homo sapiens
  misc_feature: Table A; Target 19094; HLA-B*44:02; CTCFL; ENSG00000124092; CTA
EEQEKNQL

SEQ ID NO: 19095 - protein, 9 aa, Homo sapiens
  misc_feature: Table A; Target 19095; HLA-A*30:01; CTCFL; ENSG00000124092; CTA
EEQEKNQLL

SEQ ID NO: 19096 - protein, 9 aa, Homo sapiens
  misc_feature: Table A; Target 19096; HLA-B*37:01; CTCFL; ENSG00000124092; CTA
EEQEKNQLL

SEQ ID NO: 19097 - protein, 9 aa, Homo sapiens
  misc_feature: Table A; Target 19097; HLA-B*38:01; CTCFL; ENSG00000124092; CTA
EEQEKNQLL

SEQ ID NO: 19098 - protein, 9 aa, Homo sapiens
  misc_feature: Table A; Target 19098; HLA-B*40:01; CTCFL; ENSG00000124092; CTA
EEQEKNQLL

SEQ ID NO: 19099 - protein, 9 aa, Homo sapiens
  misc_feature: Table A; Target 19099; HLA-B*40:02; CTCFL; ENSG00000124092; CTA
EEQEKNQLL

SEQ ID NO: 19100 - protein, 9 aa, Homo sapiens
  misc_feature: Table A; Target 19100; HLA-B*44:02; CTCFL; ENSG00000124092; CTA
EEQEKNQLL

SEQ ID NO: 19101 - protein, 9 aa, Homo sapiens
  misc_feature: Table A; Target 19101; HLA-B*44:03; CTCFL; ENSG00000124092; CTA
EEQEKNQLL

SEQ ID NO: 19102 - protein, 9 aa, Homo sapiens
  misc_feature: Table A; Target 19102; HLA-B*49:01; CTCFL; ENSG00000124092; CTA
EEQEKNQLL

SEQ ID NO: 19103 - protein, 9 aa, Homo sapiens
  misc_feature: Table A; Target 19103; HLA-C*16:04; CTCFL; ENSG00000124092; CTA
EEQEKNQLL

SEQ ID NO: 19104 - protein, 8 aa, Homo sapiens
  misc_feature: Table A; Target 19104; HLA-B*08:01; CTCFL; ENSG00000124092; CTA
EESEKYIL

SEQ ID NO: 19105 - protein, 8 aa, Homo sapiens
  misc_feature: Table A; Target 19105; HLA-B*18:01; CTCFL; ENSG00000124092; CTA
EESEKYIL

SEQ ID NO: 19106 - protein, 8 aa, Homo sapiens
  misc_feature: Table A; Target 19106; HLA-B*37:01; CTCFL; ENSG00000124092; CTA
EESEKYIL

SEQ ID NO: 19107 - protein, 10 aa, Homo sapiens
  misc_feature: Table A; Target 19107; HLA-A*30:01; CTCFL; ENSG00000124092; CTA
EESEKYILTL

SEQ ID NO: 19108 - protein, 10 aa, Homo sapiens
  misc_feature: Table A; Target 19108; HLA-B*40:01; CTCFL; ENSG00000124092; CTA
EESEKYILTL

SEQ ID NO: 19109 - protein, 10 aa, Homo sapiens
  misc_feature: Table A; Target 19109; HLA-B*44:02; CTCFL; ENSG00000124092; CTA
EESEKYILTL

SEQ ID NO: 19110 - protein, 10 aa, Homo sapiens
  misc_feature: Table A; Target 19110; HLA-B*44:03; CTCFL; ENSG00000124092; CTA
EESEKYILTL

SEQ ID NO: 19111 - protein, 9 aa, Homo sapiens
  misc_feature: Table A; Target 19111; HLA-A*30:01; CTCFL; ENSG00000124092; CTA
EEVDEGVTC

SEQ ID NO: 19112 - protein, 9 aa, Homo sapiens
  misc_feature: Table A; Target 19112; HLA-B*39:01; CTCFL; ENSG00000124092; CTA
EEVDEGVTC

SEQ ID NO: 19113 - protein, 9 aa, Homo sapiens
  misc_feature: Table A; Target 19113; HLA-B*40:01; CTCFL; ENSG00000124092; CTA
EEVDEGVTC

SEQ ID NO: 19114 - protein, 9 aa, Homo sapiens
  misc_feature: Table A; Target 19114; HLA-B*49:01; CTCFL; ENSG00000124092; CTA
EEVDEGVTC

SEQ ID NO: 19115 - protein, 11 aa, Homo sapiens
  misc_feature: Table A; Target 19115; HLA-A*26:01; CTCFL; ENSG00000124092; CTA
EEVDEGVTCEM

SEQ ID NO: 19116 - protein, 11 aa, Homo sapiens
  misc_feature: Table A; Target 19116; HLA-A*30:01; CTCFL; ENSG00000124092; CTA
EEVDEGVTCEM

SEQ ID NO: 19117 - protein, 11 aa, Homo sapiens
  misc_feature: Table A; Target 19117; HLA-B*18:01; CTCFL; ENSG00000124092; CTA
EEVDEGVTCEM

SEQ ID NO: 19118 - protein, 11 aa, Homo sapiens
  misc_feature: Table A; Target 19118; HLA-B*40:01; CTCFL; ENSG00000124092; CTA
EEVDEGVTCEM

SEQ ID NO: 19119 - protein, 11 aa, Homo sapiens
  misc_feature: Table A; Target 19119; HLA-B*44:03; CTCFL; ENSG00000124092; CTA
EEVDEGVTCEM

SEQ ID NO: 19120 - protein, 8 aa, Homo sapiens
  misc_feature: Table A; Target 19120; HLA-B*18:01; CTCFL; ENSG00000124092; CTA
EEVELVLA

SEQ ID NO: 19121 - protein, 9 aa, Homo sapiens
  misc_feature: Table A; Target 19121; HLA-B*18:01; CTCFL; ENSG00000124092; CTA
EEVELVLAP

SEQ ID NO: 19122 - protein, 9 aa, Homo sapiens
  misc_feature: Table A; Target 19122; HLA-C*07:06; CTCFL; ENSG00000124092; CTA
EGVQVVVQQ

SEQ ID NO: 19123 - protein, 9 aa, Homo sapiens
  misc_feature: Table A; Target 19123; HLA-A*25:01; CTCFL; ENSG00000124092; CTA
EISVLSEQF

SEQ ID NO: 19124 - protein, 9 aa, Homo sapiens
  misc_feature: Table A; Target 19124; HLA-A*26:01; CTCFL; ENSG00000124092; CTA
EISVLSEQF

SEQ ID NO: 19125 - protein, 9 aa, Homo sapiens
  misc_feature: Table A; Target 19125; HLA-B*18:01; CTCFL; ENSG00000124092; CTA
EISVLSEQF

SEQ ID NO: 19126 - protein, 9 aa, Homo sapiens
  misc_feature: Table A; Target 19126; HLA-B*44:02; CTCFL; ENSG00000124092; CTA
EISVLSEQF

SEQ ID NO: 19127 - protein, 9 aa, Homo sapiens
  misc_feature: Table A; Target 19127; HLA-B*44:03; CTCFL; ENSG00000124092; CTA
EISVLSEQF

SEQ ID NO: 19128 - protein, 11 aa, Homo sapiens
  misc_feature: Table A; Target 19128; HLA-A*68:01; CTCFL; ENSG00000124092; CTA
EISVLSEQFTK

SEQ ID NO: 19129 - protein, 11 aa, Homo sapiens
  misc_feature: Table A; Target 19129; HLA-B*27:02; CTCFL; ENSG00000124092; CTA
EISVLSEQFTK

SEQ ID NO: 19130 - protein, 9 aa, Homo sapiens
  misc_feature: Table A; Target 19130; HLA-A*33:01; CTCFL; ENSG00000124092; CTA
EKNQLLAER

SEQ ID NO: 19131 - protein, 9 aa, Homo sapiens
  misc_feature: Table A; Target 19131; HLA-A*33:03; CTCFL; ENSG00000124092; CTA
EKNQLLAER

SEQ ID NO: 19132 - protein, 8 aa, Homo sapiens
  misc_feature: Table A; Target 19132; HLA-B*08:01; CTCFL; ENSG00000124092; CTA
ELMPEKGL

SEQ ID NO: 19133 - protein, 9 aa, Homo sapiens
  misc_feature: Table A; Target 19133; HLA-A*33:03; CTCFL; ENSG00000124092; CTA
ELMPEKGLK

SEQ ID NO: 19134 - protein, 10 aa, Homo sapiens
  misc_feature: Table A; Target 19134; HLA-A*25:01; CTCFL; ENSG00000124092; CTA
ELQDMSLLSI

SEQ ID NO: 19135 - protein, 8 aa, Homo sapiens
  misc_feature: Table A; Target 19135; HLA-B*08:01; CTCFL; ENSG00000124092; CTA
ELYSPQEM

SEQ ID NO: 19136 - protein, 10 aa, Homo sapiens
  misc_feature: Table A; Target 19136; HLA-A*02:01; CTCFL; ENSG00000124092; CTA
ELYSPQEMEV

SEQ ID NO: 19137 - protein, 10 aa, Homo sapiens
  misc_feature: Table A; Target 19137; HLA-A*02:03; CTCFL; ENSG00000124092; CTA
ELYSPQEMEV

SEQ ID NO: 19138 - protein, 10 aa, Homo sapiens
  misc_feature: Table A; Target 19138; HLA-A*26:01; CTCFL; ENSG00000124092; CTA
ELYSPQEMEV

SEQ ID NO: 19139 - protein, 10 aa, Homo sapiens
  misc_feature: Table A; Target 19139; HLA-B*13:02; CTCFL; ENSG00000124092; CTA
ELYSPQEMEV

SEQ ID NO: 19140 - protein, 11 aa, Homo sapiens
  misc_feature: Table A; Target 19140; HLA-B*38:01; CTCFL; ENSG00000124092; CTA
ELYSPQEMEVL

SEQ ID NO: 19141 - protein, 8 aa, Homo sapiens
  misc_feature: Table A; Target 19141; HLA-A*33:03; CTCFL; ENSG00000124092; CTA
EMFPVACR

SEQ ID NO: 19142 - protein, 9 aa, Homo sapiens
  misc_feature: Table A; Target 19142; HLA-A*01:01; CTCFL; ENSG00000124092; CTA
EMLLNTMDK

SEQ ID NO: 19143 - protein, 9 aa, Homo sapiens
  misc_feature: Table A; Target 19143; HLA-C*07:01; CTCFL; ENSG00000124092; CTA
EMLLNTMDK

SEQ ID NO: 19144 - protein, 8 aa, Homo sapiens
  misc_feature: Table A; Target 19144; HLA-B*18:01; CTCFL; ENSG00000124092; CTA
EQFPGEMF

SEQ ID NO: 19145 - protein, 10 aa, Homo sapiens
  misc_feature: Table A; Target 19145; HLA-A*02:03; CTCFL; ENSG00000124092; CTA
EQFPGEMFPV

SEQ ID NO: 19146 - protein, 10 aa, Homo sapiens
  misc_feature: Table A; Target 19146; HLA-A*26:01; CTCFL; ENSG00000124092; CTA
EQFPGEMFPV

SEQ ID NO: 19147 - protein, 10 aa, Homo sapiens
  misc_feature: Table A; Target 19147; HLA-A*68:02; CTCFL; ENSG00000124092; CTA
EQFPGEMFPV

SEQ ID NO: 19148 - protein, 11 aa, Homo sapiens
  misc_feature: Table A; Target 19148; HLA-A*68:02; CTCFL; ENSG00000124092; CTA
EQFPGEMFPVA

SEQ ID NO: 19149 - protein, 9 aa, Homo sapiens
  misc_feature: Table A; Target 19149; HLA-A*25:01; CTCFL; ENSG00000124092; CTA
EQFTKIKEL

SEQ ID NO: 19150 - protein, 9 aa, Homo sapiens
  misc_feature: Table A; Target 19150; HLA-A*26:01; CTCFL; ENSG00000124092; CTA
EQFTKIKEL

SEQ ID NO: 19151 - protein, 9 aa, Homo sapiens
  misc_feature: Table A; Target 19151; HLA-A*68:02; CTCFL; ENSG00000124092; CTA
EQFTKIKEL

SEQ ID NO: 19152 - protein, 9 aa, Homo sapiens
  misc_feature: Table A; Target 19152; HLA-B*08:01; CTCFL; ENSG00000124092; CTA
EQFTKIKEL

SEQ ID NO: 19153 - protein, 9 aa, Homo sapiens
  misc_feature: Table A; Target 19153; HLA-B*44:03; CTCFL; ENSG00000124092; CTA
EQFTKIKEL

SEQ ID NO: 19154 - protein, 9 aa, Homo sapiens
  misc_feature: Table A; Target 19154; HLA-C*16:04; CTCFL; ENSG00000124092; CTA
EQFTKIKEL

SEQ ID NO: 19155 - protein, 9 aa, Homo sapiens
  misc_feature: Table A; Target 19155; HLA-A*68:02; CTCFL; ENSG00000124092; CTA
EQLFFVETM

SEQ ID NO: 19156 - protein, 9 aa, Homo sapiens
  misc_feature: Table A; Target 19156; HLA-B*13:02; CTCFL; ENSG00000124092; CTA
EQLFFVETM

SEQ ID NO: 19157 - protein, 9 aa, Homo sapiens
  misc_feature: Table A; Target 19157; HLA-B*18:01; CTCFL; ENSG00000124092; CTA
EQLFFVETM

SEQ ID NO: 19158 - protein, 9 aa, Homo sapiens
  misc_feature: Table A; Target 19158; HLA-B*27:05; CTCFL; ENSG00000124092; CTA
EQLFFVETM

SEQ ID NO: 19159 - protein, 9 aa, Homo sapiens
  misc_feature: Table A; Target 19159; HLA-B*35:01; CTCFL; ENSG00000124092; CTA
EQLFFVETM

SEQ ID NO: 19160 - protein, 9 aa, Homo sapiens
  misc_feature: Table A; Target 19160; HLA-B*38:01; CTCFL; ENSG00000124092; CTA
EQLFFVETM

SEQ ID NO: 19161 - protein, 9 aa, Homo sapiens
  misc_feature: Table A; Target 19161; HLA-B*39:01; CTCFL; ENSG00000124092; CTA
EQLFFVETM

SEQ ID NO: 19162 - protein, 9 aa, Homo sapiens
  misc_feature: Table A; Target 19162; HLA-C*07:01; CTCFL; ENSG00000124092; CTA
EQLFFVETM

SEQ ID NO: 19163 - protein, 10 aa, Homo sapiens
  misc_feature: Table A; Target 19163; HLA-A*68:02; CTCFL; ENSG00000124092; CTA
ERSDEIVLTV

SEQ ID NO: 19164 - protein, 9 aa, Homo sapiens
  misc_feature: Table A; Target 19164; HLA-A*01:01; CTCFL; ENSG00000124092; CTA
ESEKYILTL

SEQ ID NO: 19165 - protein, 8 aa, Homo sapiens
  misc_feature: Table A; Target 19165; HLA-A*33:03; CTCFL; ENSG00000124092; CTA
ETMSGDER

SEQ ID NO: 19166 - protein, 8 aa, Homo sapiens
  misc_feature: Table A; Target 19166; HLA-A*68:02; CTCFL; ENSG00000124092; CTA
ETTGLIKL

SEQ ID NO: 19167 - protein, 8 aa, Homo sapiens
  misc_feature: Table A; Target 19167; HLA-C*05:01; CTCFL; ENSG00000124092; CTA
EVDEGVTC

SEQ ID NO: 19168 - protein, 10 aa, Homo sapiens
  misc_feature: Table A; Target 19168; HLA-A*25:01; CTCFL; ENSG00000124092; CTA
EVDEGVTCEM

SEQ ID NO: 19169 - protein, 10 aa, Homo sapiens
  misc_feature: Table A; Target 19169; HLA-A*26:01; CTCFL; ENSG00000124092; CTA
EVDEGVTCEM

SEQ ID NO: 19170 - protein, 10 aa, Homo sapiens
  misc_feature: Table A; Target 19170; HLA-B*35:01; CTCFL; ENSG00000124092; CTA
EVDEGVTCEM

SEQ ID NO: 19171 - protein, 10 aa, Homo sapiens
  misc_feature: Table A; Target 19171; HLA-B*35:03; CTCFL; ENSG00000124092; CTA
EVDEGVTCEM

SEQ ID NO: 19172 - protein, 10 aa, Homo sapiens
  misc_feature: Table A; Target 19172; HLA-B*39:01; CTCFL; ENSG00000124092; CTA
EVDEGVTCEM

SEQ ID NO: 19173 - protein, 10 aa, Homo sapiens
  misc_feature: Table A; Target 19173; HLA-C*05:01; CTCFL; ENSG00000124092; CTA
EVDEGVTCEM

SEQ ID NO: 19174 - protein, 10 aa, Homo sapiens
  misc_feature: Table A; Target 19174; HLA-C*07:06; CTCFL; ENSG00000124092; CTA
EVDEGVTCEM

SEQ ID NO: 19175 - protein, 8 aa, Homo sapiens
  misc_feature: Table A; Target 19175; HLA-B*08:01; CTCFL; ENSG00000124092; CTA
EVLQFHAL

SEQ ID NO: 19176 - protein, 9 aa, Homo sapiens
  misc_feature: Table A; Target 19176; HLA-B*35:03; CTCFL; ENSG00000124092; CTA
FHALEENVM

SEQ ID NO: 19177 - protein, 9 aa, Homo sapiens
  misc_feature: Table A; Target 19177; HLA-B*39:01; CTCFL; ENSG00000124092; CTA
FHALEENVM

SEQ ID NO: 19178 - protein, 10 aa, Homo sapiens
  misc_feature: Table A; Target 19178; HLA-B*38:01; CTCFL; ENSG00000124092; CTA
FHALEENVMV

SEQ ID NO: 19179 - protein, 8 aa, Homo sapiens
  misc_feature: Table A; Target 19179; HLA-B*54:01; CTCFL; ENSG00000124092; CTA
FPGEMFPV

SEQ ID NO: 19180 - protein, 9 aa, Homo sapiens
  misc_feature: Table A; Target 19180; HLA-B*35:01; CTCFL; ENSG00000124092; CTA
FPGEMFPVA

SEQ ID NO: 19181 - protein, 9 aa, Homo sapiens
  misc_feature: Table A; Target 19181; HLA-B*35:03; CTCFL; ENSG00000124092; CTA
FPGEMFPVA

SEQ ID NO: 19182 - protein, 9 aa, Homo sapiens
  misc_feature: Table A; Target 19182; HLA-B*51:01; CTCFL; ENSG00000124092; CTA
FPGEMFPVA

SEQ ID NO: 19183 - protein, 9 aa, Homo sapiens
  misc_feature: Table A; Target 19183; HLA-B*54:01; CTCFL; ENSG00000124092; CTA
FPGEMFPVA

SEQ ID NO: 19184 - protein, 9 aa, Homo sapiens
  misc_feature: Table A; Target 19184; HLA-B*55:01; CTCFL; ENSG00000124092; CTA
FPGEMFPVA

SEQ ID NO: 19185 - protein, 9 aa, Homo sapiens
  misc_feature: Table A; Target 19185; HLA-B*56:01; CTCFL; ENSG00000124092; CTA
FPGEMFPVA

SEQ ID NO: 19186 - protein, 10 aa, Homo sapiens
  misc_feature: Table A; Target 19186; HLA-B*35:03; CTCFL; ENSG00000124092; CTA
FPGEMFPVAC

SEQ ID NO: 19187 - protein, 10 aa, Homo sapiens
  misc_feature: Table A; Target 19187; HLA-B*54:01; CTCFL; ENSG00000124092; CTA
FPGEMFPVAC

SEQ ID NO: 19188 - protein, 10 aa, Homo sapiens
  misc_feature: Table A; Target 19188; HLA-B*56:01; CTCFL; ENSG00000124092; CTA
FPGEMFPVAC

SEQ ID NO: 19189 - protein, 10 aa, Homo sapiens
  misc_feature: Table A; Target 19189; HLA-B*54:01; CTCFL; ENSG00000124092; CTA
FPVACRETTA

SEQ ID NO: 19190 - protein, 10 aa, Homo sapiens
  misc_feature: Table A; Target 19190; HLA-B*56:01; CTCFL; ENSG00000124092; CTA
FPVACRETTA

SEQ ID NO: 19191 - protein, 9 aa, Homo sapiens
  misc_feature: Table A; Target 19191; HLA-B*08:01; CTCFL; ENSG00000124092; CTA
FTKIKELEL

SEQ ID NO: 19192 - protein, 9 aa, Homo sapiens
  misc_feature: Table A; Target 19192; HLA-A*01:01; CTCFL; ENSG00000124092; CTA
FTQSGTMKI

SEQ ID NO: 19193 - protein, 9 aa, Homo sapiens
  misc_feature: Table A; Target 19193; HLA-A*25:01; CTCFL; ENSG00000124092; CTA
FTQSGTMKI

SEQ ID NO: 19194 - protein, 9 aa, Homo sapiens
  misc_feature: Table A; Target 19194; HLA-A*32:01; CTCFL; ENSG00000124092; CTA
FTQSGTMKI

SEQ ID NO: 19195 - protein, 9 aa, Homo sapiens
  misc_feature: Table A; Target 19195; HLA-A*68:02; CTCFL; ENSG00000124092; CTA
FTQSGTMKI

SEQ ID NO: 19196 - protein, 9 aa, Homo sapiens
  misc_feature: Table A; Target 19196; HLA-B*13:02; CTCFL; ENSG00000124092; CTA
FTQSGTMKI

SEQ ID NO: 19197 - protein, 9 aa, Homo sapiens
  misc_feature: Table A; Target 19197; HLA-B*49:01; CTCFL; ENSG00000124092; CTA
FTQSGTMKI

SEQ ID NO: 19198 - protein, 9 aa, Homo sapiens
  misc_feature: Table A; Target 19198; HLA-C*02:02; CTCFL; ENSG00000124092; CTA
FTQSGTMKI

SEQ ID NO: 19199 - protein, 9 aa, Homo sapiens
  misc_feature: Table A; Target 19199; HLA-C*03:03; CTCFL; ENSG00000124092; CTA
FTQSGTMKI

SEQ ID NO: 19200 - protein, 9 aa, Homo sapiens
  misc_feature: Table A; Target 19200; HLA-C*03:04; CTCFL; ENSG00000124092; CTA
FTQSGTMKI

SEQ ID NO: 19201 - protein, 9 aa, Homo sapiens
  misc_feature: Table A; Target 19201; HLA-C*06:02; CTCFL; ENSG00000124092; CTA
FTQSGTMKI

SEQ ID NO: 19202 - protein, 9 aa, Homo sapiens
  misc_feature: Table A; Target 19202; HLA-C*12:03; CTCFL; ENSG00000124092; CTA
FTQSGTMKI

SEQ ID NO: 19203 - protein, 9 aa, Homo sapiens
  misc_feature: Table A; Target 19203; HLA-C*16:02; CTCFL; ENSG00000124092; CTA
FTQSGTMKI

SEQ ID NO: 19204 - protein, 8 aa, Homo sapiens
  misc_feature: Table A; Target 19204; HLA-B*18:01; CTCFL; ENSG00000124092; CTA
FTSEAVEL

SEQ ID NO: 19205 - protein, 8 aa, Homo sapiens
  misc_feature: Table A; Target 19205; HLA-B*27:05; CTCFL; ENSG00000124092; CTA
FTSEAVEL

SEQ ID NO: 19206 - protein, 8 aa, Homo sapiens
  misc_feature: Table A; Target 19206; HLA-B*35:01; CTCFL; ENSG00000124092; CTA
FTSEAVEL

SEQ ID NO: 19207 - protein, 8 aa, Homo sapiens
  misc_feature: Table A; Target 19207; HLA-B*35:03; CTCFL; ENSG00000124092; CTA
FTSEAVEL

SEQ ID NO: 19208 - protein, 8 aa, Homo sapiens
  misc_feature: Table A; Target 19208; HLA-B*39:01; CTCFL; ENSG00000124092; CTA
FTSEAVEL

SEQ ID NO: 19209 - protein, 8 aa, Homo sapiens
  misc_feature: Table A; Target 19209; HLA-B*40:01; CTCFL; ENSG00000124092; CTA
FTSEAVEL

SEQ ID NO: 19210 - protein, 8 aa, Homo sapiens
  misc_feature: Table A; Target 19210; HLA-B*46:01; CTCFL; ENSG00000124092; CTA
FTSEAVEL

SEQ ID NO: 19211 - protein, 8 aa, Homo sapiens
  misc_feature: Table A; Target 19211; HLA-C*01:02; CTCFL; ENSG00000124092; CTA
FTSEAVEL

SEQ ID NO: 19212 - protein, 8 aa, Homo sapiens
  misc_feature: Table A; Target 19212; HLA-C*02:02; CTCFL; ENSG00000124092; CTA
FTSEAVEL

SEQ ID NO: 19213 - protein, 8 aa, Homo sapiens
  misc_feature: Table A; Target 19213; HLA-C*03:03; CTCFL; ENSG00000124092; CTA
FTSEAVEL

SEQ ID NO: 19214 - protein, 8 aa, Homo sapiens
  misc_feature: Table A; Target 19214; HLA-C*03:04; CTCFL; ENSG00000124092; CTA
FTSEAVEL

SEQ ID NO: 19215 - protein, 8 aa, Homo sapiens
  misc_feature: Table A; Target 19215; HLA-C*04:01; CTCFL; ENSG00000124092; CTA
FTSEAVEL

SEQ ID NO: 19216 - protein, 8 aa, Homo sapiens
  misc_feature: Table A; Target 19216; HLA-C*05:01; CTCFL; ENSG00000124092; CTA
FTSEAVEL

SEQ ID NO: 19217 - protein, 8 aa, Homo sapiens
  misc_feature: Table A; Target 19217; HLA-C*07:04; CTCFL; ENSG00000124092; CTA
FTSEAVEL

SEQ ID NO: 19218 - protein, 8 aa, Homo sapiens
  misc_feature: Table A; Target 19218; HLA-C*12:03; CTCFL; ENSG00000124092; CTA
FTSEAVEL

SEQ ID NO: 19219 - protein, 8 aa, Homo sapiens
  misc_feature: Table A; Target 19219; HLA-C*14:02; CTCFL; ENSG00000124092; CTA
FTSEAVEL

SEQ ID NO: 19220 - protein, 8 aa, Homo sapiens
  misc_feature: Table A; Target 19220; HLA-C*16:01; CTCFL; ENSG00000124092; CTA
FTSEAVEL

SEQ ID NO: 19221 - protein, 8 aa, Homo sapiens
  misc_feature: Table A; Target 19221; HLA-C*16:02; CTCFL; ENSG00000124092; CTA
FTSEAVEL

SEQ ID NO: 19222 - protein, 9 aa, Homo sapiens
  misc_feature: Table A; Target 19222; HLA-A*01:01; CTCFL; ENSG00000124092; CTA
FTSSRMSSF

SEQ ID NO: 19223 - protein, 9 aa, Homo sapiens
  misc_feature: Table A; Target 19223; HLA-A*25:01; CTCFL; ENSG00000124092; CTA
FTSSRMSSF

SEQ ID NO: 19224 - protein, 9 aa, Homo sapiens
  misc_feature: Table A; Target 19224; HLA-A*26:01; CTCFL; ENSG00000124092; CTA
FTSSRMSSF

SEQ ID NO: 19225 - protein, 9 aa, Homo sapiens
  misc_feature: Table A; Target 19225; HLA-A*32:01; CTCFL; ENSG00000124092; CTA
FTSSRMSSF

SEQ ID NO: 19226 - protein, 9 aa, Homo sapiens
  misc_feature: Table A; Target 19226; HLA-B*08:01; CTCFL; ENSG00000124092; CTA
FTSSRMSSF

SEQ ID NO: 19227 - protein, 9 aa, Homo sapiens
  misc_feature: Table A; Target 19227; HLA-B*15:01; CTCFL; ENSG00000124092; CTA
FTSSRMSSF

SEQ ID NO: 19228 - protein, 9 aa, Homo sapiens
  misc_feature: Table A; Target 19228; HLA-B*37:01; CTCFL; ENSG00000124092; CTA
FTSSRMSSF

SEQ ID NO: 19229 - protein, 9 aa, Homo sapiens
  misc_feature: Table A; Target 19229; HLA-B*46:01; CTCFL; ENSG00000124092; CTA
FTSSRMSSF

SEQ ID NO: 19230 - protein, 9 aa, Homo sapiens
  misc_feature: Table A; Target 19230; HLA-B*57:01; CTCFL; ENSG00000124092; CTA
FTSSRMSSF

SEQ ID NO: 19231 - protein, 9 aa, Homo sapiens
  misc_feature: Table A; Target 19231; HLA-C*01:02; CTCFL; ENSG00000124092; CTA
FTSSRMSSF

SEQ ID NO: 19232 - protein, 9 aa, Homo sapiens
  misc_feature: Table A; Target 19232; HLA-C*02:02; CTCFL; ENSG00000124092; CTA
FTSSRMSSF

SEQ ID NO: 19233 - protein, 9 aa, Homo sapiens
  misc_feature: Table A; Target 19233; HLA-C*03:03; CTCFL; ENSG00000124092; CTA
FTSSRMSSF

SEQ ID NO: 19234 - protein, 9 aa, Homo sapiens
  misc_feature: Table A; Target 19234; HLA-C*03:04; CTCFL; ENSG00000124092; CTA
FTSSRMSSF

SEQ ID NO: 19235 - protein, 9 aa, Homo sapiens
  misc_feature: Table A; Target 19235; HLA-C*07:04; CTCFL; ENSG00000124092; CTA
FTSSRMSSF

SEQ ID NO: 19236 - protein, 9 aa, Homo sapiens
  misc_feature: Table A; Target 19236; HLA-C*12:03; CTCFL; ENSG00000124092; CTA
FTSSRMSSF

SEQ ID NO: 19237 - protein, 9 aa, Homo sapiens
  misc_feature: Table A; Target 19237; HLA-C*14:02; CTCFL; ENSG00000124092; CTA
FTSSRMSSF

SEQ ID NO: 19238 - protein, 9 aa, Homo sapiens
  misc_feature: Table A; Target 19238; HLA-C*16:01; CTCFL; ENSG00000124092; CTA
FTSSRMSSF

SEQ ID NO: 19239 - protein, 9 aa, Homo sapiens
  misc_feature: Table A; Target 19239; HLA-C*16:02; CTCFL; ENSG00000124092; CTA
FTSSRMSSF

SEQ ID NO: 19240 - protein, 9 aa, Homo sapiens
  misc_feature: Table A; Target 19240; HLA-C*16:04; CTCFL; ENSG00000124092; CTA
FTSSRMSSF

SEQ ID NO: 19241 - protein, 10 aa, Homo sapiens
  misc_feature: Table A; Target 19241; HLA-B*27:05; CTCFL; ENSG00000124092; CTA
FVETMSGDER

SEQ ID NO: 19242 - protein, 8 aa, Homo sapiens
  misc_feature: Table A; Target 19242; HLA-B*39:01; CTCFL; ENSG00000124092; CTA
FVTSGELV

SEQ ID NO: 19243 - protein, 9 aa, Homo sapiens
  misc_feature: Table A; Target 19243; HLA-A*33:03; CTCFL; ENSG00000124092; CTA
FVTSGELVR

SEQ ID NO: 19244 - protein, 9 aa, Homo sapiens
  misc_feature: Table A; Target 19244; HLA-A*68:01; CTCFL; ENSG00000124092; CTA
FVTSGELVR

SEQ ID NO: 19245 - protein, 9 aa, Homo sapiens
  misc_feature: Table A; Target 19245; HLA-C*02:02; CTCFL; ENSG00000124092; CTA
FVTSGELVR

SEQ ID NO: 19246 - protein, 9 aa, Homo sapiens
  misc_feature: Table A; Target 19246; HLA-C*07:06; CTCFL; ENSG00000124092; CTA
FVTSGELVR

SEQ ID NO: 19247 - protein, 10 aa, Homo sapiens
  misc_feature: Table A; Target 19247; HLA-B*40:01; CTCFL; ENSG00000124092; CTA
GDERSDEIVL

SEQ ID NO: 19248 - protein, 8 aa, Homo sapiens
  misc_feature: Table A; Target 19248; HLA-A*30:01; CTCFL; ENSG00000124092; CTA
GEKPFTCL

SEQ ID NO: 19249 - protein, 8 aa, Homo sapiens
  misc_feature: Table A; Target 19249; HLA-B*18:01; CTCFL; ENSG00000124092; CTA
GEKPFTCL

SEQ ID NO: 19250 - protein, 8 aa, Homo sapiens
  misc_feature: Table A; Target 19250; HLA-B*37:01; CTCFL; ENSG00000124092; CTA
GEKPFTCL

SEQ ID NO: 19251 - protein, 8 aa, Homo sapiens
  misc_feature: Table A; Target 19251; HLA-B*40:01; CTCFL; ENSG00000124092; CTA
GEKPFTCL

SEQ ID NO: 19252 - protein, 8 aa, Homo sapiens
  misc_feature: Table A; Target 19252; HLA-B*40:02; CTCFL; ENSG00000124092; CTA
GEKPFTCL

SEQ ID NO: 19253 - protein, 8 aa, Homo sapiens
  misc_feature: Table A; Target 19253; HLA-B*49:01; CTCFL; ENSG00000124092; CTA
GEKPFTCL

SEQ ID NO: 19254 - protein, 9 aa, Homo sapiens
  misc_feature: Table A; Target 19254; HLA-B*40:02; CTCFL; ENSG00000124092; CTA
GEKPYECHI

SEQ ID NO: 19255 - protein, 9 aa, Homo sapiens
  misc_feature: Table A; Target 19255; HLA-B*49:01; CTCFL; ENSG00000124092; CTA
GEKPYECHI

SEQ ID NO: 19256 - protein, 8 aa, Homo sapiens
  misc_feature: Table A; Target 19256; HLA-B*49:01; CTCFL; ENSG00000124092; CTA
GEMFPVAC

SEQ ID NO: 19257 - protein, 9 aa, Homo sapiens
  misc_feature: Table A; Target 19257; HLA-B*37:01; CTCFL; ENSG00000124092; CTA
GENVPKYQC

SEQ ID NO: 19258 - protein, 9 aa, Homo sapiens
  misc_feature: Table A; Target 19258; HLA-B*40:01; CTCFL; ENSG00000124092; CTA
GEQFPGEMF

SEQ ID NO: 19259 - protein, 9 aa, Homo sapiens
  misc_feature: Table A; Target 19259; HLA-B*44:02; CTCFL; ENSG00000124092; CTA
GEQFPGEMF

SEQ ID NO: 19260 - protein, 9 aa, Homo sapiens
  misc_feature: Table A; Target 19260; HLA-B*44:03; CTCFL; ENSG00000124092; CTA
GEQFPGEMF

SEQ ID NO: 19261 - protein, 9 aa, Homo sapiens
  misc_feature: Table A; Target 19261; HLA-C*16:04; CTCFL; ENSG00000124092; CTA
GEQFPGEMF

SEQ ID NO: 19262 - protein, 9 aa, Homo sapiens
  misc_feature: Table A; Target 19262; HLA-B*07:02; CTCFL; ENSG00000124092; CTA
GPRQSLQQC

SEQ ID NO: 19263 - protein, 9 aa, Homo sapiens
  misc_feature: Table A; Target 19263; HLA-B*56:01; CTCFL; ENSG00000124092; CTA
GPRQSLQQC

SEQ ID NO: 19264 - protein, 10 aa, Homo sapiens
  misc_feature: Table A; Target 19264; HLA-B*07:02; CTCFL; ENSG00000124092; CTA
GPRQSLQQCV

SEQ ID NO: 19265 - protein, 11 aa, Homo sapiens
  misc_feature: Table A; Target 19265; HLA-B*56:01; CTCFL; ENSG00000124092; CTA
GPRQSLQQCVA

SEQ ID NO: 19266 - protein, 9 aa, Homo sapiens
  misc_feature: Table A; Target 19266; HLA-A*32:01; CTCFL; ENSG00000124092; CTA
GQKEAAKGW

SEQ ID NO: 19267 - protein, 9 aa, Homo sapiens
  misc_feature: Table A; Target 19267; HLA-C*16:04; CTCFL; ENSG00000124092; CTA
GQKEAAKGW

SEQ ID NO: 19268 - protein, 8 aa, Homo sapiens
  misc_feature: Table A; Target 19268; HLA-B*08:01; CTCFL; ENSG00000124092; CTA
GTMKIHIL

SEQ ID NO: 19269 - protein, 10 aa, Homo sapiens
  misc_feature: Table A; Target 19269; HLA-A*03:02; CTCFL; ENSG00000124092; CTA
GTMKIHILQK

SEQ ID NO: 19270 - protein, 10 aa, Homo sapiens
  misc_feature: Table A; Target 19270; HLA-A*31:01; CTCFL; ENSG00000124092; CTA
GTMKIHILQK

SEQ ID NO: 19271 - protein, 8 aa, Homo sapiens
  misc_feature: Table A; Target 19271; HLA-B*08:01; CTCFL; ENSG00000124092; CTA
HALEENVM

SEQ ID NO: 19272 - protein, 8 aa, Homo sapiens
  misc_feature: Table A; Target 19272; HLA-B*35:01; CTCFL; ENSG00000124092; CTA
HALEENVM

SEQ ID NO: 19273 - protein, 8 aa, Homo sapiens
  misc_feature: Table A; Target 19273; HLA-B*35:03; CTCFL; ENSG00000124092; CTA
HALEENVM

SEQ ID NO: 19274 - protein, 8 aa, Homo sapiens
  misc_feature: Table A; Target 19274; HLA-B*51:01; CTCFL; ENSG00000124092; CTA
HALEENVM

SEQ ID NO: 19275 - protein, 8 aa, Homo sapiens
  misc_feature: Table A; Target 19275; HLA-B*55:01; CTCFL; ENSG00000124092; CTA
HALEENVM

SEQ ID NO: 19276 - protein, 8 aa, Homo sapiens
  misc_feature: Table A; Target 19276; HLA-C*03:03; CTCFL; ENSG00000124092; CTA
HALEENVM

SEQ ID NO: 19277 - protein, 8 aa, Homo sapiens
  misc_feature: Table A; Target 19277; HLA-C*03:04; CTCFL; ENSG00000124092; CTA
HALEENVM

SEQ ID NO: 19278 - protein, 8 aa, Homo sapiens
  misc_feature: Table A; Target 19278; HLA-C*05:01; CTCFL; ENSG00000124092; CTA
HALEENVM

SEQ ID NO: 19279 - protein, 9 aa, Homo sapiens
  misc_feature: Table A; Target 19279; HLA-A*02:01; CTCFL; ENSG00000124092; CTA
HALEENVMV

SEQ ID NO: 19280 - protein, 9 aa, Homo sapiens
  misc_feature: Table A; Target 19280; HLA-A*68:02; CTCFL; ENSG00000124092; CTA
HALEENVMV

SEQ ID NO: 19281 - protein, 9 aa, Homo sapiens
  misc_feature: Table A; Target 19281; HLA-B*13:02; CTCFL; ENSG00000124092; CTA
HALEENVMV

SEQ ID NO: 19282 - protein, 9 aa, Homo sapiens
  misc_feature: Table A; Target 19282; HLA-B*27:05; CTCFL; ENSG00000124092; CTA
HALEENVMV

SEQ ID NO: 19283 - protein, 9 aa, Homo sapiens
  misc_feature: Table A; Target 19283; HLA-B*35:03; CTCFL; ENSG00000124092; CTA
HALEENVMV

SEQ ID NO: 19284 - protein, 9 aa, Homo sapiens
  misc_feature: Table A; Target 19284; HLA-B*38:01; CTCFL; ENSG00000124092; CTA
HALEENVMV

SEQ ID NO: 19285 - protein, 9 aa, Homo sapiens
  misc_feature: Table A; Target 19285; HLA-B*39:01; CTCFL; ENSG00000124092; CTA
HALEENVMV

SEQ ID NO: 19286 - protein, 9 aa, Homo sapiens
  misc_feature: Table A; Target 19286; HLA-B*51:01; CTCFL; ENSG00000124092; CTA
HALEENVMV

SEQ ID NO: 19287 - protein, 9 aa, Homo sapiens
  misc_feature: Table A; Target 19287; HLA-B*54:01; CTCFL; ENSG00000124092; CTA
HALEENVMV

SEQ ID NO: 19288 - protein, 9 aa, Homo sapiens
  misc_feature: Table A; Target 19288; HLA-B*55:01; CTCFL; ENSG00000124092; CTA
HALEENVMV

SEQ ID NO: 19289 - protein, 9 aa, Homo sapiens
  misc_feature: Table A; Target 19289; HLA-C*02:02; CTCFL; ENSG00000124092; CTA
HALEENVMV

SEQ ID NO: 19290 - protein, 9 aa, Homo sapiens
  misc_feature: Table A; Target 19290; HLA-C*03:03; CTCFL; ENSG00000124092; CTA
HALEENVMV

SEQ ID NO: 19291 - protein, 9 aa, Homo sapiens
  misc_feature: Table A; Target 19291; HLA-C*03:04; CTCFL; ENSG00000124092; CTA
HALEENVMV

SEQ ID NO: 19292 - protein, 9 aa, Homo sapiens
  misc_feature: Table A; Target 19292; HLA-C*04:01; CTCFL; ENSG00000124092; CTA
HALEENVMV

SEQ ID NO: 19293 - protein, 9 aa, Homo sapiens
  misc_feature: Table A; Target 19293; HLA-C*05:01; CTCFL; ENSG00000124092; CTA
HALEENVMV

SEQ ID NO: 19294 - protein, 9 aa, Homo sapiens
  misc_feature: Table A; Target 19294; HLA-C*12:03; CTCFL; ENSG00000124092; CTA
HALEENVMV

SEQ ID NO: 19295 - protein, 9 aa, Homo sapiens
  misc_feature: Table A; Target 19295; HLA-C*16:01; CTCFL; ENSG00000124092; CTA
HALEENVMV

SEQ ID NO: 19296 - protein, 9 aa, Homo sapiens
  misc_feature: Table A; Target 19296; HLA-C*16:02; CTCFL; ENSG00000124092; CTA
HALEENVMV

SEQ ID NO: 19297 - protein, 9 aa, Homo sapiens
  misc_feature: Table A; Target 19297; HLA-C*16:04; CTCFL; ENSG00000124092; CTA
HALEENVMV

SEQ ID NO: 19298 - protein, 10 aa, Homo sapiens
  misc_feature: Table A; Target 19298; HLA-B*54:01; CTCFL; ENSG00000124092; CTA
HALEENVMVA

SEQ ID NO: 19299 - protein, 10 aa, Homo sapiens
  misc_feature: Table A; Target 19299; HLA-B*56:01; CTCFL; ENSG00000124092; CTA
HALEENVMVA

SEQ ID NO: 19300 - protein, 8 aa, Homo sapiens
  misc_feature: Table A; Target 19300; HLA-A*23:01; CTCFL; ENSG00000124092; CTA
HAYSAAEL

SEQ ID NO: 19301 - protein, 8 aa, Homo sapiens
  misc_feature: Table A; Target 19301; HLA-A*30:01; CTCFL; ENSG00000124092; CTA
HAYSAAEL

SEQ ID NO: 19302 - protein, 8 aa, Homo sapiens
  misc_feature: Table A; Target 19302; HLA-A*32:01; CTCFL; ENSG00000124092; CTA
HAYSAAEL

SEQ ID NO: 19303 - protein, 8 aa, Homo sapiens
  misc_feature: Table A; Target 19303; HLA-B*07:02; CTCFL; ENSG00000124092; CTA
HAYSAAEL

SEQ ID NO: 19304 - protein, 8 aa, Homo sapiens
  misc_feature: Table A; Target 19304; HLA-B*08:01; CTCFL; ENSG00000124092; CTA
HAYSAAEL

SEQ ID NO: 19305 - protein, 8 aa, Homo sapiens
  misc_feature: Table A; Target 19305; HLA-B*13:02; CTCFL; ENSG00000124092; CTA
HAYSAAEL

SEQ ID NO: 19306 - protein, 8 aa, Homo sapiens
  misc_feature: Table A; Target 19306; HLA-B*15:03; CTCFL; ENSG00000124092; CTA
HAYSAAEL

SEQ ID NO: 19307 - protein, 8 aa, Homo sapiens
  misc_feature: Table A; Target 19307; HLA-B*18:01; CTCFL; ENSG00000124092; CTA
HAYSAAEL

SEQ ID NO: 19308 - protein, 8 aa, Homo sapiens
  misc_feature: Table A; Target 19308; HLA-B*27:05; CTCFL; ENSG00000124092; CTA
HAYSAAEL

SEQ ID NO: 19309 - protein, 8 aa, Homo sapiens
  misc_feature: Table A; Target 19309; HLA-B*35:01; CTCFL; ENSG00000124092; CTA
HAYSAAEL

SEQ ID NO: 19310 - protein, 8 aa, Homo sapiens
  misc_feature: Table A; Target 19310; HLA-B*35:03; CTCFL; ENSG00000124092; CTA
HAYSAAEL

SEQ ID NO: 19311 - protein, 8 aa, Homo sapiens
  misc_feature: Table A; Target 19311; HLA-B*37:01; CTCFL; ENSG00000124092; CTA
HAYSAAEL

SEQ ID NO: 19312 - protein, 8 aa, Homo sapiens
  misc_feature: Table A; Target 19312; HLA-B*38:01; CTCFL; ENSG00000124092; CTA
HAYSAAEL

SEQ ID NO: 19313 - protein, 8 aa, Homo sapiens
  misc_feature: Table A; Target 19313; HLA-B*39:01; CTCFL; ENSG00000124092; CTA
HAYSAAEL

SEQ ID NO: 19314 - protein, 8 aa, Homo sapiens
  misc_feature: Table A; Target 19314; HLA-B*40:01; CTCFL; ENSG00000124092; CTA
HAYSAAEL

SEQ ID NO: 19315 - protein, 8 aa, Homo sapiens
  misc_feature: Table A; Target 19315; HLA-B*40:02; CTCFL; ENSG00000124092; CTA
HAYSAAEL

SEQ ID NO: 19316 - protein, 8 aa, Homo sapiens
  misc_feature: Table A; Target 19316; HLA-B*46:01; CTCFL; ENSG00000124092; CTA
HAYSAAEL

SEQ ID NO: 19317 - protein, 8 aa, Homo sapiens
  misc_feature: Table A; Target 19317; HLA-B*51:01; CTCFL; ENSG00000124092; CTA
HAYSAAEL

SEQ ID NO: 19318 - protein, 8 aa, Homo sapiens
  misc_feature: Table A; Target 19318; HLA-B*54:01; CTCFL; ENSG00000124092; CTA
HAYSAAEL

SEQ ID NO: 19319 - protein, 8 aa, Homo sapiens
  misc_feature: Table A; Target 19319; HLA-B*58:01; CTCFL; ENSG00000124092; CTA
HAYSAAEL

SEQ ID NO: 19320 - protein, 8 aa, Homo sapiens
  misc_feature: Table A; Target 19320; HLA-C*01:02; CTCFL; ENSG00000124092; CTA
HAYSAAEL

SEQ ID NO: 19321 - protein, 8 aa, Homo sapiens
  misc_feature: Table A; Target 19321; HLA-C*02:02; CTCFL; ENSG00000124092; CTA
HAYSAAEL

SEQ ID NO: 19322 - protein, 8 aa, Homo sapiens
  misc_feature: Table A; Target 19322; HLA-C*03:03; CTCFL; ENSG00000124092; CTA
HAYSAAEL

SEQ ID NO: 19323 - protein, 8 aa, Homo sapiens
  misc_feature: Table A; Target 19323; HLA-C*05:01; CTCFL; ENSG00000124092; CTA
HAYSAAEL

SEQ ID NO: 19324 - protein, 8 aa, Homo sapiens
  misc_feature: Table A; Target 19324; HLA-C*06:02; CTCFL; ENSG00000124092; CTA
HAYSAAEL

SEQ ID NO: 19325 - protein, 8 aa, Homo sapiens
  misc_feature: Table A; Target 19325; HLA-C*07:01; CTCFL; ENSG00000124092; CTA
HAYSAAEL

SEQ ID NO: 19326 - protein, 8 aa, Homo sapiens
  misc_feature: Table A; Target 19326; HLA-C*07:02; CTCFL; ENSG00000124092; CTA
HAYSAAEL

SEQ ID NO: 19327 - protein, 8 aa, Homo sapiens
  misc_feature: Table A; Target 19327; HLA-C*07:04; CTCFL; ENSG00000124092; CTA
HAYSAAEL

SEQ ID NO: 19328 - protein, 8 aa, Homo sapiens
  misc_feature: Table A; Target 19328; HLA-C*07:06; CTCFL; ENSG00000124092; CTA
HAYSAAEL

SEQ ID NO: 19329 - protein, 8 aa, Homo sapiens
  misc_feature: Table A; Target 19329; HLA-C*12:03; CTCFL; ENSG00000124092; CTA
HAYSAAEL

SEQ ID NO: 19330 - protein, 8 aa, Homo sapiens
  misc_feature: Table A; Target 19330; HLA-C*14:02; CTCFL; ENSG00000124092; CTA
HAYSAAEL

SEQ ID NO: 19331 - protein, 8 aa, Homo sapiens
  misc_feature: Table A; Target 19331; HLA-C*16:01; CTCFL; ENSG00000124092; CTA
HAYSAAEL

SEQ ID NO: 19332 - protein, 8 aa, Homo sapiens
  misc_feature: Table A; Target 19332; HLA-C*16:02; CTCFL; ENSG00000124092; CTA
HAYSAAEL

SEQ ID NO: 19333 - protein, 8 aa, Homo sapiens
  misc_feature: Table A; Target 19333; HLA-C*16:04; CTCFL; ENSG00000124092; CTA
HAYSAAEL

SEQ ID NO: 19334 - protein, 9 aa, Homo sapiens
  misc_feature: Table A; Target 19334; HLA-A*01:01; CTCFL; ENSG00000124092; CTA
HAYSAAELK

SEQ ID NO: 19335 - protein, 9 aa, Homo sapiens
  misc_feature: Table A; Target 19335; HLA-A*03:01; CTCFL; ENSG00000124092; CTA
HAYSAAELK

SEQ ID NO: 19336 - protein, 9 aa, Homo sapiens
  misc_feature: Table A; Target 19336; HLA-A*03:02; CTCFL; ENSG00000124092; CTA
HAYSAAELK

SEQ ID NO: 19337 - protein, 9 aa, Homo sapiens
  misc_feature: Table A; Target 19337; HLA-A*11:01; CTCFL; ENSG00000124092; CTA
HAYSAAELK

SEQ ID NO: 19338 - protein, 9 aa, Homo sapiens
  misc_feature: Table A; Target 19338; HLA-A*33:01; CTCFL; ENSG00000124092; CTA
HAYSAAELK

SEQ ID NO: 19339 - protein, 9 aa, Homo sapiens
  misc_feature: Table A; Target 19339; HLA-A*33:03; CTCFL; ENSG00000124092; CTA
HAYSAAELK

SEQ ID NO: 19340 - protein, 9 aa, Homo sapiens
  misc_feature: Table A; Target 19340; HLA-A*68:01; CTCFL; ENSG00000124092; CTA
HAYSAAELK

SEQ ID NO: 19341 - protein, 9 aa, Homo sapiens
  misc_feature: Table A; Target 19341; HLA-B*27:02; CTCFL; ENSG00000124092; CTA
HAYSAAELK

SEQ ID NO: 19342 - protein, 9 aa, Homo sapiens
  misc_feature: Table A; Target 19342; HLA-B*27:05; CTCFL; ENSG00000124092; CTA
HAYSAAELK

SEQ ID NO: 19343 - protein, 9 aa, Homo sapiens
  misc_feature: Table A; Target 19343; HLA-B*57:01; CTCFL; ENSG00000124092; CTA
HAYSAAELK

SEQ ID NO: 19344 - protein, 9 aa, Homo sapiens
  misc_feature: Table A; Target 19344; HLA-C*02:02; CTCFL; ENSG00000124092; CTA
HAYSAAELK

SEQ ID NO: 19345 - protein, 9 aa, Homo sapiens
  misc_feature: Table A; Target 19345; HLA-C*03:03; CTCFL; ENSG00000124092; CTA
HAYSAAELK

SEQ ID NO: 19346 - protein, 9 aa, Homo sapiens
  misc_feature: Table A; Target 19346; HLA-C*07:06; CTCFL; ENSG00000124092; CTA
HAYSAAELK

SEQ ID NO: 19347 - protein, 10 aa, Homo sapiens
  misc_feature: Table A; Target 19347; HLA-B*51:01; CTCFL; ENSG00000124092; CTA
HAYSAAELKC

SEQ ID NO: 19348 - protein, 10 aa, Homo sapiens
  misc_feature: Table A; Target 19348; HLA-B*54:01; CTCFL; ENSG00000124092; CTA
HAYSAAELKC

SEQ ID NO: 19349 - protein, 11 aa, Homo sapiens
  misc_feature: Table A; Target 19349; HLA-A*33:01; CTCFL; ENSG00000124092; CTA
HAYSAAELKCR

SEQ ID NO: 19350 - protein, 11 aa, Homo sapiens
  misc_feature: Table A; Target 19350; HLA-A*33:03; CTCFL; ENSG00000124092; CTA
HAYSAAELKCR

SEQ ID NO: 19351 - protein, 8 aa, Homo sapiens
  misc_feature: Table A; Target 19351; HLA-A*68:01; CTCFL; ENSG00000124092; CTA
HCATIIAR

SEQ ID NO: 19352 - protein, 8 aa, Homo sapiens
  misc_feature: Table A; Target 19352; HLA-C*07:06; CTCFL; ENSG00000124092; CTA
HCATIIAR

SEQ ID NO: 19353 - protein, 9 aa, Homo sapiens
  misc_feature: Table A; Target 19353; HLA-A*03:01; CTCFL; ENSG00000124092; CTA
HCATIIARK

SEQ ID NO: 19354 - protein, 9 aa, Homo sapiens
  misc_feature: Table A; Target 19354; HLA-A*03:02; CTCFL; ENSG00000124092; CTA
HCATIIARK

SEQ ID NO: 19355 - protein, 9 aa, Homo sapiens
  misc_feature: Table A; Target 19355; HLA-A*11:01; CTCFL; ENSG00000124092; CTA
HCATIIARK

SEQ ID NO: 19356 - protein, 9 aa, Homo sapiens
  misc_feature: Table A; Target 19356; HLA-A*68:01; CTCFL; ENSG00000124092; CTA
HCATIIARK

SEQ ID NO: 19357 - protein, 9 aa, Homo sapiens
  misc_feature: Table A; Target 19357; HLA-A*02:01; CTCFL; ENSG00000124092; CTA
HDANFIPTV

SEQ ID NO: 19358 - protein, 9 aa, Homo sapiens
  misc_feature: Table A; Target 19358; HLA-A*02:03; CTCFL; ENSG00000124092; CTA
HDANFIPTV

SEQ ID NO: 19359 - protein, 9 aa, Homo sapiens
  misc_feature: Table A; Target 19359; HLA-A*30:01; CTCFL; ENSG00000124092; CTA
HDANFIPTV

SEQ ID NO: 19360 - protein, 9 aa, Homo sapiens
  misc_feature: Table A; Target 19360; HLA-A*68:02; CTCFL; ENSG00000124092; CTA
HDANFIPTV

SEQ ID NO: 19361 - protein, 9 aa, Homo sapiens
  misc_feature: Table A; Target 19361; HLA-B*13:02; CTCFL; ENSG00000124092; CTA
HDANFIPTV

SEQ ID NO: 19362 - protein, 9 aa, Homo sapiens
  misc_feature: Table A; Target 19362; HLA-B*49:01; CTCFL; ENSG00000124092; CTA
HDANFIPTV

SEQ ID NO: 19363 - protein, 9 aa, Homo sapiens
  misc_feature: Table A; Target 19363; HLA-B*51:01; CTCFL; ENSG00000124092; CTA
HDANFIPTV

SEQ ID NO: 19364 - protein, 10 aa, Homo sapiens
  misc_feature: Table A; Target 19364; HLA-A*25:01; CTCFL; ENSG00000124092; CTA
HDANFIPTVY

SEQ ID NO: 19365 - protein, 10 aa, Homo sapiens
  misc_feature: Table A; Target 19365; HLA-A*26:01; CTCFL; ENSG00000124092; CTA
HDANFIPTVY

SEQ ID NO: 19366 - protein, 10 aa, Homo sapiens
  misc_feature: Table A; Target 19366; HLA-A*29:02; CTCFL; ENSG00000124092; CTA
HDANFIPTVY

SEQ ID NO: 19367 - protein, 10 aa, Homo sapiens
  misc_feature: Table A; Target 19367; HLA-A*30:02; CTCFL; ENSG00000124092; CTA
HDANFIPTVY

SEQ ID NO: 19368 - protein, 10 aa, Homo sapiens
  misc_feature: Table A; Target 19368; HLA-B*15:03; CTCFL; ENSG00000124092; CTA
HDANFIPTVY

SEQ ID NO: 19369 - protein, 10 aa, Homo sapiens
  misc_feature: Table A; Target 19369; HLA-B*18:01; CTCFL; ENSG00000124092; CTA
HDANFIPTVY

SEQ ID NO: 19370 - protein, 10 aa, Homo sapiens
  misc_feature: Table A; Target 19370; HLA-B*27:02; CTCFL; ENSG00000124092; CTA
HDANFIPTVY

SEQ ID NO: 19371 - protein, 10 aa, Homo sapiens
  misc_feature: Table A; Target 19371; HLA-B*35:01; CTCFL; ENSG00000124092; CTA
HDANFIPTVY

SEQ ID NO: 19372 - protein, 10 aa, Homo sapiens
  misc_feature: Table A; Target 19372; HLA-B*44:03; CTCFL; ENSG00000124092; CTA
HDANFIPTVY

SEQ ID NO: 19373 - protein, 10 aa, Homo sapiens
  misc_feature: Table A; Target 19373; HLA-C*02:02; CTCFL; ENSG00000124092; CTA
HDANFIPTVY

SEQ ID NO: 19374 - protein, 10 aa, Homo sapiens
  misc_feature: Table A; Target 19374; HLA-C*07:01; CTCFL; ENSG00000124092; CTA
HDANFIPTVY

SEQ ID NO: 19375 - protein, 10 aa, Homo sapiens
  misc_feature: Table A; Target 19375; HLA-C*12:03; CTCFL; ENSG00000124092; CTA
HDANFIPTVY

SEQ ID NO: 19376 - protein, 10 aa, Homo sapiens
  misc_feature: Table A; Target 19376; HLA-C*16:04; CTCFL; ENSG00000124092; CTA
HDANFIPTVY

SEQ ID NO: 19377 - protein, 9 aa, Homo sapiens
  misc_feature: Table A; Target 19377; HLA-A*23:01; CTCFL; ENSG00000124092; CTA
HFTSEAVEL

SEQ ID NO: 19378 - protein, 9 aa, Homo sapiens
  misc_feature: Table A; Target 19378; HLA-A*24:02; CTCFL; ENSG00000124092; CTA
HFTSEAVEL

SEQ ID NO: 19379 - protein, 9 aa, Homo sapiens
  misc_feature: Table A; Target 19379; HLA-B*35:03; CTCFL; ENSG00000124092; CTA
HFTSEAVEL

SEQ ID NO: 19380 - protein, 9 aa, Homo sapiens
  misc_feature: Table A; Target 19380; HLA-C*14:02; CTCFL; ENSG00000124092; CTA
HFTSEAVEL

SEQ ID NO: 19381 - protein, 8 aa, Homo sapiens
  misc_feature: Table A; Target 19381; HLA-B*18:01; CTCFL; ENSG00000124092; CTA
HGENVPKY

SEQ ID NO: 19382 - protein, 8 aa, Homo sapiens
  misc_feature: Table A; Target 19382; HLA-B*39:01; CTCFL; ENSG00000124092; CTA
HGENVPKY

SEQ ID NO: 19383 - protein, 8 aa, Homo sapiens
  misc_feature: Table A; Target 19383; HLA-C*07:01; CTCFL; ENSG00000124092; CTA
HGENVPKY

SEQ ID NO: 19384 - protein, 8 aa, Homo sapiens
  misc_feature: Table A; Target 19384; HLA-C*07:04; CTCFL; ENSG00000124092; CTA
HGENVPKY

SEQ ID NO: 19385 - protein, 8 aa, Homo sapiens
  misc_feature: Table A; Target 19385; HLA-C*12:03; CTCFL; ENSG00000124092; CTA
HGENVPKY

SEQ ID NO: 19386 - protein, 8 aa, Homo sapiens
  misc_feature: Table A; Target 19386; HLA-C*16:02; CTCFL; ENSG00000124092; CTA
HGENVPKY

SEQ ID NO: 19387 - protein, 9 aa, Homo sapiens
  misc_feature: Table A; Target 19387; HLA-A*03:01; CTCFL; ENSG00000124092; CTA
HMKTHTSEK

SEQ ID NO: 19388 - protein, 11 aa, Homo sapiens
  misc_feature: Table A; Target 19388; HLA-B*27:02; CTCFL; ENSG00000124092; CTA
HRSPSELEAER

SEQ ID NO: 19389 - protein, 10 aa, Homo sapiens
  misc_feature: Table A; Target 19389; HLA-B*07:02; CTCFL; ENSG00000124092; CTA
HTRFTQSGTM

SEQ ID NO: 19390 - protein, 8 aa, Homo sapiens
  misc_feature: Table A; Target 19390; HLA-C*16:01; CTCFL; ENSG00000124092; CTA
HTSEKPHL

SEQ ID NO: 19391 - protein, 8 aa, Homo sapiens
  misc_feature: Table A; Target 19391; HLA-C*16:02; CTCFL; ENSG00000124092; CTA
HTSEKPHL

SEQ ID NO: 19392 - protein, 9 aa, Homo sapiens
  misc_feature: Table A; Target 19392; HLA-A*03:01; CTCFL; ENSG00000124092; CTA
HVNTHTGTR

SEQ ID NO: 19393 - protein, 9 aa, Homo sapiens
  misc_feature: Table A; Target 19393; HLA-A*31:01; CTCFL; ENSG00000124092; CTA
HVNTHTGTR

SEQ ID NO: 19394 - protein, 9 aa, Homo sapiens
  misc_feature: Table A; Target 19394; HLA-A*33:01; CTCFL; ENSG00000124092; CTA
HVNTHTGTR

SEQ ID NO: 19395 - protein, 9 aa, Homo sapiens
  misc_feature: Table A; Target 19395; HLA-A*33:03; CTCFL; ENSG00000124092; CTA
HVNTHTGTR

SEQ ID NO: 19396 - protein, 9 aa, Homo sapiens
  misc_feature: Table A; Target 19396; HLA-A*68:01; CTCFL; ENSG00000124092; CTA
HVNTHTGTR

SEQ ID NO: 19397 - protein, 9 aa, Homo sapiens
  misc_feature: Table A; Target 19397; HLA-C*07:06; CTCFL; ENSG00000124092; CTA
HVNTHTGTR

SEQ ID NO: 19398 - protein, 10 aa, Homo sapiens
  misc_feature: Table A; Target 19398; HLA-A*03:01; CTCFL; ENSG00000124092; CTA
ILKEATKGQK

SEQ ID NO: 19399 - protein, 11 aa, Homo sapiens
  misc_feature: Table A; Target 19399; HLA-A*03:02; CTCFL; ENSG00000124092; CTA
ILQKHGENVPK

SEQ ID NO: 19400 - protein, 9 aa, Homo sapiens
  misc_feature: Table A; Target 19400; HLA-A*23:01; CTCFL; ENSG00000124092; CTA
ILTLQTVHF

SEQ ID NO: 19401 - protein, 9 aa, Homo sapiens
  misc_feature: Table A; Target 19401; HLA-A*24:02; CTCFL; ENSG00000124092; CTA
ILTLQTVHF

SEQ ID NO: 19402 - protein, 11 aa, Homo sapiens
  misc_feature: Table A; Target 19402; HLA-C*04:01; CTCFL; ENSG00000124092; CTA
IQQELYSPQEM

SEQ ID NO: 19403 - protein, 9 aa, Homo sapiens
  misc_feature: Table A; Target 19403; HLA-B*13:02; CTCFL; ENSG00000124092; CTA
IQQQEGVQV

SEQ ID NO: 19404 - protein, 9 aa, Homo sapiens
  misc_feature: Table A; Target 19404; HLA-B*27:05; CTCFL; ENSG00000124092; CTA
IQQQEGVQV

SEQ ID NO: 19405 - protein, 9 aa, Homo sapiens
  misc_feature: Table A; Target 19405; HLA-B*38:01; CTCFL; ENSG00000124092; CTA
IQQQEGVQV

SEQ ID NO: 19406 - protein, 9 aa, Homo sapiens
  misc_feature: Table A; Target 19406; HLA-B*39:01; CTCFL; ENSG00000124092; CTA
IQQQEGVQV

SEQ ID NO: 19407 - protein, 10 aa, Homo sapiens
  misc_feature: Table A; Target 19407; HLA-B*13:02; CTCFL; ENSG00000124092; CTA
IQQQEGVQVV

SEQ ID NO: 19408 - protein, 11 aa, Homo sapiens
  misc_feature: Table A; Target 19408; HLA-A*30:01; CTCFL; ENSG00000124092; CTA
IQQQEGVQVVV

SEQ ID NO: 19409 - protein, 11 aa, Homo sapiens
  misc_feature: Table A; Target 19409; HLA-B*13:02; CTCFL; ENSG00000124092; CTA
IQQQEGVQVVV

SEQ ID NO: 19410 - protein, 8 aa, Homo sapiens
  misc_feature: Table A; Target 19410; HLA-B*15:01; CTCFL; ENSG00000124092; CTA
ISIQQELY

SEQ ID NO: 19411 - protein, 8 aa, Homo sapiens
  misc_feature: Table A; Target 19411; HLA-B*15:03; CTCFL; ENSG00000124092; CTA
ISIQQELY

SEQ ID NO: 19412 - protein, 8 aa, Homo sapiens
  misc_feature: Table A; Target 19412; HLA-B*58:01; CTCFL; ENSG00000124092; CTA
ISIQQELY

SEQ ID NO: 19413 - protein, 8 aa, Homo sapiens
  misc_feature: Table A; Target 19413; HLA-B*58:01; CTCFL; ENSG00000124092; CTA
ISVLSEQF

SEQ ID NO: 19414 - protein, 10 aa, Homo sapiens
  misc_feature: Table A; Target 19414; HLA-A*11:01; CTCFL; ENSG00000124092; CTA
ISVLSEQFTK

SEQ ID NO: 19415 - protein, 10 aa, Homo sapiens
  misc_feature: Table A; Target 19415; HLA-B*40:01; CTCFL; ENSG00000124092; CTA
KEAANGDEAA

SEQ ID NO: 19416 - protein, 11 aa, Homo sapiens
  misc_feature: Table A; Target 19416; HLA-B*40:01; CTCFL; ENSG00000124092; CTA
KEAANGDEAAA

SEQ ID NO: 19417 - protein, 10 aa, Homo sapiens
  misc_feature: Table A; Target 19417; HLA-B*40:01; CTCFL; ENSG00000124092; CTA
KEEVDEGVTC

SEQ ID NO: 19418 - protein, 10 aa, Homo sapiens
  misc_feature: Table A; Target 19418; HLA-A*30:01; CTCFL; ENSG00000124092; CTA
KEQLFFVETM

SEQ ID NO: 19419 - protein, 10 aa, Homo sapiens
  misc_feature: Table A; Target 19419; HLA-B*37:01; CTCFL; ENSG00000124092; CTA
KEQLFFVETM

SEQ ID NO: 19420 - protein, 10 aa, Homo sapiens
  misc_feature: Table A; Target 19420; HLA-B*40:01; CTCFL; ENSG00000124092; CTA
KEQLFFVETM

SEQ ID NO: 19421 - protein, 10 aa, Homo sapiens
  misc_feature: Table A; Target 19421; HLA-B*40:02; CTCFL; ENSG00000124092; CTA
KEQLFFVETM

SEQ ID NO: 19422 - protein, 10 aa, Homo sapiens
  misc_feature: Table A; Target 19422; HLA-B*49:01; CTCFL; ENSG00000124092; CTA
KEQLFFVETM

SEQ ID NO: 19423 - protein, 9 aa, Homo sapiens
  misc_feature: Table A; Target 19423; HLA-A*31:01; CTCFL; ENSG00000124092; CTA
KGFSRWINL

SEQ ID NO: 19424 - protein, 9 aa, Homo sapiens
  misc_feature: Table A; Target 19424; HLA-A*03:01; CTCFL; ENSG00000124092; CTA
KHGENVPKY

SEQ ID NO: 19425 - protein, 9 aa, Homo sapiens
  misc_feature: Table A; Target 19425; HLA-A*30:02; CTCFL; ENSG00000124092; CTA
KHGENVPKY

SEQ ID NO: 19426 - protein, 9 aa, Homo sapiens
  misc_feature: Table A; Target 19426; HLA-B*39:01; CTCFL; ENSG00000124092; CTA
KHGENVPKY

SEQ ID NO: 19427 - protein, 9 aa, Homo sapiens
  misc_feature: Table A; Target 19427; HLA-B*58:01; CTCFL; ENSG00000124092; CTA
KHGENVPKY

SEQ ID NO: 19428 - protein, 9 aa, Homo sapiens
  misc_feature: Table A; Target 19428; HLA-C*07:01; CTCFL; ENSG00000124092; CTA
KHGENVPKY

SEQ ID NO: 19429 - protein, 9 aa, Homo sapiens
  misc_feature: Table A; Target 19429; HLA-C*16:02; CTCFL; ENSG00000124092; CTA
KHGENVPKY

SEQ ID NO: 19430 - protein, 9 aa, Homo sapiens
  misc_feature: Table A; Target 19430; HLA-C*16:04; CTCFL; ENSG00000124092; CTA
KHGENVPKY

SEQ ID NO: 19431 - protein, 9 aa, Homo sapiens
  misc_feature: Table A; Target 19431; HLA-A*31:01; CTCFL; ENSG00000124092; CTA
KQLLNAHFR

SEQ ID NO: 19432 - protein, 8 aa, Homo sapiens
  misc_feature: Table A; Target 19432; HLA-B*40:02; CTCFL; ENSG00000124092; CTA
KTFRTVTL

SEQ ID NO: 19433 - protein, 8 aa, Homo sapiens
  misc_feature: Table A; Target 19433; HLA-B*57:01; CTCFL; ENSG00000124092; CTA
KTFRTVTL

SEQ ID NO: 19434 - protein, 8 aa, Homo sapiens
  misc_feature: Table A; Target 19434; HLA-B*58:01; CTCFL; ENSG00000124092; CTA
KTFRTVTL

SEQ ID NO: 19435 - protein, 9 aa, Homo sapiens
  misc_feature: Table A; Target 19435; HLA-A*02:04; CTCFL; ENSG00000124092; CTA
KTFRTVTLL

SEQ ID NO: 19436 - protein, 9 aa, Homo sapiens
  misc_feature: Table A; Target 19436; HLA-A*03:01; CTCFL; ENSG00000124092; CTA
KTFRTVTLL

SEQ ID NO: 19437 - protein, 9 aa, Homo sapiens
  misc_feature: Table A; Target 19437; HLA-A*31:01; CTCFL; ENSG00000124092; CTA
KTFRTVTLL

SEQ ID NO: 19438 - protein, 9 aa, Homo sapiens
  misc_feature: Table A; Target 19438; HLA-A*68:02; CTCFL; ENSG00000124092; CTA
KTFRTVTLL

SEQ ID NO: 19439 - protein, 9 aa, Homo sapiens
  misc_feature: Table A; Target 19439; HLA-B*57:01; CTCFL; ENSG00000124092; CTA
KTFRTVTLL

SEQ ID NO: 19440 - protein, 9 aa, Homo sapiens
  misc_feature: Table A; Target 19440; HLA-B*58:01; CTCFL; ENSG00000124092; CTA
KTFRTVTLL

SEQ ID NO: 19441 - protein, 10 aa, Homo sapiens
  misc_feature: Table A; Target 19441; HLA-A*03:01; CTCFL; ENSG00000124092; CTA
KTFRTVTLLR

SEQ ID NO: 19442 - protein, 10 aa, Homo sapiens
  misc_feature: Table A; Target 19442; HLA-A*31:01; CTCFL; ENSG00000124092; CTA
KTFRTVTLLR

SEQ ID NO: 19443 - protein, 10 aa, Homo sapiens
  misc_feature: Table A; Target 19443; HLA-B*57:01; CTCFL; ENSG00000124092; CTA
KTFRTVTLLR

SEQ ID NO: 19444 - protein, 9 aa, Homo sapiens
  misc_feature: Table A; Target 19444; HLA-A*32:01; CTCFL; ENSG00000124092; CTA
KTKGAKGTF

SEQ ID NO: 19445 - protein, 9 aa, Homo sapiens
  misc_feature: Table A; Target 19445; HLA-A*30:02; CTCFL; ENSG00000124092; CTA
KYASVEASK

SEQ ID NO: 19446 - protein, 9 aa, Homo sapiens
  misc_feature: Table A; Target 19446; HLA-C*06:02; CTCFL; ENSG00000124092; CTA
KYASVEASK

SEQ ID NO: 19447 - protein, 10 aa, Homo sapiens
  misc_feature: Table A; Target 19447; HLA-A*23:01; CTCFL; ENSG00000124092; CTA
KYASVEASKL

SEQ ID NO: 19448 - protein, 10 aa, Homo sapiens
  misc_feature: Table A; Target 19448; HLA-A*24:02; CTCFL; ENSG00000124092; CTA
KYASVEASKL

SEQ ID NO: 19449 - protein, 10 aa, Homo sapiens
  misc_feature: Table A; Target 19449; HLA-B*07:02; CTCFL; ENSG00000124092; CTA
KYASVEASKL

SEQ ID NO: 19450 - protein, 10 aa, Homo sapiens
  misc_feature: Table A; Target 19450; HLA-B*15:03; CTCFL; ENSG00000124092; CTA
KYASVEASKL

SEQ ID NO: 19451 - protein, 10 aa, Homo sapiens
  misc_feature: Table A; Target 19451; HLA-B*27:05; CTCFL; ENSG00000124092; CTA
KYASVEASKL

SEQ ID NO: 19452 - protein, 10 aa, Homo sapiens
  misc_feature: Table A; Target 19452; HLA-B*40:01; CTCFL; ENSG00000124092; CTA
KYASVEASKL

SEQ ID NO: 19453 - protein, 10 aa, Homo sapiens
  misc_feature: Table A; Target 19453; HLA-B*40:02; CTCFL; ENSG00000124092; CTA
KYASVEASKL

SEQ ID NO: 19454 - protein, 10 aa, Homo sapiens
  misc_feature: Table A; Target 19454; HLA-C*06:02; CTCFL; ENSG00000124092; CTA
KYASVEASKL

SEQ ID NO: 19455 - protein, 10 aa, Homo sapiens
  misc_feature: Table A; Target 19455; HLA-C*07:02; CTCFL; ENSG00000124092; CTA
KYASVEASKL

SEQ ID NO: 19456 - protein, 10 aa, Homo sapiens
  misc_feature: Table A; Target 19456; HLA-C*14:02; CTCFL; ENSG00000124092; CTA
KYASVEASKL

SEQ ID NO: 19457 - protein, 11 aa, Homo sapiens
  misc_feature: Table A; Target 19457; HLA-A*03:02; CTCFL; ENSG00000124092; CTA
KYASVEASKLK

SEQ ID NO: 19458 - protein, 11 aa, Homo sapiens
  misc_feature: Table A; Target 19458; HLA-A*31:01; CTCFL; ENSG00000124092; CTA
KYASVEASKLK

SEQ ID NO: 19459 - protein, 11 aa, Homo sapiens
  misc_feature: Table A; Target 19459; HLA-C*06:02; CTCFL; ENSG00000124092; CTA
KYASVEASKLK

SEQ ID NO: 19460 - protein, 11 aa, Homo sapiens
  misc_feature: Table A; Target 19460; HLA-C*07:01; CTCFL; ENSG00000124092; CTA
KYASVEASKLK

SEQ ID NO: 19461 - protein, 11 aa, Homo sapiens
  misc_feature: Table A; Target 19461; HLA-C*07:02; CTCFL; ENSG00000124092; CTA
KYASVEASKLK

SEQ ID NO: 19462 - protein, 9 aa, Homo sapiens
  misc_feature: Table A; Target 19462; HLA-A*23:01; CTCFL; ENSG00000124092; CTA
KYILTLQTV

SEQ ID NO: 19463 - protein, 9 aa, Homo sapiens
  misc_feature: Table A; Target 19463; HLA-A*24:02; CTCFL; ENSG00000124092; CTA
KYILTLQTV

SEQ ID NO: 19464 - protein, 9 aa, Homo sapiens
  misc_feature: Table A; Target 19464; HLA-C*14:02; CTCFL; ENSG00000124092; CTA
KYILTLQTV

SEQ ID NO: 19465 - protein, 11 aa, Homo sapiens
  misc_feature: Table A; Target 19465; HLA-A*23:01; CTCFL; ENSG00000124092; CTA
KYILTLQTVHF

SEQ ID NO: 19466 - protein, 11 aa, Homo sapiens
  misc_feature: Table A; Target 19466; HLA-A*24:02; CTCFL; ENSG00000124092; CTA
KYILTLQTVHF

SEQ ID NO: 19467 - protein, 8 aa, Homo sapiens
  misc_feature: Table A; Target 19467; HLA-C*05:01; CTCFL; ENSG00000124092; CTA
LAETTGLI

SEQ ID NO: 19468 - protein, 9 aa, Homo sapiens
  misc_feature: Table A; Target 19468; HLA-A*01:01; CTCFL; ENSG00000124092; CTA
LAETTGLIK

SEQ ID NO: 19469 - protein, 10 aa, Homo sapiens
  misc_feature: Table A; Target 19469; HLA-C*05:01; CTCFL; ENSG00000124092; CTA
LAETTGLIKL

SEQ ID NO: 19470 - protein, 10 aa, Homo sapiens
  misc_feature: Table A; Target 19470; HLA-B*55:01; CTCFL; ENSG00000124092; CTA
LAPSEESEKY

SEQ ID NO: 19471 - protein, 9 aa, Homo sapiens
  misc_feature: Table A; Target 19471; HLA-B*49:01; CTCFL; ENSG00000124092; CTA
LEAERTSGA

SEQ ID NO: 19472 - protein, 10 aa, Homo sapiens
  misc_feature: Table A; Target 19472; HLA-A*30:01; CTCFL; ENSG00000124092; CTA
LEAERTSGAF

SEQ ID NO: 19473 - protein, 10 aa, Homo sapiens
  misc_feature: Table A; Target 19473; HLA-B*18:01; CTCFL; ENSG00000124092; CTA
LEAERTSGAF

SEQ ID NO: 19474 - protein, 10 aa, Homo sapiens
  misc_feature: Table A; Target 19474; HLA-B*40:01; CTCFL; ENSG00000124092; CTA
LEAERTSGAF

SEQ ID NO: 19475 - protein, 10 aa, Homo sapiens
  misc_feature: Table A; Target 19475; HLA-B*44:02; CTCFL; ENSG00000124092; CTA
LEAERTSGAF

SEQ ID NO: 19476 - protein, 10 aa, Homo sapiens
  misc_feature: Table A; Target 19476; HLA-B*44:03; CTCFL; ENSG00000124092; CTA
LEAERTSGAF

SEQ ID NO: 19477 - protein, 10 aa, Homo sapiens
  misc_feature: Table A; Target 19477; HLA-A*30:01; CTCFL; ENSG00000124092; CTA
LEEEQEKNQL

SEQ ID NO: 19478 - protein, 10 aa, Homo sapiens
  misc_feature: Table A; Target 19478; HLA-B*40:01; CTCFL; ENSG00000124092; CTA
LEEEQEKNQL

SEQ ID NO: 19479 - protein, 11 aa, Homo sapiens
  misc_feature: Table A; Target 19479; HLA-A*30:01; CTCFL; ENSG00000124092; CTA
LEEEQEKNQLL

SEQ ID NO: 19480 - protein, 11 aa, Homo sapiens
  misc_feature: Table A; Target 19480; HLA-B*40:01; CTCFL; ENSG00000124092; CTA
LEEEQEKNQLL

SEQ ID NO: 19481 - protein, 8 aa, Homo sapiens
  misc_feature: Table A; Target 19481; HLA-B*49:01; CTCFL; ENSG00000124092; CTA
LEEEVELV

SEQ ID NO: 19482 - protein, 9 aa, Homo sapiens
  misc_feature: Table A; Target 19482; HLA-A*30:01; CTCFL; ENSG00000124092; CTA
LEEEVELVL

SEQ ID NO: 19483 - protein, 9 aa, Homo sapiens
  misc_feature: Table A; Target 19483; HLA-B*18:01; CTCFL; ENSG00000124092; CTA
LEEEVELVL

SEQ ID NO: 19484 - protein, 9 aa, Homo sapiens
  misc_feature: Table A; Target 19484; HLA-B*40:01; CTCFL; ENSG00000124092; CTA
LEEEVELVL

SEQ ID NO: 19485 - protein, 9 aa, Homo sapiens
  misc_feature: Table A; Target 19485; HLA-B*49:01; CTCFL; ENSG00000124092; CTA
LEEEVELVL

SEQ ID NO: 19486 - protein, 9 aa, Homo sapiens
  misc_feature: Table A; Target 19486; HLA-A*30:01; CTCFL; ENSG00000124092; CTA
LEEGPRQSL

SEQ ID NO: 19487 - protein, 9 aa, Homo sapiens
  misc_feature: Table A; Target 19487; HLA-B*07:02; CTCFL; ENSG00000124092; CTA
LEEGPRQSL

SEQ ID NO: 19488 - protein, 9 aa, Homo sapiens
  misc_feature: Table A; Target 19488; HLA-B*37:01; CTCFL; ENSG00000124092; CTA
LEEGPRQSL

SEQ ID NO: 19489 - protein, 9 aa, Homo sapiens
  misc_feature: Table A; Target 19489; HLA-B*40:02; CTCFL; ENSG00000124092; CTA
LEEGPRQSL

SEQ ID NO: 19490 - protein, 9 aa, Homo sapiens
  misc_feature: Table A; Target 19490; HLA-B*44:02; CTCFL; ENSG00000124092; CTA
LEEGPRQSL

SEQ ID NO: 19491 - protein, 9 aa, Homo sapiens
  misc_feature: Table A; Target 19491; HLA-B*44:03; CTCFL; ENSG00000124092; CTA
LEEGPRQSL

SEQ ID NO: 19492 - protein, 9 aa, Homo sapiens
  misc_feature: Table A; Target 19492; HLA-B*49:01; CTCFL; ENSG00000124092; CTA
LEEGPRQSL

SEQ ID NO: 19493 - protein, 9 aa, Homo sapiens
  misc_feature: Table A; Target 19493; HLA-C*03:04; CTCFL; ENSG00000124092; CTA
LEEGPRQSL

SEQ ID NO: 19494 - protein, 8 aa, Homo sapiens
  misc_feature: Table A; Target 19494; HLA-B*18:01; CTCFL; ENSG00000124092; CTA
LEENVMVA

SEQ ID NO: 19495 - protein, 8 aa, Homo sapiens
  misc_feature: Table A; Target 19495; HLA-B*49:01; CTCFL; ENSG00000124092; CTA
LEENVMVA

SEQ ID NO: 19496 - protein, 9 aa, Homo sapiens
  misc_feature: Table A; Target 19496; HLA-B*40:01; CTCFL; ENSG00000124092; CTA
LELMPEKGL

SEQ ID NO: 19497 - protein, 9 aa, Homo sapiens
  misc_feature: Table A; Target 19497; HLA-B*44:02; CTCFL; ENSG00000124092; CTA
LELMPEKGL

SEQ ID NO: 19498 - protein, 9 aa, Homo sapiens
  misc_feature: Table A; Target 19498; HLA-B*44:03; CTCFL; ENSG00000124092; CTA
LELMPEKGL

SEQ ID NO: 19499 - protein, 9 aa, Homo sapiens
  misc_feature: Table A; Target 19499; HLA-B*38:01; CTCFL; ENSG00000124092; CTA
LHAYSAAEL

SEQ ID NO: 19500 - protein, 9 aa, Homo sapiens
  misc_feature: Table A; Target 19500; HLA-B*39:01; CTCFL; ENSG00000124092; CTA
LHAYSAAEL

SEQ ID NO: 19501 - protein, 9 aa, Homo sapiens
  misc_feature: Table A; Target 19501; HLA-C*07:02; CTCFL; ENSG00000124092; CTA
LHAYSAAEL

SEQ ID NO: 19502 - protein, 9 aa, Homo sapiens
  misc_feature: Table A; Target 19502; HLA-C*07:04; CTCFL; ENSG00000124092; CTA
LHAYSAAEL

SEQ ID NO: 19503 - protein, 9 aa, Homo sapiens
  misc_feature: Table A; Target 19503; HLA-A*29:02; CTCFL; ENSG00000124092; CTA
LLNAHFRKY

SEQ ID NO: 19504 - protein, 9 aa, Homo sapiens
  misc_feature: Table A; Target 19504; HLA-B*13:02; CTCFL; ENSG00000124092; CTA
LQDMSLLSI

SEQ ID NO: 19505 - protein, 9 aa, Homo sapiens
  misc_feature: Table A; Target 19505; HLA-B*38:01; CTCFL; ENSG00000124092; CTA
LQDMSLLSI

SEQ ID NO: 19506 - protein, 9 aa, Homo sapiens
  misc_feature: Table A; Target 19506; HLA-B*13:02; CTCFL; ENSG00000124092; CTA
LQQCVAISI

SEQ ID NO: 19507 - protein, 9 aa, Homo sapiens
  misc_feature: Table A; Target 19507; HLA-C*07:04; CTCFL; ENSG00000124092; CTA
LQQCVAISI

SEQ ID NO: 19508 - protein, 9 aa, Homo sapiens
  misc_feature: Table A; Target 19508; HLA-B*58:01; CTCFL; ENSG00000124092; CTA
LSIQQQEGV

SEQ ID NO: 19509 - protein, 8 aa, Homo sapiens
  misc_feature: Table A; Target 19509; HLA-A*23:01; CTCFL; ENSG00000124092; CTA
LTLQTVHF

SEQ ID NO: 19510 - protein, 11 aa, Homo sapiens
  misc_feature: Table A; Target 19510; HLA-A*03:02; CTCFL; ENSG00000124092; CTA
LVLAPSEESEK

SEQ ID NO: 19511 - protein, 9 aa, Homo sapiens
  misc_feature: Table A; Target 19511; HLA-A*24:02; CTCFL; ENSG00000124092; CTA
LYSPQEMEV

SEQ ID NO: 19512 - protein, 9 aa, Homo sapiens
  misc_feature: Table A; Target 19512; HLA-C*04:01; CTCFL; ENSG00000124092; CTA
LYSPQEMEV

SEQ ID NO: 19513 - protein, 9 aa, Homo sapiens
  misc_feature: Table A; Target 19513; HLA-C*14:02; CTCFL; ENSG00000124092; CTA
LYSPQEMEV

SEQ ID NO: 19514 - protein, 9 aa, Homo sapiens
  misc_feature: Table A; Target 19514; HLA-C*16:02; CTCFL; ENSG00000124092; CTA
LYSPQEMEV

SEQ ID NO: 19515 - protein, 9 aa, Homo sapiens
  misc_feature: Table A; Target 19515; HLA-B*35:01; CTCFL; ENSG00000124092; CTA
MAATEISVL

SEQ ID NO: 19516 - protein, 9 aa, Homo sapiens
  misc_feature: Table A; Target 19516; HLA-B*35:03; CTCFL; ENSG00000124092; CTA
MAATEISVL

SEQ ID NO: 19517 - protein, 9 aa, Homo sapiens
  misc_feature: Table A; Target 19517; HLA-B*55:01; CTCFL; ENSG00000124092; CTA
MAATEISVL

SEQ ID NO: 19518 - protein, 9 aa, Homo sapiens
  misc_feature: Table A; Target 19518; HLA-C*02:02; CTCFL; ENSG00000124092; CTA
MAATEISVL

SEQ ID NO: 19519 - protein, 9 aa, Homo sapiens
  misc_feature: Table A; Target 19519; HLA-C*03:03; CTCFL; ENSG00000124092; CTA
MAATEISVL

SEQ ID NO: 19520 - protein, 9 aa, Homo sapiens
  misc_feature: Table A; Target 19520; HLA-C*03:04; CTCFL; ENSG00000124092; CTA
MAATEISVL

SEQ ID NO: 19521 - protein, 9 aa, Homo sapiens
  misc_feature: Table A; Target 19521; HLA-C*05:01; CTCFL; ENSG00000124092; CTA
MAATEISVL

SEQ ID NO: 19522 - protein, 9 aa, Homo sapiens
  misc_feature: Table A; Target 19522; HLA-C*07:06; CTCFL; ENSG00000124092; CTA
MAATEISVL

SEQ ID NO: 19523 - protein, 9 aa, Homo sapiens
  misc_feature: Table A; Target 19523; HLA-C*12:03; CTCFL; ENSG00000124092; CTA
MAATEISVL

SEQ ID NO: 19524 - protein, 9 aa, Homo sapiens
  misc_feature: Table A; Target 19524; HLA-B*07:02; CTCFL; ENSG00000124092; CTA
MAFVTSGEL

SEQ ID NO: 19525 - protein, 9 aa, Homo sapiens
  misc_feature: Table A; Target 19525; HLA-B*15:03; CTCFL; ENSG00000124092; CTA
MAFVTSGEL

SEQ ID NO: 19526 - protein, 9 aa, Homo sapiens
  misc_feature: Table A; Target 19526; HLA-B*27:05; CTCFL; ENSG00000124092; CTA
MAFVTSGEL

SEQ ID NO: 19527 - protein, 9 aa, Homo sapiens
  misc_feature: Table A; Target 19527; HLA-B*35:01; CTCFL; ENSG00000124092; CTA
MAFVTSGEL

SEQ ID NO: 19528 - protein, 9 aa, Homo sapiens
  misc_feature: Table A; Target 19528; HLA-B*35:03; CTCFL; ENSG00000124092; CTA
MAFVTSGEL

SEQ ID NO: 19529 - protein, 9 aa, Homo sapiens
  misc_feature: Table A; Target 19529; HLA-B*39:01; CTCFL; ENSG00000124092; CTA
MAFVTSGEL

SEQ ID NO: 19530 - protein, 9 aa, Homo sapiens
  misc_feature: Table A; Target 19530; HLA-B*40:01; CTCFL; ENSG00000124092; CTA
MAFVTSGEL

SEQ ID NO: 19531 - protein, 9 aa, Homo sapiens
  misc_feature: Table A; Target 19531; HLA-B*46:01; CTCFL; ENSG00000124092; CTA
MAFVTSGEL

SEQ ID NO: 19532 - protein, 9 aa, Homo sapiens
  misc_feature: Table A; Target 19532; HLA-B*51:01; CTCFL; ENSG00000124092; CTA
MAFVTSGEL

SEQ ID NO: 19533 - protein, 9 aa, Homo sapiens
  misc_feature: Table A; Target 19533; HLA-B*54:01; CTCFL; ENSG00000124092; CTA
MAFVTSGEL

SEQ ID NO: 19534 - protein, 9 aa, Homo sapiens
  misc_feature: Table A; Target 19534; HLA-B*55:01; CTCFL; ENSG00000124092; CTA
MAFVTSGEL

SEQ ID NO: 19535 - protein, 9 aa, Homo sapiens
  misc_feature: Table A; Target 19535; HLA-C*01:02; CTCFL; ENSG00000124092; CTA
MAFVTSGEL

SEQ ID NO: 19536 - protein, 9 aa, Homo sapiens
  misc_feature: Table A; Target 19536; HLA-C*02:02; CTCFL; ENSG00000124092; CTA
MAFVTSGEL

SEQ ID NO: 19537 - protein, 9 aa, Homo sapiens
  misc_feature: Table A; Target 19537; HLA-C*03:03; CTCFL; ENSG00000124092; CTA
MAFVTSGEL

SEQ ID NO: 19538 - protein, 9 aa, Homo sapiens
  misc_feature: Table A; Target 19538; HLA-C*03:04; CTCFL; ENSG00000124092; CTA
MAFVTSGEL

SEQ ID NO: 19539 - protein, 9 aa, Homo sapiens
  misc_feature: Table A; Target 19539; HLA-C*05:01; CTCFL; ENSG00000124092; CTA
MAFVTSGEL

SEQ ID NO: 19540 - protein, 9 aa, Homo sapiens
  misc_feature: Table A; Target 19540; HLA-C*07:02; CTCFL; ENSG00000124092; CTA
MAFVTSGEL

SEQ ID NO: 19541 - protein, 9 aa, Homo sapiens
  misc_feature: Table A; Target 19541; HLA-C*12:03; CTCFL; ENSG00000124092; CTA
MAFVTSGEL

SEQ ID NO: 19542 - protein, 9 aa, Homo sapiens
  misc_feature: Table A; Target 19542; HLA-C*14:02; CTCFL; ENSG00000124092; CTA
MAFVTSGEL

SEQ ID NO: 19543 - protein, 9 aa, Homo sapiens
  misc_feature: Table A; Target 19543; HLA-C*16:01; CTCFL; ENSG00000124092; CTA
MAFVTSGEL

SEQ ID NO: 19544 - protein, 9 aa, Homo sapiens
  misc_feature: Table A; Target 19544; HLA-C*16:02; CTCFL; ENSG00000124092; CTA
MAFVTSGEL

SEQ ID NO: 19545 - protein, 9 aa, Homo sapiens
  misc_feature: Table A; Target 19545; HLA-C*16:04; CTCFL; ENSG00000124092; CTA
MAFVTSGEL

SEQ ID NO: 19546 - protein, 10 aa, Homo sapiens
  misc_feature: Table A; Target 19546; HLA-B*51:01; CTCFL; ENSG00000124092; CTA
MAFVTSGELV

SEQ ID NO: 19547 - protein, 11 aa, Homo sapiens
  misc_feature: Table A; Target 19547; HLA-A*33:01; CTCFL; ENSG00000124092; CTA
MAFVTSGELVR

SEQ ID NO: 19548 - protein, 11 aa, Homo sapiens
  misc_feature: Table A; Target 19548; HLA-A*33:03; CTCFL; ENSG00000124092; CTA
MAFVTSGELVR

SEQ ID NO: 19549 - protein, 11 aa, Homo sapiens
  misc_feature: Table A; Target 19549; HLA-A*68:01; CTCFL; ENSG00000124092; CTA
MAFVTSGELVR

SEQ ID NO: 19550 - protein, 11 aa, Homo sapiens
  misc_feature: Table A; Target 19550; HLA-B*54:01; CTCFL; ENSG00000124092; CTA
MAFVTSGELVR

SEQ ID NO: 19551 - protein, 11 aa, Homo sapiens
  misc_feature: Table A; Target 19551; HLA-C*07:06; CTCFL; ENSG00000124092; CTA
MAFVTSGELVR

SEQ ID NO: 19552 - protein, 9 aa, Homo sapiens
  misc_feature: Table A; Target 19552; HLA-B*54:01; CTCFL; ENSG00000124092; CTA
MCKYASVEA

SEQ ID NO: 19553 - protein, 9 aa, Homo sapiens
  misc_feature: Table A; Target 19553; HLA-A*30:01; CTCFL; ENSG00000124092; CTA
MEVLQFHAL

SEQ ID NO: 19554 - protein, 9 aa, Homo sapiens
  misc_feature: Table A; Target 19554; HLA-B*18:01; CTCFL; ENSG00000124092; CTA
MEVLQFHAL

SEQ ID NO: 19555 - protein, 9 aa, Homo sapiens
  misc_feature: Table A; Target 19555; HLA-B*37:01; CTCFL; ENSG00000124092; CTA
MEVLQFHAL

SEQ ID NO: 19556 - protein, 9 aa, Homo sapiens
  misc_feature: Table A; Target 19556; HLA-B*40:01; CTCFL; ENSG00000124092; CTA
MEVLQFHAL

SEQ ID NO: 19557 - protein, 9 aa, Homo sapiens
  misc_feature: Table A; Target 19557; HLA-B*40:02; CTCFL; ENSG00000124092; CTA
MEVLQFHAL

SEQ ID NO: 19558 - protein, 9 aa, Homo sapiens
  misc_feature: Table A; Target 19558; HLA-B*44:02; CTCFL; ENSG00000124092; CTA
MEVLQFHAL

SEQ ID NO: 19559 - protein, 9 aa, Homo sapiens
  misc_feature: Table A; Target 19559; HLA-B*44:03; CTCFL; ENSG00000124092; CTA
MEVLQFHAL

SEQ ID NO: 19560 - protein, 9 aa, Homo sapiens
  misc_feature: Table A; Target 19560; HLA-B*49:01; CTCFL; ENSG00000124092; CTA
MEVLQFHAL

SEQ ID NO: 19561 - protein, 10 aa, Homo sapiens
  misc_feature: Table A; Target 19561; HLA-A*24:02; CTCFL; ENSG00000124092; CTA
MFTSSRMSSF

SEQ ID NO: 19562 - protein, 8 aa, Homo sapiens
  misc_feature: Table A; Target 19562; HLA-C*04:01; CTCFL; ENSG00000124092; CTA
MLLNTMDK

SEQ ID NO: 19563 - protein, 8 aa, Homo sapiens
  misc_feature: Table A; Target 19563; HLA-C*07:01; CTCFL; ENSG00000124092; CTA
MLLNTMDK

SEQ ID NO: 19564 - protein, 9 aa, Homo sapiens
  misc_feature: Table A; Target 19564; HLA-B*27:05; CTCFL; ENSG00000124092; CTA
MVASEDSKL

SEQ ID NO: 19565 - protein, 9 aa, Homo sapiens
  misc_feature: Table A; Target 19565; HLA-B*35:03; CTCFL; ENSG00000124092; CTA
MVASEDSKL

SEQ ID NO: 19566 - protein, 9 aa, Homo sapiens
  misc_feature: Table A; Target 19566; HLA-B*38:01; CTCFL; ENSG00000124092; CTA
MVASEDSKL

SEQ ID NO: 19567 - protein, 9 aa, Homo sapiens
  misc_feature: Table A; Target 19567; HLA-B*55:01; CTCFL; ENSG00000124092; CTA
MVASEDSKL

SEQ ID NO: 19568 - protein, 9 aa, Homo sapiens
  misc_feature: Table A; Target 19568; HLA-B*58:01; CTCFL; ENSG00000124092; CTA
MVASEDSKL

SEQ ID NO: 19569 - protein, 9 aa, Homo sapiens
  misc_feature: Table A; Target 19569; HLA-C*05:01; CTCFL; ENSG00000124092; CTA
MVASEDSKL

SEQ ID NO: 19570 - protein, 11 aa, Homo sapiens
  misc_feature: Table A; Target 19570; HLA-A*26:01; CTCFL; ENSG00000124092; CTA
MVASEDSKLAV

SEQ ID NO: 19571 - protein, 11 aa, Homo sapiens
  misc_feature: Table A; Target 19571; HLA-A*68:02; CTCFL; ENSG00000124092; CTA
MVASEDSKLAV

SEQ ID NO: 19572 - protein, 11 aa, Homo sapiens
  misc_feature: Table A; Target 19572; HLA-A*03:02; CTCFL; ENSG00000124092; CTA
NLHAYSAAELK

SEQ ID NO: 19573 - protein, 9 aa, Homo sapiens
  misc_feature: Table A; Target 19573; HLA-A*30:02; CTCFL; ENSG00000124092; CTA
NTHTGTRPY

SEQ ID NO: 19574 - protein, 9 aa, Homo sapiens
  misc_feature: Table A; Target 19574; HLA-C*16:01; CTCFL; ENSG00000124092; CTA
NTHTGTRPY

SEQ ID NO: 19575 - protein, 11 aa, Homo sapiens
  misc_feature: Table A; Target 19575; HLA-B*27:05; CTCFL; ENSG00000124092; CTA
NVMVASEDSKL

SEQ ID NO: 19576 - protein, 10 aa, Homo sapiens
  misc_feature: Table A; Target 19576; HLA-A*68:01; CTCFL; ENSG00000124092; CTA
PTAGQADAEK

SEQ ID NO: 19577 - protein, 10 aa, Homo sapiens
  misc_feature: Table A; Target 19577; HLA-B*27:02; CTCFL; ENSG00000124092; CTA
PTAGQADAEK

SEQ ID NO: 19578 - protein, 10 aa, Homo sapiens
  misc_feature: Table A; Target 19578; HLA-A*01:01; CTCFL; ENSG00000124092; CTA
QCSYASRDTY

SEQ ID NO: 19579 - protein, 10 aa, Homo sapiens
  misc_feature: Table A; Target 19579; HLA-A*30:02; CTCFL; ENSG00000124092; CTA
QCSYASRDTY

SEQ ID NO: 19580 - protein, 8 aa, Homo sapiens
  misc_feature: Table A; Target 19580; HLA-A*30:01; CTCFL; ENSG00000124092; CTA
QEGVQVVV

SEQ ID NO: 19581 - protein, 8 aa, Homo sapiens
  misc_feature: Table A; Target 19581; HLA-B*40:01; CTCFL; ENSG00000124092; CTA
QEGVQVVV

SEQ ID NO: 19582 - protein, 8 aa, Homo sapiens
  misc_feature: Table A; Target 19582; HLA-B*49:01; CTCFL; ENSG00000124092; CTA
QEGVQVVV

SEQ ID NO: 19583 - protein, 10 aa, Homo sapiens
  misc_feature: Table A; Target 19583; HLA-A*33:03; CTCFL; ENSG00000124092; CTA
QEKNQLLAER

SEQ ID NO: 19584 - protein, 9 aa, Homo sapiens
  misc_feature: Table A; Target 19584; HLA-A*30:01; CTCFL; ENSG00000124092; CTA
QELYSPQEM

SEQ ID NO: 19585 - protein, 9 aa, Homo sapiens
  misc_feature: Table A; Target 19585; HLA-B*18:01; CTCFL; ENSG00000124092; CTA
QELYSPQEM

SEQ ID NO: 19586 - protein, 9 aa, Homo sapiens
  misc_feature: Table A; Target 19586; HLA-B*37:01; CTCFL; ENSG00000124092; CTA
QELYSPQEM

SEQ ID NO: 19587 - protein, 9 aa, Homo sapiens
  misc_feature: Table A; Target 19587; HLA-B*40:01; CTCFL; ENSG00000124092; CTA
QELYSPQEM

SEQ ID NO: 19588 - protein, 9 aa, Homo sapiens
  misc_feature: Table A; Target 19588; HLA-B*44:02; CTCFL; ENSG00000124092; CTA
QELYSPQEM

SEQ ID NO: 19589 - protein, 9 aa, Homo sapiens
  misc_feature: Table A; Target 19589; HLA-B*44:03; CTCFL; ENSG00000124092; CTA
QELYSPQEM

SEQ ID NO: 19590 - protein, 9 aa, Homo sapiens
  misc_feature: Table A; Target 19590; HLA-B*49:01; CTCFL; ENSG00000124092; CTA
QELYSPQEM

SEQ ID NO: 19591 - protein, 8 aa, Homo sapiens
  misc_feature: Table A; Target 19591; HLA-A*30:01; CTCFL; ENSG00000124092; CTA
QEMEVLQF

SEQ ID NO: 19592 - protein, 8 aa, Homo sapiens
  misc_feature: Table A; Target 19592; HLA-B*18:01; CTCFL; ENSG00000124092; CTA
QEMEVLQF

SEQ ID NO: 19593 - protein, 8 aa, Homo sapiens
  misc_feature: Table A; Target 19593; HLA-B*37:01; CTCFL; ENSG00000124092; CTA
QEMEVLQF

SEQ ID NO: 19594 - protein, 8 aa, Homo sapiens
  misc_feature: Table A; Target 19594; HLA-B*44:02; CTCFL; ENSG00000124092; CTA
QEMEVLQF

SEQ ID NO: 19595 - protein, 8 aa, Homo sapiens
  misc_feature: Table A; Target 19595; HLA-B*44:03; CTCFL; ENSG00000124092; CTA
QEMEVLQF

SEQ ID NO: 19596 - protein, 8 aa, Homo sapiens
  misc_feature: Table A; Target 19596; HLA-B*49:01; CTCFL; ENSG00000124092; CTA
QEMEVLQF

SEQ ID NO: 19597 - protein, 9 aa, Homo sapiens
  misc_feature: Table A; Target 19597; HLA-B*44:02; CTCFL; ENSG00000124092; CTA
QEMEVLQFH

SEQ ID NO: 19598 - protein, 9 aa, Homo sapiens
  misc_feature: Table A; Target 19598; HLA-B*44:03; CTCFL; ENSG00000124092; CTA
QEMEVLQFH

SEQ ID NO: 19599 - protein, 11 aa, Homo sapiens
  misc_feature: Table A; Target 19599; HLA-A*30:01; CTCFL; ENSG00000124092; CTA
QEMEVLQFHAL

SEQ ID NO: 19600 - protein, 11 aa, Homo sapiens
  misc_feature: Table A; Target 19600; HLA-B*40:01; CTCFL; ENSG00000124092; CTA
QEMEVLQFHAL

SEQ ID NO: 19601 - protein, 11 aa, Homo sapiens
  misc_feature: Table A; Target 19601; HLA-B*44:02; CTCFL; ENSG00000124092; CTA
QEMEVLQFHAL

SEQ ID NO: 19602 - protein, 11 aa, Homo sapiens
  misc_feature: Table A; Target 19602; HLA-B*44:03; CTCFL; ENSG00000124092; CTA
QEMEVLQFHAL

SEQ ID NO: 19603 - protein, 11 aa, Homo sapiens
  misc_feature: Table A; Target 19603; HLA-B*49:01; CTCFL; ENSG00000124092; CTA
QEMEVLQFHAL

SEQ ID NO: 19604 - protein, 9 aa, Homo sapiens
  misc_feature: Table A; Target 19604; HLA-B*49:01; CTCFL; ENSG00000124092; CTA
QERHMTAHI

SEQ ID NO: 19605 - protein, 9 aa, Homo sapiens
  misc_feature: Table A; Target 19605; HLA-B*56:01; CTCFL; ENSG00000124092; CTA
QPTAGQADA

SEQ ID NO: 19606 - protein, 8 aa, Homo sapiens
  misc_feature: Table A; Target 19606; HLA-B*13:02; CTCFL; ENSG00000124092; CTA
QQCVAISI

SEQ ID NO: 19607 - protein, 9 aa, Homo sapiens
  misc_feature: Table A; Target 19607; HLA-A*30:01; CTCFL; ENSG00000124092; CTA
QQEGVQVVV

SEQ ID NO: 19608 - protein, 9 aa, Homo sapiens
  misc_feature: Table A; Target 19608; HLA-B*13:02; CTCFL; ENSG00000124092; CTA
QQEGVQVVV

SEQ ID NO: 19609 - protein, 9 aa, Homo sapiens
  misc_feature: Table A; Target 19609; HLA-B*27:05; CTCFL; ENSG00000124092; CTA
QQEGVQVVV

SEQ ID NO: 19610 - protein, 9 aa, Homo sapiens
  misc_feature: Table A; Target 19610; HLA-B*38:01; CTCFL; ENSG00000124092; CTA
QQEGVQVVV

SEQ ID NO: 19611 - protein, 9 aa, Homo sapiens
  misc_feature: Table A; Target 19611; HLA-B*39:01; CTCFL; ENSG00000124092; CTA
QQEGVQVVV

SEQ ID NO: 19612 - protein, 9 aa, Homo sapiens
  misc_feature: Table A; Target 19612; HLA-C*05:01; CTCFL; ENSG00000124092; CTA
QQEGVQVVV

SEQ ID NO: 19613 - protein, 9 aa, Homo sapiens
  misc_feature: Table A; Target 19613; HLA-C*07:04; CTCFL; ENSG00000124092; CTA
QQEGVQVVV

SEQ ID NO: 19614 - protein, 10 aa, Homo sapiens
  misc_feature: Table A; Target 19614; HLA-B*38:01; CTCFL; ENSG00000124092; CTA
QQELYSPQEM

SEQ ID NO: 19615 - protein, 10 aa, Homo sapiens
  misc_feature: Table A; Target 19615; HLA-B*39:01; CTCFL; ENSG00000124092; CTA
QQELYSPQEM

SEQ ID NO: 19616 - protein, 8 aa, Homo sapiens
  misc_feature: Table A; Target 19616; HLA-B*13:02; CTCFL; ENSG00000124092; CTA
QQQEGVQV

SEQ ID NO: 19617 - protein, 9 aa, Homo sapiens
  misc_feature: Table A; Target 19617; HLA-A*02:01; CTCFL; ENSG00000124092; CTA
QQQEGVQVV

SEQ ID NO: 19618 - protein, 9 aa, Homo sapiens
  misc_feature: Table A; Target 19618; HLA-A*02:03; CTCFL; ENSG00000124092; CTA
QQQEGVQVV

SEQ ID NO: 19619 - protein, 9 aa, Homo sapiens
  misc_feature: Table A; Target 19619; HLA-B*13:02; CTCFL; ENSG00000124092; CTA
QQQEGVQVV

SEQ ID NO: 19620 - protein, 9 aa, Homo sapiens
  misc_feature: Table A; Target 19620; HLA-B*15:01; CTCFL; ENSG00000124092; CTA
QQQEGVQVV

SEQ ID NO: 19621 - protein, 9 aa, Homo sapiens
  misc_feature: Table A; Target 19621; HLA-B*27:05; CTCFL; ENSG00000124092; CTA
QQQEGVQVV

SEQ ID NO: 19622 - protein, 9 aa, Homo sapiens
  misc_feature: Table A; Target 19622; HLA-B*38:01; CTCFL; ENSG00000124092; CTA
QQQEGVQVV

SEQ ID NO: 19623 - protein, 9 aa, Homo sapiens
  misc_feature: Table A; Target 19623; HLA-B*39:01; CTCFL; ENSG00000124092; CTA
QQQEGVQVV

SEQ ID NO: 19624 - protein, 9 aa, Homo sapiens
  misc_feature: Table A; Target 19624; HLA-C*16:02; CTCFL; ENSG00000124092; CTA
QQQEGVQVV

SEQ ID NO: 19625 - protein, 10 aa, Homo sapiens
  misc_feature: Table A; Target 19625; HLA-A*30:01; CTCFL; ENSG00000124092; CTA
QQQEGVQVVV

SEQ ID NO: 19626 - protein, 10 aa, Homo sapiens
  misc_feature: Table A; Target 19626; HLA-B*13:02; CTCFL; ENSG00000124092; CTA
QQQEGVQVVV

SEQ ID NO: 19627 - protein, 10 aa, Homo sapiens
  misc_feature: Table A; Target 19627; HLA-B*38:01; CTCFL; ENSG00000124092; CTA
QQQEGVQVVV

SEQ ID NO: 19628 - protein, 10 aa, Homo sapiens
  misc_feature: Table A; Target 19628; HLA-B*39:01; CTCFL; ENSG00000124092; CTA
QQQEGVQVVV

SEQ ID NO: 19629 - protein, 9 aa, Homo sapiens
  misc_feature: Table A; Target 19629; HLA-A*03:02; CTCFL; ENSG00000124092; CTA
QTILKEATK

SEQ ID NO: 19630 - protein, 9 aa, Homo sapiens
  misc_feature: Table A; Target 19630; HLA-A*11:01; CTCFL; ENSG00000124092; CTA
QTILKEATK

SEQ ID NO: 19631 - protein, 9 aa, Homo sapiens
  misc_feature: Table A; Target 19631; HLA-A*33:03; CTCFL; ENSG00000124092; CTA
QTILKEATK

SEQ ID NO: 19632 - protein, 9 aa, Homo sapiens
  misc_feature: Table A; Target 19632; HLA-A*68:01; CTCFL; ENSG00000124092; CTA
QTILKEATK

SEQ ID NO: 19633 - protein, 9 aa, Homo sapiens
  misc_feature: Table A; Target 19633; HLA-C*07:06; CTCFL; ENSG00000124092; CTA
QTILKEATK

SEQ ID NO: 19634 - protein, 10 aa, Homo sapiens
  misc_feature: Table A; Target 19634; HLA-A*68:02; CTCFL; ENSG00000124092; CTA
QTVHFTSEAV

SEQ ID NO: 19635 - protein, 11 aa, Homo sapiens
  misc_feature: Table A; Target 19635; HLA-A*31:01; CTCFL; ENSG00000124092; CTA
RQKQLLNAHFR

SEQ ID NO: 19636 - protein, 9 aa, Homo sapiens
  misc_feature: Table A; Target 19636; HLA-A*01:01; CTCFL; ENSG00000124092; CTA
RSDEIVLTV

SEQ ID NO: 19637 - protein, 9 aa, Homo sapiens
  misc_feature: Table A; Target 19637; HLA-A*02:07; CTCFL; ENSG00000124092; CTA
RSDEIVLTV

SEQ ID NO: 19638 - protein, 9 aa, Homo sapiens
  misc_feature: Table A; Target 19638; HLA-B*13:02; CTCFL; ENSG00000124092; CTA
RSDEIVLTV

SEQ ID NO: 19639 - protein, 9 aa, Homo sapiens
  misc_feature: Table A; Target 19639; HLA-C*05:01; CTCFL; ENSG00000124092; CTA
RSDEIVLTV

SEQ ID NO: 19640 - protein, 9 aa, Homo sapiens
  misc_feature: Table A; Target 19640; HLA-B*57:01; CTCFL; ENSG00000124092; CTA
RSHTGERPF

SEQ ID NO: 19641 - protein, 9 aa, Homo sapiens
  misc_feature: Table A; Target 19641; HLA-C*16:01; CTCFL; ENSG00000124092; CTA
RSHTGERPF

SEQ ID NO: 19642 - protein, 10 aa, Homo sapiens
  misc_feature: Table A; Target 19642; HLA-B*58:01; CTCFL; ENSG00000124092; CTA
RVKEEVDEGV

SEQ ID NO: 19643 - protein, 9 aa, Homo sapiens
  misc_feature: Table A; Target 19643; HLA-A*24:02; CTCFL; ENSG00000124092; CTA
RYALIQHQK

SEQ ID NO: 19644 - protein, 9 aa, Homo sapiens
  misc_feature: Table A; Target 19644; HLA-A*31:01; CTCFL; ENSG00000124092; CTA
RYALIQHQK

SEQ ID NO: 19645 - protein, 10 aa, Homo sapiens
  misc_feature: Table A; Target 19645; HLA-A*31:01; CTCFL; ENSG00000124092; CTA
RYCSAVFHER

SEQ ID NO: 19646 - protein, 9 aa, Homo sapiens
  misc_feature: Table A; Target 19646; HLA-A*26:01; CTCFL; ENSG00000124092; CTA
SAAELKCRY

SEQ ID NO: 19647 - protein, 9 aa, Homo sapiens
  misc_feature: Table A; Target 19647; HLA-A*29:02; CTCFL; ENSG00000124092; CTA
SAAELKCRY

SEQ ID NO: 19648 - protein, 9 aa, Homo sapiens
  misc_feature: Table A; Target 19648; HLA-A*30:02; CTCFL; ENSG00000124092; CTA
SAAELKCRY

SEQ ID NO: 19649 - protein, 9 aa, Homo sapiens
  misc_feature: Table A; Target 19649; HLA-A*32:01; CTCFL; ENSG00000124092; CTA
SAAELKCRY

SEQ ID NO: 19650 - protein, 9 aa, Homo sapiens
  misc_feature: Table A; Target 19650; HLA-B*35:01; CTCFL; ENSG00000124092; CTA
SAAELKCRY

SEQ ID NO: 19651 - protein, 9 aa, Homo sapiens
  misc_feature: Table A; Target 19651; HLA-B*58:01; CTCFL; ENSG00000124092; CTA
SAAELKCRY

SEQ ID NO: 19652 - protein, 9 aa, Homo sapiens
  misc_feature: Table A; Target 19652; HLA-C*02:02; CTCFL; ENSG00000124092; CTA
SAAELKCRY

SEQ ID NO: 19653 - protein, 9 aa, Homo sapiens
  misc_feature: Table A; Target 19653; HLA-C*12:03; CTCFL; ENSG00000124092; CTA
SAAELKCRY

SEQ ID NO: 19654 - protein, 9 aa, Homo sapiens
  misc_feature: Table A; Target 19654; HLA-C*16:01; CTCFL; ENSG00000124092; CTA
SAAELKCRY

SEQ ID NO: 19655 - protein, 9 aa, Homo sapiens
  misc_feature: Table A; Target 19655; HLA-C*16:02; CTCFL; ENSG00000124092; CTA
SAAELKCRY

SEQ ID NO: 19656 - protein, 8 aa, Homo sapiens
  misc_feature: Table A; Target 19656; HLA-B*08:01; CTCFL; ENSG00000124092; CTA
SAVFHERY

SEQ ID NO: 19657 - protein, 8 aa, Homo sapiens
  misc_feature: Table A; Target 19657; HLA-C*02:02; CTCFL; ENSG00000124092; CTA
SAVFHERY

SEQ ID NO: 19658 - protein, 8 aa, Homo sapiens
  misc_feature: Table A; Target 19658; HLA-C*07:01; CTCFL; ENSG00000124092; CTA
SAVFHERY

SEQ ID NO: 19659 - protein, 8 aa, Homo sapiens
  misc_feature: Table A; Target 19659; HLA-C*12:03; CTCFL; ENSG00000124092; CTA
SAVFHERY

SEQ ID NO: 19660 - protein, 8 aa, Homo sapiens
  misc_feature: Table A; Target 19660; HLA-C*16:01; CTCFL; ENSG00000124092; CTA
SAVFHERY

SEQ ID NO: 19661 - protein, 8 aa, Homo sapiens
  misc_feature: Table A; Target 19661; HLA-B*37:01; CTCFL; ENSG00000124092; CTA
SDEIVLTV

SEQ ID NO: 19662 - protein, 8 aa, Homo sapiens
  misc_feature: Table A; Target 19662; HLA-B*49:01; CTCFL; ENSG00000124092; CTA
SDEIVLTV

SEQ ID NO: 19663 - protein, 9 aa, Homo sapiens
  misc_feature: Table A; Target 19663; HLA-A*30:01; CTCFL; ENSG00000124092; CTA
SEAVELQDM

SEQ ID NO: 19664 - protein, 9 aa, Homo sapiens
  misc_feature: Table A; Target 19664; HLA-B*37:01; CTCFL; ENSG00000124092; CTA
SEAVELQDM

SEQ ID NO: 19665 - protein, 9 aa, Homo sapiens
  misc_feature: Table A; Target 19665; HLA-B*40:01; CTCFL; ENSG00000124092; CTA
SEAVELQDM

SEQ ID NO: 19666 - protein, 9 aa, Homo sapiens
  misc_feature: Table A; Target 19666; HLA-B*44:02; CTCFL; ENSG00000124092; CTA
SEAVELQDM

SEQ ID NO: 19667 - protein, 9 aa, Homo sapiens
  misc_feature: Table A; Target 19667; HLA-B*44:03; CTCFL; ENSG00000124092; CTA
SEAVELQDM

SEQ ID NO: 19668 - protein, 9 aa, Homo sapiens
  misc_feature: Table A; Target 19668; HLA-B*49:01; CTCFL; ENSG00000124092; CTA
SEAVELQDM

SEQ ID NO: 19669 - protein, 11 aa, Homo sapiens
  misc_feature: Table A; Target 19669; HLA-A*30:01; CTCFL; ENSG00000124092; CTA
SEAVELQDMSL

SEQ ID NO: 19670 - protein, 11 aa, Homo sapiens
  misc_feature: Table A; Target 19670; HLA-B*40:01; CTCFL; ENSG00000124092; CTA
SEAVELQDMSL

SEQ ID NO: 19671 - protein, 8 aa, Homo sapiens
  misc_feature: Table A; Target 19671; HLA-B*37:01; CTCFL; ENSG00000124092; CTA
SEDSKLAV

SEQ ID NO: 19672 - protein, 8 aa, Homo sapiens
  misc_feature: Table A; Target 19672; HLA-B*49:01; CTCFL; ENSG00000124092; CTA
SEDSKLAV

SEQ ID NO: 19673 - protein, 10 aa, Homo sapiens
  misc_feature: Table A; Target 19673; HLA-A*30:01; CTCFL; ENSG00000124092; CTA
SEDSKLAVSL

SEQ ID NO: 19674 - protein, 10 aa, Homo sapiens
  misc_feature: Table A; Target 19674; HLA-B*37:01; CTCFL; ENSG00000124092; CTA
SEDSKLAVSL

SEQ ID NO: 19675 - protein, 10 aa, Homo sapiens
  misc_feature: Table A; Target 19675; HLA-B*38:01; CTCFL; ENSG00000124092; CTA
SEDSKLAVSL

SEQ ID NO: 19676 - protein, 10 aa, Homo sapiens
  misc_feature: Table A; Target 19676; HLA-B*40:02; CTCFL; ENSG00000124092; CTA
SEDSKLAVSL

SEQ ID NO: 19677 - protein, 10 aa, Homo sapiens
  misc_feature: Table A; Target 19677; HLA-B*44:02; CTCFL; ENSG00000124092; CTA
SEDSKLAVSL

SEQ ID NO: 19678 - protein, 10 aa, Homo sapiens
  misc_feature: Table A; Target 19678; HLA-B*44:03; CTCFL; ENSG00000124092; CTA
SEDSKLAVSL

SEQ ID NO: 19679 - protein, 10 aa, Homo sapiens
  misc_feature: Table A; Target 19679; HLA-B*49:01; CTCFL; ENSG00000124092; CTA
SEDSKLAVSL

SEQ ID NO: 19680 - protein, 9 aa, Homo sapiens
  misc_feature: Table A; Target 19680; HLA-A*30:01; CTCFL; ENSG00000124092; CTA
SEESEKYIL

SEQ ID NO: 19681 - protein, 9 aa, Homo sapiens
  misc_feature: Table A; Target 19681; HLA-B*37:01; CTCFL; ENSG00000124092; CTA
SEESEKYIL

SEQ ID NO: 19682 - protein, 9 aa, Homo sapiens
  misc_feature: Table A; Target 19682; HLA-B*38:01; CTCFL; ENSG00000124092; CTA
SEESEKYIL

SEQ ID NO: 19683 - protein, 9 aa, Homo sapiens
  misc_feature: Table A; Target 19683; HLA-B*40:02; CTCFL; ENSG00000124092; CTA
SEESEKYIL

SEQ ID NO: 19684 - protein, 9 aa, Homo sapiens
  misc_feature: Table A; Target 19684; HLA-B*44:02; CTCFL; ENSG00000124092; CTA
SEESEKYIL

SEQ ID NO: 19685 - protein, 9 aa, Homo sapiens
  misc_feature: Table A; Target 19685; HLA-B*44:03; CTCFL; ENSG00000124092; CTA
SEESEKYIL

SEQ ID NO: 19686 - protein, 9 aa, Homo sapiens
  misc_feature: Table A; Target 19686; HLA-B*49:01; CTCFL; ENSG00000124092; CTA
SEESEKYIL

SEQ ID NO: 19687 - protein, 11 aa, Homo sapiens
  misc_feature: Table A; Target 19687; HLA-A*30:01; CTCFL; ENSG00000124092; CTA
SEESEKYILTL

SEQ ID NO: 19688 - protein, 11 aa, Homo sapiens
  misc_feature: Table A; Target 19688; HLA-B*40:01; CTCFL; ENSG00000124092; CTA
SEESEKYILTL

SEQ ID NO: 19689 - protein, 9 aa, Homo sapiens
  misc_feature: Table A; Target 19689; HLA-B*37:01; CTCFL; ENSG00000124092; CTA
SEKPHLCHL

SEQ ID NO: 19690 - protein, 9 aa, Homo sapiens
  misc_feature: Table A; Target 19690; HLA-B*40:02; CTCFL; ENSG00000124092; CTA
SEKPHLCHL

SEQ ID NO: 19691 - protein, 8 aa, Homo sapiens
  misc_feature: Table A; Target 19691; HLA-A*30:01; CTCFL; ENSG00000124092; CTA
SEKYILTL

SEQ ID NO: 19692 - protein, 8 aa, Homo sapiens
  misc_feature: Table A; Target 19692; HLA-B*18:01; CTCFL; ENSG00000124092; CTA
SEKYILTL

SEQ ID NO: 19693 - protein, 8 aa, Homo sapiens
  misc_feature: Table A; Target 19693; HLA-B*37:01; CTCFL; ENSG00000124092; CTA
SEKYILTL

SEQ ID NO: 19694 - protein, 8 aa, Homo sapiens
  misc_feature: Table A; Target 19694; HLA-B*40:02; CTCFL; ENSG00000124092; CTA
SEKYILTL

SEQ ID NO: 19695 - protein, 11 aa, Homo sapiens
  misc_feature: Table A; Target 19695; HLA-B*37:01; CTCFL; ENSG00000124092; CTA
SELEAERTSGA

SEQ ID NO: 19696 - protein, 10 aa, Homo sapiens
  misc_feature: Table A; Target 19696; HLA-B*44:02; CTCFL; ENSG00000124092; CTA
SEQFTKIKEL

SEQ ID NO: 19697 - protein, 10 aa, Homo sapiens
  misc_feature: Table A; Target 19697; HLA-B*44:03; CTCFL; ENSG00000124092; CTA
SEQFTKIKEL

SEQ ID NO: 19698 - protein, 9 aa, Homo sapiens
  misc_feature: Table A; Target 19698; HLA-B*35:03; CTCFL; ENSG00000124092; CTA
SGAFQDSVL

SEQ ID NO: 19699 - protein, 9 aa, Homo sapiens
  misc_feature: Table A; Target 19699; HLA-C*05:01; CTCFL; ENSG00000124092; CTA
SGDERSDEI

SEQ ID NO: 19700 - protein, 9 aa, Homo sapiens
  misc_feature: Table A; Target 19700; HLA-C*12:03; CTCFL; ENSG00000124092; CTA
SGTMKIHIL

SEQ ID NO: 19701 - protein, 9 aa, Homo sapiens
  misc_feature: Table A; Target 19701; HLA-C*16:01; CTCFL; ENSG00000124092; CTA
SGTMKIHIL

SEQ ID NO: 19702 - protein, 9 aa, Homo sapiens
  misc_feature: Table A; Target 19702; HLA-C*16:02; CTCFL; ENSG00000124092; CTA
SGTMKIHIL

SEQ ID NO: 19703 - protein, 8 aa, Homo sapiens
  misc_feature: Table A; Target 19703; HLA-A*02:03; CTCFL; ENSG00000124092; CTA
SLAETTGL

SEQ ID NO: 19704 - protein, 9 aa, Homo sapiens
  misc_feature: Table A; Target 19704; HLA-A*02:01; CTCFL; ENSG00000124092; CTA
SLAETTGLI

SEQ ID NO: 19705 - protein, 9 aa, Homo sapiens
  misc_feature: Table A; Target 19705; HLA-A*02:03; CTCFL; ENSG00000124092; CTA
SLAETTGLI

SEQ ID NO: 19706 - protein, 9 aa, Homo sapiens
  misc_feature: Table A; Target 19706; HLA-B*13:02; CTCFL; ENSG00000124092; CTA
SLAETTGLI

SEQ ID NO: 19707 - protein, 10 aa, Homo sapiens
  misc_feature: Table A; Target 19707; HLA-A*03:01; CTCFL; ENSG00000124092; CTA
SLAETTGLIK

SEQ ID NO: 19708 - protein, 10 aa, Homo sapiens
  misc_feature: Table A; Target 19708; HLA-A*03:02; CTCFL; ENSG00000124092; CTA
SLAETTGLIK

SEQ ID NO: 19709 - protein, 10 aa, Homo sapiens
  misc_feature: Table A; Target 19709; HLA-A*11:01; CTCFL; ENSG00000124092; CTA
SLAETTGLIK

SEQ ID NO: 19710 - protein, 10 aa, Homo sapiens
  misc_feature: Table A; Target 19710; HLA-A*68:01; CTCFL; ENSG00000124092; CTA
SLAETTGLIK

SEQ ID NO: 19711 - protein, 10 aa, Homo sapiens
  misc_feature: Table A; Target 19711; HLA-B*27:02; CTCFL; ENSG00000124092; CTA
SLAETTGLIK

SEQ ID NO: 19712 - protein, 11 aa, Homo sapiens
  misc_feature: Table A; Target 19712; HLA-A*02:01; CTCFL; ENSG00000124092; CTA
SLAETTGLIKL

SEQ ID NO: 19713 - protein, 11 aa, Homo sapiens
  misc_feature: Table A; Target 19713; HLA-A*02:03; CTCFL; ENSG00000124092; CTA
SLAETTGLIKL

SEQ ID NO: 19714 - protein, 11 aa, Homo sapiens
  misc_feature: Table A; Target 19714; HLA-A*02:04; CTCFL; ENSG00000124092; CTA
SLAETTGLIKL

SEQ ID NO: 19715 - protein, 11 aa, Homo sapiens
  misc_feature: Table A; Target 19715; HLA-A*02:07; CTCFL; ENSG00000124092; CTA
SLAETTGLIKL

SEQ ID NO: 19716 - protein, 11 aa, Homo sapiens
  misc_feature: Table A; Target 19716; HLA-A*03:01; CTCFL; ENSG00000124092; CTA
SLAETTGLIKL

SEQ ID NO: 19717 - protein, 11 aa, Homo sapiens
  misc_feature: Table A; Target 19717; HLA-A*03:02; CTCFL; ENSG00000124092; CTA
SLAETTGLIKL

SEQ ID NO: 19718 - protein, 11 aa, Homo sapiens
  misc_feature: Table A; Target 19718; HLA-B*55:01; CTCFL; ENSG00000124092; CTA
SLAETTGLIKL

SEQ ID NO: 19719 - protein, 11 aa, Homo sapiens
  misc_feature: Table A; Target 19719; HLA-A*02:01; CTCFL; ENSG00000124092; CTA
SLLSIQQQEGV

SEQ ID NO: 19720 - protein, 11 aa, Homo sapiens
  misc_feature: Table A; Target 19720; HLA-A*02:04; CTCFL; ENSG00000124092; CTA
SLLSIQQQEGV

SEQ ID NO: 19721 - protein, 11 aa, Homo sapiens
  misc_feature: Table A; Target 19721; HLA-A*02:07; CTCFL; ENSG00000124092; CTA
SLLSIQQQEGV

SEQ ID NO: 19722 - protein, 8 aa, Homo sapiens
  misc_feature: Table A; Target 19722; HLA-B*07:02; CTCFL; ENSG00000124092; CTA
SPQEMEVL

SEQ ID NO: 19723 - protein, 8 aa, Homo sapiens
  misc_feature: Table A; Target 19723; HLA-B*35:03; CTCFL; ENSG00000124092; CTA
SPQEMEVL

SEQ ID NO: 19724 - protein, 8 aa, Homo sapiens
  misc_feature: Table A; Target 19724; HLA-C*07:02; CTCFL; ENSG00000124092; CTA
SPQEMEVL

SEQ ID NO: 19725 - protein, 10 aa, Homo sapiens
  misc_feature: Table A; Target 19725; HLA-B*35:01; CTCFL; ENSG00000124092; CTA
SPQEMEVLQF

SEQ ID NO: 19726 - protein, 9 aa, Homo sapiens
  misc_feature: Table A; Target 19726; HLA-A*68:01; CTCFL; ENSG00000124092; CTA
SPSELEAER

SEQ ID NO: 19727 - protein, 9 aa, Homo sapiens
  misc_feature: Table A; Target 19727; HLA-C*07:06; CTCFL; ENSG00000124092; CTA
SPSELEAER

SEQ ID NO: 19728 - protein, 8 aa, Homo sapiens
  misc_feature: Table A; Target 19728; HLA-B*27:05; CTCFL; ENSG00000124092; CTA
SRMSSFNR

SEQ ID NO: 19729 - protein, 9 aa, Homo sapiens
  misc_feature: Table A; Target 19729; HLA-A*31:01; CTCFL; ENSG00000124092; CTA
SSRMSSFNR

SEQ ID NO: 19730 - protein, 9 aa, Homo sapiens
  misc_feature: Table A; Target 19730; HLA-A*33:01; CTCFL; ENSG00000124092; CTA
SSRMSSFNR

SEQ ID NO: 19731 - protein, 9 aa, Homo sapiens
  misc_feature: Table A; Target 19731; HLA-A*33:03; CTCFL; ENSG00000124092; CTA
SSRMSSFNR

SEQ ID NO: 19732 - protein, 8 aa, Homo sapiens
  misc_feature: Table A; Target 19732; HLA-B*58:01; CTCFL; ENSG00000124092; CTA
STTKGEQF

SEQ ID NO: 19733 - protein, 8 aa, Homo sapiens
  misc_feature: Table A; Target 19733; HLA-A*03:02; CTCFL; ENSG00000124092; CTA
SVEASKLK

SEQ ID NO: 19734 - protein, 9 aa, Homo sapiens
  misc_feature: Table A; Target 19734; HLA-C*07:06; CTCFL; ENSG00000124092; CTA
SVEASKLKR

SEQ ID NO: 19735 - protein, 9 aa, Homo sapiens
  misc_feature: Table A; Target 19735; HLA-A*02:01; CTCFL; ENSG00000124092; CTA
SVLEEEVEL

SEQ ID NO: 19736 - protein, 9 aa, Homo sapiens
  misc_feature: Table A; Target 19736; HLA-A*02:07; CTCFL; ENSG00000124092; CTA
SVLEEEVEL

SEQ ID NO: 19737 - protein, 9 aa, Homo sapiens
  misc_feature: Table A; Target 19737; HLA-B*15:01; CTCFL; ENSG00000124092; CTA
SVLEEEVEL

SEQ ID NO: 19738 - protein, 9 aa, Homo sapiens
  misc_feature: Table A; Target 19738; HLA-B*35:03; CTCFL; ENSG00000124092; CTA
SVLEEEVEL

SEQ ID NO: 19739 - protein, 9 aa, Homo sapiens
  misc_feature: Table A; Target 19739; HLA-B*38:01; CTCFL; ENSG00000124092; CTA
SVLEEEVEL

SEQ ID NO: 19740 - protein, 9 aa, Homo sapiens
  misc_feature: Table A; Target 19740; HLA-B*39:01; CTCFL; ENSG00000124092; CTA
SVLEEEVEL

SEQ ID NO: 19741 - protein, 9 aa, Homo sapiens
  misc_feature: Table A; Target 19741; HLA-B*40:01; CTCFL; ENSG00000124092; CTA
SVLEEEVEL

SEQ ID NO: 19742 - protein, 9 aa, Homo sapiens
  misc_feature: Table A; Target 19742; HLA-B*55:01; CTCFL; ENSG00000124092; CTA
SVLEEEVEL

SEQ ID NO: 19743 - protein, 9 aa, Homo sapiens
  misc_feature: Table A; Target 19743; HLA-C*03:03; CTCFL; ENSG00000124092; CTA
SVLEEEVEL

SEQ ID NO: 19744 - protein, 9 aa, Homo sapiens
  misc_feature: Table A; Target 19744; HLA-C*05:01; CTCFL; ENSG00000124092; CTA
SVLEEEVEL

SEQ ID NO: 19745 - protein, 9 aa, Homo sapiens
  misc_feature: Table A; Target 19745; HLA-A*03:01; CTCFL; ENSG00000124092; CTA
SVLSEQFTK

SEQ ID NO: 19746 - protein, 9 aa, Homo sapiens
  misc_feature: Table A; Target 19746; HLA-A*03:02; CTCFL; ENSG00000124092; CTA
SVLSEQFTK

SEQ ID NO: 19747 - protein, 9 aa, Homo sapiens
  misc_feature: Table A; Target 19747; HLA-C*07:06; CTCFL; ENSG00000124092; CTA
SVLSEQFTK

SEQ ID NO: 19748 - protein, 10 aa, Homo sapiens
  misc_feature: Table A; Target 19748; HLA-A*02:04; CTCFL; ENSG00000124092; CTA
SVLSEQFTKI

SEQ ID NO: 19749 - protein, 10 aa, Homo sapiens
  misc_feature: Table A; Target 19749; HLA-A*25:01; CTCFL; ENSG00000124092; CTA
SVLSEQFTKI

SEQ ID NO: 19750 - protein, 10 aa, Homo sapiens
  misc_feature: Table A; Target 19750; HLA-A*26:01; CTCFL; ENSG00000124092; CTA
SVLSEQFTKI

SEQ ID NO: 19751 - protein, 10 aa, Homo sapiens
  misc_feature: Table A; Target 19751; HLA-A*68:02; CTCFL; ENSG00000124092; CTA
SVLSEQFTKI

SEQ ID NO: 19752 - protein, 10 aa, Homo sapiens
  misc_feature: Table A; Target 19752; HLA-B*13:02; CTCFL; ENSG00000124092; CTA
SVLSEQFTKI

SEQ ID NO: 19753 - protein, 11 aa, Homo sapiens
  misc_feature: Table A; Target 19753; HLA-A*11:01; CTCFL; ENSG00000124092; CTA
SVLSEQFTKIK

SEQ ID NO: 19754 - protein, 8 aa, Homo sapiens
  misc_feature: Table A; Target 19754; HLA-A*30:02; CTCFL; ENSG00000124092; CTA
SYASRDTY

SEQ ID NO: 19755 - protein, 8 aa, Homo sapiens
  misc_feature: Table A; Target 19755; HLA-A*32:01; CTCFL; ENSG00000124092; CTA
SYASRDTY

SEQ ID NO: 19756 - protein, 8 aa, Homo sapiens
  misc_feature: Table A; Target 19756; HLA-C*14:02; CTCFL; ENSG00000124092; CTA
SYASRDTY

SEQ ID NO: 19757 - protein, 8 aa, Homo sapiens
  misc_feature: Table A; Target 19757; HLA-C*16:01; CTCFL; ENSG00000124092; CTA
SYASRDTY

SEQ ID NO: 19758 - protein, 10 aa, Homo sapiens
  misc_feature: Table A; Target 19758; HLA-A*24:02; CTCFL; ENSG00000124092; CTA
SYASRDTYKL

SEQ ID NO: 19759 - protein, 9 aa, Homo sapiens
  misc_feature: Table A; Target 19759; HLA-C*07:06; CTCFL; ENSG00000124092; CTA
TAGQADAEK

SEQ ID NO: 19760 - protein, 8 aa, Homo sapiens
  misc_feature: Table A; Target 19760; HLA-B*08:01; CTCFL; ENSG00000124092; CTA
TARVKEEV

SEQ ID NO: 19761 - protein, 9 aa, Homo sapiens
  misc_feature: Table A; Target 19761; HLA-B*49:01; CTCFL; ENSG00000124092; CTA
TEISVLSEQ

SEQ ID NO: 19762 - protein, 10 aa, Homo sapiens
  misc_feature: Table A; Target 19762; HLA-A*30:01; CTCFL; ENSG00000124092; CTA
TEISVLSEQF

SEQ ID NO: 19763 - protein, 10 aa, Homo sapiens
  misc_feature: Table A; Target 19763; HLA-B*18:01; CTCFL; ENSG00000124092; CTA
TEISVLSEQF

SEQ ID NO: 19764 - protein, 10 aa, Homo sapiens
  misc_feature: Table A; Target 19764; HLA-B*27:02; CTCFL; ENSG00000124092; CTA
TEISVLSEQF

SEQ ID NO: 19765 - protein, 10 aa, Homo sapiens
  misc_feature: Table A; Target 19765; HLA-B*38:01; CTCFL; ENSG00000124092; CTA
TEISVLSEQF

SEQ ID NO: 19766 - protein, 10 aa, Homo sapiens
  misc_feature: Table A; Target 19766; HLA-B*40:01; CTCFL; ENSG00000124092; CTA
TEISVLSEQF

SEQ ID NO: 19767 - protein, 10 aa, Homo sapiens
  misc_feature: Table A; Target 19767; HLA-B*44:02; CTCFL; ENSG00000124092; CTA
TEISVLSEQF

SEQ ID NO: 19768 - protein, 10 aa, Homo sapiens
  misc_feature: Table A; Target 19768; HLA-B*49:01; CTCFL; ENSG00000124092; CTA
TEISVLSEQF

SEQ ID NO: 19769 - protein, 10 aa, Homo sapiens
  misc_feature: Table A; Target 19769; HLA-C*16:04; CTCFL; ENSG00000124092; CTA
TEISVLSEQF

SEQ ID NO: 19770 - protein, 8 aa, Homo sapiens
  misc_feature: Table A; Target 19770; HLA-A*23:01; CTCFL; ENSG00000124092; CTA
TFRTVTLL

SEQ ID NO: 19771 - protein, 9 aa, Homo sapiens
  misc_feature: Table A; Target 19771; HLA-A*31:01; CTCFL; ENSG00000124092; CTA
TFRTVTLLR

SEQ ID NO: 19772 - protein, 9 aa, Homo sapiens
  misc_feature: Table A; Target 19772; HLA-A*33:03; CTCFL; ENSG00000124092; CTA
TFRTVTLLR

SEQ ID NO: 19773 - protein, 9 aa, Homo sapiens
  misc_feature: Table A; Target 19773; HLA-C*05:01; CTCFL; ENSG00000124092; CTA
TGEKPFTCL

SEQ ID NO: 19774 - protein, 9 aa, Homo sapiens
  misc_feature: Table A; Target 19774; HLA-B*38:01; CTCFL; ENSG00000124092; CTA
THTSEKPHL

SEQ ID NO: 19775 - protein, 9 aa, Homo sapiens
  misc_feature: Table A; Target 19775; HLA-B*39:01; CTCFL; ENSG00000124092; CTA
THTSEKPHL

SEQ ID NO: 19776 - protein, 9 aa, Homo sapiens
  misc_feature: Table A; Target 19776; HLA-B*08:01; CTCFL; ENSG00000124092; CTA
TIIARKSDL

SEQ ID NO: 19777 - protein, 9 aa, Homo sapiens
  misc_feature: Table A; Target 19777; HLA-A*03:01; CTCFL; ENSG00000124092; CTA
TMKIHILQK

SEQ ID NO: 19778 - protein, 9 aa, Homo sapiens
  misc_feature: Table A; Target 19778; HLA-A*31:01; CTCFL; ENSG00000124092; CTA
TMKIHILQK

SEQ ID NO: 19779 - protein, 8 aa, Homo sapiens
  misc_feature: Table A; Target 19779; HLA-A*30:01; CTCFL; ENSG00000124092; CTA
TQSGTMKI

SEQ ID NO: 19780 - protein, 8 aa, Homo sapiens
  misc_feature: Table A; Target 19780; HLA-B*13:02; CTCFL; ENSG00000124092; CTA
TQSGTMKI

SEQ ID NO: 19781 - protein, 8 aa, Homo sapiens
  misc_feature: Table A; Target 19781; HLA-B*38:01; CTCFL; ENSG00000124092; CTA
TQSGTMKI

SEQ ID NO: 19782 - protein, 8 aa, Homo sapiens
  misc_feature: Table A; Target 19782; HLA-C*06:02; CTCFL; ENSG00000124092; CTA
TQSGTMKI

SEQ ID NO: 19783 - protein, 10 aa, Homo sapiens
  misc_feature: Table A; Target 19783; HLA-B*13:02; CTCFL; ENSG00000124092; CTA
TQSGTMKIHI

SEQ ID NO: 19784 - protein, 10 aa, Homo sapiens
  misc_feature: Table A; Target 19784; HLA-B*38:01; CTCFL; ENSG00000124092; CTA
TQSGTMKIHI

SEQ ID NO: 19785 - protein, 9 aa, Homo sapiens
  misc_feature: Table A; Target 19785; HLA-B*27:05; CTCFL; ENSG00000124092; CTA
TRFTQSGTM

SEQ ID NO: 19786 - protein, 9 aa, Homo sapiens
  misc_feature: Table A; Target 19786; HLA-B*39:01; CTCFL; ENSG00000124092; CTA
TRFTQSGTM

SEQ ID NO: 19787 - protein, 9 aa, Homo sapiens
  misc_feature: Table A; Target 19787; HLA-C*06:02; CTCFL; ENSG00000124092; CTA
TRFTQSGTM

SEQ ID NO: 19788 - protein, 9 aa, Homo sapiens
  misc_feature: Table A; Target 19788; HLA-C*16:04; CTCFL; ENSG00000124092; CTA
TRFTQSGTM

SEQ ID NO: 19789 - protein, 10 aa, Homo sapiens
  misc_feature: Table A; Target 19789; HLA-B*27:05; CTCFL; ENSG00000124092; CTA
TRFTQSGTMK

SEQ ID NO: 19790 - protein, 9 aa, Homo sapiens
  misc_feature: Table A; Target 19790; HLA-A*31:01; CTCFL; ENSG00000124092; CTA
TSGELVRHR

SEQ ID NO: 19791 - protein, 9 aa, Homo sapiens
  misc_feature: Table A; Target 19791; HLA-A*33:01; CTCFL; ENSG00000124092; CTA
TSGELVRHR

SEQ ID NO: 19792 - protein, 9 aa, Homo sapiens
  misc_feature: Table A; Target 19792; HLA-A*33:03; CTCFL; ENSG00000124092; CTA
TSGELVRHR

SEQ ID NO: 19793 - protein, 9 aa, Homo sapiens
  misc_feature: Table A; Target 19793; HLA-A*68:01; CTCFL; ENSG00000124092; CTA
TSGELVRHR

SEQ ID NO: 19794 - protein, 9 aa, Homo sapiens
  misc_feature: Table A; Target 19794; HLA-C*07:06; CTCFL; ENSG00000124092; CTA
TSGELVRHR

SEQ ID NO: 19795 - protein, 8 aa, Homo sapiens
  misc_feature: Table A; Target 19795; HLA-B*37:01; CTCFL; ENSG00000124092; CTA
TSSRMSSF

SEQ ID NO: 19796 - protein, 8 aa, Homo sapiens
  misc_feature: Table A; Target 19796; HLA-B*58:01; CTCFL; ENSG00000124092; CTA
TSSRMSSF

SEQ ID NO: 19797 - protein, 9 aa, Homo sapiens
  misc_feature: Table A; Target 19797; HLA-A*68:02; CTCFL; ENSG00000124092; CTA
TTARVKEEV

SEQ ID NO: 19798 - protein, 9 aa, Homo sapiens
  misc_feature: Table A; Target 19798; HLA-B*13:02; CTCFL; ENSG00000124092; CTA
TVHFTSEAV

SEQ ID NO: 19799 - protein, 9 aa, Homo sapiens
  misc_feature: Table A; Target 19799; HLA-A*02:07; CTCFL; ENSG00000124092; CTA
VAISIQQEL

SEQ ID NO: 19800 - protein, 9 aa, Homo sapiens
  misc_feature: Table A; Target 19800; HLA-A*23:01; CTCFL; ENSG00000124092; CTA
VAISIQQEL

SEQ ID NO: 19801 - protein, 9 aa, Homo sapiens
  misc_feature: Table A; Target 19801; HLA-A*24:02; CTCFL; ENSG00000124092; CTA
VAISIQQEL

SEQ ID NO: 19802 - protein, 9 aa, Homo sapiens
  misc_feature: Table A; Target 19802; HLA-A*30:01; CTCFL; ENSG00000124092; CTA
VAISIQQEL

SEQ ID NO: 19803 - protein, 9 aa, Homo sapiens
  misc_feature: Table A; Target 19803; HLA-A*32:01; CTCFL; ENSG00000124092; CTA
VAISIQQEL

SEQ ID NO: 19804 - protein, 9 aa, Homo sapiens
  misc_feature: Table A; Target 19804; HLA-A*68:02; CTCFL; ENSG00000124092; CTA
VAISIQQEL

SEQ ID NO: 19805 - protein, 9 aa, Homo sapiens
  misc_feature: Table A; Target 19805; HLA-B*07:02; CTCFL; ENSG00000124092; CTA
VAISIQQEL

SEQ ID NO: 19806 - protein, 9 aa, Homo sapiens
  misc_feature: Table A; Target 19806; HLA-B*13:02; CTCFL; ENSG00000124092; CTA
VAISIQQEL

SEQ ID NO: 19807 - protein, 9 aa, Homo sapiens
  misc_feature: Table A; Target 19807; HLA-B*15:01; CTCFL; ENSG00000124092; CTA
VAISIQQEL

SEQ ID NO: 19808 - protein, 9 aa, Homo sapiens
  misc_feature: Table A; Target 19808; HLA-B*15:03; CTCFL; ENSG00000124092; CTA
VAISIQQEL

SEQ ID NO: 19809 - protein, 9 aa, Homo sapiens
  misc_feature: Table A; Target 19809; HLA-B*27:02; CTCFL; ENSG00000124092; CTA
VAISIQQEL

SEQ ID NO: 19810 - protein, 9 aa, Homo sapiens
  misc_feature: Table A; Target 19810; HLA-B*27:05; CTCFL; ENSG00000124092; CTA
VAISIQQEL

SEQ ID NO: 19811 - protein, 9 aa, Homo sapiens
  misc_feature: Table A; Target 19811; HLA-B*35:01; CTCFL; ENSG00000124092; CTA
VAISIQQEL

SEQ ID NO: 19812 - protein, 9 aa, Homo sapiens
  misc_feature: Table A; Target 19812; HLA-B*35:03; CTCFL; ENSG00000124092; CTA
VAISIQQEL

SEQ ID NO: 19813 - protein, 9 aa, Homo sapiens
  misc_feature: Table A; Target 19813; HLA-B*38:01; CTCFL; ENSG00000124092; CTA
VAISIQQEL

SEQ ID NO: 19814 - protein, 9 aa, Homo sapiens
  misc_feature: Table A; Target 19814; HLA-B*39:01; CTCFL; ENSG00000124092; CTA
VAISIQQEL

SEQ ID NO: 19815 - protein, 9 aa, Homo sapiens
  misc_feature: Table A; Target 19815; HLA-B*40:01; CTCFL; ENSG00000124092; CTA
VAISIQQEL

SEQ ID NO: 19816 - protein, 9 aa, Homo sapiens
  misc_feature: Table A; Target 19816; HLA-B*46:01; CTCFL; ENSG00000124092; CTA
VAISIQQEL

SEQ ID NO: 19817 - protein, 9 aa, Homo sapiens
  misc_feature: Table A; Target 19817; HLA-B*51:01; CTCFL; ENSG00000124092; CTA
VAISIQQEL

SEQ ID NO: 19818 - protein, 9 aa, Homo sapiens
  misc_feature: Table A; Target 19818; HLA-B*57:01; CTCFL; ENSG00000124092; CTA
VAISIQQEL

SEQ ID NO: 19819 - protein, 9 aa, Homo sapiens
  misc_feature: Table A; Target 19819; HLA-B*58:01; CTCFL; ENSG00000124092; CTA
VAISIQQEL

SEQ ID NO: 19820 - protein, 9 aa, Homo sapiens
  misc_feature: Table A; Target 19820; HLA-C*01:02; CTCFL; ENSG00000124092; CTA
VAISIQQEL

SEQ ID NO: 19821 - protein, 9 aa, Homo sapiens
  misc_feature: Table A; Target 19821; HLA-C*02:02; CTCFL; ENSG00000124092; CTA
VAISIQQEL

SEQ ID NO: 19822 - protein, 9 aa, Homo sapiens
  misc_feature: Table A; Target 19822; HLA-C*03:03; CTCFL; ENSG00000124092; CTA
VAISIQQEL

SEQ ID NO: 19823 - protein, 9 aa, Homo sapiens
  misc_feature: Table A; Target 19823; HLA-C*05:01; CTCFL; ENSG00000124092; CTA
VAISIQQEL

SEQ ID NO: 19824 - protein, 9 aa, Homo sapiens
  misc_feature: Table A; Target 19824; HLA-C*07:02; CTCFL; ENSG00000124092; CTA
VAISIQQEL

SEQ ID NO: 19825 - protein, 9 aa, Homo sapiens
  misc_feature: Table A; Target 19825; HLA-C*07:04; CTCFL; ENSG00000124092; CTA
VAISIQQEL

SEQ ID NO: 19826 - protein, 9 aa, Homo sapiens
  misc_feature: Table A; Target 19826; HLA-C*07:06; CTCFL; ENSG00000124092; CTA
VAISIQQEL

SEQ ID NO: 19827 - protein, 9 aa, Homo sapiens
  misc_feature: Table A; Target 19827; HLA-C*12:03; CTCFL; ENSG00000124092; CTA
VAISIQQEL

SEQ ID NO: 19828 - protein, 9 aa, Homo sapiens
  misc_feature: Table A; Target 19828; HLA-C*14:02; CTCFL; ENSG00000124092; CTA
VAISIQQEL

SEQ ID NO: 19829 - protein, 9 aa, Homo sapiens
  misc_feature: Table A; Target 19829; HLA-C*16:01; CTCFL; ENSG00000124092; CTA
VAISIQQEL

SEQ ID NO: 19830 - protein, 9 aa, Homo sapiens
  misc_feature: Table A; Target 19830; HLA-C*16:02; CTCFL; ENSG00000124092; CTA
VAISIQQEL

SEQ ID NO: 19831 - protein, 9 aa, Homo sapiens
  misc_feature: Table A; Target 19831; HLA-C*16:04; CTCFL; ENSG00000124092; CTA
VAISIQQEL

SEQ ID NO: 19832 - protein, 10 aa, Homo sapiens
  misc_feature: Table A; Target 19832; HLA-A*01:01; CTCFL; ENSG00000124092; CTA
VAISIQQELY

SEQ ID NO: 19833 - protein, 10 aa, Homo sapiens
  misc_feature: Table A; Target 19833; HLA-A*23:01; CTCFL; ENSG00000124092; CTA
VAISIQQELY

SEQ ID NO: 19834 - protein, 10 aa, Homo sapiens
  misc_feature: Table A; Target 19834; HLA-A*25:01; CTCFL; ENSG00000124092; CTA
VAISIQQELY

SEQ ID NO: 19835 - protein, 10 aa, Homo sapiens
  misc_feature: Table A; Target 19835; HLA-A*26:01; CTCFL; ENSG00000124092; CTA
VAISIQQELY

SEQ ID NO: 19836 - protein, 10 aa, Homo sapiens
  misc_feature: Table A; Target 19836; HLA-A*29:02; CTCFL; ENSG00000124092; CTA
VAISIQQELY

SEQ ID NO: 19837 - protein, 10 aa, Homo sapiens
  misc_feature: Table A; Target 19837; HLA-A*30:02; CTCFL; ENSG00000124092; CTA
VAISIQQELY

SEQ ID NO: 19838 - protein, 10 aa, Homo sapiens
  misc_feature: Table A; Target 19838; HLA-B*15:01; CTCFL; ENSG00000124092; CTA
VAISIQQELY

SEQ ID NO: 19839 - protein, 10 aa, Homo sapiens
  misc_feature: Table A; Target 19839; HLA-B*15:03; CTCFL; ENSG00000124092; CTA
VAISIQQELY

SEQ ID NO: 19840 - protein, 10 aa, Homo sapiens
  misc_feature: Table A; Target 19840; HLA-B*35:01; CTCFL; ENSG00000124092; CTA
VAISIQQELY

SEQ ID NO: 19841 - protein, 10 aa, Homo sapiens
  misc_feature: Table A; Target 19841; HLA-B*46:01; CTCFL; ENSG00000124092; CTA
VAISIQQELY

SEQ ID NO: 19842 - protein, 10 aa, Homo sapiens
  misc_feature: Table A; Target 19842; HLA-B*57:01; CTCFL; ENSG00000124092; CTA
VAISIQQELY

SEQ ID NO: 19843 - protein, 10 aa, Homo sapiens
  misc_feature: Table A; Target 19843; HLA-B*58:01; CTCFL; ENSG00000124092; CTA
VAISIQQELY

SEQ ID NO: 19844 - protein, 10 aa, Homo sapiens
  misc_feature: Table A; Target 19844; HLA-C*02:02; CTCFL; ENSG00000124092; CTA
VAISIQQELY

SEQ ID NO: 19845 - protein, 10 aa, Homo sapiens
  misc_feature: Table A; Target 19845; HLA-C*07:06; CTCFL; ENSG00000124092; CTA
VAISIQQELY

SEQ ID NO: 19846 - protein, 10 aa, Homo sapiens
  misc_feature: Table A; Target 19846; HLA-C*16:02; CTCFL; ENSG00000124092; CTA
VAISIQQELY

SEQ ID NO: 19847 - protein, 10 aa, Homo sapiens
  misc_feature: Table A; Target 19847; HLA-C*16:04; CTCFL; ENSG00000124092; CTA
VAISIQQELY

SEQ ID NO: 19848 - protein, 8 aa, Homo sapiens
  misc_feature: Table A; Target 19848; HLA-C*03:03; CTCFL; ENSG00000124092; CTA
VASEDSKL

SEQ ID NO: 19849 - protein, 8 aa, Homo sapiens
  misc_feature: Table A; Target 19849; HLA-C*03:04; CTCFL; ENSG00000124092; CTA
VASEDSKL

SEQ ID NO: 19850 - protein, 8 aa, Homo sapiens
  misc_feature: Table A; Target 19850; HLA-C*05:01; CTCFL; ENSG00000124092; CTA
VASEDSKL

SEQ ID NO: 19851 - protein, 10 aa, Homo sapiens
  misc_feature: Table A; Target 19851; HLA-C*02:02; CTCFL; ENSG00000124092; CTA
VASEDSKLAV

SEQ ID NO: 19852 - protein, 10 aa, Homo sapiens
  misc_feature: Table A; Target 19852; HLA-C*03:03; CTCFL; ENSG00000124092; CTA
VASEDSKLAV

SEQ ID NO: 19853 - protein, 10 aa, Homo sapiens
  misc_feature: Table A; Target 19853; HLA-C*03:04; CTCFL; ENSG00000124092; CTA
VASEDSKLAV

SEQ ID NO: 19854 - protein, 10 aa, Homo sapiens
  misc_feature: Table A; Target 19854; HLA-C*16:02; CTCFL; ENSG00000124092; CTA
VASEDSKLAV

SEQ ID NO: 19855 - protein, 9 aa, Homo sapiens
  misc_feature: Table A; Target 19855; HLA-A*30:01; CTCFL; ENSG00000124092; CTA
VDEGVTCEM

SEQ ID NO: 19856 - protein, 9 aa, Homo sapiens
  misc_feature: Table A; Target 19856; HLA-B*37:01; CTCFL; ENSG00000124092; CTA
VDEGVTCEM

SEQ ID NO: 19857 - protein, 9 aa, Homo sapiens
  misc_feature: Table A; Target 19857; HLA-B*39:01; CTCFL; ENSG00000124092; CTA
VDEGVTCEM

SEQ ID NO: 19858 - protein, 9 aa, Homo sapiens
  misc_feature: Table A; Target 19858; HLA-A*30:01; CTCFL; ENSG00000124092; CTA
VELQDMSLL

SEQ ID NO: 19859 - protein, 9 aa, Homo sapiens
  misc_feature: Table A; Target 19859; HLA-B*37:01; CTCFL; ENSG00000124092; CTA
VELQDMSLL

SEQ ID NO: 19860 - protein, 9 aa, Homo sapiens
  misc_feature: Table A; Target 19860; HLA-B*40:02; CTCFL; ENSG00000124092; CTA
VELQDMSLL

SEQ ID NO: 19861 - protein, 9 aa, Homo sapiens
  misc_feature: Table A; Target 19861; HLA-B*44:02; CTCFL; ENSG00000124092; CTA
VELQDMSLL

SEQ ID NO: 19862 - protein, 9 aa, Homo sapiens
  misc_feature: Table A; Target 19862; HLA-B*49:01; CTCFL; ENSG00000124092; CTA
VELQDMSLL

SEQ ID NO: 19863 - protein, 8 aa, Homo sapiens
  misc_feature: Table A; Target 19863; HLA-B*08:01; CTCFL; ENSG00000124092; CTA
VFHERYAL

SEQ ID NO: 19864 - protein, 9 aa, Homo sapiens
  misc_feature: Table A; Target 19864; HLA-A*24:02; CTCFL; ENSG00000124092; CTA
VFHERYALI

SEQ ID NO: 19865 - protein, 8 aa, Homo sapiens
  misc_feature: Table A; Target 19865; HLA-B*39:01; CTCFL; ENSG00000124092; CTA
VHFTSEAV

SEQ ID NO: 19866 - protein, 10 aa, Homo sapiens
  misc_feature: Table A; Target 19866; HLA-B*27:05; CTCFL; ENSG00000124092; CTA
VHFTSEAVEL

SEQ ID NO: 19867 - protein, 10 aa, Homo sapiens
  misc_feature: Table A; Target 19867; HLA-B*38:01; CTCFL; ENSG00000124092; CTA
VHFTSEAVEL

SEQ ID NO: 19868 - protein, 10 aa, Homo sapiens
  misc_feature: Table A; Target 19868; HLA-B*39:01; CTCFL; ENSG00000124092; CTA
VHFTSEAVEL

SEQ ID NO: 19869 - protein, 10 aa, Homo sapiens
  misc_feature: Table A; Target 19869; HLA-C*07:04; CTCFL; ENSG00000124092; CTA
VHFTSEAVEL

SEQ ID NO: 19870 - protein, 9 aa, Homo sapiens
  misc_feature: Table A; Target 19870; HLA-A*29:02; CTCFL; ENSG00000124092; CTA
VHMRNLHAY

SEQ ID NO: 19871 - protein, 9 aa, Homo sapiens
  misc_feature: Table A; Target 19871; HLA-A*30:02; CTCFL; ENSG00000124092; CTA
VHMRNLHAY

SEQ ID NO: 19872 - protein, 10 aa, Homo sapiens
  misc_feature: Table A; Target 19872; HLA-A*03:02; CTCFL; ENSG00000124092; CTA
VLAPSEESEK

SEQ ID NO: 19873 - protein, 10 aa, Homo sapiens
  misc_feature: Table A; Target 19873; HLA-B*27:02; CTCFL; ENSG00000124092; CTA
VLAPSEESEK

SEQ ID NO: 19874 - protein, 11 aa, Homo sapiens
  misc_feature: Table A; Target 19874; HLA-A*01:01; CTCFL; ENSG00000124092; CTA
VLAPSEESEKY

SEQ ID NO: 19875 - protein, 11 aa, Homo sapiens
  misc_feature: Table A; Target 19875; HLA-A*25:01; CTCFL; ENSG00000124092; CTA
VLAPSEESEKY

SEQ ID NO: 19876 - protein, 11 aa, Homo sapiens
  misc_feature: Table A; Target 19876; HLA-A*26:01; CTCFL; ENSG00000124092; CTA
VLAPSEESEKY

SEQ ID NO: 19877 - protein, 11 aa, Homo sapiens
  misc_feature: Table A; Target 19877; HLA-A*29:02; CTCFL; ENSG00000124092; CTA
VLAPSEESEKY

SEQ ID NO: 19878 - protein, 11 aa, Homo sapiens
  misc_feature: Table A; Target 19878; HLA-A*30:02; CTCFL; ENSG00000124092; CTA
VLAPSEESEKY

SEQ ID NO: 19879 - protein, 11 aa, Homo sapiens
  misc_feature: Table A; Target 19879; HLA-A*32:01; CTCFL; ENSG00000124092; CTA
VLAPSEESEKY

SEQ ID NO: 19880 - protein, 11 aa, Homo sapiens
  misc_feature: Table A; Target 19880; HLA-B*15:03; CTCFL; ENSG00000124092; CTA
VLAPSEESEKY

SEQ ID NO: 19881 - protein, 11 aa, Homo sapiens
  misc_feature: Table A; Target 19881; HLA-B*46:01; CTCFL; ENSG00000124092; CTA
VLAPSEESEKY

SEQ ID NO: 19882 - protein, 11 aa, Homo sapiens
  misc_feature: Table A; Target 19882; HLA-B*55:01; CTCFL; ENSG00000124092; CTA
VLAPSEESEKY

SEQ ID NO: 19883 - protein, 11 aa, Homo sapiens
  misc_feature: Table A; Target 19883; HLA-B*58:01; CTCFL; ENSG00000124092; CTA
VLAPSEESEKY

SEQ ID NO: 19884 - protein, 11 aa, Homo sapiens
  misc_feature: Table A; Target 19884; HLA-C*07:04; CTCFL; ENSG00000124092; CTA
VLAPSEESEKY

SEQ ID NO: 19885 - protein, 11 aa, Homo sapiens
  misc_feature: Table A; Target 19885; HLA-C*16:04; CTCFL; ENSG00000124092; CTA
VLAPSEESEKY

SEQ ID NO: 19886 - protein, 8 aa, Homo sapiens
  misc_feature: Table A; Target 19886; HLA-C*05:01; CTCFL; ENSG00000124092; CTA
VLEEEVEL

SEQ ID NO: 19887 - protein, 9 aa, Homo sapiens
  misc_feature: Table A; Target 19887; HLA-A*02:01; CTCFL; ENSG00000124092; CTA
VLEEEVELV

SEQ ID NO: 19888 - protein, 9 aa, Homo sapiens
  misc_feature: Table A; Target 19888; HLA-A*02:07; CTCFL; ENSG00000124092; CTA
VLEEEVELV

SEQ ID NO: 19889 - protein, 9 aa, Homo sapiens
  misc_feature: Table A; Target 19889; HLA-C*05:01; CTCFL; ENSG00000124092; CTA
VLEEEVELV

SEQ ID NO: 19890 - protein, 8 aa, Homo sapiens
  misc_feature: Table A; Target 19890; HLA-A*03:02; CTCFL; ENSG00000124092; CTA
VLSEQFTK

SEQ ID NO: 19891 - protein, 8 aa, Homo sapiens
  misc_feature: Table A; Target 19891; HLA-A*11:01; CTCFL; ENSG00000124092; CTA
VLSEQFTK

SEQ ID NO: 19892 - protein, 9 aa, Homo sapiens
  misc_feature: Table A; Target 19892; HLA-A*02:01; CTCFL; ENSG00000124092; CTA
VLSEQFTKI

SEQ ID NO: 19893 - protein, 9 aa, Homo sapiens
  misc_feature: Table A; Target 19893; HLA-A*02:03; CTCFL; ENSG00000124092; CTA
VLSEQFTKI

SEQ ID NO: 19894 - protein, 9 aa, Homo sapiens
  misc_feature: Table A; Target 19894; HLA-A*02:04; CTCFL; ENSG00000124092; CTA
VLSEQFTKI

SEQ ID NO: 19895 - protein, 9 aa, Homo sapiens
  misc_feature: Table A; Target 19895; HLA-A*02:07; CTCFL; ENSG00000124092; CTA
VLSEQFTKI

SEQ ID NO: 19896 - protein, 9 aa, Homo sapiens
  misc_feature: Table A; Target 19896; HLA-A*23:01; CTCFL; ENSG00000124092; CTA
VLSEQFTKI

SEQ ID NO: 19897 - protein, 9 aa, Homo sapiens
  misc_feature: Table A; Target 19897; HLA-A*24:02; CTCFL; ENSG00000124092; CTA
VLSEQFTKI

SEQ ID NO: 19898 - protein, 9 aa, Homo sapiens
  misc_feature: Table A; Target 19898; HLA-A*30:01; CTCFL; ENSG00000124092; CTA
VLSEQFTKI

SEQ ID NO: 19899 - protein, 9 aa, Homo sapiens
  misc_feature: Table A; Target 19899; HLA-A*68:02; CTCFL; ENSG00000124092; CTA
VLSEQFTKI

SEQ ID NO: 19900 - protein, 9 aa, Homo sapiens
  misc_feature: Table A; Target 19900; HLA-B*13:02; CTCFL; ENSG00000124092; CTA
VLSEQFTKI

SEQ ID NO: 19901 - protein, 9 aa, Homo sapiens
  misc_feature: Table A; Target 19901; HLA-B*38:01; CTCFL; ENSG00000124092; CTA
VLSEQFTKI

SEQ ID NO: 19902 - protein, 9 aa, Homo sapiens
  misc_feature: Table A; Target 19902; HLA-B*49:01; CTCFL; ENSG00000124092; CTA
VLSEQFTKI

SEQ ID NO: 19903 - protein, 9 aa, Homo sapiens
  misc_feature: Table A; Target 19903; HLA-B*51:01; CTCFL; ENSG00000124092; CTA
VLSEQFTKI

SEQ ID NO: 19904 - protein, 9 aa, Homo sapiens
  misc_feature: Table A; Target 19904; HLA-B*55:01; CTCFL; ENSG00000124092; CTA
VLSEQFTKI

SEQ ID NO: 19905 - protein, 9 aa, Homo sapiens
  misc_feature: Table A; Target 19905; HLA-C*02:02; CTCFL; ENSG00000124092; CTA
VLSEQFTKI

SEQ ID NO: 19906 - protein, 9 aa, Homo sapiens
  misc_feature: Table A; Target 19906; HLA-A*02:01; CTCFL; ENSG00000124092; CTA
VLTVSNSNV

SEQ ID NO: 19907 - protein, 9 aa, Homo sapiens
  misc_feature: Table A; Target 19907; HLA-A*02:03; CTCFL; ENSG00000124092; CTA
VLTVSNSNV

SEQ ID NO: 19908 - protein, 10 aa, Homo sapiens
  misc_feature: Table A; Target 19908; HLA-C*16:01; CTCFL; ENSG00000124092; CTA
VNTHTGTRPY

SEQ ID NO: 19909 - protein, 9 aa, Homo sapiens
  misc_feature: Table A; Target 19909; HLA-B*15:01; CTCFL; ENSG00000124092; CTA
VQQPGPGLL

SEQ ID NO: 19910 - protein, 9 aa, Homo sapiens
  misc_feature: Table A; Target 19910; HLA-B*39:01; CTCFL; ENSG00000124092; CTA
VQQPGPGLL

SEQ ID NO: 19911 - protein, 10 aa, Homo sapiens
  misc_feature: Table A; Target 19911; HLA-A*23:01; CTCFL; ENSG00000124092; CTA
VQQPGPGLLW

SEQ ID NO: 19912 - protein, 10 aa, Homo sapiens
  misc_feature: Table A; Target 19912; HLA-A*25:01; CTCFL; ENSG00000124092; CTA
VQQPGPGLLW

SEQ ID NO: 19913 - protein, 10 aa, Homo sapiens
  misc_feature: Table A; Target 19913; HLA-A*32:01; CTCFL; ENSG00000124092; CTA
VQQPGPGLLW

SEQ ID NO: 19914 - protein, 10 aa, Homo sapiens
  misc_feature: Table A; Target 19914; HLA-B*58:01; CTCFL; ENSG00000124092; CTA
VQQPGPGLLW

SEQ ID NO: 19915 - protein, 9 aa, Homo sapiens
  misc_feature: Table A; Target 19915; HLA-C*01:02; CTCFL; ENSG00000124092; CTA
VSLAETTGL

SEQ ID NO: 19916 - protein, 9 aa, Homo sapiens
  misc_feature: Table A; Target 19916; HLA-C*03:04; CTCFL; ENSG00000124092; CTA
VSLAETTGL

SEQ ID NO: 19917 - protein, 9 aa, Homo sapiens
  misc_feature: Table A; Target 19917; HLA-C*05:01; CTCFL; ENSG00000124092; CTA
VSLAETTGL

SEQ ID NO: 19918 - protein, 11 aa, Homo sapiens
  misc_feature: Table A; Target 19918; HLA-A*11:01; CTCFL; ENSG00000124092; CTA
VSLAETTGLIK

SEQ ID NO: 19919 - protein, 9 aa, Homo sapiens
  misc_feature: Table A; Target 19919; HLA-A*11:01; CTCFL; ENSG00000124092; CTA
VTSGELVRH

SEQ ID NO: 19920 - protein, 10 aa, Homo sapiens
  misc_feature: Table A; Target 19920; HLA-A*11:01; CTCFL; ENSG00000124092; CTA
VTSGELVRHR

SEQ ID NO: 19921 - protein, 10 aa, Homo sapiens
  misc_feature: Table A; Target 19921; HLA-A*31:01; CTCFL; ENSG00000124092; CTA
VTSGELVRHR

SEQ ID NO: 19922 - protein, 10 aa, Homo sapiens
  misc_feature: Table A; Target 19922; HLA-A*68:01; CTCFL; ENSG00000124092; CTA
VTSGELVRHR

SEQ ID NO: 19923 - protein, 10 aa, Homo sapiens
  misc_feature: Table A; Target 19923; HLA-C*07:06; CTCFL; ENSG00000124092; CTA
VTSGELVRHR

SEQ ID NO: 19924 - protein, 9 aa, Homo sapiens
  misc_feature: Table A; Target 19924; HLA-C*03:03; CTCFL; ENSG00000124092; CTA
VVQQPGPGL

SEQ ID NO: 19925 - protein, 9 aa, Homo sapiens
  misc_feature: Table A; Target 19925; HLA-C*03:04; CTCFL; ENSG00000124092; CTA
VVQQPGPGL

SEQ ID NO: 19926 - protein, 9 aa, Homo sapiens
  misc_feature: Table A; Target 19926; HLA-C*05:01; CTCFL; ENSG00000124092; CTA
VVQQPGPGL

SEQ ID NO: 19927 - protein, 11 aa, Homo sapiens
  misc_feature: Table A; Target 19927; HLA-B*57:01; CTCFL; ENSG00000124092; CTA
VVQQPGPGLLW

SEQ ID NO: 19928 - protein, 9 aa, Homo sapiens
  misc_feature: Table A; Target 19928; HLA-A*02:04; CTCFL; ENSG00000124092; CTA
YASRDTYKL

SEQ ID NO: 19929 - protein, 9 aa, Homo sapiens
  misc_feature: Table A; Target 19929; HLA-A*24:02; CTCFL; ENSG00000124092; CTA
YASRDTYKL

SEQ ID NO: 19930 - protein, 9 aa, Homo sapiens
  misc_feature: Table A; Target 19930; HLA-A*68:02; CTCFL; ENSG00000124092; CTA
YASRDTYKL

SEQ ID NO: 19931 - protein, 9 aa, Homo sapiens
  misc_feature: Table A; Target 19931; HLA-B*27:05; CTCFL; ENSG00000124092; CTA
YASRDTYKL

SEQ ID NO: 19932 - protein, 9 aa, Homo sapiens
  misc_feature: Table A; Target 19932; HLA-B*35:03; CTCFL; ENSG00000124092; CTA
YASRDTYKL

SEQ ID NO: 19933 - protein, 9 aa, Homo sapiens
  misc_feature: Table A; Target 19933; HLA-B*38:01; CTCFL; ENSG00000124092; CTA
YASRDTYKL

SEQ ID NO: 19934 - protein, 9 aa, Homo sapiens
  misc_feature: Table A; Target 19934; HLA-B*40:01; CTCFL; ENSG00000124092; CTA
YASRDTYKL

SEQ ID NO: 19935 - protein, 9 aa, Homo sapiens
  misc_feature: Table A; Target 19935; HLA-C*02:02; CTCFL; ENSG00000124092; CTA
YASRDTYKL

SEQ ID NO: 19936 - protein, 9 aa, Homo sapiens
  misc_feature: Table A; Target 19936; HLA-C*03:03; CTCFL; ENSG00000124092; CTA
YASRDTYKL

SEQ ID NO: 19937 - protein, 9 aa, Homo sapiens
  misc_feature: Table A; Target 19937; HLA-C*03:04; CTCFL; ENSG00000124092; CTA
YASRDTYKL

SEQ ID NO: 19938 - protein, 9 aa, Homo sapiens
  misc_feature: Table A; Target 19938; HLA-C*12:03; CTCFL; ENSG00000124092; CTA
YASRDTYKL

SEQ ID NO: 19939 - protein, 9 aa, Homo sapiens
  misc_feature: Table A; Target 19939; HLA-C*16:02; CTCFL; ENSG00000124092; CTA
YASRDTYKL

SEQ ID NO: 19940 - protein, 9 aa, Homo sapiens
  misc_feature: Table A; Target 19940; HLA-A*23:01; CTCFL; ENSG00000124092; CTA
YASVEASKL

SEQ ID NO: 19941 - protein, 9 aa, Homo sapiens
  misc_feature: Table A; Target 19941; HLA-A*25:01; CTCFL; ENSG00000124092; CTA
YASVEASKL

SEQ ID NO: 19942 - protein, 9 aa, Homo sapiens
  misc_feature: Table A; Target 19942; HLA-A*30:01; CTCFL; ENSG00000124092; CTA
YASVEASKL

SEQ ID NO: 19943 - protein, 9 aa, Homo sapiens
  misc_feature: Table A; Target 19943; HLA-A*32:01; CTCFL; ENSG00000124092; CTA
YASVEASKL

SEQ ID NO: 19944 - protein, 9 aa, Homo sapiens
  misc_feature: Table A; Target 19944; HLA-B*07:02; CTCFL; ENSG00000124092; CTA
YASVEASKL

SEQ ID NO: 19945 - protein, 9 aa, Homo sapiens
  misc_feature: Table A; Target 19945; HLA-B*13:02; CTCFL; ENSG00000124092; CTA
YASVEASKL

SEQ ID NO: 19946 - protein, 9 aa, Homo sapiens
  misc_feature: Table A; Target 19946; HLA-B*15:01; CTCFL; ENSG00000124092; CTA
YASVEASKL

SEQ ID NO: 19947 - protein, 9 aa, Homo sapiens
  misc_feature: Table A; Target 19947; HLA-B*15:03; CTCFL; ENSG00000124092; CTA
YASVEASKL

SEQ ID NO: 19948 - protein, 9 aa, Homo sapiens
  misc_feature: Table A; Target 19948; HLA-B*27:05; CTCFL; ENSG00000124092; CTA
YASVEASKL

SEQ ID NO: 19949 - protein, 9 aa, Homo sapiens
  misc_feature: Table A; Target 19949; HLA-B*35:01; CTCFL; ENSG00000124092; CTA
YASVEASKL

SEQ ID NO: 19950 - protein, 9 aa, Homo sapiens
  misc_feature: Table A; Target 19950; HLA-B*35:03; CTCFL; ENSG00000124092; CTA
YASVEASKL

SEQ ID NO: 19951 - protein, 9 aa, Homo sapiens
  misc_feature: Table A; Target 19951; HLA-B*38:01; CTCFL; ENSG00000124092; CTA
YASVEASKL

SEQ ID NO: 19952 - protein, 9 aa, Homo sapiens
  misc_feature: Table A; Target 19952; HLA-B*39:01; CTCFL; ENSG00000124092; CTA
YASVEASKL

SEQ ID NO: 19953 - protein, 9 aa, Homo sapiens
  misc_feature: Table A; Target 19953; HLA-B*40:01; CTCFL; ENSG00000124092; CTA
YASVEASKL

SEQ ID NO: 19954 - protein, 9 aa, Homo sapiens
  misc_feature: Table A; Target 19954; HLA-B*40:02; CTCFL; ENSG00000124092; CTA
YASVEASKL

SEQ ID NO: 19955 - protein, 9 aa, Homo sapiens
  misc_feature: Table A; Target 19955; HLA-B*46:01; CTCFL; ENSG00000124092; CTA
YASVEASKL

SEQ ID NO: 19956 - protein, 9 aa, Homo sapiens
  misc_feature: Table A; Target 19956; HLA-B*51:01; CTCFL; ENSG00000124092; CTA
YASVEASKL

SEQ ID NO: 19957 - protein, 9 aa, Homo sapiens
  misc_feature: Table A; Target 19957; HLA-B*55:01; CTCFL; ENSG00000124092; CTA
YASVEASKL

SEQ ID NO: 19958 - protein, 9 aa, Homo sapiens
  misc_feature: Table A; Target 19958; HLA-B*58:01; CTCFL; ENSG00000124092; CTA
YASVEASKL

SEQ ID NO: 19959 - protein, 9 aa, Homo sapiens
  misc_feature: Table A; Target 19959; HLA-C*01:02; CTCFL; ENSG00000124092; CTA
YASVEASKL

SEQ ID NO: 19960 - protein, 9 aa, Homo sapiens
  misc_feature: Table A; Target 19960; HLA-C*02:02; CTCFL; ENSG00000124092; CTA
YASVEASKL

SEQ ID NO: 19961 - protein, 9 aa, Homo sapiens
  misc_feature: Table A; Target 19961; HLA-C*03:03; CTCFL; ENSG00000124092; CTA
YASVEASKL

SEQ ID NO: 19962 - protein, 9 aa, Homo sapiens
  misc_feature: Table A; Target 19962; HLA-C*03:04; CTCFL; ENSG00000124092; CTA
YASVEASKL

SEQ ID NO: 19963 - protein, 9 aa, Homo sapiens
  misc_feature: Table A; Target 19963; HLA-C*04:01; CTCFL; ENSG00000124092; CTA
YASVEASKL

SEQ ID NO: 19964 - protein, 9 aa, Homo sapiens
  misc_feature: Table A; Target 19964; HLA-C*05:01; CTCFL; ENSG00000124092; CTA
YASVEASKL

SEQ ID NO: 19965 - protein, 9 aa, Homo sapiens
  misc_feature: Table A; Target 19965; HLA-C*06:02; CTCFL; ENSG00000124092; CTA
YASVEASKL

SEQ ID NO: 19966 - protein, 9 aa, Homo sapiens
  misc_feature: Table A; Target 19966; HLA-C*07:04; CTCFL; ENSG00000124092; CTA
YASVEASKL

SEQ ID NO: 19967 - protein, 9 aa, Homo sapiens
  misc_feature: Table A; Target 19967; HLA-C*07:06; CTCFL; ENSG00000124092; CTA
YASVEASKL

SEQ ID NO: 19968 - protein, 9 aa, Homo sapiens
  misc_feature: Table A; Target 19968; HLA-C*12:03; CTCFL; ENSG00000124092; CTA
YASVEASKL

SEQ ID NO: 19969 - protein, 9 aa, Homo sapiens
  misc_feature: Table A; Target 19969; HLA-C*14:02; CTCFL; ENSG00000124092; CTA
YASVEASKL

SEQ ID NO: 19970 - protein, 9 aa, Homo sapiens
  misc_feature: Table A; Target 19970; HLA-C*16:01; CTCFL; ENSG00000124092; CTA
YASVEASKL

SEQ ID NO: 19971 - protein, 9 aa, Homo sapiens
  misc_feature: Table A; Target 19971; HLA-C*16:02; CTCFL; ENSG00000124092; CTA
YASVEASKL

SEQ ID NO: 19972 - protein, 9 aa, Homo sapiens
  misc_feature: Table A; Target 19972; HLA-C*16:04; CTCFL; ENSG00000124092; CTA
YASVEASKL

SEQ ID NO: 19973 - protein, 10 aa, Homo sapiens
  misc_feature: Table A; Target 19973; HLA-B*27:02; CTCFL; ENSG00000124092; CTA
YASVEASKLK

SEQ ID NO: 19974 - protein, 10 aa, Homo sapiens
  misc_feature: Table A; Target 19974; HLA-C*07:06; CTCFL; ENSG00000124092; CTA
YASVEASKLK

SEQ ID NO: 19975 - protein, 9 aa, Homo sapiens
  misc_feature: Table A; Target 19975; HLA-A*31:01; CTCFL; ENSG00000124092; CTA
YCSAVFHER

SEQ ID NO: 19976 - protein, 9 aa, Homo sapiens
  misc_feature: Table A; Target 19976; HLA-A*33:01; CTCFL; ENSG00000124092; CTA
YCSAVFHER

SEQ ID NO: 19977 - protein, 9 aa, Homo sapiens
  misc_feature: Table A; Target 19977; HLA-A*33:03; CTCFL; ENSG00000124092; CTA
YCSAVFHER

SEQ ID NO: 19978 - protein, 9 aa, Homo sapiens
  misc_feature: Table A; Target 19978; HLA-A*68:01; CTCFL; ENSG00000124092; CTA
YCSAVFHER

SEQ ID NO: 19979 - protein, 10 aa, Homo sapiens
  misc_feature: Table A; Target 19979; HLA-A*01:01; CTCFL; ENSG00000124092; CTA
YCSAVFHERY

SEQ ID NO: 19980 - protein, 10 aa, Homo sapiens
  misc_feature: Table A; Target 19980; HLA-A*29:02; CTCFL; ENSG00000124092; CTA
YCSAVFHERY

SEQ ID NO: 19981 - protein, 10 aa, Homo sapiens
  misc_feature: Table A; Target 19981; HLA-B*38:01; CTCFL; ENSG00000124092; CTA
YHDANFIPTV

SEQ ID NO: 19982 - protein, 8 aa, Homo sapiens
  misc_feature: Table A; Target 19982; HLA-A*02:01; CTCFL; ENSG00000124092; CTA
YILTLQTV

SEQ ID NO: 19983 - protein, 8 aa, Homo sapiens
  misc_feature: Table A; Target 19983; HLA-B*08:01; CTCFL; ENSG00000124092; CTA
YILTLQTV

SEQ ID NO: 19984 - protein, 8 aa, Homo sapiens
  misc_feature: Table A; Target 19984; HLA-B*13:02; CTCFL; ENSG00000124092; CTA
YILTLQTV

SEQ ID NO: 19985 - protein, 8 aa, Homo sapiens
  misc_feature: Table A; Target 19985; HLA-B*51:01; CTCFL; ENSG00000124092; CTA
YILTLQTV

SEQ ID NO: 19986 - protein, 10 aa, Homo sapiens
  misc_feature: Table A; Target 19986; HLA-A*23:01; CTCFL; ENSG00000124092; CTA
YILTLQTVHF

SEQ ID NO: 19987 - protein, 10 aa, Homo sapiens
  misc_feature: Table A; Target 19987; HLA-A*24:02; CTCFL; ENSG00000124092; CTA
YILTLQTVHF

SEQ ID NO: 19988 - protein, 9 aa, Homo sapiens
  misc_feature: Table A; Target 19988; HLA-A*33:01; CTCFL; ENSG00000124092; CTA
YSAAELKCR

SEQ ID NO: 19989 - protein, 9 aa, Homo sapiens
  misc_feature: Table A; Target 19989; HLA-A*33:03; CTCFL; ENSG00000124092; CTA
YSAAELKCR

SEQ ID NO: 19990 - protein, 10 aa, Homo sapiens
  misc_feature: Table A; Target 19990; HLA-A*01:01; CTCFL; ENSG00000124092; CTA
YSAAELKCRY

SEQ ID NO: 19991 - protein, 10 aa, Homo sapiens
  misc_feature: Table A; Target 19991; HLA-A*29:02; CTCFL; ENSG00000124092; CTA
YSAAELKCRY

SEQ ID NO: 19992 - protein, 8 aa, Homo sapiens
  misc_feature: Table A; Target 19992; HLA-B*51:01; CTCFL; ENSG00000124092; CTA
YSPQEMEV

SEQ ID NO: 19993 - protein, 9 aa, Homo sapiens
  misc_feature: Table A; Target 19993; HLA-C*03:03; DCAF12L1; ENSG00000198889; CTA
AAADGEGPL

SEQ ID NO: 19994 - protein, 9 aa, Homo sapiens
  misc_feature: Table A; Target 19994; HLA-C*03:04; DCAF12L1; ENSG00000198889; CTA
AAADGEGPL

SEQ ID NO: 19995 - protein, 9 aa, Homo sapiens
  misc_feature: Table A; Target 19995; HLA-C*05:01; DCAF12L1; ENSG00000198889; CTA
AAADGEGPL

SEQ ID NO: 19996 - protein, 10 aa, Homo sapiens
  misc_feature: Table A; Target 19996; HLA-B*38:01; DCAF12L1; ENSG00000198889; CTA
AAADGEGPLL

SEQ ID NO: 19997 - protein, 10 aa, Homo sapiens
  misc_feature: Table A; Target 19997; HLA-B*40:01; DCAF12L1; ENSG00000198889; CTA
AAADGEGPLL

SEQ ID NO: 19998 - protein, 10 aa, Homo sapiens
  misc_feature: Table A; Target 19998; HLA-B*58:01; DCAF12L1; ENSG00000198889; CTA
AAADGEGPLL

SEQ ID NO: 19999 - protein, 10 aa, Homo sapiens
  misc_feature: Table A; Target 19999; HLA-C*03:03; DCAF12L1; ENSG00000198889; CTA
AAADGEGPLL

SEQ ID NO: 20000 - protein, 10 aa, Homo sapiens
  misc_feature: Table A; Target 20000; HLA-C*03:04; DCAF12L1; ENSG00000198889; CTA
AAADGEGPLL

SEQ ID NO: 20001 - protein, 10 aa, Homo sapiens
  misc_feature: Table A; Target 20001; HLA-C*05:01; DCAF12L1; ENSG00000198889; CTA
AAADGEGPLL

SEQ ID NO: 20002 - protein, 10 aa, Homo sapiens
  misc_feature: Table A; Target 20002; HLA-C*16:01; DCAF12L1; ENSG00000198889; CTA
AAADGEGPLL

SEQ ID NO: 20003 - protein, 10 aa, Homo sapiens
  misc_feature: Table A; Target 20003; HLA-C*16:04; DCAF12L1; ENSG00000198889; CTA
AAADGEGPLL

SEQ ID NO: 20004 - protein, 11 aa, Homo sapiens
  misc_feature: Table A; Target 20004; HLA-A*01:01; DCAF12L1; ENSG00000198889; CTA
AAADGEGPLLL

SEQ ID NO: 20005 - protein, 11 aa, Homo sapiens
  misc_feature: Table A; Target 20005; HLA-C*02:02; DCAF12L1; ENSG00000198889; CTA
AAADGEGPLLL

SEQ ID NO: 20006 - protein, 11 aa, Homo sapiens
  misc_feature: Table A; Target 20006; HLA-C*05:01; DCAF12L1; ENSG00000198889; CTA
AAADGEGPLLL

SEQ ID NO: 20007 - protein, 11 aa, Homo sapiens
  misc_feature: Table A; Target 20007; HLA-C*12:03; DCAF12L1; ENSG00000198889; CTA
AAADGEGPLLL

SEQ ID NO: 20008 - protein, 11 aa, Homo sapiens
  misc_feature: Table A; Target 20008; HLA-C*16:04; DCAF12L1; ENSG00000198889; CTA
AAADGEGPLLL

SEQ ID NO: 20009 - protein, 8 aa, Homo sapiens
  misc_feature: Table A; Target 20009; HLA-C*05:01; DCAF12L1; ENSG00000198889; CTA
AADGEGPL

SEQ ID NO: 20010 - protein, 9 aa, Homo sapiens
  misc_feature: Table A; Target 20010; HLA-A*02:07; DCAF12L1; ENSG00000198889; CTA
AADGEGPLL

SEQ ID NO: 20011 - protein, 9 aa, Homo sapiens
  misc_feature: Table A; Target 20011; HLA-A*32:01; DCAF12L1; ENSG00000198889; CTA
AADGEGPLL

SEQ ID NO: 20012 - protein, 9 aa, Homo sapiens
  misc_feature: Table A; Target 20012; HLA-B*35:03; DCAF12L1; ENSG00000198889; CTA
AADGEGPLL

SEQ ID NO: 20013 - protein, 9 aa, Homo sapiens
  misc_feature: Table A; Target 20013; HLA-B*38:01; DCAF12L1; ENSG00000198889; CTA
AADGEGPLL

SEQ ID NO: 20014 - protein, 9 aa, Homo sapiens
  misc_feature: Table A; Target 20014; HLA-B*39:01; DCAF12L1; ENSG00000198889; CTA
AADGEGPLL

SEQ ID NO: 20015 - protein, 9 aa, Homo sapiens
  misc_feature: Table A; Target 20015; HLA-B*40:01; DCAF12L1; ENSG00000198889; CTA
AADGEGPLL

SEQ ID NO: 20016 - protein, 9 aa, Homo sapiens
  misc_feature: Table A; Target 20016; HLA-C*03:03; DCAF12L1; ENSG00000198889; CTA
AADGEGPLL

SEQ ID NO: 20017 - protein, 9 aa, Homo sapiens
  misc_feature: Table A; Target 20017; HLA-C*03:04; DCAF12L1; ENSG00000198889; CTA
AADGEGPLL

SEQ ID NO: 20018 - protein, 9 aa, Homo sapiens
  misc_feature: Table A; Target 20018; HLA-C*05:01; DCAF12L1; ENSG00000198889; CTA
AADGEGPLL

SEQ ID NO: 20019 - protein, 10 aa, Homo sapiens
  misc_feature: Table A; Target 20019; HLA-A*01:01; DCAF12L1; ENSG00000198889; CTA
AADGEGPLLL

SEQ ID NO: 20020 - protein, 10 aa, Homo sapiens
  misc_feature: Table A; Target 20020; HLA-B*35:03; DCAF12L1; ENSG00000198889; CTA
AADGEGPLLL

SEQ ID NO: 20021 - protein, 10 aa, Homo sapiens
  misc_feature: Table A; Target 20021; HLA-B*38:01; DCAF12L1; ENSG00000198889; CTA
AADGEGPLLL

SEQ ID NO: 20022 - protein, 10 aa, Homo sapiens
  misc_feature: Table A; Target 20022; HLA-B*39:01; DCAF12L1; ENSG00000198889; CTA
AADGEGPLLL

SEQ ID NO: 20023 - protein, 10 aa, Homo sapiens
  misc_feature: Table A; Target 20023; HLA-B*40:01; DCAF12L1; ENSG00000198889; CTA
AADGEGPLLL

SEQ ID NO: 20024 - protein, 10 aa, Homo sapiens
  misc_feature: Table A; Target 20024; HLA-C*03:03; DCAF12L1; ENSG00000198889; CTA
AADGEGPLLL

SEQ ID NO: 20025 - protein, 10 aa, Homo sapiens
  misc_feature: Table A; Target 20025; HLA-C*03:04; DCAF12L1; ENSG00000198889; CTA
AADGEGPLLL

SEQ ID NO: 20026 - protein, 10 aa, Homo sapiens
  misc_feature: Table A; Target 20026; HLA-C*04:01; DCAF12L1; ENSG00000198889; CTA
AADGEGPLLL

SEQ ID NO: 20027 - protein, 10 aa, Homo sapiens
  misc_feature: Table A; Target 20027; HLA-C*05:01; DCAF12L1; ENSG00000198889; CTA
AADGEGPLLL

SEQ ID NO: 20028 - protein, 10 aa, Homo sapiens
  misc_feature: Table A; Target 20028; HLA-C*07:04; DCAF12L1; ENSG00000198889; CTA
AADGEGPLLL

SEQ ID NO: 20029 - protein, 11 aa, Homo sapiens
  misc_feature: Table A; Target 20029; HLA-A*01:01; DCAF12L1; ENSG00000198889; CTA
AADGEGPLLLK

SEQ ID NO: 20030 - protein, 11 aa, Homo sapiens
  misc_feature: Table A; Target 20030; HLA-A*03:01; DCAF12L1; ENSG00000198889; CTA
AADGEGPLLLK

SEQ ID NO: 20031 - protein, 11 aa, Homo sapiens
  misc_feature: Table A; Target 20031; HLA-A*03:02; DCAF12L1; ENSG00000198889; CTA
AADGEGPLLLK

SEQ ID NO: 20032 - protein, 11 aa, Homo sapiens
  misc_feature: Table A; Target 20032; HLA-A*11:01; DCAF12L1; ENSG00000198889; CTA
AADGEGPLLLK

SEQ ID NO: 20033 - protein, 11 aa, Homo sapiens
  misc_feature: Table A; Target 20033; HLA-B*27:02; DCAF12L1; ENSG00000198889; CTA
AADGEGPLLLK

SEQ ID NO: 20034 - protein, 11 aa, Homo sapiens
  misc_feature: Table A; Target 20034; HLA-C*05:01; DCAF12L1; ENSG00000198889; CTA
AADGEGPLLLK

SEQ ID NO: 20035 - protein, 11 aa, Homo sapiens
  misc_feature: Table A; Target 20035; HLA-A*30:01; DCAF12L1; ENSG00000198889; CTA
ADAESSPSQGL

SEQ ID NO: 20036 - protein, 8 aa, Homo sapiens
  misc_feature: Table A; Target 20036; HLA-B*37:01; DCAF12L1; ENSG00000198889; CTA
ADGEGPLL

SEQ ID NO: 20037 - protein, 8 aa, Homo sapiens
  misc_feature: Table A; Target 20037; HLA-B*40:01; DCAF12L1; ENSG00000198889; CTA
ADGEGPLL

SEQ ID NO: 20038 - protein, 9 aa, Homo sapiens
  misc_feature: Table A; Target 20038; HLA-A*30:01; DCAF12L1; ENSG00000198889; CTA
ADGEGPLLL

SEQ ID NO: 20039 - protein, 9 aa, Homo sapiens
  misc_feature: Table A; Target 20039; HLA-B*37:01; DCAF12L1; ENSG00000198889; CTA
ADGEGPLLL

SEQ ID NO: 20040 - protein, 9 aa, Homo sapiens
  misc_feature: Table A; Target 20040; HLA-B*40:01; DCAF12L1; ENSG00000198889; CTA
ADGEGPLLL

SEQ ID NO: 20041 - protein, 9 aa, Homo sapiens
  misc_feature: Table A; Target 20041; HLA-B*44:02; DCAF12L1; ENSG00000198889; CTA
ADGEGPLLL

SEQ ID NO: 20042 - protein, 10 aa, Homo sapiens
  misc_feature: Table A; Target 20042; HLA-A*03:01; DCAF12L1; ENSG00000198889; CTA
ADGEGPLLLK

SEQ ID NO: 20043 - protein, 10 aa, Homo sapiens
  misc_feature: Table A; Target 20043; HLA-A*11:01; DCAF12L1; ENSG00000198889; CTA
ADGEGPLLLK

SEQ ID NO: 20044 - protein, 10 aa, Homo sapiens
  misc_feature: Table A; Target 20044; HLA-B*27:02; DCAF12L1; ENSG00000198889; CTA
ADGEGPLLLK

SEQ ID NO: 20045 - protein, 9 aa, Homo sapiens
  misc_feature: Table A; Target 20045; HLA-A*30:01; DCAF12L1; ENSG00000198889; CTA
AESSPSQGL

SEQ ID NO: 20046 - protein, 9 aa, Homo sapiens
  misc_feature: Table A; Target 20046; HLA-B*13:02; DCAF12L1; ENSG00000198889; CTA
AESSPSQGL

SEQ ID NO: 20047 - protein, 9 aa, Homo sapiens
  misc_feature: Table A; Target 20047; HLA-B*27:02; DCAF12L1; ENSG00000198889; CTA
AESSPSQGL

SEQ ID NO: 20048 - protein, 9 aa, Homo sapiens
  misc_feature: Table A; Target 20048; HLA-B*27:05; DCAF12L1; ENSG00000198889; CTA
AESSPSQGL

SEQ ID NO: 20049 - protein, 9 aa, Homo sapiens
  misc_feature: Table A; Target 20049; HLA-B*37:01; DCAF12L1; ENSG00000198889; CTA
AESSPSQGL

SEQ ID NO: 20050 - protein, 9 aa, Homo sapiens
  misc_feature: Table A; Target 20050; HLA-B*38:01; DCAF12L1; ENSG00000198889; CTA
AESSPSQGL

SEQ ID NO: 20051 - protein, 9 aa, Homo sapiens
  misc_feature: Table A; Target 20051; HLA-B*39:01; DCAF12L1; ENSG00000198889; CTA
AESSPSQGL

SEQ ID NO: 20052 - protein, 9 aa, Homo sapiens
  misc_feature: Table A; Target 20052; HLA-B*40:01; DCAF12L1; ENSG00000198889; CTA
AESSPSQGL

SEQ ID NO: 20053 - protein, 9 aa, Homo sapiens
  misc_feature: Table A; Target 20053; HLA-B*40:02; DCAF12L1; ENSG00000198889; CTA
AESSPSQGL

SEQ ID NO: 20054 - protein, 9 aa, Homo sapiens
  misc_feature: Table A; Target 20054; HLA-B*44:02; DCAF12L1; ENSG00000198889; CTA
AESSPSQGL

SEQ ID NO: 20055 - protein, 9 aa, Homo sapiens
  misc_feature: Table A; Target 20055; HLA-B*44:03; DCAF12L1; ENSG00000198889; CTA
AESSPSQGL

SEQ ID NO: 20056 - protein, 9 aa, Homo sapiens
  misc_feature: Table A; Target 20056; HLA-B*49:01; DCAF12L1; ENSG00000198889; CTA
AESSPSQGL

SEQ ID NO: 20057 - protein, 9 aa, Homo sapiens
  misc_feature: Table A; Target 20057; HLA-C*03:04; DCAF12L1; ENSG00000198889; CTA
AESSPSQGL

SEQ ID NO: 20058 - protein, 9 aa, Homo sapiens
  misc_feature: Table A; Target 20058; HLA-C*16:04; DCAF12L1; ENSG00000198889; CTA
AESSPSQGL

SEQ ID NO: 20059 - protein, 10 aa, Homo sapiens
  misc_feature: Table A; Target 20059; HLA-B*49:01; DCAF12L1; ENSG00000198889; CTA
AESSPSQGLA

SEQ ID NO: 20060 - protein, 11 aa, Homo sapiens
  misc_feature: Table A; Target 20060; HLA-A*30:01; DCAF12L1; ENSG00000198889; CTA
AESSPSQGLAA

SEQ ID NO: 20061 - protein, 11 aa, Homo sapiens
  misc_feature: Table A; Target 20061; HLA-B*40:01; DCAF12L1; ENSG00000198889; CTA
AESSPSQGLAA

SEQ ID NO: 20062 - protein, 11 aa, Homo sapiens
  misc_feature: Table A; Target 20062; HLA-B*44:03; DCAF12L1; ENSG00000198889; CTA
AESSPSQGLAA

SEQ ID NO: 20063 - protein, 11 aa, Homo sapiens
  misc_feature: Table A; Target 20063; HLA-B*49:01; DCAF12L1; ENSG00000198889; CTA
AESSPSQGLAA

SEQ ID NO: 20064 - protein, 11 aa, Homo sapiens
  misc_feature: Table A; Target 20064; HLA-C*16:04; DCAF12L1; ENSG00000198889; CTA
AESSPSQGLAA

SEQ ID NO: 20065 - protein, 9 aa, Homo sapiens
  misc_feature: Table A; Target 20065; HLA-A*32:01; DCAF12L1; ENSG00000198889; CTA
AGGPLPAGL

SEQ ID NO: 20066 - protein, 9 aa, Homo sapiens
  misc_feature: Table A; Target 20066; HLA-B*27:05; DCAF12L1; ENSG00000198889; CTA
AGGPLPAGL

SEQ ID NO: 20067 - protein, 9 aa, Homo sapiens
  misc_feature: Table A; Target 20067; HLA-B*37:01; DCAF12L1; ENSG00000198889; CTA
AGGPLPAGL

SEQ ID NO: 20068 - protein, 9 aa, Homo sapiens
  misc_feature: Table A; Target 20068; HLA-C*07:02; DCAF12L1; ENSG00000198889; CTA
AGGPLPAGL

SEQ ID NO: 20069 - protein, 9 aa, Homo sapiens
  misc_feature: Table A; Target 20069; HLA-C*07:04; DCAF12L1; ENSG00000198889; CTA
AGGPLPAGL

SEQ ID NO: 20070 - protein, 9 aa, Homo sapiens
  misc_feature: Table A; Target 20070; HLA-C*14:02; DCAF12L1; ENSG00000198889; CTA
AGGPLPAGL

SEQ ID NO: 20071 - protein, 9 aa, Homo sapiens
  misc_feature: Table A; Target 20071; HLA-C*16:02; DCAF12L1; ENSG00000198889; CTA
AGGPLPAGL

SEQ ID NO: 20072 - protein, 9 aa, Homo sapiens
  misc_feature: Table A; Target 20072; HLA-B*07:02; DCAF12L1; ENSG00000198889; CTA
AGSALSRLL

SEQ ID NO: 20073 - protein, 9 aa, Homo sapiens
  misc_feature: Table A; Target 20073; HLA-C*06:02; DCAF12L1; ENSG00000198889; CTA
AGSALSRLL

SEQ ID NO: 20074 - protein, 9 aa, Homo sapiens
  misc_feature: Table A; Target 20074; HLA-C*07:02; DCAF12L1; ENSG00000198889; CTA
AGSALSRLL

SEQ ID NO: 20075 - protein, 9 aa, Homo sapiens
  misc_feature: Table A; Target 20075; HLA-C*12:03; DCAF12L1; ENSG00000198889; CTA
AGSALSRLL

SEQ ID NO: 20076 - protein, 9 aa, Homo sapiens
  misc_feature: Table A; Target 20076; HLA-C*16:01; DCAF12L1; ENSG00000198889; CTA
AGSALSRLL

SEQ ID NO: 20077 - protein, 9 aa, Homo sapiens
  misc_feature: Table A; Target 20077; HLA-C*16:02; DCAF12L1; ENSG00000198889; CTA
AGSALSRLL

SEQ ID NO: 20078 - protein, 8 aa, Homo sapiens
  misc_feature: Table A; Target 20078; HLA-A*31:01; DCAF12L1; ENSG00000198889; CTA
AIINPSNR

SEQ ID NO: 20079 - protein, 9 aa, Homo sapiens
  misc_feature: Table A; Target 20079; HLA-A*03:01; DCAF12L1; ENSG00000198889; CTA
AIINPSNRK

SEQ ID NO: 20080 - protein, 9 aa, Homo sapiens
  misc_feature: Table A; Target 20080; HLA-A*03:02; DCAF12L1; ENSG00000198889; CTA
AIINPSNRK

SEQ ID NO: 20081 - protein, 9 aa, Homo sapiens
  misc_feature: Table A; Target 20081; HLA-A*11:01; DCAF12L1; ENSG00000198889; CTA
AIINPSNRK

SEQ ID NO: 20082 - protein, 11 aa, Homo sapiens
  misc_feature: Table A; Target 20082; HLA-A*31:01; DCAF12L1; ENSG00000198889; CTA
AIINPSNRKVR

SEQ ID NO: 20083 - protein, 9 aa, Homo sapiens
  misc_feature: Table A; Target 20083; HLA-B*13:02; DCAF12L1; ENSG00000198889; CTA
AQDQQGCGI

SEQ ID NO: 20084 - protein, 9 aa, Homo sapiens
  misc_feature: Table A; Target 20084; HLA-B*38:01; DCAF12L1; ENSG00000198889; CTA
AQDQQGCGI

SEQ ID NO: 20085 - protein, 11 aa, Homo sapiens
  misc_feature: Table A; Target 20085; HLA-A*03:01; DCAF12L1; ENSG00000198889; CTA
ATLESSSGPAR

SEQ ID NO: 20086 - protein, 11 aa, Homo sapiens
  misc_feature: Table A; Target 20086; HLA-A*03:02; DCAF12L1; ENSG00000198889; CTA
ATLESSSGPAR

SEQ ID NO: 20087 - protein, 11 aa, Homo sapiens
  misc_feature: Table A; Target 20087; HLA-A*11:01; DCAF12L1; ENSG00000198889; CTA
ATLESSSGPAR

SEQ ID NO: 20088 - protein, 11 aa, Homo sapiens
  misc_feature: Table A; Target 20088; HLA-A*31:01; DCAF12L1; ENSG00000198889; CTA
ATLESSSGPAR

SEQ ID NO: 20089 - protein, 11 aa, Homo sapiens
  misc_feature: Table A; Target 20089; HLA-A*33:03; DCAF12L1; ENSG00000198889; CTA
ATLESSSGPAR

SEQ ID NO: 20090 - protein, 11 aa, Homo sapiens
  misc_feature: Table A; Target 20090; HLA-A*68:01; DCAF12L1; ENSG00000198889; CTA
ATLESSSGPAR

SEQ ID NO: 20091 - protein, 11 aa, Homo sapiens
  misc_feature: Table A; Target 20091; HLA-B*57:01; DCAF12L1; ENSG00000198889; CTA
ATLESSSGPAR

SEQ ID NO: 20092 - protein, 11 aa, Homo sapiens
  misc_feature: Table A; Target 20092; HLA-C*07:06; DCAF12L1; ENSG00000198889; CTA
ATLESSSGPAR

SEQ ID NO: 20093 - protein, 9 aa, Homo sapiens
  misc_feature: Table A; Target 20093; HLA-A*01:01; DCAF12L1; ENSG00000198889; CTA
ATYRSMAHY

SEQ ID NO: 20094 - protein, 9 aa, Homo sapiens
  misc_feature: Table A; Target 20094; HLA-A*03:01; DCAF12L1; ENSG00000198889; CTA
ATYRSMAHY

SEQ ID NO: 20095 - protein, 9 aa, Homo sapiens
  misc_feature: Table A; Target 20095; HLA-A*25:01; DCAF12L1; ENSG00000198889; CTA
ATYRSMAHY

SEQ ID NO: 20096 - protein, 9 aa, Homo sapiens
  misc_feature: Table A; Target 20096; HLA-A*29:02; DCAF12L1; ENSG00000198889; CTA
ATYRSMAHY

SEQ ID NO: 20097 - protein, 9 aa, Homo sapiens
  misc_feature: Table A; Target 20097; HLA-A*30:02; DCAF12L1; ENSG00000198889; CTA
ATYRSMAHY

SEQ ID NO: 20098 - protein, 10 aa, Homo sapiens
  misc_feature: Table A; Target 20098; HLA-A*03:01; DCAF12L1; ENSG00000198889; CTA
ATYRSMAHYL

SEQ ID NO: 20099 - protein, 10 aa, Homo sapiens
  misc_feature: Table A; Target 20099; HLA-A*32:01; DCAF12L1; ENSG00000198889; CTA
AVGSHSHVSF

SEQ ID NO: 20100 - protein, 10 aa, Homo sapiens
  misc_feature: Table A; Target 20100; HLA-C*07:04; DCAF12L1; ENSG00000198889; CTA
AVGSHSHVSF

SEQ ID NO: 20101 - protein, 11 aa, Homo sapiens
  misc_feature: Table A; Target 20101; HLA-B*44:02; DCAF12L1; ENSG00000198889; CTA
AVSLDGYFHLW

SEQ ID NO: 20102 - protein, 11 aa, Homo sapiens
  misc_feature: Table A; Target 20102; HLA-B*57:01; DCAF12L1; ENSG00000198889; CTA
AVSLDGYFHLW

SEQ ID NO: 20103 - protein, 11 aa, Homo sapiens
  misc_feature: Table A; Target 20103; HLA-A*30:02; DCAF12L1; ENSG00000198889; CTA
AWHSEVGLPVY

SEQ ID NO: 20104 - protein, 9 aa, Homo sapiens
  misc_feature: Table A; Target 20104; HLA-C*04:01; DCAF12L1; ENSG00000198889; CTA
AWLSDTVAV

SEQ ID NO: 20105 - protein, 10 aa, Homo sapiens
  misc_feature: Table A; Target 20105; HLA-B*35:03; DCAF12L1; ENSG00000198889; CTA
DAESSPSQGL

SEQ ID NO: 20106 - protein, 10 aa, Homo sapiens
  misc_feature: Table A; Target 20106; HLA-C*05:01; DCAF12L1; ENSG00000198889; CTA
DAESSPSQGL

SEQ ID NO: 20107 - protein, 8 aa, Homo sapiens
  misc_feature: Table A; Target 20107; HLA-B*18:01; DCAF12L1; ENSG00000198889; CTA
DDMSVYAV

SEQ ID NO: 20108 - protein, 8 aa, Homo sapiens
  misc_feature: Table A; Target 20108; HLA-B*37:01; DCAF12L1; ENSG00000198889; CTA
DDMSVYAV

SEQ ID NO: 20109 - protein, 8 aa, Homo sapiens
  misc_feature: Table A; Target 20109; HLA-B*40:02; DCAF12L1; ENSG00000198889; CTA
DDMSVYAV

SEQ ID NO: 20110 - protein, 8 aa, Homo sapiens
  misc_feature: Table A; Target 20110; HLA-C*05:01; DCAF12L1; ENSG00000198889; CTA
DGEGPLLL

SEQ ID NO: 20111 - protein, 9 aa, Homo sapiens
  misc_feature: Table A; Target 20111; HLA-A*11:01; DCAF12L1; ENSG00000198889; CTA
DGEGPLLLK

SEQ ID NO: 20112 - protein, 9 aa, Homo sapiens
  misc_feature: Table A; Target 20112; HLA-A*33:01; DCAF12L1; ENSG00000198889; CTA
DGEGPLLLK

SEQ ID NO: 20113 - protein, 9 aa, Homo sapiens
  misc_feature: Table A; Target 20113; HLA-A*68:01; DCAF12L1; ENSG00000198889; CTA
DGEGPLLLK

SEQ ID NO: 20114 - protein, 9 aa, Homo sapiens
  misc_feature: Table A; Target 20114; HLA-B*27:02; DCAF12L1; ENSG00000198889; CTA
DGEGPLLLK

SEQ ID NO: 20115 - protein, 10 aa, Homo sapiens
  misc_feature: Table A; Target 20115; HLA-A*33:01; DCAF12L1; ENSG00000198889; CTA
DGEGPLLLKR

SEQ ID NO: 20116 - protein, 10 aa, Homo sapiens
  misc_feature: Table A; Target 20116; HLA-A*68:01; DCAF12L1; ENSG00000198889; CTA
DGEGPLLLKR

SEQ ID NO: 20117 - protein, 10 aa, Homo sapiens
  misc_feature: Table A; Target 20117; HLA-C*07:06; DCAF12L1; ENSG00000198889; CTA
DGEGPLLLKR

SEQ ID NO: 20118 - protein, 9 aa, Homo sapiens
  misc_feature: Table A; Target 20118; HLA-B*08:01; DCAF12L1; ENSG00000198889; CTA
DGELRGYAV

SEQ ID NO: 20119 - protein, 9 aa, Homo sapiens
  misc_feature: Table A; Target 20119; HLA-B*51:01; DCAF12L1; ENSG00000198889; CTA
DGELRGYAV

SEQ ID NO: 20120 - protein, 11 aa, Homo sapiens
  misc_feature: Table A; Target 20120; HLA-A*33:01; DCAF12L1; ENSG00000198889; CTA
DGELRGYAVQR

SEQ ID NO: 20121 - protein, 10 aa, Homo sapiens
  misc_feature: Table A; Target 20121; HLA-A*33:01; DCAF12L1; ENSG00000198889; CTA
DLRQDQQNIR

SEQ ID NO: 20122 - protein, 11 aa, Homo sapiens
  misc_feature: Table A; Target 20122; HLA-A*33:01; DCAF12L1; ENSG00000198889; CTA
DQQNIRPLCSR

SEQ ID NO: 20123 - protein, 9 aa, Homo sapiens
  misc_feature: Table A; Target 20123; HLA-A*26:01; DCAF12L1; ENSG00000198889; CTA
DTVAVSGSR

SEQ ID NO: 20124 - protein, 9 aa, Homo sapiens
  misc_feature: Table A; Target 20124; HLA-A*33:01; DCAF12L1; ENSG00000198889; CTA
DTVAVSGSR

SEQ ID NO: 20125 - protein, 9 aa, Homo sapiens
  misc_feature: Table A; Target 20125; HLA-A*33:03; DCAF12L1; ENSG00000198889; CTA
DTVAVSGSR

SEQ ID NO: 20126 - protein, 9 aa, Homo sapiens
  misc_feature: Table A; Target 20126; HLA-A*68:01; DCAF12L1; ENSG00000198889; CTA
DTVAVSGSR

SEQ ID NO: 20127 - protein, 9 aa, Homo sapiens
  misc_feature: Table A; Target 20127; HLA-C*07:06; DCAF12L1; ENSG00000198889; CTA
DTVAVSGSR

SEQ ID NO: 20128 - protein, 9 aa, Homo sapiens
  misc_feature: Table A; Target 20128; HLA-A*26:01; DCAF12L1; ENSG00000198889; CTA
DTVAWHSEV

SEQ ID NO: 20129 - protein, 9 aa, Homo sapiens
  misc_feature: Table A; Target 20129; HLA-A*68:02; DCAF12L1; ENSG00000198889; CTA
DTVAWHSEV

SEQ ID NO: 20130 - protein, 9 aa, Homo sapiens
  misc_feature: Table A; Target 20130; HLA-B*51:01; DCAF12L1; ENSG00000198889; CTA
DVEAIPRAI

SEQ ID NO: 20131 - protein, 9 aa, Homo sapiens
  misc_feature: Table A; Target 20131; HLA-A*33:01; DCAF12L1; ENSG00000198889; CTA
DVESGHIAR

SEQ ID NO: 20132 - protein, 9 aa, Homo sapiens
  misc_feature: Table A; Target 20132; HLA-A*33:03; DCAF12L1; ENSG00000198889; CTA
DVESGHIAR

SEQ ID NO: 20133 - protein, 9 aa, Homo sapiens
  misc_feature: Table A; Target 20133; HLA-A*68:01; DCAF12L1; ENSG00000198889; CTA
DVESGHIAR

SEQ ID NO: 20134 - protein, 9 aa, Homo sapiens
  misc_feature: Table A; Target 20134; HLA-C*07:06; DCAF12L1; ENSG00000198889; CTA
DVESGHIAR

SEQ ID NO: 20135 - protein, 10 aa, Homo sapiens
  misc_feature: Table A; Target 20135; HLA-A*25:01; DCAF12L1; ENSG00000198889; CTA
DVESGHIARI

SEQ ID NO: 20136 - protein, 10 aa, Homo sapiens
  misc_feature: Table A; Target 20136; HLA-A*26:01; DCAF12L1; ENSG00000198889; CTA
DVESGHIARI

SEQ ID NO: 20137 - protein, 11 aa, Homo sapiens
  misc_feature: Table A; Target 20137; HLA-A*33:01; DCAF12L1; ENSG00000198889; CTA
DVRAQKFLEER

SEQ ID NO: 20138 - protein, 8 aa, Homo sapiens
  misc_feature: Table A; Target 20138; HLA-B*08:01; DCAF12L1; ENSG00000198889; CTA
EAIPRAII

SEQ ID NO: 20139 - protein, 8 aa, Homo sapiens
  misc_feature: Table A; Target 20139; HLA-B*51:01; DCAF12L1; ENSG00000198889; CTA
EAIPRAII

SEQ ID NO: 20140 - protein, 8 aa, Homo sapiens
  misc_feature: Table A; Target 20140; HLA-B*18:01; DCAF12L1; ENSG00000198889; CTA
EERASATL

SEQ ID NO: 20141 - protein, 9 aa, Homo sapiens
  misc_feature: Table A; Target 20141; HLA-C*01:02; DCAF12L1; ENSG00000198889; CTA
EGGTGVRSL

SEQ ID NO: 20142 - protein, 10 aa, Homo sapiens
  misc_feature: Table A; Target 20142; HLA-A*01:01; DCAF12L1; ENSG00000198889; CTA
ELGAVSLDGY

SEQ ID NO: 20143 - protein, 9 aa, Homo sapiens
  misc_feature: Table A; Target 20143; HLA-A*25:01; DCAF12L1; ENSG00000198889; CTA
ELGTVNKVF

SEQ ID NO: 20144 - protein, 9 aa, Homo sapiens
  misc_feature: Table A; Target 20144; HLA-B*44:02; DCAF12L1; ENSG00000198889; CTA
ELGTVNKVF

SEQ ID NO: 20145 - protein, 9 aa, Homo sapiens
  misc_feature: Table A; Target 20145; HLA-B*44:03; DCAF12L1; ENSG00000198889; CTA
ELGTVNKVF

SEQ ID NO: 20146 - protein, 9 aa, Homo sapiens
  misc_feature: Table A; Target 20146; HLA-A*02:04; DCAF12L1; ENSG00000198889; CTA
ELNPSKTLL

SEQ ID NO: 20147 - protein, 9 aa, Homo sapiens
  misc_feature: Table A; Target 20147; HLA-A*23:01; DCAF12L1; ENSG00000198889; CTA
ELNPSKTLL

SEQ ID NO: 20148 - protein, 9 aa, Homo sapiens
  misc_feature: Table A; Target 20148; HLA-A*24:02; DCAF12L1; ENSG00000198889; CTA
ELNPSKTLL

SEQ ID NO: 20149 - protein, 9 aa, Homo sapiens
  misc_feature: Table A; Target 20149; HLA-A*25:01; DCAF12L1; ENSG00000198889; CTA
ELNPSKTLL

SEQ ID NO: 20150 - protein, 9 aa, Homo sapiens
  misc_feature: Table A; Target 20150; HLA-A*26:01; DCAF12L1; ENSG00000198889; CTA
ELNPSKTLL

SEQ ID NO: 20151 - protein, 9 aa, Homo sapiens
  misc_feature: Table A; Target 20151; HLA-A*32:01; DCAF12L1; ENSG00000198889; CTA
ELNPSKTLL

SEQ ID NO: 20152 - protein, 9 aa, Homo sapiens
  misc_feature: Table A; Target 20152; HLA-B*07:02; DCAF12L1; ENSG00000198889; CTA
ELNPSKTLL

SEQ ID NO: 20153 - protein, 9 aa, Homo sapiens
  misc_feature: Table A; Target 20153; HLA-B*08:01; DCAF12L1; ENSG00000198889; CTA
ELNPSKTLL

SEQ ID NO: 20154 - protein, 9 aa, Homo sapiens
  misc_feature: Table A; Target 20154; HLA-B*15:01; DCAF12L1; ENSG00000198889; CTA
ELNPSKTLL

SEQ ID NO: 20155 - protein, 9 aa, Homo sapiens
  misc_feature: Table A; Target 20155; HLA-B*37:01; DCAF12L1; ENSG00000198889; CTA
ELNPSKTLL

SEQ ID NO: 20156 - protein, 9 aa, Homo sapiens
  misc_feature: Table A; Target 20156; HLA-B*38:01; DCAF12L1; ENSG00000198889; CTA
ELNPSKTLL

SEQ ID NO: 20157 - protein, 9 aa, Homo sapiens
  misc_feature: Table A; Target 20157; HLA-C*07:04; DCAF12L1; ENSG00000198889; CTA
ELNPSKTLL

SEQ ID NO: 20158 - protein, 9 aa, Homo sapiens
  misc_feature: Table A; Target 20158; HLA-A*33:01; DCAF12L1; ENSG00000198889; CTA
ELRGYAVQR

SEQ ID NO: 20159 - protein, 9 aa, Homo sapiens
  misc_feature: Table A; Target 20159; HLA-A*33:03; DCAF12L1; ENSG00000198889; CTA
ELRGYAVQR

SEQ ID NO: 20160 - protein, 9 aa, Homo sapiens
  misc_feature: Table A; Target 20160; HLA-A*68:01; DCAF12L1; ENSG00000198889; CTA
ELRGYAVQR

SEQ ID NO: 20161 - protein, 9 aa, Homo sapiens
  misc_feature: Table A; Target 20161; HLA-A*26:01; DCAF12L1; ENSG00000198889; CTA
ENPNSLAIY

SEQ ID NO: 20162 - protein, 8 aa, Homo sapiens
  misc_feature: Table A; Target 20162; HLA-A*33:03; DCAF12L1; ENSG00000198889; CTA
ESSSGPAR

SEQ ID NO: 20163 - protein, 9 aa, Homo sapiens
  misc_feature: Table A; Target 20163; HLA-A*33:03; DCAF12L1; ENSG00000198889; CTA
ESSSGPARR

SEQ ID NO: 20164 - protein, 9 aa, Homo sapiens
  misc_feature: Table A; Target 20164; HLA-A*68:01; DCAF12L1; ENSG00000198889; CTA
ESSSGPARR

SEQ ID NO: 20165 - protein, 8 aa, Homo sapiens
  misc_feature: Table A; Target 20165; HLA-A*26:01; DCAF12L1; ENSG00000198889; CTA
EVFPNALY

SEQ ID NO: 20166 - protein, 9 aa, Homo sapiens
  misc_feature: Table A; Target 20166; HLA-A*26:01; DCAF12L1; ENSG00000198889; CTA
EVFPNALYT

SEQ ID NO: 20167 - protein, 10 aa, Homo sapiens
  misc_feature: Table A; Target 20167; HLA-A*25:01; DCAF12L1; ENSG00000198889; CTA
EVFPNALYTH

SEQ ID NO: 20168 - protein, 10 aa, Homo sapiens
  misc_feature: Table A; Target 20168; HLA-A*26:01; DCAF12L1; ENSG00000198889; CTA
EVFPNALYTH

SEQ ID NO: 20169 - protein, 10 aa, Homo sapiens
  misc_feature: Table A; Target 20169; HLA-A*68:02; DCAF12L1; ENSG00000198889; CTA
EVFPNALYTH

SEQ ID NO: 20170 - protein, 9 aa, Homo sapiens
  misc_feature: Table A; Target 20170; HLA-A*26:01; DCAF12L1; ENSG00000198889; CTA
EVGGWGPAR

SEQ ID NO: 20171 - protein, 9 aa, Homo sapiens
  misc_feature: Table A; Target 20171; HLA-A*33:01; DCAF12L1; ENSG00000198889; CTA
EVGGWGPAR

SEQ ID NO: 20172 - protein, 9 aa, Homo sapiens
  misc_feature: Table A; Target 20172; HLA-A*33:03; DCAF12L1; ENSG00000198889; CTA
EVGGWGPAR

SEQ ID NO: 20173 - protein, 9 aa, Homo sapiens
  misc_feature: Table A; Target 20173; HLA-A*68:01; DCAF12L1; ENSG00000198889; CTA
EVGGWGPAR

SEQ ID NO: 20174 - protein, 9 aa, Homo sapiens
  misc_feature: Table A; Target 20174; HLA-C*07:06; DCAF12L1; ENSG00000198889; CTA
EVGGWGPAR

SEQ ID NO: 20175 - protein, 9 aa, Homo sapiens
  misc_feature: Table A; Target 20175; HLA-A*33:03; DCAF12L1; ENSG00000198889; CTA
EVGLPVYAH

SEQ ID NO: 20176 - protein, 10 aa, Homo sapiens
  misc_feature: Table A; Target 20176; HLA-A*68:02; DCAF12L1; ENSG00000198889; CTA
EVGLPVYAHI

SEQ ID NO: 20177 - protein, 8 aa, Homo sapiens
  misc_feature: Table A; Target 20177; HLA-C*07:01; DCAF12L1; ENSG00000198889; CTA
FDGELRGY

SEQ ID NO: 20178 - protein, 8 aa, Homo sapiens
  misc_feature: Table A; Target 20178; HLA-C*16:01; DCAF12L1; ENSG00000198889; CTA
FDGELRGY

SEQ ID NO: 20179 - protein, 10 aa, Homo sapiens
  misc_feature: Table A; Target 20179; HLA-A*02:01; DCAF12L1; ENSG00000198889; CTA
FLEERASATL

SEQ ID NO: 20180 - protein, 10 aa, Homo sapiens
  misc_feature: Table A; Target 20180; HLA-A*02:03; DCAF12L1; ENSG00000198889; CTA
FLEERASATL

SEQ ID NO: 20181 - protein, 10 aa, Homo sapiens
  misc_feature: Table A; Target 20181; HLA-A*02:07; DCAF12L1; ENSG00000198889; CTA
FLEERASATL

SEQ ID NO: 20182 - protein, 9 aa, Homo sapiens
  misc_feature: Table A; Target 20182; HLA-B*54:01; DCAF12L1; ENSG00000198889; CTA
FPNALYTHC

SEQ ID NO: 20183 - protein, 9 aa, Homo sapiens
  misc_feature: Table A; Target 20183; HLA-B*56:01; DCAF12L1; ENSG00000198889; CTA
FPNALYTHC

SEQ ID NO: 20184 - protein, 10 aa, Homo sapiens
  misc_feature: Table A; Target 20184; HLA-B*35:01; DCAF12L1; ENSG00000198889; CTA
FPNALYTHCY

SEQ ID NO: 20185 - protein, 9 aa, Homo sapiens
  misc_feature: Table A; Target 20185; HLA-A*01:01; DCAF12L1; ENSG00000198889; CTA
FRDNVCLTY

SEQ ID NO: 20186 - protein, 9 aa, Homo sapiens
  misc_feature: Table A; Target 20186; HLA-A*02:01; DCAF12L1; ENSG00000198889; CTA
FVAGGPLPA

SEQ ID NO: 20187 - protein, 9 aa, Homo sapiens
  misc_feature: Table A; Target 20187; HLA-A*02:03; DCAF12L1; ENSG00000198889; CTA
FVAGGPLPA

SEQ ID NO: 20188 - protein, 9 aa, Homo sapiens
  misc_feature: Table A; Target 20188; HLA-B*13:02; DCAF12L1; ENSG00000198889; CTA
FVAGGPLPA

SEQ ID NO: 20189 - protein, 9 aa, Homo sapiens
  misc_feature: Table A; Target 20189; HLA-B*54:01; DCAF12L1; ENSG00000198889; CTA
FVAGGPLPA

SEQ ID NO: 20190 - protein, 9 aa, Homo sapiens
  misc_feature: Table A; Target 20190; HLA-B*56:01; DCAF12L1; ENSG00000198889; CTA
FVAGGPLPA

SEQ ID NO: 20191 - protein, 9 aa, Homo sapiens
  misc_feature: Table A; Target 20191; HLA-C*02:02; DCAF12L1; ENSG00000198889; CTA
FVAGGPLPA

SEQ ID NO: 20192 - protein, 9 aa, Homo sapiens
  misc_feature: Table A; Target 20192; HLA-C*03:03; DCAF12L1; ENSG00000198889; CTA
FVAGGPLPA

SEQ ID NO: 20193 - protein, 9 aa, Homo sapiens
  misc_feature: Table A; Target 20193; HLA-C*03:04; DCAF12L1; ENSG00000198889; CTA
FVAGGPLPA

SEQ ID NO: 20194 - protein, 9 aa, Homo sapiens
  misc_feature: Table A; Target 20194; HLA-C*07:04; DCAF12L1; ENSG00000198889; CTA
FVAGGPLPA

SEQ ID NO: 20195 - protein, 10 aa, Homo sapiens
  misc_feature: Table A; Target 20195; HLA-A*25:01; DCAF12L1; ENSG00000198889; CTA
FVAGGPLPAG

SEQ ID NO: 20196 - protein, 10 aa, Homo sapiens
  misc_feature: Table A; Target 20196; HLA-A*26:01; DCAF12L1; ENSG00000198889; CTA
FVAGGPLPAG

SEQ ID NO: 20197 - protein, 10 aa, Homo sapiens
  misc_feature: Table A; Target 20197; HLA-A*68:02; DCAF12L1; ENSG00000198889; CTA
FVAGGPLPAG

SEQ ID NO: 20198 - protein, 10 aa, Homo sapiens
  misc_feature: Table A; Target 20198; HLA-B*46:01; DCAF12L1; ENSG00000198889; CTA
FVAGGPLPAG

SEQ ID NO: 20199 - protein, 10 aa, Homo sapiens
  misc_feature: Table A; Target 20199; HLA-B*54:01; DCAF12L1; ENSG00000198889; CTA
FVAGGPLPAG

SEQ ID NO: 20200 - protein, 10 aa, Homo sapiens
  misc_feature: Table A; Target 20200; HLA-C*03:04; DCAF12L1; ENSG00000198889; CTA
FVAGGPLPAG

SEQ ID NO: 20201 - protein, 11 aa, Homo sapiens
  misc_feature: Table A; Target 20201; HLA-A*26:01; DCAF12L1; ENSG00000198889; CTA
FVAGGPLPAGL

SEQ ID NO: 20202 - protein, 11 aa, Homo sapiens
  misc_feature: Table A; Target 20202; HLA-A*68:02; DCAF12L1; ENSG00000198889; CTA
FVAGGPLPAGL

SEQ ID NO: 20203 - protein, 11 aa, Homo sapiens
  misc_feature: Table A; Target 20203; HLA-C*07:04; DCAF12L1; ENSG00000198889; CTA
FVAGGPLPAGL

SEQ ID NO: 20204 - protein, 9 aa, Homo sapiens
  misc_feature: Table A; Target 20204; HLA-A*26:01; DCAF12L1; ENSG00000198889; CTA
FVVDVESGH

SEQ ID NO: 20205 - protein, 10 aa, Homo sapiens
  misc_feature: Table A; Target 20205; HLA-A*02:03; DCAF12L1; ENSG00000198889; CTA
FVVDVESGHI

SEQ ID NO: 20206 - protein, 10 aa, Homo sapiens
  misc_feature: Table A; Target 20206; HLA-A*02:07; DCAF12L1; ENSG00000198889; CTA
FVVDVESGHI

SEQ ID NO: 20207 - protein, 10 aa, Homo sapiens
  misc_feature: Table A; Target 20207; HLA-A*25:01; DCAF12L1; ENSG00000198889; CTA
FVVDVESGHI

SEQ ID NO: 20208 - protein, 10 aa, Homo sapiens
  misc_feature: Table A; Target 20208; HLA-A*26:01; DCAF12L1; ENSG00000198889; CTA
FVVDVESGHI

SEQ ID NO: 20209 - protein, 10 aa, Homo sapiens
  misc_feature: Table A; Target 20209; HLA-A*68:01; DCAF12L1; ENSG00000198889; CTA
FVVDVESGHI

SEQ ID NO: 20210 - protein, 10 aa, Homo sapiens
  misc_feature: Table A; Target 20210; HLA-A*68:02; DCAF12L1; ENSG00000198889; CTA
FVVDVESGHI

SEQ ID NO: 20211 - protein, 10 aa, Homo sapiens
  misc_feature: Table A; Target 20211; HLA-C*16:04; DCAF12L1; ENSG00000198889; CTA
FVVDVESGHI

SEQ ID NO: 20212 - protein, 11 aa, Homo sapiens
  misc_feature: Table A; Target 20212; HLA-A*26:01; DCAF12L1; ENSG00000198889; CTA
FVVDVESGHIA

SEQ ID NO: 20213 - protein, 11 aa, Homo sapiens
  misc_feature: Table A; Target 20213; HLA-A*68:02; DCAF12L1; ENSG00000198889; CTA
FVVDVESGHIA

SEQ ID NO: 20214 - protein, 11 aa, Homo sapiens
  misc_feature: Table A; Target 20214; HLA-B*54:01; DCAF12L1; ENSG00000198889; CTA
FVVDVESGHIA

SEQ ID NO: 20215 - protein, 11 aa, Homo sapiens
  misc_feature: Table A; Target 20215; HLA-C*03:04; DCAF12L1; ENSG00000198889; CTA
FVVDVESGHIA

SEQ ID NO: 20216 - protein, 9 aa, Homo sapiens
  misc_feature: Table A; Target 20216; HLA-A*23:01; DCAF12L1; ENSG00000198889; CTA
FYDVRAQKF

SEQ ID NO: 20217 - protein, 9 aa, Homo sapiens
  misc_feature: Table A; Target 20217; HLA-A*24:02; DCAF12L1; ENSG00000198889; CTA
FYDVRAQKF

SEQ ID NO: 20218 - protein, 9 aa, Homo sapiens
  misc_feature: Table A; Target 20218; HLA-A*29:02; DCAF12L1; ENSG00000198889; CTA
FYDVRAQKF

SEQ ID NO: 20219 - protein, 9 aa, Homo sapiens
  misc_feature: Table A; Target 20219; HLA-A*32:01; DCAF12L1; ENSG00000198889; CTA
FYDVRAQKF

SEQ ID NO: 20220 - protein, 9 aa, Homo sapiens
  misc_feature: Table A; Target 20220; HLA-B*35:01; DCAF12L1; ENSG00000198889; CTA
FYDVRAQKF

SEQ ID NO: 20221 - protein, 9 aa, Homo sapiens
  misc_feature: Table A; Target 20221; HLA-B*35:03; DCAF12L1; ENSG00000198889; CTA
FYDVRAQKF

SEQ ID NO: 20222 - protein, 9 aa, Homo sapiens
  misc_feature: Table A; Target 20222; HLA-C*04:01; DCAF12L1; ENSG00000198889; CTA
FYDVRAQKF

SEQ ID NO: 20223 - protein, 9 aa, Homo sapiens
  misc_feature: Table A; Target 20223; HLA-C*07:04; DCAF12L1; ENSG00000198889; CTA
FYDVRAQKF

SEQ ID NO: 20224 - protein, 9 aa, Homo sapiens
  misc_feature: Table A; Target 20224; HLA-C*14:02; DCAF12L1; ENSG00000198889; CTA
FYDVRAQKF

SEQ ID NO: 20225 - protein, 9 aa, Homo sapiens
  misc_feature: Table A; Target 20225; HLA-B*44:02; DCAF12L1; ENSG00000198889; CTA
GEGPLLLKR

SEQ ID NO: 20226 - protein, 9 aa, Homo sapiens
  misc_feature: Table A; Target 20226; HLA-B*44:03; DCAF12L1; ENSG00000198889; CTA
GEGPLLLKR

SEQ ID NO: 20227 - protein, 8 aa, Homo sapiens
  misc_feature: Table A; Target 20227; HLA-A*30:01; DCAF12L1; ENSG00000198889; CTA
GELRGYAV

SEQ ID NO: 20228 - protein, 8 aa, Homo sapiens
  misc_feature: Table A; Target 20228; HLA-B*18:01; DCAF12L1; ENSG00000198889; CTA
GELRGYAV

SEQ ID NO: 20229 - protein, 8 aa, Homo sapiens
  misc_feature: Table A; Target 20229; HLA-B*37:01; DCAF12L1; ENSG00000198889; CTA
GELRGYAV

SEQ ID NO: 20230 - protein, 8 aa, Homo sapiens
  misc_feature: Table A; Target 20230; HLA-B*40:02; DCAF12L1; ENSG00000198889; CTA
GELRGYAV

SEQ ID NO: 20231 - protein, 8 aa, Homo sapiens
  misc_feature: Table A; Target 20231; HLA-B*49:01; DCAF12L1; ENSG00000198889; CTA
GELRGYAV

SEQ ID NO: 20232 - protein, 9 aa, Homo sapiens
  misc_feature: Table A; Target 20232; HLA-A*30:01; DCAF12L1; ENSG00000198889; CTA
GENPNSLAI

SEQ ID NO: 20233 - protein, 9 aa, Homo sapiens
  misc_feature: Table A; Target 20233; HLA-B*13:02; DCAF12L1; ENSG00000198889; CTA
GENPNSLAI

SEQ ID NO: 20234 - protein, 9 aa, Homo sapiens
  misc_feature: Table A; Target 20234; HLA-B*18:01; DCAF12L1; ENSG00000198889; CTA
GENPNSLAI

SEQ ID NO: 20235 - protein, 9 aa, Homo sapiens
  misc_feature: Table A; Target 20235; HLA-B*27:02; DCAF12L1; ENSG00000198889; CTA
GENPNSLAI

SEQ ID NO: 20236 - protein, 9 aa, Homo sapiens
  misc_feature: Table A; Target 20236; HLA-B*27:05; DCAF12L1; ENSG00000198889; CTA
GENPNSLAI

SEQ ID NO: 20237 - protein, 9 aa, Homo sapiens
  misc_feature: Table A; Target 20237; HLA-B*37:01; DCAF12L1; ENSG00000198889; CTA
GENPNSLAI

SEQ ID NO: 20238 - protein, 9 aa, Homo sapiens
  misc_feature: Table A; Target 20238; HLA-B*40:01; DCAF12L1; ENSG00000198889; CTA
GENPNSLAI

SEQ ID NO: 20239 - protein, 9 aa, Homo sapiens
  misc_feature: Table A; Target 20239; HLA-B*40:02; DCAF12L1; ENSG00000198889; CTA
GENPNSLAI

SEQ ID NO: 20240 - protein, 9 aa, Homo sapiens
  misc_feature: Table A; Target 20240; HLA-B*44:02; DCAF12L1; ENSG00000198889; CTA
GENPNSLAI

SEQ ID NO: 20241 - protein, 9 aa, Homo sapiens
  misc_feature: Table A; Target 20241; HLA-B*44:03; DCAF12L1; ENSG00000198889; CTA
GENPNSLAI

SEQ ID NO: 20242 - protein, 9 aa, Homo sapiens
  misc_feature: Table A; Target 20242; HLA-B*49:01; DCAF12L1; ENSG00000198889; CTA
GENPNSLAI

SEQ ID NO: 20243 - protein, 9 aa, Homo sapiens
  misc_feature: Table A; Target 20243; HLA-C*16:04; DCAF12L1; ENSG00000198889; CTA
GENPNSLAI

SEQ ID NO: 20244 - protein, 10 aa, Homo sapiens
  misc_feature: Table A; Target 20244; HLA-A*29:02; DCAF12L1; ENSG00000198889; CTA
GENPNSLAIY

SEQ ID NO: 20245 - protein, 10 aa, Homo sapiens
  misc_feature: Table A; Target 20245; HLA-A*30:02; DCAF12L1; ENSG00000198889; CTA
GENPNSLAIY

SEQ ID NO: 20246 - protein, 10 aa, Homo sapiens
  misc_feature: Table A; Target 20246; HLA-B*15:01; DCAF12L1; ENSG00000198889; CTA
GENPNSLAIY

SEQ ID NO: 20247 - protein, 10 aa, Homo sapiens
  misc_feature: Table A; Target 20247; HLA-B*15:03; DCAF12L1; ENSG00000198889; CTA
GENPNSLAIY

SEQ ID NO: 20248 - protein, 10 aa, Homo sapiens
  misc_feature: Table A; Target 20248; HLA-B*18:01; DCAF12L1; ENSG00000198889; CTA
GENPNSLAIY

SEQ ID NO: 20249 - protein, 10 aa, Homo sapiens
  misc_feature: Table A; Target 20249; HLA-B*27:02; DCAF12L1; ENSG00000198889; CTA
GENPNSLAIY

SEQ ID NO: 20250 - protein, 10 aa, Homo sapiens
  misc_feature: Table A; Target 20250; HLA-B*40:01; DCAF12L1; ENSG00000198889; CTA
GENPNSLAIY

SEQ ID NO: 20251 - protein, 10 aa, Homo sapiens
  misc_feature: Table A; Target 20251; HLA-B*44:02; DCAF12L1; ENSG00000198889; CTA
GENPNSLAIY

SEQ ID NO: 20252 - protein, 10 aa, Homo sapiens
  misc_feature: Table A; Target 20252; HLA-B*44:03; DCAF12L1; ENSG00000198889; CTA
GENPNSLAIY

SEQ ID NO: 20253 - protein, 10 aa, Homo sapiens
  misc_feature: Table A; Target 20253; HLA-C*02:02; DCAF12L1; ENSG00000198889; CTA
GENPNSLAIY

SEQ ID NO: 20254 - protein, 10 aa, Homo sapiens
  misc_feature: Table A; Target 20254; HLA-C*16:04; DCAF12L1; ENSG00000198889; CTA
GENPNSLAIY

SEQ ID NO: 20255 - protein, 9 aa, Homo sapiens
  misc_feature: Table A; Target 20255; HLA-A*29:02; DCAF12L1; ENSG00000198889; CTA
GFDGELRGY

SEQ ID NO: 20256 - protein, 9 aa, Homo sapiens
  misc_feature: Table A; Target 20256; HLA-A*30:02; DCAF12L1; ENSG00000198889; CTA
GFDGELRGY

SEQ ID NO: 20257 - protein, 9 aa, Homo sapiens
  misc_feature: Table A; Target 20257; HLA-B*44:02; DCAF12L1; ENSG00000198889; CTA
GFDGELRGY

SEQ ID NO: 20258 - protein, 11 aa, Homo sapiens
  misc_feature: Table A; Target 20258; HLA-A*01:01; DCAF12L1; ENSG00000198889; CTA
GGENPNSLAIY

SEQ ID NO: 20259 - protein, 11 aa, Homo sapiens
  misc_feature: Table A; Target 20259; HLA-A*30:02; DCAF12L1; ENSG00000198889; CTA
GGENPNSLAIY

SEQ ID NO: 20260 - protein, 8 aa, Homo sapiens
  misc_feature: Table A; Target 20260; HLA-C*16:01; DCAF12L1; ENSG00000198889; CTA
GGTGVRSL

SEQ ID NO: 20261 - protein, 8 aa, Homo sapiens
  misc_feature: Table A; Target 20261; HLA-C*16:02; DCAF12L1; ENSG00000198889; CTA
GGTGVRSL

SEQ ID NO: 20262 - protein, 10 aa, Homo sapiens
  misc_feature: Table A; Target 20262; HLA-C*16:01; DCAF12L1; ENSG00000198889; CTA
GGTGVRSLSF

SEQ ID NO: 20263 - protein, 11 aa, Homo sapiens
  misc_feature: Table A; Target 20263; HLA-A*30:02; DCAF12L1; ENSG00000198889; CTA
GGTGVRSLSFY

SEQ ID NO: 20264 - protein, 9 aa, Homo sapiens
  misc_feature: Table A; Target 20264; HLA-A*02:04; DCAF12L1; ENSG00000198889; CTA
GHIARIPLL

SEQ ID NO: 20265 - protein, 9 aa, Homo sapiens
  misc_feature: Table A; Target 20265; HLA-A*24:02; DCAF12L1; ENSG00000198889; CTA
GHIARIPLL

SEQ ID NO: 20266 - protein, 9 aa, Homo sapiens
  misc_feature: Table A; Target 20266; HLA-B*38:01; DCAF12L1; ENSG00000198889; CTA
GHIARIPLL

SEQ ID NO: 20267 - protein, 9 aa, Homo sapiens
  misc_feature: Table A; Target 20267; HLA-A*02:04; DCAF12L1; ENSG00000198889; CTA
GHKDWIFAV

SEQ ID NO: 20268 - protein, 10 aa, Homo sapiens
  misc_feature: Table A; Target 20268; HLA-A*01:01; DCAF12L1; ENSG00000198889; CTA
GMEVFPNALY

SEQ ID NO: 20269 - protein, 10 aa, Homo sapiens
  misc_feature: Table A; Target 20269; HLA-A*29:02; DCAF12L1; ENSG00000198889; CTA
GMEVFPNALY

SEQ ID NO: 20270 - protein, 10 aa, Homo sapiens
  misc_feature: Table A; Target 20270; HLA-A*30:02; DCAF12L1; ENSG00000198889; CTA
GMEVFPNALY

SEQ ID NO: 20271 - protein, 11 aa, Homo sapiens
  misc_feature: Table A; Target 20271; HLA-A*29:02; DCAF12L1; ENSG00000198889; CTA
GPLPAGLHGNY

SEQ ID NO: 20272 - protein, 11 aa, Homo sapiens
  misc_feature: Table A; Target 20272; HLA-A*30:02; DCAF12L1; ENSG00000198889; CTA
GPLPAGLHGNY

SEQ ID NO: 20273 - protein, 11 aa, Homo sapiens
  misc_feature: Table A; Target 20273; HLA-B*35:01; DCAF12L1; ENSG00000198889; CTA
GPLPAGLHGNY

SEQ ID NO: 20274 - protein, 8 aa, Homo sapiens
  misc_feature: Table A; Target 20274; HLA-A*30:02; DCAF12L1; ENSG00000198889; CTA
GQGSLLFY

SEQ ID NO: 20275 - protein, 8 aa, Homo sapiens
  misc_feature: Table A; Target 20275; HLA-B*15:01; DCAF12L1; ENSG00000198889; CTA
GQGSLLFY

SEQ ID NO: 20276 - protein, 8 aa, Homo sapiens
  misc_feature: Table A; Target 20276; HLA-C*16:01; DCAF12L1; ENSG00000198889; CTA
GSALSRLL

SEQ ID NO: 20277 - protein, 8 aa, Homo sapiens
  misc_feature: Table A; Target 20277; HLA-A*32:01; DCAF12L1; ENSG00000198889; CTA
GSHSHVSF

SEQ ID NO: 20278 - protein, 8 aa, Homo sapiens
  misc_feature: Table A; Target 20278; HLA-B*37:01; DCAF12L1; ENSG00000198889; CTA
GSHSHVSF

SEQ ID NO: 20279 - protein, 8 aa, Homo sapiens
  misc_feature: Table A; Target 20279; HLA-B*58:01; DCAF12L1; ENSG00000198889; CTA
GSHSHVSF

SEQ ID NO: 20280 - protein, 8 aa, Homo sapiens
  misc_feature: Table A; Target 20280; HLA-C*16:01; DCAF12L1; ENSG00000198889; CTA
GSHSHVSF

SEQ ID NO: 20281 - protein, 9 aa, Homo sapiens
  misc_feature: Table A; Target 20281; HLA-B*07:02; DCAF12L1; ENSG00000198889; CTA
GSRDGTVAL

SEQ ID NO: 20282 - protein, 9 aa, Homo sapiens
  misc_feature: Table A; Target 20282; HLA-B*15:03; DCAF12L1; ENSG00000198889; CTA
GSRDGTVAL

SEQ ID NO: 20283 - protein, 9 aa, Homo sapiens
  misc_feature: Table A; Target 20283; HLA-B*46:01; DCAF12L1; ENSG00000198889; CTA
GSRDGTVAL

SEQ ID NO: 20284 - protein, 9 aa, Homo sapiens
  misc_feature: Table A; Target 20284; HLA-C*01:02; DCAF12L1; ENSG00000198889; CTA
GSRDGTVAL

SEQ ID NO: 20285 - protein, 9 aa, Homo sapiens
  misc_feature: Table A; Target 20285; HLA-C*03:03; DCAF12L1; ENSG00000198889; CTA
GSRDGTVAL

SEQ ID NO: 20286 - protein, 9 aa, Homo sapiens
  misc_feature: Table A; Target 20286; HLA-C*03:04; DCAF12L1; ENSG00000198889; CTA
GSRDGTVAL

SEQ ID NO: 20287 - protein, 9 aa, Homo sapiens
  misc_feature: Table A; Target 20287; HLA-C*07:02; DCAF12L1; ENSG00000198889; CTA
GSRDGTVAL

SEQ ID NO: 20288 - protein, 9 aa, Homo sapiens
  misc_feature: Table A; Target 20288; HLA-C*16:01; DCAF12L1; ENSG00000198889; CTA
GSRDGTVAL

SEQ ID NO: 20289 - protein, 10 aa, Homo sapiens
  misc_feature: Table A; Target 20289; HLA-A*25:01; DCAF12L1; ENSG00000198889; CTA
GSRDGTVALW

SEQ ID NO: 20290 - protein, 10 aa, Homo sapiens
  misc_feature: Table A; Target 20290; HLA-B*57:01; DCAF12L1; ENSG00000198889; CTA
GSRDGTVALW

SEQ ID NO: 20291 - protein, 10 aa, Homo sapiens
  misc_feature: Table A; Target 20291; HLA-B*58:01; DCAF12L1; ENSG00000198889; CTA
GSRDGTVALW

SEQ ID NO: 20292 - protein, 11 aa, Homo sapiens
  misc_feature: Table A; Target 20292; HLA-A*31:01; DCAF12L1; ENSG00000198889; CTA
GSRDGTVALWR

SEQ ID NO: 20293 - protein, 10 aa, Homo sapiens
  misc_feature: Table A; Target 20293; HLA-A*01:01; DCAF12L1; ENSG00000198889; CTA
GTGQGSLLFY

SEQ ID NO: 20294 - protein, 10 aa, Homo sapiens
  misc_feature: Table A; Target 20294; HLA-A*29:02; DCAF12L1; ENSG00000198889; CTA
GTGQGSLLFY

SEQ ID NO: 20295 - protein, 10 aa, Homo sapiens
  misc_feature: Table A; Target 20295; HLA-A*30:02; DCAF12L1; ENSG00000198889; CTA
GTGQGSLLFY

SEQ ID NO: 20296 - protein, 9 aa, Homo sapiens
  misc_feature: Table A; Target 20296; HLA-A*25:01; DCAF12L1; ENSG00000198889; CTA
GTGVRSLSF

SEQ ID NO: 20297 - protein, 9 aa, Homo sapiens
  misc_feature: Table A; Target 20297; HLA-A*32:01; DCAF12L1; ENSG00000198889; CTA
GTGVRSLSF

SEQ ID NO: 20298 - protein, 9 aa, Homo sapiens
  misc_feature: Table A; Target 20298; HLA-B*37:01; DCAF12L1; ENSG00000198889; CTA
GTGVRSLSF

SEQ ID NO: 20299 - protein, 9 aa, Homo sapiens
  misc_feature: Table A; Target 20299; HLA-B*58:01; DCAF12L1; ENSG00000198889; CTA
GTGVRSLSF

SEQ ID NO: 20300 - protein, 9 aa, Homo sapiens
  misc_feature: Table A; Target 20300; HLA-C*16:01; DCAF12L1; ENSG00000198889; CTA
GTGVRSLSF

SEQ ID NO: 20301 - protein, 11 aa, Homo sapiens
  misc_feature: Table A; Target 20301; HLA-A*31:01; DCAF12L1; ENSG00000198889; CTA
GTGVRSLSFYR

SEQ ID NO: 20302 - protein, 11 aa, Homo sapiens
  misc_feature: Table A; Target 20302; HLA-A*25:01; DCAF12L1; ENSG00000198889; CTA
GTVNKVFASQW

SEQ ID NO: 20303 - protein, 11 aa, Homo sapiens
  misc_feature: Table A; Target 20303; HLA-B*57:01; DCAF12L1; ENSG00000198889; CTA
GTVNKVFASQW

SEQ ID NO: 20304 - protein, 9 aa, Homo sapiens
  misc_feature: Table A; Target 20304; HLA-A*31:01; DCAF12L1; ENSG00000198889; CTA
GVRSLSFYR

SEQ ID NO: 20305 - protein, 9 aa, Homo sapiens
  misc_feature: Table A; Target 20305; HLA-A*11:01; DCAF12L1; ENSG00000198889; CTA
HAIELNPSK

SEQ ID NO: 20306 - protein, 9 aa, Homo sapiens
  misc_feature: Table A; Target 20306; HLA-A*26:01; DCAF12L1; ENSG00000198889; CTA
HAIELNPSK

SEQ ID NO: 20307 - protein, 9 aa, Homo sapiens
  misc_feature: Table A; Target 20307; HLA-A*68:01; DCAF12L1; ENSG00000198889; CTA
HAIELNPSK

SEQ ID NO: 20308 - protein, 9 aa, Homo sapiens
  misc_feature: Table A; Target 20308; HLA-B*35:01; DCAF12L1; ENSG00000198889; CTA
HAIELNPSK

SEQ ID NO: 20309 - protein, 9 aa, Homo sapiens
  misc_feature: Table A; Target 20309; HLA-B*54:01; DCAF12L1; ENSG00000198889; CTA
HAIELNPSK

SEQ ID NO: 20310 - protein, 9 aa, Homo sapiens
  misc_feature: Table A; Target 20310; HLA-C*07:06; DCAF12L1; ENSG00000198889; CTA
HAIELNPSK

SEQ ID NO: 20311 - protein, 11 aa, Homo sapiens
  misc_feature: Table A; Target 20311; HLA-C*03:03; DCAF12L1; ENSG00000198889; CTA
HAIELNPSKTL

SEQ ID NO: 20312 - protein, 11 aa, Homo sapiens
  misc_feature: Table A; Target 20312; HLA-C*03:04; DCAF12L1; ENSG00000198889; CTA
HAIELNPSKTL

SEQ ID NO: 20313 - protein, 9 aa, Homo sapiens
  misc_feature: Table A; Target 20313; HLA-A*29:02; DCAF12L1; ENSG00000198889; CTA
HIARIPLLR

SEQ ID NO: 20314 - protein, 9 aa, Homo sapiens
  misc_feature: Table A; Target 20314; HLA-A*33:03; DCAF12L1; ENSG00000198889; CTA
HIARIPLLR

SEQ ID NO: 20315 - protein, 9 aa, Homo sapiens
  misc_feature: Table A; Target 20315; HLA-A*01:01; DCAF12L1; ENSG00000198889; CTA
HSEVGLPVY

SEQ ID NO: 20316 - protein, 9 aa, Homo sapiens
  misc_feature: Table A; Target 20316; HLA-A*30:02; DCAF12L1; ENSG00000198889; CTA
HSEVGLPVY

SEQ ID NO: 20317 - protein, 9 aa, Homo sapiens
  misc_feature: Table A; Target 20317; HLA-B*35:01; DCAF12L1; ENSG00000198889; CTA
HSEVGLPVY

SEQ ID NO: 20318 - protein, 9 aa, Homo sapiens
  misc_feature: Table A; Target 20318; HLA-B*39:01; DCAF12L1; ENSG00000198889; CTA
HSEVGLPVY

SEQ ID NO: 20319 - protein, 9 aa, Homo sapiens
  misc_feature: Table A; Target 20319; HLA-B*46:01; DCAF12L1; ENSG00000198889; CTA
HSEVGLPVY

SEQ ID NO: 20320 - protein, 9 aa, Homo sapiens
  misc_feature: Table A; Target 20320; HLA-B*55:01; DCAF12L1; ENSG00000198889; CTA
HSEVGLPVY

SEQ ID NO: 20321 - protein, 9 aa, Homo sapiens
  misc_feature: Table A; Target 20321; HLA-B*58:01; DCAF12L1; ENSG00000198889; CTA
HSEVGLPVY

SEQ ID NO: 20322 - protein, 9 aa, Homo sapiens
  misc_feature: Table A; Target 20322; HLA-C*03:03; DCAF12L1; ENSG00000198889; CTA
HSEVGLPVY

SEQ ID NO: 20323 - protein, 9 aa, Homo sapiens
  misc_feature: Table A; Target 20323; HLA-C*05:01; DCAF12L1; ENSG00000198889; CTA
HSEVGLPVY

SEQ ID NO: 20324 - protein, 9 aa, Homo sapiens
  misc_feature: Table A; Target 20324; HLA-C*07:01; DCAF12L1; ENSG00000198889; CTA
HSEVGLPVY

SEQ ID NO: 20325 - protein, 9 aa, Homo sapiens
  misc_feature: Table A; Target 20325; HLA-C*07:04; DCAF12L1; ENSG00000198889; CTA
HSEVGLPVY

SEQ ID NO: 20326 - protein, 9 aa, Homo sapiens
  misc_feature: Table A; Target 20326; HLA-C*16:02; DCAF12L1; ENSG00000198889; CTA
HSEVGLPVY

SEQ ID NO: 20327 - protein, 9 aa, Homo sapiens
  misc_feature: Table A; Target 20327; HLA-A*30:01; DCAF12L1; ENSG00000198889; CTA
IELNPSKTL

SEQ ID NO: 20328 - protein, 9 aa, Homo sapiens
  misc_feature: Table A; Target 20328; HLA-B*37:01; DCAF12L1; ENSG00000198889; CTA
IELNPSKTL

SEQ ID NO: 20329 - protein, 9 aa, Homo sapiens
  misc_feature: Table A; Target 20329; HLA-B*40:01; DCAF12L1; ENSG00000198889; CTA
IELNPSKTL

SEQ ID NO: 20330 - protein, 9 aa, Homo sapiens
  misc_feature: Table A; Target 20330; HLA-B*40:02; DCAF12L1; ENSG00000198889; CTA
IELNPSKTL

SEQ ID NO: 20331 - protein, 9 aa, Homo sapiens
  misc_feature: Table A; Target 20331; HLA-B*44:02; DCAF12L1; ENSG00000198889; CTA
IELNPSKTL

SEQ ID NO: 20332 - protein, 9 aa, Homo sapiens
  misc_feature: Table A; Target 20332; HLA-B*44:03; DCAF12L1; ENSG00000198889; CTA
IELNPSKTL

SEQ ID NO: 20333 - protein, 9 aa, Homo sapiens
  misc_feature: Table A; Target 20333; HLA-B*49:01; DCAF12L1; ENSG00000198889; CTA
IELNPSKTL

SEQ ID NO: 20334 - protein, 9 aa, Homo sapiens
  misc_feature: Table A; Target 20334; HLA-C*16:04; DCAF12L1; ENSG00000198889; CTA
IELNPSKTL

SEQ ID NO: 20335 - protein, 10 aa, Homo sapiens
  misc_feature: Table A; Target 20335; HLA-A*23:01; DCAF12L1; ENSG00000198889; CTA
IELNPSKTLL

SEQ ID NO: 20336 - protein, 10 aa, Homo sapiens
  misc_feature: Table A; Target 20336; HLA-A*30:01; DCAF12L1; ENSG00000198889; CTA
IELNPSKTLL

SEQ ID NO: 20337 - protein, 10 aa, Homo sapiens
  misc_feature: Table A; Target 20337; HLA-B*37:01; DCAF12L1; ENSG00000198889; CTA
IELNPSKTLL

SEQ ID NO: 20338 - protein, 10 aa, Homo sapiens
  misc_feature: Table A; Target 20338; HLA-B*40:01; DCAF12L1; ENSG00000198889; CTA
IELNPSKTLL

SEQ ID NO: 20339 - protein, 10 aa, Homo sapiens
  misc_feature: Table A; Target 20339; HLA-B*40:02; DCAF12L1; ENSG00000198889; CTA
IELNPSKTLL

SEQ ID NO: 20340 - protein, 10 aa, Homo sapiens
  misc_feature: Table A; Target 20340; HLA-B*44:02; DCAF12L1; ENSG00000198889; CTA
IELNPSKTLL

SEQ ID NO: 20341 - protein, 10 aa, Homo sapiens
  misc_feature: Table A; Target 20341; HLA-B*44:03; DCAF12L1; ENSG00000198889; CTA
IELNPSKTLL

SEQ ID NO: 20342 - protein, 10 aa, Homo sapiens
  misc_feature: Table A; Target 20342; HLA-B*49:01; DCAF12L1; ENSG00000198889; CTA
IELNPSKTLL

SEQ ID NO: 20343 - protein, 9 aa, Homo sapiens
  misc_feature: Table A; Target 20343; HLA-C*16:02; DCAF12L1; ENSG00000198889; CTA
IINPSNRKV

SEQ ID NO: 20344 - protein, 9 aa, Homo sapiens
  misc_feature: Table A; Target 20344; HLA-B*07:02; DCAF12L1; ENSG00000198889; CTA
IPLLRDSEA

SEQ ID NO: 20345 - protein, 9 aa, Homo sapiens
  misc_feature: Table A; Target 20345; HLA-B*54:01; DCAF12L1; ENSG00000198889; CTA
IPLLRDSEA

SEQ ID NO: 20346 - protein, 9 aa, Homo sapiens
  misc_feature: Table A; Target 20346; HLA-B*55:01; DCAF12L1; ENSG00000198889; CTA
IPLLRDSEA

SEQ ID NO: 20347 - protein, 9 aa, Homo sapiens
  misc_feature: Table A; Target 20347; HLA-B*56:01; DCAF12L1; ENSG00000198889; CTA
IPLLRDSEA

SEQ ID NO: 20348 - protein, 10 aa, Homo sapiens
  misc_feature: Table A; Target 20348; HLA-B*58:01; DCAF12L1; ENSG00000198889; CTA
ITVGTGQGSL

SEQ ID NO: 20349 - protein, 10 aa, Homo sapiens
  misc_feature: Table A; Target 20349; HLA-C*03:03; DCAF12L1; ENSG00000198889; CTA
ITVGTGQGSL

SEQ ID NO: 20350 - protein, 10 aa, Homo sapiens
  misc_feature: Table A; Target 20350; HLA-C*03:04; DCAF12L1; ENSG00000198889; CTA
ITVGTGQGSL

SEQ ID NO: 20351 - protein, 11 aa, Homo sapiens
  misc_feature: Table A; Target 20351; HLA-B*58:01; DCAF12L1; ENSG00000198889; CTA
ITVGTGQGSLL

SEQ ID NO: 20352 - protein, 11 aa, Homo sapiens
  misc_feature: Table A; Target 20352; HLA-C*07:04; DCAF12L1; ENSG00000198889; CTA
ITVGTGQGSLL

SEQ ID NO: 20353 - protein, 10 aa, Homo sapiens
  misc_feature: Table A; Target 20353; HLA-C*07:02; DCAF12L1; ENSG00000198889; CTA
IYQLPSLDPL

SEQ ID NO: 20354 - protein, 10 aa, Homo sapiens
  misc_feature: Table A; Target 20354; HLA-C*14:02; DCAF12L1; ENSG00000198889; CTA
IYQLPSLDPL

SEQ ID NO: 20355 - protein, 11 aa, Homo sapiens
  misc_feature: Table A; Target 20355; HLA-A*23:01; DCAF12L1; ENSG00000198889; CTA
KFLEERASATL

SEQ ID NO: 20356 - protein, 11 aa, Homo sapiens
  misc_feature: Table A; Target 20356; HLA-A*24:02; DCAF12L1; ENSG00000198889; CTA
KFLEERASATL

SEQ ID NO: 20357 - protein, 11 aa, Homo sapiens
  misc_feature: Table A; Target 20357; HLA-A*02:01; DCAF12L1; ENSG00000198889; CTA
KLFVAGGPLPA

SEQ ID NO: 20358 - protein, 11 aa, Homo sapiens
  misc_feature: Table A; Target 20358; HLA-A*02:03; DCAF12L1; ENSG00000198889; CTA
KLFVAGGPLPA

SEQ ID NO: 20359 - protein, 11 aa, Homo sapiens
  misc_feature: Table A; Target 20359; HLA-B*56:01; DCAF12L1; ENSG00000198889; CTA
KLFVAGGPLPA

SEQ ID NO: 20360 - protein, 11 aa, Homo sapiens
  misc_feature: Table A; Target 20360; HLA-A*31:01; DCAF12L1; ENSG00000198889; CTA
KVFASQWLNSR

SEQ ID NO: 20361 - protein, 8 aa, Homo sapiens
  misc_feature: Table A; Target 20361; HLA-B*57:01; DCAF12L1; ENSG00000198889; CTA
KVREVGGW

SEQ ID NO: 20362 - protein, 11 aa, Homo sapiens
  misc_feature: Table A; Target 20362; HLA-C*03:04; DCAF12L1; ENSG00000198889; CTA
LAAADGEGPLL

SEQ ID NO: 20363 - protein, 9 aa, Homo sapiens
  misc_feature: Table A; Target 20363; HLA-B*46:01; DCAF12L1; ENSG00000198889; CTA
LAIYQLPSL

SEQ ID NO: 20364 - protein, 9 aa, Homo sapiens
  misc_feature: Table A; Target 20364; HLA-C*03:03; DCAF12L1; ENSG00000198889; CTA
LAIYQLPSL

SEQ ID NO: 20365 - protein, 9 aa, Homo sapiens
  misc_feature: Table A; Target 20365; HLA-C*03:04; DCAF12L1; ENSG00000198889; CTA
LAIYQLPSL

SEQ ID NO: 20366 - protein, 11 aa, Homo sapiens
  misc_feature: Table A; Target 20366; HLA-B*39:01; DCAF12L1; ENSG00000198889; CTA
LATGGENPNSL

SEQ ID NO: 20367 - protein, 9 aa, Homo sapiens
  misc_feature: Table A; Target 20367; HLA-A*30:01; DCAF12L1; ENSG00000198889; CTA
LEERASATL

SEQ ID NO: 20368 - protein, 9 aa, Homo sapiens
  misc_feature: Table A; Target 20368; HLA-B*18:01; DCAF12L1; ENSG00000198889; CTA
LEERASATL

SEQ ID NO: 20369 - protein, 9 aa, Homo sapiens
  misc_feature: Table A; Target 20369; HLA-B*40:01; DCAF12L1; ENSG00000198889; CTA
LEERASATL

SEQ ID NO: 20370 - protein, 9 aa, Homo sapiens
  misc_feature: Table A; Target 20370; HLA-B*40:02; DCAF12L1; ENSG00000198889; CTA
LEERASATL

SEQ ID NO: 20371 - protein, 9 aa, Homo sapiens
  misc_feature: Table A; Target 20371; HLA-B*49:01; DCAF12L1; ENSG00000198889; CTA
LEERASATL

SEQ ID NO: 20372 - protein, 9 aa, Homo sapiens
  misc_feature: Table A; Target 20372; HLA-A*30:01; DCAF12L1; ENSG00000198889; CTA
LELGTVNKV

SEQ ID NO: 20373 - protein, 9 aa, Homo sapiens
  misc_feature: Table A; Target 20373; HLA-B*40:01; DCAF12L1; ENSG00000198889; CTA
LELGTVNKV

SEQ ID NO: 20374 - protein, 9 aa, Homo sapiens
  misc_feature: Table A; Target 20374; HLA-B*49:01; DCAF12L1; ENSG00000198889; CTA
LELGTVNKV

SEQ ID NO: 20375 - protein, 10 aa, Homo sapiens
  misc_feature: Table A; Target 20375; HLA-B*44:02; DCAF12L1; ENSG00000198889; CTA
LELGTVNKVF

SEQ ID NO: 20376 - protein, 10 aa, Homo sapiens
  misc_feature: Table A; Target 20376; HLA-B*44:03; DCAF12L1; ENSG00000198889; CTA
LELGTVNKVF

SEQ ID NO: 20377 - protein, 9 aa, Homo sapiens
  misc_feature: Table A; Target 20377; HLA-B*39:01; DCAF12L1; ENSG00000198889; CTA
LESSSGPAR

SEQ ID NO: 20378 - protein, 8 aa, Homo sapiens
  misc_feature: Table A; Target 20378; HLA-C*14:02; DCAF12L1; ENSG00000198889; CTA
LFVAGGPL

SEQ ID NO: 20379 - protein, 10 aa, Homo sapiens
  misc_feature: Table A; Target 20379; HLA-A*24:02; DCAF12L1; ENSG00000198889; CTA
LFYDVRAQKF

SEQ ID NO: 20380 - protein, 9 aa, Homo sapiens
  misc_feature: Table A; Target 20380; HLA-A*01:01; DCAF12L1; ENSG00000198889; CTA
LGAVSLDGY

SEQ ID NO: 20381 - protein, 9 aa, Homo sapiens
  misc_feature: Table A; Target 20381; HLA-A*30:02; DCAF12L1; ENSG00000198889; CTA
LGAVSLDGY

SEQ ID NO: 20382 - protein, 9 aa, Homo sapiens
  misc_feature: Table A; Target 20382; HLA-B*46:01; DCAF12L1; ENSG00000198889; CTA
LGAVSLDGY

SEQ ID NO: 20383 - protein, 8 aa, Homo sapiens
  misc_feature: Table A; Target 20383; HLA-C*16:01; DCAF12L1; ENSG00000198889; CTA
LGTVNKVF

SEQ ID NO: 20384 - protein, 9 aa, Homo sapiens
  misc_feature: Table A; Target 20384; HLA-A*02:04; DCAF12L1; ENSG00000198889; CTA
LLSIRLPYF

SEQ ID NO: 20385 - protein, 9 aa, Homo sapiens
  misc_feature: Table A; Target 20385; HLA-A*24:02; DCAF12L1; ENSG00000198889; CTA
LLSIRLPYF

SEQ ID NO: 20386 - protein, 9 aa, Homo sapiens
  misc_feature: Table A; Target 20386; HLA-A*02:01; DCAF12L1; ENSG00000198889; CTA
LLTERQLEL

SEQ ID NO: 20387 - protein, 9 aa, Homo sapiens
  misc_feature: Table A; Target 20387; HLA-A*02:03; DCAF12L1; ENSG00000198889; CTA
LLTERQLEL

SEQ ID NO: 20388 - protein, 9 aa, Homo sapiens
  misc_feature: Table A; Target 20388; HLA-A*02:04; DCAF12L1; ENSG00000198889; CTA
LLTERQLEL

SEQ ID NO: 20389 - protein, 9 aa, Homo sapiens
  misc_feature: Table A; Target 20389; HLA-A*02:07; DCAF12L1; ENSG00000198889; CTA
LLTERQLEL

SEQ ID NO: 20390 - protein, 9 aa, Homo sapiens
  misc_feature: Table A; Target 20390; HLA-B*08:01; DCAF12L1; ENSG00000198889; CTA
LLTERQLEL

SEQ ID NO: 20391 - protein, 9 aa, Homo sapiens
  misc_feature: Table A; Target 20391; HLA-C*03:04; DCAF12L1; ENSG00000198889; CTA
LLTERQLEL

SEQ ID NO: 20392 - protein, 9 aa, Homo sapiens
  misc_feature: Table A; Target 20392; HLA-C*16:01; DCAF12L1; ENSG00000198889; CTA
LLTERQLEL

SEQ ID NO: 20393 - protein, 9 aa, Homo sapiens
  misc_feature: Table A; Target 20393; HLA-C*16:02; DCAF12L1; ENSG00000198889; CTA
LLTERQLEL

SEQ ID NO: 20394 - protein, 9 aa, Homo sapiens
  misc_feature: Table A; Target 20394; HLA-A*26:01; DCAF12L1; ENSG00000198889; CTA
LPAGLHGNY

SEQ ID NO: 20395 - protein, 9 aa, Homo sapiens
  misc_feature: Table A; Target 20395; HLA-A*29:02; DCAF12L1; ENSG00000198889; CTA
LPAGLHGNY

SEQ ID NO: 20396 - protein, 9 aa, Homo sapiens
  misc_feature: Table A; Target 20396; HLA-A*30:02; DCAF12L1; ENSG00000198889; CTA
LPAGLHGNY

SEQ ID NO: 20397 - protein, 9 aa, Homo sapiens
  misc_feature: Table A; Target 20397; HLA-B*35:01; DCAF12L1; ENSG00000198889; CTA
LPAGLHGNY

SEQ ID NO: 20398 - protein, 9 aa, Homo sapiens
  misc_feature: Table A; Target 20398; HLA-B*55:01; DCAF12L1; ENSG00000198889; CTA
LPAGLHGNY

SEQ ID NO: 20399 - protein, 10 aa, Homo sapiens
  misc_feature: Table A; Target 20399; HLA-B*54:01; DCAF12L1; ENSG00000198889; CTA
LPAGLHGNYA

SEQ ID NO: 20400 - protein, 10 aa, Homo sapiens
  misc_feature: Table A; Target 20400; HLA-B*56:01; DCAF12L1; ENSG00000198889; CTA
LPAGLHGNYA

SEQ ID NO: 20401 - protein, 10 aa, Homo sapiens
  misc_feature: Table A; Target 20401; HLA-B*35:01; DCAF12L1; ENSG00000198889; CTA
LPELLTERQL

SEQ ID NO: 20402 - protein, 10 aa, Homo sapiens
  misc_feature: Table A; Target 20402; HLA-B*35:03; DCAF12L1; ENSG00000198889; CTA
LPELLTERQL

SEQ ID NO: 20403 - protein, 9 aa, Homo sapiens
  misc_feature: Table A; Target 20403; HLA-B*07:02; DCAF12L1; ENSG00000198889; CTA
LPSLDPLCL

SEQ ID NO: 20404 - protein, 9 aa, Homo sapiens
  misc_feature: Table A; Target 20404; HLA-B*35:01; DCAF12L1; ENSG00000198889; CTA
LPSLDPLCL

SEQ ID NO: 20405 - protein, 9 aa, Homo sapiens
  misc_feature: Table A; Target 20405; HLA-B*35:03; DCAF12L1; ENSG00000198889; CTA
LPSLDPLCL

SEQ ID NO: 20406 - protein, 9 aa, Homo sapiens
  misc_feature: Table A; Target 20406; HLA-B*51:01; DCAF12L1; ENSG00000198889; CTA
LPSLDPLCL

SEQ ID NO: 20407 - protein, 8 aa, Homo sapiens
  misc_feature: Table A; Target 20407; HLA-B*51:01; DCAF12L1; ENSG00000198889; CTA
LPYFRDNV

SEQ ID NO: 20408 - protein, 9 aa, Homo sapiens
  misc_feature: Table A; Target 20408; HLA-B*51:01; DCAF12L1; ENSG00000198889; CTA
LPYFRDNVC

SEQ ID NO: 20409 - protein, 9 aa, Homo sapiens
  misc_feature: Table A; Target 20409; HLA-B*54:01; DCAF12L1; ENSG00000198889; CTA
LPYFRDNVC

SEQ ID NO: 20410 - protein, 9 aa, Homo sapiens
  misc_feature: Table A; Target 20410; HLA-B*27:05; DCAF12L1; ENSG00000198889; CTA
LRQDQQNIR

SEQ ID NO: 20411 - protein, 9 aa, Homo sapiens
  misc_feature: Table A; Target 20411; HLA-A*01:01; DCAF12L1; ENSG00000198889; CTA
LSDTVAVSG

SEQ ID NO: 20412 - protein, 9 aa, Homo sapiens
  misc_feature: Table A; Target 20412; HLA-C*05:01; DCAF12L1; ENSG00000198889; CTA
LSDTVAVSG

SEQ ID NO: 20413 - protein, 8 aa, Homo sapiens
  misc_feature: Table A; Target 20413; HLA-B*57:01; DCAF12L1; ENSG00000198889; CTA
LSIRLPYF

SEQ ID NO: 20414 - protein, 10 aa, Homo sapiens
  misc_feature: Table A; Target 20414; HLA-A*01:01; DCAF12L1; ENSG00000198889; CTA
LTYCDDMSVY

SEQ ID NO: 20415 - protein, 9 aa, Homo sapiens
  misc_feature: Table A; Target 20415; HLA-A*33:03; DCAF12L1; ENSG00000198889; CTA
MAQQQTGSR

SEQ ID NO: 20416 - protein, 9 aa, Homo sapiens
  misc_feature: Table A; Target 20416; HLA-C*07:06; DCAF12L1; ENSG00000198889; CTA
MAQQQTGSR

SEQ ID NO: 20417 - protein, 8 aa, Homo sapiens
  misc_feature: Table A; Target 20417; HLA-A*30:01; DCAF12L1; ENSG00000198889; CTA
MEVFPNAL

SEQ ID NO: 20418 - protein, 8 aa, Homo sapiens
  misc_feature: Table A; Target 20418; HLA-B*18:01; DCAF12L1; ENSG00000198889; CTA
MEVFPNAL

SEQ ID NO: 20419 - protein, 8 aa, Homo sapiens
  misc_feature: Table A; Target 20419; HLA-B*40:01; DCAF12L1; ENSG00000198889; CTA
MEVFPNAL

SEQ ID NO: 20420 - protein, 8 aa, Homo sapiens
  misc_feature: Table A; Target 20420; HLA-B*49:01; DCAF12L1; ENSG00000198889; CTA
MEVFPNAL

SEQ ID NO: 20421 - protein, 9 aa, Homo sapiens
  misc_feature: Table A; Target 20421; HLA-A*29:02; DCAF12L1; ENSG00000198889; CTA
MEVFPNALY

SEQ ID NO: 20422 - protein, 9 aa, Homo sapiens
  misc_feature: Table A; Target 20422; HLA-B*18:01; DCAF12L1; ENSG00000198889; CTA
MEVFPNALY

SEQ ID NO: 20423 - protein, 9 aa, Homo sapiens
  misc_feature: Table A; Target 20423; HLA-B*44:02; DCAF12L1; ENSG00000198889; CTA
MEVFPNALY

SEQ ID NO: 20424 - protein, 9 aa, Homo sapiens
  misc_feature: Table A; Target 20424; HLA-B*44:03; DCAF12L1; ENSG00000198889; CTA
MEVFPNALY

SEQ ID NO: 20425 - protein, 8 aa, Homo sapiens
  misc_feature: Table A; Target 20425; HLA-B*37:01; DCAF12L1; ENSG00000198889; CTA
NDFWVNYF

SEQ ID NO: 20426 - protein, 9 aa, Homo sapiens
  misc_feature: Table A; Target 20426; HLA-A*29:02; DCAF12L1; ENSG00000198889; CTA
NHNDFWVNY

SEQ ID NO: 20427 - protein, 8 aa, Homo sapiens
  misc_feature: Table A; Target 20427; HLA-B*35:01; DCAF12L1; ENSG00000198889; CTA
NPNSLAIY

SEQ ID NO: 20428 - protein, 10 aa, Homo sapiens
  misc_feature: Table A; Target 20428; HLA-B*35:03; DCAF12L1; ENSG00000198889; CTA
NPNSLAIYQL

SEQ ID NO: 20429 - protein, 9 aa, Homo sapiens
  misc_feature: Table A; Target 20429; HLA-B*07:02; DCAF12L1; ENSG00000198889; CTA
NPSKTLLAT

SEQ ID NO: 20430 - protein, 10 aa, Homo sapiens
  misc_feature: Table A; Target 20430; HLA-B*07:02; DCAF12L1; ENSG00000198889; CTA
NPSNRKVRAL

SEQ ID NO: 20431 - protein, 10 aa, Homo sapiens
  misc_feature: Table A; Target 20431; HLA-C*07:02; DCAF12L1; ENSG00000198889; CTA
NPSNRKVRAL

SEQ ID NO: 20432 - protein, 9 aa, Homo sapiens
  misc_feature: Table A; Target 20432; HLA-B*27:05; DCAF12L1; ENSG00000198889; CTA
NQELGAVSL

SEQ ID NO: 20433 - protein, 9 aa, Homo sapiens
  misc_feature: Table A; Target 20433; HLA-B*38:01; DCAF12L1; ENSG00000198889; CTA
NQELGAVSL

SEQ ID NO: 20434 - protein, 9 aa, Homo sapiens
  misc_feature: Table A; Target 20434; HLA-B*39:01; DCAF12L1; ENSG00000198889; CTA
NQELGAVSL

SEQ ID NO: 20435 - protein, 9 aa, Homo sapiens
  misc_feature: Table A; Target 20435; HLA-C*05:01; DCAF12L1; ENSG00000198889; CTA
NQELGAVSL

SEQ ID NO: 20436 - protein, 9 aa, Homo sapiens
  misc_feature: Table A; Target 20436; HLA-C*07:04; DCAF12L1; ENSG00000198889; CTA
NQELGAVSL

SEQ ID NO: 20437 - protein, 8 aa, Homo sapiens
  misc_feature: Table A; Target 20437; HLA-C*14:02; DCAF12L1; ENSG00000198889; CTA
NYFGGMEV

SEQ ID NO: 20438 - protein, 9 aa, Homo sapiens
  misc_feature: Table A; Target 20438; HLA-A*23:01; DCAF12L1; ENSG00000198889; CTA
NYFGGMEVF

SEQ ID NO: 20439 - protein, 9 aa, Homo sapiens
  misc_feature: Table A; Target 20439; HLA-A*24:02; DCAF12L1; ENSG00000198889; CTA
NYFGGMEVF

SEQ ID NO: 20440 - protein, 9 aa, Homo sapiens
  misc_feature: Table A; Target 20440; HLA-C*14:02; DCAF12L1; ENSG00000198889; CTA
NYFGGMEVF

SEQ ID NO: 20441 - protein, 10 aa, Homo sapiens
  misc_feature: Table A; Target 20441; HLA-A*29:02; DCAF12L1; ENSG00000198889; CTA
PLPAGLHGNY

SEQ ID NO: 20442 - protein, 9 aa, Homo sapiens
  misc_feature: Table A; Target 20442; HLA-A*31:01; DCAF12L1; ENSG00000198889; CTA
PVYAHIRPR

SEQ ID NO: 20443 - protein, 9 aa, Homo sapiens
  misc_feature: Table A; Target 20443; HLA-B*37:01; DCAF12L1; ENSG00000198889; CTA
QDQQNIRPL

SEQ ID NO: 20444 - protein, 9 aa, Homo sapiens
  misc_feature: Table A; Target 20444; HLA-C*07:01; DCAF12L1; ENSG00000198889; CTA
QDQQNIRPL

SEQ ID NO: 20445 - protein, 8 aa, Homo sapiens
  misc_feature: Table A; Target 20445; HLA-A*30:01; DCAF12L1; ENSG00000198889; CTA
QELGAVSL

SEQ ID NO: 20446 - protein, 8 aa, Homo sapiens
  misc_feature: Table A; Target 20446; HLA-B*18:01; DCAF12L1; ENSG00000198889; CTA
QELGAVSL

SEQ ID NO: 20447 - protein, 8 aa, Homo sapiens
  misc_feature: Table A; Target 20447; HLA-B*37:01; DCAF12L1; ENSG00000198889; CTA
QELGAVSL

SEQ ID NO: 20448 - protein, 8 aa, Homo sapiens
  misc_feature: Table A; Target 20448; HLA-B*40:01; DCAF12L1; ENSG00000198889; CTA
QELGAVSL

SEQ ID NO: 20449 - protein, 11 aa, Homo sapiens
  misc_feature: Table A; Target 20449; HLA-A*30:02; DCAF12L1; ENSG00000198889; CTA
QELGAVSLDGY

SEQ ID NO: 20450 - protein, 11 aa, Homo sapiens
  misc_feature: Table A; Target 20450; HLA-B*18:01; DCAF12L1; ENSG00000198889; CTA
QELGAVSLDGY

SEQ ID NO: 20451 - protein, 11 aa, Homo sapiens
  misc_feature: Table A; Target 20451; HLA-B*44:02; DCAF12L1; ENSG00000198889; CTA
QELGAVSLDGY

SEQ ID NO: 20452 - protein, 11 aa, Homo sapiens
  misc_feature: Table A; Target 20452; HLA-B*44:03; DCAF12L1; ENSG00000198889; CTA
QELGAVSLDGY

SEQ ID NO: 20453 - protein, 11 aa, Homo sapiens
  misc_feature: Table A; Target 20453; HLA-C*16:04; DCAF12L1; ENSG00000198889; CTA
QELGAVSLDGY

SEQ ID NO: 20454 - protein, 10 aa, Homo sapiens
  misc_feature: Table A; Target 20454; HLA-A*25:01; DCAF12L1; ENSG00000198889; CTA
QGFDGELRGY

SEQ ID NO: 20455 - protein, 10 aa, Homo sapiens
  misc_feature: Table A; Target 20455; HLA-A*26:01; DCAF12L1; ENSG00000198889; CTA
QGFDGELRGY

SEQ ID NO: 20456 - protein, 10 aa, Homo sapiens
  misc_feature: Table A; Target 20456; HLA-A*30:02; DCAF12L1; ENSG00000198889; CTA
QGFDGELRGY

SEQ ID NO: 20457 - protein, 10 aa, Homo sapiens
  misc_feature: Table A; Target 20457; HLA-B*15:03; DCAF12L1; ENSG00000198889; CTA
QGFDGELRGY

SEQ ID NO: 20458 - protein, 10 aa, Homo sapiens
  misc_feature: Table A; Target 20458; HLA-B*35:01; DCAF12L1; ENSG00000198889; CTA
QGFDGELRGY

SEQ ID NO: 20459 - protein, 10 aa, Homo sapiens
  misc_feature: Table A; Target 20459; HLA-B*44:02; DCAF12L1; ENSG00000198889; CTA
QGFDGELRGY

SEQ ID NO: 20460 - protein, 10 aa, Homo sapiens
  misc_feature: Table A; Target 20460; HLA-B*44:03; DCAF12L1; ENSG00000198889; CTA
QGFDGELRGY

SEQ ID NO: 20461 - protein, 10 aa, Homo sapiens
  misc_feature: Table A; Target 20461; HLA-B*46:01; DCAF12L1; ENSG00000198889; CTA
QGFDGELRGY

SEQ ID NO: 20462 - protein, 10 aa, Homo sapiens
  misc_feature: Table A; Target 20462; HLA-C*12:03; DCAF12L1; ENSG00000198889; CTA
QGFDGELRGY

SEQ ID NO: 20463 - protein, 10 aa, Homo sapiens
  misc_feature: Table A; Target 20463; HLA-C*16:01; DCAF12L1; ENSG00000198889; CTA
QGFDGELRGY

SEQ ID NO: 20464 - protein, 10 aa, Homo sapiens
  misc_feature: Table A; Target 20464; HLA-C*16:02; DCAF12L1; ENSG00000198889; CTA
QGFDGELRGY

SEQ ID NO: 20465 - protein, 9 aa, Homo sapiens
  misc_feature: Table A; Target 20465; HLA-A*03:02; DCAF12L1; ENSG00000198889; CTA
QLELGTVNK

SEQ ID NO: 20466 - protein, 9 aa, Homo sapiens
  misc_feature: Table A; Target 20466; HLA-A*31:01; DCAF12L1; ENSG00000198889; CTA
QNIRPLCSR

SEQ ID NO: 20467 - protein, 9 aa, Homo sapiens
  misc_feature: Table A; Target 20467; HLA-A*33:01; DCAF12L1; ENSG00000198889; CTA
QNIRPLCSR

SEQ ID NO: 20468 - protein, 9 aa, Homo sapiens
  misc_feature: Table A; Target 20468; HLA-A*33:03; DCAF12L1; ENSG00000198889; CTA
QNIRPLCSR

SEQ ID NO: 20469 - protein, 9 aa, Homo sapiens
  misc_feature: Table A; Target 20469; HLA-B*13:02; DCAF12L1; ENSG00000198889; CTA
QQGCGIHAI

SEQ ID NO: 20470 - protein, 10 aa, Homo sapiens
  misc_feature: Table A; Target 20470; HLA-A*31:01; DCAF12L1; ENSG00000198889; CTA
QQNIRPLCSR

SEQ ID NO: 20471 - protein, 10 aa, Homo sapiens
  misc_feature: Table A; Target 20471; HLA-B*27:02; DCAF12L1; ENSG00000198889; CTA
QRLPELLTER

SEQ ID NO: 20472 - protein, 9 aa, Homo sapiens
  misc_feature: Table A; Target 20472; HLA-A*31:01; DCAF12L1; ENSG00000198889; CTA
RAIINPSNR

SEQ ID NO: 20473 - protein, 9 aa, Homo sapiens
  misc_feature: Table A; Target 20473; HLA-C*07:06; DCAF12L1; ENSG00000198889; CTA
RAIINPSNR

SEQ ID NO: 20474 - protein, 9 aa, Homo sapiens
  misc_feature: Table A; Target 20474; HLA-A*31:01; DCAF12L1; ENSG00000198889; CTA
RAQKFLEER

SEQ ID NO: 20475 - protein, 8 aa, Homo sapiens
  misc_feature: Table A; Target 20475; HLA-B*37:01; DCAF12L1; ENSG00000198889; CTA
RDGTVALW

SEQ ID NO: 20476 - protein, 8 aa, Homo sapiens
  misc_feature: Table A; Target 20476; HLA-B*37:01; DCAF12L1; ENSG00000198889; CTA
RDSEARLA

SEQ ID NO: 20477 - protein, 10 aa, Homo sapiens
  misc_feature: Table A; Target 20477; HLA-B*40:01; DCAF12L1; ENSG00000198889; CTA
REGGTGVRSL

SEQ ID NO: 20478 - protein, 10 aa, Homo sapiens
  misc_feature: Table A; Target 20478; HLA-B*57:01; DCAF12L1; ENSG00000198889; CTA
RGWLNHNDFW

SEQ ID NO: 20479 - protein, 9 aa, Homo sapiens
  misc_feature: Table A; Target 20479; HLA-A*03:01; DCAF12L1; ENSG00000198889; CTA
RLLSIRLPY

SEQ ID NO: 20480 - protein, 9 aa, Homo sapiens
  misc_feature: Table A; Target 20480; HLA-A*29:02; DCAF12L1; ENSG00000198889; CTA
RLLSIRLPY

SEQ ID NO: 20481 - protein, 9 aa, Homo sapiens
  misc_feature: Table A; Target 20481; HLA-B*57:01; DCAF12L1; ENSG00000198889; CTA
RLLSIRLPY

SEQ ID NO: 20482 - protein, 10 aa, Homo sapiens
  misc_feature: Table A; Target 20482; HLA-A*02:04; DCAF12L1; ENSG00000198889; CTA
RLLSIRLPYF

SEQ ID NO: 20483 - protein, 10 aa, Homo sapiens
  misc_feature: Table A; Target 20483; HLA-A*24:02; DCAF12L1; ENSG00000198889; CTA
RLLSIRLPYF

SEQ ID NO: 20484 - protein, 9 aa, Homo sapiens
  misc_feature: Table A; Target 20484; HLA-A*02:07; DCAF12L1; ENSG00000198889; CTA
RLPELLTER

SEQ ID NO: 20485 - protein, 9 aa, Homo sapiens
  misc_feature: Table A; Target 20485; HLA-A*03:01; DCAF12L1; ENSG00000198889; CTA
RLPELLTER

SEQ ID NO: 20486 - protein, 9 aa, Homo sapiens
  misc_feature: Table A; Target 20486; HLA-A*31:01; DCAF12L1; ENSG00000198889; CTA
RLPELLTER

SEQ ID NO: 20487 - protein, 11 aa, Homo sapiens
  misc_feature: Table A; Target 20487; HLA-A*02:07; DCAF12L1; ENSG00000198889; CTA
RLPELLTERQL

SEQ ID NO: 20488 - protein, 9 aa, Homo sapiens
  misc_feature: Table A; Target 20488; HLA-A*02:07; DCAF12L1; ENSG00000198889; CTA
RLPYFRDNV

SEQ ID NO: 20489 - protein, 8 aa, Homo sapiens
  misc_feature: Table A; Target 20489; HLA-B*07:02; DCAF12L1; ENSG00000198889; CTA
RPATYRSM

SEQ ID NO: 20490 - protein, 9 aa, Homo sapiens
  misc_feature: Table A; Target 20490; HLA-B*07:02; DCAF12L1; ENSG00000198889; CTA
RPATYRSMA

SEQ ID NO: 20491 - protein, 10 aa, Homo sapiens
  misc_feature: Table A; Target 20491; HLA-A*31:01; DCAF12L1; ENSG00000198889; CTA
RPRDVEAIPR

SEQ ID NO: 20492 - protein, 10 aa, Homo sapiens
  misc_feature: Table A; Target 20492; HLA-A*03:01; DCAF12L1; ENSG00000198889; CTA
RQLELGTVNK

SEQ ID NO: 20493 - protein, 10 aa, Homo sapiens
  misc_feature: Table A; Target 20493; HLA-A*03:02; DCAF12L1; ENSG00000198889; CTA
RQLELGTVNK

SEQ ID NO: 20494 - protein, 10 aa, Homo sapiens
  misc_feature: Table A; Target 20494; HLA-A*11:01; DCAF12L1; ENSG00000198889; CTA
RQLELGTVNK

SEQ ID NO: 20495 - protein, 10 aa, Homo sapiens
  misc_feature: Table A; Target 20495; HLA-A*31:01; DCAF12L1; ENSG00000198889; CTA
RQLELGTVNK

SEQ ID NO: 20496 - protein, 10 aa, Homo sapiens
  misc_feature: Table A; Target 20496; HLA-B*27:05; DCAF12L1; ENSG00000198889; CTA
RQLELGTVNK

SEQ ID NO: 20497 - protein, 11 aa, Homo sapiens
  misc_feature: Table A; Target 20497; HLA-A*02:01; DCAF12L1; ENSG00000198889; CTA
RQLELGTVNKV

SEQ ID NO: 20498 - protein, 11 aa, Homo sapiens
  misc_feature: Table A; Target 20498; HLA-A*02:04; DCAF12L1; ENSG00000198889; CTA
RQLELGTVNKV

SEQ ID NO: 20499 - protein, 11 aa, Homo sapiens
  misc_feature: Table A; Target 20499; HLA-B*13:02; DCAF12L1; ENSG00000198889; CTA
RQLELGTVNKV

SEQ ID NO: 20500 - protein, 9 aa, Homo sapiens
  misc_feature: Table A; Target 20500; HLA-A*03:01; DCAF12L1; ENSG00000198889; CTA
RQRRPATYR

SEQ ID NO: 20501 - protein, 9 aa, Homo sapiens
  misc_feature: Table A; Target 20501; HLA-A*31:01; DCAF12L1; ENSG00000198889; CTA
RQRRPATYR

SEQ ID NO: 20502 - protein, 9 aa, Homo sapiens
  misc_feature: Table A; Target 20502; HLA-A*02:01; DCAF12L1; ENSG00000198889; CTA
SALSRLLSI

SEQ ID NO: 20503 - protein, 9 aa, Homo sapiens
  misc_feature: Table A; Target 20503; HLA-A*02:03; DCAF12L1; ENSG00000198889; CTA
SALSRLLSI

SEQ ID NO: 20504 - protein, 9 aa, Homo sapiens
  misc_feature: Table A; Target 20504; HLA-A*02:04; DCAF12L1; ENSG00000198889; CTA
SALSRLLSI

SEQ ID NO: 20505 - protein, 9 aa, Homo sapiens
  misc_feature: Table A; Target 20505; HLA-A*23:01; DCAF12L1; ENSG00000198889; CTA
SALSRLLSI

SEQ ID NO: 20506 - protein, 9 aa, Homo sapiens
  misc_feature: Table A; Target 20506; HLA-B*08:01; DCAF12L1; ENSG00000198889; CTA
SALSRLLSI

SEQ ID NO: 20507 - protein, 9 aa, Homo sapiens
  misc_feature: Table A; Target 20507; HLA-B*13:02; DCAF12L1; ENSG00000198889; CTA
SALSRLLSI

SEQ ID NO: 20508 - protein, 9 aa, Homo sapiens
  misc_feature: Table A; Target 20508; HLA-B*51:01; DCAF12L1; ENSG00000198889; CTA
SALSRLLSI

SEQ ID NO: 20509 - protein, 9 aa, Homo sapiens
  misc_feature: Table A; Target 20509; HLA-B*54:01; DCAF12L1; ENSG00000198889; CTA
SALSRLLSI

SEQ ID NO: 20510 - protein, 9 aa, Homo sapiens
  misc_feature: Table A; Target 20510; HLA-C*03:03; DCAF12L1; ENSG00000198889; CTA
SALSRLLSI

SEQ ID NO: 20511 - protein, 9 aa, Homo sapiens
  misc_feature: Table A; Target 20511; HLA-C*03:04; DCAF12L1; ENSG00000198889; CTA
SALSRLLSI

SEQ ID NO: 20512 - protein, 9 aa, Homo sapiens
  misc_feature: Table A; Target 20512; HLA-C*16:01; DCAF12L1; ENSG00000198889; CTA
SALSRLLSI

SEQ ID NO: 20513 - protein, 9 aa, Homo sapiens
  misc_feature: Table A; Target 20513; HLA-C*16:02; DCAF12L1; ENSG00000198889; CTA
SALSRLLSI

SEQ ID NO: 20514 - protein, 8 aa, Homo sapiens
  misc_feature: Table A; Target 20514; HLA-A*30:01; DCAF12L1; ENSG00000198889; CTA
SEVGLPVY

SEQ ID NO: 20515 - protein, 8 aa, Homo sapiens
  misc_feature: Table A; Target 20515; HLA-B*15:01; DCAF12L1; ENSG00000198889; CTA
SEVGLPVY

SEQ ID NO: 20516 - protein, 8 aa, Homo sapiens
  misc_feature: Table A; Target 20516; HLA-B*15:03; DCAF12L1; ENSG00000198889; CTA
SEVGLPVY

SEQ ID NO: 20517 - protein, 8 aa, Homo sapiens
  misc_feature: Table A; Target 20517; HLA-B*18:01; DCAF12L1; ENSG00000198889; CTA
SEVGLPVY

SEQ ID NO: 20518 - protein, 8 aa, Homo sapiens
  misc_feature: Table A; Target 20518; HLA-B*37:01; DCAF12L1; ENSG00000198889; CTA
SEVGLPVY

SEQ ID NO: 20519 - protein, 8 aa, Homo sapiens
  misc_feature: Table A; Target 20519; HLA-B*39:01; DCAF12L1; ENSG00000198889; CTA
SEVGLPVY

SEQ ID NO: 20520 - protein, 8 aa, Homo sapiens
  misc_feature: Table A; Target 20520; HLA-B*40:02; DCAF12L1; ENSG00000198889; CTA
SEVGLPVY

SEQ ID NO: 20521 - protein, 8 aa, Homo sapiens
  misc_feature: Table A; Target 20521; HLA-B*44:02; DCAF12L1; ENSG00000198889; CTA
SEVGLPVY

SEQ ID NO: 20522 - protein, 8 aa, Homo sapiens
  misc_feature: Table A; Target 20522; HLA-B*44:03; DCAF12L1; ENSG00000198889; CTA
SEVGLPVY

SEQ ID NO: 20523 - protein, 8 aa, Homo sapiens
  misc_feature: Table A; Target 20523; HLA-B*49:01; DCAF12L1; ENSG00000198889; CTA
SEVGLPVY

SEQ ID NO: 20524 - protein, 8 aa, Homo sapiens
  misc_feature: Table A; Target 20524; HLA-C*02:02; DCAF12L1; ENSG00000198889; CTA
SEVGLPVY

SEQ ID NO: 20525 - protein, 8 aa, Homo sapiens
  misc_feature: Table A; Target 20525; HLA-C*07:04; DCAF12L1; ENSG00000198889; CTA
SEVGLPVY

SEQ ID NO: 20526 - protein, 8 aa, Homo sapiens
  misc_feature: Table A; Target 20526; HLA-C*12:03; DCAF12L1; ENSG00000198889; CTA
SEVGLPVY

SEQ ID NO: 20527 - protein, 8 aa, Homo sapiens
  misc_feature: Table A; Target 20527; HLA-C*16:04; DCAF12L1; ENSG00000198889; CTA
SEVGLPVY

SEQ ID NO: 20528 - protein, 9 aa, Homo sapiens
  misc_feature: Table A; Target 20528; HLA-A*30:01; DCAF12L1; ENSG00000198889; CTA
SEVGLPVYA

SEQ ID NO: 20529 - protein, 9 aa, Homo sapiens
  misc_feature: Table A; Target 20529; HLA-B*18:01; DCAF12L1; ENSG00000198889; CTA
SEVGLPVYA

SEQ ID NO: 20530 - protein, 9 aa, Homo sapiens
  misc_feature: Table A; Target 20530; HLA-B*40:01; DCAF12L1; ENSG00000198889; CTA
SEVGLPVYA

SEQ ID NO: 20531 - protein, 9 aa, Homo sapiens
  misc_feature: Table A; Target 20531; HLA-B*40:02; DCAF12L1; ENSG00000198889; CTA
SEVGLPVYA

SEQ ID NO: 20532 - protein, 9 aa, Homo sapiens
  misc_feature: Table A; Target 20532; HLA-B*44:02; DCAF12L1; ENSG00000198889; CTA
SEVGLPVYA

SEQ ID NO: 20533 - protein, 9 aa, Homo sapiens
  misc_feature: Table A; Target 20533; HLA-B*44:03; DCAF12L1; ENSG00000198889; CTA
SEVGLPVYA

SEQ ID NO: 20534 - protein, 9 aa, Homo sapiens
  misc_feature: Table A; Target 20534; HLA-B*49:01; DCAF12L1; ENSG00000198889; CTA
SEVGLPVYA

SEQ ID NO: 20535 - protein, 9 aa, Homo sapiens
  misc_feature: Table A; Target 20535; HLA-C*02:02; DCAF12L1; ENSG00000198889; CTA
SEVGLPVYA

SEQ ID NO: 20536 - protein, 9 aa, Homo sapiens
  misc_feature: Table A; Target 20536; HLA-C*12:03; DCAF12L1; ENSG00000198889; CTA
SEVGLPVYA

SEQ ID NO: 20537 - protein, 11 aa, Homo sapiens
  misc_feature: Table A; Target 20537; HLA-B*44:02; DCAF12L1; ENSG00000198889; CTA
SEVGLPVYAHI

SEQ ID NO: 20538 - protein, 11 aa, Homo sapiens
  misc_feature: Table A; Target 20538; HLA-B*44:03; DCAF12L1; ENSG00000198889; CTA
SEVGLPVYAHI

SEQ ID NO: 20539 - protein, 9 aa, Homo sapiens
  misc_feature: Table A; Target 20539; HLA-A*02:01; DCAF12L1; ENSG00000198889; CTA
SFYRHIITV

SEQ ID NO: 20540 - protein, 9 aa, Homo sapiens
  misc_feature: Table A; Target 20540; HLA-A*02:03; DCAF12L1; ENSG00000198889; CTA
SFYRHIITV

SEQ ID NO: 20541 - protein, 9 aa, Homo sapiens
  misc_feature: Table A; Target 20541; HLA-A*02:04; DCAF12L1; ENSG00000198889; CTA
SFYRHIITV

SEQ ID NO: 20542 - protein, 11 aa, Homo sapiens
  misc_feature: Table A; Target 20542; HLA-B*57:01; DCAF12L1; ENSG00000198889; CTA
SGSRDGTVALW

SEQ ID NO: 20543 - protein, 8 aa, Homo sapiens
  misc_feature: Table A; Target 20543; HLA-A*02:07; DCAF12L1; ENSG00000198889; CTA
SLDGYFHL

SEQ ID NO: 20544 - protein, 9 aa, Homo sapiens
  misc_feature: Table A; Target 20544; HLA-A*01:01; DCAF12L1; ENSG00000198889; CTA
SLDGYFHLW

SEQ ID NO: 20545 - protein, 9 aa, Homo sapiens
  misc_feature: Table A; Target 20545; HLA-A*02:07; DCAF12L1; ENSG00000198889; CTA
SLDGYFHLW

SEQ ID NO: 20546 - protein, 9 aa, Homo sapiens
  misc_feature: Table A; Target 20546; HLA-A*24:02; DCAF12L1; ENSG00000198889; CTA
SLDGYFHLW

SEQ ID NO: 20547 - protein, 9 aa, Homo sapiens
  misc_feature: Table A; Target 20547; HLA-A*29:02; DCAF12L1; ENSG00000198889; CTA
SLDGYFHLW

SEQ ID NO: 20548 - protein, 9 aa, Homo sapiens
  misc_feature: Table A; Target 20548; HLA-B*44:02; DCAF12L1; ENSG00000198889; CTA
SLDGYFHLW

SEQ ID NO: 20549 - protein, 9 aa, Homo sapiens
  misc_feature: Table A; Target 20549; HLA-B*44:03; DCAF12L1; ENSG00000198889; CTA
SLDGYFHLW

SEQ ID NO: 20550 - protein, 9 aa, Homo sapiens
  misc_feature: Table A; Target 20550; HLA-B*57:01; DCAF12L1; ENSG00000198889; CTA
SLDGYFHLW

SEQ ID NO: 20551 - protein, 9 aa, Homo sapiens
  misc_feature: Table A; Target 20551; HLA-A*02:04; DCAF12L1; ENSG00000198889; CTA
SLLFYDVRA

SEQ ID NO: 20552 - protein, 9 aa, Homo sapiens
  misc_feature: Table A; Target 20552; HLA-A*31:01; DCAF12L1; ENSG00000198889; CTA
SMAHYLKVR

SEQ ID NO: 20553 - protein, 9 aa, Homo sapiens
  misc_feature: Table A; Target 20553; HLA-A*33:01; DCAF12L1; ENSG00000198889; CTA
SMAHYLKVR

SEQ ID NO: 20554 - protein, 8 aa, Homo sapiens
  misc_feature: Table A; Target 20554; HLA-B*56:01; DCAF12L1; ENSG00000198889; CTA
SPSQGLAA

SEQ ID NO: 20555 - protein, 9 aa, Homo sapiens
  misc_feature: Table A; Target 20555; HLA-B*07:02; DCAF12L1; ENSG00000198889; CTA
SPSQGLAAA

SEQ ID NO: 20556 - protein, 9 aa, Homo sapiens
  misc_feature: Table A; Target 20556; HLA-B*54:01; DCAF12L1; ENSG00000198889; CTA
SPSQGLAAA

SEQ ID NO: 20557 - protein, 9 aa, Homo sapiens
  misc_feature: Table A; Target 20557; HLA-B*55:01; DCAF12L1; ENSG00000198889; CTA
SPSQGLAAA

SEQ ID NO: 20558 - protein, 9 aa, Homo sapiens
  misc_feature: Table A; Target 20558; HLA-B*56:01; DCAF12L1; ENSG00000198889; CTA
SPSQGLAAA

SEQ ID NO: 20559 - protein, 9 aa, Homo sapiens
  misc_feature: Table A; Target 20559; HLA-B*13:02; DCAF12L1; ENSG00000198889; CTA
SQWLNSRQV

SEQ ID NO: 20560 - protein, 9 aa, Homo sapiens
  misc_feature: Table A; Target 20560; HLA-B*38:01; DCAF12L1; ENSG00000198889; CTA
SRDGTVALW

SEQ ID NO: 20561 - protein, 9 aa, Homo sapiens
  misc_feature: Table A; Target 20561; HLA-C*16:04; DCAF12L1; ENSG00000198889; CTA
SRDGTVALW

SEQ ID NO: 20562 - protein, 9 aa, Homo sapiens
  misc_feature: Table A; Target 20562; HLA-B*27:05; DCAF12L1; ENSG00000198889; CTA
SREGGTGVR

SEQ ID NO: 20563 - protein, 11 aa, Homo sapiens
  misc_feature: Table A; Target 20563; HLA-C*06:02; DCAF12L1; ENSG00000198889; CTA
SREGGTGVRSL

SEQ ID NO: 20564 - protein, 11 aa, Homo sapiens
  misc_feature: Table A; Target 20564; HLA-C*07:02; DCAF12L1; ENSG00000198889; CTA
SREGGTGVRSL

SEQ ID NO: 20565 - protein, 9 aa, Homo sapiens
  misc_feature: Table A; Target 20565; HLA-C*01:02; DCAF12L1; ENSG00000198889; CTA
SSPSQGLAA

SEQ ID NO: 20566 - protein, 10 aa, Homo sapiens
  misc_feature: Table A; Target 20566; HLA-A*03:01; DCAF12L1; ENSG00000198889; CTA
SVYAVGSHSH

SEQ ID NO: 20567 - protein, 10 aa, Homo sapiens
  misc_feature: Table A; Target 20567; HLA-A*03:02; DCAF12L1; ENSG00000198889; CTA
SVYAVGSHSH

SEQ ID NO: 20568 - protein, 10 aa, Homo sapiens
  misc_feature: Table A; Target 20568; HLA-A*11:01; DCAF12L1; ENSG00000198889; CTA
SVYAVGSHSH

SEQ ID NO: 20569 - protein, 10 aa, Homo sapiens
  misc_feature: Table A; Target 20569; HLA-A*30:02; DCAF12L1; ENSG00000198889; CTA
SVYAVGSHSH

SEQ ID NO: 20570 - protein, 11 aa, Homo sapiens
  misc_feature: Table A; Target 20570; HLA-A*68:02; DCAF12L1; ENSG00000198889; CTA
SVYAVGSHSHV

SEQ ID NO: 20571 - protein, 10 aa, Homo sapiens
  misc_feature: Table A; Target 20571; HLA-B*40:02; DCAF12L1; ENSG00000198889; CTA
TERQLELGTV

SEQ ID NO: 20572 - protein, 10 aa, Homo sapiens
  misc_feature: Table A; Target 20572; HLA-B*49:01; DCAF12L1; ENSG00000198889; CTA
TERQLELGTV

SEQ ID NO: 20573 - protein, 9 aa, Homo sapiens
  misc_feature: Table A; Target 20573; HLA-B*35:03; DCAF12L1; ENSG00000198889; CTA
TGGENPNSL

SEQ ID NO: 20574 - protein, 9 aa, Homo sapiens
  misc_feature: Table A; Target 20574; HLA-B*39:01; DCAF12L1; ENSG00000198889; CTA
TGGENPNSL

SEQ ID NO: 20575 - protein, 9 aa, Homo sapiens
  misc_feature: Table A; Target 20575; HLA-C*01:02; DCAF12L1; ENSG00000198889; CTA
TGGENPNSL

SEQ ID NO: 20576 - protein, 9 aa, Homo sapiens
  misc_feature: Table A; Target 20576; HLA-C*14:02; DCAF12L1; ENSG00000198889; CTA
TGGENPNSL

SEQ ID NO: 20577 - protein, 9 aa, Homo sapiens
  misc_feature: Table A; Target 20577; HLA-C*16:02; DCAF12L1; ENSG00000198889; CTA
TGGENPNSL

SEQ ID NO: 20578 - protein, 9 aa, Homo sapiens
  misc_feature: Table A; Target 20578; HLA-A*30:02; DCAF12L1; ENSG00000198889; CTA
TGQGSLLFY

SEQ ID NO: 20579 - protein, 10 aa, Homo sapiens
  misc_feature: Table A; Target 20579; HLA-A*68:01; DCAF12L1; ENSG00000198889; CTA
TLESSSGPAR

SEQ ID NO: 20580 - protein, 9 aa, Homo sapiens
  misc_feature: Table A; Target 20580; HLA-C*01:02; DCAF12L1; ENSG00000198889; CTA
TVGTGQGSL

SEQ ID NO: 20581 - protein, 10 aa, Homo sapiens
  misc_feature: Table A; Target 20581; HLA-A*25:01; DCAF12L1; ENSG00000198889; CTA
TVNKVFASQW

SEQ ID NO: 20582 - protein, 10 aa, Homo sapiens
  misc_feature: Table A; Target 20582; HLA-A*32:01; DCAF12L1; ENSG00000198889; CTA
TVNKVFASQW

SEQ ID NO: 20583 - protein, 10 aa, Homo sapiens
  misc_feature: Table A; Target 20583; HLA-B*44:02; DCAF12L1; ENSG00000198889; CTA
TVNKVFASQW

SEQ ID NO: 20584 - protein, 10 aa, Homo sapiens
  misc_feature: Table A; Target 20584; HLA-B*44:03; DCAF12L1; ENSG00000198889; CTA
TVNKVFASQW

SEQ ID NO: 20585 - protein, 10 aa, Homo sapiens
  misc_feature: Table A; Target 20585; HLA-B*57:01; DCAF12L1; ENSG00000198889; CTA
TVNKVFASQW

SEQ ID NO: 20586 - protein, 10 aa, Homo sapiens
  misc_feature: Table A; Target 20586; HLA-B*58:01; DCAF12L1; ENSG00000198889; CTA
TVNKVFASQW

SEQ ID NO: 20587 - protein, 9 aa, Homo sapiens
  misc_feature: Table A; Target 20587; HLA-A*29:02; DCAF12L1; ENSG00000198889; CTA
TYCDDMSVY

SEQ ID NO: 20588 - protein, 9 aa, Homo sapiens
  misc_feature: Table A; Target 20588; HLA-C*07:01; DCAF12L1; ENSG00000198889; CTA
TYCDDMSVY

SEQ ID NO: 20589 - protein, 9 aa, Homo sapiens
  misc_feature: Table A; Target 20589; HLA-C*14:02; DCAF12L1; ENSG00000198889; CTA
TYCDDMSVY

SEQ ID NO: 20590 - protein, 9 aa, Homo sapiens
  misc_feature: Table A; Target 20590; HLA-A*24:02; DCAF12L1; ENSG00000198889; CTA
TYRSMAHYL

SEQ ID NO: 20591 - protein, 9 aa, Homo sapiens
  misc_feature: Table A; Target 20591; HLA-B*46:01; DCAF12L1; ENSG00000198889; CTA
VAGGPLPAG

SEQ ID NO: 20592 - protein, 9 aa, Homo sapiens
  misc_feature: Table A; Target 20592; HLA-B*56:01; DCAF12L1; ENSG00000198889; CTA
VAGGPLPAG

SEQ ID NO: 20593 - protein, 10 aa, Homo sapiens
  misc_feature: Table A; Target 20593; HLA-B*07:02; DCAF12L1; ENSG00000198889; CTA
VAGGPLPAGL

SEQ ID NO: 20594 - protein, 10 aa, Homo sapiens
  misc_feature: Table A; Target 20594; HLA-C*07:02; DCAF12L1; ENSG00000198889; CTA
VAGGPLPAGL

SEQ ID NO: 20595 - protein, 11 aa, Homo sapiens
  misc_feature: Table A; Target 20595; HLA-C*16:02; DCAF12L1; ENSG00000198889; CTA
VAVSGSRDGTV

SEQ ID NO: 20596 - protein, 9 aa, Homo sapiens
  misc_feature: Table A; Target 20596; HLA-C*03:04; DCAF12L1; ENSG00000198889; CTA
VAWHSEVGL

SEQ ID NO: 20597 - protein, 8 aa, Homo sapiens
  misc_feature: Table A; Target 20597; HLA-B*51:01; DCAF12L1; ENSG00000198889; CTA
VAWLSDTV

SEQ ID NO: 20598 - protein, 9 aa, Homo sapiens
  misc_feature: Table A; Target 20598; HLA-B*54:01; DCAF12L1; ENSG00000198889; CTA
VAWLSDTVA

SEQ ID NO: 20599 - protein, 8 aa, Homo sapiens
  misc_feature: Table A; Target 20599; HLA-B*49:01; DCAF12L1; ENSG00000198889; CTA
VDVESGHI

SEQ ID NO: 20600 - protein, 8 aa, Homo sapiens
  misc_feature: Table A; Target 20600; HLA-B*49:01; DCAF12L1; ENSG00000198889; CTA
VEAIPRAI

SEQ ID NO: 20601 - protein, 9 aa, Homo sapiens
  misc_feature: Table A; Target 20601; HLA-B*40:01; DCAF12L1; ENSG00000198889; CTA
VEAIPRAII

SEQ ID NO: 20602 - protein, 9 aa, Homo sapiens
  misc_feature: Table A; Target 20602; HLA-B*44:02; DCAF12L1; ENSG00000198889; CTA
VEAIPRAII

SEQ ID NO: 20603 - protein, 9 aa, Homo sapiens
  misc_feature: Table A; Target 20603; HLA-B*44:03; DCAF12L1; ENSG00000198889; CTA
VEAIPRAII

SEQ ID NO: 20604 - protein, 9 aa, Homo sapiens
  misc_feature: Table A; Target 20604; HLA-B*49:01; DCAF12L1; ENSG00000198889; CTA
VEAIPRAII

SEQ ID NO: 20605 - protein, 9 aa, Homo sapiens
  misc_feature: Table A; Target 20605; HLA-A*30:01; DCAF12L1; ENSG00000198889; CTA
VESGHIARI

SEQ ID NO: 20606 - protein, 9 aa, Homo sapiens
  misc_feature: Table A; Target 20606; HLA-B*37:01; DCAF12L1; ENSG00000198889; CTA
VESGHIARI

SEQ ID NO: 20607 - protein, 9 aa, Homo sapiens
  misc_feature: Table A; Target 20607; HLA-B*40:01; DCAF12L1; ENSG00000198889; CTA
VESGHIARI

SEQ ID NO: 20608 - protein, 9 aa, Homo sapiens
  misc_feature: Table A; Target 20608; HLA-B*44:02; DCAF12L1; ENSG00000198889; CTA
VESGHIARI

SEQ ID NO: 20609 - protein, 9 aa, Homo sapiens
  misc_feature: Table A; Target 20609; HLA-B*44:03; DCAF12L1; ENSG00000198889; CTA
VESGHIARI

SEQ ID NO: 20610 - protein, 9 aa, Homo sapiens
  misc_feature: Table A; Target 20610; HLA-B*49:01; DCAF12L1; ENSG00000198889; CTA
VESGHIARI

SEQ ID NO: 20611 - protein, 9 aa, Homo sapiens
  misc_feature: Table A; Target 20611; HLA-C*02:02; DCAF12L1; ENSG00000198889; CTA
VESGHIARI

SEQ ID NO: 20612 - protein, 9 aa, Homo sapiens
  misc_feature: Table A; Target 20612; HLA-A*24:02; DCAF12L1; ENSG00000198889; CTA
VFPNALYTH

SEQ ID NO: 20613 - protein, 11 aa, Homo sapiens
  misc_feature: Table A; Target 20613; HLA-A*29:02; DCAF12L1; ENSG00000198889; CTA
VFPNALYTHCY

SEQ ID NO: 20614 - protein, 9 aa, Homo sapiens
  misc_feature: Table A; Target 20614; HLA-A*23:01; DCAF12L1; ENSG00000198889; CTA
VGLPVYAHI

SEQ ID NO: 20615 - protein, 9 aa, Homo sapiens
  misc_feature: Table A; Target 20615; HLA-A*24:02; DCAF12L1; ENSG00000198889; CTA
VGLPVYAHI

SEQ ID NO: 20616 - protein, 9 aa, Homo sapiens
  misc_feature: Table A; Target 20616; HLA-B*51:01; DCAF12L1; ENSG00000198889; CTA
VGLPVYAHI

SEQ ID NO: 20617 - protein, 10 aa, Homo sapiens
  misc_feature: Table A; Target 20617; HLA-A*31:01; DCAF12L1; ENSG00000198889; CTA
VGLPVYAHIR

SEQ ID NO: 20618 - protein, 9 aa, Homo sapiens
  misc_feature: Table A; Target 20618; HLA-B*15:03; DCAF12L1; ENSG00000198889; CTA
VGSHSHVSF

SEQ ID NO: 20619 - protein, 9 aa, Homo sapiens
  misc_feature: Table A; Target 20619; HLA-B*46:01; DCAF12L1; ENSG00000198889; CTA
VGSHSHVSF

SEQ ID NO: 20620 - protein, 9 aa, Homo sapiens
  misc_feature: Table A; Target 20620; HLA-C*02:02; DCAF12L1; ENSG00000198889; CTA
VGSHSHVSF

SEQ ID NO: 20621 - protein, 9 aa, Homo sapiens
  misc_feature: Table A; Target 20621; HLA-C*03:04; DCAF12L1; ENSG00000198889; CTA
VGSHSHVSF

SEQ ID NO: 20622 - protein, 9 aa, Homo sapiens
  misc_feature: Table A; Target 20622; HLA-C*07:04; DCAF12L1; ENSG00000198889; CTA
VGSHSHVSF

SEQ ID NO: 20623 - protein, 9 aa, Homo sapiens
  misc_feature: Table A; Target 20623; HLA-C*12:03; DCAF12L1; ENSG00000198889; CTA
VGSHSHVSF

SEQ ID NO: 20624 - protein, 9 aa, Homo sapiens
  misc_feature: Table A; Target 20624; HLA-C*14:02; DCAF12L1; ENSG00000198889; CTA
VGSHSHVSF

SEQ ID NO: 20625 - protein, 9 aa, Homo sapiens
  misc_feature: Table A; Target 20625; HLA-C*16:01; DCAF12L1; ENSG00000198889; CTA
VGSHSHVSF

SEQ ID NO: 20626 - protein, 9 aa, Homo sapiens
  misc_feature: Table A; Target 20626; HLA-C*16:02; DCAF12L1; ENSG00000198889; CTA
VGSHSHVSF

SEQ ID NO: 20627 - protein, 9 aa, Homo sapiens
  misc_feature: Table A; Target 20627; HLA-C*01:02; DCAF12L1; ENSG00000198889; CTA
VGTGQGSLL

SEQ ID NO: 20628 - protein, 9 aa, Homo sapiens
  misc_feature: Table A; Target 20628; HLA-C*03:03; DCAF12L1; ENSG00000198889; CTA
VGTGQGSLL

SEQ ID NO: 20629 - protein, 9 aa, Homo sapiens
  misc_feature: Table A; Target 20629; HLA-C*03:04; DCAF12L1; ENSG00000198889; CTA
VGTGQGSLL

SEQ ID NO: 20630 - protein, 9 aa, Homo sapiens
  misc_feature: Table A; Target 20630; HLA-C*05:01; DCAF12L1; ENSG00000198889; CTA
VGTGQGSLL

SEQ ID NO: 20631 - protein, 9 aa, Homo sapiens
  misc_feature: Table A; Target 20631; HLA-C*14:02; DCAF12L1; ENSG00000198889; CTA
VGTGQGSLL

SEQ ID NO: 20632 - protein, 11 aa, Homo sapiens
  misc_feature: Table A; Target 20632; HLA-A*30:02; DCAF12L1; ENSG00000198889; CTA
VGTGQGSLLFY

SEQ ID NO: 20633 - protein, 11 aa, Homo sapiens
  misc_feature: Table A; Target 20633; HLA-A*31:01; DCAF12L1; ENSG00000198889; CTA
VQRLPELLTER

SEQ ID NO: 20634 - protein, 11 aa, Homo sapiens
  misc_feature: Table A; Target 20634; HLA-A*33:01; DCAF12L1; ENSG00000198889; CTA
VQRLPELLTER

SEQ ID NO: 20635 - protein, 9 aa, Homo sapiens
  misc_feature: Table A; Target 20635; HLA-A*02:04; DCAF12L1; ENSG00000198889; CTA
VSLDGYFHL

SEQ ID NO: 20636 - protein, 9 aa, Homo sapiens
  misc_feature: Table A; Target 20636; HLA-A*23:01; DCAF12L1; ENSG00000198889; CTA
VSLDGYFHL

SEQ ID NO: 20637 - protein, 9 aa, Homo sapiens
  misc_feature: Table A; Target 20637; HLA-A*24:02; DCAF12L1; ENSG00000198889; CTA
VSLDGYFHL

SEQ ID NO: 20638 - protein, 10 aa, Homo sapiens
  misc_feature: Table A; Target 20638; HLA-A*24:02; DCAF12L1; ENSG00000198889; CTA
VSLDGYFHLW

SEQ ID NO: 20639 - protein, 10 aa, Homo sapiens
  misc_feature: Table A; Target 20639; HLA-B*44:02; DCAF12L1; ENSG00000198889; CTA
VSLDGYFHLW

SEQ ID NO: 20640 - protein, 10 aa, Homo sapiens
  misc_feature: Table A; Target 20640; HLA-B*57:01; DCAF12L1; ENSG00000198889; CTA
VSLDGYFHLW

SEQ ID NO: 20641 - protein, 8 aa, Homo sapiens
  misc_feature: Table A; Target 20641; HLA-C*05:01; DCAF12L1; ENSG00000198889; CTA
VVDVESGH

SEQ ID NO: 20642 - protein, 9 aa, Homo sapiens
  misc_feature: Table A; Target 20642; HLA-C*04:01; DCAF12L1; ENSG00000198889; CTA
VVDVESGHI

SEQ ID NO: 20643 - protein, 9 aa, Homo sapiens
  misc_feature: Table A; Target 20643; HLA-C*05:01; DCAF12L1; ENSG00000198889; CTA
VVDVESGHI

SEQ ID NO: 20644 - protein, 11 aa, Homo sapiens
  misc_feature: Table A; Target 20644; HLA-A*31:01; DCAF12L1; ENSG00000198889; CTA
VVDVESGHIAR

SEQ ID NO: 20645 - protein, 11 aa, Homo sapiens
  misc_feature: Table A; Target 20645; HLA-A*33:01; DCAF12L1; ENSG00000198889; CTA
VVDVESGHIAR

SEQ ID NO: 20646 - protein, 8 aa, Homo sapiens
  misc_feature: Table A; Target 20646; HLA-C*14:02; DCAF12L1; ENSG00000198889; CTA
VYAVGSHS

SEQ ID NO: 20647 - protein, 9 aa, Homo sapiens
  misc_feature: Table A; Target 20647; HLA-A*24:02; DCAF12L1; ENSG00000198889; CTA
VYAVGSHSH

SEQ ID NO: 20648 - protein, 9 aa, Homo sapiens
  misc_feature: Table A; Target 20648; HLA-C*14:02; DCAF12L1; ENSG00000198889; CTA
VYAVGSHSH

SEQ ID NO: 20649 - protein, 8 aa, Homo sapiens
  misc_feature: Table A; Target 20649; HLA-B*08:01; DCAF12L1; ENSG00000198889; CTA
WLNSRQVV

SEQ ID NO: 20650 - protein, 9 aa, Homo sapiens
  misc_feature: Table A; Target 20650; HLA-A*26:01; DCAF12L1; ENSG00000198889; CTA
YAVGSHSHV

SEQ ID NO: 20651 - protein, 9 aa, Homo sapiens
  misc_feature: Table A; Target 20651; HLA-A*68:02; DCAF12L1; ENSG00000198889; CTA
YAVGSHSHV

SEQ ID NO: 20652 - protein, 9 aa, Homo sapiens
  misc_feature: Table A; Target 20652; HLA-B*49:01; DCAF12L1; ENSG00000198889; CTA
YAVGSHSHV

SEQ ID NO: 20653 - protein, 9 aa, Homo sapiens
  misc_feature: Table A; Target 20653; HLA-B*51:01; DCAF12L1; ENSG00000198889; CTA
YAVGSHSHV

SEQ ID NO: 20654 - protein, 9 aa, Homo sapiens
  misc_feature: Table A; Target 20654; HLA-C*02:02; DCAF12L1; ENSG00000198889; CTA
YAVGSHSHV

SEQ ID NO: 20655 - protein, 9 aa, Homo sapiens
  misc_feature: Table A; Target 20655; HLA-C*03:03; DCAF12L1; ENSG00000198889; CTA
YAVGSHSHV

SEQ ID NO: 20656 - protein, 9 aa, Homo sapiens
  misc_feature: Table A; Target 20656; HLA-C*03:04; DCAF12L1; ENSG00000198889; CTA
YAVGSHSHV

SEQ ID NO: 20657 - protein, 9 aa, Homo sapiens
  misc_feature: Table A; Target 20657; HLA-C*12:03; DCAF12L1; ENSG00000198889; CTA
YAVGSHSHV

SEQ ID NO: 20658 - protein, 9 aa, Homo sapiens
  misc_feature: Table A; Target 20658; HLA-C*16:02; DCAF12L1; ENSG00000198889; CTA
YAVGSHSHV

SEQ ID NO: 20659 - protein, 9 aa, Homo sapiens
  misc_feature: Table A; Target 20659; HLA-C*16:04; DCAF12L1; ENSG00000198889; CTA
YAVGSHSHV

SEQ ID NO: 20660 - protein, 11 aa, Homo sapiens
  misc_feature: Table A; Target 20660; HLA-B*35:01; DCAF12L1; ENSG00000198889; CTA
YAVGSHSHVSF

SEQ ID NO: 20661 - protein, 11 aa, Homo sapiens
  misc_feature: Table A; Target 20661; HLA-B*46:01; DCAF12L1; ENSG00000198889; CTA
YAVGSHSHVSF

SEQ ID NO: 20662 - protein, 11 aa, Homo sapiens
  misc_feature: Table A; Target 20662; HLA-C*02:02; DCAF12L1; ENSG00000198889; CTA
YAVGSHSHVSF

SEQ ID NO: 20663 - protein, 11 aa, Homo sapiens
  misc_feature: Table A; Target 20663; HLA-C*12:03; DCAF12L1; ENSG00000198889; CTA
YAVGSHSHVSF

SEQ ID NO: 20664 - protein, 11 aa, Homo sapiens
  misc_feature: Table A; Target 20664; HLA-C*16:01; DCAF12L1; ENSG00000198889; CTA
YAVGSHSHVSF

SEQ ID NO: 20665 - protein, 9 aa, Homo sapiens
  misc_feature: Table A; Target 20665; HLA-A*02:04; DCAF12L1; ENSG00000198889; CTA
YAVQRLPEL

SEQ ID NO: 20666 - protein, 9 aa, Homo sapiens
  misc_feature: Table A; Target 20666; HLA-A*02:07; DCAF12L1; ENSG00000198889; CTA
YAVQRLPEL

SEQ ID NO: 20667 - protein, 9 aa, Homo sapiens
  misc_feature: Table A; Target 20667; HLA-A*23:01; DCAF12L1; ENSG00000198889; CTA
YAVQRLPEL

SEQ ID NO: 20668 - protein, 9 aa, Homo sapiens
  misc_feature: Table A; Target 20668; HLA-A*24:02; DCAF12L1; ENSG00000198889; CTA
YAVQRLPEL

SEQ ID NO: 20669 - protein, 9 aa, Homo sapiens
  misc_feature: Table A; Target 20669; HLA-A*30:01; DCAF12L1; ENSG00000198889; CTA
YAVQRLPEL

SEQ ID NO: 20670 - protein, 9 aa, Homo sapiens
  misc_feature: Table A; Target 20670; HLA-B*08:01; DCAF12L1; ENSG00000198889; CTA
YAVQRLPEL

SEQ ID NO: 20671 - protein, 9 aa, Homo sapiens
  misc_feature: Table A; Target 20671; HLA-B*35:03; DCAF12L1; ENSG00000198889; CTA
YAVQRLPEL

SEQ ID NO: 20672 - protein, 9 aa, Homo sapiens
  misc_feature: Table A; Target 20672; HLA-B*46:01; DCAF12L1; ENSG00000198889; CTA
YAVQRLPEL

SEQ ID NO: 20673 - protein, 9 aa, Homo sapiens
  misc_feature: Table A; Target 20673; HLA-B*51:01; DCAF12L1; ENSG00000198889; CTA
YAVQRLPEL

SEQ ID NO: 20674 - protein, 9 aa, Homo sapiens
  misc_feature: Table A; Target 20674; HLA-B*54:01; DCAF12L1; ENSG00000198889; CTA
YAVQRLPEL

SEQ ID NO: 20675 - protein, 9 aa, Homo sapiens
  misc_feature: Table A; Target 20675; HLA-B*58:01; DCAF12L1; ENSG00000198889; CTA
YAVQRLPEL

SEQ ID NO: 20676 - protein, 9 aa, Homo sapiens
  misc_feature: Table A; Target 20676; HLA-C*02:02; DCAF12L1; ENSG00000198889; CTA
YAVQRLPEL

SEQ ID NO: 20677 - protein, 9 aa, Homo sapiens
  misc_feature: Table A; Target 20677; HLA-C*03:03; DCAF12L1; ENSG00000198889; CTA
YAVQRLPEL

SEQ ID NO: 20678 - protein, 9 aa, Homo sapiens
  misc_feature: Table A; Target 20678; HLA-C*03:04; DCAF12L1; ENSG00000198889; CTA
YAVQRLPEL

SEQ ID NO: 20679 - protein, 9 aa, Homo sapiens
  misc_feature: Table A; Target 20679; HLA-C*12:03; DCAF12L1; ENSG00000198889; CTA
YAVQRLPEL

SEQ ID NO: 20680 - protein, 9 aa, Homo sapiens
  misc_feature: Table A; Target 20680; HLA-C*16:01; DCAF12L1; ENSG00000198889; CTA
YAVQRLPEL

SEQ ID NO: 20681 - protein, 9 aa, Homo sapiens
  misc_feature: Table A; Target 20681; HLA-C*16:02; DCAF12L1; ENSG00000198889; CTA
YAVQRLPEL

SEQ ID NO: 20682 - protein, 9 aa, Homo sapiens
  misc_feature: Table A; Target 20682; HLA-C*16:04; DCAF12L1; ENSG00000198889; CTA
YAVQRLPEL

SEQ ID NO: 20683 - protein, 8 aa, Homo sapiens
  misc_feature: Table A; Target 20683; HLA-A*01:01; DCAF12L1; ENSG00000198889; CTA
YCDDMSVY

SEQ ID NO: 20684 - protein, 8 aa, Homo sapiens
  misc_feature: Table A; Target 20684; HLA-C*05:01; DCAF12L1; ENSG00000198889; CTA
YCDDMSVY

SEQ ID NO: 20685 - protein, 10 aa, Homo sapiens
  misc_feature: Table A; Target 20685; HLA-A*02:01; DCAF12L1; ENSG00000198889; CTA
YCDDMSVYAV

SEQ ID NO: 20686 - protein, 8 aa, Homo sapiens
  misc_feature: Table A; Target 20686; HLA-B*18:01; DCAF12L1; ENSG00000198889; CTA
YDVRAQKF

SEQ ID NO: 20687 - protein, 8 aa, Homo sapiens
  misc_feature: Table A; Target 20687; HLA-B*37:01; DCAF12L1; ENSG00000198889; CTA
YDVRAQKF

SEQ ID NO: 20688 - protein, 8 aa, Homo sapiens
  misc_feature: Table A; Target 20688; HLA-B*40:02; DCAF12L1; ENSG00000198889; CTA
YDVRAQKF

SEQ ID NO: 20689 - protein, 10 aa, Homo sapiens
  misc_feature: Table A; Target 20689; HLA-A*29:02; DCAF12L1; ENSG00000198889; CTA
YFRDNVCLTY

SEQ ID NO: 20690 - protein, 9 aa, Homo sapiens
  misc_feature: Table A; Target 20690; HLA-A*02:01; DCAF12L1; ENSG00000198889; CTA
YQLPSLDPL

SEQ ID NO: 20691 - protein, 9 aa, Homo sapiens
  misc_feature: Table A; Target 20691; HLA-A*02:03; DCAF12L1; ENSG00000198889; CTA
YQLPSLDPL

SEQ ID NO: 20692 - protein, 9 aa, Homo sapiens
  misc_feature: Table A; Target 20692; HLA-A*02:04; DCAF12L1; ENSG00000198889; CTA
YQLPSLDPL

SEQ ID NO: 20693 - protein, 9 aa, Homo sapiens
  misc_feature: Table A; Target 20693; HLA-A*02:07; DCAF12L1; ENSG00000198889; CTA
YQLPSLDPL

SEQ ID NO: 20694 - protein, 9 aa, Homo sapiens
  misc_feature: Table A; Target 20694; HLA-B*13:02; DCAF12L1; ENSG00000198889; CTA
YQLPSLDPL

SEQ ID NO: 20695 - protein, 9 aa, Homo sapiens
  misc_feature: Table A; Target 20695; HLA-B*39:01; DCAF12L1; ENSG00000198889; CTA
YQLPSLDPL

SEQ ID NO: 20696 - protein, 9 aa, Homo sapiens
  misc_feature: Table A; Target 20696; HLA-B*40:01; DCAF12L1; ENSG00000198889; CTA
YQLPSLDPL

SEQ ID NO: 20697 - protein, 9 aa, Homo sapiens
  misc_feature: Table A; Target 20697; HLA-B*40:02; DCAF12L1; ENSG00000198889; CTA
YQLPSLDPL

SEQ ID NO: 20698 - protein, 9 aa, Homo sapiens
  misc_feature: Table A; Target 20698; HLA-C*03:03; DCAF12L1; ENSG00000198889; CTA
YQLPSLDPL

SEQ ID NO: 20699 - protein, 9 aa, Homo sapiens
  misc_feature: Table A; Target 20699; HLA-C*03:04; DCAF12L1; ENSG00000198889; CTA
YQLPSLDPL

SEQ ID NO: 20700 - protein, 9 aa, Homo sapiens
  misc_feature: Table A; Target 20700; HLA-C*07:04; DCAF12L1; ENSG00000198889; CTA
YQLPSLDPL

SEQ ID NO: 20701 - protein, 11 aa, Homo sapiens
  misc_feature: Table A; Target 20701; HLA-A*23:01; DCAF12L1; ENSG00000198889; CTA
YQLPSLDPLCL

SEQ ID NO: 20702 - protein, 11 aa, Homo sapiens
  misc_feature: Table A; Target 20702; HLA-B*38:01; DCAF12L1; ENSG00000198889; CTA
YQLPSLDPLCL

SEQ ID NO: 20703 - protein, 8 aa, Homo sapiens
  misc_feature: Table A; Target 20703; HLA-B*39:01; DCAF4L2; ENSG00000176566; CTA
AAVGQDCY

SEQ ID NO: 20704 - protein, 9 aa, Homo sapiens
  misc_feature: Table A; Target 20704; HLA-C*04:01; DCAF4L2; ENSG00000176566; CTA
AAVGQDCYT

SEQ ID NO: 20705 - protein, 8 aa, Homo sapiens
  misc_feature: Table A; Target 20705; HLA-B*37:01; DCAF4L2; ENSG00000176566; CTA
ADTPSCAV

SEQ ID NO: 20706 - protein, 9 aa, Homo sapiens
  misc_feature: Table A; Target 20706; HLA-B*37:01; DCAF4L2; ENSG00000176566; CTA
ADTPSCAVL

SEQ ID NO: 20707 - protein, 10 aa, Homo sapiens
  misc_feature: Table A; Target 20707; HLA-C*16:02; DCAF4L2; ENSG00000176566; CTA
ADTPSCAVLL

SEQ ID NO: 20708 - protein, 9 aa, Homo sapiens
  misc_feature: Table A; Target 20708; HLA-C*16:01; DCAF4L2; ENSG00000176566; CTA
AFSSRLGGF

SEQ ID NO: 20709 - protein, 8 aa, Homo sapiens
  misc_feature: Table A; Target 20709; HLA-B*56:01; DCAF4L2; ENSG00000176566; CTA
APGLLMAV

SEQ ID NO: 20710 - protein, 10 aa, Homo sapiens
  misc_feature: Table A; Target 20710; HLA-B*08:01; DCAF4L2; ENSG00000176566; CTA
APSMLRKNQL

SEQ ID NO: 20711 - protein, 10 aa, Homo sapiens
  misc_feature: Table A; Target 20711; HLA-C*07:02; DCAF4L2; ENSG00000176566; CTA
APSMLRKNQL

SEQ ID NO: 20712 - protein, 8 aa, Homo sapiens
  misc_feature: Table A; Target 20712; HLA-A*30:02; DCAF4L2; ENSG00000176566; CTA
ATKCVTQY

SEQ ID NO: 20713 - protein, 8 aa, Homo sapiens
  misc_feature: Table A; Target 20713; HLA-A*32:01; DCAF4L2; ENSG00000176566; CTA
ATKCVTQY

SEQ ID NO: 20714 - protein, 8 aa, Homo sapiens
  misc_feature: Table A; Target 20714; HLA-B*15:01; DCAF4L2; ENSG00000176566; CTA
ATKCVTQY

SEQ ID NO: 20715 - protein, 9 aa, Homo sapiens
  misc_feature: Table A; Target 20715; HLA-B*57:01; DCAF4L2; ENSG00000176566; CTA
AVREDLYCF

SEQ ID NO: 20716 - protein, 9 aa, Homo sapiens
  misc_feature: Table A; Target 20716; HLA-A*29:02; DCAF4L2; ENSG00000176566; CTA
AWSLSIHAY

SEQ ID NO: 20717 - protein, 9 aa, Homo sapiens
  misc_feature: Table A; Target 20717; HLA-A*30:02; DCAF4L2; ENSG00000176566; CTA
AWSLSIHAY

SEQ ID NO: 20718 - protein, 9 aa, Homo sapiens
  misc_feature: Table A; Target 20718; HLA-B*15:01; DCAF4L2; ENSG00000176566; CTA
AWSLSIHAY

SEQ ID NO: 20719 - protein, 9 aa, Homo sapiens
  misc_feature: Table A; Target 20719; HLA-B*44:02; DCAF4L2; ENSG00000176566; CTA
AWSLSIHAY

SEQ ID NO: 20720 - protein, 9 aa, Homo sapiens
  misc_feature: Table A; Target 20720; HLA-A*23:01; DCAF4L2; ENSG00000176566; CTA
AYHSFSTGL

SEQ ID NO: 20721 - protein, 9 aa, Homo sapiens
  misc_feature: Table A; Target 20721; HLA-A*24:02; DCAF4L2; ENSG00000176566; CTA
AYHSFSTGL

SEQ ID NO: 20722 - protein, 9 aa, Homo sapiens
  misc_feature: Table A; Target 20722; HLA-A*31:01; DCAF4L2; ENSG00000176566; CTA
AYHSFSTGL

SEQ ID NO: 20723 - protein, 9 aa, Homo sapiens
  misc_feature: Table A; Target 20723; HLA-B*15:03; DCAF4L2; ENSG00000176566; CTA
AYHSFSTGL

SEQ ID NO: 20724 - protein, 9 aa, Homo sapiens
  misc_feature: Table A; Target 20724; HLA-B*46:01; DCAF4L2; ENSG00000176566; CTA
AYHSFSTGL

SEQ ID NO: 20725 - protein, 9 aa, Homo sapiens
  misc_feature: Table A; Target 20725; HLA-C*01:02; DCAF4L2; ENSG00000176566; CTA
AYHSFSTGL

SEQ ID NO: 20726 - protein, 9 aa, Homo sapiens
  misc_feature: Table A; Target 20726; HLA-C*14:02; DCAF4L2; ENSG00000176566; CTA
AYHSFSTGL

SEQ ID NO: 20727 - protein, 9 aa, Homo sapiens
  misc_feature: Table A; Target 20727; HLA-A*23:01; DCAF4L2; ENSG00000176566; CTA
AYLPVHVNE

SEQ ID NO: 20728 - protein, 9 aa, Homo sapiens
  misc_feature: Table A; Target 20728; HLA-A*24:02; DCAF4L2; ENSG00000176566; CTA
AYLPVHVNE

SEQ ID NO: 20729 - protein, 9 aa, Homo sapiens
  misc_feature: Table A; Target 20729; HLA-A*31:01; DCAF4L2; ENSG00000176566; CTA
AYLPVHVNE

SEQ ID NO: 20730 - protein, 9 aa, Homo sapiens
  misc_feature: Table A; Target 20730; HLA-B*35:03; DCAF4L2; ENSG00000176566; CTA
CAVLLPASL

SEQ ID NO: 20731 - protein, 9 aa, Homo sapiens
  misc_feature: Table A; Target 20731; HLA-C*03:03; DCAF4L2; ENSG00000176566; CTA
CAVLLPASL

SEQ ID NO: 20732 - protein, 9 aa, Homo sapiens
  misc_feature: Table A; Target 20732; HLA-C*03:04; DCAF4L2; ENSG00000176566; CTA
CAVLLPASL

SEQ ID NO: 20733 - protein, 9 aa, Homo sapiens
  misc_feature: Table A; Target 20733; HLA-B*54:01; DCAF4L2; ENSG00000176566; CTA
CAWSLSIHA

SEQ ID NO: 20734 - protein, 10 aa, Homo sapiens
  misc_feature: Table A; Target 20734; HLA-A*30:02; DCAF4L2; ENSG00000176566; CTA
CAWSLSIHAY

SEQ ID NO: 20735 - protein, 9 aa, Homo sapiens
  misc_feature: Table A; Target 20735; HLA-B*57:01; DCAF4L2; ENSG00000176566; CTA
CSFQIPDAW

SEQ ID NO: 20736 - protein, 9 aa, Homo sapiens
  misc_feature: Table A; Target 20736; HLA-B*58:01; DCAF4L2; ENSG00000176566; CTA
CSFQIPDAW

SEQ ID NO: 20737 - protein, 8 aa, Homo sapiens
  misc_feature: Table A; Target 20737; HLA-A*24:02; DCAF4L2; ENSG00000176566; CTA
CYTRIWSL

SEQ ID NO: 20738 - protein, 9 aa, Homo sapiens
  misc_feature: Table A; Target 20738; HLA-B*08:01; DCAF4L2; ENSG00000176566; CTA
DCYTRIWSL

SEQ ID NO: 20739 - protein, 10 aa, Homo sapiens
  misc_feature: Table A; Target 20739; HLA-A*25:01; DCAF4L2; ENSG00000176566; CTA
DIPSVAFSSR

SEQ ID NO: 20740 - protein, 10 aa, Homo sapiens
  misc_feature: Table A; Target 20740; HLA-A*26:01; DCAF4L2; ENSG00000176566; CTA
DIPSVAFSSR

SEQ ID NO: 20741 - protein, 10 aa, Homo sapiens
  misc_feature: Table A; Target 20741; HLA-A*33:01; DCAF4L2; ENSG00000176566; CTA
DIPSVAFSSR

SEQ ID NO: 20742 - protein, 10 aa, Homo sapiens
  misc_feature: Table A; Target 20742; HLA-A*33:03; DCAF4L2; ENSG00000176566; CTA
DIPSVAFSSR

SEQ ID NO: 20743 - protein, 10 aa, Homo sapiens
  misc_feature: Table A; Target 20743; HLA-A*68:01; DCAF4L2; ENSG00000176566; CTA
DIPSVAFSSR

SEQ ID NO: 20744 - protein, 10 aa, Homo sapiens
  misc_feature: Table A; Target 20744; HLA-C*07:06; DCAF4L2; ENSG00000176566; CTA
DIPSVAFSSR

SEQ ID NO: 20745 - protein, 8 aa, Homo sapiens
  misc_feature: Table A; Target 20745; HLA-B*08:01; DCAF4L2; ENSG00000176566; CTA
DMTGTIKL

SEQ ID NO: 20746 - protein, 9 aa, Homo sapiens
  misc_feature: Table A; Target 20746; HLA-A*25:01; DCAF4L2; ENSG00000176566; CTA
DMTGTIKLW

SEQ ID NO: 20747 - protein, 9 aa, Homo sapiens
  misc_feature: Table A; Target 20747; HLA-B*44:02; DCAF4L2; ENSG00000176566; CTA
DMTGTIKLW

SEQ ID NO: 20748 - protein, 9 aa, Homo sapiens
  misc_feature: Table A; Target 20748; HLA-A*68:01; DCAF4L2; ENSG00000176566; CTA
DPSSLASDR

SEQ ID NO: 20749 - protein, 10 aa, Homo sapiens
  misc_feature: Table A; Target 20749; HLA-B*35:01; DCAF4L2; ENSG00000176566; CTA
DPSSLASDRF

SEQ ID NO: 20750 - protein, 9 aa, Homo sapiens
  misc_feature: Table A; Target 20750; HLA-B*13:02; DCAF4L2; ENSG00000176566; CTA
DQLFTVNQV

SEQ ID NO: 20751 - protein, 9 aa, Homo sapiens
  misc_feature: Table A; Target 20751; HLA-B*39:01; DCAF4L2; ENSG00000176566; CTA
DQLFTVNQV

SEQ ID NO: 20752 - protein, 9 aa, Homo sapiens
  misc_feature: Table A; Target 20752; HLA-B*51:01; DCAF4L2; ENSG00000176566; CTA
DQLFTVNQV

SEQ ID NO: 20753 - protein, 9 aa, Homo sapiens
  misc_feature: Table A; Target 20753; HLA-B*51:01; DCAF4L2; ENSG00000176566; CTA
DSAVTSLQI

SEQ ID NO: 20754 - protein, 9 aa, Homo sapiens
  misc_feature: Table A; Target 20754; HLA-B*51:01; DCAF4L2; ENSG00000176566; CTA
DVLAQQFAI

SEQ ID NO: 20755 - protein, 10 aa, Homo sapiens
  misc_feature: Table A; Target 20755; HLA-A*25:01; DCAF4L2; ENSG00000176566; CTA
DVLAQQFAIM

SEQ ID NO: 20756 - protein, 10 aa, Homo sapiens
  misc_feature: Table A; Target 20756; HLA-A*26:01; DCAF4L2; ENSG00000176566; CTA
DVLAQQFAIM

SEQ ID NO: 20757 - protein, 9 aa, Homo sapiens
  misc_feature: Table A; Target 20757; HLA-B*51:01; DCAF4L2; ENSG00000176566; CTA
EADKQKKTV

SEQ ID NO: 20758 - protein, 10 aa, Homo sapiens
  misc_feature: Table A; Target 20758; HLA-A*33:03; DCAF4L2; ENSG00000176566; CTA
EADKQKKTVR

SEQ ID NO: 20759 - protein, 10 aa, Homo sapiens
  misc_feature: Table A; Target 20759; HLA-B*44:03; DCAF4L2; ENSG00000176566; CTA
EEADKQKKTV

SEQ ID NO: 20760 - protein, 9 aa, Homo sapiens
  misc_feature: Table A; Target 20760; HLA-B*18:01; DCAF4L2; ENSG00000176566; CTA
EEEGVVAAV

SEQ ID NO: 20761 - protein, 9 aa, Homo sapiens
  misc_feature: Table A; Target 20761; HLA-B*40:01; DCAF4L2; ENSG00000176566; CTA
EEEGVVAAV

SEQ ID NO: 20762 - protein, 9 aa, Homo sapiens
  misc_feature: Table A; Target 20762; HLA-B*49:01; DCAF4L2; ENSG00000176566; CTA
EEEGVVAAV

SEQ ID NO: 20763 - protein, 8 aa, Homo sapiens
  misc_feature: Table A; Target 20763; HLA-B*18:01; DCAF4L2; ENSG00000176566; CTA
EEGVVAAV

SEQ ID NO: 20764 - protein, 8 aa, Homo sapiens
  misc_feature: Table A; Target 20764; HLA-B*49:01; DCAF4L2; ENSG00000176566; CTA
EEGVVAAV

SEQ ID NO: 20765 - protein, 9 aa, Homo sapiens
  misc_feature: Table A; Target 20765; HLA-A*25:01; DCAF4L2; ENSG00000176566; CTA
EGHVNNSAY

SEQ ID NO: 20766 - protein, 9 aa, Homo sapiens
  misc_feature: Table A; Target 20766; HLA-A*26:01; DCAF4L2; ENSG00000176566; CTA
EGHVNNSAY

SEQ ID NO: 20767 - protein, 9 aa, Homo sapiens
  misc_feature: Table A; Target 20767; HLA-A*30:02; DCAF4L2; ENSG00000176566; CTA
EGHVNNSAY

SEQ ID NO: 20768 - protein, 9 aa, Homo sapiens
  misc_feature: Table A; Target 20768; HLA-B*15:01; DCAF4L2; ENSG00000176566; CTA
EGHVNNSAY

SEQ ID NO: 20769 - protein, 9 aa, Homo sapiens
  misc_feature: Table A; Target 20769; HLA-B*46:01; DCAF4L2; ENSG00000176566; CTA
EGHVNNSAY

SEQ ID NO: 20770 - protein, 9 aa, Homo sapiens
  misc_feature: Table A; Target 20770; HLA-C*14:02; DCAF4L2; ENSG00000176566; CTA
EGHVNNSAY

SEQ ID NO: 20771 - protein, 9 aa, Homo sapiens
  misc_feature: Table A; Target 20771; HLA-A*68:02; DCAF4L2; ENSG00000176566; CTA
EIFGIDLRC

SEQ ID NO: 20772 - protein, 9 aa, Homo sapiens
  misc_feature: Table A; Target 20772; HLA-A*33:01; DCAF4L2; ENSG00000176566; CTA
ELRVSCMQR

SEQ ID NO: 20773 - protein, 9 aa, Homo sapiens
  misc_feature: Table A; Target 20773; HLA-A*33:03; DCAF4L2; ENSG00000176566; CTA
ELRVSCMQR

SEQ ID NO: 20774 - protein, 9 aa, Homo sapiens
  misc_feature: Table A; Target 20774; HLA-A*33:01; DCAF4L2; ENSG00000176566; CTA
ENDIPSVAF

SEQ ID NO: 20775 - protein, 9 aa, Homo sapiens
  misc_feature: Table A; Target 20775; HLA-A*33:03; DCAF4L2; ENSG00000176566; CTA
ENDIPSVAF

SEQ ID NO: 20776 - protein, 9 aa, Homo sapiens
  misc_feature: Table A; Target 20776; HLA-B*38:01; DCAF4L2; ENSG00000176566; CTA
ENDIPSVAF

SEQ ID NO: 20777 - protein, 9 aa, Homo sapiens
  misc_feature: Table A; Target 20777; HLA-C*04:01; DCAF4L2; ENSG00000176566; CTA
ENDIPSVAF

SEQ ID NO: 20778 - protein, 9 aa, Homo sapiens
  misc_feature: Table A; Target 20778; HLA-C*05:01; DCAF4L2; ENSG00000176566; CTA
ENDIPSVAF

SEQ ID NO: 20779 - protein, 8 aa, Homo sapiens
  misc_feature: Table A; Target 20779; HLA-A*23:01; DCAF4L2; ENSG00000176566; CTA
FAIMTPLL

SEQ ID NO: 20780 - protein, 8 aa, Homo sapiens
  misc_feature: Table A; Target 20780; HLA-B*51:01; DCAF4L2; ENSG00000176566; CTA
FAIMTPLL

SEQ ID NO: 20781 - protein, 8 aa, Homo sapiens
  misc_feature: Table A; Target 20781; HLA-C*03:03; DCAF4L2; ENSG00000176566; CTA
FAIMTPLL

SEQ ID NO: 20782 - protein, 8 aa, Homo sapiens
  misc_feature: Table A; Target 20782; HLA-C*03:04; DCAF4L2; ENSG00000176566; CTA
FAIMTPLL

SEQ ID NO: 20783 - protein, 9 aa, Homo sapiens
  misc_feature: Table A; Target 20783; HLA-A*23:01; DCAF4L2; ENSG00000176566; CTA
FAIMTPLLF

SEQ ID NO: 20784 - protein, 9 aa, Homo sapiens
  misc_feature: Table A; Target 20784; HLA-A*24:02; DCAF4L2; ENSG00000176566; CTA
FAIMTPLLF

SEQ ID NO: 20785 - protein, 9 aa, Homo sapiens
  misc_feature: Table A; Target 20785; HLA-A*26:01; DCAF4L2; ENSG00000176566; CTA
FAIMTPLLF

SEQ ID NO: 20786 - protein, 9 aa, Homo sapiens
  misc_feature: Table A; Target 20786; HLA-A*29:02; DCAF4L2; ENSG00000176566; CTA
FAIMTPLLF

SEQ ID NO: 20787 - protein, 9 aa, Homo sapiens
  misc_feature: Table A; Target 20787; HLA-B*27:02; DCAF4L2; ENSG00000176566; CTA
FAIMTPLLF

SEQ ID NO: 20788 - protein, 9 aa, Homo sapiens
  misc_feature: Table A; Target 20788; HLA-B*35:01; DCAF4L2; ENSG00000176566; CTA
FAIMTPLLF

SEQ ID NO: 20789 - protein, 9 aa, Homo sapiens
  misc_feature: Table A; Target 20789; HLA-C*02:02; DCAF4L2; ENSG00000176566; CTA
FAIMTPLLF

SEQ ID NO: 20790 - protein, 9 aa, Homo sapiens
  misc_feature: Table A; Target 20790; HLA-C*03:03; DCAF4L2; ENSG00000176566; CTA
FAIMTPLLF

SEQ ID NO: 20791 - protein, 9 aa, Homo sapiens
  misc_feature: Table A; Target 20791; HLA-C*03:04; DCAF4L2; ENSG00000176566; CTA
FAIMTPLLF

SEQ ID NO: 20792 - protein, 9 aa, Homo sapiens
  misc_feature: Table A; Target 20792; HLA-C*12:03; DCAF4L2; ENSG00000176566; CTA
FAIMTPLLF

SEQ ID NO: 20793 - protein, 8 aa, Homo sapiens
  misc_feature: Table A; Target 20793; HLA-B*35:03; DCAF4L2; ENSG00000176566; CTA
FGTSSDVL

SEQ ID NO: 20794 - protein, 8 aa, Homo sapiens
  misc_feature: Table A; Target 20794; HLA-B*39:01; DCAF4L2; ENSG00000176566; CTA
FGTSSDVL

SEQ ID NO: 20795 - protein, 8 aa, Homo sapiens
  misc_feature: Table A; Target 20795; HLA-C*03:03; DCAF4L2; ENSG00000176566; CTA
FGTSSDVL

SEQ ID NO: 20796 - protein, 8 aa, Homo sapiens
  misc_feature: Table A; Target 20796; HLA-C*03:04; DCAF4L2; ENSG00000176566; CTA
FGTSSDVL

SEQ ID NO: 20797 - protein, 9 aa, Homo sapiens
  misc_feature: Table A; Target 20797; HLA-A*02:01; DCAF4L2; ENSG00000176566; CTA
FQIPDAWSC

SEQ ID NO: 20798 - protein, 9 aa, Homo sapiens
  misc_feature: Table A; Target 20798; HLA-A*68:02; DCAF4L2; ENSG00000176566; CTA
FSTGLSQQV

SEQ ID NO: 20799 - protein, 9 aa, Homo sapiens
  misc_feature: Table A; Target 20799; HLA-B*13:02; DCAF4L2; ENSG00000176566; CTA
FSTGLSQQV

SEQ ID NO: 20800 - protein, 9 aa, Homo sapiens
  misc_feature: Table A; Target 20800; HLA-C*02:02; DCAF4L2; ENSG00000176566; CTA
FSTGLSQQV

SEQ ID NO: 20801 - protein, 9 aa, Homo sapiens
  misc_feature: Table A; Target 20801; HLA-C*12:03; DCAF4L2; ENSG00000176566; CTA
FSTGLSQQV

SEQ ID NO: 20802 - protein, 9 aa, Homo sapiens
  misc_feature: Table A; Target 20802; HLA-C*16:02; DCAF4L2; ENSG00000176566; CTA
FSTGLSQQV

SEQ ID NO: 20803 - protein, 9 aa, Homo sapiens
  misc_feature: Table A; Target 20803; HLA-A*02:07; DCAF4L2; ENSG00000176566; CTA
GAPGLLMAV

SEQ ID NO: 20804 - protein, 8 aa, Homo sapiens
  misc_feature: Table A; Target 20804; HLA-A*30:01; DCAF4L2; ENSG00000176566; CTA
GEIFGIDL

SEQ ID NO: 20805 - protein, 8 aa, Homo sapiens
  misc_feature: Table A; Target 20805; HLA-B*40:01; DCAF4L2; ENSG00000176566; CTA
GEIFGIDL

SEQ ID NO: 20806 - protein, 8 aa, Homo sapiens
  misc_feature: Table A; Target 20806; HLA-B*49:01; DCAF4L2; ENSG00000176566; CTA
GEIFGIDL

SEQ ID NO: 20807 - protein, 8 aa, Homo sapiens
  misc_feature: Table A; Target 20807; HLA-A*29:02; DCAF4L2; ENSG00000176566; CTA
GFLRFANY

SEQ ID NO: 20808 - protein, 9 aa, Homo sapiens
  misc_feature: Table A; Target 20808; HLA-B*27:05; DCAF4L2; ENSG00000176566; CTA
GHVNNSAYL

SEQ ID NO: 20809 - protein, 9 aa, Homo sapiens
  misc_feature: Table A; Target 20809; HLA-B*38:01; DCAF4L2; ENSG00000176566; CTA
GHVNNSAYL

SEQ ID NO: 20810 - protein, 9 aa, Homo sapiens
  misc_feature: Table A; Target 20810; HLA-B*39:01; DCAF4L2; ENSG00000176566; CTA
GHVNNSAYL

SEQ ID NO: 20811 - protein, 9 aa, Homo sapiens
  misc_feature: Table A; Target 20811; HLA-A*02:01; DCAF4L2; ENSG00000176566; CTA
GLADTPSCA

SEQ ID NO: 20812 - protein, 9 aa, Homo sapiens
  misc_feature: Table A; Target 20812; HLA-A*02:03; DCAF4L2; ENSG00000176566; CTA
GLADTPSCA

SEQ ID NO: 20813 - protein, 9 aa, Homo sapiens
  misc_feature: Table A; Target 20813; HLA-B*55:01; DCAF4L2; ENSG00000176566; CTA
GLADTPSCA

SEQ ID NO: 20814 - protein, 10 aa, Homo sapiens
  misc_feature: Table A; Target 20814; HLA-A*02:01; DCAF4L2; ENSG00000176566; CTA
GLADTPSCAV

SEQ ID NO: 20815 - protein, 10 aa, Homo sapiens
  misc_feature: Table A; Target 20815; HLA-A*02:03; DCAF4L2; ENSG00000176566; CTA
GLADTPSCAV

SEQ ID NO: 20816 - protein, 10 aa, Homo sapiens
  misc_feature: Table A; Target 20816; HLA-B*55:01; DCAF4L2; ENSG00000176566; CTA
GLADTPSCAV

SEQ ID NO: 20817 - protein, 9 aa, Homo sapiens
  misc_feature: Table A; Target 20817; HLA-A*03:01; DCAF4L2; ENSG00000176566; CTA
GLNAPSMLR

SEQ ID NO: 20818 - protein, 9 aa, Homo sapiens
  misc_feature: Table A; Target 20818; HLA-A*03:02; DCAF4L2; ENSG00000176566; CTA
GLNAPSMLR

SEQ ID NO: 20819 - protein, 9 aa, Homo sapiens
  misc_feature: Table A; Target 20819; HLA-A*31:01; DCAF4L2; ENSG00000176566; CTA
GLNAPSMLR

SEQ ID NO: 20820 - protein, 9 aa, Homo sapiens
  misc_feature: Table A; Target 20820; HLA-A*33:03; DCAF4L2; ENSG00000176566; CTA
GLNAPSMLR

SEQ ID NO: 20821 - protein, 10 aa, Homo sapiens
  misc_feature: Table A; Target 20821; HLA-A*03:01; DCAF4L2; ENSG00000176566; CTA
GLNAPSMLRK

SEQ ID NO: 20822 - protein, 10 aa, Homo sapiens
  misc_feature: Table A; Target 20822; HLA-A*03:02; DCAF4L2; ENSG00000176566; CTA
GLNAPSMLRK

SEQ ID NO: 20823 - protein, 10 aa, Homo sapiens
  misc_feature: Table A; Target 20823; HLA-A*11:01; DCAF4L2; ENSG00000176566; CTA
GLNAPSMLRK

SEQ ID NO: 20824 - protein, 11 aa, Homo sapiens
  misc_feature: Table A; Target 20824; HLA-A*02:01; DCAF4L2; ENSG00000176566; CTA
GLSQQVLLTNV

SEQ ID NO: 20825 - protein, 11 aa, Homo sapiens
  misc_feature: Table A; Target 20825; HLA-A*02:03; DCAF4L2; ENSG00000176566; CTA
GLSQQVLLTNV

SEQ ID NO: 20826 - protein, 11 aa, Homo sapiens
  misc_feature: Table A; Target 20826; HLA-A*02:04; DCAF4L2; ENSG00000176566; CTA
GLSQQVLLTNV

SEQ ID NO: 20827 - protein, 11 aa, Homo sapiens
  misc_feature: Table A; Target 20827; HLA-B*55:01; DCAF4L2; ENSG00000176566; CTA
GLSQQVLLTNV

SEQ ID NO: 20828 - protein, 9 aa, Homo sapiens
  misc_feature: Table A; Target 20828; HLA-B*13:02; DCAF4L2; ENSG00000176566; CTA
GLTTPELRV

SEQ ID NO: 20829 - protein, 10 aa, Homo sapiens
  misc_feature: Table A; Target 20829; HLA-A*29:02; DCAF4L2; ENSG00000176566; CTA
GLTTPELRVY

SEQ ID NO: 20830 - protein, 10 aa, Homo sapiens
  misc_feature: Table A; Target 20830; HLA-A*30:02; DCAF4L2; ENSG00000176566; CTA
GLTTPELRVY

SEQ ID NO: 20831 - protein, 10 aa, Homo sapiens
  misc_feature: Table A; Target 20831; HLA-A*32:01; DCAF4L2; ENSG00000176566; CTA
GLTTPELRVY

SEQ ID NO: 20832 - protein, 10 aa, Homo sapiens
  misc_feature: Table A; Target 20832; HLA-B*15:01; DCAF4L2; ENSG00000176566; CTA
GLTTPELRVY

SEQ ID NO: 20833 - protein, 10 aa, Homo sapiens
  misc_feature: Table A; Target 20833; HLA-B*15:03; DCAF4L2; ENSG00000176566; CTA
GLTTPELRVY

SEQ ID NO: 20834 - protein, 10 aa, Homo sapiens
  misc_feature: Table A; Target 20834; HLA-C*16:01; DCAF4L2; ENSG00000176566; CTA
GLTTPELRVY

SEQ ID NO: 20835 - protein, 10 aa, Homo sapiens
  misc_feature: Table A; Target 20835; HLA-C*16:02; DCAF4L2; ENSG00000176566; CTA
GLTTPELRVY

SEQ ID NO: 20836 - protein, 9 aa, Homo sapiens
  misc_feature: Table A; Target 20836; HLA-B*13:02; DCAF4L2; ENSG00000176566; CTA
GQFLVSSDM

SEQ ID NO: 20837 - protein, 9 aa, Homo sapiens
  misc_feature: Table A; Target 20837; HLA-B*15:01; DCAF4L2; ENSG00000176566; CTA
GQFLVSSDM

SEQ ID NO: 20838 - protein, 9 aa, Homo sapiens
  misc_feature: Table A; Target 20838; HLA-B*15:03; DCAF4L2; ENSG00000176566; CTA
GQFLVSSDM

SEQ ID NO: 20839 - protein, 9 aa, Homo sapiens
  misc_feature: Table A; Target 20839; HLA-B*27:05; DCAF4L2; ENSG00000176566; CTA
GQFLVSSDM

SEQ ID NO: 20840 - protein, 9 aa, Homo sapiens
  misc_feature: Table A; Target 20840; HLA-B*39:01; DCAF4L2; ENSG00000176566; CTA
GQFLVSSDM

SEQ ID NO: 20841 - protein, 11 aa, Homo sapiens
  misc_feature: Table A; Target 20841; HLA-B*27:05; DCAF4L2; ENSG00000176566; CTA
GQFLVSSDMTG

SEQ ID NO: 20842 - protein, 9 aa, Homo sapiens
  misc_feature: Table A; Target 20842; HLA-A*31:01; DCAF4L2; ENSG00000176566; CTA
GSKYGIITM

SEQ ID NO: 20843 - protein, 9 aa, Homo sapiens
  misc_feature: Table A; Target 20843; HLA-B*40:02; DCAF4L2; ENSG00000176566; CTA
GSKYGIITM

SEQ ID NO: 20844 - protein, 9 aa, Homo sapiens
  misc_feature: Table A; Target 20844; HLA-B*46:01; DCAF4L2; ENSG00000176566; CTA
GSKYGIITM

SEQ ID NO: 20845 - protein, 9 aa, Homo sapiens
  misc_feature: Table A; Target 20845; HLA-B*57:01; DCAF4L2; ENSG00000176566; CTA
GSKYGIITM

SEQ ID NO: 20846 - protein, 9 aa, Homo sapiens
  misc_feature: Table A; Target 20846; HLA-C*07:04; DCAF4L2; ENSG00000176566; CTA
GSKYGIITM

SEQ ID NO: 20847 - protein, 9 aa, Homo sapiens
  misc_feature: Table A; Target 20847; HLA-C*12:03; DCAF4L2; ENSG00000176566; CTA
GSKYGIITM

SEQ ID NO: 20848 - protein, 10 aa, Homo sapiens
  misc_feature: Table A; Target 20848; HLA-A*31:01; DCAF4L2; ENSG00000176566; CTA
GSKYGIITMR

SEQ ID NO: 20849 - protein, 10 aa, Homo sapiens
  misc_feature: Table A; Target 20849; HLA-A*33:03; DCAF4L2; ENSG00000176566; CTA
GSKYGIITMR

SEQ ID NO: 20850 - protein, 10 aa, Homo sapiens
  misc_feature: Table A; Target 20850; HLA-A*11:01; DCAF4L2; ENSG00000176566; CTA
GTSSDVLAQQ

SEQ ID NO: 20851 - protein, 11 aa, Homo sapiens
  misc_feature: Table A; Target 20851; HLA-A*11:01; DCAF4L2; ENSG00000176566; CTA
GTSSDVLAQQF

SEQ ID NO: 20852 - protein, 11 aa, Homo sapiens
  misc_feature: Table A; Target 20852; HLA-A*29:02; DCAF4L2; ENSG00000176566; CTA
GTSSDVLAQQF

SEQ ID NO: 20853 - protein, 11 aa, Homo sapiens
  misc_feature: Table A; Target 20853; HLA-A*30:02; DCAF4L2; ENSG00000176566; CTA
GTSSDVLAQQF

SEQ ID NO: 20854 - protein, 11 aa, Homo sapiens
  misc_feature: Table A; Target 20854; HLA-A*32:01; DCAF4L2; ENSG00000176566; CTA
GTSSDVLAQQF

SEQ ID NO: 20855 - protein, 11 aa, Homo sapiens
  misc_feature: Table A; Target 20855; HLA-B*27:02; DCAF4L2; ENSG00000176566; CTA
GTSSDVLAQQF

SEQ ID NO: 20856 - protein, 11 aa, Homo sapiens
  misc_feature: Table A; Target 20856; HLA-B*27:05; DCAF4L2; ENSG00000176566; CTA
GTSSDVLAQQF

SEQ ID NO: 20857 - protein, 11 aa, Homo sapiens
  misc_feature: Table A; Target 20857; HLA-B*39:01; DCAF4L2; ENSG00000176566; CTA
GTSSDVLAQQF

SEQ ID NO: 20858 - protein, 11 aa, Homo sapiens
  misc_feature: Table A; Target 20858; HLA-B*57:01; DCAF4L2; ENSG00000176566; CTA
GTSSDVLAQQF

SEQ ID NO: 20859 - protein, 11 aa, Homo sapiens
  misc_feature: Table A; Target 20859; HLA-B*58:01; DCAF4L2; ENSG00000176566; CTA
GTSSDVLAQQF

SEQ ID NO: 20860 - protein, 11 aa, Homo sapiens
  misc_feature: Table A; Target 20860; HLA-A*30:02; DCAF4L2; ENSG00000176566; CTA
GVVAAVGQDCY

SEQ ID NO: 20861 - protein, 11 aa, Homo sapiens
  misc_feature: Table A; Target 20861; HLA-B*15:01; DCAF4L2; ENSG00000176566; CTA
GVVAAVGQDCY

SEQ ID NO: 20862 - protein, 11 aa, Homo sapiens
  misc_feature: Table A; Target 20862; HLA-B*15:03; DCAF4L2; ENSG00000176566; CTA
GVVAAVGQDCY

SEQ ID NO: 20863 - protein, 8 aa, Homo sapiens
  misc_feature: Table A; Target 20863; HLA-A*30:01; DCAF4L2; ENSG00000176566; CTA
HDSAVTSL

SEQ ID NO: 20864 - protein, 8 aa, Homo sapiens
  misc_feature: Table A; Target 20864; HLA-B*18:01; DCAF4L2; ENSG00000176566; CTA
HDSAVTSL

SEQ ID NO: 20865 - protein, 8 aa, Homo sapiens
  misc_feature: Table A; Target 20865; HLA-B*37:01; DCAF4L2; ENSG00000176566; CTA
HDSAVTSL

SEQ ID NO: 20866 - protein, 8 aa, Homo sapiens
  misc_feature: Table A; Target 20866; HLA-B*38:01; DCAF4L2; ENSG00000176566; CTA
HDSAVTSL

SEQ ID NO: 20867 - protein, 8 aa, Homo sapiens
  misc_feature: Table A; Target 20867; HLA-B*40:01; DCAF4L2; ENSG00000176566; CTA
HDSAVTSL

SEQ ID NO: 20868 - protein, 8 aa, Homo sapiens
  misc_feature: Table A; Target 20868; HLA-B*40:02; DCAF4L2; ENSG00000176566; CTA
HDSAVTSL

SEQ ID NO: 20869 - protein, 10 aa, Homo sapiens
  misc_feature: Table A; Target 20869; HLA-B*38:01; DCAF4L2; ENSG00000176566; CTA
HDSAVTSLQI

SEQ ID NO: 20870 - protein, 8 aa, Homo sapiens
  misc_feature: Table A; Target 20870; HLA-B*51:01; DCAF4L2; ENSG00000176566; CTA
HGHLLTTI

SEQ ID NO: 20871 - protein, 9 aa, Homo sapiens
  misc_feature: Table A; Target 20871; HLA-A*02:01; DCAF4L2; ENSG00000176566; CTA
HLDSHLLLC

SEQ ID NO: 20872 - protein, 9 aa, Homo sapiens
  misc_feature: Table A; Target 20872; HLA-A*02:07; DCAF4L2; ENSG00000176566; CTA
HLDSHLLLC

SEQ ID NO: 20873 - protein, 10 aa, Homo sapiens
  misc_feature: Table A; Target 20873; HLA-A*29:02; DCAF4L2; ENSG00000176566; CTA
HLLTTIPSPY

SEQ ID NO: 20874 - protein, 11 aa, Homo sapiens
  misc_feature: Table A; Target 20874; HLA-A*68:02; DCAF4L2; ENSG00000176566; CTA
HSFSTGLSQQV

SEQ ID NO: 20875 - protein, 8 aa, Homo sapiens
  misc_feature: Table A; Target 20875; HLA-C*03:03; DCAF4L2; ENSG00000176566; CTA
HSWDPSSL

SEQ ID NO: 20876 - protein, 8 aa, Homo sapiens
  misc_feature: Table A; Target 20876; HLA-C*03:04; DCAF4L2; ENSG00000176566; CTA
HSWDPSSL

SEQ ID NO: 20877 - protein, 8 aa, Homo sapiens
  misc_feature: Table A; Target 20877; HLA-C*05:01; DCAF4L2; ENSG00000176566; CTA
HSWDPSSL

SEQ ID NO: 20878 - protein, 10 aa, Homo sapiens
  misc_feature: Table A; Target 20878; HLA-B*54:01; DCAF4L2; ENSG00000176566; CTA
HVNEEEGVVA

SEQ ID NO: 20879 - protein, 9 aa, Homo sapiens
  misc_feature: Table A; Target 20879; HLA-B*38:01; DCAF4L2; ENSG00000176566; CTA
IHSWDPSSL

SEQ ID NO: 20880 - protein, 9 aa, Homo sapiens
  misc_feature: Table A; Target 20880; HLA-B*39:01; DCAF4L2; ENSG00000176566; CTA
IHSWDPSSL

SEQ ID NO: 20881 - protein, 11 aa, Homo sapiens
  misc_feature: Table A; Target 20881; HLA-A*23:01; DCAF4L2; ENSG00000176566; CTA
ILANTNTDQLF

SEQ ID NO: 20882 - protein, 9 aa, Homo sapiens
  misc_feature: Table A; Target 20882; HLA-A*02:03; DCAF4L2; ENSG00000176566; CTA
ILQDGQFLV

SEQ ID NO: 20883 - protein, 9 aa, Homo sapiens
  misc_feature: Table A; Target 20883; HLA-A*02:04; DCAF4L2; ENSG00000176566; CTA
ILQDGQFLV

SEQ ID NO: 20884 - protein, 9 aa, Homo sapiens
  misc_feature: Table A; Target 20884; HLA-A*02:07; DCAF4L2; ENSG00000176566; CTA
ILQDGQFLV

SEQ ID NO: 20885 - protein, 9 aa, Homo sapiens
  misc_feature: Table A; Target 20885; HLA-A*30:01; DCAF4L2; ENSG00000176566; CTA
ILQDGQFLV

SEQ ID NO: 20886 - protein, 9 aa, Homo sapiens
  misc_feature: Table A; Target 20886; HLA-B*13:02; DCAF4L2; ENSG00000176566; CTA
ILQDGQFLV

SEQ ID NO: 20887 - protein, 9 aa, Homo sapiens
  misc_feature: Table A; Target 20887; HLA-B*55:01; DCAF4L2; ENSG00000176566; CTA
ILQDGQFLV

SEQ ID NO: 20888 - protein, 9 aa, Homo sapiens
  misc_feature: Table A; Target 20888; HLA-A*68:01; DCAF4L2; ENSG00000176566; CTA
IPSVAFSSR

SEQ ID NO: 20889 - protein, 9 aa, Homo sapiens
  misc_feature: Table A; Target 20889; HLA-C*07:06; DCAF4L2; ENSG00000176566; CTA
IPSVAFSSR

SEQ ID NO: 20890 - protein, 10 aa, Homo sapiens
  misc_feature: Table A; Target 20890; HLA-B*07:02; DCAF4L2; ENSG00000176566; CTA
IPSVAFSSRL

SEQ ID NO: 20891 - protein, 9 aa, Homo sapiens
  misc_feature: Table A; Target 20891; HLA-A*03:01; DCAF4L2; ENSG00000176566; CTA
KLWDLRATK

SEQ ID NO: 20892 - protein, 8 aa, Homo sapiens
  misc_feature: Table A; Target 20892; HLA-A*31:01; DCAF4L2; ENSG00000176566; CTA
KTLYVPNR

SEQ ID NO: 20893 - protein, 9 aa, Homo sapiens
  misc_feature: Table A; Target 20893; HLA-A*03:01; DCAF4L2; ENSG00000176566; CTA
KTLYVPNRK

SEQ ID NO: 20894 - protein, 9 aa, Homo sapiens
  misc_feature: Table A; Target 20894; HLA-A*11:01; DCAF4L2; ENSG00000176566; CTA
KTLYVPNRK

SEQ ID NO: 20895 - protein, 9 aa, Homo sapiens
  misc_feature: Table A; Target 20895; HLA-B*58:01; DCAF4L2; ENSG00000176566; CTA
KTVRVGLNA

SEQ ID NO: 20896 - protein, 8 aa, Homo sapiens
  misc_feature: Table A; Target 20896; HLA-A*31:01; DCAF4L2; ENSG00000176566; CTA
KYGIITMR

SEQ ID NO: 20897 - protein, 8 aa, Homo sapiens
  misc_feature: Table A; Target 20897; HLA-C*05:01; DCAF4L2; ENSG00000176566; CTA
LADTPSCA

SEQ ID NO: 20898 - protein, 9 aa, Homo sapiens
  misc_feature: Table A; Target 20898; HLA-B*51:01; DCAF4L2; ENSG00000176566; CTA
LADTPSCAV

SEQ ID NO: 20899 - protein, 9 aa, Homo sapiens
  misc_feature: Table A; Target 20899; HLA-C*03:03; DCAF4L2; ENSG00000176566; CTA
LADTPSCAV

SEQ ID NO: 20900 - protein, 9 aa, Homo sapiens
  misc_feature: Table A; Target 20900; HLA-C*03:04; DCAF4L2; ENSG00000176566; CTA
LADTPSCAV

SEQ ID NO: 20901 - protein, 9 aa, Homo sapiens
  misc_feature: Table A; Target 20901; HLA-C*05:01; DCAF4L2; ENSG00000176566; CTA
LADTPSCAV

SEQ ID NO: 20902 - protein, 10 aa, Homo sapiens
  misc_feature: Table A; Target 20902; HLA-C*03:04; DCAF4L2; ENSG00000176566; CTA
LADTPSCAVL

SEQ ID NO: 20903 - protein, 10 aa, Homo sapiens
  misc_feature: Table A; Target 20903; HLA-C*05:01; DCAF4L2; ENSG00000176566; CTA
LADTPSCAVL

SEQ ID NO: 20904 - protein, 9 aa, Homo sapiens
  misc_feature: Table A; Target 20904; HLA-C*02:02; DCAF4L2; ENSG00000176566; CTA
LANTNTDQL

SEQ ID NO: 20905 - protein, 9 aa, Homo sapiens
  misc_feature: Table A; Target 20905; HLA-C*03:03; DCAF4L2; ENSG00000176566; CTA
LANTNTDQL

SEQ ID NO: 20906 - protein, 9 aa, Homo sapiens
  misc_feature: Table A; Target 20906; HLA-C*03:04; DCAF4L2; ENSG00000176566; CTA
LANTNTDQL

SEQ ID NO: 20907 - protein, 9 aa, Homo sapiens
  misc_feature: Table A; Target 20907; HLA-C*05:01; DCAF4L2; ENSG00000176566; CTA
LANTNTDQL

SEQ ID NO: 20908 - protein, 9 aa, Homo sapiens
  misc_feature: Table A; Target 20908; HLA-C*16:02; DCAF4L2; ENSG00000176566; CTA
LANTNTDQL

SEQ ID NO: 20909 - protein, 10 aa, Homo sapiens
  misc_feature: Table A; Target 20909; HLA-B*58:01; DCAF4L2; ENSG00000176566; CTA
LANTNTDQLF

SEQ ID NO: 20910 - protein, 9 aa, Homo sapiens
  misc_feature: Table A; Target 20910; HLA-A*23:01; DCAF4L2; ENSG00000176566; CTA
LFIGSFPGM

SEQ ID NO: 20911 - protein, 9 aa, Homo sapiens
  misc_feature: Table A; Target 20911; HLA-A*24:02; DCAF4L2; ENSG00000176566; CTA
LFIGSFPGM

SEQ ID NO: 20912 - protein, 9 aa, Homo sapiens
  misc_feature: Table A; Target 20912; HLA-C*14:02; DCAF4L2; ENSG00000176566; CTA
LFIGSFPGM

SEQ ID NO: 20913 - protein, 10 aa, Homo sapiens
  misc_feature: Table A; Target 20913; HLA-A*01:01; DCAF4L2; ENSG00000176566; CTA
LLMAVREDLY

SEQ ID NO: 20914 - protein, 9 aa, Homo sapiens
  misc_feature: Table A; Target 20914; HLA-A*02:01; DCAF4L2; ENSG00000176566; CTA
LLTNVVTGH

SEQ ID NO: 20915 - protein, 9 aa, Homo sapiens
  misc_feature: Table A; Target 20915; HLA-A*02:03; DCAF4L2; ENSG00000176566; CTA
LLTNVVTGH

SEQ ID NO: 20916 - protein, 9 aa, Homo sapiens
  misc_feature: Table A; Target 20916; HLA-A*01:01; DCAF4L2; ENSG00000176566; CTA
LLTTIPSPY

SEQ ID NO: 20917 - protein, 9 aa, Homo sapiens
  misc_feature: Table A; Target 20917; HLA-A*29:02; DCAF4L2; ENSG00000176566; CTA
LLTTIPSPY

SEQ ID NO: 20918 - protein, 9 aa, Homo sapiens
  misc_feature: Table A; Target 20918; HLA-A*30:02; DCAF4L2; ENSG00000176566; CTA
LLTTIPSPY

SEQ ID NO: 20919 - protein, 9 aa, Homo sapiens
  misc_feature: Table A; Target 20919; HLA-B*46:01; DCAF4L2; ENSG00000176566; CTA
LLTTIPSPY

SEQ ID NO: 20920 - protein, 9 aa, Homo sapiens
  misc_feature: Table A; Target 20920; HLA-A*01:01; DCAF4L2; ENSG00000176566; CTA
LMAVREDLY

SEQ ID NO: 20921 - protein, 9 aa, Homo sapiens
  misc_feature: Table A; Target 20921; HLA-A*29:02; DCAF4L2; ENSG00000176566; CTA
LMAVREDLY

SEQ ID NO: 20922 - protein, 9 aa, Homo sapiens
  misc_feature: Table A; Target 20922; HLA-C*16:01; DCAF4L2; ENSG00000176566; CTA
LMAVREDLY

SEQ ID NO: 20923 - protein, 10 aa, Homo sapiens
  misc_feature: Table A; Target 20923; HLA-B*35:01; DCAF4L2; ENSG00000176566; CTA
LPASLFIGSF

SEQ ID NO: 20924 - protein, 9 aa, Homo sapiens
  misc_feature: Table A; Target 20924; HLA-B*15:01; DCAF4L2; ENSG00000176566; CTA
LQILQDGQF

SEQ ID NO: 20925 - protein, 9 aa, Homo sapiens
  misc_feature: Table A; Target 20925; HLA-B*15:03; DCAF4L2; ENSG00000176566; CTA
LQILQDGQF

SEQ ID NO: 20926 - protein, 10 aa, Homo sapiens
  misc_feature: Table A; Target 20926; HLA-C*16:04; DCAF4L2; ENSG00000176566; CTA
LRCGNQGSGW

SEQ ID NO: 20927 - protein, 10 aa, Homo sapiens
  misc_feature: Table A; Target 20927; HLA-C*01:02; DCAF4L2; ENSG00000176566; CTA
LSHDSAVTSL

SEQ ID NO: 20928 - protein, 10 aa, Homo sapiens
  misc_feature: Table A; Target 20928; HLA-C*03:04; DCAF4L2; ENSG00000176566; CTA
LSHDSAVTSL

SEQ ID NO: 20929 - protein, 9 aa, Homo sapiens
  misc_feature: Table A; Target 20929; HLA-B*46:01; DCAF4L2; ENSG00000176566; CTA
LSIHAYHSF

SEQ ID NO: 20930 - protein, 9 aa, Homo sapiens
  misc_feature: Table A; Target 20930; HLA-B*57:01; DCAF4L2; ENSG00000176566; CTA
LSIHAYHSF

SEQ ID NO: 20931 - protein, 9 aa, Homo sapiens
  misc_feature: Table A; Target 20931; HLA-B*58:01; DCAF4L2; ENSG00000176566; CTA
LSIHAYHSF

SEQ ID NO: 20932 - protein, 8 aa, Homo sapiens
  misc_feature: Table A; Target 20932; HLA-A*01:01; DCAF4L2; ENSG00000176566; CTA
LTTIPSPY

SEQ ID NO: 20933 - protein, 9 aa, Homo sapiens
  misc_feature: Table A; Target 20933; HLA-A*01:01; DCAF4L2; ENSG00000176566; CTA
LTTPELRVY

SEQ ID NO: 20934 - protein, 9 aa, Homo sapiens
  misc_feature: Table A; Target 20934; HLA-A*29:02; DCAF4L2; ENSG00000176566; CTA
LTTPELRVY

SEQ ID NO: 20935 - protein, 9 aa, Homo sapiens
  misc_feature: Table A; Target 20935; HLA-A*30:02; DCAF4L2; ENSG00000176566; CTA
LTTPELRVY

SEQ ID NO: 20936 - protein, 9 aa, Homo sapiens
  misc_feature: Table A; Target 20936; HLA-A*32:01; DCAF4L2; ENSG00000176566; CTA
LTTPELRVY

SEQ ID NO: 20937 - protein, 9 aa, Homo sapiens
  misc_feature: Table A; Target 20937; HLA-B*46:01; DCAF4L2; ENSG00000176566; CTA
LTTPELRVY

SEQ ID NO: 20938 - protein, 9 aa, Homo sapiens
  misc_feature: Table A; Target 20938; HLA-B*57:01; DCAF4L2; ENSG00000176566; CTA
LTTPELRVY

SEQ ID NO: 20939 - protein, 9 aa, Homo sapiens
  misc_feature: Table A; Target 20939; HLA-B*58:01; DCAF4L2; ENSG00000176566; CTA
LTTPELRVY

SEQ ID NO: 20940 - protein, 9 aa, Homo sapiens
  misc_feature: Table A; Target 20940; HLA-C*02:02; DCAF4L2; ENSG00000176566; CTA
LTTPELRVY

SEQ ID NO: 20941 - protein, 9 aa, Homo sapiens
  misc_feature: Table A; Target 20941; HLA-C*16:01; DCAF4L2; ENSG00000176566; CTA
LTTPELRVY

SEQ ID NO: 20942 - protein, 9 aa, Homo sapiens
  misc_feature: Table A; Target 20942; HLA-C*16:02; DCAF4L2; ENSG00000176566; CTA
LTTPELRVY

SEQ ID NO: 20943 - protein, 10 aa, Homo sapiens
  misc_feature: Table A; Target 20943; HLA-B*35:01; DCAF4L2; ENSG00000176566; CTA
MAVREDLYCF

SEQ ID NO: 20944 - protein, 8 aa, Homo sapiens
  misc_feature: Table A; Target 20944; HLA-B*08:01; DCAF4L2; ENSG00000176566; CTA
MQRKKVQI

SEQ ID NO: 20945 - protein, 9 aa, Homo sapiens
  misc_feature: Table A; Target 20945; HLA-B*27:02; DCAF4L2; ENSG00000176566; CTA
MRGLTTPEL

SEQ ID NO: 20946 - protein, 9 aa, Homo sapiens
  misc_feature: Table A; Target 20946; HLA-B*27:05; DCAF4L2; ENSG00000176566; CTA
MRGLTTPEL

SEQ ID NO: 20947 - protein, 8 aa, Homo sapiens
  misc_feature: Table A; Target 20947; HLA-B*57:01; DCAF4L2; ENSG00000176566; CTA
MTGTIKLW

SEQ ID NO: 20948 - protein, 8 aa, Homo sapiens
  misc_feature: Table A; Target 20948; HLA-B*51:01; DCAF4L2; ENSG00000176566; CTA
NAPSMLRK

SEQ ID NO: 20949 - protein, 8 aa, Homo sapiens
  misc_feature: Table A; Target 20949; HLA-A*30:01; DCAF4L2; ENSG00000176566; CTA
NDIPSVAF

SEQ ID NO: 20950 - protein, 8 aa, Homo sapiens
  misc_feature: Table A; Target 20950; HLA-B*18:01; DCAF4L2; ENSG00000176566; CTA
NDIPSVAF

SEQ ID NO: 20951 - protein, 8 aa, Homo sapiens
  misc_feature: Table A; Target 20951; HLA-B*37:01; DCAF4L2; ENSG00000176566; CTA
NDIPSVAF

SEQ ID NO: 20952 - protein, 8 aa, Homo sapiens
  misc_feature: Table A; Target 20952; HLA-B*40:02; DCAF4L2; ENSG00000176566; CTA
NDIPSVAF

SEQ ID NO: 20953 - protein, 8 aa, Homo sapiens
  misc_feature: Table A; Target 20953; HLA-B*44:02; DCAF4L2; ENSG00000176566; CTA
NDIPSVAF

SEQ ID NO: 20954 - protein, 8 aa, Homo sapiens
  misc_feature: Table A; Target 20954; HLA-B*44:03; DCAF4L2; ENSG00000176566; CTA
NDIPSVAF

SEQ ID NO: 20955 - protein, 11 aa, Homo sapiens
  misc_feature: Table A; Target 20955; HLA-A*33:01; DCAF4L2; ENSG00000176566; CTA
NDIPSVAFSSR

SEQ ID NO: 20956 - protein, 8 aa, Homo sapiens
  misc_feature: Table A; Target 20956; HLA-B*18:01; DCAF4L2; ENSG00000176566; CTA
NEEEGVVA

SEQ ID NO: 20957 - protein, 9 aa, Homo sapiens
  misc_feature: Table A; Target 20957; HLA-A*30:01; DCAF4L2; ENSG00000176566; CTA
NEEEGVVAA

SEQ ID NO: 20958 - protein, 9 aa, Homo sapiens
  misc_feature: Table A; Target 20958; HLA-B*18:01; DCAF4L2; ENSG00000176566; CTA
NEEEGVVAA

SEQ ID NO: 20959 - protein, 9 aa, Homo sapiens
  misc_feature: Table A; Target 20959; HLA-B*40:01; DCAF4L2; ENSG00000176566; CTA
NEEEGVVAA

SEQ ID NO: 20960 - protein, 10 aa, Homo sapiens
  misc_feature: Table A; Target 20960; HLA-B*40:01; DCAF4L2; ENSG00000176566; CTA
NEEEGVVAAV

SEQ ID NO: 20961 - protein, 8 aa, Homo sapiens
  misc_feature: Table A; Target 20961; HLA-B*38:01; DCAF4L2; ENSG00000176566; CTA
NHLDSHLL

SEQ ID NO: 20962 - protein, 9 aa, Homo sapiens
  misc_feature: Table A; Target 20962; HLA-B*38:01; DCAF4L2; ENSG00000176566; CTA
NHLDSHLLL

SEQ ID NO: 20963 - protein, 10 aa, Homo sapiens
  misc_feature: Table A; Target 20963; HLA-A*25:01; DCAF4L2; ENSG00000176566; CTA
NQVEAGGSKY

SEQ ID NO: 20964 - protein, 10 aa, Homo sapiens
  misc_feature: Table A; Target 20964; HLA-A*26:01; DCAF4L2; ENSG00000176566; CTA
NQVEAGGSKY

SEQ ID NO: 20965 - protein, 10 aa, Homo sapiens
  misc_feature: Table A; Target 20965; HLA-A*30:02; DCAF4L2; ENSG00000176566; CTA
NQVEAGGSKY

SEQ ID NO: 20966 - protein, 10 aa, Homo sapiens
  misc_feature: Table A; Target 20966; HLA-B*15:01; DCAF4L2; ENSG00000176566; CTA
NQVEAGGSKY

SEQ ID NO: 20967 - protein, 10 aa, Homo sapiens
  misc_feature: Table A; Target 20967; HLA-B*15:03; DCAF4L2; ENSG00000176566; CTA
NQVEAGGSKY

SEQ ID NO: 20968 - protein, 10 aa, Homo sapiens
  misc_feature: Table A; Target 20968; HLA-B*18:01; DCAF4L2; ENSG00000176566; CTA
NQVEAGGSKY

SEQ ID NO: 20969 - protein, 10 aa, Homo sapiens
  misc_feature: Table A; Target 20969; HLA-B*38:01; DCAF4L2; ENSG00000176566; CTA
NQVEAGGSKY

SEQ ID NO: 20970 - protein, 10 aa, Homo sapiens
  misc_feature: Table A; Target 20970; HLA-B*39:01; DCAF4L2; ENSG00000176566; CTA
NQVEAGGSKY

SEQ ID NO: 20971 - protein, 10 aa, Homo sapiens
  misc_feature: Table A; Target 20971; HLA-B*44:03; DCAF4L2; ENSG00000176566; CTA
NQVEAGGSKY

SEQ ID NO: 20972 - protein, 10 aa, Homo sapiens
  misc_feature: Table A; Target 20972; HLA-C*07:04; DCAF4L2; ENSG00000176566; CTA
NQVEAGGSKY

SEQ ID NO: 20973 - protein, 10 aa, Homo sapiens
  misc_feature: Table A; Target 20973; HLA-C*16:04; DCAF4L2; ENSG00000176566; CTA
NQVEAGGSKY

SEQ ID NO: 20974 - protein, 9 aa, Homo sapiens
  misc_feature: Table A; Target 20974; HLA-A*68:02; DCAF4L2; ENSG00000176566; CTA
NSAYLPVHV

SEQ ID NO: 20975 - protein, 8 aa, Homo sapiens
  misc_feature: Table A; Target 20975; HLA-C*05:01; DCAF4L2; ENSG00000176566; CTA
NTDQLFTV

SEQ ID NO: 20976 - protein, 9 aa, Homo sapiens
  misc_feature: Table A; Target 20976; HLA-A*01:01; DCAF4L2; ENSG00000176566; CTA
NTDQLFTVN

SEQ ID NO: 20977 - protein, 10 aa, Homo sapiens
  misc_feature: Table A; Target 20977; HLA-A*23:01; DCAF4L2; ENSG00000176566; CTA
NVVTGHQQSF

SEQ ID NO: 20978 - protein, 10 aa, Homo sapiens
  misc_feature: Table A; Target 20978; HLA-A*25:01; DCAF4L2; ENSG00000176566; CTA
NVVTGHQQSF

SEQ ID NO: 20979 - protein, 10 aa, Homo sapiens
  misc_feature: Table A; Target 20979; HLA-A*26:01; DCAF4L2; ENSG00000176566; CTA
NVVTGHQQSF

SEQ ID NO: 20980 - protein, 10 aa, Homo sapiens
  misc_feature: Table A; Target 20980; HLA-A*32:01; DCAF4L2; ENSG00000176566; CTA
NVVTGHQQSF

SEQ ID NO: 20981 - protein, 10 aa, Homo sapiens
  misc_feature: Table A; Target 20981; HLA-B*35:01; DCAF4L2; ENSG00000176566; CTA
NVVTGHQQSF

SEQ ID NO: 20982 - protein, 10 aa, Homo sapiens
  misc_feature: Table A; Target 20982; HLA-B*58:01; DCAF4L2; ENSG00000176566; CTA
NVVTGHQQSF

SEQ ID NO: 20983 - protein, 10 aa, Homo sapiens
  misc_feature: Table A; Target 20983; HLA-C*07:06; DCAF4L2; ENSG00000176566; CTA
NVVTGHQQSF

SEQ ID NO: 20984 - protein, 9 aa, Homo sapiens
  misc_feature: Table A; Target 20984; HLA-A*23:01; DCAF4L2; ENSG00000176566; CTA
QFAIMTPLL

SEQ ID NO: 20985 - protein, 9 aa, Homo sapiens
  misc_feature: Table A; Target 20985; HLA-A*24:02; DCAF4L2; ENSG00000176566; CTA
QFAIMTPLL

SEQ ID NO: 20986 - protein, 10 aa, Homo sapiens
  misc_feature: Table A; Target 20986; HLA-A*24:02; DCAF4L2; ENSG00000176566; CTA
QFAIMTPLLF

SEQ ID NO: 20987 - protein, 8 aa, Homo sapiens
  misc_feature: Table A; Target 20987; HLA-C*14:02; DCAF4L2; ENSG00000176566; CTA
QFLVSSDM

SEQ ID NO: 20988 - protein, 9 aa, Homo sapiens
  misc_feature: Table A; Target 20988; HLA-B*38:01; DCAF4L2; ENSG00000176566; CTA
QILQDGQFL

SEQ ID NO: 20989 - protein, 10 aa, Homo sapiens
  misc_feature: Table A; Target 20989; HLA-A*25:01; DCAF4L2; ENSG00000176566; CTA
QIPDAWSCAW

SEQ ID NO: 20990 - protein, 8 aa, Homo sapiens
  misc_feature: Table A; Target 20990; HLA-A*02:01; DCAF4L2; ENSG00000176566; CTA
QLFTVNQV

SEQ ID NO: 20991 - protein, 8 aa, Homo sapiens
  misc_feature: Table A; Target 20991; HLA-A*02:03; DCAF4L2; ENSG00000176566; CTA
QLFTVNQV

SEQ ID NO: 20992 - protein, 8 aa, Homo sapiens
  misc_feature: Table A; Target 20992; HLA-A*02:04; DCAF4L2; ENSG00000176566; CTA
QLFTVNQV

SEQ ID NO: 20993 - protein, 8 aa, Homo sapiens
  misc_feature: Table A; Target 20993; HLA-B*13:02; DCAF4L2; ENSG00000176566; CTA
QLFTVNQV

SEQ ID NO: 20994 - protein, 10 aa, Homo sapiens
  misc_feature: Table A; Target 20994; HLA-B*56:01; DCAF4L2; ENSG00000176566; CTA
QLFTVNQVEA

SEQ ID NO: 20995 - protein, 9 aa, Homo sapiens
  misc_feature: Table A; Target 20995; HLA-B*15:01; DCAF4L2; ENSG00000176566; CTA
QQFAIMTPL

SEQ ID NO: 20996 - protein, 9 aa, Homo sapiens
  misc_feature: Table A; Target 20996; HLA-B*15:03; DCAF4L2; ENSG00000176566; CTA
QQFAIMTPL

SEQ ID NO: 20997 - protein, 9 aa, Homo sapiens
  misc_feature: Table A; Target 20997; HLA-B*27:05; DCAF4L2; ENSG00000176566; CTA
QQFAIMTPL

SEQ ID NO: 20998 - protein, 9 aa, Homo sapiens
  misc_feature: Table A; Target 20998; HLA-C*02:02; DCAF4L2; ENSG00000176566; CTA
QQFAIMTPL

SEQ ID NO: 20999 - protein, 11 aa, Homo sapiens
  misc_feature: Table A; Target 20999; HLA-B*27:05; DCAF4L2; ENSG00000176566; CTA
QQSFGTSSDVL

SEQ ID NO: 21000 - protein, 11 aa, Homo sapiens
  misc_feature: Table A; Target 21000; HLA-B*38:01; DCAF4L2; ENSG00000176566; CTA
QQSFGTSSDVL

SEQ ID NO: 21001 - protein, 11 aa, Homo sapiens
  misc_feature: Table A; Target 21001; HLA-B*39:01; DCAF4L2; ENSG00000176566; CTA
QQSFGTSSDVL

SEQ ID NO: 21002 - protein, 11 aa, Homo sapiens
  misc_feature: Table A; Target 21002; HLA-C*07:04; DCAF4L2; ENSG00000176566; CTA
QQSFGTSSDVL

SEQ ID NO: 21003 - protein, 8 aa, Homo sapiens
  misc_feature: Table A; Target 21003; HLA-B*13:02; DCAF4L2; ENSG00000176566; CTA
QQVLLTNV

SEQ ID NO: 21004 - protein, 9 aa, Homo sapiens
  misc_feature: Table A; Target 21004; HLA-B*13:02; DCAF4L2; ENSG00000176566; CTA
QQVLLTNVV

SEQ ID NO: 21005 - protein, 9 aa, Homo sapiens
  misc_feature: Table A; Target 21005; HLA-B*39:01; DCAF4L2; ENSG00000176566; CTA
QQVLLTNVV

SEQ ID NO: 21006 - protein, 10 aa, Homo sapiens
  misc_feature: Table A; Target 21006; HLA-B*39:01; DCAF4L2; ENSG00000176566; CTA
QSFGTSSDVL

SEQ ID NO: 21007 - protein, 9 aa, Homo sapiens
  misc_feature: Table A; Target 21007; HLA-A*01:01; DCAF4L2; ENSG00000176566; CTA
QVEAGGSKY

SEQ ID NO: 21008 - protein, 9 aa, Homo sapiens
  misc_feature: Table A; Target 21008; HLA-A*25:01; DCAF4L2; ENSG00000176566; CTA
QVEAGGSKY

SEQ ID NO: 21009 - protein, 9 aa, Homo sapiens
  misc_feature: Table A; Target 21009; HLA-A*26:01; DCAF4L2; ENSG00000176566; CTA
QVEAGGSKY

SEQ ID NO: 21010 - protein, 9 aa, Homo sapiens
  misc_feature: Table A; Target 21010; HLA-A*30:02; DCAF4L2; ENSG00000176566; CTA
QVEAGGSKY

SEQ ID NO: 21011 - protein, 9 aa, Homo sapiens
  misc_feature: Table A; Target 21011; HLA-A*32:01; DCAF4L2; ENSG00000176566; CTA
QVEAGGSKY

SEQ ID NO: 21012 - protein, 9 aa, Homo sapiens
  misc_feature: Table A; Target 21012; HLA-B*15:01; DCAF4L2; ENSG00000176566; CTA
QVEAGGSKY

SEQ ID NO: 21013 - protein, 9 aa, Homo sapiens
  misc_feature: Table A; Target 21013; HLA-B*15:03; DCAF4L2; ENSG00000176566; CTA
QVEAGGSKY

SEQ ID NO: 21014 - protein, 9 aa, Homo sapiens
  misc_feature: Table A; Target 21014; HLA-B*35:01; DCAF4L2; ENSG00000176566; CTA
QVEAGGSKY

SEQ ID NO: 21015 - protein, 9 aa, Homo sapiens
  misc_feature: Table A; Target 21015; HLA-C*07:04; DCAF4L2; ENSG00000176566; CTA
QVEAGGSKY

SEQ ID NO: 21016 - protein, 11 aa, Homo sapiens
  misc_feature: Table A; Target 21016; HLA-A*30:02; DCAF4L2; ENSG00000176566; CTA
QYEGHVNNSAY

SEQ ID NO: 21017 - protein, 9 aa, Homo sapiens
  misc_feature: Table A; Target 21017; HLA-A*30:02; DCAF4L2; ENSG00000176566; CTA
RATKCVTQY

SEQ ID NO: 21018 - protein, 9 aa, Homo sapiens
  misc_feature: Table A; Target 21018; HLA-B*15:01; DCAF4L2; ENSG00000176566; CTA
RATKCVTQY

SEQ ID NO: 21019 - protein, 9 aa, Homo sapiens
  misc_feature: Table A; Target 21019; HLA-B*58:01; DCAF4L2; ENSG00000176566; CTA
RATKCVTQY

SEQ ID NO: 21020 - protein, 9 aa, Homo sapiens
  misc_feature: Table A; Target 21020; HLA-C*02:02; DCAF4L2; ENSG00000176566; CTA
RATKCVTQY

SEQ ID NO: 21021 - protein, 9 aa, Homo sapiens
  misc_feature: Table A; Target 21021; HLA-C*16:01; DCAF4L2; ENSG00000176566; CTA
RATKCVTQY

SEQ ID NO: 21022 - protein, 9 aa, Homo sapiens
  misc_feature: Table A; Target 21022; HLA-C*16:02; DCAF4L2; ENSG00000176566; CTA
RATKCVTQY

SEQ ID NO: 21023 - protein, 8 aa, Homo sapiens
  misc_feature: Table A; Target 21023; HLA-B*37:01; DCAF4L2; ENSG00000176566; CTA
RELRVSCM

SEQ ID NO: 21024 - protein, 8 aa, Homo sapiens
  misc_feature: Table A; Target 21024; HLA-C*03:04; DCAF4L2; ENSG00000176566; CTA
RGAPGLLM

SEQ ID NO: 21025 - protein, 11 aa, Homo sapiens
  misc_feature: Table A; Target 21025; HLA-A*31:01; DCAF4L2; ENSG00000176566; CTA
RGAPGLLMAVR

SEQ ID NO: 21026 - protein, 8 aa, Homo sapiens
  misc_feature: Table A; Target 21026; HLA-C*16:01; DCAF4L2; ENSG00000176566; CTA
RGLTTPEL

SEQ ID NO: 21027 - protein, 9 aa, Homo sapiens
  misc_feature: Table A; Target 21027; HLA-A*31:01; DCAF4L2; ENSG00000176566; CTA
RGLTTPELR

SEQ ID NO: 21028 - protein, 11 aa, Homo sapiens
  misc_feature: Table A; Target 21028; HLA-A*30:02; DCAF4L2; ENSG00000176566; CTA
RGLTTPELRVY

SEQ ID NO: 21029 - protein, 11 aa, Homo sapiens
  misc_feature: Table A; Target 21029; HLA-B*57:01; DCAF4L2; ENSG00000176566; CTA
RGLTTPELRVY

SEQ ID NO: 21030 - protein, 9 aa, Homo sapiens
  misc_feature: Table A; Target 21030; HLA-A*03:01; DCAF4L2; ENSG00000176566; CTA
RVYPHKTLY

SEQ ID NO: 21031 - protein, 9 aa, Homo sapiens
  misc_feature: Table A; Target 21031; HLA-A*29:02; DCAF4L2; ENSG00000176566; CTA
RVYPHKTLY

SEQ ID NO: 21032 - protein, 9 aa, Homo sapiens
  misc_feature: Table A; Target 21032; HLA-A*30:02; DCAF4L2; ENSG00000176566; CTA
RVYPHKTLY

SEQ ID NO: 21033 - protein, 9 aa, Homo sapiens
  misc_feature: Table A; Target 21033; HLA-A*32:01; DCAF4L2; ENSG00000176566; CTA
RVYPHKTLY

SEQ ID NO: 21034 - protein, 9 aa, Homo sapiens
  misc_feature: Table A; Target 21034; HLA-B*15:01; DCAF4L2; ENSG00000176566; CTA
RVYPHKTLY

SEQ ID NO: 21035 - protein, 9 aa, Homo sapiens
  misc_feature: Table A; Target 21035; HLA-B*57:01; DCAF4L2; ENSG00000176566; CTA
RVYPHKTLY

SEQ ID NO: 21036 - protein, 9 aa, Homo sapiens
  misc_feature: Table A; Target 21036; HLA-C*02:02; DCAF4L2; ENSG00000176566; CTA
RVYPHKTLY

SEQ ID NO: 21037 - protein, 10 aa, Homo sapiens
  misc_feature: Table A; Target 21037; HLA-A*02:03; DCAF4L2; ENSG00000176566; CTA
RVYPHKTLYV

SEQ ID NO: 21038 - protein, 10 aa, Homo sapiens
  misc_feature: Table A; Target 21038; HLA-A*03:01; DCAF4L2; ENSG00000176566; CTA
RVYPHKTLYV

SEQ ID NO: 21039 - protein, 8 aa, Homo sapiens
  misc_feature: Table A; Target 21039; HLA-B*51:01; DCAF4L2; ENSG00000176566; CTA
SAVTSLQI

SEQ ID NO: 21040 - protein, 9 aa, Homo sapiens
  misc_feature: Table A; Target 21040; HLA-B*35:03; DCAF4L2; ENSG00000176566; CTA
SAVTSLQIL

SEQ ID NO: 21041 - protein, 9 aa, Homo sapiens
  misc_feature: Table A; Target 21041; HLA-B*40:01; DCAF4L2; ENSG00000176566; CTA
SAVTSLQIL

SEQ ID NO: 21042 - protein, 9 aa, Homo sapiens
  misc_feature: Table A; Target 21042; HLA-B*46:01; DCAF4L2; ENSG00000176566; CTA
SAVTSLQIL

SEQ ID NO: 21043 - protein, 9 aa, Homo sapiens
  misc_feature: Table A; Target 21043; HLA-B*58:01; DCAF4L2; ENSG00000176566; CTA
SAVTSLQIL

SEQ ID NO: 21044 - protein, 9 aa, Homo sapiens
  misc_feature: Table A; Target 21044; HLA-C*01:02; DCAF4L2; ENSG00000176566; CTA
SAVTSLQIL

SEQ ID NO: 21045 - protein, 9 aa, Homo sapiens
  misc_feature: Table A; Target 21045; HLA-C*02:02; DCAF4L2; ENSG00000176566; CTA
SAVTSLQIL

SEQ ID NO: 21046 - protein, 9 aa, Homo sapiens
  misc_feature: Table A; Target 21046; HLA-C*03:03; DCAF4L2; ENSG00000176566; CTA
SAVTSLQIL

SEQ ID NO: 21047 - protein, 9 aa, Homo sapiens
  misc_feature: Table A; Target 21047; HLA-C*03:04; DCAF4L2; ENSG00000176566; CTA
SAVTSLQIL

SEQ ID NO: 21048 - protein, 9 aa, Homo sapiens
  misc_feature: Table A; Target 21048; HLA-C*12:03; DCAF4L2; ENSG00000176566; CTA
SAVTSLQIL

SEQ ID NO: 21049 - protein, 9 aa, Homo sapiens
  misc_feature: Table A; Target 21049; HLA-C*16:01; DCAF4L2; ENSG00000176566; CTA
SAVTSLQIL

SEQ ID NO: 21050 - protein, 9 aa, Homo sapiens
  misc_feature: Table A; Target 21050; HLA-C*16:02; DCAF4L2; ENSG00000176566; CTA
SAVTSLQIL

SEQ ID NO: 21051 - protein, 8 aa, Homo sapiens
  misc_feature: Table A; Target 21051; HLA-B*08:01; DCAF4L2; ENSG00000176566; CTA
SAYLPVHV

SEQ ID NO: 21052 - protein, 8 aa, Homo sapiens
  misc_feature: Table A; Target 21052; HLA-B*13:02; DCAF4L2; ENSG00000176566; CTA
SAYLPVHV

SEQ ID NO: 21053 - protein, 8 aa, Homo sapiens
  misc_feature: Table A; Target 21053; HLA-B*51:01; DCAF4L2; ENSG00000176566; CTA
SAYLPVHV

SEQ ID NO: 21054 - protein, 8 aa, Homo sapiens
  misc_feature: Table A; Target 21054; HLA-B*54:01; DCAF4L2; ENSG00000176566; CTA
SAYLPVHV

SEQ ID NO: 21055 - protein, 8 aa, Homo sapiens
  misc_feature: Table A; Target 21055; HLA-B*56:01; DCAF4L2; ENSG00000176566; CTA
SAYLPVHV

SEQ ID NO: 21056 - protein, 8 aa, Homo sapiens
  misc_feature: Table A; Target 21056; HLA-C*02:02; DCAF4L2; ENSG00000176566; CTA
SAYLPVHV

SEQ ID NO: 21057 - protein, 8 aa, Homo sapiens
  misc_feature: Table A; Target 21057; HLA-C*05:01; DCAF4L2; ENSG00000176566; CTA
SAYLPVHV

SEQ ID NO: 21058 - protein, 8 aa, Homo sapiens
  misc_feature: Table A; Target 21058; HLA-C*12:03; DCAF4L2; ENSG00000176566; CTA
SAYLPVHV

SEQ ID NO: 21059 - protein, 8 aa, Homo sapiens
  misc_feature: Table A; Target 21059; HLA-C*16:02; DCAF4L2; ENSG00000176566; CTA
SAYLPVHV

SEQ ID NO: 21060 - protein, 8 aa, Homo sapiens
  misc_feature: Table A; Target 21060; HLA-C*16:04; DCAF4L2; ENSG00000176566; CTA
SAYLPVHV

SEQ ID NO: 21061 - protein, 9 aa, Homo sapiens
  misc_feature: Table A; Target 21061; HLA-B*54:01; DCAF4L2; ENSG00000176566; CTA
SAYLPVHVN

SEQ ID NO: 21062 - protein, 9 aa, Homo sapiens
  misc_feature: Table A; Target 21062; HLA-C*12:03; DCAF4L2; ENSG00000176566; CTA
SAYLPVHVN

SEQ ID NO: 21063 - protein, 9 aa, Homo sapiens
  misc_feature: Table A; Target 21063; HLA-C*16:02; DCAF4L2; ENSG00000176566; CTA
SAYLPVHVN

SEQ ID NO: 21064 - protein, 9 aa, Homo sapiens
  misc_feature: Table A; Target 21064; HLA-A*30:01; DCAF4L2; ENSG00000176566; CTA
SDMTGTIKL

SEQ ID NO: 21065 - protein, 9 aa, Homo sapiens
  misc_feature: Table A; Target 21065; HLA-B*37:01; DCAF4L2; ENSG00000176566; CTA
SDMTGTIKL

SEQ ID NO: 21066 - protein, 9 aa, Homo sapiens
  misc_feature: Table A; Target 21066; HLA-B*40:01; DCAF4L2; ENSG00000176566; CTA
SDMTGTIKL

SEQ ID NO: 21067 - protein, 10 aa, Homo sapiens
  misc_feature: Table A; Target 21067; HLA-B*44:02; DCAF4L2; ENSG00000176566; CTA
SDMTGTIKLW

SEQ ID NO: 21068 - protein, 10 aa, Homo sapiens
  misc_feature: Table A; Target 21068; HLA-B*44:03; DCAF4L2; ENSG00000176566; CTA
SDMTGTIKLW

SEQ ID NO: 21069 - protein, 8 aa, Homo sapiens
  misc_feature: Table A; Target 21069; HLA-A*30:01; DCAF4L2; ENSG00000176566; CTA
SDVLAQQF

SEQ ID NO: 21070 - protein, 8 aa, Homo sapiens
  misc_feature: Table A; Target 21070; HLA-B*18:01; DCAF4L2; ENSG00000176566; CTA
SDVLAQQF

SEQ ID NO: 21071 - protein, 8 aa, Homo sapiens
  misc_feature: Table A; Target 21071; HLA-B*27:02; DCAF4L2; ENSG00000176566; CTA
SDVLAQQF

SEQ ID NO: 21072 - protein, 8 aa, Homo sapiens
  misc_feature: Table A; Target 21072; HLA-B*37:01; DCAF4L2; ENSG00000176566; CTA
SDVLAQQF

SEQ ID NO: 21073 - protein, 8 aa, Homo sapiens
  misc_feature: Table A; Target 21073; HLA-B*40:02; DCAF4L2; ENSG00000176566; CTA
SDVLAQQF

SEQ ID NO: 21074 - protein, 8 aa, Homo sapiens
  misc_feature: Table A; Target 21074; HLA-B*44:02; DCAF4L2; ENSG00000176566; CTA
SDVLAQQF

SEQ ID NO: 21075 - protein, 8 aa, Homo sapiens
  misc_feature: Table A; Target 21075; HLA-B*44:03; DCAF4L2; ENSG00000176566; CTA
SDVLAQQF

SEQ ID NO: 21076 - protein, 8 aa, Homo sapiens
  misc_feature: Table A; Target 21076; HLA-C*04:01; DCAF4L2; ENSG00000176566; CTA
SDVLAQQF

SEQ ID NO: 21077 - protein, 8 aa, Homo sapiens
  misc_feature: Table A; Target 21077; HLA-A*30:01; DCAF4L2; ENSG00000176566; CTA
SENDIPSV

SEQ ID NO: 21078 - protein, 8 aa, Homo sapiens
  misc_feature: Table A; Target 21078; HLA-B*18:01; DCAF4L2; ENSG00000176566; CTA
SENDIPSV

SEQ ID NO: 21079 - protein, 8 aa, Homo sapiens
  misc_feature: Table A; Target 21079; HLA-B*37:01; DCAF4L2; ENSG00000176566; CTA
SENDIPSV

SEQ ID NO: 21080 - protein, 8 aa, Homo sapiens
  misc_feature: Table A; Target 21080; HLA-B*49:01; DCAF4L2; ENSG00000176566; CTA
SENDIPSV

SEQ ID NO: 21081 - protein, 9 aa, Homo sapiens
  misc_feature: Table A; Target 21081; HLA-A*30:01; DCAF4L2; ENSG00000176566; CTA
SENDIPSVA

SEQ ID NO: 21082 - protein, 9 aa, Homo sapiens
  misc_feature: Table A; Target 21082; HLA-B*18:01; DCAF4L2; ENSG00000176566; CTA
SENDIPSVA

SEQ ID NO: 21083 - protein, 9 aa, Homo sapiens
  misc_feature: Table A; Target 21083; HLA-B*49:01; DCAF4L2; ENSG00000176566; CTA
SENDIPSVA

SEQ ID NO: 21084 - protein, 10 aa, Homo sapiens
  misc_feature: Table A; Target 21084; HLA-A*23:01; DCAF4L2; ENSG00000176566; CTA
SENDIPSVAF

SEQ ID NO: 21085 - protein, 10 aa, Homo sapiens
  misc_feature: Table A; Target 21085; HLA-A*25:01; DCAF4L2; ENSG00000176566; CTA
SENDIPSVAF

SEQ ID NO: 21086 - protein, 10 aa, Homo sapiens
  misc_feature: Table A; Target 21086; HLA-A*30:01; DCAF4L2; ENSG00000176566; CTA
SENDIPSVAF

SEQ ID NO: 21087 - protein, 10 aa, Homo sapiens
  misc_feature: Table A; Target 21087; HLA-B*18:01; DCAF4L2; ENSG00000176566; CTA
SENDIPSVAF

SEQ ID NO: 21088 - protein, 10 aa, Homo sapiens
  misc_feature: Table A; Target 21088; HLA-B*27:02; DCAF4L2; ENSG00000176566; CTA
SENDIPSVAF

SEQ ID NO: 21089 - protein, 10 aa, Homo sapiens
  misc_feature: Table A; Target 21089; HLA-B*37:01; DCAF4L2; ENSG00000176566; CTA
SENDIPSVAF

SEQ ID NO: 21090 - protein, 10 aa, Homo sapiens
  misc_feature: Table A; Target 21090; HLA-B*40:01; DCAF4L2; ENSG00000176566; CTA
SENDIPSVAF

SEQ ID NO: 21091 - protein, 10 aa, Homo sapiens
  misc_feature: Table A; Target 21091; HLA-B*40:02; DCAF4L2; ENSG00000176566; CTA
SENDIPSVAF

SEQ ID NO: 21092 - protein, 10 aa, Homo sapiens
  misc_feature: Table A; Target 21092; HLA-B*44:02; DCAF4L2; ENSG00000176566; CTA
SENDIPSVAF

SEQ ID NO: 21093 - protein, 10 aa, Homo sapiens
  misc_feature: Table A; Target 21093; HLA-B*49:01; DCAF4L2; ENSG00000176566; CTA
SENDIPSVAF

SEQ ID NO: 21094 - protein, 10 aa, Homo sapiens
  misc_feature: Table A; Target 21094; HLA-C*02:02; DCAF4L2; ENSG00000176566; CTA
SENDIPSVAF

SEQ ID NO: 21095 - protein, 10 aa, Homo sapiens
  misc_feature: Table A; Target 21095; HLA-C*16:04; DCAF4L2; ENSG00000176566; CTA
SENDIPSVAF

SEQ ID NO: 21096 - protein, 9 aa, Homo sapiens
  misc_feature: Table A; Target 21096; HLA-C*14:02; DCAF4L2; ENSG00000176566; CTA
SFGTSSDVL

SEQ ID NO: 21097 - protein, 9 aa, Homo sapiens
  misc_feature: Table A; Target 21097; HLA-A*02:07; DCAF4L2; ENSG00000176566; CTA
SHDSAVTSL

SEQ ID NO: 21098 - protein, 9 aa, Homo sapiens
  misc_feature: Table A; Target 21098; HLA-B*27:05; DCAF4L2; ENSG00000176566; CTA
SHDSAVTSL

SEQ ID NO: 21099 - protein, 9 aa, Homo sapiens
  misc_feature: Table A; Target 21099; HLA-B*35:03; DCAF4L2; ENSG00000176566; CTA
SHDSAVTSL

SEQ ID NO: 21100 - protein, 9 aa, Homo sapiens
  misc_feature: Table A; Target 21100; HLA-B*38:01; DCAF4L2; ENSG00000176566; CTA
SHDSAVTSL

SEQ ID NO: 21101 - protein, 9 aa, Homo sapiens
  misc_feature: Table A; Target 21101; HLA-B*39:01; DCAF4L2; ENSG00000176566; CTA
SHDSAVTSL

SEQ ID NO: 21102 - protein, 9 aa, Homo sapiens
  misc_feature: Table A; Target 21102; HLA-B*40:01; DCAF4L2; ENSG00000176566; CTA
SHDSAVTSL

SEQ ID NO: 21103 - protein, 9 aa, Homo sapiens
  misc_feature: Table A; Target 21103; HLA-C*05:01; DCAF4L2; ENSG00000176566; CTA
SHDSAVTSL

SEQ ID NO: 21104 - protein, 11 aa, Homo sapiens
  misc_feature: Table A; Target 21104; HLA-B*38:01; DCAF4L2; ENSG00000176566; CTA
SHDSAVTSLQI

SEQ ID NO: 21105 - protein, 8 aa, Homo sapiens
  misc_feature: Table A; Target 21105; HLA-B*15:03; DCAF4L2; ENSG00000176566; CTA
SKYGIITM

SEQ ID NO: 21106 - protein, 10 aa, Homo sapiens
  misc_feature: Table A; Target 21106; HLA-A*02:03; DCAF4L2; ENSG00000176566; CTA
SLFIGSFPGM

SEQ ID NO: 21107 - protein, 11 aa, Homo sapiens
  misc_feature: Table A; Target 21107; HLA-A*31:01; DCAF4L2; ENSG00000176566; CTA
SLFIGSFPGMR

SEQ ID NO: 21108 - protein, 9 aa, Homo sapiens
  misc_feature: Table A; Target 21108; HLA-A*02:04; DCAF4L2; ENSG00000176566; CTA
SLNHLDSHL

SEQ ID NO: 21109 - protein, 11 aa, Homo sapiens
  misc_feature: Table A; Target 21109; HLA-A*02:04; DCAF4L2; ENSG00000176566; CTA
SLNHLDSHLLL

SEQ ID NO: 21110 - protein, 8 aa, Homo sapiens
  misc_feature: Table A; Target 21110; HLA-B*08:01; DCAF4L2; ENSG00000176566; CTA
SMLRKNQL

SEQ ID NO: 21111 - protein, 9 aa, Homo sapiens
  misc_feature: Table A; Target 21111; HLA-A*02:01; DCAF4L2; ENSG00000176566; CTA
SQQVLLTNV

SEQ ID NO: 21112 - protein, 9 aa, Homo sapiens
  misc_feature: Table A; Target 21112; HLA-A*02:03; DCAF4L2; ENSG00000176566; CTA
SQQVLLTNV

SEQ ID NO: 21113 - protein, 9 aa, Homo sapiens
  misc_feature: Table A; Target 21113; HLA-A*02:04; DCAF4L2; ENSG00000176566; CTA
SQQVLLTNV

SEQ ID NO: 21114 - protein, 9 aa, Homo sapiens
  misc_feature: Table A; Target 21114; HLA-B*13:02; DCAF4L2; ENSG00000176566; CTA
SQQVLLTNV

SEQ ID NO: 21115 - protein, 8 aa, Homo sapiens
  misc_feature: Table A; Target 21115; HLA-C*05:01; DCAF4L2; ENSG00000176566; CTA
SSDMTGTI

SEQ ID NO: 21116 - protein, 11 aa, Homo sapiens
  misc_feature: Table A; Target 21116; HLA-B*44:02; DCAF4L2; ENSG00000176566; CTA
SSDMTGTIKLW

SEQ ID NO: 21117 - protein, 9 aa, Homo sapiens
  misc_feature: Table A; Target 21117; HLA-A*01:01; DCAF4L2; ENSG00000176566; CTA
SSDVLAQQF

SEQ ID NO: 21118 - protein, 9 aa, Homo sapiens
  misc_feature: Table A; Target 21118; HLA-A*32:01; DCAF4L2; ENSG00000176566; CTA
SSDVLAQQF

SEQ ID NO: 21119 - protein, 9 aa, Homo sapiens
  misc_feature: Table A; Target 21119; HLA-B*38:01; DCAF4L2; ENSG00000176566; CTA
SSDVLAQQF

SEQ ID NO: 21120 - protein, 9 aa, Homo sapiens
  misc_feature: Table A; Target 21120; HLA-B*58:01; DCAF4L2; ENSG00000176566; CTA
SSDVLAQQF

SEQ ID NO: 21121 - protein, 9 aa, Homo sapiens
  misc_feature: Table A; Target 21121; HLA-C*04:01; DCAF4L2; ENSG00000176566; CTA
SSDVLAQQF

SEQ ID NO: 21122 - protein, 9 aa, Homo sapiens
  misc_feature: Table A; Target 21122; HLA-C*05:01; DCAF4L2; ENSG00000176566; CTA
SSDVLAQQF

SEQ ID NO: 21123 - protein, 9 aa, Homo sapiens
  misc_feature: Table A; Target 21123; HLA-A*23:01; DCAF4L2; ENSG00000176566; CTA
TGLSQQVLL

SEQ ID NO: 21124 - protein, 8 aa, Homo sapiens
  misc_feature: Table A; Target 21124; HLA-A*03:01; DCAF4L2; ENSG00000176566; CTA
TLYVPNRK

SEQ ID NO: 21125 - protein, 9 aa, Homo sapiens
  misc_feature: Table A; Target 21125; HLA-A*02:03; DCAF4L2; ENSG00000176566; CTA
TLYVPNRKV

SEQ ID NO: 21126 - protein, 11 aa, Homo sapiens
  misc_feature: Table A; Target 21126; HLA-A*31:01; DCAF4L2; ENSG00000176566; CTA
TMRGLTTPELR

SEQ ID NO: 21127 - protein, 10 aa, Homo sapiens
  misc_feature: Table A; Target 21127; HLA-A*02:03; DCAF4L2; ENSG00000176566; CTA
TQYEGHVNNS

SEQ ID NO: 21128 - protein, 11 aa, Homo sapiens
  misc_feature: Table A; Target 21128; HLA-C*16:04; DCAF4L2; ENSG00000176566; CTA
TQYEGHVNNSA

SEQ ID NO: 21129 - protein, 10 aa, Homo sapiens
  misc_feature: Table A; Target 21129; HLA-A*23:01; DCAF4L2; ENSG00000176566; CTA
TSSDVLAQQF

SEQ ID NO: 21130 - protein, 10 aa, Homo sapiens
  misc_feature: Table A; Target 21130; HLA-A*25:01; DCAF4L2; ENSG00000176566; CTA
TSSDVLAQQF

SEQ ID NO: 21131 - protein, 10 aa, Homo sapiens
  misc_feature: Table A; Target 21131; HLA-A*26:01; DCAF4L2; ENSG00000176566; CTA
TSSDVLAQQF

SEQ ID NO: 21132 - protein, 10 aa, Homo sapiens
  misc_feature: Table A; Target 21132; HLA-A*29:02; DCAF4L2; ENSG00000176566; CTA
TSSDVLAQQF

SEQ ID NO: 21133 - protein, 10 aa, Homo sapiens
  misc_feature: Table A; Target 21133; HLA-A*30:02; DCAF4L2; ENSG00000176566; CTA
TSSDVLAQQF

SEQ ID NO: 21134 - protein, 10 aa, Homo sapiens
  misc_feature: Table A; Target 21134; HLA-A*32:01; DCAF4L2; ENSG00000176566; CTA
TSSDVLAQQF

SEQ ID NO: 21135 - protein, 10 aa, Homo sapiens
  misc_feature: Table A; Target 21135; HLA-A*33:03; DCAF4L2; ENSG00000176566; CTA
TSSDVLAQQF

SEQ ID NO: 21136 - protein, 10 aa, Homo sapiens
  misc_feature: Table A; Target 21136; HLA-A*68:01; DCAF4L2; ENSG00000176566; CTA
TSSDVLAQQF

SEQ ID NO: 21137 - protein, 10 aa, Homo sapiens
  misc_feature: Table A; Target 21137; HLA-A*68:02; DCAF4L2; ENSG00000176566; CTA
TSSDVLAQQF

SEQ ID NO: 21138 - protein, 10 aa, Homo sapiens
  misc_feature: Table A; Target 21138; HLA-B*18:01; DCAF4L2; ENSG00000176566; CTA
TSSDVLAQQF

SEQ ID NO: 21139 - protein, 10 aa, Homo sapiens
  misc_feature: Table A; Target 21139; HLA-B*27:02; DCAF4L2; ENSG00000176566; CTA
TSSDVLAQQF

SEQ ID NO: 21140 - protein, 10 aa, Homo sapiens
  misc_feature: Table A; Target 21140; HLA-B*27:05; DCAF4L2; ENSG00000176566; CTA
TSSDVLAQQF

SEQ ID NO: 21141 - protein, 10 aa, Homo sapiens
  misc_feature: Table A; Target 21141; HLA-B*35:01; DCAF4L2; ENSG00000176566; CTA
TSSDVLAQQF

SEQ ID NO: 21142 - protein, 10 aa, Homo sapiens
  misc_feature: Table A; Target 21142; HLA-B*38:01; DCAF4L2; ENSG00000176566; CTA
TSSDVLAQQF

SEQ ID NO: 21143 - protein, 10 aa, Homo sapiens
  misc_feature: Table A; Target 21143; HLA-B*44:03; DCAF4L2; ENSG00000176566; CTA
TSSDVLAQQF

SEQ ID NO: 21144 - protein, 10 aa, Homo sapiens
  misc_feature: Table A; Target 21144; HLA-B*57:01; DCAF4L2; ENSG00000176566; CTA
TSSDVLAQQF

SEQ ID NO: 21145 - protein, 10 aa, Homo sapiens
  misc_feature: Table A; Target 21145; HLA-B*58:01; DCAF4L2; ENSG00000176566; CTA
TSSDVLAQQF

SEQ ID NO: 21146 - protein, 10 aa, Homo sapiens
  misc_feature: Table A; Target 21146; HLA-C*02:02; DCAF4L2; ENSG00000176566; CTA
TSSDVLAQQF

SEQ ID NO: 21147 - protein, 10 aa, Homo sapiens
  misc_feature: Table A; Target 21147; HLA-C*07:04; DCAF4L2; ENSG00000176566; CTA
TSSDVLAQQF

SEQ ID NO: 21148 - protein, 10 aa, Homo sapiens
  misc_feature: Table A; Target 21148; HLA-C*07:06; DCAF4L2; ENSG00000176566; CTA
TSSDVLAQQF

SEQ ID NO: 21149 - protein, 10 aa, Homo sapiens
  misc_feature: Table A; Target 21149; HLA-C*16:04; DCAF4L2; ENSG00000176566; CTA
TSSDVLAQQF

SEQ ID NO: 21150 - protein, 9 aa, Homo sapiens
  misc_feature: Table A; Target 21150; HLA-A*02:01; DCAF4L2; ENSG00000176566; CTA
TTIPSPYPA

SEQ ID NO: 21151 - protein, 9 aa, Homo sapiens
  misc_feature: Table A; Target 21151; HLA-A*31:01; DCAF4L2; ENSG00000176566; CTA
TTIPSPYPA

SEQ ID NO: 21152 - protein, 9 aa, Homo sapiens
  misc_feature: Table A; Target 21152; HLA-A*68:02; DCAF4L2; ENSG00000176566; CTA
TTIPSPYPA

SEQ ID NO: 21153 - protein, 9 aa, Homo sapiens
  misc_feature: Table A; Target 21153; HLA-B*54:01; DCAF4L2; ENSG00000176566; CTA
TTIPSPYPA

SEQ ID NO: 21154 - protein, 9 aa, Homo sapiens
  misc_feature: Table A; Target 21154; HLA-B*56:01; DCAF4L2; ENSG00000176566; CTA
TTIPSPYPA

SEQ ID NO: 21155 - protein, 11 aa, Homo sapiens
  misc_feature: Table A; Target 21155; HLA-A*03:02; DCAF4L2; ENSG00000176566; CTA
TVNQVEAGGSK

SEQ ID NO: 21156 - protein, 11 aa, Homo sapiens
  misc_feature: Table A; Target 21156; HLA-A*11:01; DCAF4L2; ENSG00000176566; CTA
TVNQVEAGGSK

SEQ ID NO: 21157 - protein, 11 aa, Homo sapiens
  misc_feature: Table A; Target 21157; HLA-A*68:01; DCAF4L2; ENSG00000176566; CTA
TVNQVEAGGSK

SEQ ID NO: 21158 - protein, 11 aa, Homo sapiens
  misc_feature: Table A; Target 21158; HLA-C*07:06; DCAF4L2; ENSG00000176566; CTA
TVNQVEAGGSK

SEQ ID NO: 21159 - protein, 9 aa, Homo sapiens
  misc_feature: Table A; Target 21159; HLA-A*01:01; DCAF4L2; ENSG00000176566; CTA
VAAVGQDCY

SEQ ID NO: 21160 - protein, 9 aa, Homo sapiens
  misc_feature: Table A; Target 21160; HLA-A*30:02; DCAF4L2; ENSG00000176566; CTA
VAAVGQDCY

SEQ ID NO: 21161 - protein, 9 aa, Homo sapiens
  misc_feature: Table A; Target 21161; HLA-B*15:01; DCAF4L2; ENSG00000176566; CTA
VAAVGQDCY

SEQ ID NO: 21162 - protein, 9 aa, Homo sapiens
  misc_feature: Table A; Target 21162; HLA-B*15:03; DCAF4L2; ENSG00000176566; CTA
VAAVGQDCY

SEQ ID NO: 21163 - protein, 9 aa, Homo sapiens
  misc_feature: Table A; Target 21163; HLA-B*35:01; DCAF4L2; ENSG00000176566; CTA
VAAVGQDCY

SEQ ID NO: 21164 - protein, 9 aa, Homo sapiens
  misc_feature: Table A; Target 21164; HLA-B*39:01; DCAF4L2; ENSG00000176566; CTA
VAAVGQDCY

SEQ ID NO: 21165 - protein, 9 aa, Homo sapiens
  misc_feature: Table A; Target 21165; HLA-B*46:01; DCAF4L2; ENSG00000176566; CTA
VAAVGQDCY

SEQ ID NO: 21166 - protein, 9 aa, Homo sapiens
  misc_feature: Table A; Target 21166; HLA-B*58:01; DCAF4L2; ENSG00000176566; CTA
VAAVGQDCY

SEQ ID NO: 21167 - protein, 9 aa, Homo sapiens
  misc_feature: Table A; Target 21167; HLA-C*02:02; DCAF4L2; ENSG00000176566; CTA
VAAVGQDCY

SEQ ID NO: 21168 - protein, 9 aa, Homo sapiens
  misc_feature: Table A; Target 21168; HLA-C*16:01; DCAF4L2; ENSG00000176566; CTA
VAAVGQDCY

SEQ ID NO: 21169 - protein, 9 aa, Homo sapiens
  misc_feature: Table A; Target 21169; HLA-C*16:04; DCAF4L2; ENSG00000176566; CTA
VAAVGQDCY

SEQ ID NO: 21170 - protein, 10 aa, Homo sapiens
  misc_feature: Table A; Target 21170; HLA-C*02:02; DCAF4L2; ENSG00000176566; CTA
VAFSSRLGGF

SEQ ID NO: 21171 - protein, 8 aa, Homo sapiens
  misc_feature: Table A; Target 21171; HLA-A*32:01; DCAF4L2; ENSG00000176566; CTA
VEAGGSKY

SEQ ID NO: 21172 - protein, 8 aa, Homo sapiens
  misc_feature: Table A; Target 21172; HLA-B*15:03; DCAF4L2; ENSG00000176566; CTA
VEAGGSKY

SEQ ID NO: 21173 - protein, 8 aa, Homo sapiens
  misc_feature: Table A; Target 21173; HLA-B*18:01; DCAF4L2; ENSG00000176566; CTA
VEAGGSKY

SEQ ID NO: 21174 - protein, 8 aa, Homo sapiens
  misc_feature: Table A; Target 21174; HLA-B*44:02; DCAF4L2; ENSG00000176566; CTA
VEAGGSKY

SEQ ID NO: 21175 - protein, 8 aa, Homo sapiens
  misc_feature: Table A; Target 21175; HLA-B*44:03; DCAF4L2; ENSG00000176566; CTA
VEAGGSKY

SEQ ID NO: 21176 - protein, 8 aa, Homo sapiens
  misc_feature: Table A; Target 21176; HLA-C*16:02; DCAF4L2; ENSG00000176566; CTA
VEAGGSKY

SEQ ID NO: 21177 - protein, 8 aa, Homo sapiens
  misc_feature: Table A; Target 21177; HLA-C*16:04; DCAF4L2; ENSG00000176566; CTA
VEAGGSKY

SEQ ID NO: 21178 - protein, 10 aa, Homo sapiens
  misc_feature: Table A; Target 21178; HLA-B*44:02; DCAF4L2; ENSG00000176566; CTA
VEAGGSKYGI

SEQ ID NO: 21179 - protein, 10 aa, Homo sapiens
  misc_feature: Table A; Target 21179; HLA-B*44:03; DCAF4L2; ENSG00000176566; CTA
VEAGGSKYGI

SEQ ID NO: 21180 - protein, 10 aa, Homo sapiens
  misc_feature: Table A; Target 21180; HLA-B*49:01; DCAF4L2; ENSG00000176566; CTA
VEAGGSKYGI

SEQ ID NO: 21181 - protein, 8 aa, Homo sapiens
  misc_feature: Table A; Target 21181; HLA-B*46:01; DCAF4L2; ENSG00000176566; CTA
VGLNAPSM

SEQ ID NO: 21182 - protein, 8 aa, Homo sapiens
  misc_feature: Table A; Target 21182; HLA-C*03:04; DCAF4L2; ENSG00000176566; CTA
VGLNAPSM

SEQ ID NO: 21183 - protein, 8 aa, Homo sapiens
  misc_feature: Table A; Target 21183; HLA-C*14:02; DCAF4L2; ENSG00000176566; CTA
VGLNAPSM

SEQ ID NO: 21184 - protein, 8 aa, Homo sapiens
  misc_feature: Table A; Target 21184; HLA-C*16:01; DCAF4L2; ENSG00000176566; CTA
VGLNAPSM

SEQ ID NO: 21185 - protein, 9 aa, Homo sapiens
  misc_feature: Table A; Target 21185; HLA-A*23:01; DCAF4L2; ENSG00000176566; CTA
VGLNAPSML

SEQ ID NO: 21186 - protein, 9 aa, Homo sapiens
  misc_feature: Table A; Target 21186; HLA-C*01:02; DCAF4L2; ENSG00000176566; CTA
VGLNAPSML

SEQ ID NO: 21187 - protein, 9 aa, Homo sapiens
  misc_feature: Table A; Target 21187; HLA-C*03:03; DCAF4L2; ENSG00000176566; CTA
VGLNAPSML

SEQ ID NO: 21188 - protein, 9 aa, Homo sapiens
  misc_feature: Table A; Target 21188; HLA-C*03:04; DCAF4L2; ENSG00000176566; CTA
VGLNAPSML

SEQ ID NO: 21189 - protein, 9 aa, Homo sapiens
  misc_feature: Table A; Target 21189; HLA-C*14:02; DCAF4L2; ENSG00000176566; CTA
VGLNAPSML

SEQ ID NO: 21190 - protein, 9 aa, Homo sapiens
  misc_feature: Table A; Target 21190; HLA-B*38:01; DCAF4L2; ENSG00000176566; CTA
VHVNEEEGV

SEQ ID NO: 21191 - protein, 9 aa, Homo sapiens
  misc_feature: Table A; Target 21191; HLA-B*39:01; DCAF4L2; ENSG00000176566; CTA
VHVNEEEGV

SEQ ID NO: 21192 - protein, 10 aa, Homo sapiens
  misc_feature: Table A; Target 21192; HLA-B*39:01; DCAF4L2; ENSG00000176566; CTA
VHVNEEEGVV

SEQ ID NO: 21193 - protein, 11 aa, Homo sapiens
  misc_feature: Table A; Target 21193; HLA-B*39:01; DCAF4L2; ENSG00000176566; CTA
VHVNEEEGVVA

SEQ ID NO: 21194 - protein, 8 aa, Homo sapiens
  misc_feature: Table A; Target 21194; HLA-B*13:02; DCAF4L2; ENSG00000176566; CTA
VLAQQFAI

SEQ ID NO: 21195 - protein, 8 aa, Homo sapiens
  misc_feature: Table A; Target 21195; HLA-A*23:01; DCAF4L2; ENSG00000176566; CTA
VLLPASLF

SEQ ID NO: 21196 - protein, 9 aa, Homo sapiens
  misc_feature: Table A; Target 21196; HLA-A*02:01; DCAF4L2; ENSG00000176566; CTA
VLLPASLFI

SEQ ID NO: 21197 - protein, 9 aa, Homo sapiens
  misc_feature: Table A; Target 21197; HLA-A*02:04; DCAF4L2; ENSG00000176566; CTA
VLLPASLFI

SEQ ID NO: 21198 - protein, 9 aa, Homo sapiens
  misc_feature: Table A; Target 21198; HLA-A*02:07; DCAF4L2; ENSG00000176566; CTA
VLLPASLFI

SEQ ID NO: 21199 - protein, 9 aa, Homo sapiens
  misc_feature: Table A; Target 21199; HLA-B*13:02; DCAF4L2; ENSG00000176566; CTA
VLLPASLFI

SEQ ID NO: 21200 - protein, 9 aa, Homo sapiens
  misc_feature: Table A; Target 21200; HLA-A*02:01; DCAF4L2; ENSG00000176566; CTA
VLLTNVVTG

SEQ ID NO: 21201 - protein, 11 aa, Homo sapiens
  misc_feature: Table A; Target 21201; HLA-A*30:02; DCAF4L2; ENSG00000176566; CTA
VNQVEAGGSKY

SEQ ID NO: 21202 - protein, 9 aa, Homo sapiens
  misc_feature: Table A; Target 21202; HLA-B*07:02; DCAF4L2; ENSG00000176566; CTA
VPNRKVNSM

SEQ ID NO: 21203 - protein, 9 aa, Homo sapiens
  misc_feature: Table A; Target 21203; HLA-B*35:01; DCAF4L2; ENSG00000176566; CTA
VPNRKVNSM

SEQ ID NO: 21204 - protein, 9 aa, Homo sapiens
  misc_feature: Table A; Target 21204; HLA-B*35:03; DCAF4L2; ENSG00000176566; CTA
VPNRKVNSM

SEQ ID NO: 21205 - protein, 9 aa, Homo sapiens
  misc_feature: Table A; Target 21205; HLA-B*51:01; DCAF4L2; ENSG00000176566; CTA
VPNRKVNSM

SEQ ID NO: 21206 - protein, 9 aa, Homo sapiens
  misc_feature: Table A; Target 21206; HLA-B*55:01; DCAF4L2; ENSG00000176566; CTA
VPNRKVNSM

SEQ ID NO: 21207 - protein, 9 aa, Homo sapiens
  misc_feature: Table A; Target 21207; HLA-B*56:01; DCAF4L2; ENSG00000176566; CTA
VPNRKVNSM

SEQ ID NO: 21208 - protein, 9 aa, Homo sapiens
  misc_feature: Table A; Target 21208; HLA-C*07:02; DCAF4L2; ENSG00000176566; CTA
VPNRKVNSM

SEQ ID NO: 21209 - protein, 9 aa, Homo sapiens
  misc_feature: Table A; Target 21209; HLA-C*14:02; DCAF4L2; ENSG00000176566; CTA
VPNRKVNSM

SEQ ID NO: 21210 - protein, 10 aa, Homo sapiens
  misc_feature: Table A; Target 21210; HLA-B*27:02; DCAF4L2; ENSG00000176566; CTA
VRVGLNAPSM

SEQ ID NO: 21211 - protein, 10 aa, Homo sapiens
  misc_feature: Table A; Target 21211; HLA-C*16:04; DCAF4L2; ENSG00000176566; CTA
VRVGLNAPSM

SEQ ID NO: 21212 - protein, 9 aa, Homo sapiens
  misc_feature: Table A; Target 21212; HLA-B*58:01; DCAF4L2; ENSG00000176566; CTA
VSSDMTGTI

SEQ ID NO: 21213 - protein, 9 aa, Homo sapiens
  misc_feature: Table A; Target 21213; HLA-C*05:01; DCAF4L2; ENSG00000176566; CTA
VSSDMTGTI

SEQ ID NO: 21214 - protein, 10 aa, Homo sapiens
  misc_feature: Table A; Target 21214; HLA-A*03:01; DCAF4L2; ENSG00000176566; CTA
VSSDMTGTIK

SEQ ID NO: 21215 - protein, 10 aa, Homo sapiens
  misc_feature: Table A; Target 21215; HLA-A*03:02; DCAF4L2; ENSG00000176566; CTA
VSSDMTGTIK

SEQ ID NO: 21216 - protein, 10 aa, Homo sapiens
  misc_feature: Table A; Target 21216; HLA-A*11:01; DCAF4L2; ENSG00000176566; CTA
VSSDMTGTIK

SEQ ID NO: 21217 - protein, 8 aa, Homo sapiens
  misc_feature: Table A; Target 21217; HLA-A*32:01; DCAF4L2; ENSG00000176566; CTA
VTGHQQSF

SEQ ID NO: 21218 - protein, 8 aa, Homo sapiens
  misc_feature: Table A; Target 21218; HLA-B*58:01; DCAF4L2; ENSG00000176566; CTA
VTGHQQSF

SEQ ID NO: 21219 - protein, 10 aa, Homo sapiens
  misc_feature: Table A; Target 21219; HLA-A*01:01; DCAF4L2; ENSG00000176566; CTA
VVAAVGQDCY

SEQ ID NO: 21220 - protein, 10 aa, Homo sapiens
  misc_feature: Table A; Target 21220; HLA-A*26:01; DCAF4L2; ENSG00000176566; CTA
VVAAVGQDCY

SEQ ID NO: 21221 - protein, 10 aa, Homo sapiens
  misc_feature: Table A; Target 21221; HLA-A*29:02; DCAF4L2; ENSG00000176566; CTA
VVAAVGQDCY

SEQ ID NO: 21222 - protein, 10 aa, Homo sapiens
  misc_feature: Table A; Target 21222; HLA-A*30:02; DCAF4L2; ENSG00000176566; CTA
VVAAVGQDCY

SEQ ID NO: 21223 - protein, 10 aa, Homo sapiens
  misc_feature: Table A; Target 21223; HLA-A*32:01; DCAF4L2; ENSG00000176566; CTA
VVAAVGQDCY

SEQ ID NO: 21224 - protein, 10 aa, Homo sapiens
  misc_feature: Table A; Target 21224; HLA-B*15:01; DCAF4L2; ENSG00000176566; CTA
VVAAVGQDCY

SEQ ID NO: 21225 - protein, 10 aa, Homo sapiens
  misc_feature: Table A; Target 21225; HLA-B*15:03; DCAF4L2; ENSG00000176566; CTA
VVAAVGQDCY

SEQ ID NO: 21226 - protein, 10 aa, Homo sapiens
  misc_feature: Table A; Target 21226; HLA-B*58:01; DCAF4L2; ENSG00000176566; CTA
VVAAVGQDCY

SEQ ID NO: 21227 - protein, 9 aa, Homo sapiens
  misc_feature: Table A; Target 21227; HLA-A*23:01; DCAF4L2; ENSG00000176566; CTA
VVTGHQQSF

SEQ ID NO: 21228 - protein, 9 aa, Homo sapiens
  misc_feature: Table A; Target 21228; HLA-A*24:02; DCAF4L2; ENSG00000176566; CTA
VVTGHQQSF

SEQ ID NO: 21229 - protein, 9 aa, Homo sapiens
  misc_feature: Table A; Target 21229; HLA-A*25:01; DCAF4L2; ENSG00000176566; CTA
VVTGHQQSF

SEQ ID NO: 21230 - protein, 9 aa, Homo sapiens
  misc_feature: Table A; Target 21230; HLA-A*26:01; DCAF4L2; ENSG00000176566; CTA
VVTGHQQSF

SEQ ID NO: 21231 - protein, 9 aa, Homo sapiens
  misc_feature: Table A; Target 21231; HLA-A*29:02; DCAF4L2; ENSG00000176566; CTA
VVTGHQQSF

SEQ ID NO: 21232 - protein, 9 aa, Homo sapiens
  misc_feature: Table A; Target 21232; HLA-A*30:02; DCAF4L2; ENSG00000176566; CTA
VVTGHQQSF

SEQ ID NO: 21233 - protein, 9 aa, Homo sapiens
  misc_feature: Table A; Target 21233; HLA-A*32:01; DCAF4L2; ENSG00000176566; CTA
VVTGHQQSF

SEQ ID NO: 21234 - protein, 9 aa, Homo sapiens
  misc_feature: Table A; Target 21234; HLA-A*33:03; DCAF4L2; ENSG00000176566; CTA
VVTGHQQSF

SEQ ID NO: 21235 - protein, 9 aa, Homo sapiens
  misc_feature: Table A; Target 21235; HLA-B*07:02; DCAF4L2; ENSG00000176566; CTA
VVTGHQQSF

SEQ ID NO: 21236 - protein, 9 aa, Homo sapiens
  misc_feature: Table A; Target 21236; HLA-B*13:02; DCAF4L2; ENSG00000176566; CTA
VVTGHQQSF

SEQ ID NO: 21237 - protein, 9 aa, Homo sapiens
  misc_feature: Table A; Target 21237; HLA-B*15:01; DCAF4L2; ENSG00000176566; CTA
VVTGHQQSF

SEQ ID NO: 21238 - protein, 9 aa, Homo sapiens
  misc_feature: Table A; Target 21238; HLA-B*15:03; DCAF4L2; ENSG00000176566; CTA
VVTGHQQSF

SEQ ID NO: 21239 - protein, 9 aa, Homo sapiens
  misc_feature: Table A; Target 21239; HLA-B*35:01; DCAF4L2; ENSG00000176566; CTA
VVTGHQQSF

SEQ ID NO: 21240 - protein, 9 aa, Homo sapiens
  misc_feature: Table A; Target 21240; HLA-B*37:01; DCAF4L2; ENSG00000176566; CTA
VVTGHQQSF

SEQ ID NO: 21241 - protein, 9 aa, Homo sapiens
  misc_feature: Table A; Target 21241; HLA-B*44:03; DCAF4L2; ENSG00000176566; CTA
VVTGHQQSF

SEQ ID NO: 21242 - protein, 9 aa, Homo sapiens
  misc_feature: Table A; Target 21242; HLA-B*46:01; DCAF4L2; ENSG00000176566; CTA
VVTGHQQSF

SEQ ID NO: 21243 - protein, 9 aa, Homo sapiens
  misc_feature: Table A; Target 21243; HLA-B*57:01; DCAF4L2; ENSG00000176566; CTA
VVTGHQQSF

SEQ ID NO: 21244 - protein, 9 aa, Homo sapiens
  misc_feature: Table A; Target 21244; HLA-B*58:01; DCAF4L2; ENSG00000176566; CTA
VVTGHQQSF

SEQ ID NO: 21245 - protein, 9 aa, Homo sapiens
  misc_feature: Table A; Target 21245; HLA-C*01:02; DCAF4L2; ENSG00000176566; CTA
VVTGHQQSF

SEQ ID NO: 21246 - protein, 9 aa, Homo sapiens
  misc_feature: Table A; Target 21246; HLA-C*02:02; DCAF4L2; ENSG00000176566; CTA
VVTGHQQSF

SEQ ID NO: 21247 - protein, 9 aa, Homo sapiens
  misc_feature: Table A; Target 21247; HLA-C*03:03; DCAF4L2; ENSG00000176566; CTA
VVTGHQQSF

SEQ ID NO: 21248 - protein, 9 aa, Homo sapiens
  misc_feature: Table A; Target 21248; HLA-C*03:04; DCAF4L2; ENSG00000176566; CTA
VVTGHQQSF

SEQ ID NO: 21249 - protein, 9 aa, Homo sapiens
  misc_feature: Table A; Target 21249; HLA-C*04:01; DCAF4L2; ENSG00000176566; CTA
VVTGHQQSF

SEQ ID NO: 21250 - protein, 9 aa, Homo sapiens
  misc_feature: Table A; Target 21250; HLA-C*07:02; DCAF4L2; ENSG00000176566; CTA
VVTGHQQSF

SEQ ID NO: 21251 - protein, 9 aa, Homo sapiens
  misc_feature: Table A; Target 21251; HLA-C*07:04; DCAF4L2; ENSG00000176566; CTA
VVTGHQQSF

SEQ ID NO: 21252 - protein, 9 aa, Homo sapiens
  misc_feature: Table A; Target 21252; HLA-C*12:03; DCAF4L2; ENSG00000176566; CTA
VVTGHQQSF

SEQ ID NO: 21253 - protein, 9 aa, Homo sapiens
  misc_feature: Table A; Target 21253; HLA-C*14:02; DCAF4L2; ENSG00000176566; CTA
VVTGHQQSF

SEQ ID NO: 21254 - protein, 9 aa, Homo sapiens
  misc_feature: Table A; Target 21254; HLA-C*16:01; DCAF4L2; ENSG00000176566; CTA
VVTGHQQSF

SEQ ID NO: 21255 - protein, 9 aa, Homo sapiens
  misc_feature: Table A; Target 21255; HLA-C*16:02; DCAF4L2; ENSG00000176566; CTA
VVTGHQQSF

SEQ ID NO: 21256 - protein, 9 aa, Homo sapiens
  misc_feature: Table A; Target 21256; HLA-C*16:04; DCAF4L2; ENSG00000176566; CTA
VVTGHQQSF

SEQ ID NO: 21257 - protein, 9 aa, Homo sapiens
  misc_feature: Table A; Target 21257; HLA-A*24:02; DCAF4L2; ENSG00000176566; CTA
VYPHKTLYV

SEQ ID NO: 21258 - protein, 8 aa, Homo sapiens
  misc_feature: Table A; Target 21258; HLA-A*30:02; DCAF4L2; ENSG00000176566; CTA
WSLSIHAY

SEQ ID NO: 21259 - protein, 9 aa, Homo sapiens
  misc_feature: Table A; Target 21259; HLA-A*30:01; DCAF4L2; ENSG00000176566; CTA
YEGHVNNSA

SEQ ID NO: 21260 - protein, 9 aa, Homo sapiens
  misc_feature: Table A; Target 21260; HLA-B*18:01; DCAF4L2; ENSG00000176566; CTA
YEGHVNNSA

SEQ ID NO: 21261 - protein, 9 aa, Homo sapiens
  misc_feature: Table A; Target 21261; HLA-B*40:01; DCAF4L2; ENSG00000176566; CTA
YEGHVNNSA

SEQ ID NO: 21262 - protein, 9 aa, Homo sapiens
  misc_feature: Table A; Target 21262; HLA-B*40:02; DCAF4L2; ENSG00000176566; CTA
YEGHVNNSA

SEQ ID NO: 21263 - protein, 9 aa, Homo sapiens
  misc_feature: Table A; Target 21263; HLA-B*49:01; DCAF4L2; ENSG00000176566; CTA
YEGHVNNSA

SEQ ID NO: 21264 - protein, 9 aa, Homo sapiens
  misc_feature: Table A; Target 21264; HLA-B*54:01; DCAF4L2; ENSG00000176566; CTA
YEGHVNNSA

SEQ ID NO: 21265 - protein, 10 aa, Homo sapiens
  misc_feature: Table A; Target 21265; HLA-A*30:02; DCAF4L2; ENSG00000176566; CTA
YEGHVNNSAY

SEQ ID NO: 21266 - protein, 10 aa, Homo sapiens
  misc_feature: Table A; Target 21266; HLA-B*18:01; DCAF4L2; ENSG00000176566; CTA
YEGHVNNSAY

SEQ ID NO: 21267 - protein, 10 aa, Homo sapiens
  misc_feature: Table A; Target 21267; HLA-B*44:02; DCAF4L2; ENSG00000176566; CTA
YEGHVNNSAY

SEQ ID NO: 21268 - protein, 10 aa, Homo sapiens
  misc_feature: Table A; Target 21268; HLA-B*44:03; DCAF4L2; ENSG00000176566; CTA
YEGHVNNSAY

SEQ ID NO: 21269 - protein, 10 aa, Homo sapiens
  misc_feature: Table A; Target 21269; HLA-C*16:04; DCAF4L2; ENSG00000176566; CTA
YEGHVNNSAY

SEQ ID NO: 21270 - protein, 8 aa, Homo sapiens
  misc_feature: Table A; Target 21270; HLA-B*38:01; DCAF4L2; ENSG00000176566; CTA
YHSFSTGL

SEQ ID NO: 21271 - protein, 8 aa, Homo sapiens
  misc_feature: Table A; Target 21271; HLA-B*39:01; DCAF4L2; ENSG00000176566; CTA
YHSFSTGL

SEQ ID NO: 21272 - protein, 8 aa, Homo sapiens
  misc_feature: Table A; Target 21272; HLA-C*07:04; DCAF4L2; ENSG00000176566; CTA
YHSFSTGL

SEQ ID NO: 21273 - protein, 11 aa, Homo sapiens
  misc_feature: Table A; Target 21273; HLA-B*35:03; DCAF4L2; ENSG00000176566; CTA
YPASENDIPSV

SEQ ID NO: 21274 - protein, 11 aa, Homo sapiens
  misc_feature: Table A; Target 21274; HLA-B*54:01; DCAF4L2; ENSG00000176566; CTA
YPASENDIPSV

SEQ ID NO: 21275 - protein, 11 aa, Homo sapiens
  misc_feature: Table A; Target 21275; HLA-B*55:01; DCAF4L2; ENSG00000176566; CTA
YPASENDIPSV

SEQ ID NO: 21276 - protein, 11 aa, Homo sapiens
  misc_feature: Table A; Target 21276; HLA-B*56:01; DCAF4L2; ENSG00000176566; CTA
YPASENDIPSV

SEQ ID NO: 21277 - protein, 8 aa, Homo sapiens
  misc_feature: Table A; Target 21277; HLA-B*51:01; DCAF4L2; ENSG00000176566; CTA
YPHKTLYV

SEQ ID NO: 21278 - protein, 8 aa, Homo sapiens
  misc_feature: Table A; Target 21278; HLA-B*54:01; DCAF4L2; ENSG00000176566; CTA
YPHKTLYV

SEQ ID NO: 21279 - protein, 9 aa, Homo sapiens
  misc_feature: Table A; Target 21279; HLA-B*54:01; DCAF4L2; ENSG00000176566; CTA
YPHKTLYVP

SEQ ID NO: 21280 - protein, 10 aa, Homo sapiens
  misc_feature: Table A; Target 21280; HLA-A*25:01; DCAF4L2; ENSG00000176566; CTA
YVPNRKVNSM

SEQ ID NO: 21281 - protein, 10 aa, Homo sapiens
  misc_feature: Table A; Target 21281; HLA-A*26:01; DCAF4L2; ENSG00000176566; CTA
YVPNRKVNSM

SEQ ID NO: 21282 - protein, 10 aa, Homo sapiens
  misc_feature: Table A; Target 21282; HLA-B*08:01; DCAF4L2; ENSG00000176566; CTA
YVPNRKVNSM

SEQ ID NO: 21283 - protein, 9 aa, Homo sapiens
  misc_feature: Table A; Target 21283; HLA-A*23:01; DEFB126; ENSG00000125788; CTA
APTPVSPTG

SEQ ID NO: 21284 - protein, 9 aa, Homo sapiens
  misc_feature: Table A; Target 21284; HLA-A*24:02; DEFB126; ENSG00000125788; CTA
APTPVSPTG

SEQ ID NO: 21285 - protein, 9 aa, Homo sapiens
  misc_feature: Table A; Target 21285; HLA-A*30:01; DEFB126; ENSG00000125788; CTA
APTPVSPTG

SEQ ID NO: 21286 - protein, 9 aa, Homo sapiens
  misc_feature: Table A; Target 21286; HLA-A*32:01; DEFB126; ENSG00000125788; CTA
APTPVSPTG

SEQ ID NO: 21287 - protein, 9 aa, Homo sapiens
  misc_feature: Table A; Target 21287; HLA-A*68:01; DEFB126; ENSG00000125788; CTA
APTPVSPTG

SEQ ID NO: 21288 - protein, 9 aa, Homo sapiens
  misc_feature: Table A; Target 21288; HLA-A*68:02; DEFB126; ENSG00000125788; CTA
APTPVSPTG

SEQ ID NO: 21289 - protein, 9 aa, Homo sapiens
  misc_feature: Table A; Target 21289; HLA-B*07:02; DEFB126; ENSG00000125788; CTA
APTPVSPTG

SEQ ID NO: 21290 - protein, 9 aa, Homo sapiens
  misc_feature: Table A; Target 21290; HLA-B*13:02; DEFB126; ENSG00000125788; CTA
APTPVSPTG

SEQ ID NO: 21291 - protein, 9 aa, Homo sapiens
  misc_feature: Table A; Target 21291; HLA-B*27:05; DEFB126; ENSG00000125788; CTA
APTPVSPTG

SEQ ID NO: 21292 - protein, 9 aa, Homo sapiens
  misc_feature: Table A; Target 21292; HLA-B*35:01; DEFB126; ENSG00000125788; CTA
APTPVSPTG

SEQ ID NO: 21293 - protein, 9 aa, Homo sapiens
  misc_feature: Table A; Target 21293; HLA-B*35:03; DEFB126; ENSG00000125788; CTA
APTPVSPTG

SEQ ID NO: 21294 - protein, 9 aa, Homo sapiens
  misc_feature: Table A; Target 21294; HLA-B*40:02; DEFB126; ENSG00000125788; CTA
APTPVSPTG

SEQ ID NO: 21295 - protein, 9 aa, Homo sapiens
  misc_feature: Table A; Target 21295; HLA-B*51:01; DEFB126; ENSG00000125788; CTA
APTPVSPTG

SEQ ID NO: 21296 - protein, 9 aa, Homo sapiens
  misc_feature: Table A; Target 21296; HLA-B*54:01; DEFB126; ENSG00000125788; CTA
APTPVSPTG

SEQ ID NO: 21297 - protein, 9 aa, Homo sapiens
  misc_feature: Table A; Target 21297; HLA-B*55:01; DEFB126; ENSG00000125788; CTA
APTPVSPTG

SEQ ID NO: 21298 - protein, 9 aa, Homo sapiens
  misc_feature: Table A; Target 21298; HLA-B*56:01; DEFB126; ENSG00000125788; CTA
APTPVSPTG

SEQ ID NO: 21299 - protein, 9 aa, Homo sapiens
  misc_feature: Table A; Target 21299; HLA-B*57:01; DEFB126; ENSG00000125788; CTA
APTPVSPTG

SEQ ID NO: 21300 - protein, 9 aa, Homo sapiens
  misc_feature: Table A; Target 21300; HLA-B*58:01; DEFB126; ENSG00000125788; CTA
APTPVSPTG

SEQ ID NO: 21301 - protein, 9 aa, Homo sapiens
  misc_feature: Table A; Target 21301; HLA-C*03:03; DEFB126; ENSG00000125788; CTA
APTPVSPTG

SEQ ID NO: 21302 - protein, 9 aa, Homo sapiens
  misc_feature: Table A; Target 21302; HLA-C*04:01; DEFB126; ENSG00000125788; CTA
APTPVSPTG

SEQ ID NO: 21303 - protein, 9 aa, Homo sapiens
  misc_feature: Table A; Target 21303; HLA-C*06:02; DEFB126; ENSG00000125788; CTA
APTPVSPTG

SEQ ID NO: 21304 - protein, 9 aa, Homo sapiens
  misc_feature: Table A; Target 21304; HLA-C*07:01; DEFB126; ENSG00000125788; CTA
APTPVSPTG

SEQ ID NO: 21305 - protein, 9 aa, Homo sapiens
  misc_feature: Table A; Target 21305; HLA-C*07:02; DEFB126; ENSG00000125788; CTA
APTPVSPTG

SEQ ID NO: 21306 - protein, 9 aa, Homo sapiens
  misc_feature: Table A; Target 21306; HLA-C*12:03; DEFB126; ENSG00000125788; CTA
APTPVSPTG

SEQ ID NO: 21307 - protein, 9 aa, Homo sapiens
  misc_feature: Table A; Target 21307; HLA-C*16:01; DEFB126; ENSG00000125788; CTA
APTPVSPTG

SEQ ID NO: 21308 - protein, 9 aa, Homo sapiens
  misc_feature: Table A; Target 21308; HLA-C*16:02; DEFB126; ENSG00000125788; CTA
APTPVSPTG

SEQ ID NO: 21309 - protein, 8 aa, Homo sapiens
  misc_feature: Table A; Target 21309; HLA-A*32:01; DEFB126; ENSG00000125788; CTA
AQLVSGNW

SEQ ID NO: 21310 - protein, 9 aa, Homo sapiens
  misc_feature: Table A; Target 21310; HLA-A*30:02; DEFB126; ENSG00000125788; CTA
AQLVSGNWY

SEQ ID NO: 21311 - protein, 9 aa, Homo sapiens
  misc_feature: Table A; Target 21311; HLA-B*15:01; DEFB126; ENSG00000125788; CTA
AQLVSGNWY

SEQ ID NO: 21312 - protein, 9 aa, Homo sapiens
  misc_feature: Table A; Target 21312; HLA-B*15:03; DEFB126; ENSG00000125788; CTA
AQLVSGNWY

SEQ ID NO: 21313 - protein, 10 aa, Homo sapiens
  misc_feature: Table A; Target 21313; HLA-A*02:01; DEFB126; ENSG00000125788; CTA
AQLVSGNWYV

SEQ ID NO: 21314 - protein, 8 aa, Homo sapiens
  misc_feature: Table A; Target 21314; HLA-B*58:01; DEFB126; ENSG00000125788; CTA
ATTATTTL

SEQ ID NO: 21315 - protein, 8 aa, Homo sapiens
  misc_feature: Table A; Target 21315; HLA-C*03:04; DEFB126; ENSG00000125788; CTA
ATTATTTL

SEQ ID NO: 21316 - protein, 9 aa, Homo sapiens
  misc_feature: Table A; Target 21316; HLA-A*01:01; DEFB126; ENSG00000125788; CTA
ATTATTTLM

SEQ ID NO: 21317 - protein, 9 aa, Homo sapiens
  misc_feature: Table A; Target 21317; HLA-A*26:01; DEFB126; ENSG00000125788; CTA
ATTATTTLM

SEQ ID NO: 21318 - protein, 9 aa, Homo sapiens
  misc_feature: Table A; Target 21318; HLA-A*29:02; DEFB126; ENSG00000125788; CTA
ATTATTTLM

SEQ ID NO: 21319 - protein, 9 aa, Homo sapiens
  misc_feature: Table A; Target 21319; HLA-A*32:01; DEFB126; ENSG00000125788; CTA
ATTATTTLM

SEQ ID NO: 21320 - protein, 9 aa, Homo sapiens
  misc_feature: Table A; Target 21320; HLA-B*58:01; DEFB126; ENSG00000125788; CTA
ATTATTTLM

SEQ ID NO: 21321 - protein, 9 aa, Homo sapiens
  misc_feature: Table A; Target 21321; HLA-C*02:02; DEFB126; ENSG00000125788; CTA
ATTATTTLM

SEQ ID NO: 21322 - protein, 9 aa, Homo sapiens
  misc_feature: Table A; Target 21322; HLA-C*14:02; DEFB126; ENSG00000125788; CTA
ATTATTTLM

SEQ ID NO: 21323 - protein, 9 aa, Homo sapiens
  misc_feature: Table A; Target 21323; HLA-C*16:02; DEFB126; ENSG00000125788; CTA
ATTATTTLM

SEQ ID NO: 21324 - protein, 9 aa, Homo sapiens
  misc_feature: Table A; Target 21324; HLA-A*02:04; DEFB126; ENSG00000125788; CTA
AVFMLLAQL

SEQ ID NO: 21325 - protein, 9 aa, Homo sapiens
  misc_feature: Table A; Target 21325; HLA-A*03:01; DEFB126; ENSG00000125788; CTA
CLNDVGICK

SEQ ID NO: 21326 - protein, 9 aa, Homo sapiens
  misc_feature: Table A; Target 21326; HLA-A*03:02; DEFB126; ENSG00000125788; CTA
CLNDVGICK

SEQ ID NO: 21327 - protein, 9 aa, Homo sapiens
  misc_feature: Table A; Target 21327; HLA-A*11:01; DEFB126; ENSG00000125788; CTA
CLNDVGICK

SEQ ID NO: 21328 - protein, 10 aa, Homo sapiens
  misc_feature: Table A; Target 21328; HLA-A*03:01; DEFB126; ENSG00000125788; CTA
CLNDVGICKK

SEQ ID NO: 21329 - protein, 10 aa, Homo sapiens
  misc_feature: Table A; Target 21329; HLA-A*03:02; DEFB126; ENSG00000125788; CTA
CLNDVGICKK

SEQ ID NO: 21330 - protein, 10 aa, Homo sapiens
  misc_feature: Table A; Target 21330; HLA-A*11:01; DEFB126; ENSG00000125788; CTA
CLNDVGICKK

SEQ ID NO: 21331 - protein, 9 aa, Homo sapiens
  misc_feature: Table A; Target 21331; HLA-B*18:01; DEFB126; ENSG00000125788; CTA
EEMHVKNGW

SEQ ID NO: 21332 - protein, 9 aa, Homo sapiens
  misc_feature: Table A; Target 21332; HLA-B*27:02; DEFB126; ENSG00000125788; CTA
EEMHVKNGW

SEQ ID NO: 21333 - protein, 9 aa, Homo sapiens
  misc_feature: Table A; Target 21333; HLA-B*44:02; DEFB126; ENSG00000125788; CTA
EEMHVKNGW

SEQ ID NO: 21334 - protein, 9 aa, Homo sapiens
  misc_feature: Table A; Target 21334; HLA-B*44:03; DEFB126; ENSG00000125788; CTA
EEMHVKNGW

SEQ ID NO: 21335 - protein, 9 aa, Homo sapiens
  misc_feature: Table A; Target 21335; HLA-C*16:04; DEFB126; ENSG00000125788; CTA
EEMHVKNGW

SEQ ID NO: 21336 - protein, 9 aa, Homo sapiens
  misc_feature: Table A; Target 21336; HLA-A*02:01; DEFB126; ENSG00000125788; CTA
FTLAVFMLL

SEQ ID NO: 21337 - protein, 9 aa, Homo sapiens
  misc_feature: Table A; Target 21337; HLA-A*02:07; DEFB126; ENSG00000125788; CTA
FTLAVFMLL

SEQ ID NO: 21338 - protein, 9 aa, Homo sapiens
  misc_feature: Table A; Target 21338; HLA-A*29:02; DEFB126; ENSG00000125788; CTA
FTLAVFMLL

SEQ ID NO: 21339 - protein, 9 aa, Homo sapiens
  misc_feature: Table A; Target 21339; HLA-A*68:02; DEFB126; ENSG00000125788; CTA
FTLAVFMLL

SEQ ID NO: 21340 - protein, 10 aa, Homo sapiens
  misc_feature: Table A; Target 21340; HLA-A*03:01; DEFB126; ENSG00000125788; CTA
KCLNDVGICK

SEQ ID NO: 21341 - protein, 10 aa, Homo sapiens
  misc_feature: Table A; Target 21341; HLA-A*03:02; DEFB126; ENSG00000125788; CTA
KCLNDVGICK

SEQ ID NO: 21342 - protein, 10 aa, Homo sapiens
  misc_feature: Table A; Target 21342; HLA-A*11:01; DEFB126; ENSG00000125788; CTA
KCLNDVGICK

SEQ ID NO: 21343 - protein, 10 aa, Homo sapiens
  misc_feature: Table A; Target 21343; HLA-B*57:01; DEFB126; ENSG00000125788; CTA
KSLLFTLAVF

SEQ ID NO: 21344 - protein, 9 aa, Homo sapiens
  misc_feature: Table A; Target 21344; HLA-A*32:01; DEFB126; ENSG00000125788; CTA
KTTRISTVT

SEQ ID NO: 21345 - protein, 9 aa, Homo sapiens
  misc_feature: Table A; Target 21345; HLA-B*58:01; DEFB126; ENSG00000125788; CTA
KTTRISTVT

SEQ ID NO: 21346 - protein, 9 aa, Homo sapiens
  misc_feature: Table A; Target 21346; HLA-B*57:01; DEFB126; ENSG00000125788; CTA
LAQLVSGNW

SEQ ID NO: 21347 - protein, 9 aa, Homo sapiens
  misc_feature: Table A; Target 21347; HLA-B*58:01; DEFB126; ENSG00000125788; CTA
LAQLVSGNW

SEQ ID NO: 21348 - protein, 10 aa, Homo sapiens
  misc_feature: Table A; Target 21348; HLA-A*02:04; DEFB126; ENSG00000125788; CTA
LLFTLAVFML

SEQ ID NO: 21349 - protein, 8 aa, Homo sapiens
  misc_feature: Table A; Target 21349; HLA-B*08:01; DEFB126; ENSG00000125788; CTA
LMMTTASM

SEQ ID NO: 21350 - protein, 8 aa, Homo sapiens
  misc_feature: Table A; Target 21350; HLA-B*46:01; DEFB126; ENSG00000125788; CTA
LMMTTASM

SEQ ID NO: 21351 - protein, 8 aa, Homo sapiens
  misc_feature: Table A; Target 21351; HLA-C*14:02; DEFB126; ENSG00000125788; CTA
LMMTTASM

SEQ ID NO: 21352 - protein, 10 aa, Homo sapiens
  misc_feature: Table A; Target 21352; HLA-B*54:01; DEFB126; ENSG00000125788; CTA
MAPTPVSPTG

SEQ ID NO: 21353 - protein, 10 aa, Homo sapiens
  misc_feature: Table A; Target 21353; HLA-C*07:01; DEFB126; ENSG00000125788; CTA
MAPTPVSPTG

SEQ ID NO: 21354 - protein, 10 aa, Homo sapiens
  misc_feature: Table A; Target 21354; HLA-C*07:02; DEFB126; ENSG00000125788; CTA
MAPTPVSPTG

SEQ ID NO: 21355 - protein, 10 aa, Homo sapiens
  misc_feature: Table A; Target 21355; HLA-C*04:01; DEFB126; ENSG00000125788; CTA
MMTTASMSSM

SEQ ID NO: 21356 - protein, 10 aa, Homo sapiens
  misc_feature: Table A; Target 21356; HLA-C*14:02; DEFB126; ENSG00000125788; CTA
MMTTASMSSM

SEQ ID NO: 21357 - protein, 9 aa, Homo sapiens
  misc_feature: Table A; Target 21357; HLA-C*06:02; DEFB126; ENSG00000125788; CTA
MSSMAPTPV

SEQ ID NO: 21358 - protein, 9 aa, Homo sapiens
  misc_feature: Table A; Target 21358; HLA-A*25:01; DEFB126; ENSG00000125788; CTA
MTTASMSSM

SEQ ID NO: 21359 - protein, 9 aa, Homo sapiens
  misc_feature: Table A; Target 21359; HLA-A*26:01; DEFB126; ENSG00000125788; CTA
MTTASMSSM

SEQ ID NO: 21360 - protein, 9 aa, Homo sapiens
  misc_feature: Table A; Target 21360; HLA-B*35:01; DEFB126; ENSG00000125788; CTA
MTTASMSSM

SEQ ID NO: 21361 - protein, 9 aa, Homo sapiens
  misc_feature: Table A; Target 21361; HLA-B*35:03; DEFB126; ENSG00000125788; CTA
MTTASMSSM

SEQ ID NO: 21362 - protein, 9 aa, Homo sapiens
  misc_feature: Table A; Target 21362; HLA-B*46:01; DEFB126; ENSG00000125788; CTA
MTTASMSSM

SEQ ID NO: 21363 - protein, 9 aa, Homo sapiens
  misc_feature: Table A; Target 21363; HLA-C*01:02; DEFB126; ENSG00000125788; CTA
MTTASMSSM

SEQ ID NO: 21364 - protein, 9 aa, Homo sapiens
  misc_feature: Table A; Target 21364; HLA-C*03:03; DEFB126; ENSG00000125788; CTA
MTTASMSSM

SEQ ID NO: 21365 - protein, 9 aa, Homo sapiens
  misc_feature: Table A; Target 21365; HLA-C*03:04; DEFB126; ENSG00000125788; CTA
MTTASMSSM

SEQ ID NO: 21366 - protein, 9 aa, Homo sapiens
  misc_feature: Table A; Target 21366; HLA-C*04:01; DEFB126; ENSG00000125788; CTA
MTTASMSSM

SEQ ID NO: 21367 - protein, 9 aa, Homo sapiens
  misc_feature: Table A; Target 21367; HLA-C*07:04; DEFB126; ENSG00000125788; CTA
MTTASMSSM

SEQ ID NO: 21368 - protein, 9 aa, Homo sapiens
  misc_feature: Table A; Target 21368; HLA-C*14:02; DEFB126; ENSG00000125788; CTA
MTTASMSSM

SEQ ID NO: 21369 - protein, 9 aa, Homo sapiens
  misc_feature: Table A; Target 21369; HLA-C*16:02; DEFB126; ENSG00000125788; CTA
MTTASMSSM

SEQ ID NO: 21370 - protein, 8 aa, Homo sapiens
  misc_feature: Table A; Target 21370; HLA-C*07:01; DEFB126; ENSG00000125788; CTA
NDVGICKK

SEQ ID NO: 21371 - protein, 8 aa, Homo sapiens
  misc_feature: Table A; Target 21371; HLA-B*07:02; DEFB126; ENSG00000125788; CTA
PTPVSPTG

SEQ ID NO: 21372 - protein, 8 aa, Homo sapiens
  misc_feature: Table A; Target 21372; HLA-C*07:02; DEFB126; ENSG00000125788; CTA
PTPVSPTG

SEQ ID NO: 21373 - protein, 8 aa, Homo sapiens
  misc_feature: Table A; Target 21373; HLA-C*07:01; DEFB126; ENSG00000125788; CTA
PVFCVQTK

SEQ ID NO: 21374 - protein, 9 aa, Homo sapiens
  misc_feature: Table A; Target 21374; HLA-A*02:01; DEFB126; ENSG00000125788; CTA
QLVSGNWYV

SEQ ID NO: 21375 - protein, 9 aa, Homo sapiens
  misc_feature: Table A; Target 21375; HLA-A*02:04; DEFB126; ENSG00000125788; CTA
QLVSGNWYV

SEQ ID NO: 21376 - protein, 9 aa, Homo sapiens
  misc_feature: Table A; Target 21376; HLA-B*13:02; DEFB126; ENSG00000125788; CTA
QLVSGNWYV

SEQ ID NO: 21377 - protein, 9 aa, Homo sapiens
  misc_feature: Table A; Target 21377; HLA-A*32:01; DEFB126; ENSG00000125788; CTA
QTKTTRIST

SEQ ID NO: 21378 - protein, 9 aa, Homo sapiens
  misc_feature: Table A; Target 21378; HLA-A*32:01; DEFB126; ENSG00000125788; CTA
RISTVTATT

SEQ ID NO: 21379 - protein, 10 aa, Homo sapiens
  misc_feature: Table A; Target 21379; HLA-A*32:01; DEFB126; ENSG00000125788; CTA
RISTVTATTA

SEQ ID NO: 21380 - protein, 9 aa, Homo sapiens
  misc_feature: Table A; Target 21380; HLA-A*02:04; DEFB126; ENSG00000125788; CTA
SLLFTLAVF

SEQ ID NO: 21381 - protein, 9 aa, Homo sapiens
  misc_feature: Table A; Target 21381; HLA-A*02:01; DEFB126; ENSG00000125788; CTA
SMAPTPVSP

SEQ ID NO: 21382 - protein, 9 aa, Homo sapiens
  misc_feature: Table A; Target 21382; HLA-A*02:03; DEFB126; ENSG00000125788; CTA
SMAPTPVSP

SEQ ID NO: 21383 - protein, 9 aa, Homo sapiens
  misc_feature: Table A; Target 21383; HLA-A*03:01; DEFB126; ENSG00000125788; CTA
SMAPTPVSP

SEQ ID NO: 21384 - protein, 9 aa, Homo sapiens
  misc_feature: Table A; Target 21384; HLA-A*32:01; DEFB126; ENSG00000125788; CTA
SMAPTPVSP

SEQ ID NO: 21385 - protein, 9 aa, Homo sapiens
  misc_feature: Table A; Target 21385; HLA-C*07:04; DEFB126; ENSG00000125788; CTA
SMAPTPVSP

SEQ ID NO: 21386 - protein, 10 aa, Homo sapiens
  misc_feature: Table A; Target 21386; HLA-C*04:01; DEFB126; ENSG00000125788; CTA
SMAPTPVSPT

SEQ ID NO: 21387 - protein, 11 aa, Homo sapiens
  misc_feature: Table A; Target 21387; HLA-A*02:01; DEFB126; ENSG00000125788; CTA
SMAPTPVSPTG

SEQ ID NO: 21388 - protein, 11 aa, Homo sapiens
  misc_feature: Table A; Target 21388; HLA-C*04:01; DEFB126; ENSG00000125788; CTA
SMAPTPVSPTG

SEQ ID NO: 21389 - protein, 11 aa, Homo sapiens
  misc_feature: Table A; Target 21389; HLA-C*06:02; DEFB126; ENSG00000125788; CTA
SMAPTPVSPTG

SEQ ID NO: 21390 - protein, 10 aa, Homo sapiens
  misc_feature: Table A; Target 21390; HLA-A*02:01; DEFB126; ENSG00000125788; CTA
SMSSMAPTPV

SEQ ID NO: 21391 - protein, 10 aa, Homo sapiens
  misc_feature: Table A; Target 21391; HLA-A*02:03; DEFB126; ENSG00000125788; CTA
SMSSMAPTPV

SEQ ID NO: 21392 - protein, 9 aa, Homo sapiens
  misc_feature: Table A; Target 21392; HLA-A*23:01; DEFB126; ENSG00000125788; CTA
TATTATTTL

SEQ ID NO: 21393 - protein, 9 aa, Homo sapiens
  misc_feature: Table A; Target 21393; HLA-A*24:02; DEFB126; ENSG00000125788; CTA
TATTATTTL

SEQ ID NO: 21394 - protein, 9 aa, Homo sapiens
  misc_feature: Table A; Target 21394; HLA-A*25:01; DEFB126; ENSG00000125788; CTA
TATTATTTL

SEQ ID NO: 21395 - protein, 9 aa, Homo sapiens
  misc_feature: Table A; Target 21395; HLA-A*30:01; DEFB126; ENSG00000125788; CTA
TATTATTTL

SEQ ID NO: 21396 - protein, 9 aa, Homo sapiens
  misc_feature: Table A; Target 21396; HLA-A*32:01; DEFB126; ENSG00000125788; CTA
TATTATTTL

SEQ ID NO: 21397 - protein, 9 aa, Homo sapiens
  misc_feature: Table A; Target 21397; HLA-B*07:02; DEFB126; ENSG00000125788; CTA
TATTATTTL

SEQ ID NO: 21398 - protein, 9 aa, Homo sapiens
  misc_feature: Table A; Target 21398; HLA-B*15:01; DEFB126; ENSG00000125788; CTA
TATTATTTL

SEQ ID NO: 21399 - protein, 9 aa, Homo sapiens
  misc_feature: Table A; Target 21399; HLA-B*15:03; DEFB126; ENSG00000125788; CTA
TATTATTTL

SEQ ID NO: 21400 - protein, 9 aa, Homo sapiens
  misc_feature: Table A; Target 21400; HLA-B*35:01; DEFB126; ENSG00000125788; CTA
TATTATTTL

SEQ ID NO: 21401 - protein, 9 aa, Homo sapiens
  misc_feature: Table A; Target 21401; HLA-B*35:03; DEFB126; ENSG00000125788; CTA
TATTATTTL

SEQ ID NO: 21402 - protein, 9 aa, Homo sapiens
  misc_feature: Table A; Target 21402; HLA-B*38:01; DEFB126; ENSG00000125788; CTA
TATTATTTL

SEQ ID NO: 21403 - protein, 9 aa, Homo sapiens
  misc_feature: Table A; Target 21403; HLA-B*39:01; DEFB126; ENSG00000125788; CTA
TATTATTTL

SEQ ID NO: 21404 - protein, 9 aa, Homo sapiens
  misc_feature: Table A; Target 21404; HLA-B*40:01; DEFB126; ENSG00000125788; CTA
TATTATTTL

SEQ ID NO: 21405 - protein, 9 aa, Homo sapiens
  misc_feature: Table A; Target 21405; HLA-B*46:01; DEFB126; ENSG00000125788; CTA
TATTATTTL

SEQ ID NO: 21406 - protein, 9 aa, Homo sapiens
  misc_feature: Table A; Target 21406; HLA-B*51:01; DEFB126; ENSG00000125788; CTA
TATTATTTL

SEQ ID NO: 21407 - protein, 9 aa, Homo sapiens
  misc_feature: Table A; Target 21407; HLA-B*55:01; DEFB126; ENSG00000125788; CTA
TATTATTTL

SEQ ID NO: 21408 - protein, 9 aa, Homo sapiens
  misc_feature: Table A; Target 21408; HLA-B*58:01; DEFB126; ENSG00000125788; CTA
TATTATTTL

SEQ ID NO: 21409 - protein, 9 aa, Homo sapiens
  misc_feature: Table A; Target 21409; HLA-C*01:02; DEFB126; ENSG00000125788; CTA
TATTATTTL

SEQ ID NO: 21410 - protein, 9 aa, Homo sapiens
  misc_feature: Table A; Target 21410; HLA-C*02:02; DEFB126; ENSG00000125788; CTA
TATTATTTL

SEQ ID NO: 21411 - protein, 9 aa, Homo sapiens
  misc_feature: Table A; Target 21411; HLA-C*03:03; DEFB126; ENSG00000125788; CTA
TATTATTTL

SEQ ID NO: 21412 - protein, 9 aa, Homo sapiens
  misc_feature: Table A; Target 21412; HLA-C*03:04; DEFB126; ENSG00000125788; CTA
TATTATTTL

SEQ ID NO: 21413 - protein, 9 aa, Homo sapiens
  misc_feature: Table A; Target 21413; HLA-C*05:01; DEFB126; ENSG00000125788; CTA
TATTATTTL

SEQ ID NO: 21414 - protein, 9 aa, Homo sapiens
  misc_feature: Table A; Target 21414; HLA-C*07:02; DEFB126; ENSG00000125788; CTA
TATTATTTL

SEQ ID NO: 21415 - protein, 9 aa, Homo sapiens
  misc_feature: Table A; Target 21415; HLA-C*07:04; DEFB126; ENSG00000125788; CTA
TATTATTTL

SEQ ID NO: 21416 - protein, 9 aa, Homo sapiens
  misc_feature: Table A; Target 21416; HLA-C*07:06; DEFB126; ENSG00000125788; CTA
TATTATTTL

SEQ ID NO: 21417 - protein, 9 aa, Homo sapiens
  misc_feature: Table A; Target 21417; HLA-C*12:03; DEFB126; ENSG00000125788; CTA
TATTATTTL

SEQ ID NO: 21418 - protein, 9 aa, Homo sapiens
  misc_feature: Table A; Target 21418; HLA-C*14:02; DEFB126; ENSG00000125788; CTA
TATTATTTL

SEQ ID NO: 21419 - protein, 9 aa, Homo sapiens
  misc_feature: Table A; Target 21419; HLA-C*16:01; DEFB126; ENSG00000125788; CTA
TATTATTTL

SEQ ID NO: 21420 - protein, 9 aa, Homo sapiens
  misc_feature: Table A; Target 21420; HLA-C*16:02; DEFB126; ENSG00000125788; CTA
TATTATTTL

SEQ ID NO: 21421 - protein, 9 aa, Homo sapiens
  misc_feature: Table A; Target 21421; HLA-C*16:04; DEFB126; ENSG00000125788; CTA
TATTATTTL

SEQ ID NO: 21422 - protein, 10 aa, Homo sapiens
  misc_feature: Table A; Target 21422; HLA-B*35:01; DEFB126; ENSG00000125788; CTA
TATTATTTLM

SEQ ID NO: 21423 - protein, 10 aa, Homo sapiens
  misc_feature: Table A; Target 21423; HLA-C*07:06; DEFB126; ENSG00000125788; CTA
TATTATTTLM

SEQ ID NO: 21424 - protein, 11 aa, Homo sapiens
  misc_feature: Table A; Target 21424; HLA-C*04:01; DEFB126; ENSG00000125788; CTA
TATTATTTLMM

SEQ ID NO: 21425 - protein, 8 aa, Homo sapiens
  misc_feature: Table A; Target 21425; HLA-B*35:01; DEFB126; ENSG00000125788; CTA
TATTTLMM

SEQ ID NO: 21426 - protein, 8 aa, Homo sapiens
  misc_feature: Table A; Target 21426; HLA-B*35:03; DEFB126; ENSG00000125788; CTA
TATTTLMM

SEQ ID NO: 21427 - protein, 8 aa, Homo sapiens
  misc_feature: Table A; Target 21427; HLA-B*51:01; DEFB126; ENSG00000125788; CTA
TATTTLMM

SEQ ID NO: 21428 - protein, 8 aa, Homo sapiens
  misc_feature: Table A; Target 21428; HLA-C*03:03; DEFB126; ENSG00000125788; CTA
TATTTLMM

SEQ ID NO: 21429 - protein, 8 aa, Homo sapiens
  misc_feature: Table A; Target 21429; HLA-C*03:04; DEFB126; ENSG00000125788; CTA
TATTTLMM

SEQ ID NO: 21430 - protein, 8 aa, Homo sapiens
  misc_feature: Table A; Target 21430; HLA-C*16:01; DEFB126; ENSG00000125788; CTA
TATTTLMM

SEQ ID NO: 21431 - protein, 9 aa, Homo sapiens
  misc_feature: Table A; Target 21431; HLA-C*16:02; DEFB126; ENSG00000125788; CTA
TATTTLMMT

SEQ ID NO: 21432 - protein, 9 aa, Homo sapiens
  misc_feature: Table A; Target 21432; HLA-C*16:02; DEFB126; ENSG00000125788; CTA
TKTTRISTV

SEQ ID NO: 21433 - protein, 9 aa, Homo sapiens
  misc_feature: Table A; Target 21433; HLA-A*02:01; DEFB126; ENSG00000125788; CTA
TLMMTTASM

SEQ ID NO: 21434 - protein, 9 aa, Homo sapiens
  misc_feature: Table A; Target 21434; HLA-A*32:01; DEFB126; ENSG00000125788; CTA
TLMMTTASM

SEQ ID NO: 21435 - protein, 9 aa, Homo sapiens
  misc_feature: Table A; Target 21435; HLA-B*07:02; DEFB126; ENSG00000125788; CTA
TLMMTTASM

SEQ ID NO: 21436 - protein, 9 aa, Homo sapiens
  misc_feature: Table A; Target 21436; HLA-B*08:01; DEFB126; ENSG00000125788; CTA
TLMMTTASM

SEQ ID NO: 21437 - protein, 9 aa, Homo sapiens
  misc_feature: Table A; Target 21437; HLA-B*15:01; DEFB126; ENSG00000125788; CTA
TLMMTTASM

SEQ ID NO: 21438 - protein, 9 aa, Homo sapiens
  misc_feature: Table A; Target 21438; HLA-B*15:03; DEFB126; ENSG00000125788; CTA
TLMMTTASM

SEQ ID NO: 21439 - protein, 9 aa, Homo sapiens
  misc_feature: Table A; Target 21439; HLA-B*35:01; DEFB126; ENSG00000125788; CTA
TLMMTTASM

SEQ ID NO: 21440 - protein, 9 aa, Homo sapiens
  misc_feature: Table A; Target 21440; HLA-B*35:03; DEFB126; ENSG00000125788; CTA
TLMMTTASM

SEQ ID NO: 21441 - protein, 9 aa, Homo sapiens
  misc_feature: Table A; Target 21441; HLA-B*46:01; DEFB126; ENSG00000125788; CTA
TLMMTTASM

SEQ ID NO: 21442 - protein, 9 aa, Homo sapiens
  misc_feature: Table A; Target 21442; HLA-C*01:02; DEFB126; ENSG00000125788; CTA
TLMMTTASM

SEQ ID NO: 21443 - protein, 9 aa, Homo sapiens
  misc_feature: Table A; Target 21443; HLA-C*07:04; DEFB126; ENSG00000125788; CTA
TLMMTTASM

SEQ ID NO: 21444 - protein, 9 aa, Homo sapiens
  misc_feature: Table A; Target 21444; HLA-C*14:02; DEFB126; ENSG00000125788; CTA
TLMMTTASM

SEQ ID NO: 21445 - protein, 9 aa, Homo sapiens
  misc_feature: Table A; Target 21445; HLA-B*27:05; DEFB126; ENSG00000125788; CTA
TRISTVTAT

SEQ ID NO: 21446 - protein, 9 aa, Homo sapiens
  misc_feature: Table A; Target 21446; HLA-B*39:01; DEFB126; ENSG00000125788; CTA
TRISTVTAT

SEQ ID NO: 21447 - protein, 9 aa, Homo sapiens
  misc_feature: Table A; Target 21447; HLA-C*06:02; DEFB126; ENSG00000125788; CTA
TRISTVTAT

SEQ ID NO: 21448 - protein, 8 aa, Homo sapiens
  misc_feature: Table A; Target 21448; HLA-C*01:02; DEFB126; ENSG00000125788; CTA
TTASMSSM

SEQ ID NO: 21449 - protein, 8 aa, Homo sapiens
  misc_feature: Table A; Target 21449; HLA-C*03:03; DEFB126; ENSG00000125788; CTA
TTASMSSM

SEQ ID NO: 21450 - protein, 8 aa, Homo sapiens
  misc_feature: Table A; Target 21450; HLA-C*03:04; DEFB126; ENSG00000125788; CTA
TTASMSSM

SEQ ID NO: 21451 - protein, 8 aa, Homo sapiens
  misc_feature: Table A; Target 21451; HLA-C*05:01; DEFB126; ENSG00000125788; CTA
TTATTTLM

SEQ ID NO: 21452 - protein, 9 aa, Homo sapiens
  misc_feature: Table A; Target 21452; HLA-A*01:01; DEFB126; ENSG00000125788; CTA
TTATTTLMM

SEQ ID NO: 21453 - protein, 9 aa, Homo sapiens
  misc_feature: Table A; Target 21453; HLA-A*26:01; DEFB126; ENSG00000125788; CTA
TTATTTLMM

SEQ ID NO: 21454 - protein, 9 aa, Homo sapiens
  misc_feature: Table A; Target 21454; HLA-A*68:01; DEFB126; ENSG00000125788; CTA
TTATTTLMM

SEQ ID NO: 21455 - protein, 9 aa, Homo sapiens
  misc_feature: Table A; Target 21455; HLA-B*58:01; DEFB126; ENSG00000125788; CTA
TTATTTLMM

SEQ ID NO: 21456 - protein, 9 aa, Homo sapiens
  misc_feature: Table A; Target 21456; HLA-C*01:02; DEFB126; ENSG00000125788; CTA
TTATTTLMM

SEQ ID NO: 21457 - protein, 9 aa, Homo sapiens
  misc_feature: Table A; Target 21457; HLA-C*04:01; DEFB126; ENSG00000125788; CTA
TTATTTLMM

SEQ ID NO: 21458 - protein, 9 aa, Homo sapiens
  misc_feature: Table A; Target 21458; HLA-C*07:06; DEFB126; ENSG00000125788; CTA
TTATTTLMM

SEQ ID NO: 21459 - protein, 10 aa, Homo sapiens
  misc_feature: Table A; Target 21459; HLA-C*06:02; DEFB126; ENSG00000125788; CTA
TTATTTLMMT

SEQ ID NO: 21460 - protein, 11 aa, Homo sapiens
  misc_feature: Table A; Target 21460; HLA-C*06:02; DEFB126; ENSG00000125788; CTA
TTATTTLMMTT

SEQ ID NO: 21461 - protein, 9 aa, Homo sapiens
  misc_feature: Table A; Target 21461; HLA-B*40:02; DEFB126; ENSG00000125788; CTA
TTRISTVTA

SEQ ID NO: 21462 - protein, 9 aa, Homo sapiens
  misc_feature: Table A; Target 21462; HLA-B*54:01; DEFB126; ENSG00000125788; CTA
TTRISTVTA

SEQ ID NO: 21463 - protein, 9 aa, Homo sapiens
  misc_feature: Table A; Target 21463; HLA-B*54:01; DEFB126; ENSG00000125788; CTA
TTTLMMTTA

SEQ ID NO: 21464 - protein, 9 aa, Homo sapiens
  misc_feature: Table A; Target 21464; HLA-B*56:01; DEFB126; ENSG00000125788; CTA
TTTLMMTTA

SEQ ID NO: 21465 - protein, 11 aa, Homo sapiens
  misc_feature: Table A; Target 21465; HLA-B*35:03; DEFB126; ENSG00000125788; CTA
TVTATTATTTL

SEQ ID NO: 21466 - protein, 11 aa, Homo sapiens
  misc_feature: Table A; Target 21466; HLA-B*39:01; DEFB126; ENSG00000125788; CTA
TVTATTATTTL

SEQ ID NO: 21467 - protein, 8 aa, Homo sapiens
  misc_feature: Table A; Target 21467; HLA-A*23:01; DEFB126; ENSG00000125788; CTA
VFMLLAQL

SEQ ID NO: 21468 - protein, 9 aa, Homo sapiens
  misc_feature: Table A; Target 21468; HLA-B*07:02; DEFB126; ENSG00000125788; CTA
VPADRRANY

SEQ ID NO: 21469 - protein, 9 aa, Homo sapiens
  misc_feature: Table A; Target 21469; HLA-C*16:01; DEFB126; ENSG00000125788; CTA
VPADRRANY

SEQ ID NO: 21470 - protein, 8 aa, Homo sapiens
  misc_feature: Table A; Target 21470; HLA-B*13:02; DEFB126; ENSG00000125788; CTA
VQTKTTRI

SEQ ID NO: 21471 - protein, 9 aa, Homo sapiens
  misc_feature: Table A; Target 21471; HLA-A*03:02; DEFB126; ENSG00000125788; CTA
VSGNWYVKK

SEQ ID NO: 21472 - protein, 9 aa, Homo sapiens
  misc_feature: Table A; Target 21472; HLA-A*11:01; DEFB126; ENSG00000125788; CTA
VSGNWYVKK

SEQ ID NO: 21473 - protein, 9 aa, Homo sapiens
  misc_feature: Table A; Target 21473; HLA-B*58:01; DEFB126; ENSG00000125788; CTA
VTATTATTT

SEQ ID NO: 21474 - protein, 10 aa, Homo sapiens
  misc_feature: Table A; Target 21474; HLA-B*58:01; DEFB126; ENSG00000125788; CTA
VTATTATTTL

SEQ ID NO: 21475 - protein, 10 aa, Homo sapiens
  misc_feature: Table A; Target 21475; HLA-C*01:02; DEFB126; ENSG00000125788; CTA
VTATTATTTL

SEQ ID NO: 21476 - protein, 9 aa, Homo sapiens
  misc_feature: Table A; Target 21476; HLA-B*27:02; DEFB126; ENSG00000125788; CTA
YPVFCVQTK

SEQ ID NO: 21477 - protein, 9 aa, Homo sapiens
  misc_feature: Table A; Target 21477; HLA-B*51:01; DEFB126; ENSG00000125788; CTA
YPVFCVQTK

SEQ ID NO: 21478 - protein, 9 aa, Homo sapiens
  misc_feature: Table A; Target 21478; HLA-C*05:01; DMRT1; ENSG00000137090; CTA
AADSASGEV

SEQ ID NO: 21479 - protein, 8 aa, Homo sapiens
  misc_feature: Table A; Target 21479; HLA-C*03:04; DMRT1; ENSG00000137090; CTA
AASEGRMV

SEQ ID NO: 21480 - protein, 8 aa, Homo sapiens
  misc_feature: Table A; Target 21480; HLA-C*16:01; DMRT1; ENSG00000137090; CTA
AASEGRMV

SEQ ID NO: 21481 - protein, 8 aa, Homo sapiens
  misc_feature: Table A; Target 21481; HLA-C*16:02; DMRT1; ENSG00000137090; CTA
AASEGRMV

SEQ ID NO: 21482 - protein, 9 aa, Homo sapiens
  misc_feature: Table A; Target 21482; HLA-A*32:01; DMRT1; ENSG00000137090; CTA
AASEGRMVI

SEQ ID NO: 21483 - protein, 9 aa, Homo sapiens
  misc_feature: Table A; Target 21483; HLA-B*07:02; DMRT1; ENSG00000137090; CTA
AASEGRMVI

SEQ ID NO: 21484 - protein, 9 aa, Homo sapiens
  misc_feature: Table A; Target 21484; HLA-B*13:02; DMRT1; ENSG00000137090; CTA
AASEGRMVI

SEQ ID NO: 21485 - protein, 9 aa, Homo sapiens
  misc_feature: Table A; Target 21485; HLA-B*38:01; DMRT1; ENSG00000137090; CTA
AASEGRMVI

SEQ ID NO: 21486 - protein, 9 aa, Homo sapiens
  misc_feature: Table A; Target 21486; HLA-B*46:01; DMRT1; ENSG00000137090; CTA
AASEGRMVI

SEQ ID NO: 21487 - protein, 9 aa, Homo sapiens
  misc_feature: Table A; Target 21487; HLA-B*49:01; DMRT1; ENSG00000137090; CTA
AASEGRMVI

SEQ ID NO: 21488 - protein, 9 aa, Homo sapiens
  misc_feature: Table A; Target 21488; HLA-B*51:01; DMRT1; ENSG00000137090; CTA
AASEGRMVI

SEQ ID NO: 21489 - protein, 9 aa, Homo sapiens
  misc_feature: Table A; Target 21489; HLA-B*58:01; DMRT1; ENSG00000137090; CTA
AASEGRMVI

SEQ ID NO: 21490 - protein, 9 aa, Homo sapiens
  misc_feature: Table A; Target 21490; HLA-C*02:02; DMRT1; ENSG00000137090; CTA
AASEGRMVI

SEQ ID NO: 21491 - protein, 9 aa, Homo sapiens
  misc_feature: Table A; Target 21491; HLA-C*03:03; DMRT1; ENSG00000137090; CTA
AASEGRMVI

SEQ ID NO: 21492 - protein, 9 aa, Homo sapiens
  misc_feature: Table A; Target 21492; HLA-C*03:04; DMRT1; ENSG00000137090; CTA
AASEGRMVI

SEQ ID NO: 21493 - protein, 9 aa, Homo sapiens
  misc_feature: Table A; Target 21493; HLA-C*05:01; DMRT1; ENSG00000137090; CTA
AASEGRMVI

SEQ ID NO: 21494 - protein, 9 aa, Homo sapiens
  misc_feature: Table A; Target 21494; HLA-C*07:02; DMRT1; ENSG00000137090; CTA
AASEGRMVI

SEQ ID NO: 21495 - protein, 9 aa, Homo sapiens
  misc_feature: Table A; Target 21495; HLA-C*12:03; DMRT1; ENSG00000137090; CTA
AASEGRMVI

SEQ ID NO: 21496 - protein, 9 aa, Homo sapiens
  misc_feature: Table A; Target 21496; HLA-C*16:01; DMRT1; ENSG00000137090; CTA
AASEGRMVI

SEQ ID NO: 21497 - protein, 9 aa, Homo sapiens
  misc_feature: Table A; Target 21497; HLA-C*16:02; DMRT1; ENSG00000137090; CTA
AASEGRMVI

SEQ ID NO: 21498 - protein, 9 aa, Homo sapiens
  misc_feature: Table A; Target 21498; HLA-C*16:04; DMRT1; ENSG00000137090; CTA
AASEGRMVI

SEQ ID NO: 21499 - protein, 8 aa, Homo sapiens
  misc_feature: Table A; Target 21499; HLA-B*37:01; DMRT1; ENSG00000137090; CTA
ADSASGEV

SEQ ID NO: 21500 - protein, 9 aa, Homo sapiens
  misc_feature: Table A; Target 21500; HLA-B*37:01; DMRT1; ENSG00000137090; CTA
AERQRVMAA

SEQ ID NO: 21501 - protein, 9 aa, Homo sapiens
  misc_feature: Table A; Target 21501; HLA-B*40:02; DMRT1; ENSG00000137090; CTA
AERQRVMAA

SEQ ID NO: 21502 - protein, 11 aa, Homo sapiens
  misc_feature: Table A; Target 21502; HLA-A*02:01; DMRT1; ENSG00000137090; CTA
ALAADSASGEV

SEQ ID NO: 21503 - protein, 11 aa, Homo sapiens
  misc_feature: Table A; Target 21503; HLA-A*02:03; DMRT1; ENSG00000137090; CTA
ALAADSASGEV

SEQ ID NO: 21504 - protein, 11 aa, Homo sapiens
  misc_feature: Table A; Target 21504; HLA-A*02:03; DMRT1; ENSG00000137090; CTA
ALVGAASGSSA

SEQ ID NO: 21505 - protein, 11 aa, Homo sapiens
  misc_feature: Table A; Target 21505; HLA-C*14:02; DMRT1; ENSG00000137090; CTA
ALVGAASGSSA

SEQ ID NO: 21506 - protein, 8 aa, Homo sapiens
  misc_feature: Table A; Target 21506; HLA-B*37:01; DMRT1; ENSG00000137090; CTA
AMSSQYRM

SEQ ID NO: 21507 - protein, 9 aa, Homo sapiens
  misc_feature: Table A; Target 21507; HLA-B*07:02; DMRT1; ENSG00000137090; CTA
APHAPGVPP

SEQ ID NO: 21508 - protein, 9 aa, Homo sapiens
  misc_feature: Table A; Target 21508; HLA-B*54:01; DMRT1; ENSG00000137090; CTA
APHAPGVPP

SEQ ID NO: 21509 - protein, 9 aa, Homo sapiens
  misc_feature: Table A; Target 21509; HLA-B*56:01; DMRT1; ENSG00000137090; CTA
APHAPGVPP

SEQ ID NO: 21510 - protein, 9 aa, Homo sapiens
  misc_feature: Table A; Target 21510; HLA-B*54:01; DMRT1; ENSG00000137090; CTA
APSYPEARA

SEQ ID NO: 21511 - protein, 9 aa, Homo sapiens
  misc_feature: Table A; Target 21511; HLA-B*55:01; DMRT1; ENSG00000137090; CTA
APSYPEARA

SEQ ID NO: 21512 - protein, 9 aa, Homo sapiens
  misc_feature: Table A; Target 21512; HLA-B*56:01; DMRT1; ENSG00000137090; CTA
APSYPEARA

SEQ ID NO: 21513 - protein, 11 aa, Homo sapiens
  misc_feature: Table A; Target 21513; HLA-B*07:02; DMRT1; ENSG00000137090; CTA
APSYPEARASV

SEQ ID NO: 21514 - protein, 11 aa, Homo sapiens
  misc_feature: Table A; Target 21514; HLA-B*56:01; DMRT1; ENSG00000137090; CTA
APSYPEARASV

SEQ ID NO: 21515 - protein, 11 aa, Homo sapiens
  misc_feature: Table A; Target 21515; HLA-C*07:02; DMRT1; ENSG00000137090; CTA
APSYPEARASV

SEQ ID NO: 21516 - protein, 9 aa, Homo sapiens
  misc_feature: Table A; Target 21516; HLA-A*01:01; DMRT1; ENSG00000137090; CTA
ASDLGAGSK

SEQ ID NO: 21517 - protein, 9 aa, Homo sapiens
  misc_feature: Table A; Target 21517; HLA-A*11:01; DMRT1; ENSG00000137090; CTA
ASDLGAGSK

SEQ ID NO: 21518 - protein, 10 aa, Homo sapiens
  misc_feature: Table A; Target 21518; HLA-A*01:01; DMRT1; ENSG00000137090; CTA
ASDLGAGSKK

SEQ ID NO: 21519 - protein, 10 aa, Homo sapiens
  misc_feature: Table A; Target 21519; HLA-A*03:01; DMRT1; ENSG00000137090; CTA
ASDLGAGSKK

SEQ ID NO: 21520 - protein, 10 aa, Homo sapiens
  misc_feature: Table A; Target 21520; HLA-A*03:02; DMRT1; ENSG00000137090; CTA
ASDLGAGSKK

SEQ ID NO: 21521 - protein, 10 aa, Homo sapiens
  misc_feature: Table A; Target 21521; HLA-A*11:01; DMRT1; ENSG00000137090; CTA
ASDLGAGSKK

SEQ ID NO: 21522 - protein, 9 aa, Homo sapiens
  misc_feature: Table A; Target 21522; HLA-B*07:02; DMRT1; ENSG00000137090; CTA
ASGEVGNPL

SEQ ID NO: 21523 - protein, 9 aa, Homo sapiens
  misc_feature: Table A; Target 21523; HLA-B*46:01; DMRT1; ENSG00000137090; CTA
ASGEVGNPL

SEQ ID NO: 21524 - protein, 9 aa, Homo sapiens
  misc_feature: Table A; Target 21524; HLA-B*58:01; DMRT1; ENSG00000137090; CTA
ASGEVGNPL

SEQ ID NO: 21525 - protein, 9 aa, Homo sapiens
  misc_feature: Table A; Target 21525; HLA-C*01:02; DMRT1; ENSG00000137090; CTA
ASGEVGNPL

SEQ ID NO: 21526 - protein, 9 aa, Homo sapiens
  misc_feature: Table A; Target 21526; HLA-C*03:03; DMRT1; ENSG00000137090; CTA
ASGEVGNPL

SEQ ID NO: 21527 - protein, 9 aa, Homo sapiens
  misc_feature: Table A; Target 21527; HLA-C*03:04; DMRT1; ENSG00000137090; CTA
ASGEVGNPL

SEQ ID NO: 21528 - protein, 9 aa, Homo sapiens
  misc_feature: Table A; Target 21528; HLA-C*05:01; DMRT1; ENSG00000137090; CTA
ASGEVGNPL

SEQ ID NO: 21529 - protein, 9 aa, Homo sapiens
  misc_feature: Table A; Target 21529; HLA-C*14:02; DMRT1; ENSG00000137090; CTA
ASGEVGNPL

SEQ ID NO: 21530 - protein, 9 aa, Homo sapiens
  misc_feature: Table A; Target 21530; HLA-C*16:02; DMRT1; ENSG00000137090; CTA
ASGEVGNPL

SEQ ID NO: 21531 - protein, 10 aa, Homo sapiens
  misc_feature: Table A; Target 21531; HLA-A*30:01; DMRT1; ENSG00000137090; CTA
CEPASEPSSF

SEQ ID NO: 21532 - protein, 10 aa, Homo sapiens
  misc_feature: Table A; Target 21532; HLA-B*37:01; DMRT1; ENSG00000137090; CTA
CEPASEPSSF

SEQ ID NO: 21533 - protein, 10 aa, Homo sapiens
  misc_feature: Table A; Target 21533; HLA-B*40:01; DMRT1; ENSG00000137090; CTA
CEPASEPSSF

SEQ ID NO: 21534 - protein, 10 aa, Homo sapiens
  misc_feature: Table A; Target 21534; HLA-B*44:03; DMRT1; ENSG00000137090; CTA
CEPASEPSSF

SEQ ID NO: 21535 - protein, 8 aa, Homo sapiens
  misc_feature: Table A; Target 21535; HLA-B*07:02; DMRT1; ENSG00000137090; CTA
CPQYSMAL

SEQ ID NO: 21536 - protein, 9 aa, Homo sapiens
  misc_feature: Table A; Target 21536; HLA-B*56:01; DMRT1; ENSG00000137090; CTA
CPQYSMALA

SEQ ID NO: 21537 - protein, 10 aa, Homo sapiens
  misc_feature: Table A; Target 21537; HLA-B*56:01; DMRT1; ENSG00000137090; CTA
CPQYSMALAA

SEQ ID NO: 21538 - protein, 8 aa, Homo sapiens
  misc_feature: Table A; Target 21538; HLA-B*51:01; DMRT1; ENSG00000137090; CTA
DAPSYPEA

SEQ ID NO: 21539 - protein, 9 aa, Homo sapiens
  misc_feature: Table A; Target 21539; HLA-A*33:01; DMRT1; ENSG00000137090; CTA
DAPSYPEAR

SEQ ID NO: 21540 - protein, 9 aa, Homo sapiens
  misc_feature: Table A; Target 21540; HLA-A*33:03; DMRT1; ENSG00000137090; CTA
DAPSYPEAR

SEQ ID NO: 21541 - protein, 9 aa, Homo sapiens
  misc_feature: Table A; Target 21541; HLA-A*68:01; DMRT1; ENSG00000137090; CTA
DAPSYPEAR

SEQ ID NO: 21542 - protein, 9 aa, Homo sapiens
  misc_feature: Table A; Target 21542; HLA-B*51:01; DMRT1; ENSG00000137090; CTA
DAPSYPEAR

SEQ ID NO: 21543 - protein, 9 aa, Homo sapiens
  misc_feature: Table A; Target 21543; HLA-C*07:06; DMRT1; ENSG00000137090; CTA
DAPSYPEAR

SEQ ID NO: 21544 - protein, 10 aa, Homo sapiens
  misc_feature: Table A; Target 21544; HLA-B*51:01; DMRT1; ENSG00000137090; CTA
DAPSYPEARA

SEQ ID NO: 21545 - protein, 9 aa, Homo sapiens
  misc_feature: Table A; Target 21545; HLA-B*18:01; DMRT1; ENSG00000137090; CTA
DEAFSKPST

SEQ ID NO: 21546 - protein, 11 aa, Homo sapiens
  misc_feature: Table A; Target 21546; HLA-A*33:01; DMRT1; ENSG00000137090; CTA
DLGAGSKKSPR

SEQ ID NO: 21547 - protein, 9 aa, Homo sapiens
  misc_feature: Table A; Target 21547; HLA-A*01:01; DMRT1; ENSG00000137090; CTA
DLVSDSTYY

SEQ ID NO: 21548 - protein, 9 aa, Homo sapiens
  misc_feature: Table A; Target 21548; HLA-A*25:01; DMRT1; ENSG00000137090; CTA
DLVSDSTYY

SEQ ID NO: 21549 - protein, 9 aa, Homo sapiens
  misc_feature: Table A; Target 21549; HLA-A*26:01; DMRT1; ENSG00000137090; CTA
DLVSDSTYY

SEQ ID NO: 21550 - protein, 9 aa, Homo sapiens
  misc_feature: Table A; Target 21550; HLA-B*15:03; DMRT1; ENSG00000137090; CTA
DLVSDSTYY

SEQ ID NO: 21551 - protein, 9 aa, Homo sapiens
  misc_feature: Table A; Target 21551; HLA-B*18:01; DMRT1; ENSG00000137090; CTA
DLVSDSTYY

SEQ ID NO: 21552 - protein, 9 aa, Homo sapiens
  misc_feature: Table A; Target 21552; HLA-C*07:04; DMRT1; ENSG00000137090; CTA
DLVSDSTYY

SEQ ID NO: 21553 - protein, 11 aa, Homo sapiens
  misc_feature: Table A; Target 21553; HLA-A*33:01; DMRT1; ENSG00000137090; CTA
DSASGEVGNPL

SEQ ID NO: 21554 - protein, 11 aa, Homo sapiens
  misc_feature: Table A; Target 21554; HLA-A*68:01; DMRT1; ENSG00000137090; CTA
DSASGEVGNPL

SEQ ID NO: 21555 - protein, 11 aa, Homo sapiens
  misc_feature: Table A; Target 21555; HLA-A*68:02; DMRT1; ENSG00000137090; CTA
DSASGEVGNPL

SEQ ID NO: 21556 - protein, 11 aa, Homo sapiens
  misc_feature: Table A; Target 21556; HLA-B*38:01; DMRT1; ENSG00000137090; CTA
DSASGEVGNPL

SEQ ID NO: 21557 - protein, 11 aa, Homo sapiens
  misc_feature: Table A; Target 21557; HLA-B*39:01; DMRT1; ENSG00000137090; CTA
DSASGEVGNPL

SEQ ID NO: 21558 - protein, 11 aa, Homo sapiens
  misc_feature: Table A; Target 21558; HLA-C*07:06; DMRT1; ENSG00000137090; CTA
DSASGEVGNPL

SEQ ID NO: 21559 - protein, 8 aa, Homo sapiens
  misc_feature: Table A; Target 21559; HLA-A*25:01; DMRT1; ENSG00000137090; CTA
DSTYYSSF

SEQ ID NO: 21560 - protein, 9 aa, Homo sapiens
  misc_feature: Table A; Target 21560; HLA-A*01:01; DMRT1; ENSG00000137090; CTA
DSTYYSSFY

SEQ ID NO: 21561 - protein, 9 aa, Homo sapiens
  misc_feature: Table A; Target 21561; HLA-A*26:01; DMRT1; ENSG00000137090; CTA
DSTYYSSFY

SEQ ID NO: 21562 - protein, 9 aa, Homo sapiens
  misc_feature: Table A; Target 21562; HLA-A*26:01; DMRT1; ENSG00000137090; CTA
EAFSKPSTP

SEQ ID NO: 21563 - protein, 8 aa, Homo sapiens
  misc_feature: Table A; Target 21563; HLA-B*51:01; DMRT1; ENSG00000137090; CTA
EAPHAPGV

SEQ ID NO: 21564 - protein, 10 aa, Homo sapiens
  misc_feature: Table A; Target 21564; HLA-A*33:01; DMRT1; ENSG00000137090; CTA
EDAPSYPEAR

SEQ ID NO: 21565 - protein, 10 aa, Homo sapiens
  misc_feature: Table A; Target 21565; HLA-A*33:03; DMRT1; ENSG00000137090; CTA
EDAPSYPEAR

SEQ ID NO: 21566 - protein, 10 aa, Homo sapiens
  misc_feature: Table A; Target 21566; HLA-A*68:01; DMRT1; ENSG00000137090; CTA
EDAPSYPEAR

SEQ ID NO: 21567 - protein, 10 aa, Homo sapiens
  misc_feature: Table A; Target 21567; HLA-B*27:02; DMRT1; ENSG00000137090; CTA
EDAPSYPEAR

SEQ ID NO: 21568 - protein, 10 aa, Homo sapiens
  misc_feature: Table A; Target 21568; HLA-C*07:06; DMRT1; ENSG00000137090; CTA
EDAPSYPEAR

SEQ ID NO: 21569 - protein, 8 aa, Homo sapiens
  misc_feature: Table A; Target 21569; HLA-B*18:01; DMRT1; ENSG00000137090; CTA
EEELGISH

SEQ ID NO: 21570 - protein, 10 aa, Homo sapiens
  misc_feature: Table A; Target 21570; HLA-B*27:02; DMRT1; ENSG00000137090; CTA
EEELGISHPI

SEQ ID NO: 21571 - protein, 10 aa, Homo sapiens
  misc_feature: Table A; Target 21571; HLA-B*40:01; DMRT1; ENSG00000137090; CTA
EEELGISHPI

SEQ ID NO: 21572 - protein, 10 aa, Homo sapiens
  misc_feature: Table A; Target 21572; HLA-B*44:02; DMRT1; ENSG00000137090; CTA
EEELGISHPI

SEQ ID NO: 21573 - protein, 9 aa, Homo sapiens
  misc_feature: Table A; Target 21573; HLA-B*18:01; DMRT1; ENSG00000137090; CTA
EELGISHPI

SEQ ID NO: 21574 - protein, 9 aa, Homo sapiens
  misc_feature: Table A; Target 21574; HLA-B*44:02; DMRT1; ENSG00000137090; CTA
EELGISHPI

SEQ ID NO: 21575 - protein, 9 aa, Homo sapiens
  misc_feature: Table A; Target 21575; HLA-B*44:03; DMRT1; ENSG00000137090; CTA
EELGISHPI

SEQ ID NO: 21576 - protein, 9 aa, Homo sapiens
  misc_feature: Table A; Target 21576; HLA-B*49:01; DMRT1; ENSG00000137090; CTA
EELGISHPI

SEQ ID NO: 21577 - protein, 11 aa, Homo sapiens
  misc_feature: Table A; Target 21577; HLA-A*33:01; DMRT1; ENSG00000137090; CTA
ENRHAMSSQYR

SEQ ID NO: 21578 - protein, 9 aa, Homo sapiens
  misc_feature: Table A; Target 21578; HLA-A*25:01; DMRT1; ENSG00000137090; CTA
EPASEPSSF

SEQ ID NO: 21579 - protein, 9 aa, Homo sapiens
  misc_feature: Table A; Target 21579; HLA-A*26:01; DMRT1; ENSG00000137090; CTA
EPASEPSSF

SEQ ID NO: 21580 - protein, 9 aa, Homo sapiens
  misc_feature: Table A; Target 21580; HLA-B*07:02; DMRT1; ENSG00000137090; CTA
EPASEPSSF

SEQ ID NO: 21581 - protein, 9 aa, Homo sapiens
  misc_feature: Table A; Target 21581; HLA-B*35:01; DMRT1; ENSG00000137090; CTA
EPASEPSSF

SEQ ID NO: 21582 - protein, 9 aa, Homo sapiens
  misc_feature: Table A; Target 21582; HLA-B*35:03; DMRT1; ENSG00000137090; CTA
EPASEPSSF

SEQ ID NO: 21583 - protein, 9 aa, Homo sapiens
  misc_feature: Table A; Target 21583; HLA-B*39:01; DMRT1; ENSG00000137090; CTA
EPASEPSSF

SEQ ID NO: 21584 - protein, 9 aa, Homo sapiens
  misc_feature: Table A; Target 21584; HLA-B*55:01; DMRT1; ENSG00000137090; CTA
EPASEPSSF

SEQ ID NO: 21585 - protein, 9 aa, Homo sapiens
  misc_feature: Table A; Target 21585; HLA-C*03:03; DMRT1; ENSG00000137090; CTA
EPASEPSSF

SEQ ID NO: 21586 - protein, 9 aa, Homo sapiens
  misc_feature: Table A; Target 21586; HLA-C*07:06; DMRT1; ENSG00000137090; CTA
EPASEPSSF

SEQ ID NO: 21587 - protein, 11 aa, Homo sapiens
  misc_feature: Table A; Target 21587; HLA-A*26:01; DMRT1; ENSG00000137090; CTA
EVGNPLGGSPV

SEQ ID NO: 21588 - protein, 10 aa, Homo sapiens
  misc_feature: Table A; Target 21588; HLA-A*29:02; DMRT1; ENSG00000137090; CTA
FFTFEDAPSY

SEQ ID NO: 21589 - protein, 8 aa, Homo sapiens
  misc_feature: Table A; Target 21589; HLA-B*08:01; DMRT1; ENSG00000137090; CTA
FGKASGAL

SEQ ID NO: 21590 - protein, 8 aa, Homo sapiens
  misc_feature: Table A; Target 21590; HLA-B*40:02; DMRT1; ENSG00000137090; CTA
FGKASGAL

SEQ ID NO: 21591 - protein, 8 aa, Homo sapiens
  misc_feature: Table A; Target 21591; HLA-B*46:01; DMRT1; ENSG00000137090; CTA
FGKASGAL

SEQ ID NO: 21592 - protein, 8 aa, Homo sapiens
  misc_feature: Table A; Target 21592; HLA-C*03:03; DMRT1; ENSG00000137090; CTA
FGKASGAL

SEQ ID NO: 21593 - protein, 8 aa, Homo sapiens
  misc_feature: Table A; Target 21593; HLA-C*03:04; DMRT1; ENSG00000137090; CTA
FGKASGAL

SEQ ID NO: 21594 - protein, 8 aa, Homo sapiens
  misc_feature: Table A; Target 21594; HLA-C*07:02; DMRT1; ENSG00000137090; CTA
FGKASGAL

SEQ ID NO: 21595 - protein, 8 aa, Homo sapiens
  misc_feature: Table A; Target 21595; HLA-C*12:03; DMRT1; ENSG00000137090; CTA
FGKASGAL

SEQ ID NO: 21596 - protein, 9 aa, Homo sapiens
  misc_feature: Table A; Target 21596; HLA-B*40:02; DMRT1; ENSG00000137090; CTA
FGKASGALV

SEQ ID NO: 21597 - protein, 9 aa, Homo sapiens
  misc_feature: Table A; Target 21597; HLA-B*46:01; DMRT1; ENSG00000137090; CTA
FGKASGALV

SEQ ID NO: 21598 - protein, 9 aa, Homo sapiens
  misc_feature: Table A; Target 21598; HLA-C*02:02; DMRT1; ENSG00000137090; CTA
FGKASGALV

SEQ ID NO: 21599 - protein, 9 aa, Homo sapiens
  misc_feature: Table A; Target 21599; HLA-C*03:03; DMRT1; ENSG00000137090; CTA
FGKASGALV

SEQ ID NO: 21600 - protein, 9 aa, Homo sapiens
  misc_feature: Table A; Target 21600; HLA-C*03:04; DMRT1; ENSG00000137090; CTA
FGKASGALV

SEQ ID NO: 21601 - protein, 9 aa, Homo sapiens
  misc_feature: Table A; Target 21601; HLA-C*12:03; DMRT1; ENSG00000137090; CTA
FGKASGALV

SEQ ID NO: 21602 - protein, 11 aa, Homo sapiens
  misc_feature: Table A; Target 21602; HLA-B*54:01; DMRT1; ENSG00000137090; CTA
FGKASGALVGA

SEQ ID NO: 21603 - protein, 8 aa, Homo sapiens
  misc_feature: Table A; Target 21603; HLA-B*35:01; DMRT1; ENSG00000137090; CTA
FPYYNNLY

SEQ ID NO: 21604 - protein, 9 aa, Homo sapiens
  misc_feature: Table A; Target 21604; HLA-B*46:01; DMRT1; ENSG00000137090; CTA
FSKPSTPSE

SEQ ID NO: 21605 - protein, 9 aa, Homo sapiens
  misc_feature: Table A; Target 21605; HLA-A*01:01; DMRT1; ENSG00000137090; CTA
FTFEDAPSY

SEQ ID NO: 21606 - protein, 9 aa, Homo sapiens
  misc_feature: Table A; Target 21606; HLA-A*25:01; DMRT1; ENSG00000137090; CTA
FTFEDAPSY

SEQ ID NO: 21607 - protein, 9 aa, Homo sapiens
  misc_feature: Table A; Target 21607; HLA-A*26:01; DMRT1; ENSG00000137090; CTA
FTFEDAPSY

SEQ ID NO: 21608 - protein, 9 aa, Homo sapiens
  misc_feature: Table A; Target 21608; HLA-A*29:02; DMRT1; ENSG00000137090; CTA
FTFEDAPSY

SEQ ID NO: 21609 - protein, 9 aa, Homo sapiens
  misc_feature: Table A; Target 21609; HLA-A*30:02; DMRT1; ENSG00000137090; CTA
FTFEDAPSY

SEQ ID NO: 21610 - protein, 9 aa, Homo sapiens
  misc_feature: Table A; Target 21610; HLA-A*32:01; DMRT1; ENSG00000137090; CTA
FTFEDAPSY

SEQ ID NO: 21611 - protein, 9 aa, Homo sapiens
  misc_feature: Table A; Target 21611; HLA-A*68:01; DMRT1; ENSG00000137090; CTA
FTFEDAPSY

SEQ ID NO: 21612 - protein, 9 aa, Homo sapiens
  misc_feature: Table A; Target 21612; HLA-B*15:01; DMRT1; ENSG00000137090; CTA
FTFEDAPSY

SEQ ID NO: 21613 - protein, 9 aa, Homo sapiens
  misc_feature: Table A; Target 21613; HLA-B*15:03; DMRT1; ENSG00000137090; CTA
FTFEDAPSY

SEQ ID NO: 21614 - protein, 9 aa, Homo sapiens
  misc_feature: Table A; Target 21614; HLA-B*18:01; DMRT1; ENSG00000137090; CTA
FTFEDAPSY

SEQ ID NO: 21615 - protein, 9 aa, Homo sapiens
  misc_feature: Table A; Target 21615; HLA-B*27:05; DMRT1; ENSG00000137090; CTA
FTFEDAPSY

SEQ ID NO: 21616 - protein, 9 aa, Homo sapiens
  misc_feature: Table A; Target 21616; HLA-B*35:01; DMRT1; ENSG00000137090; CTA
FTFEDAPSY

SEQ ID NO: 21617 - protein, 9 aa, Homo sapiens
  misc_feature: Table A; Target 21617; HLA-B*39:01; DMRT1; ENSG00000137090; CTA
FTFEDAPSY

SEQ ID NO: 21618 - protein, 9 aa, Homo sapiens
  misc_feature: Table A; Target 21618; HLA-B*46:01; DMRT1; ENSG00000137090; CTA
FTFEDAPSY

SEQ ID NO: 21619 - protein, 9 aa, Homo sapiens
  misc_feature: Table A; Target 21619; HLA-B*58:01; DMRT1; ENSG00000137090; CTA
FTFEDAPSY

SEQ ID NO: 21620 - protein, 9 aa, Homo sapiens
  misc_feature: Table A; Target 21620; HLA-C*02:02; DMRT1; ENSG00000137090; CTA
FTFEDAPSY

SEQ ID NO: 21621 - protein, 9 aa, Homo sapiens
  misc_feature: Table A; Target 21621; HLA-C*03:03; DMRT1; ENSG00000137090; CTA
FTFEDAPSY

SEQ ID NO: 21622 - protein, 9 aa, Homo sapiens
  misc_feature: Table A; Target 21622; HLA-C*03:04; DMRT1; ENSG00000137090; CTA
FTFEDAPSY

SEQ ID NO: 21623 - protein, 9 aa, Homo sapiens
  misc_feature: Table A; Target 21623; HLA-C*05:01; DMRT1; ENSG00000137090; CTA
FTFEDAPSY

SEQ ID NO: 21624 - protein, 9 aa, Homo sapiens
  misc_feature: Table A; Target 21624; HLA-C*07:04; DMRT1; ENSG00000137090; CTA
FTFEDAPSY

SEQ ID NO: 21625 - protein, 9 aa, Homo sapiens
  misc_feature: Table A; Target 21625; HLA-C*07:06; DMRT1; ENSG00000137090; CTA
FTFEDAPSY

SEQ ID NO: 21626 - protein, 9 aa, Homo sapiens
  misc_feature: Table A; Target 21626; HLA-C*12:03; DMRT1; ENSG00000137090; CTA
FTFEDAPSY

SEQ ID NO: 21627 - protein, 9 aa, Homo sapiens
  misc_feature: Table A; Target 21627; HLA-C*14:02; DMRT1; ENSG00000137090; CTA
FTFEDAPSY

SEQ ID NO: 21628 - protein, 9 aa, Homo sapiens
  misc_feature: Table A; Target 21628; HLA-C*16:01; DMRT1; ENSG00000137090; CTA
FTFEDAPSY

SEQ ID NO: 21629 - protein, 9 aa, Homo sapiens
  misc_feature: Table A; Target 21629; HLA-C*16:02; DMRT1; ENSG00000137090; CTA
FTFEDAPSY

SEQ ID NO: 21630 - protein, 9 aa, Homo sapiens
  misc_feature: Table A; Target 21630; HLA-C*16:04; DMRT1; ENSG00000137090; CTA
FTFEDAPSY

SEQ ID NO: 21631 - protein, 9 aa, Homo sapiens
  misc_feature: Table A; Target 21631; HLA-A*29:02; DMRT1; ENSG00000137090; CTA
FYQPSLFPY

SEQ ID NO: 21632 - protein, 9 aa, Homo sapiens
  misc_feature: Table A; Target 21632; HLA-C*14:02; DMRT1; ENSG00000137090; CTA
FYQPSLFPY

SEQ ID NO: 21633 - protein, 10 aa, Homo sapiens
  misc_feature: Table A; Target 21633; HLA-A*24:02; DMRT1; ENSG00000137090; CTA
FYQPSLFPYY

SEQ ID NO: 21634 - protein, 10 aa, Homo sapiens
  misc_feature: Table A; Target 21634; HLA-A*29:02; DMRT1; ENSG00000137090; CTA
FYQPSLFPYY

SEQ ID NO: 21635 - protein, 10 aa, Homo sapiens
  misc_feature: Table A; Target 21635; HLA-A*30:02; DMRT1; ENSG00000137090; CTA
FYQPSLFPYY

SEQ ID NO: 21636 - protein, 10 aa, Homo sapiens
  misc_feature: Table A; Target 21636; HLA-A*11:01; DMRT1; ENSG00000137090; CTA
GASDLGAGSK

SEQ ID NO: 21637 - protein, 10 aa, Homo sapiens
  misc_feature: Table A; Target 21637; HLA-B*27:02; DMRT1; ENSG00000137090; CTA
GASDLGAGSK

SEQ ID NO: 21638 - protein, 10 aa, Homo sapiens
  misc_feature: Table A; Target 21638; HLA-C*07:06; DMRT1; ENSG00000137090; CTA
GASDLGAGSK

SEQ ID NO: 21639 - protein, 11 aa, Homo sapiens
  misc_feature: Table A; Target 21639; HLA-A*03:01; DMRT1; ENSG00000137090; CTA
GASDLGAGSKK

SEQ ID NO: 21640 - protein, 11 aa, Homo sapiens
  misc_feature: Table A; Target 21640; HLA-A*03:02; DMRT1; ENSG00000137090; CTA
GASDLGAGSKK

SEQ ID NO: 21641 - protein, 11 aa, Homo sapiens
  misc_feature: Table A; Target 21641; HLA-A*11:01; DMRT1; ENSG00000137090; CTA
GASDLGAGSKK

SEQ ID NO: 21642 - protein, 11 aa, Homo sapiens
  misc_feature: Table A; Target 21642; HLA-B*27:02; DMRT1; ENSG00000137090; CTA
GASDLGAGSKK

SEQ ID NO: 21643 - protein, 11 aa, Homo sapiens
  misc_feature: Table A; Target 21643; HLA-B*27:05; DMRT1; ENSG00000137090; CTA
GASDLGAGSKK

SEQ ID NO: 21644 - protein, 9 aa, Homo sapiens
  misc_feature: Table A; Target 21644; HLA-B*49:01; DMRT1; ENSG00000137090; CTA
GEVGNPLGG

SEQ ID NO: 21645 - protein, 9 aa, Homo sapiens
  misc_feature: Table A; Target 21645; HLA-C*16:04; DMRT1; ENSG00000137090; CTA
GEVGNPLGG

SEQ ID NO: 21646 - protein, 10 aa, Homo sapiens
  misc_feature: Table A; Target 21646; HLA-B*27:05; DMRT1; ENSG00000137090; CTA
GEVGNPLGGS

SEQ ID NO: 21647 - protein, 11 aa, Homo sapiens
  misc_feature: Table A; Target 21647; HLA-B*39:01; DMRT1; ENSG00000137090; CTA
GEVGNPLGGSP

SEQ ID NO: 21648 - protein, 11 aa, Homo sapiens
  misc_feature: Table A; Target 21648; HLA-B*40:02; DMRT1; ENSG00000137090; CTA
GEVGNPLGGSP

SEQ ID NO: 21649 - protein, 11 aa, Homo sapiens
  misc_feature: Table A; Target 21649; HLA-C*16:04; DMRT1; ENSG00000137090; CTA
GEVGNPLGGSP

SEQ ID NO: 21650 - protein, 9 aa, Homo sapiens
  misc_feature: Table A; Target 21650; HLA-A*32:01; DMRT1; ENSG00000137090; CTA
GGSPVKNSL

SEQ ID NO: 21651 - protein, 9 aa, Homo sapiens
  misc_feature: Table A; Target 21651; HLA-B*07:02; DMRT1; ENSG00000137090; CTA
GGSPVKNSL

SEQ ID NO: 21652 - protein, 9 aa, Homo sapiens
  misc_feature: Table A; Target 21652; HLA-B*08:01; DMRT1; ENSG00000137090; CTA
GGSPVKNSL

SEQ ID NO: 21653 - protein, 9 aa, Homo sapiens
  misc_feature: Table A; Target 21653; HLA-B*13:02; DMRT1; ENSG00000137090; CTA
GGSPVKNSL

SEQ ID NO: 21654 - protein, 9 aa, Homo sapiens
  misc_feature: Table A; Target 21654; HLA-B*15:03; DMRT1; ENSG00000137090; CTA
GGSPVKNSL

SEQ ID NO: 21655 - protein, 9 aa, Homo sapiens
  misc_feature: Table A; Target 21655; HLA-B*27:05; DMRT1; ENSG00000137090; CTA
GGSPVKNSL

SEQ ID NO: 21656 - protein, 9 aa, Homo sapiens
  misc_feature: Table A; Target 21656; HLA-B*37:01; DMRT1; ENSG00000137090; CTA
GGSPVKNSL

SEQ ID NO: 21657 - protein, 9 aa, Homo sapiens
  misc_feature: Table A; Target 21657; HLA-B*38:01; DMRT1; ENSG00000137090; CTA
GGSPVKNSL

SEQ ID NO: 21658 - protein, 9 aa, Homo sapiens
  misc_feature: Table A; Target 21658; HLA-B*39:01; DMRT1; ENSG00000137090; CTA
GGSPVKNSL

SEQ ID NO: 21659 - protein, 9 aa, Homo sapiens
  misc_feature: Table A; Target 21659; HLA-B*40:01; DMRT1; ENSG00000137090; CTA
GGSPVKNSL

SEQ ID NO: 21660 - protein, 9 aa, Homo sapiens
  misc_feature: Table A; Target 21660; HLA-B*58:01; DMRT1; ENSG00000137090; CTA
GGSPVKNSL

SEQ ID NO: 21661 - protein, 9 aa, Homo sapiens
  misc_feature: Table A; Target 21661; HLA-C*01:02; DMRT1; ENSG00000137090; CTA
GGSPVKNSL

SEQ ID NO: 21662 - protein, 9 aa, Homo sapiens
  misc_feature: Table A; Target 21662; HLA-C*03:03; DMRT1; ENSG00000137090; CTA
GGSPVKNSL

SEQ ID NO: 21663 - protein, 9 aa, Homo sapiens
  misc_feature: Table A; Target 21663; HLA-C*03:04; DMRT1; ENSG00000137090; CTA
GGSPVKNSL

SEQ ID NO: 21664 - protein, 9 aa, Homo sapiens
  misc_feature: Table A; Target 21664; HLA-C*06:02; DMRT1; ENSG00000137090; CTA
GGSPVKNSL

SEQ ID NO: 21665 - protein, 9 aa, Homo sapiens
  misc_feature: Table A; Target 21665; HLA-C*07:02; DMRT1; ENSG00000137090; CTA
GGSPVKNSL

SEQ ID NO: 21666 - protein, 9 aa, Homo sapiens
  misc_feature: Table A; Target 21666; HLA-C*14:02; DMRT1; ENSG00000137090; CTA
GGSPVKNSL

SEQ ID NO: 21667 - protein, 9 aa, Homo sapiens
  misc_feature: Table A; Target 21667; HLA-C*16:01; DMRT1; ENSG00000137090; CTA
GGSPVKNSL

SEQ ID NO: 21668 - protein, 9 aa, Homo sapiens
  misc_feature: Table A; Target 21668; HLA-C*16:02; DMRT1; ENSG00000137090; CTA
GGSPVKNSL

SEQ ID NO: 21669 - protein, 9 aa, Homo sapiens
  misc_feature: Table A; Target 21669; HLA-C*16:04; DMRT1; ENSG00000137090; CTA
GGSPVKNSL

SEQ ID NO: 21670 - protein, 9 aa, Homo sapiens
  misc_feature: Table A; Target 21670; HLA-B*27:05; DMRT1; ENSG00000137090; CTA
GHVENTPDL

SEQ ID NO: 21671 - protein, 9 aa, Homo sapiens
  misc_feature: Table A; Target 21671; HLA-B*38:01; DMRT1; ENSG00000137090; CTA
GHVENTPDL

SEQ ID NO: 21672 - protein, 9 aa, Homo sapiens
  misc_feature: Table A; Target 21672; HLA-B*39:01; DMRT1; ENSG00000137090; CTA
GHVENTPDL

SEQ ID NO: 21673 - protein, 10 aa, Homo sapiens
  misc_feature: Table A; Target 21673; HLA-B*39:01; DMRT1; ENSG00000137090; CTA
GHVENTPDLV

SEQ ID NO: 21674 - protein, 9 aa, Homo sapiens
  misc_feature: Table A; Target 21674; HLA-B*07:02; DMRT1; ENSG00000137090; CTA
GPYVPGQTG

SEQ ID NO: 21675 - protein, 9 aa, Homo sapiens
  misc_feature: Table A; Target 21675; HLA-B*56:01; DMRT1; ENSG00000137090; CTA
GPYVPGQTG

SEQ ID NO: 21676 - protein, 9 aa, Homo sapiens
  misc_feature: Table A; Target 21676; HLA-C*07:02; DMRT1; ENSG00000137090; CTA
GPYVPGQTG

SEQ ID NO: 21677 - protein, 8 aa, Homo sapiens
  misc_feature: Table A; Target 21677; HLA-B*13:02; DMRT1; ENSG00000137090; CTA
GQSVPQFF

SEQ ID NO: 21678 - protein, 9 aa, Homo sapiens
  misc_feature: Table A; Target 21678; HLA-B*13:02; DMRT1; ENSG00000137090; CTA
GQSVPQFFT

SEQ ID NO: 21679 - protein, 10 aa, Homo sapiens
  misc_feature: Table A; Target 21679; HLA-C*16:04; DMRT1; ENSG00000137090; CTA
GQSVPQFFTF

SEQ ID NO: 21680 - protein, 9 aa, Homo sapiens
  misc_feature: Table A; Target 21680; HLA-B*13:02; DMRT1; ENSG00000137090; CTA
GQTGNQWQM

SEQ ID NO: 21681 - protein, 9 aa, Homo sapiens
  misc_feature: Table A; Target 21681; HLA-B*27:05; DMRT1; ENSG00000137090; CTA
GQTGNQWQM

SEQ ID NO: 21682 - protein, 8 aa, Homo sapiens
  misc_feature: Table A; Target 21682; HLA-B*27:05; DMRT1; ENSG00000137090; CTA
GRAGGFGK

SEQ ID NO: 21683 - protein, 8 aa, Homo sapiens
  misc_feature: Table A; Target 21683; HLA-B*08:01; DMRT1; ENSG00000137090; CTA
GSPVKNSL

SEQ ID NO: 21684 - protein, 8 aa, Homo sapiens
  misc_feature: Table A; Target 21684; HLA-C*01:02; DMRT1; ENSG00000137090; CTA
GSPVKNSL

SEQ ID NO: 21685 - protein, 9 aa, Homo sapiens
  misc_feature: Table A; Target 21685; HLA-C*07:06; DMRT1; ENSG00000137090; CTA
GSSAGGSSR

SEQ ID NO: 21686 - protein, 8 aa, Homo sapiens
  misc_feature: Table A; Target 21686; HLA-A*33:01; DMRT1; ENSG00000137090; CTA
HAMSSQYR

SEQ ID NO: 21687 - protein, 8 aa, Homo sapiens
  misc_feature: Table A; Target 21687; HLA-A*33:03; DMRT1; ENSG00000137090; CTA
HAMSSQYR

SEQ ID NO: 21688 - protein, 8 aa, Homo sapiens
  misc_feature: Table A; Target 21688; HLA-C*07:06; DMRT1; ENSG00000137090; CTA
HAMSSQYR

SEQ ID NO: 21689 - protein, 9 aa, Homo sapiens
  misc_feature: Table A; Target 21689; HLA-B*35:01; DMRT1; ENSG00000137090; CTA
HAMSSQYRM

SEQ ID NO: 21690 - protein, 9 aa, Homo sapiens
  misc_feature: Table A; Target 21690; HLA-B*35:03; DMRT1; ENSG00000137090; CTA
HAMSSQYRM

SEQ ID NO: 21691 - protein, 9 aa, Homo sapiens
  misc_feature: Table A; Target 21691; HLA-B*58:01; DMRT1; ENSG00000137090; CTA
HAMSSQYRM

SEQ ID NO: 21692 - protein, 9 aa, Homo sapiens
  misc_feature: Table A; Target 21692; HLA-C*02:02; DMRT1; ENSG00000137090; CTA
HAMSSQYRM

SEQ ID NO: 21693 - protein, 9 aa, Homo sapiens
  misc_feature: Table A; Target 21693; HLA-C*03:03; DMRT1; ENSG00000137090; CTA
HAMSSQYRM

SEQ ID NO: 21694 - protein, 9 aa, Homo sapiens
  misc_feature: Table A; Target 21694; HLA-C*03:04; DMRT1; ENSG00000137090; CTA
HAMSSQYRM

SEQ ID NO: 21695 - protein, 9 aa, Homo sapiens
  misc_feature: Table A; Target 21695; HLA-C*16:01; DMRT1; ENSG00000137090; CTA
HAMSSQYRM

SEQ ID NO: 21696 - protein, 10 aa, Homo sapiens
  misc_feature: Table A; Target 21696; HLA-A*68:01; DMRT1; ENSG00000137090; CTA
HAPGVPPQGR

SEQ ID NO: 21697 - protein, 10 aa, Homo sapiens
  misc_feature: Table A; Target 21697; HLA-C*07:06; DMRT1; ENSG00000137090; CTA
HAPGVPPQGR

SEQ ID NO: 21698 - protein, 8 aa, Homo sapiens
  misc_feature: Table A; Target 21698; HLA-A*11:01; DMRT1; ENSG00000137090; CTA
HGYASPLK

SEQ ID NO: 21699 - protein, 8 aa, Homo sapiens
  misc_feature: Table A; Target 21699; HLA-B*51:01; DMRT1; ENSG00000137090; CTA
HGYASPLK

SEQ ID NO: 21700 - protein, 8 aa, Homo sapiens
  misc_feature: Table A; Target 21700; HLA-C*06:02; DMRT1; ENSG00000137090; CTA
HGYASPLK

SEQ ID NO: 21701 - protein, 9 aa, Homo sapiens
  misc_feature: Table A; Target 21701; HLA-B*13:02; DMRT1; ENSG00000137090; CTA
HGYASPLKG

SEQ ID NO: 21702 - protein, 9 aa, Homo sapiens
  misc_feature: Table A; Target 21702; HLA-C*06:02; DMRT1; ENSG00000137090; CTA
HGYASPLKG

SEQ ID NO: 21703 - protein, 8 aa, Homo sapiens
  misc_feature: Table A; Target 21703; HLA-B*51:01; DMRT1; ENSG00000137090; CTA
HPIPLPSA

SEQ ID NO: 21704 - protein, 8 aa, Homo sapiens
  misc_feature: Table A; Target 21704; HLA-B*54:01; DMRT1; ENSG00000137090; CTA
HPIPLPSA

SEQ ID NO: 21705 - protein, 8 aa, Homo sapiens
  misc_feature: Table A; Target 21705; HLA-B*55:01; DMRT1; ENSG00000137090; CTA
HPIPLPSA

SEQ ID NO: 21706 - protein, 8 aa, Homo sapiens
  misc_feature: Table A; Target 21706; HLA-B*56:01; DMRT1; ENSG00000137090; CTA
HPIPLPSA

SEQ ID NO: 21707 - protein, 9 aa, Homo sapiens
  misc_feature: Table A; Target 21707; HLA-B*35:03; DMRT1; ENSG00000137090; CTA
HPIPLPSAA

SEQ ID NO: 21708 - protein, 9 aa, Homo sapiens
  misc_feature: Table A; Target 21708; HLA-B*54:01; DMRT1; ENSG00000137090; CTA
HPIPLPSAA

SEQ ID NO: 21709 - protein, 9 aa, Homo sapiens
  misc_feature: Table A; Target 21709; HLA-B*55:01; DMRT1; ENSG00000137090; CTA
HPIPLPSAA

SEQ ID NO: 21710 - protein, 9 aa, Homo sapiens
  misc_feature: Table A; Target 21710; HLA-B*56:01; DMRT1; ENSG00000137090; CTA
HPIPLPSAA

SEQ ID NO: 21711 - protein, 11 aa, Homo sapiens
  misc_feature: Table A; Target 21711; HLA-B*35:01; DMRT1; ENSG00000137090; CTA
HPIPLPSAAEL

SEQ ID NO: 21712 - protein, 11 aa, Homo sapiens
  misc_feature: Table A; Target 21712; HLA-B*35:03; DMRT1; ENSG00000137090; CTA
HPIPLPSAAEL

SEQ ID NO: 21713 - protein, 9 aa, Homo sapiens
  misc_feature: Table A; Target 21713; HLA-A*01:01; DMRT1; ENSG00000137090; CTA
HSYYPPPSY

SEQ ID NO: 21714 - protein, 9 aa, Homo sapiens
  misc_feature: Table A; Target 21714; HLA-A*03:01; DMRT1; ENSG00000137090; CTA
HSYYPPPSY

SEQ ID NO: 21715 - protein, 9 aa, Homo sapiens
  misc_feature: Table A; Target 21715; HLA-A*11:01; DMRT1; ENSG00000137090; CTA
HSYYPPPSY

SEQ ID NO: 21716 - protein, 9 aa, Homo sapiens
  misc_feature: Table A; Target 21716; HLA-A*25:01; DMRT1; ENSG00000137090; CTA
HSYYPPPSY

SEQ ID NO: 21717 - protein, 9 aa, Homo sapiens
  misc_feature: Table A; Target 21717; HLA-A*26:01; DMRT1; ENSG00000137090; CTA
HSYYPPPSY

SEQ ID NO: 21718 - protein, 9 aa, Homo sapiens
  misc_feature: Table A; Target 21718; HLA-A*29:02; DMRT1; ENSG00000137090; CTA
HSYYPPPSY

SEQ ID NO: 21719 - protein, 9 aa, Homo sapiens
  misc_feature: Table A; Target 21719; HLA-A*30:02; DMRT1; ENSG00000137090; CTA
HSYYPPPSY

SEQ ID NO: 21720 - protein, 9 aa, Homo sapiens
  misc_feature: Table A; Target 21720; HLA-A*31:01; DMRT1; ENSG00000137090; CTA
HSYYPPPSY

SEQ ID NO: 21721 - protein, 9 aa, Homo sapiens
  misc_feature: Table A; Target 21721; HLA-A*32:01; DMRT1; ENSG00000137090; CTA
HSYYPPPSY

SEQ ID NO: 21722 - protein, 9 aa, Homo sapiens
  misc_feature: Table A; Target 21722; HLA-A*33:01; DMRT1; ENSG00000137090; CTA
HSYYPPPSY

SEQ ID NO: 21723 - protein, 9 aa, Homo sapiens
  misc_feature: Table A; Target 21723; HLA-A*68:01; DMRT1; ENSG00000137090; CTA
HSYYPPPSY

SEQ ID NO: 21724 - protein, 9 aa, Homo sapiens
  misc_feature: Table A; Target 21724; HLA-B*13:02; DMRT1; ENSG00000137090; CTA
HSYYPPPSY

SEQ ID NO: 21725 - protein, 9 aa, Homo sapiens
  misc_feature: Table A; Target 21725; HLA-B*15:01; DMRT1; ENSG00000137090; CTA
HSYYPPPSY

SEQ ID NO: 21726 - protein, 9 aa, Homo sapiens
  misc_feature: Table A; Target 21726; HLA-B*15:03; DMRT1; ENSG00000137090; CTA
HSYYPPPSY

SEQ ID NO: 21727 - protein, 9 aa, Homo sapiens
  misc_feature: Table A; Target 21727; HLA-B*35:01; DMRT1; ENSG00000137090; CTA
HSYYPPPSY

SEQ ID NO: 21728 - protein, 9 aa, Homo sapiens
  misc_feature: Table A; Target 21728; HLA-B*46:01; DMRT1; ENSG00000137090; CTA
HSYYPPPSY

SEQ ID NO: 21729 - protein, 9 aa, Homo sapiens
  misc_feature: Table A; Target 21729; HLA-B*51:01; DMRT1; ENSG00000137090; CTA
HSYYPPPSY

SEQ ID NO: 21730 - protein, 9 aa, Homo sapiens
  misc_feature: Table A; Target 21730; HLA-B*54:01; DMRT1; ENSG00000137090; CTA
HSYYPPPSY

SEQ ID NO: 21731 - protein, 9 aa, Homo sapiens
  misc_feature: Table A; Target 21731; HLA-B*57:01; DMRT1; ENSG00000137090; CTA
HSYYPPPSY

SEQ ID NO: 21732 - protein, 9 aa, Homo sapiens
  misc_feature: Table A; Target 21732; HLA-B*58:01; DMRT1; ENSG00000137090; CTA
HSYYPPPSY

SEQ ID NO: 21733 - protein, 9 aa, Homo sapiens
  misc_feature: Table A; Target 21733; HLA-C*02:02; DMRT1; ENSG00000137090; CTA
HSYYPPPSY

SEQ ID NO: 21734 - protein, 9 aa, Homo sapiens
  misc_feature: Table A; Target 21734; HLA-C*03:03; DMRT1; ENSG00000137090; CTA
HSYYPPPSY

SEQ ID NO: 21735 - protein, 9 aa, Homo sapiens
  misc_feature: Table A; Target 21735; HLA-C*03:04; DMRT1; ENSG00000137090; CTA
HSYYPPPSY

SEQ ID NO: 21736 - protein, 9 aa, Homo sapiens
  misc_feature: Table A; Target 21736; HLA-C*07:06; DMRT1; ENSG00000137090; CTA
HSYYPPPSY

SEQ ID NO: 21737 - protein, 9 aa, Homo sapiens
  misc_feature: Table A; Target 21737; HLA-C*12:03; DMRT1; ENSG00000137090; CTA
HSYYPPPSY

SEQ ID NO: 21738 - protein, 9 aa, Homo sapiens
  misc_feature: Table A; Target 21738; HLA-C*16:01; DMRT1; ENSG00000137090; CTA
HSYYPPPSY

SEQ ID NO: 21739 - protein, 9 aa, Homo sapiens
  misc_feature: Table A; Target 21739; HLA-C*16:04; DMRT1; ENSG00000137090; CTA
HSYYPPPSY

SEQ ID NO: 21740 - protein, 10 aa, Homo sapiens
  misc_feature: Table A; Target 21740; HLA-A*03:01; DMRT1; ENSG00000137090; CTA
HSYYPPPSYL

SEQ ID NO: 21741 - protein, 10 aa, Homo sapiens
  misc_feature: Table A; Target 21741; HLA-A*68:02; DMRT1; ENSG00000137090; CTA
HSYYPPPSYL

SEQ ID NO: 21742 - protein, 8 aa, Homo sapiens
  misc_feature: Table A; Target 21742; HLA-C*05:01; DMRT1; ENSG00000137090; CTA
HVENTPDL

SEQ ID NO: 21743 - protein, 9 aa, Homo sapiens
  misc_feature: Table A; Target 21743; HLA-C*05:01; DMRT1; ENSG00000137090; CTA
HVENTPDLV

SEQ ID NO: 21744 - protein, 8 aa, Homo sapiens
  misc_feature: Table A; Target 21744; HLA-B*08:01; DMRT1; ENSG00000137090; CTA
IAERQRVM

SEQ ID NO: 21745 - protein, 8 aa, Homo sapiens
  misc_feature: Table A; Target 21745; HLA-C*03:03; DMRT1; ENSG00000137090; CTA
IAERQRVM

SEQ ID NO: 21746 - protein, 8 aa, Homo sapiens
  misc_feature: Table A; Target 21746; HLA-C*03:04; DMRT1; ENSG00000137090; CTA
IAERQRVM

SEQ ID NO: 21747 - protein, 8 aa, Homo sapiens
  misc_feature: Table A; Target 21747; HLA-C*16:01; DMRT1; ENSG00000137090; CTA
IAERQRVM

SEQ ID NO: 21748 - protein, 9 aa, Homo sapiens
  misc_feature: Table A; Target 21748; HLA-A*23:01; DMRT1; ENSG00000137090; CTA
IPLPSAAEL

SEQ ID NO: 21749 - protein, 9 aa, Homo sapiens
  misc_feature: Table A; Target 21749; HLA-B*07:02; DMRT1; ENSG00000137090; CTA
IPLPSAAEL

SEQ ID NO: 21750 - protein, 9 aa, Homo sapiens
  misc_feature: Table A; Target 21750; HLA-B*35:01; DMRT1; ENSG00000137090; CTA
IPLPSAAEL

SEQ ID NO: 21751 - protein, 9 aa, Homo sapiens
  misc_feature: Table A; Target 21751; HLA-B*35:03; DMRT1; ENSG00000137090; CTA
IPLPSAAEL

SEQ ID NO: 21752 - protein, 9 aa, Homo sapiens
  misc_feature: Table A; Target 21752; HLA-B*51:01; DMRT1; ENSG00000137090; CTA
IPLPSAAEL

SEQ ID NO: 21753 - protein, 9 aa, Homo sapiens
  misc_feature: Table A; Target 21753; HLA-B*56:01; DMRT1; ENSG00000137090; CTA
IPLPSAAEL

SEQ ID NO: 21754 - protein, 9 aa, Homo sapiens
  misc_feature: Table A; Target 21754; HLA-C*03:03; DMRT1; ENSG00000137090; CTA
IPLPSAAEL

SEQ ID NO: 21755 - protein, 9 aa, Homo sapiens
  misc_feature: Table A; Target 21755; HLA-C*03:04; DMRT1; ENSG00000137090; CTA
IPLPSAAEL

SEQ ID NO: 21756 - protein, 9 aa, Homo sapiens
  misc_feature: Table A; Target 21756; HLA-C*07:02; DMRT1; ENSG00000137090; CTA
IPLPSAAEL

SEQ ID NO: 21757 - protein, 9 aa, Homo sapiens
  misc_feature: Table A; Target 21757; HLA-C*14:02; DMRT1; ENSG00000137090; CTA
IPLPSAAEL

SEQ ID NO: 21758 - protein, 10 aa, Homo sapiens
  misc_feature: Table A; Target 21758; HLA-B*35:03; DMRT1; ENSG00000137090; CTA
IPLPSAAELL

SEQ ID NO: 21759 - protein, 11 aa, Homo sapiens
  misc_feature: Table A; Target 21759; HLA-A*23:01; DMRT1; ENSG00000137090; CTA
IPLPSAAELLV

SEQ ID NO: 21760 - protein, 11 aa, Homo sapiens
  misc_feature: Table A; Target 21760; HLA-B*51:01; DMRT1; ENSG00000137090; CTA
IPLPSAAELLV

SEQ ID NO: 21761 - protein, 11 aa, Homo sapiens
  misc_feature: Table A; Target 21761; HLA-B*54:01; DMRT1; ENSG00000137090; CTA
IPLPSAAELLV

SEQ ID NO: 21762 - protein, 8 aa, Homo sapiens
  misc_feature: Table A; Target 21762; HLA-C*05:01; DMRT1; ENSG00000137090; CTA
IQDIPAVT

SEQ ID NO: 21763 - protein, 9 aa, Homo sapiens
  misc_feature: Table A; Target 21763; HLA-C*05:01; DMRT1; ENSG00000137090; CTA
IQDIPAVTS

SEQ ID NO: 21764 - protein, 10 aa, Homo sapiens
  misc_feature: Table A; Target 21764; HLA-C*07:06; DMRT1; ENSG00000137090; CTA
IQDIPAVTSR

SEQ ID NO: 21765 - protein, 10 aa, Homo sapiens
  misc_feature: Table A; Target 21765; HLA-B*54:01; DMRT1; ENSG00000137090; CTA
ISHPIPLPSA

SEQ ID NO: 21766 - protein, 9 aa, Homo sapiens
  misc_feature: Table A; Target 21766; HLA-A*32:01; DMRT1; ENSG00000137090; CTA
KASGALVGA

SEQ ID NO: 21767 - protein, 9 aa, Homo sapiens
  misc_feature: Table A; Target 21767; HLA-B*55:01; DMRT1; ENSG00000137090; CTA
KASGALVGA

SEQ ID NO: 21768 - protein, 9 aa, Homo sapiens
  misc_feature: Table A; Target 21768; HLA-B*56:01; DMRT1; ENSG00000137090; CTA
KASGALVGA

SEQ ID NO: 21769 - protein, 9 aa, Homo sapiens
  misc_feature: Table A; Target 21769; HLA-C*16:02; DMRT1; ENSG00000137090; CTA
KASGALVGA

SEQ ID NO: 21770 - protein, 9 aa, Homo sapiens
  misc_feature: Table A; Target 21770; HLA-C*16:01; DMRT1; ENSG00000137090; CTA
KNMENRHAM

SEQ ID NO: 21771 - protein, 9 aa, Homo sapiens
  misc_feature: Table A; Target 21771; HLA-B*07:02; DMRT1; ENSG00000137090; CTA
KPSTPSEAP

SEQ ID NO: 21772 - protein, 10 aa, Homo sapiens
  misc_feature: Table A; Target 21772; HLA-B*39:01; DMRT1; ENSG00000137090; CTA
LAADSASGEV

SEQ ID NO: 21773 - protein, 9 aa, Homo sapiens
  misc_feature: Table A; Target 21773; HLA-A*29:02; DMRT1; ENSG00000137090; CTA
LFPYYNNLY

SEQ ID NO: 21774 - protein, 9 aa, Homo sapiens
  misc_feature: Table A; Target 21774; HLA-A*32:01; DMRT1; ENSG00000137090; CTA
LGAGSKKSP

SEQ ID NO: 21775 - protein, 9 aa, Homo sapiens
  misc_feature: Table A; Target 21775; HLA-B*08:01; DMRT1; ENSG00000137090; CTA
LIAERQRVM

SEQ ID NO: 21776 - protein, 9 aa, Homo sapiens
  misc_feature: Table A; Target 21776; HLA-C*16:01; DMRT1; ENSG00000137090; CTA
LIAERQRVM

SEQ ID NO: 21777 - protein, 8 aa, Homo sapiens
  misc_feature: Table A; Target 21777; HLA-B*35:03; DMRT1; ENSG00000137090; CTA
LPSAAELL

SEQ ID NO: 21778 - protein, 9 aa, Homo sapiens
  misc_feature: Table A; Target 21778; HLA-B*35:03; DMRT1; ENSG00000137090; CTA
LPSAAELLV

SEQ ID NO: 21779 - protein, 9 aa, Homo sapiens
  misc_feature: Table A; Target 21779; HLA-B*51:01; DMRT1; ENSG00000137090; CTA
LPSAAELLV

SEQ ID NO: 21780 - protein, 9 aa, Homo sapiens
  misc_feature: Table A; Target 21780; HLA-B*54:01; DMRT1; ENSG00000137090; CTA
LPSAAELLV

SEQ ID NO: 21781 - protein, 9 aa, Homo sapiens
  misc_feature: Table A; Target 21781; HLA-B*56:01; DMRT1; ENSG00000137090; CTA
LPSAAELLV

SEQ ID NO: 21782 - protein, 10 aa, Homo sapiens
  misc_feature: Table A; Target 21782; HLA-A*03:01; DMRT1; ENSG00000137090; CTA
LSSSSPISNK

SEQ ID NO: 21783 - protein, 10 aa, Homo sapiens
  misc_feature: Table A; Target 21783; HLA-A*03:02; DMRT1; ENSG00000137090; CTA
LSSSSPISNK

SEQ ID NO: 21784 - protein, 10 aa, Homo sapiens
  misc_feature: Table A; Target 21784; HLA-A*11:01; DMRT1; ENSG00000137090; CTA
LSSSSPISNK

SEQ ID NO: 21785 - protein, 10 aa, Homo sapiens
  misc_feature: Table A; Target 21785; HLA-C*14:02; DMRT1; ENSG00000137090; CTA
LVGAASGSSA

SEQ ID NO: 21786 - protein, 8 aa, Homo sapiens
  misc_feature: Table A; Target 21786; HLA-A*30:02; DMRT1; ENSG00000137090; CTA
LVSDSTYY

SEQ ID NO: 21787 - protein, 8 aa, Homo sapiens
  misc_feature: Table A; Target 21787; HLA-B*39:01; DMRT1; ENSG00000137090; CTA
LVSDSTYY

SEQ ID NO: 21788 - protein, 11 aa, Homo sapiens
  misc_feature: Table A; Target 21788; HLA-A*25:01; DMRT1; ENSG00000137090; CTA
LVSDSTYYSSF

SEQ ID NO: 21789 - protein, 9 aa, Homo sapiens
  misc_feature: Table A; Target 21789; HLA-A*24:02; DMRT1; ENSG00000137090; CTA
LYNCPQYSM

SEQ ID NO: 21790 - protein, 9 aa, Homo sapiens
  misc_feature: Table A; Target 21790; HLA-C*14:02; DMRT1; ENSG00000137090; CTA
LYNCPQYSM

SEQ ID NO: 21791 - protein, 8 aa, Homo sapiens
  misc_feature: Table A; Target 21791; HLA-A*33:01; DMRT1; ENSG00000137090; CTA
MAAQVALR

SEQ ID NO: 21792 - protein, 8 aa, Homo sapiens
  misc_feature: Table A; Target 21792; HLA-A*33:03; DMRT1; ENSG00000137090; CTA
MAAQVALR

SEQ ID NO: 21793 - protein, 8 aa, Homo sapiens
  misc_feature: Table A; Target 21793; HLA-A*68:01; DMRT1; ENSG00000137090; CTA
MAAQVALR

SEQ ID NO: 21794 - protein, 8 aa, Homo sapiens
  misc_feature: Table A; Target 21794; HLA-B*27:02; DMRT1; ENSG00000137090; CTA
MAAQVALR

SEQ ID NO: 21795 - protein, 8 aa, Homo sapiens
  misc_feature: Table A; Target 21795; HLA-C*07:06; DMRT1; ENSG00000137090; CTA
MAAQVALR

SEQ ID NO: 21796 - protein, 9 aa, Homo sapiens
  misc_feature: Table A; Target 21796; HLA-A*33:01; DMRT1; ENSG00000137090; CTA
MAAQVALRR

SEQ ID NO: 21797 - protein, 9 aa, Homo sapiens
  misc_feature: Table A; Target 21797; HLA-A*33:03; DMRT1; ENSG00000137090; CTA
MAAQVALRR

SEQ ID NO: 21798 - protein, 9 aa, Homo sapiens
  misc_feature: Table A; Target 21798; HLA-A*68:01; DMRT1; ENSG00000137090; CTA
MAAQVALRR

SEQ ID NO: 21799 - protein, 9 aa, Homo sapiens
  misc_feature: Table A; Target 21799; HLA-A*68:02; DMRT1; ENSG00000137090; CTA
MAAQVALRR

SEQ ID NO: 21800 - protein, 9 aa, Homo sapiens
  misc_feature: Table A; Target 21800; HLA-C*07:06; DMRT1; ENSG00000137090; CTA
MAAQVALRR

SEQ ID NO: 21801 - protein, 8 aa, Homo sapiens
  misc_feature: Table A; Target 21801; HLA-B*54:01; DMRT1; ENSG00000137090; CTA
MALAADSA

SEQ ID NO: 21802 - protein, 11 aa, Homo sapiens
  misc_feature: Table A; Target 21802; HLA-B*18:01; DMRT1; ENSG00000137090; CTA
MENRHAMSSQY

SEQ ID NO: 21803 - protein, 10 aa, Homo sapiens
  misc_feature: Table A; Target 21803; HLA-A*30:02; DMRT1; ENSG00000137090; CTA
MSSQYRMHSY

SEQ ID NO: 21804 - protein, 9 aa, Homo sapiens
  misc_feature: Table A; Target 21804; HLA-A*02:01; DMRT1; ENSG00000137090; CTA
MVIQDIPAV

SEQ ID NO: 21805 - protein, 9 aa, Homo sapiens
  misc_feature: Table A; Target 21805; HLA-A*02:03; DMRT1; ENSG00000137090; CTA
MVIQDIPAV

SEQ ID NO: 21806 - protein, 9 aa, Homo sapiens
  misc_feature: Table A; Target 21806; HLA-A*02:04; DMRT1; ENSG00000137090; CTA
MVIQDIPAV

SEQ ID NO: 21807 - protein, 9 aa, Homo sapiens
  misc_feature: Table A; Target 21807; HLA-A*02:07; DMRT1; ENSG00000137090; CTA
MVIQDIPAV

SEQ ID NO: 21808 - protein, 9 aa, Homo sapiens
  misc_feature: Table A; Target 21808; HLA-A*25:01; DMRT1; ENSG00000137090; CTA
MVIQDIPAV

SEQ ID NO: 21809 - protein, 9 aa, Homo sapiens
  misc_feature: Table A; Target 21809; HLA-A*26:01; DMRT1; ENSG00000137090; CTA
MVIQDIPAV

SEQ ID NO: 21810 - protein, 9 aa, Homo sapiens
  misc_feature: Table A; Target 21810; HLA-A*30:01; DMRT1; ENSG00000137090; CTA
MVIQDIPAV

SEQ ID NO: 21811 - protein, 9 aa, Homo sapiens
  misc_feature: Table A; Target 21811; HLA-A*68:02; DMRT1; ENSG00000137090; CTA
MVIQDIPAV

SEQ ID NO: 21812 - protein, 9 aa, Homo sapiens
  misc_feature: Table A; Target 21812; HLA-B*13:02; DMRT1; ENSG00000137090; CTA
MVIQDIPAV

SEQ ID NO: 21813 - protein, 9 aa, Homo sapiens
  misc_feature: Table A; Target 21813; HLA-B*35:01; DMRT1; ENSG00000137090; CTA
MVIQDIPAV

SEQ ID NO: 21814 - protein, 9 aa, Homo sapiens
  misc_feature: Table A; Target 21814; HLA-B*35:03; DMRT1; ENSG00000137090; CTA
MVIQDIPAV

SEQ ID NO: 21815 - protein, 9 aa, Homo sapiens
  misc_feature: Table A; Target 21815; HLA-B*40:02; DMRT1; ENSG00000137090; CTA
MVIQDIPAV

SEQ ID NO: 21816 - protein, 9 aa, Homo sapiens
  misc_feature: Table A; Target 21816; HLA-B*46:01; DMRT1; ENSG00000137090; CTA
MVIQDIPAV

SEQ ID NO: 21817 - protein, 9 aa, Homo sapiens
  misc_feature: Table A; Target 21817; HLA-B*54:01; DMRT1; ENSG00000137090; CTA
MVIQDIPAV

SEQ ID NO: 21818 - protein, 9 aa, Homo sapiens
  misc_feature: Table A; Target 21818; HLA-B*55:01; DMRT1; ENSG00000137090; CTA
MVIQDIPAV

SEQ ID NO: 21819 - protein, 9 aa, Homo sapiens
  misc_feature: Table A; Target 21819; HLA-B*56:01; DMRT1; ENSG00000137090; CTA
MVIQDIPAV

SEQ ID NO: 21820 - protein, 9 aa, Homo sapiens
  misc_feature: Table A; Target 21820; HLA-B*58:01; DMRT1; ENSG00000137090; CTA
MVIQDIPAV

SEQ ID NO: 21821 - protein, 9 aa, Homo sapiens
  misc_feature: Table A; Target 21821; HLA-C*02:02; DMRT1; ENSG00000137090; CTA
MVIQDIPAV

SEQ ID NO: 21822 - protein, 9 aa, Homo sapiens
  misc_feature: Table A; Target 21822; HLA-C*03:03; DMRT1; ENSG00000137090; CTA
MVIQDIPAV

SEQ ID NO: 21823 - protein, 9 aa, Homo sapiens
  misc_feature: Table A; Target 21823; HLA-C*03:04; DMRT1; ENSG00000137090; CTA
MVIQDIPAV

SEQ ID NO: 21824 - protein, 8 aa, Homo sapiens
  misc_feature: Table A; Target 21824; HLA-C*07:01; DMRT1; ENSG00000137090; CTA
NLYNCPQY

SEQ ID NO: 21825 - protein, 8 aa, Homo sapiens
  misc_feature: Table A; Target 21825; HLA-B*08:01; DMRT1; ENSG00000137090; CTA
NMENRHAM

SEQ ID NO: 21826 - protein, 9 aa, Homo sapiens
  misc_feature: Table A; Target 21826; HLA-C*07:01; DMRT1; ENSG00000137090; CTA
NNGSNPCLM

SEQ ID NO: 21827 - protein, 9 aa, Homo sapiens
  misc_feature: Table A; Target 21827; HLA-A*29:02; DMRT1; ENSG00000137090; CTA
NNLYNCPQY

SEQ ID NO: 21828 - protein, 9 aa, Homo sapiens
  misc_feature: Table A; Target 21828; HLA-C*07:01; DMRT1; ENSG00000137090; CTA
NNLYNCPQY

SEQ ID NO: 21829 - protein, 9 aa, Homo sapiens
  misc_feature: Table A; Target 21829; HLA-B*35:01; DMRT1; ENSG00000137090; CTA
NPLGGSPVK

SEQ ID NO: 21830 - protein, 9 aa, Homo sapiens
  misc_feature: Table A; Target 21830; HLA-B*35:03; DMRT1; ENSG00000137090; CTA
NPLGGSPVK

SEQ ID NO: 21831 - protein, 9 aa, Homo sapiens
  misc_feature: Table A; Target 21831; HLA-B*27:02; DMRT1; ENSG00000137090; CTA
NRHAMSSQY

SEQ ID NO: 21832 - protein, 9 aa, Homo sapiens
  misc_feature: Table A; Target 21832; HLA-B*27:05; DMRT1; ENSG00000137090; CTA
NRHAMSSQY

SEQ ID NO: 21833 - protein, 9 aa, Homo sapiens
  misc_feature: Table A; Target 21833; HLA-C*07:01; DMRT1; ENSG00000137090; CTA
NRHAMSSQY

SEQ ID NO: 21834 - protein, 9 aa, Homo sapiens
  misc_feature: Table A; Target 21834; HLA-C*16:04; DMRT1; ENSG00000137090; CTA
NRHAMSSQY

SEQ ID NO: 21835 - protein, 10 aa, Homo sapiens
  misc_feature: Table A; Target 21835; HLA-A*01:01; DMRT1; ENSG00000137090; CTA
NSLRGLPGPY

SEQ ID NO: 21836 - protein, 10 aa, Homo sapiens
  misc_feature: Table A; Target 21836; HLA-A*30:02; DMRT1; ENSG00000137090; CTA
NSLRGLPGPY

SEQ ID NO: 21837 - protein, 11 aa, Homo sapiens
  misc_feature: Table A; Target 21837; HLA-A*01:01; DMRT1; ENSG00000137090; CTA
NTPDLVSDSTY

SEQ ID NO: 21838 - protein, 11 aa, Homo sapiens
  misc_feature: Table A; Target 21838; HLA-A*25:01; DMRT1; ENSG00000137090; CTA
NTPDLVSDSTY

SEQ ID NO: 21839 - protein, 11 aa, Homo sapiens
  misc_feature: Table A; Target 21839; HLA-A*26:01; DMRT1; ENSG00000137090; CTA
NTPDLVSDSTY

SEQ ID NO: 21840 - protein, 8 aa, Homo sapiens
  misc_feature: Table A; Target 21840; HLA-C*05:01; DMRT1; ENSG00000137090; CTA
PASEPSSF

SEQ ID NO: 21841 - protein, 10 aa, Homo sapiens
  misc_feature: Table A; Target 21841; HLA-C*07:01; DMRT1; ENSG00000137090; CTA
PDLVSDSTYY

SEQ ID NO: 21842 - protein, 8 aa, Homo sapiens
  misc_feature: Table A; Target 21842; HLA-B*18:01; DMRT1; ENSG00000137090; CTA
PEARASVF

SEQ ID NO: 21843 - protein, 8 aa, Homo sapiens
  misc_feature: Table A; Target 21843; HLA-A*03:02; DMRT1; ENSG00000137090; CTA
PLGGSPVK

SEQ ID NO: 21844 - protein, 11 aa, Homo sapiens
  misc_feature: Table A; Target 21844; HLA-C*07:02; DMRT1; ENSG00000137090; CTA
PLGGSPVKNSL

SEQ ID NO: 21845 - protein, 9 aa, Homo sapiens
  misc_feature: Table A; Target 21845; HLA-B*56:01; DMRT1; ENSG00000137090; CTA
PPASVPTTA

SEQ ID NO: 21846 - protein, 10 aa, Homo sapiens
  misc_feature: Table A; Target 21846; HLA-B*56:01; DMRT1; ENSG00000137090; CTA
PPASVPTTAA

SEQ ID NO: 21847 - protein, 11 aa, Homo sapiens
  misc_feature: Table A; Target 21847; HLA-B*57:01; DMRT1; ENSG00000137090; CTA
PSYPEARASVF

SEQ ID NO: 21848 - protein, 11 aa, Homo sapiens
  misc_feature: Table A; Target 21848; HLA-A*23:01; DMRT1; ENSG00000137090; CTA
PYVPGQTGNQW

SEQ ID NO: 21849 - protein, 11 aa, Homo sapiens
  misc_feature: Table A; Target 21849; HLA-A*24:02; DMRT1; ENSG00000137090; CTA
PYVPGQTGNQW

SEQ ID NO: 21850 - protein, 9 aa, Homo sapiens
  misc_feature: Table A; Target 21850; HLA-A*11:01; DMRT1; ENSG00000137090; CTA
QDIPAVTSR

SEQ ID NO: 21851 - protein, 9 aa, Homo sapiens
  misc_feature: Table A; Target 21851; HLA-A*31:01; DMRT1; ENSG00000137090; CTA
QDIPAVTSR

SEQ ID NO: 21852 - protein, 9 aa, Homo sapiens
  misc_feature: Table A; Target 21852; HLA-A*33:01; DMRT1; ENSG00000137090; CTA
QDIPAVTSR

SEQ ID NO: 21853 - protein, 9 aa, Homo sapiens
  misc_feature: Table A; Target 21853; HLA-A*33:03; DMRT1; ENSG00000137090; CTA
QDIPAVTSR

SEQ ID NO: 21854 - protein, 9 aa, Homo sapiens
  misc_feature: Table A; Target 21854; HLA-A*68:01; DMRT1; ENSG00000137090; CTA
QDIPAVTSR

SEQ ID NO: 21855 - protein, 9 aa, Homo sapiens
  misc_feature: Table A; Target 21855; HLA-C*07:06; DMRT1; ENSG00000137090; CTA
QDIPAVTSR

SEQ ID NO: 21856 - protein, 8 aa, Homo sapiens
  misc_feature: Table A; Target 21856; HLA-B*37:01; DMRT1; ENSG00000137090; CTA
QDSGLVSL

SEQ ID NO: 21857 - protein, 9 aa, Homo sapiens
  misc_feature: Table A; Target 21857; HLA-B*18:01; DMRT1; ENSG00000137090; CTA
QEEELGISH

SEQ ID NO: 21858 - protein, 11 aa, Homo sapiens
  misc_feature: Table A; Target 21858; HLA-A*29:02; DMRT1; ENSG00000137090; CTA
QFFTFEDAPSY

SEQ ID NO: 21859 - protein, 11 aa, Homo sapiens
  misc_feature: Table A; Target 21859; HLA-B*07:02; DMRT1; ENSG00000137090; CTA
QPPPASVPTTA

SEQ ID NO: 21860 - protein, 11 aa, Homo sapiens
  misc_feature: Table A; Target 21860; HLA-B*51:01; DMRT1; ENSG00000137090; CTA
QPPPASVPTTA

SEQ ID NO: 21861 - protein, 11 aa, Homo sapiens
  misc_feature: Table A; Target 21861; HLA-B*54:01; DMRT1; ENSG00000137090; CTA
QPPPASVPTTA

SEQ ID NO: 21862 - protein, 11 aa, Homo sapiens
  misc_feature: Table A; Target 21862; HLA-B*55:01; DMRT1; ENSG00000137090; CTA
QPPPASVPTTA

SEQ ID NO: 21863 - protein, 11 aa, Homo sapiens
  misc_feature: Table A; Target 21863; HLA-B*56:01; DMRT1; ENSG00000137090; CTA
QPPPASVPTTA

SEQ ID NO: 21864 - protein, 10 aa, Homo sapiens
  misc_feature: Table A; Target 21864; HLA-B*13:02; DMRT1; ENSG00000137090; CTA
QQAQEEELGI

SEQ ID NO: 21865 - protein, 10 aa, Homo sapiens
  misc_feature: Table A; Target 21865; HLA-B*38:01; DMRT1; ENSG00000137090; CTA
QQAQEEELGI

SEQ ID NO: 21866 - protein, 10 aa, Homo sapiens
  misc_feature: Table A; Target 21866; HLA-B*27:02; DMRT1; ENSG00000137090; CTA
QRVMAAQVAL

SEQ ID NO: 21867 - protein, 10 aa, Homo sapiens
  misc_feature: Table A; Target 21867; HLA-B*27:05; DMRT1; ENSG00000137090; CTA
QRVMAAQVAL

SEQ ID NO: 21868 - protein, 9 aa, Homo sapiens
  misc_feature: Table A; Target 21868; HLA-A*23:01; DMRT1; ENSG00000137090; CTA
QSVPQFFTF

SEQ ID NO: 21869 - protein, 9 aa, Homo sapiens
  misc_feature: Table A; Target 21869; HLA-A*24:02; DMRT1; ENSG00000137090; CTA
QSVPQFFTF

SEQ ID NO: 21870 - protein, 9 aa, Homo sapiens
  misc_feature: Table A; Target 21870; HLA-A*25:01; DMRT1; ENSG00000137090; CTA
QSVPQFFTF

SEQ ID NO: 21871 - protein, 9 aa, Homo sapiens
  misc_feature: Table A; Target 21871; HLA-B*57:01; DMRT1; ENSG00000137090; CTA
QSVPQFFTF

SEQ ID NO: 21872 - protein, 9 aa, Homo sapiens
  misc_feature: Table A; Target 21872; HLA-B*58:01; DMRT1; ENSG00000137090; CTA
QSVPQFFTF

SEQ ID NO: 21873 - protein, 9 aa, Homo sapiens
  misc_feature: Table A; Target 21873; HLA-C*02:02; DMRT1; ENSG00000137090; CTA
QSVPQFFTF

SEQ ID NO: 21874 - protein, 10 aa, Homo sapiens
  misc_feature: Table A; Target 21874; HLA-A*30:01; DMRT1; ENSG00000137090; CTA
RENNGSNPCL

SEQ ID NO: 21875 - protein, 10 aa, Homo sapiens
  misc_feature: Table A; Target 21875; HLA-B*40:01; DMRT1; ENSG00000137090; CTA
RENNGSNPCL

SEQ ID NO: 21876 - protein, 10 aa, Homo sapiens
  misc_feature: Table A; Target 21876; HLA-B*40:02; DMRT1; ENSG00000137090; CTA
RENNGSNPCL

SEQ ID NO: 21877 - protein, 10 aa, Homo sapiens
  misc_feature: Table A; Target 21877; HLA-B*44:02; DMRT1; ENSG00000137090; CTA
RENNGSNPCL

SEQ ID NO: 21878 - protein, 10 aa, Homo sapiens
  misc_feature: Table A; Target 21878; HLA-B*44:03; DMRT1; ENSG00000137090; CTA
RENNGSNPCL

SEQ ID NO: 21879 - protein, 11 aa, Homo sapiens
  misc_feature: Table A; Target 21879; HLA-B*40:01; DMRT1; ENSG00000137090; CTA
RENNGSNPCLM

SEQ ID NO: 21880 - protein, 10 aa, Homo sapiens
  misc_feature: Table A; Target 21880; HLA-A*02:01; DMRT1; ENSG00000137090; CTA
RMVIQDIPAV

SEQ ID NO: 21881 - protein, 9 aa, Homo sapiens
  misc_feature: Table A; Target 21881; HLA-B*13:02; DMRT1; ENSG00000137090; CTA
RQRVMAAQV

SEQ ID NO: 21882 - protein, 9 aa, Homo sapiens
  misc_feature: Table A; Target 21882; HLA-A*02:04; DMRT1; ENSG00000137090; CTA
RVMAAQVAL

SEQ ID NO: 21883 - protein, 9 aa, Homo sapiens
  misc_feature: Table A; Target 21883; HLA-A*03:01; DMRT1; ENSG00000137090; CTA
RVMAAQVAL

SEQ ID NO: 21884 - protein, 9 aa, Homo sapiens
  misc_feature: Table A; Target 21884; HLA-A*03:02; DMRT1; ENSG00000137090; CTA
RVMAAQVAL

SEQ ID NO: 21885 - protein, 9 aa, Homo sapiens
  misc_feature: Table A; Target 21885; HLA-A*11:01; DMRT1; ENSG00000137090; CTA
RVMAAQVAL

SEQ ID NO: 21886 - protein, 9 aa, Homo sapiens
  misc_feature: Table A; Target 21886; HLA-A*23:01; DMRT1; ENSG00000137090; CTA
RVMAAQVAL

SEQ ID NO: 21887 - protein, 9 aa, Homo sapiens
  misc_feature: Table A; Target 21887; HLA-A*31:01; DMRT1; ENSG00000137090; CTA
RVMAAQVAL

SEQ ID NO: 21888 - protein, 9 aa, Homo sapiens
  misc_feature: Table A; Target 21888; HLA-A*32:01; DMRT1; ENSG00000137090; CTA
RVMAAQVAL

SEQ ID NO: 21889 - protein, 9 aa, Homo sapiens
  misc_feature: Table A; Target 21889; HLA-B*07:02; DMRT1; ENSG00000137090; CTA
RVMAAQVAL

SEQ ID NO: 21890 - protein, 9 aa, Homo sapiens
  misc_feature: Table A; Target 21890; HLA-B*08:01; DMRT1; ENSG00000137090; CTA
RVMAAQVAL

SEQ ID NO: 21891 - protein, 9 aa, Homo sapiens
  misc_feature: Table A; Target 21891; HLA-B*13:02; DMRT1; ENSG00000137090; CTA
RVMAAQVAL

SEQ ID NO: 21892 - protein, 9 aa, Homo sapiens
  misc_feature: Table A; Target 21892; HLA-B*15:01; DMRT1; ENSG00000137090; CTA
RVMAAQVAL

SEQ ID NO: 21893 - protein, 9 aa, Homo sapiens
  misc_feature: Table A; Target 21893; HLA-B*15:03; DMRT1; ENSG00000137090; CTA
RVMAAQVAL

SEQ ID NO: 21894 - protein, 9 aa, Homo sapiens
  misc_feature: Table A; Target 21894; HLA-B*46:01; DMRT1; ENSG00000137090; CTA
RVMAAQVAL

SEQ ID NO: 21895 - protein, 9 aa, Homo sapiens
  misc_feature: Table A; Target 21895; HLA-B*56:01; DMRT1; ENSG00000137090; CTA
RVMAAQVAL

SEQ ID NO: 21896 - protein, 9 aa, Homo sapiens
  misc_feature: Table A; Target 21896; HLA-B*58:01; DMRT1; ENSG00000137090; CTA
RVMAAQVAL

SEQ ID NO: 21897 - protein, 9 aa, Homo sapiens
  misc_feature: Table A; Target 21897; HLA-C*01:02; DMRT1; ENSG00000137090; CTA
RVMAAQVAL

SEQ ID NO: 21898 - protein, 9 aa, Homo sapiens
  misc_feature: Table A; Target 21898; HLA-C*03:03; DMRT1; ENSG00000137090; CTA
RVMAAQVAL

SEQ ID NO: 21899 - protein, 9 aa, Homo sapiens
  misc_feature: Table A; Target 21899; HLA-C*03:04; DMRT1; ENSG00000137090; CTA
RVMAAQVAL

SEQ ID NO: 21900 - protein, 9 aa, Homo sapiens
  misc_feature: Table A; Target 21900; HLA-C*07:02; DMRT1; ENSG00000137090; CTA
RVMAAQVAL

SEQ ID NO: 21901 - protein, 9 aa, Homo sapiens
  misc_feature: Table A; Target 21901; HLA-C*14:02; DMRT1; ENSG00000137090; CTA
RVMAAQVAL

SEQ ID NO: 21902 - protein, 10 aa, Homo sapiens
  misc_feature: Table A; Target 21902; HLA-A*03:01; DMRT1; ENSG00000137090; CTA
RVMAAQVALR

SEQ ID NO: 21903 - protein, 10 aa, Homo sapiens
  misc_feature: Table A; Target 21903; HLA-A*03:02; DMRT1; ENSG00000137090; CTA
RVMAAQVALR

SEQ ID NO: 21904 - protein, 10 aa, Homo sapiens
  misc_feature: Table A; Target 21904; HLA-A*11:01; DMRT1; ENSG00000137090; CTA
RVMAAQVALR

SEQ ID NO: 21905 - protein, 10 aa, Homo sapiens
  misc_feature: Table A; Target 21905; HLA-A*31:01; DMRT1; ENSG00000137090; CTA
RVMAAQVALR

SEQ ID NO: 21906 - protein, 10 aa, Homo sapiens
  misc_feature: Table A; Target 21906; HLA-A*33:03; DMRT1; ENSG00000137090; CTA
RVMAAQVALR

SEQ ID NO: 21907 - protein, 10 aa, Homo sapiens
  misc_feature: Table A; Target 21907; HLA-A*68:01; DMRT1; ENSG00000137090; CTA
RVMAAQVALR

SEQ ID NO: 21908 - protein, 10 aa, Homo sapiens
  misc_feature: Table A; Target 21908; HLA-B*27:02; DMRT1; ENSG00000137090; CTA
RVMAAQVALR

SEQ ID NO: 21909 - protein, 10 aa, Homo sapiens
  misc_feature: Table A; Target 21909; HLA-B*57:01; DMRT1; ENSG00000137090; CTA
RVMAAQVALR

SEQ ID NO: 21910 - protein, 10 aa, Homo sapiens
  misc_feature: Table A; Target 21910; HLA-C*07:06; DMRT1; ENSG00000137090; CTA
RVMAAQVALR

SEQ ID NO: 21911 - protein, 11 aa, Homo sapiens
  misc_feature: Table A; Target 21911; HLA-A*03:01; DMRT1; ENSG00000137090; CTA
RVMAAQVALRR

SEQ ID NO: 21912 - protein, 11 aa, Homo sapiens
  misc_feature: Table A; Target 21912; HLA-A*31:01; DMRT1; ENSG00000137090; CTA
RVMAAQVALRR

SEQ ID NO: 21913 - protein, 9 aa, Homo sapiens
  misc_feature: Table A; Target 21913; HLA-A*11:01; DMRT1; ENSG00000137090; CTA
SAAELLVKR

SEQ ID NO: 21914 - protein, 9 aa, Homo sapiens
  misc_feature: Table A; Target 21914; HLA-A*26:01; DMRT1; ENSG00000137090; CTA
SAAELLVKR

SEQ ID NO: 21915 - protein, 9 aa, Homo sapiens
  misc_feature: Table A; Target 21915; HLA-A*31:01; DMRT1; ENSG00000137090; CTA
SAAELLVKR

SEQ ID NO: 21916 - protein, 9 aa, Homo sapiens
  misc_feature: Table A; Target 21916; HLA-A*33:01; DMRT1; ENSG00000137090; CTA
SAAELLVKR

SEQ ID NO: 21917 - protein, 9 aa, Homo sapiens
  misc_feature: Table A; Target 21917; HLA-A*33:03; DMRT1; ENSG00000137090; CTA
SAAELLVKR

SEQ ID NO: 21918 - protein, 9 aa, Homo sapiens
  misc_feature: Table A; Target 21918; HLA-A*68:02; DMRT1; ENSG00000137090; CTA
SAAELLVKR

SEQ ID NO: 21919 - protein, 9 aa, Homo sapiens
  misc_feature: Table A; Target 21919; HLA-C*02:02; DMRT1; ENSG00000137090; CTA
SAAELLVKR

SEQ ID NO: 21920 - protein, 9 aa, Homo sapiens
  misc_feature: Table A; Target 21920; HLA-C*07:06; DMRT1; ENSG00000137090; CTA
SAAELLVKR

SEQ ID NO: 21921 - protein, 9 aa, Homo sapiens
  misc_feature: Table A; Target 21921; HLA-C*16:02; DMRT1; ENSG00000137090; CTA
SAAELLVKR

SEQ ID NO: 21922 - protein, 10 aa, Homo sapiens
  misc_feature: Table A; Target 21922; HLA-A*68:01; DMRT1; ENSG00000137090; CTA
SASGEVGNPL

SEQ ID NO: 21923 - protein, 10 aa, Homo sapiens
  misc_feature: Table A; Target 21923; HLA-B*07:02; DMRT1; ENSG00000137090; CTA
SASGEVGNPL

SEQ ID NO: 21924 - protein, 10 aa, Homo sapiens
  misc_feature: Table A; Target 21924; HLA-B*27:05; DMRT1; ENSG00000137090; CTA
SASGEVGNPL

SEQ ID NO: 21925 - protein, 10 aa, Homo sapiens
  misc_feature: Table A; Target 21925; HLA-B*35:03; DMRT1; ENSG00000137090; CTA
SASGEVGNPL

SEQ ID NO: 21926 - protein, 10 aa, Homo sapiens
  misc_feature: Table A; Target 21926; HLA-B*39:01; DMRT1; ENSG00000137090; CTA
SASGEVGNPL

SEQ ID NO: 21927 - protein, 10 aa, Homo sapiens
  misc_feature: Table A; Target 21927; HLA-B*40:01; DMRT1; ENSG00000137090; CTA
SASGEVGNPL

SEQ ID NO: 21928 - protein, 10 aa, Homo sapiens
  misc_feature: Table A; Target 21928; HLA-C*01:02; DMRT1; ENSG00000137090; CTA
SASGEVGNPL

SEQ ID NO: 21929 - protein, 10 aa, Homo sapiens
  misc_feature: Table A; Target 21929; HLA-C*03:03; DMRT1; ENSG00000137090; CTA
SASGEVGNPL

SEQ ID NO: 21930 - protein, 10 aa, Homo sapiens
  misc_feature: Table A; Target 21930; HLA-C*03:04; DMRT1; ENSG00000137090; CTA
SASGEVGNPL

SEQ ID NO: 21931 - protein, 10 aa, Homo sapiens
  misc_feature: Table A; Target 21931; HLA-C*05:01; DMRT1; ENSG00000137090; CTA
SASGEVGNPL

SEQ ID NO: 21932 - protein, 10 aa, Homo sapiens
  misc_feature: Table A; Target 21932; HLA-C*07:04; DMRT1; ENSG00000137090; CTA
SASGEVGNPL

SEQ ID NO: 21933 - protein, 10 aa, Homo sapiens
  misc_feature: Table A; Target 21933; HLA-C*07:06; DMRT1; ENSG00000137090; CTA
SASGEVGNPL

SEQ ID NO: 21934 - protein, 10 aa, Homo sapiens
  misc_feature: Table A; Target 21934; HLA-C*16:02; DMRT1; ENSG00000137090; CTA
SASGEVGNPL

SEQ ID NO: 21935 - protein, 9 aa, Homo sapiens
  misc_feature: Table A; Target 21935; HLA-B*37:01; DMRT1; ENSG00000137090; CTA
SDSTYYSSF

SEQ ID NO: 21936 - protein, 9 aa, Homo sapiens
  misc_feature: Table A; Target 21936; HLA-A*30:01; DMRT1; ENSG00000137090; CTA
SEAPHAPGV

SEQ ID NO: 21937 - protein, 9 aa, Homo sapiens
  misc_feature: Table A; Target 21937; HLA-B*13:02; DMRT1; ENSG00000137090; CTA
SEAPHAPGV

SEQ ID NO: 21938 - protein, 9 aa, Homo sapiens
  misc_feature: Table A; Target 21938; HLA-B*37:01; DMRT1; ENSG00000137090; CTA
SEAPHAPGV

SEQ ID NO: 21939 - protein, 9 aa, Homo sapiens
  misc_feature: Table A; Target 21939; HLA-B*40:01; DMRT1; ENSG00000137090; CTA
SEAPHAPGV

SEQ ID NO: 21940 - protein, 9 aa, Homo sapiens
  misc_feature: Table A; Target 21940; HLA-B*44:02; DMRT1; ENSG00000137090; CTA
SEAPHAPGV

SEQ ID NO: 21941 - protein, 9 aa, Homo sapiens
  misc_feature: Table A; Target 21941; HLA-B*44:03; DMRT1; ENSG00000137090; CTA
SEAPHAPGV

SEQ ID NO: 21942 - protein, 9 aa, Homo sapiens
  misc_feature: Table A; Target 21942; HLA-B*49:01; DMRT1; ENSG00000137090; CTA
SEAPHAPGV

SEQ ID NO: 21943 - protein, 9 aa, Homo sapiens
  misc_feature: Table A; Target 21943; HLA-C*02:02; DMRT1; ENSG00000137090; CTA
SEAPHAPGV

SEQ ID NO: 21944 - protein, 8 aa, Homo sapiens
  misc_feature: Table A; Target 21944; HLA-B*49:01; DMRT1; ENSG00000137090; CTA
SEPSSFTV

SEQ ID NO: 21945 - protein, 8 aa, Homo sapiens
  misc_feature: Table A; Target 21945; HLA-A*23:01; DMRT1; ENSG00000137090; CTA
SFTVTPVI

SEQ ID NO: 21946 - protein, 10 aa, Homo sapiens
  misc_feature: Table A; Target 21946; HLA-A*29:02; DMRT1; ENSG00000137090; CTA
SFYQPSLFPY

SEQ ID NO: 21947 - protein, 11 aa, Homo sapiens
  misc_feature: Table A; Target 21947; HLA-A*29:02; DMRT1; ENSG00000137090; CTA
SFYQPSLFPYY

SEQ ID NO: 21948 - protein, 11 aa, Homo sapiens
  misc_feature: Table A; Target 21948; HLA-A*30:02; DMRT1; ENSG00000137090; CTA
SFYQPSLFPYY

SEQ ID NO: 21949 - protein, 11 aa, Homo sapiens
  misc_feature: Table A; Target 21949; HLA-C*07:04; DMRT1; ENSG00000137090; CTA
SGALVGAASGS

SEQ ID NO: 21950 - protein, 8 aa, Homo sapiens
  misc_feature: Table A; Target 21950; HLA-C*01:02; DMRT1; ENSG00000137090; CTA
SGEVGNPL

SEQ ID NO: 21951 - protein, 8 aa, Homo sapiens
  misc_feature: Table A; Target 21951; HLA-C*03:04; DMRT1; ENSG00000137090; CTA
SGEVGNPL

SEQ ID NO: 21952 - protein, 8 aa, Homo sapiens
  misc_feature: Table A; Target 21952; HLA-C*05:01; DMRT1; ENSG00000137090; CTA
SGEVGNPL

SEQ ID NO: 21953 - protein, 10 aa, Homo sapiens
  misc_feature: Table A; Target 21953; HLA-C*07:06; DMRT1; ENSG00000137090; CTA
SGSSAGGSSR

SEQ ID NO: 21954 - protein, 9 aa, Homo sapiens
  misc_feature: Table A; Target 21954; HLA-B*54:01; DMRT1; ENSG00000137090; CTA
SGTSQPPPA

SEQ ID NO: 21955 - protein, 9 aa, Homo sapiens
  misc_feature: Table A; Target 21955; HLA-A*02:01; DMRT1; ENSG00000137090; CTA
SLFPYYNNL

SEQ ID NO: 21956 - protein, 9 aa, Homo sapiens
  misc_feature: Table A; Target 21956; HLA-A*02:03; DMRT1; ENSG00000137090; CTA
SLFPYYNNL

SEQ ID NO: 21957 - protein, 9 aa, Homo sapiens
  misc_feature: Table A; Target 21957; HLA-A*02:04; DMRT1; ENSG00000137090; CTA
SLFPYYNNL

SEQ ID NO: 21958 - protein, 9 aa, Homo sapiens
  misc_feature: Table A; Target 21958; HLA-A*02:07; DMRT1; ENSG00000137090; CTA
SLFPYYNNL

SEQ ID NO: 21959 - protein, 10 aa, Homo sapiens
  misc_feature: Table A; Target 21959; HLA-A*29:02; DMRT1; ENSG00000137090; CTA
SLFPYYNNLY

SEQ ID NO: 21960 - protein, 10 aa, Homo sapiens
  misc_feature: Table A; Target 21960; HLA-A*30:02; DMRT1; ENSG00000137090; CTA
SLFPYYNNLY

SEQ ID NO: 21961 - protein, 9 aa, Homo sapiens
  misc_feature: Table A; Target 21961; HLA-A*30:02; DMRT1; ENSG00000137090; CTA
SLRGLPGPY

SEQ ID NO: 21962 - protein, 9 aa, Homo sapiens
  misc_feature: Table A; Target 21962; HLA-B*46:01; DMRT1; ENSG00000137090; CTA
SLRGLPGPY

SEQ ID NO: 21963 - protein, 10 aa, Homo sapiens
  misc_feature: Table A; Target 21963; HLA-A*02:03; DMRT1; ENSG00000137090; CTA
SLRGLPGPYV

SEQ ID NO: 21964 - protein, 11 aa, Homo sapiens
  misc_feature: Table A; Target 21964; HLA-A*03:02; DMRT1; ENSG00000137090; CTA
SLSSSSPISNK

SEQ ID NO: 21965 - protein, 11 aa, Homo sapiens
  misc_feature: Table A; Target 21965; HLA-A*11:01; DMRT1; ENSG00000137090; CTA
SLSSSSPISNK

SEQ ID NO: 21966 - protein, 9 aa, Homo sapiens
  misc_feature: Table A; Target 21966; HLA-B*07:02; DMRT1; ENSG00000137090; CTA
SPISNKSTK

SEQ ID NO: 21967 - protein, 9 aa, Homo sapiens
  misc_feature: Table A; Target 21967; HLA-B*56:01; DMRT1; ENSG00000137090; CTA
SPISNKSTK

SEQ ID NO: 21968 - protein, 9 aa, Homo sapiens
  misc_feature: Table A; Target 21968; HLA-C*07:02; DMRT1; ENSG00000137090; CTA
SPISNKSTK

SEQ ID NO: 21969 - protein, 9 aa, Homo sapiens
  misc_feature: Table A; Target 21969; HLA-C*07:06; DMRT1; ENSG00000137090; CTA
SPISNKSTK

SEQ ID NO: 21970 - protein, 10 aa, Homo sapiens
  misc_feature: Table A; Target 21970; HLA-B*07:02; DMRT1; ENSG00000137090; CTA
SPISNKSTKA

SEQ ID NO: 21971 - protein, 10 aa, Homo sapiens
  misc_feature: Table A; Target 21971; HLA-B*54:01; DMRT1; ENSG00000137090; CTA
SPISNKSTKA

SEQ ID NO: 21972 - protein, 10 aa, Homo sapiens
  misc_feature: Table A; Target 21972; HLA-B*55:01; DMRT1; ENSG00000137090; CTA
SPISNKSTKA

SEQ ID NO: 21973 - protein, 10 aa, Homo sapiens
  misc_feature: Table A; Target 21973; HLA-B*56:01; DMRT1; ENSG00000137090; CTA
SPISNKSTKA

SEQ ID NO: 21974 - protein, 10 aa, Homo sapiens
  misc_feature: Table A; Target 21974; HLA-C*07:02; DMRT1; ENSG00000137090; CTA
SPISNKSTKA

SEQ ID NO: 21975 - protein, 11 aa, Homo sapiens
  misc_feature: Table A; Target 21975; HLA-B*07:02; DMRT1; ENSG00000137090; CTA
SPISNKSTKAV

SEQ ID NO: 21976 - protein, 11 aa, Homo sapiens
  misc_feature: Table A; Target 21976; HLA-B*56:01; DMRT1; ENSG00000137090; CTA
SPISNKSTKAV

SEQ ID NO: 21977 - protein, 11 aa, Homo sapiens
  misc_feature: Table A; Target 21977; HLA-C*07:02; DMRT1; ENSG00000137090; CTA
SPISNKSTKAV

SEQ ID NO: 21978 - protein, 10 aa, Homo sapiens
  misc_feature: Table A; Target 21978; HLA-B*07:02; DMRT1; ENSG00000137090; CTA
SPPSSQDSGL

SEQ ID NO: 21979 - protein, 10 aa, Homo sapiens
  misc_feature: Table A; Target 21979; HLA-B*07:02; DMRT1; ENSG00000137090; CTA
SPVKNSLRGL

SEQ ID NO: 21980 - protein, 9 aa, Homo sapiens
  misc_feature: Table A; Target 21980; HLA-A*02:01; DMRT1; ENSG00000137090; CTA
SQDSGLVSL

SEQ ID NO: 21981 - protein, 9 aa, Homo sapiens
  misc_feature: Table A; Target 21981; HLA-A*02:07; DMRT1; ENSG00000137090; CTA
SQDSGLVSL

SEQ ID NO: 21982 - protein, 9 aa, Homo sapiens
  misc_feature: Table A; Target 21982; HLA-B*13:02; DMRT1; ENSG00000137090; CTA
SQDSGLVSL

SEQ ID NO: 21983 - protein, 9 aa, Homo sapiens
  misc_feature: Table A; Target 21983; HLA-B*27:05; DMRT1; ENSG00000137090; CTA
SQDSGLVSL

SEQ ID NO: 21984 - protein, 9 aa, Homo sapiens
  misc_feature: Table A; Target 21984; HLA-B*35:03; DMRT1; ENSG00000137090; CTA
SQDSGLVSL

SEQ ID NO: 21985 - protein, 9 aa, Homo sapiens
  misc_feature: Table A; Target 21985; HLA-B*38:01; DMRT1; ENSG00000137090; CTA
SQDSGLVSL

SEQ ID NO: 21986 - protein, 9 aa, Homo sapiens
  misc_feature: Table A; Target 21986; HLA-B*39:01; DMRT1; ENSG00000137090; CTA
SQDSGLVSL

SEQ ID NO: 21987 - protein, 9 aa, Homo sapiens
  misc_feature: Table A; Target 21987; HLA-B*40:01; DMRT1; ENSG00000137090; CTA
SQDSGLVSL

SEQ ID NO: 21988 - protein, 9 aa, Homo sapiens
  misc_feature: Table A; Target 21988; HLA-C*05:01; DMRT1; ENSG00000137090; CTA
SQDSGLVSL

SEQ ID NO: 21989 - protein, 9 aa, Homo sapiens
  misc_feature: Table A; Target 21989; HLA-C*07:04; DMRT1; ENSG00000137090; CTA
SQDSGLVSL

SEQ ID NO: 21990 - protein, 8 aa, Homo sapiens
  misc_feature: Table A; Target 21990; HLA-A*30:02; DMRT1; ENSG00000137090; CTA
SQYRMHSY

SEQ ID NO: 21991 - protein, 8 aa, Homo sapiens
  misc_feature: Table A; Target 21991; HLA-A*32:01; DMRT1; ENSG00000137090; CTA
SQYRMHSY

SEQ ID NO: 21992 - protein, 8 aa, Homo sapiens
  misc_feature: Table A; Target 21992; HLA-B*15:01; DMRT1; ENSG00000137090; CTA
SQYRMHSY

SEQ ID NO: 21993 - protein, 8 aa, Homo sapiens
  misc_feature: Table A; Target 21993; HLA-B*15:03; DMRT1; ENSG00000137090; CTA
SQYRMHSY

SEQ ID NO: 21994 - protein, 9 aa, Homo sapiens
  misc_feature: Table A; Target 21994; HLA-A*30:02; DMRT1; ENSG00000137090; CTA
SQYRMHSYY

SEQ ID NO: 21995 - protein, 9 aa, Homo sapiens
  misc_feature: Table A; Target 21995; HLA-B*13:02; DMRT1; ENSG00000137090; CTA
SSFTVTPVI

SEQ ID NO: 21996 - protein, 9 aa, Homo sapiens
  misc_feature: Table A; Target 21996; HLA-B*58:01; DMRT1; ENSG00000137090; CTA
SSFTVTPVI

SEQ ID NO: 21997 - protein, 8 aa, Homo sapiens
  misc_feature: Table A; Target 21997; HLA-C*03:03; DMRT1; ENSG00000137090; CTA
SSFYQPSL

SEQ ID NO: 21998 - protein, 8 aa, Homo sapiens
  misc_feature: Table A; Target 21998; HLA-C*03:04; DMRT1; ENSG00000137090; CTA
SSFYQPSL

SEQ ID NO: 21999 - protein, 9 aa, Homo sapiens
  misc_feature: Table A; Target 21999; HLA-B*57:01; DMRT1; ENSG00000137090; CTA
SSFYQPSLF

SEQ ID NO: 22000 - protein, 9 aa, Homo sapiens
  misc_feature: Table A; Target 22000; HLA-C*02:02; DMRT1; ENSG00000137090; CTA
SSFYQPSLF

SEQ ID NO: 22001 - protein, 9 aa, Homo sapiens
  misc_feature: Table A; Target 22001; HLA-C*12:03; DMRT1; ENSG00000137090; CTA
SSFYQPSLF

SEQ ID NO: 22002 - protein, 9 aa, Homo sapiens
  misc_feature: Table A; Target 22002; HLA-C*01:02; DMRT1; ENSG00000137090; CTA
SSPISNKST

SEQ ID NO: 22003 - protein, 9 aa, Homo sapiens
  misc_feature: Table A; Target 22003; HLA-A*30:02; DMRT1; ENSG00000137090; CTA
SSQYRMHSY

SEQ ID NO: 22004 - protein, 9 aa, Homo sapiens
  misc_feature: Table A; Target 22004; HLA-A*32:01; DMRT1; ENSG00000137090; CTA
SSQYRMHSY

SEQ ID NO: 22005 - protein, 9 aa, Homo sapiens
  misc_feature: Table A; Target 22005; HLA-C*16:01; DMRT1; ENSG00000137090; CTA
SSQYRMHSY

SEQ ID NO: 22006 - protein, 8 aa, Homo sapiens
  misc_feature: Table A; Target 22006; HLA-A*03:02; DMRT1; ENSG00000137090; CTA
SSSPISNK

SEQ ID NO: 22007 - protein, 8 aa, Homo sapiens
  misc_feature: Table A; Target 22007; HLA-A*11:01; DMRT1; ENSG00000137090; CTA
SSSPISNK

SEQ ID NO: 22008 - protein, 11 aa, Homo sapiens
  misc_feature: Table A; Target 22008; HLA-A*03:01; DMRT1; ENSG00000137090; CTA
SSSPISNKSTK

SEQ ID NO: 22009 - protein, 11 aa, Homo sapiens
  misc_feature: Table A; Target 22009; HLA-A*03:02; DMRT1; ENSG00000137090; CTA
SSSPISNKSTK

SEQ ID NO: 22010 - protein, 11 aa, Homo sapiens
  misc_feature: Table A; Target 22010; HLA-A*11:01; DMRT1; ENSG00000137090; CTA
SSSPISNKSTK

SEQ ID NO: 22011 - protein, 11 aa, Homo sapiens
  misc_feature: Table A; Target 22011; HLA-A*31:01; DMRT1; ENSG00000137090; CTA
SSSPISNKSTK

SEQ ID NO: 22012 - protein, 11 aa, Homo sapiens
  misc_feature: Table A; Target 22012; HLA-A*68:01; DMRT1; ENSG00000137090; CTA
SSSPISNKSTK

SEQ ID NO: 22013 - protein, 9 aa, Homo sapiens
  misc_feature: Table A; Target 22013; HLA-A*03:02; DMRT1; ENSG00000137090; CTA
SSSSPISNK

SEQ ID NO: 22014 - protein, 9 aa, Homo sapiens
  misc_feature: Table A; Target 22014; HLA-A*31:01; DMRT1; ENSG00000137090; CTA
SSSSPISNK

SEQ ID NO: 22015 - protein, 9 aa, Homo sapiens
  misc_feature: Table A; Target 22015; HLA-A*33:03; DMRT1; ENSG00000137090; CTA
SSSSPISNK

SEQ ID NO: 22016 - protein, 9 aa, Homo sapiens
  misc_feature: Table A; Target 22016; HLA-A*68:01; DMRT1; ENSG00000137090; CTA
SSSSPISNK

SEQ ID NO: 22017 - protein, 9 aa, Homo sapiens
  misc_feature: Table A; Target 22017; HLA-B*27:02; DMRT1; ENSG00000137090; CTA
SSSSPISNK

SEQ ID NO: 22018 - protein, 9 aa, Homo sapiens
  misc_feature: Table A; Target 22018; HLA-B*27:05; DMRT1; ENSG00000137090; CTA
SSSSPISNK

SEQ ID NO: 22019 - protein, 9 aa, Homo sapiens
  misc_feature: Table A; Target 22019; HLA-C*06:02; DMRT1; ENSG00000137090; CTA
SSSSPISNK

SEQ ID NO: 22020 - protein, 9 aa, Homo sapiens
  misc_feature: Table A; Target 22020; HLA-C*07:06; DMRT1; ENSG00000137090; CTA
SSSSPISNK

SEQ ID NO: 22021 - protein, 9 aa, Homo sapiens
  misc_feature: Table A; Target 22021; HLA-A*26:01; DMRT1; ENSG00000137090; CTA
SVFSPPSSQ

SEQ ID NO: 22022 - protein, 9 aa, Homo sapiens
  misc_feature: Table A; Target 22022; HLA-A*31:01; DMRT1; ENSG00000137090; CTA
SVFSPPSSQ

SEQ ID NO: 22023 - protein, 10 aa, Homo sapiens
  misc_feature: Table A; Target 22023; HLA-A*23:01; DMRT1; ENSG00000137090; CTA
SYLGQSVPQF

SEQ ID NO: 22024 - protein, 10 aa, Homo sapiens
  misc_feature: Table A; Target 22024; HLA-A*24:02; DMRT1; ENSG00000137090; CTA
SYLGQSVPQF

SEQ ID NO: 22025 - protein, 11 aa, Homo sapiens
  misc_feature: Table A; Target 22025; HLA-A*23:01; DMRT1; ENSG00000137090; CTA
SYLGQSVPQFF

SEQ ID NO: 22026 - protein, 11 aa, Homo sapiens
  misc_feature: Table A; Target 22026; HLA-A*24:02; DMRT1; ENSG00000137090; CTA
SYLGQSVPQFF

SEQ ID NO: 22027 - protein, 9 aa, Homo sapiens
  misc_feature: Table A; Target 22027; HLA-C*01:02; DMRT1; ENSG00000137090; CTA
SYPEARASV

SEQ ID NO: 22028 - protein, 9 aa, Homo sapiens
  misc_feature: Table A; Target 22028; HLA-C*14:02; DMRT1; ENSG00000137090; CTA
SYPEARASV

SEQ ID NO: 22029 - protein, 10 aa, Homo sapiens
  misc_feature: Table A; Target 22029; HLA-A*23:01; DMRT1; ENSG00000137090; CTA
SYPEARASVF

SEQ ID NO: 22030 - protein, 10 aa, Homo sapiens
  misc_feature: Table A; Target 22030; HLA-A*24:02; DMRT1; ENSG00000137090; CTA
SYPEARASVF

SEQ ID NO: 22031 - protein, 10 aa, Homo sapiens
  misc_feature: Table A; Target 22031; HLA-C*01:02; DMRT1; ENSG00000137090; CTA
SYPEARASVF

SEQ ID NO: 22032 - protein, 10 aa, Homo sapiens
  misc_feature: Table A; Target 22032; HLA-C*14:02; DMRT1; ENSG00000137090; CTA
SYPEARASVF

SEQ ID NO: 22033 - protein, 8 aa, Homo sapiens
  misc_feature: Table A; Target 22033; HLA-A*23:01; DMRT1; ENSG00000137090; CTA
SYYPPPSY

SEQ ID NO: 22034 - protein, 8 aa, Homo sapiens
  misc_feature: Table A; Target 22034; HLA-A*29:02; DMRT1; ENSG00000137090; CTA
SYYPPPSY

SEQ ID NO: 22035 - protein, 8 aa, Homo sapiens
  misc_feature: Table A; Target 22035; HLA-A*30:02; DMRT1; ENSG00000137090; CTA
SYYPPPSY

SEQ ID NO: 22036 - protein, 8 aa, Homo sapiens
  misc_feature: Table A; Target 22036; HLA-A*32:01; DMRT1; ENSG00000137090; CTA
SYYPPPSY

SEQ ID NO: 22037 - protein, 8 aa, Homo sapiens
  misc_feature: Table A; Target 22037; HLA-B*15:03; DMRT1; ENSG00000137090; CTA
SYYPPPSY

SEQ ID NO: 22038 - protein, 8 aa, Homo sapiens
  misc_feature: Table A; Target 22038; HLA-B*39:01; DMRT1; ENSG00000137090; CTA
SYYPPPSY

SEQ ID NO: 22039 - protein, 8 aa, Homo sapiens
  misc_feature: Table A; Target 22039; HLA-C*14:02; DMRT1; ENSG00000137090; CTA
SYYPPPSY

SEQ ID NO: 22040 - protein, 9 aa, Homo sapiens
  misc_feature: Table A; Target 22040; HLA-A*23:01; DMRT1; ENSG00000137090; CTA
SYYPPPSYL

SEQ ID NO: 22041 - protein, 9 aa, Homo sapiens
  misc_feature: Table A; Target 22041; HLA-A*24:02; DMRT1; ENSG00000137090; CTA
SYYPPPSYL

SEQ ID NO: 22042 - protein, 9 aa, Homo sapiens
  misc_feature: Table A; Target 22042; HLA-A*29:02; DMRT1; ENSG00000137090; CTA
SYYPPPSYL

SEQ ID NO: 22043 - protein, 9 aa, Homo sapiens
  misc_feature: Table A; Target 22043; HLA-A*30:02; DMRT1; ENSG00000137090; CTA
SYYPPPSYL

SEQ ID NO: 22044 - protein, 9 aa, Homo sapiens
  misc_feature: Table A; Target 22044; HLA-A*31:01; DMRT1; ENSG00000137090; CTA
SYYPPPSYL

SEQ ID NO: 22045 - protein, 9 aa, Homo sapiens
  misc_feature: Table A; Target 22045; HLA-B*07:02; DMRT1; ENSG00000137090; CTA
SYYPPPSYL

SEQ ID NO: 22046 - protein, 9 aa, Homo sapiens
  misc_feature: Table A; Target 22046; HLA-C*04:01; DMRT1; ENSG00000137090; CTA
SYYPPPSYL

SEQ ID NO: 22047 - protein, 9 aa, Homo sapiens
  misc_feature: Table A; Target 22047; HLA-C*12:03; DMRT1; ENSG00000137090; CTA
SYYPPPSYL

SEQ ID NO: 22048 - protein, 9 aa, Homo sapiens
  misc_feature: Table A; Target 22048; HLA-C*14:02; DMRT1; ENSG00000137090; CTA
SYYPPPSYL

SEQ ID NO: 22049 - protein, 9 aa, Homo sapiens
  misc_feature: Table A; Target 22049; HLA-C*03:04; DMRT1; ENSG00000137090; CTA
TAASEGRMV

SEQ ID NO: 22050 - protein, 9 aa, Homo sapiens
  misc_feature: Table A; Target 22050; HLA-C*16:01; DMRT1; ENSG00000137090; CTA
TAASEGRMV

SEQ ID NO: 22051 - protein, 9 aa, Homo sapiens
  misc_feature: Table A; Target 22051; HLA-C*16:02; DMRT1; ENSG00000137090; CTA
TAASEGRMV

SEQ ID NO: 22052 - protein, 10 aa, Homo sapiens
  misc_feature: Table A; Target 22052; HLA-C*16:01; DMRT1; ENSG00000137090; CTA
TAASEGRMVI

SEQ ID NO: 22053 - protein, 11 aa, Homo sapiens
  misc_feature: Table A; Target 22053; HLA-C*06:02; DMRT1; ENSG00000137090; CTA
TECSGTSQPPP

SEQ ID NO: 22054 - protein, 8 aa, Homo sapiens
  misc_feature: Table A; Target 22054; HLA-C*14:02; DMRT1; ENSG00000137090; CTA
TFEDAPSY

SEQ ID NO: 22055 - protein, 10 aa, Homo sapiens
  misc_feature: Table A; Target 22055; HLA-A*01:01; DMRT1; ENSG00000137090; CTA
TPDLVSDSTY

SEQ ID NO: 22056 - protein, 10 aa, Homo sapiens
  misc_feature: Table A; Target 22056; HLA-B*35:01; DMRT1; ENSG00000137090; CTA
TPDLVSDSTY

SEQ ID NO: 22057 - protein, 10 aa, Homo sapiens
  misc_feature: Table A; Target 22057; HLA-B*55:01; DMRT1; ENSG00000137090; CTA
TPDLVSDSTY

SEQ ID NO: 22058 - protein, 10 aa, Homo sapiens
  misc_feature: Table A; Target 22058; HLA-C*03:03; DMRT1; ENSG00000137090; CTA
TPDLVSDSTY

SEQ ID NO: 22059 - protein, 11 aa, Homo sapiens
  misc_feature: Table A; Target 22059; HLA-A*01:01; DMRT1; ENSG00000137090; CTA
TPDLVSDSTYY

SEQ ID NO: 22060 - protein, 11 aa, Homo sapiens
  misc_feature: Table A; Target 22060; HLA-B*35:01; DMRT1; ENSG00000137090; CTA
TPDLVSDSTYY

SEQ ID NO: 22061 - protein, 11 aa, Homo sapiens
  misc_feature: Table A; Target 22061; HLA-B*55:01; DMRT1; ENSG00000137090; CTA
TPDLVSDSTYY

SEQ ID NO: 22062 - protein, 11 aa, Homo sapiens
  misc_feature: Table A; Target 22062; HLA-C*03:03; DMRT1; ENSG00000137090; CTA
TPDLVSDSTYY

SEQ ID NO: 22063 - protein, 9 aa, Homo sapiens
  misc_feature: Table A; Target 22063; HLA-A*02:03; DMRT1; ENSG00000137090; CTA
TSQPPPASV

SEQ ID NO: 22064 - protein, 9 aa, Homo sapiens
  misc_feature: Table A; Target 22064; HLA-A*32:01; DMRT1; ENSG00000137090; CTA
TSQPPPASV

SEQ ID NO: 22065 - protein, 9 aa, Homo sapiens
  misc_feature: Table A; Target 22065; HLA-B*46:01; DMRT1; ENSG00000137090; CTA
TSQPPPASV

SEQ ID NO: 22066 - protein, 9 aa, Homo sapiens
  misc_feature: Table A; Target 22066; HLA-B*56:01; DMRT1; ENSG00000137090; CTA
TSQPPPASV

SEQ ID NO: 22067 - protein, 9 aa, Homo sapiens
  misc_feature: Table A; Target 22067; HLA-C*01:02; DMRT1; ENSG00000137090; CTA
TSQPPPASV

SEQ ID NO: 22068 - protein, 9 aa, Homo sapiens
  misc_feature: Table A; Target 22068; HLA-C*03:03; DMRT1; ENSG00000137090; CTA
TSQPPPASV

SEQ ID NO: 22069 - protein, 9 aa, Homo sapiens
  misc_feature: Table A; Target 22069; HLA-C*03:04; DMRT1; ENSG00000137090; CTA
TSQPPPASV

SEQ ID NO: 22070 - protein, 9 aa, Homo sapiens
  misc_feature: Table A; Target 22070; HLA-C*05:01; DMRT1; ENSG00000137090; CTA
TSQPPPASV

SEQ ID NO: 22071 - protein, 9 aa, Homo sapiens
  misc_feature: Table A; Target 22071; HLA-C*06:02; DMRT1; ENSG00000137090; CTA
TSQPPPASV

SEQ ID NO: 22072 - protein, 9 aa, Homo sapiens
  misc_feature: Table A; Target 22072; HLA-C*12:03; DMRT1; ENSG00000137090; CTA
TSQPPPASV

SEQ ID NO: 22073 - protein, 9 aa, Homo sapiens
  misc_feature: Table A; Target 22073; HLA-C*16:02; DMRT1; ENSG00000137090; CTA
TSQPPPASV

SEQ ID NO: 22074 - protein, 10 aa, Homo sapiens
  misc_feature: Table A; Target 22074; HLA-B*27:05; DMRT1; ENSG00000137090; CTA
TVTPVIEEDE

SEQ ID NO: 22075 - protein, 8 aa, Homo sapiens
  misc_feature: Table A; Target 22075; HLA-B*49:01; DMRT1; ENSG00000137090; CTA
VENTPDLV

SEQ ID NO: 22076 - protein, 9 aa, Homo sapiens
  misc_feature: Table A; Target 22076; HLA-B*46:01; DMRT1; ENSG00000137090; CTA
VGAASGSSA

SEQ ID NO: 22077 - protein, 9 aa, Homo sapiens
  misc_feature: Table A; Target 22077; HLA-C*01:02; DMRT1; ENSG00000137090; CTA
VGAASGSSA

SEQ ID NO: 22078 - protein, 9 aa, Homo sapiens
  misc_feature: Table A; Target 22078; HLA-C*03:03; DMRT1; ENSG00000137090; CTA
VGAASGSSA

SEQ ID NO: 22079 - protein, 9 aa, Homo sapiens
  misc_feature: Table A; Target 22079; HLA-C*03:04; DMRT1; ENSG00000137090; CTA
VGAASGSSA

SEQ ID NO: 22080 - protein, 9 aa, Homo sapiens
  misc_feature: Table A; Target 22080; HLA-C*14:02; DMRT1; ENSG00000137090; CTA
VGAASGSSA

SEQ ID NO: 22081 - protein, 11 aa, Homo sapiens
  misc_feature: Table A; Target 22081; HLA-C*07:02; DMRT1; ENSG00000137090; CTA
VGAASGSSAGG

SEQ ID NO: 22082 - protein, 10 aa, Homo sapiens
  misc_feature: Table A; Target 22082; HLA-A*02:03; DMRT1; ENSG00000137090; CTA
VGNPLGGSPV

SEQ ID NO: 22083 - protein, 10 aa, Homo sapiens
  misc_feature: Table A; Target 22083; HLA-B*39:01; DMRT1; ENSG00000137090; CTA
VGNPLGGSPV

SEQ ID NO: 22084 - protein, 10 aa, Homo sapiens
  misc_feature: Table A; Target 22084; HLA-B*46:01; DMRT1; ENSG00000137090; CTA
VGNPLGGSPV

SEQ ID NO: 22085 - protein, 10 aa, Homo sapiens
  misc_feature: Table A; Target 22085; HLA-C*01:02; DMRT1; ENSG00000137090; CTA
VGNPLGGSPV

SEQ ID NO: 22086 - protein, 10 aa, Homo sapiens
  misc_feature: Table A; Target 22086; HLA-C*03:03; DMRT1; ENSG00000137090; CTA
VGNPLGGSPV

SEQ ID NO: 22087 - protein, 10 aa, Homo sapiens
  misc_feature: Table A; Target 22087; HLA-C*03:04; DMRT1; ENSG00000137090; CTA
VGNPLGGSPV

SEQ ID NO: 22088 - protein, 10 aa, Homo sapiens
  misc_feature: Table A; Target 22088; HLA-C*04:01; DMRT1; ENSG00000137090; CTA
VGNPLGGSPV

SEQ ID NO: 22089 - protein, 10 aa, Homo sapiens
  misc_feature: Table A; Target 22089; HLA-C*14:02; DMRT1; ENSG00000137090; CTA
VGNPLGGSPV

SEQ ID NO: 22090 - protein, 11 aa, Homo sapiens
  misc_feature: Table A; Target 22090; HLA-A*03:02; DMRT1; ENSG00000137090; CTA
VGNPLGGSPVK

SEQ ID NO: 22091 - protein, 11 aa, Homo sapiens
  misc_feature: Table A; Target 22091; HLA-A*11:01; DMRT1; ENSG00000137090; CTA
VGNPLGGSPVK

SEQ ID NO: 22092 - protein, 11 aa, Homo sapiens
  misc_feature: Table A; Target 22092; HLA-B*27:02; DMRT1; ENSG00000137090; CTA
VGNPLGGSPVK

SEQ ID NO: 22093 - protein, 11 aa, Homo sapiens
  misc_feature: Table A; Target 22093; HLA-B*27:05; DMRT1; ENSG00000137090; CTA
VGNPLGGSPVK

SEQ ID NO: 22094 - protein, 11 aa, Homo sapiens
  misc_feature: Table A; Target 22094; HLA-C*06:02; DMRT1; ENSG00000137090; CTA
VGNPLGGSPVK

SEQ ID NO: 22095 - protein, 8 aa, Homo sapiens
  misc_feature: Table A; Target 22095; HLA-A*02:01; DMRT1; ENSG00000137090; CTA
VIQDIPAV

SEQ ID NO: 22096 - protein, 8 aa, Homo sapiens
  misc_feature: Table A; Target 22096; HLA-A*02:04; DMRT1; ENSG00000137090; CTA
VIQDIPAV

SEQ ID NO: 22097 - protein, 8 aa, Homo sapiens
  misc_feature: Table A; Target 22097; HLA-B*13:02; DMRT1; ENSG00000137090; CTA
VIQDIPAV

SEQ ID NO: 22098 - protein, 9 aa, Homo sapiens
  misc_feature: Table A; Target 22098; HLA-A*02:03; DMRT1; ENSG00000137090; CTA
VIQDIPAVT

SEQ ID NO: 22099 - protein, 9 aa, Homo sapiens
  misc_feature: Table A; Target 22099; HLA-A*03:02; DMRT1; ENSG00000137090; CTA
VIQDIPAVT

SEQ ID NO: 22100 - protein, 9 aa, Homo sapiens
  misc_feature: Table A; Target 22100; HLA-A*32:01; DMRT1; ENSG00000137090; CTA
VIQDIPAVT

SEQ ID NO: 22101 - protein, 9 aa, Homo sapiens
  misc_feature: Table A; Target 22101; HLA-B*39:01; DMRT1; ENSG00000137090; CTA
VIQDIPAVT

SEQ ID NO: 22102 - protein, 9 aa, Homo sapiens
  misc_feature: Table A; Target 22102; HLA-C*12:03; DMRT1; ENSG00000137090; CTA
VIQDIPAVT

SEQ ID NO: 22103 - protein, 10 aa, Homo sapiens
  misc_feature: Table A; Target 22103; HLA-A*03:02; DMRT1; ENSG00000137090; CTA
VIQDIPAVTS

SEQ ID NO: 22104 - protein, 11 aa, Homo sapiens
  misc_feature: Table A; Target 22104; HLA-A*03:02; DMRT1; ENSG00000137090; CTA
VIQDIPAVTSR

SEQ ID NO: 22105 - protein, 11 aa, Homo sapiens
  misc_feature: Table A; Target 22105; HLA-A*11:01; DMRT1; ENSG00000137090; CTA
VIQDIPAVTSR

SEQ ID NO: 22106 - protein, 11 aa, Homo sapiens
  misc_feature: Table A; Target 22106; HLA-A*31:01; DMRT1; ENSG00000137090; CTA
VIQDIPAVTSR

SEQ ID NO: 22107 - protein, 11 aa, Homo sapiens
  misc_feature: Table A; Target 22107; HLA-A*33:01; DMRT1; ENSG00000137090; CTA
VIQDIPAVTSR

SEQ ID NO: 22108 - protein, 11 aa, Homo sapiens
  misc_feature: Table A; Target 22108; HLA-A*33:03; DMRT1; ENSG00000137090; CTA
VIQDIPAVTSR

SEQ ID NO: 22109 - protein, 11 aa, Homo sapiens
  misc_feature: Table A; Target 22109; HLA-A*68:01; DMRT1; ENSG00000137090; CTA
VIQDIPAVTSR

SEQ ID NO: 22110 - protein, 11 aa, Homo sapiens
  misc_feature: Table A; Target 22110; HLA-C*07:06; DMRT1; ENSG00000137090; CTA
VIQDIPAVTSR

SEQ ID NO: 22111 - protein, 8 aa, Homo sapiens
  misc_feature: Table A; Target 22111; HLA-B*37:01; DMRT1; ENSG00000137090; CTA
VMAAQVAL

SEQ ID NO: 22112 - protein, 9 aa, Homo sapiens
  misc_feature: Table A; Target 22112; HLA-A*02:03; DMRT1; ENSG00000137090; CTA
VMAAQVALR

SEQ ID NO: 22113 - protein, 9 aa, Homo sapiens
  misc_feature: Table A; Target 22113; HLA-A*03:01; DMRT1; ENSG00000137090; CTA
VMAAQVALR

SEQ ID NO: 22114 - protein, 9 aa, Homo sapiens
  misc_feature: Table A; Target 22114; HLA-A*03:02; DMRT1; ENSG00000137090; CTA
VMAAQVALR

SEQ ID NO: 22115 - protein, 9 aa, Homo sapiens
  misc_feature: Table A; Target 22115; HLA-A*31:01; DMRT1; ENSG00000137090; CTA
VMAAQVALR

SEQ ID NO: 22116 - protein, 9 aa, Homo sapiens
  misc_feature: Table A; Target 22116; HLA-A*33:01; DMRT1; ENSG00000137090; CTA
VMAAQVALR

SEQ ID NO: 22117 - protein, 9 aa, Homo sapiens
  misc_feature: Table A; Target 22117; HLA-A*33:03; DMRT1; ENSG00000137090; CTA
VMAAQVALR

SEQ ID NO: 22118 - protein, 9 aa, Homo sapiens
  misc_feature: Table A; Target 22118; HLA-A*68:01; DMRT1; ENSG00000137090; CTA
VMAAQVALR

SEQ ID NO: 22119 - protein, 9 aa, Homo sapiens
  misc_feature: Table A; Target 22119; HLA-B*27:05; DMRT1; ENSG00000137090; CTA
VMAAQVALR

SEQ ID NO: 22120 - protein, 9 aa, Homo sapiens
  misc_feature: Table A; Target 22120; HLA-C*07:06; DMRT1; ENSG00000137090; CTA
VMAAQVALR

SEQ ID NO: 22121 - protein, 10 aa, Homo sapiens
  misc_feature: Table A; Target 22121; HLA-A*03:01; DMRT1; ENSG00000137090; CTA
VMAAQVALRR

SEQ ID NO: 22122 - protein, 10 aa, Homo sapiens
  misc_feature: Table A; Target 22122; HLA-B*07:02; DMRT1; ENSG00000137090; CTA
VPPQGRAGGF

SEQ ID NO: 22123 - protein, 10 aa, Homo sapiens
  misc_feature: Table A; Target 22123; HLA-C*07:02; DMRT1; ENSG00000137090; CTA
VPPQGRAGGF

SEQ ID NO: 22124 - protein, 10 aa, Homo sapiens
  misc_feature: Table A; Target 22124; HLA-A*01:01; DMRT1; ENSG00000137090; CTA
VSDSTYYSSF

SEQ ID NO: 22125 - protein, 10 aa, Homo sapiens
  misc_feature: Table A; Target 22125; HLA-C*05:01; DMRT1; ENSG00000137090; CTA
VSDSTYYSSF

SEQ ID NO: 22126 - protein, 11 aa, Homo sapiens
  misc_feature: Table A; Target 22126; HLA-A*01:01; DMRT1; ENSG00000137090; CTA
VSDSTYYSSFY

SEQ ID NO: 22127 - protein, 9 aa, Homo sapiens
  misc_feature: Table A; Target 22127; HLA-C*03:03; DMRT1; ENSG00000137090; CTA
VSLSSSSPI

SEQ ID NO: 22128 - protein, 9 aa, Homo sapiens
  misc_feature: Table A; Target 22128; HLA-C*03:04; DMRT1; ENSG00000137090; CTA
VSLSSSSPI

SEQ ID NO: 22129 - protein, 9 aa, Homo sapiens
  misc_feature: Table A; Target 22129; HLA-A*23:01; DMRT1; ENSG00000137090; CTA
YLGQSVPQF

SEQ ID NO: 22130 - protein, 9 aa, Homo sapiens
  misc_feature: Table A; Target 22130; HLA-A*25:01; DMRT1; ENSG00000137090; CTA
YLGQSVPQF

SEQ ID NO: 22131 - protein, 9 aa, Homo sapiens
  misc_feature: Table A; Target 22131; HLA-A*26:01; DMRT1; ENSG00000137090; CTA
YLGQSVPQF

SEQ ID NO: 22132 - protein, 10 aa, Homo sapiens
  misc_feature: Table A; Target 22132; HLA-C*07:01; DMRT1; ENSG00000137090; CTA
YNCPQYSMAL

SEQ ID NO: 22133 - protein, 10 aa, Homo sapiens
  misc_feature: Table A; Target 22133; HLA-C*07:02; DMRT1; ENSG00000137090; CTA
YNCPQYSMAL

SEQ ID NO: 22134 - protein, 9 aa, Homo sapiens
  misc_feature: Table A; Target 22134; HLA-B*07:02; DMRT1; ENSG00000137090; CTA
YPEARASVF

SEQ ID NO: 22135 - protein, 9 aa, Homo sapiens
  misc_feature: Table A; Target 22135; HLA-B*08:01; DMRT1; ENSG00000137090; CTA
YPEARASVF

SEQ ID NO: 22136 - protein, 9 aa, Homo sapiens
  misc_feature: Table A; Target 22136; HLA-B*35:01; DMRT1; ENSG00000137090; CTA
YPEARASVF

SEQ ID NO: 22137 - protein, 9 aa, Homo sapiens
  misc_feature: Table A; Target 22137; HLA-B*35:03; DMRT1; ENSG00000137090; CTA
YPEARASVF

SEQ ID NO: 22138 - protein, 9 aa, Homo sapiens
  misc_feature: Table A; Target 22138; HLA-B*37:01; DMRT1; ENSG00000137090; CTA
YPEARASVF

SEQ ID NO: 22139 - protein, 9 aa, Homo sapiens
  misc_feature: Table A; Target 22139; HLA-B*51:01; DMRT1; ENSG00000137090; CTA
YPEARASVF

SEQ ID NO: 22140 - protein, 9 aa, Homo sapiens
  misc_feature: Table A; Target 22140; HLA-B*55:01; DMRT1; ENSG00000137090; CTA
YPEARASVF

SEQ ID NO: 22141 - protein, 9 aa, Homo sapiens
  misc_feature: Table A; Target 22141; HLA-C*03:03; DMRT1; ENSG00000137090; CTA
YPEARASVF

SEQ ID NO: 22142 - protein, 9 aa, Homo sapiens
  misc_feature: Table A; Target 22142; HLA-C*05:01; DMRT1; ENSG00000137090; CTA
YPEARASVF

SEQ ID NO: 22143 - protein, 9 aa, Homo sapiens
  misc_feature: Table A; Target 22143; HLA-C*07:02; DMRT1; ENSG00000137090; CTA
YPEARASVF

SEQ ID NO: 22144 - protein, 9 aa, Homo sapiens
  misc_feature: Table A; Target 22144; HLA-C*14:02; DMRT1; ENSG00000137090; CTA
YPEARASVF

SEQ ID NO: 22145 - protein, 11 aa, Homo sapiens
  misc_feature: Table A; Target 22145; HLA-B*51:01; DMRT1; ENSG00000137090; CTA
YPPPSYLGQSV

SEQ ID NO: 22146 - protein, 11 aa, Homo sapiens
  misc_feature: Table A; Target 22146; HLA-B*54:01; DMRT1; ENSG00000137090; CTA
YPPPSYLGQSV

SEQ ID NO: 22147 - protein, 11 aa, Homo sapiens
  misc_feature: Table A; Target 22147; HLA-B*56:01; DMRT1; ENSG00000137090; CTA
YPPPSYLGQSV

SEQ ID NO: 22148 - protein, 9 aa, Homo sapiens
  misc_feature: Table A; Target 22148; HLA-A*01:01; DMRT1; ENSG00000137090; CTA
YQPSLFPYY

SEQ ID NO: 22149 - protein, 9 aa, Homo sapiens
  misc_feature: Table A; Target 22149; HLA-A*02:07; DMRT1; ENSG00000137090; CTA
YQPSLFPYY

SEQ ID NO: 22150 - protein, 9 aa, Homo sapiens
  misc_feature: Table A; Target 22150; HLA-A*24:02; DMRT1; ENSG00000137090; CTA
YQPSLFPYY

SEQ ID NO: 22151 - protein, 9 aa, Homo sapiens
  misc_feature: Table A; Target 22151; HLA-A*26:01; DMRT1; ENSG00000137090; CTA
YQPSLFPYY

SEQ ID NO: 22152 - protein, 9 aa, Homo sapiens
  misc_feature: Table A; Target 22152; HLA-A*29:02; DMRT1; ENSG00000137090; CTA
YQPSLFPYY

SEQ ID NO: 22153 - protein, 9 aa, Homo sapiens
  misc_feature: Table A; Target 22153; HLA-C*02:02; DMRT1; ENSG00000137090; CTA
YQPSLFPYY

SEQ ID NO: 22154 - protein, 9 aa, Homo sapiens
  misc_feature: Table A; Target 22154; HLA-B*27:05; DMRT1; ENSG00000137090; CTA
YSSFYQPSL

SEQ ID NO: 22155 - protein, 9 aa, Homo sapiens
  misc_feature: Table A; Target 22155; HLA-B*35:03; DMRT1; ENSG00000137090; CTA
YSSFYQPSL

SEQ ID NO: 22156 - protein, 9 aa, Homo sapiens
  misc_feature: Table A; Target 22156; HLA-B*58:01; DMRT1; ENSG00000137090; CTA
YSSFYQPSL

SEQ ID NO: 22157 - protein, 9 aa, Homo sapiens
  misc_feature: Table A; Target 22157; HLA-C*02:02; DMRT1; ENSG00000137090; CTA
YSSFYQPSL

SEQ ID NO: 22158 - protein, 9 aa, Homo sapiens
  misc_feature: Table A; Target 22158; HLA-C*03:03; DMRT1; ENSG00000137090; CTA
YSSFYQPSL

SEQ ID NO: 22159 - protein, 9 aa, Homo sapiens
  misc_feature: Table A; Target 22159; HLA-C*03:04; DMRT1; ENSG00000137090; CTA
YSSFYQPSL

SEQ ID NO: 22160 - protein, 9 aa, Homo sapiens
  misc_feature: Table A; Target 22160; HLA-C*07:04; DMRT1; ENSG00000137090; CTA
YSSFYQPSL

SEQ ID NO: 22161 - protein, 9 aa, Homo sapiens
  misc_feature: Table A; Target 22161; HLA-C*16:01; DMRT1; ENSG00000137090; CTA
YSSFYQPSL

SEQ ID NO: 22162 - protein, 9 aa, Homo sapiens
  misc_feature: Table A; Target 22162; HLA-C*16:02; DMRT1; ENSG00000137090; CTA
YSSFYQPSL

SEQ ID NO: 22163 - protein, 9 aa, Homo sapiens
  misc_feature: Table A; Target 22163; HLA-C*16:04; DMRT1; ENSG00000137090; CTA
YSSFYQPSL

SEQ ID NO: 22164 - protein, 10 aa, Homo sapiens
  misc_feature: Table A; Target 22164; HLA-A*25:01; DMRT1; ENSG00000137090; CTA
YVPGQTGNQW

SEQ ID NO: 22165 - protein, 10 aa, Homo sapiens
  misc_feature: Table A; Target 22165; HLA-A*26:01; DMRT1; ENSG00000137090; CTA
YVPGQTGNQW

SEQ ID NO: 22166 - protein, 10 aa, Homo sapiens
  misc_feature: Table A; Target 22166; HLA-A*32:01; DMRT1; ENSG00000137090; CTA
YVPGQTGNQW

SEQ ID NO: 22167 - protein, 10 aa, Homo sapiens
  misc_feature: Table A; Target 22167; HLA-B*58:01; DMRT1; ENSG00000137090; CTA
YVPGQTGNQW

SEQ ID NO: 22168 - protein, 10 aa, Homo sapiens
  misc_feature: Table A; Target 22168; HLA-C*07:04; DMRT1; ENSG00000137090; CTA
YVPGQTGNQW

SEQ ID NO: 22169 - protein, 10 aa, Homo sapiens
  misc_feature: Table A; Target 22169; HLA-C*07:06; DMRT1; ENSG00000137090; CTA
YVPGQTGNQW

SEQ ID NO: 22170 - protein, 8 aa, Homo sapiens
  misc_feature: Table A; Target 22170; HLA-A*23:01; DMRT1; ENSG00000137090; CTA
YYPPPSYL

SEQ ID NO: 22171 - protein, 8 aa, Homo sapiens
  misc_feature: Table A; Target 22171; HLA-A*24:02; DMRT1; ENSG00000137090; CTA
YYPPPSYL

SEQ ID NO: 22172 - protein, 8 aa, Homo sapiens
  misc_feature: Table A; Target 22172; HLA-C*04:01; DMRT1; ENSG00000137090; CTA
YYPPPSYL

SEQ ID NO: 22173 - protein, 8 aa, Homo sapiens
  misc_feature: Table A; Target 22173; HLA-C*07:02; DMRT1; ENSG00000137090; CTA
YYPPPSYL

SEQ ID NO: 22174 - protein, 9 aa, Homo sapiens
  misc_feature: Table A; Target 22174; HLA-A*24:02; DMRT1; ENSG00000137090; CTA
YYPPPSYLG

SEQ ID NO: 22175 - protein, 10 aa, Homo sapiens
  misc_feature: Table A; Target 22175; HLA-A*23:01; DMRT1; ENSG00000137090; CTA
YYSSFYQPSL

SEQ ID NO: 22176 - protein, 11 aa, Homo sapiens
  misc_feature: Table A; Target 22176; HLA-A*24:02; DMRT1; ENSG00000137090; CTA
YYSSFYQPSLF

SEQ ID NO: 22177 - protein, 9 aa, Homo sapiens
  misc_feature: Table A; Target 22177; HLA-B*54:01; DPPA2; ENSG00000163530; CTA
AARAVQPKA

SEQ ID NO: 22178 - protein, 9 aa, Homo sapiens
  misc_feature: Table A; Target 22178; HLA-B*56:01; DPPA2; ENSG00000163530; CTA
AARAVQPKA

SEQ ID NO: 22179 - protein, 9 aa, Homo sapiens
  misc_feature: Table A; Target 22179; HLA-C*06:02; DPPA2; ENSG00000163530; CTA
AARAVQPKA

SEQ ID NO: 22180 - protein, 9 aa, Homo sapiens
  misc_feature: Table A; Target 22180; HLA-C*16:02; DPPA2; ENSG00000163530; CTA
AARAVQPKA

SEQ ID NO: 22181 - protein, 10 aa, Homo sapiens
  misc_feature: Table A; Target 22181; HLA-B*07:02; DPPA2; ENSG00000163530; CTA
AARAVQPKAL

SEQ ID NO: 22182 - protein, 10 aa, Homo sapiens
  misc_feature: Table A; Target 22182; HLA-B*40:02; DPPA2; ENSG00000163530; CTA
AARAVQPKAL

SEQ ID NO: 22183 - protein, 10 aa, Homo sapiens
  misc_feature: Table A; Target 22183; HLA-C*07:02; DPPA2; ENSG00000163530; CTA
AARAVQPKAL

SEQ ID NO: 22184 - protein, 9 aa, Homo sapiens
  misc_feature: Table A; Target 22184; HLA-A*30:01; DPPA2; ENSG00000163530; CTA
AEETNTVEV

SEQ ID NO: 22185 - protein, 9 aa, Homo sapiens
  misc_feature: Table A; Target 22185; HLA-B*37:01; DPPA2; ENSG00000163530; CTA
AEETNTVEV

SEQ ID NO: 22186 - protein, 9 aa, Homo sapiens
  misc_feature: Table A; Target 22186; HLA-B*40:01; DPPA2; ENSG00000163530; CTA
AEETNTVEV

SEQ ID NO: 22187 - protein, 9 aa, Homo sapiens
  misc_feature: Table A; Target 22187; HLA-B*40:02; DPPA2; ENSG00000163530; CTA
AEETNTVEV

SEQ ID NO: 22188 - protein, 10 aa, Homo sapiens
  misc_feature: Table A; Target 22188; HLA-A*30:01; DPPA2; ENSG00000163530; CTA
AEETNTVEVI

SEQ ID NO: 22189 - protein, 10 aa, Homo sapiens
  misc_feature: Table A; Target 22189; HLA-B*40:01; DPPA2; ENSG00000163530; CTA
AEETNTVEVI

SEQ ID NO: 22190 - protein, 10 aa, Homo sapiens
  misc_feature: Table A; Target 22190; HLA-B*49:01; DPPA2; ENSG00000163530; CTA
AEETNTVEVI

SEQ ID NO: 22191 - protein, 11 aa, Homo sapiens
  misc_feature: Table A; Target 22191; HLA-A*31:01; DPPA2; ENSG00000163530; CTA
AGQAWVPTTHR

SEQ ID NO: 22192 - protein, 9 aa, Homo sapiens
  misc_feature: Table A; Target 22192; HLA-A*02:01; DPPA2; ENSG00000163530; CTA
ALNSCSIPV

SEQ ID NO: 22193 - protein, 9 aa, Homo sapiens
  misc_feature: Table A; Target 22193; HLA-B*55:01; DPPA2; ENSG00000163530; CTA
ALNSCSIPV

SEQ ID NO: 22194 - protein, 11 aa, Homo sapiens
  misc_feature: Table A; Target 22194; HLA-A*02:07; DPPA2; ENSG00000163530; CTA
ALPLPTILPPI

SEQ ID NO: 22195 - protein, 9 aa, Homo sapiens
  misc_feature: Table A; Target 22195; HLA-A*25:01; DPPA2; ENSG00000163530; CTA
APGAMLASW

SEQ ID NO: 22196 - protein, 9 aa, Homo sapiens
  misc_feature: Table A; Target 22196; HLA-B*07:02; DPPA2; ENSG00000163530; CTA
APGAMLASW

SEQ ID NO: 22197 - protein, 9 aa, Homo sapiens
  misc_feature: Table A; Target 22197; HLA-B*35:01; DPPA2; ENSG00000163530; CTA
APGAMLASW

SEQ ID NO: 22198 - protein, 9 aa, Homo sapiens
  misc_feature: Table A; Target 22198; HLA-B*44:02; DPPA2; ENSG00000163530; CTA
APGAMLASW

SEQ ID NO: 22199 - protein, 9 aa, Homo sapiens
  misc_feature: Table A; Target 22199; HLA-B*44:03; DPPA2; ENSG00000163530; CTA
APGAMLASW

SEQ ID NO: 22200 - protein, 9 aa, Homo sapiens
  misc_feature: Table A; Target 22200; HLA-B*56:01; DPPA2; ENSG00000163530; CTA
APGAMLASW

SEQ ID NO: 22201 - protein, 9 aa, Homo sapiens
  misc_feature: Table A; Target 22201; HLA-B*07:02; DPPA2; ENSG00000163530; CTA
APQKARCKI

SEQ ID NO: 22202 - protein, 9 aa, Homo sapiens
  misc_feature: Table A; Target 22202; HLA-C*07:02; DPPA2; ENSG00000163530; CTA
APQKARCKI

SEQ ID NO: 22203 - protein, 9 aa, Homo sapiens
  misc_feature: Table A; Target 22203; HLA-B*07:02; DPPA2; ENSG00000163530; CTA
ARAVQPKAL

SEQ ID NO: 22204 - protein, 9 aa, Homo sapiens
  misc_feature: Table A; Target 22204; HLA-B*27:02; DPPA2; ENSG00000163530; CTA
ARAVQPKAL

SEQ ID NO: 22205 - protein, 9 aa, Homo sapiens
  misc_feature: Table A; Target 22205; HLA-B*27:05; DPPA2; ENSG00000163530; CTA
ARAVQPKAL

SEQ ID NO: 22206 - protein, 9 aa, Homo sapiens
  misc_feature: Table A; Target 22206; HLA-C*06:02; DPPA2; ENSG00000163530; CTA
ARAVQPKAL

SEQ ID NO: 22207 - protein, 9 aa, Homo sapiens
  misc_feature: Table A; Target 22207; HLA-C*07:02; DPPA2; ENSG00000163530; CTA
ARAVQPKAL

SEQ ID NO: 22208 - protein, 9 aa, Homo sapiens
  misc_feature: Table A; Target 22208; HLA-C*12:03; DPPA2; ENSG00000163530; CTA
ARAVQPKAL

SEQ ID NO: 22209 - protein, 9 aa, Homo sapiens
  misc_feature: Table A; Target 22209; HLA-C*16:01; DPPA2; ENSG00000163530; CTA
ARAVQPKAL

SEQ ID NO: 22210 - protein, 9 aa, Homo sapiens
  misc_feature: Table A; Target 22210; HLA-C*16:02; DPPA2; ENSG00000163530; CTA
ARAVQPKAL

SEQ ID NO: 22211 - protein, 9 aa, Homo sapiens
  misc_feature: Table A; Target 22211; HLA-C*16:04; DPPA2; ENSG00000163530; CTA
ARAVQPKAL

SEQ ID NO: 22212 - protein, 8 aa, Homo sapiens
  misc_feature: Table A; Target 22212; HLA-C*06:02; DPPA2; ENSG00000163530; CTA
ARIAARAV

SEQ ID NO: 22213 - protein, 10 aa, Homo sapiens
  misc_feature: Table A; Target 22213; HLA-B*27:05; DPPA2; ENSG00000163530; CTA
ARIAARAVQP

SEQ ID NO: 22214 - protein, 10 aa, Homo sapiens
  misc_feature: Table A; Target 22214; HLA-C*06:02; DPPA2; ENSG00000163530; CTA
ARIAARAVQP

SEQ ID NO: 22215 - protein, 11 aa, Homo sapiens
  misc_feature: Table A; Target 22215; HLA-B*27:05; DPPA2; ENSG00000163530; CTA
ARIAARAVQPK

SEQ ID NO: 22216 - protein, 11 aa, Homo sapiens
  misc_feature: Table A; Target 22216; HLA-C*06:02; DPPA2; ENSG00000163530; CTA
ARIAARAVQPK

SEQ ID NO: 22217 - protein, 9 aa, Homo sapiens
  misc_feature: Table A; Target 22217; HLA-B*08:01; DPPA2; ENSG00000163530; CTA
ARLQRSYEM

SEQ ID NO: 22218 - protein, 9 aa, Homo sapiens
  misc_feature: Table A; Target 22218; HLA-B*27:05; DPPA2; ENSG00000163530; CTA
ARLQRSYEM

SEQ ID NO: 22219 - protein, 9 aa, Homo sapiens
  misc_feature: Table A; Target 22219; HLA-B*37:01; DPPA2; ENSG00000163530; CTA
ARLQRSYEM

SEQ ID NO: 22220 - protein, 9 aa, Homo sapiens
  misc_feature: Table A; Target 22220; HLA-C*16:01; DPPA2; ENSG00000163530; CTA
ARLQRSYEM

SEQ ID NO: 22221 - protein, 9 aa, Homo sapiens
  misc_feature: Table A; Target 22221; HLA-C*16:04; DPPA2; ENSG00000163530; CTA
ARLQRSYEM

SEQ ID NO: 22222 - protein, 9 aa, Homo sapiens
  misc_feature: Table A; Target 22222; HLA-A*31:01; DPPA2; ENSG00000163530; CTA
ASWARIAAR

SEQ ID NO: 22223 - protein, 9 aa, Homo sapiens
  misc_feature: Table A; Target 22223; HLA-A*33:01; DPPA2; ENSG00000163530; CTA
ASWARIAAR

SEQ ID NO: 22224 - protein, 9 aa, Homo sapiens
  misc_feature: Table A; Target 22224; HLA-A*33:03; DPPA2; ENSG00000163530; CTA
ASWARIAAR

SEQ ID NO: 22225 - protein, 9 aa, Homo sapiens
  misc_feature: Table A; Target 22225; HLA-B*57:01; DPPA2; ENSG00000163530; CTA
ASWARIAAR

SEQ ID NO: 22226 - protein, 9 aa, Homo sapiens
  misc_feature: Table A; Target 22226; HLA-C*01:02; DPPA2; ENSG00000163530; CTA
AYPEQRQDM

SEQ ID NO: 22227 - protein, 9 aa, Homo sapiens
  misc_feature: Table A; Target 22227; HLA-C*14:02; DPPA2; ENSG00000163530; CTA
AYPEQRQDM

SEQ ID NO: 22228 - protein, 9 aa, Homo sapiens
  misc_feature: Table A; Target 22228; HLA-B*46:01; DPPA2; ENSG00000163530; CTA
CSIPVSVEA

SEQ ID NO: 22229 - protein, 9 aa, Homo sapiens
  misc_feature: Table A; Target 22229; HLA-B*54:01; DPPA2; ENSG00000163530; CTA
CSIPVSVEA

SEQ ID NO: 22230 - protein, 9 aa, Homo sapiens
  misc_feature: Table A; Target 22230; HLA-B*56:01; DPPA2; ENSG00000163530; CTA
CSIPVSVEA

SEQ ID NO: 22231 - protein, 10 aa, Homo sapiens
  misc_feature: Table A; Target 22231; HLA-B*15:03; DPPA2; ENSG00000163530; CTA
CSIPVSVEAF

SEQ ID NO: 22232 - protein, 10 aa, Homo sapiens
  misc_feature: Table A; Target 22232; HLA-B*57:01; DPPA2; ENSG00000163530; CTA
CSIPVSVEAF

SEQ ID NO: 22233 - protein, 10 aa, Homo sapiens
  misc_feature: Table A; Target 22233; HLA-B*58:01; DPPA2; ENSG00000163530; CTA
CSIPVSVEAF

SEQ ID NO: 22234 - protein, 10 aa, Homo sapiens
  misc_feature: Table A; Target 22234; HLA-B*54:01; DPPA2; ENSG00000163530; CTA
CVVHGRLLSA

SEQ ID NO: 22235 - protein, 9 aa, Homo sapiens
  misc_feature: Table A; Target 22235; HLA-A*33:01; DPPA2; ENSG00000163530; CTA
DANLDSSKK

SEQ ID NO: 22236 - protein, 9 aa, Homo sapiens
  misc_feature: Table A; Target 22236; HLA-B*51:01; DPPA2; ENSG00000163530; CTA
DANLDSSKK

SEQ ID NO: 22237 - protein, 11 aa, Homo sapiens
  misc_feature: Table A; Target 22237; HLA-A*33:01; DPPA2; ENSG00000163530; CTA
DANLDSSKKNF

SEQ ID NO: 22238 - protein, 9 aa, Homo sapiens
  misc_feature: Table A; Target 22238; HLA-A*30:01; DPPA2; ENSG00000163530; CTA
DEESVILTL

SEQ ID NO: 22239 - protein, 9 aa, Homo sapiens
  misc_feature: Table A; Target 22239; HLA-B*18:01; DPPA2; ENSG00000163530; CTA
DEESVILTL

SEQ ID NO: 22240 - protein, 9 aa, Homo sapiens
  misc_feature: Table A; Target 22240; HLA-B*40:01; DPPA2; ENSG00000163530; CTA
DEESVILTL

SEQ ID NO: 22241 - protein, 9 aa, Homo sapiens
  misc_feature: Table A; Target 22241; HLA-B*44:02; DPPA2; ENSG00000163530; CTA
DEESVILTL

SEQ ID NO: 22242 - protein, 9 aa, Homo sapiens
  misc_feature: Table A; Target 22242; HLA-B*44:03; DPPA2; ENSG00000163530; CTA
DEESVILTL

SEQ ID NO: 22243 - protein, 8 aa, Homo sapiens
  misc_feature: Table A; Target 22243; HLA-B*08:01; DPPA2; ENSG00000163530; CTA
DSSKKNFL

SEQ ID NO: 22244 - protein, 8 aa, Homo sapiens
  misc_feature: Table A; Target 22244; HLA-B*08:01; DPPA2; ENSG00000163530; CTA
DTKGWVRL

SEQ ID NO: 22245 - protein, 9 aa, Homo sapiens
  misc_feature: Table A; Target 22245; HLA-A*33:01; DPPA2; ENSG00000163530; CTA
DVKLEKPKK

SEQ ID NO: 22246 - protein, 9 aa, Homo sapiens
  misc_feature: Table A; Target 22246; HLA-B*54:01; DPPA2; ENSG00000163530; CTA
EAFLMQASG

SEQ ID NO: 22247 - protein, 10 aa, Homo sapiens
  misc_feature: Table A; Target 22247; HLA-B*51:01; DPPA2; ENSG00000163530; CTA
EAFLMQASGV

SEQ ID NO: 22248 - protein, 11 aa, Homo sapiens
  misc_feature: Table A; Target 22248; HLA-A*68:01; DPPA2; ENSG00000163530; CTA
EAFLMQASGVR

SEQ ID NO: 22249 - protein, 8 aa, Homo sapiens
  misc_feature: Table A; Target 22249; HLA-A*30:01; DPPA2; ENSG00000163530; CTA
EESVILTL

SEQ ID NO: 22250 - protein, 8 aa, Homo sapiens
  misc_feature: Table A; Target 22250; HLA-B*18:01; DPPA2; ENSG00000163530; CTA
EESVILTL

SEQ ID NO: 22251 - protein, 8 aa, Homo sapiens
  misc_feature: Table A; Target 22251; HLA-B*37:01; DPPA2; ENSG00000163530; CTA
EESVILTL

SEQ ID NO: 22252 - protein, 8 aa, Homo sapiens
  misc_feature: Table A; Target 22252; HLA-B*40:01; DPPA2; ENSG00000163530; CTA
EESVILTL

SEQ ID NO: 22253 - protein, 8 aa, Homo sapiens
  misc_feature: Table A; Target 22253; HLA-B*44:02; DPPA2; ENSG00000163530; CTA
EESVILTL

SEQ ID NO: 22254 - protein, 8 aa, Homo sapiens
  misc_feature: Table A; Target 22254; HLA-B*44:03; DPPA2; ENSG00000163530; CTA
EESVILTL

SEQ ID NO: 22255 - protein, 8 aa, Homo sapiens
  misc_feature: Table A; Target 22255; HLA-B*49:01; DPPA2; ENSG00000163530; CTA
EESVILTL

SEQ ID NO: 22256 - protein, 9 aa, Homo sapiens
  misc_feature: Table A; Target 22256; HLA-A*68:02; DPPA2; ENSG00000163530; CTA
EESVILTLV

SEQ ID NO: 22257 - protein, 9 aa, Homo sapiens
  misc_feature: Table A; Target 22257; HLA-B*18:01; DPPA2; ENSG00000163530; CTA
EESVILTLV

SEQ ID NO: 22258 - protein, 9 aa, Homo sapiens
  misc_feature: Table A; Target 22258; HLA-B*44:02; DPPA2; ENSG00000163530; CTA
EESVILTLV

SEQ ID NO: 22259 - protein, 9 aa, Homo sapiens
  misc_feature: Table A; Target 22259; HLA-B*44:03; DPPA2; ENSG00000163530; CTA
EESVILTLV

SEQ ID NO: 22260 - protein, 9 aa, Homo sapiens
  misc_feature: Table A; Target 22260; HLA-B*49:01; DPPA2; ENSG00000163530; CTA
EESVILTLV

SEQ ID NO: 22261 - protein, 8 aa, Homo sapiens
  misc_feature: Table A; Target 22261; HLA-B*18:01; DPPA2; ENSG00000163530; CTA
EETNTVEV

SEQ ID NO: 22262 - protein, 8 aa, Homo sapiens
  misc_feature: Table A; Target 22262; HLA-B*49:01; DPPA2; ENSG00000163530; CTA
EETNTVEV

SEQ ID NO: 22263 - protein, 9 aa, Homo sapiens
  misc_feature: Table A; Target 22263; HLA-A*30:01; DPPA2; ENSG00000163530; CTA
EETNTVEVI

SEQ ID NO: 22264 - protein, 9 aa, Homo sapiens
  misc_feature: Table A; Target 22264; HLA-A*68:02; DPPA2; ENSG00000163530; CTA
EETNTVEVI

SEQ ID NO: 22265 - protein, 9 aa, Homo sapiens
  misc_feature: Table A; Target 22265; HLA-B*18:01; DPPA2; ENSG00000163530; CTA
EETNTVEVI

SEQ ID NO: 22266 - protein, 9 aa, Homo sapiens
  misc_feature: Table A; Target 22266; HLA-B*38:01; DPPA2; ENSG00000163530; CTA
EETNTVEVI

SEQ ID NO: 22267 - protein, 9 aa, Homo sapiens
  misc_feature: Table A; Target 22267; HLA-B*39:01; DPPA2; ENSG00000163530; CTA
EETNTVEVI

SEQ ID NO: 22268 - protein, 9 aa, Homo sapiens
  misc_feature: Table A; Target 22268; HLA-B*40:01; DPPA2; ENSG00000163530; CTA
EETNTVEVI

SEQ ID NO: 22269 - protein, 9 aa, Homo sapiens
  misc_feature: Table A; Target 22269; HLA-B*44:02; DPPA2; ENSG00000163530; CTA
EETNTVEVI

SEQ ID NO: 22270 - protein, 9 aa, Homo sapiens
  misc_feature: Table A; Target 22270; HLA-B*44:03; DPPA2; ENSG00000163530; CTA
EETNTVEVI

SEQ ID NO: 22271 - protein, 9 aa, Homo sapiens
  misc_feature: Table A; Target 22271; HLA-B*49:01; DPPA2; ENSG00000163530; CTA
EETNTVEVI

SEQ ID NO: 22272 - protein, 9 aa, Homo sapiens
  misc_feature: Table A; Target 22272; HLA-C*16:04; DPPA2; ENSG00000163530; CTA
EETNTVEVI

SEQ ID NO: 22273 - protein, 11 aa, Homo sapiens
  misc_feature: Table A; Target 22273; HLA-B*27:05; DPPA2; ENSG00000163530; CTA
EETNTVEVITS

SEQ ID NO: 22274 - protein, 11 aa, Homo sapiens
  misc_feature: Table A; Target 22274; HLA-B*39:01; DPPA2; ENSG00000163530; CTA
EETNTVEVITS

SEQ ID NO: 22275 - protein, 10 aa, Homo sapiens
  misc_feature: Table A; Target 22275; HLA-A*33:03; DPPA2; ENSG00000163530; CTA
EMSQETRLQR

SEQ ID NO: 22276 - protein, 11 aa, Homo sapiens
  misc_feature: Table A; Target 22276; HLA-A*68:01; DPPA2; ENSG00000163530; CTA
EPSVSSTSDVK

SEQ ID NO: 22277 - protein, 11 aa, Homo sapiens
  misc_feature: Table A; Target 22277; HLA-C*07:06; DPPA2; ENSG00000163530; CTA
EPSVSSTSDVK

SEQ ID NO: 22278 - protein, 8 aa, Homo sapiens
  misc_feature: Table A; Target 22278; HLA-A*03:02; DPPA2; ENSG00000163530; CTA
EQFTAPQK

SEQ ID NO: 22279 - protein, 8 aa, Homo sapiens
  misc_feature: Table A; Target 22279; HLA-A*11:01; DPPA2; ENSG00000163530; CTA
EQFTAPQK

SEQ ID NO: 22280 - protein, 8 aa, Homo sapiens
  misc_feature: Table A; Target 22280; HLA-A*68:01; DPPA2; ENSG00000163530; CTA
EQFTAPQK

SEQ ID NO: 22281 - protein, 8 aa, Homo sapiens
  misc_feature: Table A; Target 22281; HLA-B*13:02; DPPA2; ENSG00000163530; CTA
EQFTAPQK

SEQ ID NO: 22282 - protein, 8 aa, Homo sapiens
  misc_feature: Table A; Target 22282; HLA-B*27:02; DPPA2; ENSG00000163530; CTA
EQFTAPQK

SEQ ID NO: 22283 - protein, 8 aa, Homo sapiens
  misc_feature: Table A; Target 22283; HLA-B*27:05; DPPA2; ENSG00000163530; CTA
EQFTAPQK

SEQ ID NO: 22284 - protein, 8 aa, Homo sapiens
  misc_feature: Table A; Target 22284; HLA-C*06:02; DPPA2; ENSG00000163530; CTA
EQFTAPQK

SEQ ID NO: 22285 - protein, 8 aa, Homo sapiens
  misc_feature: Table A; Target 22285; HLA-C*07:01; DPPA2; ENSG00000163530; CTA
EQFTAPQK

SEQ ID NO: 22286 - protein, 9 aa, Homo sapiens
  misc_feature: Table A; Target 22286; HLA-A*26:01; DPPA2; ENSG00000163530; CTA
EQFTAPQKA

SEQ ID NO: 22287 - protein, 9 aa, Homo sapiens
  misc_feature: Table A; Target 22287; HLA-B*13:02; DPPA2; ENSG00000163530; CTA
EQFTAPQKA

SEQ ID NO: 22288 - protein, 9 aa, Homo sapiens
  misc_feature: Table A; Target 22288; HLA-B*39:01; DPPA2; ENSG00000163530; CTA
EQFTAPQKA

SEQ ID NO: 22289 - protein, 10 aa, Homo sapiens
  misc_feature: Table A; Target 22289; HLA-A*33:03; DPPA2; ENSG00000163530; CTA
EQFTAPQKAR

SEQ ID NO: 22290 - protein, 10 aa, Homo sapiens
  misc_feature: Table A; Target 22290; HLA-A*68:01; DPPA2; ENSG00000163530; CTA
EQFTAPQKAR

SEQ ID NO: 22291 - protein, 10 aa, Homo sapiens
  misc_feature: Table A; Target 22291; HLA-C*07:06; DPPA2; ENSG00000163530; CTA
EQFTAPQKAR

SEQ ID NO: 22292 - protein, 9 aa, Homo sapiens
  misc_feature: Table A; Target 22292; HLA-A*26:01; DPPA2; ENSG00000163530; CTA
EQRQDMPEM

SEQ ID NO: 22293 - protein, 9 aa, Homo sapiens
  misc_feature: Table A; Target 22293; HLA-B*15:01; DPPA2; ENSG00000163530; CTA
EQRQDMPEM

SEQ ID NO: 22294 - protein, 9 aa, Homo sapiens
  misc_feature: Table A; Target 22294; HLA-B*38:01; DPPA2; ENSG00000163530; CTA
ERAEETNTV

SEQ ID NO: 22295 - protein, 9 aa, Homo sapiens
  misc_feature: Table A; Target 22295; HLA-B*39:01; DPPA2; ENSG00000163530; CTA
ERAEETNTV

SEQ ID NO: 22296 - protein, 10 aa, Homo sapiens
  misc_feature: Table A; Target 22296; HLA-A*33:03; DPPA2; ENSG00000163530; CTA
ETNTVEVITS

SEQ ID NO: 22297 - protein, 10 aa, Homo sapiens
  misc_feature: Table A; Target 22297; HLA-A*68:01; DPPA2; ENSG00000163530; CTA
ETNTVEVITS

SEQ ID NO: 22298 - protein, 11 aa, Homo sapiens
  misc_feature: Table A; Target 22298; HLA-A*26:01; DPPA2; ENSG00000163530; CTA
ETNTVEVITSA

SEQ ID NO: 22299 - protein, 11 aa, Homo sapiens
  misc_feature: Table A; Target 22299; HLA-A*68:01; DPPA2; ENSG00000163530; CTA
ETNTVEVITSA

SEQ ID NO: 22300 - protein, 9 aa, Homo sapiens
  misc_feature: Table A; Target 22300; HLA-A*33:03; DPPA2; ENSG00000163530; CTA
ETRLQRCSR

SEQ ID NO: 22301 - protein, 8 aa, Homo sapiens
  misc_feature: Table A; Target 22301; HLA-C*05:01; DPPA2; ENSG00000163530; CTA
EVDDEESV

SEQ ID NO: 22302 - protein, 9 aa, Homo sapiens
  misc_feature: Table A; Target 22302; HLA-C*05:01; DPPA2; ENSG00000163530; CTA
EVDDEESVI

SEQ ID NO: 22303 - protein, 10 aa, Homo sapiens
  misc_feature: Table A; Target 22303; HLA-B*39:01; DPPA2; ENSG00000163530; CTA
EVDDEESVIL

SEQ ID NO: 22304 - protein, 9 aa, Homo sapiens
  misc_feature: Table A; Target 22304; HLA-A*25:01; DPPA2; ENSG00000163530; CTA
EVITSAPGA

SEQ ID NO: 22305 - protein, 9 aa, Homo sapiens
  misc_feature: Table A; Target 22305; HLA-A*26:01; DPPA2; ENSG00000163530; CTA
EVITSAPGA

SEQ ID NO: 22306 - protein, 10 aa, Homo sapiens
  misc_feature: Table A; Target 22306; HLA-A*25:01; DPPA2; ENSG00000163530; CTA
EVITSAPGAM

SEQ ID NO: 22307 - protein, 10 aa, Homo sapiens
  misc_feature: Table A; Target 22307; HLA-A*26:01; DPPA2; ENSG00000163530; CTA
EVITSAPGAM

SEQ ID NO: 22308 - protein, 10 aa, Homo sapiens
  misc_feature: Table A; Target 22308; HLA-A*68:01; DPPA2; ENSG00000163530; CTA
EVITSAPGAM

SEQ ID NO: 22309 - protein, 10 aa, Homo sapiens
  misc_feature: Table A; Target 22309; HLA-B*39:01; DPPA2; ENSG00000163530; CTA
EVITSAPGAM

SEQ ID NO: 22310 - protein, 10 aa, Homo sapiens
  misc_feature: Table A; Target 22310; HLA-C*07:06; DPPA2; ENSG00000163530; CTA
EVITSAPGAM

SEQ ID NO: 22311 - protein, 11 aa, Homo sapiens
  misc_feature: Table A; Target 22311; HLA-A*25:01; DPPA2; ENSG00000163530; CTA
EVITSAPGAML

SEQ ID NO: 22312 - protein, 11 aa, Homo sapiens
  misc_feature: Table A; Target 22312; HLA-A*26:01; DPPA2; ENSG00000163530; CTA
EVITSAPGAML

SEQ ID NO: 22313 - protein, 11 aa, Homo sapiens
  misc_feature: Table A; Target 22313; HLA-A*68:01; DPPA2; ENSG00000163530; CTA
EVITSAPGAML

SEQ ID NO: 22314 - protein, 11 aa, Homo sapiens
  misc_feature: Table A; Target 22314; HLA-A*68:02; DPPA2; ENSG00000163530; CTA
EVITSAPGAML

SEQ ID NO: 22315 - protein, 8 aa, Homo sapiens
  misc_feature: Table A; Target 22315; HLA-B*08:01; DPPA2; ENSG00000163530; CTA
FLMQASGV

SEQ ID NO: 22316 - protein, 8 aa, Homo sapiens
  misc_feature: Table A; Target 22316; HLA-B*13:02; DPPA2; ENSG00000163530; CTA
FLMQASGV

SEQ ID NO: 22317 - protein, 10 aa, Homo sapiens
  misc_feature: Table A; Target 22317; HLA-A*24:02; DPPA2; ENSG00000163530; CTA
FLMQASGVRW

SEQ ID NO: 22318 - protein, 10 aa, Homo sapiens
  misc_feature: Table A; Target 22318; HLA-A*25:01; DPPA2; ENSG00000163530; CTA
FLMQASGVRW

SEQ ID NO: 22319 - protein, 10 aa, Homo sapiens
  misc_feature: Table A; Target 22319; HLA-B*44:02; DPPA2; ENSG00000163530; CTA
FLMQASGVRW

SEQ ID NO: 22320 - protein, 10 aa, Homo sapiens
  misc_feature: Table A; Target 22320; HLA-B*57:01; DPPA2; ENSG00000163530; CTA
FLMQASGVRW

SEQ ID NO: 22321 - protein, 10 aa, Homo sapiens
  misc_feature: Table A; Target 22321; HLA-B*35:01; DPPA2; ENSG00000163530; CTA
FPSPGIEDNM

SEQ ID NO: 22322 - protein, 10 aa, Homo sapiens
  misc_feature: Table A; Target 22322; HLA-B*35:03; DPPA2; ENSG00000163530; CTA
FPSPGIEDNM

SEQ ID NO: 22323 - protein, 10 aa, Homo sapiens
  misc_feature: Table A; Target 22323; HLA-B*38:01; DPPA2; ENSG00000163530; CTA
FPSPGIEDNM

SEQ ID NO: 22324 - protein, 10 aa, Homo sapiens
  misc_feature: Table A; Target 22324; HLA-B*55:01; DPPA2; ENSG00000163530; CTA
FPSPGIEDNM

SEQ ID NO: 22325 - protein, 10 aa, Homo sapiens
  misc_feature: Table A; Target 22325; HLA-C*03:03; DPPA2; ENSG00000163530; CTA
FPSPGIEDNM

SEQ ID NO: 22326 - protein, 11 aa, Homo sapiens
  misc_feature: Table A; Target 22326; HLA-B*27:05; DPPA2; ENSG00000163530; CTA
FPSPGIEDNML

SEQ ID NO: 22327 - protein, 11 aa, Homo sapiens
  misc_feature: Table A; Target 22327; HLA-B*35:01; DPPA2; ENSG00000163530; CTA
FPSPGIEDNML

SEQ ID NO: 22328 - protein, 11 aa, Homo sapiens
  misc_feature: Table A; Target 22328; HLA-B*35:03; DPPA2; ENSG00000163530; CTA
FPSPGIEDNML

SEQ ID NO: 22329 - protein, 11 aa, Homo sapiens
  misc_feature: Table A; Target 22329; HLA-B*38:01; DPPA2; ENSG00000163530; CTA
FPSPGIEDNML

SEQ ID NO: 22330 - protein, 11 aa, Homo sapiens
  misc_feature: Table A; Target 22330; HLA-B*55:01; DPPA2; ENSG00000163530; CTA
FPSPGIEDNML

SEQ ID NO: 22331 - protein, 9 aa, Homo sapiens
  misc_feature: Table A; Target 22331; HLA-A*30:01; DPPA2; ENSG00000163530; CTA
GEVDDEESV

SEQ ID NO: 22332 - protein, 9 aa, Homo sapiens
  misc_feature: Table A; Target 22332; HLA-B*40:01; DPPA2; ENSG00000163530; CTA
GEVDDEESV

SEQ ID NO: 22333 - protein, 9 aa, Homo sapiens
  misc_feature: Table A; Target 22333; HLA-B*49:01; DPPA2; ENSG00000163530; CTA
GEVDDEESV

SEQ ID NO: 22334 - protein, 10 aa, Homo sapiens
  misc_feature: Table A; Target 22334; HLA-A*30:01; DPPA2; ENSG00000163530; CTA
GEVDDEESVI

SEQ ID NO: 22335 - protein, 10 aa, Homo sapiens
  misc_feature: Table A; Target 22335; HLA-B*40:01; DPPA2; ENSG00000163530; CTA
GEVDDEESVI

SEQ ID NO: 22336 - protein, 10 aa, Homo sapiens
  misc_feature: Table A; Target 22336; HLA-B*49:01; DPPA2; ENSG00000163530; CTA
GEVDDEESVI

SEQ ID NO: 22337 - protein, 11 aa, Homo sapiens
  misc_feature: Table A; Target 22337; HLA-A*30:01; DPPA2; ENSG00000163530; CTA
GEVDDEESVIL

SEQ ID NO: 22338 - protein, 11 aa, Homo sapiens
  misc_feature: Table A; Target 22338; HLA-B*40:01; DPPA2; ENSG00000163530; CTA
GEVDDEESVIL

SEQ ID NO: 22339 - protein, 10 aa, Homo sapiens
  misc_feature: Table A; Target 22339; HLA-B*38:01; DPPA2; ENSG00000163530; CTA
GHLLQTNEQF

SEQ ID NO: 22340 - protein, 11 aa, Homo sapiens
  misc_feature: Table A; Target 22340; HLA-A*02:01; DPPA2; ENSG00000163530; CTA
GLSTNGKKIEV

SEQ ID NO: 22341 - protein, 9 aa, Homo sapiens
  misc_feature: Table A; Target 22341; HLA-A*32:01; DPPA2; ENSG00000163530; CTA
GQAWVPTTH

SEQ ID NO: 22342 - protein, 9 aa, Homo sapiens
  misc_feature: Table A; Target 22342; HLA-B*13:02; DPPA2; ENSG00000163530; CTA
GQAWVPTTH

SEQ ID NO: 22343 - protein, 9 aa, Homo sapiens
  misc_feature: Table A; Target 22343; HLA-B*15:01; DPPA2; ENSG00000163530; CTA
GQAWVPTTH

SEQ ID NO: 22344 - protein, 9 aa, Homo sapiens
  misc_feature: Table A; Target 22344; HLA-B*15:03; DPPA2; ENSG00000163530; CTA
GQAWVPTTH

SEQ ID NO: 22345 - protein, 9 aa, Homo sapiens
  misc_feature: Table A; Target 22345; HLA-B*27:05; DPPA2; ENSG00000163530; CTA
GQAWVPTTH

SEQ ID NO: 22346 - protein, 10 aa, Homo sapiens
  misc_feature: Table A; Target 22346; HLA-A*31:01; DPPA2; ENSG00000163530; CTA
GQAWVPTTHR

SEQ ID NO: 22347 - protein, 9 aa, Homo sapiens
  misc_feature: Table A; Target 22347; HLA-B*27:02; DPPA2; ENSG00000163530; CTA
GRLLSADTK

SEQ ID NO: 22348 - protein, 9 aa, Homo sapiens
  misc_feature: Table A; Target 22348; HLA-B*27:05; DPPA2; ENSG00000163530; CTA
GRLLSADTK

SEQ ID NO: 22349 - protein, 11 aa, Homo sapiens
  misc_feature: Table A; Target 22349; HLA-B*27:02; DPPA2; ENSG00000163530; CTA
GRLLSADTKGW

SEQ ID NO: 22350 - protein, 11 aa, Homo sapiens
  misc_feature: Table A; Target 22350; HLA-C*16:04; DPPA2; ENSG00000163530; CTA
GRLLSADTKGW

SEQ ID NO: 22351 - protein, 10 aa, Homo sapiens
  misc_feature: Table A; Target 22351; HLA-B*35:01; DPPA2; ENSG00000163530; CTA
HAYPEQRQDM

SEQ ID NO: 22352 - protein, 10 aa, Homo sapiens
  misc_feature: Table A; Target 22352; HLA-B*35:03; DPPA2; ENSG00000163530; CTA
HAYPEQRQDM

SEQ ID NO: 22353 - protein, 10 aa, Homo sapiens
  misc_feature: Table A; Target 22353; HLA-B*55:01; DPPA2; ENSG00000163530; CTA
HAYPEQRQDM

SEQ ID NO: 22354 - protein, 9 aa, Homo sapiens
  misc_feature: Table A; Target 22354; HLA-A*23:01; DPPA2; ENSG00000163530; CTA
HLLQTNEQF

SEQ ID NO: 22355 - protein, 9 aa, Homo sapiens
  misc_feature: Table A; Target 22355; HLA-A*32:01; DPPA2; ENSG00000163530; CTA
HLLQTNEQF

SEQ ID NO: 22356 - protein, 9 aa, Homo sapiens
  misc_feature: Table A; Target 22356; HLA-B*15:01; DPPA2; ENSG00000163530; CTA
HLLQTNEQF

SEQ ID NO: 22357 - protein, 9 aa, Homo sapiens
  misc_feature: Table A; Target 22357; HLA-B*37:01; DPPA2; ENSG00000163530; CTA
HLLQTNEQF

SEQ ID NO: 22358 - protein, 9 aa, Homo sapiens
  misc_feature: Table A; Target 22358; HLA-B*38:01; DPPA2; ENSG00000163530; CTA
HLLQTNEQF

SEQ ID NO: 22359 - protein, 9 aa, Homo sapiens
  misc_feature: Table A; Target 22359; HLA-C*07:04; DPPA2; ENSG00000163530; CTA
HLLQTNEQF

SEQ ID NO: 22360 - protein, 9 aa, Homo sapiens
  misc_feature: Table A; Target 22360; HLA-A*03:01; DPPA2; ENSG00000163530; CTA
IAARAVQPK

SEQ ID NO: 22361 - protein, 9 aa, Homo sapiens
  misc_feature: Table A; Target 22361; HLA-A*03:02; DPPA2; ENSG00000163530; CTA
IAARAVQPK

SEQ ID NO: 22362 - protein, 9 aa, Homo sapiens
  misc_feature: Table A; Target 22362; HLA-A*11:01; DPPA2; ENSG00000163530; CTA
IAARAVQPK

SEQ ID NO: 22363 - protein, 9 aa, Homo sapiens
  misc_feature: Table A; Target 22363; HLA-A*31:01; DPPA2; ENSG00000163530; CTA
IAARAVQPK

SEQ ID NO: 22364 - protein, 9 aa, Homo sapiens
  misc_feature: Table A; Target 22364; HLA-A*68:01; DPPA2; ENSG00000163530; CTA
IAARAVQPK

SEQ ID NO: 22365 - protein, 9 aa, Homo sapiens
  misc_feature: Table A; Target 22365; HLA-C*02:02; DPPA2; ENSG00000163530; CTA
IAARAVQPK

SEQ ID NO: 22366 - protein, 9 aa, Homo sapiens
  misc_feature: Table A; Target 22366; HLA-C*04:01; DPPA2; ENSG00000163530; CTA
IAARAVQPK

SEQ ID NO: 22367 - protein, 9 aa, Homo sapiens
  misc_feature: Table A; Target 22367; HLA-C*06:02; DPPA2; ENSG00000163530; CTA
IAARAVQPK

SEQ ID NO: 22368 - protein, 9 aa, Homo sapiens
  misc_feature: Table A; Target 22368; HLA-C*07:01; DPPA2; ENSG00000163530; CTA
IAARAVQPK

SEQ ID NO: 22369 - protein, 9 aa, Homo sapiens
  misc_feature: Table A; Target 22369; HLA-C*07:02; DPPA2; ENSG00000163530; CTA
IAARAVQPK

SEQ ID NO: 22370 - protein, 9 aa, Homo sapiens
  misc_feature: Table A; Target 22370; HLA-C*07:04; DPPA2; ENSG00000163530; CTA
IAARAVQPK

SEQ ID NO: 22371 - protein, 9 aa, Homo sapiens
  misc_feature: Table A; Target 22371; HLA-C*07:06; DPPA2; ENSG00000163530; CTA
IAARAVQPK

SEQ ID NO: 22372 - protein, 9 aa, Homo sapiens
  misc_feature: Table A; Target 22372; HLA-C*12:03; DPPA2; ENSG00000163530; CTA
IAARAVQPK

SEQ ID NO: 22373 - protein, 9 aa, Homo sapiens
  misc_feature: Table A; Target 22373; HLA-C*16:01; DPPA2; ENSG00000163530; CTA
IAARAVQPK

SEQ ID NO: 22374 - protein, 11 aa, Homo sapiens
  misc_feature: Table A; Target 22374; HLA-A*29:02; DPPA2; ENSG00000163530; CTA
IFPSPGIEDNM

SEQ ID NO: 22375 - protein, 8 aa, Homo sapiens
  misc_feature: Table A; Target 22375; HLA-A*02:07; DPPA2; ENSG00000163530; CTA
ILPPINKV

SEQ ID NO: 22376 - protein, 8 aa, Homo sapiens
  misc_feature: Table A; Target 22376; HLA-B*27:02; DPPA2; ENSG00000163530; CTA
ILTLVPVK

SEQ ID NO: 22377 - protein, 9 aa, Homo sapiens
  misc_feature: Table A; Target 22377; HLA-A*23:01; DPPA2; ENSG00000163530; CTA
IPALPLPTI

SEQ ID NO: 22378 - protein, 9 aa, Homo sapiens
  misc_feature: Table A; Target 22378; HLA-A*24:02; DPPA2; ENSG00000163530; CTA
IPALPLPTI

SEQ ID NO: 22379 - protein, 9 aa, Homo sapiens
  misc_feature: Table A; Target 22379; HLA-A*30:01; DPPA2; ENSG00000163530; CTA
IPALPLPTI

SEQ ID NO: 22380 - protein, 9 aa, Homo sapiens
  misc_feature: Table A; Target 22380; HLA-B*07:02; DPPA2; ENSG00000163530; CTA
IPALPLPTI

SEQ ID NO: 22381 - protein, 9 aa, Homo sapiens
  misc_feature: Table A; Target 22381; HLA-B*13:02; DPPA2; ENSG00000163530; CTA
IPALPLPTI

SEQ ID NO: 22382 - protein, 9 aa, Homo sapiens
  misc_feature: Table A; Target 22382; HLA-B*35:01; DPPA2; ENSG00000163530; CTA
IPALPLPTI

SEQ ID NO: 22383 - protein, 9 aa, Homo sapiens
  misc_feature: Table A; Target 22383; HLA-B*35:03; DPPA2; ENSG00000163530; CTA
IPALPLPTI

SEQ ID NO: 22384 - protein, 9 aa, Homo sapiens
  misc_feature: Table A; Target 22384; HLA-B*38:01; DPPA2; ENSG00000163530; CTA
IPALPLPTI

SEQ ID NO: 22385 - protein, 9 aa, Homo sapiens
  misc_feature: Table A; Target 22385; HLA-B*49:01; DPPA2; ENSG00000163530; CTA
IPALPLPTI

SEQ ID NO: 22386 - protein, 9 aa, Homo sapiens
  misc_feature: Table A; Target 22386; HLA-B*54:01; DPPA2; ENSG00000163530; CTA
IPALPLPTI

SEQ ID NO: 22387 - protein, 9 aa, Homo sapiens
  misc_feature: Table A; Target 22387; HLA-B*55:01; DPPA2; ENSG00000163530; CTA
IPALPLPTI

SEQ ID NO: 22388 - protein, 9 aa, Homo sapiens
  misc_feature: Table A; Target 22388; HLA-B*56:01; DPPA2; ENSG00000163530; CTA
IPALPLPTI

SEQ ID NO: 22389 - protein, 9 aa, Homo sapiens
  misc_feature: Table A; Target 22389; HLA-C*07:02; DPPA2; ENSG00000163530; CTA
IPALPLPTI

SEQ ID NO: 22390 - protein, 9 aa, Homo sapiens
  misc_feature: Table A; Target 22390; HLA-C*16:02; DPPA2; ENSG00000163530; CTA
IPALPLPTI

SEQ ID NO: 22391 - protein, 10 aa, Homo sapiens
  misc_feature: Table A; Target 22391; HLA-B*07:02; DPPA2; ENSG00000163530; CTA
IPALPLPTIL

SEQ ID NO: 22392 - protein, 10 aa, Homo sapiens
  misc_feature: Table A; Target 22392; HLA-B*35:03; DPPA2; ENSG00000163530; CTA
IPALPLPTIL

SEQ ID NO: 22393 - protein, 10 aa, Homo sapiens
  misc_feature: Table A; Target 22393; HLA-B*56:01; DPPA2; ENSG00000163530; CTA
IPALPLPTIL

SEQ ID NO: 22394 - protein, 10 aa, Homo sapiens
  misc_feature: Table A; Target 22394; HLA-C*07:02; DPPA2; ENSG00000163530; CTA
IPALPLPTIL

SEQ ID NO: 22395 - protein, 11 aa, Homo sapiens
  misc_feature: Table A; Target 22395; HLA-B*54:01; DPPA2; ENSG00000163530; CTA
IPALPLPTILP

SEQ ID NO: 22396 - protein, 8 aa, Homo sapiens
  misc_feature: Table A; Target 22396; HLA-A*23:01; DPPA2; ENSG00000163530; CTA
IPVSVEAF

SEQ ID NO: 22397 - protein, 8 aa, Homo sapiens
  misc_feature: Table A; Target 22397; HLA-B*07:02; DPPA2; ENSG00000163530; CTA
IPVSVEAF

SEQ ID NO: 22398 - protein, 8 aa, Homo sapiens
  misc_feature: Table A; Target 22398; HLA-B*15:01; DPPA2; ENSG00000163530; CTA
IPVSVEAF

SEQ ID NO: 22399 - protein, 8 aa, Homo sapiens
  misc_feature: Table A; Target 22399; HLA-B*15:03; DPPA2; ENSG00000163530; CTA
IPVSVEAF

SEQ ID NO: 22400 - protein, 8 aa, Homo sapiens
  misc_feature: Table A; Target 22400; HLA-B*18:01; DPPA2; ENSG00000163530; CTA
IPVSVEAF

SEQ ID NO: 22401 - protein, 8 aa, Homo sapiens
  misc_feature: Table A; Target 22401; HLA-B*35:01; DPPA2; ENSG00000163530; CTA
IPVSVEAF

SEQ ID NO: 22402 - protein, 8 aa, Homo sapiens
  misc_feature: Table A; Target 22402; HLA-B*35:03; DPPA2; ENSG00000163530; CTA
IPVSVEAF

SEQ ID NO: 22403 - protein, 8 aa, Homo sapiens
  misc_feature: Table A; Target 22403; HLA-B*37:01; DPPA2; ENSG00000163530; CTA
IPVSVEAF

SEQ ID NO: 22404 - protein, 8 aa, Homo sapiens
  misc_feature: Table A; Target 22404; HLA-B*51:01; DPPA2; ENSG00000163530; CTA
IPVSVEAF

SEQ ID NO: 22405 - protein, 8 aa, Homo sapiens
  misc_feature: Table A; Target 22405; HLA-B*54:01; DPPA2; ENSG00000163530; CTA
IPVSVEAF

SEQ ID NO: 22406 - protein, 8 aa, Homo sapiens
  misc_feature: Table A; Target 22406; HLA-B*55:01; DPPA2; ENSG00000163530; CTA
IPVSVEAF

SEQ ID NO: 22407 - protein, 8 aa, Homo sapiens
  misc_feature: Table A; Target 22407; HLA-B*56:01; DPPA2; ENSG00000163530; CTA
IPVSVEAF

SEQ ID NO: 22408 - protein, 8 aa, Homo sapiens
  misc_feature: Table A; Target 22408; HLA-C*04:01; DPPA2; ENSG00000163530; CTA
IPVSVEAF

SEQ ID NO: 22409 - protein, 8 aa, Homo sapiens
  misc_feature: Table A; Target 22409; HLA-C*07:02; DPPA2; ENSG00000163530; CTA
IPVSVEAF

SEQ ID NO: 22410 - protein, 8 aa, Homo sapiens
  misc_feature: Table A; Target 22410; HLA-C*14:02; DPPA2; ENSG00000163530; CTA
IPVSVEAF

SEQ ID NO: 22411 - protein, 9 aa, Homo sapiens
  misc_feature: Table A; Target 22411; HLA-A*23:01; DPPA2; ENSG00000163530; CTA
IPVSVEAFL

SEQ ID NO: 22412 - protein, 9 aa, Homo sapiens
  misc_feature: Table A; Target 22412; HLA-A*68:02; DPPA2; ENSG00000163530; CTA
IPVSVEAFL

SEQ ID NO: 22413 - protein, 9 aa, Homo sapiens
  misc_feature: Table A; Target 22413; HLA-B*07:02; DPPA2; ENSG00000163530; CTA
IPVSVEAFL

SEQ ID NO: 22414 - protein, 9 aa, Homo sapiens
  misc_feature: Table A; Target 22414; HLA-B*35:01; DPPA2; ENSG00000163530; CTA
IPVSVEAFL

SEQ ID NO: 22415 - protein, 9 aa, Homo sapiens
  misc_feature: Table A; Target 22415; HLA-B*35:03; DPPA2; ENSG00000163530; CTA
IPVSVEAFL

SEQ ID NO: 22416 - protein, 9 aa, Homo sapiens
  misc_feature: Table A; Target 22416; HLA-B*51:01; DPPA2; ENSG00000163530; CTA
IPVSVEAFL

SEQ ID NO: 22417 - protein, 9 aa, Homo sapiens
  misc_feature: Table A; Target 22417; HLA-B*54:01; DPPA2; ENSG00000163530; CTA
IPVSVEAFL

SEQ ID NO: 22418 - protein, 9 aa, Homo sapiens
  misc_feature: Table A; Target 22418; HLA-B*55:01; DPPA2; ENSG00000163530; CTA
IPVSVEAFL

SEQ ID NO: 22419 - protein, 9 aa, Homo sapiens
  misc_feature: Table A; Target 22419; HLA-B*56:01; DPPA2; ENSG00000163530; CTA
IPVSVEAFL

SEQ ID NO: 22420 - protein, 9 aa, Homo sapiens
  misc_feature: Table A; Target 22420; HLA-C*03:03; DPPA2; ENSG00000163530; CTA
IPVSVEAFL

SEQ ID NO: 22421 - protein, 10 aa, Homo sapiens
  misc_feature: Table A; Target 22421; HLA-B*27:02; DPPA2; ENSG00000163530; CTA
IPVSVEAFLM

SEQ ID NO: 22422 - protein, 10 aa, Homo sapiens
  misc_feature: Table A; Target 22422; HLA-B*35:01; DPPA2; ENSG00000163530; CTA
IPVSVEAFLM

SEQ ID NO: 22423 - protein, 10 aa, Homo sapiens
  misc_feature: Table A; Target 22423; HLA-B*35:03; DPPA2; ENSG00000163530; CTA
IPVSVEAFLM

SEQ ID NO: 22424 - protein, 8 aa, Homo sapiens
  misc_feature: Table A; Target 22424; HLA-C*05:01; DPPA2; ENSG00000163530; CTA
ITSAPGAM

SEQ ID NO: 22425 - protein, 9 aa, Homo sapiens
  misc_feature: Table A; Target 22425; HLA-A*23:01; DPPA2; ENSG00000163530; CTA
ITSAPGAML

SEQ ID NO: 22426 - protein, 9 aa, Homo sapiens
  misc_feature: Table A; Target 22426; HLA-A*32:01; DPPA2; ENSG00000163530; CTA
ITSAPGAML

SEQ ID NO: 22427 - protein, 9 aa, Homo sapiens
  misc_feature: Table A; Target 22427; HLA-A*68:02; DPPA2; ENSG00000163530; CTA
ITSAPGAML

SEQ ID NO: 22428 - protein, 9 aa, Homo sapiens
  misc_feature: Table A; Target 22428; HLA-B*07:02; DPPA2; ENSG00000163530; CTA
ITSAPGAML

SEQ ID NO: 22429 - protein, 9 aa, Homo sapiens
  misc_feature: Table A; Target 22429; HLA-B*13:02; DPPA2; ENSG00000163530; CTA
ITSAPGAML

SEQ ID NO: 22430 - protein, 9 aa, Homo sapiens
  misc_feature: Table A; Target 22430; HLA-B*15:01; DPPA2; ENSG00000163530; CTA
ITSAPGAML

SEQ ID NO: 22431 - protein, 9 aa, Homo sapiens
  misc_feature: Table A; Target 22431; HLA-B*15:03; DPPA2; ENSG00000163530; CTA
ITSAPGAML

SEQ ID NO: 22432 - protein, 9 aa, Homo sapiens
  misc_feature: Table A; Target 22432; HLA-B*35:03; DPPA2; ENSG00000163530; CTA
ITSAPGAML

SEQ ID NO: 22433 - protein, 9 aa, Homo sapiens
  misc_feature: Table A; Target 22433; HLA-B*38:01; DPPA2; ENSG00000163530; CTA
ITSAPGAML

SEQ ID NO: 22434 - protein, 9 aa, Homo sapiens
  misc_feature: Table A; Target 22434; HLA-B*39:01; DPPA2; ENSG00000163530; CTA
ITSAPGAML

SEQ ID NO: 22435 - protein, 9 aa, Homo sapiens
  misc_feature: Table A; Target 22435; HLA-B*46:01; DPPA2; ENSG00000163530; CTA
ITSAPGAML

SEQ ID NO: 22436 - protein, 9 aa, Homo sapiens
  misc_feature: Table A; Target 22436; HLA-B*58:01; DPPA2; ENSG00000163530; CTA
ITSAPGAML

SEQ ID NO: 22437 - protein, 9 aa, Homo sapiens
  misc_feature: Table A; Target 22437; HLA-C*01:02; DPPA2; ENSG00000163530; CTA
ITSAPGAML

SEQ ID NO: 22438 - protein, 9 aa, Homo sapiens
  misc_feature: Table A; Target 22438; HLA-C*02:02; DPPA2; ENSG00000163530; CTA
ITSAPGAML

SEQ ID NO: 22439 - protein, 9 aa, Homo sapiens
  misc_feature: Table A; Target 22439; HLA-C*03:03; DPPA2; ENSG00000163530; CTA
ITSAPGAML

SEQ ID NO: 22440 - protein, 9 aa, Homo sapiens
  misc_feature: Table A; Target 22440; HLA-C*03:04; DPPA2; ENSG00000163530; CTA
ITSAPGAML

SEQ ID NO: 22441 - protein, 9 aa, Homo sapiens
  misc_feature: Table A; Target 22441; HLA-C*04:01; DPPA2; ENSG00000163530; CTA
ITSAPGAML

SEQ ID NO: 22442 - protein, 9 aa, Homo sapiens
  misc_feature: Table A; Target 22442; HLA-C*05:01; DPPA2; ENSG00000163530; CTA
ITSAPGAML

SEQ ID NO: 22443 - protein, 9 aa, Homo sapiens
  misc_feature: Table A; Target 22443; HLA-C*06:02; DPPA2; ENSG00000163530; CTA
ITSAPGAML

SEQ ID NO: 22444 - protein, 9 aa, Homo sapiens
  misc_feature: Table A; Target 22444; HLA-C*07:02; DPPA2; ENSG00000163530; CTA
ITSAPGAML

SEQ ID NO: 22445 - protein, 9 aa, Homo sapiens
  misc_feature: Table A; Target 22445; HLA-C*07:04; DPPA2; ENSG00000163530; CTA
ITSAPGAML

SEQ ID NO: 22446 - protein, 9 aa, Homo sapiens
  misc_feature: Table A; Target 22446; HLA-C*12:03; DPPA2; ENSG00000163530; CTA
ITSAPGAML

SEQ ID NO: 22447 - protein, 9 aa, Homo sapiens
  misc_feature: Table A; Target 22447; HLA-C*14:02; DPPA2; ENSG00000163530; CTA
ITSAPGAML

SEQ ID NO: 22448 - protein, 9 aa, Homo sapiens
  misc_feature: Table A; Target 22448; HLA-C*16:01; DPPA2; ENSG00000163530; CTA
ITSAPGAML

SEQ ID NO: 22449 - protein, 9 aa, Homo sapiens
  misc_feature: Table A; Target 22449; HLA-C*16:02; DPPA2; ENSG00000163530; CTA
ITSAPGAML

SEQ ID NO: 22450 - protein, 8 aa, Homo sapiens
  misc_feature: Table A; Target 22450; HLA-C*16:01; DPPA2; ENSG00000163530; CTA
KAVTKRAR

SEQ ID NO: 22451 - protein, 10 aa, Homo sapiens
  misc_feature: Table A; Target 22451; HLA-A*02:01; DPPA2; ENSG00000163530; CTA
KIPALPLPTI

SEQ ID NO: 22452 - protein, 10 aa, Homo sapiens
  misc_feature: Table A; Target 22452; HLA-A*02:07; DPPA2; ENSG00000163530; CTA
KIPALPLPTI

SEQ ID NO: 22453 - protein, 9 aa, Homo sapiens
  misc_feature: Table A; Target 22453; HLA-B*15:03; DPPA2; ENSG00000163530; CTA
KKYNPGHLL

SEQ ID NO: 22454 - protein, 9 aa, Homo sapiens
  misc_feature: Table A; Target 22454; HLA-A*02:01; DPPA2; ENSG00000163530; CTA
KMMKRLMTV

SEQ ID NO: 22455 - protein, 9 aa, Homo sapiens
  misc_feature: Table A; Target 22455; HLA-A*02:03; DPPA2; ENSG00000163530; CTA
KMMKRLMTV

SEQ ID NO: 22456 - protein, 9 aa, Homo sapiens
  misc_feature: Table A; Target 22456; HLA-B*08:01; DPPA2; ENSG00000163530; CTA
KMMKRLMTV

SEQ ID NO: 22457 - protein, 8 aa, Homo sapiens
  misc_feature: Table A; Target 22457; HLA-B*27:02; DPPA2; ENSG00000163530; CTA
KRLMTVEK

SEQ ID NO: 22458 - protein, 8 aa, Homo sapiens
  misc_feature: Table A; Target 22458; HLA-B*27:05; DPPA2; ENSG00000163530; CTA
KRLMTVEK

SEQ ID NO: 22459 - protein, 8 aa, Homo sapiens
  misc_feature: Table A; Target 22459; HLA-C*06:02; DPPA2; ENSG00000163530; CTA
KRLMTVEK

SEQ ID NO: 22460 - protein, 8 aa, Homo sapiens
  misc_feature: Table A; Target 22460; HLA-C*07:01; DPPA2; ENSG00000163530; CTA
KRLMTVEK

SEQ ID NO: 22461 - protein, 8 aa, Homo sapiens
  misc_feature: Table A; Target 22461; HLA-C*07:02; DPPA2; ENSG00000163530; CTA
KRLMTVEK

SEQ ID NO: 22462 - protein, 8 aa, Homo sapiens
  misc_feature: Table A; Target 22462; HLA-A*23:01; DPPA2; ENSG00000163530; CTA
KYNPGHLL

SEQ ID NO: 22463 - protein, 8 aa, Homo sapiens
  misc_feature: Table A; Target 22463; HLA-A*24:02; DPPA2; ENSG00000163530; CTA
KYNPGHLL

SEQ ID NO: 22464 - protein, 8 aa, Homo sapiens
  misc_feature: Table A; Target 22464; HLA-B*58:01; DPPA2; ENSG00000163530; CTA
KYNPGHLL

SEQ ID NO: 22465 - protein, 8 aa, Homo sapiens
  misc_feature: Table A; Target 22465; HLA-C*14:02; DPPA2; ENSG00000163530; CTA
KYNPGHLL

SEQ ID NO: 22466 - protein, 9 aa, Homo sapiens
  misc_feature: Table A; Target 22466; HLA-A*24:02; DPPA2; ENSG00000163530; CTA
KYNPGHLLQ

SEQ ID NO: 22467 - protein, 9 aa, Homo sapiens
  misc_feature: Table A; Target 22467; HLA-B*54:01; DPPA2; ENSG00000163530; CTA
LASWARIAA

SEQ ID NO: 22468 - protein, 9 aa, Homo sapiens
  misc_feature: Table A; Target 22468; HLA-B*56:01; DPPA2; ENSG00000163530; CTA
LASWARIAA

SEQ ID NO: 22469 - protein, 9 aa, Homo sapiens
  misc_feature: Table A; Target 22469; HLA-C*16:01; DPPA2; ENSG00000163530; CTA
LASWARIAA

SEQ ID NO: 22470 - protein, 8 aa, Homo sapiens
  misc_feature: Table A; Target 22470; HLA-B*37:01; DPPA2; ENSG00000163530; CTA
LDSSKKNF

SEQ ID NO: 22471 - protein, 9 aa, Homo sapiens
  misc_feature: Table A; Target 22471; HLA-A*24:02; DPPA2; ENSG00000163530; CTA
LMQASGVRW

SEQ ID NO: 22472 - protein, 9 aa, Homo sapiens
  misc_feature: Table A; Target 22472; HLA-A*32:01; DPPA2; ENSG00000163530; CTA
LMQASGVRW

SEQ ID NO: 22473 - protein, 9 aa, Homo sapiens
  misc_feature: Table A; Target 22473; HLA-B*57:01; DPPA2; ENSG00000163530; CTA
LMQASGVRW

SEQ ID NO: 22474 - protein, 9 aa, Homo sapiens
  misc_feature: Table A; Target 22474; HLA-B*58:01; DPPA2; ENSG00000163530; CTA
LMQASGVRW

SEQ ID NO: 22475 - protein, 9 aa, Homo sapiens
  misc_feature: Table A; Target 22475; HLA-B*51:01; DPPA2; ENSG00000163530; CTA
LPACIFPSP

SEQ ID NO: 22476 - protein, 9 aa, Homo sapiens
  misc_feature: Table A; Target 22476; HLA-B*54:01; DPPA2; ENSG00000163530; CTA
LPACIFPSP

SEQ ID NO: 22477 - protein, 9 aa, Homo sapiens
  misc_feature: Table A; Target 22477; HLA-B*56:01; DPPA2; ENSG00000163530; CTA
LPACIFPSP

SEQ ID NO: 22478 - protein, 11 aa, Homo sapiens
  misc_feature: Table A; Target 22478; HLA-B*51:01; DPPA2; ENSG00000163530; CTA
LPACIFPSPGI

SEQ ID NO: 22479 - protein, 9 aa, Homo sapiens
  misc_feature: Table A; Target 22479; HLA-B*54:01; DPPA2; ENSG00000163530; CTA
LPLPTILPP

SEQ ID NO: 22480 - protein, 9 aa, Homo sapiens
  misc_feature: Table A; Target 22480; HLA-B*56:01; DPPA2; ENSG00000163530; CTA
LPLPTILPP

SEQ ID NO: 22481 - protein, 10 aa, Homo sapiens
  misc_feature: Table A; Target 22481; HLA-A*23:01; DPPA2; ENSG00000163530; CTA
LPLPTILPPI

SEQ ID NO: 22482 - protein, 10 aa, Homo sapiens
  misc_feature: Table A; Target 22482; HLA-B*51:01; DPPA2; ENSG00000163530; CTA
LPLPTILPPI

SEQ ID NO: 22483 - protein, 10 aa, Homo sapiens
  misc_feature: Table A; Target 22483; HLA-B*54:01; DPPA2; ENSG00000163530; CTA
LPLPTILPPI

SEQ ID NO: 22484 - protein, 8 aa, Homo sapiens
  misc_feature: Table A; Target 22484; HLA-B*51:01; DPPA2; ENSG00000163530; CTA
LPTILPPI

SEQ ID NO: 22485 - protein, 8 aa, Homo sapiens
  misc_feature: Table A; Target 22485; HLA-B*54:01; DPPA2; ENSG00000163530; CTA
LPTILPPI

SEQ ID NO: 22486 - protein, 11 aa, Homo sapiens
  misc_feature: Table A; Target 22486; HLA-B*51:01; DPPA2; ENSG00000163530; CTA
LPTILPPINKV

SEQ ID NO: 22487 - protein, 11 aa, Homo sapiens
  misc_feature: Table A; Target 22487; HLA-B*54:01; DPPA2; ENSG00000163530; CTA
LPTILPPINKV

SEQ ID NO: 22488 - protein, 11 aa, Homo sapiens
  misc_feature: Table A; Target 22488; HLA-B*56:01; DPPA2; ENSG00000163530; CTA
LPTILPPINKV

SEQ ID NO: 22489 - protein, 9 aa, Homo sapiens
  misc_feature: Table A; Target 22489; HLA-A*25:01; DPPA2; ENSG00000163530; CTA
LQFHAGQAW

SEQ ID NO: 22490 - protein, 9 aa, Homo sapiens
  misc_feature: Table A; Target 22490; HLA-A*32:01; DPPA2; ENSG00000163530; CTA
LQFHAGQAW

SEQ ID NO: 22491 - protein, 8 aa, Homo sapiens
  misc_feature: Table A; Target 22491; HLA-B*57:01; DPPA2; ENSG00000163530; CTA
LSADTKGW

SEQ ID NO: 22492 - protein, 8 aa, Homo sapiens
  misc_feature: Table A; Target 22492; HLA-B*58:01; DPPA2; ENSG00000163530; CTA
LSADTKGW

SEQ ID NO: 22493 - protein, 11 aa, Homo sapiens
  misc_feature: Table A; Target 22493; HLA-B*49:01; DPPA2; ENSG00000163530; CTA
MEPSVSSTSDV

SEQ ID NO: 22494 - protein, 8 aa, Homo sapiens
  misc_feature: Table A; Target 22494; HLA-B*18:01; DPPA2; ENSG00000163530; CTA
MEQMEPSV

SEQ ID NO: 22495 - protein, 8 aa, Homo sapiens
  misc_feature: Table A; Target 22495; HLA-B*40:02; DPPA2; ENSG00000163530; CTA
MEQMEPSV

SEQ ID NO: 22496 - protein, 8 aa, Homo sapiens
  misc_feature: Table A; Target 22496; HLA-B*49:01; DPPA2; ENSG00000163530; CTA
MEQMEPSV

SEQ ID NO: 22497 - protein, 9 aa, Homo sapiens
  misc_feature: Table A; Target 22497; HLA-B*54:01; DPPA2; ENSG00000163530; CTA
MISLFLLPA

SEQ ID NO: 22498 - protein, 9 aa, Homo sapiens
  misc_feature: Table A; Target 22498; HLA-A*02:03; DPPA2; ENSG00000163530; CTA
MLASWARIA

SEQ ID NO: 22499 - protein, 9 aa, Homo sapiens
  misc_feature: Table A; Target 22499; HLA-A*02:04; DPPA2; ENSG00000163530; CTA
MLASWARIA

SEQ ID NO: 22500 - protein, 10 aa, Homo sapiens
  misc_feature: Table A; Target 22500; HLA-B*54:01; DPPA2; ENSG00000163530; CTA
MLASWARIAA

SEQ ID NO: 22501 - protein, 8 aa, Homo sapiens
  misc_feature: Table A; Target 22501; HLA-B*08:01; DPPA2; ENSG00000163530; CTA
MMKRLMTV

SEQ ID NO: 22502 - protein, 9 aa, Homo sapiens
  misc_feature: Table A; Target 22502; HLA-B*35:03; DPPA2; ENSG00000163530; CTA
MPEMSQETR

SEQ ID NO: 22503 - protein, 10 aa, Homo sapiens
  misc_feature: Table A; Target 22503; HLA-B*07:02; DPPA2; ENSG00000163530; CTA
MPEMSQETRL

SEQ ID NO: 22504 - protein, 10 aa, Homo sapiens
  misc_feature: Table A; Target 22504; HLA-B*35:01; DPPA2; ENSG00000163530; CTA
MPEMSQETRL

SEQ ID NO: 22505 - protein, 10 aa, Homo sapiens
  misc_feature: Table A; Target 22505; HLA-B*35:03; DPPA2; ENSG00000163530; CTA
MPEMSQETRL

SEQ ID NO: 22506 - protein, 10 aa, Homo sapiens
  misc_feature: Table A; Target 22506; HLA-B*55:01; DPPA2; ENSG00000163530; CTA
MPEMSQETRL

SEQ ID NO: 22507 - protein, 10 aa, Homo sapiens
  misc_feature: Table A; Target 22507; HLA-C*03:03; DPPA2; ENSG00000163530; CTA
MPEMSQETRL

SEQ ID NO: 22508 - protein, 8 aa, Homo sapiens
  misc_feature: Table A; Target 22508; HLA-A*25:01; DPPA2; ENSG00000163530; CTA
MQASGVRW

SEQ ID NO: 22509 - protein, 8 aa, Homo sapiens
  misc_feature: Table A; Target 22509; HLA-A*32:01; DPPA2; ENSG00000163530; CTA
MQASGVRW

SEQ ID NO: 22510 - protein, 8 aa, Homo sapiens
  misc_feature: Table A; Target 22510; HLA-B*44:02; DPPA2; ENSG00000163530; CTA
MQASGVRW

SEQ ID NO: 22511 - protein, 8 aa, Homo sapiens
  misc_feature: Table A; Target 22511; HLA-B*44:03; DPPA2; ENSG00000163530; CTA
MQASGVRW

SEQ ID NO: 22512 - protein, 8 aa, Homo sapiens
  misc_feature: Table A; Target 22512; HLA-C*07:04; DPPA2; ENSG00000163530; CTA
MQASGVRW

SEQ ID NO: 22513 - protein, 10 aa, Homo sapiens
  misc_feature: Table A; Target 22513; HLA-A*01:01; DPPA2; ENSG00000163530; CTA
MSDANLDSSK

SEQ ID NO: 22514 - protein, 10 aa, Homo sapiens
  misc_feature: Table A; Target 22514; HLA-B*27:02; DPPA2; ENSG00000163530; CTA
MSDANLDSSK

SEQ ID NO: 22515 - protein, 9 aa, Homo sapiens
  misc_feature: Table A; Target 22515; HLA-A*33:03; DPPA2; ENSG00000163530; CTA
MSQETRLQR

SEQ ID NO: 22516 - protein, 9 aa, Homo sapiens
  misc_feature: Table A; Target 22516; HLA-A*03:02; DPPA2; ENSG00000163530; CTA
NEQFTAPQK

SEQ ID NO: 22517 - protein, 9 aa, Homo sapiens
  misc_feature: Table A; Target 22517; HLA-A*11:01; DPPA2; ENSG00000163530; CTA
NEQFTAPQK

SEQ ID NO: 22518 - protein, 10 aa, Homo sapiens
  misc_feature: Table A; Target 22518; HLA-B*49:01; DPPA2; ENSG00000163530; CTA
NERAEETNTV

SEQ ID NO: 22519 - protein, 8 aa, Homo sapiens
  misc_feature: Table A; Target 22519; HLA-B*15:01; DPPA2; ENSG00000163530; CTA
NGKKIEVY

SEQ ID NO: 22520 - protein, 8 aa, Homo sapiens
  misc_feature: Table A; Target 22520; HLA-B*15:03; DPPA2; ENSG00000163530; CTA
NGKKIEVY

SEQ ID NO: 22521 - protein, 8 aa, Homo sapiens
  misc_feature: Table A; Target 22521; HLA-B*18:01; DPPA2; ENSG00000163530; CTA
NGKKIEVY

SEQ ID NO: 22522 - protein, 8 aa, Homo sapiens
  misc_feature: Table A; Target 22522; HLA-B*46:01; DPPA2; ENSG00000163530; CTA
NGKKIEVY

SEQ ID NO: 22523 - protein, 9 aa, Homo sapiens
  misc_feature: Table A; Target 22523; HLA-C*04:01; DPPA2; ENSG00000163530; CTA
NLDSSKKNF

SEQ ID NO: 22524 - protein, 10 aa, Homo sapiens
  misc_feature: Table A; Target 22524; HLA-A*02:07; DPPA2; ENSG00000163530; CTA
NLDSSKKNFL

SEQ ID NO: 22525 - protein, 9 aa, Homo sapiens
  misc_feature: Table A; Target 22525; HLA-A*02:01; DPPA2; ENSG00000163530; CTA
NMEQMEPSV

SEQ ID NO: 22526 - protein, 9 aa, Homo sapiens
  misc_feature: Table A; Target 22526; HLA-C*05:01; DPPA2; ENSG00000163530; CTA
NMEQMEPSV

SEQ ID NO: 22527 - protein, 9 aa, Homo sapiens
  misc_feature: Table A; Target 22527; HLA-A*68:02; DPPA2; ENSG00000163530; CTA
NSCSIPVSV

SEQ ID NO: 22528 - protein, 9 aa, Homo sapiens
  misc_feature: Table A; Target 22528; HLA-C*02:02; DPPA2; ENSG00000163530; CTA
NSCSIPVSV

SEQ ID NO: 22529 - protein, 9 aa, Homo sapiens
  misc_feature: Table A; Target 22529; HLA-C*12:03; DPPA2; ENSG00000163530; CTA
NSCSIPVSV

SEQ ID NO: 22530 - protein, 9 aa, Homo sapiens
  misc_feature: Table A; Target 22530; HLA-A*02:01; DPPA2; ENSG00000163530; CTA
NTVEVITSA

SEQ ID NO: 22531 - protein, 9 aa, Homo sapiens
  misc_feature: Table A; Target 22531; HLA-A*02:03; DPPA2; ENSG00000163530; CTA
NTVEVITSA

SEQ ID NO: 22532 - protein, 9 aa, Homo sapiens
  misc_feature: Table A; Target 22532; HLA-A*25:01; DPPA2; ENSG00000163530; CTA
NTVEVITSA

SEQ ID NO: 22533 - protein, 9 aa, Homo sapiens
  misc_feature: Table A; Target 22533; HLA-A*26:01; DPPA2; ENSG00000163530; CTA
NTVEVITSA

SEQ ID NO: 22534 - protein, 9 aa, Homo sapiens
  misc_feature: Table A; Target 22534; HLA-A*68:02; DPPA2; ENSG00000163530; CTA
NTVEVITSA

SEQ ID NO: 22535 - protein, 9 aa, Homo sapiens
  misc_feature: Table A; Target 22535; HLA-B*46:01; DPPA2; ENSG00000163530; CTA
NTVEVITSA

SEQ ID NO: 22536 - protein, 9 aa, Homo sapiens
  misc_feature: Table A; Target 22536; HLA-B*54:01; DPPA2; ENSG00000163530; CTA
NTVEVITSA

SEQ ID NO: 22537 - protein, 9 aa, Homo sapiens
  misc_feature: Table A; Target 22537; HLA-B*56:01; DPPA2; ENSG00000163530; CTA
NTVEVITSA

SEQ ID NO: 22538 - protein, 9 aa, Homo sapiens
  misc_feature: Table A; Target 22538; HLA-C*07:06; DPPA2; ENSG00000163530; CTA
NTVEVITSA

SEQ ID NO: 22539 - protein, 8 aa, Homo sapiens
  misc_feature: Table A; Target 22539; HLA-B*51:01; DPPA2; ENSG00000163530; CTA
PALPLPTI

SEQ ID NO: 22540 - protein, 9 aa, Homo sapiens
  misc_feature: Table A; Target 22540; HLA-A*30:01; DPPA2; ENSG00000163530; CTA
PEMSQETRL

SEQ ID NO: 22541 - protein, 9 aa, Homo sapiens
  misc_feature: Table A; Target 22541; HLA-B*27:02; DPPA2; ENSG00000163530; CTA
PEMSQETRL

SEQ ID NO: 22542 - protein, 9 aa, Homo sapiens
  misc_feature: Table A; Target 22542; HLA-B*40:01; DPPA2; ENSG00000163530; CTA
PEMSQETRL

SEQ ID NO: 22543 - protein, 9 aa, Homo sapiens
  misc_feature: Table A; Target 22543; HLA-B*40:02; DPPA2; ENSG00000163530; CTA
PEMSQETRL

SEQ ID NO: 22544 - protein, 9 aa, Homo sapiens
  misc_feature: Table A; Target 22544; HLA-B*44:02; DPPA2; ENSG00000163530; CTA
PEMSQETRL

SEQ ID NO: 22545 - protein, 9 aa, Homo sapiens
  misc_feature: Table A; Target 22545; HLA-B*44:03; DPPA2; ENSG00000163530; CTA
PEMSQETRL

SEQ ID NO: 22546 - protein, 9 aa, Homo sapiens
  misc_feature: Table A; Target 22546; HLA-B*49:01; DPPA2; ENSG00000163530; CTA
PEMSQETRL

SEQ ID NO: 22547 - protein, 9 aa, Homo sapiens
  misc_feature: Table A; Target 22547; HLA-A*02:04; DPPA2; ENSG00000163530; CTA
PLPTILPPI

SEQ ID NO: 22548 - protein, 9 aa, Homo sapiens
  misc_feature: Table A; Target 22548; HLA-A*02:07; DPPA2; ENSG00000163530; CTA
PLPTILPPI

SEQ ID NO: 22549 - protein, 9 aa, Homo sapiens
  misc_feature: Table A; Target 22549; HLA-A*24:02; DPPA2; ENSG00000163530; CTA
PLPTILPPI

SEQ ID NO: 22550 - protein, 9 aa, Homo sapiens
  misc_feature: Table A; Target 22550; HLA-A*03:01; DPPA2; ENSG00000163530; CTA
PTILPPINK

SEQ ID NO: 22551 - protein, 9 aa, Homo sapiens
  misc_feature: Table A; Target 22551; HLA-A*03:02; DPPA2; ENSG00000163530; CTA
PTILPPINK

SEQ ID NO: 22552 - protein, 9 aa, Homo sapiens
  misc_feature: Table A; Target 22552; HLA-A*11:01; DPPA2; ENSG00000163530; CTA
PTILPPINK

SEQ ID NO: 22553 - protein, 8 aa, Homo sapiens
  misc_feature: Table A; Target 22553; HLA-C*12:03; DPPA2; ENSG00000163530; CTA
QAWVPTTH

SEQ ID NO: 22554 - protein, 9 aa, Homo sapiens
  misc_feature: Table A; Target 22554; HLA-A*31:01; DPPA2; ENSG00000163530; CTA
QAWVPTTHR

SEQ ID NO: 22555 - protein, 9 aa, Homo sapiens
  misc_feature: Table A; Target 22555; HLA-A*33:01; DPPA2; ENSG00000163530; CTA
QAWVPTTHR

SEQ ID NO: 22556 - protein, 9 aa, Homo sapiens
  misc_feature: Table A; Target 22556; HLA-A*33:03; DPPA2; ENSG00000163530; CTA
QAWVPTTHR

SEQ ID NO: 22557 - protein, 9 aa, Homo sapiens
  misc_feature: Table A; Target 22557; HLA-A*68:01; DPPA2; ENSG00000163530; CTA
QAWVPTTHR

SEQ ID NO: 22558 - protein, 9 aa, Homo sapiens
  misc_feature: Table A; Target 22558; HLA-B*51:01; DPPA2; ENSG00000163530; CTA
QAWVPTTHR

SEQ ID NO: 22559 - protein, 9 aa, Homo sapiens
  misc_feature: Table A; Target 22559; HLA-B*57:01; DPPA2; ENSG00000163530; CTA
QAWVPTTHR

SEQ ID NO: 22560 - protein, 9 aa, Homo sapiens
  misc_feature: Table A; Target 22560; HLA-C*07:06; DPPA2; ENSG00000163530; CTA
QAWVPTTHR

SEQ ID NO: 22561 - protein, 8 aa, Homo sapiens
  misc_feature: Table A; Target 22561; HLA-C*14:02; DPPA2; ENSG00000163530; CTA
QFHAGQAW

SEQ ID NO: 22562 - protein, 9 aa, Homo sapiens
  misc_feature: Table A; Target 22562; HLA-A*33:03; DPPA2; ENSG00000163530; CTA
QFTAPQKAR

SEQ ID NO: 22563 - protein, 9 aa, Homo sapiens
  misc_feature: Table A; Target 22563; HLA-A*03:01; DPPA2; ENSG00000163530; CTA
QLGLSTNGK

SEQ ID NO: 22564 - protein, 9 aa, Homo sapiens
  misc_feature: Table A; Target 22564; HLA-A*03:02; DPPA2; ENSG00000163530; CTA
QLGLSTNGK

SEQ ID NO: 22565 - protein, 8 aa, Homo sapiens
  misc_feature: Table A; Target 22565; HLA-B*56:01; DPPA2; ENSG00000163530; CTA
QPKALNSC

SEQ ID NO: 22566 - protein, 10 aa, Homo sapiens
  misc_feature: Table A; Target 22566; HLA-A*03:02; DPPA2; ENSG00000163530; CTA
QQLGLSTNGK

SEQ ID NO: 22567 - protein, 10 aa, Homo sapiens
  misc_feature: Table A; Target 22567; HLA-A*11:01; DPPA2; ENSG00000163530; CTA
QQLGLSTNGK

SEQ ID NO: 22568 - protein, 10 aa, Homo sapiens
  misc_feature: Table A; Target 22568; HLA-B*27:02; DPPA2; ENSG00000163530; CTA
QQLGLSTNGK

SEQ ID NO: 22569 - protein, 9 aa, Homo sapiens
  misc_feature: Table A; Target 22569; HLA-B*27:05; DPPA2; ENSG00000163530; CTA
QRSYEMNER

SEQ ID NO: 22570 - protein, 11 aa, Homo sapiens
  misc_feature: Table A; Target 22570; HLA-A*03:01; DPPA2; ENSG00000163530; CTA
QTNEQFTAPQK

SEQ ID NO: 22571 - protein, 11 aa, Homo sapiens
  misc_feature: Table A; Target 22571; HLA-A*03:02; DPPA2; ENSG00000163530; CTA
QTNEQFTAPQK

SEQ ID NO: 22572 - protein, 11 aa, Homo sapiens
  misc_feature: Table A; Target 22572; HLA-A*11:01; DPPA2; ENSG00000163530; CTA
QTNEQFTAPQK

SEQ ID NO: 22573 - protein, 11 aa, Homo sapiens
  misc_feature: Table A; Target 22573; HLA-A*68:01; DPPA2; ENSG00000163530; CTA
QTNEQFTAPQK

SEQ ID NO: 22574 - protein, 11 aa, Homo sapiens
  misc_feature: Table A; Target 22574; HLA-C*07:06; DPPA2; ENSG00000163530; CTA
QTNEQFTAPQK

SEQ ID NO: 22575 - protein, 8 aa, Homo sapiens
  misc_feature: Table A; Target 22575; HLA-C*05:01; DPPA2; ENSG00000163530; CTA
RAEETNTV

SEQ ID NO: 22576 - protein, 10 aa, Homo sapiens
  misc_feature: Table A; Target 22576; HLA-C*05:01; DPPA2; ENSG00000163530; CTA
RAEETNTVEV

SEQ ID NO: 22577 - protein, 8 aa, Homo sapiens
  misc_feature: Table A; Target 22577; HLA-B*08:01; DPPA2; ENSG00000163530; CTA
RAVQPKAL

SEQ ID NO: 22578 - protein, 8 aa, Homo sapiens
  misc_feature: Table A; Target 22578; HLA-B*58:01; DPPA2; ENSG00000163530; CTA
RAVQPKAL

SEQ ID NO: 22579 - protein, 8 aa, Homo sapiens
  misc_feature: Table A; Target 22579; HLA-C*03:04; DPPA2; ENSG00000163530; CTA
RAVQPKAL

SEQ ID NO: 22580 - protein, 8 aa, Homo sapiens
  misc_feature: Table A; Target 22580; HLA-C*16:01; DPPA2; ENSG00000163530; CTA
RAVQPKAL

SEQ ID NO: 22581 - protein, 10 aa, Homo sapiens
  misc_feature: Table A; Target 22581; HLA-A*03:01; DPPA2; ENSG00000163530; CTA
RIAARAVQPK

SEQ ID NO: 22582 - protein, 10 aa, Homo sapiens
  misc_feature: Table A; Target 22582; HLA-A*03:02; DPPA2; ENSG00000163530; CTA
RIAARAVQPK

SEQ ID NO: 22583 - protein, 10 aa, Homo sapiens
  misc_feature: Table A; Target 22583; HLA-B*57:01; DPPA2; ENSG00000163530; CTA
RLLSADTKGW

SEQ ID NO: 22584 - protein, 8 aa, Homo sapiens
  misc_feature: Table A; Target 22584; HLA-A*02:04; DPPA2; ENSG00000163530; CTA
RMISLFLL

SEQ ID NO: 22585 - protein, 8 aa, Homo sapiens
  misc_feature: Table A; Target 22585; HLA-A*31:01; DPPA2; ENSG00000163530; CTA
RSYEMNER

SEQ ID NO: 22586 - protein, 10 aa, Homo sapiens
  misc_feature: Table A; Target 22586; HLA-A*25:01; DPPA2; ENSG00000163530; CTA
SAPGAMLASW

SEQ ID NO: 22587 - protein, 10 aa, Homo sapiens
  misc_feature: Table A; Target 22587; HLA-A*26:01; DPPA2; ENSG00000163530; CTA
SAPGAMLASW

SEQ ID NO: 22588 - protein, 10 aa, Homo sapiens
  misc_feature: Table A; Target 22588; HLA-B*44:02; DPPA2; ENSG00000163530; CTA
SAPGAMLASW

SEQ ID NO: 22589 - protein, 10 aa, Homo sapiens
  misc_feature: Table A; Target 22589; HLA-B*58:01; DPPA2; ENSG00000163530; CTA
SAPGAMLASW

SEQ ID NO: 22590 - protein, 9 aa, Homo sapiens
  misc_feature: Table A; Target 22590; HLA-B*27:02; DPPA2; ENSG00000163530; CTA
SDANLDSSK

SEQ ID NO: 22591 - protein, 10 aa, Homo sapiens
  misc_feature: Table A; Target 22591; HLA-A*11:01; DPPA2; ENSG00000163530; CTA
SDANLDSSKK

SEQ ID NO: 22592 - protein, 10 aa, Homo sapiens
  misc_feature: Table A; Target 22592; HLA-B*27:02; DPPA2; ENSG00000163530; CTA
SDANLDSSKK

SEQ ID NO: 22593 - protein, 9 aa, Homo sapiens
  misc_feature: Table A; Target 22593; HLA-A*02:07; DPPA2; ENSG00000163530; CTA
SIPVSVEAF

SEQ ID NO: 22594 - protein, 9 aa, Homo sapiens
  misc_feature: Table A; Target 22594; HLA-A*24:02; DPPA2; ENSG00000163530; CTA
SIPVSVEAF

SEQ ID NO: 22595 - protein, 9 aa, Homo sapiens
  misc_feature: Table A; Target 22595; HLA-A*25:01; DPPA2; ENSG00000163530; CTA
SIPVSVEAF

SEQ ID NO: 22596 - protein, 9 aa, Homo sapiens
  misc_feature: Table A; Target 22596; HLA-A*26:01; DPPA2; ENSG00000163530; CTA
SIPVSVEAF

SEQ ID NO: 22597 - protein, 9 aa, Homo sapiens
  misc_feature: Table A; Target 22597; HLA-A*32:01; DPPA2; ENSG00000163530; CTA
SIPVSVEAF

SEQ ID NO: 22598 - protein, 9 aa, Homo sapiens
  misc_feature: Table A; Target 22598; HLA-B*15:01; DPPA2; ENSG00000163530; CTA
SIPVSVEAF

SEQ ID NO: 22599 - protein, 9 aa, Homo sapiens
  misc_feature: Table A; Target 22599; HLA-B*46:01; DPPA2; ENSG00000163530; CTA
SIPVSVEAF

SEQ ID NO: 22600 - protein, 9 aa, Homo sapiens
  misc_feature: Table A; Target 22600; HLA-C*01:02; DPPA2; ENSG00000163530; CTA
SIPVSVEAF

SEQ ID NO: 22601 - protein, 9 aa, Homo sapiens
  misc_feature: Table A; Target 22601; HLA-C*07:04; DPPA2; ENSG00000163530; CTA
SIPVSVEAF

SEQ ID NO: 22602 - protein, 9 aa, Homo sapiens
  misc_feature: Table A; Target 22602; HLA-C*14:02; DPPA2; ENSG00000163530; CTA
SIPVSVEAF

SEQ ID NO: 22603 - protein, 9 aa, Homo sapiens
  misc_feature: Table A; Target 22603; HLA-A*02:01; DPPA2; ENSG00000163530; CTA
SLFLLPACI

SEQ ID NO: 22604 - protein, 9 aa, Homo sapiens
  misc_feature: Table A; Target 22604; HLA-A*02:03; DPPA2; ENSG00000163530; CTA
SLFLLPACI

SEQ ID NO: 22605 - protein, 9 aa, Homo sapiens
  misc_feature: Table A; Target 22605; HLA-A*02:04; DPPA2; ENSG00000163530; CTA
SLFLLPACI

SEQ ID NO: 22606 - protein, 9 aa, Homo sapiens
  misc_feature: Table A; Target 22606; HLA-A*30:01; DPPA2; ENSG00000163530; CTA
SLFLLPACI

SEQ ID NO: 22607 - protein, 9 aa, Homo sapiens
  misc_feature: Table A; Target 22607; HLA-B*13:02; DPPA2; ENSG00000163530; CTA
SLFLLPACI

SEQ ID NO: 22608 - protein, 9 aa, Homo sapiens
  misc_feature: Table A; Target 22608; HLA-B*35:03; DPPA2; ENSG00000163530; CTA
SPGIEDNML

SEQ ID NO: 22609 - protein, 10 aa, Homo sapiens
  misc_feature: Table A; Target 22609; HLA-A*11:01; DPPA2; ENSG00000163530; CTA
SSTSDVKLEK

SEQ ID NO: 22610 - protein, 10 aa, Homo sapiens
  misc_feature: Table A; Target 22610; HLA-C*07:06; DPPA2; ENSG00000163530; CTA
SSTSDVKLEK

SEQ ID NO: 22611 - protein, 10 aa, Homo sapiens
  misc_feature: Table A; Target 22611; HLA-A*25:01; DPPA2; ENSG00000163530; CTA
STNGKKIEVY

SEQ ID NO: 22612 - protein, 10 aa, Homo sapiens
  misc_feature: Table A; Target 22612; HLA-A*26:01; DPPA2; ENSG00000163530; CTA
STNGKKIEVY

SEQ ID NO: 22613 - protein, 10 aa, Homo sapiens
  misc_feature: Table A; Target 22613; HLA-A*30:02; DPPA2; ENSG00000163530; CTA
STNGKKIEVY

SEQ ID NO: 22614 - protein, 10 aa, Homo sapiens
  misc_feature: Table A; Target 22614; HLA-A*32:01; DPPA2; ENSG00000163530; CTA
STNGKKIEVY

SEQ ID NO: 22615 - protein, 10 aa, Homo sapiens
  misc_feature: Table A; Target 22615; HLA-B*15:01; DPPA2; ENSG00000163530; CTA
STNGKKIEVY

SEQ ID NO: 22616 - protein, 9 aa, Homo sapiens
  misc_feature: Table A; Target 22616; HLA-A*01:01; DPPA2; ENSG00000163530; CTA
STSDVKLEK

SEQ ID NO: 22617 - protein, 9 aa, Homo sapiens
  misc_feature: Table A; Target 22617; HLA-A*03:01; DPPA2; ENSG00000163530; CTA
STSDVKLEK

SEQ ID NO: 22618 - protein, 9 aa, Homo sapiens
  misc_feature: Table A; Target 22618; HLA-A*03:02; DPPA2; ENSG00000163530; CTA
STSDVKLEK

SEQ ID NO: 22619 - protein, 9 aa, Homo sapiens
  misc_feature: Table A; Target 22619; HLA-A*29:02; DPPA2; ENSG00000163530; CTA
STSDVKLEK

SEQ ID NO: 22620 - protein, 9 aa, Homo sapiens
  misc_feature: Table A; Target 22620; HLA-A*31:01; DPPA2; ENSG00000163530; CTA
STSDVKLEK

SEQ ID NO: 22621 - protein, 9 aa, Homo sapiens
  misc_feature: Table A; Target 22621; HLA-A*33:01; DPPA2; ENSG00000163530; CTA
STSDVKLEK

SEQ ID NO: 22622 - protein, 9 aa, Homo sapiens
  misc_feature: Table A; Target 22622; HLA-A*33:03; DPPA2; ENSG00000163530; CTA
STSDVKLEK

SEQ ID NO: 22623 - protein, 9 aa, Homo sapiens
  misc_feature: Table A; Target 22623; HLA-A*68:01; DPPA2; ENSG00000163530; CTA
STSDVKLEK

SEQ ID NO: 22624 - protein, 9 aa, Homo sapiens
  misc_feature: Table A; Target 22624; HLA-B*13:02; DPPA2; ENSG00000163530; CTA
STSDVKLEK

SEQ ID NO: 22625 - protein, 9 aa, Homo sapiens
  misc_feature: Table A; Target 22625; HLA-B*57:01; DPPA2; ENSG00000163530; CTA
STSDVKLEK

SEQ ID NO: 22626 - protein, 9 aa, Homo sapiens
  misc_feature: Table A; Target 22626; HLA-C*07:06; DPPA2; ENSG00000163530; CTA
STSDVKLEK

SEQ ID NO: 22627 - protein, 9 aa, Homo sapiens
  misc_feature: Table A; Target 22627; HLA-C*16:01; DPPA2; ENSG00000163530; CTA
STSDVKLEK

SEQ ID NO: 22628 - protein, 9 aa, Homo sapiens
  misc_feature: Table A; Target 22628; HLA-C*16:02; DPPA2; ENSG00000163530; CTA
STSDVKLEK

SEQ ID NO: 22629 - protein, 11 aa, Homo sapiens
  misc_feature: Table A; Target 22629; HLA-A*03:02; DPPA2; ENSG00000163530; CTA
STSDVKLEKPK

SEQ ID NO: 22630 - protein, 11 aa, Homo sapiens
  misc_feature: Table A; Target 22630; HLA-A*11:01; DPPA2; ENSG00000163530; CTA
STSDVKLEKPK

SEQ ID NO: 22631 - protein, 9 aa, Homo sapiens
  misc_feature: Table A; Target 22631; HLA-A*02:01; DPPA2; ENSG00000163530; CTA
SVILTLVPV

SEQ ID NO: 22632 - protein, 9 aa, Homo sapiens
  misc_feature: Table A; Target 22632; HLA-A*02:07; DPPA2; ENSG00000163530; CTA
SVILTLVPV

SEQ ID NO: 22633 - protein, 9 aa, Homo sapiens
  misc_feature: Table A; Target 22633; HLA-A*68:02; DPPA2; ENSG00000163530; CTA
SVILTLVPV

SEQ ID NO: 22634 - protein, 9 aa, Homo sapiens
  misc_feature: Table A; Target 22634; HLA-B*56:01; DPPA2; ENSG00000163530; CTA
SVILTLVPV

SEQ ID NO: 22635 - protein, 10 aa, Homo sapiens
  misc_feature: Table A; Target 22635; HLA-A*03:01; DPPA2; ENSG00000163530; CTA
SVILTLVPVK

SEQ ID NO: 22636 - protein, 10 aa, Homo sapiens
  misc_feature: Table A; Target 22636; HLA-A*03:02; DPPA2; ENSG00000163530; CTA
SVILTLVPVK

SEQ ID NO: 22637 - protein, 10 aa, Homo sapiens
  misc_feature: Table A; Target 22637; HLA-A*11:01; DPPA2; ENSG00000163530; CTA
SVILTLVPVK

SEQ ID NO: 22638 - protein, 10 aa, Homo sapiens
  misc_feature: Table A; Target 22638; HLA-B*27:02; DPPA2; ENSG00000163530; CTA
SVILTLVPVK

SEQ ID NO: 22639 - protein, 9 aa, Homo sapiens
  misc_feature: Table A; Target 22639; HLA-A*03:02; DPPA2; ENSG00000163530; CTA
SVSSTSDVK

SEQ ID NO: 22640 - protein, 9 aa, Homo sapiens
  misc_feature: Table A; Target 22640; HLA-A*11:01; DPPA2; ENSG00000163530; CTA
SVSSTSDVK

SEQ ID NO: 22641 - protein, 9 aa, Homo sapiens
  misc_feature: Table A; Target 22641; HLA-C*07:06; DPPA2; ENSG00000163530; CTA
SVSSTSDVK

SEQ ID NO: 22642 - protein, 10 aa, Homo sapiens
  misc_feature: Table A; Target 22642; HLA-B*35:03; DPPA2; ENSG00000163530; CTA
SVSSTSDVKL

SEQ ID NO: 22643 - protein, 8 aa, Homo sapiens
  misc_feature: Table A; Target 22643; HLA-A*03:01; DPPA2; ENSG00000163530; CTA
TILPPINK

SEQ ID NO: 22644 - protein, 8 aa, Homo sapiens
  misc_feature: Table A; Target 22644; HLA-A*03:02; DPPA2; ENSG00000163530; CTA
TILPPINK

SEQ ID NO: 22645 - protein, 8 aa, Homo sapiens
  misc_feature: Table A; Target 22645; HLA-A*11:01; DPPA2; ENSG00000163530; CTA
TILPPINK

SEQ ID NO: 22646 - protein, 9 aa, Homo sapiens
  misc_feature: Table A; Target 22646; HLA-A*02:01; DPPA2; ENSG00000163530; CTA
TILPPINKV

SEQ ID NO: 22647 - protein, 9 aa, Homo sapiens
  misc_feature: Table A; Target 22647; HLA-A*02:03; DPPA2; ENSG00000163530; CTA
TILPPINKV

SEQ ID NO: 22648 - protein, 9 aa, Homo sapiens
  misc_feature: Table A; Target 22648; HLA-A*02:04; DPPA2; ENSG00000163530; CTA
TILPPINKV

SEQ ID NO: 22649 - protein, 9 aa, Homo sapiens
  misc_feature: Table A; Target 22649; HLA-A*02:07; DPPA2; ENSG00000163530; CTA
TILPPINKV

SEQ ID NO: 22650 - protein, 9 aa, Homo sapiens
  misc_feature: Table A; Target 22650; HLA-A*68:02; DPPA2; ENSG00000163530; CTA
TILPPINKV

SEQ ID NO: 22651 - protein, 9 aa, Homo sapiens
  misc_feature: Table A; Target 22651; HLA-B*13:02; DPPA2; ENSG00000163530; CTA
TILPPINKV

SEQ ID NO: 22652 - protein, 11 aa, Homo sapiens
  misc_feature: Table A; Target 22652; HLA-A*31:01; DPPA2; ENSG00000163530; CTA
TILPPINKVCR

SEQ ID NO: 22653 - protein, 9 aa, Homo sapiens
  misc_feature: Table A; Target 22653; HLA-A*02:03; DPPA2; ENSG00000163530; CTA
TLRDWCQQL

SEQ ID NO: 22654 - protein, 9 aa, Homo sapiens
  misc_feature: Table A; Target 22654; HLA-A*02:04; DPPA2; ENSG00000163530; CTA
TLRDWCQQL

SEQ ID NO: 22655 - protein, 10 aa, Homo sapiens
  misc_feature: Table A; Target 22655; HLA-B*27:02; DPPA2; ENSG00000163530; CTA
TNEQFTAPQK

SEQ ID NO: 22656 - protein, 9 aa, Homo sapiens
  misc_feature: Table A; Target 22656; HLA-B*39:01; DPPA2; ENSG00000163530; CTA
TNTVEVITS

SEQ ID NO: 22657 - protein, 8 aa, Homo sapiens
  misc_feature: Table A; Target 22657; HLA-C*01:02; DPPA2; ENSG00000163530; CTA
TSAPGAML

SEQ ID NO: 22658 - protein, 8 aa, Homo sapiens
  misc_feature: Table A; Target 22658; HLA-C*03:03; DPPA2; ENSG00000163530; CTA
TSAPGAML

SEQ ID NO: 22659 - protein, 8 aa, Homo sapiens
  misc_feature: Table A; Target 22659; HLA-C*03:04; DPPA2; ENSG00000163530; CTA
TSAPGAML

SEQ ID NO: 22660 - protein, 9 aa, Homo sapiens
  misc_feature: Table A; Target 22660; HLA-C*06:02; DPPA2; ENSG00000163530; CTA
TSAPGAMLA

SEQ ID NO: 22661 - protein, 9 aa, Homo sapiens
  misc_feature: Table A; Target 22661; HLA-C*16:02; DPPA2; ENSG00000163530; CTA
TSAPGAMLA

SEQ ID NO: 22662 - protein, 11 aa, Homo sapiens
  misc_feature: Table A; Target 22662; HLA-A*25:01; DPPA2; ENSG00000163530; CTA
TSAPGAMLASW

SEQ ID NO: 22663 - protein, 11 aa, Homo sapiens
  misc_feature: Table A; Target 22663; HLA-A*26:01; DPPA2; ENSG00000163530; CTA
TSAPGAMLASW

SEQ ID NO: 22664 - protein, 11 aa, Homo sapiens
  misc_feature: Table A; Target 22664; HLA-A*31:01; DPPA2; ENSG00000163530; CTA
TSAPGAMLASW

SEQ ID NO: 22665 - protein, 11 aa, Homo sapiens
  misc_feature: Table A; Target 22665; HLA-A*32:01; DPPA2; ENSG00000163530; CTA
TSAPGAMLASW

SEQ ID NO: 22666 - protein, 11 aa, Homo sapiens
  misc_feature: Table A; Target 22666; HLA-B*44:03; DPPA2; ENSG00000163530; CTA
TSAPGAMLASW

SEQ ID NO: 22667 - protein, 11 aa, Homo sapiens
  misc_feature: Table A; Target 22667; HLA-B*57:01; DPPA2; ENSG00000163530; CTA
TSAPGAMLASW

SEQ ID NO: 22668 - protein, 11 aa, Homo sapiens
  misc_feature: Table A; Target 22668; HLA-B*58:01; DPPA2; ENSG00000163530; CTA
TSAPGAMLASW

SEQ ID NO: 22669 - protein, 11 aa, Homo sapiens
  misc_feature: Table A; Target 22669; HLA-C*16:04; DPPA2; ENSG00000163530; CTA
TSAPGAMLASW

SEQ ID NO: 22670 - protein, 9 aa, Homo sapiens
  misc_feature: Table A; Target 22670; HLA-B*08:01; DPPA2; ENSG00000163530; CTA
TTHRRMISL

SEQ ID NO: 22671 - protein, 8 aa, Homo sapiens
  misc_feature: Table A; Target 22671; HLA-C*05:01; DPPA2; ENSG00000163530; CTA
VDDEESVI

SEQ ID NO: 22672 - protein, 9 aa, Homo sapiens
  misc_feature: Table A; Target 22672; HLA-B*38:01; DPPA2; ENSG00000163530; CTA
VDDEESVIL

SEQ ID NO: 22673 - protein, 9 aa, Homo sapiens
  misc_feature: Table A; Target 22673; HLA-B*40:01; DPPA2; ENSG00000163530; CTA
VDDEESVIL

SEQ ID NO: 22674 - protein, 9 aa, Homo sapiens
  misc_feature: Table A; Target 22674; HLA-C*05:01; DPPA2; ENSG00000163530; CTA
VDDEESVIL

SEQ ID NO: 22675 - protein, 8 aa, Homo sapiens
  misc_feature: Table A; Target 22675; HLA-B*18:01; DPPA2; ENSG00000163530; CTA
VEAFLMQA

SEQ ID NO: 22676 - protein, 8 aa, Homo sapiens
  misc_feature: Table A; Target 22676; HLA-B*49:01; DPPA2; ENSG00000163530; CTA
VEAFLMQA

SEQ ID NO: 22677 - protein, 8 aa, Homo sapiens
  misc_feature: Table A; Target 22677; HLA-B*18:01; DPPA2; ENSG00000163530; CTA
VEVITSAP

SEQ ID NO: 22678 - protein, 8 aa, Homo sapiens
  misc_feature: Table A; Target 22678; HLA-B*40:02; DPPA2; ENSG00000163530; CTA
VEVITSAP

SEQ ID NO: 22679 - protein, 8 aa, Homo sapiens
  misc_feature: Table A; Target 22679; HLA-B*49:01; DPPA2; ENSG00000163530; CTA
VEVITSAP

SEQ ID NO: 22680 - protein, 9 aa, Homo sapiens
  misc_feature: Table A; Target 22680; HLA-B*40:02; DPPA2; ENSG00000163530; CTA
VEVITSAPG

SEQ ID NO: 22681 - protein, 9 aa, Homo sapiens
  misc_feature: Table A; Target 22681; HLA-B*49:01; DPPA2; ENSG00000163530; CTA
VEVITSAPG

SEQ ID NO: 22682 - protein, 9 aa, Homo sapiens
  misc_feature: Table A; Target 22682; HLA-C*04:01; DPPA2; ENSG00000163530; CTA
VEVITSAPG

SEQ ID NO: 22683 - protein, 11 aa, Homo sapiens
  misc_feature: Table A; Target 22683; HLA-A*30:01; DPPA2; ENSG00000163530; CTA
VEVITSAPGAM

SEQ ID NO: 22684 - protein, 11 aa, Homo sapiens
  misc_feature: Table A; Target 22684; HLA-B*18:01; DPPA2; ENSG00000163530; CTA
VEVITSAPGAM

SEQ ID NO: 22685 - protein, 11 aa, Homo sapiens
  misc_feature: Table A; Target 22685; HLA-B*40:01; DPPA2; ENSG00000163530; CTA
VEVITSAPGAM

SEQ ID NO: 22686 - protein, 11 aa, Homo sapiens
  misc_feature: Table A; Target 22686; HLA-B*40:02; DPPA2; ENSG00000163530; CTA
VEVITSAPGAM

SEQ ID NO: 22687 - protein, 9 aa, Homo sapiens
  misc_feature: Table A; Target 22687; HLA-A*03:01; DPPA2; ENSG00000163530; CTA
VILTLVPVK

SEQ ID NO: 22688 - protein, 9 aa, Homo sapiens
  misc_feature: Table A; Target 22688; HLA-A*03:02; DPPA2; ENSG00000163530; CTA
VILTLVPVK

SEQ ID NO: 22689 - protein, 9 aa, Homo sapiens
  misc_feature: Table A; Target 22689; HLA-A*11:01; DPPA2; ENSG00000163530; CTA
VILTLVPVK

SEQ ID NO: 22690 - protein, 9 aa, Homo sapiens
  misc_feature: Table A; Target 22690; HLA-B*27:02; DPPA2; ENSG00000163530; CTA
VILTLVPVK

SEQ ID NO: 22691 - protein, 9 aa, Homo sapiens
  misc_feature: Table A; Target 22691; HLA-B*39:01; DPPA2; ENSG00000163530; CTA
VITSAPGAM

SEQ ID NO: 22692 - protein, 9 aa, Homo sapiens
  misc_feature: Table A; Target 22692; HLA-C*01:02; DPPA2; ENSG00000163530; CTA
VITSAPGAM

SEQ ID NO: 22693 - protein, 10 aa, Homo sapiens
  misc_feature: Table A; Target 22693; HLA-B*39:01; DPPA2; ENSG00000163530; CTA
VITSAPGAML

SEQ ID NO: 22694 - protein, 10 aa, Homo sapiens
  misc_feature: Table A; Target 22694; HLA-C*01:02; DPPA2; ENSG00000163530; CTA
VITSAPGAML

SEQ ID NO: 22695 - protein, 11 aa, Homo sapiens
  misc_feature: Table A; Target 22695; HLA-B*07:02; DPPA2; ENSG00000163530; CTA
VPTTHRRMISL

SEQ ID NO: 22696 - protein, 9 aa, Homo sapiens
  misc_feature: Table A; Target 22696; HLA-B*07:02; DPPA2; ENSG00000163530; CTA
VPVKDDANM

SEQ ID NO: 22697 - protein, 9 aa, Homo sapiens
  misc_feature: Table A; Target 22697; HLA-B*35:01; DPPA2; ENSG00000163530; CTA
VPVKDDANM

SEQ ID NO: 22698 - protein, 9 aa, Homo sapiens
  misc_feature: Table A; Target 22698; HLA-B*35:03; DPPA2; ENSG00000163530; CTA
VPVKDDANM

SEQ ID NO: 22699 - protein, 9 aa, Homo sapiens
  misc_feature: Table A; Target 22699; HLA-B*55:01; DPPA2; ENSG00000163530; CTA
VPVKDDANM

SEQ ID NO: 22700 - protein, 9 aa, Homo sapiens
  misc_feature: Table A; Target 22700; HLA-B*56:01; DPPA2; ENSG00000163530; CTA
VPVKDDANM

SEQ ID NO: 22701 - protein, 9 aa, Homo sapiens
  misc_feature: Table A; Target 22701; HLA-C*03:03; DPPA2; ENSG00000163530; CTA
VPVKDDANM

SEQ ID NO: 22702 - protein, 9 aa, Homo sapiens
  misc_feature: Table A; Target 22702; HLA-C*07:02; DPPA2; ENSG00000163530; CTA
VPVKDDANM

SEQ ID NO: 22703 - protein, 9 aa, Homo sapiens
  misc_feature: Table A; Target 22703; HLA-C*01:02; DPPA2; ENSG00000163530; CTA
VQPKALNSC

SEQ ID NO: 22704 - protein, 9 aa, Homo sapiens
  misc_feature: Table A; Target 22704; HLA-B*38:01; DPPA2; ENSG00000163530; CTA
VSSTSDVKL

SEQ ID NO: 22705 - protein, 9 aa, Homo sapiens
  misc_feature: Table A; Target 22705; HLA-B*40:01; DPPA2; ENSG00000163530; CTA
VSSTSDVKL

SEQ ID NO: 22706 - protein, 9 aa, Homo sapiens
  misc_feature: Table A; Target 22706; HLA-B*58:01; DPPA2; ENSG00000163530; CTA
VSSTSDVKL

SEQ ID NO: 22707 - protein, 9 aa, Homo sapiens
  misc_feature: Table A; Target 22707; HLA-C*03:04; DPPA2; ENSG00000163530; CTA
VSSTSDVKL

SEQ ID NO: 22708 - protein, 9 aa, Homo sapiens
  misc_feature: Table A; Target 22708; HLA-C*05:01; DPPA2; ENSG00000163530; CTA
VSSTSDVKL

SEQ ID NO: 22709 - protein, 9 aa, Homo sapiens
  misc_feature: Table A; Target 22709; HLA-C*07:04; DPPA2; ENSG00000163530; CTA
VSSTSDVKL

SEQ ID NO: 22710 - protein, 9 aa, Homo sapiens
  misc_feature: Table A; Target 22710; HLA-C*16:02; DPPA2; ENSG00000163530; CTA
VSSTSDVKL

SEQ ID NO: 22711 - protein, 11 aa, Homo sapiens
  misc_feature: Table A; Target 22711; HLA-A*01:01; DPPA2; ENSG00000163530; CTA
VSSTSDVKLEK

SEQ ID NO: 22712 - protein, 11 aa, Homo sapiens
  misc_feature: Table A; Target 22712; HLA-A*03:01; DPPA2; ENSG00000163530; CTA
VSSTSDVKLEK

SEQ ID NO: 22713 - protein, 11 aa, Homo sapiens
  misc_feature: Table A; Target 22713; HLA-A*03:02; DPPA2; ENSG00000163530; CTA
VSSTSDVKLEK

SEQ ID NO: 22714 - protein, 11 aa, Homo sapiens
  misc_feature: Table A; Target 22714; HLA-A*11:01; DPPA2; ENSG00000163530; CTA
VSSTSDVKLEK

SEQ ID NO: 22715 - protein, 9 aa, Homo sapiens
  misc_feature: Table A; Target 22715; HLA-A*02:03; DPPA2; ENSG00000163530; CTA
VVHGRLLSA

SEQ ID NO: 22716 - protein, 9 aa, Homo sapiens
  misc_feature: Table A; Target 22716; HLA-A*32:01; DPPA2; ENSG00000163530; CTA
VVHGRLLSA

SEQ ID NO: 22717 - protein, 9 aa, Homo sapiens
  misc_feature: Table A; Target 22717; HLA-B*08:01; DPPA2; ENSG00000163530; CTA
VVHGRLLSA

SEQ ID NO: 22718 - protein, 9 aa, Homo sapiens
  misc_feature: Table A; Target 22718; HLA-B*40:02; DPPA2; ENSG00000163530; CTA
VVHGRLLSA

SEQ ID NO: 22719 - protein, 9 aa, Homo sapiens
  misc_feature: Table A; Target 22719; HLA-B*46:01; DPPA2; ENSG00000163530; CTA
VVHGRLLSA

SEQ ID NO: 22720 - protein, 9 aa, Homo sapiens
  misc_feature: Table A; Target 22720; HLA-B*54:01; DPPA2; ENSG00000163530; CTA
VVHGRLLSA

SEQ ID NO: 22721 - protein, 9 aa, Homo sapiens
  misc_feature: Table A; Target 22721; HLA-B*55:01; DPPA2; ENSG00000163530; CTA
VVHGRLLSA

SEQ ID NO: 22722 - protein, 9 aa, Homo sapiens
  misc_feature: Table A; Target 22722; HLA-B*56:01; DPPA2; ENSG00000163530; CTA
VVHGRLLSA

SEQ ID NO: 22723 - protein, 8 aa, Homo sapiens
  misc_feature: Table A; Target 22723; HLA-B*08:01; DPPA2; ENSG00000163530; CTA
YPEQRQDM

SEQ ID NO: 22724 - protein, 9 aa, Homo sapiens
  misc_feature: Table A; Target 22724; HLA-B*55:01; DPPA2; ENSG00000163530; CTA
YPEQRQDMP

SEQ ID NO: 22725 - protein, 11 aa, Homo sapiens
  misc_feature: Table A; Target 22725; HLA-B*35:01; DPPA2; ENSG00000163530; CTA
YPEQRQDMPEM

SEQ ID NO: 22726 - protein, 11 aa, Homo sapiens
  misc_feature: Table A; Target 22726; HLA-B*35:03; DPPA2; ENSG00000163530; CTA
YPEQRQDMPEM

SEQ ID NO: 22727 - protein, 11 aa, Homo sapiens
  misc_feature: Table A; Target 22727; HLA-B*55:01; DPPA2; ENSG00000163530; CTA
YPEQRQDMPEM

SEQ ID NO: 22728 - protein, 9 aa, Homo sapiens
  misc_feature: Table A; Target 22728; HLA-A*32:01; DSCR4; ENSG00000184029; TAA
AASPALHST

SEQ ID NO: 22729 - protein, 9 aa, Homo sapiens
  misc_feature: Table A; Target 22729; HLA-B*56:01; DSCR4; ENSG00000184029; TAA
AASPALHST

SEQ ID NO: 22730 - protein, 9 aa, Homo sapiens
  misc_feature: Table A; Target 22730; HLA-C*16:01; DSCR4; ENSG00000184029; TAA
AASPALHST

SEQ ID NO: 22731 - protein, 9 aa, Homo sapiens
  misc_feature: Table A; Target 22731; HLA-C*16:02; DSCR4; ENSG00000184029; TAA
AASPALHST

SEQ ID NO: 22732 - protein, 9 aa, Homo sapiens
  misc_feature: Table A; Target 22732; HLA-C*16:04; DSCR4; ENSG00000184029; TAA
AASPALHST

SEQ ID NO: 22733 - protein, 9 aa, Homo sapiens
  misc_feature: Table A; Target 22733; HLA-A*29:02; DSCR4; ENSG00000184029; TAA
CLIWKYQLY

SEQ ID NO: 22734 - protein, 11 aa, Homo sapiens
  misc_feature: Table A; Target 22734; HLA-A*33:01; DSCR4; ENSG00000184029; TAA
DAASPALHSTS

SEQ ID NO: 22735 - protein, 10 aa, Homo sapiens
  misc_feature: Table A; Target 22735; HLA-A*68:01; DSCR4; ENSG00000184029; TAA
DPASASPLHR

SEQ ID NO: 22736 - protein, 9 aa, Homo sapiens
  misc_feature: Table A; Target 22736; HLA-B*35:03; DSCR4; ENSG00000184029; TAA
DSDAASPAL

SEQ ID NO: 22737 - protein, 9 aa, Homo sapiens
  misc_feature: Table A; Target 22737; HLA-B*39:01; DSCR4; ENSG00000184029; TAA
DSDAASPAL

SEQ ID NO: 22738 - protein, 9 aa, Homo sapiens
  misc_feature: Table A; Target 22738; HLA-C*05:01; DSCR4; ENSG00000184029; TAA
DSDAASPAL

SEQ ID NO: 22739 - protein, 10 aa, Homo sapiens
  misc_feature: Table A; Target 22739; HLA-A*01:01; DSCR4; ENSG00000184029; TAA
DSDAASPALH

SEQ ID NO: 22740 - protein, 8 aa, Homo sapiens
  misc_feature: Table A; Target 22740; HLA-B*18:01; DSCR4; ENSG00000184029; TAA
EEKILPKV

SEQ ID NO: 22741 - protein, 10 aa, Homo sapiens
  misc_feature: Table A; Target 22741; HLA-A*03:01; DSCR4; ENSG00000184029; TAA
GLASPTIITR

SEQ ID NO: 22742 - protein, 10 aa, Homo sapiens
  misc_feature: Table A; Target 22742; HLA-A*03:02; DSCR4; ENSG00000184029; TAA
GLASPTIITR

SEQ ID NO: 22743 - protein, 10 aa, Homo sapiens
  misc_feature: Table A; Target 22743; HLA-A*11:01; DSCR4; ENSG00000184029; TAA
GLASPTIITR

SEQ ID NO: 22744 - protein, 10 aa, Homo sapiens
  misc_feature: Table A; Target 22744; HLA-A*31:01; DSCR4; ENSG00000184029; TAA
GLASPTIITR

SEQ ID NO: 22745 - protein, 10 aa, Homo sapiens
  misc_feature: Table A; Target 22745; HLA-A*33:03; DSCR4; ENSG00000184029; TAA
GLASPTIITR

SEQ ID NO: 22746 - protein, 10 aa, Homo sapiens
  misc_feature: Table A; Target 22746; HLA-A*68:01; DSCR4; ENSG00000184029; TAA
GLASPTIITR

SEQ ID NO: 22747 - protein, 10 aa, Homo sapiens
  misc_feature: Table A; Target 22747; HLA-C*07:06; DSCR4; ENSG00000184029; TAA
GLASPTIITR

SEQ ID NO: 22748 - protein, 10 aa, Homo sapiens
  misc_feature: Table A; Target 22748; HLA-B*57:01; DSCR4; ENSG00000184029; TAA
IITREGQQFW

SEQ ID NO: 22749 - protein, 9 aa, Homo sapiens
  misc_feature: Table A; Target 22749; HLA-B*57:01; DSCR4; ENSG00000184029; TAA
ITREGQQFW

SEQ ID NO: 22750 - protein, 9 aa, Homo sapiens
  misc_feature: Table A; Target 22750; HLA-B*58:01; DSCR4; ENSG00000184029; TAA
ITREGQQFW

SEQ ID NO: 22751 - protein, 9 aa, Homo sapiens
  misc_feature: Table A; Target 22751; HLA-A*32:01; DSCR4; ENSG00000184029; TAA
KQISASPST

SEQ ID NO: 22752 - protein, 9 aa, Homo sapiens
  misc_feature: Table A; Target 22752; HLA-B*13:02; DSCR4; ENSG00000184029; TAA
KQISASPST

SEQ ID NO: 22753 - protein, 9 aa, Homo sapiens
  misc_feature: Table A; Target 22753; HLA-B*15:01; DSCR4; ENSG00000184029; TAA
KQISASPST

SEQ ID NO: 22754 - protein, 9 aa, Homo sapiens
  misc_feature: Table A; Target 22754; HLA-B*15:03; DSCR4; ENSG00000184029; TAA
KQISASPST

SEQ ID NO: 22755 - protein, 9 aa, Homo sapiens
  misc_feature: Table A; Target 22755; HLA-B*58:01; DSCR4; ENSG00000184029; TAA
KQISASPST

SEQ ID NO: 22756 - protein, 9 aa, Homo sapiens
  misc_feature: Table A; Target 22756; HLA-C*06:02; DSCR4; ENSG00000184029; TAA
KQISASPST

SEQ ID NO: 22757 - protein, 9 aa, Homo sapiens
  misc_feature: Table A; Target 22757; HLA-C*16:04; DSCR4; ENSG00000184029; TAA
KQISASPST

SEQ ID NO: 22758 - protein, 9 aa, Homo sapiens
  misc_feature: Table A; Target 22758; HLA-A*24:02; DSCR4; ENSG00000184029; TAA
KYQLYLHGL

SEQ ID NO: 22759 - protein, 9 aa, Homo sapiens
  misc_feature: Table A; Target 22759; HLA-A*11:01; DSCR4; ENSG00000184029; TAA
LASPTIITR

SEQ ID NO: 22760 - protein, 9 aa, Homo sapiens
  misc_feature: Table A; Target 22760; HLA-A*31:01; DSCR4; ENSG00000184029; TAA
LASPTIITR

SEQ ID NO: 22761 - protein, 9 aa, Homo sapiens
  misc_feature: Table A; Target 22761; HLA-A*33:01; DSCR4; ENSG00000184029; TAA
LASPTIITR

SEQ ID NO: 22762 - protein, 9 aa, Homo sapiens
  misc_feature: Table A; Target 22762; HLA-A*33:03; DSCR4; ENSG00000184029; TAA
LASPTIITR

SEQ ID NO: 22763 - protein, 9 aa, Homo sapiens
  misc_feature: Table A; Target 22763; HLA-A*68:01; DSCR4; ENSG00000184029; TAA
LASPTIITR

SEQ ID NO: 22764 - protein, 9 aa, Homo sapiens
  misc_feature: Table A; Target 22764; HLA-B*35:01; DSCR4; ENSG00000184029; TAA
LASPTIITR

SEQ ID NO: 22765 - protein, 9 aa, Homo sapiens
  misc_feature: Table A; Target 22765; HLA-B*51:01; DSCR4; ENSG00000184029; TAA
LASPTIITR

SEQ ID NO: 22766 - protein, 9 aa, Homo sapiens
  misc_feature: Table A; Target 22766; HLA-B*57:01; DSCR4; ENSG00000184029; TAA
LASPTIITR

SEQ ID NO: 22767 - protein, 9 aa, Homo sapiens
  misc_feature: Table A; Target 22767; HLA-C*02:02; DSCR4; ENSG00000184029; TAA
LASPTIITR

SEQ ID NO: 22768 - protein, 9 aa, Homo sapiens
  misc_feature: Table A; Target 22768; HLA-C*07:06; DSCR4; ENSG00000184029; TAA
LASPTIITR

SEQ ID NO: 22769 - protein, 9 aa, Homo sapiens
  misc_feature: Table A; Target 22769; HLA-C*12:03; DSCR4; ENSG00000184029; TAA
LASPTIITR

SEQ ID NO: 22770 - protein, 9 aa, Homo sapiens
  misc_feature: Table A; Target 22770; HLA-C*16:01; DSCR4; ENSG00000184029; TAA
LASPTIITR

SEQ ID NO: 22771 - protein, 9 aa, Homo sapiens
  misc_feature: Table A; Target 22771; HLA-C*16:02; DSCR4; ENSG00000184029; TAA
LASPTIITR

SEQ ID NO: 22772 - protein, 9 aa, Homo sapiens
  misc_feature: Table A; Target 22772; HLA-A*02:04; DSCR4; ENSG00000184029; TAA
LIWKYQLYL

SEQ ID NO: 22773 - protein, 9 aa, Homo sapiens
  misc_feature: Table A; Target 22773; HLA-A*02:07; DSCR4; ENSG00000184029; TAA
LIWKYQLYL

SEQ ID NO: 22774 - protein, 10 aa, Homo sapiens
  misc_feature: Table A; Target 22774; HLA-B*07:02; DSCR4; ENSG00000184029; TAA
LPASPTDSGL

SEQ ID NO: 22775 - protein, 10 aa, Homo sapiens
  misc_feature: Table A; Target 22775; HLA-B*35:01; DSCR4; ENSG00000184029; TAA
LPASPTDSGL

SEQ ID NO: 22776 - protein, 10 aa, Homo sapiens
  misc_feature: Table A; Target 22776; HLA-B*35:03; DSCR4; ENSG00000184029; TAA
LPASPTDSGL

SEQ ID NO: 22777 - protein, 10 aa, Homo sapiens
  misc_feature: Table A; Target 22777; HLA-C*07:02; DSCR4; ENSG00000184029; TAA
LPASPTDSGL

SEQ ID NO: 22778 - protein, 10 aa, Homo sapiens
  misc_feature: Table A; Target 22778; HLA-B*07:02; DSCR4; ENSG00000184029; TAA
LPDPASASPL

SEQ ID NO: 22779 - protein, 10 aa, Homo sapiens
  misc_feature: Table A; Target 22779; HLA-B*35:01; DSCR4; ENSG00000184029; TAA
LPDPASASPL

SEQ ID NO: 22780 - protein, 10 aa, Homo sapiens
  misc_feature: Table A; Target 22780; HLA-B*35:03; DSCR4; ENSG00000184029; TAA
LPDPASASPL

SEQ ID NO: 22781 - protein, 10 aa, Homo sapiens
  misc_feature: Table A; Target 22781; HLA-C*03:03; DSCR4; ENSG00000184029; TAA
LPDPASASPL

SEQ ID NO: 22782 - protein, 10 aa, Homo sapiens
  misc_feature: Table A; Target 22782; HLA-C*05:01; DSCR4; ENSG00000184029; TAA
LPDPASASPL

SEQ ID NO: 22783 - protein, 10 aa, Homo sapiens
  misc_feature: Table A; Target 22783; HLA-C*07:02; DSCR4; ENSG00000184029; TAA
LPDPASASPL

SEQ ID NO: 22784 - protein, 10 aa, Homo sapiens
  misc_feature: Table A; Target 22784; HLA-B*57:01; DSCR4; ENSG00000184029; TAA
LTRDDEPRIF

SEQ ID NO: 22785 - protein, 9 aa, Homo sapiens
  misc_feature: Table A; Target 22785; HLA-A*68:01; DSCR4; ENSG00000184029; TAA
PASASPLHR

SEQ ID NO: 22786 - protein, 11 aa, Homo sapiens
  misc_feature: Table A; Target 22786; HLA-C*07:02; DSCR4; ENSG00000184029; TAA
PLPDPASASPL

SEQ ID NO: 22787 - protein, 9 aa, Homo sapiens
  misc_feature: Table A; Target 22787; HLA-A*03:01; DSCR4; ENSG00000184029; TAA
QLYLHGLHK

SEQ ID NO: 22788 - protein, 10 aa, Homo sapiens
  misc_feature: Table A; Target 22788; HLA-A*03:01; DSCR4; ENSG00000184029; TAA
QLYLHGLHKK

SEQ ID NO: 22789 - protein, 9 aa, Homo sapiens
  misc_feature: Table A; Target 22789; HLA-B*49:01; DSCR4; ENSG00000184029; TAA
REEKILPKV

SEQ ID NO: 22790 - protein, 9 aa, Homo sapiens
  misc_feature: Table A; Target 22790; HLA-C*16:01; DSCR4; ENSG00000184029; TAA
SASPLHREE

SEQ ID NO: 22791 - protein, 8 aa, Homo sapiens
  misc_feature: Table A; Target 22791; HLA-A*30:01; DSCR4; ENSG00000184029; TAA
SDAASPAL

SEQ ID NO: 22792 - protein, 8 aa, Homo sapiens
  misc_feature: Table A; Target 22792; HLA-B*37:01; DSCR4; ENSG00000184029; TAA
SDAASPAL

SEQ ID NO: 22793 - protein, 8 aa, Homo sapiens
  misc_feature: Table A; Target 22793; HLA-B*40:02; DSCR4; ENSG00000184029; TAA
SDAASPAL

SEQ ID NO: 22794 - protein, 11 aa, Homo sapiens
  misc_feature: Table A; Target 22794; HLA-A*33:03; DSCR4; ENSG00000184029; TAA
SGLASPTIITR

SEQ ID NO: 22795 - protein, 11 aa, Homo sapiens
  misc_feature: Table A; Target 22795; HLA-A*68:01; DSCR4; ENSG00000184029; TAA
SGLASPTIITR

SEQ ID NO: 22796 - protein, 11 aa, Homo sapiens
  misc_feature: Table A; Target 22796; HLA-C*07:06; DSCR4; ENSG00000184029; TAA
SGLASPTIITR

SEQ ID NO: 22797 - protein, 9 aa, Homo sapiens
  misc_feature: Table A; Target 22797; HLA-B*07:02; DSCR4; ENSG00000184029; TAA
SPALHSTSP

SEQ ID NO: 22798 - protein, 9 aa, Homo sapiens
  misc_feature: Table A; Target 22798; HLA-B*56:01; DSCR4; ENSG00000184029; TAA
SPALHSTSP

SEQ ID NO: 22799 - protein, 9 aa, Homo sapiens
  misc_feature: Table A; Target 22799; HLA-C*07:02; DSCR4; ENSG00000184029; TAA
SPALHSTSP

SEQ ID NO: 22800 - protein, 10 aa, Homo sapiens
  misc_feature: Table A; Target 22800; HLA-B*07:02; DSCR4; ENSG00000184029; TAA
SPALHSTSPL

SEQ ID NO: 22801 - protein, 10 aa, Homo sapiens
  misc_feature: Table A; Target 22801; HLA-C*07:02; DSCR4; ENSG00000184029; TAA
SPALHSTSPL

SEQ ID NO: 22802 - protein, 9 aa, Homo sapiens
  misc_feature: Table A; Target 22802; HLA-A*02:01; DSCR4; ENSG00000184029; TAA
SPLPDPASA

SEQ ID NO: 22803 - protein, 9 aa, Homo sapiens
  misc_feature: Table A; Target 22803; HLA-B*07:02; DSCR4; ENSG00000184029; TAA
SPLPDPASA

SEQ ID NO: 22804 - protein, 9 aa, Homo sapiens
  misc_feature: Table A; Target 22804; HLA-B*35:01; DSCR4; ENSG00000184029; TAA
SPLPDPASA

SEQ ID NO: 22805 - protein, 9 aa, Homo sapiens
  misc_feature: Table A; Target 22805; HLA-B*35:03; DSCR4; ENSG00000184029; TAA
SPLPDPASA

SEQ ID NO: 22806 - protein, 9 aa, Homo sapiens
  misc_feature: Table A; Target 22806; HLA-B*54:01; DSCR4; ENSG00000184029; TAA
SPLPDPASA

SEQ ID NO: 22807 - protein, 9 aa, Homo sapiens
  misc_feature: Table A; Target 22807; HLA-B*55:01; DSCR4; ENSG00000184029; TAA
SPLPDPASA

SEQ ID NO: 22808 - protein, 9 aa, Homo sapiens
  misc_feature: Table A; Target 22808; HLA-B*56:01; DSCR4; ENSG00000184029; TAA
SPLPDPASA

SEQ ID NO: 22809 - protein, 9 aa, Homo sapiens
  misc_feature: Table A; Target 22809; HLA-B*56:01; DSCR4; ENSG00000184029; TAA
SPTIITREG

SEQ ID NO: 22810 - protein, 10 aa, Homo sapiens
  misc_feature: Table A; Target 22810; HLA-A*25:01; DSCR4; ENSG00000184029; TAA
TIITREGQQF

SEQ ID NO: 22811 - protein, 11 aa, Homo sapiens
  misc_feature: Table A; Target 22811; HLA-B*07:02; DSCR4; ENSG00000184029; TAA
TPDSDAASPAL

SEQ ID NO: 22812 - protein, 11 aa, Homo sapiens
  misc_feature: Table A; Target 22812; HLA-B*35:01; DSCR4; ENSG00000184029; TAA
TPDSDAASPAL

SEQ ID NO: 22813 - protein, 11 aa, Homo sapiens
  misc_feature: Table A; Target 22813; HLA-B*35:03; DSCR4; ENSG00000184029; TAA
TPDSDAASPAL

SEQ ID NO: 22814 - protein, 11 aa, Homo sapiens
  misc_feature: Table A; Target 22814; HLA-B*55:01; DSCR4; ENSG00000184029; TAA
TPDSDAASPAL

SEQ ID NO: 22815 - protein, 11 aa, Homo sapiens
  misc_feature: Table A; Target 22815; HLA-C*07:02; DSCR4; ENSG00000184029; TAA
TPDSDAASPAL

SEQ ID NO: 22816 - protein, 9 aa, Homo sapiens
  misc_feature: Table A; Target 22816; HLA-B*38:01; DSCR4; ENSG00000184029; TAA
TRDDEPRIF

SEQ ID NO: 22817 - protein, 8 aa, Homo sapiens
  misc_feature: Table A; Target 22817; HLA-A*02:04; DSCR4; ENSG00000184029; TAA
YQLYLHGL

SEQ ID NO: 22818 - protein, 8 aa, Homo sapiens
  misc_feature: Table A; Target 22818; HLA-B*13:02; DSCR4; ENSG00000184029; TAA
YQLYLHGL

SEQ ID NO: 22819 - protein, 8 aa, Homo sapiens
  misc_feature: Table A; Target 22819; HLA-A*23:01; DSCR8; ENSG00000198054; TAA
AFVKHLLL

SEQ ID NO: 22820 - protein, 8 aa, Homo sapiens
  misc_feature: Table A; Target 22820; HLA-A*24:02; DSCR8; ENSG00000198054; TAA
AFVKHLLL

SEQ ID NO: 22821 - protein, 9 aa, Homo sapiens
  misc_feature: Table A; Target 22821; HLA-A*23:01; DSCR8; ENSG00000198054; TAA
AFVKHLLLF

SEQ ID NO: 22822 - protein, 9 aa, Homo sapiens
  misc_feature: Table A; Target 22822; HLA-A*24:02; DSCR8; ENSG00000198054; TAA
AFVKHLLLF

SEQ ID NO: 22823 - protein, 9 aa, Homo sapiens
  misc_feature: Table A; Target 22823; HLA-A*29:02; DSCR8; ENSG00000198054; TAA
AFVKHLLLF

SEQ ID NO: 22824 - protein, 8 aa, Homo sapiens
  misc_feature: Table A; Target 22824; HLA-A*30:01; DSCR8; ENSG00000198054; TAA
AQYESIQF

SEQ ID NO: 22825 - protein, 8 aa, Homo sapiens
  misc_feature: Table A; Target 22825; HLA-A*30:02; DSCR8; ENSG00000198054; TAA
AQYESIQF

SEQ ID NO: 22826 - protein, 8 aa, Homo sapiens
  misc_feature: Table A; Target 22826; HLA-A*32:01; DSCR8; ENSG00000198054; TAA
AQYESIQF

SEQ ID NO: 22827 - protein, 8 aa, Homo sapiens
  misc_feature: Table A; Target 22827; HLA-B*08:01; DSCR8; ENSG00000198054; TAA
AQYESIQF

SEQ ID NO: 22828 - protein, 8 aa, Homo sapiens
  misc_feature: Table A; Target 22828; HLA-B*13:02; DSCR8; ENSG00000198054; TAA
AQYESIQF

SEQ ID NO: 22829 - protein, 8 aa, Homo sapiens
  misc_feature: Table A; Target 22829; HLA-B*15:01; DSCR8; ENSG00000198054; TAA
AQYESIQF

SEQ ID NO: 22830 - protein, 8 aa, Homo sapiens
  misc_feature: Table A; Target 22830; HLA-B*15:03; DSCR8; ENSG00000198054; TAA
AQYESIQF

SEQ ID NO: 22831 - protein, 8 aa, Homo sapiens
  misc_feature: Table A; Target 22831; HLA-B*27:02; DSCR8; ENSG00000198054; TAA
AQYESIQF

SEQ ID NO: 22832 - protein, 8 aa, Homo sapiens
  misc_feature: Table A; Target 22832; HLA-B*27:05; DSCR8; ENSG00000198054; TAA
AQYESIQF

SEQ ID NO: 22833 - protein, 8 aa, Homo sapiens
  misc_feature: Table A; Target 22833; HLA-B*37:01; DSCR8; ENSG00000198054; TAA
AQYESIQF

SEQ ID NO: 22834 - protein, 8 aa, Homo sapiens
  misc_feature: Table A; Target 22834; HLA-B*39:01; DSCR8; ENSG00000198054; TAA
AQYESIQF

SEQ ID NO: 22835 - protein, 8 aa, Homo sapiens
  misc_feature: Table A; Target 22835; HLA-B*40:02; DSCR8; ENSG00000198054; TAA
AQYESIQF

SEQ ID NO: 22836 - protein, 8 aa, Homo sapiens
  misc_feature: Table A; Target 22836; HLA-B*46:01; DSCR8; ENSG00000198054; TAA
AQYESIQF

SEQ ID NO: 22837 - protein, 8 aa, Homo sapiens
  misc_feature: Table A; Target 22837; HLA-B*58:01; DSCR8; ENSG00000198054; TAA
AQYESIQF

SEQ ID NO: 22838 - protein, 8 aa, Homo sapiens
  misc_feature: Table A; Target 22838; HLA-C*02:02; DSCR8; ENSG00000198054; TAA
AQYESIQF

SEQ ID NO: 22839 - protein, 8 aa, Homo sapiens
  misc_feature: Table A; Target 22839; HLA-C*03:03; DSCR8; ENSG00000198054; TAA
AQYESIQF

SEQ ID NO: 22840 - protein, 8 aa, Homo sapiens
  misc_feature: Table A; Target 22840; HLA-C*03:04; DSCR8; ENSG00000198054; TAA
AQYESIQF

SEQ ID NO: 22841 - protein, 8 aa, Homo sapiens
  misc_feature: Table A; Target 22841; HLA-C*04:01; DSCR8; ENSG00000198054; TAA
AQYESIQF

SEQ ID NO: 22842 - protein, 8 aa, Homo sapiens
  misc_feature: Table A; Target 22842; HLA-C*05:01; DSCR8; ENSG00000198054; TAA
AQYESIQF

SEQ ID NO: 22843 - protein, 8 aa, Homo sapiens
  misc_feature: Table A; Target 22843; HLA-C*07:04; DSCR8; ENSG00000198054; TAA
AQYESIQF

SEQ ID NO: 22844 - protein, 8 aa, Homo sapiens
  misc_feature: Table A; Target 22844; HLA-C*14:02; DSCR8; ENSG00000198054; TAA
AQYESIQF

SEQ ID NO: 22845 - protein, 8 aa, Homo sapiens
  misc_feature: Table A; Target 22845; HLA-C*16:04; DSCR8; ENSG00000198054; TAA
AQYESIQF

SEQ ID NO: 22846 - protein, 9 aa, Homo sapiens
  misc_feature: Table A; Target 22846; HLA-A*02:03; DSCR8; ENSG00000198054; TAA
AQYESIQFM

SEQ ID NO: 22847 - protein, 9 aa, Homo sapiens
  misc_feature: Table A; Target 22847; HLA-A*02:04; DSCR8; ENSG00000198054; TAA
AQYESIQFM

SEQ ID NO: 22848 - protein, 9 aa, Homo sapiens
  misc_feature: Table A; Target 22848; HLA-A*26:01; DSCR8; ENSG00000198054; TAA
AQYESIQFM

SEQ ID NO: 22849 - protein, 9 aa, Homo sapiens
  misc_feature: Table A; Target 22849; HLA-A*30:01; DSCR8; ENSG00000198054; TAA
AQYESIQFM

SEQ ID NO: 22850 - protein, 9 aa, Homo sapiens
  misc_feature: Table A; Target 22850; HLA-B*13:02; DSCR8; ENSG00000198054; TAA
AQYESIQFM

SEQ ID NO: 22851 - protein, 9 aa, Homo sapiens
  misc_feature: Table A; Target 22851; HLA-B*15:01; DSCR8; ENSG00000198054; TAA
AQYESIQFM

SEQ ID NO: 22852 - protein, 9 aa, Homo sapiens
  misc_feature: Table A; Target 22852; HLA-B*15:03; DSCR8; ENSG00000198054; TAA
AQYESIQFM

SEQ ID NO: 22853 - protein, 9 aa, Homo sapiens
  misc_feature: Table A; Target 22853; HLA-B*27:05; DSCR8; ENSG00000198054; TAA
AQYESIQFM

SEQ ID NO: 22854 - protein, 9 aa, Homo sapiens
  misc_feature: Table A; Target 22854; HLA-B*38:01; DSCR8; ENSG00000198054; TAA
AQYESIQFM

SEQ ID NO: 22855 - protein, 9 aa, Homo sapiens
  misc_feature: Table A; Target 22855; HLA-B*39:01; DSCR8; ENSG00000198054; TAA
AQYESIQFM

SEQ ID NO: 22856 - protein, 9 aa, Homo sapiens
  misc_feature: Table A; Target 22856; HLA-B*44:02; DSCR8; ENSG00000198054; TAA
AQYESIQFM

SEQ ID NO: 22857 - protein, 9 aa, Homo sapiens
  misc_feature: Table A; Target 22857; HLA-B*44:03; DSCR8; ENSG00000198054; TAA
AQYESIQFM

SEQ ID NO: 22858 - protein, 9 aa, Homo sapiens
  misc_feature: Table A; Target 22858; HLA-B*49:01; DSCR8; ENSG00000198054; TAA
AQYESIQFM

SEQ ID NO: 22859 - protein, 9 aa, Homo sapiens
  misc_feature: Table A; Target 22859; HLA-C*02:02; DSCR8; ENSG00000198054; TAA
AQYESIQFM

SEQ ID NO: 22860 - protein, 9 aa, Homo sapiens
  misc_feature: Table A; Target 22860; HLA-C*12:03; DSCR8; ENSG00000198054; TAA
AQYESIQFM

SEQ ID NO: 22861 - protein, 9 aa, Homo sapiens
  misc_feature: Table A; Target 22861; HLA-C*16:04; DSCR8; ENSG00000198054; TAA
AQYESIQFM

SEQ ID NO: 22862 - protein, 8 aa, Homo sapiens
  misc_feature: Table A; Target 22862; HLA-C*07:01; DSCR8; ENSG00000198054; TAA
EPGPNFVT

SEQ ID NO: 22863 - protein, 9 aa, Homo sapiens
  misc_feature: Table A; Target 22863; HLA-A*02:03; DSCR8; ENSG00000198054; TAA
EPGPNFVTV

SEQ ID NO: 22864 - protein, 9 aa, Homo sapiens
  misc_feature: Table A; Target 22864; HLA-A*25:01; DSCR8; ENSG00000198054; TAA
EPGPNFVTV

SEQ ID NO: 22865 - protein, 9 aa, Homo sapiens
  misc_feature: Table A; Target 22865; HLA-A*26:01; DSCR8; ENSG00000198054; TAA
EPGPNFVTV

SEQ ID NO: 22866 - protein, 9 aa, Homo sapiens
  misc_feature: Table A; Target 22866; HLA-A*30:01; DSCR8; ENSG00000198054; TAA
EPGPNFVTV

SEQ ID NO: 22867 - protein, 9 aa, Homo sapiens
  misc_feature: Table A; Target 22867; HLA-A*33:01; DSCR8; ENSG00000198054; TAA
EPGPNFVTV

SEQ ID NO: 22868 - protein, 9 aa, Homo sapiens
  misc_feature: Table A; Target 22868; HLA-A*33:03; DSCR8; ENSG00000198054; TAA
EPGPNFVTV

SEQ ID NO: 22869 - protein, 9 aa, Homo sapiens
  misc_feature: Table A; Target 22869; HLA-A*68:01; DSCR8; ENSG00000198054; TAA
EPGPNFVTV

SEQ ID NO: 22870 - protein, 9 aa, Homo sapiens
  misc_feature: Table A; Target 22870; HLA-A*68:02; DSCR8; ENSG00000198054; TAA
EPGPNFVTV

SEQ ID NO: 22871 - protein, 9 aa, Homo sapiens
  misc_feature: Table A; Target 22871; HLA-B*07:02; DSCR8; ENSG00000198054; TAA
EPGPNFVTV

SEQ ID NO: 22872 - protein, 9 aa, Homo sapiens
  misc_feature: Table A; Target 22872; HLA-B*08:01; DSCR8; ENSG00000198054; TAA
EPGPNFVTV

SEQ ID NO: 22873 - protein, 9 aa, Homo sapiens
  misc_feature: Table A; Target 22873; HLA-B*13:02; DSCR8; ENSG00000198054; TAA
EPGPNFVTV

SEQ ID NO: 22874 - protein, 9 aa, Homo sapiens
  misc_feature: Table A; Target 22874; HLA-B*18:01; DSCR8; ENSG00000198054; TAA
EPGPNFVTV

SEQ ID NO: 22875 - protein, 9 aa, Homo sapiens
  misc_feature: Table A; Target 22875; HLA-B*35:01; DSCR8; ENSG00000198054; TAA
EPGPNFVTV

SEQ ID NO: 22876 - protein, 9 aa, Homo sapiens
  misc_feature: Table A; Target 22876; HLA-B*35:03; DSCR8; ENSG00000198054; TAA
EPGPNFVTV

SEQ ID NO: 22877 - protein, 9 aa, Homo sapiens
  misc_feature: Table A; Target 22877; HLA-B*38:01; DSCR8; ENSG00000198054; TAA
EPGPNFVTV

SEQ ID NO: 22878 - protein, 9 aa, Homo sapiens
  misc_feature: Table A; Target 22878; HLA-B*39:01; DSCR8; ENSG00000198054; TAA
EPGPNFVTV

SEQ ID NO: 22879 - protein, 9 aa, Homo sapiens
  misc_feature: Table A; Target 22879; HLA-B*40:02; DSCR8; ENSG00000198054; TAA
EPGPNFVTV

SEQ ID NO: 22880 - protein, 9 aa, Homo sapiens
  misc_feature: Table A; Target 22880; HLA-B*49:01; DSCR8; ENSG00000198054; TAA
EPGPNFVTV

SEQ ID NO: 22881 - protein, 9 aa, Homo sapiens
  misc_feature: Table A; Target 22881; HLA-B*51:01; DSCR8; ENSG00000198054; TAA
EPGPNFVTV

SEQ ID NO: 22882 - protein, 9 aa, Homo sapiens
  misc_feature: Table A; Target 22882; HLA-B*54:01; DSCR8; ENSG00000198054; TAA
EPGPNFVTV

SEQ ID NO: 22883 - protein, 9 aa, Homo sapiens
  misc_feature: Table A; Target 22883; HLA-B*55:01; DSCR8; ENSG00000198054; TAA
EPGPNFVTV

SEQ ID NO: 22884 - protein, 9 aa, Homo sapiens
  misc_feature: Table A; Target 22884; HLA-B*56:01; DSCR8; ENSG00000198054; TAA
EPGPNFVTV

SEQ ID NO: 22885 - protein, 9 aa, Homo sapiens
  misc_feature: Table A; Target 22885; HLA-C*03:03; DSCR8; ENSG00000198054; TAA
EPGPNFVTV

SEQ ID NO: 22886 - protein, 9 aa, Homo sapiens
  misc_feature: Table A; Target 22886; HLA-C*04:01; DSCR8; ENSG00000198054; TAA
EPGPNFVTV

SEQ ID NO: 22887 - protein, 9 aa, Homo sapiens
  misc_feature: Table A; Target 22887; HLA-C*06:02; DSCR8; ENSG00000198054; TAA
EPGPNFVTV

SEQ ID NO: 22888 - protein, 9 aa, Homo sapiens
  misc_feature: Table A; Target 22888; HLA-C*07:01; DSCR8; ENSG00000198054; TAA
EPGPNFVTV

SEQ ID NO: 22889 - protein, 9 aa, Homo sapiens
  misc_feature: Table A; Target 22889; HLA-C*07:02; DSCR8; ENSG00000198054; TAA
EPGPNFVTV

SEQ ID NO: 22890 - protein, 9 aa, Homo sapiens
  misc_feature: Table A; Target 22890; HLA-C*07:06; DSCR8; ENSG00000198054; TAA
EPGPNFVTV

SEQ ID NO: 22891 - protein, 9 aa, Homo sapiens
  misc_feature: Table A; Target 22891; HLA-C*12:03; DSCR8; ENSG00000198054; TAA
EPGPNFVTV

SEQ ID NO: 22892 - protein, 9 aa, Homo sapiens
  misc_feature: Table A; Target 22892; HLA-C*16:02; DSCR8; ENSG00000198054; TAA
EPGPNFVTV

SEQ ID NO: 22893 - protein, 10 aa, Homo sapiens
  misc_feature: Table A; Target 22893; HLA-A*33:01; DSCR8; ENSG00000198054; TAA
EPGPNFVTVR

SEQ ID NO: 22894 - protein, 10 aa, Homo sapiens
  misc_feature: Table A; Target 22894; HLA-A*33:03; DSCR8; ENSG00000198054; TAA
EPGPNFVTVR

SEQ ID NO: 22895 - protein, 10 aa, Homo sapiens
  misc_feature: Table A; Target 22895; HLA-A*68:01; DSCR8; ENSG00000198054; TAA
EPGPNFVTVR

SEQ ID NO: 22896 - protein, 10 aa, Homo sapiens
  misc_feature: Table A; Target 22896; HLA-A*68:02; DSCR8; ENSG00000198054; TAA
EPGPNFVTVR

SEQ ID NO: 22897 - protein, 10 aa, Homo sapiens
  misc_feature: Table A; Target 22897; HLA-B*27:02; DSCR8; ENSG00000198054; TAA
EPGPNFVTVR

SEQ ID NO: 22898 - protein, 10 aa, Homo sapiens
  misc_feature: Table A; Target 22898; HLA-B*35:01; DSCR8; ENSG00000198054; TAA
EPGPNFVTVR

SEQ ID NO: 22899 - protein, 10 aa, Homo sapiens
  misc_feature: Table A; Target 22899; HLA-C*07:06; DSCR8; ENSG00000198054; TAA
EPGPNFVTVR

SEQ ID NO: 22900 - protein, 11 aa, Homo sapiens
  misc_feature: Table A; Target 22900; HLA-A*33:03; DSCR8; ENSG00000198054; TAA
EPGPNFVTVRK

SEQ ID NO: 22901 - protein, 11 aa, Homo sapiens
  misc_feature: Table A; Target 22901; HLA-A*68:01; DSCR8; ENSG00000198054; TAA
EPGPNFVTVRK

SEQ ID NO: 22902 - protein, 11 aa, Homo sapiens
  misc_feature: Table A; Target 22902; HLA-A*68:02; DSCR8; ENSG00000198054; TAA
EPGPNFVTVRK

SEQ ID NO: 22903 - protein, 11 aa, Homo sapiens
  misc_feature: Table A; Target 22903; HLA-C*07:06; DSCR8; ENSG00000198054; TAA
EPGPNFVTVRK

SEQ ID NO: 22904 - protein, 9 aa, Homo sapiens
  misc_feature: Table A; Target 22904; HLA-A*23:01; DSCR8; ENSG00000198054; TAA
EQLGLQTNL

SEQ ID NO: 22905 - protein, 9 aa, Homo sapiens
  misc_feature: Table A; Target 22905; HLA-B*13:02; DSCR8; ENSG00000198054; TAA
EQLGLQTNL

SEQ ID NO: 22906 - protein, 9 aa, Homo sapiens
  misc_feature: Table A; Target 22906; HLA-B*15:01; DSCR8; ENSG00000198054; TAA
EQLGLQTNL

SEQ ID NO: 22907 - protein, 9 aa, Homo sapiens
  misc_feature: Table A; Target 22907; HLA-B*15:03; DSCR8; ENSG00000198054; TAA
EQLGLQTNL

SEQ ID NO: 22908 - protein, 9 aa, Homo sapiens
  misc_feature: Table A; Target 22908; HLA-B*27:05; DSCR8; ENSG00000198054; TAA
EQLGLQTNL

SEQ ID NO: 22909 - protein, 9 aa, Homo sapiens
  misc_feature: Table A; Target 22909; HLA-B*38:01; DSCR8; ENSG00000198054; TAA
EQLGLQTNL

SEQ ID NO: 22910 - protein, 9 aa, Homo sapiens
  misc_feature: Table A; Target 22910; HLA-B*39:01; DSCR8; ENSG00000198054; TAA
EQLGLQTNL

SEQ ID NO: 22911 - protein, 9 aa, Homo sapiens
  misc_feature: Table A; Target 22911; HLA-C*07:04; DSCR8; ENSG00000198054; TAA
EQLGLQTNL

SEQ ID NO: 22912 - protein, 8 aa, Homo sapiens
  misc_feature: Table A; Target 22912; HLA-B*07:02; DSCR8; ENSG00000198054; TAA
ESSGMMKL

SEQ ID NO: 22913 - protein, 8 aa, Homo sapiens
  misc_feature: Table A; Target 22913; HLA-B*40:02; DSCR8; ENSG00000198054; TAA
ESSGMMKL

SEQ ID NO: 22914 - protein, 8 aa, Homo sapiens
  misc_feature: Table A; Target 22914; HLA-C*04:01; DSCR8; ENSG00000198054; TAA
ESSGMMKL

SEQ ID NO: 22915 - protein, 8 aa, Homo sapiens
  misc_feature: Table A; Target 22915; HLA-C*06:02; DSCR8; ENSG00000198054; TAA
ESSGMMKL

SEQ ID NO: 22916 - protein, 8 aa, Homo sapiens
  misc_feature: Table A; Target 22916; HLA-C*07:01; DSCR8; ENSG00000198054; TAA
ESSGMMKL

SEQ ID NO: 22917 - protein, 8 aa, Homo sapiens
  misc_feature: Table A; Target 22917; HLA-C*07:02; DSCR8; ENSG00000198054; TAA
ESSGMMKL

SEQ ID NO: 22918 - protein, 8 aa, Homo sapiens
  misc_feature: Table A; Target 22918; HLA-C*12:03; DSCR8; ENSG00000198054; TAA
ESSGMMKL

SEQ ID NO: 22919 - protein, 9 aa, Homo sapiens
  misc_feature: Table A; Target 22919; HLA-A*25:01; DSCR8; ENSG00000198054; TAA
ESSGMMKLF

SEQ ID NO: 22920 - protein, 9 aa, Homo sapiens
  misc_feature: Table A; Target 22920; HLA-A*26:01; DSCR8; ENSG00000198054; TAA
ESSGMMKLF

SEQ ID NO: 22921 - protein, 9 aa, Homo sapiens
  misc_feature: Table A; Target 22921; HLA-B*44:03; DSCR8; ENSG00000198054; TAA
ESSGMMKLF

SEQ ID NO: 22922 - protein, 9 aa, Homo sapiens
  misc_feature: Table A; Target 22922; HLA-C*07:01; DSCR8; ENSG00000198054; TAA
ESSGMMKLF

SEQ ID NO: 22923 - protein, 8 aa, Homo sapiens
  misc_feature: Table A; Target 22923; HLA-A*02:07; DSCR8; ENSG00000198054; TAA
FMPRPKVL

SEQ ID NO: 22924 - protein, 8 aa, Homo sapiens
  misc_feature: Table A; Target 22924; HLA-B*07:02; DSCR8; ENSG00000198054; TAA
FMPRPKVL

SEQ ID NO: 22925 - protein, 8 aa, Homo sapiens
  misc_feature: Table A; Target 22925; HLA-C*07:01; DSCR8; ENSG00000198054; TAA
FMPRPKVL

SEQ ID NO: 22926 - protein, 8 aa, Homo sapiens
  misc_feature: Table A; Target 22926; HLA-C*07:02; DSCR8; ENSG00000198054; TAA
FMPRPKVL

SEQ ID NO: 22927 - protein, 9 aa, Homo sapiens
  misc_feature: Table A; Target 22927; HLA-A*02:01; DSCR8; ENSG00000198054; TAA
FMPRPKVLA

SEQ ID NO: 22928 - protein, 9 aa, Homo sapiens
  misc_feature: Table A; Target 22928; HLA-A*02:07; DSCR8; ENSG00000198054; TAA
FMPRPKVLA

SEQ ID NO: 22929 - protein, 11 aa, Homo sapiens
  misc_feature: Table A; Target 22929; HLA-A*02:07; DSCR8; ENSG00000198054; TAA
FMPRPKVLAQY

SEQ ID NO: 22930 - protein, 11 aa, Homo sapiens
  misc_feature: Table A; Target 22930; HLA-A*29:02; DSCR8; ENSG00000198054; TAA
FMPRPKVLAQY

SEQ ID NO: 22931 - protein, 9 aa, Homo sapiens
  misc_feature: Table A; Target 22931; HLA-A*02:03; DSCR8; ENSG00000198054; TAA
FVKHLLLFL

SEQ ID NO: 22932 - protein, 9 aa, Homo sapiens
  misc_feature: Table A; Target 22932; HLA-A*02:04; DSCR8; ENSG00000198054; TAA
FVKHLLLFL

SEQ ID NO: 22933 - protein, 9 aa, Homo sapiens
  misc_feature: Table A; Target 22933; HLA-A*68:02; DSCR8; ENSG00000198054; TAA
FVKHLLLFL

SEQ ID NO: 22934 - protein, 9 aa, Homo sapiens
  misc_feature: Table A; Target 22934; HLA-A*03:01; DSCR8; ENSG00000198054; TAA
GLHSFKMAF

SEQ ID NO: 22935 - protein, 9 aa, Homo sapiens
  misc_feature: Table A; Target 22935; HLA-A*29:02; DSCR8; ENSG00000198054; TAA
GLHSFKMAF

SEQ ID NO: 22936 - protein, 10 aa, Homo sapiens
  misc_feature: Table A; Target 22936; HLA-A*02:03; DSCR8; ENSG00000198054; TAA
GLHSFKMAFV

SEQ ID NO: 22937 - protein, 9 aa, Homo sapiens
  misc_feature: Table A; Target 22937; HLA-A*03:01; DSCR8; ENSG00000198054; TAA
GMMKLFMPR

SEQ ID NO: 22938 - protein, 9 aa, Homo sapiens
  misc_feature: Table A; Target 22938; HLA-A*31:01; DSCR8; ENSG00000198054; TAA
GMMKLFMPR

SEQ ID NO: 22939 - protein, 9 aa, Homo sapiens
  misc_feature: Table A; Target 22939; HLA-B*39:01; DSCR8; ENSG00000198054; TAA
GNQESSGMM

SEQ ID NO: 22940 - protein, 9 aa, Homo sapiens
  misc_feature: Table A; Target 22940; HLA-C*04:01; DSCR8; ENSG00000198054; TAA
GNQESSGMM

SEQ ID NO: 22941 - protein, 9 aa, Homo sapiens
  misc_feature: Table A; Target 22941; HLA-C*14:02; DSCR8; ENSG00000198054; TAA
GNQESSGMM

SEQ ID NO: 22942 - protein, 10 aa, Homo sapiens
  misc_feature: Table A; Target 22942; HLA-A*03:02; DSCR8; ENSG00000198054; TAA
GNQESSGMMK

SEQ ID NO: 22943 - protein, 10 aa, Homo sapiens
  misc_feature: Table A; Target 22943; HLA-A*11:01; DSCR8; ENSG00000198054; TAA
GNQESSGMMK

SEQ ID NO: 22944 - protein, 10 aa, Homo sapiens
  misc_feature: Table A; Target 22944; HLA-B*27:02; DSCR8; ENSG00000198054; TAA
GNQESSGMMK

SEQ ID NO: 22945 - protein, 11 aa, Homo sapiens
  misc_feature: Table A; Target 22945; HLA-C*04:01; DSCR8; ENSG00000198054; TAA
GNQESSGMMKL

SEQ ID NO: 22946 - protein, 8 aa, Homo sapiens
  misc_feature: Table A; Target 22946; HLA-B*56:01; DSCR8; ENSG00000198054; TAA
GPNFVTVR

SEQ ID NO: 22947 - protein, 9 aa, Homo sapiens
  misc_feature: Table A; Target 22947; HLA-A*03:01; DSCR8; ENSG00000198054; TAA
GPNFVTVRK

SEQ ID NO: 22948 - protein, 9 aa, Homo sapiens
  misc_feature: Table A; Target 22948; HLA-A*03:02; DSCR8; ENSG00000198054; TAA
GPNFVTVRK

SEQ ID NO: 22949 - protein, 9 aa, Homo sapiens
  misc_feature: Table A; Target 22949; HLA-A*11:01; DSCR8; ENSG00000198054; TAA
GPNFVTVRK

SEQ ID NO: 22950 - protein, 9 aa, Homo sapiens
  misc_feature: Table A; Target 22950; HLA-A*31:01; DSCR8; ENSG00000198054; TAA
GPNFVTVRK

SEQ ID NO: 22951 - protein, 9 aa, Homo sapiens
  misc_feature: Table A; Target 22951; HLA-A*68:01; DSCR8; ENSG00000198054; TAA
GPNFVTVRK

SEQ ID NO: 22952 - protein, 9 aa, Homo sapiens
  misc_feature: Table A; Target 22952; HLA-B*27:02; DSCR8; ENSG00000198054; TAA
GPNFVTVRK

SEQ ID NO: 22953 - protein, 9 aa, Homo sapiens
  misc_feature: Table A; Target 22953; HLA-B*27:05; DSCR8; ENSG00000198054; TAA
GPNFVTVRK

SEQ ID NO: 22954 - protein, 9 aa, Homo sapiens
  misc_feature: Table A; Target 22954; HLA-B*56:01; DSCR8; ENSG00000198054; TAA
GPNFVTVRK

SEQ ID NO: 22955 - protein, 11 aa, Homo sapiens
  misc_feature: Table A; Target 22955; HLA-B*07:02; DSCR8; ENSG00000198054; TAA
GPNFVTVRKGL

SEQ ID NO: 22956 - protein, 9 aa, Homo sapiens
  misc_feature: Table A; Target 22956; HLA-A*30:01; DSCR8; ENSG00000198054; TAA
GSITDHCSL

SEQ ID NO: 22957 - protein, 9 aa, Homo sapiens
  misc_feature: Table A; Target 22957; HLA-B*27:05; DSCR8; ENSG00000198054; TAA
GSITDHCSL

SEQ ID NO: 22958 - protein, 9 aa, Homo sapiens
  misc_feature: Table A; Target 22958; HLA-B*40:01; DSCR8; ENSG00000198054; TAA
GSITDHCSL

SEQ ID NO: 22959 - protein, 9 aa, Homo sapiens
  misc_feature: Table A; Target 22959; HLA-B*40:02; DSCR8; ENSG00000198054; TAA
GSITDHCSL

SEQ ID NO: 22960 - protein, 9 aa, Homo sapiens
  misc_feature: Table A; Target 22960; HLA-B*58:01; DSCR8; ENSG00000198054; TAA
GSITDHCSL

SEQ ID NO: 22961 - protein, 9 aa, Homo sapiens
  misc_feature: Table A; Target 22961; HLA-C*01:02; DSCR8; ENSG00000198054; TAA
GSITDHCSL

SEQ ID NO: 22962 - protein, 9 aa, Homo sapiens
  misc_feature: Table A; Target 22962; HLA-C*03:03; DSCR8; ENSG00000198054; TAA
GSITDHCSL

SEQ ID NO: 22963 - protein, 9 aa, Homo sapiens
  misc_feature: Table A; Target 22963; HLA-C*03:04; DSCR8; ENSG00000198054; TAA
GSITDHCSL

SEQ ID NO: 22964 - protein, 9 aa, Homo sapiens
  misc_feature: Table A; Target 22964; HLA-C*06:02; DSCR8; ENSG00000198054; TAA
GSITDHCSL

SEQ ID NO: 22965 - protein, 9 aa, Homo sapiens
  misc_feature: Table A; Target 22965; HLA-C*14:02; DSCR8; ENSG00000198054; TAA
GSITDHCSL

SEQ ID NO: 22966 - protein, 9 aa, Homo sapiens
  misc_feature: Table A; Target 22966; HLA-C*16:01; DSCR8; ENSG00000198054; TAA
GSITDHCSL

SEQ ID NO: 22967 - protein, 9 aa, Homo sapiens
  misc_feature: Table A; Target 22967; HLA-C*16:02; DSCR8; ENSG00000198054; TAA
GSITDHCSL

SEQ ID NO: 22968 - protein, 9 aa, Homo sapiens
  misc_feature: Table A; Target 22968; HLA-C*16:04; DSCR8; ENSG00000198054; TAA
GSITDHCSL

SEQ ID NO: 22969 - protein, 9 aa, Homo sapiens
  misc_feature: Table A; Target 22969; HLA-A*31:01; DSCR8; ENSG00000198054; TAA
HLLLFLSPR

SEQ ID NO: 22970 - protein, 10 aa, Homo sapiens
  misc_feature: Table A; Target 22970; HLA-A*02:04; DSCR8; ENSG00000198054; TAA
HLLLFLSPRL

SEQ ID NO: 22971 - protein, 9 aa, Homo sapiens
  misc_feature: Table A; Target 22971; HLA-A*02:01; DSCR8; ENSG00000198054; TAA
HLPVQEILM

SEQ ID NO: 22972 - protein, 9 aa, Homo sapiens
  misc_feature: Table A; Target 22972; HLA-A*02:07; DSCR8; ENSG00000198054; TAA
HLPVQEILM

SEQ ID NO: 22973 - protein, 9 aa, Homo sapiens
  misc_feature: Table A; Target 22973; HLA-A*24:02; DSCR8; ENSG00000198054; TAA
HLPVQEILM

SEQ ID NO: 22974 - protein, 9 aa, Homo sapiens
  misc_feature: Table A; Target 22974; HLA-A*29:02; DSCR8; ENSG00000198054; TAA
HLPVQEILM

SEQ ID NO: 22975 - protein, 9 aa, Homo sapiens
  misc_feature: Table A; Target 22975; HLA-B*55:01; DSCR8; ENSG00000198054; TAA
HLPVQEILM

SEQ ID NO: 22976 - protein, 9 aa, Homo sapiens
  misc_feature: Table A; Target 22976; HLA-C*04:01; DSCR8; ENSG00000198054; TAA
HLPVQEILM

SEQ ID NO: 22977 - protein, 9 aa, Homo sapiens
  misc_feature: Table A; Target 22977; HLA-C*07:01; DSCR8; ENSG00000198054; TAA
HLPVQEILM

SEQ ID NO: 22978 - protein, 9 aa, Homo sapiens
  misc_feature: Table A; Target 22978; HLA-C*07:04; DSCR8; ENSG00000198054; TAA
HLPVQEILM

SEQ ID NO: 22979 - protein, 8 aa, Homo sapiens
  misc_feature: Table A; Target 22979; HLA-A*02:03; DSCR8; ENSG00000198054; TAA
HSFKMAFV

SEQ ID NO: 22980 - protein, 8 aa, Homo sapiens
  misc_feature: Table A; Target 22980; HLA-A*68:02; DSCR8; ENSG00000198054; TAA
HSFKMAFV

SEQ ID NO: 22981 - protein, 9 aa, Homo sapiens
  misc_feature: Table A; Target 22981; HLA-A*03:01; DSCR8; ENSG00000198054; TAA
HSFKMAFVK

SEQ ID NO: 22982 - protein, 9 aa, Homo sapiens
  misc_feature: Table A; Target 22982; HLA-B*57:01; DSCR8; ENSG00000198054; TAA
HSFKMAFVK

SEQ ID NO: 22983 - protein, 9 aa, Homo sapiens
  misc_feature: Table A; Target 22983; HLA-A*01:01; DSCR8; ENSG00000198054; TAA
ILMSQPPEQ

SEQ ID NO: 22984 - protein, 9 aa, Homo sapiens
  misc_feature: Table A; Target 22984; HLA-A*02:01; DSCR8; ENSG00000198054; TAA
ILMSQPPEQ

SEQ ID NO: 22985 - protein, 9 aa, Homo sapiens
  misc_feature: Table A; Target 22985; HLA-A*03:02; DSCR8; ENSG00000198054; TAA
ILMSQPPEQ

SEQ ID NO: 22986 - protein, 9 aa, Homo sapiens
  misc_feature: Table A; Target 22986; HLA-B*13:02; DSCR8; ENSG00000198054; TAA
ILMSQPPEQ

SEQ ID NO: 22987 - protein, 9 aa, Homo sapiens
  misc_feature: Table A; Target 22987; HLA-B*55:01; DSCR8; ENSG00000198054; TAA
ILMSQPPEQ

SEQ ID NO: 22988 - protein, 10 aa, Homo sapiens
  misc_feature: Table A; Target 22988; HLA-A*02:01; DSCR8; ENSG00000198054; TAA
ILMSQPPEQL

SEQ ID NO: 22989 - protein, 10 aa, Homo sapiens
  misc_feature: Table A; Target 22989; HLA-A*02:03; DSCR8; ENSG00000198054; TAA
ILMSQPPEQL

SEQ ID NO: 22990 - protein, 10 aa, Homo sapiens
  misc_feature: Table A; Target 22990; HLA-A*02:04; DSCR8; ENSG00000198054; TAA
ILMSQPPEQL

SEQ ID NO: 22991 - protein, 10 aa, Homo sapiens
  misc_feature: Table A; Target 22991; HLA-A*02:07; DSCR8; ENSG00000198054; TAA
ILMSQPPEQL

SEQ ID NO: 22992 - protein, 10 aa, Homo sapiens
  misc_feature: Table A; Target 22992; HLA-A*03:01; DSCR8; ENSG00000198054; TAA
ILMSQPPEQL

SEQ ID NO: 22993 - protein, 10 aa, Homo sapiens
  misc_feature: Table A; Target 22993; HLA-A*03:02; DSCR8; ENSG00000198054; TAA
ILMSQPPEQL

SEQ ID NO: 22994 - protein, 10 aa, Homo sapiens
  misc_feature: Table A; Target 22994; HLA-A*23:01; DSCR8; ENSG00000198054; TAA
ILMSQPPEQL

SEQ ID NO: 22995 - protein, 10 aa, Homo sapiens
  misc_feature: Table A; Target 22995; HLA-A*24:02; DSCR8; ENSG00000198054; TAA
ILMSQPPEQL

SEQ ID NO: 22996 - protein, 10 aa, Homo sapiens
  misc_feature: Table A; Target 22996; HLA-A*31:01; DSCR8; ENSG00000198054; TAA
ILMSQPPEQL

SEQ ID NO: 22997 - protein, 10 aa, Homo sapiens
  misc_feature: Table A; Target 22997; HLA-A*32:01; DSCR8; ENSG00000198054; TAA
ILMSQPPEQL

SEQ ID NO: 22998 - protein, 10 aa, Homo sapiens
  misc_feature: Table A; Target 22998; HLA-A*68:02; DSCR8; ENSG00000198054; TAA
ILMSQPPEQL

SEQ ID NO: 22999 - protein, 10 aa, Homo sapiens
  misc_feature: Table A; Target 22999; HLA-B*13:02; DSCR8; ENSG00000198054; TAA
ILMSQPPEQL

SEQ ID NO: 23000 - protein, 10 aa, Homo sapiens
  misc_feature: Table A; Target 23000; HLA-B*15:01; DSCR8; ENSG00000198054; TAA
ILMSQPPEQL

SEQ ID NO: 23001 - protein, 10 aa, Homo sapiens
  misc_feature: Table A; Target 23001; HLA-B*27:05; DSCR8; ENSG00000198054; TAA
ILMSQPPEQL

SEQ ID NO: 23002 - protein, 10 aa, Homo sapiens
  misc_feature: Table A; Target 23002; HLA-B*38:01; DSCR8; ENSG00000198054; TAA
ILMSQPPEQL

SEQ ID NO: 23003 - protein, 10 aa, Homo sapiens
  misc_feature: Table A; Target 23003; HLA-B*40:01; DSCR8; ENSG00000198054; TAA
ILMSQPPEQL

SEQ ID NO: 23004 - protein, 10 aa, Homo sapiens
  misc_feature: Table A; Target 23004; HLA-B*55:01; DSCR8; ENSG00000198054; TAA
ILMSQPPEQL

SEQ ID NO: 23005 - protein, 10 aa, Homo sapiens
  misc_feature: Table A; Target 23005; HLA-C*01:02; DSCR8; ENSG00000198054; TAA
ILMSQPPEQL

SEQ ID NO: 23006 - protein, 10 aa, Homo sapiens
  misc_feature: Table A; Target 23006; HLA-C*04:01; DSCR8; ENSG00000198054; TAA
ILMSQPPEQL

SEQ ID NO: 23007 - protein, 10 aa, Homo sapiens
  misc_feature: Table A; Target 23007; HLA-C*06:02; DSCR8; ENSG00000198054; TAA
ILMSQPPEQL

SEQ ID NO: 23008 - protein, 10 aa, Homo sapiens
  misc_feature: Table A; Target 23008; HLA-C*07:02; DSCR8; ENSG00000198054; TAA
ILMSQPPEQL

SEQ ID NO: 23009 - protein, 10 aa, Homo sapiens
  misc_feature: Table A; Target 23009; HLA-C*14:02; DSCR8; ENSG00000198054; TAA
ILMSQPPEQL

SEQ ID NO: 23010 - protein, 8 aa, Homo sapiens
  misc_feature: Table A; Target 23010; HLA-C*06:02; DSCR8; ENSG00000198054; TAA
KEPGPNFV

SEQ ID NO: 23011 - protein, 9 aa, Homo sapiens
  misc_feature: Table A; Target 23011; HLA-B*40:01; DSCR8; ENSG00000198054; TAA
KEPGPNFVT

SEQ ID NO: 23012 - protein, 9 aa, Homo sapiens
  misc_feature: Table A; Target 23012; HLA-C*06:02; DSCR8; ENSG00000198054; TAA
KEPGPNFVT

SEQ ID NO: 23013 - protein, 10 aa, Homo sapiens
  misc_feature: Table A; Target 23013; HLA-A*02:01; DSCR8; ENSG00000198054; TAA
KEPGPNFVTV

SEQ ID NO: 23014 - protein, 10 aa, Homo sapiens
  misc_feature: Table A; Target 23014; HLA-A*02:07; DSCR8; ENSG00000198054; TAA
KEPGPNFVTV

SEQ ID NO: 23015 - protein, 10 aa, Homo sapiens
  misc_feature: Table A; Target 23015; HLA-A*30:01; DSCR8; ENSG00000198054; TAA
KEPGPNFVTV

SEQ ID NO: 23016 - protein, 10 aa, Homo sapiens
  misc_feature: Table A; Target 23016; HLA-A*68:02; DSCR8; ENSG00000198054; TAA
KEPGPNFVTV

SEQ ID NO: 23017 - protein, 10 aa, Homo sapiens
  misc_feature: Table A; Target 23017; HLA-B*13:02; DSCR8; ENSG00000198054; TAA
KEPGPNFVTV

SEQ ID NO: 23018 - protein, 10 aa, Homo sapiens
  misc_feature: Table A; Target 23018; HLA-B*37:01; DSCR8; ENSG00000198054; TAA
KEPGPNFVTV

SEQ ID NO: 23019 - protein, 10 aa, Homo sapiens
  misc_feature: Table A; Target 23019; HLA-B*40:01; DSCR8; ENSG00000198054; TAA
KEPGPNFVTV

SEQ ID NO: 23020 - protein, 10 aa, Homo sapiens
  misc_feature: Table A; Target 23020; HLA-B*40:02; DSCR8; ENSG00000198054; TAA
KEPGPNFVTV

SEQ ID NO: 23021 - protein, 10 aa, Homo sapiens
  misc_feature: Table A; Target 23021; HLA-B*44:02; DSCR8; ENSG00000198054; TAA
KEPGPNFVTV

SEQ ID NO: 23022 - protein, 10 aa, Homo sapiens
  misc_feature: Table A; Target 23022; HLA-B*44:03; DSCR8; ENSG00000198054; TAA
KEPGPNFVTV

SEQ ID NO: 23023 - protein, 10 aa, Homo sapiens
  misc_feature: Table A; Target 23023; HLA-B*49:01; DSCR8; ENSG00000198054; TAA
KEPGPNFVTV

SEQ ID NO: 23024 - protein, 10 aa, Homo sapiens
  misc_feature: Table A; Target 23024; HLA-B*56:01; DSCR8; ENSG00000198054; TAA
KEPGPNFVTV

SEQ ID NO: 23025 - protein, 10 aa, Homo sapiens
  misc_feature: Table A; Target 23025; HLA-B*58:01; DSCR8; ENSG00000198054; TAA
KEPGPNFVTV

SEQ ID NO: 23026 - protein, 10 aa, Homo sapiens
  misc_feature: Table A; Target 23026; HLA-C*02:02; DSCR8; ENSG00000198054; TAA
KEPGPNFVTV

SEQ ID NO: 23027 - protein, 10 aa, Homo sapiens
  misc_feature: Table A; Target 23027; HLA-C*04:01; DSCR8; ENSG00000198054; TAA
KEPGPNFVTV

SEQ ID NO: 23028 - protein, 10 aa, Homo sapiens
  misc_feature: Table A; Target 23028; HLA-C*06:02; DSCR8; ENSG00000198054; TAA
KEPGPNFVTV

SEQ ID NO: 23029 - protein, 10 aa, Homo sapiens
  misc_feature: Table A; Target 23029; HLA-C*07:02; DSCR8; ENSG00000198054; TAA
KEPGPNFVTV

SEQ ID NO: 23030 - protein, 10 aa, Homo sapiens
  misc_feature: Table A; Target 23030; HLA-C*12:03; DSCR8; ENSG00000198054; TAA
KEPGPNFVTV

SEQ ID NO: 23031 - protein, 10 aa, Homo sapiens
  misc_feature: Table A; Target 23031; HLA-C*16:02; DSCR8; ENSG00000198054; TAA
KEPGPNFVTV

SEQ ID NO: 23032 - protein, 10 aa, Homo sapiens
  misc_feature: Table A; Target 23032; HLA-C*16:04; DSCR8; ENSG00000198054; TAA
KEPGPNFVTV

SEQ ID NO: 23033 - protein, 11 aa, Homo sapiens
  misc_feature: Table A; Target 23033; HLA-A*30:01; DSCR8; ENSG00000198054; TAA
KEPGPNFVTVR

SEQ ID NO: 23034 - protein, 11 aa, Homo sapiens
  misc_feature: Table A; Target 23034; HLA-A*31:01; DSCR8; ENSG00000198054; TAA
KEPGPNFVTVR

SEQ ID NO: 23035 - protein, 11 aa, Homo sapiens
  misc_feature: Table A; Target 23035; HLA-A*68:02; DSCR8; ENSG00000198054; TAA
KEPGPNFVTVR

SEQ ID NO: 23036 - protein, 11 aa, Homo sapiens
  misc_feature: Table A; Target 23036; HLA-B*27:05; DSCR8; ENSG00000198054; TAA
KEPGPNFVTVR

SEQ ID NO: 23037 - protein, 11 aa, Homo sapiens
  misc_feature: Table A; Target 23037; HLA-B*40:01; DSCR8; ENSG00000198054; TAA
KEPGPNFVTVR

SEQ ID NO: 23038 - protein, 11 aa, Homo sapiens
  misc_feature: Table A; Target 23038; HLA-B*40:02; DSCR8; ENSG00000198054; TAA
KEPGPNFVTVR

SEQ ID NO: 23039 - protein, 11 aa, Homo sapiens
  misc_feature: Table A; Target 23039; HLA-B*49:01; DSCR8; ENSG00000198054; TAA
KEPGPNFVTVR

SEQ ID NO: 23040 - protein, 11 aa, Homo sapiens
  misc_feature: Table A; Target 23040; HLA-C*04:01; DSCR8; ENSG00000198054; TAA
KEPGPNFVTVR

SEQ ID NO: 23041 - protein, 11 aa, Homo sapiens
  misc_feature: Table A; Target 23041; HLA-C*07:02; DSCR8; ENSG00000198054; TAA
KEPGPNFVTVR

SEQ ID NO: 23042 - protein, 8 aa, Homo sapiens
  misc_feature: Table A; Target 23042; HLA-A*03:01; DSCR8; ENSG00000198054; TAA
KLFMPRPK

SEQ ID NO: 23043 - protein, 8 aa, Homo sapiens
  misc_feature: Table A; Target 23043; HLA-C*06:02; DSCR8; ENSG00000198054; TAA
KLFMPRPK

SEQ ID NO: 23044 - protein, 10 aa, Homo sapiens
  misc_feature: Table A; Target 23044; HLA-A*02:03; DSCR8; ENSG00000198054; TAA
KLFMPRPKVL

SEQ ID NO: 23045 - protein, 10 aa, Homo sapiens
  misc_feature: Table A; Target 23045; HLA-A*02:04; DSCR8; ENSG00000198054; TAA
KLFMPRPKVL

SEQ ID NO: 23046 - protein, 10 aa, Homo sapiens
  misc_feature: Table A; Target 23046; HLA-A*03:01; DSCR8; ENSG00000198054; TAA
KLFMPRPKVL

SEQ ID NO: 23047 - protein, 9 aa, Homo sapiens
  misc_feature: Table A; Target 23047; HLA-A*02:04; DSCR8; ENSG00000198054; TAA
KMAFVKHLL

SEQ ID NO: 23048 - protein, 9 aa, Homo sapiens
  misc_feature: Table A; Target 23048; HLA-A*31:01; DSCR8; ENSG00000198054; TAA
KMAFVKHLL

SEQ ID NO: 23049 - protein, 9 aa, Homo sapiens
  misc_feature: Table A; Target 23049; HLA-A*02:01; DSCR8; ENSG00000198054; TAA
KVLAQYESI

SEQ ID NO: 23050 - protein, 9 aa, Homo sapiens
  misc_feature: Table A; Target 23050; HLA-A*02:04; DSCR8; ENSG00000198054; TAA
KVLAQYESI

SEQ ID NO: 23051 - protein, 9 aa, Homo sapiens
  misc_feature: Table A; Target 23051; HLA-A*02:07; DSCR8; ENSG00000198054; TAA
KVLAQYESI

SEQ ID NO: 23052 - protein, 9 aa, Homo sapiens
  misc_feature: Table A; Target 23052; HLA-A*24:02; DSCR8; ENSG00000198054; TAA
KVLAQYESI

SEQ ID NO: 23053 - protein, 9 aa, Homo sapiens
  misc_feature: Table A; Target 23053; HLA-A*32:01; DSCR8; ENSG00000198054; TAA
KVLAQYESI

SEQ ID NO: 23054 - protein, 9 aa, Homo sapiens
  misc_feature: Table A; Target 23054; HLA-B*13:02; DSCR8; ENSG00000198054; TAA
KVLAQYESI

SEQ ID NO: 23055 - protein, 9 aa, Homo sapiens
  misc_feature: Table A; Target 23055; HLA-B*40:02; DSCR8; ENSG00000198054; TAA
KVLAQYESI

SEQ ID NO: 23056 - protein, 9 aa, Homo sapiens
  misc_feature: Table A; Target 23056; HLA-B*58:01; DSCR8; ENSG00000198054; TAA
KVLAQYESI

SEQ ID NO: 23057 - protein, 9 aa, Homo sapiens
  misc_feature: Table A; Target 23057; HLA-C*01:02; DSCR8; ENSG00000198054; TAA
KVLAQYESI

SEQ ID NO: 23058 - protein, 9 aa, Homo sapiens
  misc_feature: Table A; Target 23058; HLA-B*55:01; DSCR8; ENSG00000198054; TAA
LAQYESIQF

SEQ ID NO: 23059 - protein, 9 aa, Homo sapiens
  misc_feature: Table A; Target 23059; HLA-B*58:01; DSCR8; ENSG00000198054; TAA
LAQYESIQF

SEQ ID NO: 23060 - protein, 9 aa, Homo sapiens
  misc_feature: Table A; Target 23060; HLA-C*03:03; DSCR8; ENSG00000198054; TAA
LAQYESIQF

SEQ ID NO: 23061 - protein, 9 aa, Homo sapiens
  misc_feature: Table A; Target 23061; HLA-C*03:04; DSCR8; ENSG00000198054; TAA
LAQYESIQF

SEQ ID NO: 23062 - protein, 9 aa, Homo sapiens
  misc_feature: Table A; Target 23062; HLA-C*04:01; DSCR8; ENSG00000198054; TAA
LAQYESIQF

SEQ ID NO: 23063 - protein, 9 aa, Homo sapiens
  misc_feature: Table A; Target 23063; HLA-C*05:01; DSCR8; ENSG00000198054; TAA
LAQYESIQF

SEQ ID NO: 23064 - protein, 9 aa, Homo sapiens
  misc_feature: Table A; Target 23064; HLA-A*23:01; DSCR8; ENSG00000198054; TAA
LFMPRPKVL

SEQ ID NO: 23065 - protein, 9 aa, Homo sapiens
  misc_feature: Table A; Target 23065; HLA-A*24:02; DSCR8; ENSG00000198054; TAA
LFMPRPKVL

SEQ ID NO: 23066 - protein, 9 aa, Homo sapiens
  misc_feature: Table A; Target 23066; HLA-B*08:01; DSCR8; ENSG00000198054; TAA
LFMPRPKVL

SEQ ID NO: 23067 - protein, 9 aa, Homo sapiens
  misc_feature: Table A; Target 23067; HLA-C*12:03; DSCR8; ENSG00000198054; TAA
LFMPRPKVL

SEQ ID NO: 23068 - protein, 9 aa, Homo sapiens
  misc_feature: Table A; Target 23068; HLA-C*04:01; DSCR8; ENSG00000198054; TAA
LGLQTNLGN

SEQ ID NO: 23069 - protein, 9 aa, Homo sapiens
  misc_feature: Table A; Target 23069; HLA-C*07:04; DSCR8; ENSG00000198054; TAA
LGNQESSGM

SEQ ID NO: 23070 - protein, 11 aa, Homo sapiens
  misc_feature: Table A; Target 23070; HLA-A*03:02; DSCR8; ENSG00000198054; TAA
LGNQESSGMMK

SEQ ID NO: 23071 - protein, 11 aa, Homo sapiens
  misc_feature: Table A; Target 23071; HLA-A*11:01; DSCR8; ENSG00000198054; TAA
LGNQESSGMMK

SEQ ID NO: 23072 - protein, 11 aa, Homo sapiens
  misc_feature: Table A; Target 23072; HLA-B*27:02; DSCR8; ENSG00000198054; TAA
LGNQESSGMMK

SEQ ID NO: 23073 - protein, 8 aa, Homo sapiens
  misc_feature: Table A; Target 23073; HLA-B*13:02; DSCR8; ENSG00000198054; TAA
LHLPVQEI

SEQ ID NO: 23074 - protein, 8 aa, Homo sapiens
  misc_feature: Table A; Target 23074; HLA-B*38:01; DSCR8; ENSG00000198054; TAA
LHLPVQEI

SEQ ID NO: 23075 - protein, 8 aa, Homo sapiens
  misc_feature: Table A; Target 23075; HLA-B*39:01; DSCR8; ENSG00000198054; TAA
LHLPVQEI

SEQ ID NO: 23076 - protein, 8 aa, Homo sapiens
  misc_feature: Table A; Target 23076; HLA-C*07:01; DSCR8; ENSG00000198054; TAA
LHLPVQEI

SEQ ID NO: 23077 - protein, 9 aa, Homo sapiens
  misc_feature: Table A; Target 23077; HLA-B*38:01; DSCR8; ENSG00000198054; TAA
LHLPVQEIL

SEQ ID NO: 23078 - protein, 9 aa, Homo sapiens
  misc_feature: Table A; Target 23078; HLA-B*39:01; DSCR8; ENSG00000198054; TAA
LHLPVQEIL

SEQ ID NO: 23079 - protein, 9 aa, Homo sapiens
  misc_feature: Table A; Target 23079; HLA-B*57:01; DSCR8; ENSG00000198054; TAA
LHLPVQEIL

SEQ ID NO: 23080 - protein, 9 aa, Homo sapiens
  misc_feature: Table A; Target 23080; HLA-C*07:01; DSCR8; ENSG00000198054; TAA
LHLPVQEIL

SEQ ID NO: 23081 - protein, 8 aa, Homo sapiens
  misc_feature: Table A; Target 23081; HLA-A*02:04; DSCR8; ENSG00000198054; TAA
LLFLSPRL

SEQ ID NO: 23082 - protein, 9 aa, Homo sapiens
  misc_feature: Table A; Target 23082; HLA-A*02:01; DSCR8; ENSG00000198054; TAA
LLLFLSPRL

SEQ ID NO: 23083 - protein, 9 aa, Homo sapiens
  misc_feature: Table A; Target 23083; HLA-A*02:04; DSCR8; ENSG00000198054; TAA
LLLFLSPRL

SEQ ID NO: 23084 - protein, 9 aa, Homo sapiens
  misc_feature: Table A; Target 23084; HLA-A*02:07; DSCR8; ENSG00000198054; TAA
LLLFLSPRL

SEQ ID NO: 23085 - protein, 9 aa, Homo sapiens
  misc_feature: Table A; Target 23085; HLA-A*02:01; DSCR8; ENSG00000198054; TAA
LMSQPPEQL

SEQ ID NO: 23086 - protein, 9 aa, Homo sapiens
  misc_feature: Table A; Target 23086; HLA-A*02:03; DSCR8; ENSG00000198054; TAA
LMSQPPEQL

SEQ ID NO: 23087 - protein, 9 aa, Homo sapiens
  misc_feature: Table A; Target 23087; HLA-A*02:04; DSCR8; ENSG00000198054; TAA
LMSQPPEQL

SEQ ID NO: 23088 - protein, 9 aa, Homo sapiens
  misc_feature: Table A; Target 23088; HLA-A*02:07; DSCR8; ENSG00000198054; TAA
LMSQPPEQL

SEQ ID NO: 23089 - protein, 9 aa, Homo sapiens
  misc_feature: Table A; Target 23089; HLA-A*68:02; DSCR8; ENSG00000198054; TAA
LMSQPPEQL

SEQ ID NO: 23090 - protein, 9 aa, Homo sapiens
  misc_feature: Table A; Target 23090; HLA-B*13:02; DSCR8; ENSG00000198054; TAA
LMSQPPEQL

SEQ ID NO: 23091 - protein, 9 aa, Homo sapiens
  misc_feature: Table A; Target 23091; HLA-B*27:05; DSCR8; ENSG00000198054; TAA
LMSQPPEQL

SEQ ID NO: 23092 - protein, 9 aa, Homo sapiens
  misc_feature: Table A; Target 23092; HLA-B*38:01; DSCR8; ENSG00000198054; TAA
LMSQPPEQL

SEQ ID NO: 23093 - protein, 9 aa, Homo sapiens
  misc_feature: Table A; Target 23093; HLA-B*39:01; DSCR8; ENSG00000198054; TAA
LMSQPPEQL

SEQ ID NO: 23094 - protein, 9 aa, Homo sapiens
  misc_feature: Table A; Target 23094; HLA-C*05:01; DSCR8; ENSG00000198054; TAA
LMSQPPEQL

SEQ ID NO: 23095 - protein, 9 aa, Homo sapiens
  misc_feature: Table A; Target 23095; HLA-C*06:02; DSCR8; ENSG00000198054; TAA
LMSQPPEQL

SEQ ID NO: 23096 - protein, 9 aa, Homo sapiens
  misc_feature: Table A; Target 23096; HLA-C*07:02; DSCR8; ENSG00000198054; TAA
LMSQPPEQL

SEQ ID NO: 23097 - protein, 9 aa, Homo sapiens
  misc_feature: Table A; Target 23097; HLA-C*07:04; DSCR8; ENSG00000198054; TAA
LMSQPPEQL

SEQ ID NO: 23098 - protein, 9 aa, Homo sapiens
  misc_feature: Table A; Target 23098; HLA-C*12:03; DSCR8; ENSG00000198054; TAA
LMSQPPEQL

SEQ ID NO: 23099 - protein, 11 aa, Homo sapiens
  misc_feature: Table A; Target 23099; HLA-A*02:01; DSCR8; ENSG00000198054; TAA
LMSQPPEQLGL

SEQ ID NO: 23100 - protein, 11 aa, Homo sapiens
  misc_feature: Table A; Target 23100; HLA-A*02:07; DSCR8; ENSG00000198054; TAA
LMSQPPEQLGL

SEQ ID NO: 23101 - protein, 11 aa, Homo sapiens
  misc_feature: Table A; Target 23101; HLA-C*04:01; DSCR8; ENSG00000198054; TAA
LMSQPPEQLGL

SEQ ID NO: 23102 - protein, 8 aa, Homo sapiens
  misc_feature: Table A; Target 23102; HLA-B*08:01; DSCR8; ENSG00000198054; TAA
LPVQEILM

SEQ ID NO: 23103 - protein, 8 aa, Homo sapiens
  misc_feature: Table A; Target 23103; HLA-B*35:01; DSCR8; ENSG00000198054; TAA
LPVQEILM

SEQ ID NO: 23104 - protein, 8 aa, Homo sapiens
  misc_feature: Table A; Target 23104; HLA-B*35:03; DSCR8; ENSG00000198054; TAA
LPVQEILM

SEQ ID NO: 23105 - protein, 8 aa, Homo sapiens
  misc_feature: Table A; Target 23105; HLA-B*51:01; DSCR8; ENSG00000198054; TAA
LPVQEILM

SEQ ID NO: 23106 - protein, 8 aa, Homo sapiens
  misc_feature: Table A; Target 23106; HLA-B*54:01; DSCR8; ENSG00000198054; TAA
LPVQEILM

SEQ ID NO: 23107 - protein, 8 aa, Homo sapiens
  misc_feature: Table A; Target 23107; HLA-B*55:01; DSCR8; ENSG00000198054; TAA
LPVQEILM

SEQ ID NO: 23108 - protein, 10 aa, Homo sapiens
  misc_feature: Table A; Target 23108; HLA-B*54:01; DSCR8; ENSG00000198054; TAA
LPVQEILMSQ

SEQ ID NO: 23109 - protein, 9 aa, Homo sapiens
  misc_feature: Table A; Target 23109; HLA-B*27:05; DSCR8; ENSG00000198054; TAA
LQTNLGNQE

SEQ ID NO: 23110 - protein, 10 aa, Homo sapiens
  misc_feature: Table A; Target 23110; HLA-B*27:05; DSCR8; ENSG00000198054; TAA
LQTNLGNQES

SEQ ID NO: 23111 - protein, 8 aa, Homo sapiens
  misc_feature: Table A; Target 23111; HLA-B*08:01; DSCR8; ENSG00000198054; TAA
MAFVKHLL

SEQ ID NO: 23112 - protein, 8 aa, Homo sapiens
  misc_feature: Table A; Target 23112; HLA-B*51:01; DSCR8; ENSG00000198054; TAA
MAFVKHLL

SEQ ID NO: 23113 - protein, 8 aa, Homo sapiens
  misc_feature: Table A; Target 23113; HLA-B*54:01; DSCR8; ENSG00000198054; TAA
MAFVKHLL

SEQ ID NO: 23114 - protein, 8 aa, Homo sapiens
  misc_feature: Table A; Target 23114; HLA-C*07:01; DSCR8; ENSG00000198054; TAA
MAFVKHLL

SEQ ID NO: 23115 - protein, 9 aa, Homo sapiens
  misc_feature: Table A; Target 23115; HLA-A*24:02; DSCR8; ENSG00000198054; TAA
MAFVKHLLL

SEQ ID NO: 23116 - protein, 9 aa, Homo sapiens
  misc_feature: Table A; Target 23116; HLA-A*68:02; DSCR8; ENSG00000198054; TAA
MAFVKHLLL

SEQ ID NO: 23117 - protein, 9 aa, Homo sapiens
  misc_feature: Table A; Target 23117; HLA-B*08:01; DSCR8; ENSG00000198054; TAA
MAFVKHLLL

SEQ ID NO: 23118 - protein, 9 aa, Homo sapiens
  misc_feature: Table A; Target 23118; HLA-B*51:01; DSCR8; ENSG00000198054; TAA
MAFVKHLLL

SEQ ID NO: 23119 - protein, 9 aa, Homo sapiens
  misc_feature: Table A; Target 23119; HLA-B*54:01; DSCR8; ENSG00000198054; TAA
MAFVKHLLL

SEQ ID NO: 23120 - protein, 9 aa, Homo sapiens
  misc_feature: Table A; Target 23120; HLA-B*57:01; DSCR8; ENSG00000198054; TAA
MAFVKHLLL

SEQ ID NO: 23121 - protein, 9 aa, Homo sapiens
  misc_feature: Table A; Target 23121; HLA-C*02:02; DSCR8; ENSG00000198054; TAA
MAFVKHLLL

SEQ ID NO: 23122 - protein, 8 aa, Homo sapiens
  misc_feature: Table A; Target 23122; HLA-B*08:01; DSCR8; ENSG00000198054; TAA
MPRPKVLA

SEQ ID NO: 23123 - protein, 8 aa, Homo sapiens
  misc_feature: Table A; Target 23123; HLA-B*54:01; DSCR8; ENSG00000198054; TAA
MPRPKVLA

SEQ ID NO: 23124 - protein, 8 aa, Homo sapiens
  misc_feature: Table A; Target 23124; HLA-B*55:01; DSCR8; ENSG00000198054; TAA
MPRPKVLA

SEQ ID NO: 23125 - protein, 8 aa, Homo sapiens
  misc_feature: Table A; Target 23125; HLA-B*56:01; DSCR8; ENSG00000198054; TAA
MPRPKVLA

SEQ ID NO: 23126 - protein, 8 aa, Homo sapiens
  misc_feature: Table A; Target 23126; HLA-C*07:02; DSCR8; ENSG00000198054; TAA
MPRPKVLA

SEQ ID NO: 23127 - protein, 9 aa, Homo sapiens
  misc_feature: Table A; Target 23127; HLA-B*07:02; DSCR8; ENSG00000198054; TAA
MPRPKVLAQ

SEQ ID NO: 23128 - protein, 9 aa, Homo sapiens
  misc_feature: Table A; Target 23128; HLA-B*08:01; DSCR8; ENSG00000198054; TAA
MPRPKVLAQ

SEQ ID NO: 23129 - protein, 9 aa, Homo sapiens
  misc_feature: Table A; Target 23129; HLA-B*54:01; DSCR8; ENSG00000198054; TAA
MPRPKVLAQ

SEQ ID NO: 23130 - protein, 10 aa, Homo sapiens
  misc_feature: Table A; Target 23130; HLA-A*33:01; DSCR8; ENSG00000198054; TAA
MPRPKVLAQY

SEQ ID NO: 23131 - protein, 10 aa, Homo sapiens
  misc_feature: Table A; Target 23131; HLA-B*07:02; DSCR8; ENSG00000198054; TAA
MPRPKVLAQY

SEQ ID NO: 23132 - protein, 10 aa, Homo sapiens
  misc_feature: Table A; Target 23132; HLA-B*35:01; DSCR8; ENSG00000198054; TAA
MPRPKVLAQY

SEQ ID NO: 23133 - protein, 10 aa, Homo sapiens
  misc_feature: Table A; Target 23133; HLA-B*54:01; DSCR8; ENSG00000198054; TAA
MPRPKVLAQY

SEQ ID NO: 23134 - protein, 10 aa, Homo sapiens
  misc_feature: Table A; Target 23134; HLA-C*04:01; DSCR8; ENSG00000198054; TAA
MPRPKVLAQY

SEQ ID NO: 23135 - protein, 10 aa, Homo sapiens
  misc_feature: Table A; Target 23135; HLA-C*07:02; DSCR8; ENSG00000198054; TAA
MPRPKVLAQY

SEQ ID NO: 23136 - protein, 8 aa, Homo sapiens
  misc_feature: Table A; Target 23136; HLA-B*58:01; DSCR8; ENSG00000198054; TAA
MSQPPEQL

SEQ ID NO: 23137 - protein, 8 aa, Homo sapiens
  misc_feature: Table A; Target 23137; HLA-C*04:01; DSCR8; ENSG00000198054; TAA
MSQPPEQL

SEQ ID NO: 23138 - protein, 8 aa, Homo sapiens
  misc_feature: Table A; Target 23138; HLA-C*05:01; DSCR8; ENSG00000198054; TAA
MSQPPEQL

SEQ ID NO: 23139 - protein, 8 aa, Homo sapiens
  misc_feature: Table A; Target 23139; HLA-C*06:02; DSCR8; ENSG00000198054; TAA
MSQPPEQL

SEQ ID NO: 23140 - protein, 8 aa, Homo sapiens
  misc_feature: Table A; Target 23140; HLA-C*16:02; DSCR8; ENSG00000198054; TAA
MSQPPEQL

SEQ ID NO: 23141 - protein, 10 aa, Homo sapiens
  misc_feature: Table A; Target 23141; HLA-A*01:01; DSCR8; ENSG00000198054; TAA
MSQPPEQLGL

SEQ ID NO: 23142 - protein, 10 aa, Homo sapiens
  misc_feature: Table A; Target 23142; HLA-B*27:05; DSCR8; ENSG00000198054; TAA
MSQPPEQLGL

SEQ ID NO: 23143 - protein, 10 aa, Homo sapiens
  misc_feature: Table A; Target 23143; HLA-B*39:01; DSCR8; ENSG00000198054; TAA
MSQPPEQLGL

SEQ ID NO: 23144 - protein, 10 aa, Homo sapiens
  misc_feature: Table A; Target 23144; HLA-B*57:01; DSCR8; ENSG00000198054; TAA
MSQPPEQLGL

SEQ ID NO: 23145 - protein, 10 aa, Homo sapiens
  misc_feature: Table A; Target 23145; HLA-C*03:04; DSCR8; ENSG00000198054; TAA
MSQPPEQLGL

SEQ ID NO: 23146 - protein, 10 aa, Homo sapiens
  misc_feature: Table A; Target 23146; HLA-C*04:01; DSCR8; ENSG00000198054; TAA
MSQPPEQLGL

SEQ ID NO: 23147 - protein, 10 aa, Homo sapiens
  misc_feature: Table A; Target 23147; HLA-C*06:02; DSCR8; ENSG00000198054; TAA
MSQPPEQLGL

SEQ ID NO: 23148 - protein, 10 aa, Homo sapiens
  misc_feature: Table A; Target 23148; HLA-C*07:01; DSCR8; ENSG00000198054; TAA
MSQPPEQLGL

SEQ ID NO: 23149 - protein, 10 aa, Homo sapiens
  misc_feature: Table A; Target 23149; HLA-C*07:02; DSCR8; ENSG00000198054; TAA
MSQPPEQLGL

SEQ ID NO: 23150 - protein, 10 aa, Homo sapiens
  misc_feature: Table A; Target 23150; HLA-C*16:02; DSCR8; ENSG00000198054; TAA
MSQPPEQLGL

SEQ ID NO: 23151 - protein, 11 aa, Homo sapiens
  misc_feature: Table A; Target 23151; HLA-C*04:01; DSCR8; ENSG00000198054; TAA
MSQPPEQLGLQ

SEQ ID NO: 23152 - protein, 11 aa, Homo sapiens
  misc_feature: Table A; Target 23152; HLA-C*07:02; DSCR8; ENSG00000198054; TAA
MSQPPEQLGLQ

SEQ ID NO: 23153 - protein, 10 aa, Homo sapiens
  misc_feature: Table A; Target 23153; HLA-C*07:01; DSCR8; ENSG00000198054; TAA
NLGNQESSGM

SEQ ID NO: 23154 - protein, 11 aa, Homo sapiens
  misc_feature: Table A; Target 23154; HLA-C*07:01; DSCR8; ENSG00000198054; TAA
NLGNQESSGMM

SEQ ID NO: 23155 - protein, 8 aa, Homo sapiens
  misc_feature: Table A; Target 23155; HLA-B*39:01; DSCR8; ENSG00000198054; TAA
NQESSGMM

SEQ ID NO: 23156 - protein, 8 aa, Homo sapiens
  misc_feature: Table A; Target 23156; HLA-C*05:01; DSCR8; ENSG00000198054; TAA
NQESSGMM

SEQ ID NO: 23157 - protein, 8 aa, Homo sapiens
  misc_feature: Table A; Target 23157; HLA-C*07:01; DSCR8; ENSG00000198054; TAA
NQESSGMM

SEQ ID NO: 23158 - protein, 10 aa, Homo sapiens
  misc_feature: Table A; Target 23158; HLA-B*27:05; DSCR8; ENSG00000198054; TAA
NQESSGMMKL

SEQ ID NO: 23159 - protein, 10 aa, Homo sapiens
  misc_feature: Table A; Target 23159; HLA-B*38:01; DSCR8; ENSG00000198054; TAA
NQESSGMMKL

SEQ ID NO: 23160 - protein, 10 aa, Homo sapiens
  misc_feature: Table A; Target 23160; HLA-B*39:01; DSCR8; ENSG00000198054; TAA
NQESSGMMKL

SEQ ID NO: 23161 - protein, 10 aa, Homo sapiens
  misc_feature: Table A; Target 23161; HLA-B*40:02; DSCR8; ENSG00000198054; TAA
NQESSGMMKL

SEQ ID NO: 23162 - protein, 10 aa, Homo sapiens
  misc_feature: Table A; Target 23162; HLA-C*04:01; DSCR8; ENSG00000198054; TAA
NQESSGMMKL

SEQ ID NO: 23163 - protein, 11 aa, Homo sapiens
  misc_feature: Table A; Target 23163; HLA-B*38:01; DSCR8; ENSG00000198054; TAA
NQESSGMMKLF

SEQ ID NO: 23164 - protein, 8 aa, Homo sapiens
  misc_feature: Table A; Target 23164; HLA-B*51:01; DSCR8; ENSG00000198054; TAA
PGPNFVTV

SEQ ID NO: 23165 - protein, 8 aa, Homo sapiens
  misc_feature: Table A; Target 23165; HLA-C*01:02; DSCR8; ENSG00000198054; TAA
PGPNFVTV

SEQ ID NO: 23166 - protein, 8 aa, Homo sapiens
  misc_feature: Table A; Target 23166; HLA-C*04:01; DSCR8; ENSG00000198054; TAA
PGPNFVTV

SEQ ID NO: 23167 - protein, 8 aa, Homo sapiens
  misc_feature: Table A; Target 23167; HLA-C*06:02; DSCR8; ENSG00000198054; TAA
PGPNFVTV

SEQ ID NO: 23168 - protein, 8 aa, Homo sapiens
  misc_feature: Table A; Target 23168; HLA-C*07:02; DSCR8; ENSG00000198054; TAA
PGPNFVTV

SEQ ID NO: 23169 - protein, 10 aa, Homo sapiens
  misc_feature: Table A; Target 23169; HLA-C*07:02; DSCR8; ENSG00000198054; TAA
PGPNFVTVRK

SEQ ID NO: 23170 - protein, 9 aa, Homo sapiens
  misc_feature: Table A; Target 23170; HLA-B*07:02; DSCR8; ENSG00000198054; TAA
PRPKVLAQY

SEQ ID NO: 23171 - protein, 9 aa, Homo sapiens
  misc_feature: Table A; Target 23171; HLA-C*07:01; DSCR8; ENSG00000198054; TAA
PRPKVLAQY

SEQ ID NO: 23172 - protein, 9 aa, Homo sapiens
  misc_feature: Table A; Target 23172; HLA-C*07:02; DSCR8; ENSG00000198054; TAA
PRPKVLAQY

SEQ ID NO: 23173 - protein, 9 aa, Homo sapiens
  misc_feature: Table A; Target 23173; HLA-B*40:02; DSCR8; ENSG00000198054; TAA
QEILMSQPP

SEQ ID NO: 23174 - protein, 9 aa, Homo sapiens
  misc_feature: Table A; Target 23174; HLA-B*49:01; DSCR8; ENSG00000198054; TAA
QEILMSQPP

SEQ ID NO: 23175 - protein, 9 aa, Homo sapiens
  misc_feature: Table A; Target 23175; HLA-A*30:01; DSCR8; ENSG00000198054; TAA
QESSGMMKL

SEQ ID NO: 23176 - protein, 9 aa, Homo sapiens
  misc_feature: Table A; Target 23176; HLA-B*07:02; DSCR8; ENSG00000198054; TAA
QESSGMMKL

SEQ ID NO: 23177 - protein, 9 aa, Homo sapiens
  misc_feature: Table A; Target 23177; HLA-B*13:02; DSCR8; ENSG00000198054; TAA
QESSGMMKL

SEQ ID NO: 23178 - protein, 9 aa, Homo sapiens
  misc_feature: Table A; Target 23178; HLA-B*18:01; DSCR8; ENSG00000198054; TAA
QESSGMMKL

SEQ ID NO: 23179 - protein, 9 aa, Homo sapiens
  misc_feature: Table A; Target 23179; HLA-B*27:02; DSCR8; ENSG00000198054; TAA
QESSGMMKL

SEQ ID NO: 23180 - protein, 9 aa, Homo sapiens
  misc_feature: Table A; Target 23180; HLA-B*27:05; DSCR8; ENSG00000198054; TAA
QESSGMMKL

SEQ ID NO: 23181 - protein, 9 aa, Homo sapiens
  misc_feature: Table A; Target 23181; HLA-B*37:01; DSCR8; ENSG00000198054; TAA
QESSGMMKL

SEQ ID NO: 23182 - protein, 9 aa, Homo sapiens
  misc_feature: Table A; Target 23182; HLA-B*38:01; DSCR8; ENSG00000198054; TAA
QESSGMMKL

SEQ ID NO: 23183 - protein, 9 aa, Homo sapiens
  misc_feature: Table A; Target 23183; HLA-B*40:01; DSCR8; ENSG00000198054; TAA
QESSGMMKL

SEQ ID NO: 23184 - protein, 9 aa, Homo sapiens
  misc_feature: Table A; Target 23184; HLA-B*40:02; DSCR8; ENSG00000198054; TAA
QESSGMMKL

SEQ ID NO: 23185 - protein, 9 aa, Homo sapiens
  misc_feature: Table A; Target 23185; HLA-B*44:02; DSCR8; ENSG00000198054; TAA
QESSGMMKL

SEQ ID NO: 23186 - protein, 9 aa, Homo sapiens
  misc_feature: Table A; Target 23186; HLA-B*44:03; DSCR8; ENSG00000198054; TAA
QESSGMMKL

SEQ ID NO: 23187 - protein, 9 aa, Homo sapiens
  misc_feature: Table A; Target 23187; HLA-B*49:01; DSCR8; ENSG00000198054; TAA
QESSGMMKL

SEQ ID NO: 23188 - protein, 9 aa, Homo sapiens
  misc_feature: Table A; Target 23188; HLA-C*02:02; DSCR8; ENSG00000198054; TAA
QESSGMMKL

SEQ ID NO: 23189 - protein, 9 aa, Homo sapiens
  misc_feature: Table A; Target 23189; HLA-C*06:02; DSCR8; ENSG00000198054; TAA
QESSGMMKL

SEQ ID NO: 23190 - protein, 9 aa, Homo sapiens
  misc_feature: Table A; Target 23190; HLA-C*16:04; DSCR8; ENSG00000198054; TAA
QESSGMMKL

SEQ ID NO: 23191 - protein, 10 aa, Homo sapiens
  misc_feature: Table A; Target 23191; HLA-B*44:02; DSCR8; ENSG00000198054; TAA
QESSGMMKLF

SEQ ID NO: 23192 - protein, 10 aa, Homo sapiens
  misc_feature: Table A; Target 23192; HLA-B*44:03; DSCR8; ENSG00000198054; TAA
QESSGMMKLF

SEQ ID NO: 23193 - protein, 10 aa, Homo sapiens
  misc_feature: Table A; Target 23193; HLA-C*16:04; DSCR8; ENSG00000198054; TAA
QESSGMMKLF

SEQ ID NO: 23194 - protein, 8 aa, Homo sapiens
  misc_feature: Table A; Target 23194; HLA-B*51:01; DSCR8; ENSG00000198054; TAA
QPPEQLGL

SEQ ID NO: 23195 - protein, 8 aa, Homo sapiens
  misc_feature: Table A; Target 23195; HLA-B*08:01; DSCR8; ENSG00000198054; TAA
SGMMKLFM

SEQ ID NO: 23196 - protein, 8 aa, Homo sapiens
  misc_feature: Table A; Target 23196; HLA-B*08:01; DSCR8; ENSG00000198054; TAA
SITDHCSL

SEQ ID NO: 23197 - protein, 8 aa, Homo sapiens
  misc_feature: Table A; Target 23197; HLA-C*01:02; DSCR8; ENSG00000198054; TAA
SITDHCSL

SEQ ID NO: 23198 - protein, 8 aa, Homo sapiens
  misc_feature: Table A; Target 23198; HLA-C*03:04; DSCR8; ENSG00000198054; TAA
SITDHCSL

SEQ ID NO: 23199 - protein, 8 aa, Homo sapiens
  misc_feature: Table A; Target 23199; HLA-C*16:01; DSCR8; ENSG00000198054; TAA
SITDHCSL

SEQ ID NO: 23200 - protein, 9 aa, Homo sapiens
  misc_feature: Table A; Target 23200; HLA-A*02:01; DSCR8; ENSG00000198054; TAA
SLHLPVQEI

SEQ ID NO: 23201 - protein, 9 aa, Homo sapiens
  misc_feature: Table A; Target 23201; HLA-A*02:03; DSCR8; ENSG00000198054; TAA
SLHLPVQEI

SEQ ID NO: 23202 - protein, 9 aa, Homo sapiens
  misc_feature: Table A; Target 23202; HLA-A*02:04; DSCR8; ENSG00000198054; TAA
SLHLPVQEI

SEQ ID NO: 23203 - protein, 9 aa, Homo sapiens
  misc_feature: Table A; Target 23203; HLA-A*02:07; DSCR8; ENSG00000198054; TAA
SLHLPVQEI

SEQ ID NO: 23204 - protein, 9 aa, Homo sapiens
  misc_feature: Table A; Target 23204; HLA-A*30:01; DSCR8; ENSG00000198054; TAA
SLHLPVQEI

SEQ ID NO: 23205 - protein, 9 aa, Homo sapiens
  misc_feature: Table A; Target 23205; HLA-B*13:02; DSCR8; ENSG00000198054; TAA
SLHLPVQEI

SEQ ID NO: 23206 - protein, 9 aa, Homo sapiens
  misc_feature: Table A; Target 23206; HLA-B*37:01; DSCR8; ENSG00000198054; TAA
SLHLPVQEI

SEQ ID NO: 23207 - protein, 9 aa, Homo sapiens
  misc_feature: Table A; Target 23207; HLA-B*38:01; DSCR8; ENSG00000198054; TAA
SLHLPVQEI

SEQ ID NO: 23208 - protein, 9 aa, Homo sapiens
  misc_feature: Table A; Target 23208; HLA-B*40:02; DSCR8; ENSG00000198054; TAA
SLHLPVQEI

SEQ ID NO: 23209 - protein, 9 aa, Homo sapiens
  misc_feature: Table A; Target 23209; HLA-B*46:01; DSCR8; ENSG00000198054; TAA
SLHLPVQEI

SEQ ID NO: 23210 - protein, 9 aa, Homo sapiens
  misc_feature: Table A; Target 23210; HLA-B*51:01; DSCR8; ENSG00000198054; TAA
SLHLPVQEI

SEQ ID NO: 23211 - protein, 9 aa, Homo sapiens
  misc_feature: Table A; Target 23211; HLA-B*55:01; DSCR8; ENSG00000198054; TAA
SLHLPVQEI

SEQ ID NO: 23212 - protein, 9 aa, Homo sapiens
  misc_feature: Table A; Target 23212; HLA-C*01:02; DSCR8; ENSG00000198054; TAA
SLHLPVQEI

SEQ ID NO: 23213 - protein, 9 aa, Homo sapiens
  misc_feature: Table A; Target 23213; HLA-C*06:02; DSCR8; ENSG00000198054; TAA
SLHLPVQEI

SEQ ID NO: 23214 - protein, 9 aa, Homo sapiens
  misc_feature: Table A; Target 23214; HLA-C*07:04; DSCR8; ENSG00000198054; TAA
SLHLPVQEI

SEQ ID NO: 23215 - protein, 10 aa, Homo sapiens
  misc_feature: Table A; Target 23215; HLA-B*07:02; DSCR8; ENSG00000198054; TAA
SPRLECSGSI

SEQ ID NO: 23216 - protein, 9 aa, Homo sapiens
  misc_feature: Table A; Target 23216; HLA-A*02:07; DSCR8; ENSG00000198054; TAA
SQPPEQLGL

SEQ ID NO: 23217 - protein, 9 aa, Homo sapiens
  misc_feature: Table A; Target 23217; HLA-A*30:01; DSCR8; ENSG00000198054; TAA
SQPPEQLGL

SEQ ID NO: 23218 - protein, 9 aa, Homo sapiens
  misc_feature: Table A; Target 23218; HLA-A*32:01; DSCR8; ENSG00000198054; TAA
SQPPEQLGL

SEQ ID NO: 23219 - protein, 9 aa, Homo sapiens
  misc_feature: Table A; Target 23219; HLA-B*13:02; DSCR8; ENSG00000198054; TAA
SQPPEQLGL

SEQ ID NO: 23220 - protein, 9 aa, Homo sapiens
  misc_feature: Table A; Target 23220; HLA-B*15:01; DSCR8; ENSG00000198054; TAA
SQPPEQLGL

SEQ ID NO: 23221 - protein, 9 aa, Homo sapiens
  misc_feature: Table A; Target 23221; HLA-B*15:03; DSCR8; ENSG00000198054; TAA
SQPPEQLGL

SEQ ID NO: 23222 - protein, 9 aa, Homo sapiens
  misc_feature: Table A; Target 23222; HLA-B*27:05; DSCR8; ENSG00000198054; TAA
SQPPEQLGL

SEQ ID NO: 23223 - protein, 9 aa, Homo sapiens
  misc_feature: Table A; Target 23223; HLA-B*38:01; DSCR8; ENSG00000198054; TAA
SQPPEQLGL

SEQ ID NO: 23224 - protein, 9 aa, Homo sapiens
  misc_feature: Table A; Target 23224; HLA-B*39:01; DSCR8; ENSG00000198054; TAA
SQPPEQLGL

SEQ ID NO: 23225 - protein, 9 aa, Homo sapiens
  misc_feature: Table A; Target 23225; HLA-B*58:01; DSCR8; ENSG00000198054; TAA
SQPPEQLGL

SEQ ID NO: 23226 - protein, 9 aa, Homo sapiens
  misc_feature: Table A; Target 23226; HLA-C*01:02; DSCR8; ENSG00000198054; TAA
SQPPEQLGL

SEQ ID NO: 23227 - protein, 9 aa, Homo sapiens
  misc_feature: Table A; Target 23227; HLA-C*06:02; DSCR8; ENSG00000198054; TAA
SQPPEQLGL

SEQ ID NO: 23228 - protein, 9 aa, Homo sapiens
  misc_feature: Table A; Target 23228; HLA-C*07:04; DSCR8; ENSG00000198054; TAA
SQPPEQLGL

SEQ ID NO: 23229 - protein, 9 aa, Homo sapiens
  misc_feature: Table A; Target 23229; HLA-C*16:04; DSCR8; ENSG00000198054; TAA
SQPPEQLGL

SEQ ID NO: 23230 - protein, 8 aa, Homo sapiens
  misc_feature: Table A; Target 23230; HLA-B*57:01; DSCR8; ENSG00000198054; TAA
SSGMMKLF

SEQ ID NO: 23231 - protein, 8 aa, Homo sapiens
  misc_feature: Table A; Target 23231; HLA-C*07:01; DSCR8; ENSG00000198054; TAA
SSGMMKLF

SEQ ID NO: 23232 - protein, 8 aa, Homo sapiens
  misc_feature: Table A; Target 23232; HLA-C*12:03; DSCR8; ENSG00000198054; TAA
SSGMMKLF

SEQ ID NO: 23233 - protein, 11 aa, Homo sapiens
  misc_feature: Table A; Target 23233; HLA-B*27:05; DSCR8; ENSG00000198054; TAA
TNLGNQESSGM

SEQ ID NO: 23234 - protein, 11 aa, Homo sapiens
  misc_feature: Table A; Target 23234; HLA-B*39:01; DSCR8; ENSG00000198054; TAA
TNLGNQESSGM

SEQ ID NO: 23235 - protein, 11 aa, Homo sapiens
  misc_feature: Table A; Target 23235; HLA-C*04:01; DSCR8; ENSG00000198054; TAA
TNLGNQESSGM

SEQ ID NO: 23236 - protein, 11 aa, Homo sapiens
  misc_feature: Table A; Target 23236; HLA-C*07:01; DSCR8; ENSG00000198054; TAA
TNLGNQESSGM

SEQ ID NO: 23237 - protein, 9 aa, Homo sapiens
  misc_feature: Table A; Target 23237; HLA-A*25:01; DSCR8; ENSG00000198054; TAA
TVRKGLHSF

SEQ ID NO: 23238 - protein, 9 aa, Homo sapiens
  misc_feature: Table A; Target 23238; HLA-A*31:01; DSCR8; ENSG00000198054; TAA
TVRKGLHSF

SEQ ID NO: 23239 - protein, 9 aa, Homo sapiens
  misc_feature: Table A; Target 23239; HLA-A*32:01; DSCR8; ENSG00000198054; TAA
TVRKGLHSF

SEQ ID NO: 23240 - protein, 9 aa, Homo sapiens
  misc_feature: Table A; Target 23240; HLA-A*33:01; DSCR8; ENSG00000198054; TAA
TVRKGLHSF

SEQ ID NO: 23241 - protein, 9 aa, Homo sapiens
  misc_feature: Table A; Target 23241; HLA-A*33:03; DSCR8; ENSG00000198054; TAA
TVRKGLHSF

SEQ ID NO: 23242 - protein, 9 aa, Homo sapiens
  misc_feature: Table A; Target 23242; HLA-B*07:02; DSCR8; ENSG00000198054; TAA
TVRKGLHSF

SEQ ID NO: 23243 - protein, 9 aa, Homo sapiens
  misc_feature: Table A; Target 23243; HLA-B*08:01; DSCR8; ENSG00000198054; TAA
TVRKGLHSF

SEQ ID NO: 23244 - protein, 9 aa, Homo sapiens
  misc_feature: Table A; Target 23244; HLA-B*46:01; DSCR8; ENSG00000198054; TAA
TVRKGLHSF

SEQ ID NO: 23245 - protein, 9 aa, Homo sapiens
  misc_feature: Table A; Target 23245; HLA-B*57:01; DSCR8; ENSG00000198054; TAA
TVRKGLHSF

SEQ ID NO: 23246 - protein, 8 aa, Homo sapiens
  misc_feature: Table A; Target 23246; HLA-B*08:01; DSCR8; ENSG00000198054; TAA
VRKGLHSF

SEQ ID NO: 23247 - protein, 10 aa, Homo sapiens
  misc_feature: Table A; Target 23247; HLA-B*57:01; DSCR8; ENSG00000198054; TAA
VTVRKGLHSF

SEQ ID NO: 23248 - protein, 8 aa, Homo sapiens
  misc_feature: Table A; Target 23248; HLA-B*13:02; DSCR8; ENSG00000198054; TAA
YESIQFMP

SEQ ID NO: 23249 - protein, 8 aa, Homo sapiens
  misc_feature: Table A; Target 23249; HLA-B*40:02; DSCR8; ENSG00000198054; TAA
YESIQFMP

SEQ ID NO: 23250 - protein, 8 aa, Homo sapiens
  misc_feature: Table A; Target 23250; HLA-B*49:01; DSCR8; ENSG00000198054; TAA
YESIQFMP

SEQ ID NO: 23251 - protein, 8 aa, Homo sapiens
  misc_feature: Table A; Target 23251; HLA-C*07:04; DSCR8; ENSG00000198054; TAA
YESIQFMP

SEQ ID NO: 23252 - protein, 9 aa, Homo sapiens
  misc_feature: Table A; Target 23252; HLA-A*24:02; EGFR-SEPT14 Fusion; EGFR-SEPT14; EGFR-SEPT14
LVIQLQDKF

SEQ ID NO: 23253 - protein, 9 aa, Homo sapiens
  misc_feature: Table A; Target 23253; HLA-A*29:02; EGFR-SEPT14 Fusion; EGFR-SEPT14; EGFR-SEPT14
LVIQLQDKF

SEQ ID NO: 23254 - protein, 9 aa, Homo sapiens
  misc_feature: Table A; Target 23254; HLA-B*57:01; EGFR-SEPT14 Fusion; EGFR-SEPT14; EGFR-SEPT14
LVIQLQDKF

SEQ ID NO: 23255 - protein, 9 aa, Homo sapiens
  misc_feature: Table A; Target 23255; HLA-B*58:01; EGFR-SEPT14 Fusion; EGFR-SEPT14; EGFR-SEPT14
LVIQLQDKF

SEQ ID NO: 23256 - protein, 9 aa, Homo sapiens
  misc_feature: Table A; Target 23256; HLA-A*02:01; EGFR-SEPT14 Fusion; EGFR-SEPT14; EGFR-SEPT14
QLQDKFEHL

SEQ ID NO: 23257 - protein, 9 aa, Homo sapiens
  misc_feature: Table A; Target 23257; HLA-A*02:03; EGFR-SEPT14 Fusion; EGFR-SEPT14; EGFR-SEPT14
QLQDKFEHL

SEQ ID NO: 23258 - protein, 9 aa, Homo sapiens
  misc_feature: Table A; Target 23258; HLA-A*02:04; EGFR-SEPT14 Fusion; EGFR-SEPT14; EGFR-SEPT14
QLQDKFEHL

SEQ ID NO: 23259 - protein, 9 aa, Homo sapiens
  misc_feature: Table A; Target 23259; HLA-A*02:07; EGFR-SEPT14 Fusion; EGFR-SEPT14; EGFR-SEPT14
QLQDKFEHL

SEQ ID NO: 23260 - protein, 9 aa, Homo sapiens
  misc_feature: Table A; Target 23260; HLA-A*24:02; EGFR-SEPT14 Fusion; EGFR-SEPT14; EGFR-SEPT14
QLQDKFEHL

SEQ ID NO: 23261 - protein, 9 aa, Homo sapiens
  misc_feature: Table A; Target 23261; HLA-A*31:01; EGFR-SEPT14 Fusion; EGFR-SEPT14; EGFR-SEPT14
QLQDKFEHL

SEQ ID NO: 23262 - protein, 9 aa, Homo sapiens
  misc_feature: Table A; Target 23262; HLA-A*68:02; EGFR-SEPT14 Fusion; EGFR-SEPT14; EGFR-SEPT14
QLQDKFEHL

SEQ ID NO: 23263 - protein, 9 aa, Homo sapiens
  misc_feature: Table A; Target 23263; HLA-B*08:01; EGFR-SEPT14 Fusion; EGFR-SEPT14; EGFR-SEPT14
QLQDKFEHL

SEQ ID NO: 23264 - protein, 10 aa, Homo sapiens
  misc_feature: Table A; Target 23264; HLA-A*03:02; EGFR-SEPT14 Fusion; EGFR-SEPT14; EGFR-SEPT14
QLQDKFEHLK

SEQ ID NO: 23265 - protein, 8 aa, Homo sapiens
  misc_feature: Table A; Target 23265; HLA-B*37:01; EGFR-SEPT14 Fusion; EGFR-SEPT14; EGFR-SEPT14
QRYLVIQL

SEQ ID NO: 23266 - protein, 11 aa, Homo sapiens
  misc_feature: Table A; Target 23266; HLA-A*24:02; EGFR-SEPT14 Fusion; EGFR-SEPT14; EGFR-SEPT14
RYLVIQLQDKF

SEQ ID NO: 23267 - protein, 9 aa, Homo sapiens
  misc_feature: Table A; Target 23267; HLA-C*16:02; FMR1NB; ENSG00000176988; CTA
AAMADRPQP

SEQ ID NO: 23268 - protein, 11 aa, Homo sapiens
  misc_feature: Table A; Target 23268; HLA-B*57:01; FMR1NB; ENSG00000176988; CTA
AAMADRPQPGW

SEQ ID NO: 23269 - protein, 11 aa, Homo sapiens
  misc_feature: Table A; Target 23269; HLA-B*58:01; FMR1NB; ENSG00000176988; CTA
AAMADRPQPGW

SEQ ID NO: 23270 - protein, 11 aa, Homo sapiens
  misc_feature: Table A; Target 23270; HLA-C*16:04; FMR1NB; ENSG00000176988; CTA
AAMADRPQPGW

SEQ ID NO: 23271 - protein, 8 aa, Homo sapiens
  misc_feature: Table A; Target 23271; HLA-A*32:01; FMR1NB; ENSG00000176988; CTA
ADRPQPGW

SEQ ID NO: 23272 - protein, 8 aa, Homo sapiens
  misc_feature: Table A; Target 23272; HLA-B*37:01; FMR1NB; ENSG00000176988; CTA
ADRPQPGW

SEQ ID NO: 23273 - protein, 8 aa, Homo sapiens
  misc_feature: Table A; Target 23273; HLA-B*44:02; FMR1NB; ENSG00000176988; CTA
ADRPQPGW

SEQ ID NO: 23274 - protein, 8 aa, Homo sapiens
  misc_feature: Table A; Target 23274; HLA-B*44:03; FMR1NB; ENSG00000176988; CTA
ADRPQPGW

SEQ ID NO: 23275 - protein, 8 aa, Homo sapiens
  misc_feature: Table A; Target 23275; HLA-B*57:01; FMR1NB; ENSG00000176988; CTA
ADRPQPGW

SEQ ID NO: 23276 - protein, 8 aa, Homo sapiens
  misc_feature: Table A; Target 23276; HLA-B*15:03; FMR1NB; ENSG00000176988; CTA
AHLELATY

SEQ ID NO: 23277 - protein, 10 aa, Homo sapiens
  misc_feature: Table A; Target 23277; HLA-B*38:01; FMR1NB; ENSG00000176988; CTA
AHLELATYEL

SEQ ID NO: 23278 - protein, 10 aa, Homo sapiens
  misc_feature: Table A; Target 23278; HLA-B*39:01; FMR1NB; ENSG00000176988; CTA
AHLELATYEL

SEQ ID NO: 23279 - protein, 9 aa, Homo sapiens
  misc_feature: Table A; Target 23279; HLA-A*02:04; FMR1NB; ENSG00000176988; CTA
AISLILVCL

SEQ ID NO: 23280 - protein, 10 aa, Homo sapiens
  misc_feature: Table A; Target 23280; HLA-A*25:01; FMR1NB; ENSG00000176988; CTA
AMADRPQPGW

SEQ ID NO: 23281 - protein, 10 aa, Homo sapiens
  misc_feature: Table A; Target 23281; HLA-A*32:01; FMR1NB; ENSG00000176988; CTA
AMADRPQPGW

SEQ ID NO: 23282 - protein, 10 aa, Homo sapiens
  misc_feature: Table A; Target 23282; HLA-B*44:02; FMR1NB; ENSG00000176988; CTA
AMADRPQPGW

SEQ ID NO: 23283 - protein, 10 aa, Homo sapiens
  misc_feature: Table A; Target 23283; HLA-B*57:01; FMR1NB; ENSG00000176988; CTA
AMADRPQPGW

SEQ ID NO: 23284 - protein, 10 aa, Homo sapiens
  misc_feature: Table A; Target 23284; HLA-B*58:01; FMR1NB; ENSG00000176988; CTA
AMADRPQPGW

SEQ ID NO: 23285 - protein, 9 aa, Homo sapiens
  misc_feature: Table A; Target 23285; HLA-B*07:02; FMR1NB; ENSG00000176988; CTA
AMRVAHLEL

SEQ ID NO: 23286 - protein, 8 aa, Homo sapiens
  misc_feature: Table A; Target 23286; HLA-B*56:01; FMR1NB; ENSG00000176988; CTA
APFRDVPK

SEQ ID NO: 23287 - protein, 10 aa, Homo sapiens
  misc_feature: Table A; Target 23287; HLA-B*07:02; FMR1NB; ENSG00000176988; CTA
APFRDVPKQM

SEQ ID NO: 23288 - protein, 10 aa, Homo sapiens
  misc_feature: Table A; Target 23288; HLA-C*07:02; FMR1NB; ENSG00000176988; CTA
APFRDVPKQM

SEQ ID NO: 23289 - protein, 11 aa, Homo sapiens
  misc_feature: Table A; Target 23289; HLA-C*16:04; FMR1NB; ENSG00000176988; CTA
CCFSSSGTTSF

SEQ ID NO: 23290 - protein, 10 aa, Homo sapiens
  misc_feature: Table A; Target 23290; HLA-A*23:01; FMR1NB; ENSG00000176988; CTA
CFSSSGTTSF

SEQ ID NO: 23291 - protein, 10 aa, Homo sapiens
  misc_feature: Table A; Target 23291; HLA-A*24:02; FMR1NB; ENSG00000176988; CTA
CFSSSGTTSF

SEQ ID NO: 23292 - protein, 10 aa, Homo sapiens
  misc_feature: Table A; Target 23292; HLA-C*01:02; FMR1NB; ENSG00000176988; CTA
CFSSSGTTSF

SEQ ID NO: 23293 - protein, 10 aa, Homo sapiens
  misc_feature: Table A; Target 23293; HLA-C*14:02; FMR1NB; ENSG00000176988; CTA
CFSSSGTTSF

SEQ ID NO: 23294 - protein, 9 aa, Homo sapiens
  misc_feature: Table A; Target 23294; HLA-A*33:01; FMR1NB; ENSG00000176988; CTA
DDLQRQDNR

SEQ ID NO: 23295 - protein, 9 aa, Homo sapiens
  misc_feature: Table A; Target 23295; HLA-A*33:01; FMR1NB; ENSG00000176988; CTA
DLSESECLR

SEQ ID NO: 23296 - protein, 9 aa, Homo sapiens
  misc_feature: Table A; Target 23296; HLA-A*33:03; FMR1NB; ENSG00000176988; CTA
DLSESECLR

SEQ ID NO: 23297 - protein, 9 aa, Homo sapiens
  misc_feature: Table A; Target 23297; HLA-A*68:01; FMR1NB; ENSG00000176988; CTA
DLSESECLR

SEQ ID NO: 23298 - protein, 8 aa, Homo sapiens
  misc_feature: Table A; Target 23298; HLA-A*33:01; FMR1NB; ENSG00000176988; CTA
DNRVVTGL

SEQ ID NO: 23299 - protein, 8 aa, Homo sapiens
  misc_feature: Table A; Target 23299; HLA-B*08:01; FMR1NB; ENSG00000176988; CTA
DNRVVTGL

SEQ ID NO: 23300 - protein, 8 aa, Homo sapiens
  misc_feature: Table A; Target 23300; HLA-B*18:01; FMR1NB; ENSG00000176988; CTA
DNRVVTGL

SEQ ID NO: 23301 - protein, 9 aa, Homo sapiens
  misc_feature: Table A; Target 23301; HLA-A*33:01; FMR1NB; ENSG00000176988; CTA
DNRVVTGLK

SEQ ID NO: 23302 - protein, 9 aa, Homo sapiens
  misc_feature: Table A; Target 23302; HLA-A*33:03; FMR1NB; ENSG00000176988; CTA
DNRVVTGLK

SEQ ID NO: 23303 - protein, 10 aa, Homo sapiens
  misc_feature: Table A; Target 23303; HLA-A*33:01; FMR1NB; ENSG00000176988; CTA
DNRVVTGLKK

SEQ ID NO: 23304 - protein, 11 aa, Homo sapiens
  misc_feature: Table A; Target 23304; HLA-A*33:01; FMR1NB; ENSG00000176988; CTA
DNRVVTGLKKQ

SEQ ID NO: 23305 - protein, 10 aa, Homo sapiens
  misc_feature: Table A; Target 23305; HLA-A*25:01; FMR1NB; ENSG00000176988; CTA
DSALEALLNF

SEQ ID NO: 23306 - protein, 9 aa, Homo sapiens
  misc_feature: Table A; Target 23306; HLA-A*25:01; FMR1NB; ENSG00000176988; CTA
DVPKQMMQM

SEQ ID NO: 23307 - protein, 9 aa, Homo sapiens
  misc_feature: Table A; Target 23307; HLA-A*26:01; FMR1NB; ENSG00000176988; CTA
DVPKQMMQM

SEQ ID NO: 23308 - protein, 10 aa, Homo sapiens
  misc_feature: Table A; Target 23308; HLA-A*25:01; FMR1NB; ENSG00000176988; CTA
DVPKQMMQMF

SEQ ID NO: 23309 - protein, 10 aa, Homo sapiens
  misc_feature: Table A; Target 23309; HLA-A*26:01; FMR1NB; ENSG00000176988; CTA
DVPKQMMQMF

SEQ ID NO: 23310 - protein, 9 aa, Homo sapiens
  misc_feature: Table A; Target 23310; HLA-A*30:01; FMR1NB; ENSG00000176988; CTA
EEDSALEAL

SEQ ID NO: 23311 - protein, 9 aa, Homo sapiens
  misc_feature: Table A; Target 23311; HLA-B*39:01; FMR1NB; ENSG00000176988; CTA
EEDSALEAL

SEQ ID NO: 23312 - protein, 9 aa, Homo sapiens
  misc_feature: Table A; Target 23312; HLA-B*40:01; FMR1NB; ENSG00000176988; CTA
EEDSALEAL

SEQ ID NO: 23313 - protein, 9 aa, Homo sapiens
  misc_feature: Table A; Target 23313; HLA-B*44:02; FMR1NB; ENSG00000176988; CTA
EEDSALEAL

SEQ ID NO: 23314 - protein, 9 aa, Homo sapiens
  misc_feature: Table A; Target 23314; HLA-B*44:03; FMR1NB; ENSG00000176988; CTA
EEDSALEAL

SEQ ID NO: 23315 - protein, 10 aa, Homo sapiens
  misc_feature: Table A; Target 23315; HLA-B*38:01; FMR1NB; ENSG00000176988; CTA
EEDSALEALL

SEQ ID NO: 23316 - protein, 10 aa, Homo sapiens
  misc_feature: Table A; Target 23316; HLA-B*40:01; FMR1NB; ENSG00000176988; CTA
EEDSALEALL

SEQ ID NO: 23317 - protein, 10 aa, Homo sapiens
  misc_feature: Table A; Target 23317; HLA-B*44:02; FMR1NB; ENSG00000176988; CTA
EEDSALEALL

SEQ ID NO: 23318 - protein, 10 aa, Homo sapiens
  misc_feature: Table A; Target 23318; HLA-B*44:03; FMR1NB; ENSG00000176988; CTA
EEDSALEALL

SEQ ID NO: 23319 - protein, 8 aa, Homo sapiens
  misc_feature: Table A; Target 23319; HLA-A*33:01; FMR1NB; ENSG00000176988; CTA
EMLQKAAR

SEQ ID NO: 23320 - protein, 8 aa, Homo sapiens
  misc_feature: Table A; Target 23320; HLA-A*33:03; FMR1NB; ENSG00000176988; CTA
EMLQKAAR

SEQ ID NO: 23321 - protein, 8 aa, Homo sapiens
  misc_feature: Table A; Target 23321; HLA-B*08:01; FMR1NB; ENSG00000176988; CTA
EMLQKAAR

SEQ ID NO: 23322 - protein, 9 aa, Homo sapiens
  misc_feature: Table A; Target 23322; HLA-A*33:01; FMR1NB; ENSG00000176988; CTA
ESLKMRVSK

SEQ ID NO: 23323 - protein, 9 aa, Homo sapiens
  misc_feature: Table A; Target 23323; HLA-A*33:03; FMR1NB; ENSG00000176988; CTA
ESLKMRVSK

SEQ ID NO: 23324 - protein, 11 aa, Homo sapiens
  misc_feature: Table A; Target 23324; HLA-A*01:01; FMR1NB; ENSG00000176988; CTA
ESNPESSHPGY

SEQ ID NO: 23325 - protein, 11 aa, Homo sapiens
  misc_feature: Table A; Target 23325; HLA-A*25:01; FMR1NB; ENSG00000176988; CTA
ESNPESSHPGY

SEQ ID NO: 23326 - protein, 11 aa, Homo sapiens
  misc_feature: Table A; Target 23326; HLA-A*26:01; FMR1NB; ENSG00000176988; CTA
ESNPESSHPGY

SEQ ID NO: 23327 - protein, 11 aa, Homo sapiens
  misc_feature: Table A; Target 23327; HLA-A*29:02; FMR1NB; ENSG00000176988; CTA
ESNPESSHPGY

SEQ ID NO: 23328 - protein, 11 aa, Homo sapiens
  misc_feature: Table A; Target 23328; HLA-A*30:02; FMR1NB; ENSG00000176988; CTA
ESNPESSHPGY

SEQ ID NO: 23329 - protein, 11 aa, Homo sapiens
  misc_feature: Table A; Target 23329; HLA-A*32:01; FMR1NB; ENSG00000176988; CTA
ESNPESSHPGY

SEQ ID NO: 23330 - protein, 11 aa, Homo sapiens
  misc_feature: Table A; Target 23330; HLA-A*33:01; FMR1NB; ENSG00000176988; CTA
ESNPESSHPGY

SEQ ID NO: 23331 - protein, 11 aa, Homo sapiens
  misc_feature: Table A; Target 23331; HLA-A*33:03; FMR1NB; ENSG00000176988; CTA
ESNPESSHPGY

SEQ ID NO: 23332 - protein, 11 aa, Homo sapiens
  misc_feature: Table A; Target 23332; HLA-B*15:01; FMR1NB; ENSG00000176988; CTA
ESNPESSHPGY

SEQ ID NO: 23333 - protein, 11 aa, Homo sapiens
  misc_feature: Table A; Target 23333; HLA-B*57:01; FMR1NB; ENSG00000176988; CTA
ESNPESSHPGY

SEQ ID NO: 23334 - protein, 11 aa, Homo sapiens
  misc_feature: Table A; Target 23334; HLA-B*58:01; FMR1NB; ENSG00000176988; CTA
ESNPESSHPGY

SEQ ID NO: 23335 - protein, 11 aa, Homo sapiens
  misc_feature: Table A; Target 23335; HLA-C*07:01; FMR1NB; ENSG00000176988; CTA
ESNPESSHPGY

SEQ ID NO: 23336 - protein, 11 aa, Homo sapiens
  misc_feature: Table A; Target 23336; HLA-C*07:06; FMR1NB; ENSG00000176988; CTA
ESNPESSHPGY

SEQ ID NO: 23337 - protein, 9 aa, Homo sapiens
  misc_feature: Table A; Target 23337; HLA-B*54:01; FMR1NB; ENSG00000176988; CTA
ESSHPGYEA

SEQ ID NO: 23338 - protein, 9 aa, Homo sapiens
  misc_feature: Table A; Target 23338; HLA-A*23:01; FMR1NB; ENSG00000176988; CTA
FFFPTTCNL

SEQ ID NO: 23339 - protein, 9 aa, Homo sapiens
  misc_feature: Table A; Target 23339; HLA-A*24:02; FMR1NB; ENSG00000176988; CTA
FFFPTTCNL

SEQ ID NO: 23340 - protein, 9 aa, Homo sapiens
  misc_feature: Table A; Target 23340; HLA-A*29:02; FMR1NB; ENSG00000176988; CTA
FFFPTTCNL

SEQ ID NO: 23341 - protein, 9 aa, Homo sapiens
  misc_feature: Table A; Target 23341; HLA-C*14:02; FMR1NB; ENSG00000176988; CTA
FFFPTTCNL

SEQ ID NO: 23342 - protein, 8 aa, Homo sapiens
  misc_feature: Table A; Target 23342; HLA-C*03:03; FMR1NB; ENSG00000176988; CTA
FGLGAISL

SEQ ID NO: 23343 - protein, 8 aa, Homo sapiens
  misc_feature: Table A; Target 23343; HLA-C*03:04; FMR1NB; ENSG00000176988; CTA
FGLGAISL

SEQ ID NO: 23344 - protein, 8 aa, Homo sapiens
  misc_feature: Table A; Target 23344; HLA-C*14:02; FMR1NB; ENSG00000176988; CTA
FGLGAISL

SEQ ID NO: 23345 - protein, 9 aa, Homo sapiens
  misc_feature: Table A; Target 23345; HLA-B*27:05; FMR1NB; ENSG00000176988; CTA
FRDVPKQMM

SEQ ID NO: 23346 - protein, 9 aa, Homo sapiens
  misc_feature: Table A; Target 23346; HLA-A*01:01; FMR1NB; ENSG00000176988; CTA
FSSSGTTSF

SEQ ID NO: 23347 - protein, 9 aa, Homo sapiens
  misc_feature: Table A; Target 23347; HLA-A*23:01; FMR1NB; ENSG00000176988; CTA
FSSSGTTSF

SEQ ID NO: 23348 - protein, 9 aa, Homo sapiens
  misc_feature: Table A; Target 23348; HLA-A*25:01; FMR1NB; ENSG00000176988; CTA
FSSSGTTSF

SEQ ID NO: 23349 - protein, 9 aa, Homo sapiens
  misc_feature: Table A; Target 23349; HLA-A*26:01; FMR1NB; ENSG00000176988; CTA
FSSSGTTSF

SEQ ID NO: 23350 - protein, 9 aa, Homo sapiens
  misc_feature: Table A; Target 23350; HLA-A*29:02; FMR1NB; ENSG00000176988; CTA
FSSSGTTSF

SEQ ID NO: 23351 - protein, 9 aa, Homo sapiens
  misc_feature: Table A; Target 23351; HLA-A*30:02; FMR1NB; ENSG00000176988; CTA
FSSSGTTSF

SEQ ID NO: 23352 - protein, 9 aa, Homo sapiens
  misc_feature: Table A; Target 23352; HLA-A*32:01; FMR1NB; ENSG00000176988; CTA
FSSSGTTSF

SEQ ID NO: 23353 - protein, 9 aa, Homo sapiens
  misc_feature: Table A; Target 23353; HLA-B*15:01; FMR1NB; ENSG00000176988; CTA
FSSSGTTSF

SEQ ID NO: 23354 - protein, 9 aa, Homo sapiens
  misc_feature: Table A; Target 23354; HLA-B*15:03; FMR1NB; ENSG00000176988; CTA
FSSSGTTSF

SEQ ID NO: 23355 - protein, 9 aa, Homo sapiens
  misc_feature: Table A; Target 23355; HLA-B*27:05; FMR1NB; ENSG00000176988; CTA
FSSSGTTSF

SEQ ID NO: 23356 - protein, 9 aa, Homo sapiens
  misc_feature: Table A; Target 23356; HLA-B*35:01; FMR1NB; ENSG00000176988; CTA
FSSSGTTSF

SEQ ID NO: 23357 - protein, 9 aa, Homo sapiens
  misc_feature: Table A; Target 23357; HLA-B*37:01; FMR1NB; ENSG00000176988; CTA
FSSSGTTSF

SEQ ID NO: 23358 - protein, 9 aa, Homo sapiens
  misc_feature: Table A; Target 23358; HLA-B*38:01; FMR1NB; ENSG00000176988; CTA
FSSSGTTSF

SEQ ID NO: 23359 - protein, 9 aa, Homo sapiens
  misc_feature: Table A; Target 23359; HLA-B*39:01; FMR1NB; ENSG00000176988; CTA
FSSSGTTSF

SEQ ID NO: 23360 - protein, 9 aa, Homo sapiens
  misc_feature: Table A; Target 23360; HLA-B*46:01; FMR1NB; ENSG00000176988; CTA
FSSSGTTSF

SEQ ID NO: 23361 - protein, 9 aa, Homo sapiens
  misc_feature: Table A; Target 23361; HLA-B*55:01; FMR1NB; ENSG00000176988; CTA
FSSSGTTSF

SEQ ID NO: 23362 - protein, 9 aa, Homo sapiens
  misc_feature: Table A; Target 23362; HLA-B*57:01; FMR1NB; ENSG00000176988; CTA
FSSSGTTSF

SEQ ID NO: 23363 - protein, 9 aa, Homo sapiens
  misc_feature: Table A; Target 23363; HLA-B*58:01; FMR1NB; ENSG00000176988; CTA
FSSSGTTSF

SEQ ID NO: 23364 - protein, 9 aa, Homo sapiens
  misc_feature: Table A; Target 23364; HLA-C*01:02; FMR1NB; ENSG00000176988; CTA
FSSSGTTSF

SEQ ID NO: 23365 - protein, 9 aa, Homo sapiens
  misc_feature: Table A; Target 23365; HLA-C*02:02; FMR1NB; ENSG00000176988; CTA
FSSSGTTSF

SEQ ID NO: 23366 - protein, 9 aa, Homo sapiens
  misc_feature: Table A; Target 23366; HLA-C*03:03; FMR1NB; ENSG00000176988; CTA
FSSSGTTSF

SEQ ID NO: 23367 - protein, 9 aa, Homo sapiens
  misc_feature: Table A; Target 23367; HLA-C*03:04; FMR1NB; ENSG00000176988; CTA
FSSSGTTSF

SEQ ID NO: 23368 - protein, 9 aa, Homo sapiens
  misc_feature: Table A; Target 23368; HLA-C*05:01; FMR1NB; ENSG00000176988; CTA
FSSSGTTSF

SEQ ID NO: 23369 - protein, 9 aa, Homo sapiens
  misc_feature: Table A; Target 23369; HLA-C*07:04; FMR1NB; ENSG00000176988; CTA
FSSSGTTSF

SEQ ID NO: 23370 - protein, 9 aa, Homo sapiens
  misc_feature: Table A; Target 23370; HLA-C*07:06; FMR1NB; ENSG00000176988; CTA
FSSSGTTSF

SEQ ID NO: 23371 - protein, 9 aa, Homo sapiens
  misc_feature: Table A; Target 23371; HLA-C*12:03; FMR1NB; ENSG00000176988; CTA
FSSSGTTSF

SEQ ID NO: 23372 - protein, 9 aa, Homo sapiens
  misc_feature: Table A; Target 23372; HLA-C*14:02; FMR1NB; ENSG00000176988; CTA
FSSSGTTSF

SEQ ID NO: 23373 - protein, 9 aa, Homo sapiens
  misc_feature: Table A; Target 23373; HLA-C*16:01; FMR1NB; ENSG00000176988; CTA
FSSSGTTSF

SEQ ID NO: 23374 - protein, 9 aa, Homo sapiens
  misc_feature: Table A; Target 23374; HLA-C*16:02; FMR1NB; ENSG00000176988; CTA
FSSSGTTSF

SEQ ID NO: 23375 - protein, 9 aa, Homo sapiens
  misc_feature: Table A; Target 23375; HLA-C*16:04; FMR1NB; ENSG00000176988; CTA
FSSSGTTSF

SEQ ID NO: 23376 - protein, 10 aa, Homo sapiens
  misc_feature: Table A; Target 23376; HLA-A*01:01; FMR1NB; ENSG00000176988; CTA
FSSSGTTSFK

SEQ ID NO: 23377 - protein, 10 aa, Homo sapiens
  misc_feature: Table A; Target 23377; HLA-A*03:01; FMR1NB; ENSG00000176988; CTA
FSSSGTTSFK

SEQ ID NO: 23378 - protein, 9 aa, Homo sapiens
  misc_feature: Table A; Target 23378; HLA-A*02:04; FMR1NB; ENSG00000176988; CTA
FVLANGHIL

SEQ ID NO: 23379 - protein, 9 aa, Homo sapiens
  misc_feature: Table A; Target 23379; HLA-A*23:01; FMR1NB; ENSG00000176988; CTA
FVLANGHIL

SEQ ID NO: 23380 - protein, 9 aa, Homo sapiens
  misc_feature: Table A; Target 23380; HLA-B*35:03; FMR1NB; ENSG00000176988; CTA
FVLANGHIL

SEQ ID NO: 23381 - protein, 9 aa, Homo sapiens
  misc_feature: Table A; Target 23381; HLA-C*02:02; FMR1NB; ENSG00000176988; CTA
FVLANGHIL

SEQ ID NO: 23382 - protein, 9 aa, Homo sapiens
  misc_feature: Table A; Target 23382; HLA-C*03:03; FMR1NB; ENSG00000176988; CTA
FVLANGHIL

SEQ ID NO: 23383 - protein, 9 aa, Homo sapiens
  misc_feature: Table A; Target 23383; HLA-C*03:04; FMR1NB; ENSG00000176988; CTA
FVLANGHIL

SEQ ID NO: 23384 - protein, 9 aa, Homo sapiens
  misc_feature: Table A; Target 23384; HLA-C*12:03; FMR1NB; ENSG00000176988; CTA
GAISLILVC

SEQ ID NO: 23385 - protein, 8 aa, Homo sapiens
  misc_feature: Table A; Target 23385; HLA-A*02:03; FMR1NB; ENSG00000176988; CTA
GLGAISLI

SEQ ID NO: 23386 - protein, 8 aa, Homo sapiens
  misc_feature: Table A; Target 23386; HLA-B*13:02; FMR1NB; ENSG00000176988; CTA
GLGAISLI

SEQ ID NO: 23387 - protein, 10 aa, Homo sapiens
  misc_feature: Table A; Target 23387; HLA-A*02:01; FMR1NB; ENSG00000176988; CTA
GLGAISLILV

SEQ ID NO: 23388 - protein, 10 aa, Homo sapiens
  misc_feature: Table A; Target 23388; HLA-A*02:03; FMR1NB; ENSG00000176988; CTA
GLGAISLILV

SEQ ID NO: 23389 - protein, 10 aa, Homo sapiens
  misc_feature: Table A; Target 23389; HLA-A*02:04; FMR1NB; ENSG00000176988; CTA
GLGAISLILV

SEQ ID NO: 23390 - protein, 10 aa, Homo sapiens
  misc_feature: Table A; Target 23390; HLA-B*27:05; FMR1NB; ENSG00000176988; CTA
GQSLEEDSAL

SEQ ID NO: 23391 - protein, 9 aa, Homo sapiens
  misc_feature: Table A; Target 23391; HLA-A*02:01; FMR1NB; ENSG00000176988; CTA
HLELATYEL

SEQ ID NO: 23392 - protein, 9 aa, Homo sapiens
  misc_feature: Table A; Target 23392; HLA-A*02:04; FMR1NB; ENSG00000176988; CTA
HLELATYEL

SEQ ID NO: 23393 - protein, 9 aa, Homo sapiens
  misc_feature: Table A; Target 23393; HLA-A*02:07; FMR1NB; ENSG00000176988; CTA
HLELATYEL

SEQ ID NO: 23394 - protein, 9 aa, Homo sapiens
  misc_feature: Table A; Target 23394; HLA-B*35:03; FMR1NB; ENSG00000176988; CTA
HLELATYEL

SEQ ID NO: 23395 - protein, 9 aa, Homo sapiens
  misc_feature: Table A; Target 23395; HLA-B*38:01; FMR1NB; ENSG00000176988; CTA
HLELATYEL

SEQ ID NO: 23396 - protein, 9 aa, Homo sapiens
  misc_feature: Table A; Target 23396; HLA-B*39:01; FMR1NB; ENSG00000176988; CTA
HLELATYEL

SEQ ID NO: 23397 - protein, 9 aa, Homo sapiens
  misc_feature: Table A; Target 23397; HLA-B*40:01; FMR1NB; ENSG00000176988; CTA
HLELATYEL

SEQ ID NO: 23398 - protein, 9 aa, Homo sapiens
  misc_feature: Table A; Target 23398; HLA-B*55:01; FMR1NB; ENSG00000176988; CTA
HLELATYEL

SEQ ID NO: 23399 - protein, 9 aa, Homo sapiens
  misc_feature: Table A; Target 23399; HLA-C*07:04; FMR1NB; ENSG00000176988; CTA
HLELATYEL

SEQ ID NO: 23400 - protein, 8 aa, Homo sapiens
  misc_feature: Table A; Target 23400; HLA-B*35:01; FMR1NB; ENSG00000176988; CTA
HPGYEAAM

SEQ ID NO: 23401 - protein, 8 aa, Homo sapiens
  misc_feature: Table A; Target 23401; HLA-B*35:03; FMR1NB; ENSG00000176988; CTA
HPGYEAAM

SEQ ID NO: 23402 - protein, 8 aa, Homo sapiens
  misc_feature: Table A; Target 23402; HLA-B*55:01; FMR1NB; ENSG00000176988; CTA
HPGYEAAM

SEQ ID NO: 23403 - protein, 9 aa, Homo sapiens
  misc_feature: Table A; Target 23403; HLA-B*35:03; FMR1NB; ENSG00000176988; CTA
HPGYEAAMA

SEQ ID NO: 23404 - protein, 9 aa, Homo sapiens
  misc_feature: Table A; Target 23404; HLA-B*54:01; FMR1NB; ENSG00000176988; CTA
HPGYEAAMA

SEQ ID NO: 23405 - protein, 9 aa, Homo sapiens
  misc_feature: Table A; Target 23405; HLA-B*55:01; FMR1NB; ENSG00000176988; CTA
HPGYEAAMA

SEQ ID NO: 23406 - protein, 9 aa, Homo sapiens
  misc_feature: Table A; Target 23406; HLA-B*56:01; FMR1NB; ENSG00000176988; CTA
HPGYEAAMA

SEQ ID NO: 23407 - protein, 9 aa, Homo sapiens
  misc_feature: Table A; Target 23407; HLA-C*01:02; FMR1NB; ENSG00000176988; CTA
ILPNSENAH

SEQ ID NO: 23408 - protein, 10 aa, Homo sapiens
  misc_feature: Table A; Target 23408; HLA-A*31:01; FMR1NB; ENSG00000176988; CTA
KSEMLQKAAR

SEQ ID NO: 23409 - protein, 8 aa, Homo sapiens
  misc_feature: Table A; Target 23409; HLA-B*18:01; FMR1NB; ENSG00000176988; CTA
LEALLNFF

SEQ ID NO: 23410 - protein, 8 aa, Homo sapiens
  misc_feature: Table A; Target 23410; HLA-B*37:01; FMR1NB; ENSG00000176988; CTA
LEALLNFF

SEQ ID NO: 23411 - protein, 9 aa, Homo sapiens
  misc_feature: Table A; Target 23411; HLA-B*44:02; FMR1NB; ENSG00000176988; CTA
LEALLNFFF

SEQ ID NO: 23412 - protein, 9 aa, Homo sapiens
  misc_feature: Table A; Target 23412; HLA-B*49:01; FMR1NB; ENSG00000176988; CTA
LEEDSALEA

SEQ ID NO: 23413 - protein, 10 aa, Homo sapiens
  misc_feature: Table A; Target 23413; HLA-A*30:01; FMR1NB; ENSG00000176988; CTA
LEEDSALEAL

SEQ ID NO: 23414 - protein, 10 aa, Homo sapiens
  misc_feature: Table A; Target 23414; HLA-B*40:01; FMR1NB; ENSG00000176988; CTA
LEEDSALEAL

SEQ ID NO: 23415 - protein, 11 aa, Homo sapiens
  misc_feature: Table A; Target 23415; HLA-B*40:01; FMR1NB; ENSG00000176988; CTA
LEEDSALEALL

SEQ ID NO: 23416 - protein, 8 aa, Homo sapiens
  misc_feature: Table A; Target 23416; HLA-A*23:01; FMR1NB; ENSG00000176988; CTA
LELATYEL

SEQ ID NO: 23417 - protein, 8 aa, Homo sapiens
  misc_feature: Table A; Target 23417; HLA-A*30:01; FMR1NB; ENSG00000176988; CTA
LELATYEL

SEQ ID NO: 23418 - protein, 8 aa, Homo sapiens
  misc_feature: Table A; Target 23418; HLA-B*18:01; FMR1NB; ENSG00000176988; CTA
LELATYEL

SEQ ID NO: 23419 - protein, 8 aa, Homo sapiens
  misc_feature: Table A; Target 23419; HLA-B*37:01; FMR1NB; ENSG00000176988; CTA
LELATYEL

SEQ ID NO: 23420 - protein, 8 aa, Homo sapiens
  misc_feature: Table A; Target 23420; HLA-B*40:01; FMR1NB; ENSG00000176988; CTA
LELATYEL

SEQ ID NO: 23421 - protein, 8 aa, Homo sapiens
  misc_feature: Table A; Target 23421; HLA-B*40:02; FMR1NB; ENSG00000176988; CTA
LELATYEL

SEQ ID NO: 23422 - protein, 8 aa, Homo sapiens
  misc_feature: Table A; Target 23422; HLA-B*49:01; FMR1NB; ENSG00000176988; CTA
LELATYEL

SEQ ID NO: 23423 - protein, 8 aa, Homo sapiens
  misc_feature: Table A; Target 23423; HLA-C*07:04; FMR1NB; ENSG00000176988; CTA
LELATYEL

SEQ ID NO: 23424 - protein, 8 aa, Homo sapiens
  misc_feature: Table A; Target 23424; HLA-C*16:04; FMR1NB; ENSG00000176988; CTA
LELATYEL

SEQ ID NO: 23425 - protein, 9 aa, Homo sapiens
  misc_feature: Table A; Target 23425; HLA-B*49:01; FMR1NB; ENSG00000176988; CTA
LELATYELA

SEQ ID NO: 23426 - protein, 9 aa, Homo sapiens
  misc_feature: Table A; Target 23426; HLA-A*29:02; FMR1NB; ENSG00000176988; CTA
LFVCYYLSY

SEQ ID NO: 23427 - protein, 9 aa, Homo sapiens
  misc_feature: Table A; Target 23427; HLA-A*02:04; FMR1NB; ENSG00000176988; CTA
LMLSIWILL

SEQ ID NO: 23428 - protein, 10 aa, Homo sapiens
  misc_feature: Table A; Target 23428; HLA-B*27:05; FMR1NB; ENSG00000176988; CTA
LQDLSESECL

SEQ ID NO: 23429 - protein, 10 aa, Homo sapiens
  misc_feature: Table A; Target 23429; HLA-B*38:01; FMR1NB; ENSG00000176988; CTA
LQDLSESECL

SEQ ID NO: 23430 - protein, 10 aa, Homo sapiens
  misc_feature: Table A; Target 23430; HLA-B*39:01; FMR1NB; ENSG00000176988; CTA
LQDLSESECL

SEQ ID NO: 23431 - protein, 9 aa, Homo sapiens
  misc_feature: Table A; Target 23431; HLA-A*01:01; FMR1NB; ENSG00000176988; CTA
MADRPQPGW

SEQ ID NO: 23432 - protein, 9 aa, Homo sapiens
  misc_feature: Table A; Target 23432; HLA-A*25:01; FMR1NB; ENSG00000176988; CTA
MADRPQPGW

SEQ ID NO: 23433 - protein, 9 aa, Homo sapiens
  misc_feature: Table A; Target 23433; HLA-B*35:01; FMR1NB; ENSG00000176988; CTA
MADRPQPGW

SEQ ID NO: 23434 - protein, 9 aa, Homo sapiens
  misc_feature: Table A; Target 23434; HLA-B*38:01; FMR1NB; ENSG00000176988; CTA
MADRPQPGW

SEQ ID NO: 23435 - protein, 9 aa, Homo sapiens
  misc_feature: Table A; Target 23435; HLA-B*44:03; FMR1NB; ENSG00000176988; CTA
MADRPQPGW

SEQ ID NO: 23436 - protein, 9 aa, Homo sapiens
  misc_feature: Table A; Target 23436; HLA-B*51:01; FMR1NB; ENSG00000176988; CTA
MADRPQPGW

SEQ ID NO: 23437 - protein, 9 aa, Homo sapiens
  misc_feature: Table A; Target 23437; HLA-B*57:01; FMR1NB; ENSG00000176988; CTA
MADRPQPGW

SEQ ID NO: 23438 - protein, 9 aa, Homo sapiens
  misc_feature: Table A; Target 23438; HLA-B*58:01; FMR1NB; ENSG00000176988; CTA
MADRPQPGW

SEQ ID NO: 23439 - protein, 9 aa, Homo sapiens
  misc_feature: Table A; Target 23439; HLA-C*05:01; FMR1NB; ENSG00000176988; CTA
MADRPQPGW

SEQ ID NO: 23440 - protein, 9 aa, Homo sapiens
  misc_feature: Table A; Target 23440; HLA-C*14:02; FMR1NB; ENSG00000176988; CTA
MFGLGAISL

SEQ ID NO: 23441 - protein, 9 aa, Homo sapiens
  misc_feature: Table A; Target 23441; HLA-A*02:04; FMR1NB; ENSG00000176988; CTA
MLMLSIWIL

SEQ ID NO: 23442 - protein, 9 aa, Homo sapiens
  misc_feature: Table A; Target 23442; HLA-A*02:04; FMR1NB; ENSG00000176988; CTA
MLSIWILLF

SEQ ID NO: 23443 - protein, 10 aa, Homo sapiens
  misc_feature: Table A; Target 23443; HLA-C*04:01; FMR1NB; ENSG00000176988; CTA
MMQMFGLGAI

SEQ ID NO: 23444 - protein, 9 aa, Homo sapiens
  misc_feature: Table A; Target 23444; HLA-B*13:02; FMR1NB; ENSG00000176988; CTA
MQMFGLGAI

SEQ ID NO: 23445 - protein, 9 aa, Homo sapiens
  misc_feature: Table A; Target 23445; HLA-B*39:01; FMR1NB; ENSG00000176988; CTA
MQMFGLGAI

SEQ ID NO: 23446 - protein, 9 aa, Homo sapiens
  misc_feature: Table A; Target 23446; HLA-A*03:01; FMR1NB; ENSG00000176988; CTA
NLRENQVAK

SEQ ID NO: 23447 - protein, 9 aa, Homo sapiens
  misc_feature: Table A; Target 23447; HLA-A*33:01; FMR1NB; ENSG00000176988; CTA
NLRENQVAK

SEQ ID NO: 23448 - protein, 9 aa, Homo sapiens
  misc_feature: Table A; Target 23448; HLA-A*01:01; FMR1NB; ENSG00000176988; CTA
NPESSHPGY

SEQ ID NO: 23449 - protein, 9 aa, Homo sapiens
  misc_feature: Table A; Target 23449; HLA-A*29:02; FMR1NB; ENSG00000176988; CTA
NPESSHPGY

SEQ ID NO: 23450 - protein, 9 aa, Homo sapiens
  misc_feature: Table A; Target 23450; HLA-A*30:02; FMR1NB; ENSG00000176988; CTA
NPESSHPGY

SEQ ID NO: 23451 - protein, 9 aa, Homo sapiens
  misc_feature: Table A; Target 23451; HLA-B*35:01; FMR1NB; ENSG00000176988; CTA
NPESSHPGY

SEQ ID NO: 23452 - protein, 9 aa, Homo sapiens
  misc_feature: Table A; Target 23452; HLA-B*39:01; FMR1NB; ENSG00000176988; CTA
NPESSHPGY

SEQ ID NO: 23453 - protein, 9 aa, Homo sapiens
  misc_feature: Table A; Target 23453; HLA-B*55:01; FMR1NB; ENSG00000176988; CTA
NPESSHPGY

SEQ ID NO: 23454 - protein, 9 aa, Homo sapiens
  misc_feature: Table A; Target 23454; HLA-C*03:03; FMR1NB; ENSG00000176988; CTA
NPESSHPGY

SEQ ID NO: 23455 - protein, 9 aa, Homo sapiens
  misc_feature: Table A; Target 23455; HLA-C*16:01; FMR1NB; ENSG00000176988; CTA
NPESSHPGY

SEQ ID NO: 23456 - protein, 9 aa, Homo sapiens
  misc_feature: Table A; Target 23456; HLA-C*16:02; FMR1NB; ENSG00000176988; CTA
NPESSHPGY

SEQ ID NO: 23457 - protein, 11 aa, Homo sapiens
  misc_feature: Table A; Target 23457; HLA-B*54:01; FMR1NB; ENSG00000176988; CTA
NPESSHPGYEA

SEQ ID NO: 23458 - protein, 10 aa, Homo sapiens
  misc_feature: Table A; Target 23458; HLA-C*05:01; FMR1NB; ENSG00000176988; CTA
NSENAHGQSL

SEQ ID NO: 23459 - protein, 9 aa, Homo sapiens
  misc_feature: Table A; Target 23459; HLA-A*30:01; FMR1NB; ENSG00000176988; CTA
QDLSESECL

SEQ ID NO: 23460 - protein, 9 aa, Homo sapiens
  misc_feature: Table A; Target 23460; HLA-B*38:01; FMR1NB; ENSG00000176988; CTA
QDLSESECL

SEQ ID NO: 23461 - protein, 9 aa, Homo sapiens
  misc_feature: Table A; Target 23461; HLA-B*40:01; FMR1NB; ENSG00000176988; CTA
QDLSESECL

SEQ ID NO: 23462 - protein, 9 aa, Homo sapiens
  misc_feature: Table A; Target 23462; HLA-B*40:02; FMR1NB; ENSG00000176988; CTA
QDLSESECL

SEQ ID NO: 23463 - protein, 10 aa, Homo sapiens
  misc_feature: Table A; Target 23463; HLA-B*27:02; FMR1NB; ENSG00000176988; CTA
QDLSESECLR

SEQ ID NO: 23464 - protein, 9 aa, Homo sapiens
  misc_feature: Table A; Target 23464; HLA-A*30:01; FMR1NB; ENSG00000176988; CTA
QDNRVVTGL

SEQ ID NO: 23465 - protein, 9 aa, Homo sapiens
  misc_feature: Table A; Target 23465; HLA-B*37:01; FMR1NB; ENSG00000176988; CTA
QDNRVVTGL

SEQ ID NO: 23466 - protein, 9 aa, Homo sapiens
  misc_feature: Table A; Target 23466; HLA-B*40:01; FMR1NB; ENSG00000176988; CTA
QDNRVVTGL

SEQ ID NO: 23467 - protein, 9 aa, Homo sapiens
  misc_feature: Table A; Target 23467; HLA-B*40:02; FMR1NB; ENSG00000176988; CTA
QDNRVVTGL

SEQ ID NO: 23468 - protein, 9 aa, Homo sapiens
  misc_feature: Table A; Target 23468; HLA-B*44:02; FMR1NB; ENSG00000176988; CTA
QDNRVVTGL

SEQ ID NO: 23469 - protein, 9 aa, Homo sapiens
  misc_feature: Table A; Target 23469; HLA-B*44:03; FMR1NB; ENSG00000176988; CTA
QDNRVVTGL

SEQ ID NO: 23470 - protein, 9 aa, Homo sapiens
  misc_feature: Table A; Target 23470; HLA-C*16:02; FMR1NB; ENSG00000176988; CTA
QDNRVVTGL

SEQ ID NO: 23471 - protein, 10 aa, Homo sapiens
  misc_feature: Table A; Target 23471; HLA-A*02:01; FMR1NB; ENSG00000176988; CTA
QMFGLGAISL

SEQ ID NO: 23472 - protein, 10 aa, Homo sapiens
  misc_feature: Table A; Target 23472; HLA-A*02:03; FMR1NB; ENSG00000176988; CTA
QMFGLGAISL

SEQ ID NO: 23473 - protein, 11 aa, Homo sapiens
  misc_feature: Table A; Target 23473; HLA-A*02:03; FMR1NB; ENSG00000176988; CTA
QMFGLGAISLI

SEQ ID NO: 23474 - protein, 8 aa, Homo sapiens
  misc_feature: Table A; Target 23474; HLA-B*07:02; FMR1NB; ENSG00000176988; CTA
QPGWRESL

SEQ ID NO: 23475 - protein, 8 aa, Homo sapiens
  misc_feature: Table A; Target 23475; HLA-C*06:02; FMR1NB; ENSG00000176988; CTA
QRQDNRVV

SEQ ID NO: 23476 - protein, 9 aa, Homo sapiens
  misc_feature: Table A; Target 23476; HLA-B*35:03; FMR1NB; ENSG00000176988; CTA
QSLEEDSAL

SEQ ID NO: 23477 - protein, 9 aa, Homo sapiens
  misc_feature: Table A; Target 23477; HLA-B*07:02; FMR1NB; ENSG00000176988; CTA
QVAKPCNEL

SEQ ID NO: 23478 - protein, 8 aa, Homo sapiens
  misc_feature: Table A; Target 23478; HLA-B*08:01; FMR1NB; ENSG00000176988; CTA
RAMRVAHL

SEQ ID NO: 23479 - protein, 8 aa, Homo sapiens
  misc_feature: Table A; Target 23479; HLA-B*37:01; FMR1NB; ENSG00000176988; CTA
RDVPKQMM

SEQ ID NO: 23480 - protein, 10 aa, Homo sapiens
  misc_feature: Table A; Target 23480; HLA-B*07:02; FMR1NB; ENSG00000176988; CTA
RPQPGWRESL

SEQ ID NO: 23481 - protein, 10 aa, Homo sapiens
  misc_feature: Table A; Target 23481; HLA-C*07:02; FMR1NB; ENSG00000176988; CTA
RPQPGWRESL

SEQ ID NO: 23482 - protein, 10 aa, Homo sapiens
  misc_feature: Table A; Target 23482; HLA-B*38:01; FMR1NB; ENSG00000176988; CTA
RQDNRVVTGL

SEQ ID NO: 23483 - protein, 10 aa, Homo sapiens
  misc_feature: Table A; Target 23483; HLA-A*03:01; FMR1NB; ENSG00000176988; CTA
RVAHLELATY

SEQ ID NO: 23484 - protein, 10 aa, Homo sapiens
  misc_feature: Table A; Target 23484; HLA-A*03:02; FMR1NB; ENSG00000176988; CTA
RVAHLELATY

SEQ ID NO: 23485 - protein, 10 aa, Homo sapiens
  misc_feature: Table A; Target 23485; HLA-A*25:01; FMR1NB; ENSG00000176988; CTA
RVAHLELATY

SEQ ID NO: 23486 - protein, 10 aa, Homo sapiens
  misc_feature: Table A; Target 23486; HLA-A*26:01; FMR1NB; ENSG00000176988; CTA
RVAHLELATY

SEQ ID NO: 23487 - protein, 10 aa, Homo sapiens
  misc_feature: Table A; Target 23487; HLA-A*29:02; FMR1NB; ENSG00000176988; CTA
RVAHLELATY

SEQ ID NO: 23488 - protein, 10 aa, Homo sapiens
  misc_feature: Table A; Target 23488; HLA-A*30:02; FMR1NB; ENSG00000176988; CTA
RVAHLELATY

SEQ ID NO: 23489 - protein, 10 aa, Homo sapiens
  misc_feature: Table A; Target 23489; HLA-A*32:01; FMR1NB; ENSG00000176988; CTA
RVAHLELATY

SEQ ID NO: 23490 - protein, 10 aa, Homo sapiens
  misc_feature: Table A; Target 23490; HLA-B*15:01; FMR1NB; ENSG00000176988; CTA
RVAHLELATY

SEQ ID NO: 23491 - protein, 10 aa, Homo sapiens
  misc_feature: Table A; Target 23491; HLA-B*27:02; FMR1NB; ENSG00000176988; CTA
RVAHLELATY

SEQ ID NO: 23492 - protein, 10 aa, Homo sapiens
  misc_feature: Table A; Target 23492; HLA-B*57:01; FMR1NB; ENSG00000176988; CTA
RVAHLELATY

SEQ ID NO: 23493 - protein, 10 aa, Homo sapiens
  misc_feature: Table A; Target 23493; HLA-B*58:01; FMR1NB; ENSG00000176988; CTA
RVAHLELATY

SEQ ID NO: 23494 - protein, 9 aa, Homo sapiens
  misc_feature: Table A; Target 23494; HLA-A*03:01; FMR1NB; ENSG00000176988; CTA
RVSKPFGML

SEQ ID NO: 23495 - protein, 10 aa, Homo sapiens
  misc_feature: Table A; Target 23495; HLA-A*03:01; FMR1NB; ENSG00000176988; CTA
RVSKPFGMLM

SEQ ID NO: 23496 - protein, 8 aa, Homo sapiens
  misc_feature: Table A; Target 23496; HLA-A*03:01; FMR1NB; ENSG00000176988; CTA
RVVTGLKK

SEQ ID NO: 23497 - protein, 10 aa, Homo sapiens
  misc_feature: Table A; Target 23497; HLA-A*31:01; FMR1NB; ENSG00000176988; CTA
RVVTGLKKQR

SEQ ID NO: 23498 - protein, 9 aa, Homo sapiens
  misc_feature: Table A; Target 23498; HLA-A*23:01; FMR1NB; ENSG00000176988; CTA
SALEALLNF

SEQ ID NO: 23499 - protein, 9 aa, Homo sapiens
  misc_feature: Table A; Target 23499; HLA-A*25:01; FMR1NB; ENSG00000176988; CTA
SALEALLNF

SEQ ID NO: 23500 - protein, 9 aa, Homo sapiens
  misc_feature: Table A; Target 23500; HLA-A*29:02; FMR1NB; ENSG00000176988; CTA
SALEALLNF

SEQ ID NO: 23501 - protein, 9 aa, Homo sapiens
  misc_feature: Table A; Target 23501; HLA-B*35:01; FMR1NB; ENSG00000176988; CTA
SALEALLNF

SEQ ID NO: 23502 - protein, 9 aa, Homo sapiens
  misc_feature: Table A; Target 23502; HLA-B*58:01; FMR1NB; ENSG00000176988; CTA
SALEALLNF

SEQ ID NO: 23503 - protein, 9 aa, Homo sapiens
  misc_feature: Table A; Target 23503; HLA-C*02:02; FMR1NB; ENSG00000176988; CTA
SALEALLNF

SEQ ID NO: 23504 - protein, 8 aa, Homo sapiens
  misc_feature: Table A; Target 23504; HLA-B*18:01; FMR1NB; ENSG00000176988; CTA
SEMLQKAA

SEQ ID NO: 23505 - protein, 9 aa, Homo sapiens
  misc_feature: Table A; Target 23505; HLA-B*44:02; FMR1NB; ENSG00000176988; CTA
SEMLQKAAR

SEQ ID NO: 23506 - protein, 9 aa, Homo sapiens
  misc_feature: Table A; Target 23506; HLA-B*44:03; FMR1NB; ENSG00000176988; CTA
SEMLQKAAR

SEQ ID NO: 23507 - protein, 9 aa, Homo sapiens
  misc_feature: Table A; Target 23507; HLA-A*30:01; FMR1NB; ENSG00000176988; CTA
SENAHGQSL

SEQ ID NO: 23508 - protein, 9 aa, Homo sapiens
  misc_feature: Table A; Target 23508; HLA-B*07:02; FMR1NB; ENSG00000176988; CTA
SENAHGQSL

SEQ ID NO: 23509 - protein, 9 aa, Homo sapiens
  misc_feature: Table A; Target 23509; HLA-B*18:01; FMR1NB; ENSG00000176988; CTA
SENAHGQSL

SEQ ID NO: 23510 - protein, 9 aa, Homo sapiens
  misc_feature: Table A; Target 23510; HLA-B*27:02; FMR1NB; ENSG00000176988; CTA
SENAHGQSL

SEQ ID NO: 23511 - protein, 9 aa, Homo sapiens
  misc_feature: Table A; Target 23511; HLA-B*37:01; FMR1NB; ENSG00000176988; CTA
SENAHGQSL

SEQ ID NO: 23512 - protein, 9 aa, Homo sapiens
  misc_feature: Table A; Target 23512; HLA-B*40:01; FMR1NB; ENSG00000176988; CTA
SENAHGQSL

SEQ ID NO: 23513 - protein, 9 aa, Homo sapiens
  misc_feature: Table A; Target 23513; HLA-B*40:02; FMR1NB; ENSG00000176988; CTA
SENAHGQSL

SEQ ID NO: 23514 - protein, 9 aa, Homo sapiens
  misc_feature: Table A; Target 23514; HLA-B*44:02; FMR1NB; ENSG00000176988; CTA
SENAHGQSL

SEQ ID NO: 23515 - protein, 9 aa, Homo sapiens
  misc_feature: Table A; Target 23515; HLA-B*44:03; FMR1NB; ENSG00000176988; CTA
SENAHGQSL

SEQ ID NO: 23516 - protein, 9 aa, Homo sapiens
  misc_feature: Table A; Target 23516; HLA-B*49:01; FMR1NB; ENSG00000176988; CTA
SENAHGQSL

SEQ ID NO: 23517 - protein, 9 aa, Homo sapiens
  misc_feature: Table A; Target 23517; HLA-C*02:02; FMR1NB; ENSG00000176988; CTA
SENAHGQSL

SEQ ID NO: 23518 - protein, 9 aa, Homo sapiens
  misc_feature: Table A; Target 23518; HLA-C*07:02; FMR1NB; ENSG00000176988; CTA
SENAHGQSL

SEQ ID NO: 23519 - protein, 9 aa, Homo sapiens
  misc_feature: Table A; Target 23519; HLA-C*14:02; FMR1NB; ENSG00000176988; CTA
SENAHGQSL

SEQ ID NO: 23520 - protein, 9 aa, Homo sapiens
  misc_feature: Table A; Target 23520; HLA-C*16:04; FMR1NB; ENSG00000176988; CTA
SENAHGQSL

SEQ ID NO: 23521 - protein, 9 aa, Homo sapiens
  misc_feature: Table A; Target 23521; HLA-B*54:01; FMR1NB; ENSG00000176988; CTA
SGSSYFVLA

SEQ ID NO: 23522 - protein, 9 aa, Homo sapiens
  misc_feature: Table A; Target 23522; HLA-B*56:01; FMR1NB; ENSG00000176988; CTA
SGSSYFVLA

SEQ ID NO: 23523 - protein, 9 aa, Homo sapiens
  misc_feature: Table A; Target 23523; HLA-B*39:01; FMR1NB; ENSG00000176988; CTA
SHPGYEAAM

SEQ ID NO: 23524 - protein, 9 aa, Homo sapiens
  misc_feature: Table A; Target 23524; HLA-C*01:02; FMR1NB; ENSG00000176988; CTA
SHPGYEAAM

SEQ ID NO: 23525 - protein, 8 aa, Homo sapiens
  misc_feature: Table A; Target 23525; HLA-C*05:01; FMR1NB; ENSG00000176988; CTA
SLEEDSAL

SEQ ID NO: 23526 - protein, 8 aa, Homo sapiens
  misc_feature: Table A; Target 23526; HLA-B*08:01; FMR1NB; ENSG00000176988; CTA
SLKMRVSK

SEQ ID NO: 23527 - protein, 10 aa, Homo sapiens
  misc_feature: Table A; Target 23527; HLA-A*26:01; FMR1NB; ENSG00000176988; CTA
SNPESSHPGY

SEQ ID NO: 23528 - protein, 10 aa, Homo sapiens
  misc_feature: Table A; Target 23528; HLA-A*29:02; FMR1NB; ENSG00000176988; CTA
SNPESSHPGY

SEQ ID NO: 23529 - protein, 10 aa, Homo sapiens
  misc_feature: Table A; Target 23529; HLA-A*30:02; FMR1NB; ENSG00000176988; CTA
SNPESSHPGY

SEQ ID NO: 23530 - protein, 8 aa, Homo sapiens
  misc_feature: Table A; Target 23530; HLA-A*03:02; FMR1NB; ENSG00000176988; CTA
SSGTTSFK

SEQ ID NO: 23531 - protein, 8 aa, Homo sapiens
  misc_feature: Table A; Target 23531; HLA-A*11:01; FMR1NB; ENSG00000176988; CTA
SSGTTSFK

SEQ ID NO: 23532 - protein, 10 aa, Homo sapiens
  misc_feature: Table A; Target 23532; HLA-B*07:02; FMR1NB; ENSG00000176988; CTA
SSGTTSFKCF

SEQ ID NO: 23533 - protein, 8 aa, Homo sapiens
  misc_feature: Table A; Target 23533; HLA-A*32:01; FMR1NB; ENSG00000176988; CTA
SSSGTTSF

SEQ ID NO: 23534 - protein, 8 aa, Homo sapiens
  misc_feature: Table A; Target 23534; HLA-B*37:01; FMR1NB; ENSG00000176988; CTA
SSSGTTSF

SEQ ID NO: 23535 - protein, 8 aa, Homo sapiens
  misc_feature: Table A; Target 23535; HLA-C*05:01; FMR1NB; ENSG00000176988; CTA
SSSGTTSF

SEQ ID NO: 23536 - protein, 9 aa, Homo sapiens
  misc_feature: Table A; Target 23536; HLA-A*03:01; FMR1NB; ENSG00000176988; CTA
SSSGTTSFK

SEQ ID NO: 23537 - protein, 9 aa, Homo sapiens
  misc_feature: Table A; Target 23537; HLA-A*03:02; FMR1NB; ENSG00000176988; CTA
SSSGTTSFK

SEQ ID NO: 23538 - protein, 9 aa, Homo sapiens
  misc_feature: Table A; Target 23538; HLA-A*11:01; FMR1NB; ENSG00000176988; CTA
SSSGTTSFK

SEQ ID NO: 23539 - protein, 11 aa, Homo sapiens
  misc_feature: Table A; Target 23539; HLA-A*24:02; FMR1NB; ENSG00000176988; CTA
SYFVLANGHIL

SEQ ID NO: 23540 - protein, 10 aa, Homo sapiens
  misc_feature: Table A; Target 23540; HLA-A*30:02; FMR1NB; ENSG00000176988; CTA
SYYLCSGSSY

SEQ ID NO: 23541 - protein, 10 aa, Homo sapiens
  misc_feature: Table A; Target 23541; HLA-B*15:03; FMR1NB; ENSG00000176988; CTA
SYYLCSGSSY

SEQ ID NO: 23542 - protein, 10 aa, Homo sapiens
  misc_feature: Table A; Target 23542; HLA-C*14:02; FMR1NB; ENSG00000176988; CTA
SYYLCSGSSY

SEQ ID NO: 23543 - protein, 11 aa, Homo sapiens
  misc_feature: Table A; Target 23543; HLA-A*24:02; FMR1NB; ENSG00000176988; CTA
SYYLCSGSSYF

SEQ ID NO: 23544 - protein, 9 aa, Homo sapiens
  misc_feature: Table A; Target 23544; HLA-C*04:01; FMR1NB; ENSG00000176988; CTA
TYELAATES

SEQ ID NO: 23545 - protein, 11 aa, Homo sapiens
  misc_feature: Table A; Target 23545; HLA-C*06:02; FMR1NB; ENSG00000176988; CTA
TYELAATESNP

SEQ ID NO: 23546 - protein, 9 aa, Homo sapiens
  misc_feature: Table A; Target 23546; HLA-A*01:01; FMR1NB; ENSG00000176988; CTA
VAHLELATY

SEQ ID NO: 23547 - protein, 9 aa, Homo sapiens
  misc_feature: Table A; Target 23547; HLA-A*23:01; FMR1NB; ENSG00000176988; CTA
VAHLELATY

SEQ ID NO: 23548 - protein, 9 aa, Homo sapiens
  misc_feature: Table A; Target 23548; HLA-A*25:01; FMR1NB; ENSG00000176988; CTA
VAHLELATY

SEQ ID NO: 23549 - protein, 9 aa, Homo sapiens
  misc_feature: Table A; Target 23549; HLA-A*26:01; FMR1NB; ENSG00000176988; CTA
VAHLELATY

SEQ ID NO: 23550 - protein, 9 aa, Homo sapiens
  misc_feature: Table A; Target 23550; HLA-A*29:02; FMR1NB; ENSG00000176988; CTA
VAHLELATY

SEQ ID NO: 23551 - protein, 9 aa, Homo sapiens
  misc_feature: Table A; Target 23551; HLA-A*30:02; FMR1NB; ENSG00000176988; CTA
VAHLELATY

SEQ ID NO: 23552 - protein, 9 aa, Homo sapiens
  misc_feature: Table A; Target 23552; HLA-A*32:01; FMR1NB; ENSG00000176988; CTA
VAHLELATY

SEQ ID NO: 23553 - protein, 9 aa, Homo sapiens
  misc_feature: Table A; Target 23553; HLA-B*15:01; FMR1NB; ENSG00000176988; CTA
VAHLELATY

SEQ ID NO: 23554 - protein, 9 aa, Homo sapiens
  misc_feature: Table A; Target 23554; HLA-B*15:03; FMR1NB; ENSG00000176988; CTA
VAHLELATY

SEQ ID NO: 23555 - protein, 9 aa, Homo sapiens
  misc_feature: Table A; Target 23555; HLA-B*18:01; FMR1NB; ENSG00000176988; CTA
VAHLELATY

SEQ ID NO: 23556 - protein, 9 aa, Homo sapiens
  misc_feature: Table A; Target 23556; HLA-B*27:02; FMR1NB; ENSG00000176988; CTA
VAHLELATY

SEQ ID NO: 23557 - protein, 9 aa, Homo sapiens
  misc_feature: Table A; Target 23557; HLA-B*27:05; FMR1NB; ENSG00000176988; CTA
VAHLELATY

SEQ ID NO: 23558 - protein, 9 aa, Homo sapiens
  misc_feature: Table A; Target 23558; HLA-B*35:01; FMR1NB; ENSG00000176988; CTA
VAHLELATY

SEQ ID NO: 23559 - protein, 9 aa, Homo sapiens
  misc_feature: Table A; Target 23559; HLA-B*39:01; FMR1NB; ENSG00000176988; CTA
VAHLELATY

SEQ ID NO: 23560 - protein, 9 aa, Homo sapiens
  misc_feature: Table A; Target 23560; HLA-B*46:01; FMR1NB; ENSG00000176988; CTA
VAHLELATY

SEQ ID NO: 23561 - protein, 9 aa, Homo sapiens
  misc_feature: Table A; Target 23561; HLA-B*51:01; FMR1NB; ENSG00000176988; CTA
VAHLELATY

SEQ ID NO: 23562 - protein, 9 aa, Homo sapiens
  misc_feature: Table A; Target 23562; HLA-B*54:01; FMR1NB; ENSG00000176988; CTA
VAHLELATY

SEQ ID NO: 23563 - protein, 9 aa, Homo sapiens
  misc_feature: Table A; Target 23563; HLA-B*55:01; FMR1NB; ENSG00000176988; CTA
VAHLELATY

SEQ ID NO: 23564 - protein, 9 aa, Homo sapiens
  misc_feature: Table A; Target 23564; HLA-B*56:01; FMR1NB; ENSG00000176988; CTA
VAHLELATY

SEQ ID NO: 23565 - protein, 9 aa, Homo sapiens
  misc_feature: Table A; Target 23565; HLA-B*57:01; FMR1NB; ENSG00000176988; CTA
VAHLELATY

SEQ ID NO: 23566 - protein, 9 aa, Homo sapiens
  misc_feature: Table A; Target 23566; HLA-B*58:01; FMR1NB; ENSG00000176988; CTA
VAHLELATY

SEQ ID NO: 23567 - protein, 9 aa, Homo sapiens
  misc_feature: Table A; Target 23567; HLA-C*01:02; FMR1NB; ENSG00000176988; CTA
VAHLELATY

SEQ ID NO: 23568 - protein, 9 aa, Homo sapiens
  misc_feature: Table A; Target 23568; HLA-C*02:02; FMR1NB; ENSG00000176988; CTA
VAHLELATY

SEQ ID NO: 23569 - protein, 9 aa, Homo sapiens
  misc_feature: Table A; Target 23569; HLA-C*03:03; FMR1NB; ENSG00000176988; CTA
VAHLELATY

SEQ ID NO: 23570 - protein, 9 aa, Homo sapiens
  misc_feature: Table A; Target 23570; HLA-C*03:04; FMR1NB; ENSG00000176988; CTA
VAHLELATY

SEQ ID NO: 23571 - protein, 9 aa, Homo sapiens
  misc_feature: Table A; Target 23571; HLA-C*04:01; FMR1NB; ENSG00000176988; CTA
VAHLELATY

SEQ ID NO: 23572 - protein, 9 aa, Homo sapiens
  misc_feature: Table A; Target 23572; HLA-C*05:01; FMR1NB; ENSG00000176988; CTA
VAHLELATY

SEQ ID NO: 23573 - protein, 9 aa, Homo sapiens
  misc_feature: Table A; Target 23573; HLA-C*07:01; FMR1NB; ENSG00000176988; CTA
VAHLELATY

SEQ ID NO: 23574 - protein, 9 aa, Homo sapiens
  misc_feature: Table A; Target 23574; HLA-C*07:04; FMR1NB; ENSG00000176988; CTA
VAHLELATY

SEQ ID NO: 23575 - protein, 9 aa, Homo sapiens
  misc_feature: Table A; Target 23575; HLA-C*07:06; FMR1NB; ENSG00000176988; CTA
VAHLELATY

SEQ ID NO: 23576 - protein, 9 aa, Homo sapiens
  misc_feature: Table A; Target 23576; HLA-C*12:03; FMR1NB; ENSG00000176988; CTA
VAHLELATY

SEQ ID NO: 23577 - protein, 9 aa, Homo sapiens
  misc_feature: Table A; Target 23577; HLA-C*14:02; FMR1NB; ENSG00000176988; CTA
VAHLELATY

SEQ ID NO: 23578 - protein, 9 aa, Homo sapiens
  misc_feature: Table A; Target 23578; HLA-C*16:01; FMR1NB; ENSG00000176988; CTA
VAHLELATY

SEQ ID NO: 23579 - protein, 9 aa, Homo sapiens
  misc_feature: Table A; Target 23579; HLA-C*16:02; FMR1NB; ENSG00000176988; CTA
VAHLELATY

SEQ ID NO: 23580 - protein, 9 aa, Homo sapiens
  misc_feature: Table A; Target 23580; HLA-C*16:04; FMR1NB; ENSG00000176988; CTA
VAHLELATY

SEQ ID NO: 23581 - protein, 8 aa, Homo sapiens
  misc_feature: Table A; Target 23581; HLA-B*08:01; FMR1NB; ENSG00000176988; CTA
VAKPCNEL

SEQ ID NO: 23582 - protein, 8 aa, Homo sapiens
  misc_feature: Table A; Target 23582; HLA-B*46:01; FMR1NB; ENSG00000176988; CTA
VAKPCNEL

SEQ ID NO: 23583 - protein, 8 aa, Homo sapiens
  misc_feature: Table A; Target 23583; HLA-C*16:01; FMR1NB; ENSG00000176988; CTA
VAKPCNEL

SEQ ID NO: 23584 - protein, 8 aa, Homo sapiens
  misc_feature: Table A; Target 23584; HLA-C*16:02; FMR1NB; ENSG00000176988; CTA
VAKPCNEL

SEQ ID NO: 23585 - protein, 8 aa, Homo sapiens
  misc_feature: Table A; Target 23585; HLA-B*08:01; FMR1NB; ENSG00000176988; CTA
VPKQMMQM

SEQ ID NO: 23586 - protein, 9 aa, Homo sapiens
  misc_feature: Table A; Target 23586; HLA-A*31:01; FMR1NB; ENSG00000176988; CTA
VSKPFGMLM

SEQ ID NO: 23587 - protein, 9 aa, Homo sapiens
  misc_feature: Table A; Target 23587; HLA-A*32:01; FMR1NB; ENSG00000176988; CTA
VSKPFGMLM

SEQ ID NO: 23588 - protein, 9 aa, Homo sapiens
  misc_feature: Table A; Target 23588; HLA-B*40:02; FMR1NB; ENSG00000176988; CTA
VSKPFGMLM

SEQ ID NO: 23589 - protein, 9 aa, Homo sapiens
  misc_feature: Table A; Target 23589; HLA-B*46:01; FMR1NB; ENSG00000176988; CTA
VSKPFGMLM

SEQ ID NO: 23590 - protein, 9 aa, Homo sapiens
  misc_feature: Table A; Target 23590; HLA-B*57:01; FMR1NB; ENSG00000176988; CTA
VSKPFGMLM

SEQ ID NO: 23591 - protein, 9 aa, Homo sapiens
  misc_feature: Table A; Target 23591; HLA-B*58:01; FMR1NB; ENSG00000176988; CTA
VSKPFGMLM

SEQ ID NO: 23592 - protein, 9 aa, Homo sapiens
  misc_feature: Table A; Target 23592; HLA-C*02:02; FMR1NB; ENSG00000176988; CTA
VSKPFGMLM

SEQ ID NO: 23593 - protein, 9 aa, Homo sapiens
  misc_feature: Table A; Target 23593; HLA-C*03:04; FMR1NB; ENSG00000176988; CTA
VSKPFGMLM

SEQ ID NO: 23594 - protein, 9 aa, Homo sapiens
  misc_feature: Table A; Target 23594; HLA-C*12:03; FMR1NB; ENSG00000176988; CTA
VSKPFGMLM

SEQ ID NO: 23595 - protein, 9 aa, Homo sapiens
  misc_feature: Table A; Target 23595; HLA-C*16:01; FMR1NB; ENSG00000176988; CTA
VSKPFGMLM

SEQ ID NO: 23596 - protein, 9 aa, Homo sapiens
  misc_feature: Table A; Target 23596; HLA-A*31:01; FMR1NB; ENSG00000176988; CTA
VVTGLKKQR

SEQ ID NO: 23597 - protein, 9 aa, Homo sapiens
  misc_feature: Table A; Target 23597; HLA-A*33:01; FMR1NB; ENSG00000176988; CTA
VVTGLKKQR

SEQ ID NO: 23598 - protein, 9 aa, Homo sapiens
  misc_feature: Table A; Target 23598; HLA-A*33:03; FMR1NB; ENSG00000176988; CTA
VVTGLKKQR

SEQ ID NO: 23599 - protein, 9 aa, Homo sapiens
  misc_feature: Table A; Target 23599; HLA-A*68:01; FMR1NB; ENSG00000176988; CTA
VVTGLKKQR

SEQ ID NO: 23600 - protein, 9 aa, Homo sapiens
  misc_feature: Table A; Target 23600; HLA-B*39:01; FMR1NB; ENSG00000176988; CTA
WRSEPADDL

SEQ ID NO: 23601 - protein, 8 aa, Homo sapiens
  misc_feature: Table A; Target 23601; HLA-B*18:01; FMR1NB; ENSG00000176988; CTA
YELAATES

SEQ ID NO: 23602 - protein, 9 aa, Homo sapiens
  misc_feature: Table A; Target 23602; HLA-B*18:01; FMR1NB; ENSG00000176988; CTA
YELAATESN

SEQ ID NO: 23603 - protein, 9 aa, Homo sapiens
  misc_feature: Table A; Target 23603; HLA-B*40:02; FMR1NB; ENSG00000176988; CTA
YELAATESN

SEQ ID NO: 23604 - protein, 9 aa, Homo sapiens
  misc_feature: Table A; Target 23604; HLA-B*49:01; FMR1NB; ENSG00000176988; CTA
YELAATESN

SEQ ID NO: 23605 - protein, 8 aa, Homo sapiens
  misc_feature: Table A; Target 23605; HLA-B*46:01; FMR1NB; ENSG00000176988; CTA
YLCSGSSY

SEQ ID NO: 23606 - protein, 8 aa, Homo sapiens
  misc_feature: Table A; Target 23606; HLA-C*07:01; FMR1NB; ENSG00000176988; CTA
YLCSGSSY

SEQ ID NO: 23607 - protein, 8 aa, Homo sapiens
  misc_feature: Table A; Target 23607; HLA-C*14:02; FMR1NB; ENSG00000176988; CTA
YLCSGSSY

SEQ ID NO: 23608 - protein, 9 aa, Homo sapiens
  misc_feature: Table A; Target 23608; HLA-C*07:01; FMR1NB; ENSG00000176988; CTA
YLCSGSSYF

SEQ ID NO: 23609 - protein, 9 aa, Homo sapiens
  misc_feature: Table A; Target 23609; HLA-C*07:04; FMR1NB; ENSG00000176988; CTA
YLCSGSSYF

SEQ ID NO: 23610 - protein, 9 aa, Homo sapiens
  misc_feature: Table A; Target 23610; HLA-A*23:01; FMR1NB; ENSG00000176988; CTA
YYLCSGSSY

SEQ ID NO: 23611 - protein, 9 aa, Homo sapiens
  misc_feature: Table A; Target 23611; HLA-A*29:02; FMR1NB; ENSG00000176988; CTA
YYLCSGSSY

SEQ ID NO: 23612 - protein, 9 aa, Homo sapiens
  misc_feature: Table A; Target 23612; HLA-A*30:02; FMR1NB; ENSG00000176988; CTA
YYLCSGSSY

SEQ ID NO: 23613 - protein, 9 aa, Homo sapiens
  misc_feature: Table A; Target 23613; HLA-B*15:03; FMR1NB; ENSG00000176988; CTA
YYLCSGSSY

SEQ ID NO: 23614 - protein, 9 aa, Homo sapiens
  misc_feature: Table A; Target 23614; HLA-B*46:01; FMR1NB; ENSG00000176988; CTA
YYLCSGSSY

SEQ ID NO: 23615 - protein, 9 aa, Homo sapiens
  misc_feature: Table A; Target 23615; HLA-C*01:02; FMR1NB; ENSG00000176988; CTA
YYLCSGSSY

SEQ ID NO: 23616 - protein, 9 aa, Homo sapiens
  misc_feature: Table A; Target 23616; HLA-C*14:02; FMR1NB; ENSG00000176988; CTA
YYLCSGSSY

SEQ ID NO: 23617 - protein, 10 aa, Homo sapiens
  misc_feature: Table A; Target 23617; HLA-A*23:01; FMR1NB; ENSG00000176988; CTA
YYLCSGSSYF

SEQ ID NO: 23618 - protein, 10 aa, Homo sapiens
  misc_feature: Table A; Target 23618; HLA-A*24:02; FMR1NB; ENSG00000176988; CTA
YYLCSGSSYF

SEQ ID NO: 23619 - protein, 11 aa, Homo sapiens
  misc_feature: Table A; Target 23619; HLA-B*13:02; FOXE1; ENSG00000178919; TAA
AAAAAAAAAAI

SEQ ID NO: 23620 - protein, 11 aa, Homo sapiens
  misc_feature: Table A; Target 23620; HLA-C*03:03; FOXE1; ENSG00000178919; TAA
AAAAAAAAAAI

SEQ ID NO: 23621 - protein, 11 aa, Homo sapiens
  misc_feature: Table A; Target 23621; HLA-C*03:04; FOXE1; ENSG00000178919; TAA
AAAAAAAAAAI

SEQ ID NO: 23622 - protein, 11 aa, Homo sapiens
  misc_feature: Table A; Target 23622; HLA-C*16:04; FOXE1; ENSG00000178919; TAA
AAAAAAAAAAI

SEQ ID NO: 23623 - protein, 10 aa, Homo sapiens
  misc_feature: Table A; Target 23623; HLA-B*07:02; FOXE1; ENSG00000178919; TAA
AAAAAAAAAI

SEQ ID NO: 23624 - protein, 10 aa, Homo sapiens
  misc_feature: Table A; Target 23624; HLA-C*03:03; FOXE1; ENSG00000178919; TAA
AAAAAAAAAI

SEQ ID NO: 23625 - protein, 10 aa, Homo sapiens
  misc_feature: Table A; Target 23625; HLA-C*03:04; FOXE1; ENSG00000178919; TAA
AAAAAAAAAI

SEQ ID NO: 23626 - protein, 10 aa, Homo sapiens
  misc_feature: Table A; Target 23626; HLA-C*16:04; FOXE1; ENSG00000178919; TAA
AAAAAAAAAI

SEQ ID NO: 23627 - protein, 11 aa, Homo sapiens
  misc_feature: Table A; Target 23627; HLA-A*30:02; FOXE1; ENSG00000178919; TAA
AAAAAAAAAIF

SEQ ID NO: 23628 - protein, 11 aa, Homo sapiens
  misc_feature: Table A; Target 23628; HLA-B*15:01; FOXE1; ENSG00000178919; TAA
AAAAAAAAAIF

SEQ ID NO: 23629 - protein, 11 aa, Homo sapiens
  misc_feature: Table A; Target 23629; HLA-B*15:03; FOXE1; ENSG00000178919; TAA
AAAAAAAAAIF

SEQ ID NO: 23630 - protein, 11 aa, Homo sapiens
  misc_feature: Table A; Target 23630; HLA-B*27:02; FOXE1; ENSG00000178919; TAA
AAAAAAAAAIF

SEQ ID NO: 23631 - protein, 11 aa, Homo sapiens
  misc_feature: Table A; Target 23631; HLA-B*46:01; FOXE1; ENSG00000178919; TAA
AAAAAAAAAIF

SEQ ID NO: 23632 - protein, 11 aa, Homo sapiens
  misc_feature: Table A; Target 23632; HLA-B*58:01; FOXE1; ENSG00000178919; TAA
AAAAAAAAAIF

SEQ ID NO: 23633 - protein, 11 aa, Homo sapiens
  misc_feature: Table A; Target 23633; HLA-C*02:02; FOXE1; ENSG00000178919; TAA
AAAAAAAAAIF

SEQ ID NO: 23634 - protein, 11 aa, Homo sapiens
  misc_feature: Table A; Target 23634; HLA-C*03:03; FOXE1; ENSG00000178919; TAA
AAAAAAAAAIF

SEQ ID NO: 23635 - protein, 11 aa, Homo sapiens
  misc_feature: Table A; Target 23635; HLA-C*03:04; FOXE1; ENSG00000178919; TAA
AAAAAAAAAIF

SEQ ID NO: 23636 - protein, 11 aa, Homo sapiens
  misc_feature: Table A; Target 23636; HLA-C*12:03; FOXE1; ENSG00000178919; TAA
AAAAAAAAAIF

SEQ ID NO: 23637 - protein, 11 aa, Homo sapiens
  misc_feature: Table A; Target 23637; HLA-C*16:04; FOXE1; ENSG00000178919; TAA
AAAAAAAAAIF

SEQ ID NO: 23638 - protein, 9 aa, Homo sapiens
  misc_feature: Table A; Target 23638; HLA-A*30:01; FOXE1; ENSG00000178919; TAA
AAAAAAAAI

SEQ ID NO: 23639 - protein, 9 aa, Homo sapiens
  misc_feature: Table A; Target 23639; HLA-A*32:01; FOXE1; ENSG00000178919; TAA
AAAAAAAAI

SEQ ID NO: 23640 - protein, 9 aa, Homo sapiens
  misc_feature: Table A; Target 23640; HLA-B*15:01; FOXE1; ENSG00000178919; TAA
AAAAAAAAI

SEQ ID NO: 23641 - protein, 9 aa, Homo sapiens
  misc_feature: Table A; Target 23641; HLA-B*35:03; FOXE1; ENSG00000178919; TAA
AAAAAAAAI

SEQ ID NO: 23642 - protein, 9 aa, Homo sapiens
  misc_feature: Table A; Target 23642; HLA-B*37:01; FOXE1; ENSG00000178919; TAA
AAAAAAAAI

SEQ ID NO: 23643 - protein, 9 aa, Homo sapiens
  misc_feature: Table A; Target 23643; HLA-B*40:01; FOXE1; ENSG00000178919; TAA
AAAAAAAAI

SEQ ID NO: 23644 - protein, 9 aa, Homo sapiens
  misc_feature: Table A; Target 23644; HLA-B*49:01; FOXE1; ENSG00000178919; TAA
AAAAAAAAI

SEQ ID NO: 23645 - protein, 9 aa, Homo sapiens
  misc_feature: Table A; Target 23645; HLA-C*05:01; FOXE1; ENSG00000178919; TAA
AAAAAAAAI

SEQ ID NO: 23646 - protein, 9 aa, Homo sapiens
  misc_feature: Table A; Target 23646; HLA-C*07:02; FOXE1; ENSG00000178919; TAA
AAAAAAAAI

SEQ ID NO: 23647 - protein, 9 aa, Homo sapiens
  misc_feature: Table A; Target 23647; HLA-C*07:04; FOXE1; ENSG00000178919; TAA
AAAAAAAAI

SEQ ID NO: 23648 - protein, 9 aa, Homo sapiens
  misc_feature: Table A; Target 23648; HLA-C*07:06; FOXE1; ENSG00000178919; TAA
AAAAAAAAI

SEQ ID NO: 23649 - protein, 9 aa, Homo sapiens
  misc_feature: Table A; Target 23649; HLA-C*12:03; FOXE1; ENSG00000178919; TAA
AAAAAAAAI

SEQ ID NO: 23650 - protein, 10 aa, Homo sapiens
  misc_feature: Table A; Target 23650; HLA-A*25:01; FOXE1; ENSG00000178919; TAA
AAAAAAAAIF

SEQ ID NO: 23651 - protein, 10 aa, Homo sapiens
  misc_feature: Table A; Target 23651; HLA-A*26:01; FOXE1; ENSG00000178919; TAA
AAAAAAAAIF

SEQ ID NO: 23652 - protein, 10 aa, Homo sapiens
  misc_feature: Table A; Target 23652; HLA-A*30:02; FOXE1; ENSG00000178919; TAA
AAAAAAAAIF

SEQ ID NO: 23653 - protein, 10 aa, Homo sapiens
  misc_feature: Table A; Target 23653; HLA-B*15:01; FOXE1; ENSG00000178919; TAA
AAAAAAAAIF

SEQ ID NO: 23654 - protein, 10 aa, Homo sapiens
  misc_feature: Table A; Target 23654; HLA-B*15:03; FOXE1; ENSG00000178919; TAA
AAAAAAAAIF

SEQ ID NO: 23655 - protein, 10 aa, Homo sapiens
  misc_feature: Table A; Target 23655; HLA-B*27:02; FOXE1; ENSG00000178919; TAA
AAAAAAAAIF

SEQ ID NO: 23656 - protein, 10 aa, Homo sapiens
  misc_feature: Table A; Target 23656; HLA-B*35:01; FOXE1; ENSG00000178919; TAA
AAAAAAAAIF

SEQ ID NO: 23657 - protein, 10 aa, Homo sapiens
  misc_feature: Table A; Target 23657; HLA-B*39:01; FOXE1; ENSG00000178919; TAA
AAAAAAAAIF

SEQ ID NO: 23658 - protein, 10 aa, Homo sapiens
  misc_feature: Table A; Target 23658; HLA-B*46:01; FOXE1; ENSG00000178919; TAA
AAAAAAAAIF

SEQ ID NO: 23659 - protein, 10 aa, Homo sapiens
  misc_feature: Table A; Target 23659; HLA-B*58:01; FOXE1; ENSG00000178919; TAA
AAAAAAAAIF

SEQ ID NO: 23660 - protein, 10 aa, Homo sapiens
  misc_feature: Table A; Target 23660; HLA-C*01:02; FOXE1; ENSG00000178919; TAA
AAAAAAAAIF

SEQ ID NO: 23661 - protein, 10 aa, Homo sapiens
  misc_feature: Table A; Target 23661; HLA-C*02:02; FOXE1; ENSG00000178919; TAA
AAAAAAAAIF

SEQ ID NO: 23662 - protein, 10 aa, Homo sapiens
  misc_feature: Table A; Target 23662; HLA-C*03:03; FOXE1; ENSG00000178919; TAA
AAAAAAAAIF

SEQ ID NO: 23663 - protein, 10 aa, Homo sapiens
  misc_feature: Table A; Target 23663; HLA-C*03:04; FOXE1; ENSG00000178919; TAA
AAAAAAAAIF

SEQ ID NO: 23664 - protein, 10 aa, Homo sapiens
  misc_feature: Table A; Target 23664; HLA-C*07:04; FOXE1; ENSG00000178919; TAA
AAAAAAAAIF

SEQ ID NO: 23665 - protein, 10 aa, Homo sapiens
  misc_feature: Table A; Target 23665; HLA-C*07:06; FOXE1; ENSG00000178919; TAA
AAAAAAAAIF

SEQ ID NO: 23666 - protein, 10 aa, Homo sapiens
  misc_feature: Table A; Target 23666; HLA-C*12:03; FOXE1; ENSG00000178919; TAA
AAAAAAAAIF

SEQ ID NO: 23667 - protein, 10 aa, Homo sapiens
  misc_feature: Table A; Target 23667; HLA-C*16:04; FOXE1; ENSG00000178919; TAA
AAAAAAAAIF

SEQ ID NO: 23668 - protein, 8 aa, Homo sapiens
  misc_feature: Table A; Target 23668; HLA-B*46:01; FOXE1; ENSG00000178919; TAA
AAAAAAAI

SEQ ID NO: 23669 - protein, 8 aa, Homo sapiens
  misc_feature: Table A; Target 23669; HLA-B*51:01; FOXE1; ENSG00000178919; TAA
AAAAAAAI

SEQ ID NO: 23670 - protein, 8 aa, Homo sapiens
  misc_feature: Table A; Target 23670; HLA-C*03:03; FOXE1; ENSG00000178919; TAA
AAAAAAAI

SEQ ID NO: 23671 - protein, 9 aa, Homo sapiens
  misc_feature: Table A; Target 23671; HLA-A*23:01; FOXE1; ENSG00000178919; TAA
AAAAAAAIF

SEQ ID NO: 23672 - protein, 9 aa, Homo sapiens
  misc_feature: Table A; Target 23672; HLA-A*24:02; FOXE1; ENSG00000178919; TAA
AAAAAAAIF

SEQ ID NO: 23673 - protein, 9 aa, Homo sapiens
  misc_feature: Table A; Target 23673; HLA-A*25:01; FOXE1; ENSG00000178919; TAA
AAAAAAAIF

SEQ ID NO: 23674 - protein, 9 aa, Homo sapiens
  misc_feature: Table A; Target 23674; HLA-A*26:01; FOXE1; ENSG00000178919; TAA
AAAAAAAIF

SEQ ID NO: 23675 - protein, 9 aa, Homo sapiens
  misc_feature: Table A; Target 23675; HLA-A*30:02; FOXE1; ENSG00000178919; TAA
AAAAAAAIF

SEQ ID NO: 23676 - protein, 9 aa, Homo sapiens
  misc_feature: Table A; Target 23676; HLA-A*32:01; FOXE1; ENSG00000178919; TAA
AAAAAAAIF

SEQ ID NO: 23677 - protein, 9 aa, Homo sapiens
  misc_feature: Table A; Target 23677; HLA-B*07:02; FOXE1; ENSG00000178919; TAA
AAAAAAAIF

SEQ ID NO: 23678 - protein, 9 aa, Homo sapiens
  misc_feature: Table A; Target 23678; HLA-B*15:01; FOXE1; ENSG00000178919; TAA
AAAAAAAIF

SEQ ID NO: 23679 - protein, 9 aa, Homo sapiens
  misc_feature: Table A; Target 23679; HLA-B*15:03; FOXE1; ENSG00000178919; TAA
AAAAAAAIF

SEQ ID NO: 23680 - protein, 9 aa, Homo sapiens
  misc_feature: Table A; Target 23680; HLA-B*27:02; FOXE1; ENSG00000178919; TAA
AAAAAAAIF

SEQ ID NO: 23681 - protein, 9 aa, Homo sapiens
  misc_feature: Table A; Target 23681; HLA-B*27:05; FOXE1; ENSG00000178919; TAA
AAAAAAAIF

SEQ ID NO: 23682 - protein, 9 aa, Homo sapiens
  misc_feature: Table A; Target 23682; HLA-B*35:01; FOXE1; ENSG00000178919; TAA
AAAAAAAIF

SEQ ID NO: 23683 - protein, 9 aa, Homo sapiens
  misc_feature: Table A; Target 23683; HLA-B*35:03; FOXE1; ENSG00000178919; TAA
AAAAAAAIF

SEQ ID NO: 23684 - protein, 9 aa, Homo sapiens
  misc_feature: Table A; Target 23684; HLA-B*37:01; FOXE1; ENSG00000178919; TAA
AAAAAAAIF

SEQ ID NO: 23685 - protein, 9 aa, Homo sapiens
  misc_feature: Table A; Target 23685; HLA-B*38:01; FOXE1; ENSG00000178919; TAA
AAAAAAAIF

SEQ ID NO: 23686 - protein, 9 aa, Homo sapiens
  misc_feature: Table A; Target 23686; HLA-B*39:01; FOXE1; ENSG00000178919; TAA
AAAAAAAIF

SEQ ID NO: 23687 - protein, 9 aa, Homo sapiens
  misc_feature: Table A; Target 23687; HLA-B*44:02; FOXE1; ENSG00000178919; TAA
AAAAAAAIF

SEQ ID NO: 23688 - protein, 9 aa, Homo sapiens
  misc_feature: Table A; Target 23688; HLA-B*44:03; FOXE1; ENSG00000178919; TAA
AAAAAAAIF

SEQ ID NO: 23689 - protein, 9 aa, Homo sapiens
  misc_feature: Table A; Target 23689; HLA-B*46:01; FOXE1; ENSG00000178919; TAA
AAAAAAAIF

SEQ ID NO: 23690 - protein, 9 aa, Homo sapiens
  misc_feature: Table A; Target 23690; HLA-B*57:01; FOXE1; ENSG00000178919; TAA
AAAAAAAIF

SEQ ID NO: 23691 - protein, 9 aa, Homo sapiens
  misc_feature: Table A; Target 23691; HLA-B*58:01; FOXE1; ENSG00000178919; TAA
AAAAAAAIF

SEQ ID NO: 23692 - protein, 9 aa, Homo sapiens
  misc_feature: Table A; Target 23692; HLA-C*01:02; FOXE1; ENSG00000178919; TAA
AAAAAAAIF

SEQ ID NO: 23693 - protein, 9 aa, Homo sapiens
  misc_feature: Table A; Target 23693; HLA-C*02:02; FOXE1; ENSG00000178919; TAA
AAAAAAAIF

SEQ ID NO: 23694 - protein, 9 aa, Homo sapiens
  misc_feature: Table A; Target 23694; HLA-C*03:03; FOXE1; ENSG00000178919; TAA
AAAAAAAIF

SEQ ID NO: 23695 - protein, 9 aa, Homo sapiens
  misc_feature: Table A; Target 23695; HLA-C*03:04; FOXE1; ENSG00000178919; TAA
AAAAAAAIF

SEQ ID NO: 23696 - protein, 9 aa, Homo sapiens
  misc_feature: Table A; Target 23696; HLA-C*04:01; FOXE1; ENSG00000178919; TAA
AAAAAAAIF

SEQ ID NO: 23697 - protein, 9 aa, Homo sapiens
  misc_feature: Table A; Target 23697; HLA-C*05:01; FOXE1; ENSG00000178919; TAA
AAAAAAAIF

SEQ ID NO: 23698 - protein, 9 aa, Homo sapiens
  misc_feature: Table A; Target 23698; HLA-C*07:04; FOXE1; ENSG00000178919; TAA
AAAAAAAIF

SEQ ID NO: 23699 - protein, 9 aa, Homo sapiens
  misc_feature: Table A; Target 23699; HLA-C*07:06; FOXE1; ENSG00000178919; TAA
AAAAAAAIF

SEQ ID NO: 23700 - protein, 9 aa, Homo sapiens
  misc_feature: Table A; Target 23700; HLA-C*12:03; FOXE1; ENSG00000178919; TAA
AAAAAAAIF

SEQ ID NO: 23701 - protein, 9 aa, Homo sapiens
  misc_feature: Table A; Target 23701; HLA-C*14:02; FOXE1; ENSG00000178919; TAA
AAAAAAAIF

SEQ ID NO: 23702 - protein, 9 aa, Homo sapiens
  misc_feature: Table A; Target 23702; HLA-C*16:01; FOXE1; ENSG00000178919; TAA
AAAAAAAIF

SEQ ID NO: 23703 - protein, 9 aa, Homo sapiens
  misc_feature: Table A; Target 23703; HLA-C*16:02; FOXE1; ENSG00000178919; TAA
AAAAAAAIF

SEQ ID NO: 23704 - protein, 9 aa, Homo sapiens
  misc_feature: Table A; Target 23704; HLA-C*16:04; FOXE1; ENSG00000178919; TAA
AAAAAAAIF

SEQ ID NO: 23705 - protein, 8 aa, Homo sapiens
  misc_feature: Table A; Target 23705; HLA-B*15:01; FOXE1; ENSG00000178919; TAA
AAAAAAIF

SEQ ID NO: 23706 - protein, 8 aa, Homo sapiens
  misc_feature: Table A; Target 23706; HLA-B*15:03; FOXE1; ENSG00000178919; TAA
AAAAAAIF

SEQ ID NO: 23707 - protein, 8 aa, Homo sapiens
  misc_feature: Table A; Target 23707; HLA-B*35:01; FOXE1; ENSG00000178919; TAA
AAAAAAIF

SEQ ID NO: 23708 - protein, 8 aa, Homo sapiens
  misc_feature: Table A; Target 23708; HLA-B*46:01; FOXE1; ENSG00000178919; TAA
AAAAAAIF

SEQ ID NO: 23709 - protein, 8 aa, Homo sapiens
  misc_feature: Table A; Target 23709; HLA-B*58:01; FOXE1; ENSG00000178919; TAA
AAAAAAIF

SEQ ID NO: 23710 - protein, 8 aa, Homo sapiens
  misc_feature: Table A; Target 23710; HLA-C*02:02; FOXE1; ENSG00000178919; TAA
AAAAAAIF

SEQ ID NO: 23711 - protein, 8 aa, Homo sapiens
  misc_feature: Table A; Target 23711; HLA-C*03:03; FOXE1; ENSG00000178919; TAA
AAAAAAIF

SEQ ID NO: 23712 - protein, 8 aa, Homo sapiens
  misc_feature: Table A; Target 23712; HLA-C*03:04; FOXE1; ENSG00000178919; TAA
AAAAAAIF

SEQ ID NO: 23713 - protein, 8 aa, Homo sapiens
  misc_feature: Table A; Target 23713; HLA-C*12:03; FOXE1; ENSG00000178919; TAA
AAAAAAIF

SEQ ID NO: 23714 - protein, 8 aa, Homo sapiens
  misc_feature: Table A; Target 23714; HLA-C*14:02; FOXE1; ENSG00000178919; TAA
AAAAAAIF

SEQ ID NO: 23715 - protein, 8 aa, Homo sapiens
  misc_feature: Table A; Target 23715; HLA-C*16:01; FOXE1; ENSG00000178919; TAA
AAAAAAIF

SEQ ID NO: 23716 - protein, 11 aa, Homo sapiens
  misc_feature: Table A; Target 23716; HLA-B*56:01; FOXE1; ENSG00000178919; TAA
AAAAAAIFPGA

SEQ ID NO: 23717 - protein, 9 aa, Homo sapiens
  misc_feature: Table A; Target 23717; HLA-C*02:02; FOXE1; ENSG00000178919; TAA
AAAAAIFPG

SEQ ID NO: 23718 - protein, 9 aa, Homo sapiens
  misc_feature: Table A; Target 23718; HLA-C*12:03; FOXE1; ENSG00000178919; TAA
AAAAAIFPG

SEQ ID NO: 23719 - protein, 10 aa, Homo sapiens
  misc_feature: Table A; Target 23719; HLA-B*54:01; FOXE1; ENSG00000178919; TAA
AAAAAIFPGA

SEQ ID NO: 23720 - protein, 10 aa, Homo sapiens
  misc_feature: Table A; Target 23720; HLA-B*56:01; FOXE1; ENSG00000178919; TAA
AAAAAIFPGA

SEQ ID NO: 23721 - protein, 9 aa, Homo sapiens
  misc_feature: Table A; Target 23721; HLA-A*02:01; FOXE1; ENSG00000178919; TAA
AAAAIFPGA

SEQ ID NO: 23722 - protein, 9 aa, Homo sapiens
  misc_feature: Table A; Target 23722; HLA-A*02:03; FOXE1; ENSG00000178919; TAA
AAAAIFPGA

SEQ ID NO: 23723 - protein, 9 aa, Homo sapiens
  misc_feature: Table A; Target 23723; HLA-A*26:01; FOXE1; ENSG00000178919; TAA
AAAAIFPGA

SEQ ID NO: 23724 - protein, 9 aa, Homo sapiens
  misc_feature: Table A; Target 23724; HLA-A*30:01; FOXE1; ENSG00000178919; TAA
AAAAIFPGA

SEQ ID NO: 23725 - protein, 9 aa, Homo sapiens
  misc_feature: Table A; Target 23725; HLA-A*32:01; FOXE1; ENSG00000178919; TAA
AAAAIFPGA

SEQ ID NO: 23726 - protein, 9 aa, Homo sapiens
  misc_feature: Table A; Target 23726; HLA-A*68:02; FOXE1; ENSG00000178919; TAA
AAAAIFPGA

SEQ ID NO: 23727 - protein, 9 aa, Homo sapiens
  misc_feature: Table A; Target 23727; HLA-B*13:02; FOXE1; ENSG00000178919; TAA
AAAAIFPGA

SEQ ID NO: 23728 - protein, 9 aa, Homo sapiens
  misc_feature: Table A; Target 23728; HLA-B*27:05; FOXE1; ENSG00000178919; TAA
AAAAIFPGA

SEQ ID NO: 23729 - protein, 9 aa, Homo sapiens
  misc_feature: Table A; Target 23729; HLA-B*46:01; FOXE1; ENSG00000178919; TAA
AAAAIFPGA

SEQ ID NO: 23730 - protein, 9 aa, Homo sapiens
  misc_feature: Table A; Target 23730; HLA-B*54:01; FOXE1; ENSG00000178919; TAA
AAAAIFPGA

SEQ ID NO: 23731 - protein, 9 aa, Homo sapiens
  misc_feature: Table A; Target 23731; HLA-B*55:01; FOXE1; ENSG00000178919; TAA
AAAAIFPGA

SEQ ID NO: 23732 - protein, 9 aa, Homo sapiens
  misc_feature: Table A; Target 23732; HLA-B*56:01; FOXE1; ENSG00000178919; TAA
AAAAIFPGA

SEQ ID NO: 23733 - protein, 9 aa, Homo sapiens
  misc_feature: Table A; Target 23733; HLA-B*58:01; FOXE1; ENSG00000178919; TAA
AAAAIFPGA

SEQ ID NO: 23734 - protein, 9 aa, Homo sapiens
  misc_feature: Table A; Target 23734; HLA-C*02:02; FOXE1; ENSG00000178919; TAA
AAAAIFPGA

SEQ ID NO: 23735 - protein, 9 aa, Homo sapiens
  misc_feature: Table A; Target 23735; HLA-C*03:03; FOXE1; ENSG00000178919; TAA
AAAAIFPGA

SEQ ID NO: 23736 - protein, 9 aa, Homo sapiens
  misc_feature: Table A; Target 23736; HLA-C*03:04; FOXE1; ENSG00000178919; TAA
AAAAIFPGA

SEQ ID NO: 23737 - protein, 9 aa, Homo sapiens
  misc_feature: Table A; Target 23737; HLA-C*06:02; FOXE1; ENSG00000178919; TAA
AAAAIFPGA

SEQ ID NO: 23738 - protein, 9 aa, Homo sapiens
  misc_feature: Table A; Target 23738; HLA-C*12:03; FOXE1; ENSG00000178919; TAA
AAAAIFPGA

SEQ ID NO: 23739 - protein, 9 aa, Homo sapiens
  misc_feature: Table A; Target 23739; HLA-C*16:01; FOXE1; ENSG00000178919; TAA
AAAAIFPGA

SEQ ID NO: 23740 - protein, 9 aa, Homo sapiens
  misc_feature: Table A; Target 23740; HLA-C*16:02; FOXE1; ENSG00000178919; TAA
AAAAIFPGA

SEQ ID NO: 23741 - protein, 9 aa, Homo sapiens
  misc_feature: Table A; Target 23741; HLA-C*16:04; FOXE1; ENSG00000178919; TAA
AAAAIFPGA

SEQ ID NO: 23742 - protein, 9 aa, Homo sapiens
  misc_feature: Table A; Target 23742; HLA-A*32:01; FOXE1; ENSG00000178919; TAA
AAAGRLAGP

SEQ ID NO: 23743 - protein, 9 aa, Homo sapiens
  misc_feature: Table A; Target 23743; HLA-C*06:02; FOXE1; ENSG00000178919; TAA
AAAGRLAGP

SEQ ID NO: 23744 - protein, 9 aa, Homo sapiens
  misc_feature: Table A; Target 23744; HLA-C*16:01; FOXE1; ENSG00000178919; TAA
AAAGRLAGP

SEQ ID NO: 23745 - protein, 9 aa, Homo sapiens
  misc_feature: Table A; Target 23745; HLA-C*16:02; FOXE1; ENSG00000178919; TAA
AAAGRLAGP

SEQ ID NO: 23746 - protein, 8 aa, Homo sapiens
  misc_feature: Table A; Target 23746; HLA-B*54:01; FOXE1; ENSG00000178919; TAA
AAAIFPGA

SEQ ID NO: 23747 - protein, 8 aa, Homo sapiens
  misc_feature: Table A; Target 23747; HLA-B*56:01; FOXE1; ENSG00000178919; TAA
AAAIFPGA

SEQ ID NO: 23748 - protein, 9 aa, Homo sapiens
  misc_feature: Table A; Target 23748; HLA-A*02:03; FOXE1; ENSG00000178919; TAA
AAAIFPGAV

SEQ ID NO: 23749 - protein, 9 aa, Homo sapiens
  misc_feature: Table A; Target 23749; HLA-A*68:02; FOXE1; ENSG00000178919; TAA
AAAIFPGAV

SEQ ID NO: 23750 - protein, 9 aa, Homo sapiens
  misc_feature: Table A; Target 23750; HLA-B*13:02; FOXE1; ENSG00000178919; TAA
AAAIFPGAV

SEQ ID NO: 23751 - protein, 9 aa, Homo sapiens
  misc_feature: Table A; Target 23751; HLA-B*39:01; FOXE1; ENSG00000178919; TAA
AAAIFPGAV

SEQ ID NO: 23752 - protein, 9 aa, Homo sapiens
  misc_feature: Table A; Target 23752; HLA-B*56:01; FOXE1; ENSG00000178919; TAA
AAAIFPGAV

SEQ ID NO: 23753 - protein, 9 aa, Homo sapiens
  misc_feature: Table A; Target 23753; HLA-C*02:02; FOXE1; ENSG00000178919; TAA
AAAIFPGAV

SEQ ID NO: 23754 - protein, 9 aa, Homo sapiens
  misc_feature: Table A; Target 23754; HLA-C*06:02; FOXE1; ENSG00000178919; TAA
AAAIFPGAV

SEQ ID NO: 23755 - protein, 9 aa, Homo sapiens
  misc_feature: Table A; Target 23755; HLA-C*12:03; FOXE1; ENSG00000178919; TAA
AAAIFPGAV

SEQ ID NO: 23756 - protein, 9 aa, Homo sapiens
  misc_feature: Table A; Target 23756; HLA-C*16:01; FOXE1; ENSG00000178919; TAA
AAAIFPGAV

SEQ ID NO: 23757 - protein, 9 aa, Homo sapiens
  misc_feature: Table A; Target 23757; HLA-C*16:02; FOXE1; ENSG00000178919; TAA
AAAIFPGAV

SEQ ID NO: 23758 - protein, 9 aa, Homo sapiens
  misc_feature: Table A; Target 23758; HLA-C*16:04; FOXE1; ENSG00000178919; TAA
AAAIFPGAV

SEQ ID NO: 23759 - protein, 11 aa, Homo sapiens
  misc_feature: Table A; Target 23759; HLA-B*54:01; FOXE1; ENSG00000178919; TAA
AAAIFPGAVPA

SEQ ID NO: 23760 - protein, 9 aa, Homo sapiens
  misc_feature: Table A; Target 23760; HLA-B*39:01; FOXE1; ENSG00000178919; TAA
AAAYAGPDG

SEQ ID NO: 23761 - protein, 11 aa, Homo sapiens
  misc_feature: Table A; Target 23761; HLA-A*01:01; FOXE1; ENSG00000178919; TAA
AAAYAGPDGAY

SEQ ID NO: 23762 - protein, 11 aa, Homo sapiens
  misc_feature: Table A; Target 23762; HLA-A*30:02; FOXE1; ENSG00000178919; TAA
AAAYAGPDGAY

SEQ ID NO: 23763 - protein, 11 aa, Homo sapiens
  misc_feature: Table A; Target 23763; HLA-B*15:01; FOXE1; ENSG00000178919; TAA
AAAYAGPDGAY

SEQ ID NO: 23764 - protein, 11 aa, Homo sapiens
  misc_feature: Table A; Target 23764; HLA-B*27:05; FOXE1; ENSG00000178919; TAA
AAAYAGPDGAY

SEQ ID NO: 23765 - protein, 11 aa, Homo sapiens
  misc_feature: Table A; Target 23765; HLA-B*35:01; FOXE1; ENSG00000178919; TAA
AAAYAGPDGAY

SEQ ID NO: 23766 - protein, 11 aa, Homo sapiens
  misc_feature: Table A; Target 23766; HLA-B*39:01; FOXE1; ENSG00000178919; TAA
AAAYAGPDGAY

SEQ ID NO: 23767 - protein, 11 aa, Homo sapiens
  misc_feature: Table A; Target 23767; HLA-B*46:01; FOXE1; ENSG00000178919; TAA
AAAYAGPDGAY

SEQ ID NO: 23768 - protein, 11 aa, Homo sapiens
  misc_feature: Table A; Target 23768; HLA-B*58:01; FOXE1; ENSG00000178919; TAA
AAAYAGPDGAY

SEQ ID NO: 23769 - protein, 11 aa, Homo sapiens
  misc_feature: Table A; Target 23769; HLA-C*03:03; FOXE1; ENSG00000178919; TAA
AAAYAGPDGAY

SEQ ID NO: 23770 - protein, 11 aa, Homo sapiens
  misc_feature: Table A; Target 23770; HLA-C*06:02; FOXE1; ENSG00000178919; TAA
AAAYAGPDGAY

SEQ ID NO: 23771 - protein, 11 aa, Homo sapiens
  misc_feature: Table A; Target 23771; HLA-C*16:02; FOXE1; ENSG00000178919; TAA
AAAYAGPDGAY

SEQ ID NO: 23772 - protein, 11 aa, Homo sapiens
  misc_feature: Table A; Target 23772; HLA-C*16:04; FOXE1; ENSG00000178919; TAA
AAAYAGPDGAY

SEQ ID NO: 23773 - protein, 10 aa, Homo sapiens
  misc_feature: Table A; Target 23773; HLA-A*68:01; FOXE1; ENSG00000178919; TAA
AAAYPGGIDR

SEQ ID NO: 23774 - protein, 10 aa, Homo sapiens
  misc_feature: Table A; Target 23774; HLA-C*07:06; FOXE1; ENSG00000178919; TAA
AAAYPGGIDR

SEQ ID NO: 23775 - protein, 11 aa, Homo sapiens
  misc_feature: Table A; Target 23775; HLA-C*16:01; FOXE1; ENSG00000178919; TAA
AAAYPGGIDRF

SEQ ID NO: 23776 - protein, 11 aa, Homo sapiens
  misc_feature: Table A; Target 23776; HLA-C*16:04; FOXE1; ENSG00000178919; TAA
AAAYPGGIDRF

SEQ ID NO: 23777 - protein, 8 aa, Homo sapiens
  misc_feature: Table A; Target 23777; HLA-C*12:03; FOXE1; ENSG00000178919; TAA
AAIFPGAV

SEQ ID NO: 23778 - protein, 8 aa, Homo sapiens
  misc_feature: Table A; Target 23778; HLA-C*16:04; FOXE1; ENSG00000178919; TAA
AAIFPGAV

SEQ ID NO: 23779 - protein, 9 aa, Homo sapiens
  misc_feature: Table A; Target 23779; HLA-B*15:01; FOXE1; ENSG00000178919; TAA
AAIFPGAVP

SEQ ID NO: 23780 - protein, 9 aa, Homo sapiens
  misc_feature: Table A; Target 23780; HLA-B*40:02; FOXE1; ENSG00000178919; TAA
AAIFPGAVP

SEQ ID NO: 23781 - protein, 9 aa, Homo sapiens
  misc_feature: Table A; Target 23781; HLA-B*46:01; FOXE1; ENSG00000178919; TAA
AAIFPGAVP

SEQ ID NO: 23782 - protein, 9 aa, Homo sapiens
  misc_feature: Table A; Target 23782; HLA-B*56:01; FOXE1; ENSG00000178919; TAA
AAIFPGAVP

SEQ ID NO: 23783 - protein, 9 aa, Homo sapiens
  misc_feature: Table A; Target 23783; HLA-C*03:03; FOXE1; ENSG00000178919; TAA
AAIFPGAVP

SEQ ID NO: 23784 - protein, 9 aa, Homo sapiens
  misc_feature: Table A; Target 23784; HLA-C*03:04; FOXE1; ENSG00000178919; TAA
AAIFPGAVP

SEQ ID NO: 23785 - protein, 10 aa, Homo sapiens
  misc_feature: Table A; Target 23785; HLA-B*46:01; FOXE1; ENSG00000178919; TAA
AAIFPGAVPA

SEQ ID NO: 23786 - protein, 10 aa, Homo sapiens
  misc_feature: Table A; Target 23786; HLA-B*54:01; FOXE1; ENSG00000178919; TAA
AAIFPGAVPA

SEQ ID NO: 23787 - protein, 10 aa, Homo sapiens
  misc_feature: Table A; Target 23787; HLA-B*56:01; FOXE1; ENSG00000178919; TAA
AAIFPGAVPA

SEQ ID NO: 23788 - protein, 10 aa, Homo sapiens
  misc_feature: Table A; Target 23788; HLA-C*01:02; FOXE1; ENSG00000178919; TAA
AAIFPGAVPA

SEQ ID NO: 23789 - protein, 10 aa, Homo sapiens
  misc_feature: Table A; Target 23789; HLA-C*02:02; FOXE1; ENSG00000178919; TAA
AAIFPGAVPA

SEQ ID NO: 23790 - protein, 10 aa, Homo sapiens
  misc_feature: Table A; Target 23790; HLA-C*03:03; FOXE1; ENSG00000178919; TAA
AAIFPGAVPA

SEQ ID NO: 23791 - protein, 10 aa, Homo sapiens
  misc_feature: Table A; Target 23791; HLA-C*03:04; FOXE1; ENSG00000178919; TAA
AAIFPGAVPA

SEQ ID NO: 23792 - protein, 10 aa, Homo sapiens
  misc_feature: Table A; Target 23792; HLA-C*07:06; FOXE1; ENSG00000178919; TAA
AAIFPGAVPA

SEQ ID NO: 23793 - protein, 10 aa, Homo sapiens
  misc_feature: Table A; Target 23793; HLA-C*12:03; FOXE1; ENSG00000178919; TAA
AAIFPGAVPA

SEQ ID NO: 23794 - protein, 11 aa, Homo sapiens
  misc_feature: Table A; Target 23794; HLA-B*54:01; FOXE1; ENSG00000178919; TAA
AAIFPGAVPAA

SEQ ID NO: 23795 - protein, 11 aa, Homo sapiens
  misc_feature: Table A; Target 23795; HLA-B*56:01; FOXE1; ENSG00000178919; TAA
AAIFPGAVPAA

SEQ ID NO: 23796 - protein, 8 aa, Homo sapiens
  misc_feature: Table A; Target 23796; HLA-B*39:01; FOXE1; ENSG00000178919; TAA
AAPPPVYY

SEQ ID NO: 23797 - protein, 8 aa, Homo sapiens
  misc_feature: Table A; Target 23797; HLA-C*01:02; FOXE1; ENSG00000178919; TAA
AAPPPVYY

SEQ ID NO: 23798 - protein, 8 aa, Homo sapiens
  misc_feature: Table A; Target 23798; HLA-C*02:02; FOXE1; ENSG00000178919; TAA
AAPPPVYY

SEQ ID NO: 23799 - protein, 8 aa, Homo sapiens
  misc_feature: Table A; Target 23799; HLA-C*04:01; FOXE1; ENSG00000178919; TAA
AAPPPVYY

SEQ ID NO: 23800 - protein, 8 aa, Homo sapiens
  misc_feature: Table A; Target 23800; HLA-C*12:03; FOXE1; ENSG00000178919; TAA
AAPPPVYY

SEQ ID NO: 23801 - protein, 8 aa, Homo sapiens
  misc_feature: Table A; Target 23801; HLA-C*16:01; FOXE1; ENSG00000178919; TAA
AAPPPVYY

SEQ ID NO: 23802 - protein, 8 aa, Homo sapiens
  misc_feature: Table A; Target 23802; HLA-C*16:02; FOXE1; ENSG00000178919; TAA
AAPPPVYY

SEQ ID NO: 23803 - protein, 9 aa, Homo sapiens
  misc_feature: Table A; Target 23803; HLA-A*02:07; FOXE1; ENSG00000178919; TAA
AAPPPVYYP

SEQ ID NO: 23804 - protein, 9 aa, Homo sapiens
  misc_feature: Table A; Target 23804; HLA-C*06:02; FOXE1; ENSG00000178919; TAA
AAPPPVYYP

SEQ ID NO: 23805 - protein, 9 aa, Homo sapiens
  misc_feature: Table A; Target 23805; HLA-C*12:03; FOXE1; ENSG00000178919; TAA
AAPPPVYYP

SEQ ID NO: 23806 - protein, 10 aa, Homo sapiens
  misc_feature: Table A; Target 23806; HLA-A*02:07; FOXE1; ENSG00000178919; TAA
AAPPPVYYPA

SEQ ID NO: 23807 - protein, 10 aa, Homo sapiens
  misc_feature: Table A; Target 23807; HLA-B*54:01; FOXE1; ENSG00000178919; TAA
AAPPPVYYPA

SEQ ID NO: 23808 - protein, 10 aa, Homo sapiens
  misc_feature: Table A; Target 23808; HLA-B*56:01; FOXE1; ENSG00000178919; TAA
AAPPPVYYPA

SEQ ID NO: 23809 - protein, 9 aa, Homo sapiens
  misc_feature: Table A; Target 23809; HLA-B*07:02; FOXE1; ENSG00000178919; TAA
AARPPYPGA

SEQ ID NO: 23810 - protein, 9 aa, Homo sapiens
  misc_feature: Table A; Target 23810; HLA-B*54:01; FOXE1; ENSG00000178919; TAA
AARPPYPGA

SEQ ID NO: 23811 - protein, 9 aa, Homo sapiens
  misc_feature: Table A; Target 23811; HLA-B*56:01; FOXE1; ENSG00000178919; TAA
AARPPYPGA

SEQ ID NO: 23812 - protein, 11 aa, Homo sapiens
  misc_feature: Table A; Target 23812; HLA-A*29:02; FOXE1; ENSG00000178919; TAA
AARPPYPGAVY

SEQ ID NO: 23813 - protein, 11 aa, Homo sapiens
  misc_feature: Table A; Target 23813; HLA-A*30:02; FOXE1; ENSG00000178919; TAA
AARPPYPGAVY

SEQ ID NO: 23814 - protein, 11 aa, Homo sapiens
  misc_feature: Table A; Target 23814; HLA-A*31:01; FOXE1; ENSG00000178919; TAA
AARPPYPGAVY

SEQ ID NO: 23815 - protein, 11 aa, Homo sapiens
  misc_feature: Table A; Target 23815; HLA-B*15:01; FOXE1; ENSG00000178919; TAA
AARPPYPGAVY

SEQ ID NO: 23816 - protein, 11 aa, Homo sapiens
  misc_feature: Table A; Target 23816; HLA-B*15:03; FOXE1; ENSG00000178919; TAA
AARPPYPGAVY

SEQ ID NO: 23817 - protein, 11 aa, Homo sapiens
  misc_feature: Table A; Target 23817; HLA-B*46:01; FOXE1; ENSG00000178919; TAA
AARPPYPGAVY

SEQ ID NO: 23818 - protein, 11 aa, Homo sapiens
  misc_feature: Table A; Target 23818; HLA-B*57:01; FOXE1; ENSG00000178919; TAA
AARPPYPGAVY

SEQ ID NO: 23819 - protein, 11 aa, Homo sapiens
  misc_feature: Table A; Target 23819; HLA-C*16:01; FOXE1; ENSG00000178919; TAA
AARPPYPGAVY

SEQ ID NO: 23820 - protein, 9 aa, Homo sapiens
  misc_feature: Table A; Target 23820; HLA-C*02:02; FOXE1; ENSG00000178919; TAA
AASPGPCRV

SEQ ID NO: 23821 - protein, 9 aa, Homo sapiens
  misc_feature: Table A; Target 23821; HLA-C*16:02; FOXE1; ENSG00000178919; TAA
AASPGPCRV

SEQ ID NO: 23822 - protein, 10 aa, Homo sapiens
  misc_feature: Table A; Target 23822; HLA-A*30:02; FOXE1; ENSG00000178919; TAA
AASPGPCRVF

SEQ ID NO: 23823 - protein, 10 aa, Homo sapiens
  misc_feature: Table A; Target 23823; HLA-A*32:01; FOXE1; ENSG00000178919; TAA
AASPGPCRVF

SEQ ID NO: 23824 - protein, 10 aa, Homo sapiens
  misc_feature: Table A; Target 23824; HLA-B*46:01; FOXE1; ENSG00000178919; TAA
AASPGPCRVF

SEQ ID NO: 23825 - protein, 10 aa, Homo sapiens
  misc_feature: Table A; Target 23825; HLA-B*57:01; FOXE1; ENSG00000178919; TAA
AASPGPCRVF

SEQ ID NO: 23826 - protein, 10 aa, Homo sapiens
  misc_feature: Table A; Target 23826; HLA-B*58:01; FOXE1; ENSG00000178919; TAA
AASPGPCRVF

SEQ ID NO: 23827 - protein, 10 aa, Homo sapiens
  misc_feature: Table A; Target 23827; HLA-C*02:02; FOXE1; ENSG00000178919; TAA
AASPGPCRVF

SEQ ID NO: 23828 - protein, 10 aa, Homo sapiens
  misc_feature: Table A; Target 23828; HLA-C*12:03; FOXE1; ENSG00000178919; TAA
AASPGPCRVF

SEQ ID NO: 23829 - protein, 10 aa, Homo sapiens
  misc_feature: Table A; Target 23829; HLA-C*16:01; FOXE1; ENSG00000178919; TAA
AASPGPCRVF

SEQ ID NO: 23830 - protein, 10 aa, Homo sapiens
  misc_feature: Table A; Target 23830; HLA-C*16:02; FOXE1; ENSG00000178919; TAA
AASPGPCRVF

SEQ ID NO: 23831 - protein, 9 aa, Homo sapiens
  misc_feature: Table A; Target 23831; HLA-B*56:01; FOXE1; ENSG00000178919; TAA
AAYAGPDGA

SEQ ID NO: 23832 - protein, 10 aa, Homo sapiens
  misc_feature: Table A; Target 23832; HLA-A*01:01; FOXE1; ENSG00000178919; TAA
AAYAGPDGAY

SEQ ID NO: 23833 - protein, 10 aa, Homo sapiens
  misc_feature: Table A; Target 23833; HLA-A*03:01; FOXE1; ENSG00000178919; TAA
AAYAGPDGAY

SEQ ID NO: 23834 - protein, 10 aa, Homo sapiens
  misc_feature: Table A; Target 23834; HLA-A*11:01; FOXE1; ENSG00000178919; TAA
AAYAGPDGAY

SEQ ID NO: 23835 - protein, 10 aa, Homo sapiens
  misc_feature: Table A; Target 23835; HLA-A*25:01; FOXE1; ENSG00000178919; TAA
AAYAGPDGAY

SEQ ID NO: 23836 - protein, 10 aa, Homo sapiens
  misc_feature: Table A; Target 23836; HLA-A*26:01; FOXE1; ENSG00000178919; TAA
AAYAGPDGAY

SEQ ID NO: 23837 - protein, 10 aa, Homo sapiens
  misc_feature: Table A; Target 23837; HLA-A*29:02; FOXE1; ENSG00000178919; TAA
AAYAGPDGAY

SEQ ID NO: 23838 - protein, 10 aa, Homo sapiens
  misc_feature: Table A; Target 23838; HLA-A*30:02; FOXE1; ENSG00000178919; TAA
AAYAGPDGAY

SEQ ID NO: 23839 - protein, 10 aa, Homo sapiens
  misc_feature: Table A; Target 23839; HLA-A*32:01; FOXE1; ENSG00000178919; TAA
AAYAGPDGAY

SEQ ID NO: 23840 - protein, 10 aa, Homo sapiens
  misc_feature: Table A; Target 23840; HLA-B*15:01; FOXE1; ENSG00000178919; TAA
AAYAGPDGAY

SEQ ID NO: 23841 - protein, 10 aa, Homo sapiens
  misc_feature: Table A; Target 23841; HLA-B*15:03; FOXE1; ENSG00000178919; TAA
AAYAGPDGAY

SEQ ID NO: 23842 - protein, 10 aa, Homo sapiens
  misc_feature: Table A; Target 23842; HLA-B*27:05; FOXE1; ENSG00000178919; TAA
AAYAGPDGAY

SEQ ID NO: 23843 - protein, 10 aa, Homo sapiens
  misc_feature: Table A; Target 23843; HLA-B*35:01; FOXE1; ENSG00000178919; TAA
AAYAGPDGAY

SEQ ID NO: 23844 - protein, 10 aa, Homo sapiens
  misc_feature: Table A; Target 23844; HLA-B*39:01; FOXE1; ENSG00000178919; TAA
AAYAGPDGAY

SEQ ID NO: 23845 - protein, 10 aa, Homo sapiens
  misc_feature: Table A; Target 23845; HLA-B*46:01; FOXE1; ENSG00000178919; TAA
AAYAGPDGAY

SEQ ID NO: 23846 - protein, 10 aa, Homo sapiens
  misc_feature: Table A; Target 23846; HLA-B*55:01; FOXE1; ENSG00000178919; TAA
AAYAGPDGAY

SEQ ID NO: 23847 - protein, 10 aa, Homo sapiens
  misc_feature: Table A; Target 23847; HLA-B*58:01; FOXE1; ENSG00000178919; TAA
AAYAGPDGAY

SEQ ID NO: 23848 - protein, 10 aa, Homo sapiens
  misc_feature: Table A; Target 23848; HLA-C*01:02; FOXE1; ENSG00000178919; TAA
AAYAGPDGAY

SEQ ID NO: 23849 - protein, 10 aa, Homo sapiens
  misc_feature: Table A; Target 23849; HLA-C*02:02; FOXE1; ENSG00000178919; TAA
AAYAGPDGAY

SEQ ID NO: 23850 - protein, 10 aa, Homo sapiens
  misc_feature: Table A; Target 23850; HLA-C*03:03; FOXE1; ENSG00000178919; TAA
AAYAGPDGAY

SEQ ID NO: 23851 - protein, 10 aa, Homo sapiens
  misc_feature: Table A; Target 23851; HLA-C*03:04; FOXE1; ENSG00000178919; TAA
AAYAGPDGAY

SEQ ID NO: 23852 - protein, 10 aa, Homo sapiens
  misc_feature: Table A; Target 23852; HLA-C*04:01; FOXE1; ENSG00000178919; TAA
AAYAGPDGAY

SEQ ID NO: 23853 - protein, 10 aa, Homo sapiens
  misc_feature: Table A; Target 23853; HLA-C*05:01; FOXE1; ENSG00000178919; TAA
AAYAGPDGAY

SEQ ID NO: 23854 - protein, 10 aa, Homo sapiens
  misc_feature: Table A; Target 23854; HLA-C*07:04; FOXE1; ENSG00000178919; TAA
AAYAGPDGAY

SEQ ID NO: 23855 - protein, 10 aa, Homo sapiens
  misc_feature: Table A; Target 23855; HLA-C*12:03; FOXE1; ENSG00000178919; TAA
AAYAGPDGAY

SEQ ID NO: 23856 - protein, 10 aa, Homo sapiens
  misc_feature: Table A; Target 23856; HLA-C*14:02; FOXE1; ENSG00000178919; TAA
AAYAGPDGAY

SEQ ID NO: 23857 - protein, 10 aa, Homo sapiens
  misc_feature: Table A; Target 23857; HLA-C*16:01; FOXE1; ENSG00000178919; TAA
AAYAGPDGAY

SEQ ID NO: 23858 - protein, 10 aa, Homo sapiens
  misc_feature: Table A; Target 23858; HLA-C*16:02; FOXE1; ENSG00000178919; TAA
AAYAGPDGAY

SEQ ID NO: 23859 - protein, 10 aa, Homo sapiens
  misc_feature: Table A; Target 23859; HLA-C*16:04; FOXE1; ENSG00000178919; TAA
AAYAGPDGAY

SEQ ID NO: 23860 - protein, 11 aa, Homo sapiens
  misc_feature: Table A; Target 23860; HLA-B*27:05; FOXE1; ENSG00000178919; TAA
AAYAGPDGAYP

SEQ ID NO: 23861 - protein, 11 aa, Homo sapiens
  misc_feature: Table A; Target 23861; HLA-C*06:02; FOXE1; ENSG00000178919; TAA
AAYAGPDGAYP

SEQ ID NO: 23862 - protein, 11 aa, Homo sapiens
  misc_feature: Table A; Target 23862; HLA-C*16:04; FOXE1; ENSG00000178919; TAA
AAYAGPDGAYP

SEQ ID NO: 23863 - protein, 9 aa, Homo sapiens
  misc_feature: Table A; Target 23863; HLA-A*03:01; FOXE1; ENSG00000178919; TAA
AAYPGGIDR

SEQ ID NO: 23864 - protein, 9 aa, Homo sapiens
  misc_feature: Table A; Target 23864; HLA-A*03:02; FOXE1; ENSG00000178919; TAA
AAYPGGIDR

SEQ ID NO: 23865 - protein, 9 aa, Homo sapiens
  misc_feature: Table A; Target 23865; HLA-A*11:01; FOXE1; ENSG00000178919; TAA
AAYPGGIDR

SEQ ID NO: 23866 - protein, 9 aa, Homo sapiens
  misc_feature: Table A; Target 23866; HLA-A*31:01; FOXE1; ENSG00000178919; TAA
AAYPGGIDR

SEQ ID NO: 23867 - protein, 9 aa, Homo sapiens
  misc_feature: Table A; Target 23867; HLA-A*33:01; FOXE1; ENSG00000178919; TAA
AAYPGGIDR

SEQ ID NO: 23868 - protein, 9 aa, Homo sapiens
  misc_feature: Table A; Target 23868; HLA-A*33:03; FOXE1; ENSG00000178919; TAA
AAYPGGIDR

SEQ ID NO: 23869 - protein, 9 aa, Homo sapiens
  misc_feature: Table A; Target 23869; HLA-A*68:01; FOXE1; ENSG00000178919; TAA
AAYPGGIDR

SEQ ID NO: 23870 - protein, 9 aa, Homo sapiens
  misc_feature: Table A; Target 23870; HLA-B*27:05; FOXE1; ENSG00000178919; TAA
AAYPGGIDR

SEQ ID NO: 23871 - protein, 9 aa, Homo sapiens
  misc_feature: Table A; Target 23871; HLA-B*46:01; FOXE1; ENSG00000178919; TAA
AAYPGGIDR

SEQ ID NO: 23872 - protein, 9 aa, Homo sapiens
  misc_feature: Table A; Target 23872; HLA-B*56:01; FOXE1; ENSG00000178919; TAA
AAYPGGIDR

SEQ ID NO: 23873 - protein, 9 aa, Homo sapiens
  misc_feature: Table A; Target 23873; HLA-B*57:01; FOXE1; ENSG00000178919; TAA
AAYPGGIDR

SEQ ID NO: 23874 - protein, 9 aa, Homo sapiens
  misc_feature: Table A; Target 23874; HLA-B*58:01; FOXE1; ENSG00000178919; TAA
AAYPGGIDR

SEQ ID NO: 23875 - protein, 9 aa, Homo sapiens
  misc_feature: Table A; Target 23875; HLA-C*01:02; FOXE1; ENSG00000178919; TAA
AAYPGGIDR

SEQ ID NO: 23876 - protein, 9 aa, Homo sapiens
  misc_feature: Table A; Target 23876; HLA-C*02:02; FOXE1; ENSG00000178919; TAA
AAYPGGIDR

SEQ ID NO: 23877 - protein, 9 aa, Homo sapiens
  misc_feature: Table A; Target 23877; HLA-C*03:03; FOXE1; ENSG00000178919; TAA
AAYPGGIDR

SEQ ID NO: 23878 - protein, 9 aa, Homo sapiens
  misc_feature: Table A; Target 23878; HLA-C*03:04; FOXE1; ENSG00000178919; TAA
AAYPGGIDR

SEQ ID NO: 23879 - protein, 9 aa, Homo sapiens
  misc_feature: Table A; Target 23879; HLA-C*05:01; FOXE1; ENSG00000178919; TAA
AAYPGGIDR

SEQ ID NO: 23880 - protein, 9 aa, Homo sapiens
  misc_feature: Table A; Target 23880; HLA-C*07:06; FOXE1; ENSG00000178919; TAA
AAYPGGIDR

SEQ ID NO: 23881 - protein, 9 aa, Homo sapiens
  misc_feature: Table A; Target 23881; HLA-C*12:03; FOXE1; ENSG00000178919; TAA
AAYPGGIDR

SEQ ID NO: 23882 - protein, 9 aa, Homo sapiens
  misc_feature: Table A; Target 23882; HLA-C*16:01; FOXE1; ENSG00000178919; TAA
AAYPGGIDR

SEQ ID NO: 23883 - protein, 9 aa, Homo sapiens
  misc_feature: Table A; Target 23883; HLA-C*16:02; FOXE1; ENSG00000178919; TAA
AAYPGGIDR

SEQ ID NO: 23884 - protein, 9 aa, Homo sapiens
  misc_feature: Table A; Target 23884; HLA-C*16:04; FOXE1; ENSG00000178919; TAA
AAYPGGIDR

SEQ ID NO: 23885 - protein, 10 aa, Homo sapiens
  misc_feature: Table A; Target 23885; HLA-A*02:01; FOXE1; ENSG00000178919; TAA
AAYPGGIDRF

SEQ ID NO: 23886 - protein, 10 aa, Homo sapiens
  misc_feature: Table A; Target 23886; HLA-A*02:03; FOXE1; ENSG00000178919; TAA
AAYPGGIDRF

SEQ ID NO: 23887 - protein, 10 aa, Homo sapiens
  misc_feature: Table A; Target 23887; HLA-A*02:04; FOXE1; ENSG00000178919; TAA
AAYPGGIDRF

SEQ ID NO: 23888 - protein, 10 aa, Homo sapiens
  misc_feature: Table A; Target 23888; HLA-A*03:01; FOXE1; ENSG00000178919; TAA
AAYPGGIDRF

SEQ ID NO: 23889 - protein, 10 aa, Homo sapiens
  misc_feature: Table A; Target 23889; HLA-A*03:02; FOXE1; ENSG00000178919; TAA
AAYPGGIDRF

SEQ ID NO: 23890 - protein, 10 aa, Homo sapiens
  misc_feature: Table A; Target 23890; HLA-A*11:01; FOXE1; ENSG00000178919; TAA
AAYPGGIDRF

SEQ ID NO: 23891 - protein, 10 aa, Homo sapiens
  misc_feature: Table A; Target 23891; HLA-A*23:01; FOXE1; ENSG00000178919; TAA
AAYPGGIDRF

SEQ ID NO: 23892 - protein, 10 aa, Homo sapiens
  misc_feature: Table A; Target 23892; HLA-A*24:02; FOXE1; ENSG00000178919; TAA
AAYPGGIDRF

SEQ ID NO: 23893 - protein, 10 aa, Homo sapiens
  misc_feature: Table A; Target 23893; HLA-A*25:01; FOXE1; ENSG00000178919; TAA
AAYPGGIDRF

SEQ ID NO: 23894 - protein, 10 aa, Homo sapiens
  misc_feature: Table A; Target 23894; HLA-A*26:01; FOXE1; ENSG00000178919; TAA
AAYPGGIDRF

SEQ ID NO: 23895 - protein, 10 aa, Homo sapiens
  misc_feature: Table A; Target 23895; HLA-A*29:02; FOXE1; ENSG00000178919; TAA
AAYPGGIDRF

SEQ ID NO: 23896 - protein, 10 aa, Homo sapiens
  misc_feature: Table A; Target 23896; HLA-A*30:02; FOXE1; ENSG00000178919; TAA
AAYPGGIDRF

SEQ ID NO: 23897 - protein, 10 aa, Homo sapiens
  misc_feature: Table A; Target 23897; HLA-A*31:01; FOXE1; ENSG00000178919; TAA
AAYPGGIDRF

SEQ ID NO: 23898 - protein, 10 aa, Homo sapiens
  misc_feature: Table A; Target 23898; HLA-A*32:01; FOXE1; ENSG00000178919; TAA
AAYPGGIDRF

SEQ ID NO: 23899 - protein, 10 aa, Homo sapiens
  misc_feature: Table A; Target 23899; HLA-A*68:01; FOXE1; ENSG00000178919; TAA
AAYPGGIDRF

SEQ ID NO: 23900 - protein, 10 aa, Homo sapiens
  misc_feature: Table A; Target 23900; HLA-A*68:02; FOXE1; ENSG00000178919; TAA
AAYPGGIDRF

SEQ ID NO: 23901 - protein, 10 aa, Homo sapiens
  misc_feature: Table A; Target 23901; HLA-B*13:02; FOXE1; ENSG00000178919; TAA
AAYPGGIDRF

SEQ ID NO: 23902 - protein, 10 aa, Homo sapiens
  misc_feature: Table A; Target 23902; HLA-B*15:01; FOXE1; ENSG00000178919; TAA
AAYPGGIDRF

SEQ ID NO: 23903 - protein, 10 aa, Homo sapiens
  misc_feature: Table A; Target 23903; HLA-B*15:03; FOXE1; ENSG00000178919; TAA
AAYPGGIDRF

SEQ ID NO: 23904 - protein, 10 aa, Homo sapiens
  misc_feature: Table A; Target 23904; HLA-B*27:02; FOXE1; ENSG00000178919; TAA
AAYPGGIDRF

SEQ ID NO: 23905 - protein, 10 aa, Homo sapiens
  misc_feature: Table A; Target 23905; HLA-B*27:05; FOXE1; ENSG00000178919; TAA
AAYPGGIDRF

SEQ ID NO: 23906 - protein, 10 aa, Homo sapiens
  misc_feature: Table A; Target 23906; HLA-B*35:01; FOXE1; ENSG00000178919; TAA
AAYPGGIDRF

SEQ ID NO: 23907 - protein, 10 aa, Homo sapiens
  misc_feature: Table A; Target 23907; HLA-B*38:01; FOXE1; ENSG00000178919; TAA
AAYPGGIDRF

SEQ ID NO: 23908 - protein, 10 aa, Homo sapiens
  misc_feature: Table A; Target 23908; HLA-B*44:02; FOXE1; ENSG00000178919; TAA
AAYPGGIDRF

SEQ ID NO: 23909 - protein, 10 aa, Homo sapiens
  misc_feature: Table A; Target 23909; HLA-B*44:03; FOXE1; ENSG00000178919; TAA
AAYPGGIDRF

SEQ ID NO: 23910 - protein, 10 aa, Homo sapiens
  misc_feature: Table A; Target 23910; HLA-B*46:01; FOXE1; ENSG00000178919; TAA
AAYPGGIDRF

SEQ ID NO: 23911 - protein, 10 aa, Homo sapiens
  misc_feature: Table A; Target 23911; HLA-B*55:01; FOXE1; ENSG00000178919; TAA
AAYPGGIDRF

SEQ ID NO: 23912 - protein, 10 aa, Homo sapiens
  misc_feature: Table A; Target 23912; HLA-B*57:01; FOXE1; ENSG00000178919; TAA
AAYPGGIDRF

SEQ ID NO: 23913 - protein, 10 aa, Homo sapiens
  misc_feature: Table A; Target 23913; HLA-B*58:01; FOXE1; ENSG00000178919; TAA
AAYPGGIDRF

SEQ ID NO: 23914 - protein, 10 aa, Homo sapiens
  misc_feature: Table A; Target 23914; HLA-C*01:02; FOXE1; ENSG00000178919; TAA
AAYPGGIDRF

SEQ ID NO: 23915 - protein, 10 aa, Homo sapiens
  misc_feature: Table A; Target 23915; HLA-C*02:02; FOXE1; ENSG00000178919; TAA
AAYPGGIDRF

SEQ ID NO: 23916 - protein, 10 aa, Homo sapiens
  misc_feature: Table A; Target 23916; HLA-C*03:03; FOXE1; ENSG00000178919; TAA
AAYPGGIDRF

SEQ ID NO: 23917 - protein, 10 aa, Homo sapiens
  misc_feature: Table A; Target 23917; HLA-C*03:04; FOXE1; ENSG00000178919; TAA
AAYPGGIDRF

SEQ ID NO: 23918 - protein, 10 aa, Homo sapiens
  misc_feature: Table A; Target 23918; HLA-C*05:01; FOXE1; ENSG00000178919; TAA
AAYPGGIDRF

SEQ ID NO: 23919 - protein, 10 aa, Homo sapiens
  misc_feature: Table A; Target 23919; HLA-C*07:04; FOXE1; ENSG00000178919; TAA
AAYPGGIDRF

SEQ ID NO: 23920 - protein, 10 aa, Homo sapiens
  misc_feature: Table A; Target 23920; HLA-C*07:06; FOXE1; ENSG00000178919; TAA
AAYPGGIDRF

SEQ ID NO: 23921 - protein, 10 aa, Homo sapiens
  misc_feature: Table A; Target 23921; HLA-C*12:03; FOXE1; ENSG00000178919; TAA
AAYPGGIDRF

SEQ ID NO: 23922 - protein, 10 aa, Homo sapiens
  misc_feature: Table A; Target 23922; HLA-C*16:01; FOXE1; ENSG00000178919; TAA
AAYPGGIDRF

SEQ ID NO: 23923 - protein, 10 aa, Homo sapiens
  misc_feature: Table A; Target 23923; HLA-C*16:02; FOXE1; ENSG00000178919; TAA
AAYPGGIDRF

SEQ ID NO: 23924 - protein, 10 aa, Homo sapiens
  misc_feature: Table A; Target 23924; HLA-C*16:04; FOXE1; ENSG00000178919; TAA
AAYPGGIDRF

SEQ ID NO: 23925 - protein, 11 aa, Homo sapiens
  misc_feature: Table A; Target 23925; HLA-A*02:01; FOXE1; ENSG00000178919; TAA
AAYPGGIDRFV

SEQ ID NO: 23926 - protein, 11 aa, Homo sapiens
  misc_feature: Table A; Target 23926; HLA-A*68:02; FOXE1; ENSG00000178919; TAA
AAYPGGIDRFV

SEQ ID NO: 23927 - protein, 11 aa, Homo sapiens
  misc_feature: Table A; Target 23927; HLA-C*12:03; FOXE1; ENSG00000178919; TAA
AAYPGGIDRFV

SEQ ID NO: 23928 - protein, 9 aa, Homo sapiens
  misc_feature: Table A; Target 23928; HLA-B*07:02; FOXE1; ENSG00000178919; TAA
ACYNPGGQL

SEQ ID NO: 23929 - protein, 9 aa, Homo sapiens
  misc_feature: Table A; Target 23929; HLA-B*15:03; FOXE1; ENSG00000178919; TAA
ACYNPGGQL

SEQ ID NO: 23930 - protein, 9 aa, Homo sapiens
  misc_feature: Table A; Target 23930; HLA-B*39:01; FOXE1; ENSG00000178919; TAA
ACYNPGGQL

SEQ ID NO: 23931 - protein, 9 aa, Homo sapiens
  misc_feature: Table A; Target 23931; HLA-B*40:02; FOXE1; ENSG00000178919; TAA
ACYNPGGQL

SEQ ID NO: 23932 - protein, 9 aa, Homo sapiens
  misc_feature: Table A; Target 23932; HLA-C*01:02; FOXE1; ENSG00000178919; TAA
ACYNPGGQL

SEQ ID NO: 23933 - protein, 9 aa, Homo sapiens
  misc_feature: Table A; Target 23933; HLA-C*03:03; FOXE1; ENSG00000178919; TAA
ACYNPGGQL

SEQ ID NO: 23934 - protein, 9 aa, Homo sapiens
  misc_feature: Table A; Target 23934; HLA-C*03:04; FOXE1; ENSG00000178919; TAA
ACYNPGGQL

SEQ ID NO: 23935 - protein, 9 aa, Homo sapiens
  misc_feature: Table A; Target 23935; HLA-C*05:01; FOXE1; ENSG00000178919; TAA
ACYNPGGQL

SEQ ID NO: 23936 - protein, 9 aa, Homo sapiens
  misc_feature: Table A; Target 23936; HLA-C*07:02; FOXE1; ENSG00000178919; TAA
ACYNPGGQL

SEQ ID NO: 23937 - protein, 9 aa, Homo sapiens
  misc_feature: Table A; Target 23937; HLA-C*14:02; FOXE1; ENSG00000178919; TAA
ACYNPGGQL

SEQ ID NO: 23938 - protein, 9 aa, Homo sapiens
  misc_feature: Table A; Target 23938; HLA-C*16:01; FOXE1; ENSG00000178919; TAA
ACYNPGGQL

SEQ ID NO: 23939 - protein, 10 aa, Homo sapiens
  misc_feature: Table A; Target 23939; HLA-A*30:01; FOXE1; ENSG00000178919; TAA
AEDMFESGSF

SEQ ID NO: 23940 - protein, 10 aa, Homo sapiens
  misc_feature: Table A; Target 23940; HLA-B*27:02; FOXE1; ENSG00000178919; TAA
AEDMFESGSF

SEQ ID NO: 23941 - protein, 10 aa, Homo sapiens
  misc_feature: Table A; Target 23941; HLA-B*37:01; FOXE1; ENSG00000178919; TAA
AEDMFESGSF

SEQ ID NO: 23942 - protein, 10 aa, Homo sapiens
  misc_feature: Table A; Target 23942; HLA-B*40:01; FOXE1; ENSG00000178919; TAA
AEDMFESGSF

SEQ ID NO: 23943 - protein, 10 aa, Homo sapiens
  misc_feature: Table A; Target 23943; HLA-B*44:02; FOXE1; ENSG00000178919; TAA
AEDMFESGSF

SEQ ID NO: 23944 - protein, 10 aa, Homo sapiens
  misc_feature: Table A; Target 23944; HLA-B*44:03; FOXE1; ENSG00000178919; TAA
AEDMFESGSF

SEQ ID NO: 23945 - protein, 10 aa, Homo sapiens
  misc_feature: Table A; Target 23945; HLA-B*49:01; FOXE1; ENSG00000178919; TAA
AEDMFESGSF

SEQ ID NO: 23946 - protein, 10 aa, Homo sapiens
  misc_feature: Table A; Target 23946; HLA-C*16:04; FOXE1; ENSG00000178919; TAA
AEDMFESGSF

SEQ ID NO: 23947 - protein, 11 aa, Homo sapiens
  misc_feature: Table A; Target 23947; HLA-B*40:01; FOXE1; ENSG00000178919; TAA
AEDMFESGSFL

SEQ ID NO: 23948 - protein, 11 aa, Homo sapiens
  misc_feature: Table A; Target 23948; HLA-B*49:01; FOXE1; ENSG00000178919; TAA
AEDMFESGSFL

SEQ ID NO: 23949 - protein, 10 aa, Homo sapiens
  misc_feature: Table A; Target 23949; HLA-B*27:05; FOXE1; ENSG00000178919; TAA
AESGPPPPQP

SEQ ID NO: 23950 - protein, 10 aa, Homo sapiens
  misc_feature: Table A; Target 23950; HLA-B*39:01; FOXE1; ENSG00000178919; TAA
AESGPPPPQP

SEQ ID NO: 23951 - protein, 11 aa, Homo sapiens
  misc_feature: Table A; Target 23951; HLA-B*39:01; FOXE1; ENSG00000178919; TAA
AESGPPPPQPE

SEQ ID NO: 23952 - protein, 9 aa, Homo sapiens
  misc_feature: Table A; Target 23952; HLA-C*14:02; FOXE1; ENSG00000178919; TAA
AFASAGAPA

SEQ ID NO: 23953 - protein, 10 aa, Homo sapiens
  misc_feature: Table A; Target 23953; HLA-A*01:01; FOXE1; ENSG00000178919; TAA
AGAPATTTGY

SEQ ID NO: 23954 - protein, 10 aa, Homo sapiens
  misc_feature: Table A; Target 23954; HLA-A*25:01; FOXE1; ENSG00000178919; TAA
AGAPATTTGY

SEQ ID NO: 23955 - protein, 10 aa, Homo sapiens
  misc_feature: Table A; Target 23955; HLA-A*26:01; FOXE1; ENSG00000178919; TAA
AGAPATTTGY

SEQ ID NO: 23956 - protein, 10 aa, Homo sapiens
  misc_feature: Table A; Target 23956; HLA-A*29:02; FOXE1; ENSG00000178919; TAA
AGAPATTTGY

SEQ ID NO: 23957 - protein, 10 aa, Homo sapiens
  misc_feature: Table A; Target 23957; HLA-A*30:02; FOXE1; ENSG00000178919; TAA
AGAPATTTGY

SEQ ID NO: 23958 - protein, 10 aa, Homo sapiens
  misc_feature: Table A; Target 23958; HLA-A*32:01; FOXE1; ENSG00000178919; TAA
AGAPATTTGY

SEQ ID NO: 23959 - protein, 10 aa, Homo sapiens
  misc_feature: Table A; Target 23959; HLA-B*15:01; FOXE1; ENSG00000178919; TAA
AGAPATTTGY

SEQ ID NO: 23960 - protein, 10 aa, Homo sapiens
  misc_feature: Table A; Target 23960; HLA-B*15:03; FOXE1; ENSG00000178919; TAA
AGAPATTTGY

SEQ ID NO: 23961 - protein, 10 aa, Homo sapiens
  misc_feature: Table A; Target 23961; HLA-B*27:02; FOXE1; ENSG00000178919; TAA
AGAPATTTGY

SEQ ID NO: 23962 - protein, 10 aa, Homo sapiens
  misc_feature: Table A; Target 23962; HLA-B*27:05; FOXE1; ENSG00000178919; TAA
AGAPATTTGY

SEQ ID NO: 23963 - protein, 10 aa, Homo sapiens
  misc_feature: Table A; Target 23963; HLA-B*39:01; FOXE1; ENSG00000178919; TAA
AGAPATTTGY

SEQ ID NO: 23964 - protein, 10 aa, Homo sapiens
  misc_feature: Table A; Target 23964; HLA-B*44:02; FOXE1; ENSG00000178919; TAA
AGAPATTTGY

SEQ ID NO: 23965 - protein, 10 aa, Homo sapiens
  misc_feature: Table A; Target 23965; HLA-B*44:03; FOXE1; ENSG00000178919; TAA
AGAPATTTGY

SEQ ID NO: 23966 - protein, 10 aa, Homo sapiens
  misc_feature: Table A; Target 23966; HLA-B*46:01; FOXE1; ENSG00000178919; TAA
AGAPATTTGY

SEQ ID NO: 23967 - protein, 10 aa, Homo sapiens
  misc_feature: Table A; Target 23967; HLA-B*58:01; FOXE1; ENSG00000178919; TAA
AGAPATTTGY

SEQ ID NO: 23968 - protein, 10 aa, Homo sapiens
  misc_feature: Table A; Target 23968; HLA-C*01:02; FOXE1; ENSG00000178919; TAA
AGAPATTTGY

SEQ ID NO: 23969 - protein, 10 aa, Homo sapiens
  misc_feature: Table A; Target 23969; HLA-C*02:02; FOXE1; ENSG00000178919; TAA
AGAPATTTGY

SEQ ID NO: 23970 - protein, 10 aa, Homo sapiens
  misc_feature: Table A; Target 23970; HLA-C*04:01; FOXE1; ENSG00000178919; TAA
AGAPATTTGY

SEQ ID NO: 23971 - protein, 10 aa, Homo sapiens
  misc_feature: Table A; Target 23971; HLA-C*07:01; FOXE1; ENSG00000178919; TAA
AGAPATTTGY

SEQ ID NO: 23972 - protein, 10 aa, Homo sapiens
  misc_feature: Table A; Target 23972; HLA-C*07:04; FOXE1; ENSG00000178919; TAA
AGAPATTTGY

SEQ ID NO: 23973 - protein, 10 aa, Homo sapiens
  misc_feature: Table A; Target 23973; HLA-C*12:03; FOXE1; ENSG00000178919; TAA
AGAPATTTGY

SEQ ID NO: 23974 - protein, 10 aa, Homo sapiens
  misc_feature: Table A; Target 23974; HLA-C*14:02; FOXE1; ENSG00000178919; TAA
AGAPATTTGY

SEQ ID NO: 23975 - protein, 10 aa, Homo sapiens
  misc_feature: Table A; Target 23975; HLA-C*16:01; FOXE1; ENSG00000178919; TAA
AGAPATTTGY

SEQ ID NO: 23976 - protein, 10 aa, Homo sapiens
  misc_feature: Table A; Target 23976; HLA-C*16:02; FOXE1; ENSG00000178919; TAA
AGAPATTTGY

SEQ ID NO: 23977 - protein, 10 aa, Homo sapiens
  misc_feature: Table A; Target 23977; HLA-C*16:04; FOXE1; ENSG00000178919; TAA
AGAPATTTGY

SEQ ID NO: 23978 - protein, 11 aa, Homo sapiens
  misc_feature: Table A; Target 23978; HLA-C*04:01; FOXE1; ENSG00000178919; TAA
AGAPATTTGYQ

SEQ ID NO: 23979 - protein, 11 aa, Homo sapiens
  misc_feature: Table A; Target 23979; HLA-C*06:02; FOXE1; ENSG00000178919; TAA
AGAPATTTGYQ

SEQ ID NO: 23980 - protein, 11 aa, Homo sapiens
  misc_feature: Table A; Target 23980; HLA-C*07:01; FOXE1; ENSG00000178919; TAA
AGAPATTTGYQ

SEQ ID NO: 23981 - protein, 11 aa, Homo sapiens
  misc_feature: Table A; Target 23981; HLA-C*07:02; FOXE1; ENSG00000178919; TAA
AGAPATTTGYQ

SEQ ID NO: 23982 - protein, 9 aa, Homo sapiens
  misc_feature: Table A; Target 23982; HLA-C*01:02; FOXE1; ENSG00000178919; TAA
AGPDGAYPQ

SEQ ID NO: 23983 - protein, 11 aa, Homo sapiens
  misc_feature: Table A; Target 23983; HLA-C*06:02; FOXE1; ENSG00000178919; TAA
AGRLAGPASPP

SEQ ID NO: 23984 - protein, 9 aa, Homo sapiens
  misc_feature: Table A; Target 23984; HLA-A*30:02; FOXE1; ENSG00000178919; TAA
AGRPGKGNY

SEQ ID NO: 23985 - protein, 10 aa, Homo sapiens
  misc_feature: Table A; Target 23985; HLA-B*57:01; FOXE1; ENSG00000178919; TAA
AGRPGKGNYW

SEQ ID NO: 23986 - protein, 9 aa, Homo sapiens
  misc_feature: Table A; Target 23986; HLA-A*32:01; FOXE1; ENSG00000178919; TAA
AGSAIFAAA

SEQ ID NO: 23987 - protein, 9 aa, Homo sapiens
  misc_feature: Table A; Target 23987; HLA-B*27:05; FOXE1; ENSG00000178919; TAA
AGSAIFAAA

SEQ ID NO: 23988 - protein, 9 aa, Homo sapiens
  misc_feature: Table A; Target 23988; HLA-B*54:01; FOXE1; ENSG00000178919; TAA
AGSAIFAAA

SEQ ID NO: 23989 - protein, 9 aa, Homo sapiens
  misc_feature: Table A; Target 23989; HLA-B*56:01; FOXE1; ENSG00000178919; TAA
AGSAIFAAA

SEQ ID NO: 23990 - protein, 9 aa, Homo sapiens
  misc_feature: Table A; Target 23990; HLA-C*01:02; FOXE1; ENSG00000178919; TAA
AGSAIFAAA

SEQ ID NO: 23991 - protein, 9 aa, Homo sapiens
  misc_feature: Table A; Target 23991; HLA-C*02:02; FOXE1; ENSG00000178919; TAA
AGSAIFAAA

SEQ ID NO: 23992 - protein, 9 aa, Homo sapiens
  misc_feature: Table A; Target 23992; HLA-C*03:03; FOXE1; ENSG00000178919; TAA
AGSAIFAAA

SEQ ID NO: 23993 - protein, 9 aa, Homo sapiens
  misc_feature: Table A; Target 23993; HLA-C*03:04; FOXE1; ENSG00000178919; TAA
AGSAIFAAA

SEQ ID NO: 23994 - protein, 9 aa, Homo sapiens
  misc_feature: Table A; Target 23994; HLA-C*16:04; FOXE1; ENSG00000178919; TAA
AGSAIFAAA

SEQ ID NO: 23995 - protein, 10 aa, Homo sapiens
  misc_feature: Table A; Target 23995; HLA-A*31:01; FOXE1; ENSG00000178919; TAA
AGVPGEATGR

SEQ ID NO: 23996 - protein, 10 aa, Homo sapiens
  misc_feature: Table A; Target 23996; HLA-A*68:01; FOXE1; ENSG00000178919; TAA
AGVPGEATGR

SEQ ID NO: 23997 - protein, 10 aa, Homo sapiens
  misc_feature: Table A; Target 23997; HLA-B*27:02; FOXE1; ENSG00000178919; TAA
AGVPGEATGR

SEQ ID NO: 23998 - protein, 10 aa, Homo sapiens
  misc_feature: Table A; Target 23998; HLA-C*07:06; FOXE1; ENSG00000178919; TAA
AGVPGEATGR

SEQ ID NO: 23999 - protein, 8 aa, Homo sapiens
  misc_feature: Table A; Target 23999; HLA-B*08:01; FOXE1; ENSG00000178919; TAA
AGYAPPSL

SEQ ID NO: 24000 - protein, 8 aa, Homo sapiens
  misc_feature: Table A; Target 24000; HLA-B*13:02; FOXE1; ENSG00000178919; TAA
AGYAPPSL

SEQ ID NO: 24001 - protein, 8 aa, Homo sapiens
  misc_feature: Table A; Target 24001; HLA-B*15:03; FOXE1; ENSG00000178919; TAA
AGYAPPSL

SEQ ID NO: 24002 - protein, 8 aa, Homo sapiens
  misc_feature: Table A; Target 24002; HLA-B*37:01; FOXE1; ENSG00000178919; TAA
AGYAPPSL

SEQ ID NO: 24003 - protein, 8 aa, Homo sapiens
  misc_feature: Table A; Target 24003; HLA-B*39:01; FOXE1; ENSG00000178919; TAA
AGYAPPSL

SEQ ID NO: 24004 - protein, 8 aa, Homo sapiens
  misc_feature: Table A; Target 24004; HLA-B*46:01; FOXE1; ENSG00000178919; TAA
AGYAPPSL

SEQ ID NO: 24005 - protein, 8 aa, Homo sapiens
  misc_feature: Table A; Target 24005; HLA-B*51:01; FOXE1; ENSG00000178919; TAA
AGYAPPSL

SEQ ID NO: 24006 - protein, 8 aa, Homo sapiens
  misc_feature: Table A; Target 24006; HLA-B*58:01; FOXE1; ENSG00000178919; TAA
AGYAPPSL

SEQ ID NO: 24007 - protein, 8 aa, Homo sapiens
  misc_feature: Table A; Target 24007; HLA-C*02:02; FOXE1; ENSG00000178919; TAA
AGYAPPSL

SEQ ID NO: 24008 - protein, 8 aa, Homo sapiens
  misc_feature: Table A; Target 24008; HLA-C*03:03; FOXE1; ENSG00000178919; TAA
AGYAPPSL

SEQ ID NO: 24009 - protein, 8 aa, Homo sapiens
  misc_feature: Table A; Target 24009; HLA-C*03:04; FOXE1; ENSG00000178919; TAA
AGYAPPSL

SEQ ID NO: 24010 - protein, 8 aa, Homo sapiens
  misc_feature: Table A; Target 24010; HLA-C*05:01; FOXE1; ENSG00000178919; TAA
AGYAPPSL

SEQ ID NO: 24011 - protein, 8 aa, Homo sapiens
  misc_feature: Table A; Target 24011; HLA-C*06:02; FOXE1; ENSG00000178919; TAA
AGYAPPSL

SEQ ID NO: 24012 - protein, 8 aa, Homo sapiens
  misc_feature: Table A; Target 24012; HLA-C*12:03; FOXE1; ENSG00000178919; TAA
AGYAPPSL

SEQ ID NO: 24013 - protein, 8 aa, Homo sapiens
  misc_feature: Table A; Target 24013; HLA-C*16:01; FOXE1; ENSG00000178919; TAA
AGYAPPSL

SEQ ID NO: 24014 - protein, 8 aa, Homo sapiens
  misc_feature: Table A; Target 24014; HLA-C*16:02; FOXE1; ENSG00000178919; TAA
AGYAPPSL

SEQ ID NO: 24015 - protein, 8 aa, Homo sapiens
  misc_feature: Table A; Target 24015; HLA-C*16:04; FOXE1; ENSG00000178919; TAA
AGYAPPSL

SEQ ID NO: 24016 - protein, 9 aa, Homo sapiens
  misc_feature: Table A; Target 24016; HLA-B*56:01; FOXE1; ENSG00000178919; TAA
AGYAPPSLA

SEQ ID NO: 24017 - protein, 9 aa, Homo sapiens
  misc_feature: Table A; Target 24017; HLA-C*12:03; FOXE1; ENSG00000178919; TAA
AGYAPPSLA

SEQ ID NO: 24018 - protein, 10 aa, Homo sapiens
  misc_feature: Table A; Target 24018; HLA-B*56:01; FOXE1; ENSG00000178919; TAA
AGYAPPSLAA

SEQ ID NO: 24019 - protein, 8 aa, Homo sapiens
  misc_feature: Table A; Target 24019; HLA-C*16:01; FOXE1; ENSG00000178919; TAA
AIAHAPER

SEQ ID NO: 24020 - protein, 9 aa, Homo sapiens
  misc_feature: Table A; Target 24020; HLA-A*03:01; FOXE1; ENSG00000178919; TAA
AIFAAAGRL

SEQ ID NO: 24021 - protein, 9 aa, Homo sapiens
  misc_feature: Table A; Target 24021; HLA-B*07:02; FOXE1; ENSG00000178919; TAA
AIFAAAGRL

SEQ ID NO: 24022 - protein, 9 aa, Homo sapiens
  misc_feature: Table A; Target 24022; HLA-B*15:03; FOXE1; ENSG00000178919; TAA
AIFAAAGRL

SEQ ID NO: 24023 - protein, 9 aa, Homo sapiens
  misc_feature: Table A; Target 24023; HLA-B*27:05; FOXE1; ENSG00000178919; TAA
AIFAAAGRL

SEQ ID NO: 24024 - protein, 9 aa, Homo sapiens
  misc_feature: Table A; Target 24024; HLA-C*01:02; FOXE1; ENSG00000178919; TAA
AIFAAAGRL

SEQ ID NO: 24025 - protein, 9 aa, Homo sapiens
  misc_feature: Table A; Target 24025; HLA-C*07:02; FOXE1; ENSG00000178919; TAA
AIFAAAGRL

SEQ ID NO: 24026 - protein, 10 aa, Homo sapiens
  misc_feature: Table A; Target 24026; HLA-B*56:01; FOXE1; ENSG00000178919; TAA
AIFAAAGRLA

SEQ ID NO: 24027 - protein, 9 aa, Homo sapiens
  misc_feature: Table A; Target 24027; HLA-A*02:01; FOXE1; ENSG00000178919; TAA
AIFPGAVPA

SEQ ID NO: 24028 - protein, 9 aa, Homo sapiens
  misc_feature: Table A; Target 24028; HLA-A*02:03; FOXE1; ENSG00000178919; TAA
AIFPGAVPA

SEQ ID NO: 24029 - protein, 9 aa, Homo sapiens
  misc_feature: Table A; Target 24029; HLA-A*02:04; FOXE1; ENSG00000178919; TAA
AIFPGAVPA

SEQ ID NO: 24030 - protein, 9 aa, Homo sapiens
  misc_feature: Table A; Target 24030; HLA-A*02:07; FOXE1; ENSG00000178919; TAA
AIFPGAVPA

SEQ ID NO: 24031 - protein, 9 aa, Homo sapiens
  misc_feature: Table A; Target 24031; HLA-A*03:01; FOXE1; ENSG00000178919; TAA
AIFPGAVPA

SEQ ID NO: 24032 - protein, 9 aa, Homo sapiens
  misc_feature: Table A; Target 24032; HLA-A*03:02; FOXE1; ENSG00000178919; TAA
AIFPGAVPA

SEQ ID NO: 24033 - protein, 9 aa, Homo sapiens
  misc_feature: Table A; Target 24033; HLA-A*31:01; FOXE1; ENSG00000178919; TAA
AIFPGAVPA

SEQ ID NO: 24034 - protein, 9 aa, Homo sapiens
  misc_feature: Table A; Target 24034; HLA-A*32:01; FOXE1; ENSG00000178919; TAA
AIFPGAVPA

SEQ ID NO: 24035 - protein, 9 aa, Homo sapiens
  misc_feature: Table A; Target 24035; HLA-B*13:02; FOXE1; ENSG00000178919; TAA
AIFPGAVPA

SEQ ID NO: 24036 - protein, 9 aa, Homo sapiens
  misc_feature: Table A; Target 24036; HLA-B*15:01; FOXE1; ENSG00000178919; TAA
AIFPGAVPA

SEQ ID NO: 24037 - protein, 9 aa, Homo sapiens
  misc_feature: Table A; Target 24037; HLA-B*27:05; FOXE1; ENSG00000178919; TAA
AIFPGAVPA

SEQ ID NO: 24038 - protein, 9 aa, Homo sapiens
  misc_feature: Table A; Target 24038; HLA-B*37:01; FOXE1; ENSG00000178919; TAA
AIFPGAVPA

SEQ ID NO: 24039 - protein, 9 aa, Homo sapiens
  misc_feature: Table A; Target 24039; HLA-B*40:02; FOXE1; ENSG00000178919; TAA
AIFPGAVPA

SEQ ID NO: 24040 - protein, 9 aa, Homo sapiens
  misc_feature: Table A; Target 24040; HLA-B*46:01; FOXE1; ENSG00000178919; TAA
AIFPGAVPA

SEQ ID NO: 24041 - protein, 9 aa, Homo sapiens
  misc_feature: Table A; Target 24041; HLA-B*54:01; FOXE1; ENSG00000178919; TAA
AIFPGAVPA

SEQ ID NO: 24042 - protein, 9 aa, Homo sapiens
  misc_feature: Table A; Target 24042; HLA-B*55:01; FOXE1; ENSG00000178919; TAA
AIFPGAVPA

SEQ ID NO: 24043 - protein, 9 aa, Homo sapiens
  misc_feature: Table A; Target 24043; HLA-B*56:01; FOXE1; ENSG00000178919; TAA
AIFPGAVPA

SEQ ID NO: 24044 - protein, 9 aa, Homo sapiens
  misc_feature: Table A; Target 24044; HLA-C*01:02; FOXE1; ENSG00000178919; TAA
AIFPGAVPA

SEQ ID NO: 24045 - protein, 9 aa, Homo sapiens
  misc_feature: Table A; Target 24045; HLA-C*02:02; FOXE1; ENSG00000178919; TAA
AIFPGAVPA

SEQ ID NO: 24046 - protein, 9 aa, Homo sapiens
  misc_feature: Table A; Target 24046; HLA-C*03:03; FOXE1; ENSG00000178919; TAA
AIFPGAVPA

SEQ ID NO: 24047 - protein, 9 aa, Homo sapiens
  misc_feature: Table A; Target 24047; HLA-C*03:04; FOXE1; ENSG00000178919; TAA
AIFPGAVPA

SEQ ID NO: 24048 - protein, 9 aa, Homo sapiens
  misc_feature: Table A; Target 24048; HLA-C*06:02; FOXE1; ENSG00000178919; TAA
AIFPGAVPA

SEQ ID NO: 24049 - protein, 9 aa, Homo sapiens
  misc_feature: Table A; Target 24049; HLA-C*07:04; FOXE1; ENSG00000178919; TAA
AIFPGAVPA

SEQ ID NO: 24050 - protein, 9 aa, Homo sapiens
  misc_feature: Table A; Target 24050; HLA-C*12:03; FOXE1; ENSG00000178919; TAA
AIFPGAVPA

SEQ ID NO: 24051 - protein, 9 aa, Homo sapiens
  misc_feature: Table A; Target 24051; HLA-C*14:02; FOXE1; ENSG00000178919; TAA
AIFPGAVPA

SEQ ID NO: 24052 - protein, 9 aa, Homo sapiens
  misc_feature: Table A; Target 24052; HLA-C*16:04; FOXE1; ENSG00000178919; TAA
AIFPGAVPA

SEQ ID NO: 24053 - protein, 10 aa, Homo sapiens
  misc_feature: Table A; Target 24053; HLA-A*02:01; FOXE1; ENSG00000178919; TAA
AIFPGAVPAA

SEQ ID NO: 24054 - protein, 10 aa, Homo sapiens
  misc_feature: Table A; Target 24054; HLA-A*02:03; FOXE1; ENSG00000178919; TAA
AIFPGAVPAA

SEQ ID NO: 24055 - protein, 10 aa, Homo sapiens
  misc_feature: Table A; Target 24055; HLA-A*02:04; FOXE1; ENSG00000178919; TAA
AIFPGAVPAA

SEQ ID NO: 24056 - protein, 10 aa, Homo sapiens
  misc_feature: Table A; Target 24056; HLA-A*02:07; FOXE1; ENSG00000178919; TAA
AIFPGAVPAA

SEQ ID NO: 24057 - protein, 10 aa, Homo sapiens
  misc_feature: Table A; Target 24057; HLA-A*03:01; FOXE1; ENSG00000178919; TAA
AIFPGAVPAA

SEQ ID NO: 24058 - protein, 10 aa, Homo sapiens
  misc_feature: Table A; Target 24058; HLA-A*03:02; FOXE1; ENSG00000178919; TAA
AIFPGAVPAA

SEQ ID NO: 24059 - protein, 10 aa, Homo sapiens
  misc_feature: Table A; Target 24059; HLA-A*11:01; FOXE1; ENSG00000178919; TAA
AIFPGAVPAA

SEQ ID NO: 24060 - protein, 10 aa, Homo sapiens
  misc_feature: Table A; Target 24060; HLA-A*25:01; FOXE1; ENSG00000178919; TAA
AIFPGAVPAA

SEQ ID NO: 24061 - protein, 10 aa, Homo sapiens
  misc_feature: Table A; Target 24061; HLA-A*26:01; FOXE1; ENSG00000178919; TAA
AIFPGAVPAA

SEQ ID NO: 24062 - protein, 10 aa, Homo sapiens
  misc_feature: Table A; Target 24062; HLA-A*32:01; FOXE1; ENSG00000178919; TAA
AIFPGAVPAA

SEQ ID NO: 24063 - protein, 10 aa, Homo sapiens
  misc_feature: Table A; Target 24063; HLA-A*68:02; FOXE1; ENSG00000178919; TAA
AIFPGAVPAA

SEQ ID NO: 24064 - protein, 10 aa, Homo sapiens
  misc_feature: Table A; Target 24064; HLA-B*13:02; FOXE1; ENSG00000178919; TAA
AIFPGAVPAA

SEQ ID NO: 24065 - protein, 10 aa, Homo sapiens
  misc_feature: Table A; Target 24065; HLA-B*15:01; FOXE1; ENSG00000178919; TAA
AIFPGAVPAA

SEQ ID NO: 24066 - protein, 10 aa, Homo sapiens
  misc_feature: Table A; Target 24066; HLA-B*46:01; FOXE1; ENSG00000178919; TAA
AIFPGAVPAA

SEQ ID NO: 24067 - protein, 10 aa, Homo sapiens
  misc_feature: Table A; Target 24067; HLA-B*54:01; FOXE1; ENSG00000178919; TAA
AIFPGAVPAA

SEQ ID NO: 24068 - protein, 10 aa, Homo sapiens
  misc_feature: Table A; Target 24068; HLA-B*55:01; FOXE1; ENSG00000178919; TAA
AIFPGAVPAA

SEQ ID NO: 24069 - protein, 10 aa, Homo sapiens
  misc_feature: Table A; Target 24069; HLA-B*56:01; FOXE1; ENSG00000178919; TAA
AIFPGAVPAA

SEQ ID NO: 24070 - protein, 10 aa, Homo sapiens
  misc_feature: Table A; Target 24070; HLA-C*01:02; FOXE1; ENSG00000178919; TAA
AIFPGAVPAA

SEQ ID NO: 24071 - protein, 10 aa, Homo sapiens
  misc_feature: Table A; Target 24071; HLA-C*02:02; FOXE1; ENSG00000178919; TAA
AIFPGAVPAA

SEQ ID NO: 24072 - protein, 10 aa, Homo sapiens
  misc_feature: Table A; Target 24072; HLA-C*06:02; FOXE1; ENSG00000178919; TAA
AIFPGAVPAA

SEQ ID NO: 24073 - protein, 11 aa, Homo sapiens
  misc_feature: Table A; Target 24073; HLA-A*02:03; FOXE1; ENSG00000178919; TAA
AIFPGAVPAAR

SEQ ID NO: 24074 - protein, 11 aa, Homo sapiens
  misc_feature: Table A; Target 24074; HLA-A*03:01; FOXE1; ENSG00000178919; TAA
AIFPGAVPAAR

SEQ ID NO: 24075 - protein, 11 aa, Homo sapiens
  misc_feature: Table A; Target 24075; HLA-A*03:02; FOXE1; ENSG00000178919; TAA
AIFPGAVPAAR

SEQ ID NO: 24076 - protein, 11 aa, Homo sapiens
  misc_feature: Table A; Target 24076; HLA-A*11:01; FOXE1; ENSG00000178919; TAA
AIFPGAVPAAR

SEQ ID NO: 24077 - protein, 11 aa, Homo sapiens
  misc_feature: Table A; Target 24077; HLA-A*29:02; FOXE1; ENSG00000178919; TAA
AIFPGAVPAAR

SEQ ID NO: 24078 - protein, 11 aa, Homo sapiens
  misc_feature: Table A; Target 24078; HLA-A*30:02; FOXE1; ENSG00000178919; TAA
AIFPGAVPAAR

SEQ ID NO: 24079 - protein, 11 aa, Homo sapiens
  misc_feature: Table A; Target 24079; HLA-A*31:01; FOXE1; ENSG00000178919; TAA
AIFPGAVPAAR

SEQ ID NO: 24080 - protein, 11 aa, Homo sapiens
  misc_feature: Table A; Target 24080; HLA-A*32:01; FOXE1; ENSG00000178919; TAA
AIFPGAVPAAR

SEQ ID NO: 24081 - protein, 11 aa, Homo sapiens
  misc_feature: Table A; Target 24081; HLA-A*68:01; FOXE1; ENSG00000178919; TAA
AIFPGAVPAAR

SEQ ID NO: 24082 - protein, 11 aa, Homo sapiens
  misc_feature: Table A; Target 24082; HLA-A*68:02; FOXE1; ENSG00000178919; TAA
AIFPGAVPAAR

SEQ ID NO: 24083 - protein, 11 aa, Homo sapiens
  misc_feature: Table A; Target 24083; HLA-C*02:02; FOXE1; ENSG00000178919; TAA
AIFPGAVPAAR

SEQ ID NO: 24084 - protein, 11 aa, Homo sapiens
  misc_feature: Table A; Target 24084; HLA-C*07:06; FOXE1; ENSG00000178919; TAA
AIFPGAVPAAR

SEQ ID NO: 24085 - protein, 9 aa, Homo sapiens
  misc_feature: Table A; Target 24085; HLA-A*01:01; FOXE1; ENSG00000178919; TAA
ALDPNAEDM

SEQ ID NO: 24086 - protein, 9 aa, Homo sapiens
  misc_feature: Table A; Target 24086; HLA-A*02:07; FOXE1; ENSG00000178919; TAA
ALDPNAEDM

SEQ ID NO: 24087 - protein, 9 aa, Homo sapiens
  misc_feature: Table A; Target 24087; HLA-B*39:01; FOXE1; ENSG00000178919; TAA
ALDPNAEDM

SEQ ID NO: 24088 - protein, 9 aa, Homo sapiens
  misc_feature: Table A; Target 24088; HLA-B*55:01; FOXE1; ENSG00000178919; TAA
ALDPNAEDM

SEQ ID NO: 24089 - protein, 9 aa, Homo sapiens
  misc_feature: Table A; Target 24089; HLA-C*04:01; FOXE1; ENSG00000178919; TAA
ALDPNAEDM

SEQ ID NO: 24090 - protein, 9 aa, Homo sapiens
  misc_feature: Table A; Target 24090; HLA-C*05:01; FOXE1; ENSG00000178919; TAA
ALDPNAEDM

SEQ ID NO: 24091 - protein, 10 aa, Homo sapiens
  misc_feature: Table A; Target 24091; HLA-A*02:07; FOXE1; ENSG00000178919; TAA
ALDPNAEDMF

SEQ ID NO: 24092 - protein, 10 aa, Homo sapiens
  misc_feature: Table A; Target 24092; HLA-B*38:01; FOXE1; ENSG00000178919; TAA
ALDPNAEDMF

SEQ ID NO: 24093 - protein, 10 aa, Homo sapiens
  misc_feature: Table A; Target 24093; HLA-C*04:01; FOXE1; ENSG00000178919; TAA
ALDPNAEDMF

SEQ ID NO: 24094 - protein, 10 aa, Homo sapiens
  misc_feature: Table A; Target 24094; HLA-C*05:01; FOXE1; ENSG00000178919; TAA
ALDPNAEDMF

SEQ ID NO: 24095 - protein, 9 aa, Homo sapiens
  misc_feature: Table A; Target 24095; HLA-A*03:01; FOXE1; ENSG00000178919; TAA
ALIAMAIAH

SEQ ID NO: 24096 - protein, 9 aa, Homo sapiens
  misc_feature: Table A; Target 24096; HLA-A*03:02; FOXE1; ENSG00000178919; TAA
ALIAMAIAH

SEQ ID NO: 24097 - protein, 9 aa, Homo sapiens
  misc_feature: Table A; Target 24097; HLA-A*11:01; FOXE1; ENSG00000178919; TAA
ALIAMAIAH

SEQ ID NO: 24098 - protein, 9 aa, Homo sapiens
  misc_feature: Table A; Target 24098; HLA-A*30:02; FOXE1; ENSG00000178919; TAA
ALIAMAIAH

SEQ ID NO: 24099 - protein, 9 aa, Homo sapiens
  misc_feature: Table A; Target 24099; HLA-B*15:01; FOXE1; ENSG00000178919; TAA
ALIAMAIAH

SEQ ID NO: 24100 - protein, 9 aa, Homo sapiens
  misc_feature: Table A; Target 24100; HLA-B*46:01; FOXE1; ENSG00000178919; TAA
ALIAMAIAH

SEQ ID NO: 24101 - protein, 9 aa, Homo sapiens
  misc_feature: Table A; Target 24101; HLA-C*01:02; FOXE1; ENSG00000178919; TAA
ALIAMAIAH

SEQ ID NO: 24102 - protein, 10 aa, Homo sapiens
  misc_feature: Table A; Target 24102; HLA-A*02:01; FOXE1; ENSG00000178919; TAA
ALIAMAIAHA

SEQ ID NO: 24103 - protein, 10 aa, Homo sapiens
  misc_feature: Table A; Target 24103; HLA-A*02:03; FOXE1; ENSG00000178919; TAA
ALIAMAIAHA

SEQ ID NO: 24104 - protein, 10 aa, Homo sapiens
  misc_feature: Table A; Target 24104; HLA-A*26:01; FOXE1; ENSG00000178919; TAA
ANPSAYAAAY

SEQ ID NO: 24105 - protein, 10 aa, Homo sapiens
  misc_feature: Table A; Target 24105; HLA-A*29:02; FOXE1; ENSG00000178919; TAA
ANPSAYAAAY

SEQ ID NO: 24106 - protein, 10 aa, Homo sapiens
  misc_feature: Table A; Target 24106; HLA-A*30:02; FOXE1; ENSG00000178919; TAA
ANPSAYAAAY

SEQ ID NO: 24107 - protein, 8 aa, Homo sapiens
  misc_feature: Table A; Target 24107; HLA-B*07:02; FOXE1; ENSG00000178919; TAA
APATTTGY

SEQ ID NO: 24108 - protein, 8 aa, Homo sapiens
  misc_feature: Table A; Target 24108; HLA-B*15:01; FOXE1; ENSG00000178919; TAA
APATTTGY

SEQ ID NO: 24109 - protein, 8 aa, Homo sapiens
  misc_feature: Table A; Target 24109; HLA-B*15:03; FOXE1; ENSG00000178919; TAA
APATTTGY

SEQ ID NO: 24110 - protein, 8 aa, Homo sapiens
  misc_feature: Table A; Target 24110; HLA-B*35:01; FOXE1; ENSG00000178919; TAA
APATTTGY

SEQ ID NO: 24111 - protein, 8 aa, Homo sapiens
  misc_feature: Table A; Target 24111; HLA-B*55:01; FOXE1; ENSG00000178919; TAA
APATTTGY

SEQ ID NO: 24112 - protein, 8 aa, Homo sapiens
  misc_feature: Table A; Target 24112; HLA-B*56:01; FOXE1; ENSG00000178919; TAA
APATTTGY

SEQ ID NO: 24113 - protein, 8 aa, Homo sapiens
  misc_feature: Table A; Target 24113; HLA-C*07:02; FOXE1; ENSG00000178919; TAA
APATTTGY

SEQ ID NO: 24114 - protein, 10 aa, Homo sapiens
  misc_feature: Table A; Target 24114; HLA-B*55:01; FOXE1; ENSG00000178919; TAA
APATTTGYQP

SEQ ID NO: 24115 - protein, 10 aa, Homo sapiens
  misc_feature: Table A; Target 24115; HLA-B*56:01; FOXE1; ENSG00000178919; TAA
APATTTGYQP

SEQ ID NO: 24116 - protein, 10 aa, Homo sapiens
  misc_feature: Table A; Target 24116; HLA-C*04:01; FOXE1; ENSG00000178919; TAA
APATTTGYQP

SEQ ID NO: 24117 - protein, 11 aa, Homo sapiens
  misc_feature: Table A; Target 24117; HLA-B*54:01; FOXE1; ENSG00000178919; TAA
APATTTGYQPA

SEQ ID NO: 24118 - protein, 11 aa, Homo sapiens
  misc_feature: Table A; Target 24118; HLA-B*55:01; FOXE1; ENSG00000178919; TAA
APATTTGYQPA

SEQ ID NO: 24119 - protein, 11 aa, Homo sapiens
  misc_feature: Table A; Target 24119; HLA-B*56:01; FOXE1; ENSG00000178919; TAA
APATTTGYQPA

SEQ ID NO: 24120 - protein, 8 aa, Homo sapiens
  misc_feature: Table A; Target 24120; HLA-B*07:02; FOXE1; ENSG00000178919; TAA
APERRLTL

SEQ ID NO: 24121 - protein, 8 aa, Homo sapiens
  misc_feature: Table A; Target 24121; HLA-B*08:01; FOXE1; ENSG00000178919; TAA
APERRLTL

SEQ ID NO: 24122 - protein, 8 aa, Homo sapiens
  misc_feature: Table A; Target 24122; HLA-C*07:02; FOXE1; ENSG00000178919; TAA
APERRLTL

SEQ ID NO: 24123 - protein, 9 aa, Homo sapiens
  misc_feature: Table A; Target 24123; HLA-B*54:01; FOXE1; ENSG00000178919; TAA
APPPVYYPA

SEQ ID NO: 24124 - protein, 9 aa, Homo sapiens
  misc_feature: Table A; Target 24124; HLA-B*55:01; FOXE1; ENSG00000178919; TAA
APPPVYYPA

SEQ ID NO: 24125 - protein, 9 aa, Homo sapiens
  misc_feature: Table A; Target 24125; HLA-B*56:01; FOXE1; ENSG00000178919; TAA
APPPVYYPA

SEQ ID NO: 24126 - protein, 10 aa, Homo sapiens
  misc_feature: Table A; Target 24126; HLA-A*02:07; FOXE1; ENSG00000178919; TAA
APPPVYYPAA

SEQ ID NO: 24127 - protein, 10 aa, Homo sapiens
  misc_feature: Table A; Target 24127; HLA-B*54:01; FOXE1; ENSG00000178919; TAA
APPPVYYPAA

SEQ ID NO: 24128 - protein, 10 aa, Homo sapiens
  misc_feature: Table A; Target 24128; HLA-B*56:01; FOXE1; ENSG00000178919; TAA
APPPVYYPAA

SEQ ID NO: 24129 - protein, 9 aa, Homo sapiens
  misc_feature: Table A; Target 24129; HLA-B*07:02; FOXE1; ENSG00000178919; TAA
APSGPGGSC

SEQ ID NO: 24130 - protein, 9 aa, Homo sapiens
  misc_feature: Table A; Target 24130; HLA-B*56:01; FOXE1; ENSG00000178919; TAA
APSGPGGSC

SEQ ID NO: 24131 - protein, 9 aa, Homo sapiens
  misc_feature: Table A; Target 24131; HLA-C*07:02; FOXE1; ENSG00000178919; TAA
APSGPGGSC

SEQ ID NO: 24132 - protein, 10 aa, Homo sapiens
  misc_feature: Table A; Target 24132; HLA-B*56:01; FOXE1; ENSG00000178919; TAA
APSGPGGSCA

SEQ ID NO: 24133 - protein, 11 aa, Homo sapiens
  misc_feature: Table A; Target 24133; HLA-B*07:02; FOXE1; ENSG00000178919; TAA
APSGPGGSCAF

SEQ ID NO: 24134 - protein, 11 aa, Homo sapiens
  misc_feature: Table A; Target 24134; HLA-B*35:01; FOXE1; ENSG00000178919; TAA
APSGPGGSCAF

SEQ ID NO: 24135 - protein, 11 aa, Homo sapiens
  misc_feature: Table A; Target 24135; HLA-B*35:03; FOXE1; ENSG00000178919; TAA
APSGPGGSCAF

SEQ ID NO: 24136 - protein, 11 aa, Homo sapiens
  misc_feature: Table A; Target 24136; HLA-B*39:01; FOXE1; ENSG00000178919; TAA
APSGPGGSCAF

SEQ ID NO: 24137 - protein, 11 aa, Homo sapiens
  misc_feature: Table A; Target 24137; HLA-C*07:02; FOXE1; ENSG00000178919; TAA
APSGPGGSCAF

SEQ ID NO: 24138 - protein, 9 aa, Homo sapiens
  misc_feature: Table A; Target 24138; HLA-A*30:02; FOXE1; ENSG00000178919; TAA
ARPANPSAY

SEQ ID NO: 24139 - protein, 9 aa, Homo sapiens
  misc_feature: Table A; Target 24139; HLA-A*32:01; FOXE1; ENSG00000178919; TAA
ARPANPSAY

SEQ ID NO: 24140 - protein, 9 aa, Homo sapiens
  misc_feature: Table A; Target 24140; HLA-B*07:02; FOXE1; ENSG00000178919; TAA
ARPANPSAY

SEQ ID NO: 24141 - protein, 9 aa, Homo sapiens
  misc_feature: Table A; Target 24141; HLA-B*15:01; FOXE1; ENSG00000178919; TAA
ARPANPSAY

SEQ ID NO: 24142 - protein, 9 aa, Homo sapiens
  misc_feature: Table A; Target 24142; HLA-B*15:03; FOXE1; ENSG00000178919; TAA
ARPANPSAY

SEQ ID NO: 24143 - protein, 9 aa, Homo sapiens
  misc_feature: Table A; Target 24143; HLA-B*27:02; FOXE1; ENSG00000178919; TAA
ARPANPSAY

SEQ ID NO: 24144 - protein, 9 aa, Homo sapiens
  misc_feature: Table A; Target 24144; HLA-B*27:05; FOXE1; ENSG00000178919; TAA
ARPANPSAY

SEQ ID NO: 24145 - protein, 9 aa, Homo sapiens
  misc_feature: Table A; Target 24145; HLA-B*39:01; FOXE1; ENSG00000178919; TAA
ARPANPSAY

SEQ ID NO: 24146 - protein, 9 aa, Homo sapiens
  misc_feature: Table A; Target 24146; HLA-B*46:01; FOXE1; ENSG00000178919; TAA
ARPANPSAY

SEQ ID NO: 24147 - protein, 9 aa, Homo sapiens
  misc_feature: Table A; Target 24147; HLA-C*01:02; FOXE1; ENSG00000178919; TAA
ARPANPSAY

SEQ ID NO: 24148 - protein, 9 aa, Homo sapiens
  misc_feature: Table A; Target 24148; HLA-C*02:02; FOXE1; ENSG00000178919; TAA
ARPANPSAY

SEQ ID NO: 24149 - protein, 9 aa, Homo sapiens
  misc_feature: Table A; Target 24149; HLA-C*04:01; FOXE1; ENSG00000178919; TAA
ARPANPSAY

SEQ ID NO: 24150 - protein, 9 aa, Homo sapiens
  misc_feature: Table A; Target 24150; HLA-C*06:02; FOXE1; ENSG00000178919; TAA
ARPANPSAY

SEQ ID NO: 24151 - protein, 9 aa, Homo sapiens
  misc_feature: Table A; Target 24151; HLA-C*07:01; FOXE1; ENSG00000178919; TAA
ARPANPSAY

SEQ ID NO: 24152 - protein, 9 aa, Homo sapiens
  misc_feature: Table A; Target 24152; HLA-C*07:02; FOXE1; ENSG00000178919; TAA
ARPANPSAY

SEQ ID NO: 24153 - protein, 9 aa, Homo sapiens
  misc_feature: Table A; Target 24153; HLA-C*07:04; FOXE1; ENSG00000178919; TAA
ARPANPSAY

SEQ ID NO: 24154 - protein, 9 aa, Homo sapiens
  misc_feature: Table A; Target 24154; HLA-C*12:03; FOXE1; ENSG00000178919; TAA
ARPANPSAY

SEQ ID NO: 24155 - protein, 9 aa, Homo sapiens
  misc_feature: Table A; Target 24155; HLA-C*14:02; FOXE1; ENSG00000178919; TAA
ARPANPSAY

SEQ ID NO: 24156 - protein, 9 aa, Homo sapiens
  misc_feature: Table A; Target 24156; HLA-C*16:01; FOXE1; ENSG00000178919; TAA
ARPANPSAY

SEQ ID NO: 24157 - protein, 9 aa, Homo sapiens
  misc_feature: Table A; Target 24157; HLA-C*16:02; FOXE1; ENSG00000178919; TAA
ARPANPSAY

SEQ ID NO: 24158 - protein, 9 aa, Homo sapiens
  misc_feature: Table A; Target 24158; HLA-C*16:04; FOXE1; ENSG00000178919; TAA
ARPANPSAY

SEQ ID NO: 24159 - protein, 11 aa, Homo sapiens
  misc_feature: Table A; Target 24159; HLA-B*27:05; FOXE1; ENSG00000178919; TAA
ARPANPSAYAA

SEQ ID NO: 24160 - protein, 10 aa, Homo sapiens
  misc_feature: Table A; Target 24160; HLA-A*30:02; FOXE1; ENSG00000178919; TAA
ARPPYPGAVY

SEQ ID NO: 24161 - protein, 10 aa, Homo sapiens
  misc_feature: Table A; Target 24161; HLA-B*07:02; FOXE1; ENSG00000178919; TAA
ARPPYPGAVY

SEQ ID NO: 24162 - protein, 10 aa, Homo sapiens
  misc_feature: Table A; Target 24162; HLA-B*15:03; FOXE1; ENSG00000178919; TAA
ARPPYPGAVY

SEQ ID NO: 24163 - protein, 10 aa, Homo sapiens
  misc_feature: Table A; Target 24163; HLA-B*27:05; FOXE1; ENSG00000178919; TAA
ARPPYPGAVY

SEQ ID NO: 24164 - protein, 10 aa, Homo sapiens
  misc_feature: Table A; Target 24164; HLA-C*06:02; FOXE1; ENSG00000178919; TAA
ARPPYPGAVY

SEQ ID NO: 24165 - protein, 10 aa, Homo sapiens
  misc_feature: Table A; Target 24165; HLA-C*07:01; FOXE1; ENSG00000178919; TAA
ARPPYPGAVY

SEQ ID NO: 24166 - protein, 10 aa, Homo sapiens
  misc_feature: Table A; Target 24166; HLA-C*07:02; FOXE1; ENSG00000178919; TAA
ARPPYPGAVY

SEQ ID NO: 24167 - protein, 10 aa, Homo sapiens
  misc_feature: Table A; Target 24167; HLA-C*16:04; FOXE1; ENSG00000178919; TAA
ARPPYPGAVY

SEQ ID NO: 24168 - protein, 8 aa, Homo sapiens
  misc_feature: Table A; Target 24168; HLA-C*06:02; FOXE1; ENSG00000178919; TAA
ASAGAYHA

SEQ ID NO: 24169 - protein, 9 aa, Homo sapiens
  misc_feature: Table A; Target 24169; HLA-A*03:02; FOXE1; ENSG00000178919; TAA
ASAGAYHAR

SEQ ID NO: 24170 - protein, 9 aa, Homo sapiens
  misc_feature: Table A; Target 24170; HLA-A*11:01; FOXE1; ENSG00000178919; TAA
ASAGAYHAR

SEQ ID NO: 24171 - protein, 9 aa, Homo sapiens
  misc_feature: Table A; Target 24171; HLA-A*30:02; FOXE1; ENSG00000178919; TAA
ASAGAYHAR

SEQ ID NO: 24172 - protein, 9 aa, Homo sapiens
  misc_feature: Table A; Target 24172; HLA-A*31:01; FOXE1; ENSG00000178919; TAA
ASAGAYHAR

SEQ ID NO: 24173 - protein, 9 aa, Homo sapiens
  misc_feature: Table A; Target 24173; HLA-A*32:01; FOXE1; ENSG00000178919; TAA
ASAGAYHAR

SEQ ID NO: 24174 - protein, 9 aa, Homo sapiens
  misc_feature: Table A; Target 24174; HLA-A*33:01; FOXE1; ENSG00000178919; TAA
ASAGAYHAR

SEQ ID NO: 24175 - protein, 9 aa, Homo sapiens
  misc_feature: Table A; Target 24175; HLA-A*33:03; FOXE1; ENSG00000178919; TAA
ASAGAYHAR

SEQ ID NO: 24176 - protein, 9 aa, Homo sapiens
  misc_feature: Table A; Target 24176; HLA-A*68:01; FOXE1; ENSG00000178919; TAA
ASAGAYHAR

SEQ ID NO: 24177 - protein, 9 aa, Homo sapiens
  misc_feature: Table A; Target 24177; HLA-B*57:01; FOXE1; ENSG00000178919; TAA
ASAGAYHAR

SEQ ID NO: 24178 - protein, 9 aa, Homo sapiens
  misc_feature: Table A; Target 24178; HLA-C*02:02; FOXE1; ENSG00000178919; TAA
ASAGAYHAR

SEQ ID NO: 24179 - protein, 9 aa, Homo sapiens
  misc_feature: Table A; Target 24179; HLA-C*07:06; FOXE1; ENSG00000178919; TAA
ASAGAYHAR

SEQ ID NO: 24180 - protein, 9 aa, Homo sapiens
  misc_feature: Table A; Target 24180; HLA-C*16:01; FOXE1; ENSG00000178919; TAA
ASAGAYHAR

SEQ ID NO: 24181 - protein, 9 aa, Homo sapiens
  misc_feature: Table A; Target 24181; HLA-C*16:02; FOXE1; ENSG00000178919; TAA
ASAGAYHAR

SEQ ID NO: 24182 - protein, 9 aa, Homo sapiens
  misc_feature: Table A; Target 24182; HLA-C*16:01; FOXE1; ENSG00000178919; TAA
ASPGPCRVF

SEQ ID NO: 24183 - protein, 10 aa, Homo sapiens
  misc_feature: Table A; Target 24183; HLA-C*01:02; FOXE1; ENSG00000178919; TAA
ASPPAGGSSG

SEQ ID NO: 24184 - protein, 9 aa, Homo sapiens
  misc_feature: Table A; Target 24184; HLA-A*03:01; FOXE1; ENSG00000178919; TAA
AVPAARPPY

SEQ ID NO: 24185 - protein, 9 aa, Homo sapiens
  misc_feature: Table A; Target 24185; HLA-A*26:01; FOXE1; ENSG00000178919; TAA
AVPAARPPY

SEQ ID NO: 24186 - protein, 9 aa, Homo sapiens
  misc_feature: Table A; Target 24186; HLA-A*29:02; FOXE1; ENSG00000178919; TAA
AVPAARPPY

SEQ ID NO: 24187 - protein, 9 aa, Homo sapiens
  misc_feature: Table A; Target 24187; HLA-A*30:02; FOXE1; ENSG00000178919; TAA
AVPAARPPY

SEQ ID NO: 24188 - protein, 9 aa, Homo sapiens
  misc_feature: Table A; Target 24188; HLA-A*32:01; FOXE1; ENSG00000178919; TAA
AVPAARPPY

SEQ ID NO: 24189 - protein, 9 aa, Homo sapiens
  misc_feature: Table A; Target 24189; HLA-C*01:02; FOXE1; ENSG00000178919; TAA
AVPAARPPY

SEQ ID NO: 24190 - protein, 9 aa, Homo sapiens
  misc_feature: Table A; Target 24190; HLA-C*07:04; FOXE1; ENSG00000178919; TAA
AVPAARPPY

SEQ ID NO: 24191 - protein, 9 aa, Homo sapiens
  misc_feature: Table A; Target 24191; HLA-C*16:01; FOXE1; ENSG00000178919; TAA
AVPAARPPY

SEQ ID NO: 24192 - protein, 10 aa, Homo sapiens
  misc_feature: Table A; Target 24192; HLA-A*03:01; FOXE1; ENSG00000178919; TAA
AVYAGYAPPS

SEQ ID NO: 24193 - protein, 10 aa, Homo sapiens
  misc_feature: Table A; Target 24193; HLA-A*03:02; FOXE1; ENSG00000178919; TAA
AVYAGYAPPS

SEQ ID NO: 24194 - protein, 10 aa, Homo sapiens
  misc_feature: Table A; Target 24194; HLA-A*11:01; FOXE1; ENSG00000178919; TAA
AVYAGYAPPS

SEQ ID NO: 24195 - protein, 11 aa, Homo sapiens
  misc_feature: Table A; Target 24195; HLA-A*02:01; FOXE1; ENSG00000178919; TAA
AVYAGYAPPSL

SEQ ID NO: 24196 - protein, 11 aa, Homo sapiens
  misc_feature: Table A; Target 24196; HLA-A*03:01; FOXE1; ENSG00000178919; TAA
AVYAGYAPPSL

SEQ ID NO: 24197 - protein, 11 aa, Homo sapiens
  misc_feature: Table A; Target 24197; HLA-A*03:02; FOXE1; ENSG00000178919; TAA
AVYAGYAPPSL

SEQ ID NO: 24198 - protein, 11 aa, Homo sapiens
  misc_feature: Table A; Target 24198; HLA-A*11:01; FOXE1; ENSG00000178919; TAA
AVYAGYAPPSL

SEQ ID NO: 24199 - protein, 11 aa, Homo sapiens
  misc_feature: Table A; Target 24199; HLA-C*02:02; FOXE1; ENSG00000178919; TAA
AVYAGYAPPSL

SEQ ID NO: 24200 - protein, 9 aa, Homo sapiens
  misc_feature: Table A; Target 24200; HLA-C*14:02; FOXE1; ENSG00000178919; TAA
AYAAAYAGP

SEQ ID NO: 24201 - protein, 9 aa, Homo sapiens
  misc_feature: Table A; Target 24201; HLA-A*26:01; FOXE1; ENSG00000178919; TAA
AYAGPDGAY

SEQ ID NO: 24202 - protein, 9 aa, Homo sapiens
  misc_feature: Table A; Target 24202; HLA-A*29:02; FOXE1; ENSG00000178919; TAA
AYAGPDGAY

SEQ ID NO: 24203 - protein, 9 aa, Homo sapiens
  misc_feature: Table A; Target 24203; HLA-A*30:02; FOXE1; ENSG00000178919; TAA
AYAGPDGAY

SEQ ID NO: 24204 - protein, 9 aa, Homo sapiens
  misc_feature: Table A; Target 24204; HLA-A*32:01; FOXE1; ENSG00000178919; TAA
AYAGPDGAY

SEQ ID NO: 24205 - protein, 9 aa, Homo sapiens
  misc_feature: Table A; Target 24205; HLA-B*15:01; FOXE1; ENSG00000178919; TAA
AYAGPDGAY

SEQ ID NO: 24206 - protein, 9 aa, Homo sapiens
  misc_feature: Table A; Target 24206; HLA-B*39:01; FOXE1; ENSG00000178919; TAA
AYAGPDGAY

SEQ ID NO: 24207 - protein, 9 aa, Homo sapiens
  misc_feature: Table A; Target 24207; HLA-B*46:01; FOXE1; ENSG00000178919; TAA
AYAGPDGAY

SEQ ID NO: 24208 - protein, 9 aa, Homo sapiens
  misc_feature: Table A; Target 24208; HLA-C*01:02; FOXE1; ENSG00000178919; TAA
AYAGPDGAY

SEQ ID NO: 24209 - protein, 9 aa, Homo sapiens
  misc_feature: Table A; Target 24209; HLA-C*04:01; FOXE1; ENSG00000178919; TAA
AYAGPDGAY

SEQ ID NO: 24210 - protein, 9 aa, Homo sapiens
  misc_feature: Table A; Target 24210; HLA-C*14:02; FOXE1; ENSG00000178919; TAA
AYAGPDGAY

SEQ ID NO: 24211 - protein, 9 aa, Homo sapiens
  misc_feature: Table A; Target 24211; HLA-C*16:01; FOXE1; ENSG00000178919; TAA
AYAGPDGAY

SEQ ID NO: 24212 - protein, 10 aa, Homo sapiens
  misc_feature: Table A; Target 24212; HLA-C*04:01; FOXE1; ENSG00000178919; TAA
AYAGPDGAYP

SEQ ID NO: 24213 - protein, 10 aa, Homo sapiens
  misc_feature: Table A; Target 24213; HLA-C*06:02; FOXE1; ENSG00000178919; TAA
AYAGPDGAYP

SEQ ID NO: 24214 - protein, 10 aa, Homo sapiens
  misc_feature: Table A; Target 24214; HLA-C*07:02; FOXE1; ENSG00000178919; TAA
AYAGPDGAYP

SEQ ID NO: 24215 - protein, 10 aa, Homo sapiens
  misc_feature: Table A; Target 24215; HLA-C*16:02; FOXE1; ENSG00000178919; TAA
AYAGPDGAYP

SEQ ID NO: 24216 - protein, 10 aa, Homo sapiens
  misc_feature: Table A; Target 24216; HLA-A*30:02; FOXE1; ENSG00000178919; TAA
AYHARHAAAY

SEQ ID NO: 24217 - protein, 9 aa, Homo sapiens
  misc_feature: Table A; Target 24217; HLA-C*14:02; FOXE1; ENSG00000178919; TAA
AYMHDAAAA

SEQ ID NO: 24218 - protein, 10 aa, Homo sapiens
  misc_feature: Table A; Target 24218; HLA-C*14:02; FOXE1; ENSG00000178919; TAA
AYMHDAAAAA

SEQ ID NO: 24219 - protein, 11 aa, Homo sapiens
  misc_feature: Table A; Target 24219; HLA-C*14:02; FOXE1; ENSG00000178919; TAA
AYMHDAAAAAA

SEQ ID NO: 24220 - protein, 9 aa, Homo sapiens
  misc_feature: Table A; Target 24220; HLA-A*23:01; FOXE1; ENSG00000178919; TAA
AYPGGIDRF

SEQ ID NO: 24221 - protein, 9 aa, Homo sapiens
  misc_feature: Table A; Target 24221; HLA-A*24:02; FOXE1; ENSG00000178919; TAA
AYPGGIDRF

SEQ ID NO: 24222 - protein, 9 aa, Homo sapiens
  misc_feature: Table A; Target 24222; HLA-A*29:02; FOXE1; ENSG00000178919; TAA
AYPGGIDRF

SEQ ID NO: 24223 - protein, 9 aa, Homo sapiens
  misc_feature: Table A; Target 24223; HLA-C*01:02; FOXE1; ENSG00000178919; TAA
AYPQGAGSA

SEQ ID NO: 24224 - protein, 9 aa, Homo sapiens
  misc_feature: Table A; Target 24224; HLA-C*14:02; FOXE1; ENSG00000178919; TAA
AYPQGAGSA

SEQ ID NO: 24225 - protein, 10 aa, Homo sapiens
  misc_feature: Table A; Target 24225; HLA-A*24:02; FOXE1; ENSG00000178919; TAA
AYPQGAGSAI

SEQ ID NO: 24226 - protein, 10 aa, Homo sapiens
  misc_feature: Table A; Target 24226; HLA-C*01:02; FOXE1; ENSG00000178919; TAA
AYPQGAGSAI

SEQ ID NO: 24227 - protein, 10 aa, Homo sapiens
  misc_feature: Table A; Target 24227; HLA-C*14:02; FOXE1; ENSG00000178919; TAA
AYPQGAGSAI

SEQ ID NO: 24228 - protein, 11 aa, Homo sapiens
  misc_feature: Table A; Target 24228; HLA-A*23:01; FOXE1; ENSG00000178919; TAA
AYPQGAGSAIF

SEQ ID NO: 24229 - protein, 11 aa, Homo sapiens
  misc_feature: Table A; Target 24229; HLA-A*24:02; FOXE1; ENSG00000178919; TAA
AYPQGAGSAIF

SEQ ID NO: 24230 - protein, 11 aa, Homo sapiens
  misc_feature: Table A; Target 24230; HLA-C*14:02; FOXE1; ENSG00000178919; TAA
AYPQGAGSAIF

SEQ ID NO: 24231 - protein, 10 aa, Homo sapiens
  misc_feature: Table A; Target 24231; HLA-B*56:01; FOXE1; ENSG00000178919; TAA
CAFASAGAPA

SEQ ID NO: 24232 - protein, 8 aa, Homo sapiens
  misc_feature: Table A; Target 24232; HLA-B*39:01; FOXE1; ENSG00000178919; TAA
CYNPGGQL

SEQ ID NO: 24233 - protein, 8 aa, Homo sapiens
  misc_feature: Table A; Target 24233; HLA-C*01:02; FOXE1; ENSG00000178919; TAA
CYNPGGQL

SEQ ID NO: 24234 - protein, 8 aa, Homo sapiens
  misc_feature: Table A; Target 24234; HLA-C*03:04; FOXE1; ENSG00000178919; TAA
CYNPGGQL

SEQ ID NO: 24235 - protein, 8 aa, Homo sapiens
  misc_feature: Table A; Target 24235; HLA-C*04:01; FOXE1; ENSG00000178919; TAA
CYNPGGQL

SEQ ID NO: 24236 - protein, 8 aa, Homo sapiens
  misc_feature: Table A; Target 24236; HLA-C*07:02; FOXE1; ENSG00000178919; TAA
CYNPGGQL

SEQ ID NO: 24237 - protein, 8 aa, Homo sapiens
  misc_feature: Table A; Target 24237; HLA-C*14:02; FOXE1; ENSG00000178919; TAA
CYNPGGQL

SEQ ID NO: 24238 - protein, 8 aa, Homo sapiens
  misc_feature: Table A; Target 24238; HLA-C*16:02; FOXE1; ENSG00000178919; TAA
CYNPGGQL

SEQ ID NO: 24239 - protein, 9 aa, Homo sapiens
  misc_feature: Table A; Target 24239; HLA-A*24:02; FOXE1; ENSG00000178919; TAA
CYNPGGQLG

SEQ ID NO: 24240 - protein, 9 aa, Homo sapiens
  misc_feature: Table A; Target 24240; HLA-C*14:02; FOXE1; ENSG00000178919; TAA
CYNPGGQLG

SEQ ID NO: 24241 - protein, 10 aa, Homo sapiens
  misc_feature: Table A; Target 24241; HLA-B*27:05; FOXE1; ENSG00000178919; TAA
CYNPGGQLGG

SEQ ID NO: 24242 - protein, 10 aa, Homo sapiens
  misc_feature: Table A; Target 24242; HLA-C*04:01; FOXE1; ENSG00000178919; TAA
CYNPGGQLGG

SEQ ID NO: 24243 - protein, 10 aa, Homo sapiens
  misc_feature: Table A; Target 24243; HLA-C*06:02; FOXE1; ENSG00000178919; TAA
CYNPGGQLGG

SEQ ID NO: 24244 - protein, 10 aa, Homo sapiens
  misc_feature: Table A; Target 24244; HLA-C*07:02; FOXE1; ENSG00000178919; TAA
CYNPGGQLGG

SEQ ID NO: 24245 - protein, 8 aa, Homo sapiens
  misc_feature: Table A; Target 24245; HLA-B*51:01; FOXE1; ENSG00000178919; TAA
DAAAAAAA

SEQ ID NO: 24246 - protein, 9 aa, Homo sapiens
  misc_feature: Table A; Target 24246; HLA-A*26:01; FOXE1; ENSG00000178919; TAA
DAAAAAAAA

SEQ ID NO: 24247 - protein, 9 aa, Homo sapiens
  misc_feature: Table A; Target 24247; HLA-B*35:01; FOXE1; ENSG00000178919; TAA
DAAAAAAAA

SEQ ID NO: 24248 - protein, 9 aa, Homo sapiens
  misc_feature: Table A; Target 24248; HLA-B*35:03; FOXE1; ENSG00000178919; TAA
DAAAAAAAA

SEQ ID NO: 24249 - protein, 9 aa, Homo sapiens
  misc_feature: Table A; Target 24249; HLA-B*39:01; FOXE1; ENSG00000178919; TAA
DAAAAAAAA

SEQ ID NO: 24250 - protein, 9 aa, Homo sapiens
  misc_feature: Table A; Target 24250; HLA-B*51:01; FOXE1; ENSG00000178919; TAA
DAAAAAAAA

SEQ ID NO: 24251 - protein, 9 aa, Homo sapiens
  misc_feature: Table A; Target 24251; HLA-B*54:01; FOXE1; ENSG00000178919; TAA
DAAAAAAAA

SEQ ID NO: 24252 - protein, 9 aa, Homo sapiens
  misc_feature: Table A; Target 24252; HLA-C*07:06; FOXE1; ENSG00000178919; TAA
DAAAAAAAA

SEQ ID NO: 24253 - protein, 10 aa, Homo sapiens
  misc_feature: Table A; Target 24253; HLA-B*54:01; FOXE1; ENSG00000178919; TAA
DAAAAAAAAA

SEQ ID NO: 24254 - protein, 10 aa, Homo sapiens
  misc_feature: Table A; Target 24254; HLA-C*07:06; FOXE1; ENSG00000178919; TAA
DAAAAAAAAA

SEQ ID NO: 24255 - protein, 11 aa, Homo sapiens
  misc_feature: Table A; Target 24255; HLA-A*68:01; FOXE1; ENSG00000178919; TAA
DAAAAAAAAAA

SEQ ID NO: 24256 - protein, 11 aa, Homo sapiens
  misc_feature: Table A; Target 24256; HLA-B*54:01; FOXE1; ENSG00000178919; TAA
DAAAAAAAAAA

SEQ ID NO: 24257 - protein, 11 aa, Homo sapiens
  misc_feature: Table A; Target 24257; HLA-A*33:01; FOXE1; ENSG00000178919; TAA
DFYGRTSPGQF

SEQ ID NO: 24258 - protein, 8 aa, Homo sapiens
  misc_feature: Table A; Target 24258; HLA-A*25:01; FOXE1; ENSG00000178919; TAA
DLSTYPAY

SEQ ID NO: 24259 - protein, 8 aa, Homo sapiens
  misc_feature: Table A; Target 24259; HLA-A*26:01; FOXE1; ENSG00000178919; TAA
DLSTYPAY

SEQ ID NO: 24260 - protein, 8 aa, Homo sapiens
  misc_feature: Table A; Target 24260; HLA-B*18:01; FOXE1; ENSG00000178919; TAA
DLSTYPAY

SEQ ID NO: 24261 - protein, 9 aa, Homo sapiens
  misc_feature: Table A; Target 24261; HLA-A*26:01; FOXE1; ENSG00000178919; TAA
DLSTYPAYM

SEQ ID NO: 24262 - protein, 9 aa, Homo sapiens
  misc_feature: Table A; Target 24262; HLA-A*33:01; FOXE1; ENSG00000178919; TAA
DLSTYPAYM

SEQ ID NO: 24263 - protein, 8 aa, Homo sapiens
  misc_feature: Table A; Target 24263; HLA-B*18:01; FOXE1; ENSG00000178919; TAA
DMFESGSF

SEQ ID NO: 24264 - protein, 8 aa, Homo sapiens
  misc_feature: Table A; Target 24264; HLA-B*35:01; FOXE1; ENSG00000178919; TAA
DMFESGSF

SEQ ID NO: 24265 - protein, 9 aa, Homo sapiens
  misc_feature: Table A; Target 24265; HLA-A*25:01; FOXE1; ENSG00000178919; TAA
DMFESGSFL

SEQ ID NO: 24266 - protein, 9 aa, Homo sapiens
  misc_feature: Table A; Target 24266; HLA-A*26:01; FOXE1; ENSG00000178919; TAA
DMFESGSFL

SEQ ID NO: 24267 - protein, 9 aa, Homo sapiens
  misc_feature: Table A; Target 24267; HLA-A*68:02; FOXE1; ENSG00000178919; TAA
DMFESGSFL

SEQ ID NO: 24268 - protein, 9 aa, Homo sapiens
  misc_feature: Table A; Target 24268; HLA-B*38:01; FOXE1; ENSG00000178919; TAA
DMFESGSFL

SEQ ID NO: 24269 - protein, 9 aa, Homo sapiens
  misc_feature: Table A; Target 24269; HLA-B*39:01; FOXE1; ENSG00000178919; TAA
DMFESGSFL

SEQ ID NO: 24270 - protein, 9 aa, Homo sapiens
  misc_feature: Table A; Target 24270; HLA-B*51:01; FOXE1; ENSG00000178919; TAA
DMFESGSFL

SEQ ID NO: 24271 - protein, 9 aa, Homo sapiens
  misc_feature: Table A; Target 24271; HLA-C*01:02; FOXE1; ENSG00000178919; TAA
DMFESGSFL

SEQ ID NO: 24272 - protein, 9 aa, Homo sapiens
  misc_feature: Table A; Target 24272; HLA-C*05:01; FOXE1; ENSG00000178919; TAA
DMFESGSFL

SEQ ID NO: 24273 - protein, 10 aa, Homo sapiens
  misc_feature: Table A; Target 24273; HLA-A*33:01; FOXE1; ENSG00000178919; TAA
DMFESGSFLR

SEQ ID NO: 24274 - protein, 10 aa, Homo sapiens
  misc_feature: Table A; Target 24274; HLA-A*33:03; FOXE1; ENSG00000178919; TAA
DMFESGSFLR

SEQ ID NO: 24275 - protein, 10 aa, Homo sapiens
  misc_feature: Table A; Target 24275; HLA-A*68:01; FOXE1; ENSG00000178919; TAA
DMFESGSFLR

SEQ ID NO: 24276 - protein, 10 aa, Homo sapiens
  misc_feature: Table A; Target 24276; HLA-A*68:02; FOXE1; ENSG00000178919; TAA
DMFESGSFLR

SEQ ID NO: 24277 - protein, 10 aa, Homo sapiens
  misc_feature: Table A; Target 24277; HLA-C*07:06; FOXE1; ENSG00000178919; TAA
DMFESGSFLR

SEQ ID NO: 24278 - protein, 11 aa, Homo sapiens
  misc_feature: Table A; Target 24278; HLA-A*33:01; FOXE1; ENSG00000178919; TAA
DMFESGSFLRR

SEQ ID NO: 24279 - protein, 11 aa, Homo sapiens
  misc_feature: Table A; Target 24279; HLA-A*33:03; FOXE1; ENSG00000178919; TAA
DMFESGSFLRR

SEQ ID NO: 24280 - protein, 11 aa, Homo sapiens
  misc_feature: Table A; Target 24280; HLA-A*68:01; FOXE1; ENSG00000178919; TAA
DMFESGSFLRR

SEQ ID NO: 24281 - protein, 8 aa, Homo sapiens
  misc_feature: Table A; Target 24281; HLA-B*55:01; FOXE1; ENSG00000178919; TAA
DPNAEDMF

SEQ ID NO: 24282 - protein, 10 aa, Homo sapiens
  misc_feature: Table A; Target 24282; HLA-A*33:03; FOXE1; ENSG00000178919; TAA
EATGRGAGGR

SEQ ID NO: 24283 - protein, 10 aa, Homo sapiens
  misc_feature: Table A; Target 24283; HLA-A*68:01; FOXE1; ENSG00000178919; TAA
EATGRGAGGR

SEQ ID NO: 24284 - protein, 11 aa, Homo sapiens
  misc_feature: Table A; Target 24284; HLA-A*33:03; FOXE1; ENSG00000178919; TAA
EATGRGAGGRR

SEQ ID NO: 24285 - protein, 9 aa, Homo sapiens
  misc_feature: Table A; Target 24285; HLA-B*18:01; FOXE1; ENSG00000178919; TAA
EDMFESGSF

SEQ ID NO: 24286 - protein, 9 aa, Homo sapiens
  misc_feature: Table A; Target 24286; HLA-B*44:02; FOXE1; ENSG00000178919; TAA
EDMFESGSF

SEQ ID NO: 24287 - protein, 9 aa, Homo sapiens
  misc_feature: Table A; Target 24287; HLA-B*44:03; FOXE1; ENSG00000178919; TAA
EDMFESGSF

SEQ ID NO: 24288 - protein, 9 aa, Homo sapiens
  misc_feature: Table A; Target 24288; HLA-B*27:05; FOXE1; ENSG00000178919; TAA
ESGPPPPQP

SEQ ID NO: 24289 - protein, 8 aa, Homo sapiens
  misc_feature: Table A; Target 24289; HLA-A*33:03; FOXE1; ENSG00000178919; TAA
ESGSFLRR

SEQ ID NO: 24290 - protein, 10 aa, Homo sapiens
  misc_feature: Table A; Target 24290; HLA-A*68:01; FOXE1; ENSG00000178919; TAA
ETAAGAGVPG

SEQ ID NO: 24291 - protein, 11 aa, Homo sapiens
  misc_feature: Table A; Target 24291; HLA-A*26:01; FOXE1; ENSG00000178919; TAA
ETAAGAGVPGE

SEQ ID NO: 24292 - protein, 9 aa, Homo sapiens
  misc_feature: Table A; Target 24292; HLA-A*33:01; FOXE1; ENSG00000178919; TAA
ETTVDFYGR

SEQ ID NO: 24293 - protein, 9 aa, Homo sapiens
  misc_feature: Table A; Target 24293; HLA-A*33:03; FOXE1; ENSG00000178919; TAA
ETTVDFYGR

SEQ ID NO: 24294 - protein, 9 aa, Homo sapiens
  misc_feature: Table A; Target 24294; HLA-A*68:01; FOXE1; ENSG00000178919; TAA
ETTVDFYGR

SEQ ID NO: 24295 - protein, 9 aa, Homo sapiens
  misc_feature: Table A; Target 24295; HLA-B*27:02; FOXE1; ENSG00000178919; TAA
ETTVDFYGR

SEQ ID NO: 24296 - protein, 9 aa, Homo sapiens
  misc_feature: Table A; Target 24296; HLA-C*07:06; FOXE1; ENSG00000178919; TAA
ETTVDFYGR

SEQ ID NO: 24297 - protein, 10 aa, Homo sapiens
  misc_feature: Table A; Target 24297; HLA-A*33:01; FOXE1; ENSG00000178919; TAA
EVLATVKEER

SEQ ID NO: 24298 - protein, 10 aa, Homo sapiens
  misc_feature: Table A; Target 24298; HLA-A*33:03; FOXE1; ENSG00000178919; TAA
EVLATVKEER

SEQ ID NO: 24299 - protein, 10 aa, Homo sapiens
  misc_feature: Table A; Target 24299; HLA-A*68:01; FOXE1; ENSG00000178919; TAA
EVLATVKEER

SEQ ID NO: 24300 - protein, 10 aa, Homo sapiens
  misc_feature: Table A; Target 24300; HLA-C*07:06; FOXE1; ENSG00000178919; TAA
EVLATVKEER

SEQ ID NO: 24301 - protein, 8 aa, Homo sapiens
  misc_feature: Table A; Target 24301; HLA-B*54:01; FOXE1; ENSG00000178919; TAA
FAAAGRLA

SEQ ID NO: 24302 - protein, 8 aa, Homo sapiens
  misc_feature: Table A; Target 24302; HLA-C*03:04; FOXE1; ENSG00000178919; TAA
FAAAGRLA

SEQ ID NO: 24303 - protein, 8 aa, Homo sapiens
  misc_feature: Table A; Target 24303; HLA-C*16:01; FOXE1; ENSG00000178919; TAA
FAAAGRLA

SEQ ID NO: 24304 - protein, 9 aa, Homo sapiens
  misc_feature: Table A; Target 24304; HLA-C*16:01; FOXE1; ENSG00000178919; TAA
FAAAGRLAG

SEQ ID NO: 24305 - protein, 10 aa, Homo sapiens
  misc_feature: Table A; Target 24305; HLA-B*07:02; FOXE1; ENSG00000178919; TAA
FAAAGRLAGP

SEQ ID NO: 24306 - protein, 10 aa, Homo sapiens
  misc_feature: Table A; Target 24306; HLA-C*06:02; FOXE1; ENSG00000178919; TAA
FAAAGRLAGP

SEQ ID NO: 24307 - protein, 10 aa, Homo sapiens
  misc_feature: Table A; Target 24307; HLA-C*16:02; FOXE1; ENSG00000178919; TAA
FAAAGRLAGP

SEQ ID NO: 24308 - protein, 11 aa, Homo sapiens
  misc_feature: Table A; Target 24308; HLA-B*54:01; FOXE1; ENSG00000178919; TAA
FAAAGRLAGPA

SEQ ID NO: 24309 - protein, 11 aa, Homo sapiens
  misc_feature: Table A; Target 24309; HLA-C*12:03; FOXE1; ENSG00000178919; TAA
FAAAGRLAGPA

SEQ ID NO: 24310 - protein, 8 aa, Homo sapiens
  misc_feature: Table A; Target 24310; HLA-C*03:04; FOXE1; ENSG00000178919; TAA
FASAGAPA

SEQ ID NO: 24311 - protein, 9 aa, Homo sapiens
  misc_feature: Table A; Target 24311; HLA-B*35:03; FOXE1; ENSG00000178919; TAA
FASAGAPAT

SEQ ID NO: 24312 - protein, 9 aa, Homo sapiens
  misc_feature: Table A; Target 24312; HLA-C*03:03; FOXE1; ENSG00000178919; TAA
FASAGAPAT

SEQ ID NO: 24313 - protein, 9 aa, Homo sapiens
  misc_feature: Table A; Target 24313; HLA-C*03:04; FOXE1; ENSG00000178919; TAA
FASAGAPAT

SEQ ID NO: 24314 - protein, 9 aa, Homo sapiens
  misc_feature: Table A; Target 24314; HLA-C*16:01; FOXE1; ENSG00000178919; TAA
FASAGAPAT

SEQ ID NO: 24315 - protein, 9 aa, Homo sapiens
  misc_feature: Table A; Target 24315; HLA-C*16:02; FOXE1; ENSG00000178919; TAA
FASAGAPAT

SEQ ID NO: 24316 - protein, 10 aa, Homo sapiens
  misc_feature: Table A; Target 24316; HLA-C*03:03; FOXE1; ENSG00000178919; TAA
FASAGAPATT

SEQ ID NO: 24317 - protein, 10 aa, Homo sapiens
  misc_feature: Table A; Target 24317; HLA-C*03:04; FOXE1; ENSG00000178919; TAA
FASAGAPATT

SEQ ID NO: 24318 - protein, 11 aa, Homo sapiens
  misc_feature: Table A; Target 24318; HLA-C*02:02; FOXE1; ENSG00000178919; TAA
FASAGAPATTT

SEQ ID NO: 24319 - protein, 9 aa, Homo sapiens
  misc_feature: Table A; Target 24319; HLA-A*29:02; FOXE1; ENSG00000178919; TAA
FESGSFLRR

SEQ ID NO: 24320 - protein, 9 aa, Homo sapiens
  misc_feature: Table A; Target 24320; HLA-B*44:02; FOXE1; ENSG00000178919; TAA
FESGSFLRR

SEQ ID NO: 24321 - protein, 8 aa, Homo sapiens
  misc_feature: Table A; Target 24321; HLA-B*15:03; FOXE1; ENSG00000178919; TAA
FGALGACY

SEQ ID NO: 24322 - protein, 8 aa, Homo sapiens
  misc_feature: Table A; Target 24322; HLA-B*46:01; FOXE1; ENSG00000178919; TAA
FGALGACY

SEQ ID NO: 24323 - protein, 8 aa, Homo sapiens
  misc_feature: Table A; Target 24323; HLA-C*03:03; FOXE1; ENSG00000178919; TAA
FGALGACY

SEQ ID NO: 24324 - protein, 9 aa, Homo sapiens
  misc_feature: Table A; Target 24324; HLA-C*03:04; FOXE1; ENSG00000178919; TAA
FGLVPERPL

SEQ ID NO: 24325 - protein, 9 aa, Homo sapiens
  misc_feature: Table A; Target 24325; HLA-A*01:01; FOXE1; ENSG00000178919; TAA
FITERFPFY

SEQ ID NO: 24326 - protein, 9 aa, Homo sapiens
  misc_feature: Table A; Target 24326; HLA-A*29:02; FOXE1; ENSG00000178919; TAA
FITERFPFY

SEQ ID NO: 24327 - protein, 9 aa, Homo sapiens
  misc_feature: Table A; Target 24327; HLA-B*15:03; FOXE1; ENSG00000178919; TAA
FKRSDLSTY

SEQ ID NO: 24328 - protein, 8 aa, Homo sapiens
  misc_feature: Table A; Target 24328; HLA-B*08:01; FOXE1; ENSG00000178919; TAA
FLKIPREA

SEQ ID NO: 24329 - protein, 8 aa, Homo sapiens
  misc_feature: Table A; Target 24329; HLA-B*54:01; FOXE1; ENSG00000178919; TAA
FPFYRDNP

SEQ ID NO: 24330 - protein, 9 aa, Homo sapiens
  misc_feature: Table A; Target 24330; HLA-B*54:01; FOXE1; ENSG00000178919; TAA
FPFYRDNPK

SEQ ID NO: 24331 - protein, 8 aa, Homo sapiens
  misc_feature: Table A; Target 24331; HLA-B*35:01; FOXE1; ENSG00000178919; TAA
FPGAVPAA

SEQ ID NO: 24332 - protein, 8 aa, Homo sapiens
  misc_feature: Table A; Target 24332; HLA-B*35:03; FOXE1; ENSG00000178919; TAA
FPGAVPAA

SEQ ID NO: 24333 - protein, 8 aa, Homo sapiens
  misc_feature: Table A; Target 24333; HLA-B*54:01; FOXE1; ENSG00000178919; TAA
FPGAVPAA

SEQ ID NO: 24334 - protein, 8 aa, Homo sapiens
  misc_feature: Table A; Target 24334; HLA-B*55:01; FOXE1; ENSG00000178919; TAA
FPGAVPAA

SEQ ID NO: 24335 - protein, 8 aa, Homo sapiens
  misc_feature: Table A; Target 24335; HLA-B*56:01; FOXE1; ENSG00000178919; TAA
FPGAVPAA

SEQ ID NO: 24336 - protein, 9 aa, Homo sapiens
  misc_feature: Table A; Target 24336; HLA-A*33:03; FOXE1; ENSG00000178919; TAA
FPGAVPAAR

SEQ ID NO: 24337 - protein, 9 aa, Homo sapiens
  misc_feature: Table A; Target 24337; HLA-A*68:01; FOXE1; ENSG00000178919; TAA
FPGAVPAAR

SEQ ID NO: 24338 - protein, 9 aa, Homo sapiens
  misc_feature: Table A; Target 24338; HLA-B*35:01; FOXE1; ENSG00000178919; TAA
FPGAVPAAR

SEQ ID NO: 24339 - protein, 9 aa, Homo sapiens
  misc_feature: Table A; Target 24339; HLA-B*35:03; FOXE1; ENSG00000178919; TAA
FPGAVPAAR

SEQ ID NO: 24340 - protein, 9 aa, Homo sapiens
  misc_feature: Table A; Target 24340; HLA-B*54:01; FOXE1; ENSG00000178919; TAA
FPGAVPAAR

SEQ ID NO: 24341 - protein, 9 aa, Homo sapiens
  misc_feature: Table A; Target 24341; HLA-C*07:06; FOXE1; ENSG00000178919; TAA
FPGAVPAAR

SEQ ID NO: 24342 - protein, 10 aa, Homo sapiens
  misc_feature: Table A; Target 24342; HLA-A*23:01; FOXE1; ENSG00000178919; TAA
FYGRTSPGQF

SEQ ID NO: 24343 - protein, 10 aa, Homo sapiens
  misc_feature: Table A; Target 24343; HLA-A*24:02; FOXE1; ENSG00000178919; TAA
FYGRTSPGQF

SEQ ID NO: 24344 - protein, 10 aa, Homo sapiens
  misc_feature: Table A; Target 24344; HLA-C*14:02; FOXE1; ENSG00000178919; TAA
FYGRTSPGQF

SEQ ID NO: 24345 - protein, 10 aa, Homo sapiens
  misc_feature: Table A; Target 24345; HLA-B*56:01; FOXE1; ENSG00000178919; TAA
GAGSAIFAAA

SEQ ID NO: 24346 - protein, 11 aa, Homo sapiens
  misc_feature: Table A; Target 24346; HLA-A*68:01; FOXE1; ENSG00000178919; TAA
GAGVPGEATGR

SEQ ID NO: 24347 - protein, 11 aa, Homo sapiens
  misc_feature: Table A; Target 24347; HLA-B*27:05; FOXE1; ENSG00000178919; TAA
GAGVPGEATGR

SEQ ID NO: 24348 - protein, 11 aa, Homo sapiens
  misc_feature: Table A; Target 24348; HLA-C*07:06; FOXE1; ENSG00000178919; TAA
GAGVPGEATGR

SEQ ID NO: 24349 - protein, 9 aa, Homo sapiens
  misc_feature: Table A; Target 24349; HLA-A*25:01; FOXE1; ENSG00000178919; TAA
GAPATTTGY

SEQ ID NO: 24350 - protein, 9 aa, Homo sapiens
  misc_feature: Table A; Target 24350; HLA-A*26:01; FOXE1; ENSG00000178919; TAA
GAPATTTGY

SEQ ID NO: 24351 - protein, 9 aa, Homo sapiens
  misc_feature: Table A; Target 24351; HLA-A*29:02; FOXE1; ENSG00000178919; TAA
GAPATTTGY

SEQ ID NO: 24352 - protein, 9 aa, Homo sapiens
  misc_feature: Table A; Target 24352; HLA-A*30:02; FOXE1; ENSG00000178919; TAA
GAPATTTGY

SEQ ID NO: 24353 - protein, 9 aa, Homo sapiens
  misc_feature: Table A; Target 24353; HLA-A*32:01; FOXE1; ENSG00000178919; TAA
GAPATTTGY

SEQ ID NO: 24354 - protein, 9 aa, Homo sapiens
  misc_feature: Table A; Target 24354; HLA-B*15:01; FOXE1; ENSG00000178919; TAA
GAPATTTGY

SEQ ID NO: 24355 - protein, 9 aa, Homo sapiens
  misc_feature: Table A; Target 24355; HLA-B*15:03; FOXE1; ENSG00000178919; TAA
GAPATTTGY

SEQ ID NO: 24356 - protein, 9 aa, Homo sapiens
  misc_feature: Table A; Target 24356; HLA-B*35:01; FOXE1; ENSG00000178919; TAA
GAPATTTGY

SEQ ID NO: 24357 - protein, 9 aa, Homo sapiens
  misc_feature: Table A; Target 24357; HLA-B*39:01; FOXE1; ENSG00000178919; TAA
GAPATTTGY

SEQ ID NO: 24358 - protein, 9 aa, Homo sapiens
  misc_feature: Table A; Target 24358; HLA-B*46:01; FOXE1; ENSG00000178919; TAA
GAPATTTGY

SEQ ID NO: 24359 - protein, 9 aa, Homo sapiens
  misc_feature: Table A; Target 24359; HLA-B*58:01; FOXE1; ENSG00000178919; TAA
GAPATTTGY

SEQ ID NO: 24360 - protein, 9 aa, Homo sapiens
  misc_feature: Table A; Target 24360; HLA-C*01:02; FOXE1; ENSG00000178919; TAA
GAPATTTGY

SEQ ID NO: 24361 - protein, 9 aa, Homo sapiens
  misc_feature: Table A; Target 24361; HLA-C*02:02; FOXE1; ENSG00000178919; TAA
GAPATTTGY

SEQ ID NO: 24362 - protein, 9 aa, Homo sapiens
  misc_feature: Table A; Target 24362; HLA-C*07:01; FOXE1; ENSG00000178919; TAA
GAPATTTGY

SEQ ID NO: 24363 - protein, 9 aa, Homo sapiens
  misc_feature: Table A; Target 24363; HLA-C*07:04; FOXE1; ENSG00000178919; TAA
GAPATTTGY

SEQ ID NO: 24364 - protein, 9 aa, Homo sapiens
  misc_feature: Table A; Target 24364; HLA-C*14:02; FOXE1; ENSG00000178919; TAA
GAPATTTGY

SEQ ID NO: 24365 - protein, 9 aa, Homo sapiens
  misc_feature: Table A; Target 24365; HLA-C*16:04; FOXE1; ENSG00000178919; TAA
GAPATTTGY

SEQ ID NO: 24366 - protein, 11 aa, Homo sapiens
  misc_feature: Table A; Target 24366; HLA-C*07:02; FOXE1; ENSG00000178919; TAA
GAPATTTGYQP

SEQ ID NO: 24367 - protein, 9 aa, Homo sapiens
  misc_feature: Table A; Target 24367; HLA-B*07:02; FOXE1; ENSG00000178919; TAA
GARPANPSA

SEQ ID NO: 24368 - protein, 9 aa, Homo sapiens
  misc_feature: Table A; Target 24368; HLA-B*54:01; FOXE1; ENSG00000178919; TAA
GARPANPSA

SEQ ID NO: 24369 - protein, 9 aa, Homo sapiens
  misc_feature: Table A; Target 24369; HLA-B*55:01; FOXE1; ENSG00000178919; TAA
GARPANPSA

SEQ ID NO: 24370 - protein, 9 aa, Homo sapiens
  misc_feature: Table A; Target 24370; HLA-B*56:01; FOXE1; ENSG00000178919; TAA
GARPANPSA

SEQ ID NO: 24371 - protein, 10 aa, Homo sapiens
  misc_feature: Table A; Target 24371; HLA-A*25:01; FOXE1; ENSG00000178919; TAA
GARPANPSAY

SEQ ID NO: 24372 - protein, 10 aa, Homo sapiens
  misc_feature: Table A; Target 24372; HLA-A*26:01; FOXE1; ENSG00000178919; TAA
GARPANPSAY

SEQ ID NO: 24373 - protein, 10 aa, Homo sapiens
  misc_feature: Table A; Target 24373; HLA-A*30:02; FOXE1; ENSG00000178919; TAA
GARPANPSAY

SEQ ID NO: 24374 - protein, 10 aa, Homo sapiens
  misc_feature: Table A; Target 24374; HLA-A*32:01; FOXE1; ENSG00000178919; TAA
GARPANPSAY

SEQ ID NO: 24375 - protein, 10 aa, Homo sapiens
  misc_feature: Table A; Target 24375; HLA-B*07:02; FOXE1; ENSG00000178919; TAA
GARPANPSAY

SEQ ID NO: 24376 - protein, 10 aa, Homo sapiens
  misc_feature: Table A; Target 24376; HLA-B*15:01; FOXE1; ENSG00000178919; TAA
GARPANPSAY

SEQ ID NO: 24377 - protein, 10 aa, Homo sapiens
  misc_feature: Table A; Target 24377; HLA-B*15:03; FOXE1; ENSG00000178919; TAA
GARPANPSAY

SEQ ID NO: 24378 - protein, 10 aa, Homo sapiens
  misc_feature: Table A; Target 24378; HLA-B*39:01; FOXE1; ENSG00000178919; TAA
GARPANPSAY

SEQ ID NO: 24379 - protein, 10 aa, Homo sapiens
  misc_feature: Table A; Target 24379; HLA-B*46:01; FOXE1; ENSG00000178919; TAA
GARPANPSAY

SEQ ID NO: 24380 - protein, 10 aa, Homo sapiens
  misc_feature: Table A; Target 24380; HLA-B*58:01; FOXE1; ENSG00000178919; TAA
GARPANPSAY

SEQ ID NO: 24381 - protein, 10 aa, Homo sapiens
  misc_feature: Table A; Target 24381; HLA-C*01:02; FOXE1; ENSG00000178919; TAA
GARPANPSAY

SEQ ID NO: 24382 - protein, 10 aa, Homo sapiens
  misc_feature: Table A; Target 24382; HLA-C*02:02; FOXE1; ENSG00000178919; TAA
GARPANPSAY

SEQ ID NO: 24383 - protein, 10 aa, Homo sapiens
  misc_feature: Table A; Target 24383; HLA-C*06:02; FOXE1; ENSG00000178919; TAA
GARPANPSAY

SEQ ID NO: 24384 - protein, 10 aa, Homo sapiens
  misc_feature: Table A; Target 24384; HLA-C*07:02; FOXE1; ENSG00000178919; TAA
GARPANPSAY

SEQ ID NO: 24385 - protein, 10 aa, Homo sapiens
  misc_feature: Table A; Target 24385; HLA-C*07:04; FOXE1; ENSG00000178919; TAA
GARPANPSAY

SEQ ID NO: 24386 - protein, 10 aa, Homo sapiens
  misc_feature: Table A; Target 24386; HLA-C*12:03; FOXE1; ENSG00000178919; TAA
GARPANPSAY

SEQ ID NO: 24387 - protein, 10 aa, Homo sapiens
  misc_feature: Table A; Target 24387; HLA-C*14:02; FOXE1; ENSG00000178919; TAA
GARPANPSAY

SEQ ID NO: 24388 - protein, 10 aa, Homo sapiens
  misc_feature: Table A; Target 24388; HLA-C*16:02; FOXE1; ENSG00000178919; TAA
GARPANPSAY

SEQ ID NO: 24389 - protein, 10 aa, Homo sapiens
  misc_feature: Table A; Target 24389; HLA-C*16:04; FOXE1; ENSG00000178919; TAA
GARPANPSAY

SEQ ID NO: 24390 - protein, 9 aa, Homo sapiens
  misc_feature: Table A; Target 24390; HLA-C*16:02; FOXE1; ENSG00000178919; TAA
GASAGAYHA

SEQ ID NO: 24391 - protein, 10 aa, Homo sapiens
  misc_feature: Table A; Target 24391; HLA-A*11:01; FOXE1; ENSG00000178919; TAA
GASAGAYHAR

SEQ ID NO: 24392 - protein, 10 aa, Homo sapiens
  misc_feature: Table A; Target 24392; HLA-A*31:01; FOXE1; ENSG00000178919; TAA
GASAGAYHAR

SEQ ID NO: 24393 - protein, 10 aa, Homo sapiens
  misc_feature: Table A; Target 24393; HLA-A*33:01; FOXE1; ENSG00000178919; TAA
GASAGAYHAR

SEQ ID NO: 24394 - protein, 10 aa, Homo sapiens
  misc_feature: Table A; Target 24394; HLA-A*33:03; FOXE1; ENSG00000178919; TAA
GASAGAYHAR

SEQ ID NO: 24395 - protein, 10 aa, Homo sapiens
  misc_feature: Table A; Target 24395; HLA-A*68:01; FOXE1; ENSG00000178919; TAA
GASAGAYHAR

SEQ ID NO: 24396 - protein, 10 aa, Homo sapiens
  misc_feature: Table A; Target 24396; HLA-C*07:06; FOXE1; ENSG00000178919; TAA
GASAGAYHAR

SEQ ID NO: 24397 - protein, 10 aa, Homo sapiens
  misc_feature: Table A; Target 24397; HLA-C*16:02; FOXE1; ENSG00000178919; TAA
GASAGAYHAR

SEQ ID NO: 24398 - protein, 9 aa, Homo sapiens
  misc_feature: Table A; Target 24398; HLA-C*03:04; FOXE1; ENSG00000178919; TAA
GAVPAARPP

SEQ ID NO: 24399 - protein, 9 aa, Homo sapiens
  misc_feature: Table A; Target 24399; HLA-C*16:02; FOXE1; ENSG00000178919; TAA
GAVPAARPP

SEQ ID NO: 24400 - protein, 10 aa, Homo sapiens
  misc_feature: Table A; Target 24400; HLA-A*30:02; FOXE1; ENSG00000178919; TAA
GAVPAARPPY

SEQ ID NO: 24401 - protein, 9 aa, Homo sapiens
  misc_feature: Table A; Target 24401; HLA-B*54:01; FOXE1; ENSG00000178919; TAA
GAYHARHAA

SEQ ID NO: 24402 - protein, 11 aa, Homo sapiens
  misc_feature: Table A; Target 24402; HLA-A*30:02; FOXE1; ENSG00000178919; TAA
GAYHARHAAAY

SEQ ID NO: 24403 - protein, 11 aa, Homo sapiens
  misc_feature: Table A; Target 24403; HLA-B*13:02; FOXE1; ENSG00000178919; TAA
GAYPQGAGSAI

SEQ ID NO: 24404 - protein, 11 aa, Homo sapiens
  misc_feature: Table A; Target 24404; HLA-B*15:01; FOXE1; ENSG00000178919; TAA
GAYPQGAGSAI

SEQ ID NO: 24405 - protein, 11 aa, Homo sapiens
  misc_feature: Table A; Target 24405; HLA-B*15:03; FOXE1; ENSG00000178919; TAA
GAYPQGAGSAI

SEQ ID NO: 24406 - protein, 11 aa, Homo sapiens
  misc_feature: Table A; Target 24406; HLA-B*46:01; FOXE1; ENSG00000178919; TAA
GAYPQGAGSAI

SEQ ID NO: 24407 - protein, 11 aa, Homo sapiens
  misc_feature: Table A; Target 24407; HLA-B*51:01; FOXE1; ENSG00000178919; TAA
GAYPQGAGSAI

SEQ ID NO: 24408 - protein, 11 aa, Homo sapiens
  misc_feature: Table A; Target 24408; HLA-B*58:01; FOXE1; ENSG00000178919; TAA
GAYPQGAGSAI

SEQ ID NO: 24409 - protein, 11 aa, Homo sapiens
  misc_feature: Table A; Target 24409; HLA-C*01:02; FOXE1; ENSG00000178919; TAA
GAYPQGAGSAI

SEQ ID NO: 24410 - protein, 11 aa, Homo sapiens
  misc_feature: Table A; Target 24410; HLA-C*02:02; FOXE1; ENSG00000178919; TAA
GAYPQGAGSAI

SEQ ID NO: 24411 - protein, 11 aa, Homo sapiens
  misc_feature: Table A; Target 24411; HLA-C*03:03; FOXE1; ENSG00000178919; TAA
GAYPQGAGSAI

SEQ ID NO: 24412 - protein, 11 aa, Homo sapiens
  misc_feature: Table A; Target 24412; HLA-C*03:04; FOXE1; ENSG00000178919; TAA
GAYPQGAGSAI

SEQ ID NO: 24413 - protein, 11 aa, Homo sapiens
  misc_feature: Table A; Target 24413; HLA-C*05:01; FOXE1; ENSG00000178919; TAA
GAYPQGAGSAI

SEQ ID NO: 24414 - protein, 11 aa, Homo sapiens
  misc_feature: Table A; Target 24414; HLA-C*14:02; FOXE1; ENSG00000178919; TAA
GAYPQGAGSAI

SEQ ID NO: 24415 - protein, 11 aa, Homo sapiens
  misc_feature: Table A; Target 24415; HLA-C*16:04; FOXE1; ENSG00000178919; TAA
GAYPQGAGSAI

SEQ ID NO: 24416 - protein, 10 aa, Homo sapiens
  misc_feature: Table A; Target 24416; HLA-C*16:02; FOXE1; ENSG00000178919; TAA
GCTGARPANP

SEQ ID NO: 24417 - protein, 9 aa, Homo sapiens
  misc_feature: Table A; Target 24417; HLA-A*30:01; FOXE1; ENSG00000178919; TAA
GETAAGAGV

SEQ ID NO: 24418 - protein, 9 aa, Homo sapiens
  misc_feature: Table A; Target 24418; HLA-B*13:02; FOXE1; ENSG00000178919; TAA
GETAAGAGV

SEQ ID NO: 24419 - protein, 9 aa, Homo sapiens
  misc_feature: Table A; Target 24419; HLA-B*37:01; FOXE1; ENSG00000178919; TAA
GETAAGAGV

SEQ ID NO: 24420 - protein, 9 aa, Homo sapiens
  misc_feature: Table A; Target 24420; HLA-B*40:01; FOXE1; ENSG00000178919; TAA
GETAAGAGV

SEQ ID NO: 24421 - protein, 9 aa, Homo sapiens
  misc_feature: Table A; Target 24421; HLA-B*44:03; FOXE1; ENSG00000178919; TAA
GETAAGAGV

SEQ ID NO: 24422 - protein, 9 aa, Homo sapiens
  misc_feature: Table A; Target 24422; HLA-B*49:01; FOXE1; ENSG00000178919; TAA
GETAAGAGV

SEQ ID NO: 24423 - protein, 10 aa, Homo sapiens
  misc_feature: Table A; Target 24423; HLA-B*40:02; FOXE1; ENSG00000178919; TAA
GETAAGAGVP

SEQ ID NO: 24424 - protein, 11 aa, Homo sapiens
  misc_feature: Table A; Target 24424; HLA-C*04:01; FOXE1; ENSG00000178919; TAA
GETAAGAGVPG

SEQ ID NO: 24425 - protein, 8 aa, Homo sapiens
  misc_feature: Table A; Target 24425; HLA-A*30:02; FOXE1; ENSG00000178919; TAA
GGASAGAY

SEQ ID NO: 24426 - protein, 8 aa, Homo sapiens
  misc_feature: Table A; Target 24426; HLA-B*15:01; FOXE1; ENSG00000178919; TAA
GGASAGAY

SEQ ID NO: 24427 - protein, 8 aa, Homo sapiens
  misc_feature: Table A; Target 24427; HLA-B*39:01; FOXE1; ENSG00000178919; TAA
GGASAGAY

SEQ ID NO: 24428 - protein, 9 aa, Homo sapiens
  misc_feature: Table A; Target 24428; HLA-B*27:05; FOXE1; ENSG00000178919; TAA
GGASAGAYH

SEQ ID NO: 24429 - protein, 11 aa, Homo sapiens
  misc_feature: Table A; Target 24429; HLA-A*31:01; FOXE1; ENSG00000178919; TAA
GGASAGAYHAR

SEQ ID NO: 24430 - protein, 11 aa, Homo sapiens
  misc_feature: Table A; Target 24430; HLA-A*33:01; FOXE1; ENSG00000178919; TAA
GGASAGAYHAR

SEQ ID NO: 24431 - protein, 11 aa, Homo sapiens
  misc_feature: Table A; Target 24431; HLA-A*33:03; FOXE1; ENSG00000178919; TAA
GGASAGAYHAR

SEQ ID NO: 24432 - protein, 11 aa, Homo sapiens
  misc_feature: Table A; Target 24432; HLA-A*68:01; FOXE1; ENSG00000178919; TAA
GGASAGAYHAR

SEQ ID NO: 24433 - protein, 11 aa, Homo sapiens
  misc_feature: Table A; Target 24433; HLA-C*07:06; FOXE1; ENSG00000178919; TAA
GGASAGAYHAR

SEQ ID NO: 24434 - protein, 9 aa, Homo sapiens
  misc_feature: Table A; Target 24434; HLA-B*08:01; FOXE1; ENSG00000178919; TAA
GGIDRFVSA

SEQ ID NO: 24435 - protein, 9 aa, Homo sapiens
  misc_feature: Table A; Target 24435; HLA-B*46:01; FOXE1; ENSG00000178919; TAA
GGIDRFVSA

SEQ ID NO: 24436 - protein, 9 aa, Homo sapiens
  misc_feature: Table A; Target 24436; HLA-B*54:01; FOXE1; ENSG00000178919; TAA
GGIDRFVSA

SEQ ID NO: 24437 - protein, 9 aa, Homo sapiens
  misc_feature: Table A; Target 24437; HLA-B*55:01; FOXE1; ENSG00000178919; TAA
GGIDRFVSA

SEQ ID NO: 24438 - protein, 9 aa, Homo sapiens
  misc_feature: Table A; Target 24438; HLA-B*56:01; FOXE1; ENSG00000178919; TAA
GGIDRFVSA

SEQ ID NO: 24439 - protein, 10 aa, Homo sapiens
  misc_feature: Table A; Target 24439; HLA-A*30:01; FOXE1; ENSG00000178919; TAA
GGIDRFVSAM

SEQ ID NO: 24440 - protein, 10 aa, Homo sapiens
  misc_feature: Table A; Target 24440; HLA-B*39:01; FOXE1; ENSG00000178919; TAA
GGIDRFVSAM

SEQ ID NO: 24441 - protein, 10 aa, Homo sapiens
  misc_feature: Table A; Target 24441; HLA-B*46:01; FOXE1; ENSG00000178919; TAA
GGIDRFVSAM

SEQ ID NO: 24442 - protein, 10 aa, Homo sapiens
  misc_feature: Table A; Target 24442; HLA-C*02:02; FOXE1; ENSG00000178919; TAA
GGIDRFVSAM

SEQ ID NO: 24443 - protein, 9 aa, Homo sapiens
  misc_feature: Table A; Target 24443; HLA-B*15:01; FOXE1; ENSG00000178919; TAA
GGVETTVDF

SEQ ID NO: 24444 - protein, 9 aa, Homo sapiens
  misc_feature: Table A; Target 24444; HLA-B*15:03; FOXE1; ENSG00000178919; TAA
GGVETTVDF

SEQ ID NO: 24445 - protein, 9 aa, Homo sapiens
  misc_feature: Table A; Target 24445; HLA-B*46:01; FOXE1; ENSG00000178919; TAA
GGVETTVDF

SEQ ID NO: 24446 - protein, 9 aa, Homo sapiens
  misc_feature: Table A; Target 24446; HLA-C*02:02; FOXE1; ENSG00000178919; TAA
GGVETTVDF

SEQ ID NO: 24447 - protein, 10 aa, Homo sapiens
  misc_feature: Table A; Target 24447; HLA-A*30:02; FOXE1; ENSG00000178919; TAA
GGVETTVDFY

SEQ ID NO: 24448 - protein, 10 aa, Homo sapiens
  misc_feature: Table A; Target 24448; HLA-B*39:01; FOXE1; ENSG00000178919; TAA
GGVETTVDFY

SEQ ID NO: 24449 - protein, 9 aa, Homo sapiens
  misc_feature: Table A; Target 24449; HLA-A*02:07; FOXE1; ENSG00000178919; TAA
GIDRFVSAM

SEQ ID NO: 24450 - protein, 9 aa, Homo sapiens
  misc_feature: Table A; Target 24450; HLA-B*15:03; FOXE1; ENSG00000178919; TAA
GIDRFVSAM

SEQ ID NO: 24451 - protein, 9 aa, Homo sapiens
  misc_feature: Table A; Target 24451; HLA-B*27:05; FOXE1; ENSG00000178919; TAA
GIDRFVSAM

SEQ ID NO: 24452 - protein, 9 aa, Homo sapiens
  misc_feature: Table A; Target 24452; HLA-B*55:01; FOXE1; ENSG00000178919; TAA
GIDRFVSAM

SEQ ID NO: 24453 - protein, 9 aa, Homo sapiens
  misc_feature: Table A; Target 24453; HLA-C*04:01; FOXE1; ENSG00000178919; TAA
GIDRFVSAM

SEQ ID NO: 24454 - protein, 9 aa, Homo sapiens
  misc_feature: Table A; Target 24454; HLA-C*05:01; FOXE1; ENSG00000178919; TAA
GIDRFVSAM

SEQ ID NO: 24455 - protein, 9 aa, Homo sapiens
  misc_feature: Table A; Target 24455; HLA-A*03:01; FOXE1; ENSG00000178919; TAA
GIYKFITER

SEQ ID NO: 24456 - protein, 9 aa, Homo sapiens
  misc_feature: Table A; Target 24456; HLA-A*11:01; FOXE1; ENSG00000178919; TAA
GIYKFITER

SEQ ID NO: 24457 - protein, 9 aa, Homo sapiens
  misc_feature: Table A; Target 24457; HLA-A*31:01; FOXE1; ENSG00000178919; TAA
GIYKFITER

SEQ ID NO: 24458 - protein, 10 aa, Homo sapiens
  misc_feature: Table A; Target 24458; HLA-A*02:03; FOXE1; ENSG00000178919; TAA
GLVPERPLSP

SEQ ID NO: 24459 - protein, 11 aa, Homo sapiens
  misc_feature: Table A; Target 24459; HLA-B*07:02; FOXE1; ENSG00000178919; TAA
GPAPSGPGGSC

SEQ ID NO: 24460 - protein, 11 aa, Homo sapiens
  misc_feature: Table A; Target 24460; HLA-B*56:01; FOXE1; ENSG00000178919; TAA
GPAPSGPGGSC

SEQ ID NO: 24461 - protein, 11 aa, Homo sapiens
  misc_feature: Table A; Target 24461; HLA-C*07:02; FOXE1; ENSG00000178919; TAA
GPAPSGPGGSC

SEQ ID NO: 24462 - protein, 9 aa, Homo sapiens
  misc_feature: Table A; Target 24462; HLA-B*56:01; FOXE1; ENSG00000178919; TAA
GPASPPAGG

SEQ ID NO: 24463 - protein, 11 aa, Homo sapiens
  misc_feature: Table A; Target 24463; HLA-B*39:01; FOXE1; ENSG00000178919; TAA
GPASPPAGGSS

SEQ ID NO: 24464 - protein, 9 aa, Homo sapiens
  misc_feature: Table A; Target 24464; HLA-B*55:01; FOXE1; ENSG00000178919; TAA
GPDGAYPQG

SEQ ID NO: 24465 - protein, 10 aa, Homo sapiens
  misc_feature: Table A; Target 24465; HLA-B*56:01; FOXE1; ENSG00000178919; TAA
GPDGAYPQGA

SEQ ID NO: 24466 - protein, 9 aa, Homo sapiens
  misc_feature: Table A; Target 24466; HLA-A*02:07; FOXE1; ENSG00000178919; TAA
GPPPPQPEV

SEQ ID NO: 24467 - protein, 9 aa, Homo sapiens
  misc_feature: Table A; Target 24467; HLA-B*07:02; FOXE1; ENSG00000178919; TAA
GPPPPQPEV

SEQ ID NO: 24468 - protein, 9 aa, Homo sapiens
  misc_feature: Table A; Target 24468; HLA-B*51:01; FOXE1; ENSG00000178919; TAA
GPPPPQPEV

SEQ ID NO: 24469 - protein, 9 aa, Homo sapiens
  misc_feature: Table A; Target 24469; HLA-B*54:01; FOXE1; ENSG00000178919; TAA
GPPPPQPEV

SEQ ID NO: 24470 - protein, 9 aa, Homo sapiens
  misc_feature: Table A; Target 24470; HLA-B*55:01; FOXE1; ENSG00000178919; TAA
GPPPPQPEV

SEQ ID NO: 24471 - protein, 9 aa, Homo sapiens
  misc_feature: Table A; Target 24471; HLA-B*56:01; FOXE1; ENSG00000178919; TAA
GPPPPQPEV

SEQ ID NO: 24472 - protein, 10 aa, Homo sapiens
  misc_feature: Table A; Target 24472; HLA-B*07:02; FOXE1; ENSG00000178919; TAA
GPPPPQPEVL

SEQ ID NO: 24473 - protein, 8 aa, Homo sapiens
  misc_feature: Table A; Target 24473; HLA-B*13:02; FOXE1; ENSG00000178919; TAA
GQFGALGA

SEQ ID NO: 24474 - protein, 10 aa, Homo sapiens
  misc_feature: Table A; Target 24474; HLA-A*26:01; FOXE1; ENSG00000178919; TAA
GQFGALGACY

SEQ ID NO: 24475 - protein, 10 aa, Homo sapiens
  misc_feature: Table A; Target 24475; HLA-A*29:02; FOXE1; ENSG00000178919; TAA
GQFGALGACY

SEQ ID NO: 24476 - protein, 10 aa, Homo sapiens
  misc_feature: Table A; Target 24476; HLA-A*30:02; FOXE1; ENSG00000178919; TAA
GQFGALGACY

SEQ ID NO: 24477 - protein, 10 aa, Homo sapiens
  misc_feature: Table A; Target 24477; HLA-A*32:01; FOXE1; ENSG00000178919; TAA
GQFGALGACY

SEQ ID NO: 24478 - protein, 10 aa, Homo sapiens
  misc_feature: Table A; Target 24478; HLA-B*15:01; FOXE1; ENSG00000178919; TAA
GQFGALGACY

SEQ ID NO: 24479 - protein, 10 aa, Homo sapiens
  misc_feature: Table A; Target 24479; HLA-B*15:03; FOXE1; ENSG00000178919; TAA
GQFGALGACY

SEQ ID NO: 24480 - protein, 10 aa, Homo sapiens
  misc_feature: Table A; Target 24480; HLA-C*07:04; FOXE1; ENSG00000178919; TAA
GQFGALGACY

SEQ ID NO: 24481 - protein, 10 aa, Homo sapiens
  misc_feature: Table A; Target 24481; HLA-C*16:04; FOXE1; ENSG00000178919; TAA
GQFGALGACY

SEQ ID NO: 24482 - protein, 11 aa, Homo sapiens
  misc_feature: Table A; Target 24482; HLA-A*26:01; FOXE1; ENSG00000178919; TAA
GQLGGASAGAY

SEQ ID NO: 24483 - protein, 11 aa, Homo sapiens
  misc_feature: Table A; Target 24483; HLA-A*29:02; FOXE1; ENSG00000178919; TAA
GQLGGASAGAY

SEQ ID NO: 24484 - protein, 11 aa, Homo sapiens
  misc_feature: Table A; Target 24484; HLA-A*30:02; FOXE1; ENSG00000178919; TAA
GQLGGASAGAY

SEQ ID NO: 24485 - protein, 11 aa, Homo sapiens
  misc_feature: Table A; Target 24485; HLA-A*32:01; FOXE1; ENSG00000178919; TAA
GQLGGASAGAY

SEQ ID NO: 24486 - protein, 11 aa, Homo sapiens
  misc_feature: Table A; Target 24486; HLA-B*13:02; FOXE1; ENSG00000178919; TAA
GQLGGASAGAY

SEQ ID NO: 24487 - protein, 11 aa, Homo sapiens
  misc_feature: Table A; Target 24487; HLA-B*15:01; FOXE1; ENSG00000178919; TAA
GQLGGASAGAY

SEQ ID NO: 24488 - protein, 11 aa, Homo sapiens
  misc_feature: Table A; Target 24488; HLA-B*15:03; FOXE1; ENSG00000178919; TAA
GQLGGASAGAY

SEQ ID NO: 24489 - protein, 11 aa, Homo sapiens
  misc_feature: Table A; Target 24489; HLA-B*27:02; FOXE1; ENSG00000178919; TAA
GQLGGASAGAY

SEQ ID NO: 24490 - protein, 11 aa, Homo sapiens
  misc_feature: Table A; Target 24490; HLA-B*27:05; FOXE1; ENSG00000178919; TAA
GQLGGASAGAY

SEQ ID NO: 24491 - protein, 11 aa, Homo sapiens
  misc_feature: Table A; Target 24491; HLA-B*39:01; FOXE1; ENSG00000178919; TAA
GQLGGASAGAY

SEQ ID NO: 24492 - protein, 11 aa, Homo sapiens
  misc_feature: Table A; Target 24492; HLA-B*44:03; FOXE1; ENSG00000178919; TAA
GQLGGASAGAY

SEQ ID NO: 24493 - protein, 11 aa, Homo sapiens
  misc_feature: Table A; Target 24493; HLA-B*46:01; FOXE1; ENSG00000178919; TAA
GQLGGASAGAY

SEQ ID NO: 24494 - protein, 11 aa, Homo sapiens
  misc_feature: Table A; Target 24494; HLA-C*01:02; FOXE1; ENSG00000178919; TAA
GQLGGASAGAY

SEQ ID NO: 24495 - protein, 11 aa, Homo sapiens
  misc_feature: Table A; Target 24495; HLA-C*02:02; FOXE1; ENSG00000178919; TAA
GQLGGASAGAY

SEQ ID NO: 24496 - protein, 11 aa, Homo sapiens
  misc_feature: Table A; Target 24496; HLA-C*04:01; FOXE1; ENSG00000178919; TAA
GQLGGASAGAY

SEQ ID NO: 24497 - protein, 11 aa, Homo sapiens
  misc_feature: Table A; Target 24497; HLA-C*07:04; FOXE1; ENSG00000178919; TAA
GQLGGASAGAY

SEQ ID NO: 24498 - protein, 11 aa, Homo sapiens
  misc_feature: Table A; Target 24498; HLA-C*12:03; FOXE1; ENSG00000178919; TAA
GQLGGASAGAY

SEQ ID NO: 24499 - protein, 11 aa, Homo sapiens
  misc_feature: Table A; Target 24499; HLA-C*14:02; FOXE1; ENSG00000178919; TAA
GQLGGASAGAY

SEQ ID NO: 24500 - protein, 11 aa, Homo sapiens
  misc_feature: Table A; Target 24500; HLA-C*16:04; FOXE1; ENSG00000178919; TAA
GQLGGASAGAY

SEQ ID NO: 24501 - protein, 9 aa, Homo sapiens
  misc_feature: Table A; Target 24501; HLA-B*27:05; FOXE1; ENSG00000178919; TAA
GRLAGPASP

SEQ ID NO: 24502 - protein, 10 aa, Homo sapiens
  misc_feature: Table A; Target 24502; HLA-B*27:02; FOXE1; ENSG00000178919; TAA
GRLAGPASPP

SEQ ID NO: 24503 - protein, 10 aa, Homo sapiens
  misc_feature: Table A; Target 24503; HLA-B*27:05; FOXE1; ENSG00000178919; TAA
GRLAGPASPP

SEQ ID NO: 24504 - protein, 10 aa, Homo sapiens
  misc_feature: Table A; Target 24504; HLA-C*06:02; FOXE1; ENSG00000178919; TAA
GRLAGPASPP

SEQ ID NO: 24505 - protein, 10 aa, Homo sapiens
  misc_feature: Table A; Target 24505; HLA-C*07:02; FOXE1; ENSG00000178919; TAA
GRLAGPASPP

SEQ ID NO: 24506 - protein, 11 aa, Homo sapiens
  misc_feature: Table A; Target 24506; HLA-B*27:05; FOXE1; ENSG00000178919; TAA
GRLAGPASPPA

SEQ ID NO: 24507 - protein, 9 aa, Homo sapiens
  misc_feature: Table A; Target 24507; HLA-B*27:05; FOXE1; ENSG00000178919; TAA
GRTSPGQFG

SEQ ID NO: 24508 - protein, 11 aa, Homo sapiens
  misc_feature: Table A; Target 24508; HLA-B*27:05; FOXE1; ENSG00000178919; TAA
GRTSPGQFGAL

SEQ ID NO: 24509 - protein, 11 aa, Homo sapiens
  misc_feature: Table A; Target 24509; HLA-B*39:01; FOXE1; ENSG00000178919; TAA
GRTSPGQFGAL

SEQ ID NO: 24510 - protein, 10 aa, Homo sapiens
  misc_feature: Table A; Target 24510; HLA-A*31:01; FOXE1; ENSG00000178919; TAA
GSAIFAAAGR

SEQ ID NO: 24511 - protein, 10 aa, Homo sapiens
  misc_feature: Table A; Target 24511; HLA-A*68:01; FOXE1; ENSG00000178919; TAA
GSAIFAAAGR

SEQ ID NO: 24512 - protein, 10 aa, Homo sapiens
  misc_feature: Table A; Target 24512; HLA-B*27:02; FOXE1; ENSG00000178919; TAA
GSAIFAAAGR

SEQ ID NO: 24513 - protein, 10 aa, Homo sapiens
  misc_feature: Table A; Target 24513; HLA-C*07:06; FOXE1; ENSG00000178919; TAA
GSAIFAAAGR

SEQ ID NO: 24514 - protein, 10 aa, Homo sapiens
  misc_feature: Table A; Target 24514; HLA-B*39:01; FOXE1; ENSG00000178919; TAA
GSSGGVETTV

SEQ ID NO: 24515 - protein, 9 aa, Homo sapiens
  misc_feature: Table A; Target 24515; HLA-A*01:01; FOXE1; ENSG00000178919; TAA
GVETTVDFY

SEQ ID NO: 24516 - protein, 9 aa, Homo sapiens
  misc_feature: Table A; Target 24516; HLA-A*29:02; FOXE1; ENSG00000178919; TAA
GVETTVDFY

SEQ ID NO: 24517 - protein, 9 aa, Homo sapiens
  misc_feature: Table A; Target 24517; HLA-A*30:02; FOXE1; ENSG00000178919; TAA
GVETTVDFY

SEQ ID NO: 24518 - protein, 9 aa, Homo sapiens
  misc_feature: Table A; Target 24518; HLA-C*07:06; FOXE1; ENSG00000178919; TAA
GVPGEATGR

SEQ ID NO: 24519 - protein, 9 aa, Homo sapiens
  misc_feature: Table A; Target 24519; HLA-B*56:01; FOXE1; ENSG00000178919; TAA
GYAPPSLAA

SEQ ID NO: 24520 - protein, 9 aa, Homo sapiens
  misc_feature: Table A; Target 24520; HLA-C*14:02; FOXE1; ENSG00000178919; TAA
GYAPPSLAA

SEQ ID NO: 24521 - protein, 9 aa, Homo sapiens
  misc_feature: Table A; Target 24521; HLA-C*14:02; FOXE1; ENSG00000178919; TAA
GYQPAGCTG

SEQ ID NO: 24522 - protein, 9 aa, Homo sapiens
  misc_feature: Table A; Target 24522; HLA-B*51:01; FOXE1; ENSG00000178919; TAA
HAAAYPGGI

SEQ ID NO: 24523 - protein, 11 aa, Homo sapiens
  misc_feature: Table A; Target 24523; HLA-A*68:01; FOXE1; ENSG00000178919; TAA
HAAAYPGGIDR

SEQ ID NO: 24524 - protein, 11 aa, Homo sapiens
  misc_feature: Table A; Target 24524; HLA-A*68:02; FOXE1; ENSG00000178919; TAA
HAAAYPGGIDR

SEQ ID NO: 24525 - protein, 11 aa, Homo sapiens
  misc_feature: Table A; Target 24525; HLA-C*07:06; FOXE1; ENSG00000178919; TAA
HAAAYPGGIDR

SEQ ID NO: 24526 - protein, 9 aa, Homo sapiens
  misc_feature: Table A; Target 24526; HLA-B*07:02; FOXE1; ENSG00000178919; TAA
HAPERRLTL

SEQ ID NO: 24527 - protein, 9 aa, Homo sapiens
  misc_feature: Table A; Target 24527; HLA-B*08:01; FOXE1; ENSG00000178919; TAA
HAPERRLTL

SEQ ID NO: 24528 - protein, 9 aa, Homo sapiens
  misc_feature: Table A; Target 24528; HLA-B*51:01; FOXE1; ENSG00000178919; TAA
HAPERRLTL

SEQ ID NO: 24529 - protein, 9 aa, Homo sapiens
  misc_feature: Table A; Target 24529; HLA-C*01:02; FOXE1; ENSG00000178919; TAA
HAPERRLTL

SEQ ID NO: 24530 - protein, 9 aa, Homo sapiens
  misc_feature: Table A; Target 24530; HLA-C*07:02; FOXE1; ENSG00000178919; TAA
HAPERRLTL

SEQ ID NO: 24531 - protein, 9 aa, Homo sapiens
  misc_feature: Table A; Target 24531; HLA-C*16:01; FOXE1; ENSG00000178919; TAA
HAPERRLTL

SEQ ID NO: 24532 - protein, 8 aa, Homo sapiens
  misc_feature: Table A; Target 24532; HLA-B*46:01; FOXE1; ENSG00000178919; TAA
HARHAAAY

SEQ ID NO: 24533 - protein, 8 aa, Homo sapiens
  misc_feature: Table A; Target 24533; HLA-B*37:01; FOXE1; ENSG00000178919; TAA
HDAAAAAA

SEQ ID NO: 24534 - protein, 9 aa, Homo sapiens
  misc_feature: Table A; Target 24534; HLA-A*30:01; FOXE1; ENSG00000178919; TAA
HDAAAAAAA

SEQ ID NO: 24535 - protein, 9 aa, Homo sapiens
  misc_feature: Table A; Target 24535; HLA-B*37:01; FOXE1; ENSG00000178919; TAA
HDAAAAAAA

SEQ ID NO: 24536 - protein, 9 aa, Homo sapiens
  misc_feature: Table A; Target 24536; HLA-B*54:01; FOXE1; ENSG00000178919; TAA
HDAAAAAAA

SEQ ID NO: 24537 - protein, 9 aa, Homo sapiens
  misc_feature: Table A; Target 24537; HLA-B*56:01; FOXE1; ENSG00000178919; TAA
HDAAAAAAA

SEQ ID NO: 24538 - protein, 9 aa, Homo sapiens
  misc_feature: Table A; Target 24538; HLA-C*06:02; FOXE1; ENSG00000178919; TAA
HDAAAAAAA

SEQ ID NO: 24539 - protein, 8 aa, Homo sapiens
  misc_feature: Table A; Target 24539; HLA-A*23:01; FOXE1; ENSG00000178919; TAA
IALIAMAI

SEQ ID NO: 24540 - protein, 8 aa, Homo sapiens
  misc_feature: Table A; Target 24540; HLA-B*08:01; FOXE1; ENSG00000178919; TAA
IALIAMAI

SEQ ID NO: 24541 - protein, 8 aa, Homo sapiens
  misc_feature: Table A; Target 24541; HLA-B*51:01; FOXE1; ENSG00000178919; TAA
IALIAMAI

SEQ ID NO: 24542 - protein, 8 aa, Homo sapiens
  misc_feature: Table A; Target 24542; HLA-C*03:04; FOXE1; ENSG00000178919; TAA
IALIAMAI

SEQ ID NO: 24543 - protein, 8 aa, Homo sapiens
  misc_feature: Table A; Target 24543; HLA-C*07:01; FOXE1; ENSG00000178919; TAA
IALIAMAI

SEQ ID NO: 24544 - protein, 9 aa, Homo sapiens
  misc_feature: Table A; Target 24544; HLA-B*54:01; FOXE1; ENSG00000178919; TAA
IALIAMAIA

SEQ ID NO: 24545 - protein, 8 aa, Homo sapiens
  misc_feature: Table A; Target 24545; HLA-B*54:01; FOXE1; ENSG00000178919; TAA
IAMAIAHA

SEQ ID NO: 24546 - protein, 8 aa, Homo sapiens
  misc_feature: Table A; Target 24546; HLA-B*56:01; FOXE1; ENSG00000178919; TAA
IAMAIAHA

SEQ ID NO: 24547 - protein, 9 aa, Homo sapiens
  misc_feature: Table A; Target 24547; HLA-B*54:01; FOXE1; ENSG00000178919; TAA
IAMAIAHAP

SEQ ID NO: 24548 - protein, 9 aa, Homo sapiens
  misc_feature: Table A; Target 24548; HLA-C*03:03; FOXE1; ENSG00000178919; TAA
IAMAIAHAP

SEQ ID NO: 24549 - protein, 9 aa, Homo sapiens
  misc_feature: Table A; Target 24549; HLA-C*03:04; FOXE1; ENSG00000178919; TAA
IAMAIAHAP

SEQ ID NO: 24550 - protein, 9 aa, Homo sapiens
  misc_feature: Table A; Target 24550; HLA-C*16:01; FOXE1; ENSG00000178919; TAA
IAMAIAHAP

SEQ ID NO: 24551 - protein, 9 aa, Homo sapiens
  misc_feature: Table A; Target 24551; HLA-C*16:02; FOXE1; ENSG00000178919; TAA
IAMAIAHAP

SEQ ID NO: 24552 - protein, 11 aa, Homo sapiens
  misc_feature: Table A; Target 24552; HLA-A*68:01; FOXE1; ENSG00000178919; TAA
IAMAIAHAPER

SEQ ID NO: 24553 - protein, 8 aa, Homo sapiens
  misc_feature: Table A; Target 24553; HLA-B*18:01; FOXE1; ENSG00000178919; TAA
IDRFVSAM

SEQ ID NO: 24554 - protein, 8 aa, Homo sapiens
  misc_feature: Table A; Target 24554; HLA-B*37:01; FOXE1; ENSG00000178919; TAA
IDRFVSAM

SEQ ID NO: 24555 - protein, 8 aa, Homo sapiens
  misc_feature: Table A; Target 24555; HLA-B*40:02; FOXE1; ENSG00000178919; TAA
IDRFVSAM

SEQ ID NO: 24556 - protein, 8 aa, Homo sapiens
  misc_feature: Table A; Target 24556; HLA-C*14:02; FOXE1; ENSG00000178919; TAA
IFAAAGRL

SEQ ID NO: 24557 - protein, 9 aa, Homo sapiens
  misc_feature: Table A; Target 24557; HLA-C*14:02; FOXE1; ENSG00000178919; TAA
IFAAAGRLA

SEQ ID NO: 24558 - protein, 8 aa, Homo sapiens
  misc_feature: Table A; Target 24558; HLA-C*14:02; FOXE1; ENSG00000178919; TAA
IFPGAVPA

SEQ ID NO: 24559 - protein, 9 aa, Homo sapiens
  misc_feature: Table A; Target 24559; HLA-C*14:02; FOXE1; ENSG00000178919; TAA
IFPGAVPAA

SEQ ID NO: 24560 - protein, 10 aa, Homo sapiens
  misc_feature: Table A; Target 24560; HLA-A*29:02; FOXE1; ENSG00000178919; TAA
IFPGAVPAAR

SEQ ID NO: 24561 - protein, 8 aa, Homo sapiens
  misc_feature: Table A; Target 24561; HLA-A*01:01; FOXE1; ENSG00000178919; TAA
ITERFPFY

SEQ ID NO: 24562 - protein, 8 aa, Homo sapiens
  misc_feature: Table A; Target 24562; HLA-A*31:01; FOXE1; ENSG00000178919; TAA
IYKFITER

SEQ ID NO: 24563 - protein, 8 aa, Homo sapiens
  misc_feature: Table A; Target 24563; HLA-A*33:03; FOXE1; ENSG00000178919; TAA
IYKFITER

SEQ ID NO: 24564 - protein, 9 aa, Homo sapiens
  misc_feature: Table A; Target 24564; HLA-A*23:01; FOXE1; ENSG00000178919; TAA
IYKFITERF

SEQ ID NO: 24565 - protein, 9 aa, Homo sapiens
  misc_feature: Table A; Target 24565; HLA-A*24:02; FOXE1; ENSG00000178919; TAA
IYKFITERF

SEQ ID NO: 24566 - protein, 9 aa, Homo sapiens
  misc_feature: Table A; Target 24566; HLA-A*29:02; FOXE1; ENSG00000178919; TAA
IYKFITERF

SEQ ID NO: 24567 - protein, 9 aa, Homo sapiens
  misc_feature: Table A; Target 24567; HLA-B*57:01; FOXE1; ENSG00000178919; TAA
IYKFITERF

SEQ ID NO: 24568 - protein, 9 aa, Homo sapiens
  misc_feature: Table A; Target 24568; HLA-B*40:01; FOXE1; ENSG00000178919; TAA
KEERGETAA

SEQ ID NO: 24569 - protein, 9 aa, Homo sapiens
  misc_feature: Table A; Target 24569; HLA-B*40:02; FOXE1; ENSG00000178919; TAA
KEERGETAA

SEQ ID NO: 24570 - protein, 9 aa, Homo sapiens
  misc_feature: Table A; Target 24570; HLA-A*24:02; FOXE1; ENSG00000178919; TAA
KFITERFPF

SEQ ID NO: 24571 - protein, 9 aa, Homo sapiens
  misc_feature: Table A; Target 24571; HLA-B*07:02; FOXE1; ENSG00000178919; TAA
KPPYSYIAL

SEQ ID NO: 24572 - protein, 9 aa, Homo sapiens
  misc_feature: Table A; Target 24572; HLA-C*01:02; FOXE1; ENSG00000178919; TAA
KPPYSYIAL

SEQ ID NO: 24573 - protein, 9 aa, Homo sapiens
  misc_feature: Table A; Target 24573; HLA-C*07:02; FOXE1; ENSG00000178919; TAA
KPPYSYIAL

SEQ ID NO: 24574 - protein, 8 aa, Homo sapiens
  misc_feature: Table A; Target 24574; HLA-A*01:01; FOXE1; ENSG00000178919; TAA
LAAPPPVY

SEQ ID NO: 24575 - protein, 8 aa, Homo sapiens
  misc_feature: Table A; Target 24575; HLA-B*15:03; FOXE1; ENSG00000178919; TAA
LAAPPPVY

SEQ ID NO: 24576 - protein, 8 aa, Homo sapiens
  misc_feature: Table A; Target 24576; HLA-B*35:01; FOXE1; ENSG00000178919; TAA
LAAPPPVY

SEQ ID NO: 24577 - protein, 8 aa, Homo sapiens
  misc_feature: Table A; Target 24577; HLA-B*39:01; FOXE1; ENSG00000178919; TAA
LAAPPPVY

SEQ ID NO: 24578 - protein, 8 aa, Homo sapiens
  misc_feature: Table A; Target 24578; HLA-B*46:01; FOXE1; ENSG00000178919; TAA
LAAPPPVY

SEQ ID NO: 24579 - protein, 8 aa, Homo sapiens
  misc_feature: Table A; Target 24579; HLA-B*58:01; FOXE1; ENSG00000178919; TAA
LAAPPPVY

SEQ ID NO: 24580 - protein, 8 aa, Homo sapiens
  misc_feature: Table A; Target 24580; HLA-C*02:02; FOXE1; ENSG00000178919; TAA
LAAPPPVY

SEQ ID NO: 24581 - protein, 8 aa, Homo sapiens
  misc_feature: Table A; Target 24581; HLA-C*12:03; FOXE1; ENSG00000178919; TAA
LAAPPPVY

SEQ ID NO: 24582 - protein, 8 aa, Homo sapiens
  misc_feature: Table A; Target 24582; HLA-C*16:01; FOXE1; ENSG00000178919; TAA
LAAPPPVY

SEQ ID NO: 24583 - protein, 9 aa, Homo sapiens
  misc_feature: Table A; Target 24583; HLA-A*01:01; FOXE1; ENSG00000178919; TAA
LAAPPPVYY

SEQ ID NO: 24584 - protein, 9 aa, Homo sapiens
  misc_feature: Table A; Target 24584; HLA-A*03:01; FOXE1; ENSG00000178919; TAA
LAAPPPVYY

SEQ ID NO: 24585 - protein, 9 aa, Homo sapiens
  misc_feature: Table A; Target 24585; HLA-A*03:02; FOXE1; ENSG00000178919; TAA
LAAPPPVYY

SEQ ID NO: 24586 - protein, 9 aa, Homo sapiens
  misc_feature: Table A; Target 24586; HLA-A*11:01; FOXE1; ENSG00000178919; TAA
LAAPPPVYY

SEQ ID NO: 24587 - protein, 9 aa, Homo sapiens
  misc_feature: Table A; Target 24587; HLA-A*23:01; FOXE1; ENSG00000178919; TAA
LAAPPPVYY

SEQ ID NO: 24588 - protein, 9 aa, Homo sapiens
  misc_feature: Table A; Target 24588; HLA-A*25:01; FOXE1; ENSG00000178919; TAA
LAAPPPVYY

SEQ ID NO: 24589 - protein, 9 aa, Homo sapiens
  misc_feature: Table A; Target 24589; HLA-A*26:01; FOXE1; ENSG00000178919; TAA
LAAPPPVYY

SEQ ID NO: 24590 - protein, 9 aa, Homo sapiens
  misc_feature: Table A; Target 24590; HLA-A*29:02; FOXE1; ENSG00000178919; TAA
LAAPPPVYY

SEQ ID NO: 24591 - protein, 9 aa, Homo sapiens
  misc_feature: Table A; Target 24591; HLA-A*30:02; FOXE1; ENSG00000178919; TAA
LAAPPPVYY

SEQ ID NO: 24592 - protein, 9 aa, Homo sapiens
  misc_feature: Table A; Target 24592; HLA-A*32:01; FOXE1; ENSG00000178919; TAA
LAAPPPVYY

SEQ ID NO: 24593 - protein, 9 aa, Homo sapiens
  misc_feature: Table A; Target 24593; HLA-A*68:01; FOXE1; ENSG00000178919; TAA
LAAPPPVYY

SEQ ID NO: 24594 - protein, 9 aa, Homo sapiens
  misc_feature: Table A; Target 24594; HLA-B*15:01; FOXE1; ENSG00000178919; TAA
LAAPPPVYY

SEQ ID NO: 24595 - protein, 9 aa, Homo sapiens
  misc_feature: Table A; Target 24595; HLA-B*15:03; FOXE1; ENSG00000178919; TAA
LAAPPPVYY

SEQ ID NO: 24596 - protein, 9 aa, Homo sapiens
  misc_feature: Table A; Target 24596; HLA-B*18:01; FOXE1; ENSG00000178919; TAA
LAAPPPVYY

SEQ ID NO: 24597 - protein, 9 aa, Homo sapiens
  misc_feature: Table A; Target 24597; HLA-B*27:05; FOXE1; ENSG00000178919; TAA
LAAPPPVYY

SEQ ID NO: 24598 - protein, 9 aa, Homo sapiens
  misc_feature: Table A; Target 24598; HLA-B*35:01; FOXE1; ENSG00000178919; TAA
LAAPPPVYY

SEQ ID NO: 24599 - protein, 9 aa, Homo sapiens
  misc_feature: Table A; Target 24599; HLA-B*39:01; FOXE1; ENSG00000178919; TAA
LAAPPPVYY

SEQ ID NO: 24600 - protein, 9 aa, Homo sapiens
  misc_feature: Table A; Target 24600; HLA-B*46:01; FOXE1; ENSG00000178919; TAA
LAAPPPVYY

SEQ ID NO: 24601 - protein, 9 aa, Homo sapiens
  misc_feature: Table A; Target 24601; HLA-B*51:01; FOXE1; ENSG00000178919; TAA
LAAPPPVYY

SEQ ID NO: 24602 - protein, 9 aa, Homo sapiens
  misc_feature: Table A; Target 24602; HLA-B*55:01; FOXE1; ENSG00000178919; TAA
LAAPPPVYY

SEQ ID NO: 24603 - protein, 9 aa, Homo sapiens
  misc_feature: Table A; Target 24603; HLA-B*57:01; FOXE1; ENSG00000178919; TAA
LAAPPPVYY

SEQ ID NO: 24604 - protein, 9 aa, Homo sapiens
  misc_feature: Table A; Target 24604; HLA-B*58:01; FOXE1; ENSG00000178919; TAA
LAAPPPVYY

SEQ ID NO: 24605 - protein, 9 aa, Homo sapiens
  misc_feature: Table A; Target 24605; HLA-C*01:02; FOXE1; ENSG00000178919; TAA
LAAPPPVYY

SEQ ID NO: 24606 - protein, 9 aa, Homo sapiens
  misc_feature: Table A; Target 24606; HLA-C*02:02; FOXE1; ENSG00000178919; TAA
LAAPPPVYY

SEQ ID NO: 24607 - protein, 9 aa, Homo sapiens
  misc_feature: Table A; Target 24607; HLA-C*03:03; FOXE1; ENSG00000178919; TAA
LAAPPPVYY

SEQ ID NO: 24608 - protein, 9 aa, Homo sapiens
  misc_feature: Table A; Target 24608; HLA-C*03:04; FOXE1; ENSG00000178919; TAA
LAAPPPVYY

SEQ ID NO: 24609 - protein, 9 aa, Homo sapiens
  misc_feature: Table A; Target 24609; HLA-C*05:01; FOXE1; ENSG00000178919; TAA
LAAPPPVYY

SEQ ID NO: 24610 - protein, 9 aa, Homo sapiens
  misc_feature: Table A; Target 24610; HLA-C*07:04; FOXE1; ENSG00000178919; TAA
LAAPPPVYY

SEQ ID NO: 24611 - protein, 9 aa, Homo sapiens
  misc_feature: Table A; Target 24611; HLA-C*07:06; FOXE1; ENSG00000178919; TAA
LAAPPPVYY

SEQ ID NO: 24612 - protein, 9 aa, Homo sapiens
  misc_feature: Table A; Target 24612; HLA-C*12:03; FOXE1; ENSG00000178919; TAA
LAAPPPVYY

SEQ ID NO: 24613 - protein, 9 aa, Homo sapiens
  misc_feature: Table A; Target 24613; HLA-C*16:01; FOXE1; ENSG00000178919; TAA
LAAPPPVYY

SEQ ID NO: 24614 - protein, 9 aa, Homo sapiens
  misc_feature: Table A; Target 24614; HLA-C*16:02; FOXE1; ENSG00000178919; TAA
LAAPPPVYY

SEQ ID NO: 24615 - protein, 9 aa, Homo sapiens
  misc_feature: Table A; Target 24615; HLA-C*16:04; FOXE1; ENSG00000178919; TAA
LAAPPPVYY

SEQ ID NO: 24616 - protein, 11 aa, Homo sapiens
  misc_feature: Table A; Target 24616; HLA-B*54:01; FOXE1; ENSG00000178919; TAA
LAAPPPVYYPA

SEQ ID NO: 24617 - protein, 8 aa, Homo sapiens
  misc_feature: Table A; Target 24617; HLA-B*39:01; FOXE1; ENSG00000178919; TAA
LAGPASPP

SEQ ID NO: 24618 - protein, 8 aa, Homo sapiens
  misc_feature: Table A; Target 24618; HLA-C*03:03; FOXE1; ENSG00000178919; TAA
LAGPASPP

SEQ ID NO: 24619 - protein, 9 aa, Homo sapiens
  misc_feature: Table A; Target 24619; HLA-A*02:01; FOXE1; ENSG00000178919; TAA
LAGPASPPA

SEQ ID NO: 24620 - protein, 9 aa, Homo sapiens
  misc_feature: Table A; Target 24620; HLA-B*27:05; FOXE1; ENSG00000178919; TAA
LAGPASPPA

SEQ ID NO: 24621 - protein, 9 aa, Homo sapiens
  misc_feature: Table A; Target 24621; HLA-B*35:01; FOXE1; ENSG00000178919; TAA
LAGPASPPA

SEQ ID NO: 24622 - protein, 9 aa, Homo sapiens
  misc_feature: Table A; Target 24622; HLA-B*35:03; FOXE1; ENSG00000178919; TAA
LAGPASPPA

SEQ ID NO: 24623 - protein, 9 aa, Homo sapiens
  misc_feature: Table A; Target 24623; HLA-B*39:01; FOXE1; ENSG00000178919; TAA
LAGPASPPA

SEQ ID NO: 24624 - protein, 9 aa, Homo sapiens
  misc_feature: Table A; Target 24624; HLA-B*46:01; FOXE1; ENSG00000178919; TAA
LAGPASPPA

SEQ ID NO: 24625 - protein, 9 aa, Homo sapiens
  misc_feature: Table A; Target 24625; HLA-B*54:01; FOXE1; ENSG00000178919; TAA
LAGPASPPA

SEQ ID NO: 24626 - protein, 9 aa, Homo sapiens
  misc_feature: Table A; Target 24626; HLA-B*55:01; FOXE1; ENSG00000178919; TAA
LAGPASPPA

SEQ ID NO: 24627 - protein, 9 aa, Homo sapiens
  misc_feature: Table A; Target 24627; HLA-B*56:01; FOXE1; ENSG00000178919; TAA
LAGPASPPA

SEQ ID NO: 24628 - protein, 9 aa, Homo sapiens
  misc_feature: Table A; Target 24628; HLA-C*02:02; FOXE1; ENSG00000178919; TAA
LAGPASPPA

SEQ ID NO: 24629 - protein, 9 aa, Homo sapiens
  misc_feature: Table A; Target 24629; HLA-C*03:03; FOXE1; ENSG00000178919; TAA
LAGPASPPA

SEQ ID NO: 24630 - protein, 9 aa, Homo sapiens
  misc_feature: Table A; Target 24630; HLA-C*03:04; FOXE1; ENSG00000178919; TAA
LAGPASPPA

SEQ ID NO: 24631 - protein, 9 aa, Homo sapiens
  misc_feature: Table A; Target 24631; HLA-C*04:01; FOXE1; ENSG00000178919; TAA
LAGPASPPA

SEQ ID NO: 24632 - protein, 9 aa, Homo sapiens
  misc_feature: Table A; Target 24632; HLA-C*06:02; FOXE1; ENSG00000178919; TAA
LAGPASPPA

SEQ ID NO: 24633 - protein, 9 aa, Homo sapiens
  misc_feature: Table A; Target 24633; HLA-C*07:01; FOXE1; ENSG00000178919; TAA
LAGPASPPA

SEQ ID NO: 24634 - protein, 9 aa, Homo sapiens
  misc_feature: Table A; Target 24634; HLA-C*07:04; FOXE1; ENSG00000178919; TAA
LAGPASPPA

SEQ ID NO: 24635 - protein, 9 aa, Homo sapiens
  misc_feature: Table A; Target 24635; HLA-C*12:03; FOXE1; ENSG00000178919; TAA
LAGPASPPA

SEQ ID NO: 24636 - protein, 9 aa, Homo sapiens
  misc_feature: Table A; Target 24636; HLA-C*16:01; FOXE1; ENSG00000178919; TAA
LAGPASPPA

SEQ ID NO: 24637 - protein, 9 aa, Homo sapiens
  misc_feature: Table A; Target 24637; HLA-A*30:02; FOXE1; ENSG00000178919; TAA
LGGASAGAY

SEQ ID NO: 24638 - protein, 9 aa, Homo sapiens
  misc_feature: Table A; Target 24638; HLA-B*15:01; FOXE1; ENSG00000178919; TAA
LGGASAGAY

SEQ ID NO: 24639 - protein, 9 aa, Homo sapiens
  misc_feature: Table A; Target 24639; HLA-B*46:01; FOXE1; ENSG00000178919; TAA
LGGASAGAY

SEQ ID NO: 24640 - protein, 9 aa, Homo sapiens
  misc_feature: Table A; Target 24640; HLA-C*07:04; FOXE1; ENSG00000178919; TAA
LGGASAGAY

SEQ ID NO: 24641 - protein, 9 aa, Homo sapiens
  misc_feature: Table A; Target 24641; HLA-C*14:02; FOXE1; ENSG00000178919; TAA
LGGASAGAY

SEQ ID NO: 24642 - protein, 9 aa, Homo sapiens
  misc_feature: Table A; Target 24642; HLA-A*02:03; FOXE1; ENSG00000178919; TAA
LIAMAIAHA

SEQ ID NO: 24643 - protein, 8 aa, Homo sapiens
  misc_feature: Table A; Target 24643; HLA-A*03:02; FOXE1; ENSG00000178919; TAA
LTLGGIYK

SEQ ID NO: 24644 - protein, 8 aa, Homo sapiens
  misc_feature: Table A; Target 24644; HLA-A*11:01; FOXE1; ENSG00000178919; TAA
LTLGGIYK

SEQ ID NO: 24645 - protein, 9 aa, Homo sapiens
  misc_feature: Table A; Target 24645; HLA-A*02:04; FOXE1; ENSG00000178919; TAA
LTLGGIYKF

SEQ ID NO: 24646 - protein, 9 aa, Homo sapiens
  misc_feature: Table A; Target 24646; HLA-A*23:01; FOXE1; ENSG00000178919; TAA
LTLGGIYKF

SEQ ID NO: 24647 - protein, 9 aa, Homo sapiens
  misc_feature: Table A; Target 24647; HLA-A*24:02; FOXE1; ENSG00000178919; TAA
LTLGGIYKF

SEQ ID NO: 24648 - protein, 9 aa, Homo sapiens
  misc_feature: Table A; Target 24648; HLA-A*29:02; FOXE1; ENSG00000178919; TAA
LTLGGIYKF

SEQ ID NO: 24649 - protein, 9 aa, Homo sapiens
  misc_feature: Table A; Target 24649; HLA-B*57:01; FOXE1; ENSG00000178919; TAA
LTLGGIYKF

SEQ ID NO: 24650 - protein, 9 aa, Homo sapiens
  misc_feature: Table A; Target 24650; HLA-A*02:07; FOXE1; ENSG00000178919; TAA
LVPERPLSP

SEQ ID NO: 24651 - protein, 11 aa, Homo sapiens
  misc_feature: Table A; Target 24651; HLA-A*02:07; FOXE1; ENSG00000178919; TAA
LVPERPLSPEL

SEQ ID NO: 24652 - protein, 9 aa, Homo sapiens
  misc_feature: Table A; Target 24652; HLA-A*26:01; FOXE1; ENSG00000178919; TAA
MAIAHAPER

SEQ ID NO: 24653 - protein, 9 aa, Homo sapiens
  misc_feature: Table A; Target 24653; HLA-A*33:01; FOXE1; ENSG00000178919; TAA
MAIAHAPER

SEQ ID NO: 24654 - protein, 9 aa, Homo sapiens
  misc_feature: Table A; Target 24654; HLA-A*33:03; FOXE1; ENSG00000178919; TAA
MAIAHAPER

SEQ ID NO: 24655 - protein, 9 aa, Homo sapiens
  misc_feature: Table A; Target 24655; HLA-A*68:01; FOXE1; ENSG00000178919; TAA
MAIAHAPER

SEQ ID NO: 24656 - protein, 9 aa, Homo sapiens
  misc_feature: Table A; Target 24656; HLA-A*68:02; FOXE1; ENSG00000178919; TAA
MAIAHAPER

SEQ ID NO: 24657 - protein, 9 aa, Homo sapiens
  misc_feature: Table A; Target 24657; HLA-B*27:05; FOXE1; ENSG00000178919; TAA
MAIAHAPER

SEQ ID NO: 24658 - protein, 9 aa, Homo sapiens
  misc_feature: Table A; Target 24658; HLA-B*35:01; FOXE1; ENSG00000178919; TAA
MAIAHAPER

SEQ ID NO: 24659 - protein, 9 aa, Homo sapiens
  misc_feature: Table A; Target 24659; HLA-B*35:03; FOXE1; ENSG00000178919; TAA
MAIAHAPER

SEQ ID NO: 24660 - protein, 9 aa, Homo sapiens
  misc_feature: Table A; Target 24660; HLA-B*46:01; FOXE1; ENSG00000178919; TAA
MAIAHAPER

SEQ ID NO: 24661 - protein, 9 aa, Homo sapiens
  misc_feature: Table A; Target 24661; HLA-B*51:01; FOXE1; ENSG00000178919; TAA
MAIAHAPER

SEQ ID NO: 24662 - protein, 9 aa, Homo sapiens
  misc_feature: Table A; Target 24662; HLA-B*54:01; FOXE1; ENSG00000178919; TAA
MAIAHAPER

SEQ ID NO: 24663 - protein, 9 aa, Homo sapiens
  misc_feature: Table A; Target 24663; HLA-B*57:01; FOXE1; ENSG00000178919; TAA
MAIAHAPER

SEQ ID NO: 24664 - protein, 9 aa, Homo sapiens
  misc_feature: Table A; Target 24664; HLA-C*02:02; FOXE1; ENSG00000178919; TAA
MAIAHAPER

SEQ ID NO: 24665 - protein, 9 aa, Homo sapiens
  misc_feature: Table A; Target 24665; HLA-C*03:03; FOXE1; ENSG00000178919; TAA
MAIAHAPER

SEQ ID NO: 24666 - protein, 9 aa, Homo sapiens
  misc_feature: Table A; Target 24666; HLA-C*03:04; FOXE1; ENSG00000178919; TAA
MAIAHAPER

SEQ ID NO: 24667 - protein, 9 aa, Homo sapiens
  misc_feature: Table A; Target 24667; HLA-C*07:06; FOXE1; ENSG00000178919; TAA
MAIAHAPER

SEQ ID NO: 24668 - protein, 9 aa, Homo sapiens
  misc_feature: Table A; Target 24668; HLA-C*12:03; FOXE1; ENSG00000178919; TAA
MAIAHAPER

SEQ ID NO: 24669 - protein, 9 aa, Homo sapiens
  misc_feature: Table A; Target 24669; HLA-C*16:01; FOXE1; ENSG00000178919; TAA
MAIAHAPER

SEQ ID NO: 24670 - protein, 9 aa, Homo sapiens
  misc_feature: Table A; Target 24670; HLA-C*16:02; FOXE1; ENSG00000178919; TAA
MAIAHAPER

SEQ ID NO: 24671 - protein, 9 aa, Homo sapiens
  misc_feature: Table A; Target 24671; HLA-C*16:04; FOXE1; ENSG00000178919; TAA
MAIAHAPER

SEQ ID NO: 24672 - protein, 8 aa, Homo sapiens
  misc_feature: Table A; Target 24672; HLA-C*04:01; FOXE1; ENSG00000178919; TAA
MFESGSFL

SEQ ID NO: 24673 - protein, 8 aa, Homo sapiens
  misc_feature: Table A; Target 24673; HLA-C*14:02; FOXE1; ENSG00000178919; TAA
MFESGSFL

SEQ ID NO: 24674 - protein, 9 aa, Homo sapiens
  misc_feature: Table A; Target 24674; HLA-A*29:02; FOXE1; ENSG00000178919; TAA
MFESGSFLR

SEQ ID NO: 24675 - protein, 9 aa, Homo sapiens
  misc_feature: Table A; Target 24675; HLA-A*33:03; FOXE1; ENSG00000178919; TAA
MFESGSFLR

SEQ ID NO: 24676 - protein, 9 aa, Homo sapiens
  misc_feature: Table A; Target 24676; HLA-B*38:01; FOXE1; ENSG00000178919; TAA
MHDAAAAAA

SEQ ID NO: 24677 - protein, 9 aa, Homo sapiens
  misc_feature: Table A; Target 24677; HLA-B*39:01; FOXE1; ENSG00000178919; TAA
MHDAAAAAA

SEQ ID NO: 24678 - protein, 11 aa, Homo sapiens
  misc_feature: Table A; Target 24678; HLA-B*54:01; FOXE1; ENSG00000178919; TAA
NPGGQLGGASA

SEQ ID NO: 24679 - protein, 11 aa, Homo sapiens
  misc_feature: Table A; Target 24679; HLA-B*55:01; FOXE1; ENSG00000178919; TAA
NPGGQLGGASA

SEQ ID NO: 24680 - protein, 11 aa, Homo sapiens
  misc_feature: Table A; Target 24680; HLA-B*56:01; FOXE1; ENSG00000178919; TAA
NPGGQLGGASA

SEQ ID NO: 24681 - protein, 9 aa, Homo sapiens
  misc_feature: Table A; Target 24681; HLA-B*51:01; FOXE1; ENSG00000178919; TAA
NPKKWQNSI

SEQ ID NO: 24682 - protein, 8 aa, Homo sapiens
  misc_feature: Table A; Target 24682; HLA-B*56:01; FOXE1; ENSG00000178919; TAA
NPSAYAAA

SEQ ID NO: 24683 - protein, 9 aa, Homo sapiens
  misc_feature: Table A; Target 24683; HLA-A*29:02; FOXE1; ENSG00000178919; TAA
NPSAYAAAY

SEQ ID NO: 24684 - protein, 9 aa, Homo sapiens
  misc_feature: Table A; Target 24684; HLA-A*30:02; FOXE1; ENSG00000178919; TAA
NPSAYAAAY

SEQ ID NO: 24685 - protein, 9 aa, Homo sapiens
  misc_feature: Table A; Target 24685; HLA-B*18:01; FOXE1; ENSG00000178919; TAA
NPSAYAAAY

SEQ ID NO: 24686 - protein, 9 aa, Homo sapiens
  misc_feature: Table A; Target 24686; HLA-B*35:01; FOXE1; ENSG00000178919; TAA
NPSAYAAAY

SEQ ID NO: 24687 - protein, 9 aa, Homo sapiens
  misc_feature: Table A; Target 24687; HLA-B*35:03; FOXE1; ENSG00000178919; TAA
NPSAYAAAY

SEQ ID NO: 24688 - protein, 9 aa, Homo sapiens
  misc_feature: Table A; Target 24688; HLA-B*55:01; FOXE1; ENSG00000178919; TAA
NPSAYAAAY

SEQ ID NO: 24689 - protein, 9 aa, Homo sapiens
  misc_feature: Table A; Target 24689; HLA-C*03:03; FOXE1; ENSG00000178919; TAA
NPSAYAAAY

SEQ ID NO: 24690 - protein, 9 aa, Homo sapiens
  misc_feature: Table A; Target 24690; HLA-C*07:04; FOXE1; ENSG00000178919; TAA
NPSAYAAAY

SEQ ID NO: 24691 - protein, 9 aa, Homo sapiens
  misc_feature: Table A; Target 24691; HLA-C*07:06; FOXE1; ENSG00000178919; TAA
NPSAYAAAY

SEQ ID NO: 24692 - protein, 9 aa, Homo sapiens
  misc_feature: Table A; Target 24692; HLA-C*14:02; FOXE1; ENSG00000178919; TAA
NPSAYAAAY

SEQ ID NO: 24693 - protein, 9 aa, Homo sapiens
  misc_feature: Table A; Target 24693; HLA-C*16:01; FOXE1; ENSG00000178919; TAA
NPSAYAAAY

SEQ ID NO: 24694 - protein, 9 aa, Homo sapiens
  misc_feature: Table A; Target 24694; HLA-C*16:02; FOXE1; ENSG00000178919; TAA
NPSAYAAAY

SEQ ID NO: 24695 - protein, 9 aa, Homo sapiens
  misc_feature: Table A; Target 24695; HLA-B*58:01; FOXE1; ENSG00000178919; TAA
NSIRHNLTL

SEQ ID NO: 24696 - protein, 9 aa, Homo sapiens
  misc_feature: Table A; Target 24696; HLA-C*03:03; FOXE1; ENSG00000178919; TAA
NSIRHNLTL

SEQ ID NO: 24697 - protein, 9 aa, Homo sapiens
  misc_feature: Table A; Target 24697; HLA-C*03:04; FOXE1; ENSG00000178919; TAA
NSIRHNLTL

SEQ ID NO: 24698 - protein, 9 aa, Homo sapiens
  misc_feature: Table A; Target 24698; HLA-A*68:01; FOXE1; ENSG00000178919; TAA
PAASPGPCR

SEQ ID NO: 24699 - protein, 9 aa, Homo sapiens
  misc_feature: Table A; Target 24699; HLA-B*54:01; FOXE1; ENSG00000178919; TAA
PANPSAYAA

SEQ ID NO: 24700 - protein, 9 aa, Homo sapiens
  misc_feature: Table A; Target 24700; HLA-B*56:01; FOXE1; ENSG00000178919; TAA
PANPSAYAA

SEQ ID NO: 24701 - protein, 11 aa, Homo sapiens
  misc_feature: Table A; Target 24701; HLA-A*29:02; FOXE1; ENSG00000178919; TAA
PANPSAYAAAY

SEQ ID NO: 24702 - protein, 11 aa, Homo sapiens
  misc_feature: Table A; Target 24702; HLA-A*30:02; FOXE1; ENSG00000178919; TAA
PANPSAYAAAY

SEQ ID NO: 24703 - protein, 8 aa, Homo sapiens
  misc_feature: Table A; Target 24703; HLA-C*06:02; FOXE1; ENSG00000178919; TAA
PGGIDRFV

SEQ ID NO: 24704 - protein, 8 aa, Homo sapiens
  misc_feature: Table A; Target 24704; HLA-B*51:01; FOXE1; ENSG00000178919; TAA
PPPPQPEV

SEQ ID NO: 24705 - protein, 8 aa, Homo sapiens
  misc_feature: Table A; Target 24705; HLA-B*54:01; FOXE1; ENSG00000178919; TAA
PPVYYPAA

SEQ ID NO: 24706 - protein, 8 aa, Homo sapiens
  misc_feature: Table A; Target 24706; HLA-B*56:01; FOXE1; ENSG00000178919; TAA
PPVYYPAA

SEQ ID NO: 24707 - protein, 8 aa, Homo sapiens
  misc_feature: Table A; Target 24707; HLA-B*15:03; FOXE1; ENSG00000178919; TAA
PPYPGAVY

SEQ ID NO: 24708 - protein, 8 aa, Homo sapiens
  misc_feature: Table A; Target 24708; HLA-B*35:01; FOXE1; ENSG00000178919; TAA
PPYPGAVY

SEQ ID NO: 24709 - protein, 8 aa, Homo sapiens
  misc_feature: Table A; Target 24709; HLA-C*04:01; FOXE1; ENSG00000178919; TAA
PPYPGAVY

SEQ ID NO: 24710 - protein, 8 aa, Homo sapiens
  misc_feature: Table A; Target 24710; HLA-C*07:01; FOXE1; ENSG00000178919; TAA
PPYPGAVY

SEQ ID NO: 24711 - protein, 9 aa, Homo sapiens
  misc_feature: Table A; Target 24711; HLA-B*54:01; FOXE1; ENSG00000178919; TAA
PPYPGAVYA

SEQ ID NO: 24712 - protein, 9 aa, Homo sapiens
  misc_feature: Table A; Target 24712; HLA-B*55:01; FOXE1; ENSG00000178919; TAA
PPYPGAVYA

SEQ ID NO: 24713 - protein, 9 aa, Homo sapiens
  misc_feature: Table A; Target 24713; HLA-B*56:01; FOXE1; ENSG00000178919; TAA
PPYPGAVYA

SEQ ID NO: 24714 - protein, 11 aa, Homo sapiens
  misc_feature: Table A; Target 24714; HLA-A*26:01; FOXE1; ENSG00000178919; TAA
PPYPGAVYAGY

SEQ ID NO: 24715 - protein, 11 aa, Homo sapiens
  misc_feature: Table A; Target 24715; HLA-A*30:02; FOXE1; ENSG00000178919; TAA
PPYPGAVYAGY

SEQ ID NO: 24716 - protein, 9 aa, Homo sapiens
  misc_feature: Table A; Target 24716; HLA-B*51:01; FOXE1; ENSG00000178919; TAA
PPYSYIALI

SEQ ID NO: 24717 - protein, 9 aa, Homo sapiens
  misc_feature: Table A; Target 24717; HLA-B*15:01; FOXE1; ENSG00000178919; TAA
PQGAGSAIF

SEQ ID NO: 24718 - protein, 9 aa, Homo sapiens
  misc_feature: Table A; Target 24718; HLA-C*07:04; FOXE1; ENSG00000178919; TAA
PQGAGSAIF

SEQ ID NO: 24719 - protein, 9 aa, Homo sapiens
  misc_feature: Table A; Target 24719; HLA-A*02:07; FOXE1; ENSG00000178919; TAA
PQPEVLATV

SEQ ID NO: 24720 - protein, 10 aa, Homo sapiens
  misc_feature: Table A; Target 24720; HLA-B*07:02; FOXE1; ENSG00000178919; TAA
PSGPGGSCAF

SEQ ID NO: 24721 - protein, 10 aa, Homo sapiens
  misc_feature: Table A; Target 24721; HLA-C*07:01; FOXE1; ENSG00000178919; TAA
PSGPGGSCAF

SEQ ID NO: 24722 - protein, 10 aa, Homo sapiens
  misc_feature: Table A; Target 24722; HLA-C*07:02; FOXE1; ENSG00000178919; TAA
PSGPGGSCAF

SEQ ID NO: 24723 - protein, 10 aa, Homo sapiens
  misc_feature: Table A; Target 24723; HLA-A*29:02; FOXE1; ENSG00000178919; TAA
PYPGAVYAGY

SEQ ID NO: 24724 - protein, 9 aa, Homo sapiens
  misc_feature: Table A; Target 24724; HLA-A*29:02; FOXE1; ENSG00000178919; TAA
QFGALGACY

SEQ ID NO: 24725 - protein, 9 aa, Homo sapiens
  misc_feature: Table A; Target 24725; HLA-A*30:02; FOXE1; ENSG00000178919; TAA
QFGALGACY

SEQ ID NO: 24726 - protein, 11 aa, Homo sapiens
  misc_feature: Table A; Target 24726; HLA-B*56:01; FOXE1; ENSG00000178919; TAA
QGAGSAIFAAA

SEQ ID NO: 24727 - protein, 10 aa, Homo sapiens
  misc_feature: Table A; Target 24727; HLA-A*01:01; FOXE1; ENSG00000178919; TAA
QLGGASAGAY

SEQ ID NO: 24728 - protein, 10 aa, Homo sapiens
  misc_feature: Table A; Target 24728; HLA-A*30:02; FOXE1; ENSG00000178919; TAA
QLGGASAGAY

SEQ ID NO: 24729 - protein, 10 aa, Homo sapiens
  misc_feature: Table A; Target 24729; HLA-B*15:01; FOXE1; ENSG00000178919; TAA
QLGGASAGAY

SEQ ID NO: 24730 - protein, 10 aa, Homo sapiens
  misc_feature: Table A; Target 24730; HLA-C*07:01; FOXE1; ENSG00000178919; TAA
QLGGASAGAY

SEQ ID NO: 24731 - protein, 10 aa, Homo sapiens
  misc_feature: Table A; Target 24731; HLA-C*07:04; FOXE1; ENSG00000178919; TAA
QLGGASAGAY

SEQ ID NO: 24732 - protein, 8 aa, Homo sapiens
  misc_feature: Table A; Target 24732; HLA-B*08:01; FOXE1; ENSG00000178919; TAA
QNSIRHNL

SEQ ID NO: 24733 - protein, 8 aa, Homo sapiens
  misc_feature: Table A; Target 24733; HLA-C*16:01; FOXE1; ENSG00000178919; TAA
QNSIRHNL

SEQ ID NO: 24734 - protein, 9 aa, Homo sapiens
  misc_feature: Table A; Target 24734; HLA-B*27:05; FOXE1; ENSG00000178919; TAA
QRGKPPYSY

SEQ ID NO: 24735 - protein, 9 aa, Homo sapiens
  misc_feature: Table A; Target 24735; HLA-C*16:04; FOXE1; ENSG00000178919; TAA
QRGKPPYSY

SEQ ID NO: 24736 - protein, 8 aa, Homo sapiens
  misc_feature: Table A; Target 24736; HLA-A*30:02; FOXE1; ENSG00000178919; TAA
RGKPPYSY

SEQ ID NO: 24737 - protein, 9 aa, Homo sapiens
  misc_feature: Table A; Target 24737; HLA-A*02:03; FOXE1; ENSG00000178919; TAA
RLAGPASPP

SEQ ID NO: 24738 - protein, 9 aa, Homo sapiens
  misc_feature: Table A; Target 24738; HLA-A*03:01; FOXE1; ENSG00000178919; TAA
RLAGPASPP

SEQ ID NO: 24739 - protein, 9 aa, Homo sapiens
  misc_feature: Table A; Target 24739; HLA-A*03:02; FOXE1; ENSG00000178919; TAA
RLAGPASPP

SEQ ID NO: 24740 - protein, 9 aa, Homo sapiens
  misc_feature: Table A; Target 24740; HLA-A*32:01; FOXE1; ENSG00000178919; TAA
RLAGPASPP

SEQ ID NO: 24741 - protein, 9 aa, Homo sapiens
  misc_feature: Table A; Target 24741; HLA-B*46:01; FOXE1; ENSG00000178919; TAA
RLAGPASPP

SEQ ID NO: 24742 - protein, 9 aa, Homo sapiens
  misc_feature: Table A; Target 24742; HLA-C*06:02; FOXE1; ENSG00000178919; TAA
RLAGPASPP

SEQ ID NO: 24743 - protein, 9 aa, Homo sapiens
  misc_feature: Table A; Target 24743; HLA-C*07:01; FOXE1; ENSG00000178919; TAA
RLAGPASPP

SEQ ID NO: 24744 - protein, 9 aa, Homo sapiens
  misc_feature: Table A; Target 24744; HLA-C*07:02; FOXE1; ENSG00000178919; TAA
RLAGPASPP

SEQ ID NO: 24745 - protein, 9 aa, Homo sapiens
  misc_feature: Table A; Target 24745; HLA-C*16:02; FOXE1; ENSG00000178919; TAA
RLAGPASPP

SEQ ID NO: 24746 - protein, 10 aa, Homo sapiens
  misc_feature: Table A; Target 24746; HLA-A*02:01; FOXE1; ENSG00000178919; TAA
RLAGPASPPA

SEQ ID NO: 24747 - protein, 10 aa, Homo sapiens
  misc_feature: Table A; Target 24747; HLA-A*02:03; FOXE1; ENSG00000178919; TAA
RLAGPASPPA

SEQ ID NO: 24748 - protein, 10 aa, Homo sapiens
  misc_feature: Table A; Target 24748; HLA-A*03:01; FOXE1; ENSG00000178919; TAA
RLAGPASPPA

SEQ ID NO: 24749 - protein, 10 aa, Homo sapiens
  misc_feature: Table A; Target 24749; HLA-A*03:02; FOXE1; ENSG00000178919; TAA
RLAGPASPPA

SEQ ID NO: 24750 - protein, 10 aa, Homo sapiens
  misc_feature: Table A; Target 24750; HLA-B*55:01; FOXE1; ENSG00000178919; TAA
RLAGPASPPA

SEQ ID NO: 24751 - protein, 10 aa, Homo sapiens
  misc_feature: Table A; Target 24751; HLA-B*56:01; FOXE1; ENSG00000178919; TAA
RLAGPASPPA

SEQ ID NO: 24752 - protein, 10 aa, Homo sapiens
  misc_feature: Table A; Target 24752; HLA-C*06:02; FOXE1; ENSG00000178919; TAA
RLAGPASPPA

SEQ ID NO: 24753 - protein, 11 aa, Homo sapiens
  misc_feature: Table A; Target 24753; HLA-A*03:01; FOXE1; ENSG00000178919; TAA
RLAGPASPPAG

SEQ ID NO: 24754 - protein, 11 aa, Homo sapiens
  misc_feature: Table A; Target 24754; HLA-A*03:02; FOXE1; ENSG00000178919; TAA
RLAGPASPPAG

SEQ ID NO: 24755 - protein, 9 aa, Homo sapiens
  misc_feature: Table A; Target 24755; HLA-A*03:01; FOXE1; ENSG00000178919; TAA
RLTLGGIYK

SEQ ID NO: 24756 - protein, 9 aa, Homo sapiens
  misc_feature: Table A; Target 24756; HLA-A*03:02; FOXE1; ENSG00000178919; TAA
RLTLGGIYK

SEQ ID NO: 24757 - protein, 8 aa, Homo sapiens
  misc_feature: Table A; Target 24757; HLA-B*07:02; FOXE1; ENSG00000178919; TAA
RPANPSAY

SEQ ID NO: 24758 - protein, 9 aa, Homo sapiens
  misc_feature: Table A; Target 24758; HLA-B*07:02; FOXE1; ENSG00000178919; TAA
RPANPSAYA

SEQ ID NO: 24759 - protein, 9 aa, Homo sapiens
  misc_feature: Table A; Target 24759; HLA-B*54:01; FOXE1; ENSG00000178919; TAA
RPANPSAYA

SEQ ID NO: 24760 - protein, 9 aa, Homo sapiens
  misc_feature: Table A; Target 24760; HLA-B*55:01; FOXE1; ENSG00000178919; TAA
RPANPSAYA

SEQ ID NO: 24761 - protein, 9 aa, Homo sapiens
  misc_feature: Table A; Target 24761; HLA-B*56:01; FOXE1; ENSG00000178919; TAA
RPANPSAYA

SEQ ID NO: 24762 - protein, 9 aa, Homo sapiens
  misc_feature: Table A; Target 24762; HLA-C*07:02; FOXE1; ENSG00000178919; TAA
RPANPSAYA

SEQ ID NO: 24763 - protein, 10 aa, Homo sapiens
  misc_feature: Table A; Target 24763; HLA-B*07:02; FOXE1; ENSG00000178919; TAA
RPANPSAYAA

SEQ ID NO: 24764 - protein, 10 aa, Homo sapiens
  misc_feature: Table A; Target 24764; HLA-B*54:01; FOXE1; ENSG00000178919; TAA
RPANPSAYAA

SEQ ID NO: 24765 - protein, 10 aa, Homo sapiens
  misc_feature: Table A; Target 24765; HLA-B*55:01; FOXE1; ENSG00000178919; TAA
RPANPSAYAA

SEQ ID NO: 24766 - protein, 10 aa, Homo sapiens
  misc_feature: Table A; Target 24766; HLA-B*56:01; FOXE1; ENSG00000178919; TAA
RPANPSAYAA

SEQ ID NO: 24767 - protein, 10 aa, Homo sapiens
  misc_feature: Table A; Target 24767; HLA-C*07:02; FOXE1; ENSG00000178919; TAA
RPANPSAYAA

SEQ ID NO: 24768 - protein, 11 aa, Homo sapiens
  misc_feature: Table A; Target 24768; HLA-B*07:02; FOXE1; ENSG00000178919; TAA
RPANPSAYAAA

SEQ ID NO: 24769 - protein, 11 aa, Homo sapiens
  misc_feature: Table A; Target 24769; HLA-B*54:01; FOXE1; ENSG00000178919; TAA
RPANPSAYAAA

SEQ ID NO: 24770 - protein, 11 aa, Homo sapiens
  misc_feature: Table A; Target 24770; HLA-B*55:01; FOXE1; ENSG00000178919; TAA
RPANPSAYAAA

SEQ ID NO: 24771 - protein, 11 aa, Homo sapiens
  misc_feature: Table A; Target 24771; HLA-B*56:01; FOXE1; ENSG00000178919; TAA
RPANPSAYAAA

SEQ ID NO: 24772 - protein, 10 aa, Homo sapiens
  misc_feature: Table A; Target 24772; HLA-B*56:01; FOXE1; ENSG00000178919; TAA
RPLSPELGPA

SEQ ID NO: 24773 - protein, 8 aa, Homo sapiens
  misc_feature: Table A; Target 24773; HLA-B*56:01; FOXE1; ENSG00000178919; TAA
RPPYPGAV

SEQ ID NO: 24774 - protein, 9 aa, Homo sapiens
  misc_feature: Table A; Target 24774; HLA-A*03:01; FOXE1; ENSG00000178919; TAA
RPPYPGAVY

SEQ ID NO: 24775 - protein, 9 aa, Homo sapiens
  misc_feature: Table A; Target 24775; HLA-A*26:01; FOXE1; ENSG00000178919; TAA
RPPYPGAVY

SEQ ID NO: 24776 - protein, 9 aa, Homo sapiens
  misc_feature: Table A; Target 24776; HLA-A*29:02; FOXE1; ENSG00000178919; TAA
RPPYPGAVY

SEQ ID NO: 24777 - protein, 9 aa, Homo sapiens
  misc_feature: Table A; Target 24777; HLA-A*30:02; FOXE1; ENSG00000178919; TAA
RPPYPGAVY

SEQ ID NO: 24778 - protein, 9 aa, Homo sapiens
  misc_feature: Table A; Target 24778; HLA-B*07:02; FOXE1; ENSG00000178919; TAA
RPPYPGAVY

SEQ ID NO: 24779 - protein, 9 aa, Homo sapiens
  misc_feature: Table A; Target 24779; HLA-B*15:01; FOXE1; ENSG00000178919; TAA
RPPYPGAVY

SEQ ID NO: 24780 - protein, 9 aa, Homo sapiens
  misc_feature: Table A; Target 24780; HLA-B*15:03; FOXE1; ENSG00000178919; TAA
RPPYPGAVY

SEQ ID NO: 24781 - protein, 9 aa, Homo sapiens
  misc_feature: Table A; Target 24781; HLA-B*35:01; FOXE1; ENSG00000178919; TAA
RPPYPGAVY

SEQ ID NO: 24782 - protein, 9 aa, Homo sapiens
  misc_feature: Table A; Target 24782; HLA-B*35:03; FOXE1; ENSG00000178919; TAA
RPPYPGAVY

SEQ ID NO: 24783 - protein, 9 aa, Homo sapiens
  misc_feature: Table A; Target 24783; HLA-B*46:01; FOXE1; ENSG00000178919; TAA
RPPYPGAVY

SEQ ID NO: 24784 - protein, 9 aa, Homo sapiens
  misc_feature: Table A; Target 24784; HLA-B*51:01; FOXE1; ENSG00000178919; TAA
RPPYPGAVY

SEQ ID NO: 24785 - protein, 9 aa, Homo sapiens
  misc_feature: Table A; Target 24785; HLA-B*54:01; FOXE1; ENSG00000178919; TAA
RPPYPGAVY

SEQ ID NO: 24786 - protein, 9 aa, Homo sapiens
  misc_feature: Table A; Target 24786; HLA-B*55:01; FOXE1; ENSG00000178919; TAA
RPPYPGAVY

SEQ ID NO: 24787 - protein, 9 aa, Homo sapiens
  misc_feature: Table A; Target 24787; HLA-B*56:01; FOXE1; ENSG00000178919; TAA
RPPYPGAVY

SEQ ID NO: 24788 - protein, 9 aa, Homo sapiens
  misc_feature: Table A; Target 24788; HLA-C*01:02; FOXE1; ENSG00000178919; TAA
RPPYPGAVY

SEQ ID NO: 24789 - protein, 9 aa, Homo sapiens
  misc_feature: Table A; Target 24789; HLA-C*03:03; FOXE1; ENSG00000178919; TAA
RPPYPGAVY

SEQ ID NO: 24790 - protein, 9 aa, Homo sapiens
  misc_feature: Table A; Target 24790; HLA-C*04:01; FOXE1; ENSG00000178919; TAA
RPPYPGAVY

SEQ ID NO: 24791 - protein, 9 aa, Homo sapiens
  misc_feature: Table A; Target 24791; HLA-C*07:02; FOXE1; ENSG00000178919; TAA
RPPYPGAVY

SEQ ID NO: 24792 - protein, 9 aa, Homo sapiens
  misc_feature: Table A; Target 24792; HLA-C*07:04; FOXE1; ENSG00000178919; TAA
RPPYPGAVY

SEQ ID NO: 24793 - protein, 9 aa, Homo sapiens
  misc_feature: Table A; Target 24793; HLA-C*14:02; FOXE1; ENSG00000178919; TAA
RPPYPGAVY

SEQ ID NO: 24794 - protein, 10 aa, Homo sapiens
  misc_feature: Table A; Target 24794; HLA-B*54:01; FOXE1; ENSG00000178919; TAA
RPPYPGAVYA

SEQ ID NO: 24795 - protein, 10 aa, Homo sapiens
  misc_feature: Table A; Target 24795; HLA-B*56:01; FOXE1; ENSG00000178919; TAA
RPPYPGAVYA

SEQ ID NO: 24796 - protein, 10 aa, Homo sapiens
  misc_feature: Table A; Target 24796; HLA-A*01:01; FOXE1; ENSG00000178919; TAA
RSDLSTYPAY

SEQ ID NO: 24797 - protein, 10 aa, Homo sapiens
  misc_feature: Table A; Target 24797; HLA-A*30:02; FOXE1; ENSG00000178919; TAA
RSDLSTYPAY

SEQ ID NO: 24798 - protein, 10 aa, Homo sapiens
  misc_feature: Table A; Target 24798; HLA-B*58:01; FOXE1; ENSG00000178919; TAA
RSDLSTYPAY

SEQ ID NO: 24799 - protein, 11 aa, Homo sapiens
  misc_feature: Table A; Target 24799; HLA-A*01:01; FOXE1; ENSG00000178919; TAA
RSDLSTYPAYM

SEQ ID NO: 24800 - protein, 9 aa, Homo sapiens
  misc_feature: Table A; Target 24800; HLA-A*03:01; FOXE1; ENSG00000178919; TAA
RVFGLVPER

SEQ ID NO: 24801 - protein, 9 aa, Homo sapiens
  misc_feature: Table A; Target 24801; HLA-A*03:02; FOXE1; ENSG00000178919; TAA
RVFGLVPER

SEQ ID NO: 24802 - protein, 9 aa, Homo sapiens
  misc_feature: Table A; Target 24802; HLA-A*11:01; FOXE1; ENSG00000178919; TAA
RVFGLVPER

SEQ ID NO: 24803 - protein, 9 aa, Homo sapiens
  misc_feature: Table A; Target 24803; HLA-A*31:01; FOXE1; ENSG00000178919; TAA
RVFGLVPER

SEQ ID NO: 24804 - protein, 9 aa, Homo sapiens
  misc_feature: Table A; Target 24804; HLA-B*57:01; FOXE1; ENSG00000178919; TAA
RVFGLVPER

SEQ ID NO: 24805 - protein, 9 aa, Homo sapiens
  misc_feature: Table A; Target 24805; HLA-C*07:06; FOXE1; ENSG00000178919; TAA
RVFGLVPER

SEQ ID NO: 24806 - protein, 11 aa, Homo sapiens
  misc_feature: Table A; Target 24806; HLA-A*01:01; FOXE1; ENSG00000178919; TAA
SAGAPATTTGY

SEQ ID NO: 24807 - protein, 11 aa, Homo sapiens
  misc_feature: Table A; Target 24807; HLA-A*26:01; FOXE1; ENSG00000178919; TAA
SAGAPATTTGY

SEQ ID NO: 24808 - protein, 11 aa, Homo sapiens
  misc_feature: Table A; Target 24808; HLA-A*29:02; FOXE1; ENSG00000178919; TAA
SAGAPATTTGY

SEQ ID NO: 24809 - protein, 11 aa, Homo sapiens
  misc_feature: Table A; Target 24809; HLA-A*30:02; FOXE1; ENSG00000178919; TAA
SAGAPATTTGY

SEQ ID NO: 24810 - protein, 11 aa, Homo sapiens
  misc_feature: Table A; Target 24810; HLA-A*32:01; FOXE1; ENSG00000178919; TAA
SAGAPATTTGY

SEQ ID NO: 24811 - protein, 11 aa, Homo sapiens
  misc_feature: Table A; Target 24811; HLA-B*15:01; FOXE1; ENSG00000178919; TAA
SAGAPATTTGY

SEQ ID NO: 24812 - protein, 11 aa, Homo sapiens
  misc_feature: Table A; Target 24812; HLA-B*15:03; FOXE1; ENSG00000178919; TAA
SAGAPATTTGY

SEQ ID NO: 24813 - protein, 11 aa, Homo sapiens
  misc_feature: Table A; Target 24813; HLA-B*27:02; FOXE1; ENSG00000178919; TAA
SAGAPATTTGY

SEQ ID NO: 24814 - protein, 11 aa, Homo sapiens
  misc_feature: Table A; Target 24814; HLA-B*35:01; FOXE1; ENSG00000178919; TAA
SAGAPATTTGY

SEQ ID NO: 24815 - protein, 11 aa, Homo sapiens
  misc_feature: Table A; Target 24815; HLA-B*46:01; FOXE1; ENSG00000178919; TAA
SAGAPATTTGY

SEQ ID NO: 24816 - protein, 11 aa, Homo sapiens
  misc_feature: Table A; Target 24816; HLA-C*02:02; FOXE1; ENSG00000178919; TAA
SAGAPATTTGY

SEQ ID NO: 24817 - protein, 11 aa, Homo sapiens
  misc_feature: Table A; Target 24817; HLA-C*04:01; FOXE1; ENSG00000178919; TAA
SAGAPATTTGY

SEQ ID NO: 24818 - protein, 11 aa, Homo sapiens
  misc_feature: Table A; Target 24818; HLA-C*07:04; FOXE1; ENSG00000178919; TAA
SAGAPATTTGY

SEQ ID NO: 24819 - protein, 11 aa, Homo sapiens
  misc_feature: Table A; Target 24819; HLA-C*12:03; FOXE1; ENSG00000178919; TAA
SAGAPATTTGY

SEQ ID NO: 24820 - protein, 11 aa, Homo sapiens
  misc_feature: Table A; Target 24820; HLA-C*16:02; FOXE1; ENSG00000178919; TAA
SAGAPATTTGY

SEQ ID NO: 24821 - protein, 11 aa, Homo sapiens
  misc_feature: Table A; Target 24821; HLA-C*16:04; FOXE1; ENSG00000178919; TAA
SAGAPATTTGY

SEQ ID NO: 24822 - protein, 8 aa, Homo sapiens
  misc_feature: Table A; Target 24822; HLA-A*31:01; FOXE1; ENSG00000178919; TAA
SAGAYHAR

SEQ ID NO: 24823 - protein, 8 aa, Homo sapiens
  misc_feature: Table A; Target 24823; HLA-A*33:01; FOXE1; ENSG00000178919; TAA
SAGAYHAR

SEQ ID NO: 24824 - protein, 8 aa, Homo sapiens
  misc_feature: Table A; Target 24824; HLA-A*33:03; FOXE1; ENSG00000178919; TAA
SAGAYHAR

SEQ ID NO: 24825 - protein, 8 aa, Homo sapiens
  misc_feature: Table A; Target 24825; HLA-C*07:06; FOXE1; ENSG00000178919; TAA
SAGAYHAR

SEQ ID NO: 24826 - protein, 9 aa, Homo sapiens
  misc_feature: Table A; Target 24826; HLA-A*11:01; FOXE1; ENSG00000178919; TAA
SAIFAAAGR

SEQ ID NO: 24827 - protein, 9 aa, Homo sapiens
  misc_feature: Table A; Target 24827; HLA-A*31:01; FOXE1; ENSG00000178919; TAA
SAIFAAAGR

SEQ ID NO: 24828 - protein, 9 aa, Homo sapiens
  misc_feature: Table A; Target 24828; HLA-A*33:01; FOXE1; ENSG00000178919; TAA
SAIFAAAGR

SEQ ID NO: 24829 - protein, 9 aa, Homo sapiens
  misc_feature: Table A; Target 24829; HLA-A*33:03; FOXE1; ENSG00000178919; TAA
SAIFAAAGR

SEQ ID NO: 24830 - protein, 9 aa, Homo sapiens
  misc_feature: Table A; Target 24830; HLA-A*68:01; FOXE1; ENSG00000178919; TAA
SAIFAAAGR

SEQ ID NO: 24831 - protein, 9 aa, Homo sapiens
  misc_feature: Table A; Target 24831; HLA-C*07:06; FOXE1; ENSG00000178919; TAA
SAIFAAAGR

SEQ ID NO: 24832 - protein, 9 aa, Homo sapiens
  misc_feature: Table A; Target 24832; HLA-A*29:02; FOXE1; ENSG00000178919; TAA
SDLSTYPAY

SEQ ID NO: 24833 - protein, 9 aa, Homo sapiens
  misc_feature: Table A; Target 24833; HLA-A*30:02; FOXE1; ENSG00000178919; TAA
SDLSTYPAY

SEQ ID NO: 24834 - protein, 9 aa, Homo sapiens
  misc_feature: Table A; Target 24834; HLA-B*18:01; FOXE1; ENSG00000178919; TAA
SDLSTYPAY

SEQ ID NO: 24835 - protein, 9 aa, Homo sapiens
  misc_feature: Table A; Target 24835; HLA-B*44:02; FOXE1; ENSG00000178919; TAA
SDLSTYPAY

SEQ ID NO: 24836 - protein, 9 aa, Homo sapiens
  misc_feature: Table A; Target 24836; HLA-B*44:03; FOXE1; ENSG00000178919; TAA
SDLSTYPAY

SEQ ID NO: 24837 - protein, 9 aa, Homo sapiens
  misc_feature: Table A; Target 24837; HLA-C*07:01; FOXE1; ENSG00000178919; TAA
SDLSTYPAY

SEQ ID NO: 24838 - protein, 9 aa, Homo sapiens
  misc_feature: Table A; Target 24838; HLA-C*01:02; FOXE1; ENSG00000178919; TAA
SGPGGSCAF

SEQ ID NO: 24839 - protein, 9 aa, Homo sapiens
  misc_feature: Table A; Target 24839; HLA-A*01:01; FOXE1; ENSG00000178919; TAA
SLAAPPPVY

SEQ ID NO: 24840 - protein, 9 aa, Homo sapiens
  misc_feature: Table A; Target 24840; HLA-A*03:01; FOXE1; ENSG00000178919; TAA
SLAAPPPVY

SEQ ID NO: 24841 - protein, 9 aa, Homo sapiens
  misc_feature: Table A; Target 24841; HLA-A*03:02; FOXE1; ENSG00000178919; TAA
SLAAPPPVY

SEQ ID NO: 24842 - protein, 9 aa, Homo sapiens
  misc_feature: Table A; Target 24842; HLA-A*25:01; FOXE1; ENSG00000178919; TAA
SLAAPPPVY

SEQ ID NO: 24843 - protein, 9 aa, Homo sapiens
  misc_feature: Table A; Target 24843; HLA-A*26:01; FOXE1; ENSG00000178919; TAA
SLAAPPPVY

SEQ ID NO: 24844 - protein, 9 aa, Homo sapiens
  misc_feature: Table A; Target 24844; HLA-A*29:02; FOXE1; ENSG00000178919; TAA
SLAAPPPVY

SEQ ID NO: 24845 - protein, 9 aa, Homo sapiens
  misc_feature: Table A; Target 24845; HLA-A*30:02; FOXE1; ENSG00000178919; TAA
SLAAPPPVY

SEQ ID NO: 24846 - protein, 9 aa, Homo sapiens
  misc_feature: Table A; Target 24846; HLA-A*32:01; FOXE1; ENSG00000178919; TAA
SLAAPPPVY

SEQ ID NO: 24847 - protein, 9 aa, Homo sapiens
  misc_feature: Table A; Target 24847; HLA-B*15:01; FOXE1; ENSG00000178919; TAA
SLAAPPPVY

SEQ ID NO: 24848 - protein, 9 aa, Homo sapiens
  misc_feature: Table A; Target 24848; HLA-B*15:03; FOXE1; ENSG00000178919; TAA
SLAAPPPVY

SEQ ID NO: 24849 - protein, 9 aa, Homo sapiens
  misc_feature: Table A; Target 24849; HLA-B*35:01; FOXE1; ENSG00000178919; TAA
SLAAPPPVY

SEQ ID NO: 24850 - protein, 9 aa, Homo sapiens
  misc_feature: Table A; Target 24850; HLA-B*39:01; FOXE1; ENSG00000178919; TAA
SLAAPPPVY

SEQ ID NO: 24851 - protein, 9 aa, Homo sapiens
  misc_feature: Table A; Target 24851; HLA-B*46:01; FOXE1; ENSG00000178919; TAA
SLAAPPPVY

SEQ ID NO: 24852 - protein, 9 aa, Homo sapiens
  misc_feature: Table A; Target 24852; HLA-C*02:02; FOXE1; ENSG00000178919; TAA
SLAAPPPVY

SEQ ID NO: 24853 - protein, 9 aa, Homo sapiens
  misc_feature: Table A; Target 24853; HLA-C*07:04; FOXE1; ENSG00000178919; TAA
SLAAPPPVY

SEQ ID NO: 24854 - protein, 9 aa, Homo sapiens
  misc_feature: Table A; Target 24854; HLA-C*16:01; FOXE1; ENSG00000178919; TAA
SLAAPPPVY

SEQ ID NO: 24855 - protein, 10 aa, Homo sapiens
  misc_feature: Table A; Target 24855; HLA-A*01:01; FOXE1; ENSG00000178919; TAA
SLAAPPPVYY

SEQ ID NO: 24856 - protein, 10 aa, Homo sapiens
  misc_feature: Table A; Target 24856; HLA-A*03:01; FOXE1; ENSG00000178919; TAA
SLAAPPPVYY

SEQ ID NO: 24857 - protein, 10 aa, Homo sapiens
  misc_feature: Table A; Target 24857; HLA-A*03:02; FOXE1; ENSG00000178919; TAA
SLAAPPPVYY

SEQ ID NO: 24858 - protein, 10 aa, Homo sapiens
  misc_feature: Table A; Target 24858; HLA-A*26:01; FOXE1; ENSG00000178919; TAA
SLAAPPPVYY

SEQ ID NO: 24859 - protein, 10 aa, Homo sapiens
  misc_feature: Table A; Target 24859; HLA-A*29:02; FOXE1; ENSG00000178919; TAA
SLAAPPPVYY

SEQ ID NO: 24860 - protein, 10 aa, Homo sapiens
  misc_feature: Table A; Target 24860; HLA-A*30:02; FOXE1; ENSG00000178919; TAA
SLAAPPPVYY

SEQ ID NO: 24861 - protein, 10 aa, Homo sapiens
  misc_feature: Table A; Target 24861; HLA-A*32:01; FOXE1; ENSG00000178919; TAA
SLAAPPPVYY

SEQ ID NO: 24862 - protein, 10 aa, Homo sapiens
  misc_feature: Table A; Target 24862; HLA-B*15:01; FOXE1; ENSG00000178919; TAA
SLAAPPPVYY

SEQ ID NO: 24863 - protein, 10 aa, Homo sapiens
  misc_feature: Table A; Target 24863; HLA-B*15:03; FOXE1; ENSG00000178919; TAA
SLAAPPPVYY

SEQ ID NO: 24864 - protein, 10 aa, Homo sapiens
  misc_feature: Table A; Target 24864; HLA-C*02:02; FOXE1; ENSG00000178919; TAA
SLAAPPPVYY

SEQ ID NO: 24865 - protein, 8 aa, Homo sapiens
  misc_feature: Table A; Target 24865; HLA-B*08:01; FOXE1; ENSG00000178919; TAA
SPGPCRVF

SEQ ID NO: 24866 - protein, 8 aa, Homo sapiens
  misc_feature: Table A; Target 24866; HLA-B*07:02; FOXE1; ENSG00000178919; TAA
SPGQFGAL

SEQ ID NO: 24867 - protein, 8 aa, Homo sapiens
  misc_feature: Table A; Target 24867; HLA-B*08:01; FOXE1; ENSG00000178919; TAA
SPGQFGAL

SEQ ID NO: 24868 - protein, 8 aa, Homo sapiens
  misc_feature: Table A; Target 24868; HLA-B*35:03; FOXE1; ENSG00000178919; TAA
SPGQFGAL

SEQ ID NO: 24869 - protein, 8 aa, Homo sapiens
  misc_feature: Table A; Target 24869; HLA-B*56:01; FOXE1; ENSG00000178919; TAA
SPGQFGAL

SEQ ID NO: 24870 - protein, 8 aa, Homo sapiens
  misc_feature: Table A; Target 24870; HLA-C*07:02; FOXE1; ENSG00000178919; TAA
SPGQFGAL

SEQ ID NO: 24871 - protein, 10 aa, Homo sapiens
  misc_feature: Table A; Target 24871; HLA-B*56:01; FOXE1; ENSG00000178919; TAA
SPGQFGALGA

SEQ ID NO: 24872 - protein, 8 aa, Homo sapiens
  misc_feature: Table A; Target 24872; HLA-C*14:02; FOXE1; ENSG00000178919; TAA
SYIALIAM

SEQ ID NO: 24873 - protein, 10 aa, Homo sapiens
  misc_feature: Table A; Target 24873; HLA-A*23:01; FOXE1; ENSG00000178919; TAA
SYIALIAMAI

SEQ ID NO: 24874 - protein, 10 aa, Homo sapiens
  misc_feature: Table A; Target 24874; HLA-A*24:02; FOXE1; ENSG00000178919; TAA
SYIALIAMAI

SEQ ID NO: 24875 - protein, 11 aa, Homo sapiens
  misc_feature: Table A; Target 24875; HLA-B*54:01; FOXE1; ENSG00000178919; TAA
TAAGAGVPGEA

SEQ ID NO: 24876 - protein, 9 aa, Homo sapiens
  misc_feature: Table A; Target 24876; HLA-C*06:02; FOXE1; ENSG00000178919; TAA
TGARPANPS

SEQ ID NO: 24877 - protein, 11 aa, Homo sapiens
  misc_feature: Table A; Target 24877; HLA-A*30:02; FOXE1; ENSG00000178919; TAA
TGARPANPSAY

SEQ ID NO: 24878 - protein, 11 aa, Homo sapiens
  misc_feature: Table A; Target 24878; HLA-C*07:01; FOXE1; ENSG00000178919; TAA
TGARPANPSAY

SEQ ID NO: 24879 - protein, 9 aa, Homo sapiens
  misc_feature: Table A; Target 24879; HLA-C*06:02; FOXE1; ENSG00000178919; TAA
TGYQPAGCT

SEQ ID NO: 24880 - protein, 10 aa, Homo sapiens
  misc_feature: Table A; Target 24880; HLA-B*27:05; FOXE1; ENSG00000178919; TAA
TGYQPAGCTG

SEQ ID NO: 24881 - protein, 10 aa, Homo sapiens
  misc_feature: Table A; Target 24881; HLA-C*06:02; FOXE1; ENSG00000178919; TAA
TGYQPAGCTG

SEQ ID NO: 24882 - protein, 9 aa, Homo sapiens
  misc_feature: Table A; Target 24882; HLA-A*02:03; FOXE1; ENSG00000178919; TAA
TLGGIYKFI

SEQ ID NO: 24883 - protein, 9 aa, Homo sapiens
  misc_feature: Table A; Target 24883; HLA-A*02:04; FOXE1; ENSG00000178919; TAA
TLNDCFLKI

SEQ ID NO: 24884 - protein, 9 aa, Homo sapiens
  misc_feature: Table A; Target 24884; HLA-A*02:07; FOXE1; ENSG00000178919; TAA
TLNDCFLKI

SEQ ID NO: 24885 - protein, 9 aa, Homo sapiens
  misc_feature: Table A; Target 24885; HLA-A*24:02; FOXE1; ENSG00000178919; TAA
TLNDCFLKI

SEQ ID NO: 24886 - protein, 9 aa, Homo sapiens
  misc_feature: Table A; Target 24886; HLA-B*13:02; FOXE1; ENSG00000178919; TAA
TLNDCFLKI

SEQ ID NO: 24887 - protein, 9 aa, Homo sapiens
  misc_feature: Table A; Target 24887; HLA-A*25:01; FOXE1; ENSG00000178919; TAA
TSPGQFGAL

SEQ ID NO: 24888 - protein, 9 aa, Homo sapiens
  misc_feature: Table A; Target 24888; HLA-C*01:02; FOXE1; ENSG00000178919; TAA
TSPGQFGAL

SEQ ID NO: 24889 - protein, 9 aa, Homo sapiens
  misc_feature: Table A; Target 24889; HLA-C*03:04; FOXE1; ENSG00000178919; TAA
TSPGQFGAL

SEQ ID NO: 24890 - protein, 8 aa, Homo sapiens
  misc_feature: Table A; Target 24890; HLA-A*33:03; FOXE1; ENSG00000178919; TAA
TTVDFYGR

SEQ ID NO: 24891 - protein, 8 aa, Homo sapiens
  misc_feature: Table A; Target 24891; HLA-A*68:01; FOXE1; ENSG00000178919; TAA
TTVDFYGR

SEQ ID NO: 24892 - protein, 9 aa, Homo sapiens
  misc_feature: Table A; Target 24892; HLA-C*07:02; FOXE1; ENSG00000178919; TAA
TYPAYMHDA

SEQ ID NO: 24893 - protein, 8 aa, Homo sapiens
  misc_feature: Table A; Target 24893; HLA-B*15:03; FOXE1; ENSG00000178919; TAA
VETTVDFY

SEQ ID NO: 24894 - protein, 8 aa, Homo sapiens
  misc_feature: Table A; Target 24894; HLA-B*18:01; FOXE1; ENSG00000178919; TAA
VETTVDFY

SEQ ID NO: 24895 - protein, 8 aa, Homo sapiens
  misc_feature: Table A; Target 24895; HLA-B*37:01; FOXE1; ENSG00000178919; TAA
VETTVDFY

SEQ ID NO: 24896 - protein, 8 aa, Homo sapiens
  misc_feature: Table A; Target 24896; HLA-B*39:01; FOXE1; ENSG00000178919; TAA
VETTVDFY

SEQ ID NO: 24897 - protein, 8 aa, Homo sapiens
  misc_feature: Table A; Target 24897; HLA-B*44:03; FOXE1; ENSG00000178919; TAA
VETTVDFY

SEQ ID NO: 24898 - protein, 8 aa, Homo sapiens
  misc_feature: Table A; Target 24898; HLA-B*49:01; FOXE1; ENSG00000178919; TAA
VETTVDFY

SEQ ID NO: 24899 - protein, 8 aa, Homo sapiens
  misc_feature: Table A; Target 24899; HLA-C*16:02; FOXE1; ENSG00000178919; TAA
VETTVDFY

SEQ ID NO: 24900 - protein, 8 aa, Homo sapiens
  misc_feature: Table A; Target 24900; HLA-C*16:04; FOXE1; ENSG00000178919; TAA
VETTVDFY

SEQ ID NO: 24901 - protein, 10 aa, Homo sapiens
  misc_feature: Table A; Target 24901; HLA-B*27:02; FOXE1; ENSG00000178919; TAA
VETTVDFYGR

SEQ ID NO: 24902 - protein, 8 aa, Homo sapiens
  misc_feature: Table A; Target 24902; HLA-C*16:01; FOXE1; ENSG00000178919; TAA
VPAARPPY

SEQ ID NO: 24903 - protein, 9 aa, Homo sapiens
  misc_feature: Table A; Target 24903; HLA-B*55:01; FOXE1; ENSG00000178919; TAA
VPAARPPYP

SEQ ID NO: 24904 - protein, 9 aa, Homo sapiens
  misc_feature: Table A; Target 24904; HLA-B*56:01; FOXE1; ENSG00000178919; TAA
VPAARPPYP

SEQ ID NO: 24905 - protein, 11 aa, Homo sapiens
  misc_feature: Table A; Target 24905; HLA-B*54:01; FOXE1; ENSG00000178919; TAA
VPAARPPYPGA

SEQ ID NO: 24906 - protein, 11 aa, Homo sapiens
  misc_feature: Table A; Target 24906; HLA-B*56:01; FOXE1; ENSG00000178919; TAA
VPAARPPYPGA

SEQ ID NO: 24907 - protein, 10 aa, Homo sapiens
  misc_feature: Table A; Target 24907; HLA-C*07:02; FOXE1; ENSG00000178919; TAA
VPERPLSPEL

SEQ ID NO: 24908 - protein, 10 aa, Homo sapiens
  misc_feature: Table A; Target 24908; HLA-B*56:01; FOXE1; ENSG00000178919; TAA
VPGEATGRGA

SEQ ID NO: 24909 - protein, 10 aa, Homo sapiens
  misc_feature: Table A; Target 24909; HLA-A*23:01; FOXE1; ENSG00000178919; TAA
VYAGYAPPSL

SEQ ID NO: 24910 - protein, 10 aa, Homo sapiens
  misc_feature: Table A; Target 24910; HLA-A*24:02; FOXE1; ENSG00000178919; TAA
VYAGYAPPSL

SEQ ID NO: 24911 - protein, 10 aa, Homo sapiens
  misc_feature: Table A; Target 24911; HLA-B*07:02; FOXE1; ENSG00000178919; TAA
VYAGYAPPSL

SEQ ID NO: 24912 - protein, 10 aa, Homo sapiens
  misc_feature: Table A; Target 24912; HLA-B*27:02; FOXE1; ENSG00000178919; TAA
VYAGYAPPSL

SEQ ID NO: 24913 - protein, 10 aa, Homo sapiens
  misc_feature: Table A; Target 24913; HLA-B*39:01; FOXE1; ENSG00000178919; TAA
VYAGYAPPSL

SEQ ID NO: 24914 - protein, 10 aa, Homo sapiens
  misc_feature: Table A; Target 24914; HLA-C*06:02; FOXE1; ENSG00000178919; TAA
VYAGYAPPSL

SEQ ID NO: 24915 - protein, 10 aa, Homo sapiens
  misc_feature: Table A; Target 24915; HLA-C*07:02; FOXE1; ENSG00000178919; TAA
VYAGYAPPSL

SEQ ID NO: 24916 - protein, 10 aa, Homo sapiens
  misc_feature: Table A; Target 24916; HLA-C*14:02; FOXE1; ENSG00000178919; TAA
VYAGYAPPSL

SEQ ID NO: 24917 - protein, 8 aa, Homo sapiens
  misc_feature: Table A; Target 24917; HLA-C*14:02; FOXE1; ENSG00000178919; TAA
VYYPAASP

SEQ ID NO: 24918 - protein, 8 aa, Homo sapiens
  misc_feature: Table A; Target 24918; HLA-A*01:01; FOXE1; ENSG00000178919; TAA
YAGPDGAY

SEQ ID NO: 24919 - protein, 8 aa, Homo sapiens
  misc_feature: Table A; Target 24919; HLA-A*30:02; FOXE1; ENSG00000178919; TAA
YAGPDGAY

SEQ ID NO: 24920 - protein, 8 aa, Homo sapiens
  misc_feature: Table A; Target 24920; HLA-B*15:01; FOXE1; ENSG00000178919; TAA
YAGPDGAY

SEQ ID NO: 24921 - protein, 8 aa, Homo sapiens
  misc_feature: Table A; Target 24921; HLA-B*15:03; FOXE1; ENSG00000178919; TAA
YAGPDGAY

SEQ ID NO: 24922 - protein, 8 aa, Homo sapiens
  misc_feature: Table A; Target 24922; HLA-B*27:05; FOXE1; ENSG00000178919; TAA
YAGPDGAY

SEQ ID NO: 24923 - protein, 8 aa, Homo sapiens
  misc_feature: Table A; Target 24923; HLA-B*35:01; FOXE1; ENSG00000178919; TAA
YAGPDGAY

SEQ ID NO: 24924 - protein, 8 aa, Homo sapiens
  misc_feature: Table A; Target 24924; HLA-B*39:01; FOXE1; ENSG00000178919; TAA
YAGPDGAY

SEQ ID NO: 24925 - protein, 8 aa, Homo sapiens
  misc_feature: Table A; Target 24925; HLA-B*46:01; FOXE1; ENSG00000178919; TAA
YAGPDGAY

SEQ ID NO: 24926 - protein, 8 aa, Homo sapiens
  misc_feature: Table A; Target 24926; HLA-B*55:01; FOXE1; ENSG00000178919; TAA
YAGPDGAY

SEQ ID NO: 24927 - protein, 8 aa, Homo sapiens
  misc_feature: Table A; Target 24927; HLA-B*58:01; FOXE1; ENSG00000178919; TAA
YAGPDGAY

SEQ ID NO: 24928 - protein, 8 aa, Homo sapiens
  misc_feature: Table A; Target 24928; HLA-C*01:02; FOXE1; ENSG00000178919; TAA
YAGPDGAY

SEQ ID NO: 24929 - protein, 8 aa, Homo sapiens
  misc_feature: Table A; Target 24929; HLA-C*02:02; FOXE1; ENSG00000178919; TAA
YAGPDGAY

SEQ ID NO: 24930 - protein, 8 aa, Homo sapiens
  misc_feature: Table A; Target 24930; HLA-C*03:03; FOXE1; ENSG00000178919; TAA
YAGPDGAY

SEQ ID NO: 24931 - protein, 8 aa, Homo sapiens
  misc_feature: Table A; Target 24931; HLA-C*03:04; FOXE1; ENSG00000178919; TAA
YAGPDGAY

SEQ ID NO: 24932 - protein, 8 aa, Homo sapiens
  misc_feature: Table A; Target 24932; HLA-C*04:01; FOXE1; ENSG00000178919; TAA
YAGPDGAY

SEQ ID NO: 24933 - protein, 8 aa, Homo sapiens
  misc_feature: Table A; Target 24933; HLA-C*05:01; FOXE1; ENSG00000178919; TAA
YAGPDGAY

SEQ ID NO: 24934 - protein, 8 aa, Homo sapiens
  misc_feature: Table A; Target 24934; HLA-C*07:01; FOXE1; ENSG00000178919; TAA
YAGPDGAY

SEQ ID NO: 24935 - protein, 8 aa, Homo sapiens
  misc_feature: Table A; Target 24935; HLA-C*07:04; FOXE1; ENSG00000178919; TAA
YAGPDGAY

SEQ ID NO: 24936 - protein, 8 aa, Homo sapiens
  misc_feature: Table A; Target 24936; HLA-C*12:03; FOXE1; ENSG00000178919; TAA
YAGPDGAY

SEQ ID NO: 24937 - protein, 8 aa, Homo sapiens
  misc_feature: Table A; Target 24937; HLA-C*14:02; FOXE1; ENSG00000178919; TAA
YAGPDGAY

SEQ ID NO: 24938 - protein, 8 aa, Homo sapiens
  misc_feature: Table A; Target 24938; HLA-C*16:01; FOXE1; ENSG00000178919; TAA
YAGPDGAY

SEQ ID NO: 24939 - protein, 8 aa, Homo sapiens
  misc_feature: Table A; Target 24939; HLA-C*16:02; FOXE1; ENSG00000178919; TAA
YAGPDGAY

SEQ ID NO: 24940 - protein, 8 aa, Homo sapiens
  misc_feature: Table A; Target 24940; HLA-C*16:04; FOXE1; ENSG00000178919; TAA
YAGPDGAY

SEQ ID NO: 24941 - protein, 9 aa, Homo sapiens
  misc_feature: Table A; Target 24941; HLA-B*27:05; FOXE1; ENSG00000178919; TAA
YAGPDGAYP

SEQ ID NO: 24942 - protein, 9 aa, Homo sapiens
  misc_feature: Table A; Target 24942; HLA-C*03:03; FOXE1; ENSG00000178919; TAA
YAGPDGAYP

SEQ ID NO: 24943 - protein, 9 aa, Homo sapiens
  misc_feature: Table A; Target 24943; HLA-C*04:01; FOXE1; ENSG00000178919; TAA
YAGPDGAYP

SEQ ID NO: 24944 - protein, 9 aa, Homo sapiens
  misc_feature: Table A; Target 24944; HLA-C*05:01; FOXE1; ENSG00000178919; TAA
YAGPDGAYP

SEQ ID NO: 24945 - protein, 9 aa, Homo sapiens
  misc_feature: Table A; Target 24945; HLA-C*07:01; FOXE1; ENSG00000178919; TAA
YAGPDGAYP

SEQ ID NO: 24946 - protein, 9 aa, Homo sapiens
  misc_feature: Table A; Target 24946; HLA-C*07:04; FOXE1; ENSG00000178919; TAA
YAGPDGAYP

SEQ ID NO: 24947 - protein, 10 aa, Homo sapiens
  misc_feature: Table A; Target 24947; HLA-C*07:01; FOXE1; ENSG00000178919; TAA
YAGPDGAYPQ

SEQ ID NO: 24948 - protein, 9 aa, Homo sapiens
  misc_feature: Table A; Target 24948; HLA-A*02:01; FOXE1; ENSG00000178919; TAA
YAGYAPPSL

SEQ ID NO: 24949 - protein, 9 aa, Homo sapiens
  misc_feature: Table A; Target 24949; HLA-A*30:01; FOXE1; ENSG00000178919; TAA
YAGYAPPSL

SEQ ID NO: 24950 - protein, 9 aa, Homo sapiens
  misc_feature: Table A; Target 24950; HLA-A*32:01; FOXE1; ENSG00000178919; TAA
YAGYAPPSL

SEQ ID NO: 24951 - protein, 9 aa, Homo sapiens
  misc_feature: Table A; Target 24951; HLA-A*68:02; FOXE1; ENSG00000178919; TAA
YAGYAPPSL

SEQ ID NO: 24952 - protein, 9 aa, Homo sapiens
  misc_feature: Table A; Target 24952; HLA-B*07:02; FOXE1; ENSG00000178919; TAA
YAGYAPPSL

SEQ ID NO: 24953 - protein, 9 aa, Homo sapiens
  misc_feature: Table A; Target 24953; HLA-B*13:02; FOXE1; ENSG00000178919; TAA
YAGYAPPSL

SEQ ID NO: 24954 - protein, 9 aa, Homo sapiens
  misc_feature: Table A; Target 24954; HLA-B*15:03; FOXE1; ENSG00000178919; TAA
YAGYAPPSL

SEQ ID NO: 24955 - protein, 9 aa, Homo sapiens
  misc_feature: Table A; Target 24955; HLA-B*27:02; FOXE1; ENSG00000178919; TAA
YAGYAPPSL

SEQ ID NO: 24956 - protein, 9 aa, Homo sapiens
  misc_feature: Table A; Target 24956; HLA-B*27:05; FOXE1; ENSG00000178919; TAA
YAGYAPPSL

SEQ ID NO: 24957 - protein, 9 aa, Homo sapiens
  misc_feature: Table A; Target 24957; HLA-B*35:01; FOXE1; ENSG00000178919; TAA
YAGYAPPSL

SEQ ID NO: 24958 - protein, 9 aa, Homo sapiens
  misc_feature: Table A; Target 24958; HLA-B*35:03; FOXE1; ENSG00000178919; TAA
YAGYAPPSL

SEQ ID NO: 24959 - protein, 9 aa, Homo sapiens
  misc_feature: Table A; Target 24959; HLA-B*38:01; FOXE1; ENSG00000178919; TAA
YAGYAPPSL

SEQ ID NO: 24960 - protein, 9 aa, Homo sapiens
  misc_feature: Table A; Target 24960; HLA-B*39:01; FOXE1; ENSG00000178919; TAA
YAGYAPPSL

SEQ ID NO: 24961 - protein, 9 aa, Homo sapiens
  misc_feature: Table A; Target 24961; HLA-B*40:01; FOXE1; ENSG00000178919; TAA
YAGYAPPSL

SEQ ID NO: 24962 - protein, 9 aa, Homo sapiens
  misc_feature: Table A; Target 24962; HLA-B*40:02; FOXE1; ENSG00000178919; TAA
YAGYAPPSL

SEQ ID NO: 24963 - protein, 9 aa, Homo sapiens
  misc_feature: Table A; Target 24963; HLA-B*46:01; FOXE1; ENSG00000178919; TAA
YAGYAPPSL

SEQ ID NO: 24964 - protein, 9 aa, Homo sapiens
  misc_feature: Table A; Target 24964; HLA-B*51:01; FOXE1; ENSG00000178919; TAA
YAGYAPPSL

SEQ ID NO: 24965 - protein, 9 aa, Homo sapiens
  misc_feature: Table A; Target 24965; HLA-B*54:01; FOXE1; ENSG00000178919; TAA
YAGYAPPSL

SEQ ID NO: 24966 - protein, 9 aa, Homo sapiens
  misc_feature: Table A; Target 24966; HLA-B*56:01; FOXE1; ENSG00000178919; TAA
YAGYAPPSL

SEQ ID NO: 24967 - protein, 9 aa, Homo sapiens
  misc_feature: Table A; Target 24967; HLA-B*58:01; FOXE1; ENSG00000178919; TAA
YAGYAPPSL

SEQ ID NO: 24968 - protein, 9 aa, Homo sapiens
  misc_feature: Table A; Target 24968; HLA-C*01:02; FOXE1; ENSG00000178919; TAA
YAGYAPPSL

SEQ ID NO: 24969 - protein, 9 aa, Homo sapiens
  misc_feature: Table A; Target 24969; HLA-C*02:02; FOXE1; ENSG00000178919; TAA
YAGYAPPSL

SEQ ID NO: 24970 - protein, 9 aa, Homo sapiens
  misc_feature: Table A; Target 24970; HLA-C*03:03; FOXE1; ENSG00000178919; TAA
YAGYAPPSL

SEQ ID NO: 24971 - protein, 9 aa, Homo sapiens
  misc_feature: Table A; Target 24971; HLA-C*03:04; FOXE1; ENSG00000178919; TAA
YAGYAPPSL

SEQ ID NO: 24972 - protein, 9 aa, Homo sapiens
  misc_feature: Table A; Target 24972; HLA-C*05:01; FOXE1; ENSG00000178919; TAA
YAGYAPPSL

SEQ ID NO: 24973 - protein, 9 aa, Homo sapiens
  misc_feature: Table A; Target 24973; HLA-C*06:02; FOXE1; ENSG00000178919; TAA
YAGYAPPSL

SEQ ID NO: 24974 - protein, 9 aa, Homo sapiens
  misc_feature: Table A; Target 24974; HLA-C*07:01; FOXE1; ENSG00000178919; TAA
YAGYAPPSL

SEQ ID NO: 24975 - protein, 9 aa, Homo sapiens
  misc_feature: Table A; Target 24975; HLA-C*07:02; FOXE1; ENSG00000178919; TAA
YAGYAPPSL

SEQ ID NO: 24976 - protein, 9 aa, Homo sapiens
  misc_feature: Table A; Target 24976; HLA-C*07:04; FOXE1; ENSG00000178919; TAA
YAGYAPPSL

SEQ ID NO: 24977 - protein, 9 aa, Homo sapiens
  misc_feature: Table A; Target 24977; HLA-C*12:03; FOXE1; ENSG00000178919; TAA
YAGYAPPSL

SEQ ID NO: 24978 - protein, 9 aa, Homo sapiens
  misc_feature: Table A; Target 24978; HLA-C*14:02; FOXE1; ENSG00000178919; TAA
YAGYAPPSL

SEQ ID NO: 24979 - protein, 9 aa, Homo sapiens
  misc_feature: Table A; Target 24979; HLA-C*16:01; FOXE1; ENSG00000178919; TAA
YAGYAPPSL

SEQ ID NO: 24980 - protein, 9 aa, Homo sapiens
  misc_feature: Table A; Target 24980; HLA-C*16:02; FOXE1; ENSG00000178919; TAA
YAGYAPPSL

SEQ ID NO: 24981 - protein, 9 aa, Homo sapiens
  misc_feature: Table A; Target 24981; HLA-C*16:04; FOXE1; ENSG00000178919; TAA
YAGYAPPSL

SEQ ID NO: 24982 - protein, 8 aa, Homo sapiens
  misc_feature: Table A; Target 24982; HLA-B*54:01; FOXE1; ENSG00000178919; TAA
YAPPSLAA

SEQ ID NO: 24983 - protein, 9 aa, Homo sapiens
  misc_feature: Table A; Target 24983; HLA-B*07:02; FOXE1; ENSG00000178919; TAA
YGRTSPGQF

SEQ ID NO: 24984 - protein, 9 aa, Homo sapiens
  misc_feature: Table A; Target 24984; HLA-B*15:03; FOXE1; ENSG00000178919; TAA
YGRTSPGQF

SEQ ID NO: 24985 - protein, 9 aa, Homo sapiens
  misc_feature: Table A; Target 24985; HLA-B*46:01; FOXE1; ENSG00000178919; TAA
YGRTSPGQF

SEQ ID NO: 24986 - protein, 9 aa, Homo sapiens
  misc_feature: Table A; Target 24986; HLA-C*04:01; FOXE1; ENSG00000178919; TAA
YGRTSPGQF

SEQ ID NO: 24987 - protein, 9 aa, Homo sapiens
  misc_feature: Table A; Target 24987; HLA-C*07:02; FOXE1; ENSG00000178919; TAA
YGRTSPGQF

SEQ ID NO: 24988 - protein, 9 aa, Homo sapiens
  misc_feature: Table A; Target 24988; HLA-C*12:03; FOXE1; ENSG00000178919; TAA
YGRTSPGQF

SEQ ID NO: 24989 - protein, 9 aa, Homo sapiens
  misc_feature: Table A; Target 24989; HLA-C*16:02; FOXE1; ENSG00000178919; TAA
YGRTSPGQF

SEQ ID NO: 24990 - protein, 9 aa, Homo sapiens
  misc_feature: Table A; Target 24990; HLA-A*01:01; FOXE1; ENSG00000178919; TAA
YHARHAAAY

SEQ ID NO: 24991 - protein, 9 aa, Homo sapiens
  misc_feature: Table A; Target 24991; HLA-A*29:02; FOXE1; ENSG00000178919; TAA
YHARHAAAY

SEQ ID NO: 24992 - protein, 9 aa, Homo sapiens
  misc_feature: Table A; Target 24992; HLA-B*15:03; FOXE1; ENSG00000178919; TAA
YHARHAAAY

SEQ ID NO: 24993 - protein, 9 aa, Homo sapiens
  misc_feature: Table A; Target 24993; HLA-C*02:02; FOXE1; ENSG00000178919; TAA
YHARHAAAY

SEQ ID NO: 24994 - protein, 8 aa, Homo sapiens
  misc_feature: Table A; Target 24994; HLA-B*54:01; FOXE1; ENSG00000178919; TAA
YIALIAMA

SEQ ID NO: 24995 - protein, 9 aa, Homo sapiens
  misc_feature: Table A; Target 24995; HLA-A*68:02; FOXE1; ENSG00000178919; TAA
YIALIAMAI

SEQ ID NO: 24996 - protein, 9 aa, Homo sapiens
  misc_feature: Table A; Target 24996; HLA-B*13:02; FOXE1; ENSG00000178919; TAA
YIALIAMAI

SEQ ID NO: 24997 - protein, 9 aa, Homo sapiens
  misc_feature: Table A; Target 24997; HLA-C*02:02; FOXE1; ENSG00000178919; TAA
YIALIAMAI

SEQ ID NO: 24998 - protein, 8 aa, Homo sapiens
  misc_feature: Table A; Target 24998; HLA-B*46:01; FOXE1; ENSG00000178919; TAA
YMHDAAAA

SEQ ID NO: 24999 - protein, 8 aa, Homo sapiens
  misc_feature: Table A; Target 24999; HLA-B*54:01; FOXE1; ENSG00000178919; TAA
YMHDAAAA

SEQ ID NO: 25000 - protein, 8 aa, Homo sapiens
  misc_feature: Table A; Target 25000; HLA-C*14:02; FOXE1; ENSG00000178919; TAA
YMHDAAAA

SEQ ID NO: 25001 - protein, 9 aa, Homo sapiens
  misc_feature: Table A; Target 25001; HLA-A*02:01; FOXE1; ENSG00000178919; TAA
YMHDAAAAA

SEQ ID NO: 25002 - protein, 9 aa, Homo sapiens
  misc_feature: Table A; Target 25002; HLA-A*02:03; FOXE1; ENSG00000178919; TAA
YMHDAAAAA

SEQ ID NO: 25003 - protein, 9 aa, Homo sapiens
  misc_feature: Table A; Target 25003; HLA-B*13:02; FOXE1; ENSG00000178919; TAA
YMHDAAAAA

SEQ ID NO: 25004 - protein, 9 aa, Homo sapiens
  misc_feature: Table A; Target 25004; HLA-B*39:01; FOXE1; ENSG00000178919; TAA
YMHDAAAAA

SEQ ID NO: 25005 - protein, 9 aa, Homo sapiens
  misc_feature: Table A; Target 25005; HLA-B*46:01; FOXE1; ENSG00000178919; TAA
YMHDAAAAA

SEQ ID NO: 25006 - protein, 9 aa, Homo sapiens
  misc_feature: Table A; Target 25006; HLA-B*54:01; FOXE1; ENSG00000178919; TAA
YMHDAAAAA

SEQ ID NO: 25007 - protein, 9 aa, Homo sapiens
  misc_feature: Table A; Target 25007; HLA-B*55:01; FOXE1; ENSG00000178919; TAA
YMHDAAAAA

SEQ ID NO: 25008 - protein, 9 aa, Homo sapiens
  misc_feature: Table A; Target 25008; HLA-C*03:03; FOXE1; ENSG00000178919; TAA
YMHDAAAAA

SEQ ID NO: 25009 - protein, 9 aa, Homo sapiens
  misc_feature: Table A; Target 25009; HLA-C*03:04; FOXE1; ENSG00000178919; TAA
YMHDAAAAA

SEQ ID NO: 25010 - protein, 9 aa, Homo sapiens
  misc_feature: Table A; Target 25010; HLA-C*14:02; FOXE1; ENSG00000178919; TAA
YMHDAAAAA

SEQ ID NO: 25011 - protein, 10 aa, Homo sapiens
  misc_feature: Table A; Target 25011; HLA-A*02:01; FOXE1; ENSG00000178919; TAA
YMHDAAAAAA

SEQ ID NO: 25012 - protein, 10 aa, Homo sapiens
  misc_feature: Table A; Target 25012; HLA-A*02:03; FOXE1; ENSG00000178919; TAA
YMHDAAAAAA

SEQ ID NO: 25013 - protein, 10 aa, Homo sapiens
  misc_feature: Table A; Target 25013; HLA-B*46:01; FOXE1; ENSG00000178919; TAA
YMHDAAAAAA

SEQ ID NO: 25014 - protein, 10 aa, Homo sapiens
  misc_feature: Table A; Target 25014; HLA-B*54:01; FOXE1; ENSG00000178919; TAA
YMHDAAAAAA

SEQ ID NO: 25015 - protein, 11 aa, Homo sapiens
  misc_feature: Table A; Target 25015; HLA-B*46:01; FOXE1; ENSG00000178919; TAA
YMHDAAAAAAA

SEQ ID NO: 25016 - protein, 9 aa, Homo sapiens
  misc_feature: Table A; Target 25016; HLA-B*54:01; FOXE1; ENSG00000178919; TAA
YPAASPGPC

SEQ ID NO: 25017 - protein, 9 aa, Homo sapiens
  misc_feature: Table A; Target 25017; HLA-B*56:01; FOXE1; ENSG00000178919; TAA
YPAASPGPC

SEQ ID NO: 25018 - protein, 10 aa, Homo sapiens
  misc_feature: Table A; Target 25018; HLA-A*68:01; FOXE1; ENSG00000178919; TAA
YPAASPGPCR

SEQ ID NO: 25019 - protein, 10 aa, Homo sapiens
  misc_feature: Table A; Target 25019; HLA-B*51:01; FOXE1; ENSG00000178919; TAA
YPAASPGPCR

SEQ ID NO: 25020 - protein, 10 aa, Homo sapiens
  misc_feature: Table A; Target 25020; HLA-B*56:01; FOXE1; ENSG00000178919; TAA
YPAASPGPCR

SEQ ID NO: 25021 - protein, 8 aa, Homo sapiens
  misc_feature: Table A; Target 25021; HLA-B*54:01; FOXE1; ENSG00000178919; TAA
YPAYMHDA

SEQ ID NO: 25022 - protein, 8 aa, Homo sapiens
  misc_feature: Table A; Target 25022; HLA-B*55:01; FOXE1; ENSG00000178919; TAA
YPAYMHDA

SEQ ID NO: 25023 - protein, 8 aa, Homo sapiens
  misc_feature: Table A; Target 25023; HLA-B*56:01; FOXE1; ENSG00000178919; TAA
YPAYMHDA

SEQ ID NO: 25024 - protein, 9 aa, Homo sapiens
  misc_feature: Table A; Target 25024; HLA-B*35:03; FOXE1; ENSG00000178919; TAA
YPAYMHDAA

SEQ ID NO: 25025 - protein, 9 aa, Homo sapiens
  misc_feature: Table A; Target 25025; HLA-B*54:01; FOXE1; ENSG00000178919; TAA
YPAYMHDAA

SEQ ID NO: 25026 - protein, 9 aa, Homo sapiens
  misc_feature: Table A; Target 25026; HLA-B*55:01; FOXE1; ENSG00000178919; TAA
YPAYMHDAA

SEQ ID NO: 25027 - protein, 9 aa, Homo sapiens
  misc_feature: Table A; Target 25027; HLA-B*56:01; FOXE1; ENSG00000178919; TAA
YPAYMHDAA

SEQ ID NO: 25028 - protein, 9 aa, Homo sapiens
  misc_feature: Table A; Target 25028; HLA-C*03:03; FOXE1; ENSG00000178919; TAA
YPAYMHDAA

SEQ ID NO: 25029 - protein, 10 aa, Homo sapiens
  misc_feature: Table A; Target 25029; HLA-B*35:03; FOXE1; ENSG00000178919; TAA
YPAYMHDAAA

SEQ ID NO: 25030 - protein, 10 aa, Homo sapiens
  misc_feature: Table A; Target 25030; HLA-B*54:01; FOXE1; ENSG00000178919; TAA
YPAYMHDAAA

SEQ ID NO: 25031 - protein, 10 aa, Homo sapiens
  misc_feature: Table A; Target 25031; HLA-B*55:01; FOXE1; ENSG00000178919; TAA
YPAYMHDAAA

SEQ ID NO: 25032 - protein, 10 aa, Homo sapiens
  misc_feature: Table A; Target 25032; HLA-B*56:01; FOXE1; ENSG00000178919; TAA
YPAYMHDAAA

SEQ ID NO: 25033 - protein, 11 aa, Homo sapiens
  misc_feature: Table A; Target 25033; HLA-B*54:01; FOXE1; ENSG00000178919; TAA
YPAYMHDAAAA

SEQ ID NO: 25034 - protein, 9 aa, Homo sapiens
  misc_feature: Table A; Target 25034; HLA-A*01:01; FOXE1; ENSG00000178919; TAA
YPGAVYAGY

SEQ ID NO: 25035 - protein, 9 aa, Homo sapiens
  misc_feature: Table A; Target 25035; HLA-A*25:01; FOXE1; ENSG00000178919; TAA
YPGAVYAGY

SEQ ID NO: 25036 - protein, 9 aa, Homo sapiens
  misc_feature: Table A; Target 25036; HLA-A*26:01; FOXE1; ENSG00000178919; TAA
YPGAVYAGY

SEQ ID NO: 25037 - protein, 9 aa, Homo sapiens
  misc_feature: Table A; Target 25037; HLA-A*29:02; FOXE1; ENSG00000178919; TAA
YPGAVYAGY

SEQ ID NO: 25038 - protein, 9 aa, Homo sapiens
  misc_feature: Table A; Target 25038; HLA-A*30:02; FOXE1; ENSG00000178919; TAA
YPGAVYAGY

SEQ ID NO: 25039 - protein, 9 aa, Homo sapiens
  misc_feature: Table A; Target 25039; HLA-B*35:01; FOXE1; ENSG00000178919; TAA
YPGAVYAGY

SEQ ID NO: 25040 - protein, 9 aa, Homo sapiens
  misc_feature: Table A; Target 25040; HLA-B*55:01; FOXE1; ENSG00000178919; TAA
YPGAVYAGY

SEQ ID NO: 25041 - protein, 8 aa, Homo sapiens
  misc_feature: Table A; Target 25041; HLA-B*35:01; FOXE1; ENSG00000178919; TAA
YPGGIDRF

SEQ ID NO: 25042 - protein, 8 aa, Homo sapiens
  misc_feature: Table A; Target 25042; HLA-B*55:01; FOXE1; ENSG00000178919; TAA
YPGGIDRF

SEQ ID NO: 25043 - protein, 8 aa, Homo sapiens
  misc_feature: Table A; Target 25043; HLA-C*03:03; FOXE1; ENSG00000178919; TAA
YPGGIDRF

SEQ ID NO: 25044 - protein, 8 aa, Homo sapiens
  misc_feature: Table A; Target 25044; HLA-C*07:01; FOXE1; ENSG00000178919; TAA
YPGGIDRF

SEQ ID NO: 25045 - protein, 9 aa, Homo sapiens
  misc_feature: Table A; Target 25045; HLA-A*68:02; FOXE1; ENSG00000178919; TAA
YPGGIDRFV

SEQ ID NO: 25046 - protein, 9 aa, Homo sapiens
  misc_feature: Table A; Target 25046; HLA-B*51:01; FOXE1; ENSG00000178919; TAA
YPGGIDRFV

SEQ ID NO: 25047 - protein, 9 aa, Homo sapiens
  misc_feature: Table A; Target 25047; HLA-B*54:01; FOXE1; ENSG00000178919; TAA
YPGGIDRFV

SEQ ID NO: 25048 - protein, 9 aa, Homo sapiens
  misc_feature: Table A; Target 25048; HLA-B*56:01; FOXE1; ENSG00000178919; TAA
YPGGIDRFV

SEQ ID NO: 25049 - protein, 11 aa, Homo sapiens
  misc_feature: Table A; Target 25049; HLA-B*54:01; FOXE1; ENSG00000178919; TAA
YPGGIDRFVSA

SEQ ID NO: 25050 - protein, 11 aa, Homo sapiens
  misc_feature: Table A; Target 25050; HLA-B*56:01; FOXE1; ENSG00000178919; TAA
YPGGIDRFVSA

SEQ ID NO: 25051 - protein, 8 aa, Homo sapiens
  misc_feature: Table A; Target 25051; HLA-B*56:01; FOXE1; ENSG00000178919; TAA
YPQGAGSA

SEQ ID NO: 25052 - protein, 9 aa, Homo sapiens
  misc_feature: Table A; Target 25052; HLA-B*07:02; FOXE1; ENSG00000178919; TAA
YPQGAGSAI

SEQ ID NO: 25053 - protein, 9 aa, Homo sapiens
  misc_feature: Table A; Target 25053; HLA-B*08:01; FOXE1; ENSG00000178919; TAA
YPQGAGSAI

SEQ ID NO: 25054 - protein, 9 aa, Homo sapiens
  misc_feature: Table A; Target 25054; HLA-B*13:02; FOXE1; ENSG00000178919; TAA
YPQGAGSAI

SEQ ID NO: 25055 - protein, 9 aa, Homo sapiens
  misc_feature: Table A; Target 25055; HLA-B*35:01; FOXE1; ENSG00000178919; TAA
YPQGAGSAI

SEQ ID NO: 25056 - protein, 9 aa, Homo sapiens
  misc_feature: Table A; Target 25056; HLA-B*35:03; FOXE1; ENSG00000178919; TAA
YPQGAGSAI

SEQ ID NO: 25057 - protein, 9 aa, Homo sapiens
  misc_feature: Table A; Target 25057; HLA-B*38:01; FOXE1; ENSG00000178919; TAA
YPQGAGSAI

SEQ ID NO: 25058 - protein, 9 aa, Homo sapiens
  misc_feature: Table A; Target 25058; HLA-B*39:01; FOXE1; ENSG00000178919; TAA
YPQGAGSAI

SEQ ID NO: 25059 - protein, 9 aa, Homo sapiens
  misc_feature: Table A; Target 25059; HLA-B*51:01; FOXE1; ENSG00000178919; TAA
YPQGAGSAI

SEQ ID NO: 25060 - protein, 9 aa, Homo sapiens
  misc_feature: Table A; Target 25060; HLA-B*54:01; FOXE1; ENSG00000178919; TAA
YPQGAGSAI

SEQ ID NO: 25061 - protein, 9 aa, Homo sapiens
  misc_feature: Table A; Target 25061; HLA-B*55:01; FOXE1; ENSG00000178919; TAA
YPQGAGSAI

SEQ ID NO: 25062 - protein, 9 aa, Homo sapiens
  misc_feature: Table A; Target 25062; HLA-B*56:01; FOXE1; ENSG00000178919; TAA
YPQGAGSAI

SEQ ID NO: 25063 - protein, 9 aa, Homo sapiens
  misc_feature: Table A; Target 25063; HLA-C*01:02; FOXE1; ENSG00000178919; TAA
YPQGAGSAI

SEQ ID NO: 25064 - protein, 9 aa, Homo sapiens
  misc_feature: Table A; Target 25064; HLA-C*03:03; FOXE1; ENSG00000178919; TAA
YPQGAGSAI

SEQ ID NO: 25065 - protein, 9 aa, Homo sapiens
  misc_feature: Table A; Target 25065; HLA-C*03:04; FOXE1; ENSG00000178919; TAA
YPQGAGSAI

SEQ ID NO: 25066 - protein, 9 aa, Homo sapiens
  misc_feature: Table A; Target 25066; HLA-C*04:01; FOXE1; ENSG00000178919; TAA
YPQGAGSAI

SEQ ID NO: 25067 - protein, 9 aa, Homo sapiens
  misc_feature: Table A; Target 25067; HLA-C*05:01; FOXE1; ENSG00000178919; TAA
YPQGAGSAI

SEQ ID NO: 25068 - protein, 9 aa, Homo sapiens
  misc_feature: Table A; Target 25068; HLA-C*07:02; FOXE1; ENSG00000178919; TAA
YPQGAGSAI

SEQ ID NO: 25069 - protein, 9 aa, Homo sapiens
  misc_feature: Table A; Target 25069; HLA-C*14:02; FOXE1; ENSG00000178919; TAA
YPQGAGSAI

SEQ ID NO: 25070 - protein, 10 aa, Homo sapiens
  misc_feature: Table A; Target 25070; HLA-A*23:01; FOXE1; ENSG00000178919; TAA
YPQGAGSAIF

SEQ ID NO: 25071 - protein, 10 aa, Homo sapiens
  misc_feature: Table A; Target 25071; HLA-A*24:02; FOXE1; ENSG00000178919; TAA
YPQGAGSAIF

SEQ ID NO: 25072 - protein, 10 aa, Homo sapiens
  misc_feature: Table A; Target 25072; HLA-B*07:02; FOXE1; ENSG00000178919; TAA
YPQGAGSAIF

SEQ ID NO: 25073 - protein, 10 aa, Homo sapiens
  misc_feature: Table A; Target 25073; HLA-B*35:01; FOXE1; ENSG00000178919; TAA
YPQGAGSAIF

SEQ ID NO: 25074 - protein, 10 aa, Homo sapiens
  misc_feature: Table A; Target 25074; HLA-B*35:03; FOXE1; ENSG00000178919; TAA
YPQGAGSAIF

SEQ ID NO: 25075 - protein, 10 aa, Homo sapiens
  misc_feature: Table A; Target 25075; HLA-B*38:01; FOXE1; ENSG00000178919; TAA
YPQGAGSAIF

SEQ ID NO: 25076 - protein, 10 aa, Homo sapiens
  misc_feature: Table A; Target 25076; HLA-B*39:01; FOXE1; ENSG00000178919; TAA
YPQGAGSAIF

SEQ ID NO: 25077 - protein, 10 aa, Homo sapiens
  misc_feature: Table A; Target 25077; HLA-B*54:01; FOXE1; ENSG00000178919; TAA
YPQGAGSAIF

SEQ ID NO: 25078 - protein, 10 aa, Homo sapiens
  misc_feature: Table A; Target 25078; HLA-B*55:01; FOXE1; ENSG00000178919; TAA
YPQGAGSAIF

SEQ ID NO: 25079 - protein, 10 aa, Homo sapiens
  misc_feature: Table A; Target 25079; HLA-B*56:01; FOXE1; ENSG00000178919; TAA
YPQGAGSAIF

SEQ ID NO: 25080 - protein, 10 aa, Homo sapiens
  misc_feature: Table A; Target 25080; HLA-C*03:03; FOXE1; ENSG00000178919; TAA
YPQGAGSAIF

SEQ ID NO: 25081 - protein, 10 aa, Homo sapiens
  misc_feature: Table A; Target 25081; HLA-C*04:01; FOXE1; ENSG00000178919; TAA
YPQGAGSAIF

SEQ ID NO: 25082 - protein, 10 aa, Homo sapiens
  misc_feature: Table A; Target 25082; HLA-C*07:02; FOXE1; ENSG00000178919; TAA
YPQGAGSAIF

SEQ ID NO: 25083 - protein, 10 aa, Homo sapiens
  misc_feature: Table A; Target 25083; HLA-C*07:04; FOXE1; ENSG00000178919; TAA
YPQGAGSAIF

SEQ ID NO: 25084 - protein, 11 aa, Homo sapiens
  misc_feature: Table A; Target 25084; HLA-B*54:01; FOXE1; ENSG00000178919; TAA
YPQGAGSAIFA

SEQ ID NO: 25085 - protein, 11 aa, Homo sapiens
  misc_feature: Table A; Target 25085; HLA-B*55:01; FOXE1; ENSG00000178919; TAA
YPQGAGSAIFA

SEQ ID NO: 25086 - protein, 11 aa, Homo sapiens
  misc_feature: Table A; Target 25086; HLA-B*56:01; FOXE1; ENSG00000178919; TAA
YPQGAGSAIFA

SEQ ID NO: 25087 - protein, 11 aa, Homo sapiens
  misc_feature: Table A; Target 25087; HLA-C*07:02; FOXE1; ENSG00000178919; TAA
YPQGAGSAIFA

SEQ ID NO: 25088 - protein, 9 aa, Homo sapiens
  misc_feature: Table A; Target 25088; HLA-B*46:01; FOXE1; ENSG00000178919; TAA
YSYIALIAM

SEQ ID NO: 25089 - protein, 9 aa, Homo sapiens
  misc_feature: Table A; Target 25089; HLA-B*07:02; FOXE1,PASD1; ENSG00000178919,ENSG00000166049; TAA,CTA
AAAAAAAAI

SEQ ID NO: 25090 - protein, 9 aa, Homo sapiens
  misc_feature: Table A; Target 25090; HLA-B*13:02; FOXE1,PASD1; ENSG00000178919,ENSG00000166049; TAA,CTA
AAAAAAAAI

SEQ ID NO: 25091 - protein, 9 aa, Homo sapiens
  misc_feature: Table A; Target 25091; HLA-B*15:03; FOXE1,PASD1; ENSG00000178919,ENSG00000166049; TAA,CTA
AAAAAAAAI

SEQ ID NO: 25092 - protein, 9 aa, Homo sapiens
  misc_feature: Table A; Target 25092; HLA-B*39:01; FOXE1,PASD1; ENSG00000178919,ENSG00000166049; TAA,CTA
AAAAAAAAI

SEQ ID NO: 25093 - protein, 9 aa, Homo sapiens
  misc_feature: Table A; Target 25093; HLA-B*46:01; FOXE1,PASD1; ENSG00000178919,ENSG00000166049; TAA,CTA
AAAAAAAAI

SEQ ID NO: 25094 - protein, 9 aa, Homo sapiens
  misc_feature: Table A; Target 25094; HLA-B*51:01; FOXE1,PASD1; ENSG00000178919,ENSG00000166049; TAA,CTA
AAAAAAAAI

SEQ ID NO: 25095 - protein, 9 aa, Homo sapiens
  misc_feature: Table A; Target 25095; HLA-B*58:01; FOXE1,PASD1; ENSG00000178919,ENSG00000166049; TAA,CTA
AAAAAAAAI

SEQ ID NO: 25096 - protein, 9 aa, Homo sapiens
  misc_feature: Table A; Target 25096; HLA-C*01:02; FOXE1,PASD1; ENSG00000178919,ENSG00000166049; TAA,CTA
AAAAAAAAI

SEQ ID NO: 25097 - protein, 9 aa, Homo sapiens
  misc_feature: Table A; Target 25097; HLA-C*02:02; FOXE1,PASD1; ENSG00000178919,ENSG00000166049; TAA,CTA
AAAAAAAAI

SEQ ID NO: 25098 - protein, 9 aa, Homo sapiens
  misc_feature: Table A; Target 25098; HLA-C*03:03; FOXE1,PASD1; ENSG00000178919,ENSG00000166049; TAA,CTA
AAAAAAAAI

SEQ ID NO: 25099 - protein, 9 aa, Homo sapiens
  misc_feature: Table A; Target 25099; HLA-C*03:04; FOXE1,PASD1; ENSG00000178919,ENSG00000166049; TAA,CTA
AAAAAAAAI

SEQ ID NO: 25100 - protein, 9 aa, Homo sapiens
  misc_feature: Table A; Target 25100; HLA-C*14:02; FOXE1,PASD1; ENSG00000178919,ENSG00000166049; TAA,CTA
AAAAAAAAI

SEQ ID NO: 25101 - protein, 9 aa, Homo sapiens
  misc_feature: Table A; Target 25101; HLA-C*16:01; FOXE1,PASD1; ENSG00000178919,ENSG00000166049; TAA,CTA
AAAAAAAAI

SEQ ID NO: 25102 - protein, 9 aa, Homo sapiens
  misc_feature: Table A; Target 25102; HLA-C*16:02; FOXE1,PASD1; ENSG00000178919,ENSG00000166049; TAA,CTA
AAAAAAAAI

SEQ ID NO: 25103 - protein, 9 aa, Homo sapiens
  misc_feature: Table A; Target 25103; HLA-C*16:04; FOXE1,PASD1; ENSG00000178919,ENSG00000166049; TAA,CTA
AAAAAAAAI

SEQ ID NO: 25104 - protein, 8 aa, Homo sapiens
  misc_feature: Table A; Target 25104; HLA-C*03:04; FOXE1,PASD1; ENSG00000178919,ENSG00000166049; TAA,CTA
AAAAAAAI

SEQ ID NO: 25105 - protein, 9 aa, Homo sapiens
  misc_feature: Table A; Target 25105; HLA-A*02:01; FTHL17; ENSG00000132446; CTA
AAINSHITL

SEQ ID NO: 25106 - protein, 9 aa, Homo sapiens
  misc_feature: Table A; Target 25106; HLA-A*02:04; FTHL17; ENSG00000132446; CTA
AAINSHITL

SEQ ID NO: 25107 - protein, 9 aa, Homo sapiens
  misc_feature: Table A; Target 25107; HLA-A*02:07; FTHL17; ENSG00000132446; CTA
AAINSHITL

SEQ ID NO: 25108 - protein, 9 aa, Homo sapiens
  misc_feature: Table A; Target 25108; HLA-A*11:01; FTHL17; ENSG00000132446; CTA
AAINSHITL

SEQ ID NO: 25109 - protein, 9 aa, Homo sapiens
  misc_feature: Table A; Target 25109; HLA-A*23:01; FTHL17; ENSG00000132446; CTA
AAINSHITL

SEQ ID NO: 25110 - protein, 9 aa, Homo sapiens
  misc_feature: Table A; Target 25110; HLA-A*24:02; FTHL17; ENSG00000132446; CTA
AAINSHITL

SEQ ID NO: 25111 - protein, 9 aa, Homo sapiens
  misc_feature: Table A; Target 25111; HLA-A*25:01; FTHL17; ENSG00000132446; CTA
AAINSHITL

SEQ ID NO: 25112 - protein, 9 aa, Homo sapiens
  misc_feature: Table A; Target 25112; HLA-A*30:01; FTHL17; ENSG00000132446; CTA
AAINSHITL

SEQ ID NO: 25113 - protein, 9 aa, Homo sapiens
  misc_feature: Table A; Target 25113; HLA-A*31:01; FTHL17; ENSG00000132446; CTA
AAINSHITL

SEQ ID NO: 25114 - protein, 9 aa, Homo sapiens
  misc_feature: Table A; Target 25114; HLA-A*32:01; FTHL17; ENSG00000132446; CTA
AAINSHITL

SEQ ID NO: 25115 - protein, 9 aa, Homo sapiens
  misc_feature: Table A; Target 25115; HLA-A*68:02; FTHL17; ENSG00000132446; CTA
AAINSHITL

SEQ ID NO: 25116 - protein, 9 aa, Homo sapiens
  misc_feature: Table A; Target 25116; HLA-B*07:02; FTHL17; ENSG00000132446; CTA
AAINSHITL

SEQ ID NO: 25117 - protein, 9 aa, Homo sapiens
  misc_feature: Table A; Target 25117; HLA-B*08:01; FTHL17; ENSG00000132446; CTA
AAINSHITL

SEQ ID NO: 25118 - protein, 9 aa, Homo sapiens
  misc_feature: Table A; Target 25118; HLA-B*13:02; FTHL17; ENSG00000132446; CTA
AAINSHITL

SEQ ID NO: 25119 - protein, 9 aa, Homo sapiens
  misc_feature: Table A; Target 25119; HLA-B*15:01; FTHL17; ENSG00000132446; CTA
AAINSHITL

SEQ ID NO: 25120 - protein, 9 aa, Homo sapiens
  misc_feature: Table A; Target 25120; HLA-B*15:03; FTHL17; ENSG00000132446; CTA
AAINSHITL

SEQ ID NO: 25121 - protein, 9 aa, Homo sapiens
  misc_feature: Table A; Target 25121; HLA-B*27:05; FTHL17; ENSG00000132446; CTA
AAINSHITL

SEQ ID NO: 25122 - protein, 9 aa, Homo sapiens
  misc_feature: Table A; Target 25122; HLA-B*35:01; FTHL17; ENSG00000132446; CTA
AAINSHITL

SEQ ID NO: 25123 - protein, 9 aa, Homo sapiens
  misc_feature: Table A; Target 25123; HLA-B*35:03; FTHL17; ENSG00000132446; CTA
AAINSHITL

SEQ ID NO: 25124 - protein, 9 aa, Homo sapiens
  misc_feature: Table A; Target 25124; HLA-B*37:01; FTHL17; ENSG00000132446; CTA
AAINSHITL

SEQ ID NO: 25125 - protein, 9 aa, Homo sapiens
  misc_feature: Table A; Target 25125; HLA-B*38:01; FTHL17; ENSG00000132446; CTA
AAINSHITL

SEQ ID NO: 25126 - protein, 9 aa, Homo sapiens
  misc_feature: Table A; Target 25126; HLA-B*39:01; FTHL17; ENSG00000132446; CTA
AAINSHITL

SEQ ID NO: 25127 - protein, 9 aa, Homo sapiens
  misc_feature: Table A; Target 25127; HLA-B*40:01; FTHL17; ENSG00000132446; CTA
AAINSHITL

SEQ ID NO: 25128 - protein, 9 aa, Homo sapiens
  misc_feature: Table A; Target 25128; HLA-B*40:02; FTHL17; ENSG00000132446; CTA
AAINSHITL

SEQ ID NO: 25129 - protein, 9 aa, Homo sapiens
  misc_feature: Table A; Target 25129; HLA-B*44:02; FTHL17; ENSG00000132446; CTA
AAINSHITL

SEQ ID NO: 25130 - protein, 9 aa, Homo sapiens
  misc_feature: Table A; Target 25130; HLA-B*44:03; FTHL17; ENSG00000132446; CTA
AAINSHITL

SEQ ID NO: 25131 - protein, 9 aa, Homo sapiens
  misc_feature: Table A; Target 25131; HLA-B*46:01; FTHL17; ENSG00000132446; CTA
AAINSHITL

SEQ ID NO: 25132 - protein, 9 aa, Homo sapiens
  misc_feature: Table A; Target 25132; HLA-B*55:01; FTHL17; ENSG00000132446; CTA
AAINSHITL

SEQ ID NO: 25133 - protein, 9 aa, Homo sapiens
  misc_feature: Table A; Target 25133; HLA-B*57:01; FTHL17; ENSG00000132446; CTA
AAINSHITL

SEQ ID NO: 25134 - protein, 9 aa, Homo sapiens
  misc_feature: Table A; Target 25134; HLA-B*58:01; FTHL17; ENSG00000132446; CTA
AAINSHITL

SEQ ID NO: 25135 - protein, 9 aa, Homo sapiens
  misc_feature: Table A; Target 25135; HLA-C*01:02; FTHL17; ENSG00000132446; CTA
AAINSHITL

SEQ ID NO: 25136 - protein, 9 aa, Homo sapiens
  misc_feature: Table A; Target 25136; HLA-C*02:02; FTHL17; ENSG00000132446; CTA
AAINSHITL

SEQ ID NO: 25137 - protein, 9 aa, Homo sapiens
  misc_feature: Table A; Target 25137; HLA-C*03:03; FTHL17; ENSG00000132446; CTA
AAINSHITL

SEQ ID NO: 25138 - protein, 9 aa, Homo sapiens
  misc_feature: Table A; Target 25138; HLA-C*05:01; FTHL17; ENSG00000132446; CTA
AAINSHITL

SEQ ID NO: 25139 - protein, 9 aa, Homo sapiens
  misc_feature: Table A; Target 25139; HLA-C*07:02; FTHL17; ENSG00000132446; CTA
AAINSHITL

SEQ ID NO: 25140 - protein, 9 aa, Homo sapiens
  misc_feature: Table A; Target 25140; HLA-C*07:04; FTHL17; ENSG00000132446; CTA
AAINSHITL

SEQ ID NO: 25141 - protein, 9 aa, Homo sapiens
  misc_feature: Table A; Target 25141; HLA-C*07:06; FTHL17; ENSG00000132446; CTA
AAINSHITL

SEQ ID NO: 25142 - protein, 9 aa, Homo sapiens
  misc_feature: Table A; Target 25142; HLA-C*12:03; FTHL17; ENSG00000132446; CTA
AAINSHITL

SEQ ID NO: 25143 - protein, 9 aa, Homo sapiens
  misc_feature: Table A; Target 25143; HLA-C*14:02; FTHL17; ENSG00000132446; CTA
AAINSHITL

SEQ ID NO: 25144 - protein, 9 aa, Homo sapiens
  misc_feature: Table A; Target 25144; HLA-C*16:01; FTHL17; ENSG00000132446; CTA
AAINSHITL

SEQ ID NO: 25145 - protein, 9 aa, Homo sapiens
  misc_feature: Table A; Target 25145; HLA-C*16:02; FTHL17; ENSG00000132446; CTA
AAINSHITL

SEQ ID NO: 25146 - protein, 9 aa, Homo sapiens
  misc_feature: Table A; Target 25146; HLA-C*16:04; FTHL17; ENSG00000132446; CTA
AAINSHITL

SEQ ID NO: 25147 - protein, 11 aa, Homo sapiens
  misc_feature: Table A; Target 25147; HLA-B*46:01; FTHL17; ENSG00000132446; CTA
AAINSHITLEL

SEQ ID NO: 25148 - protein, 11 aa, Homo sapiens
  misc_feature: Table A; Target 25148; HLA-B*58:01; FTHL17; ENSG00000132446; CTA
AAINSHITLEL

SEQ ID NO: 25149 - protein, 11 aa, Homo sapiens
  misc_feature: Table A; Target 25149; HLA-C*02:02; FTHL17; ENSG00000132446; CTA
AAINSHITLEL

SEQ ID NO: 25150 - protein, 11 aa, Homo sapiens
  misc_feature: Table A; Target 25150; HLA-C*03:03; FTHL17; ENSG00000132446; CTA
AAINSHITLEL

SEQ ID NO: 25151 - protein, 11 aa, Homo sapiens
  misc_feature: Table A; Target 25151; HLA-C*03:04; FTHL17; ENSG00000132446; CTA
AAINSHITLEL

SEQ ID NO: 25152 - protein, 11 aa, Homo sapiens
  misc_feature: Table A; Target 25152; HLA-C*16:04; FTHL17; ENSG00000132446; CTA
AAINSHITLEL

SEQ ID NO: 25153 - protein, 8 aa, Homo sapiens
  misc_feature: Table A; Target 25153; HLA-A*30:01; FTHL17; ENSG00000132446; CTA
AEYLFDKL

SEQ ID NO: 25154 - protein, 8 aa, Homo sapiens
  misc_feature: Table A; Target 25154; HLA-B*18:01; FTHL17; ENSG00000132446; CTA
AEYLFDKL

SEQ ID NO: 25155 - protein, 8 aa, Homo sapiens
  misc_feature: Table A; Target 25155; HLA-B*37:01; FTHL17; ENSG00000132446; CTA
AEYLFDKL

SEQ ID NO: 25156 - protein, 8 aa, Homo sapiens
  misc_feature: Table A; Target 25156; HLA-B*40:01; FTHL17; ENSG00000132446; CTA
AEYLFDKL

SEQ ID NO: 25157 - protein, 8 aa, Homo sapiens
  misc_feature: Table A; Target 25157; HLA-B*40:02; FTHL17; ENSG00000132446; CTA
AEYLFDKL

SEQ ID NO: 25158 - protein, 8 aa, Homo sapiens
  misc_feature: Table A; Target 25158; HLA-B*44:02; FTHL17; ENSG00000132446; CTA
AEYLFDKL

SEQ ID NO: 25159 - protein, 8 aa, Homo sapiens
  misc_feature: Table A; Target 25159; HLA-B*44:03; FTHL17; ENSG00000132446; CTA
AEYLFDKL

SEQ ID NO: 25160 - protein, 8 aa, Homo sapiens
  misc_feature: Table A; Target 25160; HLA-B*49:01; FTHL17; ENSG00000132446; CTA
AEYLFDKL

SEQ ID NO: 25161 - protein, 9 aa, Homo sapiens
  misc_feature: Table A; Target 25161; HLA-B*49:01; FTHL17; ENSG00000132446; CTA
AEYLFDKLT

SEQ ID NO: 25162 - protein, 10 aa, Homo sapiens
  misc_feature: Table A; Target 25162; HLA-A*30:01; FTHL17; ENSG00000132446; CTA
AEYLFDKLTL

SEQ ID NO: 25163 - protein, 10 aa, Homo sapiens
  misc_feature: Table A; Target 25163; HLA-B*18:01; FTHL17; ENSG00000132446; CTA
AEYLFDKLTL

SEQ ID NO: 25164 - protein, 10 aa, Homo sapiens
  misc_feature: Table A; Target 25164; HLA-B*27:02; FTHL17; ENSG00000132446; CTA
AEYLFDKLTL

SEQ ID NO: 25165 - protein, 10 aa, Homo sapiens
  misc_feature: Table A; Target 25165; HLA-B*37:01; FTHL17; ENSG00000132446; CTA
AEYLFDKLTL

SEQ ID NO: 25166 - protein, 10 aa, Homo sapiens
  misc_feature: Table A; Target 25166; HLA-B*40:01; FTHL17; ENSG00000132446; CTA
AEYLFDKLTL

SEQ ID NO: 25167 - protein, 10 aa, Homo sapiens
  misc_feature: Table A; Target 25167; HLA-B*40:02; FTHL17; ENSG00000132446; CTA
AEYLFDKLTL

SEQ ID NO: 25168 - protein, 10 aa, Homo sapiens
  misc_feature: Table A; Target 25168; HLA-B*44:02; FTHL17; ENSG00000132446; CTA
AEYLFDKLTL

SEQ ID NO: 25169 - protein, 10 aa, Homo sapiens
  misc_feature: Table A; Target 25169; HLA-B*44:03; FTHL17; ENSG00000132446; CTA
AEYLFDKLTL

SEQ ID NO: 25170 - protein, 10 aa, Homo sapiens
  misc_feature: Table A; Target 25170; HLA-B*49:01; FTHL17; ENSG00000132446; CTA
AEYLFDKLTL

SEQ ID NO: 25171 - protein, 10 aa, Homo sapiens
  misc_feature: Table A; Target 25171; HLA-C*12:03; FTHL17; ENSG00000132446; CTA
AEYLFDKLTL

SEQ ID NO: 25172 - protein, 10 aa, Homo sapiens
  misc_feature: Table A; Target 25172; HLA-C*16:04; FTHL17; ENSG00000132446; CTA
AEYLFDKLTL

SEQ ID NO: 25173 - protein, 8 aa, Homo sapiens
  misc_feature: Table A; Target 25173; HLA-A*32:01; FTHL17; ENSG00000132446; CTA
AINSHITL

SEQ ID NO: 25174 - protein, 8 aa, Homo sapiens
  misc_feature: Table A; Target 25174; HLA-B*07:02; FTHL17; ENSG00000132446; CTA
AINSHITL

SEQ ID NO: 25175 - protein, 8 aa, Homo sapiens
  misc_feature: Table A; Target 25175; HLA-B*08:01; FTHL17; ENSG00000132446; CTA
AINSHITL

SEQ ID NO: 25176 - protein, 8 aa, Homo sapiens
  misc_feature: Table A; Target 25176; HLA-B*37:01; FTHL17; ENSG00000132446; CTA
AINSHITL

SEQ ID NO: 25177 - protein, 8 aa, Homo sapiens
  misc_feature: Table A; Target 25177; HLA-B*58:01; FTHL17; ENSG00000132446; CTA
AINSHITL

SEQ ID NO: 25178 - protein, 8 aa, Homo sapiens
  misc_feature: Table A; Target 25178; HLA-C*01:02; FTHL17; ENSG00000132446; CTA
AINSHITL

SEQ ID NO: 25179 - protein, 8 aa, Homo sapiens
  misc_feature: Table A; Target 25179; HLA-C*03:03; FTHL17; ENSG00000132446; CTA
AINSHITL

SEQ ID NO: 25180 - protein, 8 aa, Homo sapiens
  misc_feature: Table A; Target 25180; HLA-C*03:04; FTHL17; ENSG00000132446; CTA
AINSHITL

SEQ ID NO: 25181 - protein, 8 aa, Homo sapiens
  misc_feature: Table A; Target 25181; HLA-C*05:01; FTHL17; ENSG00000132446; CTA
AINSHITL

SEQ ID NO: 25182 - protein, 8 aa, Homo sapiens
  misc_feature: Table A; Target 25182; HLA-C*07:02; FTHL17; ENSG00000132446; CTA
AINSHITL

SEQ ID NO: 25183 - protein, 8 aa, Homo sapiens
  misc_feature: Table A; Target 25183; HLA-C*12:03; FTHL17; ENSG00000132446; CTA
AINSHITL

SEQ ID NO: 25184 - protein, 8 aa, Homo sapiens
  misc_feature: Table A; Target 25184; HLA-C*14:02; FTHL17; ENSG00000132446; CTA
AINSHITL

SEQ ID NO: 25185 - protein, 8 aa, Homo sapiens
  misc_feature: Table A; Target 25185; HLA-C*16:01; FTHL17; ENSG00000132446; CTA
AINSHITL

SEQ ID NO: 25186 - protein, 8 aa, Homo sapiens
  misc_feature: Table A; Target 25186; HLA-C*16:04; FTHL17; ENSG00000132446; CTA
AINSHITL

SEQ ID NO: 25187 - protein, 9 aa, Homo sapiens
  misc_feature: Table A; Target 25187; HLA-A*03:01; FTHL17; ENSG00000132446; CTA
AINSHITLE

SEQ ID NO: 25188 - protein, 10 aa, Homo sapiens
  misc_feature: Table A; Target 25188; HLA-A*02:03; FTHL17; ENSG00000132446; CTA
AINSHITLEL

SEQ ID NO: 25189 - protein, 10 aa, Homo sapiens
  misc_feature: Table A; Target 25189; HLA-A*02:04; FTHL17; ENSG00000132446; CTA
AINSHITLEL

SEQ ID NO: 25190 - protein, 10 aa, Homo sapiens
  misc_feature: Table A; Target 25190; HLA-A*03:01; FTHL17; ENSG00000132446; CTA
AINSHITLEL

SEQ ID NO: 25191 - protein, 10 aa, Homo sapiens
  misc_feature: Table A; Target 25191; HLA-B*07:02; FTHL17; ENSG00000132446; CTA
AINSHITLEL

SEQ ID NO: 25192 - protein, 10 aa, Homo sapiens
  misc_feature: Table A; Target 25192; HLA-B*46:01; FTHL17; ENSG00000132446; CTA
AINSHITLEL

SEQ ID NO: 25193 - protein, 10 aa, Homo sapiens
  misc_feature: Table A; Target 25193; HLA-C*01:02; FTHL17; ENSG00000132446; CTA
AINSHITLEL

SEQ ID NO: 25194 - protein, 10 aa, Homo sapiens
  misc_feature: Table A; Target 25194; HLA-C*02:02; FTHL17; ENSG00000132446; CTA
AINSHITLEL

SEQ ID NO: 25195 - protein, 11 aa, Homo sapiens
  misc_feature: Table A; Target 25195; HLA-A*01:01; FTHL17; ENSG00000132446; CTA
AINSHITLELY

SEQ ID NO: 25196 - protein, 11 aa, Homo sapiens
  misc_feature: Table A; Target 25196; HLA-A*29:02; FTHL17; ENSG00000132446; CTA
AINSHITLELY

SEQ ID NO: 25197 - protein, 11 aa, Homo sapiens
  misc_feature: Table A; Target 25197; HLA-A*30:02; FTHL17; ENSG00000132446; CTA
AINSHITLELY

SEQ ID NO: 25198 - protein, 11 aa, Homo sapiens
  misc_feature: Table A; Target 25198; HLA-B*15:01; FTHL17; ENSG00000132446; CTA
AINSHITLELY

SEQ ID NO: 25199 - protein, 11 aa, Homo sapiens
  misc_feature: Table A; Target 25199; HLA-B*46:01; FTHL17; ENSG00000132446; CTA
AINSHITLELY

SEQ ID NO: 25200 - protein, 8 aa, Homo sapiens
  misc_feature: Table A; Target 25200; HLA-A*01:01; FTHL17; ENSG00000132446; CTA
ALENFFRY

SEQ ID NO: 25201 - protein, 9 aa, Homo sapiens
  misc_feature: Table A; Target 25201; HLA-A*02:07; FTHL17; ENSG00000132446; CTA
ALENFFRYF

SEQ ID NO: 25202 - protein, 10 aa, Homo sapiens
  misc_feature: Table A; Target 25202; HLA-A*02:01; FTHL17; ENSG00000132446; CTA
ALENFFRYFL

SEQ ID NO: 25203 - protein, 10 aa, Homo sapiens
  misc_feature: Table A; Target 25203; HLA-A*02:04; FTHL17; ENSG00000132446; CTA
ALENFFRYFL

SEQ ID NO: 25204 - protein, 9 aa, Homo sapiens
  misc_feature: Table A; Target 25204; HLA-A*03:01; FTHL17; ENSG00000132446; CTA
AQPSQVRQK

SEQ ID NO: 25205 - protein, 9 aa, Homo sapiens
  misc_feature: Table A; Target 25205; HLA-A*03:02; FTHL17; ENSG00000132446; CTA
AQPSQVRQK

SEQ ID NO: 25206 - protein, 9 aa, Homo sapiens
  misc_feature: Table A; Target 25206; HLA-A*11:01; FTHL17; ENSG00000132446; CTA
AQPSQVRQK

SEQ ID NO: 25207 - protein, 10 aa, Homo sapiens
  misc_feature: Table A; Target 25207; HLA-A*29:02; FTHL17; ENSG00000132446; CTA
AQPSQVRQKY

SEQ ID NO: 25208 - protein, 10 aa, Homo sapiens
  misc_feature: Table A; Target 25208; HLA-A*30:02; FTHL17; ENSG00000132446; CTA
AQPSQVRQKY

SEQ ID NO: 25209 - protein, 10 aa, Homo sapiens
  misc_feature: Table A; Target 25209; HLA-A*32:01; FTHL17; ENSG00000132446; CTA
AQPSQVRQKY

SEQ ID NO: 25210 - protein, 10 aa, Homo sapiens
  misc_feature: Table A; Target 25210; HLA-B*15:01; FTHL17; ENSG00000132446; CTA
AQPSQVRQKY

SEQ ID NO: 25211 - protein, 10 aa, Homo sapiens
  misc_feature: Table A; Target 25211; HLA-B*15:03; FTHL17; ENSG00000132446; CTA
AQPSQVRQKY

SEQ ID NO: 25212 - protein, 10 aa, Homo sapiens
  misc_feature: Table A; Target 25212; HLA-B*44:02; FTHL17; ENSG00000132446; CTA
AQPSQVRQKY

SEQ ID NO: 25213 - protein, 10 aa, Homo sapiens
  misc_feature: Table A; Target 25213; HLA-B*44:03; FTHL17; ENSG00000132446; CTA
AQPSQVRQKY

SEQ ID NO: 25214 - protein, 10 aa, Homo sapiens
  misc_feature: Table A; Target 25214; HLA-C*16:04; FTHL17; ENSG00000132446; CTA
AQPSQVRQKY

SEQ ID NO: 25215 - protein, 9 aa, Homo sapiens
  misc_feature: Table A; Target 25215; HLA-A*03:01; FTHL17; ENSG00000132446; CTA
ATAQPSQVR

SEQ ID NO: 25216 - protein, 9 aa, Homo sapiens
  misc_feature: Table A; Target 25216; HLA-A*03:02; FTHL17; ENSG00000132446; CTA
ATAQPSQVR

SEQ ID NO: 25217 - protein, 9 aa, Homo sapiens
  misc_feature: Table A; Target 25217; HLA-A*11:01; FTHL17; ENSG00000132446; CTA
ATAQPSQVR

SEQ ID NO: 25218 - protein, 9 aa, Homo sapiens
  misc_feature: Table A; Target 25218; HLA-A*31:01; FTHL17; ENSG00000132446; CTA
ATAQPSQVR

SEQ ID NO: 25219 - protein, 9 aa, Homo sapiens
  misc_feature: Table A; Target 25219; HLA-A*32:01; FTHL17; ENSG00000132446; CTA
ATAQPSQVR

SEQ ID NO: 25220 - protein, 9 aa, Homo sapiens
  misc_feature: Table A; Target 25220; HLA-A*33:01; FTHL17; ENSG00000132446; CTA
ATAQPSQVR

SEQ ID NO: 25221 - protein, 9 aa, Homo sapiens
  misc_feature: Table A; Target 25221; HLA-A*33:03; FTHL17; ENSG00000132446; CTA
ATAQPSQVR

SEQ ID NO: 25222 - protein, 9 aa, Homo sapiens
  misc_feature: Table A; Target 25222; HLA-A*68:01; FTHL17; ENSG00000132446; CTA
ATAQPSQVR

SEQ ID NO: 25223 - protein, 9 aa, Homo sapiens
  misc_feature: Table A; Target 25223; HLA-B*27:05; FTHL17; ENSG00000132446; CTA
ATAQPSQVR

SEQ ID NO: 25224 - protein, 9 aa, Homo sapiens
  misc_feature: Table A; Target 25224; HLA-B*57:01; FTHL17; ENSG00000132446; CTA
ATAQPSQVR

SEQ ID NO: 25225 - protein, 9 aa, Homo sapiens
  misc_feature: Table A; Target 25225; HLA-B*58:01; FTHL17; ENSG00000132446; CTA
ATAQPSQVR

SEQ ID NO: 25226 - protein, 9 aa, Homo sapiens
  misc_feature: Table A; Target 25226; HLA-C*07:06; FTHL17; ENSG00000132446; CTA
ATAQPSQVR

SEQ ID NO: 25227 - protein, 9 aa, Homo sapiens
  misc_feature: Table A; Target 25227; HLA-C*16:01; FTHL17; ENSG00000132446; CTA
ATAQPSQVR

SEQ ID NO: 25228 - protein, 9 aa, Homo sapiens
  misc_feature: Table A; Target 25228; HLA-C*16:02; FTHL17; ENSG00000132446; CTA
ATAQPSQVR

SEQ ID NO: 25229 - protein, 10 aa, Homo sapiens
  misc_feature: Table A; Target 25229; HLA-A*11:01; FTHL17; ENSG00000132446; CTA
ATAQPSQVRQ

SEQ ID NO: 25230 - protein, 11 aa, Homo sapiens
  misc_feature: Table A; Target 25230; HLA-A*03:01; FTHL17; ENSG00000132446; CTA
ATAQPSQVRQK

SEQ ID NO: 25231 - protein, 11 aa, Homo sapiens
  misc_feature: Table A; Target 25231; HLA-A*03:02; FTHL17; ENSG00000132446; CTA
ATAQPSQVRQK

SEQ ID NO: 25232 - protein, 11 aa, Homo sapiens
  misc_feature: Table A; Target 25232; HLA-A*31:01; FTHL17; ENSG00000132446; CTA
ATAQPSQVRQK

SEQ ID NO: 25233 - protein, 11 aa, Homo sapiens
  misc_feature: Table A; Target 25233; HLA-A*68:01; FTHL17; ENSG00000132446; CTA
ATAQPSQVRQK

SEQ ID NO: 25234 - protein, 11 aa, Homo sapiens
  misc_feature: Table A; Target 25234; HLA-C*06:02; FTHL17; ENSG00000132446; CTA
ATAQPSQVRQK

SEQ ID NO: 25235 - protein, 11 aa, Homo sapiens
  misc_feature: Table A; Target 25235; HLA-C*07:06; FTHL17; ENSG00000132446; CTA
ATAQPSQVRQK

SEQ ID NO: 25236 - protein, 11 aa, Homo sapiens
  misc_feature: Table A; Target 25236; HLA-C*12:03; FTHL17; ENSG00000132446; CTA
ATAQPSQVRQK

SEQ ID NO: 25237 - protein, 11 aa, Homo sapiens
  misc_feature: Table A; Target 25237; HLA-C*16:01; FTHL17; ENSG00000132446; CTA
ATAQPSQVRQK

SEQ ID NO: 25238 - protein, 11 aa, Homo sapiens
  misc_feature: Table A; Target 25238; HLA-C*16:02; FTHL17; ENSG00000132446; CTA
ATAQPSQVRQK

SEQ ID NO: 25239 - protein, 9 aa, Homo sapiens
  misc_feature: Table A; Target 25239; HLA-B*35:03; FTHL17; ENSG00000132446; CTA
AVEKGDPQL

SEQ ID NO: 25240 - protein, 9 aa, Homo sapiens
  misc_feature: Table A; Target 25240; HLA-B*38:01; FTHL17; ENSG00000132446; CTA
AVEKGDPQL

SEQ ID NO: 25241 - protein, 9 aa, Homo sapiens
  misc_feature: Table A; Target 25241; HLA-B*40:01; FTHL17; ENSG00000132446; CTA
AVEKGDPQL

SEQ ID NO: 25242 - protein, 9 aa, Homo sapiens
  misc_feature: Table A; Target 25242; HLA-B*55:01; FTHL17; ENSG00000132446; CTA
AVEKGDPQL

SEQ ID NO: 25243 - protein, 9 aa, Homo sapiens
  misc_feature: Table A; Target 25243; HLA-C*05:01; FTHL17; ENSG00000132446; CTA
AVEKGDPQL

SEQ ID NO: 25244 - protein, 9 aa, Homo sapiens
  misc_feature: Table A; Target 25244; HLA-B*13:02; FTHL17; ENSG00000132446; CTA
CDAAINSHI

SEQ ID NO: 25245 - protein, 9 aa, Homo sapiens
  misc_feature: Table A; Target 25245; HLA-B*38:01; FTHL17; ENSG00000132446; CTA
CDAAINSHI

SEQ ID NO: 25246 - protein, 9 aa, Homo sapiens
  misc_feature: Table A; Target 25246; HLA-B*40:02; FTHL17; ENSG00000132446; CTA
CDAAINSHI

SEQ ID NO: 25247 - protein, 9 aa, Homo sapiens
  misc_feature: Table A; Target 25247; HLA-B*49:01; FTHL17; ENSG00000132446; CTA
CDAAINSHI

SEQ ID NO: 25248 - protein, 9 aa, Homo sapiens
  misc_feature: Table A; Target 25248; HLA-C*06:02; FTHL17; ENSG00000132446; CTA
CDAAINSHI

SEQ ID NO: 25249 - protein, 9 aa, Homo sapiens
  misc_feature: Table A; Target 25249; HLA-C*07:01; FTHL17; ENSG00000132446; CTA
CDAAINSHI

SEQ ID NO: 25250 - protein, 9 aa, Homo sapiens
  misc_feature: Table A; Target 25250; HLA-C*16:02; FTHL17; ENSG00000132446; CTA
CDAAINSHI

SEQ ID NO: 25251 - protein, 11 aa, Homo sapiens
  misc_feature: Table A; Target 25251; HLA-B*40:02; FTHL17; ENSG00000132446; CTA
CDAAINSHITL

SEQ ID NO: 25252 - protein, 9 aa, Homo sapiens
  misc_feature: Table A; Target 25252; HLA-B*38:01; FTHL17; ENSG00000132446; CTA
CHFLESHYL

SEQ ID NO: 25253 - protein, 10 aa, Homo sapiens
  misc_feature: Table A; Target 25253; HLA-A*01:01; FTHL17; ENSG00000132446; CTA
CSPEAGLAEY

SEQ ID NO: 25254 - protein, 10 aa, Homo sapiens
  misc_feature: Table A; Target 25254; HLA-A*26:01; FTHL17; ENSG00000132446; CTA
CSPEAGLAEY

SEQ ID NO: 25255 - protein, 10 aa, Homo sapiens
  misc_feature: Table A; Target 25255; HLA-A*30:02; FTHL17; ENSG00000132446; CTA
CSPEAGLAEY

SEQ ID NO: 25256 - protein, 10 aa, Homo sapiens
  misc_feature: Table A; Target 25256; HLA-B*46:01; FTHL17; ENSG00000132446; CTA
CSPEAGLAEY

SEQ ID NO: 25257 - protein, 10 aa, Homo sapiens
  misc_feature: Table A; Target 25257; HLA-C*01:02; FTHL17; ENSG00000132446; CTA
CSPEAGLAEY

SEQ ID NO: 25258 - protein, 8 aa, Homo sapiens
  misc_feature: Table A; Target 25258; HLA-A*33:01; FTHL17; ENSG00000132446; CTA
DAAINSHI

SEQ ID NO: 25259 - protein, 8 aa, Homo sapiens
  misc_feature: Table A; Target 25259; HLA-C*07:01; FTHL17; ENSG00000132446; CTA
DAAINSHI

SEQ ID NO: 25260 - protein, 10 aa, Homo sapiens
  misc_feature: Table A; Target 25260; HLA-A*33:01; FTHL17; ENSG00000132446; CTA
DAAINSHITL

SEQ ID NO: 25261 - protein, 10 aa, Homo sapiens
  misc_feature: Table A; Target 25261; HLA-A*68:01; FTHL17; ENSG00000132446; CTA
DAAINSHITL

SEQ ID NO: 25262 - protein, 10 aa, Homo sapiens
  misc_feature: Table A; Target 25262; HLA-B*35:03; FTHL17; ENSG00000132446; CTA
DAAINSHITL

SEQ ID NO: 25263 - protein, 10 aa, Homo sapiens
  misc_feature: Table A; Target 25263; HLA-B*51:01; FTHL17; ENSG00000132446; CTA
DAAINSHITL

SEQ ID NO: 25264 - protein, 10 aa, Homo sapiens
  misc_feature: Table A; Target 25264; HLA-C*07:06; FTHL17; ENSG00000132446; CTA
DAAINSHITL

SEQ ID NO: 25265 - protein, 9 aa, Homo sapiens
  misc_feature: Table A; Target 25265; HLA-A*33:01; FTHL17; ENSG00000132446; CTA
DDKMEHAQK

SEQ ID NO: 25266 - protein, 8 aa, Homo sapiens
  misc_feature: Table A; Target 25266; HLA-B*18:01; FTHL17; ENSG00000132446; CTA
DDVALENF

SEQ ID NO: 25267 - protein, 8 aa, Homo sapiens
  misc_feature: Table A; Target 25267; HLA-B*37:01; FTHL17; ENSG00000132446; CTA
DDVALENF

SEQ ID NO: 25268 - protein, 9 aa, Homo sapiens
  misc_feature: Table A; Target 25268; HLA-B*18:01; FTHL17; ENSG00000132446; CTA
DDVALENFF

SEQ ID NO: 25269 - protein, 9 aa, Homo sapiens
  misc_feature: Table A; Target 25269; HLA-C*07:01; FTHL17; ENSG00000132446; CTA
DDVALENFF

SEQ ID NO: 25270 - protein, 10 aa, Homo sapiens
  misc_feature: Table A; Target 25270; HLA-B*27:02; FTHL17; ENSG00000132446; CTA
DDVALENFFR

SEQ ID NO: 25271 - protein, 9 aa, Homo sapiens
  misc_feature: Table A; Target 25271; HLA-A*03:01; FTHL17; ENSG00000132446; CTA
DLYQLAVEK

SEQ ID NO: 25272 - protein, 9 aa, Homo sapiens
  misc_feature: Table A; Target 25272; HLA-A*03:02; FTHL17; ENSG00000132446; CTA
DLYQLAVEK

SEQ ID NO: 25273 - protein, 9 aa, Homo sapiens
  misc_feature: Table A; Target 25273; HLA-A*11:01; FTHL17; ENSG00000132446; CTA
DLYQLAVEK

SEQ ID NO: 25274 - protein, 9 aa, Homo sapiens
  misc_feature: Table A; Target 25274; HLA-A*26:01; FTHL17; ENSG00000132446; CTA
DLYQLAVEK

SEQ ID NO: 25275 - protein, 9 aa, Homo sapiens
  misc_feature: Table A; Target 25275; HLA-A*33:01; FTHL17; ENSG00000132446; CTA
DLYQLAVEK

SEQ ID NO: 25276 - protein, 9 aa, Homo sapiens
  misc_feature: Table A; Target 25276; HLA-A*33:03; FTHL17; ENSG00000132446; CTA
DLYQLAVEK

SEQ ID NO: 25277 - protein, 9 aa, Homo sapiens
  misc_feature: Table A; Target 25277; HLA-A*68:01; FTHL17; ENSG00000132446; CTA
DLYQLAVEK

SEQ ID NO: 25278 - protein, 9 aa, Homo sapiens
  misc_feature: Table A; Target 25278; HLA-B*18:01; FTHL17; ENSG00000132446; CTA
DLYQLAVEK

SEQ ID NO: 25279 - protein, 9 aa, Homo sapiens
  misc_feature: Table A; Target 25279; HLA-B*27:02; FTHL17; ENSG00000132446; CTA
DLYQLAVEK

SEQ ID NO: 25280 - protein, 9 aa, Homo sapiens
  misc_feature: Table A; Target 25280; HLA-B*27:05; FTHL17; ENSG00000132446; CTA
DLYQLAVEK

SEQ ID NO: 25281 - protein, 9 aa, Homo sapiens
  misc_feature: Table A; Target 25281; HLA-B*35:01; FTHL17; ENSG00000132446; CTA
DLYQLAVEK

SEQ ID NO: 25282 - protein, 9 aa, Homo sapiens
  misc_feature: Table A; Target 25282; HLA-C*07:06; FTHL17; ENSG00000132446; CTA
DLYQLAVEK

SEQ ID NO: 25283 - protein, 9 aa, Homo sapiens
  misc_feature: Table A; Target 25283; HLA-A*33:01; FTHL17; ENSG00000132446; CTA
DVALENFFR

SEQ ID NO: 25284 - protein, 9 aa, Homo sapiens
  misc_feature: Table A; Target 25284; HLA-A*33:03; FTHL17; ENSG00000132446; CTA
DVALENFFR

SEQ ID NO: 25285 - protein, 9 aa, Homo sapiens
  misc_feature: Table A; Target 25285; HLA-A*68:01; FTHL17; ENSG00000132446; CTA
DVALENFFR

SEQ ID NO: 25286 - protein, 10 aa, Homo sapiens
  misc_feature: Table A; Target 25286; HLA-A*01:01; FTHL17; ENSG00000132446; CTA
DVALENFFRY

SEQ ID NO: 25287 - protein, 10 aa, Homo sapiens
  misc_feature: Table A; Target 25287; HLA-A*25:01; FTHL17; ENSG00000132446; CTA
DVALENFFRY

SEQ ID NO: 25288 - protein, 10 aa, Homo sapiens
  misc_feature: Table A; Target 25288; HLA-A*26:01; FTHL17; ENSG00000132446; CTA
DVALENFFRY

SEQ ID NO: 25289 - protein, 8 aa, Homo sapiens
  misc_feature: Table A; Target 25289; HLA-B*35:03; FTHL17; ENSG00000132446; CTA
EAGLAEYL

SEQ ID NO: 25290 - protein, 9 aa, Homo sapiens
  misc_feature: Table A; Target 25290; HLA-B*38:01; FTHL17; ENSG00000132446; CTA
EHAQKLMRL

SEQ ID NO: 25291 - protein, 9 aa, Homo sapiens
  misc_feature: Table A; Target 25291; HLA-A*02:03; FTHL17; ENSG00000132446; CTA
ELGGYVSNL

SEQ ID NO: 25292 - protein, 9 aa, Homo sapiens
  misc_feature: Table A; Target 25292; HLA-A*25:01; FTHL17; ENSG00000132446; CTA
ELGGYVSNL

SEQ ID NO: 25293 - protein, 9 aa, Homo sapiens
  misc_feature: Table A; Target 25293; HLA-A*26:01; FTHL17; ENSG00000132446; CTA
ELGGYVSNL

SEQ ID NO: 25294 - protein, 9 aa, Homo sapiens
  misc_feature: Table A; Target 25294; HLA-A*33:03; FTHL17; ENSG00000132446; CTA
ELGGYVSNL

SEQ ID NO: 25295 - protein, 9 aa, Homo sapiens
  misc_feature: Table A; Target 25295; HLA-A*68:02; FTHL17; ENSG00000132446; CTA
ELGGYVSNL

SEQ ID NO: 25296 - protein, 9 aa, Homo sapiens
  misc_feature: Table A; Target 25296; HLA-C*01:02; FTHL17; ENSG00000132446; CTA
ELGGYVSNL

SEQ ID NO: 25297 - protein, 9 aa, Homo sapiens
  misc_feature: Table A; Target 25297; HLA-C*07:04; FTHL17; ENSG00000132446; CTA
ELGGYVSNL

SEQ ID NO: 25298 - protein, 10 aa, Homo sapiens
  misc_feature: Table A; Target 25298; HLA-A*33:03; FTHL17; ENSG00000132446; CTA
ELGGYVSNLR

SEQ ID NO: 25299 - protein, 10 aa, Homo sapiens
  misc_feature: Table A; Target 25299; HLA-A*68:01; FTHL17; ENSG00000132446; CTA
ELGGYVSNLR

SEQ ID NO: 25300 - protein, 10 aa, Homo sapiens
  misc_feature: Table A; Target 25300; HLA-C*07:06; FTHL17; ENSG00000132446; CTA
ELGGYVSNLR

SEQ ID NO: 25301 - protein, 8 aa, Homo sapiens
  misc_feature: Table A; Target 25301; HLA-A*29:02; FTHL17; ENSG00000132446; CTA
ELYTSYLY

SEQ ID NO: 25302 - protein, 8 aa, Homo sapiens
  misc_feature: Table A; Target 25302; HLA-C*07:01; FTHL17; ENSG00000132446; CTA
ELYTSYLY

SEQ ID NO: 25303 - protein, 9 aa, Homo sapiens
  misc_feature: Table A; Target 25303; HLA-A*01:01; FTHL17; ENSG00000132446; CTA
ELYTSYLYL

SEQ ID NO: 25304 - protein, 9 aa, Homo sapiens
  misc_feature: Table A; Target 25304; HLA-A*02:01; FTHL17; ENSG00000132446; CTA
ELYTSYLYL

SEQ ID NO: 25305 - protein, 9 aa, Homo sapiens
  misc_feature: Table A; Target 25305; HLA-A*02:03; FTHL17; ENSG00000132446; CTA
ELYTSYLYL

SEQ ID NO: 25306 - protein, 9 aa, Homo sapiens
  misc_feature: Table A; Target 25306; HLA-A*02:04; FTHL17; ENSG00000132446; CTA
ELYTSYLYL

SEQ ID NO: 25307 - protein, 9 aa, Homo sapiens
  misc_feature: Table A; Target 25307; HLA-A*02:07; FTHL17; ENSG00000132446; CTA
ELYTSYLYL

SEQ ID NO: 25308 - protein, 9 aa, Homo sapiens
  misc_feature: Table A; Target 25308; HLA-A*03:01; FTHL17; ENSG00000132446; CTA
ELYTSYLYL

SEQ ID NO: 25309 - protein, 9 aa, Homo sapiens
  misc_feature: Table A; Target 25309; HLA-A*25:01; FTHL17; ENSG00000132446; CTA
ELYTSYLYL

SEQ ID NO: 25310 - protein, 9 aa, Homo sapiens
  misc_feature: Table A; Target 25310; HLA-A*26:01; FTHL17; ENSG00000132446; CTA
ELYTSYLYL

SEQ ID NO: 25311 - protein, 9 aa, Homo sapiens
  misc_feature: Table A; Target 25311; HLA-A*68:02; FTHL17; ENSG00000132446; CTA
ELYTSYLYL

SEQ ID NO: 25312 - protein, 9 aa, Homo sapiens
  misc_feature: Table A; Target 25312; HLA-A*25:01; FTHL17; ENSG00000132446; CTA
EQVKTIKEL

SEQ ID NO: 25313 - protein, 9 aa, Homo sapiens
  misc_feature: Table A; Target 25313; HLA-A*26:01; FTHL17; ENSG00000132446; CTA
EQVKTIKEL

SEQ ID NO: 25314 - protein, 9 aa, Homo sapiens
  misc_feature: Table A; Target 25314; HLA-B*38:01; FTHL17; ENSG00000132446; CTA
EQVKTIKEL

SEQ ID NO: 25315 - protein, 9 aa, Homo sapiens
  misc_feature: Table A; Target 25315; HLA-B*39:01; FTHL17; ENSG00000132446; CTA
EQVKTIKEL

SEQ ID NO: 25316 - protein, 9 aa, Homo sapiens
  misc_feature: Table A; Target 25316; HLA-B*40:02; FTHL17; ENSG00000132446; CTA
EQVKTIKEL

SEQ ID NO: 25317 - protein, 9 aa, Homo sapiens
  misc_feature: Table A; Target 25317; HLA-B*44:02; FTHL17; ENSG00000132446; CTA
EQVKTIKEL

SEQ ID NO: 25318 - protein, 9 aa, Homo sapiens
  misc_feature: Table A; Target 25318; HLA-B*44:03; FTHL17; ENSG00000132446; CTA
EQVKTIKEL

SEQ ID NO: 25319 - protein, 10 aa, Homo sapiens
  misc_feature: Table A; Target 25319; HLA-A*68:02; FTHL17; ENSG00000132446; CTA
ESAFHLEKNV

SEQ ID NO: 25320 - protein, 11 aa, Homo sapiens
  misc_feature: Table A; Target 25320; HLA-C*07:01; FTHL17; ENSG00000132446; CTA
ESGLVAMESAF

SEQ ID NO: 25321 - protein, 11 aa, Homo sapiens
  misc_feature: Table A; Target 25321; HLA-C*12:03; FTHL17; ENSG00000132446; CTA
ESGLVAMESAF

SEQ ID NO: 25322 - protein, 9 aa, Homo sapiens
  misc_feature: Table A; Target 25322; HLA-A*01:01; FTHL17; ENSG00000132446; CTA
ESHYLHEQV

SEQ ID NO: 25323 - protein, 9 aa, Homo sapiens
  misc_feature: Table A; Target 25323; HLA-A*68:02; FTHL17; ENSG00000132446; CTA
ESHYLHEQV

SEQ ID NO: 25324 - protein, 9 aa, Homo sapiens
  misc_feature: Table A; Target 25324; HLA-A*23:01; FTHL17; ENSG00000132446; CTA
EYLFDKLTL

SEQ ID NO: 25325 - protein, 9 aa, Homo sapiens
  misc_feature: Table A; Target 25325; HLA-A*24:02; FTHL17; ENSG00000132446; CTA
EYLFDKLTL

SEQ ID NO: 25326 - protein, 9 aa, Homo sapiens
  misc_feature: Table A; Target 25326; HLA-A*33:03; FTHL17; ENSG00000132446; CTA
EYLFDKLTL

SEQ ID NO: 25327 - protein, 9 aa, Homo sapiens
  misc_feature: Table A; Target 25327; HLA-C*14:02; FTHL17; ENSG00000132446; CTA
EYLFDKLTL

SEQ ID NO: 25328 - protein, 8 aa, Homo sapiens
  misc_feature: Table A; Target 25328; HLA-C*06:02; FTHL17; ENSG00000132446; CTA
FDKLTLGG

SEQ ID NO: 25329 - protein, 8 aa, Homo sapiens
  misc_feature: Table A; Target 25329; HLA-C*07:01; FTHL17; ENSG00000132446; CTA
FDKLTLGG

SEQ ID NO: 25330 - protein, 8 aa, Homo sapiens
  misc_feature: Table A; Target 25330; HLA-C*07:04; FTHL17; ENSG00000132446; CTA
FDKLTLGG

SEQ ID NO: 25331 - protein, 11 aa, Homo sapiens
  misc_feature: Table A; Target 25331; HLA-B*38:01; FTHL17; ENSG00000132446; CTA
FHLEKNVNQSL

SEQ ID NO: 25332 - protein, 10 aa, Homo sapiens
  misc_feature: Table A; Target 25332; HLA-A*23:01; FTHL17; ENSG00000132446; CTA
FYFNRDDVAL

SEQ ID NO: 25333 - protein, 10 aa, Homo sapiens
  misc_feature: Table A; Target 25333; HLA-A*24:02; FTHL17; ENSG00000132446; CTA
FYFNRDDVAL

SEQ ID NO: 25334 - protein, 10 aa, Homo sapiens
  misc_feature: Table A; Target 25334; HLA-C*14:02; FTHL17; ENSG00000132446; CTA
FYFNRDDVAL

SEQ ID NO: 25335 - protein, 9 aa, Homo sapiens
  misc_feature: Table A; Target 25335; HLA-A*03:01; FTHL17; ENSG00000132446; CTA
GGYVSNLRK

SEQ ID NO: 25336 - protein, 9 aa, Homo sapiens
  misc_feature: Table A; Target 25336; HLA-A*11:01; FTHL17; ENSG00000132446; CTA
GGYVSNLRK

SEQ ID NO: 25337 - protein, 9 aa, Homo sapiens
  misc_feature: Table A; Target 25337; HLA-A*03:01; FTHL17; ENSG00000132446; CTA
GLAEYLFDK

SEQ ID NO: 25338 - protein, 9 aa, Homo sapiens
  misc_feature: Table A; Target 25338; HLA-A*03:02; FTHL17; ENSG00000132446; CTA
GLAEYLFDK

SEQ ID NO: 25339 - protein, 9 aa, Homo sapiens
  misc_feature: Table A; Target 25339; HLA-A*11:01; FTHL17; ENSG00000132446; CTA
GLAEYLFDK

SEQ ID NO: 25340 - protein, 9 aa, Homo sapiens
  misc_feature: Table A; Target 25340; HLA-B*27:02; FTHL17; ENSG00000132446; CTA
GLAEYLFDK

SEQ ID NO: 25341 - protein, 10 aa, Homo sapiens
  misc_feature: Table A; Target 25341; HLA-A*02:01; FTHL17; ENSG00000132446; CTA
GLAEYLFDKL

SEQ ID NO: 25342 - protein, 10 aa, Homo sapiens
  misc_feature: Table A; Target 25342; HLA-A*02:03; FTHL17; ENSG00000132446; CTA
GLAEYLFDKL

SEQ ID NO: 25343 - protein, 10 aa, Homo sapiens
  misc_feature: Table A; Target 25343; HLA-A*02:04; FTHL17; ENSG00000132446; CTA
GLAEYLFDKL

SEQ ID NO: 25344 - protein, 10 aa, Homo sapiens
  misc_feature: Table A; Target 25344; HLA-A*02:07; FTHL17; ENSG00000132446; CTA
GLAEYLFDKL

SEQ ID NO: 25345 - protein, 10 aa, Homo sapiens
  misc_feature: Table A; Target 25345; HLA-A*68:02; FTHL17; ENSG00000132446; CTA
GLAEYLFDKL

SEQ ID NO: 25346 - protein, 9 aa, Homo sapiens
  misc_feature: Table A; Target 25346; HLA-A*26:01; FTHL17; ENSG00000132446; CTA
GLVAMESAF

SEQ ID NO: 25347 - protein, 9 aa, Homo sapiens
  misc_feature: Table A; Target 25347; HLA-B*15:01; FTHL17; ENSG00000132446; CTA
GLVAMESAF

SEQ ID NO: 25348 - protein, 9 aa, Homo sapiens
  misc_feature: Table A; Target 25348; HLA-B*15:03; FTHL17; ENSG00000132446; CTA
GLVAMESAF

SEQ ID NO: 25349 - protein, 9 aa, Homo sapiens
  misc_feature: Table A; Target 25349; HLA-B*46:01; FTHL17; ENSG00000132446; CTA
GLVAMESAF

SEQ ID NO: 25350 - protein, 9 aa, Homo sapiens
  misc_feature: Table A; Target 25350; HLA-B*55:01; FTHL17; ENSG00000132446; CTA
GLVAMESAF

SEQ ID NO: 25351 - protein, 9 aa, Homo sapiens
  misc_feature: Table A; Target 25351; HLA-C*02:02; FTHL17; ENSG00000132446; CTA
GLVAMESAF

SEQ ID NO: 25352 - protein, 9 aa, Homo sapiens
  misc_feature: Table A; Target 25352; HLA-C*07:04; FTHL17; ENSG00000132446; CTA
GLVAMESAF

SEQ ID NO: 25353 - protein, 9 aa, Homo sapiens
  misc_feature: Table A; Target 25353; HLA-C*14:02; FTHL17; ENSG00000132446; CTA
GLVAMESAF

SEQ ID NO: 25354 - protein, 9 aa, Homo sapiens
  misc_feature: Table A; Target 25354; HLA-C*16:04; FTHL17; ENSG00000132446; CTA
GLVAMESAF

SEQ ID NO: 25355 - protein, 9 aa, Homo sapiens
  misc_feature: Table A; Target 25355; HLA-C*04:01; FTHL17; ENSG00000132446; CTA
GWESGLVAM

SEQ ID NO: 25356 - protein, 9 aa, Homo sapiens
  misc_feature: Table A; Target 25356; HLA-A*23:01; FTHL17; ENSG00000132446; CTA
GYVSNLRKI

SEQ ID NO: 25357 - protein, 9 aa, Homo sapiens
  misc_feature: Table A; Target 25357; HLA-A*24:02; FTHL17; ENSG00000132446; CTA
GYVSNLRKI

SEQ ID NO: 25358 - protein, 8 aa, Homo sapiens
  misc_feature: Table A; Target 25358; HLA-B*08:01; FTHL17; ENSG00000132446; CTA
HAQKLMRL

SEQ ID NO: 25359 - protein, 10 aa, Homo sapiens
  misc_feature: Table A; Target 25359; HLA-A*25:01; FTHL17; ENSG00000132446; CTA
HITLELYTSY

SEQ ID NO: 25360 - protein, 10 aa, Homo sapiens
  misc_feature: Table A; Target 25360; HLA-A*30:02; FTHL17; ENSG00000132446; CTA
HITLELYTSY

SEQ ID NO: 25361 - protein, 10 aa, Homo sapiens
  misc_feature: Table A; Target 25361; HLA-B*35:01; FTHL17; ENSG00000132446; CTA
HITLELYTSY

SEQ ID NO: 25362 - protein, 10 aa, Homo sapiens
  misc_feature: Table A; Target 25362; HLA-A*23:01; FTHL17; ENSG00000132446; CTA
HYLHEQVKTI

SEQ ID NO: 25363 - protein, 10 aa, Homo sapiens
  misc_feature: Table A; Target 25363; HLA-A*24:02; FTHL17; ENSG00000132446; CTA
HYLHEQVKTI

SEQ ID NO: 25364 - protein, 11 aa, Homo sapiens
  misc_feature: Table A; Target 25364; HLA-A*29:02; FTHL17; ENSG00000132446; CTA
ICSPEAGLAEY

SEQ ID NO: 25365 - protein, 11 aa, Homo sapiens
  misc_feature: Table A; Target 25365; HLA-A*30:02; FTHL17; ENSG00000132446; CTA
ICSPEAGLAEY

SEQ ID NO: 25366 - protein, 11 aa, Homo sapiens
  misc_feature: Table A; Target 25366; HLA-B*15:01; FTHL17; ENSG00000132446; CTA
ICSPEAGLAEY

SEQ ID NO: 25367 - protein, 11 aa, Homo sapiens
  misc_feature: Table A; Target 25367; HLA-B*46:01; FTHL17; ENSG00000132446; CTA
ICSPEAGLAEY

SEQ ID NO: 25368 - protein, 9 aa, Homo sapiens
  misc_feature: Table A; Target 25368; HLA-A*23:01; FTHL17; ENSG00000132446; CTA
INSHITLEL

SEQ ID NO: 25369 - protein, 9 aa, Homo sapiens
  misc_feature: Table A; Target 25369; HLA-A*29:02; FTHL17; ENSG00000132446; CTA
INSHITLEL

SEQ ID NO: 25370 - protein, 9 aa, Homo sapiens
  misc_feature: Table A; Target 25370; HLA-A*68:02; FTHL17; ENSG00000132446; CTA
INSHITLEL

SEQ ID NO: 25371 - protein, 9 aa, Homo sapiens
  misc_feature: Table A; Target 25371; HLA-B*27:05; FTHL17; ENSG00000132446; CTA
INSHITLEL

SEQ ID NO: 25372 - protein, 9 aa, Homo sapiens
  misc_feature: Table A; Target 25372; HLA-C*01:02; FTHL17; ENSG00000132446; CTA
INSHITLEL

SEQ ID NO: 25373 - protein, 9 aa, Homo sapiens
  misc_feature: Table A; Target 25373; HLA-C*02:02; FTHL17; ENSG00000132446; CTA
INSHITLEL

SEQ ID NO: 25374 - protein, 9 aa, Homo sapiens
  misc_feature: Table A; Target 25374; HLA-C*03:03; FTHL17; ENSG00000132446; CTA
INSHITLEL

SEQ ID NO: 25375 - protein, 9 aa, Homo sapiens
  misc_feature: Table A; Target 25375; HLA-C*03:04; FTHL17; ENSG00000132446; CTA
INSHITLEL

SEQ ID NO: 25376 - protein, 9 aa, Homo sapiens
  misc_feature: Table A; Target 25376; HLA-C*06:02; FTHL17; ENSG00000132446; CTA
INSHITLEL

SEQ ID NO: 25377 - protein, 9 aa, Homo sapiens
  misc_feature: Table A; Target 25377; HLA-C*12:03; FTHL17; ENSG00000132446; CTA
INSHITLEL

SEQ ID NO: 25378 - protein, 9 aa, Homo sapiens
  misc_feature: Table A; Target 25378; HLA-C*16:01; FTHL17; ENSG00000132446; CTA
INSHITLEL

SEQ ID NO: 25379 - protein, 10 aa, Homo sapiens
  misc_feature: Table A; Target 25379; HLA-A*29:02; FTHL17; ENSG00000132446; CTA
INSHITLELY

SEQ ID NO: 25380 - protein, 9 aa, Homo sapiens
  misc_feature: Table A; Target 25380; HLA-A*01:01; FTHL17; ENSG00000132446; CTA
ITLELYTSY

SEQ ID NO: 25381 - protein, 9 aa, Homo sapiens
  misc_feature: Table A; Target 25381; HLA-A*03:01; FTHL17; ENSG00000132446; CTA
ITLELYTSY

SEQ ID NO: 25382 - protein, 9 aa, Homo sapiens
  misc_feature: Table A; Target 25382; HLA-A*11:01; FTHL17; ENSG00000132446; CTA
ITLELYTSY

SEQ ID NO: 25383 - protein, 9 aa, Homo sapiens
  misc_feature: Table A; Target 25383; HLA-A*23:01; FTHL17; ENSG00000132446; CTA
ITLELYTSY

SEQ ID NO: 25384 - protein, 9 aa, Homo sapiens
  misc_feature: Table A; Target 25384; HLA-A*25:01; FTHL17; ENSG00000132446; CTA
ITLELYTSY

SEQ ID NO: 25385 - protein, 9 aa, Homo sapiens
  misc_feature: Table A; Target 25385; HLA-A*26:01; FTHL17; ENSG00000132446; CTA
ITLELYTSY

SEQ ID NO: 25386 - protein, 9 aa, Homo sapiens
  misc_feature: Table A; Target 25386; HLA-A*29:02; FTHL17; ENSG00000132446; CTA
ITLELYTSY

SEQ ID NO: 25387 - protein, 9 aa, Homo sapiens
  misc_feature: Table A; Target 25387; HLA-A*30:02; FTHL17; ENSG00000132446; CTA
ITLELYTSY

SEQ ID NO: 25388 - protein, 9 aa, Homo sapiens
  misc_feature: Table A; Target 25388; HLA-A*32:01; FTHL17; ENSG00000132446; CTA
ITLELYTSY

SEQ ID NO: 25389 - protein, 9 aa, Homo sapiens
  misc_feature: Table A; Target 25389; HLA-A*33:01; FTHL17; ENSG00000132446; CTA
ITLELYTSY

SEQ ID NO: 25390 - protein, 9 aa, Homo sapiens
  misc_feature: Table A; Target 25390; HLA-A*33:03; FTHL17; ENSG00000132446; CTA
ITLELYTSY

SEQ ID NO: 25391 - protein, 9 aa, Homo sapiens
  misc_feature: Table A; Target 25391; HLA-B*15:01; FTHL17; ENSG00000132446; CTA
ITLELYTSY

SEQ ID NO: 25392 - protein, 9 aa, Homo sapiens
  misc_feature: Table A; Target 25392; HLA-B*15:03; FTHL17; ENSG00000132446; CTA
ITLELYTSY

SEQ ID NO: 25393 - protein, 9 aa, Homo sapiens
  misc_feature: Table A; Target 25393; HLA-B*18:01; FTHL17; ENSG00000132446; CTA
ITLELYTSY

SEQ ID NO: 25394 - protein, 9 aa, Homo sapiens
  misc_feature: Table A; Target 25394; HLA-B*27:02; FTHL17; ENSG00000132446; CTA
ITLELYTSY

SEQ ID NO: 25395 - protein, 9 aa, Homo sapiens
  misc_feature: Table A; Target 25395; HLA-B*35:01; FTHL17; ENSG00000132446; CTA
ITLELYTSY

SEQ ID NO: 25396 - protein, 9 aa, Homo sapiens
  misc_feature: Table A; Target 25396; HLA-B*46:01; FTHL17; ENSG00000132446; CTA
ITLELYTSY

SEQ ID NO: 25397 - protein, 9 aa, Homo sapiens
  misc_feature: Table A; Target 25397; HLA-B*57:01; FTHL17; ENSG00000132446; CTA
ITLELYTSY

SEQ ID NO: 25398 - protein, 9 aa, Homo sapiens
  misc_feature: Table A; Target 25398; HLA-B*58:01; FTHL17; ENSG00000132446; CTA
ITLELYTSY

SEQ ID NO: 25399 - protein, 9 aa, Homo sapiens
  misc_feature: Table A; Target 25399; HLA-C*01:02; FTHL17; ENSG00000132446; CTA
ITLELYTSY

SEQ ID NO: 25400 - protein, 9 aa, Homo sapiens
  misc_feature: Table A; Target 25400; HLA-C*02:02; FTHL17; ENSG00000132446; CTA
ITLELYTSY

SEQ ID NO: 25401 - protein, 9 aa, Homo sapiens
  misc_feature: Table A; Target 25401; HLA-C*07:04; FTHL17; ENSG00000132446; CTA
ITLELYTSY

SEQ ID NO: 25402 - protein, 9 aa, Homo sapiens
  misc_feature: Table A; Target 25402; HLA-C*07:06; FTHL17; ENSG00000132446; CTA
ITLELYTSY

SEQ ID NO: 25403 - protein, 9 aa, Homo sapiens
  misc_feature: Table A; Target 25403; HLA-C*14:02; FTHL17; ENSG00000132446; CTA
ITLELYTSY

SEQ ID NO: 25404 - protein, 9 aa, Homo sapiens
  misc_feature: Table A; Target 25404; HLA-C*16:01; FTHL17; ENSG00000132446; CTA
ITLELYTSY

SEQ ID NO: 25405 - protein, 9 aa, Homo sapiens
  misc_feature: Table A; Target 25405; HLA-C*16:04; FTHL17; ENSG00000132446; CTA
ITLELYTSY

SEQ ID NO: 25406 - protein, 11 aa, Homo sapiens
  misc_feature: Table A; Target 25406; HLA-A*29:02; FTHL17; ENSG00000132446; CTA
ITLELYTSYLY

SEQ ID NO: 25407 - protein, 9 aa, Homo sapiens
  misc_feature: Table A; Target 25407; HLA-B*40:02; FTHL17; ENSG00000132446; CTA
KELGGYVSN

SEQ ID NO: 25408 - protein, 10 aa, Homo sapiens
  misc_feature: Table A; Target 25408; HLA-A*30:01; FTHL17; ENSG00000132446; CTA
KELGGYVSNL

SEQ ID NO: 25409 - protein, 10 aa, Homo sapiens
  misc_feature: Table A; Target 25409; HLA-B*37:01; FTHL17; ENSG00000132446; CTA
KELGGYVSNL

SEQ ID NO: 25410 - protein, 10 aa, Homo sapiens
  misc_feature: Table A; Target 25410; HLA-B*40:02; FTHL17; ENSG00000132446; CTA
KELGGYVSNL

SEQ ID NO: 25411 - protein, 10 aa, Homo sapiens
  misc_feature: Table A; Target 25411; HLA-B*44:03; FTHL17; ENSG00000132446; CTA
KELGGYVSNL

SEQ ID NO: 25412 - protein, 10 aa, Homo sapiens
  misc_feature: Table A; Target 25412; HLA-B*49:01; FTHL17; ENSG00000132446; CTA
KELGGYVSNL

SEQ ID NO: 25413 - protein, 8 aa, Homo sapiens
  misc_feature: Table A; Target 25413; HLA-A*02:04; FTHL17; ENSG00000132446; CTA
KLMRLQNL

SEQ ID NO: 25414 - protein, 9 aa, Homo sapiens
  misc_feature: Table A; Target 25414; HLA-A*31:01; FTHL17; ENSG00000132446; CTA
KLMRLQNLR

SEQ ID NO: 25415 - protein, 11 aa, Homo sapiens
  misc_feature: Table A; Target 25415; HLA-A*29:02; FTHL17; ENSG00000132446; CTA
KNVNQSLLDLY

SEQ ID NO: 25416 - protein, 11 aa, Homo sapiens
  misc_feature: Table A; Target 25416; HLA-A*30:02; FTHL17; ENSG00000132446; CTA
KNVNQSLLDLY

SEQ ID NO: 25417 - protein, 11 aa, Homo sapiens
  misc_feature: Table A; Target 25417; HLA-C*07:01; FTHL17; ENSG00000132446; CTA
KNVNQSLLDLY

SEQ ID NO: 25418 - protein, 9 aa, Homo sapiens
  misc_feature: Table A; Target 25418; HLA-A*01:01; FTHL17; ENSG00000132446; CTA
KTIKELGGY

SEQ ID NO: 25419 - protein, 9 aa, Homo sapiens
  misc_feature: Table A; Target 25419; HLA-A*25:01; FTHL17; ENSG00000132446; CTA
KTIKELGGY

SEQ ID NO: 25420 - protein, 9 aa, Homo sapiens
  misc_feature: Table A; Target 25420; HLA-A*26:01; FTHL17; ENSG00000132446; CTA
KTIKELGGY

SEQ ID NO: 25421 - protein, 9 aa, Homo sapiens
  misc_feature: Table A; Target 25421; HLA-A*29:02; FTHL17; ENSG00000132446; CTA
KTIKELGGY

SEQ ID NO: 25422 - protein, 9 aa, Homo sapiens
  misc_feature: Table A; Target 25422; HLA-A*30:02; FTHL17; ENSG00000132446; CTA
KTIKELGGY

SEQ ID NO: 25423 - protein, 9 aa, Homo sapiens
  misc_feature: Table A; Target 25423; HLA-A*32:01; FTHL17; ENSG00000132446; CTA
KTIKELGGY

SEQ ID NO: 25424 - protein, 9 aa, Homo sapiens
  misc_feature: Table A; Target 25424; HLA-B*15:01; FTHL17; ENSG00000132446; CTA
KTIKELGGY

SEQ ID NO: 25425 - protein, 9 aa, Homo sapiens
  misc_feature: Table A; Target 25425; HLA-B*57:01; FTHL17; ENSG00000132446; CTA
KTIKELGGY

SEQ ID NO: 25426 - protein, 9 aa, Homo sapiens
  misc_feature: Table A; Target 25426; HLA-B*58:01; FTHL17; ENSG00000132446; CTA
KTIKELGGY

SEQ ID NO: 25427 - protein, 10 aa, Homo sapiens
  misc_feature: Table A; Target 25427; HLA-B*40:02; FTHL17; ENSG00000132446; CTA
KTIKELGGYV

SEQ ID NO: 25428 - protein, 10 aa, Homo sapiens
  misc_feature: Table A; Target 25428; HLA-B*35:03; FTHL17; ENSG00000132446; CTA
LAVEKGDPQL

SEQ ID NO: 25429 - protein, 10 aa, Homo sapiens
  misc_feature: Table A; Target 25429; HLA-C*03:03; FTHL17; ENSG00000132446; CTA
LAVEKGDPQL

SEQ ID NO: 25430 - protein, 10 aa, Homo sapiens
  misc_feature: Table A; Target 25430; HLA-C*03:04; FTHL17; ENSG00000132446; CTA
LAVEKGDPQL

SEQ ID NO: 25431 - protein, 10 aa, Homo sapiens
  misc_feature: Table A; Target 25431; HLA-B*27:02; FTHL17; ENSG00000132446; CTA
LDLYQLAVEK

SEQ ID NO: 25432 - protein, 10 aa, Homo sapiens
  misc_feature: Table A; Target 25432; HLA-C*07:01; FTHL17; ENSG00000132446; CTA
LDLYQLAVEK

SEQ ID NO: 25433 - protein, 9 aa, Homo sapiens
  misc_feature: Table A; Target 25433; HLA-A*23:01; FTHL17; ENSG00000132446; CTA
LEKNVNQSL

SEQ ID NO: 25434 - protein, 9 aa, Homo sapiens
  misc_feature: Table A; Target 25434; HLA-A*30:01; FTHL17; ENSG00000132446; CTA
LEKNVNQSL

SEQ ID NO: 25435 - protein, 9 aa, Homo sapiens
  misc_feature: Table A; Target 25435; HLA-B*07:02; FTHL17; ENSG00000132446; CTA
LEKNVNQSL

SEQ ID NO: 25436 - protein, 9 aa, Homo sapiens
  misc_feature: Table A; Target 25436; HLA-B*08:01; FTHL17; ENSG00000132446; CTA
LEKNVNQSL

SEQ ID NO: 25437 - protein, 9 aa, Homo sapiens
  misc_feature: Table A; Target 25437; HLA-B*18:01; FTHL17; ENSG00000132446; CTA
LEKNVNQSL

SEQ ID NO: 25438 - protein, 9 aa, Homo sapiens
  misc_feature: Table A; Target 25438; HLA-B*27:02; FTHL17; ENSG00000132446; CTA
LEKNVNQSL

SEQ ID NO: 25439 - protein, 9 aa, Homo sapiens
  misc_feature: Table A; Target 25439; HLA-B*37:01; FTHL17; ENSG00000132446; CTA
LEKNVNQSL

SEQ ID NO: 25440 - protein, 9 aa, Homo sapiens
  misc_feature: Table A; Target 25440; HLA-B*40:01; FTHL17; ENSG00000132446; CTA
LEKNVNQSL

SEQ ID NO: 25441 - protein, 9 aa, Homo sapiens
  misc_feature: Table A; Target 25441; HLA-B*40:02; FTHL17; ENSG00000132446; CTA
LEKNVNQSL

SEQ ID NO: 25442 - protein, 9 aa, Homo sapiens
  misc_feature: Table A; Target 25442; HLA-B*44:02; FTHL17; ENSG00000132446; CTA
LEKNVNQSL

SEQ ID NO: 25443 - protein, 9 aa, Homo sapiens
  misc_feature: Table A; Target 25443; HLA-B*44:03; FTHL17; ENSG00000132446; CTA
LEKNVNQSL

SEQ ID NO: 25444 - protein, 9 aa, Homo sapiens
  misc_feature: Table A; Target 25444; HLA-B*49:01; FTHL17; ENSG00000132446; CTA
LEKNVNQSL

SEQ ID NO: 25445 - protein, 9 aa, Homo sapiens
  misc_feature: Table A; Target 25445; HLA-C*02:02; FTHL17; ENSG00000132446; CTA
LEKNVNQSL

SEQ ID NO: 25446 - protein, 9 aa, Homo sapiens
  misc_feature: Table A; Target 25446; HLA-C*03:03; FTHL17; ENSG00000132446; CTA
LEKNVNQSL

SEQ ID NO: 25447 - protein, 9 aa, Homo sapiens
  misc_feature: Table A; Target 25447; HLA-C*03:04; FTHL17; ENSG00000132446; CTA
LEKNVNQSL

SEQ ID NO: 25448 - protein, 9 aa, Homo sapiens
  misc_feature: Table A; Target 25448; HLA-C*14:02; FTHL17; ENSG00000132446; CTA
LEKNVNQSL

SEQ ID NO: 25449 - protein, 9 aa, Homo sapiens
  misc_feature: Table A; Target 25449; HLA-C*16:04; FTHL17; ENSG00000132446; CTA
LEKNVNQSL

SEQ ID NO: 25450 - protein, 10 aa, Homo sapiens
  misc_feature: Table A; Target 25450; HLA-A*30:01; FTHL17; ENSG00000132446; CTA
LEKNVNQSLL

SEQ ID NO: 25451 - protein, 10 aa, Homo sapiens
  misc_feature: Table A; Target 25451; HLA-B*40:01; FTHL17; ENSG00000132446; CTA
LEKNVNQSLL

SEQ ID NO: 25452 - protein, 8 aa, Homo sapiens
  misc_feature: Table A; Target 25452; HLA-B*49:01; FTHL17; ENSG00000132446; CTA
LELYTSYL

SEQ ID NO: 25453 - protein, 9 aa, Homo sapiens
  misc_feature: Table A; Target 25453; HLA-A*29:02; FTHL17; ENSG00000132446; CTA
LELYTSYLY

SEQ ID NO: 25454 - protein, 10 aa, Homo sapiens
  misc_feature: Table A; Target 25454; HLA-A*68:02; FTHL17; ENSG00000132446; CTA
LESHYLHEQV

SEQ ID NO: 25455 - protein, 10 aa, Homo sapiens
  misc_feature: Table A; Target 25455; HLA-C*04:01; FTHL17; ENSG00000132446; CTA
LFDKLTLGGR

SEQ ID NO: 25456 - protein, 8 aa, Homo sapiens
  misc_feature: Table A; Target 25456; HLA-C*07:02; FTHL17; ENSG00000132446; CTA
LGGYVSNL

SEQ ID NO: 25457 - protein, 8 aa, Homo sapiens
  misc_feature: Table A; Target 25457; HLA-C*07:04; FTHL17; ENSG00000132446; CTA
LGGYVSNL

SEQ ID NO: 25458 - protein, 8 aa, Homo sapiens
  misc_feature: Table A; Target 25458; HLA-C*12:03; FTHL17; ENSG00000132446; CTA
LGGYVSNL

SEQ ID NO: 25459 - protein, 8 aa, Homo sapiens
  misc_feature: Table A; Target 25459; HLA-C*14:02; FTHL17; ENSG00000132446; CTA
LGGYVSNL

SEQ ID NO: 25460 - protein, 9 aa, Homo sapiens
  misc_feature: Table A; Target 25460; HLA-A*68:01; FTHL17; ENSG00000132446; CTA
LGGYVSNLR

SEQ ID NO: 25461 - protein, 8 aa, Homo sapiens
  misc_feature: Table A; Target 25461; HLA-B*38:01; FTHL17; ENSG00000132446; CTA
LHEQVKTI

SEQ ID NO: 25462 - protein, 9 aa, Homo sapiens
  misc_feature: Table A; Target 25462; HLA-A*01:01; FTHL17; ENSG00000132446; CTA
LLDLYQLAV

SEQ ID NO: 25463 - protein, 9 aa, Homo sapiens
  misc_feature: Table A; Target 25463; HLA-A*02:01; FTHL17; ENSG00000132446; CTA
LLDLYQLAV

SEQ ID NO: 25464 - protein, 9 aa, Homo sapiens
  misc_feature: Table A; Target 25464; HLA-A*02:04; FTHL17; ENSG00000132446; CTA
LLDLYQLAV

SEQ ID NO: 25465 - protein, 9 aa, Homo sapiens
  misc_feature: Table A; Target 25465; HLA-A*02:07; FTHL17; ENSG00000132446; CTA
LLDLYQLAV

SEQ ID NO: 25466 - protein, 9 aa, Homo sapiens
  misc_feature: Table A; Target 25466; HLA-B*13:02; FTHL17; ENSG00000132446; CTA
LLDLYQLAV

SEQ ID NO: 25467 - protein, 9 aa, Homo sapiens
  misc_feature: Table A; Target 25467; HLA-B*55:01; FTHL17; ENSG00000132446; CTA
LLDLYQLAV

SEQ ID NO: 25468 - protein, 11 aa, Homo sapiens
  misc_feature: Table A; Target 25468; HLA-B*27:02; FTHL17; ENSG00000132446; CTA
LLDLYQLAVEK

SEQ ID NO: 25469 - protein, 9 aa, Homo sapiens
  misc_feature: Table A; Target 25469; HLA-A*31:01; FTHL17; ENSG00000132446; CTA
LSMAFYFNR

SEQ ID NO: 25470 - protein, 10 aa, Homo sapiens
  misc_feature: Table A; Target 25470; HLA-C*06:02; FTHL17; ENSG00000132446; CTA
LTLGGRVKET

SEQ ID NO: 25471 - protein, 10 aa, Homo sapiens
  misc_feature: Table A; Target 25471; HLA-C*07:01; FTHL17; ENSG00000132446; CTA
LTLGGRVKET

SEQ ID NO: 25472 - protein, 8 aa, Homo sapiens
  misc_feature: Table A; Target 25472; HLA-B*39:01; FTHL17; ENSG00000132446; CTA
LVAMESAF

SEQ ID NO: 25473 - protein, 8 aa, Homo sapiens
  misc_feature: Table A; Target 25473; HLA-A*29:02; FTHL17; ENSG00000132446; CTA
LYLSMAFY

SEQ ID NO: 25474 - protein, 9 aa, Homo sapiens
  misc_feature: Table A; Target 25474; HLA-A*23:01; FTHL17; ENSG00000132446; CTA
LYLSMAFYF

SEQ ID NO: 25475 - protein, 9 aa, Homo sapiens
  misc_feature: Table A; Target 25475; HLA-A*24:02; FTHL17; ENSG00000132446; CTA
LYLSMAFYF

SEQ ID NO: 25476 - protein, 9 aa, Homo sapiens
  misc_feature: Table A; Target 25476; HLA-A*29:02; FTHL17; ENSG00000132446; CTA
LYLSMAFYF

SEQ ID NO: 25477 - protein, 8 aa, Homo sapiens
  misc_feature: Table A; Target 25477; HLA-C*14:02; FTHL17; ENSG00000132446; CTA
LYQLAVEK

SEQ ID NO: 25478 - protein, 8 aa, Homo sapiens
  misc_feature: Table A; Target 25478; HLA-A*24:02; FTHL17; ENSG00000132446; CTA
LYTSYLYL

SEQ ID NO: 25479 - protein, 9 aa, Homo sapiens
  misc_feature: Table A; Target 25479; HLA-B*51:01; FTHL17; ENSG00000132446; CTA
MATAQPSQV

SEQ ID NO: 25480 - protein, 9 aa, Homo sapiens
  misc_feature: Table A; Target 25480; HLA-B*54:01; FTHL17; ENSG00000132446; CTA
MATAQPSQV

SEQ ID NO: 25481 - protein, 9 aa, Homo sapiens
  misc_feature: Table A; Target 25481; HLA-C*03:04; FTHL17; ENSG00000132446; CTA
MATAQPSQV

SEQ ID NO: 25482 - protein, 9 aa, Homo sapiens
  misc_feature: Table A; Target 25482; HLA-C*12:03; FTHL17; ENSG00000132446; CTA
MATAQPSQV

SEQ ID NO: 25483 - protein, 9 aa, Homo sapiens
  misc_feature: Table A; Target 25483; HLA-C*16:02; FTHL17; ENSG00000132446; CTA
MATAQPSQV

SEQ ID NO: 25484 - protein, 10 aa, Homo sapiens
  misc_feature: Table A; Target 25484; HLA-A*33:03; FTHL17; ENSG00000132446; CTA
MATAQPSQVR

SEQ ID NO: 25485 - protein, 10 aa, Homo sapiens
  misc_feature: Table A; Target 25485; HLA-A*68:01; FTHL17; ENSG00000132446; CTA
MATAQPSQVR

SEQ ID NO: 25486 - protein, 10 aa, Homo sapiens
  misc_feature: Table A; Target 25486; HLA-C*07:06; FTHL17; ENSG00000132446; CTA
MATAQPSQVR

SEQ ID NO: 25487 - protein, 8 aa, Homo sapiens
  misc_feature: Table A; Target 25487; HLA-B*18:01; FTHL17; ENSG00000132446; CTA
MEHAQKLM

SEQ ID NO: 25488 - protein, 8 aa, Homo sapiens
  misc_feature: Table A; Target 25488; HLA-B*37:01; FTHL17; ENSG00000132446; CTA
MEHAQKLM

SEQ ID NO: 25489 - protein, 8 aa, Homo sapiens
  misc_feature: Table A; Target 25489; HLA-B*40:02; FTHL17; ENSG00000132446; CTA
MEHAQKLM

SEQ ID NO: 25490 - protein, 8 aa, Homo sapiens
  misc_feature: Table A; Target 25490; HLA-B*44:03; FTHL17; ENSG00000132446; CTA
MEHAQKLM

SEQ ID NO: 25491 - protein, 8 aa, Homo sapiens
  misc_feature: Table A; Target 25491; HLA-B*49:01; FTHL17; ENSG00000132446; CTA
MEHAQKLM

SEQ ID NO: 25492 - protein, 8 aa, Homo sapiens
  misc_feature: Table A; Target 25492; HLA-C*07:01; FTHL17; ENSG00000132446; CTA
MEHAQKLM

SEQ ID NO: 25493 - protein, 9 aa, Homo sapiens
  misc_feature: Table A; Target 25493; HLA-B*49:01; FTHL17; ENSG00000132446; CTA
MESAFHLEK

SEQ ID NO: 25494 - protein, 8 aa, Homo sapiens
  misc_feature: Table A; Target 25494; HLA-A*30:02; FTHL17; ENSG00000132446; CTA
NQSLLDLY

SEQ ID NO: 25495 - protein, 8 aa, Homo sapiens
  misc_feature: Table A; Target 25495; HLA-B*15:01; FTHL17; ENSG00000132446; CTA
NQSLLDLY

SEQ ID NO: 25496 - protein, 8 aa, Homo sapiens
  misc_feature: Table A; Target 25496; HLA-B*15:03; FTHL17; ENSG00000132446; CTA
NQSLLDLY

SEQ ID NO: 25497 - protein, 8 aa, Homo sapiens
  misc_feature: Table A; Target 25497; HLA-B*18:01; FTHL17; ENSG00000132446; CTA
NQSLLDLY

SEQ ID NO: 25498 - protein, 8 aa, Homo sapiens
  misc_feature: Table A; Target 25498; HLA-B*39:01; FTHL17; ENSG00000132446; CTA
NQSLLDLY

SEQ ID NO: 25499 - protein, 8 aa, Homo sapiens
  misc_feature: Table A; Target 25499; HLA-C*07:04; FTHL17; ENSG00000132446; CTA
NQSLLDLY

SEQ ID NO: 25500 - protein, 10 aa, Homo sapiens
  misc_feature: Table A; Target 25500; HLA-B*38:01; FTHL17; ENSG00000132446; CTA
NQSLLDLYQL

SEQ ID NO: 25501 - protein, 10 aa, Homo sapiens
  misc_feature: Table A; Target 25501; HLA-B*39:01; FTHL17; ENSG00000132446; CTA
NQSLLDLYQL

SEQ ID NO: 25502 - protein, 10 aa, Homo sapiens
  misc_feature: Table A; Target 25502; HLA-B*38:01; FTHL17; ENSG00000132446; CTA
NRDDVALENF

SEQ ID NO: 25503 - protein, 8 aa, Homo sapiens
  misc_feature: Table A; Target 25503; HLA-B*51:01; FTHL17; ENSG00000132446; CTA
NSHITLEL

SEQ ID NO: 25504 - protein, 8 aa, Homo sapiens
  misc_feature: Table A; Target 25504; HLA-C*01:02; FTHL17; ENSG00000132446; CTA
NSHITLEL

SEQ ID NO: 25505 - protein, 8 aa, Homo sapiens
  misc_feature: Table A; Target 25505; HLA-C*03:03; FTHL17; ENSG00000132446; CTA
NSHITLEL

SEQ ID NO: 25506 - protein, 8 aa, Homo sapiens
  misc_feature: Table A; Target 25506; HLA-C*03:04; FTHL17; ENSG00000132446; CTA
NSHITLEL

SEQ ID NO: 25507 - protein, 9 aa, Homo sapiens
  misc_feature: Table A; Target 25507; HLA-A*01:01; FTHL17; ENSG00000132446; CTA
NSHITLELY

SEQ ID NO: 25508 - protein, 9 aa, Homo sapiens
  misc_feature: Table A; Target 25508; HLA-A*29:02; FTHL17; ENSG00000132446; CTA
NSHITLELY

SEQ ID NO: 25509 - protein, 9 aa, Homo sapiens
  misc_feature: Table A; Target 25509; HLA-A*30:02; FTHL17; ENSG00000132446; CTA
NSHITLELY

SEQ ID NO: 25510 - protein, 9 aa, Homo sapiens
  misc_feature: Table A; Target 25510; HLA-B*46:01; FTHL17; ENSG00000132446; CTA
NSHITLELY

SEQ ID NO: 25511 - protein, 9 aa, Homo sapiens
  misc_feature: Table A; Target 25511; HLA-C*07:01; FTHL17; ENSG00000132446; CTA
NSHITLELY

SEQ ID NO: 25512 - protein, 9 aa, Homo sapiens
  misc_feature: Table A; Target 25512; HLA-C*01:02; FTHL17; ENSG00000132446; CTA
NVNQSLLDL

SEQ ID NO: 25513 - protein, 10 aa, Homo sapiens
  misc_feature: Table A; Target 25513; HLA-A*01:01; FTHL17; ENSG00000132446; CTA
NVNQSLLDLY

SEQ ID NO: 25514 - protein, 10 aa, Homo sapiens
  misc_feature: Table A; Target 25514; HLA-A*25:01; FTHL17; ENSG00000132446; CTA
NVNQSLLDLY

SEQ ID NO: 25515 - protein, 10 aa, Homo sapiens
  misc_feature: Table A; Target 25515; HLA-A*26:01; FTHL17; ENSG00000132446; CTA
NVNQSLLDLY

SEQ ID NO: 25516 - protein, 10 aa, Homo sapiens
  misc_feature: Table A; Target 25516; HLA-A*29:02; FTHL17; ENSG00000132446; CTA
NVNQSLLDLY

SEQ ID NO: 25517 - protein, 10 aa, Homo sapiens
  misc_feature: Table A; Target 25517; HLA-A*30:02; FTHL17; ENSG00000132446; CTA
NVNQSLLDLY

SEQ ID NO: 25518 - protein, 10 aa, Homo sapiens
  misc_feature: Table A; Target 25518; HLA-B*35:01; FTHL17; ENSG00000132446; CTA
NVNQSLLDLY

SEQ ID NO: 25519 - protein, 8 aa, Homo sapiens
  misc_feature: Table A; Target 25519; HLA-B*18:01; FTHL17; ENSG00000132446; CTA
PEAGLAEY

SEQ ID NO: 25520 - protein, 9 aa, Homo sapiens
  misc_feature: Table A; Target 25520; HLA-B*40:01; FTHL17; ENSG00000132446; CTA
PEAGLAEYL

SEQ ID NO: 25521 - protein, 10 aa, Homo sapiens
  misc_feature: Table A; Target 25521; HLA-B*35:01; FTHL17; ENSG00000132446; CTA
QGWESGLVAM

SEQ ID NO: 25522 - protein, 10 aa, Homo sapiens
  misc_feature: Table A; Target 25522; HLA-B*35:03; FTHL17; ENSG00000132446; CTA
QGWESGLVAM

SEQ ID NO: 25523 - protein, 9 aa, Homo sapiens
  misc_feature: Table A; Target 25523; HLA-A*29:02; FTHL17; ENSG00000132446; CTA
QPSQVRQKY

SEQ ID NO: 25524 - protein, 9 aa, Homo sapiens
  misc_feature: Table A; Target 25524; HLA-A*30:02; FTHL17; ENSG00000132446; CTA
QPSQVRQKY

SEQ ID NO: 25525 - protein, 9 aa, Homo sapiens
  misc_feature: Table A; Target 25525; HLA-A*32:01; FTHL17; ENSG00000132446; CTA
QPSQVRQKY

SEQ ID NO: 25526 - protein, 9 aa, Homo sapiens
  misc_feature: Table A; Target 25526; HLA-B*07:02; FTHL17; ENSG00000132446; CTA
QPSQVRQKY

SEQ ID NO: 25527 - protein, 9 aa, Homo sapiens
  misc_feature: Table A; Target 25527; HLA-B*15:01; FTHL17; ENSG00000132446; CTA
QPSQVRQKY

SEQ ID NO: 25528 - protein, 9 aa, Homo sapiens
  misc_feature: Table A; Target 25528; HLA-B*35:01; FTHL17; ENSG00000132446; CTA
QPSQVRQKY

SEQ ID NO: 25529 - protein, 9 aa, Homo sapiens
  misc_feature: Table A; Target 25529; HLA-B*44:02; FTHL17; ENSG00000132446; CTA
QPSQVRQKY

SEQ ID NO: 25530 - protein, 9 aa, Homo sapiens
  misc_feature: Table A; Target 25530; HLA-B*44:03; FTHL17; ENSG00000132446; CTA
QPSQVRQKY

SEQ ID NO: 25531 - protein, 9 aa, Homo sapiens
  misc_feature: Table A; Target 25531; HLA-B*55:01; FTHL17; ENSG00000132446; CTA
QPSQVRQKY

SEQ ID NO: 25532 - protein, 9 aa, Homo sapiens
  misc_feature: Table A; Target 25532; HLA-C*07:02; FTHL17; ENSG00000132446; CTA
QPSQVRQKY

SEQ ID NO: 25533 - protein, 9 aa, Homo sapiens
  misc_feature: Table A; Target 25533; HLA-C*16:01; FTHL17; ENSG00000132446; CTA
QPSQVRQKY

SEQ ID NO: 25534 - protein, 9 aa, Homo sapiens
  misc_feature: Table A; Target 25534; HLA-C*16:02; FTHL17; ENSG00000132446; CTA
QPSQVRQKY

SEQ ID NO: 25535 - protein, 9 aa, Homo sapiens
  misc_feature: Table A; Target 25535; HLA-C*16:04; FTHL17; ENSG00000132446; CTA
QPSQVRQKY

SEQ ID NO: 25536 - protein, 9 aa, Homo sapiens
  misc_feature: Table A; Target 25536; HLA-A*02:04; FTHL17; ENSG00000132446; CTA
QSLLDLYQL

SEQ ID NO: 25537 - protein, 8 aa, Homo sapiens
  misc_feature: Table A; Target 25537; HLA-B*08:01; FTHL17; ENSG00000132446; CTA
QVKTIKEL

SEQ ID NO: 25538 - protein, 11 aa, Homo sapiens
  misc_feature: Table A; Target 25538; HLA-A*25:01; FTHL17; ENSG00000132446; CTA
QVKTIKELGGY

SEQ ID NO: 25539 - protein, 11 aa, Homo sapiens
  misc_feature: Table A; Target 25539; HLA-A*26:01; FTHL17; ENSG00000132446; CTA
QVKTIKELGGY

SEQ ID NO: 25540 - protein, 11 aa, Homo sapiens
  misc_feature: Table A; Target 25540; HLA-A*30:02; FTHL17; ENSG00000132446; CTA
QVKTIKELGGY

SEQ ID NO: 25541 - protein, 9 aa, Homo sapiens
  misc_feature: Table A; Target 25541; HLA-B*37:01; FTHL17; ENSG00000132446; CTA
RDDVALENF

SEQ ID NO: 25542 - protein, 9 aa, Homo sapiens
  misc_feature: Table A; Target 25542; HLA-A*68:02; FTHL17; ENSG00000132446; CTA
SAFHLEKNV

SEQ ID NO: 25543 - protein, 9 aa, Homo sapiens
  misc_feature: Table A; Target 25543; HLA-B*51:01; FTHL17; ENSG00000132446; CTA
SAFHLEKNV

SEQ ID NO: 25544 - protein, 9 aa, Homo sapiens
  misc_feature: Table A; Target 25544; HLA-C*02:02; FTHL17; ENSG00000132446; CTA
SAFHLEKNV

SEQ ID NO: 25545 - protein, 9 aa, Homo sapiens
  misc_feature: Table A; Target 25545; HLA-C*12:03; FTHL17; ENSG00000132446; CTA
SAFHLEKNV

SEQ ID NO: 25546 - protein, 9 aa, Homo sapiens
  misc_feature: Table A; Target 25546; HLA-C*16:02; FTHL17; ENSG00000132446; CTA
SAFHLEKNV

SEQ ID NO: 25547 - protein, 9 aa, Homo sapiens
  misc_feature: Table A; Target 25547; HLA-C*16:04; FTHL17; ENSG00000132446; CTA
SAFHLEKNV

SEQ ID NO: 25548 - protein, 8 aa, Homo sapiens
  misc_feature: Table A; Target 25548; HLA-A*02:01; FTHL17; ENSG00000132446; CTA
SLLDLYQL

SEQ ID NO: 25549 - protein, 8 aa, Homo sapiens
  misc_feature: Table A; Target 25549; HLA-A*02:04; FTHL17; ENSG00000132446; CTA
SLLDLYQL

SEQ ID NO: 25550 - protein, 8 aa, Homo sapiens
  misc_feature: Table A; Target 25550; HLA-A*23:01; FTHL17; ENSG00000132446; CTA
SLLDLYQL

SEQ ID NO: 25551 - protein, 9 aa, Homo sapiens
  misc_feature: Table A; Target 25551; HLA-A*02:01; FTHL17; ENSG00000132446; CTA
SLLDLYQLA

SEQ ID NO: 25552 - protein, 9 aa, Homo sapiens
  misc_feature: Table A; Target 25552; HLA-A*02:04; FTHL17; ENSG00000132446; CTA
SLLDLYQLA

SEQ ID NO: 25553 - protein, 10 aa, Homo sapiens
  misc_feature: Table A; Target 25553; HLA-A*02:01; FTHL17; ENSG00000132446; CTA
SLLDLYQLAV

SEQ ID NO: 25554 - protein, 10 aa, Homo sapiens
  misc_feature: Table A; Target 25554; HLA-A*02:03; FTHL17; ENSG00000132446; CTA
SLLDLYQLAV

SEQ ID NO: 25555 - protein, 10 aa, Homo sapiens
  misc_feature: Table A; Target 25555; HLA-A*02:04; FTHL17; ENSG00000132446; CTA
SLLDLYQLAV

SEQ ID NO: 25556 - protein, 10 aa, Homo sapiens
  misc_feature: Table A; Target 25556; HLA-A*02:07; FTHL17; ENSG00000132446; CTA
SLLDLYQLAV

SEQ ID NO: 25557 - protein, 10 aa, Homo sapiens
  misc_feature: Table A; Target 25557; HLA-B*13:02; FTHL17; ENSG00000132446; CTA
SLLDLYQLAV

SEQ ID NO: 25558 - protein, 8 aa, Homo sapiens
  misc_feature: Table A; Target 25558; HLA-A*31:01; FTHL17; ENSG00000132446; CTA
SMAFYFNR

SEQ ID NO: 25559 - protein, 9 aa, Homo sapiens
  misc_feature: Table A; Target 25559; HLA-A*01:01; FTHL17; ENSG00000132446; CTA
SPEAGLAEY

SEQ ID NO: 25560 - protein, 9 aa, Homo sapiens
  misc_feature: Table A; Target 25560; HLA-A*30:02; FTHL17; ENSG00000132446; CTA
SPEAGLAEY

SEQ ID NO: 25561 - protein, 9 aa, Homo sapiens
  misc_feature: Table A; Target 25561; HLA-B*18:01; FTHL17; ENSG00000132446; CTA
SPEAGLAEY

SEQ ID NO: 25562 - protein, 9 aa, Homo sapiens
  misc_feature: Table A; Target 25562; HLA-B*35:03; FTHL17; ENSG00000132446; CTA
SPEAGLAEY

SEQ ID NO: 25563 - protein, 9 aa, Homo sapiens
  misc_feature: Table A; Target 25563; HLA-B*39:01; FTHL17; ENSG00000132446; CTA
SPEAGLAEY

SEQ ID NO: 25564 - protein, 9 aa, Homo sapiens
  misc_feature: Table A; Target 25564; HLA-B*55:01; FTHL17; ENSG00000132446; CTA
SPEAGLAEY

SEQ ID NO: 25565 - protein, 9 aa, Homo sapiens
  misc_feature: Table A; Target 25565; HLA-C*03:03; FTHL17; ENSG00000132446; CTA
SPEAGLAEY

SEQ ID NO: 25566 - protein, 9 aa, Homo sapiens
  misc_feature: Table A; Target 25566; HLA-C*14:02; FTHL17; ENSG00000132446; CTA
SPEAGLAEY

SEQ ID NO: 25567 - protein, 10 aa, Homo sapiens
  misc_feature: Table A; Target 25567; HLA-B*35:03; FTHL17; ENSG00000132446; CTA
SPEAGLAEYL

SEQ ID NO: 25568 - protein, 11 aa, Homo sapiens
  misc_feature: Table A; Target 25568; HLA-B*35:01; FTHL17; ENSG00000132446; CTA
SPEAGLAEYLF

SEQ ID NO: 25569 - protein, 11 aa, Homo sapiens
  misc_feature: Table A; Target 25569; HLA-B*55:01; FTHL17; ENSG00000132446; CTA
SPEAGLAEYLF

SEQ ID NO: 25570 - protein, 9 aa, Homo sapiens
  misc_feature: Table A; Target 25570; HLA-A*23:01; FTHL17; ENSG00000132446; CTA
SYLYLSMAF

SEQ ID NO: 25571 - protein, 9 aa, Homo sapiens
  misc_feature: Table A; Target 25571; HLA-A*24:02; FTHL17; ENSG00000132446; CTA
SYLYLSMAF

SEQ ID NO: 25572 - protein, 9 aa, Homo sapiens
  misc_feature: Table A; Target 25572; HLA-A*29:02; FTHL17; ENSG00000132446; CTA
SYLYLSMAF

SEQ ID NO: 25573 - protein, 10 aa, Homo sapiens
  misc_feature: Table A; Target 25573; HLA-A*29:02; FTHL17; ENSG00000132446; CTA
SYLYLSMAFY

SEQ ID NO: 25574 - protein, 8 aa, Homo sapiens
  misc_feature: Table A; Target 25574; HLA-A*33:03; FTHL17; ENSG00000132446; CTA
TAQPSQVR

SEQ ID NO: 25575 - protein, 8 aa, Homo sapiens
  misc_feature: Table A; Target 25575; HLA-C*07:06; FTHL17; ENSG00000132446; CTA
TAQPSQVR

SEQ ID NO: 25576 - protein, 9 aa, Homo sapiens
  misc_feature: Table A; Target 25576; HLA-C*16:01; FTHL17; ENSG00000132446; CTA
TAQPSQVRQ

SEQ ID NO: 25577 - protein, 9 aa, Homo sapiens
  misc_feature: Table A; Target 25577; HLA-C*16:02; FTHL17; ENSG00000132446; CTA
TAQPSQVRQ

SEQ ID NO: 25578 - protein, 10 aa, Homo sapiens
  misc_feature: Table A; Target 25578; HLA-A*03:01; FTHL17; ENSG00000132446; CTA
TAQPSQVRQK

SEQ ID NO: 25579 - protein, 10 aa, Homo sapiens
  misc_feature: Table A; Target 25579; HLA-A*03:02; FTHL17; ENSG00000132446; CTA
TAQPSQVRQK

SEQ ID NO: 25580 - protein, 10 aa, Homo sapiens
  misc_feature: Table A; Target 25580; HLA-A*11:01; FTHL17; ENSG00000132446; CTA
TAQPSQVRQK

SEQ ID NO: 25581 - protein, 10 aa, Homo sapiens
  misc_feature: Table A; Target 25581; HLA-A*68:01; FTHL17; ENSG00000132446; CTA
TAQPSQVRQK

SEQ ID NO: 25582 - protein, 10 aa, Homo sapiens
  misc_feature: Table A; Target 25582; HLA-C*06:02; FTHL17; ENSG00000132446; CTA
TAQPSQVRQK

SEQ ID NO: 25583 - protein, 10 aa, Homo sapiens
  misc_feature: Table A; Target 25583; HLA-C*07:06; FTHL17; ENSG00000132446; CTA
TAQPSQVRQK

SEQ ID NO: 25584 - protein, 11 aa, Homo sapiens
  misc_feature: Table A; Target 25584; HLA-A*29:02; FTHL17; ENSG00000132446; CTA
TAQPSQVRQKY

SEQ ID NO: 25585 - protein, 11 aa, Homo sapiens
  misc_feature: Table A; Target 25585; HLA-A*30:02; FTHL17; ENSG00000132446; CTA
TAQPSQVRQKY

SEQ ID NO: 25586 - protein, 11 aa, Homo sapiens
  misc_feature: Table A; Target 25586; HLA-A*32:01; FTHL17; ENSG00000132446; CTA
TAQPSQVRQKY

SEQ ID NO: 25587 - protein, 11 aa, Homo sapiens
  misc_feature: Table A; Target 25587; HLA-B*15:01; FTHL17; ENSG00000132446; CTA
TAQPSQVRQKY

SEQ ID NO: 25588 - protein, 11 aa, Homo sapiens
  misc_feature: Table A; Target 25588; HLA-B*35:01; FTHL17; ENSG00000132446; CTA
TAQPSQVRQKY

SEQ ID NO: 25589 - protein, 11 aa, Homo sapiens
  misc_feature: Table A; Target 25589; HLA-B*57:01; FTHL17; ENSG00000132446; CTA
TAQPSQVRQKY

SEQ ID NO: 25590 - protein, 11 aa, Homo sapiens
  misc_feature: Table A; Target 25590; HLA-B*58:01; FTHL17; ENSG00000132446; CTA
TAQPSQVRQKY

SEQ ID NO: 25591 - protein, 11 aa, Homo sapiens
  misc_feature: Table A; Target 25591; HLA-C*16:01; FTHL17; ENSG00000132446; CTA
TAQPSQVRQKY

SEQ ID NO: 25592 - protein, 11 aa, Homo sapiens
  misc_feature: Table A; Target 25592; HLA-C*16:02; FTHL17; ENSG00000132446; CTA
TAQPSQVRQKY

SEQ ID NO: 25593 - protein, 8 aa, Homo sapiens
  misc_feature: Table A; Target 25593; HLA-A*30:02; FTHL17; ENSG00000132446; CTA
TIKELGGY

SEQ ID NO: 25594 - protein, 8 aa, Homo sapiens
  misc_feature: Table A; Target 25594; HLA-B*15:01; FTHL17; ENSG00000132446; CTA
TIKELGGY

SEQ ID NO: 25595 - protein, 8 aa, Homo sapiens
  misc_feature: Table A; Target 25595; HLA-B*46:01; FTHL17; ENSG00000132446; CTA
TIKELGGY

SEQ ID NO: 25596 - protein, 9 aa, Homo sapiens
  misc_feature: Table A; Target 25596; HLA-A*02:03; FTHL17; ENSG00000132446; CTA
TIKELGGYV

SEQ ID NO: 25597 - protein, 9 aa, Homo sapiens
  misc_feature: Table A; Target 25597; HLA-A*26:01; FTHL17; ENSG00000132446; CTA
TIKELGGYV

SEQ ID NO: 25598 - protein, 9 aa, Homo sapiens
  misc_feature: Table A; Target 25598; HLA-A*68:02; FTHL17; ENSG00000132446; CTA
TIKELGGYV

SEQ ID NO: 25599 - protein, 9 aa, Homo sapiens
  misc_feature: Table A; Target 25599; HLA-A*02:07; FTHL17; ENSG00000132446; CTA
TLELYTSYL

SEQ ID NO: 25600 - protein, 10 aa, Homo sapiens
  misc_feature: Table A; Target 25600; HLA-A*01:01; FTHL17; ENSG00000132446; CTA
TLELYTSYLY

SEQ ID NO: 25601 - protein, 9 aa, Homo sapiens
  misc_feature: Table A; Target 25601; HLA-A*02:03; FTHL17; ENSG00000132446; CTA
TLGGRVKET

SEQ ID NO: 25602 - protein, 9 aa, Homo sapiens
  misc_feature: Table A; Target 25602; HLA-C*06:02; FTHL17; ENSG00000132446; CTA
TLGGRVKET

SEQ ID NO: 25603 - protein, 9 aa, Homo sapiens
  misc_feature: Table A; Target 25603; HLA-C*07:01; FTHL17; ENSG00000132446; CTA
TLGGRVKET

SEQ ID NO: 25604 - protein, 9 aa, Homo sapiens
  misc_feature: Table A; Target 25604; HLA-C*16:02; FTHL17; ENSG00000132446; CTA
TLGGRVKET

SEQ ID NO: 25605 - protein, 9 aa, Homo sapiens
  misc_feature: Table A; Target 25605; HLA-A*01:01; FTHL17; ENSG00000132446; CTA
VALENFFRY

SEQ ID NO: 25606 - protein, 9 aa, Homo sapiens
  misc_feature: Table A; Target 25606; HLA-A*02:04; FTHL17; ENSG00000132446; CTA
VALENFFRY

SEQ ID NO: 25607 - protein, 9 aa, Homo sapiens
  misc_feature: Table A; Target 25607; HLA-A*03:01; FTHL17; ENSG00000132446; CTA
VALENFFRY

SEQ ID NO: 25608 - protein, 9 aa, Homo sapiens
  misc_feature: Table A; Target 25608; HLA-A*24:02; FTHL17; ENSG00000132446; CTA
VALENFFRY

SEQ ID NO: 25609 - protein, 9 aa, Homo sapiens
  misc_feature: Table A; Target 25609; HLA-A*29:02; FTHL17; ENSG00000132446; CTA
VALENFFRY

SEQ ID NO: 25610 - protein, 9 aa, Homo sapiens
  misc_feature: Table A; Target 25610; HLA-A*30:02; FTHL17; ENSG00000132446; CTA
VALENFFRY

SEQ ID NO: 25611 - protein, 9 aa, Homo sapiens
  misc_feature: Table A; Target 25611; HLA-B*57:01; FTHL17; ENSG00000132446; CTA
VALENFFRY

SEQ ID NO: 25612 - protein, 9 aa, Homo sapiens
  misc_feature: Table A; Target 25612; HLA-C*02:02; FTHL17; ENSG00000132446; CTA
VALENFFRY

SEQ ID NO: 25613 - protein, 10 aa, Homo sapiens
  misc_feature: Table A; Target 25613; HLA-B*57:01; FTHL17; ENSG00000132446; CTA
VALENFFRYF

SEQ ID NO: 25614 - protein, 9 aa, Homo sapiens
  misc_feature: Table A; Target 25614; HLA-A*02:01; FTHL17; ENSG00000132446; CTA
VAMESAFHL

SEQ ID NO: 25615 - protein, 9 aa, Homo sapiens
  misc_feature: Table A; Target 25615; HLA-A*02:04; FTHL17; ENSG00000132446; CTA
VAMESAFHL

SEQ ID NO: 25616 - protein, 9 aa, Homo sapiens
  misc_feature: Table A; Target 25616; HLA-A*02:07; FTHL17; ENSG00000132446; CTA
VAMESAFHL

SEQ ID NO: 25617 - protein, 9 aa, Homo sapiens
  misc_feature: Table A; Target 25617; HLA-A*03:02; FTHL17; ENSG00000132446; CTA
VAMESAFHL

SEQ ID NO: 25618 - protein, 9 aa, Homo sapiens
  misc_feature: Table A; Target 25618; HLA-A*11:01; FTHL17; ENSG00000132446; CTA
VAMESAFHL

SEQ ID NO: 25619 - protein, 9 aa, Homo sapiens
  misc_feature: Table A; Target 25619; HLA-A*23:01; FTHL17; ENSG00000132446; CTA
VAMESAFHL

SEQ ID NO: 25620 - protein, 9 aa, Homo sapiens
  misc_feature: Table A; Target 25620; HLA-A*24:02; FTHL17; ENSG00000132446; CTA
VAMESAFHL

SEQ ID NO: 25621 - protein, 9 aa, Homo sapiens
  misc_feature: Table A; Target 25621; HLA-A*30:01; FTHL17; ENSG00000132446; CTA
VAMESAFHL

SEQ ID NO: 25622 - protein, 9 aa, Homo sapiens
  misc_feature: Table A; Target 25622; HLA-A*31:01; FTHL17; ENSG00000132446; CTA
VAMESAFHL

SEQ ID NO: 25623 - protein, 9 aa, Homo sapiens
  misc_feature: Table A; Target 25623; HLA-A*68:02; FTHL17; ENSG00000132446; CTA
VAMESAFHL

SEQ ID NO: 25624 - protein, 9 aa, Homo sapiens
  misc_feature: Table A; Target 25624; HLA-B*13:02; FTHL17; ENSG00000132446; CTA
VAMESAFHL

SEQ ID NO: 25625 - protein, 9 aa, Homo sapiens
  misc_feature: Table A; Target 25625; HLA-B*15:03; FTHL17; ENSG00000132446; CTA
VAMESAFHL

SEQ ID NO: 25626 - protein, 9 aa, Homo sapiens
  misc_feature: Table A; Target 25626; HLA-B*27:02; FTHL17; ENSG00000132446; CTA
VAMESAFHL

SEQ ID NO: 25627 - protein, 9 aa, Homo sapiens
  misc_feature: Table A; Target 25627; HLA-B*35:03; FTHL17; ENSG00000132446; CTA
VAMESAFHL

SEQ ID NO: 25628 - protein, 9 aa, Homo sapiens
  misc_feature: Table A; Target 25628; HLA-B*37:01; FTHL17; ENSG00000132446; CTA
VAMESAFHL

SEQ ID NO: 25629 - protein, 9 aa, Homo sapiens
  misc_feature: Table A; Target 25629; HLA-B*38:01; FTHL17; ENSG00000132446; CTA
VAMESAFHL

SEQ ID NO: 25630 - protein, 9 aa, Homo sapiens
  misc_feature: Table A; Target 25630; HLA-B*39:01; FTHL17; ENSG00000132446; CTA
VAMESAFHL

SEQ ID NO: 25631 - protein, 9 aa, Homo sapiens
  misc_feature: Table A; Target 25631; HLA-B*40:01; FTHL17; ENSG00000132446; CTA
VAMESAFHL

SEQ ID NO: 25632 - protein, 9 aa, Homo sapiens
  misc_feature: Table A; Target 25632; HLA-B*40:02; FTHL17; ENSG00000132446; CTA
VAMESAFHL

SEQ ID NO: 25633 - protein, 9 aa, Homo sapiens
  misc_feature: Table A; Target 25633; HLA-B*46:01; FTHL17; ENSG00000132446; CTA
VAMESAFHL

SEQ ID NO: 25634 - protein, 9 aa, Homo sapiens
  misc_feature: Table A; Target 25634; HLA-B*51:01; FTHL17; ENSG00000132446; CTA
VAMESAFHL

SEQ ID NO: 25635 - protein, 9 aa, Homo sapiens
  misc_feature: Table A; Target 25635; HLA-B*55:01; FTHL17; ENSG00000132446; CTA
VAMESAFHL

SEQ ID NO: 25636 - protein, 9 aa, Homo sapiens
  misc_feature: Table A; Target 25636; HLA-B*57:01; FTHL17; ENSG00000132446; CTA
VAMESAFHL

SEQ ID NO: 25637 - protein, 9 aa, Homo sapiens
  misc_feature: Table A; Target 25637; HLA-B*58:01; FTHL17; ENSG00000132446; CTA
VAMESAFHL

SEQ ID NO: 25638 - protein, 9 aa, Homo sapiens
  misc_feature: Table A; Target 25638; HLA-C*01:02; FTHL17; ENSG00000132446; CTA
VAMESAFHL

SEQ ID NO: 25639 - protein, 9 aa, Homo sapiens
  misc_feature: Table A; Target 25639; HLA-C*02:02; FTHL17; ENSG00000132446; CTA
VAMESAFHL

SEQ ID NO: 25640 - protein, 9 aa, Homo sapiens
  misc_feature: Table A; Target 25640; HLA-C*03:03; FTHL17; ENSG00000132446; CTA
VAMESAFHL

SEQ ID NO: 25641 - protein, 9 aa, Homo sapiens
  misc_feature: Table A; Target 25641; HLA-C*03:04; FTHL17; ENSG00000132446; CTA
VAMESAFHL

SEQ ID NO: 25642 - protein, 9 aa, Homo sapiens
  misc_feature: Table A; Target 25642; HLA-C*05:01; FTHL17; ENSG00000132446; CTA
VAMESAFHL

SEQ ID NO: 25643 - protein, 9 aa, Homo sapiens
  misc_feature: Table A; Target 25643; HLA-C*07:04; FTHL17; ENSG00000132446; CTA
VAMESAFHL

SEQ ID NO: 25644 - protein, 9 aa, Homo sapiens
  misc_feature: Table A; Target 25644; HLA-C*12:03; FTHL17; ENSG00000132446; CTA
VAMESAFHL

SEQ ID NO: 25645 - protein, 9 aa, Homo sapiens
  misc_feature: Table A; Target 25645; HLA-C*14:02; FTHL17; ENSG00000132446; CTA
VAMESAFHL

SEQ ID NO: 25646 - protein, 9 aa, Homo sapiens
  misc_feature: Table A; Target 25646; HLA-C*16:01; FTHL17; ENSG00000132446; CTA
VAMESAFHL

SEQ ID NO: 25647 - protein, 9 aa, Homo sapiens
  misc_feature: Table A; Target 25647; HLA-C*16:02; FTHL17; ENSG00000132446; CTA
VAMESAFHL

SEQ ID NO: 25648 - protein, 9 aa, Homo sapiens
  misc_feature: Table A; Target 25648; HLA-C*16:04; FTHL17; ENSG00000132446; CTA
VAMESAFHL

SEQ ID NO: 25649 - protein, 11 aa, Homo sapiens
  misc_feature: Table A; Target 25649; HLA-A*11:01; FTHL17; ENSG00000132446; CTA
VAMESAFHLEK

SEQ ID NO: 25650 - protein, 8 aa, Homo sapiens
  misc_feature: Table A; Target 25650; HLA-A*30:01; FTHL17; ENSG00000132446; CTA
VEKGDPQL

SEQ ID NO: 25651 - protein, 8 aa, Homo sapiens
  misc_feature: Table A; Target 25651; HLA-B*18:01; FTHL17; ENSG00000132446; CTA
VEKGDPQL

SEQ ID NO: 25652 - protein, 8 aa, Homo sapiens
  misc_feature: Table A; Target 25652; HLA-B*37:01; FTHL17; ENSG00000132446; CTA
VEKGDPQL

SEQ ID NO: 25653 - protein, 8 aa, Homo sapiens
  misc_feature: Table A; Target 25653; HLA-B*40:01; FTHL17; ENSG00000132446; CTA
VEKGDPQL

SEQ ID NO: 25654 - protein, 8 aa, Homo sapiens
  misc_feature: Table A; Target 25654; HLA-B*40:02; FTHL17; ENSG00000132446; CTA
VEKGDPQL

SEQ ID NO: 25655 - protein, 8 aa, Homo sapiens
  misc_feature: Table A; Target 25655; HLA-C*04:01; FTHL17; ENSG00000132446; CTA
VEKGDPQL

SEQ ID NO: 25656 - protein, 8 aa, Homo sapiens
  misc_feature: Table A; Target 25656; HLA-C*06:02; FTHL17; ENSG00000132446; CTA
VEKGDPQL

SEQ ID NO: 25657 - protein, 8 aa, Homo sapiens
  misc_feature: Table A; Target 25657; HLA-C*07:02; FTHL17; ENSG00000132446; CTA
VEKGDPQL

SEQ ID NO: 25658 - protein, 8 aa, Homo sapiens
  misc_feature: Table A; Target 25658; HLA-C*12:03; FTHL17; ENSG00000132446; CTA
VEKGDPQL

SEQ ID NO: 25659 - protein, 8 aa, Homo sapiens
  misc_feature: Table A; Target 25659; HLA-C*16:02; FTHL17; ENSG00000132446; CTA
VEKGDPQL

SEQ ID NO: 25660 - protein, 9 aa, Homo sapiens
  misc_feature: Table A; Target 25660; HLA-A*30:01; FTHL17; ENSG00000132446; CTA
VEKGDPQLC

SEQ ID NO: 25661 - protein, 9 aa, Homo sapiens
  misc_feature: Table A; Target 25661; HLA-B*40:01; FTHL17; ENSG00000132446; CTA
VEKGDPQLC

SEQ ID NO: 25662 - protein, 9 aa, Homo sapiens
  misc_feature: Table A; Target 25662; HLA-B*40:02; FTHL17; ENSG00000132446; CTA
VEKGDPQLC

SEQ ID NO: 25663 - protein, 9 aa, Homo sapiens
  misc_feature: Table A; Target 25663; HLA-B*49:01; FTHL17; ENSG00000132446; CTA
VEKGDPQLC

SEQ ID NO: 25664 - protein, 9 aa, Homo sapiens
  misc_feature: Table A; Target 25664; HLA-C*06:02; FTHL17; ENSG00000132446; CTA
VEKGDPQLC

SEQ ID NO: 25665 - protein, 9 aa, Homo sapiens
  misc_feature: Table A; Target 25665; HLA-C*12:03; FTHL17; ENSG00000132446; CTA
VEKGDPQLC

SEQ ID NO: 25666 - protein, 9 aa, Homo sapiens
  misc_feature: Table A; Target 25666; HLA-A*01:01; FTHL17; ENSG00000132446; CTA
VNQSLLDLY

SEQ ID NO: 25667 - protein, 9 aa, Homo sapiens
  misc_feature: Table A; Target 25667; HLA-A*29:02; FTHL17; ENSG00000132446; CTA
VNQSLLDLY

SEQ ID NO: 25668 - protein, 9 aa, Homo sapiens
  misc_feature: Table A; Target 25668; HLA-A*30:02; FTHL17; ENSG00000132446; CTA
VNQSLLDLY

SEQ ID NO: 25669 - protein, 8 aa, Homo sapiens
  misc_feature: Table A; Target 25669; HLA-A*30:01; FTHL17; ENSG00000132446; CTA
WESGLVAM

SEQ ID NO: 25670 - protein, 8 aa, Homo sapiens
  misc_feature: Table A; Target 25670; HLA-B*18:01; FTHL17; ENSG00000132446; CTA
WESGLVAM

SEQ ID NO: 25671 - protein, 8 aa, Homo sapiens
  misc_feature: Table A; Target 25671; HLA-B*37:01; FTHL17; ENSG00000132446; CTA
WESGLVAM

SEQ ID NO: 25672 - protein, 9 aa, Homo sapiens
  misc_feature: Table A; Target 25672; HLA-A*23:01; FTHL17; ENSG00000132446; CTA
YFNRDDVAL

SEQ ID NO: 25673 - protein, 9 aa, Homo sapiens
  misc_feature: Table A; Target 25673; HLA-A*24:02; FTHL17; ENSG00000132446; CTA
YFNRDDVAL

SEQ ID NO: 25674 - protein, 9 aa, Homo sapiens
  misc_feature: Table A; Target 25674; HLA-B*35:03; FTHL17; ENSG00000132446; CTA
YFNRDDVAL

SEQ ID NO: 25675 - protein, 9 aa, Homo sapiens
  misc_feature: Table A; Target 25675; HLA-B*38:01; FTHL17; ENSG00000132446; CTA
YFNRDDVAL

SEQ ID NO: 25676 - protein, 9 aa, Homo sapiens
  misc_feature: Table A; Target 25676; HLA-B*55:01; FTHL17; ENSG00000132446; CTA
YFNRDDVAL

SEQ ID NO: 25677 - protein, 9 aa, Homo sapiens
  misc_feature: Table A; Target 25677; HLA-C*01:02; FTHL17; ENSG00000132446; CTA
YFNRDDVAL

SEQ ID NO: 25678 - protein, 9 aa, Homo sapiens
  misc_feature: Table A; Target 25678; HLA-C*03:03; FTHL17; ENSG00000132446; CTA
YFNRDDVAL

SEQ ID NO: 25679 - protein, 9 aa, Homo sapiens
  misc_feature: Table A; Target 25679; HLA-C*14:02; FTHL17; ENSG00000132446; CTA
YFNRDDVAL

SEQ ID NO: 25680 - protein, 8 aa, Homo sapiens
  misc_feature: Table A; Target 25680; HLA-A*02:01; FTHL17; ENSG00000132446; CTA
YLFDKLTL

SEQ ID NO: 25681 - protein, 8 aa, Homo sapiens
  misc_feature: Table A; Target 25681; HLA-A*02:03; FTHL17; ENSG00000132446; CTA
YLFDKLTL

SEQ ID NO: 25682 - protein, 8 aa, Homo sapiens
  misc_feature: Table A; Target 25682; HLA-A*02:04; FTHL17; ENSG00000132446; CTA
YLFDKLTL

SEQ ID NO: 25683 - protein, 8 aa, Homo sapiens
  misc_feature: Table A; Target 25683; HLA-A*02:07; FTHL17; ENSG00000132446; CTA
YLFDKLTL

SEQ ID NO: 25684 - protein, 8 aa, Homo sapiens
  misc_feature: Table A; Target 25684; HLA-A*23:01; FTHL17; ENSG00000132446; CTA
YLFDKLTL

SEQ ID NO: 25685 - protein, 8 aa, Homo sapiens
  misc_feature: Table A; Target 25685; HLA-B*08:01; FTHL17; ENSG00000132446; CTA
YLFDKLTL

SEQ ID NO: 25686 - protein, 8 aa, Homo sapiens
  misc_feature: Table A; Target 25686; HLA-B*13:02; FTHL17; ENSG00000132446; CTA
YLFDKLTL

SEQ ID NO: 25687 - protein, 8 aa, Homo sapiens
  misc_feature: Table A; Target 25687; HLA-B*40:02; FTHL17; ENSG00000132446; CTA
YLFDKLTL

SEQ ID NO: 25688 - protein, 8 aa, Homo sapiens
  misc_feature: Table A; Target 25688; HLA-C*03:03; FTHL17; ENSG00000132446; CTA
YLFDKLTL

SEQ ID NO: 25689 - protein, 8 aa, Homo sapiens
  misc_feature: Table A; Target 25689; HLA-C*03:04; FTHL17; ENSG00000132446; CTA
YLFDKLTL

SEQ ID NO: 25690 - protein, 9 aa, Homo sapiens
  misc_feature: Table A; Target 25690; HLA-A*02:01; FTHL17; ENSG00000132446; CTA
YLFDKLTLG

SEQ ID NO: 25691 - protein, 9 aa, Homo sapiens
  misc_feature: Table A; Target 25691; HLA-A*02:03; FTHL17; ENSG00000132446; CTA
YLFDKLTLG

SEQ ID NO: 25692 - protein, 9 aa, Homo sapiens
  misc_feature: Table A; Target 25692; HLA-A*02:04; FTHL17; ENSG00000132446; CTA
YLFDKLTLG

SEQ ID NO: 25693 - protein, 9 aa, Homo sapiens
  misc_feature: Table A; Target 25693; HLA-A*02:07; FTHL17; ENSG00000132446; CTA
YLFDKLTLG

SEQ ID NO: 25694 - protein, 10 aa, Homo sapiens
  misc_feature: Table A; Target 25694; HLA-A*02:01; FTHL17; ENSG00000132446; CTA
YLFDKLTLGG

SEQ ID NO: 25695 - protein, 10 aa, Homo sapiens
  misc_feature: Table A; Target 25695; HLA-A*02:03; FTHL17; ENSG00000132446; CTA
YLFDKLTLGG

SEQ ID NO: 25696 - protein, 10 aa, Homo sapiens
  misc_feature: Table A; Target 25696; HLA-A*02:04; FTHL17; ENSG00000132446; CTA
YLFDKLTLGG

SEQ ID NO: 25697 - protein, 10 aa, Homo sapiens
  misc_feature: Table A; Target 25697; HLA-A*02:07; FTHL17; ENSG00000132446; CTA
YLFDKLTLGG

SEQ ID NO: 25698 - protein, 11 aa, Homo sapiens
  misc_feature: Table A; Target 25698; HLA-A*02:03; FTHL17; ENSG00000132446; CTA
YLFDKLTLGGR

SEQ ID NO: 25699 - protein, 9 aa, Homo sapiens
  misc_feature: Table A; Target 25699; HLA-A*02:03; FTHL17; ENSG00000132446; CTA
YLHEQVKTI

SEQ ID NO: 25700 - protein, 9 aa, Homo sapiens
  misc_feature: Table A; Target 25700; HLA-A*02:04; FTHL17; ENSG00000132446; CTA
YLHEQVKTI

SEQ ID NO: 25701 - protein, 9 aa, Homo sapiens
  misc_feature: Table A; Target 25701; HLA-A*02:07; FTHL17; ENSG00000132446; CTA
YLHEQVKTI

SEQ ID NO: 25702 - protein, 9 aa, Homo sapiens
  misc_feature: Table A; Target 25702; HLA-A*23:01; FTHL17; ENSG00000132446; CTA
YLHEQVKTI

SEQ ID NO: 25703 - protein, 9 aa, Homo sapiens
  misc_feature: Table A; Target 25703; HLA-A*24:02; FTHL17; ENSG00000132446; CTA
YLHEQVKTI

SEQ ID NO: 25704 - protein, 9 aa, Homo sapiens
  misc_feature: Table A; Target 25704; HLA-A*25:01; FTHL17; ENSG00000132446; CTA
YLHEQVKTI

SEQ ID NO: 25705 - protein, 9 aa, Homo sapiens
  misc_feature: Table A; Target 25705; HLA-A*30:01; FTHL17; ENSG00000132446; CTA
YLHEQVKTI

SEQ ID NO: 25706 - protein, 9 aa, Homo sapiens
  misc_feature: Table A; Target 25706; HLA-A*32:01; FTHL17; ENSG00000132446; CTA
YLHEQVKTI

SEQ ID NO: 25707 - protein, 9 aa, Homo sapiens
  misc_feature: Table A; Target 25707; HLA-A*68:02; FTHL17; ENSG00000132446; CTA
YLHEQVKTI

SEQ ID NO: 25708 - protein, 9 aa, Homo sapiens
  misc_feature: Table A; Target 25708; HLA-B*08:01; FTHL17; ENSG00000132446; CTA
YLHEQVKTI

SEQ ID NO: 25709 - protein, 9 aa, Homo sapiens
  misc_feature: Table A; Target 25709; HLA-B*13:02; FTHL17; ENSG00000132446; CTA
YLHEQVKTI

SEQ ID NO: 25710 - protein, 9 aa, Homo sapiens
  misc_feature: Table A; Target 25710; HLA-B*40:02; FTHL17; ENSG00000132446; CTA
YLHEQVKTI

SEQ ID NO: 25711 - protein, 9 aa, Homo sapiens
  misc_feature: Table A; Target 25711; HLA-B*46:01; FTHL17; ENSG00000132446; CTA
YLHEQVKTI

SEQ ID NO: 25712 - protein, 9 aa, Homo sapiens
  misc_feature: Table A; Target 25712; HLA-B*49:01; FTHL17; ENSG00000132446; CTA
YLHEQVKTI

SEQ ID NO: 25713 - protein, 9 aa, Homo sapiens
  misc_feature: Table A; Target 25713; HLA-B*51:01; FTHL17; ENSG00000132446; CTA
YLHEQVKTI

SEQ ID NO: 25714 - protein, 9 aa, Homo sapiens
  misc_feature: Table A; Target 25714; HLA-B*55:01; FTHL17; ENSG00000132446; CTA
YLHEQVKTI

SEQ ID NO: 25715 - protein, 9 aa, Homo sapiens
  misc_feature: Table A; Target 25715; HLA-C*02:02; FTHL17; ENSG00000132446; CTA
YLHEQVKTI

SEQ ID NO: 25716 - protein, 9 aa, Homo sapiens
  misc_feature: Table A; Target 25716; HLA-C*03:03; FTHL17; ENSG00000132446; CTA
YLHEQVKTI

SEQ ID NO: 25717 - protein, 9 aa, Homo sapiens
  misc_feature: Table A; Target 25717; HLA-C*03:04; FTHL17; ENSG00000132446; CTA
YLHEQVKTI

SEQ ID NO: 25718 - protein, 9 aa, Homo sapiens
  misc_feature: Table A; Target 25718; HLA-C*06:02; FTHL17; ENSG00000132446; CTA
YLHEQVKTI

SEQ ID NO: 25719 - protein, 9 aa, Homo sapiens
  misc_feature: Table A; Target 25719; HLA-C*07:04; FTHL17; ENSG00000132446; CTA
YLHEQVKTI

SEQ ID NO: 25720 - protein, 9 aa, Homo sapiens
  misc_feature: Table A; Target 25720; HLA-C*12:03; FTHL17; ENSG00000132446; CTA
YLHEQVKTI

SEQ ID NO: 25721 - protein, 9 aa, Homo sapiens
  misc_feature: Table A; Target 25721; HLA-C*16:02; FTHL17; ENSG00000132446; CTA
YLHEQVKTI

SEQ ID NO: 25722 - protein, 10 aa, Homo sapiens
  misc_feature: Table A; Target 25722; HLA-A*03:01; FTHL17; ENSG00000132446; CTA
YLHEQVKTIK

SEQ ID NO: 25723 - protein, 8 aa, Homo sapiens
  misc_feature: Table A; Target 25723; HLA-B*37:01; FTHL17; ENSG00000132446; CTA
YLYLSMAF

SEQ ID NO: 25724 - protein, 9 aa, Homo sapiens
  misc_feature: Table A; Target 25724; HLA-A*01:01; FTHL17; ENSG00000132446; CTA
YLYLSMAFY

SEQ ID NO: 25725 - protein, 9 aa, Homo sapiens
  misc_feature: Table A; Target 25725; HLA-A*29:02; FTHL17; ENSG00000132446; CTA
YLYLSMAFY

SEQ ID NO: 25726 - protein, 9 aa, Homo sapiens
  misc_feature: Table A; Target 25726; HLA-A*01:01; FTHL17; ENSG00000132446; CTA
YTSYLYLSM

SEQ ID NO: 25727 - protein, 9 aa, Homo sapiens
  misc_feature: Table A; Target 25727; HLA-A*29:02; FTHL17; ENSG00000132446; CTA
YTSYLYLSM

SEQ ID NO: 25728 - protein, 9 aa, Homo sapiens
  misc_feature: Table A; Target 25728; HLA-A*02:01; GAGE1; ENSG00000205777; CTA
AQTGILWLL

SEQ ID NO: 25729 - protein, 9 aa, Homo sapiens
  misc_feature: Table A; Target 25729; HLA-A*02:03; GAGE1; ENSG00000205777; CTA
AQTGILWLL

SEQ ID NO: 25730 - protein, 9 aa, Homo sapiens
  misc_feature: Table A; Target 25730; HLA-A*02:04; GAGE1; ENSG00000205777; CTA
AQTGILWLL

SEQ ID NO: 25731 - protein, 9 aa, Homo sapiens
  misc_feature: Table A; Target 25731; HLA-B*13:02; GAGE1; ENSG00000205777; CTA
AQTGILWLL

SEQ ID NO: 25732 - protein, 9 aa, Homo sapiens
  misc_feature: Table A; Target 25732; HLA-A*26:01; GAGE1; ENSG00000205777; CTA
EVKTPEEEM

SEQ ID NO: 25733 - protein, 10 aa, Homo sapiens
  misc_feature: Table A; Target 25733; HLA-A*33:03; GAGE1; ENSG00000205777; CTA
EVKTPEEEMR

SEQ ID NO: 25734 - protein, 10 aa, Homo sapiens
  misc_feature: Table A; Target 25734; HLA-A*68:01; GAGE1; ENSG00000205777; CTA
EVKTPEEEMR

SEQ ID NO: 25735 - protein, 10 aa, Homo sapiens
  misc_feature: Table A; Target 25735; HLA-C*07:06; GAGE1; ENSG00000205777; CTA
EVKTPEEEMR

SEQ ID NO: 25736 - protein, 9 aa, Homo sapiens
  misc_feature: Table A; Target 25736; HLA-A*23:01; GAGE1; ENSG00000205777; CTA
HYVAQTGIL

SEQ ID NO: 25737 - protein, 9 aa, Homo sapiens
  misc_feature: Table A; Target 25737; HLA-A*24:02; GAGE1; ENSG00000205777; CTA
HYVAQTGIL

SEQ ID NO: 25738 - protein, 9 aa, Homo sapiens
  misc_feature: Table A; Target 25738; HLA-C*14:02; GAGE1; ENSG00000205777; CTA
HYVAQTGIL

SEQ ID NO: 25739 - protein, 10 aa, Homo sapiens
  misc_feature: Table A; Target 25739; HLA-A*23:01; GAGE1; ENSG00000205777; CTA
HYVAQTGILW

SEQ ID NO: 25740 - protein, 10 aa, Homo sapiens
  misc_feature: Table A; Target 25740; HLA-A*24:02; GAGE1; ENSG00000205777; CTA
HYVAQTGILW

SEQ ID NO: 25741 - protein, 10 aa, Homo sapiens
  misc_feature: Table A; Target 25741; HLA-B*57:01; GAGE1; ENSG00000205777; CTA
HYVAQTGILW

SEQ ID NO: 25742 - protein, 9 aa, Homo sapiens
  misc_feature: Table A; Target 25742; HLA-A*23:01; GAGE1; ENSG00000205777; CTA
RYVQPPEMI

SEQ ID NO: 25743 - protein, 9 aa, Homo sapiens
  misc_feature: Table A; Target 25743; HLA-A*24:02; GAGE1; ENSG00000205777; CTA
RYVQPPEMI

SEQ ID NO: 25744 - protein, 9 aa, Homo sapiens
  misc_feature: Table A; Target 25744; HLA-B*13:02; GAGE1; ENSG00000205777; CTA
SHYVAQTGI

SEQ ID NO: 25745 - protein, 9 aa, Homo sapiens
  misc_feature: Table A; Target 25745; HLA-B*38:01; GAGE1; ENSG00000205777; CTA
SHYVAQTGI

SEQ ID NO: 25746 - protein, 9 aa, Homo sapiens
  misc_feature: Table A; Target 25746; HLA-B*39:01; GAGE1; ENSG00000205777; CTA
SHYVAQTGI

SEQ ID NO: 25747 - protein, 8 aa, Homo sapiens
  misc_feature: Table A; Target 25747; HLA-B*57:01; GAGE1; ENSG00000205777; CTA
VAQTGILW

SEQ ID NO: 25748 - protein, 8 aa, Homo sapiens
  misc_feature: Table A; Target 25748; HLA-B*58:01; GAGE1; ENSG00000205777; CTA
VAQTGILW

SEQ ID NO: 25749 - protein, 8 aa, Homo sapiens
  misc_feature: Table A; Target 25749; HLA-C*03:03; GAGE1; ENSG00000205777; CTA
YVAQTGIL

SEQ ID NO: 25750 - protein, 8 aa, Homo sapiens
  misc_feature: Table A; Target 25750; HLA-C*03:04; GAGE1; ENSG00000205777; CTA
YVAQTGIL

SEQ ID NO: 25751 - protein, 9 aa, Homo sapiens
  misc_feature: Table A; Target 25751; HLA-A*01:01; GAGE1; ENSG00000205777; CTA
YVAQTGILW

SEQ ID NO: 25752 - protein, 9 aa, Homo sapiens
  misc_feature: Table A; Target 25752; HLA-A*25:01; GAGE1; ENSG00000205777; CTA
YVAQTGILW

SEQ ID NO: 25753 - protein, 9 aa, Homo sapiens
  misc_feature: Table A; Target 25753; HLA-A*26:01; GAGE1; ENSG00000205777; CTA
YVAQTGILW

SEQ ID NO: 25754 - protein, 9 aa, Homo sapiens
  misc_feature: Table A; Target 25754; HLA-A*29:02; GAGE1; ENSG00000205777; CTA
YVAQTGILW

SEQ ID NO: 25755 - protein, 9 aa, Homo sapiens
  misc_feature: Table A; Target 25755; HLA-A*33:01; GAGE1; ENSG00000205777; CTA
YVAQTGILW

SEQ ID NO: 25756 - protein, 9 aa, Homo sapiens
  misc_feature: Table A; Target 25756; HLA-B*57:01; GAGE1; ENSG00000205777; CTA
YVAQTGILW

SEQ ID NO: 25757 - protein, 9 aa, Homo sapiens
  misc_feature: Table A; Target 25757; HLA-B*58:01; GAGE1; ENSG00000205777; CTA
YVAQTGILW

SEQ ID NO: 25758 - protein, 11 aa, Homo sapiens
  misc_feature: Table A; Target 25758; HLA-A*68:02; GAGE1; ENSG00000205777; CTA
YVAQTGILWLL

SEQ ID NO: 25759 - protein, 11 aa, Homo sapiens
  misc_feature: Table A; Target 25759; HLA-A*26:01; GAGE1; ENSG00000205777; CTA
YVQPPEMIGPM

SEQ ID NO: 25760 - protein, 9 aa, Homo sapiens
  misc_feature: Table A; Target 25760; HLA-A*29:02; GAGE1; ENSG00000205777; CTA
YYWPRPRRY

SEQ ID NO: 25761 - protein, 9 aa, Homo sapiens
  misc_feature: Table A; Target 25761; HLA-A*33:01; GAGE1,GAGE12J; ENSG00000205777,ENSG00000224659; CTA,CTA
DSQEQGHPQ

SEQ ID NO: 25762 - protein, 9 aa, Homo sapiens
  misc_feature: Table A; Target 25762; HLA-A*31:01; GAGE1,GAGE12J; ENSG00000205777,ENSG00000224659; CTA,CTA
STYYWPRPR

SEQ ID NO: 25763 - protein, 10 aa, Homo sapiens
  misc_feature: Table A; Target 25763; HLA-B*40:01; GAGE1,GAGE12J,GAGE2A; ENSG00000205777,ENSG00000224659,ENSG00000189064; CTA,CTA,CTA
CEDGPDGQEM

SEQ ID NO: 25764 - protein, 8 aa, Homo sapiens
  misc_feature: Table A; Target 25764; HLA-B*18:01; GAGE1,GAGE12J,GAGE2A; ENSG00000205777,ENSG00000224659,ENSG00000189064; CTA,CTA,CTA
DEVEPATP

SEQ ID NO: 25765 - protein, 9 aa, Homo sapiens
  misc_feature: Table A; Target 25765; HLA-B*18:01; GAGE1,GAGE12J,GAGE2A; ENSG00000205777,ENSG00000224659,ENSG00000189064; CTA,CTA,CTA
DEVEPATPE

SEQ ID NO: 25766 - protein, 8 aa, Homo sapiens
  misc_feature: Table A; Target 25766; HLA-C*01:02; GAGE1,GAGE12J,GAGE2A; ENSG00000205777,ENSG00000224659,ENSG00000189064; CTA,CTA,CTA
DGPDGQEM

SEQ ID NO: 25767 - protein, 8 aa, Homo sapiens
  misc_feature: Table A; Target 25767; HLA-B*51:01; GAGE1,GAGE12J,GAGE2A; ENSG00000205777,ENSG00000224659,ENSG00000189064; CTA,CTA,CTA
DPPNPEEV

SEQ ID NO: 25768 - protein, 9 aa, Homo sapiens
  misc_feature: Table A; Target 25768; HLA-A*33:03; GAGE1,GAGE12J,GAGE2A; ENSG00000205777,ENSG00000224659,ENSG00000189064; CTA,CTA,CTA
EEGEPATQR

SEQ ID NO: 25769 - protein, 9 aa, Homo sapiens
  misc_feature: Table A; Target 25769; HLA-C*07:06; GAGE1,GAGE12J,GAGE2A; ENSG00000205777,ENSG00000224659,ENSG00000189064; CTA,CTA,CTA
EEGEPATQR

SEQ ID NO: 25770 - protein, 10 aa, Homo sapiens
  misc_feature: Table A; Target 25770; HLA-A*68:01; GAGE1,GAGE12J,GAGE2A; ENSG00000205777,ENSG00000224659,ENSG00000189064; CTA,CTA,CTA
EGASAGQGPK

SEQ ID NO: 25771 - protein, 10 aa, Homo sapiens
  misc_feature: Table A; Target 25771; HLA-A*01:01; GAGE1,GAGE12J,GAGE2A; ENSG00000205777,ENSG00000224659,ENSG00000189064; CTA,CTA,CTA
EMDPPNPEEV

SEQ ID NO: 25772 - protein, 11 aa, Homo sapiens
  misc_feature: Table A; Target 25772; HLA-A*01:01; GAGE1,GAGE12J,GAGE2A; ENSG00000205777,ENSG00000224659,ENSG00000189064; CTA,CTA,CTA
EMDPPNPEEVK

SEQ ID NO: 25773 - protein, 11 aa, Homo sapiens
  misc_feature: Table A; Target 25773; HLA-B*49:01; GAGE1,GAGE12J,GAGE2A; ENSG00000205777,ENSG00000224659,ENSG00000189064; CTA,CTA,CTA
QEMDPPNPEEV

SEQ ID NO: 25774 - protein, 8 aa, Homo sapiens
  misc_feature: Table A; Target 25774; HLA-C*16:02; GAGE1,GAGE12J,GAGE2A; ENSG00000205777,ENSG00000224659,ENSG00000189064; CTA,CTA,CTA
QEQGHPQT

SEQ ID NO: 25775 - protein, 9 aa, Homo sapiens
  misc_feature: Table A; Target 25775; HLA-B*35:03; GAGE1,GAGE12J,GAGE2A; ENSG00000205777,ENSG00000224659,ENSG00000189064; CTA,CTA,CTA
TPEEGEPAT

SEQ ID NO: 25776 - protein, 11 aa, Homo sapiens
  misc_feature: Table A; Target 25776; HLA-A*68:01; GAGE1,GAGE12J,GAGE2A; ENSG00000205777,ENSG00000224659,ENSG00000189064; CTA,CTA,CTA
TPEEGEPATQR

SEQ ID NO: 25777 - protein, 11 aa, Homo sapiens
  misc_feature: Table A; Target 25777; HLA-C*07:06; GAGE1,GAGE12J,GAGE2A; ENSG00000205777,ENSG00000224659,ENSG00000189064; CTA,CTA,CTA
TPEEGEPATQR

SEQ ID NO: 25778 - protein, 9 aa, Homo sapiens
  misc_feature: Table A; Target 25778; HLA-A*33:01; GAGE12J; ENSG00000224659; CTA
EVKTPEEGK

SEQ ID NO: 25779 - protein, 9 aa, Homo sapiens
  misc_feature: Table A; Target 25779; HLA-A*33:03; GAGE12J; ENSG00000224659; CTA
EVKTPEEGK

SEQ ID NO: 25780 - protein, 9 aa, Homo sapiens
  misc_feature: Table A; Target 25780; HLA-A*68:01; GAGE12J; ENSG00000224659; CTA
EVKTPEEGK

SEQ ID NO: 25781 - protein, 10 aa, Homo sapiens
  misc_feature: Table A; Target 25781; HLA-A*68:01; GAGE12J; ENSG00000224659; CTA
EVKTPEEGKK

SEQ ID NO: 25782 - protein, 9 aa, Homo sapiens
  misc_feature: Table A; Target 25782; HLA-A*24:02; GAGE12J; ENSG00000224659; CTA
PYVQPPEMI

SEQ ID NO: 25783 - protein, 8 aa, Homo sapiens
  misc_feature: Table A; Target 25783; HLA-B*57:01; GAGE12J; ENSG00000224659; CTA
RGRSTYYW

SEQ ID NO: 25784 - protein, 9 aa, Homo sapiens
  misc_feature: Table A; Target 25784; HLA-B*07:02; GAGE12J; ENSG00000224659; CTA
RPYVQPPEM

SEQ ID NO: 25785 - protein, 9 aa, Homo sapiens
  misc_feature: Table A; Target 25785; HLA-B*35:01; GAGE12J; ENSG00000224659; CTA
RPYVQPPEM

SEQ ID NO: 25786 - protein, 9 aa, Homo sapiens
  misc_feature: Table A; Target 25786; HLA-B*35:03; GAGE12J; ENSG00000224659; CTA
RPYVQPPEM

SEQ ID NO: 25787 - protein, 9 aa, Homo sapiens
  misc_feature: Table A; Target 25787; HLA-B*51:01; GAGE12J; ENSG00000224659; CTA
RPYVQPPEM

SEQ ID NO: 25788 - protein, 9 aa, Homo sapiens
  misc_feature: Table A; Target 25788; HLA-B*54:01; GAGE12J; ENSG00000224659; CTA
RPYVQPPEM

SEQ ID NO: 25789 - protein, 9 aa, Homo sapiens
  misc_feature: Table A; Target 25789; HLA-B*55:01; GAGE12J; ENSG00000224659; CTA
RPYVQPPEM

SEQ ID NO: 25790 - protein, 9 aa, Homo sapiens
  misc_feature: Table A; Target 25790; HLA-B*56:01; GAGE12J; ENSG00000224659; CTA
RPYVQPPEM

SEQ ID NO: 25791 - protein, 9 aa, Homo sapiens
  misc_feature: Table A; Target 25791; HLA-C*07:02; GAGE12J; ENSG00000224659; CTA
RPYVQPPEM

SEQ ID NO: 25792 - protein, 9 aa, Homo sapiens
  misc_feature: Table A; Target 25792; HLA-C*14:02; GAGE12J; ENSG00000224659; CTA
RPYVQPPEM

SEQ ID NO: 25793 - protein, 9 aa, Homo sapiens
  misc_feature: Table A; Target 25793; HLA-A*29:02; GAGE12J; ENSG00000224659; CTA
YYWPRPRPY

SEQ ID NO: 25794 - protein, 10 aa, Homo sapiens
  misc_feature: Table A; Target 25794; HLA-C*05:01; GAGE12J,GAGE2A; ENSG00000224659,ENSG00000189064; CTA,CTA
CEDGPDGQEM

SEQ ID NO: 25795 - protein, 8 aa, Homo sapiens
  misc_feature: Table A; Target 25795; HLA-B*51:01; GAGE12J,GAGE2A; ENSG00000224659,ENSG00000189064; CTA,CTA
DGPDGQEM

SEQ ID NO: 25796 - protein, 9 aa, Homo sapiens
  misc_feature: Table A; Target 25796; HLA-A*68:01; GAGE12J,GAGE2A; ENSG00000224659,ENSG00000189064; CTA,CTA
EEGEPATQR

SEQ ID NO: 25797 - protein, 10 aa, Homo sapiens
  misc_feature: Table A; Target 25797; HLA-A*30:01; GAGE2A; ENSG00000189064; CTA
CEDGPDGQEM

SEQ ID NO: 25798 - protein, 10 aa, Homo sapiens
  misc_feature: Table A; Target 25798; HLA-C*07:06; GAGE2A; ENSG00000189064; CTA
EGASAGQGPK

SEQ ID NO: 25799 - protein, 9 aa, Homo sapiens
  misc_feature: Table A; Target 25799; HLA-A*26:01; GAGE2A; ENSG00000189064; CTA
EPPEMIGPM

SEQ ID NO: 25800 - protein, 10 aa, Homo sapiens
  misc_feature: Table A; Target 25800; HLA-A*68:01; GAGE2A; ENSG00000189064; CTA
EPPEMIGPMR

SEQ ID NO: 25801 - protein, 10 aa, Homo sapiens
  misc_feature: Table A; Target 25801; HLA-A*33:03; GAGE2A; ENSG00000189064; CTA
EVKTPEEGEK

SEQ ID NO: 25802 - protein, 10 aa, Homo sapiens
  misc_feature: Table A; Target 25802; HLA-A*68:01; GAGE2A; ENSG00000189064; CTA
EVKTPEEGEK

SEQ ID NO: 25803 - protein, 10 aa, Homo sapiens
  misc_feature: Table A; Target 25803; HLA-C*07:06; GAGE2A; ENSG00000189064; CTA
EVKTPEEGEK

SEQ ID NO: 25804 - protein, 9 aa, Homo sapiens
  misc_feature: Table A; Target 25804; HLA-B*15:01; GAGE2A; ENSG00000189064; CTA
GQGPKPEAH

SEQ ID NO: 25805 - protein, 9 aa, Homo sapiens
  misc_feature: Table A; Target 25805; HLA-A*02:07; GAGE2A; ENSG00000189064; CTA
MDPPNPEEV

SEQ ID NO: 25806 - protein, 9 aa, Homo sapiens
  misc_feature: Table A; Target 25806; HLA-C*16:04; GAGE2A; ENSG00000189064; CTA
RRYVEPPEM

SEQ ID NO: 25807 - protein, 8 aa, Homo sapiens
  misc_feature: Table A; Target 25807; HLA-C*14:02; GAGE2A; ENSG00000189064; CTA
RYVEPPEM

SEQ ID NO: 25808 - protein, 9 aa, Homo sapiens
  misc_feature: Table A; Target 25808; HLA-A*23:01; GAGE2A; ENSG00000189064; CTA
RYVEPPEMI

SEQ ID NO: 25809 - protein, 9 aa, Homo sapiens
  misc_feature: Table A; Target 25809; HLA-A*24:02; GAGE2A; ENSG00000189064; CTA
RYVEPPEMI

SEQ ID NO: 25810 - protein, 10 aa, Homo sapiens
  misc_feature: Table A; Target 25810; HLA-B*54:01; GAGE2A; ENSG00000189064; CTA
SAGQGPKPEA

SEQ ID NO: 25811 - protein, 9 aa, Homo sapiens
  misc_feature: Table A; Target 25811; HLA-B*55:01; GAGE2A; ENSG00000189064; CTA
TPEEGEPAT

SEQ ID NO: 25812 - protein, 9 aa, Homo sapiens
  misc_feature: Table A; Target 25812; HLA-C*03:03; GAGE2A; ENSG00000189064; CTA
TPEEGEPAT

SEQ ID NO: 25813 - protein, 10 aa, Homo sapiens
  misc_feature: Table A; Target 25813; HLA-B*40:01; GAGE2A; ENSG00000189064; CTA
VEPPEMIGPM

SEQ ID NO: 25814 - protein, 10 aa, Homo sapiens
  misc_feature: Table A; Target 25814; HLA-B*40:02; GAGE2A; ENSG00000189064; CTA
VEPPEMIGPM

SEQ ID NO: 25815 - protein, 10 aa, Homo sapiens
  misc_feature: Table A; Target 25815; HLA-C*04:01; GAGE2A; ENSG00000189064; CTA
VEPPEMIGPM

SEQ ID NO: 25816 - protein, 8 aa, Homo sapiens
  misc_feature: Table A; Target 25816; HLA-C*05:01; GAGE2A; ENSG00000189064; CTA
YVEPPEMI

SEQ ID NO: 25817 - protein, 8 aa, Homo sapiens
  misc_feature: Table A; Target 25817; HLA-A*31:01; GAGE2A,XAGE3; ENSG00000189064,ENSG00000171402; CTA,CTA
STYRPRPR

SEQ ID NO: 25818 - protein, 8 aa, Homo sapiens
  misc_feature: Table A; Target 25818; HLA-B*44:02; GLYATL3; ENSG00000203972; CTA
ADLLNRTW

SEQ ID NO: 25819 - protein, 8 aa, Homo sapiens
  misc_feature: Table A; Target 25819; HLA-B*44:03; GLYATL3; ENSG00000203972; CTA
ADLLNRTW

SEQ ID NO: 25820 - protein, 8 aa, Homo sapiens
  misc_feature: Table A; Target 25820; HLA-B*18:01; GLYATL3; ENSG00000203972; CTA
AEFLPCRF

SEQ ID NO: 25821 - protein, 8 aa, Homo sapiens
  misc_feature: Table A; Target 25821; HLA-B*37:01; GLYATL3; ENSG00000203972; CTA
AEFLPCRF

SEQ ID NO: 25822 - protein, 8 aa, Homo sapiens
  misc_feature: Table A; Target 25822; HLA-B*44:02; GLYATL3; ENSG00000203972; CTA
AEFLPCRF

SEQ ID NO: 25823 - protein, 8 aa, Homo sapiens
  misc_feature: Table A; Target 25823; HLA-B*44:03; GLYATL3; ENSG00000203972; CTA
AEFLPCRF

SEQ ID NO: 25824 - protein, 9 aa, Homo sapiens
  misc_feature: Table A; Target 25824; HLA-A*30:02; GLYATL3; ENSG00000203972; CTA
AETDNLDHY

SEQ ID NO: 25825 - protein, 9 aa, Homo sapiens
  misc_feature: Table A; Target 25825; HLA-B*18:01; GLYATL3; ENSG00000203972; CTA
AETDNLDHY

SEQ ID NO: 25826 - protein, 9 aa, Homo sapiens
  misc_feature: Table A; Target 25826; HLA-B*27:02; GLYATL3; ENSG00000203972; CTA
AETDNLDHY

SEQ ID NO: 25827 - protein, 9 aa, Homo sapiens
  misc_feature: Table A; Target 25827; HLA-B*40:01; GLYATL3; ENSG00000203972; CTA
AETDNLDHY

SEQ ID NO: 25828 - protein, 9 aa, Homo sapiens
  misc_feature: Table A; Target 25828; HLA-B*44:02; GLYATL3; ENSG00000203972; CTA
AETDNLDHY

SEQ ID NO: 25829 - protein, 9 aa, Homo sapiens
  misc_feature: Table A; Target 25829; HLA-B*44:03; GLYATL3; ENSG00000203972; CTA
AETDNLDHY

SEQ ID NO: 25830 - protein, 9 aa, Homo sapiens
  misc_feature: Table A; Target 25830; HLA-B*49:01; GLYATL3; ENSG00000203972; CTA
AETDNLDHY

SEQ ID NO: 25831 - protein, 9 aa, Homo sapiens
  misc_feature: Table A; Target 25831; HLA-C*16:02; GLYATL3; ENSG00000203972; CTA
AETDNLDHY

SEQ ID NO: 25832 - protein, 9 aa, Homo sapiens
  misc_feature: Table A; Target 25832; HLA-C*16:04; GLYATL3; ENSG00000203972; CTA
AETDNLDHY

SEQ ID NO: 25833 - protein, 8 aa, Homo sapiens
  misc_feature: Table A; Target 25833; HLA-C*16:01; GLYATL3; ENSG00000203972; CTA
ALTLARKL

SEQ ID NO: 25834 - protein, 10 aa, Homo sapiens
  misc_feature: Table A; Target 25834; HLA-A*25:01; GLYATL3; ENSG00000203972; CTA
ANADLLNRTW

SEQ ID NO: 25835 - protein, 10 aa, Homo sapiens
  misc_feature: Table A; Target 25835; HLA-A*32:01; GLYATL3; ENSG00000203972; CTA
ANADLLNRTW

SEQ ID NO: 25836 - protein, 10 aa, Homo sapiens
  misc_feature: Table A; Target 25836; HLA-B*44:02; GLYATL3; ENSG00000203972; CTA
ANADLLNRTW

SEQ ID NO: 25837 - protein, 10 aa, Homo sapiens
  misc_feature: Table A; Target 25837; HLA-B*44:03; GLYATL3; ENSG00000203972; CTA
ANADLLNRTW

SEQ ID NO: 25838 - protein, 10 aa, Homo sapiens
  misc_feature: Table A; Target 25838; HLA-B*57:01; GLYATL3; ENSG00000203972; CTA
ANADLLNRTW

SEQ ID NO: 25839 - protein, 10 aa, Homo sapiens
  misc_feature: Table A; Target 25839; HLA-B*58:01; GLYATL3; ENSG00000203972; CTA
ANADLLNRTW

SEQ ID NO: 25840 - protein, 10 aa, Homo sapiens
  misc_feature: Table A; Target 25840; HLA-C*12:03; GLYATL3; ENSG00000203972; CTA
ANADLLNRTW

SEQ ID NO: 25841 - protein, 10 aa, Homo sapiens
  misc_feature: Table A; Target 25841; HLA-C*16:04; GLYATL3; ENSG00000203972; CTA
ANADLLNRTW

SEQ ID NO: 25842 - protein, 9 aa, Homo sapiens
  misc_feature: Table A; Target 25842; HLA-B*46:01; GLYATL3; ENSG00000203972; CTA
ASISLLKSL

SEQ ID NO: 25843 - protein, 9 aa, Homo sapiens
  misc_feature: Table A; Target 25843; HLA-B*58:01; GLYATL3; ENSG00000203972; CTA
ASISLLKSL

SEQ ID NO: 25844 - protein, 9 aa, Homo sapiens
  misc_feature: Table A; Target 25844; HLA-C*03:04; GLYATL3; ENSG00000203972; CTA
ASISLLKSL

SEQ ID NO: 25845 - protein, 9 aa, Homo sapiens
  misc_feature: Table A; Target 25845; HLA-C*16:02; GLYATL3; ENSG00000203972; CTA
ASISLLKSL

SEQ ID NO: 25846 - protein, 9 aa, Homo sapiens
  misc_feature: Table A; Target 25846; HLA-A*02:01; GLYATL3; ENSG00000203972; CTA
ATFSGLPHL

SEQ ID NO: 25847 - protein, 9 aa, Homo sapiens
  misc_feature: Table A; Target 25847; HLA-A*02:03; GLYATL3; ENSG00000203972; CTA
ATFSGLPHL

SEQ ID NO: 25848 - protein, 9 aa, Homo sapiens
  misc_feature: Table A; Target 25848; HLA-A*02:04; GLYATL3; ENSG00000203972; CTA
ATFSGLPHL

SEQ ID NO: 25849 - protein, 9 aa, Homo sapiens
  misc_feature: Table A; Target 25849; HLA-A*02:07; GLYATL3; ENSG00000203972; CTA
ATFSGLPHL

SEQ ID NO: 25850 - protein, 9 aa, Homo sapiens
  misc_feature: Table A; Target 25850; HLA-A*03:01; GLYATL3; ENSG00000203972; CTA
ATFSGLPHL

SEQ ID NO: 25851 - protein, 9 aa, Homo sapiens
  misc_feature: Table A; Target 25851; HLA-A*03:02; GLYATL3; ENSG00000203972; CTA
ATFSGLPHL

SEQ ID NO: 25852 - protein, 9 aa, Homo sapiens
  misc_feature: Table A; Target 25852; HLA-A*11:01; GLYATL3; ENSG00000203972; CTA
ATFSGLPHL

SEQ ID NO: 25853 - protein, 9 aa, Homo sapiens
  misc_feature: Table A; Target 25853; HLA-A*23:01; GLYATL3; ENSG00000203972; CTA
ATFSGLPHL

SEQ ID NO: 25854 - protein, 9 aa, Homo sapiens
  misc_feature: Table A; Target 25854; HLA-A*24:02; GLYATL3; ENSG00000203972; CTA
ATFSGLPHL

SEQ ID NO: 25855 - protein, 9 aa, Homo sapiens
  misc_feature: Table A; Target 25855; HLA-A*25:01; GLYATL3; ENSG00000203972; CTA
ATFSGLPHL

SEQ ID NO: 25856 - protein, 9 aa, Homo sapiens
  misc_feature: Table A; Target 25856; HLA-A*26:01; GLYATL3; ENSG00000203972; CTA
ATFSGLPHL

SEQ ID NO: 25857 - protein, 9 aa, Homo sapiens
  misc_feature: Table A; Target 25857; HLA-A*31:01; GLYATL3; ENSG00000203972; CTA
ATFSGLPHL

SEQ ID NO: 25858 - protein, 9 aa, Homo sapiens
  misc_feature: Table A; Target 25858; HLA-A*32:01; GLYATL3; ENSG00000203972; CTA
ATFSGLPHL

SEQ ID NO: 25859 - protein, 9 aa, Homo sapiens
  misc_feature: Table A; Target 25859; HLA-A*68:02; GLYATL3; ENSG00000203972; CTA
ATFSGLPHL

SEQ ID NO: 25860 - protein, 9 aa, Homo sapiens
  misc_feature: Table A; Target 25860; HLA-B*13:02; GLYATL3; ENSG00000203972; CTA
ATFSGLPHL

SEQ ID NO: 25861 - protein, 9 aa, Homo sapiens
  misc_feature: Table A; Target 25861; HLA-B*40:02; GLYATL3; ENSG00000203972; CTA
ATFSGLPHL

SEQ ID NO: 25862 - protein, 9 aa, Homo sapiens
  misc_feature: Table A; Target 25862; HLA-B*46:01; GLYATL3; ENSG00000203972; CTA
ATFSGLPHL

SEQ ID NO: 25863 - protein, 9 aa, Homo sapiens
  misc_feature: Table A; Target 25863; HLA-B*57:01; GLYATL3; ENSG00000203972; CTA
ATFSGLPHL

SEQ ID NO: 25864 - protein, 9 aa, Homo sapiens
  misc_feature: Table A; Target 25864; HLA-B*58:01; GLYATL3; ENSG00000203972; CTA
ATFSGLPHL

SEQ ID NO: 25865 - protein, 9 aa, Homo sapiens
  misc_feature: Table A; Target 25865; HLA-C*01:02; GLYATL3; ENSG00000203972; CTA
ATFSGLPHL

SEQ ID NO: 25866 - protein, 9 aa, Homo sapiens
  misc_feature: Table A; Target 25866; HLA-C*02:02; GLYATL3; ENSG00000203972; CTA
ATFSGLPHL

SEQ ID NO: 25867 - protein, 9 aa, Homo sapiens
  misc_feature: Table A; Target 25867; HLA-C*03:03; GLYATL3; ENSG00000203972; CTA
ATFSGLPHL

SEQ ID NO: 25868 - protein, 9 aa, Homo sapiens
  misc_feature: Table A; Target 25868; HLA-C*03:04; GLYATL3; ENSG00000203972; CTA
ATFSGLPHL

SEQ ID NO: 25869 - protein, 9 aa, Homo sapiens
  misc_feature: Table A; Target 25869; HLA-C*07:04; GLYATL3; ENSG00000203972; CTA
ATFSGLPHL

SEQ ID NO: 25870 - protein, 9 aa, Homo sapiens
  misc_feature: Table A; Target 25870; HLA-C*12:03; GLYATL3; ENSG00000203972; CTA
ATFSGLPHL

SEQ ID NO: 25871 - protein, 9 aa, Homo sapiens
  misc_feature: Table A; Target 25871; HLA-C*16:02; GLYATL3; ENSG00000203972; CTA
ATFSGLPHL

SEQ ID NO: 25872 - protein, 9 aa, Homo sapiens
  misc_feature: Table A; Target 25872; HLA-C*16:04; GLYATL3; ENSG00000203972; CTA
ATFSGLPHL

SEQ ID NO: 25873 - protein, 11 aa, Homo sapiens
  misc_feature: Table A; Target 25873; HLA-A*03:01; GLYATL3; ENSG00000203972; CTA
AVANSKQLNIK

SEQ ID NO: 25874 - protein, 11 aa, Homo sapiens
  misc_feature: Table A; Target 25874; HLA-A*03:02; GLYATL3; ENSG00000203972; CTA
AVANSKQLNIK

SEQ ID NO: 25875 - protein, 11 aa, Homo sapiens
  misc_feature: Table A; Target 25875; HLA-A*11:01; GLYATL3; ENSG00000203972; CTA
AVANSKQLNIK

SEQ ID NO: 25876 - protein, 10 aa, Homo sapiens
  misc_feature: Table A; Target 25876; HLA-A*03:01; GLYATL3; ENSG00000203972; CTA
AVFYKDVRAY

SEQ ID NO: 25877 - protein, 10 aa, Homo sapiens
  misc_feature: Table A; Target 25877; HLA-A*25:01; GLYATL3; ENSG00000203972; CTA
AVFYKDVRAY

SEQ ID NO: 25878 - protein, 10 aa, Homo sapiens
  misc_feature: Table A; Target 25878; HLA-A*30:02; GLYATL3; ENSG00000203972; CTA
AVFYKDVRAY

SEQ ID NO: 25879 - protein, 11 aa, Homo sapiens
  misc_feature: Table A; Target 25879; HLA-A*31:01; GLYATL3; ENSG00000203972; CTA
AVFYKDVRAYR

SEQ ID NO: 25880 - protein, 9 aa, Homo sapiens
  misc_feature: Table A; Target 25880; HLA-A*29:02; GLYATL3; ENSG00000203972; CTA
CFPESLKVY

SEQ ID NO: 25881 - protein, 9 aa, Homo sapiens
  misc_feature: Table A; Target 25881; HLA-B*18:01; GLYATL3; ENSG00000203972; CTA
DDNTASISL

SEQ ID NO: 25882 - protein, 11 aa, Homo sapiens
  misc_feature: Table A; Target 25882; HLA-B*27:02; GLYATL3; ENSG00000203972; CTA
DDNTASISLLK

SEQ ID NO: 25883 - protein, 9 aa, Homo sapiens
  misc_feature: Table A; Target 25883; HLA-A*25:01; GLYATL3; ENSG00000203972; CTA
DEKGNPVSW

SEQ ID NO: 25884 - protein, 9 aa, Homo sapiens
  misc_feature: Table A; Target 25884; HLA-B*18:01; GLYATL3; ENSG00000203972; CTA
DEKGNPVSW

SEQ ID NO: 25885 - protein, 9 aa, Homo sapiens
  misc_feature: Table A; Target 25885; HLA-B*27:02; GLYATL3; ENSG00000203972; CTA
DEKGNPVSW

SEQ ID NO: 25886 - protein, 9 aa, Homo sapiens
  misc_feature: Table A; Target 25886; HLA-B*40:02; GLYATL3; ENSG00000203972; CTA
DEKGNPVSW

SEQ ID NO: 25887 - protein, 9 aa, Homo sapiens
  misc_feature: Table A; Target 25887; HLA-B*44:02; GLYATL3; ENSG00000203972; CTA
DEKGNPVSW

SEQ ID NO: 25888 - protein, 9 aa, Homo sapiens
  misc_feature: Table A; Target 25888; HLA-B*44:03; GLYATL3; ENSG00000203972; CTA
DEKGNPVSW

SEQ ID NO: 25889 - protein, 9 aa, Homo sapiens
  misc_feature: Table A; Target 25889; HLA-C*16:04; GLYATL3; ENSG00000203972; CTA
DEKGNPVSW

SEQ ID NO: 25890 - protein, 8 aa, Homo sapiens
  misc_feature: Table A; Target 25890; HLA-A*33:01; GLYATL3; ENSG00000203972; CTA
DFKAVITR

SEQ ID NO: 25891 - protein, 8 aa, Homo sapiens
  misc_feature: Table A; Target 25891; HLA-A*33:03; GLYATL3; ENSG00000203972; CTA
DFKAVITR

SEQ ID NO: 25892 - protein, 9 aa, Homo sapiens
  misc_feature: Table A; Target 25892; HLA-A*33:01; GLYATL3; ENSG00000203972; CTA
DFKAVITRR

SEQ ID NO: 25893 - protein, 9 aa, Homo sapiens
  misc_feature: Table A; Target 25893; HLA-A*33:03; GLYATL3; ENSG00000203972; CTA
DFKAVITRR

SEQ ID NO: 25894 - protein, 9 aa, Homo sapiens
  misc_feature: Table A; Target 25894; HLA-B*38:01; GLYATL3; ENSG00000203972; CTA
DHYTNAYAV

SEQ ID NO: 25895 - protein, 9 aa, Homo sapiens
  misc_feature: Table A; Target 25895; HLA-B*39:01; GLYATL3; ENSG00000203972; CTA
DHYTNAYAV

SEQ ID NO: 25896 - protein, 10 aa, Homo sapiens
  misc_feature: Table A; Target 25896; HLA-B*38:01; GLYATL3; ENSG00000203972; CTA
DHYTNAYAVF

SEQ ID NO: 25897 - protein, 9 aa, Homo sapiens
  misc_feature: Table A; Target 25897; HLA-A*33:01; GLYATL3; ENSG00000203972; CTA
DLLNRTWSR

SEQ ID NO: 25898 - protein, 9 aa, Homo sapiens
  misc_feature: Table A; Target 25898; HLA-A*33:03; GLYATL3; ENSG00000203972; CTA
DLLNRTWSR

SEQ ID NO: 25899 - protein, 9 aa, Homo sapiens
  misc_feature: Table A; Target 25899; HLA-A*33:01; GLYATL3; ENSG00000203972; CTA
DNLDHYTNA

SEQ ID NO: 25900 - protein, 10 aa, Homo sapiens
  misc_feature: Table A; Target 25900; HLA-A*25:01; GLYATL3; ENSG00000203972; CTA
DNLDHYTNAY

SEQ ID NO: 25901 - protein, 10 aa, Homo sapiens
  misc_feature: Table A; Target 25901; HLA-B*18:01; GLYATL3; ENSG00000203972; CTA
DNLDHYTNAY

SEQ ID NO: 25902 - protein, 10 aa, Homo sapiens
  misc_feature: Table A; Target 25902; HLA-B*27:02; GLYATL3; ENSG00000203972; CTA
DNTASISLLK

SEQ ID NO: 25903 - protein, 10 aa, Homo sapiens
  misc_feature: Table A; Target 25903; HLA-A*26:01; GLYATL3; ENSG00000203972; CTA
DQFATMCHGY

SEQ ID NO: 25904 - protein, 9 aa, Homo sapiens
  misc_feature: Table A; Target 25904; HLA-A*25:01; GLYATL3; ENSG00000203972; CTA
DQVFQIQGL

SEQ ID NO: 25905 - protein, 9 aa, Homo sapiens
  misc_feature: Table A; Target 25905; HLA-B*38:01; GLYATL3; ENSG00000203972; CTA
DQVFQIQGL

SEQ ID NO: 25906 - protein, 9 aa, Homo sapiens
  misc_feature: Table A; Target 25906; HLA-B*39:01; GLYATL3; ENSG00000203972; CTA
DQVFQIQGL

SEQ ID NO: 25907 - protein, 9 aa, Homo sapiens
  misc_feature: Table A; Target 25907; HLA-A*25:01; GLYATL3; ENSG00000203972; CTA
DVFNWDQVF

SEQ ID NO: 25908 - protein, 9 aa, Homo sapiens
  misc_feature: Table A; Target 25908; HLA-A*26:01; GLYATL3; ENSG00000203972; CTA
DVFNWDQVF

SEQ ID NO: 25909 - protein, 11 aa, Homo sapiens
  misc_feature: Table A; Target 25909; HLA-A*68:02; GLYATL3; ENSG00000203972; CTA
DVFNWDQVFQI

SEQ ID NO: 25910 - protein, 10 aa, Homo sapiens
  misc_feature: Table A; Target 25910; HLA-A*68:01; GLYATL3; ENSG00000203972; CTA
DVSKAVANSK

SEQ ID NO: 25911 - protein, 10 aa, Homo sapiens
  misc_feature: Table A; Target 25911; HLA-A*01:01; GLYATL3; ENSG00000203972; CTA
EAETDNLDHY

SEQ ID NO: 25912 - protein, 10 aa, Homo sapiens
  misc_feature: Table A; Target 25912; HLA-C*07:01; GLYATL3; ENSG00000203972; CTA
EAETDNLDHY

SEQ ID NO: 25913 - protein, 9 aa, Homo sapiens
  misc_feature: Table A; Target 25913; HLA-A*02:01; GLYATL3; ENSG00000203972; CTA
ELYDVSKAV

SEQ ID NO: 25914 - protein, 9 aa, Homo sapiens
  misc_feature: Table A; Target 25914; HLA-A*02:03; GLYATL3; ENSG00000203972; CTA
ELYDVSKAV

SEQ ID NO: 25915 - protein, 9 aa, Homo sapiens
  misc_feature: Table A; Target 25915; HLA-A*02:07; GLYATL3; ENSG00000203972; CTA
ELYDVSKAV

SEQ ID NO: 25916 - protein, 9 aa, Homo sapiens
  misc_feature: Table A; Target 25916; HLA-A*25:01; GLYATL3; ENSG00000203972; CTA
ELYDVSKAV

SEQ ID NO: 25917 - protein, 9 aa, Homo sapiens
  misc_feature: Table A; Target 25917; HLA-A*26:01; GLYATL3; ENSG00000203972; CTA
ELYDVSKAV

SEQ ID NO: 25918 - protein, 9 aa, Homo sapiens
  misc_feature: Table A; Target 25918; HLA-A*68:02; GLYATL3; ENSG00000203972; CTA
ELYDVSKAV

SEQ ID NO: 25919 - protein, 9 aa, Homo sapiens
  misc_feature: Table A; Target 25919; HLA-B*08:01; GLYATL3; ENSG00000203972; CTA
ELYDVSKAV

SEQ ID NO: 25920 - protein, 9 aa, Homo sapiens
  misc_feature: Table A; Target 25920; HLA-B*13:02; GLYATL3; ENSG00000203972; CTA
ELYDVSKAV

SEQ ID NO: 25921 - protein, 9 aa, Homo sapiens
  misc_feature: Table A; Target 25921; HLA-B*51:01; GLYATL3; ENSG00000203972; CTA
ELYDVSKAV

SEQ ID NO: 25922 - protein, 9 aa, Homo sapiens
  misc_feature: Table A; Target 25922; HLA-B*55:01; GLYATL3; ENSG00000203972; CTA
ELYDVSKAV

SEQ ID NO: 25923 - protein, 9 aa, Homo sapiens
  misc_feature: Table A; Target 25923; HLA-C*06:02; GLYATL3; ENSG00000203972; CTA
ELYDVSKAV

SEQ ID NO: 25924 - protein, 9 aa, Homo sapiens
  misc_feature: Table A; Target 25924; HLA-C*16:04; GLYATL3; ENSG00000203972; CTA
ELYDVSKAV

SEQ ID NO: 25925 - protein, 10 aa, Homo sapiens
  misc_feature: Table A; Target 25925; HLA-A*26:01; GLYATL3; ENSG00000203972; CTA
ELYDVSKAVA

SEQ ID NO: 25926 - protein, 11 aa, Homo sapiens
  misc_feature: Table A; Target 25926; HLA-A*33:01; GLYATL3; ENSG00000203972; CTA
ELYDVSKAVAN

SEQ ID NO: 25927 - protein, 11 aa, Homo sapiens
  misc_feature: Table A; Target 25927; HLA-C*06:02; GLYATL3; ENSG00000203972; CTA
ELYDVSKAVAN

SEQ ID NO: 25928 - protein, 8 aa, Homo sapiens
  misc_feature: Table A; Target 25928; HLA-A*01:01; GLYATL3; ENSG00000203972; CTA
ETDNLDHY

SEQ ID NO: 25929 - protein, 9 aa, Homo sapiens
  misc_feature: Table A; Target 25929; HLA-A*02:03; GLYATL3; ENSG00000203972; CTA
FLKGPSPRL

SEQ ID NO: 25930 - protein, 10 aa, Homo sapiens
  misc_feature: Table A; Target 25930; HLA-A*02:03; GLYATL3; ENSG00000203972; CTA
FLKGPSPRLT

SEQ ID NO: 25931 - protein, 11 aa, Homo sapiens
  misc_feature: Table A; Target 25931; HLA-A*29:02; GLYATL3; ENSG00000203972; CTA
FLKGPSPRLTY

SEQ ID NO: 25932 - protein, 8 aa, Homo sapiens
  misc_feature: Table A; Target 25932; HLA-B*35:01; GLYATL3; ENSG00000203972; CTA
FPESLKVY

SEQ ID NO: 25933 - protein, 8 aa, Homo sapiens
  misc_feature: Table A; Target 25933; HLA-B*55:01; GLYATL3; ENSG00000203972; CTA
FPESLKVY

SEQ ID NO: 25934 - protein, 10 aa, Homo sapiens
  misc_feature: Table A; Target 25934; HLA-B*54:01; GLYATL3; ENSG00000203972; CTA
FPESLKVYGA

SEQ ID NO: 25935 - protein, 8 aa, Homo sapiens
  misc_feature: Table A; Target 25935; HLA-B*07:02; GLYATL3; ENSG00000203972; CTA
FPSQGNVL

SEQ ID NO: 25936 - protein, 8 aa, Homo sapiens
  misc_feature: Table A; Target 25936; HLA-B*08:01; GLYATL3; ENSG00000203972; CTA
FPSQGNVL

SEQ ID NO: 25937 - protein, 8 aa, Homo sapiens
  misc_feature: Table A; Target 25937; HLA-B*35:01; GLYATL3; ENSG00000203972; CTA
FPSQGNVL

SEQ ID NO: 25938 - protein, 8 aa, Homo sapiens
  misc_feature: Table A; Target 25938; HLA-B*35:03; GLYATL3; ENSG00000203972; CTA
FPSQGNVL

SEQ ID NO: 25939 - protein, 8 aa, Homo sapiens
  misc_feature: Table A; Target 25939; HLA-B*39:01; GLYATL3; ENSG00000203972; CTA
FPSQGNVL

SEQ ID NO: 25940 - protein, 8 aa, Homo sapiens
  misc_feature: Table A; Target 25940; HLA-B*55:01; GLYATL3; ENSG00000203972; CTA
FPSQGNVL

SEQ ID NO: 25941 - protein, 8 aa, Homo sapiens
  misc_feature: Table A; Target 25941; HLA-B*56:01; GLYATL3; ENSG00000203972; CTA
FPSQGNVL

SEQ ID NO: 25942 - protein, 8 aa, Homo sapiens
  misc_feature: Table A; Target 25942; HLA-C*03:03; GLYATL3; ENSG00000203972; CTA
FPSQGNVL

SEQ ID NO: 25943 - protein, 8 aa, Homo sapiens
  misc_feature: Table A; Target 25943; HLA-C*03:04; GLYATL3; ENSG00000203972; CTA
FPSQGNVL

SEQ ID NO: 25944 - protein, 8 aa, Homo sapiens
  misc_feature: Table A; Target 25944; HLA-C*05:01; GLYATL3; ENSG00000203972; CTA
FPSQGNVL

SEQ ID NO: 25945 - protein, 8 aa, Homo sapiens
  misc_feature: Table A; Target 25945; HLA-C*07:02; GLYATL3; ENSG00000203972; CTA
FPSQGNVL

SEQ ID NO: 25946 - protein, 8 aa, Homo sapiens
  misc_feature: Table A; Target 25946; HLA-C*14:02; GLYATL3; ENSG00000203972; CTA
FPSQGNVL

SEQ ID NO: 25947 - protein, 8 aa, Homo sapiens
  misc_feature: Table A; Target 25947; HLA-C*16:01; GLYATL3; ENSG00000203972; CTA
FPSQGNVL

SEQ ID NO: 25948 - protein, 10 aa, Homo sapiens
  misc_feature: Table A; Target 25948; HLA-B*15:01; GLYATL3; ENSG00000203972; CTA
FQIQGLQSEL

SEQ ID NO: 25949 - protein, 10 aa, Homo sapiens
  misc_feature: Table A; Target 25949; HLA-B*27:05; GLYATL3; ENSG00000203972; CTA
FQIQGLQSEL

SEQ ID NO: 25950 - protein, 10 aa, Homo sapiens
  misc_feature: Table A; Target 25950; HLA-B*39:01; GLYATL3; ENSG00000203972; CTA
FQIQGLQSEL

SEQ ID NO: 25951 - protein, 10 aa, Homo sapiens
  misc_feature: Table A; Target 25951; HLA-B*46:01; GLYATL3; ENSG00000203972; CTA
FQIQGLQSEL

SEQ ID NO: 25952 - protein, 10 aa, Homo sapiens
  misc_feature: Table A; Target 25952; HLA-C*02:02; GLYATL3; ENSG00000203972; CTA
FQIQGLQSEL

SEQ ID NO: 25953 - protein, 10 aa, Homo sapiens
  misc_feature: Table A; Target 25953; HLA-C*14:02; GLYATL3; ENSG00000203972; CTA
FQIQGLQSEL

SEQ ID NO: 25954 - protein, 11 aa, Homo sapiens
  misc_feature: Table A; Target 25954; HLA-A*30:02; GLYATL3; ENSG00000203972; CTA
FQIQGLQSELY

SEQ ID NO: 25955 - protein, 11 aa, Homo sapiens
  misc_feature: Table A; Target 25955; HLA-B*15:01; GLYATL3; ENSG00000203972; CTA
FQIQGLQSELY

SEQ ID NO: 25956 - protein, 11 aa, Homo sapiens
  misc_feature: Table A; Target 25956; HLA-B*15:03; GLYATL3; ENSG00000203972; CTA
FQIQGLQSELY

SEQ ID NO: 25957 - protein, 9 aa, Homo sapiens
  misc_feature: Table A; Target 25957; HLA-A*31:01; GLYATL3; ENSG00000203972; CTA
FYKDVRAYR

SEQ ID NO: 25958 - protein, 9 aa, Homo sapiens
  misc_feature: Table A; Target 25958; HLA-C*01:02; GLYATL3; ENSG00000203972; CTA
GFPSQGNVL

SEQ ID NO: 25959 - protein, 9 aa, Homo sapiens
  misc_feature: Table A; Target 25959; HLA-C*14:02; GLYATL3; ENSG00000203972; CTA
GFPSQGNVL

SEQ ID NO: 25960 - protein, 9 aa, Homo sapiens
  misc_feature: Table A; Target 25960; HLA-A*30:02; GLYATL3; ENSG00000203972; CTA
GGNEQCLRY

SEQ ID NO: 25961 - protein, 9 aa, Homo sapiens
  misc_feature: Table A; Target 25961; HLA-A*02:01; GLYATL3; ENSG00000203972; CTA
GLQSELYDV

SEQ ID NO: 25962 - protein, 9 aa, Homo sapiens
  misc_feature: Table A; Target 25962; HLA-A*02:04; GLYATL3; ENSG00000203972; CTA
GLQSELYDV

SEQ ID NO: 25963 - protein, 9 aa, Homo sapiens
  misc_feature: Table A; Target 25963; HLA-B*13:02; GLYATL3; ENSG00000203972; CTA
GLQSELYDV

SEQ ID NO: 25964 - protein, 9 aa, Homo sapiens
  misc_feature: Table A; Target 25964; HLA-B*55:01; GLYATL3; ENSG00000203972; CTA
GLQSELYDV

SEQ ID NO: 25965 - protein, 11 aa, Homo sapiens
  misc_feature: Table A; Target 25965; HLA-A*03:02; GLYATL3; ENSG00000203972; CTA
GLQSELYDVSK

SEQ ID NO: 25966 - protein, 9 aa, Homo sapiens
  misc_feature: Table A; Target 25966; HLA-B*07:02; GLYATL3; ENSG00000203972; CTA
GPSPRLTYL

SEQ ID NO: 25967 - protein, 9 aa, Homo sapiens
  misc_feature: Table A; Target 25967; HLA-B*37:01; GLYATL3; ENSG00000203972; CTA
GPSPRLTYL

SEQ ID NO: 25968 - protein, 9 aa, Homo sapiens
  misc_feature: Table A; Target 25968; HLA-C*07:02; GLYATL3; ENSG00000203972; CTA
GPSPRLTYL

SEQ ID NO: 25969 - protein, 10 aa, Homo sapiens
  misc_feature: Table A; Target 25969; HLA-A*23:01; GLYATL3; ENSG00000203972; CTA
GYSRLVALTL

SEQ ID NO: 25970 - protein, 10 aa, Homo sapiens
  misc_feature: Table A; Target 25970; HLA-A*24:02; GLYATL3; ENSG00000203972; CTA
GYSRLVALTL

SEQ ID NO: 25971 - protein, 8 aa, Homo sapiens
  misc_feature: Table A; Target 25971; HLA-C*14:02; GLYATL3; ENSG00000203972; CTA
HFSPVSSL

SEQ ID NO: 25972 - protein, 9 aa, Homo sapiens
  misc_feature: Table A; Target 25972; HLA-A*31:01; GLYATL3; ENSG00000203972; CTA
HGYTLPEHR

SEQ ID NO: 25973 - protein, 9 aa, Homo sapiens
  misc_feature: Table A; Target 25973; HLA-A*33:01; GLYATL3; ENSG00000203972; CTA
HGYTLPEHR

SEQ ID NO: 25974 - protein, 9 aa, Homo sapiens
  misc_feature: Table A; Target 25974; HLA-A*33:03; GLYATL3; ENSG00000203972; CTA
HGYTLPEHR

SEQ ID NO: 25975 - protein, 9 aa, Homo sapiens
  misc_feature: Table A; Target 25975; HLA-A*68:01; GLYATL3; ENSG00000203972; CTA
HGYTLPEHR

SEQ ID NO: 25976 - protein, 9 aa, Homo sapiens
  misc_feature: Table A; Target 25976; HLA-C*07:06; GLYATL3; ENSG00000203972; CTA
HGYTLPEHR

SEQ ID NO: 25977 - protein, 10 aa, Homo sapiens
  misc_feature: Table A; Target 25977; HLA-A*31:01; GLYATL3; ENSG00000203972; CTA
HGYTLPEHRR

SEQ ID NO: 25978 - protein, 8 aa, Homo sapiens
  misc_feature: Table A; Target 25978; HLA-C*14:02; GLYATL3; ENSG00000203972; CTA
HYTNAYAV

SEQ ID NO: 25979 - protein, 9 aa, Homo sapiens
  misc_feature: Table A; Target 25979; HLA-A*23:01; GLYATL3; ENSG00000203972; CTA
HYTNAYAVF

SEQ ID NO: 25980 - protein, 9 aa, Homo sapiens
  misc_feature: Table A; Target 25980; HLA-A*24:02; GLYATL3; ENSG00000203972; CTA
HYTNAYAVF

SEQ ID NO: 25981 - protein, 9 aa, Homo sapiens
  misc_feature: Table A; Target 25981; HLA-A*29:02; GLYATL3; ENSG00000203972; CTA
HYTNAYAVF

SEQ ID NO: 25982 - protein, 9 aa, Homo sapiens
  misc_feature: Table A; Target 25982; HLA-C*14:02; GLYATL3; ENSG00000203972; CTA
HYTNAYAVF

SEQ ID NO: 25983 - protein, 10 aa, Homo sapiens
  misc_feature: Table A; Target 25983; HLA-A*29:02; GLYATL3; ENSG00000203972; CTA
HYTNAYAVFY

SEQ ID NO: 25984 - protein, 8 aa, Homo sapiens
  misc_feature: Table A; Target 25984; HLA-B*15:01; GLYATL3; ENSG00000203972; CTA
IQGLQSEL

SEQ ID NO: 25985 - protein, 9 aa, Homo sapiens
  misc_feature: Table A; Target 25985; HLA-A*30:02; GLYATL3; ENSG00000203972; CTA
IQGLQSELY

SEQ ID NO: 25986 - protein, 9 aa, Homo sapiens
  misc_feature: Table A; Target 25986; HLA-B*15:01; GLYATL3; ENSG00000203972; CTA
IQGLQSELY

SEQ ID NO: 25987 - protein, 9 aa, Homo sapiens
  misc_feature: Table A; Target 25987; HLA-B*15:03; GLYATL3; ENSG00000203972; CTA
IQGLQSELY

SEQ ID NO: 25988 - protein, 9 aa, Homo sapiens
  misc_feature: Table A; Target 25988; HLA-C*07:04; GLYATL3; ENSG00000203972; CTA
IQGLQSELY

SEQ ID NO: 25989 - protein, 8 aa, Homo sapiens
  misc_feature: Table A; Target 25989; HLA-A*32:01; GLYATL3; ENSG00000203972; CTA
ITDQFATM

SEQ ID NO: 25990 - protein, 8 aa, Homo sapiens
  misc_feature: Table A; Target 25990; HLA-B*39:01; GLYATL3; ENSG00000203972; CTA
ITDQFATM

SEQ ID NO: 25991 - protein, 8 aa, Homo sapiens
  misc_feature: Table A; Target 25991; HLA-C*03:04; GLYATL3; ENSG00000203972; CTA
ITDQFATM

SEQ ID NO: 25992 - protein, 8 aa, Homo sapiens
  misc_feature: Table A; Target 25992; HLA-C*04:01; GLYATL3; ENSG00000203972; CTA
ITDQFATM

SEQ ID NO: 25993 - protein, 8 aa, Homo sapiens
  misc_feature: Table A; Target 25993; HLA-C*05:01; GLYATL3; ENSG00000203972; CTA
ITDQFATM

SEQ ID NO: 25994 - protein, 9 aa, Homo sapiens
  misc_feature: Table A; Target 25994; HLA-B*58:01; GLYATL3; ENSG00000203972; CTA
KAVANSKQL

SEQ ID NO: 25995 - protein, 9 aa, Homo sapiens
  misc_feature: Table A; Target 25995; HLA-C*03:03; GLYATL3; ENSG00000203972; CTA
KAVANSKQL

SEQ ID NO: 25996 - protein, 9 aa, Homo sapiens
  misc_feature: Table A; Target 25996; HLA-C*03:04; GLYATL3; ENSG00000203972; CTA
KAVANSKQL

SEQ ID NO: 25997 - protein, 9 aa, Homo sapiens
  misc_feature: Table A; Target 25997; HLA-C*16:01; GLYATL3; ENSG00000203972; CTA
KAVANSKQL

SEQ ID NO: 25998 - protein, 9 aa, Homo sapiens
  misc_feature: Table A; Target 25998; HLA-C*16:02; GLYATL3; ENSG00000203972; CTA
KAVANSKQL

SEQ ID NO: 25999 - protein, 9 aa, Homo sapiens
  misc_feature: Table A; Target 25999; HLA-A*31:01; GLYATL3; ENSG00000203972; CTA
KGNPVSWSI

SEQ ID NO: 26000 - protein, 9 aa, Homo sapiens
  misc_feature: Table A; Target 26000; HLA-A*32:01; GLYATL3; ENSG00000203972; CTA
KGNPVSWSI

SEQ ID NO: 26001 - protein, 9 aa, Homo sapiens
  misc_feature: Table A; Target 26001; HLA-A*30:02; GLYATL3; ENSG00000203972; CTA
KGPSPRLTY

SEQ ID NO: 26002 - protein, 9 aa, Homo sapiens
  misc_feature: Table A; Target 26002; HLA-A*32:01; GLYATL3; ENSG00000203972; CTA
KGPSPRLTY

SEQ ID NO: 26003 - protein, 9 aa, Homo sapiens
  misc_feature: Table A; Target 26003; HLA-B*58:01; GLYATL3; ENSG00000203972; CTA
KGPSPRLTY

SEQ ID NO: 26004 - protein, 9 aa, Homo sapiens
  misc_feature: Table A; Target 26004; HLA-C*16:01; GLYATL3; ENSG00000203972; CTA
KGPSPRLTY

SEQ ID NO: 26005 - protein, 10 aa, Homo sapiens
  misc_feature: Table A; Target 26005; HLA-A*02:07; GLYATL3; ENSG00000203972; CTA
KGPSPRLTYL

SEQ ID NO: 26006 - protein, 9 aa, Homo sapiens
  misc_feature: Table A; Target 26006; HLA-B*08:01; GLYATL3; ENSG00000203972; CTA
KGYSRLVAL

SEQ ID NO: 26007 - protein, 9 aa, Homo sapiens
  misc_feature: Table A; Target 26007; HLA-B*37:01; GLYATL3; ENSG00000203972; CTA
KGYSRLVAL

SEQ ID NO: 26008 - protein, 9 aa, Homo sapiens
  misc_feature: Table A; Target 26008; HLA-C*12:03; GLYATL3; ENSG00000203972; CTA
KGYSRLVAL

SEQ ID NO: 26009 - protein, 9 aa, Homo sapiens
  misc_feature: Table A; Target 26009; HLA-C*16:01; GLYATL3; ENSG00000203972; CTA
KGYSRLVAL

SEQ ID NO: 26010 - protein, 10 aa, Homo sapiens
  misc_feature: Table A; Target 26010; HLA-A*23:01; GLYATL3; ENSG00000203972; CTA
KQLNIKLTSF

SEQ ID NO: 26011 - protein, 10 aa, Homo sapiens
  misc_feature: Table A; Target 26011; HLA-A*24:02; GLYATL3; ENSG00000203972; CTA
KQLNIKLTSF

SEQ ID NO: 26012 - protein, 10 aa, Homo sapiens
  misc_feature: Table A; Target 26012; HLA-A*30:02; GLYATL3; ENSG00000203972; CTA
KQLNIKLTSF

SEQ ID NO: 26013 - protein, 10 aa, Homo sapiens
  misc_feature: Table A; Target 26013; HLA-A*31:01; GLYATL3; ENSG00000203972; CTA
KQLNIKLTSF

SEQ ID NO: 26014 - protein, 10 aa, Homo sapiens
  misc_feature: Table A; Target 26014; HLA-A*32:01; GLYATL3; ENSG00000203972; CTA
KQLNIKLTSF

SEQ ID NO: 26015 - protein, 10 aa, Homo sapiens
  misc_feature: Table A; Target 26015; HLA-B*15:01; GLYATL3; ENSG00000203972; CTA
KQLNIKLTSF

SEQ ID NO: 26016 - protein, 10 aa, Homo sapiens
  misc_feature: Table A; Target 26016; HLA-B*15:03; GLYATL3; ENSG00000203972; CTA
KQLNIKLTSF

SEQ ID NO: 26017 - protein, 9 aa, Homo sapiens
  misc_feature: Table A; Target 26017; HLA-A*02:01; GLYATL3; ENSG00000203972; CTA
KVYGAVMNI

SEQ ID NO: 26018 - protein, 9 aa, Homo sapiens
  misc_feature: Table A; Target 26018; HLA-A*02:03; GLYATL3; ENSG00000203972; CTA
KVYGAVMNI

SEQ ID NO: 26019 - protein, 9 aa, Homo sapiens
  misc_feature: Table A; Target 26019; HLA-A*02:07; GLYATL3; ENSG00000203972; CTA
KVYGAVMNI

SEQ ID NO: 26020 - protein, 9 aa, Homo sapiens
  misc_feature: Table A; Target 26020; HLA-A*03:01; GLYATL3; ENSG00000203972; CTA
KVYGAVMNI

SEQ ID NO: 26021 - protein, 9 aa, Homo sapiens
  misc_feature: Table A; Target 26021; HLA-A*32:01; GLYATL3; ENSG00000203972; CTA
KVYGAVMNI

SEQ ID NO: 26022 - protein, 9 aa, Homo sapiens
  misc_feature: Table A; Target 26022; HLA-B*13:02; GLYATL3; ENSG00000203972; CTA
KVYGAVMNI

SEQ ID NO: 26023 - protein, 9 aa, Homo sapiens
  misc_feature: Table A; Target 26023; HLA-B*40:02; GLYATL3; ENSG00000203972; CTA
KVYGAVMNI

SEQ ID NO: 26024 - protein, 9 aa, Homo sapiens
  misc_feature: Table A; Target 26024; HLA-B*58:01; GLYATL3; ENSG00000203972; CTA
KVYGAVMNI

SEQ ID NO: 26025 - protein, 9 aa, Homo sapiens
  misc_feature: Table A; Target 26025; HLA-C*02:02; GLYATL3; ENSG00000203972; CTA
KVYGAVMNI

SEQ ID NO: 26026 - protein, 9 aa, Homo sapiens
  misc_feature: Table A; Target 26026; HLA-C*06:02; GLYATL3; ENSG00000203972; CTA
KVYGAVMNI

SEQ ID NO: 26027 - protein, 9 aa, Homo sapiens
  misc_feature: Table A; Target 26027; HLA-C*12:03; GLYATL3; ENSG00000203972; CTA
KVYGAVMNI

SEQ ID NO: 26028 - protein, 11 aa, Homo sapiens
  misc_feature: Table A; Target 26028; HLA-A*03:01; GLYATL3; ENSG00000203972; CTA
KVYGAVMNINR

SEQ ID NO: 26029 - protein, 11 aa, Homo sapiens
  misc_feature: Table A; Target 26029; HLA-A*31:01; GLYATL3; ENSG00000203972; CTA
KVYGAVMNINR

SEQ ID NO: 26030 - protein, 8 aa, Homo sapiens
  misc_feature: Table A; Target 26030; HLA-B*18:01; GLYATL3; ENSG00000203972; CTA
LDHYTNAY

SEQ ID NO: 26031 - protein, 8 aa, Homo sapiens
  misc_feature: Table A; Target 26031; HLA-B*37:01; GLYATL3; ENSG00000203972; CTA
LDHYTNAY

SEQ ID NO: 26032 - protein, 8 aa, Homo sapiens
  misc_feature: Table A; Target 26032; HLA-A*23:01; GLYATL3; ENSG00000203972; CTA
LILTPATF

SEQ ID NO: 26033 - protein, 8 aa, Homo sapiens
  misc_feature: Table A; Target 26033; HLA-B*39:01; GLYATL3; ENSG00000203972; CTA
LILTPATF

SEQ ID NO: 26034 - protein, 8 aa, Homo sapiens
  misc_feature: Table A; Target 26034; HLA-B*27:02; GLYATL3; ENSG00000203972; CTA
LPDTSFLK

SEQ ID NO: 26035 - protein, 8 aa, Homo sapiens
  misc_feature: Table A; Target 26035; HLA-B*13:02; GLYATL3; ENSG00000203972; CTA
LQSELYDV

SEQ ID NO: 26036 - protein, 10 aa, Homo sapiens
  misc_feature: Table A; Target 26036; HLA-A*11:01; GLYATL3; ENSG00000203972; CTA
LQSELYDVSK

SEQ ID NO: 26037 - protein, 10 aa, Homo sapiens
  misc_feature: Table A; Target 26037; HLA-B*27:02; GLYATL3; ENSG00000203972; CTA
LQSELYDVSK

SEQ ID NO: 26038 - protein, 9 aa, Homo sapiens
  misc_feature: Table A; Target 26038; HLA-C*03:04; GLYATL3; ENSG00000203972; CTA
LSVANADLL

SEQ ID NO: 26039 - protein, 9 aa, Homo sapiens
  misc_feature: Table A; Target 26039; HLA-A*02:07; GLYATL3; ENSG00000203972; CTA
LTPATFSGL

SEQ ID NO: 26040 - protein, 9 aa, Homo sapiens
  misc_feature: Table A; Target 26040; HLA-C*01:02; GLYATL3; ENSG00000203972; CTA
LTPATFSGL

SEQ ID NO: 26041 - protein, 9 aa, Homo sapiens
  misc_feature: Table A; Target 26041; HLA-A*03:01; GLYATL3; ENSG00000203972; CTA
LVALTLARK

SEQ ID NO: 26042 - protein, 8 aa, Homo sapiens
  misc_feature: Table A; Target 26042; HLA-C*04:01; GLYATL3; ENSG00000203972; CTA
LYDVSKAV

SEQ ID NO: 26043 - protein, 8 aa, Homo sapiens
  misc_feature: Table A; Target 26043; HLA-C*14:02; GLYATL3; ENSG00000203972; CTA
LYDVSKAV

SEQ ID NO: 26044 - protein, 9 aa, Homo sapiens
  misc_feature: Table A; Target 26044; HLA-C*14:02; GLYATL3; ENSG00000203972; CTA
LYDVSKAVA

SEQ ID NO: 26045 - protein, 9 aa, Homo sapiens
  misc_feature: Table A; Target 26045; HLA-B*08:01; GLYATL3; ENSG00000203972; CTA
MNINRGNPF

SEQ ID NO: 26046 - protein, 9 aa, Homo sapiens
  misc_feature: Table A; Target 26046; HLA-C*16:01; GLYATL3; ENSG00000203972; CTA
MNINRGNPF

SEQ ID NO: 26047 - protein, 9 aa, Homo sapiens
  misc_feature: Table A; Target 26047; HLA-A*25:01; GLYATL3; ENSG00000203972; CTA
NADLLNRTW

SEQ ID NO: 26048 - protein, 9 aa, Homo sapiens
  misc_feature: Table A; Target 26048; HLA-B*35:01; GLYATL3; ENSG00000203972; CTA
NADLLNRTW

SEQ ID NO: 26049 - protein, 9 aa, Homo sapiens
  misc_feature: Table A; Target 26049; HLA-B*44:02; GLYATL3; ENSG00000203972; CTA
NADLLNRTW

SEQ ID NO: 26050 - protein, 9 aa, Homo sapiens
  misc_feature: Table A; Target 26050; HLA-B*44:03; GLYATL3; ENSG00000203972; CTA
NADLLNRTW

SEQ ID NO: 26051 - protein, 9 aa, Homo sapiens
  misc_feature: Table A; Target 26051; HLA-B*51:01; GLYATL3; ENSG00000203972; CTA
NADLLNRTW

SEQ ID NO: 26052 - protein, 9 aa, Homo sapiens
  misc_feature: Table A; Target 26052; HLA-B*57:01; GLYATL3; ENSG00000203972; CTA
NADLLNRTW

SEQ ID NO: 26053 - protein, 9 aa, Homo sapiens
  misc_feature: Table A; Target 26053; HLA-B*58:01; GLYATL3; ENSG00000203972; CTA
NADLLNRTW

SEQ ID NO: 26054 - protein, 9 aa, Homo sapiens
  misc_feature: Table A; Target 26054; HLA-C*03:04; GLYATL3; ENSG00000203972; CTA
NADLLNRTW

SEQ ID NO: 26055 - protein, 9 aa, Homo sapiens
  misc_feature: Table A; Target 26055; HLA-A*02:07; GLYATL3; ENSG00000203972; CTA
NLDHYTNAY

SEQ ID NO: 26056 - protein, 9 aa, Homo sapiens
  misc_feature: Table A; Target 26056; HLA-A*29:02; GLYATL3; ENSG00000203972; CTA
NLDHYTNAY

SEQ ID NO: 26057 - protein, 9 aa, Homo sapiens
  misc_feature: Table A; Target 26057; HLA-A*30:02; GLYATL3; ENSG00000203972; CTA
NLDHYTNAY

SEQ ID NO: 26058 - protein, 9 aa, Homo sapiens
  misc_feature: Table A; Target 26058; HLA-A*02:01; GLYATL3; ENSG00000203972; CTA
NLISCFPSV

SEQ ID NO: 26059 - protein, 9 aa, Homo sapiens
  misc_feature: Table A; Target 26059; HLA-A*02:07; GLYATL3; ENSG00000203972; CTA
NLISCFPSV

SEQ ID NO: 26060 - protein, 9 aa, Homo sapiens
  misc_feature: Table A; Target 26060; HLA-B*55:01; GLYATL3; ENSG00000203972; CTA
NLISCFPSV

SEQ ID NO: 26061 - protein, 8 aa, Homo sapiens
  misc_feature: Table A; Target 26061; HLA-B*08:01; GLYATL3; ENSG00000203972; CTA
NPFQKEVV

SEQ ID NO: 26062 - protein, 8 aa, Homo sapiens
  misc_feature: Table A; Target 26062; HLA-B*51:01; GLYATL3; ENSG00000203972; CTA
NPFQKEVV

SEQ ID NO: 26063 - protein, 9 aa, Homo sapiens
  misc_feature: Table A; Target 26063; HLA-B*07:02; GLYATL3; ENSG00000203972; CTA
NPFQKEVVL

SEQ ID NO: 26064 - protein, 9 aa, Homo sapiens
  misc_feature: Table A; Target 26064; HLA-B*08:01; GLYATL3; ENSG00000203972; CTA
NPFQKEVVL

SEQ ID NO: 26065 - protein, 9 aa, Homo sapiens
  misc_feature: Table A; Target 26065; HLA-B*35:01; GLYATL3; ENSG00000203972; CTA
NPFQKEVVL

SEQ ID NO: 26066 - protein, 9 aa, Homo sapiens
  misc_feature: Table A; Target 26066; HLA-B*35:03; GLYATL3; ENSG00000203972; CTA
NPFQKEVVL

SEQ ID NO: 26067 - protein, 9 aa, Homo sapiens
  misc_feature: Table A; Target 26067; HLA-B*39:01; GLYATL3; ENSG00000203972; CTA
NPFQKEVVL

SEQ ID NO: 26068 - protein, 9 aa, Homo sapiens
  misc_feature: Table A; Target 26068; HLA-B*51:01; GLYATL3; ENSG00000203972; CTA
NPFQKEVVL

SEQ ID NO: 26069 - protein, 9 aa, Homo sapiens
  misc_feature: Table A; Target 26069; HLA-B*54:01; GLYATL3; ENSG00000203972; CTA
NPFQKEVVL

SEQ ID NO: 26070 - protein, 9 aa, Homo sapiens
  misc_feature: Table A; Target 26070; HLA-B*55:01; GLYATL3; ENSG00000203972; CTA
NPFQKEVVL

SEQ ID NO: 26071 - protein, 9 aa, Homo sapiens
  misc_feature: Table A; Target 26071; HLA-B*56:01; GLYATL3; ENSG00000203972; CTA
NPFQKEVVL

SEQ ID NO: 26072 - protein, 9 aa, Homo sapiens
  misc_feature: Table A; Target 26072; HLA-C*03:03; GLYATL3; ENSG00000203972; CTA
NPFQKEVVL

SEQ ID NO: 26073 - protein, 9 aa, Homo sapiens
  misc_feature: Table A; Target 26073; HLA-C*05:01; GLYATL3; ENSG00000203972; CTA
NPFQKEVVL

SEQ ID NO: 26074 - protein, 9 aa, Homo sapiens
  misc_feature: Table A; Target 26074; HLA-C*07:02; GLYATL3; ENSG00000203972; CTA
NPFQKEVVL

SEQ ID NO: 26075 - protein, 9 aa, Homo sapiens
  misc_feature: Table A; Target 26075; HLA-C*16:01; GLYATL3; ENSG00000203972; CTA
NPFQKEVVL

SEQ ID NO: 26076 - protein, 11 aa, Homo sapiens
  misc_feature: Table A; Target 26076; HLA-B*35:01; GLYATL3; ENSG00000203972; CTA
NPVSWSITDQF

SEQ ID NO: 26077 - protein, 9 aa, Homo sapiens
  misc_feature: Table A; Target 26077; HLA-A*01:01; GLYATL3; ENSG00000203972; CTA
NTASISLLK

SEQ ID NO: 26078 - protein, 9 aa, Homo sapiens
  misc_feature: Table A; Target 26078; HLA-A*03:01; GLYATL3; ENSG00000203972; CTA
NTASISLLK

SEQ ID NO: 26079 - protein, 9 aa, Homo sapiens
  misc_feature: Table A; Target 26079; HLA-A*03:02; GLYATL3; ENSG00000203972; CTA
NTASISLLK

SEQ ID NO: 26080 - protein, 9 aa, Homo sapiens
  misc_feature: Table A; Target 26080; HLA-A*11:01; GLYATL3; ENSG00000203972; CTA
NTASISLLK

SEQ ID NO: 26081 - protein, 9 aa, Homo sapiens
  misc_feature: Table A; Target 26081; HLA-A*26:01; GLYATL3; ENSG00000203972; CTA
NTASISLLK

SEQ ID NO: 26082 - protein, 9 aa, Homo sapiens
  misc_feature: Table A; Target 26082; HLA-A*29:02; GLYATL3; ENSG00000203972; CTA
NTASISLLK

SEQ ID NO: 26083 - protein, 9 aa, Homo sapiens
  misc_feature: Table A; Target 26083; HLA-A*33:01; GLYATL3; ENSG00000203972; CTA
NTASISLLK

SEQ ID NO: 26084 - protein, 9 aa, Homo sapiens
  misc_feature: Table A; Target 26084; HLA-A*33:03; GLYATL3; ENSG00000203972; CTA
NTASISLLK

SEQ ID NO: 26085 - protein, 9 aa, Homo sapiens
  misc_feature: Table A; Target 26085; HLA-A*68:01; GLYATL3; ENSG00000203972; CTA
NTASISLLK

SEQ ID NO: 26086 - protein, 9 aa, Homo sapiens
  misc_feature: Table A; Target 26086; HLA-A*68:02; GLYATL3; ENSG00000203972; CTA
NTASISLLK

SEQ ID NO: 26087 - protein, 9 aa, Homo sapiens
  misc_feature: Table A; Target 26087; HLA-B*27:05; GLYATL3; ENSG00000203972; CTA
NTASISLLK

SEQ ID NO: 26088 - protein, 9 aa, Homo sapiens
  misc_feature: Table A; Target 26088; HLA-C*07:06; GLYATL3; ENSG00000203972; CTA
NTASISLLK

SEQ ID NO: 26089 - protein, 11 aa, Homo sapiens
  misc_feature: Table A; Target 26089; HLA-A*68:02; GLYATL3; ENSG00000203972; CTA
NTASISLLKSL

SEQ ID NO: 26090 - protein, 10 aa, Homo sapiens
  misc_feature: Table A; Target 26090; HLA-A*25:01; GLYATL3; ENSG00000203972; CTA
NVLDDNTASI

SEQ ID NO: 26091 - protein, 8 aa, Homo sapiens
  misc_feature: Table A; Target 26091; HLA-C*07:02; GLYATL3; ENSG00000203972; CTA
PSPRLTYL

SEQ ID NO: 26092 - protein, 9 aa, Homo sapiens
  misc_feature: Table A; Target 26092; HLA-A*29:02; GLYATL3; ENSG00000203972; CTA
QFATMCHGY

SEQ ID NO: 26093 - protein, 9 aa, Homo sapiens
  misc_feature: Table A; Target 26093; HLA-A*30:02; GLYATL3; ENSG00000203972; CTA
QFATMCHGY

SEQ ID NO: 26094 - protein, 9 aa, Homo sapiens
  misc_feature: Table A; Target 26094; HLA-C*01:02; GLYATL3; ENSG00000203972; CTA
QIQGLQSEL

SEQ ID NO: 26095 - protein, 9 aa, Homo sapiens
  misc_feature: Table A; Target 26095; HLA-C*14:02; GLYATL3; ENSG00000203972; CTA
QIQGLQSEL

SEQ ID NO: 26096 - protein, 10 aa, Homo sapiens
  misc_feature: Table A; Target 26096; HLA-A*30:02; GLYATL3; ENSG00000203972; CTA
QIQGLQSELY

SEQ ID NO: 26097 - protein, 10 aa, Homo sapiens
  misc_feature: Table A; Target 26097; HLA-B*15:01; GLYATL3; ENSG00000203972; CTA
QIQGLQSELY

SEQ ID NO: 26098 - protein, 9 aa, Homo sapiens
  misc_feature: Table A; Target 26098; HLA-A*02:03; GLYATL3; ENSG00000203972; CTA
QLNIKLTSF

SEQ ID NO: 26099 - protein, 9 aa, Homo sapiens
  misc_feature: Table A; Target 26099; HLA-A*23:01; GLYATL3; ENSG00000203972; CTA
QLNIKLTSF

SEQ ID NO: 26100 - protein, 9 aa, Homo sapiens
  misc_feature: Table A; Target 26100; HLA-A*24:02; GLYATL3; ENSG00000203972; CTA
QLNIKLTSF

SEQ ID NO: 26101 - protein, 9 aa, Homo sapiens
  misc_feature: Table A; Target 26101; HLA-A*25:01; GLYATL3; ENSG00000203972; CTA
QLNIKLTSF

SEQ ID NO: 26102 - protein, 9 aa, Homo sapiens
  misc_feature: Table A; Target 26102; HLA-A*31:01; GLYATL3; ENSG00000203972; CTA
QLNIKLTSF

SEQ ID NO: 26103 - protein, 9 aa, Homo sapiens
  misc_feature: Table A; Target 26103; HLA-A*32:01; GLYATL3; ENSG00000203972; CTA
QLNIKLTSF

SEQ ID NO: 26104 - protein, 9 aa, Homo sapiens
  misc_feature: Table A; Target 26104; HLA-B*07:02; GLYATL3; ENSG00000203972; CTA
QLNIKLTSF

SEQ ID NO: 26105 - protein, 9 aa, Homo sapiens
  misc_feature: Table A; Target 26105; HLA-B*08:01; GLYATL3; ENSG00000203972; CTA
QLNIKLTSF

SEQ ID NO: 26106 - protein, 9 aa, Homo sapiens
  misc_feature: Table A; Target 26106; HLA-B*15:01; GLYATL3; ENSG00000203972; CTA
QLNIKLTSF

SEQ ID NO: 26107 - protein, 9 aa, Homo sapiens
  misc_feature: Table A; Target 26107; HLA-B*15:03; GLYATL3; ENSG00000203972; CTA
QLNIKLTSF

SEQ ID NO: 26108 - protein, 9 aa, Homo sapiens
  misc_feature: Table A; Target 26108; HLA-B*37:01; GLYATL3; ENSG00000203972; CTA
QLNIKLTSF

SEQ ID NO: 26109 - protein, 9 aa, Homo sapiens
  misc_feature: Table A; Target 26109; HLA-B*46:01; GLYATL3; ENSG00000203972; CTA
QLNIKLTSF

SEQ ID NO: 26110 - protein, 9 aa, Homo sapiens
  misc_feature: Table A; Target 26110; HLA-C*01:02; GLYATL3; ENSG00000203972; CTA
QLNIKLTSF

SEQ ID NO: 26111 - protein, 9 aa, Homo sapiens
  misc_feature: Table A; Target 26111; HLA-C*14:02; GLYATL3; ENSG00000203972; CTA
QLNIKLTSF

SEQ ID NO: 26112 - protein, 9 aa, Homo sapiens
  misc_feature: Table A; Target 26112; HLA-C*16:01; GLYATL3; ENSG00000203972; CTA
QLNIKLTSF

SEQ ID NO: 26113 - protein, 10 aa, Homo sapiens
  misc_feature: Table A; Target 26113; HLA-A*03:01; GLYATL3; ENSG00000203972; CTA
QLNIKLTSFK

SEQ ID NO: 26114 - protein, 9 aa, Homo sapiens
  misc_feature: Table A; Target 26114; HLA-B*27:02; GLYATL3; ENSG00000203972; CTA
QSELYDVSK

SEQ ID NO: 26115 - protein, 10 aa, Homo sapiens
  misc_feature: Table A; Target 26115; HLA-B*44:02; GLYATL3; ENSG00000203972; CTA
RDEKGNPVSW

SEQ ID NO: 26116 - protein, 10 aa, Homo sapiens
  misc_feature: Table A; Target 26116; HLA-B*44:03; GLYATL3; ENSG00000203972; CTA
RDEKGNPVSW

SEQ ID NO: 26117 - protein, 10 aa, Homo sapiens
  misc_feature: Table A; Target 26117; HLA-B*58:01; GLYATL3; ENSG00000203972; CTA
RDEKGNPVSW

SEQ ID NO: 26118 - protein, 11 aa, Homo sapiens
  misc_feature: Table A; Target 26118; HLA-A*30:02; GLYATL3; ENSG00000203972; CTA
REAETDNLDHY

SEQ ID NO: 26119 - protein, 11 aa, Homo sapiens
  misc_feature: Table A; Target 26119; HLA-B*44:02; GLYATL3; ENSG00000203972; CTA
REAETDNLDHY

SEQ ID NO: 26120 - protein, 11 aa, Homo sapiens
  misc_feature: Table A; Target 26120; HLA-B*44:03; GLYATL3; ENSG00000203972; CTA
REAETDNLDHY

SEQ ID NO: 26121 - protein, 11 aa, Homo sapiens
  misc_feature: Table A; Target 26121; HLA-C*16:04; GLYATL3; ENSG00000203972; CTA
REAETDNLDHY

SEQ ID NO: 26122 - protein, 10 aa, Homo sapiens
  misc_feature: Table A; Target 26122; HLA-B*37:01; GLYATL3; ENSG00000203972; CTA
RGFPSQGNVL

SEQ ID NO: 26123 - protein, 10 aa, Homo sapiens
  misc_feature: Table A; Target 26123; HLA-B*40:01; GLYATL3; ENSG00000203972; CTA
RGFPSQGNVL

SEQ ID NO: 26124 - protein, 10 aa, Homo sapiens
  misc_feature: Table A; Target 26124; HLA-C*03:04; GLYATL3; ENSG00000203972; CTA
RGFPSQGNVL

SEQ ID NO: 26125 - protein, 10 aa, Homo sapiens
  misc_feature: Table A; Target 26125; HLA-C*07:04; GLYATL3; ENSG00000203972; CTA
RGFPSQGNVL

SEQ ID NO: 26126 - protein, 9 aa, Homo sapiens
  misc_feature: Table A; Target 26126; HLA-C*16:02; GLYATL3; ENSG00000203972; CTA
RGNPFQKEV

SEQ ID NO: 26127 - protein, 9 aa, Homo sapiens
  misc_feature: Table A; Target 26127; HLA-A*23:01; GLYATL3; ENSG00000203972; CTA
RLILTPATF

SEQ ID NO: 26128 - protein, 9 aa, Homo sapiens
  misc_feature: Table A; Target 26128; HLA-A*24:02; GLYATL3; ENSG00000203972; CTA
RLILTPATF

SEQ ID NO: 26129 - protein, 9 aa, Homo sapiens
  misc_feature: Table A; Target 26129; HLA-A*32:01; GLYATL3; ENSG00000203972; CTA
RLILTPATF

SEQ ID NO: 26130 - protein, 9 aa, Homo sapiens
  misc_feature: Table A; Target 26130; HLA-B*15:01; GLYATL3; ENSG00000203972; CTA
RLILTPATF

SEQ ID NO: 26131 - protein, 9 aa, Homo sapiens
  misc_feature: Table A; Target 26131; HLA-B*15:03; GLYATL3; ENSG00000203972; CTA
RLILTPATF

SEQ ID NO: 26132 - protein, 9 aa, Homo sapiens
  misc_feature: Table A; Target 26132; HLA-B*46:01; GLYATL3; ENSG00000203972; CTA
RLILTPATF

SEQ ID NO: 26133 - protein, 9 aa, Homo sapiens
  misc_feature: Table A; Target 26133; HLA-B*57:01; GLYATL3; ENSG00000203972; CTA
RLILTPATF

SEQ ID NO: 26134 - protein, 9 aa, Homo sapiens
  misc_feature: Table A; Target 26134; HLA-B*58:01; GLYATL3; ENSG00000203972; CTA
RLILTPATF

SEQ ID NO: 26135 - protein, 9 aa, Homo sapiens
  misc_feature: Table A; Target 26135; HLA-A*03:01; GLYATL3; ENSG00000203972; CTA
RLVALTLAR

SEQ ID NO: 26136 - protein, 9 aa, Homo sapiens
  misc_feature: Table A; Target 26136; HLA-A*31:01; GLYATL3; ENSG00000203972; CTA
RLVALTLAR

SEQ ID NO: 26137 - protein, 10 aa, Homo sapiens
  misc_feature: Table A; Target 26137; HLA-A*23:01; GLYATL3; ENSG00000203972; CTA
RYIANLISCF

SEQ ID NO: 26138 - protein, 10 aa, Homo sapiens
  misc_feature: Table A; Target 26138; HLA-A*24:02; GLYATL3; ENSG00000203972; CTA
RYIANLISCF

SEQ ID NO: 26139 - protein, 9 aa, Homo sapiens
  misc_feature: Table A; Target 26139; HLA-B*13:02; GLYATL3; ENSG00000203972; CTA
SCFPESLKV

SEQ ID NO: 26140 - protein, 9 aa, Homo sapiens
  misc_feature: Table A; Target 26140; HLA-C*02:02; GLYATL3; ENSG00000203972; CTA
SCFPESLKV

SEQ ID NO: 26141 - protein, 10 aa, Homo sapiens
  misc_feature: Table A; Target 26141; HLA-A*30:02; GLYATL3; ENSG00000203972; CTA
SCFPESLKVY

SEQ ID NO: 26142 - protein, 10 aa, Homo sapiens
  misc_feature: Table A; Target 26142; HLA-B*15:01; GLYATL3; ENSG00000203972; CTA
SCFPESLKVY

SEQ ID NO: 26143 - protein, 10 aa, Homo sapiens
  misc_feature: Table A; Target 26143; HLA-B*15:03; GLYATL3; ENSG00000203972; CTA
SCFPESLKVY

SEQ ID NO: 26144 - protein, 10 aa, Homo sapiens
  misc_feature: Table A; Target 26144; HLA-C*02:02; GLYATL3; ENSG00000203972; CTA
SCFPESLKVY

SEQ ID NO: 26145 - protein, 10 aa, Homo sapiens
  misc_feature: Table A; Target 26145; HLA-C*12:03; GLYATL3; ENSG00000203972; CTA
SCFPESLKVY

SEQ ID NO: 26146 - protein, 9 aa, Homo sapiens
  misc_feature: Table A; Target 26146; HLA-A*31:01; GLYATL3; ENSG00000203972; CTA
SCFPSVCVR

SEQ ID NO: 26147 - protein, 9 aa, Homo sapiens
  misc_feature: Table A; Target 26147; HLA-A*30:01; GLYATL3; ENSG00000203972; CTA
SELYDVSKA

SEQ ID NO: 26148 - protein, 9 aa, Homo sapiens
  misc_feature: Table A; Target 26148; HLA-B*40:01; GLYATL3; ENSG00000203972; CTA
SELYDVSKA

SEQ ID NO: 26149 - protein, 9 aa, Homo sapiens
  misc_feature: Table A; Target 26149; HLA-B*40:02; GLYATL3; ENSG00000203972; CTA
SELYDVSKA

SEQ ID NO: 26150 - protein, 9 aa, Homo sapiens
  misc_feature: Table A; Target 26150; HLA-B*49:01; GLYATL3; ENSG00000203972; CTA
SELYDVSKA

SEQ ID NO: 26151 - protein, 10 aa, Homo sapiens
  misc_feature: Table A; Target 26151; HLA-A*30:01; GLYATL3; ENSG00000203972; CTA
SELYDVSKAV

SEQ ID NO: 26152 - protein, 10 aa, Homo sapiens
  misc_feature: Table A; Target 26152; HLA-B*49:01; GLYATL3; ENSG00000203972; CTA
SELYDVSKAV

SEQ ID NO: 26153 - protein, 8 aa, Homo sapiens
  misc_feature: Table A; Target 26153; HLA-B*37:01; GLYATL3; ENSG00000203972; CTA
SISLLKSL

SEQ ID NO: 26154 - protein, 9 aa, Homo sapiens
  misc_feature: Table A; Target 26154; HLA-A*25:01; GLYATL3; ENSG00000203972; CTA
SITDQFATM

SEQ ID NO: 26155 - protein, 9 aa, Homo sapiens
  misc_feature: Table A; Target 26155; HLA-A*26:01; GLYATL3; ENSG00000203972; CTA
SITDQFATM

SEQ ID NO: 26156 - protein, 9 aa, Homo sapiens
  misc_feature: Table A; Target 26156; HLA-A*30:01; GLYATL3; ENSG00000203972; CTA
SITDQFATM

SEQ ID NO: 26157 - protein, 9 aa, Homo sapiens
  misc_feature: Table A; Target 26157; HLA-A*32:01; GLYATL3; ENSG00000203972; CTA
SITDQFATM

SEQ ID NO: 26158 - protein, 9 aa, Homo sapiens
  misc_feature: Table A; Target 26158; HLA-A*68:01; GLYATL3; ENSG00000203972; CTA
SITDQFATM

SEQ ID NO: 26159 - protein, 9 aa, Homo sapiens
  misc_feature: Table A; Target 26159; HLA-A*68:02; GLYATL3; ENSG00000203972; CTA
SITDQFATM

SEQ ID NO: 26160 - protein, 9 aa, Homo sapiens
  misc_feature: Table A; Target 26160; HLA-B*18:01; GLYATL3; ENSG00000203972; CTA
SITDQFATM

SEQ ID NO: 26161 - protein, 9 aa, Homo sapiens
  misc_feature: Table A; Target 26161; HLA-B*27:05; GLYATL3; ENSG00000203972; CTA
SITDQFATM

SEQ ID NO: 26162 - protein, 9 aa, Homo sapiens
  misc_feature: Table A; Target 26162; HLA-B*35:01; GLYATL3; ENSG00000203972; CTA
SITDQFATM

SEQ ID NO: 26163 - protein, 9 aa, Homo sapiens
  misc_feature: Table A; Target 26163; HLA-B*35:03; GLYATL3; ENSG00000203972; CTA
SITDQFATM

SEQ ID NO: 26164 - protein, 9 aa, Homo sapiens
  misc_feature: Table A; Target 26164; HLA-B*46:01; GLYATL3; ENSG00000203972; CTA
SITDQFATM

SEQ ID NO: 26165 - protein, 9 aa, Homo sapiens
  misc_feature: Table A; Target 26165; HLA-B*58:01; GLYATL3; ENSG00000203972; CTA
SITDQFATM

SEQ ID NO: 26166 - protein, 9 aa, Homo sapiens
  misc_feature: Table A; Target 26166; HLA-C*01:02; GLYATL3; ENSG00000203972; CTA
SITDQFATM

SEQ ID NO: 26167 - protein, 9 aa, Homo sapiens
  misc_feature: Table A; Target 26167; HLA-C*02:02; GLYATL3; ENSG00000203972; CTA
SITDQFATM

SEQ ID NO: 26168 - protein, 9 aa, Homo sapiens
  misc_feature: Table A; Target 26168; HLA-C*03:03; GLYATL3; ENSG00000203972; CTA
SITDQFATM

SEQ ID NO: 26169 - protein, 9 aa, Homo sapiens
  misc_feature: Table A; Target 26169; HLA-C*03:04; GLYATL3; ENSG00000203972; CTA
SITDQFATM

SEQ ID NO: 26170 - protein, 9 aa, Homo sapiens
  misc_feature: Table A; Target 26170; HLA-C*05:01; GLYATL3; ENSG00000203972; CTA
SITDQFATM

SEQ ID NO: 26171 - protein, 9 aa, Homo sapiens
  misc_feature: Table A; Target 26171; HLA-C*07:06; GLYATL3; ENSG00000203972; CTA
SITDQFATM

SEQ ID NO: 26172 - protein, 9 aa, Homo sapiens
  misc_feature: Table A; Target 26172; HLA-C*14:02; GLYATL3; ENSG00000203972; CTA
SITDQFATM

SEQ ID NO: 26173 - protein, 9 aa, Homo sapiens
  misc_feature: Table A; Target 26173; HLA-C*16:01; GLYATL3; ENSG00000203972; CTA
SITDQFATM

SEQ ID NO: 26174 - protein, 9 aa, Homo sapiens
  misc_feature: Table A; Target 26174; HLA-C*16:02; GLYATL3; ENSG00000203972; CTA
SITDQFATM

SEQ ID NO: 26175 - protein, 9 aa, Homo sapiens
  misc_feature: Table A; Target 26175; HLA-B*08:01; GLYATL3; ENSG00000203972; CTA
SLKVYGAVM

SEQ ID NO: 26176 - protein, 9 aa, Homo sapiens
  misc_feature: Table A; Target 26176; HLA-B*46:01; GLYATL3; ENSG00000203972; CTA
SLKVYGAVM

SEQ ID NO: 26177 - protein, 9 aa, Homo sapiens
  misc_feature: Table A; Target 26177; HLA-A*03:01; GLYATL3; ENSG00000203972; CTA
SLPDTSFLK

SEQ ID NO: 26178 - protein, 9 aa, Homo sapiens
  misc_feature: Table A; Target 26178; HLA-A*03:02; GLYATL3; ENSG00000203972; CTA
SLPDTSFLK

SEQ ID NO: 26179 - protein, 9 aa, Homo sapiens
  misc_feature: Table A; Target 26179; HLA-A*11:01; GLYATL3; ENSG00000203972; CTA
SLPDTSFLK

SEQ ID NO: 26180 - protein, 9 aa, Homo sapiens
  misc_feature: Table A; Target 26180; HLA-B*07:02; GLYATL3; ENSG00000203972; CTA
SPRLTYLSV

SEQ ID NO: 26181 - protein, 9 aa, Homo sapiens
  misc_feature: Table A; Target 26181; HLA-B*54:01; GLYATL3; ENSG00000203972; CTA
SPRLTYLSV

SEQ ID NO: 26182 - protein, 9 aa, Homo sapiens
  misc_feature: Table A; Target 26182; HLA-B*56:01; GLYATL3; ENSG00000203972; CTA
SPRLTYLSV

SEQ ID NO: 26183 - protein, 9 aa, Homo sapiens
  misc_feature: Table A; Target 26183; HLA-C*07:02; GLYATL3; ENSG00000203972; CTA
SPRLTYLSV

SEQ ID NO: 26184 - protein, 9 aa, Homo sapiens
  misc_feature: Table A; Target 26184; HLA-B*56:01; GLYATL3; ENSG00000203972; CTA
SPVSSLPDT

SEQ ID NO: 26185 - protein, 11 aa, Homo sapiens
  misc_feature: Table A; Target 26185; HLA-B*07:02; GLYATL3; ENSG00000203972; CTA
SPVSSLPDTSF

SEQ ID NO: 26186 - protein, 11 aa, Homo sapiens
  misc_feature: Table A; Target 26186; HLA-B*35:01; GLYATL3; ENSG00000203972; CTA
SPVSSLPDTSF

SEQ ID NO: 26187 - protein, 11 aa, Homo sapiens
  misc_feature: Table A; Target 26187; HLA-B*35:03; GLYATL3; ENSG00000203972; CTA
SPVSSLPDTSF

SEQ ID NO: 26188 - protein, 11 aa, Homo sapiens
  misc_feature: Table A; Target 26188; HLA-B*55:01; GLYATL3; ENSG00000203972; CTA
SPVSSLPDTSF

SEQ ID NO: 26189 - protein, 11 aa, Homo sapiens
  misc_feature: Table A; Target 26189; HLA-B*56:01; GLYATL3; ENSG00000203972; CTA
SPVSSLPDTSF

SEQ ID NO: 26190 - protein, 11 aa, Homo sapiens
  misc_feature: Table A; Target 26190; HLA-C*03:03; GLYATL3; ENSG00000203972; CTA
SPVSSLPDTSF

SEQ ID NO: 26191 - protein, 11 aa, Homo sapiens
  misc_feature: Table A; Target 26191; HLA-C*07:02; GLYATL3; ENSG00000203972; CTA
SPVSSLPDTSF

SEQ ID NO: 26192 - protein, 9 aa, Homo sapiens
  misc_feature: Table A; Target 26192; HLA-B*58:01; GLYATL3; ENSG00000203972; CTA
SSLPDTSFL

SEQ ID NO: 26193 - protein, 10 aa, Homo sapiens
  misc_feature: Table A; Target 26193; HLA-A*11:01; GLYATL3; ENSG00000203972; CTA
SSLPDTSFLK

SEQ ID NO: 26194 - protein, 9 aa, Homo sapiens
  misc_feature: Table A; Target 26194; HLA-A*03:01; GLYATL3; ENSG00000203972; CTA
STKLLILEK

SEQ ID NO: 26195 - protein, 9 aa, Homo sapiens
  misc_feature: Table A; Target 26195; HLA-A*11:01; GLYATL3; ENSG00000203972; CTA
STKLLILEK

SEQ ID NO: 26196 - protein, 9 aa, Homo sapiens
  misc_feature: Table A; Target 26196; HLA-A*31:01; GLYATL3; ENSG00000203972; CTA
STKLLILEK

SEQ ID NO: 26197 - protein, 9 aa, Homo sapiens
  misc_feature: Table A; Target 26197; HLA-A*33:01; GLYATL3; ENSG00000203972; CTA
STKLLILEK

SEQ ID NO: 26198 - protein, 9 aa, Homo sapiens
  misc_feature: Table A; Target 26198; HLA-A*33:03; GLYATL3; ENSG00000203972; CTA
STKLLILEK

SEQ ID NO: 26199 - protein, 9 aa, Homo sapiens
  misc_feature: Table A; Target 26199; HLA-B*13:02; GLYATL3; ENSG00000203972; CTA
STKLLILEK

SEQ ID NO: 26200 - protein, 10 aa, Homo sapiens
  misc_feature: Table A; Target 26200; HLA-A*03:01; GLYATL3; ENSG00000203972; CTA
SVANADLLNR

SEQ ID NO: 26201 - protein, 10 aa, Homo sapiens
  misc_feature: Table A; Target 26201; HLA-A*03:02; GLYATL3; ENSG00000203972; CTA
SVANADLLNR

SEQ ID NO: 26202 - protein, 10 aa, Homo sapiens
  misc_feature: Table A; Target 26202; HLA-A*11:01; GLYATL3; ENSG00000203972; CTA
SVANADLLNR

SEQ ID NO: 26203 - protein, 10 aa, Homo sapiens
  misc_feature: Table A; Target 26203; HLA-A*31:01; GLYATL3; ENSG00000203972; CTA
SVANADLLNR

SEQ ID NO: 26204 - protein, 10 aa, Homo sapiens
  misc_feature: Table A; Target 26204; HLA-A*33:01; GLYATL3; ENSG00000203972; CTA
SVANADLLNR

SEQ ID NO: 26205 - protein, 10 aa, Homo sapiens
  misc_feature: Table A; Target 26205; HLA-A*33:03; GLYATL3; ENSG00000203972; CTA
SVANADLLNR

SEQ ID NO: 26206 - protein, 10 aa, Homo sapiens
  misc_feature: Table A; Target 26206; HLA-A*68:01; GLYATL3; ENSG00000203972; CTA
SVANADLLNR

SEQ ID NO: 26207 - protein, 10 aa, Homo sapiens
  misc_feature: Table A; Target 26207; HLA-B*27:02; GLYATL3; ENSG00000203972; CTA
SVANADLLNR

SEQ ID NO: 26208 - protein, 10 aa, Homo sapiens
  misc_feature: Table A; Target 26208; HLA-C*07:06; GLYATL3; ENSG00000203972; CTA
SVANADLLNR

SEQ ID NO: 26209 - protein, 8 aa, Homo sapiens
  misc_feature: Table A; Target 26209; HLA-B*27:02; GLYATL3; ENSG00000203972; CTA
TASISLLK

SEQ ID NO: 26210 - protein, 10 aa, Homo sapiens
  misc_feature: Table A; Target 26210; HLA-B*07:02; GLYATL3; ENSG00000203972; CTA
TASISLLKSL

SEQ ID NO: 26211 - protein, 8 aa, Homo sapiens
  misc_feature: Table A; Target 26211; HLA-A*23:01; GLYATL3; ENSG00000203972; CTA
TFSGLPHL

SEQ ID NO: 26212 - protein, 8 aa, Homo sapiens
  misc_feature: Table A; Target 26212; HLA-B*07:02; GLYATL3; ENSG00000203972; CTA
TPATFSGL

SEQ ID NO: 26213 - protein, 11 aa, Homo sapiens
  misc_feature: Table A; Target 26213; HLA-A*68:02; GLYATL3; ENSG00000203972; CTA
TPATFSGLPHL

SEQ ID NO: 26214 - protein, 11 aa, Homo sapiens
  misc_feature: Table A; Target 26214; HLA-B*07:02; GLYATL3; ENSG00000203972; CTA
TPATFSGLPHL

SEQ ID NO: 26215 - protein, 11 aa, Homo sapiens
  misc_feature: Table A; Target 26215; HLA-B*35:03; GLYATL3; ENSG00000203972; CTA
TPATFSGLPHL

SEQ ID NO: 26216 - protein, 11 aa, Homo sapiens
  misc_feature: Table A; Target 26216; HLA-C*04:01; GLYATL3; ENSG00000203972; CTA
TPATFSGLPHL

SEQ ID NO: 26217 - protein, 11 aa, Homo sapiens
  misc_feature: Table A; Target 26217; HLA-C*06:02; GLYATL3; ENSG00000203972; CTA
TPATFSGLPHL

SEQ ID NO: 26218 - protein, 8 aa, Homo sapiens
  misc_feature: Table A; Target 26218; HLA-B*57:01; GLYATL3; ENSG00000203972; CTA
TSFKAVHF

SEQ ID NO: 26219 - protein, 10 aa, Homo sapiens
  misc_feature: Table A; Target 26219; HLA-A*68:01; GLYATL3; ENSG00000203972; CTA
TSFLKGPSPR

SEQ ID NO: 26220 - protein, 8 aa, Homo sapiens
  misc_feature: Table A; Target 26220; HLA-C*14:02; GLYATL3; ENSG00000203972; CTA
TYLSVANA

SEQ ID NO: 26221 - protein, 10 aa, Homo sapiens
  misc_feature: Table A; Target 26221; HLA-C*14:02; GLYATL3; ENSG00000203972; CTA
TYLSVANADL

SEQ ID NO: 26222 - protein, 11 aa, Homo sapiens
  misc_feature: Table A; Target 26222; HLA-A*23:01; GLYATL3; ENSG00000203972; CTA
TYLSVANADLL

SEQ ID NO: 26223 - protein, 11 aa, Homo sapiens
  misc_feature: Table A; Target 26223; HLA-A*24:02; GLYATL3; ENSG00000203972; CTA
TYLSVANADLL

SEQ ID NO: 26224 - protein, 9 aa, Homo sapiens
  misc_feature: Table A; Target 26224; HLA-B*57:01; GLYATL3; ENSG00000203972; CTA
VALTLARKL

SEQ ID NO: 26225 - protein, 9 aa, Homo sapiens
  misc_feature: Table A; Target 26225; HLA-C*02:02; GLYATL3; ENSG00000203972; CTA
VALTLARKL

SEQ ID NO: 26226 - protein, 9 aa, Homo sapiens
  misc_feature: Table A; Target 26226; HLA-C*12:03; GLYATL3; ENSG00000203972; CTA
VALTLARKL

SEQ ID NO: 26227 - protein, 9 aa, Homo sapiens
  misc_feature: Table A; Target 26227; HLA-C*16:01; GLYATL3; ENSG00000203972; CTA
VALTLARKL

SEQ ID NO: 26228 - protein, 9 aa, Homo sapiens
  misc_feature: Table A; Target 26228; HLA-C*16:02; GLYATL3; ENSG00000203972; CTA
VALTLARKL

SEQ ID NO: 26229 - protein, 9 aa, Homo sapiens
  misc_feature: Table A; Target 26229; HLA-A*03:02; GLYATL3; ENSG00000203972; CTA
VANADLLNR

SEQ ID NO: 26230 - protein, 9 aa, Homo sapiens
  misc_feature: Table A; Target 26230; HLA-A*11:01; GLYATL3; ENSG00000203972; CTA
VANADLLNR

SEQ ID NO: 26231 - protein, 9 aa, Homo sapiens
  misc_feature: Table A; Target 26231; HLA-A*31:01; GLYATL3; ENSG00000203972; CTA
VANADLLNR

SEQ ID NO: 26232 - protein, 9 aa, Homo sapiens
  misc_feature: Table A; Target 26232; HLA-A*33:01; GLYATL3; ENSG00000203972; CTA
VANADLLNR

SEQ ID NO: 26233 - protein, 9 aa, Homo sapiens
  misc_feature: Table A; Target 26233; HLA-A*33:03; GLYATL3; ENSG00000203972; CTA
VANADLLNR

SEQ ID NO: 26234 - protein, 9 aa, Homo sapiens
  misc_feature: Table A; Target 26234; HLA-A*68:01; GLYATL3; ENSG00000203972; CTA
VANADLLNR

SEQ ID NO: 26235 - protein, 9 aa, Homo sapiens
  misc_feature: Table A; Target 26235; HLA-B*27:02; GLYATL3; ENSG00000203972; CTA
VANADLLNR

SEQ ID NO: 26236 - protein, 9 aa, Homo sapiens
  misc_feature: Table A; Target 26236; HLA-B*57:01; GLYATL3; ENSG00000203972; CTA
VANADLLNR

SEQ ID NO: 26237 - protein, 9 aa, Homo sapiens
  misc_feature: Table A; Target 26237; HLA-C*07:06; GLYATL3; ENSG00000203972; CTA
VANADLLNR

SEQ ID NO: 26238 - protein, 11 aa, Homo sapiens
  misc_feature: Table A; Target 26238; HLA-A*32:01; GLYATL3; ENSG00000203972; CTA
VANADLLNRTW

SEQ ID NO: 26239 - protein, 11 aa, Homo sapiens
  misc_feature: Table A; Target 26239; HLA-B*44:02; GLYATL3; ENSG00000203972; CTA
VANADLLNRTW

SEQ ID NO: 26240 - protein, 11 aa, Homo sapiens
  misc_feature: Table A; Target 26240; HLA-B*57:01; GLYATL3; ENSG00000203972; CTA
VANADLLNRTW

SEQ ID NO: 26241 - protein, 11 aa, Homo sapiens
  misc_feature: Table A; Target 26241; HLA-B*58:01; GLYATL3; ENSG00000203972; CTA
VANADLLNRTW

SEQ ID NO: 26242 - protein, 11 aa, Homo sapiens
  misc_feature: Table A; Target 26242; HLA-C*16:04; GLYATL3; ENSG00000203972; CTA
VANADLLNRTW

SEQ ID NO: 26243 - protein, 9 aa, Homo sapiens
  misc_feature: Table A; Target 26243; HLA-A*23:01; GLYATL3; ENSG00000203972; CTA
VANSKQLNI

SEQ ID NO: 26244 - protein, 9 aa, Homo sapiens
  misc_feature: Table A; Target 26244; HLA-A*24:02; GLYATL3; ENSG00000203972; CTA
VANSKQLNI

SEQ ID NO: 26245 - protein, 9 aa, Homo sapiens
  misc_feature: Table A; Target 26245; HLA-A*30:01; GLYATL3; ENSG00000203972; CTA
VANSKQLNI

SEQ ID NO: 26246 - protein, 9 aa, Homo sapiens
  misc_feature: Table A; Target 26246; HLA-A*32:01; GLYATL3; ENSG00000203972; CTA
VANSKQLNI

SEQ ID NO: 26247 - protein, 9 aa, Homo sapiens
  misc_feature: Table A; Target 26247; HLA-B*13:02; GLYATL3; ENSG00000203972; CTA
VANSKQLNI

SEQ ID NO: 26248 - protein, 9 aa, Homo sapiens
  misc_feature: Table A; Target 26248; HLA-B*51:01; GLYATL3; ENSG00000203972; CTA
VANSKQLNI

SEQ ID NO: 26249 - protein, 9 aa, Homo sapiens
  misc_feature: Table A; Target 26249; HLA-B*58:01; GLYATL3; ENSG00000203972; CTA
VANSKQLNI

SEQ ID NO: 26250 - protein, 9 aa, Homo sapiens
  misc_feature: Table A; Target 26250; HLA-C*02:02; GLYATL3; ENSG00000203972; CTA
VANSKQLNI

SEQ ID NO: 26251 - protein, 9 aa, Homo sapiens
  misc_feature: Table A; Target 26251; HLA-C*06:02; GLYATL3; ENSG00000203972; CTA
VANSKQLNI

SEQ ID NO: 26252 - protein, 9 aa, Homo sapiens
  misc_feature: Table A; Target 26252; HLA-C*12:03; GLYATL3; ENSG00000203972; CTA
VANSKQLNI

SEQ ID NO: 26253 - protein, 9 aa, Homo sapiens
  misc_feature: Table A; Target 26253; HLA-C*16:01; GLYATL3; ENSG00000203972; CTA
VANSKQLNI

SEQ ID NO: 26254 - protein, 9 aa, Homo sapiens
  misc_feature: Table A; Target 26254; HLA-C*16:02; GLYATL3; ENSG00000203972; CTA
VANSKQLNI

SEQ ID NO: 26255 - protein, 9 aa, Homo sapiens
  misc_feature: Table A; Target 26255; HLA-C*16:04; GLYATL3; ENSG00000203972; CTA
VANSKQLNI

SEQ ID NO: 26256 - protein, 9 aa, Homo sapiens
  misc_feature: Table A; Target 26256; HLA-A*29:02; GLYATL3; ENSG00000203972; CTA
VFYKDVRAY

SEQ ID NO: 26257 - protein, 9 aa, Homo sapiens
  misc_feature: Table A; Target 26257; HLA-A*30:02; GLYATL3; ENSG00000203972; CTA
VFYKDVRAY

SEQ ID NO: 26258 - protein, 9 aa, Homo sapiens
  misc_feature: Table A; Target 26258; HLA-B*15:03; GLYATL3; ENSG00000203972; CTA
VFYKDVRAY

SEQ ID NO: 26259 - protein, 10 aa, Homo sapiens
  misc_feature: Table A; Target 26259; HLA-A*31:01; GLYATL3; ENSG00000203972; CTA
VFYKDVRAYR

SEQ ID NO: 26260 - protein, 9 aa, Homo sapiens
  misc_feature: Table A; Target 26260; HLA-B*15:03; GLYATL3; ENSG00000203972; CTA
VHFSPVSSL

SEQ ID NO: 26261 - protein, 9 aa, Homo sapiens
  misc_feature: Table A; Target 26261; HLA-B*38:01; GLYATL3; ENSG00000203972; CTA
VHFSPVSSL

SEQ ID NO: 26262 - protein, 9 aa, Homo sapiens
  misc_feature: Table A; Target 26262; HLA-B*39:01; GLYATL3; ENSG00000203972; CTA
VHFSPVSSL

SEQ ID NO: 26263 - protein, 9 aa, Homo sapiens
  misc_feature: Table A; Target 26263; HLA-C*03:03; GLYATL3; ENSG00000203972; CTA
VHFSPVSSL

SEQ ID NO: 26264 - protein, 9 aa, Homo sapiens
  misc_feature: Table A; Target 26264; HLA-C*03:04; GLYATL3; ENSG00000203972; CTA
VHFSPVSSL

SEQ ID NO: 26265 - protein, 9 aa, Homo sapiens
  misc_feature: Table A; Target 26265; HLA-C*05:01; GLYATL3; ENSG00000203972; CTA
VHFSPVSSL

SEQ ID NO: 26266 - protein, 9 aa, Homo sapiens
  misc_feature: Table A; Target 26266; HLA-A*01:01; GLYATL3; ENSG00000203972; CTA
VLDDNTASI

SEQ ID NO: 26267 - protein, 9 aa, Homo sapiens
  misc_feature: Table A; Target 26267; HLA-A*02:01; GLYATL3; ENSG00000203972; CTA
VLDDNTASI

SEQ ID NO: 26268 - protein, 9 aa, Homo sapiens
  misc_feature: Table A; Target 26268; HLA-A*02:03; GLYATL3; ENSG00000203972; CTA
VLDDNTASI

SEQ ID NO: 26269 - protein, 9 aa, Homo sapiens
  misc_feature: Table A; Target 26269; HLA-A*02:07; GLYATL3; ENSG00000203972; CTA
VLDDNTASI

SEQ ID NO: 26270 - protein, 9 aa, Homo sapiens
  misc_feature: Table A; Target 26270; HLA-A*30:01; GLYATL3; ENSG00000203972; CTA
VLDDNTASI

SEQ ID NO: 26271 - protein, 9 aa, Homo sapiens
  misc_feature: Table A; Target 26271; HLA-A*32:01; GLYATL3; ENSG00000203972; CTA
VLDDNTASI

SEQ ID NO: 26272 - protein, 9 aa, Homo sapiens
  misc_feature: Table A; Target 26272; HLA-B*13:02; GLYATL3; ENSG00000203972; CTA
VLDDNTASI

SEQ ID NO: 26273 - protein, 9 aa, Homo sapiens
  misc_feature: Table A; Target 26273; HLA-B*38:01; GLYATL3; ENSG00000203972; CTA
VLDDNTASI

SEQ ID NO: 26274 - protein, 9 aa, Homo sapiens
  misc_feature: Table A; Target 26274; HLA-B*39:01; GLYATL3; ENSG00000203972; CTA
VLDDNTASI

SEQ ID NO: 26275 - protein, 9 aa, Homo sapiens
  misc_feature: Table A; Target 26275; HLA-B*55:01; GLYATL3; ENSG00000203972; CTA
VLDDNTASI

SEQ ID NO: 26276 - protein, 9 aa, Homo sapiens
  misc_feature: Table A; Target 26276; HLA-C*04:01; GLYATL3; ENSG00000203972; CTA
VLDDNTASI

SEQ ID NO: 26277 - protein, 9 aa, Homo sapiens
  misc_feature: Table A; Target 26277; HLA-C*05:01; GLYATL3; ENSG00000203972; CTA
VLDDNTASI

SEQ ID NO: 26278 - protein, 11 aa, Homo sapiens
  misc_feature: Table A; Target 26278; HLA-A*02:01; GLYATL3; ENSG00000203972; CTA
VLDDNTASISL

SEQ ID NO: 26279 - protein, 11 aa, Homo sapiens
  misc_feature: Table A; Target 26279; HLA-A*02:07; GLYATL3; ENSG00000203972; CTA
VLDDNTASISL

SEQ ID NO: 26280 - protein, 11 aa, Homo sapiens
  misc_feature: Table A; Target 26280; HLA-B*38:01; GLYATL3; ENSG00000203972; CTA
VLDDNTASISL

SEQ ID NO: 26281 - protein, 11 aa, Homo sapiens
  misc_feature: Table A; Target 26281; HLA-B*55:01; GLYATL3; ENSG00000203972; CTA
VLDDNTASISL

SEQ ID NO: 26282 - protein, 11 aa, Homo sapiens
  misc_feature: Table A; Target 26282; HLA-C*05:01; GLYATL3; ENSG00000203972; CTA
VLDDNTASISL

SEQ ID NO: 26283 - protein, 11 aa, Homo sapiens
  misc_feature: Table A; Target 26283; HLA-A*02:01; GLYATL3; ENSG00000203972; CTA
VLDSWPDFKAV

SEQ ID NO: 26284 - protein, 11 aa, Homo sapiens
  misc_feature: Table A; Target 26284; HLA-A*02:07; GLYATL3; ENSG00000203972; CTA
VLDSWPDFKAV

SEQ ID NO: 26285 - protein, 10 aa, Homo sapiens
  misc_feature: Table A; Target 26285; HLA-A*32:01; GLYATL3; ENSG00000203972; CTA
VMNINRGNPF

SEQ ID NO: 26286 - protein, 10 aa, Homo sapiens
  misc_feature: Table A; Target 26286; HLA-B*46:01; GLYATL3; ENSG00000203972; CTA
VMNINRGNPF

SEQ ID NO: 26287 - protein, 10 aa, Homo sapiens
  misc_feature: Table A; Target 26287; HLA-C*16:01; GLYATL3; ENSG00000203972; CTA
VMNINRGNPF

SEQ ID NO: 26288 - protein, 9 aa, Homo sapiens
  misc_feature: Table A; Target 26288; HLA-A*03:01; GLYATL3; ENSG00000203972; CTA
VSKAVANSK

SEQ ID NO: 26289 - protein, 9 aa, Homo sapiens
  misc_feature: Table A; Target 26289; HLA-A*03:02; GLYATL3; ENSG00000203972; CTA
VSKAVANSK

SEQ ID NO: 26290 - protein, 9 aa, Homo sapiens
  misc_feature: Table A; Target 26290; HLA-A*31:01; GLYATL3; ENSG00000203972; CTA
VSKAVANSK

SEQ ID NO: 26291 - protein, 9 aa, Homo sapiens
  misc_feature: Table A; Target 26291; HLA-B*46:01; GLYATL3; ENSG00000203972; CTA
VSKAVANSK

SEQ ID NO: 26292 - protein, 9 aa, Homo sapiens
  misc_feature: Table A; Target 26292; HLA-B*58:01; GLYATL3; ENSG00000203972; CTA
VSKAVANSK

SEQ ID NO: 26293 - protein, 9 aa, Homo sapiens
  misc_feature: Table A; Target 26293; HLA-A*32:01; GLYATL3; ENSG00000203972; CTA
VSSLPDTSF

SEQ ID NO: 26294 - protein, 9 aa, Homo sapiens
  misc_feature: Table A; Target 26294; HLA-B*15:01; GLYATL3; ENSG00000203972; CTA
VSSLPDTSF

SEQ ID NO: 26295 - protein, 9 aa, Homo sapiens
  misc_feature: Table A; Target 26295; HLA-B*46:01; GLYATL3; ENSG00000203972; CTA
VSSLPDTSF

SEQ ID NO: 26296 - protein, 9 aa, Homo sapiens
  misc_feature: Table A; Target 26296; HLA-B*58:01; GLYATL3; ENSG00000203972; CTA
VSSLPDTSF

SEQ ID NO: 26297 - protein, 9 aa, Homo sapiens
  misc_feature: Table A; Target 26297; HLA-C*03:03; GLYATL3; ENSG00000203972; CTA
VSSLPDTSF

SEQ ID NO: 26298 - protein, 9 aa, Homo sapiens
  misc_feature: Table A; Target 26298; HLA-C*03:04; GLYATL3; ENSG00000203972; CTA
VSSLPDTSF

SEQ ID NO: 26299 - protein, 9 aa, Homo sapiens
  misc_feature: Table A; Target 26299; HLA-C*05:01; GLYATL3; ENSG00000203972; CTA
VSSLPDTSF

SEQ ID NO: 26300 - protein, 9 aa, Homo sapiens
  misc_feature: Table A; Target 26300; HLA-C*16:01; GLYATL3; ENSG00000203972; CTA
VSSLPDTSF

SEQ ID NO: 26301 - protein, 11 aa, Homo sapiens
  misc_feature: Table A; Target 26301; HLA-A*11:01; GLYATL3; ENSG00000203972; CTA
VSSLPDTSFLK

SEQ ID NO: 26302 - protein, 8 aa, Homo sapiens
  misc_feature: Table A; Target 26302; HLA-A*23:01; GLYATL3; ENSG00000203972; CTA
VYGAVMNI

SEQ ID NO: 26303 - protein, 8 aa, Homo sapiens
  misc_feature: Table A; Target 26303; HLA-A*24:02; GLYATL3; ENSG00000203972; CTA
VYGAVMNI

SEQ ID NO: 26304 - protein, 8 aa, Homo sapiens
  misc_feature: Table A; Target 26304; HLA-A*32:01; GLYATL3; ENSG00000203972; CTA
VYGAVMNI

SEQ ID NO: 26305 - protein, 8 aa, Homo sapiens
  misc_feature: Table A; Target 26305; HLA-C*06:02; GLYATL3; ENSG00000203972; CTA
VYGAVMNI

SEQ ID NO: 26306 - protein, 8 aa, Homo sapiens
  misc_feature: Table A; Target 26306; HLA-C*07:01; GLYATL3; ENSG00000203972; CTA
VYGAVMNI

SEQ ID NO: 26307 - protein, 8 aa, Homo sapiens
  misc_feature: Table A; Target 26307; HLA-C*07:02; GLYATL3; ENSG00000203972; CTA
VYGAVMNI

SEQ ID NO: 26308 - protein, 8 aa, Homo sapiens
  misc_feature: Table A; Target 26308; HLA-C*14:02; GLYATL3; ENSG00000203972; CTA
VYGAVMNI

SEQ ID NO: 26309 - protein, 10 aa, Homo sapiens
  misc_feature: Table A; Target 26309; HLA-A*31:01; GLYATL3; ENSG00000203972; CTA
VYGAVMNINR

SEQ ID NO: 26310 - protein, 10 aa, Homo sapiens
  misc_feature: Table A; Target 26310; HLA-A*33:01; GLYATL3; ENSG00000203972; CTA
VYGAVMNINR

SEQ ID NO: 26311 - protein, 10 aa, Homo sapiens
  misc_feature: Table A; Target 26311; HLA-A*33:03; GLYATL3; ENSG00000203972; CTA
VYGAVMNINR

SEQ ID NO: 26312 - protein, 10 aa, Homo sapiens
  misc_feature: Table A; Target 26312; HLA-B*27:02; GLYATL3; ENSG00000203972; CTA
VYGAVMNINR

SEQ ID NO: 26313 - protein, 8 aa, Homo sapiens
  misc_feature: Table A; Target 26313; HLA-B*08:01; GLYATL3; ENSG00000203972; CTA
WPDFKAVI

SEQ ID NO: 26314 - protein, 9 aa, Homo sapiens
  misc_feature: Table A; Target 26314; HLA-C*07:01; GLYATL3; ENSG00000203972; CTA
YDVSKAVAN

SEQ ID NO: 26315 - protein, 9 aa, Homo sapiens
  misc_feature: Table A; Target 26315; HLA-A*33:03; GLYATL3; ENSG00000203972; CTA
YGAVMNINR

SEQ ID NO: 26316 - protein, 9 aa, Homo sapiens
  misc_feature: Table A; Target 26316; HLA-A*68:01; GLYATL3; ENSG00000203972; CTA
YGAVMNINR

SEQ ID NO: 26317 - protein, 9 aa, Homo sapiens
  misc_feature: Table A; Target 26317; HLA-B*27:02; GLYATL3; ENSG00000203972; CTA
YGAVMNINR

SEQ ID NO: 26318 - protein, 9 aa, Homo sapiens
  misc_feature: Table A; Target 26318; HLA-C*07:06; GLYATL3; ENSG00000203972; CTA
YGAVMNINR

SEQ ID NO: 26319 - protein, 9 aa, Homo sapiens
  misc_feature: Table A; Target 26319; HLA-A*25:01; GLYATL3; ENSG00000203972; CTA
YIANLISCF

SEQ ID NO: 26320 - protein, 9 aa, Homo sapiens
  misc_feature: Table A; Target 26320; HLA-A*26:01; GLYATL3; ENSG00000203972; CTA
YIANLISCF

SEQ ID NO: 26321 - protein, 9 aa, Homo sapiens
  misc_feature: Table A; Target 26321; HLA-B*15:01; GLYATL3; ENSG00000203972; CTA
YIANLISCF

SEQ ID NO: 26322 - protein, 9 aa, Homo sapiens
  misc_feature: Table A; Target 26322; HLA-B*46:01; GLYATL3; ENSG00000203972; CTA
YIANLISCF

SEQ ID NO: 26323 - protein, 9 aa, Homo sapiens
  misc_feature: Table A; Target 26323; HLA-C*02:02; GLYATL3; ENSG00000203972; CTA
YIANLISCF

SEQ ID NO: 26324 - protein, 9 aa, Homo sapiens
  misc_feature: Table A; Target 26324; HLA-C*07:04; GLYATL3; ENSG00000203972; CTA
YIANLISCF

SEQ ID NO: 26325 - protein, 9 aa, Homo sapiens
  misc_feature: Table A; Target 26325; HLA-A*01:01; GLYATL3; ENSG00000203972; CTA
YTNAYAVFY

SEQ ID NO: 26326 - protein, 9 aa, Homo sapiens
  misc_feature: Table A; Target 26326; HLA-A*03:01; GLYATL3; ENSG00000203972; CTA
YTNAYAVFY

SEQ ID NO: 26327 - protein, 9 aa, Homo sapiens
  misc_feature: Table A; Target 26327; HLA-A*11:01; GLYATL3; ENSG00000203972; CTA
YTNAYAVFY

SEQ ID NO: 26328 - protein, 9 aa, Homo sapiens
  misc_feature: Table A; Target 26328; HLA-A*26:01; GLYATL3; ENSG00000203972; CTA
YTNAYAVFY

SEQ ID NO: 26329 - protein, 9 aa, Homo sapiens
  misc_feature: Table A; Target 26329; HLA-A*29:02; GLYATL3; ENSG00000203972; CTA
YTNAYAVFY

SEQ ID NO: 26330 - protein, 9 aa, Homo sapiens
  misc_feature: Table A; Target 26330; HLA-A*30:02; GLYATL3; ENSG00000203972; CTA
YTNAYAVFY

SEQ ID NO: 26331 - protein, 9 aa, Homo sapiens
  misc_feature: Table A; Target 26331; HLA-A*32:01; GLYATL3; ENSG00000203972; CTA
YTNAYAVFY

SEQ ID NO: 26332 - protein, 9 aa, Homo sapiens
  misc_feature: Table A; Target 26332; HLA-A*33:01; GLYATL3; ENSG00000203972; CTA
YTNAYAVFY

SEQ ID NO: 26333 - protein, 9 aa, Homo sapiens
  misc_feature: Table A; Target 26333; HLA-B*35:01; GLYATL3; ENSG00000203972; CTA
YTNAYAVFY

SEQ ID NO: 26334 - protein, 9 aa, Homo sapiens
  misc_feature: Table A; Target 26334; HLA-B*57:01; GLYATL3; ENSG00000203972; CTA
YTNAYAVFY

SEQ ID NO: 26335 - protein, 9 aa, Homo sapiens
  misc_feature: Table A; Target 26335; HLA-C*02:02; GLYATL3; ENSG00000203972; CTA
YTNAYAVFY

SEQ ID NO: 26336 - protein, 9 aa, Homo sapiens
  misc_feature: Table A; Target 26336; HLA-C*07:01; GLYATL3; ENSG00000203972; CTA
YTNAYAVFY

SEQ ID NO: 26337 - protein, 9 aa, Homo sapiens
  misc_feature: Table A; Target 26337; HLA-C*07:04; GLYATL3; ENSG00000203972; CTA
YTNAYAVFY

SEQ ID NO: 26338 - protein, 9 aa, Homo sapiens
  misc_feature: Table A; Target 26338; HLA-C*12:03; GLYATL3; ENSG00000203972; CTA
YTNAYAVFY

SEQ ID NO: 26339 - protein, 9 aa, Homo sapiens
  misc_feature: Table A; Target 26339; HLA-C*16:02; GPR143; ENSG00000101850; TAA
AAEGAHPSP

SEQ ID NO: 26340 - protein, 10 aa, Homo sapiens
  misc_feature: Table A; Target 26340; HLA-B*40:01; GPR143; ENSG00000101850; TAA
AAEGAHPSPL

SEQ ID NO: 26341 - protein, 10 aa, Homo sapiens
  misc_feature: Table A; Target 26341; HLA-C*03:03; GPR143; ENSG00000101850; TAA
AAEGAHPSPL

SEQ ID NO: 26342 - protein, 10 aa, Homo sapiens
  misc_feature: Table A; Target 26342; HLA-C*03:04; GPR143; ENSG00000101850; TAA
AAEGAHPSPL

SEQ ID NO: 26343 - protein, 10 aa, Homo sapiens
  misc_feature: Table A; Target 26343; HLA-C*05:01; GPR143; ENSG00000101850; TAA
AAEGAHPSPL

SEQ ID NO: 26344 - protein, 10 aa, Homo sapiens
  misc_feature: Table A; Target 26344; HLA-C*07:04; GPR143; ENSG00000101850; TAA
AAEGAHPSPL

SEQ ID NO: 26345 - protein, 9 aa, Homo sapiens
  misc_feature: Table A; Target 26345; HLA-B*07:02; GPR143; ENSG00000101850; TAA
AAFCVGSAM

SEQ ID NO: 26346 - protein, 9 aa, Homo sapiens
  misc_feature: Table A; Target 26346; HLA-B*15:03; GPR143; ENSG00000101850; TAA
AAFCVGSAM

SEQ ID NO: 26347 - protein, 9 aa, Homo sapiens
  misc_feature: Table A; Target 26347; HLA-B*46:01; GPR143; ENSG00000101850; TAA
AAFCVGSAM

SEQ ID NO: 26348 - protein, 9 aa, Homo sapiens
  misc_feature: Table A; Target 26348; HLA-C*01:02; GPR143; ENSG00000101850; TAA
AAFCVGSAM

SEQ ID NO: 26349 - protein, 9 aa, Homo sapiens
  misc_feature: Table A; Target 26349; HLA-C*02:02; GPR143; ENSG00000101850; TAA
AAFCVGSAM

SEQ ID NO: 26350 - protein, 9 aa, Homo sapiens
  misc_feature: Table A; Target 26350; HLA-C*03:03; GPR143; ENSG00000101850; TAA
AAFCVGSAM

SEQ ID NO: 26351 - protein, 9 aa, Homo sapiens
  misc_feature: Table A; Target 26351; HLA-C*03:04; GPR143; ENSG00000101850; TAA
AAFCVGSAM

SEQ ID NO: 26352 - protein, 9 aa, Homo sapiens
  misc_feature: Table A; Target 26352; HLA-C*16:01; GPR143; ENSG00000101850; TAA
AAFCVGSAM

SEQ ID NO: 26353 - protein, 9 aa, Homo sapiens
  misc_feature: Table A; Target 26353; HLA-C*16:04; GPR143; ENSG00000101850; TAA
AAFCVGSAM

SEQ ID NO: 26354 - protein, 9 aa, Homo sapiens
  misc_feature: Table A; Target 26354; HLA-A*02:01; GPR143; ENSG00000101850; TAA
AAMLYYPSV

SEQ ID NO: 26355 - protein, 9 aa, Homo sapiens
  misc_feature: Table A; Target 26355; HLA-A*02:04; GPR143; ENSG00000101850; TAA
AAMLYYPSV

SEQ ID NO: 26356 - protein, 9 aa, Homo sapiens
  misc_feature: Table A; Target 26356; HLA-A*02:07; GPR143; ENSG00000101850; TAA
AAMLYYPSV

SEQ ID NO: 26357 - protein, 9 aa, Homo sapiens
  misc_feature: Table A; Target 26357; HLA-B*13:02; GPR143; ENSG00000101850; TAA
AAMLYYPSV

SEQ ID NO: 26358 - protein, 9 aa, Homo sapiens
  misc_feature: Table A; Target 26358; HLA-B*46:01; GPR143; ENSG00000101850; TAA
AAMLYYPSV

SEQ ID NO: 26359 - protein, 9 aa, Homo sapiens
  misc_feature: Table A; Target 26359; HLA-B*51:01; GPR143; ENSG00000101850; TAA
AAMLYYPSV

SEQ ID NO: 26360 - protein, 9 aa, Homo sapiens
  misc_feature: Table A; Target 26360; HLA-B*54:01; GPR143; ENSG00000101850; TAA
AAMLYYPSV

SEQ ID NO: 26361 - protein, 9 aa, Homo sapiens
  misc_feature: Table A; Target 26361; HLA-B*56:01; GPR143; ENSG00000101850; TAA
AAMLYYPSV

SEQ ID NO: 26362 - protein, 9 aa, Homo sapiens
  misc_feature: Table A; Target 26362; HLA-C*01:02; GPR143; ENSG00000101850; TAA
AAMLYYPSV

SEQ ID NO: 26363 - protein, 9 aa, Homo sapiens
  misc_feature: Table A; Target 26363; HLA-C*02:02; GPR143; ENSG00000101850; TAA
AAMLYYPSV

SEQ ID NO: 26364 - protein, 9 aa, Homo sapiens
  misc_feature: Table A; Target 26364; HLA-C*03:04; GPR143; ENSG00000101850; TAA
AAMLYYPSV

SEQ ID NO: 26365 - protein, 9 aa, Homo sapiens
  misc_feature: Table A; Target 26365; HLA-C*16:04; GPR143; ENSG00000101850; TAA
AAMLYYPSV

SEQ ID NO: 26366 - protein, 11 aa, Homo sapiens
  misc_feature: Table A; Target 26366; HLA-A*11:01; GPR143; ENSG00000101850; TAA
AAMLYYPSVSR

SEQ ID NO: 26367 - protein, 11 aa, Homo sapiens
  misc_feature: Table A; Target 26367; HLA-A*31:01; GPR143; ENSG00000101850; TAA
AAMLYYPSVSR

SEQ ID NO: 26368 - protein, 9 aa, Homo sapiens
  misc_feature: Table A; Target 26368; HLA-A*23:01; GPR143; ENSG00000101850; TAA
AATQLVLSF

SEQ ID NO: 26369 - protein, 9 aa, Homo sapiens
  misc_feature: Table A; Target 26369; HLA-A*24:02; GPR143; ENSG00000101850; TAA
AATQLVLSF

SEQ ID NO: 26370 - protein, 9 aa, Homo sapiens
  misc_feature: Table A; Target 26370; HLA-A*25:01; GPR143; ENSG00000101850; TAA
AATQLVLSF

SEQ ID NO: 26371 - protein, 9 aa, Homo sapiens
  misc_feature: Table A; Target 26371; HLA-A*26:01; GPR143; ENSG00000101850; TAA
AATQLVLSF

SEQ ID NO: 26372 - protein, 9 aa, Homo sapiens
  misc_feature: Table A; Target 26372; HLA-A*29:02; GPR143; ENSG00000101850; TAA
AATQLVLSF

SEQ ID NO: 26373 - protein, 9 aa, Homo sapiens
  misc_feature: Table A; Target 26373; HLA-A*30:02; GPR143; ENSG00000101850; TAA
AATQLVLSF

SEQ ID NO: 26374 - protein, 9 aa, Homo sapiens
  misc_feature: Table A; Target 26374; HLA-A*32:01; GPR143; ENSG00000101850; TAA
AATQLVLSF

SEQ ID NO: 26375 - protein, 9 aa, Homo sapiens
  misc_feature: Table A; Target 26375; HLA-B*15:01; GPR143; ENSG00000101850; TAA
AATQLVLSF

SEQ ID NO: 26376 - protein, 9 aa, Homo sapiens
  misc_feature: Table A; Target 26376; HLA-B*15:03; GPR143; ENSG00000101850; TAA
AATQLVLSF

SEQ ID NO: 26377 - protein, 9 aa, Homo sapiens
  misc_feature: Table A; Target 26377; HLA-B*27:02; GPR143; ENSG00000101850; TAA
AATQLVLSF

SEQ ID NO: 26378 - protein, 9 aa, Homo sapiens
  misc_feature: Table A; Target 26378; HLA-B*35:01; GPR143; ENSG00000101850; TAA
AATQLVLSF

SEQ ID NO: 26379 - protein, 9 aa, Homo sapiens
  misc_feature: Table A; Target 26379; HLA-B*37:01; GPR143; ENSG00000101850; TAA
AATQLVLSF

SEQ ID NO: 26380 - protein, 9 aa, Homo sapiens
  misc_feature: Table A; Target 26380; HLA-B*44:02; GPR143; ENSG00000101850; TAA
AATQLVLSF

SEQ ID NO: 26381 - protein, 9 aa, Homo sapiens
  misc_feature: Table A; Target 26381; HLA-B*44:03; GPR143; ENSG00000101850; TAA
AATQLVLSF

SEQ ID NO: 26382 - protein, 9 aa, Homo sapiens
  misc_feature: Table A; Target 26382; HLA-B*46:01; GPR143; ENSG00000101850; TAA
AATQLVLSF

SEQ ID NO: 26383 - protein, 9 aa, Homo sapiens
  misc_feature: Table A; Target 26383; HLA-B*57:01; GPR143; ENSG00000101850; TAA
AATQLVLSF

SEQ ID NO: 26384 - protein, 9 aa, Homo sapiens
  misc_feature: Table A; Target 26384; HLA-B*58:01; GPR143; ENSG00000101850; TAA
AATQLVLSF

SEQ ID NO: 26385 - protein, 9 aa, Homo sapiens
  misc_feature: Table A; Target 26385; HLA-C*02:02; GPR143; ENSG00000101850; TAA
AATQLVLSF

SEQ ID NO: 26386 - protein, 9 aa, Homo sapiens
  misc_feature: Table A; Target 26386; HLA-C*03:03; GPR143; ENSG00000101850; TAA
AATQLVLSF

SEQ ID NO: 26387 - protein, 9 aa, Homo sapiens
  misc_feature: Table A; Target 26387; HLA-C*03:04; GPR143; ENSG00000101850; TAA
AATQLVLSF

SEQ ID NO: 26388 - protein, 9 aa, Homo sapiens
  misc_feature: Table A; Target 26388; HLA-C*07:06; GPR143; ENSG00000101850; TAA
AATQLVLSF

SEQ ID NO: 26389 - protein, 9 aa, Homo sapiens
  misc_feature: Table A; Target 26389; HLA-C*12:03; GPR143; ENSG00000101850; TAA
AATQLVLSF

SEQ ID NO: 26390 - protein, 9 aa, Homo sapiens
  misc_feature: Table A; Target 26390; HLA-C*16:01; GPR143; ENSG00000101850; TAA
AATQLVLSF

SEQ ID NO: 26391 - protein, 9 aa, Homo sapiens
  misc_feature: Table A; Target 26391; HLA-C*16:02; GPR143; ENSG00000101850; TAA
AATQLVLSF

SEQ ID NO: 26392 - protein, 9 aa, Homo sapiens
  misc_feature: Table A; Target 26392; HLA-C*16:04; GPR143; ENSG00000101850; TAA
AATQLVLSF

SEQ ID NO: 26393 - protein, 9 aa, Homo sapiens
  misc_feature: Table A; Target 26393; HLA-A*30:01; GPR143; ENSG00000101850; TAA
AEGAHPSPL

SEQ ID NO: 26394 - protein, 9 aa, Homo sapiens
  misc_feature: Table A; Target 26394; HLA-B*07:02; GPR143; ENSG00000101850; TAA
AEGAHPSPL

SEQ ID NO: 26395 - protein, 9 aa, Homo sapiens
  misc_feature: Table A; Target 26395; HLA-B*27:02; GPR143; ENSG00000101850; TAA
AEGAHPSPL

SEQ ID NO: 26396 - protein, 9 aa, Homo sapiens
  misc_feature: Table A; Target 26396; HLA-B*37:01; GPR143; ENSG00000101850; TAA
AEGAHPSPL

SEQ ID NO: 26397 - protein, 9 aa, Homo sapiens
  misc_feature: Table A; Target 26397; HLA-B*40:01; GPR143; ENSG00000101850; TAA
AEGAHPSPL

SEQ ID NO: 26398 - protein, 9 aa, Homo sapiens
  misc_feature: Table A; Target 26398; HLA-B*40:02; GPR143; ENSG00000101850; TAA
AEGAHPSPL

SEQ ID NO: 26399 - protein, 9 aa, Homo sapiens
  misc_feature: Table A; Target 26399; HLA-B*44:02; GPR143; ENSG00000101850; TAA
AEGAHPSPL

SEQ ID NO: 26400 - protein, 9 aa, Homo sapiens
  misc_feature: Table A; Target 26400; HLA-B*44:03; GPR143; ENSG00000101850; TAA
AEGAHPSPL

SEQ ID NO: 26401 - protein, 9 aa, Homo sapiens
  misc_feature: Table A; Target 26401; HLA-B*49:01; GPR143; ENSG00000101850; TAA
AEGAHPSPL

SEQ ID NO: 26402 - protein, 9 aa, Homo sapiens
  misc_feature: Table A; Target 26402; HLA-C*02:02; GPR143; ENSG00000101850; TAA
AEGAHPSPL

SEQ ID NO: 26403 - protein, 9 aa, Homo sapiens
  misc_feature: Table A; Target 26403; HLA-C*07:02; GPR143; ENSG00000101850; TAA
AEGAHPSPL

SEQ ID NO: 26404 - protein, 9 aa, Homo sapiens
  misc_feature: Table A; Target 26404; HLA-C*07:04; GPR143; ENSG00000101850; TAA
AEGAHPSPL

SEQ ID NO: 26405 - protein, 9 aa, Homo sapiens
  misc_feature: Table A; Target 26405; HLA-C*12:03; GPR143; ENSG00000101850; TAA
AEGAHPSPL

SEQ ID NO: 26406 - protein, 9 aa, Homo sapiens
  misc_feature: Table A; Target 26406; HLA-C*16:04; GPR143; ENSG00000101850; TAA
AEGAHPSPL

SEQ ID NO: 26407 - protein, 10 aa, Homo sapiens
  misc_feature: Table A; Target 26407; HLA-A*30:01; GPR143; ENSG00000101850; TAA
AEGAHPSPLM

SEQ ID NO: 26408 - protein, 10 aa, Homo sapiens
  misc_feature: Table A; Target 26408; HLA-B*27:02; GPR143; ENSG00000101850; TAA
AEGAHPSPLM

SEQ ID NO: 26409 - protein, 10 aa, Homo sapiens
  misc_feature: Table A; Target 26409; HLA-B*40:01; GPR143; ENSG00000101850; TAA
AEGAHPSPLM

SEQ ID NO: 26410 - protein, 10 aa, Homo sapiens
  misc_feature: Table A; Target 26410; HLA-B*40:02; GPR143; ENSG00000101850; TAA
AEGAHPSPLM

SEQ ID NO: 26411 - protein, 10 aa, Homo sapiens
  misc_feature: Table A; Target 26411; HLA-B*44:02; GPR143; ENSG00000101850; TAA
AEGAHPSPLM

SEQ ID NO: 26412 - protein, 10 aa, Homo sapiens
  misc_feature: Table A; Target 26412; HLA-B*44:03; GPR143; ENSG00000101850; TAA
AEGAHPSPLM

SEQ ID NO: 26413 - protein, 10 aa, Homo sapiens
  misc_feature: Table A; Target 26413; HLA-B*49:01; GPR143; ENSG00000101850; TAA
AEGAHPSPLM

SEQ ID NO: 26414 - protein, 10 aa, Homo sapiens
  misc_feature: Table A; Target 26414; HLA-C*16:04; GPR143; ENSG00000101850; TAA
AEGAHPSPLM

SEQ ID NO: 26415 - protein, 8 aa, Homo sapiens
  misc_feature: Table A; Target 26415; HLA-C*14:02; GPR143; ENSG00000101850; TAA
AFCVGSAM

SEQ ID NO: 26416 - protein, 9 aa, Homo sapiens
  misc_feature: Table A; Target 26416; HLA-A*01:01; GPR143; ENSG00000101850; TAA
AGLSTILLY

SEQ ID NO: 26417 - protein, 9 aa, Homo sapiens
  misc_feature: Table A; Target 26417; HLA-A*03:01; GPR143; ENSG00000101850; TAA
AGLSTILLY

SEQ ID NO: 26418 - protein, 9 aa, Homo sapiens
  misc_feature: Table A; Target 26418; HLA-A*03:02; GPR143; ENSG00000101850; TAA
AGLSTILLY

SEQ ID NO: 26419 - protein, 9 aa, Homo sapiens
  misc_feature: Table A; Target 26419; HLA-A*11:01; GPR143; ENSG00000101850; TAA
AGLSTILLY

SEQ ID NO: 26420 - protein, 9 aa, Homo sapiens
  misc_feature: Table A; Target 26420; HLA-A*29:02; GPR143; ENSG00000101850; TAA
AGLSTILLY

SEQ ID NO: 26421 - protein, 9 aa, Homo sapiens
  misc_feature: Table A; Target 26421; HLA-A*30:02; GPR143; ENSG00000101850; TAA
AGLSTILLY

SEQ ID NO: 26422 - protein, 9 aa, Homo sapiens
  misc_feature: Table A; Target 26422; HLA-B*15:01; GPR143; ENSG00000101850; TAA
AGLSTILLY

SEQ ID NO: 26423 - protein, 9 aa, Homo sapiens
  misc_feature: Table A; Target 26423; HLA-B*15:03; GPR143; ENSG00000101850; TAA
AGLSTILLY

SEQ ID NO: 26424 - protein, 9 aa, Homo sapiens
  misc_feature: Table A; Target 26424; HLA-B*35:01; GPR143; ENSG00000101850; TAA
AGLSTILLY

SEQ ID NO: 26425 - protein, 9 aa, Homo sapiens
  misc_feature: Table A; Target 26425; HLA-B*44:02; GPR143; ENSG00000101850; TAA
AGLSTILLY

SEQ ID NO: 26426 - protein, 9 aa, Homo sapiens
  misc_feature: Table A; Target 26426; HLA-B*44:03; GPR143; ENSG00000101850; TAA
AGLSTILLY

SEQ ID NO: 26427 - protein, 9 aa, Homo sapiens
  misc_feature: Table A; Target 26427; HLA-B*46:01; GPR143; ENSG00000101850; TAA
AGLSTILLY

SEQ ID NO: 26428 - protein, 9 aa, Homo sapiens
  misc_feature: Table A; Target 26428; HLA-B*57:01; GPR143; ENSG00000101850; TAA
AGLSTILLY

SEQ ID NO: 26429 - protein, 9 aa, Homo sapiens
  misc_feature: Table A; Target 26429; HLA-B*58:01; GPR143; ENSG00000101850; TAA
AGLSTILLY

SEQ ID NO: 26430 - protein, 9 aa, Homo sapiens
  misc_feature: Table A; Target 26430; HLA-C*02:02; GPR143; ENSG00000101850; TAA
AGLSTILLY

SEQ ID NO: 26431 - protein, 9 aa, Homo sapiens
  misc_feature: Table A; Target 26431; HLA-C*07:01; GPR143; ENSG00000101850; TAA
AGLSTILLY

SEQ ID NO: 26432 - protein, 9 aa, Homo sapiens
  misc_feature: Table A; Target 26432; HLA-C*07:04; GPR143; ENSG00000101850; TAA
AGLSTILLY

SEQ ID NO: 26433 - protein, 9 aa, Homo sapiens
  misc_feature: Table A; Target 26433; HLA-C*12:03; GPR143; ENSG00000101850; TAA
AGLSTILLY

SEQ ID NO: 26434 - protein, 9 aa, Homo sapiens
  misc_feature: Table A; Target 26434; HLA-C*16:04; GPR143; ENSG00000101850; TAA
AGLSTILLY

SEQ ID NO: 26435 - protein, 9 aa, Homo sapiens
  misc_feature: Table A; Target 26435; HLA-A*26:01; GPR143; ENSG00000101850; TAA
AIPHYVTMY

SEQ ID NO: 26436 - protein, 9 aa, Homo sapiens
  misc_feature: Table A; Target 26436; HLA-A*29:02; GPR143; ENSG00000101850; TAA
AIPHYVTMY

SEQ ID NO: 26437 - protein, 9 aa, Homo sapiens
  misc_feature: Table A; Target 26437; HLA-B*15:01; GPR143; ENSG00000101850; TAA
AIPHYVTMY

SEQ ID NO: 26438 - protein, 9 aa, Homo sapiens
  misc_feature: Table A; Target 26438; HLA-B*46:01; GPR143; ENSG00000101850; TAA
AIPHYVTMY

SEQ ID NO: 26439 - protein, 9 aa, Homo sapiens
  misc_feature: Table A; Target 26439; HLA-C*07:04; GPR143; ENSG00000101850; TAA
AIPHYVTMY

SEQ ID NO: 26440 - protein, 8 aa, Homo sapiens
  misc_feature: Table A; Target 26440; HLA-A*02:01; GPR143; ENSG00000101850; TAA
ALGLLQLL

SEQ ID NO: 26441 - protein, 8 aa, Homo sapiens
  misc_feature: Table A; Target 26441; HLA-A*02:04; GPR143; ENSG00000101850; TAA
ALGLLQLL

SEQ ID NO: 26442 - protein, 8 aa, Homo sapiens
  misc_feature: Table A; Target 26442; HLA-C*01:02; GPR143; ENSG00000101850; TAA
ALPTHGDL

SEQ ID NO: 26443 - protein, 10 aa, Homo sapiens
  misc_feature: Table A; Target 26443; HLA-A*03:01; GPR143; ENSG00000101850; TAA
AMLYYPSVSR

SEQ ID NO: 26444 - protein, 10 aa, Homo sapiens
  misc_feature: Table A; Target 26444; HLA-A*31:01; GPR143; ENSG00000101850; TAA
AMLYYPSVSR

SEQ ID NO: 26445 - protein, 8 aa, Homo sapiens
  misc_feature: Table A; Target 26445; HLA-A*29:02; GPR143; ENSG00000101850; TAA
AMWIQLLY

SEQ ID NO: 26446 - protein, 8 aa, Homo sapiens
  misc_feature: Table A; Target 26446; HLA-A*02:03; GPR143; ENSG00000101850; TAA
ASGKVSQV

SEQ ID NO: 26447 - protein, 8 aa, Homo sapiens
  misc_feature: Table A; Target 26447; HLA-B*58:01; GPR143; ENSG00000101850; TAA
ASPRLGTF

SEQ ID NO: 26448 - protein, 8 aa, Homo sapiens
  misc_feature: Table A; Target 26448; HLA-C*01:02; GPR143; ENSG00000101850; TAA
ASPRLGTF

SEQ ID NO: 26449 - protein, 8 aa, Homo sapiens
  misc_feature: Table A; Target 26449; HLA-C*04:01; GPR143; ENSG00000101850; TAA
ASPRLGTF

SEQ ID NO: 26450 - protein, 8 aa, Homo sapiens
  misc_feature: Table A; Target 26450; HLA-B*37:01; GPR143; ENSG00000101850; TAA
ATQLVLSF

SEQ ID NO: 26451 - protein, 11 aa, Homo sapiens
  misc_feature: Table A; Target 26451; HLA-A*11:01; GPR143; ENSG00000101850; TAA
ATQLVLSFQPR

SEQ ID NO: 26452 - protein, 11 aa, Homo sapiens
  misc_feature: Table A; Target 26452; HLA-A*31:01; GPR143; ENSG00000101850; TAA
ATQLVLSFQPR

SEQ ID NO: 26453 - protein, 11 aa, Homo sapiens
  misc_feature: Table A; Target 26453; HLA-A*33:01; GPR143; ENSG00000101850; TAA
ATQLVLSFQPR

SEQ ID NO: 26454 - protein, 9 aa, Homo sapiens
  misc_feature: Table A; Target 26454; HLA-A*03:01; GPR143; ENSG00000101850; TAA
ATSPPASVR

SEQ ID NO: 26455 - protein, 9 aa, Homo sapiens
  misc_feature: Table A; Target 26455; HLA-A*03:02; GPR143; ENSG00000101850; TAA
ATSPPASVR

SEQ ID NO: 26456 - protein, 9 aa, Homo sapiens
  misc_feature: Table A; Target 26456; HLA-A*11:01; GPR143; ENSG00000101850; TAA
ATSPPASVR

SEQ ID NO: 26457 - protein, 9 aa, Homo sapiens
  misc_feature: Table A; Target 26457; HLA-A*30:02; GPR143; ENSG00000101850; TAA
ATSPPASVR

SEQ ID NO: 26458 - protein, 9 aa, Homo sapiens
  misc_feature: Table A; Target 26458; HLA-A*31:01; GPR143; ENSG00000101850; TAA
ATSPPASVR

SEQ ID NO: 26459 - protein, 9 aa, Homo sapiens
  misc_feature: Table A; Target 26459; HLA-A*32:01; GPR143; ENSG00000101850; TAA
ATSPPASVR

SEQ ID NO: 26460 - protein, 9 aa, Homo sapiens
  misc_feature: Table A; Target 26460; HLA-A*33:01; GPR143; ENSG00000101850; TAA
ATSPPASVR

SEQ ID NO: 26461 - protein, 9 aa, Homo sapiens
  misc_feature: Table A; Target 26461; HLA-A*33:03; GPR143; ENSG00000101850; TAA
ATSPPASVR

SEQ ID NO: 26462 - protein, 9 aa, Homo sapiens
  misc_feature: Table A; Target 26462; HLA-A*68:01; GPR143; ENSG00000101850; TAA
ATSPPASVR

SEQ ID NO: 26463 - protein, 9 aa, Homo sapiens
  misc_feature: Table A; Target 26463; HLA-B*27:05; GPR143; ENSG00000101850; TAA
ATSPPASVR

SEQ ID NO: 26464 - protein, 9 aa, Homo sapiens
  misc_feature: Table A; Target 26464; HLA-C*07:06; GPR143; ENSG00000101850; TAA
ATSPPASVR

SEQ ID NO: 26465 - protein, 11 aa, Homo sapiens
  misc_feature: Table A; Target 26465; HLA-C*16:01; GPR143; ENSG00000101850; TAA
ATSPPASVRIL

SEQ ID NO: 26466 - protein, 11 aa, Homo sapiens
  misc_feature: Table A; Target 26466; HLA-C*16:02; GPR143; ENSG00000101850; TAA
ATSPPASVRIL

SEQ ID NO: 26467 - protein, 9 aa, Homo sapiens
  misc_feature: Table A; Target 26467; HLA-A*03:01; GPR143; ENSG00000101850; TAA
AVASLLKGR

SEQ ID NO: 26468 - protein, 9 aa, Homo sapiens
  misc_feature: Table A; Target 26468; HLA-A*03:02; GPR143; ENSG00000101850; TAA
AVASLLKGR

SEQ ID NO: 26469 - protein, 9 aa, Homo sapiens
  misc_feature: Table A; Target 26469; HLA-A*11:01; GPR143; ENSG00000101850; TAA
AVASLLKGR

SEQ ID NO: 26470 - protein, 9 aa, Homo sapiens
  misc_feature: Table A; Target 26470; HLA-A*31:01; GPR143; ENSG00000101850; TAA
AVASLLKGR

SEQ ID NO: 26471 - protein, 9 aa, Homo sapiens
  misc_feature: Table A; Target 26471; HLA-A*33:01; GPR143; ENSG00000101850; TAA
AVASLLKGR

SEQ ID NO: 26472 - protein, 9 aa, Homo sapiens
  misc_feature: Table A; Target 26472; HLA-A*33:03; GPR143; ENSG00000101850; TAA
AVASLLKGR

SEQ ID NO: 26473 - protein, 9 aa, Homo sapiens
  misc_feature: Table A; Target 26473; HLA-A*68:01; GPR143; ENSG00000101850; TAA
AVASLLKGR

SEQ ID NO: 26474 - protein, 9 aa, Homo sapiens
  misc_feature: Table A; Target 26474; HLA-C*07:06; GPR143; ENSG00000101850; TAA
AVASLLKGR

SEQ ID NO: 26475 - protein, 8 aa, Homo sapiens
  misc_feature: Table A; Target 26475; HLA-A*02:07; GPR143; ENSG00000101850; TAA
AVDAYLVI

SEQ ID NO: 26476 - protein, 8 aa, Homo sapiens
  misc_feature: Table A; Target 26476; HLA-B*13:02; GPR143; ENSG00000101850; TAA
AVDAYLVI

SEQ ID NO: 26477 - protein, 8 aa, Homo sapiens
  misc_feature: Table A; Target 26477; HLA-C*05:01; GPR143; ENSG00000101850; TAA
AVDAYLVI

SEQ ID NO: 26478 - protein, 9 aa, Homo sapiens
  misc_feature: Table A; Target 26478; HLA-A*03:01; GPR143; ENSG00000101850; TAA
AVDAYLVIR

SEQ ID NO: 26479 - protein, 9 aa, Homo sapiens
  misc_feature: Table A; Target 26479; HLA-A*03:02; GPR143; ENSG00000101850; TAA
AVDAYLVIR

SEQ ID NO: 26480 - protein, 9 aa, Homo sapiens
  misc_feature: Table A; Target 26480; HLA-A*11:01; GPR143; ENSG00000101850; TAA
AVDAYLVIR

SEQ ID NO: 26481 - protein, 9 aa, Homo sapiens
  misc_feature: Table A; Target 26481; HLA-A*31:01; GPR143; ENSG00000101850; TAA
AVDAYLVIR

SEQ ID NO: 26482 - protein, 9 aa, Homo sapiens
  misc_feature: Table A; Target 26482; HLA-A*33:01; GPR143; ENSG00000101850; TAA
AVDAYLVIR

SEQ ID NO: 26483 - protein, 9 aa, Homo sapiens
  misc_feature: Table A; Target 26483; HLA-A*33:03; GPR143; ENSG00000101850; TAA
AVDAYLVIR

SEQ ID NO: 26484 - protein, 10 aa, Homo sapiens
  misc_feature: Table A; Target 26484; HLA-A*31:01; GPR143; ENSG00000101850; TAA
AVDAYLVIRR

SEQ ID NO: 26485 - protein, 10 aa, Homo sapiens
  misc_feature: Table A; Target 26485; HLA-A*68:01; GPR143; ENSG00000101850; TAA
AVDAYLVIRR

SEQ ID NO: 26486 - protein, 8 aa, Homo sapiens
  misc_feature: Table A; Target 26486; HLA-B*57:01; GPR143; ENSG00000101850; TAA
AVIKIRFF

SEQ ID NO: 26487 - protein, 9 aa, Homo sapiens
  misc_feature: Table A; Target 26487; HLA-A*03:01; GPR143; ENSG00000101850; TAA
AVIKIRFFK

SEQ ID NO: 26488 - protein, 9 aa, Homo sapiens
  misc_feature: Table A; Target 26488; HLA-B*49:01; GPR143; ENSG00000101850; TAA
CERGLDHAI

SEQ ID NO: 26489 - protein, 10 aa, Homo sapiens
  misc_feature: Table A; Target 26489; HLA-B*07:02; GPR143; ENSG00000101850; TAA
CPTRDAATQL

SEQ ID NO: 26490 - protein, 10 aa, Homo sapiens
  misc_feature: Table A; Target 26490; HLA-C*07:02; GPR143; ENSG00000101850; TAA
CPTRDAATQL

SEQ ID NO: 26491 - protein, 9 aa, Homo sapiens
  misc_feature: Table A; Target 26491; HLA-A*11:01; GPR143; ENSG00000101850; TAA
CSLGFQSPR

SEQ ID NO: 26492 - protein, 9 aa, Homo sapiens
  misc_feature: Table A; Target 26492; HLA-A*31:01; GPR143; ENSG00000101850; TAA
CSLGFQSPR

SEQ ID NO: 26493 - protein, 9 aa, Homo sapiens
  misc_feature: Table A; Target 26493; HLA-A*01:01; GPR143; ENSG00000101850; TAA
CVEGAAMLY

SEQ ID NO: 26494 - protein, 9 aa, Homo sapiens
  misc_feature: Table A; Target 26494; HLA-A*03:02; GPR143; ENSG00000101850; TAA
CVEGAAMLY

SEQ ID NO: 26495 - protein, 9 aa, Homo sapiens
  misc_feature: Table A; Target 26495; HLA-A*11:01; GPR143; ENSG00000101850; TAA
CVEGAAMLY

SEQ ID NO: 26496 - protein, 9 aa, Homo sapiens
  misc_feature: Table A; Target 26496; HLA-A*26:01; GPR143; ENSG00000101850; TAA
CVEGAAMLY

SEQ ID NO: 26497 - protein, 9 aa, Homo sapiens
  misc_feature: Table A; Target 26497; HLA-A*29:02; GPR143; ENSG00000101850; TAA
CVEGAAMLY

SEQ ID NO: 26498 - protein, 9 aa, Homo sapiens
  misc_feature: Table A; Target 26498; HLA-A*30:02; GPR143; ENSG00000101850; TAA
CVEGAAMLY

SEQ ID NO: 26499 - protein, 9 aa, Homo sapiens
  misc_feature: Table A; Target 26499; HLA-B*15:01; GPR143; ENSG00000101850; TAA
CVEGAAMLY

SEQ ID NO: 26500 - protein, 9 aa, Homo sapiens
  misc_feature: Table A; Target 26500; HLA-B*15:03; GPR143; ENSG00000101850; TAA
CVEGAAMLY

SEQ ID NO: 26501 - protein, 9 aa, Homo sapiens
  misc_feature: Table A; Target 26501; HLA-B*35:01; GPR143; ENSG00000101850; TAA
CVEGAAMLY

SEQ ID NO: 26502 - protein, 9 aa, Homo sapiens
  misc_feature: Table A; Target 26502; HLA-C*01:02; GPR143; ENSG00000101850; TAA
CVEGAAMLY

SEQ ID NO: 26503 - protein, 9 aa, Homo sapiens
  misc_feature: Table A; Target 26503; HLA-C*03:03; GPR143; ENSG00000101850; TAA
CVEGAAMLY

SEQ ID NO: 26504 - protein, 9 aa, Homo sapiens
  misc_feature: Table A; Target 26504; HLA-C*07:01; GPR143; ENSG00000101850; TAA
CVEGAAMLY

SEQ ID NO: 26505 - protein, 9 aa, Homo sapiens
  misc_feature: Table A; Target 26505; HLA-C*07:04; GPR143; ENSG00000101850; TAA
CVEGAAMLY

SEQ ID NO: 26506 - protein, 9 aa, Homo sapiens
  misc_feature: Table A; Target 26506; HLA-C*12:03; GPR143; ENSG00000101850; TAA
CVEGAAMLY

SEQ ID NO: 26507 - protein, 9 aa, Homo sapiens
  misc_feature: Table A; Target 26507; HLA-C*14:02; GPR143; ENSG00000101850; TAA
CVEGAAMLY

SEQ ID NO: 26508 - protein, 9 aa, Homo sapiens
  misc_feature: Table A; Target 26508; HLA-C*16:02; GPR143; ENSG00000101850; TAA
CVEGAAMLY

SEQ ID NO: 26509 - protein, 10 aa, Homo sapiens
  misc_feature: Table A; Target 26509; HLA-A*01:01; GPR143; ENSG00000101850; TAA
CVEGAAMLYY

SEQ ID NO: 26510 - protein, 10 aa, Homo sapiens
  misc_feature: Table A; Target 26510; HLA-A*29:02; GPR143; ENSG00000101850; TAA
CVEGAAMLYY

SEQ ID NO: 26511 - protein, 10 aa, Homo sapiens
  misc_feature: Table A; Target 26511; HLA-A*30:02; GPR143; ENSG00000101850; TAA
CVEGAAMLYY

SEQ ID NO: 26512 - protein, 9 aa, Homo sapiens
  misc_feature: Table A; Target 26512; HLA-A*24:02; GPR143; ENSG00000101850; TAA
CYAVDAYLV

SEQ ID NO: 26513 - protein, 8 aa, Homo sapiens
  misc_feature: Table A; Target 26513; HLA-B*08:01; GPR143; ENSG00000101850; TAA
DAATQLVL

SEQ ID NO: 26514 - protein, 8 aa, Homo sapiens
  misc_feature: Table A; Target 26514; HLA-B*27:05; GPR143; ENSG00000101850; TAA
DAATQLVL

SEQ ID NO: 26515 - protein, 8 aa, Homo sapiens
  misc_feature: Table A; Target 26515; HLA-B*35:01; GPR143; ENSG00000101850; TAA
DAATQLVL

SEQ ID NO: 26516 - protein, 8 aa, Homo sapiens
  misc_feature: Table A; Target 26516; HLA-B*35:03; GPR143; ENSG00000101850; TAA
DAATQLVL

SEQ ID NO: 26517 - protein, 8 aa, Homo sapiens
  misc_feature: Table A; Target 26517; HLA-B*51:01; GPR143; ENSG00000101850; TAA
DAATQLVL

SEQ ID NO: 26518 - protein, 8 aa, Homo sapiens
  misc_feature: Table A; Target 26518; HLA-C*03:03; GPR143; ENSG00000101850; TAA
DAATQLVL

SEQ ID NO: 26519 - protein, 8 aa, Homo sapiens
  misc_feature: Table A; Target 26519; HLA-C*03:04; GPR143; ENSG00000101850; TAA
DAATQLVL

SEQ ID NO: 26520 - protein, 9 aa, Homo sapiens
  misc_feature: Table A; Target 26520; HLA-A*33:01; GPR143; ENSG00000101850; TAA
DAATQLVLS

SEQ ID NO: 26521 - protein, 10 aa, Homo sapiens
  misc_feature: Table A; Target 26521; HLA-A*25:01; GPR143; ENSG00000101850; TAA
DAATQLVLSF

SEQ ID NO: 26522 - protein, 10 aa, Homo sapiens
  misc_feature: Table A; Target 26522; HLA-A*26:01; GPR143; ENSG00000101850; TAA
DAATQLVLSF

SEQ ID NO: 26523 - protein, 10 aa, Homo sapiens
  misc_feature: Table A; Target 26523; HLA-A*68:01; GPR143; ENSG00000101850; TAA
DAATQLVLSF

SEQ ID NO: 26524 - protein, 10 aa, Homo sapiens
  misc_feature: Table A; Target 26524; HLA-B*18:01; GPR143; ENSG00000101850; TAA
DAATQLVLSF

SEQ ID NO: 26525 - protein, 10 aa, Homo sapiens
  misc_feature: Table A; Target 26525; HLA-B*35:01; GPR143; ENSG00000101850; TAA
DAATQLVLSF

SEQ ID NO: 26526 - protein, 10 aa, Homo sapiens
  misc_feature: Table A; Target 26526; HLA-C*07:06; GPR143; ENSG00000101850; TAA
DAATQLVLSF

SEQ ID NO: 26527 - protein, 9 aa, Homo sapiens
  misc_feature: Table A; Target 26527; HLA-A*33:01; GPR143; ENSG00000101850; TAA
DASTIEIHT

SEQ ID NO: 26528 - protein, 9 aa, Homo sapiens
  misc_feature: Table A; Target 26528; HLA-A*68:01; GPR143; ENSG00000101850; TAA
DASTIEIHT

SEQ ID NO: 26529 - protein, 9 aa, Homo sapiens
  misc_feature: Table A; Target 26529; HLA-A*68:02; GPR143; ENSG00000101850; TAA
DASTIEIHT

SEQ ID NO: 26530 - protein, 9 aa, Homo sapiens
  misc_feature: Table A; Target 26530; HLA-C*12:03; GPR143; ENSG00000101850; TAA
DASTIEIHT

SEQ ID NO: 26531 - protein, 10 aa, Homo sapiens
  misc_feature: Table A; Target 26531; HLA-A*25:01; GPR143; ENSG00000101850; TAA
DASTIEIHTA

SEQ ID NO: 26532 - protein, 10 aa, Homo sapiens
  misc_feature: Table A; Target 26532; HLA-A*33:01; GPR143; ENSG00000101850; TAA
DASTIEIHTA

SEQ ID NO: 26533 - protein, 10 aa, Homo sapiens
  misc_feature: Table A; Target 26533; HLA-A*33:03; GPR143; ENSG00000101850; TAA
DASTIEIHTA

SEQ ID NO: 26534 - protein, 10 aa, Homo sapiens
  misc_feature: Table A; Target 26534; HLA-A*68:01; GPR143; ENSG00000101850; TAA
DASTIEIHTA

SEQ ID NO: 26535 - protein, 10 aa, Homo sapiens
  misc_feature: Table A; Target 26535; HLA-B*54:01; GPR143; ENSG00000101850; TAA
DASTIEIHTA

SEQ ID NO: 26536 - protein, 10 aa, Homo sapiens
  misc_feature: Table A; Target 26536; HLA-C*07:06; GPR143; ENSG00000101850; TAA
DASTIEIHTA

SEQ ID NO: 26537 - protein, 11 aa, Homo sapiens
  misc_feature: Table A; Target 26537; HLA-A*33:01; GPR143; ENSG00000101850; TAA
DASTIEIHTAS

SEQ ID NO: 26538 - protein, 8 aa, Homo sapiens
  misc_feature: Table A; Target 26538; HLA-A*33:01; GPR143; ENSG00000101850; TAA
DAYLVIRR

SEQ ID NO: 26539 - protein, 8 aa, Homo sapiens
  misc_feature: Table A; Target 26539; HLA-A*33:03; GPR143; ENSG00000101850; TAA
DAYLVIRR

SEQ ID NO: 26540 - protein, 8 aa, Homo sapiens
  misc_feature: Table A; Target 26540; HLA-A*68:01; GPR143; ENSG00000101850; TAA
DAYLVIRR

SEQ ID NO: 26541 - protein, 8 aa, Homo sapiens
  misc_feature: Table A; Target 26541; HLA-B*08:01; GPR143; ENSG00000101850; TAA
DAYLVIRR

SEQ ID NO: 26542 - protein, 8 aa, Homo sapiens
  misc_feature: Table A; Target 26542; HLA-B*51:01; GPR143; ENSG00000101850; TAA
DAYLVIRR

SEQ ID NO: 26543 - protein, 8 aa, Homo sapiens
  misc_feature: Table A; Target 26543; HLA-B*54:01; GPR143; ENSG00000101850; TAA
DAYLVIRR

SEQ ID NO: 26544 - protein, 8 aa, Homo sapiens
  misc_feature: Table A; Target 26544; HLA-C*07:06; GPR143; ENSG00000101850; TAA
DAYLVIRR

SEQ ID NO: 26545 - protein, 9 aa, Homo sapiens
  misc_feature: Table A; Target 26545; HLA-A*33:01; GPR143; ENSG00000101850; TAA
DAYLVIRRS

SEQ ID NO: 26546 - protein, 9 aa, Homo sapiens
  misc_feature: Table A; Target 26546; HLA-B*51:01; GPR143; ENSG00000101850; TAA
DAYLVIRRS

SEQ ID NO: 26547 - protein, 10 aa, Homo sapiens
  misc_feature: Table A; Target 26547; HLA-B*51:01; GPR143; ENSG00000101850; TAA
DAYLVIRRSA

SEQ ID NO: 26548 - protein, 10 aa, Homo sapiens
  misc_feature: Table A; Target 26548; HLA-B*54:01; GPR143; ENSG00000101850; TAA
DAYLVIRRSA

SEQ ID NO: 26549 - protein, 8 aa, Homo sapiens
  misc_feature: Table A; Target 26549; HLA-B*18:01; GPR143; ENSG00000101850; TAA
DEALSMLS

SEQ ID NO: 26550 - protein, 9 aa, Homo sapiens
  misc_feature: Table A; Target 26550; HLA-B*18:01; GPR143; ENSG00000101850; TAA
DEALSMLSE

SEQ ID NO: 26551 - protein, 8 aa, Homo sapiens
  misc_feature: Table A; Target 26551; HLA-B*38:01; GPR143; ENSG00000101850; TAA
DHAIPHYV

SEQ ID NO: 26552 - protein, 8 aa, Homo sapiens
  misc_feature: Table A; Target 26552; HLA-B*39:01; GPR143; ENSG00000101850; TAA
DHAIPHYV

SEQ ID NO: 26553 - protein, 10 aa, Homo sapiens
  misc_feature: Table A; Target 26553; HLA-B*38:01; GPR143; ENSG00000101850; TAA
DHAIPHYVTM

SEQ ID NO: 26554 - protein, 10 aa, Homo sapiens
  misc_feature: Table A; Target 26554; HLA-B*39:01; GPR143; ENSG00000101850; TAA
DHAIPHYVTM

SEQ ID NO: 26555 - protein, 10 aa, Homo sapiens
  misc_feature: Table A; Target 26555; HLA-A*26:01; GPR143; ENSG00000101850; TAA
DINGGSLKPV

SEQ ID NO: 26556 - protein, 11 aa, Homo sapiens
  misc_feature: Table A; Target 26556; HLA-A*33:01; GPR143; ENSG00000101850; TAA
DINGGSLKPVR

SEQ ID NO: 26557 - protein, 11 aa, Homo sapiens
  misc_feature: Table A; Target 26557; HLA-A*33:03; GPR143; ENSG00000101850; TAA
DINGGSLKPVR

SEQ ID NO: 26558 - protein, 11 aa, Homo sapiens
  misc_feature: Table A; Target 26558; HLA-A*68:01; GPR143; ENSG00000101850; TAA
DINGGSLKPVR

SEQ ID NO: 26559 - protein, 10 aa, Homo sapiens
  misc_feature: Table A; Target 26559; HLA-B*07:02; GPR143; ENSG00000101850; TAA
DPALPTHGDL

SEQ ID NO: 26560 - protein, 10 aa, Homo sapiens
  misc_feature: Table A; Target 26560; HLA-B*35:03; GPR143; ENSG00000101850; TAA
DPALPTHGDL

SEQ ID NO: 26561 - protein, 10 aa, Homo sapiens
  misc_feature: Table A; Target 26561; HLA-C*07:02; GPR143; ENSG00000101850; TAA
DPALPTHGDL

SEQ ID NO: 26562 - protein, 9 aa, Homo sapiens
  misc_feature: Table A; Target 26562; HLA-A*26:01; GPR143; ENSG00000101850; TAA
EGAHPSPLM

SEQ ID NO: 26563 - protein, 9 aa, Homo sapiens
  misc_feature: Table A; Target 26563; HLA-B*35:01; GPR143; ENSG00000101850; TAA
EGAHPSPLM

SEQ ID NO: 26564 - protein, 9 aa, Homo sapiens
  misc_feature: Table A; Target 26564; HLA-B*35:03; GPR143; ENSG00000101850; TAA
EGAHPSPLM

SEQ ID NO: 26565 - protein, 9 aa, Homo sapiens
  misc_feature: Table A; Target 26565; HLA-B*51:01; GPR143; ENSG00000101850; TAA
EGAHPSPLM

SEQ ID NO: 26566 - protein, 9 aa, Homo sapiens
  misc_feature: Table A; Target 26566; HLA-C*03:03; GPR143; ENSG00000101850; TAA
EGAHPSPLM

SEQ ID NO: 26567 - protein, 9 aa, Homo sapiens
  misc_feature: Table A; Target 26567; HLA-C*07:02; GPR143; ENSG00000101850; TAA
EGAHPSPLM

SEQ ID NO: 26568 - protein, 9 aa, Homo sapiens
  misc_feature: Table A; Target 26568; HLA-C*16:01; GPR143; ENSG00000101850; TAA
EGAHPSPLM

SEQ ID NO: 26569 - protein, 9 aa, Homo sapiens
  misc_feature: Table A; Target 26569; HLA-C*03:03; GPR143; ENSG00000101850; TAA
EGDPALPTH

SEQ ID NO: 26570 - protein, 10 aa, Homo sapiens
  misc_feature: Table A; Target 26570; HLA-B*07:02; GPR143; ENSG00000101850; TAA
EGSDASTIEI

SEQ ID NO: 26571 - protein, 11 aa, Homo sapiens
  misc_feature: Table A; Target 26571; HLA-A*33:03; GPR143; ENSG00000101850; TAA
EIHTASESCNK

SEQ ID NO: 26572 - protein, 11 aa, Homo sapiens
  misc_feature: Table A; Target 26572; HLA-A*68:01; GPR143; ENSG00000101850; TAA
EIHTASESCNK

SEQ ID NO: 26573 - protein, 9 aa, Homo sapiens
  misc_feature: Table A; Target 26573; HLA-A*68:02; GPR143; ENSG00000101850; TAA
EIWPAAFCV

SEQ ID NO: 26574 - protein, 11 aa, Homo sapiens
  misc_feature: Table A; Target 26574; HLA-A*33:01; GPR143; ENSG00000101850; TAA
ESLTTSAAEGA

SEQ ID NO: 26575 - protein, 9 aa, Homo sapiens
  misc_feature: Table A; Target 26575; HLA-B*54:01; GPR143; ENSG00000101850; TAA
FIMGILNPA

SEQ ID NO: 26576 - protein, 9 aa, Homo sapiens
  misc_feature: Table A; Target 26576; HLA-B*56:01; GPR143; ENSG00000101850; TAA
FIMGILNPA

SEQ ID NO: 26577 - protein, 8 aa, Homo sapiens
  misc_feature: Table A; Target 26577; HLA-A*29:02; GPR143; ENSG00000101850; TAA
FLLSLAFY

SEQ ID NO: 26578 - protein, 8 aa, Homo sapiens
  misc_feature: Table A; Target 26578; HLA-B*35:01; GPR143; ENSG00000101850; TAA
FPNFVDSV

SEQ ID NO: 26579 - protein, 8 aa, Homo sapiens
  misc_feature: Table A; Target 26579; HLA-B*35:03; GPR143; ENSG00000101850; TAA
FPNFVDSV

SEQ ID NO: 26580 - protein, 8 aa, Homo sapiens
  misc_feature: Table A; Target 26580; HLA-B*51:01; GPR143; ENSG00000101850; TAA
FPNFVDSV

SEQ ID NO: 26581 - protein, 8 aa, Homo sapiens
  misc_feature: Table A; Target 26581; HLA-B*54:01; GPR143; ENSG00000101850; TAA
FPNFVDSV

SEQ ID NO: 26582 - protein, 8 aa, Homo sapiens
  misc_feature: Table A; Target 26582; HLA-B*55:01; GPR143; ENSG00000101850; TAA
FPNFVDSV

SEQ ID NO: 26583 - protein, 8 aa, Homo sapiens
  misc_feature: Table A; Target 26583; HLA-B*56:01; GPR143; ENSG00000101850; TAA
FPNFVDSV

SEQ ID NO: 26584 - protein, 8 aa, Homo sapiens
  misc_feature: Table A; Target 26584; HLA-A*02:03; GPR143; ENSG00000101850; TAA
FQKTVTAV

SEQ ID NO: 26585 - protein, 8 aa, Homo sapiens
  misc_feature: Table A; Target 26585; HLA-A*30:01; GPR143; ENSG00000101850; TAA
FQKTVTAV

SEQ ID NO: 26586 - protein, 8 aa, Homo sapiens
  misc_feature: Table A; Target 26586; HLA-B*08:01; GPR143; ENSG00000101850; TAA
FQKTVTAV

SEQ ID NO: 26587 - protein, 8 aa, Homo sapiens
  misc_feature: Table A; Target 26587; HLA-B*13:02; GPR143; ENSG00000101850; TAA
FQKTVTAV

SEQ ID NO: 26588 - protein, 8 aa, Homo sapiens
  misc_feature: Table A; Target 26588; HLA-B*15:01; GPR143; ENSG00000101850; TAA
FQKTVTAV

SEQ ID NO: 26589 - protein, 8 aa, Homo sapiens
  misc_feature: Table A; Target 26589; HLA-B*15:03; GPR143; ENSG00000101850; TAA
FQKTVTAV

SEQ ID NO: 26590 - protein, 8 aa, Homo sapiens
  misc_feature: Table A; Target 26590; HLA-B*40:02; GPR143; ENSG00000101850; TAA
FQKTVTAV

SEQ ID NO: 26591 - protein, 8 aa, Homo sapiens
  misc_feature: Table A; Target 26591; HLA-B*46:01; GPR143; ENSG00000101850; TAA
FQKTVTAV

SEQ ID NO: 26592 - protein, 8 aa, Homo sapiens
  misc_feature: Table A; Target 26592; HLA-C*02:02; GPR143; ENSG00000101850; TAA
FQKTVTAV

SEQ ID NO: 26593 - protein, 8 aa, Homo sapiens
  misc_feature: Table A; Target 26593; HLA-C*07:04; GPR143; ENSG00000101850; TAA
FQKTVTAV

SEQ ID NO: 26594 - protein, 8 aa, Homo sapiens
  misc_feature: Table A; Target 26594; HLA-C*12:03; GPR143; ENSG00000101850; TAA
FQKTVTAV

SEQ ID NO: 26595 - protein, 8 aa, Homo sapiens
  misc_feature: Table A; Target 26595; HLA-C*14:02; GPR143; ENSG00000101850; TAA
FQKTVTAV

SEQ ID NO: 26596 - protein, 9 aa, Homo sapiens
  misc_feature: Table A; Target 26596; HLA-B*46:01; GPR143; ENSG00000101850; TAA
FQKTVTAVA

SEQ ID NO: 26597 - protein, 9 aa, Homo sapiens
  misc_feature: Table A; Target 26597; HLA-A*02:04; GPR143; ENSG00000101850; TAA
FQPRAFHAL

SEQ ID NO: 26598 - protein, 9 aa, Homo sapiens
  misc_feature: Table A; Target 26598; HLA-A*02:07; GPR143; ENSG00000101850; TAA
FQPRAFHAL

SEQ ID NO: 26599 - protein, 9 aa, Homo sapiens
  misc_feature: Table A; Target 26599; HLA-A*24:02; GPR143; ENSG00000101850; TAA
FQPRAFHAL

SEQ ID NO: 26600 - protein, 9 aa, Homo sapiens
  misc_feature: Table A; Target 26600; HLA-A*31:01; GPR143; ENSG00000101850; TAA
FQPRAFHAL

SEQ ID NO: 26601 - protein, 9 aa, Homo sapiens
  misc_feature: Table A; Target 26601; HLA-A*68:02; GPR143; ENSG00000101850; TAA
FQPRAFHAL

SEQ ID NO: 26602 - protein, 8 aa, Homo sapiens
  misc_feature: Table A; Target 26602; HLA-B*35:03; GPR143; ENSG00000101850; TAA
FVDSVSDM

SEQ ID NO: 26603 - protein, 8 aa, Homo sapiens
  misc_feature: Table A; Target 26603; HLA-B*39:01; GPR143; ENSG00000101850; TAA
FVDSVSDM

SEQ ID NO: 26604 - protein, 8 aa, Homo sapiens
  misc_feature: Table A; Target 26604; HLA-C*03:04; GPR143; ENSG00000101850; TAA
FVDSVSDM

SEQ ID NO: 26605 - protein, 8 aa, Homo sapiens
  misc_feature: Table A; Target 26605; HLA-C*04:01; GPR143; ENSG00000101850; TAA
FVDSVSDM

SEQ ID NO: 26606 - protein, 8 aa, Homo sapiens
  misc_feature: Table A; Target 26606; HLA-C*05:01; GPR143; ENSG00000101850; TAA
FVDSVSDM

SEQ ID NO: 26607 - protein, 8 aa, Homo sapiens
  misc_feature: Table A; Target 26607; HLA-C*07:04; GPR143; ENSG00000101850; TAA
FVDSVSDM

SEQ ID NO: 26608 - protein, 8 aa, Homo sapiens
  misc_feature: Table A; Target 26608; HLA-C*12:03; GPR143; ENSG00000101850; TAA
FVDSVSDM

SEQ ID NO: 26609 - protein, 9 aa, Homo sapiens
  misc_feature: Table A; Target 26609; HLA-A*24:02; GPR143; ENSG00000101850; TAA
FYGWTGCSL

SEQ ID NO: 26610 - protein, 9 aa, Homo sapiens
  misc_feature: Table A; Target 26610; HLA-C*14:02; GPR143; ENSG00000101850; TAA
FYGWTGCSL

SEQ ID NO: 26611 - protein, 9 aa, Homo sapiens
  misc_feature: Table A; Target 26611; HLA-A*23:01; GPR143; ENSG00000101850; TAA
FYLEMQTDI

SEQ ID NO: 26612 - protein, 9 aa, Homo sapiens
  misc_feature: Table A; Target 26612; HLA-A*24:02; GPR143; ENSG00000101850; TAA
FYLEMQTDI

SEQ ID NO: 26613 - protein, 9 aa, Homo sapiens
  misc_feature: Table A; Target 26613; HLA-A*29:02; GPR143; ENSG00000101850; TAA
FYLEMQTDI

SEQ ID NO: 26614 - protein, 9 aa, Homo sapiens
  misc_feature: Table A; Target 26614; HLA-B*35:03; GPR143; ENSG00000101850; TAA
FYLEMQTDI

SEQ ID NO: 26615 - protein, 9 aa, Homo sapiens
  misc_feature: Table A; Target 26615; HLA-C*04:01; GPR143; ENSG00000101850; TAA
FYLEMQTDI

SEQ ID NO: 26616 - protein, 9 aa, Homo sapiens
  misc_feature: Table A; Target 26616; HLA-C*07:01; GPR143; ENSG00000101850; TAA
FYLEMQTDI

SEQ ID NO: 26617 - protein, 9 aa, Homo sapiens
  misc_feature: Table A; Target 26617; HLA-C*14:02; GPR143; ENSG00000101850; TAA
FYLEMQTDI

SEQ ID NO: 26618 - protein, 8 aa, Homo sapiens
  misc_feature: Table A; Target 26618; HLA-B*15:03; GPR143; ENSG00000101850; TAA
GAHPSPLM

SEQ ID NO: 26619 - protein, 8 aa, Homo sapiens
  misc_feature: Table A; Target 26619; HLA-B*51:01; GPR143; ENSG00000101850; TAA
GAHPSPLM

SEQ ID NO: 26620 - protein, 8 aa, Homo sapiens
  misc_feature: Table A; Target 26620; HLA-B*58:01; GPR143; ENSG00000101850; TAA
GAHPSPLM

SEQ ID NO: 26621 - protein, 8 aa, Homo sapiens
  misc_feature: Table A; Target 26621; HLA-C*02:02; GPR143; ENSG00000101850; TAA
GAHPSPLM

SEQ ID NO: 26622 - protein, 8 aa, Homo sapiens
  misc_feature: Table A; Target 26622; HLA-C*03:04; GPR143; ENSG00000101850; TAA
GAHPSPLM

SEQ ID NO: 26623 - protein, 8 aa, Homo sapiens
  misc_feature: Table A; Target 26623; HLA-B*08:01; GPR143; ENSG00000101850; TAA
GAVIKIRF

SEQ ID NO: 26624 - protein, 9 aa, Homo sapiens
  misc_feature: Table A; Target 26624; HLA-B*57:01; GPR143; ENSG00000101850; TAA
GAVIKIRFF

SEQ ID NO: 26625 - protein, 9 aa, Homo sapiens
  misc_feature: Table A; Target 26625; HLA-A*29:02; GPR143; ENSG00000101850; TAA
GFLLSLAFY

SEQ ID NO: 26626 - protein, 9 aa, Homo sapiens
  misc_feature: Table A; Target 26626; HLA-A*32:01; GPR143; ENSG00000101850; TAA
GILNPAQGF

SEQ ID NO: 26627 - protein, 9 aa, Homo sapiens
  misc_feature: Table A; Target 26627; HLA-B*15:01; GPR143; ENSG00000101850; TAA
GILNPAQGF

SEQ ID NO: 26628 - protein, 11 aa, Homo sapiens
  misc_feature: Table A; Target 26628; HLA-A*02:04; GPR143; ENSG00000101850; TAA
GILNPAQGFLL

SEQ ID NO: 26629 - protein, 8 aa, Homo sapiens
  misc_feature: Table A; Target 26629; HLA-A*02:01; GPR143; ENSG00000101850; TAA
GLATLLCV

SEQ ID NO: 26630 - protein, 8 aa, Homo sapiens
  misc_feature: Table A; Target 26630; HLA-B*13:02; GPR143; ENSG00000101850; TAA
GLATLLCV

SEQ ID NO: 26631 - protein, 9 aa, Homo sapiens
  misc_feature: Table A; Target 26631; HLA-A*01:01; GPR143; ENSG00000101850; TAA
GLDHAIPHY

SEQ ID NO: 26632 - protein, 9 aa, Homo sapiens
  misc_feature: Table A; Target 26632; HLA-A*02:07; GPR143; ENSG00000101850; TAA
GLDHAIPHY

SEQ ID NO: 26633 - protein, 9 aa, Homo sapiens
  misc_feature: Table A; Target 26633; HLA-A*03:01; GPR143; ENSG00000101850; TAA
GLDHAIPHY

SEQ ID NO: 26634 - protein, 9 aa, Homo sapiens
  misc_feature: Table A; Target 26634; HLA-A*03:02; GPR143; ENSG00000101850; TAA
GLDHAIPHY

SEQ ID NO: 26635 - protein, 9 aa, Homo sapiens
  misc_feature: Table A; Target 26635; HLA-A*29:02; GPR143; ENSG00000101850; TAA
GLDHAIPHY

SEQ ID NO: 26636 - protein, 9 aa, Homo sapiens
  misc_feature: Table A; Target 26636; HLA-A*30:02; GPR143; ENSG00000101850; TAA
GLDHAIPHY

SEQ ID NO: 26637 - protein, 9 aa, Homo sapiens
  misc_feature: Table A; Target 26637; HLA-B*15:01; GPR143; ENSG00000101850; TAA
GLDHAIPHY

SEQ ID NO: 26638 - protein, 9 aa, Homo sapiens
  misc_feature: Table A; Target 26638; HLA-B*55:01; GPR143; ENSG00000101850; TAA
GLDHAIPHY

SEQ ID NO: 26639 - protein, 10 aa, Homo sapiens
  misc_feature: Table A; Target 26639; HLA-A*01:01; GPR143; ENSG00000101850; TAA
GLDHAIPHYV

SEQ ID NO: 26640 - protein, 10 aa, Homo sapiens
  misc_feature: Table A; Target 26640; HLA-A*02:01; GPR143; ENSG00000101850; TAA
GLDHAIPHYV

SEQ ID NO: 26641 - protein, 10 aa, Homo sapiens
  misc_feature: Table A; Target 26641; HLA-A*02:03; GPR143; ENSG00000101850; TAA
GLDHAIPHYV

SEQ ID NO: 26642 - protein, 10 aa, Homo sapiens
  misc_feature: Table A; Target 26642; HLA-A*02:04; GPR143; ENSG00000101850; TAA
GLDHAIPHYV

SEQ ID NO: 26643 - protein, 10 aa, Homo sapiens
  misc_feature: Table A; Target 26643; HLA-A*02:07; GPR143; ENSG00000101850; TAA
GLDHAIPHYV

SEQ ID NO: 26644 - protein, 10 aa, Homo sapiens
  misc_feature: Table A; Target 26644; HLA-B*55:01; GPR143; ENSG00000101850; TAA
GLDHAIPHYV

SEQ ID NO: 26645 - protein, 9 aa, Homo sapiens
  misc_feature: Table A; Target 26645; HLA-A*02:04; GPR143; ENSG00000101850; TAA
GLLQLLPGR

SEQ ID NO: 26646 - protein, 9 aa, Homo sapiens
  misc_feature: Table A; Target 26646; HLA-A*31:01; GPR143; ENSG00000101850; TAA
GLLQLLPGR

SEQ ID NO: 26647 - protein, 8 aa, Homo sapiens
  misc_feature: Table A; Target 26647; HLA-A*01:01; GPR143; ENSG00000101850; TAA
GLSTILLY

SEQ ID NO: 26648 - protein, 8 aa, Homo sapiens
  misc_feature: Table A; Target 26648; HLA-A*03:01; GPR143; ENSG00000101850; TAA
GLSTILLY

SEQ ID NO: 26649 - protein, 8 aa, Homo sapiens
  misc_feature: Table A; Target 26649; HLA-A*29:02; GPR143; ENSG00000101850; TAA
GLSTILLY

SEQ ID NO: 26650 - protein, 8 aa, Homo sapiens
  misc_feature: Table A; Target 26650; HLA-A*30:02; GPR143; ENSG00000101850; TAA
GLSTILLY

SEQ ID NO: 26651 - protein, 8 aa, Homo sapiens
  misc_feature: Table A; Target 26651; HLA-B*15:01; GPR143; ENSG00000101850; TAA
GLSTILLY

SEQ ID NO: 26652 - protein, 8 aa, Homo sapiens
  misc_feature: Table A; Target 26652; HLA-C*07:01; GPR143; ENSG00000101850; TAA
GLSTILLY

SEQ ID NO: 26653 - protein, 9 aa, Homo sapiens
  misc_feature: Table A; Target 26653; HLA-A*03:01; GPR143; ENSG00000101850; TAA
GLSTILLYH

SEQ ID NO: 26654 - protein, 9 aa, Homo sapiens
  misc_feature: Table A; Target 26654; HLA-A*03:02; GPR143; ENSG00000101850; TAA
GLSTILLYH

SEQ ID NO: 26655 - protein, 9 aa, Homo sapiens
  misc_feature: Table A; Target 26655; HLA-A*29:02; GPR143; ENSG00000101850; TAA
GLSTILLYH

SEQ ID NO: 26656 - protein, 10 aa, Homo sapiens
  misc_feature: Table A; Target 26656; HLA-A*02:04; GPR143; ENSG00000101850; TAA
GLSTILLYHI

SEQ ID NO: 26657 - protein, 9 aa, Homo sapiens
  misc_feature: Table A; Target 26657; HLA-A*32:01; GPR143; ENSG00000101850; TAA
GMVIRSTVW

SEQ ID NO: 26658 - protein, 9 aa, Homo sapiens
  misc_feature: Table A; Target 26658; HLA-B*15:03; GPR143; ENSG00000101850; TAA
GMVIRSTVW

SEQ ID NO: 26659 - protein, 9 aa, Homo sapiens
  misc_feature: Table A; Target 26659; HLA-B*44:02; GPR143; ENSG00000101850; TAA
GMVIRSTVW

SEQ ID NO: 26660 - protein, 9 aa, Homo sapiens
  misc_feature: Table A; Target 26660; HLA-B*44:03; GPR143; ENSG00000101850; TAA
GMVIRSTVW

SEQ ID NO: 26661 - protein, 9 aa, Homo sapiens
  misc_feature: Table A; Target 26661; HLA-B*57:01; GPR143; ENSG00000101850; TAA
GMVIRSTVW

SEQ ID NO: 26662 - protein, 9 aa, Homo sapiens
  misc_feature: Table A; Target 26662; HLA-B*58:01; GPR143; ENSG00000101850; TAA
GMVIRSTVW

SEQ ID NO: 26663 - protein, 9 aa, Homo sapiens
  misc_feature: Table A; Target 26663; HLA-B*56:01; GPR143; ENSG00000101850; TAA
GPGSPATSP

SEQ ID NO: 26664 - protein, 11 aa, Homo sapiens
  misc_feature: Table A; Target 26664; HLA-B*56:01; GPR143; ENSG00000101850; TAA
GPGSPATSPPA

SEQ ID NO: 26665 - protein, 10 aa, Homo sapiens
  misc_feature: Table A; Target 26665; HLA-B*13:02; GPR143; ENSG00000101850; TAA
GQTSDEALSM

SEQ ID NO: 26666 - protein, 10 aa, Homo sapiens
  misc_feature: Table A; Target 26666; HLA-B*39:01; GPR143; ENSG00000101850; TAA
GQTSDEALSM

SEQ ID NO: 26667 - protein, 11 aa, Homo sapiens
  misc_feature: Table A; Target 26667; HLA-B*13:02; GPR143; ENSG00000101850; TAA
GQTSDEALSML

SEQ ID NO: 26668 - protein, 11 aa, Homo sapiens
  misc_feature: Table A; Target 26668; HLA-B*27:05; GPR143; ENSG00000101850; TAA
GQTSDEALSML

SEQ ID NO: 26669 - protein, 11 aa, Homo sapiens
  misc_feature: Table A; Target 26669; HLA-B*39:01; GPR143; ENSG00000101850; TAA
GQTSDEALSML

SEQ ID NO: 26670 - protein, 11 aa, Homo sapiens
  misc_feature: Table A; Target 26670; HLA-B*27:05; GPR143; ENSG00000101850; TAA
GRQGIYTENER

SEQ ID NO: 26671 - protein, 10 aa, Homo sapiens
  misc_feature: Table A; Target 26671; HLA-A*01:01; GPR143; ENSG00000101850; TAA
GSAMWIQLLY

SEQ ID NO: 26672 - protein, 10 aa, Homo sapiens
  misc_feature: Table A; Target 26672; HLA-A*29:02; GPR143; ENSG00000101850; TAA
GSAMWIQLLY

SEQ ID NO: 26673 - protein, 9 aa, Homo sapiens
  misc_feature: Table A; Target 26673; HLA-A*01:01; GPR143; ENSG00000101850; TAA
GSDASTIEI

SEQ ID NO: 26674 - protein, 9 aa, Homo sapiens
  misc_feature: Table A; Target 26674; HLA-B*13:02; GPR143; ENSG00000101850; TAA
GSDASTIEI

SEQ ID NO: 26675 - protein, 9 aa, Homo sapiens
  misc_feature: Table A; Target 26675; HLA-B*38:01; GPR143; ENSG00000101850; TAA
GSDASTIEI

SEQ ID NO: 26676 - protein, 9 aa, Homo sapiens
  misc_feature: Table A; Target 26676; HLA-B*58:01; GPR143; ENSG00000101850; TAA
GSDASTIEI

SEQ ID NO: 26677 - protein, 9 aa, Homo sapiens
  misc_feature: Table A; Target 26677; HLA-C*05:01; GPR143; ENSG00000101850; TAA
GSDASTIEI

SEQ ID NO: 26678 - protein, 9 aa, Homo sapiens
  misc_feature: Table A; Target 26678; HLA-B*07:02; GPR143; ENSG00000101850; TAA
GSGGLRLAL

SEQ ID NO: 26679 - protein, 8 aa, Homo sapiens
  misc_feature: Table A; Target 26679; HLA-B*08:01; GPR143; ENSG00000101850; TAA
HAIPHYVT

SEQ ID NO: 26680 - protein, 9 aa, Homo sapiens
  misc_feature: Table A; Target 26680; HLA-A*23:01; GPR143; ENSG00000101850; TAA
HAIPHYVTM

SEQ ID NO: 26681 - protein, 9 aa, Homo sapiens
  misc_feature: Table A; Target 26681; HLA-A*25:01; GPR143; ENSG00000101850; TAA
HAIPHYVTM

SEQ ID NO: 26682 - protein, 9 aa, Homo sapiens
  misc_feature: Table A; Target 26682; HLA-A*26:01; GPR143; ENSG00000101850; TAA
HAIPHYVTM

SEQ ID NO: 26683 - protein, 9 aa, Homo sapiens
  misc_feature: Table A; Target 26683; HLA-A*30:01; GPR143; ENSG00000101850; TAA
HAIPHYVTM

SEQ ID NO: 26684 - protein, 9 aa, Homo sapiens
  misc_feature: Table A; Target 26684; HLA-A*32:01; GPR143; ENSG00000101850; TAA
HAIPHYVTM

SEQ ID NO: 26685 - protein, 9 aa, Homo sapiens
  misc_feature: Table A; Target 26685; HLA-A*68:01; GPR143; ENSG00000101850; TAA
HAIPHYVTM

SEQ ID NO: 26686 - protein, 9 aa, Homo sapiens
  misc_feature: Table A; Target 26686; HLA-A*68:02; GPR143; ENSG00000101850; TAA
HAIPHYVTM

SEQ ID NO: 26687 - protein, 9 aa, Homo sapiens
  misc_feature: Table A; Target 26687; HLA-B*07:02; GPR143; ENSG00000101850; TAA
HAIPHYVTM

SEQ ID NO: 26688 - protein, 9 aa, Homo sapiens
  misc_feature: Table A; Target 26688; HLA-B*08:01; GPR143; ENSG00000101850; TAA
HAIPHYVTM

SEQ ID NO: 26689 - protein, 9 aa, Homo sapiens
  misc_feature: Table A; Target 26689; HLA-B*15:01; GPR143; ENSG00000101850; TAA
HAIPHYVTM

SEQ ID NO: 26690 - protein, 9 aa, Homo sapiens
  misc_feature: Table A; Target 26690; HLA-B*15:03; GPR143; ENSG00000101850; TAA
HAIPHYVTM

SEQ ID NO: 26691 - protein, 9 aa, Homo sapiens
  misc_feature: Table A; Target 26691; HLA-B*18:01; GPR143; ENSG00000101850; TAA
HAIPHYVTM

SEQ ID NO: 26692 - protein, 9 aa, Homo sapiens
  misc_feature: Table A; Target 26692; HLA-B*35:01; GPR143; ENSG00000101850; TAA
HAIPHYVTM

SEQ ID NO: 26693 - protein, 9 aa, Homo sapiens
  misc_feature: Table A; Target 26693; HLA-B*35:03; GPR143; ENSG00000101850; TAA
HAIPHYVTM

SEQ ID NO: 26694 - protein, 9 aa, Homo sapiens
  misc_feature: Table A; Target 26694; HLA-B*38:01; GPR143; ENSG00000101850; TAA
HAIPHYVTM

SEQ ID NO: 26695 - protein, 9 aa, Homo sapiens
  misc_feature: Table A; Target 26695; HLA-B*39:01; GPR143; ENSG00000101850; TAA
HAIPHYVTM

SEQ ID NO: 26696 - protein, 9 aa, Homo sapiens
  misc_feature: Table A; Target 26696; HLA-B*40:01; GPR143; ENSG00000101850; TAA
HAIPHYVTM

SEQ ID NO: 26697 - protein, 9 aa, Homo sapiens
  misc_feature: Table A; Target 26697; HLA-B*46:01; GPR143; ENSG00000101850; TAA
HAIPHYVTM

SEQ ID NO: 26698 - protein, 9 aa, Homo sapiens
  misc_feature: Table A; Target 26698; HLA-B*51:01; GPR143; ENSG00000101850; TAA
HAIPHYVTM

SEQ ID NO: 26699 - protein, 9 aa, Homo sapiens
  misc_feature: Table A; Target 26699; HLA-B*54:01; GPR143; ENSG00000101850; TAA
HAIPHYVTM

SEQ ID NO: 26700 - protein, 9 aa, Homo sapiens
  misc_feature: Table A; Target 26700; HLA-B*55:01; GPR143; ENSG00000101850; TAA
HAIPHYVTM

SEQ ID NO: 26701 - protein, 9 aa, Homo sapiens
  misc_feature: Table A; Target 26701; HLA-B*57:01; GPR143; ENSG00000101850; TAA
HAIPHYVTM

SEQ ID NO: 26702 - protein, 9 aa, Homo sapiens
  misc_feature: Table A; Target 26702; HLA-B*58:01; GPR143; ENSG00000101850; TAA
HAIPHYVTM

SEQ ID NO: 26703 - protein, 9 aa, Homo sapiens
  misc_feature: Table A; Target 26703; HLA-C*01:02; GPR143; ENSG00000101850; TAA
HAIPHYVTM

SEQ ID NO: 26704 - protein, 9 aa, Homo sapiens
  misc_feature: Table A; Target 26704; HLA-C*02:02; GPR143; ENSG00000101850; TAA
HAIPHYVTM

SEQ ID NO: 26705 - protein, 9 aa, Homo sapiens
  misc_feature: Table A; Target 26705; HLA-C*03:03; GPR143; ENSG00000101850; TAA
HAIPHYVTM

SEQ ID NO: 26706 - protein, 9 aa, Homo sapiens
  misc_feature: Table A; Target 26706; HLA-C*03:04; GPR143; ENSG00000101850; TAA
HAIPHYVTM

SEQ ID NO: 26707 - protein, 9 aa, Homo sapiens
  misc_feature: Table A; Target 26707; HLA-C*05:01; GPR143; ENSG00000101850; TAA
HAIPHYVTM

SEQ ID NO: 26708 - protein, 9 aa, Homo sapiens
  misc_feature: Table A; Target 26708; HLA-C*07:04; GPR143; ENSG00000101850; TAA
HAIPHYVTM

SEQ ID NO: 26709 - protein, 9 aa, Homo sapiens
  misc_feature: Table A; Target 26709; HLA-C*07:06; GPR143; ENSG00000101850; TAA
HAIPHYVTM

SEQ ID NO: 26710 - protein, 9 aa, Homo sapiens
  misc_feature: Table A; Target 26710; HLA-C*12:03; GPR143; ENSG00000101850; TAA
HAIPHYVTM

SEQ ID NO: 26711 - protein, 9 aa, Homo sapiens
  misc_feature: Table A; Target 26711; HLA-C*16:01; GPR143; ENSG00000101850; TAA
HAIPHYVTM

SEQ ID NO: 26712 - protein, 9 aa, Homo sapiens
  misc_feature: Table A; Target 26712; HLA-C*16:02; GPR143; ENSG00000101850; TAA
HAIPHYVTM

SEQ ID NO: 26713 - protein, 9 aa, Homo sapiens
  misc_feature: Table A; Target 26713; HLA-C*16:04; GPR143; ENSG00000101850; TAA
HAIPHYVTM

SEQ ID NO: 26714 - protein, 10 aa, Homo sapiens
  misc_feature: Table A; Target 26714; HLA-B*35:01; GPR143; ENSG00000101850; TAA
HAIPHYVTMY

SEQ ID NO: 26715 - protein, 10 aa, Homo sapiens
  misc_feature: Table A; Target 26715; HLA-C*02:02; GPR143; ENSG00000101850; TAA
HAIPHYVTMY

SEQ ID NO: 26716 - protein, 11 aa, Homo sapiens
  misc_feature: Table A; Target 26716; HLA-A*33:01; GPR143; ENSG00000101850; TAA
HALCLGSGGLR

SEQ ID NO: 26717 - protein, 9 aa, Homo sapiens
  misc_feature: Table A; Target 26717; HLA-A*30:01; GPR143; ENSG00000101850; TAA
HENPASGKV

SEQ ID NO: 26718 - protein, 9 aa, Homo sapiens
  misc_feature: Table A; Target 26718; HLA-B*18:01; GPR143; ENSG00000101850; TAA
HENPASGKV

SEQ ID NO: 26719 - protein, 9 aa, Homo sapiens
  misc_feature: Table A; Target 26719; HLA-B*37:01; GPR143; ENSG00000101850; TAA
HENPASGKV

SEQ ID NO: 26720 - protein, 9 aa, Homo sapiens
  misc_feature: Table A; Target 26720; HLA-B*40:01; GPR143; ENSG00000101850; TAA
HENPASGKV

SEQ ID NO: 26721 - protein, 9 aa, Homo sapiens
  misc_feature: Table A; Target 26721; HLA-B*40:02; GPR143; ENSG00000101850; TAA
HENPASGKV

SEQ ID NO: 26722 - protein, 9 aa, Homo sapiens
  misc_feature: Table A; Target 26722; HLA-B*44:02; GPR143; ENSG00000101850; TAA
HENPASGKV

SEQ ID NO: 26723 - protein, 9 aa, Homo sapiens
  misc_feature: Table A; Target 26723; HLA-B*44:03; GPR143; ENSG00000101850; TAA
HENPASGKV

SEQ ID NO: 26724 - protein, 9 aa, Homo sapiens
  misc_feature: Table A; Target 26724; HLA-B*49:01; GPR143; ENSG00000101850; TAA
HENPASGKV

SEQ ID NO: 26725 - protein, 9 aa, Homo sapiens
  misc_feature: Table A; Target 26725; HLA-B*51:01; GPR143; ENSG00000101850; TAA
HENPASGKV

SEQ ID NO: 26726 - protein, 9 aa, Homo sapiens
  misc_feature: Table A; Target 26726; HLA-C*02:02; GPR143; ENSG00000101850; TAA
HENPASGKV

SEQ ID NO: 26727 - protein, 9 aa, Homo sapiens
  misc_feature: Table A; Target 26727; HLA-C*06:02; GPR143; ENSG00000101850; TAA
HENPASGKV

SEQ ID NO: 26728 - protein, 9 aa, Homo sapiens
  misc_feature: Table A; Target 26728; HLA-C*16:04; GPR143; ENSG00000101850; TAA
HENPASGKV

SEQ ID NO: 26729 - protein, 10 aa, Homo sapiens
  misc_feature: Table A; Target 26729; HLA-A*02:04; GPR143; ENSG00000101850; TAA
HIMAWGLATL

SEQ ID NO: 26730 - protein, 9 aa, Homo sapiens
  misc_feature: Table A; Target 26730; HLA-A*03:01; GPR143; ENSG00000101850; TAA
HTASESCNK

SEQ ID NO: 26731 - protein, 9 aa, Homo sapiens
  misc_feature: Table A; Target 26731; HLA-A*03:02; GPR143; ENSG00000101850; TAA
HTASESCNK

SEQ ID NO: 26732 - protein, 9 aa, Homo sapiens
  misc_feature: Table A; Target 26732; HLA-A*11:01; GPR143; ENSG00000101850; TAA
HTASESCNK

SEQ ID NO: 26733 - protein, 9 aa, Homo sapiens
  misc_feature: Table A; Target 26733; HLA-A*33:03; GPR143; ENSG00000101850; TAA
HTASESCNK

SEQ ID NO: 26734 - protein, 9 aa, Homo sapiens
  misc_feature: Table A; Target 26734; HLA-A*68:01; GPR143; ENSG00000101850; TAA
HTASESCNK

SEQ ID NO: 26735 - protein, 9 aa, Homo sapiens
  misc_feature: Table A; Target 26735; HLA-C*07:06; GPR143; ENSG00000101850; TAA
HTASESCNK

SEQ ID NO: 26736 - protein, 9 aa, Homo sapiens
  misc_feature: Table A; Target 26736; HLA-A*01:01; GPR143; ENSG00000101850; TAA
HTEIWPAAF

SEQ ID NO: 26737 - protein, 9 aa, Homo sapiens
  misc_feature: Table A; Target 26737; HLA-B*57:01; GPR143; ENSG00000101850; TAA
HTEIWPAAF

SEQ ID NO: 26738 - protein, 9 aa, Homo sapiens
  misc_feature: Table A; Target 26738; HLA-B*49:01; GPR143; ENSG00000101850; TAA
IEIHTASES

SEQ ID NO: 26739 - protein, 10 aa, Homo sapiens
  misc_feature: Table A; Target 26739; HLA-A*30:01; GPR143; ENSG00000101850; TAA
IEIHTASESC

SEQ ID NO: 26740 - protein, 10 aa, Homo sapiens
  misc_feature: Table A; Target 26740; HLA-B*40:02; GPR143; ENSG00000101850; TAA
IEIHTASESC

SEQ ID NO: 26741 - protein, 10 aa, Homo sapiens
  misc_feature: Table A; Target 26741; HLA-B*49:01; GPR143; ENSG00000101850; TAA
IEIHTASESC

SEQ ID NO: 26742 - protein, 8 aa, Homo sapiens
  misc_feature: Table A; Target 26742; HLA-A*23:01; GPR143; ENSG00000101850; TAA
IINESLLF

SEQ ID NO: 26743 - protein, 9 aa, Homo sapiens
  misc_feature: Table A; Target 26743; HLA-A*01:01; GPR143; ENSG00000101850; TAA
IINESLLFY

SEQ ID NO: 26744 - protein, 9 aa, Homo sapiens
  misc_feature: Table A; Target 26744; HLA-A*03:01; GPR143; ENSG00000101850; TAA
IINESLLFY

SEQ ID NO: 26745 - protein, 9 aa, Homo sapiens
  misc_feature: Table A; Target 26745; HLA-A*29:02; GPR143; ENSG00000101850; TAA
IINESLLFY

SEQ ID NO: 26746 - protein, 9 aa, Homo sapiens
  misc_feature: Table A; Target 26746; HLA-A*30:02; GPR143; ENSG00000101850; TAA
IINESLLFY

SEQ ID NO: 26747 - protein, 9 aa, Homo sapiens
  misc_feature: Table A; Target 26747; HLA-B*15:01; GPR143; ENSG00000101850; TAA
IINESLLFY

SEQ ID NO: 26748 - protein, 9 aa, Homo sapiens
  misc_feature: Table A; Target 26748; HLA-B*15:03; GPR143; ENSG00000101850; TAA
IINESLLFY

SEQ ID NO: 26749 - protein, 9 aa, Homo sapiens
  misc_feature: Table A; Target 26749; HLA-B*46:01; GPR143; ENSG00000101850; TAA
IINESLLFY

SEQ ID NO: 26750 - protein, 9 aa, Homo sapiens
  misc_feature: Table A; Target 26750; HLA-C*02:02; GPR143; ENSG00000101850; TAA
IINESLLFY

SEQ ID NO: 26751 - protein, 9 aa, Homo sapiens
  misc_feature: Table A; Target 26751; HLA-C*07:04; GPR143; ENSG00000101850; TAA
IINESLLFY

SEQ ID NO: 26752 - protein, 10 aa, Homo sapiens
  misc_feature: Table A; Target 26752; HLA-A*02:04; GPR143; ENSG00000101850; TAA
IINESLLFYL

SEQ ID NO: 26753 - protein, 10 aa, Homo sapiens
  misc_feature: Table A; Target 26753; HLA-A*02:07; GPR143; ENSG00000101850; TAA
IINESLLFYL

SEQ ID NO: 26754 - protein, 8 aa, Homo sapiens
  misc_feature: Table A; Target 26754; HLA-B*08:01; GPR143; ENSG00000101850; TAA
ILFQKTVT

SEQ ID NO: 26755 - protein, 9 aa, Homo sapiens
  misc_feature: Table A; Target 26755; HLA-A*02:01; GPR143; ENSG00000101850; TAA
ILFQKTVTA

SEQ ID NO: 26756 - protein, 9 aa, Homo sapiens
  misc_feature: Table A; Target 26756; HLA-A*02:03; GPR143; ENSG00000101850; TAA
ILFQKTVTA

SEQ ID NO: 26757 - protein, 9 aa, Homo sapiens
  misc_feature: Table A; Target 26757; HLA-A*02:04; GPR143; ENSG00000101850; TAA
ILFQKTVTA

SEQ ID NO: 26758 - protein, 9 aa, Homo sapiens
  misc_feature: Table A; Target 26758; HLA-A*02:07; GPR143; ENSG00000101850; TAA
ILFQKTVTA

SEQ ID NO: 26759 - protein, 9 aa, Homo sapiens
  misc_feature: Table A; Target 26759; HLA-A*32:01; GPR143; ENSG00000101850; TAA
ILFQKTVTA

SEQ ID NO: 26760 - protein, 9 aa, Homo sapiens
  misc_feature: Table A; Target 26760; HLA-B*08:01; GPR143; ENSG00000101850; TAA
ILFQKTVTA

SEQ ID NO: 26761 - protein, 9 aa, Homo sapiens
  misc_feature: Table A; Target 26761; HLA-B*13:02; GPR143; ENSG00000101850; TAA
ILFQKTVTA

SEQ ID NO: 26762 - protein, 9 aa, Homo sapiens
  misc_feature: Table A; Target 26762; HLA-B*15:01; GPR143; ENSG00000101850; TAA
ILFQKTVTA

SEQ ID NO: 26763 - protein, 9 aa, Homo sapiens
  misc_feature: Table A; Target 26763; HLA-B*46:01; GPR143; ENSG00000101850; TAA
ILFQKTVTA

SEQ ID NO: 26764 - protein, 9 aa, Homo sapiens
  misc_feature: Table A; Target 26764; HLA-B*54:01; GPR143; ENSG00000101850; TAA
ILFQKTVTA

SEQ ID NO: 26765 - protein, 9 aa, Homo sapiens
  misc_feature: Table A; Target 26765; HLA-B*55:01; GPR143; ENSG00000101850; TAA
ILFQKTVTA

SEQ ID NO: 26766 - protein, 9 aa, Homo sapiens
  misc_feature: Table A; Target 26766; HLA-B*56:01; GPR143; ENSG00000101850; TAA
ILFQKTVTA

SEQ ID NO: 26767 - protein, 9 aa, Homo sapiens
  misc_feature: Table A; Target 26767; HLA-C*02:02; GPR143; ENSG00000101850; TAA
ILFQKTVTA

SEQ ID NO: 26768 - protein, 9 aa, Homo sapiens
  misc_feature: Table A; Target 26768; HLA-C*14:02; GPR143; ENSG00000101850; TAA
ILFQKTVTA

SEQ ID NO: 26769 - protein, 10 aa, Homo sapiens
  misc_feature: Table A; Target 26769; HLA-A*02:01; GPR143; ENSG00000101850; TAA
ILFQKTVTAV

SEQ ID NO: 26770 - protein, 10 aa, Homo sapiens
  misc_feature: Table A; Target 26770; HLA-A*02:03; GPR143; ENSG00000101850; TAA
ILFQKTVTAV

SEQ ID NO: 26771 - protein, 10 aa, Homo sapiens
  misc_feature: Table A; Target 26771; HLA-A*02:04; GPR143; ENSG00000101850; TAA
ILFQKTVTAV

SEQ ID NO: 26772 - protein, 10 aa, Homo sapiens
  misc_feature: Table A; Target 26772; HLA-A*02:07; GPR143; ENSG00000101850; TAA
ILFQKTVTAV

SEQ ID NO: 26773 - protein, 10 aa, Homo sapiens
  misc_feature: Table A; Target 26773; HLA-A*68:02; GPR143; ENSG00000101850; TAA
ILFQKTVTAV

SEQ ID NO: 26774 - protein, 10 aa, Homo sapiens
  misc_feature: Table A; Target 26774; HLA-B*13:02; GPR143; ENSG00000101850; TAA
ILFQKTVTAV

SEQ ID NO: 26775 - protein, 10 aa, Homo sapiens
  misc_feature: Table A; Target 26775; HLA-B*55:01; GPR143; ENSG00000101850; TAA
ILFQKTVTAV

SEQ ID NO: 26776 - protein, 11 aa, Homo sapiens
  misc_feature: Table A; Target 26776; HLA-A*02:03; GPR143; ENSG00000101850; TAA
ILFQKTVTAVA

SEQ ID NO: 26777 - protein, 9 aa, Homo sapiens
  misc_feature: Table A; Target 26777; HLA-B*57:01; GPR143; ENSG00000101850; TAA
ILLYHIMAW

SEQ ID NO: 26778 - protein, 8 aa, Homo sapiens
  misc_feature: Table A; Target 26778; HLA-A*23:01; GPR143; ENSG00000101850; TAA
ILNPAQGF

SEQ ID NO: 26779 - protein, 8 aa, Homo sapiens
  misc_feature: Table A; Target 26779; HLA-A*32:01; GPR143; ENSG00000101850; TAA
ILNPAQGF

SEQ ID NO: 26780 - protein, 8 aa, Homo sapiens
  misc_feature: Table A; Target 26780; HLA-B*15:01; GPR143; ENSG00000101850; TAA
ILNPAQGF

SEQ ID NO: 26781 - protein, 8 aa, Homo sapiens
  misc_feature: Table A; Target 26781; HLA-B*37:01; GPR143; ENSG00000101850; TAA
ILNPAQGF

SEQ ID NO: 26782 - protein, 8 aa, Homo sapiens
  misc_feature: Table A; Target 26782; HLA-B*46:01; GPR143; ENSG00000101850; TAA
ILNPAQGF

SEQ ID NO: 26783 - protein, 8 aa, Homo sapiens
  misc_feature: Table A; Target 26783; HLA-C*14:02; GPR143; ENSG00000101850; TAA
ILNPAQGF

SEQ ID NO: 26784 - protein, 9 aa, Homo sapiens
  misc_feature: Table A; Target 26784; HLA-A*02:03; GPR143; ENSG00000101850; TAA
ILNPAQGFL

SEQ ID NO: 26785 - protein, 9 aa, Homo sapiens
  misc_feature: Table A; Target 26785; HLA-A*02:04; GPR143; ENSG00000101850; TAA
ILNPAQGFL

SEQ ID NO: 26786 - protein, 9 aa, Homo sapiens
  misc_feature: Table A; Target 26786; HLA-A*03:01; GPR143; ENSG00000101850; TAA
ILNPAQGFL

SEQ ID NO: 26787 - protein, 9 aa, Homo sapiens
  misc_feature: Table A; Target 26787; HLA-A*32:01; GPR143; ENSG00000101850; TAA
ILNPAQGFL

SEQ ID NO: 26788 - protein, 9 aa, Homo sapiens
  misc_feature: Table A; Target 26788; HLA-B*15:01; GPR143; ENSG00000101850; TAA
ILNPAQGFL

SEQ ID NO: 26789 - protein, 10 aa, Homo sapiens
  misc_feature: Table A; Target 26789; HLA-A*02:01; GPR143; ENSG00000101850; TAA
ILNPAQGFLL

SEQ ID NO: 26790 - protein, 10 aa, Homo sapiens
  misc_feature: Table A; Target 26790; HLA-A*02:03; GPR143; ENSG00000101850; TAA
ILNPAQGFLL

SEQ ID NO: 26791 - protein, 10 aa, Homo sapiens
  misc_feature: Table A; Target 26791; HLA-A*02:04; GPR143; ENSG00000101850; TAA
ILNPAQGFLL

SEQ ID NO: 26792 - protein, 10 aa, Homo sapiens
  misc_feature: Table A; Target 26792; HLA-A*02:07; GPR143; ENSG00000101850; TAA
ILNPAQGFLL

SEQ ID NO: 26793 - protein, 10 aa, Homo sapiens
  misc_feature: Table A; Target 26793; HLA-A*03:01; GPR143; ENSG00000101850; TAA
ILNPAQGFLL

SEQ ID NO: 26794 - protein, 10 aa, Homo sapiens
  misc_feature: Table A; Target 26794; HLA-A*03:02; GPR143; ENSG00000101850; TAA
ILNPAQGFLL

SEQ ID NO: 26795 - protein, 10 aa, Homo sapiens
  misc_feature: Table A; Target 26795; HLA-A*23:01; GPR143; ENSG00000101850; TAA
ILNPAQGFLL

SEQ ID NO: 26796 - protein, 10 aa, Homo sapiens
  misc_feature: Table A; Target 26796; HLA-A*24:02; GPR143; ENSG00000101850; TAA
ILNPAQGFLL

SEQ ID NO: 26797 - protein, 10 aa, Homo sapiens
  misc_feature: Table A; Target 26797; HLA-A*29:02; GPR143; ENSG00000101850; TAA
ILNPAQGFLL

SEQ ID NO: 26798 - protein, 10 aa, Homo sapiens
  misc_feature: Table A; Target 26798; HLA-A*31:01; GPR143; ENSG00000101850; TAA
ILNPAQGFLL

SEQ ID NO: 26799 - protein, 10 aa, Homo sapiens
  misc_feature: Table A; Target 26799; HLA-A*32:01; GPR143; ENSG00000101850; TAA
ILNPAQGFLL

SEQ ID NO: 26800 - protein, 10 aa, Homo sapiens
  misc_feature: Table A; Target 26800; HLA-B*58:01; GPR143; ENSG00000101850; TAA
ILNPAQGFLL

SEQ ID NO: 26801 - protein, 10 aa, Homo sapiens
  misc_feature: Table A; Target 26801; HLA-C*01:02; GPR143; ENSG00000101850; TAA
ILNPAQGFLL

SEQ ID NO: 26802 - protein, 10 aa, Homo sapiens
  misc_feature: Table A; Target 26802; HLA-C*02:02; GPR143; ENSG00000101850; TAA
ILNPAQGFLL

SEQ ID NO: 26803 - protein, 10 aa, Homo sapiens
  misc_feature: Table A; Target 26803; HLA-C*06:02; GPR143; ENSG00000101850; TAA
ILNPAQGFLL

SEQ ID NO: 26804 - protein, 10 aa, Homo sapiens
  misc_feature: Table A; Target 26804; HLA-C*14:02; GPR143; ENSG00000101850; TAA
ILNPAQGFLL

SEQ ID NO: 26805 - protein, 9 aa, Homo sapiens
  misc_feature: Table A; Target 26805; HLA-A*02:01; GPR143; ENSG00000101850; TAA
IMAWGLATL

SEQ ID NO: 26806 - protein, 9 aa, Homo sapiens
  misc_feature: Table A; Target 26806; HLA-A*02:03; GPR143; ENSG00000101850; TAA
IMAWGLATL

SEQ ID NO: 26807 - protein, 9 aa, Homo sapiens
  misc_feature: Table A; Target 26807; HLA-A*02:04; GPR143; ENSG00000101850; TAA
IMAWGLATL

SEQ ID NO: 26808 - protein, 9 aa, Homo sapiens
  misc_feature: Table A; Target 26808; HLA-B*46:01; GPR143; ENSG00000101850; TAA
IMAWGLATL

SEQ ID NO: 26809 - protein, 9 aa, Homo sapiens
  misc_feature: Table A; Target 26809; HLA-C*04:01; GPR143; ENSG00000101850; TAA
INGGSLKPV

SEQ ID NO: 26810 - protein, 8 aa, Homo sapiens
  misc_feature: Table A; Target 26810; HLA-B*18:01; GPR143; ENSG00000101850; TAA
IPHYVTMY

SEQ ID NO: 26811 - protein, 8 aa, Homo sapiens
  misc_feature: Table A; Target 26811; HLA-B*35:01; GPR143; ENSG00000101850; TAA
IPHYVTMY

SEQ ID NO: 26812 - protein, 8 aa, Homo sapiens
  misc_feature: Table A; Target 26812; HLA-B*55:01; GPR143; ENSG00000101850; TAA
IPHYVTMY

SEQ ID NO: 26813 - protein, 9 aa, Homo sapiens
  misc_feature: Table A; Target 26813; HLA-B*51:01; GPR143; ENSG00000101850; TAA
IPHYVTMYL

SEQ ID NO: 26814 - protein, 10 aa, Homo sapiens
  misc_feature: Table A; Target 26814; HLA-A*30:01; GPR143; ENSG00000101850; TAA
IQWESLTTSA

SEQ ID NO: 26815 - protein, 9 aa, Homo sapiens
  misc_feature: Table A; Target 26815; HLA-A*24:02; GPR143; ENSG00000101850; TAA
IYTENERRM

SEQ ID NO: 26816 - protein, 9 aa, Homo sapiens
  misc_feature: Table A; Target 26816; HLA-C*16:01; GPR143; ENSG00000101850; TAA
IYTENERRM

SEQ ID NO: 26817 - protein, 9 aa, Homo sapiens
  misc_feature: Table A; Target 26817; HLA-C*16:02; GPR143; ENSG00000101850; TAA
IYTENERRM

SEQ ID NO: 26818 - protein, 9 aa, Homo sapiens
  misc_feature: Table A; Target 26818; HLA-A*23:01; GPR143; ENSG00000101850; TAA
KTVTAVASL

SEQ ID NO: 26819 - protein, 9 aa, Homo sapiens
  misc_feature: Table A; Target 26819; HLA-A*24:02; GPR143; ENSG00000101850; TAA
KTVTAVASL

SEQ ID NO: 26820 - protein, 9 aa, Homo sapiens
  misc_feature: Table A; Target 26820; HLA-A*25:01; GPR143; ENSG00000101850; TAA
KTVTAVASL

SEQ ID NO: 26821 - protein, 9 aa, Homo sapiens
  misc_feature: Table A; Target 26821; HLA-A*26:01; GPR143; ENSG00000101850; TAA
KTVTAVASL

SEQ ID NO: 26822 - protein, 9 aa, Homo sapiens
  misc_feature: Table A; Target 26822; HLA-A*31:01; GPR143; ENSG00000101850; TAA
KTVTAVASL

SEQ ID NO: 26823 - protein, 9 aa, Homo sapiens
  misc_feature: Table A; Target 26823; HLA-A*32:01; GPR143; ENSG00000101850; TAA
KTVTAVASL

SEQ ID NO: 26824 - protein, 9 aa, Homo sapiens
  misc_feature: Table A; Target 26824; HLA-B*15:01; GPR143; ENSG00000101850; TAA
KTVTAVASL

SEQ ID NO: 26825 - protein, 9 aa, Homo sapiens
  misc_feature: Table A; Target 26825; HLA-B*40:01; GPR143; ENSG00000101850; TAA
KTVTAVASL

SEQ ID NO: 26826 - protein, 9 aa, Homo sapiens
  misc_feature: Table A; Target 26826; HLA-B*40:02; GPR143; ENSG00000101850; TAA
KTVTAVASL

SEQ ID NO: 26827 - protein, 9 aa, Homo sapiens
  misc_feature: Table A; Target 26827; HLA-B*46:01; GPR143; ENSG00000101850; TAA
KTVTAVASL

SEQ ID NO: 26828 - protein, 9 aa, Homo sapiens
  misc_feature: Table A; Target 26828; HLA-B*57:01; GPR143; ENSG00000101850; TAA
KTVTAVASL

SEQ ID NO: 26829 - protein, 9 aa, Homo sapiens
  misc_feature: Table A; Target 26829; HLA-B*58:01; GPR143; ENSG00000101850; TAA
KTVTAVASL

SEQ ID NO: 26830 - protein, 9 aa, Homo sapiens
  misc_feature: Table A; Target 26830; HLA-C*01:02; GPR143; ENSG00000101850; TAA
KTVTAVASL

SEQ ID NO: 26831 - protein, 9 aa, Homo sapiens
  misc_feature: Table A; Target 26831; HLA-C*02:02; GPR143; ENSG00000101850; TAA
KTVTAVASL

SEQ ID NO: 26832 - protein, 9 aa, Homo sapiens
  misc_feature: Table A; Target 26832; HLA-C*03:03; GPR143; ENSG00000101850; TAA
KTVTAVASL

SEQ ID NO: 26833 - protein, 9 aa, Homo sapiens
  misc_feature: Table A; Target 26833; HLA-C*03:04; GPR143; ENSG00000101850; TAA
KTVTAVASL

SEQ ID NO: 26834 - protein, 9 aa, Homo sapiens
  misc_feature: Table A; Target 26834; HLA-C*06:02; GPR143; ENSG00000101850; TAA
KTVTAVASL

SEQ ID NO: 26835 - protein, 9 aa, Homo sapiens
  misc_feature: Table A; Target 26835; HLA-C*12:03; GPR143; ENSG00000101850; TAA
KTVTAVASL

SEQ ID NO: 26836 - protein, 9 aa, Homo sapiens
  misc_feature: Table A; Target 26836; HLA-C*16:01; GPR143; ENSG00000101850; TAA
KTVTAVASL

SEQ ID NO: 26837 - protein, 9 aa, Homo sapiens
  misc_feature: Table A; Target 26837; HLA-C*16:02; GPR143; ENSG00000101850; TAA
KTVTAVASL

SEQ ID NO: 26838 - protein, 9 aa, Homo sapiens
  misc_feature: Table A; Target 26838; HLA-C*16:04; GPR143; ENSG00000101850; TAA
KTVTAVASL

SEQ ID NO: 26839 - protein, 10 aa, Homo sapiens
  misc_feature: Table A; Target 26839; HLA-B*40:02; GPR143; ENSG00000101850; TAA
KTVTAVASLL

SEQ ID NO: 26840 - protein, 10 aa, Homo sapiens
  misc_feature: Table A; Target 26840; HLA-B*57:01; GPR143; ENSG00000101850; TAA
KTVTAVASLL

SEQ ID NO: 26841 - protein, 10 aa, Homo sapiens
  misc_feature: Table A; Target 26841; HLA-B*58:01; GPR143; ENSG00000101850; TAA
KTVTAVASLL

SEQ ID NO: 26842 - protein, 10 aa, Homo sapiens
  misc_feature: Table A; Target 26842; HLA-C*06:02; GPR143; ENSG00000101850; TAA
KTVTAVASLL

SEQ ID NO: 26843 - protein, 10 aa, Homo sapiens
  misc_feature: Table A; Target 26843; HLA-C*07:02; GPR143; ENSG00000101850; TAA
KTVTAVASLL

SEQ ID NO: 26844 - protein, 11 aa, Homo sapiens
  misc_feature: Table A; Target 26844; HLA-A*01:01; GPR143; ENSG00000101850; TAA
KTVTAVASLLK

SEQ ID NO: 26845 - protein, 11 aa, Homo sapiens
  misc_feature: Table A; Target 26845; HLA-A*03:01; GPR143; ENSG00000101850; TAA
KTVTAVASLLK

SEQ ID NO: 26846 - protein, 11 aa, Homo sapiens
  misc_feature: Table A; Target 26846; HLA-A*03:02; GPR143; ENSG00000101850; TAA
KTVTAVASLLK

SEQ ID NO: 26847 - protein, 11 aa, Homo sapiens
  misc_feature: Table A; Target 26847; HLA-A*11:01; GPR143; ENSG00000101850; TAA
KTVTAVASLLK

SEQ ID NO: 26848 - protein, 11 aa, Homo sapiens
  misc_feature: Table A; Target 26848; HLA-B*27:02; GPR143; ENSG00000101850; TAA
KTVTAVASLLK

SEQ ID NO: 26849 - protein, 11 aa, Homo sapiens
  misc_feature: Table A; Target 26849; HLA-B*57:01; GPR143; ENSG00000101850; TAA
KTVTAVASLLK

SEQ ID NO: 26850 - protein, 11 aa, Homo sapiens
  misc_feature: Table A; Target 26850; HLA-B*58:01; GPR143; ENSG00000101850; TAA
KTVTAVASLLK

SEQ ID NO: 26851 - protein, 11 aa, Homo sapiens
  misc_feature: Table A; Target 26851; HLA-C*06:02; GPR143; ENSG00000101850; TAA
KTVTAVASLLK

SEQ ID NO: 26852 - protein, 9 aa, Homo sapiens
  misc_feature: Table A; Target 26852; HLA-B*58:01; GPR143; ENSG00000101850; TAA
KVSQVGGQT

SEQ ID NO: 26853 - protein, 9 aa, Homo sapiens
  misc_feature: Table A; Target 26853; HLA-C*06:02; GPR143; ENSG00000101850; TAA
KVSQVGGQT

SEQ ID NO: 26854 - protein, 9 aa, Homo sapiens
  misc_feature: Table A; Target 26854; HLA-A*02:04; GPR143; ENSG00000101850; TAA
LALGLLQLL

SEQ ID NO: 26855 - protein, 8 aa, Homo sapiens
  misc_feature: Table A; Target 26855; HLA-B*46:01; GPR143; ENSG00000101850; TAA
LCVEGAAM

SEQ ID NO: 26856 - protein, 8 aa, Homo sapiens
  misc_feature: Table A; Target 26856; HLA-C*03:03; GPR143; ENSG00000101850; TAA
LCVEGAAM

SEQ ID NO: 26857 - protein, 8 aa, Homo sapiens
  misc_feature: Table A; Target 26857; HLA-C*03:04; GPR143; ENSG00000101850; TAA
LCVEGAAM

SEQ ID NO: 26858 - protein, 9 aa, Homo sapiens
  misc_feature: Table A; Target 26858; HLA-C*03:03; GPR143; ENSG00000101850; TAA
LCVEGAAML

SEQ ID NO: 26859 - protein, 9 aa, Homo sapiens
  misc_feature: Table A; Target 26859; HLA-C*03:04; GPR143; ENSG00000101850; TAA
LCVEGAAML

SEQ ID NO: 26860 - protein, 10 aa, Homo sapiens
  misc_feature: Table A; Target 26860; HLA-A*01:01; GPR143; ENSG00000101850; TAA
LCVEGAAMLY

SEQ ID NO: 26861 - protein, 10 aa, Homo sapiens
  misc_feature: Table A; Target 26861; HLA-A*29:02; GPR143; ENSG00000101850; TAA
LCVEGAAMLY

SEQ ID NO: 26862 - protein, 10 aa, Homo sapiens
  misc_feature: Table A; Target 26862; HLA-B*46:01; GPR143; ENSG00000101850; TAA
LCVEGAAMLY

SEQ ID NO: 26863 - protein, 10 aa, Homo sapiens
  misc_feature: Table A; Target 26863; HLA-C*07:01; GPR143; ENSG00000101850; TAA
LCVEGAAMLY

SEQ ID NO: 26864 - protein, 8 aa, Homo sapiens
  misc_feature: Table A; Target 26864; HLA-B*18:01; GPR143; ENSG00000101850; TAA
LDHAIPHY

SEQ ID NO: 26865 - protein, 8 aa, Homo sapiens
  misc_feature: Table A; Target 26865; HLA-B*37:01; GPR143; ENSG00000101850; TAA
LDHAIPHY

SEQ ID NO: 26866 - protein, 8 aa, Homo sapiens
  misc_feature: Table A; Target 26866; HLA-C*07:01; GPR143; ENSG00000101850; TAA
LDHAIPHY

SEQ ID NO: 26867 - protein, 9 aa, Homo sapiens
  misc_feature: Table A; Target 26867; HLA-A*68:02; GPR143; ENSG00000101850; TAA
LDHAIPHYV

SEQ ID NO: 26868 - protein, 9 aa, Homo sapiens
  misc_feature: Table A; Target 26868; HLA-B*55:01; GPR143; ENSG00000101850; TAA
LFQKTVTAV

SEQ ID NO: 26869 - protein, 9 aa, Homo sapiens
  misc_feature: Table A; Target 26869; HLA-C*04:01; GPR143; ENSG00000101850; TAA
LFQKTVTAV

SEQ ID NO: 26870 - protein, 9 aa, Homo sapiens
  misc_feature: Table A; Target 26870; HLA-C*14:02; GPR143; ENSG00000101850; TAA
LFQKTVTAV

SEQ ID NO: 26871 - protein, 9 aa, Homo sapiens
  misc_feature: Table A; Target 26871; HLA-B*51:01; GPR143; ENSG00000101850; TAA
LGMVIRSTV

SEQ ID NO: 26872 - protein, 8 aa, Homo sapiens
  misc_feature: Table A; Target 26872; HLA-C*03:04; GPR143; ENSG00000101850; TAA
LGSGGLRL

SEQ ID NO: 26873 - protein, 9 aa, Homo sapiens
  misc_feature: Table A; Target 26873; HLA-C*03:03; GPR143; ENSG00000101850; TAA
LLCVEGAAM

SEQ ID NO: 26874 - protein, 11 aa, Homo sapiens
  misc_feature: Table A; Target 26874; HLA-A*01:01; GPR143; ENSG00000101850; TAA
LLCVEGAAMLY

SEQ ID NO: 26875 - protein, 10 aa, Homo sapiens
  misc_feature: Table A; Target 26875; HLA-A*02:04; GPR143; ENSG00000101850; TAA
LLYHIMAWGL

SEQ ID NO: 26876 - protein, 9 aa, Homo sapiens
  misc_feature: Table A; Target 26876; HLA-A*24:02; GPR143; ENSG00000101850; TAA
LNPAQGFLL

SEQ ID NO: 26877 - protein, 8 aa, Homo sapiens
  misc_feature: Table A; Target 26877; HLA-B*51:01; GPR143; ENSG00000101850; TAA
LPLLLVLV

SEQ ID NO: 26878 - protein, 8 aa, Homo sapiens
  misc_feature: Table A; Target 26878; HLA-B*54:01; GPR143; ENSG00000101850; TAA
LPLLLVLV

SEQ ID NO: 26879 - protein, 8 aa, Homo sapiens
  misc_feature: Table A; Target 26879; HLA-B*56:01; GPR143; ENSG00000101850; TAA
LPLLLVLV

SEQ ID NO: 26880 - protein, 9 aa, Homo sapiens
  misc_feature: Table A; Target 26880; HLA-B*51:01; GPR143; ENSG00000101850; TAA
LPLLLVLVA

SEQ ID NO: 26881 - protein, 9 aa, Homo sapiens
  misc_feature: Table A; Target 26881; HLA-B*54:01; GPR143; ENSG00000101850; TAA
LPLLLVLVA

SEQ ID NO: 26882 - protein, 9 aa, Homo sapiens
  misc_feature: Table A; Target 26882; HLA-B*55:01; GPR143; ENSG00000101850; TAA
LPLLLVLVA

SEQ ID NO: 26883 - protein, 9 aa, Homo sapiens
  misc_feature: Table A; Target 26883; HLA-B*56:01; GPR143; ENSG00000101850; TAA
LPLLLVLVA

SEQ ID NO: 26884 - protein, 9 aa, Homo sapiens
  misc_feature: Table A; Target 26884; HLA-C*06:02; GPR143; ENSG00000101850; TAA
LRAAAACDL

SEQ ID NO: 26885 - protein, 9 aa, Homo sapiens
  misc_feature: Table A; Target 26885; HLA-C*07:02; GPR143; ENSG00000101850; TAA
LRAAAACDL

SEQ ID NO: 26886 - protein, 8 aa, Homo sapiens
  misc_feature: Table A; Target 26886; HLA-B*57:01; GPR143; ENSG00000101850; TAA
LSFQPRAF

SEQ ID NO: 26887 - protein, 8 aa, Homo sapiens
  misc_feature: Table A; Target 26887; HLA-C*16:01; GPR143; ENSG00000101850; TAA
LSFQPRAF

SEQ ID NO: 26888 - protein, 8 aa, Homo sapiens
  misc_feature: Table A; Target 26888; HLA-B*57:01; GPR143; ENSG00000101850; TAA
LSLAFYGW

SEQ ID NO: 26889 - protein, 9 aa, Homo sapiens
  misc_feature: Table A; Target 26889; HLA-B*27:05; GPR143; ENSG00000101850; TAA
LSNIINESL

SEQ ID NO: 26890 - protein, 9 aa, Homo sapiens
  misc_feature: Table A; Target 26890; HLA-B*46:01; GPR143; ENSG00000101850; TAA
LSNIINESL

SEQ ID NO: 26891 - protein, 9 aa, Homo sapiens
  misc_feature: Table A; Target 26891; HLA-B*57:01; GPR143; ENSG00000101850; TAA
LSNIINESL

SEQ ID NO: 26892 - protein, 9 aa, Homo sapiens
  misc_feature: Table A; Target 26892; HLA-B*58:01; GPR143; ENSG00000101850; TAA
LSNIINESL

SEQ ID NO: 26893 - protein, 9 aa, Homo sapiens
  misc_feature: Table A; Target 26893; HLA-C*01:02; GPR143; ENSG00000101850; TAA
LSNIINESL

SEQ ID NO: 26894 - protein, 9 aa, Homo sapiens
  misc_feature: Table A; Target 26894; HLA-C*02:02; GPR143; ENSG00000101850; TAA
LSNIINESL

SEQ ID NO: 26895 - protein, 9 aa, Homo sapiens
  misc_feature: Table A; Target 26895; HLA-C*03:03; GPR143; ENSG00000101850; TAA
LSNIINESL

SEQ ID NO: 26896 - protein, 9 aa, Homo sapiens
  misc_feature: Table A; Target 26896; HLA-C*03:04; GPR143; ENSG00000101850; TAA
LSNIINESL

SEQ ID NO: 26897 - protein, 9 aa, Homo sapiens
  misc_feature: Table A; Target 26897; HLA-C*14:02; GPR143; ENSG00000101850; TAA
LSNIINESL

SEQ ID NO: 26898 - protein, 8 aa, Homo sapiens
  misc_feature: Table A; Target 26898; HLA-A*23:01; GPR143; ENSG00000101850; TAA
LVANPILF

SEQ ID NO: 26899 - protein, 8 aa, Homo sapiens
  misc_feature: Table A; Target 26899; HLA-B*57:01; GPR143; ENSG00000101850; TAA
LVANPILF

SEQ ID NO: 26900 - protein, 10 aa, Homo sapiens
  misc_feature: Table A; Target 26900; HLA-A*03:01; GPR143; ENSG00000101850; TAA
LVANPILFQK

SEQ ID NO: 26901 - protein, 10 aa, Homo sapiens
  misc_feature: Table A; Target 26901; HLA-A*03:02; GPR143; ENSG00000101850; TAA
LVANPILFQK

SEQ ID NO: 26902 - protein, 10 aa, Homo sapiens
  misc_feature: Table A; Target 26902; HLA-A*11:01; GPR143; ENSG00000101850; TAA
LVANPILFQK

SEQ ID NO: 26903 - protein, 10 aa, Homo sapiens
  misc_feature: Table A; Target 26903; HLA-A*68:01; GPR143; ENSG00000101850; TAA
LVANPILFQK

SEQ ID NO: 26904 - protein, 10 aa, Homo sapiens
  misc_feature: Table A; Target 26904; HLA-A*68:02; GPR143; ENSG00000101850; TAA
LVANPILFQK

SEQ ID NO: 26905 - protein, 10 aa, Homo sapiens
  misc_feature: Table A; Target 26905; HLA-B*27:02; GPR143; ENSG00000101850; TAA
LVANPILFQK

SEQ ID NO: 26906 - protein, 10 aa, Homo sapiens
  misc_feature: Table A; Target 26906; HLA-C*07:06; GPR143; ENSG00000101850; TAA
LVANPILFQK

SEQ ID NO: 26907 - protein, 9 aa, Homo sapiens
  misc_feature: Table A; Target 26907; HLA-B*08:01; GPR143; ENSG00000101850; TAA
LVIRRSAGL

SEQ ID NO: 26908 - protein, 8 aa, Homo sapiens
  misc_feature: Table A; Target 26908; HLA-A*31:01; GPR143; ENSG00000101850; TAA
LVLSFQPR

SEQ ID NO: 26909 - protein, 9 aa, Homo sapiens
  misc_feature: Table A; Target 26909; HLA-B*54:01; GPR143; ENSG00000101850; TAA
LVLSFQPRA

SEQ ID NO: 26910 - protein, 10 aa, Homo sapiens
  misc_feature: Table A; Target 26910; HLA-B*57:01; GPR143; ENSG00000101850; TAA
LVLSFQPRAF

SEQ ID NO: 26911 - protein, 10 aa, Homo sapiens
  misc_feature: Table A; Target 26911; HLA-B*57:01; GPR143; ENSG00000101850; TAA
LVLVANPILF

SEQ ID NO: 26912 - protein, 8 aa, Homo sapiens
  misc_feature: Table A; Target 26912; HLA-A*31:01; GPR143; ENSG00000101850; TAA
LYYPSVSR

SEQ ID NO: 26913 - protein, 8 aa, Homo sapiens
  misc_feature: Table A; Target 26913; HLA-A*33:01; GPR143; ENSG00000101850; TAA
LYYPSVSR

SEQ ID NO: 26914 - protein, 8 aa, Homo sapiens
  misc_feature: Table A; Target 26914; HLA-A*33:03; GPR143; ENSG00000101850; TAA
LYYPSVSR

SEQ ID NO: 26915 - protein, 11 aa, Homo sapiens
  misc_feature: Table A; Target 26915; HLA-A*31:01; GPR143; ENSG00000101850; TAA
LYYPSVSRCER

SEQ ID NO: 26916 - protein, 9 aa, Homo sapiens
  misc_feature: Table A; Target 26916; HLA-A*23:01; GPR143; ENSG00000101850; TAA
MASPRLGTF

SEQ ID NO: 26917 - protein, 9 aa, Homo sapiens
  misc_feature: Table A; Target 26917; HLA-A*25:01; GPR143; ENSG00000101850; TAA
MASPRLGTF

SEQ ID NO: 26918 - protein, 9 aa, Homo sapiens
  misc_feature: Table A; Target 26918; HLA-A*30:02; GPR143; ENSG00000101850; TAA
MASPRLGTF

SEQ ID NO: 26919 - protein, 9 aa, Homo sapiens
  misc_feature: Table A; Target 26919; HLA-A*32:01; GPR143; ENSG00000101850; TAA
MASPRLGTF

SEQ ID NO: 26920 - protein, 9 aa, Homo sapiens
  misc_feature: Table A; Target 26920; HLA-B*07:02; GPR143; ENSG00000101850; TAA
MASPRLGTF

SEQ ID NO: 26921 - protein, 9 aa, Homo sapiens
  misc_feature: Table A; Target 26921; HLA-B*08:01; GPR143; ENSG00000101850; TAA
MASPRLGTF

SEQ ID NO: 26922 - protein, 9 aa, Homo sapiens
  misc_feature: Table A; Target 26922; HLA-B*35:01; GPR143; ENSG00000101850; TAA
MASPRLGTF

SEQ ID NO: 26923 - protein, 9 aa, Homo sapiens
  misc_feature: Table A; Target 26923; HLA-B*37:01; GPR143; ENSG00000101850; TAA
MASPRLGTF

SEQ ID NO: 26924 - protein, 9 aa, Homo sapiens
  misc_feature: Table A; Target 26924; HLA-B*46:01; GPR143; ENSG00000101850; TAA
MASPRLGTF

SEQ ID NO: 26925 - protein, 9 aa, Homo sapiens
  misc_feature: Table A; Target 26925; HLA-B*57:01; GPR143; ENSG00000101850; TAA
MASPRLGTF

SEQ ID NO: 26926 - protein, 9 aa, Homo sapiens
  misc_feature: Table A; Target 26926; HLA-B*58:01; GPR143; ENSG00000101850; TAA
MASPRLGTF

SEQ ID NO: 26927 - protein, 9 aa, Homo sapiens
  misc_feature: Table A; Target 26927; HLA-C*02:02; GPR143; ENSG00000101850; TAA
MASPRLGTF

SEQ ID NO: 26928 - protein, 9 aa, Homo sapiens
  misc_feature: Table A; Target 26928; HLA-C*03:04; GPR143; ENSG00000101850; TAA
MASPRLGTF

SEQ ID NO: 26929 - protein, 9 aa, Homo sapiens
  misc_feature: Table A; Target 26929; HLA-C*12:03; GPR143; ENSG00000101850; TAA
MASPRLGTF

SEQ ID NO: 26930 - protein, 9 aa, Homo sapiens
  misc_feature: Table A; Target 26930; HLA-C*16:01; GPR143; ENSG00000101850; TAA
MASPRLGTF

SEQ ID NO: 26931 - protein, 9 aa, Homo sapiens
  misc_feature: Table A; Target 26931; HLA-C*16:02; GPR143; ENSG00000101850; TAA
MASPRLGTF

SEQ ID NO: 26932 - protein, 9 aa, Homo sapiens
  misc_feature: Table A; Target 26932; HLA-C*16:04; GPR143; ENSG00000101850; TAA
MASPRLGTF

SEQ ID NO: 26933 - protein, 8 aa, Homo sapiens
  misc_feature: Table A; Target 26933; HLA-B*51:01; GPR143; ENSG00000101850; TAA
MAWGLATL

SEQ ID NO: 26934 - protein, 9 aa, Homo sapiens
  misc_feature: Table A; Target 26934; HLA-A*02:07; GPR143; ENSG00000101850; TAA
MAWGLATLL

SEQ ID NO: 26935 - protein, 9 aa, Homo sapiens
  misc_feature: Table A; Target 26935; HLA-A*23:01; GPR143; ENSG00000101850; TAA
MAWGLATLL

SEQ ID NO: 26936 - protein, 9 aa, Homo sapiens
  misc_feature: Table A; Target 26936; HLA-A*68:02; GPR143; ENSG00000101850; TAA
MAWGLATLL

SEQ ID NO: 26937 - protein, 9 aa, Homo sapiens
  misc_feature: Table A; Target 26937; HLA-B*35:01; GPR143; ENSG00000101850; TAA
MAWGLATLL

SEQ ID NO: 26938 - protein, 9 aa, Homo sapiens
  misc_feature: Table A; Target 26938; HLA-B*35:03; GPR143; ENSG00000101850; TAA
MAWGLATLL

SEQ ID NO: 26939 - protein, 9 aa, Homo sapiens
  misc_feature: Table A; Target 26939; HLA-B*51:01; GPR143; ENSG00000101850; TAA
MAWGLATLL

SEQ ID NO: 26940 - protein, 9 aa, Homo sapiens
  misc_feature: Table A; Target 26940; HLA-B*54:01; GPR143; ENSG00000101850; TAA
MAWGLATLL

SEQ ID NO: 26941 - protein, 9 aa, Homo sapiens
  misc_feature: Table A; Target 26941; HLA-C*02:02; GPR143; ENSG00000101850; TAA
MAWGLATLL

SEQ ID NO: 26942 - protein, 9 aa, Homo sapiens
  misc_feature: Table A; Target 26942; HLA-C*07:01; GPR143; ENSG00000101850; TAA
MAWGLATLL

SEQ ID NO: 26943 - protein, 9 aa, Homo sapiens
  misc_feature: Table A; Target 26943; HLA-C*07:04; GPR143; ENSG00000101850; TAA
MAWGLATLL

SEQ ID NO: 26944 - protein, 9 aa, Homo sapiens
  misc_feature: Table A; Target 26944; HLA-C*12:03; GPR143; ENSG00000101850; TAA
MAWGLATLL

SEQ ID NO: 26945 - protein, 11 aa, Homo sapiens
  misc_feature: Table A; Target 26945; HLA-B*38:01; GPR143; ENSG00000101850; TAA
MLSEGSDASTI

SEQ ID NO: 26946 - protein, 9 aa, Homo sapiens
  misc_feature: Table A; Target 26946; HLA-A*03:01; GPR143; ENSG00000101850; TAA
MLYYPSVSR

SEQ ID NO: 26947 - protein, 9 aa, Homo sapiens
  misc_feature: Table A; Target 26947; HLA-A*03:02; GPR143; ENSG00000101850; TAA
MLYYPSVSR

SEQ ID NO: 26948 - protein, 9 aa, Homo sapiens
  misc_feature: Table A; Target 26948; HLA-A*11:01; GPR143; ENSG00000101850; TAA
MLYYPSVSR

SEQ ID NO: 26949 - protein, 9 aa, Homo sapiens
  misc_feature: Table A; Target 26949; HLA-A*31:01; GPR143; ENSG00000101850; TAA
MLYYPSVSR

SEQ ID NO: 26950 - protein, 9 aa, Homo sapiens
  misc_feature: Table A; Target 26950; HLA-A*33:01; GPR143; ENSG00000101850; TAA
MLYYPSVSR

SEQ ID NO: 26951 - protein, 9 aa, Homo sapiens
  misc_feature: Table A; Target 26951; HLA-A*33:03; GPR143; ENSG00000101850; TAA
MLYYPSVSR

SEQ ID NO: 26952 - protein, 9 aa, Homo sapiens
  misc_feature: Table A; Target 26952; HLA-A*68:01; GPR143; ENSG00000101850; TAA
MLYYPSVSR

SEQ ID NO: 26953 - protein, 9 aa, Homo sapiens
  misc_feature: Table A; Target 26953; HLA-B*35:01; GPR143; ENSG00000101850; TAA
MLYYPSVSR

SEQ ID NO: 26954 - protein, 9 aa, Homo sapiens
  misc_feature: Table A; Target 26954; HLA-B*54:01; GPR143; ENSG00000101850; TAA
MLYYPSVSR

SEQ ID NO: 26955 - protein, 9 aa, Homo sapiens
  misc_feature: Table A; Target 26955; HLA-C*07:06; GPR143; ENSG00000101850; TAA
MLYYPSVSR

SEQ ID NO: 26956 - protein, 9 aa, Homo sapiens
  misc_feature: Table A; Target 26956; HLA-B*35:01; GPR143; ENSG00000101850; TAA
MPHENPASG

SEQ ID NO: 26957 - protein, 9 aa, Homo sapiens
  misc_feature: Table A; Target 26957; HLA-B*35:03; GPR143; ENSG00000101850; TAA
MPHENPASG

SEQ ID NO: 26958 - protein, 9 aa, Homo sapiens
  misc_feature: Table A; Target 26958; HLA-B*54:01; GPR143; ENSG00000101850; TAA
MPHENPASG

SEQ ID NO: 26959 - protein, 9 aa, Homo sapiens
  misc_feature: Table A; Target 26959; HLA-B*55:01; GPR143; ENSG00000101850; TAA
MPHENPASG

SEQ ID NO: 26960 - protein, 9 aa, Homo sapiens
  misc_feature: Table A; Target 26960; HLA-B*56:01; GPR143; ENSG00000101850; TAA
MPHENPASG

SEQ ID NO: 26961 - protein, 10 aa, Homo sapiens
  misc_feature: Table A; Target 26961; HLA-C*07:06; GPR143; ENSG00000101850; TAA
MPHENPASGK

SEQ ID NO: 26962 - protein, 11 aa, Homo sapiens
  misc_feature: Table A; Target 26962; HLA-B*35:01; GPR143; ENSG00000101850; TAA
MPHENPASGKV

SEQ ID NO: 26963 - protein, 11 aa, Homo sapiens
  misc_feature: Table A; Target 26963; HLA-B*35:03; GPR143; ENSG00000101850; TAA
MPHENPASGKV

SEQ ID NO: 26964 - protein, 11 aa, Homo sapiens
  misc_feature: Table A; Target 26964; HLA-B*51:01; GPR143; ENSG00000101850; TAA
MPHENPASGKV

SEQ ID NO: 26965 - protein, 11 aa, Homo sapiens
  misc_feature: Table A; Target 26965; HLA-B*54:01; GPR143; ENSG00000101850; TAA
MPHENPASGKV

SEQ ID NO: 26966 - protein, 11 aa, Homo sapiens
  misc_feature: Table A; Target 26966; HLA-B*56:01; GPR143; ENSG00000101850; TAA
MPHENPASGKV

SEQ ID NO: 26967 - protein, 10 aa, Homo sapiens
  misc_feature: Table A; Target 26967; HLA-A*25:01; GPR143; ENSG00000101850; TAA
MQTDINGGSL

SEQ ID NO: 26968 - protein, 10 aa, Homo sapiens
  misc_feature: Table A; Target 26968; HLA-A*30:01; GPR143; ENSG00000101850; TAA
MQTDINGGSL

SEQ ID NO: 26969 - protein, 10 aa, Homo sapiens
  misc_feature: Table A; Target 26969; HLA-B*15:03; GPR143; ENSG00000101850; TAA
MQTDINGGSL

SEQ ID NO: 26970 - protein, 10 aa, Homo sapiens
  misc_feature: Table A; Target 26970; HLA-B*27:05; GPR143; ENSG00000101850; TAA
MQTDINGGSL

SEQ ID NO: 26971 - protein, 10 aa, Homo sapiens
  misc_feature: Table A; Target 26971; HLA-B*38:01; GPR143; ENSG00000101850; TAA
MQTDINGGSL

SEQ ID NO: 26972 - protein, 10 aa, Homo sapiens
  misc_feature: Table A; Target 26972; HLA-B*39:01; GPR143; ENSG00000101850; TAA
MQTDINGGSL

SEQ ID NO: 26973 - protein, 10 aa, Homo sapiens
  misc_feature: Table A; Target 26973; HLA-B*40:01; GPR143; ENSG00000101850; TAA
MQTDINGGSL

SEQ ID NO: 26974 - protein, 10 aa, Homo sapiens
  misc_feature: Table A; Target 26974; HLA-B*40:02; GPR143; ENSG00000101850; TAA
MQTDINGGSL

SEQ ID NO: 26975 - protein, 10 aa, Homo sapiens
  misc_feature: Table A; Target 26975; HLA-C*03:03; GPR143; ENSG00000101850; TAA
MQTDINGGSL

SEQ ID NO: 26976 - protein, 10 aa, Homo sapiens
  misc_feature: Table A; Target 26976; HLA-C*03:04; GPR143; ENSG00000101850; TAA
MQTDINGGSL

SEQ ID NO: 26977 - protein, 10 aa, Homo sapiens
  misc_feature: Table A; Target 26977; HLA-C*07:04; GPR143; ENSG00000101850; TAA
MQTDINGGSL

SEQ ID NO: 26978 - protein, 11 aa, Homo sapiens
  misc_feature: Table A; Target 26978; HLA-B*38:01; GPR143; ENSG00000101850; TAA
MQTDINGGSLK

SEQ ID NO: 26979 - protein, 8 aa, Homo sapiens
  misc_feature: Table A; Target 26979; HLA-A*25:01; GPR143; ENSG00000101850; TAA
MVIRSTVW

SEQ ID NO: 26980 - protein, 8 aa, Homo sapiens
  misc_feature: Table A; Target 26980; HLA-B*57:01; GPR143; ENSG00000101850; TAA
MVIRSTVW

SEQ ID NO: 26981 - protein, 8 aa, Homo sapiens
  misc_feature: Table A; Target 26981; HLA-B*58:01; GPR143; ENSG00000101850; TAA
MVIRSTVW

SEQ ID NO: 26982 - protein, 9 aa, Homo sapiens
  misc_feature: Table A; Target 26982; HLA-A*23:01; GPR143; ENSG00000101850; TAA
MYLPLLLVL

SEQ ID NO: 26983 - protein, 9 aa, Homo sapiens
  misc_feature: Table A; Target 26983; HLA-A*24:02; GPR143; ENSG00000101850; TAA
MYLPLLLVL

SEQ ID NO: 26984 - protein, 9 aa, Homo sapiens
  misc_feature: Table A; Target 26984; HLA-A*29:02; GPR143; ENSG00000101850; TAA
MYLPLLLVL

SEQ ID NO: 26985 - protein, 9 aa, Homo sapiens
  misc_feature: Table A; Target 26985; HLA-B*18:01; GPR143; ENSG00000101850; TAA
NEGDPALPT

SEQ ID NO: 26986 - protein, 8 aa, Homo sapiens
  misc_feature: Table A; Target 26986; HLA-B*18:01; GPR143; ENSG00000101850; TAA
NESLLFYL

SEQ ID NO: 26987 - protein, 8 aa, Homo sapiens
  misc_feature: Table A; Target 26987; HLA-B*37:01; GPR143; ENSG00000101850; TAA
NESLLFYL

SEQ ID NO: 26988 - protein, 9 aa, Homo sapiens
  misc_feature: Table A; Target 26988; HLA-C*01:02; GPR143; ENSG00000101850; TAA
NFVDSVSDM

SEQ ID NO: 26989 - protein, 9 aa, Homo sapiens
  misc_feature: Table A; Target 26989; HLA-C*14:02; GPR143; ENSG00000101850; TAA
NFVDSVSDM

SEQ ID NO: 26990 - protein, 9 aa, Homo sapiens
  misc_feature: Table A; Target 26990; HLA-B*54:01; GPR143; ENSG00000101850; TAA
NHTEIWPAA

SEQ ID NO: 26991 - protein, 9 aa, Homo sapiens
  misc_feature: Table A; Target 26991; HLA-A*23:01; GPR143; ENSG00000101850; TAA
NIINESLLF

SEQ ID NO: 26992 - protein, 9 aa, Homo sapiens
  misc_feature: Table A; Target 26992; HLA-A*24:02; GPR143; ENSG00000101850; TAA
NIINESLLF

SEQ ID NO: 26993 - protein, 9 aa, Homo sapiens
  misc_feature: Table A; Target 26993; HLA-A*25:01; GPR143; ENSG00000101850; TAA
NIINESLLF

SEQ ID NO: 26994 - protein, 9 aa, Homo sapiens
  misc_feature: Table A; Target 26994; HLA-A*26:01; GPR143; ENSG00000101850; TAA
NIINESLLF

SEQ ID NO: 26995 - protein, 9 aa, Homo sapiens
  misc_feature: Table A; Target 26995; HLA-A*29:02; GPR143; ENSG00000101850; TAA
NIINESLLF

SEQ ID NO: 26996 - protein, 9 aa, Homo sapiens
  misc_feature: Table A; Target 26996; HLA-B*35:01; GPR143; ENSG00000101850; TAA
NIINESLLF

SEQ ID NO: 26997 - protein, 9 aa, Homo sapiens
  misc_feature: Table A; Target 26997; HLA-B*38:01; GPR143; ENSG00000101850; TAA
NIINESLLF

SEQ ID NO: 26998 - protein, 10 aa, Homo sapiens
  misc_feature: Table A; Target 26998; HLA-A*01:01; GPR143; ENSG00000101850; TAA
NIINESLLFY

SEQ ID NO: 26999 - protein, 10 aa, Homo sapiens
  misc_feature: Table A; Target 26999; HLA-A*25:01; GPR143; ENSG00000101850; TAA
NIINESLLFY

SEQ ID NO: 27000 - protein, 10 aa, Homo sapiens
  misc_feature: Table A; Target 27000; HLA-A*26:01; GPR143; ENSG00000101850; TAA
NIINESLLFY

SEQ ID NO: 27001 - protein, 10 aa, Homo sapiens
  misc_feature: Table A; Target 27001; HLA-A*29:02; GPR143; ENSG00000101850; TAA
NIINESLLFY

SEQ ID NO: 27002 - protein, 11 aa, Homo sapiens
  misc_feature: Table A; Target 27002; HLA-A*02:01; GPR143; ENSG00000101850; TAA
NIINESLLFYL

SEQ ID NO: 27003 - protein, 11 aa, Homo sapiens
  misc_feature: Table A; Target 27003; HLA-A*02:04; GPR143; ENSG00000101850; TAA
NIINESLLFYL

SEQ ID NO: 27004 - protein, 11 aa, Homo sapiens
  misc_feature: Table A; Target 27004; HLA-A*02:07; GPR143; ENSG00000101850; TAA
NIINESLLFYL

SEQ ID NO: 27005 - protein, 11 aa, Homo sapiens
  misc_feature: Table A; Target 27005; HLA-A*68:02; GPR143; ENSG00000101850; TAA
NIINESLLFYL

SEQ ID NO: 27006 - protein, 9 aa, Homo sapiens
  misc_feature: Table A; Target 27006; HLA-B*15:03; GPR143; ENSG00000101850; TAA
NKNEGDPAL

SEQ ID NO: 27007 - protein, 9 aa, Homo sapiens
  misc_feature: Table A; Target 27007; HLA-B*35:03; GPR143; ENSG00000101850; TAA
NKNEGDPAL

SEQ ID NO: 27008 - protein, 9 aa, Homo sapiens
  misc_feature: Table A; Target 27008; HLA-B*38:01; GPR143; ENSG00000101850; TAA
NKNEGDPAL

SEQ ID NO: 27009 - protein, 9 aa, Homo sapiens
  misc_feature: Table A; Target 27009; HLA-B*39:01; GPR143; ENSG00000101850; TAA
NKNEGDPAL

SEQ ID NO: 27010 - protein, 8 aa, Homo sapiens
  misc_feature: Table A; Target 27010; HLA-B*07:02; GPR143; ENSG00000101850; TAA
NPAQGFLL

SEQ ID NO: 27011 - protein, 8 aa, Homo sapiens
  misc_feature: Table A; Target 27011; HLA-B*08:01; GPR143; ENSG00000101850; TAA
NPAQGFLL

SEQ ID NO: 27012 - protein, 8 aa, Homo sapiens
  misc_feature: Table A; Target 27012; HLA-B*35:01; GPR143; ENSG00000101850; TAA
NPAQGFLL

SEQ ID NO: 27013 - protein, 8 aa, Homo sapiens
  misc_feature: Table A; Target 27013; HLA-B*35:03; GPR143; ENSG00000101850; TAA
NPAQGFLL

SEQ ID NO: 27014 - protein, 8 aa, Homo sapiens
  misc_feature: Table A; Target 27014; HLA-C*04:01; GPR143; ENSG00000101850; TAA
NPAQGFLL

SEQ ID NO: 27015 - protein, 8 aa, Homo sapiens
  misc_feature: Table A; Target 27015; HLA-C*07:02; GPR143; ENSG00000101850; TAA
NPAQGFLL

SEQ ID NO: 27016 - protein, 10 aa, Homo sapiens
  misc_feature: Table A; Target 27016; HLA-B*07:02; GPR143; ENSG00000101850; TAA
NPAQGFLLSL

SEQ ID NO: 27017 - protein, 10 aa, Homo sapiens
  misc_feature: Table A; Target 27017; HLA-B*35:01; GPR143; ENSG00000101850; TAA
NPAQGFLLSL

SEQ ID NO: 27018 - protein, 10 aa, Homo sapiens
  misc_feature: Table A; Target 27018; HLA-B*35:03; GPR143; ENSG00000101850; TAA
NPAQGFLLSL

SEQ ID NO: 27019 - protein, 10 aa, Homo sapiens
  misc_feature: Table A; Target 27019; HLA-B*56:01; GPR143; ENSG00000101850; TAA
NPAQGFLLSL

SEQ ID NO: 27020 - protein, 10 aa, Homo sapiens
  misc_feature: Table A; Target 27020; HLA-C*07:02; GPR143; ENSG00000101850; TAA
NPAQGFLLSL

SEQ ID NO: 27021 - protein, 9 aa, Homo sapiens
  misc_feature: Table A; Target 27021; HLA-B*07:02; GPR143; ENSG00000101850; TAA
NPASGKVSQ

SEQ ID NO: 27022 - protein, 10 aa, Homo sapiens
  misc_feature: Table A; Target 27022; HLA-B*07:02; GPR143; ENSG00000101850; TAA
NPASGKVSQV

SEQ ID NO: 27023 - protein, 10 aa, Homo sapiens
  misc_feature: Table A; Target 27023; HLA-B*56:01; GPR143; ENSG00000101850; TAA
NPASGKVSQV

SEQ ID NO: 27024 - protein, 10 aa, Homo sapiens
  misc_feature: Table A; Target 27024; HLA-C*07:02; GPR143; ENSG00000101850; TAA
NPASGKVSQV

SEQ ID NO: 27025 - protein, 9 aa, Homo sapiens
  misc_feature: Table A; Target 27025; HLA-B*07:02; GPR143; ENSG00000101850; TAA
NPILFQKTV

SEQ ID NO: 27026 - protein, 9 aa, Homo sapiens
  misc_feature: Table A; Target 27026; HLA-B*08:01; GPR143; ENSG00000101850; TAA
NPILFQKTV

SEQ ID NO: 27027 - protein, 9 aa, Homo sapiens
  misc_feature: Table A; Target 27027; HLA-B*51:01; GPR143; ENSG00000101850; TAA
NPILFQKTV

SEQ ID NO: 27028 - protein, 9 aa, Homo sapiens
  misc_feature: Table A; Target 27028; HLA-B*54:01; GPR143; ENSG00000101850; TAA
NPILFQKTV

SEQ ID NO: 27029 - protein, 9 aa, Homo sapiens
  misc_feature: Table A; Target 27029; HLA-B*55:01; GPR143; ENSG00000101850; TAA
NPILFQKTV

SEQ ID NO: 27030 - protein, 9 aa, Homo sapiens
  misc_feature: Table A; Target 27030; HLA-B*56:01; GPR143; ENSG00000101850; TAA
NPILFQKTV

SEQ ID NO: 27031 - protein, 9 aa, Homo sapiens
  misc_feature: Table A; Target 27031; HLA-C*07:02; GPR143; ENSG00000101850; TAA
NPILFQKTV

SEQ ID NO: 27032 - protein, 11 aa, Homo sapiens
  misc_feature: Table A; Target 27032; HLA-B*54:01; GPR143; ENSG00000101850; TAA
NPILFQKTVTA

SEQ ID NO: 27033 - protein, 11 aa, Homo sapiens
  misc_feature: Table A; Target 27033; HLA-B*56:01; GPR143; ENSG00000101850; TAA
NPILFQKTVTA

SEQ ID NO: 27034 - protein, 9 aa, Homo sapiens
  misc_feature: Table A; Target 27034; HLA-C*07:02; GPR143; ENSG00000101850; TAA
PAQGFLLSL

SEQ ID NO: 27035 - protein, 9 aa, Homo sapiens
  misc_feature: Table A; Target 27035; HLA-C*12:03; GPR143; ENSG00000101850; TAA
PASGKVSQV

SEQ ID NO: 27036 - protein, 9 aa, Homo sapiens
  misc_feature: Table A; Target 27036; HLA-C*16:02; GPR143; ENSG00000101850; TAA
PASGKVSQV

SEQ ID NO: 27037 - protein, 10 aa, Homo sapiens
  misc_feature: Table A; Target 27037; HLA-C*07:02; GPR143; ENSG00000101850; TAA
PASGKVSQVG

SEQ ID NO: 27038 - protein, 9 aa, Homo sapiens
  misc_feature: Table A; Target 27038; HLA-C*04:01; GPR143; ENSG00000101850; TAA
PGSPATSPP

SEQ ID NO: 27039 - protein, 9 aa, Homo sapiens
  misc_feature: Table A; Target 27039; HLA-B*35:01; GPR143; ENSG00000101850; TAA
QGFLLSLAF

SEQ ID NO: 27040 - protein, 9 aa, Homo sapiens
  misc_feature: Table A; Target 27040; HLA-A*68:01; GPR143; ENSG00000101850; TAA
QGIYTENER

SEQ ID NO: 27041 - protein, 9 aa, Homo sapiens
  misc_feature: Table A; Target 27041; HLA-C*07:06; GPR143; ENSG00000101850; TAA
QGIYTENER

SEQ ID NO: 27042 - protein, 9 aa, Homo sapiens
  misc_feature: Table A; Target 27042; HLA-A*31:01; GPR143; ENSG00000101850; TAA
QLVLSFQPR

SEQ ID NO: 27043 - protein, 8 aa, Homo sapiens
  misc_feature: Table A; Target 27043; HLA-B*07:02; GPR143; ENSG00000101850; TAA
QPRAFHAL

SEQ ID NO: 27044 - protein, 8 aa, Homo sapiens
  misc_feature: Table A; Target 27044; HLA-B*08:01; GPR143; ENSG00000101850; TAA
QPRAFHAL

SEQ ID NO: 27045 - protein, 8 aa, Homo sapiens
  misc_feature: Table A; Target 27045; HLA-B*56:01; GPR143; ENSG00000101850; TAA
QPRAFHAL

SEQ ID NO: 27046 - protein, 8 aa, Homo sapiens
  misc_feature: Table A; Target 27046; HLA-C*07:02; GPR143; ENSG00000101850; TAA
QPRAFHAL

SEQ ID NO: 27047 - protein, 10 aa, Homo sapiens
  misc_feature: Table A; Target 27047; HLA-B*07:02; GPR143; ENSG00000101850; TAA
QPRAFHALCL

SEQ ID NO: 27048 - protein, 9 aa, Homo sapiens
  misc_feature: Table A; Target 27048; HLA-A*01:01; GPR143; ENSG00000101850; TAA
QTDINGGSL

SEQ ID NO: 27049 - protein, 9 aa, Homo sapiens
  misc_feature: Table A; Target 27049; HLA-C*05:01; GPR143; ENSG00000101850; TAA
QTDINGGSL

SEQ ID NO: 27050 - protein, 10 aa, Homo sapiens
  misc_feature: Table A; Target 27050; HLA-A*01:01; GPR143; ENSG00000101850; TAA
QTDINGGSLK

SEQ ID NO: 27051 - protein, 10 aa, Homo sapiens
  misc_feature: Table A; Target 27051; HLA-A*03:01; GPR143; ENSG00000101850; TAA
QTDINGGSLK

SEQ ID NO: 27052 - protein, 10 aa, Homo sapiens
  misc_feature: Table A; Target 27052; HLA-A*03:02; GPR143; ENSG00000101850; TAA
QTDINGGSLK

SEQ ID NO: 27053 - protein, 10 aa, Homo sapiens
  misc_feature: Table A; Target 27053; HLA-A*11:01; GPR143; ENSG00000101850; TAA
QTDINGGSLK

SEQ ID NO: 27054 - protein, 10 aa, Homo sapiens
  misc_feature: Table A; Target 27054; HLA-A*68:01; GPR143; ENSG00000101850; TAA
QTDINGGSLK

SEQ ID NO: 27055 - protein, 11 aa, Homo sapiens
  misc_feature: Table A; Target 27055; HLA-A*01:01; GPR143; ENSG00000101850; TAA
QTDINGGSLKP

SEQ ID NO: 27056 - protein, 9 aa, Homo sapiens
  misc_feature: Table A; Target 27056; HLA-A*01:01; GPR143; ENSG00000101850; TAA
QTSDEALSM

SEQ ID NO: 27057 - protein, 9 aa, Homo sapiens
  misc_feature: Table A; Target 27057; HLA-A*26:01; GPR143; ENSG00000101850; TAA
QTSDEALSM

SEQ ID NO: 27058 - protein, 9 aa, Homo sapiens
  misc_feature: Table A; Target 27058; HLA-C*03:03; GPR143; ENSG00000101850; TAA
QTSDEALSM

SEQ ID NO: 27059 - protein, 9 aa, Homo sapiens
  misc_feature: Table A; Target 27059; HLA-C*03:04; GPR143; ENSG00000101850; TAA
QTSDEALSM

SEQ ID NO: 27060 - protein, 9 aa, Homo sapiens
  misc_feature: Table A; Target 27060; HLA-C*07:06; GPR143; ENSG00000101850; TAA
QTSDEALSM

SEQ ID NO: 27061 - protein, 10 aa, Homo sapiens
  misc_feature: Table A; Target 27061; HLA-A*25:01; GPR143; ENSG00000101850; TAA
QTSDEALSML

SEQ ID NO: 27062 - protein, 10 aa, Homo sapiens
  misc_feature: Table A; Target 27062; HLA-A*68:01; GPR143; ENSG00000101850; TAA
QTSDEALSML

SEQ ID NO: 27063 - protein, 10 aa, Homo sapiens
  misc_feature: Table A; Target 27063; HLA-B*39:01; GPR143; ENSG00000101850; TAA
QTSDEALSML

SEQ ID NO: 27064 - protein, 8 aa, Homo sapiens
  misc_feature: Table A; Target 27064; HLA-B*37:01; GPR143; ENSG00000101850; TAA
RDAATQLV

SEQ ID NO: 27065 - protein, 9 aa, Homo sapiens
  misc_feature: Table A; Target 27065; HLA-B*40:01; GPR143; ENSG00000101850; TAA
RDAATQLVL

SEQ ID NO: 27066 - protein, 10 aa, Homo sapiens
  misc_feature: Table A; Target 27066; HLA-A*30:02; GPR143; ENSG00000101850; TAA
RGLDHAIPHY

SEQ ID NO: 27067 - protein, 10 aa, Homo sapiens
  misc_feature: Table A; Target 27067; HLA-B*57:01; GPR143; ENSG00000101850; TAA
RGLDHAIPHY

SEQ ID NO: 27068 - protein, 9 aa, Homo sapiens
  misc_feature: Table A; Target 27068; HLA-A*02:04; GPR143; ENSG00000101850; TAA
RLALGLLQL

SEQ ID NO: 27069 - protein, 10 aa, Homo sapiens
  misc_feature: Table A; Target 27069; HLA-A*02:04; GPR143; ENSG00000101850; TAA
RLALGLLQLL

SEQ ID NO: 27070 - protein, 9 aa, Homo sapiens
  misc_feature: Table A; Target 27070; HLA-A*31:01; GPR143; ENSG00000101850; TAA
RMGAVIKIR

SEQ ID NO: 27071 - protein, 9 aa, Homo sapiens
  misc_feature: Table A; Target 27071; HLA-B*07:02; GPR143; ENSG00000101850; TAA
RPAGPGSPA

SEQ ID NO: 27072 - protein, 9 aa, Homo sapiens
  misc_feature: Table A; Target 27072; HLA-B*54:01; GPR143; ENSG00000101850; TAA
RPAGPGSPA

SEQ ID NO: 27073 - protein, 9 aa, Homo sapiens
  misc_feature: Table A; Target 27073; HLA-B*55:01; GPR143; ENSG00000101850; TAA
RPAGPGSPA

SEQ ID NO: 27074 - protein, 9 aa, Homo sapiens
  misc_feature: Table A; Target 27074; HLA-B*56:01; GPR143; ENSG00000101850; TAA
RPAGPGSPA

SEQ ID NO: 27075 - protein, 9 aa, Homo sapiens
  misc_feature: Table A; Target 27075; HLA-C*07:02; GPR143; ENSG00000101850; TAA
RPAGPGSPA

SEQ ID NO: 27076 - protein, 10 aa, Homo sapiens
  misc_feature: Table A; Target 27076; HLA-B*07:02; GPR143; ENSG00000101850; TAA
RPAGPGSPAT

SEQ ID NO: 27077 - protein, 10 aa, Homo sapiens
  misc_feature: Table A; Target 27077; HLA-B*56:01; GPR143; ENSG00000101850; TAA
RPAGPGSPAT

SEQ ID NO: 27078 - protein, 9 aa, Homo sapiens
  misc_feature: Table A; Target 27078; HLA-B*27:05; GPR143; ENSG00000101850; TAA
RRMGAVIKI

SEQ ID NO: 27079 - protein, 9 aa, Homo sapiens
  misc_feature: Table A; Target 27079; HLA-C*06:02; GPR143; ENSG00000101850; TAA
RRMGAVIKI

SEQ ID NO: 27080 - protein, 9 aa, Homo sapiens
  misc_feature: Table A; Target 27080; HLA-B*58:01; GPR143; ENSG00000101850; TAA
RSAGLSTIL

SEQ ID NO: 27081 - protein, 11 aa, Homo sapiens
  misc_feature: Table A; Target 27081; HLA-A*01:01; GPR143; ENSG00000101850; TAA
RSAGLSTILLY

SEQ ID NO: 27082 - protein, 11 aa, Homo sapiens
  misc_feature: Table A; Target 27082; HLA-A*29:02; GPR143; ENSG00000101850; TAA
RSAGLSTILLY

SEQ ID NO: 27083 - protein, 11 aa, Homo sapiens
  misc_feature: Table A; Target 27083; HLA-A*30:02; GPR143; ENSG00000101850; TAA
RSAGLSTILLY

SEQ ID NO: 27084 - protein, 11 aa, Homo sapiens
  misc_feature: Table A; Target 27084; HLA-B*57:01; GPR143; ENSG00000101850; TAA
RSAGLSTILLY

SEQ ID NO: 27085 - protein, 8 aa, Homo sapiens
  misc_feature: Table A; Target 27085; HLA-A*32:01; GPR143; ENSG00000101850; TAA
RTAAKTTW

SEQ ID NO: 27086 - protein, 8 aa, Homo sapiens
  misc_feature: Table A; Target 27086; HLA-B*57:01; GPR143; ENSG00000101850; TAA
RTAAKTTW

SEQ ID NO: 27087 - protein, 8 aa, Homo sapiens
  misc_feature: Table A; Target 27087; HLA-B*58:01; GPR143; ENSG00000101850; TAA
RTAAKTTW

SEQ ID NO: 27088 - protein, 9 aa, Homo sapiens
  misc_feature: Table A; Target 27088; HLA-C*07:06; GPR143; ENSG00000101850; TAA
SAAEGAHPS

SEQ ID NO: 27089 - protein, 11 aa, Homo sapiens
  misc_feature: Table A; Target 27089; HLA-C*03:03; GPR143; ENSG00000101850; TAA
SAAEGAHPSPL

SEQ ID NO: 27090 - protein, 8 aa, Homo sapiens
  misc_feature: Table A; Target 27090; HLA-B*35:03; GPR143; ENSG00000101850; TAA
SAGLSTIL

SEQ ID NO: 27091 - protein, 10 aa, Homo sapiens
  misc_feature: Table A; Target 27091; HLA-A*01:01; GPR143; ENSG00000101850; TAA
SAGLSTILLY

SEQ ID NO: 27092 - protein, 10 aa, Homo sapiens
  misc_feature: Table A; Target 27092; HLA-A*29:02; GPR143; ENSG00000101850; TAA
SAGLSTILLY

SEQ ID NO: 27093 - protein, 10 aa, Homo sapiens
  misc_feature: Table A; Target 27093; HLA-A*30:02; GPR143; ENSG00000101850; TAA
SAGLSTILLY

SEQ ID NO: 27094 - protein, 9 aa, Homo sapiens
  misc_feature: Table A; Target 27094; HLA-A*01:01; GPR143; ENSG00000101850; TAA
SAMWIQLLY

SEQ ID NO: 27095 - protein, 9 aa, Homo sapiens
  misc_feature: Table A; Target 27095; HLA-A*03:01; GPR143; ENSG00000101850; TAA
SAMWIQLLY

SEQ ID NO: 27096 - protein, 9 aa, Homo sapiens
  misc_feature: Table A; Target 27096; HLA-A*26:01; GPR143; ENSG00000101850; TAA
SAMWIQLLY

SEQ ID NO: 27097 - protein, 9 aa, Homo sapiens
  misc_feature: Table A; Target 27097; HLA-A*29:02; GPR143; ENSG00000101850; TAA
SAMWIQLLY

SEQ ID NO: 27098 - protein, 9 aa, Homo sapiens
  misc_feature: Table A; Target 27098; HLA-B*35:01; GPR143; ENSG00000101850; TAA
SAMWIQLLY

SEQ ID NO: 27099 - protein, 9 aa, Homo sapiens
  misc_feature: Table A; Target 27099; HLA-B*57:01; GPR143; ENSG00000101850; TAA
SAMWIQLLY

SEQ ID NO: 27100 - protein, 9 aa, Homo sapiens
  misc_feature: Table A; Target 27100; HLA-C*02:02; GPR143; ENSG00000101850; TAA
SAMWIQLLY

SEQ ID NO: 27101 - protein, 8 aa, Homo sapiens
  misc_feature: Table A; Target 27101; HLA-B*37:01; GPR143; ENSG00000101850; TAA
SDASTIEI

SEQ ID NO: 27102 - protein, 8 aa, Homo sapiens
  misc_feature: Table A; Target 27102; HLA-B*37:01; GPR143; ENSG00000101850; TAA
SDMNHTEI

SEQ ID NO: 27103 - protein, 9 aa, Homo sapiens
  misc_feature: Table A; Target 27103; HLA-B*37:01; GPR143; ENSG00000101850; TAA
SDMNHTEIW

SEQ ID NO: 27104 - protein, 9 aa, Homo sapiens
  misc_feature: Table A; Target 27104; HLA-B*44:02; GPR143; ENSG00000101850; TAA
SDMNHTEIW

SEQ ID NO: 27105 - protein, 9 aa, Homo sapiens
  misc_feature: Table A; Target 27105; HLA-B*44:03; GPR143; ENSG00000101850; TAA
SDMNHTEIW

SEQ ID NO: 27106 - protein, 9 aa, Homo sapiens
  misc_feature: Table A; Target 27106; HLA-A*30:01; GPR143; ENSG00000101850; TAA
SEGSDASTI

SEQ ID NO: 27107 - protein, 9 aa, Homo sapiens
  misc_feature: Table A; Target 27107; HLA-B*40:01; GPR143; ENSG00000101850; TAA
SEGSDASTI

SEQ ID NO: 27108 - protein, 9 aa, Homo sapiens
  misc_feature: Table A; Target 27108; HLA-B*44:02; GPR143; ENSG00000101850; TAA
SEGSDASTI

SEQ ID NO: 27109 - protein, 9 aa, Homo sapiens
  misc_feature: Table A; Target 27109; HLA-B*44:03; GPR143; ENSG00000101850; TAA
SEGSDASTI

SEQ ID NO: 27110 - protein, 9 aa, Homo sapiens
  misc_feature: Table A; Target 27110; HLA-B*49:01; GPR143; ENSG00000101850; TAA
SEGSDASTI

SEQ ID NO: 27111 - protein, 11 aa, Homo sapiens
  misc_feature: Table A; Target 27111; HLA-B*40:01; GPR143; ENSG00000101850; TAA
SEGSDASTIEI

SEQ ID NO: 27112 - protein, 11 aa, Homo sapiens
  misc_feature: Table A; Target 27112; HLA-B*49:01; GPR143; ENSG00000101850; TAA
SEGSDASTIEI

SEQ ID NO: 27113 - protein, 10 aa, Homo sapiens
  misc_feature: Table A; Target 27113; HLA-A*24:02; GPR143; ENSG00000101850; TAA
SFQPRAFHAL

SEQ ID NO: 27114 - protein, 8 aa, Homo sapiens
  misc_feature: Table A; Target 27114; HLA-B*07:02; GPR143; ENSG00000101850; TAA
SGGLRLAL

SEQ ID NO: 27115 - protein, 8 aa, Homo sapiens
  misc_feature: Table A; Target 27115; HLA-B*08:01; GPR143; ENSG00000101850; TAA
SGGLRLAL

SEQ ID NO: 27116 - protein, 8 aa, Homo sapiens
  misc_feature: Table A; Target 27116; HLA-C*01:02; GPR143; ENSG00000101850; TAA
SGGLRLAL

SEQ ID NO: 27117 - protein, 8 aa, Homo sapiens
  misc_feature: Table A; Target 27117; HLA-C*06:02; GPR143; ENSG00000101850; TAA
SGGLRLAL

SEQ ID NO: 27118 - protein, 8 aa, Homo sapiens
  misc_feature: Table A; Target 27118; HLA-C*07:01; GPR143; ENSG00000101850; TAA
SGGLRLAL

SEQ ID NO: 27119 - protein, 8 aa, Homo sapiens
  misc_feature: Table A; Target 27119; HLA-C*07:02; GPR143; ENSG00000101850; TAA
SGGLRLAL

SEQ ID NO: 27120 - protein, 8 aa, Homo sapiens
  misc_feature: Table A; Target 27120; HLA-C*16:01; GPR143; ENSG00000101850; TAA
SGGLRLAL

SEQ ID NO: 27121 - protein, 9 aa, Homo sapiens
  misc_feature: Table A; Target 27121; HLA-A*03:02; GPR143; ENSG00000101850; TAA
SLGFQSPRK

SEQ ID NO: 27122 - protein, 9 aa, Homo sapiens
  misc_feature: Table A; Target 27122; HLA-A*11:01; GPR143; ENSG00000101850; TAA
SLGFQSPRK

SEQ ID NO: 27123 - protein, 8 aa, Homo sapiens
  misc_feature: Table A; Target 27123; HLA-A*02:03; GPR143; ENSG00000101850; TAA
SLKPVRTA

SEQ ID NO: 27124 - protein, 9 aa, Homo sapiens
  misc_feature: Table A; Target 27124; HLA-A*02:03; GPR143; ENSG00000101850; TAA
SLKPVRTAA

SEQ ID NO: 27125 - protein, 9 aa, Homo sapiens
  misc_feature: Table A; Target 27125; HLA-A*32:01; GPR143; ENSG00000101850; TAA
SLKPVRTAA

SEQ ID NO: 27126 - protein, 9 aa, Homo sapiens
  misc_feature: Table A; Target 27126; HLA-B*07:02; GPR143; ENSG00000101850; TAA
SLKPVRTAA

SEQ ID NO: 27127 - protein, 9 aa, Homo sapiens
  misc_feature: Table A; Target 27127; HLA-B*08:01; GPR143; ENSG00000101850; TAA
SLKPVRTAA

SEQ ID NO: 27128 - protein, 9 aa, Homo sapiens
  misc_feature: Table A; Target 27128; HLA-B*46:01; GPR143; ENSG00000101850; TAA
SLKPVRTAA

SEQ ID NO: 27129 - protein, 10 aa, Homo sapiens
  misc_feature: Table A; Target 27129; HLA-A*03:01; GPR143; ENSG00000101850; TAA
SLKPVRTAAK

SEQ ID NO: 27130 - protein, 10 aa, Homo sapiens
  misc_feature: Table A; Target 27130; HLA-A*03:01; GPR143; ENSG00000101850; TAA
SLLKGRQGIY

SEQ ID NO: 27131 - protein, 10 aa, Homo sapiens
  misc_feature: Table A; Target 27131; HLA-A*30:02; GPR143; ENSG00000101850; TAA
SLLKGRQGIY

SEQ ID NO: 27132 - protein, 8 aa, Homo sapiens
  misc_feature: Table A; Target 27132; HLA-B*55:01; GPR143; ENSG00000101850; TAA
SPATSPPA

SEQ ID NO: 27133 - protein, 8 aa, Homo sapiens
  misc_feature: Table A; Target 27133; HLA-B*56:01; GPR143; ENSG00000101850; TAA
SPATSPPA

SEQ ID NO: 27134 - protein, 10 aa, Homo sapiens
  misc_feature: Table A; Target 27134; HLA-B*07:02; GPR143; ENSG00000101850; TAA
SPATSPPASV

SEQ ID NO: 27135 - protein, 10 aa, Homo sapiens
  misc_feature: Table A; Target 27135; HLA-B*56:01; GPR143; ENSG00000101850; TAA
SPATSPPASV

SEQ ID NO: 27136 - protein, 10 aa, Homo sapiens
  misc_feature: Table A; Target 27136; HLA-C*07:02; GPR143; ENSG00000101850; TAA
SPATSPPASV

SEQ ID NO: 27137 - protein, 11 aa, Homo sapiens
  misc_feature: Table A; Target 27137; HLA-A*68:01; GPR143; ENSG00000101850; TAA
SPATSPPASVR

SEQ ID NO: 27138 - protein, 11 aa, Homo sapiens
  misc_feature: Table A; Target 27138; HLA-C*07:06; GPR143; ENSG00000101850; TAA
SPATSPPASVR

SEQ ID NO: 27139 - protein, 10 aa, Homo sapiens
  misc_feature: Table A; Target 27139; HLA-B*54:01; GPR143; ENSG00000101850; TAA
SPLMPHENPA

SEQ ID NO: 27140 - protein, 10 aa, Homo sapiens
  misc_feature: Table A; Target 27140; HLA-B*55:01; GPR143; ENSG00000101850; TAA
SPLMPHENPA

SEQ ID NO: 27141 - protein, 10 aa, Homo sapiens
  misc_feature: Table A; Target 27141; HLA-B*56:01; GPR143; ENSG00000101850; TAA
SPLMPHENPA

SEQ ID NO: 27142 - protein, 8 aa, Homo sapiens
  misc_feature: Table A; Target 27142; HLA-B*51:01; GPR143; ENSG00000101850; TAA
SPPASVRI

SEQ ID NO: 27143 - protein, 9 aa, Homo sapiens
  misc_feature: Table A; Target 27143; HLA-B*07:02; GPR143; ENSG00000101850; TAA
SPPASVRIL

SEQ ID NO: 27144 - protein, 9 aa, Homo sapiens
  misc_feature: Table A; Target 27144; HLA-C*01:02; GPR143; ENSG00000101850; TAA
SPPASVRIL

SEQ ID NO: 27145 - protein, 9 aa, Homo sapiens
  misc_feature: Table A; Target 27145; HLA-C*07:02; GPR143; ENSG00000101850; TAA
SPPASVRIL

SEQ ID NO: 27146 - protein, 11 aa, Homo sapiens
  misc_feature: Table A; Target 27146; HLA-B*54:01; GPR143; ENSG00000101850; TAA
SPPASVRILRA

SEQ ID NO: 27147 - protein, 11 aa, Homo sapiens
  misc_feature: Table A; Target 27147; HLA-B*07:02; GPR143; ENSG00000101850; TAA
SPRKEIQWESL

SEQ ID NO: 27148 - protein, 8 aa, Homo sapiens
  misc_feature: Table A; Target 27148; HLA-B*56:01; GPR143; ENSG00000101850; TAA
SPRLGTFC

SEQ ID NO: 27149 - protein, 9 aa, Homo sapiens
  misc_feature: Table A; Target 27149; HLA-C*07:02; GPR143; ENSG00000101850; TAA
SPRLGTFCC

SEQ ID NO: 27150 - protein, 11 aa, Homo sapiens
  misc_feature: Table A; Target 27150; HLA-B*39:01; GPR143; ENSG00000101850; TAA
SQVGGQTSDEA

SEQ ID NO: 27151 - protein, 8 aa, Homo sapiens
  misc_feature: Table A; Target 27151; HLA-A*02:03; GPR143; ENSG00000101850; TAA
STIEIHTA

SEQ ID NO: 27152 - protein, 9 aa, Homo sapiens
  misc_feature: Table A; Target 27152; HLA-B*57:01; GPR143; ENSG00000101850; TAA
STILLYHIM

SEQ ID NO: 27153 - protein, 11 aa, Homo sapiens
  misc_feature: Table A; Target 27153; HLA-B*57:01; GPR143; ENSG00000101850; TAA
STILLYHIMAW

SEQ ID NO: 27154 - protein, 11 aa, Homo sapiens
  misc_feature: Table A; Target 27154; HLA-A*25:01; GPR143; ENSG00000101850; TAA
SVSDMNHTEIW

SEQ ID NO: 27155 - protein, 8 aa, Homo sapiens
  misc_feature: Table A; Target 27155; HLA-A*11:01; GPR143; ENSG00000101850; TAA
TAVASLLK

SEQ ID NO: 27156 - protein, 8 aa, Homo sapiens
  misc_feature: Table A; Target 27156; HLA-B*27:02; GPR143; ENSG00000101850; TAA
TAVASLLK

SEQ ID NO: 27157 - protein, 8 aa, Homo sapiens
  misc_feature: Table A; Target 27157; HLA-B*51:01; GPR143; ENSG00000101850; TAA
TAVASLLK

SEQ ID NO: 27158 - protein, 9 aa, Homo sapiens
  misc_feature: Table A; Target 27158; HLA-C*06:02; GPR143; ENSG00000101850; TAA
TAVASLLKG

SEQ ID NO: 27159 - protein, 9 aa, Homo sapiens
  misc_feature: Table A; Target 27159; HLA-C*07:01; GPR143; ENSG00000101850; TAA
TAVASLLKG

SEQ ID NO: 27160 - protein, 10 aa, Homo sapiens
  misc_feature: Table A; Target 27160; HLA-A*33:01; GPR143; ENSG00000101850; TAA
TAVASLLKGR

SEQ ID NO: 27161 - protein, 10 aa, Homo sapiens
  misc_feature: Table A; Target 27161; HLA-A*33:03; GPR143; ENSG00000101850; TAA
TAVASLLKGR

SEQ ID NO: 27162 - protein, 10 aa, Homo sapiens
  misc_feature: Table A; Target 27162; HLA-A*68:01; GPR143; ENSG00000101850; TAA
TAVASLLKGR

SEQ ID NO: 27163 - protein, 10 aa, Homo sapiens
  misc_feature: Table A; Target 27163; HLA-C*07:06; GPR143; ENSG00000101850; TAA
TAVASLLKGR

SEQ ID NO: 27164 - protein, 8 aa, Homo sapiens
  misc_feature: Table A; Target 27164; HLA-A*30:01; GPR143; ENSG00000101850; TAA
TDINGGSL

SEQ ID NO: 27165 - protein, 8 aa, Homo sapiens
  misc_feature: Table A; Target 27165; HLA-B*39:01; GPR143; ENSG00000101850; TAA
TDINGGSL

SEQ ID NO: 27166 - protein, 8 aa, Homo sapiens
  misc_feature: Table A; Target 27166; HLA-B*40:02; GPR143; ENSG00000101850; TAA
TDINGGSL

SEQ ID NO: 27167 - protein, 8 aa, Homo sapiens
  misc_feature: Table A; Target 27167; HLA-C*03:04; GPR143; ENSG00000101850; TAA
TDINGGSL

SEQ ID NO: 27168 - protein, 8 aa, Homo sapiens
  misc_feature: Table A; Target 27168; HLA-C*04:01; GPR143; ENSG00000101850; TAA
TDINGGSL

SEQ ID NO: 27169 - protein, 9 aa, Homo sapiens
  misc_feature: Table A; Target 27169; HLA-A*03:02; GPR143; ENSG00000101850; TAA
TDINGGSLK

SEQ ID NO: 27170 - protein, 9 aa, Homo sapiens
  misc_feature: Table A; Target 27170; HLA-A*11:01; GPR143; ENSG00000101850; TAA
TDINGGSLK

SEQ ID NO: 27171 - protein, 9 aa, Homo sapiens
  misc_feature: Table A; Target 27171; HLA-C*04:01; GPR143; ENSG00000101850; TAA
TDINGGSLK

SEQ ID NO: 27172 - protein, 10 aa, Homo sapiens
  misc_feature: Table A; Target 27172; HLA-C*04:01; GPR143; ENSG00000101850; TAA
TDINGGSLKP

SEQ ID NO: 27173 - protein, 10 aa, Homo sapiens
  misc_feature: Table A; Target 27173; HLA-C*06:02; GPR143; ENSG00000101850; TAA
TDINGGSLKP

SEQ ID NO: 27174 - protein, 10 aa, Homo sapiens
  misc_feature: Table A; Target 27174; HLA-C*07:01; GPR143; ENSG00000101850; TAA
TDINGGSLKP

SEQ ID NO: 27175 - protein, 10 aa, Homo sapiens
  misc_feature: Table A; Target 27175; HLA-C*07:04; GPR143; ENSG00000101850; TAA
TDINGGSLKP

SEQ ID NO: 27176 - protein, 10 aa, Homo sapiens
  misc_feature: Table A; Target 27176; HLA-C*16:02; GPR143; ENSG00000101850; TAA
TDINGGSLKP

SEQ ID NO: 27177 - protein, 11 aa, Homo sapiens
  misc_feature: Table A; Target 27177; HLA-A*68:02; GPR143; ENSG00000101850; TAA
TDINGGSLKPV

SEQ ID NO: 27178 - protein, 11 aa, Homo sapiens
  misc_feature: Table A; Target 27178; HLA-B*07:02; GPR143; ENSG00000101850; TAA
TDINGGSLKPV

SEQ ID NO: 27179 - protein, 11 aa, Homo sapiens
  misc_feature: Table A; Target 27179; HLA-C*04:01; GPR143; ENSG00000101850; TAA
TDINGGSLKPV

SEQ ID NO: 27180 - protein, 11 aa, Homo sapiens
  misc_feature: Table A; Target 27180; HLA-C*06:02; GPR143; ENSG00000101850; TAA
TDINGGSLKPV

SEQ ID NO: 27181 - protein, 11 aa, Homo sapiens
  misc_feature: Table A; Target 27181; HLA-C*07:01; GPR143; ENSG00000101850; TAA
TDINGGSLKPV

SEQ ID NO: 27182 - protein, 11 aa, Homo sapiens
  misc_feature: Table A; Target 27182; HLA-C*16:02; GPR143; ENSG00000101850; TAA
TDINGGSLKPV

SEQ ID NO: 27183 - protein, 8 aa, Homo sapiens
  misc_feature: Table A; Target 27183; HLA-B*18:01; GPR143; ENSG00000101850; TAA
TEIWPAAF

SEQ ID NO: 27184 - protein, 8 aa, Homo sapiens
  misc_feature: Table A; Target 27184; HLA-B*37:01; GPR143; ENSG00000101850; TAA
TEIWPAAF

SEQ ID NO: 27185 - protein, 8 aa, Homo sapiens
  misc_feature: Table A; Target 27185; HLA-B*44:02; GPR143; ENSG00000101850; TAA
TEIWPAAF

SEQ ID NO: 27186 - protein, 9 aa, Homo sapiens
  misc_feature: Table A; Target 27186; HLA-B*49:01; GPR143; ENSG00000101850; TAA
TEIWPAAFC

SEQ ID NO: 27187 - protein, 9 aa, Homo sapiens
  misc_feature: Table A; Target 27187; HLA-B*37:01; GPR143; ENSG00000101850; TAA
TENERRMGA

SEQ ID NO: 27188 - protein, 9 aa, Homo sapiens
  misc_feature: Table A; Target 27188; HLA-A*02:01; GPR143; ENSG00000101850; TAA
TMYLPLLLV

SEQ ID NO: 27189 - protein, 9 aa, Homo sapiens
  misc_feature: Table A; Target 27189; HLA-A*02:03; GPR143; ENSG00000101850; TAA
TMYLPLLLV

SEQ ID NO: 27190 - protein, 9 aa, Homo sapiens
  misc_feature: Table A; Target 27190; HLA-A*02:07; GPR143; ENSG00000101850; TAA
TMYLPLLLV

SEQ ID NO: 27191 - protein, 9 aa, Homo sapiens
  misc_feature: Table A; Target 27191; HLA-B*13:02; GPR143; ENSG00000101850; TAA
TMYLPLLLV

SEQ ID NO: 27192 - protein, 9 aa, Homo sapiens
  misc_feature: Table A; Target 27192; HLA-B*51:01; GPR143; ENSG00000101850; TAA
TMYLPLLLV

SEQ ID NO: 27193 - protein, 10 aa, Homo sapiens
  misc_feature: Table A; Target 27193; HLA-A*31:01; GPR143; ENSG00000101850; TAA
TQLVLSFQPR

SEQ ID NO: 27194 - protein, 9 aa, Homo sapiens
  misc_feature: Table A; Target 27194; HLA-B*38:01; GPR143; ENSG00000101850; TAA
TRDAATQLV

SEQ ID NO: 27195 - protein, 10 aa, Homo sapiens
  misc_feature: Table A; Target 27195; HLA-B*27:05; GPR143; ENSG00000101850; TAA
TRDAATQLVL

SEQ ID NO: 27196 - protein, 10 aa, Homo sapiens
  misc_feature: Table A; Target 27196; HLA-B*38:01; GPR143; ENSG00000101850; TAA
TRDAATQLVL

SEQ ID NO: 27197 - protein, 8 aa, Homo sapiens
  misc_feature: Table A; Target 27197; HLA-C*03:03; GPR143; ENSG00000101850; TAA
TSDEALSM

SEQ ID NO: 27198 - protein, 8 aa, Homo sapiens
  misc_feature: Table A; Target 27198; HLA-C*03:04; GPR143; ENSG00000101850; TAA
TSDEALSM

SEQ ID NO: 27199 - protein, 8 aa, Homo sapiens
  misc_feature: Table A; Target 27199; HLA-C*05:01; GPR143; ENSG00000101850; TAA
TSDEALSM

SEQ ID NO: 27200 - protein, 9 aa, Homo sapiens
  misc_feature: Table A; Target 27200; HLA-A*01:01; GPR143; ENSG00000101850; TAA
TSDEALSML

SEQ ID NO: 27201 - protein, 9 aa, Homo sapiens
  misc_feature: Table A; Target 27201; HLA-A*02:07; GPR143; ENSG00000101850; TAA
TSDEALSML

SEQ ID NO: 27202 - protein, 9 aa, Homo sapiens
  misc_feature: Table A; Target 27202; HLA-B*38:01; GPR143; ENSG00000101850; TAA
TSDEALSML

SEQ ID NO: 27203 - protein, 9 aa, Homo sapiens
  misc_feature: Table A; Target 27203; HLA-B*39:01; GPR143; ENSG00000101850; TAA
TSDEALSML

SEQ ID NO: 27204 - protein, 9 aa, Homo sapiens
  misc_feature: Table A; Target 27204; HLA-C*04:01; GPR143; ENSG00000101850; TAA
TSDEALSML

SEQ ID NO: 27205 - protein, 9 aa, Homo sapiens
  misc_feature: Table A; Target 27205; HLA-C*05:01; GPR143; ENSG00000101850; TAA
TSDEALSML

SEQ ID NO: 27206 - protein, 10 aa, Homo sapiens
  misc_feature: Table A; Target 27206; HLA-C*01:02; GPR143; ENSG00000101850; TAA
TSPPASVRIL

SEQ ID NO: 27207 - protein, 10 aa, Homo sapiens
  misc_feature: Table A; Target 27207; HLA-C*07:02; GPR143; ENSG00000101850; TAA
TSPPASVRIL

SEQ ID NO: 27208 - protein, 11 aa, Homo sapiens
  misc_feature: Table A; Target 27208; HLA-A*31:01; GPR143; ENSG00000101850; TAA
TSPPASVRILR

SEQ ID NO: 27209 - protein, 8 aa, Homo sapiens
  misc_feature: Table A; Target 27209; HLA-A*32:01; GPR143; ENSG00000101850; TAA
TVTAVASL

SEQ ID NO: 27210 - protein, 9 aa, Homo sapiens
  misc_feature: Table A; Target 27210; HLA-A*02:01; GPR143; ENSG00000101850; TAA
TVTAVASLL

SEQ ID NO: 27211 - protein, 9 aa, Homo sapiens
  misc_feature: Table A; Target 27211; HLA-A*02:03; GPR143; ENSG00000101850; TAA
TVTAVASLL

SEQ ID NO: 27212 - protein, 9 aa, Homo sapiens
  misc_feature: Table A; Target 27212; HLA-A*02:07; GPR143; ENSG00000101850; TAA
TVTAVASLL

SEQ ID NO: 27213 - protein, 9 aa, Homo sapiens
  misc_feature: Table A; Target 27213; HLA-A*03:02; GPR143; ENSG00000101850; TAA
TVTAVASLL

SEQ ID NO: 27214 - protein, 9 aa, Homo sapiens
  misc_feature: Table A; Target 27214; HLA-A*23:01; GPR143; ENSG00000101850; TAA
TVTAVASLL

SEQ ID NO: 27215 - protein, 9 aa, Homo sapiens
  misc_feature: Table A; Target 27215; HLA-A*24:02; GPR143; ENSG00000101850; TAA
TVTAVASLL

SEQ ID NO: 27216 - protein, 9 aa, Homo sapiens
  misc_feature: Table A; Target 27216; HLA-A*25:01; GPR143; ENSG00000101850; TAA
TVTAVASLL

SEQ ID NO: 27217 - protein, 9 aa, Homo sapiens
  misc_feature: Table A; Target 27217; HLA-A*26:01; GPR143; ENSG00000101850; TAA
TVTAVASLL

SEQ ID NO: 27218 - protein, 9 aa, Homo sapiens
  misc_feature: Table A; Target 27218; HLA-A*29:02; GPR143; ENSG00000101850; TAA
TVTAVASLL

SEQ ID NO: 27219 - protein, 9 aa, Homo sapiens
  misc_feature: Table A; Target 27219; HLA-A*30:01; GPR143; ENSG00000101850; TAA
TVTAVASLL

SEQ ID NO: 27220 - protein, 9 aa, Homo sapiens
  misc_feature: Table A; Target 27220; HLA-A*31:01; GPR143; ENSG00000101850; TAA
TVTAVASLL

SEQ ID NO: 27221 - protein, 9 aa, Homo sapiens
  misc_feature: Table A; Target 27221; HLA-A*32:01; GPR143; ENSG00000101850; TAA
TVTAVASLL

SEQ ID NO: 27222 - protein, 9 aa, Homo sapiens
  misc_feature: Table A; Target 27222; HLA-A*33:03; GPR143; ENSG00000101850; TAA
TVTAVASLL

SEQ ID NO: 27223 - protein, 9 aa, Homo sapiens
  misc_feature: Table A; Target 27223; HLA-A*68:01; GPR143; ENSG00000101850; TAA
TVTAVASLL

SEQ ID NO: 27224 - protein, 9 aa, Homo sapiens
  misc_feature: Table A; Target 27224; HLA-A*68:02; GPR143; ENSG00000101850; TAA
TVTAVASLL

SEQ ID NO: 27225 - protein, 9 aa, Homo sapiens
  misc_feature: Table A; Target 27225; HLA-B*07:02; GPR143; ENSG00000101850; TAA
TVTAVASLL

SEQ ID NO: 27226 - protein, 9 aa, Homo sapiens
  misc_feature: Table A; Target 27226; HLA-B*13:02; GPR143; ENSG00000101850; TAA
TVTAVASLL

SEQ ID NO: 27227 - protein, 9 aa, Homo sapiens
  misc_feature: Table A; Target 27227; HLA-B*15:01; GPR143; ENSG00000101850; TAA
TVTAVASLL

SEQ ID NO: 27228 - protein, 9 aa, Homo sapiens
  misc_feature: Table A; Target 27228; HLA-B*27:02; GPR143; ENSG00000101850; TAA
TVTAVASLL

SEQ ID NO: 27229 - protein, 9 aa, Homo sapiens
  misc_feature: Table A; Target 27229; HLA-B*27:05; GPR143; ENSG00000101850; TAA
TVTAVASLL

SEQ ID NO: 27230 - protein, 9 aa, Homo sapiens
  misc_feature: Table A; Target 27230; HLA-B*35:01; GPR143; ENSG00000101850; TAA
TVTAVASLL

SEQ ID NO: 27231 - protein, 9 aa, Homo sapiens
  misc_feature: Table A; Target 27231; HLA-B*35:03; GPR143; ENSG00000101850; TAA
TVTAVASLL

SEQ ID NO: 27232 - protein, 9 aa, Homo sapiens
  misc_feature: Table A; Target 27232; HLA-B*38:01; GPR143; ENSG00000101850; TAA
TVTAVASLL

SEQ ID NO: 27233 - protein, 9 aa, Homo sapiens
  misc_feature: Table A; Target 27233; HLA-B*39:01; GPR143; ENSG00000101850; TAA
TVTAVASLL

SEQ ID NO: 27234 - protein, 9 aa, Homo sapiens
  misc_feature: Table A; Target 27234; HLA-B*40:01; GPR143; ENSG00000101850; TAA
TVTAVASLL

SEQ ID NO: 27235 - protein, 9 aa, Homo sapiens
  misc_feature: Table A; Target 27235; HLA-B*40:02; GPR143; ENSG00000101850; TAA
TVTAVASLL

SEQ ID NO: 27236 - protein, 9 aa, Homo sapiens
  misc_feature: Table A; Target 27236; HLA-B*51:01; GPR143; ENSG00000101850; TAA
TVTAVASLL

SEQ ID NO: 27237 - protein, 9 aa, Homo sapiens
  misc_feature: Table A; Target 27237; HLA-B*55:01; GPR143; ENSG00000101850; TAA
TVTAVASLL

SEQ ID NO: 27238 - protein, 9 aa, Homo sapiens
  misc_feature: Table A; Target 27238; HLA-B*57:01; GPR143; ENSG00000101850; TAA
TVTAVASLL

SEQ ID NO: 27239 - protein, 9 aa, Homo sapiens
  misc_feature: Table A; Target 27239; HLA-B*58:01; GPR143; ENSG00000101850; TAA
TVTAVASLL

SEQ ID NO: 27240 - protein, 9 aa, Homo sapiens
  misc_feature: Table A; Target 27240; HLA-C*01:02; GPR143; ENSG00000101850; TAA
TVTAVASLL

SEQ ID NO: 27241 - protein, 9 aa, Homo sapiens
  misc_feature: Table A; Target 27241; HLA-C*02:02; GPR143; ENSG00000101850; TAA
TVTAVASLL

SEQ ID NO: 27242 - protein, 9 aa, Homo sapiens
  misc_feature: Table A; Target 27242; HLA-C*03:03; GPR143; ENSG00000101850; TAA
TVTAVASLL

SEQ ID NO: 27243 - protein, 9 aa, Homo sapiens
  misc_feature: Table A; Target 27243; HLA-C*03:04; GPR143; ENSG00000101850; TAA
TVTAVASLL

SEQ ID NO: 27244 - protein, 9 aa, Homo sapiens
  misc_feature: Table A; Target 27244; HLA-C*04:01; GPR143; ENSG00000101850; TAA
TVTAVASLL

SEQ ID NO: 27245 - protein, 9 aa, Homo sapiens
  misc_feature: Table A; Target 27245; HLA-C*05:01; GPR143; ENSG00000101850; TAA
TVTAVASLL

SEQ ID NO: 27246 - protein, 9 aa, Homo sapiens
  misc_feature: Table A; Target 27246; HLA-C*06:02; GPR143; ENSG00000101850; TAA
TVTAVASLL

SEQ ID NO: 27247 - protein, 9 aa, Homo sapiens
  misc_feature: Table A; Target 27247; HLA-C*07:01; GPR143; ENSG00000101850; TAA
TVTAVASLL

SEQ ID NO: 27248 - protein, 9 aa, Homo sapiens
  misc_feature: Table A; Target 27248; HLA-C*07:02; GPR143; ENSG00000101850; TAA
TVTAVASLL

SEQ ID NO: 27249 - protein, 9 aa, Homo sapiens
  misc_feature: Table A; Target 27249; HLA-C*07:04; GPR143; ENSG00000101850; TAA
TVTAVASLL

SEQ ID NO: 27250 - protein, 9 aa, Homo sapiens
  misc_feature: Table A; Target 27250; HLA-C*07:06; GPR143; ENSG00000101850; TAA
TVTAVASLL

SEQ ID NO: 27251 - protein, 9 aa, Homo sapiens
  misc_feature: Table A; Target 27251; HLA-C*12:03; GPR143; ENSG00000101850; TAA
TVTAVASLL

SEQ ID NO: 27252 - protein, 9 aa, Homo sapiens
  misc_feature: Table A; Target 27252; HLA-C*14:02; GPR143; ENSG00000101850; TAA
TVTAVASLL

SEQ ID NO: 27253 - protein, 9 aa, Homo sapiens
  misc_feature: Table A; Target 27253; HLA-C*16:01; GPR143; ENSG00000101850; TAA
TVTAVASLL

SEQ ID NO: 27254 - protein, 9 aa, Homo sapiens
  misc_feature: Table A; Target 27254; HLA-C*16:02; GPR143; ENSG00000101850; TAA
TVTAVASLL

SEQ ID NO: 27255 - protein, 9 aa, Homo sapiens
  misc_feature: Table A; Target 27255; HLA-C*16:04; GPR143; ENSG00000101850; TAA
TVTAVASLL

SEQ ID NO: 27256 - protein, 10 aa, Homo sapiens
  misc_feature: Table A; Target 27256; HLA-A*03:01; GPR143; ENSG00000101850; TAA
TVTAVASLLK

SEQ ID NO: 27257 - protein, 10 aa, Homo sapiens
  misc_feature: Table A; Target 27257; HLA-A*03:02; GPR143; ENSG00000101850; TAA
TVTAVASLLK

SEQ ID NO: 27258 - protein, 10 aa, Homo sapiens
  misc_feature: Table A; Target 27258; HLA-A*11:01; GPR143; ENSG00000101850; TAA
TVTAVASLLK

SEQ ID NO: 27259 - protein, 10 aa, Homo sapiens
  misc_feature: Table A; Target 27259; HLA-A*68:01; GPR143; ENSG00000101850; TAA
TVTAVASLLK

SEQ ID NO: 27260 - protein, 10 aa, Homo sapiens
  misc_feature: Table A; Target 27260; HLA-B*27:02; GPR143; ENSG00000101850; TAA
TVTAVASLLK

SEQ ID NO: 27261 - protein, 10 aa, Homo sapiens
  misc_feature: Table A; Target 27261; HLA-C*04:01; GPR143; ENSG00000101850; TAA
TVTAVASLLK

SEQ ID NO: 27262 - protein, 10 aa, Homo sapiens
  misc_feature: Table A; Target 27262; HLA-C*06:02; GPR143; ENSG00000101850; TAA
TVTAVASLLK

SEQ ID NO: 27263 - protein, 10 aa, Homo sapiens
  misc_feature: Table A; Target 27263; HLA-C*07:06; GPR143; ENSG00000101850; TAA
TVTAVASLLK

SEQ ID NO: 27264 - protein, 11 aa, Homo sapiens
  misc_feature: Table A; Target 27264; HLA-C*04:01; GPR143; ENSG00000101850; TAA
TVTAVASLLKG

SEQ ID NO: 27265 - protein, 11 aa, Homo sapiens
  misc_feature: Table A; Target 27265; HLA-C*06:02; GPR143; ENSG00000101850; TAA
TVTAVASLLKG

SEQ ID NO: 27266 - protein, 9 aa, Homo sapiens
  misc_feature: Table A; Target 27266; HLA-A*02:04; GPR143; ENSG00000101850; TAA
TVWLGFPNF

SEQ ID NO: 27267 - protein, 9 aa, Homo sapiens
  misc_feature: Table A; Target 27267; HLA-A*02:07; GPR143; ENSG00000101850; TAA
TVWLGFPNF

SEQ ID NO: 27268 - protein, 9 aa, Homo sapiens
  misc_feature: Table A; Target 27268; HLA-B*57:01; GPR143; ENSG00000101850; TAA
TVWLGFPNF

SEQ ID NO: 27269 - protein, 8 aa, Homo sapiens
  misc_feature: Table A; Target 27269; HLA-C*12:03; GPR143; ENSG00000101850; TAA
VANPILFQ

SEQ ID NO: 27270 - protein, 9 aa, Homo sapiens
  misc_feature: Table A; Target 27270; HLA-A*01:01; GPR143; ENSG00000101850; TAA
VANPILFQK

SEQ ID NO: 27271 - protein, 9 aa, Homo sapiens
  misc_feature: Table A; Target 27271; HLA-A*03:01; GPR143; ENSG00000101850; TAA
VANPILFQK

SEQ ID NO: 27272 - protein, 9 aa, Homo sapiens
  misc_feature: Table A; Target 27272; HLA-A*03:02; GPR143; ENSG00000101850; TAA
VANPILFQK

SEQ ID NO: 27273 - protein, 9 aa, Homo sapiens
  misc_feature: Table A; Target 27273; HLA-A*11:01; GPR143; ENSG00000101850; TAA
VANPILFQK

SEQ ID NO: 27274 - protein, 9 aa, Homo sapiens
  misc_feature: Table A; Target 27274; HLA-A*29:02; GPR143; ENSG00000101850; TAA
VANPILFQK

SEQ ID NO: 27275 - protein, 9 aa, Homo sapiens
  misc_feature: Table A; Target 27275; HLA-A*31:01; GPR143; ENSG00000101850; TAA
VANPILFQK

SEQ ID NO: 27276 - protein, 9 aa, Homo sapiens
  misc_feature: Table A; Target 27276; HLA-A*33:01; GPR143; ENSG00000101850; TAA
VANPILFQK

SEQ ID NO: 27277 - protein, 9 aa, Homo sapiens
  misc_feature: Table A; Target 27277; HLA-A*33:03; GPR143; ENSG00000101850; TAA
VANPILFQK

SEQ ID NO: 27278 - protein, 9 aa, Homo sapiens
  misc_feature: Table A; Target 27278; HLA-A*68:01; GPR143; ENSG00000101850; TAA
VANPILFQK

SEQ ID NO: 27279 - protein, 9 aa, Homo sapiens
  misc_feature: Table A; Target 27279; HLA-A*68:02; GPR143; ENSG00000101850; TAA
VANPILFQK

SEQ ID NO: 27280 - protein, 9 aa, Homo sapiens
  misc_feature: Table A; Target 27280; HLA-B*13:02; GPR143; ENSG00000101850; TAA
VANPILFQK

SEQ ID NO: 27281 - protein, 9 aa, Homo sapiens
  misc_feature: Table A; Target 27281; HLA-B*27:02; GPR143; ENSG00000101850; TAA
VANPILFQK

SEQ ID NO: 27282 - protein, 9 aa, Homo sapiens
  misc_feature: Table A; Target 27282; HLA-B*27:05; GPR143; ENSG00000101850; TAA
VANPILFQK

SEQ ID NO: 27283 - protein, 9 aa, Homo sapiens
  misc_feature: Table A; Target 27283; HLA-B*57:01; GPR143; ENSG00000101850; TAA
VANPILFQK

SEQ ID NO: 27284 - protein, 9 aa, Homo sapiens
  misc_feature: Table A; Target 27284; HLA-B*58:01; GPR143; ENSG00000101850; TAA
VANPILFQK

SEQ ID NO: 27285 - protein, 9 aa, Homo sapiens
  misc_feature: Table A; Target 27285; HLA-C*02:02; GPR143; ENSG00000101850; TAA
VANPILFQK

SEQ ID NO: 27286 - protein, 9 aa, Homo sapiens
  misc_feature: Table A; Target 27286; HLA-C*06:02; GPR143; ENSG00000101850; TAA
VANPILFQK

SEQ ID NO: 27287 - protein, 9 aa, Homo sapiens
  misc_feature: Table A; Target 27287; HLA-C*07:06; GPR143; ENSG00000101850; TAA
VANPILFQK

SEQ ID NO: 27288 - protein, 9 aa, Homo sapiens
  misc_feature: Table A; Target 27288; HLA-C*12:03; GPR143; ENSG00000101850; TAA
VANPILFQK

SEQ ID NO: 27289 - protein, 9 aa, Homo sapiens
  misc_feature: Table A; Target 27289; HLA-C*16:02; GPR143; ENSG00000101850; TAA
VANPILFQK

SEQ ID NO: 27290 - protein, 9 aa, Homo sapiens
  misc_feature: Table A; Target 27290; HLA-A*31:01; GPR143; ENSG00000101850; TAA
VDAYLVIRR

SEQ ID NO: 27291 - protein, 9 aa, Homo sapiens
  misc_feature: Table A; Target 27291; HLA-A*33:01; GPR143; ENSG00000101850; TAA
VDAYLVIRR

SEQ ID NO: 27292 - protein, 9 aa, Homo sapiens
  misc_feature: Table A; Target 27292; HLA-A*68:01; GPR143; ENSG00000101850; TAA
VDAYLVIRR

SEQ ID NO: 27293 - protein, 9 aa, Homo sapiens
  misc_feature: Table A; Target 27293; HLA-A*68:02; GPR143; ENSG00000101850; TAA
VDAYLVIRR

SEQ ID NO: 27294 - protein, 9 aa, Homo sapiens
  misc_feature: Table A; Target 27294; HLA-B*27:02; GPR143; ENSG00000101850; TAA
VDAYLVIRR

SEQ ID NO: 27295 - protein, 8 aa, Homo sapiens
  misc_feature: Table A; Target 27295; HLA-B*18:01; GPR143; ENSG00000101850; TAA
VEGAAMLY

SEQ ID NO: 27296 - protein, 8 aa, Homo sapiens
  misc_feature: Table A; Target 27296; HLA-B*27:02; GPR143; ENSG00000101850; TAA
VEGAAMLY

SEQ ID NO: 27297 - protein, 8 aa, Homo sapiens
  misc_feature: Table A; Target 27297; HLA-B*37:01; GPR143; ENSG00000101850; TAA
VEGAAMLY

SEQ ID NO: 27298 - protein, 8 aa, Homo sapiens
  misc_feature: Table A; Target 27298; HLA-B*44:02; GPR143; ENSG00000101850; TAA
VEGAAMLY

SEQ ID NO: 27299 - protein, 8 aa, Homo sapiens
  misc_feature: Table A; Target 27299; HLA-B*44:03; GPR143; ENSG00000101850; TAA
VEGAAMLY

SEQ ID NO: 27300 - protein, 8 aa, Homo sapiens
  misc_feature: Table A; Target 27300; HLA-B*49:01; GPR143; ENSG00000101850; TAA
VEGAAMLY

SEQ ID NO: 27301 - protein, 8 aa, Homo sapiens
  misc_feature: Table A; Target 27301; HLA-C*07:01; GPR143; ENSG00000101850; TAA
VEGAAMLY

SEQ ID NO: 27302 - protein, 8 aa, Homo sapiens
  misc_feature: Table A; Target 27302; HLA-C*07:04; GPR143; ENSG00000101850; TAA
VEGAAMLY

SEQ ID NO: 27303 - protein, 8 aa, Homo sapiens
  misc_feature: Table A; Target 27303; HLA-C*12:03; GPR143; ENSG00000101850; TAA
VEGAAMLY

SEQ ID NO: 27304 - protein, 8 aa, Homo sapiens
  misc_feature: Table A; Target 27304; HLA-C*16:04; GPR143; ENSG00000101850; TAA
VEGAAMLY

SEQ ID NO: 27305 - protein, 9 aa, Homo sapiens
  misc_feature: Table A; Target 27305; HLA-B*18:01; GPR143; ENSG00000101850; TAA
VEGAAMLYY

SEQ ID NO: 27306 - protein, 9 aa, Homo sapiens
  misc_feature: Table A; Target 27306; HLA-B*27:02; GPR143; ENSG00000101850; TAA
VEGAAMLYY

SEQ ID NO: 27307 - protein, 9 aa, Homo sapiens
  misc_feature: Table A; Target 27307; HLA-B*44:02; GPR143; ENSG00000101850; TAA
VEGAAMLYY

SEQ ID NO: 27308 - protein, 9 aa, Homo sapiens
  misc_feature: Table A; Target 27308; HLA-B*44:03; GPR143; ENSG00000101850; TAA
VEGAAMLYY

SEQ ID NO: 27309 - protein, 9 aa, Homo sapiens
  misc_feature: Table A; Target 27309; HLA-A*03:01; GPR143; ENSG00000101850; TAA
VLSFQPRAF

SEQ ID NO: 27310 - protein, 9 aa, Homo sapiens
  misc_feature: Table A; Target 27310; HLA-A*32:01; GPR143; ENSG00000101850; TAA
VLSFQPRAF

SEQ ID NO: 27311 - protein, 9 aa, Homo sapiens
  misc_feature: Table A; Target 27311; HLA-C*16:01; GPR143; ENSG00000101850; TAA
VLSFQPRAF

SEQ ID NO: 27312 - protein, 9 aa, Homo sapiens
  misc_feature: Table A; Target 27312; HLA-A*02:01; GPR143; ENSG00000101850; TAA
VLVANPILF

SEQ ID NO: 27313 - protein, 9 aa, Homo sapiens
  misc_feature: Table A; Target 27313; HLA-A*02:07; GPR143; ENSG00000101850; TAA
VLVANPILF

SEQ ID NO: 27314 - protein, 9 aa, Homo sapiens
  misc_feature: Table A; Target 27314; HLA-A*23:01; GPR143; ENSG00000101850; TAA
VLVANPILF

SEQ ID NO: 27315 - protein, 9 aa, Homo sapiens
  misc_feature: Table A; Target 27315; HLA-A*24:02; GPR143; ENSG00000101850; TAA
VLVANPILF

SEQ ID NO: 27316 - protein, 9 aa, Homo sapiens
  misc_feature: Table A; Target 27316; HLA-A*29:02; GPR143; ENSG00000101850; TAA
VLVANPILF

SEQ ID NO: 27317 - protein, 9 aa, Homo sapiens
  misc_feature: Table A; Target 27317; HLA-A*32:01; GPR143; ENSG00000101850; TAA
VLVANPILF

SEQ ID NO: 27318 - protein, 9 aa, Homo sapiens
  misc_feature: Table A; Target 27318; HLA-B*15:01; GPR143; ENSG00000101850; TAA
VLVANPILF

SEQ ID NO: 27319 - protein, 9 aa, Homo sapiens
  misc_feature: Table A; Target 27319; HLA-B*15:03; GPR143; ENSG00000101850; TAA
VLVANPILF

SEQ ID NO: 27320 - protein, 9 aa, Homo sapiens
  misc_feature: Table A; Target 27320; HLA-B*46:01; GPR143; ENSG00000101850; TAA
VLVANPILF

SEQ ID NO: 27321 - protein, 9 aa, Homo sapiens
  misc_feature: Table A; Target 27321; HLA-B*57:01; GPR143; ENSG00000101850; TAA
VLVANPILF

SEQ ID NO: 27322 - protein, 9 aa, Homo sapiens
  misc_feature: Table A; Target 27322; HLA-C*02:02; GPR143; ENSG00000101850; TAA
VLVANPILF

SEQ ID NO: 27323 - protein, 9 aa, Homo sapiens
  misc_feature: Table A; Target 27323; HLA-C*07:01; GPR143; ENSG00000101850; TAA
VLVANPILF

SEQ ID NO: 27324 - protein, 9 aa, Homo sapiens
  misc_feature: Table A; Target 27324; HLA-C*07:04; GPR143; ENSG00000101850; TAA
VLVANPILF

SEQ ID NO: 27325 - protein, 9 aa, Homo sapiens
  misc_feature: Table A; Target 27325; HLA-C*12:03; GPR143; ENSG00000101850; TAA
VLVANPILF

SEQ ID NO: 27326 - protein, 11 aa, Homo sapiens
  misc_feature: Table A; Target 27326; HLA-A*03:01; GPR143; ENSG00000101850; TAA
VLVANPILFQK

SEQ ID NO: 27327 - protein, 11 aa, Homo sapiens
  misc_feature: Table A; Target 27327; HLA-A*03:02; GPR143; ENSG00000101850; TAA
VLVANPILFQK

SEQ ID NO: 27328 - protein, 9 aa, Homo sapiens
  misc_feature: Table A; Target 27328; HLA-A*32:01; GPR143; ENSG00000101850; TAA
VRTAAKTTW

SEQ ID NO: 27329 - protein, 9 aa, Homo sapiens
  misc_feature: Table A; Target 27329; HLA-B*27:02; GPR143; ENSG00000101850; TAA
VRTAAKTTW

SEQ ID NO: 27330 - protein, 9 aa, Homo sapiens
  misc_feature: Table A; Target 27330; HLA-B*27:05; GPR143; ENSG00000101850; TAA
VRTAAKTTW

SEQ ID NO: 27331 - protein, 9 aa, Homo sapiens
  misc_feature: Table A; Target 27331; HLA-C*16:04; GPR143; ENSG00000101850; TAA
VRTAAKTTW

SEQ ID NO: 27332 - protein, 9 aa, Homo sapiens
  misc_feature: Table A; Target 27332; HLA-A*01:01; GPR143; ENSG00000101850; TAA
VSDMNHTEI

SEQ ID NO: 27333 - protein, 9 aa, Homo sapiens
  misc_feature: Table A; Target 27333; HLA-C*05:01; GPR143; ENSG00000101850; TAA
VSDMNHTEI

SEQ ID NO: 27334 - protein, 10 aa, Homo sapiens
  misc_feature: Table A; Target 27334; HLA-A*01:01; GPR143; ENSG00000101850; TAA
VSDMNHTEIW

SEQ ID NO: 27335 - protein, 10 aa, Homo sapiens
  misc_feature: Table A; Target 27335; HLA-B*57:01; GPR143; ENSG00000101850; TAA
VSDMNHTEIW

SEQ ID NO: 27336 - protein, 10 aa, Homo sapiens
  misc_feature: Table A; Target 27336; HLA-B*58:01; GPR143; ENSG00000101850; TAA
VSDMNHTEIW

SEQ ID NO: 27337 - protein, 8 aa, Homo sapiens
  misc_feature: Table A; Target 27337; HLA-B*46:01; GPR143; ENSG00000101850; TAA
VTAVASLL

SEQ ID NO: 27338 - protein, 8 aa, Homo sapiens
  misc_feature: Table A; Target 27338; HLA-C*01:02; GPR143; ENSG00000101850; TAA
VTAVASLL

SEQ ID NO: 27339 - protein, 8 aa, Homo sapiens
  misc_feature: Table A; Target 27339; HLA-C*03:03; GPR143; ENSG00000101850; TAA
VTAVASLL

SEQ ID NO: 27340 - protein, 8 aa, Homo sapiens
  misc_feature: Table A; Target 27340; HLA-C*03:04; GPR143; ENSG00000101850; TAA
VTAVASLL

SEQ ID NO: 27341 - protein, 8 aa, Homo sapiens
  misc_feature: Table A; Target 27341; HLA-C*04:01; GPR143; ENSG00000101850; TAA
VTAVASLL

SEQ ID NO: 27342 - protein, 8 aa, Homo sapiens
  misc_feature: Table A; Target 27342; HLA-C*05:01; GPR143; ENSG00000101850; TAA
VTAVASLL

SEQ ID NO: 27343 - protein, 8 aa, Homo sapiens
  misc_feature: Table A; Target 27343; HLA-C*06:02; GPR143; ENSG00000101850; TAA
VTAVASLL

SEQ ID NO: 27344 - protein, 8 aa, Homo sapiens
  misc_feature: Table A; Target 27344; HLA-C*07:02; GPR143; ENSG00000101850; TAA
VTAVASLL

SEQ ID NO: 27345 - protein, 8 aa, Homo sapiens
  misc_feature: Table A; Target 27345; HLA-C*12:03; GPR143; ENSG00000101850; TAA
VTAVASLL

SEQ ID NO: 27346 - protein, 8 aa, Homo sapiens
  misc_feature: Table A; Target 27346; HLA-C*14:02; GPR143; ENSG00000101850; TAA
VTAVASLL

SEQ ID NO: 27347 - protein, 9 aa, Homo sapiens
  misc_feature: Table A; Target 27347; HLA-A*01:01; GPR143; ENSG00000101850; TAA
VTAVASLLK

SEQ ID NO: 27348 - protein, 9 aa, Homo sapiens
  misc_feature: Table A; Target 27348; HLA-A*03:01; GPR143; ENSG00000101850; TAA
VTAVASLLK

SEQ ID NO: 27349 - protein, 9 aa, Homo sapiens
  misc_feature: Table A; Target 27349; HLA-A*03:02; GPR143; ENSG00000101850; TAA
VTAVASLLK

SEQ ID NO: 27350 - protein, 9 aa, Homo sapiens
  misc_feature: Table A; Target 27350; HLA-A*11:01; GPR143; ENSG00000101850; TAA
VTAVASLLK

SEQ ID NO: 27351 - protein, 9 aa, Homo sapiens
  misc_feature: Table A; Target 27351; HLA-A*68:01; GPR143; ENSG00000101850; TAA
VTAVASLLK

SEQ ID NO: 27352 - protein, 9 aa, Homo sapiens
  misc_feature: Table A; Target 27352; HLA-B*27:02; GPR143; ENSG00000101850; TAA
VTAVASLLK

SEQ ID NO: 27353 - protein, 9 aa, Homo sapiens
  misc_feature: Table A; Target 27353; HLA-C*07:06; GPR143; ENSG00000101850; TAA
VTAVASLLK

SEQ ID NO: 27354 - protein, 10 aa, Homo sapiens
  misc_feature: Table A; Target 27354; HLA-C*06:02; GPR143; ENSG00000101850; TAA
VTAVASLLKG

SEQ ID NO: 27355 - protein, 11 aa, Homo sapiens
  misc_feature: Table A; Target 27355; HLA-A*31:01; GPR143; ENSG00000101850; TAA
VTAVASLLKGR

SEQ ID NO: 27356 - protein, 11 aa, Homo sapiens
  misc_feature: Table A; Target 27356; HLA-A*33:01; GPR143; ENSG00000101850; TAA
VTAVASLLKGR

SEQ ID NO: 27357 - protein, 11 aa, Homo sapiens
  misc_feature: Table A; Target 27357; HLA-A*33:03; GPR143; ENSG00000101850; TAA
VTAVASLLKGR

SEQ ID NO: 27358 - protein, 11 aa, Homo sapiens
  misc_feature: Table A; Target 27358; HLA-A*68:01; GPR143; ENSG00000101850; TAA
VTAVASLLKGR

SEQ ID NO: 27359 - protein, 11 aa, Homo sapiens
  misc_feature: Table A; Target 27359; HLA-C*06:02; GPR143; ENSG00000101850; TAA
VTAVASLLKGR

SEQ ID NO: 27360 - protein, 9 aa, Homo sapiens
  misc_feature: Table A; Target 27360; HLA-A*01:01; GPR143; ENSG00000101850; TAA
VTMYLPLLL

SEQ ID NO: 27361 - protein, 9 aa, Homo sapiens
  misc_feature: Table A; Target 27361; HLA-A*23:01; GPR143; ENSG00000101850; TAA
VTMYLPLLL

SEQ ID NO: 27362 - protein, 9 aa, Homo sapiens
  misc_feature: Table A; Target 27362; HLA-A*24:02; GPR143; ENSG00000101850; TAA
VTMYLPLLL

SEQ ID NO: 27363 - protein, 9 aa, Homo sapiens
  misc_feature: Table A; Target 27363; HLA-A*29:02; GPR143; ENSG00000101850; TAA
VTMYLPLLL

SEQ ID NO: 27364 - protein, 8 aa, Homo sapiens
  misc_feature: Table A; Target 27364; HLA-A*24:02; GPR143; ENSG00000101850; TAA
VWLGFPNF

SEQ ID NO: 27365 - protein, 8 aa, Homo sapiens
  misc_feature: Table A; Target 27365; HLA-B*18:01; GPR143; ENSG00000101850; TAA
WESLTTSA

SEQ ID NO: 27366 - protein, 8 aa, Homo sapiens
  misc_feature: Table A; Target 27366; HLA-B*49:01; GPR143; ENSG00000101850; TAA
WESLTTSA

SEQ ID NO: 27367 - protein, 9 aa, Homo sapiens
  misc_feature: Table A; Target 27367; HLA-B*49:01; GPR143; ENSG00000101850; TAA
WESLTTSAA

SEQ ID NO: 27368 - protein, 8 aa, Homo sapiens
  misc_feature: Table A; Target 27368; HLA-A*23:01; GPR143; ENSG00000101850; TAA
YAVDAYLV

SEQ ID NO: 27369 - protein, 8 aa, Homo sapiens
  misc_feature: Table A; Target 27369; HLA-A*68:02; GPR143; ENSG00000101850; TAA
YAVDAYLV

SEQ ID NO: 27370 - protein, 8 aa, Homo sapiens
  misc_feature: Table A; Target 27370; HLA-B*13:02; GPR143; ENSG00000101850; TAA
YAVDAYLV

SEQ ID NO: 27371 - protein, 8 aa, Homo sapiens
  misc_feature: Table A; Target 27371; HLA-B*39:01; GPR143; ENSG00000101850; TAA
YAVDAYLV

SEQ ID NO: 27372 - protein, 8 aa, Homo sapiens
  misc_feature: Table A; Target 27372; HLA-B*49:01; GPR143; ENSG00000101850; TAA
YAVDAYLV

SEQ ID NO: 27373 - protein, 8 aa, Homo sapiens
  misc_feature: Table A; Target 27373; HLA-B*51:01; GPR143; ENSG00000101850; TAA
YAVDAYLV

SEQ ID NO: 27374 - protein, 8 aa, Homo sapiens
  misc_feature: Table A; Target 27374; HLA-B*54:01; GPR143; ENSG00000101850; TAA
YAVDAYLV

SEQ ID NO: 27375 - protein, 8 aa, Homo sapiens
  misc_feature: Table A; Target 27375; HLA-C*02:02; GPR143; ENSG00000101850; TAA
YAVDAYLV

SEQ ID NO: 27376 - protein, 8 aa, Homo sapiens
  misc_feature: Table A; Target 27376; HLA-C*12:03; GPR143; ENSG00000101850; TAA
YAVDAYLV

SEQ ID NO: 27377 - protein, 8 aa, Homo sapiens
  misc_feature: Table A; Target 27377; HLA-C*16:04; GPR143; ENSG00000101850; TAA
YAVDAYLV

SEQ ID NO: 27378 - protein, 9 aa, Homo sapiens
  misc_feature: Table A; Target 27378; HLA-A*02:07; GPR143; ENSG00000101850; TAA
YAVDAYLVI

SEQ ID NO: 27379 - protein, 9 aa, Homo sapiens
  misc_feature: Table A; Target 27379; HLA-A*23:01; GPR143; ENSG00000101850; TAA
YAVDAYLVI

SEQ ID NO: 27380 - protein, 9 aa, Homo sapiens
  misc_feature: Table A; Target 27380; HLA-A*24:02; GPR143; ENSG00000101850; TAA
YAVDAYLVI

SEQ ID NO: 27381 - protein, 9 aa, Homo sapiens
  misc_feature: Table A; Target 27381; HLA-A*25:01; GPR143; ENSG00000101850; TAA
YAVDAYLVI

SEQ ID NO: 27382 - protein, 9 aa, Homo sapiens
  misc_feature: Table A; Target 27382; HLA-A*26:01; GPR143; ENSG00000101850; TAA
YAVDAYLVI

SEQ ID NO: 27383 - protein, 9 aa, Homo sapiens
  misc_feature: Table A; Target 27383; HLA-A*68:02; GPR143; ENSG00000101850; TAA
YAVDAYLVI

SEQ ID NO: 27384 - protein, 9 aa, Homo sapiens
  misc_feature: Table A; Target 27384; HLA-B*13:02; GPR143; ENSG00000101850; TAA
YAVDAYLVI

SEQ ID NO: 27385 - protein, 9 aa, Homo sapiens
  misc_feature: Table A; Target 27385; HLA-B*35:01; GPR143; ENSG00000101850; TAA
YAVDAYLVI

SEQ ID NO: 27386 - protein, 9 aa, Homo sapiens
  misc_feature: Table A; Target 27386; HLA-B*35:03; GPR143; ENSG00000101850; TAA
YAVDAYLVI

SEQ ID NO: 27387 - protein, 9 aa, Homo sapiens
  misc_feature: Table A; Target 27387; HLA-B*38:01; GPR143; ENSG00000101850; TAA
YAVDAYLVI

SEQ ID NO: 27388 - protein, 9 aa, Homo sapiens
  misc_feature: Table A; Target 27388; HLA-B*39:01; GPR143; ENSG00000101850; TAA
YAVDAYLVI

SEQ ID NO: 27389 - protein, 9 aa, Homo sapiens
  misc_feature: Table A; Target 27389; HLA-B*46:01; GPR143; ENSG00000101850; TAA
YAVDAYLVI

SEQ ID NO: 27390 - protein, 9 aa, Homo sapiens
  misc_feature: Table A; Target 27390; HLA-B*49:01; GPR143; ENSG00000101850; TAA
YAVDAYLVI

SEQ ID NO: 27391 - protein, 9 aa, Homo sapiens
  misc_feature: Table A; Target 27391; HLA-B*51:01; GPR143; ENSG00000101850; TAA
YAVDAYLVI

SEQ ID NO: 27392 - protein, 9 aa, Homo sapiens
  misc_feature: Table A; Target 27392; HLA-B*54:01; GPR143; ENSG00000101850; TAA
YAVDAYLVI

SEQ ID NO: 27393 - protein, 9 aa, Homo sapiens
  misc_feature: Table A; Target 27393; HLA-B*56:01; GPR143; ENSG00000101850; TAA
YAVDAYLVI

SEQ ID NO: 27394 - protein, 9 aa, Homo sapiens
  misc_feature: Table A; Target 27394; HLA-B*57:01; GPR143; ENSG00000101850; TAA
YAVDAYLVI

SEQ ID NO: 27395 - protein, 9 aa, Homo sapiens
  misc_feature: Table A; Target 27395; HLA-B*58:01; GPR143; ENSG00000101850; TAA
YAVDAYLVI

SEQ ID NO: 27396 - protein, 9 aa, Homo sapiens
  misc_feature: Table A; Target 27396; HLA-C*02:02; GPR143; ENSG00000101850; TAA
YAVDAYLVI

SEQ ID NO: 27397 - protein, 9 aa, Homo sapiens
  misc_feature: Table A; Target 27397; HLA-C*03:03; GPR143; ENSG00000101850; TAA
YAVDAYLVI

SEQ ID NO: 27398 - protein, 9 aa, Homo sapiens
  misc_feature: Table A; Target 27398; HLA-C*03:04; GPR143; ENSG00000101850; TAA
YAVDAYLVI

SEQ ID NO: 27399 - protein, 9 aa, Homo sapiens
  misc_feature: Table A; Target 27399; HLA-C*12:03; GPR143; ENSG00000101850; TAA
YAVDAYLVI

SEQ ID NO: 27400 - protein, 9 aa, Homo sapiens
  misc_feature: Table A; Target 27400; HLA-C*16:04; GPR143; ENSG00000101850; TAA
YAVDAYLVI

SEQ ID NO: 27401 - protein, 10 aa, Homo sapiens
  misc_feature: Table A; Target 27401; HLA-A*68:01; GPR143; ENSG00000101850; TAA
YAVDAYLVIR

SEQ ID NO: 27402 - protein, 10 aa, Homo sapiens
  misc_feature: Table A; Target 27402; HLA-A*68:02; GPR143; ENSG00000101850; TAA
YAVDAYLVIR

SEQ ID NO: 27403 - protein, 10 aa, Homo sapiens
  misc_feature: Table A; Target 27403; HLA-B*27:02; GPR143; ENSG00000101850; TAA
YAVDAYLVIR

SEQ ID NO: 27404 - protein, 10 aa, Homo sapiens
  misc_feature: Table A; Target 27404; HLA-C*07:06; GPR143; ENSG00000101850; TAA
YAVDAYLVIR

SEQ ID NO: 27405 - protein, 11 aa, Homo sapiens
  misc_feature: Table A; Target 27405; HLA-A*68:01; GPR143; ENSG00000101850; TAA
YAVDAYLVIRR

SEQ ID NO: 27406 - protein, 11 aa, Homo sapiens
  misc_feature: Table A; Target 27406; HLA-A*68:02; GPR143; ENSG00000101850; TAA
YAVDAYLVIRR

SEQ ID NO: 27407 - protein, 8 aa, Homo sapiens
  misc_feature: Table A; Target 27407; HLA-B*08:01; GPR143; ENSG00000101850; TAA
YGWTGCSL

SEQ ID NO: 27408 - protein, 8 aa, Homo sapiens
  misc_feature: Table A; Target 27408; HLA-B*40:02; GPR143; ENSG00000101850; TAA
YGWTGCSL

SEQ ID NO: 27409 - protein, 8 aa, Homo sapiens
  misc_feature: Table A; Target 27409; HLA-C*03:03; GPR143; ENSG00000101850; TAA
YGWTGCSL

SEQ ID NO: 27410 - protein, 8 aa, Homo sapiens
  misc_feature: Table A; Target 27410; HLA-C*03:04; GPR143; ENSG00000101850; TAA
YGWTGCSL

SEQ ID NO: 27411 - protein, 8 aa, Homo sapiens
  misc_feature: Table A; Target 27411; HLA-A*02:07; GPR143; ENSG00000101850; TAA
YLPLLLVL

SEQ ID NO: 27412 - protein, 9 aa, Homo sapiens
  misc_feature: Table A; Target 27412; HLA-A*02:01; GPR143; ENSG00000101850; TAA
YLPLLLVLV

SEQ ID NO: 27413 - protein, 9 aa, Homo sapiens
  misc_feature: Table A; Target 27413; HLA-A*02:03; GPR143; ENSG00000101850; TAA
YLPLLLVLV

SEQ ID NO: 27414 - protein, 9 aa, Homo sapiens
  misc_feature: Table A; Target 27414; HLA-A*02:04; GPR143; ENSG00000101850; TAA
YLPLLLVLV

SEQ ID NO: 27415 - protein, 9 aa, Homo sapiens
  misc_feature: Table A; Target 27415; HLA-A*02:07; GPR143; ENSG00000101850; TAA
YLPLLLVLV

SEQ ID NO: 27416 - protein, 9 aa, Homo sapiens
  misc_feature: Table A; Target 27416; HLA-A*24:02; GPR143; ENSG00000101850; TAA
YLPLLLVLV

SEQ ID NO: 27417 - protein, 9 aa, Homo sapiens
  misc_feature: Table A; Target 27417; HLA-A*68:02; GPR143; ENSG00000101850; TAA
YLPLLLVLV

SEQ ID NO: 27418 - protein, 9 aa, Homo sapiens
  misc_feature: Table A; Target 27418; HLA-A*02:04; GPR143; ENSG00000101850; TAA
YVTMYLPLL

SEQ ID NO: 27419 - protein, 9 aa, Homo sapiens
  misc_feature: Table A; Target 27419; HLA-A*02:07; GPRC6A; ENSG00000173612; CTA
AAPTVEVNV

SEQ ID NO: 27420 - protein, 9 aa, Homo sapiens
  misc_feature: Table A; Target 27420; HLA-B*51:01; GPRC6A; ENSG00000173612; CTA
AAPTVEVNV

SEQ ID NO: 27421 - protein, 9 aa, Homo sapiens
  misc_feature: Table A; Target 27421; HLA-C*01:02; GPRC6A; ENSG00000173612; CTA
AAPTVEVNV

SEQ ID NO: 27422 - protein, 9 aa, Homo sapiens
  misc_feature: Table A; Target 27422; HLA-C*05:01; GPRC6A; ENSG00000173612; CTA
AAPTVEVNV

SEQ ID NO: 27423 - protein, 11 aa, Homo sapiens
  misc_feature: Table A; Target 27423; HLA-C*01:02; GPRC6A; ENSG00000173612; CTA
AAPTVEVNVSL

SEQ ID NO: 27424 - protein, 9 aa, Homo sapiens
  misc_feature: Table A; Target 27424; HLA-C*16:01; GPRC6A; ENSG00000173612; CTA
AATLRFLSK

SEQ ID NO: 27425 - protein, 9 aa, Homo sapiens
  misc_feature: Table A; Target 27425; HLA-C*03:03; GPRC6A; ENSG00000173612; CTA
AATSPGHII

SEQ ID NO: 27426 - protein, 9 aa, Homo sapiens
  misc_feature: Table A; Target 27426; HLA-C*03:04; GPRC6A; ENSG00000173612; CTA
AATSPGHII

SEQ ID NO: 27427 - protein, 9 aa, Homo sapiens
  misc_feature: Table A; Target 27427; HLA-C*16:01; GPRC6A; ENSG00000173612; CTA
AATSPGHII

SEQ ID NO: 27428 - protein, 9 aa, Homo sapiens
  misc_feature: Table A; Target 27428; HLA-C*16:02; GPRC6A; ENSG00000173612; CTA
AATSPGHII

SEQ ID NO: 27429 - protein, 8 aa, Homo sapiens
  misc_feature: Table A; Target 27429; HLA-B*49:01; GPRC6A; ENSG00000173612; CTA
AEANNVCI

SEQ ID NO: 27430 - protein, 10 aa, Homo sapiens
  misc_feature: Table A; Target 27430; HLA-A*30:01; GPRC6A; ENSG00000173612; CTA
AEANNVCIAF

SEQ ID NO: 27431 - protein, 10 aa, Homo sapiens
  misc_feature: Table A; Target 27431; HLA-B*27:02; GPRC6A; ENSG00000173612; CTA
AEANNVCIAF

SEQ ID NO: 27432 - protein, 10 aa, Homo sapiens
  misc_feature: Table A; Target 27432; HLA-B*40:01; GPRC6A; ENSG00000173612; CTA
AEANNVCIAF

SEQ ID NO: 27433 - protein, 10 aa, Homo sapiens
  misc_feature: Table A; Target 27433; HLA-B*44:02; GPRC6A; ENSG00000173612; CTA
AEANNVCIAF

SEQ ID NO: 27434 - protein, 10 aa, Homo sapiens
  misc_feature: Table A; Target 27434; HLA-B*44:03; GPRC6A; ENSG00000173612; CTA
AEANNVCIAF

SEQ ID NO: 27435 - protein, 10 aa, Homo sapiens
  misc_feature: Table A; Target 27435; HLA-C*16:04; GPRC6A; ENSG00000173612; CTA
AEANNVCIAF

SEQ ID NO: 27436 - protein, 8 aa, Homo sapiens
  misc_feature: Table A; Target 27436; HLA-B*37:01; GPRC6A; ENSG00000173612; CTA
AEILSDKI

SEQ ID NO: 27437 - protein, 8 aa, Homo sapiens
  misc_feature: Table A; Target 27437; HLA-B*44:02; GPRC6A; ENSG00000173612; CTA
AEILSDKI

SEQ ID NO: 27438 - protein, 8 aa, Homo sapiens
  misc_feature: Table A; Target 27438; HLA-B*44:03; GPRC6A; ENSG00000173612; CTA
AEILSDKI

SEQ ID NO: 27439 - protein, 8 aa, Homo sapiens
  misc_feature: Table A; Target 27439; HLA-B*49:01; GPRC6A; ENSG00000173612; CTA
AEILSDKI

SEQ ID NO: 27440 - protein, 10 aa, Homo sapiens
  misc_feature: Table A; Target 27440; HLA-B*44:02; GPRC6A; ENSG00000173612; CTA
AEILSDKIRF

SEQ ID NO: 27441 - protein, 10 aa, Homo sapiens
  misc_feature: Table A; Target 27441; HLA-B*44:03; GPRC6A; ENSG00000173612; CTA
AEILSDKIRF

SEQ ID NO: 27442 - protein, 9 aa, Homo sapiens
  misc_feature: Table A; Target 27442; HLA-A*02:07; GPRC6A; ENSG00000173612; CTA
AEPGLIHSI

SEQ ID NO: 27443 - protein, 9 aa, Homo sapiens
  misc_feature: Table A; Target 27443; HLA-A*30:01; GPRC6A; ENSG00000173612; CTA
AEPGLIHSI

SEQ ID NO: 27444 - protein, 9 aa, Homo sapiens
  misc_feature: Table A; Target 27444; HLA-B*13:02; GPRC6A; ENSG00000173612; CTA
AEPGLIHSI

SEQ ID NO: 27445 - protein, 9 aa, Homo sapiens
  misc_feature: Table A; Target 27445; HLA-B*27:02; GPRC6A; ENSG00000173612; CTA
AEPGLIHSI

SEQ ID NO: 27446 - protein, 9 aa, Homo sapiens
  misc_feature: Table A; Target 27446; HLA-B*37:01; GPRC6A; ENSG00000173612; CTA
AEPGLIHSI

SEQ ID NO: 27447 - protein, 9 aa, Homo sapiens
  misc_feature: Table A; Target 27447; HLA-B*40:01; GPRC6A; ENSG00000173612; CTA
AEPGLIHSI

SEQ ID NO: 27448 - protein, 9 aa, Homo sapiens
  misc_feature: Table A; Target 27448; HLA-B*40:02; GPRC6A; ENSG00000173612; CTA
AEPGLIHSI

SEQ ID NO: 27449 - protein, 9 aa, Homo sapiens
  misc_feature: Table A; Target 27449; HLA-B*44:02; GPRC6A; ENSG00000173612; CTA
AEPGLIHSI

SEQ ID NO: 27450 - protein, 9 aa, Homo sapiens
  misc_feature: Table A; Target 27450; HLA-B*44:03; GPRC6A; ENSG00000173612; CTA
AEPGLIHSI

SEQ ID NO: 27451 - protein, 9 aa, Homo sapiens
  misc_feature: Table A; Target 27451; HLA-B*49:01; GPRC6A; ENSG00000173612; CTA
AEPGLIHSI

SEQ ID NO: 27452 - protein, 9 aa, Homo sapiens
  misc_feature: Table A; Target 27452; HLA-C*16:04; GPRC6A; ENSG00000173612; CTA
AEPGLIHSI

SEQ ID NO: 27453 - protein, 11 aa, Homo sapiens
  misc_feature: Table A; Target 27453; HLA-A*30:01; GPRC6A; ENSG00000173612; CTA
AEPGLIHSIQL

SEQ ID NO: 27454 - protein, 11 aa, Homo sapiens
  misc_feature: Table A; Target 27454; HLA-B*40:01; GPRC6A; ENSG00000173612; CTA
AEPGLIHSIQL

SEQ ID NO: 27455 - protein, 11 aa, Homo sapiens
  misc_feature: Table A; Target 27455; HLA-B*44:02; GPRC6A; ENSG00000173612; CTA
AEPGLIHSIQL

SEQ ID NO: 27456 - protein, 11 aa, Homo sapiens
  misc_feature: Table A; Target 27456; HLA-B*44:03; GPRC6A; ENSG00000173612; CTA
AEPGLIHSIQL

SEQ ID NO: 27457 - protein, 9 aa, Homo sapiens
  misc_feature: Table A; Target 27457; HLA-A*30:01; GPRC6A; ENSG00000173612; CTA
AEYDLQNDV

SEQ ID NO: 27458 - protein, 9 aa, Homo sapiens
  misc_feature: Table A; Target 27458; HLA-B*40:01; GPRC6A; ENSG00000173612; CTA
AEYDLQNDV

SEQ ID NO: 27459 - protein, 9 aa, Homo sapiens
  misc_feature: Table A; Target 27459; HLA-B*49:01; GPRC6A; ENSG00000173612; CTA
AEYDLQNDV

SEQ ID NO: 27460 - protein, 9 aa, Homo sapiens
  misc_feature: Table A; Target 27460; HLA-C*16:04; GPRC6A; ENSG00000173612; CTA
AEYDLQNDV

SEQ ID NO: 27461 - protein, 10 aa, Homo sapiens
  misc_feature: Table A; Target 27461; HLA-A*30:01; GPRC6A; ENSG00000173612; CTA
AEYDLQNDVF

SEQ ID NO: 27462 - protein, 10 aa, Homo sapiens
  misc_feature: Table A; Target 27462; HLA-B*18:01; GPRC6A; ENSG00000173612; CTA
AEYDLQNDVF

SEQ ID NO: 27463 - protein, 10 aa, Homo sapiens
  misc_feature: Table A; Target 27463; HLA-B*27:02; GPRC6A; ENSG00000173612; CTA
AEYDLQNDVF

SEQ ID NO: 27464 - protein, 10 aa, Homo sapiens
  misc_feature: Table A; Target 27464; HLA-B*37:01; GPRC6A; ENSG00000173612; CTA
AEYDLQNDVF

SEQ ID NO: 27465 - protein, 10 aa, Homo sapiens
  misc_feature: Table A; Target 27465; HLA-B*40:01; GPRC6A; ENSG00000173612; CTA
AEYDLQNDVF

SEQ ID NO: 27466 - protein, 10 aa, Homo sapiens
  misc_feature: Table A; Target 27466; HLA-B*40:02; GPRC6A; ENSG00000173612; CTA
AEYDLQNDVF

SEQ ID NO: 27467 - protein, 10 aa, Homo sapiens
  misc_feature: Table A; Target 27467; HLA-B*44:02; GPRC6A; ENSG00000173612; CTA
AEYDLQNDVF

SEQ ID NO: 27468 - protein, 10 aa, Homo sapiens
  misc_feature: Table A; Target 27468; HLA-B*44:03; GPRC6A; ENSG00000173612; CTA
AEYDLQNDVF

SEQ ID NO: 27469 - protein, 10 aa, Homo sapiens
  misc_feature: Table A; Target 27469; HLA-B*49:01; GPRC6A; ENSG00000173612; CTA
AEYDLQNDVF

SEQ ID NO: 27470 - protein, 10 aa, Homo sapiens
  misc_feature: Table A; Target 27470; HLA-C*02:02; GPRC6A; ENSG00000173612; CTA
AEYDLQNDVF

SEQ ID NO: 27471 - protein, 10 aa, Homo sapiens
  misc_feature: Table A; Target 27471; HLA-C*16:04; GPRC6A; ENSG00000173612; CTA
AEYDLQNDVF

SEQ ID NO: 27472 - protein, 11 aa, Homo sapiens
  misc_feature: Table A; Target 27472; HLA-B*49:01; GPRC6A; ENSG00000173612; CTA
AEYDLQNDVFI

SEQ ID NO: 27473 - protein, 9 aa, Homo sapiens
  misc_feature: Table A; Target 27473; HLA-A*23:01; GPRC6A; ENSG00000173612; CTA
AFKEVLPAF

SEQ ID NO: 27474 - protein, 9 aa, Homo sapiens
  misc_feature: Table A; Target 27474; HLA-A*24:02; GPRC6A; ENSG00000173612; CTA
AFKEVLPAF

SEQ ID NO: 27475 - protein, 9 aa, Homo sapiens
  misc_feature: Table A; Target 27475; HLA-A*30:02; GPRC6A; ENSG00000173612; CTA
AFKEVLPAF

SEQ ID NO: 27476 - protein, 9 aa, Homo sapiens
  misc_feature: Table A; Target 27476; HLA-B*46:01; GPRC6A; ENSG00000173612; CTA
AFKEVLPAF

SEQ ID NO: 27477 - protein, 9 aa, Homo sapiens
  misc_feature: Table A; Target 27477; HLA-A*29:02; GPRC6A; ENSG00000173612; CTA
AFKGKYENY

SEQ ID NO: 27478 - protein, 9 aa, Homo sapiens
  misc_feature: Table A; Target 27478; HLA-A*30:02; GPRC6A; ENSG00000173612; CTA
AFKGKYENY

SEQ ID NO: 27479 - protein, 9 aa, Homo sapiens
  misc_feature: Table A; Target 27479; HLA-A*29:02; GPRC6A; ENSG00000173612; CTA
AFLKMIYSY

SEQ ID NO: 27480 - protein, 9 aa, Homo sapiens
  misc_feature: Table A; Target 27480; HLA-A*30:02; GPRC6A; ENSG00000173612; CTA
AFLKMIYSY

SEQ ID NO: 27481 - protein, 9 aa, Homo sapiens
  misc_feature: Table A; Target 27481; HLA-A*02:04; GPRC6A; ENSG00000173612; CTA
AILLLILSL

SEQ ID NO: 27482 - protein, 9 aa, Homo sapiens
  misc_feature: Table A; Target 27482; HLA-A*31:01; GPRC6A; ENSG00000173612; CTA
AIRDLCQAR

SEQ ID NO: 27483 - protein, 9 aa, Homo sapiens
  misc_feature: Table A; Target 27483; HLA-A*02:01; GPRC6A; ENSG00000173612; CTA
ALNTFIIQA

SEQ ID NO: 27484 - protein, 9 aa, Homo sapiens
  misc_feature: Table A; Target 27484; HLA-A*02:03; GPRC6A; ENSG00000173612; CTA
ALNTFIIQA

SEQ ID NO: 27485 - protein, 9 aa, Homo sapiens
  misc_feature: Table A; Target 27485; HLA-A*02:04; GPRC6A; ENSG00000173612; CTA
ALNTFIIQA

SEQ ID NO: 27486 - protein, 9 aa, Homo sapiens
  misc_feature: Table A; Target 27486; HLA-B*55:01; GPRC6A; ENSG00000173612; CTA
ALNTFIIQA

SEQ ID NO: 27487 - protein, 9 aa, Homo sapiens
  misc_feature: Table A; Target 27487; HLA-B*56:01; GPRC6A; ENSG00000173612; CTA
ALNTFIIQA

SEQ ID NO: 27488 - protein, 10 aa, Homo sapiens
  misc_feature: Table A; Target 27488; HLA-C*01:02; GPRC6A; ENSG00000173612; CTA
ALSPASLDSM

SEQ ID NO: 27489 - protein, 9 aa, Homo sapiens
  misc_feature: Table A; Target 27489; HLA-A*02:03; GPRC6A; ENSG00000173612; CTA
AMAATLRFL

SEQ ID NO: 27490 - protein, 8 aa, Homo sapiens
  misc_feature: Table A; Target 27490; HLA-A*03:01; GPRC6A; ENSG00000173612; CTA
AMAHLIQK

SEQ ID NO: 27491 - protein, 9 aa, Homo sapiens
  misc_feature: Table A; Target 27491; HLA-A*30:02; GPRC6A; ENSG00000173612; CTA
AMHLSACAY

SEQ ID NO: 27492 - protein, 9 aa, Homo sapiens
  misc_feature: Table A; Target 27492; HLA-B*15:01; GPRC6A; ENSG00000173612; CTA
AMHLSACAY

SEQ ID NO: 27493 - protein, 9 aa, Homo sapiens
  misc_feature: Table A; Target 27493; HLA-B*15:03; GPRC6A; ENSG00000173612; CTA
AMHLSACAY

SEQ ID NO: 27494 - protein, 9 aa, Homo sapiens
  misc_feature: Table A; Target 27494; HLA-B*46:01; GPRC6A; ENSG00000173612; CTA
AMHLSACAY

SEQ ID NO: 27495 - protein, 8 aa, Homo sapiens
  misc_feature: Table A; Target 27495; HLA-B*46:01; GPRC6A; ENSG00000173612; CTA
AMIHSIEM

SEQ ID NO: 27496 - protein, 9 aa, Homo sapiens
  misc_feature: Table A; Target 27496; HLA-A*02:01; GPRC6A; ENSG00000173612; CTA
AMIHSIEMI

SEQ ID NO: 27497 - protein, 9 aa, Homo sapiens
  misc_feature: Table A; Target 27497; HLA-A*02:03; GPRC6A; ENSG00000173612; CTA
AMIHSIEMI

SEQ ID NO: 27498 - protein, 9 aa, Homo sapiens
  misc_feature: Table A; Target 27498; HLA-A*02:04; GPRC6A; ENSG00000173612; CTA
AMIHSIEMI

SEQ ID NO: 27499 - protein, 9 aa, Homo sapiens
  misc_feature: Table A; Target 27499; HLA-A*02:07; GPRC6A; ENSG00000173612; CTA
AMIHSIEMI

SEQ ID NO: 27500 - protein, 9 aa, Homo sapiens
  misc_feature: Table A; Target 27500; HLA-B*13:02; GPRC6A; ENSG00000173612; CTA
AMIHSIEMI

SEQ ID NO: 27501 - protein, 9 aa, Homo sapiens
  misc_feature: Table A; Target 27501; HLA-C*16:01; GPRC6A; ENSG00000173612; CTA
ANKAIERNF

SEQ ID NO: 27502 - protein, 10 aa, Homo sapiens
  misc_feature: Table A; Target 27502; HLA-B*07:02; GPRC6A; ENSG00000173612; CTA
APTVEVNVSL

SEQ ID NO: 27503 - protein, 10 aa, Homo sapiens
  misc_feature: Table A; Target 27503; HLA-B*35:03; GPRC6A; ENSG00000173612; CTA
APTVEVNVSL

SEQ ID NO: 27504 - protein, 10 aa, Homo sapiens
  misc_feature: Table A; Target 27504; HLA-B*56:01; GPRC6A; ENSG00000173612; CTA
APTVEVNVSL

SEQ ID NO: 27505 - protein, 10 aa, Homo sapiens
  misc_feature: Table A; Target 27505; HLA-C*07:02; GPRC6A; ENSG00000173612; CTA
APTVEVNVSL

SEQ ID NO: 27506 - protein, 8 aa, Homo sapiens
  misc_feature: Table A; Target 27506; HLA-B*56:01; GPRC6A; ENSG00000173612; CTA
APVRSTMC

SEQ ID NO: 27507 - protein, 9 aa, Homo sapiens
  misc_feature: Table A; Target 27507; HLA-B*07:02; GPRC6A; ENSG00000173612; CTA
APVRSTMCF

SEQ ID NO: 27508 - protein, 9 aa, Homo sapiens
  misc_feature: Table A; Target 27508; HLA-C*07:02; GPRC6A; ENSG00000173612; CTA
APVRSTMCF

SEQ ID NO: 27509 - protein, 8 aa, Homo sapiens
  misc_feature: Table A; Target 27509; HLA-B*13:02; GPRC6A; ENSG00000173612; CTA
AQVNVIVV

SEQ ID NO: 27510 - protein, 9 aa, Homo sapiens
  misc_feature: Table A; Target 27510; HLA-A*23:01; GPRC6A; ENSG00000173612; CTA
AQVNVIVVF

SEQ ID NO: 27511 - protein, 9 aa, Homo sapiens
  misc_feature: Table A; Target 27511; HLA-A*25:01; GPRC6A; ENSG00000173612; CTA
AQVNVIVVF

SEQ ID NO: 27512 - protein, 9 aa, Homo sapiens
  misc_feature: Table A; Target 27512; HLA-A*26:01; GPRC6A; ENSG00000173612; CTA
AQVNVIVVF

SEQ ID NO: 27513 - protein, 9 aa, Homo sapiens
  misc_feature: Table A; Target 27513; HLA-A*30:01; GPRC6A; ENSG00000173612; CTA
AQVNVIVVF

SEQ ID NO: 27514 - protein, 9 aa, Homo sapiens
  misc_feature: Table A; Target 27514; HLA-A*32:01; GPRC6A; ENSG00000173612; CTA
AQVNVIVVF

SEQ ID NO: 27515 - protein, 9 aa, Homo sapiens
  misc_feature: Table A; Target 27515; HLA-B*13:02; GPRC6A; ENSG00000173612; CTA
AQVNVIVVF

SEQ ID NO: 27516 - protein, 9 aa, Homo sapiens
  misc_feature: Table A; Target 27516; HLA-B*15:01; GPRC6A; ENSG00000173612; CTA
AQVNVIVVF

SEQ ID NO: 27517 - protein, 9 aa, Homo sapiens
  misc_feature: Table A; Target 27517; HLA-B*15:03; GPRC6A; ENSG00000173612; CTA
AQVNVIVVF

SEQ ID NO: 27518 - protein, 9 aa, Homo sapiens
  misc_feature: Table A; Target 27518; HLA-B*27:02; GPRC6A; ENSG00000173612; CTA
AQVNVIVVF

SEQ ID NO: 27519 - protein, 9 aa, Homo sapiens
  misc_feature: Table A; Target 27519; HLA-B*38:01; GPRC6A; ENSG00000173612; CTA
AQVNVIVVF

SEQ ID NO: 27520 - protein, 9 aa, Homo sapiens
  misc_feature: Table A; Target 27520; HLA-B*39:01; GPRC6A; ENSG00000173612; CTA
AQVNVIVVF

SEQ ID NO: 27521 - protein, 9 aa, Homo sapiens
  misc_feature: Table A; Target 27521; HLA-B*44:02; GPRC6A; ENSG00000173612; CTA
AQVNVIVVF

SEQ ID NO: 27522 - protein, 9 aa, Homo sapiens
  misc_feature: Table A; Target 27522; HLA-B*44:03; GPRC6A; ENSG00000173612; CTA
AQVNVIVVF

SEQ ID NO: 27523 - protein, 9 aa, Homo sapiens
  misc_feature: Table A; Target 27523; HLA-B*58:01; GPRC6A; ENSG00000173612; CTA
AQVNVIVVF

SEQ ID NO: 27524 - protein, 9 aa, Homo sapiens
  misc_feature: Table A; Target 27524; HLA-C*02:02; GPRC6A; ENSG00000173612; CTA
AQVNVIVVF

SEQ ID NO: 27525 - protein, 9 aa, Homo sapiens
  misc_feature: Table A; Target 27525; HLA-C*07:04; GPRC6A; ENSG00000173612; CTA
AQVNVIVVF

SEQ ID NO: 27526 - protein, 9 aa, Homo sapiens
  misc_feature: Table A; Target 27526; HLA-C*12:03; GPRC6A; ENSG00000173612; CTA
AQVNVIVVF

SEQ ID NO: 27527 - protein, 9 aa, Homo sapiens
  misc_feature: Table A; Target 27527; HLA-C*16:04; GPRC6A; ENSG00000173612; CTA
AQVNVIVVF

SEQ ID NO: 27528 - protein, 11 aa, Homo sapiens
  misc_feature: Table A; Target 27528; HLA-A*03:01; GPRC6A; ENSG00000173612; CTA
ATKITTIPNVK

SEQ ID NO: 27529 - protein, 11 aa, Homo sapiens
  misc_feature: Table A; Target 27529; HLA-A*03:02; GPRC6A; ENSG00000173612; CTA
ATKITTIPNVK

SEQ ID NO: 27530 - protein, 11 aa, Homo sapiens
  misc_feature: Table A; Target 27530; HLA-A*11:01; GPRC6A; ENSG00000173612; CTA
ATKITTIPNVK

SEQ ID NO: 27531 - protein, 11 aa, Homo sapiens
  misc_feature: Table A; Target 27531; HLA-A*31:01; GPRC6A; ENSG00000173612; CTA
ATKITTIPNVK

SEQ ID NO: 27532 - protein, 9 aa, Homo sapiens
  misc_feature: Table A; Target 27532; HLA-B*57:01; GPRC6A; ENSG00000173612; CTA
ATLRFLSKF

SEQ ID NO: 27533 - protein, 8 aa, Homo sapiens
  misc_feature: Table A; Target 27533; HLA-C*03:04; GPRC6A; ENSG00000173612; CTA
ATSVSKTL

SEQ ID NO: 27534 - protein, 8 aa, Homo sapiens
  misc_feature: Table A; Target 27534; HLA-C*16:01; GPRC6A; ENSG00000173612; CTA
ATSVSKTL

SEQ ID NO: 27535 - protein, 10 aa, Homo sapiens
  misc_feature: Table A; Target 27535; HLA-C*07:06; GPRC6A; ENSG00000173612; CTA
ATSVSKTLPR

SEQ ID NO: 27536 - protein, 11 aa, Homo sapiens
  misc_feature: Table A; Target 27536; HLA-A*11:01; GPRC6A; ENSG00000173612; CTA
ATSVSKTLPRK

SEQ ID NO: 27537 - protein, 9 aa, Homo sapiens
  misc_feature: Table A; Target 27537; HLA-B*13:02; GPRC6A; ENSG00000173612; CTA
AVFALGYAI

SEQ ID NO: 27538 - protein, 10 aa, Homo sapiens
  misc_feature: Table A; Target 27538; HLA-A*25:01; GPRC6A; ENSG00000173612; CTA
AVIGSGYSEI

SEQ ID NO: 27539 - protein, 10 aa, Homo sapiens
  misc_feature: Table A; Target 27539; HLA-A*26:01; GPRC6A; ENSG00000173612; CTA
AVIGSGYSEI

SEQ ID NO: 27540 - protein, 10 aa, Homo sapiens
  misc_feature: Table A; Target 27540; HLA-B*46:01; GPRC6A; ENSG00000173612; CTA
AVIGSGYSEI

SEQ ID NO: 27541 - protein, 9 aa, Homo sapiens
  misc_feature: Table A; Target 27541; HLA-B*08:01; GPRC6A; ENSG00000173612; CTA
CAYVKDTDL

SEQ ID NO: 27542 - protein, 9 aa, Homo sapiens
  misc_feature: Table A; Target 27542; HLA-C*03:03; GPRC6A; ENSG00000173612; CTA
CAYVKDTDL

SEQ ID NO: 27543 - protein, 9 aa, Homo sapiens
  misc_feature: Table A; Target 27543; HLA-C*03:04; GPRC6A; ENSG00000173612; CTA
CAYVKDTDL

SEQ ID NO: 27544 - protein, 9 aa, Homo sapiens
  misc_feature: Table A; Target 27544; HLA-A*30:01; GPRC6A; ENSG00000173612; CTA
CEEGSILAF

SEQ ID NO: 27545 - protein, 9 aa, Homo sapiens
  misc_feature: Table A; Target 27545; HLA-B*18:01; GPRC6A; ENSG00000173612; CTA
CEEGSILAF

SEQ ID NO: 27546 - protein, 9 aa, Homo sapiens
  misc_feature: Table A; Target 27546; HLA-B*27:02; GPRC6A; ENSG00000173612; CTA
CEEGSILAF

SEQ ID NO: 27547 - protein, 9 aa, Homo sapiens
  misc_feature: Table A; Target 27547; HLA-B*40:01; GPRC6A; ENSG00000173612; CTA
CEEGSILAF

SEQ ID NO: 27548 - protein, 9 aa, Homo sapiens
  misc_feature: Table A; Target 27548; HLA-B*44:02; GPRC6A; ENSG00000173612; CTA
CEEGSILAF

SEQ ID NO: 27549 - protein, 9 aa, Homo sapiens
  misc_feature: Table A; Target 27549; HLA-B*44:03; GPRC6A; ENSG00000173612; CTA
CEEGSILAF

SEQ ID NO: 27550 - protein, 9 aa, Homo sapiens
  misc_feature: Table A; Target 27550; HLA-B*49:01; GPRC6A; ENSG00000173612; CTA
CEEGSILAF

SEQ ID NO: 27551 - protein, 9 aa, Homo sapiens
  misc_feature: Table A; Target 27551; HLA-A*30:02; GPRC6A; ENSG00000173612; CTA
CQNCPENHY

SEQ ID NO: 27552 - protein, 10 aa, Homo sapiens
  misc_feature: Table A; Target 27552; HLA-B*27:02; GPRC6A; ENSG00000173612; CTA
CRENATSVSK

SEQ ID NO: 27553 - protein, 10 aa, Homo sapiens
  misc_feature: Table A; Target 27553; HLA-B*27:05; GPRC6A; ENSG00000173612; CTA
CRENATSVSK

SEQ ID NO: 27554 - protein, 10 aa, Homo sapiens
  misc_feature: Table A; Target 27554; HLA-A*25:01; GPRC6A; ENSG00000173612; CTA
DAHGDLNTGY

SEQ ID NO: 27555 - protein, 10 aa, Homo sapiens
  misc_feature: Table A; Target 27555; HLA-A*26:01; GPRC6A; ENSG00000173612; CTA
DAHGDLNTGY

SEQ ID NO: 27556 - protein, 8 aa, Homo sapiens
  misc_feature: Table A; Target 27556; HLA-B*37:01; GPRC6A; ENSG00000173612; CTA
DDYGRLAL

SEQ ID NO: 27557 - protein, 9 aa, Homo sapiens
  misc_feature: Table A; Target 27557; HLA-A*26:01; GPRC6A; ENSG00000173612; CTA
DLFNKAIEM

SEQ ID NO: 27558 - protein, 9 aa, Homo sapiens
  misc_feature: Table A; Target 27558; HLA-A*33:01; GPRC6A; ENSG00000173612; CTA
DLFNKAIEM

SEQ ID NO: 27559 - protein, 9 aa, Homo sapiens
  misc_feature: Table A; Target 27559; HLA-B*08:01; GPRC6A; ENSG00000173612; CTA
DLFNKAIEM

SEQ ID NO: 27560 - protein, 9 aa, Homo sapiens
  misc_feature: Table A; Target 27560; HLA-B*18:01; GPRC6A; ENSG00000173612; CTA
DLFNKAIEM

SEQ ID NO: 27561 - protein, 9 aa, Homo sapiens
  misc_feature: Table A; Target 27561; HLA-C*07:04; GPRC6A; ENSG00000173612; CTA
DLFNKAIEM

SEQ ID NO: 27562 - protein, 10 aa, Homo sapiens
  misc_feature: Table A; Target 27562; HLA-A*33:01; GPRC6A; ENSG00000173612; CTA
DNTIEVRINR

SEQ ID NO: 27563 - protein, 10 aa, Homo sapiens
  misc_feature: Table A; Target 27563; HLA-A*33:03; GPRC6A; ENSG00000173612; CTA
DNTIEVRINR

SEQ ID NO: 27564 - protein, 9 aa, Homo sapiens
  misc_feature: Table A; Target 27564; HLA-B*51:01; GPRC6A; ENSG00000173612; CTA
DNWSTATKI

SEQ ID NO: 27565 - protein, 8 aa, Homo sapiens
  misc_feature: Table A; Target 27565; HLA-B*08:01; GPRC6A; ENSG00000173612; CTA
DPKLQKFL

SEQ ID NO: 27566 - protein, 9 aa, Homo sapiens
  misc_feature: Table A; Target 27566; HLA-A*01:01; GPRC6A; ENSG00000173612; CTA
DSHKLLHEY

SEQ ID NO: 27567 - protein, 9 aa, Homo sapiens
  misc_feature: Table A; Target 27567; HLA-A*30:02; GPRC6A; ENSG00000173612; CTA
DSHKLLHEY

SEQ ID NO: 27568 - protein, 9 aa, Homo sapiens
  misc_feature: Table A; Target 27568; HLA-A*33:01; GPRC6A; ENSG00000173612; CTA
DSHKLLHEY

SEQ ID NO: 27569 - protein, 9 aa, Homo sapiens
  misc_feature: Table A; Target 27569; HLA-B*18:01; GPRC6A; ENSG00000173612; CTA
DSHKLLHEY

SEQ ID NO: 27570 - protein, 9 aa, Homo sapiens
  misc_feature: Table A; Target 27570; HLA-B*51:01; GPRC6A; ENSG00000173612; CTA
DSLAILLLI

SEQ ID NO: 27571 - protein, 9 aa, Homo sapiens
  misc_feature: Table A; Target 27571; HLA-A*26:01; GPRC6A; ENSG00000173612; CTA
DSMSGNVTM

SEQ ID NO: 27572 - protein, 9 aa, Homo sapiens
  misc_feature: Table A; Target 27572; HLA-A*33:01; GPRC6A; ENSG00000173612; CTA
DSMSGNVTM

SEQ ID NO: 27573 - protein, 9 aa, Homo sapiens
  misc_feature: Table A; Target 27573; HLA-B*35:01; GPRC6A; ENSG00000173612; CTA
DSMSGNVTM

SEQ ID NO: 27574 - protein, 9 aa, Homo sapiens
  misc_feature: Table A; Target 27574; HLA-B*35:03; GPRC6A; ENSG00000173612; CTA
DSMSGNVTM

SEQ ID NO: 27575 - protein, 9 aa, Homo sapiens
  misc_feature: Table A; Target 27575; HLA-C*03:03; GPRC6A; ENSG00000173612; CTA
DSMSGNVTM

SEQ ID NO: 27576 - protein, 9 aa, Homo sapiens
  misc_feature: Table A; Target 27576; HLA-C*07:06; GPRC6A; ENSG00000173612; CTA
DSMSGNVTM

SEQ ID NO: 27577 - protein, 8 aa, Homo sapiens
  misc_feature: Table A; Target 27577; HLA-B*51:01; GPRC6A; ENSG00000173612; CTA
DSPRRPQI

SEQ ID NO: 27578 - protein, 10 aa, Homo sapiens
  misc_feature: Table A; Target 27578; HLA-A*26:01; GPRC6A; ENSG00000173612; CTA
DTCTEVTVAM

SEQ ID NO: 27579 - protein, 8 aa, Homo sapiens
  misc_feature: Table A; Target 27579; HLA-C*05:01; GPRC6A; ENSG00000173612; CTA
DTDLSQCI

SEQ ID NO: 27580 - protein, 9 aa, Homo sapiens
  misc_feature: Table A; Target 27580; HLA-A*01:01; GPRC6A; ENSG00000173612; CTA
DTDLSQCIF

SEQ ID NO: 27581 - protein, 11 aa, Homo sapiens
  misc_feature: Table A; Target 27581; HLA-A*68:01; GPRC6A; ENSG00000173612; CTA
DVFIIPDQETK

SEQ ID NO: 27582 - protein, 11 aa, Homo sapiens
  misc_feature: Table A; Target 27582; HLA-A*68:02; GPRC6A; ENSG00000173612; CTA
DVFIIPDQETK

SEQ ID NO: 27583 - protein, 10 aa, Homo sapiens
  misc_feature: Table A; Target 27583; HLA-A*33:01; GPRC6A; ENSG00000173612; CTA
DYAEPGLIHS

SEQ ID NO: 27584 - protein, 11 aa, Homo sapiens
  misc_feature: Table A; Target 27584; HLA-A*23:01; GPRC6A; ENSG00000173612; CTA
DYAEPGLIHSI

SEQ ID NO: 27585 - protein, 11 aa, Homo sapiens
  misc_feature: Table A; Target 27585; HLA-A*24:02; GPRC6A; ENSG00000173612; CTA
DYAEPGLIHSI

SEQ ID NO: 27586 - protein, 11 aa, Homo sapiens
  misc_feature: Table A; Target 27586; HLA-A*33:01; GPRC6A; ENSG00000173612; CTA
DYAEPGLIHSI

SEQ ID NO: 27587 - protein, 11 aa, Homo sapiens
  misc_feature: Table A; Target 27587; HLA-A*33:03; GPRC6A; ENSG00000173612; CTA
DYAEPGLIHSI

SEQ ID NO: 27588 - protein, 11 aa, Homo sapiens
  misc_feature: Table A; Target 27588; HLA-B*38:01; GPRC6A; ENSG00000173612; CTA
DYAEPGLIHSI

SEQ ID NO: 27589 - protein, 10 aa, Homo sapiens
  misc_feature: Table A; Target 27589; HLA-A*24:02; GPRC6A; ENSG00000173612; CTA
DYGRLALNTF

SEQ ID NO: 27590 - protein, 9 aa, Homo sapiens
  misc_feature: Table A; Target 27590; HLA-A*23:01; GPRC6A; ENSG00000173612; CTA
EANNVCIAF

SEQ ID NO: 27591 - protein, 9 aa, Homo sapiens
  misc_feature: Table A; Target 27591; HLA-A*25:01; GPRC6A; ENSG00000173612; CTA
EANNVCIAF

SEQ ID NO: 27592 - protein, 9 aa, Homo sapiens
  misc_feature: Table A; Target 27592; HLA-A*26:01; GPRC6A; ENSG00000173612; CTA
EANNVCIAF

SEQ ID NO: 27593 - protein, 9 aa, Homo sapiens
  misc_feature: Table A; Target 27593; HLA-A*32:01; GPRC6A; ENSG00000173612; CTA
EANNVCIAF

SEQ ID NO: 27594 - protein, 9 aa, Homo sapiens
  misc_feature: Table A; Target 27594; HLA-A*33:01; GPRC6A; ENSG00000173612; CTA
EANNVCIAF

SEQ ID NO: 27595 - protein, 9 aa, Homo sapiens
  misc_feature: Table A; Target 27595; HLA-A*33:03; GPRC6A; ENSG00000173612; CTA
EANNVCIAF

SEQ ID NO: 27596 - protein, 9 aa, Homo sapiens
  misc_feature: Table A; Target 27596; HLA-A*68:01; GPRC6A; ENSG00000173612; CTA
EANNVCIAF

SEQ ID NO: 27597 - protein, 9 aa, Homo sapiens
  misc_feature: Table A; Target 27597; HLA-A*68:02; GPRC6A; ENSG00000173612; CTA
EANNVCIAF

SEQ ID NO: 27598 - protein, 9 aa, Homo sapiens
  misc_feature: Table A; Target 27598; HLA-B*18:01; GPRC6A; ENSG00000173612; CTA
EANNVCIAF

SEQ ID NO: 27599 - protein, 9 aa, Homo sapiens
  misc_feature: Table A; Target 27599; HLA-B*27:02; GPRC6A; ENSG00000173612; CTA
EANNVCIAF

SEQ ID NO: 27600 - protein, 9 aa, Homo sapiens
  misc_feature: Table A; Target 27600; HLA-B*35:01; GPRC6A; ENSG00000173612; CTA
EANNVCIAF

SEQ ID NO: 27601 - protein, 9 aa, Homo sapiens
  misc_feature: Table A; Target 27601; HLA-B*35:03; GPRC6A; ENSG00000173612; CTA
EANNVCIAF

SEQ ID NO: 27602 - protein, 9 aa, Homo sapiens
  misc_feature: Table A; Target 27602; HLA-B*44:03; GPRC6A; ENSG00000173612; CTA
EANNVCIAF

SEQ ID NO: 27603 - protein, 9 aa, Homo sapiens
  misc_feature: Table A; Target 27603; HLA-B*57:01; GPRC6A; ENSG00000173612; CTA
EANNVCIAF

SEQ ID NO: 27604 - protein, 9 aa, Homo sapiens
  misc_feature: Table A; Target 27604; HLA-B*58:01; GPRC6A; ENSG00000173612; CTA
EANNVCIAF

SEQ ID NO: 27605 - protein, 9 aa, Homo sapiens
  misc_feature: Table A; Target 27605; HLA-C*03:03; GPRC6A; ENSG00000173612; CTA
EANNVCIAF

SEQ ID NO: 27606 - protein, 9 aa, Homo sapiens
  misc_feature: Table A; Target 27606; HLA-C*03:04; GPRC6A; ENSG00000173612; CTA
EANNVCIAF

SEQ ID NO: 27607 - protein, 9 aa, Homo sapiens
  misc_feature: Table A; Target 27607; HLA-C*07:06; GPRC6A; ENSG00000173612; CTA
EANNVCIAF

SEQ ID NO: 27608 - protein, 9 aa, Homo sapiens
  misc_feature: Table A; Target 27608; HLA-C*12:03; GPRC6A; ENSG00000173612; CTA
EANNVCIAF

SEQ ID NO: 27609 - protein, 9 aa, Homo sapiens
  misc_feature: Table A; Target 27609; HLA-C*16:01; GPRC6A; ENSG00000173612; CTA
EANNVCIAF

SEQ ID NO: 27610 - protein, 9 aa, Homo sapiens
  misc_feature: Table A; Target 27610; HLA-C*16:04; GPRC6A; ENSG00000173612; CTA
EANNVCIAF

SEQ ID NO: 27611 - protein, 10 aa, Homo sapiens
  misc_feature: Table A; Target 27611; HLA-A*25:01; GPRC6A; ENSG00000173612; CTA
EAQVNVIVVF

SEQ ID NO: 27612 - protein, 10 aa, Homo sapiens
  misc_feature: Table A; Target 27612; HLA-A*25:01; GPRC6A; ENSG00000173612; CTA
ECVGFEISVF

SEQ ID NO: 27613 - protein, 10 aa, Homo sapiens
  misc_feature: Table A; Target 27613; HLA-A*26:01; GPRC6A; ENSG00000173612; CTA
ECVGFEISVF

SEQ ID NO: 27614 - protein, 9 aa, Homo sapiens
  misc_feature: Table A; Target 27614; HLA-B*37:01; GPRC6A; ENSG00000173612; CTA
EDSPRRPQI

SEQ ID NO: 27615 - protein, 8 aa, Homo sapiens
  misc_feature: Table A; Target 27615; HLA-B*18:01; GPRC6A; ENSG00000173612; CTA
EEGSILAF

SEQ ID NO: 27616 - protein, 8 aa, Homo sapiens
  misc_feature: Table A; Target 27616; HLA-B*37:01; GPRC6A; ENSG00000173612; CTA
EEGSILAF

SEQ ID NO: 27617 - protein, 8 aa, Homo sapiens
  misc_feature: Table A; Target 27617; HLA-B*44:02; GPRC6A; ENSG00000173612; CTA
EEGSILAF

SEQ ID NO: 27618 - protein, 8 aa, Homo sapiens
  misc_feature: Table A; Target 27618; HLA-B*44:03; GPRC6A; ENSG00000173612; CTA
EEGSILAF

SEQ ID NO: 27619 - protein, 10 aa, Homo sapiens
  misc_feature: Table A; Target 27619; HLA-A*25:01; GPRC6A; ENSG00000173612; CTA
EIIVILISNY

SEQ ID NO: 27620 - protein, 10 aa, Homo sapiens
  misc_feature: Table A; Target 27620; HLA-A*26:01; GPRC6A; ENSG00000173612; CTA
EIIVILISNY

SEQ ID NO: 27621 - protein, 8 aa, Homo sapiens
  misc_feature: Table A; Target 27621; HLA-B*08:01; GPRC6A; ENSG00000173612; CTA
EINGHMTV

SEQ ID NO: 27622 - protein, 9 aa, Homo sapiens
  misc_feature: Table A; Target 27622; HLA-A*25:01; GPRC6A; ENSG00000173612; CTA
EINGHMTVT

SEQ ID NO: 27623 - protein, 9 aa, Homo sapiens
  misc_feature: Table A; Target 27623; HLA-A*26:01; GPRC6A; ENSG00000173612; CTA
EINGHMTVT

SEQ ID NO: 27624 - protein, 10 aa, Homo sapiens
  misc_feature: Table A; Target 27624; HLA-A*03:02; GPRC6A; ENSG00000173612; CTA
EINGHMTVTK

SEQ ID NO: 27625 - protein, 10 aa, Homo sapiens
  misc_feature: Table A; Target 27625; HLA-A*25:01; GPRC6A; ENSG00000173612; CTA
EINGHMTVTK

SEQ ID NO: 27626 - protein, 10 aa, Homo sapiens
  misc_feature: Table A; Target 27626; HLA-A*33:01; GPRC6A; ENSG00000173612; CTA
EINGHMTVTK

SEQ ID NO: 27627 - protein, 10 aa, Homo sapiens
  misc_feature: Table A; Target 27627; HLA-A*33:03; GPRC6A; ENSG00000173612; CTA
EINGHMTVTK

SEQ ID NO: 27628 - protein, 10 aa, Homo sapiens
  misc_feature: Table A; Target 27628; HLA-A*68:01; GPRC6A; ENSG00000173612; CTA
EINGHMTVTK

SEQ ID NO: 27629 - protein, 10 aa, Homo sapiens
  misc_feature: Table A; Target 27629; HLA-C*07:06; GPRC6A; ENSG00000173612; CTA
EINGHMTVTK

SEQ ID NO: 27630 - protein, 11 aa, Homo sapiens
  misc_feature: Table A; Target 27630; HLA-A*25:01; GPRC6A; ENSG00000173612; CTA
EINGHMTVTKM

SEQ ID NO: 27631 - protein, 11 aa, Homo sapiens
  misc_feature: Table A; Target 27631; HLA-A*26:01; GPRC6A; ENSG00000173612; CTA
EINGHMTVTKM

SEQ ID NO: 27632 - protein, 8 aa, Homo sapiens
  misc_feature: Table A; Target 27632; HLA-B*08:01; GPRC6A; ENSG00000173612; CTA
EINTKSAF

SEQ ID NO: 27633 - protein, 9 aa, Homo sapiens
  misc_feature: Table A; Target 27633; HLA-A*25:01; GPRC6A; ENSG00000173612; CTA
EINTKSAFL

SEQ ID NO: 27634 - protein, 9 aa, Homo sapiens
  misc_feature: Table A; Target 27634; HLA-A*26:01; GPRC6A; ENSG00000173612; CTA
EINTKSAFL

SEQ ID NO: 27635 - protein, 9 aa, Homo sapiens
  misc_feature: Table A; Target 27635; HLA-B*08:01; GPRC6A; ENSG00000173612; CTA
EINTKSAFL

SEQ ID NO: 27636 - protein, 10 aa, Homo sapiens
  misc_feature: Table A; Target 27636; HLA-A*03:02; GPRC6A; ENSG00000173612; CTA
EINTKSAFLK

SEQ ID NO: 27637 - protein, 10 aa, Homo sapiens
  misc_feature: Table A; Target 27637; HLA-A*33:01; GPRC6A; ENSG00000173612; CTA
EINTKSAFLK

SEQ ID NO: 27638 - protein, 10 aa, Homo sapiens
  misc_feature: Table A; Target 27638; HLA-A*33:03; GPRC6A; ENSG00000173612; CTA
EINTKSAFLK

SEQ ID NO: 27639 - protein, 10 aa, Homo sapiens
  misc_feature: Table A; Target 27639; HLA-A*68:01; GPRC6A; ENSG00000173612; CTA
EINTKSAFLK

SEQ ID NO: 27640 - protein, 9 aa, Homo sapiens
  misc_feature: Table A; Target 27640; HLA-A*25:01; GPRC6A; ENSG00000173612; CTA
EISVFLQTL

SEQ ID NO: 27641 - protein, 9 aa, Homo sapiens
  misc_feature: Table A; Target 27641; HLA-A*26:01; GPRC6A; ENSG00000173612; CTA
EISVFLQTL

SEQ ID NO: 27642 - protein, 9 aa, Homo sapiens
  misc_feature: Table A; Target 27642; HLA-A*68:02; GPRC6A; ENSG00000173612; CTA
EISVFLQTL

SEQ ID NO: 27643 - protein, 9 aa, Homo sapiens
  misc_feature: Table A; Target 27643; HLA-B*44:02; GPRC6A; ENSG00000173612; CTA
EISVFLQTL

SEQ ID NO: 27644 - protein, 8 aa, Homo sapiens
  misc_feature: Table A; Target 27644; HLA-A*33:03; GPRC6A; ENSG00000173612; CTA
EITMAVSR

SEQ ID NO: 27645 - protein, 8 aa, Homo sapiens
  misc_feature: Table A; Target 27645; HLA-A*68:01; GPRC6A; ENSG00000173612; CTA
EITMAVSR

SEQ ID NO: 27646 - protein, 9 aa, Homo sapiens
  misc_feature: Table A; Target 27646; HLA-A*26:01; GPRC6A; ENSG00000173612; CTA
EITMAVSRM

SEQ ID NO: 27647 - protein, 9 aa, Homo sapiens
  misc_feature: Table A; Target 27647; HLA-A*25:01; GPRC6A; ENSG00000173612; CTA
EIYDTCTEV

SEQ ID NO: 27648 - protein, 9 aa, Homo sapiens
  misc_feature: Table A; Target 27648; HLA-A*26:01; GPRC6A; ENSG00000173612; CTA
EIYDTCTEV

SEQ ID NO: 27649 - protein, 9 aa, Homo sapiens
  misc_feature: Table A; Target 27649; HLA-A*68:02; GPRC6A; ENSG00000173612; CTA
EIYDTCTEV

SEQ ID NO: 27650 - protein, 9 aa, Homo sapiens
  misc_feature: Table A; Target 27650; HLA-B*13:02; GPRC6A; ENSG00000173612; CTA
EIYDTCTEV

SEQ ID NO: 27651 - protein, 11 aa, Homo sapiens
  misc_feature: Table A; Target 27651; HLA-A*23:01; GPRC6A; ENSG00000173612; CTA
ELLGVLKNVTF

SEQ ID NO: 27652 - protein, 9 aa, Homo sapiens
  misc_feature: Table A; Target 27652; HLA-A*23:01; GPRC6A; ENSG00000173612; CTA
EMINNSTLL

SEQ ID NO: 27653 - protein, 9 aa, Homo sapiens
  misc_feature: Table A; Target 27653; HLA-A*26:01; GPRC6A; ENSG00000173612; CTA
EMINNSTLL

SEQ ID NO: 27654 - protein, 11 aa, Homo sapiens
  misc_feature: Table A; Target 27654; HLA-A*25:01; GPRC6A; ENSG00000173612; CTA
ENYNEAKFITF

SEQ ID NO: 27655 - protein, 11 aa, Homo sapiens
  misc_feature: Table A; Target 27655; HLA-A*26:01; GPRC6A; ENSG00000173612; CTA
ENYNEAKFITF

SEQ ID NO: 27656 - protein, 11 aa, Homo sapiens
  misc_feature: Table A; Target 27656; HLA-A*33:01; GPRC6A; ENSG00000173612; CTA
ENYNEAKFITF

SEQ ID NO: 27657 - protein, 11 aa, Homo sapiens
  misc_feature: Table A; Target 27657; HLA-A*33:03; GPRC6A; ENSG00000173612; CTA
ENYNEAKFITF

SEQ ID NO: 27658 - protein, 8 aa, Homo sapiens
  misc_feature: Table A; Target 27658; HLA-B*08:01; GPRC6A; ENSG00000173612; CTA
EPGLIHSI

SEQ ID NO: 27659 - protein, 8 aa, Homo sapiens
  misc_feature: Table A; Target 27659; HLA-B*51:01; GPRC6A; ENSG00000173612; CTA
EPGLIHSI

SEQ ID NO: 27660 - protein, 10 aa, Homo sapiens
  misc_feature: Table A; Target 27660; HLA-A*33:01; GPRC6A; ENSG00000173612; CTA
EPQDFTCKTR

SEQ ID NO: 27661 - protein, 10 aa, Homo sapiens
  misc_feature: Table A; Target 27661; HLA-A*33:03; GPRC6A; ENSG00000173612; CTA
EPQDFTCKTR

SEQ ID NO: 27662 - protein, 9 aa, Homo sapiens
  misc_feature: Table A; Target 27662; HLA-A*25:01; GPRC6A; ENSG00000173612; CTA
ETKNEFRNL

SEQ ID NO: 27663 - protein, 9 aa, Homo sapiens
  misc_feature: Table A; Target 27663; HLA-A*33:03; GPRC6A; ENSG00000173612; CTA
ETKNEFRNL

SEQ ID NO: 27664 - protein, 9 aa, Homo sapiens
  misc_feature: Table A; Target 27664; HLA-A*25:01; GPRC6A; ENSG00000173612; CTA
ETVEFKCDY

SEQ ID NO: 27665 - protein, 9 aa, Homo sapiens
  misc_feature: Table A; Target 27665; HLA-A*26:01; GPRC6A; ENSG00000173612; CTA
ETVEFKCDY

SEQ ID NO: 27666 - protein, 9 aa, Homo sapiens
  misc_feature: Table A; Target 27666; HLA-A*26:01; GPRC6A; ENSG00000173612; CTA
EVNVSLPRV

SEQ ID NO: 27667 - protein, 8 aa, Homo sapiens
  misc_feature: Table A; Target 27667; HLA-B*08:01; GPRC6A; ENSG00000173612; CTA
EVRINRTL

SEQ ID NO: 27668 - protein, 9 aa, Homo sapiens
  misc_feature: Table A; Target 27668; HLA-A*25:01; GPRC6A; ENSG00000173612; CTA
EVTVAMAAT

SEQ ID NO: 27669 - protein, 9 aa, Homo sapiens
  misc_feature: Table A; Target 27669; HLA-A*26:01; GPRC6A; ENSG00000173612; CTA
EVTVAMAAT

SEQ ID NO: 27670 - protein, 10 aa, Homo sapiens
  misc_feature: Table A; Target 27670; HLA-A*25:01; GPRC6A; ENSG00000173612; CTA
EVTVAMAATL

SEQ ID NO: 27671 - protein, 10 aa, Homo sapiens
  misc_feature: Table A; Target 27671; HLA-A*26:01; GPRC6A; ENSG00000173612; CTA
EVTVAMAATL

SEQ ID NO: 27672 - protein, 10 aa, Homo sapiens
  misc_feature: Table A; Target 27672; HLA-A*68:01; GPRC6A; ENSG00000173612; CTA
EVTVAMAATL

SEQ ID NO: 27673 - protein, 11 aa, Homo sapiens
  misc_feature: Table A; Target 27673; HLA-A*33:03; GPRC6A; ENSG00000173612; CTA
EVTVAMAATLR

SEQ ID NO: 27674 - protein, 11 aa, Homo sapiens
  misc_feature: Table A; Target 27674; HLA-A*68:01; GPRC6A; ENSG00000173612; CTA
EVTVAMAATLR

SEQ ID NO: 27675 - protein, 9 aa, Homo sapiens
  misc_feature: Table A; Target 27675; HLA-A*24:02; GPRC6A; ENSG00000173612; CTA
EYDLQNDVF

SEQ ID NO: 27676 - protein, 9 aa, Homo sapiens
  misc_feature: Table A; Target 27676; HLA-B*35:03; GPRC6A; ENSG00000173612; CTA
EYDLQNDVF

SEQ ID NO: 27677 - protein, 9 aa, Homo sapiens
  misc_feature: Table A; Target 27677; HLA-C*04:01; GPRC6A; ENSG00000173612; CTA
EYDLQNDVF

SEQ ID NO: 27678 - protein, 9 aa, Homo sapiens
  misc_feature: Table A; Target 27678; HLA-A*23:01; GPRC6A; ENSG00000173612; CTA
EYLNWNDSL

SEQ ID NO: 27679 - protein, 9 aa, Homo sapiens
  misc_feature: Table A; Target 27679; HLA-A*24:02; GPRC6A; ENSG00000173612; CTA
EYLNWNDSL

SEQ ID NO: 27680 - protein, 9 aa, Homo sapiens
  misc_feature: Table A; Target 27680; HLA-C*14:02; GPRC6A; ENSG00000173612; CTA
EYLNWNDSL

SEQ ID NO: 27681 - protein, 8 aa, Homo sapiens
  misc_feature: Table A; Target 27681; HLA-B*35:03; GPRC6A; ENSG00000173612; CTA
FAAPTVEV

SEQ ID NO: 27682 - protein, 8 aa, Homo sapiens
  misc_feature: Table A; Target 27682; HLA-B*39:01; GPRC6A; ENSG00000173612; CTA
FAAPTVEV

SEQ ID NO: 27683 - protein, 8 aa, Homo sapiens
  misc_feature: Table A; Target 27683; HLA-B*46:01; GPRC6A; ENSG00000173612; CTA
FAAPTVEV

SEQ ID NO: 27684 - protein, 8 aa, Homo sapiens
  misc_feature: Table A; Target 27684; HLA-B*51:01; GPRC6A; ENSG00000173612; CTA
FAAPTVEV

SEQ ID NO: 27685 - protein, 8 aa, Homo sapiens
  misc_feature: Table A; Target 27685; HLA-B*54:01; GPRC6A; ENSG00000173612; CTA
FAAPTVEV

SEQ ID NO: 27686 - protein, 8 aa, Homo sapiens
  misc_feature: Table A; Target 27686; HLA-B*56:01; GPRC6A; ENSG00000173612; CTA
FAAPTVEV

SEQ ID NO: 27687 - protein, 8 aa, Homo sapiens
  misc_feature: Table A; Target 27687; HLA-C*02:02; GPRC6A; ENSG00000173612; CTA
FAAPTVEV

SEQ ID NO: 27688 - protein, 8 aa, Homo sapiens
  misc_feature: Table A; Target 27688; HLA-C*03:03; GPRC6A; ENSG00000173612; CTA
FAAPTVEV

SEQ ID NO: 27689 - protein, 8 aa, Homo sapiens
  misc_feature: Table A; Target 27689; HLA-C*03:04; GPRC6A; ENSG00000173612; CTA
FAAPTVEV

SEQ ID NO: 27690 - protein, 8 aa, Homo sapiens
  misc_feature: Table A; Target 27690; HLA-C*05:01; GPRC6A; ENSG00000173612; CTA
FAAPTVEV

SEQ ID NO: 27691 - protein, 8 aa, Homo sapiens
  misc_feature: Table A; Target 27691; HLA-C*12:03; GPRC6A; ENSG00000173612; CTA
FAAPTVEV

SEQ ID NO: 27692 - protein, 8 aa, Homo sapiens
  misc_feature: Table A; Target 27692; HLA-C*16:02; GPRC6A; ENSG00000173612; CTA
FAAPTVEV

SEQ ID NO: 27693 - protein, 8 aa, Homo sapiens
  misc_feature: Table A; Target 27693; HLA-C*16:04; GPRC6A; ENSG00000173612; CTA
FAAPTVEV

SEQ ID NO: 27694 - protein, 9 aa, Homo sapiens
  misc_feature: Table A; Target 27694; HLA-C*12:03; GPRC6A; ENSG00000173612; CTA
FAAPTVEVN

SEQ ID NO: 27695 - protein, 10 aa, Homo sapiens
  misc_feature: Table A; Target 27695; HLA-A*68:02; GPRC6A; ENSG00000173612; CTA
FAAPTVEVNV

SEQ ID NO: 27696 - protein, 10 aa, Homo sapiens
  misc_feature: Table A; Target 27696; HLA-C*02:02; GPRC6A; ENSG00000173612; CTA
FAAPTVEVNV

SEQ ID NO: 27697 - protein, 10 aa, Homo sapiens
  misc_feature: Table A; Target 27697; HLA-A*29:02; GPRC6A; ENSG00000173612; CTA
FAFKGKYENY

SEQ ID NO: 27698 - protein, 10 aa, Homo sapiens
  misc_feature: Table A; Target 27698; HLA-B*35:01; GPRC6A; ENSG00000173612; CTA
FAFKGKYENY

SEQ ID NO: 27699 - protein, 10 aa, Homo sapiens
  misc_feature: Table A; Target 27699; HLA-C*02:02; GPRC6A; ENSG00000173612; CTA
FAFKGKYENY

SEQ ID NO: 27700 - protein, 9 aa, Homo sapiens
  misc_feature: Table A; Target 27700; HLA-B*49:01; GPRC6A; ENSG00000173612; CTA
FEISVFLQT

SEQ ID NO: 27701 - protein, 10 aa, Homo sapiens
  misc_feature: Table A; Target 27701; HLA-A*30:01; GPRC6A; ENSG00000173612; CTA
FEISVFLQTL

SEQ ID NO: 27702 - protein, 10 aa, Homo sapiens
  misc_feature: Table A; Target 27702; HLA-B*40:01; GPRC6A; ENSG00000173612; CTA
FEISVFLQTL

SEQ ID NO: 27703 - protein, 10 aa, Homo sapiens
  misc_feature: Table A; Target 27703; HLA-B*40:02; GPRC6A; ENSG00000173612; CTA
FEISVFLQTL

SEQ ID NO: 27704 - protein, 10 aa, Homo sapiens
  misc_feature: Table A; Target 27704; HLA-B*44:02; GPRC6A; ENSG00000173612; CTA
FEISVFLQTL

SEQ ID NO: 27705 - protein, 10 aa, Homo sapiens
  misc_feature: Table A; Target 27705; HLA-B*49:01; GPRC6A; ENSG00000173612; CTA
FEISVFLQTL

SEQ ID NO: 27706 - protein, 8 aa, Homo sapiens
  misc_feature: Table A; Target 27706; HLA-A*30:01; GPRC6A; ENSG00000173612; CTA
FEKEVEYL

SEQ ID NO: 27707 - protein, 8 aa, Homo sapiens
  misc_feature: Table A; Target 27707; HLA-B*18:01; GPRC6A; ENSG00000173612; CTA
FEKEVEYL

SEQ ID NO: 27708 - protein, 8 aa, Homo sapiens
  misc_feature: Table A; Target 27708; HLA-B*37:01; GPRC6A; ENSG00000173612; CTA
FEKEVEYL

SEQ ID NO: 27709 - protein, 10 aa, Homo sapiens
  misc_feature: Table A; Target 27709; HLA-B*44:02; GPRC6A; ENSG00000173612; CTA
FEKEVEYLNW

SEQ ID NO: 27710 - protein, 9 aa, Homo sapiens
  misc_feature: Table A; Target 27710; HLA-A*23:01; GPRC6A; ENSG00000173612; CTA
FFIGEPQDF

SEQ ID NO: 27711 - protein, 9 aa, Homo sapiens
  misc_feature: Table A; Target 27711; HLA-A*24:02; GPRC6A; ENSG00000173612; CTA
FFIGEPQDF

SEQ ID NO: 27712 - protein, 9 aa, Homo sapiens
  misc_feature: Table A; Target 27712; HLA-A*29:02; GPRC6A; ENSG00000173612; CTA
FFIGEPQDF

SEQ ID NO: 27713 - protein, 9 aa, Homo sapiens
  misc_feature: Table A; Target 27713; HLA-C*14:02; GPRC6A; ENSG00000173612; CTA
FFIGEPQDF

SEQ ID NO: 27714 - protein, 9 aa, Homo sapiens
  misc_feature: Table A; Target 27714; HLA-A*29:02; GPRC6A; ENSG00000173612; CTA
FIFAFKGKY

SEQ ID NO: 27715 - protein, 9 aa, Homo sapiens
  misc_feature: Table A; Target 27715; HLA-A*30:02; GPRC6A; ENSG00000173612; CTA
FIFAFKGKY

SEQ ID NO: 27716 - protein, 8 aa, Homo sapiens
  misc_feature: Table A; Target 27716; HLA-C*05:01; GPRC6A; ENSG00000173612; CTA
FIGEPQDF

SEQ ID NO: 27717 - protein, 9 aa, Homo sapiens
  misc_feature: Table A; Target 27717; HLA-B*58:01; GPRC6A; ENSG00000173612; CTA
FIIPDQETK

SEQ ID NO: 27718 - protein, 10 aa, Homo sapiens
  misc_feature: Table A; Target 27718; HLA-A*02:03; GPRC6A; ENSG00000173612; CTA
FIIQAEANNV

SEQ ID NO: 27719 - protein, 9 aa, Homo sapiens
  misc_feature: Table A; Target 27719; HLA-A*02:07; GPRC6A; ENSG00000173612; CTA
FIPIYATTF

SEQ ID NO: 27720 - protein, 9 aa, Homo sapiens
  misc_feature: Table A; Target 27720; HLA-A*24:02; GPRC6A; ENSG00000173612; CTA
FIPIYATTF

SEQ ID NO: 27721 - protein, 9 aa, Homo sapiens
  misc_feature: Table A; Target 27721; HLA-B*46:01; GPRC6A; ENSG00000173612; CTA
FIPIYATTF

SEQ ID NO: 27722 - protein, 9 aa, Homo sapiens
  misc_feature: Table A; Target 27722; HLA-C*01:02; GPRC6A; ENSG00000173612; CTA
FIPIYATTF

SEQ ID NO: 27723 - protein, 9 aa, Homo sapiens
  misc_feature: Table A; Target 27723; HLA-C*02:02; GPRC6A; ENSG00000173612; CTA
FIPIYATTF

SEQ ID NO: 27724 - protein, 9 aa, Homo sapiens
  misc_feature: Table A; Target 27724; HLA-A*32:01; GPRC6A; ENSG00000173612; CTA
FLNFASTSF

SEQ ID NO: 27725 - protein, 9 aa, Homo sapiens
  misc_feature: Table A; Target 27725; HLA-B*15:01; GPRC6A; ENSG00000173612; CTA
FLNFASTSF

SEQ ID NO: 27726 - protein, 9 aa, Homo sapiens
  misc_feature: Table A; Target 27726; HLA-B*15:03; GPRC6A; ENSG00000173612; CTA
FLNFASTSF

SEQ ID NO: 27727 - protein, 9 aa, Homo sapiens
  misc_feature: Table A; Target 27727; HLA-B*46:01; GPRC6A; ENSG00000173612; CTA
FLNFASTSF

SEQ ID NO: 27728 - protein, 9 aa, Homo sapiens
  misc_feature: Table A; Target 27728; HLA-C*01:02; GPRC6A; ENSG00000173612; CTA
FLNFASTSF

SEQ ID NO: 27729 - protein, 9 aa, Homo sapiens
  misc_feature: Table A; Target 27729; HLA-C*02:02; GPRC6A; ENSG00000173612; CTA
FLNFASTSF

SEQ ID NO: 27730 - protein, 9 aa, Homo sapiens
  misc_feature: Table A; Target 27730; HLA-C*07:04; GPRC6A; ENSG00000173612; CTA
FLNFASTSF

SEQ ID NO: 27731 - protein, 9 aa, Homo sapiens
  misc_feature: Table A; Target 27731; HLA-C*14:02; GPRC6A; ENSG00000173612; CTA
FLNFASTSF

SEQ ID NO: 27732 - protein, 8 aa, Homo sapiens
  misc_feature: Table A; Target 27732; HLA-A*02:04; GPRC6A; ENSG00000173612; CTA
FLQNLHLL

SEQ ID NO: 27733 - protein, 9 aa, Homo sapiens
  misc_feature: Table A; Target 27733; HLA-B*46:01; GPRC6A; ENSG00000173612; CTA
FLRTVPSDF

SEQ ID NO: 27734 - protein, 9 aa, Homo sapiens
  misc_feature: Table A; Target 27734; HLA-A*02:01; GPRC6A; ENSG00000173612; CTA
FLSDNTIEV

SEQ ID NO: 27735 - protein, 9 aa, Homo sapiens
  misc_feature: Table A; Target 27735; HLA-A*02:03; GPRC6A; ENSG00000173612; CTA
FLSDNTIEV

SEQ ID NO: 27736 - protein, 9 aa, Homo sapiens
  misc_feature: Table A; Target 27736; HLA-A*02:04; GPRC6A; ENSG00000173612; CTA
FLSDNTIEV

SEQ ID NO: 27737 - protein, 9 aa, Homo sapiens
  misc_feature: Table A; Target 27737; HLA-A*02:07; GPRC6A; ENSG00000173612; CTA
FLSDNTIEV

SEQ ID NO: 27738 - protein, 9 aa, Homo sapiens
  misc_feature: Table A; Target 27738; HLA-A*68:02; GPRC6A; ENSG00000173612; CTA
FLSDNTIEV

SEQ ID NO: 27739 - protein, 9 aa, Homo sapiens
  misc_feature: Table A; Target 27739; HLA-B*13:02; GPRC6A; ENSG00000173612; CTA
FLSDNTIEV

SEQ ID NO: 27740 - protein, 9 aa, Homo sapiens
  misc_feature: Table A; Target 27740; HLA-B*46:01; GPRC6A; ENSG00000173612; CTA
FLSDNTIEV

SEQ ID NO: 27741 - protein, 9 aa, Homo sapiens
  misc_feature: Table A; Target 27741; HLA-B*55:01; GPRC6A; ENSG00000173612; CTA
FLSDNTIEV

SEQ ID NO: 27742 - protein, 9 aa, Homo sapiens
  misc_feature: Table A; Target 27742; HLA-C*02:02; GPRC6A; ENSG00000173612; CTA
FLSDNTIEV

SEQ ID NO: 27743 - protein, 11 aa, Homo sapiens
  misc_feature: Table A; Target 27743; HLA-A*02:01; GPRC6A; ENSG00000173612; CTA
FLSDNTIEVRI

SEQ ID NO: 27744 - protein, 11 aa, Homo sapiens
  misc_feature: Table A; Target 27744; HLA-A*02:04; GPRC6A; ENSG00000173612; CTA
FLSDNTIEVRI

SEQ ID NO: 27745 - protein, 10 aa, Homo sapiens
  misc_feature: Table A; Target 27745; HLA-A*02:01; GPRC6A; ENSG00000173612; CTA
FLWDYAEPGL

SEQ ID NO: 27746 - protein, 10 aa, Homo sapiens
  misc_feature: Table A; Target 27746; HLA-A*02:04; GPRC6A; ENSG00000173612; CTA
FLWDYAEPGL

SEQ ID NO: 27747 - protein, 10 aa, Homo sapiens
  misc_feature: Table A; Target 27747; HLA-A*02:07; GPRC6A; ENSG00000173612; CTA
FLWDYAEPGL

SEQ ID NO: 27748 - protein, 10 aa, Homo sapiens
  misc_feature: Table A; Target 27748; HLA-A*29:02; GPRC6A; ENSG00000173612; CTA
FNHSQRTLAY

SEQ ID NO: 27749 - protein, 8 aa, Homo sapiens
  misc_feature: Table A; Target 27749; HLA-B*51:01; GPRC6A; ENSG00000173612; CTA
FPSFLRTV

SEQ ID NO: 27750 - protein, 9 aa, Homo sapiens
  misc_feature: Table A; Target 27750; HLA-A*02:07; GPRC6A; ENSG00000173612; CTA
FQPWELLGV

SEQ ID NO: 27751 - protein, 9 aa, Homo sapiens
  misc_feature: Table A; Target 27751; HLA-A*03:01; GPRC6A; ENSG00000173612; CTA
FSFDPKLQK

SEQ ID NO: 27752 - protein, 9 aa, Homo sapiens
  misc_feature: Table A; Target 27752; HLA-A*11:01; GPRC6A; ENSG00000173612; CTA
FSFDPKLQK

SEQ ID NO: 27753 - protein, 10 aa, Homo sapiens
  misc_feature: Table A; Target 27753; HLA-A*25:01; GPRC6A; ENSG00000173612; CTA
FSFDPKLQKF

SEQ ID NO: 27754 - protein, 10 aa, Homo sapiens
  misc_feature: Table A; Target 27754; HLA-A*29:02; GPRC6A; ENSG00000173612; CTA
FSFDPKLQKF

SEQ ID NO: 27755 - protein, 10 aa, Homo sapiens
  misc_feature: Table A; Target 27755; HLA-A*68:02; GPRC6A; ENSG00000173612; CTA
FSFDPKLQKF

SEQ ID NO: 27756 - protein, 10 aa, Homo sapiens
  misc_feature: Table A; Target 27756; HLA-B*57:01; GPRC6A; ENSG00000173612; CTA
FSFDPKLQKF

SEQ ID NO: 27757 - protein, 10 aa, Homo sapiens
  misc_feature: Table A; Target 27757; HLA-C*02:02; GPRC6A; ENSG00000173612; CTA
FSFDPKLQKF

SEQ ID NO: 27758 - protein, 8 aa, Homo sapiens
  misc_feature: Table A; Target 27758; HLA-C*05:01; GPRC6A; ENSG00000173612; CTA
FTDGWNSF

SEQ ID NO: 27759 - protein, 9 aa, Homo sapiens
  misc_feature: Table A; Target 27759; HLA-A*11:01; GPRC6A; ENSG00000173612; CTA
GGLFAIHEK

SEQ ID NO: 27760 - protein, 8 aa, Homo sapiens
  misc_feature: Table A; Target 27760; HLA-B*37:01; GPRC6A; ENSG00000173612; CTA
GHMTVTKM

SEQ ID NO: 27761 - protein, 9 aa, Homo sapiens
  misc_feature: Table A; Target 27761; HLA-B*15:01; GPRC6A; ENSG00000173612; CTA
GIITTDDDY

SEQ ID NO: 27762 - protein, 8 aa, Homo sapiens
  misc_feature: Table A; Target 27762; HLA-B*15:03; GPRC6A; ENSG00000173612; CTA
GKVVGFAF

SEQ ID NO: 27763 - protein, 9 aa, Homo sapiens
  misc_feature: Table A; Target 27763; HLA-B*15:03; GPRC6A; ENSG00000173612; CTA
GKYVPAVEI

SEQ ID NO: 27764 - protein, 9 aa, Homo sapiens
  misc_feature: Table A; Target 27764; HLA-A*25:01; GPRC6A; ENSG00000173612; CTA
GNISSFHSF

SEQ ID NO: 27765 - protein, 9 aa, Homo sapiens
  misc_feature: Table A; Target 27765; HLA-A*24:02; GPRC6A; ENSG00000173612; CTA
GYIAILAFI

SEQ ID NO: 27766 - protein, 9 aa, Homo sapiens
  misc_feature: Table A; Target 27766; HLA-A*23:01; GPRC6A; ENSG00000173612; CTA
GYSEITMAV

SEQ ID NO: 27767 - protein, 9 aa, Homo sapiens
  misc_feature: Table A; Target 27767; HLA-A*24:02; GPRC6A; ENSG00000173612; CTA
GYSEITMAV

SEQ ID NO: 27768 - protein, 9 aa, Homo sapiens
  misc_feature: Table A; Target 27768; HLA-A*29:02; GPRC6A; ENSG00000173612; CTA
GYSEITMAV

SEQ ID NO: 27769 - protein, 9 aa, Homo sapiens
  misc_feature: Table A; Target 27769; HLA-B*13:02; GPRC6A; ENSG00000173612; CTA
GYSEITMAV

SEQ ID NO: 27770 - protein, 9 aa, Homo sapiens
  misc_feature: Table A; Target 27770; HLA-B*27:05; GPRC6A; ENSG00000173612; CTA
GYSEITMAV

SEQ ID NO: 27771 - protein, 9 aa, Homo sapiens
  misc_feature: Table A; Target 27771; HLA-B*49:01; GPRC6A; ENSG00000173612; CTA
GYSEITMAV

SEQ ID NO: 27772 - protein, 9 aa, Homo sapiens
  misc_feature: Table A; Target 27772; HLA-C*02:02; GPRC6A; ENSG00000173612; CTA
GYSEITMAV

SEQ ID NO: 27773 - protein, 9 aa, Homo sapiens
  misc_feature: Table A; Target 27773; HLA-C*14:02; GPRC6A; ENSG00000173612; CTA
GYSEITMAV

SEQ ID NO: 27774 - protein, 11 aa, Homo sapiens
  misc_feature: Table A; Target 27774; HLA-A*31:01; GPRC6A; ENSG00000173612; CTA
GYSEITMAVSR

SEQ ID NO: 27775 - protein, 11 aa, Homo sapiens
  misc_feature: Table A; Target 27775; HLA-A*33:03; GPRC6A; ENSG00000173612; CTA
GYSEITMAVSR

SEQ ID NO: 27776 - protein, 9 aa, Homo sapiens
  misc_feature: Table A; Target 27776; HLA-A*30:01; GPRC6A; ENSG00000173612; CTA
HEYAMHLSA

SEQ ID NO: 27777 - protein, 9 aa, Homo sapiens
  misc_feature: Table A; Target 27777; HLA-B*18:01; GPRC6A; ENSG00000173612; CTA
HEYAMHLSA

SEQ ID NO: 27778 - protein, 9 aa, Homo sapiens
  misc_feature: Table A; Target 27778; HLA-B*37:01; GPRC6A; ENSG00000173612; CTA
HEYAMHLSA

SEQ ID NO: 27779 - protein, 9 aa, Homo sapiens
  misc_feature: Table A; Target 27779; HLA-B*40:02; GPRC6A; ENSG00000173612; CTA
HEYAMHLSA

SEQ ID NO: 27780 - protein, 9 aa, Homo sapiens
  misc_feature: Table A; Target 27780; HLA-B*49:01; GPRC6A; ENSG00000173612; CTA
HEYAMHLSA

SEQ ID NO: 27781 - protein, 9 aa, Homo sapiens
  misc_feature: Table A; Target 27781; HLA-B*54:01; GPRC6A; ENSG00000173612; CTA
HEYAMHLSA

SEQ ID NO: 27782 - protein, 8 aa, Homo sapiens
  misc_feature: Table A; Target 27782; HLA-C*04:01; GPRC6A; ENSG00000173612; CTA
HFDAHGDL

SEQ ID NO: 27783 - protein, 10 aa, Homo sapiens
  misc_feature: Table A; Target 27783; HLA-A*23:01; GPRC6A; ENSG00000173612; CTA
HFLNFASTSF

SEQ ID NO: 27784 - protein, 10 aa, Homo sapiens
  misc_feature: Table A; Target 27784; HLA-A*24:02; GPRC6A; ENSG00000173612; CTA
HFLNFASTSF

SEQ ID NO: 27785 - protein, 10 aa, Homo sapiens
  misc_feature: Table A; Target 27785; HLA-C*14:02; GPRC6A; ENSG00000173612; CTA
HFLNFASTSF

SEQ ID NO: 27786 - protein, 9 aa, Homo sapiens
  misc_feature: Table A; Target 27786; HLA-A*03:02; GPRC6A; ENSG00000173612; CTA
HLSACAYVK

SEQ ID NO: 27787 - protein, 8 aa, Homo sapiens
  misc_feature: Table A; Target 27787; HLA-B*58:01; GPRC6A; ENSG00000173612; CTA
HSQRTLAY

SEQ ID NO: 27788 - protein, 9 aa, Homo sapiens
  misc_feature: Table A; Target 27788; HLA-A*03:02; GPRC6A; ENSG00000173612; CTA
HSQRTLAYK

SEQ ID NO: 27789 - protein, 9 aa, Homo sapiens
  misc_feature: Table A; Target 27789; HLA-A*33:01; GPRC6A; ENSG00000173612; CTA
HSQRTLAYK

SEQ ID NO: 27790 - protein, 8 aa, Homo sapiens
  misc_feature: Table A; Target 27790; HLA-C*03:03; GPRC6A; ENSG00000173612; CTA
HSVSSIAL

SEQ ID NO: 27791 - protein, 8 aa, Homo sapiens
  misc_feature: Table A; Target 27791; HLA-C*03:04; GPRC6A; ENSG00000173612; CTA
HSVSSIAL

SEQ ID NO: 27792 - protein, 8 aa, Homo sapiens
  misc_feature: Table A; Target 27792; HLA-C*16:01; GPRC6A; ENSG00000173612; CTA
HSVSSIAL

SEQ ID NO: 27793 - protein, 9 aa, Homo sapiens
  misc_feature: Table A; Target 27793; HLA-A*68:02; GPRC6A; ENSG00000173612; CTA
HVFDLFNKA

SEQ ID NO: 27794 - protein, 9 aa, Homo sapiens
  misc_feature: Table A; Target 27794; HLA-B*54:01; GPRC6A; ENSG00000173612; CTA
HVFDLFNKA

SEQ ID NO: 27795 - protein, 10 aa, Homo sapiens
  misc_feature: Table A; Target 27795; HLA-A*68:02; GPRC6A; ENSG00000173612; CTA
HVFDLFNKAI

SEQ ID NO: 27796 - protein, 9 aa, Homo sapiens
  misc_feature: Table A; Target 27796; HLA-A*24:02; GPRC6A; ENSG00000173612; CTA
HWAPVRSTM

SEQ ID NO: 27797 - protein, 9 aa, Homo sapiens
  misc_feature: Table A; Target 27797; HLA-B*54:01; GPRC6A; ENSG00000173612; CTA
IAFKEVLPA

SEQ ID NO: 27798 - protein, 10 aa, Homo sapiens
  misc_feature: Table A; Target 27798; HLA-B*57:01; GPRC6A; ENSG00000173612; CTA
IAFKEVLPAF

SEQ ID NO: 27799 - protein, 8 aa, Homo sapiens
  misc_feature: Table A; Target 27799; HLA-C*03:03; GPRC6A; ENSG00000173612; CTA
IALSPASL

SEQ ID NO: 27800 - protein, 8 aa, Homo sapiens
  misc_feature: Table A; Target 27800; HLA-C*03:04; GPRC6A; ENSG00000173612; CTA
IALSPASL

SEQ ID NO: 27801 - protein, 8 aa, Homo sapiens
  misc_feature: Table A; Target 27801; HLA-C*05:01; GPRC6A; ENSG00000173612; CTA
IALSPASL

SEQ ID NO: 27802 - protein, 9 aa, Homo sapiens
  misc_feature: Table A; Target 27802; HLA-A*30:01; GPRC6A; ENSG00000173612; CTA
IEMINNSTL

SEQ ID NO: 27803 - protein, 9 aa, Homo sapiens
  misc_feature: Table A; Target 27803; HLA-B*18:01; GPRC6A; ENSG00000173612; CTA
IEMINNSTL

SEQ ID NO: 27804 - protein, 9 aa, Homo sapiens
  misc_feature: Table A; Target 27804; HLA-B*37:01; GPRC6A; ENSG00000173612; CTA
IEMINNSTL

SEQ ID NO: 27805 - protein, 9 aa, Homo sapiens
  misc_feature: Table A; Target 27805; HLA-B*40:01; GPRC6A; ENSG00000173612; CTA
IEMINNSTL

SEQ ID NO: 27806 - protein, 9 aa, Homo sapiens
  misc_feature: Table A; Target 27806; HLA-B*40:02; GPRC6A; ENSG00000173612; CTA
IEMINNSTL

SEQ ID NO: 27807 - protein, 9 aa, Homo sapiens
  misc_feature: Table A; Target 27807; HLA-B*44:02; GPRC6A; ENSG00000173612; CTA
IEMINNSTL

SEQ ID NO: 27808 - protein, 9 aa, Homo sapiens
  misc_feature: Table A; Target 27808; HLA-B*44:03; GPRC6A; ENSG00000173612; CTA
IEMINNSTL

SEQ ID NO: 27809 - protein, 9 aa, Homo sapiens
  misc_feature: Table A; Target 27809; HLA-B*49:01; GPRC6A; ENSG00000173612; CTA
IEMINNSTL

SEQ ID NO: 27810 - protein, 10 aa, Homo sapiens
  misc_feature: Table A; Target 27810; HLA-A*30:01; GPRC6A; ENSG00000173612; CTA
IEMINNSTLL

SEQ ID NO: 27811 - protein, 10 aa, Homo sapiens
  misc_feature: Table A; Target 27811; HLA-B*40:01; GPRC6A; ENSG00000173612; CTA
IEMINNSTLL

SEQ ID NO: 27812 - protein, 10 aa, Homo sapiens
  misc_feature: Table A; Target 27812; HLA-B*49:01; GPRC6A; ENSG00000173612; CTA
IEMINNSTLL

SEQ ID NO: 27813 - protein, 8 aa, Homo sapiens
  misc_feature: Table A; Target 27813; HLA-A*30:01; GPRC6A; ENSG00000173612; CTA
IEMNINKM

SEQ ID NO: 27814 - protein, 8 aa, Homo sapiens
  misc_feature: Table A; Target 27814; HLA-B*18:01; GPRC6A; ENSG00000173612; CTA
IEMNINKM

SEQ ID NO: 27815 - protein, 8 aa, Homo sapiens
  misc_feature: Table A; Target 27815; HLA-B*37:01; GPRC6A; ENSG00000173612; CTA
IEMNINKM

SEQ ID NO: 27816 - protein, 8 aa, Homo sapiens
  misc_feature: Table A; Target 27816; HLA-B*44:02; GPRC6A; ENSG00000173612; CTA
IEMNINKM

SEQ ID NO: 27817 - protein, 8 aa, Homo sapiens
  misc_feature: Table A; Target 27817; HLA-B*49:01; GPRC6A; ENSG00000173612; CTA
IEMNINKM

SEQ ID NO: 27818 - protein, 9 aa, Homo sapiens
  misc_feature: Table A; Target 27818; HLA-B*44:02; GPRC6A; ENSG00000173612; CTA
IEMNINKMW

SEQ ID NO: 27819 - protein, 9 aa, Homo sapiens
  misc_feature: Table A; Target 27819; HLA-B*44:03; GPRC6A; ENSG00000173612; CTA
IEMNINKMW

SEQ ID NO: 27820 - protein, 9 aa, Homo sapiens
  misc_feature: Table A; Target 27820; HLA-C*16:04; GPRC6A; ENSG00000173612; CTA
IEMNINKMW

SEQ ID NO: 27821 - protein, 9 aa, Homo sapiens
  misc_feature: Table A; Target 27821; HLA-A*23:01; GPRC6A; ENSG00000173612; CTA
IFAAPTVEV

SEQ ID NO: 27822 - protein, 9 aa, Homo sapiens
  misc_feature: Table A; Target 27822; HLA-B*46:01; GPRC6A; ENSG00000173612; CTA
IFAAPTVEV

SEQ ID NO: 27823 - protein, 9 aa, Homo sapiens
  misc_feature: Table A; Target 27823; HLA-C*01:02; GPRC6A; ENSG00000173612; CTA
IFAAPTVEV

SEQ ID NO: 27824 - protein, 9 aa, Homo sapiens
  misc_feature: Table A; Target 27824; HLA-C*02:02; GPRC6A; ENSG00000173612; CTA
IFAAPTVEV

SEQ ID NO: 27825 - protein, 9 aa, Homo sapiens
  misc_feature: Table A; Target 27825; HLA-C*03:04; GPRC6A; ENSG00000173612; CTA
IFAAPTVEV

SEQ ID NO: 27826 - protein, 9 aa, Homo sapiens
  misc_feature: Table A; Target 27826; HLA-C*14:02; GPRC6A; ENSG00000173612; CTA
IFAAPTVEV

SEQ ID NO: 27827 - protein, 11 aa, Homo sapiens
  misc_feature: Table A; Target 27827; HLA-A*23:01; GPRC6A; ENSG00000173612; CTA
IFAAPTVEVNV

SEQ ID NO: 27828 - protein, 9 aa, Homo sapiens
  misc_feature: Table A; Target 27828; HLA-C*14:02; GPRC6A; ENSG00000173612; CTA
IFNHSQRTL

SEQ ID NO: 27829 - protein, 11 aa, Homo sapiens
  misc_feature: Table A; Target 27829; HLA-A*29:02; GPRC6A; ENSG00000173612; CTA
IFNHSQRTLAY

SEQ ID NO: 27830 - protein, 10 aa, Homo sapiens
  misc_feature: Table A; Target 27830; HLA-A*23:01; GPRC6A; ENSG00000173612; CTA
IFVLVVGIIF

SEQ ID NO: 27831 - protein, 9 aa, Homo sapiens
  misc_feature: Table A; Target 27831; HLA-B*46:01; GPRC6A; ENSG00000173612; CTA
IGKVVGFAF

SEQ ID NO: 27832 - protein, 10 aa, Homo sapiens
  misc_feature: Table A; Target 27832; HLA-B*39:01; GPRC6A; ENSG00000173612; CTA
IGSGYSEITM

SEQ ID NO: 27833 - protein, 9 aa, Homo sapiens
  misc_feature: Table A; Target 27833; HLA-B*38:01; GPRC6A; ENSG00000173612; CTA
IHSIQLAVF

SEQ ID NO: 27834 - protein, 10 aa, Homo sapiens
  misc_feature: Table A; Target 27834; HLA-A*03:02; GPRC6A; ENSG00000173612; CTA
IICKQEINTK

SEQ ID NO: 27835 - protein, 9 aa, Homo sapiens
  misc_feature: Table A; Target 27835; HLA-A*02:04; GPRC6A; ENSG00000173612; CTA
IIIGGLFAI

SEQ ID NO: 27836 - protein, 9 aa, Homo sapiens
  misc_feature: Table A; Target 27836; HLA-A*02:01; GPRC6A; ENSG00000173612; CTA
IILEAQVNV

SEQ ID NO: 27837 - protein, 9 aa, Homo sapiens
  misc_feature: Table A; Target 27837; HLA-A*02:04; GPRC6A; ENSG00000173612; CTA
IILEAQVNV

SEQ ID NO: 27838 - protein, 9 aa, Homo sapiens
  misc_feature: Table A; Target 27838; HLA-A*02:07; GPRC6A; ENSG00000173612; CTA
IILEAQVNV

SEQ ID NO: 27839 - protein, 9 aa, Homo sapiens
  misc_feature: Table A; Target 27839; HLA-C*05:01; GPRC6A; ENSG00000173612; CTA
IILEAQVNV

SEQ ID NO: 27840 - protein, 11 aa, Homo sapiens
  misc_feature: Table A; Target 27840; HLA-A*02:07; GPRC6A; ENSG00000173612; CTA
IILEAQVNVIV

SEQ ID NO: 27841 - protein, 11 aa, Homo sapiens
  misc_feature: Table A; Target 27841; HLA-A*24:02; GPRC6A; ENSG00000173612; CTA
IIPDQETKNEF

SEQ ID NO: 27842 - protein, 11 aa, Homo sapiens
  misc_feature: Table A; Target 27842; HLA-A*32:01; GPRC6A; ENSG00000173612; CTA
IIPDQETKNEF

SEQ ID NO: 27843 - protein, 11 aa, Homo sapiens
  misc_feature: Table A; Target 27843; HLA-B*15:01; GPRC6A; ENSG00000173612; CTA
IIPDQETKNEF

SEQ ID NO: 27844 - protein, 9 aa, Homo sapiens
  misc_feature: Table A; Target 27844; HLA-A*26:01; GPRC6A; ENSG00000173612; CTA
IIVILISNY

SEQ ID NO: 27845 - protein, 9 aa, Homo sapiens
  misc_feature: Table A; Target 27845; HLA-A*30:02; GPRC6A; ENSG00000173612; CTA
IIVILISNY

SEQ ID NO: 27846 - protein, 9 aa, Homo sapiens
  misc_feature: Table A; Target 27846; HLA-B*15:01; GPRC6A; ENSG00000173612; CTA
IIVILISNY

SEQ ID NO: 27847 - protein, 10 aa, Homo sapiens
  misc_feature: Table A; Target 27847; HLA-A*29:02; GPRC6A; ENSG00000173612; CTA
ILAFGTMLGY

SEQ ID NO: 27848 - protein, 9 aa, Homo sapiens
  misc_feature: Table A; Target 27848; HLA-C*16:02; GPRC6A; ENSG00000173612; CTA
ILEAQVNVI

SEQ ID NO: 27849 - protein, 10 aa, Homo sapiens
  misc_feature: Table A; Target 27849; HLA-A*29:02; GPRC6A; ENSG00000173612; CTA
ILISNYGILY

SEQ ID NO: 27850 - protein, 9 aa, Homo sapiens
  misc_feature: Table A; Target 27850; HLA-A*02:04; GPRC6A; ENSG00000173612; CTA
ILLLILSLL

SEQ ID NO: 27851 - protein, 9 aa, Homo sapiens
  misc_feature: Table A; Target 27851; HLA-A*03:01; GPRC6A; ENSG00000173612; CTA
ILYCTFIPK

SEQ ID NO: 27852 - protein, 10 aa, Homo sapiens
  misc_feature: Table A; Target 27852; HLA-B*07:02; GPRC6A; ENSG00000173612; CTA
IPDQETKNEF

SEQ ID NO: 27853 - protein, 10 aa, Homo sapiens
  misc_feature: Table A; Target 27853; HLA-B*35:03; GPRC6A; ENSG00000173612; CTA
IPDQETKNEF

SEQ ID NO: 27854 - protein, 10 aa, Homo sapiens
  misc_feature: Table A; Target 27854; HLA-B*38:01; GPRC6A; ENSG00000173612; CTA
IPDQETKNEF

SEQ ID NO: 27855 - protein, 10 aa, Homo sapiens
  misc_feature: Table A; Target 27855; HLA-B*55:01; GPRC6A; ENSG00000173612; CTA
IPDQETKNEF

SEQ ID NO: 27856 - protein, 10 aa, Homo sapiens
  misc_feature: Table A; Target 27856; HLA-C*03:03; GPRC6A; ENSG00000173612; CTA
IPDQETKNEF

SEQ ID NO: 27857 - protein, 10 aa, Homo sapiens
  misc_feature: Table A; Target 27857; HLA-C*05:01; GPRC6A; ENSG00000173612; CTA
IPDQETKNEF

SEQ ID NO: 27858 - protein, 8 aa, Homo sapiens
  misc_feature: Table A; Target 27858; HLA-A*23:01; GPRC6A; ENSG00000173612; CTA
IPIYATTF

SEQ ID NO: 27859 - protein, 8 aa, Homo sapiens
  misc_feature: Table A; Target 27859; HLA-B*08:01; GPRC6A; ENSG00000173612; CTA
IPIYATTF

SEQ ID NO: 27860 - protein, 8 aa, Homo sapiens
  misc_feature: Table A; Target 27860; HLA-B*18:01; GPRC6A; ENSG00000173612; CTA
IPIYATTF

SEQ ID NO: 27861 - protein, 8 aa, Homo sapiens
  misc_feature: Table A; Target 27861; HLA-B*35:01; GPRC6A; ENSG00000173612; CTA
IPIYATTF

SEQ ID NO: 27862 - protein, 8 aa, Homo sapiens
  misc_feature: Table A; Target 27862; HLA-B*35:03; GPRC6A; ENSG00000173612; CTA
IPIYATTF

SEQ ID NO: 27863 - protein, 8 aa, Homo sapiens
  misc_feature: Table A; Target 27863; HLA-B*51:01; GPRC6A; ENSG00000173612; CTA
IPIYATTF

SEQ ID NO: 27864 - protein, 8 aa, Homo sapiens
  misc_feature: Table A; Target 27864; HLA-C*14:02; GPRC6A; ENSG00000173612; CTA
IPIYATTF

SEQ ID NO: 27865 - protein, 8 aa, Homo sapiens
  misc_feature: Table A; Target 27865; HLA-B*13:02; GPRC6A; ENSG00000173612; CTA
IQAEANNV

SEQ ID NO: 27866 - protein, 10 aa, Homo sapiens
  misc_feature: Table A; Target 27866; HLA-A*30:01; GPRC6A; ENSG00000173612; CTA
IQAEANNVCI

SEQ ID NO: 27867 - protein, 10 aa, Homo sapiens
  misc_feature: Table A; Target 27867; HLA-B*13:02; GPRC6A; ENSG00000173612; CTA
IQAEANNVCI

SEQ ID NO: 27868 - protein, 10 aa, Homo sapiens
  misc_feature: Table A; Target 27868; HLA-B*38:01; GPRC6A; ENSG00000173612; CTA
IQAEANNVCI

SEQ ID NO: 27869 - protein, 8 aa, Homo sapiens
  misc_feature: Table A; Target 27869; HLA-B*37:01; GPRC6A; ENSG00000173612; CTA
IQLAVFAL

SEQ ID NO: 27870 - protein, 10 aa, Homo sapiens
  misc_feature: Table A; Target 27870; HLA-A*29:02; GPRC6A; ENSG00000173612; CTA
IQLAVFALGY

SEQ ID NO: 27871 - protein, 8 aa, Homo sapiens
  misc_feature: Table A; Target 27871; HLA-B*15:01; GPRC6A; ENSG00000173612; CTA
IQVVICTL

SEQ ID NO: 27872 - protein, 8 aa, Homo sapiens
  misc_feature: Table A; Target 27872; HLA-A*01:01; GPRC6A; ENSG00000173612; CTA
ISNYGILY

SEQ ID NO: 27873 - protein, 8 aa, Homo sapiens
  misc_feature: Table A; Target 27873; HLA-A*30:02; GPRC6A; ENSG00000173612; CTA
ISNYGILY

SEQ ID NO: 27874 - protein, 9 aa, Homo sapiens
  misc_feature: Table A; Target 27874; HLA-B*57:01; GPRC6A; ENSG00000173612; CTA
ITFGMLIYF

SEQ ID NO: 27875 - protein, 11 aa, Homo sapiens
  misc_feature: Table A; Target 27875; HLA-B*57:01; GPRC6A; ENSG00000173612; CTA
ITFIPIYATTF

SEQ ID NO: 27876 - protein, 9 aa, Homo sapiens
  misc_feature: Table A; Target 27876; HLA-C*03:03; GPRC6A; ENSG00000173612; CTA
ITMAVSRML

SEQ ID NO: 27877 - protein, 9 aa, Homo sapiens
  misc_feature: Table A; Target 27877; HLA-C*03:04; GPRC6A; ENSG00000173612; CTA
ITMAVSRML

SEQ ID NO: 27878 - protein, 9 aa, Homo sapiens
  misc_feature: Table A; Target 27878; HLA-C*16:01; GPRC6A; ENSG00000173612; CTA
ITMAVSRML

SEQ ID NO: 27879 - protein, 8 aa, Homo sapiens
  misc_feature: Table A; Target 27879; HLA-A*03:02; GPRC6A; ENSG00000173612; CTA
ITTIPNVK

SEQ ID NO: 27880 - protein, 9 aa, Homo sapiens
  misc_feature: Table A; Target 27880; HLA-A*03:01; GPRC6A; ENSG00000173612; CTA
ITTIPNVKK

SEQ ID NO: 27881 - protein, 9 aa, Homo sapiens
  misc_feature: Table A; Target 27881; HLA-A*03:02; GPRC6A; ENSG00000173612; CTA
ITTIPNVKK

SEQ ID NO: 27882 - protein, 9 aa, Homo sapiens
  misc_feature: Table A; Target 27882; HLA-A*11:01; GPRC6A; ENSG00000173612; CTA
ITTIPNVKK

SEQ ID NO: 27883 - protein, 10 aa, Homo sapiens
  misc_feature: Table A; Target 27883; HLA-C*16:02; GPRC6A; ENSG00000173612; CTA
ITTIPNVKKI

SEQ ID NO: 27884 - protein, 8 aa, Homo sapiens
  misc_feature: Table A; Target 27884; HLA-B*15:01; GPRC6A; ENSG00000173612; CTA
IVILISNY

SEQ ID NO: 27885 - protein, 8 aa, Homo sapiens
  misc_feature: Table A; Target 27885; HLA-B*18:01; GPRC6A; ENSG00000173612; CTA
IVILISNY

SEQ ID NO: 27886 - protein, 9 aa, Homo sapiens
  misc_feature: Table A; Target 27886; HLA-A*23:01; GPRC6A; ENSG00000173612; CTA
IYATTFGKY

SEQ ID NO: 27887 - protein, 9 aa, Homo sapiens
  misc_feature: Table A; Target 27887; HLA-A*24:02; GPRC6A; ENSG00000173612; CTA
IYATTFGKY

SEQ ID NO: 27888 - protein, 9 aa, Homo sapiens
  misc_feature: Table A; Target 27888; HLA-A*29:02; GPRC6A; ENSG00000173612; CTA
IYATTFGKY

SEQ ID NO: 27889 - protein, 9 aa, Homo sapiens
  misc_feature: Table A; Target 27889; HLA-A*30:02; GPRC6A; ENSG00000173612; CTA
IYATTFGKY

SEQ ID NO: 27890 - protein, 9 aa, Homo sapiens
  misc_feature: Table A; Target 27890; HLA-C*14:02; GPRC6A; ENSG00000173612; CTA
IYATTFGKY

SEQ ID NO: 27891 - protein, 8 aa, Homo sapiens
  misc_feature: Table A; Target 27891; HLA-C*04:01; GPRC6A; ENSG00000173612; CTA
IYDTCTEV

SEQ ID NO: 27892 - protein, 10 aa, Homo sapiens
  misc_feature: Table A; Target 27892; HLA-B*35:03; GPRC6A; ENSG00000173612; CTA
IYDTCTEVTV

SEQ ID NO: 27893 - protein, 10 aa, Homo sapiens
  misc_feature: Table A; Target 27893; HLA-C*04:01; GPRC6A; ENSG00000173612; CTA
IYDTCTEVTV

SEQ ID NO: 27894 - protein, 9 aa, Homo sapiens
  misc_feature: Table A; Target 27894; HLA-A*24:02; GPRC6A; ENSG00000173612; CTA
IYFIAWITF

SEQ ID NO: 27895 - protein, 9 aa, Homo sapiens
  misc_feature: Table A; Target 27895; HLA-A*24:02; GPRC6A; ENSG00000173612; CTA
IYSYSSHSV

SEQ ID NO: 27896 - protein, 9 aa, Homo sapiens
  misc_feature: Table A; Target 27896; HLA-C*04:01; GPRC6A; ENSG00000173612; CTA
IYSYSSHSV

SEQ ID NO: 27897 - protein, 9 aa, Homo sapiens
  misc_feature: Table A; Target 27897; HLA-C*14:02; GPRC6A; ENSG00000173612; CTA
IYSYSSHSV

SEQ ID NO: 27898 - protein, 9 aa, Homo sapiens
  misc_feature: Table A; Target 27898; HLA-C*16:02; GPRC6A; ENSG00000173612; CTA
IYSYSSHSV

SEQ ID NO: 27899 - protein, 9 aa, Homo sapiens
  misc_feature: Table A; Target 27899; HLA-A*03:01; GPRC6A; ENSG00000173612; CTA
KAIEMNINK

SEQ ID NO: 27900 - protein, 9 aa, Homo sapiens
  misc_feature: Table A; Target 27900; HLA-A*03:02; GPRC6A; ENSG00000173612; CTA
KAIEMNINK

SEQ ID NO: 27901 - protein, 9 aa, Homo sapiens
  misc_feature: Table A; Target 27901; HLA-A*11:01; GPRC6A; ENSG00000173612; CTA
KAIEMNINK

SEQ ID NO: 27902 - protein, 9 aa, Homo sapiens
  misc_feature: Table A; Target 27902; HLA-B*27:05; GPRC6A; ENSG00000173612; CTA
KAIEMNINK

SEQ ID NO: 27903 - protein, 9 aa, Homo sapiens
  misc_feature: Table A; Target 27903; HLA-B*58:01; GPRC6A; ENSG00000173612; CTA
KAIEMNINK

SEQ ID NO: 27904 - protein, 9 aa, Homo sapiens
  misc_feature: Table A; Target 27904; HLA-C*07:06; GPRC6A; ENSG00000173612; CTA
KAIEMNINK

SEQ ID NO: 27905 - protein, 10 aa, Homo sapiens
  misc_feature: Table A; Target 27905; HLA-B*58:01; GPRC6A; ENSG00000173612; CTA
KAIEMNINKM

SEQ ID NO: 27906 - protein, 10 aa, Homo sapiens
  misc_feature: Table A; Target 27906; HLA-C*16:02; GPRC6A; ENSG00000173612; CTA
KAIEMNINKM

SEQ ID NO: 27907 - protein, 9 aa, Homo sapiens
  misc_feature: Table A; Target 27907; HLA-A*24:02; GPRC6A; ENSG00000173612; CTA
KAIERNFVM

SEQ ID NO: 27908 - protein, 9 aa, Homo sapiens
  misc_feature: Table A; Target 27908; HLA-A*32:01; GPRC6A; ENSG00000173612; CTA
KAIERNFVM

SEQ ID NO: 27909 - protein, 9 aa, Homo sapiens
  misc_feature: Table A; Target 27909; HLA-B*08:01; GPRC6A; ENSG00000173612; CTA
KAIERNFVM

SEQ ID NO: 27910 - protein, 9 aa, Homo sapiens
  misc_feature: Table A; Target 27910; HLA-B*37:01; GPRC6A; ENSG00000173612; CTA
KAIERNFVM

SEQ ID NO: 27911 - protein, 9 aa, Homo sapiens
  misc_feature: Table A; Target 27911; HLA-B*46:01; GPRC6A; ENSG00000173612; CTA
KAIERNFVM

SEQ ID NO: 27912 - protein, 9 aa, Homo sapiens
  misc_feature: Table A; Target 27912; HLA-B*57:01; GPRC6A; ENSG00000173612; CTA
KAIERNFVM

SEQ ID NO: 27913 - protein, 9 aa, Homo sapiens
  misc_feature: Table A; Target 27913; HLA-B*58:01; GPRC6A; ENSG00000173612; CTA
KAIERNFVM

SEQ ID NO: 27914 - protein, 9 aa, Homo sapiens
  misc_feature: Table A; Target 27914; HLA-C*02:02; GPRC6A; ENSG00000173612; CTA
KAIERNFVM

SEQ ID NO: 27915 - protein, 9 aa, Homo sapiens
  misc_feature: Table A; Target 27915; HLA-C*03:03; GPRC6A; ENSG00000173612; CTA
KAIERNFVM

SEQ ID NO: 27916 - protein, 9 aa, Homo sapiens
  misc_feature: Table A; Target 27916; HLA-C*03:04; GPRC6A; ENSG00000173612; CTA
KAIERNFVM

SEQ ID NO: 27917 - protein, 9 aa, Homo sapiens
  misc_feature: Table A; Target 27917; HLA-C*12:03; GPRC6A; ENSG00000173612; CTA
KAIERNFVM

SEQ ID NO: 27918 - protein, 9 aa, Homo sapiens
  misc_feature: Table A; Target 27918; HLA-C*16:01; GPRC6A; ENSG00000173612; CTA
KAIERNFVM

SEQ ID NO: 27919 - protein, 9 aa, Homo sapiens
  misc_feature: Table A; Target 27919; HLA-C*16:02; GPRC6A; ENSG00000173612; CTA
KAIERNFVM

SEQ ID NO: 27920 - protein, 10 aa, Homo sapiens
  misc_feature: Table A; Target 27920; HLA-A*31:01; GPRC6A; ENSG00000173612; CTA
KAIERNFVMR

SEQ ID NO: 27921 - protein, 9 aa, Homo sapiens
  misc_feature: Table A; Target 27921; HLA-A*03:01; GPRC6A; ENSG00000173612; CTA
KAMAHLIQK

SEQ ID NO: 27922 - protein, 9 aa, Homo sapiens
  misc_feature: Table A; Target 27922; HLA-A*03:02; GPRC6A; ENSG00000173612; CTA
KAMAHLIQK

SEQ ID NO: 27923 - protein, 9 aa, Homo sapiens
  misc_feature: Table A; Target 27923; HLA-A*11:01; GPRC6A; ENSG00000173612; CTA
KAMAHLIQK

SEQ ID NO: 27924 - protein, 9 aa, Homo sapiens
  misc_feature: Table A; Target 27924; HLA-A*31:01; GPRC6A; ENSG00000173612; CTA
KAMAHLIQK

SEQ ID NO: 27925 - protein, 10 aa, Homo sapiens
  misc_feature: Table A; Target 27925; HLA-B*57:01; GPRC6A; ENSG00000173612; CTA
KANKAIERNF

SEQ ID NO: 27926 - protein, 8 aa, Homo sapiens
  misc_feature: Table A; Target 27926; HLA-A*30:02; GPRC6A; ENSG00000173612; CTA
KAVIGSGY

SEQ ID NO: 27927 - protein, 8 aa, Homo sapiens
  misc_feature: Table A; Target 27927; HLA-B*15:01; GPRC6A; ENSG00000173612; CTA
KAVIGSGY

SEQ ID NO: 27928 - protein, 8 aa, Homo sapiens
  misc_feature: Table A; Target 27928; HLA-B*15:03; GPRC6A; ENSG00000173612; CTA
KAVIGSGY

SEQ ID NO: 27929 - protein, 8 aa, Homo sapiens
  misc_feature: Table A; Target 27929; HLA-B*39:01; GPRC6A; ENSG00000173612; CTA
KAVIGSGY

SEQ ID NO: 27930 - protein, 8 aa, Homo sapiens
  misc_feature: Table A; Target 27930; HLA-B*46:01; GPRC6A; ENSG00000173612; CTA
KAVIGSGY

SEQ ID NO: 27931 - protein, 8 aa, Homo sapiens
  misc_feature: Table A; Target 27931; HLA-B*58:01; GPRC6A; ENSG00000173612; CTA
KAVIGSGY

SEQ ID NO: 27932 - protein, 8 aa, Homo sapiens
  misc_feature: Table A; Target 27932; HLA-C*16:01; GPRC6A; ENSG00000173612; CTA
KAVIGSGY

SEQ ID NO: 27933 - protein, 8 aa, Homo sapiens
  misc_feature: Table A; Target 27933; HLA-B*37:01; GPRC6A; ENSG00000173612; CTA
KDLQAQAF

SEQ ID NO: 27934 - protein, 9 aa, Homo sapiens
  misc_feature: Table A; Target 27934; HLA-A*30:01; GPRC6A; ENSG00000173612; CTA
KEINGHMTV

SEQ ID NO: 27935 - protein, 9 aa, Homo sapiens
  misc_feature: Table A; Target 27935; HLA-B*37:01; GPRC6A; ENSG00000173612; CTA
KEINGHMTV

SEQ ID NO: 27936 - protein, 9 aa, Homo sapiens
  misc_feature: Table A; Target 27936; HLA-B*40:01; GPRC6A; ENSG00000173612; CTA
KEINGHMTV

SEQ ID NO: 27937 - protein, 9 aa, Homo sapiens
  misc_feature: Table A; Target 27937; HLA-B*40:02; GPRC6A; ENSG00000173612; CTA
KEINGHMTV

SEQ ID NO: 27938 - protein, 9 aa, Homo sapiens
  misc_feature: Table A; Target 27938; HLA-B*44:03; GPRC6A; ENSG00000173612; CTA
KEINGHMTV

SEQ ID NO: 27939 - protein, 9 aa, Homo sapiens
  misc_feature: Table A; Target 27939; HLA-B*49:01; GPRC6A; ENSG00000173612; CTA
KEINGHMTV

SEQ ID NO: 27940 - protein, 10 aa, Homo sapiens
  misc_feature: Table A; Target 27940; HLA-B*40:01; GPRC6A; ENSG00000173612; CTA
KEINGHMTVT

SEQ ID NO: 27941 - protein, 10 aa, Homo sapiens
  misc_feature: Table A; Target 27941; HLA-B*40:02; GPRC6A; ENSG00000173612; CTA
KEINGHMTVT

SEQ ID NO: 27942 - protein, 10 aa, Homo sapiens
  misc_feature: Table A; Target 27942; HLA-B*49:01; GPRC6A; ENSG00000173612; CTA
KEINGHMTVT

SEQ ID NO: 27943 - protein, 8 aa, Homo sapiens
  misc_feature: Table A; Target 27943; HLA-B*44:02; GPRC6A; ENSG00000173612; CTA
KEVEYLNW

SEQ ID NO: 27944 - protein, 8 aa, Homo sapiens
  misc_feature: Table A; Target 27944; HLA-B*37:01; GPRC6A; ENSG00000173612; CTA
KEVLPAFL

SEQ ID NO: 27945 - protein, 10 aa, Homo sapiens
  misc_feature: Table A; Target 27945; HLA-A*29:02; GPRC6A; ENSG00000173612; CTA
KFITFGMLIY

SEQ ID NO: 27946 - protein, 8 aa, Homo sapiens
  misc_feature: Table A; Target 27946; HLA-A*32:01; GPRC6A; ENSG00000173612; CTA
KIGKVVGF

SEQ ID NO: 27947 - protein, 8 aa, Homo sapiens
  misc_feature: Table A; Target 27947; HLA-B*37:01; GPRC6A; ENSG00000173612; CTA
KIGKVVGF

SEQ ID NO: 27948 - protein, 9 aa, Homo sapiens
  misc_feature: Table A; Target 27948; HLA-A*03:01; GPRC6A; ENSG00000173612; CTA
KITTIPNVK

SEQ ID NO: 27949 - protein, 9 aa, Homo sapiens
  misc_feature: Table A; Target 27949; HLA-A*03:02; GPRC6A; ENSG00000173612; CTA
KITTIPNVK

SEQ ID NO: 27950 - protein, 9 aa, Homo sapiens
  misc_feature: Table A; Target 27950; HLA-A*11:01; GPRC6A; ENSG00000173612; CTA
KITTIPNVK

SEQ ID NO: 27951 - protein, 10 aa, Homo sapiens
  misc_feature: Table A; Target 27951; HLA-A*03:01; GPRC6A; ENSG00000173612; CTA
KITTIPNVKK

SEQ ID NO: 27952 - protein, 10 aa, Homo sapiens
  misc_feature: Table A; Target 27952; HLA-A*03:02; GPRC6A; ENSG00000173612; CTA
KITTIPNVKK

SEQ ID NO: 27953 - protein, 10 aa, Homo sapiens
  misc_feature: Table A; Target 27953; HLA-A*11:01; GPRC6A; ENSG00000173612; CTA
KITTIPNVKK

SEQ ID NO: 27954 - protein, 9 aa, Homo sapiens
  misc_feature: Table A; Target 27954; HLA-B*15:03; GPRC6A; ENSG00000173612; CTA
KKIGKVVGF

SEQ ID NO: 27955 - protein, 9 aa, Homo sapiens
  misc_feature: Table A; Target 27955; HLA-B*57:01; GPRC6A; ENSG00000173612; CTA
KNVTFTDGW

SEQ ID NO: 27956 - protein, 9 aa, Homo sapiens
  misc_feature: Table A; Target 27956; HLA-B*58:01; GPRC6A; ENSG00000173612; CTA
KNVTFTDGW

SEQ ID NO: 27957 - protein, 10 aa, Homo sapiens
  misc_feature: Table A; Target 27957; HLA-A*30:02; GPRC6A; ENSG00000173612; CTA
KSKDLQAQAF

SEQ ID NO: 27958 - protein, 10 aa, Homo sapiens
  misc_feature: Table A; Target 27958; HLA-A*32:01; GPRC6A; ENSG00000173612; CTA
KSKDLQAQAF

SEQ ID NO: 27959 - protein, 10 aa, Homo sapiens
  misc_feature: Table A; Target 27959; HLA-B*15:01; GPRC6A; ENSG00000173612; CTA
KSKDLQAQAF

SEQ ID NO: 27960 - protein, 10 aa, Homo sapiens
  misc_feature: Table A; Target 27960; HLA-B*15:03; GPRC6A; ENSG00000173612; CTA
KSKDLQAQAF

SEQ ID NO: 27961 - protein, 10 aa, Homo sapiens
  misc_feature: Table A; Target 27961; HLA-B*46:01; GPRC6A; ENSG00000173612; CTA
KSKDLQAQAF

SEQ ID NO: 27962 - protein, 10 aa, Homo sapiens
  misc_feature: Table A; Target 27962; HLA-B*57:01; GPRC6A; ENSG00000173612; CTA
KSKDLQAQAF

SEQ ID NO: 27963 - protein, 10 aa, Homo sapiens
  misc_feature: Table A; Target 27963; HLA-B*58:01; GPRC6A; ENSG00000173612; CTA
KSKDLQAQAF

SEQ ID NO: 27964 - protein, 10 aa, Homo sapiens
  misc_feature: Table A; Target 27964; HLA-C*01:02; GPRC6A; ENSG00000173612; CTA
KSKDLQAQAF

SEQ ID NO: 27965 - protein, 9 aa, Homo sapiens
  misc_feature: Table A; Target 27965; HLA-B*57:01; GPRC6A; ENSG00000173612; CTA
KSLKILLAF

SEQ ID NO: 27966 - protein, 9 aa, Homo sapiens
  misc_feature: Table A; Target 27966; HLA-A*31:01; GPRC6A; ENSG00000173612; CTA
KVVGFAFRR

SEQ ID NO: 27967 - protein, 10 aa, Homo sapiens
  misc_feature: Table A; Target 27967; HLA-A*23:01; GPRC6A; ENSG00000173612; CTA
KYENYNEAKF

SEQ ID NO: 27968 - protein, 10 aa, Homo sapiens
  misc_feature: Table A; Target 27968; HLA-A*24:02; GPRC6A; ENSG00000173612; CTA
KYENYNEAKF

SEQ ID NO: 27969 - protein, 8 aa, Homo sapiens
  misc_feature: Table A; Target 27969; HLA-A*23:01; GPRC6A; ENSG00000173612; CTA
KYVPAVEI

SEQ ID NO: 27970 - protein, 9 aa, Homo sapiens
  misc_feature: Table A; Target 27970; HLA-A*23:01; GPRC6A; ENSG00000173612; CTA
KYVPAVEII

SEQ ID NO: 27971 - protein, 9 aa, Homo sapiens
  misc_feature: Table A; Target 27971; HLA-A*24:02; GPRC6A; ENSG00000173612; CTA
KYVPAVEII

SEQ ID NO: 27972 - protein, 11 aa, Homo sapiens
  misc_feature: Table A; Target 27972; HLA-A*24:02; GPRC6A; ENSG00000173612; CTA
KYVPAVEIIVI

SEQ ID NO: 27973 - protein, 9 aa, Homo sapiens
  misc_feature: Table A; Target 27973; HLA-A*29:02; GPRC6A; ENSG00000173612; CTA
LAFGTMLGY

SEQ ID NO: 27974 - protein, 9 aa, Homo sapiens
  misc_feature: Table A; Target 27974; HLA-B*15:03; GPRC6A; ENSG00000173612; CTA
LAFGTMLGY

SEQ ID NO: 27975 - protein, 9 aa, Homo sapiens
  misc_feature: Table A; Target 27975; HLA-B*46:01; GPRC6A; ENSG00000173612; CTA
LAFGTMLGY

SEQ ID NO: 27976 - protein, 9 aa, Homo sapiens
  misc_feature: Table A; Target 27976; HLA-C*02:02; GPRC6A; ENSG00000173612; CTA
LAFGTMLGY

SEQ ID NO: 27977 - protein, 9 aa, Homo sapiens
  misc_feature: Table A; Target 27977; HLA-A*02:04; GPRC6A; ENSG00000173612; CTA
LAFSFDPKL

SEQ ID NO: 27978 - protein, 9 aa, Homo sapiens
  misc_feature: Table A; Target 27978; HLA-B*35:03; GPRC6A; ENSG00000173612; CTA
LAFSFDPKL

SEQ ID NO: 27979 - protein, 9 aa, Homo sapiens
  misc_feature: Table A; Target 27979; HLA-C*02:02; GPRC6A; ENSG00000173612; CTA
LAFSFDPKL

SEQ ID NO: 27980 - protein, 9 aa, Homo sapiens
  misc_feature: Table A; Target 27980; HLA-B*08:01; GPRC6A; ENSG00000173612; CTA
LAMIHSIEM

SEQ ID NO: 27981 - protein, 9 aa, Homo sapiens
  misc_feature: Table A; Target 27981; HLA-B*35:01; GPRC6A; ENSG00000173612; CTA
LAMIHSIEM

SEQ ID NO: 27982 - protein, 9 aa, Homo sapiens
  misc_feature: Table A; Target 27982; HLA-B*35:03; GPRC6A; ENSG00000173612; CTA
LAMIHSIEM

SEQ ID NO: 27983 - protein, 9 aa, Homo sapiens
  misc_feature: Table A; Target 27983; HLA-B*46:01; GPRC6A; ENSG00000173612; CTA
LAMIHSIEM

SEQ ID NO: 27984 - protein, 9 aa, Homo sapiens
  misc_feature: Table A; Target 27984; HLA-C*02:02; GPRC6A; ENSG00000173612; CTA
LAMIHSIEM

SEQ ID NO: 27985 - protein, 9 aa, Homo sapiens
  misc_feature: Table A; Target 27985; HLA-C*03:03; GPRC6A; ENSG00000173612; CTA
LAMIHSIEM

SEQ ID NO: 27986 - protein, 9 aa, Homo sapiens
  misc_feature: Table A; Target 27986; HLA-C*03:04; GPRC6A; ENSG00000173612; CTA
LAMIHSIEM

SEQ ID NO: 27987 - protein, 9 aa, Homo sapiens
  misc_feature: Table A; Target 27987; HLA-C*16:01; GPRC6A; ENSG00000173612; CTA
LAMIHSIEM

SEQ ID NO: 27988 - protein, 9 aa, Homo sapiens
  misc_feature: Table A; Target 27988; HLA-B*51:01; GPRC6A; ENSG00000173612; CTA
LAYKANKAI

SEQ ID NO: 27989 - protein, 8 aa, Homo sapiens
  misc_feature: Table A; Target 27989; HLA-B*18:01; GPRC6A; ENSG00000173612; CTA
LEAQVNVI

SEQ ID NO: 27990 - protein, 8 aa, Homo sapiens
  misc_feature: Table A; Target 27990; HLA-B*49:01; GPRC6A; ENSG00000173612; CTA
LEAQVNVI

SEQ ID NO: 27991 - protein, 9 aa, Homo sapiens
  misc_feature: Table A; Target 27991; HLA-B*49:01; GPRC6A; ENSG00000173612; CTA
LEAQVNVIV

SEQ ID NO: 27992 - protein, 10 aa, Homo sapiens
  misc_feature: Table A; Target 27992; HLA-B*49:01; GPRC6A; ENSG00000173612; CTA
LEAQVNVIVV

SEQ ID NO: 27993 - protein, 11 aa, Homo sapiens
  misc_feature: Table A; Target 27993; HLA-A*30:01; GPRC6A; ENSG00000173612; CTA
LEAQVNVIVVF

SEQ ID NO: 27994 - protein, 11 aa, Homo sapiens
  misc_feature: Table A; Target 27994; HLA-B*44:02; GPRC6A; ENSG00000173612; CTA
LEAQVNVIVVF

SEQ ID NO: 27995 - protein, 11 aa, Homo sapiens
  misc_feature: Table A; Target 27995; HLA-B*44:03; GPRC6A; ENSG00000173612; CTA
LEAQVNVIVVF

SEQ ID NO: 27996 - protein, 9 aa, Homo sapiens
  misc_feature: Table A; Target 27996; HLA-B*40:01; GPRC6A; ENSG00000173612; CTA
LECEEGSIL

SEQ ID NO: 27997 - protein, 11 aa, Homo sapiens
  misc_feature: Table A; Target 27997; HLA-B*18:01; GPRC6A; ENSG00000173612; CTA
LECEEGSILAF

SEQ ID NO: 27998 - protein, 8 aa, Homo sapiens
  misc_feature: Table A; Target 27998; HLA-C*14:02; GPRC6A; ENSG00000173612; CTA
LFNKAIEM

SEQ ID NO: 27999 - protein, 8 aa, Homo sapiens
  misc_feature: Table A; Target 27999; HLA-B*51:01; GPRC6A; ENSG00000173612; CTA
LIFAAPTV

SEQ ID NO: 28000 - protein, 10 aa, Homo sapiens
  misc_feature: Table A; Target 28000; HLA-A*68:02; GPRC6A; ENSG00000173612; CTA
LIFAAPTVEV

SEQ ID NO: 28001 - protein, 9 aa, Homo sapiens
  misc_feature: Table A; Target 28001; HLA-A*01:01; GPRC6A; ENSG00000173612; CTA
LISNYGILY

SEQ ID NO: 28002 - protein, 9 aa, Homo sapiens
  misc_feature: Table A; Target 28002; HLA-A*29:02; GPRC6A; ENSG00000173612; CTA
LISNYGILY

SEQ ID NO: 28003 - protein, 9 aa, Homo sapiens
  misc_feature: Table A; Target 28003; HLA-C*02:02; GPRC6A; ENSG00000173612; CTA
LISNYGILY

SEQ ID NO: 28004 - protein, 8 aa, Homo sapiens
  misc_feature: Table A; Target 28004; HLA-A*02:04; GPRC6A; ENSG00000173612; CTA
LLGIIFVL

SEQ ID NO: 28005 - protein, 9 aa, Homo sapiens
  misc_feature: Table A; Target 28005; HLA-A*02:04; GPRC6A; ENSG00000173612; CTA
LLGIIFVLV

SEQ ID NO: 28006 - protein, 9 aa, Homo sapiens
  misc_feature: Table A; Target 28006; HLA-A*02:07; GPRC6A; ENSG00000173612; CTA
LLGIIFVLV

SEQ ID NO: 28007 - protein, 9 aa, Homo sapiens
  misc_feature: Table A; Target 28007; HLA-A*68:02; GPRC6A; ENSG00000173612; CTA
LLGIIFVLV

SEQ ID NO: 28008 - protein, 9 aa, Homo sapiens
  misc_feature: Table A; Target 28008; HLA-A*02:01; GPRC6A; ENSG00000173612; CTA
LLHEYAMHL

SEQ ID NO: 28009 - protein, 9 aa, Homo sapiens
  misc_feature: Table A; Target 28009; HLA-A*02:03; GPRC6A; ENSG00000173612; CTA
LLHEYAMHL

SEQ ID NO: 28010 - protein, 9 aa, Homo sapiens
  misc_feature: Table A; Target 28010; HLA-A*02:04; GPRC6A; ENSG00000173612; CTA
LLHEYAMHL

SEQ ID NO: 28011 - protein, 9 aa, Homo sapiens
  misc_feature: Table A; Target 28011; HLA-A*02:07; GPRC6A; ENSG00000173612; CTA
LLHEYAMHL

SEQ ID NO: 28012 - protein, 9 aa, Homo sapiens
  misc_feature: Table A; Target 28012; HLA-A*01:01; GPRC6A; ENSG00000173612; CTA
LLPGVKLGY

SEQ ID NO: 28013 - protein, 9 aa, Homo sapiens
  misc_feature: Table A; Target 28013; HLA-A*29:02; GPRC6A; ENSG00000173612; CTA
LLPGVKLGY

SEQ ID NO: 28014 - protein, 11 aa, Homo sapiens
  misc_feature: Table A; Target 28014; HLA-A*02:07; GPRC6A; ENSG00000173612; CTA
LLPGVKLGYEI

SEQ ID NO: 28015 - protein, 9 aa, Homo sapiens
  misc_feature: Table A; Target 28015; HLA-A*02:07; GPRC6A; ENSG00000173612; CTA
LLPSDSHKL

SEQ ID NO: 28016 - protein, 9 aa, Homo sapiens
  misc_feature: Table A; Target 28016; HLA-A*24:02; GPRC6A; ENSG00000173612; CTA
LLPSDSHKL

SEQ ID NO: 28017 - protein, 8 aa, Homo sapiens
  misc_feature: Table A; Target 28017; HLA-B*46:01; GPRC6A; ENSG00000173612; CTA
LNFASTSF

SEQ ID NO: 28018 - protein, 10 aa, Homo sapiens
  misc_feature: Table A; Target 28018; HLA-B*35:03; GPRC6A; ENSG00000173612; CTA
LPAFLSDNTI

SEQ ID NO: 28019 - protein, 10 aa, Homo sapiens
  misc_feature: Table A; Target 28019; HLA-B*51:01; GPRC6A; ENSG00000173612; CTA
LPAFLSDNTI

SEQ ID NO: 28020 - protein, 8 aa, Homo sapiens
  misc_feature: Table A; Target 28020; HLA-B*35:01; GPRC6A; ENSG00000173612; CTA
LPGVKLGY

SEQ ID NO: 28021 - protein, 9 aa, Homo sapiens
  misc_feature: Table A; Target 28021; HLA-B*07:02; GPRC6A; ENSG00000173612; CTA
LPRKRMSSI

SEQ ID NO: 28022 - protein, 9 aa, Homo sapiens
  misc_feature: Table A; Target 28022; HLA-B*08:01; GPRC6A; ENSG00000173612; CTA
LPRKRMSSI

SEQ ID NO: 28023 - protein, 9 aa, Homo sapiens
  misc_feature: Table A; Target 28023; HLA-B*51:01; GPRC6A; ENSG00000173612; CTA
LPRKRMSSI

SEQ ID NO: 28024 - protein, 9 aa, Homo sapiens
  misc_feature: Table A; Target 28024; HLA-B*07:02; GPRC6A; ENSG00000173612; CTA
LPRVIILEC

SEQ ID NO: 28025 - protein, 9 aa, Homo sapiens
  misc_feature: Table A; Target 28025; HLA-B*51:01; GPRC6A; ENSG00000173612; CTA
LPRVIILEC

SEQ ID NO: 28026 - protein, 9 aa, Homo sapiens
  misc_feature: Table A; Target 28026; HLA-B*54:01; GPRC6A; ENSG00000173612; CTA
LPRVIILEC

SEQ ID NO: 28027 - protein, 9 aa, Homo sapiens
  misc_feature: Table A; Target 28027; HLA-B*56:01; GPRC6A; ENSG00000173612; CTA
LPRVIILEC

SEQ ID NO: 28028 - protein, 8 aa, Homo sapiens
  misc_feature: Table A; Target 28028; HLA-B*35:03; GPRC6A; ENSG00000173612; CTA
LPSDSHKL

SEQ ID NO: 28029 - protein, 9 aa, Homo sapiens
  misc_feature: Table A; Target 28029; HLA-B*07:02; GPRC6A; ENSG00000173612; CTA
LPSDSHKLL

SEQ ID NO: 28030 - protein, 9 aa, Homo sapiens
  misc_feature: Table A; Target 28030; HLA-B*35:03; GPRC6A; ENSG00000173612; CTA
LPSDSHKLL

SEQ ID NO: 28031 - protein, 9 aa, Homo sapiens
  misc_feature: Table A; Target 28031; HLA-B*51:01; GPRC6A; ENSG00000173612; CTA
LPSDSHKLL

SEQ ID NO: 28032 - protein, 9 aa, Homo sapiens
  misc_feature: Table A; Target 28032; HLA-C*07:02; GPRC6A; ENSG00000173612; CTA
LPSDSHKLL

SEQ ID NO: 28033 - protein, 9 aa, Homo sapiens
  misc_feature: Table A; Target 28033; HLA-A*24:02; GPRC6A; ENSG00000173612; CTA
LQAQAFAHI

SEQ ID NO: 28034 - protein, 9 aa, Homo sapiens
  misc_feature: Table A; Target 28034; HLA-B*13:02; GPRC6A; ENSG00000173612; CTA
LQAQAFAHI

SEQ ID NO: 28035 - protein, 9 aa, Homo sapiens
  misc_feature: Table A; Target 28035; HLA-B*38:01; GPRC6A; ENSG00000173612; CTA
LQAQAFAHI

SEQ ID NO: 28036 - protein, 9 aa, Homo sapiens
  misc_feature: Table A; Target 28036; HLA-A*30:02; GPRC6A; ENSG00000173612; CTA
LQLMPQVGY

SEQ ID NO: 28037 - protein, 9 aa, Homo sapiens
  misc_feature: Table A; Target 28037; HLA-B*15:01; GPRC6A; ENSG00000173612; CTA
LQLMPQVGY

SEQ ID NO: 28038 - protein, 9 aa, Homo sapiens
  misc_feature: Table A; Target 28038; HLA-B*15:03; GPRC6A; ENSG00000173612; CTA
LQLMPQVGY

SEQ ID NO: 28039 - protein, 9 aa, Homo sapiens
  misc_feature: Table A; Target 28039; HLA-C*07:04; GPRC6A; ENSG00000173612; CTA
LQLMPQVGY

SEQ ID NO: 28040 - protein, 8 aa, Homo sapiens
  misc_feature: Table A; Target 28040; HLA-A*01:01; GPRC6A; ENSG00000173612; CTA
LSDNTIEV

SEQ ID NO: 28041 - protein, 8 aa, Homo sapiens
  misc_feature: Table A; Target 28041; HLA-C*05:01; GPRC6A; ENSG00000173612; CTA
LSDNTIEV

SEQ ID NO: 28042 - protein, 9 aa, Homo sapiens
  misc_feature: Table A; Target 28042; HLA-B*46:01; GPRC6A; ENSG00000173612; CTA
LSPASLDSM

SEQ ID NO: 28043 - protein, 9 aa, Homo sapiens
  misc_feature: Table A; Target 28043; HLA-C*01:02; GPRC6A; ENSG00000173612; CTA
LSPASLDSM

SEQ ID NO: 28044 - protein, 9 aa, Homo sapiens
  misc_feature: Table A; Target 28044; HLA-A*31:01; GPRC6A; ENSG00000173612; CTA
LVVGIIFTR

SEQ ID NO: 28045 - protein, 9 aa, Homo sapiens
  misc_feature: Table A; Target 28045; HLA-A*33:03; GPRC6A; ENSG00000173612; CTA
LVVGIIFTR

SEQ ID NO: 28046 - protein, 9 aa, Homo sapiens
  misc_feature: Table A; Target 28046; HLA-A*68:01; GPRC6A; ENSG00000173612; CTA
LVVGIIFTR

SEQ ID NO: 28047 - protein, 9 aa, Homo sapiens
  misc_feature: Table A; Target 28047; HLA-A*68:02; GPRC6A; ENSG00000173612; CTA
LVVGIIFTR

SEQ ID NO: 28048 - protein, 9 aa, Homo sapiens
  misc_feature: Table A; Target 28048; HLA-C*07:06; GPRC6A; ENSG00000173612; CTA
LVVGIIFTR

SEQ ID NO: 28049 - protein, 9 aa, Homo sapiens
  misc_feature: Table A; Target 28049; HLA-A*24:02; GPRC6A; ENSG00000173612; CTA
LYRPILIIF

SEQ ID NO: 28050 - protein, 9 aa, Homo sapiens
  misc_feature: Table A; Target 28050; HLA-B*57:01; GPRC6A; ENSG00000173612; CTA
LYRPILIIF

SEQ ID NO: 28051 - protein, 8 aa, Homo sapiens
  misc_feature: Table A; Target 28051; HLA-B*51:01; GPRC6A; ENSG00000173612; CTA
MAFLIILI

SEQ ID NO: 28052 - protein, 9 aa, Homo sapiens
  misc_feature: Table A; Target 28052; HLA-B*08:01; GPRC6A; ENSG00000173612; CTA
MAVSRMLNL

SEQ ID NO: 28053 - protein, 9 aa, Homo sapiens
  misc_feature: Table A; Target 28053; HLA-C*02:02; GPRC6A; ENSG00000173612; CTA
MAVSRMLNL

SEQ ID NO: 28054 - protein, 9 aa, Homo sapiens
  misc_feature: Table A; Target 28054; HLA-C*03:03; GPRC6A; ENSG00000173612; CTA
MAVSRMLNL

SEQ ID NO: 28055 - protein, 9 aa, Homo sapiens
  misc_feature: Table A; Target 28055; HLA-C*03:04; GPRC6A; ENSG00000173612; CTA
MAVSRMLNL

SEQ ID NO: 28056 - protein, 9 aa, Homo sapiens
  misc_feature: Table A; Target 28056; HLA-B*15:01; GPRC6A; ENSG00000173612; CTA
MCFEKEVEY

SEQ ID NO: 28057 - protein, 9 aa, Homo sapiens
  misc_feature: Table A; Target 28057; HLA-B*15:03; GPRC6A; ENSG00000173612; CTA
MCFEKEVEY

SEQ ID NO: 28058 - protein, 9 aa, Homo sapiens
  misc_feature: Table A; Target 28058; HLA-B*35:01; GPRC6A; ENSG00000173612; CTA
MCFEKEVEY

SEQ ID NO: 28059 - protein, 9 aa, Homo sapiens
  misc_feature: Table A; Target 28059; HLA-B*46:01; GPRC6A; ENSG00000173612; CTA
MCFEKEVEY

SEQ ID NO: 28060 - protein, 9 aa, Homo sapiens
  misc_feature: Table A; Target 28060; HLA-C*16:01; GPRC6A; ENSG00000173612; CTA
MCFEKEVEY

SEQ ID NO: 28061 - protein, 8 aa, Homo sapiens
  misc_feature: Table A; Target 28061; HLA-A*23:01; GPRC6A; ENSG00000173612; CTA
MFGVSFTL

SEQ ID NO: 28062 - protein, 8 aa, Homo sapiens
  misc_feature: Table A; Target 28062; HLA-B*35:01; GPRC6A; ENSG00000173612; CTA
MFGVSFTL

SEQ ID NO: 28063 - protein, 8 aa, Homo sapiens
  misc_feature: Table A; Target 28063; HLA-B*35:03; GPRC6A; ENSG00000173612; CTA
MFGVSFTL

SEQ ID NO: 28064 - protein, 8 aa, Homo sapiens
  misc_feature: Table A; Target 28064; HLA-C*14:02; GPRC6A; ENSG00000173612; CTA
MFGVSFTL

SEQ ID NO: 28065 - protein, 8 aa, Homo sapiens
  misc_feature: Table A; Target 28065; HLA-A*23:01; GPRC6A; ENSG00000173612; CTA
MINNSTLL

SEQ ID NO: 28066 - protein, 9 aa, Homo sapiens
  misc_feature: Table A; Target 28066; HLA-B*35:01; GPRC6A; ENSG00000173612; CTA
MPQVGYEST

SEQ ID NO: 28067 - protein, 9 aa, Homo sapiens
  misc_feature: Table A; Target 28067; HLA-B*35:03; GPRC6A; ENSG00000173612; CTA
MPQVGYEST

SEQ ID NO: 28068 - protein, 9 aa, Homo sapiens
  misc_feature: Table A; Target 28068; HLA-B*54:01; GPRC6A; ENSG00000173612; CTA
MPQVGYEST

SEQ ID NO: 28069 - protein, 9 aa, Homo sapiens
  misc_feature: Table A; Target 28069; HLA-B*55:01; GPRC6A; ENSG00000173612; CTA
MPQVGYEST

SEQ ID NO: 28070 - protein, 9 aa, Homo sapiens
  misc_feature: Table A; Target 28070; HLA-B*56:01; GPRC6A; ENSG00000173612; CTA
MPQVGYEST

SEQ ID NO: 28071 - protein, 10 aa, Homo sapiens
  misc_feature: Table A; Target 28071; HLA-B*35:01; GPRC6A; ENSG00000173612; CTA
MPQVGYESTA

SEQ ID NO: 28072 - protein, 10 aa, Homo sapiens
  misc_feature: Table A; Target 28072; HLA-B*35:03; GPRC6A; ENSG00000173612; CTA
MPQVGYESTA

SEQ ID NO: 28073 - protein, 10 aa, Homo sapiens
  misc_feature: Table A; Target 28073; HLA-B*54:01; GPRC6A; ENSG00000173612; CTA
MPQVGYESTA

SEQ ID NO: 28074 - protein, 10 aa, Homo sapiens
  misc_feature: Table A; Target 28074; HLA-B*55:01; GPRC6A; ENSG00000173612; CTA
MPQVGYESTA

SEQ ID NO: 28075 - protein, 10 aa, Homo sapiens
  misc_feature: Table A; Target 28075; HLA-B*56:01; GPRC6A; ENSG00000173612; CTA
MPQVGYESTA

SEQ ID NO: 28076 - protein, 8 aa, Homo sapiens
  misc_feature: Table A; Target 28076; HLA-B*07:02; GPRC6A; ENSG00000173612; CTA
MPRVKAVI

SEQ ID NO: 28077 - protein, 8 aa, Homo sapiens
  misc_feature: Table A; Target 28077; HLA-B*08:01; GPRC6A; ENSG00000173612; CTA
MPRVKAVI

SEQ ID NO: 28078 - protein, 8 aa, Homo sapiens
  misc_feature: Table A; Target 28078; HLA-B*51:01; GPRC6A; ENSG00000173612; CTA
MPRVKAVI

SEQ ID NO: 28079 - protein, 8 aa, Homo sapiens
  misc_feature: Table A; Target 28079; HLA-C*07:02; GPRC6A; ENSG00000173612; CTA
MPRVKAVI

SEQ ID NO: 28080 - protein, 9 aa, Homo sapiens
  misc_feature: Table A; Target 28080; HLA-A*03:01; GPRC6A; ENSG00000173612; CTA
MTNPSSSGK

SEQ ID NO: 28081 - protein, 9 aa, Homo sapiens
  misc_feature: Table A; Target 28081; HLA-A*03:02; GPRC6A; ENSG00000173612; CTA
MTNPSSSGK

SEQ ID NO: 28082 - protein, 9 aa, Homo sapiens
  misc_feature: Table A; Target 28082; HLA-A*11:01; GPRC6A; ENSG00000173612; CTA
MTNPSSSGK

SEQ ID NO: 28083 - protein, 9 aa, Homo sapiens
  misc_feature: Table A; Target 28083; HLA-A*01:01; GPRC6A; ENSG00000173612; CTA
MTVTKMAEY

SEQ ID NO: 28084 - protein, 9 aa, Homo sapiens
  misc_feature: Table A; Target 28084; HLA-A*25:01; GPRC6A; ENSG00000173612; CTA
MTVTKMAEY

SEQ ID NO: 28085 - protein, 9 aa, Homo sapiens
  misc_feature: Table A; Target 28085; HLA-A*26:01; GPRC6A; ENSG00000173612; CTA
MTVTKMAEY

SEQ ID NO: 28086 - protein, 9 aa, Homo sapiens
  misc_feature: Table A; Target 28086; HLA-A*29:02; GPRC6A; ENSG00000173612; CTA
MTVTKMAEY

SEQ ID NO: 28087 - protein, 9 aa, Homo sapiens
  misc_feature: Table A; Target 28087; HLA-A*30:02; GPRC6A; ENSG00000173612; CTA
MTVTKMAEY

SEQ ID NO: 28088 - protein, 9 aa, Homo sapiens
  misc_feature: Table A; Target 28088; HLA-A*32:01; GPRC6A; ENSG00000173612; CTA
MTVTKMAEY

SEQ ID NO: 28089 - protein, 9 aa, Homo sapiens
  misc_feature: Table A; Target 28089; HLA-B*46:01; GPRC6A; ENSG00000173612; CTA
MTVTKMAEY

SEQ ID NO: 28090 - protein, 9 aa, Homo sapiens
  misc_feature: Table A; Target 28090; HLA-B*58:01; GPRC6A; ENSG00000173612; CTA
MTVTKMAEY

SEQ ID NO: 28091 - protein, 9 aa, Homo sapiens
  misc_feature: Table A; Target 28091; HLA-C*02:02; GPRC6A; ENSG00000173612; CTA
MTVTKMAEY

SEQ ID NO: 28092 - protein, 8 aa, Homo sapiens
  misc_feature: Table A; Target 28092; HLA-C*16:02; GPRC6A; ENSG00000173612; CTA
NATSVSKT

SEQ ID NO: 28093 - protein, 9 aa, Homo sapiens
  misc_feature: Table A; Target 28093; HLA-A*23:01; GPRC6A; ENSG00000173612; CTA
NATSVSKTL

SEQ ID NO: 28094 - protein, 9 aa, Homo sapiens
  misc_feature: Table A; Target 28094; HLA-A*30:01; GPRC6A; ENSG00000173612; CTA
NATSVSKTL

SEQ ID NO: 28095 - protein, 9 aa, Homo sapiens
  misc_feature: Table A; Target 28095; HLA-B*07:02; GPRC6A; ENSG00000173612; CTA
NATSVSKTL

SEQ ID NO: 28096 - protein, 9 aa, Homo sapiens
  misc_feature: Table A; Target 28096; HLA-B*35:01; GPRC6A; ENSG00000173612; CTA
NATSVSKTL

SEQ ID NO: 28097 - protein, 9 aa, Homo sapiens
  misc_feature: Table A; Target 28097; HLA-B*35:03; GPRC6A; ENSG00000173612; CTA
NATSVSKTL

SEQ ID NO: 28098 - protein, 9 aa, Homo sapiens
  misc_feature: Table A; Target 28098; HLA-B*39:01; GPRC6A; ENSG00000173612; CTA
NATSVSKTL

SEQ ID NO: 28099 - protein, 9 aa, Homo sapiens
  misc_feature: Table A; Target 28099; HLA-B*40:01; GPRC6A; ENSG00000173612; CTA
NATSVSKTL

SEQ ID NO: 28100 - protein, 9 aa, Homo sapiens
  misc_feature: Table A; Target 28100; HLA-B*58:01; GPRC6A; ENSG00000173612; CTA
NATSVSKTL

SEQ ID NO: 28101 - protein, 9 aa, Homo sapiens
  misc_feature: Table A; Target 28101; HLA-C*01:02; GPRC6A; ENSG00000173612; CTA
NATSVSKTL

SEQ ID NO: 28102 - protein, 9 aa, Homo sapiens
  misc_feature: Table A; Target 28102; HLA-C*02:02; GPRC6A; ENSG00000173612; CTA
NATSVSKTL

SEQ ID NO: 28103 - protein, 9 aa, Homo sapiens
  misc_feature: Table A; Target 28103; HLA-C*03:03; GPRC6A; ENSG00000173612; CTA
NATSVSKTL

SEQ ID NO: 28104 - protein, 9 aa, Homo sapiens
  misc_feature: Table A; Target 28104; HLA-C*03:04; GPRC6A; ENSG00000173612; CTA
NATSVSKTL

SEQ ID NO: 28105 - protein, 9 aa, Homo sapiens
  misc_feature: Table A; Target 28105; HLA-C*05:01; GPRC6A; ENSG00000173612; CTA
NATSVSKTL

SEQ ID NO: 28106 - protein, 9 aa, Homo sapiens
  misc_feature: Table A; Target 28106; HLA-C*07:06; GPRC6A; ENSG00000173612; CTA
NATSVSKTL

SEQ ID NO: 28107 - protein, 9 aa, Homo sapiens
  misc_feature: Table A; Target 28107; HLA-C*12:03; GPRC6A; ENSG00000173612; CTA
NATSVSKTL

SEQ ID NO: 28108 - protein, 9 aa, Homo sapiens
  misc_feature: Table A; Target 28108; HLA-C*14:02; GPRC6A; ENSG00000173612; CTA
NATSVSKTL

SEQ ID NO: 28109 - protein, 9 aa, Homo sapiens
  misc_feature: Table A; Target 28109; HLA-C*16:01; GPRC6A; ENSG00000173612; CTA
NATSVSKTL

SEQ ID NO: 28110 - protein, 9 aa, Homo sapiens
  misc_feature: Table A; Target 28110; HLA-C*16:02; GPRC6A; ENSG00000173612; CTA
NATSVSKTL

SEQ ID NO: 28111 - protein, 9 aa, Homo sapiens
  misc_feature: Table A; Target 28111; HLA-C*16:04; GPRC6A; ENSG00000173612; CTA
NATSVSKTL

SEQ ID NO: 28112 - protein, 11 aa, Homo sapiens
  misc_feature: Table A; Target 28112; HLA-A*33:01; GPRC6A; ENSG00000173612; CTA
NATSVSKTLPR

SEQ ID NO: 28113 - protein, 11 aa, Homo sapiens
  misc_feature: Table A; Target 28113; HLA-A*33:03; GPRC6A; ENSG00000173612; CTA
NATSVSKTLPR

SEQ ID NO: 28114 - protein, 11 aa, Homo sapiens
  misc_feature: Table A; Target 28114; HLA-A*68:01; GPRC6A; ENSG00000173612; CTA
NATSVSKTLPR

SEQ ID NO: 28115 - protein, 8 aa, Homo sapiens
  misc_feature: Table A; Target 28115; HLA-B*18:01; GPRC6A; ENSG00000173612; CTA
NDSLAILL

SEQ ID NO: 28116 - protein, 8 aa, Homo sapiens
  misc_feature: Table A; Target 28116; HLA-B*37:01; GPRC6A; ENSG00000173612; CTA
NDSLAILL

SEQ ID NO: 28117 - protein, 8 aa, Homo sapiens
  misc_feature: Table A; Target 28117; HLA-A*30:01; GPRC6A; ENSG00000173612; CTA
NEAKFITF

SEQ ID NO: 28118 - protein, 8 aa, Homo sapiens
  misc_feature: Table A; Target 28118; HLA-B*18:01; GPRC6A; ENSG00000173612; CTA
NEAKFITF

SEQ ID NO: 28119 - protein, 8 aa, Homo sapiens
  misc_feature: Table A; Target 28119; HLA-B*37:01; GPRC6A; ENSG00000173612; CTA
NEAKFITF

SEQ ID NO: 28120 - protein, 8 aa, Homo sapiens
  misc_feature: Table A; Target 28120; HLA-B*44:02; GPRC6A; ENSG00000173612; CTA
NEAKFITF

SEQ ID NO: 28121 - protein, 8 aa, Homo sapiens
  misc_feature: Table A; Target 28121; HLA-B*44:03; GPRC6A; ENSG00000173612; CTA
NEAKFITF

SEQ ID NO: 28122 - protein, 8 aa, Homo sapiens
  misc_feature: Table A; Target 28122; HLA-B*49:01; GPRC6A; ENSG00000173612; CTA
NEAKFITF

SEQ ID NO: 28123 - protein, 9 aa, Homo sapiens
  misc_feature: Table A; Target 28123; HLA-B*44:02; GPRC6A; ENSG00000173612; CTA
NEFRNLKQI

SEQ ID NO: 28124 - protein, 9 aa, Homo sapiens
  misc_feature: Table A; Target 28124; HLA-B*44:03; GPRC6A; ENSG00000173612; CTA
NEFRNLKQI

SEQ ID NO: 28125 - protein, 9 aa, Homo sapiens
  misc_feature: Table A; Target 28125; HLA-B*49:01; GPRC6A; ENSG00000173612; CTA
NEFRNLKQI

SEQ ID NO: 28126 - protein, 8 aa, Homo sapiens
  misc_feature: Table A; Target 28126; HLA-C*14:02; GPRC6A; ENSG00000173612; CTA
NFASTSFF

SEQ ID NO: 28127 - protein, 9 aa, Homo sapiens
  misc_feature: Table A; Target 28127; HLA-C*16:01; GPRC6A; ENSG00000173612; CTA
NHSQRTLAY

SEQ ID NO: 28128 - protein, 9 aa, Homo sapiens
  misc_feature: Table A; Target 28128; HLA-B*39:01; GPRC6A; ENSG00000173612; CTA
NHYTNQTDM

SEQ ID NO: 28129 - protein, 9 aa, Homo sapiens
  misc_feature: Table A; Target 28129; HLA-A*68:02; GPRC6A; ENSG00000173612; CTA
NISSFHSFL

SEQ ID NO: 28130 - protein, 8 aa, Homo sapiens
  misc_feature: Table A; Target 28130; HLA-A*03:02; GPRC6A; ENSG00000173612; CTA
NLNTPVVK

SEQ ID NO: 28131 - protein, 10 aa, Homo sapiens
  misc_feature: Table A; Target 28131; HLA-A*30:02; GPRC6A; ENSG00000173612; CTA
NLQLMPQVGY

SEQ ID NO: 28132 - protein, 10 aa, Homo sapiens
  misc_feature: Table A; Target 28132; HLA-B*35:03; GPRC6A; ENSG00000173612; CTA
NPNAFQPWEL

SEQ ID NO: 28133 - protein, 9 aa, Homo sapiens
  misc_feature: Table A; Target 28133; HLA-B*07:02; GPRC6A; ENSG00000173612; CTA
NPSSSGKSA

SEQ ID NO: 28134 - protein, 9 aa, Homo sapiens
  misc_feature: Table A; Target 28134; HLA-B*55:01; GPRC6A; ENSG00000173612; CTA
NPSSSGKSA

SEQ ID NO: 28135 - protein, 9 aa, Homo sapiens
  misc_feature: Table A; Target 28135; HLA-B*56:01; GPRC6A; ENSG00000173612; CTA
NPSSSGKSA

SEQ ID NO: 28136 - protein, 11 aa, Homo sapiens
  misc_feature: Table A; Target 28136; HLA-A*25:01; GPRC6A; ENSG00000173612; CTA
NPSSSGKSATW

SEQ ID NO: 28137 - protein, 11 aa, Homo sapiens
  misc_feature: Table A; Target 28137; HLA-B*07:02; GPRC6A; ENSG00000173612; CTA
NPSSSGKSATW

SEQ ID NO: 28138 - protein, 11 aa, Homo sapiens
  misc_feature: Table A; Target 28138; HLA-B*35:01; GPRC6A; ENSG00000173612; CTA
NPSSSGKSATW

SEQ ID NO: 28139 - protein, 11 aa, Homo sapiens
  misc_feature: Table A; Target 28139; HLA-C*07:02; GPRC6A; ENSG00000173612; CTA
NPSSSGKSATW

SEQ ID NO: 28140 - protein, 9 aa, Homo sapiens
  misc_feature: Table A; Target 28140; HLA-B*27:05; GPRC6A; ENSG00000173612; CTA
NQTDMPHCL

SEQ ID NO: 28141 - protein, 9 aa, Homo sapiens
  misc_feature: Table A; Target 28141; HLA-B*38:01; GPRC6A; ENSG00000173612; CTA
NQTDMPHCL

SEQ ID NO: 28142 - protein, 9 aa, Homo sapiens
  misc_feature: Table A; Target 28142; HLA-B*39:01; GPRC6A; ENSG00000173612; CTA
NQTDMPHCL

SEQ ID NO: 28143 - protein, 9 aa, Homo sapiens
  misc_feature: Table A; Target 28143; HLA-A*68:02; GPRC6A; ENSG00000173612; CTA
NTFIIQAEA

SEQ ID NO: 28144 - protein, 9 aa, Homo sapiens
  misc_feature: Table A; Target 28144; HLA-B*54:01; GPRC6A; ENSG00000173612; CTA
NTFIIQAEA

SEQ ID NO: 28145 - protein, 9 aa, Homo sapiens
  misc_feature: Table A; Target 28145; HLA-A*11:01; GPRC6A; ENSG00000173612; CTA
NTIEVRINR

SEQ ID NO: 28146 - protein, 9 aa, Homo sapiens
  misc_feature: Table A; Target 28146; HLA-A*31:01; GPRC6A; ENSG00000173612; CTA
NTIEVRINR

SEQ ID NO: 28147 - protein, 9 aa, Homo sapiens
  misc_feature: Table A; Target 28147; HLA-A*33:01; GPRC6A; ENSG00000173612; CTA
NTIEVRINR

SEQ ID NO: 28148 - protein, 9 aa, Homo sapiens
  misc_feature: Table A; Target 28148; HLA-A*33:03; GPRC6A; ENSG00000173612; CTA
NTIEVRINR

SEQ ID NO: 28149 - protein, 9 aa, Homo sapiens
  misc_feature: Table A; Target 28149; HLA-A*68:01; GPRC6A; ENSG00000173612; CTA
NTIEVRINR

SEQ ID NO: 28150 - protein, 9 aa, Homo sapiens
  misc_feature: Table A; Target 28150; HLA-A*68:02; GPRC6A; ENSG00000173612; CTA
NTIEVRINR

SEQ ID NO: 28151 - protein, 9 aa, Homo sapiens
  misc_feature: Table A; Target 28151; HLA-B*57:01; GPRC6A; ENSG00000173612; CTA
NTIEVRINR

SEQ ID NO: 28152 - protein, 9 aa, Homo sapiens
  misc_feature: Table A; Target 28152; HLA-C*07:06; GPRC6A; ENSG00000173612; CTA
NTIEVRINR

SEQ ID NO: 28153 - protein, 9 aa, Homo sapiens
  misc_feature: Table A; Target 28153; HLA-A*24:02; GPRC6A; ENSG00000173612; CTA
NYGILYCTF

SEQ ID NO: 28154 - protein, 10 aa, Homo sapiens
  misc_feature: Table A; Target 28154; HLA-A*23:01; GPRC6A; ENSG00000173612; CTA
NYNEAKFITF

SEQ ID NO: 28155 - protein, 10 aa, Homo sapiens
  misc_feature: Table A; Target 28155; HLA-A*24:02; GPRC6A; ENSG00000173612; CTA
NYNEAKFITF

SEQ ID NO: 28156 - protein, 10 aa, Homo sapiens
  misc_feature: Table A; Target 28156; HLA-A*33:01; GPRC6A; ENSG00000173612; CTA
NYNEAKFITF

SEQ ID NO: 28157 - protein, 10 aa, Homo sapiens
  misc_feature: Table A; Target 28157; HLA-A*33:03; GPRC6A; ENSG00000173612; CTA
NYNEAKFITF

SEQ ID NO: 28158 - protein, 10 aa, Homo sapiens
  misc_feature: Table A; Target 28158; HLA-C*14:02; GPRC6A; ENSG00000173612; CTA
NYNEAKFITF

SEQ ID NO: 28159 - protein, 10 aa, Homo sapiens
  misc_feature: Table A; Target 28159; HLA-B*58:01; GPRC6A; ENSG00000173612; CTA
PSSSGKSATW

SEQ ID NO: 28160 - protein, 11 aa, Homo sapiens
  misc_feature: Table A; Target 28160; HLA-A*68:01; GPRC6A; ENSG00000173612; CTA
PTVEVNVSLPR

SEQ ID NO: 28161 - protein, 8 aa, Homo sapiens
  misc_feature: Table A; Target 28161; HLA-B*51:01; GPRC6A; ENSG00000173612; CTA
QAQAFAHI

SEQ ID NO: 28162 - protein, 9 aa, Homo sapiens
  misc_feature: Table A; Target 28162; HLA-C*12:03; GPRC6A; ENSG00000173612; CTA
QAQAFAHIC

SEQ ID NO: 28163 - protein, 10 aa, Homo sapiens
  misc_feature: Table A; Target 28163; HLA-A*33:03; GPRC6A; ENSG00000173612; CTA
QAQAFAHICR

SEQ ID NO: 28164 - protein, 9 aa, Homo sapiens
  misc_feature: Table A; Target 28164; HLA-A*25:01; GPRC6A; ENSG00000173612; CTA
QEINTKSAF

SEQ ID NO: 28165 - protein, 9 aa, Homo sapiens
  misc_feature: Table A; Target 28165; HLA-A*30:01; GPRC6A; ENSG00000173612; CTA
QEINTKSAF

SEQ ID NO: 28166 - protein, 9 aa, Homo sapiens
  misc_feature: Table A; Target 28166; HLA-A*32:01; GPRC6A; ENSG00000173612; CTA
QEINTKSAF

SEQ ID NO: 28167 - protein, 9 aa, Homo sapiens
  misc_feature: Table A; Target 28167; HLA-B*15:01; GPRC6A; ENSG00000173612; CTA
QEINTKSAF

SEQ ID NO: 28168 - protein, 9 aa, Homo sapiens
  misc_feature: Table A; Target 28168; HLA-B*15:03; GPRC6A; ENSG00000173612; CTA
QEINTKSAF

SEQ ID NO: 28169 - protein, 9 aa, Homo sapiens
  misc_feature: Table A; Target 28169; HLA-B*18:01; GPRC6A; ENSG00000173612; CTA
QEINTKSAF

SEQ ID NO: 28170 - protein, 9 aa, Homo sapiens
  misc_feature: Table A; Target 28170; HLA-B*27:02; GPRC6A; ENSG00000173612; CTA
QEINTKSAF

SEQ ID NO: 28171 - protein, 9 aa, Homo sapiens
  misc_feature: Table A; Target 28171; HLA-B*37:01; GPRC6A; ENSG00000173612; CTA
QEINTKSAF

SEQ ID NO: 28172 - protein, 9 aa, Homo sapiens
  misc_feature: Table A; Target 28172; HLA-B*40:01; GPRC6A; ENSG00000173612; CTA
QEINTKSAF

SEQ ID NO: 28173 - protein, 9 aa, Homo sapiens
  misc_feature: Table A; Target 28173; HLA-B*44:02; GPRC6A; ENSG00000173612; CTA
QEINTKSAF

SEQ ID NO: 28174 - protein, 9 aa, Homo sapiens
  misc_feature: Table A; Target 28174; HLA-B*44:03; GPRC6A; ENSG00000173612; CTA
QEINTKSAF

SEQ ID NO: 28175 - protein, 9 aa, Homo sapiens
  misc_feature: Table A; Target 28175; HLA-B*49:01; GPRC6A; ENSG00000173612; CTA
QEINTKSAF

SEQ ID NO: 28176 - protein, 9 aa, Homo sapiens
  misc_feature: Table A; Target 28176; HLA-C*16:04; GPRC6A; ENSG00000173612; CTA
QEINTKSAF

SEQ ID NO: 28177 - protein, 10 aa, Homo sapiens
  misc_feature: Table A; Target 28177; HLA-B*40:01; GPRC6A; ENSG00000173612; CTA
QEINTKSAFL

SEQ ID NO: 28178 - protein, 10 aa, Homo sapiens
  misc_feature: Table A; Target 28178; HLA-B*44:02; GPRC6A; ENSG00000173612; CTA
QEINTKSAFL

SEQ ID NO: 28179 - protein, 10 aa, Homo sapiens
  misc_feature: Table A; Target 28179; HLA-B*44:03; GPRC6A; ENSG00000173612; CTA
QEINTKSAFL

SEQ ID NO: 28180 - protein, 10 aa, Homo sapiens
  misc_feature: Table A; Target 28180; HLA-B*49:01; GPRC6A; ENSG00000173612; CTA
QEINTKSAFL

SEQ ID NO: 28181 - protein, 9 aa, Homo sapiens
  misc_feature: Table A; Target 28181; HLA-A*01:01; GPRC6A; ENSG00000173612; CTA
QLAVFALGY

SEQ ID NO: 28182 - protein, 9 aa, Homo sapiens
  misc_feature: Table A; Target 28182; HLA-A*03:01; GPRC6A; ENSG00000173612; CTA
QLAVFALGY

SEQ ID NO: 28183 - protein, 9 aa, Homo sapiens
  misc_feature: Table A; Target 28183; HLA-A*26:01; GPRC6A; ENSG00000173612; CTA
QLAVFALGY

SEQ ID NO: 28184 - protein, 9 aa, Homo sapiens
  misc_feature: Table A; Target 28184; HLA-A*29:02; GPRC6A; ENSG00000173612; CTA
QLAVFALGY

SEQ ID NO: 28185 - protein, 9 aa, Homo sapiens
  misc_feature: Table A; Target 28185; HLA-A*30:02; GPRC6A; ENSG00000173612; CTA
QLAVFALGY

SEQ ID NO: 28186 - protein, 9 aa, Homo sapiens
  misc_feature: Table A; Target 28186; HLA-B*15:01; GPRC6A; ENSG00000173612; CTA
QLAVFALGY

SEQ ID NO: 28187 - protein, 9 aa, Homo sapiens
  misc_feature: Table A; Target 28187; HLA-B*15:03; GPRC6A; ENSG00000173612; CTA
QLAVFALGY

SEQ ID NO: 28188 - protein, 8 aa, Homo sapiens
  misc_feature: Table A; Target 28188; HLA-A*30:02; GPRC6A; ENSG00000173612; CTA
QLMPQVGY

SEQ ID NO: 28189 - protein, 8 aa, Homo sapiens
  misc_feature: Table A; Target 28189; HLA-B*15:01; GPRC6A; ENSG00000173612; CTA
QLMPQVGY

SEQ ID NO: 28190 - protein, 8 aa, Homo sapiens
  misc_feature: Table A; Target 28190; HLA-B*15:03; GPRC6A; ENSG00000173612; CTA
QLMPQVGY

SEQ ID NO: 28191 - protein, 9 aa, Homo sapiens
  misc_feature: Table A; Target 28191; HLA-A*01:01; GPRC6A; ENSG00000173612; CTA
QTDMPHCLL

SEQ ID NO: 28192 - protein, 9 aa, Homo sapiens
  misc_feature: Table A; Target 28192; HLA-B*13:02; GPRC6A; ENSG00000173612; CTA
QTLAMIHSI

SEQ ID NO: 28193 - protein, 8 aa, Homo sapiens
  misc_feature: Table A; Target 28193; HLA-A*32:01; GPRC6A; ENSG00000173612; CTA
QVNVIVVF

SEQ ID NO: 28194 - protein, 8 aa, Homo sapiens
  misc_feature: Table A; Target 28194; HLA-B*15:01; GPRC6A; ENSG00000173612; CTA
QVNVIVVF

SEQ ID NO: 28195 - protein, 8 aa, Homo sapiens
  misc_feature: Table A; Target 28195; HLA-B*37:01; GPRC6A; ENSG00000173612; CTA
QVNVIVVF

SEQ ID NO: 28196 - protein, 9 aa, Homo sapiens
  misc_feature: Table A; Target 28196; HLA-A*02:04; GPRC6A; ENSG00000173612; CTA
QVNVIVVFL

SEQ ID NO: 28197 - protein, 9 aa, Homo sapiens
  misc_feature: Table A; Target 28197; HLA-A*02:07; GPRC6A; ENSG00000173612; CTA
QVNVIVVFL

SEQ ID NO: 28198 - protein, 9 aa, Homo sapiens
  misc_feature: Table A; Target 28198; HLA-A*68:02; GPRC6A; ENSG00000173612; CTA
QVNVIVVFL

SEQ ID NO: 28199 - protein, 9 aa, Homo sapiens
  misc_feature: Table A; Target 28199; HLA-B*37:01; GPRC6A; ENSG00000173612; CTA
RDCQNPNAF

SEQ ID NO: 28200 - protein, 9 aa, Homo sapiens
  misc_feature: Table A; Target 28200; HLA-A*03:02; GPRC6A; ENSG00000173612; CTA
RENATSVSK

SEQ ID NO: 28201 - protein, 11 aa, Homo sapiens
  misc_feature: Table A; Target 28201; HLA-A*30:01; GPRC6A; ENSG00000173612; CTA
RENATSVSKTL

SEQ ID NO: 28202 - protein, 11 aa, Homo sapiens
  misc_feature: Table A; Target 28202; HLA-B*40:01; GPRC6A; ENSG00000173612; CTA
RENATSVSKTL

SEQ ID NO: 28203 - protein, 11 aa, Homo sapiens
  misc_feature: Table A; Target 28203; HLA-B*44:02; GPRC6A; ENSG00000173612; CTA
RENATSVSKTL

SEQ ID NO: 28204 - protein, 11 aa, Homo sapiens
  misc_feature: Table A; Target 28204; HLA-B*44:03; GPRC6A; ENSG00000173612; CTA
RENATSVSKTL

SEQ ID NO: 28205 - protein, 9 aa, Homo sapiens
  misc_feature: Table A; Target 28205; HLA-A*03:02; GPRC6A; ENSG00000173612; CTA
RNLNTPVVK

SEQ ID NO: 28206 - protein, 9 aa, Homo sapiens
  misc_feature: Table A; Target 28206; HLA-A*11:01; GPRC6A; ENSG00000173612; CTA
RNLNTPVVK

SEQ ID NO: 28207 - protein, 9 aa, Homo sapiens
  misc_feature: Table A; Target 28207; HLA-B*54:01; GPRC6A; ENSG00000173612; CTA
RPILIIFTC

SEQ ID NO: 28208 - protein, 9 aa, Homo sapiens
  misc_feature: Table A; Target 28208; HLA-B*56:01; GPRC6A; ENSG00000173612; CTA
RPILIIFTC

SEQ ID NO: 28209 - protein, 9 aa, Homo sapiens
  misc_feature: Table A; Target 28209; HLA-A*24:02; GPRC6A; ENSG00000173612; CTA
RQFHVFDLF

SEQ ID NO: 28210 - protein, 9 aa, Homo sapiens
  misc_feature: Table A; Target 28210; HLA-B*57:01; GPRC6A; ENSG00000173612; CTA
RQFHVFDLF

SEQ ID NO: 28211 - protein, 9 aa, Homo sapiens
  misc_feature: Table A; Target 28211; HLA-B*15:01; GPRC6A; ENSG00000173612; CTA
RQTMFGVSF

SEQ ID NO: 28212 - protein, 9 aa, Homo sapiens
  misc_feature: Table A; Target 28212; HLA-B*15:03; GPRC6A; ENSG00000173612; CTA
RQTMFGVSF

SEQ ID NO: 28213 - protein, 9 aa, Homo sapiens
  misc_feature: Table A; Target 28213; HLA-B*37:01; GPRC6A; ENSG00000173612; CTA
RQTMFGVSF

SEQ ID NO: 28214 - protein, 9 aa, Homo sapiens
  misc_feature: Table A; Target 28214; HLA-A*03:01; GPRC6A; ENSG00000173612; CTA
RTLAYKANK

SEQ ID NO: 28215 - protein, 9 aa, Homo sapiens
  misc_feature: Table A; Target 28215; HLA-A*03:02; GPRC6A; ENSG00000173612; CTA
RTLAYKANK

SEQ ID NO: 28216 - protein, 9 aa, Homo sapiens
  misc_feature: Table A; Target 28216; HLA-A*11:01; GPRC6A; ENSG00000173612; CTA
RTLAYKANK

SEQ ID NO: 28217 - protein, 10 aa, Homo sapiens
  misc_feature: Table A; Target 28217; HLA-B*57:01; GPRC6A; ENSG00000173612; CTA
RTVPSDFHQI

SEQ ID NO: 28218 - protein, 10 aa, Homo sapiens
  misc_feature: Table A; Target 28218; HLA-B*58:01; GPRC6A; ENSG00000173612; CTA
RTVPSDFHQI

SEQ ID NO: 28219 - protein, 11 aa, Homo sapiens
  misc_feature: Table A; Target 28219; HLA-A*03:01; GPRC6A; ENSG00000173612; CTA
RTVPSDFHQIK

SEQ ID NO: 28220 - protein, 11 aa, Homo sapiens
  misc_feature: Table A; Target 28220; HLA-A*11:01; GPRC6A; ENSG00000173612; CTA
RTVPSDFHQIK

SEQ ID NO: 28221 - protein, 11 aa, Homo sapiens
  misc_feature: Table A; Target 28221; HLA-A*31:01; GPRC6A; ENSG00000173612; CTA
RTVPSDFHQIK

SEQ ID NO: 28222 - protein, 11 aa, Homo sapiens
  misc_feature: Table A; Target 28222; HLA-B*57:01; GPRC6A; ENSG00000173612; CTA
RTVPSDFHQIK

SEQ ID NO: 28223 - protein, 10 aa, Homo sapiens
  misc_feature: Table A; Target 28223; HLA-A*26:01; GPRC6A; ENSG00000173612; CTA
RVKAVIGSGY

SEQ ID NO: 28224 - protein, 10 aa, Homo sapiens
  misc_feature: Table A; Target 28224; HLA-A*30:02; GPRC6A; ENSG00000173612; CTA
RVKAVIGSGY

SEQ ID NO: 28225 - protein, 10 aa, Homo sapiens
  misc_feature: Table A; Target 28225; HLA-A*32:01; GPRC6A; ENSG00000173612; CTA
RVKAVIGSGY

SEQ ID NO: 28226 - protein, 10 aa, Homo sapiens
  misc_feature: Table A; Target 28226; HLA-B*15:01; GPRC6A; ENSG00000173612; CTA
RVKAVIGSGY

SEQ ID NO: 28227 - protein, 10 aa, Homo sapiens
  misc_feature: Table A; Target 28227; HLA-B*15:03; GPRC6A; ENSG00000173612; CTA
RVKAVIGSGY

SEQ ID NO: 28228 - protein, 10 aa, Homo sapiens
  misc_feature: Table A; Target 28228; HLA-B*46:01; GPRC6A; ENSG00000173612; CTA
RVKAVIGSGY

SEQ ID NO: 28229 - protein, 10 aa, Homo sapiens
  misc_feature: Table A; Target 28229; HLA-C*02:02; GPRC6A; ENSG00000173612; CTA
RVKAVIGSGY

SEQ ID NO: 28230 - protein, 8 aa, Homo sapiens
  misc_feature: Table A; Target 28230; HLA-B*08:01; GPRC6A; ENSG00000173612; CTA
SAFLKMIY

SEQ ID NO: 28231 - protein, 10 aa, Homo sapiens
  misc_feature: Table A; Target 28231; HLA-A*29:02; GPRC6A; ENSG00000173612; CTA
SAFLKMIYSY

SEQ ID NO: 28232 - protein, 9 aa, Homo sapiens
  misc_feature: Table A; Target 28232; HLA-B*37:01; GPRC6A; ENSG00000173612; CTA
SDFHQIKAM

SEQ ID NO: 28233 - protein, 9 aa, Homo sapiens
  misc_feature: Table A; Target 28233; HLA-B*37:01; GPRC6A; ENSG00000173612; CTA
SDKIRFPSF

SEQ ID NO: 28234 - protein, 9 aa, Homo sapiens
  misc_feature: Table A; Target 28234; HLA-B*38:01; GPRC6A; ENSG00000173612; CTA
SDNTIEVRI

SEQ ID NO: 28235 - protein, 9 aa, Homo sapiens
  misc_feature: Table A; Target 28235; HLA-B*44:02; GPRC6A; ENSG00000173612; CTA
SDNTIEVRI

SEQ ID NO: 28236 - protein, 9 aa, Homo sapiens
  misc_feature: Table A; Target 28236; HLA-B*44:03; GPRC6A; ENSG00000173612; CTA
SDNTIEVRI

SEQ ID NO: 28237 - protein, 11 aa, Homo sapiens
  misc_feature: Table A; Target 28237; HLA-A*31:01; GPRC6A; ENSG00000173612; CTA
SDNTIEVRINR

SEQ ID NO: 28238 - protein, 10 aa, Homo sapiens
  misc_feature: Table A; Target 28238; HLA-B*44:02; GPRC6A; ENSG00000173612; CTA
SEDSPRRPQI

SEQ ID NO: 28239 - protein, 10 aa, Homo sapiens
  misc_feature: Table A; Target 28239; HLA-B*44:03; GPRC6A; ENSG00000173612; CTA
SEDSPRRPQI

SEQ ID NO: 28240 - protein, 10 aa, Homo sapiens
  misc_feature: Table A; Target 28240; HLA-B*49:01; GPRC6A; ENSG00000173612; CTA
SEDSPRRPQI

SEQ ID NO: 28241 - protein, 9 aa, Homo sapiens
  misc_feature: Table A; Target 28241; HLA-B*40:01; GPRC6A; ENSG00000173612; CTA
SEITMAVSR

SEQ ID NO: 28242 - protein, 9 aa, Homo sapiens
  misc_feature: Table A; Target 28242; HLA-B*44:03; GPRC6A; ENSG00000173612; CTA
SEITMAVSR

SEQ ID NO: 28243 - protein, 9 aa, Homo sapiens
  misc_feature: Table A; Target 28243; HLA-B*49:01; GPRC6A; ENSG00000173612; CTA
SEITMAVSR

SEQ ID NO: 28244 - protein, 9 aa, Homo sapiens
  misc_feature: Table A; Target 28244; HLA-C*07:06; GPRC6A; ENSG00000173612; CTA
SEITMAVSR

SEQ ID NO: 28245 - protein, 10 aa, Homo sapiens
  misc_feature: Table A; Target 28245; HLA-A*30:01; GPRC6A; ENSG00000173612; CTA
SEITMAVSRM

SEQ ID NO: 28246 - protein, 10 aa, Homo sapiens
  misc_feature: Table A; Target 28246; HLA-B*40:01; GPRC6A; ENSG00000173612; CTA
SEITMAVSRM

SEQ ID NO: 28247 - protein, 10 aa, Homo sapiens
  misc_feature: Table A; Target 28247; HLA-B*44:03; GPRC6A; ENSG00000173612; CTA
SEITMAVSRM

SEQ ID NO: 28248 - protein, 10 aa, Homo sapiens
  misc_feature: Table A; Target 28248; HLA-B*49:01; GPRC6A; ENSG00000173612; CTA
SEITMAVSRM

SEQ ID NO: 28249 - protein, 9 aa, Homo sapiens
  misc_feature: Table A; Target 28249; HLA-A*23:01; GPRC6A; ENSG00000173612; CTA
SFDPKLQKF

SEQ ID NO: 28250 - protein, 9 aa, Homo sapiens
  misc_feature: Table A; Target 28250; HLA-A*24:02; GPRC6A; ENSG00000173612; CTA
SFDPKLQKF

SEQ ID NO: 28251 - protein, 9 aa, Homo sapiens
  misc_feature: Table A; Target 28251; HLA-A*29:02; GPRC6A; ENSG00000173612; CTA
SFDPKLQKF

SEQ ID NO: 28252 - protein, 9 aa, Homo sapiens
  misc_feature: Table A; Target 28252; HLA-A*32:01; GPRC6A; ENSG00000173612; CTA
SFDPKLQKF

SEQ ID NO: 28253 - protein, 9 aa, Homo sapiens
  misc_feature: Table A; Target 28253; HLA-B*35:01; GPRC6A; ENSG00000173612; CTA
SFDPKLQKF

SEQ ID NO: 28254 - protein, 9 aa, Homo sapiens
  misc_feature: Table A; Target 28254; HLA-C*04:01; GPRC6A; ENSG00000173612; CTA
SFDPKLQKF

SEQ ID NO: 28255 - protein, 10 aa, Homo sapiens
  misc_feature: Table A; Target 28255; HLA-A*23:01; GPRC6A; ENSG00000173612; CTA
SFFIGEPQDF

SEQ ID NO: 28256 - protein, 10 aa, Homo sapiens
  misc_feature: Table A; Target 28256; HLA-A*29:02; GPRC6A; ENSG00000173612; CTA
SFFIGEPQDF

SEQ ID NO: 28257 - protein, 9 aa, Homo sapiens
  misc_feature: Table A; Target 28257; HLA-A*23:01; GPRC6A; ENSG00000173612; CTA
SFLQNLHLL

SEQ ID NO: 28258 - protein, 9 aa, Homo sapiens
  misc_feature: Table A; Target 28258; HLA-A*24:02; GPRC6A; ENSG00000173612; CTA
SFLQNLHLL

SEQ ID NO: 28259 - protein, 8 aa, Homo sapiens
  misc_feature: Table A; Target 28259; HLA-C*16:01; GPRC6A; ENSG00000173612; CTA
SGGLRVCY

SEQ ID NO: 28260 - protein, 9 aa, Homo sapiens
  misc_feature: Table A; Target 28260; HLA-B*27:05; GPRC6A; ENSG00000173612; CTA
SHSVSSIAL

SEQ ID NO: 28261 - protein, 9 aa, Homo sapiens
  misc_feature: Table A; Target 28261; HLA-B*38:01; GPRC6A; ENSG00000173612; CTA
SHSVSSIAL

SEQ ID NO: 28262 - protein, 9 aa, Homo sapiens
  misc_feature: Table A; Target 28262; HLA-B*39:01; GPRC6A; ENSG00000173612; CTA
SHSVSSIAL

SEQ ID NO: 28263 - protein, 9 aa, Homo sapiens
  misc_feature: Table A; Target 28263; HLA-B*07:02; GPRC6A; ENSG00000173612; CTA
SIALSPASL

SEQ ID NO: 28264 - protein, 9 aa, Homo sapiens
  misc_feature: Table A; Target 28264; HLA-B*08:01; GPRC6A; ENSG00000173612; CTA
SIALSPASL

SEQ ID NO: 28265 - protein, 9 aa, Homo sapiens
  misc_feature: Table A; Target 28265; HLA-C*01:02; GPRC6A; ENSG00000173612; CTA
SIALSPASL

SEQ ID NO: 28266 - protein, 9 aa, Homo sapiens
  misc_feature: Table A; Target 28266; HLA-C*07:02; GPRC6A; ENSG00000173612; CTA
SIALSPASL

SEQ ID NO: 28267 - protein, 11 aa, Homo sapiens
  misc_feature: Table A; Target 28267; HLA-A*29:02; GPRC6A; ENSG00000173612; CTA
SILAFGTMLGY

SEQ ID NO: 28268 - protein, 9 aa, Homo sapiens
  misc_feature: Table A; Target 28268; HLA-A*02:04; GPRC6A; ENSG00000173612; CTA
SIQLAVFAL

SEQ ID NO: 28269 - protein, 9 aa, Homo sapiens
  misc_feature: Table A; Target 28269; HLA-B*15:03; GPRC6A; ENSG00000173612; CTA
SKDLQAQAF

SEQ ID NO: 28270 - protein, 9 aa, Homo sapiens
  misc_feature: Table A; Target 28270; HLA-A*02:04; GPRC6A; ENSG00000173612; CTA
SLAILLLIL

SEQ ID NO: 28271 - protein, 9 aa, Homo sapiens
  misc_feature: Table A; Target 28271; HLA-C*05:01; GPRC6A; ENSG00000173612; CTA
SLDSMSGNV

SEQ ID NO: 28272 - protein, 11 aa, Homo sapiens
  misc_feature: Table A; Target 28272; HLA-A*02:01; GPRC6A; ENSG00000173612; CTA
SLDSMSGNVTM

SEQ ID NO: 28273 - protein, 11 aa, Homo sapiens
  misc_feature: Table A; Target 28273; HLA-A*02:07; GPRC6A; ENSG00000173612; CTA
SLDSMSGNVTM

SEQ ID NO: 28274 - protein, 11 aa, Homo sapiens
  misc_feature: Table A; Target 28274; HLA-B*38:01; GPRC6A; ENSG00000173612; CTA
SLDSMSGNVTM

SEQ ID NO: 28275 - protein, 11 aa, Homo sapiens
  misc_feature: Table A; Target 28275; HLA-B*55:01; GPRC6A; ENSG00000173612; CTA
SLDSMSGNVTM

SEQ ID NO: 28276 - protein, 11 aa, Homo sapiens
  misc_feature: Table A; Target 28276; HLA-C*05:01; GPRC6A; ENSG00000173612; CTA
SLDSMSGNVTM

SEQ ID NO: 28277 - protein, 8 aa, Homo sapiens
  misc_feature: Table A; Target 28277; HLA-A*02:04; GPRC6A; ENSG00000173612; CTA
SLLGIIFV

SEQ ID NO: 28278 - protein, 9 aa, Homo sapiens
  misc_feature: Table A; Target 28278; HLA-A*02:01; GPRC6A; ENSG00000173612; CTA
SLLGIIFVL

SEQ ID NO: 28279 - protein, 9 aa, Homo sapiens
  misc_feature: Table A; Target 28279; HLA-A*02:04; GPRC6A; ENSG00000173612; CTA
SLLGIIFVL

SEQ ID NO: 28280 - protein, 9 aa, Homo sapiens
  misc_feature: Table A; Target 28280; HLA-A*02:07; GPRC6A; ENSG00000173612; CTA
SLLGIIFVL

SEQ ID NO: 28281 - protein, 10 aa, Homo sapiens
  misc_feature: Table A; Target 28281; HLA-A*02:04; GPRC6A; ENSG00000173612; CTA
SLLGIIFVLV

SEQ ID NO: 28282 - protein, 8 aa, Homo sapiens
  misc_feature: Table A; Target 28282; HLA-B*07:02; GPRC6A; ENSG00000173612; CTA
SPASLDSM

SEQ ID NO: 28283 - protein, 8 aa, Homo sapiens
  misc_feature: Table A; Target 28283; HLA-B*35:01; GPRC6A; ENSG00000173612; CTA
SPASLDSM

SEQ ID NO: 28284 - protein, 8 aa, Homo sapiens
  misc_feature: Table A; Target 28284; HLA-B*35:03; GPRC6A; ENSG00000173612; CTA
SPASLDSM

SEQ ID NO: 28285 - protein, 8 aa, Homo sapiens
  misc_feature: Table A; Target 28285; HLA-B*56:01; GPRC6A; ENSG00000173612; CTA
SPASLDSM

SEQ ID NO: 28286 - protein, 8 aa, Homo sapiens
  misc_feature: Table A; Target 28286; HLA-C*07:02; GPRC6A; ENSG00000173612; CTA
SPASLDSM

SEQ ID NO: 28287 - protein, 10 aa, Homo sapiens
  misc_feature: Table A; Target 28287; HLA-B*56:01; GPRC6A; ENSG00000173612; CTA
SPASLDSMSG

SEQ ID NO: 28288 - protein, 9 aa, Homo sapiens
  misc_feature: Table A; Target 28288; HLA-A*30:02; GPRC6A; ENSG00000173612; CTA
SSGGLRVCY

SEQ ID NO: 28289 - protein, 8 aa, Homo sapiens
  misc_feature: Table A; Target 28289; HLA-A*32:01; GPRC6A; ENSG00000173612; CTA
SSGKSATW

SEQ ID NO: 28290 - protein, 8 aa, Homo sapiens
  misc_feature: Table A; Target 28290; HLA-B*57:01; GPRC6A; ENSG00000173612; CTA
SSGKSATW

SEQ ID NO: 28291 - protein, 8 aa, Homo sapiens
  misc_feature: Table A; Target 28291; HLA-B*58:01; GPRC6A; ENSG00000173612; CTA
SSGKSATW

SEQ ID NO: 28292 - protein, 9 aa, Homo sapiens
  misc_feature: Table A; Target 28292; HLA-A*25:01; GPRC6A; ENSG00000173612; CTA
SSSGKSATW

SEQ ID NO: 28293 - protein, 9 aa, Homo sapiens
  misc_feature: Table A; Target 28293; HLA-A*32:01; GPRC6A; ENSG00000173612; CTA
SSSGKSATW

SEQ ID NO: 28294 - protein, 9 aa, Homo sapiens
  misc_feature: Table A; Target 28294; HLA-B*57:01; GPRC6A; ENSG00000173612; CTA
SSSGKSATW

SEQ ID NO: 28295 - protein, 9 aa, Homo sapiens
  misc_feature: Table A; Target 28295; HLA-B*58:01; GPRC6A; ENSG00000173612; CTA
SSSGKSATW

SEQ ID NO: 28296 - protein, 9 aa, Homo sapiens
  misc_feature: Table A; Target 28296; HLA-C*16:01; GPRC6A; ENSG00000173612; CTA
SSSGKSATW

SEQ ID NO: 28297 - protein, 9 aa, Homo sapiens
  misc_feature: Table A; Target 28297; HLA-A*03:01; GPRC6A; ENSG00000173612; CTA
STAEILSDK

SEQ ID NO: 28298 - protein, 9 aa, Homo sapiens
  misc_feature: Table A; Target 28298; HLA-A*03:02; GPRC6A; ENSG00000173612; CTA
STAEILSDK

SEQ ID NO: 28299 - protein, 9 aa, Homo sapiens
  misc_feature: Table A; Target 28299; HLA-A*11:01; GPRC6A; ENSG00000173612; CTA
STAEILSDK

SEQ ID NO: 28300 - protein, 9 aa, Homo sapiens
  misc_feature: Table A; Target 28300; HLA-A*68:01; GPRC6A; ENSG00000173612; CTA
STAEILSDK

SEQ ID NO: 28301 - protein, 9 aa, Homo sapiens
  misc_feature: Table A; Target 28301; HLA-C*07:06; GPRC6A; ENSG00000173612; CTA
STAEILSDK

SEQ ID NO: 28302 - protein, 10 aa, Homo sapiens
  misc_feature: Table A; Target 28302; HLA-A*68:02; GPRC6A; ENSG00000173612; CTA
STAEILSDKI

SEQ ID NO: 28303 - protein, 9 aa, Homo sapiens
  misc_feature: Table A; Target 28303; HLA-A*02:03; GPRC6A; ENSG00000173612; CTA
STATKITTI

SEQ ID NO: 28304 - protein, 9 aa, Homo sapiens
  misc_feature: Table A; Target 28304; HLA-A*25:01; GPRC6A; ENSG00000173612; CTA
STATKITTI

SEQ ID NO: 28305 - protein, 9 aa, Homo sapiens
  misc_feature: Table A; Target 28305; HLA-A*68:02; GPRC6A; ENSG00000173612; CTA
STATKITTI

SEQ ID NO: 28306 - protein, 9 aa, Homo sapiens
  misc_feature: Table A; Target 28306; HLA-B*13:02; GPRC6A; ENSG00000173612; CTA
STATKITTI

SEQ ID NO: 28307 - protein, 11 aa, Homo sapiens
  misc_feature: Table A; Target 28307; HLA-A*01:01; GPRC6A; ENSG00000173612; CTA
STLLPGVKLGY

SEQ ID NO: 28308 - protein, 11 aa, Homo sapiens
  misc_feature: Table A; Target 28308; HLA-A*29:02; GPRC6A; ENSG00000173612; CTA
STLLPGVKLGY

SEQ ID NO: 28309 - protein, 11 aa, Homo sapiens
  misc_feature: Table A; Target 28309; HLA-A*30:02; GPRC6A; ENSG00000173612; CTA
STLLPGVKLGY

SEQ ID NO: 28310 - protein, 9 aa, Homo sapiens
  misc_feature: Table A; Target 28310; HLA-A*03:01; GPRC6A; ENSG00000173612; CTA
SVSKTLPRK

SEQ ID NO: 28311 - protein, 9 aa, Homo sapiens
  misc_feature: Table A; Target 28311; HLA-A*03:02; GPRC6A; ENSG00000173612; CTA
SVSKTLPRK

SEQ ID NO: 28312 - protein, 9 aa, Homo sapiens
  misc_feature: Table A; Target 28312; HLA-A*11:01; GPRC6A; ENSG00000173612; CTA
SVSKTLPRK

SEQ ID NO: 28313 - protein, 10 aa, Homo sapiens
  misc_feature: Table A; Target 28313; HLA-B*56:01; GPRC6A; ENSG00000173612; CTA
SVSSIALSPA

SEQ ID NO: 28314 - protein, 9 aa, Homo sapiens
  misc_feature: Table A; Target 28314; HLA-A*24:02; GPRC6A; ENSG00000173612; CTA
SYMPRVKAV

SEQ ID NO: 28315 - protein, 9 aa, Homo sapiens
  misc_feature: Table A; Target 28315; HLA-B*37:01; GPRC6A; ENSG00000173612; CTA
SYMPRVKAV

SEQ ID NO: 28316 - protein, 9 aa, Homo sapiens
  misc_feature: Table A; Target 28316; HLA-C*16:02; GPRC6A; ENSG00000173612; CTA
SYMPRVKAV

SEQ ID NO: 28317 - protein, 10 aa, Homo sapiens
  misc_feature: Table A; Target 28317; HLA-A*23:01; GPRC6A; ENSG00000173612; CTA
SYMPRVKAVI

SEQ ID NO: 28318 - protein, 10 aa, Homo sapiens
  misc_feature: Table A; Target 28318; HLA-A*24:02; GPRC6A; ENSG00000173612; CTA
SYMPRVKAVI

SEQ ID NO: 28319 - protein, 8 aa, Homo sapiens
  misc_feature: Table A; Target 28319; HLA-B*51:01; GPRC6A; ENSG00000173612; CTA
TATKITTI

SEQ ID NO: 28320 - protein, 8 aa, Homo sapiens
  misc_feature: Table A; Target 28320; HLA-B*58:01; GPRC6A; ENSG00000173612; CTA
TATKITTI

SEQ ID NO: 28321 - protein, 8 aa, Homo sapiens
  misc_feature: Table A; Target 28321; HLA-C*16:02; GPRC6A; ENSG00000173612; CTA
TATKITTI

SEQ ID NO: 28322 - protein, 8 aa, Homo sapiens
  misc_feature: Table A; Target 28322; HLA-B*08:01; GPRC6A; ENSG00000173612; CTA
TCKTRQTM

SEQ ID NO: 28323 - protein, 9 aa, Homo sapiens
  misc_feature: Table A; Target 28323; HLA-B*08:01; GPRC6A; ENSG00000173612; CTA
TCKTRQTMF

SEQ ID NO: 28324 - protein, 9 aa, Homo sapiens
  misc_feature: Table A; Target 28324; HLA-A*30:01; GPRC6A; ENSG00000173612; CTA
TCTEVTVAM

SEQ ID NO: 28325 - protein, 9 aa, Homo sapiens
  misc_feature: Table A; Target 28325; HLA-B*18:01; GPRC6A; ENSG00000173612; CTA
TCTEVTVAM

SEQ ID NO: 28326 - protein, 9 aa, Homo sapiens
  misc_feature: Table A; Target 28326; HLA-B*35:01; GPRC6A; ENSG00000173612; CTA
TCTEVTVAM

SEQ ID NO: 28327 - protein, 9 aa, Homo sapiens
  misc_feature: Table A; Target 28327; HLA-B*35:03; GPRC6A; ENSG00000173612; CTA
TCTEVTVAM

SEQ ID NO: 28328 - protein, 9 aa, Homo sapiens
  misc_feature: Table A; Target 28328; HLA-B*39:01; GPRC6A; ENSG00000173612; CTA
TCTEVTVAM

SEQ ID NO: 28329 - protein, 9 aa, Homo sapiens
  misc_feature: Table A; Target 28329; HLA-B*40:01; GPRC6A; ENSG00000173612; CTA
TCTEVTVAM

SEQ ID NO: 28330 - protein, 9 aa, Homo sapiens
  misc_feature: Table A; Target 28330; HLA-B*46:01; GPRC6A; ENSG00000173612; CTA
TCTEVTVAM

SEQ ID NO: 28331 - protein, 9 aa, Homo sapiens
  misc_feature: Table A; Target 28331; HLA-B*55:01; GPRC6A; ENSG00000173612; CTA
TCTEVTVAM

SEQ ID NO: 28332 - protein, 9 aa, Homo sapiens
  misc_feature: Table A; Target 28332; HLA-C*01:02; GPRC6A; ENSG00000173612; CTA
TCTEVTVAM

SEQ ID NO: 28333 - protein, 9 aa, Homo sapiens
  misc_feature: Table A; Target 28333; HLA-C*02:02; GPRC6A; ENSG00000173612; CTA
TCTEVTVAM

SEQ ID NO: 28334 - protein, 9 aa, Homo sapiens
  misc_feature: Table A; Target 28334; HLA-C*03:03; GPRC6A; ENSG00000173612; CTA
TCTEVTVAM

SEQ ID NO: 28335 - protein, 9 aa, Homo sapiens
  misc_feature: Table A; Target 28335; HLA-C*03:04; GPRC6A; ENSG00000173612; CTA
TCTEVTVAM

SEQ ID NO: 28336 - protein, 9 aa, Homo sapiens
  misc_feature: Table A; Target 28336; HLA-C*04:01; GPRC6A; ENSG00000173612; CTA
TCTEVTVAM

SEQ ID NO: 28337 - protein, 9 aa, Homo sapiens
  misc_feature: Table A; Target 28337; HLA-C*05:01; GPRC6A; ENSG00000173612; CTA
TCTEVTVAM

SEQ ID NO: 28338 - protein, 9 aa, Homo sapiens
  misc_feature: Table A; Target 28338; HLA-C*07:06; GPRC6A; ENSG00000173612; CTA
TCTEVTVAM

SEQ ID NO: 28339 - protein, 9 aa, Homo sapiens
  misc_feature: Table A; Target 28339; HLA-C*12:03; GPRC6A; ENSG00000173612; CTA
TCTEVTVAM

SEQ ID NO: 28340 - protein, 9 aa, Homo sapiens
  misc_feature: Table A; Target 28340; HLA-C*14:02; GPRC6A; ENSG00000173612; CTA
TCTEVTVAM

SEQ ID NO: 28341 - protein, 9 aa, Homo sapiens
  misc_feature: Table A; Target 28341; HLA-C*16:01; GPRC6A; ENSG00000173612; CTA
TCTEVTVAM

SEQ ID NO: 28342 - protein, 9 aa, Homo sapiens
  misc_feature: Table A; Target 28342; HLA-C*16:02; GPRC6A; ENSG00000173612; CTA
TCTEVTVAM

SEQ ID NO: 28343 - protein, 9 aa, Homo sapiens
  misc_feature: Table A; Target 28343; HLA-C*16:04; GPRC6A; ENSG00000173612; CTA
TCTEVTVAM

SEQ ID NO: 28344 - protein, 9 aa, Homo sapiens
  misc_feature: Table A; Target 28344; HLA-B*38:01; GPRC6A; ENSG00000173612; CTA
TCTGIQVVI

SEQ ID NO: 28345 - protein, 9 aa, Homo sapiens
  misc_feature: Table A; Target 28345; HLA-B*39:01; GPRC6A; ENSG00000173612; CTA
TCTGIQVVI

SEQ ID NO: 28346 - protein, 8 aa, Homo sapiens
  misc_feature: Table A; Target 28346; HLA-C*05:01; GPRC6A; ENSG00000173612; CTA
TDDDYGRL

SEQ ID NO: 28347 - protein, 8 aa, Homo sapiens
  misc_feature: Table A; Target 28347; HLA-B*37:01; GPRC6A; ENSG00000173612; CTA
TDMPHCLL

SEQ ID NO: 28348 - protein, 8 aa, Homo sapiens
  misc_feature: Table A; Target 28348; HLA-A*30:01; GPRC6A; ENSG00000173612; CTA
TEVTVAMA

SEQ ID NO: 28349 - protein, 8 aa, Homo sapiens
  misc_feature: Table A; Target 28349; HLA-B*18:01; GPRC6A; ENSG00000173612; CTA
TEVTVAMA

SEQ ID NO: 28350 - protein, 8 aa, Homo sapiens
  misc_feature: Table A; Target 28350; HLA-B*49:01; GPRC6A; ENSG00000173612; CTA
TEVTVAMA

SEQ ID NO: 28351 - protein, 9 aa, Homo sapiens
  misc_feature: Table A; Target 28351; HLA-A*30:01; GPRC6A; ENSG00000173612; CTA
TEVTVAMAA

SEQ ID NO: 28352 - protein, 9 aa, Homo sapiens
  misc_feature: Table A; Target 28352; HLA-B*18:01; GPRC6A; ENSG00000173612; CTA
TEVTVAMAA

SEQ ID NO: 28353 - protein, 9 aa, Homo sapiens
  misc_feature: Table A; Target 28353; HLA-B*40:02; GPRC6A; ENSG00000173612; CTA
TEVTVAMAA

SEQ ID NO: 28354 - protein, 9 aa, Homo sapiens
  misc_feature: Table A; Target 28354; HLA-B*49:01; GPRC6A; ENSG00000173612; CTA
TEVTVAMAA

SEQ ID NO: 28355 - protein, 11 aa, Homo sapiens
  misc_feature: Table A; Target 28355; HLA-A*30:01; GPRC6A; ENSG00000173612; CTA
TEVTVAMAATL

SEQ ID NO: 28356 - protein, 11 aa, Homo sapiens
  misc_feature: Table A; Target 28356; HLA-B*40:01; GPRC6A; ENSG00000173612; CTA
TEVTVAMAATL

SEQ ID NO: 28357 - protein, 10 aa, Homo sapiens
  misc_feature: Table A; Target 28357; HLA-A*23:01; GPRC6A; ENSG00000173612; CTA
TFIPIYATTF

SEQ ID NO: 28358 - protein, 10 aa, Homo sapiens
  misc_feature: Table A; Target 28358; HLA-A*24:02; GPRC6A; ENSG00000173612; CTA
TFIPIYATTF

SEQ ID NO: 28359 - protein, 10 aa, Homo sapiens
  misc_feature: Table A; Target 28359; HLA-A*29:02; GPRC6A; ENSG00000173612; CTA
TFIPIYATTF

SEQ ID NO: 28360 - protein, 10 aa, Homo sapiens
  misc_feature: Table A; Target 28360; HLA-C*14:02; GPRC6A; ENSG00000173612; CTA
TFIPIYATTF

SEQ ID NO: 28361 - protein, 9 aa, Homo sapiens
  misc_feature: Table A; Target 28361; HLA-A*23:01; GPRC6A; ENSG00000173612; CTA
TFIPKCYVI

SEQ ID NO: 28362 - protein, 9 aa, Homo sapiens
  misc_feature: Table A; Target 28362; HLA-A*23:01; GPRC6A; ENSG00000173612; CTA
TFTDGWNSF

SEQ ID NO: 28363 - protein, 9 aa, Homo sapiens
  misc_feature: Table A; Target 28363; HLA-A*24:02; GPRC6A; ENSG00000173612; CTA
TFTDGWNSF

SEQ ID NO: 28364 - protein, 9 aa, Homo sapiens
  misc_feature: Table A; Target 28364; HLA-C*14:02; GPRC6A; ENSG00000173612; CTA
TFTDGWNSF

SEQ ID NO: 28365 - protein, 9 aa, Homo sapiens
  misc_feature: Table A; Target 28365; HLA-A*02:03; GPRC6A; ENSG00000173612; CTA
TLKKIILEA

SEQ ID NO: 28366 - protein, 9 aa, Homo sapiens
  misc_feature: Table A; Target 28366; HLA-B*08:01; GPRC6A; ENSG00000173612; CTA
TLKKIILEA

SEQ ID NO: 28367 - protein, 10 aa, Homo sapiens
  misc_feature: Table A; Target 28367; HLA-A*03:01; GPRC6A; ENSG00000173612; CTA
TLLPGVKLGY

SEQ ID NO: 28368 - protein, 10 aa, Homo sapiens
  misc_feature: Table A; Target 28368; HLA-A*29:02; GPRC6A; ENSG00000173612; CTA
TLLPGVKLGY

SEQ ID NO: 28369 - protein, 10 aa, Homo sapiens
  misc_feature: Table A; Target 28369; HLA-A*30:02; GPRC6A; ENSG00000173612; CTA
TLLPGVKLGY

SEQ ID NO: 28370 - protein, 10 aa, Homo sapiens
  misc_feature: Table A; Target 28370; HLA-A*32:01; GPRC6A; ENSG00000173612; CTA
TLLPGVKLGY

SEQ ID NO: 28371 - protein, 10 aa, Homo sapiens
  misc_feature: Table A; Target 28371; HLA-B*15:01; GPRC6A; ENSG00000173612; CTA
TLLPGVKLGY

SEQ ID NO: 28372 - protein, 9 aa, Homo sapiens
  misc_feature: Table A; Target 28372; HLA-A*02:01; GPRC6A; ENSG00000173612; CTA
TMFGVSFTL

SEQ ID NO: 28373 - protein, 9 aa, Homo sapiens
  misc_feature: Table A; Target 28373; HLA-A*02:03; GPRC6A; ENSG00000173612; CTA
TMFGVSFTL

SEQ ID NO: 28374 - protein, 9 aa, Homo sapiens
  misc_feature: Table A; Target 28374; HLA-A*02:04; GPRC6A; ENSG00000173612; CTA
TMFGVSFTL

SEQ ID NO: 28375 - protein, 9 aa, Homo sapiens
  misc_feature: Table A; Target 28375; HLA-A*02:07; GPRC6A; ENSG00000173612; CTA
TMFGVSFTL

SEQ ID NO: 28376 - protein, 9 aa, Homo sapiens
  misc_feature: Table A; Target 28376; HLA-A*23:01; GPRC6A; ENSG00000173612; CTA
TMFGVSFTL

SEQ ID NO: 28377 - protein, 9 aa, Homo sapiens
  misc_feature: Table A; Target 28377; HLA-B*13:02; GPRC6A; ENSG00000173612; CTA
TMFGVSFTL

SEQ ID NO: 28378 - protein, 9 aa, Homo sapiens
  misc_feature: Table A; Target 28378; HLA-B*35:03; GPRC6A; ENSG00000173612; CTA
TMFGVSFTL

SEQ ID NO: 28379 - protein, 9 aa, Homo sapiens
  misc_feature: Table A; Target 28379; HLA-C*02:02; GPRC6A; ENSG00000173612; CTA
TMFGVSFTL

SEQ ID NO: 28380 - protein, 9 aa, Homo sapiens
  misc_feature: Table A; Target 28380; HLA-A*02:01; GPRC6A; ENSG00000173612; CTA
TMLGYIAIL

SEQ ID NO: 28381 - protein, 9 aa, Homo sapiens
  misc_feature: Table A; Target 28381; HLA-A*02:04; GPRC6A; ENSG00000173612; CTA
TMLGYIAIL

SEQ ID NO: 28382 - protein, 8 aa, Homo sapiens
  misc_feature: Table A; Target 28382; HLA-B*56:01; GPRC6A; ENSG00000173612; CTA
TPDDFVAA

SEQ ID NO: 28383 - protein, 10 aa, Homo sapiens
  misc_feature: Table A; Target 28383; HLA-B*07:02; GPRC6A; ENSG00000173612; CTA
TPVVKSSGGL

SEQ ID NO: 28384 - protein, 10 aa, Homo sapiens
  misc_feature: Table A; Target 28384; HLA-B*27:05; GPRC6A; ENSG00000173612; CTA
TRNLNTPVVK

SEQ ID NO: 28385 - protein, 9 aa, Homo sapiens
  misc_feature: Table A; Target 28385; HLA-A*31:01; GPRC6A; ENSG00000173612; CTA
TSVSKTLPR

SEQ ID NO: 28386 - protein, 9 aa, Homo sapiens
  misc_feature: Table A; Target 28386; HLA-A*33:01; GPRC6A; ENSG00000173612; CTA
TSVSKTLPR

SEQ ID NO: 28387 - protein, 9 aa, Homo sapiens
  misc_feature: Table A; Target 28387; HLA-A*33:03; GPRC6A; ENSG00000173612; CTA
TSVSKTLPR

SEQ ID NO: 28388 - protein, 9 aa, Homo sapiens
  misc_feature: Table A; Target 28388; HLA-A*68:01; GPRC6A; ENSG00000173612; CTA
TSVSKTLPR

SEQ ID NO: 28389 - protein, 9 aa, Homo sapiens
  misc_feature: Table A; Target 28389; HLA-C*07:06; GPRC6A; ENSG00000173612; CTA
TSVSKTLPR

SEQ ID NO: 28390 - protein, 9 aa, Homo sapiens
  misc_feature: Table A; Target 28390; HLA-C*05:01; GPRC6A; ENSG00000173612; CTA
TTDDDYGRL

SEQ ID NO: 28391 - protein, 11 aa, Homo sapiens
  misc_feature: Table A; Target 28391; HLA-B*38:01; GPRC6A; ENSG00000173612; CTA
TTDDDYGRLAL

SEQ ID NO: 28392 - protein, 11 aa, Homo sapiens
  misc_feature: Table A; Target 28392; HLA-C*05:01; GPRC6A; ENSG00000173612; CTA
TTDDDYGRLAL

SEQ ID NO: 28393 - protein, 9 aa, Homo sapiens
  misc_feature: Table A; Target 28393; HLA-B*54:01; GPRC6A; ENSG00000173612; CTA
TTFGKYVPA

SEQ ID NO: 28394 - protein, 10 aa, Homo sapiens
  misc_feature: Table A; Target 28394; HLA-A*02:03; GPRC6A; ENSG00000173612; CTA
TTFGKYVPAV

SEQ ID NO: 28395 - protein, 10 aa, Homo sapiens
  misc_feature: Table A; Target 28395; HLA-A*68:02; GPRC6A; ENSG00000173612; CTA
TTFGKYVPAV

SEQ ID NO: 28396 - protein, 8 aa, Homo sapiens
  misc_feature: Table A; Target 28396; HLA-A*11:01; GPRC6A; ENSG00000173612; CTA
TTIPNVKK

SEQ ID NO: 28397 - protein, 9 aa, Homo sapiens
  misc_feature: Table A; Target 28397; HLA-A*02:03; GPRC6A; ENSG00000173612; CTA
TTIPNVKKI

SEQ ID NO: 28398 - protein, 9 aa, Homo sapiens
  misc_feature: Table A; Target 28398; HLA-A*25:01; GPRC6A; ENSG00000173612; CTA
TTIPNVKKI

SEQ ID NO: 28399 - protein, 9 aa, Homo sapiens
  misc_feature: Table A; Target 28399; HLA-A*68:02; GPRC6A; ENSG00000173612; CTA
TTIPNVKKI

SEQ ID NO: 28400 - protein, 9 aa, Homo sapiens
  misc_feature: Table A; Target 28400; HLA-C*16:02; GPRC6A; ENSG00000173612; CTA
TTIPNVKKI

SEQ ID NO: 28401 - protein, 11 aa, Homo sapiens
  misc_feature: Table A; Target 28401; HLA-A*11:01; GPRC6A; ENSG00000173612; CTA
TTIPNVKKIGK

SEQ ID NO: 28402 - protein, 8 aa, Homo sapiens
  misc_feature: Table A; Target 28402; HLA-B*35:03; GPRC6A; ENSG00000173612; CTA
TVAMAATL

SEQ ID NO: 28403 - protein, 8 aa, Homo sapiens
  misc_feature: Table A; Target 28403; HLA-C*03:03; GPRC6A; ENSG00000173612; CTA
TVAMAATL

SEQ ID NO: 28404 - protein, 8 aa, Homo sapiens
  misc_feature: Table A; Target 28404; HLA-C*03:04; GPRC6A; ENSG00000173612; CTA
TVAMAATL

SEQ ID NO: 28405 - protein, 9 aa, Homo sapiens
  misc_feature: Table A; Target 28405; HLA-A*33:03; GPRC6A; ENSG00000173612; CTA
TVAMAATLR

SEQ ID NO: 28406 - protein, 9 aa, Homo sapiens
  misc_feature: Table A; Target 28406; HLA-A*68:01; GPRC6A; ENSG00000173612; CTA
TVAMAATLR

SEQ ID NO: 28407 - protein, 9 aa, Homo sapiens
  misc_feature: Table A; Target 28407; HLA-C*07:06; GPRC6A; ENSG00000173612; CTA
TVAMAATLR

SEQ ID NO: 28408 - protein, 10 aa, Homo sapiens
  misc_feature: Table A; Target 28408; HLA-A*25:01; GPRC6A; ENSG00000173612; CTA
TVAMAATLRF

SEQ ID NO: 28409 - protein, 10 aa, Homo sapiens
  misc_feature: Table A; Target 28409; HLA-C*07:06; GPRC6A; ENSG00000173612; CTA
TVEVNVSLPR

SEQ ID NO: 28410 - protein, 9 aa, Homo sapiens
  misc_feature: Table A; Target 28410; HLA-A*02:07; GPRC6A; ENSG00000173612; CTA
TVPSDFHQI

SEQ ID NO: 28411 - protein, 9 aa, Homo sapiens
  misc_feature: Table A; Target 28411; HLA-A*24:02; GPRC6A; ENSG00000173612; CTA
TVPSDFHQI

SEQ ID NO: 28412 - protein, 9 aa, Homo sapiens
  misc_feature: Table A; Target 28412; HLA-A*25:01; GPRC6A; ENSG00000173612; CTA
TVPSDFHQI

SEQ ID NO: 28413 - protein, 9 aa, Homo sapiens
  misc_feature: Table A; Target 28413; HLA-A*26:01; GPRC6A; ENSG00000173612; CTA
TVPSDFHQI

SEQ ID NO: 28414 - protein, 9 aa, Homo sapiens
  misc_feature: Table A; Target 28414; HLA-A*68:02; GPRC6A; ENSG00000173612; CTA
TVPSDFHQI

SEQ ID NO: 28415 - protein, 8 aa, Homo sapiens
  misc_feature: Table A; Target 28415; HLA-A*26:01; GPRC6A; ENSG00000173612; CTA
TVTKMAEY

SEQ ID NO: 28416 - protein, 8 aa, Homo sapiens
  misc_feature: Table A; Target 28416; HLA-A*30:02; GPRC6A; ENSG00000173612; CTA
TVTKMAEY

SEQ ID NO: 28417 - protein, 8 aa, Homo sapiens
  misc_feature: Table A; Target 28417; HLA-B*15:01; GPRC6A; ENSG00000173612; CTA
TVTKMAEY

SEQ ID NO: 28418 - protein, 8 aa, Homo sapiens
  misc_feature: Table A; Target 28418; HLA-B*15:03; GPRC6A; ENSG00000173612; CTA
TVTKMAEY

SEQ ID NO: 28419 - protein, 8 aa, Homo sapiens
  misc_feature: Table A; Target 28419; HLA-B*18:01; GPRC6A; ENSG00000173612; CTA
TVTKMAEY

SEQ ID NO: 28420 - protein, 8 aa, Homo sapiens
  misc_feature: Table A; Target 28420; HLA-B*46:01; GPRC6A; ENSG00000173612; CTA
TVTKMAEY

SEQ ID NO: 28421 - protein, 10 aa, Homo sapiens
  misc_feature: Table A; Target 28421; HLA-C*03:04; GPRC6A; ENSG00000173612; CTA
VAATSPGHII

SEQ ID NO: 28422 - protein, 8 aa, Homo sapiens
  misc_feature: Table A; Target 28422; HLA-C*07:06; GPRC6A; ENSG00000173612; CTA
VAMAATLR

SEQ ID NO: 28423 - protein, 9 aa, Homo sapiens
  misc_feature: Table A; Target 28423; HLA-A*23:01; GPRC6A; ENSG00000173612; CTA
VAMAATLRF

SEQ ID NO: 28424 - protein, 9 aa, Homo sapiens
  misc_feature: Table A; Target 28424; HLA-A*24:02; GPRC6A; ENSG00000173612; CTA
VAMAATLRF

SEQ ID NO: 28425 - protein, 9 aa, Homo sapiens
  misc_feature: Table A; Target 28425; HLA-B*46:01; GPRC6A; ENSG00000173612; CTA
VAMAATLRF

SEQ ID NO: 28426 - protein, 9 aa, Homo sapiens
  misc_feature: Table A; Target 28426; HLA-B*58:01; GPRC6A; ENSG00000173612; CTA
VAMAATLRF

SEQ ID NO: 28427 - protein, 9 aa, Homo sapiens
  misc_feature: Table A; Target 28427; HLA-C*02:02; GPRC6A; ENSG00000173612; CTA
VAMAATLRF

SEQ ID NO: 28428 - protein, 10 aa, Homo sapiens
  misc_feature: Table A; Target 28428; HLA-B*18:01; GPRC6A; ENSG00000173612; CTA
VEFKCDYSSY

SEQ ID NO: 28429 - protein, 8 aa, Homo sapiens
  misc_feature: Table A; Target 28429; HLA-B*18:01; GPRC6A; ENSG00000173612; CTA
VEIIVILI

SEQ ID NO: 28430 - protein, 8 aa, Homo sapiens
  misc_feature: Table A; Target 28430; HLA-B*49:01; GPRC6A; ENSG00000173612; CTA
VEIIVILI

SEQ ID NO: 28431 - protein, 8 aa, Homo sapiens
  misc_feature: Table A; Target 28431; HLA-B*49:01; GPRC6A; ENSG00000173612; CTA
VEVNVSLP

SEQ ID NO: 28432 - protein, 10 aa, Homo sapiens
  misc_feature: Table A; Target 28432; HLA-B*49:01; GPRC6A; ENSG00000173612; CTA
VEVNVSLPRV

SEQ ID NO: 28433 - protein, 11 aa, Homo sapiens
  misc_feature: Table A; Target 28433; HLA-B*49:01; GPRC6A; ENSG00000173612; CTA
VEVNVSLPRVI

SEQ ID NO: 28434 - protein, 10 aa, Homo sapiens
  misc_feature: Table A; Target 28434; HLA-B*40:01; GPRC6A; ENSG00000173612; CTA
VEYLNWNDSL

SEQ ID NO: 28435 - protein, 10 aa, Homo sapiens
  misc_feature: Table A; Target 28435; HLA-B*49:01; GPRC6A; ENSG00000173612; CTA
VEYLNWNDSL

SEQ ID NO: 28436 - protein, 8 aa, Homo sapiens
  misc_feature: Table A; Target 28436; HLA-A*23:01; GPRC6A; ENSG00000173612; CTA
VFALGYAI

SEQ ID NO: 28437 - protein, 8 aa, Homo sapiens
  misc_feature: Table A; Target 28437; HLA-C*14:02; GPRC6A; ENSG00000173612; CTA
VFALGYAI

SEQ ID NO: 28438 - protein, 10 aa, Homo sapiens
  misc_feature: Table A; Target 28438; HLA-B*27:02; GPRC6A; ENSG00000173612; CTA
VFIIPDQETK

SEQ ID NO: 28439 - protein, 8 aa, Homo sapiens
  misc_feature: Table A; Target 28439; HLA-C*14:02; GPRC6A; ENSG00000173612; CTA
VFLQTLAM

SEQ ID NO: 28440 - protein, 9 aa, Homo sapiens
  misc_feature: Table A; Target 28440; HLA-A*23:01; GPRC6A; ENSG00000173612; CTA
VFLQTLAMI

SEQ ID NO: 28441 - protein, 9 aa, Homo sapiens
  misc_feature: Table A; Target 28441; HLA-A*23:01; GPRC6A; ENSG00000173612; CTA
VFLRQFHVF

SEQ ID NO: 28442 - protein, 9 aa, Homo sapiens
  misc_feature: Table A; Target 28442; HLA-A*24:02; GPRC6A; ENSG00000173612; CTA
VFLRQFHVF

SEQ ID NO: 28443 - protein, 8 aa, Homo sapiens
  misc_feature: Table A; Target 28443; HLA-B*18:01; GPRC6A; ENSG00000173612; CTA
VGFEISVF

SEQ ID NO: 28444 - protein, 8 aa, Homo sapiens
  misc_feature: Table A; Target 28444; HLA-B*46:01; GPRC6A; ENSG00000173612; CTA
VGFEISVF

SEQ ID NO: 28445 - protein, 8 aa, Homo sapiens
  misc_feature: Table A; Target 28445; HLA-C*12:03; GPRC6A; ENSG00000173612; CTA
VGFEISVF

SEQ ID NO: 28446 - protein, 9 aa, Homo sapiens
  misc_feature: Table A; Target 28446; HLA-B*46:01; GPRC6A; ENSG00000173612; CTA
VGYESTAEI

SEQ ID NO: 28447 - protein, 9 aa, Homo sapiens
  misc_feature: Table A; Target 28447; HLA-B*49:01; GPRC6A; ENSG00000173612; CTA
VGYESTAEI

SEQ ID NO: 28448 - protein, 9 aa, Homo sapiens
  misc_feature: Table A; Target 28448; HLA-B*51:01; GPRC6A; ENSG00000173612; CTA
VGYESTAEI

SEQ ID NO: 28449 - protein, 9 aa, Homo sapiens
  misc_feature: Table A; Target 28449; HLA-C*03:03; GPRC6A; ENSG00000173612; CTA
VGYESTAEI

SEQ ID NO: 28450 - protein, 9 aa, Homo sapiens
  misc_feature: Table A; Target 28450; HLA-C*03:04; GPRC6A; ENSG00000173612; CTA
VGYESTAEI

SEQ ID NO: 28451 - protein, 9 aa, Homo sapiens
  misc_feature: Table A; Target 28451; HLA-C*14:02; GPRC6A; ENSG00000173612; CTA
VGYESTAEI

SEQ ID NO: 28452 - protein, 9 aa, Homo sapiens
  misc_feature: Table A; Target 28452; HLA-C*01:02; GPRC6A; ENSG00000173612; CTA
VIGSGYSEI

SEQ ID NO: 28453 - protein, 9 aa, Homo sapiens
  misc_feature: Table A; Target 28453; HLA-B*15:01; GPRC6A; ENSG00000173612; CTA
VKAVIGSGY

SEQ ID NO: 28454 - protein, 9 aa, Homo sapiens
  misc_feature: Table A; Target 28454; HLA-B*15:03; GPRC6A; ENSG00000173612; CTA
VKAVIGSGY

SEQ ID NO: 28455 - protein, 9 aa, Homo sapiens
  misc_feature: Table A; Target 28455; HLA-B*35:01; GPRC6A; ENSG00000173612; CTA
VPAVEIIVI

SEQ ID NO: 28456 - protein, 9 aa, Homo sapiens
  misc_feature: Table A; Target 28456; HLA-B*35:03; GPRC6A; ENSG00000173612; CTA
VPAVEIIVI

SEQ ID NO: 28457 - protein, 9 aa, Homo sapiens
  misc_feature: Table A; Target 28457; HLA-B*51:01; GPRC6A; ENSG00000173612; CTA
VPAVEIIVI

SEQ ID NO: 28458 - protein, 9 aa, Homo sapiens
  misc_feature: Table A; Target 28458; HLA-B*56:01; GPRC6A; ENSG00000173612; CTA
VPAVEIIVI

SEQ ID NO: 28459 - protein, 8 aa, Homo sapiens
  misc_feature: Table A; Target 28459; HLA-B*51:01; GPRC6A; ENSG00000173612; CTA
VPSDFHQI

SEQ ID NO: 28460 - protein, 10 aa, Homo sapiens
  misc_feature: Table A; Target 28460; HLA-B*54:01; GPRC6A; ENSG00000173612; CTA
VPSDFHQIKA

SEQ ID NO: 28461 - protein, 10 aa, Homo sapiens
  misc_feature: Table A; Target 28461; HLA-B*55:01; GPRC6A; ENSG00000173612; CTA
VPSDFHQIKA

SEQ ID NO: 28462 - protein, 10 aa, Homo sapiens
  misc_feature: Table A; Target 28462; HLA-B*56:01; GPRC6A; ENSG00000173612; CTA
VPSDFHQIKA

SEQ ID NO: 28463 - protein, 9 aa, Homo sapiens
  misc_feature: Table A; Target 28463; HLA-A*02:04; GPRC6A; ENSG00000173612; CTA
VSLPRVIIL

SEQ ID NO: 28464 - protein, 9 aa, Homo sapiens
  misc_feature: Table A; Target 28464; HLA-C*12:03; GPRC6A; ENSG00000173612; CTA
VSLPRVIIL

SEQ ID NO: 28465 - protein, 9 aa, Homo sapiens
  misc_feature: Table A; Target 28465; HLA-C*16:01; GPRC6A; ENSG00000173612; CTA
VSLPRVIIL

SEQ ID NO: 28466 - protein, 10 aa, Homo sapiens
  misc_feature: Table A; Target 28466; HLA-B*57:01; GPRC6A; ENSG00000173612; CTA
VTFTDGWNSF

SEQ ID NO: 28467 - protein, 11 aa, Homo sapiens
  misc_feature: Table A; Target 28467; HLA-A*03:01; GPRC6A; ENSG00000173612; CTA
VTMTNPSSSGK

SEQ ID NO: 28468 - protein, 11 aa, Homo sapiens
  misc_feature: Table A; Target 28468; HLA-A*03:02; GPRC6A; ENSG00000173612; CTA
VTMTNPSSSGK

SEQ ID NO: 28469 - protein, 11 aa, Homo sapiens
  misc_feature: Table A; Target 28469; HLA-A*11:01; GPRC6A; ENSG00000173612; CTA
VTMTNPSSSGK

SEQ ID NO: 28470 - protein, 11 aa, Homo sapiens
  misc_feature: Table A; Target 28470; HLA-B*27:02; GPRC6A; ENSG00000173612; CTA
VTMTNPSSSGK

SEQ ID NO: 28471 - protein, 9 aa, Homo sapiens
  misc_feature: Table A; Target 28471; HLA-A*23:01; GPRC6A; ENSG00000173612; CTA
VTVAMAATL

SEQ ID NO: 28472 - protein, 9 aa, Homo sapiens
  misc_feature: Table A; Target 28472; HLA-B*40:01; GPRC6A; ENSG00000173612; CTA
VTVAMAATL

SEQ ID NO: 28473 - protein, 9 aa, Homo sapiens
  misc_feature: Table A; Target 28473; HLA-B*46:01; GPRC6A; ENSG00000173612; CTA
VTVAMAATL

SEQ ID NO: 28474 - protein, 9 aa, Homo sapiens
  misc_feature: Table A; Target 28474; HLA-B*58:01; GPRC6A; ENSG00000173612; CTA
VTVAMAATL

SEQ ID NO: 28475 - protein, 9 aa, Homo sapiens
  misc_feature: Table A; Target 28475; HLA-C*02:02; GPRC6A; ENSG00000173612; CTA
VTVAMAATL

SEQ ID NO: 28476 - protein, 9 aa, Homo sapiens
  misc_feature: Table A; Target 28476; HLA-C*03:03; GPRC6A; ENSG00000173612; CTA
VTVAMAATL

SEQ ID NO: 28477 - protein, 9 aa, Homo sapiens
  misc_feature: Table A; Target 28477; HLA-C*03:04; GPRC6A; ENSG00000173612; CTA
VTVAMAATL

SEQ ID NO: 28478 - protein, 8 aa, Homo sapiens
  misc_feature: Table A; Target 28478; HLA-A*31:01; GPRC6A; ENSG00000173612; CTA
VVGIIFTR

SEQ ID NO: 28479 - protein, 9 aa, Homo sapiens
  misc_feature: Table A; Target 28479; HLA-A*31:01; GPRC6A; ENSG00000173612; CTA
VVKSSGGLR

SEQ ID NO: 28480 - protein, 9 aa, Homo sapiens
  misc_feature: Table A; Target 28480; HLA-A*33:01; GPRC6A; ENSG00000173612; CTA
VVKSSGGLR

SEQ ID NO: 28481 - protein, 9 aa, Homo sapiens
  misc_feature: Table A; Target 28481; HLA-A*33:03; GPRC6A; ENSG00000173612; CTA
VVKSSGGLR

SEQ ID NO: 28482 - protein, 8 aa, Homo sapiens
  misc_feature: Table A; Target 28482; HLA-B*08:01; GPRC6A; ENSG00000173612; CTA
WAPVRSTM

SEQ ID NO: 28483 - protein, 10 aa, Homo sapiens
  misc_feature: Table A; Target 28483; HLA-A*01:01; GPRC6A; ENSG00000173612; CTA
YAEPGLIHSI

SEQ ID NO: 28484 - protein, 10 aa, Homo sapiens
  misc_feature: Table A; Target 28484; HLA-A*25:01; GPRC6A; ENSG00000173612; CTA
YAEPGLIHSI

SEQ ID NO: 28485 - protein, 10 aa, Homo sapiens
  misc_feature: Table A; Target 28485; HLA-B*35:03; GPRC6A; ENSG00000173612; CTA
YAEPGLIHSI

SEQ ID NO: 28486 - protein, 10 aa, Homo sapiens
  misc_feature: Table A; Target 28486; HLA-B*38:01; GPRC6A; ENSG00000173612; CTA
YAEPGLIHSI

SEQ ID NO: 28487 - protein, 10 aa, Homo sapiens
  misc_feature: Table A; Target 28487; HLA-B*49:01; GPRC6A; ENSG00000173612; CTA
YAEPGLIHSI

SEQ ID NO: 28488 - protein, 10 aa, Homo sapiens
  misc_feature: Table A; Target 28488; HLA-B*51:01; GPRC6A; ENSG00000173612; CTA
YAEPGLIHSI

SEQ ID NO: 28489 - protein, 10 aa, Homo sapiens
  misc_feature: Table A; Target 28489; HLA-B*54:01; GPRC6A; ENSG00000173612; CTA
YAEPGLIHSI

SEQ ID NO: 28490 - protein, 10 aa, Homo sapiens
  misc_feature: Table A; Target 28490; HLA-B*58:01; GPRC6A; ENSG00000173612; CTA
YAEPGLIHSI

SEQ ID NO: 28491 - protein, 10 aa, Homo sapiens
  misc_feature: Table A; Target 28491; HLA-C*02:02; GPRC6A; ENSG00000173612; CTA
YAEPGLIHSI

SEQ ID NO: 28492 - protein, 10 aa, Homo sapiens
  misc_feature: Table A; Target 28492; HLA-C*05:01; GPRC6A; ENSG00000173612; CTA
YAEPGLIHSI

SEQ ID NO: 28493 - protein, 10 aa, Homo sapiens
  misc_feature: Table A; Target 28493; HLA-C*12:03; GPRC6A; ENSG00000173612; CTA
YAEPGLIHSI

SEQ ID NO: 28494 - protein, 10 aa, Homo sapiens
  misc_feature: Table A; Target 28494; HLA-C*16:02; GPRC6A; ENSG00000173612; CTA
YAEPGLIHSI

SEQ ID NO: 28495 - protein, 10 aa, Homo sapiens
  misc_feature: Table A; Target 28495; HLA-C*16:04; GPRC6A; ENSG00000173612; CTA
YAEPGLIHSI

SEQ ID NO: 28496 - protein, 9 aa, Homo sapiens
  misc_feature: Table A; Target 28496; HLA-B*54:01; GPRC6A; ENSG00000173612; CTA
YAIRDLCQA

SEQ ID NO: 28497 - protein, 9 aa, Homo sapiens
  misc_feature: Table A; Target 28497; HLA-B*54:01; GPRC6A; ENSG00000173612; CTA
YAMHLSACA

SEQ ID NO: 28498 - protein, 9 aa, Homo sapiens
  misc_feature: Table A; Target 28498; HLA-C*02:02; GPRC6A; ENSG00000173612; CTA
YATTFGKYV

SEQ ID NO: 28499 - protein, 9 aa, Homo sapiens
  misc_feature: Table A; Target 28499; HLA-C*16:02; GPRC6A; ENSG00000173612; CTA
YATTFGKYV

SEQ ID NO: 28500 - protein, 9 aa, Homo sapiens
  misc_feature: Table A; Target 28500; HLA-C*16:02; GPRC6A; ENSG00000173612; CTA
YDTCTEVTV

SEQ ID NO: 28501 - protein, 10 aa, Homo sapiens
  misc_feature: Table A; Target 28501; HLA-B*49:01; GPRC6A; ENSG00000173612; CTA
YEIYDTCTEV

SEQ ID NO: 28502 - protein, 9 aa, Homo sapiens
  misc_feature: Table A; Target 28502; HLA-A*30:01; GPRC6A; ENSG00000173612; CTA
YENYNEAKF

SEQ ID NO: 28503 - protein, 9 aa, Homo sapiens
  misc_feature: Table A; Target 28503; HLA-B*18:01; GPRC6A; ENSG00000173612; CTA
YENYNEAKF

SEQ ID NO: 28504 - protein, 9 aa, Homo sapiens
  misc_feature: Table A; Target 28504; HLA-B*37:01; GPRC6A; ENSG00000173612; CTA
YENYNEAKF

SEQ ID NO: 28505 - protein, 9 aa, Homo sapiens
  misc_feature: Table A; Target 28505; HLA-B*40:01; GPRC6A; ENSG00000173612; CTA
YENYNEAKF

SEQ ID NO: 28506 - protein, 9 aa, Homo sapiens
  misc_feature: Table A; Target 28506; HLA-B*44:02; GPRC6A; ENSG00000173612; CTA
YENYNEAKF

SEQ ID NO: 28507 - protein, 9 aa, Homo sapiens
  misc_feature: Table A; Target 28507; HLA-B*44:03; GPRC6A; ENSG00000173612; CTA
YENYNEAKF

SEQ ID NO: 28508 - protein, 9 aa, Homo sapiens
  misc_feature: Table A; Target 28508; HLA-B*49:01; GPRC6A; ENSG00000173612; CTA
YENYNEAKF

SEQ ID NO: 28509 - protein, 9 aa, Homo sapiens
  misc_feature: Table A; Target 28509; HLA-C*16:04; GPRC6A; ENSG00000173612; CTA
YENYNEAKF

SEQ ID NO: 28510 - protein, 8 aa, Homo sapiens
  misc_feature: Table A; Target 28510; HLA-A*30:01; GPRC6A; ENSG00000173612; CTA
YESTAEIL

SEQ ID NO: 28511 - protein, 8 aa, Homo sapiens
  misc_feature: Table A; Target 28511; HLA-B*18:01; GPRC6A; ENSG00000173612; CTA
YESTAEIL

SEQ ID NO: 28512 - protein, 8 aa, Homo sapiens
  misc_feature: Table A; Target 28512; HLA-B*37:01; GPRC6A; ENSG00000173612; CTA
YESTAEIL

SEQ ID NO: 28513 - protein, 8 aa, Homo sapiens
  misc_feature: Table A; Target 28513; HLA-B*40:01; GPRC6A; ENSG00000173612; CTA
YESTAEIL

SEQ ID NO: 28514 - protein, 8 aa, Homo sapiens
  misc_feature: Table A; Target 28514; HLA-B*49:01; GPRC6A; ENSG00000173612; CTA
YESTAEIL

SEQ ID NO: 28515 - protein, 11 aa, Homo sapiens
  misc_feature: Table A; Target 28515; HLA-B*27:02; GPRC6A; ENSG00000173612; CTA
YESTAEILSDK

SEQ ID NO: 28516 - protein, 9 aa, Homo sapiens
  misc_feature: Table A; Target 28516; HLA-B*46:01; GPRC6A; ENSG00000173612; CTA
YGRLALNTF

SEQ ID NO: 28517 - protein, 9 aa, Homo sapiens
  misc_feature: Table A; Target 28517; HLA-A*02:07; GPRC6A; ENSG00000173612; CTA
YMPRVKAVI

SEQ ID NO: 28518 - protein, 9 aa, Homo sapiens
  misc_feature: Table A; Target 28518; HLA-A*24:02; GPRC6A; ENSG00000173612; CTA
YMPRVKAVI

SEQ ID NO: 28519 - protein, 9 aa, Homo sapiens
  misc_feature: Table A; Target 28519; HLA-A*25:01; GPRC6A; ENSG00000173612; CTA
YSSHSVSSI

SEQ ID NO: 28520 - protein, 9 aa, Homo sapiens
  misc_feature: Table A; Target 28520; HLA-B*58:01; GPRC6A; ENSG00000173612; CTA
YSSHSVSSI

SEQ ID NO: 28521 - protein, 9 aa, Homo sapiens
  misc_feature: Table A; Target 28521; HLA-C*03:03; GPRC6A; ENSG00000173612; CTA
YSSHSVSSI

SEQ ID NO: 28522 - protein, 9 aa, Homo sapiens
  misc_feature: Table A; Target 28522; HLA-C*03:04; GPRC6A; ENSG00000173612; CTA
YSSHSVSSI

SEQ ID NO: 28523 - protein, 9 aa, Homo sapiens
  misc_feature: Table A; Target 28523; HLA-C*16:02; GPRC6A; ENSG00000173612; CTA
YSSHSVSSI

SEQ ID NO: 28524 - protein, 8 aa, Homo sapiens
  misc_feature: Table A; Target 28524; HLA-B*13:02; GPRC6A; ENSG00000173612; CTA
YSSYMPRV

SEQ ID NO: 28525 - protein, 8 aa, Homo sapiens
  misc_feature: Table A; Target 28525; HLA-B*08:01; GPRC6A; ENSG00000173612; CTA
YSYSSHSV

SEQ ID NO: 28526 - protein, 8 aa, Homo sapiens
  misc_feature: Table A; Target 28526; HLA-B*13:02; GPRC6A; ENSG00000173612; CTA
YSYSSHSV

SEQ ID NO: 28527 - protein, 8 aa, Homo sapiens
  misc_feature: Table A; Target 28527; HLA-B*51:01; GPRC6A; ENSG00000173612; CTA
YSYSSHSV

SEQ ID NO: 28528 - protein, 8 aa, Homo sapiens
  misc_feature: Table A; Target 28528; HLA-B*54:01; GPRC6A; ENSG00000173612; CTA
YSYSSHSV

SEQ ID NO: 28529 - protein, 8 aa, Homo sapiens
  misc_feature: Table A; Target 28529; HLA-C*03:03; GPRC6A; ENSG00000173612; CTA
YSYSSHSV

SEQ ID NO: 28530 - protein, 8 aa, Homo sapiens
  misc_feature: Table A; Target 28530; HLA-C*03:04; GPRC6A; ENSG00000173612; CTA
YSYSSHSV

SEQ ID NO: 28531 - protein, 8 aa, Homo sapiens
  misc_feature: Table A; Target 28531; HLA-C*16:02; GPRC6A; ENSG00000173612; CTA
YSYSSHSV

SEQ ID NO: 28532 - protein, 8 aa, Homo sapiens
  misc_feature: Table A; Target 28532; HLA-C*16:04; GPRC6A; ENSG00000173612; CTA
YSYSSHSV

SEQ ID NO: 28533 - protein, 9 aa, Homo sapiens
  misc_feature: Table A; Target 28533; HLA-B*13:02; GPRC6A; ENSG00000173612; CTA
YVIICKQEI

SEQ ID NO: 28534 - protein, 9 aa, Homo sapiens
  misc_feature: Table A; Target 28534; HLA-A*26:01; GPRC6A; ENSG00000173612; CTA
YVKDTDLSQ

SEQ ID NO: 28535 - protein, 9 aa, Homo sapiens
  misc_feature: Table A; Target 28535; HLA-A*02:07; GPRC6A; ENSG00000173612; CTA
YVPAVEIIV

SEQ ID NO: 28536 - protein, 9 aa, Homo sapiens
  misc_feature: Table A; Target 28536; HLA-C*01:02; GSG1L2; ENSG00000214978; CTA
AAPCPAEQA

SEQ ID NO: 28537 - protein, 10 aa, Homo sapiens
  misc_feature: Table A; Target 28537; HLA-C*01:02; GSG1L2; ENSG00000214978; CTA
AAPCPAEQAF

SEQ ID NO: 28538 - protein, 9 aa, Homo sapiens
  misc_feature: Table A; Target 28538; HLA-A*03:01; GSG1L2; ENSG00000214978; CTA
AARLEFTEK

SEQ ID NO: 28539 - protein, 9 aa, Homo sapiens
  misc_feature: Table A; Target 28539; HLA-A*03:02; GSG1L2; ENSG00000214978; CTA
AARLEFTEK

SEQ ID NO: 28540 - protein, 9 aa, Homo sapiens
  misc_feature: Table A; Target 28540; HLA-A*11:01; GSG1L2; ENSG00000214978; CTA
AARLEFTEK

SEQ ID NO: 28541 - protein, 9 aa, Homo sapiens
  misc_feature: Table A; Target 28541; HLA-A*31:01; GSG1L2; ENSG00000214978; CTA
AARLEFTEK

SEQ ID NO: 28542 - protein, 9 aa, Homo sapiens
  misc_feature: Table A; Target 28542; HLA-A*33:01; GSG1L2; ENSG00000214978; CTA
AARLEFTEK

SEQ ID NO: 28543 - protein, 9 aa, Homo sapiens
  misc_feature: Table A; Target 28543; HLA-B*46:01; GSG1L2; ENSG00000214978; CTA
AARLEFTEK

SEQ ID NO: 28544 - protein, 9 aa, Homo sapiens
  misc_feature: Table A; Target 28544; HLA-B*56:01; GSG1L2; ENSG00000214978; CTA
AARLEFTEK

SEQ ID NO: 28545 - protein, 9 aa, Homo sapiens
  misc_feature: Table A; Target 28545; HLA-B*57:01; GSG1L2; ENSG00000214978; CTA
AARLEFTEK

SEQ ID NO: 28546 - protein, 9 aa, Homo sapiens
  misc_feature: Table A; Target 28546; HLA-C*07:06; GSG1L2; ENSG00000214978; CTA
AARLEFTEK

SEQ ID NO: 28547 - protein, 8 aa, Homo sapiens
  misc_feature: Table A; Target 28547; HLA-B*44:02; GSG1L2; ENSG00000214978; CTA
AEEQGVLW

SEQ ID NO: 28548 - protein, 8 aa, Homo sapiens
  misc_feature: Table A; Target 28548; HLA-B*44:03; GSG1L2; ENSG00000214978; CTA
AEEQGVLW

SEQ ID NO: 28549 - protein, 9 aa, Homo sapiens
  misc_feature: Table A; Target 28549; HLA-B*40:01; GSG1L2; ENSG00000214978; CTA
AEEQGVLWL

SEQ ID NO: 28550 - protein, 9 aa, Homo sapiens
  misc_feature: Table A; Target 28550; HLA-B*44:02; GSG1L2; ENSG00000214978; CTA
AEEQGVLWL

SEQ ID NO: 28551 - protein, 9 aa, Homo sapiens
  misc_feature: Table A; Target 28551; HLA-B*44:03; GSG1L2; ENSG00000214978; CTA
AEEQGVLWL

SEQ ID NO: 28552 - protein, 9 aa, Homo sapiens
  misc_feature: Table A; Target 28552; HLA-B*49:01; GSG1L2; ENSG00000214978; CTA
AEEQGVLWL

SEQ ID NO: 28553 - protein, 8 aa, Homo sapiens
  misc_feature: Table A; Target 28553; HLA-B*37:01; GSG1L2; ENSG00000214978; CTA
AEQAFRNV

SEQ ID NO: 28554 - protein, 8 aa, Homo sapiens
  misc_feature: Table A; Target 28554; HLA-B*49:01; GSG1L2; ENSG00000214978; CTA
AEQAFRNV

SEQ ID NO: 28555 - protein, 10 aa, Homo sapiens
  misc_feature: Table A; Target 28555; HLA-B*40:02; GSG1L2; ENSG00000214978; CTA
AEQAFRNVSG

SEQ ID NO: 28556 - protein, 9 aa, Homo sapiens
  misc_feature: Table A; Target 28556; HLA-C*01:02; GSG1L2; ENSG00000214978; CTA
AGLLGMVAH

SEQ ID NO: 28557 - protein, 9 aa, Homo sapiens
  misc_feature: Table A; Target 28557; HLA-A*02:04; GSG1L2; ENSG00000214978; CTA
AIFMVLAGL

SEQ ID NO: 28558 - protein, 11 aa, Homo sapiens
  misc_feature: Table A; Target 28558; HLA-A*31:01; GSG1L2; ENSG00000214978; CTA
AILLGSRVSCR

SEQ ID NO: 28559 - protein, 9 aa, Homo sapiens
  misc_feature: Table A; Target 28559; HLA-A*02:01; GSG1L2; ENSG00000214978; CTA
ALLLLPVCL

SEQ ID NO: 28560 - protein, 9 aa, Homo sapiens
  misc_feature: Table A; Target 28560; HLA-A*02:04; GSG1L2; ENSG00000214978; CTA
ALLLLPVCL

SEQ ID NO: 28561 - protein, 9 aa, Homo sapiens
  misc_feature: Table A; Target 28561; HLA-A*02:01; GSG1L2; ENSG00000214978; CTA
ALTFSLTAV

SEQ ID NO: 28562 - protein, 9 aa, Homo sapiens
  misc_feature: Table A; Target 28562; HLA-A*02:03; GSG1L2; ENSG00000214978; CTA
ALTFSLTAV

SEQ ID NO: 28563 - protein, 9 aa, Homo sapiens
  misc_feature: Table A; Target 28563; HLA-A*02:04; GSG1L2; ENSG00000214978; CTA
ALTFSLTAV

SEQ ID NO: 28564 - protein, 9 aa, Homo sapiens
  misc_feature: Table A; Target 28564; HLA-A*02:07; GSG1L2; ENSG00000214978; CTA
ALTFSLTAV

SEQ ID NO: 28565 - protein, 9 aa, Homo sapiens
  misc_feature: Table A; Target 28565; HLA-B*13:02; GSG1L2; ENSG00000214978; CTA
ALTFSLTAV

SEQ ID NO: 28566 - protein, 9 aa, Homo sapiens
  misc_feature: Table A; Target 28566; HLA-B*55:01; GSG1L2; ENSG00000214978; CTA
ALTFSLTAV

SEQ ID NO: 28567 - protein, 8 aa, Homo sapiens
  misc_feature: Table A; Target 28567; HLA-A*02:01; GSG1L2; ENSG00000214978; CTA
ALVAIFMV

SEQ ID NO: 28568 - protein, 8 aa, Homo sapiens
  misc_feature: Table A; Target 28568; HLA-A*02:04; GSG1L2; ENSG00000214978; CTA
ALVAIFMV

SEQ ID NO: 28569 - protein, 8 aa, Homo sapiens
  misc_feature: Table A; Target 28569; HLA-B*13:02; GSG1L2; ENSG00000214978; CTA
ALVAIFMV

SEQ ID NO: 28570 - protein, 9 aa, Homo sapiens
  misc_feature: Table A; Target 28570; HLA-A*02:01; GSG1L2; ENSG00000214978; CTA
ALVAIFMVL

SEQ ID NO: 28571 - protein, 9 aa, Homo sapiens
  misc_feature: Table A; Target 28571; HLA-A*02:03; GSG1L2; ENSG00000214978; CTA
ALVAIFMVL

SEQ ID NO: 28572 - protein, 9 aa, Homo sapiens
  misc_feature: Table A; Target 28572; HLA-A*02:04; GSG1L2; ENSG00000214978; CTA
ALVAIFMVL

SEQ ID NO: 28573 - protein, 9 aa, Homo sapiens
  misc_feature: Table A; Target 28573; HLA-A*02:07; GSG1L2; ENSG00000214978; CTA
ALVAIFMVL

SEQ ID NO: 28574 - protein, 9 aa, Homo sapiens
  misc_feature: Table A; Target 28574; HLA-A*03:01; GSG1L2; ENSG00000214978; CTA
ALVAIFMVL

SEQ ID NO: 28575 - protein, 9 aa, Homo sapiens
  misc_feature: Table A; Target 28575; HLA-A*23:01; GSG1L2; ENSG00000214978; CTA
ALVAIFMVL

SEQ ID NO: 28576 - protein, 9 aa, Homo sapiens
  misc_feature: Table A; Target 28576; HLA-A*24:02; GSG1L2; ENSG00000214978; CTA
ALVAIFMVL

SEQ ID NO: 28577 - protein, 9 aa, Homo sapiens
  misc_feature: Table A; Target 28577; HLA-C*02:02; GSG1L2; ENSG00000214978; CTA
ALVAIFMVL

SEQ ID NO: 28578 - protein, 8 aa, Homo sapiens
  misc_feature: Table A; Target 28578; HLA-B*56:01; GSG1L2; ENSG00000214978; CTA
AMSRFTAA

SEQ ID NO: 28579 - protein, 9 aa, Homo sapiens
  misc_feature: Table A; Target 28579; HLA-A*31:01; GSG1L2; ENSG00000214978; CTA
AMSRFTAAR

SEQ ID NO: 28580 - protein, 8 aa, Homo sapiens
  misc_feature: Table A; Target 28580; HLA-B*56:01; GSG1L2; ENSG00000214978; CTA
APCPAEQA

SEQ ID NO: 28581 - protein, 9 aa, Homo sapiens
  misc_feature: Table A; Target 28581; HLA-A*30:02; GSG1L2; ENSG00000214978; CTA
APCPAEQAF

SEQ ID NO: 28582 - protein, 9 aa, Homo sapiens
  misc_feature: Table A; Target 28582; HLA-A*32:01; GSG1L2; ENSG00000214978; CTA
APCPAEQAF

SEQ ID NO: 28583 - protein, 9 aa, Homo sapiens
  misc_feature: Table A; Target 28583; HLA-B*07:02; GSG1L2; ENSG00000214978; CTA
APCPAEQAF

SEQ ID NO: 28584 - protein, 9 aa, Homo sapiens
  misc_feature: Table A; Target 28584; HLA-B*08:01; GSG1L2; ENSG00000214978; CTA
APCPAEQAF

SEQ ID NO: 28585 - protein, 9 aa, Homo sapiens
  misc_feature: Table A; Target 28585; HLA-B*15:01; GSG1L2; ENSG00000214978; CTA
APCPAEQAF

SEQ ID NO: 28586 - protein, 9 aa, Homo sapiens
  misc_feature: Table A; Target 28586; HLA-B*15:03; GSG1L2; ENSG00000214978; CTA
APCPAEQAF

SEQ ID NO: 28587 - protein, 9 aa, Homo sapiens
  misc_feature: Table A; Target 28587; HLA-B*35:01; GSG1L2; ENSG00000214978; CTA
APCPAEQAF

SEQ ID NO: 28588 - protein, 9 aa, Homo sapiens
  misc_feature: Table A; Target 28588; HLA-B*35:03; GSG1L2; ENSG00000214978; CTA
APCPAEQAF

SEQ ID NO: 28589 - protein, 9 aa, Homo sapiens
  misc_feature: Table A; Target 28589; HLA-B*37:01; GSG1L2; ENSG00000214978; CTA
APCPAEQAF

SEQ ID NO: 28590 - protein, 9 aa, Homo sapiens
  misc_feature: Table A; Target 28590; HLA-B*38:01; GSG1L2; ENSG00000214978; CTA
APCPAEQAF

SEQ ID NO: 28591 - protein, 9 aa, Homo sapiens
  misc_feature: Table A; Target 28591; HLA-B*55:01; GSG1L2; ENSG00000214978; CTA
APCPAEQAF

SEQ ID NO: 28592 - protein, 9 aa, Homo sapiens
  misc_feature: Table A; Target 28592; HLA-B*56:01; GSG1L2; ENSG00000214978; CTA
APCPAEQAF

SEQ ID NO: 28593 - protein, 9 aa, Homo sapiens
  misc_feature: Table A; Target 28593; HLA-C*01:02; GSG1L2; ENSG00000214978; CTA
APCPAEQAF

SEQ ID NO: 28594 - protein, 9 aa, Homo sapiens
  misc_feature: Table A; Target 28594; HLA-C*03:03; GSG1L2; ENSG00000214978; CTA
APCPAEQAF

SEQ ID NO: 28595 - protein, 9 aa, Homo sapiens
  misc_feature: Table A; Target 28595; HLA-C*04:01; GSG1L2; ENSG00000214978; CTA
APCPAEQAF

SEQ ID NO: 28596 - protein, 9 aa, Homo sapiens
  misc_feature: Table A; Target 28596; HLA-C*07:01; GSG1L2; ENSG00000214978; CTA
APCPAEQAF

SEQ ID NO: 28597 - protein, 9 aa, Homo sapiens
  misc_feature: Table A; Target 28597; HLA-C*07:02; GSG1L2; ENSG00000214978; CTA
APCPAEQAF

SEQ ID NO: 28598 - protein, 9 aa, Homo sapiens
  misc_feature: Table A; Target 28598; HLA-C*07:04; GSG1L2; ENSG00000214978; CTA
APCPAEQAF

SEQ ID NO: 28599 - protein, 9 aa, Homo sapiens
  misc_feature: Table A; Target 28599; HLA-C*12:03; GSG1L2; ENSG00000214978; CTA
APCPAEQAF

SEQ ID NO: 28600 - protein, 9 aa, Homo sapiens
  misc_feature: Table A; Target 28600; HLA-C*14:02; GSG1L2; ENSG00000214978; CTA
APCPAEQAF

SEQ ID NO: 28601 - protein, 9 aa, Homo sapiens
  misc_feature: Table A; Target 28601; HLA-C*16:01; GSG1L2; ENSG00000214978; CTA
APCPAEQAF

SEQ ID NO: 28602 - protein, 9 aa, Homo sapiens
  misc_feature: Table A; Target 28602; HLA-C*16:02; GSG1L2; ENSG00000214978; CTA
APCPAEQAF

SEQ ID NO: 28603 - protein, 9 aa, Homo sapiens
  misc_feature: Table A; Target 28603; HLA-A*32:01; GSG1L2; ENSG00000214978; CTA
AQNGSRHSQ

SEQ ID NO: 28604 - protein, 8 aa, Homo sapiens
  misc_feature: Table A; Target 28604; HLA-B*27:05; GSG1L2; ENSG00000214978; CTA
ARLEFTEK

SEQ ID NO: 28605 - protein, 8 aa, Homo sapiens
  misc_feature: Table A; Target 28605; HLA-A*02:04; GSG1L2; ENSG00000214978; CTA
AVLYIWEL

SEQ ID NO: 28606 - protein, 9 aa, Homo sapiens
  misc_feature: Table A; Target 28606; HLA-A*03:01; GSG1L2; ENSG00000214978; CTA
AVSVSAMSR

SEQ ID NO: 28607 - protein, 9 aa, Homo sapiens
  misc_feature: Table A; Target 28607; HLA-A*03:02; GSG1L2; ENSG00000214978; CTA
AVSVSAMSR

SEQ ID NO: 28608 - protein, 9 aa, Homo sapiens
  misc_feature: Table A; Target 28608; HLA-A*11:01; GSG1L2; ENSG00000214978; CTA
AVSVSAMSR

SEQ ID NO: 28609 - protein, 9 aa, Homo sapiens
  misc_feature: Table A; Target 28609; HLA-A*31:01; GSG1L2; ENSG00000214978; CTA
AVSVSAMSR

SEQ ID NO: 28610 - protein, 9 aa, Homo sapiens
  misc_feature: Table A; Target 28610; HLA-A*33:03; GSG1L2; ENSG00000214978; CTA
AVSVSAMSR

SEQ ID NO: 28611 - protein, 9 aa, Homo sapiens
  misc_feature: Table A; Target 28611; HLA-A*68:01; GSG1L2; ENSG00000214978; CTA
AVSVSAMSR

SEQ ID NO: 28612 - protein, 9 aa, Homo sapiens
  misc_feature: Table A; Target 28612; HLA-C*07:06; GSG1L2; ENSG00000214978; CTA
AVSVSAMSR

SEQ ID NO: 28613 - protein, 10 aa, Homo sapiens
  misc_feature: Table A; Target 28613; HLA-A*25:01; GSG1L2; ENSG00000214978; CTA
AVSVSAMSRF

SEQ ID NO: 28614 - protein, 10 aa, Homo sapiens
  misc_feature: Table A; Target 28614; HLA-A*26:01; GSG1L2; ENSG00000214978; CTA
AVSVSAMSRF

SEQ ID NO: 28615 - protein, 9 aa, Homo sapiens
  misc_feature: Table A; Target 28615; HLA-A*02:03; GSG1L2; ENSG00000214978; CTA
CLAVSVSAM

SEQ ID NO: 28616 - protein, 9 aa, Homo sapiens
  misc_feature: Table A; Target 28616; HLA-B*15:01; GSG1L2; ENSG00000214978; CTA
CLAVSVSAM

SEQ ID NO: 28617 - protein, 9 aa, Homo sapiens
  misc_feature: Table A; Target 28617; HLA-B*27:05; GSG1L2; ENSG00000214978; CTA
CLAVSVSAM

SEQ ID NO: 28618 - protein, 9 aa, Homo sapiens
  misc_feature: Table A; Target 28618; HLA-B*46:01; GSG1L2; ENSG00000214978; CTA
CLAVSVSAM

SEQ ID NO: 28619 - protein, 9 aa, Homo sapiens
  misc_feature: Table A; Target 28619; HLA-C*01:02; GSG1L2; ENSG00000214978; CTA
CLAVSVSAM

SEQ ID NO: 28620 - protein, 9 aa, Homo sapiens
  misc_feature: Table A; Target 28620; HLA-C*04:01; GSG1L2; ENSG00000214978; CTA
CLAVSVSAM

SEQ ID NO: 28621 - protein, 9 aa, Homo sapiens
  misc_feature: Table A; Target 28621; HLA-C*07:04; GSG1L2; ENSG00000214978; CTA
CLAVSVSAM

SEQ ID NO: 28622 - protein, 9 aa, Homo sapiens
  misc_feature: Table A; Target 28622; HLA-C*14:02; GSG1L2; ENSG00000214978; CTA
CLAVSVSAM

SEQ ID NO: 28623 - protein, 9 aa, Homo sapiens
  misc_feature: Table A; Target 28623; HLA-A*02:01; GSG1L2; ENSG00000214978; CTA
CLAWGSFAL

SEQ ID NO: 28624 - protein, 9 aa, Homo sapiens
  misc_feature: Table A; Target 28624; HLA-A*02:04; GSG1L2; ENSG00000214978; CTA
CLAWGSFAL

SEQ ID NO: 28625 - protein, 10 aa, Homo sapiens
  misc_feature: Table A; Target 28625; HLA-B*51:01; GSG1L2; ENSG00000214978; CTA
CPAEQAFRNV

SEQ ID NO: 28626 - protein, 10 aa, Homo sapiens
  misc_feature: Table A; Target 28626; HLA-B*56:01; GSG1L2; ENSG00000214978; CTA
CPAEQAFRNV

SEQ ID NO: 28627 - protein, 8 aa, Homo sapiens
  misc_feature: Table A; Target 28627; HLA-A*33:01; GSG1L2; ENSG00000214978; CTA
DALVAIFM

SEQ ID NO: 28628 - protein, 8 aa, Homo sapiens
  misc_feature: Table A; Target 28628; HLA-B*08:01; GSG1L2; ENSG00000214978; CTA
DALVAIFM

SEQ ID NO: 28629 - protein, 8 aa, Homo sapiens
  misc_feature: Table A; Target 28629; HLA-B*18:01; GSG1L2; ENSG00000214978; CTA
DALVAIFM

SEQ ID NO: 28630 - protein, 8 aa, Homo sapiens
  misc_feature: Table A; Target 28630; HLA-B*35:01; GSG1L2; ENSG00000214978; CTA
DALVAIFM

SEQ ID NO: 28631 - protein, 8 aa, Homo sapiens
  misc_feature: Table A; Target 28631; HLA-B*35:03; GSG1L2; ENSG00000214978; CTA
DALVAIFM

SEQ ID NO: 28632 - protein, 8 aa, Homo sapiens
  misc_feature: Table A; Target 28632; HLA-B*51:01; GSG1L2; ENSG00000214978; CTA
DALVAIFM

SEQ ID NO: 28633 - protein, 9 aa, Homo sapiens
  misc_feature: Table A; Target 28633; HLA-B*51:01; GSG1L2; ENSG00000214978; CTA
DALVAIFMV

SEQ ID NO: 28634 - protein, 9 aa, Homo sapiens
  misc_feature: Table A; Target 28634; HLA-B*54:01; GSG1L2; ENSG00000214978; CTA
DIVLILTSA

SEQ ID NO: 28635 - protein, 9 aa, Homo sapiens
  misc_feature: Table A; Target 28635; HLA-B*56:01; GSG1L2; ENSG00000214978; CTA
DIVLILTSA

SEQ ID NO: 28636 - protein, 8 aa, Homo sapiens
  misc_feature: Table A; Target 28636; HLA-B*35:03; GSG1L2; ENSG00000214978; CTA
DNNSQAVL

SEQ ID NO: 28637 - protein, 9 aa, Homo sapiens
  misc_feature: Table A; Target 28637; HLA-A*26:01; GSG1L2; ENSG00000214978; CTA
DNNSQAVLY

SEQ ID NO: 28638 - protein, 9 aa, Homo sapiens
  misc_feature: Table A; Target 28638; HLA-A*33:01; GSG1L2; ENSG00000214978; CTA
DNNSQAVLY

SEQ ID NO: 28639 - protein, 9 aa, Homo sapiens
  misc_feature: Table A; Target 28639; HLA-A*33:03; GSG1L2; ENSG00000214978; CTA
DNNSQAVLY

SEQ ID NO: 28640 - protein, 9 aa, Homo sapiens
  misc_feature: Table A; Target 28640; HLA-B*18:01; GSG1L2; ENSG00000214978; CTA
DNNSQAVLY

SEQ ID NO: 28641 - protein, 9 aa, Homo sapiens
  misc_feature: Table A; Target 28641; HLA-B*35:01; GSG1L2; ENSG00000214978; CTA
DNNSQAVLY

SEQ ID NO: 28642 - protein, 9 aa, Homo sapiens
  misc_feature: Table A; Target 28642; HLA-B*07:02; GSG1L2; ENSG00000214978; CTA
DRAKQQQAL

SEQ ID NO: 28643 - protein, 9 aa, Homo sapiens
  misc_feature: Table A; Target 28643; HLA-B*08:01; GSG1L2; ENSG00000214978; CTA
DRAKQQQAL

SEQ ID NO: 28644 - protein, 9 aa, Homo sapiens
  misc_feature: Table A; Target 28644; HLA-B*27:05; GSG1L2; ENSG00000214978; CTA
DRAKQQQAL

SEQ ID NO: 28645 - protein, 9 aa, Homo sapiens
  misc_feature: Table A; Target 28645; HLA-B*38:01; GSG1L2; ENSG00000214978; CTA
DRAKQQQAL

SEQ ID NO: 28646 - protein, 9 aa, Homo sapiens
  misc_feature: Table A; Target 28646; HLA-B*39:01; GSG1L2; ENSG00000214978; CTA
DRAKQQQAL

SEQ ID NO: 28647 - protein, 9 aa, Homo sapiens
  misc_feature: Table A; Target 28647; HLA-C*06:02; GSG1L2; ENSG00000214978; CTA
DRAKQQQAL

SEQ ID NO: 28648 - protein, 9 aa, Homo sapiens
  misc_feature: Table A; Target 28648; HLA-C*07:02; GSG1L2; ENSG00000214978; CTA
DRAKQQQAL

SEQ ID NO: 28649 - protein, 8 aa, Homo sapiens
  misc_feature: Table A; Target 28649; HLA-B*44:02; GSG1L2; ENSG00000214978; CTA
EDWKPQTW

SEQ ID NO: 28650 - protein, 10 aa, Homo sapiens
  misc_feature: Table A; Target 28650; HLA-A*33:01; GSG1L2; ENSG00000214978; CTA
ELGDDKFIQR

SEQ ID NO: 28651 - protein, 10 aa, Homo sapiens
  misc_feature: Table A; Target 28651; HLA-A*33:03; GSG1L2; ENSG00000214978; CTA
ELGDDKFIQR

SEQ ID NO: 28652 - protein, 10 aa, Homo sapiens
  misc_feature: Table A; Target 28652; HLA-A*68:01; GSG1L2; ENSG00000214978; CTA
ELGDDKFIQR

SEQ ID NO: 28653 - protein, 10 aa, Homo sapiens
  misc_feature: Table A; Target 28653; HLA-C*07:06; GSG1L2; ENSG00000214978; CTA
ELGDDKFIQR

SEQ ID NO: 28654 - protein, 11 aa, Homo sapiens
  misc_feature: Table A; Target 28654; HLA-A*33:01; GSG1L2; ENSG00000214978; CTA
ESLNGEDEKCR

SEQ ID NO: 28655 - protein, 11 aa, Homo sapiens
  misc_feature: Table A; Target 28655; HLA-A*33:03; GSG1L2; ENSG00000214978; CTA
ESLNGEDEKCR

SEQ ID NO: 28656 - protein, 9 aa, Homo sapiens
  misc_feature: Table A; Target 28656; HLA-A*02:04; GSG1L2; ENSG00000214978; CTA
EVLDIVLIL

SEQ ID NO: 28657 - protein, 9 aa, Homo sapiens
  misc_feature: Table A; Target 28657; HLA-A*23:01; GSG1L2; ENSG00000214978; CTA
EVLDIVLIL

SEQ ID NO: 28658 - protein, 9 aa, Homo sapiens
  misc_feature: Table A; Target 28658; HLA-A*25:01; GSG1L2; ENSG00000214978; CTA
EVLDIVLIL

SEQ ID NO: 28659 - protein, 9 aa, Homo sapiens
  misc_feature: Table A; Target 28659; HLA-A*26:01; GSG1L2; ENSG00000214978; CTA
EVLDIVLIL

SEQ ID NO: 28660 - protein, 9 aa, Homo sapiens
  misc_feature: Table A; Target 28660; HLA-A*29:02; GSG1L2; ENSG00000214978; CTA
EVLDIVLIL

SEQ ID NO: 28661 - protein, 9 aa, Homo sapiens
  misc_feature: Table A; Target 28661; HLA-A*33:03; GSG1L2; ENSG00000214978; CTA
EVLDIVLIL

SEQ ID NO: 28662 - protein, 9 aa, Homo sapiens
  misc_feature: Table A; Target 28662; HLA-A*68:02; GSG1L2; ENSG00000214978; CTA
EVLDIVLIL

SEQ ID NO: 28663 - protein, 9 aa, Homo sapiens
  misc_feature: Table A; Target 28663; HLA-B*35:03; GSG1L2; ENSG00000214978; CTA
EVLDIVLIL

SEQ ID NO: 28664 - protein, 10 aa, Homo sapiens
  misc_feature: Table A; Target 28664; HLA-A*68:02; GSG1L2; ENSG00000214978; CTA
EVLDIVLILT

SEQ ID NO: 28665 - protein, 9 aa, Homo sapiens
  misc_feature: Table A; Target 28665; HLA-A*02:01; GSG1L2; ENSG00000214978; CTA
FALCLAVSV

SEQ ID NO: 28666 - protein, 9 aa, Homo sapiens
  misc_feature: Table A; Target 28666; HLA-B*51:01; GSG1L2; ENSG00000214978; CTA
FALCLAVSV

SEQ ID NO: 28667 - protein, 9 aa, Homo sapiens
  misc_feature: Table A; Target 28667; HLA-B*54:01; GSG1L2; ENSG00000214978; CTA
FALCLAVSV

SEQ ID NO: 28668 - protein, 9 aa, Homo sapiens
  misc_feature: Table A; Target 28668; HLA-C*02:02; GSG1L2; ENSG00000214978; CTA
FALCLAVSV

SEQ ID NO: 28669 - protein, 9 aa, Homo sapiens
  misc_feature: Table A; Target 28669; HLA-C*12:03; GSG1L2; ENSG00000214978; CTA
FALCLAVSV

SEQ ID NO: 28670 - protein, 9 aa, Homo sapiens
  misc_feature: Table A; Target 28670; HLA-C*16:04; GSG1L2; ENSG00000214978; CTA
FALCLAVSV

SEQ ID NO: 28671 - protein, 11 aa, Homo sapiens
  misc_feature: Table A; Target 28671; HLA-B*57:01; GSG1L2; ENSG00000214978; CTA
FSLTAVVSSHW

SEQ ID NO: 28672 - protein, 11 aa, Homo sapiens
  misc_feature: Table A; Target 28672; HLA-B*58:01; GSG1L2; ENSG00000214978; CTA
FSLTAVVSSHW

SEQ ID NO: 28673 - protein, 8 aa, Homo sapiens
  misc_feature: Table A; Target 28673; HLA-A*23:01; GSG1L2; ENSG00000214978; CTA
FTAARLEF

SEQ ID NO: 28674 - protein, 8 aa, Homo sapiens
  misc_feature: Table A; Target 28674; HLA-A*32:01; GSG1L2; ENSG00000214978; CTA
FTAARLEF

SEQ ID NO: 28675 - protein, 8 aa, Homo sapiens
  misc_feature: Table A; Target 28675; HLA-B*08:01; GSG1L2; ENSG00000214978; CTA
FTAARLEF

SEQ ID NO: 28676 - protein, 8 aa, Homo sapiens
  misc_feature: Table A; Target 28676; HLA-B*46:01; GSG1L2; ENSG00000214978; CTA
FTAARLEF

SEQ ID NO: 28677 - protein, 8 aa, Homo sapiens
  misc_feature: Table A; Target 28677; HLA-C*02:02; GSG1L2; ENSG00000214978; CTA
FTAARLEF

SEQ ID NO: 28678 - protein, 8 aa, Homo sapiens
  misc_feature: Table A; Target 28678; HLA-C*03:04; GSG1L2; ENSG00000214978; CTA
FTAARLEF

SEQ ID NO: 28679 - protein, 8 aa, Homo sapiens
  misc_feature: Table A; Target 28679; HLA-C*16:01; GSG1L2; ENSG00000214978; CTA
FTAARLEF

SEQ ID NO: 28680 - protein, 9 aa, Homo sapiens
  misc_feature: Table A; Target 28680; HLA-A*01:01; GSG1L2; ENSG00000214978; CTA
FTEKQQAQN

SEQ ID NO: 28681 - protein, 11 aa, Homo sapiens
  misc_feature: Table A; Target 28681; HLA-B*15:01; GSG1L2; ENSG00000214978; CTA
GAAPCPAEQAF

SEQ ID NO: 28682 - protein, 8 aa, Homo sapiens
  misc_feature: Table A; Target 28682; HLA-A*11:01; GSG1L2; ENSG00000214978; CTA
GDDKFIQR

SEQ ID NO: 28683 - protein, 8 aa, Homo sapiens
  misc_feature: Table A; Target 28683; HLA-A*31:01; GSG1L2; ENSG00000214978; CTA
GDDKFIQR

SEQ ID NO: 28684 - protein, 10 aa, Homo sapiens
  misc_feature: Table A; Target 28684; HLA-B*44:02; GSG1L2; ENSG00000214978; CTA
GDDKFIQRGF

SEQ ID NO: 28685 - protein, 10 aa, Homo sapiens
  misc_feature: Table A; Target 28685; HLA-B*44:03; GSG1L2; ENSG00000214978; CTA
GDDKFIQRGF

SEQ ID NO: 28686 - protein, 9 aa, Homo sapiens
  misc_feature: Table A; Target 28686; HLA-B*18:01; GSG1L2; ENSG00000214978; CTA
GEDEKCRSF

SEQ ID NO: 28687 - protein, 9 aa, Homo sapiens
  misc_feature: Table A; Target 28687; HLA-B*37:01; GSG1L2; ENSG00000214978; CTA
GEDEKCRSF

SEQ ID NO: 28688 - protein, 9 aa, Homo sapiens
  misc_feature: Table A; Target 28688; HLA-B*44:02; GSG1L2; ENSG00000214978; CTA
GEDEKCRSF

SEQ ID NO: 28689 - protein, 9 aa, Homo sapiens
  misc_feature: Table A; Target 28689; HLA-B*44:03; GSG1L2; ENSG00000214978; CTA
GEDEKCRSF

SEQ ID NO: 28690 - protein, 8 aa, Homo sapiens
  misc_feature: Table A; Target 28690; HLA-A*30:01; GSG1L2; ENSG00000214978; CTA
GEVLDIVL

SEQ ID NO: 28691 - protein, 8 aa, Homo sapiens
  misc_feature: Table A; Target 28691; HLA-B*40:01; GSG1L2; ENSG00000214978; CTA
GEVLDIVL

SEQ ID NO: 28692 - protein, 9 aa, Homo sapiens
  misc_feature: Table A; Target 28692; HLA-A*30:01; GSG1L2; ENSG00000214978; CTA
GEVLDIVLI

SEQ ID NO: 28693 - protein, 9 aa, Homo sapiens
  misc_feature: Table A; Target 28693; HLA-B*40:01; GSG1L2; ENSG00000214978; CTA
GEVLDIVLI

SEQ ID NO: 28694 - protein, 9 aa, Homo sapiens
  misc_feature: Table A; Target 28694; HLA-B*44:02; GSG1L2; ENSG00000214978; CTA
GEVLDIVLI

SEQ ID NO: 28695 - protein, 9 aa, Homo sapiens
  misc_feature: Table A; Target 28695; HLA-B*44:03; GSG1L2; ENSG00000214978; CTA
GEVLDIVLI

SEQ ID NO: 28696 - protein, 9 aa, Homo sapiens
  misc_feature: Table A; Target 28696; HLA-B*49:01; GSG1L2; ENSG00000214978; CTA
GEVLDIVLI

SEQ ID NO: 28697 - protein, 10 aa, Homo sapiens
  misc_feature: Table A; Target 28697; HLA-B*40:01; GSG1L2; ENSG00000214978; CTA
GEVLDIVLIL

SEQ ID NO: 28698 - protein, 9 aa, Homo sapiens
  misc_feature: Table A; Target 28698; HLA-A*02:01; GSG1L2; ENSG00000214978; CTA
GLLGMVAHM

SEQ ID NO: 28699 - protein, 9 aa, Homo sapiens
  misc_feature: Table A; Target 28699; HLA-A*02:04; GSG1L2; ENSG00000214978; CTA
GLLGMVAHM

SEQ ID NO: 28700 - protein, 9 aa, Homo sapiens
  misc_feature: Table A; Target 28700; HLA-A*29:02; GSG1L2; ENSG00000214978; CTA
GLLGMVAHM

SEQ ID NO: 28701 - protein, 9 aa, Homo sapiens
  misc_feature: Table A; Target 28701; HLA-B*55:01; GSG1L2; ENSG00000214978; CTA
GLLGMVAHM

SEQ ID NO: 28702 - protein, 8 aa, Homo sapiens
  misc_feature: Table A; Target 28702; HLA-C*07:01; GSG1L2; ENSG00000214978; CTA
GMVAHMMY

SEQ ID NO: 28703 - protein, 9 aa, Homo sapiens
  misc_feature: Table A; Target 28703; HLA-B*27:05; GSG1L2; ENSG00000214978; CTA
GRMDNNSQA

SEQ ID NO: 28704 - protein, 10 aa, Homo sapiens
  misc_feature: Table A; Target 28704; HLA-B*27:02; GSG1L2; ENSG00000214978; CTA
GRMDNNSQAV

SEQ ID NO: 28705 - protein, 10 aa, Homo sapiens
  misc_feature: Table A; Target 28705; HLA-B*27:05; GSG1L2; ENSG00000214978; CTA
GRMDNNSQAV

SEQ ID NO: 28706 - protein, 11 aa, Homo sapiens
  misc_feature: Table A; Target 28706; HLA-B*27:02; GSG1L2; ENSG00000214978; CTA
GRMDNNSQAVL

SEQ ID NO: 28707 - protein, 11 aa, Homo sapiens
  misc_feature: Table A; Target 28707; HLA-B*27:05; GSG1L2; ENSG00000214978; CTA
GRMDNNSQAVL

SEQ ID NO: 28708 - protein, 11 aa, Homo sapiens
  misc_feature: Table A; Target 28708; HLA-C*16:04; GSG1L2; ENSG00000214978; CTA
GRMDNNSQAVL

SEQ ID NO: 28709 - protein, 9 aa, Homo sapiens
  misc_feature: Table A; Target 28709; HLA-B*13:02; GSG1L2; ENSG00000214978; CTA
GSFALCLAV

SEQ ID NO: 28710 - protein, 9 aa, Homo sapiens
  misc_feature: Table A; Target 28710; HLA-B*57:01; GSG1L2; ENSG00000214978; CTA
GSRHSQHSF

SEQ ID NO: 28711 - protein, 9 aa, Homo sapiens
  misc_feature: Table A; Target 28711; HLA-A*03:02; GSG1L2; ENSG00000214978; CTA
HLPPGAPGK

SEQ ID NO: 28712 - protein, 10 aa, Homo sapiens
  misc_feature: Table A; Target 28712; HLA-A*02:03; GSG1L2; ENSG00000214978; CTA
HLPPGAPGKV

SEQ ID NO: 28713 - protein, 10 aa, Homo sapiens
  misc_feature: Table A; Target 28713; HLA-A*02:07; GSG1L2; ENSG00000214978; CTA
HLPPGAPGKV

SEQ ID NO: 28714 - protein, 10 aa, Homo sapiens
  misc_feature: Table A; Target 28714; HLA-A*68:02; GSG1L2; ENSG00000214978; CTA
HLPPGAPGKV

SEQ ID NO: 28715 - protein, 8 aa, Homo sapiens
  misc_feature: Table A; Target 28715; HLA-B*54:01; GSG1L2; ENSG00000214978; CTA
HSFLEPEA

SEQ ID NO: 28716 - protein, 9 aa, Homo sapiens
  misc_feature: Table A; Target 28716; HLA-A*23:01; GSG1L2; ENSG00000214978; CTA
IFMVLAGLL

SEQ ID NO: 28717 - protein, 9 aa, Homo sapiens
  misc_feature: Table A; Target 28717; HLA-A*24:02; GSG1L2; ENSG00000214978; CTA
IFMVLAGLL

SEQ ID NO: 28718 - protein, 8 aa, Homo sapiens
  misc_feature: Table A; Target 28718; HLA-A*23:01; GSG1L2; ENSG00000214978; CTA
IFQITVNL

SEQ ID NO: 28719 - protein, 8 aa, Homo sapiens
  misc_feature: Table A; Target 28719; HLA-C*14:02; GSG1L2; ENSG00000214978; CTA
IFQITVNL

SEQ ID NO: 28720 - protein, 8 aa, Homo sapiens
  misc_feature: Table A; Target 28720; HLA-B*51:01; GSG1L2; ENSG00000214978; CTA
IGGEVLDI

SEQ ID NO: 28721 - protein, 8 aa, Homo sapiens
  misc_feature: Table A; Target 28721; HLA-A*23:01; GSG1L2; ENSG00000214978; CTA
ILTSAILL

SEQ ID NO: 28722 - protein, 10 aa, Homo sapiens
  misc_feature: Table A; Target 28722; HLA-B*57:01; GSG1L2; ENSG00000214978; CTA
ITVNLGPEDW

SEQ ID NO: 28723 - protein, 10 aa, Homo sapiens
  misc_feature: Table A; Target 28723; HLA-B*58:01; GSG1L2; ENSG00000214978; CTA
ITVNLGPEDW

SEQ ID NO: 28724 - protein, 8 aa, Homo sapiens
  misc_feature: Table A; Target 28724; HLA-B*54:01; GSG1L2; ENSG00000214978; CTA
IVLILTSA

SEQ ID NO: 28725 - protein, 9 aa, Homo sapiens
  misc_feature: Table A; Target 28725; HLA-A*23:01; GSG1L2; ENSG00000214978; CTA
IVLILTSAI

SEQ ID NO: 28726 - protein, 9 aa, Homo sapiens
  misc_feature: Table A; Target 28726; HLA-C*01:02; GSG1L2; ENSG00000214978; CTA
IVLILTSAI

SEQ ID NO: 28727 - protein, 9 aa, Homo sapiens
  misc_feature: Table A; Target 28727; HLA-A*02:04; GSG1L2; ENSG00000214978; CTA
KQQQALLLL

SEQ ID NO: 28728 - protein, 9 aa, Homo sapiens
  misc_feature: Table A; Target 28728; HLA-B*13:02; GSG1L2; ENSG00000214978; CTA
KQQQALLLL

SEQ ID NO: 28729 - protein, 9 aa, Homo sapiens
  misc_feature: Table A; Target 28729; HLA-B*54:01; GSG1L2; ENSG00000214978; CTA
LAGLLGMVA

SEQ ID NO: 28730 - protein, 9 aa, Homo sapiens
  misc_feature: Table A; Target 28730; HLA-B*54:01; GSG1L2; ENSG00000214978; CTA
LALTFSLTA

SEQ ID NO: 28731 - protein, 8 aa, Homo sapiens
  misc_feature: Table A; Target 28731; HLA-A*30:01; GSG1L2; ENSG00000214978; CTA
LAVSVSAM

SEQ ID NO: 28732 - protein, 8 aa, Homo sapiens
  misc_feature: Table A; Target 28732; HLA-B*08:01; GSG1L2; ENSG00000214978; CTA
LAVSVSAM

SEQ ID NO: 28733 - protein, 8 aa, Homo sapiens
  misc_feature: Table A; Target 28733; HLA-B*15:01; GSG1L2; ENSG00000214978; CTA
LAVSVSAM

SEQ ID NO: 28734 - protein, 8 aa, Homo sapiens
  misc_feature: Table A; Target 28734; HLA-B*15:03; GSG1L2; ENSG00000214978; CTA
LAVSVSAM

SEQ ID NO: 28735 - protein, 8 aa, Homo sapiens
  misc_feature: Table A; Target 28735; HLA-B*18:01; GSG1L2; ENSG00000214978; CTA
LAVSVSAM

SEQ ID NO: 28736 - protein, 8 aa, Homo sapiens
  misc_feature: Table A; Target 28736; HLA-B*35:01; GSG1L2; ENSG00000214978; CTA
LAVSVSAM

SEQ ID NO: 28737 - protein, 8 aa, Homo sapiens
  misc_feature: Table A; Target 28737; HLA-B*35:03; GSG1L2; ENSG00000214978; CTA
LAVSVSAM

SEQ ID NO: 28738 - protein, 8 aa, Homo sapiens
  misc_feature: Table A; Target 28738; HLA-B*39:01; GSG1L2; ENSG00000214978; CTA
LAVSVSAM

SEQ ID NO: 28739 - protein, 8 aa, Homo sapiens
  misc_feature: Table A; Target 28739; HLA-B*40:02; GSG1L2; ENSG00000214978; CTA
LAVSVSAM

SEQ ID NO: 28740 - protein, 8 aa, Homo sapiens
  misc_feature: Table A; Target 28740; HLA-B*46:01; GSG1L2; ENSG00000214978; CTA
LAVSVSAM

SEQ ID NO: 28741 - protein, 8 aa, Homo sapiens
  misc_feature: Table A; Target 28741; HLA-B*51:01; GSG1L2; ENSG00000214978; CTA
LAVSVSAM

SEQ ID NO: 28742 - protein, 8 aa, Homo sapiens
  misc_feature: Table A; Target 28742; HLA-B*54:01; GSG1L2; ENSG00000214978; CTA
LAVSVSAM

SEQ ID NO: 28743 - protein, 8 aa, Homo sapiens
  misc_feature: Table A; Target 28743; HLA-B*58:01; GSG1L2; ENSG00000214978; CTA
LAVSVSAM

SEQ ID NO: 28744 - protein, 8 aa, Homo sapiens
  misc_feature: Table A; Target 28744; HLA-C*01:02; GSG1L2; ENSG00000214978; CTA
LAVSVSAM

SEQ ID NO: 28745 - protein, 8 aa, Homo sapiens
  misc_feature: Table A; Target 28745; HLA-C*02:02; GSG1L2; ENSG00000214978; CTA
LAVSVSAM

SEQ ID NO: 28746 - protein, 8 aa, Homo sapiens
  misc_feature: Table A; Target 28746; HLA-C*03:03; GSG1L2; ENSG00000214978; CTA
LAVSVSAM

SEQ ID NO: 28747 - protein, 8 aa, Homo sapiens
  misc_feature: Table A; Target 28747; HLA-C*03:04; GSG1L2; ENSG00000214978; CTA
LAVSVSAM

SEQ ID NO: 28748 - protein, 8 aa, Homo sapiens
  misc_feature: Table A; Target 28748; HLA-C*05:01; GSG1L2; ENSG00000214978; CTA
LAVSVSAM

SEQ ID NO: 28749 - protein, 8 aa, Homo sapiens
  misc_feature: Table A; Target 28749; HLA-C*07:01; GSG1L2; ENSG00000214978; CTA
LAVSVSAM

SEQ ID NO: 28750 - protein, 8 aa, Homo sapiens
  misc_feature: Table A; Target 28750; HLA-C*07:04; GSG1L2; ENSG00000214978; CTA
LAVSVSAM

SEQ ID NO: 28751 - protein, 8 aa, Homo sapiens
  misc_feature: Table A; Target 28751; HLA-C*12:03; GSG1L2; ENSG00000214978; CTA
LAVSVSAM

SEQ ID NO: 28752 - protein, 8 aa, Homo sapiens
  misc_feature: Table A; Target 28752; HLA-C*14:02; GSG1L2; ENSG00000214978; CTA
LAVSVSAM

SEQ ID NO: 28753 - protein, 8 aa, Homo sapiens
  misc_feature: Table A; Target 28753; HLA-C*16:01; GSG1L2; ENSG00000214978; CTA
LAVSVSAM

SEQ ID NO: 28754 - protein, 8 aa, Homo sapiens
  misc_feature: Table A; Target 28754; HLA-C*16:02; GSG1L2; ENSG00000214978; CTA
LAVSVSAM

SEQ ID NO: 28755 - protein, 8 aa, Homo sapiens
  misc_feature: Table A; Target 28755; HLA-C*16:04; GSG1L2; ENSG00000214978; CTA
LAVSVSAM

SEQ ID NO: 28756 - protein, 10 aa, Homo sapiens
  misc_feature: Table A; Target 28756; HLA-A*68:01; GSG1L2; ENSG00000214978; CTA
LAVSVSAMSR

SEQ ID NO: 28757 - protein, 10 aa, Homo sapiens
  misc_feature: Table A; Target 28757; HLA-B*27:02; GSG1L2; ENSG00000214978; CTA
LAVSVSAMSR

SEQ ID NO: 28758 - protein, 10 aa, Homo sapiens
  misc_feature: Table A; Target 28758; HLA-C*07:06; GSG1L2; ENSG00000214978; CTA
LAVSVSAMSR

SEQ ID NO: 28759 - protein, 11 aa, Homo sapiens
  misc_feature: Table A; Target 28759; HLA-C*02:02; GSG1L2; ENSG00000214978; CTA
LAVSVSAMSRF

SEQ ID NO: 28760 - protein, 8 aa, Homo sapiens
  misc_feature: Table A; Target 28760; HLA-C*03:04; GSG1L2; ENSG00000214978; CTA
LAWGSFAL

SEQ ID NO: 28761 - protein, 9 aa, Homo sapiens
  misc_feature: Table A; Target 28761; HLA-B*54:01; GSG1L2; ENSG00000214978; CTA
LCLAVSVSA

SEQ ID NO: 28762 - protein, 10 aa, Homo sapiens
  misc_feature: Table A; Target 28762; HLA-C*04:01; GSG1L2; ENSG00000214978; CTA
LCLAVSVSAM

SEQ ID NO: 28763 - protein, 9 aa, Homo sapiens
  misc_feature: Table A; Target 28763; HLA-A*30:01; GSG1L2; ENSG00000214978; CTA
LEFTEKQQA

SEQ ID NO: 28764 - protein, 9 aa, Homo sapiens
  misc_feature: Table A; Target 28764; HLA-B*18:01; GSG1L2; ENSG00000214978; CTA
LEFTEKQQA

SEQ ID NO: 28765 - protein, 9 aa, Homo sapiens
  misc_feature: Table A; Target 28765; HLA-B*40:01; GSG1L2; ENSG00000214978; CTA
LEFTEKQQA

SEQ ID NO: 28766 - protein, 9 aa, Homo sapiens
  misc_feature: Table A; Target 28766; HLA-B*40:02; GSG1L2; ENSG00000214978; CTA
LEFTEKQQA

SEQ ID NO: 28767 - protein, 9 aa, Homo sapiens
  misc_feature: Table A; Target 28767; HLA-B*44:02; GSG1L2; ENSG00000214978; CTA
LEFTEKQQA

SEQ ID NO: 28768 - protein, 9 aa, Homo sapiens
  misc_feature: Table A; Target 28768; HLA-B*44:03; GSG1L2; ENSG00000214978; CTA
LEFTEKQQA

SEQ ID NO: 28769 - protein, 9 aa, Homo sapiens
  misc_feature: Table A; Target 28769; HLA-B*49:01; GSG1L2; ENSG00000214978; CTA
LEFTEKQQA

SEQ ID NO: 28770 - protein, 9 aa, Homo sapiens
  misc_feature: Table A; Target 28770; HLA-B*49:01; GSG1L2; ENSG00000214978; CTA
LEPEASESI

SEQ ID NO: 28771 - protein, 10 aa, Homo sapiens
  misc_feature: Table A; Target 28771; HLA-B*44:02; GSG1L2; ENSG00000214978; CTA
LEPEASESIW

SEQ ID NO: 28772 - protein, 10 aa, Homo sapiens
  misc_feature: Table A; Target 28772; HLA-B*44:03; GSG1L2; ENSG00000214978; CTA
LEPEASESIW

SEQ ID NO: 28773 - protein, 10 aa, Homo sapiens
  misc_feature: Table A; Target 28773; HLA-B*57:01; GSG1L2; ENSG00000214978; CTA
LEPEASESIW

SEQ ID NO: 28774 - protein, 10 aa, Homo sapiens
  misc_feature: Table A; Target 28774; HLA-C*16:04; GSG1L2; ENSG00000214978; CTA
LEPEASESIW

SEQ ID NO: 28775 - protein, 9 aa, Homo sapiens
  misc_feature: Table A; Target 28775; HLA-A*11:01; GSG1L2; ENSG00000214978; CTA
LGDDKFIQR

SEQ ID NO: 28776 - protein, 9 aa, Homo sapiens
  misc_feature: Table A; Target 28776; HLA-A*31:01; GSG1L2; ENSG00000214978; CTA
LGDDKFIQR

SEQ ID NO: 28777 - protein, 8 aa, Homo sapiens
  misc_feature: Table A; Target 28777; HLA-B*08:01; GSG1L2; ENSG00000214978; CTA
LGMVAHMM

SEQ ID NO: 28778 - protein, 8 aa, Homo sapiens
  misc_feature: Table A; Target 28778; HLA-C*07:01; GSG1L2; ENSG00000214978; CTA
LLGMVAHM

SEQ ID NO: 28779 - protein, 8 aa, Homo sapiens
  misc_feature: Table A; Target 28779; HLA-C*07:04; GSG1L2; ENSG00000214978; CTA
LLGMVAHM

SEQ ID NO: 28780 - protein, 9 aa, Homo sapiens
  misc_feature: Table A; Target 28780; HLA-A*02:01; GSG1L2; ENSG00000214978; CTA
LLLPVCLAL

SEQ ID NO: 28781 - protein, 9 aa, Homo sapiens
  misc_feature: Table A; Target 28781; HLA-A*02:04; GSG1L2; ENSG00000214978; CTA
LLLPVCLAL

SEQ ID NO: 28782 - protein, 9 aa, Homo sapiens
  misc_feature: Table A; Target 28782; HLA-B*51:01; GSG1L2; ENSG00000214978; CTA
LPPGAPGKV

SEQ ID NO: 28783 - protein, 11 aa, Homo sapiens
  misc_feature: Table A; Target 28783; HLA-B*07:02; GSG1L2; ENSG00000214978; CTA
LPPGAPGKVSI

SEQ ID NO: 28784 - protein, 11 aa, Homo sapiens
  misc_feature: Table A; Target 28784; HLA-B*51:01; GSG1L2; ENSG00000214978; CTA
LPPGAPGKVSI

SEQ ID NO: 28785 - protein, 11 aa, Homo sapiens
  misc_feature: Table A; Target 28785; HLA-B*54:01; GSG1L2; ENSG00000214978; CTA
LPPGAPGKVSI

SEQ ID NO: 28786 - protein, 11 aa, Homo sapiens
  misc_feature: Table A; Target 28786; HLA-B*56:01; GSG1L2; ENSG00000214978; CTA
LPPGAPGKVSI

SEQ ID NO: 28787 - protein, 11 aa, Homo sapiens
  misc_feature: Table A; Target 28787; HLA-C*07:02; GSG1L2; ENSG00000214978; CTA
LPPGAPGKVSI

SEQ ID NO: 28788 - protein, 9 aa, Homo sapiens
  misc_feature: Table A; Target 28788; HLA-B*35:01; GSG1L2; ENSG00000214978; CTA
LPVCLALTF

SEQ ID NO: 28789 - protein, 9 aa, Homo sapiens
  misc_feature: Table A; Target 28789; HLA-B*35:03; GSG1L2; ENSG00000214978; CTA
LPVCLALTF

SEQ ID NO: 28790 - protein, 9 aa, Homo sapiens
  misc_feature: Table A; Target 28790; HLA-B*51:01; GSG1L2; ENSG00000214978; CTA
LPVCLALTF

SEQ ID NO: 28791 - protein, 8 aa, Homo sapiens
  misc_feature: Table A; Target 28791; HLA-C*03:03; GSG1L2; ENSG00000214978; CTA
LSIGGEVL

SEQ ID NO: 28792 - protein, 8 aa, Homo sapiens
  misc_feature: Table A; Target 28792; HLA-C*03:04; GSG1L2; ENSG00000214978; CTA
LSIGGEVL

SEQ ID NO: 28793 - protein, 8 aa, Homo sapiens
  misc_feature: Table A; Target 28793; HLA-C*05:01; GSG1L2; ENSG00000214978; CTA
LSIGGEVL

SEQ ID NO: 28794 - protein, 9 aa, Homo sapiens
  misc_feature: Table A; Target 28794; HLA-A*24:02; GSG1L2; ENSG00000214978; CTA
LTAVVSSHW

SEQ ID NO: 28795 - protein, 9 aa, Homo sapiens
  misc_feature: Table A; Target 28795; HLA-A*25:01; GSG1L2; ENSG00000214978; CTA
LTAVVSSHW

SEQ ID NO: 28796 - protein, 9 aa, Homo sapiens
  misc_feature: Table A; Target 28796; HLA-A*26:01; GSG1L2; ENSG00000214978; CTA
LTAVVSSHW

SEQ ID NO: 28797 - protein, 9 aa, Homo sapiens
  misc_feature: Table A; Target 28797; HLA-A*32:01; GSG1L2; ENSG00000214978; CTA
LTAVVSSHW

SEQ ID NO: 28798 - protein, 9 aa, Homo sapiens
  misc_feature: Table A; Target 28798; HLA-B*44:02; GSG1L2; ENSG00000214978; CTA
LTAVVSSHW

SEQ ID NO: 28799 - protein, 9 aa, Homo sapiens
  misc_feature: Table A; Target 28799; HLA-B*44:03; GSG1L2; ENSG00000214978; CTA
LTAVVSSHW

SEQ ID NO: 28800 - protein, 9 aa, Homo sapiens
  misc_feature: Table A; Target 28800; HLA-B*57:01; GSG1L2; ENSG00000214978; CTA
LTAVVSSHW

SEQ ID NO: 28801 - protein, 9 aa, Homo sapiens
  misc_feature: Table A; Target 28801; HLA-B*58:01; GSG1L2; ENSG00000214978; CTA
LTAVVSSHW

SEQ ID NO: 28802 - protein, 9 aa, Homo sapiens
  misc_feature: Table A; Target 28802; HLA-C*16:04; GSG1L2; ENSG00000214978; CTA
LTAVVSSHW

SEQ ID NO: 28803 - protein, 8 aa, Homo sapiens
  misc_feature: Table A; Target 28803; HLA-A*68:02; GSG1L2; ENSG00000214978; CTA
LTFSLTAV

SEQ ID NO: 28804 - protein, 9 aa, Homo sapiens
  misc_feature: Table A; Target 28804; HLA-A*68:02; GSG1L2; ENSG00000214978; CTA
LTFSLTAVV

SEQ ID NO: 28805 - protein, 9 aa, Homo sapiens
  misc_feature: Table A; Target 28805; HLA-C*02:02; GSG1L2; ENSG00000214978; CTA
LTFSLTAVV

SEQ ID NO: 28806 - protein, 11 aa, Homo sapiens
  misc_feature: Table A; Target 28806; HLA-A*68:02; GSG1L2; ENSG00000214978; CTA
LTSAILLGSRV

SEQ ID NO: 28807 - protein, 8 aa, Homo sapiens
  misc_feature: Table A; Target 28807; HLA-B*37:01; GSG1L2; ENSG00000214978; CTA
MDNNSQAV

SEQ ID NO: 28808 - protein, 9 aa, Homo sapiens
  misc_feature: Table A; Target 28808; HLA-A*30:01; GSG1L2; ENSG00000214978; CTA
MDNNSQAVL

SEQ ID NO: 28809 - protein, 9 aa, Homo sapiens
  misc_feature: Table A; Target 28809; HLA-B*37:01; GSG1L2; ENSG00000214978; CTA
MDNNSQAVL

SEQ ID NO: 28810 - protein, 9 aa, Homo sapiens
  misc_feature: Table A; Target 28810; HLA-B*40:01; GSG1L2; ENSG00000214978; CTA
MDNNSQAVL

SEQ ID NO: 28811 - protein, 9 aa, Homo sapiens
  misc_feature: Table A; Target 28811; HLA-C*07:04; GSG1L2; ENSG00000214978; CTA
MDNNSQAVL

SEQ ID NO: 28812 - protein, 10 aa, Homo sapiens
  misc_feature: Table A; Target 28812; HLA-A*29:02; GSG1L2; ENSG00000214978; CTA
MDNNSQAVLY

SEQ ID NO: 28813 - protein, 10 aa, Homo sapiens
  misc_feature: Table A; Target 28813; HLA-A*33:01; GSG1L2; ENSG00000214978; CTA
MDNNSQAVLY

SEQ ID NO: 28814 - protein, 10 aa, Homo sapiens
  misc_feature: Table A; Target 28814; HLA-B*35:01; GSG1L2; ENSG00000214978; CTA
MDNNSQAVLY

SEQ ID NO: 28815 - protein, 10 aa, Homo sapiens
  misc_feature: Table A; Target 28815; HLA-B*44:03; GSG1L2; ENSG00000214978; CTA
MDNNSQAVLY

SEQ ID NO: 28816 - protein, 10 aa, Homo sapiens
  misc_feature: Table A; Target 28816; HLA-C*07:01; GSG1L2; ENSG00000214978; CTA
MDNNSQAVLY

SEQ ID NO: 28817 - protein, 10 aa, Homo sapiens
  misc_feature: Table A; Target 28817; HLA-C*07:04; GSG1L2; ENSG00000214978; CTA
MDNNSQAVLY

SEQ ID NO: 28818 - protein, 9 aa, Homo sapiens
  misc_feature: Table A; Target 28818; HLA-A*02:01; GSG1L2; ENSG00000214978; CTA
MMYTTIFQI

SEQ ID NO: 28819 - protein, 9 aa, Homo sapiens
  misc_feature: Table A; Target 28819; HLA-A*02:03; GSG1L2; ENSG00000214978; CTA
MMYTTIFQI

SEQ ID NO: 28820 - protein, 9 aa, Homo sapiens
  misc_feature: Table A; Target 28820; HLA-A*02:04; GSG1L2; ENSG00000214978; CTA
MMYTTIFQI

SEQ ID NO: 28821 - protein, 9 aa, Homo sapiens
  misc_feature: Table A; Target 28821; HLA-A*02:07; GSG1L2; ENSG00000214978; CTA
MMYTTIFQI

SEQ ID NO: 28822 - protein, 9 aa, Homo sapiens
  misc_feature: Table A; Target 28822; HLA-B*13:02; GSG1L2; ENSG00000214978; CTA
MMYTTIFQI

SEQ ID NO: 28823 - protein, 9 aa, Homo sapiens
  misc_feature: Table A; Target 28823; HLA-B*51:01; GSG1L2; ENSG00000214978; CTA
MMYTTIFQI

SEQ ID NO: 28824 - protein, 9 aa, Homo sapiens
  misc_feature: Table A; Target 28824; HLA-A*26:01; GSG1L2; ENSG00000214978; CTA
MVLAGLLGM

SEQ ID NO: 28825 - protein, 9 aa, Homo sapiens
  misc_feature: Table A; Target 28825; HLA-A*29:02; GSG1L2; ENSG00000214978; CTA
MVLAGLLGM

SEQ ID NO: 28826 - protein, 9 aa, Homo sapiens
  misc_feature: Table A; Target 28826; HLA-B*35:01; GSG1L2; ENSG00000214978; CTA
MVLAGLLGM

SEQ ID NO: 28827 - protein, 11 aa, Homo sapiens
  misc_feature: Table A; Target 28827; HLA-B*54:01; GSG1L2; ENSG00000214978; CTA
MVLAGLLGMVA

SEQ ID NO: 28828 - protein, 11 aa, Homo sapiens
  misc_feature: Table A; Target 28828; HLA-B*56:01; GSG1L2; ENSG00000214978; CTA
MVLAGLLGMVA

SEQ ID NO: 28829 - protein, 8 aa, Homo sapiens
  misc_feature: Table A; Target 28829; HLA-A*23:01; GSG1L2; ENSG00000214978; CTA
MYTTIFQI

SEQ ID NO: 28830 - protein, 8 aa, Homo sapiens
  misc_feature: Table A; Target 28830; HLA-A*24:02; GSG1L2; ENSG00000214978; CTA
MYTTIFQI

SEQ ID NO: 28831 - protein, 8 aa, Homo sapiens
  misc_feature: Table A; Target 28831; HLA-B*07:02; GSG1L2; ENSG00000214978; CTA
MYTTIFQI

SEQ ID NO: 28832 - protein, 8 aa, Homo sapiens
  misc_feature: Table A; Target 28832; HLA-C*14:02; GSG1L2; ENSG00000214978; CTA
MYTTIFQI

SEQ ID NO: 28833 - protein, 9 aa, Homo sapiens
  misc_feature: Table A; Target 28833; HLA-A*24:02; GSG1L2; ENSG00000214978; CTA
MYTTIFQIT

SEQ ID NO: 28834 - protein, 8 aa, Homo sapiens
  misc_feature: Table A; Target 28834; HLA-B*18:01; GSG1L2; ENSG00000214978; CTA
NNSQAVLY

SEQ ID NO: 28835 - protein, 9 aa, Homo sapiens
  misc_feature: Table A; Target 28835; HLA-B*57:01; GSG1L2; ENSG00000214978; CTA
NSQAVLYIW

SEQ ID NO: 28836 - protein, 9 aa, Homo sapiens
  misc_feature: Table A; Target 28836; HLA-B*44:02; GSG1L2; ENSG00000214978; CTA
PEDWKPQTW

SEQ ID NO: 28837 - protein, 8 aa, Homo sapiens
  misc_feature: Table A; Target 28837; HLA-C*07:01; GSG1L2; ENSG00000214978; CTA
PVCLALTF

SEQ ID NO: 28838 - protein, 9 aa, Homo sapiens
  misc_feature: Table A; Target 28838; HLA-B*54:01; GSG1L2; ENSG00000214978; CTA
QALLLLPVC

SEQ ID NO: 28839 - protein, 9 aa, Homo sapiens
  misc_feature: Table A; Target 28839; HLA-B*35:03; GSG1L2; ENSG00000214978; CTA
QAVLYIWEL

SEQ ID NO: 28840 - protein, 9 aa, Homo sapiens
  misc_feature: Table A; Target 28840; HLA-B*39:01; GSG1L2; ENSG00000214978; CTA
QHSFLEPEA

SEQ ID NO: 28841 - protein, 9 aa, Homo sapiens
  misc_feature: Table A; Target 28841; HLA-B*13:02; GSG1L2; ENSG00000214978; CTA
QQALLLLPV

SEQ ID NO: 28842 - protein, 9 aa, Homo sapiens
  misc_feature: Table A; Target 28842; HLA-A*01:01; GSG1L2; ENSG00000214978; CTA
QTWDYGWSY

SEQ ID NO: 28843 - protein, 9 aa, Homo sapiens
  misc_feature: Table A; Target 28843; HLA-A*29:02; GSG1L2; ENSG00000214978; CTA
QTWDYGWSY

SEQ ID NO: 28844 - protein, 8 aa, Homo sapiens
  misc_feature: Table A; Target 28844; HLA-B*08:01; GSG1L2; ENSG00000214978; CTA
RAKQQQAL

SEQ ID NO: 28845 - protein, 9 aa, Homo sapiens
  misc_feature: Table A; Target 28845; HLA-A*23:01; GSG1L2; ENSG00000214978; CTA
RFTAARLEF

SEQ ID NO: 28846 - protein, 9 aa, Homo sapiens
  misc_feature: Table A; Target 28846; HLA-A*24:02; GSG1L2; ENSG00000214978; CTA
RFTAARLEF

SEQ ID NO: 28847 - protein, 8 aa, Homo sapiens
  misc_feature: Table A; Target 28847; HLA-B*57:01; GSG1L2; ENSG00000214978; CTA
RGFHVGLW

SEQ ID NO: 28848 - protein, 9 aa, Homo sapiens
  misc_feature: Table A; Target 28848; HLA-A*02:01; GSG1L2; ENSG00000214978; CTA
RMDNNSQAV

SEQ ID NO: 28849 - protein, 9 aa, Homo sapiens
  misc_feature: Table A; Target 28849; HLA-B*55:01; GSG1L2; ENSG00000214978; CTA
RMDNNSQAV

SEQ ID NO: 28850 - protein, 10 aa, Homo sapiens
  misc_feature: Table A; Target 28850; HLA-B*07:02; GSG1L2; ENSG00000214978; CTA
RMDNNSQAVL

SEQ ID NO: 28851 - protein, 10 aa, Homo sapiens
  misc_feature: Table A; Target 28851; HLA-B*40:01; GSG1L2; ENSG00000214978; CTA
RMDNNSQAVL

SEQ ID NO: 28852 - protein, 10 aa, Homo sapiens
  misc_feature: Table A; Target 28852; HLA-C*05:01; GSG1L2; ENSG00000214978; CTA
RMDNNSQAVL

SEQ ID NO: 28853 - protein, 11 aa, Homo sapiens
  misc_feature: Table A; Target 28853; HLA-A*01:01; GSG1L2; ENSG00000214978; CTA
RMDNNSQAVLY

SEQ ID NO: 28854 - protein, 11 aa, Homo sapiens
  misc_feature: Table A; Target 28854; HLA-A*29:02; GSG1L2; ENSG00000214978; CTA
RMDNNSQAVLY

SEQ ID NO: 28855 - protein, 11 aa, Homo sapiens
  misc_feature: Table A; Target 28855; HLA-A*30:02; GSG1L2; ENSG00000214978; CTA
RMDNNSQAVLY

SEQ ID NO: 28856 - protein, 9 aa, Homo sapiens
  misc_feature: Table A; Target 28856; HLA-A*02:07; GSG1L2; ENSG00000214978; CTA
RVDALVAIF

SEQ ID NO: 28857 - protein, 9 aa, Homo sapiens
  misc_feature: Table A; Target 28857; HLA-B*57:01; GSG1L2; ENSG00000214978; CTA
RVDALVAIF

SEQ ID NO: 28858 - protein, 9 aa, Homo sapiens
  misc_feature: Table A; Target 28858; HLA-B*58:01; GSG1L2; ENSG00000214978; CTA
RVDALVAIF

SEQ ID NO: 28859 - protein, 10 aa, Homo sapiens
  misc_feature: Table A; Target 28859; HLA-A*02:07; GSG1L2; ENSG00000214978; CTA
RVDALVAIFM

SEQ ID NO: 28860 - protein, 11 aa, Homo sapiens
  misc_feature: Table A; Target 28860; HLA-A*02:07; GSG1L2; ENSG00000214978; CTA
RVDALVAIFMV

SEQ ID NO: 28861 - protein, 9 aa, Homo sapiens
  misc_feature: Table A; Target 28861; HLA-A*68:02; GSG1L2; ENSG00000214978; CTA
SAILLGSRV

SEQ ID NO: 28862 - protein, 9 aa, Homo sapiens
  misc_feature: Table A; Target 28862; HLA-B*51:01; GSG1L2; ENSG00000214978; CTA
SAILLGSRV

SEQ ID NO: 28863 - protein, 9 aa, Homo sapiens
  misc_feature: Table A; Target 28863; HLA-B*54:01; GSG1L2; ENSG00000214978; CTA
SAILLGSRV

SEQ ID NO: 28864 - protein, 9 aa, Homo sapiens
  misc_feature: Table A; Target 28864; HLA-C*02:02; GSG1L2; ENSG00000214978; CTA
SAILLGSRV

SEQ ID NO: 28865 - protein, 9 aa, Homo sapiens
  misc_feature: Table A; Target 28865; HLA-C*05:01; GSG1L2; ENSG00000214978; CTA
SAILLGSRV

SEQ ID NO: 28866 - protein, 9 aa, Homo sapiens
  misc_feature: Table A; Target 28866; HLA-C*12:03; GSG1L2; ENSG00000214978; CTA
SAILLGSRV

SEQ ID NO: 28867 - protein, 9 aa, Homo sapiens
  misc_feature: Table A; Target 28867; HLA-C*16:02; GSG1L2; ENSG00000214978; CTA
SAILLGSRV

SEQ ID NO: 28868 - protein, 9 aa, Homo sapiens
  misc_feature: Table A; Target 28868; HLA-C*16:04; GSG1L2; ENSG00000214978; CTA
SAILLGSRV

SEQ ID NO: 28869 - protein, 8 aa, Homo sapiens
  misc_feature: Table A; Target 28869; HLA-A*32:01; GSG1L2; ENSG00000214978; CTA
SAMSRFTA

SEQ ID NO: 28870 - protein, 8 aa, Homo sapiens
  misc_feature: Table A; Target 28870; HLA-B*08:01; GSG1L2; ENSG00000214978; CTA
SAMSRFTA

SEQ ID NO: 28871 - protein, 8 aa, Homo sapiens
  misc_feature: Table A; Target 28871; HLA-B*54:01; GSG1L2; ENSG00000214978; CTA
SAMSRFTA

SEQ ID NO: 28872 - protein, 8 aa, Homo sapiens
  misc_feature: Table A; Target 28872; HLA-B*56:01; GSG1L2; ENSG00000214978; CTA
SAMSRFTA

SEQ ID NO: 28873 - protein, 8 aa, Homo sapiens
  misc_feature: Table A; Target 28873; HLA-C*16:01; GSG1L2; ENSG00000214978; CTA
SAMSRFTA

SEQ ID NO: 28874 - protein, 9 aa, Homo sapiens
  misc_feature: Table A; Target 28874; HLA-A*02:01; GSG1L2; ENSG00000214978; CTA
SAMSRFTAA

SEQ ID NO: 28875 - protein, 9 aa, Homo sapiens
  misc_feature: Table A; Target 28875; HLA-A*02:03; GSG1L2; ENSG00000214978; CTA
SAMSRFTAA

SEQ ID NO: 28876 - protein, 9 aa, Homo sapiens
  misc_feature: Table A; Target 28876; HLA-A*25:01; GSG1L2; ENSG00000214978; CTA
SAMSRFTAA

SEQ ID NO: 28877 - protein, 9 aa, Homo sapiens
  misc_feature: Table A; Target 28877; HLA-A*30:01; GSG1L2; ENSG00000214978; CTA
SAMSRFTAA

SEQ ID NO: 28878 - protein, 9 aa, Homo sapiens
  misc_feature: Table A; Target 28878; HLA-A*32:01; GSG1L2; ENSG00000214978; CTA
SAMSRFTAA

SEQ ID NO: 28879 - protein, 9 aa, Homo sapiens
  misc_feature: Table A; Target 28879; HLA-B*07:02; GSG1L2; ENSG00000214978; CTA
SAMSRFTAA

SEQ ID NO: 28880 - protein, 9 aa, Homo sapiens
  misc_feature: Table A; Target 28880; HLA-B*08:01; GSG1L2; ENSG00000214978; CTA
SAMSRFTAA

SEQ ID NO: 28881 - protein, 9 aa, Homo sapiens
  misc_feature: Table A; Target 28881; HLA-B*37:01; GSG1L2; ENSG00000214978; CTA
SAMSRFTAA

SEQ ID NO: 28882 - protein, 9 aa, Homo sapiens
  misc_feature: Table A; Target 28882; HLA-B*40:02; GSG1L2; ENSG00000214978; CTA
SAMSRFTAA

SEQ ID NO: 28883 - protein, 9 aa, Homo sapiens
  misc_feature: Table A; Target 28883; HLA-B*46:01; GSG1L2; ENSG00000214978; CTA
SAMSRFTAA

SEQ ID NO: 28884 - protein, 9 aa, Homo sapiens
  misc_feature: Table A; Target 28884; HLA-B*54:01; GSG1L2; ENSG00000214978; CTA
SAMSRFTAA

SEQ ID NO: 28885 - protein, 9 aa, Homo sapiens
  misc_feature: Table A; Target 28885; HLA-B*55:01; GSG1L2; ENSG00000214978; CTA
SAMSRFTAA

SEQ ID NO: 28886 - protein, 9 aa, Homo sapiens
  misc_feature: Table A; Target 28886; HLA-B*56:01; GSG1L2; ENSG00000214978; CTA
SAMSRFTAA

SEQ ID NO: 28887 - protein, 9 aa, Homo sapiens
  misc_feature: Table A; Target 28887; HLA-C*01:02; GSG1L2; ENSG00000214978; CTA
SAMSRFTAA

SEQ ID NO: 28888 - protein, 9 aa, Homo sapiens
  misc_feature: Table A; Target 28888; HLA-C*02:02; GSG1L2; ENSG00000214978; CTA
SAMSRFTAA

SEQ ID NO: 28889 - protein, 9 aa, Homo sapiens
  misc_feature: Table A; Target 28889; HLA-C*03:03; GSG1L2; ENSG00000214978; CTA
SAMSRFTAA

SEQ ID NO: 28890 - protein, 9 aa, Homo sapiens
  misc_feature: Table A; Target 28890; HLA-C*03:04; GSG1L2; ENSG00000214978; CTA
SAMSRFTAA

SEQ ID NO: 28891 - protein, 9 aa, Homo sapiens
  misc_feature: Table A; Target 28891; HLA-C*07:02; GSG1L2; ENSG00000214978; CTA
SAMSRFTAA

SEQ ID NO: 28892 - protein, 9 aa, Homo sapiens
  misc_feature: Table A; Target 28892; HLA-C*12:03; GSG1L2; ENSG00000214978; CTA
SAMSRFTAA

SEQ ID NO: 28893 - protein, 9 aa, Homo sapiens
  misc_feature: Table A; Target 28893; HLA-C*14:02; GSG1L2; ENSG00000214978; CTA
SAMSRFTAA

SEQ ID NO: 28894 - protein, 9 aa, Homo sapiens
  misc_feature: Table A; Target 28894; HLA-C*16:01; GSG1L2; ENSG00000214978; CTA
SAMSRFTAA

SEQ ID NO: 28895 - protein, 9 aa, Homo sapiens
  misc_feature: Table A; Target 28895; HLA-C*16:02; GSG1L2; ENSG00000214978; CTA
SAMSRFTAA

SEQ ID NO: 28896 - protein, 9 aa, Homo sapiens
  misc_feature: Table A; Target 28896; HLA-C*16:04; GSG1L2; ENSG00000214978; CTA
SAMSRFTAA

SEQ ID NO: 28897 - protein, 10 aa, Homo sapiens
  misc_feature: Table A; Target 28897; HLA-A*31:01; GSG1L2; ENSG00000214978; CTA
SAMSRFTAAR

SEQ ID NO: 28898 - protein, 10 aa, Homo sapiens
  misc_feature: Table A; Target 28898; HLA-A*33:01; GSG1L2; ENSG00000214978; CTA
SAMSRFTAAR

SEQ ID NO: 28899 - protein, 10 aa, Homo sapiens
  misc_feature: Table A; Target 28899; HLA-A*33:03; GSG1L2; ENSG00000214978; CTA
SAMSRFTAAR

SEQ ID NO: 28900 - protein, 9 aa, Homo sapiens
  misc_feature: Table A; Target 28900; HLA-B*37:01; GSG1L2; ENSG00000214978; CTA
SESIWKTGA

SEQ ID NO: 28901 - protein, 9 aa, Homo sapiens
  misc_feature: Table A; Target 28901; HLA-A*03:01; GSG1L2; ENSG00000214978; CTA
SLTAVVSSH

SEQ ID NO: 28902 - protein, 9 aa, Homo sapiens
  misc_feature: Table A; Target 28902; HLA-A*03:02; GSG1L2; ENSG00000214978; CTA
SLTAVVSSH

SEQ ID NO: 28903 - protein, 9 aa, Homo sapiens
  misc_feature: Table A; Target 28903; HLA-A*30:02; GSG1L2; ENSG00000214978; CTA
SLTAVVSSH

SEQ ID NO: 28904 - protein, 9 aa, Homo sapiens
  misc_feature: Table A; Target 28904; HLA-A*32:01; GSG1L2; ENSG00000214978; CTA
SLTAVVSSH

SEQ ID NO: 28905 - protein, 9 aa, Homo sapiens
  misc_feature: Table A; Target 28905; HLA-B*15:01; GSG1L2; ENSG00000214978; CTA
SLTAVVSSH

SEQ ID NO: 28906 - protein, 9 aa, Homo sapiens
  misc_feature: Table A; Target 28906; HLA-B*46:01; GSG1L2; ENSG00000214978; CTA
SLTAVVSSH

SEQ ID NO: 28907 - protein, 9 aa, Homo sapiens
  misc_feature: Table A; Target 28907; HLA-C*16:02; GSG1L2; ENSG00000214978; CTA
SLTAVVSSH

SEQ ID NO: 28908 - protein, 10 aa, Homo sapiens
  misc_feature: Table A; Target 28908; HLA-A*23:01; GSG1L2; ENSG00000214978; CTA
SLTAVVSSHW

SEQ ID NO: 28909 - protein, 10 aa, Homo sapiens
  misc_feature: Table A; Target 28909; HLA-A*24:02; GSG1L2; ENSG00000214978; CTA
SLTAVVSSHW

SEQ ID NO: 28910 - protein, 10 aa, Homo sapiens
  misc_feature: Table A; Target 28910; HLA-A*25:01; GSG1L2; ENSG00000214978; CTA
SLTAVVSSHW

SEQ ID NO: 28911 - protein, 10 aa, Homo sapiens
  misc_feature: Table A; Target 28911; HLA-A*32:01; GSG1L2; ENSG00000214978; CTA
SLTAVVSSHW

SEQ ID NO: 28912 - protein, 10 aa, Homo sapiens
  misc_feature: Table A; Target 28912; HLA-B*27:02; GSG1L2; ENSG00000214978; CTA
SLTAVVSSHW

SEQ ID NO: 28913 - protein, 10 aa, Homo sapiens
  misc_feature: Table A; Target 28913; HLA-B*44:02; GSG1L2; ENSG00000214978; CTA
SLTAVVSSHW

SEQ ID NO: 28914 - protein, 10 aa, Homo sapiens
  misc_feature: Table A; Target 28914; HLA-B*44:03; GSG1L2; ENSG00000214978; CTA
SLTAVVSSHW

SEQ ID NO: 28915 - protein, 10 aa, Homo sapiens
  misc_feature: Table A; Target 28915; HLA-B*57:01; GSG1L2; ENSG00000214978; CTA
SLTAVVSSHW

SEQ ID NO: 28916 - protein, 10 aa, Homo sapiens
  misc_feature: Table A; Target 28916; HLA-B*58:01; GSG1L2; ENSG00000214978; CTA
SLTAVVSSHW

SEQ ID NO: 28917 - protein, 10 aa, Homo sapiens
  misc_feature: Table A; Target 28917; HLA-A*02:04; GSG1L2; ENSG00000214978; CTA
SQAVLYIWEL

SEQ ID NO: 28918 - protein, 8 aa, Homo sapiens
  misc_feature: Table A; Target 28918; HLA-A*32:01; GSG1L2; ENSG00000214978; CTA
SVSAMSRF

SEQ ID NO: 28919 - protein, 8 aa, Homo sapiens
  misc_feature: Table A; Target 28919; HLA-B*37:01; GSG1L2; ENSG00000214978; CTA
SVSAMSRF

SEQ ID NO: 28920 - protein, 8 aa, Homo sapiens
  misc_feature: Table A; Target 28920; HLA-C*05:01; GSG1L2; ENSG00000214978; CTA
SVSAMSRF

SEQ ID NO: 28921 - protein, 10 aa, Homo sapiens
  misc_feature: Table A; Target 28921; HLA-A*03:01; GSG1L2; ENSG00000214978; CTA
TAARLEFTEK

SEQ ID NO: 28922 - protein, 10 aa, Homo sapiens
  misc_feature: Table A; Target 28922; HLA-A*03:02; GSG1L2; ENSG00000214978; CTA
TAARLEFTEK

SEQ ID NO: 28923 - protein, 10 aa, Homo sapiens
  misc_feature: Table A; Target 28923; HLA-A*11:01; GSG1L2; ENSG00000214978; CTA
TAARLEFTEK

SEQ ID NO: 28924 - protein, 10 aa, Homo sapiens
  misc_feature: Table A; Target 28924; HLA-A*68:01; GSG1L2; ENSG00000214978; CTA
TAARLEFTEK

SEQ ID NO: 28925 - protein, 10 aa, Homo sapiens
  misc_feature: Table A; Target 28925; HLA-B*27:02; GSG1L2; ENSG00000214978; CTA
TAARLEFTEK

SEQ ID NO: 28926 - protein, 10 aa, Homo sapiens
  misc_feature: Table A; Target 28926; HLA-C*07:06; GSG1L2; ENSG00000214978; CTA
TAARLEFTEK

SEQ ID NO: 28927 - protein, 8 aa, Homo sapiens
  misc_feature: Table A; Target 28927; HLA-A*25:01; GSG1L2; ENSG00000214978; CTA
TAVVSSHW

SEQ ID NO: 28928 - protein, 8 aa, Homo sapiens
  misc_feature: Table A; Target 28928; HLA-A*32:01; GSG1L2; ENSG00000214978; CTA
TAVVSSHW

SEQ ID NO: 28929 - protein, 8 aa, Homo sapiens
  misc_feature: Table A; Target 28929; HLA-B*51:01; GSG1L2; ENSG00000214978; CTA
TAVVSSHW

SEQ ID NO: 28930 - protein, 8 aa, Homo sapiens
  misc_feature: Table A; Target 28930; HLA-B*57:01; GSG1L2; ENSG00000214978; CTA
TAVVSSHW

SEQ ID NO: 28931 - protein, 8 aa, Homo sapiens
  misc_feature: Table A; Target 28931; HLA-B*58:01; GSG1L2; ENSG00000214978; CTA
TAVVSSHW

SEQ ID NO: 28932 - protein, 8 aa, Homo sapiens
  misc_feature: Table A; Target 28932; HLA-C*07:01; GSG1L2; ENSG00000214978; CTA
TAVVSSHW

SEQ ID NO: 28933 - protein, 8 aa, Homo sapiens
  misc_feature: Table A; Target 28933; HLA-C*12:03; GSG1L2; ENSG00000214978; CTA
TAVVSSHW

SEQ ID NO: 28934 - protein, 8 aa, Homo sapiens
  misc_feature: Table A; Target 28934; HLA-C*16:04; GSG1L2; ENSG00000214978; CTA
TAVVSSHW

SEQ ID NO: 28935 - protein, 11 aa, Homo sapiens
  misc_feature: Table A; Target 28935; HLA-A*33:03; GSG1L2; ENSG00000214978; CTA
TEKQQAQNGSR

SEQ ID NO: 28936 - protein, 9 aa, Homo sapiens
  misc_feature: Table A; Target 28936; HLA-A*02:01; GSG1L2; ENSG00000214978; CTA
TIFQITVNL

SEQ ID NO: 28937 - protein, 9 aa, Homo sapiens
  misc_feature: Table A; Target 28937; HLA-A*02:03; GSG1L2; ENSG00000214978; CTA
TIFQITVNL

SEQ ID NO: 28938 - protein, 9 aa, Homo sapiens
  misc_feature: Table A; Target 28938; HLA-A*02:04; GSG1L2; ENSG00000214978; CTA
TIFQITVNL

SEQ ID NO: 28939 - protein, 9 aa, Homo sapiens
  misc_feature: Table A; Target 28939; HLA-A*02:07; GSG1L2; ENSG00000214978; CTA
TIFQITVNL

SEQ ID NO: 28940 - protein, 9 aa, Homo sapiens
  misc_feature: Table A; Target 28940; HLA-A*23:01; GSG1L2; ENSG00000214978; CTA
TIFQITVNL

SEQ ID NO: 28941 - protein, 9 aa, Homo sapiens
  misc_feature: Table A; Target 28941; HLA-A*68:01; GSG1L2; ENSG00000214978; CTA
TIFQITVNL

SEQ ID NO: 28942 - protein, 9 aa, Homo sapiens
  misc_feature: Table A; Target 28942; HLA-A*68:02; GSG1L2; ENSG00000214978; CTA
TIFQITVNL

SEQ ID NO: 28943 - protein, 9 aa, Homo sapiens
  misc_feature: Table A; Target 28943; HLA-B*13:02; GSG1L2; ENSG00000214978; CTA
TIFQITVNL

SEQ ID NO: 28944 - protein, 9 aa, Homo sapiens
  misc_feature: Table A; Target 28944; HLA-B*27:05; GSG1L2; ENSG00000214978; CTA
TIFQITVNL

SEQ ID NO: 28945 - protein, 9 aa, Homo sapiens
  misc_feature: Table A; Target 28945; HLA-B*38:01; GSG1L2; ENSG00000214978; CTA
TIFQITVNL

SEQ ID NO: 28946 - protein, 9 aa, Homo sapiens
  misc_feature: Table A; Target 28946; HLA-C*02:02; GSG1L2; ENSG00000214978; CTA
TIFQITVNL

SEQ ID NO: 28947 - protein, 9 aa, Homo sapiens
  misc_feature: Table A; Target 28947; HLA-A*31:01; GSG1L2; ENSG00000214978; CTA
TSAILLGSR

SEQ ID NO: 28948 - protein, 9 aa, Homo sapiens
  misc_feature: Table A; Target 28948; HLA-A*33:03; GSG1L2; ENSG00000214978; CTA
TSAILLGSR

SEQ ID NO: 28949 - protein, 9 aa, Homo sapiens
  misc_feature: Table A; Target 28949; HLA-A*68:01; GSG1L2; ENSG00000214978; CTA
TSAILLGSR

SEQ ID NO: 28950 - protein, 9 aa, Homo sapiens
  misc_feature: Table A; Target 28950; HLA-C*07:06; GSG1L2; ENSG00000214978; CTA
TSAILLGSR

SEQ ID NO: 28951 - protein, 10 aa, Homo sapiens
  misc_feature: Table A; Target 28951; HLA-A*68:02; GSG1L2; ENSG00000214978; CTA
TSAILLGSRV

SEQ ID NO: 28952 - protein, 10 aa, Homo sapiens
  misc_feature: Table A; Target 28952; HLA-C*06:02; GSG1L2; ENSG00000214978; CTA
TSAILLGSRV

SEQ ID NO: 28953 - protein, 8 aa, Homo sapiens
  misc_feature: Table A; Target 28953; HLA-A*68:02; GSG1L2; ENSG00000214978; CTA
TTIFQITV

SEQ ID NO: 28954 - protein, 10 aa, Homo sapiens
  misc_feature: Table A; Target 28954; HLA-A*68:02; GSG1L2; ENSG00000214978; CTA
TTIFQITVNL

SEQ ID NO: 28955 - protein, 9 aa, Homo sapiens
  misc_feature: Table A; Target 28955; HLA-B*57:01; GSG1L2; ENSG00000214978; CTA
TVNLGPEDW

SEQ ID NO: 28956 - protein, 9 aa, Homo sapiens
  misc_feature: Table A; Target 28956; HLA-A*23:01; GSG1L2; ENSG00000214978; CTA
VAHMMYTTI

SEQ ID NO: 28957 - protein, 9 aa, Homo sapiens
  misc_feature: Table A; Target 28957; HLA-A*24:02; GSG1L2; ENSG00000214978; CTA
VAHMMYTTI

SEQ ID NO: 28958 - protein, 9 aa, Homo sapiens
  misc_feature: Table A; Target 28958; HLA-B*51:01; GSG1L2; ENSG00000214978; CTA
VAHMMYTTI

SEQ ID NO: 28959 - protein, 9 aa, Homo sapiens
  misc_feature: Table A; Target 28959; HLA-C*02:02; GSG1L2; ENSG00000214978; CTA
VAHMMYTTI

SEQ ID NO: 28960 - protein, 8 aa, Homo sapiens
  misc_feature: Table A; Target 28960; HLA-B*18:01; GSG1L2; ENSG00000214978; CTA
VDALVAIF

SEQ ID NO: 28961 - protein, 8 aa, Homo sapiens
  misc_feature: Table A; Target 28961; HLA-B*37:01; GSG1L2; ENSG00000214978; CTA
VDALVAIF

SEQ ID NO: 28962 - protein, 9 aa, Homo sapiens
  misc_feature: Table A; Target 28962; HLA-B*37:01; GSG1L2; ENSG00000214978; CTA
VDALVAIFM

SEQ ID NO: 28963 - protein, 9 aa, Homo sapiens
  misc_feature: Table A; Target 28963; HLA-A*02:01; GSG1L2; ENSG00000214978; CTA
VLAGLLGMV

SEQ ID NO: 28964 - protein, 9 aa, Homo sapiens
  misc_feature: Table A; Target 28964; HLA-A*02:03; GSG1L2; ENSG00000214978; CTA
VLAGLLGMV

SEQ ID NO: 28965 - protein, 9 aa, Homo sapiens
  misc_feature: Table A; Target 28965; HLA-A*02:04; GSG1L2; ENSG00000214978; CTA
VLAGLLGMV

SEQ ID NO: 28966 - protein, 9 aa, Homo sapiens
  misc_feature: Table A; Target 28966; HLA-A*02:07; GSG1L2; ENSG00000214978; CTA
VLAGLLGMV

SEQ ID NO: 28967 - protein, 9 aa, Homo sapiens
  misc_feature: Table A; Target 28967; HLA-B*13:02; GSG1L2; ENSG00000214978; CTA
VLAGLLGMV

SEQ ID NO: 28968 - protein, 9 aa, Homo sapiens
  misc_feature: Table A; Target 28968; HLA-B*55:01; GSG1L2; ENSG00000214978; CTA
VLAGLLGMV

SEQ ID NO: 28969 - protein, 10 aa, Homo sapiens
  misc_feature: Table A; Target 28969; HLA-A*02:03; GSG1L2; ENSG00000214978; CTA
VLAGLLGMVA

SEQ ID NO: 28970 - protein, 10 aa, Homo sapiens
  misc_feature: Table A; Target 28970; HLA-C*12:03; GSG1L2; ENSG00000214978; CTA
VLAGLLGMVA

SEQ ID NO: 28971 - protein, 8 aa, Homo sapiens
  misc_feature: Table A; Target 28971; HLA-B*51:01; GSG1L2; ENSG00000214978; CTA
VPAEEQGV

SEQ ID NO: 28972 - protein, 9 aa, Homo sapiens
  misc_feature: Table A; Target 28972; HLA-B*07:02; GSG1L2; ENSG00000214978; CTA
VPAEEQGVL

SEQ ID NO: 28973 - protein, 9 aa, Homo sapiens
  misc_feature: Table A; Target 28973; HLA-B*35:01; GSG1L2; ENSG00000214978; CTA
VPAEEQGVL

SEQ ID NO: 28974 - protein, 9 aa, Homo sapiens
  misc_feature: Table A; Target 28974; HLA-B*35:03; GSG1L2; ENSG00000214978; CTA
VPAEEQGVL

SEQ ID NO: 28975 - protein, 9 aa, Homo sapiens
  misc_feature: Table A; Target 28975; HLA-B*51:01; GSG1L2; ENSG00000214978; CTA
VPAEEQGVL

SEQ ID NO: 28976 - protein, 9 aa, Homo sapiens
  misc_feature: Table A; Target 28976; HLA-B*55:01; GSG1L2; ENSG00000214978; CTA
VPAEEQGVL

SEQ ID NO: 28977 - protein, 9 aa, Homo sapiens
  misc_feature: Table A; Target 28977; HLA-C*03:03; GSG1L2; ENSG00000214978; CTA
VPAEEQGVL

SEQ ID NO: 28978 - protein, 9 aa, Homo sapiens
  misc_feature: Table A; Target 28978; HLA-C*05:01; GSG1L2; ENSG00000214978; CTA
VPAEEQGVL

SEQ ID NO: 28979 - protein, 9 aa, Homo sapiens
  misc_feature: Table A; Target 28979; HLA-C*07:02; GSG1L2; ENSG00000214978; CTA
VPAEEQGVL

SEQ ID NO: 28980 - protein, 10 aa, Homo sapiens
  misc_feature: Table A; Target 28980; HLA-A*25:01; GSG1L2; ENSG00000214978; CTA
VPAEEQGVLW

SEQ ID NO: 28981 - protein, 10 aa, Homo sapiens
  misc_feature: Table A; Target 28981; HLA-B*35:01; GSG1L2; ENSG00000214978; CTA
VPAEEQGVLW

SEQ ID NO: 28982 - protein, 10 aa, Homo sapiens
  misc_feature: Table A; Target 28982; HLA-B*57:01; GSG1L2; ENSG00000214978; CTA
VPAEEQGVLW

SEQ ID NO: 28983 - protein, 10 aa, Homo sapiens
  misc_feature: Table A; Target 28983; HLA-C*07:06; GSG1L2; ENSG00000214978; CTA
VPAEEQGVLW

SEQ ID NO: 28984 - protein, 9 aa, Homo sapiens
  misc_feature: Table A; Target 28984; HLA-C*16:01; GSG1L2; ENSG00000214978; CTA
VSAMSRFTA

SEQ ID NO: 28985 - protein, 10 aa, Homo sapiens
  misc_feature: Table A; Target 28985; HLA-B*40:02; GSG1L2; ENSG00000214978; CTA
VSAMSRFTAA

SEQ ID NO: 28986 - protein, 9 aa, Homo sapiens
  misc_feature: Table A; Target 28986; HLA-A*23:01; GSG1L2; ENSG00000214978; CTA
VSVSAMSRF

SEQ ID NO: 28987 - protein, 9 aa, Homo sapiens
  misc_feature: Table A; Target 28987; HLA-A*24:02; GSG1L2; ENSG00000214978; CTA
VSVSAMSRF

SEQ ID NO: 28988 - protein, 9 aa, Homo sapiens
  misc_feature: Table A; Target 28988; HLA-A*25:01; GSG1L2; ENSG00000214978; CTA
VSVSAMSRF

SEQ ID NO: 28989 - protein, 9 aa, Homo sapiens
  misc_feature: Table A; Target 28989; HLA-A*26:01; GSG1L2; ENSG00000214978; CTA
VSVSAMSRF

SEQ ID NO: 28990 - protein, 9 aa, Homo sapiens
  misc_feature: Table A; Target 28990; HLA-B*46:01; GSG1L2; ENSG00000214978; CTA
VSVSAMSRF

SEQ ID NO: 28991 - protein, 9 aa, Homo sapiens
  misc_feature: Table A; Target 28991; HLA-B*57:01; GSG1L2; ENSG00000214978; CTA
VSVSAMSRF

SEQ ID NO: 28992 - protein, 9 aa, Homo sapiens
  misc_feature: Table A; Target 28992; HLA-B*58:01; GSG1L2; ENSG00000214978; CTA
VSVSAMSRF

SEQ ID NO: 28993 - protein, 9 aa, Homo sapiens
  misc_feature: Table A; Target 28993; HLA-C*02:02; GSG1L2; ENSG00000214978; CTA
VSVSAMSRF

SEQ ID NO: 28994 - protein, 9 aa, Homo sapiens
  misc_feature: Table A; Target 28994; HLA-C*12:03; GSG1L2; ENSG00000214978; CTA
VSVSAMSRF

SEQ ID NO: 28995 - protein, 9 aa, Homo sapiens
  misc_feature: Table A; Target 28995; HLA-C*16:01; GSG1L2; ENSG00000214978; CTA
VSVSAMSRF

SEQ ID NO: 28996 - protein, 9 aa, Homo sapiens
  misc_feature: Table A; Target 28996; HLA-A*02:07; GSG1L2; ENSG00000214978; CTA
VVPAEEQGV

SEQ ID NO: 28997 - protein, 11 aa, Homo sapiens
  misc_feature: Table A; Target 28997; HLA-A*25:01; GSG1L2; ENSG00000214978; CTA
VVPAEEQGVLW

SEQ ID NO: 28998 - protein, 11 aa, Homo sapiens
  misc_feature: Table A; Target 28998; HLA-B*57:01; GSG1L2; ENSG00000214978; CTA
VVPAEEQGVLW

SEQ ID NO: 28999 - protein, 11 aa, Homo sapiens
  misc_feature: Table A; Target 28999; HLA-B*58:01; GSG1L2; ENSG00000214978; CTA
VVPAEEQGVLW

SEQ ID NO: 29000 - protein, 10 aa, Homo sapiens
  misc_feature: Table A; Target 29000; HLA-A*02:07; GSG1L2; ENSG00000214978; CTA
YIWELGDDKF

SEQ ID NO: 29001 - protein, 9 aa, Homo sapiens
  misc_feature: Table A; Target 29001; HLA-A*30:01; GSG1L2; ENSG00000214978; CTA
YTTIFQITV

SEQ ID NO: 29002 - protein, 9 aa, Homo sapiens
  misc_feature: Table A; Target 29002; HLA-A*68:02; GSG1L2; ENSG00000214978; CTA
YTTIFQITV

SEQ ID NO: 29003 - protein, 9 aa, Homo sapiens
  misc_feature: Table A; Target 29003; HLA-B*13:02; GSG1L2; ENSG00000214978; CTA
YTTIFQITV

SEQ ID NO: 29004 - protein, 9 aa, Homo sapiens
  misc_feature: Table A; Target 29004; HLA-B*40:02; GSG1L2; ENSG00000214978; CTA
YTTIFQITV

SEQ ID NO: 29005 - protein, 9 aa, Homo sapiens
  misc_feature: Table A; Target 29005; HLA-B*49:01; GSG1L2; ENSG00000214978; CTA
YTTIFQITV

SEQ ID NO: 29006 - protein, 9 aa, Homo sapiens
  misc_feature: Table A; Target 29006; HLA-B*51:01; GSG1L2; ENSG00000214978; CTA
YTTIFQITV

SEQ ID NO: 29007 - protein, 9 aa, Homo sapiens
  misc_feature: Table A; Target 29007; HLA-B*54:01; GSG1L2; ENSG00000214978; CTA
YTTIFQITV

SEQ ID NO: 29008 - protein, 9 aa, Homo sapiens
  misc_feature: Table A; Target 29008; HLA-C*02:02; GSG1L2; ENSG00000214978; CTA
YTTIFQITV

SEQ ID NO: 29009 - protein, 9 aa, Homo sapiens
  misc_feature: Table A; Target 29009; HLA-C*16:02; GSG1L2; ENSG00000214978; CTA
YTTIFQITV

SEQ ID NO: 29010 - protein, 11 aa, Homo sapiens
  misc_feature: Table A; Target 29010; HLA-A*68:02; GSG1L2; ENSG00000214978; CTA
YTTIFQITVNL

SEQ ID NO: 29011 - protein, 9 aa, Homo sapiens
  misc_feature: Table A; Target 29011; HLA-B*37:01; GTSF1; ENSG00000170627; TAA
AEISHHISS

SEQ ID NO: 29012 - protein, 9 aa, Homo sapiens
  misc_feature: Table A; Target 29012; HLA-B*40:02; GTSF1; ENSG00000170627; TAA
AEISHHISS

SEQ ID NO: 29013 - protein, 9 aa, Homo sapiens
  misc_feature: Table A; Target 29013; HLA-B*49:01; GTSF1; ENSG00000170627; TAA
AEISHHISS

SEQ ID NO: 29014 - protein, 10 aa, Homo sapiens
  misc_feature: Table A; Target 29014; HLA-A*30:01; GTSF1; ENSG00000170627; TAA
AEISHHISSC

SEQ ID NO: 29015 - protein, 10 aa, Homo sapiens
  misc_feature: Table A; Target 29015; HLA-B*49:01; GTSF1; ENSG00000170627; TAA
AEISHHISSC

SEQ ID NO: 29016 - protein, 8 aa, Homo sapiens
  misc_feature: Table A; Target 29016; HLA-C*16:01; GTSF1; ENSG00000170627; TAA
ASGMRVPK

SEQ ID NO: 29017 - protein, 9 aa, Homo sapiens
  misc_feature: Table A; Target 29017; HLA-A*03:01; GTSF1; ENSG00000170627; TAA
ASNIVTEHK

SEQ ID NO: 29018 - protein, 9 aa, Homo sapiens
  misc_feature: Table A; Target 29018; HLA-A*03:02; GTSF1; ENSG00000170627; TAA
ASNIVTEHK

SEQ ID NO: 29019 - protein, 9 aa, Homo sapiens
  misc_feature: Table A; Target 29019; HLA-A*11:01; GTSF1; ENSG00000170627; TAA
ASNIVTEHK

SEQ ID NO: 29020 - protein, 9 aa, Homo sapiens
  misc_feature: Table A; Target 29020; HLA-A*31:01; GTSF1; ENSG00000170627; TAA
ASNIVTEHK

SEQ ID NO: 29021 - protein, 9 aa, Homo sapiens
  misc_feature: Table A; Target 29021; HLA-B*57:01; GTSF1; ENSG00000170627; TAA
ASNIVTEHK

SEQ ID NO: 29022 - protein, 9 aa, Homo sapiens
  misc_feature: Table A; Target 29022; HLA-C*07:06; GTSF1; ENSG00000170627; TAA
ASNIVTEHK

SEQ ID NO: 29023 - protein, 8 aa, Homo sapiens
  misc_feature: Table A; Target 29023; HLA-A*31:01; GTSF1; ENSG00000170627; TAA
ATCPFNAR

SEQ ID NO: 29024 - protein, 9 aa, Homo sapiens
  misc_feature: Table A; Target 29024; HLA-B*07:02; GTSF1; ENSG00000170627; TAA
CPFNARHQV

SEQ ID NO: 29025 - protein, 9 aa, Homo sapiens
  misc_feature: Table A; Target 29025; HLA-B*51:01; GTSF1; ENSG00000170627; TAA
CPFNARHQV

SEQ ID NO: 29026 - protein, 9 aa, Homo sapiens
  misc_feature: Table A; Target 29026; HLA-B*54:01; GTSF1; ENSG00000170627; TAA
CPFNARHQV

SEQ ID NO: 29027 - protein, 9 aa, Homo sapiens
  misc_feature: Table A; Target 29027; HLA-B*56:01; GTSF1; ENSG00000170627; TAA
CPFNARHQV

SEQ ID NO: 29028 - protein, 9 aa, Homo sapiens
  misc_feature: Table A; Target 29028; HLA-A*23:01; GTSF1; ENSG00000170627; TAA
CPYDKNHQI

SEQ ID NO: 29029 - protein, 9 aa, Homo sapiens
  misc_feature: Table A; Target 29029; HLA-B*07:02; GTSF1; ENSG00000170627; TAA
CPYDKNHQI

SEQ ID NO: 29030 - protein, 9 aa, Homo sapiens
  misc_feature: Table A; Target 29030; HLA-B*08:01; GTSF1; ENSG00000170627; TAA
CPYDKNHQI

SEQ ID NO: 29031 - protein, 9 aa, Homo sapiens
  misc_feature: Table A; Target 29031; HLA-B*13:02; GTSF1; ENSG00000170627; TAA
CPYDKNHQI

SEQ ID NO: 29032 - protein, 9 aa, Homo sapiens
  misc_feature: Table A; Target 29032; HLA-B*35:03; GTSF1; ENSG00000170627; TAA
CPYDKNHQI

SEQ ID NO: 29033 - protein, 9 aa, Homo sapiens
  misc_feature: Table A; Target 29033; HLA-B*49:01; GTSF1; ENSG00000170627; TAA
CPYDKNHQI

SEQ ID NO: 29034 - protein, 9 aa, Homo sapiens
  misc_feature: Table A; Target 29034; HLA-B*51:01; GTSF1; ENSG00000170627; TAA
CPYDKNHQI

SEQ ID NO: 29035 - protein, 9 aa, Homo sapiens
  misc_feature: Table A; Target 29035; HLA-B*54:01; GTSF1; ENSG00000170627; TAA
CPYDKNHQI

SEQ ID NO: 29036 - protein, 9 aa, Homo sapiens
  misc_feature: Table A; Target 29036; HLA-B*55:01; GTSF1; ENSG00000170627; TAA
CPYDKNHQI

SEQ ID NO: 29037 - protein, 9 aa, Homo sapiens
  misc_feature: Table A; Target 29037; HLA-B*56:01; GTSF1; ENSG00000170627; TAA
CPYDKNHQI

SEQ ID NO: 29038 - protein, 9 aa, Homo sapiens
  misc_feature: Table A; Target 29038; HLA-C*16:02; GTSF1; ENSG00000170627; TAA
CPYDKNHQI

SEQ ID NO: 29039 - protein, 10 aa, Homo sapiens
  misc_feature: Table A; Target 29039; HLA-A*25:01; GTSF1; ENSG00000170627; TAA
DLWEQTSTPF

SEQ ID NO: 29040 - protein, 9 aa, Homo sapiens
  misc_feature: Table A; Target 29040; HLA-A*33:01; GTSF1; ENSG00000170627; TAA
DNNSPASNI

SEQ ID NO: 29041 - protein, 9 aa, Homo sapiens
  misc_feature: Table A; Target 29041; HLA-A*33:03; GTSF1; ENSG00000170627; TAA
DNNSPASNI

SEQ ID NO: 29042 - protein, 9 aa, Homo sapiens
  misc_feature: Table A; Target 29042; HLA-B*51:01; GTSF1; ENSG00000170627; TAA
DNNSPASNI

SEQ ID NO: 29043 - protein, 9 aa, Homo sapiens
  misc_feature: Table A; Target 29043; HLA-A*25:01; GTSF1; ENSG00000170627; TAA
DVASKLATC

SEQ ID NO: 29044 - protein, 9 aa, Homo sapiens
  misc_feature: Table A; Target 29044; HLA-A*26:01; GTSF1; ENSG00000170627; TAA
DVASKLATC

SEQ ID NO: 29045 - protein, 9 aa, Homo sapiens
  misc_feature: Table A; Target 29045; HLA-A*25:01; GTSF1; ENSG00000170627; TAA
DVVNQTRSL

SEQ ID NO: 29046 - protein, 9 aa, Homo sapiens
  misc_feature: Table A; Target 29046; HLA-A*26:01; GTSF1; ENSG00000170627; TAA
DVVNQTRSL

SEQ ID NO: 29047 - protein, 9 aa, Homo sapiens
  misc_feature: Table A; Target 29047; HLA-A*68:01; GTSF1; ENSG00000170627; TAA
DVVNQTRSL

SEQ ID NO: 29048 - protein, 9 aa, Homo sapiens
  misc_feature: Table A; Target 29048; HLA-A*68:02; GTSF1; ENSG00000170627; TAA
DVVNQTRSL

SEQ ID NO: 29049 - protein, 9 aa, Homo sapiens
  misc_feature: Table A; Target 29049; HLA-B*08:01; GTSF1; ENSG00000170627; TAA
DVVNQTRSL

SEQ ID NO: 29050 - protein, 9 aa, Homo sapiens
  misc_feature: Table A; Target 29050; HLA-B*51:01; GTSF1; ENSG00000170627; TAA
DVVNQTRSL

SEQ ID NO: 29051 - protein, 9 aa, Homo sapiens
  misc_feature: Table A; Target 29051; HLA-C*01:02; GTSF1; ENSG00000170627; TAA
DVVNQTRSL

SEQ ID NO: 29052 - protein, 9 aa, Homo sapiens
  misc_feature: Table A; Target 29052; HLA-C*03:03; GTSF1; ENSG00000170627; TAA
DVVNQTRSL

SEQ ID NO: 29053 - protein, 9 aa, Homo sapiens
  misc_feature: Table A; Target 29053; HLA-C*03:04; GTSF1; ENSG00000170627; TAA
DVVNQTRSL

SEQ ID NO: 29054 - protein, 9 aa, Homo sapiens
  misc_feature: Table A; Target 29054; HLA-C*14:02; GTSF1; ENSG00000170627; TAA
DVVNQTRSL

SEQ ID NO: 29055 - protein, 10 aa, Homo sapiens
  misc_feature: Table A; Target 29055; HLA-A*26:01; GTSF1; ENSG00000170627; TAA
DVVNQTRSLR

SEQ ID NO: 29056 - protein, 10 aa, Homo sapiens
  misc_feature: Table A; Target 29056; HLA-A*33:01; GTSF1; ENSG00000170627; TAA
DVVNQTRSLR

SEQ ID NO: 29057 - protein, 10 aa, Homo sapiens
  misc_feature: Table A; Target 29057; HLA-A*33:03; GTSF1; ENSG00000170627; TAA
DVVNQTRSLR

SEQ ID NO: 29058 - protein, 10 aa, Homo sapiens
  misc_feature: Table A; Target 29058; HLA-A*68:01; GTSF1; ENSG00000170627; TAA
DVVNQTRSLR

SEQ ID NO: 29059 - protein, 10 aa, Homo sapiens
  misc_feature: Table A; Target 29059; HLA-C*07:06; GTSF1; ENSG00000170627; TAA
DVVNQTRSLR

SEQ ID NO: 29060 - protein, 8 aa, Homo sapiens
  misc_feature: Table A; Target 29060; HLA-B*18:01; GTSF1; ENSG00000170627; TAA
EETYTDSL

SEQ ID NO: 29061 - protein, 8 aa, Homo sapiens
  misc_feature: Table A; Target 29061; HLA-B*40:01; GTSF1; ENSG00000170627; TAA
EETYTDSL

SEQ ID NO: 29062 - protein, 9 aa, Homo sapiens
  misc_feature: Table A; Target 29062; HLA-A*33:03; GTSF1; ENSG00000170627; TAA
EQDVVNQTR

SEQ ID NO: 29063 - protein, 9 aa, Homo sapiens
  misc_feature: Table A; Target 29063; HLA-A*68:01; GTSF1; ENSG00000170627; TAA
EQDVVNQTR

SEQ ID NO: 29064 - protein, 9 aa, Homo sapiens
  misc_feature: Table A; Target 29064; HLA-B*38:01; GTSF1; ENSG00000170627; TAA
EQDVVNQTR

SEQ ID NO: 29065 - protein, 9 aa, Homo sapiens
  misc_feature: Table A; Target 29065; HLA-C*07:06; GTSF1; ENSG00000170627; TAA
EQDVVNQTR

SEQ ID NO: 29066 - protein, 11 aa, Homo sapiens
  misc_feature: Table A; Target 29066; HLA-B*38:01; GTSF1; ENSG00000170627; TAA
EQDVVNQTRSL

SEQ ID NO: 29067 - protein, 8 aa, Homo sapiens
  misc_feature: Table A; Target 29067; HLA-B*13:02; GTSF1; ENSG00000170627; TAA
EQTSTPFV

SEQ ID NO: 29068 - protein, 9 aa, Homo sapiens
  misc_feature: Table A; Target 29068; HLA-A*24:02; GTSF1; ENSG00000170627; TAA
EQTSTPFVW

SEQ ID NO: 29069 - protein, 9 aa, Homo sapiens
  misc_feature: Table A; Target 29069; HLA-A*25:01; GTSF1; ENSG00000170627; TAA
EQTSTPFVW

SEQ ID NO: 29070 - protein, 9 aa, Homo sapiens
  misc_feature: Table A; Target 29070; HLA-B*44:02; GTSF1; ENSG00000170627; TAA
EQTSTPFVW

SEQ ID NO: 29071 - protein, 11 aa, Homo sapiens
  misc_feature: Table A; Target 29071; HLA-A*11:01; GTSF1; ENSG00000170627; TAA
ETYTDSLDPEK

SEQ ID NO: 29072 - protein, 11 aa, Homo sapiens
  misc_feature: Table A; Target 29072; HLA-A*33:01; GTSF1; ENSG00000170627; TAA
ETYTDSLDPEK

SEQ ID NO: 29073 - protein, 11 aa, Homo sapiens
  misc_feature: Table A; Target 29073; HLA-A*33:03; GTSF1; ENSG00000170627; TAA
ETYTDSLDPEK

SEQ ID NO: 29074 - protein, 11 aa, Homo sapiens
  misc_feature: Table A; Target 29074; HLA-A*68:01; GTSF1; ENSG00000170627; TAA
ETYTDSLDPEK

SEQ ID NO: 29075 - protein, 11 aa, Homo sapiens
  misc_feature: Table A; Target 29075; HLA-B*27:02; GTSF1; ENSG00000170627; TAA
ETYTDSLDPEK

SEQ ID NO: 29076 - protein, 11 aa, Homo sapiens
  misc_feature: Table A; Target 29076; HLA-C*07:06; GTSF1; ENSG00000170627; TAA
ETYTDSLDPEK

SEQ ID NO: 29077 - protein, 9 aa, Homo sapiens
  misc_feature: Table A; Target 29077; HLA-A*33:03; GTSF1; ENSG00000170627; TAA
FNARHQVPR

SEQ ID NO: 29078 - protein, 8 aa, Homo sapiens
  misc_feature: Table A; Target 29078; HLA-B*51:01; GTSF1; ENSG00000170627; TAA
FPYHLIKC

SEQ ID NO: 29079 - protein, 8 aa, Homo sapiens
  misc_feature: Table A; Target 29079; HLA-B*54:01; GTSF1; ENSG00000170627; TAA
FPYHLIKC

SEQ ID NO: 29080 - protein, 8 aa, Homo sapiens
  misc_feature: Table A; Target 29080; HLA-B*56:01; GTSF1; ENSG00000170627; TAA
FPYHLIKC

SEQ ID NO: 29081 - protein, 9 aa, Homo sapiens
  misc_feature: Table A; Target 29081; HLA-B*54:01; GTSF1; ENSG00000170627; TAA
FPYHLIKCR

SEQ ID NO: 29082 - protein, 8 aa, Homo sapiens
  misc_feature: Table A; Target 29082; HLA-A*29:02; GTSF1; ENSG00000170627; TAA
FVWGTTHY

SEQ ID NO: 29083 - protein, 10 aa, Homo sapiens
  misc_feature: Table A; Target 29083; HLA-A*03:01; GTSF1; ENSG00000170627; TAA
GMRVPKSLPY

SEQ ID NO: 29084 - protein, 9 aa, Homo sapiens
  misc_feature: Table A; Target 29084; HLA-B*15:03; GTSF1; ENSG00000170627; TAA
HKNNLASGM

SEQ ID NO: 29085 - protein, 8 aa, Homo sapiens
  misc_feature: Table A; Target 29085; HLA-B*07:02; GTSF1; ENSG00000170627; TAA
HPDVASKL

SEQ ID NO: 29086 - protein, 8 aa, Homo sapiens
  misc_feature: Table A; Target 29086; HLA-B*08:01; GTSF1; ENSG00000170627; TAA
HPDVASKL

SEQ ID NO: 29087 - protein, 8 aa, Homo sapiens
  misc_feature: Table A; Target 29087; HLA-B*35:01; GTSF1; ENSG00000170627; TAA
HPDVASKL

SEQ ID NO: 29088 - protein, 8 aa, Homo sapiens
  misc_feature: Table A; Target 29088; HLA-B*35:03; GTSF1; ENSG00000170627; TAA
HPDVASKL

SEQ ID NO: 29089 - protein, 8 aa, Homo sapiens
  misc_feature: Table A; Target 29089; HLA-B*51:01; GTSF1; ENSG00000170627; TAA
HPDVASKL

SEQ ID NO: 29090 - protein, 8 aa, Homo sapiens
  misc_feature: Table A; Target 29090; HLA-B*55:01; GTSF1; ENSG00000170627; TAA
HPDVASKL

SEQ ID NO: 29091 - protein, 8 aa, Homo sapiens
  misc_feature: Table A; Target 29091; HLA-C*03:03; GTSF1; ENSG00000170627; TAA
HPDVASKL

SEQ ID NO: 29092 - protein, 8 aa, Homo sapiens
  misc_feature: Table A; Target 29092; HLA-C*03:04; GTSF1; ENSG00000170627; TAA
HPDVASKL

SEQ ID NO: 29093 - protein, 8 aa, Homo sapiens
  misc_feature: Table A; Target 29093; HLA-C*04:01; GTSF1; ENSG00000170627; TAA
HPDVASKL

SEQ ID NO: 29094 - protein, 8 aa, Homo sapiens
  misc_feature: Table A; Target 29094; HLA-C*05:01; GTSF1; ENSG00000170627; TAA
HPDVASKL

SEQ ID NO: 29095 - protein, 8 aa, Homo sapiens
  misc_feature: Table A; Target 29095; HLA-C*07:02; GTSF1; ENSG00000170627; TAA
HPDVASKL

SEQ ID NO: 29096 - protein, 8 aa, Homo sapiens
  misc_feature: Table A; Target 29096; HLA-C*07:04; GTSF1; ENSG00000170627; TAA
HPDVASKL

SEQ ID NO: 29097 - protein, 8 aa, Homo sapiens
  misc_feature: Table A; Target 29097; HLA-C*16:02; GTSF1; ENSG00000170627; TAA
HPDVASKL

SEQ ID NO: 29098 - protein, 9 aa, Homo sapiens
  misc_feature: Table A; Target 29098; HLA-B*54:01; GTSF1; ENSG00000170627; TAA
HPDVASKLA

SEQ ID NO: 29099 - protein, 9 aa, Homo sapiens
  misc_feature: Table A; Target 29099; HLA-B*55:01; GTSF1; ENSG00000170627; TAA
HPDVASKLA

SEQ ID NO: 29100 - protein, 9 aa, Homo sapiens
  misc_feature: Table A; Target 29100; HLA-B*56:01; GTSF1; ENSG00000170627; TAA
HPDVASKLA

SEQ ID NO: 29101 - protein, 10 aa, Homo sapiens
  misc_feature: Table A; Target 29101; HLA-B*55:01; GTSF1; ENSG00000170627; TAA
HPDVASKLAT

SEQ ID NO: 29102 - protein, 11 aa, Homo sapiens
  misc_feature: Table A; Target 29102; HLA-B*55:01; GTSF1; ENSG00000170627; TAA
HPDVASKLATC

SEQ ID NO: 29103 - protein, 11 aa, Homo sapiens
  misc_feature: Table A; Target 29103; HLA-B*56:01; GTSF1; ENSG00000170627; TAA
HPDVASKLATC

SEQ ID NO: 29104 - protein, 8 aa, Homo sapiens
  misc_feature: Table A; Target 29104; HLA-B*13:02; GTSF1; ENSG00000170627; TAA
HQVPRAEI

SEQ ID NO: 29105 - protein, 9 aa, Homo sapiens
  misc_feature: Table A; Target 29105; HLA-C*14:02; GTSF1; ENSG00000170627; TAA
HYSDNNSPA

SEQ ID NO: 29106 - protein, 9 aa, Homo sapiens
  misc_feature: Table A; Target 29106; HLA-A*30:01; GTSF1; ENSG00000170627; TAA
IEQDVVNQT

SEQ ID NO: 29107 - protein, 9 aa, Homo sapiens
  misc_feature: Table A; Target 29107; HLA-B*13:02; GTSF1; ENSG00000170627; TAA
IEQDVVNQT

SEQ ID NO: 29108 - protein, 9 aa, Homo sapiens
  misc_feature: Table A; Target 29108; HLA-B*18:01; GTSF1; ENSG00000170627; TAA
IEQDVVNQT

SEQ ID NO: 29109 - protein, 9 aa, Homo sapiens
  misc_feature: Table A; Target 29109; HLA-B*40:02; GTSF1; ENSG00000170627; TAA
IEQDVVNQT

SEQ ID NO: 29110 - protein, 9 aa, Homo sapiens
  misc_feature: Table A; Target 29110; HLA-B*44:02; GTSF1; ENSG00000170627; TAA
IEQDVVNQT

SEQ ID NO: 29111 - protein, 9 aa, Homo sapiens
  misc_feature: Table A; Target 29111; HLA-B*44:03; GTSF1; ENSG00000170627; TAA
IEQDVVNQT

SEQ ID NO: 29112 - protein, 9 aa, Homo sapiens
  misc_feature: Table A; Target 29112; HLA-B*49:01; GTSF1; ENSG00000170627; TAA
IEQDVVNQT

SEQ ID NO: 29113 - protein, 9 aa, Homo sapiens
  misc_feature: Table A; Target 29113; HLA-C*16:02; GTSF1; ENSG00000170627; TAA
IEQDVVNQT

SEQ ID NO: 29114 - protein, 10 aa, Homo sapiens
  misc_feature: Table A; Target 29114; HLA-A*31:01; GTSF1; ENSG00000170627; TAA
IEQDVVNQTR

SEQ ID NO: 29115 - protein, 10 aa, Homo sapiens
  misc_feature: Table A; Target 29115; HLA-A*33:03; GTSF1; ENSG00000170627; TAA
IEQDVVNQTR

SEQ ID NO: 29116 - protein, 10 aa, Homo sapiens
  misc_feature: Table A; Target 29116; HLA-A*68:01; GTSF1; ENSG00000170627; TAA
IEQDVVNQTR

SEQ ID NO: 29117 - protein, 10 aa, Homo sapiens
  misc_feature: Table A; Target 29117; HLA-B*27:02; GTSF1; ENSG00000170627; TAA
IEQDVVNQTR

SEQ ID NO: 29118 - protein, 10 aa, Homo sapiens
  misc_feature: Table A; Target 29118; HLA-B*40:01; GTSF1; ENSG00000170627; TAA
IEQDVVNQTR

SEQ ID NO: 29119 - protein, 10 aa, Homo sapiens
  misc_feature: Table A; Target 29119; HLA-B*44:02; GTSF1; ENSG00000170627; TAA
IEQDVVNQTR

SEQ ID NO: 29120 - protein, 10 aa, Homo sapiens
  misc_feature: Table A; Target 29120; HLA-B*44:03; GTSF1; ENSG00000170627; TAA
IEQDVVNQTR

SEQ ID NO: 29121 - protein, 10 aa, Homo sapiens
  misc_feature: Table A; Target 29121; HLA-B*57:01; GTSF1; ENSG00000170627; TAA
IEQDVVNQTR

SEQ ID NO: 29122 - protein, 10 aa, Homo sapiens
  misc_feature: Table A; Target 29122; HLA-C*07:06; GTSF1; ENSG00000170627; TAA
IEQDVVNQTR

SEQ ID NO: 29123 - protein, 9 aa, Homo sapiens
  misc_feature: Table A; Target 29123; HLA-A*23:01; GTSF1; ENSG00000170627; TAA
IVTEHKNNL

SEQ ID NO: 29124 - protein, 9 aa, Homo sapiens
  misc_feature: Table A; Target 29124; HLA-A*32:01; GTSF1; ENSG00000170627; TAA
IVTEHKNNL

SEQ ID NO: 29125 - protein, 9 aa, Homo sapiens
  misc_feature: Table A; Target 29125; HLA-B*27:05; GTSF1; ENSG00000170627; TAA
IVTEHKNNL

SEQ ID NO: 29126 - protein, 9 aa, Homo sapiens
  misc_feature: Table A; Target 29126; HLA-B*37:01; GTSF1; ENSG00000170627; TAA
IVTEHKNNL

SEQ ID NO: 29127 - protein, 9 aa, Homo sapiens
  misc_feature: Table A; Target 29127; HLA-C*16:01; GTSF1; ENSG00000170627; TAA
IVTEHKNNL

SEQ ID NO: 29128 - protein, 9 aa, Homo sapiens
  misc_feature: Table A; Target 29128; HLA-C*16:02; GTSF1; ENSG00000170627; TAA
IVTEHKNNL

SEQ ID NO: 29129 - protein, 10 aa, Homo sapiens
  misc_feature: Table A; Target 29129; HLA-A*03:01; GTSF1; ENSG00000170627; TAA
KLATCPFNAR

SEQ ID NO: 29130 - protein, 9 aa, Homo sapiens
  misc_feature: Table A; Target 29130; HLA-A*03:02; GTSF1; ENSG00000170627; TAA
KNHPDVASK

SEQ ID NO: 29131 - protein, 10 aa, Homo sapiens
  misc_feature: Table A; Target 29131; HLA-C*07:02; GTSF1; ENSG00000170627; TAA
KNHPDVASKL

SEQ ID NO: 29132 - protein, 9 aa, Homo sapiens
  misc_feature: Table A; Target 29132; HLA-A*31:01; GTSF1; ENSG00000170627; TAA
KSLPYVLPW

SEQ ID NO: 29133 - protein, 9 aa, Homo sapiens
  misc_feature: Table A; Target 29133; HLA-B*57:01; GTSF1; ENSG00000170627; TAA
KSLPYVLPW

SEQ ID NO: 29134 - protein, 9 aa, Homo sapiens
  misc_feature: Table A; Target 29134; HLA-A*11:01; GTSF1; ENSG00000170627; TAA
LASGMRVPK

SEQ ID NO: 29135 - protein, 9 aa, Homo sapiens
  misc_feature: Table A; Target 29135; HLA-C*16:01; GTSF1; ENSG00000170627; TAA
LASGMRVPK

SEQ ID NO: 29136 - protein, 9 aa, Homo sapiens
  misc_feature: Table A; Target 29136; HLA-B*54:01; GTSF1; ENSG00000170627; TAA
LPWKNNGNA

SEQ ID NO: 29137 - protein, 10 aa, Homo sapiens
  misc_feature: Table A; Target 29137; HLA-B*35:01; GTSF1; ENSG00000170627; TAA
LPWKNNGNAQ

SEQ ID NO: 29138 - protein, 10 aa, Homo sapiens
  misc_feature: Table A; Target 29138; HLA-B*54:01; GTSF1; ENSG00000170627; TAA
LPWKNNGNAQ

SEQ ID NO: 29139 - protein, 9 aa, Homo sapiens
  misc_feature: Table A; Target 29139; HLA-B*54:01; GTSF1; ENSG00000170627; TAA
LPYVLPWKN

SEQ ID NO: 29140 - protein, 11 aa, Homo sapiens
  misc_feature: Table A; Target 29140; HLA-C*16:04; GTSF1; ENSG00000170627; TAA
LRQETLAESTW

SEQ ID NO: 29141 - protein, 9 aa, Homo sapiens
  misc_feature: Table A; Target 29141; HLA-B*40:01; GTSF1; ENSG00000170627; TAA
MEETYTDSL

SEQ ID NO: 29142 - protein, 9 aa, Homo sapiens
  misc_feature: Table A; Target 29142; HLA-A*02:07; GTSF1; ENSG00000170627; TAA
NHPDVASKL

SEQ ID NO: 29143 - protein, 9 aa, Homo sapiens
  misc_feature: Table A; Target 29143; HLA-A*24:02; GTSF1; ENSG00000170627; TAA
NHPDVASKL

SEQ ID NO: 29144 - protein, 9 aa, Homo sapiens
  misc_feature: Table A; Target 29144; HLA-B*38:01; GTSF1; ENSG00000170627; TAA
NHPDVASKL

SEQ ID NO: 29145 - protein, 9 aa, Homo sapiens
  misc_feature: Table A; Target 29145; HLA-B*39:01; GTSF1; ENSG00000170627; TAA
NHPDVASKL

SEQ ID NO: 29146 - protein, 9 aa, Homo sapiens
  misc_feature: Table A; Target 29146; HLA-C*01:02; GTSF1; ENSG00000170627; TAA
NHPDVASKL

SEQ ID NO: 29147 - protein, 9 aa, Homo sapiens
  misc_feature: Table A; Target 29147; HLA-C*06:02; GTSF1; ENSG00000170627; TAA
NHPDVASKL

SEQ ID NO: 29148 - protein, 11 aa, Homo sapiens
  misc_feature: Table A; Target 29148; HLA-A*33:01; GTSF1; ENSG00000170627; TAA
NNLASGMRVPK

SEQ ID NO: 29149 - protein, 9 aa, Homo sapiens
  misc_feature: Table A; Target 29149; HLA-C*12:03; GTSF1; ENSG00000170627; TAA
NNSPASNIV

SEQ ID NO: 29150 - protein, 9 aa, Homo sapiens
  misc_feature: Table A; Target 29150; HLA-C*12:03; GTSF1; ENSG00000170627; TAA
PASNIVTEH

SEQ ID NO: 29151 - protein, 9 aa, Homo sapiens
  misc_feature: Table A; Target 29151; HLA-A*29:02; GTSF1; ENSG00000170627; TAA
PFVWGTTHY

SEQ ID NO: 29152 - protein, 8 aa, Homo sapiens
  misc_feature: Table A; Target 29152; HLA-A*24:02; GTSF1; ENSG00000170627; TAA
PYDKNHQI

SEQ ID NO: 29153 - protein, 8 aa, Homo sapiens
  misc_feature: Table A; Target 29153; HLA-C*04:01; GTSF1; ENSG00000170627; TAA
PYDKNHQI

SEQ ID NO: 29154 - protein, 9 aa, Homo sapiens
  misc_feature: Table A; Target 29154; HLA-B*18:01; GTSF1; ENSG00000170627; TAA
QETLAESTW

SEQ ID NO: 29155 - protein, 9 aa, Homo sapiens
  misc_feature: Table A; Target 29155; HLA-B*27:02; GTSF1; ENSG00000170627; TAA
QETLAESTW

SEQ ID NO: 29156 - protein, 9 aa, Homo sapiens
  misc_feature: Table A; Target 29156; HLA-B*40:01; GTSF1; ENSG00000170627; TAA
QETLAESTW

SEQ ID NO: 29157 - protein, 9 aa, Homo sapiens
  misc_feature: Table A; Target 29157; HLA-B*40:02; GTSF1; ENSG00000170627; TAA
QETLAESTW

SEQ ID NO: 29158 - protein, 9 aa, Homo sapiens
  misc_feature: Table A; Target 29158; HLA-B*44:02; GTSF1; ENSG00000170627; TAA
QETLAESTW

SEQ ID NO: 29159 - protein, 9 aa, Homo sapiens
  misc_feature: Table A; Target 29159; HLA-B*44:03; GTSF1; ENSG00000170627; TAA
QETLAESTW

SEQ ID NO: 29160 - protein, 9 aa, Homo sapiens
  misc_feature: Table A; Target 29160; HLA-B*49:01; GTSF1; ENSG00000170627; TAA
QETLAESTW

SEQ ID NO: 29161 - protein, 9 aa, Homo sapiens
  misc_feature: Table A; Target 29161; HLA-C*16:04; GTSF1; ENSG00000170627; TAA
QETLAESTW

SEQ ID NO: 29162 - protein, 8 aa, Homo sapiens
  misc_feature: Table A; Target 29162; HLA-B*57:01; GTSF1; ENSG00000170627; TAA
QTSTPFVW

SEQ ID NO: 29163 - protein, 8 aa, Homo sapiens
  misc_feature: Table A; Target 29163; HLA-B*58:01; GTSF1; ENSG00000170627; TAA
QTSTPFVW

SEQ ID NO: 29164 - protein, 10 aa, Homo sapiens
  misc_feature: Table A; Target 29164; HLA-A*32:01; GTSF1; ENSG00000170627; TAA
RQETLAESTW

SEQ ID NO: 29165 - protein, 10 aa, Homo sapiens
  misc_feature: Table A; Target 29165; HLA-B*58:01; GTSF1; ENSG00000170627; TAA
RQETLAESTW

SEQ ID NO: 29166 - protein, 10 aa, Homo sapiens
  misc_feature: Table A; Target 29166; HLA-C*16:04; GTSF1; ENSG00000170627; TAA
RQETLAESTW

SEQ ID NO: 29167 - protein, 8 aa, Homo sapiens
  misc_feature: Table A; Target 29167; HLA-B*58:01; GTSF1; ENSG00000170627; TAA
RSLRQETL

SEQ ID NO: 29168 - protein, 9 aa, Homo sapiens
  misc_feature: Table A; Target 29168; HLA-A*02:04; GTSF1; ENSG00000170627; TAA
RVPKSLPYV

SEQ ID NO: 29169 - protein, 9 aa, Homo sapiens
  misc_feature: Table A; Target 29169; HLA-A*02:07; GTSF1; ENSG00000170627; TAA
RVPKSLPYV

SEQ ID NO: 29170 - protein, 8 aa, Homo sapiens
  misc_feature: Table A; Target 29170; HLA-C*05:01; GTSF1; ENSG00000170627; TAA
SLDPEKLL

SEQ ID NO: 29171 - protein, 10 aa, Homo sapiens
  misc_feature: Table A; Target 29171; HLA-A*02:01; GTSF1; ENSG00000170627; TAA
SLDPEKLLQC

SEQ ID NO: 29172 - protein, 9 aa, Homo sapiens
  misc_feature: Table A; Target 29172; HLA-B*56:01; GTSF1; ENSG00000170627; TAA
SPASNIVTE

SEQ ID NO: 29173 - protein, 10 aa, Homo sapiens
  misc_feature: Table A; Target 29173; HLA-A*68:01; GTSF1; ENSG00000170627; TAA
SPASNIVTEH

SEQ ID NO: 29174 - protein, 10 aa, Homo sapiens
  misc_feature: Table A; Target 29174; HLA-B*07:02; GTSF1; ENSG00000170627; TAA
SPASNIVTEH

SEQ ID NO: 29175 - protein, 10 aa, Homo sapiens
  misc_feature: Table A; Target 29175; HLA-B*35:01; GTSF1; ENSG00000170627; TAA
SPASNIVTEH

SEQ ID NO: 29176 - protein, 10 aa, Homo sapiens
  misc_feature: Table A; Target 29176; HLA-B*56:01; GTSF1; ENSG00000170627; TAA
SPASNIVTEH

SEQ ID NO: 29177 - protein, 10 aa, Homo sapiens
  misc_feature: Table A; Target 29177; HLA-C*07:02; GTSF1; ENSG00000170627; TAA
SPASNIVTEH

SEQ ID NO: 29178 - protein, 10 aa, Homo sapiens
  misc_feature: Table A; Target 29178; HLA-C*07:06; GTSF1; ENSG00000170627; TAA
SPASNIVTEH

SEQ ID NO: 29179 - protein, 8 aa, Homo sapiens
  misc_feature: Table A; Target 29179; HLA-B*27:02; GTSF1; ENSG00000170627; TAA
TDSLDPEK

SEQ ID NO: 29180 - protein, 9 aa, Homo sapiens
  misc_feature: Table A; Target 29180; HLA-B*37:01; GTSF1; ENSG00000170627; TAA
TDSLDPEKL

SEQ ID NO: 29181 - protein, 9 aa, Homo sapiens
  misc_feature: Table A; Target 29181; HLA-B*38:01; GTSF1; ENSG00000170627; TAA
TDSLDPEKL

SEQ ID NO: 29182 - protein, 9 aa, Homo sapiens
  misc_feature: Table A; Target 29182; HLA-B*40:01; GTSF1; ENSG00000170627; TAA
TDSLDPEKL

SEQ ID NO: 29183 - protein, 9 aa, Homo sapiens
  misc_feature: Table A; Target 29183; HLA-B*27:05; GTSF1; ENSG00000170627; TAA
THYSDNNSP

SEQ ID NO: 29184 - protein, 9 aa, Homo sapiens
  misc_feature: Table A; Target 29184; HLA-B*38:01; GTSF1; ENSG00000170627; TAA
THYSDNNSP

SEQ ID NO: 29185 - protein, 9 aa, Homo sapiens
  misc_feature: Table A; Target 29185; HLA-A*02:01; GTSF1; ENSG00000170627; TAA
TLAESTWQC

SEQ ID NO: 29186 - protein, 9 aa, Homo sapiens
  misc_feature: Table A; Target 29186; HLA-B*35:01; GTSF1; ENSG00000170627; TAA
TPFVWGTTH

SEQ ID NO: 29187 - protein, 9 aa, Homo sapiens
  misc_feature: Table A; Target 29187; HLA-B*51:01; GTSF1; ENSG00000170627; TAA
TPFVWGTTH

SEQ ID NO: 29188 - protein, 10 aa, Homo sapiens
  misc_feature: Table A; Target 29188; HLA-A*29:02; GTSF1; ENSG00000170627; TAA
TPFVWGTTHY

SEQ ID NO: 29189 - protein, 10 aa, Homo sapiens
  misc_feature: Table A; Target 29189; HLA-B*35:01; GTSF1; ENSG00000170627; TAA
TPFVWGTTHY

SEQ ID NO: 29190 - protein, 10 aa, Homo sapiens
  misc_feature: Table A; Target 29190; HLA-C*07:01; GTSF1; ENSG00000170627; TAA
TPFVWGTTHY

SEQ ID NO: 29191 - protein, 9 aa, Homo sapiens
  misc_feature: Table A; Target 29191; HLA-B*38:01; GTSF1; ENSG00000170627; TAA
TRSLRQETL

SEQ ID NO: 29192 - protein, 10 aa, Homo sapiens
  misc_feature: Table A; Target 29192; HLA-B*27:02; GTSF1; ENSG00000170627; TAA
TYTDSLDPEK

SEQ ID NO: 29193 - protein, 11 aa, Homo sapiens
  misc_feature: Table A; Target 29193; HLA-A*24:02; GTSF1; ENSG00000170627; TAA
TYTDSLDPEKL

SEQ ID NO: 29194 - protein, 8 aa, Homo sapiens
  misc_feature: Table A; Target 29194; HLA-B*51:01; GTSF1; ENSG00000170627; TAA
VPKSLPYV

SEQ ID NO: 29195 - protein, 8 aa, Homo sapiens
  misc_feature: Table A; Target 29195; HLA-B*56:01; GTSF1; ENSG00000170627; TAA
VPKSLPYV

SEQ ID NO: 29196 - protein, 9 aa, Homo sapiens
  misc_feature: Table A; Target 29196; HLA-A*23:01; GTSF1; ENSG00000170627; TAA
VPKSLPYVL

SEQ ID NO: 29197 - protein, 9 aa, Homo sapiens
  misc_feature: Table A; Target 29197; HLA-B*07:02; GTSF1; ENSG00000170627; TAA
VPKSLPYVL

SEQ ID NO: 29198 - protein, 9 aa, Homo sapiens
  misc_feature: Table A; Target 29198; HLA-B*08:01; GTSF1; ENSG00000170627; TAA
VPKSLPYVL

SEQ ID NO: 29199 - protein, 9 aa, Homo sapiens
  misc_feature: Table A; Target 29199; HLA-B*56:01; GTSF1; ENSG00000170627; TAA
VPKSLPYVL

SEQ ID NO: 29200 - protein, 9 aa, Homo sapiens
  misc_feature: Table A; Target 29200; HLA-C*07:02; GTSF1; ENSG00000170627; TAA
VPKSLPYVL

SEQ ID NO: 29201 - protein, 8 aa, Homo sapiens
  misc_feature: Table A; Target 29201; HLA-A*32:01; GTSF1; ENSG00000170627; TAA
VVNQTRSL

SEQ ID NO: 29202 - protein, 8 aa, Homo sapiens
  misc_feature: Table A; Target 29202; HLA-B*07:02; GTSF1; ENSG00000170627; TAA
VVNQTRSL

SEQ ID NO: 29203 - protein, 8 aa, Homo sapiens
  misc_feature: Table A; Target 29203; HLA-B*08:01; GTSF1; ENSG00000170627; TAA
VVNQTRSL

SEQ ID NO: 29204 - protein, 8 aa, Homo sapiens
  misc_feature: Table A; Target 29204; HLA-B*46:01; GTSF1; ENSG00000170627; TAA
VVNQTRSL

SEQ ID NO: 29205 - protein, 8 aa, Homo sapiens
  misc_feature: Table A; Target 29205; HLA-C*01:02; GTSF1; ENSG00000170627; TAA
VVNQTRSL

SEQ ID NO: 29206 - protein, 8 aa, Homo sapiens
  misc_feature: Table A; Target 29206; HLA-C*03:03; GTSF1; ENSG00000170627; TAA
VVNQTRSL

SEQ ID NO: 29207 - protein, 8 aa, Homo sapiens
  misc_feature: Table A; Target 29207; HLA-C*03:04; GTSF1; ENSG00000170627; TAA
VVNQTRSL

SEQ ID NO: 29208 - protein, 8 aa, Homo sapiens
  misc_feature: Table A; Target 29208; HLA-C*14:02; GTSF1; ENSG00000170627; TAA
VVNQTRSL

SEQ ID NO: 29209 - protein, 8 aa, Homo sapiens
  misc_feature: Table A; Target 29209; HLA-C*16:01; GTSF1; ENSG00000170627; TAA
VVNQTRSL

SEQ ID NO: 29210 - protein, 9 aa, Homo sapiens
  misc_feature: Table A; Target 29210; HLA-A*03:01; GTSF1; ENSG00000170627; TAA
VVNQTRSLR

SEQ ID NO: 29211 - protein, 9 aa, Homo sapiens
  misc_feature: Table A; Target 29211; HLA-A*31:01; GTSF1; ENSG00000170627; TAA
VVNQTRSLR

SEQ ID NO: 29212 - protein, 9 aa, Homo sapiens
  misc_feature: Table A; Target 29212; HLA-A*33:01; GTSF1; ENSG00000170627; TAA
VVNQTRSLR

SEQ ID NO: 29213 - protein, 9 aa, Homo sapiens
  misc_feature: Table A; Target 29213; HLA-A*33:03; GTSF1; ENSG00000170627; TAA
VVNQTRSLR

SEQ ID NO: 29214 - protein, 8 aa, Homo sapiens
  misc_feature: Table A; Target 29214; HLA-B*18:01; GTSF1; ENSG00000170627; TAA
WEQTSTPF

SEQ ID NO: 29215 - protein, 8 aa, Homo sapiens
  misc_feature: Table A; Target 29215; HLA-B*37:01; GTSF1; ENSG00000170627; TAA
WEQTSTPF

SEQ ID NO: 29216 - protein, 9 aa, Homo sapiens
  misc_feature: Table A; Target 29216; HLA-B*49:01; GTSF1; ENSG00000170627; TAA
WEQTSTPFV

SEQ ID NO: 29217 - protein, 10 aa, Homo sapiens
  misc_feature: Table A; Target 29217; HLA-B*44:02; GTSF1; ENSG00000170627; TAA
WEQTSTPFVW

SEQ ID NO: 29218 - protein, 10 aa, Homo sapiens
  misc_feature: Table A; Target 29218; HLA-B*44:03; GTSF1; ENSG00000170627; TAA
WEQTSTPFVW

SEQ ID NO: 29219 - protein, 9 aa, Homo sapiens
  misc_feature: Table A; Target 29219; HLA-A*01:01; GTSF1; ENSG00000170627; TAA
YSDNNSPAS

SEQ ID NO: 29220 - protein, 10 aa, Homo sapiens
  misc_feature: Table A; Target 29220; HLA-A*01:01; GTSF1; ENSG00000170627; TAA
YSDNNSPASN

SEQ ID NO: 29221 - protein, 11 aa, Homo sapiens
  misc_feature: Table A; Target 29221; HLA-A*01:01; GTSF1; ENSG00000170627; TAA
YSDNNSPASNI

SEQ ID NO: 29222 - protein, 11 aa, Homo sapiens
  misc_feature: Table A; Target 29222; HLA-B*38:01; GTSF1; ENSG00000170627; TAA
YSDNNSPASNI

SEQ ID NO: 29223 - protein, 11 aa, Homo sapiens
  misc_feature: Table A; Target 29223; HLA-C*05:01; GTSF1; ENSG00000170627; TAA
YSDNNSPASNI

SEQ ID NO: 29224 - protein, 9 aa, Homo sapiens
  misc_feature: Table A; Target 29224; HLA-A*01:01; GTSF1; ENSG00000170627; TAA
YTDSLDPEK

SEQ ID NO: 29225 - protein, 9 aa, Homo sapiens
  misc_feature: Table A; Target 29225; HLA-A*11:01; GTSF1; ENSG00000170627; TAA
YTDSLDPEK

SEQ ID NO: 29226 - protein, 10 aa, Homo sapiens
  misc_feature: Table A; Target 29226; HLA-A*01:01; GTSF1; ENSG00000170627; TAA
YTDSLDPEKL

SEQ ID NO: 29227 - protein, 10 aa, Homo sapiens
  misc_feature: Table A; Target 29227; HLA-A*02:07; GTSF1; ENSG00000170627; TAA
YTDSLDPEKL

SEQ ID NO: 29228 - protein, 10 aa, Homo sapiens
  misc_feature: Table A; Target 29228; HLA-B*35:03; GTSF1; ENSG00000170627; TAA
YTDSLDPEKL

SEQ ID NO: 29229 - protein, 10 aa, Homo sapiens
  misc_feature: Table A; Target 29229; HLA-B*38:01; GTSF1; ENSG00000170627; TAA
YTDSLDPEKL

SEQ ID NO: 29230 - protein, 10 aa, Homo sapiens
  misc_feature: Table A; Target 29230; HLA-C*05:01; GTSF1; ENSG00000170627; TAA
YTDSLDPEKL

SEQ ID NO: 29231 - protein, 11 aa, Homo sapiens
  misc_feature: Table A; Target 29231; HLA-A*01:01; GTSF1; ENSG00000170627; TAA
YTDSLDPEKLL

SEQ ID NO: 29232 - protein, 11 aa, Homo sapiens
  misc_feature: Table A; Target 29232; HLA-A*02:07; GTSF1; ENSG00000170627; TAA
YTDSLDPEKLL

SEQ ID NO: 29233 - protein, 8 aa, Homo sapiens
  misc_feature: Table A; Target 29233; HLA-B*37:01; HAVCR1; ENSG00000113249; TAA
ADSVAGSV

SEQ ID NO: 29234 - protein, 9 aa, Homo sapiens
  misc_feature: Table A; Target 29234; HLA-B*37:01; HAVCR1; ENSG00000113249; TAA
ADSVAGSVK

SEQ ID NO: 29235 - protein, 10 aa, Homo sapiens
  misc_feature: Table A; Target 29235; HLA-B*37:01; HAVCR1; ENSG00000113249; TAA
ADSVAGSVKV

SEQ ID NO: 29236 - protein, 10 aa, Homo sapiens
  misc_feature: Table A; Target 29236; HLA-B*40:02; HAVCR1; ENSG00000113249; TAA
ADSVAGSVKV

SEQ ID NO: 29237 - protein, 10 aa, Homo sapiens
  misc_feature: Table A; Target 29237; HLA-B*49:01; HAVCR1; ENSG00000113249; TAA
ADSVAGSVKV

SEQ ID NO: 29238 - protein, 11 aa, Homo sapiens
  misc_feature: Table A; Target 29238; HLA-B*07:02; HAVCR1; ENSG00000113249; TAA
ADSVAGSVKVG

SEQ ID NO: 29239 - protein, 11 aa, Homo sapiens
  misc_feature: Table A; Target 29239; HLA-C*07:02; HAVCR1; ENSG00000113249; TAA
ADSVAGSVKVG

SEQ ID NO: 29240 - protein, 11 aa, Homo sapiens
  misc_feature: Table A; Target 29240; HLA-A*30:01; HAVCR1; ENSG00000113249; TAA
AEDNIYIENSL

SEQ ID NO: 29241 - protein, 11 aa, Homo sapiens
  misc_feature: Table A; Target 29241; HLA-B*38:01; HAVCR1; ENSG00000113249; TAA
AEDNIYIENSL

SEQ ID NO: 29242 - protein, 11 aa, Homo sapiens
  misc_feature: Table A; Target 29242; HLA-B*40:01; HAVCR1; ENSG00000113249; TAA
AEDNIYIENSL

SEQ ID NO: 29243 - protein, 8 aa, Homo sapiens
  misc_feature: Table A; Target 29243; HLA-A*30:01; HAVCR1; ENSG00000113249; TAA
AETHPTTL

SEQ ID NO: 29244 - protein, 8 aa, Homo sapiens
  misc_feature: Table A; Target 29244; HLA-B*37:01; HAVCR1; ENSG00000113249; TAA
AETHPTTL

SEQ ID NO: 29245 - protein, 8 aa, Homo sapiens
  misc_feature: Table A; Target 29245; HLA-B*40:01; HAVCR1; ENSG00000113249; TAA
AETHPTTL

SEQ ID NO: 29246 - protein, 8 aa, Homo sapiens
  misc_feature: Table A; Target 29246; HLA-B*44:03; HAVCR1; ENSG00000113249; TAA
AETHPTTL

SEQ ID NO: 29247 - protein, 8 aa, Homo sapiens
  misc_feature: Table A; Target 29247; HLA-B*49:01; HAVCR1; ENSG00000113249; TAA
AETHPTTL

SEQ ID NO: 29248 - protein, 9 aa, Homo sapiens
  misc_feature: Table A; Target 29248; HLA-A*02:01; HAVCR1; ENSG00000113249; TAA
ALLGVIIAK

SEQ ID NO: 29249 - protein, 9 aa, Homo sapiens
  misc_feature: Table A; Target 29249; HLA-A*02:04; HAVCR1; ENSG00000113249; TAA
ALLGVIIAK

SEQ ID NO: 29250 - protein, 9 aa, Homo sapiens
  misc_feature: Table A; Target 29250; HLA-A*03:01; HAVCR1; ENSG00000113249; TAA
ALLGVIIAK

SEQ ID NO: 29251 - protein, 9 aa, Homo sapiens
  misc_feature: Table A; Target 29251; HLA-A*03:02; HAVCR1; ENSG00000113249; TAA
ALLGVIIAK

SEQ ID NO: 29252 - protein, 9 aa, Homo sapiens
  misc_feature: Table A; Target 29252; HLA-A*11:01; HAVCR1; ENSG00000113249; TAA
ALLGVIIAK

SEQ ID NO: 29253 - protein, 9 aa, Homo sapiens
  misc_feature: Table A; Target 29253; HLA-A*29:02; HAVCR1; ENSG00000113249; TAA
ALLGVIIAK

SEQ ID NO: 29254 - protein, 9 aa, Homo sapiens
  misc_feature: Table A; Target 29254; HLA-A*31:01; HAVCR1; ENSG00000113249; TAA
ALLGVIIAK

SEQ ID NO: 29255 - protein, 9 aa, Homo sapiens
  misc_feature: Table A; Target 29255; HLA-A*33:03; HAVCR1; ENSG00000113249; TAA
ALLGVIIAK

SEQ ID NO: 29256 - protein, 9 aa, Homo sapiens
  misc_feature: Table A; Target 29256; HLA-B*13:02; HAVCR1; ENSG00000113249; TAA
ALLGVIIAK

SEQ ID NO: 29257 - protein, 9 aa, Homo sapiens
  misc_feature: Table A; Target 29257; HLA-B*27:05; HAVCR1; ENSG00000113249; TAA
ALLGVIIAK

SEQ ID NO: 29258 - protein, 9 aa, Homo sapiens
  misc_feature: Table A; Target 29258; HLA-C*07:06; HAVCR1; ENSG00000113249; TAA
ALLGVIIAK

SEQ ID NO: 29259 - protein, 10 aa, Homo sapiens
  misc_feature: Table A; Target 29259; HLA-A*03:01; HAVCR1; ENSG00000113249; TAA
ALLGVIIAKK

SEQ ID NO: 29260 - protein, 10 aa, Homo sapiens
  misc_feature: Table A; Target 29260; HLA-A*03:02; HAVCR1; ENSG00000113249; TAA
ALLGVIIAKK

SEQ ID NO: 29261 - protein, 10 aa, Homo sapiens
  misc_feature: Table A; Target 29261; HLA-A*11:01; HAVCR1; ENSG00000113249; TAA
ALLGVIIAKK

SEQ ID NO: 29262 - protein, 11 aa, Homo sapiens
  misc_feature: Table A; Target 29262; HLA-A*29:02; HAVCR1; ENSG00000113249; TAA
ALLGVIIAKKY

SEQ ID NO: 29263 - protein, 11 aa, Homo sapiens
  misc_feature: Table A; Target 29263; HLA-A*30:02; HAVCR1; ENSG00000113249; TAA
ALLGVIIAKKY

SEQ ID NO: 29264 - protein, 8 aa, Homo sapiens
  misc_feature: Table A; Target 29264; HLA-A*03:02; HAVCR1; ENSG00000113249; TAA
ALQNAVEK

SEQ ID NO: 29265 - protein, 8 aa, Homo sapiens
  misc_feature: Table A; Target 29265; HLA-C*16:01; HAVCR1; ENSG00000113249; TAA
ANTTKGIY

SEQ ID NO: 29266 - protein, 8 aa, Homo sapiens
  misc_feature: Table A; Target 29266; HLA-A*30:02; HAVCR1; ENSG00000113249; TAA
AVSDSGVY

SEQ ID NO: 29267 - protein, 8 aa, Homo sapiens
  misc_feature: Table A; Target 29267; HLA-A*32:01; HAVCR1; ENSG00000113249; TAA
AVSDSGVY

SEQ ID NO: 29268 - protein, 8 aa, Homo sapiens
  misc_feature: Table A; Target 29268; HLA-B*15:01; HAVCR1; ENSG00000113249; TAA
AVSDSGVY

SEQ ID NO: 29269 - protein, 8 aa, Homo sapiens
  misc_feature: Table A; Target 29269; HLA-B*39:01; HAVCR1; ENSG00000113249; TAA
AVSDSGVY

SEQ ID NO: 29270 - protein, 11 aa, Homo sapiens
  misc_feature: Table A; Target 29270; HLA-A*31:01; HAVCR1; ENSG00000113249; TAA
AVSDSGVYCCR

SEQ ID NO: 29271 - protein, 11 aa, Homo sapiens
  misc_feature: Table A; Target 29271; HLA-A*68:01; HAVCR1; ENSG00000113249; TAA
AVSDSGVYCCR

SEQ ID NO: 29272 - protein, 9 aa, Homo sapiens
  misc_feature: Table A; Target 29272; HLA-A*31:01; HAVCR1; ENSG00000113249; TAA
AVTSMCWNR

SEQ ID NO: 29273 - protein, 10 aa, Homo sapiens
  misc_feature: Table A; Target 29273; HLA-B*38:01; HAVCR1; ENSG00000113249; TAA
CHYSGAVTSM

SEQ ID NO: 29274 - protein, 10 aa, Homo sapiens
  misc_feature: Table A; Target 29274; HLA-B*39:01; HAVCR1; ENSG00000113249; TAA
CHYSGAVTSM

SEQ ID NO: 29275 - protein, 9 aa, Homo sapiens
  misc_feature: Table A; Target 29275; HLA-B*08:01; HAVCR1; ENSG00000113249; TAA
DLSRRDVSL

SEQ ID NO: 29276 - protein, 8 aa, Homo sapiens
  misc_feature: Table A; Target 29276; HLA-B*08:01; HAVCR1; ENSG00000113249; TAA
DMKITVSL

SEQ ID NO: 29277 - protein, 9 aa, Homo sapiens
  misc_feature: Table A; Target 29277; HLA-B*18:01; HAVCR1; ENSG00000113249; TAA
DNIYIENSL

SEQ ID NO: 29278 - protein, 10 aa, Homo sapiens
  misc_feature: Table A; Target 29278; HLA-A*25:01; HAVCR1; ENSG00000113249; TAA
DNIYIENSLY

SEQ ID NO: 29279 - protein, 10 aa, Homo sapiens
  misc_feature: Table A; Target 29279; HLA-A*26:01; HAVCR1; ENSG00000113249; TAA
DNIYIENSLY

SEQ ID NO: 29280 - protein, 10 aa, Homo sapiens
  misc_feature: Table A; Target 29280; HLA-A*33:01; HAVCR1; ENSG00000113249; TAA
DNIYIENSLY

SEQ ID NO: 29281 - protein, 9 aa, Homo sapiens
  misc_feature: Table A; Target 29281; HLA-A*25:01; HAVCR1; ENSG00000113249; TAA
DSVAGSVKV

SEQ ID NO: 29282 - protein, 9 aa, Homo sapiens
  misc_feature: Table A; Target 29282; HLA-A*26:01; HAVCR1; ENSG00000113249; TAA
DSVAGSVKV

SEQ ID NO: 29283 - protein, 9 aa, Homo sapiens
  misc_feature: Table A; Target 29283; HLA-A*68:01; HAVCR1; ENSG00000113249; TAA
DSVAGSVKV

SEQ ID NO: 29284 - protein, 9 aa, Homo sapiens
  misc_feature: Table A; Target 29284; HLA-A*68:02; HAVCR1; ENSG00000113249; TAA
DSVAGSVKV

SEQ ID NO: 29285 - protein, 9 aa, Homo sapiens
  misc_feature: Table A; Target 29285; HLA-B*51:01; HAVCR1; ENSG00000113249; TAA
DSVAGSVKV

SEQ ID NO: 29286 - protein, 10 aa, Homo sapiens
  misc_feature: Table A; Target 29286; HLA-C*12:03; HAVCR1; ENSG00000113249; TAA
DSVAGSVKVG

SEQ ID NO: 29287 - protein, 11 aa, Homo sapiens
  misc_feature: Table A; Target 29287; HLA-A*01:01; HAVCR1; ENSG00000113249; TAA
DTVTESSDGLW

SEQ ID NO: 29288 - protein, 11 aa, Homo sapiens
  misc_feature: Table A; Target 29288; HLA-A*25:01; HAVCR1; ENSG00000113249; TAA
DTVTESSDGLW

SEQ ID NO: 29289 - protein, 11 aa, Homo sapiens
  misc_feature: Table A; Target 29289; HLA-A*26:01; HAVCR1; ENSG00000113249; TAA
DTVTESSDGLW

SEQ ID NO: 29290 - protein, 11 aa, Homo sapiens
  misc_feature: Table A; Target 29290; HLA-A*33:01; HAVCR1; ENSG00000113249; TAA
DTVTESSDGLW

SEQ ID NO: 29291 - protein, 11 aa, Homo sapiens
  misc_feature: Table A; Target 29291; HLA-A*33:03; HAVCR1; ENSG00000113249; TAA
DTVTESSDGLW

SEQ ID NO: 29292 - protein, 11 aa, Homo sapiens
  misc_feature: Table A; Target 29292; HLA-A*68:01; HAVCR1; ENSG00000113249; TAA
DTVTESSDGLW

SEQ ID NO: 29293 - protein, 11 aa, Homo sapiens
  misc_feature: Table A; Target 29293; HLA-B*57:01; HAVCR1; ENSG00000113249; TAA
DTVTESSDGLW

SEQ ID NO: 29294 - protein, 11 aa, Homo sapiens
  misc_feature: Table A; Target 29294; HLA-A*68:02; HAVCR1; ENSG00000113249; TAA
DVSLTIENTAV

SEQ ID NO: 29295 - protein, 8 aa, Homo sapiens
  misc_feature: Table A; Target 29295; HLA-B*35:03; HAVCR1; ENSG00000113249; TAA
EAGPSVTL

SEQ ID NO: 29296 - protein, 8 aa, Homo sapiens
  misc_feature: Table A; Target 29296; HLA-C*05:01; HAVCR1; ENSG00000113249; TAA
EAGPSVTL

SEQ ID NO: 29297 - protein, 9 aa, Homo sapiens
  misc_feature: Table A; Target 29297; HLA-B*38:01; HAVCR1; ENSG00000113249; TAA
EHSLLTANT

SEQ ID NO: 29298 - protein, 9 aa, Homo sapiens
  misc_feature: Table A; Target 29298; HLA-B*39:01; HAVCR1; ENSG00000113249; TAA
EHSLLTANT

SEQ ID NO: 29299 - protein, 10 aa, Homo sapiens
  misc_feature: Table A; Target 29299; HLA-B*38:01; HAVCR1; ENSG00000113249; TAA
EHSLLTANTT

SEQ ID NO: 29300 - protein, 10 aa, Homo sapiens
  misc_feature: Table A; Target 29300; HLA-B*39:01; HAVCR1; ENSG00000113249; TAA
EHSLLTANTT

SEQ ID NO: 29301 - protein, 10 aa, Homo sapiens
  misc_feature: Table A; Target 29301; HLA-C*07:01; HAVCR1; ENSG00000113249; TAA
EHSLLTANTT

SEQ ID NO: 29302 - protein, 11 aa, Homo sapiens
  misc_feature: Table A; Target 29302; HLA-B*27:02; HAVCR1; ENSG00000113249; TAA
EHSLLTANTTK

SEQ ID NO: 29303 - protein, 11 aa, Homo sapiens
  misc_feature: Table A; Target 29303; HLA-B*38:01; HAVCR1; ENSG00000113249; TAA
EHSLLTANTTK

SEQ ID NO: 29304 - protein, 11 aa, Homo sapiens
  misc_feature: Table A; Target 29304; HLA-B*39:01; HAVCR1; ENSG00000113249; TAA
EHSLLTANTTK

SEQ ID NO: 29305 - protein, 11 aa, Homo sapiens
  misc_feature: Table A; Target 29305; HLA-C*07:01; HAVCR1; ENSG00000113249; TAA
EHSLLTANTTK

SEQ ID NO: 29306 - protein, 11 aa, Homo sapiens
  misc_feature: Table A; Target 29306; HLA-C*07:02; HAVCR1; ENSG00000113249; TAA
EHSLLTANTTK

SEQ ID NO: 29307 - protein, 10 aa, Homo sapiens
  misc_feature: Table A; Target 29307; HLA-A*25:01; HAVCR1; ENSG00000113249; TAA
EIVPPKVTTT

SEQ ID NO: 29308 - protein, 11 aa, Homo sapiens
  misc_feature: Table A; Target 29308; HLA-A*26:01; HAVCR1; ENSG00000113249; TAA
ENTAVSDSGVY

SEQ ID NO: 29309 - protein, 8 aa, Homo sapiens
  misc_feature: Table A; Target 29309; HLA-B*35:01; HAVCR1; ENSG00000113249; TAA
EPTSSPLY

SEQ ID NO: 29310 - protein, 8 aa, Homo sapiens
  misc_feature: Table A; Target 29310; HLA-B*55:01; HAVCR1; ENSG00000113249; TAA
EPTSSPLY

SEQ ID NO: 29311 - protein, 10 aa, Homo sapiens
  misc_feature: Table A; Target 29311; HLA-A*25:01; HAVCR1; ENSG00000113249; TAA
EPTSSPLYSY

SEQ ID NO: 29312 - protein, 10 aa, Homo sapiens
  misc_feature: Table A; Target 29312; HLA-A*26:01; HAVCR1; ENSG00000113249; TAA
EPTSSPLYSY

SEQ ID NO: 29313 - protein, 10 aa, Homo sapiens
  misc_feature: Table A; Target 29313; HLA-B*35:01; HAVCR1; ENSG00000113249; TAA
EPTSSPLYSY

SEQ ID NO: 29314 - protein, 10 aa, Homo sapiens
  misc_feature: Table A; Target 29314; HLA-B*55:01; HAVCR1; ENSG00000113249; TAA
EPTSSPLYSY

SEQ ID NO: 29315 - protein, 9 aa, Homo sapiens
  misc_feature: Table A; Target 29315; HLA-A*23:01; HAVCR1; ENSG00000113249; TAA
EVQQLSVSF

SEQ ID NO: 29316 - protein, 9 aa, Homo sapiens
  misc_feature: Table A; Target 29316; HLA-A*25:01; HAVCR1; ENSG00000113249; TAA
EVQQLSVSF

SEQ ID NO: 29317 - protein, 9 aa, Homo sapiens
  misc_feature: Table A; Target 29317; HLA-A*26:01; HAVCR1; ENSG00000113249; TAA
EVQQLSVSF

SEQ ID NO: 29318 - protein, 9 aa, Homo sapiens
  misc_feature: Table A; Target 29318; HLA-A*33:01; HAVCR1; ENSG00000113249; TAA
EVQQLSVSF

SEQ ID NO: 29319 - protein, 9 aa, Homo sapiens
  misc_feature: Table A; Target 29319; HLA-A*33:03; HAVCR1; ENSG00000113249; TAA
EVQQLSVSF

SEQ ID NO: 29320 - protein, 9 aa, Homo sapiens
  misc_feature: Table A; Target 29320; HLA-A*68:01; HAVCR1; ENSG00000113249; TAA
EVQQLSVSF

SEQ ID NO: 29321 - protein, 9 aa, Homo sapiens
  misc_feature: Table A; Target 29321; HLA-B*15:01; HAVCR1; ENSG00000113249; TAA
EVQQLSVSF

SEQ ID NO: 29322 - protein, 9 aa, Homo sapiens
  misc_feature: Table A; Target 29322; HLA-B*18:01; HAVCR1; ENSG00000113249; TAA
EVQQLSVSF

SEQ ID NO: 29323 - protein, 9 aa, Homo sapiens
  misc_feature: Table A; Target 29323; HLA-B*35:01; HAVCR1; ENSG00000113249; TAA
EVQQLSVSF

SEQ ID NO: 29324 - protein, 9 aa, Homo sapiens
  misc_feature: Table A; Target 29324; HLA-B*44:02; HAVCR1; ENSG00000113249; TAA
EVQQLSVSF

SEQ ID NO: 29325 - protein, 9 aa, Homo sapiens
  misc_feature: Table A; Target 29325; HLA-B*44:03; HAVCR1; ENSG00000113249; TAA
EVQQLSVSF

SEQ ID NO: 29326 - protein, 9 aa, Homo sapiens
  misc_feature: Table A; Target 29326; HLA-C*07:06; HAVCR1; ENSG00000113249; TAA
EVQQLSVSF

SEQ ID NO: 29327 - protein, 9 aa, Homo sapiens
  misc_feature: Table A; Target 29327; HLA-A*23:01; HAVCR1; ENSG00000113249; TAA
FFKKEVQQL

SEQ ID NO: 29328 - protein, 9 aa, Homo sapiens
  misc_feature: Table A; Target 29328; HLA-A*24:02; HAVCR1; ENSG00000113249; TAA
FFKKEVQQL

SEQ ID NO: 29329 - protein, 9 aa, Homo sapiens
  misc_feature: Table A; Target 29329; HLA-A*02:01; HAVCR1; ENSG00000113249; TAA
FLEHSLLTA

SEQ ID NO: 29330 - protein, 9 aa, Homo sapiens
  misc_feature: Table A; Target 29330; HLA-A*02:03; HAVCR1; ENSG00000113249; TAA
FLEHSLLTA

SEQ ID NO: 29331 - protein, 9 aa, Homo sapiens
  misc_feature: Table A; Target 29331; HLA-A*02:07; HAVCR1; ENSG00000113249; TAA
FLEHSLLTA

SEQ ID NO: 29332 - protein, 9 aa, Homo sapiens
  misc_feature: Table A; Target 29332; HLA-A*02:04; HAVCR1; ENSG00000113249; TAA
FSSLQIKAL

SEQ ID NO: 29333 - protein, 9 aa, Homo sapiens
  misc_feature: Table A; Target 29333; HLA-B*07:02; HAVCR1; ENSG00000113249; TAA
FSSLQIKAL

SEQ ID NO: 29334 - protein, 9 aa, Homo sapiens
  misc_feature: Table A; Target 29334; HLA-B*08:01; HAVCR1; ENSG00000113249; TAA
FSSLQIKAL

SEQ ID NO: 29335 - protein, 9 aa, Homo sapiens
  misc_feature: Table A; Target 29335; HLA-B*46:01; HAVCR1; ENSG00000113249; TAA
FSSLQIKAL

SEQ ID NO: 29336 - protein, 9 aa, Homo sapiens
  misc_feature: Table A; Target 29336; HLA-B*54:01; HAVCR1; ENSG00000113249; TAA
FSSLQIKAL

SEQ ID NO: 29337 - protein, 9 aa, Homo sapiens
  misc_feature: Table A; Target 29337; HLA-C*01:02; HAVCR1; ENSG00000113249; TAA
FSSLQIKAL

SEQ ID NO: 29338 - protein, 9 aa, Homo sapiens
  misc_feature: Table A; Target 29338; HLA-C*02:02; HAVCR1; ENSG00000113249; TAA
FSSLQIKAL

SEQ ID NO: 29339 - protein, 9 aa, Homo sapiens
  misc_feature: Table A; Target 29339; HLA-C*03:03; HAVCR1; ENSG00000113249; TAA
FSSLQIKAL

SEQ ID NO: 29340 - protein, 9 aa, Homo sapiens
  misc_feature: Table A; Target 29340; HLA-C*03:04; HAVCR1; ENSG00000113249; TAA
FSSLQIKAL

SEQ ID NO: 29341 - protein, 9 aa, Homo sapiens
  misc_feature: Table A; Target 29341; HLA-C*06:02; HAVCR1; ENSG00000113249; TAA
FSSLQIKAL

SEQ ID NO: 29342 - protein, 9 aa, Homo sapiens
  misc_feature: Table A; Target 29342; HLA-C*12:03; HAVCR1; ENSG00000113249; TAA
FSSLQIKAL

SEQ ID NO: 29343 - protein, 9 aa, Homo sapiens
  misc_feature: Table A; Target 29343; HLA-C*16:01; HAVCR1; ENSG00000113249; TAA
FSSLQIKAL

SEQ ID NO: 29344 - protein, 9 aa, Homo sapiens
  misc_feature: Table A; Target 29344; HLA-C*16:02; HAVCR1; ENSG00000113249; TAA
FSSLQIKAL

SEQ ID NO: 29345 - protein, 9 aa, Homo sapiens
  misc_feature: Table A; Target 29345; HLA-B*57:01; HAVCR1; ENSG00000113249; TAA
FTCQNGIVW

SEQ ID NO: 29346 - protein, 9 aa, Homo sapiens
  misc_feature: Table A; Target 29346; HLA-A*29:02; HAVCR1; ENSG00000113249; TAA
FVPPMPLPR

SEQ ID NO: 29347 - protein, 9 aa, Homo sapiens
  misc_feature: Table A; Target 29347; HLA-A*31:01; HAVCR1; ENSG00000113249; TAA
FVPPMPLPR

SEQ ID NO: 29348 - protein, 9 aa, Homo sapiens
  misc_feature: Table A; Target 29348; HLA-A*33:03; HAVCR1; ENSG00000113249; TAA
FVPPMPLPR

SEQ ID NO: 29349 - protein, 9 aa, Homo sapiens
  misc_feature: Table A; Target 29349; HLA-A*68:01; HAVCR1; ENSG00000113249; TAA
FVPPMPLPR

SEQ ID NO: 29350 - protein, 8 aa, Homo sapiens
  misc_feature: Table A; Target 29350; HLA-B*58:01; HAVCR1; ENSG00000113249; TAA
GAVTSMCW

SEQ ID NO: 29351 - protein, 10 aa, Homo sapiens
  misc_feature: Table A; Target 29351; HLA-B*37:01; HAVCR1; ENSG00000113249; TAA
GDLSRRDVSL

SEQ ID NO: 29352 - protein, 9 aa, Homo sapiens
  misc_feature: Table A; Target 29352; HLA-A*30:01; HAVCR1; ENSG00000113249; TAA
GEAGPSVTL

SEQ ID NO: 29353 - protein, 9 aa, Homo sapiens
  misc_feature: Table A; Target 29353; HLA-B*15:01; HAVCR1; ENSG00000113249; TAA
GEAGPSVTL

SEQ ID NO: 29354 - protein, 9 aa, Homo sapiens
  misc_feature: Table A; Target 29354; HLA-B*15:03; HAVCR1; ENSG00000113249; TAA
GEAGPSVTL

SEQ ID NO: 29355 - protein, 9 aa, Homo sapiens
  misc_feature: Table A; Target 29355; HLA-B*18:01; HAVCR1; ENSG00000113249; TAA
GEAGPSVTL

SEQ ID NO: 29356 - protein, 9 aa, Homo sapiens
  misc_feature: Table A; Target 29356; HLA-B*27:02; HAVCR1; ENSG00000113249; TAA
GEAGPSVTL

SEQ ID NO: 29357 - protein, 9 aa, Homo sapiens
  misc_feature: Table A; Target 29357; HLA-B*27:05; HAVCR1; ENSG00000113249; TAA
GEAGPSVTL

SEQ ID NO: 29358 - protein, 9 aa, Homo sapiens
  misc_feature: Table A; Target 29358; HLA-B*37:01; HAVCR1; ENSG00000113249; TAA
GEAGPSVTL

SEQ ID NO: 29359 - protein, 9 aa, Homo sapiens
  misc_feature: Table A; Target 29359; HLA-B*38:01; HAVCR1; ENSG00000113249; TAA
GEAGPSVTL

SEQ ID NO: 29360 - protein, 9 aa, Homo sapiens
  misc_feature: Table A; Target 29360; HLA-B*39:01; HAVCR1; ENSG00000113249; TAA
GEAGPSVTL

SEQ ID NO: 29361 - protein, 9 aa, Homo sapiens
  misc_feature: Table A; Target 29361; HLA-B*40:01; HAVCR1; ENSG00000113249; TAA
GEAGPSVTL

SEQ ID NO: 29362 - protein, 9 aa, Homo sapiens
  misc_feature: Table A; Target 29362; HLA-B*40:02; HAVCR1; ENSG00000113249; TAA
GEAGPSVTL

SEQ ID NO: 29363 - protein, 9 aa, Homo sapiens
  misc_feature: Table A; Target 29363; HLA-B*44:02; HAVCR1; ENSG00000113249; TAA
GEAGPSVTL

SEQ ID NO: 29364 - protein, 9 aa, Homo sapiens
  misc_feature: Table A; Target 29364; HLA-B*44:03; HAVCR1; ENSG00000113249; TAA
GEAGPSVTL

SEQ ID NO: 29365 - protein, 9 aa, Homo sapiens
  misc_feature: Table A; Target 29365; HLA-B*49:01; HAVCR1; ENSG00000113249; TAA
GEAGPSVTL

SEQ ID NO: 29366 - protein, 9 aa, Homo sapiens
  misc_feature: Table A; Target 29366; HLA-C*16:04; HAVCR1; ENSG00000113249; TAA
GEAGPSVTL

SEQ ID NO: 29367 - protein, 10 aa, Homo sapiens
  misc_feature: Table A; Target 29367; HLA-B*40:01; HAVCR1; ENSG00000113249; TAA
GEAGPSVTLP

SEQ ID NO: 29368 - protein, 10 aa, Homo sapiens
  misc_feature: Table A; Target 29368; HLA-B*49:01; HAVCR1; ENSG00000113249; TAA
GEAGPSVTLP

SEQ ID NO: 29369 - protein, 10 aa, Homo sapiens
  misc_feature: Table A; Target 29369; HLA-B*40:01; HAVCR1; ENSG00000113249; TAA
GGEAGPSVTL

SEQ ID NO: 29370 - protein, 8 aa, Homo sapiens
  misc_feature: Table A; Target 29370; HLA-B*13:02; HAVCR1; ENSG00000113249; TAA
GIYAGVCI

SEQ ID NO: 29371 - protein, 10 aa, Homo sapiens
  misc_feature: Table A; Target 29371; HLA-A*02:01; HAVCR1; ENSG00000113249; TAA
GIYAGVCISV

SEQ ID NO: 29372 - protein, 10 aa, Homo sapiens
  misc_feature: Table A; Target 29372; HLA-A*02:03; HAVCR1; ENSG00000113249; TAA
GIYAGVCISV

SEQ ID NO: 29373 - protein, 10 aa, Homo sapiens
  misc_feature: Table A; Target 29373; HLA-A*02:01; HAVCR1; ENSG00000113249; TAA
GLWNNNQTQL

SEQ ID NO: 29374 - protein, 10 aa, Homo sapiens
  misc_feature: Table A; Target 29374; HLA-A*02:03; HAVCR1; ENSG00000113249; TAA
GLWNNNQTQL

SEQ ID NO: 29375 - protein, 10 aa, Homo sapiens
  misc_feature: Table A; Target 29375; HLA-A*02:04; HAVCR1; ENSG00000113249; TAA
GLWNNNQTQL

SEQ ID NO: 29376 - protein, 11 aa, Homo sapiens
  misc_feature: Table A; Target 29376; HLA-A*29:02; HAVCR1; ENSG00000113249; TAA
GLWNNNQTQLF

SEQ ID NO: 29377 - protein, 8 aa, Homo sapiens
  misc_feature: Table A; Target 29377; HLA-A*11:01; HAVCR1; ENSG00000113249; TAA
GTHVTYRK

SEQ ID NO: 29378 - protein, 10 aa, Homo sapiens
  misc_feature: Table A; Target 29378; HLA-A*02:03; HAVCR1; ENSG00000113249; TAA
HLADSVAGSV

SEQ ID NO: 29379 - protein, 10 aa, Homo sapiens
  misc_feature: Table A; Target 29379; HLA-A*26:01; HAVCR1; ENSG00000113249; TAA
HLADSVAGSV

SEQ ID NO: 29380 - protein, 10 aa, Homo sapiens
  misc_feature: Table A; Target 29380; HLA-A*68:02; HAVCR1; ENSG00000113249; TAA
HLADSVAGSV

SEQ ID NO: 29381 - protein, 10 aa, Homo sapiens
  misc_feature: Table A; Target 29381; HLA-B*13:02; HAVCR1; ENSG00000113249; TAA
HLADSVAGSV

SEQ ID NO: 29382 - protein, 11 aa, Homo sapiens
  misc_feature: Table A; Target 29382; HLA-A*03:01; HAVCR1; ENSG00000113249; TAA
HLADSVAGSVK

SEQ ID NO: 29383 - protein, 11 aa, Homo sapiens
  misc_feature: Table A; Target 29383; HLA-A*03:02; HAVCR1; ENSG00000113249; TAA
HLADSVAGSVK

SEQ ID NO: 29384 - protein, 11 aa, Homo sapiens
  misc_feature: Table A; Target 29384; HLA-A*11:01; HAVCR1; ENSG00000113249; TAA
HLADSVAGSVK

SEQ ID NO: 29385 - protein, 11 aa, Homo sapiens
  misc_feature: Table A; Target 29385; HLA-A*68:01; HAVCR1; ENSG00000113249; TAA
HLADSVAGSVK

SEQ ID NO: 29386 - protein, 11 aa, Homo sapiens
  misc_feature: Table A; Target 29386; HLA-C*07:06; HAVCR1; ENSG00000113249; TAA
HLADSVAGSVK

SEQ ID NO: 29387 - protein, 9 aa, Homo sapiens
  misc_feature: Table A; Target 29387; HLA-B*07:02; HAVCR1; ENSG00000113249; TAA
HPQVVILSL

SEQ ID NO: 29388 - protein, 9 aa, Homo sapiens
  misc_feature: Table A; Target 29388; HLA-B*08:01; HAVCR1; ENSG00000113249; TAA
HPQVVILSL

SEQ ID NO: 29389 - protein, 9 aa, Homo sapiens
  misc_feature: Table A; Target 29389; HLA-B*35:01; HAVCR1; ENSG00000113249; TAA
HPQVVILSL

SEQ ID NO: 29390 - protein, 9 aa, Homo sapiens
  misc_feature: Table A; Target 29390; HLA-B*35:03; HAVCR1; ENSG00000113249; TAA
HPQVVILSL

SEQ ID NO: 29391 - protein, 9 aa, Homo sapiens
  misc_feature: Table A; Target 29391; HLA-B*51:01; HAVCR1; ENSG00000113249; TAA
HPQVVILSL

SEQ ID NO: 29392 - protein, 9 aa, Homo sapiens
  misc_feature: Table A; Target 29392; HLA-B*54:01; HAVCR1; ENSG00000113249; TAA
HPQVVILSL

SEQ ID NO: 29393 - protein, 9 aa, Homo sapiens
  misc_feature: Table A; Target 29393; HLA-B*55:01; HAVCR1; ENSG00000113249; TAA
HPQVVILSL

SEQ ID NO: 29394 - protein, 9 aa, Homo sapiens
  misc_feature: Table A; Target 29394; HLA-B*56:01; HAVCR1; ENSG00000113249; TAA
HPQVVILSL

SEQ ID NO: 29395 - protein, 9 aa, Homo sapiens
  misc_feature: Table A; Target 29395; HLA-C*07:02; HAVCR1; ENSG00000113249; TAA
HPQVVILSL

SEQ ID NO: 29396 - protein, 8 aa, Homo sapiens
  misc_feature: Table A; Target 29396; HLA-B*54:01; HAVCR1; ENSG00000113249; TAA
HPTTLQGA

SEQ ID NO: 29397 - protein, 8 aa, Homo sapiens
  misc_feature: Table A; Target 29397; HLA-B*55:01; HAVCR1; ENSG00000113249; TAA
HPTTLQGA

SEQ ID NO: 29398 - protein, 8 aa, Homo sapiens
  misc_feature: Table A; Target 29398; HLA-B*56:01; HAVCR1; ENSG00000113249; TAA
HPTTLQGA

SEQ ID NO: 29399 - protein, 9 aa, Homo sapiens
  misc_feature: Table A; Target 29399; HLA-B*07:02; HAVCR1; ENSG00000113249; TAA
HPTTLQGAI

SEQ ID NO: 29400 - protein, 9 aa, Homo sapiens
  misc_feature: Table A; Target 29400; HLA-B*35:03; HAVCR1; ENSG00000113249; TAA
HPTTLQGAI

SEQ ID NO: 29401 - protein, 9 aa, Homo sapiens
  misc_feature: Table A; Target 29401; HLA-B*51:01; HAVCR1; ENSG00000113249; TAA
HPTTLQGAI

SEQ ID NO: 29402 - protein, 9 aa, Homo sapiens
  misc_feature: Table A; Target 29402; HLA-B*54:01; HAVCR1; ENSG00000113249; TAA
HPTTLQGAI

SEQ ID NO: 29403 - protein, 9 aa, Homo sapiens
  misc_feature: Table A; Target 29403; HLA-B*56:01; HAVCR1; ENSG00000113249; TAA
HPTTLQGAI

SEQ ID NO: 29404 - protein, 10 aa, Homo sapiens
  misc_feature: Table A; Target 29404; HLA-A*68:01; HAVCR1; ENSG00000113249; TAA
HPTTLQGAIR

SEQ ID NO: 29405 - protein, 10 aa, Homo sapiens
  misc_feature: Table A; Target 29405; HLA-B*35:03; HAVCR1; ENSG00000113249; TAA
HPTTLQGAIR

SEQ ID NO: 29406 - protein, 10 aa, Homo sapiens
  misc_feature: Table A; Target 29406; HLA-C*07:06; HAVCR1; ENSG00000113249; TAA
HPTTLQGAIR

SEQ ID NO: 29407 - protein, 10 aa, Homo sapiens
  misc_feature: Table A; Target 29407; HLA-A*03:02; HAVCR1; ENSG00000113249; TAA
HSLLTANTTK

SEQ ID NO: 29408 - protein, 10 aa, Homo sapiens
  misc_feature: Table A; Target 29408; HLA-A*11:01; HAVCR1; ENSG00000113249; TAA
HSLLTANTTK

SEQ ID NO: 29409 - protein, 10 aa, Homo sapiens
  misc_feature: Table A; Target 29409; HLA-B*27:02; HAVCR1; ENSG00000113249; TAA
HSLLTANTTK

SEQ ID NO: 29410 - protein, 10 aa, Homo sapiens
  misc_feature: Table A; Target 29410; HLA-C*07:06; HAVCR1; ENSG00000113249; TAA
HSLLTANTTK

SEQ ID NO: 29411 - protein, 9 aa, Homo sapiens
  misc_feature: Table A; Target 29411; HLA-A*23:01; HAVCR1; ENSG00000113249; TAA
HYSGAVTSM

SEQ ID NO: 29412 - protein, 9 aa, Homo sapiens
  misc_feature: Table A; Target 29412; HLA-A*24:02; HAVCR1; ENSG00000113249; TAA
HYSGAVTSM

SEQ ID NO: 29413 - protein, 9 aa, Homo sapiens
  misc_feature: Table A; Target 29413; HLA-A*26:01; HAVCR1; ENSG00000113249; TAA
HYSGAVTSM

SEQ ID NO: 29414 - protein, 9 aa, Homo sapiens
  misc_feature: Table A; Target 29414; HLA-A*30:02; HAVCR1; ENSG00000113249; TAA
HYSGAVTSM

SEQ ID NO: 29415 - protein, 9 aa, Homo sapiens
  misc_feature: Table A; Target 29415; HLA-A*32:01; HAVCR1; ENSG00000113249; TAA
HYSGAVTSM

SEQ ID NO: 29416 - protein, 9 aa, Homo sapiens
  misc_feature: Table A; Target 29416; HLA-A*33:03; HAVCR1; ENSG00000113249; TAA
HYSGAVTSM

SEQ ID NO: 29417 - protein, 9 aa, Homo sapiens
  misc_feature: Table A; Target 29417; HLA-B*07:02; HAVCR1; ENSG00000113249; TAA
HYSGAVTSM

SEQ ID NO: 29418 - protein, 9 aa, Homo sapiens
  misc_feature: Table A; Target 29418; HLA-B*15:01; HAVCR1; ENSG00000113249; TAA
HYSGAVTSM

SEQ ID NO: 29419 - protein, 9 aa, Homo sapiens
  misc_feature: Table A; Target 29419; HLA-B*15:03; HAVCR1; ENSG00000113249; TAA
HYSGAVTSM

SEQ ID NO: 29420 - protein, 9 aa, Homo sapiens
  misc_feature: Table A; Target 29420; HLA-B*35:01; HAVCR1; ENSG00000113249; TAA
HYSGAVTSM

SEQ ID NO: 29421 - protein, 9 aa, Homo sapiens
  misc_feature: Table A; Target 29421; HLA-B*35:03; HAVCR1; ENSG00000113249; TAA
HYSGAVTSM

SEQ ID NO: 29422 - protein, 9 aa, Homo sapiens
  misc_feature: Table A; Target 29422; HLA-B*37:01; HAVCR1; ENSG00000113249; TAA
HYSGAVTSM

SEQ ID NO: 29423 - protein, 9 aa, Homo sapiens
  misc_feature: Table A; Target 29423; HLA-B*38:01; HAVCR1; ENSG00000113249; TAA
HYSGAVTSM

SEQ ID NO: 29424 - protein, 9 aa, Homo sapiens
  misc_feature: Table A; Target 29424; HLA-B*39:01; HAVCR1; ENSG00000113249; TAA
HYSGAVTSM

SEQ ID NO: 29425 - protein, 9 aa, Homo sapiens
  misc_feature: Table A; Target 29425; HLA-B*46:01; HAVCR1; ENSG00000113249; TAA
HYSGAVTSM

SEQ ID NO: 29426 - protein, 9 aa, Homo sapiens
  misc_feature: Table A; Target 29426; HLA-B*55:01; HAVCR1; ENSG00000113249; TAA
HYSGAVTSM

SEQ ID NO: 29427 - protein, 9 aa, Homo sapiens
  misc_feature: Table A; Target 29427; HLA-C*01:02; HAVCR1; ENSG00000113249; TAA
HYSGAVTSM

SEQ ID NO: 29428 - protein, 9 aa, Homo sapiens
  misc_feature: Table A; Target 29428; HLA-C*02:02; HAVCR1; ENSG00000113249; TAA
HYSGAVTSM

SEQ ID NO: 29429 - protein, 9 aa, Homo sapiens
  misc_feature: Table A; Target 29429; HLA-C*03:03; HAVCR1; ENSG00000113249; TAA
HYSGAVTSM

SEQ ID NO: 29430 - protein, 9 aa, Homo sapiens
  misc_feature: Table A; Target 29430; HLA-C*03:04; HAVCR1; ENSG00000113249; TAA
HYSGAVTSM

SEQ ID NO: 29431 - protein, 9 aa, Homo sapiens
  misc_feature: Table A; Target 29431; HLA-C*04:01; HAVCR1; ENSG00000113249; TAA
HYSGAVTSM

SEQ ID NO: 29432 - protein, 9 aa, Homo sapiens
  misc_feature: Table A; Target 29432; HLA-C*07:04; HAVCR1; ENSG00000113249; TAA
HYSGAVTSM

SEQ ID NO: 29433 - protein, 9 aa, Homo sapiens
  misc_feature: Table A; Target 29433; HLA-C*07:06; HAVCR1; ENSG00000113249; TAA
HYSGAVTSM

SEQ ID NO: 29434 - protein, 9 aa, Homo sapiens
  misc_feature: Table A; Target 29434; HLA-C*12:03; HAVCR1; ENSG00000113249; TAA
HYSGAVTSM

SEQ ID NO: 29435 - protein, 9 aa, Homo sapiens
  misc_feature: Table A; Target 29435; HLA-C*14:02; HAVCR1; ENSG00000113249; TAA
HYSGAVTSM

SEQ ID NO: 29436 - protein, 9 aa, Homo sapiens
  misc_feature: Table A; Target 29436; HLA-C*16:01; HAVCR1; ENSG00000113249; TAA
HYSGAVTSM

SEQ ID NO: 29437 - protein, 9 aa, Homo sapiens
  misc_feature: Table A; Target 29437; HLA-C*16:02; HAVCR1; ENSG00000113249; TAA
HYSGAVTSM

SEQ ID NO: 29438 - protein, 8 aa, Homo sapiens
  misc_feature: Table A; Target 29438; HLA-B*18:01; HAVCR1; ENSG00000113249; TAA
IENSLYAT

SEQ ID NO: 29439 - protein, 9 aa, Homo sapiens
  misc_feature: Table A; Target 29439; HLA-A*03:01; HAVCR1; ENSG00000113249; TAA
IIAKKYFFK

SEQ ID NO: 29440 - protein, 8 aa, Homo sapiens
  misc_feature: Table A; Target 29440; HLA-B*13:02; HAVCR1; ENSG00000113249; TAA
ILHLADSV

SEQ ID NO: 29441 - protein, 8 aa, Homo sapiens
  misc_feature: Table A; Target 29441; HLA-C*06:02; HAVCR1; ENSG00000113249; TAA
ILHLADSV

SEQ ID NO: 29442 - protein, 8 aa, Homo sapiens
  misc_feature: Table A; Target 29442; HLA-A*02:04; HAVCR1; ENSG00000113249; TAA
ILSLILHL

SEQ ID NO: 29443 - protein, 9 aa, Homo sapiens
  misc_feature: Table A; Target 29443; HLA-B*07:02; HAVCR1; ENSG00000113249; TAA
IPTTTSVPV

SEQ ID NO: 29444 - protein, 9 aa, Homo sapiens
  misc_feature: Table A; Target 29444; HLA-B*35:01; HAVCR1; ENSG00000113249; TAA
IPTTTSVPV

SEQ ID NO: 29445 - protein, 9 aa, Homo sapiens
  misc_feature: Table A; Target 29445; HLA-B*35:03; HAVCR1; ENSG00000113249; TAA
IPTTTSVPV

SEQ ID NO: 29446 - protein, 9 aa, Homo sapiens
  misc_feature: Table A; Target 29446; HLA-B*51:01; HAVCR1; ENSG00000113249; TAA
IPTTTSVPV

SEQ ID NO: 29447 - protein, 9 aa, Homo sapiens
  misc_feature: Table A; Target 29447; HLA-B*54:01; HAVCR1; ENSG00000113249; TAA
IPTTTSVPV

SEQ ID NO: 29448 - protein, 9 aa, Homo sapiens
  misc_feature: Table A; Target 29448; HLA-B*55:01; HAVCR1; ENSG00000113249; TAA
IPTTTSVPV

SEQ ID NO: 29449 - protein, 9 aa, Homo sapiens
  misc_feature: Table A; Target 29449; HLA-B*56:01; HAVCR1; ENSG00000113249; TAA
IPTTTSVPV

SEQ ID NO: 29450 - protein, 9 aa, Homo sapiens
  misc_feature: Table A; Target 29450; HLA-C*04:01; HAVCR1; ENSG00000113249; TAA
IPTTTSVPV

SEQ ID NO: 29451 - protein, 9 aa, Homo sapiens
  misc_feature: Table A; Target 29451; HLA-C*07:02; HAVCR1; ENSG00000113249; TAA
IPTTTSVPV

SEQ ID NO: 29452 - protein, 9 aa, Homo sapiens
  misc_feature: Table A; Target 29452; HLA-C*14:02; HAVCR1; ENSG00000113249; TAA
IPTTTSVPV

SEQ ID NO: 29453 - protein, 8 aa, Homo sapiens
  misc_feature: Table A; Target 29453; HLA-B*07:02; HAVCR1; ENSG00000113249; TAA
IPTTTTVL

SEQ ID NO: 29454 - protein, 8 aa, Homo sapiens
  misc_feature: Table A; Target 29454; HLA-B*08:01; HAVCR1; ENSG00000113249; TAA
IPTTTTVL

SEQ ID NO: 29455 - protein, 8 aa, Homo sapiens
  misc_feature: Table A; Target 29455; HLA-B*35:01; HAVCR1; ENSG00000113249; TAA
IPTTTTVL

SEQ ID NO: 29456 - protein, 8 aa, Homo sapiens
  misc_feature: Table A; Target 29456; HLA-B*35:03; HAVCR1; ENSG00000113249; TAA
IPTTTTVL

SEQ ID NO: 29457 - protein, 8 aa, Homo sapiens
  misc_feature: Table A; Target 29457; HLA-B*51:01; HAVCR1; ENSG00000113249; TAA
IPTTTTVL

SEQ ID NO: 29458 - protein, 8 aa, Homo sapiens
  misc_feature: Table A; Target 29458; HLA-B*55:01; HAVCR1; ENSG00000113249; TAA
IPTTTTVL

SEQ ID NO: 29459 - protein, 8 aa, Homo sapiens
  misc_feature: Table A; Target 29459; HLA-B*56:01; HAVCR1; ENSG00000113249; TAA
IPTTTTVL

SEQ ID NO: 29460 - protein, 8 aa, Homo sapiens
  misc_feature: Table A; Target 29460; HLA-C*05:01; HAVCR1; ENSG00000113249; TAA
IPTTTTVL

SEQ ID NO: 29461 - protein, 8 aa, Homo sapiens
  misc_feature: Table A; Target 29461; HLA-C*07:02; HAVCR1; ENSG00000113249; TAA
IPTTTTVL

SEQ ID NO: 29462 - protein, 9 aa, Homo sapiens
  misc_feature: Table A; Target 29462; HLA-B*56:01; HAVCR1; ENSG00000113249; TAA
IPTTTTVLT

SEQ ID NO: 29463 - protein, 11 aa, Homo sapiens
  misc_feature: Table A; Target 29463; HLA-B*07:02; HAVCR1; ENSG00000113249; TAA
IPTTTTVLTTM

SEQ ID NO: 29464 - protein, 11 aa, Homo sapiens
  misc_feature: Table A; Target 29464; HLA-B*35:01; HAVCR1; ENSG00000113249; TAA
IPTTTTVLTTM

SEQ ID NO: 29465 - protein, 11 aa, Homo sapiens
  misc_feature: Table A; Target 29465; HLA-B*35:03; HAVCR1; ENSG00000113249; TAA
IPTTTTVLTTM

SEQ ID NO: 29466 - protein, 11 aa, Homo sapiens
  misc_feature: Table A; Target 29466; HLA-B*51:01; HAVCR1; ENSG00000113249; TAA
IPTTTTVLTTM

SEQ ID NO: 29467 - protein, 11 aa, Homo sapiens
  misc_feature: Table A; Target 29467; HLA-B*54:01; HAVCR1; ENSG00000113249; TAA
IPTTTTVLTTM

SEQ ID NO: 29468 - protein, 11 aa, Homo sapiens
  misc_feature: Table A; Target 29468; HLA-B*55:01; HAVCR1; ENSG00000113249; TAA
IPTTTTVLTTM

SEQ ID NO: 29469 - protein, 11 aa, Homo sapiens
  misc_feature: Table A; Target 29469; HLA-B*56:01; HAVCR1; ENSG00000113249; TAA
IPTTTTVLTTM

SEQ ID NO: 29470 - protein, 11 aa, Homo sapiens
  misc_feature: Table A; Target 29470; HLA-C*07:02; HAVCR1; ENSG00000113249; TAA
IPTTTTVLTTM

SEQ ID NO: 29471 - protein, 11 aa, Homo sapiens
  misc_feature: Table A; Target 29471; HLA-C*14:02; HAVCR1; ENSG00000113249; TAA
IPTTTTVLTTM

SEQ ID NO: 29472 - protein, 11 aa, Homo sapiens
  misc_feature: Table A; Target 29472; HLA-A*03:01; HAVCR1; ENSG00000113249; TAA
ITVSLEIVPPK

SEQ ID NO: 29473 - protein, 11 aa, Homo sapiens
  misc_feature: Table A; Target 29473; HLA-A*03:02; HAVCR1; ENSG00000113249; TAA
ITVSLEIVPPK

SEQ ID NO: 29474 - protein, 11 aa, Homo sapiens
  misc_feature: Table A; Target 29474; HLA-A*11:01; HAVCR1; ENSG00000113249; TAA
ITVSLEIVPPK

SEQ ID NO: 29475 - protein, 11 aa, Homo sapiens
  misc_feature: Table A; Target 29475; HLA-A*68:01; HAVCR1; ENSG00000113249; TAA
ITVSLEIVPPK

SEQ ID NO: 29476 - protein, 11 aa, Homo sapiens
  misc_feature: Table A; Target 29476; HLA-B*27:02; HAVCR1; ENSG00000113249; TAA
ITVSLEIVPPK

SEQ ID NO: 29477 - protein, 11 aa, Homo sapiens
  misc_feature: Table A; Target 29477; HLA-C*07:06; HAVCR1; ENSG00000113249; TAA
ITVSLEIVPPK

SEQ ID NO: 29478 - protein, 8 aa, Homo sapiens
  misc_feature: Table A; Target 29478; HLA-A*02:01; HAVCR1; ENSG00000113249; TAA
IVTTVPTV

SEQ ID NO: 29479 - protein, 8 aa, Homo sapiens
  misc_feature: Table A; Target 29479; HLA-B*13:02; HAVCR1; ENSG00000113249; TAA
IVTTVPTV

SEQ ID NO: 29480 - protein, 8 aa, Homo sapiens
  misc_feature: Table A; Target 29480; HLA-B*49:01; HAVCR1; ENSG00000113249; TAA
IVTTVPTV

SEQ ID NO: 29481 - protein, 8 aa, Homo sapiens
  misc_feature: Table A; Target 29481; HLA-B*51:01; HAVCR1; ENSG00000113249; TAA
IVTTVPTV

SEQ ID NO: 29482 - protein, 8 aa, Homo sapiens
  misc_feature: Table A; Target 29482; HLA-B*55:01; HAVCR1; ENSG00000113249; TAA
IVTTVPTV

SEQ ID NO: 29483 - protein, 8 aa, Homo sapiens
  misc_feature: Table A; Target 29483; HLA-C*02:02; HAVCR1; ENSG00000113249; TAA
IVTTVPTV

SEQ ID NO: 29484 - protein, 8 aa, Homo sapiens
  misc_feature: Table A; Target 29484; HLA-C*16:02; HAVCR1; ENSG00000113249; TAA
IVTTVPTV

SEQ ID NO: 29485 - protein, 9 aa, Homo sapiens
  misc_feature: Table A; Target 29485; HLA-A*32:01; HAVCR1; ENSG00000113249; TAA
IVTTVPTVT

SEQ ID NO: 29486 - protein, 9 aa, Homo sapiens
  misc_feature: Table A; Target 29486; HLA-C*16:02; HAVCR1; ENSG00000113249; TAA
IVTTVPTVT

SEQ ID NO: 29487 - protein, 11 aa, Homo sapiens
  misc_feature: Table A; Target 29487; HLA-A*02:01; HAVCR1; ENSG00000113249; TAA
IVTTVPTVTTV

SEQ ID NO: 29488 - protein, 9 aa, Homo sapiens
  misc_feature: Table A; Target 29488; HLA-A*02:07; HAVCR1; ENSG00000113249; TAA
IVWTNGTHV

SEQ ID NO: 29489 - protein, 11 aa, Homo sapiens
  misc_feature: Table A; Target 29489; HLA-A*23:01; HAVCR1; ENSG00000113249; TAA
IVWTNGTHVTY

SEQ ID NO: 29490 - protein, 11 aa, Homo sapiens
  misc_feature: Table A; Target 29490; HLA-A*29:02; HAVCR1; ENSG00000113249; TAA
IVWTNGTHVTY

SEQ ID NO: 29491 - protein, 11 aa, Homo sapiens
  misc_feature: Table A; Target 29491; HLA-A*30:02; HAVCR1; ENSG00000113249; TAA
IVWTNGTHVTY

SEQ ID NO: 29492 - protein, 11 aa, Homo sapiens
  misc_feature: Table A; Target 29492; HLA-A*32:01; HAVCR1; ENSG00000113249; TAA
IVWTNGTHVTY

SEQ ID NO: 29493 - protein, 11 aa, Homo sapiens
  misc_feature: Table A; Target 29493; HLA-B*15:01; HAVCR1; ENSG00000113249; TAA
IVWTNGTHVTY

SEQ ID NO: 29494 - protein, 11 aa, Homo sapiens
  misc_feature: Table A; Target 29494; HLA-B*35:01; HAVCR1; ENSG00000113249; TAA
IVWTNGTHVTY

SEQ ID NO: 29495 - protein, 11 aa, Homo sapiens
  misc_feature: Table A; Target 29495; HLA-B*57:01; HAVCR1; ENSG00000113249; TAA
IVWTNGTHVTY

SEQ ID NO: 29496 - protein, 11 aa, Homo sapiens
  misc_feature: Table A; Target 29496; HLA-B*58:01; HAVCR1; ENSG00000113249; TAA
IVWTNGTHVTY

SEQ ID NO: 29497 - protein, 11 aa, Homo sapiens
  misc_feature: Table A; Target 29497; HLA-C*07:04; HAVCR1; ENSG00000113249; TAA
IVWTNGTHVTY

SEQ ID NO: 29498 - protein, 11 aa, Homo sapiens
  misc_feature: Table A; Target 29498; HLA-C*12:03; HAVCR1; ENSG00000113249; TAA
IVWTNGTHVTY

SEQ ID NO: 29499 - protein, 9 aa, Homo sapiens
  misc_feature: Table A; Target 29499; HLA-A*23:01; HAVCR1; ENSG00000113249; TAA
IYAGVCISV

SEQ ID NO: 29500 - protein, 9 aa, Homo sapiens
  misc_feature: Table A; Target 29500; HLA-A*24:02; HAVCR1; ENSG00000113249; TAA
IYAGVCISV

SEQ ID NO: 29501 - protein, 9 aa, Homo sapiens
  misc_feature: Table A; Target 29501; HLA-B*13:02; HAVCR1; ENSG00000113249; TAA
IYAGVCISV

SEQ ID NO: 29502 - protein, 9 aa, Homo sapiens
  misc_feature: Table A; Target 29502; HLA-C*04:01; HAVCR1; ENSG00000113249; TAA
IYAGVCISV

SEQ ID NO: 29503 - protein, 9 aa, Homo sapiens
  misc_feature: Table A; Target 29503; HLA-C*06:02; HAVCR1; ENSG00000113249; TAA
IYAGVCISV

SEQ ID NO: 29504 - protein, 9 aa, Homo sapiens
  misc_feature: Table A; Target 29504; HLA-C*14:02; HAVCR1; ENSG00000113249; TAA
IYAGVCISV

SEQ ID NO: 29505 - protein, 9 aa, Homo sapiens
  misc_feature: Table A; Target 29505; HLA-C*16:02; HAVCR1; ENSG00000113249; TAA
IYAGVCISV

SEQ ID NO: 29506 - protein, 10 aa, Homo sapiens
  misc_feature: Table A; Target 29506; HLA-A*23:01; HAVCR1; ENSG00000113249; TAA
IYAGVCISVL

SEQ ID NO: 29507 - protein, 10 aa, Homo sapiens
  misc_feature: Table A; Target 29507; HLA-A*24:02; HAVCR1; ENSG00000113249; TAA
IYAGVCISVL

SEQ ID NO: 29508 - protein, 8 aa, Homo sapiens
  misc_feature: Table A; Target 29508; HLA-A*23:01; HAVCR1; ENSG00000113249; TAA
IYIENSLY

SEQ ID NO: 29509 - protein, 8 aa, Homo sapiens
  misc_feature: Table A; Target 29509; HLA-A*24:02; HAVCR1; ENSG00000113249; TAA
IYIENSLY

SEQ ID NO: 29510 - protein, 8 aa, Homo sapiens
  misc_feature: Table A; Target 29510; HLA-A*29:02; HAVCR1; ENSG00000113249; TAA
IYIENSLY

SEQ ID NO: 29511 - protein, 8 aa, Homo sapiens
  misc_feature: Table A; Target 29511; HLA-A*30:02; HAVCR1; ENSG00000113249; TAA
IYIENSLY

SEQ ID NO: 29512 - protein, 8 aa, Homo sapiens
  misc_feature: Table A; Target 29512; HLA-B*15:01; HAVCR1; ENSG00000113249; TAA
IYIENSLY

SEQ ID NO: 29513 - protein, 8 aa, Homo sapiens
  misc_feature: Table A; Target 29513; HLA-B*15:03; HAVCR1; ENSG00000113249; TAA
IYIENSLY

SEQ ID NO: 29514 - protein, 8 aa, Homo sapiens
  misc_feature: Table A; Target 29514; HLA-B*39:01; HAVCR1; ENSG00000113249; TAA
IYIENSLY

SEQ ID NO: 29515 - protein, 8 aa, Homo sapiens
  misc_feature: Table A; Target 29515; HLA-C*04:01; HAVCR1; ENSG00000113249; TAA
IYIENSLY

SEQ ID NO: 29516 - protein, 8 aa, Homo sapiens
  misc_feature: Table A; Target 29516; HLA-C*07:01; HAVCR1; ENSG00000113249; TAA
IYIENSLY

SEQ ID NO: 29517 - protein, 8 aa, Homo sapiens
  misc_feature: Table A; Target 29517; HLA-C*14:02; HAVCR1; ENSG00000113249; TAA
IYIENSLY

SEQ ID NO: 29518 - protein, 8 aa, Homo sapiens
  misc_feature: Table A; Target 29518; HLA-C*16:02; HAVCR1; ENSG00000113249; TAA
IYIENSLY

SEQ ID NO: 29519 - protein, 9 aa, Homo sapiens
  misc_feature: Table A; Target 29519; HLA-A*23:01; HAVCR1; ENSG00000113249; TAA
IYIENSLYA

SEQ ID NO: 29520 - protein, 9 aa, Homo sapiens
  misc_feature: Table A; Target 29520; HLA-A*24:02; HAVCR1; ENSG00000113249; TAA
IYIENSLYA

SEQ ID NO: 29521 - protein, 9 aa, Homo sapiens
  misc_feature: Table A; Target 29521; HLA-A*29:02; HAVCR1; ENSG00000113249; TAA
IYIENSLYA

SEQ ID NO: 29522 - protein, 9 aa, Homo sapiens
  misc_feature: Table A; Target 29522; HLA-C*14:02; HAVCR1; ENSG00000113249; TAA
IYIENSLYA

SEQ ID NO: 29523 - protein, 9 aa, Homo sapiens
  misc_feature: Table A; Target 29523; HLA-A*03:01; HAVCR1; ENSG00000113249; TAA
KALQNAVEK

SEQ ID NO: 29524 - protein, 9 aa, Homo sapiens
  misc_feature: Table A; Target 29524; HLA-A*03:02; HAVCR1; ENSG00000113249; TAA
KALQNAVEK

SEQ ID NO: 29525 - protein, 9 aa, Homo sapiens
  misc_feature: Table A; Target 29525; HLA-A*11:01; HAVCR1; ENSG00000113249; TAA
KALQNAVEK

SEQ ID NO: 29526 - protein, 9 aa, Homo sapiens
  misc_feature: Table A; Target 29526; HLA-C*07:06; HAVCR1; ENSG00000113249; TAA
KALQNAVEK

SEQ ID NO: 29527 - protein, 9 aa, Homo sapiens
  misc_feature: Table A; Target 29527; HLA-B*40:01; HAVCR1; ENSG00000113249; TAA
KEVQAEDNI

SEQ ID NO: 29528 - protein, 9 aa, Homo sapiens
  misc_feature: Table A; Target 29528; HLA-B*44:03; HAVCR1; ENSG00000113249; TAA
KEVQAEDNI

SEQ ID NO: 29529 - protein, 9 aa, Homo sapiens
  misc_feature: Table A; Target 29529; HLA-B*49:01; HAVCR1; ENSG00000113249; TAA
KEVQAEDNI

SEQ ID NO: 29530 - protein, 10 aa, Homo sapiens
  misc_feature: Table A; Target 29530; HLA-B*40:01; HAVCR1; ENSG00000113249; TAA
KEVQAEDNIY

SEQ ID NO: 29531 - protein, 10 aa, Homo sapiens
  misc_feature: Table A; Target 29531; HLA-B*44:03; HAVCR1; ENSG00000113249; TAA
KEVQAEDNIY

SEQ ID NO: 29532 - protein, 11 aa, Homo sapiens
  misc_feature: Table A; Target 29532; HLA-B*40:01; HAVCR1; ENSG00000113249; TAA
KEVQAEDNIYI

SEQ ID NO: 29533 - protein, 11 aa, Homo sapiens
  misc_feature: Table A; Target 29533; HLA-B*49:01; HAVCR1; ENSG00000113249; TAA
KEVQAEDNIYI

SEQ ID NO: 29534 - protein, 8 aa, Homo sapiens
  misc_feature: Table A; Target 29534; HLA-A*30:01; HAVCR1; ENSG00000113249; TAA
KEVQQLSV

SEQ ID NO: 29535 - protein, 8 aa, Homo sapiens
  misc_feature: Table A; Target 29535; HLA-B*49:01; HAVCR1; ENSG00000113249; TAA
KEVQQLSV

SEQ ID NO: 29536 - protein, 10 aa, Homo sapiens
  misc_feature: Table A; Target 29536; HLA-A*23:01; HAVCR1; ENSG00000113249; TAA
KEVQQLSVSF

SEQ ID NO: 29537 - protein, 10 aa, Homo sapiens
  misc_feature: Table A; Target 29537; HLA-A*30:01; HAVCR1; ENSG00000113249; TAA
KEVQQLSVSF

SEQ ID NO: 29538 - protein, 10 aa, Homo sapiens
  misc_feature: Table A; Target 29538; HLA-B*15:03; HAVCR1; ENSG00000113249; TAA
KEVQQLSVSF

SEQ ID NO: 29539 - protein, 10 aa, Homo sapiens
  misc_feature: Table A; Target 29539; HLA-B*18:01; HAVCR1; ENSG00000113249; TAA
KEVQQLSVSF

SEQ ID NO: 29540 - protein, 10 aa, Homo sapiens
  misc_feature: Table A; Target 29540; HLA-B*27:02; HAVCR1; ENSG00000113249; TAA
KEVQQLSVSF

SEQ ID NO: 29541 - protein, 10 aa, Homo sapiens
  misc_feature: Table A; Target 29541; HLA-B*37:01; HAVCR1; ENSG00000113249; TAA
KEVQQLSVSF

SEQ ID NO: 29542 - protein, 10 aa, Homo sapiens
  misc_feature: Table A; Target 29542; HLA-B*40:01; HAVCR1; ENSG00000113249; TAA
KEVQQLSVSF

SEQ ID NO: 29543 - protein, 10 aa, Homo sapiens
  misc_feature: Table A; Target 29543; HLA-B*40:02; HAVCR1; ENSG00000113249; TAA
KEVQQLSVSF

SEQ ID NO: 29544 - protein, 10 aa, Homo sapiens
  misc_feature: Table A; Target 29544; HLA-B*44:02; HAVCR1; ENSG00000113249; TAA
KEVQQLSVSF

SEQ ID NO: 29545 - protein, 10 aa, Homo sapiens
  misc_feature: Table A; Target 29545; HLA-B*44:03; HAVCR1; ENSG00000113249; TAA
KEVQQLSVSF

SEQ ID NO: 29546 - protein, 10 aa, Homo sapiens
  misc_feature: Table A; Target 29546; HLA-B*49:01; HAVCR1; ENSG00000113249; TAA
KEVQQLSVSF

SEQ ID NO: 29547 - protein, 10 aa, Homo sapiens
  misc_feature: Table A; Target 29547; HLA-B*57:01; HAVCR1; ENSG00000113249; TAA
KEVQQLSVSF

SEQ ID NO: 29548 - protein, 10 aa, Homo sapiens
  misc_feature: Table A; Target 29548; HLA-C*16:04; HAVCR1; ENSG00000113249; TAA
KEVQQLSVSF

SEQ ID NO: 29549 - protein, 8 aa, Homo sapiens
  misc_feature: Table A; Target 29549; HLA-B*13:02; HAVCR1; ENSG00000113249; TAA
KITVSLEI

SEQ ID NO: 29550 - protein, 9 aa, Homo sapiens
  misc_feature: Table A; Target 29550; HLA-A*31:01; HAVCR1; ENSG00000113249; TAA
KLLGDLSRR

SEQ ID NO: 29551 - protein, 11 aa, Homo sapiens
  misc_feature: Table A; Target 29551; HLA-A*24:02; HAVCR1; ENSG00000113249; TAA
KYFFKKEVQQL

SEQ ID NO: 29552 - protein, 9 aa, Homo sapiens
  misc_feature: Table A; Target 29552; HLA-A*01:01; HAVCR1; ENSG00000113249; TAA
LADSVAGSV

SEQ ID NO: 29553 - protein, 9 aa, Homo sapiens
  misc_feature: Table A; Target 29553; HLA-B*35:03; HAVCR1; ENSG00000113249; TAA
LADSVAGSV

SEQ ID NO: 29554 - protein, 9 aa, Homo sapiens
  misc_feature: Table A; Target 29554; HLA-B*51:01; HAVCR1; ENSG00000113249; TAA
LADSVAGSV

SEQ ID NO: 29555 - protein, 9 aa, Homo sapiens
  misc_feature: Table A; Target 29555; HLA-C*03:03; HAVCR1; ENSG00000113249; TAA
LADSVAGSV

SEQ ID NO: 29556 - protein, 9 aa, Homo sapiens
  misc_feature: Table A; Target 29556; HLA-C*03:04; HAVCR1; ENSG00000113249; TAA
LADSVAGSV

SEQ ID NO: 29557 - protein, 9 aa, Homo sapiens
  misc_feature: Table A; Target 29557; HLA-C*05:01; HAVCR1; ENSG00000113249; TAA
LADSVAGSV

SEQ ID NO: 29558 - protein, 10 aa, Homo sapiens
  misc_feature: Table A; Target 29558; HLA-A*01:01; HAVCR1; ENSG00000113249; TAA
LADSVAGSVK

SEQ ID NO: 29559 - protein, 10 aa, Homo sapiens
  misc_feature: Table A; Target 29559; HLA-A*03:02; HAVCR1; ENSG00000113249; TAA
LADSVAGSVK

SEQ ID NO: 29560 - protein, 10 aa, Homo sapiens
  misc_feature: Table A; Target 29560; HLA-A*68:01; HAVCR1; ENSG00000113249; TAA
LADSVAGSVK

SEQ ID NO: 29561 - protein, 10 aa, Homo sapiens
  misc_feature: Table A; Target 29561; HLA-B*27:02; HAVCR1; ENSG00000113249; TAA
LADSVAGSVK

SEQ ID NO: 29562 - protein, 10 aa, Homo sapiens
  misc_feature: Table A; Target 29562; HLA-B*27:05; HAVCR1; ENSG00000113249; TAA
LADSVAGSVK

SEQ ID NO: 29563 - protein, 10 aa, Homo sapiens
  misc_feature: Table A; Target 29563; HLA-C*05:01; HAVCR1; ENSG00000113249; TAA
LADSVAGSVK

SEQ ID NO: 29564 - protein, 10 aa, Homo sapiens
  misc_feature: Table A; Target 29564; HLA-C*07:06; HAVCR1; ENSG00000113249; TAA
LADSVAGSVK

SEQ ID NO: 29565 - protein, 11 aa, Homo sapiens
  misc_feature: Table A; Target 29565; HLA-B*38:01; HAVCR1; ENSG00000113249; TAA
LADSVAGSVKV

SEQ ID NO: 29566 - protein, 11 aa, Homo sapiens
  misc_feature: Table A; Target 29566; HLA-C*05:01; HAVCR1; ENSG00000113249; TAA
LADSVAGSVKV

SEQ ID NO: 29567 - protein, 8 aa, Homo sapiens
  misc_feature: Table A; Target 29567; HLA-B*51:01; HAVCR1; ENSG00000113249; TAA
LALLGVII

SEQ ID NO: 29568 - protein, 9 aa, Homo sapiens
  misc_feature: Table A; Target 29568; HLA-B*54:01; HAVCR1; ENSG00000113249; TAA
LALLGVIIA

SEQ ID NO: 29569 - protein, 10 aa, Homo sapiens
  misc_feature: Table A; Target 29569; HLA-B*27:02; HAVCR1; ENSG00000113249; TAA
LALLGVIIAK

SEQ ID NO: 29570 - protein, 8 aa, Homo sapiens
  misc_feature: Table A; Target 29570; HLA-B*18:01; HAVCR1; ENSG00000113249; TAA
LEHSLLTA

SEQ ID NO: 29571 - protein, 8 aa, Homo sapiens
  misc_feature: Table A; Target 29571; HLA-B*49:01; HAVCR1; ENSG00000113249; TAA
LEHSLLTA

SEQ ID NO: 29572 - protein, 9 aa, Homo sapiens
  misc_feature: Table A; Target 29572; HLA-B*18:01; HAVCR1; ENSG00000113249; TAA
LEHSLLTAN

SEQ ID NO: 29573 - protein, 8 aa, Homo sapiens
  misc_feature: Table A; Target 29573; HLA-A*30:01; HAVCR1; ENSG00000113249; TAA
LEIVPPKV

SEQ ID NO: 29574 - protein, 8 aa, Homo sapiens
  misc_feature: Table A; Target 29574; HLA-B*18:01; HAVCR1; ENSG00000113249; TAA
LEIVPPKV

SEQ ID NO: 29575 - protein, 8 aa, Homo sapiens
  misc_feature: Table A; Target 29575; HLA-B*40:02; HAVCR1; ENSG00000113249; TAA
LEIVPPKV

SEQ ID NO: 29576 - protein, 8 aa, Homo sapiens
  misc_feature: Table A; Target 29576; HLA-B*49:01; HAVCR1; ENSG00000113249; TAA
LEIVPPKV

SEQ ID NO: 29577 - protein, 9 aa, Homo sapiens
  misc_feature: Table A; Target 29577; HLA-B*49:01; HAVCR1; ENSG00000113249; TAA
LEIVPPKVT

SEQ ID NO: 29578 - protein, 8 aa, Homo sapiens
  misc_feature: Table A; Target 29578; HLA-B*08:01; HAVCR1; ENSG00000113249; TAA
LFLEHSLL

SEQ ID NO: 29579 - protein, 9 aa, Homo sapiens
  misc_feature: Table A; Target 29579; HLA-C*12:03; HAVCR1; ENSG00000113249; TAA
LGVIIAKKY

SEQ ID NO: 29580 - protein, 9 aa, Homo sapiens
  misc_feature: Table A; Target 29580; HLA-A*02:07; HAVCR1; ENSG00000113249; TAA
LILHLADSV

SEQ ID NO: 29581 - protein, 8 aa, Homo sapiens
  misc_feature: Table A; Target 29581; HLA-A*03:01; HAVCR1; ENSG00000113249; TAA
LLGVIIAK

SEQ ID NO: 29582 - protein, 8 aa, Homo sapiens
  misc_feature: Table A; Target 29582; HLA-A*03:02; HAVCR1; ENSG00000113249; TAA
LLGVIIAK

SEQ ID NO: 29583 - protein, 8 aa, Homo sapiens
  misc_feature: Table A; Target 29583; HLA-B*27:02; HAVCR1; ENSG00000113249; TAA
LLGVIIAK

SEQ ID NO: 29584 - protein, 9 aa, Homo sapiens
  misc_feature: Table A; Target 29584; HLA-A*03:01; HAVCR1; ENSG00000113249; TAA
LLGVIIAKK

SEQ ID NO: 29585 - protein, 9 aa, Homo sapiens
  misc_feature: Table A; Target 29585; HLA-A*03:02; HAVCR1; ENSG00000113249; TAA
LLGVIIAKK

SEQ ID NO: 29586 - protein, 11 aa, Homo sapiens
  misc_feature: Table A; Target 29586; HLA-A*30:02; HAVCR1; ENSG00000113249; TAA
LLTANTTKGIY

SEQ ID NO: 29587 - protein, 9 aa, Homo sapiens
  misc_feature: Table A; Target 29587; HLA-B*07:02; HAVCR1; ENSG00000113249; TAA
LPRQNHEPV

SEQ ID NO: 29588 - protein, 9 aa, Homo sapiens
  misc_feature: Table A; Target 29588; HLA-B*51:01; HAVCR1; ENSG00000113249; TAA
LPRQNHEPV

SEQ ID NO: 29589 - protein, 10 aa, Homo sapiens
  misc_feature: Table A; Target 29589; HLA-B*54:01; HAVCR1; ENSG00000113249; TAA
LPRQNHEPVA

SEQ ID NO: 29590 - protein, 10 aa, Homo sapiens
  misc_feature: Table A; Target 29590; HLA-B*55:01; HAVCR1; ENSG00000113249; TAA
LPRQNHEPVA

SEQ ID NO: 29591 - protein, 10 aa, Homo sapiens
  misc_feature: Table A; Target 29591; HLA-B*56:01; HAVCR1; ENSG00000113249; TAA
LPRQNHEPVA

SEQ ID NO: 29592 - protein, 9 aa, Homo sapiens
  misc_feature: Table A; Target 29592; HLA-B*13:02; HAVCR1; ENSG00000113249; TAA
LQNAVEKEV

SEQ ID NO: 29593 - protein, 9 aa, Homo sapiens
  misc_feature: Table A; Target 29593; HLA-C*06:02; HAVCR1; ENSG00000113249; TAA
LQNAVEKEV

SEQ ID NO: 29594 - protein, 8 aa, Homo sapiens
  misc_feature: Table A; Target 29594; HLA-C*03:03; HAVCR1; ENSG00000113249; TAA
LSVSFSSL

SEQ ID NO: 29595 - protein, 8 aa, Homo sapiens
  misc_feature: Table A; Target 29595; HLA-C*03:04; HAVCR1; ENSG00000113249; TAA
LSVSFSSL

SEQ ID NO: 29596 - protein, 10 aa, Homo sapiens
  misc_feature: Table A; Target 29596; HLA-A*01:01; HAVCR1; ENSG00000113249; TAA
LTANTTKGIY

SEQ ID NO: 29597 - protein, 10 aa, Homo sapiens
  misc_feature: Table A; Target 29597; HLA-A*26:01; HAVCR1; ENSG00000113249; TAA
LTANTTKGIY

SEQ ID NO: 29598 - protein, 10 aa, Homo sapiens
  misc_feature: Table A; Target 29598; HLA-A*30:02; HAVCR1; ENSG00000113249; TAA
LTANTTKGIY

SEQ ID NO: 29599 - protein, 10 aa, Homo sapiens
  misc_feature: Table A; Target 29599; HLA-A*32:01; HAVCR1; ENSG00000113249; TAA
LTANTTKGIY

SEQ ID NO: 29600 - protein, 10 aa, Homo sapiens
  misc_feature: Table A; Target 29600; HLA-B*58:01; HAVCR1; ENSG00000113249; TAA
LTANTTKGIY

SEQ ID NO: 29601 - protein, 10 aa, Homo sapiens
  misc_feature: Table A; Target 29601; HLA-C*12:03; HAVCR1; ENSG00000113249; TAA
LTANTTKGIY

SEQ ID NO: 29602 - protein, 10 aa, Homo sapiens
  misc_feature: Table A; Target 29602; HLA-C*16:01; HAVCR1; ENSG00000113249; TAA
LTANTTKGIY

SEQ ID NO: 29603 - protein, 10 aa, Homo sapiens
  misc_feature: Table A; Target 29603; HLA-C*16:02; HAVCR1; ENSG00000113249; TAA
LTANTTKGIY

SEQ ID NO: 29604 - protein, 9 aa, Homo sapiens
  misc_feature: Table A; Target 29604; HLA-A*23:01; HAVCR1; ENSG00000113249; TAA
LWNNNQTQL

SEQ ID NO: 29605 - protein, 9 aa, Homo sapiens
  misc_feature: Table A; Target 29605; HLA-A*24:02; HAVCR1; ENSG00000113249; TAA
LWNNNQTQL

SEQ ID NO: 29606 - protein, 9 aa, Homo sapiens
  misc_feature: Table A; Target 29606; HLA-C*14:02; HAVCR1; ENSG00000113249; TAA
LWNNNQTQL

SEQ ID NO: 29607 - protein, 10 aa, Homo sapiens
  misc_feature: Table A; Target 29607; HLA-A*23:01; HAVCR1; ENSG00000113249; TAA
LWNNNQTQLF

SEQ ID NO: 29608 - protein, 10 aa, Homo sapiens
  misc_feature: Table A; Target 29608; HLA-A*24:02; HAVCR1; ENSG00000113249; TAA
LWNNNQTQLF

SEQ ID NO: 29609 - protein, 10 aa, Homo sapiens
  misc_feature: Table A; Target 29609; HLA-B*54:01; HAVCR1; ENSG00000113249; TAA
MPLPRQNHEP

SEQ ID NO: 29610 - protein, 11 aa, Homo sapiens
  misc_feature: Table A; Target 29610; HLA-B*54:01; HAVCR1; ENSG00000113249; TAA
MPLPRQNHEPV

SEQ ID NO: 29611 - protein, 9 aa, Homo sapiens
  misc_feature: Table A; Target 29611; HLA-A*02:03; HAVCR1; ENSG00000113249; TAA
MSIPTTTTV

SEQ ID NO: 29612 - protein, 9 aa, Homo sapiens
  misc_feature: Table A; Target 29612; HLA-A*68:02; HAVCR1; ENSG00000113249; TAA
MSIPTTTTV

SEQ ID NO: 29613 - protein, 9 aa, Homo sapiens
  misc_feature: Table A; Target 29613; HLA-B*46:01; HAVCR1; ENSG00000113249; TAA
MSIPTTTTV

SEQ ID NO: 29614 - protein, 9 aa, Homo sapiens
  misc_feature: Table A; Target 29614; HLA-B*49:01; HAVCR1; ENSG00000113249; TAA
MSIPTTTTV

SEQ ID NO: 29615 - protein, 9 aa, Homo sapiens
  misc_feature: Table A; Target 29615; HLA-B*51:01; HAVCR1; ENSG00000113249; TAA
MSIPTTTTV

SEQ ID NO: 29616 - protein, 9 aa, Homo sapiens
  misc_feature: Table A; Target 29616; HLA-B*58:01; HAVCR1; ENSG00000113249; TAA
MSIPTTTTV

SEQ ID NO: 29617 - protein, 9 aa, Homo sapiens
  misc_feature: Table A; Target 29617; HLA-C*02:02; HAVCR1; ENSG00000113249; TAA
MSIPTTTTV

SEQ ID NO: 29618 - protein, 9 aa, Homo sapiens
  misc_feature: Table A; Target 29618; HLA-C*03:03; HAVCR1; ENSG00000113249; TAA
MSIPTTTTV

SEQ ID NO: 29619 - protein, 9 aa, Homo sapiens
  misc_feature: Table A; Target 29619; HLA-C*03:04; HAVCR1; ENSG00000113249; TAA
MSIPTTTTV

SEQ ID NO: 29620 - protein, 10 aa, Homo sapiens
  misc_feature: Table A; Target 29620; HLA-B*58:01; HAVCR1; ENSG00000113249; TAA
MSIPTTTTVL

SEQ ID NO: 29621 - protein, 10 aa, Homo sapiens
  misc_feature: Table A; Target 29621; HLA-C*03:04; HAVCR1; ENSG00000113249; TAA
MSIPTTTTVL

SEQ ID NO: 29622 - protein, 9 aa, Homo sapiens
  misc_feature: Table A; Target 29622; HLA-A*02:03; HAVCR1; ENSG00000113249; TAA
MTVSTTTSV

SEQ ID NO: 29623 - protein, 9 aa, Homo sapiens
  misc_feature: Table A; Target 29623; HLA-A*25:01; HAVCR1; ENSG00000113249; TAA
MTVSTTTSV

SEQ ID NO: 29624 - protein, 9 aa, Homo sapiens
  misc_feature: Table A; Target 29624; HLA-A*26:01; HAVCR1; ENSG00000113249; TAA
MTVSTTTSV

SEQ ID NO: 29625 - protein, 9 aa, Homo sapiens
  misc_feature: Table A; Target 29625; HLA-A*68:02; HAVCR1; ENSG00000113249; TAA
MTVSTTTSV

SEQ ID NO: 29626 - protein, 9 aa, Homo sapiens
  misc_feature: Table A; Target 29626; HLA-B*13:02; HAVCR1; ENSG00000113249; TAA
MTVSTTTSV

SEQ ID NO: 29627 - protein, 9 aa, Homo sapiens
  misc_feature: Table A; Target 29627; HLA-B*46:01; HAVCR1; ENSG00000113249; TAA
MTVSTTTSV

SEQ ID NO: 29628 - protein, 9 aa, Homo sapiens
  misc_feature: Table A; Target 29628; HLA-C*02:02; HAVCR1; ENSG00000113249; TAA
MTVSTTTSV

SEQ ID NO: 29629 - protein, 9 aa, Homo sapiens
  misc_feature: Table A; Target 29629; HLA-C*03:03; HAVCR1; ENSG00000113249; TAA
MTVSTTTSV

SEQ ID NO: 29630 - protein, 9 aa, Homo sapiens
  misc_feature: Table A; Target 29630; HLA-C*03:04; HAVCR1; ENSG00000113249; TAA
MTVSTTTSV

SEQ ID NO: 29631 - protein, 9 aa, Homo sapiens
  misc_feature: Table A; Target 29631; HLA-B*35:03; HAVCR1; ENSG00000113249; TAA
NAVEKEVQA

SEQ ID NO: 29632 - protein, 9 aa, Homo sapiens
  misc_feature: Table A; Target 29632; HLA-B*54:01; HAVCR1; ENSG00000113249; TAA
NAVEKEVQA

SEQ ID NO: 29633 - protein, 9 aa, Homo sapiens
  misc_feature: Table A; Target 29633; HLA-C*16:01; HAVCR1; ENSG00000113249; TAA
NAVEKEVQA

SEQ ID NO: 29634 - protein, 9 aa, Homo sapiens
  misc_feature: Table A; Target 29634; HLA-A*23:01; HAVCR1; ENSG00000113249; TAA
NDMKITVSL

SEQ ID NO: 29635 - protein, 9 aa, Homo sapiens
  misc_feature: Table A; Target 29635; HLA-A*30:01; HAVCR1; ENSG00000113249; TAA
NDMKITVSL

SEQ ID NO: 29636 - protein, 9 aa, Homo sapiens
  misc_feature: Table A; Target 29636; HLA-B*08:01; HAVCR1; ENSG00000113249; TAA
NDMKITVSL

SEQ ID NO: 29637 - protein, 9 aa, Homo sapiens
  misc_feature: Table A; Target 29637; HLA-B*18:01; HAVCR1; ENSG00000113249; TAA
NDMKITVSL

SEQ ID NO: 29638 - protein, 9 aa, Homo sapiens
  misc_feature: Table A; Target 29638; HLA-B*37:01; HAVCR1; ENSG00000113249; TAA
NDMKITVSL

SEQ ID NO: 29639 - protein, 9 aa, Homo sapiens
  misc_feature: Table A; Target 29639; HLA-B*40:01; HAVCR1; ENSG00000113249; TAA
NDMKITVSL

SEQ ID NO: 29640 - protein, 9 aa, Homo sapiens
  misc_feature: Table A; Target 29640; HLA-B*44:02; HAVCR1; ENSG00000113249; TAA
NDMKITVSL

SEQ ID NO: 29641 - protein, 9 aa, Homo sapiens
  misc_feature: Table A; Target 29641; HLA-B*44:03; HAVCR1; ENSG00000113249; TAA
NDMKITVSL

SEQ ID NO: 29642 - protein, 8 aa, Homo sapiens
  misc_feature: Table A; Target 29642; HLA-A*33:01; HAVCR1; ENSG00000113249; TAA
NGTHVTYR

SEQ ID NO: 29643 - protein, 8 aa, Homo sapiens
  misc_feature: Table A; Target 29643; HLA-C*01:02; HAVCR1; ENSG00000113249; TAA
NIYIENSL

SEQ ID NO: 29644 - protein, 8 aa, Homo sapiens
  misc_feature: Table A; Target 29644; HLA-C*14:02; HAVCR1; ENSG00000113249; TAA
NIYIENSL

SEQ ID NO: 29645 - protein, 9 aa, Homo sapiens
  misc_feature: Table A; Target 29645; HLA-A*01:01; HAVCR1; ENSG00000113249; TAA
NIYIENSLY

SEQ ID NO: 29646 - protein, 9 aa, Homo sapiens
  misc_feature: Table A; Target 29646; HLA-A*26:01; HAVCR1; ENSG00000113249; TAA
NIYIENSLY

SEQ ID NO: 29647 - protein, 9 aa, Homo sapiens
  misc_feature: Table A; Target 29647; HLA-A*29:02; HAVCR1; ENSG00000113249; TAA
NIYIENSLY

SEQ ID NO: 29648 - protein, 9 aa, Homo sapiens
  misc_feature: Table A; Target 29648; HLA-A*30:02; HAVCR1; ENSG00000113249; TAA
NIYIENSLY

SEQ ID NO: 29649 - protein, 9 aa, Homo sapiens
  misc_feature: Table A; Target 29649; HLA-B*15:01; HAVCR1; ENSG00000113249; TAA
NIYIENSLY

SEQ ID NO: 29650 - protein, 9 aa, Homo sapiens
  misc_feature: Table A; Target 29650; HLA-B*15:03; HAVCR1; ENSG00000113249; TAA
NIYIENSLY

SEQ ID NO: 29651 - protein, 9 aa, Homo sapiens
  misc_feature: Table A; Target 29651; HLA-B*35:01; HAVCR1; ENSG00000113249; TAA
NIYIENSLY

SEQ ID NO: 29652 - protein, 9 aa, Homo sapiens
  misc_feature: Table A; Target 29652; HLA-B*46:01; HAVCR1; ENSG00000113249; TAA
NIYIENSLY

SEQ ID NO: 29653 - protein, 9 aa, Homo sapiens
  misc_feature: Table A; Target 29653; HLA-C*04:01; HAVCR1; ENSG00000113249; TAA
NIYIENSLY

SEQ ID NO: 29654 - protein, 9 aa, Homo sapiens
  misc_feature: Table A; Target 29654; HLA-C*07:01; HAVCR1; ENSG00000113249; TAA
NIYIENSLY

SEQ ID NO: 29655 - protein, 9 aa, Homo sapiens
  misc_feature: Table A; Target 29655; HLA-C*07:04; HAVCR1; ENSG00000113249; TAA
NIYIENSLY

SEQ ID NO: 29656 - protein, 9 aa, Homo sapiens
  misc_feature: Table A; Target 29656; HLA-C*14:02; HAVCR1; ENSG00000113249; TAA
NIYIENSLY

SEQ ID NO: 29657 - protein, 10 aa, Homo sapiens
  misc_feature: Table A; Target 29657; HLA-A*01:01; HAVCR1; ENSG00000113249; TAA
NTAVSDSGVY

SEQ ID NO: 29658 - protein, 10 aa, Homo sapiens
  misc_feature: Table A; Target 29658; HLA-A*25:01; HAVCR1; ENSG00000113249; TAA
NTAVSDSGVY

SEQ ID NO: 29659 - protein, 10 aa, Homo sapiens
  misc_feature: Table A; Target 29659; HLA-A*26:01; HAVCR1; ENSG00000113249; TAA
NTAVSDSGVY

SEQ ID NO: 29660 - protein, 10 aa, Homo sapiens
  misc_feature: Table A; Target 29660; HLA-A*68:01; HAVCR1; ENSG00000113249; TAA
NTTKGIYAGV

SEQ ID NO: 29661 - protein, 10 aa, Homo sapiens
  misc_feature: Table A; Target 29661; HLA-A*68:02; HAVCR1; ENSG00000113249; TAA
NTTKGIYAGV

SEQ ID NO: 29662 - protein, 9 aa, Homo sapiens
  misc_feature: Table A; Target 29662; HLA-C*05:01; HAVCR1; ENSG00000113249; TAA
PAETHPTTL

SEQ ID NO: 29663 - protein, 9 aa, Homo sapiens
  misc_feature: Table A; Target 29663; HLA-C*16:02; HAVCR1; ENSG00000113249; TAA
PAETHPTTL

SEQ ID NO: 29664 - protein, 11 aa, Homo sapiens
  misc_feature: Table A; Target 29664; HLA-C*07:02; HAVCR1; ENSG00000113249; TAA
PQPAETHPTTL

SEQ ID NO: 29665 - protein, 9 aa, Homo sapiens
  misc_feature: Table A; Target 29665; HLA-A*01:01; HAVCR1; ENSG00000113249; TAA
PTSSPLYSY

SEQ ID NO: 29666 - protein, 9 aa, Homo sapiens
  misc_feature: Table A; Target 29666; HLA-A*03:01; HAVCR1; ENSG00000113249; TAA
PTSSPLYSY

SEQ ID NO: 29667 - protein, 9 aa, Homo sapiens
  misc_feature: Table A; Target 29667; HLA-A*03:02; HAVCR1; ENSG00000113249; TAA
PTSSPLYSY

SEQ ID NO: 29668 - protein, 9 aa, Homo sapiens
  misc_feature: Table A; Target 29668; HLA-A*11:01; HAVCR1; ENSG00000113249; TAA
PTSSPLYSY

SEQ ID NO: 29669 - protein, 9 aa, Homo sapiens
  misc_feature: Table A; Target 29669; HLA-A*29:02; HAVCR1; ENSG00000113249; TAA
PTSSPLYSY

SEQ ID NO: 29670 - protein, 9 aa, Homo sapiens
  misc_feature: Table A; Target 29670; HLA-A*30:02; HAVCR1; ENSG00000113249; TAA
PTSSPLYSY

SEQ ID NO: 29671 - protein, 10 aa, Homo sapiens
  misc_feature: Table A; Target 29671; HLA-C*07:02; HAVCR1; ENSG00000113249; TAA
PTTTTVLTTM

SEQ ID NO: 29672 - protein, 9 aa, Homo sapiens
  misc_feature: Table A; Target 29672; HLA-A*25:01; HAVCR1; ENSG00000113249; TAA
PVTTTVSTF

SEQ ID NO: 29673 - protein, 9 aa, Homo sapiens
  misc_feature: Table A; Target 29673; HLA-A*26:01; HAVCR1; ENSG00000113249; TAA
PVTTTVSTF

SEQ ID NO: 29674 - protein, 9 aa, Homo sapiens
  misc_feature: Table A; Target 29674; HLA-A*02:03; HAVCR1; ENSG00000113249; TAA
QIKALQNAV

SEQ ID NO: 29675 - protein, 9 aa, Homo sapiens
  misc_feature: Table A; Target 29675; HLA-A*32:01; HAVCR1; ENSG00000113249; TAA
QIKALQNAV

SEQ ID NO: 29676 - protein, 9 aa, Homo sapiens
  misc_feature: Table A; Target 29676; HLA-B*08:01; HAVCR1; ENSG00000113249; TAA
QIKALQNAV

SEQ ID NO: 29677 - protein, 9 aa, Homo sapiens
  misc_feature: Table A; Target 29677; HLA-B*13:02; HAVCR1; ENSG00000113249; TAA
QIKALQNAV

SEQ ID NO: 29678 - protein, 11 aa, Homo sapiens
  misc_feature: Table A; Target 29678; HLA-A*03:02; HAVCR1; ENSG00000113249; TAA
QIKALQNAVEK

SEQ ID NO: 29679 - protein, 9 aa, Homo sapiens
  misc_feature: Table A; Target 29679; HLA-A*02:04; HAVCR1; ENSG00000113249; TAA
QLFLEHSLL

SEQ ID NO: 29680 - protein, 11 aa, Homo sapiens
  misc_feature: Table A; Target 29680; HLA-A*02:03; HAVCR1; ENSG00000113249; TAA
QLFLEHSLLTA

SEQ ID NO: 29681 - protein, 9 aa, Homo sapiens
  misc_feature: Table A; Target 29681; HLA-A*25:01; HAVCR1; ENSG00000113249; TAA
QLSVSFSSL

SEQ ID NO: 29682 - protein, 9 aa, Homo sapiens
  misc_feature: Table A; Target 29682; HLA-B*07:02; HAVCR1; ENSG00000113249; TAA
QLSVSFSSL

SEQ ID NO: 29683 - protein, 9 aa, Homo sapiens
  misc_feature: Table A; Target 29683; HLA-B*39:01; HAVCR1; ENSG00000113249; TAA
QLSVSFSSL

SEQ ID NO: 29684 - protein, 9 aa, Homo sapiens
  misc_feature: Table A; Target 29684; HLA-C*01:02; HAVCR1; ENSG00000113249; TAA
QLSVSFSSL

SEQ ID NO: 29685 - protein, 9 aa, Homo sapiens
  misc_feature: Table A; Target 29685; HLA-C*14:02; HAVCR1; ENSG00000113249; TAA
QLSVSFSSL

SEQ ID NO: 29686 - protein, 9 aa, Homo sapiens
  misc_feature: Table A; Target 29686; HLA-B*35:03; HAVCR1; ENSG00000113249; TAA
QPAETHPTT

SEQ ID NO: 29687 - protein, 9 aa, Homo sapiens
  misc_feature: Table A; Target 29687; HLA-B*56:01; HAVCR1; ENSG00000113249; TAA
QPAETHPTT

SEQ ID NO: 29688 - protein, 10 aa, Homo sapiens
  misc_feature: Table A; Target 29688; HLA-B*07:02; HAVCR1; ENSG00000113249; TAA
QPAETHPTTL

SEQ ID NO: 29689 - protein, 10 aa, Homo sapiens
  misc_feature: Table A; Target 29689; HLA-B*35:01; HAVCR1; ENSG00000113249; TAA
QPAETHPTTL

SEQ ID NO: 29690 - protein, 10 aa, Homo sapiens
  misc_feature: Table A; Target 29690; HLA-B*35:03; HAVCR1; ENSG00000113249; TAA
QPAETHPTTL

SEQ ID NO: 29691 - protein, 10 aa, Homo sapiens
  misc_feature: Table A; Target 29691; HLA-B*40:01; HAVCR1; ENSG00000113249; TAA
QPAETHPTTL

SEQ ID NO: 29692 - protein, 10 aa, Homo sapiens
  misc_feature: Table A; Target 29692; HLA-B*56:01; HAVCR1; ENSG00000113249; TAA
QPAETHPTTL

SEQ ID NO: 29693 - protein, 10 aa, Homo sapiens
  misc_feature: Table A; Target 29693; HLA-C*07:02; HAVCR1; ENSG00000113249; TAA
QPAETHPTTL

SEQ ID NO: 29694 - protein, 8 aa, Homo sapiens
  misc_feature: Table A; Target 29694; HLA-B*37:01; HAVCR1; ENSG00000113249; TAA
REPTSSPL

SEQ ID NO: 29695 - protein, 9 aa, Homo sapiens
  misc_feature: Table A; Target 29695; HLA-A*24:02; HAVCR1; ENSG00000113249; TAA
REPTSSPLY

SEQ ID NO: 29696 - protein, 9 aa, Homo sapiens
  misc_feature: Table A; Target 29696; HLA-A*30:02; HAVCR1; ENSG00000113249; TAA
REPTSSPLY

SEQ ID NO: 29697 - protein, 9 aa, Homo sapiens
  misc_feature: Table A; Target 29697; HLA-B*15:03; HAVCR1; ENSG00000113249; TAA
REPTSSPLY

SEQ ID NO: 29698 - protein, 9 aa, Homo sapiens
  misc_feature: Table A; Target 29698; HLA-B*37:01; HAVCR1; ENSG00000113249; TAA
REPTSSPLY

SEQ ID NO: 29699 - protein, 9 aa, Homo sapiens
  misc_feature: Table A; Target 29699; HLA-B*44:02; HAVCR1; ENSG00000113249; TAA
REPTSSPLY

SEQ ID NO: 29700 - protein, 9 aa, Homo sapiens
  misc_feature: Table A; Target 29700; HLA-B*44:03; HAVCR1; ENSG00000113249; TAA
REPTSSPLY

SEQ ID NO: 29701 - protein, 9 aa, Homo sapiens
  misc_feature: Table A; Target 29701; HLA-C*16:04; HAVCR1; ENSG00000113249; TAA
REPTSSPLY

SEQ ID NO: 29702 - protein, 11 aa, Homo sapiens
  misc_feature: Table A; Target 29702; HLA-A*24:02; HAVCR1; ENSG00000113249; TAA
REPTSSPLYSY

SEQ ID NO: 29703 - protein, 11 aa, Homo sapiens
  misc_feature: Table A; Target 29703; HLA-A*29:02; HAVCR1; ENSG00000113249; TAA
REPTSSPLYSY

SEQ ID NO: 29704 - protein, 11 aa, Homo sapiens
  misc_feature: Table A; Target 29704; HLA-A*30:02; HAVCR1; ENSG00000113249; TAA
REPTSSPLYSY

SEQ ID NO: 29705 - protein, 11 aa, Homo sapiens
  misc_feature: Table A; Target 29705; HLA-B*44:02; HAVCR1; ENSG00000113249; TAA
REPTSSPLYSY

SEQ ID NO: 29706 - protein, 11 aa, Homo sapiens
  misc_feature: Table A; Target 29706; HLA-B*44:03; HAVCR1; ENSG00000113249; TAA
REPTSSPLYSY

SEQ ID NO: 29707 - protein, 11 aa, Homo sapiens
  misc_feature: Table A; Target 29707; HLA-C*16:04; HAVCR1; ENSG00000113249; TAA
REPTSSPLYSY

SEQ ID NO: 29708 - protein, 10 aa, Homo sapiens
  misc_feature: Table A; Target 29708; HLA-B*27:02; HAVCR1; ENSG00000113249; TAA
RREPTSSPLY

SEQ ID NO: 29709 - protein, 10 aa, Homo sapiens
  misc_feature: Table A; Target 29709; HLA-C*16:04; HAVCR1; ENSG00000113249; TAA
RREPTSSPLY

SEQ ID NO: 29710 - protein, 9 aa, Homo sapiens
  misc_feature: Table A; Target 29710; HLA-A*32:01; HAVCR1; ENSG00000113249; TAA
RTSTTVPTT

SEQ ID NO: 29711 - protein, 10 aa, Homo sapiens
  misc_feature: Table A; Target 29711; HLA-A*31:01; HAVCR1; ENSG00000113249; TAA
RYKLLGDLSR

SEQ ID NO: 29712 - protein, 11 aa, Homo sapiens
  misc_feature: Table A; Target 29712; HLA-A*31:01; HAVCR1; ENSG00000113249; TAA
RYKLLGDLSRR

SEQ ID NO: 29713 - protein, 9 aa, Homo sapiens
  misc_feature: Table A; Target 29713; HLA-B*58:01; HAVCR1; ENSG00000113249; TAA
SGAVTSMCW

SEQ ID NO: 29714 - protein, 8 aa, Homo sapiens
  misc_feature: Table A; Target 29714; HLA-C*01:02; HAVCR1; ENSG00000113249; TAA
SIPTTTSV

SEQ ID NO: 29715 - protein, 8 aa, Homo sapiens
  misc_feature: Table A; Target 29715; HLA-C*01:02; HAVCR1; ENSG00000113249; TAA
SIPTTTTV

SEQ ID NO: 29716 - protein, 8 aa, Homo sapiens
  misc_feature: Table A; Target 29716; HLA-C*05:01; HAVCR1; ENSG00000113249; TAA
SIPTTTTV

SEQ ID NO: 29717 - protein, 9 aa, Homo sapiens
  misc_feature: Table A; Target 29717; HLA-A*02:07; HAVCR1; ENSG00000113249; TAA
SIPTTTTVL

SEQ ID NO: 29718 - protein, 9 aa, Homo sapiens
  misc_feature: Table A; Target 29718; HLA-B*15:01; HAVCR1; ENSG00000113249; TAA
SIPTTTTVL

SEQ ID NO: 29719 - protein, 9 aa, Homo sapiens
  misc_feature: Table A; Target 29719; HLA-B*46:01; HAVCR1; ENSG00000113249; TAA
SIPTTTTVL

SEQ ID NO: 29720 - protein, 9 aa, Homo sapiens
  misc_feature: Table A; Target 29720; HLA-C*01:02; HAVCR1; ENSG00000113249; TAA
SIPTTTTVL

SEQ ID NO: 29721 - protein, 9 aa, Homo sapiens
  misc_feature: Table A; Target 29721; HLA-C*07:04; HAVCR1; ENSG00000113249; TAA
SIPTTTTVL

SEQ ID NO: 29722 - protein, 9 aa, Homo sapiens
  misc_feature: Table A; Target 29722; HLA-C*14:02; HAVCR1; ENSG00000113249; TAA
SIPTTTTVL

SEQ ID NO: 29723 - protein, 8 aa, Homo sapiens
  misc_feature: Table A; Target 29723; HLA-A*03:02; HAVCR1; ENSG00000113249; TAA
SLEIVPPK

SEQ ID NO: 29724 - protein, 9 aa, Homo sapiens
  misc_feature: Table A; Target 29724; HLA-A*02:01; HAVCR1; ENSG00000113249; TAA
SLEIVPPKV

SEQ ID NO: 29725 - protein, 9 aa, Homo sapiens
  misc_feature: Table A; Target 29725; HLA-A*02:03; HAVCR1; ENSG00000113249; TAA
SLEIVPPKV

SEQ ID NO: 29726 - protein, 9 aa, Homo sapiens
  misc_feature: Table A; Target 29726; HLA-A*02:04; HAVCR1; ENSG00000113249; TAA
SLEIVPPKV

SEQ ID NO: 29727 - protein, 9 aa, Homo sapiens
  misc_feature: Table A; Target 29727; HLA-A*02:07; HAVCR1; ENSG00000113249; TAA
SLEIVPPKV

SEQ ID NO: 29728 - protein, 9 aa, Homo sapiens
  misc_feature: Table A; Target 29728; HLA-B*13:02; HAVCR1; ENSG00000113249; TAA
SLEIVPPKV

SEQ ID NO: 29729 - protein, 9 aa, Homo sapiens
  misc_feature: Table A; Target 29729; HLA-B*55:01; HAVCR1; ENSG00000113249; TAA
SLEIVPPKV

SEQ ID NO: 29730 - protein, 9 aa, Homo sapiens
  misc_feature: Table A; Target 29730; HLA-B*13:02; HAVCR1; ENSG00000113249; TAA
SLFTCQNGI

SEQ ID NO: 29731 - protein, 9 aa, Homo sapiens
  misc_feature: Table A; Target 29731; HLA-A*03:01; HAVCR1; ENSG00000113249; TAA
SLLTANTTK

SEQ ID NO: 29732 - protein, 9 aa, Homo sapiens
  misc_feature: Table A; Target 29732; HLA-A*03:02; HAVCR1; ENSG00000113249; TAA
SLLTANTTK

SEQ ID NO: 29733 - protein, 9 aa, Homo sapiens
  misc_feature: Table A; Target 29733; HLA-A*11:01; HAVCR1; ENSG00000113249; TAA
SLLTANTTK

SEQ ID NO: 29734 - protein, 9 aa, Homo sapiens
  misc_feature: Table A; Target 29734; HLA-A*32:01; HAVCR1; ENSG00000113249; TAA
SLLTANTTK

SEQ ID NO: 29735 - protein, 9 aa, Homo sapiens
  misc_feature: Table A; Target 29735; HLA-A*02:01; HAVCR1; ENSG00000113249; TAA
SLTIENTAV

SEQ ID NO: 29736 - protein, 9 aa, Homo sapiens
  misc_feature: Table A; Target 29736; HLA-A*02:03; HAVCR1; ENSG00000113249; TAA
SLTIENTAV

SEQ ID NO: 29737 - protein, 9 aa, Homo sapiens
  misc_feature: Table A; Target 29737; HLA-B*13:02; HAVCR1; ENSG00000113249; TAA
SLTIENTAV

SEQ ID NO: 29738 - protein, 9 aa, Homo sapiens
  misc_feature: Table A; Target 29738; HLA-B*55:01; HAVCR1; ENSG00000113249; TAA
SLTIENTAV

SEQ ID NO: 29739 - protein, 8 aa, Homo sapiens
  misc_feature: Table A; Target 29739; HLA-C*16:01; HAVCR1; ENSG00000113249; TAA
SSLQIKAL

SEQ ID NO: 29740 - protein, 9 aa, Homo sapiens
  misc_feature: Table A; Target 29740; HLA-A*02:03; HAVCR1; ENSG00000113249; TAA
STFVPPMPL

SEQ ID NO: 29741 - protein, 9 aa, Homo sapiens
  misc_feature: Table A; Target 29741; HLA-A*31:01; HAVCR1; ENSG00000113249; TAA
STFVPPMPL

SEQ ID NO: 29742 - protein, 9 aa, Homo sapiens
  misc_feature: Table A; Target 29742; HLA-A*68:02; HAVCR1; ENSG00000113249; TAA
STFVPPMPL

SEQ ID NO: 29743 - protein, 9 aa, Homo sapiens
  misc_feature: Table A; Target 29743; HLA-C*03:03; HAVCR1; ENSG00000113249; TAA
STFVPPMPL

SEQ ID NO: 29744 - protein, 9 aa, Homo sapiens
  misc_feature: Table A; Target 29744; HLA-C*03:04; HAVCR1; ENSG00000113249; TAA
STFVPPMPL

SEQ ID NO: 29745 - protein, 11 aa, Homo sapiens
  misc_feature: Table A; Target 29745; HLA-A*11:01; HAVCR1; ENSG00000113249; TAA
STFVPPMPLPR

SEQ ID NO: 29746 - protein, 11 aa, Homo sapiens
  misc_feature: Table A; Target 29746; HLA-A*31:01; HAVCR1; ENSG00000113249; TAA
STFVPPMPLPR

SEQ ID NO: 29747 - protein, 11 aa, Homo sapiens
  misc_feature: Table A; Target 29747; HLA-A*33:01; HAVCR1; ENSG00000113249; TAA
STFVPPMPLPR

SEQ ID NO: 29748 - protein, 11 aa, Homo sapiens
  misc_feature: Table A; Target 29748; HLA-A*33:03; HAVCR1; ENSG00000113249; TAA
STFVPPMPLPR

SEQ ID NO: 29749 - protein, 11 aa, Homo sapiens
  misc_feature: Table A; Target 29749; HLA-A*68:01; HAVCR1; ENSG00000113249; TAA
STFVPPMPLPR

SEQ ID NO: 29750 - protein, 11 aa, Homo sapiens
  misc_feature: Table A; Target 29750; HLA-C*07:06; HAVCR1; ENSG00000113249; TAA
STFVPPMPLPR

SEQ ID NO: 29751 - protein, 8 aa, Homo sapiens
  misc_feature: Table A; Target 29751; HLA-C*06:02; HAVCR1; ENSG00000113249; TAA
SVAGSVKV

SEQ ID NO: 29752 - protein, 9 aa, Homo sapiens
  misc_feature: Table A; Target 29752; HLA-C*07:04; HAVCR1; ENSG00000113249; TAA
SVAGSVKVG

SEQ ID NO: 29753 - protein, 9 aa, Homo sapiens
  misc_feature: Table A; Target 29753; HLA-C*12:03; HAVCR1; ENSG00000113249; TAA
SVAGSVKVG

SEQ ID NO: 29754 - protein, 9 aa, Homo sapiens
  misc_feature: Table A; Target 29754; HLA-C*16:02; HAVCR1; ENSG00000113249; TAA
SVAGSVKVG

SEQ ID NO: 29755 - protein, 10 aa, Homo sapiens
  misc_feature: Table A; Target 29755; HLA-A*32:01; HAVCR1; ENSG00000113249; TAA
SVAGSVKVGG

SEQ ID NO: 29756 - protein, 9 aa, Homo sapiens
  misc_feature: Table A; Target 29756; HLA-A*02:04; HAVCR1; ENSG00000113249; TAA
SVLVLLALL

SEQ ID NO: 29757 - protein, 8 aa, Homo sapiens
  misc_feature: Table A; Target 29757; HLA-B*51:01; HAVCR1; ENSG00000113249; TAA
SVPTTTSI

SEQ ID NO: 29758 - protein, 8 aa, Homo sapiens
  misc_feature: Table A; Target 29758; HLA-C*01:02; HAVCR1; ENSG00000113249; TAA
SVPTTTSI

SEQ ID NO: 29759 - protein, 10 aa, Homo sapiens
  misc_feature: Table A; Target 29759; HLA-C*01:02; HAVCR1; ENSG00000113249; TAA
SVPTTTSIPT

SEQ ID NO: 29760 - protein, 8 aa, Homo sapiens
  misc_feature: Table A; Target 29760; HLA-B*51:01; HAVCR1; ENSG00000113249; TAA
SVPVTTTV

SEQ ID NO: 29761 - protein, 8 aa, Homo sapiens
  misc_feature: Table A; Target 29761; HLA-C*01:02; HAVCR1; ENSG00000113249; TAA
SVPVTTTV

SEQ ID NO: 29762 - protein, 8 aa, Homo sapiens
  misc_feature: Table A; Target 29762; HLA-C*05:01; HAVCR1; ENSG00000113249; TAA
SVPVTTTV

SEQ ID NO: 29763 - protein, 11 aa, Homo sapiens
  misc_feature: Table A; Target 29763; HLA-A*25:01; HAVCR1; ENSG00000113249; TAA
SVPVTTTVSTF

SEQ ID NO: 29764 - protein, 11 aa, Homo sapiens
  misc_feature: Table A; Target 29764; HLA-A*26:01; HAVCR1; ENSG00000113249; TAA
SVPVTTTVSTF

SEQ ID NO: 29765 - protein, 11 aa, Homo sapiens
  misc_feature: Table A; Target 29765; HLA-C*01:02; HAVCR1; ENSG00000113249; TAA
SVPVTTTVSTF

SEQ ID NO: 29766 - protein, 9 aa, Homo sapiens
  misc_feature: Table A; Target 29766; HLA-B*13:02; HAVCR1; ENSG00000113249; TAA
SVSFSSLQI

SEQ ID NO: 29767 - protein, 10 aa, Homo sapiens
  misc_feature: Table A; Target 29767; HLA-A*03:01; HAVCR1; ENSG00000113249; TAA
SVSFSSLQIK

SEQ ID NO: 29768 - protein, 10 aa, Homo sapiens
  misc_feature: Table A; Target 29768; HLA-A*03:02; HAVCR1; ENSG00000113249; TAA
SVSFSSLQIK

SEQ ID NO: 29769 - protein, 10 aa, Homo sapiens
  misc_feature: Table A; Target 29769; HLA-A*11:01; HAVCR1; ENSG00000113249; TAA
SVSFSSLQIK

SEQ ID NO: 29770 - protein, 8 aa, Homo sapiens
  misc_feature: Table A; Target 29770; HLA-B*51:01; HAVCR1; ENSG00000113249; TAA
TANTTKGI

SEQ ID NO: 29771 - protein, 9 aa, Homo sapiens
  misc_feature: Table A; Target 29771; HLA-A*25:01; HAVCR1; ENSG00000113249; TAA
TANTTKGIY

SEQ ID NO: 29772 - protein, 9 aa, Homo sapiens
  misc_feature: Table A; Target 29772; HLA-A*26:01; HAVCR1; ENSG00000113249; TAA
TANTTKGIY

SEQ ID NO: 29773 - protein, 9 aa, Homo sapiens
  misc_feature: Table A; Target 29773; HLA-A*29:02; HAVCR1; ENSG00000113249; TAA
TANTTKGIY

SEQ ID NO: 29774 - protein, 9 aa, Homo sapiens
  misc_feature: Table A; Target 29774; HLA-A*30:02; HAVCR1; ENSG00000113249; TAA
TANTTKGIY

SEQ ID NO: 29775 - protein, 9 aa, Homo sapiens
  misc_feature: Table A; Target 29775; HLA-A*32:01; HAVCR1; ENSG00000113249; TAA
TANTTKGIY

SEQ ID NO: 29776 - protein, 9 aa, Homo sapiens
  misc_feature: Table A; Target 29776; HLA-B*15:01; HAVCR1; ENSG00000113249; TAA
TANTTKGIY

SEQ ID NO: 29777 - protein, 9 aa, Homo sapiens
  misc_feature: Table A; Target 29777; HLA-B*15:03; HAVCR1; ENSG00000113249; TAA
TANTTKGIY

SEQ ID NO: 29778 - protein, 9 aa, Homo sapiens
  misc_feature: Table A; Target 29778; HLA-B*35:01; HAVCR1; ENSG00000113249; TAA
TANTTKGIY

SEQ ID NO: 29779 - protein, 9 aa, Homo sapiens
  misc_feature: Table A; Target 29779; HLA-B*46:01; HAVCR1; ENSG00000113249; TAA
TANTTKGIY

SEQ ID NO: 29780 - protein, 9 aa, Homo sapiens
  misc_feature: Table A; Target 29780; HLA-B*55:01; HAVCR1; ENSG00000113249; TAA
TANTTKGIY

SEQ ID NO: 29781 - protein, 9 aa, Homo sapiens
  misc_feature: Table A; Target 29781; HLA-B*58:01; HAVCR1; ENSG00000113249; TAA
TANTTKGIY

SEQ ID NO: 29782 - protein, 9 aa, Homo sapiens
  misc_feature: Table A; Target 29782; HLA-C*01:02; HAVCR1; ENSG00000113249; TAA
TANTTKGIY

SEQ ID NO: 29783 - protein, 9 aa, Homo sapiens
  misc_feature: Table A; Target 29783; HLA-C*02:02; HAVCR1; ENSG00000113249; TAA
TANTTKGIY

SEQ ID NO: 29784 - protein, 9 aa, Homo sapiens
  misc_feature: Table A; Target 29784; HLA-C*04:01; HAVCR1; ENSG00000113249; TAA
TANTTKGIY

SEQ ID NO: 29785 - protein, 9 aa, Homo sapiens
  misc_feature: Table A; Target 29785; HLA-C*07:04; HAVCR1; ENSG00000113249; TAA
TANTTKGIY

SEQ ID NO: 29786 - protein, 9 aa, Homo sapiens
  misc_feature: Table A; Target 29786; HLA-C*12:03; HAVCR1; ENSG00000113249; TAA
TANTTKGIY

SEQ ID NO: 29787 - protein, 9 aa, Homo sapiens
  misc_feature: Table A; Target 29787; HLA-C*14:02; HAVCR1; ENSG00000113249; TAA
TANTTKGIY

SEQ ID NO: 29788 - protein, 9 aa, Homo sapiens
  misc_feature: Table A; Target 29788; HLA-C*16:01; HAVCR1; ENSG00000113249; TAA
TANTTKGIY

SEQ ID NO: 29789 - protein, 9 aa, Homo sapiens
  misc_feature: Table A; Target 29789; HLA-C*16:02; HAVCR1; ENSG00000113249; TAA
TANTTKGIY

SEQ ID NO: 29790 - protein, 9 aa, Homo sapiens
  misc_feature: Table A; Target 29790; HLA-C*16:04; HAVCR1; ENSG00000113249; TAA
TANTTKGIY

SEQ ID NO: 29791 - protein, 10 aa, Homo sapiens
  misc_feature: Table A; Target 29791; HLA-B*54:01; HAVCR1; ENSG00000113249; TAA
TANTTKGIYA

SEQ ID NO: 29792 - protein, 9 aa, Homo sapiens
  misc_feature: Table A; Target 29792; HLA-A*25:01; HAVCR1; ENSG00000113249; TAA
TAVSDSGVY

SEQ ID NO: 29793 - protein, 9 aa, Homo sapiens
  misc_feature: Table A; Target 29793; HLA-A*26:01; HAVCR1; ENSG00000113249; TAA
TAVSDSGVY

SEQ ID NO: 29794 - protein, 9 aa, Homo sapiens
  misc_feature: Table A; Target 29794; HLA-A*30:02; HAVCR1; ENSG00000113249; TAA
TAVSDSGVY

SEQ ID NO: 29795 - protein, 9 aa, Homo sapiens
  misc_feature: Table A; Target 29795; HLA-B*15:01; HAVCR1; ENSG00000113249; TAA
TAVSDSGVY

SEQ ID NO: 29796 - protein, 9 aa, Homo sapiens
  misc_feature: Table A; Target 29796; HLA-B*15:03; HAVCR1; ENSG00000113249; TAA
TAVSDSGVY

SEQ ID NO: 29797 - protein, 9 aa, Homo sapiens
  misc_feature: Table A; Target 29797; HLA-B*27:05; HAVCR1; ENSG00000113249; TAA
TAVSDSGVY

SEQ ID NO: 29798 - protein, 9 aa, Homo sapiens
  misc_feature: Table A; Target 29798; HLA-B*35:01; HAVCR1; ENSG00000113249; TAA
TAVSDSGVY

SEQ ID NO: 29799 - protein, 9 aa, Homo sapiens
  misc_feature: Table A; Target 29799; HLA-B*35:03; HAVCR1; ENSG00000113249; TAA
TAVSDSGVY

SEQ ID NO: 29800 - protein, 9 aa, Homo sapiens
  misc_feature: Table A; Target 29800; HLA-B*39:01; HAVCR1; ENSG00000113249; TAA
TAVSDSGVY

SEQ ID NO: 29801 - protein, 9 aa, Homo sapiens
  misc_feature: Table A; Target 29801; HLA-B*46:01; HAVCR1; ENSG00000113249; TAA
TAVSDSGVY

SEQ ID NO: 29802 - protein, 9 aa, Homo sapiens
  misc_feature: Table A; Target 29802; HLA-B*55:01; HAVCR1; ENSG00000113249; TAA
TAVSDSGVY

SEQ ID NO: 29803 - protein, 9 aa, Homo sapiens
  misc_feature: Table A; Target 29803; HLA-B*58:01; HAVCR1; ENSG00000113249; TAA
TAVSDSGVY

SEQ ID NO: 29804 - protein, 9 aa, Homo sapiens
  misc_feature: Table A; Target 29804; HLA-C*02:02; HAVCR1; ENSG00000113249; TAA
TAVSDSGVY

SEQ ID NO: 29805 - protein, 9 aa, Homo sapiens
  misc_feature: Table A; Target 29805; HLA-C*03:03; HAVCR1; ENSG00000113249; TAA
TAVSDSGVY

SEQ ID NO: 29806 - protein, 9 aa, Homo sapiens
  misc_feature: Table A; Target 29806; HLA-C*03:04; HAVCR1; ENSG00000113249; TAA
TAVSDSGVY

SEQ ID NO: 29807 - protein, 9 aa, Homo sapiens
  misc_feature: Table A; Target 29807; HLA-C*07:01; HAVCR1; ENSG00000113249; TAA
TAVSDSGVY

SEQ ID NO: 29808 - protein, 9 aa, Homo sapiens
  misc_feature: Table A; Target 29808; HLA-C*07:04; HAVCR1; ENSG00000113249; TAA
TAVSDSGVY

SEQ ID NO: 29809 - protein, 9 aa, Homo sapiens
  misc_feature: Table A; Target 29809; HLA-C*07:06; HAVCR1; ENSG00000113249; TAA
TAVSDSGVY

SEQ ID NO: 29810 - protein, 9 aa, Homo sapiens
  misc_feature: Table A; Target 29810; HLA-C*12:03; HAVCR1; ENSG00000113249; TAA
TAVSDSGVY

SEQ ID NO: 29811 - protein, 9 aa, Homo sapiens
  misc_feature: Table A; Target 29811; HLA-C*16:01; HAVCR1; ENSG00000113249; TAA
TAVSDSGVY

SEQ ID NO: 29812 - protein, 9 aa, Homo sapiens
  misc_feature: Table A; Target 29812; HLA-C*16:02; HAVCR1; ENSG00000113249; TAA
TAVSDSGVY

SEQ ID NO: 29813 - protein, 9 aa, Homo sapiens
  misc_feature: Table A; Target 29813; HLA-C*16:04; HAVCR1; ENSG00000113249; TAA
TAVSDSGVY

SEQ ID NO: 29814 - protein, 10 aa, Homo sapiens
  misc_feature: Table A; Target 29814; HLA-C*03:03; HAVCR1; ENSG00000113249; TAA
TAVSDSGVYC

SEQ ID NO: 29815 - protein, 9 aa, Homo sapiens
  misc_feature: Table A; Target 29815; HLA-A*23:01; HAVCR1; ENSG00000113249; TAA
TFVPPMPLP

SEQ ID NO: 29816 - protein, 10 aa, Homo sapiens
  misc_feature: Table A; Target 29816; HLA-A*31:01; HAVCR1; ENSG00000113249; TAA
TFVPPMPLPR

SEQ ID NO: 29817 - protein, 8 aa, Homo sapiens
  misc_feature: Table A; Target 29817; HLA-A*32:01; HAVCR1; ENSG00000113249; TAA
TNGTHVTY

SEQ ID NO: 29818 - protein, 8 aa, Homo sapiens
  misc_feature: Table A; Target 29818; HLA-B*18:01; HAVCR1; ENSG00000113249; TAA
TNGTHVTY

SEQ ID NO: 29819 - protein, 8 aa, Homo sapiens
  misc_feature: Table A; Target 29819; HLA-B*35:01; HAVCR1; ENSG00000113249; TAA
TNGTHVTY

SEQ ID NO: 29820 - protein, 8 aa, Homo sapiens
  misc_feature: Table A; Target 29820; HLA-C*03:03; HAVCR1; ENSG00000113249; TAA
TNGTHVTY

SEQ ID NO: 29821 - protein, 8 aa, Homo sapiens
  misc_feature: Table A; Target 29821; HLA-C*04:01; HAVCR1; ENSG00000113249; TAA
TNGTHVTY

SEQ ID NO: 29822 - protein, 8 aa, Homo sapiens
  misc_feature: Table A; Target 29822; HLA-C*07:01; HAVCR1; ENSG00000113249; TAA
TNGTHVTY

SEQ ID NO: 29823 - protein, 8 aa, Homo sapiens
  misc_feature: Table A; Target 29823; HLA-C*07:04; HAVCR1; ENSG00000113249; TAA
TNGTHVTY

SEQ ID NO: 29824 - protein, 8 aa, Homo sapiens
  misc_feature: Table A; Target 29824; HLA-C*12:03; HAVCR1; ENSG00000113249; TAA
TNGTHVTY

SEQ ID NO: 29825 - protein, 8 aa, Homo sapiens
  misc_feature: Table A; Target 29825; HLA-C*16:01; HAVCR1; ENSG00000113249; TAA
TNGTHVTY

SEQ ID NO: 29826 - protein, 8 aa, Homo sapiens
  misc_feature: Table A; Target 29826; HLA-C*16:02; HAVCR1; ENSG00000113249; TAA
TNGTHVTY

SEQ ID NO: 29827 - protein, 9 aa, Homo sapiens
  misc_feature: Table A; Target 29827; HLA-A*31:01; HAVCR1; ENSG00000113249; TAA
TNGTHVTYR

SEQ ID NO: 29828 - protein, 9 aa, Homo sapiens
  misc_feature: Table A; Target 29828; HLA-A*33:01; HAVCR1; ENSG00000113249; TAA
TNGTHVTYR

SEQ ID NO: 29829 - protein, 9 aa, Homo sapiens
  misc_feature: Table A; Target 29829; HLA-A*33:03; HAVCR1; ENSG00000113249; TAA
TNGTHVTYR

SEQ ID NO: 29830 - protein, 9 aa, Homo sapiens
  misc_feature: Table A; Target 29830; HLA-A*68:01; HAVCR1; ENSG00000113249; TAA
TNGTHVTYR

SEQ ID NO: 29831 - protein, 9 aa, Homo sapiens
  misc_feature: Table A; Target 29831; HLA-C*07:06; HAVCR1; ENSG00000113249; TAA
TNGTHVTYR

SEQ ID NO: 29832 - protein, 9 aa, Homo sapiens
  misc_feature: Table A; Target 29832; HLA-B*35:03; HAVCR1; ENSG00000113249; TAA
TPIVTTVPT

SEQ ID NO: 29833 - protein, 9 aa, Homo sapiens
  misc_feature: Table A; Target 29833; HLA-B*56:01; HAVCR1; ENSG00000113249; TAA
TPIVTTVPT

SEQ ID NO: 29834 - protein, 10 aa, Homo sapiens
  misc_feature: Table A; Target 29834; HLA-B*51:01; HAVCR1; ENSG00000113249; TAA
TPIVTTVPTV

SEQ ID NO: 29835 - protein, 10 aa, Homo sapiens
  misc_feature: Table A; Target 29835; HLA-B*54:01; HAVCR1; ENSG00000113249; TAA
TPIVTTVPTV

SEQ ID NO: 29836 - protein, 10 aa, Homo sapiens
  misc_feature: Table A; Target 29836; HLA-B*56:01; HAVCR1; ENSG00000113249; TAA
TPIVTTVPTV

SEQ ID NO: 29837 - protein, 9 aa, Homo sapiens
  misc_feature: Table A; Target 29837; HLA-A*02:04; HAVCR1; ENSG00000113249; TAA
TQLFLEHSL

SEQ ID NO: 29838 - protein, 9 aa, Homo sapiens
  misc_feature: Table A; Target 29838; HLA-B*13:02; HAVCR1; ENSG00000113249; TAA
TQLFLEHSL

SEQ ID NO: 29839 - protein, 9 aa, Homo sapiens
  misc_feature: Table A; Target 29839; HLA-B*38:01; HAVCR1; ENSG00000113249; TAA
TQLFLEHSL

SEQ ID NO: 29840 - protein, 9 aa, Homo sapiens
  misc_feature: Table A; Target 29840; HLA-B*39:01; HAVCR1; ENSG00000113249; TAA
TQLFLEHSL

SEQ ID NO: 29841 - protein, 9 aa, Homo sapiens
  misc_feature: Table A; Target 29841; HLA-A*02:03; HAVCR1; ENSG00000113249; TAA
TSIPTTTSV

SEQ ID NO: 29842 - protein, 9 aa, Homo sapiens
  misc_feature: Table A; Target 29842; HLA-A*25:01; HAVCR1; ENSG00000113249; TAA
TSIPTTTSV

SEQ ID NO: 29843 - protein, 9 aa, Homo sapiens
  misc_feature: Table A; Target 29843; HLA-A*32:01; HAVCR1; ENSG00000113249; TAA
TSIPTTTSV

SEQ ID NO: 29844 - protein, 9 aa, Homo sapiens
  misc_feature: Table A; Target 29844; HLA-B*13:02; HAVCR1; ENSG00000113249; TAA
TSIPTTTSV

SEQ ID NO: 29845 - protein, 9 aa, Homo sapiens
  misc_feature: Table A; Target 29845; HLA-B*39:01; HAVCR1; ENSG00000113249; TAA
TSIPTTTSV

SEQ ID NO: 29846 - protein, 9 aa, Homo sapiens
  misc_feature: Table A; Target 29846; HLA-B*46:01; HAVCR1; ENSG00000113249; TAA
TSIPTTTSV

SEQ ID NO: 29847 - protein, 9 aa, Homo sapiens
  misc_feature: Table A; Target 29847; HLA-B*49:01; HAVCR1; ENSG00000113249; TAA
TSIPTTTSV

SEQ ID NO: 29848 - protein, 9 aa, Homo sapiens
  misc_feature: Table A; Target 29848; HLA-B*51:01; HAVCR1; ENSG00000113249; TAA
TSIPTTTSV

SEQ ID NO: 29849 - protein, 9 aa, Homo sapiens
  misc_feature: Table A; Target 29849; HLA-B*58:01; HAVCR1; ENSG00000113249; TAA
TSIPTTTSV

SEQ ID NO: 29850 - protein, 9 aa, Homo sapiens
  misc_feature: Table A; Target 29850; HLA-C*01:02; HAVCR1; ENSG00000113249; TAA
TSIPTTTSV

SEQ ID NO: 29851 - protein, 9 aa, Homo sapiens
  misc_feature: Table A; Target 29851; HLA-C*02:02; HAVCR1; ENSG00000113249; TAA
TSIPTTTSV

SEQ ID NO: 29852 - protein, 9 aa, Homo sapiens
  misc_feature: Table A; Target 29852; HLA-C*03:03; HAVCR1; ENSG00000113249; TAA
TSIPTTTSV

SEQ ID NO: 29853 - protein, 9 aa, Homo sapiens
  misc_feature: Table A; Target 29853; HLA-C*03:04; HAVCR1; ENSG00000113249; TAA
TSIPTTTSV

SEQ ID NO: 29854 - protein, 9 aa, Homo sapiens
  misc_feature: Table A; Target 29854; HLA-C*16:02; HAVCR1; ENSG00000113249; TAA
TSIPTTTSV

SEQ ID NO: 29855 - protein, 11 aa, Homo sapiens
  misc_feature: Table A; Target 29855; HLA-C*06:02; HAVCR1; ENSG00000113249; TAA
TSIPTTTSVPV

SEQ ID NO: 29856 - protein, 8 aa, Homo sapiens
  misc_feature: Table A; Target 29856; HLA-A*30:02; HAVCR1; ENSG00000113249; TAA
TSSPLYSY

SEQ ID NO: 29857 - protein, 8 aa, Homo sapiens
  misc_feature: Table A; Target 29857; HLA-B*58:01; HAVCR1; ENSG00000113249; TAA
TSSPLYSY

SEQ ID NO: 29858 - protein, 9 aa, Homo sapiens
  misc_feature: Table A; Target 29858; HLA-C*16:02; HAVCR1; ENSG00000113249; TAA
TSTTVPTTT

SEQ ID NO: 29859 - protein, 9 aa, Homo sapiens
  misc_feature: Table A; Target 29859; HLA-A*23:01; HAVCR1; ENSG00000113249; TAA
TSVPTTTSI

SEQ ID NO: 29860 - protein, 9 aa, Homo sapiens
  misc_feature: Table A; Target 29860; HLA-A*25:01; HAVCR1; ENSG00000113249; TAA
TSVPTTTSI

SEQ ID NO: 29861 - protein, 9 aa, Homo sapiens
  misc_feature: Table A; Target 29861; HLA-A*32:01; HAVCR1; ENSG00000113249; TAA
TSVPTTTSI

SEQ ID NO: 29862 - protein, 9 aa, Homo sapiens
  misc_feature: Table A; Target 29862; HLA-B*13:02; HAVCR1; ENSG00000113249; TAA
TSVPTTTSI

SEQ ID NO: 29863 - protein, 9 aa, Homo sapiens
  misc_feature: Table A; Target 29863; HLA-B*46:01; HAVCR1; ENSG00000113249; TAA
TSVPTTTSI

SEQ ID NO: 29864 - protein, 9 aa, Homo sapiens
  misc_feature: Table A; Target 29864; HLA-B*49:01; HAVCR1; ENSG00000113249; TAA
TSVPTTTSI

SEQ ID NO: 29865 - protein, 9 aa, Homo sapiens
  misc_feature: Table A; Target 29865; HLA-B*51:01; HAVCR1; ENSG00000113249; TAA
TSVPTTTSI

SEQ ID NO: 29866 - protein, 9 aa, Homo sapiens
  misc_feature: Table A; Target 29866; HLA-B*58:01; HAVCR1; ENSG00000113249; TAA
TSVPTTTSI

SEQ ID NO: 29867 - protein, 9 aa, Homo sapiens
  misc_feature: Table A; Target 29867; HLA-C*01:02; HAVCR1; ENSG00000113249; TAA
TSVPTTTSI

SEQ ID NO: 29868 - protein, 9 aa, Homo sapiens
  misc_feature: Table A; Target 29868; HLA-C*03:03; HAVCR1; ENSG00000113249; TAA
TSVPTTTSI

SEQ ID NO: 29869 - protein, 9 aa, Homo sapiens
  misc_feature: Table A; Target 29869; HLA-C*03:04; HAVCR1; ENSG00000113249; TAA
TSVPTTTSI

SEQ ID NO: 29870 - protein, 11 aa, Homo sapiens
  misc_feature: Table A; Target 29870; HLA-C*04:01; HAVCR1; ENSG00000113249; TAA
TSVPTTTSIPT

SEQ ID NO: 29871 - protein, 9 aa, Homo sapiens
  misc_feature: Table A; Target 29871; HLA-A*02:01; HAVCR1; ENSG00000113249; TAA
TSVPVTTTV

SEQ ID NO: 29872 - protein, 9 aa, Homo sapiens
  misc_feature: Table A; Target 29872; HLA-A*02:03; HAVCR1; ENSG00000113249; TAA
TSVPVTTTV

SEQ ID NO: 29873 - protein, 9 aa, Homo sapiens
  misc_feature: Table A; Target 29873; HLA-A*02:07; HAVCR1; ENSG00000113249; TAA
TSVPVTTTV

SEQ ID NO: 29874 - protein, 9 aa, Homo sapiens
  misc_feature: Table A; Target 29874; HLA-A*23:01; HAVCR1; ENSG00000113249; TAA
TSVPVTTTV

SEQ ID NO: 29875 - protein, 9 aa, Homo sapiens
  misc_feature: Table A; Target 29875; HLA-A*25:01; HAVCR1; ENSG00000113249; TAA
TSVPVTTTV

SEQ ID NO: 29876 - protein, 9 aa, Homo sapiens
  misc_feature: Table A; Target 29876; HLA-A*30:01; HAVCR1; ENSG00000113249; TAA
TSVPVTTTV

SEQ ID NO: 29877 - protein, 9 aa, Homo sapiens
  misc_feature: Table A; Target 29877; HLA-A*32:01; HAVCR1; ENSG00000113249; TAA
TSVPVTTTV

SEQ ID NO: 29878 - protein, 9 aa, Homo sapiens
  misc_feature: Table A; Target 29878; HLA-A*68:02; HAVCR1; ENSG00000113249; TAA
TSVPVTTTV

SEQ ID NO: 29879 - protein, 9 aa, Homo sapiens
  misc_feature: Table A; Target 29879; HLA-B*13:02; HAVCR1; ENSG00000113249; TAA
TSVPVTTTV

SEQ ID NO: 29880 - protein, 9 aa, Homo sapiens
  misc_feature: Table A; Target 29880; HLA-B*39:01; HAVCR1; ENSG00000113249; TAA
TSVPVTTTV

SEQ ID NO: 29881 - protein, 9 aa, Homo sapiens
  misc_feature: Table A; Target 29881; HLA-B*40:02; HAVCR1; ENSG00000113249; TAA
TSVPVTTTV

SEQ ID NO: 29882 - protein, 9 aa, Homo sapiens
  misc_feature: Table A; Target 29882; HLA-B*46:01; HAVCR1; ENSG00000113249; TAA
TSVPVTTTV

SEQ ID NO: 29883 - protein, 9 aa, Homo sapiens
  misc_feature: Table A; Target 29883; HLA-B*49:01; HAVCR1; ENSG00000113249; TAA
TSVPVTTTV

SEQ ID NO: 29884 - protein, 9 aa, Homo sapiens
  misc_feature: Table A; Target 29884; HLA-B*51:01; HAVCR1; ENSG00000113249; TAA
TSVPVTTTV

SEQ ID NO: 29885 - protein, 9 aa, Homo sapiens
  misc_feature: Table A; Target 29885; HLA-B*58:01; HAVCR1; ENSG00000113249; TAA
TSVPVTTTV

SEQ ID NO: 29886 - protein, 9 aa, Homo sapiens
  misc_feature: Table A; Target 29886; HLA-C*02:02; HAVCR1; ENSG00000113249; TAA
TSVPVTTTV

SEQ ID NO: 29887 - protein, 9 aa, Homo sapiens
  misc_feature: Table A; Target 29887; HLA-C*03:03; HAVCR1; ENSG00000113249; TAA
TSVPVTTTV

SEQ ID NO: 29888 - protein, 9 aa, Homo sapiens
  misc_feature: Table A; Target 29888; HLA-C*03:04; HAVCR1; ENSG00000113249; TAA
TSVPVTTTV

SEQ ID NO: 29889 - protein, 9 aa, Homo sapiens
  misc_feature: Table A; Target 29889; HLA-C*05:01; HAVCR1; ENSG00000113249; TAA
TSVPVTTTV

SEQ ID NO: 29890 - protein, 9 aa, Homo sapiens
  misc_feature: Table A; Target 29890; HLA-C*12:03; HAVCR1; ENSG00000113249; TAA
TSVPVTTTV

SEQ ID NO: 29891 - protein, 9 aa, Homo sapiens
  misc_feature: Table A; Target 29891; HLA-C*16:02; HAVCR1; ENSG00000113249; TAA
TSVPVTTTV

SEQ ID NO: 29892 - protein, 9 aa, Homo sapiens
  misc_feature: Table A; Target 29892; HLA-C*16:04; HAVCR1; ENSG00000113249; TAA
TSVPVTTTV

SEQ ID NO: 29893 - protein, 8 aa, Homo sapiens
  misc_feature: Table A; Target 29893; HLA-C*05:01; HAVCR1; ENSG00000113249; TAA
TTDGNDTV

SEQ ID NO: 29894 - protein, 11 aa, Homo sapiens
  misc_feature: Table A; Target 29894; HLA-B*39:01; HAVCR1; ENSG00000113249; TAA
TTDGNDTVTES

SEQ ID NO: 29895 - protein, 9 aa, Homo sapiens
  misc_feature: Table A; Target 29895; HLA-A*02:03; HAVCR1; ENSG00000113249; TAA
TTKGIYAGV

SEQ ID NO: 29896 - protein, 9 aa, Homo sapiens
  misc_feature: Table A; Target 29896; HLA-A*25:01; HAVCR1; ENSG00000113249; TAA
TTKGIYAGV

SEQ ID NO: 29897 - protein, 9 aa, Homo sapiens
  misc_feature: Table A; Target 29897; HLA-A*26:01; HAVCR1; ENSG00000113249; TAA
TTKGIYAGV

SEQ ID NO: 29898 - protein, 9 aa, Homo sapiens
  misc_feature: Table A; Target 29898; HLA-A*31:01; HAVCR1; ENSG00000113249; TAA
TTKGIYAGV

SEQ ID NO: 29899 - protein, 9 aa, Homo sapiens
  misc_feature: Table A; Target 29899; HLA-A*33:01; HAVCR1; ENSG00000113249; TAA
TTKGIYAGV

SEQ ID NO: 29900 - protein, 9 aa, Homo sapiens
  misc_feature: Table A; Target 29900; HLA-A*33:03; HAVCR1; ENSG00000113249; TAA
TTKGIYAGV

SEQ ID NO: 29901 - protein, 9 aa, Homo sapiens
  misc_feature: Table A; Target 29901; HLA-A*68:01; HAVCR1; ENSG00000113249; TAA
TTKGIYAGV

SEQ ID NO: 29902 - protein, 9 aa, Homo sapiens
  misc_feature: Table A; Target 29902; HLA-A*68:02; HAVCR1; ENSG00000113249; TAA
TTKGIYAGV

SEQ ID NO: 29903 - protein, 9 aa, Homo sapiens
  misc_feature: Table A; Target 29903; HLA-B*40:02; HAVCR1; ENSG00000113249; TAA
TTKGIYAGV

SEQ ID NO: 29904 - protein, 9 aa, Homo sapiens
  misc_feature: Table A; Target 29904; HLA-C*06:02; HAVCR1; ENSG00000113249; TAA
TTKGIYAGV

SEQ ID NO: 29905 - protein, 9 aa, Homo sapiens
  misc_feature: Table A; Target 29905; HLA-C*16:02; HAVCR1; ENSG00000113249; TAA
TTKGIYAGV

SEQ ID NO: 29906 - protein, 9 aa, Homo sapiens
  misc_feature: Table A; Target 29906; HLA-A*11:01; HAVCR1; ENSG00000113249; TAA
TTLQGAIRR

SEQ ID NO: 29907 - protein, 9 aa, Homo sapiens
  misc_feature: Table A; Target 29907; HLA-A*31:01; HAVCR1; ENSG00000113249; TAA
TTLQGAIRR

SEQ ID NO: 29908 - protein, 9 aa, Homo sapiens
  misc_feature: Table A; Target 29908; HLA-A*33:01; HAVCR1; ENSG00000113249; TAA
TTLQGAIRR

SEQ ID NO: 29909 - protein, 9 aa, Homo sapiens
  misc_feature: Table A; Target 29909; HLA-A*33:03; HAVCR1; ENSG00000113249; TAA
TTLQGAIRR

SEQ ID NO: 29910 - protein, 9 aa, Homo sapiens
  misc_feature: Table A; Target 29910; HLA-A*68:01; HAVCR1; ENSG00000113249; TAA
TTLQGAIRR

SEQ ID NO: 29911 - protein, 9 aa, Homo sapiens
  misc_feature: Table A; Target 29911; HLA-C*07:06; HAVCR1; ENSG00000113249; TAA
TTLQGAIRR

SEQ ID NO: 29912 - protein, 9 aa, Homo sapiens
  misc_feature: Table A; Target 29912; HLA-A*32:01; HAVCR1; ENSG00000113249; TAA
TTMSIPTTT

SEQ ID NO: 29913 - protein, 9 aa, Homo sapiens
  misc_feature: Table A; Target 29913; HLA-A*32:01; HAVCR1; ENSG00000113249; TAA
TTMTVSTTT

SEQ ID NO: 29914 - protein, 8 aa, Homo sapiens
  misc_feature: Table A; Target 29914; HLA-B*51:01; HAVCR1; ENSG00000113249; TAA
TTPIVTTV

SEQ ID NO: 29915 - protein, 10 aa, Homo sapiens
  misc_feature: Table A; Target 29915; HLA-A*68:02; HAVCR1; ENSG00000113249; TAA
TTSVPVTTTV

SEQ ID NO: 29916 - protein, 10 aa, Homo sapiens
  misc_feature: Table A; Target 29916; HLA-C*07:06; HAVCR1; ENSG00000113249; TAA
TTSVPVTTTV

SEQ ID NO: 29917 - protein, 9 aa, Homo sapiens
  misc_feature: Table A; Target 29917; HLA-A*02:01; HAVCR1; ENSG00000113249; TAA
TTTPIVTTV

SEQ ID NO: 29918 - protein, 9 aa, Homo sapiens
  misc_feature: Table A; Target 29918; HLA-A*02:03; HAVCR1; ENSG00000113249; TAA
TTTPIVTTV

SEQ ID NO: 29919 - protein, 9 aa, Homo sapiens
  misc_feature: Table A; Target 29919; HLA-A*02:04; HAVCR1; ENSG00000113249; TAA
TTTPIVTTV

SEQ ID NO: 29920 - protein, 9 aa, Homo sapiens
  misc_feature: Table A; Target 29920; HLA-A*26:01; HAVCR1; ENSG00000113249; TAA
TTTPIVTTV

SEQ ID NO: 29921 - protein, 9 aa, Homo sapiens
  misc_feature: Table A; Target 29921; HLA-A*32:01; HAVCR1; ENSG00000113249; TAA
TTTPIVTTV

SEQ ID NO: 29922 - protein, 9 aa, Homo sapiens
  misc_feature: Table A; Target 29922; HLA-A*68:02; HAVCR1; ENSG00000113249; TAA
TTTPIVTTV

SEQ ID NO: 29923 - protein, 9 aa, Homo sapiens
  misc_feature: Table A; Target 29923; HLA-B*13:02; HAVCR1; ENSG00000113249; TAA
TTTPIVTTV

SEQ ID NO: 29924 - protein, 9 aa, Homo sapiens
  misc_feature: Table A; Target 29924; HLA-C*02:02; HAVCR1; ENSG00000113249; TAA
TTTPIVTTV

SEQ ID NO: 29925 - protein, 9 aa, Homo sapiens
  misc_feature: Table A; Target 29925; HLA-C*12:03; HAVCR1; ENSG00000113249; TAA
TTTPIVTTV

SEQ ID NO: 29926 - protein, 9 aa, Homo sapiens
  misc_feature: Table A; Target 29926; HLA-C*16:02; HAVCR1; ENSG00000113249; TAA
TTTPIVTTV

SEQ ID NO: 29927 - protein, 9 aa, Homo sapiens
  misc_feature: Table A; Target 29927; HLA-A*32:01; HAVCR1; ENSG00000113249; TAA
TTTSIPTTT

SEQ ID NO: 29928 - protein, 9 aa, Homo sapiens
  misc_feature: Table A; Target 29928; HLA-C*16:02; HAVCR1; ENSG00000113249; TAA
TTTSIPTTT

SEQ ID NO: 29929 - protein, 9 aa, Homo sapiens
  misc_feature: Table A; Target 29929; HLA-A*32:01; HAVCR1; ENSG00000113249; TAA
TTTSVPTTT

SEQ ID NO: 29930 - protein, 9 aa, Homo sapiens
  misc_feature: Table A; Target 29930; HLA-C*16:02; HAVCR1; ENSG00000113249; TAA
TTTSVPTTT

SEQ ID NO: 29931 - protein, 9 aa, Homo sapiens
  misc_feature: Table A; Target 29931; HLA-A*32:01; HAVCR1; ENSG00000113249; TAA
TTTSVPVTT

SEQ ID NO: 29932 - protein, 9 aa, Homo sapiens
  misc_feature: Table A; Target 29932; HLA-C*16:02; HAVCR1; ENSG00000113249; TAA
TTTSVPVTT

SEQ ID NO: 29933 - protein, 11 aa, Homo sapiens
  misc_feature: Table A; Target 29933; HLA-A*68:02; HAVCR1; ENSG00000113249; TAA
TTTSVPVTTTV

SEQ ID NO: 29934 - protein, 9 aa, Homo sapiens
  misc_feature: Table A; Target 29934; HLA-A*23:01; HAVCR1; ENSG00000113249; TAA
TTTTVLTTM

SEQ ID NO: 29935 - protein, 9 aa, Homo sapiens
  misc_feature: Table A; Target 29935; HLA-A*25:01; HAVCR1; ENSG00000113249; TAA
TTTTVLTTM

SEQ ID NO: 29936 - protein, 9 aa, Homo sapiens
  misc_feature: Table A; Target 29936; HLA-A*26:01; HAVCR1; ENSG00000113249; TAA
TTTTVLTTM

SEQ ID NO: 29937 - protein, 9 aa, Homo sapiens
  misc_feature: Table A; Target 29937; HLA-A*32:01; HAVCR1; ENSG00000113249; TAA
TTTTVLTTM

SEQ ID NO: 29938 - protein, 9 aa, Homo sapiens
  misc_feature: Table A; Target 29938; HLA-A*33:03; HAVCR1; ENSG00000113249; TAA
TTTTVLTTM

SEQ ID NO: 29939 - protein, 9 aa, Homo sapiens
  misc_feature: Table A; Target 29939; HLA-A*68:01; HAVCR1; ENSG00000113249; TAA
TTTTVLTTM

SEQ ID NO: 29940 - protein, 9 aa, Homo sapiens
  misc_feature: Table A; Target 29940; HLA-A*68:02; HAVCR1; ENSG00000113249; TAA
TTTTVLTTM

SEQ ID NO: 29941 - protein, 9 aa, Homo sapiens
  misc_feature: Table A; Target 29941; HLA-B*35:01; HAVCR1; ENSG00000113249; TAA
TTTTVLTTM

SEQ ID NO: 29942 - protein, 9 aa, Homo sapiens
  misc_feature: Table A; Target 29942; HLA-B*35:03; HAVCR1; ENSG00000113249; TAA
TTTTVLTTM

SEQ ID NO: 29943 - protein, 9 aa, Homo sapiens
  misc_feature: Table A; Target 29943; HLA-B*39:01; HAVCR1; ENSG00000113249; TAA
TTTTVLTTM

SEQ ID NO: 29944 - protein, 9 aa, Homo sapiens
  misc_feature: Table A; Target 29944; HLA-B*46:01; HAVCR1; ENSG00000113249; TAA
TTTTVLTTM

SEQ ID NO: 29945 - protein, 9 aa, Homo sapiens
  misc_feature: Table A; Target 29945; HLA-B*57:01; HAVCR1; ENSG00000113249; TAA
TTTTVLTTM

SEQ ID NO: 29946 - protein, 9 aa, Homo sapiens
  misc_feature: Table A; Target 29946; HLA-B*58:01; HAVCR1; ENSG00000113249; TAA
TTTTVLTTM

SEQ ID NO: 29947 - protein, 9 aa, Homo sapiens
  misc_feature: Table A; Target 29947; HLA-C*01:02; HAVCR1; ENSG00000113249; TAA
TTTTVLTTM

SEQ ID NO: 29948 - protein, 9 aa, Homo sapiens
  misc_feature: Table A; Target 29948; HLA-C*02:02; HAVCR1; ENSG00000113249; TAA
TTTTVLTTM

SEQ ID NO: 29949 - protein, 9 aa, Homo sapiens
  misc_feature: Table A; Target 29949; HLA-C*03:03; HAVCR1; ENSG00000113249; TAA
TTTTVLTTM

SEQ ID NO: 29950 - protein, 9 aa, Homo sapiens
  misc_feature: Table A; Target 29950; HLA-C*03:04; HAVCR1; ENSG00000113249; TAA
TTTTVLTTM

SEQ ID NO: 29951 - protein, 9 aa, Homo sapiens
  misc_feature: Table A; Target 29951; HLA-C*07:04; HAVCR1; ENSG00000113249; TAA
TTTTVLTTM

SEQ ID NO: 29952 - protein, 9 aa, Homo sapiens
  misc_feature: Table A; Target 29952; HLA-C*07:06; HAVCR1; ENSG00000113249; TAA
TTTTVLTTM

SEQ ID NO: 29953 - protein, 9 aa, Homo sapiens
  misc_feature: Table A; Target 29953; HLA-C*16:01; HAVCR1; ENSG00000113249; TAA
TTTTVLTTM

SEQ ID NO: 29954 - protein, 9 aa, Homo sapiens
  misc_feature: Table A; Target 29954; HLA-C*16:02; HAVCR1; ENSG00000113249; TAA
TTTTVLTTM

SEQ ID NO: 29955 - protein, 8 aa, Homo sapiens
  misc_feature: Table A; Target 29955; HLA-A*32:01; HAVCR1; ENSG00000113249; TAA
TTTVLTTM

SEQ ID NO: 29956 - protein, 8 aa, Homo sapiens
  misc_feature: Table A; Target 29956; HLA-C*05:01; HAVCR1; ENSG00000113249; TAA
TTTVPTTM

SEQ ID NO: 29957 - protein, 9 aa, Homo sapiens
  misc_feature: Table A; Target 29957; HLA-C*05:01; HAVCR1; ENSG00000113249; TAA
TTTVPTTTV

SEQ ID NO: 29958 - protein, 9 aa, Homo sapiens
  misc_feature: Table A; Target 29958; HLA-A*68:02; HAVCR1; ENSG00000113249; TAA
TTVLTTMTV

SEQ ID NO: 29959 - protein, 9 aa, Homo sapiens
  misc_feature: Table A; Target 29959; HLA-B*13:02; HAVCR1; ENSG00000113249; TAA
TTVLTTMTV

SEQ ID NO: 29960 - protein, 9 aa, Homo sapiens
  misc_feature: Table A; Target 29960; HLA-B*40:02; HAVCR1; ENSG00000113249; TAA
TTVLTTMTV

SEQ ID NO: 29961 - protein, 9 aa, Homo sapiens
  misc_feature: Table A; Target 29961; HLA-B*51:01; HAVCR1; ENSG00000113249; TAA
TTVLTTMTV

SEQ ID NO: 29962 - protein, 9 aa, Homo sapiens
  misc_feature: Table A; Target 29962; HLA-C*06:02; HAVCR1; ENSG00000113249; TAA
TTVLTTMTV

SEQ ID NO: 29963 - protein, 9 aa, Homo sapiens
  misc_feature: Table A; Target 29963; HLA-A*25:01; HAVCR1; ENSG00000113249; TAA
TTVPTTMSI

SEQ ID NO: 29964 - protein, 9 aa, Homo sapiens
  misc_feature: Table A; Target 29964; HLA-B*58:01; HAVCR1; ENSG00000113249; TAA
TTVPTTMSI

SEQ ID NO: 29965 - protein, 9 aa, Homo sapiens
  misc_feature: Table A; Target 29965; HLA-C*03:04; HAVCR1; ENSG00000113249; TAA
TTVPTTMSI

SEQ ID NO: 29966 - protein, 9 aa, Homo sapiens
  misc_feature: Table A; Target 29966; HLA-A*02:01; HAVCR1; ENSG00000113249; TAA
TTVPTTTTV

SEQ ID NO: 29967 - protein, 9 aa, Homo sapiens
  misc_feature: Table A; Target 29967; HLA-A*02:03; HAVCR1; ENSG00000113249; TAA
TTVPTTTTV

SEQ ID NO: 29968 - protein, 9 aa, Homo sapiens
  misc_feature: Table A; Target 29968; HLA-A*02:07; HAVCR1; ENSG00000113249; TAA
TTVPTTTTV

SEQ ID NO: 29969 - protein, 9 aa, Homo sapiens
  misc_feature: Table A; Target 29969; HLA-A*25:01; HAVCR1; ENSG00000113249; TAA
TTVPTTTTV

SEQ ID NO: 29970 - protein, 9 aa, Homo sapiens
  misc_feature: Table A; Target 29970; HLA-A*26:01; HAVCR1; ENSG00000113249; TAA
TTVPTTTTV

SEQ ID NO: 29971 - protein, 9 aa, Homo sapiens
  misc_feature: Table A; Target 29971; HLA-A*32:01; HAVCR1; ENSG00000113249; TAA
TTVPTTTTV

SEQ ID NO: 29972 - protein, 9 aa, Homo sapiens
  misc_feature: Table A; Target 29972; HLA-A*68:02; HAVCR1; ENSG00000113249; TAA
TTVPTTTTV

SEQ ID NO: 29973 - protein, 9 aa, Homo sapiens
  misc_feature: Table A; Target 29973; HLA-B*13:02; HAVCR1; ENSG00000113249; TAA
TTVPTTTTV

SEQ ID NO: 29974 - protein, 9 aa, Homo sapiens
  misc_feature: Table A; Target 29974; HLA-B*46:01; HAVCR1; ENSG00000113249; TAA
TTVPTTTTV

SEQ ID NO: 29975 - protein, 9 aa, Homo sapiens
  misc_feature: Table A; Target 29975; HLA-B*49:01; HAVCR1; ENSG00000113249; TAA
TTVPTTTTV

SEQ ID NO: 29976 - protein, 9 aa, Homo sapiens
  misc_feature: Table A; Target 29976; HLA-B*51:01; HAVCR1; ENSG00000113249; TAA
TTVPTTTTV

SEQ ID NO: 29977 - protein, 9 aa, Homo sapiens
  misc_feature: Table A; Target 29977; HLA-B*58:01; HAVCR1; ENSG00000113249; TAA
TTVPTTTTV

SEQ ID NO: 29978 - protein, 9 aa, Homo sapiens
  misc_feature: Table A; Target 29978; HLA-C*02:02; HAVCR1; ENSG00000113249; TAA
TTVPTTTTV

SEQ ID NO: 29979 - protein, 9 aa, Homo sapiens
  misc_feature: Table A; Target 29979; HLA-C*03:03; HAVCR1; ENSG00000113249; TAA
TTVPTTTTV

SEQ ID NO: 29980 - protein, 9 aa, Homo sapiens
  misc_feature: Table A; Target 29980; HLA-C*03:04; HAVCR1; ENSG00000113249; TAA
TTVPTTTTV

SEQ ID NO: 29981 - protein, 9 aa, Homo sapiens
  misc_feature: Table A; Target 29981; HLA-C*07:06; HAVCR1; ENSG00000113249; TAA
TTVPTTTTV

SEQ ID NO: 29982 - protein, 9 aa, Homo sapiens
  misc_feature: Table A; Target 29982; HLA-C*12:03; HAVCR1; ENSG00000113249; TAA
TTVPTTTTV

SEQ ID NO: 29983 - protein, 9 aa, Homo sapiens
  misc_feature: Table A; Target 29983; HLA-C*16:02; HAVCR1; ENSG00000113249; TAA
TTVPTTTTV

SEQ ID NO: 29984 - protein, 9 aa, Homo sapiens
  misc_feature: Table A; Target 29984; HLA-A*02:01; HAVCR1; ENSG00000113249; TAA
TTVPTVTTV

SEQ ID NO: 29985 - protein, 9 aa, Homo sapiens
  misc_feature: Table A; Target 29985; HLA-A*02:03; HAVCR1; ENSG00000113249; TAA
TTVPTVTTV

SEQ ID NO: 29986 - protein, 9 aa, Homo sapiens
  misc_feature: Table A; Target 29986; HLA-A*02:04; HAVCR1; ENSG00000113249; TAA
TTVPTVTTV

SEQ ID NO: 29987 - protein, 9 aa, Homo sapiens
  misc_feature: Table A; Target 29987; HLA-A*02:07; HAVCR1; ENSG00000113249; TAA
TTVPTVTTV

SEQ ID NO: 29988 - protein, 9 aa, Homo sapiens
  misc_feature: Table A; Target 29988; HLA-A*25:01; HAVCR1; ENSG00000113249; TAA
TTVPTVTTV

SEQ ID NO: 29989 - protein, 9 aa, Homo sapiens
  misc_feature: Table A; Target 29989; HLA-A*26:01; HAVCR1; ENSG00000113249; TAA
TTVPTVTTV

SEQ ID NO: 29990 - protein, 9 aa, Homo sapiens
  misc_feature: Table A; Target 29990; HLA-A*32:01; HAVCR1; ENSG00000113249; TAA
TTVPTVTTV

SEQ ID NO: 29991 - protein, 9 aa, Homo sapiens
  misc_feature: Table A; Target 29991; HLA-A*68:02; HAVCR1; ENSG00000113249; TAA
TTVPTVTTV

SEQ ID NO: 29992 - protein, 9 aa, Homo sapiens
  misc_feature: Table A; Target 29992; HLA-B*13:02; HAVCR1; ENSG00000113249; TAA
TTVPTVTTV

SEQ ID NO: 29993 - protein, 9 aa, Homo sapiens
  misc_feature: Table A; Target 29993; HLA-B*46:01; HAVCR1; ENSG00000113249; TAA
TTVPTVTTV

SEQ ID NO: 29994 - protein, 9 aa, Homo sapiens
  misc_feature: Table A; Target 29994; HLA-B*49:01; HAVCR1; ENSG00000113249; TAA
TTVPTVTTV

SEQ ID NO: 29995 - protein, 9 aa, Homo sapiens
  misc_feature: Table A; Target 29995; HLA-B*51:01; HAVCR1; ENSG00000113249; TAA
TTVPTVTTV

SEQ ID NO: 29996 - protein, 9 aa, Homo sapiens
  misc_feature: Table A; Target 29996; HLA-B*55:01; HAVCR1; ENSG00000113249; TAA
TTVPTVTTV

SEQ ID NO: 29997 - protein, 9 aa, Homo sapiens
  misc_feature: Table A; Target 29997; HLA-B*58:01; HAVCR1; ENSG00000113249; TAA
TTVPTVTTV

SEQ ID NO: 29998 - protein, 9 aa, Homo sapiens
  misc_feature: Table A; Target 29998; HLA-C*02:02; HAVCR1; ENSG00000113249; TAA
TTVPTVTTV

SEQ ID NO: 29999 - protein, 9 aa, Homo sapiens
  misc_feature: Table A; Target 29999; HLA-C*03:04; HAVCR1; ENSG00000113249; TAA
TTVPTVTTV

SEQ ID NO: 30000 - protein, 9 aa, Homo sapiens
  misc_feature: Table A; Target 30000; HLA-C*07:06; HAVCR1; ENSG00000113249; TAA
TTVPTVTTV

SEQ ID NO: 30001 - protein, 9 aa, Homo sapiens
  misc_feature: Table A; Target 30001; HLA-C*12:03; HAVCR1; ENSG00000113249; TAA
TTVPTVTTV

SEQ ID NO: 30002 - protein, 9 aa, Homo sapiens
  misc_feature: Table A; Target 30002; HLA-C*16:02; HAVCR1; ENSG00000113249; TAA
TTVPTVTTV

SEQ ID NO: 30003 - protein, 10 aa, Homo sapiens
  misc_feature: Table A; Target 30003; HLA-A*11:01; HAVCR1; ENSG00000113249; TAA
TTVPTVTTVR

SEQ ID NO: 30004 - protein, 10 aa, Homo sapiens
  misc_feature: Table A; Target 30004; HLA-A*31:01; HAVCR1; ENSG00000113249; TAA
TTVPTVTTVR

SEQ ID NO: 30005 - protein, 10 aa, Homo sapiens
  misc_feature: Table A; Target 30005; HLA-A*33:03; HAVCR1; ENSG00000113249; TAA
TTVPTVTTVR

SEQ ID NO: 30006 - protein, 10 aa, Homo sapiens
  misc_feature: Table A; Target 30006; HLA-A*68:01; HAVCR1; ENSG00000113249; TAA
TTVPTVTTVR

SEQ ID NO: 30007 - protein, 10 aa, Homo sapiens
  misc_feature: Table A; Target 30007; HLA-C*07:06; HAVCR1; ENSG00000113249; TAA
TTVPTVTTVR

SEQ ID NO: 30008 - protein, 8 aa, Homo sapiens
  misc_feature: Table A; Target 30008; HLA-B*51:01; HAVCR1; ENSG00000113249; TAA
TVLTTMTV

SEQ ID NO: 30009 - protein, 8 aa, Homo sapiens
  misc_feature: Table A; Target 30009; HLA-B*51:01; HAVCR1; ENSG00000113249; TAA
TVPTTMSI

SEQ ID NO: 30010 - protein, 8 aa, Homo sapiens
  misc_feature: Table A; Target 30010; HLA-B*51:01; HAVCR1; ENSG00000113249; TAA
TVPTTTTV

SEQ ID NO: 30011 - protein, 8 aa, Homo sapiens
  misc_feature: Table A; Target 30011; HLA-C*01:02; HAVCR1; ENSG00000113249; TAA
TVPTTTTV

SEQ ID NO: 30012 - protein, 9 aa, Homo sapiens
  misc_feature: Table A; Target 30012; HLA-C*01:02; HAVCR1; ENSG00000113249; TAA
TVPTTTVPT

SEQ ID NO: 30013 - protein, 11 aa, Homo sapiens
  misc_feature: Table A; Target 30013; HLA-A*26:01; HAVCR1; ENSG00000113249; TAA
TVPTTTVPTTM

SEQ ID NO: 30014 - protein, 11 aa, Homo sapiens
  misc_feature: Table A; Target 30014; HLA-B*39:01; HAVCR1; ENSG00000113249; TAA
TVPTTTVPTTM

SEQ ID NO: 30015 - protein, 11 aa, Homo sapiens
  misc_feature: Table A; Target 30015; HLA-C*01:02; HAVCR1; ENSG00000113249; TAA
TVPTTTVPTTM

SEQ ID NO: 30016 - protein, 8 aa, Homo sapiens
  misc_feature: Table A; Target 30016; HLA-B*51:01; HAVCR1; ENSG00000113249; TAA
TVPTVTTV

SEQ ID NO: 30017 - protein, 8 aa, Homo sapiens
  misc_feature: Table A; Target 30017; HLA-C*01:02; HAVCR1; ENSG00000113249; TAA
TVPTVTTV

SEQ ID NO: 30018 - protein, 9 aa, Homo sapiens
  misc_feature: Table A; Target 30018; HLA-A*26:01; HAVCR1; ENSG00000113249; TAA
TVPTVTTVR

SEQ ID NO: 30019 - protein, 9 aa, Homo sapiens
  misc_feature: Table A; Target 30019; HLA-A*31:01; HAVCR1; ENSG00000113249; TAA
TVPTVTTVR

SEQ ID NO: 30020 - protein, 9 aa, Homo sapiens
  misc_feature: Table A; Target 30020; HLA-A*33:01; HAVCR1; ENSG00000113249; TAA
TVPTVTTVR

SEQ ID NO: 30021 - protein, 9 aa, Homo sapiens
  misc_feature: Table A; Target 30021; HLA-A*33:03; HAVCR1; ENSG00000113249; TAA
TVPTVTTVR

SEQ ID NO: 30022 - protein, 9 aa, Homo sapiens
  misc_feature: Table A; Target 30022; HLA-A*68:01; HAVCR1; ENSG00000113249; TAA
TVPTVTTVR

SEQ ID NO: 30023 - protein, 9 aa, Homo sapiens
  misc_feature: Table A; Target 30023; HLA-C*07:06; HAVCR1; ENSG00000113249; TAA
TVPTVTTVR

SEQ ID NO: 30024 - protein, 10 aa, Homo sapiens
  misc_feature: Table A; Target 30024; HLA-A*03:01; HAVCR1; ENSG00000113249; TAA
TVSLEIVPPK

SEQ ID NO: 30025 - protein, 10 aa, Homo sapiens
  misc_feature: Table A; Target 30025; HLA-A*03:02; HAVCR1; ENSG00000113249; TAA
TVSLEIVPPK

SEQ ID NO: 30026 - protein, 10 aa, Homo sapiens
  misc_feature: Table A; Target 30026; HLA-A*11:01; HAVCR1; ENSG00000113249; TAA
TVSLEIVPPK

SEQ ID NO: 30027 - protein, 10 aa, Homo sapiens
  misc_feature: Table A; Target 30027; HLA-A*68:01; HAVCR1; ENSG00000113249; TAA
TVSLEIVPPK

SEQ ID NO: 30028 - protein, 10 aa, Homo sapiens
  misc_feature: Table A; Target 30028; HLA-B*27:02; HAVCR1; ENSG00000113249; TAA
TVSLEIVPPK

SEQ ID NO: 30029 - protein, 10 aa, Homo sapiens
  misc_feature: Table A; Target 30029; HLA-C*07:06; HAVCR1; ENSG00000113249; TAA
TVSLEIVPPK

SEQ ID NO: 30030 - protein, 9 aa, Homo sapiens
  misc_feature: Table A; Target 30030; HLA-A*26:01; HAVCR1; ENSG00000113249; TAA
TVSTFVPPM

SEQ ID NO: 30031 - protein, 9 aa, Homo sapiens
  misc_feature: Table A; Target 30031; HLA-B*35:01; HAVCR1; ENSG00000113249; TAA
TVSTFVPPM

SEQ ID NO: 30032 - protein, 9 aa, Homo sapiens
  misc_feature: Table A; Target 30032; HLA-C*07:06; HAVCR1; ENSG00000113249; TAA
TVSTFVPPM

SEQ ID NO: 30033 - protein, 8 aa, Homo sapiens
  misc_feature: Table A; Target 30033; HLA-C*05:01; HAVCR1; ENSG00000113249; TAA
TVSTTTSV

SEQ ID NO: 30034 - protein, 9 aa, Homo sapiens
  misc_feature: Table A; Target 30034; HLA-B*39:01; HAVCR1; ENSG00000113249; TAA
TVTESSDGL

SEQ ID NO: 30035 - protein, 10 aa, Homo sapiens
  misc_feature: Table A; Target 30035; HLA-A*25:01; HAVCR1; ENSG00000113249; TAA
TVTESSDGLW

SEQ ID NO: 30036 - protein, 9 aa, Homo sapiens
  misc_feature: Table A; Target 30036; HLA-A*32:01; HAVCR1; ENSG00000113249; TAA
TVTTVRTST

SEQ ID NO: 30037 - protein, 9 aa, Homo sapiens
  misc_feature: Table A; Target 30037; HLA-C*16:01; HAVCR1; ENSG00000113249; TAA
TVTTVRTST

SEQ ID NO: 30038 - protein, 8 aa, Homo sapiens
  misc_feature: Table A; Target 30038; HLA-C*07:01; HAVCR1; ENSG00000113249; TAA
VAGSVKVG

SEQ ID NO: 30039 - protein, 8 aa, Homo sapiens
  misc_feature: Table A; Target 30039; HLA-C*12:03; HAVCR1; ENSG00000113249; TAA
VAGSVKVG

SEQ ID NO: 30040 - protein, 9 aa, Homo sapiens
  misc_feature: Table A; Target 30040; HLA-A*23:01; HAVCR1; ENSG00000113249; TAA
VCISVLVLL

SEQ ID NO: 30041 - protein, 11 aa, Homo sapiens
  misc_feature: Table A; Target 30041; HLA-A*30:01; HAVCR1; ENSG00000113249; TAA
VEKEVQAEDNI

SEQ ID NO: 30042 - protein, 11 aa, Homo sapiens
  misc_feature: Table A; Target 30042; HLA-B*49:01; HAVCR1; ENSG00000113249; TAA
VEKEVQAEDNI

SEQ ID NO: 30043 - protein, 9 aa, Homo sapiens
  misc_feature: Table A; Target 30043; HLA-A*02:01; HAVCR1; ENSG00000113249; TAA
VGGEAGPSV

SEQ ID NO: 30044 - protein, 9 aa, Homo sapiens
  misc_feature: Table A; Target 30044; HLA-B*46:01; HAVCR1; ENSG00000113249; TAA
VGGEAGPSV

SEQ ID NO: 30045 - protein, 9 aa, Homo sapiens
  misc_feature: Table A; Target 30045; HLA-B*51:01; HAVCR1; ENSG00000113249; TAA
VGGEAGPSV

SEQ ID NO: 30046 - protein, 9 aa, Homo sapiens
  misc_feature: Table A; Target 30046; HLA-C*01:02; HAVCR1; ENSG00000113249; TAA
VGGEAGPSV

SEQ ID NO: 30047 - protein, 9 aa, Homo sapiens
  misc_feature: Table A; Target 30047; HLA-C*03:03; HAVCR1; ENSG00000113249; TAA
VGGEAGPSV

SEQ ID NO: 30048 - protein, 9 aa, Homo sapiens
  misc_feature: Table A; Target 30048; HLA-C*03:04; HAVCR1; ENSG00000113249; TAA
VGGEAGPSV

SEQ ID NO: 30049 - protein, 9 aa, Homo sapiens
  misc_feature: Table A; Target 30049; HLA-C*05:01; HAVCR1; ENSG00000113249; TAA
VGGEAGPSV

SEQ ID NO: 30050 - protein, 9 aa, Homo sapiens
  misc_feature: Table A; Target 30050; HLA-A*24:02; HAVCR1; ENSG00000113249; TAA
VIIAKKYFF

SEQ ID NO: 30051 - protein, 9 aa, Homo sapiens
  misc_feature: Table A; Target 30051; HLA-A*02:01; HAVCR1; ENSG00000113249; TAA
VILSLILHL

SEQ ID NO: 30052 - protein, 9 aa, Homo sapiens
  misc_feature: Table A; Target 30052; HLA-A*02:04; HAVCR1; ENSG00000113249; TAA
VILSLILHL

SEQ ID NO: 30053 - protein, 9 aa, Homo sapiens
  misc_feature: Table A; Target 30053; HLA-A*02:07; HAVCR1; ENSG00000113249; TAA
VILSLILHL

SEQ ID NO: 30054 - protein, 9 aa, Homo sapiens
  misc_feature: Table A; Target 30054; HLA-A*23:01; HAVCR1; ENSG00000113249; TAA
VILSLILHL

SEQ ID NO: 30055 - protein, 11 aa, Homo sapiens
  misc_feature: Table A; Target 30055; HLA-B*15:03; HAVCR1; ENSG00000113249; TAA
VKVGGEAGPSV

SEQ ID NO: 30056 - protein, 9 aa, Homo sapiens
  misc_feature: Table A; Target 30056; HLA-A*02:01; HAVCR1; ENSG00000113249; TAA
VLTTMTVST

SEQ ID NO: 30057 - protein, 9 aa, Homo sapiens
  misc_feature: Table A; Target 30057; HLA-A*32:01; HAVCR1; ENSG00000113249; TAA
VLTTMTVST

SEQ ID NO: 30058 - protein, 9 aa, Homo sapiens
  misc_feature: Table A; Target 30058; HLA-C*16:02; HAVCR1; ENSG00000113249; TAA
VLTTMTVST

SEQ ID NO: 30059 - protein, 8 aa, Homo sapiens
  misc_feature: Table A; Target 30059; HLA-B*51:01; HAVCR1; ENSG00000113249; TAA
VPPKVTTT

SEQ ID NO: 30060 - protein, 9 aa, Homo sapiens
  misc_feature: Table A; Target 30060; HLA-B*51:01; HAVCR1; ENSG00000113249; TAA
VPPKVTTTP

SEQ ID NO: 30061 - protein, 10 aa, Homo sapiens
  misc_feature: Table A; Target 30061; HLA-B*07:02; HAVCR1; ENSG00000113249; TAA
VPPKVTTTPI

SEQ ID NO: 30062 - protein, 10 aa, Homo sapiens
  misc_feature: Table A; Target 30062; HLA-B*51:01; HAVCR1; ENSG00000113249; TAA
VPPKVTTTPI

SEQ ID NO: 30063 - protein, 9 aa, Homo sapiens
  misc_feature: Table A; Target 30063; HLA-B*56:01; HAVCR1; ENSG00000113249; TAA
VPTTMSIPT

SEQ ID NO: 30064 - protein, 9 aa, Homo sapiens
  misc_feature: Table A; Target 30064; HLA-B*35:03; HAVCR1; ENSG00000113249; TAA
VPTTTSIPT

SEQ ID NO: 30065 - protein, 9 aa, Homo sapiens
  misc_feature: Table A; Target 30065; HLA-B*55:01; HAVCR1; ENSG00000113249; TAA
VPTTTSIPT

SEQ ID NO: 30066 - protein, 9 aa, Homo sapiens
  misc_feature: Table A; Target 30066; HLA-B*56:01; HAVCR1; ENSG00000113249; TAA
VPTTTSIPT

SEQ ID NO: 30067 - protein, 10 aa, Homo sapiens
  misc_feature: Table A; Target 30067; HLA-B*56:01; HAVCR1; ENSG00000113249; TAA
VPTTTSIPTT

SEQ ID NO: 30068 - protein, 8 aa, Homo sapiens
  misc_feature: Table A; Target 30068; HLA-B*56:01; HAVCR1; ENSG00000113249; TAA
VPTTTTVP

SEQ ID NO: 30069 - protein, 9 aa, Homo sapiens
  misc_feature: Table A; Target 30069; HLA-B*55:01; HAVCR1; ENSG00000113249; TAA
VPTTTTVPT

SEQ ID NO: 30070 - protein, 9 aa, Homo sapiens
  misc_feature: Table A; Target 30070; HLA-B*56:01; HAVCR1; ENSG00000113249; TAA
VPTTTTVPT

SEQ ID NO: 30071 - protein, 9 aa, Homo sapiens
  misc_feature: Table A; Target 30071; HLA-B*35:03; HAVCR1; ENSG00000113249; TAA
VPTTTVPTT

SEQ ID NO: 30072 - protein, 9 aa, Homo sapiens
  misc_feature: Table A; Target 30072; HLA-B*51:01; HAVCR1; ENSG00000113249; TAA
VPTTTVPTT

SEQ ID NO: 30073 - protein, 9 aa, Homo sapiens
  misc_feature: Table A; Target 30073; HLA-B*54:01; HAVCR1; ENSG00000113249; TAA
VPTTTVPTT

SEQ ID NO: 30074 - protein, 9 aa, Homo sapiens
  misc_feature: Table A; Target 30074; HLA-B*55:01; HAVCR1; ENSG00000113249; TAA
VPTTTVPTT

SEQ ID NO: 30075 - protein, 9 aa, Homo sapiens
  misc_feature: Table A; Target 30075; HLA-B*56:01; HAVCR1; ENSG00000113249; TAA
VPTTTVPTT

SEQ ID NO: 30076 - protein, 9 aa, Homo sapiens
  misc_feature: Table A; Target 30076; HLA-C*16:02; HAVCR1; ENSG00000113249; TAA
VPTTTVPTT

SEQ ID NO: 30077 - protein, 10 aa, Homo sapiens
  misc_feature: Table A; Target 30077; HLA-B*07:02; HAVCR1; ENSG00000113249; TAA
VPTTTVPTTM

SEQ ID NO: 30078 - protein, 10 aa, Homo sapiens
  misc_feature: Table A; Target 30078; HLA-B*35:01; HAVCR1; ENSG00000113249; TAA
VPTTTVPTTM

SEQ ID NO: 30079 - protein, 10 aa, Homo sapiens
  misc_feature: Table A; Target 30079; HLA-B*35:03; HAVCR1; ENSG00000113249; TAA
VPTTTVPTTM

SEQ ID NO: 30080 - protein, 10 aa, Homo sapiens
  misc_feature: Table A; Target 30080; HLA-B*51:01; HAVCR1; ENSG00000113249; TAA
VPTTTVPTTM

SEQ ID NO: 30081 - protein, 10 aa, Homo sapiens
  misc_feature: Table A; Target 30081; HLA-B*55:01; HAVCR1; ENSG00000113249; TAA
VPTTTVPTTM

SEQ ID NO: 30082 - protein, 10 aa, Homo sapiens
  misc_feature: Table A; Target 30082; HLA-B*56:01; HAVCR1; ENSG00000113249; TAA
VPTTTVPTTM

SEQ ID NO: 30083 - protein, 10 aa, Homo sapiens
  misc_feature: Table A; Target 30083; HLA-C*07:02; HAVCR1; ENSG00000113249; TAA
VPTTTVPTTM

SEQ ID NO: 30084 - protein, 10 aa, Homo sapiens
  misc_feature: Table A; Target 30084; HLA-C*14:02; HAVCR1; ENSG00000113249; TAA
VPTTTVPTTM

SEQ ID NO: 30085 - protein, 8 aa, Homo sapiens
  misc_feature: Table A; Target 30085; HLA-B*56:01; HAVCR1; ENSG00000113249; TAA
VPTVTTVR

SEQ ID NO: 30086 - protein, 8 aa, Homo sapiens
  misc_feature: Table A; Target 30086; HLA-C*07:06; HAVCR1; ENSG00000113249; TAA
VPTVTTVR

SEQ ID NO: 30087 - protein, 9 aa, Homo sapiens
  misc_feature: Table A; Target 30087; HLA-B*55:01; HAVCR1; ENSG00000113249; TAA
VPTVTTVRT

SEQ ID NO: 30088 - protein, 9 aa, Homo sapiens
  misc_feature: Table A; Target 30088; HLA-B*56:01; HAVCR1; ENSG00000113249; TAA
VPTVTTVRT

SEQ ID NO: 30089 - protein, 9 aa, Homo sapiens
  misc_feature: Table A; Target 30089; HLA-B*35:01; HAVCR1; ENSG00000113249; TAA
VPVTTTVST

SEQ ID NO: 30090 - protein, 9 aa, Homo sapiens
  misc_feature: Table A; Target 30090; HLA-B*35:03; HAVCR1; ENSG00000113249; TAA
VPVTTTVST

SEQ ID NO: 30091 - protein, 9 aa, Homo sapiens
  misc_feature: Table A; Target 30091; HLA-B*54:01; HAVCR1; ENSG00000113249; TAA
VPVTTTVST

SEQ ID NO: 30092 - protein, 9 aa, Homo sapiens
  misc_feature: Table A; Target 30092; HLA-B*55:01; HAVCR1; ENSG00000113249; TAA
VPVTTTVST

SEQ ID NO: 30093 - protein, 9 aa, Homo sapiens
  misc_feature: Table A; Target 30093; HLA-B*56:01; HAVCR1; ENSG00000113249; TAA
VPVTTTVST

SEQ ID NO: 30094 - protein, 10 aa, Homo sapiens
  misc_feature: Table A; Target 30094; HLA-A*23:01; HAVCR1; ENSG00000113249; TAA
VPVTTTVSTF

SEQ ID NO: 30095 - protein, 10 aa, Homo sapiens
  misc_feature: Table A; Target 30095; HLA-B*07:02; HAVCR1; ENSG00000113249; TAA
VPVTTTVSTF

SEQ ID NO: 30096 - protein, 10 aa, Homo sapiens
  misc_feature: Table A; Target 30096; HLA-B*35:01; HAVCR1; ENSG00000113249; TAA
VPVTTTVSTF

SEQ ID NO: 30097 - protein, 9 aa, Homo sapiens
  misc_feature: Table A; Target 30097; HLA-A*30:01; HAVCR1; ENSG00000113249; TAA
VQAEDNIYI

SEQ ID NO: 30098 - protein, 9 aa, Homo sapiens
  misc_feature: Table A; Target 30098; HLA-B*13:02; HAVCR1; ENSG00000113249; TAA
VQAEDNIYI

SEQ ID NO: 30099 - protein, 9 aa, Homo sapiens
  misc_feature: Table A; Target 30099; HLA-B*27:05; HAVCR1; ENSG00000113249; TAA
VQAEDNIYI

SEQ ID NO: 30100 - protein, 9 aa, Homo sapiens
  misc_feature: Table A; Target 30100; HLA-B*38:01; HAVCR1; ENSG00000113249; TAA
VQAEDNIYI

SEQ ID NO: 30101 - protein, 9 aa, Homo sapiens
  misc_feature: Table A; Target 30101; HLA-B*39:01; HAVCR1; ENSG00000113249; TAA
VQAEDNIYI

SEQ ID NO: 30102 - protein, 9 aa, Homo sapiens
  misc_feature: Table A; Target 30102; HLA-C*06:02; HAVCR1; ENSG00000113249; TAA
VQAEDNIYI

SEQ ID NO: 30103 - protein, 8 aa, Homo sapiens
  misc_feature: Table A; Target 30103; HLA-B*15:01; HAVCR1; ENSG00000113249; TAA
VQQLSVSF

SEQ ID NO: 30104 - protein, 8 aa, Homo sapiens
  misc_feature: Table A; Target 30104; HLA-B*15:03; HAVCR1; ENSG00000113249; TAA
VQQLSVSF

SEQ ID NO: 30105 - protein, 8 aa, Homo sapiens
  misc_feature: Table A; Target 30105; HLA-B*37:01; HAVCR1; ENSG00000113249; TAA
VQQLSVSF

SEQ ID NO: 30106 - protein, 8 aa, Homo sapiens
  misc_feature: Table A; Target 30106; HLA-C*07:04; HAVCR1; ENSG00000113249; TAA
VQQLSVSF

SEQ ID NO: 30107 - protein, 8 aa, Homo sapiens
  misc_feature: Table A; Target 30107; HLA-C*14:02; HAVCR1; ENSG00000113249; TAA
VQQLSVSF

SEQ ID NO: 30108 - protein, 8 aa, Homo sapiens
  misc_feature: Table A; Target 30108; HLA-C*05:01; HAVCR1; ENSG00000113249; TAA
VSDSGVYC

SEQ ID NO: 30109 - protein, 9 aa, Homo sapiens
  misc_feature: Table A; Target 30109; HLA-C*05:01; HAVCR1; ENSG00000113249; TAA
VSDSGVYCC

SEQ ID NO: 30110 - protein, 8 aa, Homo sapiens
  misc_feature: Table A; Target 30110; HLA-B*13:02; HAVCR1; ENSG00000113249; TAA
VSFSSLQI

SEQ ID NO: 30111 - protein, 8 aa, Homo sapiens
  misc_feature: Table A; Target 30111; HLA-B*51:01; HAVCR1; ENSG00000113249; TAA
VSFSSLQI

SEQ ID NO: 30112 - protein, 9 aa, Homo sapiens
  misc_feature: Table A; Target 30112; HLA-A*03:01; HAVCR1; ENSG00000113249; TAA
VSFSSLQIK

SEQ ID NO: 30113 - protein, 9 aa, Homo sapiens
  misc_feature: Table A; Target 30113; HLA-A*03:02; HAVCR1; ENSG00000113249; TAA
VSFSSLQIK

SEQ ID NO: 30114 - protein, 9 aa, Homo sapiens
  misc_feature: Table A; Target 30114; HLA-A*11:01; HAVCR1; ENSG00000113249; TAA
VSFSSLQIK

SEQ ID NO: 30115 - protein, 9 aa, Homo sapiens
  misc_feature: Table A; Target 30115; HLA-B*27:05; HAVCR1; ENSG00000113249; TAA
VSFSSLQIK

SEQ ID NO: 30116 - protein, 9 aa, Homo sapiens
  misc_feature: Table A; Target 30116; HLA-B*57:01; HAVCR1; ENSG00000113249; TAA
VSFSSLQIK

SEQ ID NO: 30117 - protein, 9 aa, Homo sapiens
  misc_feature: Table A; Target 30117; HLA-C*07:06; HAVCR1; ENSG00000113249; TAA
VSFSSLQIK

SEQ ID NO: 30118 - protein, 9 aa, Homo sapiens
  misc_feature: Table A; Target 30118; HLA-A*03:01; HAVCR1; ENSG00000113249; TAA
VSLEIVPPK

SEQ ID NO: 30119 - protein, 9 aa, Homo sapiens
  misc_feature: Table A; Target 30119; HLA-A*03:02; HAVCR1; ENSG00000113249; TAA
VSLEIVPPK

SEQ ID NO: 30120 - protein, 9 aa, Homo sapiens
  misc_feature: Table A; Target 30120; HLA-A*11:01; HAVCR1; ENSG00000113249; TAA
VSLEIVPPK

SEQ ID NO: 30121 - protein, 9 aa, Homo sapiens
  misc_feature: Table A; Target 30121; HLA-B*27:02; HAVCR1; ENSG00000113249; TAA
VSLEIVPPK

SEQ ID NO: 30122 - protein, 9 aa, Homo sapiens
  misc_feature: Table A; Target 30122; HLA-C*07:06; HAVCR1; ENSG00000113249; TAA
VSLEIVPPK

SEQ ID NO: 30123 - protein, 8 aa, Homo sapiens
  misc_feature: Table A; Target 30123; HLA-C*05:01; HAVCR1; ENSG00000113249; TAA
VTESSDGL

SEQ ID NO: 30124 - protein, 9 aa, Homo sapiens
  misc_feature: Table A; Target 30124; HLA-C*16:02; HAVCR1; ENSG00000113249; TAA
VTTTPIVTT

SEQ ID NO: 30125 - protein, 8 aa, Homo sapiens
  misc_feature: Table A; Target 30125; HLA-A*23:01; HAVCR1; ENSG00000113249; TAA
VTTTVSTF

SEQ ID NO: 30126 - protein, 8 aa, Homo sapiens
  misc_feature: Table A; Target 30126; HLA-A*32:01; HAVCR1; ENSG00000113249; TAA
VTTTVSTF

SEQ ID NO: 30127 - protein, 9 aa, Homo sapiens
  misc_feature: Table A; Target 30127; HLA-A*68:02; HAVCR1; ENSG00000113249; TAA
VTTTVSTFV

SEQ ID NO: 30128 - protein, 9 aa, Homo sapiens
  misc_feature: Table A; Target 30128; HLA-B*13:02; HAVCR1; ENSG00000113249; TAA
VTTTVSTFV

SEQ ID NO: 30129 - protein, 11 aa, Homo sapiens
  misc_feature: Table A; Target 30129; HLA-C*07:06; HAVCR1; ENSG00000113249; TAA
VTTVPTVTTVR

SEQ ID NO: 30130 - protein, 9 aa, Homo sapiens
  misc_feature: Table A; Target 30130; HLA-A*01:01; HAVCR1; ENSG00000113249; TAA
VTYRKDTRY

SEQ ID NO: 30131 - protein, 10 aa, Homo sapiens
  misc_feature: Table A; Target 30131; HLA-A*23:01; HAVCR1; ENSG00000113249; TAA
VWTNGTHVTY

SEQ ID NO: 30132 - protein, 10 aa, Homo sapiens
  misc_feature: Table A; Target 30132; HLA-A*24:02; HAVCR1; ENSG00000113249; TAA
VWTNGTHVTY

SEQ ID NO: 30133 - protein, 10 aa, Homo sapiens
  misc_feature: Table A; Target 30133; HLA-A*29:02; HAVCR1; ENSG00000113249; TAA
VWTNGTHVTY

SEQ ID NO: 30134 - protein, 9 aa, Homo sapiens
  misc_feature: Table A; Target 30134; HLA-A*01:01; HAVCR1; ENSG00000113249; TAA
WTNGTHVTY

SEQ ID NO: 30135 - protein, 9 aa, Homo sapiens
  misc_feature: Table A; Target 30135; HLA-A*25:01; HAVCR1; ENSG00000113249; TAA
WTNGTHVTY

SEQ ID NO: 30136 - protein, 9 aa, Homo sapiens
  misc_feature: Table A; Target 30136; HLA-A*26:01; HAVCR1; ENSG00000113249; TAA
WTNGTHVTY

SEQ ID NO: 30137 - protein, 9 aa, Homo sapiens
  misc_feature: Table A; Target 30137; HLA-A*29:02; HAVCR1; ENSG00000113249; TAA
WTNGTHVTY

SEQ ID NO: 30138 - protein, 9 aa, Homo sapiens
  misc_feature: Table A; Target 30138; HLA-A*30:02; HAVCR1; ENSG00000113249; TAA
WTNGTHVTY

SEQ ID NO: 30139 - protein, 9 aa, Homo sapiens
  misc_feature: Table A; Target 30139; HLA-A*32:01; HAVCR1; ENSG00000113249; TAA
WTNGTHVTY

SEQ ID NO: 30140 - protein, 9 aa, Homo sapiens
  misc_feature: Table A; Target 30140; HLA-A*68:01; HAVCR1; ENSG00000113249; TAA
WTNGTHVTY

SEQ ID NO: 30141 - protein, 9 aa, Homo sapiens
  misc_feature: Table A; Target 30141; HLA-B*15:01; HAVCR1; ENSG00000113249; TAA
WTNGTHVTY

SEQ ID NO: 30142 - protein, 9 aa, Homo sapiens
  misc_feature: Table A; Target 30142; HLA-B*15:03; HAVCR1; ENSG00000113249; TAA
WTNGTHVTY

SEQ ID NO: 30143 - protein, 9 aa, Homo sapiens
  misc_feature: Table A; Target 30143; HLA-B*35:01; HAVCR1; ENSG00000113249; TAA
WTNGTHVTY

SEQ ID NO: 30144 - protein, 9 aa, Homo sapiens
  misc_feature: Table A; Target 30144; HLA-B*46:01; HAVCR1; ENSG00000113249; TAA
WTNGTHVTY

SEQ ID NO: 30145 - protein, 9 aa, Homo sapiens
  misc_feature: Table A; Target 30145; HLA-B*57:01; HAVCR1; ENSG00000113249; TAA
WTNGTHVTY

SEQ ID NO: 30146 - protein, 9 aa, Homo sapiens
  misc_feature: Table A; Target 30146; HLA-B*58:01; HAVCR1; ENSG00000113249; TAA
WTNGTHVTY

SEQ ID NO: 30147 - protein, 9 aa, Homo sapiens
  misc_feature: Table A; Target 30147; HLA-C*02:02; HAVCR1; ENSG00000113249; TAA
WTNGTHVTY

SEQ ID NO: 30148 - protein, 9 aa, Homo sapiens
  misc_feature: Table A; Target 30148; HLA-C*07:04; HAVCR1; ENSG00000113249; TAA
WTNGTHVTY

SEQ ID NO: 30149 - protein, 9 aa, Homo sapiens
  misc_feature: Table A; Target 30149; HLA-C*12:03; HAVCR1; ENSG00000113249; TAA
WTNGTHVTY

SEQ ID NO: 30150 - protein, 9 aa, Homo sapiens
  misc_feature: Table A; Target 30150; HLA-C*14:02; HAVCR1; ENSG00000113249; TAA
WTNGTHVTY

SEQ ID NO: 30151 - protein, 9 aa, Homo sapiens
  misc_feature: Table A; Target 30151; HLA-C*16:01; HAVCR1; ENSG00000113249; TAA
WTNGTHVTY

SEQ ID NO: 30152 - protein, 9 aa, Homo sapiens
  misc_feature: Table A; Target 30152; HLA-C*16:02; HAVCR1; ENSG00000113249; TAA
WTNGTHVTY

SEQ ID NO: 30153 - protein, 9 aa, Homo sapiens
  misc_feature: Table A; Target 30153; HLA-C*16:04; HAVCR1; ENSG00000113249; TAA
WTNGTHVTY

SEQ ID NO: 30154 - protein, 10 aa, Homo sapiens
  misc_feature: Table A; Target 30154; HLA-A*31:01; HAVCR1; ENSG00000113249; TAA
WTNGTHVTYR

SEQ ID NO: 30155 - protein, 10 aa, Homo sapiens
  misc_feature: Table A; Target 30155; HLA-A*33:01; HAVCR1; ENSG00000113249; TAA
WTNGTHVTYR

SEQ ID NO: 30156 - protein, 10 aa, Homo sapiens
  misc_feature: Table A; Target 30156; HLA-A*33:03; HAVCR1; ENSG00000113249; TAA
WTNGTHVTYR

SEQ ID NO: 30157 - protein, 10 aa, Homo sapiens
  misc_feature: Table A; Target 30157; HLA-A*68:01; HAVCR1; ENSG00000113249; TAA
WTNGTHVTYR

SEQ ID NO: 30158 - protein, 8 aa, Homo sapiens
  misc_feature: Table A; Target 30158; HLA-B*08:01; HAVCR1; ENSG00000113249; TAA
YAGVCISV

SEQ ID NO: 30159 - protein, 8 aa, Homo sapiens
  misc_feature: Table A; Target 30159; HLA-B*51:01; HAVCR1; ENSG00000113249; TAA
YAGVCISV

SEQ ID NO: 30160 - protein, 8 aa, Homo sapiens
  misc_feature: Table A; Target 30160; HLA-C*12:03; HAVCR1; ENSG00000113249; TAA
YAGVCISV

SEQ ID NO: 30161 - protein, 9 aa, Homo sapiens
  misc_feature: Table A; Target 30161; HLA-C*03:03; HAVCR1; ENSG00000113249; TAA
YAGVCISVL

SEQ ID NO: 30162 - protein, 9 aa, Homo sapiens
  misc_feature: Table A; Target 30162; HLA-C*03:04; HAVCR1; ENSG00000113249; TAA
YAGVCISVL

SEQ ID NO: 30163 - protein, 9 aa, Homo sapiens
  misc_feature: Table A; Target 30163; HLA-C*12:03; HAVCR1; ENSG00000113249; TAA
YAGVCISVL

SEQ ID NO: 30164 - protein, 8 aa, Homo sapiens
  misc_feature: Table A; Target 30164; HLA-A*30:01; HAVCR1; ENSG00000113249; TAA
YSGAVTSM

SEQ ID NO: 30165 - protein, 8 aa, Homo sapiens
  misc_feature: Table A; Target 30165; HLA-A*32:01; HAVCR1; ENSG00000113249; TAA
YSGAVTSM

SEQ ID NO: 30166 - protein, 8 aa, Homo sapiens
  misc_feature: Table A; Target 30166; HLA-B*08:01; HAVCR1; ENSG00000113249; TAA
YSGAVTSM

SEQ ID NO: 30167 - protein, 8 aa, Homo sapiens
  misc_feature: Table A; Target 30167; HLA-B*15:01; HAVCR1; ENSG00000113249; TAA
YSGAVTSM

SEQ ID NO: 30168 - protein, 8 aa, Homo sapiens
  misc_feature: Table A; Target 30168; HLA-B*15:03; HAVCR1; ENSG00000113249; TAA
YSGAVTSM

SEQ ID NO: 30169 - protein, 8 aa, Homo sapiens
  misc_feature: Table A; Target 30169; HLA-B*18:01; HAVCR1; ENSG00000113249; TAA
YSGAVTSM

SEQ ID NO: 30170 - protein, 8 aa, Homo sapiens
  misc_feature: Table A; Target 30170; HLA-B*35:01; HAVCR1; ENSG00000113249; TAA
YSGAVTSM

SEQ ID NO: 30171 - protein, 8 aa, Homo sapiens
  misc_feature: Table A; Target 30171; HLA-B*35:03; HAVCR1; ENSG00000113249; TAA
YSGAVTSM

SEQ ID NO: 30172 - protein, 8 aa, Homo sapiens
  misc_feature: Table A; Target 30172; HLA-B*37:01; HAVCR1; ENSG00000113249; TAA
YSGAVTSM

SEQ ID NO: 30173 - protein, 8 aa, Homo sapiens
  misc_feature: Table A; Target 30173; HLA-B*39:01; HAVCR1; ENSG00000113249; TAA
YSGAVTSM

SEQ ID NO: 30174 - protein, 8 aa, Homo sapiens
  misc_feature: Table A; Target 30174; HLA-B*40:02; HAVCR1; ENSG00000113249; TAA
YSGAVTSM

SEQ ID NO: 30175 - protein, 8 aa, Homo sapiens
  misc_feature: Table A; Target 30175; HLA-B*46:01; HAVCR1; ENSG00000113249; TAA
YSGAVTSM

SEQ ID NO: 30176 - protein, 8 aa, Homo sapiens
  misc_feature: Table A; Target 30176; HLA-B*58:01; HAVCR1; ENSG00000113249; TAA
YSGAVTSM

SEQ ID NO: 30177 - protein, 8 aa, Homo sapiens
  misc_feature: Table A; Target 30177; HLA-C*01:02; HAVCR1; ENSG00000113249; TAA
YSGAVTSM

SEQ ID NO: 30178 - protein, 8 aa, Homo sapiens
  misc_feature: Table A; Target 30178; HLA-C*02:02; HAVCR1; ENSG00000113249; TAA
YSGAVTSM

SEQ ID NO: 30179 - protein, 8 aa, Homo sapiens
  misc_feature: Table A; Target 30179; HLA-C*03:03; HAVCR1; ENSG00000113249; TAA
YSGAVTSM

SEQ ID NO: 30180 - protein, 8 aa, Homo sapiens
  misc_feature: Table A; Target 30180; HLA-C*03:04; HAVCR1; ENSG00000113249; TAA
YSGAVTSM

SEQ ID NO: 30181 - protein, 8 aa, Homo sapiens
  misc_feature: Table A; Target 30181; HLA-C*05:01; HAVCR1; ENSG00000113249; TAA
YSGAVTSM

SEQ ID NO: 30182 - protein, 8 aa, Homo sapiens
  misc_feature: Table A; Target 30182; HLA-C*07:04; HAVCR1; ENSG00000113249; TAA
YSGAVTSM

SEQ ID NO: 30183 - protein, 8 aa, Homo sapiens
  misc_feature: Table A; Target 30183; HLA-C*12:03; HAVCR1; ENSG00000113249; TAA
YSGAVTSM

SEQ ID NO: 30184 - protein, 8 aa, Homo sapiens
  misc_feature: Table A; Target 30184; HLA-C*14:02; HAVCR1; ENSG00000113249; TAA
YSGAVTSM

SEQ ID NO: 30185 - protein, 8 aa, Homo sapiens
  misc_feature: Table A; Target 30185; HLA-C*16:01; HAVCR1; ENSG00000113249; TAA
YSGAVTSM

SEQ ID NO: 30186 - protein, 8 aa, Homo sapiens
  misc_feature: Table A; Target 30186; HLA-C*16:02; HAVCR1; ENSG00000113249; TAA
YSGAVTSM

SEQ ID NO: 30187 - protein, 8 aa, Homo sapiens
  misc_feature: Table A; Target 30187; HLA-C*16:04; HAVCR1; ENSG00000113249; TAA
YSGAVTSM

SEQ ID NO: 30188 - protein, 9 aa, Homo sapiens
  misc_feature: Table A; Target 30188; HLA-A*02:01; HAVCR1; ENSG00000113249; TAA
YTTDGNDTV

SEQ ID NO: 30189 - protein, 9 aa, Homo sapiens
  misc_feature: Table A; Target 30189; HLA-A*68:02; HAVCR1; ENSG00000113249; TAA
YTTDGNDTV

SEQ ID NO: 30190 - protein, 9 aa, Homo sapiens
  misc_feature: Table A; Target 30190; HLA-B*27:05; HAVCR1; ENSG00000113249; TAA
YTTDGNDTV

SEQ ID NO: 30191 - protein, 9 aa, Homo sapiens
  misc_feature: Table A; Target 30191; HLA-B*39:01; HAVCR1; ENSG00000113249; TAA
YTTDGNDTV

SEQ ID NO: 30192 - protein, 9 aa, Homo sapiens
  misc_feature: Table A; Target 30192; HLA-C*03:04; HAVCR1; ENSG00000113249; TAA
YTTDGNDTV

SEQ ID NO: 30193 - protein, 8 aa, Homo sapiens
  misc_feature: Table A; Target 30193; HLA-B*40:02; IFNK; ENSG00000147896; CTA
AEYLNQCL

SEQ ID NO: 30194 - protein, 11 aa, Homo sapiens
  misc_feature: Table A; Target 30194; HLA-A*29:02; IFNK; ENSG00000147896; CTA
AFELPQEFLQY

SEQ ID NO: 30195 - protein, 10 aa, Homo sapiens
  misc_feature: Table A; Target 30195; HLA-A*23:01; IFNK; ENSG00000147896; CTA
AFNIFSQHTF

SEQ ID NO: 30196 - protein, 10 aa, Homo sapiens
  misc_feature: Table A; Target 30196; HLA-A*24:02; IFNK; ENSG00000147896; CTA
AFNIFSQHTF

SEQ ID NO: 30197 - protein, 10 aa, Homo sapiens
  misc_feature: Table A; Target 30197; HLA-A*30:02; IFNK; ENSG00000147896; CTA
AFNIFSQHTF

SEQ ID NO: 30198 - protein, 10 aa, Homo sapiens
  misc_feature: Table A; Target 30198; HLA-A*32:01; IFNK; ENSG00000147896; CTA
AFNIFSQHTF

SEQ ID NO: 30199 - protein, 10 aa, Homo sapiens
  misc_feature: Table A; Target 30199; HLA-A*23:01; IFNK; ENSG00000147896; CTA
AFYEMSLQAF

SEQ ID NO: 30200 - protein, 9 aa, Homo sapiens
  misc_feature: Table A; Target 30200; HLA-B*27:05; IFNK; ENSG00000147896; CTA
ARVPQLSSL

SEQ ID NO: 30201 - protein, 9 aa, Homo sapiens
  misc_feature: Table A; Target 30201; HLA-C*02:02; IFNK; ENSG00000147896; CTA
ARVPQLSSL

SEQ ID NO: 30202 - protein, 9 aa, Homo sapiens
  misc_feature: Table A; Target 30202; HLA-C*16:04; IFNK; ENSG00000147896; CTA
ARVPQLSSL

SEQ ID NO: 30203 - protein, 8 aa, Homo sapiens
  misc_feature: Table A; Target 30203; HLA-B*51:01; IFNK; ENSG00000147896; CTA
CAWEIVRV

SEQ ID NO: 30204 - protein, 9 aa, Homo sapiens
  misc_feature: Table A; Target 30204; HLA-A*33:01; IFNK; ENSG00000147896; CTA
CNLLNVHLR

SEQ ID NO: 30205 - protein, 9 aa, Homo sapiens
  misc_feature: Table A; Target 30205; HLA-A*33:01; IFNK; ENSG00000147896; CTA
DCNLLNVHL

SEQ ID NO: 30206 - protein, 10 aa, Homo sapiens
  misc_feature: Table A; Target 30206; HLA-A*33:01; IFNK; ENSG00000147896; CTA
DCNLLNVHLR

SEQ ID NO: 30207 - protein, 11 aa, Homo sapiens
  misc_feature: Table A; Target 30207; HLA-A*33:01; IFNK; ENSG00000147896; CTA
DCNLLNVHLRR

SEQ ID NO: 30208 - protein, 9 aa, Homo sapiens
  misc_feature: Table A; Target 30208; HLA-A*33:01; IFNK; ENSG00000147896; CTA
DIKKAFYEM

SEQ ID NO: 30209 - protein, 9 aa, Homo sapiens
  misc_feature: Table A; Target 30209; HLA-B*08:01; IFNK; ENSG00000147896; CTA
DIKKAFYEM

SEQ ID NO: 30210 - protein, 10 aa, Homo sapiens
  misc_feature: Table A; Target 30210; HLA-B*08:01; IFNK; ENSG00000147896; CTA
DMKEMKENEM

SEQ ID NO: 30211 - protein, 10 aa, Homo sapiens
  misc_feature: Table A; Target 30211; HLA-A*25:01; IFNK; ENSG00000147896; CTA
EARVPQLSSL

SEQ ID NO: 30212 - protein, 9 aa, Homo sapiens
  misc_feature: Table A; Target 30212; HLA-C*14:02; IFNK; ENSG00000147896; CTA
EFLQYTQPM

SEQ ID NO: 30213 - protein, 11 aa, Homo sapiens
  misc_feature: Table A; Target 30213; HLA-A*33:01; IFNK; ENSG00000147896; CTA
EFLQYTQPMKR

SEQ ID NO: 30214 - protein, 9 aa, Homo sapiens
  misc_feature: Table A; Target 30214; HLA-A*01:01; IFNK; ENSG00000147896; CTA
ELPQEFLQY

SEQ ID NO: 30215 - protein, 9 aa, Homo sapiens
  misc_feature: Table A; Target 30215; HLA-A*25:01; IFNK; ENSG00000147896; CTA
ELPQEFLQY

SEQ ID NO: 30216 - protein, 9 aa, Homo sapiens
  misc_feature: Table A; Target 30216; HLA-A*26:01; IFNK; ENSG00000147896; CTA
ELPQEFLQY

SEQ ID NO: 30217 - protein, 9 aa, Homo sapiens
  misc_feature: Table A; Target 30217; HLA-A*29:02; IFNK; ENSG00000147896; CTA
ELPQEFLQY

SEQ ID NO: 30218 - protein, 8 aa, Homo sapiens
  misc_feature: Table A; Target 30218; HLA-A*33:03; IFNK; ENSG00000147896; CTA
EMKPSEAR

SEQ ID NO: 30219 - protein, 8 aa, Homo sapiens
  misc_feature: Table A; Target 30219; HLA-B*49:01; IFNK; ENSG00000147896; CTA
FELPQEFL

SEQ ID NO: 30220 - protein, 10 aa, Homo sapiens
  misc_feature: Table A; Target 30220; HLA-A*29:02; IFNK; ENSG00000147896; CTA
FELPQEFLQY

SEQ ID NO: 30221 - protein, 10 aa, Homo sapiens
  misc_feature: Table A; Target 30221; HLA-B*18:01; IFNK; ENSG00000147896; CTA
FELPQEFLQY

SEQ ID NO: 30222 - protein, 10 aa, Homo sapiens
  misc_feature: Table A; Target 30222; HLA-B*44:02; IFNK; ENSG00000147896; CTA
FELPQEFLQY

SEQ ID NO: 30223 - protein, 10 aa, Homo sapiens
  misc_feature: Table A; Target 30223; HLA-B*44:03; IFNK; ENSG00000147896; CTA
FELPQEFLQY

SEQ ID NO: 30224 - protein, 8 aa, Homo sapiens
  misc_feature: Table A; Target 30224; HLA-C*03:04; IFNK; ENSG00000147896; CTA
FIAGTLSL

SEQ ID NO: 30225 - protein, 9 aa, Homo sapiens
  misc_feature: Table A; Target 30225; HLA-A*03:02; IFNK; ENSG00000147896; CTA
FLQYTQPMK

SEQ ID NO: 30226 - protein, 11 aa, Homo sapiens
  misc_feature: Table A; Target 30226; HLA-A*29:02; IFNK; ENSG00000147896; CTA
FNIFSQHTFKY

SEQ ID NO: 30227 - protein, 9 aa, Homo sapiens
  misc_feature: Table A; Target 30227; HLA-B*57:01; IFNK; ENSG00000147896; CTA
FSQHTFKYW

SEQ ID NO: 30228 - protein, 9 aa, Homo sapiens
  misc_feature: Table A; Target 30228; HLA-A*23:01; IFNK; ENSG00000147896; CTA
FYEMSLQAF

SEQ ID NO: 30229 - protein, 9 aa, Homo sapiens
  misc_feature: Table A; Target 30229; HLA-A*24:02; IFNK; ENSG00000147896; CTA
FYEMSLQAF

SEQ ID NO: 30230 - protein, 9 aa, Homo sapiens
  misc_feature: Table A; Target 30230; HLA-B*35:03; IFNK; ENSG00000147896; CTA
FYEMSLQAF

SEQ ID NO: 30231 - protein, 9 aa, Homo sapiens
  misc_feature: Table A; Target 30231; HLA-C*04:01; IFNK; ENSG00000147896; CTA
FYEMSLQAF

SEQ ID NO: 30232 - protein, 9 aa, Homo sapiens
  misc_feature: Table A; Target 30232; HLA-C*14:02; IFNK; ENSG00000147896; CTA
FYEMSLQAF

SEQ ID NO: 30233 - protein, 8 aa, Homo sapiens
  misc_feature: Table A; Target 30233; HLA-A*01:01; IFNK; ENSG00000147896; CTA
GLDQQAEY

SEQ ID NO: 30234 - protein, 9 aa, Homo sapiens
  misc_feature: Table A; Target 30234; HLA-A*02:01; IFNK; ENSG00000147896; CTA
GLDQQAEYL

SEQ ID NO: 30235 - protein, 9 aa, Homo sapiens
  misc_feature: Table A; Target 30235; HLA-A*02:07; IFNK; ENSG00000147896; CTA
GLDQQAEYL

SEQ ID NO: 30236 - protein, 9 aa, Homo sapiens
  misc_feature: Table A; Target 30236; HLA-B*38:01; IFNK; ENSG00000147896; CTA
GLDQQAEYL

SEQ ID NO: 30237 - protein, 9 aa, Homo sapiens
  misc_feature: Table A; Target 30237; HLA-B*55:01; IFNK; ENSG00000147896; CTA
GLDQQAEYL

SEQ ID NO: 30238 - protein, 9 aa, Homo sapiens
  misc_feature: Table A; Target 30238; HLA-C*05:01; IFNK; ENSG00000147896; CTA
GLDQQAEYL

SEQ ID NO: 30239 - protein, 9 aa, Homo sapiens
  misc_feature: Table A; Target 30239; HLA-A*02:03; IFNK; ENSG00000147896; CTA
HLKQIQIGL

SEQ ID NO: 30240 - protein, 9 aa, Homo sapiens
  misc_feature: Table A; Target 30240; HLA-A*02:04; IFNK; ENSG00000147896; CTA
HLKQIQIGL

SEQ ID NO: 30241 - protein, 9 aa, Homo sapiens
  misc_feature: Table A; Target 30241; HLA-B*08:01; IFNK; ENSG00000147896; CTA
HLKQIQIGL

SEQ ID NO: 30242 - protein, 9 aa, Homo sapiens
  misc_feature: Table A; Target 30242; HLA-A*25:01; IFNK; ENSG00000147896; CTA
HLSSMSNSF

SEQ ID NO: 30243 - protein, 9 aa, Homo sapiens
  misc_feature: Table A; Target 30243; HLA-A*26:01; IFNK; ENSG00000147896; CTA
HLSSMSNSF

SEQ ID NO: 30244 - protein, 9 aa, Homo sapiens
  misc_feature: Table A; Target 30244; HLA-A*32:01; IFNK; ENSG00000147896; CTA
HLSSMSNSF

SEQ ID NO: 30245 - protein, 9 aa, Homo sapiens
  misc_feature: Table A; Target 30245; HLA-B*15:01; IFNK; ENSG00000147896; CTA
HLSSMSNSF

SEQ ID NO: 30246 - protein, 9 aa, Homo sapiens
  misc_feature: Table A; Target 30246; HLA-B*15:03; IFNK; ENSG00000147896; CTA
HLSSMSNSF

SEQ ID NO: 30247 - protein, 9 aa, Homo sapiens
  misc_feature: Table A; Target 30247; HLA-B*27:05; IFNK; ENSG00000147896; CTA
HLSSMSNSF

SEQ ID NO: 30248 - protein, 9 aa, Homo sapiens
  misc_feature: Table A; Target 30248; HLA-B*35:01; IFNK; ENSG00000147896; CTA
HLSSMSNSF

SEQ ID NO: 30249 - protein, 9 aa, Homo sapiens
  misc_feature: Table A; Target 30249; HLA-B*37:01; IFNK; ENSG00000147896; CTA
HLSSMSNSF

SEQ ID NO: 30250 - protein, 9 aa, Homo sapiens
  misc_feature: Table A; Target 30250; HLA-B*38:01; IFNK; ENSG00000147896; CTA
HLSSMSNSF

SEQ ID NO: 30251 - protein, 9 aa, Homo sapiens
  misc_feature: Table A; Target 30251; HLA-C*07:04; IFNK; ENSG00000147896; CTA
HLSSMSNSF

SEQ ID NO: 30252 - protein, 9 aa, Homo sapiens
  misc_feature: Table A; Target 30252; HLA-A*23:01; IFNK; ENSG00000147896; CTA
IAFELPQEF

SEQ ID NO: 30253 - protein, 9 aa, Homo sapiens
  misc_feature: Table A; Target 30253; HLA-A*24:02; IFNK; ENSG00000147896; CTA
IAFELPQEF

SEQ ID NO: 30254 - protein, 9 aa, Homo sapiens
  misc_feature: Table A; Target 30254; HLA-A*25:01; IFNK; ENSG00000147896; CTA
IAFELPQEF

SEQ ID NO: 30255 - protein, 9 aa, Homo sapiens
  misc_feature: Table A; Target 30255; HLA-A*26:01; IFNK; ENSG00000147896; CTA
IAFELPQEF

SEQ ID NO: 30256 - protein, 9 aa, Homo sapiens
  misc_feature: Table A; Target 30256; HLA-A*29:02; IFNK; ENSG00000147896; CTA
IAFELPQEF

SEQ ID NO: 30257 - protein, 9 aa, Homo sapiens
  misc_feature: Table A; Target 30257; HLA-A*32:01; IFNK; ENSG00000147896; CTA
IAFELPQEF

SEQ ID NO: 30258 - protein, 9 aa, Homo sapiens
  misc_feature: Table A; Target 30258; HLA-B*15:01; IFNK; ENSG00000147896; CTA
IAFELPQEF

SEQ ID NO: 30259 - protein, 9 aa, Homo sapiens
  misc_feature: Table A; Target 30259; HLA-B*15:03; IFNK; ENSG00000147896; CTA
IAFELPQEF

SEQ ID NO: 30260 - protein, 9 aa, Homo sapiens
  misc_feature: Table A; Target 30260; HLA-B*18:01; IFNK; ENSG00000147896; CTA
IAFELPQEF

SEQ ID NO: 30261 - protein, 9 aa, Homo sapiens
  misc_feature: Table A; Target 30261; HLA-B*27:02; IFNK; ENSG00000147896; CTA
IAFELPQEF

SEQ ID NO: 30262 - protein, 9 aa, Homo sapiens
  misc_feature: Table A; Target 30262; HLA-B*35:01; IFNK; ENSG00000147896; CTA
IAFELPQEF

SEQ ID NO: 30263 - protein, 9 aa, Homo sapiens
  misc_feature: Table A; Target 30263; HLA-B*35:03; IFNK; ENSG00000147896; CTA
IAFELPQEF

SEQ ID NO: 30264 - protein, 9 aa, Homo sapiens
  misc_feature: Table A; Target 30264; HLA-B*38:01; IFNK; ENSG00000147896; CTA
IAFELPQEF

SEQ ID NO: 30265 - protein, 9 aa, Homo sapiens
  misc_feature: Table A; Target 30265; HLA-B*46:01; IFNK; ENSG00000147896; CTA
IAFELPQEF

SEQ ID NO: 30266 - protein, 9 aa, Homo sapiens
  misc_feature: Table A; Target 30266; HLA-B*51:01; IFNK; ENSG00000147896; CTA
IAFELPQEF

SEQ ID NO: 30267 - protein, 9 aa, Homo sapiens
  misc_feature: Table A; Target 30267; HLA-B*54:01; IFNK; ENSG00000147896; CTA
IAFELPQEF

SEQ ID NO: 30268 - protein, 9 aa, Homo sapiens
  misc_feature: Table A; Target 30268; HLA-B*57:01; IFNK; ENSG00000147896; CTA
IAFELPQEF

SEQ ID NO: 30269 - protein, 9 aa, Homo sapiens
  misc_feature: Table A; Target 30269; HLA-B*58:01; IFNK; ENSG00000147896; CTA
IAFELPQEF

SEQ ID NO: 30270 - protein, 9 aa, Homo sapiens
  misc_feature: Table A; Target 30270; HLA-C*02:02; IFNK; ENSG00000147896; CTA
IAFELPQEF

SEQ ID NO: 30271 - protein, 9 aa, Homo sapiens
  misc_feature: Table A; Target 30271; HLA-C*03:03; IFNK; ENSG00000147896; CTA
IAFELPQEF

SEQ ID NO: 30272 - protein, 9 aa, Homo sapiens
  misc_feature: Table A; Target 30272; HLA-C*03:04; IFNK; ENSG00000147896; CTA
IAFELPQEF

SEQ ID NO: 30273 - protein, 9 aa, Homo sapiens
  misc_feature: Table A; Target 30273; HLA-C*05:01; IFNK; ENSG00000147896; CTA
IAFELPQEF

SEQ ID NO: 30274 - protein, 9 aa, Homo sapiens
  misc_feature: Table A; Target 30274; HLA-C*07:04; IFNK; ENSG00000147896; CTA
IAFELPQEF

SEQ ID NO: 30275 - protein, 9 aa, Homo sapiens
  misc_feature: Table A; Target 30275; HLA-C*07:06; IFNK; ENSG00000147896; CTA
IAFELPQEF

SEQ ID NO: 30276 - protein, 9 aa, Homo sapiens
  misc_feature: Table A; Target 30276; HLA-C*12:03; IFNK; ENSG00000147896; CTA
IAFELPQEF

SEQ ID NO: 30277 - protein, 9 aa, Homo sapiens
  misc_feature: Table A; Target 30277; HLA-C*16:01; IFNK; ENSG00000147896; CTA
IAFELPQEF

SEQ ID NO: 30278 - protein, 9 aa, Homo sapiens
  misc_feature: Table A; Target 30278; HLA-C*16:02; IFNK; ENSG00000147896; CTA
IAFELPQEF

SEQ ID NO: 30279 - protein, 9 aa, Homo sapiens
  misc_feature: Table A; Target 30279; HLA-C*16:04; IFNK; ENSG00000147896; CTA
IAFELPQEF

SEQ ID NO: 30280 - protein, 9 aa, Homo sapiens
  misc_feature: Table A; Target 30280; HLA-A*23:01; IFNK; ENSG00000147896; CTA
IFIAGTLSL

SEQ ID NO: 30281 - protein, 9 aa, Homo sapiens
  misc_feature: Table A; Target 30281; HLA-A*24:02; IFNK; ENSG00000147896; CTA
IFIAGTLSL

SEQ ID NO: 30282 - protein, 9 aa, Homo sapiens
  misc_feature: Table A; Target 30282; HLA-A*29:02; IFNK; ENSG00000147896; CTA
IFIAGTLSL

SEQ ID NO: 30283 - protein, 9 aa, Homo sapiens
  misc_feature: Table A; Target 30283; HLA-B*46:01; IFNK; ENSG00000147896; CTA
IFIAGTLSL

SEQ ID NO: 30284 - protein, 9 aa, Homo sapiens
  misc_feature: Table A; Target 30284; HLA-C*01:02; IFNK; ENSG00000147896; CTA
IFIAGTLSL

SEQ ID NO: 30285 - protein, 9 aa, Homo sapiens
  misc_feature: Table A; Target 30285; HLA-C*03:03; IFNK; ENSG00000147896; CTA
IFIAGTLSL

SEQ ID NO: 30286 - protein, 9 aa, Homo sapiens
  misc_feature: Table A; Target 30286; HLA-C*03:04; IFNK; ENSG00000147896; CTA
IFIAGTLSL

SEQ ID NO: 30287 - protein, 9 aa, Homo sapiens
  misc_feature: Table A; Target 30287; HLA-C*14:02; IFNK; ENSG00000147896; CTA
IFIAGTLSL

SEQ ID NO: 30288 - protein, 9 aa, Homo sapiens
  misc_feature: Table A; Target 30288; HLA-A*24:02; IFNK; ENSG00000147896; CTA
IFSQHTFKY

SEQ ID NO: 30289 - protein, 9 aa, Homo sapiens
  misc_feature: Table A; Target 30289; HLA-A*29:02; IFNK; ENSG00000147896; CTA
IFSQHTFKY

SEQ ID NO: 30290 - protein, 9 aa, Homo sapiens
  misc_feature: Table A; Target 30290; HLA-A*29:02; IFNK; ENSG00000147896; CTA
IGLDQQAEY

SEQ ID NO: 30291 - protein, 9 aa, Homo sapiens
  misc_feature: Table A; Target 30291; HLA-A*30:02; IFNK; ENSG00000147896; CTA
IGLDQQAEY

SEQ ID NO: 30292 - protein, 9 aa, Homo sapiens
  misc_feature: Table A; Target 30292; HLA-B*15:01; IFNK; ENSG00000147896; CTA
IGLDQQAEY

SEQ ID NO: 30293 - protein, 9 aa, Homo sapiens
  misc_feature: Table A; Target 30293; HLA-B*15:03; IFNK; ENSG00000147896; CTA
IGLDQQAEY

SEQ ID NO: 30294 - protein, 9 aa, Homo sapiens
  misc_feature: Table A; Target 30294; HLA-B*35:01; IFNK; ENSG00000147896; CTA
IGLDQQAEY

SEQ ID NO: 30295 - protein, 9 aa, Homo sapiens
  misc_feature: Table A; Target 30295; HLA-B*46:01; IFNK; ENSG00000147896; CTA
IGLDQQAEY

SEQ ID NO: 30296 - protein, 9 aa, Homo sapiens
  misc_feature: Table A; Target 30296; HLA-C*14:02; IFNK; ENSG00000147896; CTA
IGLDQQAEY

SEQ ID NO: 30297 - protein, 9 aa, Homo sapiens
  misc_feature: Table A; Target 30297; HLA-B*13:02; IFNK; ENSG00000147896; CTA
IQIGLDQQA

SEQ ID NO: 30298 - protein, 11 aa, Homo sapiens
  misc_feature: Table A; Target 30298; HLA-A*23:01; IFNK; ENSG00000147896; CTA
IQIGLDQQAEY

SEQ ID NO: 30299 - protein, 11 aa, Homo sapiens
  misc_feature: Table A; Target 30299; HLA-A*26:01; IFNK; ENSG00000147896; CTA
IQIGLDQQAEY

SEQ ID NO: 30300 - protein, 11 aa, Homo sapiens
  misc_feature: Table A; Target 30300; HLA-A*29:02; IFNK; ENSG00000147896; CTA
IQIGLDQQAEY

SEQ ID NO: 30301 - protein, 11 aa, Homo sapiens
  misc_feature: Table A; Target 30301; HLA-A*30:02; IFNK; ENSG00000147896; CTA
IQIGLDQQAEY

SEQ ID NO: 30302 - protein, 11 aa, Homo sapiens
  misc_feature: Table A; Target 30302; HLA-A*32:01; IFNK; ENSG00000147896; CTA
IQIGLDQQAEY

SEQ ID NO: 30303 - protein, 11 aa, Homo sapiens
  misc_feature: Table A; Target 30303; HLA-B*15:01; IFNK; ENSG00000147896; CTA
IQIGLDQQAEY

SEQ ID NO: 30304 - protein, 11 aa, Homo sapiens
  misc_feature: Table A; Target 30304; HLA-B*15:03; IFNK; ENSG00000147896; CTA
IQIGLDQQAEY

SEQ ID NO: 30305 - protein, 11 aa, Homo sapiens
  misc_feature: Table A; Target 30305; HLA-B*46:01; IFNK; ENSG00000147896; CTA
IQIGLDQQAEY

SEQ ID NO: 30306 - protein, 11 aa, Homo sapiens
  misc_feature: Table A; Target 30306; HLA-B*58:01; IFNK; ENSG00000147896; CTA
IQIGLDQQAEY

SEQ ID NO: 30307 - protein, 11 aa, Homo sapiens
  misc_feature: Table A; Target 30307; HLA-C*02:02; IFNK; ENSG00000147896; CTA
IQIGLDQQAEY

SEQ ID NO: 30308 - protein, 11 aa, Homo sapiens
  misc_feature: Table A; Target 30308; HLA-C*07:04; IFNK; ENSG00000147896; CTA
IQIGLDQQAEY

SEQ ID NO: 30309 - protein, 11 aa, Homo sapiens
  misc_feature: Table A; Target 30309; HLA-C*16:04; IFNK; ENSG00000147896; CTA
IQIGLDQQAEY

SEQ ID NO: 30310 - protein, 8 aa, Homo sapiens
  misc_feature: Table A; Target 30310; HLA-B*37:01; IFNK; ENSG00000147896; CTA
KEMKENEM

SEQ ID NO: 30311 - protein, 10 aa, Homo sapiens
  misc_feature: Table A; Target 30311; HLA-B*07:02; IFNK; ENSG00000147896; CTA
KPSEARVPQL

SEQ ID NO: 30312 - protein, 10 aa, Homo sapiens
  misc_feature: Table A; Target 30312; HLA-C*07:02; IFNK; ENSG00000147896; CTA
KPSEARVPQL

SEQ ID NO: 30313 - protein, 9 aa, Homo sapiens
  misc_feature: Table A; Target 30313; HLA-A*24:02; IFNK; ENSG00000147896; CTA
KYSDCAWEI

SEQ ID NO: 30314 - protein, 9 aa, Homo sapiens
  misc_feature: Table A; Target 30314; HLA-B*49:01; IFNK; ENSG00000147896; CTA
LEILMGIFI

SEQ ID NO: 30315 - protein, 8 aa, Homo sapiens
  misc_feature: Table A; Target 30315; HLA-B*18:01; IFNK; ENSG00000147896; CTA
LPQEFLQY

SEQ ID NO: 30316 - protein, 8 aa, Homo sapiens
  misc_feature: Table A; Target 30316; HLA-B*35:01; IFNK; ENSG00000147896; CTA
LPQEFLQY

SEQ ID NO: 30317 - protein, 9 aa, Homo sapiens
  misc_feature: Table A; Target 30317; HLA-B*51:01; IFNK; ENSG00000147896; CTA
LPQEFLQYT

SEQ ID NO: 30318 - protein, 9 aa, Homo sapiens
  misc_feature: Table A; Target 30318; HLA-A*03:01; IFNK; ENSG00000147896; CTA
LQYTQPMKR

SEQ ID NO: 30319 - protein, 9 aa, Homo sapiens
  misc_feature: Table A; Target 30319; HLA-A*31:01; IFNK; ENSG00000147896; CTA
LQYTQPMKR

SEQ ID NO: 30320 - protein, 9 aa, Homo sapiens
  misc_feature: Table A; Target 30320; HLA-C*03:04; IFNK; ENSG00000147896; CTA
MGIFIAGTL

SEQ ID NO: 30321 - protein, 9 aa, Homo sapiens
  misc_feature: Table A; Target 30321; HLA-B*54:01; IFNK; ENSG00000147896; CTA
MSNSFPVEC

SEQ ID NO: 30322 - protein, 9 aa, Homo sapiens
  misc_feature: Table A; Target 30322; HLA-C*12:03; IFNK; ENSG00000147896; CTA
MSNSFPVEC

SEQ ID NO: 30323 - protein, 8 aa, Homo sapiens
  misc_feature: Table A; Target 30323; HLA-B*18:01; IFNK; ENSG00000147896; CTA
NEMKPSEA

SEQ ID NO: 30324 - protein, 9 aa, Homo sapiens
  misc_feature: Table A; Target 30324; HLA-B*18:01; IFNK; ENSG00000147896; CTA
NENEDMKEM

SEQ ID NO: 30325 - protein, 9 aa, Homo sapiens
  misc_feature: Table A; Target 30325; HLA-B*44:02; IFNK; ENSG00000147896; CTA
NENEDMKEM

SEQ ID NO: 30326 - protein, 9 aa, Homo sapiens
  misc_feature: Table A; Target 30326; HLA-B*44:03; IFNK; ENSG00000147896; CTA
NENEDMKEM

SEQ ID NO: 30327 - protein, 9 aa, Homo sapiens
  misc_feature: Table A; Target 30327; HLA-C*16:04; IFNK; ENSG00000147896; CTA
NENEDMKEM

SEQ ID NO: 30328 - protein, 8 aa, Homo sapiens
  misc_feature: Table A; Target 30328; HLA-A*32:01; IFNK; ENSG00000147896; CTA
NIFSQHTF

SEQ ID NO: 30329 - protein, 9 aa, Homo sapiens
  misc_feature: Table A; Target 30329; HLA-A*03:01; IFNK; ENSG00000147896; CTA
NIFSQHTFK

SEQ ID NO: 30330 - protein, 10 aa, Homo sapiens
  misc_feature: Table A; Target 30330; HLA-A*29:02; IFNK; ENSG00000147896; CTA
NIFSQHTFKY

SEQ ID NO: 30331 - protein, 9 aa, Homo sapiens
  misc_feature: Table A; Target 30331; HLA-A*31:01; IFNK; ENSG00000147896; CTA
NSFPVECLR

SEQ ID NO: 30332 - protein, 9 aa, Homo sapiens
  misc_feature: Table A; Target 30332; HLA-A*33:01; IFNK; ENSG00000147896; CTA
NSFPVECLR

SEQ ID NO: 30333 - protein, 9 aa, Homo sapiens
  misc_feature: Table A; Target 30333; HLA-C*07:06; IFNK; ENSG00000147896; CTA
QAFNIFSQH

SEQ ID NO: 30334 - protein, 10 aa, Homo sapiens
  misc_feature: Table A; Target 30334; HLA-A*01:01; IFNK; ENSG00000147896; CTA
QIGLDQQAEY

SEQ ID NO: 30335 - protein, 10 aa, Homo sapiens
  misc_feature: Table A; Target 30335; HLA-A*30:02; IFNK; ENSG00000147896; CTA
QIGLDQQAEY

SEQ ID NO: 30336 - protein, 10 aa, Homo sapiens
  misc_feature: Table A; Target 30336; HLA-B*13:02; IFNK; ENSG00000147896; CTA
QQAEYLNQCL

SEQ ID NO: 30337 - protein, 10 aa, Homo sapiens
  misc_feature: Table A; Target 30337; HLA-B*27:05; IFNK; ENSG00000147896; CTA
QQAEYLNQCL

SEQ ID NO: 30338 - protein, 10 aa, Homo sapiens
  misc_feature: Table A; Target 30338; HLA-B*38:01; IFNK; ENSG00000147896; CTA
QQAEYLNQCL

SEQ ID NO: 30339 - protein, 8 aa, Homo sapiens
  misc_feature: Table A; Target 30339; HLA-B*18:01; IFNK; ENSG00000147896; CTA
RENIAFEL

SEQ ID NO: 30340 - protein, 8 aa, Homo sapiens
  misc_feature: Table A; Target 30340; HLA-B*37:01; IFNK; ENSG00000147896; CTA
RENIAFEL

SEQ ID NO: 30341 - protein, 10 aa, Homo sapiens
  misc_feature: Table A; Target 30341; HLA-B*38:01; IFNK; ENSG00000147896; CTA
RHLSSMSNSF

SEQ ID NO: 30342 - protein, 9 aa, Homo sapiens
  misc_feature: Table A; Target 30342; HLA-A*03:01; IFNK; ENSG00000147896; CTA
RIDNFLKEK

SEQ ID NO: 30343 - protein, 9 aa, Homo sapiens
  misc_feature: Table A; Target 30343; HLA-A*03:02; IFNK; ENSG00000147896; CTA
RIDNFLKEK

SEQ ID NO: 30344 - protein, 11 aa, Homo sapiens
  misc_feature: Table A; Target 30344; HLA-A*31:01; IFNK; ENSG00000147896; CTA
RVPQLSSLELR

SEQ ID NO: 30345 - protein, 9 aa, Homo sapiens
  misc_feature: Table A; Target 30345; HLA-A*24:02; IFNK; ENSG00000147896; CTA
RYFHRIDNF

SEQ ID NO: 30346 - protein, 8 aa, Homo sapiens
  misc_feature: Table A; Target 30346; HLA-A*30:01; IFNK; ENSG00000147896; CTA
SEARVPQL

SEQ ID NO: 30347 - protein, 8 aa, Homo sapiens
  misc_feature: Table A; Target 30347; HLA-B*18:01; IFNK; ENSG00000147896; CTA
SEARVPQL

SEQ ID NO: 30348 - protein, 8 aa, Homo sapiens
  misc_feature: Table A; Target 30348; HLA-B*37:01; IFNK; ENSG00000147896; CTA
SEARVPQL

SEQ ID NO: 30349 - protein, 8 aa, Homo sapiens
  misc_feature: Table A; Target 30349; HLA-B*40:01; IFNK; ENSG00000147896; CTA
SEARVPQL

SEQ ID NO: 30350 - protein, 8 aa, Homo sapiens
  misc_feature: Table A; Target 30350; HLA-B*44:02; IFNK; ENSG00000147896; CTA
SEARVPQL

SEQ ID NO: 30351 - protein, 8 aa, Homo sapiens
  misc_feature: Table A; Target 30351; HLA-B*44:03; IFNK; ENSG00000147896; CTA
SEARVPQL

SEQ ID NO: 30352 - protein, 8 aa, Homo sapiens
  misc_feature: Table A; Target 30352; HLA-B*49:01; IFNK; ENSG00000147896; CTA
SEARVPQL

SEQ ID NO: 30353 - protein, 11 aa, Homo sapiens
  misc_feature: Table A; Target 30353; HLA-A*30:01; IFNK; ENSG00000147896; CTA
SEARVPQLSSL

SEQ ID NO: 30354 - protein, 11 aa, Homo sapiens
  misc_feature: Table A; Target 30354; HLA-B*40:01; IFNK; ENSG00000147896; CTA
SEARVPQLSSL

SEQ ID NO: 30355 - protein, 9 aa, Homo sapiens
  misc_feature: Table A; Target 30355; HLA-A*02:01; IFNK; ENSG00000147896; CTA
SLDCNLLNV

SEQ ID NO: 30356 - protein, 9 aa, Homo sapiens
  misc_feature: Table A; Target 30356; HLA-A*02:07; IFNK; ENSG00000147896; CTA
SLDCNLLNV

SEQ ID NO: 30357 - protein, 9 aa, Homo sapiens
  misc_feature: Table A; Target 30357; HLA-B*57:01; IFNK; ENSG00000147896; CTA
SSLELRRYF

SEQ ID NO: 30358 - protein, 9 aa, Homo sapiens
  misc_feature: Table A; Target 30358; HLA-A*11:01; IFNK; ENSG00000147896; CTA
SSMSNSFPV

SEQ ID NO: 30359 - protein, 9 aa, Homo sapiens
  misc_feature: Table A; Target 30359; HLA-A*03:01; IFNK; ENSG00000147896; CTA
STKPDMIQK

SEQ ID NO: 30360 - protein, 9 aa, Homo sapiens
  misc_feature: Table A; Target 30360; HLA-A*03:02; IFNK; ENSG00000147896; CTA
STKPDMIQK

SEQ ID NO: 30361 - protein, 9 aa, Homo sapiens
  misc_feature: Table A; Target 30361; HLA-A*11:01; IFNK; ENSG00000147896; CTA
STKPDMIQK

SEQ ID NO: 30362 - protein, 9 aa, Homo sapiens
  misc_feature: Table A; Target 30362; HLA-A*31:01; IFNK; ENSG00000147896; CTA
STKPDMIQK

SEQ ID NO: 30363 - protein, 9 aa, Homo sapiens
  misc_feature: Table A; Target 30363; HLA-A*33:01; IFNK; ENSG00000147896; CTA
STKPDMIQK

SEQ ID NO: 30364 - protein, 9 aa, Homo sapiens
  misc_feature: Table A; Target 30364; HLA-A*33:03; IFNK; ENSG00000147896; CTA
STKPDMIQK

SEQ ID NO: 30365 - protein, 9 aa, Homo sapiens
  misc_feature: Table A; Target 30365; HLA-A*68:01; IFNK; ENSG00000147896; CTA
STKPDMIQK

SEQ ID NO: 30366 - protein, 9 aa, Homo sapiens
  misc_feature: Table A; Target 30366; HLA-B*13:02; IFNK; ENSG00000147896; CTA
STKPDMIQK

SEQ ID NO: 30367 - protein, 9 aa, Homo sapiens
  misc_feature: Table A; Target 30367; HLA-B*40:02; IFNK; ENSG00000147896; CTA
STKPDMIQK

SEQ ID NO: 30368 - protein, 9 aa, Homo sapiens
  misc_feature: Table A; Target 30368; HLA-B*57:01; IFNK; ENSG00000147896; CTA
STKPDMIQK

SEQ ID NO: 30369 - protein, 9 aa, Homo sapiens
  misc_feature: Table A; Target 30369; HLA-C*07:06; IFNK; ENSG00000147896; CTA
STKPDMIQK

SEQ ID NO: 30370 - protein, 9 aa, Homo sapiens
  misc_feature: Table A; Target 30370; HLA-B*07:02; IFNK; ENSG00000147896; CTA
VPQLSSLEL

SEQ ID NO: 30371 - protein, 9 aa, Homo sapiens
  misc_feature: Table A; Target 30371; HLA-B*08:01; IFNK; ENSG00000147896; CTA
VPQLSSLEL

SEQ ID NO: 30372 - protein, 9 aa, Homo sapiens
  misc_feature: Table A; Target 30372; HLA-B*35:01; IFNK; ENSG00000147896; CTA
VPQLSSLEL

SEQ ID NO: 30373 - protein, 9 aa, Homo sapiens
  misc_feature: Table A; Target 30373; HLA-B*35:03; IFNK; ENSG00000147896; CTA
VPQLSSLEL

SEQ ID NO: 30374 - protein, 9 aa, Homo sapiens
  misc_feature: Table A; Target 30374; HLA-C*07:02; IFNK; ENSG00000147896; CTA
VPQLSSLEL

SEQ ID NO: 30375 - protein, 8 aa, Homo sapiens
  misc_feature: Table A; Target 30375; HLA-B*49:01; IFNK; ENSG00000147896; CTA
WEIVRVEI

SEQ ID NO: 30376 - protein, 8 aa, Homo sapiens
  misc_feature: Table A; Target 30376; HLA-A*30:01; IFNK; ENSG00000147896; CTA
YEMSLQAF

SEQ ID NO: 30377 - protein, 8 aa, Homo sapiens
  misc_feature: Table A; Target 30377; HLA-B*18:01; IFNK; ENSG00000147896; CTA
YEMSLQAF

SEQ ID NO: 30378 - protein, 8 aa, Homo sapiens
  misc_feature: Table A; Target 30378; HLA-B*37:01; IFNK; ENSG00000147896; CTA
YEMSLQAF

SEQ ID NO: 30379 - protein, 8 aa, Homo sapiens
  misc_feature: Table A; Target 30379; HLA-B*40:01; IFNK; ENSG00000147896; CTA
YEMSLQAF

SEQ ID NO: 30380 - protein, 8 aa, Homo sapiens
  misc_feature: Table A; Target 30380; HLA-B*40:02; IFNK; ENSG00000147896; CTA
YEMSLQAF

SEQ ID NO: 30381 - protein, 8 aa, Homo sapiens
  misc_feature: Table A; Target 30381; HLA-B*44:02; IFNK; ENSG00000147896; CTA
YEMSLQAF

SEQ ID NO: 30382 - protein, 8 aa, Homo sapiens
  misc_feature: Table A; Target 30382; HLA-B*44:03; IFNK; ENSG00000147896; CTA
YEMSLQAF

SEQ ID NO: 30383 - protein, 8 aa, Homo sapiens
  misc_feature: Table A; Target 30383; HLA-B*49:01; IFNK; ENSG00000147896; CTA
YEMSLQAF

SEQ ID NO: 30384 - protein, 8 aa, Homo sapiens
  misc_feature: Table A; Target 30384; HLA-C*16:04; IFNK; ENSG00000147896; CTA
YEMSLQAF

SEQ ID NO: 30385 - protein, 10 aa, Homo sapiens
  misc_feature: Table A; Target 30385; HLA-B*44:02; IFNK; ENSG00000147896; CTA
YEMSLQAFNI

SEQ ID NO: 30386 - protein, 10 aa, Homo sapiens
  misc_feature: Table A; Target 30386; HLA-B*49:01; IFNK; ENSG00000147896; CTA
YEMSLQAFNI

SEQ ID NO: 30387 - protein, 8 aa, Homo sapiens
  misc_feature: Table A; Target 30387; HLA-B*08:01; IFNK; ENSG00000147896; CTA
YFYKFTAL

SEQ ID NO: 30388 - protein, 9 aa, Homo sapiens
  misc_feature: Table A; Target 30388; HLA-A*24:02; IFNK; ENSG00000147896; CTA
YFYKFTALF

SEQ ID NO: 30389 - protein, 9 aa, Homo sapiens
  misc_feature: Table A; Target 30389; HLA-A*29:02; IFNK; ENSG00000147896; CTA
YFYKFTALF

SEQ ID NO: 30390 - protein, 9 aa, Homo sapiens
  misc_feature: Table A; Target 30390; HLA-A*24:02; IFNK; ENSG00000147896; CTA
YYFYKFTAL

SEQ ID NO: 30391 - protein, 10 aa, Homo sapiens
  misc_feature: Table A; Target 30391; HLA-A*25:01; IL22RA2; ENSG00000164485; CTA
AASAGSYSEW

SEQ ID NO: 30392 - protein, 10 aa, Homo sapiens
  misc_feature: Table A; Target 30392; HLA-A*26:01; IL22RA2; ENSG00000164485; CTA
AASAGSYSEW

SEQ ID NO: 30393 - protein, 10 aa, Homo sapiens
  misc_feature: Table A; Target 30393; HLA-A*32:01; IL22RA2; ENSG00000164485; CTA
AASAGSYSEW

SEQ ID NO: 30394 - protein, 10 aa, Homo sapiens
  misc_feature: Table A; Target 30394; HLA-B*27:02; IL22RA2; ENSG00000164485; CTA
AASAGSYSEW

SEQ ID NO: 30395 - protein, 10 aa, Homo sapiens
  misc_feature: Table A; Target 30395; HLA-B*44:02; IL22RA2; ENSG00000164485; CTA
AASAGSYSEW

SEQ ID NO: 30396 - protein, 10 aa, Homo sapiens
  misc_feature: Table A; Target 30396; HLA-B*44:03; IL22RA2; ENSG00000164485; CTA
AASAGSYSEW

SEQ ID NO: 30397 - protein, 10 aa, Homo sapiens
  misc_feature: Table A; Target 30397; HLA-B*57:01; IL22RA2; ENSG00000164485; CTA
AASAGSYSEW

SEQ ID NO: 30398 - protein, 10 aa, Homo sapiens
  misc_feature: Table A; Target 30398; HLA-B*58:01; IL22RA2; ENSG00000164485; CTA
AASAGSYSEW

SEQ ID NO: 30399 - protein, 10 aa, Homo sapiens
  misc_feature: Table A; Target 30399; HLA-C*01:02; IL22RA2; ENSG00000164485; CTA
AASAGSYSEW

SEQ ID NO: 30400 - protein, 10 aa, Homo sapiens
  misc_feature: Table A; Target 30400; HLA-C*02:02; IL22RA2; ENSG00000164485; CTA
AASAGSYSEW

SEQ ID NO: 30401 - protein, 10 aa, Homo sapiens
  misc_feature: Table A; Target 30401; HLA-C*03:03; IL22RA2; ENSG00000164485; CTA
AASAGSYSEW

SEQ ID NO: 30402 - protein, 10 aa, Homo sapiens
  misc_feature: Table A; Target 30402; HLA-C*07:06; IL22RA2; ENSG00000164485; CTA
AASAGSYSEW

SEQ ID NO: 30403 - protein, 10 aa, Homo sapiens
  misc_feature: Table A; Target 30403; HLA-C*12:03; IL22RA2; ENSG00000164485; CTA
AASAGSYSEW

SEQ ID NO: 30404 - protein, 10 aa, Homo sapiens
  misc_feature: Table A; Target 30404; HLA-C*16:02; IL22RA2; ENSG00000164485; CTA
AASAGSYSEW

SEQ ID NO: 30405 - protein, 10 aa, Homo sapiens
  misc_feature: Table A; Target 30405; HLA-C*16:04; IL22RA2; ENSG00000164485; CTA
AASAGSYSEW

SEQ ID NO: 30406 - protein, 8 aa, Homo sapiens
  misc_feature: Table A; Target 30406; HLA-A*30:01; IL22RA2; ENSG00000164485; CTA
AEIYQPML

SEQ ID NO: 30407 - protein, 8 aa, Homo sapiens
  misc_feature: Table A; Target 30407; HLA-B*37:01; IL22RA2; ENSG00000164485; CTA
AEIYQPML

SEQ ID NO: 30408 - protein, 8 aa, Homo sapiens
  misc_feature: Table A; Target 30408; HLA-B*40:01; IL22RA2; ENSG00000164485; CTA
AEIYQPML

SEQ ID NO: 30409 - protein, 8 aa, Homo sapiens
  misc_feature: Table A; Target 30409; HLA-B*40:02; IL22RA2; ENSG00000164485; CTA
AEIYQPML

SEQ ID NO: 30410 - protein, 8 aa, Homo sapiens
  misc_feature: Table A; Target 30410; HLA-B*44:02; IL22RA2; ENSG00000164485; CTA
AEIYQPML

SEQ ID NO: 30411 - protein, 8 aa, Homo sapiens
  misc_feature: Table A; Target 30411; HLA-B*44:03; IL22RA2; ENSG00000164485; CTA
AEIYQPML

SEQ ID NO: 30412 - protein, 8 aa, Homo sapiens
  misc_feature: Table A; Target 30412; HLA-B*49:01; IL22RA2; ENSG00000164485; CTA
AEIYQPML

SEQ ID NO: 30413 - protein, 8 aa, Homo sapiens
  misc_feature: Table A; Target 30413; HLA-C*16:04; IL22RA2; ENSG00000164485; CTA
AEIYQPML

SEQ ID NO: 30414 - protein, 10 aa, Homo sapiens
  misc_feature: Table A; Target 30414; HLA-B*44:03; IL22RA2; ENSG00000164485; CTA
AEIYQPMLDR

SEQ ID NO: 30415 - protein, 10 aa, Homo sapiens
  misc_feature: Table A; Target 30415; HLA-C*16:01; IL22RA2; ENSG00000164485; CTA
AGTQSTHESL

SEQ ID NO: 30416 - protein, 10 aa, Homo sapiens
  misc_feature: Table A; Target 30416; HLA-B*38:01; IL22RA2; ENSG00000164485; CTA
AHRAVEIEAL

SEQ ID NO: 30417 - protein, 9 aa, Homo sapiens
  misc_feature: Table A; Target 30417; HLA-A*25:01; IL22RA2; ENSG00000164485; CTA
ALTGNSSVY

SEQ ID NO: 30418 - protein, 9 aa, Homo sapiens
  misc_feature: Table A; Target 30418; HLA-A*26:01; IL22RA2; ENSG00000164485; CTA
ALTGNSSVY

SEQ ID NO: 30419 - protein, 9 aa, Homo sapiens
  misc_feature: Table A; Target 30419; HLA-A*29:02; IL22RA2; ENSG00000164485; CTA
ALTGNSSVY

SEQ ID NO: 30420 - protein, 9 aa, Homo sapiens
  misc_feature: Table A; Target 30420; HLA-A*30:02; IL22RA2; ENSG00000164485; CTA
ALTGNSSVY

SEQ ID NO: 30421 - protein, 9 aa, Homo sapiens
  misc_feature: Table A; Target 30421; HLA-A*32:01; IL22RA2; ENSG00000164485; CTA
ALTGNSSVY

SEQ ID NO: 30422 - protein, 9 aa, Homo sapiens
  misc_feature: Table A; Target 30422; HLA-B*15:01; IL22RA2; ENSG00000164485; CTA
ALTGNSSVY

SEQ ID NO: 30423 - protein, 9 aa, Homo sapiens
  misc_feature: Table A; Target 30423; HLA-B*15:03; IL22RA2; ENSG00000164485; CTA
ALTGNSSVY

SEQ ID NO: 30424 - protein, 9 aa, Homo sapiens
  misc_feature: Table A; Target 30424; HLA-B*39:01; IL22RA2; ENSG00000164485; CTA
ALTGNSSVY

SEQ ID NO: 30425 - protein, 9 aa, Homo sapiens
  misc_feature: Table A; Target 30425; HLA-B*46:01; IL22RA2; ENSG00000164485; CTA
ALTGNSSVY

SEQ ID NO: 30426 - protein, 9 aa, Homo sapiens
  misc_feature: Table A; Target 30426; HLA-C*02:02; IL22RA2; ENSG00000164485; CTA
ALTGNSSVY

SEQ ID NO: 30427 - protein, 9 aa, Homo sapiens
  misc_feature: Table A; Target 30427; HLA-C*07:04; IL22RA2; ENSG00000164485; CTA
ALTGNSSVY

SEQ ID NO: 30428 - protein, 9 aa, Homo sapiens
  misc_feature: Table A; Target 30428; HLA-C*14:02; IL22RA2; ENSG00000164485; CTA
ALTGNSSVY

SEQ ID NO: 30429 - protein, 9 aa, Homo sapiens
  misc_feature: Table A; Target 30429; HLA-C*16:01; IL22RA2; ENSG00000164485; CTA
ALTGNSSVY

SEQ ID NO: 30430 - protein, 9 aa, Homo sapiens
  misc_feature: Table A; Target 30430; HLA-C*16:02; IL22RA2; ENSG00000164485; CTA
ALTGNSSVY

SEQ ID NO: 30431 - protein, 9 aa, Homo sapiens
  misc_feature: Table A; Target 30431; HLA-C*16:04; IL22RA2; ENSG00000164485; CTA
ALTGNSSVY

SEQ ID NO: 30432 - protein, 10 aa, Homo sapiens
  misc_feature: Table A; Target 30432; HLA-C*04:01; IL22RA2; ENSG00000164485; CTA
ALTGNSSVYF

SEQ ID NO: 30433 - protein, 8 aa, Homo sapiens
  misc_feature: Table A; Target 30433; HLA-A*30:02; IL22RA2; ENSG00000164485; CTA
ALTPHSSY

SEQ ID NO: 30434 - protein, 8 aa, Homo sapiens
  misc_feature: Table A; Target 30434; HLA-A*32:01; IL22RA2; ENSG00000164485; CTA
ALTPHSSY

SEQ ID NO: 30435 - protein, 8 aa, Homo sapiens
  misc_feature: Table A; Target 30435; HLA-B*15:01; IL22RA2; ENSG00000164485; CTA
ALTPHSSY

SEQ ID NO: 30436 - protein, 8 aa, Homo sapiens
  misc_feature: Table A; Target 30436; HLA-B*15:03; IL22RA2; ENSG00000164485; CTA
ALTPHSSY

SEQ ID NO: 30437 - protein, 8 aa, Homo sapiens
  misc_feature: Table A; Target 30437; HLA-C*16:01; IL22RA2; ENSG00000164485; CTA
ALTPHSSY

SEQ ID NO: 30438 - protein, 8 aa, Homo sapiens
  misc_feature: Table A; Target 30438; HLA-B*35:01; IL22RA2; ENSG00000164485; CTA
APNLPYRY

SEQ ID NO: 30439 - protein, 10 aa, Homo sapiens
  misc_feature: Table A; Target 30439; HLA-B*56:01; IL22RA2; ENSG00000164485; CTA
APNLPYRYQK

SEQ ID NO: 30440 - protein, 9 aa, Homo sapiens
  misc_feature: Table A; Target 30440; HLA-A*01:01; IL22RA2; ENSG00000164485; CTA
ASAGSYSEW

SEQ ID NO: 30441 - protein, 9 aa, Homo sapiens
  misc_feature: Table A; Target 30441; HLA-A*25:01; IL22RA2; ENSG00000164485; CTA
ASAGSYSEW

SEQ ID NO: 30442 - protein, 9 aa, Homo sapiens
  misc_feature: Table A; Target 30442; HLA-A*26:01; IL22RA2; ENSG00000164485; CTA
ASAGSYSEW

SEQ ID NO: 30443 - protein, 9 aa, Homo sapiens
  misc_feature: Table A; Target 30443; HLA-A*30:02; IL22RA2; ENSG00000164485; CTA
ASAGSYSEW

SEQ ID NO: 30444 - protein, 9 aa, Homo sapiens
  misc_feature: Table A; Target 30444; HLA-A*32:01; IL22RA2; ENSG00000164485; CTA
ASAGSYSEW

SEQ ID NO: 30445 - protein, 9 aa, Homo sapiens
  misc_feature: Table A; Target 30445; HLA-B*15:01; IL22RA2; ENSG00000164485; CTA
ASAGSYSEW

SEQ ID NO: 30446 - protein, 9 aa, Homo sapiens
  misc_feature: Table A; Target 30446; HLA-B*27:02; IL22RA2; ENSG00000164485; CTA
ASAGSYSEW

SEQ ID NO: 30447 - protein, 9 aa, Homo sapiens
  misc_feature: Table A; Target 30447; HLA-B*44:02; IL22RA2; ENSG00000164485; CTA
ASAGSYSEW

SEQ ID NO: 30448 - protein, 9 aa, Homo sapiens
  misc_feature: Table A; Target 30448; HLA-B*44:03; IL22RA2; ENSG00000164485; CTA
ASAGSYSEW

SEQ ID NO: 30449 - protein, 9 aa, Homo sapiens
  misc_feature: Table A; Target 30449; HLA-B*46:01; IL22RA2; ENSG00000164485; CTA
ASAGSYSEW

SEQ ID NO: 30450 - protein, 9 aa, Homo sapiens
  misc_feature: Table A; Target 30450; HLA-B*57:01; IL22RA2; ENSG00000164485; CTA
ASAGSYSEW

SEQ ID NO: 30451 - protein, 9 aa, Homo sapiens
  misc_feature: Table A; Target 30451; HLA-B*58:01; IL22RA2; ENSG00000164485; CTA
ASAGSYSEW

SEQ ID NO: 30452 - protein, 9 aa, Homo sapiens
  misc_feature: Table A; Target 30452; HLA-C*01:02; IL22RA2; ENSG00000164485; CTA
ASAGSYSEW

SEQ ID NO: 30453 - protein, 9 aa, Homo sapiens
  misc_feature: Table A; Target 30453; HLA-C*02:02; IL22RA2; ENSG00000164485; CTA
ASAGSYSEW

SEQ ID NO: 30454 - protein, 9 aa, Homo sapiens
  misc_feature: Table A; Target 30454; HLA-C*03:04; IL22RA2; ENSG00000164485; CTA
ASAGSYSEW

SEQ ID NO: 30455 - protein, 9 aa, Homo sapiens
  misc_feature: Table A; Target 30455; HLA-C*04:01; IL22RA2; ENSG00000164485; CTA
ASAGSYSEW

SEQ ID NO: 30456 - protein, 9 aa, Homo sapiens
  misc_feature: Table A; Target 30456; HLA-C*07:06; IL22RA2; ENSG00000164485; CTA
ASAGSYSEW

SEQ ID NO: 30457 - protein, 9 aa, Homo sapiens
  misc_feature: Table A; Target 30457; HLA-C*12:03; IL22RA2; ENSG00000164485; CTA
ASAGSYSEW

SEQ ID NO: 30458 - protein, 9 aa, Homo sapiens
  misc_feature: Table A; Target 30458; HLA-C*16:01; IL22RA2; ENSG00000164485; CTA
ASAGSYSEW

SEQ ID NO: 30459 - protein, 9 aa, Homo sapiens
  misc_feature: Table A; Target 30459; HLA-C*16:04; IL22RA2; ENSG00000164485; CTA
ASAGSYSEW

SEQ ID NO: 30460 - protein, 9 aa, Homo sapiens
  misc_feature: Table A; Target 30460; HLA-A*23:01; IL22RA2; ENSG00000164485; CTA
CFLGFLISF

SEQ ID NO: 30461 - protein, 9 aa, Homo sapiens
  misc_feature: Table A; Target 30461; HLA-C*06:02; IL22RA2; ENSG00000164485; CTA
CNFPGCRTL

SEQ ID NO: 30462 - protein, 9 aa, Homo sapiens
  misc_feature: Table A; Target 30462; HLA-C*12:03; IL22RA2; ENSG00000164485; CTA
CNFPGCRTL

SEQ ID NO: 30463 - protein, 9 aa, Homo sapiens
  misc_feature: Table A; Target 30463; HLA-A*03:02; IL22RA2; ENSG00000164485; CTA
CSMKSSHQK

SEQ ID NO: 30464 - protein, 9 aa, Homo sapiens
  misc_feature: Table A; Target 30464; HLA-A*11:01; IL22RA2; ENSG00000164485; CTA
CSMKSSHQK

SEQ ID NO: 30465 - protein, 9 aa, Homo sapiens
  misc_feature: Table A; Target 30465; HLA-A*03:02; IL22RA2; ENSG00000164485; CTA
DIQEPYYGR

SEQ ID NO: 30466 - protein, 9 aa, Homo sapiens
  misc_feature: Table A; Target 30466; HLA-A*11:01; IL22RA2; ENSG00000164485; CTA
DIQEPYYGR

SEQ ID NO: 30467 - protein, 9 aa, Homo sapiens
  misc_feature: Table A; Target 30467; HLA-A*26:01; IL22RA2; ENSG00000164485; CTA
DIQEPYYGR

SEQ ID NO: 30468 - protein, 9 aa, Homo sapiens
  misc_feature: Table A; Target 30468; HLA-A*31:01; IL22RA2; ENSG00000164485; CTA
DIQEPYYGR

SEQ ID NO: 30469 - protein, 9 aa, Homo sapiens
  misc_feature: Table A; Target 30469; HLA-A*33:01; IL22RA2; ENSG00000164485; CTA
DIQEPYYGR

SEQ ID NO: 30470 - protein, 9 aa, Homo sapiens
  misc_feature: Table A; Target 30470; HLA-A*33:03; IL22RA2; ENSG00000164485; CTA
DIQEPYYGR

SEQ ID NO: 30471 - protein, 9 aa, Homo sapiens
  misc_feature: Table A; Target 30471; HLA-A*68:01; IL22RA2; ENSG00000164485; CTA
DIQEPYYGR

SEQ ID NO: 30472 - protein, 9 aa, Homo sapiens
  misc_feature: Table A; Target 30472; HLA-C*07:06; IL22RA2; ENSG00000164485; CTA
DIQEPYYGR

SEQ ID NO: 30473 - protein, 10 aa, Homo sapiens
  misc_feature: Table A; Target 30473; HLA-A*26:01; IL22RA2; ENSG00000164485; CTA
DIQEPYYGRV

SEQ ID NO: 30474 - protein, 10 aa, Homo sapiens
  misc_feature: Table A; Target 30474; HLA-A*68:01; IL22RA2; ENSG00000164485; CTA
DIQEPYYGRV

SEQ ID NO: 30475 - protein, 10 aa, Homo sapiens
  misc_feature: Table A; Target 30475; HLA-A*68:02; IL22RA2; ENSG00000164485; CTA
DIQEPYYGRV

SEQ ID NO: 30476 - protein, 11 aa, Homo sapiens
  misc_feature: Table A; Target 30476; HLA-A*33:01; IL22RA2; ENSG00000164485; CTA
DIQEPYYGRVR

SEQ ID NO: 30477 - protein, 11 aa, Homo sapiens
  misc_feature: Table A; Target 30477; HLA-A*68:01; IL22RA2; ENSG00000164485; CTA
DIQEPYYGRVR

SEQ ID NO: 30478 - protein, 10 aa, Homo sapiens
  misc_feature: Table A; Target 30478; HLA-B*51:01; IL22RA2; ENSG00000164485; CTA
DPPVMNITQV

SEQ ID NO: 30479 - protein, 8 aa, Homo sapiens
  misc_feature: Table A; Target 30479; HLA-A*33:01; IL22RA2; ENSG00000164485; CTA
DYYELLYR

SEQ ID NO: 30480 - protein, 8 aa, Homo sapiens
  misc_feature: Table A; Target 30480; HLA-A*33:03; IL22RA2; ENSG00000164485; CTA
DYYELLYR

SEQ ID NO: 30481 - protein, 9 aa, Homo sapiens
  misc_feature: Table A; Target 30481; HLA-A*23:01; IL22RA2; ENSG00000164485; CTA
EALTPHSSY

SEQ ID NO: 30482 - protein, 9 aa, Homo sapiens
  misc_feature: Table A; Target 30482; HLA-A*25:01; IL22RA2; ENSG00000164485; CTA
EALTPHSSY

SEQ ID NO: 30483 - protein, 9 aa, Homo sapiens
  misc_feature: Table A; Target 30483; HLA-A*26:01; IL22RA2; ENSG00000164485; CTA
EALTPHSSY

SEQ ID NO: 30484 - protein, 9 aa, Homo sapiens
  misc_feature: Table A; Target 30484; HLA-A*29:02; IL22RA2; ENSG00000164485; CTA
EALTPHSSY

SEQ ID NO: 30485 - protein, 9 aa, Homo sapiens
  misc_feature: Table A; Target 30485; HLA-A*30:02; IL22RA2; ENSG00000164485; CTA
EALTPHSSY

SEQ ID NO: 30486 - protein, 9 aa, Homo sapiens
  misc_feature: Table A; Target 30486; HLA-A*32:01; IL22RA2; ENSG00000164485; CTA
EALTPHSSY

SEQ ID NO: 30487 - protein, 9 aa, Homo sapiens
  misc_feature: Table A; Target 30487; HLA-A*33:01; IL22RA2; ENSG00000164485; CTA
EALTPHSSY

SEQ ID NO: 30488 - protein, 9 aa, Homo sapiens
  misc_feature: Table A; Target 30488; HLA-A*33:03; IL22RA2; ENSG00000164485; CTA
EALTPHSSY

SEQ ID NO: 30489 - protein, 9 aa, Homo sapiens
  misc_feature: Table A; Target 30489; HLA-A*68:01; IL22RA2; ENSG00000164485; CTA
EALTPHSSY

SEQ ID NO: 30490 - protein, 9 aa, Homo sapiens
  misc_feature: Table A; Target 30490; HLA-B*08:01; IL22RA2; ENSG00000164485; CTA
EALTPHSSY

SEQ ID NO: 30491 - protein, 9 aa, Homo sapiens
  misc_feature: Table A; Target 30491; HLA-B*15:01; IL22RA2; ENSG00000164485; CTA
EALTPHSSY

SEQ ID NO: 30492 - protein, 9 aa, Homo sapiens
  misc_feature: Table A; Target 30492; HLA-B*15:03; IL22RA2; ENSG00000164485; CTA
EALTPHSSY

SEQ ID NO: 30493 - protein, 9 aa, Homo sapiens
  misc_feature: Table A; Target 30493; HLA-B*18:01; IL22RA2; ENSG00000164485; CTA
EALTPHSSY

SEQ ID NO: 30494 - protein, 9 aa, Homo sapiens
  misc_feature: Table A; Target 30494; HLA-B*35:01; IL22RA2; ENSG00000164485; CTA
EALTPHSSY

SEQ ID NO: 30495 - protein, 9 aa, Homo sapiens
  misc_feature: Table A; Target 30495; HLA-B*35:03; IL22RA2; ENSG00000164485; CTA
EALTPHSSY

SEQ ID NO: 30496 - protein, 9 aa, Homo sapiens
  misc_feature: Table A; Target 30496; HLA-B*39:01; IL22RA2; ENSG00000164485; CTA
EALTPHSSY

SEQ ID NO: 30497 - protein, 9 aa, Homo sapiens
  misc_feature: Table A; Target 30497; HLA-B*44:02; IL22RA2; ENSG00000164485; CTA
EALTPHSSY

SEQ ID NO: 30498 - protein, 9 aa, Homo sapiens
  misc_feature: Table A; Target 30498; HLA-B*44:03; IL22RA2; ENSG00000164485; CTA
EALTPHSSY

SEQ ID NO: 30499 - protein, 9 aa, Homo sapiens
  misc_feature: Table A; Target 30499; HLA-B*46:01; IL22RA2; ENSG00000164485; CTA
EALTPHSSY

SEQ ID NO: 30500 - protein, 9 aa, Homo sapiens
  misc_feature: Table A; Target 30500; HLA-B*51:01; IL22RA2; ENSG00000164485; CTA
EALTPHSSY

SEQ ID NO: 30501 - protein, 9 aa, Homo sapiens
  misc_feature: Table A; Target 30501; HLA-B*54:01; IL22RA2; ENSG00000164485; CTA
EALTPHSSY

SEQ ID NO: 30502 - protein, 9 aa, Homo sapiens
  misc_feature: Table A; Target 30502; HLA-B*55:01; IL22RA2; ENSG00000164485; CTA
EALTPHSSY

SEQ ID NO: 30503 - protein, 9 aa, Homo sapiens
  misc_feature: Table A; Target 30503; HLA-B*57:01; IL22RA2; ENSG00000164485; CTA
EALTPHSSY

SEQ ID NO: 30504 - protein, 9 aa, Homo sapiens
  misc_feature: Table A; Target 30504; HLA-B*58:01; IL22RA2; ENSG00000164485; CTA
EALTPHSSY

SEQ ID NO: 30505 - protein, 9 aa, Homo sapiens
  misc_feature: Table A; Target 30505; HLA-C*01:02; IL22RA2; ENSG00000164485; CTA
EALTPHSSY

SEQ ID NO: 30506 - protein, 9 aa, Homo sapiens
  misc_feature: Table A; Target 30506; HLA-C*02:02; IL22RA2; ENSG00000164485; CTA
EALTPHSSY

SEQ ID NO: 30507 - protein, 9 aa, Homo sapiens
  misc_feature: Table A; Target 30507; HLA-C*03:03; IL22RA2; ENSG00000164485; CTA
EALTPHSSY

SEQ ID NO: 30508 - protein, 9 aa, Homo sapiens
  misc_feature: Table A; Target 30508; HLA-C*03:04; IL22RA2; ENSG00000164485; CTA
EALTPHSSY

SEQ ID NO: 30509 - protein, 9 aa, Homo sapiens
  misc_feature: Table A; Target 30509; HLA-C*07:01; IL22RA2; ENSG00000164485; CTA
EALTPHSSY

SEQ ID NO: 30510 - protein, 9 aa, Homo sapiens
  misc_feature: Table A; Target 30510; HLA-C*07:04; IL22RA2; ENSG00000164485; CTA
EALTPHSSY

SEQ ID NO: 30511 - protein, 9 aa, Homo sapiens
  misc_feature: Table A; Target 30511; HLA-C*07:06; IL22RA2; ENSG00000164485; CTA
EALTPHSSY

SEQ ID NO: 30512 - protein, 9 aa, Homo sapiens
  misc_feature: Table A; Target 30512; HLA-C*12:03; IL22RA2; ENSG00000164485; CTA
EALTPHSSY

SEQ ID NO: 30513 - protein, 9 aa, Homo sapiens
  misc_feature: Table A; Target 30513; HLA-C*14:02; IL22RA2; ENSG00000164485; CTA
EALTPHSSY

SEQ ID NO: 30514 - protein, 9 aa, Homo sapiens
  misc_feature: Table A; Target 30514; HLA-C*16:01; IL22RA2; ENSG00000164485; CTA
EALTPHSSY

SEQ ID NO: 30515 - protein, 9 aa, Homo sapiens
  misc_feature: Table A; Target 30515; HLA-C*16:02; IL22RA2; ENSG00000164485; CTA
EALTPHSSY

SEQ ID NO: 30516 - protein, 9 aa, Homo sapiens
  misc_feature: Table A; Target 30516; HLA-C*16:04; IL22RA2; ENSG00000164485; CTA
EALTPHSSY

SEQ ID NO: 30517 - protein, 9 aa, Homo sapiens
  misc_feature: Table A; Target 30517; HLA-A*33:01; IL22RA2; ENSG00000164485; CTA
EDYYELLYR

SEQ ID NO: 30518 - protein, 10 aa, Homo sapiens
  misc_feature: Table A; Target 30518; HLA-A*68:02; IL22RA2; ENSG00000164485; CTA
EDYYELLYRV

SEQ ID NO: 30519 - protein, 11 aa, Homo sapiens
  misc_feature: Table A; Target 30519; HLA-A*01:01; IL22RA2; ENSG00000164485; CTA
EIEALTPHSSY

SEQ ID NO: 30520 - protein, 11 aa, Homo sapiens
  misc_feature: Table A; Target 30520; HLA-A*25:01; IL22RA2; ENSG00000164485; CTA
EIEALTPHSSY

SEQ ID NO: 30521 - protein, 11 aa, Homo sapiens
  misc_feature: Table A; Target 30521; HLA-A*26:01; IL22RA2; ENSG00000164485; CTA
EIEALTPHSSY

SEQ ID NO: 30522 - protein, 11 aa, Homo sapiens
  misc_feature: Table A; Target 30522; HLA-A*30:02; IL22RA2; ENSG00000164485; CTA
EIEALTPHSSY

SEQ ID NO: 30523 - protein, 11 aa, Homo sapiens
  misc_feature: Table A; Target 30523; HLA-C*07:01; IL22RA2; ENSG00000164485; CTA
EIEALTPHSSY

SEQ ID NO: 30524 - protein, 9 aa, Homo sapiens
  misc_feature: Table A; Target 30524; HLA-A*26:01; IL22RA2; ENSG00000164485; CTA
EIYQPMLDR

SEQ ID NO: 30525 - protein, 9 aa, Homo sapiens
  misc_feature: Table A; Target 30525; HLA-A*33:01; IL22RA2; ENSG00000164485; CTA
EIYQPMLDR

SEQ ID NO: 30526 - protein, 9 aa, Homo sapiens
  misc_feature: Table A; Target 30526; HLA-A*33:03; IL22RA2; ENSG00000164485; CTA
EIYQPMLDR

SEQ ID NO: 30527 - protein, 9 aa, Homo sapiens
  misc_feature: Table A; Target 30527; HLA-A*68:01; IL22RA2; ENSG00000164485; CTA
EIYQPMLDR

SEQ ID NO: 30528 - protein, 9 aa, Homo sapiens
  misc_feature: Table A; Target 30528; HLA-A*68:02; IL22RA2; ENSG00000164485; CTA
EIYQPMLDR

SEQ ID NO: 30529 - protein, 9 aa, Homo sapiens
  misc_feature: Table A; Target 30529; HLA-C*07:06; IL22RA2; ENSG00000164485; CTA
EIYQPMLDR

SEQ ID NO: 30530 - protein, 10 aa, Homo sapiens
  misc_feature: Table A; Target 30530; HLA-A*68:02; IL22RA2; ENSG00000164485; CTA
EIYQPMLDRR

SEQ ID NO: 30531 - protein, 9 aa, Homo sapiens
  misc_feature: Table A; Target 30531; HLA-B*15:03; IL22RA2; ENSG00000164485; CTA
EKNVSIEDY

SEQ ID NO: 30532 - protein, 9 aa, Homo sapiens
  misc_feature: Table A; Target 30532; HLA-A*02:04; IL22RA2; ENSG00000164485; CTA
ELLYRVFII

SEQ ID NO: 30533 - protein, 9 aa, Homo sapiens
  misc_feature: Table A; Target 30533; HLA-A*24:02; IL22RA2; ENSG00000164485; CTA
ELLYRVFII

SEQ ID NO: 30534 - protein, 9 aa, Homo sapiens
  misc_feature: Table A; Target 30534; HLA-B*51:01; IL22RA2; ENSG00000164485; CTA
EPYYGRVRA

SEQ ID NO: 30535 - protein, 9 aa, Homo sapiens
  misc_feature: Table A; Target 30535; HLA-B*54:01; IL22RA2; ENSG00000164485; CTA
EPYYGRVRA

SEQ ID NO: 30536 - protein, 9 aa, Homo sapiens
  misc_feature: Table A; Target 30536; HLA-B*55:01; IL22RA2; ENSG00000164485; CTA
EPYYGRVRA

SEQ ID NO: 30537 - protein, 9 aa, Homo sapiens
  misc_feature: Table A; Target 30537; HLA-B*56:01; IL22RA2; ENSG00000164485; CTA
EPYYGRVRA

SEQ ID NO: 30538 - protein, 10 aa, Homo sapiens
  misc_feature: Table A; Target 30538; HLA-B*54:01; IL22RA2; ENSG00000164485; CTA
EPYYGRVRAA

SEQ ID NO: 30539 - protein, 10 aa, Homo sapiens
  misc_feature: Table A; Target 30539; HLA-B*55:01; IL22RA2; ENSG00000164485; CTA
EPYYGRVRAA

SEQ ID NO: 30540 - protein, 10 aa, Homo sapiens
  misc_feature: Table A; Target 30540; HLA-B*56:01; IL22RA2; ENSG00000164485; CTA
EPYYGRVRAA

SEQ ID NO: 30541 - protein, 10 aa, Homo sapiens
  misc_feature: Table A; Target 30541; HLA-A*33:03; IL22RA2; ENSG00000164485; CTA
EQKVYEGAHR

SEQ ID NO: 30542 - protein, 10 aa, Homo sapiens
  misc_feature: Table A; Target 30542; HLA-A*23:01; IL22RA2; ENSG00000164485; CTA
ESLKPQRVQF

SEQ ID NO: 30543 - protein, 10 aa, Homo sapiens
  misc_feature: Table A; Target 30543; HLA-A*24:02; IL22RA2; ENSG00000164485; CTA
ESLKPQRVQF

SEQ ID NO: 30544 - protein, 10 aa, Homo sapiens
  misc_feature: Table A; Target 30544; HLA-A*33:03; IL22RA2; ENSG00000164485; CTA
ESLKPQRVQF

SEQ ID NO: 30545 - protein, 10 aa, Homo sapiens
  misc_feature: Table A; Target 30545; HLA-B*57:01; IL22RA2; ENSG00000164485; CTA
ESLKPQRVQF

SEQ ID NO: 30546 - protein, 9 aa, Homo sapiens
  misc_feature: Table A; Target 30546; HLA-A*01:01; IL22RA2; ENSG00000164485; CTA
ETKIDPPVM

SEQ ID NO: 30547 - protein, 9 aa, Homo sapiens
  misc_feature: Table A; Target 30547; HLA-A*25:01; IL22RA2; ENSG00000164485; CTA
ETKIDPPVM

SEQ ID NO: 30548 - protein, 9 aa, Homo sapiens
  misc_feature: Table A; Target 30548; HLA-A*26:01; IL22RA2; ENSG00000164485; CTA
ETKIDPPVM

SEQ ID NO: 30549 - protein, 9 aa, Homo sapiens
  misc_feature: Table A; Target 30549; HLA-A*33:01; IL22RA2; ENSG00000164485; CTA
ETKIDPPVM

SEQ ID NO: 30550 - protein, 9 aa, Homo sapiens
  misc_feature: Table A; Target 30550; HLA-A*33:03; IL22RA2; ENSG00000164485; CTA
ETKIDPPVM

SEQ ID NO: 30551 - protein, 9 aa, Homo sapiens
  misc_feature: Table A; Target 30551; HLA-A*68:01; IL22RA2; ENSG00000164485; CTA
ETKIDPPVM

SEQ ID NO: 30552 - protein, 9 aa, Homo sapiens
  misc_feature: Table A; Target 30552; HLA-B*39:01; IL22RA2; ENSG00000164485; CTA
ETKIDPPVM

SEQ ID NO: 30553 - protein, 9 aa, Homo sapiens
  misc_feature: Table A; Target 30553; HLA-B*40:02; IL22RA2; ENSG00000164485; CTA
ETKIDPPVM

SEQ ID NO: 30554 - protein, 9 aa, Homo sapiens
  misc_feature: Table A; Target 30554; HLA-B*57:01; IL22RA2; ENSG00000164485; CTA
ETKIDPPVM

SEQ ID NO: 30555 - protein, 9 aa, Homo sapiens
  misc_feature: Table A; Target 30555; HLA-A*01:01; IL22RA2; ENSG00000164485; CTA
ETSDIQEPY

SEQ ID NO: 30556 - protein, 9 aa, Homo sapiens
  misc_feature: Table A; Target 30556; HLA-A*11:01; IL22RA2; ENSG00000164485; CTA
ETSDIQEPY

SEQ ID NO: 30557 - protein, 9 aa, Homo sapiens
  misc_feature: Table A; Target 30557; HLA-A*25:01; IL22RA2; ENSG00000164485; CTA
ETSDIQEPY

SEQ ID NO: 30558 - protein, 9 aa, Homo sapiens
  misc_feature: Table A; Target 30558; HLA-A*26:01; IL22RA2; ENSG00000164485; CTA
ETSDIQEPY

SEQ ID NO: 30559 - protein, 9 aa, Homo sapiens
  misc_feature: Table A; Target 30559; HLA-A*29:02; IL22RA2; ENSG00000164485; CTA
ETSDIQEPY

SEQ ID NO: 30560 - protein, 9 aa, Homo sapiens
  misc_feature: Table A; Target 30560; HLA-A*30:02; IL22RA2; ENSG00000164485; CTA
ETSDIQEPY

SEQ ID NO: 30561 - protein, 9 aa, Homo sapiens
  misc_feature: Table A; Target 30561; HLA-A*33:01; IL22RA2; ENSG00000164485; CTA
ETSDIQEPY

SEQ ID NO: 30562 - protein, 9 aa, Homo sapiens
  misc_feature: Table A; Target 30562; HLA-A*33:03; IL22RA2; ENSG00000164485; CTA
ETSDIQEPY

SEQ ID NO: 30563 - protein, 9 aa, Homo sapiens
  misc_feature: Table A; Target 30563; HLA-A*68:01; IL22RA2; ENSG00000164485; CTA
ETSDIQEPY

SEQ ID NO: 30564 - protein, 9 aa, Homo sapiens
  misc_feature: Table A; Target 30564; HLA-A*68:02; IL22RA2; ENSG00000164485; CTA
ETSDIQEPY

SEQ ID NO: 30565 - protein, 9 aa, Homo sapiens
  misc_feature: Table A; Target 30565; HLA-B*35:01; IL22RA2; ENSG00000164485; CTA
ETSDIQEPY

SEQ ID NO: 30566 - protein, 9 aa, Homo sapiens
  misc_feature: Table A; Target 30566; HLA-C*07:06; IL22RA2; ENSG00000164485; CTA
ETSDIQEPY

SEQ ID NO: 30567 - protein, 10 aa, Homo sapiens
  misc_feature: Table A; Target 30567; HLA-A*01:01; IL22RA2; ENSG00000164485; CTA
ETSDIQEPYY

SEQ ID NO: 30568 - protein, 10 aa, Homo sapiens
  misc_feature: Table A; Target 30568; HLA-A*25:01; IL22RA2; ENSG00000164485; CTA
ETSDIQEPYY

SEQ ID NO: 30569 - protein, 10 aa, Homo sapiens
  misc_feature: Table A; Target 30569; HLA-A*26:01; IL22RA2; ENSG00000164485; CTA
ETSDIQEPYY

SEQ ID NO: 30570 - protein, 10 aa, Homo sapiens
  misc_feature: Table A; Target 30570; HLA-A*29:02; IL22RA2; ENSG00000164485; CTA
ETSDIQEPYY

SEQ ID NO: 30571 - protein, 10 aa, Homo sapiens
  misc_feature: Table A; Target 30571; HLA-A*30:02; IL22RA2; ENSG00000164485; CTA
ETSDIQEPYY

SEQ ID NO: 30572 - protein, 10 aa, Homo sapiens
  misc_feature: Table A; Target 30572; HLA-A*33:03; IL22RA2; ENSG00000164485; CTA
ETSDIQEPYY

SEQ ID NO: 30573 - protein, 10 aa, Homo sapiens
  misc_feature: Table A; Target 30573; HLA-A*68:01; IL22RA2; ENSG00000164485; CTA
ETSDIQEPYY

SEQ ID NO: 30574 - protein, 10 aa, Homo sapiens
  misc_feature: Table A; Target 30574; HLA-A*68:02; IL22RA2; ENSG00000164485; CTA
ETSDIQEPYY

SEQ ID NO: 30575 - protein, 8 aa, Homo sapiens
  misc_feature: Table A; Target 30575; HLA-C*14:02; IL22RA2; ENSG00000164485; CTA
FFLTGVAG

SEQ ID NO: 30576 - protein, 10 aa, Homo sapiens
  misc_feature: Table A; Target 30576; HLA-A*29:02; IL22RA2; ENSG00000164485; CTA
FFLTGVAGTQ

SEQ ID NO: 30577 - protein, 11 aa, Homo sapiens
  misc_feature: Table A; Target 30577; HLA-C*14:02; IL22RA2; ENSG00000164485; CTA
FFLTGVAGTQS

SEQ ID NO: 30578 - protein, 9 aa, Homo sapiens
  misc_feature: Table A; Target 30578; HLA-A*03:01; IL22RA2; ENSG00000164485; CTA
FIINNSLEK

SEQ ID NO: 30579 - protein, 9 aa, Homo sapiens
  misc_feature: Table A; Target 30579; HLA-A*11:01; IL22RA2; ENSG00000164485; CTA
FIINNSLEK

SEQ ID NO: 30580 - protein, 9 aa, Homo sapiens
  misc_feature: Table A; Target 30580; HLA-B*27:02; IL22RA2; ENSG00000164485; CTA
FIINNSLEK

SEQ ID NO: 30581 - protein, 9 aa, Homo sapiens
  misc_feature: Table A; Target 30581; HLA-B*46:01; IL22RA2; ENSG00000164485; CTA
FIINNSLEK

SEQ ID NO: 30582 - protein, 9 aa, Homo sapiens
  misc_feature: Table A; Target 30582; HLA-C*02:02; IL22RA2; ENSG00000164485; CTA
FIINNSLEK

SEQ ID NO: 30583 - protein, 9 aa, Homo sapiens
  misc_feature: Table A; Target 30583; HLA-C*07:06; IL22RA2; ENSG00000164485; CTA
FIINNSLEK

SEQ ID NO: 30584 - protein, 10 aa, Homo sapiens
  misc_feature: Table A; Target 30584; HLA-A*02:01; IL22RA2; ENSG00000164485; CTA
FLISFFLTGV

SEQ ID NO: 30585 - protein, 10 aa, Homo sapiens
  misc_feature: Table A; Target 30585; HLA-A*02:03; IL22RA2; ENSG00000164485; CTA
FLISFFLTGV

SEQ ID NO: 30586 - protein, 10 aa, Homo sapiens
  misc_feature: Table A; Target 30586; HLA-A*02:04; IL22RA2; ENSG00000164485; CTA
FLISFFLTGV

SEQ ID NO: 30587 - protein, 10 aa, Homo sapiens
  misc_feature: Table A; Target 30587; HLA-A*02:07; IL22RA2; ENSG00000164485; CTA
FLISFFLTGV

SEQ ID NO: 30588 - protein, 9 aa, Homo sapiens
  misc_feature: Table A; Target 30588; HLA-A*26:01; IL22RA2; ENSG00000164485; CTA
FLTGVAGTQ

SEQ ID NO: 30589 - protein, 9 aa, Homo sapiens
  misc_feature: Table A; Target 30589; HLA-B*39:01; IL22RA2; ENSG00000164485; CTA
FLTGVAGTQ

SEQ ID NO: 30590 - protein, 9 aa, Homo sapiens
  misc_feature: Table A; Target 30590; HLA-C*06:02; IL22RA2; ENSG00000164485; CTA
FLTGVAGTQ

SEQ ID NO: 30591 - protein, 9 aa, Homo sapiens
  misc_feature: Table A; Target 30591; HLA-C*07:01; IL22RA2; ENSG00000164485; CTA
FLTGVAGTQ

SEQ ID NO: 30592 - protein, 9 aa, Homo sapiens
  misc_feature: Table A; Target 30592; HLA-C*07:02; IL22RA2; ENSG00000164485; CTA
FLTGVAGTQ

SEQ ID NO: 30593 - protein, 9 aa, Homo sapiens
  misc_feature: Table A; Target 30593; HLA-C*07:04; IL22RA2; ENSG00000164485; CTA
FLTGVAGTQ

SEQ ID NO: 30594 - protein, 9 aa, Homo sapiens
  misc_feature: Table A; Target 30594; HLA-C*12:03; IL22RA2; ENSG00000164485; CTA
FLTGVAGTQ

SEQ ID NO: 30595 - protein, 9 aa, Homo sapiens
  misc_feature: Table A; Target 30595; HLA-C*16:02; IL22RA2; ENSG00000164485; CTA
FLTGVAGTQ

SEQ ID NO: 30596 - protein, 10 aa, Homo sapiens
  misc_feature: Table A; Target 30596; HLA-B*39:01; IL22RA2; ENSG00000164485; CTA
FLTGVAGTQS

SEQ ID NO: 30597 - protein, 10 aa, Homo sapiens
  misc_feature: Table A; Target 30597; HLA-C*07:04; IL22RA2; ENSG00000164485; CTA
FLTGVAGTQS

SEQ ID NO: 30598 - protein, 9 aa, Homo sapiens
  misc_feature: Table A; Target 30598; HLA-A*24:02; IL22RA2; ENSG00000164485; CTA
FQSRNFHNI

SEQ ID NO: 30599 - protein, 9 aa, Homo sapiens
  misc_feature: Table A; Target 30599; HLA-A*02:07; IL22RA2; ENSG00000164485; CTA
FTPWWETKI

SEQ ID NO: 30600 - protein, 9 aa, Homo sapiens
  misc_feature: Table A; Target 30600; HLA-A*68:02; IL22RA2; ENSG00000164485; CTA
FTPWWETKI

SEQ ID NO: 30601 - protein, 8 aa, Homo sapiens
  misc_feature: Table A; Target 30601; HLA-B*08:01; IL22RA2; ENSG00000164485; CTA
FVQYKIMF

SEQ ID NO: 30602 - protein, 10 aa, Homo sapiens
  misc_feature: Table A; Target 30602; HLA-A*29:02; IL22RA2; ENSG00000164485; CTA
GNSSVYFVQY

SEQ ID NO: 30603 - protein, 10 aa, Homo sapiens
  misc_feature: Table A; Target 30603; HLA-A*30:02; IL22RA2; ENSG00000164485; CTA
GNSSVYFVQY

SEQ ID NO: 30604 - protein, 11 aa, Homo sapiens
  misc_feature: Table A; Target 30604; HLA-C*16:04; IL22RA2; ENSG00000164485; CTA
GRALTGNSSVY

SEQ ID NO: 30605 - protein, 11 aa, Homo sapiens
  misc_feature: Table A; Target 30605; HLA-A*30:02; IL22RA2; ENSG00000164485; CTA
GRVRAASAGSY

SEQ ID NO: 30606 - protein, 11 aa, Homo sapiens
  misc_feature: Table A; Target 30606; HLA-B*27:02; IL22RA2; ENSG00000164485; CTA
GRVRAASAGSY

SEQ ID NO: 30607 - protein, 11 aa, Homo sapiens
  misc_feature: Table A; Target 30607; HLA-C*16:04; IL22RA2; ENSG00000164485; CTA
GRVRAASAGSY

SEQ ID NO: 30608 - protein, 9 aa, Homo sapiens
  misc_feature: Table A; Target 30608; HLA-A*32:01; IL22RA2; ENSG00000164485; CTA
GTQSTHESL

SEQ ID NO: 30609 - protein, 9 aa, Homo sapiens
  misc_feature: Table A; Target 30609; HLA-B*58:01; IL22RA2; ENSG00000164485; CTA
GTQSTHESL

SEQ ID NO: 30610 - protein, 9 aa, Homo sapiens
  misc_feature: Table A; Target 30610; HLA-C*01:02; IL22RA2; ENSG00000164485; CTA
GTQSTHESL

SEQ ID NO: 30611 - protein, 9 aa, Homo sapiens
  misc_feature: Table A; Target 30611; HLA-C*14:02; IL22RA2; ENSG00000164485; CTA
GTQSTHESL

SEQ ID NO: 30612 - protein, 9 aa, Homo sapiens
  misc_feature: Table A; Target 30612; HLA-C*16:01; IL22RA2; ENSG00000164485; CTA
GTQSTHESL

SEQ ID NO: 30613 - protein, 9 aa, Homo sapiens
  misc_feature: Table A; Target 30613; HLA-C*16:02; IL22RA2; ENSG00000164485; CTA
GTQSTHESL

SEQ ID NO: 30614 - protein, 10 aa, Homo sapiens
  misc_feature: Table A; Target 30614; HLA-A*03:01; IL22RA2; ENSG00000164485; CTA
GTQSTHESLK

SEQ ID NO: 30615 - protein, 10 aa, Homo sapiens
  misc_feature: Table A; Target 30615; HLA-A*03:02; IL22RA2; ENSG00000164485; CTA
GTQSTHESLK

SEQ ID NO: 30616 - protein, 10 aa, Homo sapiens
  misc_feature: Table A; Target 30616; HLA-A*11:01; IL22RA2; ENSG00000164485; CTA
GTQSTHESLK

SEQ ID NO: 30617 - protein, 9 aa, Homo sapiens
  misc_feature: Table A; Target 30617; HLA-B*15:01; IL22RA2; ENSG00000164485; CTA
GVAGTQSTH

SEQ ID NO: 30618 - protein, 8 aa, Homo sapiens
  misc_feature: Table A; Target 30618; HLA-A*33:03; IL22RA2; ENSG00000164485; CTA
HAPNLPYR

SEQ ID NO: 30619 - protein, 8 aa, Homo sapiens
  misc_feature: Table A; Target 30619; HLA-B*51:01; IL22RA2; ENSG00000164485; CTA
HAPNLPYR

SEQ ID NO: 30620 - protein, 9 aa, Homo sapiens
  misc_feature: Table A; Target 30620; HLA-A*29:02; IL22RA2; ENSG00000164485; CTA
HAPNLPYRY

SEQ ID NO: 30621 - protein, 9 aa, Homo sapiens
  misc_feature: Table A; Target 30621; HLA-A*30:02; IL22RA2; ENSG00000164485; CTA
HAPNLPYRY

SEQ ID NO: 30622 - protein, 9 aa, Homo sapiens
  misc_feature: Table A; Target 30622; HLA-B*35:01; IL22RA2; ENSG00000164485; CTA
HAPNLPYRY

SEQ ID NO: 30623 - protein, 9 aa, Homo sapiens
  misc_feature: Table A; Target 30623; HLA-B*51:01; IL22RA2; ENSG00000164485; CTA
HAPNLPYRY

SEQ ID NO: 30624 - protein, 9 aa, Homo sapiens
  misc_feature: Table A; Target 30624; HLA-C*02:02; IL22RA2; ENSG00000164485; CTA
HAPNLPYRY

SEQ ID NO: 30625 - protein, 9 aa, Homo sapiens
  misc_feature: Table A; Target 30625; HLA-B*37:01; IL22RA2; ENSG00000164485; CTA
HESLKPQRV

SEQ ID NO: 30626 - protein, 9 aa, Homo sapiens
  misc_feature: Table A; Target 30626; HLA-B*44:03; IL22RA2; ENSG00000164485; CTA
HESLKPQRV

SEQ ID NO: 30627 - protein, 9 aa, Homo sapiens
  misc_feature: Table A; Target 30627; HLA-B*49:01; IL22RA2; ENSG00000164485; CTA
HESLKPQRV

SEQ ID NO: 30628 - protein, 9 aa, Homo sapiens
  misc_feature: Table A; Target 30628; HLA-B*27:02; IL22RA2; ENSG00000164485; CTA
HRAVEIEAL

SEQ ID NO: 30629 - protein, 9 aa, Homo sapiens
  misc_feature: Table A; Target 30629; HLA-B*27:05; IL22RA2; ENSG00000164485; CTA
HRAVEIEAL

SEQ ID NO: 30630 - protein, 9 aa, Homo sapiens
  misc_feature: Table A; Target 30630; HLA-B*38:01; IL22RA2; ENSG00000164485; CTA
HRAVEIEAL

SEQ ID NO: 30631 - protein, 9 aa, Homo sapiens
  misc_feature: Table A; Target 30631; HLA-B*39:01; IL22RA2; ENSG00000164485; CTA
HRAVEIEAL

SEQ ID NO: 30632 - protein, 8 aa, Homo sapiens
  misc_feature: Table A; Target 30632; HLA-B*37:01; IL22RA2; ENSG00000164485; CTA
IDPPVMNI

SEQ ID NO: 30633 - protein, 8 aa, Homo sapiens
  misc_feature: Table A; Target 30633; HLA-B*49:01; IL22RA2; ENSG00000164485; CTA
IDPPVMNI

SEQ ID NO: 30634 - protein, 8 aa, Homo sapiens
  misc_feature: Table A; Target 30634; HLA-B*51:01; IL22RA2; ENSG00000164485; CTA
IDPPVMNI

SEQ ID NO: 30635 - protein, 8 aa, Homo sapiens
  misc_feature: Table A; Target 30635; HLA-C*06:02; IL22RA2; ENSG00000164485; CTA
IDPPVMNI

SEQ ID NO: 30636 - protein, 8 aa, Homo sapiens
  misc_feature: Table A; Target 30636; HLA-C*12:03; IL22RA2; ENSG00000164485; CTA
IDPPVMNI

SEQ ID NO: 30637 - protein, 11 aa, Homo sapiens
  misc_feature: Table A; Target 30637; HLA-A*02:07; IL22RA2; ENSG00000164485; CTA
IDPPVMNITQV

SEQ ID NO: 30638 - protein, 10 aa, Homo sapiens
  misc_feature: Table A; Target 30638; HLA-A*01:01; IL22RA2; ENSG00000164485; CTA
IEALTPHSSY

SEQ ID NO: 30639 - protein, 10 aa, Homo sapiens
  misc_feature: Table A; Target 30639; HLA-A*25:01; IL22RA2; ENSG00000164485; CTA
IEALTPHSSY

SEQ ID NO: 30640 - protein, 10 aa, Homo sapiens
  misc_feature: Table A; Target 30640; HLA-A*26:01; IL22RA2; ENSG00000164485; CTA
IEALTPHSSY

SEQ ID NO: 30641 - protein, 10 aa, Homo sapiens
  misc_feature: Table A; Target 30641; HLA-A*30:01; IL22RA2; ENSG00000164485; CTA
IEALTPHSSY

SEQ ID NO: 30642 - protein, 10 aa, Homo sapiens
  misc_feature: Table A; Target 30642; HLA-A*30:02; IL22RA2; ENSG00000164485; CTA
IEALTPHSSY

SEQ ID NO: 30643 - protein, 10 aa, Homo sapiens
  misc_feature: Table A; Target 30643; HLA-B*15:01; IL22RA2; ENSG00000164485; CTA
IEALTPHSSY

SEQ ID NO: 30644 - protein, 10 aa, Homo sapiens
  misc_feature: Table A; Target 30644; HLA-B*15:03; IL22RA2; ENSG00000164485; CTA
IEALTPHSSY

SEQ ID NO: 30645 - protein, 10 aa, Homo sapiens
  misc_feature: Table A; Target 30645; HLA-B*18:01; IL22RA2; ENSG00000164485; CTA
IEALTPHSSY

SEQ ID NO: 30646 - protein, 10 aa, Homo sapiens
  misc_feature: Table A; Target 30646; HLA-B*27:02; IL22RA2; ENSG00000164485; CTA
IEALTPHSSY

SEQ ID NO: 30647 - protein, 10 aa, Homo sapiens
  misc_feature: Table A; Target 30647; HLA-B*37:01; IL22RA2; ENSG00000164485; CTA
IEALTPHSSY

SEQ ID NO: 30648 - protein, 10 aa, Homo sapiens
  misc_feature: Table A; Target 30648; HLA-B*40:01; IL22RA2; ENSG00000164485; CTA
IEALTPHSSY

SEQ ID NO: 30649 - protein, 10 aa, Homo sapiens
  misc_feature: Table A; Target 30649; HLA-B*44:02; IL22RA2; ENSG00000164485; CTA
IEALTPHSSY

SEQ ID NO: 30650 - protein, 10 aa, Homo sapiens
  misc_feature: Table A; Target 30650; HLA-B*44:03; IL22RA2; ENSG00000164485; CTA
IEALTPHSSY

SEQ ID NO: 30651 - protein, 10 aa, Homo sapiens
  misc_feature: Table A; Target 30651; HLA-B*49:01; IL22RA2; ENSG00000164485; CTA
IEALTPHSSY

SEQ ID NO: 30652 - protein, 10 aa, Homo sapiens
  misc_feature: Table A; Target 30652; HLA-C*02:02; IL22RA2; ENSG00000164485; CTA
IEALTPHSSY

SEQ ID NO: 30653 - protein, 10 aa, Homo sapiens
  misc_feature: Table A; Target 30653; HLA-C*14:02; IL22RA2; ENSG00000164485; CTA
IEALTPHSSY

SEQ ID NO: 30654 - protein, 10 aa, Homo sapiens
  misc_feature: Table A; Target 30654; HLA-C*16:01; IL22RA2; ENSG00000164485; CTA
IEALTPHSSY

SEQ ID NO: 30655 - protein, 10 aa, Homo sapiens
  misc_feature: Table A; Target 30655; HLA-C*16:04; IL22RA2; ENSG00000164485; CTA
IEALTPHSSY

SEQ ID NO: 30656 - protein, 9 aa, Homo sapiens
  misc_feature: Table A; Target 30656; HLA-A*01:01; IL22RA2; ENSG00000164485; CTA
IEDYYELLY

SEQ ID NO: 30657 - protein, 9 aa, Homo sapiens
  misc_feature: Table A; Target 30657; HLA-B*18:01; IL22RA2; ENSG00000164485; CTA
IEDYYELLY

SEQ ID NO: 30658 - protein, 9 aa, Homo sapiens
  misc_feature: Table A; Target 30658; HLA-B*44:02; IL22RA2; ENSG00000164485; CTA
IEDYYELLY

SEQ ID NO: 30659 - protein, 9 aa, Homo sapiens
  misc_feature: Table A; Target 30659; HLA-B*44:03; IL22RA2; ENSG00000164485; CTA
IEDYYELLY

SEQ ID NO: 30660 - protein, 8 aa, Homo sapiens
  misc_feature: Table A; Target 30660; HLA-A*03:01; IL22RA2; ENSG00000164485; CTA
IINNSLEK

SEQ ID NO: 30661 - protein, 8 aa, Homo sapiens
  misc_feature: Table A; Target 30661; HLA-A*03:02; IL22RA2; ENSG00000164485; CTA
IINNSLEK

SEQ ID NO: 30662 - protein, 8 aa, Homo sapiens
  misc_feature: Table A; Target 30662; HLA-B*27:02; IL22RA2; ENSG00000164485; CTA
IINNSLEK

SEQ ID NO: 30663 - protein, 11 aa, Homo sapiens
  misc_feature: Table A; Target 30663; HLA-A*03:02; IL22RA2; ENSG00000164485; CTA
IINNSLEKEQK

SEQ ID NO: 30664 - protein, 9 aa, Homo sapiens
  misc_feature: Table A; Target 30664; HLA-A*01:01; IL22RA2; ENSG00000164485; CTA
ILHAPNLPY

SEQ ID NO: 30665 - protein, 9 aa, Homo sapiens
  misc_feature: Table A; Target 30665; HLA-A*03:01; IL22RA2; ENSG00000164485; CTA
ILHAPNLPY

SEQ ID NO: 30666 - protein, 9 aa, Homo sapiens
  misc_feature: Table A; Target 30666; HLA-A*29:02; IL22RA2; ENSG00000164485; CTA
ILHAPNLPY

SEQ ID NO: 30667 - protein, 9 aa, Homo sapiens
  misc_feature: Table A; Target 30667; HLA-A*30:02; IL22RA2; ENSG00000164485; CTA
ILHAPNLPY

SEQ ID NO: 30668 - protein, 9 aa, Homo sapiens
  misc_feature: Table A; Target 30668; HLA-B*15:01; IL22RA2; ENSG00000164485; CTA
ILHAPNLPY

SEQ ID NO: 30669 - protein, 9 aa, Homo sapiens
  misc_feature: Table A; Target 30669; HLA-B*46:01; IL22RA2; ENSG00000164485; CTA
ILHAPNLPY

SEQ ID NO: 30670 - protein, 9 aa, Homo sapiens
  misc_feature: Table A; Target 30670; HLA-C*07:04; IL22RA2; ENSG00000164485; CTA
ILHAPNLPY

SEQ ID NO: 30671 - protein, 11 aa, Homo sapiens
  misc_feature: Table A; Target 30671; HLA-A*29:02; IL22RA2; ENSG00000164485; CTA
ILHAPNLPYRY

SEQ ID NO: 30672 - protein, 11 aa, Homo sapiens
  misc_feature: Table A; Target 30672; HLA-A*30:02; IL22RA2; ENSG00000164485; CTA
ILHAPNLPYRY

SEQ ID NO: 30673 - protein, 10 aa, Homo sapiens
  misc_feature: Table A; Target 30673; HLA-B*27:02; IL22RA2; ENSG00000164485; CTA
INNSLEKEQK

SEQ ID NO: 30674 - protein, 8 aa, Homo sapiens
  misc_feature: Table A; Target 30674; HLA-C*01:02; IL22RA2; ENSG00000164485; CTA
ITQVNGSL

SEQ ID NO: 30675 - protein, 8 aa, Homo sapiens
  misc_feature: Table A; Target 30675; HLA-C*03:04; IL22RA2; ENSG00000164485; CTA
ITQVNGSL

SEQ ID NO: 30676 - protein, 9 aa, Homo sapiens
  misc_feature: Table A; Target 30676; HLA-C*01:02; IL22RA2; ENSG00000164485; CTA
ITQVNGSLL

SEQ ID NO: 30677 - protein, 9 aa, Homo sapiens
  misc_feature: Table A; Target 30677; HLA-C*03:03; IL22RA2; ENSG00000164485; CTA
ITQVNGSLL

SEQ ID NO: 30678 - protein, 9 aa, Homo sapiens
  misc_feature: Table A; Target 30678; HLA-C*03:04; IL22RA2; ENSG00000164485; CTA
ITQVNGSLL

SEQ ID NO: 30679 - protein, 9 aa, Homo sapiens
  misc_feature: Table A; Target 30679; HLA-C*14:02; IL22RA2; ENSG00000164485; CTA
ITQVNGSLL

SEQ ID NO: 30680 - protein, 9 aa, Homo sapiens
  misc_feature: Table A; Target 30680; HLA-A*24:02; IL22RA2; ENSG00000164485; CTA
IYQPMLDRR

SEQ ID NO: 30681 - protein, 9 aa, Homo sapiens
  misc_feature: Table A; Target 30681; HLA-A*31:01; IL22RA2; ENSG00000164485; CTA
IYQPMLDRR

SEQ ID NO: 30682 - protein, 10 aa, Homo sapiens
  misc_feature: Table A; Target 30682; HLA-B*40:01; IL22RA2; ENSG00000164485; CTA
KEDCWGTQEL

SEQ ID NO: 30683 - protein, 10 aa, Homo sapiens
  misc_feature: Table A; Target 30683; HLA-A*30:02; IL22RA2; ENSG00000164485; CTA
KEKNVSIEDY

SEQ ID NO: 30684 - protein, 10 aa, Homo sapiens
  misc_feature: Table A; Target 30684; HLA-B*44:02; IL22RA2; ENSG00000164485; CTA
KEKNVSIEDY

SEQ ID NO: 30685 - protein, 10 aa, Homo sapiens
  misc_feature: Table A; Target 30685; HLA-B*44:03; IL22RA2; ENSG00000164485; CTA
KEKNVSIEDY

SEQ ID NO: 30686 - protein, 11 aa, Homo sapiens
  misc_feature: Table A; Target 30686; HLA-A*30:02; IL22RA2; ENSG00000164485; CTA
KEKNVSIEDYY

SEQ ID NO: 30687 - protein, 11 aa, Homo sapiens
  misc_feature: Table A; Target 30687; HLA-B*44:02; IL22RA2; ENSG00000164485; CTA
KEKNVSIEDYY

SEQ ID NO: 30688 - protein, 11 aa, Homo sapiens
  misc_feature: Table A; Target 30688; HLA-B*44:03; IL22RA2; ENSG00000164485; CTA
KEKNVSIEDYY

SEQ ID NO: 30689 - protein, 11 aa, Homo sapiens
  misc_feature: Table A; Target 30689; HLA-C*16:04; IL22RA2; ENSG00000164485; CTA
KEKNVSIEDYY

SEQ ID NO: 30690 - protein, 9 aa, Homo sapiens
  misc_feature: Table A; Target 30690; HLA-B*40:02; IL22RA2; ENSG00000164485; CTA
KEQKVYEGA

SEQ ID NO: 30691 - protein, 9 aa, Homo sapiens
  misc_feature: Table A; Target 30691; HLA-A*01:01; IL22RA2; ENSG00000164485; CTA
KIDPPVMNI

SEQ ID NO: 30692 - protein, 9 aa, Homo sapiens
  misc_feature: Table A; Target 30692; HLA-A*02:01; IL22RA2; ENSG00000164485; CTA
KIDPPVMNI

SEQ ID NO: 30693 - protein, 9 aa, Homo sapiens
  misc_feature: Table A; Target 30693; HLA-A*02:03; IL22RA2; ENSG00000164485; CTA
KIDPPVMNI

SEQ ID NO: 30694 - protein, 9 aa, Homo sapiens
  misc_feature: Table A; Target 30694; HLA-A*02:04; IL22RA2; ENSG00000164485; CTA
KIDPPVMNI

SEQ ID NO: 30695 - protein, 9 aa, Homo sapiens
  misc_feature: Table A; Target 30695; HLA-A*02:07; IL22RA2; ENSG00000164485; CTA
KIDPPVMNI

SEQ ID NO: 30696 - protein, 9 aa, Homo sapiens
  misc_feature: Table A; Target 30696; HLA-A*03:01; IL22RA2; ENSG00000164485; CTA
KIDPPVMNI

SEQ ID NO: 30697 - protein, 9 aa, Homo sapiens
  misc_feature: Table A; Target 30697; HLA-A*03:02; IL22RA2; ENSG00000164485; CTA
KIDPPVMNI

SEQ ID NO: 30698 - protein, 9 aa, Homo sapiens
  misc_feature: Table A; Target 30698; HLA-A*30:01; IL22RA2; ENSG00000164485; CTA
KIDPPVMNI

SEQ ID NO: 30699 - protein, 9 aa, Homo sapiens
  misc_feature: Table A; Target 30699; HLA-A*31:01; IL22RA2; ENSG00000164485; CTA
KIDPPVMNI

SEQ ID NO: 30700 - protein, 9 aa, Homo sapiens
  misc_feature: Table A; Target 30700; HLA-A*32:01; IL22RA2; ENSG00000164485; CTA
KIDPPVMNI

SEQ ID NO: 30701 - protein, 9 aa, Homo sapiens
  misc_feature: Table A; Target 30701; HLA-B*13:02; IL22RA2; ENSG00000164485; CTA
KIDPPVMNI

SEQ ID NO: 30702 - protein, 9 aa, Homo sapiens
  misc_feature: Table A; Target 30702; HLA-B*37:01; IL22RA2; ENSG00000164485; CTA
KIDPPVMNI

SEQ ID NO: 30703 - protein, 9 aa, Homo sapiens
  misc_feature: Table A; Target 30703; HLA-B*38:01; IL22RA2; ENSG00000164485; CTA
KIDPPVMNI

SEQ ID NO: 30704 - protein, 9 aa, Homo sapiens
  misc_feature: Table A; Target 30704; HLA-B*49:01; IL22RA2; ENSG00000164485; CTA
KIDPPVMNI

SEQ ID NO: 30705 - protein, 9 aa, Homo sapiens
  misc_feature: Table A; Target 30705; HLA-B*58:01; IL22RA2; ENSG00000164485; CTA
KIDPPVMNI

SEQ ID NO: 30706 - protein, 9 aa, Homo sapiens
  misc_feature: Table A; Target 30706; HLA-C*04:01; IL22RA2; ENSG00000164485; CTA
KIDPPVMNI

SEQ ID NO: 30707 - protein, 9 aa, Homo sapiens
  misc_feature: Table A; Target 30707; HLA-C*05:01; IL22RA2; ENSG00000164485; CTA
KIDPPVMNI

SEQ ID NO: 30708 - protein, 9 aa, Homo sapiens
  misc_feature: Table A; Target 30708; HLA-A*29:02; IL22RA2; ENSG00000164485; CTA
KNVSIEDYY

SEQ ID NO: 30709 - protein, 9 aa, Homo sapiens
  misc_feature: Table A; Target 30709; HLA-A*30:02; IL22RA2; ENSG00000164485; CTA
KNVSIEDYY

SEQ ID NO: 30710 - protein, 10 aa, Homo sapiens
  misc_feature: Table A; Target 30710; HLA-B*56:01; IL22RA2; ENSG00000164485; CTA
KPQRVQFQSR

SEQ ID NO: 30711 - protein, 8 aa, Homo sapiens
  misc_feature: Table A; Target 30711; HLA-A*03:01; IL22RA2; ENSG00000164485; CTA
KVYEGAHR

SEQ ID NO: 30712 - protein, 8 aa, Homo sapiens
  misc_feature: Table A; Target 30712; HLA-A*31:01; IL22RA2; ENSG00000164485; CTA
KVYEGAHR

SEQ ID NO: 30713 - protein, 9 aa, Homo sapiens
  misc_feature: Table A; Target 30713; HLA-B*55:01; IL22RA2; ENSG00000164485; CTA
KVYEGAHRA

SEQ ID NO: 30714 - protein, 10 aa, Homo sapiens
  misc_feature: Table A; Target 30714; HLA-A*02:01; IL22RA2; ENSG00000164485; CTA
KVYEGAHRAV

SEQ ID NO: 30715 - protein, 10 aa, Homo sapiens
  misc_feature: Table A; Target 30715; HLA-A*02:03; IL22RA2; ENSG00000164485; CTA
KVYEGAHRAV

SEQ ID NO: 30716 - protein, 10 aa, Homo sapiens
  misc_feature: Table A; Target 30716; HLA-A*03:01; IL22RA2; ENSG00000164485; CTA
KVYEGAHRAV

SEQ ID NO: 30717 - protein, 10 aa, Homo sapiens
  misc_feature: Table A; Target 30717; HLA-C*06:02; IL22RA2; ENSG00000164485; CTA
KVYEGAHRAV

SEQ ID NO: 30718 - protein, 9 aa, Homo sapiens
  misc_feature: Table A; Target 30718; HLA-B*57:01; IL22RA2; ENSG00000164485; CTA
LAKYGQRQW

SEQ ID NO: 30719 - protein, 8 aa, Homo sapiens
  misc_feature: Table A; Target 30719; HLA-B*15:03; IL22RA2; ENSG00000164485; CTA
LEKEQKVY

SEQ ID NO: 30720 - protein, 8 aa, Homo sapiens
  misc_feature: Table A; Target 30720; HLA-B*18:01; IL22RA2; ENSG00000164485; CTA
LEKEQKVY

SEQ ID NO: 30721 - protein, 10 aa, Homo sapiens
  misc_feature: Table A; Target 30721; HLA-A*29:02; IL22RA2; ENSG00000164485; CTA
LHAPNLPYRY

SEQ ID NO: 30722 - protein, 10 aa, Homo sapiens
  misc_feature: Table A; Target 30722; HLA-B*57:01; IL22RA2; ENSG00000164485; CTA
LHAPNLPYRY

SEQ ID NO: 30723 - protein, 9 aa, Homo sapiens
  misc_feature: Table A; Target 30723; HLA-A*02:01; IL22RA2; ENSG00000164485; CTA
LISFFLTGV

SEQ ID NO: 30724 - protein, 9 aa, Homo sapiens
  misc_feature: Table A; Target 30724; HLA-A*02:03; IL22RA2; ENSG00000164485; CTA
LISFFLTGV

SEQ ID NO: 30725 - protein, 9 aa, Homo sapiens
  misc_feature: Table A; Target 30725; HLA-A*02:04; IL22RA2; ENSG00000164485; CTA
LISFFLTGV

SEQ ID NO: 30726 - protein, 9 aa, Homo sapiens
  misc_feature: Table A; Target 30726; HLA-A*02:07; IL22RA2; ENSG00000164485; CTA
LISFFLTGV

SEQ ID NO: 30727 - protein, 9 aa, Homo sapiens
  misc_feature: Table A; Target 30727; HLA-A*68:02; IL22RA2; ENSG00000164485; CTA
LISFFLTGV

SEQ ID NO: 30728 - protein, 9 aa, Homo sapiens
  misc_feature: Table A; Target 30728; HLA-B*15:03; IL22RA2; ENSG00000164485; CTA
LQWQPGRAL

SEQ ID NO: 30729 - protein, 9 aa, Homo sapiens
  misc_feature: Table A; Target 30729; HLA-C*03:03; IL22RA2; ENSG00000164485; CTA
LQWQPGRAL

SEQ ID NO: 30730 - protein, 9 aa, Homo sapiens
  misc_feature: Table A; Target 30730; HLA-C*03:04; IL22RA2; ENSG00000164485; CTA
LQWQPGRAL

SEQ ID NO: 30731 - protein, 8 aa, Homo sapiens
  misc_feature: Table A; Target 30731; HLA-A*01:01; IL22RA2; ENSG00000164485; CTA
LTGNSSVY

SEQ ID NO: 30732 - protein, 8 aa, Homo sapiens
  misc_feature: Table A; Target 30732; HLA-B*15:01; IL22RA2; ENSG00000164485; CTA
LTGNSSVY

SEQ ID NO: 30733 - protein, 8 aa, Homo sapiens
  misc_feature: Table A; Target 30733; HLA-B*39:01; IL22RA2; ENSG00000164485; CTA
LTGNSSVY

SEQ ID NO: 30734 - protein, 8 aa, Homo sapiens
  misc_feature: Table A; Target 30734; HLA-B*46:01; IL22RA2; ENSG00000164485; CTA
LTGNSSVY

SEQ ID NO: 30735 - protein, 8 aa, Homo sapiens
  misc_feature: Table A; Target 30735; HLA-C*01:02; IL22RA2; ENSG00000164485; CTA
LTGNSSVY

SEQ ID NO: 30736 - protein, 8 aa, Homo sapiens
  misc_feature: Table A; Target 30736; HLA-C*07:01; IL22RA2; ENSG00000164485; CTA
LTGNSSVY

SEQ ID NO: 30737 - protein, 8 aa, Homo sapiens
  misc_feature: Table A; Target 30737; HLA-C*07:04; IL22RA2; ENSG00000164485; CTA
LTGNSSVY

SEQ ID NO: 30738 - protein, 8 aa, Homo sapiens
  misc_feature: Table A; Target 30738; HLA-C*12:03; IL22RA2; ENSG00000164485; CTA
LTGNSSVY

SEQ ID NO: 30739 - protein, 8 aa, Homo sapiens
  misc_feature: Table A; Target 30739; HLA-C*14:02; IL22RA2; ENSG00000164485; CTA
LTGNSSVY

SEQ ID NO: 30740 - protein, 9 aa, Homo sapiens
  misc_feature: Table A; Target 30740; HLA-A*32:01; IL22RA2; ENSG00000164485; CTA
LTGNSSVYF

SEQ ID NO: 30741 - protein, 9 aa, Homo sapiens
  misc_feature: Table A; Target 30741; HLA-C*07:04; IL22RA2; ENSG00000164485; CTA
LTGNSSVYF

SEQ ID NO: 30742 - protein, 8 aa, Homo sapiens
  misc_feature: Table A; Target 30742; HLA-C*12:03; IL22RA2; ENSG00000164485; CTA
LTGVAGTQ

SEQ ID NO: 30743 - protein, 9 aa, Homo sapiens
  misc_feature: Table A; Target 30743; HLA-A*02:04; IL22RA2; ENSG00000164485; CTA
LVILHAPNL

SEQ ID NO: 30744 - protein, 9 aa, Homo sapiens
  misc_feature: Table A; Target 30744; HLA-C*03:04; IL22RA2; ENSG00000164485; CTA
LVILHAPNL

SEQ ID NO: 30745 - protein, 9 aa, Homo sapiens
  misc_feature: Table A; Target 30745; HLA-B*57:01; IL22RA2; ENSG00000164485; CTA
MTPRFTPWW

SEQ ID NO: 30746 - protein, 9 aa, Homo sapiens
  misc_feature: Table A; Target 30746; HLA-C*01:02; IL22RA2; ENSG00000164485; CTA
NITQVNGSL

SEQ ID NO: 30747 - protein, 10 aa, Homo sapiens
  misc_feature: Table A; Target 30747; HLA-C*16:02; IL22RA2; ENSG00000164485; CTA
NSLEKEQKVY

SEQ ID NO: 30748 - protein, 9 aa, Homo sapiens
  misc_feature: Table A; Target 30748; HLA-A*01:01; IL22RA2; ENSG00000164485; CTA
NSSVYFVQY

SEQ ID NO: 30749 - protein, 9 aa, Homo sapiens
  misc_feature: Table A; Target 30749; HLA-A*29:02; IL22RA2; ENSG00000164485; CTA
NSSVYFVQY

SEQ ID NO: 30750 - protein, 9 aa, Homo sapiens
  misc_feature: Table A; Target 30750; HLA-A*30:02; IL22RA2; ENSG00000164485; CTA
NSSVYFVQY

SEQ ID NO: 30751 - protein, 9 aa, Homo sapiens
  misc_feature: Table A; Target 30751; HLA-B*18:01; IL22RA2; ENSG00000164485; CTA
NSSVYFVQY

SEQ ID NO: 30752 - protein, 9 aa, Homo sapiens
  misc_feature: Table A; Target 30752; HLA-B*35:01; IL22RA2; ENSG00000164485; CTA
NSSVYFVQY

SEQ ID NO: 30753 - protein, 9 aa, Homo sapiens
  misc_feature: Table A; Target 30753; HLA-C*01:02; IL22RA2; ENSG00000164485; CTA
NSSVYFVQY

SEQ ID NO: 30754 - protein, 9 aa, Homo sapiens
  misc_feature: Table A; Target 30754; HLA-C*02:02; IL22RA2; ENSG00000164485; CTA
NSSVYFVQY

SEQ ID NO: 30755 - protein, 9 aa, Homo sapiens
  misc_feature: Table A; Target 30755; HLA-C*07:06; IL22RA2; ENSG00000164485; CTA
NSSVYFVQY

SEQ ID NO: 30756 - protein, 9 aa, Homo sapiens
  misc_feature: Table A; Target 30756; HLA-C*12:03; IL22RA2; ENSG00000164485; CTA
NSSVYFVQY

SEQ ID NO: 30757 - protein, 9 aa, Homo sapiens
  misc_feature: Table A; Target 30757; HLA-C*16:01; IL22RA2; ENSG00000164485; CTA
NSSVYFVQY

SEQ ID NO: 30758 - protein, 9 aa, Homo sapiens
  misc_feature: Table A; Target 30758; HLA-C*16:02; IL22RA2; ENSG00000164485; CTA
NSSVYFVQY

SEQ ID NO: 30759 - protein, 9 aa, Homo sapiens
  misc_feature: Table A; Target 30759; HLA-B*56:01; IL22RA2; ENSG00000164485; CTA
PPVMNITQV

SEQ ID NO: 30760 - protein, 9 aa, Homo sapiens
  misc_feature: Table A; Target 30760; HLA-A*31:01; IL22RA2; ENSG00000164485; CTA
PQRVQFQSR

SEQ ID NO: 30761 - protein, 10 aa, Homo sapiens
  misc_feature: Table A; Target 30761; HLA-B*27:02; IL22RA2; ENSG00000164485; CTA
QRVQFQSRNF

SEQ ID NO: 30762 - protein, 10 aa, Homo sapiens
  misc_feature: Table A; Target 30762; HLA-C*16:04; IL22RA2; ENSG00000164485; CTA
QRVQFQSRNF

SEQ ID NO: 30763 - protein, 11 aa, Homo sapiens
  misc_feature: Table A; Target 30763; HLA-B*57:01; IL22RA2; ENSG00000164485; CTA
QSRNFHNILQW

SEQ ID NO: 30764 - protein, 9 aa, Homo sapiens
  misc_feature: Table A; Target 30764; HLA-A*25:01; IL22RA2; ENSG00000164485; CTA
QVNGSLLVI

SEQ ID NO: 30765 - protein, 9 aa, Homo sapiens
  misc_feature: Table A; Target 30765; HLA-B*13:02; IL22RA2; ENSG00000164485; CTA
QVNGSLLVI

SEQ ID NO: 30766 - protein, 8 aa, Homo sapiens
  misc_feature: Table A; Target 30766; HLA-A*30:02; IL22RA2; ENSG00000164485; CTA
RAASAGSY

SEQ ID NO: 30767 - protein, 8 aa, Homo sapiens
  misc_feature: Table A; Target 30767; HLA-B*15:01; IL22RA2; ENSG00000164485; CTA
RAASAGSY

SEQ ID NO: 30768 - protein, 8 aa, Homo sapiens
  misc_feature: Table A; Target 30768; HLA-B*46:01; IL22RA2; ENSG00000164485; CTA
RAASAGSY

SEQ ID NO: 30769 - protein, 8 aa, Homo sapiens
  misc_feature: Table A; Target 30769; HLA-B*58:01; IL22RA2; ENSG00000164485; CTA
RAASAGSY

SEQ ID NO: 30770 - protein, 8 aa, Homo sapiens
  misc_feature: Table A; Target 30770; HLA-C*16:01; IL22RA2; ENSG00000164485; CTA
RAASAGSY

SEQ ID NO: 30771 - protein, 11 aa, Homo sapiens
  misc_feature: Table A; Target 30771; HLA-A*25:01; IL22RA2; ENSG00000164485; CTA
RAASAGSYSEW

SEQ ID NO: 30772 - protein, 11 aa, Homo sapiens
  misc_feature: Table A; Target 30772; HLA-A*30:02; IL22RA2; ENSG00000164485; CTA
RAASAGSYSEW

SEQ ID NO: 30773 - protein, 11 aa, Homo sapiens
  misc_feature: Table A; Target 30773; HLA-A*32:01; IL22RA2; ENSG00000164485; CTA
RAASAGSYSEW

SEQ ID NO: 30774 - protein, 11 aa, Homo sapiens
  misc_feature: Table A; Target 30774; HLA-B*44:02; IL22RA2; ENSG00000164485; CTA
RAASAGSYSEW

SEQ ID NO: 30775 - protein, 11 aa, Homo sapiens
  misc_feature: Table A; Target 30775; HLA-B*44:03; IL22RA2; ENSG00000164485; CTA
RAASAGSYSEW

SEQ ID NO: 30776 - protein, 11 aa, Homo sapiens
  misc_feature: Table A; Target 30776; HLA-B*57:01; IL22RA2; ENSG00000164485; CTA
RAASAGSYSEW

SEQ ID NO: 30777 - protein, 11 aa, Homo sapiens
  misc_feature: Table A; Target 30777; HLA-B*58:01; IL22RA2; ENSG00000164485; CTA
RAASAGSYSEW

SEQ ID NO: 30778 - protein, 11 aa, Homo sapiens
  misc_feature: Table A; Target 30778; HLA-C*02:02; IL22RA2; ENSG00000164485; CTA
RAASAGSYSEW

SEQ ID NO: 30779 - protein, 11 aa, Homo sapiens
  misc_feature: Table A; Target 30779; HLA-C*16:04; IL22RA2; ENSG00000164485; CTA
RAASAGSYSEW

SEQ ID NO: 30780 - protein, 10 aa, Homo sapiens
  misc_feature: Table A; Target 30780; HLA-A*23:01; IL22RA2; ENSG00000164485; CTA
RALTGNSSVY

SEQ ID NO: 30781 - protein, 10 aa, Homo sapiens
  misc_feature: Table A; Target 30781; HLA-A*30:02; IL22RA2; ENSG00000164485; CTA
RALTGNSSVY

SEQ ID NO: 30782 - protein, 10 aa, Homo sapiens
  misc_feature: Table A; Target 30782; HLA-A*32:01; IL22RA2; ENSG00000164485; CTA
RALTGNSSVY

SEQ ID NO: 30783 - protein, 10 aa, Homo sapiens
  misc_feature: Table A; Target 30783; HLA-B*15:01; IL22RA2; ENSG00000164485; CTA
RALTGNSSVY

SEQ ID NO: 30784 - protein, 10 aa, Homo sapiens
  misc_feature: Table A; Target 30784; HLA-B*15:03; IL22RA2; ENSG00000164485; CTA
RALTGNSSVY

SEQ ID NO: 30785 - protein, 10 aa, Homo sapiens
  misc_feature: Table A; Target 30785; HLA-B*46:01; IL22RA2; ENSG00000164485; CTA
RALTGNSSVY

SEQ ID NO: 30786 - protein, 10 aa, Homo sapiens
  misc_feature: Table A; Target 30786; HLA-B*57:01; IL22RA2; ENSG00000164485; CTA
RALTGNSSVY

SEQ ID NO: 30787 - protein, 10 aa, Homo sapiens
  misc_feature: Table A; Target 30787; HLA-B*58:01; IL22RA2; ENSG00000164485; CTA
RALTGNSSVY

SEQ ID NO: 30788 - protein, 10 aa, Homo sapiens
  misc_feature: Table A; Target 30788; HLA-C*02:02; IL22RA2; ENSG00000164485; CTA
RALTGNSSVY

SEQ ID NO: 30789 - protein, 10 aa, Homo sapiens
  misc_feature: Table A; Target 30789; HLA-C*14:02; IL22RA2; ENSG00000164485; CTA
RALTGNSSVY

SEQ ID NO: 30790 - protein, 10 aa, Homo sapiens
  misc_feature: Table A; Target 30790; HLA-C*16:04; IL22RA2; ENSG00000164485; CTA
RALTGNSSVY

SEQ ID NO: 30791 - protein, 11 aa, Homo sapiens
  misc_feature: Table A; Target 30791; HLA-B*57:01; IL22RA2; ENSG00000164485; CTA
RALTGNSSVYF

SEQ ID NO: 30792 - protein, 11 aa, Homo sapiens
  misc_feature: Table A; Target 30792; HLA-B*58:01; IL22RA2; ENSG00000164485; CTA
RALTGNSSVYF

SEQ ID NO: 30793 - protein, 8 aa, Homo sapiens
  misc_feature: Table A; Target 30793; HLA-B*58:01; IL22RA2; ENSG00000164485; CTA
RAVEIEAL

SEQ ID NO: 30794 - protein, 9 aa, Homo sapiens
  misc_feature: Table A; Target 30794; HLA-B*57:01; IL22RA2; ENSG00000164485; CTA
RNFHNILQW

SEQ ID NO: 30795 - protein, 9 aa, Homo sapiens
  misc_feature: Table A; Target 30795; HLA-A*03:01; IL22RA2; ENSG00000164485; CTA
RTLAKYGQR

SEQ ID NO: 30796 - protein, 9 aa, Homo sapiens
  misc_feature: Table A; Target 30796; HLA-A*31:01; IL22RA2; ENSG00000164485; CTA
RTLAKYGQR

SEQ ID NO: 30797 - protein, 11 aa, Homo sapiens
  misc_feature: Table A; Target 30797; HLA-B*57:01; IL22RA2; ENSG00000164485; CTA
RTLAKYGQRQW

SEQ ID NO: 30798 - protein, 9 aa, Homo sapiens
  misc_feature: Table A; Target 30798; HLA-A*02:04; IL22RA2; ENSG00000164485; CTA
RVFIINNSL

SEQ ID NO: 30799 - protein, 9 aa, Homo sapiens
  misc_feature: Table A; Target 30799; HLA-A*31:01; IL22RA2; ENSG00000164485; CTA
RVFIINNSL

SEQ ID NO: 30800 - protein, 9 aa, Homo sapiens
  misc_feature: Table A; Target 30800; HLA-A*32:01; IL22RA2; ENSG00000164485; CTA
RVFIINNSL

SEQ ID NO: 30801 - protein, 9 aa, Homo sapiens
  misc_feature: Table A; Target 30801; HLA-A*68:02; IL22RA2; ENSG00000164485; CTA
RVFIINNSL

SEQ ID NO: 30802 - protein, 9 aa, Homo sapiens
  misc_feature: Table A; Target 30802; HLA-B*07:02; IL22RA2; ENSG00000164485; CTA
RVFIINNSL

SEQ ID NO: 30803 - protein, 9 aa, Homo sapiens
  misc_feature: Table A; Target 30803; HLA-B*08:01; IL22RA2; ENSG00000164485; CTA
RVFIINNSL

SEQ ID NO: 30804 - protein, 9 aa, Homo sapiens
  misc_feature: Table A; Target 30804; HLA-B*27:05; IL22RA2; ENSG00000164485; CTA
RVFIINNSL

SEQ ID NO: 30805 - protein, 9 aa, Homo sapiens
  misc_feature: Table A; Target 30805; HLA-B*57:01; IL22RA2; ENSG00000164485; CTA
RVFIINNSL

SEQ ID NO: 30806 - protein, 9 aa, Homo sapiens
  misc_feature: Table A; Target 30806; HLA-B*58:01; IL22RA2; ENSG00000164485; CTA
RVFIINNSL

SEQ ID NO: 30807 - protein, 9 aa, Homo sapiens
  misc_feature: Table A; Target 30807; HLA-C*01:02; IL22RA2; ENSG00000164485; CTA
RVFIINNSL

SEQ ID NO: 30808 - protein, 9 aa, Homo sapiens
  misc_feature: Table A; Target 30808; HLA-C*07:02; IL22RA2; ENSG00000164485; CTA
RVFIINNSL

SEQ ID NO: 30809 - protein, 11 aa, Homo sapiens
  misc_feature: Table A; Target 30809; HLA-A*03:01; IL22RA2; ENSG00000164485; CTA
RVFIINNSLEK

SEQ ID NO: 30810 - protein, 11 aa, Homo sapiens
  misc_feature: Table A; Target 30810; HLA-A*11:01; IL22RA2; ENSG00000164485; CTA
RVFIINNSLEK

SEQ ID NO: 30811 - protein, 9 aa, Homo sapiens
  misc_feature: Table A; Target 30811; HLA-A*32:01; IL22RA2; ENSG00000164485; CTA
RVQFQSRNF

SEQ ID NO: 30812 - protein, 10 aa, Homo sapiens
  misc_feature: Table A; Target 30812; HLA-A*30:02; IL22RA2; ENSG00000164485; CTA
RVRAASAGSY

SEQ ID NO: 30813 - protein, 10 aa, Homo sapiens
  misc_feature: Table A; Target 30813; HLA-A*32:01; IL22RA2; ENSG00000164485; CTA
RVRAASAGSY

SEQ ID NO: 30814 - protein, 10 aa, Homo sapiens
  misc_feature: Table A; Target 30814; HLA-B*15:01; IL22RA2; ENSG00000164485; CTA
RVRAASAGSY

SEQ ID NO: 30815 - protein, 10 aa, Homo sapiens
  misc_feature: Table A; Target 30815; HLA-B*15:03; IL22RA2; ENSG00000164485; CTA
RVRAASAGSY

SEQ ID NO: 30816 - protein, 10 aa, Homo sapiens
  misc_feature: Table A; Target 30816; HLA-B*46:01; IL22RA2; ENSG00000164485; CTA
RVRAASAGSY

SEQ ID NO: 30817 - protein, 8 aa, Homo sapiens
  misc_feature: Table A; Target 30817; HLA-A*25:01; IL22RA2; ENSG00000164485; CTA
SAGSYSEW

SEQ ID NO: 30818 - protein, 8 aa, Homo sapiens
  misc_feature: Table A; Target 30818; HLA-A*32:01; IL22RA2; ENSG00000164485; CTA
SAGSYSEW

SEQ ID NO: 30819 - protein, 8 aa, Homo sapiens
  misc_feature: Table A; Target 30819; HLA-B*57:01; IL22RA2; ENSG00000164485; CTA
SAGSYSEW

SEQ ID NO: 30820 - protein, 8 aa, Homo sapiens
  misc_feature: Table A; Target 30820; HLA-B*58:01; IL22RA2; ENSG00000164485; CTA
SAGSYSEW

SEQ ID NO: 30821 - protein, 8 aa, Homo sapiens
  misc_feature: Table A; Target 30821; HLA-C*07:01; IL22RA2; ENSG00000164485; CTA
SAGSYSEW

SEQ ID NO: 30822 - protein, 8 aa, Homo sapiens
  misc_feature: Table A; Target 30822; HLA-C*12:03; IL22RA2; ENSG00000164485; CTA
SAGSYSEW

SEQ ID NO: 30823 - protein, 8 aa, Homo sapiens
  misc_feature: Table A; Target 30823; HLA-C*16:01; IL22RA2; ENSG00000164485; CTA
SAGSYSEW

SEQ ID NO: 30824 - protein, 8 aa, Homo sapiens
  misc_feature: Table A; Target 30824; HLA-B*18:01; IL22RA2; ENSG00000164485; CTA
SDIQEPYY

SEQ ID NO: 30825 - protein, 8 aa, Homo sapiens
  misc_feature: Table A; Target 30825; HLA-C*06:02; IL22RA2; ENSG00000164485; CTA
SDIQEPYY

SEQ ID NO: 30826 - protein, 8 aa, Homo sapiens
  misc_feature: Table A; Target 30826; HLA-C*07:01; IL22RA2; ENSG00000164485; CTA
SDIQEPYY

SEQ ID NO: 30827 - protein, 10 aa, Homo sapiens
  misc_feature: Table A; Target 30827; HLA-A*33:01; IL22RA2; ENSG00000164485; CTA
SDIQEPYYGR

SEQ ID NO: 30828 - protein, 10 aa, Homo sapiens
  misc_feature: Table A; Target 30828; HLA-A*30:02; IL22RA2; ENSG00000164485; CTA
SETSDIQEPY

SEQ ID NO: 30829 - protein, 10 aa, Homo sapiens
  misc_feature: Table A; Target 30829; HLA-B*18:01; IL22RA2; ENSG00000164485; CTA
SETSDIQEPY

SEQ ID NO: 30830 - protein, 10 aa, Homo sapiens
  misc_feature: Table A; Target 30830; HLA-B*27:02; IL22RA2; ENSG00000164485; CTA
SETSDIQEPY

SEQ ID NO: 30831 - protein, 10 aa, Homo sapiens
  misc_feature: Table A; Target 30831; HLA-B*40:01; IL22RA2; ENSG00000164485; CTA
SETSDIQEPY

SEQ ID NO: 30832 - protein, 10 aa, Homo sapiens
  misc_feature: Table A; Target 30832; HLA-B*44:02; IL22RA2; ENSG00000164485; CTA
SETSDIQEPY

SEQ ID NO: 30833 - protein, 10 aa, Homo sapiens
  misc_feature: Table A; Target 30833; HLA-B*44:03; IL22RA2; ENSG00000164485; CTA
SETSDIQEPY

SEQ ID NO: 30834 - protein, 10 aa, Homo sapiens
  misc_feature: Table A; Target 30834; HLA-C*16:04; IL22RA2; ENSG00000164485; CTA
SETSDIQEPY

SEQ ID NO: 30835 - protein, 11 aa, Homo sapiens
  misc_feature: Table A; Target 30835; HLA-A*30:02; IL22RA2; ENSG00000164485; CTA
SETSDIQEPYY

SEQ ID NO: 30836 - protein, 11 aa, Homo sapiens
  misc_feature: Table A; Target 30836; HLA-B*39:01; IL22RA2; ENSG00000164485; CTA
SETSDIQEPYY

SEQ ID NO: 30837 - protein, 11 aa, Homo sapiens
  misc_feature: Table A; Target 30837; HLA-B*44:02; IL22RA2; ENSG00000164485; CTA
SETSDIQEPYY

SEQ ID NO: 30838 - protein, 11 aa, Homo sapiens
  misc_feature: Table A; Target 30838; HLA-B*44:03; IL22RA2; ENSG00000164485; CTA
SETSDIQEPYY

SEQ ID NO: 30839 - protein, 9 aa, Homo sapiens
  misc_feature: Table A; Target 30839; HLA-B*18:01; IL22RA2; ENSG00000164485; CTA
SEWSMTPRF

SEQ ID NO: 30840 - protein, 9 aa, Homo sapiens
  misc_feature: Table A; Target 30840; HLA-B*37:01; IL22RA2; ENSG00000164485; CTA
SEWSMTPRF

SEQ ID NO: 30841 - protein, 9 aa, Homo sapiens
  misc_feature: Table A; Target 30841; HLA-B*44:02; IL22RA2; ENSG00000164485; CTA
SEWSMTPRF

SEQ ID NO: 30842 - protein, 9 aa, Homo sapiens
  misc_feature: Table A; Target 30842; HLA-B*44:03; IL22RA2; ENSG00000164485; CTA
SEWSMTPRF

SEQ ID NO: 30843 - protein, 9 aa, Homo sapiens
  misc_feature: Table A; Target 30843; HLA-C*14:02; IL22RA2; ENSG00000164485; CTA
SFFLTGVAG

SEQ ID NO: 30844 - protein, 8 aa, Homo sapiens
  misc_feature: Table A; Target 30844; HLA-C*05:01; IL22RA2; ENSG00000164485; CTA
SIEDYYEL

SEQ ID NO: 30845 - protein, 9 aa, Homo sapiens
  misc_feature: Table A; Target 30845; HLA-A*02:07; IL22RA2; ENSG00000164485; CTA
SIEDYYELL

SEQ ID NO: 30846 - protein, 9 aa, Homo sapiens
  misc_feature: Table A; Target 30846; HLA-C*05:01; IL22RA2; ENSG00000164485; CTA
SIEDYYELL

SEQ ID NO: 30847 - protein, 10 aa, Homo sapiens
  misc_feature: Table A; Target 30847; HLA-A*01:01; IL22RA2; ENSG00000164485; CTA
SIEDYYELLY

SEQ ID NO: 30848 - protein, 10 aa, Homo sapiens
  misc_feature: Table A; Target 30848; HLA-A*29:02; IL22RA2; ENSG00000164485; CTA
SIEDYYELLY

SEQ ID NO: 30849 - protein, 9 aa, Homo sapiens
  misc_feature: Table A; Target 30849; HLA-A*01:01; IL22RA2; ENSG00000164485; CTA
SLEKEQKVY

SEQ ID NO: 30850 - protein, 9 aa, Homo sapiens
  misc_feature: Table A; Target 30850; HLA-A*30:02; IL22RA2; ENSG00000164485; CTA
SLEKEQKVY

SEQ ID NO: 30851 - protein, 9 aa, Homo sapiens
  misc_feature: Table A; Target 30851; HLA-B*15:01; IL22RA2; ENSG00000164485; CTA
SLEKEQKVY

SEQ ID NO: 30852 - protein, 9 aa, Homo sapiens
  misc_feature: Table A; Target 30852; HLA-B*15:03; IL22RA2; ENSG00000164485; CTA
SLEKEQKVY

SEQ ID NO: 30853 - protein, 9 aa, Homo sapiens
  misc_feature: Table A; Target 30853; HLA-C*03:03; IL22RA2; ENSG00000164485; CTA
SLEKEQKVY

SEQ ID NO: 30854 - protein, 9 aa, Homo sapiens
  misc_feature: Table A; Target 30854; HLA-C*07:04; IL22RA2; ENSG00000164485; CTA
SLEKEQKVY

SEQ ID NO: 30855 - protein, 9 aa, Homo sapiens
  misc_feature: Table A; Target 30855; HLA-C*16:02; IL22RA2; ENSG00000164485; CTA
SLEKEQKVY

SEQ ID NO: 30856 - protein, 9 aa, Homo sapiens
  misc_feature: Table A; Target 30856; HLA-A*31:01; IL22RA2; ENSG00000164485; CTA
SLKPQRVQF

SEQ ID NO: 30857 - protein, 9 aa, Homo sapiens
  misc_feature: Table A; Target 30857; HLA-A*32:01; IL22RA2; ENSG00000164485; CTA
SLKPQRVQF

SEQ ID NO: 30858 - protein, 9 aa, Homo sapiens
  misc_feature: Table A; Target 30858; HLA-B*08:01; IL22RA2; ENSG00000164485; CTA
SLKPQRVQF

SEQ ID NO: 30859 - protein, 9 aa, Homo sapiens
  misc_feature: Table A; Target 30859; HLA-B*15:01; IL22RA2; ENSG00000164485; CTA
SLKPQRVQF

SEQ ID NO: 30860 - protein, 9 aa, Homo sapiens
  misc_feature: Table A; Target 30860; HLA-B*37:01; IL22RA2; ENSG00000164485; CTA
SLKPQRVQF

SEQ ID NO: 30861 - protein, 9 aa, Homo sapiens
  misc_feature: Table A; Target 30861; HLA-B*46:01; IL22RA2; ENSG00000164485; CTA
SLKPQRVQF

SEQ ID NO: 30862 - protein, 9 aa, Homo sapiens
  misc_feature: Table A; Target 30862; HLA-B*57:01; IL22RA2; ENSG00000164485; CTA
SLKPQRVQF

SEQ ID NO: 30863 - protein, 9 aa, Homo sapiens
  misc_feature: Table A; Target 30863; HLA-C*16:01; IL22RA2; ENSG00000164485; CTA
SLKPQRVQF

SEQ ID NO: 30864 - protein, 11 aa, Homo sapiens
  misc_feature: Table A; Target 30864; HLA-A*02:04; IL22RA2; ENSG00000164485; CTA
SLLVILHAPNL

SEQ ID NO: 30865 - protein, 9 aa, Homo sapiens
  misc_feature: Table A; Target 30865; HLA-A*24:02; IL22RA2; ENSG00000164485; CTA
SMTPRFTPW

SEQ ID NO: 30866 - protein, 8 aa, Homo sapiens
  misc_feature: Table A; Target 30866; HLA-B*15:01; IL22RA2; ENSG00000164485; CTA
SSVYFVQY

SEQ ID NO: 30867 - protein, 8 aa, Homo sapiens
  misc_feature: Table A; Target 30867; HLA-B*18:01; IL22RA2; ENSG00000164485; CTA
SSVYFVQY

SEQ ID NO: 30868 - protein, 8 aa, Homo sapiens
  misc_feature: Table A; Target 30868; HLA-C*12:03; IL22RA2; ENSG00000164485; CTA
SSVYFVQY

SEQ ID NO: 30869 - protein, 9 aa, Homo sapiens
  misc_feature: Table A; Target 30869; HLA-A*03:02; IL22RA2; ENSG00000164485; CTA
SSVYFVQYK

SEQ ID NO: 30870 - protein, 9 aa, Homo sapiens
  misc_feature: Table A; Target 30870; HLA-A*11:01; IL22RA2; ENSG00000164485; CTA
SSVYFVQYK

SEQ ID NO: 30871 - protein, 9 aa, Homo sapiens
  misc_feature: Table A; Target 30871; HLA-C*07:06; IL22RA2; ENSG00000164485; CTA
SSVYFVQYK

SEQ ID NO: 30872 - protein, 9 aa, Homo sapiens
  misc_feature: Table A; Target 30872; HLA-B*13:02; IL22RA2; ENSG00000164485; CTA
SSYCVVAEI

SEQ ID NO: 30873 - protein, 10 aa, Homo sapiens
  misc_feature: Table A; Target 30873; HLA-A*68:01; IL22RA2; ENSG00000164485; CTA
STHESLKPQR

SEQ ID NO: 30874 - protein, 9 aa, Homo sapiens
  misc_feature: Table A; Target 30874; HLA-A*02:07; IL22RA2; ENSG00000164485; CTA
SVYFVQYKI

SEQ ID NO: 30875 - protein, 9 aa, Homo sapiens
  misc_feature: Table A; Target 30875; HLA-A*68:02; IL22RA2; ENSG00000164485; CTA
SVYFVQYKI

SEQ ID NO: 30876 - protein, 9 aa, Homo sapiens
  misc_feature: Table A; Target 30876; HLA-B*13:02; IL22RA2; ENSG00000164485; CTA
SVYFVQYKI

SEQ ID NO: 30877 - protein, 9 aa, Homo sapiens
  misc_feature: Table A; Target 30877; HLA-A*29:02; IL22RA2; ENSG00000164485; CTA
SYCVVAEIY

SEQ ID NO: 30878 - protein, 10 aa, Homo sapiens
  misc_feature: Table A; Target 30878; HLA-A*31:01; IL22RA2; ENSG00000164485; CTA
SYSEWSMTPR

SEQ ID NO: 30879 - protein, 10 aa, Homo sapiens
  misc_feature: Table A; Target 30879; HLA-A*33:03; IL22RA2; ENSG00000164485; CTA
SYSEWSMTPR

SEQ ID NO: 30880 - protein, 11 aa, Homo sapiens
  misc_feature: Table A; Target 30880; HLA-A*24:02; IL22RA2; ENSG00000164485; CTA
SYSEWSMTPRF

SEQ ID NO: 30881 - protein, 8 aa, Homo sapiens
  misc_feature: Table A; Target 30881; HLA-C*04:01; IL22RA2; ENSG00000164485; CTA
TGNSSVYF

SEQ ID NO: 30882 - protein, 9 aa, Homo sapiens
  misc_feature: Table A; Target 30882; HLA-B*13:02; IL22RA2; ENSG00000164485; CTA
TGNSSVYFV

SEQ ID NO: 30883 - protein, 9 aa, Homo sapiens
  misc_feature: Table A; Target 30883; HLA-C*06:02; IL22RA2; ENSG00000164485; CTA
TGNSSVYFV

SEQ ID NO: 30884 - protein, 11 aa, Homo sapiens
  misc_feature: Table A; Target 30884; HLA-A*30:02; IL22RA2; ENSG00000164485; CTA
TGNSSVYFVQY

SEQ ID NO: 30885 - protein, 11 aa, Homo sapiens
  misc_feature: Table A; Target 30885; HLA-B*35:01; IL22RA2; ENSG00000164485; CTA
TGNSSVYFVQY

SEQ ID NO: 30886 - protein, 11 aa, Homo sapiens
  misc_feature: Table A; Target 30886; HLA-C*07:01; IL22RA2; ENSG00000164485; CTA
TGVAGTQSTHE

SEQ ID NO: 30887 - protein, 10 aa, Homo sapiens
  misc_feature: Table A; Target 30887; HLA-B*38:01; IL22RA2; ENSG00000164485; CTA
THESLKPQRV

SEQ ID NO: 30888 - protein, 8 aa, Homo sapiens
  misc_feature: Table A; Target 30888; HLA-B*15:03; IL22RA2; ENSG00000164485; CTA
TKIDPPVM

SEQ ID NO: 30889 - protein, 8 aa, Homo sapiens
  misc_feature: Table A; Target 30889; HLA-B*51:01; IL22RA2; ENSG00000164485; CTA
TPHSSYCV

SEQ ID NO: 30890 - protein, 8 aa, Homo sapiens
  misc_feature: Table A; Target 30890; HLA-B*56:01; IL22RA2; ENSG00000164485; CTA
TPHSSYCV

SEQ ID NO: 30891 - protein, 9 aa, Homo sapiens
  misc_feature: Table A; Target 30891; HLA-B*07:02; IL22RA2; ENSG00000164485; CTA
TPHSSYCVV

SEQ ID NO: 30892 - protein, 9 aa, Homo sapiens
  misc_feature: Table A; Target 30892; HLA-B*51:01; IL22RA2; ENSG00000164485; CTA
TPHSSYCVV

SEQ ID NO: 30893 - protein, 9 aa, Homo sapiens
  misc_feature: Table A; Target 30893; HLA-B*54:01; IL22RA2; ENSG00000164485; CTA
TPHSSYCVV

SEQ ID NO: 30894 - protein, 9 aa, Homo sapiens
  misc_feature: Table A; Target 30894; HLA-B*56:01; IL22RA2; ENSG00000164485; CTA
TPHSSYCVV

SEQ ID NO: 30895 - protein, 10 aa, Homo sapiens
  misc_feature: Table A; Target 30895; HLA-B*54:01; IL22RA2; ENSG00000164485; CTA
TPHSSYCVVA

SEQ ID NO: 30896 - protein, 10 aa, Homo sapiens
  misc_feature: Table A; Target 30896; HLA-B*56:01; IL22RA2; ENSG00000164485; CTA
TPHSSYCVVA

SEQ ID NO: 30897 - protein, 8 aa, Homo sapiens
  misc_feature: Table A; Target 30897; HLA-B*08:01; IL22RA2; ENSG00000164485; CTA
TQSTHESL

SEQ ID NO: 30898 - protein, 8 aa, Homo sapiens
  misc_feature: Table A; Target 30898; HLA-B*37:01; IL22RA2; ENSG00000164485; CTA
TQSTHESL

SEQ ID NO: 30899 - protein, 8 aa, Homo sapiens
  misc_feature: Table A; Target 30899; HLA-B*38:01; IL22RA2; ENSG00000164485; CTA
TQSTHESL

SEQ ID NO: 30900 - protein, 8 aa, Homo sapiens
  misc_feature: Table A; Target 30900; HLA-B*39:01; IL22RA2; ENSG00000164485; CTA
TQSTHESL

SEQ ID NO: 30901 - protein, 8 aa, Homo sapiens
  misc_feature: Table A; Target 30901; HLA-B*15:01; IL22RA2; ENSG00000164485; CTA
TQVNGSLL

SEQ ID NO: 30902 - protein, 8 aa, Homo sapiens
  misc_feature: Table A; Target 30902; HLA-B*15:03; IL22RA2; ENSG00000164485; CTA
TQVNGSLL

SEQ ID NO: 30903 - protein, 8 aa, Homo sapiens
  misc_feature: Table A; Target 30903; HLA-B*38:01; IL22RA2; ENSG00000164485; CTA
TQVNGSLL

SEQ ID NO: 30904 - protein, 8 aa, Homo sapiens
  misc_feature: Table A; Target 30904; HLA-B*39:01; IL22RA2; ENSG00000164485; CTA
TQVNGSLL

SEQ ID NO: 30905 - protein, 8 aa, Homo sapiens
  misc_feature: Table A; Target 30905; HLA-C*03:03; IL22RA2; ENSG00000164485; CTA
TQVNGSLL

SEQ ID NO: 30906 - protein, 8 aa, Homo sapiens
  misc_feature: Table A; Target 30906; HLA-C*03:04; IL22RA2; ENSG00000164485; CTA
TQVNGSLL

SEQ ID NO: 30907 - protein, 8 aa, Homo sapiens
  misc_feature: Table A; Target 30907; HLA-C*05:01; IL22RA2; ENSG00000164485; CTA
TQVNGSLL

SEQ ID NO: 30908 - protein, 8 aa, Homo sapiens
  misc_feature: Table A; Target 30908; HLA-C*14:02; IL22RA2; ENSG00000164485; CTA
TQVNGSLL

SEQ ID NO: 30909 - protein, 9 aa, Homo sapiens
  misc_feature: Table A; Target 30909; HLA-B*13:02; IL22RA2; ENSG00000164485; CTA
TQVNGSLLV

SEQ ID NO: 30910 - protein, 9 aa, Homo sapiens
  misc_feature: Table A; Target 30910; HLA-B*27:05; IL22RA2; ENSG00000164485; CTA
TQVNGSLLV

SEQ ID NO: 30911 - protein, 9 aa, Homo sapiens
  misc_feature: Table A; Target 30911; HLA-B*38:01; IL22RA2; ENSG00000164485; CTA
TQVNGSLLV

SEQ ID NO: 30912 - protein, 9 aa, Homo sapiens
  misc_feature: Table A; Target 30912; HLA-B*39:01; IL22RA2; ENSG00000164485; CTA
TQVNGSLLV

SEQ ID NO: 30913 - protein, 9 aa, Homo sapiens
  misc_feature: Table A; Target 30913; HLA-B*49:01; IL22RA2; ENSG00000164485; CTA
TQVNGSLLV

SEQ ID NO: 30914 - protein, 9 aa, Homo sapiens
  misc_feature: Table A; Target 30914; HLA-C*06:02; IL22RA2; ENSG00000164485; CTA
TQVNGSLLV

SEQ ID NO: 30915 - protein, 10 aa, Homo sapiens
  misc_feature: Table A; Target 30915; HLA-B*13:02; IL22RA2; ENSG00000164485; CTA
TQVNGSLLVI

SEQ ID NO: 30916 - protein, 10 aa, Homo sapiens
  misc_feature: Table A; Target 30916; HLA-B*38:01; IL22RA2; ENSG00000164485; CTA
TQVNGSLLVI

SEQ ID NO: 30917 - protein, 10 aa, Homo sapiens
  misc_feature: Table A; Target 30917; HLA-B*39:01; IL22RA2; ENSG00000164485; CTA
TQVNGSLLVI

SEQ ID NO: 30918 - protein, 11 aa, Homo sapiens
  misc_feature: Table A; Target 30918; HLA-B*38:01; IL22RA2; ENSG00000164485; CTA
TQVNGSLLVIL

SEQ ID NO: 30919 - protein, 8 aa, Homo sapiens
  misc_feature: Table A; Target 30919; HLA-A*01:01; IL22RA2; ENSG00000164485; CTA
TSDIQEPY

SEQ ID NO: 30920 - protein, 9 aa, Homo sapiens
  misc_feature: Table A; Target 30920; HLA-A*01:01; IL22RA2; ENSG00000164485; CTA
TSDIQEPYY

SEQ ID NO: 30921 - protein, 9 aa, Homo sapiens
  misc_feature: Table A; Target 30921; HLA-A*30:02; IL22RA2; ENSG00000164485; CTA
TSDIQEPYY

SEQ ID NO: 30922 - protein, 9 aa, Homo sapiens
  misc_feature: Table A; Target 30922; HLA-B*55:01; IL22RA2; ENSG00000164485; CTA
TSDIQEPYY

SEQ ID NO: 30923 - protein, 9 aa, Homo sapiens
  misc_feature: Table A; Target 30923; HLA-C*05:01; IL22RA2; ENSG00000164485; CTA
TSDIQEPYY

SEQ ID NO: 30924 - protein, 9 aa, Homo sapiens
  misc_feature: Table A; Target 30924; HLA-C*07:01; IL22RA2; ENSG00000164485; CTA
TSDIQEPYY

SEQ ID NO: 30925 - protein, 11 aa, Homo sapiens
  misc_feature: Table A; Target 30925; HLA-A*31:01; IL22RA2; ENSG00000164485; CTA
TSDIQEPYYGR

SEQ ID NO: 30926 - protein, 11 aa, Homo sapiens
  misc_feature: Table A; Target 30926; HLA-A*33:01; IL22RA2; ENSG00000164485; CTA
TSDIQEPYYGR

SEQ ID NO: 30927 - protein, 11 aa, Homo sapiens
  misc_feature: Table A; Target 30927; HLA-A*68:01; IL22RA2; ENSG00000164485; CTA
TSDIQEPYYGR

SEQ ID NO: 30928 - protein, 11 aa, Homo sapiens
  misc_feature: Table A; Target 30928; HLA-A*01:01; IL22RA2; ENSG00000164485; CTA
TSETSDIQEPY

SEQ ID NO: 30929 - protein, 11 aa, Homo sapiens
  misc_feature: Table A; Target 30929; HLA-C*07:01; IL22RA2; ENSG00000164485; CTA
TSETSDIQEPY

SEQ ID NO: 30930 - protein, 9 aa, Homo sapiens
  misc_feature: Table A; Target 30930; HLA-B*35:03; IL22RA2; ENSG00000164485; CTA
VAEIYQPML

SEQ ID NO: 30931 - protein, 9 aa, Homo sapiens
  misc_feature: Table A; Target 30931; HLA-C*03:03; IL22RA2; ENSG00000164485; CTA
VAEIYQPML

SEQ ID NO: 30932 - protein, 9 aa, Homo sapiens
  misc_feature: Table A; Target 30932; HLA-C*03:04; IL22RA2; ENSG00000164485; CTA
VAEIYQPML

SEQ ID NO: 30933 - protein, 9 aa, Homo sapiens
  misc_feature: Table A; Target 30933; HLA-C*05:01; IL22RA2; ENSG00000164485; CTA
VAEIYQPML

SEQ ID NO: 30934 - protein, 9 aa, Homo sapiens
  misc_feature: Table A; Target 30934; HLA-C*16:02; IL22RA2; ENSG00000164485; CTA
VAEIYQPML

SEQ ID NO: 30935 - protein, 8 aa, Homo sapiens
  misc_feature: Table A; Target 30935; HLA-B*18:01; IL22RA2; ENSG00000164485; CTA
VEIEALTP

SEQ ID NO: 30936 - protein, 8 aa, Homo sapiens
  misc_feature: Table A; Target 30936; HLA-B*49:01; IL22RA2; ENSG00000164485; CTA
VEIEALTP

SEQ ID NO: 30937 - protein, 9 aa, Homo sapiens
  misc_feature: Table A; Target 30937; HLA-B*18:01; IL22RA2; ENSG00000164485; CTA
VEIEALTPH

SEQ ID NO: 30938 - protein, 9 aa, Homo sapiens
  misc_feature: Table A; Target 30938; HLA-B*40:02; IL22RA2; ENSG00000164485; CTA
VEIEALTPH

SEQ ID NO: 30939 - protein, 9 aa, Homo sapiens
  misc_feature: Table A; Target 30939; HLA-B*46:01; IL22RA2; ENSG00000164485; CTA
VEIEALTPH

SEQ ID NO: 30940 - protein, 9 aa, Homo sapiens
  misc_feature: Table A; Target 30940; HLA-B*49:01; IL22RA2; ENSG00000164485; CTA
VEIEALTPH

SEQ ID NO: 30941 - protein, 8 aa, Homo sapiens
  misc_feature: Table A; Target 30941; HLA-A*23:01; IL22RA2; ENSG00000164485; CTA
VFIINNSL

SEQ ID NO: 30942 - protein, 8 aa, Homo sapiens
  misc_feature: Table A; Target 30942; HLA-A*24:02; IL22RA2; ENSG00000164485; CTA
VFIINNSL

SEQ ID NO: 30943 - protein, 8 aa, Homo sapiens
  misc_feature: Table A; Target 30943; HLA-B*08:01; IL22RA2; ENSG00000164485; CTA
VFIINNSL

SEQ ID NO: 30944 - protein, 8 aa, Homo sapiens
  misc_feature: Table A; Target 30944; HLA-C*01:02; IL22RA2; ENSG00000164485; CTA
VFIINNSL

SEQ ID NO: 30945 - protein, 8 aa, Homo sapiens
  misc_feature: Table A; Target 30945; HLA-C*14:02; IL22RA2; ENSG00000164485; CTA
VFIINNSL

SEQ ID NO: 30946 - protein, 10 aa, Homo sapiens
  misc_feature: Table A; Target 30946; HLA-A*03:01; IL22RA2; ENSG00000164485; CTA
VILHAPNLPY

SEQ ID NO: 30947 - protein, 10 aa, Homo sapiens
  misc_feature: Table A; Target 30947; HLA-A*29:02; IL22RA2; ENSG00000164485; CTA
VILHAPNLPY

SEQ ID NO: 30948 - protein, 8 aa, Homo sapiens
  misc_feature: Table A; Target 30948; HLA-B*15:01; IL22RA2; ENSG00000164485; CTA
VQFQSRNF

SEQ ID NO: 30949 - protein, 8 aa, Homo sapiens
  misc_feature: Table A; Target 30949; HLA-B*15:03; IL22RA2; ENSG00000164485; CTA
VQFQSRNF

SEQ ID NO: 30950 - protein, 9 aa, Homo sapiens
  misc_feature: Table A; Target 30950; HLA-A*30:02; IL22RA2; ENSG00000164485; CTA
VRAASAGSY

SEQ ID NO: 30951 - protein, 9 aa, Homo sapiens
  misc_feature: Table A; Target 30951; HLA-A*32:01; IL22RA2; ENSG00000164485; CTA
VRAASAGSY

SEQ ID NO: 30952 - protein, 9 aa, Homo sapiens
  misc_feature: Table A; Target 30952; HLA-B*07:02; IL22RA2; ENSG00000164485; CTA
VRAASAGSY

SEQ ID NO: 30953 - protein, 9 aa, Homo sapiens
  misc_feature: Table A; Target 30953; HLA-B*15:03; IL22RA2; ENSG00000164485; CTA
VRAASAGSY

SEQ ID NO: 30954 - protein, 9 aa, Homo sapiens
  misc_feature: Table A; Target 30954; HLA-B*27:02; IL22RA2; ENSG00000164485; CTA
VRAASAGSY

SEQ ID NO: 30955 - protein, 9 aa, Homo sapiens
  misc_feature: Table A; Target 30955; HLA-B*27:05; IL22RA2; ENSG00000164485; CTA
VRAASAGSY

SEQ ID NO: 30956 - protein, 9 aa, Homo sapiens
  misc_feature: Table A; Target 30956; HLA-B*39:01; IL22RA2; ENSG00000164485; CTA
VRAASAGSY

SEQ ID NO: 30957 - protein, 9 aa, Homo sapiens
  misc_feature: Table A; Target 30957; HLA-C*06:02; IL22RA2; ENSG00000164485; CTA
VRAASAGSY

SEQ ID NO: 30958 - protein, 9 aa, Homo sapiens
  misc_feature: Table A; Target 30958; HLA-C*07:01; IL22RA2; ENSG00000164485; CTA
VRAASAGSY

SEQ ID NO: 30959 - protein, 9 aa, Homo sapiens
  misc_feature: Table A; Target 30959; HLA-C*07:02; IL22RA2; ENSG00000164485; CTA
VRAASAGSY

SEQ ID NO: 30960 - protein, 9 aa, Homo sapiens
  misc_feature: Table A; Target 30960; HLA-C*07:04; IL22RA2; ENSG00000164485; CTA
VRAASAGSY

SEQ ID NO: 30961 - protein, 9 aa, Homo sapiens
  misc_feature: Table A; Target 30961; HLA-C*12:03; IL22RA2; ENSG00000164485; CTA
VRAASAGSY

SEQ ID NO: 30962 - protein, 9 aa, Homo sapiens
  misc_feature: Table A; Target 30962; HLA-C*16:01; IL22RA2; ENSG00000164485; CTA
VRAASAGSY

SEQ ID NO: 30963 - protein, 9 aa, Homo sapiens
  misc_feature: Table A; Target 30963; HLA-C*16:04; IL22RA2; ENSG00000164485; CTA
VRAASAGSY

SEQ ID NO: 30964 - protein, 9 aa, Homo sapiens
  misc_feature: Table A; Target 30964; HLA-A*02:07; IL22RA2; ENSG00000164485; CTA
VSIEDYYEL

SEQ ID NO: 30965 - protein, 9 aa, Homo sapiens
  misc_feature: Table A; Target 30965; HLA-A*23:01; IL22RA2; ENSG00000164485; CTA
VSIEDYYEL

SEQ ID NO: 30966 - protein, 9 aa, Homo sapiens
  misc_feature: Table A; Target 30966; HLA-B*27:05; IL22RA2; ENSG00000164485; CTA
VSIEDYYEL

SEQ ID NO: 30967 - protein, 9 aa, Homo sapiens
  misc_feature: Table A; Target 30967; HLA-B*35:03; IL22RA2; ENSG00000164485; CTA
VSIEDYYEL

SEQ ID NO: 30968 - protein, 9 aa, Homo sapiens
  misc_feature: Table A; Target 30968; HLA-B*46:01; IL22RA2; ENSG00000164485; CTA
VSIEDYYEL

SEQ ID NO: 30969 - protein, 9 aa, Homo sapiens
  misc_feature: Table A; Target 30969; HLA-B*58:01; IL22RA2; ENSG00000164485; CTA
VSIEDYYEL

SEQ ID NO: 30970 - protein, 9 aa, Homo sapiens
  misc_feature: Table A; Target 30970; HLA-C*03:03; IL22RA2; ENSG00000164485; CTA
VSIEDYYEL

SEQ ID NO: 30971 - protein, 9 aa, Homo sapiens
  misc_feature: Table A; Target 30971; HLA-C*03:04; IL22RA2; ENSG00000164485; CTA
VSIEDYYEL

SEQ ID NO: 30972 - protein, 11 aa, Homo sapiens
  misc_feature: Table A; Target 30972; HLA-A*01:01; IL22RA2; ENSG00000164485; CTA
VSIEDYYELLY

SEQ ID NO: 30973 - protein, 9 aa, Homo sapiens
  misc_feature: Table A; Target 30973; HLA-A*01:01; IL22RA2; ENSG00000164485; CTA
VVAEIYQPM

SEQ ID NO: 30974 - protein, 9 aa, Homo sapiens
  misc_feature: Table A; Target 30974; HLA-A*02:01; IL22RA2; ENSG00000164485; CTA
VVAEIYQPM

SEQ ID NO: 30975 - protein, 9 aa, Homo sapiens
  misc_feature: Table A; Target 30975; HLA-A*02:03; IL22RA2; ENSG00000164485; CTA
VVAEIYQPM

SEQ ID NO: 30976 - protein, 9 aa, Homo sapiens
  misc_feature: Table A; Target 30976; HLA-A*02:07; IL22RA2; ENSG00000164485; CTA
VVAEIYQPM

SEQ ID NO: 30977 - protein, 9 aa, Homo sapiens
  misc_feature: Table A; Target 30977; HLA-A*03:01; IL22RA2; ENSG00000164485; CTA
VVAEIYQPM

SEQ ID NO: 30978 - protein, 9 aa, Homo sapiens
  misc_feature: Table A; Target 30978; HLA-A*03:02; IL22RA2; ENSG00000164485; CTA
VVAEIYQPM

SEQ ID NO: 30979 - protein, 9 aa, Homo sapiens
  misc_feature: Table A; Target 30979; HLA-A*11:01; IL22RA2; ENSG00000164485; CTA
VVAEIYQPM

SEQ ID NO: 30980 - protein, 9 aa, Homo sapiens
  misc_feature: Table A; Target 30980; HLA-A*23:01; IL22RA2; ENSG00000164485; CTA
VVAEIYQPM

SEQ ID NO: 30981 - protein, 9 aa, Homo sapiens
  misc_feature: Table A; Target 30981; HLA-A*25:01; IL22RA2; ENSG00000164485; CTA
VVAEIYQPM

SEQ ID NO: 30982 - protein, 9 aa, Homo sapiens
  misc_feature: Table A; Target 30982; HLA-A*26:01; IL22RA2; ENSG00000164485; CTA
VVAEIYQPM

SEQ ID NO: 30983 - protein, 9 aa, Homo sapiens
  misc_feature: Table A; Target 30983; HLA-A*29:02; IL22RA2; ENSG00000164485; CTA
VVAEIYQPM

SEQ ID NO: 30984 - protein, 9 aa, Homo sapiens
  misc_feature: Table A; Target 30984; HLA-A*30:02; IL22RA2; ENSG00000164485; CTA
VVAEIYQPM

SEQ ID NO: 30985 - protein, 9 aa, Homo sapiens
  misc_feature: Table A; Target 30985; HLA-A*31:01; IL22RA2; ENSG00000164485; CTA
VVAEIYQPM

SEQ ID NO: 30986 - protein, 9 aa, Homo sapiens
  misc_feature: Table A; Target 30986; HLA-A*32:01; IL22RA2; ENSG00000164485; CTA
VVAEIYQPM

SEQ ID NO: 30987 - protein, 9 aa, Homo sapiens
  misc_feature: Table A; Target 30987; HLA-A*33:01; IL22RA2; ENSG00000164485; CTA
VVAEIYQPM

SEQ ID NO: 30988 - protein, 9 aa, Homo sapiens
  misc_feature: Table A; Target 30988; HLA-A*33:03; IL22RA2; ENSG00000164485; CTA
VVAEIYQPM

SEQ ID NO: 30989 - protein, 9 aa, Homo sapiens
  misc_feature: Table A; Target 30989; HLA-A*68:01; IL22RA2; ENSG00000164485; CTA
VVAEIYQPM

SEQ ID NO: 30990 - protein, 9 aa, Homo sapiens
  misc_feature: Table A; Target 30990; HLA-A*68:02; IL22RA2; ENSG00000164485; CTA
VVAEIYQPM

SEQ ID NO: 30991 - protein, 9 aa, Homo sapiens
  misc_feature: Table A; Target 30991; HLA-B*15:01; IL22RA2; ENSG00000164485; CTA
VVAEIYQPM

SEQ ID NO: 30992 - protein, 9 aa, Homo sapiens
  misc_feature: Table A; Target 30992; HLA-B*27:05; IL22RA2; ENSG00000164485; CTA
VVAEIYQPM

SEQ ID NO: 30993 - protein, 9 aa, Homo sapiens
  misc_feature: Table A; Target 30993; HLA-B*35:01; IL22RA2; ENSG00000164485; CTA
VVAEIYQPM

SEQ ID NO: 30994 - protein, 9 aa, Homo sapiens
  misc_feature: Table A; Target 30994; HLA-B*35:03; IL22RA2; ENSG00000164485; CTA
VVAEIYQPM

SEQ ID NO: 30995 - protein, 9 aa, Homo sapiens
  misc_feature: Table A; Target 30995; HLA-B*46:01; IL22RA2; ENSG00000164485; CTA
VVAEIYQPM

SEQ ID NO: 30996 - protein, 9 aa, Homo sapiens
  misc_feature: Table A; Target 30996; HLA-B*56:01; IL22RA2; ENSG00000164485; CTA
VVAEIYQPM

SEQ ID NO: 30997 - protein, 9 aa, Homo sapiens
  misc_feature: Table A; Target 30997; HLA-C*01:02; IL22RA2; ENSG00000164485; CTA
VVAEIYQPM

SEQ ID NO: 30998 - protein, 9 aa, Homo sapiens
  misc_feature: Table A; Target 30998; HLA-C*02:02; IL22RA2; ENSG00000164485; CTA
VVAEIYQPM

SEQ ID NO: 30999 - protein, 9 aa, Homo sapiens
  misc_feature: Table A; Target 30999; HLA-C*03:03; IL22RA2; ENSG00000164485; CTA
VVAEIYQPM

SEQ ID NO: 31000 - protein, 9 aa, Homo sapiens
  misc_feature: Table A; Target 31000; HLA-C*03:04; IL22RA2; ENSG00000164485; CTA
VVAEIYQPM

SEQ ID NO: 31001 - protein, 9 aa, Homo sapiens
  misc_feature: Table A; Target 31001; HLA-C*04:01; IL22RA2; ENSG00000164485; CTA
VVAEIYQPM

SEQ ID NO: 31002 - protein, 9 aa, Homo sapiens
  misc_feature: Table A; Target 31002; HLA-C*05:01; IL22RA2; ENSG00000164485; CTA
VVAEIYQPM

SEQ ID NO: 31003 - protein, 9 aa, Homo sapiens
  misc_feature: Table A; Target 31003; HLA-C*07:04; IL22RA2; ENSG00000164485; CTA
VVAEIYQPM

SEQ ID NO: 31004 - protein, 9 aa, Homo sapiens
  misc_feature: Table A; Target 31004; HLA-C*07:06; IL22RA2; ENSG00000164485; CTA
VVAEIYQPM

SEQ ID NO: 31005 - protein, 9 aa, Homo sapiens
  misc_feature: Table A; Target 31005; HLA-C*12:03; IL22RA2; ENSG00000164485; CTA
VVAEIYQPM

SEQ ID NO: 31006 - protein, 9 aa, Homo sapiens
  misc_feature: Table A; Target 31006; HLA-C*14:02; IL22RA2; ENSG00000164485; CTA
VVAEIYQPM

SEQ ID NO: 31007 - protein, 9 aa, Homo sapiens
  misc_feature: Table A; Target 31007; HLA-C*16:04; IL22RA2; ENSG00000164485; CTA
VVAEIYQPM

SEQ ID NO: 31008 - protein, 10 aa, Homo sapiens
  misc_feature: Table A; Target 31008; HLA-A*02:01; IL22RA2; ENSG00000164485; CTA
VVAEIYQPML

SEQ ID NO: 31009 - protein, 10 aa, Homo sapiens
  misc_feature: Table A; Target 31009; HLA-A*02:04; IL22RA2; ENSG00000164485; CTA
VVAEIYQPML

SEQ ID NO: 31010 - protein, 10 aa, Homo sapiens
  misc_feature: Table A; Target 31010; HLA-A*02:07; IL22RA2; ENSG00000164485; CTA
VVAEIYQPML

SEQ ID NO: 31011 - protein, 10 aa, Homo sapiens
  misc_feature: Table A; Target 31011; HLA-A*23:01; IL22RA2; ENSG00000164485; CTA
VVAEIYQPML

SEQ ID NO: 31012 - protein, 10 aa, Homo sapiens
  misc_feature: Table A; Target 31012; HLA-A*68:02; IL22RA2; ENSG00000164485; CTA
VVAEIYQPML

SEQ ID NO: 31013 - protein, 9 aa, Homo sapiens
  misc_feature: Table A; Target 31013; HLA-A*32:01; IL22RA2; ENSG00000164485; CTA
VYEGAHRAV

SEQ ID NO: 31014 - protein, 9 aa, Homo sapiens
  misc_feature: Table A; Target 31014; HLA-C*01:02; IL22RA2; ENSG00000164485; CTA
VYEGAHRAV

SEQ ID NO: 31015 - protein, 9 aa, Homo sapiens
  misc_feature: Table A; Target 31015; HLA-C*04:01; IL22RA2; ENSG00000164485; CTA
VYEGAHRAV

SEQ ID NO: 31016 - protein, 9 aa, Homo sapiens
  misc_feature: Table A; Target 31016; HLA-C*06:02; IL22RA2; ENSG00000164485; CTA
VYEGAHRAV

SEQ ID NO: 31017 - protein, 9 aa, Homo sapiens
  misc_feature: Table A; Target 31017; HLA-C*07:01; IL22RA2; ENSG00000164485; CTA
VYEGAHRAV

SEQ ID NO: 31018 - protein, 9 aa, Homo sapiens
  misc_feature: Table A; Target 31018; HLA-C*14:02; IL22RA2; ENSG00000164485; CTA
VYEGAHRAV

SEQ ID NO: 31019 - protein, 9 aa, Homo sapiens
  misc_feature: Table A; Target 31019; HLA-C*16:01; IL22RA2; ENSG00000164485; CTA
VYEGAHRAV

SEQ ID NO: 31020 - protein, 11 aa, Homo sapiens
  misc_feature: Table A; Target 31020; HLA-A*24:02; IL22RA2; ENSG00000164485; CTA
VYEGAHRAVEI

SEQ ID NO: 31021 - protein, 8 aa, Homo sapiens
  misc_feature: Table A; Target 31021; HLA-A*23:01; IL22RA2; ENSG00000164485; CTA
VYFVQYKI

SEQ ID NO: 31022 - protein, 8 aa, Homo sapiens
  misc_feature: Table A; Target 31022; HLA-A*24:02; IL22RA2; ENSG00000164485; CTA
VYFVQYKI

SEQ ID NO: 31023 - protein, 10 aa, Homo sapiens
  misc_feature: Table A; Target 31023; HLA-A*24:02; IL22RA2; ENSG00000164485; CTA
VYFVQYKIMF

SEQ ID NO: 31024 - protein, 9 aa, Homo sapiens
  misc_feature: Table A; Target 31024; HLA-B*49:01; IL22RA2; ENSG00000164485; CTA
WETKIDPPV

SEQ ID NO: 31025 - protein, 8 aa, Homo sapiens
  misc_feature: Table A; Target 31025; HLA-B*46:01; IL22RA2; ENSG00000164485; CTA
YCVVAEIY

SEQ ID NO: 31026 - protein, 8 aa, Homo sapiens
  misc_feature: Table A; Target 31026; HLA-B*37:01; IL22RA2; ENSG00000164485; CTA
YEGAHRAV

SEQ ID NO: 31027 - protein, 8 aa, Homo sapiens
  misc_feature: Table A; Target 31027; HLA-B*49:01; IL22RA2; ENSG00000164485; CTA
YEGAHRAV

SEQ ID NO: 31028 - protein, 8 aa, Homo sapiens
  misc_feature: Table A; Target 31028; HLA-B*18:01; IL22RA2; ENSG00000164485; CTA
YELLYRVF

SEQ ID NO: 31029 - protein, 9 aa, Homo sapiens
  misc_feature: Table A; Target 31029; HLA-A*23:01; IL22RA2; ENSG00000164485; CTA
YFVQYKIMF

SEQ ID NO: 31030 - protein, 9 aa, Homo sapiens
  misc_feature: Table A; Target 31030; HLA-A*24:02; IL22RA2; ENSG00000164485; CTA
YFVQYKIMF

SEQ ID NO: 31031 - protein, 9 aa, Homo sapiens
  misc_feature: Table A; Target 31031; HLA-A*29:02; IL22RA2; ENSG00000164485; CTA
YFVQYKIMF

SEQ ID NO: 31032 - protein, 9 aa, Homo sapiens
  misc_feature: Table A; Target 31032; HLA-B*08:01; IL22RA2; ENSG00000164485; CTA
YGRVRAASA

SEQ ID NO: 31033 - protein, 9 aa, Homo sapiens
  misc_feature: Table A; Target 31033; HLA-B*54:01; IL22RA2; ENSG00000164485; CTA
YGRVRAASA

SEQ ID NO: 31034 - protein, 9 aa, Homo sapiens
  misc_feature: Table A; Target 31034; HLA-A*02:03; IL22RA2; ENSG00000164485; CTA
YQKEKNVSI

SEQ ID NO: 31035 - protein, 9 aa, Homo sapiens
  misc_feature: Table A; Target 31035; HLA-A*30:01; IL22RA2; ENSG00000164485; CTA
YQKEKNVSI

SEQ ID NO: 31036 - protein, 9 aa, Homo sapiens
  misc_feature: Table A; Target 31036; HLA-A*32:01; IL22RA2; ENSG00000164485; CTA
YQKEKNVSI

SEQ ID NO: 31037 - protein, 9 aa, Homo sapiens
  misc_feature: Table A; Target 31037; HLA-B*08:01; IL22RA2; ENSG00000164485; CTA
YQKEKNVSI

SEQ ID NO: 31038 - protein, 9 aa, Homo sapiens
  misc_feature: Table A; Target 31038; HLA-B*13:02; IL22RA2; ENSG00000164485; CTA
YQKEKNVSI

SEQ ID NO: 31039 - protein, 9 aa, Homo sapiens
  misc_feature: Table A; Target 31039; HLA-B*15:03; IL22RA2; ENSG00000164485; CTA
YQKEKNVSI

SEQ ID NO: 31040 - protein, 9 aa, Homo sapiens
  misc_feature: Table A; Target 31040; HLA-B*38:01; IL22RA2; ENSG00000164485; CTA
YQKEKNVSI

SEQ ID NO: 31041 - protein, 9 aa, Homo sapiens
  misc_feature: Table A; Target 31041; HLA-B*39:01; IL22RA2; ENSG00000164485; CTA
YQKEKNVSI

SEQ ID NO: 31042 - protein, 9 aa, Homo sapiens
  misc_feature: Table A; Target 31042; HLA-B*40:02; IL22RA2; ENSG00000164485; CTA
YQKEKNVSI

SEQ ID NO: 31043 - protein, 9 aa, Homo sapiens
  misc_feature: Table A; Target 31043; HLA-B*46:01; IL22RA2; ENSG00000164485; CTA
YQKEKNVSI

SEQ ID NO: 31044 - protein, 9 aa, Homo sapiens
  misc_feature: Table A; Target 31044; HLA-C*02:02; IL22RA2; ENSG00000164485; CTA
YQKEKNVSI

SEQ ID NO: 31045 - protein, 9 aa, Homo sapiens
  misc_feature: Table A; Target 31045; HLA-A*24:02; IL22RA2; ENSG00000164485; CTA
YYELLYRVF

SEQ ID NO: 31046 - protein, 9 aa, Homo sapiens
  misc_feature: Table A; Target 31046; HLA-A*29:02; IL22RA2; ENSG00000164485; CTA
YYELLYRVF

SEQ ID NO: 31047 - protein, 9 aa, Homo sapiens
  misc_feature: Table A; Target 31047; HLA-A*02:04; INSL4; ENSG00000120211; CTA
AIWLLLSQL

SEQ ID NO: 31048 - protein, 8 aa, Homo sapiens
  misc_feature: Table A; Target 31048; HLA-A*32:01; INSL4; ENSG00000120211; CTA
ALGTTSEF

SEQ ID NO: 31049 - protein, 8 aa, Homo sapiens
  misc_feature: Table A; Target 31049; HLA-B*37:01; INSL4; ENSG00000120211; CTA
ALGTTSEF

SEQ ID NO: 31050 - protein, 8 aa, Homo sapiens
  misc_feature: Table A; Target 31050; HLA-B*46:01; INSL4; ENSG00000120211; CTA
ALGTTSEF

SEQ ID NO: 31051 - protein, 8 aa, Homo sapiens
  misc_feature: Table A; Target 31051; HLA-C*05:01; INSL4; ENSG00000120211; CTA
ALGTTSEF

SEQ ID NO: 31052 - protein, 8 aa, Homo sapiens
  misc_feature: Table A; Target 31052; HLA-C*14:02; INSL4; ENSG00000120211; CTA
ALGTTSEF

SEQ ID NO: 31053 - protein, 9 aa, Homo sapiens
  misc_feature: Table A; Target 31053; HLA-B*13:02; INSL4; ENSG00000120211; CTA
ALGTTSEFI

SEQ ID NO: 31054 - protein, 9 aa, Homo sapiens
  misc_feature: Table A; Target 31054; HLA-B*38:01; INSL4; ENSG00000120211; CTA
CDDGTSVKL

SEQ ID NO: 31055 - protein, 9 aa, Homo sapiens
  misc_feature: Table A; Target 31055; HLA-B*40:01; INSL4; ENSG00000120211; CTA
CDDGTSVKL

SEQ ID NO: 31056 - protein, 9 aa, Homo sapiens
  misc_feature: Table A; Target 31056; HLA-C*04:01; INSL4; ENSG00000120211; CTA
CDDGTSVKL

SEQ ID NO: 31057 - protein, 9 aa, Homo sapiens
  misc_feature: Table A; Target 31057; HLA-C*05:01; INSL4; ENSG00000120211; CTA
CDDGTSVKL

SEQ ID NO: 31058 - protein, 11 aa, Homo sapiens
  misc_feature: Table A; Target 31058; HLA-B*56:01; INSL4; ENSG00000120211; CTA
CPMPEKTFTTT

SEQ ID NO: 31059 - protein, 8 aa, Homo sapiens
  misc_feature: Table A; Target 31059; HLA-B*18:01; INSL4; ENSG00000120211; CTA
DDGTSVKL

SEQ ID NO: 31060 - protein, 8 aa, Homo sapiens
  misc_feature: Table A; Target 31060; HLA-C*07:01; INSL4; ENSG00000120211; CTA
DDGTSVKL

SEQ ID NO: 31061 - protein, 8 aa, Homo sapiens
  misc_feature: Table A; Target 31061; HLA-B*51:01; INSL4; ENSG00000120211; CTA
DPFCCEVI

SEQ ID NO: 31062 - protein, 10 aa, Homo sapiens
  misc_feature: Table A; Target 31062; HLA-A*23:01; INSL4; ENSG00000120211; CTA
EFIPNLSPEL

SEQ ID NO: 31063 - protein, 10 aa, Homo sapiens
  misc_feature: Table A; Target 31063; HLA-A*24:02; INSL4; ENSG00000120211; CTA
EFIPNLSPEL

SEQ ID NO: 31064 - protein, 10 aa, Homo sapiens
  misc_feature: Table A; Target 31064; HLA-C*14:02; INSL4; ENSG00000120211; CTA
EFIPNLSPEL

SEQ ID NO: 31065 - protein, 9 aa, Homo sapiens
  misc_feature: Table A; Target 31065; HLA-A*33:03; INSL4; ENSG00000120211; CTA
EMVSTSNNK

SEQ ID NO: 31066 - protein, 8 aa, Homo sapiens
  misc_feature: Table A; Target 31066; HLA-A*33:03; INSL4; ENSG00000120211; CTA
ESLAAELR

SEQ ID NO: 31067 - protein, 10 aa, Homo sapiens
  misc_feature: Table A; Target 31067; HLA-A*25:01; INSL4; ENSG00000120211; CTA
EVICDDGTSV

SEQ ID NO: 31068 - protein, 10 aa, Homo sapiens
  misc_feature: Table A; Target 31068; HLA-A*26:01; INSL4; ENSG00000120211; CTA
EVICDDGTSV

SEQ ID NO: 31069 - protein, 10 aa, Homo sapiens
  misc_feature: Table A; Target 31069; HLA-A*68:02; INSL4; ENSG00000120211; CTA
EVICDDGTSV

SEQ ID NO: 31070 - protein, 11 aa, Homo sapiens
  misc_feature: Table A; Target 31070; HLA-A*26:01; INSL4; ENSG00000120211; CTA
EVICDDGTSVK

SEQ ID NO: 31071 - protein, 11 aa, Homo sapiens
  misc_feature: Table A; Target 31071; HLA-A*68:01; INSL4; ENSG00000120211; CTA
EVICDDGTSVK

SEQ ID NO: 31072 - protein, 11 aa, Homo sapiens
  misc_feature: Table A; Target 31072; HLA-C*07:06; INSL4; ENSG00000120211; CTA
EVICDDGTSVK

SEQ ID NO: 31073 - protein, 9 aa, Homo sapiens
  misc_feature: Table A; Target 31073; HLA-A*02:01; INSL4; ENSG00000120211; CTA
FIPNLSPEL

SEQ ID NO: 31074 - protein, 9 aa, Homo sapiens
  misc_feature: Table A; Target 31074; HLA-A*02:04; INSL4; ENSG00000120211; CTA
FIPNLSPEL

SEQ ID NO: 31075 - protein, 9 aa, Homo sapiens
  misc_feature: Table A; Target 31075; HLA-A*02:07; INSL4; ENSG00000120211; CTA
FIPNLSPEL

SEQ ID NO: 31076 - protein, 9 aa, Homo sapiens
  misc_feature: Table A; Target 31076; HLA-A*23:01; INSL4; ENSG00000120211; CTA
FIPNLSPEL

SEQ ID NO: 31077 - protein, 9 aa, Homo sapiens
  misc_feature: Table A; Target 31077; HLA-A*24:02; INSL4; ENSG00000120211; CTA
FIPNLSPEL

SEQ ID NO: 31078 - protein, 9 aa, Homo sapiens
  misc_feature: Table A; Target 31078; HLA-A*26:01; INSL4; ENSG00000120211; CTA
FIPNLSPEL

SEQ ID NO: 31079 - protein, 9 aa, Homo sapiens
  misc_feature: Table A; Target 31079; HLA-A*68:02; INSL4; ENSG00000120211; CTA
FIPNLSPEL

SEQ ID NO: 31080 - protein, 9 aa, Homo sapiens
  misc_feature: Table A; Target 31080; HLA-B*35:03; INSL4; ENSG00000120211; CTA
FIPNLSPEL

SEQ ID NO: 31081 - protein, 9 aa, Homo sapiens
  misc_feature: Table A; Target 31081; HLA-B*46:01; INSL4; ENSG00000120211; CTA
FIPNLSPEL

SEQ ID NO: 31082 - protein, 9 aa, Homo sapiens
  misc_feature: Table A; Target 31082; HLA-B*58:01; INSL4; ENSG00000120211; CTA
FIPNLSPEL

SEQ ID NO: 31083 - protein, 9 aa, Homo sapiens
  misc_feature: Table A; Target 31083; HLA-C*01:02; INSL4; ENSG00000120211; CTA
FIPNLSPEL

SEQ ID NO: 31084 - protein, 9 aa, Homo sapiens
  misc_feature: Table A; Target 31084; HLA-C*02:02; INSL4; ENSG00000120211; CTA
FIPNLSPEL

SEQ ID NO: 31085 - protein, 9 aa, Homo sapiens
  misc_feature: Table A; Target 31085; HLA-C*03:03; INSL4; ENSG00000120211; CTA
FIPNLSPEL

SEQ ID NO: 31086 - protein, 9 aa, Homo sapiens
  misc_feature: Table A; Target 31086; HLA-C*03:04; INSL4; ENSG00000120211; CTA
FIPNLSPEL

SEQ ID NO: 31087 - protein, 8 aa, Homo sapiens
  misc_feature: Table A; Target 31087; HLA-A*32:01; INSL4; ENSG00000120211; CTA
FTTTPGGW

SEQ ID NO: 31088 - protein, 10 aa, Homo sapiens
  misc_feature: Table A; Target 31088; HLA-A*01:01; INSL4; ENSG00000120211; CTA
FTTTPGGWLL

SEQ ID NO: 31089 - protein, 10 aa, Homo sapiens
  misc_feature: Table A; Target 31089; HLA-A*68:02; INSL4; ENSG00000120211; CTA
FTTTPGGWLL

SEQ ID NO: 31090 - protein, 9 aa, Homo sapiens
  misc_feature: Table A; Target 31090; HLA-B*07:02; INSL4; ENSG00000120211; CTA
GPRFGKHLL

SEQ ID NO: 31091 - protein, 10 aa, Homo sapiens
  misc_feature: Table A; Target 31091; HLA-A*30:02; INSL4; ENSG00000120211; CTA
GQALGTTSEF

SEQ ID NO: 31092 - protein, 10 aa, Homo sapiens
  misc_feature: Table A; Target 31092; HLA-B*15:01; INSL4; ENSG00000120211; CTA
GQALGTTSEF

SEQ ID NO: 31093 - protein, 10 aa, Homo sapiens
  misc_feature: Table A; Target 31093; HLA-B*15:03; INSL4; ENSG00000120211; CTA
GQALGTTSEF

SEQ ID NO: 31094 - protein, 10 aa, Homo sapiens
  misc_feature: Table A; Target 31094; HLA-B*27:02; INSL4; ENSG00000120211; CTA
GQALGTTSEF

SEQ ID NO: 31095 - protein, 10 aa, Homo sapiens
  misc_feature: Table A; Target 31095; HLA-B*27:05; INSL4; ENSG00000120211; CTA
GQALGTTSEF

SEQ ID NO: 31096 - protein, 10 aa, Homo sapiens
  misc_feature: Table A; Target 31096; HLA-C*07:04; INSL4; ENSG00000120211; CTA
GQALGTTSEF

SEQ ID NO: 31097 - protein, 10 aa, Homo sapiens
  misc_feature: Table A; Target 31097; HLA-C*16:04; INSL4; ENSG00000120211; CTA
GQALGTTSEF

SEQ ID NO: 31098 - protein, 11 aa, Homo sapiens
  misc_feature: Table A; Target 31098; HLA-B*13:02; INSL4; ENSG00000120211; CTA
GQALGTTSEFI

SEQ ID NO: 31099 - protein, 10 aa, Homo sapiens
  misc_feature: Table A; Target 31099; HLA-A*02:04; INSL4; ENSG00000120211; CTA
GTTSEFIPNL

SEQ ID NO: 31100 - protein, 10 aa, Homo sapiens
  misc_feature: Table A; Target 31100; HLA-A*11:01; INSL4; ENSG00000120211; CTA
GTTSEFIPNL

SEQ ID NO: 31101 - protein, 10 aa, Homo sapiens
  misc_feature: Table A; Target 31101; HLA-A*68:02; INSL4; ENSG00000120211; CTA
GTTSEFIPNL

SEQ ID NO: 31102 - protein, 8 aa, Homo sapiens
  misc_feature: Table A; Target 31102; HLA-C*05:01; INSL4; ENSG00000120211; CTA
ICDDGTSV

SEQ ID NO: 31103 - protein, 9 aa, Homo sapiens
  misc_feature: Table A; Target 31103; HLA-C*05:01; INSL4; ENSG00000120211; CTA
ICDDGTSVK

SEQ ID NO: 31104 - protein, 10 aa, Homo sapiens
  misc_feature: Table A; Target 31104; HLA-A*02:07; INSL4; ENSG00000120211; CTA
ICDDGTSVKL

SEQ ID NO: 31105 - protein, 10 aa, Homo sapiens
  misc_feature: Table A; Target 31105; HLA-B*35:01; INSL4; ENSG00000120211; CTA
ICDDGTSVKL

SEQ ID NO: 31106 - protein, 10 aa, Homo sapiens
  misc_feature: Table A; Target 31106; HLA-B*35:03; INSL4; ENSG00000120211; CTA
ICDDGTSVKL

SEQ ID NO: 31107 - protein, 10 aa, Homo sapiens
  misc_feature: Table A; Target 31107; HLA-B*38:01; INSL4; ENSG00000120211; CTA
ICDDGTSVKL

SEQ ID NO: 31108 - protein, 10 aa, Homo sapiens
  misc_feature: Table A; Target 31108; HLA-B*39:01; INSL4; ENSG00000120211; CTA
ICDDGTSVKL

SEQ ID NO: 31109 - protein, 10 aa, Homo sapiens
  misc_feature: Table A; Target 31109; HLA-B*40:01; INSL4; ENSG00000120211; CTA
ICDDGTSVKL

SEQ ID NO: 31110 - protein, 10 aa, Homo sapiens
  misc_feature: Table A; Target 31110; HLA-B*55:01; INSL4; ENSG00000120211; CTA
ICDDGTSVKL

SEQ ID NO: 31111 - protein, 10 aa, Homo sapiens
  misc_feature: Table A; Target 31111; HLA-C*03:04; INSL4; ENSG00000120211; CTA
ICDDGTSVKL

SEQ ID NO: 31112 - protein, 10 aa, Homo sapiens
  misc_feature: Table A; Target 31112; HLA-C*05:01; INSL4; ENSG00000120211; CTA
ICDDGTSVKL

SEQ ID NO: 31113 - protein, 10 aa, Homo sapiens
  misc_feature: Table A; Target 31113; HLA-C*07:04; INSL4; ENSG00000120211; CTA
ICDDGTSVKL

SEQ ID NO: 31114 - protein, 10 aa, Homo sapiens
  misc_feature: Table A; Target 31114; HLA-C*12:03; INSL4; ENSG00000120211; CTA
ICDDGTSVKL

SEQ ID NO: 31115 - protein, 8 aa, Homo sapiens
  misc_feature: Table A; Target 31115; HLA-B*07:02; INSL4; ENSG00000120211; CTA
IPNLSPEL

SEQ ID NO: 31116 - protein, 8 aa, Homo sapiens
  misc_feature: Table A; Target 31116; HLA-B*08:01; INSL4; ENSG00000120211; CTA
IPNLSPEL

SEQ ID NO: 31117 - protein, 8 aa, Homo sapiens
  misc_feature: Table A; Target 31117; HLA-B*35:01; INSL4; ENSG00000120211; CTA
IPNLSPEL

SEQ ID NO: 31118 - protein, 8 aa, Homo sapiens
  misc_feature: Table A; Target 31118; HLA-B*35:03; INSL4; ENSG00000120211; CTA
IPNLSPEL

SEQ ID NO: 31119 - protein, 8 aa, Homo sapiens
  misc_feature: Table A; Target 31119; HLA-B*39:01; INSL4; ENSG00000120211; CTA
IPNLSPEL

SEQ ID NO: 31120 - protein, 8 aa, Homo sapiens
  misc_feature: Table A; Target 31120; HLA-B*51:01; INSL4; ENSG00000120211; CTA
IPNLSPEL

SEQ ID NO: 31121 - protein, 8 aa, Homo sapiens
  misc_feature: Table A; Target 31121; HLA-B*54:01; INSL4; ENSG00000120211; CTA
IPNLSPEL

SEQ ID NO: 31122 - protein, 8 aa, Homo sapiens
  misc_feature: Table A; Target 31122; HLA-B*55:01; INSL4; ENSG00000120211; CTA
IPNLSPEL

SEQ ID NO: 31123 - protein, 8 aa, Homo sapiens
  misc_feature: Table A; Target 31123; HLA-B*56:01; INSL4; ENSG00000120211; CTA
IPNLSPEL

SEQ ID NO: 31124 - protein, 8 aa, Homo sapiens
  misc_feature: Table A; Target 31124; HLA-C*01:02; INSL4; ENSG00000120211; CTA
IPNLSPEL

SEQ ID NO: 31125 - protein, 8 aa, Homo sapiens
  misc_feature: Table A; Target 31125; HLA-C*03:03; INSL4; ENSG00000120211; CTA
IPNLSPEL

SEQ ID NO: 31126 - protein, 8 aa, Homo sapiens
  misc_feature: Table A; Target 31126; HLA-C*03:04; INSL4; ENSG00000120211; CTA
IPNLSPEL

SEQ ID NO: 31127 - protein, 8 aa, Homo sapiens
  misc_feature: Table A; Target 31127; HLA-C*05:01; INSL4; ENSG00000120211; CTA
IPNLSPEL

SEQ ID NO: 31128 - protein, 8 aa, Homo sapiens
  misc_feature: Table A; Target 31128; HLA-C*07:02; INSL4; ENSG00000120211; CTA
IPNLSPEL

SEQ ID NO: 31129 - protein, 8 aa, Homo sapiens
  misc_feature: Table A; Target 31129; HLA-C*14:02; INSL4; ENSG00000120211; CTA
IPNLSPEL

SEQ ID NO: 31130 - protein, 8 aa, Homo sapiens
  misc_feature: Table A; Target 31130; HLA-C*16:01; INSL4; ENSG00000120211; CTA
IPNLSPEL

SEQ ID NO: 31131 - protein, 8 aa, Homo sapiens
  misc_feature: Table A; Target 31131; HLA-C*16:02; INSL4; ENSG00000120211; CTA
IPNLSPEL

SEQ ID NO: 31132 - protein, 9 aa, Homo sapiens
  misc_feature: Table A; Target 31132; HLA-A*24:02; INSL4; ENSG00000120211; CTA
IWLLLSQLL

SEQ ID NO: 31133 - protein, 11 aa, Homo sapiens
  misc_feature: Table A; Target 31133; HLA-B*15:03; INSL4; ENSG00000120211; CTA
KKPLSEGQPSL

SEQ ID NO: 31134 - protein, 10 aa, Homo sapiens
  misc_feature: Table A; Target 31134; HLA-B*07:02; INSL4; ENSG00000120211; CTA
KPLSEGQPSL

SEQ ID NO: 31135 - protein, 10 aa, Homo sapiens
  misc_feature: Table A; Target 31135; HLA-B*35:01; INSL4; ENSG00000120211; CTA
KPLSEGQPSL

SEQ ID NO: 31136 - protein, 10 aa, Homo sapiens
  misc_feature: Table A; Target 31136; HLA-B*35:03; INSL4; ENSG00000120211; CTA
KPLSEGQPSL

SEQ ID NO: 31137 - protein, 10 aa, Homo sapiens
  misc_feature: Table A; Target 31137; HLA-B*40:01; INSL4; ENSG00000120211; CTA
KPLSEGQPSL

SEQ ID NO: 31138 - protein, 10 aa, Homo sapiens
  misc_feature: Table A; Target 31138; HLA-B*55:01; INSL4; ENSG00000120211; CTA
KPLSEGQPSL

SEQ ID NO: 31139 - protein, 10 aa, Homo sapiens
  misc_feature: Table A; Target 31139; HLA-B*56:01; INSL4; ENSG00000120211; CTA
KPLSEGQPSL

SEQ ID NO: 31140 - protein, 10 aa, Homo sapiens
  misc_feature: Table A; Target 31140; HLA-C*07:02; INSL4; ENSG00000120211; CTA
KPLSEGQPSL

SEQ ID NO: 31141 - protein, 11 aa, Homo sapiens
  misc_feature: Table A; Target 31141; HLA-A*03:01; INSL4; ENSG00000120211; CTA
KPLSEGQPSLK

SEQ ID NO: 31142 - protein, 11 aa, Homo sapiens
  misc_feature: Table A; Target 31142; HLA-A*03:02; INSL4; ENSG00000120211; CTA
KPLSEGQPSLK

SEQ ID NO: 31143 - protein, 11 aa, Homo sapiens
  misc_feature: Table A; Target 31143; HLA-B*27:02; INSL4; ENSG00000120211; CTA
KPLSEGQPSLK

SEQ ID NO: 31144 - protein, 10 aa, Homo sapiens
  misc_feature: Table A; Target 31144; HLA-A*25:01; INSL4; ENSG00000120211; CTA
KTFTTTPGGW

SEQ ID NO: 31145 - protein, 10 aa, Homo sapiens
  misc_feature: Table A; Target 31145; HLA-A*32:01; INSL4; ENSG00000120211; CTA
KTFTTTPGGW

SEQ ID NO: 31146 - protein, 10 aa, Homo sapiens
  misc_feature: Table A; Target 31146; HLA-B*57:01; INSL4; ENSG00000120211; CTA
KTFTTTPGGW

SEQ ID NO: 31147 - protein, 10 aa, Homo sapiens
  misc_feature: Table A; Target 31147; HLA-B*58:01; INSL4; ENSG00000120211; CTA
KTFTTTPGGW

SEQ ID NO: 31148 - protein, 9 aa, Homo sapiens
  misc_feature: Table A; Target 31148; HLA-B*37:01; INSL4; ENSG00000120211; CTA
LESGRPKEM

SEQ ID NO: 31149 - protein, 10 aa, Homo sapiens
  misc_feature: Table A; Target 31149; HLA-A*02:03; INSL4; ENSG00000120211; CTA
LLRESLAAEL

SEQ ID NO: 31150 - protein, 10 aa, Homo sapiens
  misc_feature: Table A; Target 31150; HLA-A*02:04; INSL4; ENSG00000120211; CTA
LLRESLAAEL

SEQ ID NO: 31151 - protein, 10 aa, Homo sapiens
  misc_feature: Table A; Target 31151; HLA-A*02:04; INSL4; ENSG00000120211; CTA
LLSQLLRESL

SEQ ID NO: 31152 - protein, 9 aa, Homo sapiens
  misc_feature: Table A; Target 31152; HLA-B*27:05; INSL4; ENSG00000120211; CTA
LRESLAAEL

SEQ ID NO: 31153 - protein, 9 aa, Homo sapiens
  misc_feature: Table A; Target 31153; HLA-B*38:01; INSL4; ENSG00000120211; CTA
LRESLAAEL

SEQ ID NO: 31154 - protein, 9 aa, Homo sapiens
  misc_feature: Table A; Target 31154; HLA-B*39:01; INSL4; ENSG00000120211; CTA
LRESLAAEL

SEQ ID NO: 31155 - protein, 9 aa, Homo sapiens
  misc_feature: Table A; Target 31155; HLA-C*06:02; INSL4; ENSG00000120211; CTA
LRESLAAEL

SEQ ID NO: 31156 - protein, 9 aa, Homo sapiens
  misc_feature: Table A; Target 31156; HLA-C*07:02; INSL4; ENSG00000120211; CTA
LRESLAAEL

SEQ ID NO: 31157 - protein, 8 aa, Homo sapiens
  misc_feature: Table A; Target 31157; HLA-C*03:04; INSL4; ENSG00000120211; CTA
LSEGQPSL

SEQ ID NO: 31158 - protein, 8 aa, Homo sapiens
  misc_feature: Table A; Target 31158; HLA-C*05:01; INSL4; ENSG00000120211; CTA
LSEGQPSL

SEQ ID NO: 31159 - protein, 9 aa, Homo sapiens
  misc_feature: Table A; Target 31159; HLA-A*01:01; INSL4; ENSG00000120211; CTA
LSEGQPSLK

SEQ ID NO: 31160 - protein, 9 aa, Homo sapiens
  misc_feature: Table A; Target 31160; HLA-A*03:02; INSL4; ENSG00000120211; CTA
LSEGQPSLK

SEQ ID NO: 31161 - protein, 9 aa, Homo sapiens
  misc_feature: Table A; Target 31161; HLA-C*05:01; INSL4; ENSG00000120211; CTA
LSEGQPSLK

SEQ ID NO: 31162 - protein, 9 aa, Homo sapiens
  misc_feature: Table A; Target 31162; HLA-A*32:01; INSL4; ENSG00000120211; CTA
LSQLLRESL

SEQ ID NO: 31163 - protein, 9 aa, Homo sapiens
  misc_feature: Table A; Target 31163; HLA-C*01:02; INSL4; ENSG00000120211; CTA
LSQLLRESL

SEQ ID NO: 31164 - protein, 9 aa, Homo sapiens
  misc_feature: Table A; Target 31164; HLA-C*07:02; INSL4; ENSG00000120211; CTA
LSQLLRESL

SEQ ID NO: 31165 - protein, 9 aa, Homo sapiens
  misc_feature: Table A; Target 31165; HLA-C*16:01; INSL4; ENSG00000120211; CTA
LSQLLRESL

SEQ ID NO: 31166 - protein, 9 aa, Homo sapiens
  misc_feature: Table A; Target 31166; HLA-A*03:01; INSL4; ENSG00000120211; CTA
LSYCPMPEK

SEQ ID NO: 31167 - protein, 9 aa, Homo sapiens
  misc_feature: Table A; Target 31167; HLA-A*11:01; INSL4; ENSG00000120211; CTA
LSYCPMPEK

SEQ ID NO: 31168 - protein, 8 aa, Homo sapiens
  misc_feature: Table A; Target 31168; HLA-C*16:01; INSL4; ENSG00000120211; CTA
MASLFRSY

SEQ ID NO: 31169 - protein, 9 aa, Homo sapiens
  misc_feature: Table A; Target 31169; HLA-B*07:02; INSL4; ENSG00000120211; CTA
MPEKTFTTT

SEQ ID NO: 31170 - protein, 9 aa, Homo sapiens
  misc_feature: Table A; Target 31170; HLA-B*35:01; INSL4; ENSG00000120211; CTA
MPEKTFTTT

SEQ ID NO: 31171 - protein, 9 aa, Homo sapiens
  misc_feature: Table A; Target 31171; HLA-B*35:03; INSL4; ENSG00000120211; CTA
MPEKTFTTT

SEQ ID NO: 31172 - protein, 9 aa, Homo sapiens
  misc_feature: Table A; Target 31172; HLA-B*54:01; INSL4; ENSG00000120211; CTA
MPEKTFTTT

SEQ ID NO: 31173 - protein, 9 aa, Homo sapiens
  misc_feature: Table A; Target 31173; HLA-B*55:01; INSL4; ENSG00000120211; CTA
MPEKTFTTT

SEQ ID NO: 31174 - protein, 9 aa, Homo sapiens
  misc_feature: Table A; Target 31174; HLA-B*56:01; INSL4; ENSG00000120211; CTA
MPEKTFTTT

SEQ ID NO: 31175 - protein, 8 aa, Homo sapiens
  misc_feature: Table A; Target 31175; HLA-B*08:01; INSL4; ENSG00000120211; CTA
NNKDGQAL

SEQ ID NO: 31176 - protein, 8 aa, Homo sapiens
  misc_feature: Table A; Target 31176; HLA-C*01:02; INSL4; ENSG00000120211; CTA
NNKDGQAL

SEQ ID NO: 31177 - protein, 9 aa, Homo sapiens
  misc_feature: Table A; Target 31177; HLA-A*02:01; INSL4; ENSG00000120211; CTA
PLSEGQPSL

SEQ ID NO: 31178 - protein, 9 aa, Homo sapiens
  misc_feature: Table A; Target 31178; HLA-A*02:04; INSL4; ENSG00000120211; CTA
PLSEGQPSL

SEQ ID NO: 31179 - protein, 9 aa, Homo sapiens
  misc_feature: Table A; Target 31179; HLA-B*13:02; INSL4; ENSG00000120211; CTA
PLSEGQPSL

SEQ ID NO: 31180 - protein, 9 aa, Homo sapiens
  misc_feature: Table A; Target 31180; HLA-B*39:01; INSL4; ENSG00000120211; CTA
PLSEGQPSL

SEQ ID NO: 31181 - protein, 9 aa, Homo sapiens
  misc_feature: Table A; Target 31181; HLA-B*55:01; INSL4; ENSG00000120211; CTA
PLSEGQPSL

SEQ ID NO: 31182 - protein, 9 aa, Homo sapiens
  misc_feature: Table A; Target 31182; HLA-A*23:01; INSL4; ENSG00000120211; CTA
QALGTTSEF

SEQ ID NO: 31183 - protein, 9 aa, Homo sapiens
  misc_feature: Table A; Target 31183; HLA-A*24:02; INSL4; ENSG00000120211; CTA
QALGTTSEF

SEQ ID NO: 31184 - protein, 9 aa, Homo sapiens
  misc_feature: Table A; Target 31184; HLA-A*25:01; INSL4; ENSG00000120211; CTA
QALGTTSEF

SEQ ID NO: 31185 - protein, 9 aa, Homo sapiens
  misc_feature: Table A; Target 31185; HLA-A*26:01; INSL4; ENSG00000120211; CTA
QALGTTSEF

SEQ ID NO: 31186 - protein, 9 aa, Homo sapiens
  misc_feature: Table A; Target 31186; HLA-A*30:02; INSL4; ENSG00000120211; CTA
QALGTTSEF

SEQ ID NO: 31187 - protein, 9 aa, Homo sapiens
  misc_feature: Table A; Target 31187; HLA-A*32:01; INSL4; ENSG00000120211; CTA
QALGTTSEF

SEQ ID NO: 31188 - protein, 9 aa, Homo sapiens
  misc_feature: Table A; Target 31188; HLA-B*07:02; INSL4; ENSG00000120211; CTA
QALGTTSEF

SEQ ID NO: 31189 - protein, 9 aa, Homo sapiens
  misc_feature: Table A; Target 31189; HLA-B*15:01; INSL4; ENSG00000120211; CTA
QALGTTSEF

SEQ ID NO: 31190 - protein, 9 aa, Homo sapiens
  misc_feature: Table A; Target 31190; HLA-B*15:03; INSL4; ENSG00000120211; CTA
QALGTTSEF

SEQ ID NO: 31191 - protein, 9 aa, Homo sapiens
  misc_feature: Table A; Target 31191; HLA-B*35:01; INSL4; ENSG00000120211; CTA
QALGTTSEF

SEQ ID NO: 31192 - protein, 9 aa, Homo sapiens
  misc_feature: Table A; Target 31192; HLA-B*35:03; INSL4; ENSG00000120211; CTA
QALGTTSEF

SEQ ID NO: 31193 - protein, 9 aa, Homo sapiens
  misc_feature: Table A; Target 31193; HLA-B*39:01; INSL4; ENSG00000120211; CTA
QALGTTSEF

SEQ ID NO: 31194 - protein, 9 aa, Homo sapiens
  misc_feature: Table A; Target 31194; HLA-B*46:01; INSL4; ENSG00000120211; CTA
QALGTTSEF

SEQ ID NO: 31195 - protein, 9 aa, Homo sapiens
  misc_feature: Table A; Target 31195; HLA-B*55:01; INSL4; ENSG00000120211; CTA
QALGTTSEF

SEQ ID NO: 31196 - protein, 9 aa, Homo sapiens
  misc_feature: Table A; Target 31196; HLA-B*58:01; INSL4; ENSG00000120211; CTA
QALGTTSEF

SEQ ID NO: 31197 - protein, 9 aa, Homo sapiens
  misc_feature: Table A; Target 31197; HLA-C*01:02; INSL4; ENSG00000120211; CTA
QALGTTSEF

SEQ ID NO: 31198 - protein, 9 aa, Homo sapiens
  misc_feature: Table A; Target 31198; HLA-C*02:02; INSL4; ENSG00000120211; CTA
QALGTTSEF

SEQ ID NO: 31199 - protein, 9 aa, Homo sapiens
  misc_feature: Table A; Target 31199; HLA-C*03:03; INSL4; ENSG00000120211; CTA
QALGTTSEF

SEQ ID NO: 31200 - protein, 9 aa, Homo sapiens
  misc_feature: Table A; Target 31200; HLA-C*03:04; INSL4; ENSG00000120211; CTA
QALGTTSEF

SEQ ID NO: 31201 - protein, 9 aa, Homo sapiens
  misc_feature: Table A; Target 31201; HLA-C*04:01; INSL4; ENSG00000120211; CTA
QALGTTSEF

SEQ ID NO: 31202 - protein, 9 aa, Homo sapiens
  misc_feature: Table A; Target 31202; HLA-C*05:01; INSL4; ENSG00000120211; CTA
QALGTTSEF

SEQ ID NO: 31203 - protein, 9 aa, Homo sapiens
  misc_feature: Table A; Target 31203; HLA-C*07:06; INSL4; ENSG00000120211; CTA
QALGTTSEF

SEQ ID NO: 31204 - protein, 9 aa, Homo sapiens
  misc_feature: Table A; Target 31204; HLA-C*12:03; INSL4; ENSG00000120211; CTA
QALGTTSEF

SEQ ID NO: 31205 - protein, 9 aa, Homo sapiens
  misc_feature: Table A; Target 31205; HLA-C*14:02; INSL4; ENSG00000120211; CTA
QALGTTSEF

SEQ ID NO: 31206 - protein, 9 aa, Homo sapiens
  misc_feature: Table A; Target 31206; HLA-C*16:01; INSL4; ENSG00000120211; CTA
QALGTTSEF

SEQ ID NO: 31207 - protein, 9 aa, Homo sapiens
  misc_feature: Table A; Target 31207; HLA-C*16:02; INSL4; ENSG00000120211; CTA
QALGTTSEF

SEQ ID NO: 31208 - protein, 9 aa, Homo sapiens
  misc_feature: Table A; Target 31208; HLA-C*16:04; INSL4; ENSG00000120211; CTA
QALGTTSEF

SEQ ID NO: 31209 - protein, 11 aa, Homo sapiens
  misc_feature: Table A; Target 31209; HLA-A*02:01; INSL4; ENSG00000120211; CTA
QLLRESLAAEL

SEQ ID NO: 31210 - protein, 11 aa, Homo sapiens
  misc_feature: Table A; Target 31210; HLA-A*02:04; INSL4; ENSG00000120211; CTA
QLLRESLAAEL

SEQ ID NO: 31211 - protein, 8 aa, Homo sapiens
  misc_feature: Table A; Target 31211; HLA-B*08:01; INSL4; ENSG00000120211; CTA
QPSLKKII

SEQ ID NO: 31212 - protein, 9 aa, Homo sapiens
  misc_feature: Table A; Target 31212; HLA-B*07:02; INSL4; ENSG00000120211; CTA
QPSLKKIIL

SEQ ID NO: 31213 - protein, 9 aa, Homo sapiens
  misc_feature: Table A; Target 31213; HLA-B*08:01; INSL4; ENSG00000120211; CTA
QPSLKKIIL

SEQ ID NO: 31214 - protein, 9 aa, Homo sapiens
  misc_feature: Table A; Target 31214; HLA-C*07:02; INSL4; ENSG00000120211; CTA
QPSLKKIIL

SEQ ID NO: 31215 - protein, 8 aa, Homo sapiens
  misc_feature: Table A; Target 31215; HLA-A*30:01; INSL4; ENSG00000120211; CTA
RESLAAEL

SEQ ID NO: 31216 - protein, 8 aa, Homo sapiens
  misc_feature: Table A; Target 31216; HLA-B*18:01; INSL4; ENSG00000120211; CTA
RESLAAEL

SEQ ID NO: 31217 - protein, 8 aa, Homo sapiens
  misc_feature: Table A; Target 31217; HLA-B*37:01; INSL4; ENSG00000120211; CTA
RESLAAEL

SEQ ID NO: 31218 - protein, 8 aa, Homo sapiens
  misc_feature: Table A; Target 31218; HLA-B*40:01; INSL4; ENSG00000120211; CTA
RESLAAEL

SEQ ID NO: 31219 - protein, 9 aa, Homo sapiens
  misc_feature: Table A; Target 31219; HLA-A*29:02; INSL4; ENSG00000120211; CTA
RFGKHLLSY

SEQ ID NO: 31220 - protein, 8 aa, Homo sapiens
  misc_feature: Table A; Target 31220; HLA-B*57:01; INSL4; ENSG00000120211; CTA
RSYLPAIW

SEQ ID NO: 31221 - protein, 9 aa, Homo sapiens
  misc_feature: Table A; Target 31221; HLA-B*40:02; INSL4; ENSG00000120211; CTA
SEFIPNLSP

SEQ ID NO: 31222 - protein, 9 aa, Homo sapiens
  misc_feature: Table A; Target 31222; HLA-B*49:01; INSL4; ENSG00000120211; CTA
SEFIPNLSP

SEQ ID NO: 31223 - protein, 11 aa, Homo sapiens
  misc_feature: Table A; Target 31223; HLA-A*30:01; INSL4; ENSG00000120211; CTA
SEFIPNLSPEL

SEQ ID NO: 31224 - protein, 11 aa, Homo sapiens
  misc_feature: Table A; Target 31224; HLA-B*40:01; INSL4; ENSG00000120211; CTA
SEFIPNLSPEL

SEQ ID NO: 31225 - protein, 11 aa, Homo sapiens
  misc_feature: Table A; Target 31225; HLA-B*44:02; INSL4; ENSG00000120211; CTA
SEFIPNLSPEL

SEQ ID NO: 31226 - protein, 11 aa, Homo sapiens
  misc_feature: Table A; Target 31226; HLA-B*44:03; INSL4; ENSG00000120211; CTA
SEFIPNLSPEL

SEQ ID NO: 31227 - protein, 9 aa, Homo sapiens
  misc_feature: Table A; Target 31227; HLA-B*44:03; INSL4; ENSG00000120211; CTA
SEGQPSLKK

SEQ ID NO: 31228 - protein, 10 aa, Homo sapiens
  misc_feature: Table A; Target 31228; HLA-B*44:02; INSL4; ENSG00000120211; CTA
SEGQPSLKKI

SEQ ID NO: 31229 - protein, 10 aa, Homo sapiens
  misc_feature: Table A; Target 31229; HLA-B*44:03; INSL4; ENSG00000120211; CTA
SEGQPSLKKI

SEQ ID NO: 31230 - protein, 10 aa, Homo sapiens
  misc_feature: Table A; Target 31230; HLA-B*49:01; INSL4; ENSG00000120211; CTA
SEGQPSLKKI

SEQ ID NO: 31231 - protein, 9 aa, Homo sapiens
  misc_feature: Table A; Target 31231; HLA-A*02:03; INSL4; ENSG00000120211; CTA
SLAAELRGC

SEQ ID NO: 31232 - protein, 10 aa, Homo sapiens
  misc_feature: Table A; Target 31232; HLA-A*02:01; INSL4; ENSG00000120211; CTA
SLFRSYLPAI

SEQ ID NO: 31233 - protein, 10 aa, Homo sapiens
  misc_feature: Table A; Target 31233; HLA-A*02:03; INSL4; ENSG00000120211; CTA
SLFRSYLPAI

SEQ ID NO: 31234 - protein, 10 aa, Homo sapiens
  misc_feature: Table A; Target 31234; HLA-A*02:04; INSL4; ENSG00000120211; CTA
SLFRSYLPAI

SEQ ID NO: 31235 - protein, 9 aa, Homo sapiens
  misc_feature: Table A; Target 31235; HLA-A*02:03; INSL4; ENSG00000120211; CTA
SLKKIILSR

SEQ ID NO: 31236 - protein, 9 aa, Homo sapiens
  misc_feature: Table A; Target 31236; HLA-A*03:01; INSL4; ENSG00000120211; CTA
SLKKIILSR

SEQ ID NO: 31237 - protein, 9 aa, Homo sapiens
  misc_feature: Table A; Target 31237; HLA-A*31:01; INSL4; ENSG00000120211; CTA
SLKKIILSR

SEQ ID NO: 31238 - protein, 9 aa, Homo sapiens
  misc_feature: Table A; Target 31238; HLA-A*33:01; INSL4; ENSG00000120211; CTA
SLKKIILSR

SEQ ID NO: 31239 - protein, 9 aa, Homo sapiens
  misc_feature: Table A; Target 31239; HLA-A*33:03; INSL4; ENSG00000120211; CTA
SLKKIILSR

SEQ ID NO: 31240 - protein, 9 aa, Homo sapiens
  misc_feature: Table A; Target 31240; HLA-B*08:01; INSL4; ENSG00000120211; CTA
SLKKIILSR

SEQ ID NO: 31241 - protein, 10 aa, Homo sapiens
  misc_feature: Table A; Target 31241; HLA-A*03:01; INSL4; ENSG00000120211; CTA
SLKKIILSRK

SEQ ID NO: 31242 - protein, 9 aa, Homo sapiens
  misc_feature: Table A; Target 31242; HLA-C*01:02; INSL4; ENSG00000120211; CTA
SNNKDGQAL

SEQ ID NO: 31243 - protein, 9 aa, Homo sapiens
  misc_feature: Table A; Target 31243; HLA-C*14:02; INSL4; ENSG00000120211; CTA
SNNKDGQAL

SEQ ID NO: 31244 - protein, 8 aa, Homo sapiens
  misc_feature: Table A; Target 31244; HLA-B*07:02; INSL4; ENSG00000120211; CTA
SPELKKPL

SEQ ID NO: 31245 - protein, 8 aa, Homo sapiens
  misc_feature: Table A; Target 31245; HLA-B*08:01; INSL4; ENSG00000120211; CTA
SPELKKPL

SEQ ID NO: 31246 - protein, 8 aa, Homo sapiens
  misc_feature: Table A; Target 31246; HLA-C*07:02; INSL4; ENSG00000120211; CTA
SPELKKPL

SEQ ID NO: 31247 - protein, 8 aa, Homo sapiens
  misc_feature: Table A; Target 31247; HLA-B*08:01; INSL4; ENSG00000120211; CTA
SQLLRESL

SEQ ID NO: 31248 - protein, 10 aa, Homo sapiens
  misc_feature: Table A; Target 31248; HLA-A*23:01; INSL4; ENSG00000120211; CTA
SYCPMPEKTF

SEQ ID NO: 31249 - protein, 10 aa, Homo sapiens
  misc_feature: Table A; Target 31249; HLA-A*24:02; INSL4; ENSG00000120211; CTA
SYCPMPEKTF

SEQ ID NO: 31250 - protein, 9 aa, Homo sapiens
  misc_feature: Table A; Target 31250; HLA-A*02:04; INSL4; ENSG00000120211; CTA
SYLPAIWLL

SEQ ID NO: 31251 - protein, 9 aa, Homo sapiens
  misc_feature: Table A; Target 31251; HLA-A*23:01; INSL4; ENSG00000120211; CTA
SYLPAIWLL

SEQ ID NO: 31252 - protein, 9 aa, Homo sapiens
  misc_feature: Table A; Target 31252; HLA-A*24:02; INSL4; ENSG00000120211; CTA
SYLPAIWLL

SEQ ID NO: 31253 - protein, 9 aa, Homo sapiens
  misc_feature: Table A; Target 31253; HLA-A*29:02; INSL4; ENSG00000120211; CTA
SYLPAIWLL

SEQ ID NO: 31254 - protein, 10 aa, Homo sapiens
  misc_feature: Table A; Target 31254; HLA-A*23:01; INSL4; ENSG00000120211; CTA
SYLPAIWLLL

SEQ ID NO: 31255 - protein, 10 aa, Homo sapiens
  misc_feature: Table A; Target 31255; HLA-A*24:02; INSL4; ENSG00000120211; CTA
SYLPAIWLLL

SEQ ID NO: 31256 - protein, 9 aa, Homo sapiens
  misc_feature: Table A; Target 31256; HLA-A*02:01; INSL4; ENSG00000120211; CTA
TTSEFIPNL

SEQ ID NO: 31257 - protein, 9 aa, Homo sapiens
  misc_feature: Table A; Target 31257; HLA-A*02:03; INSL4; ENSG00000120211; CTA
TTSEFIPNL

SEQ ID NO: 31258 - protein, 9 aa, Homo sapiens
  misc_feature: Table A; Target 31258; HLA-A*02:04; INSL4; ENSG00000120211; CTA
TTSEFIPNL

SEQ ID NO: 31259 - protein, 9 aa, Homo sapiens
  misc_feature: Table A; Target 31259; HLA-A*02:07; INSL4; ENSG00000120211; CTA
TTSEFIPNL

SEQ ID NO: 31260 - protein, 9 aa, Homo sapiens
  misc_feature: Table A; Target 31260; HLA-A*03:02; INSL4; ENSG00000120211; CTA
TTSEFIPNL

SEQ ID NO: 31261 - protein, 9 aa, Homo sapiens
  misc_feature: Table A; Target 31261; HLA-A*11:01; INSL4; ENSG00000120211; CTA
TTSEFIPNL

SEQ ID NO: 31262 - protein, 9 aa, Homo sapiens
  misc_feature: Table A; Target 31262; HLA-A*23:01; INSL4; ENSG00000120211; CTA
TTSEFIPNL

SEQ ID NO: 31263 - protein, 9 aa, Homo sapiens
  misc_feature: Table A; Target 31263; HLA-A*25:01; INSL4; ENSG00000120211; CTA
TTSEFIPNL

SEQ ID NO: 31264 - protein, 9 aa, Homo sapiens
  misc_feature: Table A; Target 31264; HLA-A*26:01; INSL4; ENSG00000120211; CTA
TTSEFIPNL

SEQ ID NO: 31265 - protein, 9 aa, Homo sapiens
  misc_feature: Table A; Target 31265; HLA-A*31:01; INSL4; ENSG00000120211; CTA
TTSEFIPNL

SEQ ID NO: 31266 - protein, 9 aa, Homo sapiens
  misc_feature: Table A; Target 31266; HLA-A*68:01; INSL4; ENSG00000120211; CTA
TTSEFIPNL

SEQ ID NO: 31267 - protein, 9 aa, Homo sapiens
  misc_feature: Table A; Target 31267; HLA-A*68:02; INSL4; ENSG00000120211; CTA
TTSEFIPNL

SEQ ID NO: 31268 - protein, 9 aa, Homo sapiens
  misc_feature: Table A; Target 31268; HLA-B*13:02; INSL4; ENSG00000120211; CTA
TTSEFIPNL

SEQ ID NO: 31269 - protein, 9 aa, Homo sapiens
  misc_feature: Table A; Target 31269; HLA-B*27:05; INSL4; ENSG00000120211; CTA
TTSEFIPNL

SEQ ID NO: 31270 - protein, 9 aa, Homo sapiens
  misc_feature: Table A; Target 31270; HLA-B*35:03; INSL4; ENSG00000120211; CTA
TTSEFIPNL

SEQ ID NO: 31271 - protein, 9 aa, Homo sapiens
  misc_feature: Table A; Target 31271; HLA-B*38:01; INSL4; ENSG00000120211; CTA
TTSEFIPNL

SEQ ID NO: 31272 - protein, 9 aa, Homo sapiens
  misc_feature: Table A; Target 31272; HLA-B*39:01; INSL4; ENSG00000120211; CTA
TTSEFIPNL

SEQ ID NO: 31273 - protein, 9 aa, Homo sapiens
  misc_feature: Table A; Target 31273; HLA-C*01:02; INSL4; ENSG00000120211; CTA
TTSEFIPNL

SEQ ID NO: 31274 - protein, 9 aa, Homo sapiens
  misc_feature: Table A; Target 31274; HLA-C*02:02; INSL4; ENSG00000120211; CTA
TTSEFIPNL

SEQ ID NO: 31275 - protein, 9 aa, Homo sapiens
  misc_feature: Table A; Target 31275; HLA-C*03:04; INSL4; ENSG00000120211; CTA
TTSEFIPNL

SEQ ID NO: 31276 - protein, 9 aa, Homo sapiens
  misc_feature: Table A; Target 31276; HLA-C*07:04; INSL4; ENSG00000120211; CTA
TTSEFIPNL

SEQ ID NO: 31277 - protein, 9 aa, Homo sapiens
  misc_feature: Table A; Target 31277; HLA-C*07:06; INSL4; ENSG00000120211; CTA
TTSEFIPNL

SEQ ID NO: 31278 - protein, 9 aa, Homo sapiens
  misc_feature: Table A; Target 31278; HLA-C*12:03; INSL4; ENSG00000120211; CTA
TTSEFIPNL

SEQ ID NO: 31279 - protein, 9 aa, Homo sapiens
  misc_feature: Table A; Target 31279; HLA-C*16:01; INSL4; ENSG00000120211; CTA
TTSEFIPNL

SEQ ID NO: 31280 - protein, 9 aa, Homo sapiens
  misc_feature: Table A; Target 31280; HLA-C*16:02; INSL4; ENSG00000120211; CTA
TTSEFIPNL

SEQ ID NO: 31281 - protein, 9 aa, Homo sapiens
  misc_feature: Table A; Target 31281; HLA-A*68:02; INSL4; ENSG00000120211; CTA
TTTPGGWLL

SEQ ID NO: 31282 - protein, 9 aa, Homo sapiens
  misc_feature: Table A; Target 31282; HLA-A*02:01; INSL4; ENSG00000120211; CTA
VICDDGTSV

SEQ ID NO: 31283 - protein, 9 aa, Homo sapiens
  misc_feature: Table A; Target 31283; HLA-A*02:03; INSL4; ENSG00000120211; CTA
VICDDGTSV

SEQ ID NO: 31284 - protein, 9 aa, Homo sapiens
  misc_feature: Table A; Target 31284; HLA-B*55:01; INSL4; ENSG00000120211; CTA
VICDDGTSV

SEQ ID NO: 31285 - protein, 9 aa, Homo sapiens
  misc_feature: Table A; Target 31285; HLA-C*01:02; INSL4; ENSG00000120211; CTA
VICDDGTSV

SEQ ID NO: 31286 - protein, 9 aa, Homo sapiens
  misc_feature: Table A; Target 31286; HLA-C*05:01; INSL4; ENSG00000120211; CTA
VICDDGTSV

SEQ ID NO: 31287 - protein, 10 aa, Homo sapiens
  misc_feature: Table A; Target 31287; HLA-A*03:02; INSL4; ENSG00000120211; CTA
VICDDGTSVK

SEQ ID NO: 31288 - protein, 8 aa, Homo sapiens
  misc_feature: Table A; Target 31288; HLA-A*02:04; INSL4; ENSG00000120211; CTA
YLPAIWLL

SEQ ID NO: 31289 - protein, 8 aa, Homo sapiens
  misc_feature: Table A; Target 31289; HLA-A*02:07; INSL4; ENSG00000120211; CTA
YLPAIWLL

SEQ ID NO: 31290 - protein, 9 aa, Homo sapiens
  misc_feature: Table A; Target 31290; HLA-A*02:01; INSL4; ENSG00000120211; CTA
YLPAIWLLL

SEQ ID NO: 31291 - protein, 9 aa, Homo sapiens
  misc_feature: Table A; Target 31291; HLA-A*02:03; INSL4; ENSG00000120211; CTA
YLPAIWLLL

SEQ ID NO: 31292 - protein, 9 aa, Homo sapiens
  misc_feature: Table A; Target 31292; HLA-A*02:04; INSL4; ENSG00000120211; CTA
YLPAIWLLL

SEQ ID NO: 31293 - protein, 9 aa, Homo sapiens
  misc_feature: Table A; Target 31293; HLA-A*02:07; INSL4; ENSG00000120211; CTA
YLPAIWLLL

SEQ ID NO: 31294 - protein, 9 aa, Homo sapiens
  misc_feature: Table A; Target 31294; HLA-A*24:02; INSL4; ENSG00000120211; CTA
YLPAIWLLL

SEQ ID NO: 31295 - protein, 9 aa, Homo sapiens
  misc_feature: Table A; Target 31295; HLA-A*29:02; INSL4; ENSG00000120211; CTA
YLPAIWLLL

SEQ ID NO: 31296 - protein, 9 aa, Homo sapiens
  misc_feature: Table A; Target 31296; HLA-A*11:01; INSL6; ENSG00000120210; CTA
ACLPYIDFK

SEQ ID NO: 31297 - protein, 10 aa, Homo sapiens
  misc_feature: Table A; Target 31297; HLA-A*25:01; INSL6; ENSG00000120210; CTA
AQASEKVEAY

SEQ ID NO: 31298 - protein, 10 aa, Homo sapiens
  misc_feature: Table A; Target 31298; HLA-A*26:01; INSL6; ENSG00000120210; CTA
AQASEKVEAY

SEQ ID NO: 31299 - protein, 10 aa, Homo sapiens
  misc_feature: Table A; Target 31299; HLA-A*30:02; INSL6; ENSG00000120210; CTA
AQASEKVEAY

SEQ ID NO: 31300 - protein, 10 aa, Homo sapiens
  misc_feature: Table A; Target 31300; HLA-A*32:01; INSL6; ENSG00000120210; CTA
AQASEKVEAY

SEQ ID NO: 31301 - protein, 10 aa, Homo sapiens
  misc_feature: Table A; Target 31301; HLA-B*15:03; INSL6; ENSG00000120210; CTA
AQASEKVEAY

SEQ ID NO: 31302 - protein, 10 aa, Homo sapiens
  misc_feature: Table A; Target 31302; HLA-B*44:02; INSL6; ENSG00000120210; CTA
AQASEKVEAY

SEQ ID NO: 31303 - protein, 10 aa, Homo sapiens
  misc_feature: Table A; Target 31303; HLA-B*44:03; INSL6; ENSG00000120210; CTA
AQASEKVEAY

SEQ ID NO: 31304 - protein, 10 aa, Homo sapiens
  misc_feature: Table A; Target 31304; HLA-C*07:04; INSL6; ENSG00000120210; CTA
AQASEKVEAY

SEQ ID NO: 31305 - protein, 10 aa, Homo sapiens
  misc_feature: Table A; Target 31305; HLA-C*16:04; INSL6; ENSG00000120210; CTA
AQASEKVEAY

SEQ ID NO: 31306 - protein, 8 aa, Homo sapiens
  misc_feature: Table A; Target 31306; HLA-A*01:01; INSL6; ENSG00000120210; CTA
ASEKVEAY

SEQ ID NO: 31307 - protein, 8 aa, Homo sapiens
  misc_feature: Table A; Target 31307; HLA-A*30:02; INSL6; ENSG00000120210; CTA
ASEKVEAY

SEQ ID NO: 31308 - protein, 8 aa, Homo sapiens
  misc_feature: Table A; Target 31308; HLA-B*58:01; INSL6; ENSG00000120210; CTA
ASEKVEAY

SEQ ID NO: 31309 - protein, 11 aa, Homo sapiens
  misc_feature: Table A; Target 31309; HLA-A*01:01; INSL6; ENSG00000120210; CTA
ASEKVEAYSPY

SEQ ID NO: 31310 - protein, 8 aa, Homo sapiens
  misc_feature: Table A; Target 31310; HLA-B*08:01; INSL6; ENSG00000120210; CTA
DISSARKL

SEQ ID NO: 31311 - protein, 8 aa, Homo sapiens
  misc_feature: Table A; Target 31311; HLA-B*35:01; INSL6; ENSG00000120210; CTA
EAVNSWEM

SEQ ID NO: 31312 - protein, 8 aa, Homo sapiens
  misc_feature: Table A; Target 31312; HLA-B*35:03; INSL6; ENSG00000120210; CTA
EAVNSWEM

SEQ ID NO: 31313 - protein, 8 aa, Homo sapiens
  misc_feature: Table A; Target 31313; HLA-A*23:01; INSL6; ENSG00000120210; CTA
EAYSPYQF

SEQ ID NO: 31314 - protein, 8 aa, Homo sapiens
  misc_feature: Table A; Target 31314; HLA-B*08:01; INSL6; ENSG00000120210; CTA
EAYSPYQF

SEQ ID NO: 31315 - protein, 9 aa, Homo sapiens
  misc_feature: Table A; Target 31315; HLA-B*18:01; INSL6; ENSG00000120210; CTA
EEAVNSWEM

SEQ ID NO: 31316 - protein, 9 aa, Homo sapiens
  misc_feature: Table A; Target 31316; HLA-B*40:01; INSL6; ENSG00000120210; CTA
EEAVNSWEM

SEQ ID NO: 31317 - protein, 9 aa, Homo sapiens
  misc_feature: Table A; Target 31317; HLA-B*40:01; INSL6; ENSG00000120210; CTA
EEETPFSRL

SEQ ID NO: 31318 - protein, 9 aa, Homo sapiens
  misc_feature: Table A; Target 31318; HLA-B*44:03; INSL6; ENSG00000120210; CTA
EEETPFSRL

SEQ ID NO: 31319 - protein, 10 aa, Homo sapiens
  misc_feature: Table A; Target 31319; HLA-B*44:02; INSL6; ENSG00000120210; CTA
EEETPFSRLI

SEQ ID NO: 31320 - protein, 10 aa, Homo sapiens
  misc_feature: Table A; Target 31320; HLA-B*44:03; INSL6; ENSG00000120210; CTA
EEETPFSRLI

SEQ ID NO: 31321 - protein, 10 aa, Homo sapiens
  misc_feature: Table A; Target 31321; HLA-B*49:01; INSL6; ENSG00000120210; CTA
EEETPFSRLI

SEQ ID NO: 31322 - protein, 8 aa, Homo sapiens
  misc_feature: Table A; Target 31322; HLA-B*18:01; INSL6; ENSG00000120210; CTA
EELSIACL

SEQ ID NO: 31323 - protein, 8 aa, Homo sapiens
  misc_feature: Table A; Target 31323; HLA-B*18:01; INSL6; ENSG00000120210; CTA
EETPFSRL

SEQ ID NO: 31324 - protein, 8 aa, Homo sapiens
  misc_feature: Table A; Target 31324; HLA-B*44:03; INSL6; ENSG00000120210; CTA
EETPFSRL

SEQ ID NO: 31325 - protein, 9 aa, Homo sapiens
  misc_feature: Table A; Target 31325; HLA-A*30:01; INSL6; ENSG00000120210; CTA
EETPFSRLI

SEQ ID NO: 31326 - protein, 9 aa, Homo sapiens
  misc_feature: Table A; Target 31326; HLA-A*68:02; INSL6; ENSG00000120210; CTA
EETPFSRLI

SEQ ID NO: 31327 - protein, 9 aa, Homo sapiens
  misc_feature: Table A; Target 31327; HLA-B*18:01; INSL6; ENSG00000120210; CTA
EETPFSRLI

SEQ ID NO: 31328 - protein, 9 aa, Homo sapiens
  misc_feature: Table A; Target 31328; HLA-B*44:02; INSL6; ENSG00000120210; CTA
EETPFSRLI

SEQ ID NO: 31329 - protein, 9 aa, Homo sapiens
  misc_feature: Table A; Target 31329; HLA-B*44:03; INSL6; ENSG00000120210; CTA
EETPFSRLI

SEQ ID NO: 31330 - protein, 9 aa, Homo sapiens
  misc_feature: Table A; Target 31330; HLA-B*49:01; INSL6; ENSG00000120210; CTA
EETPFSRLI

SEQ ID NO: 31331 - protein, 9 aa, Homo sapiens
  misc_feature: Table A; Target 31331; HLA-C*16:02; INSL6; ENSG00000120210; CTA
EETPFSRLI

SEQ ID NO: 31332 - protein, 9 aa, Homo sapiens
  misc_feature: Table A; Target 31332; HLA-A*26:01; INSL6; ENSG00000120210; CTA
EKVEAYSPY

SEQ ID NO: 31333 - protein, 9 aa, Homo sapiens
  misc_feature: Table A; Target 31333; HLA-B*15:03; INSL6; ENSG00000120210; CTA
EKVEAYSPY

SEQ ID NO: 31334 - protein, 9 aa, Homo sapiens
  misc_feature: Table A; Target 31334; HLA-A*26:01; INSL6; ENSG00000120210; CTA
ELSDISSAR

SEQ ID NO: 31335 - protein, 9 aa, Homo sapiens
  misc_feature: Table A; Target 31335; HLA-A*33:01; INSL6; ENSG00000120210; CTA
ELSDISSAR

SEQ ID NO: 31336 - protein, 9 aa, Homo sapiens
  misc_feature: Table A; Target 31336; HLA-A*33:03; INSL6; ENSG00000120210; CTA
ELSDISSAR

SEQ ID NO: 31337 - protein, 9 aa, Homo sapiens
  misc_feature: Table A; Target 31337; HLA-A*68:01; INSL6; ENSG00000120210; CTA
ELSDISSAR

SEQ ID NO: 31338 - protein, 9 aa, Homo sapiens
  misc_feature: Table A; Target 31338; HLA-C*07:06; INSL6; ENSG00000120210; CTA
ELSDISSAR

SEQ ID NO: 31339 - protein, 10 aa, Homo sapiens
  misc_feature: Table A; Target 31339; HLA-A*33:03; INSL6; ENSG00000120210; CTA
ELSDISSARK

SEQ ID NO: 31340 - protein, 10 aa, Homo sapiens
  misc_feature: Table A; Target 31340; HLA-A*68:01; INSL6; ENSG00000120210; CTA
ELSDISSARK

SEQ ID NO: 31341 - protein, 11 aa, Homo sapiens
  misc_feature: Table A; Target 31341; HLA-A*68:02; INSL6; ENSG00000120210; CTA
ELSDISSARKL

SEQ ID NO: 31342 - protein, 8 aa, Homo sapiens
  misc_feature: Table A; Target 31342; HLA-A*30:02; INSL6; ENSG00000120210; CTA
EMQSLPEY

SEQ ID NO: 31343 - protein, 9 aa, Homo sapiens
  misc_feature: Table A; Target 31343; HLA-A*03:02; INSL6; ENSG00000120210; CTA
EMQSLPEYK

SEQ ID NO: 31344 - protein, 9 aa, Homo sapiens
  misc_feature: Table A; Target 31344; HLA-A*33:03; INSL6; ENSG00000120210; CTA
EMQSLPEYK

SEQ ID NO: 31345 - protein, 9 aa, Homo sapiens
  misc_feature: Table A; Target 31345; HLA-A*33:03; INSL6; ENSG00000120210; CTA
ENAKFQKKR

SEQ ID NO: 31346 - protein, 10 aa, Homo sapiens
  misc_feature: Table A; Target 31346; HLA-A*68:01; INSL6; ENSG00000120210; CTA
ESPQTASPAR

SEQ ID NO: 31347 - protein, 10 aa, Homo sapiens
  misc_feature: Table A; Target 31347; HLA-C*07:06; INSL6; ENSG00000120210; CTA
ESPQTASPAR

SEQ ID NO: 31348 - protein, 10 aa, Homo sapiens
  misc_feature: Table A; Target 31348; HLA-B*40:01; INSL6; ENSG00000120210; CTA
FEEETPFSRL

SEQ ID NO: 31349 - protein, 10 aa, Homo sapiens
  misc_feature: Table A; Target 31349; HLA-B*49:01; INSL6; ENSG00000120210; CTA
FEEETPFSRL

SEQ ID NO: 31350 - protein, 11 aa, Homo sapiens
  misc_feature: Table A; Target 31350; HLA-B*49:01; INSL6; ENSG00000120210; CTA
FEEETPFSRLI

SEQ ID NO: 31351 - protein, 9 aa, Homo sapiens
  misc_feature: Table A; Target 31351; HLA-B*49:01; INSL6; ENSG00000120210; CTA
FESPQTASP

SEQ ID NO: 31352 - protein, 11 aa, Homo sapiens
  misc_feature: Table A; Target 31352; HLA-B*27:02; INSL6; ENSG00000120210; CTA
FESPQTASPAR

SEQ ID NO: 31353 - protein, 11 aa, Homo sapiens
  misc_feature: Table A; Target 31353; HLA-B*27:05; INSL6; ENSG00000120210; CTA
FESPQTASPAR

SEQ ID NO: 31354 - protein, 9 aa, Homo sapiens
  misc_feature: Table A; Target 31354; HLA-A*68:02; INSL6; ENSG00000120210; CTA
FSSSHNINV

SEQ ID NO: 31355 - protein, 9 aa, Homo sapiens
  misc_feature: Table A; Target 31355; HLA-C*02:02; INSL6; ENSG00000120210; CTA
FSSSHNINV

SEQ ID NO: 31356 - protein, 10 aa, Homo sapiens
  misc_feature: Table A; Target 31356; HLA-A*01:01; INSL6; ENSG00000120210; CTA
FSSSHNINVY

SEQ ID NO: 31357 - protein, 10 aa, Homo sapiens
  misc_feature: Table A; Target 31357; HLA-A*30:02; INSL6; ENSG00000120210; CTA
FSSSHNINVY

SEQ ID NO: 31358 - protein, 10 aa, Homo sapiens
  misc_feature: Table A; Target 31358; HLA-B*46:01; INSL6; ENSG00000120210; CTA
FSSSHNINVY

SEQ ID NO: 31359 - protein, 10 aa, Homo sapiens
  misc_feature: Table A; Target 31359; HLA-C*02:02; INSL6; ENSG00000120210; CTA
FSSSHNINVY

SEQ ID NO: 31360 - protein, 11 aa, Homo sapiens
  misc_feature: Table A; Target 31360; HLA-B*27:02; INSL6; ENSG00000120210; CTA
GRGTNPVSTSW

SEQ ID NO: 31361 - protein, 11 aa, Homo sapiens
  misc_feature: Table A; Target 31361; HLA-C*16:04; INSL6; ENSG00000120210; CTA
GRGTNPVSTSW

SEQ ID NO: 31362 - protein, 10 aa, Homo sapiens
  misc_feature: Table A; Target 31362; HLA-B*27:05; INSL6; ENSG00000120210; CTA
GRYLVKEIEK

SEQ ID NO: 31363 - protein, 9 aa, Homo sapiens
  misc_feature: Table A; Target 31363; HLA-A*11:01; INSL6; ENSG00000120210; CTA
GTNPVSTSW

SEQ ID NO: 31364 - protein, 9 aa, Homo sapiens
  misc_feature: Table A; Target 31364; HLA-A*23:01; INSL6; ENSG00000120210; CTA
GTNPVSTSW

SEQ ID NO: 31365 - protein, 9 aa, Homo sapiens
  misc_feature: Table A; Target 31365; HLA-A*25:01; INSL6; ENSG00000120210; CTA
GTNPVSTSW

SEQ ID NO: 31366 - protein, 9 aa, Homo sapiens
  misc_feature: Table A; Target 31366; HLA-A*26:01; INSL6; ENSG00000120210; CTA
GTNPVSTSW

SEQ ID NO: 31367 - protein, 9 aa, Homo sapiens
  misc_feature: Table A; Target 31367; HLA-A*29:02; INSL6; ENSG00000120210; CTA
GTNPVSTSW

SEQ ID NO: 31368 - protein, 9 aa, Homo sapiens
  misc_feature: Table A; Target 31368; HLA-A*30:02; INSL6; ENSG00000120210; CTA
GTNPVSTSW

SEQ ID NO: 31369 - protein, 9 aa, Homo sapiens
  misc_feature: Table A; Target 31369; HLA-A*31:01; INSL6; ENSG00000120210; CTA
GTNPVSTSW

SEQ ID NO: 31370 - protein, 9 aa, Homo sapiens
  misc_feature: Table A; Target 31370; HLA-A*33:03; INSL6; ENSG00000120210; CTA
GTNPVSTSW

SEQ ID NO: 31371 - protein, 9 aa, Homo sapiens
  misc_feature: Table A; Target 31371; HLA-B*15:01; INSL6; ENSG00000120210; CTA
GTNPVSTSW

SEQ ID NO: 31372 - protein, 9 aa, Homo sapiens
  misc_feature: Table A; Target 31372; HLA-B*15:03; INSL6; ENSG00000120210; CTA
GTNPVSTSW

SEQ ID NO: 31373 - protein, 9 aa, Homo sapiens
  misc_feature: Table A; Target 31373; HLA-B*27:02; INSL6; ENSG00000120210; CTA
GTNPVSTSW

SEQ ID NO: 31374 - protein, 9 aa, Homo sapiens
  misc_feature: Table A; Target 31374; HLA-B*44:02; INSL6; ENSG00000120210; CTA
GTNPVSTSW

SEQ ID NO: 31375 - protein, 9 aa, Homo sapiens
  misc_feature: Table A; Target 31375; HLA-B*44:03; INSL6; ENSG00000120210; CTA
GTNPVSTSW

SEQ ID NO: 31376 - protein, 9 aa, Homo sapiens
  misc_feature: Table A; Target 31376; HLA-B*46:01; INSL6; ENSG00000120210; CTA
GTNPVSTSW

SEQ ID NO: 31377 - protein, 9 aa, Homo sapiens
  misc_feature: Table A; Target 31377; HLA-B*57:01; INSL6; ENSG00000120210; CTA
GTNPVSTSW

SEQ ID NO: 31378 - protein, 9 aa, Homo sapiens
  misc_feature: Table A; Target 31378; HLA-B*58:01; INSL6; ENSG00000120210; CTA
GTNPVSTSW

SEQ ID NO: 31379 - protein, 9 aa, Homo sapiens
  misc_feature: Table A; Target 31379; HLA-C*02:02; INSL6; ENSG00000120210; CTA
GTNPVSTSW

SEQ ID NO: 31380 - protein, 9 aa, Homo sapiens
  misc_feature: Table A; Target 31380; HLA-C*07:06; INSL6; ENSG00000120210; CTA
GTNPVSTSW

SEQ ID NO: 31381 - protein, 9 aa, Homo sapiens
  misc_feature: Table A; Target 31381; HLA-C*16:01; INSL6; ENSG00000120210; CTA
GTNPVSTSW

SEQ ID NO: 31382 - protein, 9 aa, Homo sapiens
  misc_feature: Table A; Target 31382; HLA-C*16:04; INSL6; ENSG00000120210; CTA
GTNPVSTSW

SEQ ID NO: 31383 - protein, 9 aa, Homo sapiens
  misc_feature: Table A; Target 31383; HLA-A*33:03; INSL6; ENSG00000120210; CTA
GYSPLGKTR

SEQ ID NO: 31384 - protein, 11 aa, Homo sapiens
  misc_feature: Table A; Target 31384; HLA-A*24:02; INSL6; ENSG00000120210; CTA
GYSPLGKTREF

SEQ ID NO: 31385 - protein, 10 aa, Homo sapiens
  misc_feature: Table A; Target 31385; HLA-B*54:01; INSL6; ENSG00000120210; CTA
IAQASEKVEA

SEQ ID NO: 31386 - protein, 11 aa, Homo sapiens
  misc_feature: Table A; Target 31386; HLA-A*26:01; INSL6; ENSG00000120210; CTA
IAQASEKVEAY

SEQ ID NO: 31387 - protein, 11 aa, Homo sapiens
  misc_feature: Table A; Target 31387; HLA-A*30:02; INSL6; ENSG00000120210; CTA
IAQASEKVEAY

SEQ ID NO: 31388 - protein, 11 aa, Homo sapiens
  misc_feature: Table A; Target 31388; HLA-B*15:01; INSL6; ENSG00000120210; CTA
IAQASEKVEAY

SEQ ID NO: 31389 - protein, 11 aa, Homo sapiens
  misc_feature: Table A; Target 31389; HLA-B*35:01; INSL6; ENSG00000120210; CTA
IAQASEKVEAY

SEQ ID NO: 31390 - protein, 11 aa, Homo sapiens
  misc_feature: Table A; Target 31390; HLA-B*46:01; INSL6; ENSG00000120210; CTA
IAQASEKVEAY

SEQ ID NO: 31391 - protein, 11 aa, Homo sapiens
  misc_feature: Table A; Target 31391; HLA-C*02:02; INSL6; ENSG00000120210; CTA
IAQASEKVEAY

SEQ ID NO: 31392 - protein, 11 aa, Homo sapiens
  misc_feature: Table A; Target 31392; HLA-C*16:02; INSL6; ENSG00000120210; CTA
IAQASEKVEAY

SEQ ID NO: 31393 - protein, 11 aa, Homo sapiens
  misc_feature: Table A; Target 31393; HLA-C*16:04; INSL6; ENSG00000120210; CTA
IAQASEKVEAY

SEQ ID NO: 31394 - protein, 9 aa, Homo sapiens
  misc_feature: Table A; Target 31394; HLA-B*40:01; INSL6; ENSG00000120210; CTA
KEELSIACL

SEQ ID NO: 31395 - protein, 8 aa, Homo sapiens
  misc_feature: Table A; Target 31395; HLA-A*03:01; INSL6; ENSG00000120210; CTA
KGYSPLGK

SEQ ID NO: 31396 - protein, 8 aa, Homo sapiens
  misc_feature: Table A; Target 31396; HLA-A*03:02; INSL6; ENSG00000120210; CTA
KGYSPLGK

SEQ ID NO: 31397 - protein, 10 aa, Homo sapiens
  misc_feature: Table A; Target 31397; HLA-A*31:01; INSL6; ENSG00000120210; CTA
KGYSPLGKTR

SEQ ID NO: 31398 - protein, 10 aa, Homo sapiens
  misc_feature: Table A; Target 31398; HLA-B*57:01; INSL6; ENSG00000120210; CTA
KGYSPLGKTR

SEQ ID NO: 31399 - protein, 10 aa, Homo sapiens
  misc_feature: Table A; Target 31399; HLA-B*57:01; INSL6; ENSG00000120210; CTA
KIKTLSNLFW

SEQ ID NO: 31400 - protein, 9 aa, Homo sapiens
  misc_feature: Table A; Target 31400; HLA-C*06:02; INSL6; ENSG00000120210; CTA
KRSSLVTKI

SEQ ID NO: 31401 - protein, 8 aa, Homo sapiens
  misc_feature: Table A; Target 31401; HLA-B*57:01; INSL6; ENSG00000120210; CTA
KTLSNLFW

SEQ ID NO: 31402 - protein, 9 aa, Homo sapiens
  misc_feature: Table A; Target 31402; HLA-A*02:01; INSL6; ENSG00000120210; CTA
LLWLGLLLV

SEQ ID NO: 31403 - protein, 9 aa, Homo sapiens
  misc_feature: Table A; Target 31403; HLA-A*02:04; INSL6; ENSG00000120210; CTA
LLWLGLLLV

SEQ ID NO: 31404 - protein, 9 aa, Homo sapiens
  misc_feature: Table A; Target 31404; HLA-A*02:07; INSL6; ENSG00000120210; CTA
LLWLGLLLV

SEQ ID NO: 31405 - protein, 9 aa, Homo sapiens
  misc_feature: Table A; Target 31405; HLA-B*51:01; INSL6; ENSG00000120210; CTA
LPYIDFKRL

SEQ ID NO: 31406 - protein, 9 aa, Homo sapiens
  misc_feature: Table A; Target 31406; HLA-A*01:01; INSL6; ENSG00000120210; CTA
LSDISSARK

SEQ ID NO: 31407 - protein, 10 aa, Homo sapiens
  misc_feature: Table A; Target 31407; HLA-C*07:02; INSL6; ENSG00000120210; CTA
LSDISSARKL

SEQ ID NO: 31408 - protein, 8 aa, Homo sapiens
  misc_feature: Table A; Target 31408; HLA-B*08:01; INSL6; ENSG00000120210; CTA
LVKEIEKL

SEQ ID NO: 31409 - protein, 9 aa, Homo sapiens
  misc_feature: Table A; Target 31409; HLA-B*07:02; INSL6; ENSG00000120210; CTA
MPRLLRLSL

SEQ ID NO: 31410 - protein, 9 aa, Homo sapiens
  misc_feature: Table A; Target 31410; HLA-A*03:01; INSL6; ENSG00000120210; CTA
NVYIHENAK

SEQ ID NO: 31411 - protein, 9 aa, Homo sapiens
  misc_feature: Table A; Target 31411; HLA-A*03:02; INSL6; ENSG00000120210; CTA
NVYIHENAK

SEQ ID NO: 31412 - protein, 9 aa, Homo sapiens
  misc_feature: Table A; Target 31412; HLA-A*11:01; INSL6; ENSG00000120210; CTA
NVYIHENAK

SEQ ID NO: 31413 - protein, 10 aa, Homo sapiens
  misc_feature: Table A; Target 31413; HLA-A*25:01; INSL6; ENSG00000120210; CTA
NVYIHENAKF

SEQ ID NO: 31414 - protein, 9 aa, Homo sapiens
  misc_feature: Table A; Target 31414; HLA-A*01:01; INSL6; ENSG00000120210; CTA
QASEKVEAY

SEQ ID NO: 31415 - protein, 9 aa, Homo sapiens
  misc_feature: Table A; Target 31415; HLA-A*25:01; INSL6; ENSG00000120210; CTA
QASEKVEAY

SEQ ID NO: 31416 - protein, 9 aa, Homo sapiens
  misc_feature: Table A; Target 31416; HLA-A*26:01; INSL6; ENSG00000120210; CTA
QASEKVEAY

SEQ ID NO: 31417 - protein, 9 aa, Homo sapiens
  misc_feature: Table A; Target 31417; HLA-A*29:02; INSL6; ENSG00000120210; CTA
QASEKVEAY

SEQ ID NO: 31418 - protein, 9 aa, Homo sapiens
  misc_feature: Table A; Target 31418; HLA-A*30:02; INSL6; ENSG00000120210; CTA
QASEKVEAY

SEQ ID NO: 31419 - protein, 9 aa, Homo sapiens
  misc_feature: Table A; Target 31419; HLA-A*32:01; INSL6; ENSG00000120210; CTA
QASEKVEAY

SEQ ID NO: 31420 - protein, 9 aa, Homo sapiens
  misc_feature: Table A; Target 31420; HLA-B*15:01; INSL6; ENSG00000120210; CTA
QASEKVEAY

SEQ ID NO: 31421 - protein, 9 aa, Homo sapiens
  misc_feature: Table A; Target 31421; HLA-B*15:03; INSL6; ENSG00000120210; CTA
QASEKVEAY

SEQ ID NO: 31422 - protein, 9 aa, Homo sapiens
  misc_feature: Table A; Target 31422; HLA-B*18:01; INSL6; ENSG00000120210; CTA
QASEKVEAY

SEQ ID NO: 31423 - protein, 9 aa, Homo sapiens
  misc_feature: Table A; Target 31423; HLA-B*39:01; INSL6; ENSG00000120210; CTA
QASEKVEAY

SEQ ID NO: 31424 - protein, 9 aa, Homo sapiens
  misc_feature: Table A; Target 31424; HLA-B*44:02; INSL6; ENSG00000120210; CTA
QASEKVEAY

SEQ ID NO: 31425 - protein, 9 aa, Homo sapiens
  misc_feature: Table A; Target 31425; HLA-B*44:03; INSL6; ENSG00000120210; CTA
QASEKVEAY

SEQ ID NO: 31426 - protein, 9 aa, Homo sapiens
  misc_feature: Table A; Target 31426; HLA-B*46:01; INSL6; ENSG00000120210; CTA
QASEKVEAY

SEQ ID NO: 31427 - protein, 9 aa, Homo sapiens
  misc_feature: Table A; Target 31427; HLA-B*55:01; INSL6; ENSG00000120210; CTA
QASEKVEAY

SEQ ID NO: 31428 - protein, 9 aa, Homo sapiens
  misc_feature: Table A; Target 31428; HLA-B*58:01; INSL6; ENSG00000120210; CTA
QASEKVEAY

SEQ ID NO: 31429 - protein, 9 aa, Homo sapiens
  misc_feature: Table A; Target 31429; HLA-C*01:02; INSL6; ENSG00000120210; CTA
QASEKVEAY

SEQ ID NO: 31430 - protein, 9 aa, Homo sapiens
  misc_feature: Table A; Target 31430; HLA-C*02:02; INSL6; ENSG00000120210; CTA
QASEKVEAY

SEQ ID NO: 31431 - protein, 9 aa, Homo sapiens
  misc_feature: Table A; Target 31431; HLA-C*03:03; INSL6; ENSG00000120210; CTA
QASEKVEAY

SEQ ID NO: 31432 - protein, 9 aa, Homo sapiens
  misc_feature: Table A; Target 31432; HLA-C*07:04; INSL6; ENSG00000120210; CTA
QASEKVEAY

SEQ ID NO: 31433 - protein, 9 aa, Homo sapiens
  misc_feature: Table A; Target 31433; HLA-C*07:06; INSL6; ENSG00000120210; CTA
QASEKVEAY

SEQ ID NO: 31434 - protein, 9 aa, Homo sapiens
  misc_feature: Table A; Target 31434; HLA-C*12:03; INSL6; ENSG00000120210; CTA
QASEKVEAY

SEQ ID NO: 31435 - protein, 9 aa, Homo sapiens
  misc_feature: Table A; Target 31435; HLA-C*14:02; INSL6; ENSG00000120210; CTA
QASEKVEAY

SEQ ID NO: 31436 - protein, 9 aa, Homo sapiens
  misc_feature: Table A; Target 31436; HLA-C*16:01; INSL6; ENSG00000120210; CTA
QASEKVEAY

SEQ ID NO: 31437 - protein, 9 aa, Homo sapiens
  misc_feature: Table A; Target 31437; HLA-C*16:02; INSL6; ENSG00000120210; CTA
QASEKVEAY

SEQ ID NO: 31438 - protein, 9 aa, Homo sapiens
  misc_feature: Table A; Target 31438; HLA-C*16:04; INSL6; ENSG00000120210; CTA
QASEKVEAY

SEQ ID NO: 31439 - protein, 9 aa, Homo sapiens
  misc_feature: Table A; Target 31439; HLA-A*31:01; INSL6; ENSG00000120210; CTA
QTASPARGR

SEQ ID NO: 31440 - protein, 9 aa, Homo sapiens
  misc_feature: Table A; Target 31440; HLA-A*33:03; INSL6; ENSG00000120210; CTA
QTASPARGR

SEQ ID NO: 31441 - protein, 9 aa, Homo sapiens
  misc_feature: Table A; Target 31441; HLA-A*68:01; INSL6; ENSG00000120210; CTA
QTASPARGR

SEQ ID NO: 31442 - protein, 9 aa, Homo sapiens
  misc_feature: Table A; Target 31442; HLA-C*07:06; INSL6; ENSG00000120210; CTA
QTASPARGR

SEQ ID NO: 31443 - protein, 9 aa, Homo sapiens
  misc_feature: Table A; Target 31443; HLA-B*37:01; INSL6; ENSG00000120210; CTA
REFSSSHNI

SEQ ID NO: 31444 - protein, 9 aa, Homo sapiens
  misc_feature: Table A; Target 31444; HLA-B*40:01; INSL6; ENSG00000120210; CTA
REFSSSHNI

SEQ ID NO: 31445 - protein, 9 aa, Homo sapiens
  misc_feature: Table A; Target 31445; HLA-B*44:02; INSL6; ENSG00000120210; CTA
REFSSSHNI

SEQ ID NO: 31446 - protein, 9 aa, Homo sapiens
  misc_feature: Table A; Target 31446; HLA-B*44:03; INSL6; ENSG00000120210; CTA
REFSSSHNI

SEQ ID NO: 31447 - protein, 9 aa, Homo sapiens
  misc_feature: Table A; Target 31447; HLA-B*49:01; INSL6; ENSG00000120210; CTA
REFSSSHNI

SEQ ID NO: 31448 - protein, 9 aa, Homo sapiens
  misc_feature: Table A; Target 31448; HLA-A*30:01; INSL6; ENSG00000120210; CTA
RELSDISSA

SEQ ID NO: 31449 - protein, 9 aa, Homo sapiens
  misc_feature: Table A; Target 31449; HLA-B*40:01; INSL6; ENSG00000120210; CTA
RELSDISSA

SEQ ID NO: 31450 - protein, 9 aa, Homo sapiens
  misc_feature: Table A; Target 31450; HLA-B*40:02; INSL6; ENSG00000120210; CTA
RELSDISSA

SEQ ID NO: 31451 - protein, 9 aa, Homo sapiens
  misc_feature: Table A; Target 31451; HLA-B*49:01; INSL6; ENSG00000120210; CTA
RELSDISSA

SEQ ID NO: 31452 - protein, 10 aa, Homo sapiens
  misc_feature: Table A; Target 31452; HLA-B*40:01; INSL6; ENSG00000120210; CTA
RELSDISSAR

SEQ ID NO: 31453 - protein, 10 aa, Homo sapiens
  misc_feature: Table A; Target 31453; HLA-A*25:01; INSL6; ENSG00000120210; CTA
RGTNPVSTSW

SEQ ID NO: 31454 - protein, 10 aa, Homo sapiens
  misc_feature: Table A; Target 31454; HLA-A*32:01; INSL6; ENSG00000120210; CTA
RGTNPVSTSW

SEQ ID NO: 31455 - protein, 10 aa, Homo sapiens
  misc_feature: Table A; Target 31455; HLA-B*57:01; INSL6; ENSG00000120210; CTA
RGTNPVSTSW

SEQ ID NO: 31456 - protein, 10 aa, Homo sapiens
  misc_feature: Table A; Target 31456; HLA-B*58:01; INSL6; ENSG00000120210; CTA
RGTNPVSTSW

SEQ ID NO: 31457 - protein, 10 aa, Homo sapiens
  misc_feature: Table A; Target 31457; HLA-C*16:04; INSL6; ENSG00000120210; CTA
RGTNPVSTSW

SEQ ID NO: 31458 - protein, 9 aa, Homo sapiens
  misc_feature: Table A; Target 31458; HLA-A*03:01; INSL6; ENSG00000120210; CTA
RLIAQASEK

SEQ ID NO: 31459 - protein, 9 aa, Homo sapiens
  misc_feature: Table A; Target 31459; HLA-A*03:02; INSL6; ENSG00000120210; CTA
RLIAQASEK

SEQ ID NO: 31460 - protein, 10 aa, Homo sapiens
  misc_feature: Table A; Target 31460; HLA-A*02:03; INSL6; ENSG00000120210; CTA
RLIAQASEKV

SEQ ID NO: 31461 - protein, 9 aa, Homo sapiens
  misc_feature: Table A; Target 31461; HLA-B*08:01; INSL6; ENSG00000120210; CTA
RLKEKRSSL

SEQ ID NO: 31462 - protein, 9 aa, Homo sapiens
  misc_feature: Table A; Target 31462; HLA-B*57:01; INSL6; ENSG00000120210; CTA
RLLRLSLLW

SEQ ID NO: 31463 - protein, 8 aa, Homo sapiens
  misc_feature: Table A; Target 31463; HLA-B*37:01; INSL6; ENSG00000120210; CTA
RSSLVTKI

SEQ ID NO: 31464 - protein, 9 aa, Homo sapiens
  misc_feature: Table A; Target 31464; HLA-A*01:01; INSL6; ENSG00000120210; CTA
RSSLVTKIY

SEQ ID NO: 31465 - protein, 9 aa, Homo sapiens
  misc_feature: Table A; Target 31465; HLA-A*03:01; INSL6; ENSG00000120210; CTA
RSSLVTKIY

SEQ ID NO: 31466 - protein, 9 aa, Homo sapiens
  misc_feature: Table A; Target 31466; HLA-A*29:02; INSL6; ENSG00000120210; CTA
RSSLVTKIY

SEQ ID NO: 31467 - protein, 9 aa, Homo sapiens
  misc_feature: Table A; Target 31467; HLA-A*30:02; INSL6; ENSG00000120210; CTA
RSSLVTKIY

SEQ ID NO: 31468 - protein, 9 aa, Homo sapiens
  misc_feature: Table A; Target 31468; HLA-A*32:01; INSL6; ENSG00000120210; CTA
RSSLVTKIY

SEQ ID NO: 31469 - protein, 9 aa, Homo sapiens
  misc_feature: Table A; Target 31469; HLA-B*07:02; INSL6; ENSG00000120210; CTA
RSSLVTKIY

SEQ ID NO: 31470 - protein, 9 aa, Homo sapiens
  misc_feature: Table A; Target 31470; HLA-B*15:01; INSL6; ENSG00000120210; CTA
RSSLVTKIY

SEQ ID NO: 31471 - protein, 9 aa, Homo sapiens
  misc_feature: Table A; Target 31471; HLA-B*15:03; INSL6; ENSG00000120210; CTA
RSSLVTKIY

SEQ ID NO: 31472 - protein, 9 aa, Homo sapiens
  misc_feature: Table A; Target 31472; HLA-B*44:02; INSL6; ENSG00000120210; CTA
RSSLVTKIY

SEQ ID NO: 31473 - protein, 9 aa, Homo sapiens
  misc_feature: Table A; Target 31473; HLA-B*44:03; INSL6; ENSG00000120210; CTA
RSSLVTKIY

SEQ ID NO: 31474 - protein, 9 aa, Homo sapiens
  misc_feature: Table A; Target 31474; HLA-B*57:01; INSL6; ENSG00000120210; CTA
RSSLVTKIY

SEQ ID NO: 31475 - protein, 9 aa, Homo sapiens
  misc_feature: Table A; Target 31475; HLA-B*58:01; INSL6; ENSG00000120210; CTA
RSSLVTKIY

SEQ ID NO: 31476 - protein, 9 aa, Homo sapiens
  misc_feature: Table A; Target 31476; HLA-C*02:02; INSL6; ENSG00000120210; CTA
RSSLVTKIY

SEQ ID NO: 31477 - protein, 9 aa, Homo sapiens
  misc_feature: Table A; Target 31477; HLA-C*04:01; INSL6; ENSG00000120210; CTA
RSSLVTKIY

SEQ ID NO: 31478 - protein, 9 aa, Homo sapiens
  misc_feature: Table A; Target 31478; HLA-C*06:02; INSL6; ENSG00000120210; CTA
RSSLVTKIY

SEQ ID NO: 31479 - protein, 9 aa, Homo sapiens
  misc_feature: Table A; Target 31479; HLA-C*07:01; INSL6; ENSG00000120210; CTA
RSSLVTKIY

SEQ ID NO: 31480 - protein, 9 aa, Homo sapiens
  misc_feature: Table A; Target 31480; HLA-C*12:03; INSL6; ENSG00000120210; CTA
RSSLVTKIY

SEQ ID NO: 31481 - protein, 9 aa, Homo sapiens
  misc_feature: Table A; Target 31481; HLA-C*16:01; INSL6; ENSG00000120210; CTA
RSSLVTKIY

SEQ ID NO: 31482 - protein, 9 aa, Homo sapiens
  misc_feature: Table A; Target 31482; HLA-C*16:02; INSL6; ENSG00000120210; CTA
RSSLVTKIY

SEQ ID NO: 31483 - protein, 9 aa, Homo sapiens
  misc_feature: Table A; Target 31483; HLA-C*16:04; INSL6; ENSG00000120210; CTA
RSSLVTKIY

SEQ ID NO: 31484 - protein, 10 aa, Homo sapiens
  misc_feature: Table A; Target 31484; HLA-A*24:02; INSL6; ENSG00000120210; CTA
RYLVKEIEKL

SEQ ID NO: 31485 - protein, 9 aa, Homo sapiens
  misc_feature: Table A; Target 31485; HLA-A*30:01; INSL6; ENSG00000120210; CTA
SDISSARKL

SEQ ID NO: 31486 - protein, 9 aa, Homo sapiens
  misc_feature: Table A; Target 31486; HLA-B*37:01; INSL6; ENSG00000120210; CTA
SDISSARKL

SEQ ID NO: 31487 - protein, 9 aa, Homo sapiens
  misc_feature: Table A; Target 31487; HLA-B*44:02; INSL6; ENSG00000120210; CTA
SDISSARKL

SEQ ID NO: 31488 - protein, 9 aa, Homo sapiens
  misc_feature: Table A; Target 31488; HLA-B*44:03; INSL6; ENSG00000120210; CTA
SDISSARKL

SEQ ID NO: 31489 - protein, 9 aa, Homo sapiens
  misc_feature: Table A; Target 31489; HLA-C*06:02; INSL6; ENSG00000120210; CTA
SDISSARKL

SEQ ID NO: 31490 - protein, 9 aa, Homo sapiens
  misc_feature: Table A; Target 31490; HLA-C*12:03; INSL6; ENSG00000120210; CTA
SDISSARKL

SEQ ID NO: 31491 - protein, 9 aa, Homo sapiens
  misc_feature: Table A; Target 31491; HLA-C*16:01; INSL6; ENSG00000120210; CTA
SDISSARKL

SEQ ID NO: 31492 - protein, 9 aa, Homo sapiens
  misc_feature: Table A; Target 31492; HLA-C*16:02; INSL6; ENSG00000120210; CTA
SDISSARKL

SEQ ID NO: 31493 - protein, 9 aa, Homo sapiens
  misc_feature: Table A; Target 31493; HLA-B*40:02; INSL6; ENSG00000120210; CTA
SEKVEAYSP

SEQ ID NO: 31494 - protein, 10 aa, Homo sapiens
  misc_feature: Table A; Target 31494; HLA-A*30:02; INSL6; ENSG00000120210; CTA
SEKVEAYSPY

SEQ ID NO: 31495 - protein, 10 aa, Homo sapiens
  misc_feature: Table A; Target 31495; HLA-B*44:02; INSL6; ENSG00000120210; CTA
SEKVEAYSPY

SEQ ID NO: 31496 - protein, 10 aa, Homo sapiens
  misc_feature: Table A; Target 31496; HLA-B*44:03; INSL6; ENSG00000120210; CTA
SEKVEAYSPY

SEQ ID NO: 31497 - protein, 8 aa, Homo sapiens
  misc_feature: Table A; Target 31497; HLA-B*38:01; INSL6; ENSG00000120210; CTA
SHNINVYI

SEQ ID NO: 31498 - protein, 9 aa, Homo sapiens
  misc_feature: Table A; Target 31498; HLA-A*02:01; INSL6; ENSG00000120210; CTA
SLLWLGLLL

SEQ ID NO: 31499 - protein, 9 aa, Homo sapiens
  misc_feature: Table A; Target 31499; HLA-A*02:04; INSL6; ENSG00000120210; CTA
SLLWLGLLL

SEQ ID NO: 31500 - protein, 10 aa, Homo sapiens
  misc_feature: Table A; Target 31500; HLA-A*02:01; INSL6; ENSG00000120210; CTA
SLLWLGLLLV

SEQ ID NO: 31501 - protein, 10 aa, Homo sapiens
  misc_feature: Table A; Target 31501; HLA-A*02:04; INSL6; ENSG00000120210; CTA
SLLWLGLLLV

SEQ ID NO: 31502 - protein, 11 aa, Homo sapiens
  misc_feature: Table A; Target 31502; HLA-B*07:02; INSL6; ENSG00000120210; CTA
SPARGRGTNPV

SEQ ID NO: 31503 - protein, 9 aa, Homo sapiens
  misc_feature: Table A; Target 31503; HLA-B*07:02; INSL6; ENSG00000120210; CTA
SPLGKTREF

SEQ ID NO: 31504 - protein, 9 aa, Homo sapiens
  misc_feature: Table A; Target 31504; HLA-B*08:01; INSL6; ENSG00000120210; CTA
SPLGKTREF

SEQ ID NO: 31505 - protein, 9 aa, Homo sapiens
  misc_feature: Table A; Target 31505; HLA-B*35:01; INSL6; ENSG00000120210; CTA
SPLGKTREF

SEQ ID NO: 31506 - protein, 9 aa, Homo sapiens
  misc_feature: Table A; Target 31506; HLA-C*07:02; INSL6; ENSG00000120210; CTA
SPLGKTREF

SEQ ID NO: 31507 - protein, 9 aa, Homo sapiens
  misc_feature: Table A; Target 31507; HLA-C*16:01; INSL6; ENSG00000120210; CTA
SPLGKTREF

SEQ ID NO: 31508 - protein, 9 aa, Homo sapiens
  misc_feature: Table A; Target 31508; HLA-C*07:06; INSL6; ENSG00000120210; CTA
SPQTASPAR

SEQ ID NO: 31509 - protein, 8 aa, Homo sapiens
  misc_feature: Table A; Target 31509; HLA-B*56:01; INSL6; ENSG00000120210; CTA
SPYQFESP

SEQ ID NO: 31510 - protein, 10 aa, Homo sapiens
  misc_feature: Table A; Target 31510; HLA-B*51:01; INSL6; ENSG00000120210; CTA
SPYQFESPQT

SEQ ID NO: 31511 - protein, 10 aa, Homo sapiens
  misc_feature: Table A; Target 31511; HLA-B*56:01; INSL6; ENSG00000120210; CTA
SPYQFESPQT

SEQ ID NO: 31512 - protein, 11 aa, Homo sapiens
  misc_feature: Table A; Target 31512; HLA-B*54:01; INSL6; ENSG00000120210; CTA
SPYQFESPQTA

SEQ ID NO: 31513 - protein, 11 aa, Homo sapiens
  misc_feature: Table A; Target 31513; HLA-B*55:01; INSL6; ENSG00000120210; CTA
SPYQFESPQTA

SEQ ID NO: 31514 - protein, 11 aa, Homo sapiens
  misc_feature: Table A; Target 31514; HLA-B*56:01; INSL6; ENSG00000120210; CTA
SPYQFESPQTA

SEQ ID NO: 31515 - protein, 8 aa, Homo sapiens
  misc_feature: Table A; Target 31515; HLA-A*30:02; INSL6; ENSG00000120210; CTA
SSHNINVY

SEQ ID NO: 31516 - protein, 8 aa, Homo sapiens
  misc_feature: Table A; Target 31516; HLA-B*15:01; INSL6; ENSG00000120210; CTA
SSHNINVY

SEQ ID NO: 31517 - protein, 8 aa, Homo sapiens
  misc_feature: Table A; Target 31517; HLA-B*46:01; INSL6; ENSG00000120210; CTA
SSHNINVY

SEQ ID NO: 31518 - protein, 8 aa, Homo sapiens
  misc_feature: Table A; Target 31518; HLA-C*16:01; INSL6; ENSG00000120210; CTA
SSHNINVY

SEQ ID NO: 31519 - protein, 9 aa, Homo sapiens
  misc_feature: Table A; Target 31519; HLA-A*68:02; INSL6; ENSG00000120210; CTA
SSHNINVYI

SEQ ID NO: 31520 - protein, 9 aa, Homo sapiens
  misc_feature: Table A; Target 31520; HLA-B*13:02; INSL6; ENSG00000120210; CTA
SSHNINVYI

SEQ ID NO: 31521 - protein, 8 aa, Homo sapiens
  misc_feature: Table A; Target 31521; HLA-B*15:01; INSL6; ENSG00000120210; CTA
SSLVTKIY

SEQ ID NO: 31522 - protein, 8 aa, Homo sapiens
  misc_feature: Table A; Target 31522; HLA-B*15:03; INSL6; ENSG00000120210; CTA
SSLVTKIY

SEQ ID NO: 31523 - protein, 8 aa, Homo sapiens
  misc_feature: Table A; Target 31523; HLA-B*46:01; INSL6; ENSG00000120210; CTA
SSLVTKIY

SEQ ID NO: 31524 - protein, 8 aa, Homo sapiens
  misc_feature: Table A; Target 31524; HLA-C*07:01; INSL6; ENSG00000120210; CTA
SSLVTKIY

SEQ ID NO: 31525 - protein, 8 aa, Homo sapiens
  misc_feature: Table A; Target 31525; HLA-C*12:03; INSL6; ENSG00000120210; CTA
SSLVTKIY

SEQ ID NO: 31526 - protein, 8 aa, Homo sapiens
  misc_feature: Table A; Target 31526; HLA-C*16:01; INSL6; ENSG00000120210; CTA
SSLVTKIY

SEQ ID NO: 31527 - protein, 9 aa, Homo sapiens
  misc_feature: Table A; Target 31527; HLA-A*01:01; INSL6; ENSG00000120210; CTA
SSSHNINVY

SEQ ID NO: 31528 - protein, 9 aa, Homo sapiens
  misc_feature: Table A; Target 31528; HLA-A*26:01; INSL6; ENSG00000120210; CTA
SSSHNINVY

SEQ ID NO: 31529 - protein, 9 aa, Homo sapiens
  misc_feature: Table A; Target 31529; HLA-A*30:02; INSL6; ENSG00000120210; CTA
SSSHNINVY

SEQ ID NO: 31530 - protein, 9 aa, Homo sapiens
  misc_feature: Table A; Target 31530; HLA-A*32:01; INSL6; ENSG00000120210; CTA
SSSHNINVY

SEQ ID NO: 31531 - protein, 9 aa, Homo sapiens
  misc_feature: Table A; Target 31531; HLA-B*15:01; INSL6; ENSG00000120210; CTA
SSSHNINVY

SEQ ID NO: 31532 - protein, 9 aa, Homo sapiens
  misc_feature: Table A; Target 31532; HLA-B*46:01; INSL6; ENSG00000120210; CTA
SSSHNINVY

SEQ ID NO: 31533 - protein, 9 aa, Homo sapiens
  misc_feature: Table A; Target 31533; HLA-B*58:01; INSL6; ENSG00000120210; CTA
SSSHNINVY

SEQ ID NO: 31534 - protein, 9 aa, Homo sapiens
  misc_feature: Table A; Target 31534; HLA-C*02:02; INSL6; ENSG00000120210; CTA
SSSHNINVY

SEQ ID NO: 31535 - protein, 9 aa, Homo sapiens
  misc_feature: Table A; Target 31535; HLA-C*07:04; INSL6; ENSG00000120210; CTA
SSSHNINVY

SEQ ID NO: 31536 - protein, 9 aa, Homo sapiens
  misc_feature: Table A; Target 31536; HLA-C*12:03; INSL6; ENSG00000120210; CTA
SSSHNINVY

SEQ ID NO: 31537 - protein, 9 aa, Homo sapiens
  misc_feature: Table A; Target 31537; HLA-C*16:01; INSL6; ENSG00000120210; CTA
SSSHNINVY

SEQ ID NO: 31538 - protein, 9 aa, Homo sapiens
  misc_feature: Table A; Target 31538; HLA-C*16:02; INSL6; ENSG00000120210; CTA
SSSHNINVY

SEQ ID NO: 31539 - protein, 10 aa, Homo sapiens
  misc_feature: Table A; Target 31539; HLA-A*68:02; INSL6; ENSG00000120210; CTA
SSSHNINVYI

SEQ ID NO: 31540 - protein, 11 aa, Homo sapiens
  misc_feature: Table A; Target 31540; HLA-A*25:01; INSL6; ENSG00000120210; CTA
STSWEEAVNSW

SEQ ID NO: 31541 - protein, 8 aa, Homo sapiens
  misc_feature: Table A; Target 31541; HLA-B*54:01; INSL6; ENSG00000120210; CTA
TPFSRLIA

SEQ ID NO: 31542 - protein, 8 aa, Homo sapiens
  misc_feature: Table A; Target 31542; HLA-B*56:01; INSL6; ENSG00000120210; CTA
TPFSRLIA

SEQ ID NO: 31543 - protein, 9 aa, Homo sapiens
  misc_feature: Table A; Target 31543; HLA-B*54:01; INSL6; ENSG00000120210; CTA
TPFSRLIAQ

SEQ ID NO: 31544 - protein, 9 aa, Homo sapiens
  misc_feature: Table A; Target 31544; HLA-B*56:01; INSL6; ENSG00000120210; CTA
TPFSRLIAQ

SEQ ID NO: 31545 - protein, 10 aa, Homo sapiens
  misc_feature: Table A; Target 31545; HLA-B*54:01; INSL6; ENSG00000120210; CTA
TPFSRLIAQA

SEQ ID NO: 31546 - protein, 10 aa, Homo sapiens
  misc_feature: Table A; Target 31546; HLA-B*56:01; INSL6; ENSG00000120210; CTA
TPFSRLIAQA

SEQ ID NO: 31547 - protein, 10 aa, Homo sapiens
  misc_feature: Table A; Target 31547; HLA-A*25:01; INSL6; ENSG00000120210; CTA
TSWEEAVNSW

SEQ ID NO: 31548 - protein, 10 aa, Homo sapiens
  misc_feature: Table A; Target 31548; HLA-B*57:01; INSL6; ENSG00000120210; CTA
TSWEEAVNSW

SEQ ID NO: 31549 - protein, 10 aa, Homo sapiens
  misc_feature: Table A; Target 31549; HLA-B*58:01; INSL6; ENSG00000120210; CTA
TSWEEAVNSW

SEQ ID NO: 31550 - protein, 10 aa, Homo sapiens
  misc_feature: Table A; Target 31550; HLA-C*07:06; INSL6; ENSG00000120210; CTA
TSWEEAVNSW

SEQ ID NO: 31551 - protein, 9 aa, Homo sapiens
  misc_feature: Table A; Target 31551; HLA-A*23:01; INSL6; ENSG00000120210; CTA
VEAYSPYQF

SEQ ID NO: 31552 - protein, 9 aa, Homo sapiens
  misc_feature: Table A; Target 31552; HLA-A*24:02; INSL6; ENSG00000120210; CTA
VEAYSPYQF

SEQ ID NO: 31553 - protein, 9 aa, Homo sapiens
  misc_feature: Table A; Target 31553; HLA-A*30:01; INSL6; ENSG00000120210; CTA
VEAYSPYQF

SEQ ID NO: 31554 - protein, 9 aa, Homo sapiens
  misc_feature: Table A; Target 31554; HLA-B*18:01; INSL6; ENSG00000120210; CTA
VEAYSPYQF

SEQ ID NO: 31555 - protein, 9 aa, Homo sapiens
  misc_feature: Table A; Target 31555; HLA-B*27:02; INSL6; ENSG00000120210; CTA
VEAYSPYQF

SEQ ID NO: 31556 - protein, 9 aa, Homo sapiens
  misc_feature: Table A; Target 31556; HLA-B*37:01; INSL6; ENSG00000120210; CTA
VEAYSPYQF

SEQ ID NO: 31557 - protein, 9 aa, Homo sapiens
  misc_feature: Table A; Target 31557; HLA-B*40:01; INSL6; ENSG00000120210; CTA
VEAYSPYQF

SEQ ID NO: 31558 - protein, 9 aa, Homo sapiens
  misc_feature: Table A; Target 31558; HLA-B*44:02; INSL6; ENSG00000120210; CTA
VEAYSPYQF

SEQ ID NO: 31559 - protein, 9 aa, Homo sapiens
  misc_feature: Table A; Target 31559; HLA-B*44:03; INSL6; ENSG00000120210; CTA
VEAYSPYQF

SEQ ID NO: 31560 - protein, 9 aa, Homo sapiens
  misc_feature: Table A; Target 31560; HLA-A*23:01; INSL6; ENSG00000120210; CTA
VYIHENAKF

SEQ ID NO: 31561 - protein, 9 aa, Homo sapiens
  misc_feature: Table A; Target 31561; HLA-A*29:02; INSL6; ENSG00000120210; CTA
VYIHENAKF

SEQ ID NO: 31562 - protein, 9 aa, Homo sapiens
  misc_feature: Table A; Target 31562; HLA-B*58:01; INSL6; ENSG00000120210; CTA
VYIHENAKF

SEQ ID NO: 31563 - protein, 9 aa, Homo sapiens
  misc_feature: Table A; Target 31563; HLA-C*14:02; INSL6; ENSG00000120210; CTA
VYIHENAKF

SEQ ID NO: 31564 - protein, 9 aa, Homo sapiens
  misc_feature: Table A; Target 31564; HLA-B*15:03; INSL6; ENSG00000120210; CTA
WEMQSLPEY

SEQ ID NO: 31565 - protein, 9 aa, Homo sapiens
  misc_feature: Table A; Target 31565; HLA-B*18:01; INSL6; ENSG00000120210; CTA
WEMQSLPEY

SEQ ID NO: 31566 - protein, 9 aa, Homo sapiens
  misc_feature: Table A; Target 31566; HLA-B*44:02; INSL6; ENSG00000120210; CTA
WEMQSLPEY

SEQ ID NO: 31567 - protein, 9 aa, Homo sapiens
  misc_feature: Table A; Target 31567; HLA-B*44:03; INSL6; ENSG00000120210; CTA
WEMQSLPEY

SEQ ID NO: 31568 - protein, 9 aa, Homo sapiens
  misc_feature: Table A; Target 31568; HLA-B*49:01; INSL6; ENSG00000120210; CTA
WEMQSLPEY

SEQ ID NO: 31569 - protein, 9 aa, Homo sapiens
  misc_feature: Table A; Target 31569; HLA-C*16:04; INSL6; ENSG00000120210; CTA
WEMQSLPEY

SEQ ID NO: 31570 - protein, 9 aa, Homo sapiens
  misc_feature: Table A; Target 31570; HLA-A*02:01; INSL6; ENSG00000120210; CTA
YLVKEIEKL

SEQ ID NO: 31571 - protein, 9 aa, Homo sapiens
  misc_feature: Table A; Target 31571; HLA-A*02:03; INSL6; ENSG00000120210; CTA
YLVKEIEKL

SEQ ID NO: 31572 - protein, 9 aa, Homo sapiens
  misc_feature: Table A; Target 31572; HLA-A*02:04; INSL6; ENSG00000120210; CTA
YLVKEIEKL

SEQ ID NO: 31573 - protein, 9 aa, Homo sapiens
  misc_feature: Table A; Target 31573; HLA-A*02:07; INSL6; ENSG00000120210; CTA
YLVKEIEKL

SEQ ID NO: 31574 - protein, 9 aa, Homo sapiens
  misc_feature: Table A; Target 31574; HLA-A*68:02; INSL6; ENSG00000120210; CTA
YLVKEIEKL

SEQ ID NO: 31575 - protein, 8 aa, Homo sapiens
  misc_feature: Table A; Target 31575; HLA-B*13:02; INSL6; ENSG00000120210; CTA
YQFESPQT

SEQ ID NO: 31576 - protein, 9 aa, Homo sapiens
  misc_feature: Table A; Target 31576; HLA-A*02:01; INSL6; ENSG00000120210; CTA
YQFESPQTA

SEQ ID NO: 31577 - protein, 9 aa, Homo sapiens
  misc_feature: Table A; Target 31577; HLA-A*02:03; INSL6; ENSG00000120210; CTA
YQFESPQTA

SEQ ID NO: 31578 - protein, 9 aa, Homo sapiens
  misc_feature: Table A; Target 31578; HLA-A*30:01; INSL6; ENSG00000120210; CTA
YQFESPQTA

SEQ ID NO: 31579 - protein, 9 aa, Homo sapiens
  misc_feature: Table A; Target 31579; HLA-A*32:01; INSL6; ENSG00000120210; CTA
YQFESPQTA

SEQ ID NO: 31580 - protein, 9 aa, Homo sapiens
  misc_feature: Table A; Target 31580; HLA-B*13:02; INSL6; ENSG00000120210; CTA
YQFESPQTA

SEQ ID NO: 31581 - protein, 9 aa, Homo sapiens
  misc_feature: Table A; Target 31581; HLA-B*15:01; INSL6; ENSG00000120210; CTA
YQFESPQTA

SEQ ID NO: 31582 - protein, 9 aa, Homo sapiens
  misc_feature: Table A; Target 31582; HLA-B*15:03; INSL6; ENSG00000120210; CTA
YQFESPQTA

SEQ ID NO: 31583 - protein, 9 aa, Homo sapiens
  misc_feature: Table A; Target 31583; HLA-B*27:05; INSL6; ENSG00000120210; CTA
YQFESPQTA

SEQ ID NO: 31584 - protein, 9 aa, Homo sapiens
  misc_feature: Table A; Target 31584; HLA-B*39:01; INSL6; ENSG00000120210; CTA
YQFESPQTA

SEQ ID NO: 31585 - protein, 9 aa, Homo sapiens
  misc_feature: Table A; Target 31585; HLA-C*02:02; INSL6; ENSG00000120210; CTA
YQFESPQTA

SEQ ID NO: 31586 - protein, 9 aa, Homo sapiens
  misc_feature: Table A; Target 31586; HLA-C*03:04; INSL6; ENSG00000120210; CTA
YQFESPQTA

SEQ ID NO: 31587 - protein, 9 aa, Homo sapiens
  misc_feature: Table A; Target 31587; HLA-C*12:03; INSL6; ENSG00000120210; CTA
YQFESPQTA

SEQ ID NO: 31588 - protein, 8 aa, Homo sapiens
  misc_feature: Table A; Target 31588; HLA-C*05:01; KCNU1; ENSG00000215262; CTA
AADDKIKF

SEQ ID NO: 31589 - protein, 9 aa, Homo sapiens
  misc_feature: Table A; Target 31589; HLA-B*44:02; KCNU1; ENSG00000215262; CTA
AADDKIKFW

SEQ ID NO: 31590 - protein, 9 aa, Homo sapiens
  misc_feature: Table A; Target 31590; HLA-B*57:01; KCNU1; ENSG00000215262; CTA
AADDKIKFW

SEQ ID NO: 31591 - protein, 8 aa, Homo sapiens
  misc_feature: Table A; Target 31591; HLA-B*46:01; KCNU1; ENSG00000215262; CTA
AAFILSSF

SEQ ID NO: 31592 - protein, 8 aa, Homo sapiens
  misc_feature: Table A; Target 31592; HLA-C*02:02; KCNU1; ENSG00000215262; CTA
AAFILSSF

SEQ ID NO: 31593 - protein, 8 aa, Homo sapiens
  misc_feature: Table A; Target 31593; HLA-C*12:03; KCNU1; ENSG00000215262; CTA
AAGFIHLV

SEQ ID NO: 31594 - protein, 9 aa, Homo sapiens
  misc_feature: Table A; Target 31594; HLA-B*46:01; KCNU1; ENSG00000215262; CTA
AANIEQCSM

SEQ ID NO: 31595 - protein, 9 aa, Homo sapiens
  misc_feature: Table A; Target 31595; HLA-B*58:01; KCNU1; ENSG00000215262; CTA
AANIEQCSM

SEQ ID NO: 31596 - protein, 9 aa, Homo sapiens
  misc_feature: Table A; Target 31596; HLA-C*01:02; KCNU1; ENSG00000215262; CTA
AANIEQCSM

SEQ ID NO: 31597 - protein, 9 aa, Homo sapiens
  misc_feature: Table A; Target 31597; HLA-C*03:03; KCNU1; ENSG00000215262; CTA
AANIEQCSM

SEQ ID NO: 31598 - protein, 9 aa, Homo sapiens
  misc_feature: Table A; Target 31598; HLA-C*03:04; KCNU1; ENSG00000215262; CTA
AANIEQCSM

SEQ ID NO: 31599 - protein, 9 aa, Homo sapiens
  misc_feature: Table A; Target 31599; HLA-C*16:01; KCNU1; ENSG00000215262; CTA
AANIEQCSM

SEQ ID NO: 31600 - protein, 9 aa, Homo sapiens
  misc_feature: Table A; Target 31600; HLA-C*16:02; KCNU1; ENSG00000215262; CTA
AANIEQCSM

SEQ ID NO: 31601 - protein, 9 aa, Homo sapiens
  misc_feature: Table A; Target 31601; HLA-C*16:04; KCNU1; ENSG00000215262; CTA
AANIEQCSM

SEQ ID NO: 31602 - protein, 10 aa, Homo sapiens
  misc_feature: Table A; Target 31602; HLA-B*44:02; KCNU1; ENSG00000215262; CTA
ADPVGSCSSY

SEQ ID NO: 31603 - protein, 10 aa, Homo sapiens
  misc_feature: Table A; Target 31603; HLA-C*04:01; KCNU1; ENSG00000215262; CTA
ADPVGSCSSY

SEQ ID NO: 31604 - protein, 10 aa, Homo sapiens
  misc_feature: Table A; Target 31604; HLA-C*07:01; KCNU1; ENSG00000215262; CTA
ADPVGSCSSY

SEQ ID NO: 31605 - protein, 10 aa, Homo sapiens
  misc_feature: Table A; Target 31605; HLA-C*07:02; KCNU1; ENSG00000215262; CTA
ADPVGSCSSY

SEQ ID NO: 31606 - protein, 8 aa, Homo sapiens
  misc_feature: Table A; Target 31606; HLA-B*37:01; KCNU1; ENSG00000215262; CTA
ADSCTSLL

SEQ ID NO: 31607 - protein, 8 aa, Homo sapiens
  misc_feature: Table A; Target 31607; HLA-B*18:01; KCNU1; ENSG00000215262; CTA
AEDISNIM

SEQ ID NO: 31608 - protein, 8 aa, Homo sapiens
  misc_feature: Table A; Target 31608; HLA-B*37:01; KCNU1; ENSG00000215262; CTA
AEDISNIM

SEQ ID NO: 31609 - protein, 8 aa, Homo sapiens
  misc_feature: Table A; Target 31609; HLA-B*40:01; KCNU1; ENSG00000215262; CTA
AEDISNIM

SEQ ID NO: 31610 - protein, 8 aa, Homo sapiens
  misc_feature: Table A; Target 31610; HLA-B*49:01; KCNU1; ENSG00000215262; CTA
AEDISNIM

SEQ ID NO: 31611 - protein, 10 aa, Homo sapiens
  misc_feature: Table A; Target 31611; HLA-B*40:01; KCNU1; ENSG00000215262; CTA
AEDISNIMRV

SEQ ID NO: 31612 - protein, 10 aa, Homo sapiens
  misc_feature: Table A; Target 31612; HLA-B*49:01; KCNU1; ENSG00000215262; CTA
AEDISNIMRV

SEQ ID NO: 31613 - protein, 11 aa, Homo sapiens
  misc_feature: Table A; Target 31613; HLA-A*30:01; KCNU1; ENSG00000215262; CTA
AEDISNIMRVL

SEQ ID NO: 31614 - protein, 11 aa, Homo sapiens
  misc_feature: Table A; Target 31614; HLA-B*40:01; KCNU1; ENSG00000215262; CTA
AEDISNIMRVL

SEQ ID NO: 31615 - protein, 11 aa, Homo sapiens
  misc_feature: Table A; Target 31615; HLA-B*40:02; KCNU1; ENSG00000215262; CTA
AEDISNIMRVL

SEQ ID NO: 31616 - protein, 11 aa, Homo sapiens
  misc_feature: Table A; Target 31616; HLA-B*44:02; KCNU1; ENSG00000215262; CTA
AEDISNIMRVL

SEQ ID NO: 31617 - protein, 11 aa, Homo sapiens
  misc_feature: Table A; Target 31617; HLA-B*44:03; KCNU1; ENSG00000215262; CTA
AEDISNIMRVL

SEQ ID NO: 31618 - protein, 11 aa, Homo sapiens
  misc_feature: Table A; Target 31618; HLA-B*49:01; KCNU1; ENSG00000215262; CTA
AEDISNIMRVL

SEQ ID NO: 31619 - protein, 8 aa, Homo sapiens
  misc_feature: Table A; Target 31619; HLA-B*49:01; KCNU1; ENSG00000215262; CTA
AELKLGFI

SEQ ID NO: 31620 - protein, 9 aa, Homo sapiens
  misc_feature: Table A; Target 31620; HLA-B*40:02; KCNU1; ENSG00000215262; CTA
AELKLGFIA

SEQ ID NO: 31621 - protein, 10 aa, Homo sapiens
  misc_feature: Table A; Target 31621; HLA-B*44:02; KCNU1; ENSG00000215262; CTA
AELKLGFIAQ

SEQ ID NO: 31622 - protein, 10 aa, Homo sapiens
  misc_feature: Table A; Target 31622; HLA-A*23:01; KCNU1; ENSG00000215262; CTA
AFILSSFVTF

SEQ ID NO: 31623 - protein, 10 aa, Homo sapiens
  misc_feature: Table A; Target 31623; HLA-A*24:02; KCNU1; ENSG00000215262; CTA
AFILSSFVTF

SEQ ID NO: 31624 - protein, 8 aa, Homo sapiens
  misc_feature: Table A; Target 31624; HLA-A*23:01; KCNU1; ENSG00000215262; CTA
AFSTGTVF

SEQ ID NO: 31625 - protein, 8 aa, Homo sapiens
  misc_feature: Table A; Target 31625; HLA-B*15:03; KCNU1; ENSG00000215262; CTA
AFSTGTVF

SEQ ID NO: 31626 - protein, 8 aa, Homo sapiens
  misc_feature: Table A; Target 31626; HLA-C*01:02; KCNU1; ENSG00000215262; CTA
AFSTGTVF

SEQ ID NO: 31627 - protein, 8 aa, Homo sapiens
  misc_feature: Table A; Target 31627; HLA-C*04:01; KCNU1; ENSG00000215262; CTA
AFSTGTVF

SEQ ID NO: 31628 - protein, 8 aa, Homo sapiens
  misc_feature: Table A; Target 31628; HLA-C*14:02; KCNU1; ENSG00000215262; CTA
AFSTGTVF

SEQ ID NO: 31629 - protein, 8 aa, Homo sapiens
  misc_feature: Table A; Target 31629; HLA-C*16:01; KCNU1; ENSG00000215262; CTA
AFSTGTVF

SEQ ID NO: 31630 - protein, 10 aa, Homo sapiens
  misc_feature: Table A; Target 31630; HLA-A*11:01; KCNU1; ENSG00000215262; CTA
AGMSFPEVAR

SEQ ID NO: 31631 - protein, 10 aa, Homo sapiens
  misc_feature: Table A; Target 31631; HLA-A*31:01; KCNU1; ENSG00000215262; CTA
AGMSFPEVAR

SEQ ID NO: 31632 - protein, 10 aa, Homo sapiens
  misc_feature: Table A; Target 31632; HLA-C*07:06; KCNU1; ENSG00000215262; CTA
AGMSFPEVAR

SEQ ID NO: 31633 - protein, 11 aa, Homo sapiens
  misc_feature: Table A; Target 31633; HLA-A*02:04; KCNU1; ENSG00000215262; CTA
AGMSFPEVARL

SEQ ID NO: 31634 - protein, 8 aa, Homo sapiens
  misc_feature: Table A; Target 31634; HLA-B*37:01; KCNU1; ENSG00000215262; CTA
AHSAPMGL

SEQ ID NO: 31635 - protein, 8 aa, Homo sapiens
  misc_feature: Table A; Target 31635; HLA-B*38:01; KCNU1; ENSG00000215262; CTA
AHSAPMGL

SEQ ID NO: 31636 - protein, 8 aa, Homo sapiens
  misc_feature: Table A; Target 31636; HLA-A*32:01; KCNU1; ENSG00000215262; CTA
AIKTSNSV

SEQ ID NO: 31637 - protein, 8 aa, Homo sapiens
  misc_feature: Table A; Target 31637; HLA-B*08:01; KCNU1; ENSG00000215262; CTA
AIKTSNSV

SEQ ID NO: 31638 - protein, 9 aa, Homo sapiens
  misc_feature: Table A; Target 31638; HLA-A*03:01; KCNU1; ENSG00000215262; CTA
AIKTSNSVK

SEQ ID NO: 31639 - protein, 9 aa, Homo sapiens
  misc_feature: Table A; Target 31639; HLA-A*03:02; KCNU1; ENSG00000215262; CTA
AIKTSNSVK

SEQ ID NO: 31640 - protein, 10 aa, Homo sapiens
  misc_feature: Table A; Target 31640; HLA-B*15:01; KCNU1; ENSG00000215262; CTA
AIKTSNSVKF

SEQ ID NO: 31641 - protein, 10 aa, Homo sapiens
  misc_feature: Table A; Target 31641; HLA-B*46:01; KCNU1; ENSG00000215262; CTA
AIKTSNSVKF

SEQ ID NO: 31642 - protein, 8 aa, Homo sapiens
  misc_feature: Table A; Target 31642; HLA-B*13:02; KCNU1; ENSG00000215262; CTA
AIMATLTI

SEQ ID NO: 31643 - protein, 9 aa, Homo sapiens
  misc_feature: Table A; Target 31643; HLA-A*26:01; KCNU1; ENSG00000215262; CTA
AIPFSTACY

SEQ ID NO: 31644 - protein, 9 aa, Homo sapiens
  misc_feature: Table A; Target 31644; HLA-A*29:02; KCNU1; ENSG00000215262; CTA
AIPFSTACY

SEQ ID NO: 31645 - protein, 9 aa, Homo sapiens
  misc_feature: Table A; Target 31645; HLA-A*30:02; KCNU1; ENSG00000215262; CTA
AIPFSTACY

SEQ ID NO: 31646 - protein, 9 aa, Homo sapiens
  misc_feature: Table A; Target 31646; HLA-B*15:01; KCNU1; ENSG00000215262; CTA
AIPFSTACY

SEQ ID NO: 31647 - protein, 9 aa, Homo sapiens
  misc_feature: Table A; Target 31647; HLA-B*15:03; KCNU1; ENSG00000215262; CTA
AIPFSTACY

SEQ ID NO: 31648 - protein, 9 aa, Homo sapiens
  misc_feature: Table A; Target 31648; HLA-B*46:01; KCNU1; ENSG00000215262; CTA
AIPFSTACY

SEQ ID NO: 31649 - protein, 9 aa, Homo sapiens
  misc_feature: Table A; Target 31649; HLA-C*01:02; KCNU1; ENSG00000215262; CTA
AIPFSTACY

SEQ ID NO: 31650 - protein, 9 aa, Homo sapiens
  misc_feature: Table A; Target 31650; HLA-C*07:04; KCNU1; ENSG00000215262; CTA
AIPFSTACY

SEQ ID NO: 31651 - protein, 10 aa, Homo sapiens
  misc_feature: Table A; Target 31651; HLA-A*03:01; KCNU1; ENSG00000215262; CTA
AIPFSTACYK

SEQ ID NO: 31652 - protein, 10 aa, Homo sapiens
  misc_feature: Table A; Target 31652; HLA-A*03:02; KCNU1; ENSG00000215262; CTA
AIPFSTACYK

SEQ ID NO: 31653 - protein, 10 aa, Homo sapiens
  misc_feature: Table A; Target 31653; HLA-A*11:01; KCNU1; ENSG00000215262; CTA
AIPFSTACYK

SEQ ID NO: 31654 - protein, 9 aa, Homo sapiens
  misc_feature: Table A; Target 31654; HLA-B*15:03; KCNU1; ENSG00000215262; CTA
AKTSLGRTF

SEQ ID NO: 31655 - protein, 10 aa, Homo sapiens
  misc_feature: Table A; Target 31655; HLA-A*02:04; KCNU1; ENSG00000215262; CTA
ALRLLELPQI

SEQ ID NO: 31656 - protein, 9 aa, Homo sapiens
  misc_feature: Table A; Target 31656; HLA-A*02:01; KCNU1; ENSG00000215262; CTA
ALYSGDLHA

SEQ ID NO: 31657 - protein, 9 aa, Homo sapiens
  misc_feature: Table A; Target 31657; HLA-A*02:03; KCNU1; ENSG00000215262; CTA
ALYSGDLHA

SEQ ID NO: 31658 - protein, 9 aa, Homo sapiens
  misc_feature: Table A; Target 31658; HLA-A*02:04; KCNU1; ENSG00000215262; CTA
ALYSGDLHA

SEQ ID NO: 31659 - protein, 9 aa, Homo sapiens
  misc_feature: Table A; Target 31659; HLA-B*13:02; KCNU1; ENSG00000215262; CTA
ALYSGDLHA

SEQ ID NO: 31660 - protein, 9 aa, Homo sapiens
  misc_feature: Table A; Target 31660; HLA-B*55:01; KCNU1; ENSG00000215262; CTA
ALYSGDLHA

SEQ ID NO: 31661 - protein, 10 aa, Homo sapiens
  misc_feature: Table A; Target 31661; HLA-A*02:03; KCNU1; ENSG00000215262; CTA
ALYSGDLHAA

SEQ ID NO: 31662 - protein, 10 aa, Homo sapiens
  misc_feature: Table A; Target 31662; HLA-A*02:04; KCNU1; ENSG00000215262; CTA
ALYSGDLHAA

SEQ ID NO: 31663 - protein, 10 aa, Homo sapiens
  misc_feature: Table A; Target 31663; HLA-A*02:07; KCNU1; ENSG00000215262; CTA
ALYSGDLHAA

SEQ ID NO: 31664 - protein, 10 aa, Homo sapiens
  misc_feature: Table A; Target 31664; HLA-A*03:01; KCNU1; ENSG00000215262; CTA
ALYSGDLHAA

SEQ ID NO: 31665 - protein, 10 aa, Homo sapiens
  misc_feature: Table A; Target 31665; HLA-A*32:01; KCNU1; ENSG00000215262; CTA
ALYSGDLHAA

SEQ ID NO: 31666 - protein, 10 aa, Homo sapiens
  misc_feature: Table A; Target 31666; HLA-B*13:02; KCNU1; ENSG00000215262; CTA
ALYSGDLHAA

SEQ ID NO: 31667 - protein, 10 aa, Homo sapiens
  misc_feature: Table A; Target 31667; HLA-B*46:01; KCNU1; ENSG00000215262; CTA
ALYSGDLHAA

SEQ ID NO: 31668 - protein, 10 aa, Homo sapiens
  misc_feature: Table A; Target 31668; HLA-B*55:01; KCNU1; ENSG00000215262; CTA
ALYSGDLHAA

SEQ ID NO: 31669 - protein, 10 aa, Homo sapiens
  misc_feature: Table A; Target 31669; HLA-B*56:01; KCNU1; ENSG00000215262; CTA
ALYSGDLHAA

SEQ ID NO: 31670 - protein, 9 aa, Homo sapiens
  misc_feature: Table A; Target 31670; HLA-B*07:02; KCNU1; ENSG00000215262; CTA
APMGLRNFV

SEQ ID NO: 31671 - protein, 9 aa, Homo sapiens
  misc_feature: Table A; Target 31671; HLA-B*56:01; KCNU1; ENSG00000215262; CTA
APMGLRNFV

SEQ ID NO: 31672 - protein, 9 aa, Homo sapiens
  misc_feature: Table A; Target 31672; HLA-C*07:02; KCNU1; ENSG00000215262; CTA
APMGLRNFV

SEQ ID NO: 31673 - protein, 10 aa, Homo sapiens
  misc_feature: Table A; Target 31673; HLA-B*07:02; KCNU1; ENSG00000215262; CTA
APMGLRNFVM

SEQ ID NO: 31674 - protein, 10 aa, Homo sapiens
  misc_feature: Table A; Target 31674; HLA-B*08:01; KCNU1; ENSG00000215262; CTA
APMGLRNFVM

SEQ ID NO: 31675 - protein, 10 aa, Homo sapiens
  misc_feature: Table A; Target 31675; HLA-B*35:03; KCNU1; ENSG00000215262; CTA
APMGLRNFVM

SEQ ID NO: 31676 - protein, 10 aa, Homo sapiens
  misc_feature: Table A; Target 31676; HLA-B*56:01; KCNU1; ENSG00000215262; CTA
APMGLRNFVM

SEQ ID NO: 31677 - protein, 10 aa, Homo sapiens
  misc_feature: Table A; Target 31677; HLA-C*07:02; KCNU1; ENSG00000215262; CTA
APMGLRNFVM

SEQ ID NO: 31678 - protein, 8 aa, Homo sapiens
  misc_feature: Table A; Target 31678; HLA-B*13:02; KCNU1; ENSG00000215262; CTA
AQTFVGQV

SEQ ID NO: 31679 - protein, 9 aa, Homo sapiens
  misc_feature: Table A; Target 31679; HLA-A*30:01; KCNU1; ENSG00000215262; CTA
AQTFVGQVL

SEQ ID NO: 31680 - protein, 9 aa, Homo sapiens
  misc_feature: Table A; Target 31680; HLA-A*32:01; KCNU1; ENSG00000215262; CTA
AQTFVGQVL

SEQ ID NO: 31681 - protein, 9 aa, Homo sapiens
  misc_feature: Table A; Target 31681; HLA-B*13:02; KCNU1; ENSG00000215262; CTA
AQTFVGQVL

SEQ ID NO: 31682 - protein, 9 aa, Homo sapiens
  misc_feature: Table A; Target 31682; HLA-B*15:01; KCNU1; ENSG00000215262; CTA
AQTFVGQVL

SEQ ID NO: 31683 - protein, 9 aa, Homo sapiens
  misc_feature: Table A; Target 31683; HLA-B*15:03; KCNU1; ENSG00000215262; CTA
AQTFVGQVL

SEQ ID NO: 31684 - protein, 9 aa, Homo sapiens
  misc_feature: Table A; Target 31684; HLA-B*27:02; KCNU1; ENSG00000215262; CTA
AQTFVGQVL

SEQ ID NO: 31685 - protein, 9 aa, Homo sapiens
  misc_feature: Table A; Target 31685; HLA-B*27:05; KCNU1; ENSG00000215262; CTA
AQTFVGQVL

SEQ ID NO: 31686 - protein, 9 aa, Homo sapiens
  misc_feature: Table A; Target 31686; HLA-B*37:01; KCNU1; ENSG00000215262; CTA
AQTFVGQVL

SEQ ID NO: 31687 - protein, 9 aa, Homo sapiens
  misc_feature: Table A; Target 31687; HLA-B*38:01; KCNU1; ENSG00000215262; CTA
AQTFVGQVL

SEQ ID NO: 31688 - protein, 9 aa, Homo sapiens
  misc_feature: Table A; Target 31688; HLA-B*39:01; KCNU1; ENSG00000215262; CTA
AQTFVGQVL

SEQ ID NO: 31689 - protein, 9 aa, Homo sapiens
  misc_feature: Table A; Target 31689; HLA-B*40:01; KCNU1; ENSG00000215262; CTA
AQTFVGQVL

SEQ ID NO: 31690 - protein, 9 aa, Homo sapiens
  misc_feature: Table A; Target 31690; HLA-B*40:02; KCNU1; ENSG00000215262; CTA
AQTFVGQVL

SEQ ID NO: 31691 - protein, 9 aa, Homo sapiens
  misc_feature: Table A; Target 31691; HLA-B*44:02; KCNU1; ENSG00000215262; CTA
AQTFVGQVL

SEQ ID NO: 31692 - protein, 9 aa, Homo sapiens
  misc_feature: Table A; Target 31692; HLA-B*44:03; KCNU1; ENSG00000215262; CTA
AQTFVGQVL

SEQ ID NO: 31693 - protein, 9 aa, Homo sapiens
  misc_feature: Table A; Target 31693; HLA-B*58:01; KCNU1; ENSG00000215262; CTA
AQTFVGQVL

SEQ ID NO: 31694 - protein, 9 aa, Homo sapiens
  misc_feature: Table A; Target 31694; HLA-C*02:02; KCNU1; ENSG00000215262; CTA
AQTFVGQVL

SEQ ID NO: 31695 - protein, 9 aa, Homo sapiens
  misc_feature: Table A; Target 31695; HLA-C*03:03; KCNU1; ENSG00000215262; CTA
AQTFVGQVL

SEQ ID NO: 31696 - protein, 9 aa, Homo sapiens
  misc_feature: Table A; Target 31696; HLA-C*03:04; KCNU1; ENSG00000215262; CTA
AQTFVGQVL

SEQ ID NO: 31697 - protein, 9 aa, Homo sapiens
  misc_feature: Table A; Target 31697; HLA-C*06:02; KCNU1; ENSG00000215262; CTA
AQTFVGQVL

SEQ ID NO: 31698 - protein, 9 aa, Homo sapiens
  misc_feature: Table A; Target 31698; HLA-C*07:04; KCNU1; ENSG00000215262; CTA
AQTFVGQVL

SEQ ID NO: 31699 - protein, 9 aa, Homo sapiens
  misc_feature: Table A; Target 31699; HLA-C*16:02; KCNU1; ENSG00000215262; CTA
AQTFVGQVL

SEQ ID NO: 31700 - protein, 9 aa, Homo sapiens
  misc_feature: Table A; Target 31700; HLA-C*16:04; KCNU1; ENSG00000215262; CTA
AQTFVGQVL

SEQ ID NO: 31701 - protein, 10 aa, Homo sapiens
  misc_feature: Table A; Target 31701; HLA-B*13:02; KCNU1; ENSG00000215262; CTA
AQTFVGQVLV

SEQ ID NO: 31702 - protein, 9 aa, Homo sapiens
  misc_feature: Table A; Target 31702; HLA-B*58:01; KCNU1; ENSG00000215262; CTA
ASNYTRKEL

SEQ ID NO: 31703 - protein, 9 aa, Homo sapiens
  misc_feature: Table A; Target 31703; HLA-C*16:01; KCNU1; ENSG00000215262; CTA
ASNYTRKEL

SEQ ID NO: 31704 - protein, 9 aa, Homo sapiens
  misc_feature: Table A; Target 31704; HLA-A*30:02; KCNU1; ENSG00000215262; CTA
ASTSSISNF

SEQ ID NO: 31705 - protein, 9 aa, Homo sapiens
  misc_feature: Table A; Target 31705; HLA-A*32:01; KCNU1; ENSG00000215262; CTA
ASTSSISNF

SEQ ID NO: 31706 - protein, 9 aa, Homo sapiens
  misc_feature: Table A; Target 31706; HLA-B*46:01; KCNU1; ENSG00000215262; CTA
ASTSSISNF

SEQ ID NO: 31707 - protein, 9 aa, Homo sapiens
  misc_feature: Table A; Target 31707; HLA-B*58:01; KCNU1; ENSG00000215262; CTA
ASTSSISNF

SEQ ID NO: 31708 - protein, 9 aa, Homo sapiens
  misc_feature: Table A; Target 31708; HLA-C*02:02; KCNU1; ENSG00000215262; CTA
ASTSSISNF

SEQ ID NO: 31709 - protein, 9 aa, Homo sapiens
  misc_feature: Table A; Target 31709; HLA-C*07:04; KCNU1; ENSG00000215262; CTA
ASTSSISNF

SEQ ID NO: 31710 - protein, 9 aa, Homo sapiens
  misc_feature: Table A; Target 31710; HLA-C*16:01; KCNU1; ENSG00000215262; CTA
ASTSSISNF

SEQ ID NO: 31711 - protein, 9 aa, Homo sapiens
  misc_feature: Table A; Target 31711; HLA-C*16:02; KCNU1; ENSG00000215262; CTA
ASTSSISNF

SEQ ID NO: 31712 - protein, 9 aa, Homo sapiens
  misc_feature: Table A; Target 31712; HLA-C*16:04; KCNU1; ENSG00000215262; CTA
ASTSSISNF

SEQ ID NO: 31713 - protein, 9 aa, Homo sapiens
  misc_feature: Table A; Target 31713; HLA-A*68:02; KCNU1; ENSG00000215262; CTA
ATAFYNYHV

SEQ ID NO: 31714 - protein, 8 aa, Homo sapiens
  misc_feature: Table A; Target 31714; HLA-A*32:01; KCNU1; ENSG00000215262; CTA
ATTSTVGF

SEQ ID NO: 31715 - protein, 8 aa, Homo sapiens
  misc_feature: Table A; Target 31715; HLA-B*58:01; KCNU1; ENSG00000215262; CTA
ATTSTVGF

SEQ ID NO: 31716 - protein, 9 aa, Homo sapiens
  misc_feature: Table A; Target 31716; HLA-B*27:05; KCNU1; ENSG00000215262; CTA
AVLSPPPQP

SEQ ID NO: 31717 - protein, 10 aa, Homo sapiens
  misc_feature: Table A; Target 31717; HLA-B*27:05; KCNU1; ENSG00000215262; CTA
AVLSPPPQPS

SEQ ID NO: 31718 - protein, 11 aa, Homo sapiens
  misc_feature: Table A; Target 31718; HLA-C*04:01; KCNU1; ENSG00000215262; CTA
AYTTFISGSAM

SEQ ID NO: 31719 - protein, 11 aa, Homo sapiens
  misc_feature: Table A; Target 31719; HLA-C*14:02; KCNU1; ENSG00000215262; CTA
AYTTFISGSAM

SEQ ID NO: 31720 - protein, 9 aa, Homo sapiens
  misc_feature: Table A; Target 31720; HLA-C*03:04; KCNU1; ENSG00000215262; CTA
CAIPFSTAC

SEQ ID NO: 31721 - protein, 9 aa, Homo sapiens
  misc_feature: Table A; Target 31721; HLA-C*12:03; KCNU1; ENSG00000215262; CTA
CAIPFSTAC

SEQ ID NO: 31722 - protein, 10 aa, Homo sapiens
  misc_feature: Table A; Target 31722; HLA-A*26:01; KCNU1; ENSG00000215262; CTA
CAIPFSTACY

SEQ ID NO: 31723 - protein, 10 aa, Homo sapiens
  misc_feature: Table A; Target 31723; HLA-A*30:02; KCNU1; ENSG00000215262; CTA
CAIPFSTACY

SEQ ID NO: 31724 - protein, 10 aa, Homo sapiens
  misc_feature: Table A; Target 31724; HLA-B*15:01; KCNU1; ENSG00000215262; CTA
CAIPFSTACY

SEQ ID NO: 31725 - protein, 10 aa, Homo sapiens
  misc_feature: Table A; Target 31725; HLA-B*15:03; KCNU1; ENSG00000215262; CTA
CAIPFSTACY

SEQ ID NO: 31726 - protein, 10 aa, Homo sapiens
  misc_feature: Table A; Target 31726; HLA-B*46:01; KCNU1; ENSG00000215262; CTA
CAIPFSTACY

SEQ ID NO: 31727 - protein, 10 aa, Homo sapiens
  misc_feature: Table A; Target 31727; HLA-C*02:02; KCNU1; ENSG00000215262; CTA
CAIPFSTACY

SEQ ID NO: 31728 - protein, 10 aa, Homo sapiens
  misc_feature: Table A; Target 31728; HLA-C*16:04; KCNU1; ENSG00000215262; CTA
CAIPFSTACY

SEQ ID NO: 31729 - protein, 8 aa, Homo sapiens
  misc_feature: Table A; Target 31729; HLA-B*51:01; KCNU1; ENSG00000215262; CTA
CPPTIDSV

SEQ ID NO: 31730 - protein, 10 aa, Homo sapiens
  misc_feature: Table A; Target 31730; HLA-A*31:01; KCNU1; ENSG00000215262; CTA
CTSLLSGRNR

SEQ ID NO: 31731 - protein, 9 aa, Homo sapiens
  misc_feature: Table A; Target 31731; HLA-A*23:01; KCNU1; ENSG00000215262; CTA
CTTEIQAAF

SEQ ID NO: 31732 - protein, 9 aa, Homo sapiens
  misc_feature: Table A; Target 31732; HLA-A*26:01; KCNU1; ENSG00000215262; CTA
CTTEIQAAF

SEQ ID NO: 31733 - protein, 9 aa, Homo sapiens
  misc_feature: Table A; Target 31733; HLA-A*30:02; KCNU1; ENSG00000215262; CTA
CTTEIQAAF

SEQ ID NO: 31734 - protein, 9 aa, Homo sapiens
  misc_feature: Table A; Target 31734; HLA-A*32:01; KCNU1; ENSG00000215262; CTA
CTTEIQAAF

SEQ ID NO: 31735 - protein, 9 aa, Homo sapiens
  misc_feature: Table A; Target 31735; HLA-B*15:03; KCNU1; ENSG00000215262; CTA
CTTEIQAAF

SEQ ID NO: 31736 - protein, 9 aa, Homo sapiens
  misc_feature: Table A; Target 31736; HLA-B*46:01; KCNU1; ENSG00000215262; CTA
CTTEIQAAF

SEQ ID NO: 31737 - protein, 9 aa, Homo sapiens
  misc_feature: Table A; Target 31737; HLA-B*57:01; KCNU1; ENSG00000215262; CTA
CTTEIQAAF

SEQ ID NO: 31738 - protein, 9 aa, Homo sapiens
  misc_feature: Table A; Target 31738; HLA-B*58:01; KCNU1; ENSG00000215262; CTA
CTTEIQAAF

SEQ ID NO: 31739 - protein, 9 aa, Homo sapiens
  misc_feature: Table A; Target 31739; HLA-C*02:02; KCNU1; ENSG00000215262; CTA
CTTEIQAAF

SEQ ID NO: 31740 - protein, 9 aa, Homo sapiens
  misc_feature: Table A; Target 31740; HLA-C*03:04; KCNU1; ENSG00000215262; CTA
CTTEIQAAF

SEQ ID NO: 31741 - protein, 9 aa, Homo sapiens
  misc_feature: Table A; Target 31741; HLA-C*16:01; KCNU1; ENSG00000215262; CTA
CTTEIQAAF

SEQ ID NO: 31742 - protein, 9 aa, Homo sapiens
  misc_feature: Table A; Target 31742; HLA-C*16:04; KCNU1; ENSG00000215262; CTA
CTTEIQAAF

SEQ ID NO: 31743 - protein, 9 aa, Homo sapiens
  misc_feature: Table A; Target 31743; HLA-B*54:01; KCNU1; ENSG00000215262; CTA
CVFGDAHSA

SEQ ID NO: 31744 - protein, 9 aa, Homo sapiens
  misc_feature: Table A; Target 31744; HLA-B*56:01; KCNU1; ENSG00000215262; CTA
CVFGDAHSA

SEQ ID NO: 31745 - protein, 8 aa, Homo sapiens
  misc_feature: Table A; Target 31745; HLA-A*23:01; KCNU1; ENSG00000215262; CTA
CYLAYTTF

SEQ ID NO: 31746 - protein, 8 aa, Homo sapiens
  misc_feature: Table A; Target 31746; HLA-A*24:02; KCNU1; ENSG00000215262; CTA
CYLAYTTF

SEQ ID NO: 31747 - protein, 8 aa, Homo sapiens
  misc_feature: Table A; Target 31747; HLA-C*14:02; KCNU1; ENSG00000215262; CTA
CYLAYTTF

SEQ ID NO: 31748 - protein, 9 aa, Homo sapiens
  misc_feature: Table A; Target 31748; HLA-A*24:02; KCNU1; ENSG00000215262; CTA
CYLAYTTFI

SEQ ID NO: 31749 - protein, 8 aa, Homo sapiens
  misc_feature: Table A; Target 31749; HLA-B*51:01; KCNU1; ENSG00000215262; CTA
DAHSAPMG

SEQ ID NO: 31750 - protein, 9 aa, Homo sapiens
  misc_feature: Table A; Target 31750; HLA-A*25:01; KCNU1; ENSG00000215262; CTA
DAHSAPMGL

SEQ ID NO: 31751 - protein, 9 aa, Homo sapiens
  misc_feature: Table A; Target 31751; HLA-A*26:01; KCNU1; ENSG00000215262; CTA
DAHSAPMGL

SEQ ID NO: 31752 - protein, 9 aa, Homo sapiens
  misc_feature: Table A; Target 31752; HLA-A*33:01; KCNU1; ENSG00000215262; CTA
DAHSAPMGL

SEQ ID NO: 31753 - protein, 9 aa, Homo sapiens
  misc_feature: Table A; Target 31753; HLA-A*33:03; KCNU1; ENSG00000215262; CTA
DAHSAPMGL

SEQ ID NO: 31754 - protein, 9 aa, Homo sapiens
  misc_feature: Table A; Target 31754; HLA-A*68:01; KCNU1; ENSG00000215262; CTA
DAHSAPMGL

SEQ ID NO: 31755 - protein, 9 aa, Homo sapiens
  misc_feature: Table A; Target 31755; HLA-B*07:02; KCNU1; ENSG00000215262; CTA
DAHSAPMGL

SEQ ID NO: 31756 - protein, 9 aa, Homo sapiens
  misc_feature: Table A; Target 31756; HLA-B*08:01; KCNU1; ENSG00000215262; CTA
DAHSAPMGL

SEQ ID NO: 31757 - protein, 9 aa, Homo sapiens
  misc_feature: Table A; Target 31757; HLA-B*35:01; KCNU1; ENSG00000215262; CTA
DAHSAPMGL

SEQ ID NO: 31758 - protein, 9 aa, Homo sapiens
  misc_feature: Table A; Target 31758; HLA-B*35:03; KCNU1; ENSG00000215262; CTA
DAHSAPMGL

SEQ ID NO: 31759 - protein, 9 aa, Homo sapiens
  misc_feature: Table A; Target 31759; HLA-B*51:01; KCNU1; ENSG00000215262; CTA
DAHSAPMGL

SEQ ID NO: 31760 - protein, 9 aa, Homo sapiens
  misc_feature: Table A; Target 31760; HLA-C*07:01; KCNU1; ENSG00000215262; CTA
DAHSAPMGL

SEQ ID NO: 31761 - protein, 9 aa, Homo sapiens
  misc_feature: Table A; Target 31761; HLA-C*07:02; KCNU1; ENSG00000215262; CTA
DAHSAPMGL

SEQ ID NO: 31762 - protein, 9 aa, Homo sapiens
  misc_feature: Table A; Target 31762; HLA-C*07:04; KCNU1; ENSG00000215262; CTA
DAHSAPMGL

SEQ ID NO: 31763 - protein, 9 aa, Homo sapiens
  misc_feature: Table A; Target 31763; HLA-C*07:06; KCNU1; ENSG00000215262; CTA
DAHSAPMGL

SEQ ID NO: 31764 - protein, 10 aa, Homo sapiens
  misc_feature: Table A; Target 31764; HLA-A*33:01; KCNU1; ENSG00000215262; CTA
DAHSAPMGLR

SEQ ID NO: 31765 - protein, 10 aa, Homo sapiens
  misc_feature: Table A; Target 31765; HLA-A*33:03; KCNU1; ENSG00000215262; CTA
DAHSAPMGLR

SEQ ID NO: 31766 - protein, 10 aa, Homo sapiens
  misc_feature: Table A; Target 31766; HLA-A*68:01; KCNU1; ENSG00000215262; CTA
DAHSAPMGLR

SEQ ID NO: 31767 - protein, 8 aa, Homo sapiens
  misc_feature: Table A; Target 31767; HLA-B*18:01; KCNU1; ENSG00000215262; CTA
DDFAGMSF

SEQ ID NO: 31768 - protein, 8 aa, Homo sapiens
  misc_feature: Table A; Target 31768; HLA-B*37:01; KCNU1; ENSG00000215262; CTA
DDFAGMSF

SEQ ID NO: 31769 - protein, 8 aa, Homo sapiens
  misc_feature: Table A; Target 31769; HLA-B*40:02; KCNU1; ENSG00000215262; CTA
DDFAGMSF

SEQ ID NO: 31770 - protein, 8 aa, Homo sapiens
  misc_feature: Table A; Target 31770; HLA-B*18:01; KCNU1; ENSG00000215262; CTA
DDVFIPEL

SEQ ID NO: 31771 - protein, 9 aa, Homo sapiens
  misc_feature: Table A; Target 31771; HLA-A*68:02; KCNU1; ENSG00000215262; CTA
DDVFIPELI

SEQ ID NO: 31772 - protein, 9 aa, Homo sapiens
  misc_feature: Table A; Target 31772; HLA-B*18:01; KCNU1; ENSG00000215262; CTA
DEDPFAYSE

SEQ ID NO: 31773 - protein, 11 aa, Homo sapiens
  misc_feature: Table A; Target 31773; HLA-B*18:01; KCNU1; ENSG00000215262; CTA
DEDPFAYSEPL

SEQ ID NO: 31774 - protein, 9 aa, Homo sapiens
  misc_feature: Table A; Target 31774; HLA-B*18:01; KCNU1; ENSG00000215262; CTA
DEVYDEDPF

SEQ ID NO: 31775 - protein, 11 aa, Homo sapiens
  misc_feature: Table A; Target 31775; HLA-B*18:01; KCNU1; ENSG00000215262; CTA
DEVYDEDPFAY

SEQ ID NO: 31776 - protein, 9 aa, Homo sapiens
  misc_feature: Table A; Target 31776; HLA-A*23:01; KCNU1; ENSG00000215262; CTA
DIFTIPPTF

SEQ ID NO: 31777 - protein, 9 aa, Homo sapiens
  misc_feature: Table A; Target 31777; HLA-A*25:01; KCNU1; ENSG00000215262; CTA
DIFTIPPTF

SEQ ID NO: 31778 - protein, 9 aa, Homo sapiens
  misc_feature: Table A; Target 31778; HLA-A*26:01; KCNU1; ENSG00000215262; CTA
DIFTIPPTF

SEQ ID NO: 31779 - protein, 9 aa, Homo sapiens
  misc_feature: Table A; Target 31779; HLA-A*68:01; KCNU1; ENSG00000215262; CTA
DIFTIPPTF

SEQ ID NO: 31780 - protein, 9 aa, Homo sapiens
  misc_feature: Table A; Target 31780; HLA-B*18:01; KCNU1; ENSG00000215262; CTA
DIFTIPPTF

SEQ ID NO: 31781 - protein, 10 aa, Homo sapiens
  misc_feature: Table A; Target 31781; HLA-A*68:02; KCNU1; ENSG00000215262; CTA
DIFTIPPTFI

SEQ ID NO: 31782 - protein, 8 aa, Homo sapiens
  misc_feature: Table A; Target 31782; HLA-B*51:01; KCNU1; ENSG00000215262; CTA
DISNIMRV

SEQ ID NO: 31783 - protein, 9 aa, Homo sapiens
  misc_feature: Table A; Target 31783; HLA-A*25:01; KCNU1; ENSG00000215262; CTA
DISNIMRVL

SEQ ID NO: 31784 - protein, 9 aa, Homo sapiens
  misc_feature: Table A; Target 31784; HLA-A*68:02; KCNU1; ENSG00000215262; CTA
DISNIMRVL

SEQ ID NO: 31785 - protein, 9 aa, Homo sapiens
  misc_feature: Table A; Target 31785; HLA-C*12:03; KCNU1; ENSG00000215262; CTA
DISNIMRVL

SEQ ID NO: 31786 - protein, 10 aa, Homo sapiens
  misc_feature: Table A; Target 31786; HLA-A*26:01; KCNU1; ENSG00000215262; CTA
DIVFIGSLDY

SEQ ID NO: 31787 - protein, 11 aa, Homo sapiens
  misc_feature: Table A; Target 31787; HLA-A*68:02; KCNU1; ENSG00000215262; CTA
DIVFIGSLDYL

SEQ ID NO: 31788 - protein, 8 aa, Homo sapiens
  misc_feature: Table A; Target 31788; HLA-B*51:01; KCNU1; ENSG00000215262; CTA
DLFGILCV

SEQ ID NO: 31789 - protein, 9 aa, Homo sapiens
  misc_feature: Table A; Target 31789; HLA-A*25:01; KCNU1; ENSG00000215262; CTA
DPFAYSEPL

SEQ ID NO: 31790 - protein, 9 aa, Homo sapiens
  misc_feature: Table A; Target 31790; HLA-A*26:01; KCNU1; ENSG00000215262; CTA
DPFAYSEPL

SEQ ID NO: 31791 - protein, 9 aa, Homo sapiens
  misc_feature: Table A; Target 31791; HLA-A*33:01; KCNU1; ENSG00000215262; CTA
DPFAYSEPL

SEQ ID NO: 31792 - protein, 9 aa, Homo sapiens
  misc_feature: Table A; Target 31792; HLA-A*68:01; KCNU1; ENSG00000215262; CTA
DPFAYSEPL

SEQ ID NO: 31793 - protein, 9 aa, Homo sapiens
  misc_feature: Table A; Target 31793; HLA-A*68:02; KCNU1; ENSG00000215262; CTA
DPFAYSEPL

SEQ ID NO: 31794 - protein, 9 aa, Homo sapiens
  misc_feature: Table A; Target 31794; HLA-B*07:02; KCNU1; ENSG00000215262; CTA
DPFAYSEPL

SEQ ID NO: 31795 - protein, 9 aa, Homo sapiens
  misc_feature: Table A; Target 31795; HLA-B*18:01; KCNU1; ENSG00000215262; CTA
DPFAYSEPL

SEQ ID NO: 31796 - protein, 9 aa, Homo sapiens
  misc_feature: Table A; Target 31796; HLA-B*27:02; KCNU1; ENSG00000215262; CTA
DPFAYSEPL

SEQ ID NO: 31797 - protein, 9 aa, Homo sapiens
  misc_feature: Table A; Target 31797; HLA-B*35:01; KCNU1; ENSG00000215262; CTA
DPFAYSEPL

SEQ ID NO: 31798 - protein, 9 aa, Homo sapiens
  misc_feature: Table A; Target 31798; HLA-B*35:03; KCNU1; ENSG00000215262; CTA
DPFAYSEPL

SEQ ID NO: 31799 - protein, 9 aa, Homo sapiens
  misc_feature: Table A; Target 31799; HLA-B*51:01; KCNU1; ENSG00000215262; CTA
DPFAYSEPL

SEQ ID NO: 31800 - protein, 9 aa, Homo sapiens
  misc_feature: Table A; Target 31800; HLA-B*55:01; KCNU1; ENSG00000215262; CTA
DPFAYSEPL

SEQ ID NO: 31801 - protein, 9 aa, Homo sapiens
  misc_feature: Table A; Target 31801; HLA-C*07:01; KCNU1; ENSG00000215262; CTA
DPFAYSEPL

SEQ ID NO: 31802 - protein, 9 aa, Homo sapiens
  misc_feature: Table A; Target 31802; HLA-C*07:02; KCNU1; ENSG00000215262; CTA
DPFAYSEPL

SEQ ID NO: 31803 - protein, 9 aa, Homo sapiens
  misc_feature: Table A; Target 31803; HLA-A*25:01; KCNU1; ENSG00000215262; CTA
DPVGSCSSY

SEQ ID NO: 31804 - protein, 9 aa, Homo sapiens
  misc_feature: Table A; Target 31804; HLA-A*26:01; KCNU1; ENSG00000215262; CTA
DPVGSCSSY

SEQ ID NO: 31805 - protein, 9 aa, Homo sapiens
  misc_feature: Table A; Target 31805; HLA-B*35:01; KCNU1; ENSG00000215262; CTA
DPVGSCSSY

SEQ ID NO: 31806 - protein, 10 aa, Homo sapiens
  misc_feature: Table A; Target 31806; HLA-A*33:01; KCNU1; ENSG00000215262; CTA
DSCTSLLSGR

SEQ ID NO: 31807 - protein, 10 aa, Homo sapiens
  misc_feature: Table A; Target 31807; HLA-A*33:03; KCNU1; ENSG00000215262; CTA
DSCTSLLSGR

SEQ ID NO: 31808 - protein, 10 aa, Homo sapiens
  misc_feature: Table A; Target 31808; HLA-A*68:01; KCNU1; ENSG00000215262; CTA
DSCTSLLSGR

SEQ ID NO: 31809 - protein, 8 aa, Homo sapiens
  misc_feature: Table A; Target 31809; HLA-B*08:01; KCNU1; ENSG00000215262; CTA
DSLLATAF

SEQ ID NO: 31810 - protein, 8 aa, Homo sapiens
  misc_feature: Table A; Target 31810; HLA-B*18:01; KCNU1; ENSG00000215262; CTA
DSLLATAF

SEQ ID NO: 31811 - protein, 8 aa, Homo sapiens
  misc_feature: Table A; Target 31811; HLA-B*35:01; KCNU1; ENSG00000215262; CTA
DSLLATAF

SEQ ID NO: 31812 - protein, 9 aa, Homo sapiens
  misc_feature: Table A; Target 31812; HLA-A*01:01; KCNU1; ENSG00000215262; CTA
DSLLATAFY

SEQ ID NO: 31813 - protein, 9 aa, Homo sapiens
  misc_feature: Table A; Target 31813; HLA-A*26:01; KCNU1; ENSG00000215262; CTA
DSLLATAFY

SEQ ID NO: 31814 - protein, 9 aa, Homo sapiens
  misc_feature: Table A; Target 31814; HLA-A*33:01; KCNU1; ENSG00000215262; CTA
DSLLATAFY

SEQ ID NO: 31815 - protein, 8 aa, Homo sapiens
  misc_feature: Table A; Target 31815; HLA-B*08:01; KCNU1; ENSG00000215262; CTA
DSTTRIII

SEQ ID NO: 31816 - protein, 8 aa, Homo sapiens
  misc_feature: Table A; Target 31816; HLA-C*16:01; KCNU1; ENSG00000215262; CTA
DSTTRIII

SEQ ID NO: 31817 - protein, 8 aa, Homo sapiens
  misc_feature: Table A; Target 31817; HLA-A*33:01; KCNU1; ENSG00000215262; CTA
DSVTAFLR

SEQ ID NO: 31818 - protein, 8 aa, Homo sapiens
  misc_feature: Table A; Target 31818; HLA-A*68:01; KCNU1; ENSG00000215262; CTA
DSVTAFLR

SEQ ID NO: 31819 - protein, 10 aa, Homo sapiens
  misc_feature: Table A; Target 31819; HLA-A*25:01; KCNU1; ENSG00000215262; CTA
DSVTAFLRNF

SEQ ID NO: 31820 - protein, 10 aa, Homo sapiens
  misc_feature: Table A; Target 31820; HLA-A*26:01; KCNU1; ENSG00000215262; CTA
DSVTAFLRNF

SEQ ID NO: 31821 - protein, 9 aa, Homo sapiens
  misc_feature: Table A; Target 31821; HLA-A*25:01; KCNU1; ENSG00000215262; CTA
DTEAIMATL

SEQ ID NO: 31822 - protein, 9 aa, Homo sapiens
  misc_feature: Table A; Target 31822; HLA-A*68:01; KCNU1; ENSG00000215262; CTA
DTEAIMATL

SEQ ID NO: 31823 - protein, 9 aa, Homo sapiens
  misc_feature: Table A; Target 31823; HLA-A*68:02; KCNU1; ENSG00000215262; CTA
DTEAIMATL

SEQ ID NO: 31824 - protein, 9 aa, Homo sapiens
  misc_feature: Table A; Target 31824; HLA-B*35:03; KCNU1; ENSG00000215262; CTA
DTEAIMATL

SEQ ID NO: 31825 - protein, 9 aa, Homo sapiens
  misc_feature: Table A; Target 31825; HLA-B*51:01; KCNU1; ENSG00000215262; CTA
DTEAIMATL

SEQ ID NO: 31826 - protein, 9 aa, Homo sapiens
  misc_feature: Table A; Target 31826; HLA-C*07:06; KCNU1; ENSG00000215262; CTA
DTEAIMATL

SEQ ID NO: 31827 - protein, 9 aa, Homo sapiens
  misc_feature: Table A; Target 31827; HLA-A*25:01; KCNU1; ENSG00000215262; CTA
DTGDNIICF

SEQ ID NO: 31828 - protein, 9 aa, Homo sapiens
  misc_feature: Table A; Target 31828; HLA-A*26:01; KCNU1; ENSG00000215262; CTA
DTGDNIICF

SEQ ID NO: 31829 - protein, 9 aa, Homo sapiens
  misc_feature: Table A; Target 31829; HLA-A*33:01; KCNU1; ENSG00000215262; CTA
DTGDNIICF

SEQ ID NO: 31830 - protein, 9 aa, Homo sapiens
  misc_feature: Table A; Target 31830; HLA-A*33:03; KCNU1; ENSG00000215262; CTA
DTGDNIICF

SEQ ID NO: 31831 - protein, 9 aa, Homo sapiens
  misc_feature: Table A; Target 31831; HLA-A*68:01; KCNU1; ENSG00000215262; CTA
DTGDNIICF

SEQ ID NO: 31832 - protein, 8 aa, Homo sapiens
  misc_feature: Table A; Target 31832; HLA-B*51:01; KCNU1; ENSG00000215262; CTA
DTNCPPTI

SEQ ID NO: 31833 - protein, 8 aa, Homo sapiens
  misc_feature: Table A; Target 31833; HLA-B*51:01; KCNU1; ENSG00000215262; CTA
DVFIPELI

SEQ ID NO: 31834 - protein, 10 aa, Homo sapiens
  misc_feature: Table A; Target 31834; HLA-A*68:02; KCNU1; ENSG00000215262; CTA
DVFIPELITN

SEQ ID NO: 31835 - protein, 8 aa, Homo sapiens
  misc_feature: Table A; Target 31835; HLA-A*25:01; KCNU1; ENSG00000215262; CTA
DVNPRNTF

SEQ ID NO: 31836 - protein, 8 aa, Homo sapiens
  misc_feature: Table A; Target 31836; HLA-A*32:01; KCNU1; ENSG00000215262; CTA
DVNPRNTF

SEQ ID NO: 31837 - protein, 8 aa, Homo sapiens
  misc_feature: Table A; Target 31837; HLA-B*08:01; KCNU1; ENSG00000215262; CTA
DVNPRNTF

SEQ ID NO: 31838 - protein, 11 aa, Homo sapiens
  misc_feature: Table A; Target 31838; HLA-A*25:01; KCNU1; ENSG00000215262; CTA
DVNPRNTFGQL

SEQ ID NO: 31839 - protein, 11 aa, Homo sapiens
  misc_feature: Table A; Target 31839; HLA-A*33:01; KCNU1; ENSG00000215262; CTA
DVNPRNTFGQL

SEQ ID NO: 31840 - protein, 8 aa, Homo sapiens
  misc_feature: Table A; Target 31840; HLA-B*08:01; KCNU1; ENSG00000215262; CTA
DVVAKTSL

SEQ ID NO: 31841 - protein, 9 aa, Homo sapiens
  misc_feature: Table A; Target 31841; HLA-A*26:01; KCNU1; ENSG00000215262; CTA
DVVAKTSLG

SEQ ID NO: 31842 - protein, 10 aa, Homo sapiens
  misc_feature: Table A; Target 31842; HLA-A*33:01; KCNU1; ENSG00000215262; CTA
DVVAKTSLGR

SEQ ID NO: 31843 - protein, 10 aa, Homo sapiens
  misc_feature: Table A; Target 31843; HLA-A*33:03; KCNU1; ENSG00000215262; CTA
DVVAKTSLGR

SEQ ID NO: 31844 - protein, 10 aa, Homo sapiens
  misc_feature: Table A; Target 31844; HLA-A*68:01; KCNU1; ENSG00000215262; CTA
DVVAKTSLGR

SEQ ID NO: 31845 - protein, 10 aa, Homo sapiens
  misc_feature: Table A; Target 31845; HLA-C*07:06; KCNU1; ENSG00000215262; CTA
DVVAKTSLGR

SEQ ID NO: 31846 - protein, 9 aa, Homo sapiens
  misc_feature: Table A; Target 31846; HLA-A*24:02; KCNU1; ENSG00000215262; CTA
DYLQREWRF

SEQ ID NO: 31847 - protein, 9 aa, Homo sapiens
  misc_feature: Table A; Target 31847; HLA-A*23:01; KCNU1; ENSG00000215262; CTA
EAIMATLTI

SEQ ID NO: 31848 - protein, 9 aa, Homo sapiens
  misc_feature: Table A; Target 31848; HLA-A*25:01; KCNU1; ENSG00000215262; CTA
EAIMATLTI

SEQ ID NO: 31849 - protein, 9 aa, Homo sapiens
  misc_feature: Table A; Target 31849; HLA-A*26:01; KCNU1; ENSG00000215262; CTA
EAIMATLTI

SEQ ID NO: 31850 - protein, 9 aa, Homo sapiens
  misc_feature: Table A; Target 31850; HLA-A*68:02; KCNU1; ENSG00000215262; CTA
EAIMATLTI

SEQ ID NO: 31851 - protein, 9 aa, Homo sapiens
  misc_feature: Table A; Target 31851; HLA-B*13:02; KCNU1; ENSG00000215262; CTA
EAIMATLTI

SEQ ID NO: 31852 - protein, 9 aa, Homo sapiens
  misc_feature: Table A; Target 31852; HLA-B*35:03; KCNU1; ENSG00000215262; CTA
EAIMATLTI

SEQ ID NO: 31853 - protein, 9 aa, Homo sapiens
  misc_feature: Table A; Target 31853; HLA-B*51:01; KCNU1; ENSG00000215262; CTA
EAIMATLTI

SEQ ID NO: 31854 - protein, 9 aa, Homo sapiens
  misc_feature: Table A; Target 31854; HLA-C*03:04; KCNU1; ENSG00000215262; CTA
EAIMATLTI

SEQ ID NO: 31855 - protein, 9 aa, Homo sapiens
  misc_feature: Table A; Target 31855; HLA-A*26:01; KCNU1; ENSG00000215262; CTA
EDISNIMRV

SEQ ID NO: 31856 - protein, 9 aa, Homo sapiens
  misc_feature: Table A; Target 31856; HLA-A*68:02; KCNU1; ENSG00000215262; CTA
EDISNIMRV

SEQ ID NO: 31857 - protein, 10 aa, Homo sapiens
  misc_feature: Table A; Target 31857; HLA-B*44:02; KCNU1; ENSG00000215262; CTA
EDISNIMRVL

SEQ ID NO: 31858 - protein, 11 aa, Homo sapiens
  misc_feature: Table A; Target 31858; HLA-B*44:02; KCNU1; ENSG00000215262; CTA
EEELNPENKRF

SEQ ID NO: 31859 - protein, 11 aa, Homo sapiens
  misc_feature: Table A; Target 31859; HLA-B*44:03; KCNU1; ENSG00000215262; CTA
EEELNPENKRF

SEQ ID NO: 31860 - protein, 9 aa, Homo sapiens
  misc_feature: Table A; Target 31860; HLA-A*25:01; KCNU1; ENSG00000215262; CTA
EEFSLQKSY

SEQ ID NO: 31861 - protein, 9 aa, Homo sapiens
  misc_feature: Table A; Target 31861; HLA-A*26:01; KCNU1; ENSG00000215262; CTA
EEFSLQKSY

SEQ ID NO: 31862 - protein, 9 aa, Homo sapiens
  misc_feature: Table A; Target 31862; HLA-A*30:01; KCNU1; ENSG00000215262; CTA
EEFSLQKSY

SEQ ID NO: 31863 - protein, 9 aa, Homo sapiens
  misc_feature: Table A; Target 31863; HLA-B*27:02; KCNU1; ENSG00000215262; CTA
EEFSLQKSY

SEQ ID NO: 31864 - protein, 9 aa, Homo sapiens
  misc_feature: Table A; Target 31864; HLA-B*49:01; KCNU1; ENSG00000215262; CTA
EEFSLQKSY

SEQ ID NO: 31865 - protein, 9 aa, Homo sapiens
  misc_feature: Table A; Target 31865; HLA-C*16:04; KCNU1; ENSG00000215262; CTA
EEFSLQKSY

SEQ ID NO: 31866 - protein, 10 aa, Homo sapiens
  misc_feature: Table A; Target 31866; HLA-B*44:02; KCNU1; ENSG00000215262; CTA
EELNPENKRF

SEQ ID NO: 31867 - protein, 10 aa, Homo sapiens
  misc_feature: Table A; Target 31867; HLA-B*44:03; KCNU1; ENSG00000215262; CTA
EELNPENKRF

SEQ ID NO: 31868 - protein, 10 aa, Homo sapiens
  misc_feature: Table A; Target 31868; HLA-C*16:04; KCNU1; ENSG00000215262; CTA
EELNPENKRF

SEQ ID NO: 31869 - protein, 9 aa, Homo sapiens
  misc_feature: Table A; Target 31869; HLA-B*39:01; KCNU1; ENSG00000215262; CTA
EGSLQETNL

SEQ ID NO: 31870 - protein, 9 aa, Homo sapiens
  misc_feature: Table A; Target 31870; HLA-A*68:02; KCNU1; ENSG00000215262; CTA
EINTEIVFL

SEQ ID NO: 31871 - protein, 11 aa, Homo sapiens
  misc_feature: Table A; Target 31871; HLA-A*25:01; KCNU1; ENSG00000215262; CTA
EIQAAFILSSF

SEQ ID NO: 31872 - protein, 11 aa, Homo sapiens
  misc_feature: Table A; Target 31872; HLA-A*26:01; KCNU1; ENSG00000215262; CTA
EIQAAFILSSF

SEQ ID NO: 31873 - protein, 9 aa, Homo sapiens
  misc_feature: Table A; Target 31873; HLA-A*01:01; KCNU1; ENSG00000215262; CTA
ELETIFKCY

SEQ ID NO: 31874 - protein, 9 aa, Homo sapiens
  misc_feature: Table A; Target 31874; HLA-A*26:01; KCNU1; ENSG00000215262; CTA
ELFTSGTIA

SEQ ID NO: 31875 - protein, 10 aa, Homo sapiens
  misc_feature: Table A; Target 31875; HLA-A*25:01; KCNU1; ENSG00000215262; CTA
ELFTSGTIAR

SEQ ID NO: 31876 - protein, 10 aa, Homo sapiens
  misc_feature: Table A; Target 31876; HLA-A*26:01; KCNU1; ENSG00000215262; CTA
ELFTSGTIAR

SEQ ID NO: 31877 - protein, 10 aa, Homo sapiens
  misc_feature: Table A; Target 31877; HLA-A*33:01; KCNU1; ENSG00000215262; CTA
ELFTSGTIAR

SEQ ID NO: 31878 - protein, 10 aa, Homo sapiens
  misc_feature: Table A; Target 31878; HLA-A*33:03; KCNU1; ENSG00000215262; CTA
ELFTSGTIAR

SEQ ID NO: 31879 - protein, 10 aa, Homo sapiens
  misc_feature: Table A; Target 31879; HLA-A*68:01; KCNU1; ENSG00000215262; CTA
ELFTSGTIAR

SEQ ID NO: 31880 - protein, 10 aa, Homo sapiens
  misc_feature: Table A; Target 31880; HLA-A*68:02; KCNU1; ENSG00000215262; CTA
ELFTSGTIAR

SEQ ID NO: 31881 - protein, 10 aa, Homo sapiens
  misc_feature: Table A; Target 31881; HLA-C*07:06; KCNU1; ENSG00000215262; CTA
ELFTSGTIAR

SEQ ID NO: 31882 - protein, 10 aa, Homo sapiens
  misc_feature: Table A; Target 31882; HLA-A*33:03; KCNU1; ENSG00000215262; CTA
ELKNPSNIHF

SEQ ID NO: 31883 - protein, 9 aa, Homo sapiens
  misc_feature: Table A; Target 31883; HLA-A*02:07; KCNU1; ENSG00000215262; CTA
ELPQILQIL

SEQ ID NO: 31884 - protein, 9 aa, Homo sapiens
  misc_feature: Table A; Target 31884; HLA-A*24:02; KCNU1; ENSG00000215262; CTA
ELPQILQIL

SEQ ID NO: 31885 - protein, 9 aa, Homo sapiens
  misc_feature: Table A; Target 31885; HLA-A*68:02; KCNU1; ENSG00000215262; CTA
ELPQILQIL

SEQ ID NO: 31886 - protein, 10 aa, Homo sapiens
  misc_feature: Table A; Target 31886; HLA-A*68:02; KCNU1; ENSG00000215262; CTA
ELPQILQILR

SEQ ID NO: 31887 - protein, 9 aa, Homo sapiens
  misc_feature: Table A; Target 31887; HLA-A*23:01; KCNU1; ENSG00000215262; CTA
EMLLSAQTF

SEQ ID NO: 31888 - protein, 9 aa, Homo sapiens
  misc_feature: Table A; Target 31888; HLA-A*24:02; KCNU1; ENSG00000215262; CTA
EMLLSAQTF

SEQ ID NO: 31889 - protein, 9 aa, Homo sapiens
  misc_feature: Table A; Target 31889; HLA-A*33:03; KCNU1; ENSG00000215262; CTA
EMLLSAQTF

SEQ ID NO: 31890 - protein, 9 aa, Homo sapiens
  misc_feature: Table A; Target 31890; HLA-B*18:01; KCNU1; ENSG00000215262; CTA
EMLLSAQTF

SEQ ID NO: 31891 - protein, 9 aa, Homo sapiens
  misc_feature: Table A; Target 31891; HLA-B*44:02; KCNU1; ENSG00000215262; CTA
EMLLSAQTF

SEQ ID NO: 31892 - protein, 9 aa, Homo sapiens
  misc_feature: Table A; Target 31892; HLA-C*14:02; KCNU1; ENSG00000215262; CTA
EMLLSAQTF

SEQ ID NO: 31893 - protein, 9 aa, Homo sapiens
  misc_feature: Table A; Target 31893; HLA-A*24:02; KCNU1; ENSG00000215262; CTA
EMNSIVDIF

SEQ ID NO: 31894 - protein, 9 aa, Homo sapiens
  misc_feature: Table A; Target 31894; HLA-A*26:01; KCNU1; ENSG00000215262; CTA
EMNSIVDIF

SEQ ID NO: 31895 - protein, 9 aa, Homo sapiens
  misc_feature: Table A; Target 31895; HLA-A*33:03; KCNU1; ENSG00000215262; CTA
EMNSIVDIF

SEQ ID NO: 31896 - protein, 9 aa, Homo sapiens
  misc_feature: Table A; Target 31896; HLA-A*11:01; KCNU1; ENSG00000215262; CTA
EMVELFANK

SEQ ID NO: 31897 - protein, 9 aa, Homo sapiens
  misc_feature: Table A; Target 31897; HLA-A*25:01; KCNU1; ENSG00000215262; CTA
EMVELFANK

SEQ ID NO: 31898 - protein, 9 aa, Homo sapiens
  misc_feature: Table A; Target 31898; HLA-A*26:01; KCNU1; ENSG00000215262; CTA
EMVELFANK

SEQ ID NO: 31899 - protein, 9 aa, Homo sapiens
  misc_feature: Table A; Target 31899; HLA-A*33:01; KCNU1; ENSG00000215262; CTA
EMVELFANK

SEQ ID NO: 31900 - protein, 9 aa, Homo sapiens
  misc_feature: Table A; Target 31900; HLA-A*33:03; KCNU1; ENSG00000215262; CTA
EMVELFANK

SEQ ID NO: 31901 - protein, 9 aa, Homo sapiens
  misc_feature: Table A; Target 31901; HLA-A*68:01; KCNU1; ENSG00000215262; CTA
EMVELFANK

SEQ ID NO: 31902 - protein, 9 aa, Homo sapiens
  misc_feature: Table A; Target 31902; HLA-A*68:02; KCNU1; ENSG00000215262; CTA
EMVELFANK

SEQ ID NO: 31903 - protein, 9 aa, Homo sapiens
  misc_feature: Table A; Target 31903; HLA-B*27:02; KCNU1; ENSG00000215262; CTA
EMVELFANK

SEQ ID NO: 31904 - protein, 9 aa, Homo sapiens
  misc_feature: Table A; Target 31904; HLA-C*07:06; KCNU1; ENSG00000215262; CTA
EMVELFANK

SEQ ID NO: 31905 - protein, 10 aa, Homo sapiens
  misc_feature: Table A; Target 31905; HLA-A*33:03; KCNU1; ENSG00000215262; CTA
EMVELFANKR

SEQ ID NO: 31906 - protein, 10 aa, Homo sapiens
  misc_feature: Table A; Target 31906; HLA-A*68:01; KCNU1; ENSG00000215262; CTA
EMVELFANKR

SEQ ID NO: 31907 - protein, 10 aa, Homo sapiens
  misc_feature: Table A; Target 31907; HLA-C*07:06; KCNU1; ENSG00000215262; CTA
EMVELFANKR

SEQ ID NO: 31908 - protein, 9 aa, Homo sapiens
  misc_feature: Table A; Target 31908; HLA-A*33:01; KCNU1; ENSG00000215262; CTA
ENKRFVITR

SEQ ID NO: 31909 - protein, 9 aa, Homo sapiens
  misc_feature: Table A; Target 31909; HLA-A*33:03; KCNU1; ENSG00000215262; CTA
ENKRFVITR

SEQ ID NO: 31910 - protein, 10 aa, Homo sapiens
  misc_feature: Table A; Target 31910; HLA-B*39:01; KCNU1; ENSG00000215262; CTA
EQLGGLEGSL

SEQ ID NO: 31911 - protein, 9 aa, Homo sapiens
  misc_feature: Table A; Target 31911; HLA-A*33:03; KCNU1; ENSG00000215262; CTA
EQNKKVMPK

SEQ ID NO: 31912 - protein, 10 aa, Homo sapiens
  misc_feature: Table A; Target 31912; HLA-A*11:01; KCNU1; ENSG00000215262; CTA
ETILSDVNPR

SEQ ID NO: 31913 - protein, 10 aa, Homo sapiens
  misc_feature: Table A; Target 31913; HLA-A*26:01; KCNU1; ENSG00000215262; CTA
ETILSDVNPR

SEQ ID NO: 31914 - protein, 10 aa, Homo sapiens
  misc_feature: Table A; Target 31914; HLA-A*33:01; KCNU1; ENSG00000215262; CTA
ETILSDVNPR

SEQ ID NO: 31915 - protein, 10 aa, Homo sapiens
  misc_feature: Table A; Target 31915; HLA-A*33:03; KCNU1; ENSG00000215262; CTA
ETILSDVNPR

SEQ ID NO: 31916 - protein, 10 aa, Homo sapiens
  misc_feature: Table A; Target 31916; HLA-A*68:01; KCNU1; ENSG00000215262; CTA
ETILSDVNPR

SEQ ID NO: 31917 - protein, 10 aa, Homo sapiens
  misc_feature: Table A; Target 31917; HLA-B*27:02; KCNU1; ENSG00000215262; CTA
ETILSDVNPR

SEQ ID NO: 31918 - protein, 10 aa, Homo sapiens
  misc_feature: Table A; Target 31918; HLA-C*07:06; KCNU1; ENSG00000215262; CTA
ETILSDVNPR

SEQ ID NO: 31919 - protein, 8 aa, Homo sapiens
  misc_feature: Table A; Target 31919; HLA-A*26:01; KCNU1; ENSG00000215262; CTA
ETLYSPVY

SEQ ID NO: 31920 - protein, 8 aa, Homo sapiens
  misc_feature: Table A; Target 31920; HLA-B*18:01; KCNU1; ENSG00000215262; CTA
ETLYSPVY

SEQ ID NO: 31921 - protein, 10 aa, Homo sapiens
  misc_feature: Table A; Target 31921; HLA-A*01:01; KCNU1; ENSG00000215262; CTA
ETLYSPVYSY

SEQ ID NO: 31922 - protein, 10 aa, Homo sapiens
  misc_feature: Table A; Target 31922; HLA-A*25:01; KCNU1; ENSG00000215262; CTA
ETLYSPVYSY

SEQ ID NO: 31923 - protein, 10 aa, Homo sapiens
  misc_feature: Table A; Target 31923; HLA-A*26:01; KCNU1; ENSG00000215262; CTA
ETLYSPVYSY

SEQ ID NO: 31924 - protein, 10 aa, Homo sapiens
  misc_feature: Table A; Target 31924; HLA-A*29:02; KCNU1; ENSG00000215262; CTA
ETLYSPVYSY

SEQ ID NO: 31925 - protein, 10 aa, Homo sapiens
  misc_feature: Table A; Target 31925; HLA-A*25:01; KCNU1; ENSG00000215262; CTA
ETNLHLSTAF

SEQ ID NO: 31926 - protein, 10 aa, Homo sapiens
  misc_feature: Table A; Target 31926; HLA-A*26:01; KCNU1; ENSG00000215262; CTA
ETNLHLSTAF

SEQ ID NO: 31927 - protein, 10 aa, Homo sapiens
  misc_feature: Table A; Target 31927; HLA-A*33:01; KCNU1; ENSG00000215262; CTA
ETNLHLSTAF

SEQ ID NO: 31928 - protein, 10 aa, Homo sapiens
  misc_feature: Table A; Target 31928; HLA-A*33:03; KCNU1; ENSG00000215262; CTA
ETNLHLSTAF

SEQ ID NO: 31929 - protein, 10 aa, Homo sapiens
  misc_feature: Table A; Target 31929; HLA-B*44:02; KCNU1; ENSG00000215262; CTA
ETNLHLSTAF

SEQ ID NO: 31930 - protein, 10 aa, Homo sapiens
  misc_feature: Table A; Target 31930; HLA-B*44:03; KCNU1; ENSG00000215262; CTA
ETNLHLSTAF

SEQ ID NO: 31931 - protein, 9 aa, Homo sapiens
  misc_feature: Table A; Target 31931; HLA-A*26:01; KCNU1; ENSG00000215262; CTA
ETPGYTNGH

SEQ ID NO: 31932 - protein, 11 aa, Homo sapiens
  misc_feature: Table A; Target 31932; HLA-A*25:01; KCNU1; ENSG00000215262; CTA
ETPPSLELETI

SEQ ID NO: 31933 - protein, 11 aa, Homo sapiens
  misc_feature: Table A; Target 31933; HLA-A*68:02; KCNU1; ENSG00000215262; CTA
ETPPSLELETI

SEQ ID NO: 31934 - protein, 9 aa, Homo sapiens
  misc_feature: Table A; Target 31934; HLA-A*02:01; KCNU1; ENSG00000215262; CTA
ETWEDLPKM

SEQ ID NO: 31935 - protein, 9 aa, Homo sapiens
  misc_feature: Table A; Target 31935; HLA-A*02:07; KCNU1; ENSG00000215262; CTA
ETWEDLPKM

SEQ ID NO: 31936 - protein, 9 aa, Homo sapiens
  misc_feature: Table A; Target 31936; HLA-A*25:01; KCNU1; ENSG00000215262; CTA
ETWEDLPKM

SEQ ID NO: 31937 - protein, 9 aa, Homo sapiens
  misc_feature: Table A; Target 31937; HLA-A*26:01; KCNU1; ENSG00000215262; CTA
ETWEDLPKM

SEQ ID NO: 31938 - protein, 9 aa, Homo sapiens
  misc_feature: Table A; Target 31938; HLA-A*33:03; KCNU1; ENSG00000215262; CTA
ETWEDLPKM

SEQ ID NO: 31939 - protein, 9 aa, Homo sapiens
  misc_feature: Table A; Target 31939; HLA-A*68:02; KCNU1; ENSG00000215262; CTA
ETWEDLPKM

SEQ ID NO: 31940 - protein, 9 aa, Homo sapiens
  misc_feature: Table A; Target 31940; HLA-A*26:01; KCNU1; ENSG00000215262; CTA
EVYDEDPFA

SEQ ID NO: 31941 - protein, 10 aa, Homo sapiens
  misc_feature: Table A; Target 31941; HLA-A*01:01; KCNU1; ENSG00000215262; CTA
EVYDEDPFAY

SEQ ID NO: 31942 - protein, 10 aa, Homo sapiens
  misc_feature: Table A; Target 31942; HLA-A*25:01; KCNU1; ENSG00000215262; CTA
EVYDEDPFAY

SEQ ID NO: 31943 - protein, 10 aa, Homo sapiens
  misc_feature: Table A; Target 31943; HLA-A*29:02; KCNU1; ENSG00000215262; CTA
EVYDEDPFAY

SEQ ID NO: 31944 - protein, 10 aa, Homo sapiens
  misc_feature: Table A; Target 31944; HLA-A*30:02; KCNU1; ENSG00000215262; CTA
EVYDEDPFAY

SEQ ID NO: 31945 - protein, 10 aa, Homo sapiens
  misc_feature: Table A; Target 31945; HLA-A*33:01; KCNU1; ENSG00000215262; CTA
EVYDEDPFAY

SEQ ID NO: 31946 - protein, 10 aa, Homo sapiens
  misc_feature: Table A; Target 31946; HLA-A*33:03; KCNU1; ENSG00000215262; CTA
EVYDEDPFAY

SEQ ID NO: 31947 - protein, 10 aa, Homo sapiens
  misc_feature: Table A; Target 31947; HLA-A*68:01; KCNU1; ENSG00000215262; CTA
EVYDEDPFAY

SEQ ID NO: 31948 - protein, 10 aa, Homo sapiens
  misc_feature: Table A; Target 31948; HLA-B*15:01; KCNU1; ENSG00000215262; CTA
EVYDEDPFAY

SEQ ID NO: 31949 - protein, 10 aa, Homo sapiens
  misc_feature: Table A; Target 31949; HLA-B*18:01; KCNU1; ENSG00000215262; CTA
EVYDEDPFAY

SEQ ID NO: 31950 - protein, 10 aa, Homo sapiens
  misc_feature: Table A; Target 31950; HLA-B*35:01; KCNU1; ENSG00000215262; CTA
EVYDEDPFAY

SEQ ID NO: 31951 - protein, 10 aa, Homo sapiens
  misc_feature: Table A; Target 31951; HLA-C*07:06; KCNU1; ENSG00000215262; CTA
EVYDEDPFAY

SEQ ID NO: 31952 - protein, 10 aa, Homo sapiens
  misc_feature: Table A; Target 31952; HLA-A*24:02; KCNU1; ENSG00000215262; CTA
EYKSLFTDGF

SEQ ID NO: 31953 - protein, 9 aa, Homo sapiens
  misc_feature: Table A; Target 31953; HLA-B*35:03; KCNU1; ENSG00000215262; CTA
FAGMSFPEV

SEQ ID NO: 31954 - protein, 9 aa, Homo sapiens
  misc_feature: Table A; Target 31954; HLA-B*46:01; KCNU1; ENSG00000215262; CTA
FAGMSFPEV

SEQ ID NO: 31955 - protein, 9 aa, Homo sapiens
  misc_feature: Table A; Target 31955; HLA-B*51:01; KCNU1; ENSG00000215262; CTA
FAGMSFPEV

SEQ ID NO: 31956 - protein, 9 aa, Homo sapiens
  misc_feature: Table A; Target 31956; HLA-B*54:01; KCNU1; ENSG00000215262; CTA
FAGMSFPEV

SEQ ID NO: 31957 - protein, 9 aa, Homo sapiens
  misc_feature: Table A; Target 31957; HLA-C*02:02; KCNU1; ENSG00000215262; CTA
FAGMSFPEV

SEQ ID NO: 31958 - protein, 9 aa, Homo sapiens
  misc_feature: Table A; Target 31958; HLA-C*03:03; KCNU1; ENSG00000215262; CTA
FAGMSFPEV

SEQ ID NO: 31959 - protein, 9 aa, Homo sapiens
  misc_feature: Table A; Target 31959; HLA-C*03:04; KCNU1; ENSG00000215262; CTA
FAGMSFPEV

SEQ ID NO: 31960 - protein, 9 aa, Homo sapiens
  misc_feature: Table A; Target 31960; HLA-C*12:03; KCNU1; ENSG00000215262; CTA
FAGMSFPEV

SEQ ID NO: 31961 - protein, 9 aa, Homo sapiens
  misc_feature: Table A; Target 31961; HLA-C*16:04; KCNU1; ENSG00000215262; CTA
FAGMSFPEV

SEQ ID NO: 31962 - protein, 8 aa, Homo sapiens
  misc_feature: Table A; Target 31962; HLA-B*35:01; KCNU1; ENSG00000215262; CTA
FANYIPEM

SEQ ID NO: 31963 - protein, 8 aa, Homo sapiens
  misc_feature: Table A; Target 31963; HLA-B*46:01; KCNU1; ENSG00000215262; CTA
FANYIPEM

SEQ ID NO: 31964 - protein, 8 aa, Homo sapiens
  misc_feature: Table A; Target 31964; HLA-B*51:01; KCNU1; ENSG00000215262; CTA
FANYIPEM

SEQ ID NO: 31965 - protein, 8 aa, Homo sapiens
  misc_feature: Table A; Target 31965; HLA-B*54:01; KCNU1; ENSG00000215262; CTA
FANYIPEM

SEQ ID NO: 31966 - protein, 8 aa, Homo sapiens
  misc_feature: Table A; Target 31966; HLA-C*03:03; KCNU1; ENSG00000215262; CTA
FANYIPEM

SEQ ID NO: 31967 - protein, 8 aa, Homo sapiens
  misc_feature: Table A; Target 31967; HLA-C*03:04; KCNU1; ENSG00000215262; CTA
FANYIPEM

SEQ ID NO: 31968 - protein, 9 aa, Homo sapiens
  misc_feature: Table A; Target 31968; HLA-A*68:02; KCNU1; ENSG00000215262; CTA
FANYIPEMV

SEQ ID NO: 31969 - protein, 9 aa, Homo sapiens
  misc_feature: Table A; Target 31969; HLA-B*54:01; KCNU1; ENSG00000215262; CTA
FANYIPEMV

SEQ ID NO: 31970 - protein, 9 aa, Homo sapiens
  misc_feature: Table A; Target 31970; HLA-B*54:01; KCNU1; ENSG00000215262; CTA
FCAIPFSTA

SEQ ID NO: 31971 - protein, 9 aa, Homo sapiens
  misc_feature: Table A; Target 31971; HLA-C*03:03; KCNU1; ENSG00000215262; CTA
FCAIPFSTA

SEQ ID NO: 31972 - protein, 8 aa, Homo sapiens
  misc_feature: Table A; Target 31972; HLA-B*18:01; KCNU1; ENSG00000215262; CTA
FESIYLVM

SEQ ID NO: 31973 - protein, 8 aa, Homo sapiens
  misc_feature: Table A; Target 31973; HLA-B*49:01; KCNU1; ENSG00000215262; CTA
FESIYLVM

SEQ ID NO: 31974 - protein, 9 aa, Homo sapiens
  misc_feature: Table A; Target 31974; HLA-B*49:01; KCNU1; ENSG00000215262; CTA
FESIYLVMA

SEQ ID NO: 31975 - protein, 10 aa, Homo sapiens
  misc_feature: Table A; Target 31975; HLA-A*29:02; KCNU1; ENSG00000215262; CTA
FFSFYFGLRF

SEQ ID NO: 31976 - protein, 9 aa, Homo sapiens
  misc_feature: Table A; Target 31976; HLA-A*32:01; KCNU1; ENSG00000215262; CTA
FGDAHSAPM

SEQ ID NO: 31977 - protein, 9 aa, Homo sapiens
  misc_feature: Table A; Target 31977; HLA-B*35:01; KCNU1; ENSG00000215262; CTA
FGDAHSAPM

SEQ ID NO: 31978 - protein, 9 aa, Homo sapiens
  misc_feature: Table A; Target 31978; HLA-B*35:03; KCNU1; ENSG00000215262; CTA
FGDAHSAPM

SEQ ID NO: 31979 - protein, 9 aa, Homo sapiens
  misc_feature: Table A; Target 31979; HLA-B*37:01; KCNU1; ENSG00000215262; CTA
FGDAHSAPM

SEQ ID NO: 31980 - protein, 9 aa, Homo sapiens
  misc_feature: Table A; Target 31980; HLA-B*46:01; KCNU1; ENSG00000215262; CTA
FGDAHSAPM

SEQ ID NO: 31981 - protein, 9 aa, Homo sapiens
  misc_feature: Table A; Target 31981; HLA-B*55:01; KCNU1; ENSG00000215262; CTA
FGDAHSAPM

SEQ ID NO: 31982 - protein, 9 aa, Homo sapiens
  misc_feature: Table A; Target 31982; HLA-C*02:02; KCNU1; ENSG00000215262; CTA
FGDAHSAPM

SEQ ID NO: 31983 - protein, 9 aa, Homo sapiens
  misc_feature: Table A; Target 31983; HLA-C*03:03; KCNU1; ENSG00000215262; CTA
FGDAHSAPM

SEQ ID NO: 31984 - protein, 9 aa, Homo sapiens
  misc_feature: Table A; Target 31984; HLA-C*03:04; KCNU1; ENSG00000215262; CTA
FGDAHSAPM

SEQ ID NO: 31985 - protein, 9 aa, Homo sapiens
  misc_feature: Table A; Target 31985; HLA-C*04:01; KCNU1; ENSG00000215262; CTA
FGDAHSAPM

SEQ ID NO: 31986 - protein, 9 aa, Homo sapiens
  misc_feature: Table A; Target 31986; HLA-C*05:01; KCNU1; ENSG00000215262; CTA
FGDAHSAPM

SEQ ID NO: 31987 - protein, 9 aa, Homo sapiens
  misc_feature: Table A; Target 31987; HLA-C*07:04; KCNU1; ENSG00000215262; CTA
FGDAHSAPM

SEQ ID NO: 31988 - protein, 9 aa, Homo sapiens
  misc_feature: Table A; Target 31988; HLA-C*12:03; KCNU1; ENSG00000215262; CTA
FGDAHSAPM

SEQ ID NO: 31989 - protein, 9 aa, Homo sapiens
  misc_feature: Table A; Target 31989; HLA-C*16:01; KCNU1; ENSG00000215262; CTA
FGDAHSAPM

SEQ ID NO: 31990 - protein, 11 aa, Homo sapiens
  misc_feature: Table A; Target 31990; HLA-C*05:01; KCNU1; ENSG00000215262; CTA
FGDAHSAPMGL

SEQ ID NO: 31991 - protein, 10 aa, Homo sapiens
  misc_feature: Table A; Target 31991; HLA-A*02:07; KCNU1; ENSG00000215262; CTA
FGDVVAKTSL

SEQ ID NO: 31992 - protein, 10 aa, Homo sapiens
  misc_feature: Table A; Target 31992; HLA-B*35:03; KCNU1; ENSG00000215262; CTA
FGDVVAKTSL

SEQ ID NO: 31993 - protein, 10 aa, Homo sapiens
  misc_feature: Table A; Target 31993; HLA-B*38:01; KCNU1; ENSG00000215262; CTA
FGDVVAKTSL

SEQ ID NO: 31994 - protein, 10 aa, Homo sapiens
  misc_feature: Table A; Target 31994; HLA-B*40:01; KCNU1; ENSG00000215262; CTA
FGDVVAKTSL

SEQ ID NO: 31995 - protein, 10 aa, Homo sapiens
  misc_feature: Table A; Target 31995; HLA-C*03:03; KCNU1; ENSG00000215262; CTA
FGDVVAKTSL

SEQ ID NO: 31996 - protein, 10 aa, Homo sapiens
  misc_feature: Table A; Target 31996; HLA-C*03:04; KCNU1; ENSG00000215262; CTA
FGDVVAKTSL

SEQ ID NO: 31997 - protein, 10 aa, Homo sapiens
  misc_feature: Table A; Target 31997; HLA-C*05:01; KCNU1; ENSG00000215262; CTA
FGDVVAKTSL

SEQ ID NO: 31998 - protein, 8 aa, Homo sapiens
  misc_feature: Table A; Target 31998; HLA-B*54:01; KCNU1; ENSG00000215262; CTA
FGLRFMAA

SEQ ID NO: 31999 - protein, 9 aa, Homo sapiens
  misc_feature: Table A; Target 31999; HLA-A*02:03; KCNU1; ENSG00000215262; CTA
FIAETPKDV

SEQ ID NO: 32000 - protein, 9 aa, Homo sapiens
  misc_feature: Table A; Target 32000; HLA-A*02:07; KCNU1; ENSG00000215262; CTA
FIAETPKDV

SEQ ID NO: 32001 - protein, 9 aa, Homo sapiens
  misc_feature: Table A; Target 32001; HLA-C*12:03; KCNU1; ENSG00000215262; CTA
FIAETPKDV

SEQ ID NO: 32002 - protein, 9 aa, Homo sapiens
  misc_feature: Table A; Target 32002; HLA-C*16:02; KCNU1; ENSG00000215262; CTA
FIAETPKDV

SEQ ID NO: 32003 - protein, 10 aa, Homo sapiens
  misc_feature: Table A; Target 32003; HLA-A*33:01; KCNU1; ENSG00000215262; CTA
FIAETPKDVR

SEQ ID NO: 32004 - protein, 10 aa, Homo sapiens
  misc_feature: Table A; Target 32004; HLA-A*33:03; KCNU1; ENSG00000215262; CTA
FIAETPKDVR

SEQ ID NO: 32005 - protein, 10 aa, Homo sapiens
  misc_feature: Table A; Target 32005; HLA-A*68:01; KCNU1; ENSG00000215262; CTA
FIAETPKDVR

SEQ ID NO: 32006 - protein, 10 aa, Homo sapiens
  misc_feature: Table A; Target 32006; HLA-A*68:02; KCNU1; ENSG00000215262; CTA
FIAETPKDVR

SEQ ID NO: 32007 - protein, 10 aa, Homo sapiens
  misc_feature: Table A; Target 32007; HLA-B*35:01; KCNU1; ENSG00000215262; CTA
FIAETPKDVR

SEQ ID NO: 32008 - protein, 10 aa, Homo sapiens
  misc_feature: Table A; Target 32008; HLA-C*07:06; KCNU1; ENSG00000215262; CTA
FIAETPKDVR

SEQ ID NO: 32009 - protein, 9 aa, Homo sapiens
  misc_feature: Table A; Target 32009; HLA-A*02:04; KCNU1; ENSG00000215262; CTA
FILSSFVTF

SEQ ID NO: 32010 - protein, 9 aa, Homo sapiens
  misc_feature: Table A; Target 32010; HLA-A*02:07; KCNU1; ENSG00000215262; CTA
FILSSFVTF

SEQ ID NO: 32011 - protein, 9 aa, Homo sapiens
  misc_feature: Table A; Target 32011; HLA-A*23:01; KCNU1; ENSG00000215262; CTA
FILSSFVTF

SEQ ID NO: 32012 - protein, 9 aa, Homo sapiens
  misc_feature: Table A; Target 32012; HLA-A*24:02; KCNU1; ENSG00000215262; CTA
FILSSFVTF

SEQ ID NO: 32013 - protein, 9 aa, Homo sapiens
  misc_feature: Table A; Target 32013; HLA-A*25:01; KCNU1; ENSG00000215262; CTA
FILSSFVTF

SEQ ID NO: 32014 - protein, 9 aa, Homo sapiens
  misc_feature: Table A; Target 32014; HLA-A*29:02; KCNU1; ENSG00000215262; CTA
FILSSFVTF

SEQ ID NO: 32015 - protein, 9 aa, Homo sapiens
  misc_feature: Table A; Target 32015; HLA-B*46:01; KCNU1; ENSG00000215262; CTA
FILSSFVTF

SEQ ID NO: 32016 - protein, 9 aa, Homo sapiens
  misc_feature: Table A; Target 32016; HLA-B*57:01; KCNU1; ENSG00000215262; CTA
FILSSFVTF

SEQ ID NO: 32017 - protein, 9 aa, Homo sapiens
  misc_feature: Table A; Target 32017; HLA-C*02:02; KCNU1; ENSG00000215262; CTA
FILSSFVTF

SEQ ID NO: 32018 - protein, 9 aa, Homo sapiens
  misc_feature: Table A; Target 32018; HLA-C*07:04; KCNU1; ENSG00000215262; CTA
FILSSFVTF

SEQ ID NO: 32019 - protein, 9 aa, Homo sapiens
  misc_feature: Table A; Target 32019; HLA-A*02:01; KCNU1; ENSG00000215262; CTA
FIPELITNC

SEQ ID NO: 32020 - protein, 9 aa, Homo sapiens
  misc_feature: Table A; Target 32020; HLA-A*02:07; KCNU1; ENSG00000215262; CTA
FIPELITNC

SEQ ID NO: 32021 - protein, 9 aa, Homo sapiens
  misc_feature: Table A; Target 32021; HLA-A*25:01; KCNU1; ENSG00000215262; CTA
FISGSAMKW

SEQ ID NO: 32022 - protein, 9 aa, Homo sapiens
  misc_feature: Table A; Target 32022; HLA-B*57:01; KCNU1; ENSG00000215262; CTA
FISGSAMKW

SEQ ID NO: 32023 - protein, 9 aa, Homo sapiens
  misc_feature: Table A; Target 32023; HLA-C*02:02; KCNU1; ENSG00000215262; CTA
FISGSAMKW

SEQ ID NO: 32024 - protein, 9 aa, Homo sapiens
  misc_feature: Table A; Target 32024; HLA-A*02:01; KCNU1; ENSG00000215262; CTA
FLDSLLATA

SEQ ID NO: 32025 - protein, 9 aa, Homo sapiens
  misc_feature: Table A; Target 32025; HLA-A*02:07; KCNU1; ENSG00000215262; CTA
FLDSLLATA

SEQ ID NO: 32026 - protein, 10 aa, Homo sapiens
  misc_feature: Table A; Target 32026; HLA-A*01:01; KCNU1; ENSG00000215262; CTA
FLDSLLATAF

SEQ ID NO: 32027 - protein, 10 aa, Homo sapiens
  misc_feature: Table A; Target 32027; HLA-A*02:07; KCNU1; ENSG00000215262; CTA
FLDSLLATAF

SEQ ID NO: 32028 - protein, 10 aa, Homo sapiens
  misc_feature: Table A; Target 32028; HLA-A*29:02; KCNU1; ENSG00000215262; CTA
FLDSLLATAF

SEQ ID NO: 32029 - protein, 11 aa, Homo sapiens
  misc_feature: Table A; Target 32029; HLA-A*01:01; KCNU1; ENSG00000215262; CTA
FLDSLLATAFY

SEQ ID NO: 32030 - protein, 9 aa, Homo sapiens
  misc_feature: Table A; Target 32030; HLA-A*02:01; KCNU1; ENSG00000215262; CTA
FLGETPPSL

SEQ ID NO: 32031 - protein, 9 aa, Homo sapiens
  misc_feature: Table A; Target 32031; HLA-A*02:03; KCNU1; ENSG00000215262; CTA
FLGETPPSL

SEQ ID NO: 32032 - protein, 9 aa, Homo sapiens
  misc_feature: Table A; Target 32032; HLA-A*02:04; KCNU1; ENSG00000215262; CTA
FLGETPPSL

SEQ ID NO: 32033 - protein, 9 aa, Homo sapiens
  misc_feature: Table A; Target 32033; HLA-A*02:07; KCNU1; ENSG00000215262; CTA
FLGETPPSL

SEQ ID NO: 32034 - protein, 9 aa, Homo sapiens
  misc_feature: Table A; Target 32034; HLA-A*23:01; KCNU1; ENSG00000215262; CTA
FLGETPPSL

SEQ ID NO: 32035 - protein, 9 aa, Homo sapiens
  misc_feature: Table A; Target 32035; HLA-A*30:01; KCNU1; ENSG00000215262; CTA
FLGETPPSL

SEQ ID NO: 32036 - protein, 9 aa, Homo sapiens
  misc_feature: Table A; Target 32036; HLA-A*32:01; KCNU1; ENSG00000215262; CTA
FLGETPPSL

SEQ ID NO: 32037 - protein, 9 aa, Homo sapiens
  misc_feature: Table A; Target 32037; HLA-B*13:02; KCNU1; ENSG00000215262; CTA
FLGETPPSL

SEQ ID NO: 32038 - protein, 9 aa, Homo sapiens
  misc_feature: Table A; Target 32038; HLA-B*35:03; KCNU1; ENSG00000215262; CTA
FLGETPPSL

SEQ ID NO: 32039 - protein, 9 aa, Homo sapiens
  misc_feature: Table A; Target 32039; HLA-B*38:01; KCNU1; ENSG00000215262; CTA
FLGETPPSL

SEQ ID NO: 32040 - protein, 9 aa, Homo sapiens
  misc_feature: Table A; Target 32040; HLA-B*39:01; KCNU1; ENSG00000215262; CTA
FLGETPPSL

SEQ ID NO: 32041 - protein, 9 aa, Homo sapiens
  misc_feature: Table A; Target 32041; HLA-B*40:01; KCNU1; ENSG00000215262; CTA
FLGETPPSL

SEQ ID NO: 32042 - protein, 9 aa, Homo sapiens
  misc_feature: Table A; Target 32042; HLA-B*46:01; KCNU1; ENSG00000215262; CTA
FLGETPPSL

SEQ ID NO: 32043 - protein, 9 aa, Homo sapiens
  misc_feature: Table A; Target 32043; HLA-B*55:01; KCNU1; ENSG00000215262; CTA
FLGETPPSL

SEQ ID NO: 32044 - protein, 9 aa, Homo sapiens
  misc_feature: Table A; Target 32044; HLA-C*01:02; KCNU1; ENSG00000215262; CTA
FLGETPPSL

SEQ ID NO: 32045 - protein, 9 aa, Homo sapiens
  misc_feature: Table A; Target 32045; HLA-C*02:02; KCNU1; ENSG00000215262; CTA
FLGETPPSL

SEQ ID NO: 32046 - protein, 9 aa, Homo sapiens
  misc_feature: Table A; Target 32046; HLA-C*03:03; KCNU1; ENSG00000215262; CTA
FLGETPPSL

SEQ ID NO: 32047 - protein, 9 aa, Homo sapiens
  misc_feature: Table A; Target 32047; HLA-C*03:04; KCNU1; ENSG00000215262; CTA
FLGETPPSL

SEQ ID NO: 32048 - protein, 9 aa, Homo sapiens
  misc_feature: Table A; Target 32048; HLA-C*05:01; KCNU1; ENSG00000215262; CTA
FLGETPPSL

SEQ ID NO: 32049 - protein, 9 aa, Homo sapiens
  misc_feature: Table A; Target 32049; HLA-C*07:04; KCNU1; ENSG00000215262; CTA
FLGETPPSL

SEQ ID NO: 32050 - protein, 9 aa, Homo sapiens
  misc_feature: Table A; Target 32050; HLA-C*14:02; KCNU1; ENSG00000215262; CTA
FLGETPPSL

SEQ ID NO: 32051 - protein, 9 aa, Homo sapiens
  misc_feature: Table A; Target 32051; HLA-C*16:01; KCNU1; ENSG00000215262; CTA
FLGETPPSL

SEQ ID NO: 32052 - protein, 11 aa, Homo sapiens
  misc_feature: Table A; Target 32052; HLA-A*02:01; KCNU1; ENSG00000215262; CTA
FLGETPPSLEL

SEQ ID NO: 32053 - protein, 9 aa, Homo sapiens
  misc_feature: Table A; Target 32053; HLA-A*02:03; KCNU1; ENSG00000215262; CTA
FLKMHLLLI

SEQ ID NO: 32054 - protein, 10 aa, Homo sapiens
  misc_feature: Table A; Target 32054; HLA-A*02:03; KCNU1; ENSG00000215262; CTA
FLRALRLLEL

SEQ ID NO: 32055 - protein, 9 aa, Homo sapiens
  misc_feature: Table A; Target 32055; HLA-A*02:03; KCNU1; ENSG00000215262; CTA
FLRDKSGEI

SEQ ID NO: 32056 - protein, 9 aa, Homo sapiens
  misc_feature: Table A; Target 32056; HLA-B*46:01; KCNU1; ENSG00000215262; CTA
FLRDKSGEI

SEQ ID NO: 32057 - protein, 8 aa, Homo sapiens
  misc_feature: Table A; Target 32057; HLA-A*02:07; KCNU1; ENSG00000215262; CTA
FLWNFPQI

SEQ ID NO: 32058 - protein, 9 aa, Homo sapiens
  misc_feature: Table A; Target 32058; HLA-A*29:02; KCNU1; ENSG00000215262; CTA
FLWNFPQIY

SEQ ID NO: 32059 - protein, 10 aa, Homo sapiens
  misc_feature: Table A; Target 32059; HLA-A*02:01; KCNU1; ENSG00000215262; CTA
FLWNFPQIYI

SEQ ID NO: 32060 - protein, 10 aa, Homo sapiens
  misc_feature: Table A; Target 32060; HLA-A*02:04; KCNU1; ENSG00000215262; CTA
FLWNFPQIYI

SEQ ID NO: 32061 - protein, 11 aa, Homo sapiens
  misc_feature: Table A; Target 32061; HLA-A*02:04; KCNU1; ENSG00000215262; CTA
FLWNFPQIYIL

SEQ ID NO: 32062 - protein, 9 aa, Homo sapiens
  misc_feature: Table A; Target 32062; HLA-B*35:01; KCNU1; ENSG00000215262; CTA
FPEVARLCF

SEQ ID NO: 32063 - protein, 10 aa, Homo sapiens
  misc_feature: Table A; Target 32063; HLA-B*57:01; KCNU1; ENSG00000215262; CTA
FQTKLRNETW

SEQ ID NO: 32064 - protein, 9 aa, Homo sapiens
  misc_feature: Table A; Target 32064; HLA-A*29:02; KCNU1; ENSG00000215262; CTA
FSFYFGLRF

SEQ ID NO: 32065 - protein, 9 aa, Homo sapiens
  misc_feature: Table A; Target 32065; HLA-B*57:01; KCNU1; ENSG00000215262; CTA
FSFYFGLRF

SEQ ID NO: 32066 - protein, 9 aa, Homo sapiens
  misc_feature: Table A; Target 32066; HLA-A*68:02; KCNU1; ENSG00000215262; CTA
FSGLIILLI

SEQ ID NO: 32067 - protein, 9 aa, Homo sapiens
  misc_feature: Table A; Target 32067; HLA-A*02:01; KCNU1; ENSG00000215262; CTA
FTAAGFIHL

SEQ ID NO: 32068 - protein, 9 aa, Homo sapiens
  misc_feature: Table A; Target 32068; HLA-A*02:04; KCNU1; ENSG00000215262; CTA
FTAAGFIHL

SEQ ID NO: 32069 - protein, 9 aa, Homo sapiens
  misc_feature: Table A; Target 32069; HLA-A*02:07; KCNU1; ENSG00000215262; CTA
FTAAGFIHL

SEQ ID NO: 32070 - protein, 9 aa, Homo sapiens
  misc_feature: Table A; Target 32070; HLA-A*11:01; KCNU1; ENSG00000215262; CTA
FTAAGFIHL

SEQ ID NO: 32071 - protein, 9 aa, Homo sapiens
  misc_feature: Table A; Target 32071; HLA-A*68:01; KCNU1; ENSG00000215262; CTA
FTAAGFIHL

SEQ ID NO: 32072 - protein, 9 aa, Homo sapiens
  misc_feature: Table A; Target 32072; HLA-A*68:02; KCNU1; ENSG00000215262; CTA
FTAAGFIHL

SEQ ID NO: 32073 - protein, 9 aa, Homo sapiens
  misc_feature: Table A; Target 32073; HLA-C*02:02; KCNU1; ENSG00000215262; CTA
FTAAGFIHL

SEQ ID NO: 32074 - protein, 9 aa, Homo sapiens
  misc_feature: Table A; Target 32074; HLA-C*03:03; KCNU1; ENSG00000215262; CTA
FTAAGFIHL

SEQ ID NO: 32075 - protein, 9 aa, Homo sapiens
  misc_feature: Table A; Target 32075; HLA-C*03:04; KCNU1; ENSG00000215262; CTA
FTAAGFIHL

SEQ ID NO: 32076 - protein, 9 aa, Homo sapiens
  misc_feature: Table A; Target 32076; HLA-C*07:04; KCNU1; ENSG00000215262; CTA
FTAAGFIHL

SEQ ID NO: 32077 - protein, 9 aa, Homo sapiens
  misc_feature: Table A; Target 32077; HLA-C*12:03; KCNU1; ENSG00000215262; CTA
FTAAGFIHL

SEQ ID NO: 32078 - protein, 10 aa, Homo sapiens
  misc_feature: Table A; Target 32078; HLA-A*68:02; KCNU1; ENSG00000215262; CTA
FTAAGFIHLV

SEQ ID NO: 32079 - protein, 8 aa, Homo sapiens
  misc_feature: Table A; Target 32079; HLA-C*05:01; KCNU1; ENSG00000215262; CTA
FTDGFCGL

SEQ ID NO: 32080 - protein, 9 aa, Homo sapiens
  misc_feature: Table A; Target 32080; HLA-A*01:01; KCNU1; ENSG00000215262; CTA
FTDGFCGLI

SEQ ID NO: 32081 - protein, 10 aa, Homo sapiens
  misc_feature: Table A; Target 32081; HLA-A*01:01; KCNU1; ENSG00000215262; CTA
FTIPPTFISY

SEQ ID NO: 32082 - protein, 10 aa, Homo sapiens
  misc_feature: Table A; Target 32082; HLA-A*25:01; KCNU1; ENSG00000215262; CTA
FTIPPTFISY

SEQ ID NO: 32083 - protein, 10 aa, Homo sapiens
  misc_feature: Table A; Target 32083; HLA-A*26:01; KCNU1; ENSG00000215262; CTA
FTIPPTFISY

SEQ ID NO: 32084 - protein, 10 aa, Homo sapiens
  misc_feature: Table A; Target 32084; HLA-A*29:02; KCNU1; ENSG00000215262; CTA
FTIPPTFISY

SEQ ID NO: 32085 - protein, 10 aa, Homo sapiens
  misc_feature: Table A; Target 32085; HLA-A*30:02; KCNU1; ENSG00000215262; CTA
FTIPPTFISY

SEQ ID NO: 32086 - protein, 10 aa, Homo sapiens
  misc_feature: Table A; Target 32086; HLA-A*32:01; KCNU1; ENSG00000215262; CTA
FTIPPTFISY

SEQ ID NO: 32087 - protein, 10 aa, Homo sapiens
  misc_feature: Table A; Target 32087; HLA-B*46:01; KCNU1; ENSG00000215262; CTA
FTIPPTFISY

SEQ ID NO: 32088 - protein, 10 aa, Homo sapiens
  misc_feature: Table A; Target 32088; HLA-B*57:01; KCNU1; ENSG00000215262; CTA
FTIPPTFISY

SEQ ID NO: 32089 - protein, 10 aa, Homo sapiens
  misc_feature: Table A; Target 32089; HLA-C*02:02; KCNU1; ENSG00000215262; CTA
FTIPPTFISY

SEQ ID NO: 32090 - protein, 10 aa, Homo sapiens
  misc_feature: Table A; Target 32090; HLA-C*12:03; KCNU1; ENSG00000215262; CTA
FTIPPTFISY

SEQ ID NO: 32091 - protein, 11 aa, Homo sapiens
  misc_feature: Table A; Target 32091; HLA-A*01:01; KCNU1; ENSG00000215262; CTA
FTIPPTFISYY

SEQ ID NO: 32092 - protein, 11 aa, Homo sapiens
  misc_feature: Table A; Target 32092; HLA-A*29:02; KCNU1; ENSG00000215262; CTA
FTIPPTFISYY

SEQ ID NO: 32093 - protein, 9 aa, Homo sapiens
  misc_feature: Table A; Target 32093; HLA-A*23:01; KCNU1; ENSG00000215262; CTA
FTLGSLILF

SEQ ID NO: 32094 - protein, 9 aa, Homo sapiens
  misc_feature: Table A; Target 32094; HLA-A*29:02; KCNU1; ENSG00000215262; CTA
FTLGSLILF

SEQ ID NO: 32095 - protein, 9 aa, Homo sapiens
  misc_feature: Table A; Target 32095; HLA-B*57:01; KCNU1; ENSG00000215262; CTA
FTLGSLILF

SEQ ID NO: 32096 - protein, 8 aa, Homo sapiens
  misc_feature: Table A; Target 32096; HLA-A*11:01; KCNU1; ENSG00000215262; CTA
FTSGTIAR

SEQ ID NO: 32097 - protein, 8 aa, Homo sapiens
  misc_feature: Table A; Target 32097; HLA-A*33:03; KCNU1; ENSG00000215262; CTA
FTSGTIAR

SEQ ID NO: 32098 - protein, 8 aa, Homo sapiens
  misc_feature: Table A; Target 32098; HLA-A*68:01; KCNU1; ENSG00000215262; CTA
FTSGTIAR

SEQ ID NO: 32099 - protein, 8 aa, Homo sapiens
  misc_feature: Table A; Target 32099; HLA-B*27:02; KCNU1; ENSG00000215262; CTA
FTSGTIAR

SEQ ID NO: 32100 - protein, 9 aa, Homo sapiens
  misc_feature: Table A; Target 32100; HLA-B*08:01; KCNU1; ENSG00000215262; CTA
FVEQNKKVM

SEQ ID NO: 32101 - protein, 9 aa, Homo sapiens
  misc_feature: Table A; Target 32101; HLA-B*35:01; KCNU1; ENSG00000215262; CTA
FVEQNKKVM

SEQ ID NO: 32102 - protein, 9 aa, Homo sapiens
  misc_feature: Table A; Target 32102; HLA-B*35:03; KCNU1; ENSG00000215262; CTA
FVEQNKKVM

SEQ ID NO: 32103 - protein, 9 aa, Homo sapiens
  misc_feature: Table A; Target 32103; HLA-C*03:03; KCNU1; ENSG00000215262; CTA
FVEQNKKVM

SEQ ID NO: 32104 - protein, 9 aa, Homo sapiens
  misc_feature: Table A; Target 32104; HLA-C*03:04; KCNU1; ENSG00000215262; CTA
FVEQNKKVM

SEQ ID NO: 32105 - protein, 9 aa, Homo sapiens
  misc_feature: Table A; Target 32105; HLA-C*05:01; KCNU1; ENSG00000215262; CTA
FVEQNKKVM

SEQ ID NO: 32106 - protein, 9 aa, Homo sapiens
  misc_feature: Table A; Target 32106; HLA-C*07:04; KCNU1; ENSG00000215262; CTA
FVEQNKKVM

SEQ ID NO: 32107 - protein, 9 aa, Homo sapiens
  misc_feature: Table A; Target 32107; HLA-C*12:03; KCNU1; ENSG00000215262; CTA
FVEQNKKVM

SEQ ID NO: 32108 - protein, 9 aa, Homo sapiens
  misc_feature: Table A; Target 32108; HLA-C*16:01; KCNU1; ENSG00000215262; CTA
FVEQNKKVM

SEQ ID NO: 32109 - protein, 9 aa, Homo sapiens
  misc_feature: Table A; Target 32109; HLA-C*16:02; KCNU1; ENSG00000215262; CTA
FVEQNKKVM

SEQ ID NO: 32110 - protein, 8 aa, Homo sapiens
  misc_feature: Table A; Target 32110; HLA-B*51:01; KCNU1; ENSG00000215262; CTA
FVGQVLVI

SEQ ID NO: 32111 - protein, 10 aa, Homo sapiens
  misc_feature: Table A; Target 32111; HLA-A*25:01; KCNU1; ENSG00000215262; CTA
FVITRPANEF

SEQ ID NO: 32112 - protein, 10 aa, Homo sapiens
  misc_feature: Table A; Target 32112; HLA-A*26:01; KCNU1; ENSG00000215262; CTA
FVITRPANEF

SEQ ID NO: 32113 - protein, 10 aa, Homo sapiens
  misc_feature: Table A; Target 32113; HLA-B*15:01; KCNU1; ENSG00000215262; CTA
FVITRPANEF

SEQ ID NO: 32114 - protein, 10 aa, Homo sapiens
  misc_feature: Table A; Target 32114; HLA-B*46:01; KCNU1; ENSG00000215262; CTA
FVITRPANEF

SEQ ID NO: 32115 - protein, 10 aa, Homo sapiens
  misc_feature: Table A; Target 32115; HLA-B*58:01; KCNU1; ENSG00000215262; CTA
FVITRPANEF

SEQ ID NO: 32116 - protein, 10 aa, Homo sapiens
  misc_feature: Table A; Target 32116; HLA-C*02:02; KCNU1; ENSG00000215262; CTA
FVITRPANEF

SEQ ID NO: 32117 - protein, 10 aa, Homo sapiens
  misc_feature: Table A; Target 32117; HLA-C*03:03; KCNU1; ENSG00000215262; CTA
FVITRPANEF

SEQ ID NO: 32118 - protein, 10 aa, Homo sapiens
  misc_feature: Table A; Target 32118; HLA-C*03:04; KCNU1; ENSG00000215262; CTA
FVITRPANEF

SEQ ID NO: 32119 - protein, 11 aa, Homo sapiens
  misc_feature: Table A; Target 32119; HLA-A*29:02; KCNU1; ENSG00000215262; CTA
FVLSIGSLIIY

SEQ ID NO: 32120 - protein, 10 aa, Homo sapiens
  misc_feature: Table A; Target 32120; HLA-A*03:01; KCNU1; ENSG00000215262; CTA
FVMPLRASNY

SEQ ID NO: 32121 - protein, 10 aa, Homo sapiens
  misc_feature: Table A; Target 32121; HLA-A*25:01; KCNU1; ENSG00000215262; CTA
FVMPLRASNY

SEQ ID NO: 32122 - protein, 10 aa, Homo sapiens
  misc_feature: Table A; Target 32122; HLA-A*26:01; KCNU1; ENSG00000215262; CTA
FVMPLRASNY

SEQ ID NO: 32123 - protein, 10 aa, Homo sapiens
  misc_feature: Table A; Target 32123; HLA-A*29:02; KCNU1; ENSG00000215262; CTA
FVMPLRASNY

SEQ ID NO: 32124 - protein, 10 aa, Homo sapiens
  misc_feature: Table A; Target 32124; HLA-A*30:02; KCNU1; ENSG00000215262; CTA
FVMPLRASNY

SEQ ID NO: 32125 - protein, 10 aa, Homo sapiens
  misc_feature: Table A; Target 32125; HLA-A*32:01; KCNU1; ENSG00000215262; CTA
FVMPLRASNY

SEQ ID NO: 32126 - protein, 10 aa, Homo sapiens
  misc_feature: Table A; Target 32126; HLA-B*15:01; KCNU1; ENSG00000215262; CTA
FVMPLRASNY

SEQ ID NO: 32127 - protein, 10 aa, Homo sapiens
  misc_feature: Table A; Target 32127; HLA-B*44:02; KCNU1; ENSG00000215262; CTA
FVMPLRASNY

SEQ ID NO: 32128 - protein, 10 aa, Homo sapiens
  misc_feature: Table A; Target 32128; HLA-B*46:01; KCNU1; ENSG00000215262; CTA
FVMPLRASNY

SEQ ID NO: 32129 - protein, 10 aa, Homo sapiens
  misc_feature: Table A; Target 32129; HLA-B*57:01; KCNU1; ENSG00000215262; CTA
FVMPLRASNY

SEQ ID NO: 32130 - protein, 10 aa, Homo sapiens
  misc_feature: Table A; Target 32130; HLA-C*02:02; KCNU1; ENSG00000215262; CTA
FVMPLRASNY

SEQ ID NO: 32131 - protein, 10 aa, Homo sapiens
  misc_feature: Table A; Target 32131; HLA-C*12:03; KCNU1; ENSG00000215262; CTA
FVMPLRASNY

SEQ ID NO: 32132 - protein, 10 aa, Homo sapiens
  misc_feature: Table A; Target 32132; HLA-C*16:01; KCNU1; ENSG00000215262; CTA
FVMPLRASNY

SEQ ID NO: 32133 - protein, 9 aa, Homo sapiens
  misc_feature: Table A; Target 32133; HLA-A*23:01; KCNU1; ENSG00000215262; CTA
FYNYHVLEL

SEQ ID NO: 32134 - protein, 9 aa, Homo sapiens
  misc_feature: Table A; Target 32134; HLA-A*24:02; KCNU1; ENSG00000215262; CTA
FYNYHVLEL

SEQ ID NO: 32135 - protein, 9 aa, Homo sapiens
  misc_feature: Table A; Target 32135; HLA-A*29:02; KCNU1; ENSG00000215262; CTA
FYNYHVLEL

SEQ ID NO: 32136 - protein, 9 aa, Homo sapiens
  misc_feature: Table A; Target 32136; HLA-C*14:02; KCNU1; ENSG00000215262; CTA
FYNYHVLEL

SEQ ID NO: 32137 - protein, 8 aa, Homo sapiens
  misc_feature: Table A; Target 32137; HLA-B*37:01; KCNU1; ENSG00000215262; CTA
GDAHSAPM

SEQ ID NO: 32138 - protein, 8 aa, Homo sapiens
  misc_feature: Table A; Target 32138; HLA-B*37:01; KCNU1; ENSG00000215262; CTA
GDLHAANI

SEQ ID NO: 32139 - protein, 9 aa, Homo sapiens
  misc_feature: Table A; Target 32139; HLA-A*30:01; KCNU1; ENSG00000215262; CTA
GDVVAKTSL

SEQ ID NO: 32140 - protein, 9 aa, Homo sapiens
  misc_feature: Table A; Target 32140; HLA-B*15:03; KCNU1; ENSG00000215262; CTA
GDVVAKTSL

SEQ ID NO: 32141 - protein, 9 aa, Homo sapiens
  misc_feature: Table A; Target 32141; HLA-B*37:01; KCNU1; ENSG00000215262; CTA
GDVVAKTSL

SEQ ID NO: 32142 - protein, 9 aa, Homo sapiens
  misc_feature: Table A; Target 32142; HLA-B*40:01; KCNU1; ENSG00000215262; CTA
GDVVAKTSL

SEQ ID NO: 32143 - protein, 9 aa, Homo sapiens
  misc_feature: Table A; Target 32143; HLA-B*40:02; KCNU1; ENSG00000215262; CTA
GDVVAKTSL

SEQ ID NO: 32144 - protein, 9 aa, Homo sapiens
  misc_feature: Table A; Target 32144; HLA-B*44:03; KCNU1; ENSG00000215262; CTA
GDVVAKTSL

SEQ ID NO: 32145 - protein, 9 aa, Homo sapiens
  misc_feature: Table A; Target 32145; HLA-B*49:01; KCNU1; ENSG00000215262; CTA
GDVVAKTSL

SEQ ID NO: 32146 - protein, 8 aa, Homo sapiens
  misc_feature: Table A; Target 32146; HLA-B*49:01; KCNU1; ENSG00000215262; CTA
GEINTEIV

SEQ ID NO: 32147 - protein, 9 aa, Homo sapiens
  misc_feature: Table A; Target 32147; HLA-A*30:01; KCNU1; ENSG00000215262; CTA
GEINTEIVF

SEQ ID NO: 32148 - protein, 9 aa, Homo sapiens
  misc_feature: Table A; Target 32148; HLA-B*15:01; KCNU1; ENSG00000215262; CTA
GEINTEIVF

SEQ ID NO: 32149 - protein, 9 aa, Homo sapiens
  misc_feature: Table A; Target 32149; HLA-B*15:03; KCNU1; ENSG00000215262; CTA
GEINTEIVF

SEQ ID NO: 32150 - protein, 9 aa, Homo sapiens
  misc_feature: Table A; Target 32150; HLA-B*18:01; KCNU1; ENSG00000215262; CTA
GEINTEIVF

SEQ ID NO: 32151 - protein, 9 aa, Homo sapiens
  misc_feature: Table A; Target 32151; HLA-B*27:02; KCNU1; ENSG00000215262; CTA
GEINTEIVF

SEQ ID NO: 32152 - protein, 9 aa, Homo sapiens
  misc_feature: Table A; Target 32152; HLA-B*37:01; KCNU1; ENSG00000215262; CTA
GEINTEIVF

SEQ ID NO: 32153 - protein, 9 aa, Homo sapiens
  misc_feature: Table A; Target 32153; HLA-B*40:02; KCNU1; ENSG00000215262; CTA
GEINTEIVF

SEQ ID NO: 32154 - protein, 9 aa, Homo sapiens
  misc_feature: Table A; Target 32154; HLA-B*44:02; KCNU1; ENSG00000215262; CTA
GEINTEIVF

SEQ ID NO: 32155 - protein, 9 aa, Homo sapiens
  misc_feature: Table A; Target 32155; HLA-B*49:01; KCNU1; ENSG00000215262; CTA
GEINTEIVF

SEQ ID NO: 32156 - protein, 9 aa, Homo sapiens
  misc_feature: Table A; Target 32156; HLA-C*02:02; KCNU1; ENSG00000215262; CTA
GEINTEIVF

SEQ ID NO: 32157 - protein, 9 aa, Homo sapiens
  misc_feature: Table A; Target 32157; HLA-C*16:04; KCNU1; ENSG00000215262; CTA
GEINTEIVF

SEQ ID NO: 32158 - protein, 10 aa, Homo sapiens
  misc_feature: Table A; Target 32158; HLA-A*30:01; KCNU1; ENSG00000215262; CTA
GEINTEIVFL

SEQ ID NO: 32159 - protein, 10 aa, Homo sapiens
  misc_feature: Table A; Target 32159; HLA-B*40:01; KCNU1; ENSG00000215262; CTA
GEINTEIVFL

SEQ ID NO: 32160 - protein, 10 aa, Homo sapiens
  misc_feature: Table A; Target 32160; HLA-B*44:02; KCNU1; ENSG00000215262; CTA
GEINTEIVFL

SEQ ID NO: 32161 - protein, 10 aa, Homo sapiens
  misc_feature: Table A; Target 32161; HLA-B*44:03; KCNU1; ENSG00000215262; CTA
GEINTEIVFL

SEQ ID NO: 32162 - protein, 10 aa, Homo sapiens
  misc_feature: Table A; Target 32162; HLA-B*49:01; KCNU1; ENSG00000215262; CTA
GEINTEIVFL

SEQ ID NO: 32163 - protein, 9 aa, Homo sapiens
  misc_feature: Table A; Target 32163; HLA-A*30:01; KCNU1; ENSG00000215262; CTA
GETPPSLEL

SEQ ID NO: 32164 - protein, 9 aa, Homo sapiens
  misc_feature: Table A; Target 32164; HLA-B*13:02; KCNU1; ENSG00000215262; CTA
GETPPSLEL

SEQ ID NO: 32165 - protein, 9 aa, Homo sapiens
  misc_feature: Table A; Target 32165; HLA-B*18:01; KCNU1; ENSG00000215262; CTA
GETPPSLEL

SEQ ID NO: 32166 - protein, 9 aa, Homo sapiens
  misc_feature: Table A; Target 32166; HLA-B*27:02; KCNU1; ENSG00000215262; CTA
GETPPSLEL

SEQ ID NO: 32167 - protein, 9 aa, Homo sapiens
  misc_feature: Table A; Target 32167; HLA-B*27:05; KCNU1; ENSG00000215262; CTA
GETPPSLEL

SEQ ID NO: 32168 - protein, 9 aa, Homo sapiens
  misc_feature: Table A; Target 32168; HLA-B*37:01; KCNU1; ENSG00000215262; CTA
GETPPSLEL

SEQ ID NO: 32169 - protein, 9 aa, Homo sapiens
  misc_feature: Table A; Target 32169; HLA-B*39:01; KCNU1; ENSG00000215262; CTA
GETPPSLEL

SEQ ID NO: 32170 - protein, 9 aa, Homo sapiens
  misc_feature: Table A; Target 32170; HLA-B*40:01; KCNU1; ENSG00000215262; CTA
GETPPSLEL

SEQ ID NO: 32171 - protein, 9 aa, Homo sapiens
  misc_feature: Table A; Target 32171; HLA-B*40:02; KCNU1; ENSG00000215262; CTA
GETPPSLEL

SEQ ID NO: 32172 - protein, 9 aa, Homo sapiens
  misc_feature: Table A; Target 32172; HLA-B*44:02; KCNU1; ENSG00000215262; CTA
GETPPSLEL

SEQ ID NO: 32173 - protein, 9 aa, Homo sapiens
  misc_feature: Table A; Target 32173; HLA-B*44:03; KCNU1; ENSG00000215262; CTA
GETPPSLEL

SEQ ID NO: 32174 - protein, 9 aa, Homo sapiens
  misc_feature: Table A; Target 32174; HLA-B*49:01; KCNU1; ENSG00000215262; CTA
GETPPSLEL

SEQ ID NO: 32175 - protein, 9 aa, Homo sapiens
  misc_feature: Table A; Target 32175; HLA-C*02:02; KCNU1; ENSG00000215262; CTA
GETPPSLEL

SEQ ID NO: 32176 - protein, 9 aa, Homo sapiens
  misc_feature: Table A; Target 32176; HLA-C*16:04; KCNU1; ENSG00000215262; CTA
GETPPSLEL

SEQ ID NO: 32177 - protein, 8 aa, Homo sapiens
  misc_feature: Table A; Target 32177; HLA-A*03:02; KCNU1; ENSG00000215262; CTA
GFGDVVAK

SEQ ID NO: 32178 - protein, 8 aa, Homo sapiens
  misc_feature: Table A; Target 32178; HLA-B*27:05; KCNU1; ENSG00000215262; CTA
GFGDVVAK

SEQ ID NO: 32179 - protein, 9 aa, Homo sapiens
  misc_feature: Table A; Target 32179; HLA-A*02:04; KCNU1; ENSG00000215262; CTA
GLCTFLTSL

SEQ ID NO: 32180 - protein, 10 aa, Homo sapiens
  misc_feature: Table A; Target 32180; HLA-A*02:04; KCNU1; ENSG00000215262; CTA
GLIILLIFRL

SEQ ID NO: 32181 - protein, 10 aa, Homo sapiens
  misc_feature: Table A; Target 32181; HLA-A*02:01; KCNU1; ENSG00000215262; CTA
GLILNPPPQV

SEQ ID NO: 32182 - protein, 10 aa, Homo sapiens
  misc_feature: Table A; Target 32182; HLA-A*02:03; KCNU1; ENSG00000215262; CTA
GLILNPPPQV

SEQ ID NO: 32183 - protein, 9 aa, Homo sapiens
  misc_feature: Table A; Target 32183; HLA-A*02:04; KCNU1; ENSG00000215262; CTA
GLLSLHETI

SEQ ID NO: 32184 - protein, 9 aa, Homo sapiens
  misc_feature: Table A; Target 32184; HLA-B*13:02; KCNU1; ENSG00000215262; CTA
GLLSLHETI

SEQ ID NO: 32185 - protein, 10 aa, Homo sapiens
  misc_feature: Table A; Target 32185; HLA-A*02:01; KCNU1; ENSG00000215262; CTA
GLLSLHETIL

SEQ ID NO: 32186 - protein, 10 aa, Homo sapiens
  misc_feature: Table A; Target 32186; HLA-A*02:04; KCNU1; ENSG00000215262; CTA
GLLSLHETIL

SEQ ID NO: 32187 - protein, 9 aa, Homo sapiens
  misc_feature: Table A; Target 32187; HLA-A*02:03; KCNU1; ENSG00000215262; CTA
GLRNFVMPL

SEQ ID NO: 32188 - protein, 11 aa, Homo sapiens
  misc_feature: Table A; Target 32188; HLA-A*02:04; KCNU1; ENSG00000215262; CTA
GLYRIIDEEEL

SEQ ID NO: 32189 - protein, 9 aa, Homo sapiens
  misc_feature: Table A; Target 32189; HLA-C*07:06; KCNU1; ENSG00000215262; CTA
GMSFPEVAR

SEQ ID NO: 32190 - protein, 8 aa, Homo sapiens
  misc_feature: Table A; Target 32190; HLA-A*02:01; KCNU1; ENSG00000215262; CTA
GQDSPPRV

SEQ ID NO: 32191 - protein, 8 aa, Homo sapiens
  misc_feature: Table A; Target 32191; HLA-B*13:02; KCNU1; ENSG00000215262; CTA
GQDSPPRV

SEQ ID NO: 32192 - protein, 8 aa, Homo sapiens
  misc_feature: Table A; Target 32192; HLA-C*05:01; KCNU1; ENSG00000215262; CTA
GQDSPPRV

SEQ ID NO: 32193 - protein, 10 aa, Homo sapiens
  misc_feature: Table A; Target 32193; HLA-B*27:05; KCNU1; ENSG00000215262; CTA
GQDSPPRVSA

SEQ ID NO: 32194 - protein, 9 aa, Homo sapiens
  misc_feature: Table A; Target 32194; HLA-B*13:02; KCNU1; ENSG00000215262; CTA
GQFRDHIEM

SEQ ID NO: 32195 - protein, 9 aa, Homo sapiens
  misc_feature: Table A; Target 32195; HLA-B*15:01; KCNU1; ENSG00000215262; CTA
GQFRDHIEM

SEQ ID NO: 32196 - protein, 8 aa, Homo sapiens
  misc_feature: Table A; Target 32196; HLA-B*13:02; KCNU1; ENSG00000215262; CTA
GQVLVILV

SEQ ID NO: 32197 - protein, 9 aa, Homo sapiens
  misc_feature: Table A; Target 32197; HLA-B*13:02; KCNU1; ENSG00000215262; CTA
GQVLVILVF

SEQ ID NO: 32198 - protein, 9 aa, Homo sapiens
  misc_feature: Table A; Target 32198; HLA-B*15:01; KCNU1; ENSG00000215262; CTA
GQVLVILVF

SEQ ID NO: 32199 - protein, 9 aa, Homo sapiens
  misc_feature: Table A; Target 32199; HLA-B*15:03; KCNU1; ENSG00000215262; CTA
GQVLVILVF

SEQ ID NO: 32200 - protein, 9 aa, Homo sapiens
  misc_feature: Table A; Target 32200; HLA-B*27:02; KCNU1; ENSG00000215262; CTA
GQVLVILVF

SEQ ID NO: 32201 - protein, 9 aa, Homo sapiens
  misc_feature: Table A; Target 32201; HLA-B*44:02; KCNU1; ENSG00000215262; CTA
GQVLVILVF

SEQ ID NO: 32202 - protein, 9 aa, Homo sapiens
  misc_feature: Table A; Target 32202; HLA-B*44:03; KCNU1; ENSG00000215262; CTA
GQVLVILVF

SEQ ID NO: 32203 - protein, 9 aa, Homo sapiens
  misc_feature: Table A; Target 32203; HLA-C*02:02; KCNU1; ENSG00000215262; CTA
GQVLVILVF

SEQ ID NO: 32204 - protein, 9 aa, Homo sapiens
  misc_feature: Table A; Target 32204; HLA-C*16:04; KCNU1; ENSG00000215262; CTA
GQVLVILVF

SEQ ID NO: 32205 - protein, 9 aa, Homo sapiens
  misc_feature: Table A; Target 32205; HLA-A*30:02; KCNU1; ENSG00000215262; CTA
GRNSQNISY

SEQ ID NO: 32206 - protein, 9 aa, Homo sapiens
  misc_feature: Table A; Target 32206; HLA-A*32:01; KCNU1; ENSG00000215262; CTA
GRNSQNISY

SEQ ID NO: 32207 - protein, 9 aa, Homo sapiens
  misc_feature: Table A; Target 32207; HLA-B*27:02; KCNU1; ENSG00000215262; CTA
GRNSQNISY

SEQ ID NO: 32208 - protein, 9 aa, Homo sapiens
  misc_feature: Table A; Target 32208; HLA-B*27:05; KCNU1; ENSG00000215262; CTA
GRNSQNISY

SEQ ID NO: 32209 - protein, 9 aa, Homo sapiens
  misc_feature: Table A; Target 32209; HLA-C*02:02; KCNU1; ENSG00000215262; CTA
GRNSQNISY

SEQ ID NO: 32210 - protein, 9 aa, Homo sapiens
  misc_feature: Table A; Target 32210; HLA-C*16:04; KCNU1; ENSG00000215262; CTA
GRNSQNISY

SEQ ID NO: 32211 - protein, 10 aa, Homo sapiens
  misc_feature: Table A; Target 32211; HLA-B*27:02; KCNU1; ENSG00000215262; CTA
GRNSQNISYF

SEQ ID NO: 32212 - protein, 10 aa, Homo sapiens
  misc_feature: Table A; Target 32212; HLA-B*27:05; KCNU1; ENSG00000215262; CTA
GRNSQNISYF

SEQ ID NO: 32213 - protein, 10 aa, Homo sapiens
  misc_feature: Table A; Target 32213; HLA-C*16:04; KCNU1; ENSG00000215262; CTA
GRNSQNISYF

SEQ ID NO: 32214 - protein, 10 aa, Homo sapiens
  misc_feature: Table A; Target 32214; HLA-B*44:02; KCNU1; ENSG00000215262; CTA
GSLDYLQREW

SEQ ID NO: 32215 - protein, 10 aa, Homo sapiens
  misc_feature: Table A; Target 32215; HLA-B*57:01; KCNU1; ENSG00000215262; CTA
GSLDYLQREW

SEQ ID NO: 32216 - protein, 9 aa, Homo sapiens
  misc_feature: Table A; Target 32216; HLA-A*29:02; KCNU1; ENSG00000215262; CTA
GSLILFANY

SEQ ID NO: 32217 - protein, 9 aa, Homo sapiens
  misc_feature: Table A; Target 32217; HLA-A*30:02; KCNU1; ENSG00000215262; CTA
GSLILFANY

SEQ ID NO: 32218 - protein, 9 aa, Homo sapiens
  misc_feature: Table A; Target 32218; HLA-B*57:01; KCNU1; ENSG00000215262; CTA
GSLILFANY

SEQ ID NO: 32219 - protein, 9 aa, Homo sapiens
  misc_feature: Table A; Target 32219; HLA-B*57:01; KCNU1; ENSG00000215262; CTA
GTGIILELF

SEQ ID NO: 32220 - protein, 9 aa, Homo sapiens
  misc_feature: Table A; Target 32220; HLA-A*03:01; KCNU1; ENSG00000215262; CTA
GTIARSHVR

SEQ ID NO: 32221 - protein, 9 aa, Homo sapiens
  misc_feature: Table A; Target 32221; HLA-A*11:01; KCNU1; ENSG00000215262; CTA
GTIARSHVR

SEQ ID NO: 32222 - protein, 9 aa, Homo sapiens
  misc_feature: Table A; Target 32222; HLA-A*31:01; KCNU1; ENSG00000215262; CTA
GTIARSHVR

SEQ ID NO: 32223 - protein, 9 aa, Homo sapiens
  misc_feature: Table A; Target 32223; HLA-A*33:03; KCNU1; ENSG00000215262; CTA
GTIARSHVR

SEQ ID NO: 32224 - protein, 9 aa, Homo sapiens
  misc_feature: Table A; Target 32224; HLA-B*57:01; KCNU1; ENSG00000215262; CTA
GTIARSHVR

SEQ ID NO: 32225 - protein, 9 aa, Homo sapiens
  misc_feature: Table A; Target 32225; HLA-C*03:03; KCNU1; ENSG00000215262; CTA
GTVFSGSFL

SEQ ID NO: 32226 - protein, 9 aa, Homo sapiens
  misc_feature: Table A; Target 32226; HLA-C*03:04; KCNU1; ENSG00000215262; CTA
GTVFSGSFL

SEQ ID NO: 32227 - protein, 9 aa, Homo sapiens
  misc_feature: Table A; Target 32227; HLA-A*25:01; KCNU1; ENSG00000215262; CTA
GVADSCTSL

SEQ ID NO: 32228 - protein, 9 aa, Homo sapiens
  misc_feature: Table A; Target 32228; HLA-A*26:01; KCNU1; ENSG00000215262; CTA
GVADSCTSL

SEQ ID NO: 32229 - protein, 9 aa, Homo sapiens
  misc_feature: Table A; Target 32229; HLA-B*15:01; KCNU1; ENSG00000215262; CTA
GVADSCTSL

SEQ ID NO: 32230 - protein, 9 aa, Homo sapiens
  misc_feature: Table A; Target 32230; HLA-B*27:05; KCNU1; ENSG00000215262; CTA
GVADSCTSL

SEQ ID NO: 32231 - protein, 9 aa, Homo sapiens
  misc_feature: Table A; Target 32231; HLA-C*01:02; KCNU1; ENSG00000215262; CTA
GVADSCTSL

SEQ ID NO: 32232 - protein, 10 aa, Homo sapiens
  misc_feature: Table A; Target 32232; HLA-A*26:01; KCNU1; ENSG00000215262; CTA
GVADSCTSLL

SEQ ID NO: 32233 - protein, 10 aa, Homo sapiens
  misc_feature: Table A; Target 32233; HLA-B*27:05; KCNU1; ENSG00000215262; CTA
GVSSQLEQHL

SEQ ID NO: 32234 - protein, 10 aa, Homo sapiens
  misc_feature: Table A; Target 32234; HLA-B*35:01; KCNU1; ENSG00000215262; CTA
HAANIEQCSM

SEQ ID NO: 32235 - protein, 10 aa, Homo sapiens
  misc_feature: Table A; Target 32235; HLA-B*35:03; KCNU1; ENSG00000215262; CTA
HAANIEQCSM

SEQ ID NO: 32236 - protein, 10 aa, Homo sapiens
  misc_feature: Table A; Target 32236; HLA-C*07:06; KCNU1; ENSG00000215262; CTA
HAANIEQCSM

SEQ ID NO: 32237 - protein, 8 aa, Homo sapiens
  misc_feature: Table A; Target 32237; HLA-C*05:01; KCNU1; ENSG00000215262; CTA
HAEDISNI

SEQ ID NO: 32238 - protein, 9 aa, Homo sapiens
  misc_feature: Table A; Target 32238; HLA-B*27:05; KCNU1; ENSG00000215262; CTA
HAEDISNIM

SEQ ID NO: 32239 - protein, 9 aa, Homo sapiens
  misc_feature: Table A; Target 32239; HLA-B*35:03; KCNU1; ENSG00000215262; CTA
HAEDISNIM

SEQ ID NO: 32240 - protein, 9 aa, Homo sapiens
  misc_feature: Table A; Target 32240; HLA-B*38:01; KCNU1; ENSG00000215262; CTA
HAEDISNIM

SEQ ID NO: 32241 - protein, 9 aa, Homo sapiens
  misc_feature: Table A; Target 32241; HLA-B*39:01; KCNU1; ENSG00000215262; CTA
HAEDISNIM

SEQ ID NO: 32242 - protein, 9 aa, Homo sapiens
  misc_feature: Table A; Target 32242; HLA-B*55:01; KCNU1; ENSG00000215262; CTA
HAEDISNIM

SEQ ID NO: 32243 - protein, 9 aa, Homo sapiens
  misc_feature: Table A; Target 32243; HLA-C*02:02; KCNU1; ENSG00000215262; CTA
HAEDISNIM

SEQ ID NO: 32244 - protein, 9 aa, Homo sapiens
  misc_feature: Table A; Target 32244; HLA-C*03:03; KCNU1; ENSG00000215262; CTA
HAEDISNIM

SEQ ID NO: 32245 - protein, 9 aa, Homo sapiens
  misc_feature: Table A; Target 32245; HLA-C*03:04; KCNU1; ENSG00000215262; CTA
HAEDISNIM

SEQ ID NO: 32246 - protein, 9 aa, Homo sapiens
  misc_feature: Table A; Target 32246; HLA-C*05:01; KCNU1; ENSG00000215262; CTA
HAEDISNIM

SEQ ID NO: 32247 - protein, 9 aa, Homo sapiens
  misc_feature: Table A; Target 32247; HLA-C*07:04; KCNU1; ENSG00000215262; CTA
HAEDISNIM

SEQ ID NO: 32248 - protein, 9 aa, Homo sapiens
  misc_feature: Table A; Target 32248; HLA-C*07:06; KCNU1; ENSG00000215262; CTA
HAEDISNIM

SEQ ID NO: 32249 - protein, 9 aa, Homo sapiens
  misc_feature: Table A; Target 32249; HLA-C*12:03; KCNU1; ENSG00000215262; CTA
HAEDISNIM

SEQ ID NO: 32250 - protein, 9 aa, Homo sapiens
  misc_feature: Table A; Target 32250; HLA-C*16:04; KCNU1; ENSG00000215262; CTA
HAEDISNIM

SEQ ID NO: 32251 - protein, 10 aa, Homo sapiens
  misc_feature: Table A; Target 32251; HLA-A*33:01; KCNU1; ENSG00000215262; CTA
HAEDISNIMR

SEQ ID NO: 32252 - protein, 10 aa, Homo sapiens
  misc_feature: Table A; Target 32252; HLA-A*33:03; KCNU1; ENSG00000215262; CTA
HAEDISNIMR

SEQ ID NO: 32253 - protein, 10 aa, Homo sapiens
  misc_feature: Table A; Target 32253; HLA-A*68:01; KCNU1; ENSG00000215262; CTA
HAEDISNIMR

SEQ ID NO: 32254 - protein, 10 aa, Homo sapiens
  misc_feature: Table A; Target 32254; HLA-A*68:02; KCNU1; ENSG00000215262; CTA
HAEDISNIMR

SEQ ID NO: 32255 - protein, 10 aa, Homo sapiens
  misc_feature: Table A; Target 32255; HLA-B*35:03; KCNU1; ENSG00000215262; CTA
HAEDISNIMR

SEQ ID NO: 32256 - protein, 10 aa, Homo sapiens
  misc_feature: Table A; Target 32256; HLA-C*07:06; KCNU1; ENSG00000215262; CTA
HAEDISNIMR

SEQ ID NO: 32257 - protein, 11 aa, Homo sapiens
  misc_feature: Table A; Target 32257; HLA-A*68:02; KCNU1; ENSG00000215262; CTA
HAEDISNIMRV

SEQ ID NO: 32258 - protein, 8 aa, Homo sapiens
  misc_feature: Table A; Target 32258; HLA-A*30:01; KCNU1; ENSG00000215262; CTA
HETILSDV

SEQ ID NO: 32259 - protein, 8 aa, Homo sapiens
  misc_feature: Table A; Target 32259; HLA-B*18:01; KCNU1; ENSG00000215262; CTA
HETILSDV

SEQ ID NO: 32260 - protein, 8 aa, Homo sapiens
  misc_feature: Table A; Target 32260; HLA-B*49:01; KCNU1; ENSG00000215262; CTA
HETILSDV

SEQ ID NO: 32261 - protein, 11 aa, Homo sapiens
  misc_feature: Table A; Target 32261; HLA-B*27:02; KCNU1; ENSG00000215262; CTA
HETILSDVNPR

SEQ ID NO: 32262 - protein, 9 aa, Homo sapiens
  misc_feature: Table A; Target 32262; HLA-C*14:02; KCNU1; ENSG00000215262; CTA
HFIEQLGGL

SEQ ID NO: 32263 - protein, 8 aa, Homo sapiens
  misc_feature: Table A; Target 32263; HLA-A*03:01; KCNU1; ENSG00000215262; CTA
HITVPSVK

SEQ ID NO: 32264 - protein, 8 aa, Homo sapiens
  misc_feature: Table A; Target 32264; HLA-A*03:02; KCNU1; ENSG00000215262; CTA
HITVPSVK

SEQ ID NO: 32265 - protein, 9 aa, Homo sapiens
  misc_feature: Table A; Target 32265; HLA-A*33:01; KCNU1; ENSG00000215262; CTA
HITVPSVKR

SEQ ID NO: 32266 - protein, 9 aa, Homo sapiens
  misc_feature: Table A; Target 32266; HLA-A*33:03; KCNU1; ENSG00000215262; CTA
HITVPSVKR

SEQ ID NO: 32267 - protein, 9 aa, Homo sapiens
  misc_feature: Table A; Target 32267; HLA-A*68:01; KCNU1; ENSG00000215262; CTA
HITVPSVKR

SEQ ID NO: 32268 - protein, 9 aa, Homo sapiens
  misc_feature: Table A; Target 32268; HLA-C*07:06; KCNU1; ENSG00000215262; CTA
HITVPSVKR

SEQ ID NO: 32269 - protein, 10 aa, Homo sapiens
  misc_feature: Table A; Target 32269; HLA-A*02:01; KCNU1; ENSG00000215262; CTA
HLDKDKVYGV

SEQ ID NO: 32270 - protein, 10 aa, Homo sapiens
  misc_feature: Table A; Target 32270; HLA-A*02:07; KCNU1; ENSG00000215262; CTA
HLDKDKVYGV

SEQ ID NO: 32271 - protein, 9 aa, Homo sapiens
  misc_feature: Table A; Target 32271; HLA-A*01:01; KCNU1; ENSG00000215262; CTA
HLLLIAIEY

SEQ ID NO: 32272 - protein, 9 aa, Homo sapiens
  misc_feature: Table A; Target 32272; HLA-A*29:02; KCNU1; ENSG00000215262; CTA
HLLLIAIEY

SEQ ID NO: 32273 - protein, 9 aa, Homo sapiens
  misc_feature: Table A; Target 32273; HLA-B*35:01; KCNU1; ENSG00000215262; CTA
HLLLIAIEY

SEQ ID NO: 32274 - protein, 9 aa, Homo sapiens
  misc_feature: Table A; Target 32274; HLA-C*07:04; KCNU1; ENSG00000215262; CTA
HLLLIAIEY

SEQ ID NO: 32275 - protein, 10 aa, Homo sapiens
  misc_feature: Table A; Target 32275; HLA-A*25:01; KCNU1; ENSG00000215262; CTA
HLVENSGDPW

SEQ ID NO: 32276 - protein, 10 aa, Homo sapiens
  misc_feature: Table A; Target 32276; HLA-B*57:01; KCNU1; ENSG00000215262; CTA
HSAPMGLRNF

SEQ ID NO: 32277 - protein, 9 aa, Homo sapiens
  misc_feature: Table A; Target 32277; HLA-A*02:04; KCNU1; ENSG00000215262; CTA
HVLELLQML

SEQ ID NO: 32278 - protein, 9 aa, Homo sapiens
  misc_feature: Table A; Target 32278; HLA-A*02:07; KCNU1; ENSG00000215262; CTA
HVLELLQML

SEQ ID NO: 32279 - protein, 8 aa, Homo sapiens
  misc_feature: Table A; Target 32279; HLA-C*05:01; KCNU1; ENSG00000215262; CTA
IAETPKDV

SEQ ID NO: 32280 - protein, 8 aa, Homo sapiens
  misc_feature: Table A; Target 32280; HLA-C*16:02; KCNU1; ENSG00000215262; CTA
IAETPKDV

SEQ ID NO: 32281 - protein, 9 aa, Homo sapiens
  misc_feature: Table A; Target 32281; HLA-A*68:01; KCNU1; ENSG00000215262; CTA
IAETPKDVR

SEQ ID NO: 32282 - protein, 9 aa, Homo sapiens
  misc_feature: Table A; Target 32282; HLA-C*05:01; KCNU1; ENSG00000215262; CTA
IAETPKDVR

SEQ ID NO: 32283 - protein, 9 aa, Homo sapiens
  misc_feature: Table A; Target 32283; HLA-C*07:06; KCNU1; ENSG00000215262; CTA
IAETPKDVR

SEQ ID NO: 32284 - protein, 8 aa, Homo sapiens
  misc_feature: Table A; Target 32284; HLA-B*46:01; KCNU1; ENSG00000215262; CTA
IAIEYKSL

SEQ ID NO: 32285 - protein, 8 aa, Homo sapiens
  misc_feature: Table A; Target 32285; HLA-C*03:04; KCNU1; ENSG00000215262; CTA
IAIEYKSL

SEQ ID NO: 32286 - protein, 9 aa, Homo sapiens
  misc_feature: Table A; Target 32286; HLA-A*23:01; KCNU1; ENSG00000215262; CTA
IAIEYKSLF

SEQ ID NO: 32287 - protein, 9 aa, Homo sapiens
  misc_feature: Table A; Target 32287; HLA-A*24:02; KCNU1; ENSG00000215262; CTA
IAIEYKSLF

SEQ ID NO: 32288 - protein, 9 aa, Homo sapiens
  misc_feature: Table A; Target 32288; HLA-A*29:02; KCNU1; ENSG00000215262; CTA
IAIEYKSLF

SEQ ID NO: 32289 - protein, 9 aa, Homo sapiens
  misc_feature: Table A; Target 32289; HLA-B*35:01; KCNU1; ENSG00000215262; CTA
IAIEYKSLF

SEQ ID NO: 32290 - protein, 9 aa, Homo sapiens
  misc_feature: Table A; Target 32290; HLA-B*46:01; KCNU1; ENSG00000215262; CTA
IAIEYKSLF

SEQ ID NO: 32291 - protein, 9 aa, Homo sapiens
  misc_feature: Table A; Target 32291; HLA-B*51:01; KCNU1; ENSG00000215262; CTA
IAIEYKSLF

SEQ ID NO: 32292 - protein, 9 aa, Homo sapiens
  misc_feature: Table A; Target 32292; HLA-B*57:01; KCNU1; ENSG00000215262; CTA
IAIEYKSLF

SEQ ID NO: 32293 - protein, 9 aa, Homo sapiens
  misc_feature: Table A; Target 32293; HLA-B*58:01; KCNU1; ENSG00000215262; CTA
IAIEYKSLF

SEQ ID NO: 32294 - protein, 9 aa, Homo sapiens
  misc_feature: Table A; Target 32294; HLA-C*02:02; KCNU1; ENSG00000215262; CTA
IAIEYKSLF

SEQ ID NO: 32295 - protein, 9 aa, Homo sapiens
  misc_feature: Table A; Target 32295; HLA-C*16:01; KCNU1; ENSG00000215262; CTA
IAIEYKSLF

SEQ ID NO: 32296 - protein, 9 aa, Homo sapiens
  misc_feature: Table A; Target 32296; HLA-C*16:02; KCNU1; ENSG00000215262; CTA
IAIEYKSLF

SEQ ID NO: 32297 - protein, 9 aa, Homo sapiens
  misc_feature: Table A; Target 32297; HLA-C*16:02; KCNU1; ENSG00000215262; CTA
IARSHVRSL

SEQ ID NO: 32298 - protein, 11 aa, Homo sapiens
  misc_feature: Table A; Target 32298; HLA-B*27:02; KCNU1; ENSG00000215262; CTA
IDEEELNPENK

SEQ ID NO: 32299 - protein, 8 aa, Homo sapiens
  misc_feature: Table A; Target 32299; HLA-B*37:01; KCNU1; ENSG00000215262; CTA
IDLVFNAF

SEQ ID NO: 32300 - protein, 8 aa, Homo sapiens
  misc_feature: Table A; Target 32300; HLA-B*37:01; KCNU1; ENSG00000215262; CTA
IDSVTETL

SEQ ID NO: 32301 - protein, 10 aa, Homo sapiens
  misc_feature: Table A; Target 32301; HLA-A*30:01; KCNU1; ENSG00000215262; CTA
IEMLLSAQTF

SEQ ID NO: 32302 - protein, 10 aa, Homo sapiens
  misc_feature: Table A; Target 32302; HLA-B*18:01; KCNU1; ENSG00000215262; CTA
IEMLLSAQTF

SEQ ID NO: 32303 - protein, 10 aa, Homo sapiens
  misc_feature: Table A; Target 32303; HLA-B*27:02; KCNU1; ENSG00000215262; CTA
IEMLLSAQTF

SEQ ID NO: 32304 - protein, 10 aa, Homo sapiens
  misc_feature: Table A; Target 32304; HLA-B*37:01; KCNU1; ENSG00000215262; CTA
IEMLLSAQTF

SEQ ID NO: 32305 - protein, 10 aa, Homo sapiens
  misc_feature: Table A; Target 32305; HLA-B*40:01; KCNU1; ENSG00000215262; CTA
IEMLLSAQTF

SEQ ID NO: 32306 - protein, 10 aa, Homo sapiens
  misc_feature: Table A; Target 32306; HLA-B*40:02; KCNU1; ENSG00000215262; CTA
IEMLLSAQTF

SEQ ID NO: 32307 - protein, 10 aa, Homo sapiens
  misc_feature: Table A; Target 32307; HLA-B*44:02; KCNU1; ENSG00000215262; CTA
IEMLLSAQTF

SEQ ID NO: 32308 - protein, 10 aa, Homo sapiens
  misc_feature: Table A; Target 32308; HLA-B*44:03; KCNU1; ENSG00000215262; CTA
IEMLLSAQTF

SEQ ID NO: 32309 - protein, 10 aa, Homo sapiens
  misc_feature: Table A; Target 32309; HLA-B*49:01; KCNU1; ENSG00000215262; CTA
IEMLLSAQTF

SEQ ID NO: 32310 - protein, 10 aa, Homo sapiens
  misc_feature: Table A; Target 32310; HLA-C*16:04; KCNU1; ENSG00000215262; CTA
IEMLLSAQTF

SEQ ID NO: 32311 - protein, 11 aa, Homo sapiens
  misc_feature: Table A; Target 32311; HLA-B*49:01; KCNU1; ENSG00000215262; CTA
IEMLLSAQTFV

SEQ ID NO: 32312 - protein, 9 aa, Homo sapiens
  misc_feature: Table A; Target 32312; HLA-B*49:01; KCNU1; ENSG00000215262; CTA
IEQCSMCAV

SEQ ID NO: 32313 - protein, 11 aa, Homo sapiens
  misc_feature: Table A; Target 32313; HLA-A*30:01; KCNU1; ENSG00000215262; CTA
IEQLGGLEGSL

SEQ ID NO: 32314 - protein, 11 aa, Homo sapiens
  misc_feature: Table A; Target 32314; HLA-B*40:01; KCNU1; ENSG00000215262; CTA
IEQLGGLEGSL

SEQ ID NO: 32315 - protein, 11 aa, Homo sapiens
  misc_feature: Table A; Target 32315; HLA-B*40:02; KCNU1; ENSG00000215262; CTA
IEQLGGLEGSL

SEQ ID NO: 32316 - protein, 8 aa, Homo sapiens
  misc_feature: Table A; Target 32316; HLA-A*23:01; KCNU1; ENSG00000215262; CTA
IFTIPPTF

SEQ ID NO: 32317 - protein, 8 aa, Homo sapiens
  misc_feature: Table A; Target 32317; HLA-A*24:02; KCNU1; ENSG00000215262; CTA
IFTIPPTF

SEQ ID NO: 32318 - protein, 9 aa, Homo sapiens
  misc_feature: Table A; Target 32318; HLA-A*23:01; KCNU1; ENSG00000215262; CTA
IFTIPPTFI

SEQ ID NO: 32319 - protein, 9 aa, Homo sapiens
  misc_feature: Table A; Target 32319; HLA-A*24:02; KCNU1; ENSG00000215262; CTA
IFTIPPTFI

SEQ ID NO: 32320 - protein, 9 aa, Homo sapiens
  misc_feature: Table A; Target 32320; HLA-A*68:02; KCNU1; ENSG00000215262; CTA
IGSLIIYFI

SEQ ID NO: 32321 - protein, 9 aa, Homo sapiens
  misc_feature: Table A; Target 32321; HLA-B*46:01; KCNU1; ENSG00000215262; CTA
IIIQILQSH

SEQ ID NO: 32322 - protein, 9 aa, Homo sapiens
  misc_feature: Table A; Target 32322; HLA-C*07:04; KCNU1; ENSG00000215262; CTA
IIKGTGIIL

SEQ ID NO: 32323 - protein, 8 aa, Homo sapiens
  misc_feature: Table A; Target 32323; HLA-A*02:04; KCNU1; ENSG00000215262; CTA
IILLIFRL

SEQ ID NO: 32324 - protein, 10 aa, Homo sapiens
  misc_feature: Table A; Target 32324; HLA-A*03:02; KCNU1; ENSG00000215262; CTA
IIQILQSHNK

SEQ ID NO: 32325 - protein, 10 aa, Homo sapiens
  misc_feature: Table A; Target 32325; HLA-A*11:01; KCNU1; ENSG00000215262; CTA
IIQILQSHNK

SEQ ID NO: 32326 - protein, 9 aa, Homo sapiens
  misc_feature: Table A; Target 32326; HLA-A*23:01; KCNU1; ENSG00000215262; CTA
IKTSNSVKF

SEQ ID NO: 32327 - protein, 9 aa, Homo sapiens
  misc_feature: Table A; Target 32327; HLA-A*24:02; KCNU1; ENSG00000215262; CTA
IKTSNSVKF

SEQ ID NO: 32328 - protein, 9 aa, Homo sapiens
  misc_feature: Table A; Target 32328; HLA-B*15:03; KCNU1; ENSG00000215262; CTA
IKTSNSVKF

SEQ ID NO: 32329 - protein, 10 aa, Homo sapiens
  misc_feature: Table A; Target 32329; HLA-A*02:04; KCNU1; ENSG00000215262; CTA
ILFANYIPEM

SEQ ID NO: 32330 - protein, 8 aa, Homo sapiens
  misc_feature: Table A; Target 32330; HLA-A*02:01; KCNU1; ENSG00000215262; CTA
ILNPPPQV

SEQ ID NO: 32331 - protein, 8 aa, Homo sapiens
  misc_feature: Table A; Target 32331; HLA-A*02:03; KCNU1; ENSG00000215262; CTA
ILNPPPQV

SEQ ID NO: 32332 - protein, 8 aa, Homo sapiens
  misc_feature: Table A; Target 32332; HLA-A*02:04; KCNU1; ENSG00000215262; CTA
ILNPPPQV

SEQ ID NO: 32333 - protein, 8 aa, Homo sapiens
  misc_feature: Table A; Target 32333; HLA-B*13:02; KCNU1; ENSG00000215262; CTA
ILNPPPQV

SEQ ID NO: 32334 - protein, 8 aa, Homo sapiens
  misc_feature: Table A; Target 32334; HLA-B*55:01; KCNU1; ENSG00000215262; CTA
ILNPPPQV

SEQ ID NO: 32335 - protein, 8 aa, Homo sapiens
  misc_feature: Table A; Target 32335; HLA-C*16:02; KCNU1; ENSG00000215262; CTA
ILNPPPQV

SEQ ID NO: 32336 - protein, 9 aa, Homo sapiens
  misc_feature: Table A; Target 32336; HLA-A*02:03; KCNU1; ENSG00000215262; CTA
ILNPPPQVR

SEQ ID NO: 32337 - protein, 9 aa, Homo sapiens
  misc_feature: Table A; Target 32337; HLA-A*03:01; KCNU1; ENSG00000215262; CTA
ILNPPPQVR

SEQ ID NO: 32338 - protein, 9 aa, Homo sapiens
  misc_feature: Table A; Target 32338; HLA-A*03:02; KCNU1; ENSG00000215262; CTA
ILNPPPQVR

SEQ ID NO: 32339 - protein, 9 aa, Homo sapiens
  misc_feature: Table A; Target 32339; HLA-A*11:01; KCNU1; ENSG00000215262; CTA
ILNPPPQVR

SEQ ID NO: 32340 - protein, 9 aa, Homo sapiens
  misc_feature: Table A; Target 32340; HLA-A*23:01; KCNU1; ENSG00000215262; CTA
ILNPPPQVR

SEQ ID NO: 32341 - protein, 9 aa, Homo sapiens
  misc_feature: Table A; Target 32341; HLA-A*24:02; KCNU1; ENSG00000215262; CTA
ILNPPPQVR

SEQ ID NO: 32342 - protein, 9 aa, Homo sapiens
  misc_feature: Table A; Target 32342; HLA-A*29:02; KCNU1; ENSG00000215262; CTA
ILNPPPQVR

SEQ ID NO: 32343 - protein, 9 aa, Homo sapiens
  misc_feature: Table A; Target 32343; HLA-A*30:02; KCNU1; ENSG00000215262; CTA
ILNPPPQVR

SEQ ID NO: 32344 - protein, 9 aa, Homo sapiens
  misc_feature: Table A; Target 32344; HLA-A*31:01; KCNU1; ENSG00000215262; CTA
ILNPPPQVR

SEQ ID NO: 32345 - protein, 9 aa, Homo sapiens
  misc_feature: Table A; Target 32345; HLA-A*32:01; KCNU1; ENSG00000215262; CTA
ILNPPPQVR

SEQ ID NO: 32346 - protein, 9 aa, Homo sapiens
  misc_feature: Table A; Target 32346; HLA-A*33:01; KCNU1; ENSG00000215262; CTA
ILNPPPQVR

SEQ ID NO: 32347 - protein, 9 aa, Homo sapiens
  misc_feature: Table A; Target 32347; HLA-A*33:03; KCNU1; ENSG00000215262; CTA
ILNPPPQVR

SEQ ID NO: 32348 - protein, 9 aa, Homo sapiens
  misc_feature: Table A; Target 32348; HLA-A*68:01; KCNU1; ENSG00000215262; CTA
ILNPPPQVR

SEQ ID NO: 32349 - protein, 9 aa, Homo sapiens
  misc_feature: Table A; Target 32349; HLA-B*46:01; KCNU1; ENSG00000215262; CTA
ILNPPPQVR

SEQ ID NO: 32350 - protein, 9 aa, Homo sapiens
  misc_feature: Table A; Target 32350; HLA-B*57:01; KCNU1; ENSG00000215262; CTA
ILNPPPQVR

SEQ ID NO: 32351 - protein, 9 aa, Homo sapiens
  misc_feature: Table A; Target 32351; HLA-C*02:02; KCNU1; ENSG00000215262; CTA
ILNPPPQVR

SEQ ID NO: 32352 - protein, 9 aa, Homo sapiens
  misc_feature: Table A; Target 32352; HLA-C*07:06; KCNU1; ENSG00000215262; CTA
ILNPPPQVR

SEQ ID NO: 32353 - protein, 10 aa, Homo sapiens
  misc_feature: Table A; Target 32353; HLA-A*02:01; KCNU1; ENSG00000215262; CTA
ILNPPPQVRI

SEQ ID NO: 32354 - protein, 10 aa, Homo sapiens
  misc_feature: Table A; Target 32354; HLA-A*02:03; KCNU1; ENSG00000215262; CTA
ILNPPPQVRI

SEQ ID NO: 32355 - protein, 10 aa, Homo sapiens
  misc_feature: Table A; Target 32355; HLA-A*02:04; KCNU1; ENSG00000215262; CTA
ILNPPPQVRI

SEQ ID NO: 32356 - protein, 10 aa, Homo sapiens
  misc_feature: Table A; Target 32356; HLA-A*02:07; KCNU1; ENSG00000215262; CTA
ILNPPPQVRI

SEQ ID NO: 32357 - protein, 10 aa, Homo sapiens
  misc_feature: Table A; Target 32357; HLA-A*03:01; KCNU1; ENSG00000215262; CTA
ILNPPPQVRI

SEQ ID NO: 32358 - protein, 10 aa, Homo sapiens
  misc_feature: Table A; Target 32358; HLA-A*23:01; KCNU1; ENSG00000215262; CTA
ILNPPPQVRI

SEQ ID NO: 32359 - protein, 10 aa, Homo sapiens
  misc_feature: Table A; Target 32359; HLA-A*24:02; KCNU1; ENSG00000215262; CTA
ILNPPPQVRI

SEQ ID NO: 32360 - protein, 10 aa, Homo sapiens
  misc_feature: Table A; Target 32360; HLA-A*31:01; KCNU1; ENSG00000215262; CTA
ILNPPPQVRI

SEQ ID NO: 32361 - protein, 10 aa, Homo sapiens
  misc_feature: Table A; Target 32361; HLA-A*32:01; KCNU1; ENSG00000215262; CTA
ILNPPPQVRI

SEQ ID NO: 32362 - protein, 10 aa, Homo sapiens
  misc_feature: Table A; Target 32362; HLA-B*13:02; KCNU1; ENSG00000215262; CTA
ILNPPPQVRI

SEQ ID NO: 32363 - protein, 10 aa, Homo sapiens
  misc_feature: Table A; Target 32363; HLA-B*51:01; KCNU1; ENSG00000215262; CTA
ILNPPPQVRI

SEQ ID NO: 32364 - protein, 11 aa, Homo sapiens
  misc_feature: Table A; Target 32364; HLA-A*31:01; KCNU1; ENSG00000215262; CTA
ILNPPPQVRIR

SEQ ID NO: 32365 - protein, 9 aa, Homo sapiens
  misc_feature: Table A; Target 32365; HLA-A*30:02; KCNU1; ENSG00000215262; CTA
ILQSHNKVY

SEQ ID NO: 32366 - protein, 9 aa, Homo sapiens
  misc_feature: Table A; Target 32366; HLA-A*32:01; KCNU1; ENSG00000215262; CTA
ILQSHNKVY

SEQ ID NO: 32367 - protein, 9 aa, Homo sapiens
  misc_feature: Table A; Target 32367; HLA-B*15:01; KCNU1; ENSG00000215262; CTA
ILQSHNKVY

SEQ ID NO: 32368 - protein, 9 aa, Homo sapiens
  misc_feature: Table A; Target 32368; HLA-C*07:04; KCNU1; ENSG00000215262; CTA
ILQSHNKVY

SEQ ID NO: 32369 - protein, 9 aa, Homo sapiens
  misc_feature: Table A; Target 32369; HLA-C*16:01; KCNU1; ENSG00000215262; CTA
ILQSHNKVY

SEQ ID NO: 32370 - protein, 10 aa, Homo sapiens
  misc_feature: Table A; Target 32370; HLA-A*02:03; KCNU1; ENSG00000215262; CTA
ILSDVNPRNT

SEQ ID NO: 32371 - protein, 11 aa, Homo sapiens
  misc_feature: Table A; Target 32371; HLA-A*23:01; KCNU1; ENSG00000215262; CTA
ILSDVNPRNTF

SEQ ID NO: 32372 - protein, 11 aa, Homo sapiens
  misc_feature: Table A; Target 32372; HLA-A*24:02; KCNU1; ENSG00000215262; CTA
ILSDVNPRNTF

SEQ ID NO: 32373 - protein, 11 aa, Homo sapiens
  misc_feature: Table A; Target 32373; HLA-A*32:01; KCNU1; ENSG00000215262; CTA
ILSDVNPRNTF

SEQ ID NO: 32374 - protein, 11 aa, Homo sapiens
  misc_feature: Table A; Target 32374; HLA-B*15:01; KCNU1; ENSG00000215262; CTA
ILSDVNPRNTF

SEQ ID NO: 32375 - protein, 11 aa, Homo sapiens
  misc_feature: Table A; Target 32375; HLA-B*46:01; KCNU1; ENSG00000215262; CTA
ILSDVNPRNTF

SEQ ID NO: 32376 - protein, 11 aa, Homo sapiens
  misc_feature: Table A; Target 32376; HLA-C*16:01; KCNU1; ENSG00000215262; CTA
ILSDVNPRNTF

SEQ ID NO: 32377 - protein, 8 aa, Homo sapiens
  misc_feature: Table A; Target 32377; HLA-A*23:01; KCNU1; ENSG00000215262; CTA
ILSSFVTF

SEQ ID NO: 32378 - protein, 8 aa, Homo sapiens
  misc_feature: Table A; Target 32378; HLA-B*37:01; KCNU1; ENSG00000215262; CTA
ILSSFVTF

SEQ ID NO: 32379 - protein, 9 aa, Homo sapiens
  misc_feature: Table A; Target 32379; HLA-A*02:01; KCNU1; ENSG00000215262; CTA
ILSSFVTFF

SEQ ID NO: 32380 - protein, 9 aa, Homo sapiens
  misc_feature: Table A; Target 32380; HLA-A*02:03; KCNU1; ENSG00000215262; CTA
ILSSFVTFF

SEQ ID NO: 32381 - protein, 9 aa, Homo sapiens
  misc_feature: Table A; Target 32381; HLA-A*02:04; KCNU1; ENSG00000215262; CTA
ILSSFVTFF

SEQ ID NO: 32382 - protein, 9 aa, Homo sapiens
  misc_feature: Table A; Target 32382; HLA-A*02:07; KCNU1; ENSG00000215262; CTA
ILSSFVTFF

SEQ ID NO: 32383 - protein, 9 aa, Homo sapiens
  misc_feature: Table A; Target 32383; HLA-A*23:01; KCNU1; ENSG00000215262; CTA
ILSSFVTFF

SEQ ID NO: 32384 - protein, 9 aa, Homo sapiens
  misc_feature: Table A; Target 32384; HLA-A*24:02; KCNU1; ENSG00000215262; CTA
ILSSFVTFF

SEQ ID NO: 32385 - protein, 9 aa, Homo sapiens
  misc_feature: Table A; Target 32385; HLA-A*29:02; KCNU1; ENSG00000215262; CTA
ILSSFVTFF

SEQ ID NO: 32386 - protein, 9 aa, Homo sapiens
  misc_feature: Table A; Target 32386; HLA-C*02:02; KCNU1; ENSG00000215262; CTA
ILSSFVTFF

SEQ ID NO: 32387 - protein, 9 aa, Homo sapiens
  misc_feature: Table A; Target 32387; HLA-A*02:03; KCNU1; ENSG00000215262; CTA
ILSTWFTAA

SEQ ID NO: 32388 - protein, 9 aa, Homo sapiens
  misc_feature: Table A; Target 32388; HLA-A*02:04; KCNU1; ENSG00000215262; CTA
ILSTWFTAA

SEQ ID NO: 32389 - protein, 10 aa, Homo sapiens
  misc_feature: Table A; Target 32389; HLA-A*02:03; KCNU1; ENSG00000215262; CTA
IMATLTIGSL

SEQ ID NO: 32390 - protein, 11 aa, Homo sapiens
  misc_feature: Table A; Target 32390; HLA-B*27:02; KCNU1; ENSG00000215262; CTA
IPEMVELFANK

SEQ ID NO: 32391 - protein, 8 aa, Homo sapiens
  misc_feature: Table A; Target 32391; HLA-B*15:01; KCNU1; ENSG00000215262; CTA
IPFSTACY

SEQ ID NO: 32392 - protein, 8 aa, Homo sapiens
  misc_feature: Table A; Target 32392; HLA-B*15:03; KCNU1; ENSG00000215262; CTA
IPFSTACY

SEQ ID NO: 32393 - protein, 8 aa, Homo sapiens
  misc_feature: Table A; Target 32393; HLA-B*18:01; KCNU1; ENSG00000215262; CTA
IPFSTACY

SEQ ID NO: 32394 - protein, 8 aa, Homo sapiens
  misc_feature: Table A; Target 32394; HLA-B*35:01; KCNU1; ENSG00000215262; CTA
IPFSTACY

SEQ ID NO: 32395 - protein, 8 aa, Homo sapiens
  misc_feature: Table A; Target 32395; HLA-B*51:01; KCNU1; ENSG00000215262; CTA
IPFSTACY

SEQ ID NO: 32396 - protein, 8 aa, Homo sapiens
  misc_feature: Table A; Target 32396; HLA-B*56:01; KCNU1; ENSG00000215262; CTA
IPFSTACY

SEQ ID NO: 32397 - protein, 9 aa, Homo sapiens
  misc_feature: Table A; Target 32397; HLA-B*35:03; KCNU1; ENSG00000215262; CTA
IPIDLVFNA

SEQ ID NO: 32398 - protein, 9 aa, Homo sapiens
  misc_feature: Table A; Target 32398; HLA-B*54:01; KCNU1; ENSG00000215262; CTA
IPIDLVFNA

SEQ ID NO: 32399 - protein, 9 aa, Homo sapiens
  misc_feature: Table A; Target 32399; HLA-B*55:01; KCNU1; ENSG00000215262; CTA
IPIDLVFNA

SEQ ID NO: 32400 - protein, 9 aa, Homo sapiens
  misc_feature: Table A; Target 32400; HLA-B*56:01; KCNU1; ENSG00000215262; CTA
IPIDLVFNA

SEQ ID NO: 32401 - protein, 10 aa, Homo sapiens
  misc_feature: Table A; Target 32401; HLA-A*23:01; KCNU1; ENSG00000215262; CTA
IPIDLVFNAF

SEQ ID NO: 32402 - protein, 10 aa, Homo sapiens
  misc_feature: Table A; Target 32402; HLA-B*35:01; KCNU1; ENSG00000215262; CTA
IPIDLVFNAF

SEQ ID NO: 32403 - protein, 10 aa, Homo sapiens
  misc_feature: Table A; Target 32403; HLA-B*35:03; KCNU1; ENSG00000215262; CTA
IPIDLVFNAF

SEQ ID NO: 32404 - protein, 8 aa, Homo sapiens
  misc_feature: Table A; Target 32404; HLA-B*35:01; KCNU1; ENSG00000215262; CTA
IPPTFISY

SEQ ID NO: 32405 - protein, 8 aa, Homo sapiens
  misc_feature: Table A; Target 32405; HLA-B*51:01; KCNU1; ENSG00000215262; CTA
IPPTFISY

SEQ ID NO: 32406 - protein, 9 aa, Homo sapiens
  misc_feature: Table A; Target 32406; HLA-B*35:01; KCNU1; ENSG00000215262; CTA
IPPTFISYY

SEQ ID NO: 32407 - protein, 9 aa, Homo sapiens
  misc_feature: Table A; Target 32407; HLA-B*51:01; KCNU1; ENSG00000215262; CTA
IPPTFISYY

SEQ ID NO: 32408 - protein, 10 aa, Homo sapiens
  misc_feature: Table A; Target 32408; HLA-A*23:01; KCNU1; ENSG00000215262; CTA
IQAAFILSSF

SEQ ID NO: 32409 - protein, 10 aa, Homo sapiens
  misc_feature: Table A; Target 32409; HLA-A*25:01; KCNU1; ENSG00000215262; CTA
IQAAFILSSF

SEQ ID NO: 32410 - protein, 10 aa, Homo sapiens
  misc_feature: Table A; Target 32410; HLA-A*26:01; KCNU1; ENSG00000215262; CTA
IQAAFILSSF

SEQ ID NO: 32411 - protein, 10 aa, Homo sapiens
  misc_feature: Table A; Target 32411; HLA-A*30:02; KCNU1; ENSG00000215262; CTA
IQAAFILSSF

SEQ ID NO: 32412 - protein, 10 aa, Homo sapiens
  misc_feature: Table A; Target 32412; HLA-A*32:01; KCNU1; ENSG00000215262; CTA
IQAAFILSSF

SEQ ID NO: 32413 - protein, 10 aa, Homo sapiens
  misc_feature: Table A; Target 32413; HLA-B*15:01; KCNU1; ENSG00000215262; CTA
IQAAFILSSF

SEQ ID NO: 32414 - protein, 10 aa, Homo sapiens
  misc_feature: Table A; Target 32414; HLA-B*15:03; KCNU1; ENSG00000215262; CTA
IQAAFILSSF

SEQ ID NO: 32415 - protein, 10 aa, Homo sapiens
  misc_feature: Table A; Target 32415; HLA-B*46:01; KCNU1; ENSG00000215262; CTA
IQAAFILSSF

SEQ ID NO: 32416 - protein, 10 aa, Homo sapiens
  misc_feature: Table A; Target 32416; HLA-C*02:02; KCNU1; ENSG00000215262; CTA
IQAAFILSSF

SEQ ID NO: 32417 - protein, 10 aa, Homo sapiens
  misc_feature: Table A; Target 32417; HLA-C*07:04; KCNU1; ENSG00000215262; CTA
IQAAFILSSF

SEQ ID NO: 32418 - protein, 10 aa, Homo sapiens
  misc_feature: Table A; Target 32418; HLA-C*16:04; KCNU1; ENSG00000215262; CTA
IQAAFILSSF

SEQ ID NO: 32419 - protein, 11 aa, Homo sapiens
  misc_feature: Table A; Target 32419; HLA-B*15:01; KCNU1; ENSG00000215262; CTA
IQILQSHNKVY

SEQ ID NO: 32420 - protein, 9 aa, Homo sapiens
  misc_feature: Table A; Target 32420; HLA-A*11:01; KCNU1; ENSG00000215262; CTA
ISGQDSPPR

SEQ ID NO: 32421 - protein, 9 aa, Homo sapiens
  misc_feature: Table A; Target 32421; HLA-A*68:01; KCNU1; ENSG00000215262; CTA
ISGQDSPPR

SEQ ID NO: 32422 - protein, 9 aa, Homo sapiens
  misc_feature: Table A; Target 32422; HLA-C*07:06; KCNU1; ENSG00000215262; CTA
ISGQDSPPR

SEQ ID NO: 32423 - protein, 8 aa, Homo sapiens
  misc_feature: Table A; Target 32423; HLA-A*32:01; KCNU1; ENSG00000215262; CTA
ISGSAMKW

SEQ ID NO: 32424 - protein, 8 aa, Homo sapiens
  misc_feature: Table A; Target 32424; HLA-B*57:01; KCNU1; ENSG00000215262; CTA
ISGSAMKW

SEQ ID NO: 32425 - protein, 8 aa, Homo sapiens
  misc_feature: Table A; Target 32425; HLA-B*58:01; KCNU1; ENSG00000215262; CTA
ISGSAMKW

SEQ ID NO: 32426 - protein, 8 aa, Homo sapiens
  misc_feature: Table A; Target 32426; HLA-C*12:03; KCNU1; ENSG00000215262; CTA
ISGSAMKW

SEQ ID NO: 32427 - protein, 9 aa, Homo sapiens
  misc_feature: Table A; Target 32427; HLA-A*32:01; KCNU1; ENSG00000215262; CTA
ISNFTTRTL

SEQ ID NO: 32428 - protein, 9 aa, Homo sapiens
  misc_feature: Table A; Target 32428; HLA-B*46:01; KCNU1; ENSG00000215262; CTA
ISNFTTRTL

SEQ ID NO: 32429 - protein, 9 aa, Homo sapiens
  misc_feature: Table A; Target 32429; HLA-B*57:01; KCNU1; ENSG00000215262; CTA
ISNFTTRTL

SEQ ID NO: 32430 - protein, 9 aa, Homo sapiens
  misc_feature: Table A; Target 32430; HLA-B*58:01; KCNU1; ENSG00000215262; CTA
ISNFTTRTL

SEQ ID NO: 32431 - protein, 9 aa, Homo sapiens
  misc_feature: Table A; Target 32431; HLA-C*01:02; KCNU1; ENSG00000215262; CTA
ISNFTTRTL

SEQ ID NO: 32432 - protein, 9 aa, Homo sapiens
  misc_feature: Table A; Target 32432; HLA-C*03:03; KCNU1; ENSG00000215262; CTA
ISNFTTRTL

SEQ ID NO: 32433 - protein, 9 aa, Homo sapiens
  misc_feature: Table A; Target 32433; HLA-C*03:04; KCNU1; ENSG00000215262; CTA
ISNFTTRTL

SEQ ID NO: 32434 - protein, 9 aa, Homo sapiens
  misc_feature: Table A; Target 32434; HLA-C*06:02; KCNU1; ENSG00000215262; CTA
ISNFTTRTL

SEQ ID NO: 32435 - protein, 9 aa, Homo sapiens
  misc_feature: Table A; Target 32435; HLA-C*12:03; KCNU1; ENSG00000215262; CTA
ISNFTTRTL

SEQ ID NO: 32436 - protein, 9 aa, Homo sapiens
  misc_feature: Table A; Target 32436; HLA-C*14:02; KCNU1; ENSG00000215262; CTA
ISNFTTRTL

SEQ ID NO: 32437 - protein, 9 aa, Homo sapiens
  misc_feature: Table A; Target 32437; HLA-C*16:01; KCNU1; ENSG00000215262; CTA
ISNFTTRTL

SEQ ID NO: 32438 - protein, 9 aa, Homo sapiens
  misc_feature: Table A; Target 32438; HLA-C*16:02; KCNU1; ENSG00000215262; CTA
ISNFTTRTL

SEQ ID NO: 32439 - protein, 8 aa, Homo sapiens
  misc_feature: Table A; Target 32439; HLA-B*08:01; KCNU1; ENSG00000215262; CTA
ISNIMRVL

SEQ ID NO: 32440 - protein, 8 aa, Homo sapiens
  misc_feature: Table A; Target 32440; HLA-C*03:04; KCNU1; ENSG00000215262; CTA
ISNIMRVL

SEQ ID NO: 32441 - protein, 8 aa, Homo sapiens
  misc_feature: Table A; Target 32441; HLA-C*06:02; KCNU1; ENSG00000215262; CTA
ISNIMRVL

SEQ ID NO: 32442 - protein, 8 aa, Homo sapiens
  misc_feature: Table A; Target 32442; HLA-C*12:03; KCNU1; ENSG00000215262; CTA
ISNIMRVL

SEQ ID NO: 32443 - protein, 8 aa, Homo sapiens
  misc_feature: Table A; Target 32443; HLA-C*16:01; KCNU1; ENSG00000215262; CTA
ISNIMRVL

SEQ ID NO: 32444 - protein, 9 aa, Homo sapiens
  misc_feature: Table A; Target 32444; HLA-B*57:01; KCNU1; ENSG00000215262; CTA
ISYYLKSNW

SEQ ID NO: 32445 - protein, 8 aa, Homo sapiens
  misc_feature: Table A; Target 32445; HLA-A*32:01; KCNU1; ENSG00000215262; CTA
ITRPANEF

SEQ ID NO: 32446 - protein, 8 aa, Homo sapiens
  misc_feature: Table A; Target 32446; HLA-B*07:02; KCNU1; ENSG00000215262; CTA
ITRPANEF

SEQ ID NO: 32447 - protein, 8 aa, Homo sapiens
  misc_feature: Table A; Target 32447; HLA-B*15:01; KCNU1; ENSG00000215262; CTA
ITRPANEF

SEQ ID NO: 32448 - protein, 8 aa, Homo sapiens
  misc_feature: Table A; Target 32448; HLA-B*15:03; KCNU1; ENSG00000215262; CTA
ITRPANEF

SEQ ID NO: 32449 - protein, 8 aa, Homo sapiens
  misc_feature: Table A; Target 32449; HLA-B*46:01; KCNU1; ENSG00000215262; CTA
ITRPANEF

SEQ ID NO: 32450 - protein, 8 aa, Homo sapiens
  misc_feature: Table A; Target 32450; HLA-B*57:01; KCNU1; ENSG00000215262; CTA
ITRPANEF

SEQ ID NO: 32451 - protein, 8 aa, Homo sapiens
  misc_feature: Table A; Target 32451; HLA-B*58:01; KCNU1; ENSG00000215262; CTA
ITRPANEF

SEQ ID NO: 32452 - protein, 8 aa, Homo sapiens
  misc_feature: Table A; Target 32452; HLA-C*01:02; KCNU1; ENSG00000215262; CTA
ITRPANEF

SEQ ID NO: 32453 - protein, 8 aa, Homo sapiens
  misc_feature: Table A; Target 32453; HLA-C*07:02; KCNU1; ENSG00000215262; CTA
ITRPANEF

SEQ ID NO: 32454 - protein, 8 aa, Homo sapiens
  misc_feature: Table A; Target 32454; HLA-C*14:02; KCNU1; ENSG00000215262; CTA
ITRPANEF

SEQ ID NO: 32455 - protein, 8 aa, Homo sapiens
  misc_feature: Table A; Target 32455; HLA-C*16:01; KCNU1; ENSG00000215262; CTA
ITRPANEF

SEQ ID NO: 32456 - protein, 10 aa, Homo sapiens
  misc_feature: Table A; Target 32456; HLA-B*57:01; KCNU1; ENSG00000215262; CTA
ITRPANEFKL

SEQ ID NO: 32457 - protein, 9 aa, Homo sapiens
  misc_feature: Table A; Target 32457; HLA-A*23:01; KCNU1; ENSG00000215262; CTA
ITVDSVTAF

SEQ ID NO: 32458 - protein, 9 aa, Homo sapiens
  misc_feature: Table A; Target 32458; HLA-A*24:02; KCNU1; ENSG00000215262; CTA
ITVDSVTAF

SEQ ID NO: 32459 - protein, 9 aa, Homo sapiens
  misc_feature: Table A; Target 32459; HLA-A*25:01; KCNU1; ENSG00000215262; CTA
ITVDSVTAF

SEQ ID NO: 32460 - protein, 9 aa, Homo sapiens
  misc_feature: Table A; Target 32460; HLA-A*26:01; KCNU1; ENSG00000215262; CTA
ITVDSVTAF

SEQ ID NO: 32461 - protein, 9 aa, Homo sapiens
  misc_feature: Table A; Target 32461; HLA-A*29:02; KCNU1; ENSG00000215262; CTA
ITVDSVTAF

SEQ ID NO: 32462 - protein, 9 aa, Homo sapiens
  misc_feature: Table A; Target 32462; HLA-A*30:01; KCNU1; ENSG00000215262; CTA
ITVDSVTAF

SEQ ID NO: 32463 - protein, 9 aa, Homo sapiens
  misc_feature: Table A; Target 32463; HLA-A*30:02; KCNU1; ENSG00000215262; CTA
ITVDSVTAF

SEQ ID NO: 32464 - protein, 9 aa, Homo sapiens
  misc_feature: Table A; Target 32464; HLA-A*32:01; KCNU1; ENSG00000215262; CTA
ITVDSVTAF

SEQ ID NO: 32465 - protein, 9 aa, Homo sapiens
  misc_feature: Table A; Target 32465; HLA-B*15:01; KCNU1; ENSG00000215262; CTA
ITVDSVTAF

SEQ ID NO: 32466 - protein, 9 aa, Homo sapiens
  misc_feature: Table A; Target 32466; HLA-B*15:03; KCNU1; ENSG00000215262; CTA
ITVDSVTAF

SEQ ID NO: 32467 - protein, 9 aa, Homo sapiens
  misc_feature: Table A; Target 32467; HLA-B*18:01; KCNU1; ENSG00000215262; CTA
ITVDSVTAF

SEQ ID NO: 32468 - protein, 9 aa, Homo sapiens
  misc_feature: Table A; Target 32468; HLA-B*35:01; KCNU1; ENSG00000215262; CTA
ITVDSVTAF

SEQ ID NO: 32469 - protein, 9 aa, Homo sapiens
  misc_feature: Table A; Target 32469; HLA-B*39:01; KCNU1; ENSG00000215262; CTA
ITVDSVTAF

SEQ ID NO: 32470 - protein, 9 aa, Homo sapiens
  misc_feature: Table A; Target 32470; HLA-B*46:01; KCNU1; ENSG00000215262; CTA
ITVDSVTAF

SEQ ID NO: 32471 - protein, 9 aa, Homo sapiens
  misc_feature: Table A; Target 32471; HLA-B*57:01; KCNU1; ENSG00000215262; CTA
ITVDSVTAF

SEQ ID NO: 32472 - protein, 9 aa, Homo sapiens
  misc_feature: Table A; Target 32472; HLA-B*58:01; KCNU1; ENSG00000215262; CTA
ITVDSVTAF

SEQ ID NO: 32473 - protein, 9 aa, Homo sapiens
  misc_feature: Table A; Target 32473; HLA-C*01:02; KCNU1; ENSG00000215262; CTA
ITVDSVTAF

SEQ ID NO: 32474 - protein, 9 aa, Homo sapiens
  misc_feature: Table A; Target 32474; HLA-C*02:02; KCNU1; ENSG00000215262; CTA
ITVDSVTAF

SEQ ID NO: 32475 - protein, 9 aa, Homo sapiens
  misc_feature: Table A; Target 32475; HLA-C*03:03; KCNU1; ENSG00000215262; CTA
ITVDSVTAF

SEQ ID NO: 32476 - protein, 9 aa, Homo sapiens
  misc_feature: Table A; Target 32476; HLA-C*03:04; KCNU1; ENSG00000215262; CTA
ITVDSVTAF

SEQ ID NO: 32477 - protein, 9 aa, Homo sapiens
  misc_feature: Table A; Target 32477; HLA-C*05:01; KCNU1; ENSG00000215262; CTA
ITVDSVTAF

SEQ ID NO: 32478 - protein, 9 aa, Homo sapiens
  misc_feature: Table A; Target 32478; HLA-C*07:04; KCNU1; ENSG00000215262; CTA
ITVDSVTAF

SEQ ID NO: 32479 - protein, 9 aa, Homo sapiens
  misc_feature: Table A; Target 32479; HLA-C*07:06; KCNU1; ENSG00000215262; CTA
ITVDSVTAF

SEQ ID NO: 32480 - protein, 9 aa, Homo sapiens
  misc_feature: Table A; Target 32480; HLA-C*12:03; KCNU1; ENSG00000215262; CTA
ITVDSVTAF

SEQ ID NO: 32481 - protein, 9 aa, Homo sapiens
  misc_feature: Table A; Target 32481; HLA-C*14:02; KCNU1; ENSG00000215262; CTA
ITVDSVTAF

SEQ ID NO: 32482 - protein, 9 aa, Homo sapiens
  misc_feature: Table A; Target 32482; HLA-C*16:01; KCNU1; ENSG00000215262; CTA
ITVDSVTAF

SEQ ID NO: 32483 - protein, 9 aa, Homo sapiens
  misc_feature: Table A; Target 32483; HLA-C*16:04; KCNU1; ENSG00000215262; CTA
ITVDSVTAF

SEQ ID NO: 32484 - protein, 10 aa, Homo sapiens
  misc_feature: Table A; Target 32484; HLA-A*68:02; KCNU1; ENSG00000215262; CTA
ITVDSVTAFL

SEQ ID NO: 32485 - protein, 11 aa, Homo sapiens
  misc_feature: Table A; Target 32485; HLA-A*11:01; KCNU1; ENSG00000215262; CTA
ITVDSVTAFLR

SEQ ID NO: 32486 - protein, 11 aa, Homo sapiens
  misc_feature: Table A; Target 32486; HLA-A*31:01; KCNU1; ENSG00000215262; CTA
ITVDSVTAFLR

SEQ ID NO: 32487 - protein, 11 aa, Homo sapiens
  misc_feature: Table A; Target 32487; HLA-A*33:03; KCNU1; ENSG00000215262; CTA
ITVDSVTAFLR

SEQ ID NO: 32488 - protein, 11 aa, Homo sapiens
  misc_feature: Table A; Target 32488; HLA-A*68:01; KCNU1; ENSG00000215262; CTA
ITVDSVTAFLR

SEQ ID NO: 32489 - protein, 11 aa, Homo sapiens
  misc_feature: Table A; Target 32489; HLA-B*27:02; KCNU1; ENSG00000215262; CTA
ITVDSVTAFLR

SEQ ID NO: 32490 - protein, 11 aa, Homo sapiens
  misc_feature: Table A; Target 32490; HLA-C*07:06; KCNU1; ENSG00000215262; CTA
ITVDSVTAFLR

SEQ ID NO: 32491 - protein, 9 aa, Homo sapiens
  misc_feature: Table A; Target 32491; HLA-A*26:01; KCNU1; ENSG00000215262; CTA
ITVPSVKRM

SEQ ID NO: 32492 - protein, 9 aa, Homo sapiens
  misc_feature: Table A; Target 32492; HLA-B*57:01; KCNU1; ENSG00000215262; CTA
ITVPSVKRM

SEQ ID NO: 32493 - protein, 9 aa, Homo sapiens
  misc_feature: Table A; Target 32493; HLA-B*58:01; KCNU1; ENSG00000215262; CTA
ITVPSVKRM

SEQ ID NO: 32494 - protein, 9 aa, Homo sapiens
  misc_feature: Table A; Target 32494; HLA-C*12:03; KCNU1; ENSG00000215262; CTA
ITVPSVKRM

SEQ ID NO: 32495 - protein, 9 aa, Homo sapiens
  misc_feature: Table A; Target 32495; HLA-C*16:01; KCNU1; ENSG00000215262; CTA
ITVPSVKRM

SEQ ID NO: 32496 - protein, 9 aa, Homo sapiens
  misc_feature: Table A; Target 32496; HLA-C*16:02; KCNU1; ENSG00000215262; CTA
ITVPSVKRM

SEQ ID NO: 32497 - protein, 9 aa, Homo sapiens
  misc_feature: Table A; Target 32497; HLA-A*01:01; KCNU1; ENSG00000215262; CTA
IVFIGSLDY

SEQ ID NO: 32498 - protein, 9 aa, Homo sapiens
  misc_feature: Table A; Target 32498; HLA-A*26:01; KCNU1; ENSG00000215262; CTA
IVFIGSLDY

SEQ ID NO: 32499 - protein, 9 aa, Homo sapiens
  misc_feature: Table A; Target 32499; HLA-A*29:02; KCNU1; ENSG00000215262; CTA
IVFIGSLDY

SEQ ID NO: 32500 - protein, 9 aa, Homo sapiens
  misc_feature: Table A; Target 32500; HLA-A*30:02; KCNU1; ENSG00000215262; CTA
IVFIGSLDY

SEQ ID NO: 32501 - protein, 9 aa, Homo sapiens
  misc_feature: Table A; Target 32501; HLA-B*15:01; KCNU1; ENSG00000215262; CTA
IVFIGSLDY

SEQ ID NO: 32502 - protein, 9 aa, Homo sapiens
  misc_feature: Table A; Target 32502; HLA-B*15:03; KCNU1; ENSG00000215262; CTA
IVFIGSLDY

SEQ ID NO: 32503 - protein, 9 aa, Homo sapiens
  misc_feature: Table A; Target 32503; HLA-B*35:01; KCNU1; ENSG00000215262; CTA
IVFIGSLDY

SEQ ID NO: 32504 - protein, 9 aa, Homo sapiens
  misc_feature: Table A; Target 32504; HLA-B*46:01; KCNU1; ENSG00000215262; CTA
IVFIGSLDY

SEQ ID NO: 32505 - protein, 9 aa, Homo sapiens
  misc_feature: Table A; Target 32505; HLA-C*02:02; KCNU1; ENSG00000215262; CTA
IVFIGSLDY

SEQ ID NO: 32506 - protein, 10 aa, Homo sapiens
  misc_feature: Table A; Target 32506; HLA-A*68:02; KCNU1; ENSG00000215262; CTA
IVFIGSLDYL

SEQ ID NO: 32507 - protein, 11 aa, Homo sapiens
  misc_feature: Table A; Target 32507; HLA-C*01:02; KCNU1; ENSG00000215262; CTA
IVFLGETPPSL

SEQ ID NO: 32508 - protein, 9 aa, Homo sapiens
  misc_feature: Table A; Target 32508; HLA-A*23:01; KCNU1; ENSG00000215262; CTA
IYILPGCAL

SEQ ID NO: 32509 - protein, 9 aa, Homo sapiens
  misc_feature: Table A; Target 32509; HLA-A*24:02; KCNU1; ENSG00000215262; CTA
IYILPGCAL

SEQ ID NO: 32510 - protein, 9 aa, Homo sapiens
  misc_feature: Table A; Target 32510; HLA-C*01:02; KCNU1; ENSG00000215262; CTA
IYILPGCAL

SEQ ID NO: 32511 - protein, 9 aa, Homo sapiens
  misc_feature: Table A; Target 32511; HLA-C*03:03; KCNU1; ENSG00000215262; CTA
IYILPGCAL

SEQ ID NO: 32512 - protein, 9 aa, Homo sapiens
  misc_feature: Table A; Target 32512; HLA-C*03:04; KCNU1; ENSG00000215262; CTA
IYILPGCAL

SEQ ID NO: 32513 - protein, 9 aa, Homo sapiens
  misc_feature: Table A; Target 32513; HLA-C*14:02; KCNU1; ENSG00000215262; CTA
IYILPGCAL

SEQ ID NO: 32514 - protein, 10 aa, Homo sapiens
  misc_feature: Table A; Target 32514; HLA-A*24:02; KCNU1; ENSG00000215262; CTA
IYILPGCALY

SEQ ID NO: 32515 - protein, 10 aa, Homo sapiens
  misc_feature: Table A; Target 32515; HLA-A*29:02; KCNU1; ENSG00000215262; CTA
IYILPGCALY

SEQ ID NO: 32516 - protein, 9 aa, Homo sapiens
  misc_feature: Table A; Target 32516; HLA-A*23:01; KCNU1; ENSG00000215262; CTA
IYLVMATTS

SEQ ID NO: 32517 - protein, 9 aa, Homo sapiens
  misc_feature: Table A; Target 32517; HLA-C*14:02; KCNU1; ENSG00000215262; CTA
IYLVMATTS

SEQ ID NO: 32518 - protein, 9 aa, Homo sapiens
  misc_feature: Table A; Target 32518; HLA-A*32:01; KCNU1; ENSG00000215262; CTA
KASQTTETH

SEQ ID NO: 32519 - protein, 9 aa, Homo sapiens
  misc_feature: Table A; Target 32519; HLA-B*58:01; KCNU1; ENSG00000215262; CTA
KASQTTETH

SEQ ID NO: 32520 - protein, 8 aa, Homo sapiens
  misc_feature: Table A; Target 32520; HLA-B*37:01; KCNU1; ENSG00000215262; CTA
KELKDIVF

SEQ ID NO: 32521 - protein, 9 aa, Homo sapiens
  misc_feature: Table A; Target 32521; HLA-B*40:01; KCNU1; ENSG00000215262; CTA
KELKDIVFI

SEQ ID NO: 32522 - protein, 9 aa, Homo sapiens
  misc_feature: Table A; Target 32522; HLA-B*44:02; KCNU1; ENSG00000215262; CTA
KELKDIVFI

SEQ ID NO: 32523 - protein, 9 aa, Homo sapiens
  misc_feature: Table A; Target 32523; HLA-B*49:01; KCNU1; ENSG00000215262; CTA
KELKDIVFI

SEQ ID NO: 32524 - protein, 10 aa, Homo sapiens
  misc_feature: Table A; Target 32524; HLA-A*30:02; KCNU1; ENSG00000215262; CTA
KGRNSQNISY

SEQ ID NO: 32525 - protein, 10 aa, Homo sapiens
  misc_feature: Table A; Target 32525; HLA-B*46:01; KCNU1; ENSG00000215262; CTA
KGRNSQNISY

SEQ ID NO: 32526 - protein, 9 aa, Homo sapiens
  misc_feature: Table A; Target 32526; HLA-C*16:02; KCNU1; ENSG00000215262; CTA
KGTGIILEL

SEQ ID NO: 32527 - protein, 9 aa, Homo sapiens
  misc_feature: Table A; Target 32527; HLA-A*02:04; KCNU1; ENSG00000215262; CTA
KLLPSDLVF

SEQ ID NO: 32528 - protein, 9 aa, Homo sapiens
  misc_feature: Table A; Target 32528; HLA-A*23:01; KCNU1; ENSG00000215262; CTA
KLLPSDLVF

SEQ ID NO: 32529 - protein, 9 aa, Homo sapiens
  misc_feature: Table A; Target 32529; HLA-A*29:02; KCNU1; ENSG00000215262; CTA
KLLPSDLVF

SEQ ID NO: 32530 - protein, 9 aa, Homo sapiens
  misc_feature: Table A; Target 32530; HLA-B*15:01; KCNU1; ENSG00000215262; CTA
KLLPSDLVF

SEQ ID NO: 32531 - protein, 9 aa, Homo sapiens
  misc_feature: Table A; Target 32531; HLA-B*57:01; KCNU1; ENSG00000215262; CTA
KLLPSDLVF

SEQ ID NO: 32532 - protein, 10 aa, Homo sapiens
  misc_feature: Table A; Target 32532; HLA-A*02:01; KCNU1; ENSG00000215262; CTA
KLLPSDLVFC

SEQ ID NO: 32533 - protein, 10 aa, Homo sapiens
  misc_feature: Table A; Target 32533; HLA-A*02:04; KCNU1; ENSG00000215262; CTA
KLLPSDLVFC

SEQ ID NO: 32534 - protein, 9 aa, Homo sapiens
  misc_feature: Table A; Target 32534; HLA-A*02:04; KCNU1; ENSG00000215262; CTA
KLLSIILST

SEQ ID NO: 32535 - protein, 10 aa, Homo sapiens
  misc_feature: Table A; Target 32535; HLA-A*02:04; KCNU1; ENSG00000215262; CTA
KLLSIILSTW

SEQ ID NO: 32536 - protein, 10 aa, Homo sapiens
  misc_feature: Table A; Target 32536; HLA-B*57:01; KCNU1; ENSG00000215262; CTA
KLLSIILSTW

SEQ ID NO: 32537 - protein, 9 aa, Homo sapiens
  misc_feature: Table A; Target 32537; HLA-C*07:02; KCNU1; ENSG00000215262; CTA
KNKILTQRL

SEQ ID NO: 32538 - protein, 9 aa, Homo sapiens
  misc_feature: Table A; Target 32538; HLA-A*02:07; KCNU1; ENSG00000215262; CTA
KNPSNIHFI

SEQ ID NO: 32539 - protein, 9 aa, Homo sapiens
  misc_feature: Table A; Target 32539; HLA-A*24:02; KCNU1; ENSG00000215262; CTA
KNPSNIHFI

SEQ ID NO: 32540 - protein, 9 aa, Homo sapiens
  misc_feature: Table A; Target 32540; HLA-A*23:01; KCNU1; ENSG00000215262; CTA
KNYDSTTRI

SEQ ID NO: 32541 - protein, 8 aa, Homo sapiens
  misc_feature: Table A; Target 32541; HLA-B*56:01; KCNU1; ENSG00000215262; CTA
KPTSLDKV

SEQ ID NO: 32542 - protein, 10 aa, Homo sapiens
  misc_feature: Table A; Target 32542; HLA-B*07:02; KCNU1; ENSG00000215262; CTA
KPTSLDKVTL

SEQ ID NO: 32543 - protein, 10 aa, Homo sapiens
  misc_feature: Table A; Target 32543; HLA-B*35:01; KCNU1; ENSG00000215262; CTA
KPTSLDKVTL

SEQ ID NO: 32544 - protein, 10 aa, Homo sapiens
  misc_feature: Table A; Target 32544; HLA-B*35:03; KCNU1; ENSG00000215262; CTA
KPTSLDKVTL

SEQ ID NO: 32545 - protein, 10 aa, Homo sapiens
  misc_feature: Table A; Target 32545; HLA-B*40:01; KCNU1; ENSG00000215262; CTA
KPTSLDKVTL

SEQ ID NO: 32546 - protein, 10 aa, Homo sapiens
  misc_feature: Table A; Target 32546; HLA-B*40:02; KCNU1; ENSG00000215262; CTA
KPTSLDKVTL

SEQ ID NO: 32547 - protein, 10 aa, Homo sapiens
  misc_feature: Table A; Target 32547; HLA-B*55:01; KCNU1; ENSG00000215262; CTA
KPTSLDKVTL

SEQ ID NO: 32548 - protein, 10 aa, Homo sapiens
  misc_feature: Table A; Target 32548; HLA-B*56:01; KCNU1; ENSG00000215262; CTA
KPTSLDKVTL

SEQ ID NO: 32549 - protein, 10 aa, Homo sapiens
  misc_feature: Table A; Target 32549; HLA-C*07:02; KCNU1; ENSG00000215262; CTA
KPTSLDKVTL

SEQ ID NO: 32550 - protein, 11 aa, Homo sapiens
  misc_feature: Table A; Target 32550; HLA-A*03:02; KCNU1; ENSG00000215262; CTA
KPTSLDKVTLK

SEQ ID NO: 32551 - protein, 9 aa, Homo sapiens
  misc_feature: Table A; Target 32551; HLA-A*31:01; KCNU1; ENSG00000215262; CTA
KQIAWNQSR

SEQ ID NO: 32552 - protein, 9 aa, Homo sapiens
  misc_feature: Table A; Target 32552; HLA-B*58:01; KCNU1; ENSG00000215262; CTA
KSGEINTEI

SEQ ID NO: 32553 - protein, 8 aa, Homo sapiens
  misc_feature: Table A; Target 32553; HLA-B*58:01; KCNU1; ENSG00000215262; CTA
KSLFTDGF

SEQ ID NO: 32554 - protein, 9 aa, Homo sapiens
  misc_feature: Table A; Target 32554; HLA-B*57:01; KCNU1; ENSG00000215262; CTA
KSNWLGLRF

SEQ ID NO: 32555 - protein, 8 aa, Homo sapiens
  misc_feature: Table A; Target 32555; HLA-A*03:01; KCNU1; ENSG00000215262; CTA
KSYEIVNK

SEQ ID NO: 32556 - protein, 8 aa, Homo sapiens
  misc_feature: Table A; Target 32556; HLA-A*03:02; KCNU1; ENSG00000215262; CTA
KSYEIVNK

SEQ ID NO: 32557 - protein, 8 aa, Homo sapiens
  misc_feature: Table A; Target 32557; HLA-A*11:01; KCNU1; ENSG00000215262; CTA
KSYEIVNK

SEQ ID NO: 32558 - protein, 8 aa, Homo sapiens
  misc_feature: Table A; Target 32558; HLA-A*31:01; KCNU1; ENSG00000215262; CTA
KSYEIVNK

SEQ ID NO: 32559 - protein, 9 aa, Homo sapiens
  misc_feature: Table A; Target 32559; HLA-B*40:02; KCNU1; ENSG00000215262; CTA
KSYEIVNKA

SEQ ID NO: 32560 - protein, 9 aa, Homo sapiens
  misc_feature: Table A; Target 32560; HLA-B*56:01; KCNU1; ENSG00000215262; CTA
KSYEIVNKA

SEQ ID NO: 32561 - protein, 9 aa, Homo sapiens
  misc_feature: Table A; Target 32561; HLA-B*58:01; KCNU1; ENSG00000215262; CTA
KSYEIVNKA

SEQ ID NO: 32562 - protein, 9 aa, Homo sapiens
  misc_feature: Table A; Target 32562; HLA-C*12:03; KCNU1; ENSG00000215262; CTA
KSYEIVNKA

SEQ ID NO: 32563 - protein, 9 aa, Homo sapiens
  misc_feature: Table A; Target 32563; HLA-C*16:02; KCNU1; ENSG00000215262; CTA
KSYEIVNKA

SEQ ID NO: 32564 - protein, 9 aa, Homo sapiens
  misc_feature: Table A; Target 32564; HLA-A*23:01; KCNU1; ENSG00000215262; CTA
KTIPIDLVF

SEQ ID NO: 32565 - protein, 9 aa, Homo sapiens
  misc_feature: Table A; Target 32565; HLA-A*24:02; KCNU1; ENSG00000215262; CTA
KTIPIDLVF

SEQ ID NO: 32566 - protein, 9 aa, Homo sapiens
  misc_feature: Table A; Target 32566; HLA-A*29:02; KCNU1; ENSG00000215262; CTA
KTIPIDLVF

SEQ ID NO: 32567 - protein, 9 aa, Homo sapiens
  misc_feature: Table A; Target 32567; HLA-A*32:01; KCNU1; ENSG00000215262; CTA
KTIPIDLVF

SEQ ID NO: 32568 - protein, 9 aa, Homo sapiens
  misc_feature: Table A; Target 32568; HLA-B*15:01; KCNU1; ENSG00000215262; CTA
KTIPIDLVF

SEQ ID NO: 32569 - protein, 9 aa, Homo sapiens
  misc_feature: Table A; Target 32569; HLA-B*44:03; KCNU1; ENSG00000215262; CTA
KTIPIDLVF

SEQ ID NO: 32570 - protein, 9 aa, Homo sapiens
  misc_feature: Table A; Target 32570; HLA-B*57:01; KCNU1; ENSG00000215262; CTA
KTIPIDLVF

SEQ ID NO: 32571 - protein, 9 aa, Homo sapiens
  misc_feature: Table A; Target 32571; HLA-B*58:01; KCNU1; ENSG00000215262; CTA
KTIPIDLVF

SEQ ID NO: 32572 - protein, 9 aa, Homo sapiens
  misc_feature: Table A; Target 32572; HLA-C*02:02; KCNU1; ENSG00000215262; CTA
KTIPIDLVF

SEQ ID NO: 32573 - protein, 9 aa, Homo sapiens
  misc_feature: Table A; Target 32573; HLA-C*03:04; KCNU1; ENSG00000215262; CTA
KTIPIDLVF

SEQ ID NO: 32574 - protein, 8 aa, Homo sapiens
  misc_feature: Table A; Target 32574; HLA-C*16:01; KCNU1; ENSG00000215262; CTA
KTSLGRTF

SEQ ID NO: 32575 - protein, 8 aa, Homo sapiens
  misc_feature: Table A; Target 32575; HLA-A*32:01; KCNU1; ENSG00000215262; CTA
KTSNSVKF

SEQ ID NO: 32576 - protein, 8 aa, Homo sapiens
  misc_feature: Table A; Target 32576; HLA-B*37:01; KCNU1; ENSG00000215262; CTA
KTSNSVKF

SEQ ID NO: 32577 - protein, 8 aa, Homo sapiens
  misc_feature: Table A; Target 32577; HLA-B*58:01; KCNU1; ENSG00000215262; CTA
KTSNSVKF

SEQ ID NO: 32578 - protein, 8 aa, Homo sapiens
  misc_feature: Table A; Target 32578; HLA-C*16:01; KCNU1; ENSG00000215262; CTA
KTSNSVKF

SEQ ID NO: 32579 - protein, 10 aa, Homo sapiens
  misc_feature: Table A; Target 32579; HLA-A*03:01; KCNU1; ENSG00000215262; CTA
KTSNSVKFSK

SEQ ID NO: 32580 - protein, 10 aa, Homo sapiens
  misc_feature: Table A; Target 32580; HLA-A*03:02; KCNU1; ENSG00000215262; CTA
KTSNSVKFSK

SEQ ID NO: 32581 - protein, 10 aa, Homo sapiens
  misc_feature: Table A; Target 32581; HLA-A*11:01; KCNU1; ENSG00000215262; CTA
KTSNSVKFSK

SEQ ID NO: 32582 - protein, 8 aa, Homo sapiens
  misc_feature: Table A; Target 32582; HLA-A*32:01; KCNU1; ENSG00000215262; CTA
KVMPKQTW

SEQ ID NO: 32583 - protein, 8 aa, Homo sapiens
  misc_feature: Table A; Target 32583; HLA-B*08:01; KCNU1; ENSG00000215262; CTA
KVMPKQTW

SEQ ID NO: 32584 - protein, 8 aa, Homo sapiens
  misc_feature: Table A; Target 32584; HLA-B*57:01; KCNU1; ENSG00000215262; CTA
KVMPKQTW

SEQ ID NO: 32585 - protein, 8 aa, Homo sapiens
  misc_feature: Table A; Target 32585; HLA-B*58:01; KCNU1; ENSG00000215262; CTA
KVMPKQTW

SEQ ID NO: 32586 - protein, 9 aa, Homo sapiens
  misc_feature: Table A; Target 32586; HLA-A*03:01; KCNU1; ENSG00000215262; CTA
KVMPKQTWK

SEQ ID NO: 32587 - protein, 9 aa, Homo sapiens
  misc_feature: Table A; Target 32587; HLA-A*03:02; KCNU1; ENSG00000215262; CTA
KVMPKQTWK

SEQ ID NO: 32588 - protein, 9 aa, Homo sapiens
  misc_feature: Table A; Target 32588; HLA-A*11:01; KCNU1; ENSG00000215262; CTA
KVMPKQTWK

SEQ ID NO: 32589 - protein, 8 aa, Homo sapiens
  misc_feature: Table A; Target 32589; HLA-A*02:07; KCNU1; ENSG00000215262; CTA
KVPILTEL

SEQ ID NO: 32590 - protein, 8 aa, Homo sapiens
  misc_feature: Table A; Target 32590; HLA-C*01:02; KCNU1; ENSG00000215262; CTA
KVPILTEL

SEQ ID NO: 32591 - protein, 9 aa, Homo sapiens
  misc_feature: Table A; Target 32591; HLA-A*03:01; KCNU1; ENSG00000215262; CTA
KVPILTELK

SEQ ID NO: 32592 - protein, 9 aa, Homo sapiens
  misc_feature: Table A; Target 32592; HLA-A*03:02; KCNU1; ENSG00000215262; CTA
KVPILTELK

SEQ ID NO: 32593 - protein, 10 aa, Homo sapiens
  misc_feature: Table A; Target 32593; HLA-A*25:01; KCNU1; ENSG00000215262; CTA
KVYLPKIPSW

SEQ ID NO: 32594 - protein, 10 aa, Homo sapiens
  misc_feature: Table A; Target 32594; HLA-B*57:01; KCNU1; ENSG00000215262; CTA
KVYLPKIPSW

SEQ ID NO: 32595 - protein, 9 aa, Homo sapiens
  misc_feature: Table A; Target 32595; HLA-A*23:01; KCNU1; ENSG00000215262; CTA
KYTSSYEAL

SEQ ID NO: 32596 - protein, 9 aa, Homo sapiens
  misc_feature: Table A; Target 32596; HLA-A*24:02; KCNU1; ENSG00000215262; CTA
KYTSSYEAL

SEQ ID NO: 32597 - protein, 9 aa, Homo sapiens
  misc_feature: Table A; Target 32597; HLA-C*01:02; KCNU1; ENSG00000215262; CTA
KYTSSYEAL

SEQ ID NO: 32598 - protein, 9 aa, Homo sapiens
  misc_feature: Table A; Target 32598; HLA-C*14:02; KCNU1; ENSG00000215262; CTA
KYTSSYEAL

SEQ ID NO: 32599 - protein, 9 aa, Homo sapiens
  misc_feature: Table A; Target 32599; HLA-A*02:03; KCNU1; ENSG00000215262; CTA
LDKDKVYGV

SEQ ID NO: 32600 - protein, 9 aa, Homo sapiens
  misc_feature: Table A; Target 32600; HLA-B*37:01; KCNU1; ENSG00000215262; CTA
LDKDKVYGV

SEQ ID NO: 32601 - protein, 9 aa, Homo sapiens
  misc_feature: Table A; Target 32601; HLA-B*18:01; KCNU1; ENSG00000215262; CTA
LDSLLATAF

SEQ ID NO: 32602 - protein, 9 aa, Homo sapiens
  misc_feature: Table A; Target 32602; HLA-B*37:01; KCNU1; ENSG00000215262; CTA
LDSLLATAF

SEQ ID NO: 32603 - protein, 9 aa, Homo sapiens
  misc_feature: Table A; Target 32603; HLA-B*40:02; KCNU1; ENSG00000215262; CTA
LDSLLATAF

SEQ ID NO: 32604 - protein, 9 aa, Homo sapiens
  misc_feature: Table A; Target 32604; HLA-B*44:02; KCNU1; ENSG00000215262; CTA
LDSLLATAF

SEQ ID NO: 32605 - protein, 10 aa, Homo sapiens
  misc_feature: Table A; Target 32605; HLA-A*30:01; KCNU1; ENSG00000215262; CTA
LEGSLQETNL

SEQ ID NO: 32606 - protein, 10 aa, Homo sapiens
  misc_feature: Table A; Target 32606; HLA-B*40:01; KCNU1; ENSG00000215262; CTA
LEGSLQETNL

SEQ ID NO: 32607 - protein, 10 aa, Homo sapiens
  misc_feature: Table A; Target 32607; HLA-B*44:02; KCNU1; ENSG00000215262; CTA
LELETIFKCY

SEQ ID NO: 32608 - protein, 10 aa, Homo sapiens
  misc_feature: Table A; Target 32608; HLA-B*44:03; KCNU1; ENSG00000215262; CTA
LELETIFKCY

SEQ ID NO: 32609 - protein, 9 aa, Homo sapiens
  misc_feature: Table A; Target 32609; HLA-B*49:01; KCNU1; ENSG00000215262; CTA
LELFTSGTI

SEQ ID NO: 32610 - protein, 8 aa, Homo sapiens
  misc_feature: Table A; Target 32610; HLA-B*49:01; KCNU1; ENSG00000215262; CTA
LELLQMLV

SEQ ID NO: 32611 - protein, 9 aa, Homo sapiens
  misc_feature: Table A; Target 32611; HLA-A*23:01; KCNU1; ENSG00000215262; CTA
LELPQILQI

SEQ ID NO: 32612 - protein, 9 aa, Homo sapiens
  misc_feature: Table A; Target 32612; HLA-A*30:01; KCNU1; ENSG00000215262; CTA
LELPQILQI

SEQ ID NO: 32613 - protein, 9 aa, Homo sapiens
  misc_feature: Table A; Target 32613; HLA-B*13:02; KCNU1; ENSG00000215262; CTA
LELPQILQI

SEQ ID NO: 32614 - protein, 9 aa, Homo sapiens
  misc_feature: Table A; Target 32614; HLA-B*18:01; KCNU1; ENSG00000215262; CTA
LELPQILQI

SEQ ID NO: 32615 - protein, 9 aa, Homo sapiens
  misc_feature: Table A; Target 32615; HLA-B*40:01; KCNU1; ENSG00000215262; CTA
LELPQILQI

SEQ ID NO: 32616 - protein, 9 aa, Homo sapiens
  misc_feature: Table A; Target 32616; HLA-B*44:02; KCNU1; ENSG00000215262; CTA
LELPQILQI

SEQ ID NO: 32617 - protein, 9 aa, Homo sapiens
  misc_feature: Table A; Target 32617; HLA-B*44:03; KCNU1; ENSG00000215262; CTA
LELPQILQI

SEQ ID NO: 32618 - protein, 9 aa, Homo sapiens
  misc_feature: Table A; Target 32618; HLA-B*49:01; KCNU1; ENSG00000215262; CTA
LELPQILQI

SEQ ID NO: 32619 - protein, 9 aa, Homo sapiens
  misc_feature: Table A; Target 32619; HLA-B*51:01; KCNU1; ENSG00000215262; CTA
LELPQILQI

SEQ ID NO: 32620 - protein, 10 aa, Homo sapiens
  misc_feature: Table A; Target 32620; HLA-A*30:01; KCNU1; ENSG00000215262; CTA
LELPQILQIL

SEQ ID NO: 32621 - protein, 10 aa, Homo sapiens
  misc_feature: Table A; Target 32621; HLA-B*40:01; KCNU1; ENSG00000215262; CTA
LELPQILQIL

SEQ ID NO: 32622 - protein, 10 aa, Homo sapiens
  misc_feature: Table A; Target 32622; HLA-B*44:02; KCNU1; ENSG00000215262; CTA
LELPQILQIL

SEQ ID NO: 32623 - protein, 9 aa, Homo sapiens
  misc_feature: Table A; Target 32623; HLA-A*30:01; KCNU1; ENSG00000215262; CTA
LEMNSIVDI

SEQ ID NO: 32624 - protein, 9 aa, Homo sapiens
  misc_feature: Table A; Target 32624; HLA-B*40:01; KCNU1; ENSG00000215262; CTA
LEMNSIVDI

SEQ ID NO: 32625 - protein, 9 aa, Homo sapiens
  misc_feature: Table A; Target 32625; HLA-B*44:02; KCNU1; ENSG00000215262; CTA
LEMNSIVDI

SEQ ID NO: 32626 - protein, 9 aa, Homo sapiens
  misc_feature: Table A; Target 32626; HLA-B*49:01; KCNU1; ENSG00000215262; CTA
LEMNSIVDI

SEQ ID NO: 32627 - protein, 10 aa, Homo sapiens
  misc_feature: Table A; Target 32627; HLA-B*44:02; KCNU1; ENSG00000215262; CTA
LEMNSIVDIF

SEQ ID NO: 32628 - protein, 8 aa, Homo sapiens
  misc_feature: Table A; Target 32628; HLA-B*18:01; KCNU1; ENSG00000215262; CTA
LETIFKCY

SEQ ID NO: 32629 - protein, 9 aa, Homo sapiens
  misc_feature: Table A; Target 32629; HLA-A*23:01; KCNU1; ENSG00000215262; CTA
LFANYIPEM

SEQ ID NO: 32630 - protein, 9 aa, Homo sapiens
  misc_feature: Table A; Target 32630; HLA-A*24:02; KCNU1; ENSG00000215262; CTA
LFANYIPEM

SEQ ID NO: 32631 - protein, 9 aa, Homo sapiens
  misc_feature: Table A; Target 32631; HLA-A*33:01; KCNU1; ENSG00000215262; CTA
LFTSGTIAR

SEQ ID NO: 32632 - protein, 9 aa, Homo sapiens
  misc_feature: Table A; Target 32632; HLA-A*33:03; KCNU1; ENSG00000215262; CTA
LFTSGTIAR

SEQ ID NO: 32633 - protein, 8 aa, Homo sapiens
  misc_feature: Table A; Target 32633; HLA-C*05:01; KCNU1; ENSG00000215262; CTA
LGETPPSL

SEQ ID NO: 32634 - protein, 9 aa, Homo sapiens
  misc_feature: Table A; Target 32634; HLA-A*02:04; KCNU1; ENSG00000215262; CTA
LIILLIFRL

SEQ ID NO: 32635 - protein, 9 aa, Homo sapiens
  misc_feature: Table A; Target 32635; HLA-B*54:01; KCNU1; ENSG00000215262; CTA
LIIYFINSA

SEQ ID NO: 32636 - protein, 9 aa, Homo sapiens
  misc_feature: Table A; Target 32636; HLA-A*02:01; KCNU1; ENSG00000215262; CTA
LILNPPPQV

SEQ ID NO: 32637 - protein, 9 aa, Homo sapiens
  misc_feature: Table A; Target 32637; HLA-A*02:03; KCNU1; ENSG00000215262; CTA
LILNPPPQV

SEQ ID NO: 32638 - protein, 9 aa, Homo sapiens
  misc_feature: Table A; Target 32638; HLA-A*02:04; KCNU1; ENSG00000215262; CTA
LILNPPPQV

SEQ ID NO: 32639 - protein, 9 aa, Homo sapiens
  misc_feature: Table A; Target 32639; HLA-A*02:07; KCNU1; ENSG00000215262; CTA
LILNPPPQV

SEQ ID NO: 32640 - protein, 9 aa, Homo sapiens
  misc_feature: Table A; Target 32640; HLA-B*15:03; KCNU1; ENSG00000215262; CTA
LKNPSNIHF

SEQ ID NO: 32641 - protein, 9 aa, Homo sapiens
  misc_feature: Table A; Target 32641; HLA-A*01:01; KCNU1; ENSG00000215262; CTA
LLATAFYNY

SEQ ID NO: 32642 - protein, 9 aa, Homo sapiens
  misc_feature: Table A; Target 32642; HLA-A*03:01; KCNU1; ENSG00000215262; CTA
LLATAFYNY

SEQ ID NO: 32643 - protein, 9 aa, Homo sapiens
  misc_feature: Table A; Target 32643; HLA-A*29:02; KCNU1; ENSG00000215262; CTA
LLATAFYNY

SEQ ID NO: 32644 - protein, 9 aa, Homo sapiens
  misc_feature: Table A; Target 32644; HLA-A*30:02; KCNU1; ENSG00000215262; CTA
LLATAFYNY

SEQ ID NO: 32645 - protein, 8 aa, Homo sapiens
  misc_feature: Table A; Target 32645; HLA-A*29:02; KCNU1; ENSG00000215262; CTA
LLLIAIEY

SEQ ID NO: 32646 - protein, 8 aa, Homo sapiens
  misc_feature: Table A; Target 32646; HLA-B*46:01; KCNU1; ENSG00000215262; CTA
LLLIAIEY

SEQ ID NO: 32647 - protein, 8 aa, Homo sapiens
  misc_feature: Table A; Target 32647; HLA-C*07:01; KCNU1; ENSG00000215262; CTA
LLLIAIEY

SEQ ID NO: 32648 - protein, 9 aa, Homo sapiens
  misc_feature: Table A; Target 32648; HLA-A*02:01; KCNU1; ENSG00000215262; CTA
LLPSDLVFC

SEQ ID NO: 32649 - protein, 9 aa, Homo sapiens
  misc_feature: Table A; Target 32649; HLA-A*02:07; KCNU1; ENSG00000215262; CTA
LLPSDLVFC

SEQ ID NO: 32650 - protein, 11 aa, Homo sapiens
  misc_feature: Table A; Target 32650; HLA-A*02:07; KCNU1; ENSG00000215262; CTA
LLPSDLVFCAI

SEQ ID NO: 32651 - protein, 9 aa, Homo sapiens
  misc_feature: Table A; Target 32651; HLA-C*07:04; KCNU1; ENSG00000215262; CTA
LLQMLVTGG

SEQ ID NO: 32652 - protein, 9 aa, Homo sapiens
  misc_feature: Table A; Target 32652; HLA-B*44:02; KCNU1; ENSG00000215262; CTA
LLSIILSTW

SEQ ID NO: 32653 - protein, 9 aa, Homo sapiens
  misc_feature: Table A; Target 32653; HLA-B*57:01; KCNU1; ENSG00000215262; CTA
LLSIILSTW

SEQ ID NO: 32654 - protein, 9 aa, Homo sapiens
  misc_feature: Table A; Target 32654; HLA-A*02:04; KCNU1; ENSG00000215262; CTA
LLSLHETIL

SEQ ID NO: 32655 - protein, 8 aa, Homo sapiens
  misc_feature: Table A; Target 32655; HLA-B*51:01; KCNU1; ENSG00000215262; CTA
LPQILQIL

SEQ ID NO: 32656 - protein, 10 aa, Homo sapiens
  misc_feature: Table A; Target 32656; HLA-B*54:01; KCNU1; ENSG00000215262; CTA
LPQILQILRA

SEQ ID NO: 32657 - protein, 10 aa, Homo sapiens
  misc_feature: Table A; Target 32657; HLA-B*56:01; KCNU1; ENSG00000215262; CTA
LPQILQILRA

SEQ ID NO: 32658 - protein, 9 aa, Homo sapiens
  misc_feature: Table A; Target 32658; HLA-B*35:03; KCNU1; ENSG00000215262; CTA
LPSDLVFCA

SEQ ID NO: 32659 - protein, 9 aa, Homo sapiens
  misc_feature: Table A; Target 32659; HLA-B*54:01; KCNU1; ENSG00000215262; CTA
LPSDLVFCA

SEQ ID NO: 32660 - protein, 9 aa, Homo sapiens
  misc_feature: Table A; Target 32660; HLA-B*55:01; KCNU1; ENSG00000215262; CTA
LPSDLVFCA

SEQ ID NO: 32661 - protein, 9 aa, Homo sapiens
  misc_feature: Table A; Target 32661; HLA-B*56:01; KCNU1; ENSG00000215262; CTA
LPSDLVFCA

SEQ ID NO: 32662 - protein, 10 aa, Homo sapiens
  misc_feature: Table A; Target 32662; HLA-A*03:01; KCNU1; ENSG00000215262; CTA
LQKSYEIVNK

SEQ ID NO: 32663 - protein, 9 aa, Homo sapiens
  misc_feature: Table A; Target 32663; HLA-B*13:02; KCNU1; ENSG00000215262; CTA
LQMLVTGGV

SEQ ID NO: 32664 - protein, 8 aa, Homo sapiens
  misc_feature: Table A; Target 32664; HLA-C*05:01; KCNU1; ENSG00000215262; CTA
LSDDFAGM

SEQ ID NO: 32665 - protein, 10 aa, Homo sapiens
  misc_feature: Table A; Target 32665; HLA-A*01:01; KCNU1; ENSG00000215262; CTA
LSDDFAGMSF

SEQ ID NO: 32666 - protein, 10 aa, Homo sapiens
  misc_feature: Table A; Target 32666; HLA-B*46:01; KCNU1; ENSG00000215262; CTA
LSDDFAGMSF

SEQ ID NO: 32667 - protein, 10 aa, Homo sapiens
  misc_feature: Table A; Target 32667; HLA-B*58:01; KCNU1; ENSG00000215262; CTA
LSDDFAGMSF

SEQ ID NO: 32668 - protein, 10 aa, Homo sapiens
  misc_feature: Table A; Target 32668; HLA-C*02:02; KCNU1; ENSG00000215262; CTA
LSDDFAGMSF

SEQ ID NO: 32669 - protein, 10 aa, Homo sapiens
  misc_feature: Table A; Target 32669; HLA-C*03:03; KCNU1; ENSG00000215262; CTA
LSDDFAGMSF

SEQ ID NO: 32670 - protein, 10 aa, Homo sapiens
  misc_feature: Table A; Target 32670; HLA-C*03:04; KCNU1; ENSG00000215262; CTA
LSDDFAGMSF

SEQ ID NO: 32671 - protein, 10 aa, Homo sapiens
  misc_feature: Table A; Target 32671; HLA-C*05:01; KCNU1; ENSG00000215262; CTA
LSDDFAGMSF

SEQ ID NO: 32672 - protein, 10 aa, Homo sapiens
  misc_feature: Table A; Target 32672; HLA-A*01:01; KCNU1; ENSG00000215262; CTA
LSDVNPRNTF

SEQ ID NO: 32673 - protein, 10 aa, Homo sapiens
  misc_feature: Table A; Target 32673; HLA-B*57:01; KCNU1; ENSG00000215262; CTA
LSDVNPRNTF

SEQ ID NO: 32674 - protein, 10 aa, Homo sapiens
  misc_feature: Table A; Target 32674; HLA-B*58:01; KCNU1; ENSG00000215262; CTA
LSDVNPRNTF

SEQ ID NO: 32675 - protein, 10 aa, Homo sapiens
  misc_feature: Table A; Target 32675; HLA-C*05:01; KCNU1; ENSG00000215262; CTA
LSDVNPRNTF

SEQ ID NO: 32676 - protein, 9 aa, Homo sapiens
  misc_feature: Table A; Target 32676; HLA-A*25:01; KCNU1; ENSG00000215262; CTA
LSFPKQIAW

SEQ ID NO: 32677 - protein, 9 aa, Homo sapiens
  misc_feature: Table A; Target 32677; HLA-A*32:01; KCNU1; ENSG00000215262; CTA
LSFPKQIAW

SEQ ID NO: 32678 - protein, 9 aa, Homo sapiens
  misc_feature: Table A; Target 32678; HLA-B*08:01; KCNU1; ENSG00000215262; CTA
LSFPKQIAW

SEQ ID NO: 32679 - protein, 9 aa, Homo sapiens
  misc_feature: Table A; Target 32679; HLA-B*57:01; KCNU1; ENSG00000215262; CTA
LSFPKQIAW

SEQ ID NO: 32680 - protein, 9 aa, Homo sapiens
  misc_feature: Table A; Target 32680; HLA-B*58:01; KCNU1; ENSG00000215262; CTA
LSFPKQIAW

SEQ ID NO: 32681 - protein, 9 aa, Homo sapiens
  misc_feature: Table A; Target 32681; HLA-C*02:02; KCNU1; ENSG00000215262; CTA
LSFPKQIAW

SEQ ID NO: 32682 - protein, 9 aa, Homo sapiens
  misc_feature: Table A; Target 32682; HLA-C*16:01; KCNU1; ENSG00000215262; CTA
LSFPKQIAW

SEQ ID NO: 32683 - protein, 9 aa, Homo sapiens
  misc_feature: Table A; Target 32683; HLA-C*16:04; KCNU1; ENSG00000215262; CTA
LSFPKQIAW

SEQ ID NO: 32684 - protein, 9 aa, Homo sapiens
  misc_feature: Table A; Target 32684; HLA-B*46:01; KCNU1; ENSG00000215262; CTA
LSIGSLIIY

SEQ ID NO: 32685 - protein, 10 aa, Homo sapiens
  misc_feature: Table A; Target 32685; HLA-B*57:01; KCNU1; ENSG00000215262; CTA
LSIGSLIIYF

SEQ ID NO: 32686 - protein, 8 aa, Homo sapiens
  misc_feature: Table A; Target 32686; HLA-B*57:01; KCNU1; ENSG00000215262; CTA
LSIILSTW

SEQ ID NO: 32687 - protein, 8 aa, Homo sapiens
  misc_feature: Table A; Target 32687; HLA-B*58:01; KCNU1; ENSG00000215262; CTA
LSIILSTW

SEQ ID NO: 32688 - protein, 9 aa, Homo sapiens
  misc_feature: Table A; Target 32688; HLA-B*57:01; KCNU1; ENSG00000215262; CTA
LSIILSTWF

SEQ ID NO: 32689 - protein, 11 aa, Homo sapiens
  misc_feature: Table A; Target 32689; HLA-B*57:01; KCNU1; ENSG00000215262; CTA
LSTAFSTGTVF

SEQ ID NO: 32690 - protein, 10 aa, Homo sapiens
  misc_feature: Table A; Target 32690; HLA-A*03:02; KCNU1; ENSG00000215262; CTA
LTSLFVEQNK

SEQ ID NO: 32691 - protein, 10 aa, Homo sapiens
  misc_feature: Table A; Target 32691; HLA-A*11:01; KCNU1; ENSG00000215262; CTA
LTSLFVEQNK

SEQ ID NO: 32692 - protein, 10 aa, Homo sapiens
  misc_feature: Table A; Target 32692; HLA-B*27:02; KCNU1; ENSG00000215262; CTA
LTSLFVEQNK

SEQ ID NO: 32693 - protein, 10 aa, Homo sapiens
  misc_feature: Table A; Target 32693; HLA-B*57:01; KCNU1; ENSG00000215262; CTA
LTSLFVEQNK

SEQ ID NO: 32694 - protein, 8 aa, Homo sapiens
  misc_feature: Table A; Target 32694; HLA-C*05:01; KCNU1; ENSG00000215262; CTA
LVDTEAIM

SEQ ID NO: 32695 - protein, 11 aa, Homo sapiens
  misc_feature: Table A; Target 32695; HLA-A*02:07; KCNU1; ENSG00000215262; CTA
LVDTEAIMATL

SEQ ID NO: 32696 - protein, 9 aa, Homo sapiens
  misc_feature: Table A; Target 32696; HLA-A*02:01; KCNU1; ENSG00000215262; CTA
LVMATTSTV

SEQ ID NO: 32697 - protein, 9 aa, Homo sapiens
  misc_feature: Table A; Target 32697; HLA-A*02:03; KCNU1; ENSG00000215262; CTA
LVMATTSTV

SEQ ID NO: 32698 - protein, 9 aa, Homo sapiens
  misc_feature: Table A; Target 32698; HLA-A*02:07; KCNU1; ENSG00000215262; CTA
LVMATTSTV

SEQ ID NO: 32699 - protein, 9 aa, Homo sapiens
  misc_feature: Table A; Target 32699; HLA-A*25:01; KCNU1; ENSG00000215262; CTA
LVMATTSTV

SEQ ID NO: 32700 - protein, 9 aa, Homo sapiens
  misc_feature: Table A; Target 32700; HLA-B*13:02; KCNU1; ENSG00000215262; CTA
LVMATTSTV

SEQ ID NO: 32701 - protein, 9 aa, Homo sapiens
  misc_feature: Table A; Target 32701; HLA-B*46:01; KCNU1; ENSG00000215262; CTA
LVMATTSTV

SEQ ID NO: 32702 - protein, 9 aa, Homo sapiens
  misc_feature: Table A; Target 32702; HLA-B*51:01; KCNU1; ENSG00000215262; CTA
LVMATTSTV

SEQ ID NO: 32703 - protein, 9 aa, Homo sapiens
  misc_feature: Table A; Target 32703; HLA-B*55:01; KCNU1; ENSG00000215262; CTA
LVMATTSTV

SEQ ID NO: 32704 - protein, 9 aa, Homo sapiens
  misc_feature: Table A; Target 32704; HLA-B*56:01; KCNU1; ENSG00000215262; CTA
LVMATTSTV

SEQ ID NO: 32705 - protein, 9 aa, Homo sapiens
  misc_feature: Table A; Target 32705; HLA-C*01:02; KCNU1; ENSG00000215262; CTA
LVMATTSTV

SEQ ID NO: 32706 - protein, 9 aa, Homo sapiens
  misc_feature: Table A; Target 32706; HLA-C*03:03; KCNU1; ENSG00000215262; CTA
LVMATTSTV

SEQ ID NO: 32707 - protein, 9 aa, Homo sapiens
  misc_feature: Table A; Target 32707; HLA-C*03:04; KCNU1; ENSG00000215262; CTA
LVMATTSTV

SEQ ID NO: 32708 - protein, 9 aa, Homo sapiens
  misc_feature: Table A; Target 32708; HLA-C*14:02; KCNU1; ENSG00000215262; CTA
LVMATTSTV

SEQ ID NO: 32709 - protein, 11 aa, Homo sapiens
  misc_feature: Table A; Target 32709; HLA-A*23:01; KCNU1; ENSG00000215262; CTA
LVMATTSTVGF

SEQ ID NO: 32710 - protein, 9 aa, Homo sapiens
  misc_feature: Table A; Target 32710; HLA-C*14:02; KCNU1; ENSG00000215262; CTA
LYSGDLHAA

SEQ ID NO: 32711 - protein, 8 aa, Homo sapiens
  misc_feature: Table A; Target 32711; HLA-A*23:01; KCNU1; ENSG00000215262; CTA
LYSPVYSY

SEQ ID NO: 32712 - protein, 8 aa, Homo sapiens
  misc_feature: Table A; Target 32712; HLA-A*24:02; KCNU1; ENSG00000215262; CTA
LYSPVYSY

SEQ ID NO: 32713 - protein, 8 aa, Homo sapiens
  misc_feature: Table A; Target 32713; HLA-A*29:02; KCNU1; ENSG00000215262; CTA
LYSPVYSY

SEQ ID NO: 32714 - protein, 8 aa, Homo sapiens
  misc_feature: Table A; Target 32714; HLA-A*30:02; KCNU1; ENSG00000215262; CTA
LYSPVYSY

SEQ ID NO: 32715 - protein, 8 aa, Homo sapiens
  misc_feature: Table A; Target 32715; HLA-C*14:02; KCNU1; ENSG00000215262; CTA
LYSPVYSY

SEQ ID NO: 32716 - protein, 11 aa, Homo sapiens
  misc_feature: Table A; Target 32716; HLA-A*31:01; KCNU1; ENSG00000215262; CTA
LYSPVYSYQPR

SEQ ID NO: 32717 - protein, 9 aa, Homo sapiens
  misc_feature: Table A; Target 32717; HLA-B*35:01; KCNU1; ENSG00000215262; CTA
MAADDKIKF

SEQ ID NO: 32718 - protein, 9 aa, Homo sapiens
  misc_feature: Table A; Target 32718; HLA-B*35:03; KCNU1; ENSG00000215262; CTA
MAADDKIKF

SEQ ID NO: 32719 - protein, 9 aa, Homo sapiens
  misc_feature: Table A; Target 32719; HLA-B*38:01; KCNU1; ENSG00000215262; CTA
MAADDKIKF

SEQ ID NO: 32720 - protein, 9 aa, Homo sapiens
  misc_feature: Table A; Target 32720; HLA-B*55:01; KCNU1; ENSG00000215262; CTA
MAADDKIKF

SEQ ID NO: 32721 - protein, 9 aa, Homo sapiens
  misc_feature: Table A; Target 32721; HLA-B*58:01; KCNU1; ENSG00000215262; CTA
MAADDKIKF

SEQ ID NO: 32722 - protein, 9 aa, Homo sapiens
  misc_feature: Table A; Target 32722; HLA-C*02:02; KCNU1; ENSG00000215262; CTA
MAADDKIKF

SEQ ID NO: 32723 - protein, 9 aa, Homo sapiens
  misc_feature: Table A; Target 32723; HLA-C*03:03; KCNU1; ENSG00000215262; CTA
MAADDKIKF

SEQ ID NO: 32724 - protein, 9 aa, Homo sapiens
  misc_feature: Table A; Target 32724; HLA-C*07:06; KCNU1; ENSG00000215262; CTA
MAADDKIKF

SEQ ID NO: 32725 - protein, 9 aa, Homo sapiens
  misc_feature: Table A; Target 32725; HLA-C*12:03; KCNU1; ENSG00000215262; CTA
MAADDKIKF

SEQ ID NO: 32726 - protein, 9 aa, Homo sapiens
  misc_feature: Table A; Target 32726; HLA-C*16:01; KCNU1; ENSG00000215262; CTA
MAADDKIKF

SEQ ID NO: 32727 - protein, 10 aa, Homo sapiens
  misc_feature: Table A; Target 32727; HLA-A*25:01; KCNU1; ENSG00000215262; CTA
MAADDKIKFW

SEQ ID NO: 32728 - protein, 10 aa, Homo sapiens
  misc_feature: Table A; Target 32728; HLA-B*57:01; KCNU1; ENSG00000215262; CTA
MAADDKIKFW

SEQ ID NO: 32729 - protein, 9 aa, Homo sapiens
  misc_feature: Table A; Target 32729; HLA-B*35:01; KCNU1; ENSG00000215262; CTA
MATLTIGSL

SEQ ID NO: 32730 - protein, 9 aa, Homo sapiens
  misc_feature: Table A; Target 32730; HLA-B*35:03; KCNU1; ENSG00000215262; CTA
MATLTIGSL

SEQ ID NO: 32731 - protein, 9 aa, Homo sapiens
  misc_feature: Table A; Target 32731; HLA-B*51:01; KCNU1; ENSG00000215262; CTA
MATLTIGSL

SEQ ID NO: 32732 - protein, 9 aa, Homo sapiens
  misc_feature: Table A; Target 32732; HLA-B*54:01; KCNU1; ENSG00000215262; CTA
MATLTIGSL

SEQ ID NO: 32733 - protein, 9 aa, Homo sapiens
  misc_feature: Table A; Target 32733; HLA-C*03:03; KCNU1; ENSG00000215262; CTA
MATLTIGSL

SEQ ID NO: 32734 - protein, 9 aa, Homo sapiens
  misc_feature: Table A; Target 32734; HLA-C*03:04; KCNU1; ENSG00000215262; CTA
MATLTIGSL

SEQ ID NO: 32735 - protein, 9 aa, Homo sapiens
  misc_feature: Table A; Target 32735; HLA-C*07:06; KCNU1; ENSG00000215262; CTA
MATLTIGSL

SEQ ID NO: 32736 - protein, 9 aa, Homo sapiens
  misc_feature: Table A; Target 32736; HLA-C*16:01; KCNU1; ENSG00000215262; CTA
MATLTIGSL

SEQ ID NO: 32737 - protein, 9 aa, Homo sapiens
  misc_feature: Table A; Target 32737; HLA-C*16:02; KCNU1; ENSG00000215262; CTA
MATLTIGSL

SEQ ID NO: 32738 - protein, 9 aa, Homo sapiens
  misc_feature: Table A; Target 32738; HLA-A*23:01; KCNU1; ENSG00000215262; CTA
MATTSTVGF

SEQ ID NO: 32739 - protein, 9 aa, Homo sapiens
  misc_feature: Table A; Target 32739; HLA-A*25:01; KCNU1; ENSG00000215262; CTA
MATTSTVGF

SEQ ID NO: 32740 - protein, 9 aa, Homo sapiens
  misc_feature: Table A; Target 32740; HLA-A*26:01; KCNU1; ENSG00000215262; CTA
MATTSTVGF

SEQ ID NO: 32741 - protein, 9 aa, Homo sapiens
  misc_feature: Table A; Target 32741; HLA-A*32:01; KCNU1; ENSG00000215262; CTA
MATTSTVGF

SEQ ID NO: 32742 - protein, 9 aa, Homo sapiens
  misc_feature: Table A; Target 32742; HLA-B*15:01; KCNU1; ENSG00000215262; CTA
MATTSTVGF

SEQ ID NO: 32743 - protein, 9 aa, Homo sapiens
  misc_feature: Table A; Target 32743; HLA-B*15:03; KCNU1; ENSG00000215262; CTA
MATTSTVGF

SEQ ID NO: 32744 - protein, 9 aa, Homo sapiens
  misc_feature: Table A; Target 32744; HLA-B*27:05; KCNU1; ENSG00000215262; CTA
MATTSTVGF

SEQ ID NO: 32745 - protein, 9 aa, Homo sapiens
  misc_feature: Table A; Target 32745; HLA-B*35:01; KCNU1; ENSG00000215262; CTA
MATTSTVGF

SEQ ID NO: 32746 - protein, 9 aa, Homo sapiens
  misc_feature: Table A; Target 32746; HLA-B*35:03; KCNU1; ENSG00000215262; CTA
MATTSTVGF

SEQ ID NO: 32747 - protein, 9 aa, Homo sapiens
  misc_feature: Table A; Target 32747; HLA-B*46:01; KCNU1; ENSG00000215262; CTA
MATTSTVGF

SEQ ID NO: 32748 - protein, 9 aa, Homo sapiens
  misc_feature: Table A; Target 32748; HLA-B*55:01; KCNU1; ENSG00000215262; CTA
MATTSTVGF

SEQ ID NO: 32749 - protein, 9 aa, Homo sapiens
  misc_feature: Table A; Target 32749; HLA-B*58:01; KCNU1; ENSG00000215262; CTA
MATTSTVGF

SEQ ID NO: 32750 - protein, 9 aa, Homo sapiens
  misc_feature: Table A; Target 32750; HLA-C*02:02; KCNU1; ENSG00000215262; CTA
MATTSTVGF

SEQ ID NO: 32751 - protein, 9 aa, Homo sapiens
  misc_feature: Table A; Target 32751; HLA-C*03:03; KCNU1; ENSG00000215262; CTA
MATTSTVGF

SEQ ID NO: 32752 - protein, 9 aa, Homo sapiens
  misc_feature: Table A; Target 32752; HLA-C*03:04; KCNU1; ENSG00000215262; CTA
MATTSTVGF

SEQ ID NO: 32753 - protein, 9 aa, Homo sapiens
  misc_feature: Table A; Target 32753; HLA-C*04:01; KCNU1; ENSG00000215262; CTA
MATTSTVGF

SEQ ID NO: 32754 - protein, 9 aa, Homo sapiens
  misc_feature: Table A; Target 32754; HLA-C*05:01; KCNU1; ENSG00000215262; CTA
MATTSTVGF

SEQ ID NO: 32755 - protein, 9 aa, Homo sapiens
  misc_feature: Table A; Target 32755; HLA-C*07:04; KCNU1; ENSG00000215262; CTA
MATTSTVGF

SEQ ID NO: 32756 - protein, 9 aa, Homo sapiens
  misc_feature: Table A; Target 32756; HLA-C*07:06; KCNU1; ENSG00000215262; CTA
MATTSTVGF

SEQ ID NO: 32757 - protein, 9 aa, Homo sapiens
  misc_feature: Table A; Target 32757; HLA-C*12:03; KCNU1; ENSG00000215262; CTA
MATTSTVGF

SEQ ID NO: 32758 - protein, 9 aa, Homo sapiens
  misc_feature: Table A; Target 32758; HLA-C*14:02; KCNU1; ENSG00000215262; CTA
MATTSTVGF

SEQ ID NO: 32759 - protein, 9 aa, Homo sapiens
  misc_feature: Table A; Target 32759; HLA-C*16:01; KCNU1; ENSG00000215262; CTA
MATTSTVGF

SEQ ID NO: 32760 - protein, 9 aa, Homo sapiens
  misc_feature: Table A; Target 32760; HLA-C*16:02; KCNU1; ENSG00000215262; CTA
MATTSTVGF

SEQ ID NO: 32761 - protein, 9 aa, Homo sapiens
  misc_feature: Table A; Target 32761; HLA-C*16:04; KCNU1; ENSG00000215262; CTA
MATTSTVGF

SEQ ID NO: 32762 - protein, 8 aa, Homo sapiens
  misc_feature: Table A; Target 32762; HLA-A*23:01; KCNU1; ENSG00000215262; CTA
MLLSAQTF

SEQ ID NO: 32763 - protein, 9 aa, Homo sapiens
  misc_feature: Table A; Target 32763; HLA-A*02:01; KCNU1; ENSG00000215262; CTA
MLLSAQTFV

SEQ ID NO: 32764 - protein, 9 aa, Homo sapiens
  misc_feature: Table A; Target 32764; HLA-A*02:04; KCNU1; ENSG00000215262; CTA
MLLSAQTFV

SEQ ID NO: 32765 - protein, 10 aa, Homo sapiens
  misc_feature: Table A; Target 32765; HLA-C*01:02; KCNU1; ENSG00000215262; CTA
MLVTGGVSSQ

SEQ ID NO: 32766 - protein, 10 aa, Homo sapiens
  misc_feature: Table A; Target 32766; HLA-C*07:01; KCNU1; ENSG00000215262; CTA
MLVTGGVSSQ

SEQ ID NO: 32767 - protein, 8 aa, Homo sapiens
  misc_feature: Table A; Target 32767; HLA-B*08:01; KCNU1; ENSG00000215262; CTA
MPLRASNY

SEQ ID NO: 32768 - protein, 8 aa, Homo sapiens
  misc_feature: Table A; Target 32768; HLA-B*18:01; KCNU1; ENSG00000215262; CTA
MPLRASNY

SEQ ID NO: 32769 - protein, 8 aa, Homo sapiens
  misc_feature: Table A; Target 32769; HLA-B*35:01; KCNU1; ENSG00000215262; CTA
MPLRASNY

SEQ ID NO: 32770 - protein, 8 aa, Homo sapiens
  misc_feature: Table A; Target 32770; HLA-B*51:01; KCNU1; ENSG00000215262; CTA
MPLRASNY

SEQ ID NO: 32771 - protein, 8 aa, Homo sapiens
  misc_feature: Table A; Target 32771; HLA-B*55:01; KCNU1; ENSG00000215262; CTA
MPLRASNY

SEQ ID NO: 32772 - protein, 8 aa, Homo sapiens
  misc_feature: Table A; Target 32772; HLA-C*03:03; KCNU1; ENSG00000215262; CTA
MPLRASNY

SEQ ID NO: 32773 - protein, 9 aa, Homo sapiens
  misc_feature: Table A; Target 32773; HLA-B*27:02; KCNU1; ENSG00000215262; CTA
MRVLSIKNY

SEQ ID NO: 32774 - protein, 9 aa, Homo sapiens
  misc_feature: Table A; Target 32774; HLA-B*27:05; KCNU1; ENSG00000215262; CTA
MRVLSIKNY

SEQ ID NO: 32775 - protein, 9 aa, Homo sapiens
  misc_feature: Table A; Target 32775; HLA-C*07:01; KCNU1; ENSG00000215262; CTA
MRVLSIKNY

SEQ ID NO: 32776 - protein, 9 aa, Homo sapiens
  misc_feature: Table A; Target 32776; HLA-C*16:04; KCNU1; ENSG00000215262; CTA
MRVLSIKNY

SEQ ID NO: 32777 - protein, 9 aa, Homo sapiens
  misc_feature: Table A; Target 32777; HLA-A*02:03; KCNU1; ENSG00000215262; CTA
MSFPEVARL

SEQ ID NO: 32778 - protein, 9 aa, Homo sapiens
  misc_feature: Table A; Target 32778; HLA-A*02:04; KCNU1; ENSG00000215262; CTA
MSFPEVARL

SEQ ID NO: 32779 - protein, 9 aa, Homo sapiens
  misc_feature: Table A; Target 32779; HLA-A*02:07; KCNU1; ENSG00000215262; CTA
MSFPEVARL

SEQ ID NO: 32780 - protein, 9 aa, Homo sapiens
  misc_feature: Table A; Target 32780; HLA-A*68:02; KCNU1; ENSG00000215262; CTA
MSFPEVARL

SEQ ID NO: 32781 - protein, 9 aa, Homo sapiens
  misc_feature: Table A; Target 32781; HLA-B*57:01; KCNU1; ENSG00000215262; CTA
MSFPEVARL

SEQ ID NO: 32782 - protein, 9 aa, Homo sapiens
  misc_feature: Table A; Target 32782; HLA-B*58:01; KCNU1; ENSG00000215262; CTA
MSFPEVARL

SEQ ID NO: 32783 - protein, 9 aa, Homo sapiens
  misc_feature: Table A; Target 32783; HLA-C*02:02; KCNU1; ENSG00000215262; CTA
MSFPEVARL

SEQ ID NO: 32784 - protein, 9 aa, Homo sapiens
  misc_feature: Table A; Target 32784; HLA-C*03:03; KCNU1; ENSG00000215262; CTA
MSFPEVARL

SEQ ID NO: 32785 - protein, 9 aa, Homo sapiens
  misc_feature: Table A; Target 32785; HLA-C*03:04; KCNU1; ENSG00000215262; CTA
MSFPEVARL

SEQ ID NO: 32786 - protein, 9 aa, Homo sapiens
  misc_feature: Table A; Target 32786; HLA-C*07:04; KCNU1; ENSG00000215262; CTA
MSFPEVARL

SEQ ID NO: 32787 - protein, 9 aa, Homo sapiens
  misc_feature: Table A; Target 32787; HLA-C*16:02; KCNU1; ENSG00000215262; CTA
MSFPEVARL

SEQ ID NO: 32788 - protein, 11 aa, Homo sapiens
  misc_feature: Table A; Target 32788; HLA-B*57:01; KCNU1; ENSG00000215262; CTA
MSFPEVARLCF

SEQ ID NO: 32789 - protein, 9 aa, Homo sapiens
  misc_feature: Table A; Target 32789; HLA-A*02:07; KCNU1; ENSG00000215262; CTA
NCPPTIDSV

SEQ ID NO: 32790 - protein, 9 aa, Homo sapiens
  misc_feature: Table A; Target 32790; HLA-C*01:02; KCNU1; ENSG00000215262; CTA
NCPPTIDSV

SEQ ID NO: 32791 - protein, 10 aa, Homo sapiens
  misc_feature: Table A; Target 32791; HLA-B*18:01; KCNU1; ENSG00000215262; CTA
NEEFSLQKSY

SEQ ID NO: 32792 - protein, 10 aa, Homo sapiens
  misc_feature: Table A; Target 32792; HLA-B*44:02; KCNU1; ENSG00000215262; CTA
NEEFSLQKSY

SEQ ID NO: 32793 - protein, 10 aa, Homo sapiens
  misc_feature: Table A; Target 32793; HLA-B*44:03; KCNU1; ENSG00000215262; CTA
NEEFSLQKSY

SEQ ID NO: 32794 - protein, 10 aa, Homo sapiens
  misc_feature: Table A; Target 32794; HLA-C*16:04; KCNU1; ENSG00000215262; CTA
NEEFSLQKSY

SEQ ID NO: 32795 - protein, 8 aa, Homo sapiens
  misc_feature: Table A; Target 32795; HLA-B*18:01; KCNU1; ENSG00000215262; CTA
NHIVACVF

SEQ ID NO: 32796 - protein, 8 aa, Homo sapiens
  misc_feature: Table A; Target 32796; HLA-B*51:01; KCNU1; ENSG00000215262; CTA
NIMRVLSI

SEQ ID NO: 32797 - protein, 10 aa, Homo sapiens
  misc_feature: Table A; Target 32797; HLA-A*25:01; KCNU1; ENSG00000215262; CTA
NITVDSVTAF

SEQ ID NO: 32798 - protein, 10 aa, Homo sapiens
  misc_feature: Table A; Target 32798; HLA-B*39:01; KCNU1; ENSG00000215262; CTA
NITVDSVTAF

SEQ ID NO: 32799 - protein, 8 aa, Homo sapiens
  misc_feature: Table A; Target 32799; HLA-B*08:01; KCNU1; ENSG00000215262; CTA
NLHLSTAF

SEQ ID NO: 32800 - protein, 8 aa, Homo sapiens
  misc_feature: Table A; Target 32800; HLA-B*18:01; KCNU1; ENSG00000215262; CTA
NLHLSTAF

SEQ ID NO: 32801 - protein, 8 aa, Homo sapiens
  misc_feature: Table A; Target 32801; HLA-B*37:01; KCNU1; ENSG00000215262; CTA
NLHLSTAF

SEQ ID NO: 32802 - protein, 8 aa, Homo sapiens
  misc_feature: Table A; Target 32802; HLA-B*51:01; KCNU1; ENSG00000215262; CTA
NPPPQVRI

SEQ ID NO: 32803 - protein, 9 aa, Homo sapiens
  misc_feature: Table A; Target 32803; HLA-B*07:02; KCNU1; ENSG00000215262; CTA
NPRNTFGQL

SEQ ID NO: 32804 - protein, 9 aa, Homo sapiens
  misc_feature: Table A; Target 32804; HLA-C*07:02; KCNU1; ENSG00000215262; CTA
NPRNTFGQL

SEQ ID NO: 32805 - protein, 10 aa, Homo sapiens
  misc_feature: Table A; Target 32805; HLA-B*07:02; KCNU1; ENSG00000215262; CTA
NPRNTFGQLF

SEQ ID NO: 32806 - protein, 8 aa, Homo sapiens
  misc_feature: Table A; Target 32806; HLA-B*51:01; KCNU1; ENSG00000215262; CTA
NPSNIHFI

SEQ ID NO: 32807 - protein, 11 aa, Homo sapiens
  misc_feature: Table A; Target 32807; HLA-A*68:02; KCNU1; ENSG00000215262; CTA
NPSNIHFIEQL

SEQ ID NO: 32808 - protein, 9 aa, Homo sapiens
  misc_feature: Table A; Target 32808; HLA-B*38:01; KCNU1; ENSG00000215262; CTA
NQSRTNSII

SEQ ID NO: 32809 - protein, 9 aa, Homo sapiens
  misc_feature: Table A; Target 32809; HLA-C*12:03; KCNU1; ENSG00000215262; CTA
NSADPVGSC

SEQ ID NO: 32810 - protein, 8 aa, Homo sapiens
  misc_feature: Table A; Target 32810; HLA-B*51:01; KCNU1; ENSG00000215262; CTA
NSIISSQI

SEQ ID NO: 32811 - protein, 11 aa, Homo sapiens
  misc_feature: Table A; Target 32811; HLA-B*57:01; KCNU1; ENSG00000215262; CTA
NSLSFPKQIAW

SEQ ID NO: 32812 - protein, 8 aa, Homo sapiens
  misc_feature: Table A; Target 32812; HLA-B*35:03; KCNU1; ENSG00000215262; CTA
NYDSTTRI

SEQ ID NO: 32813 - protein, 8 aa, Homo sapiens
  misc_feature: Table A; Target 32813; HLA-C*04:01; KCNU1; ENSG00000215262; CTA
NYDSTTRI

SEQ ID NO: 32814 - protein, 8 aa, Homo sapiens
  misc_feature: Table A; Target 32814; HLA-C*05:01; KCNU1; ENSG00000215262; CTA
NYDSTTRI

SEQ ID NO: 32815 - protein, 8 aa, Homo sapiens
  misc_feature: Table A; Target 32815; HLA-C*07:04; KCNU1; ENSG00000215262; CTA
NYDSTTRI

SEQ ID NO: 32816 - protein, 9 aa, Homo sapiens
  misc_feature: Table A; Target 32816; HLA-A*23:01; KCNU1; ENSG00000215262; CTA
NYDSTTRII

SEQ ID NO: 32817 - protein, 9 aa, Homo sapiens
  misc_feature: Table A; Target 32817; HLA-A*24:02; KCNU1; ENSG00000215262; CTA
NYDSTTRII

SEQ ID NO: 32818 - protein, 9 aa, Homo sapiens
  misc_feature: Table A; Target 32818; HLA-B*35:01; KCNU1; ENSG00000215262; CTA
NYDSTTRII

SEQ ID NO: 32819 - protein, 9 aa, Homo sapiens
  misc_feature: Table A; Target 32819; HLA-B*35:03; KCNU1; ENSG00000215262; CTA
NYDSTTRII

SEQ ID NO: 32820 - protein, 9 aa, Homo sapiens
  misc_feature: Table A; Target 32820; HLA-C*04:01; KCNU1; ENSG00000215262; CTA
NYDSTTRII

SEQ ID NO: 32821 - protein, 10 aa, Homo sapiens
  misc_feature: Table A; Target 32821; HLA-A*24:02; KCNU1; ENSG00000215262; CTA
NYDSTTRIII

SEQ ID NO: 32822 - protein, 9 aa, Homo sapiens
  misc_feature: Table A; Target 32822; HLA-A*23:01; KCNU1; ENSG00000215262; CTA
NYIPEMVEL

SEQ ID NO: 32823 - protein, 9 aa, Homo sapiens
  misc_feature: Table A; Target 32823; HLA-A*24:02; KCNU1; ENSG00000215262; CTA
NYIPEMVEL

SEQ ID NO: 32824 - protein, 9 aa, Homo sapiens
  misc_feature: Table A; Target 32824; HLA-B*35:03; KCNU1; ENSG00000215262; CTA
NYIPEMVEL

SEQ ID NO: 32825 - protein, 9 aa, Homo sapiens
  misc_feature: Table A; Target 32825; HLA-B*38:01; KCNU1; ENSG00000215262; CTA
NYIPEMVEL

SEQ ID NO: 32826 - protein, 9 aa, Homo sapiens
  misc_feature: Table A; Target 32826; HLA-C*14:02; KCNU1; ENSG00000215262; CTA
NYIPEMVEL

SEQ ID NO: 32827 - protein, 10 aa, Homo sapiens
  misc_feature: Table A; Target 32827; HLA-A*23:01; KCNU1; ENSG00000215262; CTA
NYIPEMVELF

SEQ ID NO: 32828 - protein, 10 aa, Homo sapiens
  misc_feature: Table A; Target 32828; HLA-A*24:02; KCNU1; ENSG00000215262; CTA
NYIPEMVELF

SEQ ID NO: 32829 - protein, 10 aa, Homo sapiens
  misc_feature: Table A; Target 32829; HLA-A*29:02; KCNU1; ENSG00000215262; CTA
NYIPEMVELF

SEQ ID NO: 32830 - protein, 10 aa, Homo sapiens
  misc_feature: Table A; Target 32830; HLA-B*27:02; KCNU1; ENSG00000215262; CTA
PEMVELFANK

SEQ ID NO: 32831 - protein, 11 aa, Homo sapiens
  misc_feature: Table A; Target 32831; HLA-B*07:02; KCNU1; ENSG00000215262; CTA
PPPQPSSNQTL

SEQ ID NO: 32832 - protein, 10 aa, Homo sapiens
  misc_feature: Table A; Target 32832; HLA-B*27:02; KCNU1; ENSG00000215262; CTA
PSLELETIFK

SEQ ID NO: 32833 - protein, 11 aa, Homo sapiens
  misc_feature: Table A; Target 32833; HLA-A*01:01; KCNU1; ENSG00000215262; CTA
PTIDSVTETLY

SEQ ID NO: 32834 - protein, 11 aa, Homo sapiens
  misc_feature: Table A; Target 32834; HLA-A*30:02; KCNU1; ENSG00000215262; CTA
PTIDSVTETLY

SEQ ID NO: 32835 - protein, 8 aa, Homo sapiens
  misc_feature: Table A; Target 32835; HLA-C*07:01; KCNU1; ENSG00000215262; CTA
PVGSCSSY

SEQ ID NO: 32836 - protein, 9 aa, Homo sapiens
  misc_feature: Table A; Target 32836; HLA-A*23:01; KCNU1; ENSG00000215262; CTA
QAAFILSSF

SEQ ID NO: 32837 - protein, 9 aa, Homo sapiens
  misc_feature: Table A; Target 32837; HLA-A*24:02; KCNU1; ENSG00000215262; CTA
QAAFILSSF

SEQ ID NO: 32838 - protein, 9 aa, Homo sapiens
  misc_feature: Table A; Target 32838; HLA-A*25:01; KCNU1; ENSG00000215262; CTA
QAAFILSSF

SEQ ID NO: 32839 - protein, 9 aa, Homo sapiens
  misc_feature: Table A; Target 32839; HLA-A*26:01; KCNU1; ENSG00000215262; CTA
QAAFILSSF

SEQ ID NO: 32840 - protein, 9 aa, Homo sapiens
  misc_feature: Table A; Target 32840; HLA-A*30:02; KCNU1; ENSG00000215262; CTA
QAAFILSSF

SEQ ID NO: 32841 - protein, 9 aa, Homo sapiens
  misc_feature: Table A; Target 32841; HLA-A*32:01; KCNU1; ENSG00000215262; CTA
QAAFILSSF

SEQ ID NO: 32842 - protein, 9 aa, Homo sapiens
  misc_feature: Table A; Target 32842; HLA-A*68:02; KCNU1; ENSG00000215262; CTA
QAAFILSSF

SEQ ID NO: 32843 - protein, 9 aa, Homo sapiens
  misc_feature: Table A; Target 32843; HLA-B*15:01; KCNU1; ENSG00000215262; CTA
QAAFILSSF

SEQ ID NO: 32844 - protein, 9 aa, Homo sapiens
  misc_feature: Table A; Target 32844; HLA-B*15:03; KCNU1; ENSG00000215262; CTA
QAAFILSSF

SEQ ID NO: 32845 - protein, 9 aa, Homo sapiens
  misc_feature: Table A; Target 32845; HLA-B*27:02; KCNU1; ENSG00000215262; CTA
QAAFILSSF

SEQ ID NO: 32846 - protein, 9 aa, Homo sapiens
  misc_feature: Table A; Target 32846; HLA-B*35:01; KCNU1; ENSG00000215262; CTA
QAAFILSSF

SEQ ID NO: 32847 - protein, 9 aa, Homo sapiens
  misc_feature: Table A; Target 32847; HLA-B*38:01; KCNU1; ENSG00000215262; CTA
QAAFILSSF

SEQ ID NO: 32848 - protein, 9 aa, Homo sapiens
  misc_feature: Table A; Target 32848; HLA-B*44:02; KCNU1; ENSG00000215262; CTA
QAAFILSSF

SEQ ID NO: 32849 - protein, 9 aa, Homo sapiens
  misc_feature: Table A; Target 32849; HLA-B*44:03; KCNU1; ENSG00000215262; CTA
QAAFILSSF

SEQ ID NO: 32850 - protein, 9 aa, Homo sapiens
  misc_feature: Table A; Target 32850; HLA-B*46:01; KCNU1; ENSG00000215262; CTA
QAAFILSSF

SEQ ID NO: 32851 - protein, 9 aa, Homo sapiens
  misc_feature: Table A; Target 32851; HLA-B*57:01; KCNU1; ENSG00000215262; CTA
QAAFILSSF

SEQ ID NO: 32852 - protein, 9 aa, Homo sapiens
  misc_feature: Table A; Target 32852; HLA-B*58:01; KCNU1; ENSG00000215262; CTA
QAAFILSSF

SEQ ID NO: 32853 - protein, 9 aa, Homo sapiens
  misc_feature: Table A; Target 32853; HLA-C*01:02; KCNU1; ENSG00000215262; CTA
QAAFILSSF

SEQ ID NO: 32854 - protein, 9 aa, Homo sapiens
  misc_feature: Table A; Target 32854; HLA-C*02:02; KCNU1; ENSG00000215262; CTA
QAAFILSSF

SEQ ID NO: 32855 - protein, 9 aa, Homo sapiens
  misc_feature: Table A; Target 32855; HLA-C*03:03; KCNU1; ENSG00000215262; CTA
QAAFILSSF

SEQ ID NO: 32856 - protein, 9 aa, Homo sapiens
  misc_feature: Table A; Target 32856; HLA-C*03:04; KCNU1; ENSG00000215262; CTA
QAAFILSSF

SEQ ID NO: 32857 - protein, 9 aa, Homo sapiens
  misc_feature: Table A; Target 32857; HLA-C*05:01; KCNU1; ENSG00000215262; CTA
QAAFILSSF

SEQ ID NO: 32858 - protein, 9 aa, Homo sapiens
  misc_feature: Table A; Target 32858; HLA-C*07:06; KCNU1; ENSG00000215262; CTA
QAAFILSSF

SEQ ID NO: 32859 - protein, 9 aa, Homo sapiens
  misc_feature: Table A; Target 32859; HLA-C*12:03; KCNU1; ENSG00000215262; CTA
QAAFILSSF

SEQ ID NO: 32860 - protein, 9 aa, Homo sapiens
  misc_feature: Table A; Target 32860; HLA-C*14:02; KCNU1; ENSG00000215262; CTA
QAAFILSSF

SEQ ID NO: 32861 - protein, 9 aa, Homo sapiens
  misc_feature: Table A; Target 32861; HLA-C*16:02; KCNU1; ENSG00000215262; CTA
QAAFILSSF

SEQ ID NO: 32862 - protein, 9 aa, Homo sapiens
  misc_feature: Table A; Target 32862; HLA-C*16:04; KCNU1; ENSG00000215262; CTA
QAAFILSSF

SEQ ID NO: 32863 - protein, 9 aa, Homo sapiens
  misc_feature: Table A; Target 32863; HLA-A*30:01; KCNU1; ENSG00000215262; CTA
QDSPPRVSA

SEQ ID NO: 32864 - protein, 9 aa, Homo sapiens
  misc_feature: Table A; Target 32864; HLA-B*37:01; KCNU1; ENSG00000215262; CTA
QDSPPRVSA

SEQ ID NO: 32865 - protein, 9 aa, Homo sapiens
  misc_feature: Table A; Target 32865; HLA-B*54:01; KCNU1; ENSG00000215262; CTA
QDSPPRVSA

SEQ ID NO: 32866 - protein, 9 aa, Homo sapiens
  misc_feature: Table A; Target 32866; HLA-B*56:01; KCNU1; ENSG00000215262; CTA
QDSPPRVSA

SEQ ID NO: 32867 - protein, 10 aa, Homo sapiens
  misc_feature: Table A; Target 32867; HLA-A*30:01; KCNU1; ENSG00000215262; CTA
QETNLHLSTA

SEQ ID NO: 32868 - protein, 10 aa, Homo sapiens
  misc_feature: Table A; Target 32868; HLA-B*49:01; KCNU1; ENSG00000215262; CTA
QETNLHLSTA

SEQ ID NO: 32869 - protein, 11 aa, Homo sapiens
  misc_feature: Table A; Target 32869; HLA-A*30:01; KCNU1; ENSG00000215262; CTA
QETNLHLSTAF

SEQ ID NO: 32870 - protein, 11 aa, Homo sapiens
  misc_feature: Table A; Target 32870; HLA-B*18:01; KCNU1; ENSG00000215262; CTA
QETNLHLSTAF

SEQ ID NO: 32871 - protein, 11 aa, Homo sapiens
  misc_feature: Table A; Target 32871; HLA-B*40:02; KCNU1; ENSG00000215262; CTA
QETNLHLSTAF

SEQ ID NO: 32872 - protein, 11 aa, Homo sapiens
  misc_feature: Table A; Target 32872; HLA-B*44:02; KCNU1; ENSG00000215262; CTA
QETNLHLSTAF

SEQ ID NO: 32873 - protein, 11 aa, Homo sapiens
  misc_feature: Table A; Target 32873; HLA-B*44:03; KCNU1; ENSG00000215262; CTA
QETNLHLSTAF

SEQ ID NO: 32874 - protein, 11 aa, Homo sapiens
  misc_feature: Table A; Target 32874; HLA-C*16:04; KCNU1; ENSG00000215262; CTA
QETNLHLSTAF

SEQ ID NO: 32875 - protein, 11 aa, Homo sapiens
  misc_feature: Table A; Target 32875; HLA-B*38:01; KCNU1; ENSG00000215262; CTA
QHDVEQDSDQL

SEQ ID NO: 32876 - protein, 11 aa, Homo sapiens
  misc_feature: Table A; Target 32876; HLA-B*39:01; KCNU1; ENSG00000215262; CTA
QHDVEQDSDQL

SEQ ID NO: 32877 - protein, 8 aa, Homo sapiens
  misc_feature: Table A; Target 32877; HLA-B*13:02; KCNU1; ENSG00000215262; CTA
QHITVPSV

SEQ ID NO: 32878 - protein, 8 aa, Homo sapiens
  misc_feature: Table A; Target 32878; HLA-B*38:01; KCNU1; ENSG00000215262; CTA
QHITVPSV

SEQ ID NO: 32879 - protein, 8 aa, Homo sapiens
  misc_feature: Table A; Target 32879; HLA-B*39:01; KCNU1; ENSG00000215262; CTA
QHITVPSV

SEQ ID NO: 32880 - protein, 8 aa, Homo sapiens
  misc_feature: Table A; Target 32880; HLA-B*51:01; KCNU1; ENSG00000215262; CTA
QHITVPSV

SEQ ID NO: 32881 - protein, 10 aa, Homo sapiens
  misc_feature: Table A; Target 32881; HLA-A*33:03; KCNU1; ENSG00000215262; CTA
QHITVPSVKR

SEQ ID NO: 32882 - protein, 8 aa, Homo sapiens
  misc_feature: Table A; Target 32882; HLA-C*05:01; KCNU1; ENSG00000215262; CTA
QLDSSGMF

SEQ ID NO: 32883 - protein, 9 aa, Homo sapiens
  misc_feature: Table A; Target 32883; HLA-A*01:01; KCNU1; ENSG00000215262; CTA
QLDSSGMFH

SEQ ID NO: 32884 - protein, 10 aa, Homo sapiens
  misc_feature: Table A; Target 32884; HLA-A*01:01; KCNU1; ENSG00000215262; CTA
QLDSSGMFHW

SEQ ID NO: 32885 - protein, 11 aa, Homo sapiens
  misc_feature: Table A; Target 32885; HLA-C*07:01; KCNU1; ENSG00000215262; CTA
QMLVTGGVSSQ

SEQ ID NO: 32886 - protein, 9 aa, Homo sapiens
  misc_feature: Table A; Target 32886; HLA-B*07:02; KCNU1; ENSG00000215262; CTA
QPRTNSLSF

SEQ ID NO: 32887 - protein, 9 aa, Homo sapiens
  misc_feature: Table A; Target 32887; HLA-B*35:01; KCNU1; ENSG00000215262; CTA
QPRTNSLSF

SEQ ID NO: 32888 - protein, 9 aa, Homo sapiens
  misc_feature: Table A; Target 32888; HLA-C*07:02; KCNU1; ENSG00000215262; CTA
QPRTNSLSF

SEQ ID NO: 32889 - protein, 9 aa, Homo sapiens
  misc_feature: Table A; Target 32889; HLA-B*56:01; KCNU1; ENSG00000215262; CTA
QPSSNQTLV

SEQ ID NO: 32890 - protein, 8 aa, Homo sapiens
  misc_feature: Table A; Target 32890; HLA-B*08:01; KCNU1; ENSG00000215262; CTA
QSHNKVYL

SEQ ID NO: 32891 - protein, 8 aa, Homo sapiens
  misc_feature: Table A; Target 32891; HLA-B*08:01; KCNU1; ENSG00000215262; CTA
QTFVGQVL

SEQ ID NO: 32892 - protein, 8 aa, Homo sapiens
  misc_feature: Table A; Target 32892; HLA-B*15:03; KCNU1; ENSG00000215262; CTA
QTFVGQVL

SEQ ID NO: 32893 - protein, 8 aa, Homo sapiens
  misc_feature: Table A; Target 32893; HLA-B*46:01; KCNU1; ENSG00000215262; CTA
QTFVGQVL

SEQ ID NO: 32894 - protein, 8 aa, Homo sapiens
  misc_feature: Table A; Target 32894; HLA-C*01:02; KCNU1; ENSG00000215262; CTA
QTFVGQVL

SEQ ID NO: 32895 - protein, 8 aa, Homo sapiens
  misc_feature: Table A; Target 32895; HLA-C*03:03; KCNU1; ENSG00000215262; CTA
QTFVGQVL

SEQ ID NO: 32896 - protein, 8 aa, Homo sapiens
  misc_feature: Table A; Target 32896; HLA-C*03:04; KCNU1; ENSG00000215262; CTA
QTFVGQVL

SEQ ID NO: 32897 - protein, 8 aa, Homo sapiens
  misc_feature: Table A; Target 32897; HLA-C*14:02; KCNU1; ENSG00000215262; CTA
QTFVGQVL

SEQ ID NO: 32898 - protein, 9 aa, Homo sapiens
  misc_feature: Table A; Target 32898; HLA-A*68:02; KCNU1; ENSG00000215262; CTA
QTFVGQVLV

SEQ ID NO: 32899 - protein, 10 aa, Homo sapiens
  misc_feature: Table A; Target 32899; HLA-A*68:02; KCNU1; ENSG00000215262; CTA
QTFVGQVLVI

SEQ ID NO: 32900 - protein, 9 aa, Homo sapiens
  misc_feature: Table A; Target 32900; HLA-A*32:01; KCNU1; ENSG00000215262; CTA
QTKLRNETW

SEQ ID NO: 32901 - protein, 9 aa, Homo sapiens
  misc_feature: Table A; Target 32901; HLA-B*57:01; KCNU1; ENSG00000215262; CTA
QTKLRNETW

SEQ ID NO: 32902 - protein, 9 aa, Homo sapiens
  misc_feature: Table A; Target 32902; HLA-B*08:01; KCNU1; ENSG00000215262; CTA
QVRIRKNTL

SEQ ID NO: 32903 - protein, 9 aa, Homo sapiens
  misc_feature: Table A; Target 32903; HLA-A*32:01; KCNU1; ENSG00000215262; CTA
RAIKTSNSV

SEQ ID NO: 32904 - protein, 9 aa, Homo sapiens
  misc_feature: Table A; Target 32904; HLA-B*46:01; KCNU1; ENSG00000215262; CTA
RAIKTSNSV

SEQ ID NO: 32905 - protein, 9 aa, Homo sapiens
  misc_feature: Table A; Target 32905; HLA-B*58:01; KCNU1; ENSG00000215262; CTA
RAIKTSNSV

SEQ ID NO: 32906 - protein, 9 aa, Homo sapiens
  misc_feature: Table A; Target 32906; HLA-C*03:03; KCNU1; ENSG00000215262; CTA
RAIKTSNSV

SEQ ID NO: 32907 - protein, 9 aa, Homo sapiens
  misc_feature: Table A; Target 32907; HLA-C*03:04; KCNU1; ENSG00000215262; CTA
RAIKTSNSV

SEQ ID NO: 32908 - protein, 9 aa, Homo sapiens
  misc_feature: Table A; Target 32908; HLA-C*16:02; KCNU1; ENSG00000215262; CTA
RAIKTSNSV

SEQ ID NO: 32909 - protein, 11 aa, Homo sapiens
  misc_feature: Table A; Target 32909; HLA-B*57:01; KCNU1; ENSG00000215262; CTA
RAIKTSNSVKF

SEQ ID NO: 32910 - protein, 11 aa, Homo sapiens
  misc_feature: Table A; Target 32910; HLA-B*58:01; KCNU1; ENSG00000215262; CTA
RAIKTSNSVKF

SEQ ID NO: 32911 - protein, 9 aa, Homo sapiens
  misc_feature: Table A; Target 32911; HLA-A*24:02; KCNU1; ENSG00000215262; CTA
RFLWNFPQI

SEQ ID NO: 32912 - protein, 11 aa, Homo sapiens
  misc_feature: Table A; Target 32912; HLA-A*24:02; KCNU1; ENSG00000215262; CTA
RFMAADDKIKF

SEQ ID NO: 32913 - protein, 11 aa, Homo sapiens
  misc_feature: Table A; Target 32913; HLA-A*24:02; KCNU1; ENSG00000215262; CTA
RFVITRPANEF

SEQ ID NO: 32914 - protein, 9 aa, Homo sapiens
  misc_feature: Table A; Target 32914; HLA-B*15:03; KCNU1; ENSG00000215262; CTA
RKVPILTEL

SEQ ID NO: 32915 - protein, 8 aa, Homo sapiens
  misc_feature: Table A; Target 32915; HLA-A*02:04; KCNU1; ENSG00000215262; CTA
RLLELPQI

SEQ ID NO: 32916 - protein, 9 aa, Homo sapiens
  misc_feature: Table A; Target 32916; HLA-A*02:01; KCNU1; ENSG00000215262; CTA
RLLELPQIL

SEQ ID NO: 32917 - protein, 9 aa, Homo sapiens
  misc_feature: Table A; Target 32917; HLA-A*02:03; KCNU1; ENSG00000215262; CTA
RLLELPQIL

SEQ ID NO: 32918 - protein, 9 aa, Homo sapiens
  misc_feature: Table A; Target 32918; HLA-A*02:04; KCNU1; ENSG00000215262; CTA
RLLELPQIL

SEQ ID NO: 32919 - protein, 9 aa, Homo sapiens
  misc_feature: Table A; Target 32919; HLA-A*02:07; KCNU1; ENSG00000215262; CTA
RLLELPQIL

SEQ ID NO: 32920 - protein, 11 aa, Homo sapiens
  misc_feature: Table A; Target 32920; HLA-A*02:01; KCNU1; ENSG00000215262; CTA
RLLELPQILQI

SEQ ID NO: 32921 - protein, 11 aa, Homo sapiens
  misc_feature: Table A; Target 32921; HLA-A*02:03; KCNU1; ENSG00000215262; CTA
RLLELPQILQI

SEQ ID NO: 32922 - protein, 11 aa, Homo sapiens
  misc_feature: Table A; Target 32922; HLA-A*02:04; KCNU1; ENSG00000215262; CTA
RLLELPQILQI

SEQ ID NO: 32923 - protein, 11 aa, Homo sapiens
  misc_feature: Table A; Target 32923; HLA-B*15:01; KCNU1; ENSG00000215262; CTA
RLSDDFAGMSF

SEQ ID NO: 32924 - protein, 9 aa, Homo sapiens
  misc_feature: Table A; Target 32924; HLA-A*02:01; KCNU1; ENSG00000215262; CTA
RQHITVPSV

SEQ ID NO: 32925 - protein, 9 aa, Homo sapiens
  misc_feature: Table A; Target 32925; HLA-A*02:03; KCNU1; ENSG00000215262; CTA
RQHITVPSV

SEQ ID NO: 32926 - protein, 9 aa, Homo sapiens
  misc_feature: Table A; Target 32926; HLA-A*02:04; KCNU1; ENSG00000215262; CTA
RQHITVPSV

SEQ ID NO: 32927 - protein, 9 aa, Homo sapiens
  misc_feature: Table A; Target 32927; HLA-B*13:02; KCNU1; ENSG00000215262; CTA
RQHITVPSV

SEQ ID NO: 32928 - protein, 9 aa, Homo sapiens
  misc_feature: Table A; Target 32928; HLA-B*15:03; KCNU1; ENSG00000215262; CTA
RQHITVPSV

SEQ ID NO: 32929 - protein, 10 aa, Homo sapiens
  misc_feature: Table A; Target 32929; HLA-A*03:01; KCNU1; ENSG00000215262; CTA
RQHITVPSVK

SEQ ID NO: 32930 - protein, 10 aa, Homo sapiens
  misc_feature: Table A; Target 32930; HLA-A*03:02; KCNU1; ENSG00000215262; CTA
RQHITVPSVK

SEQ ID NO: 32931 - protein, 11 aa, Homo sapiens
  misc_feature: Table A; Target 32931; HLA-A*31:01; KCNU1; ENSG00000215262; CTA
RQHITVPSVKR

SEQ ID NO: 32932 - protein, 9 aa, Homo sapiens
  misc_feature: Table A; Target 32932; HLA-B*57:01; KCNU1; ENSG00000215262; CTA
RSLHFQGQF

SEQ ID NO: 32933 - protein, 10 aa, Homo sapiens
  misc_feature: Table A; Target 32933; HLA-A*31:01; KCNU1; ENSG00000215262; CTA
RSLHFQGQFR

SEQ ID NO: 32934 - protein, 9 aa, Homo sapiens
  misc_feature: Table A; Target 32934; HLA-B*57:01; KCNU1; ENSG00000215262; CTA
RTFIMFFTL

SEQ ID NO: 32935 - protein, 9 aa, Homo sapiens
  misc_feature: Table A; Target 32935; HLA-A*03:01; KCNU1; ENSG00000215262; CTA
RTNSLSFPK

SEQ ID NO: 32936 - protein, 9 aa, Homo sapiens
  misc_feature: Table A; Target 32936; HLA-A*03:02; KCNU1; ENSG00000215262; CTA
RTNSLSFPK

SEQ ID NO: 32937 - protein, 9 aa, Homo sapiens
  misc_feature: Table A; Target 32937; HLA-A*11:01; KCNU1; ENSG00000215262; CTA
RTNSLSFPK

SEQ ID NO: 32938 - protein, 9 aa, Homo sapiens
  misc_feature: Table A; Target 32938; HLA-A*31:01; KCNU1; ENSG00000215262; CTA
RTNSLSFPK

SEQ ID NO: 32939 - protein, 8 aa, Homo sapiens
  misc_feature: Table A; Target 32939; HLA-C*05:01; KCNU1; ENSG00000215262; CTA
SADPVGSC

SEQ ID NO: 32940 - protein, 9 aa, Homo sapiens
  misc_feature: Table A; Target 32940; HLA-C*05:01; KCNU1; ENSG00000215262; CTA
SADPVGSCS

SEQ ID NO: 32941 - protein, 11 aa, Homo sapiens
  misc_feature: Table A; Target 32941; HLA-A*01:01; KCNU1; ENSG00000215262; CTA
SADPVGSCSSY

SEQ ID NO: 32942 - protein, 11 aa, Homo sapiens
  misc_feature: Table A; Target 32942; HLA-A*30:02; KCNU1; ENSG00000215262; CTA
SADPVGSCSSY

SEQ ID NO: 32943 - protein, 11 aa, Homo sapiens
  misc_feature: Table A; Target 32943; HLA-B*27:05; KCNU1; ENSG00000215262; CTA
SADPVGSCSSY

SEQ ID NO: 32944 - protein, 11 aa, Homo sapiens
  misc_feature: Table A; Target 32944; HLA-B*35:01; KCNU1; ENSG00000215262; CTA
SADPVGSCSSY

SEQ ID NO: 32945 - protein, 11 aa, Homo sapiens
  misc_feature: Table A; Target 32945; HLA-B*55:01; KCNU1; ENSG00000215262; CTA
SADPVGSCSSY

SEQ ID NO: 32946 - protein, 11 aa, Homo sapiens
  misc_feature: Table A; Target 32946; HLA-C*05:01; KCNU1; ENSG00000215262; CTA
SADPVGSCSSY

SEQ ID NO: 32947 - protein, 9 aa, Homo sapiens
  misc_feature: Table A; Target 32947; HLA-A*31:01; KCNU1; ENSG00000215262; CTA
SAMKWEDLR

SEQ ID NO: 32948 - protein, 9 aa, Homo sapiens
  misc_feature: Table A; Target 32948; HLA-C*01:02; KCNU1; ENSG00000215262; CTA
SAPMGLRNF

SEQ ID NO: 32949 - protein, 9 aa, Homo sapiens
  misc_feature: Table A; Target 32949; HLA-C*16:01; KCNU1; ENSG00000215262; CTA
SAPMGLRNF

SEQ ID NO: 32950 - protein, 9 aa, Homo sapiens
  misc_feature: Table A; Target 32950; HLA-A*02:03; KCNU1; ENSG00000215262; CTA
SAQTFVGQV

SEQ ID NO: 32951 - protein, 9 aa, Homo sapiens
  misc_feature: Table A; Target 32951; HLA-C*02:02; KCNU1; ENSG00000215262; CTA
SAQTFVGQV

SEQ ID NO: 32952 - protein, 9 aa, Homo sapiens
  misc_feature: Table A; Target 32952; HLA-C*12:03; KCNU1; ENSG00000215262; CTA
SAQTFVGQV

SEQ ID NO: 32953 - protein, 9 aa, Homo sapiens
  misc_feature: Table A; Target 32953; HLA-C*16:02; KCNU1; ENSG00000215262; CTA
SAQTFVGQV

SEQ ID NO: 32954 - protein, 10 aa, Homo sapiens
  misc_feature: Table A; Target 32954; HLA-C*03:03; KCNU1; ENSG00000215262; CTA
SAQTFVGQVL

SEQ ID NO: 32955 - protein, 10 aa, Homo sapiens
  misc_feature: Table A; Target 32955; HLA-C*03:04; KCNU1; ENSG00000215262; CTA
SAQTFVGQVL

SEQ ID NO: 32956 - protein, 10 aa, Homo sapiens
  misc_feature: Table A; Target 32956; HLA-C*16:04; KCNU1; ENSG00000215262; CTA
SAQTFVGQVL

SEQ ID NO: 32957 - protein, 9 aa, Homo sapiens
  misc_feature: Table A; Target 32957; HLA-B*37:01; KCNU1; ENSG00000215262; CTA
SDDFAGMSF

SEQ ID NO: 32958 - protein, 9 aa, Homo sapiens
  misc_feature: Table A; Target 32958; HLA-C*04:01; KCNU1; ENSG00000215262; CTA
SDDFAGMSF

SEQ ID NO: 32959 - protein, 9 aa, Homo sapiens
  misc_feature: Table A; Target 32959; HLA-B*37:01; KCNU1; ENSG00000215262; CTA
SDQLDSSGM

SEQ ID NO: 32960 - protein, 9 aa, Homo sapiens
  misc_feature: Table A; Target 32960; HLA-C*16:02; KCNU1; ENSG00000215262; CTA
SDTNCPPTI

SEQ ID NO: 32961 - protein, 9 aa, Homo sapiens
  misc_feature: Table A; Target 32961; HLA-A*23:01; KCNU1; ENSG00000215262; CTA
SDVNPRNTF

SEQ ID NO: 32962 - protein, 9 aa, Homo sapiens
  misc_feature: Table A; Target 32962; HLA-A*30:01; KCNU1; ENSG00000215262; CTA
SDVNPRNTF

SEQ ID NO: 32963 - protein, 9 aa, Homo sapiens
  misc_feature: Table A; Target 32963; HLA-A*32:01; KCNU1; ENSG00000215262; CTA
SDVNPRNTF

SEQ ID NO: 32964 - protein, 9 aa, Homo sapiens
  misc_feature: Table A; Target 32964; HLA-B*15:03; KCNU1; ENSG00000215262; CTA
SDVNPRNTF

SEQ ID NO: 32965 - protein, 9 aa, Homo sapiens
  misc_feature: Table A; Target 32965; HLA-B*37:01; KCNU1; ENSG00000215262; CTA
SDVNPRNTF

SEQ ID NO: 32966 - protein, 9 aa, Homo sapiens
  misc_feature: Table A; Target 32966; HLA-B*44:02; KCNU1; ENSG00000215262; CTA
SDVNPRNTF

SEQ ID NO: 32967 - protein, 9 aa, Homo sapiens
  misc_feature: Table A; Target 32967; HLA-B*44:03; KCNU1; ENSG00000215262; CTA
SDVNPRNTF

SEQ ID NO: 32968 - protein, 9 aa, Homo sapiens
  misc_feature: Table A; Target 32968; HLA-C*16:01; KCNU1; ENSG00000215262; CTA
SDVNPRNTF

SEQ ID NO: 32969 - protein, 9 aa, Homo sapiens
  misc_feature: Table A; Target 32969; HLA-C*16:04; KCNU1; ENSG00000215262; CTA
SDVNPRNTF

SEQ ID NO: 32970 - protein, 11 aa, Homo sapiens
  misc_feature: Table A; Target 32970; HLA-A*23:01; KCNU1; ENSG00000215262; CTA
SFLDSLLATAF

SEQ ID NO: 32971 - protein, 11 aa, Homo sapiens
  misc_feature: Table A; Target 32971; HLA-A*24:02; KCNU1; ENSG00000215262; CTA
SFLDSLLATAF

SEQ ID NO: 32972 - protein, 11 aa, Homo sapiens
  misc_feature: Table A; Target 32972; HLA-A*29:02; KCNU1; ENSG00000215262; CTA
SFLDSLLATAF

SEQ ID NO: 32973 - protein, 11 aa, Homo sapiens
  misc_feature: Table A; Target 32973; HLA-C*14:02; KCNU1; ENSG00000215262; CTA
SFLDSLLATAF

SEQ ID NO: 32974 - protein, 10 aa, Homo sapiens
  misc_feature: Table A; Target 32974; HLA-A*24:02; KCNU1; ENSG00000215262; CTA
SFPEVARLCF

SEQ ID NO: 32975 - protein, 9 aa, Homo sapiens
  misc_feature: Table A; Target 32975; HLA-B*38:01; KCNU1; ENSG00000215262; CTA
SGDLHAANI

SEQ ID NO: 32976 - protein, 9 aa, Homo sapiens
  misc_feature: Table A; Target 32976; HLA-C*05:01; KCNU1; ENSG00000215262; CTA
SGDLHAANI

SEQ ID NO: 32977 - protein, 9 aa, Homo sapiens
  misc_feature: Table A; Target 32977; HLA-A*31:01; KCNU1; ENSG00000215262; CTA
SGDPWLKGR

SEQ ID NO: 32978 - protein, 9 aa, Homo sapiens
  misc_feature: Table A; Target 32978; HLA-B*27:05; KCNU1; ENSG00000215262; CTA
SHAEDISNI

SEQ ID NO: 32979 - protein, 9 aa, Homo sapiens
  misc_feature: Table A; Target 32979; HLA-B*38:01; KCNU1; ENSG00000215262; CTA
SHAEDISNI

SEQ ID NO: 32980 - protein, 9 aa, Homo sapiens
  misc_feature: Table A; Target 32980; HLA-B*39:01; KCNU1; ENSG00000215262; CTA
SHAEDISNI

SEQ ID NO: 32981 - protein, 10 aa, Homo sapiens
  misc_feature: Table A; Target 32981; HLA-B*38:01; KCNU1; ENSG00000215262; CTA
SHAEDISNIM

SEQ ID NO: 32982 - protein, 10 aa, Homo sapiens
  misc_feature: Table A; Target 32982; HLA-B*39:01; KCNU1; ENSG00000215262; CTA
SHAEDISNIM

SEQ ID NO: 32983 - protein, 9 aa, Homo sapiens
  misc_feature: Table A; Target 32983; HLA-B*35:03; KCNU1; ENSG00000215262; CTA
SIISSQIPL

SEQ ID NO: 32984 - protein, 9 aa, Homo sapiens
  misc_feature: Table A; Target 32984; HLA-C*01:02; KCNU1; ENSG00000215262; CTA
SIISSQIPL

SEQ ID NO: 32985 - protein, 9 aa, Homo sapiens
  misc_feature: Table A; Target 32985; HLA-C*03:03; KCNU1; ENSG00000215262; CTA
SIISSQIPL

SEQ ID NO: 32986 - protein, 9 aa, Homo sapiens
  misc_feature: Table A; Target 32986; HLA-C*03:04; KCNU1; ENSG00000215262; CTA
SIISSQIPL

SEQ ID NO: 32987 - protein, 9 aa, Homo sapiens
  misc_feature: Table A; Target 32987; HLA-C*07:04; KCNU1; ENSG00000215262; CTA
SIISSQIPL

SEQ ID NO: 32988 - protein, 9 aa, Homo sapiens
  misc_feature: Table A; Target 32988; HLA-C*16:01; KCNU1; ENSG00000215262; CTA
SIISSQIPL

SEQ ID NO: 32989 - protein, 10 aa, Homo sapiens
  misc_feature: Table A; Target 32989; HLA-A*31:01; KCNU1; ENSG00000215262; CTA
SIKNYDSTTR

SEQ ID NO: 32990 - protein, 10 aa, Homo sapiens
  misc_feature: Table A; Target 32990; HLA-A*33:03; KCNU1; ENSG00000215262; CTA
SIKNYDSTTR

SEQ ID NO: 32991 - protein, 10 aa, Homo sapiens
  misc_feature: Table A; Target 32991; HLA-A*68:01; KCNU1; ENSG00000215262; CTA
SIKNYDSTTR

SEQ ID NO: 32992 - protein, 10 aa, Homo sapiens
  misc_feature: Table A; Target 32992; HLA-C*07:06; KCNU1; ENSG00000215262; CTA
SIKNYDSTTR

SEQ ID NO: 32993 - protein, 8 aa, Homo sapiens
  misc_feature: Table A; Target 32993; HLA-A*31:01; KCNU1; ENSG00000215262; CTA
SISNFTTR

SEQ ID NO: 32994 - protein, 8 aa, Homo sapiens
  misc_feature: Table A; Target 32994; HLA-A*33:03; KCNU1; ENSG00000215262; CTA
SISNFTTR

SEQ ID NO: 32995 - protein, 8 aa, Homo sapiens
  misc_feature: Table A; Target 32995; HLA-A*68:01; KCNU1; ENSG00000215262; CTA
SISNFTTR

SEQ ID NO: 32996 - protein, 8 aa, Homo sapiens
  misc_feature: Table A; Target 32996; HLA-C*07:06; KCNU1; ENSG00000215262; CTA
SISNFTTR

SEQ ID NO: 32997 - protein, 8 aa, Homo sapiens
  misc_feature: Table A; Target 32997; HLA-A*02:04; KCNU1; ENSG00000215262; CTA
SIVDIFTI

SEQ ID NO: 32998 - protein, 8 aa, Homo sapiens
  misc_feature: Table A; Target 32998; HLA-B*13:02; KCNU1; ENSG00000215262; CTA
SIVDIFTI

SEQ ID NO: 32999 - protein, 8 aa, Homo sapiens
  misc_feature: Table A; Target 32999; HLA-A*03:02; KCNU1; ENSG00000215262; CTA
SLDKVTLK

SEQ ID NO: 33000 - protein, 9 aa, Homo sapiens
  misc_feature: Table A; Target 33000; HLA-A*02:07; KCNU1; ENSG00000215262; CTA
SLDKVTLKR

SEQ ID NO: 33001 - protein, 9 aa, Homo sapiens
  misc_feature: Table A; Target 33001; HLA-A*03:01; KCNU1; ENSG00000215262; CTA
SLDKVTLKR

SEQ ID NO: 33002 - protein, 10 aa, Homo sapiens
  misc_feature: Table A; Target 33002; HLA-A*02:01; KCNU1; ENSG00000215262; CTA
SLDLFGILCV

SEQ ID NO: 33003 - protein, 9 aa, Homo sapiens
  misc_feature: Table A; Target 33003; HLA-B*44:02; KCNU1; ENSG00000215262; CTA
SLDYLQREW

SEQ ID NO: 33004 - protein, 10 aa, Homo sapiens
  misc_feature: Table A; Target 33004; HLA-A*02:01; KCNU1; ENSG00000215262; CTA
SLFTDGFCGL

SEQ ID NO: 33005 - protein, 10 aa, Homo sapiens
  misc_feature: Table A; Target 33005; HLA-A*02:03; KCNU1; ENSG00000215262; CTA
SLFTDGFCGL

SEQ ID NO: 33006 - protein, 10 aa, Homo sapiens
  misc_feature: Table A; Target 33006; HLA-A*02:04; KCNU1; ENSG00000215262; CTA
SLFTDGFCGL

SEQ ID NO: 33007 - protein, 10 aa, Homo sapiens
  misc_feature: Table A; Target 33007; HLA-A*02:07; KCNU1; ENSG00000215262; CTA
SLFTDGFCGL

SEQ ID NO: 33008 - protein, 9 aa, Homo sapiens
  misc_feature: Table A; Target 33008; HLA-A*03:01; KCNU1; ENSG00000215262; CTA
SLFVEQNKK

SEQ ID NO: 33009 - protein, 9 aa, Homo sapiens
  misc_feature: Table A; Target 33009; HLA-A*03:02; KCNU1; ENSG00000215262; CTA
SLFVEQNKK

SEQ ID NO: 33010 - protein, 9 aa, Homo sapiens
  misc_feature: Table A; Target 33010; HLA-A*11:01; KCNU1; ENSG00000215262; CTA
SLFVEQNKK

SEQ ID NO: 33011 - protein, 10 aa, Homo sapiens
  misc_feature: Table A; Target 33011; HLA-A*02:03; KCNU1; ENSG00000215262; CTA
SLFVEQNKKV

SEQ ID NO: 33012 - protein, 10 aa, Homo sapiens
  misc_feature: Table A; Target 33012; HLA-A*02:03; KCNU1; ENSG00000215262; CTA
SLHETILSDV

SEQ ID NO: 33013 - protein, 9 aa, Homo sapiens
  misc_feature: Table A; Target 33013; HLA-A*31:01; KCNU1; ENSG00000215262; CTA
SLHFQGQFR

SEQ ID NO: 33014 - protein, 10 aa, Homo sapiens
  misc_feature: Table A; Target 33014; HLA-A*29:02; KCNU1; ENSG00000215262; CTA
SLLATAFYNY

SEQ ID NO: 33015 - protein, 9 aa, Homo sapiens
  misc_feature: Table A; Target 33015; HLA-A*02:01; KCNU1; ENSG00000215262; CTA
SLQETNLHL

SEQ ID NO: 33016 - protein, 9 aa, Homo sapiens
  misc_feature: Table A; Target 33016; HLA-A*02:03; KCNU1; ENSG00000215262; CTA
SLQETNLHL

SEQ ID NO: 33017 - protein, 9 aa, Homo sapiens
  misc_feature: Table A; Target 33017; HLA-A*02:04; KCNU1; ENSG00000215262; CTA
SLQETNLHL

SEQ ID NO: 33018 - protein, 9 aa, Homo sapiens
  misc_feature: Table A; Target 33018; HLA-A*02:07; KCNU1; ENSG00000215262; CTA
SLQETNLHL

SEQ ID NO: 33019 - protein, 9 aa, Homo sapiens
  misc_feature: Table A; Target 33019; HLA-B*13:02; KCNU1; ENSG00000215262; CTA
SLQETNLHL

SEQ ID NO: 33020 - protein, 9 aa, Homo sapiens
  misc_feature: Table A; Target 33020; HLA-B*55:01; KCNU1; ENSG00000215262; CTA
SLQETNLHL

SEQ ID NO: 33021 - protein, 8 aa, Homo sapiens
  misc_feature: Table A; Target 33021; HLA-B*13:02; KCNU1; ENSG00000215262; CTA
SLQKSYEI

SEQ ID NO: 33022 - protein, 11 aa, Homo sapiens
  misc_feature: Table A; Target 33022; HLA-A*03:02; KCNU1; ENSG00000215262; CTA
SLQKSYEIVNK

SEQ ID NO: 33023 - protein, 11 aa, Homo sapiens
  misc_feature: Table A; Target 33023; HLA-A*11:01; KCNU1; ENSG00000215262; CTA
SLQKSYEIVNK

SEQ ID NO: 33024 - protein, 9 aa, Homo sapiens
  misc_feature: Table A; Target 33024; HLA-B*08:01; KCNU1; ENSG00000215262; CTA
SMKNKILTQ

SEQ ID NO: 33025 - protein, 10 aa, Homo sapiens
  misc_feature: Table A; Target 33025; HLA-A*31:01; KCNU1; ENSG00000215262; CTA
SMKNKILTQR

SEQ ID NO: 33026 - protein, 8 aa, Homo sapiens
  misc_feature: Table A; Target 33026; HLA-C*16:01; KCNU1; ENSG00000215262; CTA
SNFTTRTL

SEQ ID NO: 33027 - protein, 9 aa, Homo sapiens
  misc_feature: Table A; Target 33027; HLA-B*08:01; KCNU1; ENSG00000215262; CTA
SNIMRVLSI

SEQ ID NO: 33028 - protein, 8 aa, Homo sapiens
  misc_feature: Table A; Target 33028; HLA-B*08:01; KCNU1; ENSG00000215262; CTA
SNYTRKEL

SEQ ID NO: 33029 - protein, 8 aa, Homo sapiens
  misc_feature: Table A; Target 33029; HLA-C*16:01; KCNU1; ENSG00000215262; CTA
SNYTRKEL

SEQ ID NO: 33030 - protein, 9 aa, Homo sapiens
  misc_feature: Table A; Target 33030; HLA-A*68:01; KCNU1; ENSG00000215262; CTA
SPVYSYQPR

SEQ ID NO: 33031 - protein, 9 aa, Homo sapiens
  misc_feature: Table A; Target 33031; HLA-C*07:06; KCNU1; ENSG00000215262; CTA
SPVYSYQPR

SEQ ID NO: 33032 - protein, 9 aa, Homo sapiens
  misc_feature: Table A; Target 33032; HLA-B*39:01; KCNU1; ENSG00000215262; CTA
SQIPLGDNA

SEQ ID NO: 33033 - protein, 11 aa, Homo sapiens
  misc_feature: Table A; Target 33033; HLA-B*27:05; KCNU1; ENSG00000215262; CTA
SRISGQDSPPR

SEQ ID NO: 33034 - protein, 8 aa, Homo sapiens
  misc_feature: Table A; Target 33034; HLA-C*05:01; KCNU1; ENSG00000215262; CTA
SSDPSPSV

SEQ ID NO: 33035 - protein, 9 aa, Homo sapiens
  misc_feature: Table A; Target 33035; HLA-A*03:01; KCNU1; ENSG00000215262; CTA
SSISNFTTR

SEQ ID NO: 33036 - protein, 9 aa, Homo sapiens
  misc_feature: Table A; Target 33036; HLA-A*03:02; KCNU1; ENSG00000215262; CTA
SSISNFTTR

SEQ ID NO: 33037 - protein, 9 aa, Homo sapiens
  misc_feature: Table A; Target 33037; HLA-A*11:01; KCNU1; ENSG00000215262; CTA
SSISNFTTR

SEQ ID NO: 33038 - protein, 9 aa, Homo sapiens
  misc_feature: Table A; Target 33038; HLA-A*25:01; KCNU1; ENSG00000215262; CTA
SSISNFTTR

SEQ ID NO: 33039 - protein, 9 aa, Homo sapiens
  misc_feature: Table A; Target 33039; HLA-A*31:01; KCNU1; ENSG00000215262; CTA
SSISNFTTR

SEQ ID NO: 33040 - protein, 9 aa, Homo sapiens
  misc_feature: Table A; Target 33040; HLA-A*32:01; KCNU1; ENSG00000215262; CTA
SSISNFTTR

SEQ ID NO: 33041 - protein, 9 aa, Homo sapiens
  misc_feature: Table A; Target 33041; HLA-A*33:01; KCNU1; ENSG00000215262; CTA
SSISNFTTR

SEQ ID NO: 33042 - protein, 9 aa, Homo sapiens
  misc_feature: Table A; Target 33042; HLA-A*33:03; KCNU1; ENSG00000215262; CTA
SSISNFTTR

SEQ ID NO: 33043 - protein, 9 aa, Homo sapiens
  misc_feature: Table A; Target 33043; HLA-A*68:01; KCNU1; ENSG00000215262; CTA
SSISNFTTR

SEQ ID NO: 33044 - protein, 9 aa, Homo sapiens
  misc_feature: Table A; Target 33044; HLA-A*68:02; KCNU1; ENSG00000215262; CTA
SSISNFTTR

SEQ ID NO: 33045 - protein, 9 aa, Homo sapiens
  misc_feature: Table A; Target 33045; HLA-B*57:01; KCNU1; ENSG00000215262; CTA
SSISNFTTR

SEQ ID NO: 33046 - protein, 9 aa, Homo sapiens
  misc_feature: Table A; Target 33046; HLA-B*58:01; KCNU1; ENSG00000215262; CTA
SSISNFTTR

SEQ ID NO: 33047 - protein, 9 aa, Homo sapiens
  misc_feature: Table A; Target 33047; HLA-C*02:02; KCNU1; ENSG00000215262; CTA
SSISNFTTR

SEQ ID NO: 33048 - protein, 9 aa, Homo sapiens
  misc_feature: Table A; Target 33048; HLA-C*07:06; KCNU1; ENSG00000215262; CTA
SSISNFTTR

SEQ ID NO: 33049 - protein, 11 aa, Homo sapiens
  misc_feature: Table A; Target 33049; HLA-A*11:01; KCNU1; ENSG00000215262; CTA
SSQIPLGDNAK

SEQ ID NO: 33050 - protein, 9 aa, Homo sapiens
  misc_feature: Table A; Target 33050; HLA-A*02:01; KCNU1; ENSG00000215262; CTA
SSSDPSPSV

SEQ ID NO: 33051 - protein, 9 aa, Homo sapiens
  misc_feature: Table A; Target 33051; HLA-B*13:02; KCNU1; ENSG00000215262; CTA
SSSDPSPSV

SEQ ID NO: 33052 - protein, 9 aa, Homo sapiens
  misc_feature: Table A; Target 33052; HLA-B*27:05; KCNU1; ENSG00000215262; CTA
SSSDPSPSV

SEQ ID NO: 33053 - protein, 9 aa, Homo sapiens
  misc_feature: Table A; Target 33053; HLA-B*39:01; KCNU1; ENSG00000215262; CTA
SSSDPSPSV

SEQ ID NO: 33054 - protein, 9 aa, Homo sapiens
  misc_feature: Table A; Target 33054; HLA-B*51:01; KCNU1; ENSG00000215262; CTA
SSSDPSPSV

SEQ ID NO: 33055 - protein, 9 aa, Homo sapiens
  misc_feature: Table A; Target 33055; HLA-C*02:02; KCNU1; ENSG00000215262; CTA
SSSDPSPSV

SEQ ID NO: 33056 - protein, 9 aa, Homo sapiens
  misc_feature: Table A; Target 33056; HLA-C*03:03; KCNU1; ENSG00000215262; CTA
SSSDPSPSV

SEQ ID NO: 33057 - protein, 9 aa, Homo sapiens
  misc_feature: Table A; Target 33057; HLA-C*03:04; KCNU1; ENSG00000215262; CTA
SSSDPSPSV

SEQ ID NO: 33058 - protein, 9 aa, Homo sapiens
  misc_feature: Table A; Target 33058; HLA-C*05:01; KCNU1; ENSG00000215262; CTA
SSSDPSPSV

SEQ ID NO: 33059 - protein, 9 aa, Homo sapiens
  misc_feature: Table A; Target 33059; HLA-C*06:02; KCNU1; ENSG00000215262; CTA
SSSDPSPSV

SEQ ID NO: 33060 - protein, 9 aa, Homo sapiens
  misc_feature: Table A; Target 33060; HLA-C*12:03; KCNU1; ENSG00000215262; CTA
SSSDPSPSV

SEQ ID NO: 33061 - protein, 9 aa, Homo sapiens
  misc_feature: Table A; Target 33061; HLA-C*16:01; KCNU1; ENSG00000215262; CTA
SSSDPSPSV

SEQ ID NO: 33062 - protein, 9 aa, Homo sapiens
  misc_feature: Table A; Target 33062; HLA-C*16:02; KCNU1; ENSG00000215262; CTA
SSSDPSPSV

SEQ ID NO: 33063 - protein, 9 aa, Homo sapiens
  misc_feature: Table A; Target 33063; HLA-C*16:04; KCNU1; ENSG00000215262; CTA
SSSDPSPSV

SEQ ID NO: 33064 - protein, 9 aa, Homo sapiens
  misc_feature: Table A; Target 33064; HLA-A*03:01; KCNU1; ENSG00000215262; CTA
SSYEALKGK

SEQ ID NO: 33065 - protein, 9 aa, Homo sapiens
  misc_feature: Table A; Target 33065; HLA-A*03:02; KCNU1; ENSG00000215262; CTA
SSYEALKGK

SEQ ID NO: 33066 - protein, 9 aa, Homo sapiens
  misc_feature: Table A; Target 33066; HLA-A*11:01; KCNU1; ENSG00000215262; CTA
SSYEALKGK

SEQ ID NO: 33067 - protein, 10 aa, Homo sapiens
  misc_feature: Table A; Target 33067; HLA-A*11:01; KCNU1; ENSG00000215262; CTA
SSYEALKGKK

SEQ ID NO: 33068 - protein, 9 aa, Homo sapiens
  misc_feature: Table A; Target 33068; HLA-A*02:03; KCNU1; ENSG00000215262; CTA
STAFSTGTV

SEQ ID NO: 33069 - protein, 10 aa, Homo sapiens
  misc_feature: Table A; Target 33069; HLA-A*25:01; KCNU1; ENSG00000215262; CTA
STAFSTGTVF

SEQ ID NO: 33070 - protein, 10 aa, Homo sapiens
  misc_feature: Table A; Target 33070; HLA-A*26:01; KCNU1; ENSG00000215262; CTA
STAFSTGTVF

SEQ ID NO: 33071 - protein, 10 aa, Homo sapiens
  misc_feature: Table A; Target 33071; HLA-B*15:01; KCNU1; ENSG00000215262; CTA
STAFSTGTVF

SEQ ID NO: 33072 - protein, 10 aa, Homo sapiens
  misc_feature: Table A; Target 33072; HLA-B*15:03; KCNU1; ENSG00000215262; CTA
STAFSTGTVF

SEQ ID NO: 33073 - protein, 10 aa, Homo sapiens
  misc_feature: Table A; Target 33073; HLA-B*39:01; KCNU1; ENSG00000215262; CTA
STAFSTGTVF

SEQ ID NO: 33074 - protein, 10 aa, Homo sapiens
  misc_feature: Table A; Target 33074; HLA-C*02:02; KCNU1; ENSG00000215262; CTA
STAFSTGTVF

SEQ ID NO: 33075 - protein, 10 aa, Homo sapiens
  misc_feature: Table A; Target 33075; HLA-C*07:04; KCNU1; ENSG00000215262; CTA
STAFSTGTVF

SEQ ID NO: 33076 - protein, 8 aa, Homo sapiens
  misc_feature: Table A; Target 33076; HLA-B*37:01; KCNU1; ENSG00000215262; CTA
STSSISNF

SEQ ID NO: 33077 - protein, 11 aa, Homo sapiens
  misc_feature: Table A; Target 33077; HLA-A*03:02; KCNU1; ENSG00000215262; CTA
STSSISNFTTR

SEQ ID NO: 33078 - protein, 11 aa, Homo sapiens
  misc_feature: Table A; Target 33078; HLA-A*11:01; KCNU1; ENSG00000215262; CTA
STSSISNFTTR

SEQ ID NO: 33079 - protein, 11 aa, Homo sapiens
  misc_feature: Table A; Target 33079; HLA-A*31:01; KCNU1; ENSG00000215262; CTA
STSSISNFTTR

SEQ ID NO: 33080 - protein, 11 aa, Homo sapiens
  misc_feature: Table A; Target 33080; HLA-A*33:01; KCNU1; ENSG00000215262; CTA
STSSISNFTTR

SEQ ID NO: 33081 - protein, 11 aa, Homo sapiens
  misc_feature: Table A; Target 33081; HLA-A*33:03; KCNU1; ENSG00000215262; CTA
STSSISNFTTR

SEQ ID NO: 33082 - protein, 11 aa, Homo sapiens
  misc_feature: Table A; Target 33082; HLA-A*68:01; KCNU1; ENSG00000215262; CTA
STSSISNFTTR

SEQ ID NO: 33083 - protein, 11 aa, Homo sapiens
  misc_feature: Table A; Target 33083; HLA-A*68:02; KCNU1; ENSG00000215262; CTA
STSSISNFTTR

SEQ ID NO: 33084 - protein, 11 aa, Homo sapiens
  misc_feature: Table A; Target 33084; HLA-C*07:06; KCNU1; ENSG00000215262; CTA
STSSISNFTTR

SEQ ID NO: 33085 - protein, 9 aa, Homo sapiens
  misc_feature: Table A; Target 33085; HLA-A*02:04; KCNU1; ENSG00000215262; CTA
STTRIIIQI

SEQ ID NO: 33086 - protein, 9 aa, Homo sapiens
  misc_feature: Table A; Target 33086; HLA-A*68:01; KCNU1; ENSG00000215262; CTA
STTRIIIQI

SEQ ID NO: 33087 - protein, 9 aa, Homo sapiens
  misc_feature: Table A; Target 33087; HLA-A*68:02; KCNU1; ENSG00000215262; CTA
STTRIIIQI

SEQ ID NO: 33088 - protein, 9 aa, Homo sapiens
  misc_feature: Table A; Target 33088; HLA-B*13:02; KCNU1; ENSG00000215262; CTA
STTRIIIQI

SEQ ID NO: 33089 - protein, 9 aa, Homo sapiens
  misc_feature: Table A; Target 33089; HLA-B*57:01; KCNU1; ENSG00000215262; CTA
STTRIIIQI

SEQ ID NO: 33090 - protein, 9 aa, Homo sapiens
  misc_feature: Table A; Target 33090; HLA-C*16:02; KCNU1; ENSG00000215262; CTA
STTRIIIQI

SEQ ID NO: 33091 - protein, 10 aa, Homo sapiens
  misc_feature: Table A; Target 33091; HLA-A*68:02; KCNU1; ENSG00000215262; CTA
STTRIIIQIL

SEQ ID NO: 33092 - protein, 9 aa, Homo sapiens
  misc_feature: Table A; Target 33092; HLA-A*68:02; KCNU1; ENSG00000215262; CTA
STVGFGDVV

SEQ ID NO: 33093 - protein, 9 aa, Homo sapiens
  misc_feature: Table A; Target 33093; HLA-B*13:02; KCNU1; ENSG00000215262; CTA
STVGFGDVV

SEQ ID NO: 33094 - protein, 9 aa, Homo sapiens
  misc_feature: Table A; Target 33094; HLA-B*39:01; KCNU1; ENSG00000215262; CTA
STVGFGDVV

SEQ ID NO: 33095 - protein, 11 aa, Homo sapiens
  misc_feature: Table A; Target 33095; HLA-A*03:01; KCNU1; ENSG00000215262; CTA
STVGFGDVVAK

SEQ ID NO: 33096 - protein, 11 aa, Homo sapiens
  misc_feature: Table A; Target 33096; HLA-A*03:02; KCNU1; ENSG00000215262; CTA
STVGFGDVVAK

SEQ ID NO: 33097 - protein, 11 aa, Homo sapiens
  misc_feature: Table A; Target 33097; HLA-A*31:01; KCNU1; ENSG00000215262; CTA
STVGFGDVVAK

SEQ ID NO: 33098 - protein, 11 aa, Homo sapiens
  misc_feature: Table A; Target 33098; HLA-A*68:01; KCNU1; ENSG00000215262; CTA
STVGFGDVVAK

SEQ ID NO: 33099 - protein, 11 aa, Homo sapiens
  misc_feature: Table A; Target 33099; HLA-A*68:02; KCNU1; ENSG00000215262; CTA
STVGFGDVVAK

SEQ ID NO: 33100 - protein, 11 aa, Homo sapiens
  misc_feature: Table A; Target 33100; HLA-B*27:02; KCNU1; ENSG00000215262; CTA
STVGFGDVVAK

SEQ ID NO: 33101 - protein, 11 aa, Homo sapiens
  misc_feature: Table A; Target 33101; HLA-C*07:06; KCNU1; ENSG00000215262; CTA
STVGFGDVVAK

SEQ ID NO: 33102 - protein, 9 aa, Homo sapiens
  misc_feature: Table A; Target 33102; HLA-A*03:01; KCNU1; ENSG00000215262; CTA
SVKKWQIIK

SEQ ID NO: 33103 - protein, 9 aa, Homo sapiens
  misc_feature: Table A; Target 33103; HLA-A*01:01; KCNU1; ENSG00000215262; CTA
SVSEETPGY

SEQ ID NO: 33104 - protein, 9 aa, Homo sapiens
  misc_feature: Table A; Target 33104; HLA-A*25:01; KCNU1; ENSG00000215262; CTA
SVSEETPGY

SEQ ID NO: 33105 - protein, 9 aa, Homo sapiens
  misc_feature: Table A; Target 33105; HLA-A*26:01; KCNU1; ENSG00000215262; CTA
SVSEETPGY

SEQ ID NO: 33106 - protein, 9 aa, Homo sapiens
  misc_feature: Table A; Target 33106; HLA-A*29:02; KCNU1; ENSG00000215262; CTA
SVSEETPGY

SEQ ID NO: 33107 - protein, 9 aa, Homo sapiens
  misc_feature: Table A; Target 33107; HLA-A*30:02; KCNU1; ENSG00000215262; CTA
SVSEETPGY

SEQ ID NO: 33108 - protein, 9 aa, Homo sapiens
  misc_feature: Table A; Target 33108; HLA-A*32:01; KCNU1; ENSG00000215262; CTA
SVSEETPGY

SEQ ID NO: 33109 - protein, 9 aa, Homo sapiens
  misc_feature: Table A; Target 33109; HLA-B*15:01; KCNU1; ENSG00000215262; CTA
SVSEETPGY

SEQ ID NO: 33110 - protein, 9 aa, Homo sapiens
  misc_feature: Table A; Target 33110; HLA-B*35:01; KCNU1; ENSG00000215262; CTA
SVSEETPGY

SEQ ID NO: 33111 - protein, 9 aa, Homo sapiens
  misc_feature: Table A; Target 33111; HLA-C*07:04; KCNU1; ENSG00000215262; CTA
SVSEETPGY

SEQ ID NO: 33112 - protein, 9 aa, Homo sapiens
  misc_feature: Table A; Target 33112; HLA-C*07:06; KCNU1; ENSG00000215262; CTA
SVSEETPGY

SEQ ID NO: 33113 - protein, 9 aa, Homo sapiens
  misc_feature: Table A; Target 33113; HLA-A*25:01; KCNU1; ENSG00000215262; CTA
SVTAFLRNF

SEQ ID NO: 33114 - protein, 9 aa, Homo sapiens
  misc_feature: Table A; Target 33114; HLA-A*32:01; KCNU1; ENSG00000215262; CTA
SVTAFLRNF

SEQ ID NO: 33115 - protein, 9 aa, Homo sapiens
  misc_feature: Table A; Target 33115; HLA-B*57:01; KCNU1; ENSG00000215262; CTA
SVTAFLRNF

SEQ ID NO: 33116 - protein, 9 aa, Homo sapiens
  misc_feature: Table A; Target 33116; HLA-C*16:01; KCNU1; ENSG00000215262; CTA
SVTAFLRNF

SEQ ID NO: 33117 - protein, 11 aa, Homo sapiens
  misc_feature: Table A; Target 33117; HLA-A*26:01; KCNU1; ENSG00000215262; CTA
SVTETLYSPVY

SEQ ID NO: 33118 - protein, 11 aa, Homo sapiens
  misc_feature: Table A; Target 33118; HLA-A*30:02; KCNU1; ENSG00000215262; CTA
SVTETLYSPVY

SEQ ID NO: 33119 - protein, 9 aa, Homo sapiens
  misc_feature: Table A; Target 33119; HLA-A*02:04; KCNU1; ENSG00000215262; CTA
SYFESIYLV

SEQ ID NO: 33120 - protein, 9 aa, Homo sapiens
  misc_feature: Table A; Target 33120; HLA-A*24:02; KCNU1; ENSG00000215262; CTA
SYFESIYLV

SEQ ID NO: 33121 - protein, 9 aa, Homo sapiens
  misc_feature: Table A; Target 33121; HLA-A*29:02; KCNU1; ENSG00000215262; CTA
SYFESIYLV

SEQ ID NO: 33122 - protein, 9 aa, Homo sapiens
  misc_feature: Table A; Target 33122; HLA-A*68:02; KCNU1; ENSG00000215262; CTA
SYFESIYLV

SEQ ID NO: 33123 - protein, 10 aa, Homo sapiens
  misc_feature: Table A; Target 33123; HLA-A*29:02; KCNU1; ENSG00000215262; CTA
SYFESIYLVM

SEQ ID NO: 33124 - protein, 9 aa, Homo sapiens
  misc_feature: Table A; Target 33124; HLA-A*23:01; KCNU1; ENSG00000215262; CTA
SYQPRTNSL

SEQ ID NO: 33125 - protein, 9 aa, Homo sapiens
  misc_feature: Table A; Target 33125; HLA-A*24:02; KCNU1; ENSG00000215262; CTA
SYQPRTNSL

SEQ ID NO: 33126 - protein, 9 aa, Homo sapiens
  misc_feature: Table A; Target 33126; HLA-B*07:02; KCNU1; ENSG00000215262; CTA
SYQPRTNSL

SEQ ID NO: 33127 - protein, 9 aa, Homo sapiens
  misc_feature: Table A; Target 33127; HLA-B*08:01; KCNU1; ENSG00000215262; CTA
SYQPRTNSL

SEQ ID NO: 33128 - protein, 9 aa, Homo sapiens
  misc_feature: Table A; Target 33128; HLA-B*37:01; KCNU1; ENSG00000215262; CTA
SYQPRTNSL

SEQ ID NO: 33129 - protein, 9 aa, Homo sapiens
  misc_feature: Table A; Target 33129; HLA-C*01:02; KCNU1; ENSG00000215262; CTA
SYQPRTNSL

SEQ ID NO: 33130 - protein, 9 aa, Homo sapiens
  misc_feature: Table A; Target 33130; HLA-C*07:02; KCNU1; ENSG00000215262; CTA
SYQPRTNSL

SEQ ID NO: 33131 - protein, 9 aa, Homo sapiens
  misc_feature: Table A; Target 33131; HLA-C*14:02; KCNU1; ENSG00000215262; CTA
SYQPRTNSL

SEQ ID NO: 33132 - protein, 9 aa, Homo sapiens
  misc_feature: Table A; Target 33132; HLA-C*16:01; KCNU1; ENSG00000215262; CTA
SYQPRTNSL

SEQ ID NO: 33133 - protein, 9 aa, Homo sapiens
  misc_feature: Table A; Target 33133; HLA-C*16:02; KCNU1; ENSG00000215262; CTA
SYQPRTNSL

SEQ ID NO: 33134 - protein, 11 aa, Homo sapiens
  misc_feature: Table A; Target 33134; HLA-A*23:01; KCNU1; ENSG00000215262; CTA
SYQPRTNSLSF

SEQ ID NO: 33135 - protein, 11 aa, Homo sapiens
  misc_feature: Table A; Target 33135; HLA-A*24:02; KCNU1; ENSG00000215262; CTA
SYQPRTNSLSF

SEQ ID NO: 33136 - protein, 8 aa, Homo sapiens
  misc_feature: Table A; Target 33136; HLA-C*02:02; KCNU1; ENSG00000215262; CTA
TAAGFIHL

SEQ ID NO: 33137 - protein, 8 aa, Homo sapiens
  misc_feature: Table A; Target 33137; HLA-C*03:03; KCNU1; ENSG00000215262; CTA
TAAGFIHL

SEQ ID NO: 33138 - protein, 8 aa, Homo sapiens
  misc_feature: Table A; Target 33138; HLA-C*03:04; KCNU1; ENSG00000215262; CTA
TAAGFIHL

SEQ ID NO: 33139 - protein, 8 aa, Homo sapiens
  misc_feature: Table A; Target 33139; HLA-C*16:01; KCNU1; ENSG00000215262; CTA
TAAGFIHL

SEQ ID NO: 33140 - protein, 9 aa, Homo sapiens
  misc_feature: Table A; Target 33140; HLA-A*02:01; KCNU1; ENSG00000215262; CTA
TAAGFIHLV

SEQ ID NO: 33141 - protein, 9 aa, Homo sapiens
  misc_feature: Table A; Target 33141; HLA-A*02:03; KCNU1; ENSG00000215262; CTA
TAAGFIHLV

SEQ ID NO: 33142 - protein, 9 aa, Homo sapiens
  misc_feature: Table A; Target 33142; HLA-A*02:04; KCNU1; ENSG00000215262; CTA
TAAGFIHLV

SEQ ID NO: 33143 - protein, 9 aa, Homo sapiens
  misc_feature: Table A; Target 33143; HLA-A*02:07; KCNU1; ENSG00000215262; CTA
TAAGFIHLV

SEQ ID NO: 33144 - protein, 9 aa, Homo sapiens
  misc_feature: Table A; Target 33144; HLA-A*26:01; KCNU1; ENSG00000215262; CTA
TAAGFIHLV

SEQ ID NO: 33145 - protein, 9 aa, Homo sapiens
  misc_feature: Table A; Target 33145; HLA-A*68:01; KCNU1; ENSG00000215262; CTA
TAAGFIHLV

SEQ ID NO: 33146 - protein, 9 aa, Homo sapiens
  misc_feature: Table A; Target 33146; HLA-A*68:02; KCNU1; ENSG00000215262; CTA
TAAGFIHLV

SEQ ID NO: 33147 - protein, 9 aa, Homo sapiens
  misc_feature: Table A; Target 33147; HLA-B*13:02; KCNU1; ENSG00000215262; CTA
TAAGFIHLV

SEQ ID NO: 33148 - protein, 9 aa, Homo sapiens
  misc_feature: Table A; Target 33148; HLA-B*35:01; KCNU1; ENSG00000215262; CTA
TAAGFIHLV

SEQ ID NO: 33149 - protein, 9 aa, Homo sapiens
  misc_feature: Table A; Target 33149; HLA-B*51:01; KCNU1; ENSG00000215262; CTA
TAAGFIHLV

SEQ ID NO: 33150 - protein, 9 aa, Homo sapiens
  misc_feature: Table A; Target 33150; HLA-B*54:01; KCNU1; ENSG00000215262; CTA
TAAGFIHLV

SEQ ID NO: 33151 - protein, 9 aa, Homo sapiens
  misc_feature: Table A; Target 33151; HLA-B*55:01; KCNU1; ENSG00000215262; CTA
TAAGFIHLV

SEQ ID NO: 33152 - protein, 9 aa, Homo sapiens
  misc_feature: Table A; Target 33152; HLA-C*02:02; KCNU1; ENSG00000215262; CTA
TAAGFIHLV

SEQ ID NO: 33153 - protein, 9 aa, Homo sapiens
  misc_feature: Table A; Target 33153; HLA-C*06:02; KCNU1; ENSG00000215262; CTA
TAAGFIHLV

SEQ ID NO: 33154 - protein, 9 aa, Homo sapiens
  misc_feature: Table A; Target 33154; HLA-C*12:03; KCNU1; ENSG00000215262; CTA
TAAGFIHLV

SEQ ID NO: 33155 - protein, 9 aa, Homo sapiens
  misc_feature: Table A; Target 33155; HLA-C*16:02; KCNU1; ENSG00000215262; CTA
TAAGFIHLV

SEQ ID NO: 33156 - protein, 9 aa, Homo sapiens
  misc_feature: Table A; Target 33156; HLA-C*16:04; KCNU1; ENSG00000215262; CTA
TAAGFIHLV

SEQ ID NO: 33157 - protein, 8 aa, Homo sapiens
  misc_feature: Table A; Target 33157; HLA-B*08:01; KCNU1; ENSG00000215262; CTA
TAFLRNFL

SEQ ID NO: 33158 - protein, 9 aa, Homo sapiens
  misc_feature: Table A; Target 33158; HLA-A*31:01; KCNU1; ENSG00000215262; CTA
TAFLRNFLR

SEQ ID NO: 33159 - protein, 9 aa, Homo sapiens
  misc_feature: Table A; Target 33159; HLA-B*57:01; KCNU1; ENSG00000215262; CTA
TAFLRNFLR

SEQ ID NO: 33160 - protein, 8 aa, Homo sapiens
  misc_feature: Table A; Target 33160; HLA-B*51:01; KCNU1; ENSG00000215262; CTA
TAFSTGTV

SEQ ID NO: 33161 - protein, 8 aa, Homo sapiens
  misc_feature: Table A; Target 33161; HLA-C*12:03; KCNU1; ENSG00000215262; CTA
TAFSTGTV

SEQ ID NO: 33162 - protein, 9 aa, Homo sapiens
  misc_feature: Table A; Target 33162; HLA-A*23:01; KCNU1; ENSG00000215262; CTA
TAFSTGTVF

SEQ ID NO: 33163 - protein, 9 aa, Homo sapiens
  misc_feature: Table A; Target 33163; HLA-A*25:01; KCNU1; ENSG00000215262; CTA
TAFSTGTVF

SEQ ID NO: 33164 - protein, 9 aa, Homo sapiens
  misc_feature: Table A; Target 33164; HLA-A*26:01; KCNU1; ENSG00000215262; CTA
TAFSTGTVF

SEQ ID NO: 33165 - protein, 9 aa, Homo sapiens
  misc_feature: Table A; Target 33165; HLA-A*29:02; KCNU1; ENSG00000215262; CTA
TAFSTGTVF

SEQ ID NO: 33166 - protein, 9 aa, Homo sapiens
  misc_feature: Table A; Target 33166; HLA-A*30:02; KCNU1; ENSG00000215262; CTA
TAFSTGTVF

SEQ ID NO: 33167 - protein, 9 aa, Homo sapiens
  misc_feature: Table A; Target 33167; HLA-A*32:01; KCNU1; ENSG00000215262; CTA
TAFSTGTVF

SEQ ID NO: 33168 - protein, 9 aa, Homo sapiens
  misc_feature: Table A; Target 33168; HLA-A*68:01; KCNU1; ENSG00000215262; CTA
TAFSTGTVF

SEQ ID NO: 33169 - protein, 9 aa, Homo sapiens
  misc_feature: Table A; Target 33169; HLA-B*07:02; KCNU1; ENSG00000215262; CTA
TAFSTGTVF

SEQ ID NO: 33170 - protein, 9 aa, Homo sapiens
  misc_feature: Table A; Target 33170; HLA-B*15:03; KCNU1; ENSG00000215262; CTA
TAFSTGTVF

SEQ ID NO: 33171 - protein, 9 aa, Homo sapiens
  misc_feature: Table A; Target 33171; HLA-B*18:01; KCNU1; ENSG00000215262; CTA
TAFSTGTVF

SEQ ID NO: 33172 - protein, 9 aa, Homo sapiens
  misc_feature: Table A; Target 33172; HLA-B*27:02; KCNU1; ENSG00000215262; CTA
TAFSTGTVF

SEQ ID NO: 33173 - protein, 9 aa, Homo sapiens
  misc_feature: Table A; Target 33173; HLA-B*27:05; KCNU1; ENSG00000215262; CTA
TAFSTGTVF

SEQ ID NO: 33174 - protein, 9 aa, Homo sapiens
  misc_feature: Table A; Target 33174; HLA-B*35:03; KCNU1; ENSG00000215262; CTA
TAFSTGTVF

SEQ ID NO: 33175 - protein, 9 aa, Homo sapiens
  misc_feature: Table A; Target 33175; HLA-B*38:01; KCNU1; ENSG00000215262; CTA
TAFSTGTVF

SEQ ID NO: 33176 - protein, 9 aa, Homo sapiens
  misc_feature: Table A; Target 33176; HLA-B*39:01; KCNU1; ENSG00000215262; CTA
TAFSTGTVF

SEQ ID NO: 33177 - protein, 9 aa, Homo sapiens
  misc_feature: Table A; Target 33177; HLA-B*46:01; KCNU1; ENSG00000215262; CTA
TAFSTGTVF

SEQ ID NO: 33178 - protein, 9 aa, Homo sapiens
  misc_feature: Table A; Target 33178; HLA-B*51:01; KCNU1; ENSG00000215262; CTA
TAFSTGTVF

SEQ ID NO: 33179 - protein, 9 aa, Homo sapiens
  misc_feature: Table A; Target 33179; HLA-B*54:01; KCNU1; ENSG00000215262; CTA
TAFSTGTVF

SEQ ID NO: 33180 - protein, 9 aa, Homo sapiens
  misc_feature: Table A; Target 33180; HLA-B*55:01; KCNU1; ENSG00000215262; CTA
TAFSTGTVF

SEQ ID NO: 33181 - protein, 9 aa, Homo sapiens
  misc_feature: Table A; Target 33181; HLA-B*56:01; KCNU1; ENSG00000215262; CTA
TAFSTGTVF

SEQ ID NO: 33182 - protein, 9 aa, Homo sapiens
  misc_feature: Table A; Target 33182; HLA-B*57:01; KCNU1; ENSG00000215262; CTA
TAFSTGTVF

SEQ ID NO: 33183 - protein, 9 aa, Homo sapiens
  misc_feature: Table A; Target 33183; HLA-B*58:01; KCNU1; ENSG00000215262; CTA
TAFSTGTVF

SEQ ID NO: 33184 - protein, 9 aa, Homo sapiens
  misc_feature: Table A; Target 33184; HLA-C*01:02; KCNU1; ENSG00000215262; CTA
TAFSTGTVF

SEQ ID NO: 33185 - protein, 9 aa, Homo sapiens
  misc_feature: Table A; Target 33185; HLA-C*02:02; KCNU1; ENSG00000215262; CTA
TAFSTGTVF

SEQ ID NO: 33186 - protein, 9 aa, Homo sapiens
  misc_feature: Table A; Target 33186; HLA-C*03:03; KCNU1; ENSG00000215262; CTA
TAFSTGTVF

SEQ ID NO: 33187 - protein, 9 aa, Homo sapiens
  misc_feature: Table A; Target 33187; HLA-C*03:04; KCNU1; ENSG00000215262; CTA
TAFSTGTVF

SEQ ID NO: 33188 - protein, 9 aa, Homo sapiens
  misc_feature: Table A; Target 33188; HLA-C*05:01; KCNU1; ENSG00000215262; CTA
TAFSTGTVF

SEQ ID NO: 33189 - protein, 9 aa, Homo sapiens
  misc_feature: Table A; Target 33189; HLA-C*07:02; KCNU1; ENSG00000215262; CTA
TAFSTGTVF

SEQ ID NO: 33190 - protein, 9 aa, Homo sapiens
  misc_feature: Table A; Target 33190; HLA-C*07:04; KCNU1; ENSG00000215262; CTA
TAFSTGTVF

SEQ ID NO: 33191 - protein, 9 aa, Homo sapiens
  misc_feature: Table A; Target 33191; HLA-C*07:06; KCNU1; ENSG00000215262; CTA
TAFSTGTVF

SEQ ID NO: 33192 - protein, 9 aa, Homo sapiens
  misc_feature: Table A; Target 33192; HLA-C*12:03; KCNU1; ENSG00000215262; CTA
TAFSTGTVF

SEQ ID NO: 33193 - protein, 9 aa, Homo sapiens
  misc_feature: Table A; Target 33193; HLA-C*14:02; KCNU1; ENSG00000215262; CTA
TAFSTGTVF

SEQ ID NO: 33194 - protein, 9 aa, Homo sapiens
  misc_feature: Table A; Target 33194; HLA-C*16:01; KCNU1; ENSG00000215262; CTA
TAFSTGTVF

SEQ ID NO: 33195 - protein, 9 aa, Homo sapiens
  misc_feature: Table A; Target 33195; HLA-C*16:02; KCNU1; ENSG00000215262; CTA
TAFSTGTVF

SEQ ID NO: 33196 - protein, 9 aa, Homo sapiens
  misc_feature: Table A; Target 33196; HLA-C*16:04; KCNU1; ENSG00000215262; CTA
TAFSTGTVF

SEQ ID NO: 33197 - protein, 9 aa, Homo sapiens
  misc_feature: Table A; Target 33197; HLA-A*68:02; KCNU1; ENSG00000215262; CTA
TAFYNYHVL

SEQ ID NO: 33198 - protein, 9 aa, Homo sapiens
  misc_feature: Table A; Target 33198; HLA-B*27:02; KCNU1; ENSG00000215262; CTA
TAFYNYHVL

SEQ ID NO: 33199 - protein, 9 aa, Homo sapiens
  misc_feature: Table A; Target 33199; HLA-B*35:01; KCNU1; ENSG00000215262; CTA
TAFYNYHVL

SEQ ID NO: 33200 - protein, 9 aa, Homo sapiens
  misc_feature: Table A; Target 33200; HLA-B*35:03; KCNU1; ENSG00000215262; CTA
TAFYNYHVL

SEQ ID NO: 33201 - protein, 9 aa, Homo sapiens
  misc_feature: Table A; Target 33201; HLA-B*51:01; KCNU1; ENSG00000215262; CTA
TAFYNYHVL

SEQ ID NO: 33202 - protein, 9 aa, Homo sapiens
  misc_feature: Table A; Target 33202; HLA-B*54:01; KCNU1; ENSG00000215262; CTA
TAFYNYHVL

SEQ ID NO: 33203 - protein, 9 aa, Homo sapiens
  misc_feature: Table A; Target 33203; HLA-C*02:02; KCNU1; ENSG00000215262; CTA
TAFYNYHVL

SEQ ID NO: 33204 - protein, 9 aa, Homo sapiens
  misc_feature: Table A; Target 33204; HLA-C*03:03; KCNU1; ENSG00000215262; CTA
TAFYNYHVL

SEQ ID NO: 33205 - protein, 9 aa, Homo sapiens
  misc_feature: Table A; Target 33205; HLA-C*03:04; KCNU1; ENSG00000215262; CTA
TAFYNYHVL

SEQ ID NO: 33206 - protein, 9 aa, Homo sapiens
  misc_feature: Table A; Target 33206; HLA-C*12:03; KCNU1; ENSG00000215262; CTA
TAFYNYHVL

SEQ ID NO: 33207 - protein, 9 aa, Homo sapiens
  misc_feature: Table A; Target 33207; HLA-C*16:02; KCNU1; ENSG00000215262; CTA
TAFYNYHVL

SEQ ID NO: 33208 - protein, 9 aa, Homo sapiens
  misc_feature: Table A; Target 33208; HLA-C*16:04; KCNU1; ENSG00000215262; CTA
TAFYNYHVL

SEQ ID NO: 33209 - protein, 8 aa, Homo sapiens
  misc_feature: Table A; Target 33209; HLA-A*30:01; KCNU1; ENSG00000215262; CTA
TEAIMATL

SEQ ID NO: 33210 - protein, 8 aa, Homo sapiens
  misc_feature: Table A; Target 33210; HLA-B*18:01; KCNU1; ENSG00000215262; CTA
TEAIMATL

SEQ ID NO: 33211 - protein, 8 aa, Homo sapiens
  misc_feature: Table A; Target 33211; HLA-B*37:01; KCNU1; ENSG00000215262; CTA
TEAIMATL

SEQ ID NO: 33212 - protein, 8 aa, Homo sapiens
  misc_feature: Table A; Target 33212; HLA-B*40:01; KCNU1; ENSG00000215262; CTA
TEAIMATL

SEQ ID NO: 33213 - protein, 8 aa, Homo sapiens
  misc_feature: Table A; Target 33213; HLA-B*40:02; KCNU1; ENSG00000215262; CTA
TEAIMATL

SEQ ID NO: 33214 - protein, 8 aa, Homo sapiens
  misc_feature: Table A; Target 33214; HLA-B*49:01; KCNU1; ENSG00000215262; CTA
TEAIMATL

SEQ ID NO: 33215 - protein, 9 aa, Homo sapiens
  misc_feature: Table A; Target 33215; HLA-B*49:01; KCNU1; ENSG00000215262; CTA
TEAIMATLT

SEQ ID NO: 33216 - protein, 10 aa, Homo sapiens
  misc_feature: Table A; Target 33216; HLA-B*49:01; KCNU1; ENSG00000215262; CTA
TEAIMATLTI

SEQ ID NO: 33217 - protein, 8 aa, Homo sapiens
  misc_feature: Table A; Target 33217; HLA-B*49:01; KCNU1; ENSG00000215262; CTA
TEIQAAFI

SEQ ID NO: 33218 - protein, 9 aa, Homo sapiens
  misc_feature: Table A; Target 33218; HLA-A*30:01; KCNU1; ENSG00000215262; CTA
TEIQAAFIL

SEQ ID NO: 33219 - protein, 9 aa, Homo sapiens
  misc_feature: Table A; Target 33219; HLA-B*40:01; KCNU1; ENSG00000215262; CTA
TEIQAAFIL

SEQ ID NO: 33220 - protein, 9 aa, Homo sapiens
  misc_feature: Table A; Target 33220; HLA-B*40:02; KCNU1; ENSG00000215262; CTA
TEIQAAFIL

SEQ ID NO: 33221 - protein, 9 aa, Homo sapiens
  misc_feature: Table A; Target 33221; HLA-B*44:02; KCNU1; ENSG00000215262; CTA
TEIQAAFIL

SEQ ID NO: 33222 - protein, 9 aa, Homo sapiens
  misc_feature: Table A; Target 33222; HLA-B*44:03; KCNU1; ENSG00000215262; CTA
TEIQAAFIL

SEQ ID NO: 33223 - protein, 9 aa, Homo sapiens
  misc_feature: Table A; Target 33223; HLA-B*49:01; KCNU1; ENSG00000215262; CTA
TEIVFLGET

SEQ ID NO: 33224 - protein, 9 aa, Homo sapiens
  misc_feature: Table A; Target 33224; HLA-B*49:01; KCNU1; ENSG00000215262; CTA
TELKNPSNI

SEQ ID NO: 33225 - protein, 11 aa, Homo sapiens
  misc_feature: Table A; Target 33225; HLA-B*44:02; KCNU1; ENSG00000215262; CTA
TELKNPSNIHF

SEQ ID NO: 33226 - protein, 11 aa, Homo sapiens
  misc_feature: Table A; Target 33226; HLA-B*44:03; KCNU1; ENSG00000215262; CTA
TELKNPSNIHF

SEQ ID NO: 33227 - protein, 8 aa, Homo sapiens
  misc_feature: Table A; Target 33227; HLA-B*18:01; KCNU1; ENSG00000215262; CTA
TETLYSPV

SEQ ID NO: 33228 - protein, 8 aa, Homo sapiens
  misc_feature: Table A; Target 33228; HLA-B*49:01; KCNU1; ENSG00000215262; CTA
TETLYSPV

SEQ ID NO: 33229 - protein, 9 aa, Homo sapiens
  misc_feature: Table A; Target 33229; HLA-A*30:01; KCNU1; ENSG00000215262; CTA
TETLYSPVY

SEQ ID NO: 33230 - protein, 9 aa, Homo sapiens
  misc_feature: Table A; Target 33230; HLA-B*15:03; KCNU1; ENSG00000215262; CTA
TETLYSPVY

SEQ ID NO: 33231 - protein, 9 aa, Homo sapiens
  misc_feature: Table A; Target 33231; HLA-B*18:01; KCNU1; ENSG00000215262; CTA
TETLYSPVY

SEQ ID NO: 33232 - protein, 9 aa, Homo sapiens
  misc_feature: Table A; Target 33232; HLA-B*27:02; KCNU1; ENSG00000215262; CTA
TETLYSPVY

SEQ ID NO: 33233 - protein, 9 aa, Homo sapiens
  misc_feature: Table A; Target 33233; HLA-B*35:01; KCNU1; ENSG00000215262; CTA
TETLYSPVY

SEQ ID NO: 33234 - protein, 9 aa, Homo sapiens
  misc_feature: Table A; Target 33234; HLA-B*37:01; KCNU1; ENSG00000215262; CTA
TETLYSPVY

SEQ ID NO: 33235 - protein, 9 aa, Homo sapiens
  misc_feature: Table A; Target 33235; HLA-B*40:01; KCNU1; ENSG00000215262; CTA
TETLYSPVY

SEQ ID NO: 33236 - protein, 9 aa, Homo sapiens
  misc_feature: Table A; Target 33236; HLA-B*44:02; KCNU1; ENSG00000215262; CTA
TETLYSPVY

SEQ ID NO: 33237 - protein, 9 aa, Homo sapiens
  misc_feature: Table A; Target 33237; HLA-B*44:03; KCNU1; ENSG00000215262; CTA
TETLYSPVY

SEQ ID NO: 33238 - protein, 9 aa, Homo sapiens
  misc_feature: Table A; Target 33238; HLA-B*49:01; KCNU1; ENSG00000215262; CTA
TETLYSPVY

SEQ ID NO: 33239 - protein, 9 aa, Homo sapiens
  misc_feature: Table A; Target 33239; HLA-C*07:01; KCNU1; ENSG00000215262; CTA
TETLYSPVY

SEQ ID NO: 33240 - protein, 9 aa, Homo sapiens
  misc_feature: Table A; Target 33240; HLA-C*07:04; KCNU1; ENSG00000215262; CTA
TETLYSPVY

SEQ ID NO: 33241 - protein, 9 aa, Homo sapiens
  misc_feature: Table A; Target 33241; HLA-C*16:02; KCNU1; ENSG00000215262; CTA
TETLYSPVY

SEQ ID NO: 33242 - protein, 9 aa, Homo sapiens
  misc_feature: Table A; Target 33242; HLA-C*16:04; KCNU1; ENSG00000215262; CTA
TETLYSPVY

SEQ ID NO: 33243 - protein, 11 aa, Homo sapiens
  misc_feature: Table A; Target 33243; HLA-B*18:01; KCNU1; ENSG00000215262; CTA
TETLYSPVYSY

SEQ ID NO: 33244 - protein, 8 aa, Homo sapiens
  misc_feature: Table A; Target 33244; HLA-A*23:01; KCNU1; ENSG00000215262; CTA
TFIMFFTL

SEQ ID NO: 33245 - protein, 8 aa, Homo sapiens
  misc_feature: Table A; Target 33245; HLA-A*23:01; KCNU1; ENSG00000215262; CTA
TFISGSAM

SEQ ID NO: 33246 - protein, 8 aa, Homo sapiens
  misc_feature: Table A; Target 33246; HLA-C*01:02; KCNU1; ENSG00000215262; CTA
TFISGSAM

SEQ ID NO: 33247 - protein, 8 aa, Homo sapiens
  misc_feature: Table A; Target 33247; HLA-C*04:01; KCNU1; ENSG00000215262; CTA
TFISGSAM

SEQ ID NO: 33248 - protein, 8 aa, Homo sapiens
  misc_feature: Table A; Target 33248; HLA-C*14:02; KCNU1; ENSG00000215262; CTA
TFISGSAM

SEQ ID NO: 33249 - protein, 10 aa, Homo sapiens
  misc_feature: Table A; Target 33249; HLA-A*23:01; KCNU1; ENSG00000215262; CTA
TFISGSAMKW

SEQ ID NO: 33250 - protein, 10 aa, Homo sapiens
  misc_feature: Table A; Target 33250; HLA-A*24:02; KCNU1; ENSG00000215262; CTA
TFISGSAMKW

SEQ ID NO: 33251 - protein, 10 aa, Homo sapiens
  misc_feature: Table A; Target 33251; HLA-A*25:01; KCNU1; ENSG00000215262; CTA
TFISGSAMKW

SEQ ID NO: 33252 - protein, 9 aa, Homo sapiens
  misc_feature: Table A; Target 33252; HLA-A*23:01; KCNU1; ENSG00000215262; CTA
TFVGQVLVI

SEQ ID NO: 33253 - protein, 9 aa, Homo sapiens
  misc_feature: Table A; Target 33253; HLA-A*24:02; KCNU1; ENSG00000215262; CTA
TFVGQVLVI

SEQ ID NO: 33254 - protein, 8 aa, Homo sapiens
  misc_feature: Table A; Target 33254; HLA-C*05:01; KCNU1; ENSG00000215262; CTA
TGDNIICF

SEQ ID NO: 33255 - protein, 8 aa, Homo sapiens
  misc_feature: Table A; Target 33255; HLA-C*01:02; KCNU1; ENSG00000215262; CTA
TGGVSSQL

SEQ ID NO: 33256 - protein, 8 aa, Homo sapiens
  misc_feature: Table A; Target 33256; HLA-B*08:01; KCNU1; ENSG00000215262; CTA
TGKSKYKF

SEQ ID NO: 33257 - protein, 9 aa, Homo sapiens
  misc_feature: Table A; Target 33257; HLA-B*15:03; KCNU1; ENSG00000215262; CTA
TGTVFSGSF

SEQ ID NO: 33258 - protein, 9 aa, Homo sapiens
  misc_feature: Table A; Target 33258; HLA-B*39:01; KCNU1; ENSG00000215262; CTA
TGTVFSGSF

SEQ ID NO: 33259 - protein, 9 aa, Homo sapiens
  misc_feature: Table A; Target 33259; HLA-C*03:04; KCNU1; ENSG00000215262; CTA
TGTVFSGSF

SEQ ID NO: 33260 - protein, 9 aa, Homo sapiens
  misc_feature: Table A; Target 33260; HLA-C*14:02; KCNU1; ENSG00000215262; CTA
TGTVFSGSF

SEQ ID NO: 33261 - protein, 9 aa, Homo sapiens
  misc_feature: Table A; Target 33261; HLA-C*16:01; KCNU1; ENSG00000215262; CTA
TGTVFSGSF

SEQ ID NO: 33262 - protein, 11 aa, Homo sapiens
  misc_feature: Table A; Target 33262; HLA-B*38:01; KCNU1; ENSG00000215262; CTA
THSDTNCPPTI

SEQ ID NO: 33263 - protein, 8 aa, Homo sapiens
  misc_feature: Table A; Target 33263; HLA-C*05:01; KCNU1; ENSG00000215262; CTA
TIDSVTET

SEQ ID NO: 33264 - protein, 9 aa, Homo sapiens
  misc_feature: Table A; Target 33264; HLA-A*02:07; KCNU1; ENSG00000215262; CTA
TIDSVTETL

SEQ ID NO: 33265 - protein, 9 aa, Homo sapiens
  misc_feature: Table A; Target 33265; HLA-B*35:03; KCNU1; ENSG00000215262; CTA
TIDSVTETL

SEQ ID NO: 33266 - protein, 9 aa, Homo sapiens
  misc_feature: Table A; Target 33266; HLA-B*38:01; KCNU1; ENSG00000215262; CTA
TIDSVTETL

SEQ ID NO: 33267 - protein, 9 aa, Homo sapiens
  misc_feature: Table A; Target 33267; HLA-C*05:01; KCNU1; ENSG00000215262; CTA
TIDSVTETL

SEQ ID NO: 33268 - protein, 9 aa, Homo sapiens
  misc_feature: Table A; Target 33268; HLA-C*07:04; KCNU1; ENSG00000215262; CTA
TIDSVTETL

SEQ ID NO: 33269 - protein, 10 aa, Homo sapiens
  misc_feature: Table A; Target 33269; HLA-A*01:01; KCNU1; ENSG00000215262; CTA
TIDSVTETLY

SEQ ID NO: 33270 - protein, 9 aa, Homo sapiens
  misc_feature: Table A; Target 33270; HLA-A*03:01; KCNU1; ENSG00000215262; CTA
TIFKCYLAY

SEQ ID NO: 33271 - protein, 9 aa, Homo sapiens
  misc_feature: Table A; Target 33271; HLA-A*29:02; KCNU1; ENSG00000215262; CTA
TIFKCYLAY

SEQ ID NO: 33272 - protein, 9 aa, Homo sapiens
  misc_feature: Table A; Target 33272; HLA-A*03:02; KCNU1; ENSG00000215262; CTA
TILSDVNPR

SEQ ID NO: 33273 - protein, 9 aa, Homo sapiens
  misc_feature: Table A; Target 33273; HLA-A*11:01; KCNU1; ENSG00000215262; CTA
TILSDVNPR

SEQ ID NO: 33274 - protein, 9 aa, Homo sapiens
  misc_feature: Table A; Target 33274; HLA-A*31:01; KCNU1; ENSG00000215262; CTA
TILSDVNPR

SEQ ID NO: 33275 - protein, 9 aa, Homo sapiens
  misc_feature: Table A; Target 33275; HLA-A*33:01; KCNU1; ENSG00000215262; CTA
TILSDVNPR

SEQ ID NO: 33276 - protein, 9 aa, Homo sapiens
  misc_feature: Table A; Target 33276; HLA-A*33:03; KCNU1; ENSG00000215262; CTA
TILSDVNPR

SEQ ID NO: 33277 - protein, 9 aa, Homo sapiens
  misc_feature: Table A; Target 33277; HLA-A*68:01; KCNU1; ENSG00000215262; CTA
TILSDVNPR

SEQ ID NO: 33278 - protein, 9 aa, Homo sapiens
  misc_feature: Table A; Target 33278; HLA-B*27:02; KCNU1; ENSG00000215262; CTA
TILSDVNPR

SEQ ID NO: 33279 - protein, 9 aa, Homo sapiens
  misc_feature: Table A; Target 33279; HLA-B*27:05; KCNU1; ENSG00000215262; CTA
TILSDVNPR

SEQ ID NO: 33280 - protein, 9 aa, Homo sapiens
  misc_feature: Table A; Target 33280; HLA-C*07:06; KCNU1; ENSG00000215262; CTA
TILSDVNPR

SEQ ID NO: 33281 - protein, 9 aa, Homo sapiens
  misc_feature: Table A; Target 33281; HLA-A*03:01; KCNU1; ENSG00000215262; CTA
TIPPTFISY

SEQ ID NO: 33282 - protein, 9 aa, Homo sapiens
  misc_feature: Table A; Target 33282; HLA-A*25:01; KCNU1; ENSG00000215262; CTA
TIPPTFISY

SEQ ID NO: 33283 - protein, 9 aa, Homo sapiens
  misc_feature: Table A; Target 33283; HLA-A*26:01; KCNU1; ENSG00000215262; CTA
TIPPTFISY

SEQ ID NO: 33284 - protein, 9 aa, Homo sapiens
  misc_feature: Table A; Target 33284; HLA-A*29:02; KCNU1; ENSG00000215262; CTA
TIPPTFISY

SEQ ID NO: 33285 - protein, 9 aa, Homo sapiens
  misc_feature: Table A; Target 33285; HLA-A*32:01; KCNU1; ENSG00000215262; CTA
TIPPTFISY

SEQ ID NO: 33286 - protein, 9 aa, Homo sapiens
  misc_feature: Table A; Target 33286; HLA-B*15:01; KCNU1; ENSG00000215262; CTA
TIPPTFISY

SEQ ID NO: 33287 - protein, 9 aa, Homo sapiens
  misc_feature: Table A; Target 33287; HLA-B*15:03; KCNU1; ENSG00000215262; CTA
TIPPTFISY

SEQ ID NO: 33288 - protein, 9 aa, Homo sapiens
  misc_feature: Table A; Target 33288; HLA-B*35:01; KCNU1; ENSG00000215262; CTA
TIPPTFISY

SEQ ID NO: 33289 - protein, 9 aa, Homo sapiens
  misc_feature: Table A; Target 33289; HLA-B*46:01; KCNU1; ENSG00000215262; CTA
TIPPTFISY

SEQ ID NO: 33290 - protein, 9 aa, Homo sapiens
  misc_feature: Table A; Target 33290; HLA-C*01:02; KCNU1; ENSG00000215262; CTA
TIPPTFISY

SEQ ID NO: 33291 - protein, 9 aa, Homo sapiens
  misc_feature: Table A; Target 33291; HLA-C*02:02; KCNU1; ENSG00000215262; CTA
TIPPTFISY

SEQ ID NO: 33292 - protein, 9 aa, Homo sapiens
  misc_feature: Table A; Target 33292; HLA-C*07:04; KCNU1; ENSG00000215262; CTA
TIPPTFISY

SEQ ID NO: 33293 - protein, 11 aa, Homo sapiens
  misc_feature: Table A; Target 33293; HLA-A*02:07; KCNU1; ENSG00000215262; CTA
TIPPTFISYYL

SEQ ID NO: 33294 - protein, 9 aa, Homo sapiens
  misc_feature: Table A; Target 33294; HLA-A*02:01; KCNU1; ENSG00000215262; CTA
TLGSLILFA

SEQ ID NO: 33295 - protein, 9 aa, Homo sapiens
  misc_feature: Table A; Target 33295; HLA-A*02:03; KCNU1; ENSG00000215262; CTA
TLGSLILFA

SEQ ID NO: 33296 - protein, 9 aa, Homo sapiens
  misc_feature: Table A; Target 33296; HLA-A*02:04; KCNU1; ENSG00000215262; CTA
TLGSLILFA

SEQ ID NO: 33297 - protein, 11 aa, Homo sapiens
  misc_feature: Table A; Target 33297; HLA-A*30:02; KCNU1; ENSG00000215262; CTA
TLGSLILFANY

SEQ ID NO: 33298 - protein, 9 aa, Homo sapiens
  misc_feature: Table A; Target 33298; HLA-B*13:02; KCNU1; ENSG00000215262; CTA
TLTIGSLQI

SEQ ID NO: 33299 - protein, 9 aa, Homo sapiens
  misc_feature: Table A; Target 33299; HLA-B*35:01; KCNU1; ENSG00000215262; CTA
TLVDTEAIM

SEQ ID NO: 33300 - protein, 9 aa, Homo sapiens
  misc_feature: Table A; Target 33300; HLA-B*35:03; KCNU1; ENSG00000215262; CTA
TLVDTEAIM

SEQ ID NO: 33301 - protein, 9 aa, Homo sapiens
  misc_feature: Table A; Target 33301; HLA-B*39:01; KCNU1; ENSG00000215262; CTA
TLVDTEAIM

SEQ ID NO: 33302 - protein, 9 aa, Homo sapiens
  misc_feature: Table A; Target 33302; HLA-B*55:01; KCNU1; ENSG00000215262; CTA
TLVDTEAIM

SEQ ID NO: 33303 - protein, 9 aa, Homo sapiens
  misc_feature: Table A; Target 33303; HLA-C*03:03; KCNU1; ENSG00000215262; CTA
TLVDTEAIM

SEQ ID NO: 33304 - protein, 9 aa, Homo sapiens
  misc_feature: Table A; Target 33304; HLA-A*01:01; KCNU1; ENSG00000215262; CTA
TLYSPVYSY

SEQ ID NO: 33305 - protein, 9 aa, Homo sapiens
  misc_feature: Table A; Target 33305; HLA-A*03:01; KCNU1; ENSG00000215262; CTA
TLYSPVYSY

SEQ ID NO: 33306 - protein, 9 aa, Homo sapiens
  misc_feature: Table A; Target 33306; HLA-A*25:01; KCNU1; ENSG00000215262; CTA
TLYSPVYSY

SEQ ID NO: 33307 - protein, 9 aa, Homo sapiens
  misc_feature: Table A; Target 33307; HLA-A*26:01; KCNU1; ENSG00000215262; CTA
TLYSPVYSY

SEQ ID NO: 33308 - protein, 9 aa, Homo sapiens
  misc_feature: Table A; Target 33308; HLA-A*29:02; KCNU1; ENSG00000215262; CTA
TLYSPVYSY

SEQ ID NO: 33309 - protein, 9 aa, Homo sapiens
  misc_feature: Table A; Target 33309; HLA-A*30:02; KCNU1; ENSG00000215262; CTA
TLYSPVYSY

SEQ ID NO: 33310 - protein, 9 aa, Homo sapiens
  misc_feature: Table A; Target 33310; HLA-A*32:01; KCNU1; ENSG00000215262; CTA
TLYSPVYSY

SEQ ID NO: 33311 - protein, 9 aa, Homo sapiens
  misc_feature: Table A; Target 33311; HLA-B*15:01; KCNU1; ENSG00000215262; CTA
TLYSPVYSY

SEQ ID NO: 33312 - protein, 9 aa, Homo sapiens
  misc_feature: Table A; Target 33312; HLA-B*15:03; KCNU1; ENSG00000215262; CTA
TLYSPVYSY

SEQ ID NO: 33313 - protein, 9 aa, Homo sapiens
  misc_feature: Table A; Target 33313; HLA-B*35:01; KCNU1; ENSG00000215262; CTA
TLYSPVYSY

SEQ ID NO: 33314 - protein, 9 aa, Homo sapiens
  misc_feature: Table A; Target 33314; HLA-B*46:01; KCNU1; ENSG00000215262; CTA
TLYSPVYSY

SEQ ID NO: 33315 - protein, 9 aa, Homo sapiens
  misc_feature: Table A; Target 33315; HLA-C*02:02; KCNU1; ENSG00000215262; CTA
TLYSPVYSY

SEQ ID NO: 33316 - protein, 9 aa, Homo sapiens
  misc_feature: Table A; Target 33316; HLA-C*07:04; KCNU1; ENSG00000215262; CTA
TLYSPVYSY

SEQ ID NO: 33317 - protein, 9 aa, Homo sapiens
  misc_feature: Table A; Target 33317; HLA-C*14:02; KCNU1; ENSG00000215262; CTA
TLYSPVYSY

SEQ ID NO: 33318 - protein, 9 aa, Homo sapiens
  misc_feature: Table A; Target 33318; HLA-A*23:01; KCNU1; ENSG00000215262; CTA
TNLHLSTAF

SEQ ID NO: 33319 - protein, 9 aa, Homo sapiens
  misc_feature: Table A; Target 33319; HLA-A*29:02; KCNU1; ENSG00000215262; CTA
TNLHLSTAF

SEQ ID NO: 33320 - protein, 9 aa, Homo sapiens
  misc_feature: Table A; Target 33320; HLA-B*07:02; KCNU1; ENSG00000215262; CTA
TPKDVRRAL

SEQ ID NO: 33321 - protein, 9 aa, Homo sapiens
  misc_feature: Table A; Target 33321; HLA-B*08:01; KCNU1; ENSG00000215262; CTA
TPKDVRRAL

SEQ ID NO: 33322 - protein, 9 aa, Homo sapiens
  misc_feature: Table A; Target 33322; HLA-C*07:02; KCNU1; ENSG00000215262; CTA
TPKDVRRAL

SEQ ID NO: 33323 - protein, 8 aa, Homo sapiens
  misc_feature: Table A; Target 33323; HLA-B*15:03; KCNU1; ENSG00000215262; CTA
TQRLSDDF

SEQ ID NO: 33324 - protein, 8 aa, Homo sapiens
  misc_feature: Table A; Target 33324; HLA-B*08:01; KCNU1; ENSG00000215262; CTA
TSLDKVTL

SEQ ID NO: 33325 - protein, 8 aa, Homo sapiens
  misc_feature: Table A; Target 33325; HLA-C*16:01; KCNU1; ENSG00000215262; CTA
TSLDKVTL

SEQ ID NO: 33326 - protein, 9 aa, Homo sapiens
  misc_feature: Table A; Target 33326; HLA-A*03:01; KCNU1; ENSG00000215262; CTA
TSLDKVTLK

SEQ ID NO: 33327 - protein, 9 aa, Homo sapiens
  misc_feature: Table A; Target 33327; HLA-A*03:02; KCNU1; ENSG00000215262; CTA
TSLDKVTLK

SEQ ID NO: 33328 - protein, 9 aa, Homo sapiens
  misc_feature: Table A; Target 33328; HLA-A*11:01; KCNU1; ENSG00000215262; CTA
TSLDKVTLK

SEQ ID NO: 33329 - protein, 9 aa, Homo sapiens
  misc_feature: Table A; Target 33329; HLA-A*31:01; KCNU1; ENSG00000215262; CTA
TSLDKVTLK

SEQ ID NO: 33330 - protein, 9 aa, Homo sapiens
  misc_feature: Table A; Target 33330; HLA-A*33:01; KCNU1; ENSG00000215262; CTA
TSLDKVTLK

SEQ ID NO: 33331 - protein, 9 aa, Homo sapiens
  misc_feature: Table A; Target 33331; HLA-A*33:03; KCNU1; ENSG00000215262; CTA
TSLDKVTLK

SEQ ID NO: 33332 - protein, 9 aa, Homo sapiens
  misc_feature: Table A; Target 33332; HLA-A*68:01; KCNU1; ENSG00000215262; CTA
TSLDKVTLK

SEQ ID NO: 33333 - protein, 9 aa, Homo sapiens
  misc_feature: Table A; Target 33333; HLA-C*07:06; KCNU1; ENSG00000215262; CTA
TSLDKVTLK

SEQ ID NO: 33334 - protein, 10 aa, Homo sapiens
  misc_feature: Table A; Target 33334; HLA-A*33:01; KCNU1; ENSG00000215262; CTA
TSLDKVTLKR

SEQ ID NO: 33335 - protein, 10 aa, Homo sapiens
  misc_feature: Table A; Target 33335; HLA-A*33:03; KCNU1; ENSG00000215262; CTA
TSLDKVTLKR

SEQ ID NO: 33336 - protein, 9 aa, Homo sapiens
  misc_feature: Table A; Target 33336; HLA-A*03:02; KCNU1; ENSG00000215262; CTA
TSLFVEQNK

SEQ ID NO: 33337 - protein, 9 aa, Homo sapiens
  misc_feature: Table A; Target 33337; HLA-A*11:01; KCNU1; ENSG00000215262; CTA
TSLFVEQNK

SEQ ID NO: 33338 - protein, 9 aa, Homo sapiens
  misc_feature: Table A; Target 33338; HLA-B*27:02; KCNU1; ENSG00000215262; CTA
TSLFVEQNK

SEQ ID NO: 33339 - protein, 9 aa, Homo sapiens
  misc_feature: Table A; Target 33339; HLA-B*57:01; KCNU1; ENSG00000215262; CTA
TSLFVEQNK

SEQ ID NO: 33340 - protein, 9 aa, Homo sapiens
  misc_feature: Table A; Target 33340; HLA-C*07:06; KCNU1; ENSG00000215262; CTA
TSLFVEQNK

SEQ ID NO: 33341 - protein, 10 aa, Homo sapiens
  misc_feature: Table A; Target 33341; HLA-A*11:01; KCNU1; ENSG00000215262; CTA
TSLFVEQNKK

SEQ ID NO: 33342 - protein, 10 aa, Homo sapiens
  misc_feature: Table A; Target 33342; HLA-B*27:02; KCNU1; ENSG00000215262; CTA
TSLFVEQNKK

SEQ ID NO: 33343 - protein, 11 aa, Homo sapiens
  misc_feature: Table A; Target 33343; HLA-C*06:02; KCNU1; ENSG00000215262; CTA
TSLFVEQNKKV

SEQ ID NO: 33344 - protein, 9 aa, Homo sapiens
  misc_feature: Table A; Target 33344; HLA-C*16:01; KCNU1; ENSG00000215262; CTA
TSLGRTFIM

SEQ ID NO: 33345 - protein, 9 aa, Homo sapiens
  misc_feature: Table A; Target 33345; HLA-A*31:01; KCNU1; ENSG00000215262; CTA
TSLLSGRNR

SEQ ID NO: 33346 - protein, 9 aa, Homo sapiens
  misc_feature: Table A; Target 33346; HLA-A*33:03; KCNU1; ENSG00000215262; CTA
TSLLSGRNR

SEQ ID NO: 33347 - protein, 9 aa, Homo sapiens
  misc_feature: Table A; Target 33347; HLA-A*03:02; KCNU1; ENSG00000215262; CTA
TSNSVKFSK

SEQ ID NO: 33348 - protein, 9 aa, Homo sapiens
  misc_feature: Table A; Target 33348; HLA-A*11:01; KCNU1; ENSG00000215262; CTA
TSNSVKFSK

SEQ ID NO: 33349 - protein, 9 aa, Homo sapiens
  misc_feature: Table A; Target 33349; HLA-A*31:01; KCNU1; ENSG00000215262; CTA
TSNSVKFSK

SEQ ID NO: 33350 - protein, 9 aa, Homo sapiens
  misc_feature: Table A; Target 33350; HLA-A*33:01; KCNU1; ENSG00000215262; CTA
TSNSVKFSK

SEQ ID NO: 33351 - protein, 9 aa, Homo sapiens
  misc_feature: Table A; Target 33351; HLA-A*33:03; KCNU1; ENSG00000215262; CTA
TSNSVKFSK

SEQ ID NO: 33352 - protein, 9 aa, Homo sapiens
  misc_feature: Table A; Target 33352; HLA-A*68:01; KCNU1; ENSG00000215262; CTA
TSNSVKFSK

SEQ ID NO: 33353 - protein, 9 aa, Homo sapiens
  misc_feature: Table A; Target 33353; HLA-C*07:06; KCNU1; ENSG00000215262; CTA
TSNSVKFSK

SEQ ID NO: 33354 - protein, 10 aa, Homo sapiens
  misc_feature: Table A; Target 33354; HLA-A*68:01; KCNU1; ENSG00000215262; CTA
TSSISNFTTR

SEQ ID NO: 33355 - protein, 10 aa, Homo sapiens
  misc_feature: Table A; Target 33355; HLA-C*07:06; KCNU1; ENSG00000215262; CTA
TSSISNFTTR

SEQ ID NO: 33356 - protein, 10 aa, Homo sapiens
  misc_feature: Table A; Target 33356; HLA-B*39:01; KCNU1; ENSG00000215262; CTA
TSTVGFGDVV

SEQ ID NO: 33357 - protein, 9 aa, Homo sapiens
  misc_feature: Table A; Target 33357; HLA-A*26:01; KCNU1; ENSG00000215262; CTA
TTFISGSAM

SEQ ID NO: 33358 - protein, 9 aa, Homo sapiens
  misc_feature: Table A; Target 33358; HLA-A*32:01; KCNU1; ENSG00000215262; CTA
TTFISGSAM

SEQ ID NO: 33359 - protein, 9 aa, Homo sapiens
  misc_feature: Table A; Target 33359; HLA-B*07:02; KCNU1; ENSG00000215262; CTA
TTFISGSAM

SEQ ID NO: 33360 - protein, 9 aa, Homo sapiens
  misc_feature: Table A; Target 33360; HLA-B*15:01; KCNU1; ENSG00000215262; CTA
TTFISGSAM

SEQ ID NO: 33361 - protein, 9 aa, Homo sapiens
  misc_feature: Table A; Target 33361; HLA-B*15:03; KCNU1; ENSG00000215262; CTA
TTFISGSAM

SEQ ID NO: 33362 - protein, 9 aa, Homo sapiens
  misc_feature: Table A; Target 33362; HLA-B*27:05; KCNU1; ENSG00000215262; CTA
TTFISGSAM

SEQ ID NO: 33363 - protein, 9 aa, Homo sapiens
  misc_feature: Table A; Target 33363; HLA-B*35:01; KCNU1; ENSG00000215262; CTA
TTFISGSAM

SEQ ID NO: 33364 - protein, 9 aa, Homo sapiens
  misc_feature: Table A; Target 33364; HLA-B*35:03; KCNU1; ENSG00000215262; CTA
TTFISGSAM

SEQ ID NO: 33365 - protein, 9 aa, Homo sapiens
  misc_feature: Table A; Target 33365; HLA-B*39:01; KCNU1; ENSG00000215262; CTA
TTFISGSAM

SEQ ID NO: 33366 - protein, 9 aa, Homo sapiens
  misc_feature: Table A; Target 33366; HLA-B*46:01; KCNU1; ENSG00000215262; CTA
TTFISGSAM

SEQ ID NO: 33367 - protein, 9 aa, Homo sapiens
  misc_feature: Table A; Target 33367; HLA-C*01:02; KCNU1; ENSG00000215262; CTA
TTFISGSAM

SEQ ID NO: 33368 - protein, 9 aa, Homo sapiens
  misc_feature: Table A; Target 33368; HLA-C*03:03; KCNU1; ENSG00000215262; CTA
TTFISGSAM

SEQ ID NO: 33369 - protein, 9 aa, Homo sapiens
  misc_feature: Table A; Target 33369; HLA-C*03:04; KCNU1; ENSG00000215262; CTA
TTFISGSAM

SEQ ID NO: 33370 - protein, 9 aa, Homo sapiens
  misc_feature: Table A; Target 33370; HLA-C*07:04; KCNU1; ENSG00000215262; CTA
TTFISGSAM

SEQ ID NO: 33371 - protein, 9 aa, Homo sapiens
  misc_feature: Table A; Target 33371; HLA-C*07:06; KCNU1; ENSG00000215262; CTA
TTFISGSAM

SEQ ID NO: 33372 - protein, 9 aa, Homo sapiens
  misc_feature: Table A; Target 33372; HLA-C*14:02; KCNU1; ENSG00000215262; CTA
TTFISGSAM

SEQ ID NO: 33373 - protein, 9 aa, Homo sapiens
  misc_feature: Table A; Target 33373; HLA-C*16:01; KCNU1; ENSG00000215262; CTA
TTFISGSAM

SEQ ID NO: 33374 - protein, 10 aa, Homo sapiens
  misc_feature: Table A; Target 33374; HLA-A*03:01; KCNU1; ENSG00000215262; CTA
TTFISGSAMK

SEQ ID NO: 33375 - protein, 10 aa, Homo sapiens
  misc_feature: Table A; Target 33375; HLA-A*03:02; KCNU1; ENSG00000215262; CTA
TTFISGSAMK

SEQ ID NO: 33376 - protein, 10 aa, Homo sapiens
  misc_feature: Table A; Target 33376; HLA-A*11:01; KCNU1; ENSG00000215262; CTA
TTFISGSAMK

SEQ ID NO: 33377 - protein, 10 aa, Homo sapiens
  misc_feature: Table A; Target 33377; HLA-A*68:01; KCNU1; ENSG00000215262; CTA
TTFISGSAMK

SEQ ID NO: 33378 - protein, 11 aa, Homo sapiens
  misc_feature: Table A; Target 33378; HLA-A*25:01; KCNU1; ENSG00000215262; CTA
TTFISGSAMKW

SEQ ID NO: 33379 - protein, 11 aa, Homo sapiens
  misc_feature: Table A; Target 33379; HLA-A*33:01; KCNU1; ENSG00000215262; CTA
TTFISGSAMKW

SEQ ID NO: 33380 - protein, 11 aa, Homo sapiens
  misc_feature: Table A; Target 33380; HLA-B*44:02; KCNU1; ENSG00000215262; CTA
TTFISGSAMKW

SEQ ID NO: 33381 - protein, 11 aa, Homo sapiens
  misc_feature: Table A; Target 33381; HLA-B*44:03; KCNU1; ENSG00000215262; CTA
TTFISGSAMKW

SEQ ID NO: 33382 - protein, 11 aa, Homo sapiens
  misc_feature: Table A; Target 33382; HLA-B*57:01; KCNU1; ENSG00000215262; CTA
TTFISGSAMKW

SEQ ID NO: 33383 - protein, 11 aa, Homo sapiens
  misc_feature: Table A; Target 33383; HLA-B*58:01; KCNU1; ENSG00000215262; CTA
TTFISGSAMKW

SEQ ID NO: 33384 - protein, 11 aa, Homo sapiens
  misc_feature: Table A; Target 33384; HLA-A*01:01; KCNU1; ENSG00000215262; CTA
TTSTVGFGDVV

SEQ ID NO: 33385 - protein, 11 aa, Homo sapiens
  misc_feature: Table A; Target 33385; HLA-A*68:02; KCNU1; ENSG00000215262; CTA
TTSTVGFGDVV

SEQ ID NO: 33386 - protein, 8 aa, Homo sapiens
  misc_feature: Table A; Target 33386; HLA-B*37:01; KCNU1; ENSG00000215262; CTA
TVDSVTAF

SEQ ID NO: 33387 - protein, 8 aa, Homo sapiens
  misc_feature: Table A; Target 33387; HLA-C*05:01; KCNU1; ENSG00000215262; CTA
TVDSVTAF

SEQ ID NO: 33388 - protein, 9 aa, Homo sapiens
  misc_feature: Table A; Target 33388; HLA-A*01:01; KCNU1; ENSG00000215262; CTA
TVDSVTAFL

SEQ ID NO: 33389 - protein, 9 aa, Homo sapiens
  misc_feature: Table A; Target 33389; HLA-A*02:01; KCNU1; ENSG00000215262; CTA
TVDSVTAFL

SEQ ID NO: 33390 - protein, 9 aa, Homo sapiens
  misc_feature: Table A; Target 33390; HLA-A*02:07; KCNU1; ENSG00000215262; CTA
TVDSVTAFL

SEQ ID NO: 33391 - protein, 9 aa, Homo sapiens
  misc_feature: Table A; Target 33391; HLA-A*68:02; KCNU1; ENSG00000215262; CTA
TVDSVTAFL

SEQ ID NO: 33392 - protein, 9 aa, Homo sapiens
  misc_feature: Table A; Target 33392; HLA-B*13:02; KCNU1; ENSG00000215262; CTA
TVDSVTAFL

SEQ ID NO: 33393 - protein, 9 aa, Homo sapiens
  misc_feature: Table A; Target 33393; HLA-B*35:03; KCNU1; ENSG00000215262; CTA
TVDSVTAFL

SEQ ID NO: 33394 - protein, 9 aa, Homo sapiens
  misc_feature: Table A; Target 33394; HLA-B*38:01; KCNU1; ENSG00000215262; CTA
TVDSVTAFL

SEQ ID NO: 33395 - protein, 9 aa, Homo sapiens
  misc_feature: Table A; Target 33395; HLA-B*39:01; KCNU1; ENSG00000215262; CTA
TVDSVTAFL

SEQ ID NO: 33396 - protein, 9 aa, Homo sapiens
  misc_feature: Table A; Target 33396; HLA-B*55:01; KCNU1; ENSG00000215262; CTA
TVDSVTAFL

SEQ ID NO: 33397 - protein, 9 aa, Homo sapiens
  misc_feature: Table A; Target 33397; HLA-C*04:01; KCNU1; ENSG00000215262; CTA
TVDSVTAFL

SEQ ID NO: 33398 - protein, 9 aa, Homo sapiens
  misc_feature: Table A; Target 33398; HLA-C*05:01; KCNU1; ENSG00000215262; CTA
TVDSVTAFL

SEQ ID NO: 33399 - protein, 9 aa, Homo sapiens
  misc_feature: Table A; Target 33399; HLA-C*07:04; KCNU1; ENSG00000215262; CTA
TVDSVTAFL

SEQ ID NO: 33400 - protein, 10 aa, Homo sapiens
  misc_feature: Table A; Target 33400; HLA-A*03:02; KCNU1; ENSG00000215262; CTA
TVDSVTAFLR

SEQ ID NO: 33401 - protein, 10 aa, Homo sapiens
  misc_feature: Table A; Target 33401; HLA-A*68:01; KCNU1; ENSG00000215262; CTA
TVDSVTAFLR

SEQ ID NO: 33402 - protein, 10 aa, Homo sapiens
  misc_feature: Table A; Target 33402; HLA-B*27:02; KCNU1; ENSG00000215262; CTA
TVDSVTAFLR

SEQ ID NO: 33403 - protein, 10 aa, Homo sapiens
  misc_feature: Table A; Target 33403; HLA-C*07:06; KCNU1; ENSG00000215262; CTA
TVDSVTAFLR

SEQ ID NO: 33404 - protein, 11 aa, Homo sapiens
  misc_feature: Table A; Target 33404; HLA-A*02:04; KCNU1; ENSG00000215262; CTA
TVFSGSFLDSL

SEQ ID NO: 33405 - protein, 11 aa, Homo sapiens
  misc_feature: Table A; Target 33405; HLA-A*68:02; KCNU1; ENSG00000215262; CTA
TVFSGSFLDSL

SEQ ID NO: 33406 - protein, 8 aa, Homo sapiens
  misc_feature: Table A; Target 33406; HLA-B*39:01; KCNU1; ENSG00000215262; CTA
TVGFGDVV

SEQ ID NO: 33407 - protein, 10 aa, Homo sapiens
  misc_feature: Table A; Target 33407; HLA-A*03:01; KCNU1; ENSG00000215262; CTA
TVGFGDVVAK

SEQ ID NO: 33408 - protein, 10 aa, Homo sapiens
  misc_feature: Table A; Target 33408; HLA-A*03:02; KCNU1; ENSG00000215262; CTA
TVGFGDVVAK

SEQ ID NO: 33409 - protein, 10 aa, Homo sapiens
  misc_feature: Table A; Target 33409; HLA-A*11:01; KCNU1; ENSG00000215262; CTA
TVGFGDVVAK

SEQ ID NO: 33410 - protein, 10 aa, Homo sapiens
  misc_feature: Table A; Target 33410; HLA-A*68:01; KCNU1; ENSG00000215262; CTA
TVGFGDVVAK

SEQ ID NO: 33411 - protein, 10 aa, Homo sapiens
  misc_feature: Table A; Target 33411; HLA-B*27:02; KCNU1; ENSG00000215262; CTA
TVGFGDVVAK

SEQ ID NO: 33412 - protein, 10 aa, Homo sapiens
  misc_feature: Table A; Target 33412; HLA-C*07:06; KCNU1; ENSG00000215262; CTA
TVGFGDVVAK

SEQ ID NO: 33413 - protein, 8 aa, Homo sapiens
  misc_feature: Table A; Target 33413; HLA-C*05:01; KCNU1; ENSG00000215262; CTA
VADSCTSL

SEQ ID NO: 33414 - protein, 9 aa, Homo sapiens
  misc_feature: Table A; Target 33414; HLA-A*01:01; KCNU1; ENSG00000215262; CTA
VADSCTSLL

SEQ ID NO: 33415 - protein, 9 aa, Homo sapiens
  misc_feature: Table A; Target 33415; HLA-A*02:07; KCNU1; ENSG00000215262; CTA
VADSCTSLL

SEQ ID NO: 33416 - protein, 9 aa, Homo sapiens
  misc_feature: Table A; Target 33416; HLA-B*35:03; KCNU1; ENSG00000215262; CTA
VADSCTSLL

SEQ ID NO: 33417 - protein, 9 aa, Homo sapiens
  misc_feature: Table A; Target 33417; HLA-B*38:01; KCNU1; ENSG00000215262; CTA
VADSCTSLL

SEQ ID NO: 33418 - protein, 9 aa, Homo sapiens
  misc_feature: Table A; Target 33418; HLA-C*03:03; KCNU1; ENSG00000215262; CTA
VADSCTSLL

SEQ ID NO: 33419 - protein, 9 aa, Homo sapiens
  misc_feature: Table A; Target 33419; HLA-C*03:04; KCNU1; ENSG00000215262; CTA
VADSCTSLL

SEQ ID NO: 33420 - protein, 9 aa, Homo sapiens
  misc_feature: Table A; Target 33420; HLA-C*04:01; KCNU1; ENSG00000215262; CTA
VADSCTSLL

SEQ ID NO: 33421 - protein, 9 aa, Homo sapiens
  misc_feature: Table A; Target 33421; HLA-C*07:04; KCNU1; ENSG00000215262; CTA
VADSCTSLL

SEQ ID NO: 33422 - protein, 8 aa, Homo sapiens
  misc_feature: Table A; Target 33422; HLA-B*46:01; KCNU1; ENSG00000215262; CTA
VAVESAEA

SEQ ID NO: 33423 - protein, 8 aa, Homo sapiens
  misc_feature: Table A; Target 33423; HLA-C*03:03; KCNU1; ENSG00000215262; CTA
VAVESAEA

SEQ ID NO: 33424 - protein, 8 aa, Homo sapiens
  misc_feature: Table A; Target 33424; HLA-C*03:04; KCNU1; ENSG00000215262; CTA
VAVESAEA

SEQ ID NO: 33425 - protein, 9 aa, Homo sapiens
  misc_feature: Table A; Target 33425; HLA-B*46:01; KCNU1; ENSG00000215262; CTA
VAVESAEAC

SEQ ID NO: 33426 - protein, 9 aa, Homo sapiens
  misc_feature: Table A; Target 33426; HLA-C*03:03; KCNU1; ENSG00000215262; CTA
VAVESAEAC

SEQ ID NO: 33427 - protein, 9 aa, Homo sapiens
  misc_feature: Table A; Target 33427; HLA-C*03:04; KCNU1; ENSG00000215262; CTA
VAVESAEAC

SEQ ID NO: 33428 - protein, 10 aa, Homo sapiens
  misc_feature: Table A; Target 33428; HLA-B*35:03; KCNU1; ENSG00000215262; CTA
VAVESAEACL

SEQ ID NO: 33429 - protein, 10 aa, Homo sapiens
  misc_feature: Table A; Target 33429; HLA-C*03:03; KCNU1; ENSG00000215262; CTA
VAVESAEACL

SEQ ID NO: 33430 - protein, 10 aa, Homo sapiens
  misc_feature: Table A; Target 33430; HLA-C*03:04; KCNU1; ENSG00000215262; CTA
VAVESAEACL

SEQ ID NO: 33431 - protein, 8 aa, Homo sapiens
  misc_feature: Table A; Target 33431; HLA-B*37:01; KCNU1; ENSG00000215262; CTA
VDSVTAFL

SEQ ID NO: 33432 - protein, 10 aa, Homo sapiens
  misc_feature: Table A; Target 33432; HLA-A*30:01; KCNU1; ENSG00000215262; CTA
VDTEAIMATL

SEQ ID NO: 33433 - protein, 10 aa, Homo sapiens
  misc_feature: Table A; Target 33433; HLA-B*40:01; KCNU1; ENSG00000215262; CTA
VDTEAIMATL

SEQ ID NO: 33434 - protein, 9 aa, Homo sapiens
  misc_feature: Table A; Target 33434; HLA-B*40:01; KCNU1; ENSG00000215262; CTA
VENSGDPWL

SEQ ID NO: 33435 - protein, 10 aa, Homo sapiens
  misc_feature: Table A; Target 33435; HLA-A*03:02; KCNU1; ENSG00000215262; CTA
VENSGDPWLK

SEQ ID NO: 33436 - protein, 10 aa, Homo sapiens
  misc_feature: Table A; Target 33436; HLA-A*11:01; KCNU1; ENSG00000215262; CTA
VENSGDPWLK

SEQ ID NO: 33437 - protein, 10 aa, Homo sapiens
  misc_feature: Table A; Target 33437; HLA-B*27:02; KCNU1; ENSG00000215262; CTA
VENSGDPWLK

SEQ ID NO: 33438 - protein, 8 aa, Homo sapiens
  misc_feature: Table A; Target 33438; HLA-B*37:01; KCNU1; ENSG00000215262; CTA
VEQNKKVM

SEQ ID NO: 33439 - protein, 8 aa, Homo sapiens
  misc_feature: Table A; Target 33439; HLA-B*37:01; KCNU1; ENSG00000215262; CTA
VESAEACL

SEQ ID NO: 33440 - protein, 8 aa, Homo sapiens
  misc_feature: Table A; Target 33440; HLA-B*40:01; KCNU1; ENSG00000215262; CTA
VESAEACL

SEQ ID NO: 33441 - protein, 9 aa, Homo sapiens
  misc_feature: Table A; Target 33441; HLA-A*30:01; KCNU1; ENSG00000215262; CTA
VESAEACLI

SEQ ID NO: 33442 - protein, 9 aa, Homo sapiens
  misc_feature: Table A; Target 33442; HLA-B*40:01; KCNU1; ENSG00000215262; CTA
VESAEACLI

SEQ ID NO: 33443 - protein, 9 aa, Homo sapiens
  misc_feature: Table A; Target 33443; HLA-B*49:01; KCNU1; ENSG00000215262; CTA
VESAEACLI

SEQ ID NO: 33444 - protein, 10 aa, Homo sapiens
  misc_feature: Table A; Target 33444; HLA-B*49:01; KCNU1; ENSG00000215262; CTA
VESAEACLII

SEQ ID NO: 33445 - protein, 8 aa, Homo sapiens
  misc_feature: Table A; Target 33445; HLA-C*14:02; KCNU1; ENSG00000215262; CTA
VFGDAHSA

SEQ ID NO: 33446 - protein, 10 aa, Homo sapiens
  misc_feature: Table A; Target 33446; HLA-C*14:02; KCNU1; ENSG00000215262; CTA
VFGDAHSAPM

SEQ ID NO: 33447 - protein, 8 aa, Homo sapiens
  misc_feature: Table A; Target 33447; HLA-A*29:02; KCNU1; ENSG00000215262; CTA
VFIGSLDY

SEQ ID NO: 33448 - protein, 8 aa, Homo sapiens
  misc_feature: Table A; Target 33448; HLA-C*14:02; KCNU1; ENSG00000215262; CTA
VFIGSLDY

SEQ ID NO: 33449 - protein, 9 aa, Homo sapiens
  misc_feature: Table A; Target 33449; HLA-A*23:01; KCNU1; ENSG00000215262; CTA
VFIGSLDYL

SEQ ID NO: 33450 - protein, 9 aa, Homo sapiens
  misc_feature: Table A; Target 33450; HLA-A*24:02; KCNU1; ENSG00000215262; CTA
VFIGSLDYL

SEQ ID NO: 33451 - protein, 10 aa, Homo sapiens
  misc_feature: Table A; Target 33451; HLA-A*23:01; KCNU1; ENSG00000215262; CTA
VFLGETPPSL

SEQ ID NO: 33452 - protein, 10 aa, Homo sapiens
  misc_feature: Table A; Target 33452; HLA-A*24:02; KCNU1; ENSG00000215262; CTA
VFLGETPPSL

SEQ ID NO: 33453 - protein, 10 aa, Homo sapiens
  misc_feature: Table A; Target 33453; HLA-C*14:02; KCNU1; ENSG00000215262; CTA
VFLGETPPSL

SEQ ID NO: 33454 - protein, 9 aa, Homo sapiens
  misc_feature: Table A; Target 33454; HLA-A*29:02; KCNU1; ENSG00000215262; CTA
VFNAFFSFY

SEQ ID NO: 33455 - protein, 9 aa, Homo sapiens
  misc_feature: Table A; Target 33455; HLA-A*23:01; KCNU1; ENSG00000215262; CTA
VFVLSIGSL

SEQ ID NO: 33456 - protein, 9 aa, Homo sapiens
  misc_feature: Table A; Target 33456; HLA-C*14:02; KCNU1; ENSG00000215262; CTA
VFVLSIGSL

SEQ ID NO: 33457 - protein, 10 aa, Homo sapiens
  misc_feature: Table A; Target 33457; HLA-A*23:01; KCNU1; ENSG00000215262; CTA
VFVLSIGSLI

SEQ ID NO: 33458 - protein, 9 aa, Homo sapiens
  misc_feature: Table A; Target 33458; HLA-A*03:01; KCNU1; ENSG00000215262; CTA
VGFGDVVAK

SEQ ID NO: 33459 - protein, 9 aa, Homo sapiens
  misc_feature: Table A; Target 33459; HLA-A*03:02; KCNU1; ENSG00000215262; CTA
VGFGDVVAK

SEQ ID NO: 33460 - protein, 9 aa, Homo sapiens
  misc_feature: Table A; Target 33460; HLA-A*11:01; KCNU1; ENSG00000215262; CTA
VGFGDVVAK

SEQ ID NO: 33461 - protein, 9 aa, Homo sapiens
  misc_feature: Table A; Target 33461; HLA-A*31:01; KCNU1; ENSG00000215262; CTA
VGFGDVVAK

SEQ ID NO: 33462 - protein, 9 aa, Homo sapiens
  misc_feature: Table A; Target 33462; HLA-A*68:01; KCNU1; ENSG00000215262; CTA
VGFGDVVAK

SEQ ID NO: 33463 - protein, 9 aa, Homo sapiens
  misc_feature: Table A; Target 33463; HLA-B*27:02; KCNU1; ENSG00000215262; CTA
VGFGDVVAK

SEQ ID NO: 33464 - protein, 9 aa, Homo sapiens
  misc_feature: Table A; Target 33464; HLA-B*27:05; KCNU1; ENSG00000215262; CTA
VGFGDVVAK

SEQ ID NO: 33465 - protein, 9 aa, Homo sapiens
  misc_feature: Table A; Target 33465; HLA-C*02:02; KCNU1; ENSG00000215262; CTA
VGFGDVVAK

SEQ ID NO: 33466 - protein, 9 aa, Homo sapiens
  misc_feature: Table A; Target 33466; HLA-C*07:04; KCNU1; ENSG00000215262; CTA
VGFGDVVAK

SEQ ID NO: 33467 - protein, 9 aa, Homo sapiens
  misc_feature: Table A; Target 33467; HLA-C*07:06; KCNU1; ENSG00000215262; CTA
VGFGDVVAK

SEQ ID NO: 33468 - protein, 9 aa, Homo sapiens
  misc_feature: Table A; Target 33468; HLA-C*12:03; KCNU1; ENSG00000215262; CTA
VGFGDVVAK

SEQ ID NO: 33469 - protein, 9 aa, Homo sapiens
  misc_feature: Table A; Target 33469; HLA-A*23:01; KCNU1; ENSG00000215262; CTA
VITRPANEF

SEQ ID NO: 33470 - protein, 9 aa, Homo sapiens
  misc_feature: Table A; Target 33470; HLA-A*24:02; KCNU1; ENSG00000215262; CTA
VITRPANEF

SEQ ID NO: 33471 - protein, 9 aa, Homo sapiens
  misc_feature: Table A; Target 33471; HLA-A*32:01; KCNU1; ENSG00000215262; CTA
VITRPANEF

SEQ ID NO: 33472 - protein, 9 aa, Homo sapiens
  misc_feature: Table A; Target 33472; HLA-B*15:01; KCNU1; ENSG00000215262; CTA
VITRPANEF

SEQ ID NO: 33473 - protein, 9 aa, Homo sapiens
  misc_feature: Table A; Target 33473; HLA-B*15:03; KCNU1; ENSG00000215262; CTA
VITRPANEF

SEQ ID NO: 33474 - protein, 9 aa, Homo sapiens
  misc_feature: Table A; Target 33474; HLA-B*46:01; KCNU1; ENSG00000215262; CTA
VITRPANEF

SEQ ID NO: 33475 - protein, 9 aa, Homo sapiens
  misc_feature: Table A; Target 33475; HLA-B*57:01; KCNU1; ENSG00000215262; CTA
VITRPANEF

SEQ ID NO: 33476 - protein, 9 aa, Homo sapiens
  misc_feature: Table A; Target 33476; HLA-B*58:01; KCNU1; ENSG00000215262; CTA
VITRPANEF

SEQ ID NO: 33477 - protein, 9 aa, Homo sapiens
  misc_feature: Table A; Target 33477; HLA-C*01:02; KCNU1; ENSG00000215262; CTA
VITRPANEF

SEQ ID NO: 33478 - protein, 9 aa, Homo sapiens
  misc_feature: Table A; Target 33478; HLA-C*02:02; KCNU1; ENSG00000215262; CTA
VITRPANEF

SEQ ID NO: 33479 - protein, 9 aa, Homo sapiens
  misc_feature: Table A; Target 33479; HLA-C*03:03; KCNU1; ENSG00000215262; CTA
VITRPANEF

SEQ ID NO: 33480 - protein, 9 aa, Homo sapiens
  misc_feature: Table A; Target 33480; HLA-C*03:04; KCNU1; ENSG00000215262; CTA
VITRPANEF

SEQ ID NO: 33481 - protein, 9 aa, Homo sapiens
  misc_feature: Table A; Target 33481; HLA-C*07:04; KCNU1; ENSG00000215262; CTA
VITRPANEF

SEQ ID NO: 33482 - protein, 9 aa, Homo sapiens
  misc_feature: Table A; Target 33482; HLA-C*14:02; KCNU1; ENSG00000215262; CTA
VITRPANEF

SEQ ID NO: 33483 - protein, 9 aa, Homo sapiens
  misc_feature: Table A; Target 33483; HLA-C*16:01; KCNU1; ENSG00000215262; CTA
VITRPANEF

SEQ ID NO: 33484 - protein, 9 aa, Homo sapiens
  misc_feature: Table A; Target 33484; HLA-C*16:02; KCNU1; ENSG00000215262; CTA
VITRPANEF

SEQ ID NO: 33485 - protein, 9 aa, Homo sapiens
  misc_feature: Table A; Target 33485; HLA-A*01:01; KCNU1; ENSG00000215262; CTA
VLELLQMLV

SEQ ID NO: 33486 - protein, 9 aa, Homo sapiens
  misc_feature: Table A; Target 33486; HLA-A*03:02; KCNU1; ENSG00000215262; CTA
VLSPPPQPS

SEQ ID NO: 33487 - protein, 9 aa, Homo sapiens
  misc_feature: Table A; Target 33487; HLA-B*27:05; KCNU1; ENSG00000215262; CTA
VLSPPPQPS

SEQ ID NO: 33488 - protein, 9 aa, Homo sapiens
  misc_feature: Table A; Target 33488; HLA-B*39:01; KCNU1; ENSG00000215262; CTA
VLSPPPQPS

SEQ ID NO: 33489 - protein, 9 aa, Homo sapiens
  misc_feature: Table A; Target 33489; HLA-C*06:02; KCNU1; ENSG00000215262; CTA
VLSPPPQPS

SEQ ID NO: 33490 - protein, 10 aa, Homo sapiens
  misc_feature: Table A; Target 33490; HLA-B*27:05; KCNU1; ENSG00000215262; CTA
VLSPPPQPSS

SEQ ID NO: 33491 - protein, 9 aa, Homo sapiens
  misc_feature: Table A; Target 33491; HLA-A*02:04; KCNU1; ENSG00000215262; CTA
VLVILVFVL

SEQ ID NO: 33492 - protein, 8 aa, Homo sapiens
  misc_feature: Table A; Target 33492; HLA-A*02:03; KCNU1; ENSG00000215262; CTA
VMATTSTV

SEQ ID NO: 33493 - protein, 8 aa, Homo sapiens
  misc_feature: Table A; Target 33493; HLA-B*46:01; KCNU1; ENSG00000215262; CTA
VMATTSTV

SEQ ID NO: 33494 - protein, 8 aa, Homo sapiens
  misc_feature: Table A; Target 33494; HLA-B*51:01; KCNU1; ENSG00000215262; CTA
VMATTSTV

SEQ ID NO: 33495 - protein, 9 aa, Homo sapiens
  misc_feature: Table A; Target 33495; HLA-A*32:01; KCNU1; ENSG00000215262; CTA
VMATTSTVG

SEQ ID NO: 33496 - protein, 10 aa, Homo sapiens
  misc_feature: Table A; Target 33496; HLA-A*23:01; KCNU1; ENSG00000215262; CTA
VMATTSTVGF

SEQ ID NO: 33497 - protein, 10 aa, Homo sapiens
  misc_feature: Table A; Target 33497; HLA-A*24:02; KCNU1; ENSG00000215262; CTA
VMATTSTVGF

SEQ ID NO: 33498 - protein, 10 aa, Homo sapiens
  misc_feature: Table A; Target 33498; HLA-A*32:01; KCNU1; ENSG00000215262; CTA
VMATTSTVGF

SEQ ID NO: 33499 - protein, 10 aa, Homo sapiens
  misc_feature: Table A; Target 33499; HLA-B*15:01; KCNU1; ENSG00000215262; CTA
VMATTSTVGF

SEQ ID NO: 33500 - protein, 10 aa, Homo sapiens
  misc_feature: Table A; Target 33500; HLA-B*46:01; KCNU1; ENSG00000215262; CTA
VMATTSTVGF

SEQ ID NO: 33501 - protein, 10 aa, Homo sapiens
  misc_feature: Table A; Target 33501; HLA-C*07:04; KCNU1; ENSG00000215262; CTA
VMATTSTVGF

SEQ ID NO: 33502 - protein, 10 aa, Homo sapiens
  misc_feature: Table A; Target 33502; HLA-C*14:02; KCNU1; ENSG00000215262; CTA
VMATTSTVGF

SEQ ID NO: 33503 - protein, 9 aa, Homo sapiens
  misc_feature: Table A; Target 33503; HLA-A*32:01; KCNU1; ENSG00000215262; CTA
VMPLRASNY

SEQ ID NO: 33504 - protein, 9 aa, Homo sapiens
  misc_feature: Table A; Target 33504; HLA-B*15:01; KCNU1; ENSG00000215262; CTA
VMPLRASNY

SEQ ID NO: 33505 - protein, 9 aa, Homo sapiens
  misc_feature: Table A; Target 33505; HLA-B*15:03; KCNU1; ENSG00000215262; CTA
VMPLRASNY

SEQ ID NO: 33506 - protein, 9 aa, Homo sapiens
  misc_feature: Table A; Target 33506; HLA-B*46:01; KCNU1; ENSG00000215262; CTA
VMPLRASNY

SEQ ID NO: 33507 - protein, 9 aa, Homo sapiens
  misc_feature: Table A; Target 33507; HLA-C*01:02; KCNU1; ENSG00000215262; CTA
VMPLRASNY

SEQ ID NO: 33508 - protein, 11 aa, Homo sapiens
  misc_feature: Table A; Target 33508; HLA-A*24:02; KCNU1; ENSG00000215262; CTA
VNPRNTFGQLF

SEQ ID NO: 33509 - protein, 11 aa, Homo sapiens
  misc_feature: Table A; Target 33509; HLA-B*56:01; KCNU1; ENSG00000215262; CTA
VPILTELKNPS

SEQ ID NO: 33510 - protein, 8 aa, Homo sapiens
  misc_feature: Table A; Target 33510; HLA-A*01:01; KCNU1; ENSG00000215262; CTA
VSEETPGY

SEQ ID NO: 33511 - protein, 8 aa, Homo sapiens
  misc_feature: Table A; Target 33511; HLA-C*05:01; KCNU1; ENSG00000215262; CTA
VSEETPGY

SEQ ID NO: 33512 - protein, 9 aa, Homo sapiens
  misc_feature: Table A; Target 33512; HLA-B*58:01; KCNU1; ENSG00000215262; CTA
VSSQLEQHL

SEQ ID NO: 33513 - protein, 9 aa, Homo sapiens
  misc_feature: Table A; Target 33513; HLA-C*16:01; KCNU1; ENSG00000215262; CTA
VSSQLEQHL

SEQ ID NO: 33514 - protein, 9 aa, Homo sapiens
  misc_feature: Table A; Target 33514; HLA-C*16:02; KCNU1; ENSG00000215262; CTA
VSSQLEQHL

SEQ ID NO: 33515 - protein, 9 aa, Homo sapiens
  misc_feature: Table A; Target 33515; HLA-A*68:02; KCNU1; ENSG00000215262; CTA
VTAFLRNFL

SEQ ID NO: 33516 - protein, 9 aa, Homo sapiens
  misc_feature: Table A; Target 33516; HLA-A*01:01; KCNU1; ENSG00000215262; CTA
VTETLYSPV

SEQ ID NO: 33517 - protein, 10 aa, Homo sapiens
  misc_feature: Table A; Target 33517; HLA-A*01:01; KCNU1; ENSG00000215262; CTA
VTETLYSPVY

SEQ ID NO: 33518 - protein, 10 aa, Homo sapiens
  misc_feature: Table A; Target 33518; HLA-A*30:02; KCNU1; ENSG00000215262; CTA
VTETLYSPVY

SEQ ID NO: 33519 - protein, 9 aa, Homo sapiens
  misc_feature: Table A; Target 33519; HLA-A*03:01; KCNU1; ENSG00000215262; CTA
VTGGVSSQL

SEQ ID NO: 33520 - protein, 9 aa, Homo sapiens
  misc_feature: Table A; Target 33520; HLA-A*03:02; KCNU1; ENSG00000215262; CTA
VTGGVSSQL

SEQ ID NO: 33521 - protein, 9 aa, Homo sapiens
  misc_feature: Table A; Target 33521; HLA-A*32:01; KCNU1; ENSG00000215262; CTA
VTGGVSSQL

SEQ ID NO: 33522 - protein, 9 aa, Homo sapiens
  misc_feature: Table A; Target 33522; HLA-A*68:01; KCNU1; ENSG00000215262; CTA
VTGGVSSQL

SEQ ID NO: 33523 - protein, 9 aa, Homo sapiens
  misc_feature: Table A; Target 33523; HLA-B*27:05; KCNU1; ENSG00000215262; CTA
VTGGVSSQL

SEQ ID NO: 33524 - protein, 9 aa, Homo sapiens
  misc_feature: Table A; Target 33524; HLA-B*40:01; KCNU1; ENSG00000215262; CTA
VTGGVSSQL

SEQ ID NO: 33525 - protein, 9 aa, Homo sapiens
  misc_feature: Table A; Target 33525; HLA-B*58:01; KCNU1; ENSG00000215262; CTA
VTGGVSSQL

SEQ ID NO: 33526 - protein, 9 aa, Homo sapiens
  misc_feature: Table A; Target 33526; HLA-C*01:02; KCNU1; ENSG00000215262; CTA
VTGGVSSQL

SEQ ID NO: 33527 - protein, 9 aa, Homo sapiens
  misc_feature: Table A; Target 33527; HLA-C*03:03; KCNU1; ENSG00000215262; CTA
VTGGVSSQL

SEQ ID NO: 33528 - protein, 9 aa, Homo sapiens
  misc_feature: Table A; Target 33528; HLA-C*05:01; KCNU1; ENSG00000215262; CTA
VTGGVSSQL

SEQ ID NO: 33529 - protein, 9 aa, Homo sapiens
  misc_feature: Table A; Target 33529; HLA-C*16:02; KCNU1; ENSG00000215262; CTA
VTGGVSSQL

SEQ ID NO: 33530 - protein, 9 aa, Homo sapiens
  misc_feature: Table A; Target 33530; HLA-A*03:01; KCNU1; ENSG00000215262; CTA
VVAKTSLGR

SEQ ID NO: 33531 - protein, 9 aa, Homo sapiens
  misc_feature: Table A; Target 33531; HLA-C*07:06; KCNU1; ENSG00000215262; CTA
VVAKTSLGR

SEQ ID NO: 33532 - protein, 9 aa, Homo sapiens
  misc_feature: Table A; Target 33532; HLA-A*01:01; KCNU1; ENSG00000215262; CTA
VYDEDPFAY

SEQ ID NO: 33533 - protein, 9 aa, Homo sapiens
  misc_feature: Table A; Target 33533; HLA-A*23:01; KCNU1; ENSG00000215262; CTA
VYDEDPFAY

SEQ ID NO: 33534 - protein, 9 aa, Homo sapiens
  misc_feature: Table A; Target 33534; HLA-A*24:02; KCNU1; ENSG00000215262; CTA
VYDEDPFAY

SEQ ID NO: 33535 - protein, 9 aa, Homo sapiens
  misc_feature: Table A; Target 33535; HLA-A*29:02; KCNU1; ENSG00000215262; CTA
VYDEDPFAY

SEQ ID NO: 33536 - protein, 9 aa, Homo sapiens
  misc_feature: Table A; Target 33536; HLA-A*30:02; KCNU1; ENSG00000215262; CTA
VYDEDPFAY

SEQ ID NO: 33537 - protein, 9 aa, Homo sapiens
  misc_feature: Table A; Target 33537; HLA-B*35:01; KCNU1; ENSG00000215262; CTA
VYDEDPFAY

SEQ ID NO: 33538 - protein, 9 aa, Homo sapiens
  misc_feature: Table A; Target 33538; HLA-B*35:03; KCNU1; ENSG00000215262; CTA
VYDEDPFAY

SEQ ID NO: 33539 - protein, 9 aa, Homo sapiens
  misc_feature: Table A; Target 33539; HLA-B*55:01; KCNU1; ENSG00000215262; CTA
VYDEDPFAY

SEQ ID NO: 33540 - protein, 9 aa, Homo sapiens
  misc_feature: Table A; Target 33540; HLA-C*04:01; KCNU1; ENSG00000215262; CTA
VYDEDPFAY

SEQ ID NO: 33541 - protein, 9 aa, Homo sapiens
  misc_feature: Table A; Target 33541; HLA-C*05:01; KCNU1; ENSG00000215262; CTA
VYDEDPFAY

SEQ ID NO: 33542 - protein, 9 aa, Homo sapiens
  misc_feature: Table A; Target 33542; HLA-C*14:02; KCNU1; ENSG00000215262; CTA
VYDEDPFAY

SEQ ID NO: 33543 - protein, 8 aa, Homo sapiens
  misc_feature: Table A; Target 33543; HLA-C*14:02; KCNU1; ENSG00000215262; CTA
VYGVADSC

SEQ ID NO: 33544 - protein, 9 aa, Homo sapiens
  misc_feature: Table A; Target 33544; HLA-A*23:01; KCNU1; ENSG00000215262; CTA
VYLPKIPSW

SEQ ID NO: 33545 - protein, 9 aa, Homo sapiens
  misc_feature: Table A; Target 33545; HLA-A*24:02; KCNU1; ENSG00000215262; CTA
VYLPKIPSW

SEQ ID NO: 33546 - protein, 9 aa, Homo sapiens
  misc_feature: Table A; Target 33546; HLA-A*25:01; KCNU1; ENSG00000215262; CTA
VYLPKIPSW

SEQ ID NO: 33547 - protein, 9 aa, Homo sapiens
  misc_feature: Table A; Target 33547; HLA-A*29:02; KCNU1; ENSG00000215262; CTA
VYLPKIPSW

SEQ ID NO: 33548 - protein, 9 aa, Homo sapiens
  misc_feature: Table A; Target 33548; HLA-A*31:01; KCNU1; ENSG00000215262; CTA
VYLPKIPSW

SEQ ID NO: 33549 - protein, 9 aa, Homo sapiens
  misc_feature: Table A; Target 33549; HLA-A*32:01; KCNU1; ENSG00000215262; CTA
VYLPKIPSW

SEQ ID NO: 33550 - protein, 9 aa, Homo sapiens
  misc_feature: Table A; Target 33550; HLA-B*57:01; KCNU1; ENSG00000215262; CTA
VYLPKIPSW

SEQ ID NO: 33551 - protein, 9 aa, Homo sapiens
  misc_feature: Table A; Target 33551; HLA-B*58:01; KCNU1; ENSG00000215262; CTA
VYLPKIPSW

SEQ ID NO: 33552 - protein, 11 aa, Homo sapiens
  misc_feature: Table A; Target 33552; HLA-A*24:02; KCNU1; ENSG00000215262; CTA
VYLPKIPSWNW

SEQ ID NO: 33553 - protein, 11 aa, Homo sapiens
  misc_feature: Table A; Target 33553; HLA-A*24:02; KCNU1; ENSG00000215262; CTA
VYSYQPRTNSL

SEQ ID NO: 33554 - protein, 9 aa, Homo sapiens
  misc_feature: Table A; Target 33554; HLA-B*13:02; KCNU1; ENSG00000215262; CTA
WQIIKGTGI

SEQ ID NO: 33555 - protein, 8 aa, Homo sapiens
  misc_feature: Table A; Target 33555; HLA-B*18:01; KCNU1; ENSG00000215262; CTA
YDEDPFAY

SEQ ID NO: 33556 - protein, 8 aa, Homo sapiens
  misc_feature: Table A; Target 33556; HLA-B*37:01; KCNU1; ENSG00000215262; CTA
YDSTTRII

SEQ ID NO: 33557 - protein, 9 aa, Homo sapiens
  misc_feature: Table A; Target 33557; HLA-B*37:01; KCNU1; ENSG00000215262; CTA
YDSTTRIII

SEQ ID NO: 33558 - protein, 9 aa, Homo sapiens
  misc_feature: Table A; Target 33558; HLA-B*37:01; KCNU1; ENSG00000215262; CTA
YEALKGKKF

SEQ ID NO: 33559 - protein, 9 aa, Homo sapiens
  misc_feature: Table A; Target 33559; HLA-B*44:02; KCNU1; ENSG00000215262; CTA
YEALKGKKF

SEQ ID NO: 33560 - protein, 9 aa, Homo sapiens
  misc_feature: Table A; Target 33560; HLA-B*44:03; KCNU1; ENSG00000215262; CTA
YEALKGKKF

SEQ ID NO: 33561 - protein, 8 aa, Homo sapiens
  misc_feature: Table A; Target 33561; HLA-B*49:01; KCNU1; ENSG00000215262; CTA
YEDKTIPI

SEQ ID NO: 33562 - protein, 10 aa, Homo sapiens
  misc_feature: Table A; Target 33562; HLA-A*30:01; KCNU1; ENSG00000215262; CTA
YEDKTIPIDL

SEQ ID NO: 33563 - protein, 10 aa, Homo sapiens
  misc_feature: Table A; Target 33563; HLA-B*40:01; KCNU1; ENSG00000215262; CTA
YEDKTIPIDL

SEQ ID NO: 33564 - protein, 10 aa, Homo sapiens
  misc_feature: Table A; Target 33564; HLA-B*49:01; KCNU1; ENSG00000215262; CTA
YEDKTIPIDL

SEQ ID NO: 33565 - protein, 9 aa, Homo sapiens
  misc_feature: Table A; Target 33565; HLA-A*30:01; KCNU1; ENSG00000215262; CTA
YEIVNKASQ

SEQ ID NO: 33566 - protein, 9 aa, Homo sapiens
  misc_feature: Table A; Target 33566; HLA-B*18:01; KCNU1; ENSG00000215262; CTA
YEIVNKASQ

SEQ ID NO: 33567 - protein, 9 aa, Homo sapiens
  misc_feature: Table A; Target 33567; HLA-B*40:01; KCNU1; ENSG00000215262; CTA
YEIVNKASQ

SEQ ID NO: 33568 - protein, 9 aa, Homo sapiens
  misc_feature: Table A; Target 33568; HLA-B*40:02; KCNU1; ENSG00000215262; CTA
YEIVNKASQ

SEQ ID NO: 33569 - protein, 9 aa, Homo sapiens
  misc_feature: Table A; Target 33569; HLA-B*44:02; KCNU1; ENSG00000215262; CTA
YEIVNKASQ

SEQ ID NO: 33570 - protein, 9 aa, Homo sapiens
  misc_feature: Table A; Target 33570; HLA-B*49:01; KCNU1; ENSG00000215262; CTA
YEIVNKASQ

SEQ ID NO: 33571 - protein, 10 aa, Homo sapiens
  misc_feature: Table A; Target 33571; HLA-B*40:02; KCNU1; ENSG00000215262; CTA
YEIVNKASQT

SEQ ID NO: 33572 - protein, 10 aa, Homo sapiens
  misc_feature: Table A; Target 33572; HLA-B*49:01; KCNU1; ENSG00000215262; CTA
YEIVNKASQT

SEQ ID NO: 33573 - protein, 11 aa, Homo sapiens
  misc_feature: Table A; Target 33573; HLA-A*30:01; KCNU1; ENSG00000215262; CTA
YEIVNKASQTT

SEQ ID NO: 33574 - protein, 9 aa, Homo sapiens
  misc_feature: Table A; Target 33574; HLA-A*23:01; KCNU1; ENSG00000215262; CTA
YFESIYLVM

SEQ ID NO: 33575 - protein, 9 aa, Homo sapiens
  misc_feature: Table A; Target 33575; HLA-A*29:02; KCNU1; ENSG00000215262; CTA
YFESIYLVM

SEQ ID NO: 33576 - protein, 9 aa, Homo sapiens
  misc_feature: Table A; Target 33576; HLA-C*14:02; KCNU1; ENSG00000215262; CTA
YFINSADPV

SEQ ID NO: 33577 - protein, 10 aa, Homo sapiens
  misc_feature: Table A; Target 33577; HLA-C*03:03; KCNU1; ENSG00000215262; CTA
YGVADSCTSL

SEQ ID NO: 33578 - protein, 10 aa, Homo sapiens
  misc_feature: Table A; Target 33578; HLA-C*03:04; KCNU1; ENSG00000215262; CTA
YGVADSCTSL

SEQ ID NO: 33579 - protein, 8 aa, Homo sapiens
  misc_feature: Table A; Target 33579; HLA-B*08:01; KCNU1; ENSG00000215262; CTA
YILPGCAL

SEQ ID NO: 33580 - protein, 8 aa, Homo sapiens
  misc_feature: Table A; Target 33580; HLA-C*03:03; KCNU1; ENSG00000215262; CTA
YILPGCAL

SEQ ID NO: 33581 - protein, 8 aa, Homo sapiens
  misc_feature: Table A; Target 33581; HLA-C*03:04; KCNU1; ENSG00000215262; CTA
YILPGCAL

SEQ ID NO: 33582 - protein, 9 aa, Homo sapiens
  misc_feature: Table A; Target 33582; HLA-A*01:01; KCNU1; ENSG00000215262; CTA
YILPGCALY

SEQ ID NO: 33583 - protein, 9 aa, Homo sapiens
  misc_feature: Table A; Target 33583; HLA-A*29:02; KCNU1; ENSG00000215262; CTA
YILPGCALY

SEQ ID NO: 33584 - protein, 9 aa, Homo sapiens
  misc_feature: Table A; Target 33584; HLA-A*30:02; KCNU1; ENSG00000215262; CTA
YILPGCALY

SEQ ID NO: 33585 - protein, 8 aa, Homo sapiens
  misc_feature: Table A; Target 33585; HLA-A*02:07; KCNU1; ENSG00000215262; CTA
YIPEMVEL

SEQ ID NO: 33586 - protein, 8 aa, Homo sapiens
  misc_feature: Table A; Target 33586; HLA-C*01:02; KCNU1; ENSG00000215262; CTA
YIPEMVEL

SEQ ID NO: 33587 - protein, 8 aa, Homo sapiens
  misc_feature: Table A; Target 33587; HLA-C*05:01; KCNU1; ENSG00000215262; CTA
YIPEMVEL

SEQ ID NO: 33588 - protein, 9 aa, Homo sapiens
  misc_feature: Table A; Target 33588; HLA-A*02:07; KCNU1; ENSG00000215262; CTA
YIPEMVELF

SEQ ID NO: 33589 - protein, 9 aa, Homo sapiens
  misc_feature: Table A; Target 33589; HLA-A*24:02; KCNU1; ENSG00000215262; CTA
YIPEMVELF

SEQ ID NO: 33590 - protein, 9 aa, Homo sapiens
  misc_feature: Table A; Target 33590; HLA-A*26:01; KCNU1; ENSG00000215262; CTA
YIPEMVELF

SEQ ID NO: 33591 - protein, 9 aa, Homo sapiens
  misc_feature: Table A; Target 33591; HLA-A*29:02; KCNU1; ENSG00000215262; CTA
YIPEMVELF

SEQ ID NO: 33592 - protein, 10 aa, Homo sapiens
  misc_feature: Table A; Target 33592; HLA-A*02:07; KCNU1; ENSG00000215262; CTA
YIPEMVELFA

SEQ ID NO: 33593 - protein, 8 aa, Homo sapiens
  misc_feature: Table A; Target 33593; HLA-B*13:02; KCNU1; ENSG00000215262; CTA
YLAYTTFI

SEQ ID NO: 33594 - protein, 9 aa, Homo sapiens
  misc_feature: Table A; Target 33594; HLA-A*02:03; KCNU1; ENSG00000215262; CTA
YLKSNWLGL

SEQ ID NO: 33595 - protein, 9 aa, Homo sapiens
  misc_feature: Table A; Target 33595; HLA-A*02:04; KCNU1; ENSG00000215262; CTA
YLKSNWLGL

SEQ ID NO: 33596 - protein, 8 aa, Homo sapiens
  misc_feature: Table A; Target 33596; HLA-A*24:02; KCNU1; ENSG00000215262; CTA
YLPKIPSW

SEQ ID NO: 33597 - protein, 10 aa, Homo sapiens
  misc_feature: Table A; Target 33597; HLA-A*02:07; KCNU1; ENSG00000215262; CTA
YLPKIPSWNW

SEQ ID NO: 33598 - protein, 10 aa, Homo sapiens
  misc_feature: Table A; Target 33598; HLA-A*24:02; KCNU1; ENSG00000215262; CTA
YLPKIPSWNW

SEQ ID NO: 33599 - protein, 9 aa, Homo sapiens
  misc_feature: Table A; Target 33599; HLA-B*46:01; KCNU1; ENSG00000215262; CTA
YLVMATTST

SEQ ID NO: 33600 - protein, 10 aa, Homo sapiens
  misc_feature: Table A; Target 33600; HLA-A*02:03; KCNU1; ENSG00000215262; CTA
YLVMATTSTV

SEQ ID NO: 33601 - protein, 9 aa, Homo sapiens
  misc_feature: Table A; Target 33601; HLA-A*02:04; KCNU1; ENSG00000215262; CTA
YNYHVLELL

SEQ ID NO: 33602 - protein, 9 aa, Homo sapiens
  misc_feature: Table A; Target 33602; HLA-A*68:02; KCNU1; ENSG00000215262; CTA
YNYHVLELL

SEQ ID NO: 33603 - protein, 8 aa, Homo sapiens
  misc_feature: Table A; Target 33603; HLA-B*08:01; KCNU1; ENSG00000215262; CTA
YQPRTNSL

SEQ ID NO: 33604 - protein, 8 aa, Homo sapiens
  misc_feature: Table A; Target 33604; HLA-B*13:02; KCNU1; ENSG00000215262; CTA
YQPRTNSL

SEQ ID NO: 33605 - protein, 8 aa, Homo sapiens
  misc_feature: Table A; Target 33605; HLA-B*15:01; KCNU1; ENSG00000215262; CTA
YQPRTNSL

SEQ ID NO: 33606 - protein, 8 aa, Homo sapiens
  misc_feature: Table A; Target 33606; HLA-C*01:02; KCNU1; ENSG00000215262; CTA
YQPRTNSL

SEQ ID NO: 33607 - protein, 10 aa, Homo sapiens
  misc_feature: Table A; Target 33607; HLA-A*24:02; KCNU1; ENSG00000215262; CTA
YQPRTNSLSF

SEQ ID NO: 33608 - protein, 10 aa, Homo sapiens
  misc_feature: Table A; Target 33608; HLA-B*15:01; KCNU1; ENSG00000215262; CTA
YQPRTNSLSF

SEQ ID NO: 33609 - protein, 9 aa, Homo sapiens
  misc_feature: Table A; Target 33609; HLA-B*27:05; KCNU1; ENSG00000215262; CTA
YRIIDEEEL

SEQ ID NO: 33610 - protein, 9 aa, Homo sapiens
  misc_feature: Table A; Target 33610; HLA-B*38:01; KCNU1; ENSG00000215262; CTA
YRIIDEEEL

SEQ ID NO: 33611 - protein, 9 aa, Homo sapiens
  misc_feature: Table A; Target 33611; HLA-B*39:01; KCNU1; ENSG00000215262; CTA
YRIIDEEEL

SEQ ID NO: 33612 - protein, 9 aa, Homo sapiens
  misc_feature: Table A; Target 33612; HLA-B*40:01; KCNU1; ENSG00000215262; CTA
YRIIDEEEL

SEQ ID NO: 33613 - protein, 9 aa, Homo sapiens
  misc_feature: Table A; Target 33613; HLA-C*16:04; KCNU1; ENSG00000215262; CTA
YRIIDEEEL

SEQ ID NO: 33614 - protein, 8 aa, Homo sapiens
  misc_feature: Table A; Target 33614; HLA-B*54:01; KCNU1; ENSG00000215262; CTA
YSGDLHAA

SEQ ID NO: 33615 - protein, 10 aa, Homo sapiens
  misc_feature: Table A; Target 33615; HLA-A*25:01; KCNU1; ENSG00000215262; CTA
YSYQPRTNSL

SEQ ID NO: 33616 - protein, 10 aa, Homo sapiens
  misc_feature: Table A; Target 33616; HLA-A*30:01; KCNU1; ENSG00000215262; CTA
YSYQPRTNSL

SEQ ID NO: 33617 - protein, 10 aa, Homo sapiens
  misc_feature: Table A; Target 33617; HLA-B*08:01; KCNU1; ENSG00000215262; CTA
YSYQPRTNSL

SEQ ID NO: 33618 - protein, 10 aa, Homo sapiens
  misc_feature: Table A; Target 33618; HLA-B*40:02; KCNU1; ENSG00000215262; CTA
YSYQPRTNSL

SEQ ID NO: 33619 - protein, 10 aa, Homo sapiens
  misc_feature: Table A; Target 33619; HLA-B*46:01; KCNU1; ENSG00000215262; CTA
YSYQPRTNSL

SEQ ID NO: 33620 - protein, 10 aa, Homo sapiens
  misc_feature: Table A; Target 33620; HLA-B*58:01; KCNU1; ENSG00000215262; CTA
YSYQPRTNSL

SEQ ID NO: 33621 - protein, 10 aa, Homo sapiens
  misc_feature: Table A; Target 33621; HLA-C*01:02; KCNU1; ENSG00000215262; CTA
YSYQPRTNSL

SEQ ID NO: 33622 - protein, 10 aa, Homo sapiens
  misc_feature: Table A; Target 33622; HLA-C*02:02; KCNU1; ENSG00000215262; CTA
YSYQPRTNSL

SEQ ID NO: 33623 - protein, 10 aa, Homo sapiens
  misc_feature: Table A; Target 33623; HLA-C*03:03; KCNU1; ENSG00000215262; CTA
YSYQPRTNSL

SEQ ID NO: 33624 - protein, 10 aa, Homo sapiens
  misc_feature: Table A; Target 33624; HLA-C*03:04; KCNU1; ENSG00000215262; CTA
YSYQPRTNSL

SEQ ID NO: 33625 - protein, 10 aa, Homo sapiens
  misc_feature: Table A; Target 33625; HLA-C*12:03; KCNU1; ENSG00000215262; CTA
YSYQPRTNSL

SEQ ID NO: 33626 - protein, 10 aa, Homo sapiens
  misc_feature: Table A; Target 33626; HLA-C*14:02; KCNU1; ENSG00000215262; CTA
YSYQPRTNSL

SEQ ID NO: 33627 - protein, 10 aa, Homo sapiens
  misc_feature: Table A; Target 33627; HLA-C*16:01; KCNU1; ENSG00000215262; CTA
YSYQPRTNSL

SEQ ID NO: 33628 - protein, 10 aa, Homo sapiens
  misc_feature: Table A; Target 33628; HLA-C*16:02; KCNU1; ENSG00000215262; CTA
YSYQPRTNSL

SEQ ID NO: 33629 - protein, 8 aa, Homo sapiens
  misc_feature: Table A; Target 33629; HLA-C*03:03; KCNU1; ENSG00000215262; CTA
YTSSYEAL

SEQ ID NO: 33630 - protein, 8 aa, Homo sapiens
  misc_feature: Table A; Target 33630; HLA-C*03:04; KCNU1; ENSG00000215262; CTA
YTSSYEAL

SEQ ID NO: 33631 - protein, 8 aa, Homo sapiens
  misc_feature: Table A; Target 33631; HLA-C*14:02; KCNU1; ENSG00000215262; CTA
YTSSYEAL

SEQ ID NO: 33632 - protein, 9 aa, Homo sapiens
  misc_feature: Table A; Target 33632; HLA-A*01:01; KCNU1; ENSG00000215262; CTA
YTSSYEALK

SEQ ID NO: 33633 - protein, 9 aa, Homo sapiens
  misc_feature: Table A; Target 33633; HLA-A*03:02; KCNU1; ENSG00000215262; CTA
YTSSYEALK

SEQ ID NO: 33634 - protein, 9 aa, Homo sapiens
  misc_feature: Table A; Target 33634; HLA-A*11:01; KCNU1; ENSG00000215262; CTA
YTSSYEALK

SEQ ID NO: 33635 - protein, 9 aa, Homo sapiens
  misc_feature: Table A; Target 33635; HLA-A*68:01; KCNU1; ENSG00000215262; CTA
YTSSYEALK

SEQ ID NO: 33636 - protein, 9 aa, Homo sapiens
  misc_feature: Table A; Target 33636; HLA-A*68:02; KCNU1; ENSG00000215262; CTA
YTSSYEALK

SEQ ID NO: 33637 - protein, 9 aa, Homo sapiens
  misc_feature: Table A; Target 33637; HLA-B*27:02; KCNU1; ENSG00000215262; CTA
YTSSYEALK

SEQ ID NO: 33638 - protein, 9 aa, Homo sapiens
  misc_feature: Table A; Target 33638; HLA-C*07:06; KCNU1; ENSG00000215262; CTA
YTSSYEALK

SEQ ID NO: 33639 - protein, 11 aa, Homo sapiens
  misc_feature: Table A; Target 33639; HLA-A*03:01; KCNU1; ENSG00000215262; CTA
YTSSYEALKGK

SEQ ID NO: 33640 - protein, 11 aa, Homo sapiens
  misc_feature: Table A; Target 33640; HLA-A*03:02; KCNU1; ENSG00000215262; CTA
YTSSYEALKGK

SEQ ID NO: 33641 - protein, 11 aa, Homo sapiens
  misc_feature: Table A; Target 33641; HLA-A*11:01; KCNU1; ENSG00000215262; CTA
YTSSYEALKGK

SEQ ID NO: 33642 - protein, 11 aa, Homo sapiens
  misc_feature: Table A; Target 33642; HLA-A*68:01; KCNU1; ENSG00000215262; CTA
YTSSYEALKGK

SEQ ID NO: 33643 - protein, 11 aa, Homo sapiens
  misc_feature: Table A; Target 33643; HLA-A*68:02; KCNU1; ENSG00000215262; CTA
YTSSYEALKGK

SEQ ID NO: 33644 - protein, 11 aa, Homo sapiens
  misc_feature: Table A; Target 33644; HLA-B*27:02; KCNU1; ENSG00000215262; CTA
YTSSYEALKGK

SEQ ID NO: 33645 - protein, 9 aa, Homo sapiens
  misc_feature: Table A; Target 33645; HLA-B*54:01; KCNU1; ENSG00000215262; CTA
YTTFISGSA

SEQ ID NO: 33646 - protein, 9 aa, Homo sapiens
  misc_feature: Table A; Target 33646; HLA-B*56:01; KCNU1; ENSG00000215262; CTA
YTTFISGSA

SEQ ID NO: 33647 - protein, 10 aa, Homo sapiens
  misc_feature: Table A; Target 33647; HLA-A*01:01; KCNU1; ENSG00000215262; CTA
YTTFISGSAM

SEQ ID NO: 33648 - protein, 10 aa, Homo sapiens
  misc_feature: Table A; Target 33648; HLA-C*02:02; KCNU1; ENSG00000215262; CTA
YTTFISGSAM

SEQ ID NO: 33649 - protein, 10 aa, Homo sapiens
  misc_feature: Table A; Target 33649; HLA-C*03:03; KCNU1; ENSG00000215262; CTA
YTTFISGSAM

SEQ ID NO: 33650 - protein, 10 aa, Homo sapiens
  misc_feature: Table A; Target 33650; HLA-C*03:04; KCNU1; ENSG00000215262; CTA
YTTFISGSAM

SEQ ID NO: 33651 - protein, 9 aa, Homo sapiens
  misc_feature: Table A; Target 33651; HLA-B*15:03; KLK2; ENSG00000167751; TAA
AKITDVVKV

SEQ ID NO: 33652 - protein, 9 aa, Homo sapiens
  misc_feature: Table A; Target 33652; HLA-A*01:01; KLK2; ENSG00000167751; TAA
ALPEKPAVY

SEQ ID NO: 33653 - protein, 9 aa, Homo sapiens
  misc_feature: Table A; Target 33653; HLA-A*02:01; KLK2; ENSG00000167751; TAA
ALPEKPAVY

SEQ ID NO: 33654 - protein, 9 aa, Homo sapiens
  misc_feature: Table A; Target 33654; HLA-A*02:03; KLK2; ENSG00000167751; TAA
ALPEKPAVY

SEQ ID NO: 33655 - protein, 9 aa, Homo sapiens
  misc_feature: Table A; Target 33655; HLA-A*02:07; KLK2; ENSG00000167751; TAA
ALPEKPAVY

SEQ ID NO: 33656 - protein, 9 aa, Homo sapiens
  misc_feature: Table A; Target 33656; HLA-A*03:01; KLK2; ENSG00000167751; TAA
ALPEKPAVY

SEQ ID NO: 33657 - protein, 9 aa, Homo sapiens
  misc_feature: Table A; Target 33657; HLA-A*03:02; KLK2; ENSG00000167751; TAA
ALPEKPAVY

SEQ ID NO: 33658 - protein, 9 aa, Homo sapiens
  misc_feature: Table A; Target 33658; HLA-A*25:01; KLK2; ENSG00000167751; TAA
ALPEKPAVY

SEQ ID NO: 33659 - protein, 9 aa, Homo sapiens
  misc_feature: Table A; Target 33659; HLA-A*26:01; KLK2; ENSG00000167751; TAA
ALPEKPAVY

SEQ ID NO: 33660 - protein, 9 aa, Homo sapiens
  misc_feature: Table A; Target 33660; HLA-A*29:02; KLK2; ENSG00000167751; TAA
ALPEKPAVY

SEQ ID NO: 33661 - protein, 9 aa, Homo sapiens
  misc_feature: Table A; Target 33661; HLA-A*30:02; KLK2; ENSG00000167751; TAA
ALPEKPAVY

SEQ ID NO: 33662 - protein, 9 aa, Homo sapiens
  misc_feature: Table A; Target 33662; HLA-A*32:01; KLK2; ENSG00000167751; TAA
ALPEKPAVY

SEQ ID NO: 33663 - protein, 9 aa, Homo sapiens
  misc_feature: Table A; Target 33663; HLA-B*15:01; KLK2; ENSG00000167751; TAA
ALPEKPAVY

SEQ ID NO: 33664 - protein, 9 aa, Homo sapiens
  misc_feature: Table A; Target 33664; HLA-B*15:03; KLK2; ENSG00000167751; TAA
ALPEKPAVY

SEQ ID NO: 33665 - protein, 9 aa, Homo sapiens
  misc_feature: Table A; Target 33665; HLA-B*46:01; KLK2; ENSG00000167751; TAA
ALPEKPAVY

SEQ ID NO: 33666 - protein, 9 aa, Homo sapiens
  misc_feature: Table A; Target 33666; HLA-B*58:01; KLK2; ENSG00000167751; TAA
ALPEKPAVY

SEQ ID NO: 33667 - protein, 9 aa, Homo sapiens
  misc_feature: Table A; Target 33667; HLA-C*01:02; KLK2; ENSG00000167751; TAA
ALPEKPAVY

SEQ ID NO: 33668 - protein, 9 aa, Homo sapiens
  misc_feature: Table A; Target 33668; HLA-C*02:02; KLK2; ENSG00000167751; TAA
ALPEKPAVY

SEQ ID NO: 33669 - protein, 9 aa, Homo sapiens
  misc_feature: Table A; Target 33669; HLA-C*07:04; KLK2; ENSG00000167751; TAA
ALPEKPAVY

SEQ ID NO: 33670 - protein, 9 aa, Homo sapiens
  misc_feature: Table A; Target 33670; HLA-C*14:02; KLK2; ENSG00000167751; TAA
ALPEKPAVY

SEQ ID NO: 33671 - protein, 9 aa, Homo sapiens
  misc_feature: Table A; Target 33671; HLA-C*16:01; KLK2; ENSG00000167751; TAA
ALPEKPAVY

SEQ ID NO: 33672 - protein, 10 aa, Homo sapiens
  misc_feature: Table A; Target 33672; HLA-A*02:07; KLK2; ENSG00000167751; TAA
ALPEKPAVYT

SEQ ID NO: 33673 - protein, 11 aa, Homo sapiens
  misc_feature: Table A; Target 33673; HLA-A*03:01; KLK2; ENSG00000167751; TAA
ALPEKPAVYTK

SEQ ID NO: 33674 - protein, 11 aa, Homo sapiens
  misc_feature: Table A; Target 33674; HLA-A*03:02; KLK2; ENSG00000167751; TAA
ALPEKPAVYTK

SEQ ID NO: 33675 - protein, 9 aa, Homo sapiens
  misc_feature: Table A; Target 33675; HLA-A*02:07; KLK2; ENSG00000167751; TAA
AVPLIQSRI

SEQ ID NO: 33676 - protein, 9 aa, Homo sapiens
  misc_feature: Table A; Target 33676; HLA-B*13:02; KLK2; ENSG00000167751; TAA
AVPLIQSRI

SEQ ID NO: 33677 - protein, 9 aa, Homo sapiens
  misc_feature: Table A; Target 33677; HLA-A*03:01; KLK2; ENSG00000167751; TAA
AVYSHGWAH

SEQ ID NO: 33678 - protein, 9 aa, Homo sapiens
  misc_feature: Table A; Target 33678; HLA-A*11:01; KLK2; ENSG00000167751; TAA
AVYSHGWAH

SEQ ID NO: 33679 - protein, 8 aa, Homo sapiens
  misc_feature: Table A; Target 33679; HLA-B*08:01; KLK2; ENSG00000167751; TAA
AVYTKVVH

SEQ ID NO: 33680 - protein, 9 aa, Homo sapiens
  misc_feature: Table A; Target 33680; HLA-A*01:01; KLK2; ENSG00000167751; TAA
AVYTKVVHY

SEQ ID NO: 33681 - protein, 9 aa, Homo sapiens
  misc_feature: Table A; Target 33681; HLA-A*02:03; KLK2; ENSG00000167751; TAA
AVYTKVVHY

SEQ ID NO: 33682 - protein, 9 aa, Homo sapiens
  misc_feature: Table A; Target 33682; HLA-A*03:01; KLK2; ENSG00000167751; TAA
AVYTKVVHY

SEQ ID NO: 33683 - protein, 9 aa, Homo sapiens
  misc_feature: Table A; Target 33683; HLA-A*03:02; KLK2; ENSG00000167751; TAA
AVYTKVVHY

SEQ ID NO: 33684 - protein, 9 aa, Homo sapiens
  misc_feature: Table A; Target 33684; HLA-A*11:01; KLK2; ENSG00000167751; TAA
AVYTKVVHY

SEQ ID NO: 33685 - protein, 9 aa, Homo sapiens
  misc_feature: Table A; Target 33685; HLA-A*23:01; KLK2; ENSG00000167751; TAA
AVYTKVVHY

SEQ ID NO: 33686 - protein, 9 aa, Homo sapiens
  misc_feature: Table A; Target 33686; HLA-A*25:01; KLK2; ENSG00000167751; TAA
AVYTKVVHY

SEQ ID NO: 33687 - protein, 9 aa, Homo sapiens
  misc_feature: Table A; Target 33687; HLA-A*26:01; KLK2; ENSG00000167751; TAA
AVYTKVVHY

SEQ ID NO: 33688 - protein, 9 aa, Homo sapiens
  misc_feature: Table A; Target 33688; HLA-A*29:02; KLK2; ENSG00000167751; TAA
AVYTKVVHY

SEQ ID NO: 33689 - protein, 9 aa, Homo sapiens
  misc_feature: Table A; Target 33689; HLA-A*30:02; KLK2; ENSG00000167751; TAA
AVYTKVVHY

SEQ ID NO: 33690 - protein, 9 aa, Homo sapiens
  misc_feature: Table A; Target 33690; HLA-A*31:01; KLK2; ENSG00000167751; TAA
AVYTKVVHY

SEQ ID NO: 33691 - protein, 9 aa, Homo sapiens
  misc_feature: Table A; Target 33691; HLA-A*32:01; KLK2; ENSG00000167751; TAA
AVYTKVVHY

SEQ ID NO: 33692 - protein, 9 aa, Homo sapiens
  misc_feature: Table A; Target 33692; HLA-A*68:01; KLK2; ENSG00000167751; TAA
AVYTKVVHY

SEQ ID NO: 33693 - protein, 9 aa, Homo sapiens
  misc_feature: Table A; Target 33693; HLA-B*08:01; KLK2; ENSG00000167751; TAA
AVYTKVVHY

SEQ ID NO: 33694 - protein, 9 aa, Homo sapiens
  misc_feature: Table A; Target 33694; HLA-B*13:02; KLK2; ENSG00000167751; TAA
AVYTKVVHY

SEQ ID NO: 33695 - protein, 9 aa, Homo sapiens
  misc_feature: Table A; Target 33695; HLA-B*15:01; KLK2; ENSG00000167751; TAA
AVYTKVVHY

SEQ ID NO: 33696 - protein, 9 aa, Homo sapiens
  misc_feature: Table A; Target 33696; HLA-B*15:03; KLK2; ENSG00000167751; TAA
AVYTKVVHY

SEQ ID NO: 33697 - protein, 9 aa, Homo sapiens
  misc_feature: Table A; Target 33697; HLA-B*35:01; KLK2; ENSG00000167751; TAA
AVYTKVVHY

SEQ ID NO: 33698 - protein, 9 aa, Homo sapiens
  misc_feature: Table A; Target 33698; HLA-B*37:01; KLK2; ENSG00000167751; TAA
AVYTKVVHY

SEQ ID NO: 33699 - protein, 9 aa, Homo sapiens
  misc_feature: Table A; Target 33699; HLA-B*44:02; KLK2; ENSG00000167751; TAA
AVYTKVVHY

SEQ ID NO: 33700 - protein, 9 aa, Homo sapiens
  misc_feature: Table A; Target 33700; HLA-B*44:03; KLK2; ENSG00000167751; TAA
AVYTKVVHY

SEQ ID NO: 33701 - protein, 9 aa, Homo sapiens
  misc_feature: Table A; Target 33701; HLA-B*46:01; KLK2; ENSG00000167751; TAA
AVYTKVVHY

SEQ ID NO: 33702 - protein, 9 aa, Homo sapiens
  misc_feature: Table A; Target 33702; HLA-B*57:01; KLK2; ENSG00000167751; TAA
AVYTKVVHY

SEQ ID NO: 33703 - protein, 9 aa, Homo sapiens
  misc_feature: Table A; Target 33703; HLA-B*58:01; KLK2; ENSG00000167751; TAA
AVYTKVVHY

SEQ ID NO: 33704 - protein, 9 aa, Homo sapiens
  misc_feature: Table A; Target 33704; HLA-C*01:02; KLK2; ENSG00000167751; TAA
AVYTKVVHY

SEQ ID NO: 33705 - protein, 9 aa, Homo sapiens
  misc_feature: Table A; Target 33705; HLA-C*02:02; KLK2; ENSG00000167751; TAA
AVYTKVVHY

SEQ ID NO: 33706 - protein, 9 aa, Homo sapiens
  misc_feature: Table A; Target 33706; HLA-C*07:04; KLK2; ENSG00000167751; TAA
AVYTKVVHY

SEQ ID NO: 33707 - protein, 9 aa, Homo sapiens
  misc_feature: Table A; Target 33707; HLA-C*07:06; KLK2; ENSG00000167751; TAA
AVYTKVVHY

SEQ ID NO: 33708 - protein, 9 aa, Homo sapiens
  misc_feature: Table A; Target 33708; HLA-C*12:03; KLK2; ENSG00000167751; TAA
AVYTKVVHY

SEQ ID NO: 33709 - protein, 9 aa, Homo sapiens
  misc_feature: Table A; Target 33709; HLA-C*14:02; KLK2; ENSG00000167751; TAA
AVYTKVVHY

SEQ ID NO: 33710 - protein, 9 aa, Homo sapiens
  misc_feature: Table A; Target 33710; HLA-C*16:01; KLK2; ENSG00000167751; TAA
AVYTKVVHY

SEQ ID NO: 33711 - protein, 9 aa, Homo sapiens
  misc_feature: Table A; Target 33711; HLA-C*16:02; KLK2; ENSG00000167751; TAA
AVYTKVVHY

SEQ ID NO: 33712 - protein, 9 aa, Homo sapiens
  misc_feature: Table A; Target 33712; HLA-C*16:04; KLK2; ENSG00000167751; TAA
AVYTKVVHY

SEQ ID NO: 33713 - protein, 10 aa, Homo sapiens
  misc_feature: Table A; Target 33713; HLA-A*03:01; KLK2; ENSG00000167751; TAA
AVYTKVVHYR

SEQ ID NO: 33714 - protein, 10 aa, Homo sapiens
  misc_feature: Table A; Target 33714; HLA-A*31:01; KLK2; ENSG00000167751; TAA
AVYTKVVHYR

SEQ ID NO: 33715 - protein, 9 aa, Homo sapiens
  misc_feature: Table A; Target 33715; HLA-A*02:01; KLK2; ENSG00000167751; TAA
AYSEKVTEF

SEQ ID NO: 33716 - protein, 9 aa, Homo sapiens
  misc_feature: Table A; Target 33716; HLA-A*23:01; KLK2; ENSG00000167751; TAA
AYSEKVTEF

SEQ ID NO: 33717 - protein, 9 aa, Homo sapiens
  misc_feature: Table A; Target 33717; HLA-A*24:02; KLK2; ENSG00000167751; TAA
AYSEKVTEF

SEQ ID NO: 33718 - protein, 9 aa, Homo sapiens
  misc_feature: Table A; Target 33718; HLA-A*25:01; KLK2; ENSG00000167751; TAA
AYSEKVTEF

SEQ ID NO: 33719 - protein, 9 aa, Homo sapiens
  misc_feature: Table A; Target 33719; HLA-A*26:01; KLK2; ENSG00000167751; TAA
AYSEKVTEF

SEQ ID NO: 33720 - protein, 9 aa, Homo sapiens
  misc_feature: Table A; Target 33720; HLA-A*29:02; KLK2; ENSG00000167751; TAA
AYSEKVTEF

SEQ ID NO: 33721 - protein, 9 aa, Homo sapiens
  misc_feature: Table A; Target 33721; HLA-A*30:01; KLK2; ENSG00000167751; TAA
AYSEKVTEF

SEQ ID NO: 33722 - protein, 9 aa, Homo sapiens
  misc_feature: Table A; Target 33722; HLA-A*30:02; KLK2; ENSG00000167751; TAA
AYSEKVTEF

SEQ ID NO: 33723 - protein, 9 aa, Homo sapiens
  misc_feature: Table A; Target 33723; HLA-A*31:01; KLK2; ENSG00000167751; TAA
AYSEKVTEF

SEQ ID NO: 33724 - protein, 9 aa, Homo sapiens
  misc_feature: Table A; Target 33724; HLA-A*32:01; KLK2; ENSG00000167751; TAA
AYSEKVTEF

SEQ ID NO: 33725 - protein, 9 aa, Homo sapiens
  misc_feature: Table A; Target 33725; HLA-A*33:01; KLK2; ENSG00000167751; TAA
AYSEKVTEF

SEQ ID NO: 33726 - protein, 9 aa, Homo sapiens
  misc_feature: Table A; Target 33726; HLA-A*33:03; KLK2; ENSG00000167751; TAA
AYSEKVTEF

SEQ ID NO: 33727 - protein, 9 aa, Homo sapiens
  misc_feature: Table A; Target 33727; HLA-B*07:02; KLK2; ENSG00000167751; TAA
AYSEKVTEF

SEQ ID NO: 33728 - protein, 9 aa, Homo sapiens
  misc_feature: Table A; Target 33728; HLA-B*15:01; KLK2; ENSG00000167751; TAA
AYSEKVTEF

SEQ ID NO: 33729 - protein, 9 aa, Homo sapiens
  misc_feature: Table A; Target 33729; HLA-B*15:03; KLK2; ENSG00000167751; TAA
AYSEKVTEF

SEQ ID NO: 33730 - protein, 9 aa, Homo sapiens
  misc_feature: Table A; Target 33730; HLA-B*35:01; KLK2; ENSG00000167751; TAA
AYSEKVTEF

SEQ ID NO: 33731 - protein, 9 aa, Homo sapiens
  misc_feature: Table A; Target 33731; HLA-B*35:03; KLK2; ENSG00000167751; TAA
AYSEKVTEF

SEQ ID NO: 33732 - protein, 9 aa, Homo sapiens
  misc_feature: Table A; Target 33732; HLA-B*37:01; KLK2; ENSG00000167751; TAA
AYSEKVTEF

SEQ ID NO: 33733 - protein, 9 aa, Homo sapiens
  misc_feature: Table A; Target 33733; HLA-B*38:01; KLK2; ENSG00000167751; TAA
AYSEKVTEF

SEQ ID NO: 33734 - protein, 9 aa, Homo sapiens
  misc_feature: Table A; Target 33734; HLA-B*44:02; KLK2; ENSG00000167751; TAA
AYSEKVTEF

SEQ ID NO: 33735 - protein, 9 aa, Homo sapiens
  misc_feature: Table A; Target 33735; HLA-B*44:03; KLK2; ENSG00000167751; TAA
AYSEKVTEF

SEQ ID NO: 33736 - protein, 9 aa, Homo sapiens
  misc_feature: Table A; Target 33736; HLA-B*46:01; KLK2; ENSG00000167751; TAA
AYSEKVTEF

SEQ ID NO: 33737 - protein, 9 aa, Homo sapiens
  misc_feature: Table A; Target 33737; HLA-B*55:01; KLK2; ENSG00000167751; TAA
AYSEKVTEF

SEQ ID NO: 33738 - protein, 9 aa, Homo sapiens
  misc_feature: Table A; Target 33738; HLA-B*58:01; KLK2; ENSG00000167751; TAA
AYSEKVTEF

SEQ ID NO: 33739 - protein, 9 aa, Homo sapiens
  misc_feature: Table A; Target 33739; HLA-C*01:02; KLK2; ENSG00000167751; TAA
AYSEKVTEF

SEQ ID NO: 33740 - protein, 9 aa, Homo sapiens
  misc_feature: Table A; Target 33740; HLA-C*02:02; KLK2; ENSG00000167751; TAA
AYSEKVTEF

SEQ ID NO: 33741 - protein, 9 aa, Homo sapiens
  misc_feature: Table A; Target 33741; HLA-C*03:03; KLK2; ENSG00000167751; TAA
AYSEKVTEF

SEQ ID NO: 33742 - protein, 9 aa, Homo sapiens
  misc_feature: Table A; Target 33742; HLA-C*03:04; KLK2; ENSG00000167751; TAA
AYSEKVTEF

SEQ ID NO: 33743 - protein, 9 aa, Homo sapiens
  misc_feature: Table A; Target 33743; HLA-C*04:01; KLK2; ENSG00000167751; TAA
AYSEKVTEF

SEQ ID NO: 33744 - protein, 9 aa, Homo sapiens
  misc_feature: Table A; Target 33744; HLA-C*05:01; KLK2; ENSG00000167751; TAA
AYSEKVTEF

SEQ ID NO: 33745 - protein, 9 aa, Homo sapiens
  misc_feature: Table A; Target 33745; HLA-C*07:04; KLK2; ENSG00000167751; TAA
AYSEKVTEF

SEQ ID NO: 33746 - protein, 9 aa, Homo sapiens
  misc_feature: Table A; Target 33746; HLA-C*12:03; KLK2; ENSG00000167751; TAA
AYSEKVTEF

SEQ ID NO: 33747 - protein, 9 aa, Homo sapiens
  misc_feature: Table A; Target 33747; HLA-C*14:02; KLK2; ENSG00000167751; TAA
AYSEKVTEF

SEQ ID NO: 33748 - protein, 9 aa, Homo sapiens
  misc_feature: Table A; Target 33748; HLA-C*16:01; KLK2; ENSG00000167751; TAA
AYSEKVTEF

SEQ ID NO: 33749 - protein, 9 aa, Homo sapiens
  misc_feature: Table A; Target 33749; HLA-C*16:02; KLK2; ENSG00000167751; TAA
AYSEKVTEF

SEQ ID NO: 33750 - protein, 9 aa, Homo sapiens
  misc_feature: Table A; Target 33750; HLA-C*16:04; KLK2; ENSG00000167751; TAA
AYSEKVTEF

SEQ ID NO: 33751 - protein, 10 aa, Homo sapiens
  misc_feature: Table A; Target 33751; HLA-A*24:02; KLK2; ENSG00000167751; TAA
AYSEKVTEFM

SEQ ID NO: 33752 - protein, 9 aa, Homo sapiens
  misc_feature: Table A; Target 33752; HLA-B*51:01; KLK2; ENSG00000167751; TAA
CALPEKPAV

SEQ ID NO: 33753 - protein, 9 aa, Homo sapiens
  misc_feature: Table A; Target 33753; HLA-C*03:03; KLK2; ENSG00000167751; TAA
CALPEKPAV

SEQ ID NO: 33754 - protein, 9 aa, Homo sapiens
  misc_feature: Table A; Target 33754; HLA-C*03:04; KLK2; ENSG00000167751; TAA
CALPEKPAV

SEQ ID NO: 33755 - protein, 9 aa, Homo sapiens
  misc_feature: Table A; Target 33755; HLA-C*16:01; KLK2; ENSG00000167751; TAA
CALPEKPAV

SEQ ID NO: 33756 - protein, 9 aa, Homo sapiens
  misc_feature: Table A; Target 33756; HLA-C*16:02; KLK2; ENSG00000167751; TAA
CALPEKPAV

SEQ ID NO: 33757 - protein, 10 aa, Homo sapiens
  misc_feature: Table A; Target 33757; HLA-A*29:02; KLK2; ENSG00000167751; TAA
CALPEKPAVY

SEQ ID NO: 33758 - protein, 10 aa, Homo sapiens
  misc_feature: Table A; Target 33758; HLA-A*30:02; KLK2; ENSG00000167751; TAA
CALPEKPAVY

SEQ ID NO: 33759 - protein, 10 aa, Homo sapiens
  misc_feature: Table A; Target 33759; HLA-A*32:01; KLK2; ENSG00000167751; TAA
CALPEKPAVY

SEQ ID NO: 33760 - protein, 10 aa, Homo sapiens
  misc_feature: Table A; Target 33760; HLA-B*15:01; KLK2; ENSG00000167751; TAA
CALPEKPAVY

SEQ ID NO: 33761 - protein, 10 aa, Homo sapiens
  misc_feature: Table A; Target 33761; HLA-B*15:03; KLK2; ENSG00000167751; TAA
CALPEKPAVY

SEQ ID NO: 33762 - protein, 10 aa, Homo sapiens
  misc_feature: Table A; Target 33762; HLA-B*35:01; KLK2; ENSG00000167751; TAA
CALPEKPAVY

SEQ ID NO: 33763 - protein, 10 aa, Homo sapiens
  misc_feature: Table A; Target 33763; HLA-B*46:01; KLK2; ENSG00000167751; TAA
CALPEKPAVY

SEQ ID NO: 33764 - protein, 10 aa, Homo sapiens
  misc_feature: Table A; Target 33764; HLA-C*02:02; KLK2; ENSG00000167751; TAA
CALPEKPAVY

SEQ ID NO: 33765 - protein, 10 aa, Homo sapiens
  misc_feature: Table A; Target 33765; HLA-C*12:03; KLK2; ENSG00000167751; TAA
CALPEKPAVY

SEQ ID NO: 33766 - protein, 10 aa, Homo sapiens
  misc_feature: Table A; Target 33766; HLA-C*16:04; KLK2; ENSG00000167751; TAA
CALPEKPAVY

SEQ ID NO: 33767 - protein, 9 aa, Homo sapiens
  misc_feature: Table A; Target 33767; HLA-C*07:01; KLK2; ENSG00000167751; TAA
CTGAVPLIQ

SEQ ID NO: 33768 - protein, 11 aa, Homo sapiens
  misc_feature: Table A; Target 33768; HLA-A*33:03; KLK2; ENSG00000167751; TAA
CTGAVPLIQSR

SEQ ID NO: 33769 - protein, 8 aa, Homo sapiens
  misc_feature: Table A; Target 33769; HLA-B*18:01; KLK2; ENSG00000167751; TAA
DEDSSHDL

SEQ ID NO: 33770 - protein, 9 aa, Homo sapiens
  misc_feature: Table A; Target 33770; HLA-B*18:01; KLK2; ENSG00000167751; TAA
DEDSSHDLM

SEQ ID NO: 33771 - protein, 9 aa, Homo sapiens
  misc_feature: Table A; Target 33771; HLA-B*40:01; KLK2; ENSG00000167751; TAA
DEDSSHDLM

SEQ ID NO: 33772 - protein, 10 aa, Homo sapiens
  misc_feature: Table A; Target 33772; HLA-B*38:01; KLK2; ENSG00000167751; TAA
DEDSSHDLML

SEQ ID NO: 33773 - protein, 10 aa, Homo sapiens
  misc_feature: Table A; Target 33773; HLA-B*40:01; KLK2; ENSG00000167751; TAA
DEDSSHDLML

SEQ ID NO: 33774 - protein, 8 aa, Homo sapiens
  misc_feature: Table A; Target 33774; HLA-B*08:01; KLK2; ENSG00000167751; TAA
DLVLSIAL

SEQ ID NO: 33775 - protein, 8 aa, Homo sapiens
  misc_feature: Table A; Target 33775; HLA-B*18:01; KLK2; ENSG00000167751; TAA
DLVLSIAL

SEQ ID NO: 33776 - protein, 8 aa, Homo sapiens
  misc_feature: Table A; Target 33776; HLA-B*08:01; KLK2; ENSG00000167751; TAA
DTGQRVPV

SEQ ID NO: 33777 - protein, 8 aa, Homo sapiens
  misc_feature: Table A; Target 33777; HLA-A*25:01; KLK2; ENSG00000167751; TAA
DVVKVLGL

SEQ ID NO: 33778 - protein, 8 aa, Homo sapiens
  misc_feature: Table A; Target 33778; HLA-A*26:01; KLK2; ENSG00000167751; TAA
DVVKVLGL

SEQ ID NO: 33779 - protein, 8 aa, Homo sapiens
  misc_feature: Table A; Target 33779; HLA-B*08:01; KLK2; ENSG00000167751; TAA
DVVKVLGL

SEQ ID NO: 33780 - protein, 8 aa, Homo sapiens
  misc_feature: Table A; Target 33780; HLA-B*18:01; KLK2; ENSG00000167751; TAA
DVVKVLGL

SEQ ID NO: 33781 - protein, 8 aa, Homo sapiens
  misc_feature: Table A; Target 33781; HLA-B*51:01; KLK2; ENSG00000167751; TAA
DVVKVLGL

SEQ ID NO: 33782 - protein, 8 aa, Homo sapiens
  misc_feature: Table A; Target 33782; HLA-B*37:01; KLK2; ENSG00000167751; TAA
EDSSHDLM

SEQ ID NO: 33783 - protein, 9 aa, Homo sapiens
  misc_feature: Table A; Target 33783; HLA-B*38:01; KLK2; ENSG00000167751; TAA
EDSSHDLML

SEQ ID NO: 33784 - protein, 9 aa, Homo sapiens
  misc_feature: Table A; Target 33784; HLA-C*04:01; KLK2; ENSG00000167751; TAA
EDTGQRVPV

SEQ ID NO: 33785 - protein, 9 aa, Homo sapiens
  misc_feature: Table A; Target 33785; HLA-B*08:01; KLK2; ENSG00000167751; TAA
EEFLRPRSL

SEQ ID NO: 33786 - protein, 9 aa, Homo sapiens
  misc_feature: Table A; Target 33786; HLA-B*18:01; KLK2; ENSG00000167751; TAA
EEFLRPRSL

SEQ ID NO: 33787 - protein, 9 aa, Homo sapiens
  misc_feature: Table A; Target 33787; HLA-B*37:01; KLK2; ENSG00000167751; TAA
EEFLRPRSL

SEQ ID NO: 33788 - protein, 9 aa, Homo sapiens
  misc_feature: Table A; Target 33788; HLA-B*44:02; KLK2; ENSG00000167751; TAA
EEFLRPRSL

SEQ ID NO: 33789 - protein, 9 aa, Homo sapiens
  misc_feature: Table A; Target 33789; HLA-B*44:03; KLK2; ENSG00000167751; TAA
EEFLRPRSL

SEQ ID NO: 33790 - protein, 8 aa, Homo sapiens
  misc_feature: Table A; Target 33790; HLA-B*51:01; KLK2; ENSG00000167751; TAA
EPAKITDV

SEQ ID NO: 33791 - protein, 9 aa, Homo sapiens
  misc_feature: Table A; Target 33791; HLA-A*68:01; KLK2; ENSG00000167751; TAA
EPAKITDVV

SEQ ID NO: 33792 - protein, 9 aa, Homo sapiens
  misc_feature: Table A; Target 33792; HLA-A*68:02; KLK2; ENSG00000167751; TAA
EPAKITDVV

SEQ ID NO: 33793 - protein, 9 aa, Homo sapiens
  misc_feature: Table A; Target 33793; HLA-B*07:02; KLK2; ENSG00000167751; TAA
EPAKITDVV

SEQ ID NO: 33794 - protein, 9 aa, Homo sapiens
  misc_feature: Table A; Target 33794; HLA-B*35:01; KLK2; ENSG00000167751; TAA
EPAKITDVV

SEQ ID NO: 33795 - protein, 9 aa, Homo sapiens
  misc_feature: Table A; Target 33795; HLA-B*35:03; KLK2; ENSG00000167751; TAA
EPAKITDVV

SEQ ID NO: 33796 - protein, 9 aa, Homo sapiens
  misc_feature: Table A; Target 33796; HLA-B*51:01; KLK2; ENSG00000167751; TAA
EPAKITDVV

SEQ ID NO: 33797 - protein, 9 aa, Homo sapiens
  misc_feature: Table A; Target 33797; HLA-B*54:01; KLK2; ENSG00000167751; TAA
EPAKITDVV

SEQ ID NO: 33798 - protein, 9 aa, Homo sapiens
  misc_feature: Table A; Target 33798; HLA-B*55:01; KLK2; ENSG00000167751; TAA
EPAKITDVV

SEQ ID NO: 33799 - protein, 9 aa, Homo sapiens
  misc_feature: Table A; Target 33799; HLA-B*56:01; KLK2; ENSG00000167751; TAA
EPAKITDVV

SEQ ID NO: 33800 - protein, 9 aa, Homo sapiens
  misc_feature: Table A; Target 33800; HLA-C*07:02; KLK2; ENSG00000167751; TAA
EPAKITDVV

SEQ ID NO: 33801 - protein, 9 aa, Homo sapiens
  misc_feature: Table A; Target 33801; HLA-C*07:06; KLK2; ENSG00000167751; TAA
EPAKITDVV

SEQ ID NO: 33802 - protein, 10 aa, Homo sapiens
  misc_feature: Table A; Target 33802; HLA-A*33:03; KLK2; ENSG00000167751; TAA
EPAKITDVVK

SEQ ID NO: 33803 - protein, 10 aa, Homo sapiens
  misc_feature: Table A; Target 33803; HLA-A*68:01; KLK2; ENSG00000167751; TAA
EPAKITDVVK

SEQ ID NO: 33804 - protein, 10 aa, Homo sapiens
  misc_feature: Table A; Target 33804; HLA-A*68:02; KLK2; ENSG00000167751; TAA
EPAKITDVVK

SEQ ID NO: 33805 - protein, 10 aa, Homo sapiens
  misc_feature: Table A; Target 33805; HLA-B*35:01; KLK2; ENSG00000167751; TAA
EPAKITDVVK

SEQ ID NO: 33806 - protein, 10 aa, Homo sapiens
  misc_feature: Table A; Target 33806; HLA-B*35:03; KLK2; ENSG00000167751; TAA
EPAKITDVVK

SEQ ID NO: 33807 - protein, 10 aa, Homo sapiens
  misc_feature: Table A; Target 33807; HLA-B*55:01; KLK2; ENSG00000167751; TAA
EPAKITDVVK

SEQ ID NO: 33808 - protein, 10 aa, Homo sapiens
  misc_feature: Table A; Target 33808; HLA-C*07:06; KLK2; ENSG00000167751; TAA
EPAKITDVVK

SEQ ID NO: 33809 - protein, 11 aa, Homo sapiens
  misc_feature: Table A; Target 33809; HLA-A*68:01; KLK2; ENSG00000167751; TAA
EPAKITDVVKV

SEQ ID NO: 33810 - protein, 11 aa, Homo sapiens
  misc_feature: Table A; Target 33810; HLA-A*68:02; KLK2; ENSG00000167751; TAA
EPAKITDVVKV

SEQ ID NO: 33811 - protein, 9 aa, Homo sapiens
  misc_feature: Table A; Target 33811; HLA-A*33:01; KLK2; ENSG00000167751; TAA
EPEEFLRPR

SEQ ID NO: 33812 - protein, 9 aa, Homo sapiens
  misc_feature: Table A; Target 33812; HLA-A*33:03; KLK2; ENSG00000167751; TAA
EPEEFLRPR

SEQ ID NO: 33813 - protein, 10 aa, Homo sapiens
  misc_feature: Table A; Target 33813; HLA-A*02:07; KLK2; ENSG00000167751; TAA
FEPEDTGQRV

SEQ ID NO: 33814 - protein, 10 aa, Homo sapiens
  misc_feature: Table A; Target 33814; HLA-A*30:01; KLK2; ENSG00000167751; TAA
FEPEDTGQRV

SEQ ID NO: 33815 - protein, 10 aa, Homo sapiens
  misc_feature: Table A; Target 33815; HLA-B*40:01; KLK2; ENSG00000167751; TAA
FEPEDTGQRV

SEQ ID NO: 33816 - protein, 10 aa, Homo sapiens
  misc_feature: Table A; Target 33816; HLA-B*49:01; KLK2; ENSG00000167751; TAA
FEPEDTGQRV

SEQ ID NO: 33817 - protein, 11 aa, Homo sapiens
  misc_feature: Table A; Target 33817; HLA-A*30:01; KLK2; ENSG00000167751; TAA
FEPEDTGQRVP

SEQ ID NO: 33818 - protein, 10 aa, Homo sapiens
  misc_feature: Table A; Target 33818; HLA-A*02:03; KLK2; ENSG00000167751; TAA
FLRPRSLQCV

SEQ ID NO: 33819 - protein, 8 aa, Homo sapiens
  misc_feature: Table A; Target 33819; HLA-B*08:01; KLK2; ENSG00000167751; TAA
FPHPLYNM

SEQ ID NO: 33820 - protein, 8 aa, Homo sapiens
  misc_feature: Table A; Target 33820; HLA-B*35:01; KLK2; ENSG00000167751; TAA
FPHPLYNM

SEQ ID NO: 33821 - protein, 8 aa, Homo sapiens
  misc_feature: Table A; Target 33821; HLA-B*35:03; KLK2; ENSG00000167751; TAA
FPHPLYNM

SEQ ID NO: 33822 - protein, 8 aa, Homo sapiens
  misc_feature: Table A; Target 33822; HLA-B*51:01; KLK2; ENSG00000167751; TAA
FPHPLYNM

SEQ ID NO: 33823 - protein, 8 aa, Homo sapiens
  misc_feature: Table A; Target 33823; HLA-B*54:01; KLK2; ENSG00000167751; TAA
FPHPLYNM

SEQ ID NO: 33824 - protein, 8 aa, Homo sapiens
  misc_feature: Table A; Target 33824; HLA-B*56:01; KLK2; ENSG00000167751; TAA
FPHPLYNM

SEQ ID NO: 33825 - protein, 9 aa, Homo sapiens
  misc_feature: Table A; Target 33825; HLA-B*54:01; KLK2; ENSG00000167751; TAA
FPHPLYNMS

SEQ ID NO: 33826 - protein, 10 aa, Homo sapiens
  misc_feature: Table A; Target 33826; HLA-B*35:01; KLK2; ENSG00000167751; TAA
FPHPLYNMSL

SEQ ID NO: 33827 - protein, 10 aa, Homo sapiens
  misc_feature: Table A; Target 33827; HLA-B*35:03; KLK2; ENSG00000167751; TAA
FPHPLYNMSL

SEQ ID NO: 33828 - protein, 10 aa, Homo sapiens
  misc_feature: Table A; Target 33828; HLA-B*54:01; KLK2; ENSG00000167751; TAA
FPHPLYNMSL

SEQ ID NO: 33829 - protein, 10 aa, Homo sapiens
  misc_feature: Table A; Target 33829; HLA-B*56:01; KLK2; ENSG00000167751; TAA
FPHPLYNMSL

SEQ ID NO: 33830 - protein, 9 aa, Homo sapiens
  misc_feature: Table A; Target 33830; HLA-A*11:01; KLK2; ENSG00000167751; TAA
GAVPLIQSR

SEQ ID NO: 33831 - protein, 9 aa, Homo sapiens
  misc_feature: Table A; Target 33831; HLA-A*26:01; KLK2; ENSG00000167751; TAA
GAVPLIQSR

SEQ ID NO: 33832 - protein, 9 aa, Homo sapiens
  misc_feature: Table A; Target 33832; HLA-A*31:01; KLK2; ENSG00000167751; TAA
GAVPLIQSR

SEQ ID NO: 33833 - protein, 9 aa, Homo sapiens
  misc_feature: Table A; Target 33833; HLA-A*33:03; KLK2; ENSG00000167751; TAA
GAVPLIQSR

SEQ ID NO: 33834 - protein, 9 aa, Homo sapiens
  misc_feature: Table A; Target 33834; HLA-A*68:01; KLK2; ENSG00000167751; TAA
GAVPLIQSR

SEQ ID NO: 33835 - protein, 9 aa, Homo sapiens
  misc_feature: Table A; Target 33835; HLA-B*57:01; KLK2; ENSG00000167751; TAA
GAVPLIQSR

SEQ ID NO: 33836 - protein, 9 aa, Homo sapiens
  misc_feature: Table A; Target 33836; HLA-B*58:01; KLK2; ENSG00000167751; TAA
GAVPLIQSR

SEQ ID NO: 33837 - protein, 9 aa, Homo sapiens
  misc_feature: Table A; Target 33837; HLA-C*02:02; KLK2; ENSG00000167751; TAA
GAVPLIQSR

SEQ ID NO: 33838 - protein, 9 aa, Homo sapiens
  misc_feature: Table A; Target 33838; HLA-C*07:06; KLK2; ENSG00000167751; TAA
GAVPLIQSR

SEQ ID NO: 33839 - protein, 9 aa, Homo sapiens
  misc_feature: Table A; Target 33839; HLA-B*07:02; KLK2; ENSG00000167751; TAA
GCTGAVPLI

SEQ ID NO: 33840 - protein, 9 aa, Homo sapiens
  misc_feature: Table A; Target 33840; HLA-B*13:02; KLK2; ENSG00000167751; TAA
GCTGAVPLI

SEQ ID NO: 33841 - protein, 9 aa, Homo sapiens
  misc_feature: Table A; Target 33841; HLA-B*55:01; KLK2; ENSG00000167751; TAA
GCTGAVPLI

SEQ ID NO: 33842 - protein, 9 aa, Homo sapiens
  misc_feature: Table A; Target 33842; HLA-C*06:02; KLK2; ENSG00000167751; TAA
GCTGAVPLI

SEQ ID NO: 33843 - protein, 9 aa, Homo sapiens
  misc_feature: Table A; Target 33843; HLA-C*12:03; KLK2; ENSG00000167751; TAA
GCTGAVPLI

SEQ ID NO: 33844 - protein, 9 aa, Homo sapiens
  misc_feature: Table A; Target 33844; HLA-C*16:02; KLK2; ENSG00000167751; TAA
GCTGAVPLI

SEQ ID NO: 33845 - protein, 10 aa, Homo sapiens
  misc_feature: Table A; Target 33845; HLA-C*07:01; KLK2; ENSG00000167751; TAA
GCTGAVPLIQ

SEQ ID NO: 33846 - protein, 8 aa, Homo sapiens
  misc_feature: Table A; Target 33846; HLA-C*05:01; KLK2; ENSG00000167751; TAA
GGDSGGPL

SEQ ID NO: 33847 - protein, 9 aa, Homo sapiens
  misc_feature: Table A; Target 33847; HLA-B*39:01; KLK2; ENSG00000167751; TAA
GGDSGGPLV

SEQ ID NO: 33848 - protein, 9 aa, Homo sapiens
  misc_feature: Table A; Target 33848; HLA-C*05:01; KLK2; ENSG00000167751; TAA
GGDSGGPLV

SEQ ID NO: 33849 - protein, 9 aa, Homo sapiens
  misc_feature: Table A; Target 33849; HLA-A*02:01; KLK2; ENSG00000167751; TAA
GLPTQEPAL

SEQ ID NO: 33850 - protein, 9 aa, Homo sapiens
  misc_feature: Table A; Target 33850; HLA-A*02:03; KLK2; ENSG00000167751; TAA
GLPTQEPAL

SEQ ID NO: 33851 - protein, 9 aa, Homo sapiens
  misc_feature: Table A; Target 33851; HLA-A*02:04; KLK2; ENSG00000167751; TAA
GLPTQEPAL

SEQ ID NO: 33852 - protein, 9 aa, Homo sapiens
  misc_feature: Table A; Target 33852; HLA-A*02:07; KLK2; ENSG00000167751; TAA
GLPTQEPAL

SEQ ID NO: 33853 - protein, 9 aa, Homo sapiens
  misc_feature: Table A; Target 33853; HLA-A*23:01; KLK2; ENSG00000167751; TAA
GLPTQEPAL

SEQ ID NO: 33854 - protein, 9 aa, Homo sapiens
  misc_feature: Table A; Target 33854; HLA-A*24:02; KLK2; ENSG00000167751; TAA
GLPTQEPAL

SEQ ID NO: 33855 - protein, 9 aa, Homo sapiens
  misc_feature: Table A; Target 33855; HLA-B*13:02; KLK2; ENSG00000167751; TAA
GLPTQEPAL

SEQ ID NO: 33856 - protein, 9 aa, Homo sapiens
  misc_feature: Table A; Target 33856; HLA-B*15:01; KLK2; ENSG00000167751; TAA
GLPTQEPAL

SEQ ID NO: 33857 - protein, 9 aa, Homo sapiens
  misc_feature: Table A; Target 33857; HLA-B*15:03; KLK2; ENSG00000167751; TAA
GLPTQEPAL

SEQ ID NO: 33858 - protein, 9 aa, Homo sapiens
  misc_feature: Table A; Target 33858; HLA-B*39:01; KLK2; ENSG00000167751; TAA
GLPTQEPAL

SEQ ID NO: 33859 - protein, 9 aa, Homo sapiens
  misc_feature: Table A; Target 33859; HLA-B*40:01; KLK2; ENSG00000167751; TAA
GLPTQEPAL

SEQ ID NO: 33860 - protein, 9 aa, Homo sapiens
  misc_feature: Table A; Target 33860; HLA-B*55:01; KLK2; ENSG00000167751; TAA
GLPTQEPAL

SEQ ID NO: 33861 - protein, 9 aa, Homo sapiens
  misc_feature: Table A; Target 33861; HLA-C*01:02; KLK2; ENSG00000167751; TAA
GLPTQEPAL

SEQ ID NO: 33862 - protein, 9 aa, Homo sapiens
  misc_feature: Table A; Target 33862; HLA-C*14:02; KLK2; ENSG00000167751; TAA
GLPTQEPAL

SEQ ID NO: 33863 - protein, 10 aa, Homo sapiens
  misc_feature: Table A; Target 33863; HLA-A*02:01; KLK2; ENSG00000167751; TAA
GLWTGGKDTC

SEQ ID NO: 33864 - protein, 10 aa, Homo sapiens
  misc_feature: Table A; Target 33864; HLA-B*55:01; KLK2; ENSG00000167751; TAA
GLWTGGKDTC

SEQ ID NO: 33865 - protein, 8 aa, Homo sapiens
  misc_feature: Table A; Target 33865; HLA-B*15:01; KLK2; ENSG00000167751; TAA
GQRVPVSH

SEQ ID NO: 33866 - protein, 8 aa, Homo sapiens
  misc_feature: Table A; Target 33866; HLA-B*15:03; KLK2; ENSG00000167751; TAA
GQRVPVSH

SEQ ID NO: 33867 - protein, 10 aa, Homo sapiens
  misc_feature: Table A; Target 33867; HLA-A*30:02; KLK2; ENSG00000167751; TAA
GQRVPVSHSF

SEQ ID NO: 33868 - protein, 10 aa, Homo sapiens
  misc_feature: Table A; Target 33868; HLA-A*32:01; KLK2; ENSG00000167751; TAA
GQRVPVSHSF

SEQ ID NO: 33869 - protein, 10 aa, Homo sapiens
  misc_feature: Table A; Target 33869; HLA-B*15:01; KLK2; ENSG00000167751; TAA
GQRVPVSHSF

SEQ ID NO: 33870 - protein, 10 aa, Homo sapiens
  misc_feature: Table A; Target 33870; HLA-B*15:03; KLK2; ENSG00000167751; TAA
GQRVPVSHSF

SEQ ID NO: 33871 - protein, 10 aa, Homo sapiens
  misc_feature: Table A; Target 33871; HLA-A*11:01; KLK2; ENSG00000167751; TAA
GSIEPEEFLR

SEQ ID NO: 33872 - protein, 10 aa, Homo sapiens
  misc_feature: Table A; Target 33872; HLA-C*07:06; KLK2; ENSG00000167751; TAA
GSIEPEEFLR

SEQ ID NO: 33873 - protein, 10 aa, Homo sapiens
  misc_feature: Table A; Target 33873; HLA-B*57:01; KLK2; ENSG00000167751; TAA
HCLKKNSQVW

SEQ ID NO: 33874 - protein, 9 aa, Homo sapiens
  misc_feature: Table A; Target 33874; HLA-B*54:01; KLK2; ENSG00000167751; TAA
HLLSNDMCA

SEQ ID NO: 33875 - protein, 10 aa, Homo sapiens
  misc_feature: Table A; Target 33875; HLA-A*33:01; KLK2; ENSG00000167751; TAA
HLLSNDMCAR

SEQ ID NO: 33876 - protein, 8 aa, Homo sapiens
  misc_feature: Table A; Target 33876; HLA-B*35:03; KLK2; ENSG00000167751; TAA
HPLYNMSL

SEQ ID NO: 33877 - protein, 9 aa, Homo sapiens
  misc_feature: Table A; Target 33877; HLA-B*35:03; KLK2; ENSG00000167751; TAA
HPLYNMSLL

SEQ ID NO: 33878 - protein, 10 aa, Homo sapiens
  misc_feature: Table A; Target 33878; HLA-A*68:02; KLK2; ENSG00000167751; TAA
HSFPHPLYNM

SEQ ID NO: 33879 - protein, 10 aa, Homo sapiens
  misc_feature: Table A; Target 33879; HLA-B*57:01; KLK2; ENSG00000167751; TAA
HSFPHPLYNM

SEQ ID NO: 33880 - protein, 9 aa, Homo sapiens
  misc_feature: Table A; Target 33880; HLA-A*02:01; KLK2; ENSG00000167751; TAA
HSQPWQVAV

SEQ ID NO: 33881 - protein, 9 aa, Homo sapiens
  misc_feature: Table A; Target 33881; HLA-A*02:04; KLK2; ENSG00000167751; TAA
HSQPWQVAV

SEQ ID NO: 33882 - protein, 9 aa, Homo sapiens
  misc_feature: Table A; Target 33882; HLA-A*02:07; KLK2; ENSG00000167751; TAA
HSQPWQVAV

SEQ ID NO: 33883 - protein, 9 aa, Homo sapiens
  misc_feature: Table A; Target 33883; HLA-A*68:02; KLK2; ENSG00000167751; TAA
HSQPWQVAV

SEQ ID NO: 33884 - protein, 9 aa, Homo sapiens
  misc_feature: Table A; Target 33884; HLA-B*13:02; KLK2; ENSG00000167751; TAA
HSQPWQVAV

SEQ ID NO: 33885 - protein, 9 aa, Homo sapiens
  misc_feature: Table A; Target 33885; HLA-B*54:01; KLK2; ENSG00000167751; TAA
HSQPWQVAV

SEQ ID NO: 33886 - protein, 9 aa, Homo sapiens
  misc_feature: Table A; Target 33886; HLA-C*16:02; KLK2; ENSG00000167751; TAA
HSQPWQVAV

SEQ ID NO: 33887 - protein, 10 aa, Homo sapiens
  misc_feature: Table A; Target 33887; HLA-A*01:01; KLK2; ENSG00000167751; TAA
HSQPWQVAVY

SEQ ID NO: 33888 - protein, 10 aa, Homo sapiens
  misc_feature: Table A; Target 33888; HLA-A*25:01; KLK2; ENSG00000167751; TAA
HSQPWQVAVY

SEQ ID NO: 33889 - protein, 10 aa, Homo sapiens
  misc_feature: Table A; Target 33889; HLA-A*26:01; KLK2; ENSG00000167751; TAA
HSQPWQVAVY

SEQ ID NO: 33890 - protein, 10 aa, Homo sapiens
  misc_feature: Table A; Target 33890; HLA-A*29:02; KLK2; ENSG00000167751; TAA
HSQPWQVAVY

SEQ ID NO: 33891 - protein, 10 aa, Homo sapiens
  misc_feature: Table A; Target 33891; HLA-A*30:02; KLK2; ENSG00000167751; TAA
HSQPWQVAVY

SEQ ID NO: 33892 - protein, 10 aa, Homo sapiens
  misc_feature: Table A; Target 33892; HLA-B*57:01; KLK2; ENSG00000167751; TAA
HSQPWQVAVY

SEQ ID NO: 33893 - protein, 10 aa, Homo sapiens
  misc_feature: Table A; Target 33893; HLA-C*07:01; KLK2; ENSG00000167751; TAA
HSQPWQVAVY

SEQ ID NO: 33894 - protein, 10 aa, Homo sapiens
  misc_feature: Table A; Target 33894; HLA-C*07:04; KLK2; ENSG00000167751; TAA
HSQPWQVAVY

SEQ ID NO: 33895 - protein, 9 aa, Homo sapiens
  misc_feature: Table A; Target 33895; HLA-C*03:04; KLK2; ENSG00000167751; TAA
IALSVGCTG

SEQ ID NO: 33896 - protein, 9 aa, Homo sapiens
  misc_feature: Table A; Target 33896; HLA-B*49:01; KLK2; ENSG00000167751; TAA
IEPEEFLRP

SEQ ID NO: 33897 - protein, 9 aa, Homo sapiens
  misc_feature: Table A; Target 33897; HLA-A*25:01; KLK2; ENSG00000167751; TAA
IQSRIVGGW

SEQ ID NO: 33898 - protein, 9 aa, Homo sapiens
  misc_feature: Table A; Target 33898; HLA-A*32:01; KLK2; ENSG00000167751; TAA
IQSRIVGGW

SEQ ID NO: 33899 - protein, 9 aa, Homo sapiens
  misc_feature: Table A; Target 33899; HLA-B*44:02; KLK2; ENSG00000167751; TAA
IQSRIVGGW

SEQ ID NO: 33900 - protein, 9 aa, Homo sapiens
  misc_feature: Table A; Target 33900; HLA-B*44:03; KLK2; ENSG00000167751; TAA
IQSRIVGGW

SEQ ID NO: 33901 - protein, 9 aa, Homo sapiens
  misc_feature: Table A; Target 33901; HLA-B*57:01; KLK2; ENSG00000167751; TAA
IQSRIVGGW

SEQ ID NO: 33902 - protein, 9 aa, Homo sapiens
  misc_feature: Table A; Target 33902; HLA-B*58:01; KLK2; ENSG00000167751; TAA
IQSRIVGGW

SEQ ID NO: 33903 - protein, 9 aa, Homo sapiens
  misc_feature: Table A; Target 33903; HLA-C*16:04; KLK2; ENSG00000167751; TAA
IQSRIVGGW

SEQ ID NO: 33904 - protein, 8 aa, Homo sapiens
  misc_feature: Table A; Target 33904; HLA-A*01:01; KLK2; ENSG00000167751; TAA
ITDVVKVL

SEQ ID NO: 33905 - protein, 8 aa, Homo sapiens
  misc_feature: Table A; Target 33905; HLA-C*03:03; KLK2; ENSG00000167751; TAA
ITDVVKVL

SEQ ID NO: 33906 - protein, 8 aa, Homo sapiens
  misc_feature: Table A; Target 33906; HLA-C*03:04; KLK2; ENSG00000167751; TAA
ITDVVKVL

SEQ ID NO: 33907 - protein, 8 aa, Homo sapiens
  misc_feature: Table A; Target 33907; HLA-C*04:01; KLK2; ENSG00000167751; TAA
ITDVVKVL

SEQ ID NO: 33908 - protein, 8 aa, Homo sapiens
  misc_feature: Table A; Target 33908; HLA-C*05:01; KLK2; ENSG00000167751; TAA
ITDVVKVL

SEQ ID NO: 33909 - protein, 8 aa, Homo sapiens
  misc_feature: Table A; Target 33909; HLA-C*07:04; KLK2; ENSG00000167751; TAA
ITDVVKVL

SEQ ID NO: 33910 - protein, 8 aa, Homo sapiens
  misc_feature: Table A; Target 33910; HLA-C*12:03; KLK2; ENSG00000167751; TAA
ITDVVKVL

SEQ ID NO: 33911 - protein, 8 aa, Homo sapiens
  misc_feature: Table A; Target 33911; HLA-C*16:02; KLK2; ENSG00000167751; TAA
ITDVVKVL

SEQ ID NO: 33912 - protein, 10 aa, Homo sapiens
  misc_feature: Table A; Target 33912; HLA-A*02:07; KLK2; ENSG00000167751; TAA
ITDVVKVLGL

SEQ ID NO: 33913 - protein, 9 aa, Homo sapiens
  misc_feature: Table A; Target 33913; HLA-B*27:02; KLK2; ENSG00000167751; TAA
IVGGWECEK

SEQ ID NO: 33914 - protein, 8 aa, Homo sapiens
  misc_feature: Table A; Target 33914; HLA-A*02:01; KLK2; ENSG00000167751; TAA
KITDVVKV

SEQ ID NO: 33915 - protein, 8 aa, Homo sapiens
  misc_feature: Table A; Target 33915; HLA-A*02:03; KLK2; ENSG00000167751; TAA
KITDVVKV

SEQ ID NO: 33916 - protein, 8 aa, Homo sapiens
  misc_feature: Table A; Target 33916; HLA-A*02:04; KLK2; ENSG00000167751; TAA
KITDVVKV

SEQ ID NO: 33917 - protein, 8 aa, Homo sapiens
  misc_feature: Table A; Target 33917; HLA-B*13:02; KLK2; ENSG00000167751; TAA
KITDVVKV

SEQ ID NO: 33918 - protein, 8 aa, Homo sapiens
  misc_feature: Table A; Target 33918; HLA-B*37:01; KLK2; ENSG00000167751; TAA
KITDVVKV

SEQ ID NO: 33919 - protein, 8 aa, Homo sapiens
  misc_feature: Table A; Target 33919; HLA-B*55:01; KLK2; ENSG00000167751; TAA
KITDVVKV

SEQ ID NO: 33920 - protein, 8 aa, Homo sapiens
  misc_feature: Table A; Target 33920; HLA-C*16:02; KLK2; ENSG00000167751; TAA
KITDVVKV

SEQ ID NO: 33921 - protein, 9 aa, Homo sapiens
  misc_feature: Table A; Target 33921; HLA-A*02:01; KLK2; ENSG00000167751; TAA
KITDVVKVL

SEQ ID NO: 33922 - protein, 9 aa, Homo sapiens
  misc_feature: Table A; Target 33922; HLA-A*02:03; KLK2; ENSG00000167751; TAA
KITDVVKVL

SEQ ID NO: 33923 - protein, 9 aa, Homo sapiens
  misc_feature: Table A; Target 33923; HLA-A*02:04; KLK2; ENSG00000167751; TAA
KITDVVKVL

SEQ ID NO: 33924 - protein, 9 aa, Homo sapiens
  misc_feature: Table A; Target 33924; HLA-A*02:07; KLK2; ENSG00000167751; TAA
KITDVVKVL

SEQ ID NO: 33925 - protein, 9 aa, Homo sapiens
  misc_feature: Table A; Target 33925; HLA-A*03:01; KLK2; ENSG00000167751; TAA
KITDVVKVL

SEQ ID NO: 33926 - protein, 9 aa, Homo sapiens
  misc_feature: Table A; Target 33926; HLA-A*03:02; KLK2; ENSG00000167751; TAA
KITDVVKVL

SEQ ID NO: 33927 - protein, 9 aa, Homo sapiens
  misc_feature: Table A; Target 33927; HLA-A*23:01; KLK2; ENSG00000167751; TAA
KITDVVKVL

SEQ ID NO: 33928 - protein, 9 aa, Homo sapiens
  misc_feature: Table A; Target 33928; HLA-A*24:02; KLK2; ENSG00000167751; TAA
KITDVVKVL

SEQ ID NO: 33929 - protein, 9 aa, Homo sapiens
  misc_feature: Table A; Target 33929; HLA-A*25:01; KLK2; ENSG00000167751; TAA
KITDVVKVL

SEQ ID NO: 33930 - protein, 9 aa, Homo sapiens
  misc_feature: Table A; Target 33930; HLA-A*30:01; KLK2; ENSG00000167751; TAA
KITDVVKVL

SEQ ID NO: 33931 - protein, 9 aa, Homo sapiens
  misc_feature: Table A; Target 33931; HLA-A*31:01; KLK2; ENSG00000167751; TAA
KITDVVKVL

SEQ ID NO: 33932 - protein, 9 aa, Homo sapiens
  misc_feature: Table A; Target 33932; HLA-A*32:01; KLK2; ENSG00000167751; TAA
KITDVVKVL

SEQ ID NO: 33933 - protein, 9 aa, Homo sapiens
  misc_feature: Table A; Target 33933; HLA-A*68:02; KLK2; ENSG00000167751; TAA
KITDVVKVL

SEQ ID NO: 33934 - protein, 9 aa, Homo sapiens
  misc_feature: Table A; Target 33934; HLA-B*15:01; KLK2; ENSG00000167751; TAA
KITDVVKVL

SEQ ID NO: 33935 - protein, 9 aa, Homo sapiens
  misc_feature: Table A; Target 33935; HLA-B*15:03; KLK2; ENSG00000167751; TAA
KITDVVKVL

SEQ ID NO: 33936 - protein, 9 aa, Homo sapiens
  misc_feature: Table A; Target 33936; HLA-B*27:05; KLK2; ENSG00000167751; TAA
KITDVVKVL

SEQ ID NO: 33937 - protein, 9 aa, Homo sapiens
  misc_feature: Table A; Target 33937; HLA-B*40:01; KLK2; ENSG00000167751; TAA
KITDVVKVL

SEQ ID NO: 33938 - protein, 9 aa, Homo sapiens
  misc_feature: Table A; Target 33938; HLA-B*40:02; KLK2; ENSG00000167751; TAA
KITDVVKVL

SEQ ID NO: 33939 - protein, 9 aa, Homo sapiens
  misc_feature: Table A; Target 33939; HLA-B*44:03; KLK2; ENSG00000167751; TAA
KITDVVKVL

SEQ ID NO: 33940 - protein, 9 aa, Homo sapiens
  misc_feature: Table A; Target 33940; HLA-B*46:01; KLK2; ENSG00000167751; TAA
KITDVVKVL

SEQ ID NO: 33941 - protein, 9 aa, Homo sapiens
  misc_feature: Table A; Target 33941; HLA-B*55:01; KLK2; ENSG00000167751; TAA
KITDVVKVL

SEQ ID NO: 33942 - protein, 9 aa, Homo sapiens
  misc_feature: Table A; Target 33942; HLA-B*57:01; KLK2; ENSG00000167751; TAA
KITDVVKVL

SEQ ID NO: 33943 - protein, 9 aa, Homo sapiens
  misc_feature: Table A; Target 33943; HLA-B*58:01; KLK2; ENSG00000167751; TAA
KITDVVKVL

SEQ ID NO: 33944 - protein, 9 aa, Homo sapiens
  misc_feature: Table A; Target 33944; HLA-C*01:02; KLK2; ENSG00000167751; TAA
KITDVVKVL

SEQ ID NO: 33945 - protein, 9 aa, Homo sapiens
  misc_feature: Table A; Target 33945; HLA-C*02:02; KLK2; ENSG00000167751; TAA
KITDVVKVL

SEQ ID NO: 33946 - protein, 9 aa, Homo sapiens
  misc_feature: Table A; Target 33946; HLA-C*03:03; KLK2; ENSG00000167751; TAA
KITDVVKVL

SEQ ID NO: 33947 - protein, 9 aa, Homo sapiens
  misc_feature: Table A; Target 33947; HLA-C*03:04; KLK2; ENSG00000167751; TAA
KITDVVKVL

SEQ ID NO: 33948 - protein, 9 aa, Homo sapiens
  misc_feature: Table A; Target 33948; HLA-C*06:02; KLK2; ENSG00000167751; TAA
KITDVVKVL

SEQ ID NO: 33949 - protein, 9 aa, Homo sapiens
  misc_feature: Table A; Target 33949; HLA-C*07:04; KLK2; ENSG00000167751; TAA
KITDVVKVL

SEQ ID NO: 33950 - protein, 9 aa, Homo sapiens
  misc_feature: Table A; Target 33950; HLA-C*12:03; KLK2; ENSG00000167751; TAA
KITDVVKVL

SEQ ID NO: 33951 - protein, 9 aa, Homo sapiens
  misc_feature: Table A; Target 33951; HLA-C*16:01; KLK2; ENSG00000167751; TAA
KITDVVKVL

SEQ ID NO: 33952 - protein, 9 aa, Homo sapiens
  misc_feature: Table A; Target 33952; HLA-C*16:02; KLK2; ENSG00000167751; TAA
KITDVVKVL

SEQ ID NO: 33953 - protein, 9 aa, Homo sapiens
  misc_feature: Table A; Target 33953; HLA-C*16:04; KLK2; ENSG00000167751; TAA
KITDVVKVL

SEQ ID NO: 33954 - protein, 9 aa, Homo sapiens
  misc_feature: Table A; Target 33954; HLA-A*31:01; KLK2; ENSG00000167751; TAA
KNSQVWLGR

SEQ ID NO: 33955 - protein, 8 aa, Homo sapiens
  misc_feature: Table A; Target 33955; HLA-B*56:01; KLK2; ENSG00000167751; TAA
KPAVYTKV

SEQ ID NO: 33956 - protein, 9 aa, Homo sapiens
  misc_feature: Table A; Target 33956; HLA-B*07:02; KLK2; ENSG00000167751; TAA
KPAVYTKVV

SEQ ID NO: 33957 - protein, 9 aa, Homo sapiens
  misc_feature: Table A; Target 33957; HLA-B*55:01; KLK2; ENSG00000167751; TAA
KPAVYTKVV

SEQ ID NO: 33958 - protein, 9 aa, Homo sapiens
  misc_feature: Table A; Target 33958; HLA-B*56:01; KLK2; ENSG00000167751; TAA
KPAVYTKVV

SEQ ID NO: 33959 - protein, 9 aa, Homo sapiens
  misc_feature: Table A; Target 33959; HLA-C*07:02; KLK2; ENSG00000167751; TAA
KPAVYTKVV

SEQ ID NO: 33960 - protein, 9 aa, Homo sapiens
  misc_feature: Table A; Target 33960; HLA-B*13:02; KLK2; ENSG00000167751; TAA
KVTEFMLCA

SEQ ID NO: 33961 - protein, 9 aa, Homo sapiens
  misc_feature: Table A; Target 33961; HLA-B*54:01; KLK2; ENSG00000167751; TAA
KVTEFMLCA

SEQ ID NO: 33962 - protein, 9 aa, Homo sapiens
  misc_feature: Table A; Target 33962; HLA-B*56:01; KLK2; ENSG00000167751; TAA
KVTEFMLCA

SEQ ID NO: 33963 - protein, 9 aa, Homo sapiens
  misc_feature: Table A; Target 33963; HLA-B*54:01; KLK2; ENSG00000167751; TAA
LGLPTQEPA

SEQ ID NO: 33964 - protein, 10 aa, Homo sapiens
  misc_feature: Table A; Target 33964; HLA-C*03:03; KLK2; ENSG00000167751; TAA
LGLPTQEPAL

SEQ ID NO: 33965 - protein, 10 aa, Homo sapiens
  misc_feature: Table A; Target 33965; HLA-A*02:03; KLK2; ENSG00000167751; TAA
LLRLSEPAKI

SEQ ID NO: 33966 - protein, 8 aa, Homo sapiens
  misc_feature: Table A; Target 33966; HLA-A*01:01; KLK2; ENSG00000167751; TAA
LPEKPAVY

SEQ ID NO: 33967 - protein, 8 aa, Homo sapiens
  misc_feature: Table A; Target 33967; HLA-B*35:01; KLK2; ENSG00000167751; TAA
LPEKPAVY

SEQ ID NO: 33968 - protein, 8 aa, Homo sapiens
  misc_feature: Table A; Target 33968; HLA-B*35:03; KLK2; ENSG00000167751; TAA
LPEKPAVY

SEQ ID NO: 33969 - protein, 8 aa, Homo sapiens
  misc_feature: Table A; Target 33969; HLA-B*55:01; KLK2; ENSG00000167751; TAA
LPEKPAVY

SEQ ID NO: 33970 - protein, 8 aa, Homo sapiens
  misc_feature: Table A; Target 33970; HLA-C*03:03; KLK2; ENSG00000167751; TAA
LPEKPAVY

SEQ ID NO: 33971 - protein, 10 aa, Homo sapiens
  misc_feature: Table A; Target 33971; HLA-B*27:02; KLK2; ENSG00000167751; TAA
LPEKPAVYTK

SEQ ID NO: 33972 - protein, 10 aa, Homo sapiens
  misc_feature: Table A; Target 33972; HLA-A*30:02; KLK2; ENSG00000167751; TAA
LSNDMCARAY

SEQ ID NO: 33973 - protein, 10 aa, Homo sapiens
  misc_feature: Table A; Target 33973; HLA-B*07:02; KLK2; ENSG00000167751; TAA
LSNDMCARAY

SEQ ID NO: 33974 - protein, 10 aa, Homo sapiens
  misc_feature: Table A; Target 33974; HLA-B*46:01; KLK2; ENSG00000167751; TAA
LSNDMCARAY

SEQ ID NO: 33975 - protein, 10 aa, Homo sapiens
  misc_feature: Table A; Target 33975; HLA-C*07:01; KLK2; ENSG00000167751; TAA
LSNDMCARAY

SEQ ID NO: 33976 - protein, 10 aa, Homo sapiens
  misc_feature: Table A; Target 33976; HLA-C*16:01; KLK2; ENSG00000167751; TAA
LSNDMCARAY

SEQ ID NO: 33977 - protein, 10 aa, Homo sapiens
  misc_feature: Table A; Target 33977; HLA-C*16:02; KLK2; ENSG00000167751; TAA
LSNDMCARAY

SEQ ID NO: 33978 - protein, 9 aa, Homo sapiens
  misc_feature: Table A; Target 33978; HLA-A*02:01; KLK2; ENSG00000167751; TAA
LVLSIALSV

SEQ ID NO: 33979 - protein, 9 aa, Homo sapiens
  misc_feature: Table A; Target 33979; HLA-A*02:07; KLK2; ENSG00000167751; TAA
LVLSIALSV

SEQ ID NO: 33980 - protein, 9 aa, Homo sapiens
  misc_feature: Table A; Target 33980; HLA-A*68:02; KLK2; ENSG00000167751; TAA
LVLSIALSV

SEQ ID NO: 33981 - protein, 9 aa, Homo sapiens
  misc_feature: Table A; Target 33981; HLA-B*13:02; KLK2; ENSG00000167751; TAA
LVLSIALSV

SEQ ID NO: 33982 - protein, 9 aa, Homo sapiens
  misc_feature: Table A; Target 33982; HLA-B*08:01; KLK2; ENSG00000167751; TAA
MSLLKHQSL

SEQ ID NO: 33983 - protein, 9 aa, Homo sapiens
  misc_feature: Table A; Target 33983; HLA-C*16:01; KLK2; ENSG00000167751; TAA
MSLLKHQSL

SEQ ID NO: 33984 - protein, 8 aa, Homo sapiens
  misc_feature: Table A; Target 33984; HLA-B*18:01; KLK2; ENSG00000167751; TAA
NDMCARAY

SEQ ID NO: 33985 - protein, 8 aa, Homo sapiens
  misc_feature: Table A; Target 33985; HLA-B*37:01; KLK2; ENSG00000167751; TAA
NDMCARAY

SEQ ID NO: 33986 - protein, 8 aa, Homo sapiens
  misc_feature: Table A; Target 33986; HLA-C*07:01; KLK2; ENSG00000167751; TAA
NDMCARAY

SEQ ID NO: 33987 - protein, 11 aa, Homo sapiens
  misc_feature: Table A; Target 33987; HLA-A*29:02; KLK2; ENSG00000167751; TAA
NLFEPEDTGQR

SEQ ID NO: 33988 - protein, 11 aa, Homo sapiens
  misc_feature: Table A; Target 33988; HLA-A*33:01; KLK2; ENSG00000167751; TAA
NLFEPEDTGQR

SEQ ID NO: 33989 - protein, 11 aa, Homo sapiens
  misc_feature: Table A; Target 33989; HLA-A*33:03; KLK2; ENSG00000167751; TAA
NLFEPEDTGQR

SEQ ID NO: 33990 - protein, 11 aa, Homo sapiens
  misc_feature: Table A; Target 33990; HLA-A*68:01; KLK2; ENSG00000167751; TAA
NLFEPEDTGQR

SEQ ID NO: 33991 - protein, 11 aa, Homo sapiens
  misc_feature: Table A; Target 33991; HLA-A*68:02; KLK2; ENSG00000167751; TAA
NLFEPEDTGQR

SEQ ID NO: 33992 - protein, 11 aa, Homo sapiens
  misc_feature: Table A; Target 33992; HLA-B*27:05; KLK2; ENSG00000167751; TAA
NLFEPEDTGQR

SEQ ID NO: 33993 - protein, 11 aa, Homo sapiens
  misc_feature: Table A; Target 33993; HLA-C*07:06; KLK2; ENSG00000167751; TAA
NLFEPEDTGQR

SEQ ID NO: 33994 - protein, 10 aa, Homo sapiens
  misc_feature: Table A; Target 33994; HLA-B*08:01; KLK2; ENSG00000167751; TAA
NMSLLKHQSL

SEQ ID NO: 33995 - protein, 10 aa, Homo sapiens
  misc_feature: Table A; Target 33995; HLA-B*49:01; KLK2; ENSG00000167751; TAA
PEDTGQRVPV

SEQ ID NO: 33996 - protein, 10 aa, Homo sapiens
  misc_feature: Table A; Target 33996; HLA-C*04:01; KLK2; ENSG00000167751; TAA
PEDTGQRVPV

SEQ ID NO: 33997 - protein, 8 aa, Homo sapiens
  misc_feature: Table A; Target 33997; HLA-C*04:01; KLK2; ENSG00000167751; TAA
PEKPAVYT

SEQ ID NO: 33998 - protein, 9 aa, Homo sapiens
  misc_feature: Table A; Target 33998; HLA-C*07:02; KLK2; ENSG00000167751; TAA
PEKPAVYTK

SEQ ID NO: 33999 - protein, 8 aa, Homo sapiens
  misc_feature: Table A; Target 33999; HLA-B*15:03; KLK2; ENSG00000167751; TAA
QPWQVAVY

SEQ ID NO: 34000 - protein, 8 aa, Homo sapiens
  misc_feature: Table A; Target 34000; HLA-B*18:01; KLK2; ENSG00000167751; TAA
QPWQVAVY

SEQ ID NO: 34001 - protein, 8 aa, Homo sapiens
  misc_feature: Table A; Target 34001; HLA-B*35:01; KLK2; ENSG00000167751; TAA
QPWQVAVY

SEQ ID NO: 34002 - protein, 8 aa, Homo sapiens
  misc_feature: Table A; Target 34002; HLA-B*51:01; KLK2; ENSG00000167751; TAA
QPWQVAVY

SEQ ID NO: 34003 - protein, 8 aa, Homo sapiens
  misc_feature: Table A; Target 34003; HLA-B*55:01; KLK2; ENSG00000167751; TAA
QPWQVAVY

SEQ ID NO: 34004 - protein, 9 aa, Homo sapiens
  misc_feature: Table A; Target 34004; HLA-A*23:01; KLK2; ENSG00000167751; TAA
QRVPVSHSF

SEQ ID NO: 34005 - protein, 9 aa, Homo sapiens
  misc_feature: Table A; Target 34005; HLA-A*24:02; KLK2; ENSG00000167751; TAA
QRVPVSHSF

SEQ ID NO: 34006 - protein, 9 aa, Homo sapiens
  misc_feature: Table A; Target 34006; HLA-A*32:01; KLK2; ENSG00000167751; TAA
QRVPVSHSF

SEQ ID NO: 34007 - protein, 9 aa, Homo sapiens
  misc_feature: Table A; Target 34007; HLA-B*15:03; KLK2; ENSG00000167751; TAA
QRVPVSHSF

SEQ ID NO: 34008 - protein, 9 aa, Homo sapiens
  misc_feature: Table A; Target 34008; HLA-B*27:02; KLK2; ENSG00000167751; TAA
QRVPVSHSF

SEQ ID NO: 34009 - protein, 9 aa, Homo sapiens
  misc_feature: Table A; Target 34009; HLA-B*27:05; KLK2; ENSG00000167751; TAA
QRVPVSHSF

SEQ ID NO: 34010 - protein, 9 aa, Homo sapiens
  misc_feature: Table A; Target 34010; HLA-B*37:01; KLK2; ENSG00000167751; TAA
QRVPVSHSF

SEQ ID NO: 34011 - protein, 9 aa, Homo sapiens
  misc_feature: Table A; Target 34011; HLA-B*38:01; KLK2; ENSG00000167751; TAA
QRVPVSHSF

SEQ ID NO: 34012 - protein, 9 aa, Homo sapiens
  misc_feature: Table A; Target 34012; HLA-B*39:01; KLK2; ENSG00000167751; TAA
QRVPVSHSF

SEQ ID NO: 34013 - protein, 9 aa, Homo sapiens
  misc_feature: Table A; Target 34013; HLA-B*40:02; KLK2; ENSG00000167751; TAA
QRVPVSHSF

SEQ ID NO: 34014 - protein, 9 aa, Homo sapiens
  misc_feature: Table A; Target 34014; HLA-B*44:02; KLK2; ENSG00000167751; TAA
QRVPVSHSF

SEQ ID NO: 34015 - protein, 9 aa, Homo sapiens
  misc_feature: Table A; Target 34015; HLA-B*44:03; KLK2; ENSG00000167751; TAA
QRVPVSHSF

SEQ ID NO: 34016 - protein, 9 aa, Homo sapiens
  misc_feature: Table A; Target 34016; HLA-B*58:01; KLK2; ENSG00000167751; TAA
QRVPVSHSF

SEQ ID NO: 34017 - protein, 9 aa, Homo sapiens
  misc_feature: Table A; Target 34017; HLA-C*02:02; KLK2; ENSG00000167751; TAA
QRVPVSHSF

SEQ ID NO: 34018 - protein, 9 aa, Homo sapiens
  misc_feature: Table A; Target 34018; HLA-C*06:02; KLK2; ENSG00000167751; TAA
QRVPVSHSF

SEQ ID NO: 34019 - protein, 9 aa, Homo sapiens
  misc_feature: Table A; Target 34019; HLA-C*16:01; KLK2; ENSG00000167751; TAA
QRVPVSHSF

SEQ ID NO: 34020 - protein, 9 aa, Homo sapiens
  misc_feature: Table A; Target 34020; HLA-C*16:04; KLK2; ENSG00000167751; TAA
QRVPVSHSF

SEQ ID NO: 34021 - protein, 8 aa, Homo sapiens
  misc_feature: Table A; Target 34021; HLA-B*57:01; KLK2; ENSG00000167751; TAA
QSRIVGGW

SEQ ID NO: 34022 - protein, 9 aa, Homo sapiens
  misc_feature: Table A; Target 34022; HLA-A*25:01; KLK2; ENSG00000167751; TAA
QVAVYSHGW

SEQ ID NO: 34023 - protein, 9 aa, Homo sapiens
  misc_feature: Table A; Target 34023; HLA-A*32:01; KLK2; ENSG00000167751; TAA
QVAVYSHGW

SEQ ID NO: 34024 - protein, 9 aa, Homo sapiens
  misc_feature: Table A; Target 34024; HLA-B*44:02; KLK2; ENSG00000167751; TAA
QVAVYSHGW

SEQ ID NO: 34025 - protein, 9 aa, Homo sapiens
  misc_feature: Table A; Target 34025; HLA-B*44:03; KLK2; ENSG00000167751; TAA
QVAVYSHGW

SEQ ID NO: 34026 - protein, 9 aa, Homo sapiens
  misc_feature: Table A; Target 34026; HLA-B*57:01; KLK2; ENSG00000167751; TAA
QVAVYSHGW

SEQ ID NO: 34027 - protein, 9 aa, Homo sapiens
  misc_feature: Table A; Target 34027; HLA-B*58:01; KLK2; ENSG00000167751; TAA
QVAVYSHGW

SEQ ID NO: 34028 - protein, 10 aa, Homo sapiens
  misc_feature: Table A; Target 34028; HLA-A*03:01; KLK2; ENSG00000167751; TAA
RAYSEKVTEF

SEQ ID NO: 34029 - protein, 10 aa, Homo sapiens
  misc_feature: Table A; Target 34029; HLA-A*23:01; KLK2; ENSG00000167751; TAA
RAYSEKVTEF

SEQ ID NO: 34030 - protein, 10 aa, Homo sapiens
  misc_feature: Table A; Target 34030; HLA-A*24:02; KLK2; ENSG00000167751; TAA
RAYSEKVTEF

SEQ ID NO: 34031 - protein, 10 aa, Homo sapiens
  misc_feature: Table A; Target 34031; HLA-A*25:01; KLK2; ENSG00000167751; TAA
RAYSEKVTEF

SEQ ID NO: 34032 - protein, 10 aa, Homo sapiens
  misc_feature: Table A; Target 34032; HLA-A*26:01; KLK2; ENSG00000167751; TAA
RAYSEKVTEF

SEQ ID NO: 34033 - protein, 10 aa, Homo sapiens
  misc_feature: Table A; Target 34033; HLA-A*30:02; KLK2; ENSG00000167751; TAA
RAYSEKVTEF

SEQ ID NO: 34034 - protein, 10 aa, Homo sapiens
  misc_feature: Table A; Target 34034; HLA-A*32:01; KLK2; ENSG00000167751; TAA
RAYSEKVTEF

SEQ ID NO: 34035 - protein, 10 aa, Homo sapiens
  misc_feature: Table A; Target 34035; HLA-B*15:01; KLK2; ENSG00000167751; TAA
RAYSEKVTEF

SEQ ID NO: 34036 - protein, 10 aa, Homo sapiens
  misc_feature: Table A; Target 34036; HLA-B*15:03; KLK2; ENSG00000167751; TAA
RAYSEKVTEF

SEQ ID NO: 34037 - protein, 10 aa, Homo sapiens
  misc_feature: Table A; Target 34037; HLA-B*35:01; KLK2; ENSG00000167751; TAA
RAYSEKVTEF

SEQ ID NO: 34038 - protein, 10 aa, Homo sapiens
  misc_feature: Table A; Target 34038; HLA-B*46:01; KLK2; ENSG00000167751; TAA
RAYSEKVTEF

SEQ ID NO: 34039 - protein, 10 aa, Homo sapiens
  misc_feature: Table A; Target 34039; HLA-B*57:01; KLK2; ENSG00000167751; TAA
RAYSEKVTEF

SEQ ID NO: 34040 - protein, 10 aa, Homo sapiens
  misc_feature: Table A; Target 34040; HLA-B*58:01; KLK2; ENSG00000167751; TAA
RAYSEKVTEF

SEQ ID NO: 34041 - protein, 10 aa, Homo sapiens
  misc_feature: Table A; Target 34041; HLA-C*02:02; KLK2; ENSG00000167751; TAA
RAYSEKVTEF

SEQ ID NO: 34042 - protein, 10 aa, Homo sapiens
  misc_feature: Table A; Target 34042; HLA-C*03:04; KLK2; ENSG00000167751; TAA
RAYSEKVTEF

SEQ ID NO: 34043 - protein, 10 aa, Homo sapiens
  misc_feature: Table A; Target 34043; HLA-C*05:01; KLK2; ENSG00000167751; TAA
RAYSEKVTEF

SEQ ID NO: 34044 - protein, 10 aa, Homo sapiens
  misc_feature: Table A; Target 34044; HLA-C*12:03; KLK2; ENSG00000167751; TAA
RAYSEKVTEF

SEQ ID NO: 34045 - protein, 10 aa, Homo sapiens
  misc_feature: Table A; Target 34045; HLA-C*16:04; KLK2; ENSG00000167751; TAA
RAYSEKVTEF

SEQ ID NO: 34046 - protein, 11 aa, Homo sapiens
  misc_feature: Table A; Target 34046; HLA-A*02:01; KLK2; ENSG00000167751; TAA
RLSEPAKITDV

SEQ ID NO: 34047 - protein, 11 aa, Homo sapiens
  misc_feature: Table A; Target 34047; HLA-A*02:03; KLK2; ENSG00000167751; TAA
RLSEPAKITDV

SEQ ID NO: 34048 - protein, 11 aa, Homo sapiens
  misc_feature: Table A; Target 34048; HLA-A*02:04; KLK2; ENSG00000167751; TAA
RLSEPAKITDV

SEQ ID NO: 34049 - protein, 11 aa, Homo sapiens
  misc_feature: Table A; Target 34049; HLA-A*02:07; KLK2; ENSG00000167751; TAA
RLSEPAKITDV

SEQ ID NO: 34050 - protein, 10 aa, Homo sapiens
  misc_feature: Table A; Target 34050; HLA-B*07:02; KLK2; ENSG00000167751; TAA
RPDEDSSHDL

SEQ ID NO: 34051 - protein, 10 aa, Homo sapiens
  misc_feature: Table A; Target 34051; HLA-B*35:01; KLK2; ENSG00000167751; TAA
RPDEDSSHDL

SEQ ID NO: 34052 - protein, 10 aa, Homo sapiens
  misc_feature: Table A; Target 34052; HLA-B*35:03; KLK2; ENSG00000167751; TAA
RPDEDSSHDL

SEQ ID NO: 34053 - protein, 10 aa, Homo sapiens
  misc_feature: Table A; Target 34053; HLA-B*40:01; KLK2; ENSG00000167751; TAA
RPDEDSSHDL

SEQ ID NO: 34054 - protein, 10 aa, Homo sapiens
  misc_feature: Table A; Target 34054; HLA-B*55:01; KLK2; ENSG00000167751; TAA
RPDEDSSHDL

SEQ ID NO: 34055 - protein, 10 aa, Homo sapiens
  misc_feature: Table A; Target 34055; HLA-C*05:01; KLK2; ENSG00000167751; TAA
RPDEDSSHDL

SEQ ID NO: 34056 - protein, 10 aa, Homo sapiens
  misc_feature: Table A; Target 34056; HLA-C*07:02; KLK2; ENSG00000167751; TAA
RPDEDSSHDL

SEQ ID NO: 34057 - protein, 11 aa, Homo sapiens
  misc_feature: Table A; Target 34057; HLA-B*07:02; KLK2; ENSG00000167751; TAA
RPDEDSSHDLM

SEQ ID NO: 34058 - protein, 11 aa, Homo sapiens
  misc_feature: Table A; Target 34058; HLA-B*35:01; KLK2; ENSG00000167751; TAA
RPDEDSSHDLM

SEQ ID NO: 34059 - protein, 11 aa, Homo sapiens
  misc_feature: Table A; Target 34059; HLA-B*35:03; KLK2; ENSG00000167751; TAA
RPDEDSSHDLM

SEQ ID NO: 34060 - protein, 11 aa, Homo sapiens
  misc_feature: Table A; Target 34060; HLA-B*55:01; KLK2; ENSG00000167751; TAA
RPDEDSSHDLM

SEQ ID NO: 34061 - protein, 11 aa, Homo sapiens
  misc_feature: Table A; Target 34061; HLA-C*03:03; KLK2; ENSG00000167751; TAA
RPDEDSSHDLM

SEQ ID NO: 34062 - protein, 11 aa, Homo sapiens
  misc_feature: Table A; Target 34062; HLA-C*05:01; KLK2; ENSG00000167751; TAA
RPDEDSSHDLM

SEQ ID NO: 34063 - protein, 10 aa, Homo sapiens
  misc_feature: Table A; Target 34063; HLA-B*07:02; KLK2; ENSG00000167751; TAA
RPRSLQCVSL

SEQ ID NO: 34064 - protein, 10 aa, Homo sapiens
  misc_feature: Table A; Target 34064; HLA-C*07:02; KLK2; ENSG00000167751; TAA
RPRSLQCVSL

SEQ ID NO: 34065 - protein, 8 aa, Homo sapiens
  misc_feature: Table A; Target 34065; HLA-A*32:01; KLK2; ENSG00000167751; TAA
RVPVSHSF

SEQ ID NO: 34066 - protein, 8 aa, Homo sapiens
  misc_feature: Table A; Target 34066; HLA-B*37:01; KLK2; ENSG00000167751; TAA
RVPVSHSF

SEQ ID NO: 34067 - protein, 8 aa, Homo sapiens
  misc_feature: Table A; Target 34067; HLA-A*30:01; KLK2; ENSG00000167751; TAA
SEKVTEFM

SEQ ID NO: 34068 - protein, 8 aa, Homo sapiens
  misc_feature: Table A; Target 34068; HLA-B*18:01; KLK2; ENSG00000167751; TAA
SEKVTEFM

SEQ ID NO: 34069 - protein, 8 aa, Homo sapiens
  misc_feature: Table A; Target 34069; HLA-B*37:01; KLK2; ENSG00000167751; TAA
SEKVTEFM

SEQ ID NO: 34070 - protein, 8 aa, Homo sapiens
  misc_feature: Table A; Target 34070; HLA-B*40:02; KLK2; ENSG00000167751; TAA
SEKVTEFM

SEQ ID NO: 34071 - protein, 8 aa, Homo sapiens
  misc_feature: Table A; Target 34071; HLA-B*49:01; KLK2; ENSG00000167751; TAA
SEKVTEFM

SEQ ID NO: 34072 - protein, 9 aa, Homo sapiens
  misc_feature: Table A; Target 34072; HLA-A*30:01; KLK2; ENSG00000167751; TAA
SEKVTEFML

SEQ ID NO: 34073 - protein, 9 aa, Homo sapiens
  misc_feature: Table A; Target 34073; HLA-B*37:01; KLK2; ENSG00000167751; TAA
SEKVTEFML

SEQ ID NO: 34074 - protein, 9 aa, Homo sapiens
  misc_feature: Table A; Target 34074; HLA-B*40:01; KLK2; ENSG00000167751; TAA
SEKVTEFML

SEQ ID NO: 34075 - protein, 9 aa, Homo sapiens
  misc_feature: Table A; Target 34075; HLA-B*40:02; KLK2; ENSG00000167751; TAA
SEKVTEFML

SEQ ID NO: 34076 - protein, 9 aa, Homo sapiens
  misc_feature: Table A; Target 34076; HLA-B*44:02; KLK2; ENSG00000167751; TAA
SEKVTEFML

SEQ ID NO: 34077 - protein, 9 aa, Homo sapiens
  misc_feature: Table A; Target 34077; HLA-B*44:03; KLK2; ENSG00000167751; TAA
SEKVTEFML

SEQ ID NO: 34078 - protein, 9 aa, Homo sapiens
  misc_feature: Table A; Target 34078; HLA-A*30:01; KLK2; ENSG00000167751; TAA
SEPAKITDV

SEQ ID NO: 34079 - protein, 9 aa, Homo sapiens
  misc_feature: Table A; Target 34079; HLA-B*37:01; KLK2; ENSG00000167751; TAA
SEPAKITDV

SEQ ID NO: 34080 - protein, 9 aa, Homo sapiens
  misc_feature: Table A; Target 34080; HLA-B*40:01; KLK2; ENSG00000167751; TAA
SEPAKITDV

SEQ ID NO: 34081 - protein, 9 aa, Homo sapiens
  misc_feature: Table A; Target 34081; HLA-B*40:02; KLK2; ENSG00000167751; TAA
SEPAKITDV

SEQ ID NO: 34082 - protein, 9 aa, Homo sapiens
  misc_feature: Table A; Target 34082; HLA-B*49:01; KLK2; ENSG00000167751; TAA
SEPAKITDV

SEQ ID NO: 34083 - protein, 11 aa, Homo sapiens
  misc_feature: Table A; Target 34083; HLA-C*04:01; KLK2; ENSG00000167751; TAA
SEPAKITDVVK

SEQ ID NO: 34084 - protein, 9 aa, Homo sapiens
  misc_feature: Table A; Target 34084; HLA-A*23:01; KLK2; ENSG00000167751; TAA
SFPHPLYNM

SEQ ID NO: 34085 - protein, 9 aa, Homo sapiens
  misc_feature: Table A; Target 34085; HLA-A*24:02; KLK2; ENSG00000167751; TAA
SFPHPLYNM

SEQ ID NO: 34086 - protein, 9 aa, Homo sapiens
  misc_feature: Table A; Target 34086; HLA-A*29:02; KLK2; ENSG00000167751; TAA
SFPHPLYNM

SEQ ID NO: 34087 - protein, 11 aa, Homo sapiens
  misc_feature: Table A; Target 34087; HLA-A*31:01; KLK2; ENSG00000167751; TAA
SIEPEEFLRPR

SEQ ID NO: 34088 - protein, 8 aa, Homo sapiens
  misc_feature: Table A; Target 34088; HLA-B*08:01; KLK2; ENSG00000167751; TAA
SLLKHQSL

SEQ ID NO: 34089 - protein, 8 aa, Homo sapiens
  misc_feature: Table A; Target 34089; HLA-B*37:01; KLK2; ENSG00000167751; TAA
SLLKHQSL

SEQ ID NO: 34090 - protein, 9 aa, Homo sapiens
  misc_feature: Table A; Target 34090; HLA-A*03:01; KLK2; ENSG00000167751; TAA
SLLKHQSLR

SEQ ID NO: 34091 - protein, 10 aa, Homo sapiens
  misc_feature: Table A; Target 34091; HLA-A*02:04; KLK2; ENSG00000167751; TAA
SLQCVSLHLL

SEQ ID NO: 34092 - protein, 9 aa, Homo sapiens
  misc_feature: Table A; Target 34092; HLA-C*07:01; KLK2; ENSG00000167751; TAA
SNDMCARAY

SEQ ID NO: 34093 - protein, 9 aa, Homo sapiens
  misc_feature: Table A; Target 34093; HLA-C*16:01; KLK2; ENSG00000167751; TAA
SNDMCARAY

SEQ ID NO: 34094 - protein, 9 aa, Homo sapiens
  misc_feature: Table A; Target 34094; HLA-A*26:01; KLK2; ENSG00000167751; TAA
SQPWQVAVY

SEQ ID NO: 34095 - protein, 9 aa, Homo sapiens
  misc_feature: Table A; Target 34095; HLA-A*29:02; KLK2; ENSG00000167751; TAA
SQPWQVAVY

SEQ ID NO: 34096 - protein, 9 aa, Homo sapiens
  misc_feature: Table A; Target 34096; HLA-A*30:02; KLK2; ENSG00000167751; TAA
SQPWQVAVY

SEQ ID NO: 34097 - protein, 9 aa, Homo sapiens
  misc_feature: Table A; Target 34097; HLA-A*32:01; KLK2; ENSG00000167751; TAA
SQPWQVAVY

SEQ ID NO: 34098 - protein, 9 aa, Homo sapiens
  misc_feature: Table A; Target 34098; HLA-B*15:01; KLK2; ENSG00000167751; TAA
SQPWQVAVY

SEQ ID NO: 34099 - protein, 9 aa, Homo sapiens
  misc_feature: Table A; Target 34099; HLA-B*15:03; KLK2; ENSG00000167751; TAA
SQPWQVAVY

SEQ ID NO: 34100 - protein, 9 aa, Homo sapiens
  misc_feature: Table A; Target 34100; HLA-B*46:01; KLK2; ENSG00000167751; TAA
SQPWQVAVY

SEQ ID NO: 34101 - protein, 9 aa, Homo sapiens
  misc_feature: Table A; Target 34101; HLA-C*02:02; KLK2; ENSG00000167751; TAA
SQPWQVAVY

SEQ ID NO: 34102 - protein, 9 aa, Homo sapiens
  misc_feature: Table A; Target 34102; HLA-C*07:04; KLK2; ENSG00000167751; TAA
SQPWQVAVY

SEQ ID NO: 34103 - protein, 9 aa, Homo sapiens
  misc_feature: Table A; Target 34103; HLA-A*30:01; KLK2; ENSG00000167751; TAA
TDVVKVLGL

SEQ ID NO: 34104 - protein, 9 aa, Homo sapiens
  misc_feature: Table A; Target 34104; HLA-B*08:01; KLK2; ENSG00000167751; TAA
TDVVKVLGL

SEQ ID NO: 34105 - protein, 9 aa, Homo sapiens
  misc_feature: Table A; Target 34105; HLA-B*37:01; KLK2; ENSG00000167751; TAA
TDVVKVLGL

SEQ ID NO: 34106 - protein, 9 aa, Homo sapiens
  misc_feature: Table A; Target 34106; HLA-B*40:02; KLK2; ENSG00000167751; TAA
TDVVKVLGL

SEQ ID NO: 34107 - protein, 9 aa, Homo sapiens
  misc_feature: Table A; Target 34107; HLA-B*18:01; KLK2; ENSG00000167751; TAA
TEFMLCAGL

SEQ ID NO: 34108 - protein, 9 aa, Homo sapiens
  misc_feature: Table A; Target 34108; HLA-B*40:01; KLK2; ENSG00000167751; TAA
TEFMLCAGL

SEQ ID NO: 34109 - protein, 10 aa, Homo sapiens
  misc_feature: Table A; Target 34109; HLA-B*44:02; KLK2; ENSG00000167751; TAA
TEFMLCAGLW

SEQ ID NO: 34110 - protein, 10 aa, Homo sapiens
  misc_feature: Table A; Target 34110; HLA-B*44:03; KLK2; ENSG00000167751; TAA
TEFMLCAGLW

SEQ ID NO: 34111 - protein, 8 aa, Homo sapiens
  misc_feature: Table A; Target 34111; HLA-C*12:03; KLK2; ENSG00000167751; TAA
TGAVPLIQ

SEQ ID NO: 34112 - protein, 10 aa, Homo sapiens
  misc_feature: Table A; Target 34112; HLA-A*33:03; KLK2; ENSG00000167751; TAA
TGAVPLIQSR

SEQ ID NO: 34113 - protein, 10 aa, Homo sapiens
  misc_feature: Table A; Target 34113; HLA-A*68:01; KLK2; ENSG00000167751; TAA
TGAVPLIQSR

SEQ ID NO: 34114 - protein, 10 aa, Homo sapiens
  misc_feature: Table A; Target 34114; HLA-B*27:02; KLK2; ENSG00000167751; TAA
TGAVPLIQSR

SEQ ID NO: 34115 - protein, 10 aa, Homo sapiens
  misc_feature: Table A; Target 34115; HLA-C*07:06; KLK2; ENSG00000167751; TAA
TGAVPLIQSR

SEQ ID NO: 34116 - protein, 8 aa, Homo sapiens
  misc_feature: Table A; Target 34116; HLA-B*57:01; KLK2; ENSG00000167751; TAA
VAVYSHGW

SEQ ID NO: 34117 - protein, 8 aa, Homo sapiens
  misc_feature: Table A; Target 34117; HLA-B*58:01; KLK2; ENSG00000167751; TAA
VAVYSHGW

SEQ ID NO: 34118 - protein, 11 aa, Homo sapiens
  misc_feature: Table A; Target 34118; HLA-A*02:01; KLK2; ENSG00000167751; TAA
VLGLPTQEPAL

SEQ ID NO: 34119 - protein, 11 aa, Homo sapiens
  misc_feature: Table A; Target 34119; HLA-A*02:04; KLK2; ENSG00000167751; TAA
VLGLPTQEPAL

SEQ ID NO: 34120 - protein, 8 aa, Homo sapiens
  misc_feature: Table A; Target 34120; HLA-B*13:02; KLK2; ENSG00000167751; TAA
VLSIALSV

SEQ ID NO: 34121 - protein, 11 aa, Homo sapiens
  misc_feature: Table A; Target 34121; HLA-C*06:02; KLK2; ENSG00000167751; TAA
VLSIALSVGCT

SEQ ID NO: 34122 - protein, 9 aa, Homo sapiens
  misc_feature: Table A; Target 34122; HLA-A*03:01; KLK2; ENSG00000167751; TAA
VLTAAHCLK

SEQ ID NO: 34123 - protein, 9 aa, Homo sapiens
  misc_feature: Table A; Target 34123; HLA-A*03:02; KLK2; ENSG00000167751; TAA
VLTAAHCLK

SEQ ID NO: 34124 - protein, 9 aa, Homo sapiens
  misc_feature: Table A; Target 34124; HLA-C*06:02; KLK2; ENSG00000167751; TAA
VLTAAHCLK

SEQ ID NO: 34125 - protein, 8 aa, Homo sapiens
  misc_feature: Table A; Target 34125; HLA-B*08:01; KLK2; ENSG00000167751; TAA
VPLIQSRI

SEQ ID NO: 34126 - protein, 8 aa, Homo sapiens
  misc_feature: Table A; Target 34126; HLA-B*51:01; KLK2; ENSG00000167751; TAA
VPLIQSRI

SEQ ID NO: 34127 - protein, 9 aa, Homo sapiens
  misc_feature: Table A; Target 34127; HLA-B*07:02; KLK2; ENSG00000167751; TAA
VPLIQSRIV

SEQ ID NO: 34128 - protein, 9 aa, Homo sapiens
  misc_feature: Table A; Target 34128; HLA-B*51:01; KLK2; ENSG00000167751; TAA
VPLIQSRIV

SEQ ID NO: 34129 - protein, 9 aa, Homo sapiens
  misc_feature: Table A; Target 34129; HLA-B*54:01; KLK2; ENSG00000167751; TAA
VPLIQSRIV

SEQ ID NO: 34130 - protein, 9 aa, Homo sapiens
  misc_feature: Table A; Target 34130; HLA-B*56:01; KLK2; ENSG00000167751; TAA
VPLIQSRIV

SEQ ID NO: 34131 - protein, 9 aa, Homo sapiens
  misc_feature: Table A; Target 34131; HLA-A*24:02; KLK2; ENSG00000167751; TAA
VWLGRHNLF

SEQ ID NO: 34132 - protein, 10 aa, Homo sapiens
  misc_feature: Table A; Target 34132; HLA-A*24:02; KLK2; ENSG00000167751; TAA
VYSHGWAHCG

SEQ ID NO: 34133 - protein, 8 aa, Homo sapiens
  misc_feature: Table A; Target 34133; HLA-A*23:01; KLK2; ENSG00000167751; TAA
VYTKVVHY

SEQ ID NO: 34134 - protein, 8 aa, Homo sapiens
  misc_feature: Table A; Target 34134; HLA-A*24:02; KLK2; ENSG00000167751; TAA
VYTKVVHY

SEQ ID NO: 34135 - protein, 8 aa, Homo sapiens
  misc_feature: Table A; Target 34135; HLA-A*29:02; KLK2; ENSG00000167751; TAA
VYTKVVHY

SEQ ID NO: 34136 - protein, 8 aa, Homo sapiens
  misc_feature: Table A; Target 34136; HLA-A*30:02; KLK2; ENSG00000167751; TAA
VYTKVVHY

SEQ ID NO: 34137 - protein, 8 aa, Homo sapiens
  misc_feature: Table A; Target 34137; HLA-A*32:01; KLK2; ENSG00000167751; TAA
VYTKVVHY

SEQ ID NO: 34138 - protein, 8 aa, Homo sapiens
  misc_feature: Table A; Target 34138; HLA-B*15:03; KLK2; ENSG00000167751; TAA
VYTKVVHY

SEQ ID NO: 34139 - protein, 8 aa, Homo sapiens
  misc_feature: Table A; Target 34139; HLA-C*04:01; KLK2; ENSG00000167751; TAA
VYTKVVHY

SEQ ID NO: 34140 - protein, 8 aa, Homo sapiens
  misc_feature: Table A; Target 34140; HLA-C*07:01; KLK2; ENSG00000167751; TAA
VYTKVVHY

SEQ ID NO: 34141 - protein, 8 aa, Homo sapiens
  misc_feature: Table A; Target 34141; HLA-C*07:02; KLK2; ENSG00000167751; TAA
VYTKVVHY

SEQ ID NO: 34142 - protein, 8 aa, Homo sapiens
  misc_feature: Table A; Target 34142; HLA-C*07:04; KLK2; ENSG00000167751; TAA
VYTKVVHY

SEQ ID NO: 34143 - protein, 8 aa, Homo sapiens
  misc_feature: Table A; Target 34143; HLA-C*14:02; KLK2; ENSG00000167751; TAA
VYTKVVHY

SEQ ID NO: 34144 - protein, 8 aa, Homo sapiens
  misc_feature: Table A; Target 34144; HLA-C*16:01; KLK2; ENSG00000167751; TAA
VYTKVVHY

SEQ ID NO: 34145 - protein, 8 aa, Homo sapiens
  misc_feature: Table A; Target 34145; HLA-C*16:02; KLK2; ENSG00000167751; TAA
VYTKVVHY

SEQ ID NO: 34146 - protein, 9 aa, Homo sapiens
  misc_feature: Table A; Target 34146; HLA-A*23:01; KLK2; ENSG00000167751; TAA
VYTKVVHYR

SEQ ID NO: 34147 - protein, 9 aa, Homo sapiens
  misc_feature: Table A; Target 34147; HLA-A*24:02; KLK2; ENSG00000167751; TAA
VYTKVVHYR

SEQ ID NO: 34148 - protein, 9 aa, Homo sapiens
  misc_feature: Table A; Target 34148; HLA-A*31:01; KLK2; ENSG00000167751; TAA
VYTKVVHYR

SEQ ID NO: 34149 - protein, 9 aa, Homo sapiens
  misc_feature: Table A; Target 34149; HLA-A*33:01; KLK2; ENSG00000167751; TAA
VYTKVVHYR

SEQ ID NO: 34150 - protein, 9 aa, Homo sapiens
  misc_feature: Table A; Target 34150; HLA-A*33:03; KLK2; ENSG00000167751; TAA
VYTKVVHYR

SEQ ID NO: 34151 - protein, 8 aa, Homo sapiens
  misc_feature: Table A; Target 34151; HLA-A*01:01; KLK2; ENSG00000167751; TAA
YSEKVTEF

SEQ ID NO: 34152 - protein, 8 aa, Homo sapiens
  misc_feature: Table A; Target 34152; HLA-A*32:01; KLK2; ENSG00000167751; TAA
YSEKVTEF

SEQ ID NO: 34153 - protein, 8 aa, Homo sapiens
  misc_feature: Table A; Target 34153; HLA-B*15:01; KLK2; ENSG00000167751; TAA
YSEKVTEF

SEQ ID NO: 34154 - protein, 8 aa, Homo sapiens
  misc_feature: Table A; Target 34154; HLA-B*15:03; KLK2; ENSG00000167751; TAA
YSEKVTEF

SEQ ID NO: 34155 - protein, 8 aa, Homo sapiens
  misc_feature: Table A; Target 34155; HLA-B*18:01; KLK2; ENSG00000167751; TAA
YSEKVTEF

SEQ ID NO: 34156 - protein, 8 aa, Homo sapiens
  misc_feature: Table A; Target 34156; HLA-B*37:01; KLK2; ENSG00000167751; TAA
YSEKVTEF

SEQ ID NO: 34157 - protein, 8 aa, Homo sapiens
  misc_feature: Table A; Target 34157; HLA-B*39:01; KLK2; ENSG00000167751; TAA
YSEKVTEF

SEQ ID NO: 34158 - protein, 8 aa, Homo sapiens
  misc_feature: Table A; Target 34158; HLA-B*46:01; KLK2; ENSG00000167751; TAA
YSEKVTEF

SEQ ID NO: 34159 - protein, 8 aa, Homo sapiens
  misc_feature: Table A; Target 34159; HLA-B*57:01; KLK2; ENSG00000167751; TAA
YSEKVTEF

SEQ ID NO: 34160 - protein, 8 aa, Homo sapiens
  misc_feature: Table A; Target 34160; HLA-B*58:01; KLK2; ENSG00000167751; TAA
YSEKVTEF

SEQ ID NO: 34161 - protein, 8 aa, Homo sapiens
  misc_feature: Table A; Target 34161; HLA-C*02:02; KLK2; ENSG00000167751; TAA
YSEKVTEF

SEQ ID NO: 34162 - protein, 8 aa, Homo sapiens
  misc_feature: Table A; Target 34162; HLA-C*04:01; KLK2; ENSG00000167751; TAA
YSEKVTEF

SEQ ID NO: 34163 - protein, 8 aa, Homo sapiens
  misc_feature: Table A; Target 34163; HLA-C*05:01; KLK2; ENSG00000167751; TAA
YSEKVTEF

SEQ ID NO: 34164 - protein, 8 aa, Homo sapiens
  misc_feature: Table A; Target 34164; HLA-C*07:01; KLK2; ENSG00000167751; TAA
YSEKVTEF

SEQ ID NO: 34165 - protein, 8 aa, Homo sapiens
  misc_feature: Table A; Target 34165; HLA-C*07:04; KLK2; ENSG00000167751; TAA
YSEKVTEF

SEQ ID NO: 34166 - protein, 8 aa, Homo sapiens
  misc_feature: Table A; Target 34166; HLA-C*12:03; KLK2; ENSG00000167751; TAA
YSEKVTEF

SEQ ID NO: 34167 - protein, 8 aa, Homo sapiens
  misc_feature: Table A; Target 34167; HLA-C*16:01; KLK2; ENSG00000167751; TAA
YSEKVTEF

SEQ ID NO: 34168 - protein, 8 aa, Homo sapiens
  misc_feature: Table A; Target 34168; HLA-C*16:02; KLK2; ENSG00000167751; TAA
YSEKVTEF

SEQ ID NO: 34169 - protein, 9 aa, Homo sapiens
  misc_feature: Table A; Target 34169; HLA-A*01:01; KLK2; ENSG00000167751; TAA
YSEKVTEFM

SEQ ID NO: 34170 - protein, 9 aa, Homo sapiens
  misc_feature: Table A; Target 34170; HLA-B*58:01; KLK2; ENSG00000167751; TAA
YSEKVTEFM

SEQ ID NO: 34171 - protein, 9 aa, Homo sapiens
  misc_feature: Table A; Target 34171; HLA-C*05:01; KLK2; ENSG00000167751; TAA
YSEKVTEFM

SEQ ID NO: 34172 - protein, 9 aa, Homo sapiens
  misc_feature: Table A; Target 34172; HLA-A*02:07; KLK3; ENSG00000142515; TAA
AAPLILSRI

SEQ ID NO: 34173 - protein, 9 aa, Homo sapiens
  misc_feature: Table A; Target 34173; HLA-A*24:02; KLK3; ENSG00000142515; TAA
AAPLILSRI

SEQ ID NO: 34174 - protein, 9 aa, Homo sapiens
  misc_feature: Table A; Target 34174; HLA-A*68:02; KLK3; ENSG00000142515; TAA
AAPLILSRI

SEQ ID NO: 34175 - protein, 9 aa, Homo sapiens
  misc_feature: Table A; Target 34175; HLA-B*51:01; KLK3; ENSG00000142515; TAA
AAPLILSRI

SEQ ID NO: 34176 - protein, 9 aa, Homo sapiens
  misc_feature: Table A; Target 34176; HLA-C*01:02; KLK3; ENSG00000142515; TAA
AAPLILSRI

SEQ ID NO: 34177 - protein, 9 aa, Homo sapiens
  misc_feature: Table A; Target 34177; HLA-C*07:02; KLK3; ENSG00000142515; TAA
AAPLILSRI

SEQ ID NO: 34178 - protein, 9 aa, Homo sapiens
  misc_feature: Table A; Target 34178; HLA-A*30:01; KLK3; ENSG00000142515; TAA
AELTDAVKV

SEQ ID NO: 34179 - protein, 9 aa, Homo sapiens
  misc_feature: Table A; Target 34179; HLA-B*13:02; KLK3; ENSG00000142515; TAA
AELTDAVKV

SEQ ID NO: 34180 - protein, 9 aa, Homo sapiens
  misc_feature: Table A; Target 34180; HLA-B*37:01; KLK3; ENSG00000142515; TAA
AELTDAVKV

SEQ ID NO: 34181 - protein, 9 aa, Homo sapiens
  misc_feature: Table A; Target 34181; HLA-B*40:01; KLK3; ENSG00000142515; TAA
AELTDAVKV

SEQ ID NO: 34182 - protein, 9 aa, Homo sapiens
  misc_feature: Table A; Target 34182; HLA-B*40:02; KLK3; ENSG00000142515; TAA
AELTDAVKV

SEQ ID NO: 34183 - protein, 9 aa, Homo sapiens
  misc_feature: Table A; Target 34183; HLA-B*44:02; KLK3; ENSG00000142515; TAA
AELTDAVKV

SEQ ID NO: 34184 - protein, 9 aa, Homo sapiens
  misc_feature: Table A; Target 34184; HLA-B*44:03; KLK3; ENSG00000142515; TAA
AELTDAVKV

SEQ ID NO: 34185 - protein, 9 aa, Homo sapiens
  misc_feature: Table A; Target 34185; HLA-B*49:01; KLK3; ENSG00000142515; TAA
AELTDAVKV

SEQ ID NO: 34186 - protein, 9 aa, Homo sapiens
  misc_feature: Table A; Target 34186; HLA-C*02:02; KLK3; ENSG00000142515; TAA
AELTDAVKV

SEQ ID NO: 34187 - protein, 9 aa, Homo sapiens
  misc_feature: Table A; Target 34187; HLA-C*16:04; KLK3; ENSG00000142515; TAA
AELTDAVKV

SEQ ID NO: 34188 - protein, 10 aa, Homo sapiens
  misc_feature: Table A; Target 34188; HLA-A*30:01; KLK3; ENSG00000142515; TAA
AELTDAVKVM

SEQ ID NO: 34189 - protein, 10 aa, Homo sapiens
  misc_feature: Table A; Target 34189; HLA-B*40:01; KLK3; ENSG00000142515; TAA
AELTDAVKVM

SEQ ID NO: 34190 - protein, 10 aa, Homo sapiens
  misc_feature: Table A; Target 34190; HLA-B*40:02; KLK3; ENSG00000142515; TAA
AELTDAVKVM

SEQ ID NO: 34191 - protein, 10 aa, Homo sapiens
  misc_feature: Table A; Target 34191; HLA-B*44:02; KLK3; ENSG00000142515; TAA
AELTDAVKVM

SEQ ID NO: 34192 - protein, 10 aa, Homo sapiens
  misc_feature: Table A; Target 34192; HLA-B*44:03; KLK3; ENSG00000142515; TAA
AELTDAVKVM

SEQ ID NO: 34193 - protein, 10 aa, Homo sapiens
  misc_feature: Table A; Target 34193; HLA-B*49:01; KLK3; ENSG00000142515; TAA
AELTDAVKVM

SEQ ID NO: 34194 - protein, 10 aa, Homo sapiens
  misc_feature: Table A; Target 34194; HLA-C*16:04; KLK3; ENSG00000142515; TAA
AELTDAVKVM

SEQ ID NO: 34195 - protein, 8 aa, Homo sapiens
  misc_feature: Table A; Target 34195; HLA-A*02:01; KLK3; ENSG00000142515; TAA
ALGTTCYA

SEQ ID NO: 34196 - protein, 8 aa, Homo sapiens
  misc_feature: Table A; Target 34196; HLA-A*02:07; KLK3; ENSG00000142515; TAA
ALPERPSL

SEQ ID NO: 34197 - protein, 8 aa, Homo sapiens
  misc_feature: Table A; Target 34197; HLA-B*08:01; KLK3; ENSG00000142515; TAA
ALPERPSL

SEQ ID NO: 34198 - protein, 8 aa, Homo sapiens
  misc_feature: Table A; Target 34198; HLA-C*01:02; KLK3; ENSG00000142515; TAA
ALPERPSL

SEQ ID NO: 34199 - protein, 8 aa, Homo sapiens
  misc_feature: Table A; Target 34199; HLA-C*16:01; KLK3; ENSG00000142515; TAA
ALPERPSL

SEQ ID NO: 34200 - protein, 9 aa, Homo sapiens
  misc_feature: Table A; Target 34200; HLA-A*01:01; KLK3; ENSG00000142515; TAA
ALPERPSLY

SEQ ID NO: 34201 - protein, 9 aa, Homo sapiens
  misc_feature: Table A; Target 34201; HLA-A*02:01; KLK3; ENSG00000142515; TAA
ALPERPSLY

SEQ ID NO: 34202 - protein, 9 aa, Homo sapiens
  misc_feature: Table A; Target 34202; HLA-A*02:03; KLK3; ENSG00000142515; TAA
ALPERPSLY

SEQ ID NO: 34203 - protein, 9 aa, Homo sapiens
  misc_feature: Table A; Target 34203; HLA-A*02:07; KLK3; ENSG00000142515; TAA
ALPERPSLY

SEQ ID NO: 34204 - protein, 9 aa, Homo sapiens
  misc_feature: Table A; Target 34204; HLA-A*03:01; KLK3; ENSG00000142515; TAA
ALPERPSLY

SEQ ID NO: 34205 - protein, 9 aa, Homo sapiens
  misc_feature: Table A; Target 34205; HLA-A*24:02; KLK3; ENSG00000142515; TAA
ALPERPSLY

SEQ ID NO: 34206 - protein, 9 aa, Homo sapiens
  misc_feature: Table A; Target 34206; HLA-A*26:01; KLK3; ENSG00000142515; TAA
ALPERPSLY

SEQ ID NO: 34207 - protein, 9 aa, Homo sapiens
  misc_feature: Table A; Target 34207; HLA-A*29:02; KLK3; ENSG00000142515; TAA
ALPERPSLY

SEQ ID NO: 34208 - protein, 9 aa, Homo sapiens
  misc_feature: Table A; Target 34208; HLA-A*30:02; KLK3; ENSG00000142515; TAA
ALPERPSLY

SEQ ID NO: 34209 - protein, 9 aa, Homo sapiens
  misc_feature: Table A; Target 34209; HLA-A*32:01; KLK3; ENSG00000142515; TAA
ALPERPSLY

SEQ ID NO: 34210 - protein, 9 aa, Homo sapiens
  misc_feature: Table A; Target 34210; HLA-B*15:01; KLK3; ENSG00000142515; TAA
ALPERPSLY

SEQ ID NO: 34211 - protein, 9 aa, Homo sapiens
  misc_feature: Table A; Target 34211; HLA-B*15:03; KLK3; ENSG00000142515; TAA
ALPERPSLY

SEQ ID NO: 34212 - protein, 9 aa, Homo sapiens
  misc_feature: Table A; Target 34212; HLA-B*46:01; KLK3; ENSG00000142515; TAA
ALPERPSLY

SEQ ID NO: 34213 - protein, 9 aa, Homo sapiens
  misc_feature: Table A; Target 34213; HLA-C*01:02; KLK3; ENSG00000142515; TAA
ALPERPSLY

SEQ ID NO: 34214 - protein, 9 aa, Homo sapiens
  misc_feature: Table A; Target 34214; HLA-C*02:02; KLK3; ENSG00000142515; TAA
ALPERPSLY

SEQ ID NO: 34215 - protein, 9 aa, Homo sapiens
  misc_feature: Table A; Target 34215; HLA-C*07:04; KLK3; ENSG00000142515; TAA
ALPERPSLY

SEQ ID NO: 34216 - protein, 9 aa, Homo sapiens
  misc_feature: Table A; Target 34216; HLA-C*16:01; KLK3; ENSG00000142515; TAA
ALPERPSLY

SEQ ID NO: 34217 - protein, 9 aa, Homo sapiens
  misc_feature: Table A; Target 34217; HLA-C*16:02; KLK3; ENSG00000142515; TAA
ALPERPSLY

SEQ ID NO: 34218 - protein, 10 aa, Homo sapiens
  misc_feature: Table A; Target 34218; HLA-A*02:07; KLK3; ENSG00000142515; TAA
ALPERPSLYT

SEQ ID NO: 34219 - protein, 11 aa, Homo sapiens
  misc_feature: Table A; Target 34219; HLA-A*02:07; KLK3; ENSG00000142515; TAA
ALPERPSLYTK

SEQ ID NO: 34220 - protein, 11 aa, Homo sapiens
  misc_feature: Table A; Target 34220; HLA-A*03:01; KLK3; ENSG00000142515; TAA
ALPERPSLYTK

SEQ ID NO: 34221 - protein, 11 aa, Homo sapiens
  misc_feature: Table A; Target 34221; HLA-A*03:02; KLK3; ENSG00000142515; TAA
ALPERPSLYTK

SEQ ID NO: 34222 - protein, 8 aa, Homo sapiens
  misc_feature: Table A; Target 34222; HLA-B*51:01; KLK3; ENSG00000142515; TAA
APLILSRI

SEQ ID NO: 34223 - protein, 9 aa, Homo sapiens
  misc_feature: Table A; Target 34223; HLA-B*07:02; KLK3; ENSG00000142515; TAA
APLILSRIV

SEQ ID NO: 34224 - protein, 9 aa, Homo sapiens
  misc_feature: Table A; Target 34224; HLA-B*54:01; KLK3; ENSG00000142515; TAA
APLILSRIV

SEQ ID NO: 34225 - protein, 9 aa, Homo sapiens
  misc_feature: Table A; Target 34225; HLA-B*56:01; KLK3; ENSG00000142515; TAA
APLILSRIV

SEQ ID NO: 34226 - protein, 9 aa, Homo sapiens
  misc_feature: Table A; Target 34226; HLA-C*07:02; KLK3; ENSG00000142515; TAA
APLILSRIV

SEQ ID NO: 34227 - protein, 8 aa, Homo sapiens
  misc_feature: Table A; Target 34227; HLA-B*13:02; KLK3; ENSG00000142515; TAA
AQVHPQKV

SEQ ID NO: 34228 - protein, 10 aa, Homo sapiens
  misc_feature: Table A; Target 34228; HLA-A*03:01; KLK3; ENSG00000142515; TAA
AQVHPQKVTK

SEQ ID NO: 34229 - protein, 10 aa, Homo sapiens
  misc_feature: Table A; Target 34229; HLA-A*03:02; KLK3; ENSG00000142515; TAA
AQVHPQKVTK

SEQ ID NO: 34230 - protein, 10 aa, Homo sapiens
  misc_feature: Table A; Target 34230; HLA-A*11:01; KLK3; ENSG00000142515; TAA
AQVHPQKVTK

SEQ ID NO: 34231 - protein, 10 aa, Homo sapiens
  misc_feature: Table A; Target 34231; HLA-B*27:05; KLK3; ENSG00000142515; TAA
AQVHPQKVTK

SEQ ID NO: 34232 - protein, 11 aa, Homo sapiens
  misc_feature: Table A; Target 34232; HLA-A*32:01; KLK3; ENSG00000142515; TAA
AQVHPQKVTKF

SEQ ID NO: 34233 - protein, 11 aa, Homo sapiens
  misc_feature: Table A; Target 34233; HLA-B*15:01; KLK3; ENSG00000142515; TAA
AQVHPQKVTKF

SEQ ID NO: 34234 - protein, 11 aa, Homo sapiens
  misc_feature: Table A; Target 34234; HLA-C*02:02; KLK3; ENSG00000142515; TAA
AQVHPQKVTKF

SEQ ID NO: 34235 - protein, 8 aa, Homo sapiens
  misc_feature: Table A; Target 34235; HLA-C*04:01; KLK3; ENSG00000142515; TAA
AVCGGVLV

SEQ ID NO: 34236 - protein, 9 aa, Homo sapiens
  misc_feature: Table A; Target 34236; HLA-A*03:01; KLK3; ENSG00000142515; TAA
AVCGGVLVH

SEQ ID NO: 34237 - protein, 9 aa, Homo sapiens
  misc_feature: Table A; Target 34237; HLA-A*03:02; KLK3; ENSG00000142515; TAA
AVCGGVLVH

SEQ ID NO: 34238 - protein, 9 aa, Homo sapiens
  misc_feature: Table A; Target 34238; HLA-A*11:01; KLK3; ENSG00000142515; TAA
AVCGGVLVH

SEQ ID NO: 34239 - protein, 9 aa, Homo sapiens
  misc_feature: Table A; Target 34239; HLA-B*27:05; KLK3; ENSG00000142515; TAA
AVCGGVLVH

SEQ ID NO: 34240 - protein, 9 aa, Homo sapiens
  misc_feature: Table A; Target 34240; HLA-C*07:04; KLK3; ENSG00000142515; TAA
AVCGGVLVH

SEQ ID NO: 34241 - protein, 9 aa, Homo sapiens
  misc_feature: Table A; Target 34241; HLA-C*12:03; KLK3; ENSG00000142515; TAA
AVCGGVLVH

SEQ ID NO: 34242 - protein, 9 aa, Homo sapiens
  misc_feature: Table A; Target 34242; HLA-A*02:01; KLK3; ENSG00000142515; TAA
CALPERPSL

SEQ ID NO: 34243 - protein, 9 aa, Homo sapiens
  misc_feature: Table A; Target 34243; HLA-A*23:01; KLK3; ENSG00000142515; TAA
CALPERPSL

SEQ ID NO: 34244 - protein, 9 aa, Homo sapiens
  misc_feature: Table A; Target 34244; HLA-A*24:02; KLK3; ENSG00000142515; TAA
CALPERPSL

SEQ ID NO: 34245 - protein, 9 aa, Homo sapiens
  misc_feature: Table A; Target 34245; HLA-A*32:01; KLK3; ENSG00000142515; TAA
CALPERPSL

SEQ ID NO: 34246 - protein, 9 aa, Homo sapiens
  misc_feature: Table A; Target 34246; HLA-B*07:02; KLK3; ENSG00000142515; TAA
CALPERPSL

SEQ ID NO: 34247 - protein, 9 aa, Homo sapiens
  misc_feature: Table A; Target 34247; HLA-B*08:01; KLK3; ENSG00000142515; TAA
CALPERPSL

SEQ ID NO: 34248 - protein, 9 aa, Homo sapiens
  misc_feature: Table A; Target 34248; HLA-B*15:03; KLK3; ENSG00000142515; TAA
CALPERPSL

SEQ ID NO: 34249 - protein, 9 aa, Homo sapiens
  misc_feature: Table A; Target 34249; HLA-B*35:03; KLK3; ENSG00000142515; TAA
CALPERPSL

SEQ ID NO: 34250 - protein, 9 aa, Homo sapiens
  misc_feature: Table A; Target 34250; HLA-B*40:01; KLK3; ENSG00000142515; TAA
CALPERPSL

SEQ ID NO: 34251 - protein, 9 aa, Homo sapiens
  misc_feature: Table A; Target 34251; HLA-B*40:02; KLK3; ENSG00000142515; TAA
CALPERPSL

SEQ ID NO: 34252 - protein, 9 aa, Homo sapiens
  misc_feature: Table A; Target 34252; HLA-B*46:01; KLK3; ENSG00000142515; TAA
CALPERPSL

SEQ ID NO: 34253 - protein, 9 aa, Homo sapiens
  misc_feature: Table A; Target 34253; HLA-B*55:01; KLK3; ENSG00000142515; TAA
CALPERPSL

SEQ ID NO: 34254 - protein, 9 aa, Homo sapiens
  misc_feature: Table A; Target 34254; HLA-B*58:01; KLK3; ENSG00000142515; TAA
CALPERPSL

SEQ ID NO: 34255 - protein, 9 aa, Homo sapiens
  misc_feature: Table A; Target 34255; HLA-C*02:02; KLK3; ENSG00000142515; TAA
CALPERPSL

SEQ ID NO: 34256 - protein, 9 aa, Homo sapiens
  misc_feature: Table A; Target 34256; HLA-C*03:03; KLK3; ENSG00000142515; TAA
CALPERPSL

SEQ ID NO: 34257 - protein, 9 aa, Homo sapiens
  misc_feature: Table A; Target 34257; HLA-C*03:04; KLK3; ENSG00000142515; TAA
CALPERPSL

SEQ ID NO: 34258 - protein, 9 aa, Homo sapiens
  misc_feature: Table A; Target 34258; HLA-C*07:02; KLK3; ENSG00000142515; TAA
CALPERPSL

SEQ ID NO: 34259 - protein, 9 aa, Homo sapiens
  misc_feature: Table A; Target 34259; HLA-C*12:03; KLK3; ENSG00000142515; TAA
CALPERPSL

SEQ ID NO: 34260 - protein, 9 aa, Homo sapiens
  misc_feature: Table A; Target 34260; HLA-C*16:01; KLK3; ENSG00000142515; TAA
CALPERPSL

SEQ ID NO: 34261 - protein, 9 aa, Homo sapiens
  misc_feature: Table A; Target 34261; HLA-C*16:02; KLK3; ENSG00000142515; TAA
CALPERPSL

SEQ ID NO: 34262 - protein, 9 aa, Homo sapiens
  misc_feature: Table A; Target 34262; HLA-C*16:04; KLK3; ENSG00000142515; TAA
CALPERPSL

SEQ ID NO: 34263 - protein, 10 aa, Homo sapiens
  misc_feature: Table A; Target 34263; HLA-A*01:01; KLK3; ENSG00000142515; TAA
CALPERPSLY

SEQ ID NO: 34264 - protein, 10 aa, Homo sapiens
  misc_feature: Table A; Target 34264; HLA-A*29:02; KLK3; ENSG00000142515; TAA
CALPERPSLY

SEQ ID NO: 34265 - protein, 10 aa, Homo sapiens
  misc_feature: Table A; Target 34265; HLA-A*30:02; KLK3; ENSG00000142515; TAA
CALPERPSLY

SEQ ID NO: 34266 - protein, 10 aa, Homo sapiens
  misc_feature: Table A; Target 34266; HLA-B*57:01; KLK3; ENSG00000142515; TAA
CALPERPSLY

SEQ ID NO: 34267 - protein, 10 aa, Homo sapiens
  misc_feature: Table A; Target 34267; HLA-C*02:02; KLK3; ENSG00000142515; TAA
CALPERPSLY

SEQ ID NO: 34268 - protein, 10 aa, Homo sapiens
  misc_feature: Table A; Target 34268; HLA-C*12:03; KLK3; ENSG00000142515; TAA
CALPERPSLY

SEQ ID NO: 34269 - protein, 8 aa, Homo sapiens
  misc_feature: Table A; Target 34269; HLA-A*11:01; KLK3; ENSG00000142515; TAA
CAQVHPQK

SEQ ID NO: 34270 - protein, 8 aa, Homo sapiens
  misc_feature: Table A; Target 34270; HLA-C*16:01; KLK3; ENSG00000142515; TAA
CAQVHPQK

SEQ ID NO: 34271 - protein, 9 aa, Homo sapiens
  misc_feature: Table A; Target 34271; HLA-C*12:03; KLK3; ENSG00000142515; TAA
CAQVHPQKV

SEQ ID NO: 34272 - protein, 9 aa, Homo sapiens
  misc_feature: Table A; Target 34272; HLA-C*16:02; KLK3; ENSG00000142515; TAA
CAQVHPQKV

SEQ ID NO: 34273 - protein, 9 aa, Homo sapiens
  misc_feature: Table A; Target 34273; HLA-A*01:01; KLK3; ENSG00000142515; TAA
CVDLHVISN

SEQ ID NO: 34274 - protein, 9 aa, Homo sapiens
  misc_feature: Table A; Target 34274; HLA-A*24:02; KLK3; ENSG00000142515; TAA
CYASGWGSI

SEQ ID NO: 34275 - protein, 8 aa, Homo sapiens
  misc_feature: Table A; Target 34275; HLA-B*08:01; KLK3; ENSG00000142515; TAA
DAVKVMDL

SEQ ID NO: 34276 - protein, 8 aa, Homo sapiens
  misc_feature: Table A; Target 34276; HLA-B*18:01; KLK3; ENSG00000142515; TAA
DAVKVMDL

SEQ ID NO: 34277 - protein, 8 aa, Homo sapiens
  misc_feature: Table A; Target 34277; HLA-B*27:05; KLK3; ENSG00000142515; TAA
DAVKVMDL

SEQ ID NO: 34278 - protein, 8 aa, Homo sapiens
  misc_feature: Table A; Target 34278; HLA-B*35:01; KLK3; ENSG00000142515; TAA
DAVKVMDL

SEQ ID NO: 34279 - protein, 8 aa, Homo sapiens
  misc_feature: Table A; Target 34279; HLA-B*35:03; KLK3; ENSG00000142515; TAA
DAVKVMDL

SEQ ID NO: 34280 - protein, 8 aa, Homo sapiens
  misc_feature: Table A; Target 34280; HLA-B*40:02; KLK3; ENSG00000142515; TAA
DAVKVMDL

SEQ ID NO: 34281 - protein, 8 aa, Homo sapiens
  misc_feature: Table A; Target 34281; HLA-B*51:01; KLK3; ENSG00000142515; TAA
DAVKVMDL

SEQ ID NO: 34282 - protein, 8 aa, Homo sapiens
  misc_feature: Table A; Target 34282; HLA-C*07:01; KLK3; ENSG00000142515; TAA
DAVKVMDL

SEQ ID NO: 34283 - protein, 8 aa, Homo sapiens
  misc_feature: Table A; Target 34283; HLA-C*12:03; KLK3; ENSG00000142515; TAA
DAVKVMDL

SEQ ID NO: 34284 - protein, 8 aa, Homo sapiens
  misc_feature: Table A; Target 34284; HLA-B*37:01; KLK3; ENSG00000142515; TAA
DDSSHDLM

SEQ ID NO: 34285 - protein, 8 aa, Homo sapiens
  misc_feature: Table A; Target 34285; HLA-C*07:01; KLK3; ENSG00000142515; TAA
DDSSHDLM

SEQ ID NO: 34286 - protein, 9 aa, Homo sapiens
  misc_feature: Table A; Target 34286; HLA-B*38:01; KLK3; ENSG00000142515; TAA
DDSSHDLML

SEQ ID NO: 34287 - protein, 11 aa, Homo sapiens
  misc_feature: Table A; Target 34287; HLA-A*33:01; KLK3; ENSG00000142515; TAA
DDSSHDLMLLR

SEQ ID NO: 34288 - protein, 9 aa, Homo sapiens
  misc_feature: Table A; Target 34288; HLA-A*02:07; KLK3; ENSG00000142515; TAA
DLPTQEPAL

SEQ ID NO: 34289 - protein, 9 aa, Homo sapiens
  misc_feature: Table A; Target 34289; HLA-A*24:02; KLK3; ENSG00000142515; TAA
DLPTQEPAL

SEQ ID NO: 34290 - protein, 9 aa, Homo sapiens
  misc_feature: Table A; Target 34290; HLA-A*25:01; KLK3; ENSG00000142515; TAA
DLPTQEPAL

SEQ ID NO: 34291 - protein, 9 aa, Homo sapiens
  misc_feature: Table A; Target 34291; HLA-A*26:01; KLK3; ENSG00000142515; TAA
DLPTQEPAL

SEQ ID NO: 34292 - protein, 9 aa, Homo sapiens
  misc_feature: Table A; Target 34292; HLA-A*68:02; KLK3; ENSG00000142515; TAA
DLPTQEPAL

SEQ ID NO: 34293 - protein, 9 aa, Homo sapiens
  misc_feature: Table A; Target 34293; HLA-B*08:01; KLK3; ENSG00000142515; TAA
DLPTQEPAL

SEQ ID NO: 34294 - protein, 9 aa, Homo sapiens
  misc_feature: Table A; Target 34294; HLA-B*35:03; KLK3; ENSG00000142515; TAA
DLPTQEPAL

SEQ ID NO: 34295 - protein, 9 aa, Homo sapiens
  misc_feature: Table A; Target 34295; HLA-B*39:01; KLK3; ENSG00000142515; TAA
DLPTQEPAL

SEQ ID NO: 34296 - protein, 9 aa, Homo sapiens
  misc_feature: Table A; Target 34296; HLA-B*51:01; KLK3; ENSG00000142515; TAA
DLPTQEPAL

SEQ ID NO: 34297 - protein, 9 aa, Homo sapiens
  misc_feature: Table A; Target 34297; HLA-C*01:02; KLK3; ENSG00000142515; TAA
DLPTQEPAL

SEQ ID NO: 34298 - protein, 9 aa, Homo sapiens
  misc_feature: Table A; Target 34298; HLA-C*07:02; KLK3; ENSG00000142515; TAA
DLPTQEPAL

SEQ ID NO: 34299 - protein, 8 aa, Homo sapiens
  misc_feature: Table A; Target 34299; HLA-A*33:01; KLK3; ENSG00000142515; TAA
DMSLLKNR

SEQ ID NO: 34300 - protein, 8 aa, Homo sapiens
  misc_feature: Table A; Target 34300; HLA-A*33:03; KLK3; ENSG00000142515; TAA
DMSLLKNR

SEQ ID NO: 34301 - protein, 8 aa, Homo sapiens
  misc_feature: Table A; Target 34301; HLA-C*07:01; KLK3; ENSG00000142515; TAA
DSGGPLVC

SEQ ID NO: 34302 - protein, 9 aa, Homo sapiens
  misc_feature: Table A; Target 34302; HLA-A*33:01; KLK3; ENSG00000142515; TAA
DSSHDLMLL

SEQ ID NO: 34303 - protein, 10 aa, Homo sapiens
  misc_feature: Table A; Target 34303; HLA-A*33:01; KLK3; ENSG00000142515; TAA
DSSHDLMLLR

SEQ ID NO: 34304 - protein, 10 aa, Homo sapiens
  misc_feature: Table A; Target 34304; HLA-A*68:01; KLK3; ENSG00000142515; TAA
DSSHDLMLLR

SEQ ID NO: 34305 - protein, 8 aa, Homo sapiens
  misc_feature: Table A; Target 34305; HLA-A*68:02; KLK3; ENSG00000142515; TAA
DTGQVFQV

SEQ ID NO: 34306 - protein, 8 aa, Homo sapiens
  misc_feature: Table A; Target 34306; HLA-B*51:01; KLK3; ENSG00000142515; TAA
DTGQVFQV

SEQ ID NO: 34307 - protein, 9 aa, Homo sapiens
  misc_feature: Table A; Target 34307; HLA-A*33:01; KLK3; ENSG00000142515; TAA
DTGQVFQVS

SEQ ID NO: 34308 - protein, 10 aa, Homo sapiens
  misc_feature: Table A; Target 34308; HLA-A*68:01; KLK3; ENSG00000142515; TAA
DTGQVFQVSH

SEQ ID NO: 34309 - protein, 9 aa, Homo sapiens
  misc_feature: Table A; Target 34309; HLA-A*33:01; KLK3; ENSG00000142515; TAA
DVCAQVHPQ

SEQ ID NO: 34310 - protein, 9 aa, Homo sapiens
  misc_feature: Table A; Target 34310; HLA-C*07:01; KLK3; ENSG00000142515; TAA
DVCAQVHPQ

SEQ ID NO: 34311 - protein, 10 aa, Homo sapiens
  misc_feature: Table A; Target 34311; HLA-A*03:02; KLK3; ENSG00000142515; TAA
DVCAQVHPQK

SEQ ID NO: 34312 - protein, 10 aa, Homo sapiens
  misc_feature: Table A; Target 34312; HLA-A*11:01; KLK3; ENSG00000142515; TAA
DVCAQVHPQK

SEQ ID NO: 34313 - protein, 10 aa, Homo sapiens
  misc_feature: Table A; Target 34313; HLA-A*33:01; KLK3; ENSG00000142515; TAA
DVCAQVHPQK

SEQ ID NO: 34314 - protein, 10 aa, Homo sapiens
  misc_feature: Table A; Target 34314; HLA-A*33:03; KLK3; ENSG00000142515; TAA
DVCAQVHPQK

SEQ ID NO: 34315 - protein, 10 aa, Homo sapiens
  misc_feature: Table A; Target 34315; HLA-A*68:01; KLK3; ENSG00000142515; TAA
DVCAQVHPQK

SEQ ID NO: 34316 - protein, 9 aa, Homo sapiens
  misc_feature: Table A; Target 34316; HLA-A*68:02; KLK3; ENSG00000142515; TAA
EDTGQVFQV

SEQ ID NO: 34317 - protein, 9 aa, Homo sapiens
  misc_feature: Table A; Target 34317; HLA-C*16:02; KLK3; ENSG00000142515; TAA
EDTGQVFQV

SEQ ID NO: 34318 - protein, 10 aa, Homo sapiens
  misc_feature: Table A; Target 34318; HLA-C*07:01; KLK3; ENSG00000142515; TAA
EDTGQVFQVS

SEQ ID NO: 34319 - protein, 8 aa, Homo sapiens
  misc_feature: Table A; Target 34319; HLA-B*18:01; KLK3; ENSG00000142515; TAA
EEFLTPKK

SEQ ID NO: 34320 - protein, 9 aa, Homo sapiens
  misc_feature: Table A; Target 34320; HLA-A*30:01; KLK3; ENSG00000142515; TAA
EEFLTPKKL

SEQ ID NO: 34321 - protein, 9 aa, Homo sapiens
  misc_feature: Table A; Target 34321; HLA-B*18:01; KLK3; ENSG00000142515; TAA
EEFLTPKKL

SEQ ID NO: 34322 - protein, 9 aa, Homo sapiens
  misc_feature: Table A; Target 34322; HLA-B*40:01; KLK3; ENSG00000142515; TAA
EEFLTPKKL

SEQ ID NO: 34323 - protein, 9 aa, Homo sapiens
  misc_feature: Table A; Target 34323; HLA-B*40:02; KLK3; ENSG00000142515; TAA
EEFLTPKKL

SEQ ID NO: 34324 - protein, 9 aa, Homo sapiens
  misc_feature: Table A; Target 34324; HLA-B*44:02; KLK3; ENSG00000142515; TAA
EEFLTPKKL

SEQ ID NO: 34325 - protein, 9 aa, Homo sapiens
  misc_feature: Table A; Target 34325; HLA-B*44:03; KLK3; ENSG00000142515; TAA
EEFLTPKKL

SEQ ID NO: 34326 - protein, 9 aa, Homo sapiens
  misc_feature: Table A; Target 34326; HLA-B*49:01; KLK3; ENSG00000142515; TAA
EEFLTPKKL

SEQ ID NO: 34327 - protein, 9 aa, Homo sapiens
  misc_feature: Table A; Target 34327; HLA-C*16:04; KLK3; ENSG00000142515; TAA
EEFLTPKKL

SEQ ID NO: 34328 - protein, 9 aa, Homo sapiens
  misc_feature: Table A; Target 34328; HLA-A*25:01; KLK3; ENSG00000142515; TAA
ELTDAVKVM

SEQ ID NO: 34329 - protein, 9 aa, Homo sapiens
  misc_feature: Table A; Target 34329; HLA-A*26:01; KLK3; ENSG00000142515; TAA
ELTDAVKVM

SEQ ID NO: 34330 - protein, 9 aa, Homo sapiens
  misc_feature: Table A; Target 34330; HLA-B*35:01; KLK3; ENSG00000142515; TAA
ELTDAVKVM

SEQ ID NO: 34331 - protein, 9 aa, Homo sapiens
  misc_feature: Table A; Target 34331; HLA-B*39:01; KLK3; ENSG00000142515; TAA
ELTDAVKVM

SEQ ID NO: 34332 - protein, 9 aa, Homo sapiens
  misc_feature: Table A; Target 34332; HLA-B*44:03; KLK3; ENSG00000142515; TAA
ELTDAVKVM

SEQ ID NO: 34333 - protein, 9 aa, Homo sapiens
  misc_feature: Table A; Target 34333; HLA-B*55:01; KLK3; ENSG00000142515; TAA
ELTDAVKVM

SEQ ID NO: 34334 - protein, 9 aa, Homo sapiens
  misc_feature: Table A; Target 34334; HLA-C*07:04; KLK3; ENSG00000142515; TAA
ELTDAVKVM

SEQ ID NO: 34335 - protein, 9 aa, Homo sapiens
  misc_feature: Table A; Target 34335; HLA-C*12:03; KLK3; ENSG00000142515; TAA
ELTDAVKVM

SEQ ID NO: 34336 - protein, 9 aa, Homo sapiens
  misc_feature: Table A; Target 34336; HLA-C*16:01; KLK3; ENSG00000142515; TAA
ELTDAVKVM

SEQ ID NO: 34337 - protein, 9 aa, Homo sapiens
  misc_feature: Table A; Target 34337; HLA-C*16:02; KLK3; ENSG00000142515; TAA
ELTDAVKVM

SEQ ID NO: 34338 - protein, 9 aa, Homo sapiens
  misc_feature: Table A; Target 34338; HLA-A*68:02; KLK3; ENSG00000142515; TAA
EPAELTDAV

SEQ ID NO: 34339 - protein, 9 aa, Homo sapiens
  misc_feature: Table A; Target 34339; HLA-B*35:01; KLK3; ENSG00000142515; TAA
EPAELTDAV

SEQ ID NO: 34340 - protein, 9 aa, Homo sapiens
  misc_feature: Table A; Target 34340; HLA-B*35:03; KLK3; ENSG00000142515; TAA
EPAELTDAV

SEQ ID NO: 34341 - protein, 9 aa, Homo sapiens
  misc_feature: Table A; Target 34341; HLA-B*39:01; KLK3; ENSG00000142515; TAA
EPAELTDAV

SEQ ID NO: 34342 - protein, 9 aa, Homo sapiens
  misc_feature: Table A; Target 34342; HLA-B*51:01; KLK3; ENSG00000142515; TAA
EPAELTDAV

SEQ ID NO: 34343 - protein, 9 aa, Homo sapiens
  misc_feature: Table A; Target 34343; HLA-B*55:01; KLK3; ENSG00000142515; TAA
EPAELTDAV

SEQ ID NO: 34344 - protein, 9 aa, Homo sapiens
  misc_feature: Table A; Target 34344; HLA-B*56:01; KLK3; ENSG00000142515; TAA
EPAELTDAV

SEQ ID NO: 34345 - protein, 9 aa, Homo sapiens
  misc_feature: Table A; Target 34345; HLA-C*07:06; KLK3; ENSG00000142515; TAA
EPAELTDAV

SEQ ID NO: 34346 - protein, 10 aa, Homo sapiens
  misc_feature: Table A; Target 34346; HLA-A*33:03; KLK3; ENSG00000142515; TAA
EPAELTDAVK

SEQ ID NO: 34347 - protein, 10 aa, Homo sapiens
  misc_feature: Table A; Target 34347; HLA-A*68:01; KLK3; ENSG00000142515; TAA
EPAELTDAVK

SEQ ID NO: 34348 - protein, 10 aa, Homo sapiens
  misc_feature: Table A; Target 34348; HLA-B*27:02; KLK3; ENSG00000142515; TAA
EPAELTDAVK

SEQ ID NO: 34349 - protein, 10 aa, Homo sapiens
  misc_feature: Table A; Target 34349; HLA-B*35:01; KLK3; ENSG00000142515; TAA
EPAELTDAVK

SEQ ID NO: 34350 - protein, 10 aa, Homo sapiens
  misc_feature: Table A; Target 34350; HLA-B*35:03; KLK3; ENSG00000142515; TAA
EPAELTDAVK

SEQ ID NO: 34351 - protein, 10 aa, Homo sapiens
  misc_feature: Table A; Target 34351; HLA-C*07:06; KLK3; ENSG00000142515; TAA
EPAELTDAVK

SEQ ID NO: 34352 - protein, 11 aa, Homo sapiens
  misc_feature: Table A; Target 34352; HLA-A*26:01; KLK3; ENSG00000142515; TAA
EPAELTDAVKV

SEQ ID NO: 34353 - protein, 11 aa, Homo sapiens
  misc_feature: Table A; Target 34353; HLA-A*33:03; KLK3; ENSG00000142515; TAA
EPAELTDAVKV

SEQ ID NO: 34354 - protein, 11 aa, Homo sapiens
  misc_feature: Table A; Target 34354; HLA-A*68:01; KLK3; ENSG00000142515; TAA
EPAELTDAVKV

SEQ ID NO: 34355 - protein, 11 aa, Homo sapiens
  misc_feature: Table A; Target 34355; HLA-A*68:02; KLK3; ENSG00000142515; TAA
EPAELTDAVKV

SEQ ID NO: 34356 - protein, 11 aa, Homo sapiens
  misc_feature: Table A; Target 34356; HLA-B*35:01; KLK3; ENSG00000142515; TAA
EPAELTDAVKV

SEQ ID NO: 34357 - protein, 11 aa, Homo sapiens
  misc_feature: Table A; Target 34357; HLA-B*35:03; KLK3; ENSG00000142515; TAA
EPAELTDAVKV

SEQ ID NO: 34358 - protein, 11 aa, Homo sapiens
  misc_feature: Table A; Target 34358; HLA-B*51:01; KLK3; ENSG00000142515; TAA
EPAELTDAVKV

SEQ ID NO: 34359 - protein, 11 aa, Homo sapiens
  misc_feature: Table A; Target 34359; HLA-B*54:01; KLK3; ENSG00000142515; TAA
EPAELTDAVKV

SEQ ID NO: 34360 - protein, 11 aa, Homo sapiens
  misc_feature: Table A; Target 34360; HLA-B*55:01; KLK3; ENSG00000142515; TAA
EPAELTDAVKV

SEQ ID NO: 34361 - protein, 11 aa, Homo sapiens
  misc_feature: Table A; Target 34361; HLA-B*56:01; KLK3; ENSG00000142515; TAA
EPAELTDAVKV

SEQ ID NO: 34362 - protein, 11 aa, Homo sapiens
  misc_feature: Table A; Target 34362; HLA-C*07:06; KLK3; ENSG00000142515; TAA
EPAELTDAVKV

SEQ ID NO: 34363 - protein, 9 aa, Homo sapiens
  misc_feature: Table A; Target 34363; HLA-B*18:01; KLK3; ENSG00000142515; TAA
EPALGTTCY

SEQ ID NO: 34364 - protein, 9 aa, Homo sapiens
  misc_feature: Table A; Target 34364; HLA-B*35:03; KLK3; ENSG00000142515; TAA
EPALGTTCY

SEQ ID NO: 34365 - protein, 10 aa, Homo sapiens
  misc_feature: Table A; Target 34365; HLA-B*56:01; KLK3; ENSG00000142515; TAA
EPALGTTCYA

SEQ ID NO: 34366 - protein, 9 aa, Homo sapiens
  misc_feature: Table A; Target 34366; HLA-A*33:03; KLK3; ENSG00000142515; TAA
EPEEFLTPK

SEQ ID NO: 34367 - protein, 9 aa, Homo sapiens
  misc_feature: Table A; Target 34367; HLA-A*68:01; KLK3; ENSG00000142515; TAA
EPEEFLTPK

SEQ ID NO: 34368 - protein, 9 aa, Homo sapiens
  misc_feature: Table A; Target 34368; HLA-B*27:02; KLK3; ENSG00000142515; TAA
EPEEFLTPK

SEQ ID NO: 34369 - protein, 9 aa, Homo sapiens
  misc_feature: Table A; Target 34369; HLA-B*38:01; KLK3; ENSG00000142515; TAA
FHPEDTGQV

SEQ ID NO: 34370 - protein, 10 aa, Homo sapiens
  misc_feature: Table A; Target 34370; HLA-A*24:02; KLK3; ENSG00000142515; TAA
FHPEDTGQVF

SEQ ID NO: 34371 - protein, 10 aa, Homo sapiens
  misc_feature: Table A; Target 34371; HLA-B*15:03; KLK3; ENSG00000142515; TAA
FHPEDTGQVF

SEQ ID NO: 34372 - protein, 10 aa, Homo sapiens
  misc_feature: Table A; Target 34372; HLA-B*27:05; KLK3; ENSG00000142515; TAA
FHPEDTGQVF

SEQ ID NO: 34373 - protein, 10 aa, Homo sapiens
  misc_feature: Table A; Target 34373; HLA-B*38:01; KLK3; ENSG00000142515; TAA
FHPEDTGQVF

SEQ ID NO: 34374 - protein, 10 aa, Homo sapiens
  misc_feature: Table A; Target 34374; HLA-B*39:01; KLK3; ENSG00000142515; TAA
FHPEDTGQVF

SEQ ID NO: 34375 - protein, 10 aa, Homo sapiens
  misc_feature: Table A; Target 34375; HLA-C*01:02; KLK3; ENSG00000142515; TAA
FHPEDTGQVF

SEQ ID NO: 34376 - protein, 10 aa, Homo sapiens
  misc_feature: Table A; Target 34376; HLA-C*04:01; KLK3; ENSG00000142515; TAA
FHPEDTGQVF

SEQ ID NO: 34377 - protein, 10 aa, Homo sapiens
  misc_feature: Table A; Target 34377; HLA-C*05:01; KLK3; ENSG00000142515; TAA
FHPEDTGQVF

SEQ ID NO: 34378 - protein, 10 aa, Homo sapiens
  misc_feature: Table A; Target 34378; HLA-C*07:01; KLK3; ENSG00000142515; TAA
FHPEDTGQVF

SEQ ID NO: 34379 - protein, 10 aa, Homo sapiens
  misc_feature: Table A; Target 34379; HLA-C*07:04; KLK3; ENSG00000142515; TAA
FHPEDTGQVF

SEQ ID NO: 34380 - protein, 10 aa, Homo sapiens
  misc_feature: Table A; Target 34380; HLA-C*14:02; KLK3; ENSG00000142515; TAA
FHPEDTGQVF

SEQ ID NO: 34381 - protein, 8 aa, Homo sapiens
  misc_feature: Table A; Target 34381; HLA-B*35:01; KLK3; ENSG00000142515; TAA
FPHPLYDM

SEQ ID NO: 34382 - protein, 8 aa, Homo sapiens
  misc_feature: Table A; Target 34382; HLA-B*35:03; KLK3; ENSG00000142515; TAA
FPHPLYDM

SEQ ID NO: 34383 - protein, 8 aa, Homo sapiens
  misc_feature: Table A; Target 34383; HLA-B*51:01; KLK3; ENSG00000142515; TAA
FPHPLYDM

SEQ ID NO: 34384 - protein, 8 aa, Homo sapiens
  misc_feature: Table A; Target 34384; HLA-B*54:01; KLK3; ENSG00000142515; TAA
FPHPLYDM

SEQ ID NO: 34385 - protein, 8 aa, Homo sapiens
  misc_feature: Table A; Target 34385; HLA-B*55:01; KLK3; ENSG00000142515; TAA
FPHPLYDM

SEQ ID NO: 34386 - protein, 8 aa, Homo sapiens
  misc_feature: Table A; Target 34386; HLA-B*56:01; KLK3; ENSG00000142515; TAA
FPHPLYDM

SEQ ID NO: 34387 - protein, 10 aa, Homo sapiens
  misc_feature: Table A; Target 34387; HLA-B*35:01; KLK3; ENSG00000142515; TAA
FPHPLYDMSL

SEQ ID NO: 34388 - protein, 10 aa, Homo sapiens
  misc_feature: Table A; Target 34388; HLA-B*35:03; KLK3; ENSG00000142515; TAA
FPHPLYDMSL

SEQ ID NO: 34389 - protein, 10 aa, Homo sapiens
  misc_feature: Table A; Target 34389; HLA-B*54:01; KLK3; ENSG00000142515; TAA
FPHPLYDMSL

SEQ ID NO: 34390 - protein, 10 aa, Homo sapiens
  misc_feature: Table A; Target 34390; HLA-B*56:01; KLK3; ENSG00000142515; TAA
FPHPLYDMSL

SEQ ID NO: 34391 - protein, 9 aa, Homo sapiens
  misc_feature: Table A; Target 34391; HLA-A*03:01; KLK3; ENSG00000142515; TAA
GAAPLILSR

SEQ ID NO: 34392 - protein, 9 aa, Homo sapiens
  misc_feature: Table A; Target 34392; HLA-A*03:02; KLK3; ENSG00000142515; TAA
GAAPLILSR

SEQ ID NO: 34393 - protein, 9 aa, Homo sapiens
  misc_feature: Table A; Target 34393; HLA-A*11:01; KLK3; ENSG00000142515; TAA
GAAPLILSR

SEQ ID NO: 34394 - protein, 9 aa, Homo sapiens
  misc_feature: Table A; Target 34394; HLA-A*25:01; KLK3; ENSG00000142515; TAA
GAAPLILSR

SEQ ID NO: 34395 - protein, 9 aa, Homo sapiens
  misc_feature: Table A; Target 34395; HLA-A*26:01; KLK3; ENSG00000142515; TAA
GAAPLILSR

SEQ ID NO: 34396 - protein, 9 aa, Homo sapiens
  misc_feature: Table A; Target 34396; HLA-A*29:02; KLK3; ENSG00000142515; TAA
GAAPLILSR

SEQ ID NO: 34397 - protein, 9 aa, Homo sapiens
  misc_feature: Table A; Target 34397; HLA-A*31:01; KLK3; ENSG00000142515; TAA
GAAPLILSR

SEQ ID NO: 34398 - protein, 9 aa, Homo sapiens
  misc_feature: Table A; Target 34398; HLA-A*33:01; KLK3; ENSG00000142515; TAA
GAAPLILSR

SEQ ID NO: 34399 - protein, 9 aa, Homo sapiens
  misc_feature: Table A; Target 34399; HLA-A*33:03; KLK3; ENSG00000142515; TAA
GAAPLILSR

SEQ ID NO: 34400 - protein, 9 aa, Homo sapiens
  misc_feature: Table A; Target 34400; HLA-A*68:01; KLK3; ENSG00000142515; TAA
GAAPLILSR

SEQ ID NO: 34401 - protein, 9 aa, Homo sapiens
  misc_feature: Table A; Target 34401; HLA-B*13:02; KLK3; ENSG00000142515; TAA
GAAPLILSR

SEQ ID NO: 34402 - protein, 9 aa, Homo sapiens
  misc_feature: Table A; Target 34402; HLA-B*27:02; KLK3; ENSG00000142515; TAA
GAAPLILSR

SEQ ID NO: 34403 - protein, 9 aa, Homo sapiens
  misc_feature: Table A; Target 34403; HLA-B*27:05; KLK3; ENSG00000142515; TAA
GAAPLILSR

SEQ ID NO: 34404 - protein, 9 aa, Homo sapiens
  misc_feature: Table A; Target 34404; HLA-B*35:01; KLK3; ENSG00000142515; TAA
GAAPLILSR

SEQ ID NO: 34405 - protein, 9 aa, Homo sapiens
  misc_feature: Table A; Target 34405; HLA-B*56:01; KLK3; ENSG00000142515; TAA
GAAPLILSR

SEQ ID NO: 34406 - protein, 9 aa, Homo sapiens
  misc_feature: Table A; Target 34406; HLA-B*57:01; KLK3; ENSG00000142515; TAA
GAAPLILSR

SEQ ID NO: 34407 - protein, 9 aa, Homo sapiens
  misc_feature: Table A; Target 34407; HLA-C*02:02; KLK3; ENSG00000142515; TAA
GAAPLILSR

SEQ ID NO: 34408 - protein, 9 aa, Homo sapiens
  misc_feature: Table A; Target 34408; HLA-C*07:06; KLK3; ENSG00000142515; TAA
GAAPLILSR

SEQ ID NO: 34409 - protein, 9 aa, Homo sapiens
  misc_feature: Table A; Target 34409; HLA-C*12:03; KLK3; ENSG00000142515; TAA
GAAPLILSR

SEQ ID NO: 34410 - protein, 9 aa, Homo sapiens
  misc_feature: Table A; Target 34410; HLA-C*16:02; KLK3; ENSG00000142515; TAA
GAAPLILSR

SEQ ID NO: 34411 - protein, 9 aa, Homo sapiens
  misc_feature: Table A; Target 34411; HLA-C*16:04; KLK3; ENSG00000142515; TAA
GAAPLILSR

SEQ ID NO: 34412 - protein, 10 aa, Homo sapiens
  misc_feature: Table A; Target 34412; HLA-A*02:03; KLK3; ENSG00000142515; TAA
GAAPLILSRI

SEQ ID NO: 34413 - protein, 10 aa, Homo sapiens
  misc_feature: Table A; Target 34413; HLA-A*02:04; KLK3; ENSG00000142515; TAA
GAAPLILSRI

SEQ ID NO: 34414 - protein, 10 aa, Homo sapiens
  misc_feature: Table A; Target 34414; HLA-A*68:02; KLK3; ENSG00000142515; TAA
GAAPLILSRI

SEQ ID NO: 34415 - protein, 8 aa, Homo sapiens
  misc_feature: Table A; Target 34415; HLA-B*37:01; KLK3; ENSG00000142515; TAA
GDDSSHDL

SEQ ID NO: 34416 - protein, 10 aa, Homo sapiens
  misc_feature: Table A; Target 34416; HLA-B*38:01; KLK3; ENSG00000142515; TAA
GDDSSHDLML

SEQ ID NO: 34417 - protein, 10 aa, Homo sapiens
  misc_feature: Table A; Target 34417; HLA-B*40:01; KLK3; ENSG00000142515; TAA
GDDSSHDLML

SEQ ID NO: 34418 - protein, 8 aa, Homo sapiens
  misc_feature: Table A; Target 34418; HLA-B*39:01; KLK3; ENSG00000142515; TAA
GDSGGPLV

SEQ ID NO: 34419 - protein, 8 aa, Homo sapiens
  misc_feature: Table A; Target 34419; HLA-C*04:01; KLK3; ENSG00000142515; TAA
GDSGGPLV

SEQ ID NO: 34420 - protein, 8 aa, Homo sapiens
  misc_feature: Table A; Target 34420; HLA-C*06:02; KLK3; ENSG00000142515; TAA
GDSGGPLV

SEQ ID NO: 34421 - protein, 8 aa, Homo sapiens
  misc_feature: Table A; Target 34421; HLA-C*16:02; KLK3; ENSG00000142515; TAA
GDSGGPLV

SEQ ID NO: 34422 - protein, 9 aa, Homo sapiens
  misc_feature: Table A; Target 34422; HLA-C*07:04; KLK3; ENSG00000142515; TAA
GDSGGPLVC

SEQ ID NO: 34423 - protein, 10 aa, Homo sapiens
  misc_feature: Table A; Target 34423; HLA-C*07:01; KLK3; ENSG00000142515; TAA
GDSGGPLVCN

SEQ ID NO: 34424 - protein, 11 aa, Homo sapiens
  misc_feature: Table A; Target 34424; HLA-C*04:01; KLK3; ENSG00000142515; TAA
GDSGGPLVCNG

SEQ ID NO: 34425 - protein, 8 aa, Homo sapiens
  misc_feature: Table A; Target 34425; HLA-B*15:01; KLK3; ENSG00000142515; TAA
GQVFQVSH

SEQ ID NO: 34426 - protein, 10 aa, Homo sapiens
  misc_feature: Table A; Target 34426; HLA-A*30:02; KLK3; ENSG00000142515; TAA
GQVFQVSHSF

SEQ ID NO: 34427 - protein, 10 aa, Homo sapiens
  misc_feature: Table A; Target 34427; HLA-B*15:01; KLK3; ENSG00000142515; TAA
GQVFQVSHSF

SEQ ID NO: 34428 - protein, 10 aa, Homo sapiens
  misc_feature: Table A; Target 34428; HLA-B*15:03; KLK3; ENSG00000142515; TAA
GQVFQVSHSF

SEQ ID NO: 34429 - protein, 10 aa, Homo sapiens
  misc_feature: Table A; Target 34429; HLA-B*27:02; KLK3; ENSG00000142515; TAA
GQVFQVSHSF

SEQ ID NO: 34430 - protein, 10 aa, Homo sapiens
  misc_feature: Table A; Target 34430; HLA-B*44:03; KLK3; ENSG00000142515; TAA
GQVFQVSHSF

SEQ ID NO: 34431 - protein, 10 aa, Homo sapiens
  misc_feature: Table A; Target 34431; HLA-C*16:04; KLK3; ENSG00000142515; TAA
GQVFQVSHSF

SEQ ID NO: 34432 - protein, 9 aa, Homo sapiens
  misc_feature: Table A; Target 34432; HLA-B*27:05; KLK3; ENSG00000142515; TAA
GRAVCGGVL

SEQ ID NO: 34433 - protein, 9 aa, Homo sapiens
  misc_feature: Table A; Target 34433; HLA-C*06:02; KLK3; ENSG00000142515; TAA
GRAVCGGVL

SEQ ID NO: 34434 - protein, 10 aa, Homo sapiens
  misc_feature: Table A; Target 34434; HLA-B*27:05; KLK3; ENSG00000142515; TAA
GRWTGGKSTC

SEQ ID NO: 34435 - protein, 10 aa, Homo sapiens
  misc_feature: Table A; Target 34435; HLA-C*06:02; KLK3; ENSG00000142515; TAA
GRWTGGKSTC

SEQ ID NO: 34436 - protein, 9 aa, Homo sapiens
  misc_feature: Table A; Target 34436; HLA-B*58:01; KLK3; ENSG00000142515; TAA
GSIEPEEFL

SEQ ID NO: 34437 - protein, 9 aa, Homo sapiens
  misc_feature: Table A; Target 34437; HLA-B*57:01; KLK3; ENSG00000142515; TAA
GTTCYASGW

SEQ ID NO: 34438 - protein, 9 aa, Homo sapiens
  misc_feature: Table A; Target 34438; HLA-A*30:01; KLK3; ENSG00000142515; TAA
GVLQGITSW

SEQ ID NO: 34439 - protein, 9 aa, Homo sapiens
  misc_feature: Table A; Target 34439; HLA-B*13:02; KLK3; ENSG00000142515; TAA
GVLQGITSW

SEQ ID NO: 34440 - protein, 9 aa, Homo sapiens
  misc_feature: Table A; Target 34440; HLA-B*18:01; KLK3; ENSG00000142515; TAA
GVLQGITSW

SEQ ID NO: 34441 - protein, 9 aa, Homo sapiens
  misc_feature: Table A; Target 34441; HLA-B*40:02; KLK3; ENSG00000142515; TAA
GVLQGITSW

SEQ ID NO: 34442 - protein, 9 aa, Homo sapiens
  misc_feature: Table A; Target 34442; HLA-C*01:02; KLK3; ENSG00000142515; TAA
GVLQGITSW

SEQ ID NO: 34443 - protein, 9 aa, Homo sapiens
  misc_feature: Table A; Target 34443; HLA-C*02:02; KLK3; ENSG00000142515; TAA
GVLQGITSW

SEQ ID NO: 34444 - protein, 9 aa, Homo sapiens
  misc_feature: Table A; Target 34444; HLA-C*07:06; KLK3; ENSG00000142515; TAA
GVLQGITSW

SEQ ID NO: 34445 - protein, 9 aa, Homo sapiens
  misc_feature: Table A; Target 34445; HLA-A*32:01; KLK3; ENSG00000142515; TAA
HPEDTGQVF

SEQ ID NO: 34446 - protein, 9 aa, Homo sapiens
  misc_feature: Table A; Target 34446; HLA-A*33:03; KLK3; ENSG00000142515; TAA
HPEDTGQVF

SEQ ID NO: 34447 - protein, 9 aa, Homo sapiens
  misc_feature: Table A; Target 34447; HLA-A*68:01; KLK3; ENSG00000142515; TAA
HPEDTGQVF

SEQ ID NO: 34448 - protein, 9 aa, Homo sapiens
  misc_feature: Table A; Target 34448; HLA-B*07:02; KLK3; ENSG00000142515; TAA
HPEDTGQVF

SEQ ID NO: 34449 - protein, 9 aa, Homo sapiens
  misc_feature: Table A; Target 34449; HLA-B*15:01; KLK3; ENSG00000142515; TAA
HPEDTGQVF

SEQ ID NO: 34450 - protein, 9 aa, Homo sapiens
  misc_feature: Table A; Target 34450; HLA-B*15:03; KLK3; ENSG00000142515; TAA
HPEDTGQVF

SEQ ID NO: 34451 - protein, 9 aa, Homo sapiens
  misc_feature: Table A; Target 34451; HLA-B*18:01; KLK3; ENSG00000142515; TAA
HPEDTGQVF

SEQ ID NO: 34452 - protein, 9 aa, Homo sapiens
  misc_feature: Table A; Target 34452; HLA-B*35:01; KLK3; ENSG00000142515; TAA
HPEDTGQVF

SEQ ID NO: 34453 - protein, 9 aa, Homo sapiens
  misc_feature: Table A; Target 34453; HLA-B*35:03; KLK3; ENSG00000142515; TAA
HPEDTGQVF

SEQ ID NO: 34454 - protein, 9 aa, Homo sapiens
  misc_feature: Table A; Target 34454; HLA-B*38:01; KLK3; ENSG00000142515; TAA
HPEDTGQVF

SEQ ID NO: 34455 - protein, 9 aa, Homo sapiens
  misc_feature: Table A; Target 34455; HLA-B*39:01; KLK3; ENSG00000142515; TAA
HPEDTGQVF

SEQ ID NO: 34456 - protein, 9 aa, Homo sapiens
  misc_feature: Table A; Target 34456; HLA-B*55:01; KLK3; ENSG00000142515; TAA
HPEDTGQVF

SEQ ID NO: 34457 - protein, 9 aa, Homo sapiens
  misc_feature: Table A; Target 34457; HLA-C*01:02; KLK3; ENSG00000142515; TAA
HPEDTGQVF

SEQ ID NO: 34458 - protein, 9 aa, Homo sapiens
  misc_feature: Table A; Target 34458; HLA-C*03:03; KLK3; ENSG00000142515; TAA
HPEDTGQVF

SEQ ID NO: 34459 - protein, 9 aa, Homo sapiens
  misc_feature: Table A; Target 34459; HLA-C*03:04; KLK3; ENSG00000142515; TAA
HPEDTGQVF

SEQ ID NO: 34460 - protein, 9 aa, Homo sapiens
  misc_feature: Table A; Target 34460; HLA-C*04:01; KLK3; ENSG00000142515; TAA
HPEDTGQVF

SEQ ID NO: 34461 - protein, 9 aa, Homo sapiens
  misc_feature: Table A; Target 34461; HLA-C*05:01; KLK3; ENSG00000142515; TAA
HPEDTGQVF

SEQ ID NO: 34462 - protein, 9 aa, Homo sapiens
  misc_feature: Table A; Target 34462; HLA-C*07:01; KLK3; ENSG00000142515; TAA
HPEDTGQVF

SEQ ID NO: 34463 - protein, 9 aa, Homo sapiens
  misc_feature: Table A; Target 34463; HLA-C*07:02; KLK3; ENSG00000142515; TAA
HPEDTGQVF

SEQ ID NO: 34464 - protein, 9 aa, Homo sapiens
  misc_feature: Table A; Target 34464; HLA-C*07:04; KLK3; ENSG00000142515; TAA
HPEDTGQVF

SEQ ID NO: 34465 - protein, 9 aa, Homo sapiens
  misc_feature: Table A; Target 34465; HLA-C*07:06; KLK3; ENSG00000142515; TAA
HPEDTGQVF

SEQ ID NO: 34466 - protein, 9 aa, Homo sapiens
  misc_feature: Table A; Target 34466; HLA-C*12:03; KLK3; ENSG00000142515; TAA
HPEDTGQVF

SEQ ID NO: 34467 - protein, 9 aa, Homo sapiens
  misc_feature: Table A; Target 34467; HLA-C*14:02; KLK3; ENSG00000142515; TAA
HPEDTGQVF

SEQ ID NO: 34468 - protein, 11 aa, Homo sapiens
  misc_feature: Table A; Target 34468; HLA-A*68:01; KLK3; ENSG00000142515; TAA
HPEDTGQVFQV

SEQ ID NO: 34469 - protein, 11 aa, Homo sapiens
  misc_feature: Table A; Target 34469; HLA-A*68:02; KLK3; ENSG00000142515; TAA
HPEDTGQVFQV

SEQ ID NO: 34470 - protein, 11 aa, Homo sapiens
  misc_feature: Table A; Target 34470; HLA-B*35:03; KLK3; ENSG00000142515; TAA
HPEDTGQVFQV

SEQ ID NO: 34471 - protein, 11 aa, Homo sapiens
  misc_feature: Table A; Target 34471; HLA-B*54:01; KLK3; ENSG00000142515; TAA
HPEDTGQVFQV

SEQ ID NO: 34472 - protein, 11 aa, Homo sapiens
  misc_feature: Table A; Target 34472; HLA-B*55:01; KLK3; ENSG00000142515; TAA
HPEDTGQVFQV

SEQ ID NO: 34473 - protein, 11 aa, Homo sapiens
  misc_feature: Table A; Target 34473; HLA-B*56:01; KLK3; ENSG00000142515; TAA
HPEDTGQVFQV

SEQ ID NO: 34474 - protein, 8 aa, Homo sapiens
  misc_feature: Table A; Target 34474; HLA-B*35:03; KLK3; ENSG00000142515; TAA
HPLYDMSL

SEQ ID NO: 34475 - protein, 9 aa, Homo sapiens
  misc_feature: Table A; Target 34475; HLA-B*35:01; KLK3; ENSG00000142515; TAA
HPLYDMSLL

SEQ ID NO: 34476 - protein, 9 aa, Homo sapiens
  misc_feature: Table A; Target 34476; HLA-B*35:03; KLK3; ENSG00000142515; TAA
HPLYDMSLL

SEQ ID NO: 34477 - protein, 8 aa, Homo sapiens
  misc_feature: Table A; Target 34477; HLA-B*07:02; KLK3; ENSG00000142515; TAA
HPQKVTKF

SEQ ID NO: 34478 - protein, 8 aa, Homo sapiens
  misc_feature: Table A; Target 34478; HLA-B*08:01; KLK3; ENSG00000142515; TAA
HPQKVTKF

SEQ ID NO: 34479 - protein, 8 aa, Homo sapiens
  misc_feature: Table A; Target 34479; HLA-B*35:01; KLK3; ENSG00000142515; TAA
HPQKVTKF

SEQ ID NO: 34480 - protein, 8 aa, Homo sapiens
  misc_feature: Table A; Target 34480; HLA-B*37:01; KLK3; ENSG00000142515; TAA
HPQKVTKF

SEQ ID NO: 34481 - protein, 8 aa, Homo sapiens
  misc_feature: Table A; Target 34481; HLA-B*55:01; KLK3; ENSG00000142515; TAA
HPQKVTKF

SEQ ID NO: 34482 - protein, 9 aa, Homo sapiens
  misc_feature: Table A; Target 34482; HLA-B*07:02; KLK3; ENSG00000142515; TAA
HPQKVTKFM

SEQ ID NO: 34483 - protein, 8 aa, Homo sapiens
  misc_feature: Table A; Target 34483; HLA-B*55:01; KLK3; ENSG00000142515; TAA
HPQWVLTA

SEQ ID NO: 34484 - protein, 9 aa, Homo sapiens
  misc_feature: Table A; Target 34484; HLA-B*07:02; KLK3; ENSG00000142515; TAA
HPQWVLTAA

SEQ ID NO: 34485 - protein, 8 aa, Homo sapiens
  misc_feature: Table A; Target 34485; HLA-A*30:02; KLK3; ENSG00000142515; TAA
HSFPHPLY

SEQ ID NO: 34486 - protein, 8 aa, Homo sapiens
  misc_feature: Table A; Target 34486; HLA-A*32:01; KLK3; ENSG00000142515; TAA
HSFPHPLY

SEQ ID NO: 34487 - protein, 8 aa, Homo sapiens
  misc_feature: Table A; Target 34487; HLA-B*54:01; KLK3; ENSG00000142515; TAA
HSFPHPLY

SEQ ID NO: 34488 - protein, 8 aa, Homo sapiens
  misc_feature: Table A; Target 34488; HLA-C*04:01; KLK3; ENSG00000142515; TAA
HSFPHPLY

SEQ ID NO: 34489 - protein, 10 aa, Homo sapiens
  misc_feature: Table A; Target 34489; HLA-B*57:01; KLK3; ENSG00000142515; TAA
HSFPHPLYDM

SEQ ID NO: 34490 - protein, 9 aa, Homo sapiens
  misc_feature: Table A; Target 34490; HLA-A*02:04; KLK3; ENSG00000142515; TAA
HSQPWQVLV

SEQ ID NO: 34491 - protein, 9 aa, Homo sapiens
  misc_feature: Table A; Target 34491; HLA-A*02:07; KLK3; ENSG00000142515; TAA
HSQPWQVLV

SEQ ID NO: 34492 - protein, 9 aa, Homo sapiens
  misc_feature: Table A; Target 34492; HLA-A*68:02; KLK3; ENSG00000142515; TAA
HSQPWQVLV

SEQ ID NO: 34493 - protein, 9 aa, Homo sapiens
  misc_feature: Table A; Target 34493; HLA-B*13:02; KLK3; ENSG00000142515; TAA
HSQPWQVLV

SEQ ID NO: 34494 - protein, 10 aa, Homo sapiens
  misc_feature: Table A; Target 34494; HLA-B*54:01; KLK3; ENSG00000142515; TAA
HSQPWQVLVA

SEQ ID NO: 34495 - protein, 9 aa, Homo sapiens
  misc_feature: Table A; Target 34495; HLA-B*35:03; KLK3; ENSG00000142515; TAA
HVISNDVCA

SEQ ID NO: 34496 - protein, 9 aa, Homo sapiens
  misc_feature: Table A; Target 34496; HLA-B*54:01; KLK3; ENSG00000142515; TAA
HVISNDVCA

SEQ ID NO: 34497 - protein, 9 aa, Homo sapiens
  misc_feature: Table A; Target 34497; HLA-B*55:01; KLK3; ENSG00000142515; TAA
HVISNDVCA

SEQ ID NO: 34498 - protein, 9 aa, Homo sapiens
  misc_feature: Table A; Target 34498; HLA-B*56:01; KLK3; ENSG00000142515; TAA
HVISNDVCA

SEQ ID NO: 34499 - protein, 10 aa, Homo sapiens
  misc_feature: Table A; Target 34499; HLA-A*26:01; KLK3; ENSG00000142515; TAA
HVISNDVCAQ

SEQ ID NO: 34500 - protein, 10 aa, Homo sapiens
  misc_feature: Table A; Target 34500; HLA-C*07:01; KLK3; ENSG00000142515; TAA
HVISNDVCAQ

SEQ ID NO: 34501 - protein, 11 aa, Homo sapiens
  misc_feature: Table A; Target 34501; HLA-A*68:02; KLK3; ENSG00000142515; TAA
HVISNDVCAQV

SEQ ID NO: 34502 - protein, 9 aa, Homo sapiens
  misc_feature: Table A; Target 34502; HLA-B*49:01; KLK3; ENSG00000142515; TAA
IEPEEFLTP

SEQ ID NO: 34503 - protein, 10 aa, Homo sapiens
  misc_feature: Table A; Target 34503; HLA-A*11:01; KLK3; ENSG00000142515; TAA
IEPEEFLTPK

SEQ ID NO: 34504 - protein, 10 aa, Homo sapiens
  misc_feature: Table A; Target 34504; HLA-B*27:02; KLK3; ENSG00000142515; TAA
IEPEEFLTPK

SEQ ID NO: 34505 - protein, 8 aa, Homo sapiens
  misc_feature: Table A; Target 34505; HLA-C*03:03; KLK3; ENSG00000142515; TAA
IGAAPLIL

SEQ ID NO: 34506 - protein, 8 aa, Homo sapiens
  misc_feature: Table A; Target 34506; HLA-C*03:04; KLK3; ENSG00000142515; TAA
IGAAPLIL

SEQ ID NO: 34507 - protein, 8 aa, Homo sapiens
  misc_feature: Table A; Target 34507; HLA-C*07:01; KLK3; ENSG00000142515; TAA
IGAAPLIL

SEQ ID NO: 34508 - protein, 8 aa, Homo sapiens
  misc_feature: Table A; Target 34508; HLA-C*07:02; KLK3; ENSG00000142515; TAA
IGAAPLIL

SEQ ID NO: 34509 - protein, 8 aa, Homo sapiens
  misc_feature: Table A; Target 34509; HLA-C*12:03; KLK3; ENSG00000142515; TAA
IGAAPLIL

SEQ ID NO: 34510 - protein, 8 aa, Homo sapiens
  misc_feature: Table A; Target 34510; HLA-C*16:01; KLK3; ENSG00000142515; TAA
IGAAPLIL

SEQ ID NO: 34511 - protein, 9 aa, Homo sapiens
  misc_feature: Table A; Target 34511; HLA-B*27:05; KLK3; ENSG00000142515; TAA
IGAAPLILS

SEQ ID NO: 34512 - protein, 9 aa, Homo sapiens
  misc_feature: Table A; Target 34512; HLA-C*04:01; KLK3; ENSG00000142515; TAA
IGAAPLILS

SEQ ID NO: 34513 - protein, 9 aa, Homo sapiens
  misc_feature: Table A; Target 34513; HLA-C*07:02; KLK3; ENSG00000142515; TAA
IGAAPLILS

SEQ ID NO: 34514 - protein, 10 aa, Homo sapiens
  misc_feature: Table A; Target 34514; HLA-A*31:01; KLK3; ENSG00000142515; TAA
IGAAPLILSR

SEQ ID NO: 34515 - protein, 10 aa, Homo sapiens
  misc_feature: Table A; Target 34515; HLA-A*33:03; KLK3; ENSG00000142515; TAA
IGAAPLILSR

SEQ ID NO: 34516 - protein, 10 aa, Homo sapiens
  misc_feature: Table A; Target 34516; HLA-A*68:01; KLK3; ENSG00000142515; TAA
IGAAPLILSR

SEQ ID NO: 34517 - protein, 10 aa, Homo sapiens
  misc_feature: Table A; Target 34517; HLA-B*27:02; KLK3; ENSG00000142515; TAA
IGAAPLILSR

SEQ ID NO: 34518 - protein, 10 aa, Homo sapiens
  misc_feature: Table A; Target 34518; HLA-C*07:06; KLK3; ENSG00000142515; TAA
IGAAPLILSR

SEQ ID NO: 34519 - protein, 8 aa, Homo sapiens
  misc_feature: Table A; Target 34519; HLA-B*08:01; KLK3; ENSG00000142515; TAA
ILLGRHSL

SEQ ID NO: 34520 - protein, 9 aa, Homo sapiens
  misc_feature: Table A; Target 34520; HLA-A*24:02; KLK3; ENSG00000142515; TAA
ILLGRHSLF

SEQ ID NO: 34521 - protein, 9 aa, Homo sapiens
  misc_feature: Table A; Target 34521; HLA-A*25:01; KLK3; ENSG00000142515; TAA
ILSRIVGGW

SEQ ID NO: 34522 - protein, 9 aa, Homo sapiens
  misc_feature: Table A; Target 34522; HLA-A*32:01; KLK3; ENSG00000142515; TAA
ILSRIVGGW

SEQ ID NO: 34523 - protein, 9 aa, Homo sapiens
  misc_feature: Table A; Target 34523; HLA-B*57:01; KLK3; ENSG00000142515; TAA
ILSRIVGGW

SEQ ID NO: 34524 - protein, 9 aa, Homo sapiens
  misc_feature: Table A; Target 34524; HLA-B*27:05; KLK3; ENSG00000142515; TAA
IRNKSVILL

SEQ ID NO: 34525 - protein, 9 aa, Homo sapiens
  misc_feature: Table A; Target 34525; HLA-C*06:02; KLK3; ENSG00000142515; TAA
IRNKSVILL

SEQ ID NO: 34526 - protein, 9 aa, Homo sapiens
  misc_feature: Table A; Target 34526; HLA-C*07:01; KLK3; ENSG00000142515; TAA
IRNKSVILL

SEQ ID NO: 34527 - protein, 9 aa, Homo sapiens
  misc_feature: Table A; Target 34527; HLA-C*07:02; KLK3; ENSG00000142515; TAA
IRNKSVILL

SEQ ID NO: 34528 - protein, 9 aa, Homo sapiens
  misc_feature: Table A; Target 34528; HLA-A*02:01; KLK3; ENSG00000142515; TAA
ISNDVCAQV

SEQ ID NO: 34529 - protein, 9 aa, Homo sapiens
  misc_feature: Table A; Target 34529; HLA-A*02:03; KLK3; ENSG00000142515; TAA
ISNDVCAQV

SEQ ID NO: 34530 - protein, 9 aa, Homo sapiens
  misc_feature: Table A; Target 34530; HLA-A*32:01; KLK3; ENSG00000142515; TAA
ISNDVCAQV

SEQ ID NO: 34531 - protein, 9 aa, Homo sapiens
  misc_feature: Table A; Target 34531; HLA-A*68:02; KLK3; ENSG00000142515; TAA
ISNDVCAQV

SEQ ID NO: 34532 - protein, 9 aa, Homo sapiens
  misc_feature: Table A; Target 34532; HLA-B*13:02; KLK3; ENSG00000142515; TAA
ISNDVCAQV

SEQ ID NO: 34533 - protein, 9 aa, Homo sapiens
  misc_feature: Table A; Target 34533; HLA-B*55:01; KLK3; ENSG00000142515; TAA
ISNDVCAQV

SEQ ID NO: 34534 - protein, 9 aa, Homo sapiens
  misc_feature: Table A; Target 34534; HLA-C*06:02; KLK3; ENSG00000142515; TAA
ISNDVCAQV

SEQ ID NO: 34535 - protein, 9 aa, Homo sapiens
  misc_feature: Table A; Target 34535; HLA-C*12:03; KLK3; ENSG00000142515; TAA
ISNDVCAQV

SEQ ID NO: 34536 - protein, 9 aa, Homo sapiens
  misc_feature: Table A; Target 34536; HLA-C*16:02; KLK3; ENSG00000142515; TAA
ISNDVCAQV

SEQ ID NO: 34537 - protein, 8 aa, Homo sapiens
  misc_feature: Table A; Target 34537; HLA-B*37:01; KLK3; ENSG00000142515; TAA
KDTIVANP

SEQ ID NO: 34538 - protein, 8 aa, Homo sapiens
  misc_feature: Table A; Target 34538; HLA-C*06:02; KLK3; ENSG00000142515; TAA
KDTIVANP

SEQ ID NO: 34539 - protein, 8 aa, Homo sapiens
  misc_feature: Table A; Target 34539; HLA-C*07:04; KLK3; ENSG00000142515; TAA
KDTIVANP

SEQ ID NO: 34540 - protein, 8 aa, Homo sapiens
  misc_feature: Table A; Target 34540; HLA-C*16:02; KLK3; ENSG00000142515; TAA
KDTIVANP

SEQ ID NO: 34541 - protein, 9 aa, Homo sapiens
  misc_feature: Table A; Target 34541; HLA-B*38:01; KLK3; ENSG00000142515; TAA
KHSQPWQVL

SEQ ID NO: 34542 - protein, 8 aa, Homo sapiens
  misc_feature: Table A; Target 34542; HLA-A*31:01; KLK3; ENSG00000142515; TAA
KSVILLGR

SEQ ID NO: 34543 - protein, 9 aa, Homo sapiens
  misc_feature: Table A; Target 34543; HLA-A*31:01; KLK3; ENSG00000142515; TAA
KVMDLPTQE

SEQ ID NO: 34544 - protein, 9 aa, Homo sapiens
  misc_feature: Table A; Target 34544; HLA-A*32:01; KLK3; ENSG00000142515; TAA
KVMDLPTQE

SEQ ID NO: 34545 - protein, 10 aa, Homo sapiens
  misc_feature: Table A; Target 34545; HLA-A*32:01; KLK3; ENSG00000142515; TAA
KVMDLPTQEP

SEQ ID NO: 34546 - protein, 11 aa, Homo sapiens
  misc_feature: Table A; Target 34546; HLA-A*02:01; KLK3; ENSG00000142515; TAA
KVMDLPTQEPA

SEQ ID NO: 34547 - protein, 11 aa, Homo sapiens
  misc_feature: Table A; Target 34547; HLA-B*56:01; KLK3; ENSG00000142515; TAA
KVMDLPTQEPA

SEQ ID NO: 34548 - protein, 11 aa, Homo sapiens
  misc_feature: Table A; Target 34548; HLA-A*23:01; KLK3; ENSG00000142515; TAA
LFHPEDTGQVF

SEQ ID NO: 34549 - protein, 11 aa, Homo sapiens
  misc_feature: Table A; Target 34549; HLA-A*24:02; KLK3; ENSG00000142515; TAA
LFHPEDTGQVF

SEQ ID NO: 34550 - protein, 11 aa, Homo sapiens
  misc_feature: Table A; Target 34550; HLA-A*29:02; KLK3; ENSG00000142515; TAA
LFHPEDTGQVF

SEQ ID NO: 34551 - protein, 11 aa, Homo sapiens
  misc_feature: Table A; Target 34551; HLA-A*30:02; KLK3; ENSG00000142515; TAA
LFHPEDTGQVF

SEQ ID NO: 34552 - protein, 11 aa, Homo sapiens
  misc_feature: Table A; Target 34552; HLA-B*15:01; KLK3; ENSG00000142515; TAA
LFHPEDTGQVF

SEQ ID NO: 34553 - protein, 11 aa, Homo sapiens
  misc_feature: Table A; Target 34553; HLA-B*46:01; KLK3; ENSG00000142515; TAA
LFHPEDTGQVF

SEQ ID NO: 34554 - protein, 11 aa, Homo sapiens
  misc_feature: Table A; Target 34554; HLA-B*57:01; KLK3; ENSG00000142515; TAA
LFHPEDTGQVF

SEQ ID NO: 34555 - protein, 11 aa, Homo sapiens
  misc_feature: Table A; Target 34555; HLA-C*14:02; KLK3; ENSG00000142515; TAA
LFHPEDTGQVF

SEQ ID NO: 34556 - protein, 10 aa, Homo sapiens
  misc_feature: Table A; Target 34556; HLA-A*02:03; KLK3; ENSG00000142515; TAA
LLRLSEPAEL

SEQ ID NO: 34557 - protein, 10 aa, Homo sapiens
  misc_feature: Table A; Target 34557; HLA-A*02:04; KLK3; ENSG00000142515; TAA
LLRLSEPAEL

SEQ ID NO: 34558 - protein, 10 aa, Homo sapiens
  misc_feature: Table A; Target 34558; HLA-C*07:02; KLK3; ENSG00000142515; TAA
LLRLSEPAEL

SEQ ID NO: 34559 - protein, 8 aa, Homo sapiens
  misc_feature: Table A; Target 34559; HLA-A*01:01; KLK3; ENSG00000142515; TAA
LPERPSLY

SEQ ID NO: 34560 - protein, 8 aa, Homo sapiens
  misc_feature: Table A; Target 34560; HLA-B*35:01; KLK3; ENSG00000142515; TAA
LPERPSLY

SEQ ID NO: 34561 - protein, 8 aa, Homo sapiens
  misc_feature: Table A; Target 34561; HLA-B*55:01; KLK3; ENSG00000142515; TAA
LPERPSLY

SEQ ID NO: 34562 - protein, 8 aa, Homo sapiens
  misc_feature: Table A; Target 34562; HLA-C*03:03; KLK3; ENSG00000142515; TAA
LPERPSLY

SEQ ID NO: 34563 - protein, 8 aa, Homo sapiens
  misc_feature: Table A; Target 34563; HLA-C*04:01; KLK3; ENSG00000142515; TAA
LPERPSLY

SEQ ID NO: 34564 - protein, 8 aa, Homo sapiens
  misc_feature: Table A; Target 34564; HLA-C*05:01; KLK3; ENSG00000142515; TAA
LPERPSLY

SEQ ID NO: 34565 - protein, 8 aa, Homo sapiens
  misc_feature: Table A; Target 34565; HLA-C*07:01; KLK3; ENSG00000142515; TAA
LPERPSLY

SEQ ID NO: 34566 - protein, 11 aa, Homo sapiens
  misc_feature: Table A; Target 34566; HLA-B*51:01; KLK3; ENSG00000142515; TAA
LPERPSLYTKV

SEQ ID NO: 34567 - protein, 8 aa, Homo sapiens
  misc_feature: Table A; Target 34567; HLA-B*39:01; KLK3; ENSG00000142515; TAA
LPTQEPAL

SEQ ID NO: 34568 - protein, 9 aa, Homo sapiens
  misc_feature: Table A; Target 34568; HLA-B*13:02; KLK3; ENSG00000142515; TAA
LQCVDLHVI

SEQ ID NO: 34569 - protein, 9 aa, Homo sapiens
  misc_feature: Table A; Target 34569; HLA-B*27:02; KLK3; ENSG00000142515; TAA
LRLSEPAEL

SEQ ID NO: 34570 - protein, 9 aa, Homo sapiens
  misc_feature: Table A; Target 34570; HLA-B*27:05; KLK3; ENSG00000142515; TAA
LRLSEPAEL

SEQ ID NO: 34571 - protein, 9 aa, Homo sapiens
  misc_feature: Table A; Target 34571; HLA-B*38:01; KLK3; ENSG00000142515; TAA
LRLSEPAEL

SEQ ID NO: 34572 - protein, 9 aa, Homo sapiens
  misc_feature: Table A; Target 34572; HLA-B*39:01; KLK3; ENSG00000142515; TAA
LRLSEPAEL

SEQ ID NO: 34573 - protein, 9 aa, Homo sapiens
  misc_feature: Table A; Target 34573; HLA-C*06:02; KLK3; ENSG00000142515; TAA
LRLSEPAEL

SEQ ID NO: 34574 - protein, 9 aa, Homo sapiens
  misc_feature: Table A; Target 34574; HLA-C*07:02; KLK3; ENSG00000142515; TAA
LRLSEPAEL

SEQ ID NO: 34575 - protein, 9 aa, Homo sapiens
  misc_feature: Table A; Target 34575; HLA-C*16:04; KLK3; ENSG00000142515; TAA
LRLSEPAEL

SEQ ID NO: 34576 - protein, 11 aa, Homo sapiens
  misc_feature: Table A; Target 34576; HLA-C*07:02; KLK3; ENSG00000142515; TAA
LRPGDDSSHDL

SEQ ID NO: 34577 - protein, 11 aa, Homo sapiens
  misc_feature: Table A; Target 34577; HLA-A*01:01; KLK3; ENSG00000142515; TAA
LSEPAELTDAV

SEQ ID NO: 34578 - protein, 8 aa, Homo sapiens
  misc_feature: Table A; Target 34578; HLA-B*57:01; KLK3; ENSG00000142515; TAA
LSRIVGGW

SEQ ID NO: 34579 - protein, 8 aa, Homo sapiens
  misc_feature: Table A; Target 34579; HLA-A*01:01; KLK3; ENSG00000142515; TAA
LTDAVKVM

SEQ ID NO: 34580 - protein, 8 aa, Homo sapiens
  misc_feature: Table A; Target 34580; HLA-C*03:03; KLK3; ENSG00000142515; TAA
LTDAVKVM

SEQ ID NO: 34581 - protein, 8 aa, Homo sapiens
  misc_feature: Table A; Target 34581; HLA-C*03:04; KLK3; ENSG00000142515; TAA
LTDAVKVM

SEQ ID NO: 34582 - protein, 8 aa, Homo sapiens
  misc_feature: Table A; Target 34582; HLA-C*04:01; KLK3; ENSG00000142515; TAA
LTDAVKVM

SEQ ID NO: 34583 - protein, 8 aa, Homo sapiens
  misc_feature: Table A; Target 34583; HLA-C*05:01; KLK3; ENSG00000142515; TAA
LTDAVKVM

SEQ ID NO: 34584 - protein, 8 aa, Homo sapiens
  misc_feature: Table A; Target 34584; HLA-C*12:03; KLK3; ENSG00000142515; TAA
LTDAVKVM

SEQ ID NO: 34585 - protein, 10 aa, Homo sapiens
  misc_feature: Table A; Target 34585; HLA-A*01:01; KLK3; ENSG00000142515; TAA
LTDAVKVMDL

SEQ ID NO: 34586 - protein, 9 aa, Homo sapiens
  misc_feature: Table A; Target 34586; HLA-A*02:03; KLK3; ENSG00000142515; TAA
LVASRGRAV

SEQ ID NO: 34587 - protein, 9 aa, Homo sapiens
  misc_feature: Table A; Target 34587; HLA-C*16:01; KLK3; ENSG00000142515; TAA
LVASRGRAV

SEQ ID NO: 34588 - protein, 8 aa, Homo sapiens
  misc_feature: Table A; Target 34588; HLA-A*23:01; KLK3; ENSG00000142515; TAA
LYTKVVHY

SEQ ID NO: 34589 - protein, 8 aa, Homo sapiens
  misc_feature: Table A; Target 34589; HLA-A*24:02; KLK3; ENSG00000142515; TAA
LYTKVVHY

SEQ ID NO: 34590 - protein, 8 aa, Homo sapiens
  misc_feature: Table A; Target 34590; HLA-A*29:02; KLK3; ENSG00000142515; TAA
LYTKVVHY

SEQ ID NO: 34591 - protein, 8 aa, Homo sapiens
  misc_feature: Table A; Target 34591; HLA-B*15:03; KLK3; ENSG00000142515; TAA
LYTKVVHY

SEQ ID NO: 34592 - protein, 8 aa, Homo sapiens
  misc_feature: Table A; Target 34592; HLA-C*07:01; KLK3; ENSG00000142515; TAA
LYTKVVHY

SEQ ID NO: 34593 - protein, 8 aa, Homo sapiens
  misc_feature: Table A; Target 34593; HLA-C*07:04; KLK3; ENSG00000142515; TAA
LYTKVVHY

SEQ ID NO: 34594 - protein, 8 aa, Homo sapiens
  misc_feature: Table A; Target 34594; HLA-C*14:02; KLK3; ENSG00000142515; TAA
LYTKVVHY

SEQ ID NO: 34595 - protein, 9 aa, Homo sapiens
  misc_feature: Table A; Target 34595; HLA-A*24:02; KLK3; ENSG00000142515; TAA
LYTKVVHYR

SEQ ID NO: 34596 - protein, 9 aa, Homo sapiens
  misc_feature: Table A; Target 34596; HLA-A*31:01; KLK3; ENSG00000142515; TAA
LYTKVVHYR

SEQ ID NO: 34597 - protein, 9 aa, Homo sapiens
  misc_feature: Table A; Target 34597; HLA-A*33:01; KLK3; ENSG00000142515; TAA
LYTKVVHYR

SEQ ID NO: 34598 - protein, 9 aa, Homo sapiens
  misc_feature: Table A; Target 34598; HLA-A*33:03; KLK3; ENSG00000142515; TAA
LYTKVVHYR

SEQ ID NO: 34599 - protein, 8 aa, Homo sapiens
  misc_feature: Table A; Target 34599; HLA-C*06:02; KLK3; ENSG00000142515; TAA
MDLPTQEP

SEQ ID NO: 34600 - protein, 8 aa, Homo sapiens
  misc_feature: Table A; Target 34600; HLA-C*07:01; KLK3; ENSG00000142515; TAA
MDLPTQEP

SEQ ID NO: 34601 - protein, 9 aa, Homo sapiens
  misc_feature: Table A; Target 34601; HLA-B*40:02; KLK3; ENSG00000142515; TAA
MDLPTQEPA

SEQ ID NO: 34602 - protein, 9 aa, Homo sapiens
  misc_feature: Table A; Target 34602; HLA-B*54:01; KLK3; ENSG00000142515; TAA
MDLPTQEPA

SEQ ID NO: 34603 - protein, 10 aa, Homo sapiens
  misc_feature: Table A; Target 34603; HLA-A*02:01; KLK3; ENSG00000142515; TAA
MDLPTQEPAL

SEQ ID NO: 34604 - protein, 10 aa, Homo sapiens
  misc_feature: Table A; Target 34604; HLA-A*23:01; KLK3; ENSG00000142515; TAA
MDLPTQEPAL

SEQ ID NO: 34605 - protein, 10 aa, Homo sapiens
  misc_feature: Table A; Target 34605; HLA-A*30:01; KLK3; ENSG00000142515; TAA
MDLPTQEPAL

SEQ ID NO: 34606 - protein, 10 aa, Homo sapiens
  misc_feature: Table A; Target 34606; HLA-B*38:01; KLK3; ENSG00000142515; TAA
MDLPTQEPAL

SEQ ID NO: 34607 - protein, 10 aa, Homo sapiens
  misc_feature: Table A; Target 34607; HLA-B*40:01; KLK3; ENSG00000142515; TAA
MDLPTQEPAL

SEQ ID NO: 34608 - protein, 10 aa, Homo sapiens
  misc_feature: Table A; Target 34608; HLA-B*40:02; KLK3; ENSG00000142515; TAA
MDLPTQEPAL

SEQ ID NO: 34609 - protein, 10 aa, Homo sapiens
  misc_feature: Table A; Target 34609; HLA-C*04:01; KLK3; ENSG00000142515; TAA
MDLPTQEPAL

SEQ ID NO: 34610 - protein, 10 aa, Homo sapiens
  misc_feature: Table A; Target 34610; HLA-C*07:01; KLK3; ENSG00000142515; TAA
MDLPTQEPAL

SEQ ID NO: 34611 - protein, 10 aa, Homo sapiens
  misc_feature: Table A; Target 34611; HLA-C*07:02; KLK3; ENSG00000142515; TAA
MDLPTQEPAL

SEQ ID NO: 34612 - protein, 11 aa, Homo sapiens
  misc_feature: Table A; Target 34612; HLA-C*04:01; KLK3; ENSG00000142515; TAA
MDLPTQEPALG

SEQ ID NO: 34613 - protein, 11 aa, Homo sapiens
  misc_feature: Table A; Target 34613; HLA-A*02:01; KLK3; ENSG00000142515; TAA
MLLRLSEPAEL

SEQ ID NO: 34614 - protein, 11 aa, Homo sapiens
  misc_feature: Table A; Target 34614; HLA-A*02:04; KLK3; ENSG00000142515; TAA
MLLRLSEPAEL

SEQ ID NO: 34615 - protein, 11 aa, Homo sapiens
  misc_feature: Table A; Target 34615; HLA-A*02:07; KLK3; ENSG00000142515; TAA
MLLRLSEPAEL

SEQ ID NO: 34616 - protein, 10 aa, Homo sapiens
  misc_feature: Table A; Target 34616; HLA-A*23:01; KLK3; ENSG00000142515; TAA
MWVPVVFLTL

SEQ ID NO: 34617 - protein, 10 aa, Homo sapiens
  misc_feature: Table A; Target 34617; HLA-A*24:02; KLK3; ENSG00000142515; TAA
MWVPVVFLTL

SEQ ID NO: 34618 - protein, 10 aa, Homo sapiens
  misc_feature: Table A; Target 34618; HLA-B*44:03; KLK3; ENSG00000142515; TAA
NGVLQGITSW

SEQ ID NO: 34619 - protein, 10 aa, Homo sapiens
  misc_feature: Table A; Target 34619; HLA-B*57:01; KLK3; ENSG00000142515; TAA
NGVLQGITSW

SEQ ID NO: 34620 - protein, 9 aa, Homo sapiens
  misc_feature: Table A; Target 34620; HLA-B*27:02; KLK3; ENSG00000142515; TAA
PAELTDAVK

SEQ ID NO: 34621 - protein, 8 aa, Homo sapiens
  misc_feature: Table A; Target 34621; HLA-B*15:01; KLK3; ENSG00000142515; TAA
PALGTTCY

SEQ ID NO: 34622 - protein, 9 aa, Homo sapiens
  misc_feature: Table A; Target 34622; HLA-C*04:01; KLK3; ENSG00000142515; TAA
PALGTTCYA

SEQ ID NO: 34623 - protein, 9 aa, Homo sapiens
  misc_feature: Table A; Target 34623; HLA-C*07:02; KLK3; ENSG00000142515; TAA
PALGTTCYA

SEQ ID NO: 34624 - protein, 10 aa, Homo sapiens
  misc_feature: Table A; Target 34624; HLA-C*07:02; KLK3; ENSG00000142515; TAA
PCALPERPSL

SEQ ID NO: 34625 - protein, 8 aa, Homo sapiens
  misc_feature: Table A; Target 34625; HLA-B*18:01; KLK3; ENSG00000142515; TAA
PEDTGQVF

SEQ ID NO: 34626 - protein, 8 aa, Homo sapiens
  misc_feature: Table A; Target 34626; HLA-C*04:01; KLK3; ENSG00000142515; TAA
PEDTGQVF

SEQ ID NO: 34627 - protein, 8 aa, Homo sapiens
  misc_feature: Table A; Target 34627; HLA-C*05:01; KLK3; ENSG00000142515; TAA
PEDTGQVF

SEQ ID NO: 34628 - protein, 9 aa, Homo sapiens
  misc_feature: Table A; Target 34628; HLA-C*05:01; KLK3; ENSG00000142515; TAA
PGDDSSHDL

SEQ ID NO: 34629 - protein, 9 aa, Homo sapiens
  misc_feature: Table A; Target 34629; HLA-A*03:01; KLK3; ENSG00000142515; TAA
PLYDMSLLK

SEQ ID NO: 34630 - protein, 10 aa, Homo sapiens
  misc_feature: Table A; Target 34630; HLA-C*07:01; KLK3; ENSG00000142515; TAA
PSLYTKVVHY

SEQ ID NO: 34631 - protein, 10 aa, Homo sapiens
  misc_feature: Table A; Target 34631; HLA-C*07:01; KLK3; ENSG00000142515; TAA
QCVDLHVISN

SEQ ID NO: 34632 - protein, 9 aa, Homo sapiens
  misc_feature: Table A; Target 34632; HLA-B*40:02; KLK3; ENSG00000142515; TAA
QEPALGTTC

SEQ ID NO: 34633 - protein, 10 aa, Homo sapiens
  misc_feature: Table A; Target 34633; HLA-A*25:01; KLK3; ENSG00000142515; TAA
QEPALGTTCY

SEQ ID NO: 34634 - protein, 10 aa, Homo sapiens
  misc_feature: Table A; Target 34634; HLA-B*27:02; KLK3; ENSG00000142515; TAA
QEPALGTTCY

SEQ ID NO: 34635 - protein, 10 aa, Homo sapiens
  misc_feature: Table A; Target 34635; HLA-B*35:01; KLK3; ENSG00000142515; TAA
QEPALGTTCY

SEQ ID NO: 34636 - protein, 10 aa, Homo sapiens
  misc_feature: Table A; Target 34636; HLA-C*02:02; KLK3; ENSG00000142515; TAA
QEPALGTTCY

SEQ ID NO: 34637 - protein, 10 aa, Homo sapiens
  misc_feature: Table A; Target 34637; HLA-C*07:01; KLK3; ENSG00000142515; TAA
QEPALGTTCY

SEQ ID NO: 34638 - protein, 8 aa, Homo sapiens
  misc_feature: Table A; Target 34638; HLA-B*51:01; KLK3; ENSG00000142515; TAA
QPWQVLVA

SEQ ID NO: 34639 - protein, 8 aa, Homo sapiens
  misc_feature: Table A; Target 34639; HLA-B*54:01; KLK3; ENSG00000142515; TAA
QPWQVLVA

SEQ ID NO: 34640 - protein, 8 aa, Homo sapiens
  misc_feature: Table A; Target 34640; HLA-B*55:01; KLK3; ENSG00000142515; TAA
QPWQVLVA

SEQ ID NO: 34641 - protein, 8 aa, Homo sapiens
  misc_feature: Table A; Target 34641; HLA-B*56:01; KLK3; ENSG00000142515; TAA
QPWQVLVA

SEQ ID NO: 34642 - protein, 9 aa, Homo sapiens
  misc_feature: Table A; Target 34642; HLA-B*54:01; KLK3; ENSG00000142515; TAA
QPWQVLVAS

SEQ ID NO: 34643 - protein, 9 aa, Homo sapiens
  misc_feature: Table A; Target 34643; HLA-B*56:01; KLK3; ENSG00000142515; TAA
QPWQVLVAS

SEQ ID NO: 34644 - protein, 10 aa, Homo sapiens
  misc_feature: Table A; Target 34644; HLA-B*27:02; KLK3; ENSG00000142515; TAA
QPWQVLVASR

SEQ ID NO: 34645 - protein, 10 aa, Homo sapiens
  misc_feature: Table A; Target 34645; HLA-B*56:01; KLK3; ENSG00000142515; TAA
QPWQVLVASR

SEQ ID NO: 34646 - protein, 9 aa, Homo sapiens
  misc_feature: Table A; Target 34646; HLA-A*23:01; KLK3; ENSG00000142515; TAA
QVFQVSHSF

SEQ ID NO: 34647 - protein, 9 aa, Homo sapiens
  misc_feature: Table A; Target 34647; HLA-A*24:02; KLK3; ENSG00000142515; TAA
QVFQVSHSF

SEQ ID NO: 34648 - protein, 9 aa, Homo sapiens
  misc_feature: Table A; Target 34648; HLA-A*25:01; KLK3; ENSG00000142515; TAA
QVFQVSHSF

SEQ ID NO: 34649 - protein, 9 aa, Homo sapiens
  misc_feature: Table A; Target 34649; HLA-A*26:01; KLK3; ENSG00000142515; TAA
QVFQVSHSF

SEQ ID NO: 34650 - protein, 9 aa, Homo sapiens
  misc_feature: Table A; Target 34650; HLA-A*29:02; KLK3; ENSG00000142515; TAA
QVFQVSHSF

SEQ ID NO: 34651 - protein, 9 aa, Homo sapiens
  misc_feature: Table A; Target 34651; HLA-A*30:02; KLK3; ENSG00000142515; TAA
QVFQVSHSF

SEQ ID NO: 34652 - protein, 9 aa, Homo sapiens
  misc_feature: Table A; Target 34652; HLA-A*32:01; KLK3; ENSG00000142515; TAA
QVFQVSHSF

SEQ ID NO: 34653 - protein, 9 aa, Homo sapiens
  misc_feature: Table A; Target 34653; HLA-B*15:01; KLK3; ENSG00000142515; TAA
QVFQVSHSF

SEQ ID NO: 34654 - protein, 9 aa, Homo sapiens
  misc_feature: Table A; Target 34654; HLA-B*15:03; KLK3; ENSG00000142515; TAA
QVFQVSHSF

SEQ ID NO: 34655 - protein, 9 aa, Homo sapiens
  misc_feature: Table A; Target 34655; HLA-B*18:01; KLK3; ENSG00000142515; TAA
QVFQVSHSF

SEQ ID NO: 34656 - protein, 9 aa, Homo sapiens
  misc_feature: Table A; Target 34656; HLA-B*35:01; KLK3; ENSG00000142515; TAA
QVFQVSHSF

SEQ ID NO: 34657 - protein, 9 aa, Homo sapiens
  misc_feature: Table A; Target 34657; HLA-B*37:01; KLK3; ENSG00000142515; TAA
QVFQVSHSF

SEQ ID NO: 34658 - protein, 9 aa, Homo sapiens
  misc_feature: Table A; Target 34658; HLA-B*38:01; KLK3; ENSG00000142515; TAA
QVFQVSHSF

SEQ ID NO: 34659 - protein, 9 aa, Homo sapiens
  misc_feature: Table A; Target 34659; HLA-B*44:02; KLK3; ENSG00000142515; TAA
QVFQVSHSF

SEQ ID NO: 34660 - protein, 9 aa, Homo sapiens
  misc_feature: Table A; Target 34660; HLA-B*44:03; KLK3; ENSG00000142515; TAA
QVFQVSHSF

SEQ ID NO: 34661 - protein, 9 aa, Homo sapiens
  misc_feature: Table A; Target 34661; HLA-B*46:01; KLK3; ENSG00000142515; TAA
QVFQVSHSF

SEQ ID NO: 34662 - protein, 9 aa, Homo sapiens
  misc_feature: Table A; Target 34662; HLA-B*57:01; KLK3; ENSG00000142515; TAA
QVFQVSHSF

SEQ ID NO: 34663 - protein, 9 aa, Homo sapiens
  misc_feature: Table A; Target 34663; HLA-B*58:01; KLK3; ENSG00000142515; TAA
QVFQVSHSF

SEQ ID NO: 34664 - protein, 9 aa, Homo sapiens
  misc_feature: Table A; Target 34664; HLA-C*02:02; KLK3; ENSG00000142515; TAA
QVFQVSHSF

SEQ ID NO: 34665 - protein, 9 aa, Homo sapiens
  misc_feature: Table A; Target 34665; HLA-C*07:06; KLK3; ENSG00000142515; TAA
QVFQVSHSF

SEQ ID NO: 34666 - protein, 9 aa, Homo sapiens
  misc_feature: Table A; Target 34666; HLA-C*16:01; KLK3; ENSG00000142515; TAA
QVFQVSHSF

SEQ ID NO: 34667 - protein, 9 aa, Homo sapiens
  misc_feature: Table A; Target 34667; HLA-C*16:04; KLK3; ENSG00000142515; TAA
QVFQVSHSF

SEQ ID NO: 34668 - protein, 9 aa, Homo sapiens
  misc_feature: Table A; Target 34668; HLA-A*03:01; KLK3; ENSG00000142515; TAA
QVHPQKVTK

SEQ ID NO: 34669 - protein, 9 aa, Homo sapiens
  misc_feature: Table A; Target 34669; HLA-A*03:02; KLK3; ENSG00000142515; TAA
QVHPQKVTK

SEQ ID NO: 34670 - protein, 9 aa, Homo sapiens
  misc_feature: Table A; Target 34670; HLA-A*11:01; KLK3; ENSG00000142515; TAA
QVHPQKVTK

SEQ ID NO: 34671 - protein, 9 aa, Homo sapiens
  misc_feature: Table A; Target 34671; HLA-A*31:01; KLK3; ENSG00000142515; TAA
QVHPQKVTK

SEQ ID NO: 34672 - protein, 9 aa, Homo sapiens
  misc_feature: Table A; Target 34672; HLA-A*32:01; KLK3; ENSG00000142515; TAA
QVHPQKVTK

SEQ ID NO: 34673 - protein, 9 aa, Homo sapiens
  misc_feature: Table A; Target 34673; HLA-A*33:01; KLK3; ENSG00000142515; TAA
QVHPQKVTK

SEQ ID NO: 34674 - protein, 9 aa, Homo sapiens
  misc_feature: Table A; Target 34674; HLA-A*33:03; KLK3; ENSG00000142515; TAA
QVHPQKVTK

SEQ ID NO: 34675 - protein, 9 aa, Homo sapiens
  misc_feature: Table A; Target 34675; HLA-A*68:01; KLK3; ENSG00000142515; TAA
QVHPQKVTK

SEQ ID NO: 34676 - protein, 9 aa, Homo sapiens
  misc_feature: Table A; Target 34676; HLA-B*27:05; KLK3; ENSG00000142515; TAA
QVHPQKVTK

SEQ ID NO: 34677 - protein, 9 aa, Homo sapiens
  misc_feature: Table A; Target 34677; HLA-C*06:02; KLK3; ENSG00000142515; TAA
QVHPQKVTK

SEQ ID NO: 34678 - protein, 9 aa, Homo sapiens
  misc_feature: Table A; Target 34678; HLA-C*07:04; KLK3; ENSG00000142515; TAA
QVHPQKVTK

SEQ ID NO: 34679 - protein, 9 aa, Homo sapiens
  misc_feature: Table A; Target 34679; HLA-C*07:06; KLK3; ENSG00000142515; TAA
QVHPQKVTK

SEQ ID NO: 34680 - protein, 9 aa, Homo sapiens
  misc_feature: Table A; Target 34680; HLA-C*16:01; KLK3; ENSG00000142515; TAA
QVHPQKVTK

SEQ ID NO: 34681 - protein, 9 aa, Homo sapiens
  misc_feature: Table A; Target 34681; HLA-C*16:02; KLK3; ENSG00000142515; TAA
QVHPQKVTK

SEQ ID NO: 34682 - protein, 10 aa, Homo sapiens
  misc_feature: Table A; Target 34682; HLA-A*25:01; KLK3; ENSG00000142515; TAA
QVHPQKVTKF

SEQ ID NO: 34683 - protein, 10 aa, Homo sapiens
  misc_feature: Table A; Target 34683; HLA-A*26:01; KLK3; ENSG00000142515; TAA
QVHPQKVTKF

SEQ ID NO: 34684 - protein, 10 aa, Homo sapiens
  misc_feature: Table A; Target 34684; HLA-A*32:01; KLK3; ENSG00000142515; TAA
QVHPQKVTKF

SEQ ID NO: 34685 - protein, 10 aa, Homo sapiens
  misc_feature: Table A; Target 34685; HLA-A*33:03; KLK3; ENSG00000142515; TAA
QVHPQKVTKF

SEQ ID NO: 34686 - protein, 10 aa, Homo sapiens
  misc_feature: Table A; Target 34686; HLA-B*57:01; KLK3; ENSG00000142515; TAA
QVHPQKVTKF

SEQ ID NO: 34687 - protein, 11 aa, Homo sapiens
  misc_feature: Table A; Target 34687; HLA-A*29:02; KLK3; ENSG00000142515; TAA
QVSHSFPHPLY

SEQ ID NO: 34688 - protein, 8 aa, Homo sapiens
  misc_feature: Table A; Target 34688; HLA-C*03:04; KLK3; ENSG00000142515; TAA
RAVCGGVL

SEQ ID NO: 34689 - protein, 8 aa, Homo sapiens
  misc_feature: Table A; Target 34689; HLA-B*37:01; KLK3; ENSG00000142515; TAA
RLSEPAEL

SEQ ID NO: 34690 - protein, 8 aa, Homo sapiens
  misc_feature: Table A; Target 34690; HLA-C*05:01; KLK3; ENSG00000142515; TAA
RLSEPAEL

SEQ ID NO: 34691 - protein, 11 aa, Homo sapiens
  misc_feature: Table A; Target 34691; HLA-A*02:01; KLK3; ENSG00000142515; TAA
RLSEPAELTDA

SEQ ID NO: 34692 - protein, 11 aa, Homo sapiens
  misc_feature: Table A; Target 34692; HLA-A*02:03; KLK3; ENSG00000142515; TAA
RLSEPAELTDA

SEQ ID NO: 34693 - protein, 10 aa, Homo sapiens
  misc_feature: Table A; Target 34693; HLA-A*31:01; KLK3; ENSG00000142515; TAA
RNKSVILLGR

SEQ ID NO: 34694 - protein, 10 aa, Homo sapiens
  misc_feature: Table A; Target 34694; HLA-B*07:02; KLK3; ENSG00000142515; TAA
RPGDDSSHDL

SEQ ID NO: 34695 - protein, 10 aa, Homo sapiens
  misc_feature: Table A; Target 34695; HLA-B*35:03; KLK3; ENSG00000142515; TAA
RPGDDSSHDL

SEQ ID NO: 34696 - protein, 10 aa, Homo sapiens
  misc_feature: Table A; Target 34696; HLA-C*07:02; KLK3; ENSG00000142515; TAA
RPGDDSSHDL

SEQ ID NO: 34697 - protein, 11 aa, Homo sapiens
  misc_feature: Table A; Target 34697; HLA-B*55:01; KLK3; ENSG00000142515; TAA
RPGDDSSHDLM

SEQ ID NO: 34698 - protein, 11 aa, Homo sapiens
  misc_feature: Table A; Target 34698; HLA-C*03:03; KLK3; ENSG00000142515; TAA
RPGDDSSHDLM

SEQ ID NO: 34699 - protein, 8 aa, Homo sapiens
  misc_feature: Table A; Target 34699; HLA-B*07:02; KLK3; ENSG00000142515; TAA
RPSLYTKV

SEQ ID NO: 34700 - protein, 8 aa, Homo sapiens
  misc_feature: Table A; Target 34700; HLA-B*56:01; KLK3; ENSG00000142515; TAA
RPSLYTKV

SEQ ID NO: 34701 - protein, 9 aa, Homo sapiens
  misc_feature: Table A; Target 34701; HLA-B*07:02; KLK3; ENSG00000142515; TAA
RPSLYTKVV

SEQ ID NO: 34702 - protein, 9 aa, Homo sapiens
  misc_feature: Table A; Target 34702; HLA-B*56:01; KLK3; ENSG00000142515; TAA
RPSLYTKVV

SEQ ID NO: 34703 - protein, 9 aa, Homo sapiens
  misc_feature: Table A; Target 34703; HLA-C*07:02; KLK3; ENSG00000142515; TAA
RPSLYTKVV

SEQ ID NO: 34704 - protein, 10 aa, Homo sapiens
  misc_feature: Table A; Target 34704; HLA-A*30:01; KLK3; ENSG00000142515; TAA
SEPAELTDAV

SEQ ID NO: 34705 - protein, 10 aa, Homo sapiens
  misc_feature: Table A; Target 34705; HLA-B*40:01; KLK3; ENSG00000142515; TAA
SEPAELTDAV

SEQ ID NO: 34706 - protein, 10 aa, Homo sapiens
  misc_feature: Table A; Target 34706; HLA-B*49:01; KLK3; ENSG00000142515; TAA
SEPAELTDAV

SEQ ID NO: 34707 - protein, 11 aa, Homo sapiens
  misc_feature: Table A; Target 34707; HLA-B*27:02; KLK3; ENSG00000142515; TAA
SEPAELTDAVK

SEQ ID NO: 34708 - protein, 9 aa, Homo sapiens
  misc_feature: Table A; Target 34708; HLA-A*29:02; KLK3; ENSG00000142515; TAA
SFPHPLYDM

SEQ ID NO: 34709 - protein, 8 aa, Homo sapiens
  misc_feature: Table A; Target 34709; HLA-C*05:01; KLK3; ENSG00000142515; TAA
SGDSGGPL

SEQ ID NO: 34710 - protein, 9 aa, Homo sapiens
  misc_feature: Table A; Target 34710; HLA-A*02:01; KLK3; ENSG00000142515; TAA
SGDSGGPLV

SEQ ID NO: 34711 - protein, 9 aa, Homo sapiens
  misc_feature: Table A; Target 34711; HLA-B*38:01; KLK3; ENSG00000142515; TAA
SGDSGGPLV

SEQ ID NO: 34712 - protein, 9 aa, Homo sapiens
  misc_feature: Table A; Target 34712; HLA-B*39:01; KLK3; ENSG00000142515; TAA
SGDSGGPLV

SEQ ID NO: 34713 - protein, 9 aa, Homo sapiens
  misc_feature: Table A; Target 34713; HLA-C*05:01; KLK3; ENSG00000142515; TAA
SGDSGGPLV

SEQ ID NO: 34714 - protein, 10 aa, Homo sapiens
  misc_feature: Table A; Target 34714; HLA-C*03:03; KLK3; ENSG00000142515; TAA
SGDSGGPLVC

SEQ ID NO: 34715 - protein, 9 aa, Homo sapiens
  misc_feature: Table A; Target 34715; HLA-C*12:03; KLK3; ENSG00000142515; TAA
SGGPLVCNG

SEQ ID NO: 34716 - protein, 9 aa, Homo sapiens
  misc_feature: Table A; Target 34716; HLA-B*38:01; KLK3; ENSG00000142515; TAA
SHSFPHPLY

SEQ ID NO: 34717 - protein, 11 aa, Homo sapiens
  misc_feature: Table A; Target 34717; HLA-A*03:01; KLK3; ENSG00000142515; TAA
SIEPEEFLTPK

SEQ ID NO: 34718 - protein, 11 aa, Homo sapiens
  misc_feature: Table A; Target 34718; HLA-A*03:02; KLK3; ENSG00000142515; TAA
SIEPEEFLTPK

SEQ ID NO: 34719 - protein, 11 aa, Homo sapiens
  misc_feature: Table A; Target 34719; HLA-A*11:01; KLK3; ENSG00000142515; TAA
SIEPEEFLTPK

SEQ ID NO: 34720 - protein, 11 aa, Homo sapiens
  misc_feature: Table A; Target 34720; HLA-A*31:01; KLK3; ENSG00000142515; TAA
SIEPEEFLTPK

SEQ ID NO: 34721 - protein, 11 aa, Homo sapiens
  misc_feature: Table A; Target 34721; HLA-A*68:02; KLK3; ENSG00000142515; TAA
SIEPEEFLTPK

SEQ ID NO: 34722 - protein, 11 aa, Homo sapiens
  misc_feature: Table A; Target 34722; HLA-B*27:02; KLK3; ENSG00000142515; TAA
SIEPEEFLTPK

SEQ ID NO: 34723 - protein, 11 aa, Homo sapiens
  misc_feature: Table A; Target 34723; HLA-A*02:03; KLK3; ENSG00000142515; TAA
SLFHPEDTGQV

SEQ ID NO: 34724 - protein, 11 aa, Homo sapiens
  misc_feature: Table A; Target 34724; HLA-A*02:07; KLK3; ENSG00000142515; TAA
SLFHPEDTGQV

SEQ ID NO: 34725 - protein, 11 aa, Homo sapiens
  misc_feature: Table A; Target 34725; HLA-A*68:02; KLK3; ENSG00000142515; TAA
SLFHPEDTGQV

SEQ ID NO: 34726 - protein, 9 aa, Homo sapiens
  misc_feature: Table A; Target 34726; HLA-A*31:01; KLK3; ENSG00000142515; TAA
SLLKNRFLR

SEQ ID NO: 34727 - protein, 8 aa, Homo sapiens
  misc_feature: Table A; Target 34727; HLA-B*08:01; KLK3; ENSG00000142515; TAA
SLYTKVVH

SEQ ID NO: 34728 - protein, 9 aa, Homo sapiens
  misc_feature: Table A; Target 34728; HLA-A*01:01; KLK3; ENSG00000142515; TAA
SLYTKVVHY

SEQ ID NO: 34729 - protein, 9 aa, Homo sapiens
  misc_feature: Table A; Target 34729; HLA-A*02:01; KLK3; ENSG00000142515; TAA
SLYTKVVHY

SEQ ID NO: 34730 - protein, 9 aa, Homo sapiens
  misc_feature: Table A; Target 34730; HLA-A*02:03; KLK3; ENSG00000142515; TAA
SLYTKVVHY

SEQ ID NO: 34731 - protein, 9 aa, Homo sapiens
  misc_feature: Table A; Target 34731; HLA-A*02:04; KLK3; ENSG00000142515; TAA
SLYTKVVHY

SEQ ID NO: 34732 - protein, 9 aa, Homo sapiens
  misc_feature: Table A; Target 34732; HLA-A*03:01; KLK3; ENSG00000142515; TAA
SLYTKVVHY

SEQ ID NO: 34733 - protein, 9 aa, Homo sapiens
  misc_feature: Table A; Target 34733; HLA-A*03:02; KLK3; ENSG00000142515; TAA
SLYTKVVHY

SEQ ID NO: 34734 - protein, 9 aa, Homo sapiens
  misc_feature: Table A; Target 34734; HLA-A*11:01; KLK3; ENSG00000142515; TAA
SLYTKVVHY

SEQ ID NO: 34735 - protein, 9 aa, Homo sapiens
  misc_feature: Table A; Target 34735; HLA-A*25:01; KLK3; ENSG00000142515; TAA
SLYTKVVHY

SEQ ID NO: 34736 - protein, 9 aa, Homo sapiens
  misc_feature: Table A; Target 34736; HLA-A*26:01; KLK3; ENSG00000142515; TAA
SLYTKVVHY

SEQ ID NO: 34737 - protein, 9 aa, Homo sapiens
  misc_feature: Table A; Target 34737; HLA-A*29:02; KLK3; ENSG00000142515; TAA
SLYTKVVHY

SEQ ID NO: 34738 - protein, 9 aa, Homo sapiens
  misc_feature: Table A; Target 34738; HLA-A*30:02; KLK3; ENSG00000142515; TAA
SLYTKVVHY

SEQ ID NO: 34739 - protein, 9 aa, Homo sapiens
  misc_feature: Table A; Target 34739; HLA-A*31:01; KLK3; ENSG00000142515; TAA
SLYTKVVHY

SEQ ID NO: 34740 - protein, 9 aa, Homo sapiens
  misc_feature: Table A; Target 34740; HLA-A*32:01; KLK3; ENSG00000142515; TAA
SLYTKVVHY

SEQ ID NO: 34741 - protein, 9 aa, Homo sapiens
  misc_feature: Table A; Target 34741; HLA-B*08:01; KLK3; ENSG00000142515; TAA
SLYTKVVHY

SEQ ID NO: 34742 - protein, 9 aa, Homo sapiens
  misc_feature: Table A; Target 34742; HLA-B*13:02; KLK3; ENSG00000142515; TAA
SLYTKVVHY

SEQ ID NO: 34743 - protein, 9 aa, Homo sapiens
  misc_feature: Table A; Target 34743; HLA-B*15:01; KLK3; ENSG00000142515; TAA
SLYTKVVHY

SEQ ID NO: 34744 - protein, 9 aa, Homo sapiens
  misc_feature: Table A; Target 34744; HLA-B*15:03; KLK3; ENSG00000142515; TAA
SLYTKVVHY

SEQ ID NO: 34745 - protein, 9 aa, Homo sapiens
  misc_feature: Table A; Target 34745; HLA-B*18:01; KLK3; ENSG00000142515; TAA
SLYTKVVHY

SEQ ID NO: 34746 - protein, 9 aa, Homo sapiens
  misc_feature: Table A; Target 34746; HLA-B*35:01; KLK3; ENSG00000142515; TAA
SLYTKVVHY

SEQ ID NO: 34747 - protein, 9 aa, Homo sapiens
  misc_feature: Table A; Target 34747; HLA-B*37:01; KLK3; ENSG00000142515; TAA
SLYTKVVHY

SEQ ID NO: 34748 - protein, 9 aa, Homo sapiens
  misc_feature: Table A; Target 34748; HLA-B*44:03; KLK3; ENSG00000142515; TAA
SLYTKVVHY

SEQ ID NO: 34749 - protein, 9 aa, Homo sapiens
  misc_feature: Table A; Target 34749; HLA-B*46:01; KLK3; ENSG00000142515; TAA
SLYTKVVHY

SEQ ID NO: 34750 - protein, 9 aa, Homo sapiens
  misc_feature: Table A; Target 34750; HLA-C*02:02; KLK3; ENSG00000142515; TAA
SLYTKVVHY

SEQ ID NO: 34751 - protein, 9 aa, Homo sapiens
  misc_feature: Table A; Target 34751; HLA-C*07:01; KLK3; ENSG00000142515; TAA
SLYTKVVHY

SEQ ID NO: 34752 - protein, 9 aa, Homo sapiens
  misc_feature: Table A; Target 34752; HLA-C*07:04; KLK3; ENSG00000142515; TAA
SLYTKVVHY

SEQ ID NO: 34753 - protein, 9 aa, Homo sapiens
  misc_feature: Table A; Target 34753; HLA-C*12:03; KLK3; ENSG00000142515; TAA
SLYTKVVHY

SEQ ID NO: 34754 - protein, 9 aa, Homo sapiens
  misc_feature: Table A; Target 34754; HLA-C*14:02; KLK3; ENSG00000142515; TAA
SLYTKVVHY

SEQ ID NO: 34755 - protein, 9 aa, Homo sapiens
  misc_feature: Table A; Target 34755; HLA-C*16:01; KLK3; ENSG00000142515; TAA
SLYTKVVHY

SEQ ID NO: 34756 - protein, 9 aa, Homo sapiens
  misc_feature: Table A; Target 34756; HLA-C*16:02; KLK3; ENSG00000142515; TAA
SLYTKVVHY

SEQ ID NO: 34757 - protein, 9 aa, Homo sapiens
  misc_feature: Table A; Target 34757; HLA-C*16:04; KLK3; ENSG00000142515; TAA
SLYTKVVHY

SEQ ID NO: 34758 - protein, 10 aa, Homo sapiens
  misc_feature: Table A; Target 34758; HLA-A*03:01; KLK3; ENSG00000142515; TAA
SLYTKVVHYR

SEQ ID NO: 34759 - protein, 10 aa, Homo sapiens
  misc_feature: Table A; Target 34759; HLA-A*31:01; KLK3; ENSG00000142515; TAA
SLYTKVVHYR

SEQ ID NO: 34760 - protein, 9 aa, Homo sapiens
  misc_feature: Table A; Target 34760; HLA-B*13:02; KLK3; ENSG00000142515; TAA
SQPWQVLVA

SEQ ID NO: 34761 - protein, 11 aa, Homo sapiens
  misc_feature: Table A; Target 34761; HLA-A*31:01; KLK3; ENSG00000142515; TAA
SQPWQVLVASR

SEQ ID NO: 34762 - protein, 9 aa, Homo sapiens
  misc_feature: Table A; Target 34762; HLA-A*33:03; KLK3; ENSG00000142515; TAA
SSHDLMLLR

SEQ ID NO: 34763 - protein, 9 aa, Homo sapiens
  misc_feature: Table A; Target 34763; HLA-C*07:06; KLK3; ENSG00000142515; TAA
SSHDLMLLR

SEQ ID NO: 34764 - protein, 10 aa, Homo sapiens
  misc_feature: Table A; Target 34764; HLA-A*25:01; KLK3; ENSG00000142515; TAA
SVILLGRHSL

SEQ ID NO: 34765 - protein, 10 aa, Homo sapiens
  misc_feature: Table A; Target 34765; HLA-B*07:02; KLK3; ENSG00000142515; TAA
SVILLGRHSL

SEQ ID NO: 34766 - protein, 11 aa, Homo sapiens
  misc_feature: Table A; Target 34766; HLA-B*57:01; KLK3; ENSG00000142515; TAA
SVILLGRHSLF

SEQ ID NO: 34767 - protein, 9 aa, Homo sapiens
  misc_feature: Table A; Target 34767; HLA-A*03:02; KLK3; ENSG00000142515; TAA
TAAHCIRNK

SEQ ID NO: 34768 - protein, 9 aa, Homo sapiens
  misc_feature: Table A; Target 34768; HLA-A*68:01; KLK3; ENSG00000142515; TAA
TAAHCIRNK

SEQ ID NO: 34769 - protein, 9 aa, Homo sapiens
  misc_feature: Table A; Target 34769; HLA-C*06:02; KLK3; ENSG00000142515; TAA
TAAHCIRNK

SEQ ID NO: 34770 - protein, 10 aa, Homo sapiens
  misc_feature: Table A; Target 34770; HLA-C*04:01; KLK3; ENSG00000142515; TAA
TCSGDSGGPL

SEQ ID NO: 34771 - protein, 9 aa, Homo sapiens
  misc_feature: Table A; Target 34771; HLA-A*30:01; KLK3; ENSG00000142515; TAA
TDAVKVMDL

SEQ ID NO: 34772 - protein, 9 aa, Homo sapiens
  misc_feature: Table A; Target 34772; HLA-B*08:01; KLK3; ENSG00000142515; TAA
TDAVKVMDL

SEQ ID NO: 34773 - protein, 9 aa, Homo sapiens
  misc_feature: Table A; Target 34773; HLA-B*37:01; KLK3; ENSG00000142515; TAA
TDAVKVMDL

SEQ ID NO: 34774 - protein, 9 aa, Homo sapiens
  misc_feature: Table A; Target 34774; HLA-B*40:01; KLK3; ENSG00000142515; TAA
TDAVKVMDL

SEQ ID NO: 34775 - protein, 9 aa, Homo sapiens
  misc_feature: Table A; Target 34775; HLA-B*40:02; KLK3; ENSG00000142515; TAA
TDAVKVMDL

SEQ ID NO: 34776 - protein, 9 aa, Homo sapiens
  misc_feature: Table A; Target 34776; HLA-C*06:02; KLK3; ENSG00000142515; TAA
TDAVKVMDL

SEQ ID NO: 34777 - protein, 9 aa, Homo sapiens
  misc_feature: Table A; Target 34777; HLA-C*07:02; KLK3; ENSG00000142515; TAA
TDAVKVMDL

SEQ ID NO: 34778 - protein, 9 aa, Homo sapiens
  misc_feature: Table A; Target 34778; HLA-C*12:03; KLK3; ENSG00000142515; TAA
TDAVKVMDL

SEQ ID NO: 34779 - protein, 9 aa, Homo sapiens
  misc_feature: Table A; Target 34779; HLA-B*27:05; KLK3; ENSG00000142515; TAA
TGQVFQVSH

SEQ ID NO: 34780 - protein, 8 aa, Homo sapiens
  misc_feature: Table A; Target 34780; HLA-B*08:01; KLK3; ENSG00000142515; TAA
TPKKLQCV

SEQ ID NO: 34781 - protein, 11 aa, Homo sapiens
  misc_feature: Table A; Target 34781; HLA-C*07:01; KLK3; ENSG00000142515; TAA
TQEPALGTTCY

SEQ ID NO: 34782 - protein, 9 aa, Homo sapiens
  misc_feature: Table A; Target 34782; HLA-A*23:01; KLK3; ENSG00000142515; TAA
TWIGAAPLI

SEQ ID NO: 34783 - protein, 9 aa, Homo sapiens
  misc_feature: Table A; Target 34783; HLA-A*24:02; KLK3; ENSG00000142515; TAA
TWIGAAPLI

SEQ ID NO: 34784 - protein, 9 aa, Homo sapiens
  misc_feature: Table A; Target 34784; HLA-C*06:02; KLK3; ENSG00000142515; TAA
TWIGAAPLI

SEQ ID NO: 34785 - protein, 10 aa, Homo sapiens
  misc_feature: Table A; Target 34785; HLA-A*23:01; KLK3; ENSG00000142515; TAA
TWIGAAPLIL

SEQ ID NO: 34786 - protein, 10 aa, Homo sapiens
  misc_feature: Table A; Target 34786; HLA-A*24:02; KLK3; ENSG00000142515; TAA
TWIGAAPLIL

SEQ ID NO: 34787 - protein, 10 aa, Homo sapiens
  misc_feature: Table A; Target 34787; HLA-C*06:02; KLK3; ENSG00000142515; TAA
TWIGAAPLIL

SEQ ID NO: 34788 - protein, 8 aa, Homo sapiens
  misc_feature: Table A; Target 34788; HLA-B*07:02; KLK3; ENSG00000142515; TAA
VASRGRAV

SEQ ID NO: 34789 - protein, 8 aa, Homo sapiens
  misc_feature: Table A; Target 34789; HLA-C*03:03; KLK3; ENSG00000142515; TAA
VASRGRAV

SEQ ID NO: 34790 - protein, 8 aa, Homo sapiens
  misc_feature: Table A; Target 34790; HLA-C*03:04; KLK3; ENSG00000142515; TAA
VASRGRAV

SEQ ID NO: 34791 - protein, 8 aa, Homo sapiens
  misc_feature: Table A; Target 34791; HLA-C*16:01; KLK3; ENSG00000142515; TAA
VASRGRAV

SEQ ID NO: 34792 - protein, 8 aa, Homo sapiens
  misc_feature: Table A; Target 34792; HLA-C*16:02; KLK3; ENSG00000142515; TAA
VASRGRAV

SEQ ID NO: 34793 - protein, 9 aa, Homo sapiens
  misc_feature: Table A; Target 34793; HLA-A*03:01; KLK3; ENSG00000142515; TAA
VCAQVHPQK

SEQ ID NO: 34794 - protein, 9 aa, Homo sapiens
  misc_feature: Table A; Target 34794; HLA-A*03:02; KLK3; ENSG00000142515; TAA
VCAQVHPQK

SEQ ID NO: 34795 - protein, 9 aa, Homo sapiens
  misc_feature: Table A; Target 34795; HLA-A*11:01; KLK3; ENSG00000142515; TAA
VCAQVHPQK

SEQ ID NO: 34796 - protein, 9 aa, Homo sapiens
  misc_feature: Table A; Target 34796; HLA-A*68:01; KLK3; ENSG00000142515; TAA
VCAQVHPQK

SEQ ID NO: 34797 - protein, 9 aa, Homo sapiens
  misc_feature: Table A; Target 34797; HLA-B*27:02; KLK3; ENSG00000142515; TAA
VCAQVHPQK

SEQ ID NO: 34798 - protein, 9 aa, Homo sapiens
  misc_feature: Table A; Target 34798; HLA-C*06:02; KLK3; ENSG00000142515; TAA
VCAQVHPQK

SEQ ID NO: 34799 - protein, 9 aa, Homo sapiens
  misc_feature: Table A; Target 34799; HLA-C*12:03; KLK3; ENSG00000142515; TAA
VCAQVHPQK

SEQ ID NO: 34800 - protein, 9 aa, Homo sapiens
  misc_feature: Table A; Target 34800; HLA-C*16:01; KLK3; ENSG00000142515; TAA
VCAQVHPQK

SEQ ID NO: 34801 - protein, 8 aa, Homo sapiens
  misc_feature: Table A; Target 34801; HLA-C*07:01; KLK3; ENSG00000142515; TAA
VDLHVISN

SEQ ID NO: 34802 - protein, 9 aa, Homo sapiens
  misc_feature: Table A; Target 34802; HLA-A*23:01; KLK3; ENSG00000142515; TAA
VFLTLSVTW

SEQ ID NO: 34803 - protein, 9 aa, Homo sapiens
  misc_feature: Table A; Target 34803; HLA-A*24:02; KLK3; ENSG00000142515; TAA
VFLTLSVTW

SEQ ID NO: 34804 - protein, 9 aa, Homo sapiens
  misc_feature: Table A; Target 34804; HLA-B*57:01; KLK3; ENSG00000142515; TAA
VFLTLSVTW

SEQ ID NO: 34805 - protein, 8 aa, Homo sapiens
  misc_feature: Table A; Target 34805; HLA-A*23:01; KLK3; ENSG00000142515; TAA
VFQVSHSF

SEQ ID NO: 34806 - protein, 8 aa, Homo sapiens
  misc_feature: Table A; Target 34806; HLA-A*24:02; KLK3; ENSG00000142515; TAA
VFQVSHSF

SEQ ID NO: 34807 - protein, 8 aa, Homo sapiens
  misc_feature: Table A; Target 34807; HLA-A*32:01; KLK3; ENSG00000142515; TAA
VFQVSHSF

SEQ ID NO: 34808 - protein, 8 aa, Homo sapiens
  misc_feature: Table A; Target 34808; HLA-B*37:01; KLK3; ENSG00000142515; TAA
VFQVSHSF

SEQ ID NO: 34809 - protein, 8 aa, Homo sapiens
  misc_feature: Table A; Target 34809; HLA-C*04:01; KLK3; ENSG00000142515; TAA
VFQVSHSF

SEQ ID NO: 34810 - protein, 8 aa, Homo sapiens
  misc_feature: Table A; Target 34810; HLA-C*14:02; KLK3; ENSG00000142515; TAA
VFQVSHSF

SEQ ID NO: 34811 - protein, 9 aa, Homo sapiens
  misc_feature: Table A; Target 34811; HLA-A*24:02; KLK3; ENSG00000142515; TAA
VHPQKVTKF

SEQ ID NO: 34812 - protein, 9 aa, Homo sapiens
  misc_feature: Table A; Target 34812; HLA-B*08:01; KLK3; ENSG00000142515; TAA
VILLGRHSL

SEQ ID NO: 34813 - protein, 9 aa, Homo sapiens
  misc_feature: Table A; Target 34813; HLA-C*07:01; KLK3; ENSG00000142515; TAA
VKVMDLPTQ

SEQ ID NO: 34814 - protein, 8 aa, Homo sapiens
  misc_feature: Table A; Target 34814; HLA-B*13:02; KLK3; ENSG00000142515; TAA
VLTAAHCI

SEQ ID NO: 34815 - protein, 10 aa, Homo sapiens
  misc_feature: Table A; Target 34815; HLA-A*02:03; KLK3; ENSG00000142515; TAA
VLVASRGRAV

SEQ ID NO: 34816 - protein, 11 aa, Homo sapiens
  misc_feature: Table A; Target 34816; HLA-A*02:04; KLK3; ENSG00000142515; TAA
VLVHPQWVLTA

SEQ ID NO: 34817 - protein, 9 aa, Homo sapiens
  misc_feature: Table A; Target 34817; HLA-C*04:01; KLK3; ENSG00000142515; TAA
VMDLPTQEP

SEQ ID NO: 34818 - protein, 9 aa, Homo sapiens
  misc_feature: Table A; Target 34818; HLA-C*05:01; KLK3; ENSG00000142515; TAA
VMDLPTQEP

SEQ ID NO: 34819 - protein, 11 aa, Homo sapiens
  misc_feature: Table A; Target 34819; HLA-A*02:01; KLK3; ENSG00000142515; TAA
VMDLPTQEPAL

SEQ ID NO: 34820 - protein, 11 aa, Homo sapiens
  misc_feature: Table A; Target 34820; HLA-A*02:07; KLK3; ENSG00000142515; TAA
VMDLPTQEPAL

SEQ ID NO: 34821 - protein, 11 aa, Homo sapiens
  misc_feature: Table A; Target 34821; HLA-B*38:01; KLK3; ENSG00000142515; TAA
VMDLPTQEPAL

SEQ ID NO: 34822 - protein, 11 aa, Homo sapiens
  misc_feature: Table A; Target 34822; HLA-B*39:01; KLK3; ENSG00000142515; TAA
VMDLPTQEPAL

SEQ ID NO: 34823 - protein, 11 aa, Homo sapiens
  misc_feature: Table A; Target 34823; HLA-C*04:01; KLK3; ENSG00000142515; TAA
VMDLPTQEPAL

SEQ ID NO: 34824 - protein, 11 aa, Homo sapiens
  misc_feature: Table A; Target 34824; HLA-C*05:01; KLK3; ENSG00000142515; TAA
VMDLPTQEPAL

SEQ ID NO: 34825 - protein, 8 aa, Homo sapiens
  misc_feature: Table A; Target 34825; HLA-A*23:01; KLK3; ENSG00000142515; TAA
VPVVFLTL

SEQ ID NO: 34826 - protein, 8 aa, Homo sapiens
  misc_feature: Table A; Target 34826; HLA-B*07:02; KLK3; ENSG00000142515; TAA
VPVVFLTL

SEQ ID NO: 34827 - protein, 8 aa, Homo sapiens
  misc_feature: Table A; Target 34827; HLA-B*08:01; KLK3; ENSG00000142515; TAA
VPVVFLTL

SEQ ID NO: 34828 - protein, 8 aa, Homo sapiens
  misc_feature: Table A; Target 34828; HLA-B*35:01; KLK3; ENSG00000142515; TAA
VPVVFLTL

SEQ ID NO: 34829 - protein, 8 aa, Homo sapiens
  misc_feature: Table A; Target 34829; HLA-B*35:03; KLK3; ENSG00000142515; TAA
VPVVFLTL

SEQ ID NO: 34830 - protein, 8 aa, Homo sapiens
  misc_feature: Table A; Target 34830; HLA-B*51:01; KLK3; ENSG00000142515; TAA
VPVVFLTL

SEQ ID NO: 34831 - protein, 8 aa, Homo sapiens
  misc_feature: Table A; Target 34831; HLA-B*54:01; KLK3; ENSG00000142515; TAA
VPVVFLTL

SEQ ID NO: 34832 - protein, 8 aa, Homo sapiens
  misc_feature: Table A; Target 34832; HLA-B*56:01; KLK3; ENSG00000142515; TAA
VPVVFLTL

SEQ ID NO: 34833 - protein, 8 aa, Homo sapiens
  misc_feature: Table A; Target 34833; HLA-C*07:02; KLK3; ENSG00000142515; TAA
VPVVFLTL

SEQ ID NO: 34834 - protein, 10 aa, Homo sapiens
  misc_feature: Table A; Target 34834; HLA-B*54:01; KLK3; ENSG00000142515; TAA
VPVVFLTLSV

SEQ ID NO: 34835 - protein, 10 aa, Homo sapiens
  misc_feature: Table A; Target 34835; HLA-B*56:01; KLK3; ENSG00000142515; TAA
VPVVFLTLSV

SEQ ID NO: 34836 - protein, 9 aa, Homo sapiens
  misc_feature: Table A; Target 34836; HLA-A*31:01; KLK3; ENSG00000142515; TAA
VSHSFPHPL

SEQ ID NO: 34837 - protein, 9 aa, Homo sapiens
  misc_feature: Table A; Target 34837; HLA-A*33:01; KLK3; ENSG00000142515; TAA
VSHSFPHPL

SEQ ID NO: 34838 - protein, 9 aa, Homo sapiens
  misc_feature: Table A; Target 34838; HLA-A*68:02; KLK3; ENSG00000142515; TAA
VSHSFPHPL

SEQ ID NO: 34839 - protein, 9 aa, Homo sapiens
  misc_feature: Table A; Target 34839; HLA-B*07:02; KLK3; ENSG00000142515; TAA
VSHSFPHPL

SEQ ID NO: 34840 - protein, 9 aa, Homo sapiens
  misc_feature: Table A; Target 34840; HLA-B*40:02; KLK3; ENSG00000142515; TAA
VSHSFPHPL

SEQ ID NO: 34841 - protein, 9 aa, Homo sapiens
  misc_feature: Table A; Target 34841; HLA-B*46:01; KLK3; ENSG00000142515; TAA
VSHSFPHPL

SEQ ID NO: 34842 - protein, 9 aa, Homo sapiens
  misc_feature: Table A; Target 34842; HLA-B*54:01; KLK3; ENSG00000142515; TAA
VSHSFPHPL

SEQ ID NO: 34843 - protein, 9 aa, Homo sapiens
  misc_feature: Table A; Target 34843; HLA-B*57:01; KLK3; ENSG00000142515; TAA
VSHSFPHPL

SEQ ID NO: 34844 - protein, 9 aa, Homo sapiens
  misc_feature: Table A; Target 34844; HLA-C*02:02; KLK3; ENSG00000142515; TAA
VSHSFPHPL

SEQ ID NO: 34845 - protein, 9 aa, Homo sapiens
  misc_feature: Table A; Target 34845; HLA-C*03:03; KLK3; ENSG00000142515; TAA
VSHSFPHPL

SEQ ID NO: 34846 - protein, 9 aa, Homo sapiens
  misc_feature: Table A; Target 34846; HLA-C*06:02; KLK3; ENSG00000142515; TAA
VSHSFPHPL

SEQ ID NO: 34847 - protein, 9 aa, Homo sapiens
  misc_feature: Table A; Target 34847; HLA-C*07:01; KLK3; ENSG00000142515; TAA
VSHSFPHPL

SEQ ID NO: 34848 - protein, 9 aa, Homo sapiens
  misc_feature: Table A; Target 34848; HLA-C*07:02; KLK3; ENSG00000142515; TAA
VSHSFPHPL

SEQ ID NO: 34849 - protein, 9 aa, Homo sapiens
  misc_feature: Table A; Target 34849; HLA-C*12:03; KLK3; ENSG00000142515; TAA
VSHSFPHPL

SEQ ID NO: 34850 - protein, 9 aa, Homo sapiens
  misc_feature: Table A; Target 34850; HLA-C*16:01; KLK3; ENSG00000142515; TAA
VSHSFPHPL

SEQ ID NO: 34851 - protein, 9 aa, Homo sapiens
  misc_feature: Table A; Target 34851; HLA-C*16:02; KLK3; ENSG00000142515; TAA
VSHSFPHPL

SEQ ID NO: 34852 - protein, 10 aa, Homo sapiens
  misc_feature: Table A; Target 34852; HLA-A*29:02; KLK3; ENSG00000142515; TAA
VSHSFPHPLY

SEQ ID NO: 34853 - protein, 10 aa, Homo sapiens
  misc_feature: Table A; Target 34853; HLA-B*57:01; KLK3; ENSG00000142515; TAA
VSHSFPHPLY

SEQ ID NO: 34854 - protein, 9 aa, Homo sapiens
  misc_feature: Table A; Target 34854; HLA-A*31:01; KLK3; ENSG00000142515; TAA
VTWIGAAPL

SEQ ID NO: 34855 - protein, 9 aa, Homo sapiens
  misc_feature: Table A; Target 34855; HLA-B*40:02; KLK3; ENSG00000142515; TAA
VTWIGAAPL

SEQ ID NO: 34856 - protein, 9 aa, Homo sapiens
  misc_feature: Table A; Target 34856; HLA-C*01:02; KLK3; ENSG00000142515; TAA
VTWIGAAPL

SEQ ID NO: 34857 - protein, 9 aa, Homo sapiens
  misc_feature: Table A; Target 34857; HLA-C*03:03; KLK3; ENSG00000142515; TAA
VTWIGAAPL

SEQ ID NO: 34858 - protein, 9 aa, Homo sapiens
  misc_feature: Table A; Target 34858; HLA-C*03:04; KLK3; ENSG00000142515; TAA
VTWIGAAPL

SEQ ID NO: 34859 - protein, 9 aa, Homo sapiens
  misc_feature: Table A; Target 34859; HLA-C*04:01; KLK3; ENSG00000142515; TAA
VTWIGAAPL

SEQ ID NO: 34860 - protein, 9 aa, Homo sapiens
  misc_feature: Table A; Target 34860; HLA-C*06:02; KLK3; ENSG00000142515; TAA
VTWIGAAPL

SEQ ID NO: 34861 - protein, 8 aa, Homo sapiens
  misc_feature: Table A; Target 34861; HLA-B*51:01; KLK3; ENSG00000142515; TAA
VVFLTLSV

SEQ ID NO: 34862 - protein, 10 aa, Homo sapiens
  misc_feature: Table A; Target 34862; HLA-B*44:02; KLK3; ENSG00000142515; TAA
VVFLTLSVTW

SEQ ID NO: 34863 - protein, 10 aa, Homo sapiens
  misc_feature: Table A; Target 34863; HLA-B*57:01; KLK3; ENSG00000142515; TAA
VVFLTLSVTW

SEQ ID NO: 34864 - protein, 9 aa, Homo sapiens
  misc_feature: Table A; Target 34864; HLA-A*02:07; KLK3; ENSG00000142515; TAA
WVPVVFLTL

SEQ ID NO: 34865 - protein, 9 aa, Homo sapiens
  misc_feature: Table A; Target 34865; HLA-A*24:02; KLK3; ENSG00000142515; TAA
WVPVVFLTL

SEQ ID NO: 34866 - protein, 9 aa, Homo sapiens
  misc_feature: Table A; Target 34866; HLA-A*68:02; KLK3; ENSG00000142515; TAA
WVPVVFLTL

SEQ ID NO: 34867 - protein, 9 aa, Homo sapiens
  misc_feature: Table A; Target 34867; HLA-A*33:01; KLK3; ENSG00000142515; TAA
YDMSLLKNR

SEQ ID NO: 34868 - protein, 9 aa, Homo sapiens
  misc_feature: Table A; Target 34868; HLA-A*33:03; KLK3; ENSG00000142515; TAA
YDMSLLKNR

SEQ ID NO: 34869 - protein, 8 aa, Homo sapiens
  misc_feature: Table A; Target 34869; HLA-B*57:01; KLK3; ENSG00000142515; TAA
YTKVVHYR

SEQ ID NO: 34870 - protein, 8 aa, Homo sapiens
  misc_feature: Table A; Target 34870; HLA-C*04:01; KLK3; ENSG00000142515; TAA
YTKVVHYR

SEQ ID NO: 34871 - protein, 8 aa, Homo sapiens
  misc_feature: Table A; Target 34871; HLA-C*12:03; KLK3,KLK2; ENSG00000142515,ENSG00000167751; TAA,TAA
DSGGPLVC

SEQ ID NO: 34872 - protein, 9 aa, Homo sapiens
  misc_feature: Table A; Target 34872; HLA-A*68:02; KLK3,KLK2; ENSG00000142515,ENSG00000167751; TAA,TAA
DSSHDLMLL

SEQ ID NO: 34873 - protein, 10 aa, Homo sapiens
  misc_feature: Table A; Target 34873; HLA-C*07:06; KLK3,KLK2; ENSG00000142515,ENSG00000167751; TAA,TAA
DSSHDLMLLR

SEQ ID NO: 34874 - protein, 8 aa, Homo sapiens
  misc_feature: Table A; Target 34874; HLA-B*56:01; KLK3,KLK2; ENSG00000142515,ENSG00000167751; TAA,TAA
EPALGTTC

SEQ ID NO: 34875 - protein, 9 aa, Homo sapiens
  misc_feature: Table A; Target 34875; HLA-A*25:01; KLK3,KLK2; ENSG00000142515,ENSG00000167751; TAA,TAA
EPALGTTCY

SEQ ID NO: 34876 - protein, 9 aa, Homo sapiens
  misc_feature: Table A; Target 34876; HLA-A*26:01; KLK3,KLK2; ENSG00000142515,ENSG00000167751; TAA,TAA
EPALGTTCY

SEQ ID NO: 34877 - protein, 9 aa, Homo sapiens
  misc_feature: Table A; Target 34877; HLA-A*68:01; KLK3,KLK2; ENSG00000142515,ENSG00000167751; TAA,TAA
EPALGTTCY

SEQ ID NO: 34878 - protein, 9 aa, Homo sapiens
  misc_feature: Table A; Target 34878; HLA-B*35:01; KLK3,KLK2; ENSG00000142515,ENSG00000167751; TAA,TAA
EPALGTTCY

SEQ ID NO: 34879 - protein, 9 aa, Homo sapiens
  misc_feature: Table A; Target 34879; HLA-B*55:01; KLK3,KLK2; ENSG00000142515,ENSG00000167751; TAA,TAA
EPALGTTCY

SEQ ID NO: 34880 - protein, 8 aa, Homo sapiens
  misc_feature: Table A; Target 34880; HLA-B*37:01; KLK3,KLK2; ENSG00000142515,ENSG00000167751; TAA,TAA
GDSGGPLV

SEQ ID NO: 34881 - protein, 9 aa, Homo sapiens
  misc_feature: Table A; Target 34881; HLA-B*44:02; KLK3,KLK2; ENSG00000142515,ENSG00000167751; TAA,TAA
GGVLVHPQW

SEQ ID NO: 34882 - protein, 9 aa, Homo sapiens
  misc_feature: Table A; Target 34882; HLA-B*44:03; KLK3,KLK2; ENSG00000142515,ENSG00000167751; TAA,TAA
GGVLVHPQW

SEQ ID NO: 34883 - protein, 9 aa, Homo sapiens
  misc_feature: Table A; Target 34883; HLA-B*57:01; KLK3,KLK2; ENSG00000142515,ENSG00000167751; TAA,TAA
GGVLVHPQW

SEQ ID NO: 34884 - protein, 9 aa, Homo sapiens
  misc_feature: Table A; Target 34884; HLA-B*58:01; KLK3,KLK2; ENSG00000142515,ENSG00000167751; TAA,TAA
GGVLVHPQW

SEQ ID NO: 34885 - protein, 9 aa, Homo sapiens
  misc_feature: Table A; Target 34885; HLA-C*16:04; KLK3,KLK2; ENSG00000142515,ENSG00000167751; TAA,TAA
GGVLVHPQW

SEQ ID NO: 34886 - protein, 9 aa, Homo sapiens
  misc_feature: Table A; Target 34886; HLA-B*07:02; KLK3,KLK2; ENSG00000142515,ENSG00000167751; TAA,TAA
GPLVCNGVL

SEQ ID NO: 34887 - protein, 9 aa, Homo sapiens
  misc_feature: Table A; Target 34887; HLA-C*07:02; KLK3,KLK2; ENSG00000142515,ENSG00000167751; TAA,TAA
GPLVCNGVL

SEQ ID NO: 34888 - protein, 8 aa, Homo sapiens
  misc_feature: Table A; Target 34888; HLA-B*58:01; KLK3,KLK2; ENSG00000142515,ENSG00000167751; TAA,TAA
GSIEPEEF

SEQ ID NO: 34889 - protein, 8 aa, Homo sapiens
  misc_feature: Table A; Target 34889; HLA-C*05:01; KLK3,KLK2; ENSG00000142515,ENSG00000167751; TAA,TAA
GSIEPEEF

SEQ ID NO: 34890 - protein, 9 aa, Homo sapiens
  misc_feature: Table A; Target 34890; HLA-A*25:01; KLK3,KLK2; ENSG00000142515,ENSG00000167751; TAA,TAA
GTTCYASGW

SEQ ID NO: 34891 - protein, 9 aa, Homo sapiens
  misc_feature: Table A; Target 34891; HLA-B*58:01; KLK3,KLK2; ENSG00000142515,ENSG00000167751; TAA,TAA
GTTCYASGW

SEQ ID NO: 34892 - protein, 9 aa, Homo sapiens
  misc_feature: Table A; Target 34892; HLA-A*02:04; KLK3,KLK2; ENSG00000142515,ENSG00000167751; TAA,TAA
GVLQGITSW

SEQ ID NO: 34893 - protein, 9 aa, Homo sapiens
  misc_feature: Table A; Target 34893; HLA-A*23:01; KLK3,KLK2; ENSG00000142515,ENSG00000167751; TAA,TAA
GVLQGITSW

SEQ ID NO: 34894 - protein, 9 aa, Homo sapiens
  misc_feature: Table A; Target 34894; HLA-A*25:01; KLK3,KLK2; ENSG00000142515,ENSG00000167751; TAA,TAA
GVLQGITSW

SEQ ID NO: 34895 - protein, 9 aa, Homo sapiens
  misc_feature: Table A; Target 34895; HLA-A*26:01; KLK3,KLK2; ENSG00000142515,ENSG00000167751; TAA,TAA
GVLQGITSW

SEQ ID NO: 34896 - protein, 9 aa, Homo sapiens
  misc_feature: Table A; Target 34896; HLA-A*29:02; KLK3,KLK2; ENSG00000142515,ENSG00000167751; TAA,TAA
GVLQGITSW

SEQ ID NO: 34897 - protein, 9 aa, Homo sapiens
  misc_feature: Table A; Target 34897; HLA-A*30:02; KLK3,KLK2; ENSG00000142515,ENSG00000167751; TAA,TAA
GVLQGITSW

SEQ ID NO: 34898 - protein, 9 aa, Homo sapiens
  misc_feature: Table A; Target 34898; HLA-A*31:01; KLK3,KLK2; ENSG00000142515,ENSG00000167751; TAA,TAA
GVLQGITSW

SEQ ID NO: 34899 - protein, 9 aa, Homo sapiens
  misc_feature: Table A; Target 34899; HLA-A*32:01; KLK3,KLK2; ENSG00000142515,ENSG00000167751; TAA,TAA
GVLQGITSW

SEQ ID NO: 34900 - protein, 9 aa, Homo sapiens
  misc_feature: Table A; Target 34900; HLA-B*15:01; KLK3,KLK2; ENSG00000142515,ENSG00000167751; TAA,TAA
GVLQGITSW

SEQ ID NO: 34901 - protein, 9 aa, Homo sapiens
  misc_feature: Table A; Target 34901; HLA-B*15:03; KLK3,KLK2; ENSG00000142515,ENSG00000167751; TAA,TAA
GVLQGITSW

SEQ ID NO: 34902 - protein, 9 aa, Homo sapiens
  misc_feature: Table A; Target 34902; HLA-B*27:02; KLK3,KLK2; ENSG00000142515,ENSG00000167751; TAA,TAA
GVLQGITSW

SEQ ID NO: 34903 - protein, 9 aa, Homo sapiens
  misc_feature: Table A; Target 34903; HLA-B*44:02; KLK3,KLK2; ENSG00000142515,ENSG00000167751; TAA,TAA
GVLQGITSW

SEQ ID NO: 34904 - protein, 9 aa, Homo sapiens
  misc_feature: Table A; Target 34904; HLA-B*44:03; KLK3,KLK2; ENSG00000142515,ENSG00000167751; TAA,TAA
GVLQGITSW

SEQ ID NO: 34905 - protein, 9 aa, Homo sapiens
  misc_feature: Table A; Target 34905; HLA-B*46:01; KLK3,KLK2; ENSG00000142515,ENSG00000167751; TAA,TAA
GVLQGITSW

SEQ ID NO: 34906 - protein, 9 aa, Homo sapiens
  misc_feature: Table A; Target 34906; HLA-B*57:01; KLK3,KLK2; ENSG00000142515,ENSG00000167751; TAA,TAA
GVLQGITSW

SEQ ID NO: 34907 - protein, 9 aa, Homo sapiens
  misc_feature: Table A; Target 34907; HLA-B*58:01; KLK3,KLK2; ENSG00000142515,ENSG00000167751; TAA,TAA
GVLQGITSW

SEQ ID NO: 34908 - protein, 9 aa, Homo sapiens
  misc_feature: Table A; Target 34908; HLA-C*07:04; KLK3,KLK2; ENSG00000142515,ENSG00000167751; TAA,TAA
GVLQGITSW

SEQ ID NO: 34909 - protein, 9 aa, Homo sapiens
  misc_feature: Table A; Target 34909; HLA-C*16:04; KLK3,KLK2; ENSG00000142515,ENSG00000167751; TAA,TAA
GVLQGITSW

SEQ ID NO: 34910 - protein, 8 aa, Homo sapiens
  misc_feature: Table A; Target 34910; HLA-B*54:01; KLK3,KLK2; ENSG00000142515,ENSG00000167751; TAA,TAA
HPQWVLTA

SEQ ID NO: 34911 - protein, 8 aa, Homo sapiens
  misc_feature: Table A; Target 34911; HLA-B*56:01; KLK3,KLK2; ENSG00000142515,ENSG00000167751; TAA,TAA
HPQWVLTA

SEQ ID NO: 34912 - protein, 9 aa, Homo sapiens
  misc_feature: Table A; Target 34912; HLA-B*54:01; KLK3,KLK2; ENSG00000142515,ENSG00000167751; TAA,TAA
HPQWVLTAA

SEQ ID NO: 34913 - protein, 9 aa, Homo sapiens
  misc_feature: Table A; Target 34913; HLA-B*55:01; KLK3,KLK2; ENSG00000142515,ENSG00000167751; TAA,TAA
HPQWVLTAA

SEQ ID NO: 34914 - protein, 9 aa, Homo sapiens
  misc_feature: Table A; Target 34914; HLA-B*56:01; KLK3,KLK2; ENSG00000142515,ENSG00000167751; TAA,TAA
HPQWVLTAA

SEQ ID NO: 34915 - protein, 8 aa, Homo sapiens
  misc_feature: Table A; Target 34915; HLA-A*29:02; KLK3,KLK2; ENSG00000142515,ENSG00000167751; TAA,TAA
HSFPHPLY

SEQ ID NO: 34916 - protein, 8 aa, Homo sapiens
  misc_feature: Table A; Target 34916; HLA-B*57:01; KLK3,KLK2; ENSG00000142515,ENSG00000167751; TAA,TAA
HSFPHPLY

SEQ ID NO: 34917 - protein, 8 aa, Homo sapiens
  misc_feature: Table A; Target 34917; HLA-C*02:02; KLK3,KLK2; ENSG00000142515,ENSG00000167751; TAA,TAA
HSFPHPLY

SEQ ID NO: 34918 - protein, 8 aa, Homo sapiens
  misc_feature: Table A; Target 34918; HLA-C*07:01; KLK3,KLK2; ENSG00000142515,ENSG00000167751; TAA,TAA
HSFPHPLY

SEQ ID NO: 34919 - protein, 8 aa, Homo sapiens
  misc_feature: Table A; Target 34919; HLA-C*12:03; KLK3,KLK2; ENSG00000142515,ENSG00000167751; TAA,TAA
HSFPHPLY

SEQ ID NO: 34920 - protein, 9 aa, Homo sapiens
  misc_feature: Table A; Target 34920; HLA-A*03:02; KLK3,KLK2; ENSG00000142515,ENSG00000167751; TAA,TAA
IVGGWECEK

SEQ ID NO: 34921 - protein, 9 aa, Homo sapiens
  misc_feature: Table A; Target 34921; HLA-A*11:01; KLK3,KLK2; ENSG00000142515,ENSG00000167751; TAA,TAA
IVGGWECEK

SEQ ID NO: 34922 - protein, 8 aa, Homo sapiens
  misc_feature: Table A; Target 34922; HLA-B*07:02; KLK3,KLK2; ENSG00000142515,ENSG00000167751; TAA,TAA
LPTQEPAL

SEQ ID NO: 34923 - protein, 8 aa, Homo sapiens
  misc_feature: Table A; Target 34923; HLA-B*08:01; KLK3,KLK2; ENSG00000142515,ENSG00000167751; TAA,TAA
LPTQEPAL

SEQ ID NO: 34924 - protein, 8 aa, Homo sapiens
  misc_feature: Table A; Target 34924; HLA-B*35:01; KLK3,KLK2; ENSG00000142515,ENSG00000167751; TAA,TAA
LPTQEPAL

SEQ ID NO: 34925 - protein, 8 aa, Homo sapiens
  misc_feature: Table A; Target 34925; HLA-B*35:03; KLK3,KLK2; ENSG00000142515,ENSG00000167751; TAA,TAA
LPTQEPAL

SEQ ID NO: 34926 - protein, 8 aa, Homo sapiens
  misc_feature: Table A; Target 34926; HLA-B*51:01; KLK3,KLK2; ENSG00000142515,ENSG00000167751; TAA,TAA
LPTQEPAL

SEQ ID NO: 34927 - protein, 8 aa, Homo sapiens
  misc_feature: Table A; Target 34927; HLA-B*54:01; KLK3,KLK2; ENSG00000142515,ENSG00000167751; TAA,TAA
LPTQEPAL

SEQ ID NO: 34928 - protein, 8 aa, Homo sapiens
  misc_feature: Table A; Target 34928; HLA-B*55:01; KLK3,KLK2; ENSG00000142515,ENSG00000167751; TAA,TAA
LPTQEPAL

SEQ ID NO: 34929 - protein, 8 aa, Homo sapiens
  misc_feature: Table A; Target 34929; HLA-B*56:01; KLK3,KLK2; ENSG00000142515,ENSG00000167751; TAA,TAA
LPTQEPAL

SEQ ID NO: 34930 - protein, 8 aa, Homo sapiens
  misc_feature: Table A; Target 34930; HLA-C*03:03; KLK3,KLK2; ENSG00000142515,ENSG00000167751; TAA,TAA
LPTQEPAL

SEQ ID NO: 34931 - protein, 8 aa, Homo sapiens
  misc_feature: Table A; Target 34931; HLA-C*03:04; KLK3,KLK2; ENSG00000142515,ENSG00000167751; TAA,TAA
LPTQEPAL

SEQ ID NO: 34932 - protein, 8 aa, Homo sapiens
  misc_feature: Table A; Target 34932; HLA-C*05:01; KLK3,KLK2; ENSG00000142515,ENSG00000167751; TAA,TAA
LPTQEPAL

SEQ ID NO: 34933 - protein, 8 aa, Homo sapiens
  misc_feature: Table A; Target 34933; HLA-C*07:02; KLK3,KLK2; ENSG00000142515,ENSG00000167751; TAA,TAA
LPTQEPAL

SEQ ID NO: 34934 - protein, 8 aa, Homo sapiens
  misc_feature: Table A; Target 34934; HLA-C*16:01; KLK3,KLK2; ENSG00000142515,ENSG00000167751; TAA,TAA
LPTQEPAL

SEQ ID NO: 34935 - protein, 9 aa, Homo sapiens
  misc_feature: Table A; Target 34935; HLA-B*54:01; KLK3,KLK2; ENSG00000142515,ENSG00000167751; TAA,TAA
MLLRLSEPA

SEQ ID NO: 34936 - protein, 10 aa, Homo sapiens
  misc_feature: Table A; Target 34936; HLA-A*25:01; KLK3,KLK2; ENSG00000142515,ENSG00000167751; TAA,TAA
NGVLQGITSW

SEQ ID NO: 34937 - protein, 10 aa, Homo sapiens
  misc_feature: Table A; Target 34937; HLA-B*44:02; KLK3,KLK2; ENSG00000142515,ENSG00000167751; TAA,TAA
NGVLQGITSW

SEQ ID NO: 34938 - protein, 10 aa, Homo sapiens
  misc_feature: Table A; Target 34938; HLA-B*58:01; KLK3,KLK2; ENSG00000142515,ENSG00000167751; TAA,TAA
NGVLQGITSW

SEQ ID NO: 34939 - protein, 10 aa, Homo sapiens
  misc_feature: Table A; Target 34939; HLA-C*16:04; KLK3,KLK2; ENSG00000142515,ENSG00000167751; TAA,TAA
NGVLQGITSW

SEQ ID NO: 34940 - protein, 8 aa, Homo sapiens
  misc_feature: Table A; Target 34940; HLA-B*39:01; KLK3,KLK2; ENSG00000142515,ENSG00000167751; TAA,TAA
PALGTTCY

SEQ ID NO: 34941 - protein, 8 aa, Homo sapiens
  misc_feature: Table A; Target 34941; HLA-C*07:01; KLK3,KLK2; ENSG00000142515,ENSG00000167751; TAA,TAA
PALGTTCY

SEQ ID NO: 34942 - protein, 9 aa, Homo sapiens
  misc_feature: Table A; Target 34942; HLA-C*06:02; KLK3,KLK2; ENSG00000142515,ENSG00000167751; TAA,TAA
PALGTTCYA

SEQ ID NO: 34943 - protein, 9 aa, Homo sapiens
  misc_feature: Table A; Target 34943; HLA-C*07:01; KLK3,KLK2; ENSG00000142515,ENSG00000167751; TAA,TAA
PALGTTCYA

SEQ ID NO: 34944 - protein, 9 aa, Homo sapiens
  misc_feature: Table A; Target 34944; HLA-A*30:01; KLK3,KLK2; ENSG00000142515,ENSG00000167751; TAA,TAA
QEPALGTTC

SEQ ID NO: 34945 - protein, 9 aa, Homo sapiens
  misc_feature: Table A; Target 34945; HLA-B*49:01; KLK3,KLK2; ENSG00000142515,ENSG00000167751; TAA,TAA
QEPALGTTC

SEQ ID NO: 34946 - protein, 10 aa, Homo sapiens
  misc_feature: Table A; Target 34946; HLA-A*26:01; KLK3,KLK2; ENSG00000142515,ENSG00000167751; TAA,TAA
QEPALGTTCY

SEQ ID NO: 34947 - protein, 10 aa, Homo sapiens
  misc_feature: Table A; Target 34947; HLA-A*30:01; KLK3,KLK2; ENSG00000142515,ENSG00000167751; TAA,TAA
QEPALGTTCY

SEQ ID NO: 34948 - protein, 10 aa, Homo sapiens
  misc_feature: Table A; Target 34948; HLA-A*30:02; KLK3,KLK2; ENSG00000142515,ENSG00000167751; TAA,TAA
QEPALGTTCY

SEQ ID NO: 34949 - protein, 10 aa, Homo sapiens
  misc_feature: Table A; Target 34949; HLA-B*15:01; KLK3,KLK2; ENSG00000142515,ENSG00000167751; TAA,TAA
QEPALGTTCY

SEQ ID NO: 34950 - protein, 10 aa, Homo sapiens
  misc_feature: Table A; Target 34950; HLA-B*15:03; KLK3,KLK2; ENSG00000142515,ENSG00000167751; TAA,TAA
QEPALGTTCY

SEQ ID NO: 34951 - protein, 10 aa, Homo sapiens
  misc_feature: Table A; Target 34951; HLA-B*18:01; KLK3,KLK2; ENSG00000142515,ENSG00000167751; TAA,TAA
QEPALGTTCY

SEQ ID NO: 34952 - protein, 10 aa, Homo sapiens
  misc_feature: Table A; Target 34952; HLA-B*40:01; KLK3,KLK2; ENSG00000142515,ENSG00000167751; TAA,TAA
QEPALGTTCY

SEQ ID NO: 34953 - protein, 10 aa, Homo sapiens
  misc_feature: Table A; Target 34953; HLA-B*44:02; KLK3,KLK2; ENSG00000142515,ENSG00000167751; TAA,TAA
QEPALGTTCY

SEQ ID NO: 34954 - protein, 10 aa, Homo sapiens
  misc_feature: Table A; Target 34954; HLA-B*44:03; KLK3,KLK2; ENSG00000142515,ENSG00000167751; TAA,TAA
QEPALGTTCY

SEQ ID NO: 34955 - protein, 10 aa, Homo sapiens
  misc_feature: Table A; Target 34955; HLA-C*07:04; KLK3,KLK2; ENSG00000142515,ENSG00000167751; TAA,TAA
QEPALGTTCY

SEQ ID NO: 34956 - protein, 10 aa, Homo sapiens
  misc_feature: Table A; Target 34956; HLA-C*16:04; KLK3,KLK2; ENSG00000142515,ENSG00000167751; TAA,TAA
QEPALGTTCY

SEQ ID NO: 34957 - protein, 9 aa, Homo sapiens
  misc_feature: Table A; Target 34957; HLA-C*06:02; KLK3,KLK2; ENSG00000142515,ENSG00000167751; TAA,TAA
SGGPLVCNG

SEQ ID NO: 34958 - protein, 9 aa, Homo sapiens
  misc_feature: Table A; Target 34958; HLA-B*38:01; KLK3,KLK2; ENSG00000142515,ENSG00000167751; TAA,TAA
SHDLMLLRL

SEQ ID NO: 34959 - protein, 9 aa, Homo sapiens
  misc_feature: Table A; Target 34959; HLA-A*29:02; KLK3,KLK2; ENSG00000142515,ENSG00000167751; TAA,TAA
SHSFPHPLY

SEQ ID NO: 34960 - protein, 9 aa, Homo sapiens
  misc_feature: Table A; Target 34960; HLA-A*31:01; KLK3,KLK2; ENSG00000142515,ENSG00000167751; TAA,TAA
SSHDLMLLR

SEQ ID NO: 34961 - protein, 9 aa, Homo sapiens
  misc_feature: Table A; Target 34961; HLA-A*33:01; KLK3,KLK2; ENSG00000142515,ENSG00000167751; TAA,TAA
SSHDLMLLR

SEQ ID NO: 34962 - protein, 9 aa, Homo sapiens
  misc_feature: Table A; Target 34962; HLA-B*57:01; KLK3,KLK2; ENSG00000142515,ENSG00000167751; TAA,TAA
SSHDLMLLR

SEQ ID NO: 34963 - protein, 10 aa, Homo sapiens
  misc_feature: Table A; Target 34963; HLA-B*38:01; KLK3,KLK2; ENSG00000142515,ENSG00000167751; TAA,TAA
TQEPALGTTC

SEQ ID NO: 34964 - protein, 11 aa, Homo sapiens
  misc_feature: Table A; Target 34964; HLA-A*30:02; KLK3,KLK2; ENSG00000142515,ENSG00000167751; TAA,TAA
TQEPALGTTCY

SEQ ID NO: 34965 - protein, 11 aa, Homo sapiens
  misc_feature: Table A; Target 34965; HLA-B*15:01; KLK3,KLK2; ENSG00000142515,ENSG00000167751; TAA,TAA
TQEPALGTTCY

SEQ ID NO: 34966 - protein, 11 aa, Homo sapiens
  misc_feature: Table A; Target 34966; HLA-B*15:03; KLK3,KLK2; ENSG00000142515,ENSG00000167751; TAA,TAA
TQEPALGTTCY

SEQ ID NO: 34967 - protein, 11 aa, Homo sapiens
  misc_feature: Table A; Target 34967; HLA-B*27:05; KLK3,KLK2; ENSG00000142515,ENSG00000167751; TAA,TAA
TQEPALGTTCY

SEQ ID NO: 34968 - protein, 11 aa, Homo sapiens
  misc_feature: Table A; Target 34968; HLA-B*38:01; KLK3,KLK2; ENSG00000142515,ENSG00000167751; TAA,TAA
TQEPALGTTCY

SEQ ID NO: 34969 - protein, 11 aa, Homo sapiens
  misc_feature: Table A; Target 34969; HLA-B*39:01; KLK3,KLK2; ENSG00000142515,ENSG00000167751; TAA,TAA
TQEPALGTTCY

SEQ ID NO: 34970 - protein, 11 aa, Homo sapiens
  misc_feature: Table A; Target 34970; HLA-C*04:01; KLK3,KLK2; ENSG00000142515,ENSG00000167751; TAA,TAA
TQEPALGTTCY

SEQ ID NO: 34971 - protein, 11 aa, Homo sapiens
  misc_feature: Table A; Target 34971; HLA-C*07:04; KLK3,KLK2; ENSG00000142515,ENSG00000167751; TAA,TAA
TQEPALGTTCY

SEQ ID NO: 34972 - protein, 11 aa, Homo sapiens
  misc_feature: Table A; Target 34972; HLA-C*16:04; KLK3,KLK2; ENSG00000142515,ENSG00000167751; TAA,TAA
TQEPALGTTCY

SEQ ID NO: 34973 - protein, 8 aa, Homo sapiens
  misc_feature: Table A; Target 34973; HLA-A*23:01; KLK3,KLK2; ENSG00000142515,ENSG00000167751; TAA,TAA
VLQGITSW

SEQ ID NO: 34974 - protein, 8 aa, Homo sapiens
  misc_feature: Table A; Target 34974; HLA-A*32:01; KLK3,KLK2; ENSG00000142515,ENSG00000167751; TAA,TAA
VLQGITSW

SEQ ID NO: 34975 - protein, 8 aa, Homo sapiens
  misc_feature: Table A; Target 34975; HLA-B*15:01; KLK3,KLK2; ENSG00000142515,ENSG00000167751; TAA,TAA
VLQGITSW

SEQ ID NO: 34976 - protein, 8 aa, Homo sapiens
  misc_feature: Table A; Target 34976; HLA-B*58:01; KLK3,KLK2; ENSG00000142515,ENSG00000167751; TAA,TAA
VLQGITSW

SEQ ID NO: 34977 - protein, 9 aa, Homo sapiens
  misc_feature: Table A; Target 34977; HLA-C*03:04; KLK3,KLK2; ENSG00000142515,ENSG00000167751; TAA,TAA
VSHSFPHPL

SEQ ID NO: 34978 - protein, 10 aa, Homo sapiens
  misc_feature: Table A; Target 34978; HLA-A*01:01; KLK3,KLK2; ENSG00000142515,ENSG00000167751; TAA,TAA
VSHSFPHPLY

SEQ ID NO: 34979 - protein, 10 aa, Homo sapiens
  misc_feature: Table A; Target 34979; HLA-A*30:02; KLK3,KLK2; ENSG00000142515,ENSG00000167751; TAA,TAA
VSHSFPHPLY

SEQ ID NO: 34980 - protein, 8 aa, Homo sapiens
  misc_feature: Table A; Target 34980; HLA-A*31:01; KLK3,KLK2; ENSG00000142515,ENSG00000167751; TAA,TAA
YTKVVHYR

SEQ ID NO: 34981 - protein, 8 aa, Homo sapiens
  misc_feature: Table A; Target 34981; HLA-A*33:01; KLK3,KLK2; ENSG00000142515,ENSG00000167751; TAA,TAA
YTKVVHYR

SEQ ID NO: 34982 - protein, 8 aa, Homo sapiens
  misc_feature: Table A; Target 34982; HLA-A*33:03; KLK3,KLK2; ENSG00000142515,ENSG00000167751; TAA,TAA
YTKVVHYR

SEQ ID NO: 34983 - protein, 8 aa, Homo sapiens
  misc_feature: Table A; Target 34983; HLA-A*32:01; KLK3,KLK2,KLK4; ENSG00000142515,ENSG00000167751,ENSG00000167749; TAA,TAA,TAA
GVLVHPQW

SEQ ID NO: 34984 - protein, 8 aa, Homo sapiens
  misc_feature: Table A; Target 34984; HLA-B*57:01; KLK3,KLK2,KLK4; ENSG00000142515,ENSG00000167751,ENSG00000167749; TAA,TAA,TAA
GVLVHPQW

SEQ ID NO: 34985 - protein, 8 aa, Homo sapiens
  misc_feature: Table A; Target 34985; HLA-B*58:01; KLK3,KLK2,KLK4; ENSG00000142515,ENSG00000167751,ENSG00000167749; TAA,TAA,TAA
GVLVHPQW

SEQ ID NO: 34986 - protein, 9 aa, Homo sapiens
  misc_feature: Table A; Target 34986; HLA-A*02:01; KLK3,KLK2,KLK4; ENSG00000142515,ENSG00000167751,ENSG00000167749; TAA,TAA,TAA
VLVHPQWVL

SEQ ID NO: 34987 - protein, 9 aa, Homo sapiens
  misc_feature: Table A; Target 34987; HLA-A*02:04; KLK3,KLK2,KLK4; ENSG00000142515,ENSG00000167751,ENSG00000167749; TAA,TAA,TAA
VLVHPQWVL

SEQ ID NO: 34988 - protein, 9 aa, Homo sapiens
  misc_feature: Table A; Target 34988; HLA-A*02:07; KLK3,KLK2,KLK4; ENSG00000142515,ENSG00000167751,ENSG00000167749; TAA,TAA,TAA
VLVHPQWVL

SEQ ID NO: 34989 - protein, 9 aa, Homo sapiens
  misc_feature: Table A; Target 34989; HLA-A*24:02; KLK3,KLK2,KLK4; ENSG00000142515,ENSG00000167751,ENSG00000167749; TAA,TAA,TAA
VLVHPQWVL

SEQ ID NO: 34990 - protein, 9 aa, Homo sapiens
  misc_feature: Table A; Target 34990; HLA-A*23:01; KLK3,KLK4; ENSG00000142515,ENSG00000167749; TAA,TAA
VLVHPQWVL

SEQ ID NO: 34991 - protein, 9 aa, Homo sapiens
  misc_feature: Table A; Target 34991; HLA-A*30:02; KLK4; ENSG00000167749; TAA
AAHCFQNSY

SEQ ID NO: 34992 - protein, 9 aa, Homo sapiens
  misc_feature: Table A; Target 34992; HLA-A*32:01; KLK4; ENSG00000167749; TAA
AAHCFQNSY

SEQ ID NO: 34993 - protein, 9 aa, Homo sapiens
  misc_feature: Table A; Target 34993; HLA-B*15:01; KLK4; ENSG00000167749; TAA
AAHCFQNSY

SEQ ID NO: 34994 - protein, 9 aa, Homo sapiens
  misc_feature: Table A; Target 34994; HLA-B*15:03; KLK4; ENSG00000167749; TAA
AAHCFQNSY

SEQ ID NO: 34995 - protein, 9 aa, Homo sapiens
  misc_feature: Table A; Target 34995; HLA-B*46:01; KLK4; ENSG00000167749; TAA
AAHCFQNSY

SEQ ID NO: 34996 - protein, 9 aa, Homo sapiens
  misc_feature: Table A; Target 34996; HLA-B*58:01; KLK4; ENSG00000167749; TAA
AAHCFQNSY

SEQ ID NO: 34997 - protein, 9 aa, Homo sapiens
  misc_feature: Table A; Target 34997; HLA-C*02:02; KLK4; ENSG00000167749; TAA
AAHCFQNSY

SEQ ID NO: 34998 - protein, 9 aa, Homo sapiens
  misc_feature: Table A; Target 34998; HLA-C*16:01; KLK4; ENSG00000167749; TAA
AAHCFQNSY

SEQ ID NO: 34999 - protein, 9 aa, Homo sapiens
  misc_feature: Table A; Target 34999; HLA-C*16:02; KLK4; ENSG00000167749; TAA
AAHCFQNSY

SEQ ID NO: 35000 - protein, 9 aa, Homo sapiens
  misc_feature: Table A; Target 35000; HLA-C*16:04; KLK4; ENSG00000167749; TAA
AAHCFQNSY

SEQ ID NO: 35001 - protein, 9 aa, Homo sapiens
  misc_feature: Table A; Target 35001; HLA-B*35:03; KLK4; ENSG00000167749; TAA
AALVMENEL

SEQ ID NO: 35002 - protein, 9 aa, Homo sapiens
  misc_feature: Table A; Target 35002; HLA-B*40:01; KLK4; ENSG00000167749; TAA
AALVMENEL

SEQ ID NO: 35003 - protein, 9 aa, Homo sapiens
  misc_feature: Table A; Target 35003; HLA-B*46:01; KLK4; ENSG00000167749; TAA
AALVMENEL

SEQ ID NO: 35004 - protein, 9 aa, Homo sapiens
  misc_feature: Table A; Target 35004; HLA-B*58:01; KLK4; ENSG00000167749; TAA
AALVMENEL

SEQ ID NO: 35005 - protein, 9 aa, Homo sapiens
  misc_feature: Table A; Target 35005; HLA-C*01:02; KLK4; ENSG00000167749; TAA
AALVMENEL

SEQ ID NO: 35006 - protein, 9 aa, Homo sapiens
  misc_feature: Table A; Target 35006; HLA-C*03:03; KLK4; ENSG00000167749; TAA
AALVMENEL

SEQ ID NO: 35007 - protein, 9 aa, Homo sapiens
  misc_feature: Table A; Target 35007; HLA-C*03:04; KLK4; ENSG00000167749; TAA
AALVMENEL

SEQ ID NO: 35008 - protein, 9 aa, Homo sapiens
  misc_feature: Table A; Target 35008; HLA-C*05:01; KLK4; ENSG00000167749; TAA
AALVMENEL

SEQ ID NO: 35009 - protein, 9 aa, Homo sapiens
  misc_feature: Table A; Target 35009; HLA-C*14:02; KLK4; ENSG00000167749; TAA
AALVMENEL

SEQ ID NO: 35010 - protein, 9 aa, Homo sapiens
  misc_feature: Table A; Target 35010; HLA-C*16:01; KLK4; ENSG00000167749; TAA
AALVMENEL

SEQ ID NO: 35011 - protein, 9 aa, Homo sapiens
  misc_feature: Table A; Target 35011; HLA-C*16:02; KLK4; ENSG00000167749; TAA
AALVMENEL

SEQ ID NO: 35012 - protein, 9 aa, Homo sapiens
  misc_feature: Table A; Target 35012; HLA-C*16:04; KLK4; ENSG00000167749; TAA
AALVMENEL

SEQ ID NO: 35013 - protein, 9 aa, Homo sapiens
  misc_feature: Table A; Target 35013; HLA-B*37:01; KLK4; ENSG00000167749; TAA
ADQEPGSQM

SEQ ID NO: 35014 - protein, 9 aa, Homo sapiens
  misc_feature: Table A; Target 35014; HLA-C*01:02; KLK4; ENSG00000167749; TAA
ADQEPGSQM

SEQ ID NO: 35015 - protein, 9 aa, Homo sapiens
  misc_feature: Table A; Target 35015; HLA-C*05:01; KLK4; ENSG00000167749; TAA
ADQEPGSQM

SEQ ID NO: 35016 - protein, 9 aa, Homo sapiens
  misc_feature: Table A; Target 35016; HLA-C*07:02; KLK4; ENSG00000167749; TAA
ADQEPGSQM

SEQ ID NO: 35017 - protein, 9 aa, Homo sapiens
  misc_feature: Table A; Target 35017; HLA-C*14:02; KLK4; ENSG00000167749; TAA
ADQEPGSQM

SEQ ID NO: 35018 - protein, 9 aa, Homo sapiens
  misc_feature: Table A; Target 35018; HLA-A*02:04; KLK4; ENSG00000167749; TAA
AGNPWGWFL

SEQ ID NO: 35019 - protein, 9 aa, Homo sapiens
  misc_feature: Table A; Target 35019; HLA-A*31:01; KLK4; ENSG00000167749; TAA
AGNPWGWFL

SEQ ID NO: 35020 - protein, 8 aa, Homo sapiens
  misc_feature: Table A; Target 35020; HLA-C*07:01; KLK4; ENSG00000167749; TAA
AHCFQNSY

SEQ ID NO: 35021 - protein, 10 aa, Homo sapiens
  misc_feature: Table A; Target 35021; HLA-B*38:01; KLK4; ENSG00000167749; TAA
AHCFQNSYTI

SEQ ID NO: 35022 - protein, 9 aa, Homo sapiens
  misc_feature: Table A; Target 35022; HLA-A*23:01; KLK4; ENSG00000167749; TAA
ALVMENELF

SEQ ID NO: 35023 - protein, 9 aa, Homo sapiens
  misc_feature: Table A; Target 35023; HLA-B*15:01; KLK4; ENSG00000167749; TAA
ALVMENELF

SEQ ID NO: 35024 - protein, 9 aa, Homo sapiens
  misc_feature: Table A; Target 35024; HLA-C*07:02; KLK4; ENSG00000167749; TAA
ANGRMPTVL

SEQ ID NO: 35025 - protein, 10 aa, Homo sapiens
  misc_feature: Table A; Target 35025; HLA-C*04:01; KLK4; ENSG00000167749; TAA
APCGQVGVPG

SEQ ID NO: 35026 - protein, 10 aa, Homo sapiens
  misc_feature: Table A; Target 35026; HLA-A*29:02; KLK4; ENSG00000167749; TAA
ASLSVRHPEY

SEQ ID NO: 35027 - protein, 10 aa, Homo sapiens
  misc_feature: Table A; Target 35027; HLA-A*30:02; KLK4; ENSG00000167749; TAA
ASLSVRHPEY

SEQ ID NO: 35028 - protein, 10 aa, Homo sapiens
  misc_feature: Table A; Target 35028; HLA-C*16:01; KLK4; ENSG00000167749; TAA
ASLSVRHPEY

SEQ ID NO: 35029 - protein, 9 aa, Homo sapiens
  misc_feature: Table A; Target 35029; HLA-A*25:01; KLK4; ENSG00000167749; TAA
ATAGNPWGW

SEQ ID NO: 35030 - protein, 9 aa, Homo sapiens
  misc_feature: Table A; Target 35030; HLA-A*32:01; KLK4; ENSG00000167749; TAA
ATAGNPWGW

SEQ ID NO: 35031 - protein, 9 aa, Homo sapiens
  misc_feature: Table A; Target 35031; HLA-B*57:01; KLK4; ENSG00000167749; TAA
ATAGNPWGW

SEQ ID NO: 35032 - protein, 9 aa, Homo sapiens
  misc_feature: Table A; Target 35032; HLA-B*58:01; KLK4; ENSG00000167749; TAA
ATAGNPWGW

SEQ ID NO: 35033 - protein, 9 aa, Homo sapiens
  misc_feature: Table A; Target 35033; HLA-C*16:04; KLK4; ENSG00000167749; TAA
ATAGNPWGW

SEQ ID NO: 35034 - protein, 8 aa, Homo sapiens
  misc_feature: Table A; Target 35034; HLA-A*23:01; KLK4; ENSG00000167749; TAA
CFQNSYTI

SEQ ID NO: 35035 - protein, 10 aa, Homo sapiens
  misc_feature: Table A; Target 35035; HLA-A*30:02; KLK4; ENSG00000167749; TAA
CGQVGVPGVY

SEQ ID NO: 35036 - protein, 9 aa, Homo sapiens
  misc_feature: Table A; Target 35036; HLA-B*07:02; KLK4; ENSG00000167749; TAA
CPTAGNSCL

SEQ ID NO: 35037 - protein, 9 aa, Homo sapiens
  misc_feature: Table A; Target 35037; HLA-B*35:03; KLK4; ENSG00000167749; TAA
CPTAGNSCL

SEQ ID NO: 35038 - protein, 9 aa, Homo sapiens
  misc_feature: Table A; Target 35038; HLA-C*07:02; KLK4; ENSG00000167749; TAA
CPTAGNSCL

SEQ ID NO: 35039 - protein, 9 aa, Homo sapiens
  misc_feature: Table A; Target 35039; HLA-A*01:01; KLK4; ENSG00000167749; TAA
CSKLYDPLY

SEQ ID NO: 35040 - protein, 9 aa, Homo sapiens
  misc_feature: Table A; Target 35040; HLA-A*30:02; KLK4; ENSG00000167749; TAA
CSKLYDPLY

SEQ ID NO: 35041 - protein, 9 aa, Homo sapiens
  misc_feature: Table A; Target 35041; HLA-A*25:01; KLK4; ENSG00000167749; TAA
DCSPHSQPW

SEQ ID NO: 35042 - protein, 9 aa, Homo sapiens
  misc_feature: Table A; Target 35042; HLA-A*33:01; KLK4; ENSG00000167749; TAA
DCSPHSQPW

SEQ ID NO: 35043 - protein, 10 aa, Homo sapiens
  misc_feature: Table A; Target 35043; HLA-B*38:01; KLK4; ENSG00000167749; TAA
DESVSESDTI

SEQ ID NO: 35044 - protein, 10 aa, Homo sapiens
  misc_feature: Table A; Target 35044; HLA-B*39:01; KLK4; ENSG00000167749; TAA
DESVSESDTI

SEQ ID NO: 35045 - protein, 8 aa, Homo sapiens
  misc_feature: Table A; Target 35045; HLA-B*08:01; KLK4; ENSG00000167749; TAA
DPLYHPSM

SEQ ID NO: 35046 - protein, 8 aa, Homo sapiens
  misc_feature: Table A; Target 35046; HLA-B*35:01; KLK4; ENSG00000167749; TAA
DPLYHPSM

SEQ ID NO: 35047 - protein, 8 aa, Homo sapiens
  misc_feature: Table A; Target 35047; HLA-B*35:03; KLK4; ENSG00000167749; TAA
DPLYHPSM

SEQ ID NO: 35048 - protein, 8 aa, Homo sapiens
  misc_feature: Table A; Target 35048; HLA-B*51:01; KLK4; ENSG00000167749; TAA
DPLYHPSM

SEQ ID NO: 35049 - protein, 8 aa, Homo sapiens
  misc_feature: Table A; Target 35049; HLA-B*54:01; KLK4; ENSG00000167749; TAA
DPLYHPSM

SEQ ID NO: 35050 - protein, 8 aa, Homo sapiens
  misc_feature: Table A; Target 35050; HLA-B*55:01; KLK4; ENSG00000167749; TAA
DPLYHPSM

SEQ ID NO: 35051 - protein, 8 aa, Homo sapiens
  misc_feature: Table A; Target 35051; HLA-C*03:03; KLK4; ENSG00000167749; TAA
DPLYHPSM

SEQ ID NO: 35052 - protein, 8 aa, Homo sapiens
  misc_feature: Table A; Target 35052; HLA-C*07:01; KLK4; ENSG00000167749; TAA
DPLYHPSM

SEQ ID NO: 35053 - protein, 9 aa, Homo sapiens
  misc_feature: Table A; Target 35053; HLA-A*33:01; KLK4; ENSG00000167749; TAA
DPLYHPSMF

SEQ ID NO: 35054 - protein, 9 aa, Homo sapiens
  misc_feature: Table A; Target 35054; HLA-B*35:01; KLK4; ENSG00000167749; TAA
DPLYHPSMF

SEQ ID NO: 35055 - protein, 9 aa, Homo sapiens
  misc_feature: Table A; Target 35055; HLA-B*35:03; KLK4; ENSG00000167749; TAA
DPLYHPSMF

SEQ ID NO: 35056 - protein, 9 aa, Homo sapiens
  misc_feature: Table A; Target 35056; HLA-B*51:01; KLK4; ENSG00000167749; TAA
DPLYHPSMF

SEQ ID NO: 35057 - protein, 8 aa, Homo sapiens
  misc_feature: Table A; Target 35057; HLA-C*05:01; KLK4; ENSG00000167749; TAA
DQEPGSQM

SEQ ID NO: 35058 - protein, 9 aa, Homo sapiens
  misc_feature: Table A; Target 35058; HLA-B*27:05; KLK4; ENSG00000167749; TAA
DQEPGSQMV

SEQ ID NO: 35059 - protein, 9 aa, Homo sapiens
  misc_feature: Table A; Target 35059; HLA-B*38:01; KLK4; ENSG00000167749; TAA
DQEPGSQMV

SEQ ID NO: 35060 - protein, 9 aa, Homo sapiens
  misc_feature: Table A; Target 35060; HLA-B*39:01; KLK4; ENSG00000167749; TAA
DQEPGSQMV

SEQ ID NO: 35061 - protein, 9 aa, Homo sapiens
  misc_feature: Table A; Target 35061; HLA-C*05:01; KLK4; ENSG00000167749; TAA
DQEPGSQMV

SEQ ID NO: 35062 - protein, 10 aa, Homo sapiens
  misc_feature: Table A; Target 35062; HLA-B*39:01; KLK4; ENSG00000167749; TAA
DQEPGSQMVE

SEQ ID NO: 35063 - protein, 11 aa, Homo sapiens
  misc_feature: Table A; Target 35063; HLA-B*39:01; KLK4; ENSG00000167749; TAA
DQEPGSQMVEA

SEQ ID NO: 35064 - protein, 11 aa, Homo sapiens
  misc_feature: Table A; Target 35064; HLA-A*26:01; KLK4; ENSG00000167749; TAA
DSGGPLICNGY

SEQ ID NO: 35065 - protein, 8 aa, Homo sapiens
  misc_feature: Table A; Target 35065; HLA-A*25:01; KLK4; ENSG00000167749; TAA
DTIRSISI

SEQ ID NO: 35066 - protein, 8 aa, Homo sapiens
  misc_feature: Table A; Target 35066; HLA-B*08:01; KLK4; ENSG00000167749; TAA
DTIRSISI

SEQ ID NO: 35067 - protein, 8 aa, Homo sapiens
  misc_feature: Table A; Target 35067; HLA-B*18:01; KLK4; ENSG00000167749; TAA
DTIRSISI

SEQ ID NO: 35068 - protein, 8 aa, Homo sapiens
  misc_feature: Table A; Target 35068; HLA-B*51:01; KLK4; ENSG00000167749; TAA
DTIRSISI

SEQ ID NO: 35069 - protein, 8 aa, Homo sapiens
  misc_feature: Table A; Target 35069; HLA-C*03:03; KLK4; ENSG00000167749; TAA
DTIRSISI

SEQ ID NO: 35070 - protein, 9 aa, Homo sapiens
  misc_feature: Table A; Target 35070; HLA-A*25:01; KLK4; ENSG00000167749; TAA
DTIRSISIA

SEQ ID NO: 35071 - protein, 9 aa, Homo sapiens
  misc_feature: Table A; Target 35071; HLA-A*26:01; KLK4; ENSG00000167749; TAA
DTIRSISIA

SEQ ID NO: 35072 - protein, 11 aa, Homo sapiens
  misc_feature: Table A; Target 35072; HLA-A*25:01; KLK4; ENSG00000167749; TAA
DTIRSISIASQ

SEQ ID NO: 35073 - protein, 11 aa, Homo sapiens
  misc_feature: Table A; Target 35073; HLA-A*26:01; KLK4; ENSG00000167749; TAA
DTIRSISIASQ

SEQ ID NO: 35074 - protein, 11 aa, Homo sapiens
  misc_feature: Table A; Target 35074; HLA-A*33:01; KLK4; ENSG00000167749; TAA
DTIRSISIASQ

SEQ ID NO: 35075 - protein, 10 aa, Homo sapiens
  misc_feature: Table A; Target 35075; HLA-A*26:01; KLK4; ENSG00000167749; TAA
EADQEPGSQM

SEQ ID NO: 35076 - protein, 10 aa, Homo sapiens
  misc_feature: Table A; Target 35076; HLA-B*38:01; KLK4; ENSG00000167749; TAA
EADQEPGSQM

SEQ ID NO: 35077 - protein, 10 aa, Homo sapiens
  misc_feature: Table A; Target 35077; HLA-B*39:01; KLK4; ENSG00000167749; TAA
EADQEPGSQM

SEQ ID NO: 35078 - protein, 10 aa, Homo sapiens
  misc_feature: Table A; Target 35078; HLA-B*55:01; KLK4; ENSG00000167749; TAA
EADQEPGSQM

SEQ ID NO: 35079 - protein, 10 aa, Homo sapiens
  misc_feature: Table A; Target 35079; HLA-C*04:01; KLK4; ENSG00000167749; TAA
EADQEPGSQM

SEQ ID NO: 35080 - protein, 10 aa, Homo sapiens
  misc_feature: Table A; Target 35080; HLA-C*05:01; KLK4; ENSG00000167749; TAA
EADQEPGSQM

SEQ ID NO: 35081 - protein, 10 aa, Homo sapiens
  misc_feature: Table A; Target 35081; HLA-C*07:06; KLK4; ENSG00000167749; TAA
EADQEPGSQM

SEQ ID NO: 35082 - protein, 8 aa, Homo sapiens
  misc_feature: Table A; Target 35082; HLA-B*18:01; KLK4; ENSG00000167749; TAA
EEVCSKLY

SEQ ID NO: 35083 - protein, 8 aa, Homo sapiens
  misc_feature: Table A; Target 35083; HLA-B*44:03; KLK4; ENSG00000167749; TAA
EEVCSKLY

SEQ ID NO: 35084 - protein, 9 aa, Homo sapiens
  misc_feature: Table A; Target 35084; HLA-A*68:02; KLK4; ENSG00000167749; TAA
ELFCSGVLV

SEQ ID NO: 35085 - protein, 9 aa, Homo sapiens
  misc_feature: Table A; Target 35085; HLA-B*54:01; KLK4; ENSG00000167749; TAA
EPGSQMVEA

SEQ ID NO: 35086 - protein, 9 aa, Homo sapiens
  misc_feature: Table A; Target 35086; HLA-B*56:01; KLK4; ENSG00000167749; TAA
EPGSQMVEA

SEQ ID NO: 35087 - protein, 8 aa, Homo sapiens
  misc_feature: Table A; Target 35087; HLA-B*51:01; KLK4; ENSG00000167749; TAA
ESDTIRSI

SEQ ID NO: 35088 - protein, 8 aa, Homo sapiens
  misc_feature: Table A; Target 35088; HLA-C*05:01; KLK4; ENSG00000167749; TAA
ESDTIRSI

SEQ ID NO: 35089 - protein, 10 aa, Homo sapiens
  misc_feature: Table A; Target 35089; HLA-A*01:01; KLK4; ENSG00000167749; TAA
ESDTIRSISI

SEQ ID NO: 35090 - protein, 10 aa, Homo sapiens
  misc_feature: Table A; Target 35090; HLA-A*25:01; KLK4; ENSG00000167749; TAA
ESDTIRSISI

SEQ ID NO: 35091 - protein, 10 aa, Homo sapiens
  misc_feature: Table A; Target 35091; HLA-A*68:01; KLK4; ENSG00000167749; TAA
ESDTIRSISI

SEQ ID NO: 35092 - protein, 10 aa, Homo sapiens
  misc_feature: Table A; Target 35092; HLA-C*16:04; KLK4; ENSG00000167749; TAA
ESDTIRSISI

SEQ ID NO: 35093 - protein, 9 aa, Homo sapiens
  misc_feature: Table A; Target 35093; HLA-B*38:01; KLK4; ENSG00000167749; TAA
ESVSESDTI

SEQ ID NO: 35094 - protein, 10 aa, Homo sapiens
  misc_feature: Table A; Target 35094; HLA-A*33:03; KLK4; ENSG00000167749; TAA
ESVSESDTIR

SEQ ID NO: 35095 - protein, 10 aa, Homo sapiens
  misc_feature: Table A; Target 35095; HLA-A*68:01; KLK4; ENSG00000167749; TAA
ESVSESDTIR

SEQ ID NO: 35096 - protein, 10 aa, Homo sapiens
  misc_feature: Table A; Target 35096; HLA-C*07:06; KLK4; ENSG00000167749; TAA
ESVSESDTIR

SEQ ID NO: 35097 - protein, 11 aa, Homo sapiens
  misc_feature: Table A; Target 35097; HLA-A*24:02; KLK4; ENSG00000167749; TAA
EYNRPLLANDL

SEQ ID NO: 35098 - protein, 9 aa, Homo sapiens
  misc_feature: Table A; Target 35098; HLA-A*02:01; KLK4; ENSG00000167749; TAA
FLGYLILGV

SEQ ID NO: 35099 - protein, 9 aa, Homo sapiens
  misc_feature: Table A; Target 35099; HLA-A*02:03; KLK4; ENSG00000167749; TAA
FLGYLILGV

SEQ ID NO: 35100 - protein, 9 aa, Homo sapiens
  misc_feature: Table A; Target 35100; HLA-A*02:04; KLK4; ENSG00000167749; TAA
FLGYLILGV

SEQ ID NO: 35101 - protein, 9 aa, Homo sapiens
  misc_feature: Table A; Target 35101; HLA-A*02:07; KLK4; ENSG00000167749; TAA
FLGYLILGV

SEQ ID NO: 35102 - protein, 9 aa, Homo sapiens
  misc_feature: Table A; Target 35102; HLA-A*68:02; KLK4; ENSG00000167749; TAA
FLGYLILGV

SEQ ID NO: 35103 - protein, 9 aa, Homo sapiens
  misc_feature: Table A; Target 35103; HLA-B*13:02; KLK4; ENSG00000167749; TAA
FLGYLILGV

SEQ ID NO: 35104 - protein, 9 aa, Homo sapiens
  misc_feature: Table A; Target 35104; HLA-A*02:01; KLK4; ENSG00000167749; TAA
FQNSYTIGL

SEQ ID NO: 35105 - protein, 9 aa, Homo sapiens
  misc_feature: Table A; Target 35105; HLA-A*02:03; KLK4; ENSG00000167749; TAA
FQNSYTIGL

SEQ ID NO: 35106 - protein, 9 aa, Homo sapiens
  misc_feature: Table A; Target 35106; HLA-A*02:04; KLK4; ENSG00000167749; TAA
FQNSYTIGL

SEQ ID NO: 35107 - protein, 9 aa, Homo sapiens
  misc_feature: Table A; Target 35107; HLA-A*02:07; KLK4; ENSG00000167749; TAA
FQNSYTIGL

SEQ ID NO: 35108 - protein, 9 aa, Homo sapiens
  misc_feature: Table A; Target 35108; HLA-A*03:01; KLK4; ENSG00000167749; TAA
FQNSYTIGL

SEQ ID NO: 35109 - protein, 9 aa, Homo sapiens
  misc_feature: Table A; Target 35109; HLA-A*30:01; KLK4; ENSG00000167749; TAA
FQNSYTIGL

SEQ ID NO: 35110 - protein, 9 aa, Homo sapiens
  misc_feature: Table A; Target 35110; HLA-A*31:01; KLK4; ENSG00000167749; TAA
FQNSYTIGL

SEQ ID NO: 35111 - protein, 9 aa, Homo sapiens
  misc_feature: Table A; Target 35111; HLA-A*32:01; KLK4; ENSG00000167749; TAA
FQNSYTIGL

SEQ ID NO: 35112 - protein, 9 aa, Homo sapiens
  misc_feature: Table A; Target 35112; HLA-A*68:02; KLK4; ENSG00000167749; TAA
FQNSYTIGL

SEQ ID NO: 35113 - protein, 9 aa, Homo sapiens
  misc_feature: Table A; Target 35113; HLA-B*07:02; KLK4; ENSG00000167749; TAA
FQNSYTIGL

SEQ ID NO: 35114 - protein, 9 aa, Homo sapiens
  misc_feature: Table A; Target 35114; HLA-B*08:01; KLK4; ENSG00000167749; TAA
FQNSYTIGL

SEQ ID NO: 35115 - protein, 9 aa, Homo sapiens
  misc_feature: Table A; Target 35115; HLA-B*13:02; KLK4; ENSG00000167749; TAA
FQNSYTIGL

SEQ ID NO: 35116 - protein, 9 aa, Homo sapiens
  misc_feature: Table A; Target 35116; HLA-B*15:01; KLK4; ENSG00000167749; TAA
FQNSYTIGL

SEQ ID NO: 35117 - protein, 9 aa, Homo sapiens
  misc_feature: Table A; Target 35117; HLA-B*15:03; KLK4; ENSG00000167749; TAA
FQNSYTIGL

SEQ ID NO: 35118 - protein, 9 aa, Homo sapiens
  misc_feature: Table A; Target 35118; HLA-B*27:05; KLK4; ENSG00000167749; TAA
FQNSYTIGL

SEQ ID NO: 35119 - protein, 9 aa, Homo sapiens
  misc_feature: Table A; Target 35119; HLA-B*35:03; KLK4; ENSG00000167749; TAA
FQNSYTIGL

SEQ ID NO: 35120 - protein, 9 aa, Homo sapiens
  misc_feature: Table A; Target 35120; HLA-B*37:01; KLK4; ENSG00000167749; TAA
FQNSYTIGL

SEQ ID NO: 35121 - protein, 9 aa, Homo sapiens
  misc_feature: Table A; Target 35121; HLA-B*38:01; KLK4; ENSG00000167749; TAA
FQNSYTIGL

SEQ ID NO: 35122 - protein, 9 aa, Homo sapiens
  misc_feature: Table A; Target 35122; HLA-B*39:01; KLK4; ENSG00000167749; TAA
FQNSYTIGL

SEQ ID NO: 35123 - protein, 9 aa, Homo sapiens
  misc_feature: Table A; Target 35123; HLA-B*40:01; KLK4; ENSG00000167749; TAA
FQNSYTIGL

SEQ ID NO: 35124 - protein, 9 aa, Homo sapiens
  misc_feature: Table A; Target 35124; HLA-B*40:02; KLK4; ENSG00000167749; TAA
FQNSYTIGL

SEQ ID NO: 35125 - protein, 9 aa, Homo sapiens
  misc_feature: Table A; Target 35125; HLA-B*46:01; KLK4; ENSG00000167749; TAA
FQNSYTIGL

SEQ ID NO: 35126 - protein, 9 aa, Homo sapiens
  misc_feature: Table A; Target 35126; HLA-B*55:01; KLK4; ENSG00000167749; TAA
FQNSYTIGL

SEQ ID NO: 35127 - protein, 9 aa, Homo sapiens
  misc_feature: Table A; Target 35127; HLA-B*58:01; KLK4; ENSG00000167749; TAA
FQNSYTIGL

SEQ ID NO: 35128 - protein, 9 aa, Homo sapiens
  misc_feature: Table A; Target 35128; HLA-C*01:02; KLK4; ENSG00000167749; TAA
FQNSYTIGL

SEQ ID NO: 35129 - protein, 9 aa, Homo sapiens
  misc_feature: Table A; Target 35129; HLA-C*02:02; KLK4; ENSG00000167749; TAA
FQNSYTIGL

SEQ ID NO: 35130 - protein, 9 aa, Homo sapiens
  misc_feature: Table A; Target 35130; HLA-C*03:03; KLK4; ENSG00000167749; TAA
FQNSYTIGL

SEQ ID NO: 35131 - protein, 9 aa, Homo sapiens
  misc_feature: Table A; Target 35131; HLA-C*03:04; KLK4; ENSG00000167749; TAA
FQNSYTIGL

SEQ ID NO: 35132 - protein, 9 aa, Homo sapiens
  misc_feature: Table A; Target 35132; HLA-C*04:01; KLK4; ENSG00000167749; TAA
FQNSYTIGL

SEQ ID NO: 35133 - protein, 9 aa, Homo sapiens
  misc_feature: Table A; Target 35133; HLA-C*05:01; KLK4; ENSG00000167749; TAA
FQNSYTIGL

SEQ ID NO: 35134 - protein, 9 aa, Homo sapiens
  misc_feature: Table A; Target 35134; HLA-C*06:02; KLK4; ENSG00000167749; TAA
FQNSYTIGL

SEQ ID NO: 35135 - protein, 9 aa, Homo sapiens
  misc_feature: Table A; Target 35135; HLA-C*07:04; KLK4; ENSG00000167749; TAA
FQNSYTIGL

SEQ ID NO: 35136 - protein, 9 aa, Homo sapiens
  misc_feature: Table A; Target 35136; HLA-C*12:03; KLK4; ENSG00000167749; TAA
FQNSYTIGL

SEQ ID NO: 35137 - protein, 9 aa, Homo sapiens
  misc_feature: Table A; Target 35137; HLA-C*14:02; KLK4; ENSG00000167749; TAA
FQNSYTIGL

SEQ ID NO: 35138 - protein, 9 aa, Homo sapiens
  misc_feature: Table A; Target 35138; HLA-C*16:02; KLK4; ENSG00000167749; TAA
FQNSYTIGL

SEQ ID NO: 35139 - protein, 9 aa, Homo sapiens
  misc_feature: Table A; Target 35139; HLA-C*16:04; KLK4; ENSG00000167749; TAA
FQNSYTIGL

SEQ ID NO: 35140 - protein, 11 aa, Homo sapiens
  misc_feature: Table A; Target 35140; HLA-A*02:04; KLK4; ENSG00000167749; TAA
FQNSYTIGLGL

SEQ ID NO: 35141 - protein, 11 aa, Homo sapiens
  misc_feature: Table A; Target 35141; HLA-B*13:02; KLK4; ENSG00000167749; TAA
FQNSYTIGLGL

SEQ ID NO: 35142 - protein, 11 aa, Homo sapiens
  misc_feature: Table A; Target 35142; HLA-B*38:01; KLK4; ENSG00000167749; TAA
FQNSYTIGLGL

SEQ ID NO: 35143 - protein, 9 aa, Homo sapiens
  misc_feature: Table A; Target 35143; HLA-A*02:07; KLK4; ENSG00000167749; TAA
FTEWIEKTV

SEQ ID NO: 35144 - protein, 9 aa, Homo sapiens
  misc_feature: Table A; Target 35144; HLA-A*68:02; KLK4; ENSG00000167749; TAA
FTEWIEKTV

SEQ ID NO: 35145 - protein, 8 aa, Homo sapiens
  misc_feature: Table A; Target 35145; HLA-B*37:01; KLK4; ENSG00000167749; TAA
GDSGGPLI

SEQ ID NO: 35146 - protein, 11 aa, Homo sapiens
  misc_feature: Table A; Target 35146; HLA-B*44:02; KLK4; ENSG00000167749; TAA
GEDCSPHSQPW

SEQ ID NO: 35147 - protein, 9 aa, Homo sapiens
  misc_feature: Table A; Target 35147; HLA-A*30:02; KLK4; ENSG00000167749; TAA
GGPLICNGY

SEQ ID NO: 35148 - protein, 9 aa, Homo sapiens
  misc_feature: Table A; Target 35148; HLA-B*15:01; KLK4; ENSG00000167749; TAA
GGPLICNGY

SEQ ID NO: 35149 - protein, 9 aa, Homo sapiens
  misc_feature: Table A; Target 35149; HLA-B*15:03; KLK4; ENSG00000167749; TAA
GGPLICNGY

SEQ ID NO: 35150 - protein, 9 aa, Homo sapiens
  misc_feature: Table A; Target 35150; HLA-C*07:01; KLK4; ENSG00000167749; TAA
GGPLICNGY

SEQ ID NO: 35151 - protein, 11 aa, Homo sapiens
  misc_feature: Table A; Target 35151; HLA-A*02:01; KLK4; ENSG00000167749; TAA
GLLANGRMPTV

SEQ ID NO: 35152 - protein, 11 aa, Homo sapiens
  misc_feature: Table A; Target 35152; HLA-A*02:03; KLK4; ENSG00000167749; TAA
GLLANGRMPTV

SEQ ID NO: 35153 - protein, 11 aa, Homo sapiens
  misc_feature: Table A; Target 35153; HLA-A*02:04; KLK4; ENSG00000167749; TAA
GLLANGRMPTV

SEQ ID NO: 35154 - protein, 11 aa, Homo sapiens
  misc_feature: Table A; Target 35154; HLA-B*55:01; KLK4; ENSG00000167749; TAA
GLLANGRMPTV

SEQ ID NO: 35155 - protein, 10 aa, Homo sapiens
  misc_feature: Table A; Target 35155; HLA-A*29:02; KLK4; ENSG00000167749; TAA
GNPWGWFLGY

SEQ ID NO: 35156 - protein, 8 aa, Homo sapiens
  misc_feature: Table A; Target 35156; HLA-A*30:01; KLK4; ENSG00000167749; TAA
GQVGVPGV

SEQ ID NO: 35157 - protein, 8 aa, Homo sapiens
  misc_feature: Table A; Target 35157; HLA-B*13:02; KLK4; ENSG00000167749; TAA
GQVGVPGV

SEQ ID NO: 35158 - protein, 8 aa, Homo sapiens
  misc_feature: Table A; Target 35158; HLA-C*06:02; KLK4; ENSG00000167749; TAA
GQVGVPGV

SEQ ID NO: 35159 - protein, 9 aa, Homo sapiens
  misc_feature: Table A; Target 35159; HLA-A*25:01; KLK4; ENSG00000167749; TAA
GQVGVPGVY

SEQ ID NO: 35160 - protein, 9 aa, Homo sapiens
  misc_feature: Table A; Target 35160; HLA-A*26:01; KLK4; ENSG00000167749; TAA
GQVGVPGVY

SEQ ID NO: 35161 - protein, 9 aa, Homo sapiens
  misc_feature: Table A; Target 35161; HLA-A*29:02; KLK4; ENSG00000167749; TAA
GQVGVPGVY

SEQ ID NO: 35162 - protein, 9 aa, Homo sapiens
  misc_feature: Table A; Target 35162; HLA-A*30:02; KLK4; ENSG00000167749; TAA
GQVGVPGVY

SEQ ID NO: 35163 - protein, 9 aa, Homo sapiens
  misc_feature: Table A; Target 35163; HLA-A*32:01; KLK4; ENSG00000167749; TAA
GQVGVPGVY

SEQ ID NO: 35164 - protein, 9 aa, Homo sapiens
  misc_feature: Table A; Target 35164; HLA-B*13:02; KLK4; ENSG00000167749; TAA
GQVGVPGVY

SEQ ID NO: 35165 - protein, 9 aa, Homo sapiens
  misc_feature: Table A; Target 35165; HLA-B*15:01; KLK4; ENSG00000167749; TAA
GQVGVPGVY

SEQ ID NO: 35166 - protein, 9 aa, Homo sapiens
  misc_feature: Table A; Target 35166; HLA-B*15:03; KLK4; ENSG00000167749; TAA
GQVGVPGVY

SEQ ID NO: 35167 - protein, 9 aa, Homo sapiens
  misc_feature: Table A; Target 35167; HLA-B*18:01; KLK4; ENSG00000167749; TAA
GQVGVPGVY

SEQ ID NO: 35168 - protein, 9 aa, Homo sapiens
  misc_feature: Table A; Target 35168; HLA-B*27:02; KLK4; ENSG00000167749; TAA
GQVGVPGVY

SEQ ID NO: 35169 - protein, 9 aa, Homo sapiens
  misc_feature: Table A; Target 35169; HLA-B*27:05; KLK4; ENSG00000167749; TAA
GQVGVPGVY

SEQ ID NO: 35170 - protein, 9 aa, Homo sapiens
  misc_feature: Table A; Target 35170; HLA-B*39:01; KLK4; ENSG00000167749; TAA
GQVGVPGVY

SEQ ID NO: 35171 - protein, 9 aa, Homo sapiens
  misc_feature: Table A; Target 35171; HLA-B*40:01; KLK4; ENSG00000167749; TAA
GQVGVPGVY

SEQ ID NO: 35172 - protein, 9 aa, Homo sapiens
  misc_feature: Table A; Target 35172; HLA-B*44:02; KLK4; ENSG00000167749; TAA
GQVGVPGVY

SEQ ID NO: 35173 - protein, 9 aa, Homo sapiens
  misc_feature: Table A; Target 35173; HLA-B*44:03; KLK4; ENSG00000167749; TAA
GQVGVPGVY

SEQ ID NO: 35174 - protein, 9 aa, Homo sapiens
  misc_feature: Table A; Target 35174; HLA-B*46:01; KLK4; ENSG00000167749; TAA
GQVGVPGVY

SEQ ID NO: 35175 - protein, 9 aa, Homo sapiens
  misc_feature: Table A; Target 35175; HLA-B*58:01; KLK4; ENSG00000167749; TAA
GQVGVPGVY

SEQ ID NO: 35176 - protein, 9 aa, Homo sapiens
  misc_feature: Table A; Target 35176; HLA-C*02:02; KLK4; ENSG00000167749; TAA
GQVGVPGVY

SEQ ID NO: 35177 - protein, 9 aa, Homo sapiens
  misc_feature: Table A; Target 35177; HLA-C*07:04; KLK4; ENSG00000167749; TAA
GQVGVPGVY

SEQ ID NO: 35178 - protein, 9 aa, Homo sapiens
  misc_feature: Table A; Target 35178; HLA-C*12:03; KLK4; ENSG00000167749; TAA
GQVGVPGVY

SEQ ID NO: 35179 - protein, 9 aa, Homo sapiens
  misc_feature: Table A; Target 35179; HLA-C*16:02; KLK4; ENSG00000167749; TAA
GQVGVPGVY

SEQ ID NO: 35180 - protein, 9 aa, Homo sapiens
  misc_feature: Table A; Target 35180; HLA-C*16:04; KLK4; ENSG00000167749; TAA
GQVGVPGVY

SEQ ID NO: 35181 - protein, 10 aa, Homo sapiens
  misc_feature: Table A; Target 35181; HLA-B*13:02; KLK4; ENSG00000167749; TAA
GQVGVPGVYT

SEQ ID NO: 35182 - protein, 10 aa, Homo sapiens
  misc_feature: Table A; Target 35182; HLA-B*27:05; KLK4; ENSG00000167749; TAA
GQVGVPGVYT

SEQ ID NO: 35183 - protein, 10 aa, Homo sapiens
  misc_feature: Table A; Target 35183; HLA-C*04:01; KLK4; ENSG00000167749; TAA
GQVGVPGVYT

SEQ ID NO: 35184 - protein, 9 aa, Homo sapiens
  misc_feature: Table A; Target 35184; HLA-B*27:05; KLK4; ENSG00000167749; TAA
GRMPTVLQC

SEQ ID NO: 35185 - protein, 10 aa, Homo sapiens
  misc_feature: Table A; Target 35185; HLA-B*27:05; KLK4; ENSG00000167749; TAA
GRMPTVLQCV

SEQ ID NO: 35186 - protein, 9 aa, Homo sapiens
  misc_feature: Table A; Target 35186; HLA-A*02:07; KLK4; ENSG00000167749; TAA
GVPGVYTNL

SEQ ID NO: 35187 - protein, 9 aa, Homo sapiens
  misc_feature: Table A; Target 35187; HLA-A*25:01; KLK4; ENSG00000167749; TAA
GVPGVYTNL

SEQ ID NO: 35188 - protein, 9 aa, Homo sapiens
  misc_feature: Table A; Target 35188; HLA-A*26:01; KLK4; ENSG00000167749; TAA
GVPGVYTNL

SEQ ID NO: 35189 - protein, 9 aa, Homo sapiens
  misc_feature: Table A; Target 35189; HLA-A*29:02; KLK4; ENSG00000167749; TAA
GVPGVYTNL

SEQ ID NO: 35190 - protein, 9 aa, Homo sapiens
  misc_feature: Table A; Target 35190; HLA-A*68:02; KLK4; ENSG00000167749; TAA
GVPGVYTNL

SEQ ID NO: 35191 - protein, 9 aa, Homo sapiens
  misc_feature: Table A; Target 35191; HLA-C*01:02; KLK4; ENSG00000167749; TAA
GVPGVYTNL

SEQ ID NO: 35192 - protein, 9 aa, Homo sapiens
  misc_feature: Table A; Target 35192; HLA-A*25:01; KLK4; ENSG00000167749; TAA
GVYTNLCKF

SEQ ID NO: 35193 - protein, 11 aa, Homo sapiens
  misc_feature: Table A; Target 35193; HLA-A*23:01; KLK4; ENSG00000167749; TAA
GYLILGVAGSL

SEQ ID NO: 35194 - protein, 9 aa, Homo sapiens
  misc_feature: Table A; Target 35194; HLA-A*23:01; KLK4; ENSG00000167749; TAA
GYLQGLVSF

SEQ ID NO: 35195 - protein, 9 aa, Homo sapiens
  misc_feature: Table A; Target 35195; HLA-A*24:02; KLK4; ENSG00000167749; TAA
GYLQGLVSF

SEQ ID NO: 35196 - protein, 9 aa, Homo sapiens
  misc_feature: Table A; Target 35196; HLA-A*29:02; KLK4; ENSG00000167749; TAA
GYLQGLVSF

SEQ ID NO: 35197 - protein, 9 aa, Homo sapiens
  misc_feature: Table A; Target 35197; HLA-A*31:01; KLK4; ENSG00000167749; TAA
GYLQGLVSF

SEQ ID NO: 35198 - protein, 9 aa, Homo sapiens
  misc_feature: Table A; Target 35198; HLA-A*32:01; KLK4; ENSG00000167749; TAA
GYLQGLVSF

SEQ ID NO: 35199 - protein, 9 aa, Homo sapiens
  misc_feature: Table A; Target 35199; HLA-A*33:03; KLK4; ENSG00000167749; TAA
GYLQGLVSF

SEQ ID NO: 35200 - protein, 9 aa, Homo sapiens
  misc_feature: Table A; Target 35200; HLA-B*15:01; KLK4; ENSG00000167749; TAA
GYLQGLVSF

SEQ ID NO: 35201 - protein, 9 aa, Homo sapiens
  misc_feature: Table A; Target 35201; HLA-B*15:03; KLK4; ENSG00000167749; TAA
GYLQGLVSF

SEQ ID NO: 35202 - protein, 9 aa, Homo sapiens
  misc_feature: Table A; Target 35202; HLA-B*46:01; KLK4; ENSG00000167749; TAA
GYLQGLVSF

SEQ ID NO: 35203 - protein, 9 aa, Homo sapiens
  misc_feature: Table A; Target 35203; HLA-B*58:01; KLK4; ENSG00000167749; TAA
GYLQGLVSF

SEQ ID NO: 35204 - protein, 9 aa, Homo sapiens
  misc_feature: Table A; Target 35204; HLA-C*01:02; KLK4; ENSG00000167749; TAA
GYLQGLVSF

SEQ ID NO: 35205 - protein, 9 aa, Homo sapiens
  misc_feature: Table A; Target 35205; HLA-C*04:01; KLK4; ENSG00000167749; TAA
GYLQGLVSF

SEQ ID NO: 35206 - protein, 9 aa, Homo sapiens
  misc_feature: Table A; Target 35206; HLA-C*14:02; KLK4; ENSG00000167749; TAA
GYLQGLVSF

SEQ ID NO: 35207 - protein, 9 aa, Homo sapiens
  misc_feature: Table A; Target 35207; HLA-B*13:02; KLK4; ENSG00000167749; TAA
HCFQNSYTI

SEQ ID NO: 35208 - protein, 9 aa, Homo sapiens
  misc_feature: Table A; Target 35208; HLA-B*38:01; KLK4; ENSG00000167749; TAA
HCFQNSYTI

SEQ ID NO: 35209 - protein, 9 aa, Homo sapiens
  misc_feature: Table A; Target 35209; HLA-B*51:01; KLK4; ENSG00000167749; TAA
HCFQNSYTI

SEQ ID NO: 35210 - protein, 9 aa, Homo sapiens
  misc_feature: Table A; Target 35210; HLA-B*07:02; KLK4; ENSG00000167749; TAA
HPEYNRPLL

SEQ ID NO: 35211 - protein, 9 aa, Homo sapiens
  misc_feature: Table A; Target 35211; HLA-B*35:01; KLK4; ENSG00000167749; TAA
HPEYNRPLL

SEQ ID NO: 35212 - protein, 9 aa, Homo sapiens
  misc_feature: Table A; Target 35212; HLA-B*35:03; KLK4; ENSG00000167749; TAA
HPEYNRPLL

SEQ ID NO: 35213 - protein, 9 aa, Homo sapiens
  misc_feature: Table A; Target 35213; HLA-B*55:01; KLK4; ENSG00000167749; TAA
HPEYNRPLL

SEQ ID NO: 35214 - protein, 9 aa, Homo sapiens
  misc_feature: Table A; Target 35214; HLA-C*03:03; KLK4; ENSG00000167749; TAA
HPEYNRPLL

SEQ ID NO: 35215 - protein, 9 aa, Homo sapiens
  misc_feature: Table A; Target 35215; HLA-C*07:02; KLK4; ENSG00000167749; TAA
HPEYNRPLL

SEQ ID NO: 35216 - protein, 10 aa, Homo sapiens
  misc_feature: Table A; Target 35216; HLA-B*54:01; KLK4; ENSG00000167749; TAA
HPEYNRPLLA

SEQ ID NO: 35217 - protein, 8 aa, Homo sapiens
  misc_feature: Table A; Target 35217; HLA-B*54:01; KLK4; ENSG00000167749; TAA
HPQWVLSA

SEQ ID NO: 35218 - protein, 8 aa, Homo sapiens
  misc_feature: Table A; Target 35218; HLA-B*56:01; KLK4; ENSG00000167749; TAA
HPQWVLSA

SEQ ID NO: 35219 - protein, 9 aa, Homo sapiens
  misc_feature: Table A; Target 35219; HLA-B*54:01; KLK4; ENSG00000167749; TAA
HPQWVLSAA

SEQ ID NO: 35220 - protein, 9 aa, Homo sapiens
  misc_feature: Table A; Target 35220; HLA-B*55:01; KLK4; ENSG00000167749; TAA
HPQWVLSAA

SEQ ID NO: 35221 - protein, 9 aa, Homo sapiens
  misc_feature: Table A; Target 35221; HLA-B*56:01; KLK4; ENSG00000167749; TAA
HPQWVLSAA

SEQ ID NO: 35222 - protein, 9 aa, Homo sapiens
  misc_feature: Table A; Target 35222; HLA-A*02:04; KLK4; ENSG00000167749; TAA
HSQPWQAAL

SEQ ID NO: 35223 - protein, 9 aa, Homo sapiens
  misc_feature: Table A; Target 35223; HLA-C*03:03; KLK4; ENSG00000167749; TAA
HSQPWQAAL

SEQ ID NO: 35224 - protein, 9 aa, Homo sapiens
  misc_feature: Table A; Target 35224; HLA-C*03:04; KLK4; ENSG00000167749; TAA
HSQPWQAAL

SEQ ID NO: 35225 - protein, 8 aa, Homo sapiens
  misc_feature: Table A; Target 35225; HLA-B*08:01; KLK4; ENSG00000167749; TAA
IGLGLHSL

SEQ ID NO: 35226 - protein, 8 aa, Homo sapiens
  misc_feature: Table A; Target 35226; HLA-B*07:02; KLK4; ENSG00000167749; TAA
ILGVAGSL

SEQ ID NO: 35227 - protein, 8 aa, Homo sapiens
  misc_feature: Table A; Target 35227; HLA-B*08:01; KLK4; ENSG00000167749; TAA
ILGVAGSL

SEQ ID NO: 35228 - protein, 8 aa, Homo sapiens
  misc_feature: Table A; Target 35228; HLA-C*01:02; KLK4; ENSG00000167749; TAA
ILGVAGSL

SEQ ID NO: 35229 - protein, 8 aa, Homo sapiens
  misc_feature: Table A; Target 35229; HLA-C*03:03; KLK4; ENSG00000167749; TAA
ILGVAGSL

SEQ ID NO: 35230 - protein, 8 aa, Homo sapiens
  misc_feature: Table A; Target 35230; HLA-C*03:04; KLK4; ENSG00000167749; TAA
ILGVAGSL

SEQ ID NO: 35231 - protein, 8 aa, Homo sapiens
  misc_feature: Table A; Target 35231; HLA-C*07:02; KLK4; ENSG00000167749; TAA
ILGVAGSL

SEQ ID NO: 35232 - protein, 8 aa, Homo sapiens
  misc_feature: Table A; Target 35232; HLA-C*07:04; KLK4; ENSG00000167749; TAA
ILGVAGSL

SEQ ID NO: 35233 - protein, 8 aa, Homo sapiens
  misc_feature: Table A; Target 35233; HLA-C*14:02; KLK4; ENSG00000167749; TAA
ILGVAGSL

SEQ ID NO: 35234 - protein, 9 aa, Homo sapiens
  misc_feature: Table A; Target 35234; HLA-A*02:01; KLK4; ENSG00000167749; TAA
ILGVAGSLV

SEQ ID NO: 35235 - protein, 9 aa, Homo sapiens
  misc_feature: Table A; Target 35235; HLA-A*02:03; KLK4; ENSG00000167749; TAA
ILGVAGSLV

SEQ ID NO: 35236 - protein, 9 aa, Homo sapiens
  misc_feature: Table A; Target 35236; HLA-B*13:02; KLK4; ENSG00000167749; TAA
ILGVAGSLV

SEQ ID NO: 35237 - protein, 9 aa, Homo sapiens
  misc_feature: Table A; Target 35237; HLA-B*55:01; KLK4; ENSG00000167749; TAA
ILGVAGSLV

SEQ ID NO: 35238 - protein, 9 aa, Homo sapiens
  misc_feature: Table A; Target 35238; HLA-C*04:01; KLK4; ENSG00000167749; TAA
ILGVAGSLV

SEQ ID NO: 35239 - protein, 9 aa, Homo sapiens
  misc_feature: Table A; Target 35239; HLA-C*05:01; KLK4; ENSG00000167749; TAA
ILGVAGSLV

SEQ ID NO: 35240 - protein, 9 aa, Homo sapiens
  misc_feature: Table A; Target 35240; HLA-C*14:02; KLK4; ENSG00000167749; TAA
ILGVAGSLV

SEQ ID NO: 35241 - protein, 11 aa, Homo sapiens
  misc_feature: Table A; Target 35241; HLA-C*01:02; KLK4; ENSG00000167749; TAA
ILGVAGSLVSG

SEQ ID NO: 35242 - protein, 9 aa, Homo sapiens
  misc_feature: Table A; Target 35242; HLA-C*01:02; KLK4; ENSG00000167749; TAA
KAPCGQVGV

SEQ ID NO: 35243 - protein, 10 aa, Homo sapiens
  misc_feature: Table A; Target 35243; HLA-C*07:02; KLK4; ENSG00000167749; TAA
KAPCGQVGVP

SEQ ID NO: 35244 - protein, 8 aa, Homo sapiens
  misc_feature: Table A; Target 35244; HLA-A*03:01; KLK4; ENSG00000167749; TAA
KLYDPLYH

SEQ ID NO: 35245 - protein, 9 aa, Homo sapiens
  misc_feature: Table A; Target 35245; HLA-A*02:03; KLK4; ENSG00000167749; TAA
KLYDPLYHP

SEQ ID NO: 35246 - protein, 9 aa, Homo sapiens
  misc_feature: Table A; Target 35246; HLA-A*02:07; KLK4; ENSG00000167749; TAA
KLYDPLYHP

SEQ ID NO: 35247 - protein, 10 aa, Homo sapiens
  misc_feature: Table A; Target 35247; HLA-A*03:01; KLK4; ENSG00000167749; TAA
KLYDPLYHPS

SEQ ID NO: 35248 - protein, 11 aa, Homo sapiens
  misc_feature: Table A; Target 35248; HLA-A*02:01; KLK4; ENSG00000167749; TAA
KLYDPLYHPSM

SEQ ID NO: 35249 - protein, 11 aa, Homo sapiens
  misc_feature: Table A; Target 35249; HLA-A*02:04; KLK4; ENSG00000167749; TAA
KLYDPLYHPSM

SEQ ID NO: 35250 - protein, 11 aa, Homo sapiens
  misc_feature: Table A; Target 35250; HLA-A*02:07; KLK4; ENSG00000167749; TAA
KLYDPLYHPSM

SEQ ID NO: 35251 - protein, 11 aa, Homo sapiens
  misc_feature: Table A; Target 35251; HLA-A*03:01; KLK4; ENSG00000167749; TAA
KLYDPLYHPSM

SEQ ID NO: 35252 - protein, 8 aa, Homo sapiens
  misc_feature: Table A; Target 35252; HLA-B*51:01; KLK4; ENSG00000167749; TAA
LANDLMLI

SEQ ID NO: 35253 - protein, 9 aa, Homo sapiens
  misc_feature: Table A; Target 35253; HLA-B*27:02; KLK4; ENSG00000167749; TAA
LANDLMLIK

SEQ ID NO: 35254 - protein, 9 aa, Homo sapiens
  misc_feature: Table A; Target 35254; HLA-A*02:03; KLK4; ENSG00000167749; TAA
LANGRMPTV

SEQ ID NO: 35255 - protein, 9 aa, Homo sapiens
  misc_feature: Table A; Target 35255; HLA-B*08:01; KLK4; ENSG00000167749; TAA
LANGRMPTV

SEQ ID NO: 35256 - protein, 9 aa, Homo sapiens
  misc_feature: Table A; Target 35256; HLA-B*51:01; KLK4; ENSG00000167749; TAA
LANGRMPTV

SEQ ID NO: 35257 - protein, 9 aa, Homo sapiens
  misc_feature: Table A; Target 35257; HLA-B*54:01; KLK4; ENSG00000167749; TAA
LANGRMPTV

SEQ ID NO: 35258 - protein, 9 aa, Homo sapiens
  misc_feature: Table A; Target 35258; HLA-B*56:01; KLK4; ENSG00000167749; TAA
LANGRMPTV

SEQ ID NO: 35259 - protein, 9 aa, Homo sapiens
  misc_feature: Table A; Target 35259; HLA-C*02:02; KLK4; ENSG00000167749; TAA
LANGRMPTV

SEQ ID NO: 35260 - protein, 9 aa, Homo sapiens
  misc_feature: Table A; Target 35260; HLA-C*03:03; KLK4; ENSG00000167749; TAA
LANGRMPTV

SEQ ID NO: 35261 - protein, 9 aa, Homo sapiens
  misc_feature: Table A; Target 35261; HLA-C*03:04; KLK4; ENSG00000167749; TAA
LANGRMPTV

SEQ ID NO: 35262 - protein, 9 aa, Homo sapiens
  misc_feature: Table A; Target 35262; HLA-C*12:03; KLK4; ENSG00000167749; TAA
LANGRMPTV

SEQ ID NO: 35263 - protein, 9 aa, Homo sapiens
  misc_feature: Table A; Target 35263; HLA-C*16:01; KLK4; ENSG00000167749; TAA
LANGRMPTV

SEQ ID NO: 35264 - protein, 9 aa, Homo sapiens
  misc_feature: Table A; Target 35264; HLA-C*16:02; KLK4; ENSG00000167749; TAA
LANGRMPTV

SEQ ID NO: 35265 - protein, 11 aa, Homo sapiens
  misc_feature: Table A; Target 35265; HLA-B*38:01; KLK4; ENSG00000167749; TAA
LDESVSESDTI

SEQ ID NO: 35266 - protein, 11 aa, Homo sapiens
  misc_feature: Table A; Target 35266; HLA-A*26:01; KLK4; ENSG00000167749; TAA
LEADQEPGSQM

SEQ ID NO: 35267 - protein, 11 aa, Homo sapiens
  misc_feature: Table A; Target 35267; HLA-A*30:01; KLK4; ENSG00000167749; TAA
LEADQEPGSQM

SEQ ID NO: 35268 - protein, 11 aa, Homo sapiens
  misc_feature: Table A; Target 35268; HLA-B*27:05; KLK4; ENSG00000167749; TAA
LEADQEPGSQM

SEQ ID NO: 35269 - protein, 11 aa, Homo sapiens
  misc_feature: Table A; Target 35269; HLA-B*39:01; KLK4; ENSG00000167749; TAA
LEADQEPGSQM

SEQ ID NO: 35270 - protein, 11 aa, Homo sapiens
  misc_feature: Table A; Target 35270; HLA-B*40:01; KLK4; ENSG00000167749; TAA
LEADQEPGSQM

SEQ ID NO: 35271 - protein, 11 aa, Homo sapiens
  misc_feature: Table A; Target 35271; HLA-B*40:02; KLK4; ENSG00000167749; TAA
LEADQEPGSQM

SEQ ID NO: 35272 - protein, 11 aa, Homo sapiens
  misc_feature: Table A; Target 35272; HLA-B*49:01; KLK4; ENSG00000167749; TAA
LEADQEPGSQM

SEQ ID NO: 35273 - protein, 8 aa, Homo sapiens
  misc_feature: Table A; Target 35273; HLA-B*51:01; KLK4; ENSG00000167749; TAA
LGVAGSLV

SEQ ID NO: 35274 - protein, 8 aa, Homo sapiens
  misc_feature: Table A; Target 35274; HLA-B*51:01; KLK4; ENSG00000167749; TAA
LGYLILGV

SEQ ID NO: 35275 - protein, 9 aa, Homo sapiens
  misc_feature: Table A; Target 35275; HLA-B*07:02; KLK4; ENSG00000167749; TAA
LILGVAGSL

SEQ ID NO: 35276 - protein, 9 aa, Homo sapiens
  misc_feature: Table A; Target 35276; HLA-C*01:02; KLK4; ENSG00000167749; TAA
LILGVAGSL

SEQ ID NO: 35277 - protein, 9 aa, Homo sapiens
  misc_feature: Table A; Target 35277; HLA-C*03:03; KLK4; ENSG00000167749; TAA
LILGVAGSL

SEQ ID NO: 35278 - protein, 9 aa, Homo sapiens
  misc_feature: Table A; Target 35278; HLA-C*03:04; KLK4; ENSG00000167749; TAA
LILGVAGSL

SEQ ID NO: 35279 - protein, 9 aa, Homo sapiens
  misc_feature: Table A; Target 35279; HLA-C*14:02; KLK4; ENSG00000167749; TAA
LILGVAGSL

SEQ ID NO: 35280 - protein, 10 aa, Homo sapiens
  misc_feature: Table A; Target 35280; HLA-A*02:01; KLK4; ENSG00000167749; TAA
LILGVAGSLV

SEQ ID NO: 35281 - protein, 10 aa, Homo sapiens
  misc_feature: Table A; Target 35281; HLA-A*02:03; KLK4; ENSG00000167749; TAA
LILGVAGSLV

SEQ ID NO: 35282 - protein, 10 aa, Homo sapiens
  misc_feature: Table A; Target 35282; HLA-A*02:07; KLK4; ENSG00000167749; TAA
LILGVAGSLV

SEQ ID NO: 35283 - protein, 9 aa, Homo sapiens
  misc_feature: Table A; Target 35283; HLA-A*02:01; KLK4; ENSG00000167749; TAA
LLANDLMLI

SEQ ID NO: 35284 - protein, 9 aa, Homo sapiens
  misc_feature: Table A; Target 35284; HLA-A*02:03; KLK4; ENSG00000167749; TAA
LLANDLMLI

SEQ ID NO: 35285 - protein, 9 aa, Homo sapiens
  misc_feature: Table A; Target 35285; HLA-A*02:04; KLK4; ENSG00000167749; TAA
LLANDLMLI

SEQ ID NO: 35286 - protein, 11 aa, Homo sapiens
  misc_feature: Table A; Target 35286; HLA-A*02:04; KLK4; ENSG00000167749; TAA
LLANDLMLIKL

SEQ ID NO: 35287 - protein, 10 aa, Homo sapiens
  misc_feature: Table A; Target 35287; HLA-A*02:03; KLK4; ENSG00000167749; TAA
LLANGRMPTV

SEQ ID NO: 35288 - protein, 8 aa, Homo sapiens
  misc_feature: Table A; Target 35288; HLA-C*07:04; KLK4; ENSG00000167749; TAA
LQGLVSFG

SEQ ID NO: 35289 - protein, 9 aa, Homo sapiens
  misc_feature: Table A; Target 35289; HLA-A*03:02; KLK4; ENSG00000167749; TAA
LQGLVSFGK

SEQ ID NO: 35290 - protein, 8 aa, Homo sapiens
  misc_feature: Table A; Target 35290; HLA-B*46:01; KLK4; ENSG00000167749; TAA
LSVRHPEY

SEQ ID NO: 35291 - protein, 8 aa, Homo sapiens
  misc_feature: Table A; Target 35291; HLA-B*58:01; KLK4; ENSG00000167749; TAA
LSVRHPEY

SEQ ID NO: 35292 - protein, 8 aa, Homo sapiens
  misc_feature: Table A; Target 35292; HLA-C*12:03; KLK4; ENSG00000167749; TAA
LSVRHPEY

SEQ ID NO: 35293 - protein, 8 aa, Homo sapiens
  misc_feature: Table A; Target 35293; HLA-C*16:01; KLK4; ENSG00000167749; TAA
LSVRHPEY

SEQ ID NO: 35294 - protein, 9 aa, Homo sapiens
  misc_feature: Table A; Target 35294; HLA-C*06:02; KLK4; ENSG00000167749; TAA
LVSGSCSQI

SEQ ID NO: 35295 - protein, 10 aa, Homo sapiens
  misc_feature: Table A; Target 35295; HLA-A*24:02; KLK4; ENSG00000167749; TAA
LYDPLYHPSM

SEQ ID NO: 35296 - protein, 11 aa, Homo sapiens
  misc_feature: Table A; Target 35296; HLA-A*24:02; KLK4; ENSG00000167749; TAA
LYDPLYHPSMF

SEQ ID NO: 35297 - protein, 9 aa, Homo sapiens
  misc_feature: Table A; Target 35297; HLA-B*18:01; KLK4; ENSG00000167749; TAA
MENELFCSG

SEQ ID NO: 35298 - protein, 9 aa, Homo sapiens
  misc_feature: Table A; Target 35298; HLA-B*40:02; KLK4; ENSG00000167749; TAA
MENELFCSG

SEQ ID NO: 35299 - protein, 9 aa, Homo sapiens
  misc_feature: Table A; Target 35299; HLA-B*49:01; KLK4; ENSG00000167749; TAA
MENELFCSG

SEQ ID NO: 35300 - protein, 10 aa, Homo sapiens
  misc_feature: Table A; Target 35300; HLA-B*49:01; KLK4; ENSG00000167749; TAA
MENELFCSGV

SEQ ID NO: 35301 - protein, 9 aa, Homo sapiens
  misc_feature: Table A; Target 35301; HLA-A*02:01; KLK4; ENSG00000167749; TAA
MLIKLDESV

SEQ ID NO: 35302 - protein, 9 aa, Homo sapiens
  misc_feature: Table A; Target 35302; HLA-A*02:03; KLK4; ENSG00000167749; TAA
MLIKLDESV

SEQ ID NO: 35303 - protein, 9 aa, Homo sapiens
  misc_feature: Table A; Target 35303; HLA-A*02:04; KLK4; ENSG00000167749; TAA
MLIKLDESV

SEQ ID NO: 35304 - protein, 9 aa, Homo sapiens
  misc_feature: Table A; Target 35304; HLA-A*02:07; KLK4; ENSG00000167749; TAA
MLIKLDESV

SEQ ID NO: 35305 - protein, 9 aa, Homo sapiens
  misc_feature: Table A; Target 35305; HLA-A*68:02; KLK4; ENSG00000167749; TAA
MLIKLDESV

SEQ ID NO: 35306 - protein, 9 aa, Homo sapiens
  misc_feature: Table A; Target 35306; HLA-B*13:02; KLK4; ENSG00000167749; TAA
MLIKLDESV

SEQ ID NO: 35307 - protein, 9 aa, Homo sapiens
  misc_feature: Table A; Target 35307; HLA-B*35:03; KLK4; ENSG00000167749; TAA
MLIKLDESV

SEQ ID NO: 35308 - protein, 9 aa, Homo sapiens
  misc_feature: Table A; Target 35308; HLA-B*55:01; KLK4; ENSG00000167749; TAA
MLIKLDESV

SEQ ID NO: 35309 - protein, 8 aa, Homo sapiens
  misc_feature: Table A; Target 35309; HLA-B*07:02; KLK4; ENSG00000167749; TAA
MPTVLQCV

SEQ ID NO: 35310 - protein, 8 aa, Homo sapiens
  misc_feature: Table A; Target 35310; HLA-B*08:01; KLK4; ENSG00000167749; TAA
MPTVLQCV

SEQ ID NO: 35311 - protein, 8 aa, Homo sapiens
  misc_feature: Table A; Target 35311; HLA-B*35:01; KLK4; ENSG00000167749; TAA
MPTVLQCV

SEQ ID NO: 35312 - protein, 8 aa, Homo sapiens
  misc_feature: Table A; Target 35312; HLA-B*35:03; KLK4; ENSG00000167749; TAA
MPTVLQCV

SEQ ID NO: 35313 - protein, 8 aa, Homo sapiens
  misc_feature: Table A; Target 35313; HLA-B*51:01; KLK4; ENSG00000167749; TAA
MPTVLQCV

SEQ ID NO: 35314 - protein, 8 aa, Homo sapiens
  misc_feature: Table A; Target 35314; HLA-B*54:01; KLK4; ENSG00000167749; TAA
MPTVLQCV

SEQ ID NO: 35315 - protein, 8 aa, Homo sapiens
  misc_feature: Table A; Target 35315; HLA-B*55:01; KLK4; ENSG00000167749; TAA
MPTVLQCV

SEQ ID NO: 35316 - protein, 8 aa, Homo sapiens
  misc_feature: Table A; Target 35316; HLA-B*56:01; KLK4; ENSG00000167749; TAA
MPTVLQCV

SEQ ID NO: 35317 - protein, 8 aa, Homo sapiens
  misc_feature: Table A; Target 35317; HLA-C*04:01; KLK4; ENSG00000167749; TAA
MPTVLQCV

SEQ ID NO: 35318 - protein, 10 aa, Homo sapiens
  misc_feature: Table A; Target 35318; HLA-B*54:01; KLK4; ENSG00000167749; TAA
MPTVLQCVNV

SEQ ID NO: 35319 - protein, 10 aa, Homo sapiens
  misc_feature: Table A; Target 35319; HLA-C*04:01; KLK4; ENSG00000167749; TAA
MPTVLQCVNV

SEQ ID NO: 35320 - protein, 9 aa, Homo sapiens
  misc_feature: Table A; Target 35320; HLA-A*33:01; KLK4; ENSG00000167749; TAA
MVEASLSVR

SEQ ID NO: 35321 - protein, 9 aa, Homo sapiens
  misc_feature: Table A; Target 35321; HLA-A*33:03; KLK4; ENSG00000167749; TAA
MVEASLSVR

SEQ ID NO: 35322 - protein, 9 aa, Homo sapiens
  misc_feature: Table A; Target 35322; HLA-A*68:01; KLK4; ENSG00000167749; TAA
MVEASLSVR

SEQ ID NO: 35323 - protein, 9 aa, Homo sapiens
  misc_feature: Table A; Target 35323; HLA-C*07:06; KLK4; ENSG00000167749; TAA
MVEASLSVR

SEQ ID NO: 35324 - protein, 8 aa, Homo sapiens
  misc_feature: Table A; Target 35324; HLA-C*05:01; KLK4; ENSG00000167749; TAA
NGDSGGPL

SEQ ID NO: 35325 - protein, 9 aa, Homo sapiens
  misc_feature: Table A; Target 35325; HLA-B*35:03; KLK4; ENSG00000167749; TAA
NGDSGGPLI

SEQ ID NO: 35326 - protein, 9 aa, Homo sapiens
  misc_feature: Table A; Target 35326; HLA-B*38:01; KLK4; ENSG00000167749; TAA
NGDSGGPLI

SEQ ID NO: 35327 - protein, 9 aa, Homo sapiens
  misc_feature: Table A; Target 35327; HLA-B*39:01; KLK4; ENSG00000167749; TAA
NGDSGGPLI

SEQ ID NO: 35328 - protein, 9 aa, Homo sapiens
  misc_feature: Table A; Target 35328; HLA-B*51:01; KLK4; ENSG00000167749; TAA
NGDSGGPLI

SEQ ID NO: 35329 - protein, 9 aa, Homo sapiens
  misc_feature: Table A; Target 35329; HLA-C*05:01; KLK4; ENSG00000167749; TAA
NGDSGGPLI

SEQ ID NO: 35330 - protein, 8 aa, Homo sapiens
  misc_feature: Table A; Target 35330; HLA-B*51:01; KLK4; ENSG00000167749; TAA
NGYLQGLV

SEQ ID NO: 35331 - protein, 10 aa, Homo sapiens
  misc_feature: Table A; Target 35331; HLA-B*15:03; KLK4; ENSG00000167749; TAA
NGYLQGLVSF

SEQ ID NO: 35332 - protein, 10 aa, Homo sapiens
  misc_feature: Table A; Target 35332; HLA-B*18:01; KLK4; ENSG00000167749; TAA
NGYLQGLVSF

SEQ ID NO: 35333 - protein, 10 aa, Homo sapiens
  misc_feature: Table A; Target 35333; HLA-B*35:01; KLK4; ENSG00000167749; TAA
NGYLQGLVSF

SEQ ID NO: 35334 - protein, 10 aa, Homo sapiens
  misc_feature: Table A; Target 35334; HLA-B*39:01; KLK4; ENSG00000167749; TAA
NGYLQGLVSF

SEQ ID NO: 35335 - protein, 10 aa, Homo sapiens
  misc_feature: Table A; Target 35335; HLA-B*46:01; KLK4; ENSG00000167749; TAA
NGYLQGLVSF

SEQ ID NO: 35336 - protein, 10 aa, Homo sapiens
  misc_feature: Table A; Target 35336; HLA-C*04:01; KLK4; ENSG00000167749; TAA
NGYLQGLVSF

SEQ ID NO: 35337 - protein, 10 aa, Homo sapiens
  misc_feature: Table A; Target 35337; HLA-C*12:03; KLK4; ENSG00000167749; TAA
NGYLQGLVSF

SEQ ID NO: 35338 - protein, 9 aa, Homo sapiens
  misc_feature: Table A; Target 35338; HLA-A*29:02; KLK4; ENSG00000167749; TAA
NPWGWFLGY

SEQ ID NO: 35339 - protein, 9 aa, Homo sapiens
  misc_feature: Table A; Target 35339; HLA-C*01:02; KLK4; ENSG00000167749; TAA
NRPLLANDL

SEQ ID NO: 35340 - protein, 9 aa, Homo sapiens
  misc_feature: Table A; Target 35340; HLA-C*06:02; KLK4; ENSG00000167749; TAA
NRPLLANDL

SEQ ID NO: 35341 - protein, 9 aa, Homo sapiens
  misc_feature: Table A; Target 35341; HLA-C*07:02; KLK4; ENSG00000167749; TAA
NRPLLANDL

SEQ ID NO: 35342 - protein, 9 aa, Homo sapiens
  misc_feature: Table A; Target 35342; HLA-A*01:01; KLK4; ENSG00000167749; TAA
NSYTIGLGL

SEQ ID NO: 35343 - protein, 9 aa, Homo sapiens
  misc_feature: Table A; Target 35343; HLA-A*68:02; KLK4; ENSG00000167749; TAA
NSYTIGLGL

SEQ ID NO: 35344 - protein, 9 aa, Homo sapiens
  misc_feature: Table A; Target 35344; HLA-B*13:02; KLK4; ENSG00000167749; TAA
NSYTIGLGL

SEQ ID NO: 35345 - protein, 9 aa, Homo sapiens
  misc_feature: Table A; Target 35345; HLA-B*27:05; KLK4; ENSG00000167749; TAA
NSYTIGLGL

SEQ ID NO: 35346 - protein, 9 aa, Homo sapiens
  misc_feature: Table A; Target 35346; HLA-B*39:01; KLK4; ENSG00000167749; TAA
NSYTIGLGL

SEQ ID NO: 35347 - protein, 9 aa, Homo sapiens
  misc_feature: Table A; Target 35347; HLA-B*51:01; KLK4; ENSG00000167749; TAA
NSYTIGLGL

SEQ ID NO: 35348 - protein, 9 aa, Homo sapiens
  misc_feature: Table A; Target 35348; HLA-B*58:01; KLK4; ENSG00000167749; TAA
NSYTIGLGL

SEQ ID NO: 35349 - protein, 9 aa, Homo sapiens
  misc_feature: Table A; Target 35349; HLA-C*01:02; KLK4; ENSG00000167749; TAA
NSYTIGLGL

SEQ ID NO: 35350 - protein, 9 aa, Homo sapiens
  misc_feature: Table A; Target 35350; HLA-C*02:02; KLK4; ENSG00000167749; TAA
NSYTIGLGL

SEQ ID NO: 35351 - protein, 9 aa, Homo sapiens
  misc_feature: Table A; Target 35351; HLA-C*03:03; KLK4; ENSG00000167749; TAA
NSYTIGLGL

SEQ ID NO: 35352 - protein, 9 aa, Homo sapiens
  misc_feature: Table A; Target 35352; HLA-C*03:04; KLK4; ENSG00000167749; TAA
NSYTIGLGL

SEQ ID NO: 35353 - protein, 9 aa, Homo sapiens
  misc_feature: Table A; Target 35353; HLA-C*05:01; KLK4; ENSG00000167749; TAA
NSYTIGLGL

SEQ ID NO: 35354 - protein, 9 aa, Homo sapiens
  misc_feature: Table A; Target 35354; HLA-C*06:02; KLK4; ENSG00000167749; TAA
NSYTIGLGL

SEQ ID NO: 35355 - protein, 9 aa, Homo sapiens
  misc_feature: Table A; Target 35355; HLA-C*07:06; KLK4; ENSG00000167749; TAA
NSYTIGLGL

SEQ ID NO: 35356 - protein, 9 aa, Homo sapiens
  misc_feature: Table A; Target 35356; HLA-C*12:03; KLK4; ENSG00000167749; TAA
NSYTIGLGL

SEQ ID NO: 35357 - protein, 9 aa, Homo sapiens
  misc_feature: Table A; Target 35357; HLA-C*14:02; KLK4; ENSG00000167749; TAA
NSYTIGLGL

SEQ ID NO: 35358 - protein, 9 aa, Homo sapiens
  misc_feature: Table A; Target 35358; HLA-C*16:02; KLK4; ENSG00000167749; TAA
NSYTIGLGL

SEQ ID NO: 35359 - protein, 9 aa, Homo sapiens
  misc_feature: Table A; Target 35359; HLA-C*16:04; KLK4; ENSG00000167749; TAA
NSYTIGLGL

SEQ ID NO: 35360 - protein, 9 aa, Homo sapiens
  misc_feature: Table A; Target 35360; HLA-A*68:02; KLK4; ENSG00000167749; TAA
NVSVVSEEV

SEQ ID NO: 35361 - protein, 9 aa, Homo sapiens
  misc_feature: Table A; Target 35361; HLA-B*13:02; KLK4; ENSG00000167749; TAA
NVSVVSEEV

SEQ ID NO: 35362 - protein, 9 aa, Homo sapiens
  misc_feature: Table A; Target 35362; HLA-B*35:03; KLK4; ENSG00000167749; TAA
NVSVVSEEV

SEQ ID NO: 35363 - protein, 9 aa, Homo sapiens
  misc_feature: Table A; Target 35363; HLA-B*55:01; KLK4; ENSG00000167749; TAA
NVSVVSEEV

SEQ ID NO: 35364 - protein, 9 aa, Homo sapiens
  misc_feature: Table A; Target 35364; HLA-C*04:01; KLK4; ENSG00000167749; TAA
NVSVVSEEV

SEQ ID NO: 35365 - protein, 9 aa, Homo sapiens
  misc_feature: Table A; Target 35365; HLA-C*07:06; KLK4; ENSG00000167749; TAA
NVSVVSEEV

SEQ ID NO: 35366 - protein, 8 aa, Homo sapiens
  misc_feature: Table A; Target 35366; HLA-B*40:02; KLK4; ENSG00000167749; TAA
PEYNRPLL

SEQ ID NO: 35367 - protein, 10 aa, Homo sapiens
  misc_feature: Table A; Target 35367; HLA-B*07:02; KLK4; ENSG00000167749; TAA
PGSQMVEASL

SEQ ID NO: 35368 - protein, 9 aa, Homo sapiens
  misc_feature: Table A; Target 35368; HLA-C*06:02; KLK4; ENSG00000167749; TAA
PTAGNSCLV

SEQ ID NO: 35369 - protein, 10 aa, Homo sapiens
  misc_feature: Table A; Target 35369; HLA-B*35:03; KLK4; ENSG00000167749; TAA
QAALVMENEL

SEQ ID NO: 35370 - protein, 10 aa, Homo sapiens
  misc_feature: Table A; Target 35370; HLA-B*38:01; KLK4; ENSG00000167749; TAA
QAALVMENEL

SEQ ID NO: 35371 - protein, 10 aa, Homo sapiens
  misc_feature: Table A; Target 35371; HLA-B*39:01; KLK4; ENSG00000167749; TAA
QAALVMENEL

SEQ ID NO: 35372 - protein, 9 aa, Homo sapiens
  misc_feature: Table A; Target 35372; HLA-C*01:02; KLK4; ENSG00000167749; TAA
QCPTAGNSC

SEQ ID NO: 35373 - protein, 10 aa, Homo sapiens
  misc_feature: Table A; Target 35373; HLA-C*01:02; KLK4; ENSG00000167749; TAA
QCPTAGNSCL

SEQ ID NO: 35374 - protein, 10 aa, Homo sapiens
  misc_feature: Table A; Target 35374; HLA-A*30:01; KLK4; ENSG00000167749; TAA
QEPGSQMVEA

SEQ ID NO: 35375 - protein, 10 aa, Homo sapiens
  misc_feature: Table A; Target 35375; HLA-B*40:02; KLK4; ENSG00000167749; TAA
QEPGSQMVEA

SEQ ID NO: 35376 - protein, 8 aa, Homo sapiens
  misc_feature: Table A; Target 35376; HLA-B*27:02; KLK4; ENSG00000167749; TAA
QGLVSFGK

SEQ ID NO: 35377 - protein, 9 aa, Homo sapiens
  misc_feature: Table A; Target 35377; HLA-A*02:01; KLK4; ENSG00000167749; TAA
QMVEASLSV

SEQ ID NO: 35378 - protein, 9 aa, Homo sapiens
  misc_feature: Table A; Target 35378; HLA-A*02:03; KLK4; ENSG00000167749; TAA
QMVEASLSV

SEQ ID NO: 35379 - protein, 9 aa, Homo sapiens
  misc_feature: Table A; Target 35379; HLA-A*30:01; KLK4; ENSG00000167749; TAA
QMVEASLSV

SEQ ID NO: 35380 - protein, 9 aa, Homo sapiens
  misc_feature: Table A; Target 35380; HLA-B*13:02; KLK4; ENSG00000167749; TAA
QMVEASLSV

SEQ ID NO: 35381 - protein, 9 aa, Homo sapiens
  misc_feature: Table A; Target 35381; HLA-B*46:01; KLK4; ENSG00000167749; TAA
QMVEASLSV

SEQ ID NO: 35382 - protein, 9 aa, Homo sapiens
  misc_feature: Table A; Target 35382; HLA-B*55:01; KLK4; ENSG00000167749; TAA
QMVEASLSV

SEQ ID NO: 35383 - protein, 9 aa, Homo sapiens
  misc_feature: Table A; Target 35383; HLA-B*56:01; KLK4; ENSG00000167749; TAA
QMVEASLSV

SEQ ID NO: 35384 - protein, 10 aa, Homo sapiens
  misc_feature: Table A; Target 35384; HLA-A*31:01; KLK4; ENSG00000167749; TAA
QMVEASLSVR

SEQ ID NO: 35385 - protein, 10 aa, Homo sapiens
  misc_feature: Table A; Target 35385; HLA-A*33:03; KLK4; ENSG00000167749; TAA
QMVEASLSVR

SEQ ID NO: 35386 - protein, 10 aa, Homo sapiens
  misc_feature: Table A; Target 35386; HLA-A*68:01; KLK4; ENSG00000167749; TAA
QMVEASLSVR

SEQ ID NO: 35387 - protein, 10 aa, Homo sapiens
  misc_feature: Table A; Target 35387; HLA-C*07:06; KLK4; ENSG00000167749; TAA
QMVEASLSVR

SEQ ID NO: 35388 - protein, 8 aa, Homo sapiens
  misc_feature: Table A; Target 35388; HLA-B*51:01; KLK4; ENSG00000167749; TAA
QPWQAALV

SEQ ID NO: 35389 - protein, 8 aa, Homo sapiens
  misc_feature: Table A; Target 35389; HLA-B*56:01; KLK4; ENSG00000167749; TAA
QPWQAALV

SEQ ID NO: 35390 - protein, 9 aa, Homo sapiens
  misc_feature: Table A; Target 35390; HLA-B*07:02; KLK4; ENSG00000167749; TAA
QPWQAALVM

SEQ ID NO: 35391 - protein, 9 aa, Homo sapiens
  misc_feature: Table A; Target 35391; HLA-B*35:01; KLK4; ENSG00000167749; TAA
QPWQAALVM

SEQ ID NO: 35392 - protein, 9 aa, Homo sapiens
  misc_feature: Table A; Target 35392; HLA-B*35:03; KLK4; ENSG00000167749; TAA
QPWQAALVM

SEQ ID NO: 35393 - protein, 8 aa, Homo sapiens
  misc_feature: Table A; Target 35393; HLA-A*01:01; KLK4; ENSG00000167749; TAA
QVGVPGVY

SEQ ID NO: 35394 - protein, 8 aa, Homo sapiens
  misc_feature: Table A; Target 35394; HLA-A*30:02; KLK4; ENSG00000167749; TAA
QVGVPGVY

SEQ ID NO: 35395 - protein, 8 aa, Homo sapiens
  misc_feature: Table A; Target 35395; HLA-A*32:01; KLK4; ENSG00000167749; TAA
QVGVPGVY

SEQ ID NO: 35396 - protein, 8 aa, Homo sapiens
  misc_feature: Table A; Target 35396; HLA-B*15:01; KLK4; ENSG00000167749; TAA
QVGVPGVY

SEQ ID NO: 35397 - protein, 8 aa, Homo sapiens
  misc_feature: Table A; Target 35397; HLA-B*15:03; KLK4; ENSG00000167749; TAA
QVGVPGVY

SEQ ID NO: 35398 - protein, 8 aa, Homo sapiens
  misc_feature: Table A; Target 35398; HLA-B*39:01; KLK4; ENSG00000167749; TAA
QVGVPGVY

SEQ ID NO: 35399 - protein, 8 aa, Homo sapiens
  misc_feature: Table A; Target 35399; HLA-C*05:01; KLK4; ENSG00000167749; TAA
QVGVPGVY

SEQ ID NO: 35400 - protein, 8 aa, Homo sapiens
  misc_feature: Table A; Target 35400; HLA-C*07:01; KLK4; ENSG00000167749; TAA
QVGVPGVY

SEQ ID NO: 35401 - protein, 8 aa, Homo sapiens
  misc_feature: Table A; Target 35401; HLA-C*07:04; KLK4; ENSG00000167749; TAA
QVGVPGVY

SEQ ID NO: 35402 - protein, 8 aa, Homo sapiens
  misc_feature: Table A; Target 35402; HLA-C*12:03; KLK4; ENSG00000167749; TAA
QVGVPGVY

SEQ ID NO: 35403 - protein, 11 aa, Homo sapiens
  misc_feature: Table A; Target 35403; HLA-C*01:02; KLK4; ENSG00000167749; TAA
QVGVPGVYTNL

SEQ ID NO: 35404 - protein, 10 aa, Homo sapiens
  misc_feature: Table A; Target 35404; HLA-A*24:02; KLK4; ENSG00000167749; TAA
RHPEYNRPLL

SEQ ID NO: 35405 - protein, 9 aa, Homo sapiens
  misc_feature: Table A; Target 35405; HLA-A*02:01; KLK4; ENSG00000167749; TAA
RMPTVLQCV

SEQ ID NO: 35406 - protein, 9 aa, Homo sapiens
  misc_feature: Table A; Target 35406; HLA-A*02:03; KLK4; ENSG00000167749; TAA
RMPTVLQCV

SEQ ID NO: 35407 - protein, 9 aa, Homo sapiens
  misc_feature: Table A; Target 35407; HLA-A*02:07; KLK4; ENSG00000167749; TAA
RMPTVLQCV

SEQ ID NO: 35408 - protein, 9 aa, Homo sapiens
  misc_feature: Table A; Target 35408; HLA-A*24:02; KLK4; ENSG00000167749; TAA
RMPTVLQCV

SEQ ID NO: 35409 - protein, 9 aa, Homo sapiens
  misc_feature: Table A; Target 35409; HLA-B*13:02; KLK4; ENSG00000167749; TAA
RMPTVLQCV

SEQ ID NO: 35410 - protein, 9 aa, Homo sapiens
  misc_feature: Table A; Target 35410; HLA-B*55:01; KLK4; ENSG00000167749; TAA
RMPTVLQCV

SEQ ID NO: 35411 - protein, 8 aa, Homo sapiens
  misc_feature: Table A; Target 35411; HLA-B*07:02; KLK4; ENSG00000167749; TAA
RPLLANDL

SEQ ID NO: 35412 - protein, 8 aa, Homo sapiens
  misc_feature: Table A; Target 35412; HLA-B*08:01; KLK4; ENSG00000167749; TAA
RPLLANDL

SEQ ID NO: 35413 - protein, 8 aa, Homo sapiens
  misc_feature: Table A; Target 35413; HLA-C*07:02; KLK4; ENSG00000167749; TAA
RPLLANDL

SEQ ID NO: 35414 - protein, 9 aa, Homo sapiens
  misc_feature: Table A; Target 35414; HLA-B*58:01; KLK4; ENSG00000167749; TAA
RSISIASQC

SEQ ID NO: 35415 - protein, 9 aa, Homo sapiens
  misc_feature: Table A; Target 35415; HLA-A*30:01; KLK4; ENSG00000167749; TAA
SDTIRSISI

SEQ ID NO: 35416 - protein, 9 aa, Homo sapiens
  misc_feature: Table A; Target 35416; HLA-B*08:01; KLK4; ENSG00000167749; TAA
SDTIRSISI

SEQ ID NO: 35417 - protein, 9 aa, Homo sapiens
  misc_feature: Table A; Target 35417; HLA-B*37:01; KLK4; ENSG00000167749; TAA
SDTIRSISI

SEQ ID NO: 35418 - protein, 9 aa, Homo sapiens
  misc_feature: Table A; Target 35418; HLA-B*40:02; KLK4; ENSG00000167749; TAA
SDTIRSISI

SEQ ID NO: 35419 - protein, 9 aa, Homo sapiens
  misc_feature: Table A; Target 35419; HLA-B*44:02; KLK4; ENSG00000167749; TAA
SDTIRSISI

SEQ ID NO: 35420 - protein, 9 aa, Homo sapiens
  misc_feature: Table A; Target 35420; HLA-B*49:01; KLK4; ENSG00000167749; TAA
SDTIRSISI

SEQ ID NO: 35421 - protein, 9 aa, Homo sapiens
  misc_feature: Table A; Target 35421; HLA-C*06:02; KLK4; ENSG00000167749; TAA
SDTIRSISI

SEQ ID NO: 35422 - protein, 9 aa, Homo sapiens
  misc_feature: Table A; Target 35422; HLA-C*16:01; KLK4; ENSG00000167749; TAA
SDTIRSISI

SEQ ID NO: 35423 - protein, 9 aa, Homo sapiens
  misc_feature: Table A; Target 35423; HLA-C*16:02; KLK4; ENSG00000167749; TAA
SDTIRSISI

SEQ ID NO: 35424 - protein, 9 aa, Homo sapiens
  misc_feature: Table A; Target 35424; HLA-B*44:02; KLK4; ENSG00000167749; TAA
SEEVCSKLY

SEQ ID NO: 35425 - protein, 9 aa, Homo sapiens
  misc_feature: Table A; Target 35425; HLA-B*44:03; KLK4; ENSG00000167749; TAA
SEEVCSKLY

SEQ ID NO: 35426 - protein, 9 aa, Homo sapiens
  misc_feature: Table A; Target 35426; HLA-C*16:04; KLK4; ENSG00000167749; TAA
SEEVCSKLY

SEQ ID NO: 35427 - protein, 9 aa, Homo sapiens
  misc_feature: Table A; Target 35427; HLA-A*30:01; KLK4; ENSG00000167749; TAA
SESDTIRSI

SEQ ID NO: 35428 - protein, 9 aa, Homo sapiens
  misc_feature: Table A; Target 35428; HLA-B*13:02; KLK4; ENSG00000167749; TAA
SESDTIRSI

SEQ ID NO: 35429 - protein, 9 aa, Homo sapiens
  misc_feature: Table A; Target 35429; HLA-B*18:01; KLK4; ENSG00000167749; TAA
SESDTIRSI

SEQ ID NO: 35430 - protein, 9 aa, Homo sapiens
  misc_feature: Table A; Target 35430; HLA-B*27:02; KLK4; ENSG00000167749; TAA
SESDTIRSI

SEQ ID NO: 35431 - protein, 9 aa, Homo sapiens
  misc_feature: Table A; Target 35431; HLA-B*27:05; KLK4; ENSG00000167749; TAA
SESDTIRSI

SEQ ID NO: 35432 - protein, 9 aa, Homo sapiens
  misc_feature: Table A; Target 35432; HLA-B*37:01; KLK4; ENSG00000167749; TAA
SESDTIRSI

SEQ ID NO: 35433 - protein, 9 aa, Homo sapiens
  misc_feature: Table A; Target 35433; HLA-B*38:01; KLK4; ENSG00000167749; TAA
SESDTIRSI

SEQ ID NO: 35434 - protein, 9 aa, Homo sapiens
  misc_feature: Table A; Target 35434; HLA-B*40:01; KLK4; ENSG00000167749; TAA
SESDTIRSI

SEQ ID NO: 35435 - protein, 9 aa, Homo sapiens
  misc_feature: Table A; Target 35435; HLA-B*40:02; KLK4; ENSG00000167749; TAA
SESDTIRSI

SEQ ID NO: 35436 - protein, 9 aa, Homo sapiens
  misc_feature: Table A; Target 35436; HLA-B*44:02; KLK4; ENSG00000167749; TAA
SESDTIRSI

SEQ ID NO: 35437 - protein, 9 aa, Homo sapiens
  misc_feature: Table A; Target 35437; HLA-B*44:03; KLK4; ENSG00000167749; TAA
SESDTIRSI

SEQ ID NO: 35438 - protein, 9 aa, Homo sapiens
  misc_feature: Table A; Target 35438; HLA-B*49:01; KLK4; ENSG00000167749; TAA
SESDTIRSI

SEQ ID NO: 35439 - protein, 9 aa, Homo sapiens
  misc_feature: Table A; Target 35439; HLA-C*02:02; KLK4; ENSG00000167749; TAA
SESDTIRSI

SEQ ID NO: 35440 - protein, 9 aa, Homo sapiens
  misc_feature: Table A; Target 35440; HLA-C*06:02; KLK4; ENSG00000167749; TAA
SESDTIRSI

SEQ ID NO: 35441 - protein, 9 aa, Homo sapiens
  misc_feature: Table A; Target 35441; HLA-C*12:03; KLK4; ENSG00000167749; TAA
SESDTIRSI

SEQ ID NO: 35442 - protein, 9 aa, Homo sapiens
  misc_feature: Table A; Target 35442; HLA-C*16:01; KLK4; ENSG00000167749; TAA
SESDTIRSI

SEQ ID NO: 35443 - protein, 9 aa, Homo sapiens
  misc_feature: Table A; Target 35443; HLA-C*16:02; KLK4; ENSG00000167749; TAA
SESDTIRSI

SEQ ID NO: 35444 - protein, 9 aa, Homo sapiens
  misc_feature: Table A; Target 35444; HLA-C*16:04; KLK4; ENSG00000167749; TAA
SESDTIRSI

SEQ ID NO: 35445 - protein, 11 aa, Homo sapiens
  misc_feature: Table A; Target 35445; HLA-A*30:01; KLK4; ENSG00000167749; TAA
SESDTIRSISI

SEQ ID NO: 35446 - protein, 11 aa, Homo sapiens
  misc_feature: Table A; Target 35446; HLA-B*37:01; KLK4; ENSG00000167749; TAA
SESDTIRSISI

SEQ ID NO: 35447 - protein, 11 aa, Homo sapiens
  misc_feature: Table A; Target 35447; HLA-B*40:01; KLK4; ENSG00000167749; TAA
SESDTIRSISI

SEQ ID NO: 35448 - protein, 11 aa, Homo sapiens
  misc_feature: Table A; Target 35448; HLA-B*44:02; KLK4; ENSG00000167749; TAA
SESDTIRSISI

SEQ ID NO: 35449 - protein, 11 aa, Homo sapiens
  misc_feature: Table A; Target 35449; HLA-B*44:03; KLK4; ENSG00000167749; TAA
SESDTIRSISI

SEQ ID NO: 35450 - protein, 11 aa, Homo sapiens
  misc_feature: Table A; Target 35450; HLA-B*49:01; KLK4; ENSG00000167749; TAA
SESDTIRSISI

SEQ ID NO: 35451 - protein, 10 aa, Homo sapiens
  misc_feature: Table A; Target 35451; HLA-A*30:02; KLK4; ENSG00000167749; TAA
SGGPLICNGY

SEQ ID NO: 35452 - protein, 10 aa, Homo sapiens
  misc_feature: Table A; Target 35452; HLA-C*07:01; KLK4; ENSG00000167749; TAA
SGGPLICNGY

SEQ ID NO: 35453 - protein, 9 aa, Homo sapiens
  misc_feature: Table A; Target 35453; HLA-B*44:02; KLK4; ENSG00000167749; TAA
SGVLVHPQW

SEQ ID NO: 35454 - protein, 9 aa, Homo sapiens
  misc_feature: Table A; Target 35454; HLA-B*44:03; KLK4; ENSG00000167749; TAA
SGVLVHPQW

SEQ ID NO: 35455 - protein, 9 aa, Homo sapiens
  misc_feature: Table A; Target 35455; HLA-B*57:01; KLK4; ENSG00000167749; TAA
SGVLVHPQW

SEQ ID NO: 35456 - protein, 9 aa, Homo sapiens
  misc_feature: Table A; Target 35456; HLA-B*58:01; KLK4; ENSG00000167749; TAA
SGVLVHPQW

SEQ ID NO: 35457 - protein, 9 aa, Homo sapiens
  misc_feature: Table A; Target 35457; HLA-C*12:03; KLK4; ENSG00000167749; TAA
SGVLVHPQW

SEQ ID NO: 35458 - protein, 9 aa, Homo sapiens
  misc_feature: Table A; Target 35458; HLA-C*16:04; KLK4; ENSG00000167749; TAA
SGVLVHPQW

SEQ ID NO: 35459 - protein, 9 aa, Homo sapiens
  misc_feature: Table A; Target 35459; HLA-A*02:01; KLK4; ENSG00000167749; TAA
SIASQCPTA

SEQ ID NO: 35460 - protein, 9 aa, Homo sapiens
  misc_feature: Table A; Target 35460; HLA-B*55:01; KLK4; ENSG00000167749; TAA
SIASQCPTA

SEQ ID NO: 35461 - protein, 10 aa, Homo sapiens
  misc_feature: Table A; Target 35461; HLA-C*06:02; KLK4; ENSG00000167749; TAA
SISIASQCPT

SEQ ID NO: 35462 - protein, 9 aa, Homo sapiens
  misc_feature: Table A; Target 35462; HLA-A*01:01; KLK4; ENSG00000167749; TAA
SLSVRHPEY

SEQ ID NO: 35463 - protein, 9 aa, Homo sapiens
  misc_feature: Table A; Target 35463; HLA-A*29:02; KLK4; ENSG00000167749; TAA
SLSVRHPEY

SEQ ID NO: 35464 - protein, 9 aa, Homo sapiens
  misc_feature: Table A; Target 35464; HLA-A*30:02; KLK4; ENSG00000167749; TAA
SLSVRHPEY

SEQ ID NO: 35465 - protein, 9 aa, Homo sapiens
  misc_feature: Table A; Target 35465; HLA-A*32:01; KLK4; ENSG00000167749; TAA
SLSVRHPEY

SEQ ID NO: 35466 - protein, 9 aa, Homo sapiens
  misc_feature: Table A; Target 35466; HLA-B*15:01; KLK4; ENSG00000167749; TAA
SLSVRHPEY

SEQ ID NO: 35467 - protein, 9 aa, Homo sapiens
  misc_feature: Table A; Target 35467; HLA-C*16:01; KLK4; ENSG00000167749; TAA
SLSVRHPEY

SEQ ID NO: 35468 - protein, 9 aa, Homo sapiens
  misc_feature: Table A; Target 35468; HLA-B*54:01; KLK4; ENSG00000167749; TAA
SPHSQPWQA

SEQ ID NO: 35469 - protein, 9 aa, Homo sapiens
  misc_feature: Table A; Target 35469; HLA-B*55:01; KLK4; ENSG00000167749; TAA
SPHSQPWQA

SEQ ID NO: 35470 - protein, 9 aa, Homo sapiens
  misc_feature: Table A; Target 35470; HLA-B*56:01; KLK4; ENSG00000167749; TAA
SPHSQPWQA

SEQ ID NO: 35471 - protein, 10 aa, Homo sapiens
  misc_feature: Table A; Target 35471; HLA-B*56:01; KLK4; ENSG00000167749; TAA
SPHSQPWQAA

SEQ ID NO: 35472 - protein, 11 aa, Homo sapiens
  misc_feature: Table A; Target 35472; HLA-B*07:02; KLK4; ENSG00000167749; TAA
SPHSQPWQAAL

SEQ ID NO: 35473 - protein, 8 aa, Homo sapiens
  misc_feature: Table A; Target 35473; HLA-B*13:02; KLK4; ENSG00000167749; TAA
SQMVEASL

SEQ ID NO: 35474 - protein, 8 aa, Homo sapiens
  misc_feature: Table A; Target 35474; HLA-B*15:01; KLK4; ENSG00000167749; TAA
SQMVEASL

SEQ ID NO: 35475 - protein, 8 aa, Homo sapiens
  misc_feature: Table A; Target 35475; HLA-B*39:01; KLK4; ENSG00000167749; TAA
SQMVEASL

SEQ ID NO: 35476 - protein, 10 aa, Homo sapiens
  misc_feature: Table A; Target 35476; HLA-B*13:02; KLK4; ENSG00000167749; TAA
SQMVEASLSV

SEQ ID NO: 35477 - protein, 9 aa, Homo sapiens
  misc_feature: Table A; Target 35477; HLA-B*13:02; KLK4; ENSG00000167749; TAA
SQPWQAALV

SEQ ID NO: 35478 - protein, 9 aa, Homo sapiens
  misc_feature: Table A; Target 35478; HLA-A*31:01; KLK4; ENSG00000167749; TAA
SVRHPEYNR

SEQ ID NO: 35479 - protein, 9 aa, Homo sapiens
  misc_feature: Table A; Target 35479; HLA-A*33:01; KLK4; ENSG00000167749; TAA
SVRHPEYNR

SEQ ID NO: 35480 - protein, 9 aa, Homo sapiens
  misc_feature: Table A; Target 35480; HLA-A*33:03; KLK4; ENSG00000167749; TAA
SVRHPEYNR

SEQ ID NO: 35481 - protein, 9 aa, Homo sapiens
  misc_feature: Table A; Target 35481; HLA-B*57:01; KLK4; ENSG00000167749; TAA
SVRHPEYNR

SEQ ID NO: 35482 - protein, 8 aa, Homo sapiens
  misc_feature: Table A; Target 35482; HLA-C*05:01; KLK4; ENSG00000167749; TAA
SVSESDTI

SEQ ID NO: 35483 - protein, 9 aa, Homo sapiens
  misc_feature: Table A; Target 35483; HLA-A*68:01; KLK4; ENSG00000167749; TAA
SVSESDTIR

SEQ ID NO: 35484 - protein, 9 aa, Homo sapiens
  misc_feature: Table A; Target 35484; HLA-C*07:06; KLK4; ENSG00000167749; TAA
SVSESDTIR

SEQ ID NO: 35485 - protein, 11 aa, Homo sapiens
  misc_feature: Table A; Target 35485; HLA-A*25:01; KLK4; ENSG00000167749; TAA
SVSESDTIRSI

SEQ ID NO: 35486 - protein, 10 aa, Homo sapiens
  misc_feature: Table A; Target 35486; HLA-A*03:02; KLK4; ENSG00000167749; TAA
SVVSEEVCSK

SEQ ID NO: 35487 - protein, 10 aa, Homo sapiens
  misc_feature: Table A; Target 35487; HLA-A*11:01; KLK4; ENSG00000167749; TAA
SVVSEEVCSK

SEQ ID NO: 35488 - protein, 10 aa, Homo sapiens
  misc_feature: Table A; Target 35488; HLA-A*68:01; KLK4; ENSG00000167749; TAA
SVVSEEVCSK

SEQ ID NO: 35489 - protein, 10 aa, Homo sapiens
  misc_feature: Table A; Target 35489; HLA-C*07:06; KLK4; ENSG00000167749; TAA
SVVSEEVCSK

SEQ ID NO: 35490 - protein, 11 aa, Homo sapiens
  misc_feature: Table A; Target 35490; HLA-A*26:01; KLK4; ENSG00000167749; TAA
SVVSEEVCSKL

SEQ ID NO: 35491 - protein, 11 aa, Homo sapiens
  misc_feature: Table A; Target 35491; HLA-A*68:02; KLK4; ENSG00000167749; TAA
SVVSEEVCSKL

SEQ ID NO: 35492 - protein, 8 aa, Homo sapiens
  misc_feature: Table A; Target 35492; HLA-C*01:02; KLK4; ENSG00000167749; TAA
SYTIGLGL

SEQ ID NO: 35493 - protein, 8 aa, Homo sapiens
  misc_feature: Table A; Target 35493; HLA-C*14:02; KLK4; ENSG00000167749; TAA
SYTIGLGL

SEQ ID NO: 35494 - protein, 11 aa, Homo sapiens
  misc_feature: Table A; Target 35494; HLA-A*24:02; KLK4; ENSG00000167749; TAA
SYTIGLGLHSL

SEQ ID NO: 35495 - protein, 8 aa, Homo sapiens
  misc_feature: Table A; Target 35495; HLA-B*57:01; KLK4; ENSG00000167749; TAA
TAGNPWGW

SEQ ID NO: 35496 - protein, 8 aa, Homo sapiens
  misc_feature: Table A; Target 35496; HLA-B*51:01; KLK4; ENSG00000167749; TAA
TAGNSCLV

SEQ ID NO: 35497 - protein, 8 aa, Homo sapiens
  misc_feature: Table A; Target 35497; HLA-A*30:01; KLK4; ENSG00000167749; TAA
TEWIEKTV

SEQ ID NO: 35498 - protein, 8 aa, Homo sapiens
  misc_feature: Table A; Target 35498; HLA-B*18:01; KLK4; ENSG00000167749; TAA
TEWIEKTV

SEQ ID NO: 35499 - protein, 8 aa, Homo sapiens
  misc_feature: Table A; Target 35499; HLA-B*40:02; KLK4; ENSG00000167749; TAA
TEWIEKTV

SEQ ID NO: 35500 - protein, 8 aa, Homo sapiens
  misc_feature: Table A; Target 35500; HLA-B*44:03; KLK4; ENSG00000167749; TAA
TEWIEKTV

SEQ ID NO: 35501 - protein, 8 aa, Homo sapiens
  misc_feature: Table A; Target 35501; HLA-B*49:01; KLK4; ENSG00000167749; TAA
TEWIEKTV

SEQ ID NO: 35502 - protein, 8 aa, Homo sapiens
  misc_feature: Table A; Target 35502; HLA-C*16:04; KLK4; ENSG00000167749; TAA
TEWIEKTV

SEQ ID NO: 35503 - protein, 9 aa, Homo sapiens
  misc_feature: Table A; Target 35503; HLA-B*40:02; KLK4; ENSG00000167749; TAA
TEWIEKTVQ

SEQ ID NO: 35504 - protein, 10 aa, Homo sapiens
  misc_feature: Table A; Target 35504; HLA-A*30:01; KLK4; ENSG00000167749; TAA
TEWIEKTVQA

SEQ ID NO: 35505 - protein, 10 aa, Homo sapiens
  misc_feature: Table A; Target 35505; HLA-B*40:01; KLK4; ENSG00000167749; TAA
TEWIEKTVQA

SEQ ID NO: 35506 - protein, 10 aa, Homo sapiens
  misc_feature: Table A; Target 35506; HLA-B*40:02; KLK4; ENSG00000167749; TAA
TEWIEKTVQA

SEQ ID NO: 35507 - protein, 10 aa, Homo sapiens
  misc_feature: Table A; Target 35507; HLA-B*49:01; KLK4; ENSG00000167749; TAA
TEWIEKTVQA

SEQ ID NO: 35508 - protein, 11 aa, Homo sapiens
  misc_feature: Table A; Target 35508; HLA-C*06:02; KLK4; ENSG00000167749; TAA
TEWIEKTVQAS

SEQ ID NO: 35509 - protein, 9 aa, Homo sapiens
  misc_feature: Table A; Target 35509; HLA-A*02:04; KLK4; ENSG00000167749; TAA
TIGLGLHSL

SEQ ID NO: 35510 - protein, 9 aa, Homo sapiens
  misc_feature: Table A; Target 35510; HLA-B*08:01; KLK4; ENSG00000167749; TAA
TIGLGLHSL

SEQ ID NO: 35511 - protein, 9 aa, Homo sapiens
  misc_feature: Table A; Target 35511; HLA-B*40:02; KLK4; ENSG00000167749; TAA
TIGLGLHSL

SEQ ID NO: 35512 - protein, 9 aa, Homo sapiens
  misc_feature: Table A; Target 35512; HLA-C*01:02; KLK4; ENSG00000167749; TAA
TIGLGLHSL

SEQ ID NO: 35513 - protein, 9 aa, Homo sapiens
  misc_feature: Table A; Target 35513; HLA-C*07:04; KLK4; ENSG00000167749; TAA
TIGLGLHSL

SEQ ID NO: 35514 - protein, 9 aa, Homo sapiens
  misc_feature: Table A; Target 35514; HLA-B*18:01; KLK4; ENSG00000167749; TAA
VEASLSVRH

SEQ ID NO: 35515 - protein, 9 aa, Homo sapiens
  misc_feature: Table A; Target 35515; HLA-B*44:03; KLK4; ENSG00000167749; TAA
VEASLSVRH

SEQ ID NO: 35516 - protein, 10 aa, Homo sapiens
  misc_feature: Table A; Target 35516; HLA-A*23:01; KLK4; ENSG00000167749; TAA
VGVPGVYTNL

SEQ ID NO: 35517 - protein, 10 aa, Homo sapiens
  misc_feature: Table A; Target 35517; HLA-B*46:01; KLK4; ENSG00000167749; TAA
VGVPGVYTNL

SEQ ID NO: 35518 - protein, 10 aa, Homo sapiens
  misc_feature: Table A; Target 35518; HLA-C*02:02; KLK4; ENSG00000167749; TAA
VGVPGVYTNL

SEQ ID NO: 35519 - protein, 10 aa, Homo sapiens
  misc_feature: Table A; Target 35519; HLA-C*03:04; KLK4; ENSG00000167749; TAA
VGVPGVYTNL

SEQ ID NO: 35520 - protein, 9 aa, Homo sapiens
  misc_feature: Table A; Target 35520; HLA-A*02:01; KLK4; ENSG00000167749; TAA
VLQCVNVSV

SEQ ID NO: 35521 - protein, 9 aa, Homo sapiens
  misc_feature: Table A; Target 35521; HLA-B*13:02; KLK4; ENSG00000167749; TAA
VLQCVNVSV

SEQ ID NO: 35522 - protein, 8 aa, Homo sapiens
  misc_feature: Table A; Target 35522; HLA-B*37:01; KLK4; ENSG00000167749; TAA
VLSAAHCF

SEQ ID NO: 35523 - protein, 8 aa, Homo sapiens
  misc_feature: Table A; Target 35523; HLA-B*07:02; KLK4; ENSG00000167749; TAA
VPGVYTNL

SEQ ID NO: 35524 - protein, 8 aa, Homo sapiens
  misc_feature: Table A; Target 35524; HLA-B*08:01; KLK4; ENSG00000167749; TAA
VPGVYTNL

SEQ ID NO: 35525 - protein, 8 aa, Homo sapiens
  misc_feature: Table A; Target 35525; HLA-B*35:03; KLK4; ENSG00000167749; TAA
VPGVYTNL

SEQ ID NO: 35526 - protein, 8 aa, Homo sapiens
  misc_feature: Table A; Target 35526; HLA-C*07:02; KLK4; ENSG00000167749; TAA
VPGVYTNL

SEQ ID NO: 35527 - protein, 9 aa, Homo sapiens
  misc_feature: Table A; Target 35527; HLA-C*05:01; KLK4; ENSG00000167749; TAA
VSEEVCSKL

SEQ ID NO: 35528 - protein, 10 aa, Homo sapiens
  misc_feature: Table A; Target 35528; HLA-A*01:01; KLK4; ENSG00000167749; TAA
VSEEVCSKLY

SEQ ID NO: 35529 - protein, 9 aa, Homo sapiens
  misc_feature: Table A; Target 35529; HLA-C*06:02; KLK4; ENSG00000167749; TAA
VSFGKAPCG

SEQ ID NO: 35530 - protein, 9 aa, Homo sapiens
  misc_feature: Table A; Target 35530; HLA-C*12:03; KLK4; ENSG00000167749; TAA
VSFGKAPCG

SEQ ID NO: 35531 - protein, 8 aa, Homo sapiens
  misc_feature: Table A; Target 35531; HLA-B*46:01; KLK4; ENSG00000167749; TAA
VSVVSEEV

SEQ ID NO: 35532 - protein, 8 aa, Homo sapiens
  misc_feature: Table A; Target 35532; HLA-C*03:04; KLK4; ENSG00000167749; TAA
VSVVSEEV

SEQ ID NO: 35533 - protein, 11 aa, Homo sapiens
  misc_feature: Table A; Target 35533; HLA-C*07:06; KLK4; ENSG00000167749; TAA
VSVVSEEVCSK

SEQ ID NO: 35534 - protein, 9 aa, Homo sapiens
  misc_feature: Table A; Target 35534; HLA-A*03:01; KLK4; ENSG00000167749; TAA
VVSEEVCSK

SEQ ID NO: 35535 - protein, 9 aa, Homo sapiens
  misc_feature: Table A; Target 35535; HLA-A*03:02; KLK4; ENSG00000167749; TAA
VVSEEVCSK

SEQ ID NO: 35536 - protein, 9 aa, Homo sapiens
  misc_feature: Table A; Target 35536; HLA-A*11:01; KLK4; ENSG00000167749; TAA
VVSEEVCSK

SEQ ID NO: 35537 - protein, 9 aa, Homo sapiens
  misc_feature: Table A; Target 35537; HLA-A*68:01; KLK4; ENSG00000167749; TAA
VVSEEVCSK

SEQ ID NO: 35538 - protein, 9 aa, Homo sapiens
  misc_feature: Table A; Target 35538; HLA-B*27:05; KLK4; ENSG00000167749; TAA
VVSEEVCSK

SEQ ID NO: 35539 - protein, 9 aa, Homo sapiens
  misc_feature: Table A; Target 35539; HLA-C*07:06; KLK4; ENSG00000167749; TAA
VVSEEVCSK

SEQ ID NO: 35540 - protein, 10 aa, Homo sapiens
  misc_feature: Table A; Target 35540; HLA-A*25:01; KLK4; ENSG00000167749; TAA
VVSEEVCSKL

SEQ ID NO: 35541 - protein, 10 aa, Homo sapiens
  misc_feature: Table A; Target 35541; HLA-A*26:01; KLK4; ENSG00000167749; TAA
VVSEEVCSKL

SEQ ID NO: 35542 - protein, 10 aa, Homo sapiens
  misc_feature: Table A; Target 35542; HLA-A*68:02; KLK4; ENSG00000167749; TAA
VVSEEVCSKL

SEQ ID NO: 35543 - protein, 10 aa, Homo sapiens
  misc_feature: Table A; Target 35543; HLA-B*27:05; KLK4; ENSG00000167749; TAA
VVSEEVCSKL

SEQ ID NO: 35544 - protein, 11 aa, Homo sapiens
  misc_feature: Table A; Target 35544; HLA-A*30:02; KLK4; ENSG00000167749; TAA
VVSEEVCSKLY

SEQ ID NO: 35545 - protein, 11 aa, Homo sapiens
  misc_feature: Table A; Target 35545; HLA-C*16:02; KLK4; ENSG00000167749; TAA
VVSEEVCSKLY

SEQ ID NO: 35546 - protein, 8 aa, Homo sapiens
  misc_feature: Table A; Target 35546; HLA-A*23:01; KLK4; ENSG00000167749; TAA
VYTNLCKF

SEQ ID NO: 35547 - protein, 8 aa, Homo sapiens
  misc_feature: Table A; Target 35547; HLA-A*24:02; KLK4; ENSG00000167749; TAA
VYTNLCKF

SEQ ID NO: 35548 - protein, 8 aa, Homo sapiens
  misc_feature: Table A; Target 35548; HLA-C*14:02; KLK4; ENSG00000167749; TAA
VYTNLCKF

SEQ ID NO: 35549 - protein, 9 aa, Homo sapiens
  misc_feature: Table A; Target 35549; HLA-A*02:07; KLK4; ENSG00000167749; TAA
YDPLYHPSM

SEQ ID NO: 35550 - protein, 9 aa, Homo sapiens
  misc_feature: Table A; Target 35550; HLA-B*37:01; KLK4; ENSG00000167749; TAA
YDPLYHPSM

SEQ ID NO: 35551 - protein, 10 aa, Homo sapiens
  misc_feature: Table A; Target 35551; HLA-A*24:02; KLK4; ENSG00000167749; TAA
YDPLYHPSMF

SEQ ID NO: 35552 - protein, 10 aa, Homo sapiens
  misc_feature: Table A; Target 35552; HLA-B*07:02; KLK4; ENSG00000167749; TAA
YDPLYHPSMF

SEQ ID NO: 35553 - protein, 10 aa, Homo sapiens
  misc_feature: Table A; Target 35553; HLA-C*04:01; KLK4; ENSG00000167749; TAA
YDPLYHPSMF

SEQ ID NO: 35554 - protein, 10 aa, Homo sapiens
  misc_feature: Table A; Target 35554; HLA-C*07:01; KLK4; ENSG00000167749; TAA
YDPLYHPSMF

SEQ ID NO: 35555 - protein, 10 aa, Homo sapiens
  misc_feature: Table A; Target 35555; HLA-C*07:02; KLK4; ENSG00000167749; TAA
YDPLYHPSMF

SEQ ID NO: 35556 - protein, 10 aa, Homo sapiens
  misc_feature: Table A; Target 35556; HLA-B*15:03; KLK4; ENSG00000167749; TAA
YLILGVAGSL

SEQ ID NO: 35557 - protein, 10 aa, Homo sapiens
  misc_feature: Table A; Target 35557; HLA-B*40:01; KLK4; ENSG00000167749; TAA
YLILGVAGSL

SEQ ID NO: 35558 - protein, 10 aa, Homo sapiens
  misc_feature: Table A; Target 35558; HLA-C*14:02; KLK4; ENSG00000167749; TAA
YLILGVAGSL

SEQ ID NO: 35559 - protein, 11 aa, Homo sapiens
  misc_feature: Table A; Target 35559; HLA-A*02:01; KLK4; ENSG00000167749; TAA
YLILGVAGSLV

SEQ ID NO: 35560 - protein, 11 aa, Homo sapiens
  misc_feature: Table A; Target 35560; HLA-A*02:03; KLK4; ENSG00000167749; TAA
YLILGVAGSLV

SEQ ID NO: 35561 - protein, 8 aa, Homo sapiens
  misc_feature: Table A; Target 35561; HLA-A*02:04; KLK4; ENSG00000167749; TAA
YLQGLVSF

SEQ ID NO: 35562 - protein, 8 aa, Homo sapiens
  misc_feature: Table A; Target 35562; HLA-A*23:01; KLK4; ENSG00000167749; TAA
YLQGLVSF

SEQ ID NO: 35563 - protein, 8 aa, Homo sapiens
  misc_feature: Table A; Target 35563; HLA-B*08:01; KLK4; ENSG00000167749; TAA
YLQGLVSF

SEQ ID NO: 35564 - protein, 8 aa, Homo sapiens
  misc_feature: Table A; Target 35564; HLA-B*37:01; KLK4; ENSG00000167749; TAA
YLQGLVSF

SEQ ID NO: 35565 - protein, 8 aa, Homo sapiens
  misc_feature: Table A; Target 35565; HLA-B*46:01; KLK4; ENSG00000167749; TAA
YLQGLVSF

SEQ ID NO: 35566 - protein, 8 aa, Homo sapiens
  misc_feature: Table A; Target 35566; HLA-C*07:04; KLK4; ENSG00000167749; TAA
YLQGLVSF

SEQ ID NO: 35567 - protein, 9 aa, Homo sapiens
  misc_feature: Table A; Target 35567; HLA-A*02:03; KLK4; ENSG00000167749; TAA
YLQGLVSFG

SEQ ID NO: 35568 - protein, 9 aa, Homo sapiens
  misc_feature: Table A; Target 35568; HLA-C*07:01; KLK4; ENSG00000167749; TAA
YLQGLVSFG

SEQ ID NO: 35569 - protein, 9 aa, Homo sapiens
  misc_feature: Table A; Target 35569; HLA-C*07:04; KLK4; ENSG00000167749; TAA
YLQGLVSFG

SEQ ID NO: 35570 - protein, 9 aa, Homo sapiens
  misc_feature: Table A; Target 35570; HLA-C*12:03; KLK4; ENSG00000167749; TAA
YLQGLVSFG

SEQ ID NO: 35571 - protein, 10 aa, Homo sapiens
  misc_feature: Table A; Target 35571; HLA-A*03:02; KLK4; ENSG00000167749; TAA
YLQGLVSFGK

SEQ ID NO: 35572 - protein, 10 aa, Homo sapiens
  misc_feature: Table A; Target 35572; HLA-B*27:02; KLK4; ENSG00000167749; TAA
YLQGLVSFGK

SEQ ID NO: 35573 - protein, 8 aa, Homo sapiens
  misc_feature: Table A; Target 35573; HLA-C*04:01; KLK4; ENSG00000167749; TAA
YTIGLGLH

SEQ ID NO: 35574 - protein, 8 aa, Homo sapiens
  misc_feature: Table A; Target 35574; HLA-C*06:02; KLK4; ENSG00000167749; TAA
YTIGLGLH

SEQ ID NO: 35575 - protein, 8 aa, Homo sapiens
  misc_feature: Table A; Target 35575; HLA-C*07:01; KLK4; ENSG00000167749; TAA
YTIGLGLH

SEQ ID NO: 35576 - protein, 10 aa, Homo sapiens
  misc_feature: Table A; Target 35576; HLA-A*02:01; KLK4; ENSG00000167749; TAA
YTIGLGLHSL

SEQ ID NO: 35577 - protein, 10 aa, Homo sapiens
  misc_feature: Table A; Target 35577; HLA-A*02:03; KLK4; ENSG00000167749; TAA
YTIGLGLHSL

SEQ ID NO: 35578 - protein, 10 aa, Homo sapiens
  misc_feature: Table A; Target 35578; HLA-A*02:04; KLK4; ENSG00000167749; TAA
YTIGLGLHSL

SEQ ID NO: 35579 - protein, 10 aa, Homo sapiens
  misc_feature: Table A; Target 35579; HLA-A*02:07; KLK4; ENSG00000167749; TAA
YTIGLGLHSL

SEQ ID NO: 35580 - protein, 10 aa, Homo sapiens
  misc_feature: Table A; Target 35580; HLA-A*23:01; KLK4; ENSG00000167749; TAA
YTIGLGLHSL

SEQ ID NO: 35581 - protein, 10 aa, Homo sapiens
  misc_feature: Table A; Target 35581; HLA-A*24:02; KLK4; ENSG00000167749; TAA
YTIGLGLHSL

SEQ ID NO: 35582 - protein, 10 aa, Homo sapiens
  misc_feature: Table A; Target 35582; HLA-A*25:01; KLK4; ENSG00000167749; TAA
YTIGLGLHSL

SEQ ID NO: 35583 - protein, 10 aa, Homo sapiens
  misc_feature: Table A; Target 35583; HLA-A*26:01; KLK4; ENSG00000167749; TAA
YTIGLGLHSL

SEQ ID NO: 35584 - protein, 10 aa, Homo sapiens
  misc_feature: Table A; Target 35584; HLA-A*30:01; KLK4; ENSG00000167749; TAA
YTIGLGLHSL

SEQ ID NO: 35585 - protein, 10 aa, Homo sapiens
  misc_feature: Table A; Target 35585; HLA-A*31:01; KLK4; ENSG00000167749; TAA
YTIGLGLHSL

SEQ ID NO: 35586 - protein, 10 aa, Homo sapiens
  misc_feature: Table A; Target 35586; HLA-A*32:01; KLK4; ENSG00000167749; TAA
YTIGLGLHSL

SEQ ID NO: 35587 - protein, 10 aa, Homo sapiens
  misc_feature: Table A; Target 35587; HLA-A*33:01; KLK4; ENSG00000167749; TAA
YTIGLGLHSL

SEQ ID NO: 35588 - protein, 10 aa, Homo sapiens
  misc_feature: Table A; Target 35588; HLA-A*68:01; KLK4; ENSG00000167749; TAA
YTIGLGLHSL

SEQ ID NO: 35589 - protein, 10 aa, Homo sapiens
  misc_feature: Table A; Target 35589; HLA-A*68:02; KLK4; ENSG00000167749; TAA
YTIGLGLHSL

SEQ ID NO: 35590 - protein, 10 aa, Homo sapiens
  misc_feature: Table A; Target 35590; HLA-B*08:01; KLK4; ENSG00000167749; TAA
YTIGLGLHSL

SEQ ID NO: 35591 - protein, 10 aa, Homo sapiens
  misc_feature: Table A; Target 35591; HLA-B*13:02; KLK4; ENSG00000167749; TAA
YTIGLGLHSL

SEQ ID NO: 35592 - protein, 10 aa, Homo sapiens
  misc_feature: Table A; Target 35592; HLA-B*35:03; KLK4; ENSG00000167749; TAA
YTIGLGLHSL

SEQ ID NO: 35593 - protein, 10 aa, Homo sapiens
  misc_feature: Table A; Target 35593; HLA-B*40:01; KLK4; ENSG00000167749; TAA
YTIGLGLHSL

SEQ ID NO: 35594 - protein, 10 aa, Homo sapiens
  misc_feature: Table A; Target 35594; HLA-B*40:02; KLK4; ENSG00000167749; TAA
YTIGLGLHSL

SEQ ID NO: 35595 - protein, 10 aa, Homo sapiens
  misc_feature: Table A; Target 35595; HLA-B*44:02; KLK4; ENSG00000167749; TAA
YTIGLGLHSL

SEQ ID NO: 35596 - protein, 10 aa, Homo sapiens
  misc_feature: Table A; Target 35596; HLA-B*46:01; KLK4; ENSG00000167749; TAA
YTIGLGLHSL

SEQ ID NO: 35597 - protein, 10 aa, Homo sapiens
  misc_feature: Table A; Target 35597; HLA-B*54:01; KLK4; ENSG00000167749; TAA
YTIGLGLHSL

SEQ ID NO: 35598 - protein, 10 aa, Homo sapiens
  misc_feature: Table A; Target 35598; HLA-B*57:01; KLK4; ENSG00000167749; TAA
YTIGLGLHSL

SEQ ID NO: 35599 - protein, 10 aa, Homo sapiens
  misc_feature: Table A; Target 35599; HLA-B*58:01; KLK4; ENSG00000167749; TAA
YTIGLGLHSL

SEQ ID NO: 35600 - protein, 10 aa, Homo sapiens
  misc_feature: Table A; Target 35600; HLA-C*01:02; KLK4; ENSG00000167749; TAA
YTIGLGLHSL

SEQ ID NO: 35601 - protein, 10 aa, Homo sapiens
  misc_feature: Table A; Target 35601; HLA-C*02:02; KLK4; ENSG00000167749; TAA
YTIGLGLHSL

SEQ ID NO: 35602 - protein, 10 aa, Homo sapiens
  misc_feature: Table A; Target 35602; HLA-C*03:03; KLK4; ENSG00000167749; TAA
YTIGLGLHSL

SEQ ID NO: 35603 - protein, 10 aa, Homo sapiens
  misc_feature: Table A; Target 35603; HLA-C*03:04; KLK4; ENSG00000167749; TAA
YTIGLGLHSL

SEQ ID NO: 35604 - protein, 10 aa, Homo sapiens
  misc_feature: Table A; Target 35604; HLA-C*06:02; KLK4; ENSG00000167749; TAA
YTIGLGLHSL

SEQ ID NO: 35605 - protein, 10 aa, Homo sapiens
  misc_feature: Table A; Target 35605; HLA-C*07:04; KLK4; ENSG00000167749; TAA
YTIGLGLHSL

SEQ ID NO: 35606 - protein, 10 aa, Homo sapiens
  misc_feature: Table A; Target 35606; HLA-C*12:03; KLK4; ENSG00000167749; TAA
YTIGLGLHSL

SEQ ID NO: 35607 - protein, 10 aa, Homo sapiens
  misc_feature: Table A; Target 35607; HLA-C*14:02; KLK4; ENSG00000167749; TAA
YTIGLGLHSL

SEQ ID NO: 35608 - protein, 10 aa, Homo sapiens
  misc_feature: Table A; Target 35608; HLA-C*16:02; KLK4; ENSG00000167749; TAA
YTIGLGLHSL

SEQ ID NO: 35609 - protein, 8 aa, Homo sapiens
  misc_feature: Table A; Target 35609; HLA-A*01:01; LIN28A; ENSG00000131914; CTA
AADEPQLL

SEQ ID NO: 35610 - protein, 8 aa, Homo sapiens
  misc_feature: Table A; Target 35610; HLA-A*32:01; LIN28A; ENSG00000131914; CTA
AADEPQLL

SEQ ID NO: 35611 - protein, 8 aa, Homo sapiens
  misc_feature: Table A; Target 35611; HLA-B*35:03; LIN28A; ENSG00000131914; CTA
AADEPQLL

SEQ ID NO: 35612 - protein, 8 aa, Homo sapiens
  misc_feature: Table A; Target 35612; HLA-B*38:01; LIN28A; ENSG00000131914; CTA
AADEPQLL

SEQ ID NO: 35613 - protein, 8 aa, Homo sapiens
  misc_feature: Table A; Target 35613; HLA-B*39:01; LIN28A; ENSG00000131914; CTA
AADEPQLL

SEQ ID NO: 35614 - protein, 8 aa, Homo sapiens
  misc_feature: Table A; Target 35614; HLA-C*03:03; LIN28A; ENSG00000131914; CTA
AADEPQLL

SEQ ID NO: 35615 - protein, 8 aa, Homo sapiens
  misc_feature: Table A; Target 35615; HLA-C*03:04; LIN28A; ENSG00000131914; CTA
AADEPQLL

SEQ ID NO: 35616 - protein, 8 aa, Homo sapiens
  misc_feature: Table A; Target 35616; HLA-C*04:01; LIN28A; ENSG00000131914; CTA
AADEPQLL

SEQ ID NO: 35617 - protein, 8 aa, Homo sapiens
  misc_feature: Table A; Target 35617; HLA-C*07:04; LIN28A; ENSG00000131914; CTA
AADEPQLL

SEQ ID NO: 35618 - protein, 9 aa, Homo sapiens
  misc_feature: Table A; Target 35618; HLA-A*01:01; LIN28A; ENSG00000131914; CTA
AADEPQLLH

SEQ ID NO: 35619 - protein, 9 aa, Homo sapiens
  misc_feature: Table A; Target 35619; HLA-A*03:01; LIN28A; ENSG00000131914; CTA
AADEPQLLH

SEQ ID NO: 35620 - protein, 9 aa, Homo sapiens
  misc_feature: Table A; Target 35620; HLA-A*03:02; LIN28A; ENSG00000131914; CTA
AADEPQLLH

SEQ ID NO: 35621 - protein, 9 aa, Homo sapiens
  misc_feature: Table A; Target 35621; HLA-A*11:01; LIN28A; ENSG00000131914; CTA
AADEPQLLH

SEQ ID NO: 35622 - protein, 9 aa, Homo sapiens
  misc_feature: Table A; Target 35622; HLA-B*27:05; LIN28A; ENSG00000131914; CTA
AADEPQLLH

SEQ ID NO: 35623 - protein, 9 aa, Homo sapiens
  misc_feature: Table A; Target 35623; HLA-C*03:03; LIN28A; ENSG00000131914; CTA
AADEPQLLH

SEQ ID NO: 35624 - protein, 9 aa, Homo sapiens
  misc_feature: Table A; Target 35624; HLA-C*05:01; LIN28A; ENSG00000131914; CTA
AADEPQLLH

SEQ ID NO: 35625 - protein, 9 aa, Homo sapiens
  misc_feature: Table A; Target 35625; HLA-C*07:06; LIN28A; ENSG00000131914; CTA
AADEPQLLH

SEQ ID NO: 35626 - protein, 11 aa, Homo sapiens
  misc_feature: Table A; Target 35626; HLA-A*02:07; LIN28A; ENSG00000131914; CTA
AADEPQLLHGA

SEQ ID NO: 35627 - protein, 9 aa, Homo sapiens
  misc_feature: Table A; Target 35627; HLA-C*05:01; LIN28A; ENSG00000131914; CTA
AAEEAPEEA

SEQ ID NO: 35628 - protein, 10 aa, Homo sapiens
  misc_feature: Table A; Target 35628; HLA-B*07:02; LIN28A; ENSG00000131914; CTA
AARAADEPQL

SEQ ID NO: 35629 - protein, 11 aa, Homo sapiens
  misc_feature: Table A; Target 35629; HLA-B*57:01; LIN28A; ENSG00000131914; CTA
AARAADEPQLL

SEQ ID NO: 35630 - protein, 9 aa, Homo sapiens
  misc_feature: Table A; Target 35630; HLA-B*55:01; LIN28A; ENSG00000131914; CTA
AGVALDPPV

SEQ ID NO: 35631 - protein, 9 aa, Homo sapiens
  misc_feature: Table A; Target 35631; HLA-B*56:01; LIN28A; ENSG00000131914; CTA
AGVALDPPV

SEQ ID NO: 35632 - protein, 9 aa, Homo sapiens
  misc_feature: Table A; Target 35632; HLA-C*04:01; LIN28A; ENSG00000131914; CTA
AGVALDPPV

SEQ ID NO: 35633 - protein, 9 aa, Homo sapiens
  misc_feature: Table A; Target 35633; HLA-C*06:02; LIN28A; ENSG00000131914; CTA
AGVALDPPV

SEQ ID NO: 35634 - protein, 8 aa, Homo sapiens
  misc_feature: Table A; Target 35634; HLA-A*02:01; LIN28A; ENSG00000131914; CTA
ALDPPVDV

SEQ ID NO: 35635 - protein, 8 aa, Homo sapiens
  misc_feature: Table A; Target 35635; HLA-A*02:07; LIN28A; ENSG00000131914; CTA
ALDPPVDV

SEQ ID NO: 35636 - protein, 8 aa, Homo sapiens
  misc_feature: Table A; Target 35636; HLA-C*04:01; LIN28A; ENSG00000131914; CTA
ALDPPVDV

SEQ ID NO: 35637 - protein, 8 aa, Homo sapiens
  misc_feature: Table A; Target 35637; HLA-C*05:01; LIN28A; ENSG00000131914; CTA
ALDPPVDV

SEQ ID NO: 35638 - protein, 9 aa, Homo sapiens
  misc_feature: Table A; Target 35638; HLA-A*01:01; LIN28A; ENSG00000131914; CTA
ALDPPVDVF

SEQ ID NO: 35639 - protein, 9 aa, Homo sapiens
  misc_feature: Table A; Target 35639; HLA-A*02:01; LIN28A; ENSG00000131914; CTA
ALDPPVDVF

SEQ ID NO: 35640 - protein, 9 aa, Homo sapiens
  misc_feature: Table A; Target 35640; HLA-A*02:07; LIN28A; ENSG00000131914; CTA
ALDPPVDVF

SEQ ID NO: 35641 - protein, 9 aa, Homo sapiens
  misc_feature: Table A; Target 35641; HLA-A*03:02; LIN28A; ENSG00000131914; CTA
ALDPPVDVF

SEQ ID NO: 35642 - protein, 9 aa, Homo sapiens
  misc_feature: Table A; Target 35642; HLA-A*23:01; LIN28A; ENSG00000131914; CTA
ALDPPVDVF

SEQ ID NO: 35643 - protein, 9 aa, Homo sapiens
  misc_feature: Table A; Target 35643; HLA-A*24:02; LIN28A; ENSG00000131914; CTA
ALDPPVDVF

SEQ ID NO: 35644 - protein, 9 aa, Homo sapiens
  misc_feature: Table A; Target 35644; HLA-A*25:01; LIN28A; ENSG00000131914; CTA
ALDPPVDVF

SEQ ID NO: 35645 - protein, 9 aa, Homo sapiens
  misc_feature: Table A; Target 35645; HLA-A*29:02; LIN28A; ENSG00000131914; CTA
ALDPPVDVF

SEQ ID NO: 35646 - protein, 9 aa, Homo sapiens
  misc_feature: Table A; Target 35646; HLA-A*32:01; LIN28A; ENSG00000131914; CTA
ALDPPVDVF

SEQ ID NO: 35647 - protein, 9 aa, Homo sapiens
  misc_feature: Table A; Target 35647; HLA-B*13:02; LIN28A; ENSG00000131914; CTA
ALDPPVDVF

SEQ ID NO: 35648 - protein, 9 aa, Homo sapiens
  misc_feature: Table A; Target 35648; HLA-B*15:01; LIN28A; ENSG00000131914; CTA
ALDPPVDVF

SEQ ID NO: 35649 - protein, 9 aa, Homo sapiens
  misc_feature: Table A; Target 35649; HLA-B*15:03; LIN28A; ENSG00000131914; CTA
ALDPPVDVF

SEQ ID NO: 35650 - protein, 9 aa, Homo sapiens
  misc_feature: Table A; Target 35650; HLA-B*27:05; LIN28A; ENSG00000131914; CTA
ALDPPVDVF

SEQ ID NO: 35651 - protein, 9 aa, Homo sapiens
  misc_feature: Table A; Target 35651; HLA-B*35:01; LIN28A; ENSG00000131914; CTA
ALDPPVDVF

SEQ ID NO: 35652 - protein, 9 aa, Homo sapiens
  misc_feature: Table A; Target 35652; HLA-B*37:01; LIN28A; ENSG00000131914; CTA
ALDPPVDVF

SEQ ID NO: 35653 - protein, 9 aa, Homo sapiens
  misc_feature: Table A; Target 35653; HLA-B*38:01; LIN28A; ENSG00000131914; CTA
ALDPPVDVF

SEQ ID NO: 35654 - protein, 9 aa, Homo sapiens
  misc_feature: Table A; Target 35654; HLA-B*39:01; LIN28A; ENSG00000131914; CTA
ALDPPVDVF

SEQ ID NO: 35655 - protein, 9 aa, Homo sapiens
  misc_feature: Table A; Target 35655; HLA-B*44:02; LIN28A; ENSG00000131914; CTA
ALDPPVDVF

SEQ ID NO: 35656 - protein, 9 aa, Homo sapiens
  misc_feature: Table A; Target 35656; HLA-B*44:03; LIN28A; ENSG00000131914; CTA
ALDPPVDVF

SEQ ID NO: 35657 - protein, 9 aa, Homo sapiens
  misc_feature: Table A; Target 35657; HLA-B*55:01; LIN28A; ENSG00000131914; CTA
ALDPPVDVF

SEQ ID NO: 35658 - protein, 9 aa, Homo sapiens
  misc_feature: Table A; Target 35658; HLA-B*57:01; LIN28A; ENSG00000131914; CTA
ALDPPVDVF

SEQ ID NO: 35659 - protein, 9 aa, Homo sapiens
  misc_feature: Table A; Target 35659; HLA-B*58:01; LIN28A; ENSG00000131914; CTA
ALDPPVDVF

SEQ ID NO: 35660 - protein, 9 aa, Homo sapiens
  misc_feature: Table A; Target 35660; HLA-C*02:02; LIN28A; ENSG00000131914; CTA
ALDPPVDVF

SEQ ID NO: 35661 - protein, 9 aa, Homo sapiens
  misc_feature: Table A; Target 35661; HLA-C*03:03; LIN28A; ENSG00000131914; CTA
ALDPPVDVF

SEQ ID NO: 35662 - protein, 9 aa, Homo sapiens
  misc_feature: Table A; Target 35662; HLA-C*03:04; LIN28A; ENSG00000131914; CTA
ALDPPVDVF

SEQ ID NO: 35663 - protein, 9 aa, Homo sapiens
  misc_feature: Table A; Target 35663; HLA-C*04:01; LIN28A; ENSG00000131914; CTA
ALDPPVDVF

SEQ ID NO: 35664 - protein, 9 aa, Homo sapiens
  misc_feature: Table A; Target 35664; HLA-C*05:01; LIN28A; ENSG00000131914; CTA
ALDPPVDVF

SEQ ID NO: 35665 - protein, 9 aa, Homo sapiens
  misc_feature: Table A; Target 35665; HLA-C*07:04; LIN28A; ENSG00000131914; CTA
ALDPPVDVF

SEQ ID NO: 35666 - protein, 9 aa, Homo sapiens
  misc_feature: Table A; Target 35666; HLA-C*12:03; LIN28A; ENSG00000131914; CTA
ALDPPVDVF

SEQ ID NO: 35667 - protein, 10 aa, Homo sapiens
  misc_feature: Table A; Target 35667; HLA-A*01:01; LIN28A; ENSG00000131914; CTA
ALDPPVDVFV

SEQ ID NO: 35668 - protein, 10 aa, Homo sapiens
  misc_feature: Table A; Target 35668; HLA-A*02:04; LIN28A; ENSG00000131914; CTA
ALDPPVDVFV

SEQ ID NO: 35669 - protein, 10 aa, Homo sapiens
  misc_feature: Table A; Target 35669; HLA-A*02:07; LIN28A; ENSG00000131914; CTA
ALDPPVDVFV

SEQ ID NO: 35670 - protein, 10 aa, Homo sapiens
  misc_feature: Table A; Target 35670; HLA-A*68:02; LIN28A; ENSG00000131914; CTA
ALDPPVDVFV

SEQ ID NO: 35671 - protein, 10 aa, Homo sapiens
  misc_feature: Table A; Target 35671; HLA-B*13:02; LIN28A; ENSG00000131914; CTA
ALDPPVDVFV

SEQ ID NO: 35672 - protein, 10 aa, Homo sapiens
  misc_feature: Table A; Target 35672; HLA-B*38:01; LIN28A; ENSG00000131914; CTA
ALDPPVDVFV

SEQ ID NO: 35673 - protein, 10 aa, Homo sapiens
  misc_feature: Table A; Target 35673; HLA-B*55:01; LIN28A; ENSG00000131914; CTA
ALDPPVDVFV

SEQ ID NO: 35674 - protein, 10 aa, Homo sapiens
  misc_feature: Table A; Target 35674; HLA-C*05:01; LIN28A; ENSG00000131914; CTA
ALDPPVDVFV

SEQ ID NO: 35675 - protein, 9 aa, Homo sapiens
  misc_feature: Table A; Target 35675; HLA-B*07:02; LIN28A; ENSG00000131914; CTA
APEDAARAA

SEQ ID NO: 35676 - protein, 9 aa, Homo sapiens
  misc_feature: Table A; Target 35676; HLA-B*54:01; LIN28A; ENSG00000131914; CTA
APEDAARAA

SEQ ID NO: 35677 - protein, 9 aa, Homo sapiens
  misc_feature: Table A; Target 35677; HLA-B*55:01; LIN28A; ENSG00000131914; CTA
APEDAARAA

SEQ ID NO: 35678 - protein, 9 aa, Homo sapiens
  misc_feature: Table A; Target 35678; HLA-B*56:01; LIN28A; ENSG00000131914; CTA
APEDAARAA

SEQ ID NO: 35679 - protein, 8 aa, Homo sapiens
  misc_feature: Table A; Target 35679; HLA-A*32:01; LIN28A; ENSG00000131914; CTA
AQGKPTYF

SEQ ID NO: 35680 - protein, 8 aa, Homo sapiens
  misc_feature: Table A; Target 35680; HLA-B*15:01; LIN28A; ENSG00000131914; CTA
AQGKPTYF

SEQ ID NO: 35681 - protein, 8 aa, Homo sapiens
  misc_feature: Table A; Target 35681; HLA-B*15:03; LIN28A; ENSG00000131914; CTA
AQGKPTYF

SEQ ID NO: 35682 - protein, 8 aa, Homo sapiens
  misc_feature: Table A; Target 35682; HLA-B*37:01; LIN28A; ENSG00000131914; CTA
AQGKPTYF

SEQ ID NO: 35683 - protein, 8 aa, Homo sapiens
  misc_feature: Table A; Target 35683; HLA-B*38:01; LIN28A; ENSG00000131914; CTA
AQGKPTYF

SEQ ID NO: 35684 - protein, 10 aa, Homo sapiens
  misc_feature: Table A; Target 35684; HLA-A*03:02; LIN28A; ENSG00000131914; CTA
AQQGPSAQGK

SEQ ID NO: 35685 - protein, 10 aa, Homo sapiens
  misc_feature: Table A; Target 35685; HLA-A*11:01; LIN28A; ENSG00000131914; CTA
AQQGPSAQGK

SEQ ID NO: 35686 - protein, 9 aa, Homo sapiens
  misc_feature: Table A; Target 35686; HLA-B*27:02; LIN28A; ENSG00000131914; CTA
ARAADEPQL

SEQ ID NO: 35687 - protein, 9 aa, Homo sapiens
  misc_feature: Table A; Target 35687; HLA-B*27:05; LIN28A; ENSG00000131914; CTA
ARAADEPQL

SEQ ID NO: 35688 - protein, 9 aa, Homo sapiens
  misc_feature: Table A; Target 35688; HLA-B*38:01; LIN28A; ENSG00000131914; CTA
ARAADEPQL

SEQ ID NO: 35689 - protein, 9 aa, Homo sapiens
  misc_feature: Table A; Target 35689; HLA-B*39:01; LIN28A; ENSG00000131914; CTA
ARAADEPQL

SEQ ID NO: 35690 - protein, 9 aa, Homo sapiens
  misc_feature: Table A; Target 35690; HLA-B*40:01; LIN28A; ENSG00000131914; CTA
ARAADEPQL

SEQ ID NO: 35691 - protein, 9 aa, Homo sapiens
  misc_feature: Table A; Target 35691; HLA-C*06:02; LIN28A; ENSG00000131914; CTA
ARAADEPQL

SEQ ID NO: 35692 - protein, 9 aa, Homo sapiens
  misc_feature: Table A; Target 35692; HLA-C*16:04; LIN28A; ENSG00000131914; CTA
ARAADEPQL

SEQ ID NO: 35693 - protein, 10 aa, Homo sapiens
  misc_feature: Table A; Target 35693; HLA-B*27:05; LIN28A; ENSG00000131914; CTA
ARAADEPQLL

SEQ ID NO: 35694 - protein, 10 aa, Homo sapiens
  misc_feature: Table A; Target 35694; HLA-B*38:01; LIN28A; ENSG00000131914; CTA
ARAADEPQLL

SEQ ID NO: 35695 - protein, 10 aa, Homo sapiens
  misc_feature: Table A; Target 35695; HLA-B*39:01; LIN28A; ENSG00000131914; CTA
ARAADEPQLL

SEQ ID NO: 35696 - protein, 9 aa, Homo sapiens
  misc_feature: Table A; Target 35696; HLA-B*27:05; LIN28A; ENSG00000131914; CTA
ARAGVALDP

SEQ ID NO: 35697 - protein, 8 aa, Homo sapiens
  misc_feature: Table A; Target 35697; HLA-A*03:02; LIN28A; ENSG00000131914; CTA
AVEFTFKK

SEQ ID NO: 35698 - protein, 8 aa, Homo sapiens
  misc_feature: Table A; Target 35698; HLA-A*11:01; LIN28A; ENSG00000131914; CTA
AVEFTFKK

SEQ ID NO: 35699 - protein, 11 aa, Homo sapiens
  misc_feature: Table A; Target 35699; HLA-B*54:01; LIN28A; ENSG00000131914; CTA
CPLKAQQGPSA

SEQ ID NO: 35700 - protein, 11 aa, Homo sapiens
  misc_feature: Table A; Target 35700; HLA-B*55:01; LIN28A; ENSG00000131914; CTA
CPLKAQQGPSA

SEQ ID NO: 35701 - protein, 11 aa, Homo sapiens
  misc_feature: Table A; Target 35701; HLA-B*56:01; LIN28A; ENSG00000131914; CTA
CPLKAQQGPSA

SEQ ID NO: 35702 - protein, 8 aa, Homo sapiens
  misc_feature: Table A; Target 35702; HLA-B*13:02; LIN28A; ENSG00000131914; CTA
CQSISHMV

SEQ ID NO: 35703 - protein, 9 aa, Homo sapiens
  misc_feature: Table A; Target 35703; HLA-B*18:01; LIN28A; ENSG00000131914; CTA
DEPQLLHGA

SEQ ID NO: 35704 - protein, 8 aa, Homo sapiens
  misc_feature: Table A; Target 35704; HLA-B*51:01; LIN28A; ENSG00000131914; CTA
DPPVDVFV

SEQ ID NO: 35705 - protein, 9 aa, Homo sapiens
  misc_feature: Table A; Target 35705; HLA-A*25:01; LIN28A; ENSG00000131914; CTA
DVFVHQSKL

SEQ ID NO: 35706 - protein, 9 aa, Homo sapiens
  misc_feature: Table A; Target 35706; HLA-A*26:01; LIN28A; ENSG00000131914; CTA
DVFVHQSKL

SEQ ID NO: 35707 - protein, 9 aa, Homo sapiens
  misc_feature: Table A; Target 35707; HLA-A*33:01; LIN28A; ENSG00000131914; CTA
DVFVHQSKL

SEQ ID NO: 35708 - protein, 9 aa, Homo sapiens
  misc_feature: Table A; Target 35708; HLA-A*68:01; LIN28A; ENSG00000131914; CTA
DVFVHQSKL

SEQ ID NO: 35709 - protein, 9 aa, Homo sapiens
  misc_feature: Table A; Target 35709; HLA-A*68:02; LIN28A; ENSG00000131914; CTA
DVFVHQSKL

SEQ ID NO: 35710 - protein, 9 aa, Homo sapiens
  misc_feature: Table A; Target 35710; HLA-B*51:01; LIN28A; ENSG00000131914; CTA
DVFVHQSKL

SEQ ID NO: 35711 - protein, 9 aa, Homo sapiens
  misc_feature: Table A; Target 35711; HLA-A*26:01; LIN28A; ENSG00000131914; CTA
EAPEDAARA

SEQ ID NO: 35712 - protein, 8 aa, Homo sapiens
  misc_feature: Table A; Target 35712; HLA-A*33:01; LIN28A; ENSG00000131914; CTA
EAVEFTFK

SEQ ID NO: 35713 - protein, 8 aa, Homo sapiens
  misc_feature: Table A; Target 35713; HLA-A*33:03; LIN28A; ENSG00000131914; CTA
EAVEFTFK

SEQ ID NO: 35714 - protein, 8 aa, Homo sapiens
  misc_feature: Table A; Target 35714; HLA-A*68:01; LIN28A; ENSG00000131914; CTA
EAVEFTFK

SEQ ID NO: 35715 - protein, 8 aa, Homo sapiens
  misc_feature: Table A; Target 35715; HLA-B*27:02; LIN28A; ENSG00000131914; CTA
EAVEFTFK

SEQ ID NO: 35716 - protein, 8 aa, Homo sapiens
  misc_feature: Table A; Target 35716; HLA-B*51:01; LIN28A; ENSG00000131914; CTA
EAVEFTFK

SEQ ID NO: 35717 - protein, 8 aa, Homo sapiens
  misc_feature: Table A; Target 35717; HLA-C*07:01; LIN28A; ENSG00000131914; CTA
EAVEFTFK

SEQ ID NO: 35718 - protein, 9 aa, Homo sapiens
  misc_feature: Table A; Target 35718; HLA-A*11:01; LIN28A; ENSG00000131914; CTA
EAVEFTFKK

SEQ ID NO: 35719 - protein, 9 aa, Homo sapiens
  misc_feature: Table A; Target 35719; HLA-A*26:01; LIN28A; ENSG00000131914; CTA
EAVEFTFKK

SEQ ID NO: 35720 - protein, 9 aa, Homo sapiens
  misc_feature: Table A; Target 35720; HLA-A*33:01; LIN28A; ENSG00000131914; CTA
EAVEFTFKK

SEQ ID NO: 35721 - protein, 9 aa, Homo sapiens
  misc_feature: Table A; Target 35721; HLA-A*33:03; LIN28A; ENSG00000131914; CTA
EAVEFTFKK

SEQ ID NO: 35722 - protein, 9 aa, Homo sapiens
  misc_feature: Table A; Target 35722; HLA-A*68:01; LIN28A; ENSG00000131914; CTA
EAVEFTFKK

SEQ ID NO: 35723 - protein, 9 aa, Homo sapiens
  misc_feature: Table A; Target 35723; HLA-A*68:02; LIN28A; ENSG00000131914; CTA
EAVEFTFKK

SEQ ID NO: 35724 - protein, 9 aa, Homo sapiens
  misc_feature: Table A; Target 35724; HLA-C*07:06; LIN28A; ENSG00000131914; CTA
EAVEFTFKK

SEQ ID NO: 35725 - protein, 11 aa, Homo sapiens
  misc_feature: Table A; Target 35725; HLA-B*54:01; LIN28A; ENSG00000131914; CTA
EAVEFTFKKSA

SEQ ID NO: 35726 - protein, 9 aa, Homo sapiens
  misc_feature: Table A; Target 35726; HLA-A*33:01; LIN28A; ENSG00000131914; CTA
ECKLPPQPK

SEQ ID NO: 35727 - protein, 11 aa, Homo sapiens
  misc_feature: Table A; Target 35727; HLA-B*39:01; LIN28A; ENSG00000131914; CTA
EEAPEEAPEDA

SEQ ID NO: 35728 - protein, 11 aa, Homo sapiens
  misc_feature: Table A; Target 35728; HLA-A*30:01; LIN28A; ENSG00000131914; CTA
EEEEEIHSPTL

SEQ ID NO: 35729 - protein, 11 aa, Homo sapiens
  misc_feature: Table A; Target 35729; HLA-B*40:01; LIN28A; ENSG00000131914; CTA
EEEEEIHSPTL

SEQ ID NO: 35730 - protein, 11 aa, Homo sapiens
  misc_feature: Table A; Target 35730; HLA-B*44:02; LIN28A; ENSG00000131914; CTA
EEEEEIHSPTL

SEQ ID NO: 35731 - protein, 11 aa, Homo sapiens
  misc_feature: Table A; Target 35731; HLA-B*44:03; LIN28A; ENSG00000131914; CTA
EEEEEIHSPTL

SEQ ID NO: 35732 - protein, 10 aa, Homo sapiens
  misc_feature: Table A; Target 35732; HLA-A*30:01; LIN28A; ENSG00000131914; CTA
EEEEIHSPTL

SEQ ID NO: 35733 - protein, 10 aa, Homo sapiens
  misc_feature: Table A; Target 35733; HLA-B*18:01; LIN28A; ENSG00000131914; CTA
EEEEIHSPTL

SEQ ID NO: 35734 - protein, 10 aa, Homo sapiens
  misc_feature: Table A; Target 35734; HLA-B*38:01; LIN28A; ENSG00000131914; CTA
EEEEIHSPTL

SEQ ID NO: 35735 - protein, 10 aa, Homo sapiens
  misc_feature: Table A; Target 35735; HLA-B*40:01; LIN28A; ENSG00000131914; CTA
EEEEIHSPTL

SEQ ID NO: 35736 - protein, 10 aa, Homo sapiens
  misc_feature: Table A; Target 35736; HLA-B*40:02; LIN28A; ENSG00000131914; CTA
EEEEIHSPTL

SEQ ID NO: 35737 - protein, 10 aa, Homo sapiens
  misc_feature: Table A; Target 35737; HLA-B*44:02; LIN28A; ENSG00000131914; CTA
EEEEIHSPTL

SEQ ID NO: 35738 - protein, 10 aa, Homo sapiens
  misc_feature: Table A; Target 35738; HLA-B*44:03; LIN28A; ENSG00000131914; CTA
EEEEIHSPTL

SEQ ID NO: 35739 - protein, 10 aa, Homo sapiens
  misc_feature: Table A; Target 35739; HLA-B*49:01; LIN28A; ENSG00000131914; CTA
EEEEIHSPTL

SEQ ID NO: 35740 - protein, 11 aa, Homo sapiens
  misc_feature: Table A; Target 35740; HLA-B*40:01; LIN28A; ENSG00000131914; CTA
EEEEIHSPTLL

SEQ ID NO: 35741 - protein, 9 aa, Homo sapiens
  misc_feature: Table A; Target 35741; HLA-A*30:01; LIN28A; ENSG00000131914; CTA
EEEIHSPTL

SEQ ID NO: 35742 - protein, 9 aa, Homo sapiens
  misc_feature: Table A; Target 35742; HLA-B*18:01; LIN28A; ENSG00000131914; CTA
EEEIHSPTL

SEQ ID NO: 35743 - protein, 9 aa, Homo sapiens
  misc_feature: Table A; Target 35743; HLA-B*27:02; LIN28A; ENSG00000131914; CTA
EEEIHSPTL

SEQ ID NO: 35744 - protein, 9 aa, Homo sapiens
  misc_feature: Table A; Target 35744; HLA-B*37:01; LIN28A; ENSG00000131914; CTA
EEEIHSPTL

SEQ ID NO: 35745 - protein, 9 aa, Homo sapiens
  misc_feature: Table A; Target 35745; HLA-B*38:01; LIN28A; ENSG00000131914; CTA
EEEIHSPTL

SEQ ID NO: 35746 - protein, 9 aa, Homo sapiens
  misc_feature: Table A; Target 35746; HLA-B*39:01; LIN28A; ENSG00000131914; CTA
EEEIHSPTL

SEQ ID NO: 35747 - protein, 9 aa, Homo sapiens
  misc_feature: Table A; Target 35747; HLA-B*40:01; LIN28A; ENSG00000131914; CTA
EEEIHSPTL

SEQ ID NO: 35748 - protein, 9 aa, Homo sapiens
  misc_feature: Table A; Target 35748; HLA-B*40:02; LIN28A; ENSG00000131914; CTA
EEEIHSPTL

SEQ ID NO: 35749 - protein, 9 aa, Homo sapiens
  misc_feature: Table A; Target 35749; HLA-B*44:02; LIN28A; ENSG00000131914; CTA
EEEIHSPTL

SEQ ID NO: 35750 - protein, 9 aa, Homo sapiens
  misc_feature: Table A; Target 35750; HLA-B*44:03; LIN28A; ENSG00000131914; CTA
EEEIHSPTL

SEQ ID NO: 35751 - protein, 9 aa, Homo sapiens
  misc_feature: Table A; Target 35751; HLA-B*49:01; LIN28A; ENSG00000131914; CTA
EEEIHSPTL

SEQ ID NO: 35752 - protein, 9 aa, Homo sapiens
  misc_feature: Table A; Target 35752; HLA-C*16:04; LIN28A; ENSG00000131914; CTA
EEEIHSPTL

SEQ ID NO: 35753 - protein, 10 aa, Homo sapiens
  misc_feature: Table A; Target 35753; HLA-B*40:01; LIN28A; ENSG00000131914; CTA
EEEIHSPTLL

SEQ ID NO: 35754 - protein, 8 aa, Homo sapiens
  misc_feature: Table A; Target 35754; HLA-A*30:01; LIN28A; ENSG00000131914; CTA
EEIHSPTL

SEQ ID NO: 35755 - protein, 8 aa, Homo sapiens
  misc_feature: Table A; Target 35755; HLA-B*18:01; LIN28A; ENSG00000131914; CTA
EEIHSPTL

SEQ ID NO: 35756 - protein, 8 aa, Homo sapiens
  misc_feature: Table A; Target 35756; HLA-B*40:01; LIN28A; ENSG00000131914; CTA
EEIHSPTL

SEQ ID NO: 35757 - protein, 8 aa, Homo sapiens
  misc_feature: Table A; Target 35757; HLA-B*40:02; LIN28A; ENSG00000131914; CTA
EEIHSPTL

SEQ ID NO: 35758 - protein, 8 aa, Homo sapiens
  misc_feature: Table A; Target 35758; HLA-B*44:02; LIN28A; ENSG00000131914; CTA
EEIHSPTL

SEQ ID NO: 35759 - protein, 8 aa, Homo sapiens
  misc_feature: Table A; Target 35759; HLA-B*44:03; LIN28A; ENSG00000131914; CTA
EEIHSPTL

SEQ ID NO: 35760 - protein, 8 aa, Homo sapiens
  misc_feature: Table A; Target 35760; HLA-B*49:01; LIN28A; ENSG00000131914; CTA
EEIHSPTL

SEQ ID NO: 35761 - protein, 8 aa, Homo sapiens
  misc_feature: Table A; Target 35761; HLA-C*16:04; LIN28A; ENSG00000131914; CTA
EEIHSPTL

SEQ ID NO: 35762 - protein, 9 aa, Homo sapiens
  misc_feature: Table A; Target 35762; HLA-A*25:01; LIN28A; ENSG00000131914; CTA
EEIHSPTLL

SEQ ID NO: 35763 - protein, 9 aa, Homo sapiens
  misc_feature: Table A; Target 35763; HLA-A*26:01; LIN28A; ENSG00000131914; CTA
EEIHSPTLL

SEQ ID NO: 35764 - protein, 9 aa, Homo sapiens
  misc_feature: Table A; Target 35764; HLA-A*30:01; LIN28A; ENSG00000131914; CTA
EEIHSPTLL

SEQ ID NO: 35765 - protein, 9 aa, Homo sapiens
  misc_feature: Table A; Target 35765; HLA-B*18:01; LIN28A; ENSG00000131914; CTA
EEIHSPTLL

SEQ ID NO: 35766 - protein, 9 aa, Homo sapiens
  misc_feature: Table A; Target 35766; HLA-B*40:01; LIN28A; ENSG00000131914; CTA
EEIHSPTLL

SEQ ID NO: 35767 - protein, 9 aa, Homo sapiens
  misc_feature: Table A; Target 35767; HLA-B*40:02; LIN28A; ENSG00000131914; CTA
EEIHSPTLL

SEQ ID NO: 35768 - protein, 9 aa, Homo sapiens
  misc_feature: Table A; Target 35768; HLA-B*44:02; LIN28A; ENSG00000131914; CTA
EEIHSPTLL

SEQ ID NO: 35769 - protein, 9 aa, Homo sapiens
  misc_feature: Table A; Target 35769; HLA-B*44:03; LIN28A; ENSG00000131914; CTA
EEIHSPTLL

SEQ ID NO: 35770 - protein, 9 aa, Homo sapiens
  misc_feature: Table A; Target 35770; HLA-B*49:01; LIN28A; ENSG00000131914; CTA
EEIHSPTLL

SEQ ID NO: 35771 - protein, 9 aa, Homo sapiens
  misc_feature: Table A; Target 35771; HLA-A*33:01; LIN28A; ENSG00000131914; CTA
EFTFKKSAK

SEQ ID NO: 35772 - protein, 9 aa, Homo sapiens
  misc_feature: Table A; Target 35772; HLA-A*33:03; LIN28A; ENSG00000131914; CTA
EFTFKKSAK

SEQ ID NO: 35773 - protein, 9 aa, Homo sapiens
  misc_feature: Table A; Target 35773; HLA-A*23:01; LIN28A; ENSG00000131914; CTA
EGEAVEFTF

SEQ ID NO: 35774 - protein, 9 aa, Homo sapiens
  misc_feature: Table A; Target 35774; HLA-B*35:03; LIN28A; ENSG00000131914; CTA
EGEAVEFTF

SEQ ID NO: 35775 - protein, 9 aa, Homo sapiens
  misc_feature: Table A; Target 35775; HLA-B*38:01; LIN28A; ENSG00000131914; CTA
EGEAVEFTF

SEQ ID NO: 35776 - protein, 9 aa, Homo sapiens
  misc_feature: Table A; Target 35776; HLA-C*05:01; LIN28A; ENSG00000131914; CTA
EGEAVEFTF

SEQ ID NO: 35777 - protein, 10 aa, Homo sapiens
  misc_feature: Table A; Target 35777; HLA-B*27:02; LIN28A; ENSG00000131914; CTA
EGEAVEFTFK

SEQ ID NO: 35778 - protein, 8 aa, Homo sapiens
  misc_feature: Table A; Target 35778; HLA-B*54:01; LIN28A; ENSG00000131914; CTA
EPQLLHGA

SEQ ID NO: 35779 - protein, 8 aa, Homo sapiens
  misc_feature: Table A; Target 35779; HLA-B*55:01; LIN28A; ENSG00000131914; CTA
EPQLLHGA

SEQ ID NO: 35780 - protein, 8 aa, Homo sapiens
  misc_feature: Table A; Target 35780; HLA-B*56:01; LIN28A; ENSG00000131914; CTA
EPQLLHGA

SEQ ID NO: 35781 - protein, 9 aa, Homo sapiens
  misc_feature: Table A; Target 35781; HLA-C*03:03; LIN28A; ENSG00000131914; CTA
FAGGCAKAA

SEQ ID NO: 35782 - protein, 9 aa, Homo sapiens
  misc_feature: Table A; Target 35782; HLA-C*04:01; LIN28A; ENSG00000131914; CTA
FCQSISHMV

SEQ ID NO: 35783 - protein, 9 aa, Homo sapiens
  misc_feature: Table A; Target 35783; HLA-C*12:03; LIN28A; ENSG00000131914; CTA
FCQSISHMV

SEQ ID NO: 35784 - protein, 8 aa, Homo sapiens
  misc_feature: Table A; Target 35784; HLA-B*40:02; LIN28A; ENSG00000131914; CTA
FGFLSMTA

SEQ ID NO: 35785 - protein, 8 aa, Homo sapiens
  misc_feature: Table A; Target 35785; HLA-B*54:01; LIN28A; ENSG00000131914; CTA
FGFLSMTA

SEQ ID NO: 35786 - protein, 8 aa, Homo sapiens
  misc_feature: Table A; Target 35786; HLA-B*56:01; LIN28A; ENSG00000131914; CTA
FGFLSMTA

SEQ ID NO: 35787 - protein, 8 aa, Homo sapiens
  misc_feature: Table A; Target 35787; HLA-C*03:04; LIN28A; ENSG00000131914; CTA
FGFLSMTA

SEQ ID NO: 35788 - protein, 8 aa, Homo sapiens
  misc_feature: Table A; Target 35788; HLA-C*06:02; LIN28A; ENSG00000131914; CTA
FGFLSMTA

SEQ ID NO: 35789 - protein, 8 aa, Homo sapiens
  misc_feature: Table A; Target 35789; HLA-C*12:03; LIN28A; ENSG00000131914; CTA
FGFLSMTA

SEQ ID NO: 35790 - protein, 9 aa, Homo sapiens
  misc_feature: Table A; Target 35790; HLA-A*31:01; LIN28A; ENSG00000131914; CTA
FGFLSMTAR

SEQ ID NO: 35791 - protein, 9 aa, Homo sapiens
  misc_feature: Table A; Target 35791; HLA-A*33:01; LIN28A; ENSG00000131914; CTA
FGFLSMTAR

SEQ ID NO: 35792 - protein, 9 aa, Homo sapiens
  misc_feature: Table A; Target 35792; HLA-A*68:01; LIN28A; ENSG00000131914; CTA
FGFLSMTAR

SEQ ID NO: 35793 - protein, 9 aa, Homo sapiens
  misc_feature: Table A; Target 35793; HLA-B*27:02; LIN28A; ENSG00000131914; CTA
FGFLSMTAR

SEQ ID NO: 35794 - protein, 9 aa, Homo sapiens
  misc_feature: Table A; Target 35794; HLA-B*27:05; LIN28A; ENSG00000131914; CTA
FGFLSMTAR

SEQ ID NO: 35795 - protein, 9 aa, Homo sapiens
  misc_feature: Table A; Target 35795; HLA-B*46:01; LIN28A; ENSG00000131914; CTA
FGFLSMTAR

SEQ ID NO: 35796 - protein, 9 aa, Homo sapiens
  misc_feature: Table A; Target 35796; HLA-B*54:01; LIN28A; ENSG00000131914; CTA
FGFLSMTAR

SEQ ID NO: 35797 - protein, 9 aa, Homo sapiens
  misc_feature: Table A; Target 35797; HLA-C*07:06; LIN28A; ENSG00000131914; CTA
FGFLSMTAR

SEQ ID NO: 35798 - protein, 10 aa, Homo sapiens
  misc_feature: Table A; Target 35798; HLA-B*54:01; LIN28A; ENSG00000131914; CTA
FGFLSMTARA

SEQ ID NO: 35799 - protein, 10 aa, Homo sapiens
  misc_feature: Table A; Target 35799; HLA-A*02:03; LIN28A; ENSG00000131914; CTA
FLSMTARAGV

SEQ ID NO: 35800 - protein, 8 aa, Homo sapiens
  misc_feature: Table A; Target 35800; HLA-A*30:01; LIN28A; ENSG00000131914; CTA
GEAVEFTF

SEQ ID NO: 35801 - protein, 8 aa, Homo sapiens
  misc_feature: Table A; Target 35801; HLA-B*13:02; LIN28A; ENSG00000131914; CTA
GEAVEFTF

SEQ ID NO: 35802 - protein, 8 aa, Homo sapiens
  misc_feature: Table A; Target 35802; HLA-B*18:01; LIN28A; ENSG00000131914; CTA
GEAVEFTF

SEQ ID NO: 35803 - protein, 8 aa, Homo sapiens
  misc_feature: Table A; Target 35803; HLA-B*27:02; LIN28A; ENSG00000131914; CTA
GEAVEFTF

SEQ ID NO: 35804 - protein, 8 aa, Homo sapiens
  misc_feature: Table A; Target 35804; HLA-B*27:05; LIN28A; ENSG00000131914; CTA
GEAVEFTF

SEQ ID NO: 35805 - protein, 8 aa, Homo sapiens
  misc_feature: Table A; Target 35805; HLA-B*37:01; LIN28A; ENSG00000131914; CTA
GEAVEFTF

SEQ ID NO: 35806 - protein, 8 aa, Homo sapiens
  misc_feature: Table A; Target 35806; HLA-B*40:01; LIN28A; ENSG00000131914; CTA
GEAVEFTF

SEQ ID NO: 35807 - protein, 8 aa, Homo sapiens
  misc_feature: Table A; Target 35807; HLA-B*40:02; LIN28A; ENSG00000131914; CTA
GEAVEFTF

SEQ ID NO: 35808 - protein, 8 aa, Homo sapiens
  misc_feature: Table A; Target 35808; HLA-B*44:02; LIN28A; ENSG00000131914; CTA
GEAVEFTF

SEQ ID NO: 35809 - protein, 8 aa, Homo sapiens
  misc_feature: Table A; Target 35809; HLA-B*44:03; LIN28A; ENSG00000131914; CTA
GEAVEFTF

SEQ ID NO: 35810 - protein, 8 aa, Homo sapiens
  misc_feature: Table A; Target 35810; HLA-B*49:01; LIN28A; ENSG00000131914; CTA
GEAVEFTF

SEQ ID NO: 35811 - protein, 8 aa, Homo sapiens
  misc_feature: Table A; Target 35811; HLA-C*16:04; LIN28A; ENSG00000131914; CTA
GEAVEFTF

SEQ ID NO: 35812 - protein, 9 aa, Homo sapiens
  misc_feature: Table A; Target 35812; HLA-B*27:05; LIN28A; ENSG00000131914; CTA
GEAVEFTFK

SEQ ID NO: 35813 - protein, 9 aa, Homo sapiens
  misc_feature: Table A; Target 35813; HLA-B*49:01; LIN28A; ENSG00000131914; CTA
GEAVEFTFK

SEQ ID NO: 35814 - protein, 10 aa, Homo sapiens
  misc_feature: Table A; Target 35814; HLA-B*27:02; LIN28A; ENSG00000131914; CTA
GEAVEFTFKK

SEQ ID NO: 35815 - protein, 8 aa, Homo sapiens
  misc_feature: Table A; Target 35815; HLA-A*31:01; LIN28A; ENSG00000131914; CTA
GFLSMTAR

SEQ ID NO: 35816 - protein, 8 aa, Homo sapiens
  misc_feature: Table A; Target 35816; HLA-B*27:05; LIN28A; ENSG00000131914; CTA
GGLDHHAK

SEQ ID NO: 35817 - protein, 10 aa, Homo sapiens
  misc_feature: Table A; Target 35817; HLA-A*30:02; LIN28A; ENSG00000131914; CTA
GPSAQGKPTY

SEQ ID NO: 35818 - protein, 10 aa, Homo sapiens
  misc_feature: Table A; Target 35818; HLA-B*07:02; LIN28A; ENSG00000131914; CTA
GPSAQGKPTY

SEQ ID NO: 35819 - protein, 10 aa, Homo sapiens
  misc_feature: Table A; Target 35819; HLA-B*15:01; LIN28A; ENSG00000131914; CTA
GPSAQGKPTY

SEQ ID NO: 35820 - protein, 10 aa, Homo sapiens
  misc_feature: Table A; Target 35820; HLA-B*35:01; LIN28A; ENSG00000131914; CTA
GPSAQGKPTY

SEQ ID NO: 35821 - protein, 10 aa, Homo sapiens
  misc_feature: Table A; Target 35821; HLA-B*44:03; LIN28A; ENSG00000131914; CTA
GPSAQGKPTY

SEQ ID NO: 35822 - protein, 10 aa, Homo sapiens
  misc_feature: Table A; Target 35822; HLA-B*55:01; LIN28A; ENSG00000131914; CTA
GPSAQGKPTY

SEQ ID NO: 35823 - protein, 10 aa, Homo sapiens
  misc_feature: Table A; Target 35823; HLA-C*07:02; LIN28A; ENSG00000131914; CTA
GPSAQGKPTY

SEQ ID NO: 35824 - protein, 11 aa, Homo sapiens
  misc_feature: Table A; Target 35824; HLA-B*07:02; LIN28A; ENSG00000131914; CTA
GPSAQGKPTYF

SEQ ID NO: 35825 - protein, 11 aa, Homo sapiens
  misc_feature: Table A; Target 35825; HLA-C*04:01; LIN28A; ENSG00000131914; CTA
GPSAQGKPTYF

SEQ ID NO: 35826 - protein, 11 aa, Homo sapiens
  misc_feature: Table A; Target 35826; HLA-C*07:02; LIN28A; ENSG00000131914; CTA
GPSAQGKPTYF

SEQ ID NO: 35827 - protein, 11 aa, Homo sapiens
  misc_feature: Table A; Target 35827; HLA-C*12:03; LIN28A; ENSG00000131914; CTA
GPSAQGKPTYF

SEQ ID NO: 35828 - protein, 8 aa, Homo sapiens
  misc_feature: Table A; Target 35828; HLA-B*58:01; LIN28A; ENSG00000131914; CTA
GSVSNQQF

SEQ ID NO: 35829 - protein, 11 aa, Homo sapiens
  misc_feature: Table A; Target 35829; HLA-B*39:01; LIN28A; ENSG00000131914; CTA
GVALDPPVDVF

SEQ ID NO: 35830 - protein, 9 aa, Homo sapiens
  misc_feature: Table A; Target 35830; HLA-A*68:01; LIN28A; ENSG00000131914; CTA
GVFCIGSER

SEQ ID NO: 35831 - protein, 9 aa, Homo sapiens
  misc_feature: Table A; Target 35831; HLA-C*07:06; LIN28A; ENSG00000131914; CTA
GVFCIGSER

SEQ ID NO: 35832 - protein, 9 aa, Homo sapiens
  misc_feature: Table A; Target 35832; HLA-A*03:01; LIN28A; ENSG00000131914; CTA
HMEGFRSLK

SEQ ID NO: 35833 - protein, 9 aa, Homo sapiens
  misc_feature: Table A; Target 35833; HLA-A*03:01; LIN28A; ENSG00000131914; CTA
HMVASCPLK

SEQ ID NO: 35834 - protein, 9 aa, Homo sapiens
  misc_feature: Table A; Target 35834; HLA-A*03:02; LIN28A; ENSG00000131914; CTA
HMVASCPLK

SEQ ID NO: 35835 - protein, 9 aa, Homo sapiens
  misc_feature: Table A; Target 35835; HLA-C*04:01; LIN28A; ENSG00000131914; CTA
HMVASCPLK

SEQ ID NO: 35836 - protein, 9 aa, Homo sapiens
  misc_feature: Table A; Target 35836; HLA-C*06:02; LIN28A; ENSG00000131914; CTA
HMVASCPLK

SEQ ID NO: 35837 - protein, 9 aa, Homo sapiens
  misc_feature: Table A; Target 35837; HLA-C*07:01; LIN28A; ENSG00000131914; CTA
HMVASCPLK

SEQ ID NO: 35838 - protein, 9 aa, Homo sapiens
  misc_feature: Table A; Target 35838; HLA-A*02:07; LIN28A; ENSG00000131914; CTA
HSPTLLPEA

SEQ ID NO: 35839 - protein, 9 aa, Homo sapiens
  misc_feature: Table A; Target 35839; HLA-B*54:01; LIN28A; ENSG00000131914; CTA
HSPTLLPEA

SEQ ID NO: 35840 - protein, 8 aa, Homo sapiens
  misc_feature: Table A; Target 35840; HLA-C*16:01; LIN28A; ENSG00000131914; CTA
IGSERRPK

SEQ ID NO: 35841 - protein, 10 aa, Homo sapiens
  misc_feature: Table A; Target 35841; HLA-B*07:02; LIN28A; ENSG00000131914; CTA
IRVTGPGGVF

SEQ ID NO: 35842 - protein, 10 aa, Homo sapiens
  misc_feature: Table A; Target 35842; HLA-B*15:03; LIN28A; ENSG00000131914; CTA
IRVTGPGGVF

SEQ ID NO: 35843 - protein, 10 aa, Homo sapiens
  misc_feature: Table A; Target 35843; HLA-B*27:02; LIN28A; ENSG00000131914; CTA
IRVTGPGGVF

SEQ ID NO: 35844 - protein, 10 aa, Homo sapiens
  misc_feature: Table A; Target 35844; HLA-B*27:05; LIN28A; ENSG00000131914; CTA
IRVTGPGGVF

SEQ ID NO: 35845 - protein, 10 aa, Homo sapiens
  misc_feature: Table A; Target 35845; HLA-B*38:01; LIN28A; ENSG00000131914; CTA
IRVTGPGGVF

SEQ ID NO: 35846 - protein, 10 aa, Homo sapiens
  misc_feature: Table A; Target 35846; HLA-B*39:01; LIN28A; ENSG00000131914; CTA
IRVTGPGGVF

SEQ ID NO: 35847 - protein, 10 aa, Homo sapiens
  misc_feature: Table A; Target 35847; HLA-C*03:03; LIN28A; ENSG00000131914; CTA
IRVTGPGGVF

SEQ ID NO: 35848 - protein, 10 aa, Homo sapiens
  misc_feature: Table A; Target 35848; HLA-C*03:04; LIN28A; ENSG00000131914; CTA
IRVTGPGGVF

SEQ ID NO: 35849 - protein, 10 aa, Homo sapiens
  misc_feature: Table A; Target 35849; HLA-C*06:02; LIN28A; ENSG00000131914; CTA
IRVTGPGGVF

SEQ ID NO: 35850 - protein, 10 aa, Homo sapiens
  misc_feature: Table A; Target 35850; HLA-C*07:01; LIN28A; ENSG00000131914; CTA
IRVTGPGGVF

SEQ ID NO: 35851 - protein, 10 aa, Homo sapiens
  misc_feature: Table A; Target 35851; HLA-C*07:04; LIN28A; ENSG00000131914; CTA
IRVTGPGGVF

SEQ ID NO: 35852 - protein, 10 aa, Homo sapiens
  misc_feature: Table A; Target 35852; HLA-C*12:03; LIN28A; ENSG00000131914; CTA
IRVTGPGGVF

SEQ ID NO: 35853 - protein, 10 aa, Homo sapiens
  misc_feature: Table A; Target 35853; HLA-C*16:04; LIN28A; ENSG00000131914; CTA
IRVTGPGGVF

SEQ ID NO: 35854 - protein, 10 aa, Homo sapiens
  misc_feature: Table A; Target 35854; HLA-C*06:02; LIN28A; ENSG00000131914; CTA
ISHMVASCPL

SEQ ID NO: 35855 - protein, 10 aa, Homo sapiens
  misc_feature: Table A; Target 35855; HLA-C*07:01; LIN28A; ENSG00000131914; CTA
ISHMVASCPL

SEQ ID NO: 35856 - protein, 11 aa, Homo sapiens
  misc_feature: Table A; Target 35856; HLA-A*03:02; LIN28A; ENSG00000131914; CTA
KAQQGPSAQGK

SEQ ID NO: 35857 - protein, 8 aa, Homo sapiens
  misc_feature: Table A; Target 35857; HLA-A*30:01; LIN28A; ENSG00000131914; CTA
KEGEAVEF

SEQ ID NO: 35858 - protein, 8 aa, Homo sapiens
  misc_feature: Table A; Target 35858; HLA-A*32:01; LIN28A; ENSG00000131914; CTA
KEGEAVEF

SEQ ID NO: 35859 - protein, 8 aa, Homo sapiens
  misc_feature: Table A; Target 35859; HLA-B*15:03; LIN28A; ENSG00000131914; CTA
KEGEAVEF

SEQ ID NO: 35860 - protein, 8 aa, Homo sapiens
  misc_feature: Table A; Target 35860; HLA-B*18:01; LIN28A; ENSG00000131914; CTA
KEGEAVEF

SEQ ID NO: 35861 - protein, 8 aa, Homo sapiens
  misc_feature: Table A; Target 35861; HLA-B*27:02; LIN28A; ENSG00000131914; CTA
KEGEAVEF

SEQ ID NO: 35862 - protein, 8 aa, Homo sapiens
  misc_feature: Table A; Target 35862; HLA-B*37:01; LIN28A; ENSG00000131914; CTA
KEGEAVEF

SEQ ID NO: 35863 - protein, 8 aa, Homo sapiens
  misc_feature: Table A; Target 35863; HLA-B*40:01; LIN28A; ENSG00000131914; CTA
KEGEAVEF

SEQ ID NO: 35864 - protein, 8 aa, Homo sapiens
  misc_feature: Table A; Target 35864; HLA-B*40:02; LIN28A; ENSG00000131914; CTA
KEGEAVEF

SEQ ID NO: 35865 - protein, 8 aa, Homo sapiens
  misc_feature: Table A; Target 35865; HLA-B*44:02; LIN28A; ENSG00000131914; CTA
KEGEAVEF

SEQ ID NO: 35866 - protein, 8 aa, Homo sapiens
  misc_feature: Table A; Target 35866; HLA-B*44:03; LIN28A; ENSG00000131914; CTA
KEGEAVEF

SEQ ID NO: 35867 - protein, 8 aa, Homo sapiens
  misc_feature: Table A; Target 35867; HLA-B*57:01; LIN28A; ENSG00000131914; CTA
KEGEAVEF

SEQ ID NO: 35868 - protein, 8 aa, Homo sapiens
  misc_feature: Table A; Target 35868; HLA-B*58:01; LIN28A; ENSG00000131914; CTA
KEGEAVEF

SEQ ID NO: 35869 - protein, 8 aa, Homo sapiens
  misc_feature: Table A; Target 35869; HLA-C*12:03; LIN28A; ENSG00000131914; CTA
KEGEAVEF

SEQ ID NO: 35870 - protein, 8 aa, Homo sapiens
  misc_feature: Table A; Target 35870; HLA-C*16:01; LIN28A; ENSG00000131914; CTA
KEGEAVEF

SEQ ID NO: 35871 - protein, 8 aa, Homo sapiens
  misc_feature: Table A; Target 35871; HLA-C*16:02; LIN28A; ENSG00000131914; CTA
KEGEAVEF

SEQ ID NO: 35872 - protein, 8 aa, Homo sapiens
  misc_feature: Table A; Target 35872; HLA-C*16:04; LIN28A; ENSG00000131914; CTA
KEGEAVEF

SEQ ID NO: 35873 - protein, 10 aa, Homo sapiens
  misc_feature: Table A; Target 35873; HLA-A*23:01; LIN28A; ENSG00000131914; CTA
KEGEAVEFTF

SEQ ID NO: 35874 - protein, 10 aa, Homo sapiens
  misc_feature: Table A; Target 35874; HLA-A*24:02; LIN28A; ENSG00000131914; CTA
KEGEAVEFTF

SEQ ID NO: 35875 - protein, 10 aa, Homo sapiens
  misc_feature: Table A; Target 35875; HLA-A*30:01; LIN28A; ENSG00000131914; CTA
KEGEAVEFTF

SEQ ID NO: 35876 - protein, 10 aa, Homo sapiens
  misc_feature: Table A; Target 35876; HLA-B*18:01; LIN28A; ENSG00000131914; CTA
KEGEAVEFTF

SEQ ID NO: 35877 - protein, 10 aa, Homo sapiens
  misc_feature: Table A; Target 35877; HLA-B*27:02; LIN28A; ENSG00000131914; CTA
KEGEAVEFTF

SEQ ID NO: 35878 - protein, 10 aa, Homo sapiens
  misc_feature: Table A; Target 35878; HLA-B*37:01; LIN28A; ENSG00000131914; CTA
KEGEAVEFTF

SEQ ID NO: 35879 - protein, 10 aa, Homo sapiens
  misc_feature: Table A; Target 35879; HLA-B*38:01; LIN28A; ENSG00000131914; CTA
KEGEAVEFTF

SEQ ID NO: 35880 - protein, 10 aa, Homo sapiens
  misc_feature: Table A; Target 35880; HLA-B*40:01; LIN28A; ENSG00000131914; CTA
KEGEAVEFTF

SEQ ID NO: 35881 - protein, 10 aa, Homo sapiens
  misc_feature: Table A; Target 35881; HLA-B*40:02; LIN28A; ENSG00000131914; CTA
KEGEAVEFTF

SEQ ID NO: 35882 - protein, 10 aa, Homo sapiens
  misc_feature: Table A; Target 35882; HLA-B*44:02; LIN28A; ENSG00000131914; CTA
KEGEAVEFTF

SEQ ID NO: 35883 - protein, 10 aa, Homo sapiens
  misc_feature: Table A; Target 35883; HLA-B*44:03; LIN28A; ENSG00000131914; CTA
KEGEAVEFTF

SEQ ID NO: 35884 - protein, 10 aa, Homo sapiens
  misc_feature: Table A; Target 35884; HLA-B*49:01; LIN28A; ENSG00000131914; CTA
KEGEAVEFTF

SEQ ID NO: 35885 - protein, 10 aa, Homo sapiens
  misc_feature: Table A; Target 35885; HLA-B*57:01; LIN28A; ENSG00000131914; CTA
KEGEAVEFTF

SEQ ID NO: 35886 - protein, 10 aa, Homo sapiens
  misc_feature: Table A; Target 35886; HLA-B*58:01; LIN28A; ENSG00000131914; CTA
KEGEAVEFTF

SEQ ID NO: 35887 - protein, 10 aa, Homo sapiens
  misc_feature: Table A; Target 35887; HLA-C*16:04; LIN28A; ENSG00000131914; CTA
KEGEAVEFTF

SEQ ID NO: 35888 - protein, 11 aa, Homo sapiens
  misc_feature: Table A; Target 35888; HLA-A*03:02; LIN28A; ENSG00000131914; CTA
KEGEAVEFTFK

SEQ ID NO: 35889 - protein, 11 aa, Homo sapiens
  misc_feature: Table A; Target 35889; HLA-A*32:01; LIN28A; ENSG00000131914; CTA
KGLESIRVTGP

SEQ ID NO: 35890 - protein, 11 aa, Homo sapiens
  misc_feature: Table A; Target 35890; HLA-C*04:01; LIN28A; ENSG00000131914; CTA
KGLESIRVTGP

SEQ ID NO: 35891 - protein, 9 aa, Homo sapiens
  misc_feature: Table A; Target 35891; HLA-B*40:02; LIN28A; ENSG00000131914; CTA
KSAKGLESI

SEQ ID NO: 35892 - protein, 9 aa, Homo sapiens
  misc_feature: Table A; Target 35892; HLA-B*58:01; LIN28A; ENSG00000131914; CTA
KSAKGLESI

SEQ ID NO: 35893 - protein, 8 aa, Homo sapiens
  misc_feature: Table A; Target 35893; HLA-B*37:01; LIN28A; ENSG00000131914; CTA
LDPPVDVF

SEQ ID NO: 35894 - protein, 8 aa, Homo sapiens
  misc_feature: Table A; Target 35894; HLA-C*12:03; LIN28A; ENSG00000131914; CTA
LDPPVDVF

SEQ ID NO: 35895 - protein, 9 aa, Homo sapiens
  misc_feature: Table A; Target 35895; HLA-A*02:07; LIN28A; ENSG00000131914; CTA
LDPPVDVFV

SEQ ID NO: 35896 - protein, 9 aa, Homo sapiens
  misc_feature: Table A; Target 35896; HLA-A*68:02; LIN28A; ENSG00000131914; CTA
LDPPVDVFV

SEQ ID NO: 35897 - protein, 9 aa, Homo sapiens
  misc_feature: Table A; Target 35897; HLA-C*04:01; LIN28A; ENSG00000131914; CTA
LDPPVDVFV

SEQ ID NO: 35898 - protein, 9 aa, Homo sapiens
  misc_feature: Table A; Target 35898; HLA-B*37:01; LIN28A; ENSG00000131914; CTA
LESIRVTGP

SEQ ID NO: 35899 - protein, 9 aa, Homo sapiens
  misc_feature: Table A; Target 35899; HLA-B*40:02; LIN28A; ENSG00000131914; CTA
LESIRVTGP

SEQ ID NO: 35900 - protein, 9 aa, Homo sapiens
  misc_feature: Table A; Target 35900; HLA-B*49:01; LIN28A; ENSG00000131914; CTA
LESIRVTGP

SEQ ID NO: 35901 - protein, 9 aa, Homo sapiens
  misc_feature: Table A; Target 35901; HLA-C*07:04; LIN28A; ENSG00000131914; CTA
LESIRVTGP

SEQ ID NO: 35902 - protein, 9 aa, Homo sapiens
  misc_feature: Table A; Target 35902; HLA-B*38:01; LIN28A; ENSG00000131914; CTA
LHMEGFRSL

SEQ ID NO: 35903 - protein, 9 aa, Homo sapiens
  misc_feature: Table A; Target 35903; HLA-C*03:04; LIN28A; ENSG00000131914; CTA
LHMEGFRSL

SEQ ID NO: 35904 - protein, 9 aa, Homo sapiens
  misc_feature: Table A; Target 35904; HLA-B*15:03; LIN28A; ENSG00000131914; CTA
LKEGEAVEF

SEQ ID NO: 35905 - protein, 9 aa, Homo sapiens
  misc_feature: Table A; Target 35905; HLA-B*38:01; LIN28A; ENSG00000131914; CTA
LKEGEAVEF

SEQ ID NO: 35906 - protein, 11 aa, Homo sapiens
  misc_feature: Table A; Target 35906; HLA-B*07:02; LIN28A; ENSG00000131914; CTA
LSMTARAGVAL

SEQ ID NO: 35907 - protein, 11 aa, Homo sapiens
  misc_feature: Table A; Target 35907; HLA-C*03:03; LIN28A; ENSG00000131914; CTA
LSMTARAGVAL

SEQ ID NO: 35908 - protein, 11 aa, Homo sapiens
  misc_feature: Table A; Target 35908; HLA-C*03:04; LIN28A; ENSG00000131914; CTA
LSMTARAGVAL

SEQ ID NO: 35909 - protein, 8 aa, Homo sapiens
  misc_feature: Table A; Target 35909; HLA-B*51:01; LIN28A; ENSG00000131914; CTA
MGFGFLSM

SEQ ID NO: 35910 - protein, 8 aa, Homo sapiens
  misc_feature: Table A; Target 35910; HLA-B*54:01; LIN28A; ENSG00000131914; CTA
MGFGFLSM

SEQ ID NO: 35911 - protein, 9 aa, Homo sapiens
  misc_feature: Table A; Target 35911; HLA-B*54:01; LIN28A; ENSG00000131914; CTA
MGFGFLSMT

SEQ ID NO: 35912 - protein, 10 aa, Homo sapiens
  misc_feature: Table A; Target 35912; HLA-B*54:01; LIN28A; ENSG00000131914; CTA
MGFGFLSMTA

SEQ ID NO: 35913 - protein, 11 aa, Homo sapiens
  misc_feature: Table A; Target 35913; HLA-A*31:01; LIN28A; ENSG00000131914; CTA
MGFGFLSMTAR

SEQ ID NO: 35914 - protein, 9 aa, Homo sapiens
  misc_feature: Table A; Target 35914; HLA-B*15:01; LIN28A; ENSG00000131914; CTA
MGSVSNQQF

SEQ ID NO: 35915 - protein, 9 aa, Homo sapiens
  misc_feature: Table A; Target 35915; HLA-B*27:05; LIN28A; ENSG00000131914; CTA
MGSVSNQQF

SEQ ID NO: 35916 - protein, 9 aa, Homo sapiens
  misc_feature: Table A; Target 35916; HLA-B*38:01; LIN28A; ENSG00000131914; CTA
MGSVSNQQF

SEQ ID NO: 35917 - protein, 9 aa, Homo sapiens
  misc_feature: Table A; Target 35917; HLA-C*04:01; LIN28A; ENSG00000131914; CTA
MGSVSNQQF

SEQ ID NO: 35918 - protein, 9 aa, Homo sapiens
  misc_feature: Table A; Target 35918; HLA-C*07:04; LIN28A; ENSG00000131914; CTA
MGSVSNQQF

SEQ ID NO: 35919 - protein, 9 aa, Homo sapiens
  misc_feature: Table A; Target 35919; HLA-C*14:02; LIN28A; ENSG00000131914; CTA
MGSVSNQQF

SEQ ID NO: 35920 - protein, 9 aa, Homo sapiens
  misc_feature: Table A; Target 35920; HLA-C*16:01; LIN28A; ENSG00000131914; CTA
MGSVSNQQF

SEQ ID NO: 35921 - protein, 9 aa, Homo sapiens
  misc_feature: Table A; Target 35921; HLA-A*25:01; LIN28A; ENSG00000131914; CTA
MTARAGVAL

SEQ ID NO: 35922 - protein, 9 aa, Homo sapiens
  misc_feature: Table A; Target 35922; HLA-B*07:02; LIN28A; ENSG00000131914; CTA
MTARAGVAL

SEQ ID NO: 35923 - protein, 9 aa, Homo sapiens
  misc_feature: Table A; Target 35923; HLA-B*35:03; LIN28A; ENSG00000131914; CTA
MTARAGVAL

SEQ ID NO: 35924 - protein, 9 aa, Homo sapiens
  misc_feature: Table A; Target 35924; HLA-B*46:01; LIN28A; ENSG00000131914; CTA
MTARAGVAL

SEQ ID NO: 35925 - protein, 9 aa, Homo sapiens
  misc_feature: Table A; Target 35925; HLA-B*58:01; LIN28A; ENSG00000131914; CTA
MTARAGVAL

SEQ ID NO: 35926 - protein, 9 aa, Homo sapiens
  misc_feature: Table A; Target 35926; HLA-C*01:02; LIN28A; ENSG00000131914; CTA
MTARAGVAL

SEQ ID NO: 35927 - protein, 9 aa, Homo sapiens
  misc_feature: Table A; Target 35927; HLA-C*02:02; LIN28A; ENSG00000131914; CTA
MTARAGVAL

SEQ ID NO: 35928 - protein, 9 aa, Homo sapiens
  misc_feature: Table A; Target 35928; HLA-C*03:03; LIN28A; ENSG00000131914; CTA
MTARAGVAL

SEQ ID NO: 35929 - protein, 9 aa, Homo sapiens
  misc_feature: Table A; Target 35929; HLA-C*03:04; LIN28A; ENSG00000131914; CTA
MTARAGVAL

SEQ ID NO: 35930 - protein, 9 aa, Homo sapiens
  misc_feature: Table A; Target 35930; HLA-C*07:04; LIN28A; ENSG00000131914; CTA
MTARAGVAL

SEQ ID NO: 35931 - protein, 9 aa, Homo sapiens
  misc_feature: Table A; Target 35931; HLA-C*16:01; LIN28A; ENSG00000131914; CTA
MTARAGVAL

SEQ ID NO: 35932 - protein, 8 aa, Homo sapiens
  misc_feature: Table A; Target 35932; HLA-A*03:02; LIN28A; ENSG00000131914; CTA
MVASCPLK

SEQ ID NO: 35933 - protein, 9 aa, Homo sapiens
  misc_feature: Table A; Target 35933; HLA-B*13:02; LIN28A; ENSG00000131914; CTA
MVASCPLKA

SEQ ID NO: 35934 - protein, 9 aa, Homo sapiens
  misc_feature: Table A; Target 35934; HLA-B*54:01; LIN28A; ENSG00000131914; CTA
MVASCPLKA

SEQ ID NO: 35935 - protein, 9 aa, Homo sapiens
  misc_feature: Table A; Target 35935; HLA-C*06:02; LIN28A; ENSG00000131914; CTA
MVASCPLKA

SEQ ID NO: 35936 - protein, 10 aa, Homo sapiens
  misc_feature: Table A; Target 35936; HLA-B*27:05; LIN28A; ENSG00000131914; CTA
NQQFAGGCAK

SEQ ID NO: 35937 - protein, 10 aa, Homo sapiens
  misc_feature: Table A; Target 35937; HLA-B*27:02; LIN28A; ENSG00000131914; CTA
PEEAPEDAAR

SEQ ID NO: 35938 - protein, 9 aa, Homo sapiens
  misc_feature: Table A; Target 35938; HLA-A*01:01; LIN28A; ENSG00000131914; CTA
PSAQGKPTY

SEQ ID NO: 35939 - protein, 9 aa, Homo sapiens
  misc_feature: Table A; Target 35939; HLA-A*30:02; LIN28A; ENSG00000131914; CTA
PSAQGKPTY

SEQ ID NO: 35940 - protein, 9 aa, Homo sapiens
  misc_feature: Table A; Target 35940; HLA-A*32:01; LIN28A; ENSG00000131914; CTA
PSAQGKPTY

SEQ ID NO: 35941 - protein, 9 aa, Homo sapiens
  misc_feature: Table A; Target 35941; HLA-B*15:01; LIN28A; ENSG00000131914; CTA
PSAQGKPTY

SEQ ID NO: 35942 - protein, 9 aa, Homo sapiens
  misc_feature: Table A; Target 35942; HLA-B*58:01; LIN28A; ENSG00000131914; CTA
PSAQGKPTY

SEQ ID NO: 35943 - protein, 9 aa, Homo sapiens
  misc_feature: Table A; Target 35943; HLA-C*16:01; LIN28A; ENSG00000131914; CTA
PSAQGKPTY

SEQ ID NO: 35944 - protein, 9 aa, Homo sapiens
  misc_feature: Table A; Target 35944; HLA-C*16:02; LIN28A; ENSG00000131914; CTA
PSAQGKPTY

SEQ ID NO: 35945 - protein, 10 aa, Homo sapiens
  misc_feature: Table A; Target 35945; HLA-B*07:02; LIN28A; ENSG00000131914; CTA
PSAQGKPTYF

SEQ ID NO: 35946 - protein, 10 aa, Homo sapiens
  misc_feature: Table A; Target 35946; HLA-C*07:02; LIN28A; ENSG00000131914; CTA
PSAQGKPTYF

SEQ ID NO: 35947 - protein, 9 aa, Homo sapiens
  misc_feature: Table A; Target 35947; HLA-C*07:01; LIN28A; ENSG00000131914; CTA
PTLLPEAQN

SEQ ID NO: 35948 - protein, 8 aa, Homo sapiens
  misc_feature: Table A; Target 35948; HLA-A*31:01; LIN28A; ENSG00000131914; CTA
QGKPTYFR

SEQ ID NO: 35949 - protein, 11 aa, Homo sapiens
  misc_feature: Table A; Target 35949; HLA-A*30:02; LIN28A; ENSG00000131914; CTA
QGPSAQGKPTY

SEQ ID NO: 35950 - protein, 11 aa, Homo sapiens
  misc_feature: Table A; Target 35950; HLA-C*04:01; LIN28A; ENSG00000131914; CTA
QGPSAQGKPTY

SEQ ID NO: 35951 - protein, 11 aa, Homo sapiens
  misc_feature: Table A; Target 35951; HLA-C*07:01; LIN28A; ENSG00000131914; CTA
QGPSAQGKPTY

SEQ ID NO: 35952 - protein, 9 aa, Homo sapiens
  misc_feature: Table A; Target 35952; HLA-A*03:01; LIN28A; ENSG00000131914; CTA
QQFAGGCAK

SEQ ID NO: 35953 - protein, 9 aa, Homo sapiens
  misc_feature: Table A; Target 35953; HLA-A*03:02; LIN28A; ENSG00000131914; CTA
QQFAGGCAK

SEQ ID NO: 35954 - protein, 9 aa, Homo sapiens
  misc_feature: Table A; Target 35954; HLA-A*11:01; LIN28A; ENSG00000131914; CTA
QQFAGGCAK

SEQ ID NO: 35955 - protein, 9 aa, Homo sapiens
  misc_feature: Table A; Target 35955; HLA-A*30:02; LIN28A; ENSG00000131914; CTA
QQFAGGCAK

SEQ ID NO: 35956 - protein, 9 aa, Homo sapiens
  misc_feature: Table A; Target 35956; HLA-A*31:01; LIN28A; ENSG00000131914; CTA
QQFAGGCAK

SEQ ID NO: 35957 - protein, 9 aa, Homo sapiens
  misc_feature: Table A; Target 35957; HLA-B*13:02; LIN28A; ENSG00000131914; CTA
QQFAGGCAK

SEQ ID NO: 35958 - protein, 9 aa, Homo sapiens
  misc_feature: Table A; Target 35958; HLA-B*15:01; LIN28A; ENSG00000131914; CTA
QQFAGGCAK

SEQ ID NO: 35959 - protein, 9 aa, Homo sapiens
  misc_feature: Table A; Target 35959; HLA-B*15:03; LIN28A; ENSG00000131914; CTA
QQFAGGCAK

SEQ ID NO: 35960 - protein, 9 aa, Homo sapiens
  misc_feature: Table A; Target 35960; HLA-B*27:05; LIN28A; ENSG00000131914; CTA
QQFAGGCAK

SEQ ID NO: 35961 - protein, 9 aa, Homo sapiens
  misc_feature: Table A; Target 35961; HLA-B*39:01; LIN28A; ENSG00000131914; CTA
QQFAGGCAK

SEQ ID NO: 35962 - protein, 9 aa, Homo sapiens
  misc_feature: Table A; Target 35962; HLA-C*03:03; LIN28A; ENSG00000131914; CTA
QQFAGGCAK

SEQ ID NO: 35963 - protein, 9 aa, Homo sapiens
  misc_feature: Table A; Target 35963; HLA-C*03:04; LIN28A; ENSG00000131914; CTA
QQFAGGCAK

SEQ ID NO: 35964 - protein, 9 aa, Homo sapiens
  misc_feature: Table A; Target 35964; HLA-C*06:02; LIN28A; ENSG00000131914; CTA
QQFAGGCAK

SEQ ID NO: 35965 - protein, 9 aa, Homo sapiens
  misc_feature: Table A; Target 35965; HLA-C*07:04; LIN28A; ENSG00000131914; CTA
QQFAGGCAK

SEQ ID NO: 35966 - protein, 9 aa, Homo sapiens
  misc_feature: Table A; Target 35966; HLA-C*07:06; LIN28A; ENSG00000131914; CTA
QQFAGGCAK

SEQ ID NO: 35967 - protein, 10 aa, Homo sapiens
  misc_feature: Table A; Target 35967; HLA-B*13:02; LIN28A; ENSG00000131914; CTA
QQFAGGCAKA

SEQ ID NO: 35968 - protein, 9 aa, Homo sapiens
  misc_feature: Table A; Target 35968; HLA-A*03:02; LIN28A; ENSG00000131914; CTA
QQGPSAQGK

SEQ ID NO: 35969 - protein, 8 aa, Homo sapiens
  misc_feature: Table A; Target 35969; HLA-B*40:02; LIN28A; ENSG00000131914; CTA
QSISHMVA

SEQ ID NO: 35970 - protein, 8 aa, Homo sapiens
  misc_feature: Table A; Target 35970; HLA-C*12:03; LIN28A; ENSG00000131914; CTA
QSISHMVA

SEQ ID NO: 35971 - protein, 9 aa, Homo sapiens
  misc_feature: Table A; Target 35971; HLA-B*08:01; LIN28A; ENSG00000131914; CTA
QSKLHMEGF

SEQ ID NO: 35972 - protein, 9 aa, Homo sapiens
  misc_feature: Table A; Target 35972; HLA-B*57:01; LIN28A; ENSG00000131914; CTA
QSKLHMEGF

SEQ ID NO: 35973 - protein, 9 aa, Homo sapiens
  misc_feature: Table A; Target 35973; HLA-C*07:01; LIN28A; ENSG00000131914; CTA
QSKLHMEGF

SEQ ID NO: 35974 - protein, 9 aa, Homo sapiens
  misc_feature: Table A; Target 35974; HLA-B*38:01; LIN28A; ENSG00000131914; CTA
RAADEPQLL

SEQ ID NO: 35975 - protein, 9 aa, Homo sapiens
  misc_feature: Table A; Target 35975; HLA-B*40:01; LIN28A; ENSG00000131914; CTA
RAADEPQLL

SEQ ID NO: 35976 - protein, 9 aa, Homo sapiens
  misc_feature: Table A; Target 35976; HLA-B*58:01; LIN28A; ENSG00000131914; CTA
RAADEPQLL

SEQ ID NO: 35977 - protein, 9 aa, Homo sapiens
  misc_feature: Table A; Target 35977; HLA-C*03:03; LIN28A; ENSG00000131914; CTA
RAADEPQLL

SEQ ID NO: 35978 - protein, 9 aa, Homo sapiens
  misc_feature: Table A; Target 35978; HLA-C*03:04; LIN28A; ENSG00000131914; CTA
RAADEPQLL

SEQ ID NO: 35979 - protein, 9 aa, Homo sapiens
  misc_feature: Table A; Target 35979; HLA-C*05:01; LIN28A; ENSG00000131914; CTA
RAADEPQLL

SEQ ID NO: 35980 - protein, 10 aa, Homo sapiens
  misc_feature: Table A; Target 35980; HLA-A*03:01; LIN28A; ENSG00000131914; CTA
RAADEPQLLH

SEQ ID NO: 35981 - protein, 10 aa, Homo sapiens
  misc_feature: Table A; Target 35981; HLA-A*11:01; LIN28A; ENSG00000131914; CTA
RAADEPQLLH

SEQ ID NO: 35982 - protein, 11 aa, Homo sapiens
  misc_feature: Table A; Target 35982; HLA-B*57:01; LIN28A; ENSG00000131914; CTA
RSLKEGEAVEF

SEQ ID NO: 35983 - protein, 11 aa, Homo sapiens
  misc_feature: Table A; Target 35983; HLA-B*58:01; LIN28A; ENSG00000131914; CTA
RSLKEGEAVEF

SEQ ID NO: 35984 - protein, 9 aa, Homo sapiens
  misc_feature: Table A; Target 35984; HLA-A*03:01; LIN28A; ENSG00000131914; CTA
RVTGPGGVF

SEQ ID NO: 35985 - protein, 9 aa, Homo sapiens
  misc_feature: Table A; Target 35985; HLA-A*25:01; LIN28A; ENSG00000131914; CTA
RVTGPGGVF

SEQ ID NO: 35986 - protein, 9 aa, Homo sapiens
  misc_feature: Table A; Target 35986; HLA-A*26:01; LIN28A; ENSG00000131914; CTA
RVTGPGGVF

SEQ ID NO: 35987 - protein, 9 aa, Homo sapiens
  misc_feature: Table A; Target 35987; HLA-A*30:02; LIN28A; ENSG00000131914; CTA
RVTGPGGVF

SEQ ID NO: 35988 - protein, 9 aa, Homo sapiens
  misc_feature: Table A; Target 35988; HLA-A*32:01; LIN28A; ENSG00000131914; CTA
RVTGPGGVF

SEQ ID NO: 35989 - protein, 9 aa, Homo sapiens
  misc_feature: Table A; Target 35989; HLA-B*07:02; LIN28A; ENSG00000131914; CTA
RVTGPGGVF

SEQ ID NO: 35990 - protein, 9 aa, Homo sapiens
  misc_feature: Table A; Target 35990; HLA-B*15:03; LIN28A; ENSG00000131914; CTA
RVTGPGGVF

SEQ ID NO: 35991 - protein, 9 aa, Homo sapiens
  misc_feature: Table A; Target 35991; HLA-B*27:05; LIN28A; ENSG00000131914; CTA
RVTGPGGVF

SEQ ID NO: 35992 - protein, 9 aa, Homo sapiens
  misc_feature: Table A; Target 35992; HLA-B*39:01; LIN28A; ENSG00000131914; CTA
RVTGPGGVF

SEQ ID NO: 35993 - protein, 9 aa, Homo sapiens
  misc_feature: Table A; Target 35993; HLA-B*40:02; LIN28A; ENSG00000131914; CTA
RVTGPGGVF

SEQ ID NO: 35994 - protein, 9 aa, Homo sapiens
  misc_feature: Table A; Target 35994; HLA-B*46:01; LIN28A; ENSG00000131914; CTA
RVTGPGGVF

SEQ ID NO: 35995 - protein, 9 aa, Homo sapiens
  misc_feature: Table A; Target 35995; HLA-B*57:01; LIN28A; ENSG00000131914; CTA
RVTGPGGVF

SEQ ID NO: 35996 - protein, 9 aa, Homo sapiens
  misc_feature: Table A; Target 35996; HLA-B*58:01; LIN28A; ENSG00000131914; CTA
RVTGPGGVF

SEQ ID NO: 35997 - protein, 9 aa, Homo sapiens
  misc_feature: Table A; Target 35997; HLA-C*01:02; LIN28A; ENSG00000131914; CTA
RVTGPGGVF

SEQ ID NO: 35998 - protein, 9 aa, Homo sapiens
  misc_feature: Table A; Target 35998; HLA-C*02:02; LIN28A; ENSG00000131914; CTA
RVTGPGGVF

SEQ ID NO: 35999 - protein, 9 aa, Homo sapiens
  misc_feature: Table A; Target 35999; HLA-C*03:03; LIN28A; ENSG00000131914; CTA
RVTGPGGVF

SEQ ID NO: 36000 - protein, 9 aa, Homo sapiens
  misc_feature: Table A; Target 36000; HLA-C*03:04; LIN28A; ENSG00000131914; CTA
RVTGPGGVF

SEQ ID NO: 36001 - protein, 9 aa, Homo sapiens
  misc_feature: Table A; Target 36001; HLA-C*04:01; LIN28A; ENSG00000131914; CTA
RVTGPGGVF

SEQ ID NO: 36002 - protein, 9 aa, Homo sapiens
  misc_feature: Table A; Target 36002; HLA-C*05:01; LIN28A; ENSG00000131914; CTA
RVTGPGGVF

SEQ ID NO: 36003 - protein, 9 aa, Homo sapiens
  misc_feature: Table A; Target 36003; HLA-C*07:02; LIN28A; ENSG00000131914; CTA
RVTGPGGVF

SEQ ID NO: 36004 - protein, 9 aa, Homo sapiens
  misc_feature: Table A; Target 36004; HLA-C*07:04; LIN28A; ENSG00000131914; CTA
RVTGPGGVF

SEQ ID NO: 36005 - protein, 9 aa, Homo sapiens
  misc_feature: Table A; Target 36005; HLA-C*12:03; LIN28A; ENSG00000131914; CTA
RVTGPGGVF

SEQ ID NO: 36006 - protein, 9 aa, Homo sapiens
  misc_feature: Table A; Target 36006; HLA-C*14:02; LIN28A; ENSG00000131914; CTA
RVTGPGGVF

SEQ ID NO: 36007 - protein, 9 aa, Homo sapiens
  misc_feature: Table A; Target 36007; HLA-C*16:01; LIN28A; ENSG00000131914; CTA
RVTGPGGVF

SEQ ID NO: 36008 - protein, 9 aa, Homo sapiens
  misc_feature: Table A; Target 36008; HLA-C*16:04; LIN28A; ENSG00000131914; CTA
RVTGPGGVF

SEQ ID NO: 36009 - protein, 9 aa, Homo sapiens
  misc_feature: Table A; Target 36009; HLA-A*31:01; LIN28A; ENSG00000131914; CTA
SAKGLESIR

SEQ ID NO: 36010 - protein, 9 aa, Homo sapiens
  misc_feature: Table A; Target 36010; HLA-A*33:03; LIN28A; ENSG00000131914; CTA
SAKGLESIR

SEQ ID NO: 36011 - protein, 9 aa, Homo sapiens
  misc_feature: Table A; Target 36011; HLA-A*68:01; LIN28A; ENSG00000131914; CTA
SAKGLESIR

SEQ ID NO: 36012 - protein, 9 aa, Homo sapiens
  misc_feature: Table A; Target 36012; HLA-C*07:06; LIN28A; ENSG00000131914; CTA
SAKGLESIR

SEQ ID NO: 36013 - protein, 9 aa, Homo sapiens
  misc_feature: Table A; Target 36013; HLA-C*12:03; LIN28A; ENSG00000131914; CTA
SAKGLESIR

SEQ ID NO: 36014 - protein, 8 aa, Homo sapiens
  misc_feature: Table A; Target 36014; HLA-A*30:02; LIN28A; ENSG00000131914; CTA
SAQGKPTY

SEQ ID NO: 36015 - protein, 8 aa, Homo sapiens
  misc_feature: Table A; Target 36015; HLA-A*32:01; LIN28A; ENSG00000131914; CTA
SAQGKPTY

SEQ ID NO: 36016 - protein, 8 aa, Homo sapiens
  misc_feature: Table A; Target 36016; HLA-C*16:01; LIN28A; ENSG00000131914; CTA
SAQGKPTY

SEQ ID NO: 36017 - protein, 8 aa, Homo sapiens
  misc_feature: Table A; Target 36017; HLA-C*16:02; LIN28A; ENSG00000131914; CTA
SAQGKPTY

SEQ ID NO: 36018 - protein, 9 aa, Homo sapiens
  misc_feature: Table A; Target 36018; HLA-A*03:02; LIN28A; ENSG00000131914; CTA
SAQGKPTYF

SEQ ID NO: 36019 - protein, 9 aa, Homo sapiens
  misc_feature: Table A; Target 36019; HLA-A*11:01; LIN28A; ENSG00000131914; CTA
SAQGKPTYF

SEQ ID NO: 36020 - protein, 9 aa, Homo sapiens
  misc_feature: Table A; Target 36020; HLA-A*26:01; LIN28A; ENSG00000131914; CTA
SAQGKPTYF

SEQ ID NO: 36021 - protein, 9 aa, Homo sapiens
  misc_feature: Table A; Target 36021; HLA-A*30:02; LIN28A; ENSG00000131914; CTA
SAQGKPTYF

SEQ ID NO: 36022 - protein, 9 aa, Homo sapiens
  misc_feature: Table A; Target 36022; HLA-A*31:01; LIN28A; ENSG00000131914; CTA
SAQGKPTYF

SEQ ID NO: 36023 - protein, 9 aa, Homo sapiens
  misc_feature: Table A; Target 36023; HLA-A*32:01; LIN28A; ENSG00000131914; CTA
SAQGKPTYF

SEQ ID NO: 36024 - protein, 9 aa, Homo sapiens
  misc_feature: Table A; Target 36024; HLA-A*33:01; LIN28A; ENSG00000131914; CTA
SAQGKPTYF

SEQ ID NO: 36025 - protein, 9 aa, Homo sapiens
  misc_feature: Table A; Target 36025; HLA-A*33:03; LIN28A; ENSG00000131914; CTA
SAQGKPTYF

SEQ ID NO: 36026 - protein, 9 aa, Homo sapiens
  misc_feature: Table A; Target 36026; HLA-B*46:01; LIN28A; ENSG00000131914; CTA
SAQGKPTYF

SEQ ID NO: 36027 - protein, 9 aa, Homo sapiens
  misc_feature: Table A; Target 36027; HLA-B*57:01; LIN28A; ENSG00000131914; CTA
SAQGKPTYF

SEQ ID NO: 36028 - protein, 9 aa, Homo sapiens
  misc_feature: Table A; Target 36028; HLA-B*58:01; LIN28A; ENSG00000131914; CTA
SAQGKPTYF

SEQ ID NO: 36029 - protein, 9 aa, Homo sapiens
  misc_feature: Table A; Target 36029; HLA-C*02:02; LIN28A; ENSG00000131914; CTA
SAQGKPTYF

SEQ ID NO: 36030 - protein, 9 aa, Homo sapiens
  misc_feature: Table A; Target 36030; HLA-C*04:01; LIN28A; ENSG00000131914; CTA
SAQGKPTYF

SEQ ID NO: 36031 - protein, 9 aa, Homo sapiens
  misc_feature: Table A; Target 36031; HLA-C*05:01; LIN28A; ENSG00000131914; CTA
SAQGKPTYF

SEQ ID NO: 36032 - protein, 9 aa, Homo sapiens
  misc_feature: Table A; Target 36032; HLA-C*07:04; LIN28A; ENSG00000131914; CTA
SAQGKPTYF

SEQ ID NO: 36033 - protein, 9 aa, Homo sapiens
  misc_feature: Table A; Target 36033; HLA-C*12:03; LIN28A; ENSG00000131914; CTA
SAQGKPTYF

SEQ ID NO: 36034 - protein, 9 aa, Homo sapiens
  misc_feature: Table A; Target 36034; HLA-C*16:01; LIN28A; ENSG00000131914; CTA
SAQGKPTYF

SEQ ID NO: 36035 - protein, 9 aa, Homo sapiens
  misc_feature: Table A; Target 36035; HLA-C*16:02; LIN28A; ENSG00000131914; CTA
SAQGKPTYF

SEQ ID NO: 36036 - protein, 9 aa, Homo sapiens
  misc_feature: Table A; Target 36036; HLA-C*16:04; LIN28A; ENSG00000131914; CTA
SAQGKPTYF

SEQ ID NO: 36037 - protein, 10 aa, Homo sapiens
  misc_feature: Table A; Target 36037; HLA-A*31:01; LIN28A; ENSG00000131914; CTA
SAQGKPTYFR

SEQ ID NO: 36038 - protein, 10 aa, Homo sapiens
  misc_feature: Table A; Target 36038; HLA-A*33:01; LIN28A; ENSG00000131914; CTA
SAQGKPTYFR

SEQ ID NO: 36039 - protein, 9 aa, Homo sapiens
  misc_feature: Table A; Target 36039; HLA-B*39:01; LIN28A; ENSG00000131914; CTA
SHMVASCPL

SEQ ID NO: 36040 - protein, 11 aa, Homo sapiens
  misc_feature: Table A; Target 36040; HLA-B*07:02; LIN28A; ENSG00000131914; CTA
SIRVTGPGGVF

SEQ ID NO: 36041 - protein, 11 aa, Homo sapiens
  misc_feature: Table A; Target 36041; HLA-B*15:01; LIN28A; ENSG00000131914; CTA
SIRVTGPGGVF

SEQ ID NO: 36042 - protein, 11 aa, Homo sapiens
  misc_feature: Table A; Target 36042; HLA-B*46:01; LIN28A; ENSG00000131914; CTA
SIRVTGPGGVF

SEQ ID NO: 36043 - protein, 11 aa, Homo sapiens
  misc_feature: Table A; Target 36043; HLA-C*07:02; LIN28A; ENSG00000131914; CTA
SIRVTGPGGVF

SEQ ID NO: 36044 - protein, 10 aa, Homo sapiens
  misc_feature: Table A; Target 36044; HLA-A*02:03; LIN28A; ENSG00000131914; CTA
SLKEGEAVEF

SEQ ID NO: 36045 - protein, 10 aa, Homo sapiens
  misc_feature: Table A; Target 36045; HLA-A*25:01; LIN28A; ENSG00000131914; CTA
SLKEGEAVEF

SEQ ID NO: 36046 - protein, 10 aa, Homo sapiens
  misc_feature: Table A; Target 36046; HLA-A*26:01; LIN28A; ENSG00000131914; CTA
SLKEGEAVEF

SEQ ID NO: 36047 - protein, 10 aa, Homo sapiens
  misc_feature: Table A; Target 36047; HLA-A*30:02; LIN28A; ENSG00000131914; CTA
SLKEGEAVEF

SEQ ID NO: 36048 - protein, 10 aa, Homo sapiens
  misc_feature: Table A; Target 36048; HLA-A*32:01; LIN28A; ENSG00000131914; CTA
SLKEGEAVEF

SEQ ID NO: 36049 - protein, 10 aa, Homo sapiens
  misc_feature: Table A; Target 36049; HLA-B*15:01; LIN28A; ENSG00000131914; CTA
SLKEGEAVEF

SEQ ID NO: 36050 - protein, 10 aa, Homo sapiens
  misc_feature: Table A; Target 36050; HLA-B*15:03; LIN28A; ENSG00000131914; CTA
SLKEGEAVEF

SEQ ID NO: 36051 - protein, 10 aa, Homo sapiens
  misc_feature: Table A; Target 36051; HLA-B*46:01; LIN28A; ENSG00000131914; CTA
SLKEGEAVEF

SEQ ID NO: 36052 - protein, 10 aa, Homo sapiens
  misc_feature: Table A; Target 36052; HLA-B*57:01; LIN28A; ENSG00000131914; CTA
SLKEGEAVEF

SEQ ID NO: 36053 - protein, 10 aa, Homo sapiens
  misc_feature: Table A; Target 36053; HLA-C*07:04; LIN28A; ENSG00000131914; CTA
SLKEGEAVEF

SEQ ID NO: 36054 - protein, 10 aa, Homo sapiens
  misc_feature: Table A; Target 36054; HLA-C*14:02; LIN28A; ENSG00000131914; CTA
SLKEGEAVEF

SEQ ID NO: 36055 - protein, 9 aa, Homo sapiens
  misc_feature: Table A; Target 36055; HLA-B*55:01; LIN28A; ENSG00000131914; CTA
SMTARAGVA

SEQ ID NO: 36056 - protein, 8 aa, Homo sapiens
  misc_feature: Table A; Target 36056; HLA-B*51:01; LIN28A; ENSG00000131914; CTA
SPTLLPEA

SEQ ID NO: 36057 - protein, 8 aa, Homo sapiens
  misc_feature: Table A; Target 36057; HLA-B*54:01; LIN28A; ENSG00000131914; CTA
SPTLLPEA

SEQ ID NO: 36058 - protein, 8 aa, Homo sapiens
  misc_feature: Table A; Target 36058; HLA-B*55:01; LIN28A; ENSG00000131914; CTA
SPTLLPEA

SEQ ID NO: 36059 - protein, 8 aa, Homo sapiens
  misc_feature: Table A; Target 36059; HLA-B*56:01; LIN28A; ENSG00000131914; CTA
SPTLLPEA

SEQ ID NO: 36060 - protein, 8 aa, Homo sapiens
  misc_feature: Table A; Target 36060; HLA-B*07:02; LIN28A; ENSG00000131914; CTA
TARAGVAL

SEQ ID NO: 36061 - protein, 8 aa, Homo sapiens
  misc_feature: Table A; Target 36061; HLA-B*08:01; LIN28A; ENSG00000131914; CTA
TARAGVAL

SEQ ID NO: 36062 - protein, 8 aa, Homo sapiens
  misc_feature: Table A; Target 36062; HLA-B*40:02; LIN28A; ENSG00000131914; CTA
TARAGVAL

SEQ ID NO: 36063 - protein, 8 aa, Homo sapiens
  misc_feature: Table A; Target 36063; HLA-B*46:01; LIN28A; ENSG00000131914; CTA
TARAGVAL

SEQ ID NO: 36064 - protein, 8 aa, Homo sapiens
  misc_feature: Table A; Target 36064; HLA-C*01:02; LIN28A; ENSG00000131914; CTA
TARAGVAL

SEQ ID NO: 36065 - protein, 8 aa, Homo sapiens
  misc_feature: Table A; Target 36065; HLA-C*03:03; LIN28A; ENSG00000131914; CTA
TARAGVAL

SEQ ID NO: 36066 - protein, 8 aa, Homo sapiens
  misc_feature: Table A; Target 36066; HLA-C*03:04; LIN28A; ENSG00000131914; CTA
TARAGVAL

SEQ ID NO: 36067 - protein, 8 aa, Homo sapiens
  misc_feature: Table A; Target 36067; HLA-C*07:02; LIN28A; ENSG00000131914; CTA
TARAGVAL

SEQ ID NO: 36068 - protein, 8 aa, Homo sapiens
  misc_feature: Table A; Target 36068; HLA-C*07:04; LIN28A; ENSG00000131914; CTA
TARAGVAL

SEQ ID NO: 36069 - protein, 8 aa, Homo sapiens
  misc_feature: Table A; Target 36069; HLA-C*14:02; LIN28A; ENSG00000131914; CTA
TARAGVAL

SEQ ID NO: 36070 - protein, 8 aa, Homo sapiens
  misc_feature: Table A; Target 36070; HLA-C*16:01; LIN28A; ENSG00000131914; CTA
TARAGVAL

SEQ ID NO: 36071 - protein, 8 aa, Homo sapiens
  misc_feature: Table A; Target 36071; HLA-C*16:02; LIN28A; ENSG00000131914; CTA
TARAGVAL

SEQ ID NO: 36072 - protein, 11 aa, Homo sapiens
  misc_feature: Table A; Target 36072; HLA-C*06:02; LIN28A; ENSG00000131914; CTA
TARAGVALDPP

SEQ ID NO: 36073 - protein, 9 aa, Homo sapiens
  misc_feature: Table A; Target 36073; HLA-B*13:02; LIN28A; ENSG00000131914; CTA
TGPGGVFCI

SEQ ID NO: 36074 - protein, 9 aa, Homo sapiens
  misc_feature: Table A; Target 36074; HLA-C*06:02; LIN28A; ENSG00000131914; CTA
TGPGGVFCI

SEQ ID NO: 36075 - protein, 10 aa, Homo sapiens
  misc_feature: Table A; Target 36075; HLA-C*04:01; LIN28A; ENSG00000131914; CTA
TGPGGVFCIG

SEQ ID NO: 36076 - protein, 10 aa, Homo sapiens
  misc_feature: Table A; Target 36076; HLA-C*06:02; LIN28A; ENSG00000131914; CTA
TGPGGVFCIG

SEQ ID NO: 36077 - protein, 10 aa, Homo sapiens
  misc_feature: Table A; Target 36077; HLA-C*07:01; LIN28A; ENSG00000131914; CTA
TGPGGVFCIG

SEQ ID NO: 36078 - protein, 10 aa, Homo sapiens
  misc_feature: Table A; Target 36078; HLA-C*07:02; LIN28A; ENSG00000131914; CTA
TGPGGVFCIG

SEQ ID NO: 36079 - protein, 9 aa, Homo sapiens
  misc_feature: Table A; Target 36079; HLA-B*46:01; LIN28A; ENSG00000131914; CTA
VALDPPVDV

SEQ ID NO: 36080 - protein, 9 aa, Homo sapiens
  misc_feature: Table A; Target 36080; HLA-B*51:01; LIN28A; ENSG00000131914; CTA
VALDPPVDV

SEQ ID NO: 36081 - protein, 9 aa, Homo sapiens
  misc_feature: Table A; Target 36081; HLA-B*54:01; LIN28A; ENSG00000131914; CTA
VALDPPVDV

SEQ ID NO: 36082 - protein, 9 aa, Homo sapiens
  misc_feature: Table A; Target 36082; HLA-C*01:02; LIN28A; ENSG00000131914; CTA
VALDPPVDV

SEQ ID NO: 36083 - protein, 9 aa, Homo sapiens
  misc_feature: Table A; Target 36083; HLA-C*02:02; LIN28A; ENSG00000131914; CTA
VALDPPVDV

SEQ ID NO: 36084 - protein, 9 aa, Homo sapiens
  misc_feature: Table A; Target 36084; HLA-C*03:03; LIN28A; ENSG00000131914; CTA
VALDPPVDV

SEQ ID NO: 36085 - protein, 9 aa, Homo sapiens
  misc_feature: Table A; Target 36085; HLA-C*03:04; LIN28A; ENSG00000131914; CTA
VALDPPVDV

SEQ ID NO: 36086 - protein, 9 aa, Homo sapiens
  misc_feature: Table A; Target 36086; HLA-C*05:01; LIN28A; ENSG00000131914; CTA
VALDPPVDV

SEQ ID NO: 36087 - protein, 9 aa, Homo sapiens
  misc_feature: Table A; Target 36087; HLA-C*12:03; LIN28A; ENSG00000131914; CTA
VALDPPVDV

SEQ ID NO: 36088 - protein, 9 aa, Homo sapiens
  misc_feature: Table A; Target 36088; HLA-C*16:04; LIN28A; ENSG00000131914; CTA
VALDPPVDV

SEQ ID NO: 36089 - protein, 10 aa, Homo sapiens
  misc_feature: Table A; Target 36089; HLA-A*23:01; LIN28A; ENSG00000131914; CTA
VALDPPVDVF

SEQ ID NO: 36090 - protein, 10 aa, Homo sapiens
  misc_feature: Table A; Target 36090; HLA-A*24:02; LIN28A; ENSG00000131914; CTA
VALDPPVDVF

SEQ ID NO: 36091 - protein, 10 aa, Homo sapiens
  misc_feature: Table A; Target 36091; HLA-A*25:01; LIN28A; ENSG00000131914; CTA
VALDPPVDVF

SEQ ID NO: 36092 - protein, 10 aa, Homo sapiens
  misc_feature: Table A; Target 36092; HLA-A*29:02; LIN28A; ENSG00000131914; CTA
VALDPPVDVF

SEQ ID NO: 36093 - protein, 10 aa, Homo sapiens
  misc_feature: Table A; Target 36093; HLA-A*30:02; LIN28A; ENSG00000131914; CTA
VALDPPVDVF

SEQ ID NO: 36094 - protein, 10 aa, Homo sapiens
  misc_feature: Table A; Target 36094; HLA-B*27:02; LIN28A; ENSG00000131914; CTA
VALDPPVDVF

SEQ ID NO: 36095 - protein, 10 aa, Homo sapiens
  misc_feature: Table A; Target 36095; HLA-B*27:05; LIN28A; ENSG00000131914; CTA
VALDPPVDVF

SEQ ID NO: 36096 - protein, 10 aa, Homo sapiens
  misc_feature: Table A; Target 36096; HLA-B*35:01; LIN28A; ENSG00000131914; CTA
VALDPPVDVF

SEQ ID NO: 36097 - protein, 10 aa, Homo sapiens
  misc_feature: Table A; Target 36097; HLA-B*39:01; LIN28A; ENSG00000131914; CTA
VALDPPVDVF

SEQ ID NO: 36098 - protein, 10 aa, Homo sapiens
  misc_feature: Table A; Target 36098; HLA-B*46:01; LIN28A; ENSG00000131914; CTA
VALDPPVDVF

SEQ ID NO: 36099 - protein, 10 aa, Homo sapiens
  misc_feature: Table A; Target 36099; HLA-B*57:01; LIN28A; ENSG00000131914; CTA
VALDPPVDVF

SEQ ID NO: 36100 - protein, 10 aa, Homo sapiens
  misc_feature: Table A; Target 36100; HLA-C*02:02; LIN28A; ENSG00000131914; CTA
VALDPPVDVF

SEQ ID NO: 36101 - protein, 10 aa, Homo sapiens
  misc_feature: Table A; Target 36101; HLA-C*03:03; LIN28A; ENSG00000131914; CTA
VALDPPVDVF

SEQ ID NO: 36102 - protein, 10 aa, Homo sapiens
  misc_feature: Table A; Target 36102; HLA-C*03:04; LIN28A; ENSG00000131914; CTA
VALDPPVDVF

SEQ ID NO: 36103 - protein, 10 aa, Homo sapiens
  misc_feature: Table A; Target 36103; HLA-C*05:01; LIN28A; ENSG00000131914; CTA
VALDPPVDVF

SEQ ID NO: 36104 - protein, 10 aa, Homo sapiens
  misc_feature: Table A; Target 36104; HLA-C*07:06; LIN28A; ENSG00000131914; CTA
VALDPPVDVF

SEQ ID NO: 36105 - protein, 10 aa, Homo sapiens
  misc_feature: Table A; Target 36105; HLA-C*12:03; LIN28A; ENSG00000131914; CTA
VALDPPVDVF

SEQ ID NO: 36106 - protein, 10 aa, Homo sapiens
  misc_feature: Table A; Target 36106; HLA-C*16:04; LIN28A; ENSG00000131914; CTA
VALDPPVDVF

SEQ ID NO: 36107 - protein, 11 aa, Homo sapiens
  misc_feature: Table A; Target 36107; HLA-A*02:01; LIN28A; ENSG00000131914; CTA
VALDPPVDVFV

SEQ ID NO: 36108 - protein, 11 aa, Homo sapiens
  misc_feature: Table A; Target 36108; HLA-A*02:04; LIN28A; ENSG00000131914; CTA
VALDPPVDVFV

SEQ ID NO: 36109 - protein, 11 aa, Homo sapiens
  misc_feature: Table A; Target 36109; HLA-A*02:07; LIN28A; ENSG00000131914; CTA
VALDPPVDVFV

SEQ ID NO: 36110 - protein, 11 aa, Homo sapiens
  misc_feature: Table A; Target 36110; HLA-A*68:02; LIN28A; ENSG00000131914; CTA
VALDPPVDVFV

SEQ ID NO: 36111 - protein, 9 aa, Homo sapiens
  misc_feature: Table A; Target 36111; HLA-B*18:01; LIN28A; ENSG00000131914; CTA
VEFTFKKSA

SEQ ID NO: 36112 - protein, 9 aa, Homo sapiens
  misc_feature: Table A; Target 36112; HLA-B*40:02; LIN28A; ENSG00000131914; CTA
VEFTFKKSA

SEQ ID NO: 36113 - protein, 9 aa, Homo sapiens
  misc_feature: Table A; Target 36113; HLA-B*44:03; LIN28A; ENSG00000131914; CTA
VEFTFKKSA

SEQ ID NO: 36114 - protein, 9 aa, Homo sapiens
  misc_feature: Table A; Target 36114; HLA-B*49:01; LIN28A; ENSG00000131914; CTA
VEFTFKKSA

SEQ ID NO: 36115 - protein, 8 aa, Homo sapiens
  misc_feature: Table A; Target 36115; HLA-A*23:01; LIN28A; ENSG00000131914; CTA
VTGPGGVF

SEQ ID NO: 36116 - protein, 8 aa, Homo sapiens
  misc_feature: Table A; Target 36116; HLA-A*25:01; LIN28A; ENSG00000131914; CTA
VTGPGGVF

SEQ ID NO: 36117 - protein, 8 aa, Homo sapiens
  misc_feature: Table A; Target 36117; HLA-A*30:02; LIN28A; ENSG00000131914; CTA
VTGPGGVF

SEQ ID NO: 36118 - protein, 8 aa, Homo sapiens
  misc_feature: Table A; Target 36118; HLA-A*32:01; LIN28A; ENSG00000131914; CTA
VTGPGGVF

SEQ ID NO: 36119 - protein, 8 aa, Homo sapiens
  misc_feature: Table A; Target 36119; HLA-B*15:01; LIN28A; ENSG00000131914; CTA
VTGPGGVF

SEQ ID NO: 36120 - protein, 8 aa, Homo sapiens
  misc_feature: Table A; Target 36120; HLA-B*15:03; LIN28A; ENSG00000131914; CTA
VTGPGGVF

SEQ ID NO: 36121 - protein, 8 aa, Homo sapiens
  misc_feature: Table A; Target 36121; HLA-B*27:05; LIN28A; ENSG00000131914; CTA
VTGPGGVF

SEQ ID NO: 36122 - protein, 8 aa, Homo sapiens
  misc_feature: Table A; Target 36122; HLA-B*39:01; LIN28A; ENSG00000131914; CTA
VTGPGGVF

SEQ ID NO: 36123 - protein, 8 aa, Homo sapiens
  misc_feature: Table A; Target 36123; HLA-B*40:02; LIN28A; ENSG00000131914; CTA
VTGPGGVF

SEQ ID NO: 36124 - protein, 8 aa, Homo sapiens
  misc_feature: Table A; Target 36124; HLA-B*46:01; LIN28A; ENSG00000131914; CTA
VTGPGGVF

SEQ ID NO: 36125 - protein, 8 aa, Homo sapiens
  misc_feature: Table A; Target 36125; HLA-B*57:01; LIN28A; ENSG00000131914; CTA
VTGPGGVF

SEQ ID NO: 36126 - protein, 8 aa, Homo sapiens
  misc_feature: Table A; Target 36126; HLA-B*58:01; LIN28A; ENSG00000131914; CTA
VTGPGGVF

SEQ ID NO: 36127 - protein, 8 aa, Homo sapiens
  misc_feature: Table A; Target 36127; HLA-C*01:02; LIN28A; ENSG00000131914; CTA
VTGPGGVF

SEQ ID NO: 36128 - protein, 8 aa, Homo sapiens
  misc_feature: Table A; Target 36128; HLA-C*02:02; LIN28A; ENSG00000131914; CTA
VTGPGGVF

SEQ ID NO: 36129 - protein, 8 aa, Homo sapiens
  misc_feature: Table A; Target 36129; HLA-C*03:03; LIN28A; ENSG00000131914; CTA
VTGPGGVF

SEQ ID NO: 36130 - protein, 8 aa, Homo sapiens
  misc_feature: Table A; Target 36130; HLA-C*03:04; LIN28A; ENSG00000131914; CTA
VTGPGGVF

SEQ ID NO: 36131 - protein, 8 aa, Homo sapiens
  misc_feature: Table A; Target 36131; HLA-C*04:01; LIN28A; ENSG00000131914; CTA
VTGPGGVF

SEQ ID NO: 36132 - protein, 8 aa, Homo sapiens
  misc_feature: Table A; Target 36132; HLA-C*05:01; LIN28A; ENSG00000131914; CTA
VTGPGGVF

SEQ ID NO: 36133 - protein, 8 aa, Homo sapiens
  misc_feature: Table A; Target 36133; HLA-C*06:02; LIN28A; ENSG00000131914; CTA
VTGPGGVF

SEQ ID NO: 36134 - protein, 8 aa, Homo sapiens
  misc_feature: Table A; Target 36134; HLA-C*07:01; LIN28A; ENSG00000131914; CTA
VTGPGGVF

SEQ ID NO: 36135 - protein, 8 aa, Homo sapiens
  misc_feature: Table A; Target 36135; HLA-C*07:02; LIN28A; ENSG00000131914; CTA
VTGPGGVF

SEQ ID NO: 36136 - protein, 8 aa, Homo sapiens
  misc_feature: Table A; Target 36136; HLA-C*07:04; LIN28A; ENSG00000131914; CTA
VTGPGGVF

SEQ ID NO: 36137 - protein, 8 aa, Homo sapiens
  misc_feature: Table A; Target 36137; HLA-C*12:03; LIN28A; ENSG00000131914; CTA
VTGPGGVF

SEQ ID NO: 36138 - protein, 8 aa, Homo sapiens
  misc_feature: Table A; Target 36138; HLA-C*14:02; LIN28A; ENSG00000131914; CTA
VTGPGGVF

SEQ ID NO: 36139 - protein, 8 aa, Homo sapiens
  misc_feature: Table A; Target 36139; HLA-C*16:01; LIN28A; ENSG00000131914; CTA
VTGPGGVF

SEQ ID NO: 36140 - protein, 8 aa, Homo sapiens
  misc_feature: Table A; Target 36140; HLA-C*16:02; LIN28A; ENSG00000131914; CTA
VTGPGGVF

SEQ ID NO: 36141 - protein, 10 aa, Homo sapiens
  misc_feature: Table A; Target 36141; HLA-C*06:02; LIN28A; ENSG00000131914; CTA
VTGPGGVFCI

SEQ ID NO: 36142 - protein, 8 aa, Homo sapiens
  misc_feature: Table A; Target 36142; HLA-B*08:01; LUZP4; ENSG00000102021; CTA
ASFRKLTL

SEQ ID NO: 36143 - protein, 8 aa, Homo sapiens
  misc_feature: Table A; Target 36143; HLA-B*40:02; LUZP4; ENSG00000102021; CTA
ASFRKLTL

SEQ ID NO: 36144 - protein, 8 aa, Homo sapiens
  misc_feature: Table A; Target 36144; HLA-C*03:04; LUZP4; ENSG00000102021; CTA
ASFRKLTL

SEQ ID NO: 36145 - protein, 8 aa, Homo sapiens
  misc_feature: Table A; Target 36145; HLA-C*16:01; LUZP4; ENSG00000102021; CTA
ASFRKLTL

SEQ ID NO: 36146 - protein, 11 aa, Homo sapiens
  misc_feature: Table A; Target 36146; HLA-A*03:02; LUZP4; ENSG00000102021; CTA
ATQKDLIATQR

SEQ ID NO: 36147 - protein, 11 aa, Homo sapiens
  misc_feature: Table A; Target 36147; HLA-A*11:01; LUZP4; ENSG00000102021; CTA
ATQKDLIATQR

SEQ ID NO: 36148 - protein, 11 aa, Homo sapiens
  misc_feature: Table A; Target 36148; HLA-A*31:01; LUZP4; ENSG00000102021; CTA
ATQKDLIATQR

SEQ ID NO: 36149 - protein, 11 aa, Homo sapiens
  misc_feature: Table A; Target 36149; HLA-A*33:01; LUZP4; ENSG00000102021; CTA
ATQKDLIATQR

SEQ ID NO: 36150 - protein, 11 aa, Homo sapiens
  misc_feature: Table A; Target 36150; HLA-A*33:03; LUZP4; ENSG00000102021; CTA
ATQKDLIATQR

SEQ ID NO: 36151 - protein, 11 aa, Homo sapiens
  misc_feature: Table A; Target 36151; HLA-A*68:01; LUZP4; ENSG00000102021; CTA
ATQKDLIATQR

SEQ ID NO: 36152 - protein, 11 aa, Homo sapiens
  misc_feature: Table A; Target 36152; HLA-C*07:06; LUZP4; ENSG00000102021; CTA
ATQKDLIATQR

SEQ ID NO: 36153 - protein, 11 aa, Homo sapiens
  misc_feature: Table A; Target 36153; HLA-A*03:01; LUZP4; ENSG00000102021; CTA
ATQRDLIATQK

SEQ ID NO: 36154 - protein, 11 aa, Homo sapiens
  misc_feature: Table A; Target 36154; HLA-A*03:02; LUZP4; ENSG00000102021; CTA
ATQRDLIATQK

SEQ ID NO: 36155 - protein, 11 aa, Homo sapiens
  misc_feature: Table A; Target 36155; HLA-A*31:01; LUZP4; ENSG00000102021; CTA
ATQRDLIATQK

SEQ ID NO: 36156 - protein, 11 aa, Homo sapiens
  misc_feature: Table A; Target 36156; HLA-B*27:02; LUZP4; ENSG00000102021; CTA
ATQRDLIATQK

SEQ ID NO: 36157 - protein, 11 aa, Homo sapiens
  misc_feature: Table A; Target 36157; HLA-A*03:02; LUZP4; ENSG00000102021; CTA
ATQRDLIATQR

SEQ ID NO: 36158 - protein, 11 aa, Homo sapiens
  misc_feature: Table A; Target 36158; HLA-A*11:01; LUZP4; ENSG00000102021; CTA
ATQRDLIATQR

SEQ ID NO: 36159 - protein, 11 aa, Homo sapiens
  misc_feature: Table A; Target 36159; HLA-A*31:01; LUZP4; ENSG00000102021; CTA
ATQRDLIATQR

SEQ ID NO: 36160 - protein, 11 aa, Homo sapiens
  misc_feature: Table A; Target 36160; HLA-A*33:01; LUZP4; ENSG00000102021; CTA
ATQRDLIATQR

SEQ ID NO: 36161 - protein, 11 aa, Homo sapiens
  misc_feature: Table A; Target 36161; HLA-A*33:03; LUZP4; ENSG00000102021; CTA
ATQRDLIATQR

SEQ ID NO: 36162 - protein, 11 aa, Homo sapiens
  misc_feature: Table A; Target 36162; HLA-A*68:01; LUZP4; ENSG00000102021; CTA
ATQRDLIATQR

SEQ ID NO: 36163 - protein, 11 aa, Homo sapiens
  misc_feature: Table A; Target 36163; HLA-C*07:06; LUZP4; ENSG00000102021; CTA
ATQRDLIATQR

SEQ ID NO: 36164 - protein, 10 aa, Homo sapiens
  misc_feature: Table A; Target 36164; HLA-A*11:01; LUZP4; ENSG00000102021; CTA
ATQRDLIVTQ

SEQ ID NO: 36165 - protein, 11 aa, Homo sapiens
  misc_feature: Table A; Target 36165; HLA-A*03:02; LUZP4; ENSG00000102021; CTA
ATQRDLIVTQR

SEQ ID NO: 36166 - protein, 11 aa, Homo sapiens
  misc_feature: Table A; Target 36166; HLA-A*11:01; LUZP4; ENSG00000102021; CTA
ATQRDLIVTQR

SEQ ID NO: 36167 - protein, 11 aa, Homo sapiens
  misc_feature: Table A; Target 36167; HLA-A*31:01; LUZP4; ENSG00000102021; CTA
ATQRDLIVTQR

SEQ ID NO: 36168 - protein, 11 aa, Homo sapiens
  misc_feature: Table A; Target 36168; HLA-A*33:01; LUZP4; ENSG00000102021; CTA
ATQRDLIVTQR

SEQ ID NO: 36169 - protein, 11 aa, Homo sapiens
  misc_feature: Table A; Target 36169; HLA-A*33:03; LUZP4; ENSG00000102021; CTA
ATQRDLIVTQR

SEQ ID NO: 36170 - protein, 11 aa, Homo sapiens
  misc_feature: Table A; Target 36170; HLA-A*68:01; LUZP4; ENSG00000102021; CTA
ATQRDLIVTQR

SEQ ID NO: 36171 - protein, 11 aa, Homo sapiens
  misc_feature: Table A; Target 36171; HLA-C*07:06; LUZP4; ENSG00000102021; CTA
ATQRDLIVTQR

SEQ ID NO: 36172 - protein, 8 aa, Homo sapiens
  misc_feature: Table A; Target 36172; HLA-B*18:01; LUZP4; ENSG00000102021; CTA
DDIIIYKE

SEQ ID NO: 36173 - protein, 8 aa, Homo sapiens
  misc_feature: Table A; Target 36173; HLA-C*07:01; LUZP4; ENSG00000102021; CTA
DDIIIYKE

SEQ ID NO: 36174 - protein, 9 aa, Homo sapiens
  misc_feature: Table A; Target 36174; HLA-B*18:01; LUZP4; ENSG00000102021; CTA
DDIIIYKEL

SEQ ID NO: 36175 - protein, 9 aa, Homo sapiens
  misc_feature: Table A; Target 36175; HLA-B*40:02; LUZP4; ENSG00000102021; CTA
DDIIIYKEL

SEQ ID NO: 36176 - protein, 9 aa, Homo sapiens
  misc_feature: Table A; Target 36176; HLA-B*44:02; LUZP4; ENSG00000102021; CTA
DDIIIYKEL

SEQ ID NO: 36177 - protein, 9 aa, Homo sapiens
  misc_feature: Table A; Target 36177; HLA-B*44:03; LUZP4; ENSG00000102021; CTA
DDIIIYKEL

SEQ ID NO: 36178 - protein, 8 aa, Homo sapiens
  misc_feature: Table A; Target 36178; HLA-B*08:01; LUZP4; ENSG00000102021; CTA
DIIIYKEL

SEQ ID NO: 36179 - protein, 9 aa, Homo sapiens
  misc_feature: Table A; Target 36179; HLA-B*08:01; LUZP4; ENSG00000102021; CTA
DLIATQKDL

SEQ ID NO: 36180 - protein, 8 aa, Homo sapiens
  misc_feature: Table A; Target 36180; HLA-A*33:01; LUZP4; ENSG00000102021; CTA
DLINQSGR

SEQ ID NO: 36181 - protein, 8 aa, Homo sapiens
  misc_feature: Table A; Target 36181; HLA-A*33:03; LUZP4; ENSG00000102021; CTA
DLINQSGR

SEQ ID NO: 36182 - protein, 8 aa, Homo sapiens
  misc_feature: Table A; Target 36182; HLA-A*68:01; LUZP4; ENSG00000102021; CTA
DLINQSGR

SEQ ID NO: 36183 - protein, 10 aa, Homo sapiens
  misc_feature: Table A; Target 36183; HLA-A*25:01; LUZP4; ENSG00000102021; CTA
DLINQSGRSH

SEQ ID NO: 36184 - protein, 9 aa, Homo sapiens
  misc_feature: Table A; Target 36184; HLA-B*08:01; LUZP4; ENSG00000102021; CTA
DLIVTQRDL

SEQ ID NO: 36185 - protein, 9 aa, Homo sapiens
  misc_feature: Table A; Target 36185; HLA-A*26:01; LUZP4; ENSG00000102021; CTA
DLVDTQSDL

SEQ ID NO: 36186 - protein, 10 aa, Homo sapiens
  misc_feature: Table A; Target 36186; HLA-A*25:01; LUZP4; ENSG00000102021; CTA
DLVDTQSDLI

SEQ ID NO: 36187 - protein, 11 aa, Homo sapiens
  misc_feature: Table A; Target 36187; HLA-A*33:01; LUZP4; ENSG00000102021; CTA
DMSLDDIIIYK

SEQ ID NO: 36188 - protein, 11 aa, Homo sapiens
  misc_feature: Table A; Target 36188; HLA-B*27:02; LUZP4; ENSG00000102021; CTA
DMSLDDIIIYK

SEQ ID NO: 36189 - protein, 9 aa, Homo sapiens
  misc_feature: Table A; Target 36189; HLA-A*26:01; LUZP4; ENSG00000102021; CTA
DNYEAQAEK

SEQ ID NO: 36190 - protein, 9 aa, Homo sapiens
  misc_feature: Table A; Target 36190; HLA-A*33:01; LUZP4; ENSG00000102021; CTA
DNYEAQAEK

SEQ ID NO: 36191 - protein, 9 aa, Homo sapiens
  misc_feature: Table A; Target 36191; HLA-A*33:03; LUZP4; ENSG00000102021; CTA
DNYEAQAEK

SEQ ID NO: 36192 - protein, 9 aa, Homo sapiens
  misc_feature: Table A; Target 36192; HLA-A*68:01; LUZP4; ENSG00000102021; CTA
DNYEAQAEK

SEQ ID NO: 36193 - protein, 9 aa, Homo sapiens
  misc_feature: Table A; Target 36193; HLA-B*27:02; LUZP4; ENSG00000102021; CTA
DNYEAQAEK

SEQ ID NO: 36194 - protein, 9 aa, Homo sapiens
  misc_feature: Table A; Target 36194; HLA-C*07:06; LUZP4; ENSG00000102021; CTA
DNYEAQAEK

SEQ ID NO: 36195 - protein, 9 aa, Homo sapiens
  misc_feature: Table A; Target 36195; HLA-B*27:05; LUZP4; ENSG00000102021; CTA
DRSQGQLKR

SEQ ID NO: 36196 - protein, 10 aa, Homo sapiens
  misc_feature: Table A; Target 36196; HLA-A*25:01; LUZP4; ENSG00000102021; CTA
DTQSDLIATQ

SEQ ID NO: 36197 - protein, 10 aa, Homo sapiens
  misc_feature: Table A; Target 36197; HLA-A*26:01; LUZP4; ENSG00000102021; CTA
DTQSDLIATQ

SEQ ID NO: 36198 - protein, 10 aa, Homo sapiens
  misc_feature: Table A; Target 36198; HLA-A*33:01; LUZP4; ENSG00000102021; CTA
DTQSDLIATQ

SEQ ID NO: 36199 - protein, 11 aa, Homo sapiens
  misc_feature: Table A; Target 36199; HLA-A*03:02; LUZP4; ENSG00000102021; CTA
DTQSDLIATQR

SEQ ID NO: 36200 - protein, 11 aa, Homo sapiens
  misc_feature: Table A; Target 36200; HLA-A*11:01; LUZP4; ENSG00000102021; CTA
DTQSDLIATQR

SEQ ID NO: 36201 - protein, 11 aa, Homo sapiens
  misc_feature: Table A; Target 36201; HLA-A*31:01; LUZP4; ENSG00000102021; CTA
DTQSDLIATQR

SEQ ID NO: 36202 - protein, 11 aa, Homo sapiens
  misc_feature: Table A; Target 36202; HLA-A*33:01; LUZP4; ENSG00000102021; CTA
DTQSDLIATQR

SEQ ID NO: 36203 - protein, 11 aa, Homo sapiens
  misc_feature: Table A; Target 36203; HLA-A*33:03; LUZP4; ENSG00000102021; CTA
DTQSDLIATQR

SEQ ID NO: 36204 - protein, 11 aa, Homo sapiens
  misc_feature: Table A; Target 36204; HLA-A*68:01; LUZP4; ENSG00000102021; CTA
DTQSDLIATQR

SEQ ID NO: 36205 - protein, 11 aa, Homo sapiens
  misc_feature: Table A; Target 36205; HLA-B*27:02; LUZP4; ENSG00000102021; CTA
DTQSDLIATQR

SEQ ID NO: 36206 - protein, 11 aa, Homo sapiens
  misc_feature: Table A; Target 36206; HLA-C*07:06; LUZP4; ENSG00000102021; CTA
DTQSDLIATQR

SEQ ID NO: 36207 - protein, 8 aa, Homo sapiens
  misc_feature: Table A; Target 36207; HLA-A*33:01; LUZP4; ENSG00000102021; CTA
EENHHSER

SEQ ID NO: 36208 - protein, 9 aa, Homo sapiens
  misc_feature: Table A; Target 36208; HLA-B*39:01; LUZP4; ENSG00000102021; CTA
EESQGQPEE

SEQ ID NO: 36209 - protein, 11 aa, Homo sapiens
  misc_feature: Table A; Target 36209; HLA-B*27:02; LUZP4; ENSG00000102021; CTA
ELEGTNAEEEK

SEQ ID NO: 36210 - protein, 9 aa, Homo sapiens
  misc_feature: Table A; Target 36210; HLA-B*27:05; LUZP4; ENSG00000102021; CTA
ERDLINQSG

SEQ ID NO: 36211 - protein, 9 aa, Homo sapiens
  misc_feature: Table A; Target 36211; HLA-C*01:02; LUZP4; ENSG00000102021; CTA
ESPSRQQSK

SEQ ID NO: 36212 - protein, 9 aa, Homo sapiens
  misc_feature: Table A; Target 36212; HLA-A*02:07; LUZP4; ENSG00000102021; CTA
FLDMSLDDI

SEQ ID NO: 36213 - protein, 10 aa, Homo sapiens
  misc_feature: Table A; Target 36213; HLA-B*15:01; LUZP4; ENSG00000102021; CTA
GQHPLNGQPL

SEQ ID NO: 36214 - protein, 10 aa, Homo sapiens
  misc_feature: Table A; Target 36214; HLA-B*27:05; LUZP4; ENSG00000102021; CTA
GQHPLNGQPL

SEQ ID NO: 36215 - protein, 10 aa, Homo sapiens
  misc_feature: Table A; Target 36215; HLA-B*39:01; LUZP4; ENSG00000102021; CTA
GQHPLNGQPL

SEQ ID NO: 36216 - protein, 11 aa, Homo sapiens
  misc_feature: Table A; Target 36216; HLA-A*30:01; LUZP4; ENSG00000102021; CTA
GQHPLNGQPLI

SEQ ID NO: 36217 - protein, 11 aa, Homo sapiens
  misc_feature: Table A; Target 36217; HLA-B*13:02; LUZP4; ENSG00000102021; CTA
GQHPLNGQPLI

SEQ ID NO: 36218 - protein, 9 aa, Homo sapiens
  misc_feature: Table A; Target 36218; HLA-A*11:01; LUZP4; ENSG00000102021; CTA
GQPLIEQEK

SEQ ID NO: 36219 - protein, 9 aa, Homo sapiens
  misc_feature: Table A; Target 36219; HLA-B*13:02; LUZP4; ENSG00000102021; CTA
GQPLIEQEK

SEQ ID NO: 36220 - protein, 10 aa, Homo sapiens
  misc_feature: Table A; Target 36220; HLA-B*13:02; LUZP4; ENSG00000102021; CTA
GQSEGNQHQS

SEQ ID NO: 36221 - protein, 10 aa, Homo sapiens
  misc_feature: Table A; Target 36221; HLA-B*27:05; LUZP4; ENSG00000102021; CTA
GQSEGNQHQS

SEQ ID NO: 36222 - protein, 9 aa, Homo sapiens
  misc_feature: Table A; Target 36222; HLA-A*29:02; LUZP4; ENSG00000102021; CTA
GQSERHQRY

SEQ ID NO: 36223 - protein, 9 aa, Homo sapiens
  misc_feature: Table A; Target 36223; HLA-A*30:02; LUZP4; ENSG00000102021; CTA
GQSERHQRY

SEQ ID NO: 36224 - protein, 9 aa, Homo sapiens
  misc_feature: Table A; Target 36224; HLA-A*32:01; LUZP4; ENSG00000102021; CTA
GQSERHQRY

SEQ ID NO: 36225 - protein, 9 aa, Homo sapiens
  misc_feature: Table A; Target 36225; HLA-B*15:01; LUZP4; ENSG00000102021; CTA
GQSERHQRY

SEQ ID NO: 36226 - protein, 9 aa, Homo sapiens
  misc_feature: Table A; Target 36226; HLA-B*15:03; LUZP4; ENSG00000102021; CTA
GQSERHQRY

SEQ ID NO: 36227 - protein, 9 aa, Homo sapiens
  misc_feature: Table A; Target 36227; HLA-C*02:02; LUZP4; ENSG00000102021; CTA
GQSERHQRY

SEQ ID NO: 36228 - protein, 9 aa, Homo sapiens
  misc_feature: Table A; Target 36228; HLA-C*16:01; LUZP4; ENSG00000102021; CTA
GQSERHQRY

SEQ ID NO: 36229 - protein, 9 aa, Homo sapiens
  misc_feature: Table A; Target 36229; HLA-B*27:05; LUZP4; ENSG00000102021; CTA
GRSHGQSER

SEQ ID NO: 36230 - protein, 10 aa, Homo sapiens
  misc_feature: Table A; Target 36230; HLA-A*03:02; LUZP4; ENSG00000102021; CTA
GTNAEEEKNK

SEQ ID NO: 36231 - protein, 10 aa, Homo sapiens
  misc_feature: Table A; Target 36231; HLA-A*11:01; LUZP4; ENSG00000102021; CTA
GTNAEEEKNK

SEQ ID NO: 36232 - protein, 11 aa, Homo sapiens
  misc_feature: Table A; Target 36232; HLA-A*31:01; LUZP4; ENSG00000102021; CTA
GTNAEEEKNKR

SEQ ID NO: 36233 - protein, 11 aa, Homo sapiens
  misc_feature: Table A; Target 36233; HLA-A*33:03; LUZP4; ENSG00000102021; CTA
GTNAEEEKNKR

SEQ ID NO: 36234 - protein, 8 aa, Homo sapiens
  misc_feature: Table A; Target 36234; HLA-B*07:02; LUZP4; ENSG00000102021; CTA
HDKKPSQK

SEQ ID NO: 36235 - protein, 8 aa, Homo sapiens
  misc_feature: Table A; Target 36235; HLA-C*04:01; LUZP4; ENSG00000102021; CTA
HDKKPSQK

SEQ ID NO: 36236 - protein, 8 aa, Homo sapiens
  misc_feature: Table A; Target 36236; HLA-C*06:02; LUZP4; ENSG00000102021; CTA
HDKKPSQK

SEQ ID NO: 36237 - protein, 8 aa, Homo sapiens
  misc_feature: Table A; Target 36237; HLA-C*07:01; LUZP4; ENSG00000102021; CTA
HDKKPSQK

SEQ ID NO: 36238 - protein, 9 aa, Homo sapiens
  misc_feature: Table A; Target 36238; HLA-A*33:01; LUZP4; ENSG00000102021; CTA
HGQSERHQR

SEQ ID NO: 36239 - protein, 8 aa, Homo sapiens
  misc_feature: Table A; Target 36239; HLA-B*07:02; LUZP4; ENSG00000102021; CTA
HPLNGQPL

SEQ ID NO: 36240 - protein, 8 aa, Homo sapiens
  misc_feature: Table A; Target 36240; HLA-B*08:01; LUZP4; ENSG00000102021; CTA
HPLNGQPL

SEQ ID NO: 36241 - protein, 8 aa, Homo sapiens
  misc_feature: Table A; Target 36241; HLA-B*35:03; LUZP4; ENSG00000102021; CTA
HPLNGQPL

SEQ ID NO: 36242 - protein, 9 aa, Homo sapiens
  misc_feature: Table A; Target 36242; HLA-A*23:01; LUZP4; ENSG00000102021; CTA
HPLNGQPLI

SEQ ID NO: 36243 - protein, 9 aa, Homo sapiens
  misc_feature: Table A; Target 36243; HLA-B*13:02; LUZP4; ENSG00000102021; CTA
HPLNGQPLI

SEQ ID NO: 36244 - protein, 9 aa, Homo sapiens
  misc_feature: Table A; Target 36244; HLA-B*35:01; LUZP4; ENSG00000102021; CTA
HPLNGQPLI

SEQ ID NO: 36245 - protein, 9 aa, Homo sapiens
  misc_feature: Table A; Target 36245; HLA-B*35:03; LUZP4; ENSG00000102021; CTA
HPLNGQPLI

SEQ ID NO: 36246 - protein, 9 aa, Homo sapiens
  misc_feature: Table A; Target 36246; HLA-B*38:01; LUZP4; ENSG00000102021; CTA
HPLNGQPLI

SEQ ID NO: 36247 - protein, 9 aa, Homo sapiens
  misc_feature: Table A; Target 36247; HLA-B*51:01; LUZP4; ENSG00000102021; CTA
HPLNGQPLI

SEQ ID NO: 36248 - protein, 9 aa, Homo sapiens
  misc_feature: Table A; Target 36248; HLA-B*54:01; LUZP4; ENSG00000102021; CTA
HPLNGQPLI

SEQ ID NO: 36249 - protein, 9 aa, Homo sapiens
  misc_feature: Table A; Target 36249; HLA-B*55:01; LUZP4; ENSG00000102021; CTA
HPLNGQPLI

SEQ ID NO: 36250 - protein, 9 aa, Homo sapiens
  misc_feature: Table A; Target 36250; HLA-B*56:01; LUZP4; ENSG00000102021; CTA
HPLNGQPLI

SEQ ID NO: 36251 - protein, 11 aa, Homo sapiens
  misc_feature: Table A; Target 36251; HLA-B*35:01; LUZP4; ENSG00000102021; CTA
HPQYERSHGQY

SEQ ID NO: 36252 - protein, 9 aa, Homo sapiens
  misc_feature: Table A; Target 36252; HLA-B*39:01; LUZP4; ENSG00000102021; CTA
HQSEGNPDK

SEQ ID NO: 36253 - protein, 9 aa, Homo sapiens
  misc_feature: Table A; Target 36253; HLA-A*31:01; LUZP4; ENSG00000102021; CTA
HSKKESPSR

SEQ ID NO: 36254 - protein, 9 aa, Homo sapiens
  misc_feature: Table A; Target 36254; HLA-A*33:01; LUZP4; ENSG00000102021; CTA
HSKKESPSR

SEQ ID NO: 36255 - protein, 9 aa, Homo sapiens
  misc_feature: Table A; Target 36255; HLA-A*33:03; LUZP4; ENSG00000102021; CTA
HSKKESPSR

SEQ ID NO: 36256 - protein, 8 aa, Homo sapiens
  misc_feature: Table A; Target 36256; HLA-B*51:01; LUZP4; ENSG00000102021; CTA
IATQKDLI

SEQ ID NO: 36257 - protein, 8 aa, Homo sapiens
  misc_feature: Table A; Target 36257; HLA-C*16:01; LUZP4; ENSG00000102021; CTA
IATQKDLI

SEQ ID NO: 36258 - protein, 8 aa, Homo sapiens
  misc_feature: Table A; Target 36258; HLA-C*16:02; LUZP4; ENSG00000102021; CTA
IATQKDLI

SEQ ID NO: 36259 - protein, 9 aa, Homo sapiens
  misc_feature: Table A; Target 36259; HLA-B*54:01; LUZP4; ENSG00000102021; CTA
IATQKDLIA

SEQ ID NO: 36260 - protein, 9 aa, Homo sapiens
  misc_feature: Table A; Target 36260; HLA-B*51:01; LUZP4; ENSG00000102021; CTA
IATQRDLIV

SEQ ID NO: 36261 - protein, 9 aa, Homo sapiens
  misc_feature: Table A; Target 36261; HLA-C*03:04; LUZP4; ENSG00000102021; CTA
IATQRDLIV

SEQ ID NO: 36262 - protein, 9 aa, Homo sapiens
  misc_feature: Table A; Target 36262; HLA-C*12:03; LUZP4; ENSG00000102021; CTA
IATQRDLIV

SEQ ID NO: 36263 - protein, 9 aa, Homo sapiens
  misc_feature: Table A; Target 36263; HLA-C*16:01; LUZP4; ENSG00000102021; CTA
IATQRDLIV

SEQ ID NO: 36264 - protein, 9 aa, Homo sapiens
  misc_feature: Table A; Target 36264; HLA-C*16:02; LUZP4; ENSG00000102021; CTA
IATQRDLIV

SEQ ID NO: 36265 - protein, 10 aa, Homo sapiens
  misc_feature: Table A; Target 36265; HLA-A*30:02; LUZP4; ENSG00000102021; CTA
IEQEKCSDNY

SEQ ID NO: 36266 - protein, 9 aa, Homo sapiens
  misc_feature: Table A; Target 36266; HLA-B*08:01; LUZP4; ENSG00000102021; CTA
IVTQRDLVA

SEQ ID NO: 36267 - protein, 9 aa, Homo sapiens
  misc_feature: Table A; Target 36267; HLA-B*54:01; LUZP4; ENSG00000102021; CTA
IVTQRDLVA

SEQ ID NO: 36268 - protein, 9 aa, Homo sapiens
  misc_feature: Table A; Target 36268; HLA-C*16:01; LUZP4; ENSG00000102021; CTA
IVTQRDLVA

SEQ ID NO: 36269 - protein, 10 aa, Homo sapiens
  misc_feature: Table A; Target 36269; HLA-C*14:02; LUZP4; ENSG00000102021; CTA
IYKELEGTNA

SEQ ID NO: 36270 - protein, 8 aa, Homo sapiens
  misc_feature: Table A; Target 36270; HLA-A*31:01; LUZP4; ENSG00000102021; CTA
KDLIATQR

SEQ ID NO: 36271 - protein, 8 aa, Homo sapiens
  misc_feature: Table A; Target 36271; HLA-B*37:01; LUZP4; ENSG00000102021; CTA
KDLIATQR

SEQ ID NO: 36272 - protein, 10 aa, Homo sapiens
  misc_feature: Table A; Target 36272; HLA-B*37:01; LUZP4; ENSG00000102021; CTA
KESPSRQQSK

SEQ ID NO: 36273 - protein, 10 aa, Homo sapiens
  misc_feature: Table A; Target 36273; HLA-B*15:03; LUZP4; ENSG00000102021; CTA
KKPSQKPSGF

SEQ ID NO: 36274 - protein, 9 aa, Homo sapiens
  misc_feature: Table A; Target 36274; HLA-B*07:02; LUZP4; ENSG00000102021; CTA
KPSQKPSGF

SEQ ID NO: 36275 - protein, 9 aa, Homo sapiens
  misc_feature: Table A; Target 36275; HLA-B*08:01; LUZP4; ENSG00000102021; CTA
KPSQKPSGF

SEQ ID NO: 36276 - protein, 9 aa, Homo sapiens
  misc_feature: Table A; Target 36276; HLA-B*37:01; LUZP4; ENSG00000102021; CTA
KPSQKPSGF

SEQ ID NO: 36277 - protein, 9 aa, Homo sapiens
  misc_feature: Table A; Target 36277; HLA-C*07:02; LUZP4; ENSG00000102021; CTA
KPSQKPSGF

SEQ ID NO: 36278 - protein, 9 aa, Homo sapiens
  misc_feature: Table A; Target 36278; HLA-B*07:02; LUZP4; ENSG00000102021; CTA
KVNFLDMSL

SEQ ID NO: 36279 - protein, 9 aa, Homo sapiens
  misc_feature: Table A; Target 36279; HLA-A*02:07; LUZP4; ENSG00000102021; CTA
KVPPNHPSR

SEQ ID NO: 36280 - protein, 9 aa, Homo sapiens
  misc_feature: Table A; Target 36280; HLA-A*03:01; LUZP4; ENSG00000102021; CTA
KVPPNHPSR

SEQ ID NO: 36281 - protein, 9 aa, Homo sapiens
  misc_feature: Table A; Target 36281; HLA-A*03:02; LUZP4; ENSG00000102021; CTA
KVPPNHPSR

SEQ ID NO: 36282 - protein, 9 aa, Homo sapiens
  misc_feature: Table A; Target 36282; HLA-A*11:01; LUZP4; ENSG00000102021; CTA
KVPPNHPSR

SEQ ID NO: 36283 - protein, 9 aa, Homo sapiens
  misc_feature: Table A; Target 36283; HLA-A*31:01; LUZP4; ENSG00000102021; CTA
KVPPNHPSR

SEQ ID NO: 36284 - protein, 9 aa, Homo sapiens
  misc_feature: Table A; Target 36284; HLA-A*32:01; LUZP4; ENSG00000102021; CTA
KVPPNHPSR

SEQ ID NO: 36285 - protein, 10 aa, Homo sapiens
  misc_feature: Table A; Target 36285; HLA-A*03:01; LUZP4; ENSG00000102021; CTA
KVPPNHPSRK

SEQ ID NO: 36286 - protein, 10 aa, Homo sapiens
  misc_feature: Table A; Target 36286; HLA-A*03:02; LUZP4; ENSG00000102021; CTA
KVPPNHPSRK

SEQ ID NO: 36287 - protein, 10 aa, Homo sapiens
  misc_feature: Table A; Target 36287; HLA-A*11:01; LUZP4; ENSG00000102021; CTA
KVPPNHPSRK

SEQ ID NO: 36288 - protein, 8 aa, Homo sapiens
  misc_feature: Table A; Target 36288; HLA-B*27:02; LUZP4; ENSG00000102021; CTA
LDDIIIYK

SEQ ID NO: 36289 - protein, 8 aa, Homo sapiens
  misc_feature: Table A; Target 36289; HLA-C*03:04; LUZP4; ENSG00000102021; CTA
LVATERDL

SEQ ID NO: 36290 - protein, 8 aa, Homo sapiens
  misc_feature: Table A; Target 36290; HLA-C*16:01; LUZP4; ENSG00000102021; CTA
LVATERDL

SEQ ID NO: 36291 - protein, 8 aa, Homo sapiens
  misc_feature: Table A; Target 36291; HLA-C*05:01; LUZP4; ENSG00000102021; CTA
LVDTQSDL

SEQ ID NO: 36292 - protein, 9 aa, Homo sapiens
  misc_feature: Table A; Target 36292; HLA-A*01:01; LUZP4; ENSG00000102021; CTA
LVDTQSDLI

SEQ ID NO: 36293 - protein, 9 aa, Homo sapiens
  misc_feature: Table A; Target 36293; HLA-A*02:07; LUZP4; ENSG00000102021; CTA
LVDTQSDLI

SEQ ID NO: 36294 - protein, 9 aa, Homo sapiens
  misc_feature: Table A; Target 36294; HLA-B*27:05; LUZP4; ENSG00000102021; CTA
LVDTQSDLI

SEQ ID NO: 36295 - protein, 9 aa, Homo sapiens
  misc_feature: Table A; Target 36295; HLA-B*38:01; LUZP4; ENSG00000102021; CTA
LVDTQSDLI

SEQ ID NO: 36296 - protein, 9 aa, Homo sapiens
  misc_feature: Table A; Target 36296; HLA-C*05:01; LUZP4; ENSG00000102021; CTA
LVDTQSDLI

SEQ ID NO: 36297 - protein, 9 aa, Homo sapiens
  misc_feature: Table A; Target 36297; HLA-B*08:01; LUZP4; ENSG00000102021; CTA
MASFRKLTL

SEQ ID NO: 36298 - protein, 9 aa, Homo sapiens
  misc_feature: Table A; Target 36298; HLA-C*03:04; LUZP4; ENSG00000102021; CTA
MASFRKLTL

SEQ ID NO: 36299 - protein, 9 aa, Homo sapiens
  misc_feature: Table A; Target 36299; HLA-C*16:01; LUZP4; ENSG00000102021; CTA
MASFRKLTL

SEQ ID NO: 36300 - protein, 9 aa, Homo sapiens
  misc_feature: Table A; Target 36300; HLA-C*16:02; LUZP4; ENSG00000102021; CTA
MASFRKLTL

SEQ ID NO: 36301 - protein, 9 aa, Homo sapiens
  misc_feature: Table A; Target 36301; HLA-A*01:01; LUZP4; ENSG00000102021; CTA
MSLDDIIIY

SEQ ID NO: 36302 - protein, 9 aa, Homo sapiens
  misc_feature: Table A; Target 36302; HLA-A*29:02; LUZP4; ENSG00000102021; CTA
MSLDDIIIY

SEQ ID NO: 36303 - protein, 9 aa, Homo sapiens
  misc_feature: Table A; Target 36303; HLA-B*35:01; LUZP4; ENSG00000102021; CTA
MSLDDIIIY

SEQ ID NO: 36304 - protein, 9 aa, Homo sapiens
  misc_feature: Table A; Target 36304; HLA-B*55:01; LUZP4; ENSG00000102021; CTA
MSLDDIIIY

SEQ ID NO: 36305 - protein, 9 aa, Homo sapiens
  misc_feature: Table A; Target 36305; HLA-B*57:01; LUZP4; ENSG00000102021; CTA
MSLDDIIIY

SEQ ID NO: 36306 - protein, 9 aa, Homo sapiens
  misc_feature: Table A; Target 36306; HLA-B*58:01; LUZP4; ENSG00000102021; CTA
MSLDDIIIY

SEQ ID NO: 36307 - protein, 9 aa, Homo sapiens
  misc_feature: Table A; Target 36307; HLA-C*07:01; LUZP4; ENSG00000102021; CTA
MSLDDIIIY

SEQ ID NO: 36308 - protein, 9 aa, Homo sapiens
  misc_feature: Table A; Target 36308; HLA-C*12:03; LUZP4; ENSG00000102021; CTA
MSLDDIIIY

SEQ ID NO: 36309 - protein, 10 aa, Homo sapiens
  misc_feature: Table A; Target 36309; HLA-A*03:01; LUZP4; ENSG00000102021; CTA
MSLDDIIIYK

SEQ ID NO: 36310 - protein, 10 aa, Homo sapiens
  misc_feature: Table A; Target 36310; HLA-A*03:02; LUZP4; ENSG00000102021; CTA
MSLDDIIIYK

SEQ ID NO: 36311 - protein, 10 aa, Homo sapiens
  misc_feature: Table A; Target 36311; HLA-A*11:01; LUZP4; ENSG00000102021; CTA
MSLDDIIIYK

SEQ ID NO: 36312 - protein, 10 aa, Homo sapiens
  misc_feature: Table A; Target 36312; HLA-A*68:02; LUZP4; ENSG00000102021; CTA
MSLDDIIIYK

SEQ ID NO: 36313 - protein, 10 aa, Homo sapiens
  misc_feature: Table A; Target 36313; HLA-B*27:02; LUZP4; ENSG00000102021; CTA
MSLDDIIIYK

SEQ ID NO: 36314 - protein, 10 aa, Homo sapiens
  misc_feature: Table A; Target 36314; HLA-B*57:01; LUZP4; ENSG00000102021; CTA
MSLDDIIIYK

SEQ ID NO: 36315 - protein, 10 aa, Homo sapiens
  misc_feature: Table A; Target 36315; HLA-B*27:02; LUZP4; ENSG00000102021; CTA
NGQPLIEQEK

SEQ ID NO: 36316 - protein, 9 aa, Homo sapiens
  misc_feature: Table A; Target 36316; HLA-A*01:01; LUZP4; ENSG00000102021; CTA
NSEEGNHDK

SEQ ID NO: 36317 - protein, 10 aa, Homo sapiens
  misc_feature: Table A; Target 36317; HLA-A*30:02; LUZP4; ENSG00000102021; CTA
PQYERSHGQY

SEQ ID NO: 36318 - protein, 9 aa, Homo sapiens
  misc_feature: Table A; Target 36318; HLA-B*38:01; LUZP4; ENSG00000102021; CTA
QHPLNGQPL

SEQ ID NO: 36319 - protein, 9 aa, Homo sapiens
  misc_feature: Table A; Target 36319; HLA-B*39:01; LUZP4; ENSG00000102021; CTA
QHPLNGQPL

SEQ ID NO: 36320 - protein, 9 aa, Homo sapiens
  misc_feature: Table A; Target 36320; HLA-C*01:02; LUZP4; ENSG00000102021; CTA
QHPLNGQPL

SEQ ID NO: 36321 - protein, 10 aa, Homo sapiens
  misc_feature: Table A; Target 36321; HLA-B*38:01; LUZP4; ENSG00000102021; CTA
QHPLNGQPLI

SEQ ID NO: 36322 - protein, 10 aa, Homo sapiens
  misc_feature: Table A; Target 36322; HLA-B*39:01; LUZP4; ENSG00000102021; CTA
QHQSEGNPDK

SEQ ID NO: 36323 - protein, 9 aa, Homo sapiens
  misc_feature: Table A; Target 36323; HLA-B*55:01; LUZP4; ENSG00000102021; CTA
QPLIEQEKC

SEQ ID NO: 36324 - protein, 9 aa, Homo sapiens
  misc_feature: Table A; Target 36324; HLA-B*27:02; LUZP4; ENSG00000102021; CTA
QRDLIATQK

SEQ ID NO: 36325 - protein, 9 aa, Homo sapiens
  misc_feature: Table A; Target 36325; HLA-B*27:05; LUZP4; ENSG00000102021; CTA
QRDLIATQK

SEQ ID NO: 36326 - protein, 9 aa, Homo sapiens
  misc_feature: Table A; Target 36326; HLA-B*27:02; LUZP4; ENSG00000102021; CTA
QRDLIATQR

SEQ ID NO: 36327 - protein, 9 aa, Homo sapiens
  misc_feature: Table A; Target 36327; HLA-B*27:05; LUZP4; ENSG00000102021; CTA
QRDLIATQR

SEQ ID NO: 36328 - protein, 9 aa, Homo sapiens
  misc_feature: Table A; Target 36328; HLA-B*27:02; LUZP4; ENSG00000102021; CTA
QRDLIVTQR

SEQ ID NO: 36329 - protein, 9 aa, Homo sapiens
  misc_feature: Table A; Target 36329; HLA-B*27:05; LUZP4; ENSG00000102021; CTA
QRDLIVTQR

SEQ ID NO: 36330 - protein, 9 aa, Homo sapiens
  misc_feature: Table A; Target 36330; HLA-B*27:05; LUZP4; ENSG00000102021; CTA
QRDLVATER

SEQ ID NO: 36331 - protein, 10 aa, Homo sapiens
  misc_feature: Table A; Target 36331; HLA-B*38:01; LUZP4; ENSG00000102021; CTA
QRYSTGKNTI

SEQ ID NO: 36332 - protein, 10 aa, Homo sapiens
  misc_feature: Table A; Target 36332; HLA-C*06:02; LUZP4; ENSG00000102021; CTA
QRYSTGKNTI

SEQ ID NO: 36333 - protein, 10 aa, Homo sapiens
  misc_feature: Table A; Target 36333; HLA-C*07:01; LUZP4; ENSG00000102021; CTA
QRYSTGKNTI

SEQ ID NO: 36334 - protein, 9 aa, Homo sapiens
  misc_feature: Table A; Target 36334; HLA-A*01:01; LUZP4; ENSG00000102021; CTA
QSDLIATQR

SEQ ID NO: 36335 - protein, 9 aa, Homo sapiens
  misc_feature: Table A; Target 36335; HLA-A*11:01; LUZP4; ENSG00000102021; CTA
QSDLIATQR

SEQ ID NO: 36336 - protein, 9 aa, Homo sapiens
  misc_feature: Table A; Target 36336; HLA-A*31:01; LUZP4; ENSG00000102021; CTA
QSDLIATQR

SEQ ID NO: 36337 - protein, 9 aa, Homo sapiens
  misc_feature: Table A; Target 36337; HLA-A*33:01; LUZP4; ENSG00000102021; CTA
QSDLIATQR

SEQ ID NO: 36338 - protein, 9 aa, Homo sapiens
  misc_feature: Table A; Target 36338; HLA-A*33:03; LUZP4; ENSG00000102021; CTA
QSDLIATQR

SEQ ID NO: 36339 - protein, 9 aa, Homo sapiens
  misc_feature: Table A; Target 36339; HLA-A*68:01; LUZP4; ENSG00000102021; CTA
QSDLIATQR

SEQ ID NO: 36340 - protein, 9 aa, Homo sapiens
  misc_feature: Table A; Target 36340; HLA-C*07:06; LUZP4; ENSG00000102021; CTA
QSDLIATQR

SEQ ID NO: 36341 - protein, 9 aa, Homo sapiens
  misc_feature: Table A; Target 36341; HLA-A*01:01; LUZP4; ENSG00000102021; CTA
QSDRSQGQL

SEQ ID NO: 36342 - protein, 9 aa, Homo sapiens
  misc_feature: Table A; Target 36342; HLA-B*58:01; LUZP4; ENSG00000102021; CTA
QSDRSQGQL

SEQ ID NO: 36343 - protein, 9 aa, Homo sapiens
  misc_feature: Table A; Target 36343; HLA-C*05:01; LUZP4; ENSG00000102021; CTA
QSDRSQGQL

SEQ ID NO: 36344 - protein, 10 aa, Homo sapiens
  misc_feature: Table A; Target 36344; HLA-A*01:01; LUZP4; ENSG00000102021; CTA
QSDRSQGQLK

SEQ ID NO: 36345 - protein, 10 aa, Homo sapiens
  misc_feature: Table A; Target 36345; HLA-A*03:02; LUZP4; ENSG00000102021; CTA
QSDRSQGQLK

SEQ ID NO: 36346 - protein, 10 aa, Homo sapiens
  misc_feature: Table A; Target 36346; HLA-A*11:01; LUZP4; ENSG00000102021; CTA
QSDRSQGQLK

SEQ ID NO: 36347 - protein, 9 aa, Homo sapiens
  misc_feature: Table A; Target 36347; HLA-A*29:02; LUZP4; ENSG00000102021; CTA
QYERSHGQY

SEQ ID NO: 36348 - protein, 9 aa, Homo sapiens
  misc_feature: Table A; Target 36348; HLA-A*30:02; LUZP4; ENSG00000102021; CTA
QYERSHGQY

SEQ ID NO: 36349 - protein, 9 aa, Homo sapiens
  misc_feature: Table A; Target 36349; HLA-C*07:01; LUZP4; ENSG00000102021; CTA
QYERSHGQY

SEQ ID NO: 36350 - protein, 8 aa, Homo sapiens
  misc_feature: Table A; Target 36350; HLA-A*03:02; LUZP4; ENSG00000102021; CTA
RDLIATQK

SEQ ID NO: 36351 - protein, 8 aa, Homo sapiens
  misc_feature: Table A; Target 36351; HLA-A*11:01; LUZP4; ENSG00000102021; CTA
RDLIATQK

SEQ ID NO: 36352 - protein, 8 aa, Homo sapiens
  misc_feature: Table A; Target 36352; HLA-B*27:02; LUZP4; ENSG00000102021; CTA
RDLIATQK

SEQ ID NO: 36353 - protein, 8 aa, Homo sapiens
  misc_feature: Table A; Target 36353; HLA-B*37:01; LUZP4; ENSG00000102021; CTA
RDLIATQK

SEQ ID NO: 36354 - protein, 8 aa, Homo sapiens
  misc_feature: Table A; Target 36354; HLA-A*31:01; LUZP4; ENSG00000102021; CTA
RDLIATQR

SEQ ID NO: 36355 - protein, 8 aa, Homo sapiens
  misc_feature: Table A; Target 36355; HLA-B*37:01; LUZP4; ENSG00000102021; CTA
RDLIATQR

SEQ ID NO: 36356 - protein, 9 aa, Homo sapiens
  misc_feature: Table A; Target 36356; HLA-A*31:01; LUZP4; ENSG00000102021; CTA
RDLINQSGR

SEQ ID NO: 36357 - protein, 8 aa, Homo sapiens
  misc_feature: Table A; Target 36357; HLA-A*31:01; LUZP4; ENSG00000102021; CTA
RDLIVTQR

SEQ ID NO: 36358 - protein, 8 aa, Homo sapiens
  misc_feature: Table A; Target 36358; HLA-B*37:01; LUZP4; ENSG00000102021; CTA
RDLIVTQR

SEQ ID NO: 36359 - protein, 8 aa, Homo sapiens
  misc_feature: Table A; Target 36359; HLA-A*03:01; LUZP4; ENSG00000102021; CTA
RDLVATER

SEQ ID NO: 36360 - protein, 8 aa, Homo sapiens
  misc_feature: Table A; Target 36360; HLA-A*11:01; LUZP4; ENSG00000102021; CTA
RDLVATER

SEQ ID NO: 36361 - protein, 8 aa, Homo sapiens
  misc_feature: Table A; Target 36361; HLA-A*31:01; LUZP4; ENSG00000102021; CTA
RDLVATER

SEQ ID NO: 36362 - protein, 8 aa, Homo sapiens
  misc_feature: Table A; Target 36362; HLA-B*37:01; LUZP4; ENSG00000102021; CTA
RDLVATER

SEQ ID NO: 36363 - protein, 9 aa, Homo sapiens
  misc_feature: Table A; Target 36363; HLA-A*23:01; LUZP4; ENSG00000102021; CTA
RYSTGKNTI

SEQ ID NO: 36364 - protein, 9 aa, Homo sapiens
  misc_feature: Table A; Target 36364; HLA-A*24:02; LUZP4; ENSG00000102021; CTA
RYSTGKNTI

SEQ ID NO: 36365 - protein, 8 aa, Homo sapiens
  misc_feature: Table A; Target 36365; HLA-A*11:01; LUZP4; ENSG00000102021; CTA
SDLIATQR

SEQ ID NO: 36366 - protein, 8 aa, Homo sapiens
  misc_feature: Table A; Target 36366; HLA-B*37:01; LUZP4; ENSG00000102021; CTA
SDLIATQR

SEQ ID NO: 36367 - protein, 10 aa, Homo sapiens
  misc_feature: Table A; Target 36367; HLA-A*03:02; LUZP4; ENSG00000102021; CTA
SDNYEAQAEK

SEQ ID NO: 36368 - protein, 10 aa, Homo sapiens
  misc_feature: Table A; Target 36368; HLA-A*11:01; LUZP4; ENSG00000102021; CTA
SDNYEAQAEK

SEQ ID NO: 36369 - protein, 10 aa, Homo sapiens
  misc_feature: Table A; Target 36369; HLA-B*27:02; LUZP4; ENSG00000102021; CTA
SDNYEAQAEK

SEQ ID NO: 36370 - protein, 9 aa, Homo sapiens
  misc_feature: Table A; Target 36370; HLA-C*06:02; LUZP4; ENSG00000102021; CTA
SDRSQGQLK

SEQ ID NO: 36371 - protein, 9 aa, Homo sapiens
  misc_feature: Table A; Target 36371; HLA-B*40:02; LUZP4; ENSG00000102021; CTA
SEKVPPNHP

SEQ ID NO: 36372 - protein, 10 aa, Homo sapiens
  misc_feature: Table A; Target 36372; HLA-B*40:02; LUZP4; ENSG00000102021; CTA
SEKVPPNHPS

SEQ ID NO: 36373 - protein, 10 aa, Homo sapiens
  misc_feature: Table A; Target 36373; HLA-C*04:01; LUZP4; ENSG00000102021; CTA
SEKVPPNHPS

SEQ ID NO: 36374 - protein, 10 aa, Homo sapiens
  misc_feature: Table A; Target 36374; HLA-C*06:02; LUZP4; ENSG00000102021; CTA
SEKVPPNHPS

SEQ ID NO: 36375 - protein, 10 aa, Homo sapiens
  misc_feature: Table A; Target 36375; HLA-C*07:02; LUZP4; ENSG00000102021; CTA
SEKVPPNHPS

SEQ ID NO: 36376 - protein, 11 aa, Homo sapiens
  misc_feature: Table A; Target 36376; HLA-A*31:01; LUZP4; ENSG00000102021; CTA
SEKVPPNHPSR

SEQ ID NO: 36377 - protein, 8 aa, Homo sapiens
  misc_feature: Table A; Target 36377; HLA-A*01:01; LUZP4; ENSG00000102021; CTA
SLDDIIIY

SEQ ID NO: 36378 - protein, 8 aa, Homo sapiens
  misc_feature: Table A; Target 36378; HLA-C*04:01; LUZP4; ENSG00000102021; CTA
SLDDIIIY

SEQ ID NO: 36379 - protein, 8 aa, Homo sapiens
  misc_feature: Table A; Target 36379; HLA-C*05:01; LUZP4; ENSG00000102021; CTA
SLDDIIIY

SEQ ID NO: 36380 - protein, 8 aa, Homo sapiens
  misc_feature: Table A; Target 36380; HLA-C*12:03; LUZP4; ENSG00000102021; CTA
SLDDIIIY

SEQ ID NO: 36381 - protein, 9 aa, Homo sapiens
  misc_feature: Table A; Target 36381; HLA-A*01:01; LUZP4; ENSG00000102021; CTA
SLDDIIIYK

SEQ ID NO: 36382 - protein, 9 aa, Homo sapiens
  misc_feature: Table A; Target 36382; HLA-A*02:01; LUZP4; ENSG00000102021; CTA
SLDDIIIYK

SEQ ID NO: 36383 - protein, 9 aa, Homo sapiens
  misc_feature: Table A; Target 36383; HLA-A*02:04; LUZP4; ENSG00000102021; CTA
SLDDIIIYK

SEQ ID NO: 36384 - protein, 9 aa, Homo sapiens
  misc_feature: Table A; Target 36384; HLA-A*02:07; LUZP4; ENSG00000102021; CTA
SLDDIIIYK

SEQ ID NO: 36385 - protein, 9 aa, Homo sapiens
  misc_feature: Table A; Target 36385; HLA-A*03:01; LUZP4; ENSG00000102021; CTA
SLDDIIIYK

SEQ ID NO: 36386 - protein, 9 aa, Homo sapiens
  misc_feature: Table A; Target 36386; HLA-A*03:02; LUZP4; ENSG00000102021; CTA
SLDDIIIYK

SEQ ID NO: 36387 - protein, 9 aa, Homo sapiens
  misc_feature: Table A; Target 36387; HLA-A*11:01; LUZP4; ENSG00000102021; CTA
SLDDIIIYK

SEQ ID NO: 36388 - protein, 9 aa, Homo sapiens
  misc_feature: Table A; Target 36388; HLA-A*31:01; LUZP4; ENSG00000102021; CTA
SLDDIIIYK

SEQ ID NO: 36389 - protein, 9 aa, Homo sapiens
  misc_feature: Table A; Target 36389; HLA-A*68:01; LUZP4; ENSG00000102021; CTA
SLDDIIIYK

SEQ ID NO: 36390 - protein, 9 aa, Homo sapiens
  misc_feature: Table A; Target 36390; HLA-A*68:02; LUZP4; ENSG00000102021; CTA
SLDDIIIYK

SEQ ID NO: 36391 - protein, 10 aa, Homo sapiens
  misc_feature: Table A; Target 36391; HLA-A*02:07; LUZP4; ENSG00000102021; CTA
SLDDIIIYKE

SEQ ID NO: 36392 - protein, 11 aa, Homo sapiens
  misc_feature: Table A; Target 36392; HLA-A*02:07; LUZP4; ENSG00000102021; CTA
SLDDIIIYKEL

SEQ ID NO: 36393 - protein, 9 aa, Homo sapiens
  misc_feature: Table A; Target 36393; HLA-B*56:01; LUZP4; ENSG00000102021; CTA
SPSRQQSKA

SEQ ID NO: 36394 - protein, 10 aa, Homo sapiens
  misc_feature: Table A; Target 36394; HLA-B*27:05; LUZP4; ENSG00000102021; CTA
SQSDRSQGQL

SEQ ID NO: 36395 - protein, 10 aa, Homo sapiens
  misc_feature: Table A; Target 36395; HLA-B*39:01; LUZP4; ENSG00000102021; CTA
SQSDRSQGQL

SEQ ID NO: 36396 - protein, 11 aa, Homo sapiens
  misc_feature: Table A; Target 36396; HLA-A*03:02; LUZP4; ENSG00000102021; CTA
SQSDRSQGQLK

SEQ ID NO: 36397 - protein, 11 aa, Homo sapiens
  misc_feature: Table A; Target 36397; HLA-A*11:01; LUZP4; ENSG00000102021; CTA
SQSDRSQGQLK

SEQ ID NO: 36398 - protein, 11 aa, Homo sapiens
  misc_feature: Table A; Target 36398; HLA-A*31:01; LUZP4; ENSG00000102021; CTA
SQSDRSQGQLK

SEQ ID NO: 36399 - protein, 9 aa, Homo sapiens
  misc_feature: Table A; Target 36399; HLA-C*06:02; LUZP4; ENSG00000102021; CTA
SRNHLERSL

SEQ ID NO: 36400 - protein, 10 aa, Homo sapiens
  misc_feature: Table A; Target 36400; HLA-A*30:01; LUZP4; ENSG00000102021; CTA
TERDLINQSG

SEQ ID NO: 36401 - protein, 10 aa, Homo sapiens
  misc_feature: Table A; Target 36401; HLA-B*40:02; LUZP4; ENSG00000102021; CTA
TERDLINQSG

SEQ ID NO: 36402 - protein, 10 aa, Homo sapiens
  misc_feature: Table A; Target 36402; HLA-C*06:02; LUZP4; ENSG00000102021; CTA
TERDLINQSG

SEQ ID NO: 36403 - protein, 11 aa, Homo sapiens
  misc_feature: Table A; Target 36403; HLA-A*31:01; LUZP4; ENSG00000102021; CTA
TERDLINQSGR

SEQ ID NO: 36404 - protein, 8 aa, Homo sapiens
  misc_feature: Table A; Target 36404; HLA-C*04:01; LUZP4; ENSG00000102021; CTA
TGKNTITT

SEQ ID NO: 36405 - protein, 8 aa, Homo sapiens
  misc_feature: Table A; Target 36405; HLA-C*06:02; LUZP4; ENSG00000102021; CTA
TGKNTITT

SEQ ID NO: 36406 - protein, 8 aa, Homo sapiens
  misc_feature: Table A; Target 36406; HLA-C*07:01; LUZP4; ENSG00000102021; CTA
TGKNTITT

SEQ ID NO: 36407 - protein, 8 aa, Homo sapiens
  misc_feature: Table A; Target 36407; HLA-C*07:02; LUZP4; ENSG00000102021; CTA
TGKNTITT

SEQ ID NO: 36408 - protein, 8 aa, Homo sapiens
  misc_feature: Table A; Target 36408; HLA-C*07:04; LUZP4; ENSG00000102021; CTA
TGKNTITT

SEQ ID NO: 36409 - protein, 9 aa, Homo sapiens
  misc_feature: Table A; Target 36409; HLA-A*31:01; LUZP4; ENSG00000102021; CTA
TQKDLIATQ

SEQ ID NO: 36410 - protein, 9 aa, Homo sapiens
  misc_feature: Table A; Target 36410; HLA-B*27:05; LUZP4; ENSG00000102021; CTA
TQKDLIATQ

SEQ ID NO: 36411 - protein, 10 aa, Homo sapiens
  misc_feature: Table A; Target 36411; HLA-A*31:01; LUZP4; ENSG00000102021; CTA
TQKDLIATQR

SEQ ID NO: 36412 - protein, 10 aa, Homo sapiens
  misc_feature: Table A; Target 36412; HLA-A*33:01; LUZP4; ENSG00000102021; CTA
TQKDLIATQR

SEQ ID NO: 36413 - protein, 10 aa, Homo sapiens
  misc_feature: Table A; Target 36413; HLA-A*33:03; LUZP4; ENSG00000102021; CTA
TQKDLIATQR

SEQ ID NO: 36414 - protein, 10 aa, Homo sapiens
  misc_feature: Table A; Target 36414; HLA-A*68:01; LUZP4; ENSG00000102021; CTA
TQKDLIATQR

SEQ ID NO: 36415 - protein, 10 aa, Homo sapiens
  misc_feature: Table A; Target 36415; HLA-C*07:06; LUZP4; ENSG00000102021; CTA
TQKDLIATQR

SEQ ID NO: 36416 - protein, 10 aa, Homo sapiens
  misc_feature: Table A; Target 36416; HLA-A*03:01; LUZP4; ENSG00000102021; CTA
TQRDLIATQK

SEQ ID NO: 36417 - protein, 10 aa, Homo sapiens
  misc_feature: Table A; Target 36417; HLA-A*03:02; LUZP4; ENSG00000102021; CTA
TQRDLIATQK

SEQ ID NO: 36418 - protein, 10 aa, Homo sapiens
  misc_feature: Table A; Target 36418; HLA-A*31:01; LUZP4; ENSG00000102021; CTA
TQRDLIATQK

SEQ ID NO: 36419 - protein, 10 aa, Homo sapiens
  misc_feature: Table A; Target 36419; HLA-A*31:01; LUZP4; ENSG00000102021; CTA
TQRDLIATQR

SEQ ID NO: 36420 - protein, 10 aa, Homo sapiens
  misc_feature: Table A; Target 36420; HLA-A*33:03; LUZP4; ENSG00000102021; CTA
TQRDLIATQR

SEQ ID NO: 36421 - protein, 10 aa, Homo sapiens
  misc_feature: Table A; Target 36421; HLA-A*68:01; LUZP4; ENSG00000102021; CTA
TQRDLIATQR

SEQ ID NO: 36422 - protein, 10 aa, Homo sapiens
  misc_feature: Table A; Target 36422; HLA-C*07:06; LUZP4; ENSG00000102021; CTA
TQRDLIATQR

SEQ ID NO: 36423 - protein, 9 aa, Homo sapiens
  misc_feature: Table A; Target 36423; HLA-A*31:01; LUZP4; ENSG00000102021; CTA
TQRDLIVTQ

SEQ ID NO: 36424 - protein, 9 aa, Homo sapiens
  misc_feature: Table A; Target 36424; HLA-B*27:05; LUZP4; ENSG00000102021; CTA
TQRDLIVTQ

SEQ ID NO: 36425 - protein, 9 aa, Homo sapiens
  misc_feature: Table A; Target 36425; HLA-C*06:02; LUZP4; ENSG00000102021; CTA
TQRDLIVTQ

SEQ ID NO: 36426 - protein, 10 aa, Homo sapiens
  misc_feature: Table A; Target 36426; HLA-A*31:01; LUZP4; ENSG00000102021; CTA
TQRDLIVTQR

SEQ ID NO: 36427 - protein, 10 aa, Homo sapiens
  misc_feature: Table A; Target 36427; HLA-A*33:03; LUZP4; ENSG00000102021; CTA
TQRDLIVTQR

SEQ ID NO: 36428 - protein, 10 aa, Homo sapiens
  misc_feature: Table A; Target 36428; HLA-A*68:01; LUZP4; ENSG00000102021; CTA
TQRDLIVTQR

SEQ ID NO: 36429 - protein, 10 aa, Homo sapiens
  misc_feature: Table A; Target 36429; HLA-C*07:06; LUZP4; ENSG00000102021; CTA
TQRDLIVTQR

SEQ ID NO: 36430 - protein, 10 aa, Homo sapiens
  misc_feature: Table A; Target 36430; HLA-A*31:01; LUZP4; ENSG00000102021; CTA
TQRDLVATER

SEQ ID NO: 36431 - protein, 10 aa, Homo sapiens
  misc_feature: Table A; Target 36431; HLA-A*33:01; LUZP4; ENSG00000102021; CTA
TQRDLVATER

SEQ ID NO: 36432 - protein, 10 aa, Homo sapiens
  misc_feature: Table A; Target 36432; HLA-A*33:03; LUZP4; ENSG00000102021; CTA
TQRDLVATER

SEQ ID NO: 36433 - protein, 10 aa, Homo sapiens
  misc_feature: Table A; Target 36433; HLA-C*07:06; LUZP4; ENSG00000102021; CTA
TQRDLVATER

SEQ ID NO: 36434 - protein, 9 aa, Homo sapiens
  misc_feature: Table A; Target 36434; HLA-B*27:05; LUZP4; ENSG00000102021; CTA
TQSDLIATQ

SEQ ID NO: 36435 - protein, 9 aa, Homo sapiens
  misc_feature: Table A; Target 36435; HLA-B*38:01; LUZP4; ENSG00000102021; CTA
TQSDLIATQ

SEQ ID NO: 36436 - protein, 9 aa, Homo sapiens
  misc_feature: Table A; Target 36436; HLA-B*39:01; LUZP4; ENSG00000102021; CTA
TQSDLIATQ

SEQ ID NO: 36437 - protein, 10 aa, Homo sapiens
  misc_feature: Table A; Target 36437; HLA-A*11:01; LUZP4; ENSG00000102021; CTA
TQSDLIATQR

SEQ ID NO: 36438 - protein, 10 aa, Homo sapiens
  misc_feature: Table A; Target 36438; HLA-A*31:01; LUZP4; ENSG00000102021; CTA
TQSDLIATQR

SEQ ID NO: 36439 - protein, 10 aa, Homo sapiens
  misc_feature: Table A; Target 36439; HLA-A*33:03; LUZP4; ENSG00000102021; CTA
TQSDLIATQR

SEQ ID NO: 36440 - protein, 10 aa, Homo sapiens
  misc_feature: Table A; Target 36440; HLA-A*68:01; LUZP4; ENSG00000102021; CTA
TQSDLIATQR

SEQ ID NO: 36441 - protein, 10 aa, Homo sapiens
  misc_feature: Table A; Target 36441; HLA-A*68:02; LUZP4; ENSG00000102021; CTA
TQSDLIATQR

SEQ ID NO: 36442 - protein, 10 aa, Homo sapiens
  misc_feature: Table A; Target 36442; HLA-B*27:02; LUZP4; ENSG00000102021; CTA
TQSDLIATQR

SEQ ID NO: 36443 - protein, 10 aa, Homo sapiens
  misc_feature: Table A; Target 36443; HLA-B*27:05; LUZP4; ENSG00000102021; CTA
TQSDLIATQR

SEQ ID NO: 36444 - protein, 10 aa, Homo sapiens
  misc_feature: Table A; Target 36444; HLA-C*07:06; LUZP4; ENSG00000102021; CTA
TQSDLIATQR

SEQ ID NO: 36445 - protein, 8 aa, Homo sapiens
  misc_feature: Table A; Target 36445; HLA-B*51:01; LUZP4; ENSG00000102021; CTA
VATERDLI

SEQ ID NO: 36446 - protein, 8 aa, Homo sapiens
  misc_feature: Table A; Target 36446; HLA-C*16:01; LUZP4; ENSG00000102021; CTA
VATERDLI

SEQ ID NO: 36447 - protein, 8 aa, Homo sapiens
  misc_feature: Table A; Target 36447; HLA-C*16:02; LUZP4; ENSG00000102021; CTA
VATERDLI

SEQ ID NO: 36448 - protein, 8 aa, Homo sapiens
  misc_feature: Table A; Target 36448; HLA-B*51:01; LUZP4; ENSG00000102021; CTA
VPPNHPSR

SEQ ID NO: 36449 - protein, 8 aa, Homo sapiens
  misc_feature: Table A; Target 36449; HLA-C*16:01; LUZP4; ENSG00000102021; CTA
VPPNHPSR

SEQ ID NO: 36450 - protein, 11 aa, Homo sapiens
  misc_feature: Table A; Target 36450; HLA-A*31:01; LUZP4; ENSG00000102021; CTA
VTQRDLVATER

SEQ ID NO: 36451 - protein, 11 aa, Homo sapiens
  misc_feature: Table A; Target 36451; HLA-A*33:01; LUZP4; ENSG00000102021; CTA
VTQRDLVATER

SEQ ID NO: 36452 - protein, 11 aa, Homo sapiens
  misc_feature: Table A; Target 36452; HLA-A*68:01; LUZP4; ENSG00000102021; CTA
VTQRDLVATER

SEQ ID NO: 36453 - protein, 11 aa, Homo sapiens
  misc_feature: Table A; Target 36453; HLA-C*07:06; LUZP4; ENSG00000102021; CTA
VTQRDLVATER

SEQ ID NO: 36454 - protein, 8 aa, Homo sapiens
  misc_feature: Table A; Target 36454; HLA-C*07:04; LUZP4; ENSG00000102021; CTA
YEAQAEKN

SEQ ID NO: 36455 - protein, 9 aa, Homo sapiens
  misc_feature: Table A; Target 36455; HLA-B*07:02; LUZP4; ENSG00000102021; CTA
YEAQAEKNQ

SEQ ID NO: 36456 - protein, 9 aa, Homo sapiens
  misc_feature: Table A; Target 36456; HLA-B*44:02; LUZP4; ENSG00000102021; CTA
YEAQAEKNQ

SEQ ID NO: 36457 - protein, 9 aa, Homo sapiens
  misc_feature: Table A; Target 36457; HLA-B*44:03; LUZP4; ENSG00000102021; CTA
YEAQAEKNQ

SEQ ID NO: 36458 - protein, 9 aa, Homo sapiens
  misc_feature: Table A; Target 36458; HLA-C*06:02; LUZP4; ENSG00000102021; CTA
YEAQAEKNQ

SEQ ID NO: 36459 - protein, 9 aa, Homo sapiens
  misc_feature: Table A; Target 36459; HLA-C*07:01; LUZP4; ENSG00000102021; CTA
YEAQAEKNQ

SEQ ID NO: 36460 - protein, 9 aa, Homo sapiens
  misc_feature: Table A; Target 36460; HLA-C*12:03; LUZP4; ENSG00000102021; CTA
YEAQAEKNQ

SEQ ID NO: 36461 - protein, 9 aa, Homo sapiens
  misc_feature: Table A; Target 36461; HLA-C*16:02; LUZP4; ENSG00000102021; CTA
YEAQAEKNQ

SEQ ID NO: 36462 - protein, 10 aa, Homo sapiens
  misc_feature: Table A; Target 36462; HLA-B*40:02; LUZP4; ENSG00000102021; CTA
YEAQAEKNQG

SEQ ID NO: 36463 - protein, 10 aa, Homo sapiens
  misc_feature: Table A; Target 36463; HLA-B*49:01; LUZP4; ENSG00000102021; CTA
YEAQAEKNQG

SEQ ID NO: 36464 - protein, 11 aa, Homo sapiens
  misc_feature: Table A; Target 36464; HLA-C*06:02; LUZP4; ENSG00000102021; CTA
YEAQAEKNQGQ

SEQ ID NO: 36465 - protein, 8 aa, Homo sapiens
  misc_feature: Table A; Target 36465; HLA-B*18:01; LUZP4; ENSG00000102021; CTA
YERSHGQY

SEQ ID NO: 36466 - protein, 8 aa, Homo sapiens
  misc_feature: Table A; Target 36466; HLA-A*32:01; LUZP4; ENSG00000102021; CTA
YSTGKNTI

SEQ ID NO: 36467 - protein, 8 aa, Homo sapiens
  misc_feature: Table A; Target 36467; HLA-B*08:01; LUZP4; ENSG00000102021; CTA
YSTGKNTI

SEQ ID NO: 36468 - protein, 8 aa, Homo sapiens
  misc_feature: Table A; Target 36468; HLA-C*16:01; LUZP4; ENSG00000102021; CTA
YSTGKNTI

SEQ ID NO: 36469 - protein, 8 aa, Homo sapiens
  misc_feature: Table A; Target 36469; HLA-C*16:02; LUZP4; ENSG00000102021; CTA
YSTGKNTI

SEQ ID NO: 36470 - protein, 9 aa, Homo sapiens
  misc_feature: Table A; Target 36470; HLA-B*07:02; MAGEA1; ENSG00000198681; CTA
AATSSSSPL

SEQ ID NO: 36471 - protein, 9 aa, Homo sapiens
  misc_feature: Table A; Target 36471; HLA-B*35:03; MAGEA1; ENSG00000198681; CTA
AATSSSSPL

SEQ ID NO: 36472 - protein, 9 aa, Homo sapiens
  misc_feature: Table A; Target 36472; HLA-B*46:01; MAGEA1; ENSG00000198681; CTA
AATSSSSPL

SEQ ID NO: 36473 - protein, 9 aa, Homo sapiens
  misc_feature: Table A; Target 36473; HLA-C*01:02; MAGEA1; ENSG00000198681; CTA
AATSSSSPL

SEQ ID NO: 36474 - protein, 9 aa, Homo sapiens
  misc_feature: Table A; Target 36474; HLA-C*02:02; MAGEA1; ENSG00000198681; CTA
AATSSSSPL

SEQ ID NO: 36475 - protein, 9 aa, Homo sapiens
  misc_feature: Table A; Target 36475; HLA-C*03:03; MAGEA1; ENSG00000198681; CTA
AATSSSSPL

SEQ ID NO: 36476 - protein, 9 aa, Homo sapiens
  misc_feature: Table A; Target 36476; HLA-C*03:04; MAGEA1; ENSG00000198681; CTA
AATSSSSPL

SEQ ID NO: 36477 - protein, 9 aa, Homo sapiens
  misc_feature: Table A; Target 36477; HLA-C*07:02; MAGEA1; ENSG00000198681; CTA
AATSSSSPL

SEQ ID NO: 36478 - protein, 9 aa, Homo sapiens
  misc_feature: Table A; Target 36478; HLA-C*14:02; MAGEA1; ENSG00000198681; CTA
AATSSSSPL

SEQ ID NO: 36479 - protein, 9 aa, Homo sapiens
  misc_feature: Table A; Target 36479; HLA-C*16:01; MAGEA1; ENSG00000198681; CTA
AATSSSSPL

SEQ ID NO: 36480 - protein, 9 aa, Homo sapiens
  misc_feature: Table A; Target 36480; HLA-C*16:02; MAGEA1; ENSG00000198681; CTA
AATSSSSPL

SEQ ID NO: 36481 - protein, 11 aa, Homo sapiens
  misc_feature: Table A; Target 36481; HLA-C*03:03; MAGEA1; ENSG00000198681; CTA
AATSSSSPLVL

SEQ ID NO: 36482 - protein, 11 aa, Homo sapiens
  misc_feature: Table A; Target 36482; HLA-C*03:04; MAGEA1; ENSG00000198681; CTA
AATSSSSPLVL

SEQ ID NO: 36483 - protein, 8 aa, Homo sapiens
  misc_feature: Table A; Target 36483; HLA-B*37:01; MAGEA1; ENSG00000198681; CTA
ADLVGFLL

SEQ ID NO: 36484 - protein, 8 aa, Homo sapiens
  misc_feature: Table A; Target 36484; HLA-B*40:02; MAGEA1; ENSG00000198681; CTA
ADLVGFLL

SEQ ID NO: 36485 - protein, 9 aa, Homo sapiens
  misc_feature: Table A; Target 36485; HLA-B*37:01; MAGEA1; ENSG00000198681; CTA
ADLVGFLLL

SEQ ID NO: 36486 - protein, 9 aa, Homo sapiens
  misc_feature: Table A; Target 36486; HLA-B*44:02; MAGEA1; ENSG00000198681; CTA
ADLVGFLLL

SEQ ID NO: 36487 - protein, 8 aa, Homo sapiens
  misc_feature: Table A; Target 36487; HLA-A*30:02; MAGEA1; ENSG00000198681; CTA
ADPTGHSY

SEQ ID NO: 36488 - protein, 8 aa, Homo sapiens
  misc_feature: Table A; Target 36488; HLA-B*15:03; MAGEA1; ENSG00000198681; CTA
ADPTGHSY

SEQ ID NO: 36489 - protein, 8 aa, Homo sapiens
  misc_feature: Table A; Target 36489; HLA-B*37:01; MAGEA1; ENSG00000198681; CTA
ADPTGHSY

SEQ ID NO: 36490 - protein, 8 aa, Homo sapiens
  misc_feature: Table A; Target 36490; HLA-B*44:02; MAGEA1; ENSG00000198681; CTA
ADPTGHSY

SEQ ID NO: 36491 - protein, 8 aa, Homo sapiens
  misc_feature: Table A; Target 36491; HLA-B*44:03; MAGEA1; ENSG00000198681; CTA
ADPTGHSY

SEQ ID NO: 36492 - protein, 8 aa, Homo sapiens
  misc_feature: Table A; Target 36492; HLA-C*01:02; MAGEA1; ENSG00000198681; CTA
ADPTGHSY

SEQ ID NO: 36493 - protein, 8 aa, Homo sapiens
  misc_feature: Table A; Target 36493; HLA-C*14:02; MAGEA1; ENSG00000198681; CTA
ADPTGHSY

SEQ ID NO: 36494 - protein, 9 aa, Homo sapiens
  misc_feature: Table A; Target 36494; HLA-B*37:01; MAGEA1; ENSG00000198681; CTA
ADPTGHSYV

SEQ ID NO: 36495 - protein, 10 aa, Homo sapiens
  misc_feature: Table A; Target 36495; HLA-B*37:01; MAGEA1; ENSG00000198681; CTA
ADPTGHSYVL

SEQ ID NO: 36496 - protein, 11 aa, Homo sapiens
  misc_feature: Table A; Target 36496; HLA-A*30:02; MAGEA1; ENSG00000198681; CTA
AETSYVKVLEY

SEQ ID NO: 36497 - protein, 11 aa, Homo sapiens
  misc_feature: Table A; Target 36497; HLA-B*18:01; MAGEA1; ENSG00000198681; CTA
AETSYVKVLEY

SEQ ID NO: 36498 - protein, 11 aa, Homo sapiens
  misc_feature: Table A; Target 36498; HLA-B*27:02; MAGEA1; ENSG00000198681; CTA
AETSYVKVLEY

SEQ ID NO: 36499 - protein, 11 aa, Homo sapiens
  misc_feature: Table A; Target 36499; HLA-B*40:01; MAGEA1; ENSG00000198681; CTA
AETSYVKVLEY

SEQ ID NO: 36500 - protein, 11 aa, Homo sapiens
  misc_feature: Table A; Target 36500; HLA-B*44:02; MAGEA1; ENSG00000198681; CTA
AETSYVKVLEY

SEQ ID NO: 36501 - protein, 11 aa, Homo sapiens
  misc_feature: Table A; Target 36501; HLA-C*16:04; MAGEA1; ENSG00000198681; CTA
AETSYVKVLEY

SEQ ID NO: 36502 - protein, 8 aa, Homo sapiens
  misc_feature: Table A; Target 36502; HLA-A*23:01; MAGEA1; ENSG00000198681; CTA
AFPTTINF

SEQ ID NO: 36503 - protein, 8 aa, Homo sapiens
  misc_feature: Table A; Target 36503; HLA-C*01:02; MAGEA1; ENSG00000198681; CTA
AFPTTINF

SEQ ID NO: 36504 - protein, 8 aa, Homo sapiens
  misc_feature: Table A; Target 36504; HLA-C*14:02; MAGEA1; ENSG00000198681; CTA
AFPTTINF

SEQ ID NO: 36505 - protein, 9 aa, Homo sapiens
  misc_feature: Table A; Target 36505; HLA-C*01:02; MAGEA1; ENSG00000198681; CTA
ALEAQQEAL

SEQ ID NO: 36506 - protein, 9 aa, Homo sapiens
  misc_feature: Table A; Target 36506; HLA-A*02:01; MAGEA1; ENSG00000198681; CTA
ALGLVCVQA

SEQ ID NO: 36507 - protein, 9 aa, Homo sapiens
  misc_feature: Table A; Target 36507; HLA-B*55:01; MAGEA1; ENSG00000198681; CTA
ALGLVCVQA

SEQ ID NO: 36508 - protein, 9 aa, Homo sapiens
  misc_feature: Table A; Target 36508; HLA-A*02:03; MAGEA1; ENSG00000198681; CTA
ALREEEEGV

SEQ ID NO: 36509 - protein, 9 aa, Homo sapiens
  misc_feature: Table A; Target 36509; HLA-A*02:04; MAGEA1; ENSG00000198681; CTA
ALREEEEGV

SEQ ID NO: 36510 - protein, 9 aa, Homo sapiens
  misc_feature: Table A; Target 36510; HLA-A*02:07; MAGEA1; ENSG00000198681; CTA
ALREEEEGV

SEQ ID NO: 36511 - protein, 9 aa, Homo sapiens
  misc_feature: Table A; Target 36511; HLA-B*13:02; MAGEA1; ENSG00000198681; CTA
ALREEEEGV

SEQ ID NO: 36512 - protein, 9 aa, Homo sapiens
  misc_feature: Table A; Target 36512; HLA-B*15:01; MAGEA1; ENSG00000198681; CTA
ALREEEEGV

SEQ ID NO: 36513 - protein, 9 aa, Homo sapiens
  misc_feature: Table A; Target 36513; HLA-B*40:02; MAGEA1; ENSG00000198681; CTA
ALREEEEGV

SEQ ID NO: 36514 - protein, 9 aa, Homo sapiens
  misc_feature: Table A; Target 36514; HLA-C*06:02; MAGEA1; ENSG00000198681; CTA
ALREEEEGV

SEQ ID NO: 36515 - protein, 9 aa, Homo sapiens
  misc_feature: Table A; Target 36515; HLA-C*07:04; MAGEA1; ENSG00000198681; CTA
ALREEEEGV

SEQ ID NO: 36516 - protein, 9 aa, Homo sapiens
  misc_feature: Table A; Target 36516; HLA-A*02:03; MAGEA1; ENSG00000198681; CTA
AQQEALGLV

SEQ ID NO: 36517 - protein, 9 aa, Homo sapiens
  misc_feature: Table A; Target 36517; HLA-B*13:02; MAGEA1; ENSG00000198681; CTA
AQQEALGLV

SEQ ID NO: 36518 - protein, 11 aa, Homo sapiens
  misc_feature: Table A; Target 36518; HLA-A*02:01; MAGEA1; ENSG00000198681; CTA
AQQEALGLVCV

SEQ ID NO: 36519 - protein, 11 aa, Homo sapiens
  misc_feature: Table A; Target 36519; HLA-A*02:04; MAGEA1; ENSG00000198681; CTA
AQQEALGLVCV

SEQ ID NO: 36520 - protein, 11 aa, Homo sapiens
  misc_feature: Table A; Target 36520; HLA-A*30:01; MAGEA1; ENSG00000198681; CTA
AQQEALGLVCV

SEQ ID NO: 36521 - protein, 11 aa, Homo sapiens
  misc_feature: Table A; Target 36521; HLA-B*13:02; MAGEA1; ENSG00000198681; CTA
AQQEALGLVCV

SEQ ID NO: 36522 - protein, 11 aa, Homo sapiens
  misc_feature: Table A; Target 36522; HLA-B*15:01; MAGEA1; ENSG00000198681; CTA
AQQEALGLVCV

SEQ ID NO: 36523 - protein, 10 aa, Homo sapiens
  misc_feature: Table A; Target 36523; HLA-B*57:01; MAGEA1; ENSG00000198681; CTA
ASAFPTTINF

SEQ ID NO: 36524 - protein, 10 aa, Homo sapiens
  misc_feature: Table A; Target 36524; HLA-B*58:01; MAGEA1; ENSG00000198681; CTA
ASAFPTTINF

SEQ ID NO: 36525 - protein, 9 aa, Homo sapiens
  misc_feature: Table A; Target 36525; HLA-A*01:01; MAGEA1; ENSG00000198681; CTA
ASESLQLVF

SEQ ID NO: 36526 - protein, 9 aa, Homo sapiens
  misc_feature: Table A; Target 36526; HLA-A*29:02; MAGEA1; ENSG00000198681; CTA
ASESLQLVF

SEQ ID NO: 36527 - protein, 9 aa, Homo sapiens
  misc_feature: Table A; Target 36527; HLA-B*57:01; MAGEA1; ENSG00000198681; CTA
ASESLQLVF

SEQ ID NO: 36528 - protein, 9 aa, Homo sapiens
  misc_feature: Table A; Target 36528; HLA-B*58:01; MAGEA1; ENSG00000198681; CTA
ASESLQLVF

SEQ ID NO: 36529 - protein, 9 aa, Homo sapiens
  misc_feature: Table A; Target 36529; HLA-C*05:01; MAGEA1; ENSG00000198681; CTA
ASESLQLVF

SEQ ID NO: 36530 - protein, 9 aa, Homo sapiens
  misc_feature: Table A; Target 36530; HLA-A*01:01; MAGEA1; ENSG00000198681; CTA
ATSSSSPLV

SEQ ID NO: 36531 - protein, 9 aa, Homo sapiens
  misc_feature: Table A; Target 36531; HLA-A*02:01; MAGEA1; ENSG00000198681; CTA
ATSSSSPLV

SEQ ID NO: 36532 - protein, 9 aa, Homo sapiens
  misc_feature: Table A; Target 36532; HLA-A*03:02; MAGEA1; ENSG00000198681; CTA
ATSSSSPLV

SEQ ID NO: 36533 - protein, 9 aa, Homo sapiens
  misc_feature: Table A; Target 36533; HLA-A*11:01; MAGEA1; ENSG00000198681; CTA
ATSSSSPLV

SEQ ID NO: 36534 - protein, 9 aa, Homo sapiens
  misc_feature: Table A; Target 36534; HLA-B*13:02; MAGEA1; ENSG00000198681; CTA
ATSSSSPLV

SEQ ID NO: 36535 - protein, 9 aa, Homo sapiens
  misc_feature: Table A; Target 36535; HLA-B*27:05; MAGEA1; ENSG00000198681; CTA
ATSSSSPLV

SEQ ID NO: 36536 - protein, 9 aa, Homo sapiens
  misc_feature: Table A; Target 36536; HLA-B*39:01; MAGEA1; ENSG00000198681; CTA
ATSSSSPLV

SEQ ID NO: 36537 - protein, 9 aa, Homo sapiens
  misc_feature: Table A; Target 36537; HLA-C*02:02; MAGEA1; ENSG00000198681; CTA
ATSSSSPLV

SEQ ID NO: 36538 - protein, 9 aa, Homo sapiens
  misc_feature: Table A; Target 36538; HLA-C*16:02; MAGEA1; ENSG00000198681; CTA
ATSSSSPLV

SEQ ID NO: 36539 - protein, 10 aa, Homo sapiens
  misc_feature: Table A; Target 36539; HLA-A*03:01; MAGEA1; ENSG00000198681; CTA
ATSSSSPLVL

SEQ ID NO: 36540 - protein, 10 aa, Homo sapiens
  misc_feature: Table A; Target 36540; HLA-A*11:01; MAGEA1; ENSG00000198681; CTA
ATSSSSPLVL

SEQ ID NO: 36541 - protein, 10 aa, Homo sapiens
  misc_feature: Table A; Target 36541; HLA-C*07:04; MAGEA1; ENSG00000198681; CTA
ATSSSSPLVL

SEQ ID NO: 36542 - protein, 11 aa, Homo sapiens
  misc_feature: Table A; Target 36542; HLA-A*31:01; MAGEA1; ENSG00000198681; CTA
ATSSSSPLVLG

SEQ ID NO: 36543 - protein, 8 aa, Homo sapiens
  misc_feature: Table A; Target 36543; HLA-B*08:01; MAGEA1; ENSG00000198681; CTA
AVITKKVA

SEQ ID NO: 36544 - protein, 8 aa, Homo sapiens
  misc_feature: Table A; Target 36544; HLA-A*24:02; MAGEA1; ENSG00000198681; CTA
AYGEPRKL

SEQ ID NO: 36545 - protein, 8 aa, Homo sapiens
  misc_feature: Table A; Target 36545; HLA-C*16:01; MAGEA1; ENSG00000198681; CTA
AYGEPRKL

SEQ ID NO: 36546 - protein, 9 aa, Homo sapiens
  misc_feature: Table A; Target 36546; HLA-A*24:02; MAGEA1; ENSG00000198681; CTA
AYGEPRKLL

SEQ ID NO: 36547 - protein, 9 aa, Homo sapiens
  misc_feature: Table A; Target 36547; HLA-A*02:01; MAGEA1; ENSG00000198681; CTA
CILESLFRA

SEQ ID NO: 36548 - protein, 9 aa, Homo sapiens
  misc_feature: Table A; Target 36548; HLA-A*02:04; MAGEA1; ENSG00000198681; CTA
CILESLFRA

SEQ ID NO: 36549 - protein, 8 aa, Homo sapiens
  misc_feature: Table A; Target 36549; HLA-B*08:01; MAGEA1; ENSG00000198681; CTA
DGREHSAY

SEQ ID NO: 36550 - protein, 8 aa, Homo sapiens
  misc_feature: Table A; Target 36550; HLA-B*18:01; MAGEA1; ENSG00000198681; CTA
DGREHSAY

SEQ ID NO: 36551 - protein, 10 aa, Homo sapiens
  misc_feature: Table A; Target 36551; HLA-A*25:01; MAGEA1; ENSG00000198681; CTA
DLVGFLLLKY

SEQ ID NO: 36552 - protein, 10 aa, Homo sapiens
  misc_feature: Table A; Target 36552; HLA-A*26:01; MAGEA1; ENSG00000198681; CTA
DLVGFLLLKY

SEQ ID NO: 36553 - protein, 10 aa, Homo sapiens
  misc_feature: Table A; Target 36553; HLA-A*29:02; MAGEA1; ENSG00000198681; CTA
DLVGFLLLKY

SEQ ID NO: 36554 - protein, 11 aa, Homo sapiens
  misc_feature: Table A; Target 36554; HLA-A*33:01; MAGEA1; ENSG00000198681; CTA
DLVQEKYLEYR

SEQ ID NO: 36555 - protein, 8 aa, Homo sapiens
  misc_feature: Table A; Target 36555; HLA-B*51:01; MAGEA1; ENSG00000198681; CTA
DPTGHSYV

SEQ ID NO: 36556 - protein, 9 aa, Homo sapiens
  misc_feature: Table A; Target 36556; HLA-B*07:02; MAGEA1; ENSG00000198681; CTA
DPTGHSYVL

SEQ ID NO: 36557 - protein, 9 aa, Homo sapiens
  misc_feature: Table A; Target 36557; HLA-B*08:01; MAGEA1; ENSG00000198681; CTA
DPTGHSYVL

SEQ ID NO: 36558 - protein, 9 aa, Homo sapiens
  misc_feature: Table A; Target 36558; HLA-B*35:01; MAGEA1; ENSG00000198681; CTA
DPTGHSYVL

SEQ ID NO: 36559 - protein, 9 aa, Homo sapiens
  misc_feature: Table A; Target 36559; HLA-B*39:01; MAGEA1; ENSG00000198681; CTA
DPTGHSYVL

SEQ ID NO: 36560 - protein, 9 aa, Homo sapiens
  misc_feature: Table A; Target 36560; HLA-B*51:01; MAGEA1; ENSG00000198681; CTA
DPTGHSYVL

SEQ ID NO: 36561 - protein, 9 aa, Homo sapiens
  misc_feature: Table A; Target 36561; HLA-B*55:01; MAGEA1; ENSG00000198681; CTA
DPTGHSYVL

SEQ ID NO: 36562 - protein, 9 aa, Homo sapiens
  misc_feature: Table A; Target 36562; HLA-C*07:02; MAGEA1; ENSG00000198681; CTA
DPTGHSYVL

SEQ ID NO: 36563 - protein, 9 aa, Homo sapiens
  misc_feature: Table A; Target 36563; HLA-A*01:01; MAGEA1; ENSG00000198681; CTA
DSDPARYEF

SEQ ID NO: 36564 - protein, 9 aa, Homo sapiens
  misc_feature: Table A; Target 36564; HLA-A*25:01; MAGEA1; ENSG00000198681; CTA
DSDPARYEF

SEQ ID NO: 36565 - protein, 9 aa, Homo sapiens
  misc_feature: Table A; Target 36565; HLA-A*32:01; MAGEA1; ENSG00000198681; CTA
DSDPARYEF

SEQ ID NO: 36566 - protein, 9 aa, Homo sapiens
  misc_feature: Table A; Target 36566; HLA-A*33:01; MAGEA1; ENSG00000198681; CTA
DSDPARYEF

SEQ ID NO: 36567 - protein, 9 aa, Homo sapiens
  misc_feature: Table A; Target 36567; HLA-B*18:01; MAGEA1; ENSG00000198681; CTA
DSDPARYEF

SEQ ID NO: 36568 - protein, 9 aa, Homo sapiens
  misc_feature: Table A; Target 36568; HLA-B*35:01; MAGEA1; ENSG00000198681; CTA
DSDPARYEF

SEQ ID NO: 36569 - protein, 9 aa, Homo sapiens
  misc_feature: Table A; Target 36569; HLA-B*38:01; MAGEA1; ENSG00000198681; CTA
DSDPARYEF

SEQ ID NO: 36570 - protein, 9 aa, Homo sapiens
  misc_feature: Table A; Target 36570; HLA-B*39:01; MAGEA1; ENSG00000198681; CTA
DSDPARYEF

SEQ ID NO: 36571 - protein, 9 aa, Homo sapiens
  misc_feature: Table A; Target 36571; HLA-B*57:01; MAGEA1; ENSG00000198681; CTA
DSDPARYEF

SEQ ID NO: 36572 - protein, 9 aa, Homo sapiens
  misc_feature: Table A; Target 36572; HLA-B*58:01; MAGEA1; ENSG00000198681; CTA
DSDPARYEF

SEQ ID NO: 36573 - protein, 9 aa, Homo sapiens
  misc_feature: Table A; Target 36573; HLA-C*05:01; MAGEA1; ENSG00000198681; CTA
DSDPARYEF

SEQ ID NO: 36574 - protein, 9 aa, Homo sapiens
  misc_feature: Table A; Target 36574; HLA-C*16:01; MAGEA1; ENSG00000198681; CTA
DSDPARYEF

SEQ ID NO: 36575 - protein, 10 aa, Homo sapiens
  misc_feature: Table A; Target 36575; HLA-A*01:01; MAGEA1; ENSG00000198681; CTA
DSDPARYEFL

SEQ ID NO: 36576 - protein, 10 aa, Homo sapiens
  misc_feature: Table A; Target 36576; HLA-A*25:01; MAGEA1; ENSG00000198681; CTA
DVKEADPTGH

SEQ ID NO: 36577 - protein, 10 aa, Homo sapiens
  misc_feature: Table A; Target 36577; HLA-A*26:01; MAGEA1; ENSG00000198681; CTA
DVKEADPTGH

SEQ ID NO: 36578 - protein, 9 aa, Homo sapiens
  misc_feature: Table A; Target 36578; HLA-A*25:01; MAGEA1; ENSG00000198681; CTA
EADPTGHSY

SEQ ID NO: 36579 - protein, 9 aa, Homo sapiens
  misc_feature: Table A; Target 36579; HLA-A*26:01; MAGEA1; ENSG00000198681; CTA
EADPTGHSY

SEQ ID NO: 36580 - protein, 9 aa, Homo sapiens
  misc_feature: Table A; Target 36580; HLA-A*29:02; MAGEA1; ENSG00000198681; CTA
EADPTGHSY

SEQ ID NO: 36581 - protein, 9 aa, Homo sapiens
  misc_feature: Table A; Target 36581; HLA-A*30:02; MAGEA1; ENSG00000198681; CTA
EADPTGHSY

SEQ ID NO: 36582 - protein, 9 aa, Homo sapiens
  misc_feature: Table A; Target 36582; HLA-A*32:01; MAGEA1; ENSG00000198681; CTA
EADPTGHSY

SEQ ID NO: 36583 - protein, 9 aa, Homo sapiens
  misc_feature: Table A; Target 36583; HLA-A*33:01; MAGEA1; ENSG00000198681; CTA
EADPTGHSY

SEQ ID NO: 36584 - protein, 9 aa, Homo sapiens
  misc_feature: Table A; Target 36584; HLA-A*33:03; MAGEA1; ENSG00000198681; CTA
EADPTGHSY

SEQ ID NO: 36585 - protein, 9 aa, Homo sapiens
  misc_feature: Table A; Target 36585; HLA-A*68:01; MAGEA1; ENSG00000198681; CTA
EADPTGHSY

SEQ ID NO: 36586 - protein, 9 aa, Homo sapiens
  misc_feature: Table A; Target 36586; HLA-B*15:01; MAGEA1; ENSG00000198681; CTA
EADPTGHSY

SEQ ID NO: 36587 - protein, 9 aa, Homo sapiens
  misc_feature: Table A; Target 36587; HLA-B*15:03; MAGEA1; ENSG00000198681; CTA
EADPTGHSY

SEQ ID NO: 36588 - protein, 9 aa, Homo sapiens
  misc_feature: Table A; Target 36588; HLA-B*18:01; MAGEA1; ENSG00000198681; CTA
EADPTGHSY

SEQ ID NO: 36589 - protein, 9 aa, Homo sapiens
  misc_feature: Table A; Target 36589; HLA-B*35:03; MAGEA1; ENSG00000198681; CTA
EADPTGHSY

SEQ ID NO: 36590 - protein, 9 aa, Homo sapiens
  misc_feature: Table A; Target 36590; HLA-B*38:01; MAGEA1; ENSG00000198681; CTA
EADPTGHSY

SEQ ID NO: 36591 - protein, 9 aa, Homo sapiens
  misc_feature: Table A; Target 36591; HLA-B*39:01; MAGEA1; ENSG00000198681; CTA
EADPTGHSY

SEQ ID NO: 36592 - protein, 9 aa, Homo sapiens
  misc_feature: Table A; Target 36592; HLA-B*44:02; MAGEA1; ENSG00000198681; CTA
EADPTGHSY

SEQ ID NO: 36593 - protein, 9 aa, Homo sapiens
  misc_feature: Table A; Target 36593; HLA-B*44:03; MAGEA1; ENSG00000198681; CTA
EADPTGHSY

SEQ ID NO: 36594 - protein, 9 aa, Homo sapiens
  misc_feature: Table A; Target 36594; HLA-B*46:01; MAGEA1; ENSG00000198681; CTA
EADPTGHSY

SEQ ID NO: 36595 - protein, 9 aa, Homo sapiens
  misc_feature: Table A; Target 36595; HLA-B*58:01; MAGEA1; ENSG00000198681; CTA
EADPTGHSY

SEQ ID NO: 36596 - protein, 9 aa, Homo sapiens
  misc_feature: Table A; Target 36596; HLA-C*01:02; MAGEA1; ENSG00000198681; CTA
EADPTGHSY

SEQ ID NO: 36597 - protein, 9 aa, Homo sapiens
  misc_feature: Table A; Target 36597; HLA-C*02:02; MAGEA1; ENSG00000198681; CTA
EADPTGHSY

SEQ ID NO: 36598 - protein, 9 aa, Homo sapiens
  misc_feature: Table A; Target 36598; HLA-C*03:03; MAGEA1; ENSG00000198681; CTA
EADPTGHSY

SEQ ID NO: 36599 - protein, 9 aa, Homo sapiens
  misc_feature: Table A; Target 36599; HLA-C*03:04; MAGEA1; ENSG00000198681; CTA
EADPTGHSY

SEQ ID NO: 36600 - protein, 9 aa, Homo sapiens
  misc_feature: Table A; Target 36600; HLA-C*04:01; MAGEA1; ENSG00000198681; CTA
EADPTGHSY

SEQ ID NO: 36601 - protein, 9 aa, Homo sapiens
  misc_feature: Table A; Target 36601; HLA-C*05:01; MAGEA1; ENSG00000198681; CTA
EADPTGHSY

SEQ ID NO: 36602 - protein, 9 aa, Homo sapiens
  misc_feature: Table A; Target 36602; HLA-C*07:04; MAGEA1; ENSG00000198681; CTA
EADPTGHSY

SEQ ID NO: 36603 - protein, 9 aa, Homo sapiens
  misc_feature: Table A; Target 36603; HLA-C*07:06; MAGEA1; ENSG00000198681; CTA
EADPTGHSY

SEQ ID NO: 36604 - protein, 9 aa, Homo sapiens
  misc_feature: Table A; Target 36604; HLA-C*14:02; MAGEA1; ENSG00000198681; CTA
EADPTGHSY

SEQ ID NO: 36605 - protein, 9 aa, Homo sapiens
  misc_feature: Table A; Target 36605; HLA-C*16:01; MAGEA1; ENSG00000198681; CTA
EADPTGHSY

SEQ ID NO: 36606 - protein, 9 aa, Homo sapiens
  misc_feature: Table A; Target 36606; HLA-C*16:02; MAGEA1; ENSG00000198681; CTA
EADPTGHSY

SEQ ID NO: 36607 - protein, 9 aa, Homo sapiens
  misc_feature: Table A; Target 36607; HLA-C*16:04; MAGEA1; ENSG00000198681; CTA
EADPTGHSY

SEQ ID NO: 36608 - protein, 10 aa, Homo sapiens
  misc_feature: Table A; Target 36608; HLA-A*01:01; MAGEA1; ENSG00000198681; CTA
EADPTGHSYV

SEQ ID NO: 36609 - protein, 10 aa, Homo sapiens
  misc_feature: Table A; Target 36609; HLA-A*68:02; MAGEA1; ENSG00000198681; CTA
EADPTGHSYV

SEQ ID NO: 36610 - protein, 10 aa, Homo sapiens
  misc_feature: Table A; Target 36610; HLA-B*38:01; MAGEA1; ENSG00000198681; CTA
EADPTGHSYV

SEQ ID NO: 36611 - protein, 10 aa, Homo sapiens
  misc_feature: Table A; Target 36611; HLA-B*51:01; MAGEA1; ENSG00000198681; CTA
EADPTGHSYV

SEQ ID NO: 36612 - protein, 10 aa, Homo sapiens
  misc_feature: Table A; Target 36612; HLA-C*05:01; MAGEA1; ENSG00000198681; CTA
EADPTGHSYV

SEQ ID NO: 36613 - protein, 10 aa, Homo sapiens
  misc_feature: Table A; Target 36613; HLA-C*16:02; MAGEA1; ENSG00000198681; CTA
EADPTGHSYV

SEQ ID NO: 36614 - protein, 11 aa, Homo sapiens
  misc_feature: Table A; Target 36614; HLA-A*01:01; MAGEA1; ENSG00000198681; CTA
EADPTGHSYVL

SEQ ID NO: 36615 - protein, 11 aa, Homo sapiens
  misc_feature: Table A; Target 36615; HLA-B*27:05; MAGEA1; ENSG00000198681; CTA
EADPTGHSYVL

SEQ ID NO: 36616 - protein, 11 aa, Homo sapiens
  misc_feature: Table A; Target 36616; HLA-B*35:01; MAGEA1; ENSG00000198681; CTA
EADPTGHSYVL

SEQ ID NO: 36617 - protein, 11 aa, Homo sapiens
  misc_feature: Table A; Target 36617; HLA-B*35:03; MAGEA1; ENSG00000198681; CTA
EADPTGHSYVL

SEQ ID NO: 36618 - protein, 11 aa, Homo sapiens
  misc_feature: Table A; Target 36618; HLA-B*38:01; MAGEA1; ENSG00000198681; CTA
EADPTGHSYVL

SEQ ID NO: 36619 - protein, 11 aa, Homo sapiens
  misc_feature: Table A; Target 36619; HLA-B*39:01; MAGEA1; ENSG00000198681; CTA
EADPTGHSYVL

SEQ ID NO: 36620 - protein, 11 aa, Homo sapiens
  misc_feature: Table A; Target 36620; HLA-B*40:01; MAGEA1; ENSG00000198681; CTA
EADPTGHSYVL

SEQ ID NO: 36621 - protein, 11 aa, Homo sapiens
  misc_feature: Table A; Target 36621; HLA-B*55:01; MAGEA1; ENSG00000198681; CTA
EADPTGHSYVL

SEQ ID NO: 36622 - protein, 11 aa, Homo sapiens
  misc_feature: Table A; Target 36622; HLA-C*03:03; MAGEA1; ENSG00000198681; CTA
EADPTGHSYVL

SEQ ID NO: 36623 - protein, 11 aa, Homo sapiens
  misc_feature: Table A; Target 36623; HLA-C*03:04; MAGEA1; ENSG00000198681; CTA
EADPTGHSYVL

SEQ ID NO: 36624 - protein, 11 aa, Homo sapiens
  misc_feature: Table A; Target 36624; HLA-C*05:01; MAGEA1; ENSG00000198681; CTA
EADPTGHSYVL

SEQ ID NO: 36625 - protein, 11 aa, Homo sapiens
  misc_feature: Table A; Target 36625; HLA-C*16:02; MAGEA1; ENSG00000198681; CTA
EADPTGHSYVL

SEQ ID NO: 36626 - protein, 9 aa, Homo sapiens
  misc_feature: Table A; Target 36626; HLA-B*54:01; MAGEA1; ENSG00000198681; CTA
EALEAQQEA

SEQ ID NO: 36627 - protein, 9 aa, Homo sapiens
  misc_feature: Table A; Target 36627; HLA-C*07:06; MAGEA1; ENSG00000198681; CTA
EALEAQQEA

SEQ ID NO: 36628 - protein, 10 aa, Homo sapiens
  misc_feature: Table A; Target 36628; HLA-A*68:01; MAGEA1; ENSG00000198681; CTA
EALEAQQEAL

SEQ ID NO: 36629 - protein, 10 aa, Homo sapiens
  misc_feature: Table A; Target 36629; HLA-B*35:03; MAGEA1; ENSG00000198681; CTA
EALEAQQEAL

SEQ ID NO: 36630 - protein, 10 aa, Homo sapiens
  misc_feature: Table A; Target 36630; HLA-C*07:06; MAGEA1; ENSG00000198681; CTA
EALEAQQEAL

SEQ ID NO: 36631 - protein, 8 aa, Homo sapiens
  misc_feature: Table A; Target 36631; HLA-B*51:01; MAGEA1; ENSG00000198681; CTA
EALGLVCV

SEQ ID NO: 36632 - protein, 9 aa, Homo sapiens
  misc_feature: Table A; Target 36632; HLA-C*07:01; MAGEA1; ENSG00000198681; CTA
EALGLVCVQ

SEQ ID NO: 36633 - protein, 9 aa, Homo sapiens
  misc_feature: Table A; Target 36633; HLA-C*12:03; MAGEA1; ENSG00000198681; CTA
EALGLVCVQ

SEQ ID NO: 36634 - protein, 10 aa, Homo sapiens
  misc_feature: Table A; Target 36634; HLA-A*33:03; MAGEA1; ENSG00000198681; CTA
EALGLVCVQA

SEQ ID NO: 36635 - protein, 10 aa, Homo sapiens
  misc_feature: Table A; Target 36635; HLA-A*68:02; MAGEA1; ENSG00000198681; CTA
EALGLVCVQA

SEQ ID NO: 36636 - protein, 10 aa, Homo sapiens
  misc_feature: Table A; Target 36636; HLA-B*54:01; MAGEA1; ENSG00000198681; CTA
EALGLVCVQA

SEQ ID NO: 36637 - protein, 9 aa, Homo sapiens
  misc_feature: Table A; Target 36637; HLA-C*07:06; MAGEA1; ENSG00000198681; CTA
EAQQEALGL

SEQ ID NO: 36638 - protein, 11 aa, Homo sapiens
  misc_feature: Table A; Target 36638; HLA-A*30:01; MAGEA1; ENSG00000198681; CTA
EEALEAQQEAL

SEQ ID NO: 36639 - protein, 11 aa, Homo sapiens
  misc_feature: Table A; Target 36639; HLA-B*40:01; MAGEA1; ENSG00000198681; CTA
EEALEAQQEAL

SEQ ID NO: 36640 - protein, 11 aa, Homo sapiens
  misc_feature: Table A; Target 36640; HLA-B*44:02; MAGEA1; ENSG00000198681; CTA
EEALEAQQEAL

SEQ ID NO: 36641 - protein, 11 aa, Homo sapiens
  misc_feature: Table A; Target 36641; HLA-B*44:03; MAGEA1; ENSG00000198681; CTA
EEALEAQQEAL

SEQ ID NO: 36642 - protein, 9 aa, Homo sapiens
  misc_feature: Table A; Target 36642; HLA-B*39:01; MAGEA1; ENSG00000198681; CTA
EEEGPSTSC

SEQ ID NO: 36643 - protein, 10 aa, Homo sapiens
  misc_feature: Table A; Target 36643; HLA-B*40:01; MAGEA1; ENSG00000198681; CTA
EEEGPSTSCI

SEQ ID NO: 36644 - protein, 10 aa, Homo sapiens
  misc_feature: Table A; Target 36644; HLA-B*49:01; MAGEA1; ENSG00000198681; CTA
EEEGPSTSCI

SEQ ID NO: 36645 - protein, 11 aa, Homo sapiens
  misc_feature: Table A; Target 36645; HLA-B*40:01; MAGEA1; ENSG00000198681; CTA
EEEGPSTSCIL

SEQ ID NO: 36646 - protein, 9 aa, Homo sapiens
  misc_feature: Table A; Target 36646; HLA-B*40:01; MAGEA1; ENSG00000198681; CTA
EEGPSTSCI

SEQ ID NO: 36647 - protein, 9 aa, Homo sapiens
  misc_feature: Table A; Target 36647; HLA-B*44:02; MAGEA1; ENSG00000198681; CTA
EEGPSTSCI

SEQ ID NO: 36648 - protein, 9 aa, Homo sapiens
  misc_feature: Table A; Target 36648; HLA-B*44:03; MAGEA1; ENSG00000198681; CTA
EEGPSTSCI

SEQ ID NO: 36649 - protein, 9 aa, Homo sapiens
  misc_feature: Table A; Target 36649; HLA-B*49:01; MAGEA1; ENSG00000198681; CTA
EEGPSTSCI

SEQ ID NO: 36650 - protein, 10 aa, Homo sapiens
  misc_feature: Table A; Target 36650; HLA-B*40:01; MAGEA1; ENSG00000198681; CTA
EEGPSTSCIL

SEQ ID NO: 36651 - protein, 10 aa, Homo sapiens
  misc_feature: Table A; Target 36651; HLA-B*44:03; MAGEA1; ENSG00000198681; CTA
EEGPSTSCIL

SEQ ID NO: 36652 - protein, 9 aa, Homo sapiens
  misc_feature: Table A; Target 36652; HLA-B*49:01; MAGEA1; ENSG00000198681; CTA
EEIWEELSV

SEQ ID NO: 36653 - protein, 8 aa, Homo sapiens
  misc_feature: Table A; Target 36653; HLA-B*18:01; MAGEA1; ENSG00000198681; CTA
EELSVMEV

SEQ ID NO: 36654 - protein, 8 aa, Homo sapiens
  misc_feature: Table A; Target 36654; HLA-B*40:02; MAGEA1; ENSG00000198681; CTA
EELSVMEV

SEQ ID NO: 36655 - protein, 8 aa, Homo sapiens
  misc_feature: Table A; Target 36655; HLA-B*49:01; MAGEA1; ENSG00000198681; CTA
EELSVMEV

SEQ ID NO: 36656 - protein, 9 aa, Homo sapiens
  misc_feature: Table A; Target 36656; HLA-A*25:01; MAGEA1; ENSG00000198681; CTA
EELSVMEVY

SEQ ID NO: 36657 - protein, 9 aa, Homo sapiens
  misc_feature: Table A; Target 36657; HLA-A*26:01; MAGEA1; ENSG00000198681; CTA
EELSVMEVY

SEQ ID NO: 36658 - protein, 9 aa, Homo sapiens
  misc_feature: Table A; Target 36658; HLA-A*30:01; MAGEA1; ENSG00000198681; CTA
EELSVMEVY

SEQ ID NO: 36659 - protein, 9 aa, Homo sapiens
  misc_feature: Table A; Target 36659; HLA-B*15:03; MAGEA1; ENSG00000198681; CTA
EELSVMEVY

SEQ ID NO: 36660 - protein, 9 aa, Homo sapiens
  misc_feature: Table A; Target 36660; HLA-B*27:02; MAGEA1; ENSG00000198681; CTA
EELSVMEVY

SEQ ID NO: 36661 - protein, 9 aa, Homo sapiens
  misc_feature: Table A; Target 36661; HLA-B*35:01; MAGEA1; ENSG00000198681; CTA
EELSVMEVY

SEQ ID NO: 36662 - protein, 9 aa, Homo sapiens
  misc_feature: Table A; Target 36662; HLA-B*40:01; MAGEA1; ENSG00000198681; CTA
EELSVMEVY

SEQ ID NO: 36663 - protein, 9 aa, Homo sapiens
  misc_feature: Table A; Target 36663; HLA-B*44:02; MAGEA1; ENSG00000198681; CTA
EELSVMEVY

SEQ ID NO: 36664 - protein, 9 aa, Homo sapiens
  misc_feature: Table A; Target 36664; HLA-C*16:04; MAGEA1; ENSG00000198681; CTA
EELSVMEVY

SEQ ID NO: 36665 - protein, 8 aa, Homo sapiens
  misc_feature: Table A; Target 36665; HLA-B*51:01; MAGEA1; ENSG00000198681; CTA
EGPSTSCI

SEQ ID NO: 36666 - protein, 9 aa, Homo sapiens
  misc_feature: Table A; Target 36666; HLA-A*33:03; MAGEA1; ENSG00000198681; CTA
EHSAYGEPR

SEQ ID NO: 36667 - protein, 10 aa, Homo sapiens
  misc_feature: Table A; Target 36667; HLA-A*25:01; MAGEA1; ENSG00000198681; CTA
EIFGKASESL

SEQ ID NO: 36668 - protein, 10 aa, Homo sapiens
  misc_feature: Table A; Target 36668; HLA-A*26:01; MAGEA1; ENSG00000198681; CTA
EIFGKASESL

SEQ ID NO: 36669 - protein, 8 aa, Homo sapiens
  misc_feature: Table A; Target 36669; HLA-B*18:01; MAGEA1; ENSG00000198681; CTA
ELSVMEVY

SEQ ID NO: 36670 - protein, 8 aa, Homo sapiens
  misc_feature: Table A; Target 36670; HLA-C*07:01; MAGEA1; ENSG00000198681; CTA
ELSVMEVY

SEQ ID NO: 36671 - protein, 8 aa, Homo sapiens
  misc_feature: Table A; Target 36671; HLA-B*08:01; MAGEA1; ENSG00000198681; CTA
ESLFRAVI

SEQ ID NO: 36672 - protein, 10 aa, Homo sapiens
  misc_feature: Table A; Target 36672; HLA-A*33:03; MAGEA1; ENSG00000198681; CTA
ESLFRAVITK

SEQ ID NO: 36673 - protein, 9 aa, Homo sapiens
  misc_feature: Table A; Target 36673; HLA-A*33:01; MAGEA1; ENSG00000198681; CTA
ESLQLVFGI

SEQ ID NO: 36674 - protein, 9 aa, Homo sapiens
  misc_feature: Table A; Target 36674; HLA-A*68:02; MAGEA1; ENSG00000198681; CTA
ESLQLVFGI

SEQ ID NO: 36675 - protein, 9 aa, Homo sapiens
  misc_feature: Table A; Target 36675; HLA-B*44:02; MAGEA1; ENSG00000198681; CTA
ESLQLVFGI

SEQ ID NO: 36676 - protein, 9 aa, Homo sapiens
  misc_feature: Table A; Target 36676; HLA-C*07:01; MAGEA1; ENSG00000198681; CTA
ESLQLVFGI

SEQ ID NO: 36677 - protein, 11 aa, Homo sapiens
  misc_feature: Table A; Target 36677; HLA-A*68:02; MAGEA1; ENSG00000198681; CTA
ESLQLVFGIDV

SEQ ID NO: 36678 - protein, 10 aa, Homo sapiens
  misc_feature: Table A; Target 36678; HLA-A*01:01; MAGEA1; ENSG00000198681; CTA
ETSYVKVLEY

SEQ ID NO: 36679 - protein, 10 aa, Homo sapiens
  misc_feature: Table A; Target 36679; HLA-A*25:01; MAGEA1; ENSG00000198681; CTA
ETSYVKVLEY

SEQ ID NO: 36680 - protein, 10 aa, Homo sapiens
  misc_feature: Table A; Target 36680; HLA-A*29:02; MAGEA1; ENSG00000198681; CTA
ETSYVKVLEY

SEQ ID NO: 36681 - protein, 10 aa, Homo sapiens
  misc_feature: Table A; Target 36681; HLA-A*33:03; MAGEA1; ENSG00000198681; CTA
ETSYVKVLEY

SEQ ID NO: 36682 - protein, 10 aa, Homo sapiens
  misc_feature: Table A; Target 36682; HLA-A*68:01; MAGEA1; ENSG00000198681; CTA
ETSYVKVLEY

SEQ ID NO: 36683 - protein, 10 aa, Homo sapiens
  misc_feature: Table A; Target 36683; HLA-A*68:02; MAGEA1; ENSG00000198681; CTA
ETSYVKVLEY

SEQ ID NO: 36684 - protein, 10 aa, Homo sapiens
  misc_feature: Table A; Target 36684; HLA-B*44:03; MAGEA1; ENSG00000198681; CTA
ETSYVKVLEY

SEQ ID NO: 36685 - protein, 11 aa, Homo sapiens
  misc_feature: Table A; Target 36685; HLA-A*68:02; MAGEA1; ENSG00000198681; CTA
ETSYVKVLEYV

SEQ ID NO: 36686 - protein, 10 aa, Homo sapiens
  misc_feature: Table A; Target 36686; HLA-A*25:01; MAGEA1; ENSG00000198681; CTA
EVYDGREHSA

SEQ ID NO: 36687 - protein, 10 aa, Homo sapiens
  misc_feature: Table A; Target 36687; HLA-A*26:01; MAGEA1; ENSG00000198681; CTA
EVYDGREHSA

SEQ ID NO: 36688 - protein, 10 aa, Homo sapiens
  misc_feature: Table A; Target 36688; HLA-A*32:01; MAGEA1; ENSG00000198681; CTA
EVYDGREHSA

SEQ ID NO: 36689 - protein, 10 aa, Homo sapiens
  misc_feature: Table A; Target 36689; HLA-A*33:01; MAGEA1; ENSG00000198681; CTA
EVYDGREHSA

SEQ ID NO: 36690 - protein, 10 aa, Homo sapiens
  misc_feature: Table A; Target 36690; HLA-A*33:03; MAGEA1; ENSG00000198681; CTA
EVYDGREHSA

SEQ ID NO: 36691 - protein, 10 aa, Homo sapiens
  misc_feature: Table A; Target 36691; HLA-A*68:01; MAGEA1; ENSG00000198681; CTA
EVYDGREHSA

SEQ ID NO: 36692 - protein, 10 aa, Homo sapiens
  misc_feature: Table A; Target 36692; HLA-A*68:02; MAGEA1; ENSG00000198681; CTA
EVYDGREHSA

SEQ ID NO: 36693 - protein, 10 aa, Homo sapiens
  misc_feature: Table A; Target 36693; HLA-B*08:01; MAGEA1; ENSG00000198681; CTA
EVYDGREHSA

SEQ ID NO: 36694 - protein, 10 aa, Homo sapiens
  misc_feature: Table A; Target 36694; HLA-B*54:01; MAGEA1; ENSG00000198681; CTA
EVYDGREHSA

SEQ ID NO: 36695 - protein, 10 aa, Homo sapiens
  misc_feature: Table A; Target 36695; HLA-B*55:01; MAGEA1; ENSG00000198681; CTA
EVYDGREHSA

SEQ ID NO: 36696 - protein, 10 aa, Homo sapiens
  misc_feature: Table A; Target 36696; HLA-B*56:01; MAGEA1; ENSG00000198681; CTA
EVYDGREHSA

SEQ ID NO: 36697 - protein, 10 aa, Homo sapiens
  misc_feature: Table A; Target 36697; HLA-C*12:03; MAGEA1; ENSG00000198681; CTA
EVYDGREHSA

SEQ ID NO: 36698 - protein, 11 aa, Homo sapiens
  misc_feature: Table A; Target 36698; HLA-A*01:01; MAGEA1; ENSG00000198681; CTA
EVYDGREHSAY

SEQ ID NO: 36699 - protein, 11 aa, Homo sapiens
  misc_feature: Table A; Target 36699; HLA-A*25:01; MAGEA1; ENSG00000198681; CTA
EVYDGREHSAY

SEQ ID NO: 36700 - protein, 11 aa, Homo sapiens
  misc_feature: Table A; Target 36700; HLA-A*29:02; MAGEA1; ENSG00000198681; CTA
EVYDGREHSAY

SEQ ID NO: 36701 - protein, 11 aa, Homo sapiens
  misc_feature: Table A; Target 36701; HLA-A*30:02; MAGEA1; ENSG00000198681; CTA
EVYDGREHSAY

SEQ ID NO: 36702 - protein, 11 aa, Homo sapiens
  misc_feature: Table A; Target 36702; HLA-A*32:01; MAGEA1; ENSG00000198681; CTA
EVYDGREHSAY

SEQ ID NO: 36703 - protein, 11 aa, Homo sapiens
  misc_feature: Table A; Target 36703; HLA-A*33:01; MAGEA1; ENSG00000198681; CTA
EVYDGREHSAY

SEQ ID NO: 36704 - protein, 11 aa, Homo sapiens
  misc_feature: Table A; Target 36704; HLA-A*33:03; MAGEA1; ENSG00000198681; CTA
EVYDGREHSAY

SEQ ID NO: 36705 - protein, 11 aa, Homo sapiens
  misc_feature: Table A; Target 36705; HLA-A*68:01; MAGEA1; ENSG00000198681; CTA
EVYDGREHSAY

SEQ ID NO: 36706 - protein, 11 aa, Homo sapiens
  misc_feature: Table A; Target 36706; HLA-B*15:01; MAGEA1; ENSG00000198681; CTA
EVYDGREHSAY

SEQ ID NO: 36707 - protein, 11 aa, Homo sapiens
  misc_feature: Table A; Target 36707; HLA-B*35:01; MAGEA1; ENSG00000198681; CTA
EVYDGREHSAY

SEQ ID NO: 36708 - protein, 11 aa, Homo sapiens
  misc_feature: Table A; Target 36708; HLA-C*07:04; MAGEA1; ENSG00000198681; CTA
EVYDGREHSAY

SEQ ID NO: 36709 - protein, 11 aa, Homo sapiens
  misc_feature: Table A; Target 36709; HLA-C*12:03; MAGEA1; ENSG00000198681; CTA
EVYDGREHSAY

SEQ ID NO: 36710 - protein, 8 aa, Homo sapiens
  misc_feature: Table A; Target 36710; HLA-B*08:01; MAGEA1; ENSG00000198681; CTA
EYVIKVSA

SEQ ID NO: 36711 - protein, 9 aa, Homo sapiens
  misc_feature: Table A; Target 36711; HLA-A*26:01; MAGEA1; ENSG00000198681; CTA
EYVIKVSAR

SEQ ID NO: 36712 - protein, 9 aa, Homo sapiens
  misc_feature: Table A; Target 36712; HLA-A*31:01; MAGEA1; ENSG00000198681; CTA
EYVIKVSAR

SEQ ID NO: 36713 - protein, 9 aa, Homo sapiens
  misc_feature: Table A; Target 36713; HLA-A*33:01; MAGEA1; ENSG00000198681; CTA
EYVIKVSAR

SEQ ID NO: 36714 - protein, 9 aa, Homo sapiens
  misc_feature: Table A; Target 36714; HLA-A*68:01; MAGEA1; ENSG00000198681; CTA
EYVIKVSAR

SEQ ID NO: 36715 - protein, 9 aa, Homo sapiens
  misc_feature: Table A; Target 36715; HLA-C*07:06; MAGEA1; ENSG00000198681; CTA
EYVIKVSAR

SEQ ID NO: 36716 - protein, 9 aa, Homo sapiens
  misc_feature: Table A; Target 36716; HLA-A*02:03; MAGEA1; ENSG00000198681; CTA
FFFPSLREA

SEQ ID NO: 36717 - protein, 9 aa, Homo sapiens
  misc_feature: Table A; Target 36717; HLA-B*54:01; MAGEA1; ENSG00000198681; CTA
FFFPSLREA

SEQ ID NO: 36718 - protein, 11 aa, Homo sapiens
  misc_feature: Table A; Target 36718; HLA-A*29:02; MAGEA1; ENSG00000198681; CTA
FFFPSLREAAL

SEQ ID NO: 36719 - protein, 8 aa, Homo sapiens
  misc_feature: Table A; Target 36719; HLA-B*46:01; MAGEA1; ENSG00000198681; CTA
FGKASESL

SEQ ID NO: 36720 - protein, 8 aa, Homo sapiens
  misc_feature: Table A; Target 36720; HLA-C*03:04; MAGEA1; ENSG00000198681; CTA
FGKASESL

SEQ ID NO: 36721 - protein, 8 aa, Homo sapiens
  misc_feature: Table A; Target 36721; HLA-C*14:02; MAGEA1; ENSG00000198681; CTA
FGKASESL

SEQ ID NO: 36722 - protein, 9 aa, Homo sapiens
  misc_feature: Table A; Target 36722; HLA-A*02:01; MAGEA1; ENSG00000198681; CTA
FLIIVLVMI

SEQ ID NO: 36723 - protein, 9 aa, Homo sapiens
  misc_feature: Table A; Target 36723; HLA-A*02:03; MAGEA1; ENSG00000198681; CTA
FLIIVLVMI

SEQ ID NO: 36724 - protein, 9 aa, Homo sapiens
  misc_feature: Table A; Target 36724; HLA-A*02:04; MAGEA1; ENSG00000198681; CTA
FLIIVLVMI

SEQ ID NO: 36725 - protein, 9 aa, Homo sapiens
  misc_feature: Table A; Target 36725; HLA-A*02:07; MAGEA1; ENSG00000198681; CTA
FLIIVLVMI

SEQ ID NO: 36726 - protein, 8 aa, Homo sapiens
  misc_feature: Table A; Target 36726; HLA-B*54:01; MAGEA1; ENSG00000198681; CTA
FPEIFGKA

SEQ ID NO: 36727 - protein, 8 aa, Homo sapiens
  misc_feature: Table A; Target 36727; HLA-B*56:01; MAGEA1; ENSG00000198681; CTA
FPEIFGKA

SEQ ID NO: 36728 - protein, 8 aa, Homo sapiens
  misc_feature: Table A; Target 36728; HLA-B*54:01; MAGEA1; ENSG00000198681; CTA
FPSLREAA

SEQ ID NO: 36729 - protein, 8 aa, Homo sapiens
  misc_feature: Table A; Target 36729; HLA-B*56:01; MAGEA1; ENSG00000198681; CTA
FPSLREAA

SEQ ID NO: 36730 - protein, 9 aa, Homo sapiens
  misc_feature: Table A; Target 36730; HLA-B*35:01; MAGEA1; ENSG00000198681; CTA
FPSLREAAL

SEQ ID NO: 36731 - protein, 9 aa, Homo sapiens
  misc_feature: Table A; Target 36731; HLA-B*37:01; MAGEA1; ENSG00000198681; CTA
FPSLREAAL

SEQ ID NO: 36732 - protein, 9 aa, Homo sapiens
  misc_feature: Table A; Target 36732; HLA-B*39:01; MAGEA1; ENSG00000198681; CTA
FPSLREAAL

SEQ ID NO: 36733 - protein, 9 aa, Homo sapiens
  misc_feature: Table A; Target 36733; HLA-B*40:01; MAGEA1; ENSG00000198681; CTA
FPSLREAAL

SEQ ID NO: 36734 - protein, 9 aa, Homo sapiens
  misc_feature: Table A; Target 36734; HLA-B*51:01; MAGEA1; ENSG00000198681; CTA
FPSLREAAL

SEQ ID NO: 36735 - protein, 9 aa, Homo sapiens
  misc_feature: Table A; Target 36735; HLA-B*54:01; MAGEA1; ENSG00000198681; CTA
FPSLREAAL

SEQ ID NO: 36736 - protein, 9 aa, Homo sapiens
  misc_feature: Table A; Target 36736; HLA-B*55:01; MAGEA1; ENSG00000198681; CTA
FPSLREAAL

SEQ ID NO: 36737 - protein, 9 aa, Homo sapiens
  misc_feature: Table A; Target 36737; HLA-B*56:01; MAGEA1; ENSG00000198681; CTA
FPSLREAAL

SEQ ID NO: 36738 - protein, 9 aa, Homo sapiens
  misc_feature: Table A; Target 36738; HLA-C*01:02; MAGEA1; ENSG00000198681; CTA
FPSLREAAL

SEQ ID NO: 36739 - protein, 9 aa, Homo sapiens
  misc_feature: Table A; Target 36739; HLA-C*03:03; MAGEA1; ENSG00000198681; CTA
FPSLREAAL

SEQ ID NO: 36740 - protein, 9 aa, Homo sapiens
  misc_feature: Table A; Target 36740; HLA-C*03:04; MAGEA1; ENSG00000198681; CTA
FPSLREAAL

SEQ ID NO: 36741 - protein, 9 aa, Homo sapiens
  misc_feature: Table A; Target 36741; HLA-C*07:02; MAGEA1; ENSG00000198681; CTA
FPSLREAAL

SEQ ID NO: 36742 - protein, 9 aa, Homo sapiens
  misc_feature: Table A; Target 36742; HLA-C*12:03; MAGEA1; ENSG00000198681; CTA
FPSLREAAL

SEQ ID NO: 36743 - protein, 9 aa, Homo sapiens
  misc_feature: Table A; Target 36743; HLA-C*14:02; MAGEA1; ENSG00000198681; CTA
FPSLREAAL

SEQ ID NO: 36744 - protein, 9 aa, Homo sapiens
  misc_feature: Table A; Target 36744; HLA-C*16:01; MAGEA1; ENSG00000198681; CTA
FPSLREAAL

SEQ ID NO: 36745 - protein, 8 aa, Homo sapiens
  misc_feature: Table A; Target 36745; HLA-B*54:01; MAGEA1; ENSG00000198681; CTA
FPTTINFT

SEQ ID NO: 36746 - protein, 8 aa, Homo sapiens
  misc_feature: Table A; Target 36746; HLA-B*56:01; MAGEA1; ENSG00000198681; CTA
FPTTINFT

SEQ ID NO: 36747 - protein, 9 aa, Homo sapiens
  misc_feature: Table A; Target 36747; HLA-A*33:03; MAGEA1; ENSG00000198681; CTA
FPTTINFTR

SEQ ID NO: 36748 - protein, 9 aa, Homo sapiens
  misc_feature: Table A; Target 36748; HLA-A*68:01; MAGEA1; ENSG00000198681; CTA
FPTTINFTR

SEQ ID NO: 36749 - protein, 9 aa, Homo sapiens
  misc_feature: Table A; Target 36749; HLA-A*68:02; MAGEA1; ENSG00000198681; CTA
FPTTINFTR

SEQ ID NO: 36750 - protein, 9 aa, Homo sapiens
  misc_feature: Table A; Target 36750; HLA-B*27:02; MAGEA1; ENSG00000198681; CTA
FPTTINFTR

SEQ ID NO: 36751 - protein, 9 aa, Homo sapiens
  misc_feature: Table A; Target 36751; HLA-B*35:01; MAGEA1; ENSG00000198681; CTA
FPTTINFTR

SEQ ID NO: 36752 - protein, 9 aa, Homo sapiens
  misc_feature: Table A; Target 36752; HLA-B*35:03; MAGEA1; ENSG00000198681; CTA
FPTTINFTR

SEQ ID NO: 36753 - protein, 9 aa, Homo sapiens
  misc_feature: Table A; Target 36753; HLA-B*54:01; MAGEA1; ENSG00000198681; CTA
FPTTINFTR

SEQ ID NO: 36754 - protein, 9 aa, Homo sapiens
  misc_feature: Table A; Target 36754; HLA-B*55:01; MAGEA1; ENSG00000198681; CTA
FPTTINFTR

SEQ ID NO: 36755 - protein, 9 aa, Homo sapiens
  misc_feature: Table A; Target 36755; HLA-B*56:01; MAGEA1; ENSG00000198681; CTA
FPTTINFTR

SEQ ID NO: 36756 - protein, 9 aa, Homo sapiens
  misc_feature: Table A; Target 36756; HLA-C*07:06; MAGEA1; ENSG00000198681; CTA
FPTTINFTR

SEQ ID NO: 36757 - protein, 10 aa, Homo sapiens
  misc_feature: Table A; Target 36757; HLA-B*54:01; MAGEA1; ENSG00000198681; CTA
FPTTINFTRQ

SEQ ID NO: 36758 - protein, 8 aa, Homo sapiens
  misc_feature: Table A; Target 36758; HLA-B*27:05; MAGEA1; ENSG00000198681; CTA
FRAVITKK

SEQ ID NO: 36759 - protein, 9 aa, Homo sapiens
  misc_feature: Table A; Target 36759; HLA-A*68:02; MAGEA1; ENSG00000198681; CTA
FRAVITKKV

SEQ ID NO: 36760 - protein, 9 aa, Homo sapiens
  misc_feature: Table A; Target 36760; HLA-C*02:02; MAGEA1; ENSG00000198681; CTA
FRAVITKKV

SEQ ID NO: 36761 - protein, 9 aa, Homo sapiens
  misc_feature: Table A; Target 36761; HLA-C*06:02; MAGEA1; ENSG00000198681; CTA
FRAVITKKV

SEQ ID NO: 36762 - protein, 9 aa, Homo sapiens
  misc_feature: Table A; Target 36762; HLA-B*13:02; MAGEA1; ENSG00000198681; CTA
GASAFPTTI

SEQ ID NO: 36763 - protein, 9 aa, Homo sapiens
  misc_feature: Table A; Target 36763; HLA-B*49:01; MAGEA1; ENSG00000198681; CTA
GASAFPTTI

SEQ ID NO: 36764 - protein, 9 aa, Homo sapiens
  misc_feature: Table A; Target 36764; HLA-B*51:01; MAGEA1; ENSG00000198681; CTA
GASAFPTTI

SEQ ID NO: 36765 - protein, 9 aa, Homo sapiens
  misc_feature: Table A; Target 36765; HLA-C*02:02; MAGEA1; ENSG00000198681; CTA
GASAFPTTI

SEQ ID NO: 36766 - protein, 9 aa, Homo sapiens
  misc_feature: Table A; Target 36766; HLA-C*12:03; MAGEA1; ENSG00000198681; CTA
GASAFPTTI

SEQ ID NO: 36767 - protein, 9 aa, Homo sapiens
  misc_feature: Table A; Target 36767; HLA-C*16:02; MAGEA1; ENSG00000198681; CTA
GASAFPTTI

SEQ ID NO: 36768 - protein, 9 aa, Homo sapiens
  misc_feature: Table A; Target 36768; HLA-C*16:04; MAGEA1; ENSG00000198681; CTA
GASAFPTTI

SEQ ID NO: 36769 - protein, 8 aa, Homo sapiens
  misc_feature: Table A; Target 36769; HLA-B*38:01; MAGEA1; ENSG00000198681; CTA
GHAPEEEI

SEQ ID NO: 36770 - protein, 9 aa, Homo sapiens
  misc_feature: Table A; Target 36770; HLA-B*38:01; MAGEA1; ENSG00000198681; CTA
GHAPEEEIW

SEQ ID NO: 36771 - protein, 10 aa, Homo sapiens
  misc_feature: Table A; Target 36771; HLA-B*38:01; MAGEA1; ENSG00000198681; CTA
GHSYVLVTCL

SEQ ID NO: 36772 - protein, 9 aa, Homo sapiens
  misc_feature: Table A; Target 36772; HLA-B*15:03; MAGEA1; ENSG00000198681; CTA
GKASESLQL

SEQ ID NO: 36773 - protein, 11 aa, Homo sapiens
  misc_feature: Table A; Target 36773; HLA-B*15:03; MAGEA1; ENSG00000198681; CTA
GKASESLQLVF

SEQ ID NO: 36774 - protein, 9 aa, Homo sapiens
  misc_feature: Table A; Target 36774; HLA-A*02:01; MAGEA1; ENSG00000198681; CTA
GTLEEVPTA

SEQ ID NO: 36775 - protein, 9 aa, Homo sapiens
  misc_feature: Table A; Target 36775; HLA-B*55:01; MAGEA1; ENSG00000198681; CTA
GTLEEVPTA

SEQ ID NO: 36776 - protein, 9 aa, Homo sapiens
  misc_feature: Table A; Target 36776; HLA-A*03:01; MAGEA1; ENSG00000198681; CTA
HCFPEIFGK

SEQ ID NO: 36777 - protein, 9 aa, Homo sapiens
  misc_feature: Table A; Target 36777; HLA-A*03:02; MAGEA1; ENSG00000198681; CTA
HCFPEIFGK

SEQ ID NO: 36778 - protein, 9 aa, Homo sapiens
  misc_feature: Table A; Target 36778; HLA-A*11:01; MAGEA1; ENSG00000198681; CTA
HCFPEIFGK

SEQ ID NO: 36779 - protein, 8 aa, Homo sapiens
  misc_feature: Table A; Target 36779; HLA-A*68:01; MAGEA1; ENSG00000198681; CTA
HSAYGEPR

SEQ ID NO: 36780 - protein, 9 aa, Homo sapiens
  misc_feature: Table A; Target 36780; HLA-B*46:01; MAGEA1; ENSG00000198681; CTA
IAMEGGHAP

SEQ ID NO: 36781 - protein, 9 aa, Homo sapiens
  misc_feature: Table A; Target 36781; HLA-C*03:03; MAGEA1; ENSG00000198681; CTA
IAMEGGHAP

SEQ ID NO: 36782 - protein, 9 aa, Homo sapiens
  misc_feature: Table A; Target 36782; HLA-C*03:04; MAGEA1; ENSG00000198681; CTA
IAMEGGHAP

SEQ ID NO: 36783 - protein, 9 aa, Homo sapiens
  misc_feature: Table A; Target 36783; HLA-C*16:01; MAGEA1; ENSG00000198681; CTA
IAMEGGHAP

SEQ ID NO: 36784 - protein, 9 aa, Homo sapiens
  misc_feature: Table A; Target 36784; HLA-C*16:02; MAGEA1; ENSG00000198681; CTA
IAMEGGHAP

SEQ ID NO: 36785 - protein, 9 aa, Homo sapiens
  misc_feature: Table A; Target 36785; HLA-C*14:02; MAGEA1; ENSG00000198681; CTA
IFGKASESL

SEQ ID NO: 36786 - protein, 9 aa, Homo sapiens
  misc_feature: Table A; Target 36786; HLA-A*02:03; MAGEA1; ENSG00000198681; CTA
ILESLFRAV

SEQ ID NO: 36787 - protein, 9 aa, Homo sapiens
  misc_feature: Table A; Target 36787; HLA-A*02:04; MAGEA1; ENSG00000198681; CTA
ILESLFRAV

SEQ ID NO: 36788 - protein, 9 aa, Homo sapiens
  misc_feature: Table A; Target 36788; HLA-A*02:07; MAGEA1; ENSG00000198681; CTA
ILESLFRAV

SEQ ID NO: 36789 - protein, 8 aa, Homo sapiens
  misc_feature: Table A; Target 36789; HLA-B*08:01; MAGEA1; ENSG00000198681; CTA
ITKKVADL

SEQ ID NO: 36790 - protein, 11 aa, Homo sapiens
  misc_feature: Table A; Target 36790; HLA-B*57:01; MAGEA1; ENSG00000198681; CTA
ITKKVADLVGF

SEQ ID NO: 36791 - protein, 8 aa, Homo sapiens
  misc_feature: Table A; Target 36791; HLA-C*03:04; MAGEA1; ENSG00000198681; CTA
KASESLQL

SEQ ID NO: 36792 - protein, 8 aa, Homo sapiens
  misc_feature: Table A; Target 36792; HLA-C*16:01; MAGEA1; ENSG00000198681; CTA
KASESLQL

SEQ ID NO: 36793 - protein, 9 aa, Homo sapiens
  misc_feature: Table A; Target 36793; HLA-B*58:01; MAGEA1; ENSG00000198681; CTA
KASESLQLV

SEQ ID NO: 36794 - protein, 9 aa, Homo sapiens
  misc_feature: Table A; Target 36794; HLA-C*02:02; MAGEA1; ENSG00000198681; CTA
KASESLQLV

SEQ ID NO: 36795 - protein, 9 aa, Homo sapiens
  misc_feature: Table A; Target 36795; HLA-C*12:03; MAGEA1; ENSG00000198681; CTA
KASESLQLV

SEQ ID NO: 36796 - protein, 9 aa, Homo sapiens
  misc_feature: Table A; Target 36796; HLA-C*16:02; MAGEA1; ENSG00000198681; CTA
KASESLQLV

SEQ ID NO: 36797 - protein, 10 aa, Homo sapiens
  misc_feature: Table A; Target 36797; HLA-A*23:01; MAGEA1; ENSG00000198681; CTA
KASESLQLVF

SEQ ID NO: 36798 - protein, 10 aa, Homo sapiens
  misc_feature: Table A; Target 36798; HLA-A*29:02; MAGEA1; ENSG00000198681; CTA
KASESLQLVF

SEQ ID NO: 36799 - protein, 10 aa, Homo sapiens
  misc_feature: Table A; Target 36799; HLA-B*27:02; MAGEA1; ENSG00000198681; CTA
KASESLQLVF

SEQ ID NO: 36800 - protein, 10 aa, Homo sapiens
  misc_feature: Table A; Target 36800; HLA-B*57:01; MAGEA1; ENSG00000198681; CTA
KASESLQLVF

SEQ ID NO: 36801 - protein, 10 aa, Homo sapiens
  misc_feature: Table A; Target 36801; HLA-B*58:01; MAGEA1; ENSG00000198681; CTA
KASESLQLVF

SEQ ID NO: 36802 - protein, 10 aa, Homo sapiens
  misc_feature: Table A; Target 36802; HLA-C*02:02; MAGEA1; ENSG00000198681; CTA
KASESLQLVF

SEQ ID NO: 36803 - protein, 10 aa, Homo sapiens
  misc_feature: Table A; Target 36803; HLA-C*16:04; MAGEA1; ENSG00000198681; CTA
KASESLQLVF

SEQ ID NO: 36804 - protein, 10 aa, Homo sapiens
  misc_feature: Table A; Target 36804; HLA-A*01:01; MAGEA1; ENSG00000198681; CTA
KEADPTGHSY

SEQ ID NO: 36805 - protein, 10 aa, Homo sapiens
  misc_feature: Table A; Target 36805; HLA-A*03:02; MAGEA1; ENSG00000198681; CTA
KEADPTGHSY

SEQ ID NO: 36806 - protein, 10 aa, Homo sapiens
  misc_feature: Table A; Target 36806; HLA-A*25:01; MAGEA1; ENSG00000198681; CTA
KEADPTGHSY

SEQ ID NO: 36807 - protein, 10 aa, Homo sapiens
  misc_feature: Table A; Target 36807; HLA-A*26:01; MAGEA1; ENSG00000198681; CTA
KEADPTGHSY

SEQ ID NO: 36808 - protein, 10 aa, Homo sapiens
  misc_feature: Table A; Target 36808; HLA-A*29:02; MAGEA1; ENSG00000198681; CTA
KEADPTGHSY

SEQ ID NO: 36809 - protein, 10 aa, Homo sapiens
  misc_feature: Table A; Target 36809; HLA-A*30:01; MAGEA1; ENSG00000198681; CTA
KEADPTGHSY

SEQ ID NO: 36810 - protein, 10 aa, Homo sapiens
  misc_feature: Table A; Target 36810; HLA-A*30:02; MAGEA1; ENSG00000198681; CTA
KEADPTGHSY

SEQ ID NO: 36811 - protein, 10 aa, Homo sapiens
  misc_feature: Table A; Target 36811; HLA-A*32:01; MAGEA1; ENSG00000198681; CTA
KEADPTGHSY

SEQ ID NO: 36812 - protein, 10 aa, Homo sapiens
  misc_feature: Table A; Target 36812; HLA-B*15:01; MAGEA1; ENSG00000198681; CTA
KEADPTGHSY

SEQ ID NO: 36813 - protein, 10 aa, Homo sapiens
  misc_feature: Table A; Target 36813; HLA-B*15:03; MAGEA1; ENSG00000198681; CTA
KEADPTGHSY

SEQ ID NO: 36814 - protein, 10 aa, Homo sapiens
  misc_feature: Table A; Target 36814; HLA-B*18:01; MAGEA1; ENSG00000198681; CTA
KEADPTGHSY

SEQ ID NO: 36815 - protein, 10 aa, Homo sapiens
  misc_feature: Table A; Target 36815; HLA-B*27:02; MAGEA1; ENSG00000198681; CTA
KEADPTGHSY

SEQ ID NO: 36816 - protein, 10 aa, Homo sapiens
  misc_feature: Table A; Target 36816; HLA-B*27:05; MAGEA1; ENSG00000198681; CTA
KEADPTGHSY

SEQ ID NO: 36817 - protein, 10 aa, Homo sapiens
  misc_feature: Table A; Target 36817; HLA-B*37:01; MAGEA1; ENSG00000198681; CTA
KEADPTGHSY

SEQ ID NO: 36818 - protein, 10 aa, Homo sapiens
  misc_feature: Table A; Target 36818; HLA-B*40:01; MAGEA1; ENSG00000198681; CTA
KEADPTGHSY

SEQ ID NO: 36819 - protein, 10 aa, Homo sapiens
  misc_feature: Table A; Target 36819; HLA-B*46:01; MAGEA1; ENSG00000198681; CTA
KEADPTGHSY

SEQ ID NO: 36820 - protein, 10 aa, Homo sapiens
  misc_feature: Table A; Target 36820; HLA-B*49:01; MAGEA1; ENSG00000198681; CTA
KEADPTGHSY

SEQ ID NO: 36821 - protein, 10 aa, Homo sapiens
  misc_feature: Table A; Target 36821; HLA-B*57:01; MAGEA1; ENSG00000198681; CTA
KEADPTGHSY

SEQ ID NO: 36822 - protein, 10 aa, Homo sapiens
  misc_feature: Table A; Target 36822; HLA-B*58:01; MAGEA1; ENSG00000198681; CTA
KEADPTGHSY

SEQ ID NO: 36823 - protein, 10 aa, Homo sapiens
  misc_feature: Table A; Target 36823; HLA-C*02:02; MAGEA1; ENSG00000198681; CTA
KEADPTGHSY

SEQ ID NO: 36824 - protein, 10 aa, Homo sapiens
  misc_feature: Table A; Target 36824; HLA-C*07:04; MAGEA1; ENSG00000198681; CTA
KEADPTGHSY

SEQ ID NO: 36825 - protein, 10 aa, Homo sapiens
  misc_feature: Table A; Target 36825; HLA-C*14:02; MAGEA1; ENSG00000198681; CTA
KEADPTGHSY

SEQ ID NO: 36826 - protein, 10 aa, Homo sapiens
  misc_feature: Table A; Target 36826; HLA-C*16:01; MAGEA1; ENSG00000198681; CTA
KEADPTGHSY

SEQ ID NO: 36827 - protein, 10 aa, Homo sapiens
  misc_feature: Table A; Target 36827; HLA-C*16:02; MAGEA1; ENSG00000198681; CTA
KEADPTGHSY

SEQ ID NO: 36828 - protein, 10 aa, Homo sapiens
  misc_feature: Table A; Target 36828; HLA-C*16:04; MAGEA1; ENSG00000198681; CTA
KEADPTGHSY

SEQ ID NO: 36829 - protein, 11 aa, Homo sapiens
  misc_feature: Table A; Target 36829; HLA-B*40:01; MAGEA1; ENSG00000198681; CTA
KEADPTGHSYV

SEQ ID NO: 36830 - protein, 11 aa, Homo sapiens
  misc_feature: Table A; Target 36830; HLA-B*49:01; MAGEA1; ENSG00000198681; CTA
KEADPTGHSYV

SEQ ID NO: 36831 - protein, 9 aa, Homo sapiens
  misc_feature: Table A; Target 36831; HLA-B*15:03; MAGEA1; ENSG00000198681; CTA
KKVADLVGF

SEQ ID NO: 36832 - protein, 11 aa, Homo sapiens
  misc_feature: Table A; Target 36832; HLA-A*03:01; MAGEA1; ENSG00000198681; CTA
KLLTQDLVQEK

SEQ ID NO: 36833 - protein, 11 aa, Homo sapiens
  misc_feature: Table A; Target 36833; HLA-A*03:02; MAGEA1; ENSG00000198681; CTA
KLLTQDLVQEK

SEQ ID NO: 36834 - protein, 11 aa, Homo sapiens
  misc_feature: Table A; Target 36834; HLA-A*11:01; MAGEA1; ENSG00000198681; CTA
KLLTQDLVQEK

SEQ ID NO: 36835 - protein, 11 aa, Homo sapiens
  misc_feature: Table A; Target 36835; HLA-A*31:01; MAGEA1; ENSG00000198681; CTA
KLLTQDLVQEK

SEQ ID NO: 36836 - protein, 9 aa, Homo sapiens
  misc_feature: Table A; Target 36836; HLA-A*02:03; MAGEA1; ENSG00000198681; CTA
KVADLVGFL

SEQ ID NO: 36837 - protein, 9 aa, Homo sapiens
  misc_feature: Table A; Target 36837; HLA-A*02:04; MAGEA1; ENSG00000198681; CTA
KVADLVGFL

SEQ ID NO: 36838 - protein, 9 aa, Homo sapiens
  misc_feature: Table A; Target 36838; HLA-A*03:01; MAGEA1; ENSG00000198681; CTA
KVADLVGFL

SEQ ID NO: 36839 - protein, 9 aa, Homo sapiens
  misc_feature: Table A; Target 36839; HLA-A*25:01; MAGEA1; ENSG00000198681; CTA
KVADLVGFL

SEQ ID NO: 36840 - protein, 9 aa, Homo sapiens
  misc_feature: Table A; Target 36840; HLA-A*32:01; MAGEA1; ENSG00000198681; CTA
KVADLVGFL

SEQ ID NO: 36841 - protein, 9 aa, Homo sapiens
  misc_feature: Table A; Target 36841; HLA-A*68:02; MAGEA1; ENSG00000198681; CTA
KVADLVGFL

SEQ ID NO: 36842 - protein, 9 aa, Homo sapiens
  misc_feature: Table A; Target 36842; HLA-B*27:05; MAGEA1; ENSG00000198681; CTA
KVADLVGFL

SEQ ID NO: 36843 - protein, 9 aa, Homo sapiens
  misc_feature: Table A; Target 36843; HLA-B*58:01; MAGEA1; ENSG00000198681; CTA
KVADLVGFL

SEQ ID NO: 36844 - protein, 10 aa, Homo sapiens
  misc_feature: Table A; Target 36844; HLA-A*02:01; MAGEA1; ENSG00000198681; CTA
KVADLVGFLL

SEQ ID NO: 36845 - protein, 10 aa, Homo sapiens
  misc_feature: Table A; Target 36845; HLA-A*02:04; MAGEA1; ENSG00000198681; CTA
KVADLVGFLL

SEQ ID NO: 36846 - protein, 10 aa, Homo sapiens
  misc_feature: Table A; Target 36846; HLA-A*02:07; MAGEA1; ENSG00000198681; CTA
KVADLVGFLL

SEQ ID NO: 36847 - protein, 10 aa, Homo sapiens
  misc_feature: Table A; Target 36847; HLA-A*03:01; MAGEA1; ENSG00000198681; CTA
KVADLVGFLL

SEQ ID NO: 36848 - protein, 10 aa, Homo sapiens
  misc_feature: Table A; Target 36848; HLA-A*31:01; MAGEA1; ENSG00000198681; CTA
KVADLVGFLL

SEQ ID NO: 36849 - protein, 10 aa, Homo sapiens
  misc_feature: Table A; Target 36849; HLA-A*68:02; MAGEA1; ENSG00000198681; CTA
KVADLVGFLL

SEQ ID NO: 36850 - protein, 10 aa, Homo sapiens
  misc_feature: Table A; Target 36850; HLA-B*57:01; MAGEA1; ENSG00000198681; CTA
KVADLVGFLL

SEQ ID NO: 36851 - protein, 11 aa, Homo sapiens
  misc_feature: Table A; Target 36851; HLA-A*02:01; MAGEA1; ENSG00000198681; CTA
KVADLVGFLLL

SEQ ID NO: 36852 - protein, 11 aa, Homo sapiens
  misc_feature: Table A; Target 36852; HLA-A*02:04; MAGEA1; ENSG00000198681; CTA
KVADLVGFLLL

SEQ ID NO: 36853 - protein, 11 aa, Homo sapiens
  misc_feature: Table A; Target 36853; HLA-A*02:07; MAGEA1; ENSG00000198681; CTA
KVADLVGFLLL

SEQ ID NO: 36854 - protein, 11 aa, Homo sapiens
  misc_feature: Table A; Target 36854; HLA-A*03:01; MAGEA1; ENSG00000198681; CTA
KVADLVGFLLL

SEQ ID NO: 36855 - protein, 9 aa, Homo sapiens
  misc_feature: Table A; Target 36855; HLA-A*02:03; MAGEA1; ENSG00000198681; CTA
KVLEYVIKV

SEQ ID NO: 36856 - protein, 9 aa, Homo sapiens
  misc_feature: Table A; Target 36856; HLA-A*02:04; MAGEA1; ENSG00000198681; CTA
KVLEYVIKV

SEQ ID NO: 36857 - protein, 9 aa, Homo sapiens
  misc_feature: Table A; Target 36857; HLA-A*02:07; MAGEA1; ENSG00000198681; CTA
KVLEYVIKV

SEQ ID NO: 36858 - protein, 9 aa, Homo sapiens
  misc_feature: Table A; Target 36858; HLA-A*03:01; MAGEA1; ENSG00000198681; CTA
KVLEYVIKV

SEQ ID NO: 36859 - protein, 9 aa, Homo sapiens
  misc_feature: Table A; Target 36859; HLA-A*03:02; MAGEA1; ENSG00000198681; CTA
KVLEYVIKV

SEQ ID NO: 36860 - protein, 9 aa, Homo sapiens
  misc_feature: Table A; Target 36860; HLA-A*11:01; MAGEA1; ENSG00000198681; CTA
KVLEYVIKV

SEQ ID NO: 36861 - protein, 9 aa, Homo sapiens
  misc_feature: Table A; Target 36861; HLA-A*31:01; MAGEA1; ENSG00000198681; CTA
KVLEYVIKV

SEQ ID NO: 36862 - protein, 9 aa, Homo sapiens
  misc_feature: Table A; Target 36862; HLA-A*32:01; MAGEA1; ENSG00000198681; CTA
KVLEYVIKV

SEQ ID NO: 36863 - protein, 9 aa, Homo sapiens
  misc_feature: Table A; Target 36863; HLA-A*68:02; MAGEA1; ENSG00000198681; CTA
KVLEYVIKV

SEQ ID NO: 36864 - protein, 9 aa, Homo sapiens
  misc_feature: Table A; Target 36864; HLA-B*13:02; MAGEA1; ENSG00000198681; CTA
KVLEYVIKV

SEQ ID NO: 36865 - protein, 9 aa, Homo sapiens
  misc_feature: Table A; Target 36865; HLA-B*40:02; MAGEA1; ENSG00000198681; CTA
KVLEYVIKV

SEQ ID NO: 36866 - protein, 9 aa, Homo sapiens
  misc_feature: Table A; Target 36866; HLA-B*57:01; MAGEA1; ENSG00000198681; CTA
KVLEYVIKV

SEQ ID NO: 36867 - protein, 9 aa, Homo sapiens
  misc_feature: Table A; Target 36867; HLA-B*58:01; MAGEA1; ENSG00000198681; CTA
KVLEYVIKV

SEQ ID NO: 36868 - protein, 9 aa, Homo sapiens
  misc_feature: Table A; Target 36868; HLA-C*02:02; MAGEA1; ENSG00000198681; CTA
KVLEYVIKV

SEQ ID NO: 36869 - protein, 9 aa, Homo sapiens
  misc_feature: Table A; Target 36869; HLA-C*06:02; MAGEA1; ENSG00000198681; CTA
KVLEYVIKV

SEQ ID NO: 36870 - protein, 9 aa, Homo sapiens
  misc_feature: Table A; Target 36870; HLA-C*12:03; MAGEA1; ENSG00000198681; CTA
KVLEYVIKV

SEQ ID NO: 36871 - protein, 9 aa, Homo sapiens
  misc_feature: Table A; Target 36871; HLA-C*16:02; MAGEA1; ENSG00000198681; CTA
KVLEYVIKV

SEQ ID NO: 36872 - protein, 11 aa, Homo sapiens
  misc_feature: Table A; Target 36872; HLA-A*02:01; MAGEA1; ENSG00000198681; CTA
KVLEYVIKVSA

SEQ ID NO: 36873 - protein, 11 aa, Homo sapiens
  misc_feature: Table A; Target 36873; HLA-B*54:01; MAGEA1; ENSG00000198681; CTA
KVLEYVIKVSA

SEQ ID NO: 36874 - protein, 11 aa, Homo sapiens
  misc_feature: Table A; Target 36874; HLA-B*56:01; MAGEA1; ENSG00000198681; CTA
KVLEYVIKVSA

SEQ ID NO: 36875 - protein, 8 aa, Homo sapiens
  misc_feature: Table A; Target 36875; HLA-A*30:01; MAGEA1; ENSG00000198681; CTA
LEAQQEAL

SEQ ID NO: 36876 - protein, 8 aa, Homo sapiens
  misc_feature: Table A; Target 36876; HLA-B*18:01; MAGEA1; ENSG00000198681; CTA
LEAQQEAL

SEQ ID NO: 36877 - protein, 8 aa, Homo sapiens
  misc_feature: Table A; Target 36877; HLA-B*40:01; MAGEA1; ENSG00000198681; CTA
LEAQQEAL

SEQ ID NO: 36878 - protein, 8 aa, Homo sapiens
  misc_feature: Table A; Target 36878; HLA-B*49:01; MAGEA1; ENSG00000198681; CTA
LEAQQEAL

SEQ ID NO: 36879 - protein, 10 aa, Homo sapiens
  misc_feature: Table A; Target 36879; HLA-A*30:01; MAGEA1; ENSG00000198681; CTA
LEAQQEALGL

SEQ ID NO: 36880 - protein, 10 aa, Homo sapiens
  misc_feature: Table A; Target 36880; HLA-B*40:01; MAGEA1; ENSG00000198681; CTA
LEAQQEALGL

SEQ ID NO: 36881 - protein, 11 aa, Homo sapiens
  misc_feature: Table A; Target 36881; HLA-B*49:01; MAGEA1; ENSG00000198681; CTA
LEAQQEALGLV

SEQ ID NO: 36882 - protein, 9 aa, Homo sapiens
  misc_feature: Table A; Target 36882; HLA-B*49:01; MAGEA1; ENSG00000198681; CTA
LEEVPTAGS

SEQ ID NO: 36883 - protein, 8 aa, Homo sapiens
  misc_feature: Table A; Target 36883; HLA-B*18:01; MAGEA1; ENSG00000198681; CTA
LESLFRAV

SEQ ID NO: 36884 - protein, 8 aa, Homo sapiens
  misc_feature: Table A; Target 36884; HLA-B*37:01; MAGEA1; ENSG00000198681; CTA
LESLFRAV

SEQ ID NO: 36885 - protein, 8 aa, Homo sapiens
  misc_feature: Table A; Target 36885; HLA-B*49:01; MAGEA1; ENSG00000198681; CTA
LESLFRAV

SEQ ID NO: 36886 - protein, 9 aa, Homo sapiens
  misc_feature: Table A; Target 36886; HLA-B*44:02; MAGEA1; ENSG00000198681; CTA
LESLFRAVI

SEQ ID NO: 36887 - protein, 9 aa, Homo sapiens
  misc_feature: Table A; Target 36887; HLA-B*49:01; MAGEA1; ENSG00000198681; CTA
LESLFRAVI

SEQ ID NO: 36888 - protein, 9 aa, Homo sapiens
  misc_feature: Table A; Target 36888; HLA-A*30:01; MAGEA1; ENSG00000198681; CTA
LEYVIKVSA

SEQ ID NO: 36889 - protein, 9 aa, Homo sapiens
  misc_feature: Table A; Target 36889; HLA-B*18:01; MAGEA1; ENSG00000198681; CTA
LEYVIKVSA

SEQ ID NO: 36890 - protein, 9 aa, Homo sapiens
  misc_feature: Table A; Target 36890; HLA-B*37:01; MAGEA1; ENSG00000198681; CTA
LEYVIKVSA

SEQ ID NO: 36891 - protein, 9 aa, Homo sapiens
  misc_feature: Table A; Target 36891; HLA-B*40:01; MAGEA1; ENSG00000198681; CTA
LEYVIKVSA

SEQ ID NO: 36892 - protein, 9 aa, Homo sapiens
  misc_feature: Table A; Target 36892; HLA-B*40:02; MAGEA1; ENSG00000198681; CTA
LEYVIKVSA

SEQ ID NO: 36893 - protein, 9 aa, Homo sapiens
  misc_feature: Table A; Target 36893; HLA-B*49:01; MAGEA1; ENSG00000198681; CTA
LEYVIKVSA

SEQ ID NO: 36894 - protein, 9 aa, Homo sapiens
  misc_feature: Table A; Target 36894; HLA-B*54:01; MAGEA1; ENSG00000198681; CTA
LEYVIKVSA

SEQ ID NO: 36895 - protein, 9 aa, Homo sapiens
  misc_feature: Table A; Target 36895; HLA-B*56:01; MAGEA1; ENSG00000198681; CTA
LEYVIKVSA

SEQ ID NO: 36896 - protein, 9 aa, Homo sapiens
  misc_feature: Table A; Target 36896; HLA-B*38:01; MAGEA1; ENSG00000198681; CTA
LHCKPEEAL

SEQ ID NO: 36897 - protein, 10 aa, Homo sapiens
  misc_feature: Table A; Target 36897; HLA-B*27:02; MAGEA1; ENSG00000198681; CTA
LLTQDLVQEK

SEQ ID NO: 36898 - protein, 9 aa, Homo sapiens
  misc_feature: Table A; Target 36898; HLA-B*13:02; MAGEA1; ENSG00000198681; CTA
LQLVFGIDV

SEQ ID NO: 36899 - protein, 10 aa, Homo sapiens
  misc_feature: Table A; Target 36899; HLA-B*27:02; MAGEA1; ENSG00000198681; CTA
LSVMEVYDGR

SEQ ID NO: 36900 - protein, 9 aa, Homo sapiens
  misc_feature: Table A; Target 36900; HLA-A*01:01; MAGEA1; ENSG00000198681; CTA
LTQDLVQEK

SEQ ID NO: 36901 - protein, 9 aa, Homo sapiens
  misc_feature: Table A; Target 36901; HLA-A*03:02; MAGEA1; ENSG00000198681; CTA
LTQDLVQEK

SEQ ID NO: 36902 - protein, 9 aa, Homo sapiens
  misc_feature: Table A; Target 36902; HLA-A*31:01; MAGEA1; ENSG00000198681; CTA
LTQDLVQEK

SEQ ID NO: 36903 - protein, 9 aa, Homo sapiens
  misc_feature: Table A; Target 36903; HLA-A*33:01; MAGEA1; ENSG00000198681; CTA
LTQDLVQEK

SEQ ID NO: 36904 - protein, 9 aa, Homo sapiens
  misc_feature: Table A; Target 36904; HLA-A*33:03; MAGEA1; ENSG00000198681; CTA
LTQDLVQEK

SEQ ID NO: 36905 - protein, 9 aa, Homo sapiens
  misc_feature: Table A; Target 36905; HLA-A*68:01; MAGEA1; ENSG00000198681; CTA
LTQDLVQEK

SEQ ID NO: 36906 - protein, 9 aa, Homo sapiens
  misc_feature: Table A; Target 36906; HLA-B*27:02; MAGEA1; ENSG00000198681; CTA
LTQDLVQEK

SEQ ID NO: 36907 - protein, 9 aa, Homo sapiens
  misc_feature: Table A; Target 36907; HLA-B*27:05; MAGEA1; ENSG00000198681; CTA
LTQDLVQEK

SEQ ID NO: 36908 - protein, 9 aa, Homo sapiens
  misc_feature: Table A; Target 36908; HLA-C*07:06; MAGEA1; ENSG00000198681; CTA
LTQDLVQEK

SEQ ID NO: 36909 - protein, 10 aa, Homo sapiens
  misc_feature: Table A; Target 36909; HLA-A*01:01; MAGEA1; ENSG00000198681; CTA
LTQDLVQEKY

SEQ ID NO: 36910 - protein, 10 aa, Homo sapiens
  misc_feature: Table A; Target 36910; HLA-A*25:01; MAGEA1; ENSG00000198681; CTA
LTQDLVQEKY

SEQ ID NO: 36911 - protein, 10 aa, Homo sapiens
  misc_feature: Table A; Target 36911; HLA-A*26:01; MAGEA1; ENSG00000198681; CTA
LTQDLVQEKY

SEQ ID NO: 36912 - protein, 10 aa, Homo sapiens
  misc_feature: Table A; Target 36912; HLA-A*29:02; MAGEA1; ENSG00000198681; CTA
LTQDLVQEKY

SEQ ID NO: 36913 - protein, 10 aa, Homo sapiens
  misc_feature: Table A; Target 36913; HLA-A*30:02; MAGEA1; ENSG00000198681; CTA
LTQDLVQEKY

SEQ ID NO: 36914 - protein, 10 aa, Homo sapiens
  misc_feature: Table A; Target 36914; HLA-A*32:01; MAGEA1; ENSG00000198681; CTA
LTQDLVQEKY

SEQ ID NO: 36915 - protein, 10 aa, Homo sapiens
  misc_feature: Table A; Target 36915; HLA-B*57:01; MAGEA1; ENSG00000198681; CTA
LTQDLVQEKY

SEQ ID NO: 36916 - protein, 10 aa, Homo sapiens
  misc_feature: Table A; Target 36916; HLA-B*58:01; MAGEA1; ENSG00000198681; CTA
LTQDLVQEKY

SEQ ID NO: 36917 - protein, 10 aa, Homo sapiens
  misc_feature: Table A; Target 36917; HLA-C*07:01; MAGEA1; ENSG00000198681; CTA
LTQDLVQEKY

SEQ ID NO: 36918 - protein, 10 aa, Homo sapiens
  misc_feature: Table A; Target 36918; HLA-C*16:01; MAGEA1; ENSG00000198681; CTA
LTQDLVQEKY

SEQ ID NO: 36919 - protein, 10 aa, Homo sapiens
  misc_feature: Table A; Target 36919; HLA-C*16:02; MAGEA1; ENSG00000198681; CTA
LTQDLVQEKY

SEQ ID NO: 36920 - protein, 10 aa, Homo sapiens
  misc_feature: Table A; Target 36920; HLA-C*16:04; MAGEA1; ENSG00000198681; CTA
LTQDLVQEKY

SEQ ID NO: 36921 - protein, 8 aa, Homo sapiens
  misc_feature: Table A; Target 36921; HLA-B*27:02; MAGEA1; ENSG00000198681; CTA
LVFGIDVK

SEQ ID NO: 36922 - protein, 9 aa, Homo sapiens
  misc_feature: Table A; Target 36922; HLA-A*01:01; MAGEA1; ENSG00000198681; CTA
LVGFLLLKY

SEQ ID NO: 36923 - protein, 9 aa, Homo sapiens
  misc_feature: Table A; Target 36923; HLA-A*29:02; MAGEA1; ENSG00000198681; CTA
LVGFLLLKY

SEQ ID NO: 36924 - protein, 9 aa, Homo sapiens
  misc_feature: Table A; Target 36924; HLA-C*07:01; MAGEA1; ENSG00000198681; CTA
LVGFLLLKY

SEQ ID NO: 36925 - protein, 9 aa, Homo sapiens
  misc_feature: Table A; Target 36925; HLA-A*02:01; MAGEA1; ENSG00000198681; CTA
LVLGTLEEV

SEQ ID NO: 36926 - protein, 9 aa, Homo sapiens
  misc_feature: Table A; Target 36926; HLA-A*02:03; MAGEA1; ENSG00000198681; CTA
LVLGTLEEV

SEQ ID NO: 36927 - protein, 9 aa, Homo sapiens
  misc_feature: Table A; Target 36927; HLA-A*02:04; MAGEA1; ENSG00000198681; CTA
LVLGTLEEV

SEQ ID NO: 36928 - protein, 9 aa, Homo sapiens
  misc_feature: Table A; Target 36928; HLA-A*02:07; MAGEA1; ENSG00000198681; CTA
LVLGTLEEV

SEQ ID NO: 36929 - protein, 9 aa, Homo sapiens
  misc_feature: Table A; Target 36929; HLA-B*55:01; MAGEA1; ENSG00000198681; CTA
LVLGTLEEV

SEQ ID NO: 36930 - protein, 9 aa, Homo sapiens
  misc_feature: Table A; Target 36930; HLA-A*02:07; MAGEA1; ENSG00000198681; CTA
LVQEKYLEY

SEQ ID NO: 36931 - protein, 9 aa, Homo sapiens
  misc_feature: Table A; Target 36931; HLA-B*08:01; MAGEA1; ENSG00000198681; CTA
LVQEKYLEY

SEQ ID NO: 36932 - protein, 9 aa, Homo sapiens
  misc_feature: Table A; Target 36932; HLA-B*15:03; MAGEA1; ENSG00000198681; CTA
LVQEKYLEY

SEQ ID NO: 36933 - protein, 10 aa, Homo sapiens
  misc_feature: Table A; Target 36933; HLA-A*31:01; MAGEA1; ENSG00000198681; CTA
LVQEKYLEYR

SEQ ID NO: 36934 - protein, 10 aa, Homo sapiens
  misc_feature: Table A; Target 36934; HLA-A*33:01; MAGEA1; ENSG00000198681; CTA
LVQEKYLEYR

SEQ ID NO: 36935 - protein, 11 aa, Homo sapiens
  misc_feature: Table A; Target 36935; HLA-A*30:01; MAGEA1; ENSG00000198681; CTA
MEVYDGREHSA

SEQ ID NO: 36936 - protein, 11 aa, Homo sapiens
  misc_feature: Table A; Target 36936; HLA-B*40:02; MAGEA1; ENSG00000198681; CTA
MEVYDGREHSA

SEQ ID NO: 36937 - protein, 11 aa, Homo sapiens
  misc_feature: Table A; Target 36937; HLA-B*54:01; MAGEA1; ENSG00000198681; CTA
MEVYDGREHSA

SEQ ID NO: 36938 - protein, 10 aa, Homo sapiens
  misc_feature: Table A; Target 36938; HLA-B*54:01; MAGEA1; ENSG00000198681; CTA
MPKTGFLIIV

SEQ ID NO: 36939 - protein, 8 aa, Homo sapiens
  misc_feature: Table A; Target 36939; HLA-C*03:04; MAGEA1; ENSG00000198681; CTA
MSLEQRSL

SEQ ID NO: 36940 - protein, 8 aa, Homo sapiens
  misc_feature: Table A; Target 36940; HLA-C*16:01; MAGEA1; ENSG00000198681; CTA
MSLEQRSL

SEQ ID NO: 36941 - protein, 9 aa, Homo sapiens
  misc_feature: Table A; Target 36941; HLA-A*24:02; MAGEA1; ENSG00000198681; CTA
NYKHCFPEI

SEQ ID NO: 36942 - protein, 10 aa, Homo sapiens
  misc_feature: Table A; Target 36942; HLA-B*15:01; MAGEA1; ENSG00000198681; CTA
PQSPQGASAF

SEQ ID NO: 36943 - protein, 8 aa, Homo sapiens
  misc_feature: Table A; Target 36943; HLA-B*07:02; MAGEA1; ENSG00000198681; CTA
PTGHSYVL

SEQ ID NO: 36944 - protein, 8 aa, Homo sapiens
  misc_feature: Table A; Target 36944; HLA-C*07:01; MAGEA1; ENSG00000198681; CTA
PTGHSYVL

SEQ ID NO: 36945 - protein, 8 aa, Homo sapiens
  misc_feature: Table A; Target 36945; HLA-C*07:02; MAGEA1; ENSG00000198681; CTA
PTGHSYVL

SEQ ID NO: 36946 - protein, 8 aa, Homo sapiens
  misc_feature: Table A; Target 36946; HLA-B*27:02; MAGEA1; ENSG00000198681; CTA
PTTINFTR

SEQ ID NO: 36947 - protein, 10 aa, Homo sapiens
  misc_feature: Table A; Target 36947; HLA-B*35:03; MAGEA1; ENSG00000198681; CTA
QAATSSSSPL

SEQ ID NO: 36948 - protein, 10 aa, Homo sapiens
  misc_feature: Table A; Target 36948; HLA-C*03:03; MAGEA1; ENSG00000198681; CTA
QAATSSSSPL

SEQ ID NO: 36949 - protein, 10 aa, Homo sapiens
  misc_feature: Table A; Target 36949; HLA-C*03:04; MAGEA1; ENSG00000198681; CTA
QAATSSSSPL

SEQ ID NO: 36950 - protein, 8 aa, Homo sapiens
  misc_feature: Table A; Target 36950; HLA-B*44:03; MAGEA1; ENSG00000198681; CTA
QDLVQEKY

SEQ ID NO: 36951 - protein, 9 aa, Homo sapiens
  misc_feature: Table A; Target 36951; HLA-A*30:01; MAGEA1; ENSG00000198681; CTA
QEALGLVCV

SEQ ID NO: 36952 - protein, 9 aa, Homo sapiens
  misc_feature: Table A; Target 36952; HLA-B*13:02; MAGEA1; ENSG00000198681; CTA
QEALGLVCV

SEQ ID NO: 36953 - protein, 9 aa, Homo sapiens
  misc_feature: Table A; Target 36953; HLA-B*40:01; MAGEA1; ENSG00000198681; CTA
QEALGLVCV

SEQ ID NO: 36954 - protein, 9 aa, Homo sapiens
  misc_feature: Table A; Target 36954; HLA-B*40:02; MAGEA1; ENSG00000198681; CTA
QEALGLVCV

SEQ ID NO: 36955 - protein, 9 aa, Homo sapiens
  misc_feature: Table A; Target 36955; HLA-B*44:03; MAGEA1; ENSG00000198681; CTA
QEALGLVCV

SEQ ID NO: 36956 - protein, 9 aa, Homo sapiens
  misc_feature: Table A; Target 36956; HLA-A*03:02; MAGEA1; ENSG00000198681; CTA
QLVFGIDVK

SEQ ID NO: 36957 - protein, 9 aa, Homo sapiens
  misc_feature: Table A; Target 36957; HLA-A*68:01; MAGEA1; ENSG00000198681; CTA
QPSEGSSSR

SEQ ID NO: 36958 - protein, 9 aa, Homo sapiens
  misc_feature: Table A; Target 36958; HLA-C*07:06; MAGEA1; ENSG00000198681; CTA
QPSEGSSSR

SEQ ID NO: 36959 - protein, 10 aa, Homo sapiens
  misc_feature: Table A; Target 36959; HLA-A*02:01; MAGEA1; ENSG00000198681; CTA
QQEALGLVCV

SEQ ID NO: 36960 - protein, 10 aa, Homo sapiens
  misc_feature: Table A; Target 36960; HLA-B*13:02; MAGEA1; ENSG00000198681; CTA
QQEALGLVCV

SEQ ID NO: 36961 - protein, 10 aa, Homo sapiens
  misc_feature: Table A; Target 36961; HLA-C*04:01; MAGEA1; ENSG00000198681; CTA
QQEALGLVCV

SEQ ID NO: 36962 - protein, 11 aa, Homo sapiens
  misc_feature: Table A; Target 36962; HLA-B*27:05; MAGEA1; ENSG00000198681; CTA
QRQPSEGSSSR

SEQ ID NO: 36963 - protein, 9 aa, Homo sapiens
  misc_feature: Table A; Target 36963; HLA-B*46:01; MAGEA1; ENSG00000198681; CTA
QSPQGASAF

SEQ ID NO: 36964 - protein, 9 aa, Homo sapiens
  misc_feature: Table A; Target 36964; HLA-C*01:02; MAGEA1; ENSG00000198681; CTA
QSPQGASAF

SEQ ID NO: 36965 - protein, 9 aa, Homo sapiens
  misc_feature: Table A; Target 36965; HLA-C*14:02; MAGEA1; ENSG00000198681; CTA
QSPQGASAF

SEQ ID NO: 36966 - protein, 9 aa, Homo sapiens
  misc_feature: Table A; Target 36966; HLA-A*68:01; MAGEA1; ENSG00000198681; CTA
QVPDSDPAR

SEQ ID NO: 36967 - protein, 10 aa, Homo sapiens
  misc_feature: Table A; Target 36967; HLA-A*01:01; MAGEA1; ENSG00000198681; CTA
QVPDSDPARY

SEQ ID NO: 36968 - protein, 10 aa, Homo sapiens
  misc_feature: Table A; Target 36968; HLA-A*25:01; MAGEA1; ENSG00000198681; CTA
QVPDSDPARY

SEQ ID NO: 36969 - protein, 10 aa, Homo sapiens
  misc_feature: Table A; Target 36969; HLA-A*26:01; MAGEA1; ENSG00000198681; CTA
QVPDSDPARY

SEQ ID NO: 36970 - protein, 10 aa, Homo sapiens
  misc_feature: Table A; Target 36970; HLA-A*29:02; MAGEA1; ENSG00000198681; CTA
QVPDSDPARY

SEQ ID NO: 36971 - protein, 10 aa, Homo sapiens
  misc_feature: Table A; Target 36971; HLA-A*30:02; MAGEA1; ENSG00000198681; CTA
QVPDSDPARY

SEQ ID NO: 36972 - protein, 10 aa, Homo sapiens
  misc_feature: Table A; Target 36972; HLA-C*07:04; MAGEA1; ENSG00000198681; CTA
QVPDSDPARY

SEQ ID NO: 36973 - protein, 10 aa, Homo sapiens
  misc_feature: Table A; Target 36973; HLA-A*30:01; MAGEA1; ENSG00000198681; CTA
REEEGPSTSC

SEQ ID NO: 36974 - protein, 10 aa, Homo sapiens
  misc_feature: Table A; Target 36974; HLA-B*40:01; MAGEA1; ENSG00000198681; CTA
REEEGPSTSC

SEQ ID NO: 36975 - protein, 10 aa, Homo sapiens
  misc_feature: Table A; Target 36975; HLA-B*49:01; MAGEA1; ENSG00000198681; CTA
REEEGPSTSC

SEQ ID NO: 36976 - protein, 11 aa, Homo sapiens
  misc_feature: Table A; Target 36976; HLA-B*40:01; MAGEA1; ENSG00000198681; CTA
REEEGPSTSCI

SEQ ID NO: 36977 - protein, 11 aa, Homo sapiens
  misc_feature: Table A; Target 36977; HLA-B*49:01; MAGEA1; ENSG00000198681; CTA
REEEGPSTSCI

SEQ ID NO: 36978 - protein, 11 aa, Homo sapiens
  misc_feature: Table A; Target 36978; HLA-A*29:02; MAGEA1; ENSG00000198681; CTA
RQVPDSDPARY

SEQ ID NO: 36979 - protein, 11 aa, Homo sapiens
  misc_feature: Table A; Target 36979; HLA-A*32:01; MAGEA1; ENSG00000198681; CTA
RQVPDSDPARY

SEQ ID NO: 36980 - protein, 11 aa, Homo sapiens
  misc_feature: Table A; Target 36980; HLA-B*15:03; MAGEA1; ENSG00000198681; CTA
RQVPDSDPARY

SEQ ID NO: 36981 - protein, 11 aa, Homo sapiens
  misc_feature: Table A; Target 36981; HLA-B*57:01; MAGEA1; ENSG00000198681; CTA
RQVPDSDPARY

SEQ ID NO: 36982 - protein, 11 aa, Homo sapiens
  misc_feature: Table A; Target 36982; HLA-B*58:01; MAGEA1; ENSG00000198681; CTA
RQVPDSDPARY

SEQ ID NO: 36983 - protein, 9 aa, Homo sapiens
  misc_feature: Table A; Target 36983; HLA-A*02:04; MAGEA1; ENSG00000198681; CTA
RVRFFFPSL

SEQ ID NO: 36984 - protein, 10 aa, Homo sapiens
  misc_feature: Table A; Target 36984; HLA-A*31:01; MAGEA1; ENSG00000198681; CTA
RVRFFFPSLR

SEQ ID NO: 36985 - protein, 9 aa, Homo sapiens
  misc_feature: Table A; Target 36985; HLA-A*02:04; MAGEA1; ENSG00000198681; CTA
SAFPTTINF

SEQ ID NO: 36986 - protein, 9 aa, Homo sapiens
  misc_feature: Table A; Target 36986; HLA-A*02:07; MAGEA1; ENSG00000198681; CTA
SAFPTTINF

SEQ ID NO: 36987 - protein, 9 aa, Homo sapiens
  misc_feature: Table A; Target 36987; HLA-A*03:01; MAGEA1; ENSG00000198681; CTA
SAFPTTINF

SEQ ID NO: 36988 - protein, 9 aa, Homo sapiens
  misc_feature: Table A; Target 36988; HLA-A*03:02; MAGEA1; ENSG00000198681; CTA
SAFPTTINF

SEQ ID NO: 36989 - protein, 9 aa, Homo sapiens
  misc_feature: Table A; Target 36989; HLA-A*11:01; MAGEA1; ENSG00000198681; CTA
SAFPTTINF

SEQ ID NO: 36990 - protein, 9 aa, Homo sapiens
  misc_feature: Table A; Target 36990; HLA-A*23:01; MAGEA1; ENSG00000198681; CTA
SAFPTTINF

SEQ ID NO: 36991 - protein, 9 aa, Homo sapiens
  misc_feature: Table A; Target 36991; HLA-A*24:02; MAGEA1; ENSG00000198681; CTA
SAFPTTINF

SEQ ID NO: 36992 - protein, 9 aa, Homo sapiens
  misc_feature: Table A; Target 36992; HLA-A*25:01; MAGEA1; ENSG00000198681; CTA
SAFPTTINF

SEQ ID NO: 36993 - protein, 9 aa, Homo sapiens
  misc_feature: Table A; Target 36993; HLA-A*26:01; MAGEA1; ENSG00000198681; CTA
SAFPTTINF

SEQ ID NO: 36994 - protein, 9 aa, Homo sapiens
  misc_feature: Table A; Target 36994; HLA-A*29:02; MAGEA1; ENSG00000198681; CTA
SAFPTTINF

SEQ ID NO: 36995 - protein, 9 aa, Homo sapiens
  misc_feature: Table A; Target 36995; HLA-A*30:01; MAGEA1; ENSG00000198681; CTA
SAFPTTINF

SEQ ID NO: 36996 - protein, 9 aa, Homo sapiens
  misc_feature: Table A; Target 36996; HLA-A*30:02; MAGEA1; ENSG00000198681; CTA
SAFPTTINF

SEQ ID NO: 36997 - protein, 9 aa, Homo sapiens
  misc_feature: Table A; Target 36997; HLA-A*31:01; MAGEA1; ENSG00000198681; CTA
SAFPTTINF

SEQ ID NO: 36998 - protein, 9 aa, Homo sapiens
  misc_feature: Table A; Target 36998; HLA-A*32:01; MAGEA1; ENSG00000198681; CTA
SAFPTTINF

SEQ ID NO: 36999 - protein, 9 aa, Homo sapiens
  misc_feature: Table A; Target 36999; HLA-A*33:01; MAGEA1; ENSG00000198681; CTA
SAFPTTINF

SEQ ID NO: 37000 - protein, 9 aa, Homo sapiens
  misc_feature: Table A; Target 37000; HLA-A*33:03; MAGEA1; ENSG00000198681; CTA
SAFPTTINF

SEQ ID NO: 37001 - protein, 9 aa, Homo sapiens
  misc_feature: Table A; Target 37001; HLA-A*68:01; MAGEA1; ENSG00000198681; CTA
SAFPTTINF

SEQ ID NO: 37002 - protein, 9 aa, Homo sapiens
  misc_feature: Table A; Target 37002; HLA-A*68:02; MAGEA1; ENSG00000198681; CTA
SAFPTTINF

SEQ ID NO: 37003 - protein, 9 aa, Homo sapiens
  misc_feature: Table A; Target 37003; HLA-B*07:02; MAGEA1; ENSG00000198681; CTA
SAFPTTINF

SEQ ID NO: 37004 - protein, 9 aa, Homo sapiens
  misc_feature: Table A; Target 37004; HLA-B*13:02; MAGEA1; ENSG00000198681; CTA
SAFPTTINF

SEQ ID NO: 37005 - protein, 9 aa, Homo sapiens
  misc_feature: Table A; Target 37005; HLA-B*15:03; MAGEA1; ENSG00000198681; CTA
SAFPTTINF

SEQ ID NO: 37006 - protein, 9 aa, Homo sapiens
  misc_feature: Table A; Target 37006; HLA-B*18:01; MAGEA1; ENSG00000198681; CTA
SAFPTTINF

SEQ ID NO: 37007 - protein, 9 aa, Homo sapiens
  misc_feature: Table A; Target 37007; HLA-B*27:02; MAGEA1; ENSG00000198681; CTA
SAFPTTINF

SEQ ID NO: 37008 - protein, 9 aa, Homo sapiens
  misc_feature: Table A; Target 37008; HLA-B*27:05; MAGEA1; ENSG00000198681; CTA
SAFPTTINF

SEQ ID NO: 37009 - protein, 9 aa, Homo sapiens
  misc_feature: Table A; Target 37009; HLA-B*35:03; MAGEA1; ENSG00000198681; CTA
SAFPTTINF

SEQ ID NO: 37010 - protein, 9 aa, Homo sapiens
  misc_feature: Table A; Target 37010; HLA-B*37:01; MAGEA1; ENSG00000198681; CTA
SAFPTTINF

SEQ ID NO: 37011 - protein, 9 aa, Homo sapiens
  misc_feature: Table A; Target 37011; HLA-B*38:01; MAGEA1; ENSG00000198681; CTA
SAFPTTINF

SEQ ID NO: 37012 - protein, 9 aa, Homo sapiens
  misc_feature: Table A; Target 37012; HLA-B*39:01; MAGEA1; ENSG00000198681; CTA
SAFPTTINF

SEQ ID NO: 37013 - protein, 9 aa, Homo sapiens
  misc_feature: Table A; Target 37013; HLA-B*40:02; MAGEA1; ENSG00000198681; CTA
SAFPTTINF

SEQ ID NO: 37014 - protein, 9 aa, Homo sapiens
  misc_feature: Table A; Target 37014; HLA-B*44:02; MAGEA1; ENSG00000198681; CTA
SAFPTTINF

SEQ ID NO: 37015 - protein, 9 aa, Homo sapiens
  misc_feature: Table A; Target 37015; HLA-B*44:03; MAGEA1; ENSG00000198681; CTA
SAFPTTINF

SEQ ID NO: 37016 - protein, 9 aa, Homo sapiens
  misc_feature: Table A; Target 37016; HLA-B*46:01; MAGEA1; ENSG00000198681; CTA
SAFPTTINF

SEQ ID NO: 37017 - protein, 9 aa, Homo sapiens
  misc_feature: Table A; Target 37017; HLA-B*51:01; MAGEA1; ENSG00000198681; CTA
SAFPTTINF

SEQ ID NO: 37018 - protein, 9 aa, Homo sapiens
  misc_feature: Table A; Target 37018; HLA-B*54:01; MAGEA1; ENSG00000198681; CTA
SAFPTTINF

SEQ ID NO: 37019 - protein, 9 aa, Homo sapiens
  misc_feature: Table A; Target 37019; HLA-B*55:01; MAGEA1; ENSG00000198681; CTA
SAFPTTINF

SEQ ID NO: 37020 - protein, 9 aa, Homo sapiens
  misc_feature: Table A; Target 37020; HLA-B*56:01; MAGEA1; ENSG00000198681; CTA
SAFPTTINF

SEQ ID NO: 37021 - protein, 9 aa, Homo sapiens
  misc_feature: Table A; Target 37021; HLA-C*01:02; MAGEA1; ENSG00000198681; CTA
SAFPTTINF

SEQ ID NO: 37022 - protein, 9 aa, Homo sapiens
  misc_feature: Table A; Target 37022; HLA-C*03:03; MAGEA1; ENSG00000198681; CTA
SAFPTTINF

SEQ ID NO: 37023 - protein, 9 aa, Homo sapiens
  misc_feature: Table A; Target 37023; HLA-C*03:04; MAGEA1; ENSG00000198681; CTA
SAFPTTINF

SEQ ID NO: 37024 - protein, 9 aa, Homo sapiens
  misc_feature: Table A; Target 37024; HLA-C*04:01; MAGEA1; ENSG00000198681; CTA
SAFPTTINF

SEQ ID NO: 37025 - protein, 9 aa, Homo sapiens
  misc_feature: Table A; Target 37025; HLA-C*05:01; MAGEA1; ENSG00000198681; CTA
SAFPTTINF

SEQ ID NO: 37026 - protein, 9 aa, Homo sapiens
  misc_feature: Table A; Target 37026; HLA-C*06:02; MAGEA1; ENSG00000198681; CTA
SAFPTTINF

SEQ ID NO: 37027 - protein, 9 aa, Homo sapiens
  misc_feature: Table A; Target 37027; HLA-C*07:04; MAGEA1; ENSG00000198681; CTA
SAFPTTINF

SEQ ID NO: 37028 - protein, 9 aa, Homo sapiens
  misc_feature: Table A; Target 37028; HLA-C*07:06; MAGEA1; ENSG00000198681; CTA
SAFPTTINF

SEQ ID NO: 37029 - protein, 9 aa, Homo sapiens
  misc_feature: Table A; Target 37029; HLA-C*14:02; MAGEA1; ENSG00000198681; CTA
SAFPTTINF

SEQ ID NO: 37030 - protein, 9 aa, Homo sapiens
  misc_feature: Table A; Target 37030; HLA-C*16:01; MAGEA1; ENSG00000198681; CTA
SAFPTTINF

SEQ ID NO: 37031 - protein, 9 aa, Homo sapiens
  misc_feature: Table A; Target 37031; HLA-C*16:02; MAGEA1; ENSG00000198681; CTA
SAFPTTINF

SEQ ID NO: 37032 - protein, 9 aa, Homo sapiens
  misc_feature: Table A; Target 37032; HLA-C*16:04; MAGEA1; ENSG00000198681; CTA
SAFPTTINF

SEQ ID NO: 37033 - protein, 11 aa, Homo sapiens
  misc_feature: Table A; Target 37033; HLA-A*03:02; MAGEA1; ENSG00000198681; CTA
SAFPTTINFTR

SEQ ID NO: 37034 - protein, 11 aa, Homo sapiens
  misc_feature: Table A; Target 37034; HLA-A*11:01; MAGEA1; ENSG00000198681; CTA
SAFPTTINFTR

SEQ ID NO: 37035 - protein, 11 aa, Homo sapiens
  misc_feature: Table A; Target 37035; HLA-A*31:01; MAGEA1; ENSG00000198681; CTA
SAFPTTINFTR

SEQ ID NO: 37036 - protein, 11 aa, Homo sapiens
  misc_feature: Table A; Target 37036; HLA-A*33:01; MAGEA1; ENSG00000198681; CTA
SAFPTTINFTR

SEQ ID NO: 37037 - protein, 11 aa, Homo sapiens
  misc_feature: Table A; Target 37037; HLA-A*33:03; MAGEA1; ENSG00000198681; CTA
SAFPTTINFTR

SEQ ID NO: 37038 - protein, 11 aa, Homo sapiens
  misc_feature: Table A; Target 37038; HLA-A*68:01; MAGEA1; ENSG00000198681; CTA
SAFPTTINFTR

SEQ ID NO: 37039 - protein, 11 aa, Homo sapiens
  misc_feature: Table A; Target 37039; HLA-A*68:02; MAGEA1; ENSG00000198681; CTA
SAFPTTINFTR

SEQ ID NO: 37040 - protein, 11 aa, Homo sapiens
  misc_feature: Table A; Target 37040; HLA-B*57:01; MAGEA1; ENSG00000198681; CTA
SAFPTTINFTR

SEQ ID NO: 37041 - protein, 11 aa, Homo sapiens
  misc_feature: Table A; Target 37041; HLA-C*02:02; MAGEA1; ENSG00000198681; CTA
SAFPTTINFTR

SEQ ID NO: 37042 - protein, 11 aa, Homo sapiens
  misc_feature: Table A; Target 37042; HLA-C*07:06; MAGEA1; ENSG00000198681; CTA
SAFPTTINFTR

SEQ ID NO: 37043 - protein, 9 aa, Homo sapiens
  misc_feature: Table A; Target 37043; HLA-A*03:01; MAGEA1; ENSG00000198681; CTA
SAYGEPRKL

SEQ ID NO: 37044 - protein, 9 aa, Homo sapiens
  misc_feature: Table A; Target 37044; HLA-B*15:03; MAGEA1; ENSG00000198681; CTA
SAYGEPRKL

SEQ ID NO: 37045 - protein, 9 aa, Homo sapiens
  misc_feature: Table A; Target 37045; HLA-B*51:01; MAGEA1; ENSG00000198681; CTA
SAYGEPRKL

SEQ ID NO: 37046 - protein, 9 aa, Homo sapiens
  misc_feature: Table A; Target 37046; HLA-B*58:01; MAGEA1; ENSG00000198681; CTA
SAYGEPRKL

SEQ ID NO: 37047 - protein, 9 aa, Homo sapiens
  misc_feature: Table A; Target 37047; HLA-C*02:02; MAGEA1; ENSG00000198681; CTA
SAYGEPRKL

SEQ ID NO: 37048 - protein, 9 aa, Homo sapiens
  misc_feature: Table A; Target 37048; HLA-C*03:03; MAGEA1; ENSG00000198681; CTA
SAYGEPRKL

SEQ ID NO: 37049 - protein, 9 aa, Homo sapiens
  misc_feature: Table A; Target 37049; HLA-C*03:04; MAGEA1; ENSG00000198681; CTA
SAYGEPRKL

SEQ ID NO: 37050 - protein, 9 aa, Homo sapiens
  misc_feature: Table A; Target 37050; HLA-C*06:02; MAGEA1; ENSG00000198681; CTA
SAYGEPRKL

SEQ ID NO: 37051 - protein, 9 aa, Homo sapiens
  misc_feature: Table A; Target 37051; HLA-C*12:03; MAGEA1; ENSG00000198681; CTA
SAYGEPRKL

SEQ ID NO: 37052 - protein, 9 aa, Homo sapiens
  misc_feature: Table A; Target 37052; HLA-C*16:01; MAGEA1; ENSG00000198681; CTA
SAYGEPRKL

SEQ ID NO: 37053 - protein, 9 aa, Homo sapiens
  misc_feature: Table A; Target 37053; HLA-C*16:02; MAGEA1; ENSG00000198681; CTA
SAYGEPRKL

SEQ ID NO: 37054 - protein, 9 aa, Homo sapiens
  misc_feature: Table A; Target 37054; HLA-C*16:04; MAGEA1; ENSG00000198681; CTA
SAYGEPRKL

SEQ ID NO: 37055 - protein, 8 aa, Homo sapiens
  misc_feature: Table A; Target 37055; HLA-B*37:01; MAGEA1; ENSG00000198681; CTA
SDPARYEF

SEQ ID NO: 37056 - protein, 8 aa, Homo sapiens
  misc_feature: Table A; Target 37056; HLA-A*30:01; MAGEA1; ENSG00000198681; CTA
SESLQLVF

SEQ ID NO: 37057 - protein, 8 aa, Homo sapiens
  misc_feature: Table A; Target 37057; HLA-B*18:01; MAGEA1; ENSG00000198681; CTA
SESLQLVF

SEQ ID NO: 37058 - protein, 8 aa, Homo sapiens
  misc_feature: Table A; Target 37058; HLA-B*37:01; MAGEA1; ENSG00000198681; CTA
SESLQLVF

SEQ ID NO: 37059 - protein, 8 aa, Homo sapiens
  misc_feature: Table A; Target 37059; HLA-B*44:02; MAGEA1; ENSG00000198681; CTA
SESLQLVF

SEQ ID NO: 37060 - protein, 8 aa, Homo sapiens
  misc_feature: Table A; Target 37060; HLA-B*44:03; MAGEA1; ENSG00000198681; CTA
SESLQLVF

SEQ ID NO: 37061 - protein, 8 aa, Homo sapiens
  misc_feature: Table A; Target 37061; HLA-B*49:01; MAGEA1; ENSG00000198681; CTA
SESLQLVF

SEQ ID NO: 37062 - protein, 9 aa, Homo sapiens
  misc_feature: Table A; Target 37062; HLA-A*02:03; MAGEA1; ENSG00000198681; CTA
SLFRAVITK

SEQ ID NO: 37063 - protein, 9 aa, Homo sapiens
  misc_feature: Table A; Target 37063; HLA-A*02:04; MAGEA1; ENSG00000198681; CTA
SLFRAVITK

SEQ ID NO: 37064 - protein, 9 aa, Homo sapiens
  misc_feature: Table A; Target 37064; HLA-A*03:01; MAGEA1; ENSG00000198681; CTA
SLFRAVITK

SEQ ID NO: 37065 - protein, 9 aa, Homo sapiens
  misc_feature: Table A; Target 37065; HLA-A*03:02; MAGEA1; ENSG00000198681; CTA
SLFRAVITK

SEQ ID NO: 37066 - protein, 9 aa, Homo sapiens
  misc_feature: Table A; Target 37066; HLA-A*11:01; MAGEA1; ENSG00000198681; CTA
SLFRAVITK

SEQ ID NO: 37067 - protein, 10 aa, Homo sapiens
  misc_feature: Table A; Target 37067; HLA-A*03:01; MAGEA1; ENSG00000198681; CTA
SLFRAVITKK

SEQ ID NO: 37068 - protein, 10 aa, Homo sapiens
  misc_feature: Table A; Target 37068; HLA-A*03:02; MAGEA1; ENSG00000198681; CTA
SLFRAVITKK

SEQ ID NO: 37069 - protein, 8 aa, Homo sapiens
  misc_feature: Table A; Target 37069; HLA-B*07:02; MAGEA1; ENSG00000198681; CTA
SPLVLGTL

SEQ ID NO: 37070 - protein, 8 aa, Homo sapiens
  misc_feature: Table A; Target 37070; HLA-B*08:01; MAGEA1; ENSG00000198681; CTA
SPLVLGTL

SEQ ID NO: 37071 - protein, 8 aa, Homo sapiens
  misc_feature: Table A; Target 37071; HLA-B*56:01; MAGEA1; ENSG00000198681; CTA
SPLVLGTL

SEQ ID NO: 37072 - protein, 8 aa, Homo sapiens
  misc_feature: Table A; Target 37072; HLA-C*07:02; MAGEA1; ENSG00000198681; CTA
SPLVLGTL

SEQ ID NO: 37073 - protein, 11 aa, Homo sapiens
  misc_feature: Table A; Target 37073; HLA-B*56:01; MAGEA1; ENSG00000198681; CTA
SPLVLGTLEEV

SEQ ID NO: 37074 - protein, 8 aa, Homo sapiens
  misc_feature: Table A; Target 37074; HLA-B*07:02; MAGEA1; ENSG00000198681; CTA
SPQGASAF

SEQ ID NO: 37075 - protein, 9 aa, Homo sapiens
  misc_feature: Table A; Target 37075; HLA-A*02:07; MAGEA1; ENSG00000198681; CTA
SSPLVLGTL

SEQ ID NO: 37076 - protein, 9 aa, Homo sapiens
  misc_feature: Table A; Target 37076; HLA-B*46:01; MAGEA1; ENSG00000198681; CTA
SSPLVLGTL

SEQ ID NO: 37077 - protein, 9 aa, Homo sapiens
  misc_feature: Table A; Target 37077; HLA-C*01:02; MAGEA1; ENSG00000198681; CTA
SSPLVLGTL

SEQ ID NO: 37078 - protein, 9 aa, Homo sapiens
  misc_feature: Table A; Target 37078; HLA-C*07:02; MAGEA1; ENSG00000198681; CTA
SSPLVLGTL

SEQ ID NO: 37079 - protein, 10 aa, Homo sapiens
  misc_feature: Table A; Target 37079; HLA-A*25:01; MAGEA1; ENSG00000198681; CTA
SSSPLVLGTL

SEQ ID NO: 37080 - protein, 10 aa, Homo sapiens
  misc_feature: Table A; Target 37080; HLA-C*16:02; MAGEA1; ENSG00000198681; CTA
SSSPLVLGTL

SEQ ID NO: 37081 - protein, 8 aa, Homo sapiens
  misc_feature: Table A; Target 37081; HLA-C*02:02; MAGEA1; ENSG00000198681; CTA
SSSSPLVL

SEQ ID NO: 37082 - protein, 8 aa, Homo sapiens
  misc_feature: Table A; Target 37082; HLA-C*03:03; MAGEA1; ENSG00000198681; CTA
SSSSPLVL

SEQ ID NO: 37083 - protein, 8 aa, Homo sapiens
  misc_feature: Table A; Target 37083; HLA-C*03:04; MAGEA1; ENSG00000198681; CTA
SSSSPLVL

SEQ ID NO: 37084 - protein, 8 aa, Homo sapiens
  misc_feature: Table A; Target 37084; HLA-C*05:01; MAGEA1; ENSG00000198681; CTA
SSSSPLVL

SEQ ID NO: 37085 - protein, 8 aa, Homo sapiens
  misc_feature: Table A; Target 37085; HLA-C*07:04; MAGEA1; ENSG00000198681; CTA
SSSSPLVL

SEQ ID NO: 37086 - protein, 8 aa, Homo sapiens
  misc_feature: Table A; Target 37086; HLA-C*12:03; MAGEA1; ENSG00000198681; CTA
SSSSPLVL

SEQ ID NO: 37087 - protein, 8 aa, Homo sapiens
  misc_feature: Table A; Target 37087; HLA-C*16:01; MAGEA1; ENSG00000198681; CTA
SSSSPLVL

SEQ ID NO: 37088 - protein, 9 aa, Homo sapiens
  misc_feature: Table A; Target 37088; HLA-A*01:01; MAGEA1; ENSG00000198681; CTA
STDPPQSPQ

SEQ ID NO: 37089 - protein, 9 aa, Homo sapiens
  misc_feature: Table A; Target 37089; HLA-A*11:01; MAGEA1; ENSG00000198681; CTA
STDPPQSPQ

SEQ ID NO: 37090 - protein, 10 aa, Homo sapiens
  misc_feature: Table A; Target 37090; HLA-A*01:01; MAGEA1; ENSG00000198681; CTA
STDPPQSPQG

SEQ ID NO: 37091 - protein, 9 aa, Homo sapiens
  misc_feature: Table A; Target 37091; HLA-A*68:02; MAGEA1; ENSG00000198681; CTA
STSCILESL

SEQ ID NO: 37092 - protein, 9 aa, Homo sapiens
  misc_feature: Table A; Target 37092; HLA-A*03:02; MAGEA1; ENSG00000198681; CTA
SVMEVYDGR

SEQ ID NO: 37093 - protein, 9 aa, Homo sapiens
  misc_feature: Table A; Target 37093; HLA-A*11:01; MAGEA1; ENSG00000198681; CTA
SVMEVYDGR

SEQ ID NO: 37094 - protein, 9 aa, Homo sapiens
  misc_feature: Table A; Target 37094; HLA-A*25:01; MAGEA1; ENSG00000198681; CTA
SVMEVYDGR

SEQ ID NO: 37095 - protein, 9 aa, Homo sapiens
  misc_feature: Table A; Target 37095; HLA-A*26:01; MAGEA1; ENSG00000198681; CTA
SVMEVYDGR

SEQ ID NO: 37096 - protein, 9 aa, Homo sapiens
  misc_feature: Table A; Target 37096; HLA-A*31:01; MAGEA1; ENSG00000198681; CTA
SVMEVYDGR

SEQ ID NO: 37097 - protein, 9 aa, Homo sapiens
  misc_feature: Table A; Target 37097; HLA-A*33:01; MAGEA1; ENSG00000198681; CTA
SVMEVYDGR

SEQ ID NO: 37098 - protein, 9 aa, Homo sapiens
  misc_feature: Table A; Target 37098; HLA-A*33:03; MAGEA1; ENSG00000198681; CTA
SVMEVYDGR

SEQ ID NO: 37099 - protein, 9 aa, Homo sapiens
  misc_feature: Table A; Target 37099; HLA-A*68:02; MAGEA1; ENSG00000198681; CTA
SVMEVYDGR

SEQ ID NO: 37100 - protein, 9 aa, Homo sapiens
  misc_feature: Table A; Target 37100; HLA-C*07:06; MAGEA1; ENSG00000198681; CTA
SVMEVYDGR

SEQ ID NO: 37101 - protein, 8 aa, Homo sapiens
  misc_feature: Table A; Target 37101; HLA-A*23:01; MAGEA1; ENSG00000198681; CTA
SYVKVLEY

SEQ ID NO: 37102 - protein, 8 aa, Homo sapiens
  misc_feature: Table A; Target 37102; HLA-A*24:02; MAGEA1; ENSG00000198681; CTA
SYVKVLEY

SEQ ID NO: 37103 - protein, 8 aa, Homo sapiens
  misc_feature: Table A; Target 37103; HLA-A*29:02; MAGEA1; ENSG00000198681; CTA
SYVKVLEY

SEQ ID NO: 37104 - protein, 8 aa, Homo sapiens
  misc_feature: Table A; Target 37104; HLA-A*30:02; MAGEA1; ENSG00000198681; CTA
SYVKVLEY

SEQ ID NO: 37105 - protein, 8 aa, Homo sapiens
  misc_feature: Table A; Target 37105; HLA-B*15:01; MAGEA1; ENSG00000198681; CTA
SYVKVLEY

SEQ ID NO: 37106 - protein, 8 aa, Homo sapiens
  misc_feature: Table A; Target 37106; HLA-B*15:03; MAGEA1; ENSG00000198681; CTA
SYVKVLEY

SEQ ID NO: 37107 - protein, 8 aa, Homo sapiens
  misc_feature: Table A; Target 37107; HLA-B*18:01; MAGEA1; ENSG00000198681; CTA
SYVKVLEY

SEQ ID NO: 37108 - protein, 8 aa, Homo sapiens
  misc_feature: Table A; Target 37108; HLA-B*46:01; MAGEA1; ENSG00000198681; CTA
SYVKVLEY

SEQ ID NO: 37109 - protein, 8 aa, Homo sapiens
  misc_feature: Table A; Target 37109; HLA-C*07:01; MAGEA1; ENSG00000198681; CTA
SYVKVLEY

SEQ ID NO: 37110 - protein, 8 aa, Homo sapiens
  misc_feature: Table A; Target 37110; HLA-C*14:02; MAGEA1; ENSG00000198681; CTA
SYVKVLEY

SEQ ID NO: 37111 - protein, 9 aa, Homo sapiens
  misc_feature: Table A; Target 37111; HLA-A*24:02; MAGEA1; ENSG00000198681; CTA
SYVKVLEYV

SEQ ID NO: 37112 - protein, 10 aa, Homo sapiens
  misc_feature: Table A; Target 37112; HLA-A*23:01; MAGEA1; ENSG00000198681; CTA
SYVKVLEYVI

SEQ ID NO: 37113 - protein, 10 aa, Homo sapiens
  misc_feature: Table A; Target 37113; HLA-A*24:02; MAGEA1; ENSG00000198681; CTA
SYVKVLEYVI

SEQ ID NO: 37114 - protein, 8 aa, Homo sapiens
  misc_feature: Table A; Target 37114; HLA-A*23:01; MAGEA1; ENSG00000198681; CTA
SYVLVTCL

SEQ ID NO: 37115 - protein, 8 aa, Homo sapiens
  misc_feature: Table A; Target 37115; HLA-A*24:02; MAGEA1; ENSG00000198681; CTA
SYVLVTCL

SEQ ID NO: 37116 - protein, 8 aa, Homo sapiens
  misc_feature: Table A; Target 37116; HLA-C*14:02; MAGEA1; ENSG00000198681; CTA
SYVLVTCL

SEQ ID NO: 37117 - protein, 9 aa, Homo sapiens
  misc_feature: Table A; Target 37117; HLA-A*68:02; MAGEA1; ENSG00000198681; CTA
TGFLIIVLV

SEQ ID NO: 37118 - protein, 9 aa, Homo sapiens
  misc_feature: Table A; Target 37118; HLA-B*51:01; MAGEA1; ENSG00000198681; CTA
TGFLIIVLV

SEQ ID NO: 37119 - protein, 9 aa, Homo sapiens
  misc_feature: Table A; Target 37119; HLA-C*16:01; MAGEA1; ENSG00000198681; CTA
TQDLVQEKY

SEQ ID NO: 37120 - protein, 8 aa, Homo sapiens
  misc_feature: Table A; Target 37120; HLA-C*06:02; MAGEA1; ENSG00000198681; CTA
TSSSSPLV

SEQ ID NO: 37121 - protein, 9 aa, Homo sapiens
  misc_feature: Table A; Target 37121; HLA-A*01:01; MAGEA1; ENSG00000198681; CTA
TSSSSPLVL

SEQ ID NO: 37122 - protein, 9 aa, Homo sapiens
  misc_feature: Table A; Target 37122; HLA-A*23:01; MAGEA1; ENSG00000198681; CTA
TSSSSPLVL

SEQ ID NO: 37123 - protein, 9 aa, Homo sapiens
  misc_feature: Table A; Target 37123; HLA-A*25:01; MAGEA1; ENSG00000198681; CTA
TSSSSPLVL

SEQ ID NO: 37124 - protein, 9 aa, Homo sapiens
  misc_feature: Table A; Target 37124; HLA-A*30:01; MAGEA1; ENSG00000198681; CTA
TSSSSPLVL

SEQ ID NO: 37125 - protein, 9 aa, Homo sapiens
  misc_feature: Table A; Target 37125; HLA-A*68:01; MAGEA1; ENSG00000198681; CTA
TSSSSPLVL

SEQ ID NO: 37126 - protein, 9 aa, Homo sapiens
  misc_feature: Table A; Target 37126; HLA-A*68:02; MAGEA1; ENSG00000198681; CTA
TSSSSPLVL

SEQ ID NO: 37127 - protein, 9 aa, Homo sapiens
  misc_feature: Table A; Target 37127; HLA-B*07:02; MAGEA1; ENSG00000198681; CTA
TSSSSPLVL

SEQ ID NO: 37128 - protein, 9 aa, Homo sapiens
  misc_feature: Table A; Target 37128; HLA-B*13:02; MAGEA1; ENSG00000198681; CTA
TSSSSPLVL

SEQ ID NO: 37129 - protein, 9 aa, Homo sapiens
  misc_feature: Table A; Target 37129; HLA-B*27:05; MAGEA1; ENSG00000198681; CTA
TSSSSPLVL

SEQ ID NO: 37130 - protein, 9 aa, Homo sapiens
  misc_feature: Table A; Target 37130; HLA-B*35:01; MAGEA1; ENSG00000198681; CTA
TSSSSPLVL

SEQ ID NO: 37131 - protein, 9 aa, Homo sapiens
  misc_feature: Table A; Target 37131; HLA-B*35:03; MAGEA1; ENSG00000198681; CTA
TSSSSPLVL

SEQ ID NO: 37132 - protein, 9 aa, Homo sapiens
  misc_feature: Table A; Target 37132; HLA-B*38:01; MAGEA1; ENSG00000198681; CTA
TSSSSPLVL

SEQ ID NO: 37133 - protein, 9 aa, Homo sapiens
  misc_feature: Table A; Target 37133; HLA-B*39:01; MAGEA1; ENSG00000198681; CTA
TSSSSPLVL

SEQ ID NO: 37134 - protein, 9 aa, Homo sapiens
  misc_feature: Table A; Target 37134; HLA-B*40:01; MAGEA1; ENSG00000198681; CTA
TSSSSPLVL

SEQ ID NO: 37135 - protein, 9 aa, Homo sapiens
  misc_feature: Table A; Target 37135; HLA-B*58:01; MAGEA1; ENSG00000198681; CTA
TSSSSPLVL

SEQ ID NO: 37136 - protein, 9 aa, Homo sapiens
  misc_feature: Table A; Target 37136; HLA-C*01:02; MAGEA1; ENSG00000198681; CTA
TSSSSPLVL

SEQ ID NO: 37137 - protein, 9 aa, Homo sapiens
  misc_feature: Table A; Target 37137; HLA-C*02:02; MAGEA1; ENSG00000198681; CTA
TSSSSPLVL

SEQ ID NO: 37138 - protein, 9 aa, Homo sapiens
  misc_feature: Table A; Target 37138; HLA-C*03:03; MAGEA1; ENSG00000198681; CTA
TSSSSPLVL

SEQ ID NO: 37139 - protein, 9 aa, Homo sapiens
  misc_feature: Table A; Target 37139; HLA-C*03:04; MAGEA1; ENSG00000198681; CTA
TSSSSPLVL

SEQ ID NO: 37140 - protein, 9 aa, Homo sapiens
  misc_feature: Table A; Target 37140; HLA-C*04:01; MAGEA1; ENSG00000198681; CTA
TSSSSPLVL

SEQ ID NO: 37141 - protein, 9 aa, Homo sapiens
  misc_feature: Table A; Target 37141; HLA-C*05:01; MAGEA1; ENSG00000198681; CTA
TSSSSPLVL

SEQ ID NO: 37142 - protein, 9 aa, Homo sapiens
  misc_feature: Table A; Target 37142; HLA-C*06:02; MAGEA1; ENSG00000198681; CTA
TSSSSPLVL

SEQ ID NO: 37143 - protein, 9 aa, Homo sapiens
  misc_feature: Table A; Target 37143; HLA-C*07:04; MAGEA1; ENSG00000198681; CTA
TSSSSPLVL

SEQ ID NO: 37144 - protein, 9 aa, Homo sapiens
  misc_feature: Table A; Target 37144; HLA-C*07:06; MAGEA1; ENSG00000198681; CTA
TSSSSPLVL

SEQ ID NO: 37145 - protein, 9 aa, Homo sapiens
  misc_feature: Table A; Target 37145; HLA-C*12:03; MAGEA1; ENSG00000198681; CTA
TSSSSPLVL

SEQ ID NO: 37146 - protein, 9 aa, Homo sapiens
  misc_feature: Table A; Target 37146; HLA-C*14:02; MAGEA1; ENSG00000198681; CTA
TSSSSPLVL

SEQ ID NO: 37147 - protein, 9 aa, Homo sapiens
  misc_feature: Table A; Target 37147; HLA-C*16:01; MAGEA1; ENSG00000198681; CTA
TSSSSPLVL

SEQ ID NO: 37148 - protein, 9 aa, Homo sapiens
  misc_feature: Table A; Target 37148; HLA-C*16:02; MAGEA1; ENSG00000198681; CTA
TSSSSPLVL

SEQ ID NO: 37149 - protein, 9 aa, Homo sapiens
  misc_feature: Table A; Target 37149; HLA-C*16:04; MAGEA1; ENSG00000198681; CTA
TSSSSPLVL

SEQ ID NO: 37150 - protein, 9 aa, Homo sapiens
  misc_feature: Table A; Target 37150; HLA-A*01:01; MAGEA1; ENSG00000198681; CTA
TSYVKVLEY

SEQ ID NO: 37151 - protein, 9 aa, Homo sapiens
  misc_feature: Table A; Target 37151; HLA-A*03:01; MAGEA1; ENSG00000198681; CTA
TSYVKVLEY

SEQ ID NO: 37152 - protein, 9 aa, Homo sapiens
  misc_feature: Table A; Target 37152; HLA-A*11:01; MAGEA1; ENSG00000198681; CTA
TSYVKVLEY

SEQ ID NO: 37153 - protein, 9 aa, Homo sapiens
  misc_feature: Table A; Target 37153; HLA-A*23:01; MAGEA1; ENSG00000198681; CTA
TSYVKVLEY

SEQ ID NO: 37154 - protein, 9 aa, Homo sapiens
  misc_feature: Table A; Target 37154; HLA-A*25:01; MAGEA1; ENSG00000198681; CTA
TSYVKVLEY

SEQ ID NO: 37155 - protein, 9 aa, Homo sapiens
  misc_feature: Table A; Target 37155; HLA-A*26:01; MAGEA1; ENSG00000198681; CTA
TSYVKVLEY

SEQ ID NO: 37156 - protein, 9 aa, Homo sapiens
  misc_feature: Table A; Target 37156; HLA-A*29:02; MAGEA1; ENSG00000198681; CTA
TSYVKVLEY

SEQ ID NO: 37157 - protein, 9 aa, Homo sapiens
  misc_feature: Table A; Target 37157; HLA-A*30:02; MAGEA1; ENSG00000198681; CTA
TSYVKVLEY

SEQ ID NO: 37158 - protein, 9 aa, Homo sapiens
  misc_feature: Table A; Target 37158; HLA-A*32:01; MAGEA1; ENSG00000198681; CTA
TSYVKVLEY

SEQ ID NO: 37159 - protein, 9 aa, Homo sapiens
  misc_feature: Table A; Target 37159; HLA-A*33:01; MAGEA1; ENSG00000198681; CTA
TSYVKVLEY

SEQ ID NO: 37160 - protein, 9 aa, Homo sapiens
  misc_feature: Table A; Target 37160; HLA-B*08:01; MAGEA1; ENSG00000198681; CTA
TSYVKVLEY

SEQ ID NO: 37161 - protein, 9 aa, Homo sapiens
  misc_feature: Table A; Target 37161; HLA-B*13:02; MAGEA1; ENSG00000198681; CTA
TSYVKVLEY

SEQ ID NO: 37162 - protein, 9 aa, Homo sapiens
  misc_feature: Table A; Target 37162; HLA-B*15:01; MAGEA1; ENSG00000198681; CTA
TSYVKVLEY

SEQ ID NO: 37163 - protein, 9 aa, Homo sapiens
  misc_feature: Table A; Target 37163; HLA-B*15:03; MAGEA1; ENSG00000198681; CTA
TSYVKVLEY

SEQ ID NO: 37164 - protein, 9 aa, Homo sapiens
  misc_feature: Table A; Target 37164; HLA-B*18:01; MAGEA1; ENSG00000198681; CTA
TSYVKVLEY

SEQ ID NO: 37165 - protein, 9 aa, Homo sapiens
  misc_feature: Table A; Target 37165; HLA-B*27:02; MAGEA1; ENSG00000198681; CTA
TSYVKVLEY

SEQ ID NO: 37166 - protein, 9 aa, Homo sapiens
  misc_feature: Table A; Target 37166; HLA-B*35:01; MAGEA1; ENSG00000198681; CTA
TSYVKVLEY

SEQ ID NO: 37167 - protein, 9 aa, Homo sapiens
  misc_feature: Table A; Target 37167; HLA-B*39:01; MAGEA1; ENSG00000198681; CTA
TSYVKVLEY

SEQ ID NO: 37168 - protein, 9 aa, Homo sapiens
  misc_feature: Table A; Target 37168; HLA-B*44:02; MAGEA1; ENSG00000198681; CTA
TSYVKVLEY

SEQ ID NO: 37169 - protein, 9 aa, Homo sapiens
  misc_feature: Table A; Target 37169; HLA-B*44:03; MAGEA1; ENSG00000198681; CTA
TSYVKVLEY

SEQ ID NO: 37170 - protein, 9 aa, Homo sapiens
  misc_feature: Table A; Target 37170; HLA-B*46:01; MAGEA1; ENSG00000198681; CTA
TSYVKVLEY

SEQ ID NO: 37171 - protein, 9 aa, Homo sapiens
  misc_feature: Table A; Target 37171; HLA-B*51:01; MAGEA1; ENSG00000198681; CTA
TSYVKVLEY

SEQ ID NO: 37172 - protein, 9 aa, Homo sapiens
  misc_feature: Table A; Target 37172; HLA-B*57:01; MAGEA1; ENSG00000198681; CTA
TSYVKVLEY

SEQ ID NO: 37173 - protein, 9 aa, Homo sapiens
  misc_feature: Table A; Target 37173; HLA-B*58:01; MAGEA1; ENSG00000198681; CTA
TSYVKVLEY

SEQ ID NO: 37174 - protein, 9 aa, Homo sapiens
  misc_feature: Table A; Target 37174; HLA-C*01:02; MAGEA1; ENSG00000198681; CTA
TSYVKVLEY

SEQ ID NO: 37175 - protein, 9 aa, Homo sapiens
  misc_feature: Table A; Target 37175; HLA-C*02:02; MAGEA1; ENSG00000198681; CTA
TSYVKVLEY

SEQ ID NO: 37176 - protein, 9 aa, Homo sapiens
  misc_feature: Table A; Target 37176; HLA-C*03:03; MAGEA1; ENSG00000198681; CTA
TSYVKVLEY

SEQ ID NO: 37177 - protein, 9 aa, Homo sapiens
  misc_feature: Table A; Target 37177; HLA-C*03:04; MAGEA1; ENSG00000198681; CTA
TSYVKVLEY

SEQ ID NO: 37178 - protein, 9 aa, Homo sapiens
  misc_feature: Table A; Target 37178; HLA-C*07:01; MAGEA1; ENSG00000198681; CTA
TSYVKVLEY

SEQ ID NO: 37179 - protein, 9 aa, Homo sapiens
  misc_feature: Table A; Target 37179; HLA-C*07:04; MAGEA1; ENSG00000198681; CTA
TSYVKVLEY

SEQ ID NO: 37180 - protein, 9 aa, Homo sapiens
  misc_feature: Table A; Target 37180; HLA-C*07:06; MAGEA1; ENSG00000198681; CTA
TSYVKVLEY

SEQ ID NO: 37181 - protein, 9 aa, Homo sapiens
  misc_feature: Table A; Target 37181; HLA-C*12:03; MAGEA1; ENSG00000198681; CTA
TSYVKVLEY

SEQ ID NO: 37182 - protein, 9 aa, Homo sapiens
  misc_feature: Table A; Target 37182; HLA-C*14:02; MAGEA1; ENSG00000198681; CTA
TSYVKVLEY

SEQ ID NO: 37183 - protein, 9 aa, Homo sapiens
  misc_feature: Table A; Target 37183; HLA-C*16:01; MAGEA1; ENSG00000198681; CTA
TSYVKVLEY

SEQ ID NO: 37184 - protein, 9 aa, Homo sapiens
  misc_feature: Table A; Target 37184; HLA-C*16:02; MAGEA1; ENSG00000198681; CTA
TSYVKVLEY

SEQ ID NO: 37185 - protein, 9 aa, Homo sapiens
  misc_feature: Table A; Target 37185; HLA-C*16:04; MAGEA1; ENSG00000198681; CTA
TSYVKVLEY

SEQ ID NO: 37186 - protein, 10 aa, Homo sapiens
  misc_feature: Table A; Target 37186; HLA-A*68:02; MAGEA1; ENSG00000198681; CTA
TSYVKVLEYV

SEQ ID NO: 37187 - protein, 9 aa, Homo sapiens
  misc_feature: Table A; Target 37187; HLA-A*11:01; MAGEA1; ENSG00000198681; CTA
TTINFTRQR

SEQ ID NO: 37188 - protein, 9 aa, Homo sapiens
  misc_feature: Table A; Target 37188; HLA-A*31:01; MAGEA1; ENSG00000198681; CTA
TTINFTRQR

SEQ ID NO: 37189 - protein, 9 aa, Homo sapiens
  misc_feature: Table A; Target 37189; HLA-A*33:01; MAGEA1; ENSG00000198681; CTA
TTINFTRQR

SEQ ID NO: 37190 - protein, 9 aa, Homo sapiens
  misc_feature: Table A; Target 37190; HLA-A*33:03; MAGEA1; ENSG00000198681; CTA
TTINFTRQR

SEQ ID NO: 37191 - protein, 9 aa, Homo sapiens
  misc_feature: Table A; Target 37191; HLA-A*68:01; MAGEA1; ENSG00000198681; CTA
TTINFTRQR

SEQ ID NO: 37192 - protein, 9 aa, Homo sapiens
  misc_feature: Table A; Target 37192; HLA-C*07:06; MAGEA1; ENSG00000198681; CTA
TTINFTRQR

SEQ ID NO: 37193 - protein, 8 aa, Homo sapiens
  misc_feature: Table A; Target 37193; HLA-C*04:01; MAGEA1; ENSG00000198681; CTA
VADLVGFL

SEQ ID NO: 37194 - protein, 8 aa, Homo sapiens
  misc_feature: Table A; Target 37194; HLA-C*05:01; MAGEA1; ENSG00000198681; CTA
VADLVGFL

SEQ ID NO: 37195 - protein, 9 aa, Homo sapiens
  misc_feature: Table A; Target 37195; HLA-A*01:01; MAGEA1; ENSG00000198681; CTA
VADLVGFLL

SEQ ID NO: 37196 - protein, 9 aa, Homo sapiens
  misc_feature: Table A; Target 37196; HLA-A*02:07; MAGEA1; ENSG00000198681; CTA
VADLVGFLL

SEQ ID NO: 37197 - protein, 9 aa, Homo sapiens
  misc_feature: Table A; Target 37197; HLA-B*38:01; MAGEA1; ENSG00000198681; CTA
VADLVGFLL

SEQ ID NO: 37198 - protein, 9 aa, Homo sapiens
  misc_feature: Table A; Target 37198; HLA-C*03:03; MAGEA1; ENSG00000198681; CTA
VADLVGFLL

SEQ ID NO: 37199 - protein, 9 aa, Homo sapiens
  misc_feature: Table A; Target 37199; HLA-C*03:04; MAGEA1; ENSG00000198681; CTA
VADLVGFLL

SEQ ID NO: 37200 - protein, 9 aa, Homo sapiens
  misc_feature: Table A; Target 37200; HLA-C*04:01; MAGEA1; ENSG00000198681; CTA
VADLVGFLL

SEQ ID NO: 37201 - protein, 9 aa, Homo sapiens
  misc_feature: Table A; Target 37201; HLA-C*05:01; MAGEA1; ENSG00000198681; CTA
VADLVGFLL

SEQ ID NO: 37202 - protein, 10 aa, Homo sapiens
  misc_feature: Table A; Target 37202; HLA-A*01:01; MAGEA1; ENSG00000198681; CTA
VADLVGFLLL

SEQ ID NO: 37203 - protein, 10 aa, Homo sapiens
  misc_feature: Table A; Target 37203; HLA-A*02:07; MAGEA1; ENSG00000198681; CTA
VADLVGFLLL

SEQ ID NO: 37204 - protein, 10 aa, Homo sapiens
  misc_feature: Table A; Target 37204; HLA-C*03:04; MAGEA1; ENSG00000198681; CTA
VADLVGFLLL

SEQ ID NO: 37205 - protein, 10 aa, Homo sapiens
  misc_feature: Table A; Target 37205; HLA-C*05:01; MAGEA1; ENSG00000198681; CTA
VADLVGFLLL

SEQ ID NO: 37206 - protein, 8 aa, Homo sapiens
  misc_feature: Table A; Target 37206; HLA-C*07:01; MAGEA1; ENSG00000198681; CTA
VGFLLLKY

SEQ ID NO: 37207 - protein, 8 aa, Homo sapiens
  misc_feature: Table A; Target 37207; HLA-C*12:03; MAGEA1; ENSG00000198681; CTA
VGFLLLKY

SEQ ID NO: 37208 - protein, 8 aa, Homo sapiens
  misc_feature: Table A; Target 37208; HLA-B*08:01; MAGEA1; ENSG00000198681; CTA
VIKVSARV

SEQ ID NO: 37209 - protein, 9 aa, Homo sapiens
  misc_feature: Table A; Target 37209; HLA-B*08:01; MAGEA1; ENSG00000198681; CTA
VITKKVADL

SEQ ID NO: 37210 - protein, 11 aa, Homo sapiens
  misc_feature: Table A; Target 37210; HLA-B*15:03; MAGEA1; ENSG00000198681; CTA
VKEADPTGHSY

SEQ ID NO: 37211 - protein, 8 aa, Homo sapiens
  misc_feature: Table A; Target 37211; HLA-A*02:01; MAGEA1; ENSG00000198681; CTA
VLGTLEEV

SEQ ID NO: 37212 - protein, 8 aa, Homo sapiens
  misc_feature: Table A; Target 37212; HLA-A*02:03; MAGEA1; ENSG00000198681; CTA
VLGTLEEV

SEQ ID NO: 37213 - protein, 10 aa, Homo sapiens
  misc_feature: Table A; Target 37213; HLA-A*29:02; MAGEA1; ENSG00000198681; CTA
VLVTCLGLSY

SEQ ID NO: 37214 - protein, 9 aa, Homo sapiens
  misc_feature: Table A; Target 37214; HLA-A*01:01; MAGEA1; ENSG00000198681; CTA
VPDSDPARY

SEQ ID NO: 37215 - protein, 9 aa, Homo sapiens
  misc_feature: Table A; Target 37215; HLA-A*30:02; MAGEA1; ENSG00000198681; CTA
VPDSDPARY

SEQ ID NO: 37216 - protein, 9 aa, Homo sapiens
  misc_feature: Table A; Target 37216; HLA-B*35:01; MAGEA1; ENSG00000198681; CTA
VPDSDPARY

SEQ ID NO: 37217 - protein, 9 aa, Homo sapiens
  misc_feature: Table A; Target 37217; HLA-B*35:03; MAGEA1; ENSG00000198681; CTA
VPDSDPARY

SEQ ID NO: 37218 - protein, 9 aa, Homo sapiens
  misc_feature: Table A; Target 37218; HLA-C*03:03; MAGEA1; ENSG00000198681; CTA
VPDSDPARY

SEQ ID NO: 37219 - protein, 9 aa, Homo sapiens
  misc_feature: Table A; Target 37219; HLA-C*05:01; MAGEA1; ENSG00000198681; CTA
VPDSDPARY

SEQ ID NO: 37220 - protein, 9 aa, Homo sapiens
  misc_feature: Table A; Target 37220; HLA-C*16:02; MAGEA1; ENSG00000198681; CTA
VPDSDPARY

SEQ ID NO: 37221 - protein, 11 aa, Homo sapiens
  misc_feature: Table A; Target 37221; HLA-A*24:02; MAGEA1; ENSG00000198681; CTA
VPDSDPARYEF

SEQ ID NO: 37222 - protein, 11 aa, Homo sapiens
  misc_feature: Table A; Target 37222; HLA-B*07:02; MAGEA1; ENSG00000198681; CTA
VPDSDPARYEF

SEQ ID NO: 37223 - protein, 11 aa, Homo sapiens
  misc_feature: Table A; Target 37223; HLA-B*35:03; MAGEA1; ENSG00000198681; CTA
VPDSDPARYEF

SEQ ID NO: 37224 - protein, 11 aa, Homo sapiens
  misc_feature: Table A; Target 37224; HLA-C*03:03; MAGEA1; ENSG00000198681; CTA
VPDSDPARYEF

SEQ ID NO: 37225 - protein, 11 aa, Homo sapiens
  misc_feature: Table A; Target 37225; HLA-C*04:01; MAGEA1; ENSG00000198681; CTA
VPDSDPARYEF

SEQ ID NO: 37226 - protein, 11 aa, Homo sapiens
  misc_feature: Table A; Target 37226; HLA-C*05:01; MAGEA1; ENSG00000198681; CTA
VPDSDPARYEF

SEQ ID NO: 37227 - protein, 11 aa, Homo sapiens
  misc_feature: Table A; Target 37227; HLA-C*07:02; MAGEA1; ENSG00000198681; CTA
VPDSDPARYEF

SEQ ID NO: 37228 - protein, 11 aa, Homo sapiens
  misc_feature: Table A; Target 37228; HLA-B*27:05; MAGEA1; ENSG00000198681; CTA
VQAATSSSSPL

SEQ ID NO: 37229 - protein, 11 aa, Homo sapiens
  misc_feature: Table A; Target 37229; HLA-C*07:02; MAGEA1; ENSG00000198681; CTA
VQAATSSSSPL

SEQ ID NO: 37230 - protein, 11 aa, Homo sapiens
  misc_feature: Table A; Target 37230; HLA-C*07:04; MAGEA1; ENSG00000198681; CTA
VQAATSSSSPL

SEQ ID NO: 37231 - protein, 8 aa, Homo sapiens
  misc_feature: Table A; Target 37231; HLA-C*07:04; MAGEA1; ENSG00000198681; CTA
VQEKYLEY

SEQ ID NO: 37232 - protein, 8 aa, Homo sapiens
  misc_feature: Table A; Target 37232; HLA-C*16:02; MAGEA1; ENSG00000198681; CTA
VQEKYLEY

SEQ ID NO: 37233 - protein, 9 aa, Homo sapiens
  misc_feature: Table A; Target 37233; HLA-B*57:01; MAGEA1; ENSG00000198681; CTA
VSARVRFFF

SEQ ID NO: 37234 - protein, 9 aa, Homo sapiens
  misc_feature: Table A; Target 37234; HLA-C*04:01; MAGEA1; ENSG00000198681; CTA
VYDGREHSA

SEQ ID NO: 37235 - protein, 10 aa, Homo sapiens
  misc_feature: Table A; Target 37235; HLA-A*01:01; MAGEA1; ENSG00000198681; CTA
VYDGREHSAY

SEQ ID NO: 37236 - protein, 10 aa, Homo sapiens
  misc_feature: Table A; Target 37236; HLA-A*29:02; MAGEA1; ENSG00000198681; CTA
VYDGREHSAY

SEQ ID NO: 37237 - protein, 10 aa, Homo sapiens
  misc_feature: Table A; Target 37237; HLA-A*30:02; MAGEA1; ENSG00000198681; CTA
VYDGREHSAY

SEQ ID NO: 37238 - protein, 10 aa, Homo sapiens
  misc_feature: Table A; Target 37238; HLA-C*04:01; MAGEA1; ENSG00000198681; CTA
VYDGREHSAY

SEQ ID NO: 37239 - protein, 10 aa, Homo sapiens
  misc_feature: Table A; Target 37239; HLA-C*07:01; MAGEA1; ENSG00000198681; CTA
VYDGREHSAY

SEQ ID NO: 37240 - protein, 10 aa, Homo sapiens
  misc_feature: Table A; Target 37240; HLA-C*14:02; MAGEA1; ENSG00000198681; CTA
VYDGREHSAY

SEQ ID NO: 37241 - protein, 9 aa, Homo sapiens
  misc_feature: Table A; Target 37241; HLA-B*49:01; MAGEA1; ENSG00000198681; CTA
WEELSVMEV

SEQ ID NO: 37242 - protein, 9 aa, Homo sapiens
  misc_feature: Table A; Target 37242; HLA-A*01:01; MAGEA1; ENSG00000198681; CTA
YDGREHSAY

SEQ ID NO: 37243 - protein, 9 aa, Homo sapiens
  misc_feature: Table A; Target 37243; HLA-A*29:02; MAGEA1; ENSG00000198681; CTA
YDGREHSAY

SEQ ID NO: 37244 - protein, 9 aa, Homo sapiens
  misc_feature: Table A; Target 37244; HLA-C*07:01; MAGEA1; ENSG00000198681; CTA
YDGREHSAY

SEQ ID NO: 37245 - protein, 8 aa, Homo sapiens
  misc_feature: Table A; Target 37245; HLA-A*26:01; MAGEA1; ENSG00000198681; CTA
YVIKVSAR

SEQ ID NO: 37246 - protein, 8 aa, Homo sapiens
  misc_feature: Table A; Target 37246; HLA-A*31:01; MAGEA1; ENSG00000198681; CTA
YVIKVSAR

SEQ ID NO: 37247 - protein, 8 aa, Homo sapiens
  misc_feature: Table A; Target 37247; HLA-A*33:03; MAGEA1; ENSG00000198681; CTA
YVIKVSAR

SEQ ID NO: 37248 - protein, 8 aa, Homo sapiens
  misc_feature: Table A; Target 37248; HLA-A*68:01; MAGEA1; ENSG00000198681; CTA
YVIKVSAR

SEQ ID NO: 37249 - protein, 8 aa, Homo sapiens
  misc_feature: Table A; Target 37249; HLA-B*08:01; MAGEA1; ENSG00000198681; CTA
YVIKVSAR

SEQ ID NO: 37250 - protein, 8 aa, Homo sapiens
  misc_feature: Table A; Target 37250; HLA-B*18:01; MAGEA1; ENSG00000198681; CTA
YVIKVSAR

SEQ ID NO: 37251 - protein, 8 aa, Homo sapiens
  misc_feature: Table A; Target 37251; HLA-B*40:02; MAGEA1; ENSG00000198681; CTA
YVIKVSAR

SEQ ID NO: 37252 - protein, 8 aa, Homo sapiens
  misc_feature: Table A; Target 37252; HLA-C*04:01; MAGEA1; ENSG00000198681; CTA
YVIKVSAR

SEQ ID NO: 37253 - protein, 9 aa, Homo sapiens
  misc_feature: Table A; Target 37253; HLA-A*02:01; MAGEA1; ENSG00000198681; CTA
YVIKVSARV

SEQ ID NO: 37254 - protein, 9 aa, Homo sapiens
  misc_feature: Table A; Target 37254; HLA-A*02:03; MAGEA1; ENSG00000198681; CTA
YVIKVSARV

SEQ ID NO: 37255 - protein, 9 aa, Homo sapiens
  misc_feature: Table A; Target 37255; HLA-A*02:04; MAGEA1; ENSG00000198681; CTA
YVIKVSARV

SEQ ID NO: 37256 - protein, 9 aa, Homo sapiens
  misc_feature: Table A; Target 37256; HLA-A*02:07; MAGEA1; ENSG00000198681; CTA
YVIKVSARV

SEQ ID NO: 37257 - protein, 9 aa, Homo sapiens
  misc_feature: Table A; Target 37257; HLA-B*13:02; MAGEA1; ENSG00000198681; CTA
YVIKVSARV

SEQ ID NO: 37258 - protein, 9 aa, Homo sapiens
  misc_feature: Table A; Target 37258; HLA-B*27:05; MAGEA1; ENSG00000198681; CTA
YVIKVSARV

SEQ ID NO: 37259 - protein, 9 aa, Homo sapiens
  misc_feature: Table A; Target 37259; HLA-A*02:04; MAGEA1; ENSG00000198681; CTA
YVKVLEYVI

SEQ ID NO: 37260 - protein, 9 aa, Homo sapiens
  misc_feature: Table A; Target 37260; HLA-A*24:02; MAGEA1; ENSG00000198681; CTA
YVKVLEYVI

SEQ ID NO: 37261 - protein, 9 aa, Homo sapiens
  misc_feature: Table A; Target 37261; HLA-A*68:02; MAGEA1; ENSG00000198681; CTA
YVKVLEYVI

SEQ ID NO: 37262 - protein, 9 aa, Homo sapiens
  misc_feature: Table A; Target 37262; HLA-B*08:01; MAGEA1; ENSG00000198681; CTA
YVKVLEYVI

SEQ ID NO: 37263 - protein, 9 aa, Homo sapiens
  misc_feature: Table A; Target 37263; HLA-B*13:02; MAGEA1; ENSG00000198681; CTA
YVKVLEYVI

SEQ ID NO: 37264 - protein, 9 aa, Homo sapiens
  misc_feature: Table A; Target 37264; HLA-B*40:02; MAGEA1; ENSG00000198681; CTA
YVKVLEYVI

SEQ ID NO: 37265 - protein, 9 aa, Homo sapiens
  misc_feature: Table A; Target 37265; HLA-B*51:01; MAGEA1; ENSG00000198681; CTA
YVKVLEYVI

SEQ ID NO: 37266 - protein, 9 aa, Homo sapiens
  misc_feature: Table A; Target 37266; HLA-B*57:01; MAGEA1; ENSG00000198681; CTA
YVKVLEYVI

SEQ ID NO: 37267 - protein, 9 aa, Homo sapiens
  misc_feature: Table A; Target 37267; HLA-B*27:05; MAGEA1,MAGEA10; ENSG00000198681,ENSG00000124260; CTA,CTA
LVFGIDVKE

SEQ ID NO: 37268 - protein, 9 aa, Homo sapiens
  misc_feature: Table A; Target 37268; HLA-A*02:04; MAGEA1,MAGEA11,MAGEA3,MAGEA6; ENSG00000198681,ENSG00000185247,ENSG00000221867,ENSG00000197172; CTA,TAA,CTA,CTA
YEFLWGPRA

SEQ ID NO: 37269 - protein, 10 aa, Homo sapiens
  misc_feature: Table A; Target 37269; HLA-B*27:02; MAGEA1,MAGEA3,MAGEA6; ENSG00000198681,ENSG00000221867,ENSG00000197172; CTA,CTA,CTA
AREPVTKAEM

SEQ ID NO: 37270 - protein, 10 aa, Homo sapiens
  misc_feature: Table A; Target 37270; HLA-B*27:05; MAGEA1,MAGEA3,MAGEA6; ENSG00000198681,ENSG00000221867,ENSG00000197172; CTA,CTA,CTA
AREPVTKAEM

SEQ ID NO: 37271 - protein, 10 aa, Homo sapiens
  misc_feature: Table A; Target 37271; HLA-B*38:01; MAGEA1,MAGEA3,MAGEA6; ENSG00000198681,ENSG00000221867,ENSG00000197172; CTA,CTA,CTA
AREPVTKAEM

SEQ ID NO: 37272 - protein, 10 aa, Homo sapiens
  misc_feature: Table A; Target 37272; HLA-C*16:04; MAGEA1,MAGEA3,MAGEA6; ENSG00000198681,ENSG00000221867,ENSG00000197172; CTA,CTA,CTA
AREPVTKAEM

SEQ ID NO: 37273 - protein, 9 aa, Homo sapiens
  misc_feature: Table A; Target 37273; HLA-B*38:01; MAGEA1,MAGEA3,MAGEA6; ENSG00000198681,ENSG00000221867,ENSG00000197172; CTA,CTA,CTA
DGLLGDNQI

SEQ ID NO: 37274 - protein, 9 aa, Homo sapiens
  misc_feature: Table A; Target 37274; HLA-B*51:01; MAGEA1,MAGEA3,MAGEA6; ENSG00000198681,ENSG00000221867,ENSG00000197172; CTA,CTA,CTA
DGLLGDNQI

SEQ ID NO: 37275 - protein, 8 aa, Homo sapiens
  misc_feature: Table A; Target 37275; HLA-B*51:01; MAGEA1,MAGEA3,MAGEA6; ENSG00000198681,ENSG00000221867,ENSG00000197172; CTA,CTA,CTA
DPPQSPQG

SEQ ID NO: 37276 - protein, 8 aa, Homo sapiens
  misc_feature: Table A; Target 37276; HLA-B*07:02; MAGEA1,MAGEA3,MAGEA6; ENSG00000198681,ENSG00000221867,ENSG00000197172; CTA,CTA,CTA
EPVTKAEM

SEQ ID NO: 37277 - protein, 8 aa, Homo sapiens
  misc_feature: Table A; Target 37277; HLA-B*35:01; MAGEA1,MAGEA3,MAGEA6; ENSG00000198681,ENSG00000221867,ENSG00000197172; CTA,CTA,CTA
EPVTKAEM

SEQ ID NO: 37278 - protein, 8 aa, Homo sapiens
  misc_feature: Table A; Target 37278; HLA-B*55:01; MAGEA1,MAGEA3,MAGEA6; ENSG00000198681,ENSG00000221867,ENSG00000197172; CTA,CTA,CTA
EPVTKAEM

SEQ ID NO: 37279 - protein, 8 aa, Homo sapiens
  misc_feature: Table A; Target 37279; HLA-A*11:01; MAGEA1,MAGEA3,MAGEA6; ENSG00000198681,ENSG00000221867,ENSG00000197172; CTA,CTA,CTA
GDNQIMPK

SEQ ID NO: 37280 - protein, 8 aa, Homo sapiens
  misc_feature: Table A; Target 37280; HLA-B*27:02; MAGEA1,MAGEA3,MAGEA6; ENSG00000198681,ENSG00000221867,ENSG00000197172; CTA,CTA,CTA
GDNQIMPK

SEQ ID NO: 37281 - protein, 11 aa, Homo sapiens
  misc_feature: Table A; Target 37281; HLA-A*02:01; MAGEA1,MAGEA3,MAGEA6; ENSG00000198681,ENSG00000221867,ENSG00000197172; CTA,CTA,CTA
GLLGDNQIMPK

SEQ ID NO: 37282 - protein, 11 aa, Homo sapiens
  misc_feature: Table A; Target 37282; HLA-A*03:01; MAGEA1,MAGEA3,MAGEA6; ENSG00000198681,ENSG00000221867,ENSG00000197172; CTA,CTA,CTA
GLLGDNQIMPK

SEQ ID NO: 37283 - protein, 11 aa, Homo sapiens
  misc_feature: Table A; Target 37283; HLA-A*03:02; MAGEA1,MAGEA3,MAGEA6; ENSG00000198681,ENSG00000221867,ENSG00000197172; CTA,CTA,CTA
GLLGDNQIMPK

SEQ ID NO: 37284 - protein, 11 aa, Homo sapiens
  misc_feature: Table A; Target 37284; HLA-A*11:01; MAGEA1,MAGEA3,MAGEA6; ENSG00000198681,ENSG00000221867,ENSG00000197172; CTA,CTA,CTA
GLLGDNQIMPK

SEQ ID NO: 37285 - protein, 11 aa, Homo sapiens
  misc_feature: Table A; Target 37285; HLA-A*31:01; MAGEA1,MAGEA3,MAGEA6; ENSG00000198681,ENSG00000221867,ENSG00000197172; CTA,CTA,CTA
GLLGDNQIMPK

SEQ ID NO: 37286 - protein, 11 aa, Homo sapiens
  misc_feature: Table A; Target 37286; HLA-B*27:02; MAGEA1,MAGEA3,MAGEA6; ENSG00000198681,ENSG00000221867,ENSG00000197172; CTA,CTA,CTA
GLLGDNQIMPK

SEQ ID NO: 37287 - protein, 11 aa, Homo sapiens
  misc_feature: Table A; Target 37287; HLA-B*27:05; MAGEA1,MAGEA3,MAGEA6; ENSG00000198681,ENSG00000221867,ENSG00000197172; CTA,CTA,CTA
GLLGDNQIMPK

SEQ ID NO: 37288 - protein, 11 aa, Homo sapiens
  misc_feature: Table A; Target 37288; HLA-C*04:01; MAGEA1,MAGEA3,MAGEA6; ENSG00000198681,ENSG00000221867,ENSG00000197172; CTA,CTA,CTA
GLLGDNQIMPK

SEQ ID NO: 37289 - protein, 9 aa, Homo sapiens
  misc_feature: Table A; Target 37289; HLA-A*03:01; MAGEA1,MAGEA3,MAGEA6; ENSG00000198681,ENSG00000221867,ENSG00000197172; CTA,CTA,CTA
LGDNQIMPK

SEQ ID NO: 37290 - protein, 9 aa, Homo sapiens
  misc_feature: Table A; Target 37290; HLA-A*03:02; MAGEA1,MAGEA3,MAGEA6; ENSG00000198681,ENSG00000221867,ENSG00000197172; CTA,CTA,CTA
LGDNQIMPK

SEQ ID NO: 37291 - protein, 9 aa, Homo sapiens
  misc_feature: Table A; Target 37291; HLA-A*11:01; MAGEA1,MAGEA3,MAGEA6; ENSG00000198681,ENSG00000221867,ENSG00000197172; CTA,CTA,CTA
LGDNQIMPK

SEQ ID NO: 37292 - protein, 9 aa, Homo sapiens
  misc_feature: Table A; Target 37292; HLA-B*27:02; MAGEA1,MAGEA3,MAGEA6; ENSG00000198681,ENSG00000221867,ENSG00000197172; CTA,CTA,CTA
LGDNQIMPK

SEQ ID NO: 37293 - protein, 10 aa, Homo sapiens
  misc_feature: Table A; Target 37293; HLA-A*03:01; MAGEA1,MAGEA3,MAGEA6; ENSG00000198681,ENSG00000221867,ENSG00000197172; CTA,CTA,CTA
LLGDNQIMPK

SEQ ID NO: 37294 - protein, 10 aa, Homo sapiens
  misc_feature: Table A; Target 37294; HLA-A*03:02; MAGEA1,MAGEA3,MAGEA6; ENSG00000198681,ENSG00000221867,ENSG00000197172; CTA,CTA,CTA
LLGDNQIMPK

SEQ ID NO: 37295 - protein, 10 aa, Homo sapiens
  misc_feature: Table A; Target 37295; HLA-A*11:01; MAGEA1,MAGEA3,MAGEA6; ENSG00000198681,ENSG00000221867,ENSG00000197172; CTA,CTA,CTA
LLGDNQIMPK

SEQ ID NO: 37296 - protein, 10 aa, Homo sapiens
  misc_feature: Table A; Target 37296; HLA-B*27:02; MAGEA1,MAGEA3,MAGEA6; ENSG00000198681,ENSG00000221867,ENSG00000197172; CTA,CTA,CTA
LLGDNQIMPK

SEQ ID NO: 37297 - protein, 8 aa, Homo sapiens
  misc_feature: Table A; Target 37297; HLA-A*03:01; MAGEA1,MAGEA3,MAGEA6; ENSG00000198681,ENSG00000221867,ENSG00000197172; CTA,CTA,CTA
RAREPVTK

SEQ ID NO: 37298 - protein, 8 aa, Homo sapiens
  misc_feature: Table A; Target 37298; HLA-B*57:01; MAGEA1,MAGEA3,MAGEA6; ENSG00000198681,ENSG00000221867,ENSG00000197172; CTA,CTA,CTA
RAREPVTK

SEQ ID NO: 37299 - protein, 9 aa, Homo sapiens
  misc_feature: Table A; Target 37299; HLA-A*32:01; MAGEA1,MAGEA3,MAGEA6; ENSG00000198681,ENSG00000221867,ENSG00000197172; CTA,CTA,CTA
RAREPVTKA

SEQ ID NO: 37300 - protein, 9 aa, Homo sapiens
  misc_feature: Table A; Target 37300; HLA-B*07:02; MAGEA1,MAGEA3,MAGEA6; ENSG00000198681,ENSG00000221867,ENSG00000197172; CTA,CTA,CTA
RAREPVTKA

SEQ ID NO: 37301 - protein, 9 aa, Homo sapiens
  misc_feature: Table A; Target 37301; HLA-B*54:01; MAGEA1,MAGEA3,MAGEA6; ENSG00000198681,ENSG00000221867,ENSG00000197172; CTA,CTA,CTA
RAREPVTKA

SEQ ID NO: 37302 - protein, 9 aa, Homo sapiens
  misc_feature: Table A; Target 37302; HLA-B*56:01; MAGEA1,MAGEA3,MAGEA6; ENSG00000198681,ENSG00000221867,ENSG00000197172; CTA,CTA,CTA
RAREPVTKA

SEQ ID NO: 37303 - protein, 9 aa, Homo sapiens
  misc_feature: Table A; Target 37303; HLA-A*30:01; MAGEA1,MAGEA3,MAGEA6; ENSG00000198681,ENSG00000221867,ENSG00000197172; CTA,CTA,CTA
REPVTKAEM

SEQ ID NO: 37304 - protein, 9 aa, Homo sapiens
  misc_feature: Table A; Target 37304; HLA-B*37:01; MAGEA1,MAGEA3,MAGEA6; ENSG00000198681,ENSG00000221867,ENSG00000197172; CTA,CTA,CTA
REPVTKAEM

SEQ ID NO: 37305 - protein, 9 aa, Homo sapiens
  misc_feature: Table A; Target 37305; HLA-B*40:01; MAGEA1,MAGEA3,MAGEA6; ENSG00000198681,ENSG00000221867,ENSG00000197172; CTA,CTA,CTA
REPVTKAEM

SEQ ID NO: 37306 - protein, 9 aa, Homo sapiens
  misc_feature: Table A; Target 37306; HLA-B*40:02; MAGEA1,MAGEA3,MAGEA6; ENSG00000198681,ENSG00000221867,ENSG00000197172; CTA,CTA,CTA
REPVTKAEM

SEQ ID NO: 37307 - protein, 9 aa, Homo sapiens
  misc_feature: Table A; Target 37307; HLA-B*44:02; MAGEA1,MAGEA3,MAGEA6; ENSG00000198681,ENSG00000221867,ENSG00000197172; CTA,CTA,CTA
REPVTKAEM

SEQ ID NO: 37308 - protein, 9 aa, Homo sapiens
  misc_feature: Table A; Target 37308; HLA-B*44:03; MAGEA1,MAGEA3,MAGEA6; ENSG00000198681,ENSG00000221867,ENSG00000197172; CTA,CTA,CTA
REPVTKAEM

SEQ ID NO: 37309 - protein, 9 aa, Homo sapiens
  misc_feature: Table A; Target 37309; HLA-C*01:02; MAGEA1,MAGEA3,MAGEA6; ENSG00000198681,ENSG00000221867,ENSG00000197172; CTA,CTA,CTA
REPVTKAEM

SEQ ID NO: 37310 - protein, 10 aa, Homo sapiens
  misc_feature: Table A; Target 37310; HLA-A*30:01; MAGEA1,MAGEA3,MAGEA6; ENSG00000198681,ENSG00000221867,ENSG00000197172; CTA,CTA,CTA
REPVTKAEML

SEQ ID NO: 37311 - protein, 10 aa, Homo sapiens
  misc_feature: Table A; Target 37311; HLA-B*40:01; MAGEA1,MAGEA3,MAGEA6; ENSG00000198681,ENSG00000221867,ENSG00000197172; CTA,CTA,CTA
REPVTKAEML

SEQ ID NO: 37312 - protein, 10 aa, Homo sapiens
  misc_feature: Table A; Target 37312; HLA-B*40:02; MAGEA1,MAGEA3,MAGEA6; ENSG00000198681,ENSG00000221867,ENSG00000197172; CTA,CTA,CTA
REPVTKAEML

SEQ ID NO: 37313 - protein, 8 aa, Homo sapiens
  misc_feature: Table A; Target 37313; HLA-A*02:04; MAGEA1,MAGEA3,MAGEA6; ENSG00000198681,ENSG00000221867,ENSG00000197172; CTA,CTA,CTA
SLQLVFGI

SEQ ID NO: 37314 - protein, 8 aa, Homo sapiens
  misc_feature: Table A; Target 37314; HLA-B*37:01; MAGEA1,MAGEA3,MAGEA6; ENSG00000198681,ENSG00000221867,ENSG00000197172; CTA,CTA,CTA
SLQLVFGI

SEQ ID NO: 37315 - protein, 11 aa, Homo sapiens
  misc_feature: Table A; Target 37315; HLA-B*35:03; MAGEA1,MAGEA3,MAGEA6; ENSG00000198681,ENSG00000221867,ENSG00000197172; CTA,CTA,CTA
SYDGLLGDNQI

SEQ ID NO: 37316 - protein, 11 aa, Homo sapiens
  misc_feature: Table A; Target 37316; HLA-B*38:01; MAGEA1,MAGEA3,MAGEA6; ENSG00000198681,ENSG00000221867,ENSG00000197172; CTA,CTA,CTA
SYDGLLGDNQI

SEQ ID NO: 37317 - protein, 11 aa, Homo sapiens
  misc_feature: Table A; Target 37317; HLA-C*04:01; MAGEA1,MAGEA3,MAGEA6; ENSG00000198681,ENSG00000221867,ENSG00000197172; CTA,CTA,CTA
SYDGLLGDNQI

SEQ ID NO: 37318 - protein, 9 aa, Homo sapiens
  misc_feature: Table A; Target 37318; HLA-B*27:02; MAGEA1,MAGEA3,MAGEA6; ENSG00000198681,ENSG00000221867,ENSG00000197172; CTA,CTA,CTA
YRAREPVTK

SEQ ID NO: 37319 - protein, 9 aa, Homo sapiens
  misc_feature: Table A; Target 37319; HLA-B*27:05; MAGEA1,MAGEA3,MAGEA6; ENSG00000198681,ENSG00000221867,ENSG00000197172; CTA,CTA,CTA
YRAREPVTK

SEQ ID NO: 37320 - protein, 9 aa, Homo sapiens
  misc_feature: Table A; Target 37320; HLA-B*39:01; MAGEA1,MAGEA3,MAGEA6; ENSG00000198681,ENSG00000221867,ENSG00000197172; CTA,CTA,CTA
YRAREPVTK

SEQ ID NO: 37321 - protein, 8 aa, Homo sapiens
  misc_feature: Table A; Target 37321; HLA-C*07:02; MAGEA1,MAGEA3,MAGEA6,MAGEA8; ENSG00000198681,ENSG00000221867,ENSG00000197172,ENSG00000156009; CTA,CTA,CTA,TAA
EPVTKAEM

SEQ ID NO: 37322 - protein, 9 aa, Homo sapiens
  misc_feature: Table A; Target 37322; HLA-B*07:02; MAGEA1,MAGEA3,MAGEA6,MAGEA8; ENSG00000198681,ENSG00000221867,ENSG00000197172,ENSG00000156009; CTA,CTA,CTA,TAA
EPVTKAEML

SEQ ID NO: 37323 - protein, 9 aa, Homo sapiens
  misc_feature: Table A; Target 37323; HLA-B*35:01; MAGEA1,MAGEA3,MAGEA6,MAGEA8; ENSG00000198681,ENSG00000221867,ENSG00000197172,ENSG00000156009; CTA,CTA,CTA,TAA
EPVTKAEML

SEQ ID NO: 37324 - protein, 8 aa, Homo sapiens
  misc_feature: Table A; Target 37324; HLA-B*35:03; MAGEA1,MAGEA3,MAGEA6,MAGEA8,MAGEA9; ENSG00000198681,ENSG00000221867,ENSG00000197172, ENSG00000156009,ENSG00000123584; CTA,CTA,CTA,TAA,CTA
EPVTKAEM

SEQ ID NO: 37325 - protein, 9 aa, Homo sapiens
  misc_feature: Table A; Target 37325; HLA-B*08:01; MAGEA1,MAGEA3,MAGEA6,MAGEA8,MAGEA9; ENSG00000198681,ENSG00000221867,ENSG00000197172, ENSG00000156009,ENSG00000123584; CTA,CTA,CTA,TAA,CTA
EPVTKAEML

SEQ ID NO: 37326 - protein, 9 aa, Homo sapiens
  misc_feature: Table A; Target 37326; HLA-C*07:02; MAGEA1,MAGEA3,MAGEA6,MAGEA8,MAGEA9; ENSG00000198681,ENSG00000221867,ENSG00000197172, ENSG00000156009,ENSG00000123584; CTA,CTA,CTA,TAA,CTA
EPVTKAEML

SEQ ID NO: 37327 - protein, 8 aa, Homo sapiens
  misc_feature: Table A; Target 37327; HLA-A*02:04; MAGEA1,MAGEA3,MAGEA8; ENSG00000198681,ENSG00000221867,ENSG00000156009; CTA,CTA,TAA
FLWGPRAL

SEQ ID NO: 37328 - protein, 8 aa, Homo sapiens
  misc_feature: Table A; Target 37328; HLA-B*08:01; MAGEA1,MAGEA4; ENSG00000198681,ENSG00000147381; CTA,TAA
FGKASESL

SEQ ID NO: 37329 - protein, 11 aa, Homo sapiens
  misc_feature: Table A; Target 37329; HLA-A*02:04; MAGEA1,MAGEA6; ENSG00000198681,ENSG00000197172; CTA,CTA
GLLGDNQIMPK

SEQ ID NO: 37330 - protein, 9 aa, Homo sapiens
  misc_feature: Table A; Target 37330; HLA-A*02:07; MAGEA1,MAGEA6; ENSG00000198681,ENSG00000197172; CTA,CTA
IMPKTGFLI

SEQ ID NO: 37331 - protein, 9 aa, Homo sapiens
  misc_feature: Table A; Target 37331; HLA-A*24:02; MAGEA1,MAGEA6; ENSG00000198681,ENSG00000197172; CTA,CTA
IMPKTGFLI

SEQ ID NO: 37332 - protein, 10 aa, Homo sapiens
  misc_feature: Table A; Target 37332; HLA-A*24:02; MAGEA1,MAGEA6; ENSG00000198681,ENSG00000197172; CTA,CTA
IMPKTGFLII

SEQ ID NO: 37333 - protein, 8 aa, Homo sapiens
  misc_feature: Table A; Target 37333; HLA-B*08:01; MAGEA1,MAGEA6; ENSG00000198681,ENSG00000197172; CTA,CTA
MPKTGFLI

SEQ ID NO: 37334 - protein, 8 aa, Homo sapiens
  misc_feature: Table A; Target 37334; HLA-B*51:01; MAGEA1,MAGEA6; ENSG00000198681,ENSG00000197172; CTA,CTA
MPKTGFLI

SEQ ID NO: 37335 - protein, 9 aa, Homo sapiens
  misc_feature: Table A; Target 37335; HLA-B*51:01; MAGEA1,MAGEA6; ENSG00000198681,ENSG00000197172; CTA,CTA
MPKTGFLII

SEQ ID NO: 37336 - protein, 9 aa, Homo sapiens
  misc_feature: Table A; Target 37336; HLA-B*54:01; MAGEA1,MAGEA6; ENSG00000198681,ENSG00000197172; CTA,CTA
MPKTGFLII

SEQ ID NO: 37337 - protein, 9 aa, Homo sapiens
  misc_feature: Table A; Target 37337; HLA-A*25:01; MAGEA1,MAGEA6; ENSG00000198681,ENSG00000197172; CTA,CTA
NQIMPKTGF

SEQ ID NO: 37338 - protein, 9 aa, Homo sapiens
  misc_feature: Table A; Target 37338; HLA-A*26:01; MAGEA1,MAGEA6; ENSG00000198681,ENSG00000197172; CTA,CTA
NQIMPKTGF

SEQ ID NO: 37339 - protein, 9 aa, Homo sapiens
  misc_feature: Table A; Target 37339; HLA-A*32:01; MAGEA1,MAGEA6; ENSG00000198681,ENSG00000197172; CTA,CTA
NQIMPKTGF

SEQ ID NO: 37340 - protein, 9 aa, Homo sapiens
  misc_feature: Table A; Target 37340; HLA-B*15:03; MAGEA1,MAGEA6; ENSG00000198681,ENSG00000197172; CTA,CTA
NQIMPKTGF

SEQ ID NO: 37341 - protein, 9 aa, Homo sapiens
  misc_feature: Table A; Target 37341; HLA-B*18:01; MAGEA1,MAGEA6; ENSG00000198681,ENSG00000197172; CTA,CTA
NQIMPKTGF

SEQ ID NO: 37342 - protein, 9 aa, Homo sapiens
  misc_feature: Table A; Target 37342; HLA-B*37:01; MAGEA1,MAGEA6; ENSG00000198681,ENSG00000197172; CTA,CTA
NQIMPKTGF

SEQ ID NO: 37343 - protein, 9 aa, Homo sapiens
  misc_feature: Table A; Target 37343; HLA-B*38:01; MAGEA1,MAGEA6; ENSG00000198681,ENSG00000197172; CTA,CTA
NQIMPKTGF

SEQ ID NO: 37344 - protein, 9 aa, Homo sapiens
  misc_feature: Table A; Target 37344; HLA-B*44:02; MAGEA1,MAGEA6; ENSG00000198681,ENSG00000197172; CTA,CTA
NQIMPKTGF

SEQ ID NO: 37345 - protein, 9 aa, Homo sapiens
  misc_feature: Table A; Target 37345; HLA-B*44:03; MAGEA1,MAGEA6; ENSG00000198681,ENSG00000197172; CTA,CTA
NQIMPKTGF

SEQ ID NO: 37346 - protein, 9 aa, Homo sapiens
  misc_feature: Table A; Target 37346; HLA-B*46:01; MAGEA1,MAGEA6; ENSG00000198681,ENSG00000197172; CTA,CTA
NQIMPKTGF

SEQ ID NO: 37347 - protein, 9 aa, Homo sapiens
  misc_feature: Table A; Target 37347; HLA-C*07:04; MAGEA1,MAGEA6; ENSG00000198681,ENSG00000197172; CTA,CTA
NQIMPKTGF

SEQ ID NO: 37348 - protein, 9 aa, Homo sapiens
  misc_feature: Table A; Target 37348; HLA-C*14:02; MAGEA1,MAGEA6; ENSG00000198681,ENSG00000197172; CTA,CTA
NQIMPKTGF

SEQ ID NO: 37349 - protein, 9 aa, Homo sapiens
  misc_feature: Table A; Target 37349; HLA-C*16:04; MAGEA1,MAGEA6; ENSG00000198681,ENSG00000197172; CTA,CTA
NQIMPKTGF

SEQ ID NO: 37350 - protein, 8 aa, Homo sapiens
  misc_feature: Table A; Target 37350; HLA-B*08:01; MAGEA1,MAGEA6; ENSG00000198681,ENSG00000197172; CTA,CTA
QIMPKTGF

SEQ ID NO: 37351 - protein, 8 aa, Homo sapiens
  misc_feature: Table A; Target 37351; HLA-B*15:01; MAGEA1,MAGEA6; ENSG00000198681,ENSG00000197172; CTA,CTA
QIMPKTGF

SEQ ID NO: 37352 - protein, 8 aa, Homo sapiens
  misc_feature: Table A; Target 37352; HLA-B*37:01; MAGEA1,MAGEA6; ENSG00000198681,ENSG00000197172; CTA,CTA
QIMPKTGF

SEQ ID NO: 37353 - protein, 8 aa, Homo sapiens
  misc_feature: Table A; Target 37353; HLA-A*30:01; MAGEA1,MAGEA8; ENSG00000198681,ENSG00000156009; CTA,TAA
AEMLESVI

SEQ ID NO: 37354 - protein, 8 aa, Homo sapiens
  misc_feature: Table A; Target 37354; HLA-B*13:02; MAGEA1,MAGEA8; ENSG00000198681,ENSG00000156009; CTA,TAA
AEMLESVI

SEQ ID NO: 37355 - protein, 8 aa, Homo sapiens
  misc_feature: Table A; Target 37355; HLA-B*18:01; MAGEA1,MAGEA8; ENSG00000198681,ENSG00000156009; CTA,TAA
AEMLESVI

SEQ ID NO: 37356 - protein, 8 aa, Homo sapiens
  misc_feature: Table A; Target 37356; HLA-B*40:02; MAGEA1,MAGEA8; ENSG00000198681,ENSG00000156009; CTA,TAA
AEMLESVI

SEQ ID NO: 37357 - protein, 10 aa, Homo sapiens
  misc_feature: Table A; Target 37357; HLA-B*44:03; MAGEA1,MAGEA8; ENSG00000198681,ENSG00000156009; CTA,TAA
AEMLESVIKN

SEQ ID NO: 37358 - protein, 11 aa, Homo sapiens
  misc_feature: Table A; Target 37358; HLA-B*18:01; MAGEA1,MAGEA8; ENSG00000198681,ENSG00000156009; CTA,TAA
AEMLESVIKNY

SEQ ID NO: 37359 - protein, 8 aa, Homo sapiens
  misc_feature: Table A; Target 37359; HLA-A*30:01; MAGEA1,MAGEA8; ENSG00000198681,ENSG00000156009; CTA,TAA
AETSYVKV

SEQ ID NO: 37360 - protein, 8 aa, Homo sapiens
  misc_feature: Table A; Target 37360; HLA-B*37:01; MAGEA1,MAGEA8; ENSG00000198681,ENSG00000156009; CTA,TAA
AETSYVKV

SEQ ID NO: 37361 - protein, 8 aa, Homo sapiens
  misc_feature: Table A; Target 37361; HLA-B*49:01; MAGEA1,MAGEA8; ENSG00000198681,ENSG00000156009; CTA,TAA
AETSYVKV

SEQ ID NO: 37362 - protein, 9 aa, Homo sapiens
  misc_feature: Table A; Target 37362; HLA-B*18:01; MAGEA1,MAGEA8; ENSG00000198681,ENSG00000156009; CTA,TAA
AETSYVKVL

SEQ ID NO: 37363 - protein, 9 aa, Homo sapiens
  misc_feature: Table A; Target 37363; HLA-B*27:02; MAGEA1,MAGEA8; ENSG00000198681,ENSG00000156009; CTA,TAA
AETSYVKVL

SEQ ID NO: 37364 - protein, 9 aa, Homo sapiens
  misc_feature: Table A; Target 37364; HLA-B*27:05; MAGEA1,MAGEA8; ENSG00000198681,ENSG00000156009; CTA,TAA
AETSYVKVL

SEQ ID NO: 37365 - protein, 9 aa, Homo sapiens
  misc_feature: Table A; Target 37365; HLA-B*37:01; MAGEA1,MAGEA8; ENSG00000198681,ENSG00000156009; CTA,TAA
AETSYVKVL

SEQ ID NO: 37366 - protein, 9 aa, Homo sapiens
  misc_feature: Table A; Target 37366; HLA-B*40:02; MAGEA1,MAGEA8; ENSG00000198681,ENSG00000156009; CTA,TAA
AETSYVKVL

SEQ ID NO: 37367 - protein, 9 aa, Homo sapiens
  misc_feature: Table A; Target 37367; HLA-B*49:01; MAGEA1,MAGEA8; ENSG00000198681,ENSG00000156009; CTA,TAA
AETSYVKVL

SEQ ID NO: 37368 - protein, 9 aa, Homo sapiens
  misc_feature: Table A; Target 37368; HLA-C*02:02; MAGEA1,MAGEA8; ENSG00000198681,ENSG00000156009; CTA,TAA
AETSYVKVL

SEQ ID NO: 37369 - protein, 9 aa, Homo sapiens
  misc_feature: Table A; Target 37369; HLA-C*07:04; MAGEA1,MAGEA8; ENSG00000198681,ENSG00000156009; CTA,TAA
AETSYVKVL

SEQ ID NO: 37370 - protein, 9 aa, Homo sapiens
  misc_feature: Table A; Target 37370; HLA-C*12:03; MAGEA1,MAGEA8; ENSG00000198681,ENSG00000156009; CTA,TAA
AETSYVKVL

SEQ ID NO: 37371 - protein, 9 aa, Homo sapiens
  misc_feature: Table A; Target 37371; HLA-C*16:01; MAGEA1,MAGEA8; ENSG00000198681,ENSG00000156009; CTA,TAA
AETSYVKVL

SEQ ID NO: 37372 - protein, 9 aa, Homo sapiens
  misc_feature: Table A; Target 37372; HLA-C*16:02; MAGEA1,MAGEA8; ENSG00000198681,ENSG00000156009; CTA,TAA
AETSYVKVL

SEQ ID NO: 37373 - protein, 9 aa, Homo sapiens
  misc_feature: Table A; Target 37373; HLA-C*16:04; MAGEA1,MAGEA8; ENSG00000198681,ENSG00000156009; CTA,TAA
AETSYVKVL

SEQ ID NO: 37374 - protein, 8 aa, Homo sapiens
  misc_feature: Table A; Target 37374; HLA-A*02:01; MAGEA1,MAGEA8; ENSG00000198681,ENSG00000156009; CTA,TAA
ALAETSYV

SEQ ID NO: 37375 - protein, 8 aa, Homo sapiens
  misc_feature: Table A; Target 37375; HLA-A*02:03; MAGEA1,MAGEA8; ENSG00000198681,ENSG00000156009; CTA,TAA
ALAETSYV

SEQ ID NO: 37376 - protein, 8 aa, Homo sapiens
  misc_feature: Table A; Target 37376; HLA-B*55:01; MAGEA1,MAGEA8; ENSG00000198681,ENSG00000156009; CTA,TAA
ALAETSYV

SEQ ID NO: 37377 - protein, 9 aa, Homo sapiens
  misc_feature: Table A; Target 37377; HLA-A*01:01; MAGEA1,MAGEA8; ENSG00000198681,ENSG00000156009; CTA,TAA
ALAETSYVK

SEQ ID NO: 37378 - protein, 9 aa, Homo sapiens
  misc_feature: Table A; Target 37378; HLA-A*03:01; MAGEA1,MAGEA8; ENSG00000198681,ENSG00000156009; CTA,TAA
ALAETSYVK

SEQ ID NO: 37379 - protein, 9 aa, Homo sapiens
  misc_feature: Table A; Target 37379; HLA-A*03:02; MAGEA1,MAGEA8; ENSG00000198681,ENSG00000156009; CTA,TAA
ALAETSYVK

SEQ ID NO: 37380 - protein, 9 aa, Homo sapiens
  misc_feature: Table A; Target 37380; HLA-A*29:02; MAGEA1,MAGEA8; ENSG00000198681,ENSG00000156009; CTA,TAA
ALAETSYVK

SEQ ID NO: 37381 - protein, 9 aa, Homo sapiens
  misc_feature: Table A; Target 37381; HLA-B*13:02; MAGEA1,MAGEA8; ENSG00000198681,ENSG00000156009; CTA,TAA
ALAETSYVK

SEQ ID NO: 37382 - protein, 9 aa, Homo sapiens
  misc_feature: Table A; Target 37382; HLA-B*27:05; MAGEA1,MAGEA8; ENSG00000198681,ENSG00000156009; CTA,TAA
ALAETSYVK

SEQ ID NO: 37383 - protein, 9 aa, Homo sapiens
  misc_feature: Table A; Target 37383; HLA-C*07:06; MAGEA1,MAGEA8; ENSG00000198681,ENSG00000156009; CTA,TAA
ALAETSYVK

SEQ ID NO: 37384 - protein, 10 aa, Homo sapiens
  misc_feature: Table A; Target 37384; HLA-A*02:01; MAGEA1,MAGEA8; ENSG00000198681,ENSG00000156009; CTA,TAA
ALAETSYVKV

SEQ ID NO: 37385 - protein, 10 aa, Homo sapiens
  misc_feature: Table A; Target 37385; HLA-A*02:03; MAGEA1,MAGEA8; ENSG00000198681,ENSG00000156009; CTA,TAA
ALAETSYVKV

SEQ ID NO: 37386 - protein, 10 aa, Homo sapiens
  misc_feature: Table A; Target 37386; HLA-A*02:04; MAGEA1,MAGEA8; ENSG00000198681,ENSG00000156009; CTA,TAA
ALAETSYVKV

SEQ ID NO: 37387 - protein, 10 aa, Homo sapiens
  misc_feature: Table A; Target 37387; HLA-A*02:07; MAGEA1,MAGEA8; ENSG00000198681,ENSG00000156009; CTA,TAA
ALAETSYVKV

SEQ ID NO: 37388 - protein, 10 aa, Homo sapiens
  misc_feature: Table A; Target 37388; HLA-B*55:01; MAGEA1,MAGEA8; ENSG00000198681,ENSG00000156009; CTA,TAA
ALAETSYVKV

SEQ ID NO: 37389 - protein, 11 aa, Homo sapiens
  misc_feature: Table A; Target 37389; HLA-A*02:03; MAGEA1,MAGEA8; ENSG00000198681,ENSG00000156009; CTA,TAA
ALAETSYVKVL

SEQ ID NO: 37390 - protein, 11 aa, Homo sapiens
  misc_feature: Table A; Target 37390; HLA-A*02:04; MAGEA1,MAGEA8; ENSG00000198681,ENSG00000156009; CTA,TAA
ALAETSYVKVL

SEQ ID NO: 37391 - protein, 10 aa, Homo sapiens
  misc_feature: Table A; Target 37391; HLA-B*18:01; MAGEA1,MAGEA8; ENSG00000198681,ENSG00000156009; CTA,TAA
EMLESVIKNY

SEQ ID NO: 37392 - protein, 11 aa, Homo sapiens
  misc_feature: Table A; Target 37392; HLA-A*33:03; MAGEA1,MAGEA8; ENSG00000198681,ENSG00000156009; CTA,TAA
EMLESVIKNYK

SEQ ID NO: 37393 - protein, 9 aa, Homo sapiens
  misc_feature: Table A; Target 37393; HLA-A*02:01; MAGEA1,MAGEA8; ENSG00000198681,ENSG00000156009; CTA,TAA
FLWGPRALA

SEQ ID NO: 37394 - protein, 11 aa, Homo sapiens
  misc_feature: Table A; Target 37394; HLA-A*02:01; MAGEA1,MAGEA8; ENSG00000198681,ENSG00000156009; CTA,TAA
FLWGPRALAET

SEQ ID NO: 37395 - protein, 11 aa, Homo sapiens
  misc_feature: Table A; Target 37395; HLA-A*02:03; MAGEA1,MAGEA8; ENSG00000198681,ENSG00000156009; CTA,TAA
FLWGPRALAET

SEQ ID NO: 37396 - protein, 11 aa, Homo sapiens
  misc_feature: Table A; Target 37396; HLA-A*02:04; MAGEA1,MAGEA8; ENSG00000198681,ENSG00000156009; CTA,TAA
FLWGPRALAET

SEQ ID NO: 37397 - protein, 11 aa, Homo sapiens
  misc_feature: Table A; Target 37397; HLA-A*02:07; MAGEA1,MAGEA8; ENSG00000198681,ENSG00000156009; CTA,TAA
FLWGPRALAET

SEQ ID NO: 37398 - protein, 10 aa, Homo sapiens
  misc_feature: Table A; Target 37398; HLA-A*30:02; MAGEA1,MAGEA8; ENSG00000198681,ENSG00000156009; CTA,TAA
GPRALAETSY

SEQ ID NO: 37399 - protein, 10 aa, Homo sapiens
  misc_feature: Table A; Target 37399; HLA-B*07:02; MAGEA1,MAGEA8; ENSG00000198681,ENSG00000156009; CTA,TAA
GPRALAETSY

SEQ ID NO: 37400 - protein, 10 aa, Homo sapiens
  misc_feature: Table A; Target 37400; HLA-B*15:01; MAGEA1,MAGEA8; ENSG00000198681,ENSG00000156009; CTA,TAA
GPRALAETSY

SEQ ID NO: 37401 - protein, 10 aa, Homo sapiens
  misc_feature: Table A; Target 37401; HLA-B*15:03; MAGEA1,MAGEA8; ENSG00000198681,ENSG00000156009; CTA,TAA
GPRALAETSY

SEQ ID NO: 37402 - protein, 10 aa, Homo sapiens
  misc_feature: Table A; Target 37402; HLA-B*35:01; MAGEA1,MAGEA8; ENSG00000198681,ENSG00000156009; CTA,TAA
GPRALAETSY

SEQ ID NO: 37403 - protein, 10 aa, Homo sapiens
  misc_feature: Table A; Target 37403; HLA-B*55:01; MAGEA1,MAGEA8; ENSG00000198681,ENSG00000156009; CTA,TAA
GPRALAETSY

SEQ ID NO: 37404 - protein, 11 aa, Homo sapiens
  misc_feature: Table A; Target 37404; HLA-C*07:02; MAGEA1,MAGEA8; ENSG00000198681,ENSG00000156009; CTA,TAA
GPRALAETSYV

SEQ ID NO: 37405 - protein, 10 aa, Homo sapiens
  misc_feature: Table A; Target 37405; HLA-B*27:02; MAGEA1,MAGEA8; ENSG00000198681,ENSG00000156009; CTA,TAA
KAEMLESVIK

SEQ ID NO: 37406 - protein, 8 aa, Homo sapiens
  misc_feature: Table A; Target 37406; HLA-B*27:02; MAGEA1,MAGEA8; ENSG00000198681,ENSG00000156009; CTA,TAA
LAETSYVK

SEQ ID NO: 37407 - protein, 9 aa, Homo sapiens
  misc_feature: Table A; Target 37407; HLA-C*05:01; MAGEA1,MAGEA8; ENSG00000198681,ENSG00000156009; CTA,TAA
LAETSYVKV

SEQ ID NO: 37408 - protein, 8 aa, Homo sapiens
  misc_feature: Table A; Target 37408; HLA-C*12:03; MAGEA1,MAGEA8; ENSG00000198681,ENSG00000156009; CTA,TAA
LESVIKNY

SEQ ID NO: 37409 - protein, 8 aa, Homo sapiens
  misc_feature: Table A; Target 37409; HLA-C*16:02; MAGEA1,MAGEA8; ENSG00000198681,ENSG00000156009; CTA,TAA
LESVIKNY

SEQ ID NO: 37410 - protein, 9 aa, Homo sapiens
  misc_feature: Table A; Target 37410; HLA-A*01:01; MAGEA1,MAGEA8; ENSG00000198681,ENSG00000156009; CTA,TAA
LVTCLGLSY

SEQ ID NO: 37411 - protein, 9 aa, Homo sapiens
  misc_feature: Table A; Target 37411; HLA-A*26:01; MAGEA1,MAGEA8; ENSG00000198681,ENSG00000156009; CTA,TAA
LVTCLGLSY

SEQ ID NO: 37412 - protein, 9 aa, Homo sapiens
  misc_feature: Table A; Target 37412; HLA-A*29:02; MAGEA1,MAGEA8; ENSG00000198681,ENSG00000156009; CTA,TAA
LVTCLGLSY

SEQ ID NO: 37413 - protein, 9 aa, Homo sapiens
  misc_feature: Table A; Target 37413; HLA-A*30:02; MAGEA1,MAGEA8; ENSG00000198681,ENSG00000156009; CTA,TAA
LVTCLGLSY

SEQ ID NO: 37414 - protein, 9 aa, Homo sapiens
  misc_feature: Table A; Target 37414; HLA-A*02:07; MAGEA1,MAGEA8; ENSG00000198681,ENSG00000156009; CTA,TAA
MLESVIKNY

SEQ ID NO: 37415 - protein, 9 aa, Homo sapiens
  misc_feature: Table A; Target 37415; HLA-A*03:01; MAGEA1,MAGEA8; ENSG00000198681,ENSG00000156009; CTA,TAA
MLESVIKNY

SEQ ID NO: 37416 - protein, 9 aa, Homo sapiens
  misc_feature: Table A; Target 37416; HLA-A*03:02; MAGEA1,MAGEA8; ENSG00000198681,ENSG00000156009; CTA,TAA
MLESVIKNY

SEQ ID NO: 37417 - protein, 9 aa, Homo sapiens
  misc_feature: Table A; Target 37417; HLA-A*26:01; MAGEA1,MAGEA8; ENSG00000198681,ENSG00000156009; CTA,TAA
MLESVIKNY

SEQ ID NO: 37418 - protein, 9 aa, Homo sapiens
  misc_feature: Table A; Target 37418; HLA-B*18:01; MAGEA1,MAGEA8; ENSG00000198681,ENSG00000156009; CTA,TAA
MLESVIKNY

SEQ ID NO: 37419 - protein, 9 aa, Homo sapiens
  misc_feature: Table A; Target 37419; HLA-C*03:03; MAGEA1,MAGEA8; ENSG00000198681,ENSG00000156009; CTA,TAA
MLESVIKNY

SEQ ID NO: 37420 - protein, 9 aa, Homo sapiens
  misc_feature: Table A; Target 37420; HLA-C*07:01; MAGEA1,MAGEA8; ENSG00000198681,ENSG00000156009; CTA,TAA
MLESVIKNY

SEQ ID NO: 37421 - protein, 9 aa, Homo sapiens
  misc_feature: Table A; Target 37421; HLA-C*12:03; MAGEA1,MAGEA8; ENSG00000198681,ENSG00000156009; CTA,TAA
MLESVIKNY

SEQ ID NO: 37422 - protein, 10 aa, Homo sapiens
  misc_feature: Table A; Target 37422; HLA-A*01:01; MAGEA1,MAGEA8; ENSG00000198681,ENSG00000156009; CTA,TAA
MLESVIKNYK

SEQ ID NO: 37423 - protein, 9 aa, Homo sapiens
  misc_feature: Table A; Target 37423; HLA-B*15:03; MAGEA1,MAGEA8; ENSG00000198681,ENSG00000156009; CTA,TAA
PRALAETSY

SEQ ID NO: 37424 - protein, 9 aa, Homo sapiens
  misc_feature: Table A; Target 37424; HLA-B*27:02; MAGEA1,MAGEA8; ENSG00000198681,ENSG00000156009; CTA,TAA
PRALAETSY

SEQ ID NO: 37425 - protein, 9 aa, Homo sapiens
  misc_feature: Table A; Target 37425; HLA-C*07:01; MAGEA1,MAGEA8; ENSG00000198681,ENSG00000156009; CTA,TAA
PRALAETSY

SEQ ID NO: 37426 - protein, 9 aa, Homo sapiens
  misc_feature: Table A; Target 37426; HLA-C*07:04; MAGEA1,MAGEA8; ENSG00000198681,ENSG00000156009; CTA,TAA
PRALAETSY

SEQ ID NO: 37427 - protein, 10 aa, Homo sapiens
  misc_feature: Table A; Target 37427; HLA-A*03:02; MAGEA1,MAGEA8; ENSG00000198681,ENSG00000156009; CTA,TAA
RALAETSYVK

SEQ ID NO: 37428 - protein, 10 aa, Homo sapiens
  misc_feature: Table A; Target 37428; HLA-B*27:02; MAGEA1,MAGEA8; ENSG00000198681,ENSG00000156009; CTA,TAA
RALAETSYVK

SEQ ID NO: 37429 - protein, 8 aa, Homo sapiens
  misc_feature: Table A; Target 37429; HLA-A*01:01; MAGEA1,MAGEA8; ENSG00000198681,ENSG00000156009; CTA,TAA
VTCLGLSY

SEQ ID NO: 37430 - protein, 8 aa, Homo sapiens
  misc_feature: Table A; Target 37430; HLA-B*37:01; MAGEA1,MAGEA8,MAGEA9; ENSG00000198681,ENSG00000156009,ENSG00000123584; CTA,TAA,CTA
AEMLESVI

SEQ ID NO: 37431 - protein, 8 aa, Homo sapiens
  misc_feature: Table A; Target 37431; HLA-B*40:01; MAGEA1,MAGEA8,MAGEA9; ENSG00000198681,ENSG00000156009,ENSG00000123584; CTA,TAA,CTA
AEMLESVI

SEQ ID NO: 37432 - protein, 8 aa, Homo sapiens
  misc_feature: Table A; Target 37432; HLA-B*44:02; MAGEA1,MAGEA8,MAGEA9; ENSG00000198681,ENSG00000156009,ENSG00000123584; CTA,TAA,CTA
AEMLESVI

SEQ ID NO: 37433 - protein, 8 aa, Homo sapiens
  misc_feature: Table A; Target 37433; HLA-B*44:03; MAGEA1,MAGEA8,MAGEA9; ENSG00000198681,ENSG00000156009,ENSG00000123584; CTA,TAA,CTA
AEMLESVI

SEQ ID NO: 37434 - protein, 8 aa, Homo sapiens
  misc_feature: Table A; Target 37434; HLA-B*49:01; MAGEA1,MAGEA8,MAGEA9; ENSG00000198681,ENSG00000156009,ENSG00000123584; CTA,TAA,CTA
AEMLESVI

SEQ ID NO: 37435 - protein, 10 aa, Homo sapiens
  misc_feature: Table A; Target 37435; HLA-B*44:02; MAGEA1,MAGEA8,MAGEA9; ENSG00000198681,ENSG00000156009,ENSG00000123584; CTA,TAA,CTA
AEMLESVIKN

SEQ ID NO: 37436 - protein, 10 aa, Homo sapiens
  misc_feature: Table A; Target 37436; HLA-B*49:01; MAGEA1,MAGEA8,MAGEA9; ENSG00000198681,ENSG00000156009,ENSG00000123584; CTA,TAA,CTA
AEMLESVIKN

SEQ ID NO: 37437 - protein, 11 aa, Homo sapiens
  misc_feature: Table A; Target 37437; HLA-A*30:01; MAGEA1,MAGEA8,MAGEA9; ENSG00000198681,ENSG00000156009,ENSG00000123584; CTA,TAA,CTA
AEMLESVIKNY

SEQ ID NO: 37438 - protein, 11 aa, Homo sapiens
  misc_feature: Table A; Target 37438; HLA-A*30:02; MAGEA1,MAGEA8,MAGEA9; ENSG00000198681,ENSG00000156009,ENSG00000123584; CTA,TAA,CTA
AEMLESVIKNY

SEQ ID NO: 37439 - protein, 11 aa, Homo sapiens
  misc_feature: Table A; Target 37439; HLA-B*27:02; MAGEA1,MAGEA8,MAGEA9; ENSG00000198681,ENSG00000156009,ENSG00000123584; CTA,TAA,CTA
AEMLESVIKNY

SEQ ID NO: 37440 - protein, 11 aa, Homo sapiens
  misc_feature: Table A; Target 37440; HLA-B*40:01; MAGEA1,MAGEA8,MAGEA9; ENSG00000198681,ENSG00000156009,ENSG00000123584; CTA,TAA,CTA
AEMLESVIKNY

SEQ ID NO: 37441 - protein, 11 aa, Homo sapiens
  misc_feature: Table A; Target 37441; HLA-B*49:01; MAGEA1,MAGEA8,MAGEA9; ENSG00000198681,ENSG00000156009,ENSG00000123584; CTA,TAA,CTA
AEMLESVIKNY

SEQ ID NO: 37442 - protein, 11 aa, Homo sapiens
  misc_feature: Table A; Target 37442; HLA-C*16:04; MAGEA1,MAGEA8,MAGEA9; ENSG00000198681,ENSG00000156009,ENSG00000123584; CTA,TAA,CTA
AEMLESVIKNY

SEQ ID NO: 37443 - protein, 10 aa, Homo sapiens
  misc_feature: Table A; Target 37443; HLA-A*25:01; MAGEA1,MAGEA8,MAGEA9; ENSG00000198681,ENSG00000156009,ENSG00000123584; CTA,TAA,CTA
EMLESVIKNY

SEQ ID NO: 37444 - protein, 10 aa, Homo sapiens
  misc_feature: Table A; Target 37444; HLA-A*26:01; MAGEA1,MAGEA8,MAGEA9; ENSG00000198681,ENSG00000156009,ENSG00000123584; CTA,TAA,CTA
EMLESVIKNY

SEQ ID NO: 37445 - protein, 10 aa, Homo sapiens
  misc_feature: Table A; Target 37445; HLA-A*29:02; MAGEA1,MAGEA8,MAGEA9; ENSG00000198681,ENSG00000156009,ENSG00000123584; CTA,TAA,CTA
EMLESVIKNY

SEQ ID NO: 37446 - protein, 10 aa, Homo sapiens
  misc_feature: Table A; Target 37446; HLA-A*30:02; MAGEA1,MAGEA8,MAGEA9; ENSG00000198681,ENSG00000156009,ENSG00000123584; CTA,TAA,CTA
EMLESVIKNY

SEQ ID NO: 37447 - protein, 10 aa, Homo sapiens
  misc_feature: Table A; Target 37447; HLA-A*33:01; MAGEA1,MAGEA8,MAGEA9; ENSG00000198681,ENSG00000156009,ENSG00000123584; CTA,TAA,CTA
EMLESVIKNY

SEQ ID NO: 37448 - protein, 10 aa, Homo sapiens
  misc_feature: Table A; Target 37448; HLA-A*33:03; MAGEA1,MAGEA8,MAGEA9; ENSG00000198681,ENSG00000156009,ENSG00000123584; CTA,TAA,CTA
EMLESVIKNY

SEQ ID NO: 37449 - protein, 10 aa, Homo sapiens
  misc_feature: Table A; Target 37449; HLA-B*44:02; MAGEA1,MAGEA8,MAGEA9; ENSG00000198681,ENSG00000156009,ENSG00000123584; CTA,TAA,CTA
EMLESVIKNY

SEQ ID NO: 37450 - protein, 10 aa, Homo sapiens
  misc_feature: Table A; Target 37450; HLA-B*44:03; MAGEA1,MAGEA8,MAGEA9; ENSG00000198681,ENSG00000156009,ENSG00000123584; CTA,TAA,CTA
EMLESVIKNY

SEQ ID NO: 37451 - protein, 10 aa, Homo sapiens
  misc_feature: Table A; Target 37451; HLA-C*07:06; MAGEA1,MAGEA8,MAGEA9; ENSG00000198681,ENSG00000156009,ENSG00000123584; CTA,TAA,CTA
EMLESVIKNY

SEQ ID NO: 37452 - protein, 8 aa, Homo sapiens
  misc_feature: Table A; Target 37452; HLA-B*08:01; MAGEA1,MAGEA8,MAGEA9; ENSG00000198681,ENSG00000156009,ENSG00000123584; CTA,TAA,CTA
EPVTKAEM

SEQ ID NO: 37453 - protein, 9 aa, Homo sapiens
  misc_feature: Table A; Target 37453; HLA-B*35:03; MAGEA1,MAGEA8,MAGEA9; ENSG00000198681,ENSG00000156009,ENSG00000123584; CTA,TAA,CTA
EPVTKAEML

SEQ ID NO: 37454 - protein, 8 aa, Homo sapiens
  misc_feature: Table A; Target 37454; HLA-B*37:01; MAGEA1,MAGEA8,MAGEA9; ENSG00000198681,ENSG00000156009,ENSG00000123584; CTA,TAA,CTA
LESVIKNY

SEQ ID NO: 37455 - protein, 8 aa, Homo sapiens
  misc_feature: Table A; Target 37455; HLA-B*44:02; MAGEA1,MAGEA8,MAGEA9; ENSG00000198681,ENSG00000156009,ENSG00000123584; CTA,TAA,CTA
LESVIKNY

SEQ ID NO: 37456 - protein, 8 aa, Homo sapiens
  misc_feature: Table A; Target 37456; HLA-B*44:03; MAGEA1,MAGEA8,MAGEA9; ENSG00000198681,ENSG00000156009,ENSG00000123584; CTA,TAA,CTA
LESVIKNY

SEQ ID NO: 37457 - protein, 8 aa, Homo sapiens
  misc_feature: Table A; Target 37457; HLA-C*02:02; MAGEA1,MAGEA8,MAGEA9; ENSG00000198681,ENSG00000156009,ENSG00000123584; CTA,TAA,CTA
LESVIKNY

SEQ ID NO: 37458 - protein, 8 aa, Homo sapiens
  misc_feature: Table A; Target 37458; HLA-C*16:04; MAGEA1,MAGEA8,MAGEA9; ENSG00000198681,ENSG00000156009,ENSG00000123584; CTA,TAA,CTA
LESVIKNY

SEQ ID NO: 37459 - protein, 9 aa, Homo sapiens
  misc_feature: Table A; Target 37459; HLA-A*01:01; MAGEA1,MAGEA8,MAGEA9; ENSG00000198681,ENSG00000156009,ENSG00000123584; CTA,TAA,CTA
MLESVIKNY

SEQ ID NO: 37460 - protein, 9 aa, Homo sapiens
  misc_feature: Table A; Target 37460; HLA-A*29:02; MAGEA1,MAGEA8,MAGEA9; ENSG00000198681,ENSG00000156009,ENSG00000123584; CTA,TAA,CTA
MLESVIKNY

SEQ ID NO: 37461 - protein, 9 aa, Homo sapiens
  misc_feature: Table A; Target 37461; HLA-A*30:02; MAGEA1,MAGEA8,MAGEA9; ENSG00000198681,ENSG00000156009,ENSG00000123584; CTA,TAA,CTA
MLESVIKNY

SEQ ID NO: 37462 - protein, 9 aa, Homo sapiens
  misc_feature: Table A; Target 37462; HLA-A*32:01; MAGEA1,MAGEA8,MAGEA9; ENSG00000198681,ENSG00000156009,ENSG00000123584; CTA,TAA,CTA
MLESVIKNY

SEQ ID NO: 37463 - protein, 9 aa, Homo sapiens
  misc_feature: Table A; Target 37463; HLA-B*15:01; MAGEA1,MAGEA8,MAGEA9; ENSG00000198681,ENSG00000156009,ENSG00000123584; CTA,TAA,CTA
MLESVIKNY

SEQ ID NO: 37464 - protein, 9 aa, Homo sapiens
  misc_feature: Table A; Target 37464; HLA-B*15:03; MAGEA1,MAGEA8,MAGEA9; ENSG00000198681,ENSG00000156009,ENSG00000123584; CTA,TAA,CTA
MLESVIKNY

SEQ ID NO: 37465 - protein, 9 aa, Homo sapiens
  misc_feature: Table A; Target 37465; HLA-B*27:02; MAGEA1,MAGEA8,MAGEA9; ENSG00000198681,ENSG00000156009,ENSG00000123584; CTA,TAA,CTA
MLESVIKNY

SEQ ID NO: 37466 - protein, 9 aa, Homo sapiens
  misc_feature: Table A; Target 37466; HLA-B*27:05; MAGEA1,MAGEA8,MAGEA9; ENSG00000198681,ENSG00000156009,ENSG00000123584; CTA,TAA,CTA
MLESVIKNY

SEQ ID NO: 37467 - protein, 9 aa, Homo sapiens
  misc_feature: Table A; Target 37467; HLA-B*35:01; MAGEA1,MAGEA8,MAGEA9; ENSG00000198681,ENSG00000156009,ENSG00000123584; CTA,TAA,CTA
MLESVIKNY

SEQ ID NO: 37468 - protein, 9 aa, Homo sapiens
  misc_feature: Table A; Target 37468; HLA-B*44:02; MAGEA1,MAGEA8,MAGEA9; ENSG00000198681,ENSG00000156009,ENSG00000123584; CTA,TAA,CTA
MLESVIKNY

SEQ ID NO: 37469 - protein, 9 aa, Homo sapiens
  misc_feature: Table A; Target 37469; HLA-B*44:03; MAGEA1,MAGEA8,MAGEA9; ENSG00000198681,ENSG00000156009,ENSG00000123584; CTA,TAA,CTA
MLESVIKNY

SEQ ID NO: 37470 - protein, 9 aa, Homo sapiens
  misc_feature: Table A; Target 37470; HLA-C*06:02; MAGEA1,MAGEA8,MAGEA9; ENSG00000198681,ENSG00000156009,ENSG00000123584; CTA,TAA,CTA
MLESVIKNY

SEQ ID NO: 37471 - protein, 9 aa, Homo sapiens
  misc_feature: Table A; Target 37471; HLA-C*07:04; MAGEA1,MAGEA8,MAGEA9; ENSG00000198681,ENSG00000156009,ENSG00000123584; CTA,TAA,CTA
MLESVIKNY

SEQ ID NO: 37472 - protein, 9 aa, Homo sapiens
  misc_feature: Table A; Target 37472; HLA-C*16:01; MAGEA1,MAGEA8,MAGEA9; ENSG00000198681,ENSG00000156009,ENSG00000123584; CTA,TAA,CTA
MLESVIKNY

SEQ ID NO: 37473 - protein, 9 aa, Homo sapiens
  misc_feature: Table A; Target 37473; HLA-C*16:02; MAGEA1,MAGEA8,MAGEA9; ENSG00000198681,ENSG00000156009,ENSG00000123584; CTA,TAA,CTA
MLESVIKNY

SEQ ID NO: 37474 - protein, 9 aa, Homo sapiens
  misc_feature: Table A; Target 37474; HLA-C*16:04; MAGEA1,MAGEA8,MAGEA9; ENSG00000198681,ENSG00000156009,ENSG00000123584; CTA,TAA,CTA
MLESVIKNY

SEQ ID NO: 37475 - protein, 10 aa, Homo sapiens
  misc_feature: Table A; Target 37475; HLA-A*03:01; MAGEA1,MAGEA8,MAGEA9; ENSG00000198681,ENSG00000156009,ENSG00000123584; CTA,TAA,CTA
MLESVIKNYK

SEQ ID NO: 37476 - protein, 10 aa, Homo sapiens
  misc_feature: Table A; Target 37476; HLA-A*03:02; MAGEA1,MAGEA8,MAGEA9; ENSG00000198681,ENSG00000156009,ENSG00000123584; CTA,TAA,CTA
MLESVIKNYK

SEQ ID NO: 37477 - protein, 8 aa, Homo sapiens
  misc_feature: Table A; Target 37477; HLA-B*15:03; MAGEA1,MAGEB1; ENSG00000198681,ENSG00000214107; CTA,CTA
QDLVQEKY

SEQ ID NO: 37478 - protein, 8 aa, Homo sapiens
  misc_feature: Table A; Target 37478; HLA-C*05:01; MAGEA1,MAGEB1; ENSG00000198681,ENSG00000214107; CTA,CTA
TQDLVQEK

SEQ ID NO: 37479 - protein, 9 aa, Homo sapiens
  misc_feature: Table A; Target 37479; HLA-A*29:02; MAGEA1,MAGEB1; ENSG00000198681,ENSG00000214107; CTA,CTA
TQDLVQEKY

SEQ ID NO: 37480 - protein, 9 aa, Homo sapiens
  misc_feature: Table A; Target 37480; HLA-B*44:02; MAGEA1,MAGEB1; ENSG00000198681,ENSG00000214107; CTA,CTA
TQDLVQEKY

SEQ ID NO: 37481 - protein, 9 aa, Homo sapiens
  misc_feature: Table A; Target 37481; HLA-B*58:01; MAGEA1,MAGEB1; ENSG00000198681,ENSG00000214107; CTA,CTA
TQDLVQEKY

SEQ ID NO: 37482 - protein, 9 aa, Homo sapiens
  misc_feature: Table A; Target 37482; HLA-C*04:01; MAGEA1,MAGEB1; ENSG00000198681,ENSG00000214107; CTA,CTA
TQDLVQEKY

SEQ ID NO: 37483 - protein, 9 aa, Homo sapiens
  misc_feature: Table A; Target 37483; HLA-C*07:04; MAGEA1,MAGEB1; ENSG00000198681,ENSG00000214107; CTA,CTA
TQDLVQEKY

SEQ ID NO: 37484 - protein, 8 aa, Homo sapiens
  misc_feature: Table A; Target 37484; HLA-B*18:01; MAGEA1,MAGEB1,MAGEB4; ENSG00000198681,ENSG00000214107,ENSG00000120289; CTA,CTA,CTA
QDLVQEKY

SEQ ID NO: 37485 - protein, 8 aa, Homo sapiens
  misc_feature: Table A; Target 37485; HLA-B*37:01; MAGEA1,MAGEB1,MAGEB4; ENSG00000198681,ENSG00000214107,ENSG00000120289; CTA,CTA,CTA
QDLVQEKY

SEQ ID NO: 37486 - protein, 8 aa, Homo sapiens
  misc_feature: Table A; Target 37486; HLA-C*07:01; MAGEA1,MAGEB1,MAGEB4; ENSG00000198681,ENSG00000214107,ENSG00000120289; CTA,CTA,CTA
QDLVQEKY

SEQ ID NO: 37487 - protein, 9 aa, Homo sapiens
  misc_feature: Table A; Target 37487; HLA-A*01:01; MAGEA1,MAGEB1,MAGEB4; ENSG00000198681,ENSG00000214107,ENSG00000120289; CTA,CTA,CTA
TQDLVQEKY

SEQ ID NO: 37488 - protein, 9 aa, Homo sapiens
  misc_feature: Table A; Target 37488; HLA-A*30:02; MAGEA1,MAGEB1,MAGEB4; ENSG00000198681,ENSG00000214107,ENSG00000120289; CTA,CTA,CTA
TQDLVQEKY

SEQ ID NO: 37489 - protein, 9 aa, Homo sapiens
  misc_feature: Table A; Target 37489; HLA-A*32:01; MAGEA1,MAGEB1,MAGEB4; ENSG00000198681,ENSG00000214107,ENSG00000120289; CTA,CTA,CTA
TQDLVQEKY

SEQ ID NO: 37490 - protein, 9 aa, Homo sapiens
  misc_feature: Table A; Target 37490; HLA-B*15:01; MAGEA1,MAGEB1,MAGEB4; ENSG00000198681,ENSG00000214107,ENSG00000120289; CTA,CTA,CTA
TQDLVQEKY

SEQ ID NO: 37491 - protein, 9 aa, Homo sapiens
  misc_feature: Table A; Target 37491; HLA-B*15:03; MAGEA1,MAGEB1,MAGEB4; ENSG00000198681,ENSG00000214107,ENSG00000120289; CTA,CTA,CTA
TQDLVQEKY

SEQ ID NO: 37492 - protein, 9 aa, Homo sapiens
  misc_feature: Table A; Target 37492; HLA-B*18:01; MAGEA1,MAGEB1,MAGEB4; ENSG00000198681,ENSG00000214107,ENSG00000120289; CTA,CTA,CTA
TQDLVQEKY

SEQ ID NO: 37493 - protein, 9 aa, Homo sapiens
  misc_feature: Table A; Target 37493; HLA-B*35:01; MAGEA1,MAGEB1,MAGEB4; ENSG00000198681,ENSG00000214107,ENSG00000120289; CTA,CTA,CTA
TQDLVQEKY

SEQ ID NO: 37494 - protein, 9 aa, Homo sapiens
  misc_feature: Table A; Target 37494; HLA-B*38:01; MAGEA1,MAGEB1,MAGEB4; ENSG00000198681,ENSG00000214107,ENSG00000120289; CTA,CTA,CTA
TQDLVQEKY

SEQ ID NO: 37495 - protein, 9 aa, Homo sapiens
  misc_feature: Table A; Target 37495; HLA-B*39:01; MAGEA1,MAGEB1,MAGEB4; ENSG00000198681,ENSG00000214107,ENSG00000120289; CTA,CTA,CTA
TQDLVQEKY

SEQ ID NO: 37496 - protein, 9 aa, Homo sapiens
  misc_feature: Table A; Target 37496; HLA-B*44:03; MAGEA1,MAGEB1,MAGEB4; ENSG00000198681,ENSG00000214107,ENSG00000120289; CTA,CTA,CTA
TQDLVQEKY

SEQ ID NO: 37497 - protein, 9 aa, Homo sapiens
  misc_feature: Table A; Target 37497; HLA-C*05:01; MAGEA1,MAGEB1,MAGEB4; ENSG00000198681,ENSG00000214107,ENSG00000120289; CTA,CTA,CTA
TQDLVQEKY

SEQ ID NO: 37498 - protein, 9 aa, Homo sapiens
  misc_feature: Table A; Target 37498; HLA-C*16:04; MAGEA1,MAGEB1,MAGEB4; ENSG00000198681,ENSG00000214107,ENSG00000120289; CTA,CTA,CTA
TQDLVQEKY

SEQ ID NO: 37499 - protein, 10 aa, Homo sapiens
  misc_feature: Table A; Target 37499; HLA-B*38:01; MAGEA1,MAGEB1,MAGEB4; ENSG00000198681,ENSG00000214107,ENSG00000120289; CTA,CTA,CTA
TQDLVQEKYL

SEQ ID NO: 37500 - protein, 10 aa, Homo sapiens
  misc_feature: Table A; Target 37500; HLA-B*35:01; MAGEA1,MAGEB2; ENSG00000198681,ENSG00000099399; CTA,CTA
DLVQEKYLEY

SEQ ID NO: 37501 - protein, 9 aa, Homo sapiens
  misc_feature: Table A; Target 37501; HLA-A*33:01; MAGEA1,MAGEB2; ENSG00000198681,ENSG00000099399; CTA,CTA
LVQEKYLEY

SEQ ID NO: 37502 - protein, 9 aa, Homo sapiens
  misc_feature: Table A; Target 37502; HLA-B*18:01; MAGEA1,MAGEB2; ENSG00000198681,ENSG00000099399; CTA,CTA
LVQEKYLEY

SEQ ID NO: 37503 - protein, 9 aa, Homo sapiens
  misc_feature: Table A; Target 37503; HLA-C*07:01; MAGEA1,MAGEB2; ENSG00000198681,ENSG00000099399; CTA,CTA
LVQEKYLEY

SEQ ID NO: 37504 - protein, 9 aa, Homo sapiens
  misc_feature: Table A; Target 37504; HLA-C*16:04; MAGEA1,MAGEB2; ENSG00000198681,ENSG00000099399; CTA,CTA
LVQEKYLEY

SEQ ID NO: 37505 - protein, 8 aa, Homo sapiens
  misc_feature: Table A; Target 37505; HLA-A*30:02; MAGEA1,MAGEB2; ENSG00000198681,ENSG00000099399; CTA,CTA
VQEKYLEY

SEQ ID NO: 37506 - protein, 8 aa, Homo sapiens
  misc_feature: Table A; Target 37506; HLA-C*07:01; MAGEA1,MAGEB2; ENSG00000198681,ENSG00000099399; CTA,CTA
VQEKYLEY

SEQ ID NO: 37507 - protein, 10 aa, Homo sapiens
  misc_feature: Table A; Target 37507; HLA-A*01:01; MAGEA1,MAGEB2,MAGEB4; ENSG00000198681,ENSG00000099399,ENSG00000120289; CTA,CTA,CTA
DLVQEKYLEY

SEQ ID NO: 37508 - protein, 10 aa, Homo sapiens
  misc_feature: Table A; Target 37508; HLA-A*25:01; MAGEA1,MAGEB2,MAGEB4; ENSG00000198681,ENSG00000099399,ENSG00000120289; CTA,CTA,CTA
DLVQEKYLEY

SEQ ID NO: 37509 - protein, 10 aa, Homo sapiens
  misc_feature: Table A; Target 37509; HLA-A*26:01; MAGEA1,MAGEB2,MAGEB4; ENSG00000198681,ENSG00000099399,ENSG00000120289; CTA,CTA,CTA
DLVQEKYLEY

SEQ ID NO: 37510 - protein, 10 aa, Homo sapiens
  misc_feature: Table A; Target 37510; HLA-A*29:02; MAGEA1,MAGEB2,MAGEB4; ENSG00000198681,ENSG00000099399,ENSG00000120289; CTA,CTA,CTA
DLVQEKYLEY

SEQ ID NO: 37511 - protein, 9 aa, Homo sapiens
  misc_feature: Table A; Target 37511; HLA-A*01:01; MAGEA1,MAGEB2,MAGEB4; ENSG00000198681,ENSG00000099399,ENSG00000120289; CTA,CTA,CTA
LVQEKYLEY

SEQ ID NO: 37512 - protein, 9 aa, Homo sapiens
  misc_feature: Table A; Target 37512; HLA-A*03:01; MAGEA1,MAGEB2,MAGEB4; ENSG00000198681,ENSG00000099399,ENSG00000120289; CTA,CTA,CTA
LVQEKYLEY

SEQ ID NO: 37513 - protein, 9 aa, Homo sapiens
  misc_feature: Table A; Target 37513; HLA-A*03:02; MAGEA1,MAGEB2,MAGEB4; ENSG00000198681,ENSG00000099399,ENSG00000120289; CTA,CTA,CTA
LVQEKYLEY

SEQ ID NO: 37514 - protein, 9 aa, Homo sapiens
  misc_feature: Table A; Target 37514; HLA-A*11:01; MAGEA1,MAGEB2,MAGEB4; ENSG00000198681,ENSG00000099399,ENSG00000120289; CTA,CTA,CTA
LVQEKYLEY

SEQ ID NO: 37515 - protein, 9 aa, Homo sapiens
  misc_feature: Table A; Target 37515; HLA-A*25:01; MAGEA1,MAGEB2,MAGEB4; ENSG00000198681,ENSG00000099399,ENSG00000120289; CTA,CTA,CTA
LVQEKYLEY

SEQ ID NO: 37516 - protein, 9 aa, Homo sapiens
  misc_feature: Table A; Target 37516; HLA-A*26:01; MAGEA1,MAGEB2,MAGEB4; ENSG00000198681,ENSG00000099399,ENSG00000120289; CTA,CTA,CTA
LVQEKYLEY

SEQ ID NO: 37517 - protein, 9 aa, Homo sapiens
  misc_feature: Table A; Target 37517; HLA-A*30:02; MAGEA1,MAGEB2,MAGEB4; ENSG00000198681,ENSG00000099399,ENSG00000120289; CTA,CTA,CTA
LVQEKYLEY

SEQ ID NO: 37518 - protein, 9 aa, Homo sapiens
  misc_feature: Table A; Target 37518; HLA-A*32:01; MAGEA1,MAGEB2,MAGEB4; ENSG00000198681,ENSG00000099399,ENSG00000120289; CTA,CTA,CTA
LVQEKYLEY

SEQ ID NO: 37519 - protein, 9 aa, Homo sapiens
  misc_feature: Table A; Target 37519; HLA-B*15:01; MAGEA1,MAGEB2,MAGEB4; ENSG00000198681,ENSG00000099399,ENSG00000120289; CTA,CTA,CTA
LVQEKYLEY

SEQ ID NO: 37520 - protein, 9 aa, Homo sapiens
  misc_feature: Table A; Target 37520; HLA-B*35:01; MAGEA1,MAGEB2,MAGEB4; ENSG00000198681,ENSG00000099399,ENSG00000120289; CTA,CTA,CTA
LVQEKYLEY

SEQ ID NO: 37521 - protein, 9 aa, Homo sapiens
  misc_feature: Table A; Target 37521; HLA-B*46:01; MAGEA1,MAGEB2,MAGEB4; ENSG00000198681,ENSG00000099399,ENSG00000120289; CTA,CTA,CTA
LVQEKYLEY

SEQ ID NO: 37522 - protein, 9 aa, Homo sapiens
  misc_feature: Table A; Target 37522; HLA-B*57:01; MAGEA1,MAGEB2,MAGEB4; ENSG00000198681,ENSG00000099399,ENSG00000120289; CTA,CTA,CTA
LVQEKYLEY

SEQ ID NO: 37523 - protein, 9 aa, Homo sapiens
  misc_feature: Table A; Target 37523; HLA-B*58:01; MAGEA1,MAGEB2,MAGEB4; ENSG00000198681,ENSG00000099399,ENSG00000120289; CTA,CTA,CTA
LVQEKYLEY

SEQ ID NO: 37524 - protein, 9 aa, Homo sapiens
  misc_feature: Table A; Target 37524; HLA-C*01:02; MAGEA1,MAGEB2,MAGEB4; ENSG00000198681,ENSG00000099399,ENSG00000120289; CTA,CTA,CTA
LVQEKYLEY

SEQ ID NO: 37525 - protein, 9 aa, Homo sapiens
  misc_feature: Table A; Target 37525; HLA-C*02:02; MAGEA1,MAGEB2,MAGEB4; ENSG00000198681,ENSG00000099399,ENSG00000120289; CTA,CTA,CTA
LVQEKYLEY

SEQ ID NO: 37526 - protein, 9 aa, Homo sapiens
  misc_feature: Table A; Target 37526; HLA-C*03:03; MAGEA1,MAGEB2,MAGEB4; ENSG00000198681,ENSG00000099399,ENSG00000120289; CTA,CTA,CTA
LVQEKYLEY

SEQ ID NO: 37527 - protein, 9 aa, Homo sapiens
  misc_feature: Table A; Target 37527; HLA-C*03:04; MAGEA1,MAGEB2,MAGEB4; ENSG00000198681,ENSG00000099399,ENSG00000120289; CTA,CTA,CTA
LVQEKYLEY

SEQ ID NO: 37528 - protein, 9 aa, Homo sapiens
  misc_feature: Table A; Target 37528; HLA-C*07:04; MAGEA1,MAGEB2,MAGEB4; ENSG00000198681,ENSG00000099399,ENSG00000120289; CTA,CTA,CTA
LVQEKYLEY

SEQ ID NO: 37529 - protein, 9 aa, Homo sapiens
  misc_feature: Table A; Target 37529; HLA-C*12:03; MAGEA1,MAGEB2,MAGEB4; ENSG00000198681,ENSG00000099399,ENSG00000120289; CTA,CTA,CTA
LVQEKYLEY

SEQ ID NO: 37530 - protein, 9 aa, Homo sapiens
  misc_feature: Table A; Target 37530; HLA-C*14:02; MAGEA1,MAGEB2,MAGEB4; ENSG00000198681,ENSG00000099399,ENSG00000120289; CTA,CTA,CTA
LVQEKYLEY

SEQ ID NO: 37531 - protein, 9 aa, Homo sapiens
  misc_feature: Table A; Target 37531; HLA-C*16:01; MAGEA1,MAGEB2,MAGEB4; ENSG00000198681,ENSG00000099399,ENSG00000120289; CTA,CTA,CTA
LVQEKYLEY

SEQ ID NO: 37532 - protein, 9 aa, Homo sapiens
  misc_feature: Table A; Target 37532; HLA-C*16:02; MAGEA1,MAGEB2,MAGEB4; ENSG00000198681,ENSG00000099399,ENSG00000120289; CTA,CTA,CTA
LVQEKYLEY

SEQ ID NO: 37533 - protein, 8 aa, Homo sapiens
  misc_feature: Table A; Target 37533; HLA-A*01:01; MAGEA1,MAGEB2,MAGEB4; ENSG00000198681,ENSG00000099399,ENSG00000120289; CTA,CTA,CTA
VQEKYLEY

SEQ ID NO: 37534 - protein, 8 aa, Homo sapiens
  misc_feature: Table A; Target 37534; HLA-B*15:01; MAGEA1,MAGEB2,MAGEB4; ENSG00000198681,ENSG00000099399,ENSG00000120289; CTA,CTA,CTA
VQEKYLEY

SEQ ID NO: 37535 - protein, 8 aa, Homo sapiens
  misc_feature: Table A; Target 37535; HLA-B*15:03; MAGEA1,MAGEB2,MAGEB4; ENSG00000198681,ENSG00000099399,ENSG00000120289; CTA,CTA,CTA
VQEKYLEY

SEQ ID NO: 37536 - protein, 9 aa, Homo sapiens
  misc_feature: Table A; Target 37536; HLA-B*15:01; MAGEA10; ENSG00000124260; CTA
AQAPLAVEE

SEQ ID NO: 37537 - protein, 11 aa, Homo sapiens
  misc_feature: Table A; Target 37537; HLA-C*03:04; MAGEA10; ENSG00000124260; CTA
ASASSSATGSF

SEQ ID NO: 37538 - protein, 9 aa, Homo sapiens
  misc_feature: Table A; Target 37538; HLA-B*39:01; MAGEA10; ENSG00000124260; CTA
ASSSATGSF

SEQ ID NO: 37539 - protein, 11 aa, Homo sapiens
  misc_feature: Table A; Target 37539; HLA-B*15:01; MAGEA10; ENSG00000124260; CTA
ASSSATGSFSY

SEQ ID NO: 37540 - protein, 11 aa, Homo sapiens
  misc_feature: Table A; Target 37540; HLA-B*57:01; MAGEA10; ENSG00000124260; CTA
ASSSATGSFSY

SEQ ID NO: 37541 - protein, 9 aa, Homo sapiens
  misc_feature: Table A; Target 37541; HLA-A*03:02; MAGEA10; ENSG00000124260; CTA
ATGSFSYPE

SEQ ID NO: 37542 - protein, 9 aa, Homo sapiens
  misc_feature: Table A; Target 37542; HLA-B*15:03; MAGEA10; ENSG00000124260; CTA
ATTDDTTAM

SEQ ID NO: 37543 - protein, 9 aa, Homo sapiens
  misc_feature: Table A; Target 37543; HLA-B*40:01; MAGEA10; ENSG00000124260; CTA
ATTDDTTAM

SEQ ID NO: 37544 - protein, 9 aa, Homo sapiens
  misc_feature: Table A; Target 37544; HLA-B*55:01; MAGEA10; ENSG00000124260; CTA
ATTDDTTAM

SEQ ID NO: 37545 - protein, 10 aa, Homo sapiens
  misc_feature: Table A; Target 37545; HLA-A*30:01; MAGEA10; ENSG00000124260; CTA
DETPNPPQSA

SEQ ID NO: 37546 - protein, 10 aa, Homo sapiens
  misc_feature: Table A; Target 37546; HLA-B*51:01; MAGEA10; ENSG00000124260; CTA
DPTGHSFVLV

SEQ ID NO: 37547 - protein, 10 aa, Homo sapiens
  misc_feature: Table A; Target 37547; HLA-C*07:06; MAGEA10; ENSG00000124260; CTA
DVKEVDPTGH

SEQ ID NO: 37548 - protein, 9 aa, Homo sapiens
  misc_feature: Table A; Target 37548; HLA-A*33:03; MAGEA10; ENSG00000124260; CTA
EALKDEEER

SEQ ID NO: 37549 - protein, 9 aa, Homo sapiens
  misc_feature: Table A; Target 37549; HLA-C*07:01; MAGEA10; ENSG00000124260; CTA
EALNMMGLY

SEQ ID NO: 37550 - protein, 10 aa, Homo sapiens
  misc_feature: Table A; Target 37550; HLA-B*18:01; MAGEA10; ENSG00000124260; CTA
EESPSTLQVL

SEQ ID NO: 37551 - protein, 10 aa, Homo sapiens
  misc_feature: Table A; Target 37551; HLA-B*18:01; MAGEA10; ENSG00000124260; CTA
EILESVIRNY

SEQ ID NO: 37552 - protein, 10 aa, Homo sapiens
  misc_feature: Table A; Target 37552; HLA-B*57:01; MAGEA10; ENSG00000124260; CTA
EILESVIRNY

SEQ ID NO: 37553 - protein, 8 aa, Homo sapiens
  misc_feature: Table A; Target 37553; HLA-B*08:01; MAGEA10; ENSG00000124260; CTA
EIRKMSLL

SEQ ID NO: 37554 - protein, 9 aa, Homo sapiens
  misc_feature: Table A; Target 37554; HLA-A*26:01; MAGEA10; ENSG00000124260; CTA
ESPSTLQVL

SEQ ID NO: 37555 - protein, 9 aa, Homo sapiens
  misc_feature: Table A; Target 37555; HLA-C*01:02; MAGEA10; ENSG00000124260; CTA
EVDPTGHSF

SEQ ID NO: 37556 - protein, 9 aa, Homo sapiens
  misc_feature: Table A; Target 37556; HLA-C*16:01; MAGEA10; ENSG00000124260; CTA
EVDPTGHSF

SEQ ID NO: 37557 - protein, 9 aa, Homo sapiens
  misc_feature: Table A; Target 37557; HLA-B*56:01; MAGEA10; ENSG00000124260; CTA
FPLLFSEAS

SEQ ID NO: 37558 - protein, 8 aa, Homo sapiens
  misc_feature: Table A; Target 37558; HLA-B*56:01; MAGEA10; ENSG00000124260; CTA
FPSSFPSS

SEQ ID NO: 37559 - protein, 10 aa, Homo sapiens
  misc_feature: Table A; Target 37559; HLA-B*27:05; MAGEA10; ENSG00000124260; CTA
FPSSFPSSSS

SEQ ID NO: 37560 - protein, 10 aa, Homo sapiens
  misc_feature: Table A; Target 37560; HLA-C*07:02; MAGEA10; ENSG00000124260; CTA
FPSSFPSSSS

SEQ ID NO: 37561 - protein, 9 aa, Homo sapiens
  misc_feature: Table A; Target 37561; HLA-C*03:03; MAGEA10; ENSG00000124260; CTA
FVLVTSLGL

SEQ ID NO: 37562 - protein, 9 aa, Homo sapiens
  misc_feature: Table A; Target 37562; HLA-C*03:04; MAGEA10; ENSG00000124260; CTA
FVLVTSLGL

SEQ ID NO: 37563 - protein, 11 aa, Homo sapiens
  misc_feature: Table A; Target 37563; HLA-A*01:01; MAGEA10; ENSG00000124260; CTA
FVLVTSLGLTY

SEQ ID NO: 37564 - protein, 11 aa, Homo sapiens
  misc_feature: Table A; Target 37564; HLA-B*13:02; MAGEA10; ENSG00000124260; CTA
GLEGAQAPLAV

SEQ ID NO: 37565 - protein, 8 aa, Homo sapiens
  misc_feature: Table A; Target 37565; HLA-A*03:01; MAGEA10; ENSG00000124260; CTA
GLYDGMEH

SEQ ID NO: 37566 - protein, 9 aa, Homo sapiens
  misc_feature: Table A; Target 37566; HLA-B*27:05; MAGEA10; ENSG00000124260; CTA
GLYDGMEHL

SEQ ID NO: 37567 - protein, 9 aa, Homo sapiens
  misc_feature: Table A; Target 37567; HLA-B*40:02; MAGEA10; ENSG00000124260; CTA
GLYDGMEHL

SEQ ID NO: 37568 - protein, 9 aa, Homo sapiens
  misc_feature: Table A; Target 37568; HLA-C*01:02; MAGEA10; ENSG00000124260; CTA
GLYDGMEHL

SEQ ID NO: 37569 - protein, 10 aa, Homo sapiens
  misc_feature: Table A; Target 37569; HLA-B*38:01; MAGEA10; ENSG00000124260; CTA
GLYDGMEHLI

SEQ ID NO: 37570 - protein, 10 aa, Homo sapiens
  misc_feature: Table A; Target 37570; HLA-B*49:01; MAGEA10; ENSG00000124260; CTA
GLYDGMEHLI

SEQ ID NO: 37571 - protein, 9 aa, Homo sapiens
  misc_feature: Table A; Target 37571; HLA-C*04:01; MAGEA10; ENSG00000124260; CTA
GMLSDVQSM

SEQ ID NO: 37572 - protein, 9 aa, Homo sapiens
  misc_feature: Table A; Target 37572; HLA-B*15:03; MAGEA10; ENSG00000124260; CTA
GSDPARYEF

SEQ ID NO: 37573 - protein, 9 aa, Homo sapiens
  misc_feature: Table A; Target 37573; HLA-B*27:05; MAGEA10; ENSG00000124260; CTA
GSDPARYEF

SEQ ID NO: 37574 - protein, 10 aa, Homo sapiens
  misc_feature: Table A; Target 37574; HLA-A*01:01; MAGEA10; ENSG00000124260; CTA
GSDPRSFPLW

SEQ ID NO: 37575 - protein, 9 aa, Homo sapiens
  misc_feature: Table A; Target 37575; HLA-A*30:01; MAGEA10; ENSG00000124260; CTA
HSFVLVTSL

SEQ ID NO: 37576 - protein, 9 aa, Homo sapiens
  misc_feature: Table A; Target 37576; HLA-C*01:02; MAGEA10; ENSG00000124260; CTA
HSFVLVTSL

SEQ ID NO: 37577 - protein, 9 aa, Homo sapiens
  misc_feature: Table A; Target 37577; HLA-C*05:01; MAGEA10; ENSG00000124260; CTA
HSFVLVTSL

SEQ ID NO: 37578 - protein, 9 aa, Homo sapiens
  misc_feature: Table A; Target 37578; HLA-C*16:04; MAGEA10; ENSG00000124260; CTA
HSFVLVTSL

SEQ ID NO: 37579 - protein, 10 aa, Homo sapiens
  misc_feature: Table A; Target 37579; HLA-C*02:02; MAGEA10; ENSG00000124260; CTA
IATTDDTTAM

SEQ ID NO: 37580 - protein, 9 aa, Homo sapiens
  misc_feature: Table A; Target 37580; HLA-C*12:03; MAGEA10; ENSG00000124260; CTA
ILESVIRNY

SEQ ID NO: 37581 - protein, 9 aa, Homo sapiens
  misc_feature: Table A; Target 37581; HLA-C*16:04; MAGEA10; ENSG00000124260; CTA
ILESVIRNY

SEQ ID NO: 37582 - protein, 8 aa, Homo sapiens
  misc_feature: Table A; Target 37582; HLA-B*56:01; MAGEA10; ENSG00000124260; CTA
IPSTPEEV

SEQ ID NO: 37583 - protein, 8 aa, Homo sapiens
  misc_feature: Table A; Target 37583; HLA-C*16:02; MAGEA10; ENSG00000124260; CTA
IYGEPRKL

SEQ ID NO: 37584 - protein, 11 aa, Homo sapiens
  misc_feature: Table A; Target 37584; HLA-B*38:01; MAGEA10; ENSG00000124260; CTA
KEESPSTLQVL

SEQ ID NO: 37585 - protein, 11 aa, Homo sapiens
  misc_feature: Table A; Target 37585; HLA-B*44:02; MAGEA10; ENSG00000124260; CTA
KEESPSTLQVL

SEQ ID NO: 37586 - protein, 10 aa, Homo sapiens
  misc_feature: Table A; Target 37586; HLA-B*15:01; MAGEA10; ENSG00000124260; CTA
KVNGSDPRSF

SEQ ID NO: 37587 - protein, 9 aa, Homo sapiens
  misc_feature: Table A; Target 37587; HLA-C*06:02; MAGEA10; ENSG00000124260; CTA
KVTDLVQFL

SEQ ID NO: 37588 - protein, 10 aa, Homo sapiens
  misc_feature: Table A; Target 37588; HLA-A*30:01; MAGEA10; ENSG00000124260; CTA
LEGAQAPLAV

SEQ ID NO: 37589 - protein, 8 aa, Homo sapiens
  misc_feature: Table A; Target 37589; HLA-A*30:02; MAGEA10; ENSG00000124260; CTA
LESVIRNY

SEQ ID NO: 37590 - protein, 9 aa, Homo sapiens
  misc_feature: Table A; Target 37590; HLA-A*02:03; MAGEA10; ENSG00000124260; CTA
LIYGEPRKL

SEQ ID NO: 37591 - protein, 9 aa, Homo sapiens
  misc_feature: Table A; Target 37591; HLA-B*27:02; MAGEA10; ENSG00000124260; CTA
LPDSESLPR

SEQ ID NO: 37592 - protein, 9 aa, Homo sapiens
  misc_feature: Table A; Target 37592; HLA-B*35:03; MAGEA10; ENSG00000124260; CTA
LPLDQSDEG

SEQ ID NO: 37593 - protein, 9 aa, Homo sapiens
  misc_feature: Table A; Target 37593; HLA-B*54:01; MAGEA10; ENSG00000124260; CTA
LPLDQSDEG

SEQ ID NO: 37594 - protein, 10 aa, Homo sapiens
  misc_feature: Table A; Target 37594; HLA-B*38:01; MAGEA10; ENSG00000124260; CTA
LQVLPDSESL

SEQ ID NO: 37595 - protein, 9 aa, Homo sapiens
  misc_feature: Table A; Target 37595; HLA-B*15:01; MAGEA10; ENSG00000124260; CTA
LSIVFIEGY

SEQ ID NO: 37596 - protein, 9 aa, Homo sapiens
  misc_feature: Table A; Target 37596; HLA-B*58:01; MAGEA10; ENSG00000124260; CTA
LSIVFIEGY

SEQ ID NO: 37597 - protein, 10 aa, Homo sapiens
  misc_feature: Table A; Target 37597; HLA-A*02:04; MAGEA10; ENSG00000124260; CTA
LVFGIDVKEV

SEQ ID NO: 37598 - protein, 10 aa, Homo sapiens
  misc_feature: Table A; Target 37598; HLA-A*02:07; MAGEA10; ENSG00000124260; CTA
LVFGIDVKEV

SEQ ID NO: 37599 - protein, 9 aa, Homo sapiens
  misc_feature: Table A; Target 37599; HLA-C*07:04; MAGEA10; ENSG00000124260; CTA
LYDGMEHLI

SEQ ID NO: 37600 - protein, 9 aa, Homo sapiens
  misc_feature: Table A; Target 37600; HLA-C*03:03; MAGEA10; ENSG00000124260; CTA
MASASSSAT

SEQ ID NO: 37601 - protein, 10 aa, Homo sapiens
  misc_feature: Table A; Target 37601; HLA-C*07:02; MAGEA10; ENSG00000124260; CTA
MLSDVQSMPK

SEQ ID NO: 37602 - protein, 8 aa, Homo sapiens
  misc_feature: Table A; Target 37602; HLA-B*56:01; MAGEA10; ENSG00000124260; CTA
MPKTGILI

SEQ ID NO: 37603 - protein, 9 aa, Homo sapiens
  misc_feature: Table A; Target 37603; HLA-A*03:01; MAGEA10; ENSG00000124260; CTA
MSLLKFLAK

SEQ ID NO: 37604 - protein, 9 aa, Homo sapiens
  misc_feature: Table A; Target 37604; HLA-B*37:01; MAGEA10; ENSG00000124260; CTA
QDWVQENYL

SEQ ID NO: 37605 - protein, 9 aa, Homo sapiens
  misc_feature: Table A; Target 37605; HLA-B*13:02; MAGEA10; ENSG00000124260; CTA
QIACSSPSV

SEQ ID NO: 37606 - protein, 9 aa, Homo sapiens
  misc_feature: Table A; Target 37606; HLA-B*38:01; MAGEA10; ENSG00000124260; CTA
QKEESPSTL

SEQ ID NO: 37607 - protein, 8 aa, Homo sapiens
  misc_feature: Table A; Target 37607; HLA-A*03:01; MAGEA10; ENSG00000124260; CTA
QMKEPITK

SEQ ID NO: 37608 - protein, 8 aa, Homo sapiens
  misc_feature: Table A; Target 37608; HLA-A*03:02; MAGEA10; ENSG00000124260; CTA
QMKEPITK

SEQ ID NO: 37609 - protein, 9 aa, Homo sapiens
  misc_feature: Table A; Target 37609; HLA-B*37:01; MAGEA10; ENSG00000124260; CTA
QSMPKTGIL

SEQ ID NO: 37610 - protein, 9 aa, Homo sapiens
  misc_feature: Table A; Target 37610; HLA-C*03:04; MAGEA10; ENSG00000124260; CTA
QSMPKTGIL

SEQ ID NO: 37611 - protein, 9 aa, Homo sapiens
  misc_feature: Table A; Target 37611; HLA-B*58:01; MAGEA10; ENSG00000124260; CTA
QVLPDSESL

SEQ ID NO: 37612 - protein, 11 aa, Homo sapiens
  misc_feature: Table A; Target 37612; HLA-A*03:02; MAGEA10; ENSG00000124260; CTA
QVLPDSESLPR

SEQ ID NO: 37613 - protein, 10 aa, Homo sapiens
  misc_feature: Table A; Target 37613; HLA-C*05:01; MAGEA10; ENSG00000124260; CTA
SASSSATGSF

SEQ ID NO: 37614 - protein, 9 aa, Homo sapiens
  misc_feature: Table A; Target 37614; HLA-B*49:01; MAGEA10; ENSG00000124260; CTA
SETQGLEGA

SEQ ID NO: 37615 - protein, 9 aa, Homo sapiens
  misc_feature: Table A; Target 37615; HLA-C*14:02; MAGEA10; ENSG00000124260; CTA
SFPSSSSSS

SEQ ID NO: 37616 - protein, 8 aa, Homo sapiens
  misc_feature: Table A; Target 37616; HLA-B*35:03; MAGEA10; ENSG00000124260; CTA
SPSTLQVL

SEQ ID NO: 37617 - protein, 8 aa, Homo sapiens
  misc_feature: Table A; Target 37617; HLA-B*56:01; MAGEA10; ENSG00000124260; CTA
SPSTLQVL

SEQ ID NO: 37618 - protein, 9 aa, Homo sapiens
  misc_feature: Table A; Target 37618; HLA-A*68:02; MAGEA10; ENSG00000124260; CTA
SSPSVVASL

SEQ ID NO: 37619 - protein, 9 aa, Homo sapiens
  misc_feature: Table A; Target 37619; HLA-B*07:02; MAGEA10; ENSG00000124260; CTA
SSPSVVASL

SEQ ID NO: 37620 - protein, 9 aa, Homo sapiens
  misc_feature: Table A; Target 37620; HLA-C*05:01; MAGEA10; ENSG00000124260; CTA
SSPSVVASL

SEQ ID NO: 37621 - protein, 9 aa, Homo sapiens
  misc_feature: Table A; Target 37621; HLA-C*07:02; MAGEA10; ENSG00000124260; CTA
SSPSVVASL

SEQ ID NO: 37622 - protein, 8 aa, Homo sapiens
  misc_feature: Table A; Target 37622; HLA-A*32:01; MAGEA10; ENSG00000124260; CTA
SSSATGSF

SEQ ID NO: 37623 - protein, 9 aa, Homo sapiens
  misc_feature: Table A; Target 37623; HLA-C*06:02; MAGEA10; ENSG00000124260; CTA
SSSFPSSFP

SEQ ID NO: 37624 - protein, 9 aa, Homo sapiens
  misc_feature: Table A; Target 37624; HLA-A*32:01; MAGEA10; ENSG00000124260; CTA
SSSSSSSCY

SEQ ID NO: 37625 - protein, 9 aa, Homo sapiens
  misc_feature: Table A; Target 37625; HLA-B*35:01; MAGEA10; ENSG00000124260; CTA
SSTSTSSSF

SEQ ID NO: 37626 - protein, 9 aa, Homo sapiens
  misc_feature: Table A; Target 37626; HLA-B*57:01; MAGEA10; ENSG00000124260; CTA
SSTSTSSSF

SEQ ID NO: 37627 - protein, 10 aa, Homo sapiens
  misc_feature: Table A; Target 37627; HLA-A*30:02; MAGEA10; ENSG00000124260; CTA
STSSSFPSSF

SEQ ID NO: 37628 - protein, 8 aa, Homo sapiens
  misc_feature: Table A; Target 37628; HLA-A*32:01; MAGEA10; ENSG00000124260; CTA
STSTSSSF

SEQ ID NO: 37629 - protein, 8 aa, Homo sapiens
  misc_feature: Table A; Target 37629; HLA-B*37:01; MAGEA10; ENSG00000124260; CTA
STSTSSSF

SEQ ID NO: 37630 - protein, 8 aa, Homo sapiens
  misc_feature: Table A; Target 37630; HLA-C*14:02; MAGEA10; ENSG00000124260; CTA
STSTSSSF

SEQ ID NO: 37631 - protein, 10 aa, Homo sapiens
  misc_feature: Table A; Target 37631; HLA-A*11:01; MAGEA10; ENSG00000124260; CTA
STSTSSSFPS

SEQ ID NO: 37632 - protein, 10 aa, Homo sapiens
  misc_feature: Table A; Target 37632; HLA-C*16:02; MAGEA10; ENSG00000124260; CTA
TPNPPQSAQI

SEQ ID NO: 37633 - protein, 9 aa, Homo sapiens
  misc_feature: Table A; Target 37633; HLA-B*15:03; MAGEA10; ENSG00000124260; CTA
TQDWVQENY

SEQ ID NO: 37634 - protein, 9 aa, Homo sapiens
  misc_feature: Table A; Target 37634; HLA-B*15:03; MAGEA10; ENSG00000124260; CTA
TSSSFPSSF

SEQ ID NO: 37635 - protein, 9 aa, Homo sapiens
  misc_feature: Table A; Target 37635; HLA-B*18:01; MAGEA10; ENSG00000124260; CTA
TSSSFPSSF

SEQ ID NO: 37636 - protein, 9 aa, Homo sapiens
  misc_feature: Table A; Target 37636; HLA-B*57:01; MAGEA10; ENSG00000124260; CTA
TSSSFPSSF

SEQ ID NO: 37637 - protein, 9 aa, Homo sapiens
  misc_feature: Table A; Target 37637; HLA-C*12:03; MAGEA10; ENSG00000124260; CTA
TSSSFPSSF

SEQ ID NO: 37638 - protein, 8 aa, Homo sapiens
  misc_feature: Table A; Target 37638; HLA-A*32:01; MAGEA10; ENSG00000124260; CTA
TTDDTTAM

SEQ ID NO: 37639 - protein, 8 aa, Homo sapiens
  misc_feature: Table A; Target 37639; HLA-B*39:01; MAGEA10; ENSG00000124260; CTA
TTDDTTAM

SEQ ID NO: 37640 - protein, 11 aa, Homo sapiens
  misc_feature: Table A; Target 37640; HLA-B*39:01; MAGEA10; ENSG00000124260; CTA
TTDDTTAMASA

SEQ ID NO: 37641 - protein, 8 aa, Homo sapiens
  misc_feature: Table A; Target 37641; HLA-A*32:01; MAGEA10; ENSG00000124260; CTA
VDPTGHSF

SEQ ID NO: 37642 - protein, 8 aa, Homo sapiens
  misc_feature: Table A; Target 37642; HLA-B*58:01; MAGEA10; ENSG00000124260; CTA
VDPTGHSF

SEQ ID NO: 37643 - protein, 11 aa, Homo sapiens
  misc_feature: Table A; Target 37643; HLA-B*40:01; MAGEA10; ENSG00000124260; CTA
VEEDASSSTST

SEQ ID NO: 37644 - protein, 8 aa, Homo sapiens
  misc_feature: Table A; Target 37644; HLA-C*05:01; MAGEA10; ENSG00000124260; CTA
VLPDSESL

SEQ ID NO: 37645 - protein, 10 aa, Homo sapiens
  misc_feature: Table A; Target 37645; HLA-B*44:02; MAGEA10; ENSG00000124260; CTA
VLVTSLGLTY

SEQ ID NO: 37646 - protein, 10 aa, Homo sapiens
  misc_feature: Table A; Target 37646; HLA-C*14:02; MAGEA10; ENSG00000124260; CTA
VLVTSLGLTY

SEQ ID NO: 37647 - protein, 10 aa, Homo sapiens
  misc_feature: Table A; Target 37647; HLA-C*16:04; MAGEA10; ENSG00000124260; CTA
VLVTSLGLTY

SEQ ID NO: 37648 - protein, 9 aa, Homo sapiens
  misc_feature: Table A; Target 37648; HLA-C*07:01; MAGEA10; ENSG00000124260; CTA
VNGSDPRSF

SEQ ID NO: 37649 - protein, 9 aa, Homo sapiens
  misc_feature: Table A; Target 37649; HLA-A*01:01; MAGEA10; ENSG00000124260; CTA
VPGSDPARY

SEQ ID NO: 37650 - protein, 8 aa, Homo sapiens
  misc_feature: Table A; Target 37650; HLA-B*15:01; MAGEA10; ENSG00000124260; CTA
VQFLLFKY

SEQ ID NO: 37651 - protein, 8 aa, Homo sapiens
  misc_feature: Table A; Target 37651; HLA-B*15:03; MAGEA10; ENSG00000124260; CTA
VQFLLFKY

SEQ ID NO: 37652 - protein, 8 aa, Homo sapiens
  misc_feature: Table A; Target 37652; HLA-A*30:02; MAGEA10; ENSG00000124260; CTA
VTSLGLTY

SEQ ID NO: 37653 - protein, 8 aa, Homo sapiens
  misc_feature: Table A; Target 37653; HLA-C*01:02; MAGEA10; ENSG00000124260; CTA
VTSLGLTY

SEQ ID NO: 37654 - protein, 8 aa, Homo sapiens
  misc_feature: Table A; Target 37654; HLA-A*02:07; MAGEA10; ENSG00000124260; CTA
YEDHFPLL

SEQ ID NO: 37655 - protein, 8 aa, Homo sapiens
  misc_feature: Table A; Target 37655; HLA-B*54:01; MAGEA10; ENSG00000124260; CTA
YPLIPSTP

SEQ ID NO: 37656 - protein, 9 aa, Homo sapiens
  misc_feature: Table A; Target 37656; HLA-A*01:01; MAGEA10; ENSG00000124260; CTA
YQMKEPITK

SEQ ID NO: 37657 - protein, 9 aa, Homo sapiens
  misc_feature: Table A; Target 37657; HLA-A*02:01; MAGEA10; ENSG00000124260; CTA
YQMKEPITK

SEQ ID NO: 37658 - protein, 9 aa, Homo sapiens
  misc_feature: Table A; Target 37658; HLA-A*31:01; MAGEA10; ENSG00000124260; CTA
YQMKEPITK

SEQ ID NO: 37659 - protein, 9 aa, Homo sapiens
  misc_feature: Table A; Target 37659; HLA-B*15:03; MAGEA10; ENSG00000124260; CTA
YQMKEPITK

SEQ ID NO: 37660 - protein, 9 aa, Homo sapiens
  misc_feature: Table A; Target 37660; HLA-C*16:04; MAGEA10; ENSG00000124260; CTA
YQMKEPITK

SEQ ID NO: 37661 - protein, 8 aa, Homo sapiens
  misc_feature: Table A; Target 37661; HLA-B*49:01; MAGEA10,MAGEA11,MAGEA8; ENSG00000124260,ENSG00000185247,ENSG00000156009; CTA,TAA,TAA
FGIDVKEV

SEQ ID NO: 37662 - protein, 8 aa, Homo sapiens
  misc_feature: Table A; Target 37662; HLA-B*15:01; MAGEA10,MAGEA3,MAGEA6,MAGEA8; ENSG00000124260,ENSG00000221867,ENSG00000197172,ENSG00000156009; CTA,CTA,CTA,TAA
VQENYLEY

SEQ ID NO: 37663 - protein, 8 aa, Homo sapiens
  misc_feature: Table A; Target 37663; HLA-C*07:01; MAGEA10,MAGEA3,MAGEA6,MAGEA8; ENSG00000124260,ENSG00000221867,ENSG00000197172,ENSG00000156009; CTA,CTA,CTA,TAA
VQENYLEY

SEQ ID NO: 37664 - protein, 9 aa, Homo sapiens
  misc_feature: Table A; Target 37664; HLA-A*03:01; MAGEA10,MAGEA8; ENSG00000124260,ENSG00000156009; CTA,TAA
WVQENYLEY

SEQ ID NO: 37665 - protein, 8 aa, Homo sapiens
  misc_feature: Table A; Target 37665; HLA-B*08:01; MAGEA11; ENSG00000185247; TAA
AAFFSSTL

SEQ ID NO: 37666 - protein, 8 aa, Homo sapiens
  misc_feature: Table A; Target 37666; HLA-B*15:01; MAGEA11; ENSG00000185247; TAA
AAFFSSTL

SEQ ID NO: 37667 - protein, 8 aa, Homo sapiens
  misc_feature: Table A; Target 37667; HLA-B*15:03; MAGEA11; ENSG00000185247; TAA
AAFFSSTL

SEQ ID NO: 37668 - protein, 8 aa, Homo sapiens
  misc_feature: Table A; Target 37668; HLA-B*46:01; MAGEA11; ENSG00000185247; TAA
AAFFSSTL

SEQ ID NO: 37669 - protein, 8 aa, Homo sapiens
  misc_feature: Table A; Target 37669; HLA-B*58:01; MAGEA11; ENSG00000185247; TAA
AAFFSSTL

SEQ ID NO: 37670 - protein, 8 aa, Homo sapiens
  misc_feature: Table A; Target 37670; HLA-C*01:02; MAGEA11; ENSG00000185247; TAA
AAFFSSTL

SEQ ID NO: 37671 - protein, 8 aa, Homo sapiens
  misc_feature: Table A; Target 37671; HLA-C*02:02; MAGEA11; ENSG00000185247; TAA
AAFFSSTL

SEQ ID NO: 37672 - protein, 8 aa, Homo sapiens
  misc_feature: Table A; Target 37672; HLA-C*03:03; MAGEA11; ENSG00000185247; TAA
AAFFSSTL

SEQ ID NO: 37673 - protein, 8 aa, Homo sapiens
  misc_feature: Table A; Target 37673; HLA-C*03:04; MAGEA11; ENSG00000185247; TAA
AAFFSSTL

SEQ ID NO: 37674 - protein, 8 aa, Homo sapiens
  misc_feature: Table A; Target 37674; HLA-C*05:01; MAGEA11; ENSG00000185247; TAA
AAFFSSTL

SEQ ID NO: 37675 - protein, 8 aa, Homo sapiens
  misc_feature: Table A; Target 37675; HLA-C*12:03; MAGEA11; ENSG00000185247; TAA
AAFFSSTL

SEQ ID NO: 37676 - protein, 8 aa, Homo sapiens
  misc_feature: Table A; Target 37676; HLA-C*16:04; MAGEA11; ENSG00000185247; TAA
AAFFSSTL

SEQ ID NO: 37677 - protein, 8 aa, Homo sapiens
  misc_feature: Table A; Target 37677; HLA-B*37:01; MAGEA11; ENSG00000185247; TAA
ADLTRVIM

SEQ ID NO: 37678 - protein, 9 aa, Homo sapiens
  misc_feature: Table A; Target 37678; HLA-B*37:01; MAGEA11; ENSG00000185247; TAA
ADLTRVIMP

SEQ ID NO: 37679 - protein, 9 aa, Homo sapiens
  misc_feature: Table A; Target 37679; HLA-A*30:01; MAGEA11; ENSG00000185247; TAA
AEEQEAAFF

SEQ ID NO: 37680 - protein, 9 aa, Homo sapiens
  misc_feature: Table A; Target 37680; HLA-B*27:02; MAGEA11; ENSG00000185247; TAA
AEEQEAAFF

SEQ ID NO: 37681 - protein, 9 aa, Homo sapiens
  misc_feature: Table A; Target 37681; HLA-B*37:01; MAGEA11; ENSG00000185247; TAA
AEEQEAAFF

SEQ ID NO: 37682 - protein, 9 aa, Homo sapiens
  misc_feature: Table A; Target 37682; HLA-B*38:01; MAGEA11; ENSG00000185247; TAA
AEEQEAAFF

SEQ ID NO: 37683 - protein, 9 aa, Homo sapiens
  misc_feature: Table A; Target 37683; HLA-B*40:01; MAGEA11; ENSG00000185247; TAA
AEEQEAAFF

SEQ ID NO: 37684 - protein, 9 aa, Homo sapiens
  misc_feature: Table A; Target 37684; HLA-B*44:02; MAGEA11; ENSG00000185247; TAA
AEEQEAAFF

SEQ ID NO: 37685 - protein, 9 aa, Homo sapiens
  misc_feature: Table A; Target 37685; HLA-B*44:03; MAGEA11; ENSG00000185247; TAA
AEEQEAAFF

SEQ ID NO: 37686 - protein, 9 aa, Homo sapiens
  misc_feature: Table A; Target 37686; HLA-B*49:01; MAGEA11; ENSG00000185247; TAA
AEEQEAAFF

SEQ ID NO: 37687 - protein, 9 aa, Homo sapiens
  misc_feature: Table A; Target 37687; HLA-C*16:04; MAGEA11; ENSG00000185247; TAA
AEEQEAAFF

SEQ ID NO: 37688 - protein, 8 aa, Homo sapiens
  misc_feature: Table A; Target 37688; HLA-A*30:01; MAGEA11; ENSG00000185247; TAA
AEMLGSVI

SEQ ID NO: 37689 - protein, 8 aa, Homo sapiens
  misc_feature: Table A; Target 37689; HLA-B*13:02; MAGEA11; ENSG00000185247; TAA
AEMLGSVI

SEQ ID NO: 37690 - protein, 8 aa, Homo sapiens
  misc_feature: Table A; Target 37690; HLA-B*18:01; MAGEA11; ENSG00000185247; TAA
AEMLGSVI

SEQ ID NO: 37691 - protein, 8 aa, Homo sapiens
  misc_feature: Table A; Target 37691; HLA-B*27:02; MAGEA11; ENSG00000185247; TAA
AEMLGSVI

SEQ ID NO: 37692 - protein, 8 aa, Homo sapiens
  misc_feature: Table A; Target 37692; HLA-B*37:01; MAGEA11; ENSG00000185247; TAA
AEMLGSVI

SEQ ID NO: 37693 - protein, 8 aa, Homo sapiens
  misc_feature: Table A; Target 37693; HLA-B*40:01; MAGEA11; ENSG00000185247; TAA
AEMLGSVI

SEQ ID NO: 37694 - protein, 8 aa, Homo sapiens
  misc_feature: Table A; Target 37694; HLA-B*40:02; MAGEA11; ENSG00000185247; TAA
AEMLGSVI

SEQ ID NO: 37695 - protein, 8 aa, Homo sapiens
  misc_feature: Table A; Target 37695; HLA-B*44:02; MAGEA11; ENSG00000185247; TAA
AEMLGSVI

SEQ ID NO: 37696 - protein, 8 aa, Homo sapiens
  misc_feature: Table A; Target 37696; HLA-B*44:03; MAGEA11; ENSG00000185247; TAA
AEMLGSVI

SEQ ID NO: 37697 - protein, 8 aa, Homo sapiens
  misc_feature: Table A; Target 37697; HLA-B*49:01; MAGEA11; ENSG00000185247; TAA
AEMLGSVI

SEQ ID NO: 37698 - protein, 10 aa, Homo sapiens
  misc_feature: Table A; Target 37698; HLA-B*44:02; MAGEA11; ENSG00000185247; TAA
AEMLGSVIKN

SEQ ID NO: 37699 - protein, 11 aa, Homo sapiens
  misc_feature: Table A; Target 37699; HLA-A*30:01; MAGEA11; ENSG00000185247; TAA
AEMLGSVIKNY

SEQ ID NO: 37700 - protein, 11 aa, Homo sapiens
  misc_feature: Table A; Target 37700; HLA-A*30:02; MAGEA11; ENSG00000185247; TAA
AEMLGSVIKNY

SEQ ID NO: 37701 - protein, 11 aa, Homo sapiens
  misc_feature: Table A; Target 37701; HLA-B*27:02; MAGEA11; ENSG00000185247; TAA
AEMLGSVIKNY

SEQ ID NO: 37702 - protein, 11 aa, Homo sapiens
  misc_feature: Table A; Target 37702; HLA-B*44:02; MAGEA11; ENSG00000185247; TAA
AEMLGSVIKNY

SEQ ID NO: 37703 - protein, 11 aa, Homo sapiens
  misc_feature: Table A; Target 37703; HLA-B*44:03; MAGEA11; ENSG00000185247; TAA
AEMLGSVIKNY

SEQ ID NO: 37704 - protein, 11 aa, Homo sapiens
  misc_feature: Table A; Target 37704; HLA-C*16:04; MAGEA11; ENSG00000185247; TAA
AEMLGSVIKNY

SEQ ID NO: 37705 - protein, 8 aa, Homo sapiens
  misc_feature: Table A; Target 37705; HLA-B*37:01; MAGEA11; ENSG00000185247; TAA
AESPSPPQ

SEQ ID NO: 37706 - protein, 10 aa, Homo sapiens
  misc_feature: Table A; Target 37706; HLA-A*30:01; MAGEA11; ENSG00000185247; TAA
AESPSPPQSP

SEQ ID NO: 37707 - protein, 10 aa, Homo sapiens
  misc_feature: Table A; Target 37707; HLA-B*49:01; MAGEA11; ENSG00000185247; TAA
AESPSPPQSP

SEQ ID NO: 37708 - protein, 11 aa, Homo sapiens
  misc_feature: Table A; Target 37708; HLA-B*44:02; MAGEA11; ENSG00000185247; TAA
AETSKMKVLEY

SEQ ID NO: 37709 - protein, 11 aa, Homo sapiens
  misc_feature: Table A; Target 37709; HLA-B*44:03; MAGEA11; ENSG00000185247; TAA
AETSKMKVLEY

SEQ ID NO: 37710 - protein, 9 aa, Homo sapiens
  misc_feature: Table A; Target 37710; HLA-B*13:02; MAGEA11; ENSG00000185247; TAA
AFFSSTLNV

SEQ ID NO: 37711 - protein, 9 aa, Homo sapiens
  misc_feature: Table A; Target 37711; HLA-C*14:02; MAGEA11; ENSG00000185247; TAA
AFFSSTLNV

SEQ ID NO: 37712 - protein, 11 aa, Homo sapiens
  misc_feature: Table A; Target 37712; HLA-A*30:02; MAGEA11; ENSG00000185247; TAA
ALQAEEQEAAF

SEQ ID NO: 37713 - protein, 11 aa, Homo sapiens
  misc_feature: Table A; Target 37713; HLA-B*15:01; MAGEA11; ENSG00000185247; TAA
ALQAEEQEAAF

SEQ ID NO: 37714 - protein, 9 aa, Homo sapiens
  misc_feature: Table A; Target 37714; HLA-A*02:01; MAGEA11; ENSG00000185247; TAA
ALREEGEGV

SEQ ID NO: 37715 - protein, 9 aa, Homo sapiens
  misc_feature: Table A; Target 37715; HLA-A*02:03; MAGEA11; ENSG00000185247; TAA
ALREEGEGV

SEQ ID NO: 37716 - protein, 9 aa, Homo sapiens
  misc_feature: Table A; Target 37716; HLA-A*02:04; MAGEA11; ENSG00000185247; TAA
ALREEGEGV

SEQ ID NO: 37717 - protein, 9 aa, Homo sapiens
  misc_feature: Table A; Target 37717; HLA-A*02:07; MAGEA11; ENSG00000185247; TAA
ALREEGEGV

SEQ ID NO: 37718 - protein, 9 aa, Homo sapiens
  misc_feature: Table A; Target 37718; HLA-B*07:02; MAGEA11; ENSG00000185247; TAA
ALREEGEGV

SEQ ID NO: 37719 - protein, 9 aa, Homo sapiens
  misc_feature: Table A; Target 37719; HLA-B*13:02; MAGEA11; ENSG00000185247; TAA
ALREEGEGV

SEQ ID NO: 37720 - protein, 9 aa, Homo sapiens
  misc_feature: Table A; Target 37720; HLA-B*15:01; MAGEA11; ENSG00000185247; TAA
ALREEGEGV

SEQ ID NO: 37721 - protein, 9 aa, Homo sapiens
  misc_feature: Table A; Target 37721; HLA-B*40:02; MAGEA11; ENSG00000185247; TAA
ALREEGEGV

SEQ ID NO: 37722 - protein, 9 aa, Homo sapiens
  misc_feature: Table A; Target 37722; HLA-B*46:01; MAGEA11; ENSG00000185247; TAA
ALREEGEGV

SEQ ID NO: 37723 - protein, 9 aa, Homo sapiens
  misc_feature: Table A; Target 37723; HLA-B*55:01; MAGEA11; ENSG00000185247; TAA
ALREEGEGV

SEQ ID NO: 37724 - protein, 9 aa, Homo sapiens
  misc_feature: Table A; Target 37724; HLA-C*01:02; MAGEA11; ENSG00000185247; TAA
ALREEGEGV

SEQ ID NO: 37725 - protein, 9 aa, Homo sapiens
  misc_feature: Table A; Target 37725; HLA-C*06:02; MAGEA11; ENSG00000185247; TAA
ALREEGEGV

SEQ ID NO: 37726 - protein, 9 aa, Homo sapiens
  misc_feature: Table A; Target 37726; HLA-C*07:02; MAGEA11; ENSG00000185247; TAA
ALREEGEGV

SEQ ID NO: 37727 - protein, 9 aa, Homo sapiens
  misc_feature: Table A; Target 37727; HLA-C*14:02; MAGEA11; ENSG00000185247; TAA
ALREEGEGV

SEQ ID NO: 37728 - protein, 9 aa, Homo sapiens
  misc_feature: Table A; Target 37728; HLA-A*01:01; MAGEA11; ENSG00000185247; TAA
AMDAIFGSL

SEQ ID NO: 37729 - protein, 9 aa, Homo sapiens
  misc_feature: Table A; Target 37729; HLA-A*02:07; MAGEA11; ENSG00000185247; TAA
AMDAIFGSL

SEQ ID NO: 37730 - protein, 9 aa, Homo sapiens
  misc_feature: Table A; Target 37730; HLA-A*32:01; MAGEA11; ENSG00000185247; TAA
AMDAIFGSL

SEQ ID NO: 37731 - protein, 9 aa, Homo sapiens
  misc_feature: Table A; Target 37731; HLA-B*40:01; MAGEA11; ENSG00000185247; TAA
AMDAIFGSL

SEQ ID NO: 37732 - protein, 9 aa, Homo sapiens
  misc_feature: Table A; Target 37732; HLA-C*01:02; MAGEA11; ENSG00000185247; TAA
AMDAIFGSL

SEQ ID NO: 37733 - protein, 9 aa, Homo sapiens
  misc_feature: Table A; Target 37733; HLA-C*02:02; MAGEA11; ENSG00000185247; TAA
AMDAIFGSL

SEQ ID NO: 37734 - protein, 9 aa, Homo sapiens
  misc_feature: Table A; Target 37734; HLA-C*04:01; MAGEA11; ENSG00000185247; TAA
AMDAIFGSL

SEQ ID NO: 37735 - protein, 9 aa, Homo sapiens
  misc_feature: Table A; Target 37735; HLA-C*05:01; MAGEA11; ENSG00000185247; TAA
AMDAIFGSL

SEQ ID NO: 37736 - protein, 11 aa, Homo sapiens
  misc_feature: Table A; Target 37736; HLA-A*30:02; MAGEA11; ENSG00000185247; TAA
ANANGRDPTSY

SEQ ID NO: 37737 - protein, 11 aa, Homo sapiens
  misc_feature: Table A; Target 37737; HLA-C*12:03; MAGEA11; ENSG00000185247; TAA
ANANGRDPTSY

SEQ ID NO: 37738 - protein, 9 aa, Homo sapiens
  misc_feature: Table A; Target 37738; HLA-A*30:02; MAGEA11; ENSG00000185247; TAA
ANGRDPTSY

SEQ ID NO: 37739 - protein, 9 aa, Homo sapiens
  misc_feature: Table A; Target 37739; HLA-A*33:01; MAGEA11; ENSG00000185247; TAA
ANLEDRSPR

SEQ ID NO: 37740 - protein, 9 aa, Homo sapiens
  misc_feature: Table A; Target 37740; HLA-A*33:03; MAGEA11; ENSG00000185247; TAA
ANLEDRSPR

SEQ ID NO: 37741 - protein, 9 aa, Homo sapiens
  misc_feature: Table A; Target 37741; HLA-A*25:01; MAGEA11; ENSG00000185247; TAA
APYGPQLQW

SEQ ID NO: 37742 - protein, 9 aa, Homo sapiens
  misc_feature: Table A; Target 37742; HLA-B*07:02; MAGEA11; ENSG00000185247; TAA
APYGPQLQW

SEQ ID NO: 37743 - protein, 9 aa, Homo sapiens
  misc_feature: Table A; Target 37743; HLA-B*35:01; MAGEA11; ENSG00000185247; TAA
APYGPQLQW

SEQ ID NO: 37744 - protein, 9 aa, Homo sapiens
  misc_feature: Table A; Target 37744; HLA-B*44:02; MAGEA11; ENSG00000185247; TAA
APYGPQLQW

SEQ ID NO: 37745 - protein, 9 aa, Homo sapiens
  misc_feature: Table A; Target 37745; HLA-B*44:03; MAGEA11; ENSG00000185247; TAA
APYGPQLQW

SEQ ID NO: 37746 - protein, 9 aa, Homo sapiens
  misc_feature: Table A; Target 37746; HLA-B*51:01; MAGEA11; ENSG00000185247; TAA
APYGPQLQW

SEQ ID NO: 37747 - protein, 9 aa, Homo sapiens
  misc_feature: Table A; Target 37747; HLA-B*54:01; MAGEA11; ENSG00000185247; TAA
APYGPQLQW

SEQ ID NO: 37748 - protein, 9 aa, Homo sapiens
  misc_feature: Table A; Target 37748; HLA-B*56:01; MAGEA11; ENSG00000185247; TAA
APYGPQLQW

SEQ ID NO: 37749 - protein, 9 aa, Homo sapiens
  misc_feature: Table A; Target 37749; HLA-B*57:01; MAGEA11; ENSG00000185247; TAA
APYGPQLQW

SEQ ID NO: 37750 - protein, 9 aa, Homo sapiens
  misc_feature: Table A; Target 37750; HLA-B*58:01; MAGEA11; ENSG00000185247; TAA
APYGPQLQW

SEQ ID NO: 37751 - protein, 9 aa, Homo sapiens
  misc_feature: Table A; Target 37751; HLA-C*02:02; MAGEA11; ENSG00000185247; TAA
APYGPQLQW

SEQ ID NO: 37752 - protein, 9 aa, Homo sapiens
  misc_feature: Table A; Target 37752; HLA-C*07:02; MAGEA11; ENSG00000185247; TAA
APYGPQLQW

SEQ ID NO: 37753 - protein, 10 aa, Homo sapiens
  misc_feature: Table A; Target 37753; HLA-A*02:07; MAGEA11; ENSG00000185247; TAA
CIPEEVMWEV

SEQ ID NO: 37754 - protein, 8 aa, Homo sapiens
  misc_feature: Table A; Target 37754; HLA-A*33:01; MAGEA11; ENSG00000185247; TAA
DDFQSTER

SEQ ID NO: 37755 - protein, 8 aa, Homo sapiens
  misc_feature: Table A; Target 37755; HLA-A*33:03; MAGEA11; ENSG00000185247; TAA
DDFQSTER

SEQ ID NO: 37756 - protein, 8 aa, Homo sapiens
  misc_feature: Table A; Target 37756; HLA-A*68:01; MAGEA11; ENSG00000185247; TAA
DDFQSTER

SEQ ID NO: 37757 - protein, 11 aa, Homo sapiens
  misc_feature: Table A; Target 37757; HLA-B*18:01; MAGEA11; ENSG00000185247; TAA
DDFQSTERAPY

SEQ ID NO: 37758 - protein, 10 aa, Homo sapiens
  misc_feature: Table A; Target 37758; HLA-A*23:01; MAGEA11; ENSG00000185247; TAA
DFGLQVSTMF

SEQ ID NO: 37759 - protein, 10 aa, Homo sapiens
  misc_feature: Table A; Target 37759; HLA-C*04:01; MAGEA11; ENSG00000185247; TAA
DFGLQVSTMF

SEQ ID NO: 37760 - protein, 10 aa, Homo sapiens
  misc_feature: Table A; Target 37760; HLA-A*30:02; MAGEA11; ENSG00000185247; TAA
DFQSTERAPY

SEQ ID NO: 37761 - protein, 10 aa, Homo sapiens
  misc_feature: Table A; Target 37761; HLA-C*07:02; MAGEA11; ENSG00000185247; TAA
DLGLVGAQAL

SEQ ID NO: 37762 - protein, 8 aa, Homo sapiens
  misc_feature: Table A; Target 37762; HLA-A*25:01; MAGEA11; ENSG00000185247; TAA
DLIDPESF

SEQ ID NO: 37763 - protein, 8 aa, Homo sapiens
  misc_feature: Table A; Target 37763; HLA-B*08:01; MAGEA11; ENSG00000185247; TAA
DLPRVQVF

SEQ ID NO: 37764 - protein, 8 aa, Homo sapiens
  misc_feature: Table A; Target 37764; HLA-B*51:01; MAGEA11; ENSG00000185247; TAA
DLPRVQVF

SEQ ID NO: 37765 - protein, 8 aa, Homo sapiens
  misc_feature: Table A; Target 37765; HLA-C*07:01; MAGEA11; ENSG00000185247; TAA
DLPRVQVF

SEQ ID NO: 37766 - protein, 9 aa, Homo sapiens
  misc_feature: Table A; Target 37766; HLA-A*33:01; MAGEA11; ENSG00000185247; TAA
DLPRVQVFR

SEQ ID NO: 37767 - protein, 9 aa, Homo sapiens
  misc_feature: Table A; Target 37767; HLA-A*33:03; MAGEA11; ENSG00000185247; TAA
DLPRVQVFR

SEQ ID NO: 37768 - protein, 10 aa, Homo sapiens
  misc_feature: Table A; Target 37768; HLA-B*35:03; MAGEA11; ENSG00000185247; TAA
DPESFSQDIL

SEQ ID NO: 37769 - protein, 8 aa, Homo sapiens
  misc_feature: Table A; Target 37769; HLA-B*51:01; MAGEA11; ENSG00000185247; TAA
DPTSHSYV

SEQ ID NO: 37770 - protein, 9 aa, Homo sapiens
  misc_feature: Table A; Target 37770; HLA-B*07:02; MAGEA11; ENSG00000185247; TAA
DPTSHSYVL

SEQ ID NO: 37771 - protein, 9 aa, Homo sapiens
  misc_feature: Table A; Target 37771; HLA-B*08:01; MAGEA11; ENSG00000185247; TAA
DPTSHSYVL

SEQ ID NO: 37772 - protein, 9 aa, Homo sapiens
  misc_feature: Table A; Target 37772; HLA-B*35:01; MAGEA11; ENSG00000185247; TAA
DPTSHSYVL

SEQ ID NO: 37773 - protein, 9 aa, Homo sapiens
  misc_feature: Table A; Target 37773; HLA-B*35:03; MAGEA11; ENSG00000185247; TAA
DPTSHSYVL

SEQ ID NO: 37774 - protein, 9 aa, Homo sapiens
  misc_feature: Table A; Target 37774; HLA-B*39:01; MAGEA11; ENSG00000185247; TAA
DPTSHSYVL

SEQ ID NO: 37775 - protein, 9 aa, Homo sapiens
  misc_feature: Table A; Target 37775; HLA-B*51:01; MAGEA11; ENSG00000185247; TAA
DPTSHSYVL

SEQ ID NO: 37776 - protein, 9 aa, Homo sapiens
  misc_feature: Table A; Target 37776; HLA-B*55:01; MAGEA11; ENSG00000185247; TAA
DPTSHSYVL

SEQ ID NO: 37777 - protein, 9 aa, Homo sapiens
  misc_feature: Table A; Target 37777; HLA-C*07:02; MAGEA11; ENSG00000185247; TAA
DPTSHSYVL

SEQ ID NO: 37778 - protein, 8 aa, Homo sapiens
  misc_feature: Table A; Target 37778; HLA-B*07:02; MAGEA11; ENSG00000185247; TAA
DPTSYPSL

SEQ ID NO: 37779 - protein, 8 aa, Homo sapiens
  misc_feature: Table A; Target 37779; HLA-B*35:01; MAGEA11; ENSG00000185247; TAA
DPTSYPSL

SEQ ID NO: 37780 - protein, 8 aa, Homo sapiens
  misc_feature: Table A; Target 37780; HLA-B*35:03; MAGEA11; ENSG00000185247; TAA
DPTSYPSL

SEQ ID NO: 37781 - protein, 8 aa, Homo sapiens
  misc_feature: Table A; Target 37781; HLA-B*51:01; MAGEA11; ENSG00000185247; TAA
DPTSYPSL

SEQ ID NO: 37782 - protein, 9 aa, Homo sapiens
  misc_feature: Table A; Target 37782; HLA-A*01:01; MAGEA11; ENSG00000185247; TAA
DPTSYPSLY

SEQ ID NO: 37783 - protein, 9 aa, Homo sapiens
  misc_feature: Table A; Target 37783; HLA-A*26:01; MAGEA11; ENSG00000185247; TAA
DPTSYPSLY

SEQ ID NO: 37784 - protein, 9 aa, Homo sapiens
  misc_feature: Table A; Target 37784; HLA-B*18:01; MAGEA11; ENSG00000185247; TAA
DPTSYPSLY

SEQ ID NO: 37785 - protein, 9 aa, Homo sapiens
  misc_feature: Table A; Target 37785; HLA-B*35:01; MAGEA11; ENSG00000185247; TAA
DPTSYPSLY

SEQ ID NO: 37786 - protein, 9 aa, Homo sapiens
  misc_feature: Table A; Target 37786; HLA-B*55:01; MAGEA11; ENSG00000185247; TAA
DPTSYPSLY

SEQ ID NO: 37787 - protein, 9 aa, Homo sapiens
  misc_feature: Table A; Target 37787; HLA-A*26:01; MAGEA11; ENSG00000185247; TAA
DSGDFGLQV

SEQ ID NO: 37788 - protein, 9 aa, Homo sapiens
  misc_feature: Table A; Target 37788; HLA-A*68:01; MAGEA11; ENSG00000185247; TAA
DSGDFGLQV

SEQ ID NO: 37789 - protein, 9 aa, Homo sapiens
  misc_feature: Table A; Target 37789; HLA-A*68:02; MAGEA11; ENSG00000185247; TAA
DSGDFGLQV

SEQ ID NO: 37790 - protein, 9 aa, Homo sapiens
  misc_feature: Table A; Target 37790; HLA-B*51:01; MAGEA11; ENSG00000185247; TAA
DSGDFGLQV

SEQ ID NO: 37791 - protein, 10 aa, Homo sapiens
  misc_feature: Table A; Target 37791; HLA-A*25:01; MAGEA11; ENSG00000185247; TAA
DVKEVDPTSH

SEQ ID NO: 37792 - protein, 10 aa, Homo sapiens
  misc_feature: Table A; Target 37792; HLA-A*26:01; MAGEA11; ENSG00000185247; TAA
DVKEVDPTSH

SEQ ID NO: 37793 - protein, 10 aa, Homo sapiens
  misc_feature: Table A; Target 37793; HLA-A*33:01; MAGEA11; ENSG00000185247; TAA
DVKEVDPTSH

SEQ ID NO: 37794 - protein, 10 aa, Homo sapiens
  misc_feature: Table A; Target 37794; HLA-A*68:01; MAGEA11; ENSG00000185247; TAA
DVKEVDPTSH

SEQ ID NO: 37795 - protein, 10 aa, Homo sapiens
  misc_feature: Table A; Target 37795; HLA-C*07:06; MAGEA11; ENSG00000185247; TAA
DVKEVDPTSH

SEQ ID NO: 37796 - protein, 10 aa, Homo sapiens
  misc_feature: Table A; Target 37796; HLA-B*54:01; MAGEA11; ENSG00000185247; TAA
DYFPEIFREA

SEQ ID NO: 37797 - protein, 9 aa, Homo sapiens
  misc_feature: Table A; Target 37797; HLA-A*25:01; MAGEA11; ENSG00000185247; TAA
EAAFFSSTL

SEQ ID NO: 37798 - protein, 9 aa, Homo sapiens
  misc_feature: Table A; Target 37798; HLA-A*26:01; MAGEA11; ENSG00000185247; TAA
EAAFFSSTL

SEQ ID NO: 37799 - protein, 9 aa, Homo sapiens
  misc_feature: Table A; Target 37799; HLA-A*33:01; MAGEA11; ENSG00000185247; TAA
EAAFFSSTL

SEQ ID NO: 37800 - protein, 9 aa, Homo sapiens
  misc_feature: Table A; Target 37800; HLA-A*33:03; MAGEA11; ENSG00000185247; TAA
EAAFFSSTL

SEQ ID NO: 37801 - protein, 9 aa, Homo sapiens
  misc_feature: Table A; Target 37801; HLA-A*68:01; MAGEA11; ENSG00000185247; TAA
EAAFFSSTL

SEQ ID NO: 37802 - protein, 9 aa, Homo sapiens
  misc_feature: Table A; Target 37802; HLA-A*68:02; MAGEA11; ENSG00000185247; TAA
EAAFFSSTL

SEQ ID NO: 37803 - protein, 9 aa, Homo sapiens
  misc_feature: Table A; Target 37803; HLA-B*07:02; MAGEA11; ENSG00000185247; TAA
EAAFFSSTL

SEQ ID NO: 37804 - protein, 9 aa, Homo sapiens
  misc_feature: Table A; Target 37804; HLA-B*08:01; MAGEA11; ENSG00000185247; TAA
EAAFFSSTL

SEQ ID NO: 37805 - protein, 9 aa, Homo sapiens
  misc_feature: Table A; Target 37805; HLA-B*27:05; MAGEA11; ENSG00000185247; TAA
EAAFFSSTL

SEQ ID NO: 37806 - protein, 9 aa, Homo sapiens
  misc_feature: Table A; Target 37806; HLA-B*35:01; MAGEA11; ENSG00000185247; TAA
EAAFFSSTL

SEQ ID NO: 37807 - protein, 9 aa, Homo sapiens
  misc_feature: Table A; Target 37807; HLA-B*35:03; MAGEA11; ENSG00000185247; TAA
EAAFFSSTL

SEQ ID NO: 37808 - protein, 9 aa, Homo sapiens
  misc_feature: Table A; Target 37808; HLA-B*38:01; MAGEA11; ENSG00000185247; TAA
EAAFFSSTL

SEQ ID NO: 37809 - protein, 9 aa, Homo sapiens
  misc_feature: Table A; Target 37809; HLA-B*39:01; MAGEA11; ENSG00000185247; TAA
EAAFFSSTL

SEQ ID NO: 37810 - protein, 9 aa, Homo sapiens
  misc_feature: Table A; Target 37810; HLA-B*40:02; MAGEA11; ENSG00000185247; TAA
EAAFFSSTL

SEQ ID NO: 37811 - protein, 9 aa, Homo sapiens
  misc_feature: Table A; Target 37811; HLA-B*51:01; MAGEA11; ENSG00000185247; TAA
EAAFFSSTL

SEQ ID NO: 37812 - protein, 9 aa, Homo sapiens
  misc_feature: Table A; Target 37812; HLA-C*01:02; MAGEA11; ENSG00000185247; TAA
EAAFFSSTL

SEQ ID NO: 37813 - protein, 9 aa, Homo sapiens
  misc_feature: Table A; Target 37813; HLA-C*02:02; MAGEA11; ENSG00000185247; TAA
EAAFFSSTL

SEQ ID NO: 37814 - protein, 9 aa, Homo sapiens
  misc_feature: Table A; Target 37814; HLA-C*03:03; MAGEA11; ENSG00000185247; TAA
EAAFFSSTL

SEQ ID NO: 37815 - protein, 9 aa, Homo sapiens
  misc_feature: Table A; Target 37815; HLA-C*03:04; MAGEA11; ENSG00000185247; TAA
EAAFFSSTL

SEQ ID NO: 37816 - protein, 9 aa, Homo sapiens
  misc_feature: Table A; Target 37816; HLA-C*05:01; MAGEA11; ENSG00000185247; TAA
EAAFFSSTL

SEQ ID NO: 37817 - protein, 9 aa, Homo sapiens
  misc_feature: Table A; Target 37817; HLA-C*07:02; MAGEA11; ENSG00000185247; TAA
EAAFFSSTL

SEQ ID NO: 37818 - protein, 9 aa, Homo sapiens
  misc_feature: Table A; Target 37818; HLA-C*07:06; MAGEA11; ENSG00000185247; TAA
EAAFFSSTL

SEQ ID NO: 37819 - protein, 9 aa, Homo sapiens
  misc_feature: Table A; Target 37819; HLA-C*12:03; MAGEA11; ENSG00000185247; TAA
EAAFFSSTL

SEQ ID NO: 37820 - protein, 9 aa, Homo sapiens
  misc_feature: Table A; Target 37820; HLA-C*16:04; MAGEA11; ENSG00000185247; TAA
EAAFFSSTL

SEQ ID NO: 37821 - protein, 9 aa, Homo sapiens
  misc_feature: Table A; Target 37821; HLA-A*33:03; MAGEA11; ENSG00000185247; TAA
EDDFQSTER

SEQ ID NO: 37822 - protein, 9 aa, Homo sapiens
  misc_feature: Table A; Target 37822; HLA-A*68:01; MAGEA11; ENSG00000185247; TAA
EDDFQSTER

SEQ ID NO: 37823 - protein, 9 aa, Homo sapiens
  misc_feature: Table A; Target 37823; HLA-C*07:06; MAGEA11; ENSG00000185247; TAA
EDDFQSTER

SEQ ID NO: 37824 - protein, 11 aa, Homo sapiens
  misc_feature: Table A; Target 37824; HLA-A*30:01; MAGEA11; ENSG00000185247; TAA
EDLGLVGAQAL

SEQ ID NO: 37825 - protein, 11 aa, Homo sapiens
  misc_feature: Table A; Target 37825; HLA-B*44:02; MAGEA11; ENSG00000185247; TAA
EDLGLVGAQAL

SEQ ID NO: 37826 - protein, 11 aa, Homo sapiens
  misc_feature: Table A; Target 37826; HLA-B*44:03; MAGEA11; ENSG00000185247; TAA
EDLGLVGAQAL

SEQ ID NO: 37827 - protein, 11 aa, Homo sapiens
  misc_feature: Table A; Target 37827; HLA-C*07:01; MAGEA11; ENSG00000185247; TAA
EDLGLVGAQAL

SEQ ID NO: 37828 - protein, 10 aa, Homo sapiens
  misc_feature: Table A; Target 37828; HLA-A*68:02; MAGEA11; ENSG00000185247; TAA
EDSGDFGLQV

SEQ ID NO: 37829 - protein, 9 aa, Homo sapiens
  misc_feature: Table A; Target 37829; HLA-A*33:01; MAGEA11; ENSG00000185247; TAA
EDYFPEIFR

SEQ ID NO: 37830 - protein, 9 aa, Homo sapiens
  misc_feature: Table A; Target 37830; HLA-A*68:02; MAGEA11; ENSG00000185247; TAA
EDYFPEIFR

SEQ ID NO: 37831 - protein, 9 aa, Homo sapiens
  misc_feature: Table A; Target 37831; HLA-B*49:01; MAGEA11; ENSG00000185247; TAA
EEDLGLVGA

SEQ ID NO: 37832 - protein, 9 aa, Homo sapiens
  misc_feature: Table A; Target 37832; HLA-B*40:02; MAGEA11; ENSG00000185247; TAA
EELPAAESP

SEQ ID NO: 37833 - protein, 8 aa, Homo sapiens
  misc_feature: Table A; Target 37833; HLA-B*18:01; MAGEA11; ENSG00000185247; TAA
EEQEAAFF

SEQ ID NO: 37834 - protein, 8 aa, Homo sapiens
  misc_feature: Table A; Target 37834; HLA-B*37:01; MAGEA11; ENSG00000185247; TAA
EEQEAAFF

SEQ ID NO: 37835 - protein, 8 aa, Homo sapiens
  misc_feature: Table A; Target 37835; HLA-B*44:02; MAGEA11; ENSG00000185247; TAA
EEQEAAFF

SEQ ID NO: 37836 - protein, 8 aa, Homo sapiens
  misc_feature: Table A; Target 37836; HLA-B*44:03; MAGEA11; ENSG00000185247; TAA
EEQEAAFF

SEQ ID NO: 37837 - protein, 8 aa, Homo sapiens
  misc_feature: Table A; Target 37837; HLA-B*18:01; MAGEA11; ENSG00000185247; TAA
EESFSPTA

SEQ ID NO: 37838 - protein, 9 aa, Homo sapiens
  misc_feature: Table A; Target 37838; HLA-A*30:01; MAGEA11; ENSG00000185247; TAA
EESFSPTAM

SEQ ID NO: 37839 - protein, 9 aa, Homo sapiens
  misc_feature: Table A; Target 37839; HLA-B*18:01; MAGEA11; ENSG00000185247; TAA
EESFSPTAM

SEQ ID NO: 37840 - protein, 9 aa, Homo sapiens
  misc_feature: Table A; Target 37840; HLA-B*37:01; MAGEA11; ENSG00000185247; TAA
EESFSPTAM

SEQ ID NO: 37841 - protein, 9 aa, Homo sapiens
  misc_feature: Table A; Target 37841; HLA-B*39:01; MAGEA11; ENSG00000185247; TAA
EESFSPTAM

SEQ ID NO: 37842 - protein, 9 aa, Homo sapiens
  misc_feature: Table A; Target 37842; HLA-B*40:01; MAGEA11; ENSG00000185247; TAA
EESFSPTAM

SEQ ID NO: 37843 - protein, 9 aa, Homo sapiens
  misc_feature: Table A; Target 37843; HLA-B*44:03; MAGEA11; ENSG00000185247; TAA
EESFSPTAM

SEQ ID NO: 37844 - protein, 9 aa, Homo sapiens
  misc_feature: Table A; Target 37844; HLA-C*16:04; MAGEA11; ENSG00000185247; TAA
EESFSPTAM

SEQ ID NO: 37845 - protein, 10 aa, Homo sapiens
  misc_feature: Table A; Target 37845; HLA-A*26:01; MAGEA11; ENSG00000185247; TAA
EIFREASVCM

SEQ ID NO: 37846 - protein, 10 aa, Homo sapiens
  misc_feature: Table A; Target 37846; HLA-A*25:01; MAGEA11; ENSG00000185247; TAA
EMLGSVIKNY

SEQ ID NO: 37847 - protein, 10 aa, Homo sapiens
  misc_feature: Table A; Target 37847; HLA-A*26:01; MAGEA11; ENSG00000185247; TAA
EMLGSVIKNY

SEQ ID NO: 37848 - protein, 10 aa, Homo sapiens
  misc_feature: Table A; Target 37848; HLA-A*29:02; MAGEA11; ENSG00000185247; TAA
EMLGSVIKNY

SEQ ID NO: 37849 - protein, 10 aa, Homo sapiens
  misc_feature: Table A; Target 37849; HLA-A*30:02; MAGEA11; ENSG00000185247; TAA
EMLGSVIKNY

SEQ ID NO: 37850 - protein, 10 aa, Homo sapiens
  misc_feature: Table A; Target 37850; HLA-A*33:01; MAGEA11; ENSG00000185247; TAA
EMLGSVIKNY

SEQ ID NO: 37851 - protein, 10 aa, Homo sapiens
  misc_feature: Table A; Target 37851; HLA-A*33:03; MAGEA11; ENSG00000185247; TAA
EMLGSVIKNY

SEQ ID NO: 37852 - protein, 10 aa, Homo sapiens
  misc_feature: Table A; Target 37852; HLA-B*44:02; MAGEA11; ENSG00000185247; TAA
EMLGSVIKNY

SEQ ID NO: 37853 - protein, 10 aa, Homo sapiens
  misc_feature: Table A; Target 37853; HLA-B*44:03; MAGEA11; ENSG00000185247; TAA
EMLGSVIKNY

SEQ ID NO: 37854 - protein, 10 aa, Homo sapiens
  misc_feature: Table A; Target 37854; HLA-C*07:06; MAGEA11; ENSG00000185247; TAA
EMLGSVIKNY

SEQ ID NO: 37855 - protein, 11 aa, Homo sapiens
  misc_feature: Table A; Target 37855; HLA-B*38:01; MAGEA11; ENSG00000185247; TAA
EQEAAFFSSTL

SEQ ID NO: 37856 - protein, 9 aa, Homo sapiens
  misc_feature: Table A; Target 37856; HLA-B*38:01; MAGEA11; ENSG00000185247; TAA
EQSMPKSGL

SEQ ID NO: 37857 - protein, 9 aa, Homo sapiens
  misc_feature: Table A; Target 37857; HLA-B*39:01; MAGEA11; ENSG00000185247; TAA
EQSMPKSGL

SEQ ID NO: 37858 - protein, 9 aa, Homo sapiens
  misc_feature: Table A; Target 37858; HLA-B*27:02; MAGEA11; ENSG00000185247; TAA
ERAPYGPQL

SEQ ID NO: 37859 - protein, 9 aa, Homo sapiens
  misc_feature: Table A; Target 37859; HLA-B*27:05; MAGEA11; ENSG00000185247; TAA
ERAPYGPQL

SEQ ID NO: 37860 - protein, 9 aa, Homo sapiens
  misc_feature: Table A; Target 37860; HLA-B*38:01; MAGEA11; ENSG00000185247; TAA
ERAPYGPQL

SEQ ID NO: 37861 - protein, 9 aa, Homo sapiens
  misc_feature: Table A; Target 37861; HLA-B*39:01; MAGEA11; ENSG00000185247; TAA
ERAPYGPQL

SEQ ID NO: 37862 - protein, 9 aa, Homo sapiens
  misc_feature: Table A; Target 37862; HLA-C*06:02; MAGEA11; ENSG00000185247; TAA
ERAPYGPQL

SEQ ID NO: 37863 - protein, 9 aa, Homo sapiens
  misc_feature: Table A; Target 37863; HLA-C*07:04; MAGEA11; ENSG00000185247; TAA
ERAPYGPQL

SEQ ID NO: 37864 - protein, 9 aa, Homo sapiens
  misc_feature: Table A; Target 37864; HLA-C*16:04; MAGEA11; ENSG00000185247; TAA
ERAPYGPQL

SEQ ID NO: 37865 - protein, 11 aa, Homo sapiens
  misc_feature: Table A; Target 37865; HLA-B*44:02; MAGEA11; ENSG00000185247; TAA
ERAPYGPQLQW

SEQ ID NO: 37866 - protein, 8 aa, Homo sapiens
  misc_feature: Table A; Target 37866; HLA-A*26:01; MAGEA11; ENSG00000185247; TAA
ESFSPTAM

SEQ ID NO: 37867 - protein, 8 aa, Homo sapiens
  misc_feature: Table A; Target 37867; HLA-C*05:01; MAGEA11; ENSG00000185247; TAA
ESFSPTAM

SEQ ID NO: 37868 - protein, 11 aa, Homo sapiens
  misc_feature: Table A; Target 37868; HLA-A*68:01; MAGEA11; ENSG00000185247; TAA
ESFSQDILHDK

SEQ ID NO: 37869 - protein, 10 aa, Homo sapiens
  misc_feature: Table A; Target 37869; HLA-A*01:01; MAGEA11; ENSG00000185247; TAA
ETSKMKVLEY

SEQ ID NO: 37870 - protein, 10 aa, Homo sapiens
  misc_feature: Table A; Target 37870; HLA-A*25:01; MAGEA11; ENSG00000185247; TAA
ETSKMKVLEY

SEQ ID NO: 37871 - protein, 10 aa, Homo sapiens
  misc_feature: Table A; Target 37871; HLA-A*26:01; MAGEA11; ENSG00000185247; TAA
ETSKMKVLEY

SEQ ID NO: 37872 - protein, 9 aa, Homo sapiens
  misc_feature: Table A; Target 37872; HLA-A*01:01; MAGEA11; ENSG00000185247; TAA
EVDPTSHSY

SEQ ID NO: 37873 - protein, 9 aa, Homo sapiens
  misc_feature: Table A; Target 37873; HLA-A*11:01; MAGEA11; ENSG00000185247; TAA
EVDPTSHSY

SEQ ID NO: 37874 - protein, 9 aa, Homo sapiens
  misc_feature: Table A; Target 37874; HLA-A*25:01; MAGEA11; ENSG00000185247; TAA
EVDPTSHSY

SEQ ID NO: 37875 - protein, 9 aa, Homo sapiens
  misc_feature: Table A; Target 37875; HLA-A*26:01; MAGEA11; ENSG00000185247; TAA
EVDPTSHSY

SEQ ID NO: 37876 - protein, 9 aa, Homo sapiens
  misc_feature: Table A; Target 37876; HLA-A*29:02; MAGEA11; ENSG00000185247; TAA
EVDPTSHSY

SEQ ID NO: 37877 - protein, 9 aa, Homo sapiens
  misc_feature: Table A; Target 37877; HLA-A*30:02; MAGEA11; ENSG00000185247; TAA
EVDPTSHSY

SEQ ID NO: 37878 - protein, 9 aa, Homo sapiens
  misc_feature: Table A; Target 37878; HLA-A*32:01; MAGEA11; ENSG00000185247; TAA
EVDPTSHSY

SEQ ID NO: 37879 - protein, 9 aa, Homo sapiens
  misc_feature: Table A; Target 37879; HLA-A*33:03; MAGEA11; ENSG00000185247; TAA
EVDPTSHSY

SEQ ID NO: 37880 - protein, 9 aa, Homo sapiens
  misc_feature: Table A; Target 37880; HLA-A*68:01; MAGEA11; ENSG00000185247; TAA
EVDPTSHSY

SEQ ID NO: 37881 - protein, 9 aa, Homo sapiens
  misc_feature: Table A; Target 37881; HLA-B*15:01; MAGEA11; ENSG00000185247; TAA
EVDPTSHSY

SEQ ID NO: 37882 - protein, 9 aa, Homo sapiens
  misc_feature: Table A; Target 37882; HLA-B*15:03; MAGEA11; ENSG00000185247; TAA
EVDPTSHSY

SEQ ID NO: 37883 - protein, 9 aa, Homo sapiens
  misc_feature: Table A; Target 37883; HLA-B*18:01; MAGEA11; ENSG00000185247; TAA
EVDPTSHSY

SEQ ID NO: 37884 - protein, 9 aa, Homo sapiens
  misc_feature: Table A; Target 37884; HLA-B*27:05; MAGEA11; ENSG00000185247; TAA
EVDPTSHSY

SEQ ID NO: 37885 - protein, 9 aa, Homo sapiens
  misc_feature: Table A; Target 37885; HLA-B*35:01; MAGEA11; ENSG00000185247; TAA
EVDPTSHSY

SEQ ID NO: 37886 - protein, 9 aa, Homo sapiens
  misc_feature: Table A; Target 37886; HLA-B*38:01; MAGEA11; ENSG00000185247; TAA
EVDPTSHSY

SEQ ID NO: 37887 - protein, 9 aa, Homo sapiens
  misc_feature: Table A; Target 37887; HLA-B*39:01; MAGEA11; ENSG00000185247; TAA
EVDPTSHSY

SEQ ID NO: 37888 - protein, 9 aa, Homo sapiens
  misc_feature: Table A; Target 37888; HLA-B*44:02; MAGEA11; ENSG00000185247; TAA
EVDPTSHSY

SEQ ID NO: 37889 - protein, 9 aa, Homo sapiens
  misc_feature: Table A; Target 37889; HLA-B*44:03; MAGEA11; ENSG00000185247; TAA
EVDPTSHSY

SEQ ID NO: 37890 - protein, 9 aa, Homo sapiens
  misc_feature: Table A; Target 37890; HLA-B*46:01; MAGEA11; ENSG00000185247; TAA
EVDPTSHSY

SEQ ID NO: 37891 - protein, 9 aa, Homo sapiens
  misc_feature: Table A; Target 37891; HLA-B*55:01; MAGEA11; ENSG00000185247; TAA
EVDPTSHSY

SEQ ID NO: 37892 - protein, 9 aa, Homo sapiens
  misc_feature: Table A; Target 37892; HLA-B*58:01; MAGEA11; ENSG00000185247; TAA
EVDPTSHSY

SEQ ID NO: 37893 - protein, 9 aa, Homo sapiens
  misc_feature: Table A; Target 37893; HLA-C*02:02; MAGEA11; ENSG00000185247; TAA
EVDPTSHSY

SEQ ID NO: 37894 - protein, 9 aa, Homo sapiens
  misc_feature: Table A; Target 37894; HLA-C*03:03; MAGEA11; ENSG00000185247; TAA
EVDPTSHSY

SEQ ID NO: 37895 - protein, 9 aa, Homo sapiens
  misc_feature: Table A; Target 37895; HLA-C*05:01; MAGEA11; ENSG00000185247; TAA
EVDPTSHSY

SEQ ID NO: 37896 - protein, 9 aa, Homo sapiens
  misc_feature: Table A; Target 37896; HLA-C*07:04; MAGEA11; ENSG00000185247; TAA
EVDPTSHSY

SEQ ID NO: 37897 - protein, 9 aa, Homo sapiens
  misc_feature: Table A; Target 37897; HLA-C*07:06; MAGEA11; ENSG00000185247; TAA
EVDPTSHSY

SEQ ID NO: 37898 - protein, 9 aa, Homo sapiens
  misc_feature: Table A; Target 37898; HLA-C*16:01; MAGEA11; ENSG00000185247; TAA
EVDPTSHSY

SEQ ID NO: 37899 - protein, 9 aa, Homo sapiens
  misc_feature: Table A; Target 37899; HLA-C*16:02; MAGEA11; ENSG00000185247; TAA
EVDPTSHSY

SEQ ID NO: 37900 - protein, 9 aa, Homo sapiens
  misc_feature: Table A; Target 37900; HLA-C*16:04; MAGEA11; ENSG00000185247; TAA
EVDPTSHSY

SEQ ID NO: 37901 - protein, 10 aa, Homo sapiens
  misc_feature: Table A; Target 37901; HLA-A*01:01; MAGEA11; ENSG00000185247; TAA
EVDPTSHSYV

SEQ ID NO: 37902 - protein, 10 aa, Homo sapiens
  misc_feature: Table A; Target 37902; HLA-A*26:01; MAGEA11; ENSG00000185247; TAA
EVDPTSHSYV

SEQ ID NO: 37903 - protein, 10 aa, Homo sapiens
  misc_feature: Table A; Target 37903; HLA-A*68:02; MAGEA11; ENSG00000185247; TAA
EVDPTSHSYV

SEQ ID NO: 37904 - protein, 10 aa, Homo sapiens
  misc_feature: Table A; Target 37904; HLA-C*05:01; MAGEA11; ENSG00000185247; TAA
EVDPTSHSYV

SEQ ID NO: 37905 - protein, 11 aa, Homo sapiens
  misc_feature: Table A; Target 37905; HLA-A*01:01; MAGEA11; ENSG00000185247; TAA
EVDPTSHSYVL

SEQ ID NO: 37906 - protein, 11 aa, Homo sapiens
  misc_feature: Table A; Target 37906; HLA-A*02:07; MAGEA11; ENSG00000185247; TAA
EVDPTSHSYVL

SEQ ID NO: 37907 - protein, 11 aa, Homo sapiens
  misc_feature: Table A; Target 37907; HLA-A*68:02; MAGEA11; ENSG00000185247; TAA
EVDPTSHSYVL

SEQ ID NO: 37908 - protein, 11 aa, Homo sapiens
  misc_feature: Table A; Target 37908; HLA-B*35:03; MAGEA11; ENSG00000185247; TAA
EVDPTSHSYVL

SEQ ID NO: 37909 - protein, 11 aa, Homo sapiens
  misc_feature: Table A; Target 37909; HLA-B*38:01; MAGEA11; ENSG00000185247; TAA
EVDPTSHSYVL

SEQ ID NO: 37910 - protein, 11 aa, Homo sapiens
  misc_feature: Table A; Target 37910; HLA-B*39:01; MAGEA11; ENSG00000185247; TAA
EVDPTSHSYVL

SEQ ID NO: 37911 - protein, 11 aa, Homo sapiens
  misc_feature: Table A; Target 37911; HLA-C*05:01; MAGEA11; ENSG00000185247; TAA
EVDPTSHSYVL

SEQ ID NO: 37912 - protein, 8 aa, Homo sapiens
  misc_feature: Table A; Target 37912; HLA-A*26:01; MAGEA11; ENSG00000185247; TAA
EVLSIMGV

SEQ ID NO: 37913 - protein, 9 aa, Homo sapiens
  misc_feature: Table A; Target 37913; HLA-A*25:01; MAGEA11; ENSG00000185247; TAA
EVLSIMGVY

SEQ ID NO: 37914 - protein, 9 aa, Homo sapiens
  misc_feature: Table A; Target 37914; HLA-A*26:01; MAGEA11; ENSG00000185247; TAA
EVLSIMGVY

SEQ ID NO: 37915 - protein, 9 aa, Homo sapiens
  misc_feature: Table A; Target 37915; HLA-A*29:02; MAGEA11; ENSG00000185247; TAA
EVLSIMGVY

SEQ ID NO: 37916 - protein, 9 aa, Homo sapiens
  misc_feature: Table A; Target 37916; HLA-A*30:02; MAGEA11; ENSG00000185247; TAA
EVLSIMGVY

SEQ ID NO: 37917 - protein, 9 aa, Homo sapiens
  misc_feature: Table A; Target 37917; HLA-A*33:01; MAGEA11; ENSG00000185247; TAA
EVLSIMGVY

SEQ ID NO: 37918 - protein, 9 aa, Homo sapiens
  misc_feature: Table A; Target 37918; HLA-A*33:03; MAGEA11; ENSG00000185247; TAA
EVLSIMGVY

SEQ ID NO: 37919 - protein, 9 aa, Homo sapiens
  misc_feature: Table A; Target 37919; HLA-B*18:01; MAGEA11; ENSG00000185247; TAA
EVLSIMGVY

SEQ ID NO: 37920 - protein, 9 aa, Homo sapiens
  misc_feature: Table A; Target 37920; HLA-B*35:01; MAGEA11; ENSG00000185247; TAA
EVLSIMGVY

SEQ ID NO: 37921 - protein, 9 aa, Homo sapiens
  misc_feature: Table A; Target 37921; HLA-B*44:03; MAGEA11; ENSG00000185247; TAA
EVLSIMGVY

SEQ ID NO: 37922 - protein, 9 aa, Homo sapiens
  misc_feature: Table A; Target 37922; HLA-C*07:06; MAGEA11; ENSG00000185247; TAA
EVLSIMGVY

SEQ ID NO: 37923 - protein, 10 aa, Homo sapiens
  misc_feature: Table A; Target 37923; HLA-A*26:01; MAGEA11; ENSG00000185247; TAA
EVLSIMGVYA

SEQ ID NO: 37924 - protein, 10 aa, Homo sapiens
  misc_feature: Table A; Target 37924; HLA-A*68:02; MAGEA11; ENSG00000185247; TAA
EVLSIMGVYA

SEQ ID NO: 37925 - protein, 10 aa, Homo sapiens
  misc_feature: Table A; Target 37925; HLA-B*54:01; MAGEA11; ENSG00000185247; TAA
EVLSIMGVYA

SEQ ID NO: 37926 - protein, 9 aa, Homo sapiens
  misc_feature: Table A; Target 37926; HLA-A*25:01; MAGEA11; ENSG00000185247; TAA
EVMWEVLSI

SEQ ID NO: 37927 - protein, 9 aa, Homo sapiens
  misc_feature: Table A; Target 37927; HLA-A*26:01; MAGEA11; ENSG00000185247; TAA
EVMWEVLSI

SEQ ID NO: 37928 - protein, 9 aa, Homo sapiens
  misc_feature: Table A; Target 37928; HLA-A*68:02; MAGEA11; ENSG00000185247; TAA
EVMWEVLSI

SEQ ID NO: 37929 - protein, 10 aa, Homo sapiens
  misc_feature: Table A; Target 37929; HLA-A*26:01; MAGEA11; ENSG00000185247; TAA
EVMWEVLSIM

SEQ ID NO: 37930 - protein, 9 aa, Homo sapiens
  misc_feature: Table A; Target 37930; HLA-A*33:01; MAGEA11; ENSG00000185247; TAA
EYIANANGR

SEQ ID NO: 37931 - protein, 9 aa, Homo sapiens
  misc_feature: Table A; Target 37931; HLA-A*33:03; MAGEA11; ENSG00000185247; TAA
EYIANANGR

SEQ ID NO: 37932 - protein, 9 aa, Homo sapiens
  misc_feature: Table A; Target 37932; HLA-A*68:01; MAGEA11; ENSG00000185247; TAA
EYIANANGR

SEQ ID NO: 37933 - protein, 9 aa, Homo sapiens
  misc_feature: Table A; Target 37933; HLA-C*07:06; MAGEA11; ENSG00000185247; TAA
EYIANANGR

SEQ ID NO: 37934 - protein, 8 aa, Homo sapiens
  misc_feature: Table A; Target 37934; HLA-C*03:04; MAGEA11; ENSG00000185247; TAA
FGIDVKEV

SEQ ID NO: 37935 - protein, 8 aa, Homo sapiens
  misc_feature: Table A; Target 37935; HLA-B*08:01; MAGEA11; ENSG00000185247; TAA
FGLQVSTM

SEQ ID NO: 37936 - protein, 8 aa, Homo sapiens
  misc_feature: Table A; Target 37936; HLA-B*46:01; MAGEA11; ENSG00000185247; TAA
FGLQVSTM

SEQ ID NO: 37937 - protein, 8 aa, Homo sapiens
  misc_feature: Table A; Target 37937; HLA-B*51:01; MAGEA11; ENSG00000185247; TAA
FGLQVSTM

SEQ ID NO: 37938 - protein, 8 aa, Homo sapiens
  misc_feature: Table A; Target 37938; HLA-C*03:03; MAGEA11; ENSG00000185247; TAA
FGLQVSTM

SEQ ID NO: 37939 - protein, 8 aa, Homo sapiens
  misc_feature: Table A; Target 37939; HLA-C*03:04; MAGEA11; ENSG00000185247; TAA
FGLQVSTM

SEQ ID NO: 37940 - protein, 8 aa, Homo sapiens
  misc_feature: Table A; Target 37940; HLA-C*14:02; MAGEA11; ENSG00000185247; TAA
FGLQVSTM

SEQ ID NO: 37941 - protein, 9 aa, Homo sapiens
  misc_feature: Table A; Target 37941; HLA-A*23:01; MAGEA11; ENSG00000185247; TAA
FGLQVSTMF

SEQ ID NO: 37942 - protein, 9 aa, Homo sapiens
  misc_feature: Table A; Target 37942; HLA-B*46:01; MAGEA11; ENSG00000185247; TAA
FGLQVSTMF

SEQ ID NO: 37943 - protein, 9 aa, Homo sapiens
  misc_feature: Table A; Target 37943; HLA-C*02:02; MAGEA11; ENSG00000185247; TAA
FGLQVSTMF

SEQ ID NO: 37944 - protein, 9 aa, Homo sapiens
  misc_feature: Table A; Target 37944; HLA-C*04:01; MAGEA11; ENSG00000185247; TAA
FGLQVSTMF

SEQ ID NO: 37945 - protein, 9 aa, Homo sapiens
  misc_feature: Table A; Target 37945; HLA-C*14:02; MAGEA11; ENSG00000185247; TAA
FGLQVSTMF

SEQ ID NO: 37946 - protein, 9 aa, Homo sapiens
  misc_feature: Table A; Target 37946; HLA-C*16:04; MAGEA11; ENSG00000185247; TAA
FGLQVSTMF

SEQ ID NO: 37947 - protein, 9 aa, Homo sapiens
  misc_feature: Table A; Target 37947; HLA-A*02:01; MAGEA11; ENSG00000185247; TAA
FLFGEPKRL

SEQ ID NO: 37948 - protein, 9 aa, Homo sapiens
  misc_feature: Table A; Target 37948; HLA-A*02:03; MAGEA11; ENSG00000185247; TAA
FLFGEPKRL

SEQ ID NO: 37949 - protein, 9 aa, Homo sapiens
  misc_feature: Table A; Target 37949; HLA-A*02:04; MAGEA11; ENSG00000185247; TAA
FLFGEPKRL

SEQ ID NO: 37950 - protein, 9 aa, Homo sapiens
  misc_feature: Table A; Target 37950; HLA-A*02:07; MAGEA11; ENSG00000185247; TAA
FLFGEPKRL

SEQ ID NO: 37951 - protein, 10 aa, Homo sapiens
  misc_feature: Table A; Target 37951; HLA-A*02:01; MAGEA11; ENSG00000185247; TAA
FLFGEPKRLL

SEQ ID NO: 37952 - protein, 10 aa, Homo sapiens
  misc_feature: Table A; Target 37952; HLA-A*02:03; MAGEA11; ENSG00000185247; TAA
FLFGEPKRLL

SEQ ID NO: 37953 - protein, 10 aa, Homo sapiens
  misc_feature: Table A; Target 37953; HLA-A*02:04; MAGEA11; ENSG00000185247; TAA
FLFGEPKRLL

SEQ ID NO: 37954 - protein, 11 aa, Homo sapiens
  misc_feature: Table A; Target 37954; HLA-A*02:01; MAGEA11; ENSG00000185247; TAA
FLFGEPKRLLT

SEQ ID NO: 37955 - protein, 8 aa, Homo sapiens
  misc_feature: Table A; Target 37955; HLA-B*54:01; MAGEA11; ENSG00000185247; TAA
FPEIFREA

SEQ ID NO: 37956 - protein, 8 aa, Homo sapiens
  misc_feature: Table A; Target 37956; HLA-B*55:01; MAGEA11; ENSG00000185247; TAA
FPEIFREA

SEQ ID NO: 37957 - protein, 8 aa, Homo sapiens
  misc_feature: Table A; Target 37957; HLA-B*56:01; MAGEA11; ENSG00000185247; TAA
FPEIFREA

SEQ ID NO: 37958 - protein, 10 aa, Homo sapiens
  misc_feature: Table A; Target 37958; HLA-B*51:01; MAGEA11; ENSG00000185247; TAA
FPEIFREASV

SEQ ID NO: 37959 - protein, 10 aa, Homo sapiens
  misc_feature: Table A; Target 37959; HLA-B*54:01; MAGEA11; ENSG00000185247; TAA
FPEIFREASV

SEQ ID NO: 37960 - protein, 10 aa, Homo sapiens
  misc_feature: Table A; Target 37960; HLA-B*56:01; MAGEA11; ENSG00000185247; TAA
FPEIFREASV

SEQ ID NO: 37961 - protein, 9 aa, Homo sapiens
  misc_feature: Table A; Target 37961; HLA-B*07:02; MAGEA11; ENSG00000185247; TAA
FPTVRPADL

SEQ ID NO: 37962 - protein, 9 aa, Homo sapiens
  misc_feature: Table A; Target 37962; HLA-B*08:01; MAGEA11; ENSG00000185247; TAA
FPTVRPADL

SEQ ID NO: 37963 - protein, 9 aa, Homo sapiens
  misc_feature: Table A; Target 37963; HLA-B*35:01; MAGEA11; ENSG00000185247; TAA
FPTVRPADL

SEQ ID NO: 37964 - protein, 9 aa, Homo sapiens
  misc_feature: Table A; Target 37964; HLA-B*35:03; MAGEA11; ENSG00000185247; TAA
FPTVRPADL

SEQ ID NO: 37965 - protein, 9 aa, Homo sapiens
  misc_feature: Table A; Target 37965; HLA-C*07:02; MAGEA11; ENSG00000185247; TAA
FPTVRPADL

SEQ ID NO: 37966 - protein, 9 aa, Homo sapiens
  misc_feature: Table A; Target 37966; HLA-A*01:01; MAGEA11; ENSG00000185247; TAA
FQSTERAPY

SEQ ID NO: 37967 - protein, 9 aa, Homo sapiens
  misc_feature: Table A; Target 37967; HLA-A*29:02; MAGEA11; ENSG00000185247; TAA
FQSTERAPY

SEQ ID NO: 37968 - protein, 9 aa, Homo sapiens
  misc_feature: Table A; Target 37968; HLA-A*30:02; MAGEA11; ENSG00000185247; TAA
FQSTERAPY

SEQ ID NO: 37969 - protein, 9 aa, Homo sapiens
  misc_feature: Table A; Target 37969; HLA-A*32:01; MAGEA11; ENSG00000185247; TAA
FQSTERAPY

SEQ ID NO: 37970 - protein, 9 aa, Homo sapiens
  misc_feature: Table A; Target 37970; HLA-B*15:01; MAGEA11; ENSG00000185247; TAA
FQSTERAPY

SEQ ID NO: 37971 - protein, 9 aa, Homo sapiens
  misc_feature: Table A; Target 37971; HLA-B*15:03; MAGEA11; ENSG00000185247; TAA
FQSTERAPY

SEQ ID NO: 37972 - protein, 9 aa, Homo sapiens
  misc_feature: Table A; Target 37972; HLA-B*46:01; MAGEA11; ENSG00000185247; TAA
FQSTERAPY

SEQ ID NO: 37973 - protein, 9 aa, Homo sapiens
  misc_feature: Table A; Target 37973; HLA-C*02:02; MAGEA11; ENSG00000185247; TAA
FQSTERAPY

SEQ ID NO: 37974 - protein, 9 aa, Homo sapiens
  misc_feature: Table A; Target 37974; HLA-C*03:03; MAGEA11; ENSG00000185247; TAA
FQSTERAPY

SEQ ID NO: 37975 - protein, 9 aa, Homo sapiens
  misc_feature: Table A; Target 37975; HLA-C*07:04; MAGEA11; ENSG00000185247; TAA
FQSTERAPY

SEQ ID NO: 37976 - protein, 9 aa, Homo sapiens
  misc_feature: Table A; Target 37976; HLA-C*16:01; MAGEA11; ENSG00000185247; TAA
FQSTERAPY

SEQ ID NO: 37977 - protein, 9 aa, Homo sapiens
  misc_feature: Table A; Target 37977; HLA-C*01:02; MAGEA11; ENSG00000185247; TAA
FSPTAMDAI

SEQ ID NO: 37978 - protein, 9 aa, Homo sapiens
  misc_feature: Table A; Target 37978; HLA-A*11:01; MAGEA11; ENSG00000185247; TAA
FSQDILHDK

SEQ ID NO: 37979 - protein, 9 aa, Homo sapiens
  misc_feature: Table A; Target 37979; HLA-A*33:01; MAGEA11; ENSG00000185247; TAA
FSQDILHDK

SEQ ID NO: 37980 - protein, 9 aa, Homo sapiens
  misc_feature: Table A; Target 37980; HLA-A*03:01; MAGEA11; ENSG00000185247; TAA
GCSPASIKR

SEQ ID NO: 37981 - protein, 9 aa, Homo sapiens
  misc_feature: Table A; Target 37981; HLA-A*03:02; MAGEA11; ENSG00000185247; TAA
GCSPASIKR

SEQ ID NO: 37982 - protein, 9 aa, Homo sapiens
  misc_feature: Table A; Target 37982; HLA-A*11:01; MAGEA11; ENSG00000185247; TAA
GCSPASIKR

SEQ ID NO: 37983 - protein, 9 aa, Homo sapiens
  misc_feature: Table A; Target 37983; HLA-A*31:01; MAGEA11; ENSG00000185247; TAA
GCSPASIKR

SEQ ID NO: 37984 - protein, 9 aa, Homo sapiens
  misc_feature: Table A; Target 37984; HLA-A*68:01; MAGEA11; ENSG00000185247; TAA
GCSPASIKR

SEQ ID NO: 37985 - protein, 9 aa, Homo sapiens
  misc_feature: Table A; Target 37985; HLA-B*27:05; MAGEA11; ENSG00000185247; TAA
GCSPASIKR

SEQ ID NO: 37986 - protein, 9 aa, Homo sapiens
  misc_feature: Table A; Target 37986; HLA-C*07:06; MAGEA11; ENSG00000185247; TAA
GCSPASIKR

SEQ ID NO: 37987 - protein, 10 aa, Homo sapiens
  misc_feature: Table A; Target 37987; HLA-A*03:01; MAGEA11; ENSG00000185247; TAA
GCSPASIKRK

SEQ ID NO: 37988 - protein, 10 aa, Homo sapiens
  misc_feature: Table A; Target 37988; HLA-A*03:02; MAGEA11; ENSG00000185247; TAA
GCSPASIKRK

SEQ ID NO: 37989 - protein, 10 aa, Homo sapiens
  misc_feature: Table A; Target 37989; HLA-A*11:01; MAGEA11; ENSG00000185247; TAA
GCSPASIKRK

SEQ ID NO: 37990 - protein, 10 aa, Homo sapiens
  misc_feature: Table A; Target 37990; HLA-A*30:01; MAGEA11; ENSG00000185247; TAA
GDFGLQVSTM

SEQ ID NO: 37991 - protein, 10 aa, Homo sapiens
  misc_feature: Table A; Target 37991; HLA-B*37:01; MAGEA11; ENSG00000185247; TAA
GDFGLQVSTM

SEQ ID NO: 37992 - protein, 10 aa, Homo sapiens
  misc_feature: Table A; Target 37992; HLA-B*40:02; MAGEA11; ENSG00000185247; TAA
GDFGLQVSTM

SEQ ID NO: 37993 - protein, 10 aa, Homo sapiens
  misc_feature: Table A; Target 37993; HLA-C*07:04; MAGEA11; ENSG00000185247; TAA
GDFGLQVSTM

SEQ ID NO: 37994 - protein, 11 aa, Homo sapiens
  misc_feature: Table A; Target 37994; HLA-B*44:02; MAGEA11; ENSG00000185247; TAA
GEPKRLLTQNW

SEQ ID NO: 37995 - protein, 9 aa, Homo sapiens
  misc_feature: Table A; Target 37995; HLA-B*49:01; MAGEA11; ENSG00000185247; TAA
GEQVLWGPI

SEQ ID NO: 37996 - protein, 11 aa, Homo sapiens
  misc_feature: Table A; Target 37996; HLA-A*03:01; MAGEA11; ENSG00000185247; TAA
GIQCNEQSMPK

SEQ ID NO: 37997 - protein, 11 aa, Homo sapiens
  misc_feature: Table A; Target 37997; HLA-A*03:02; MAGEA11; ENSG00000185247; TAA
GIQCNEQSMPK

SEQ ID NO: 37998 - protein, 11 aa, Homo sapiens
  misc_feature: Table A; Target 37998; HLA-A*11:01; MAGEA11; ENSG00000185247; TAA
GIQCNEQSMPK

SEQ ID NO: 37999 - protein, 9 aa, Homo sapiens
  misc_feature: Table A; Target 37999; HLA-A*02:01; MAGEA11; ENSG00000185247; TAA
GLGCSPASI

SEQ ID NO: 38000 - protein, 9 aa, Homo sapiens
  misc_feature: Table A; Target 38000; HLA-A*02:03; MAGEA11; ENSG00000185247; TAA
GLGCSPASI

SEQ ID NO: 38001 - protein, 10 aa, Homo sapiens
  misc_feature: Table A; Target 38001; HLA-A*03:01; MAGEA11; ENSG00000185247; TAA
GLGCSPASIK

SEQ ID NO: 38002 - protein, 10 aa, Homo sapiens
  misc_feature: Table A; Target 38002; HLA-A*03:02; MAGEA11; ENSG00000185247; TAA
GLGCSPASIK

SEQ ID NO: 38003 - protein, 8 aa, Homo sapiens
  misc_feature: Table A; Target 38003; HLA-B*08:01; MAGEA11; ENSG00000185247; TAA
GLITKAEM

SEQ ID NO: 38004 - protein, 9 aa, Homo sapiens
  misc_feature: Table A; Target 38004; HLA-A*02:01; MAGEA11; ENSG00000185247; TAA
GLITKAEML

SEQ ID NO: 38005 - protein, 9 aa, Homo sapiens
  misc_feature: Table A; Target 38005; HLA-A*02:03; MAGEA11; ENSG00000185247; TAA
GLITKAEML

SEQ ID NO: 38006 - protein, 9 aa, Homo sapiens
  misc_feature: Table A; Target 38006; HLA-A*02:04; MAGEA11; ENSG00000185247; TAA
GLITKAEML

SEQ ID NO: 38007 - protein, 9 aa, Homo sapiens
  misc_feature: Table A; Target 38007; HLA-A*02:07; MAGEA11; ENSG00000185247; TAA
GLITKAEML

SEQ ID NO: 38008 - protein, 9 aa, Homo sapiens
  misc_feature: Table A; Target 38008; HLA-B*08:01; MAGEA11; ENSG00000185247; TAA
GLITKAEML

SEQ ID NO: 38009 - protein, 9 aa, Homo sapiens
  misc_feature: Table A; Target 38009; HLA-A*02:01; MAGEA11; ENSG00000185247; TAA
GLLIIVLGV

SEQ ID NO: 38010 - protein, 9 aa, Homo sapiens
  misc_feature: Table A; Target 38010; HLA-A*02:03; MAGEA11; ENSG00000185247; TAA
GLLIIVLGV

SEQ ID NO: 38011 - protein, 9 aa, Homo sapiens
  misc_feature: Table A; Target 38011; HLA-A*02:04; MAGEA11; ENSG00000185247; TAA
GLLIIVLGV

SEQ ID NO: 38012 - protein, 9 aa, Homo sapiens
  misc_feature: Table A; Target 38012; HLA-A*02:07; MAGEA11; ENSG00000185247; TAA
GLLIIVLGV

SEQ ID NO: 38013 - protein, 9 aa, Homo sapiens
  misc_feature: Table A; Target 38013; HLA-B*13:02; MAGEA11; ENSG00000185247; TAA
GLLIIVLGV

SEQ ID NO: 38014 - protein, 8 aa, Homo sapiens
  misc_feature: Table A; Target 38014; HLA-B*15:01; MAGEA11; ENSG00000185247; TAA
GLQVSTMF

SEQ ID NO: 38015 - protein, 10 aa, Homo sapiens
  misc_feature: Table A; Target 38015; HLA-B*54:01; MAGEA11; ENSG00000185247; TAA
GPITQIFPTV

SEQ ID NO: 38016 - protein, 10 aa, Homo sapiens
  misc_feature: Table A; Target 38016; HLA-B*55:01; MAGEA11; ENSG00000185247; TAA
GPITQIFPTV

SEQ ID NO: 38017 - protein, 10 aa, Homo sapiens
  misc_feature: Table A; Target 38017; HLA-B*56:01; MAGEA11; ENSG00000185247; TAA
GPITQIFPTV

SEQ ID NO: 38018 - protein, 8 aa, Homo sapiens
  misc_feature: Table A; Target 38018; HLA-B*07:02; MAGEA11; ENSG00000185247; TAA
GPSTSPDL

SEQ ID NO: 38019 - protein, 9 aa, Homo sapiens
  misc_feature: Table A; Target 38019; HLA-B*27:05; MAGEA11; ENSG00000185247; TAA
GRDPTSYPS

SEQ ID NO: 38020 - protein, 10 aa, Homo sapiens
  misc_feature: Table A; Target 38020; HLA-B*27:02; MAGEA11; ENSG00000185247; TAA
GRDPTSYPSL

SEQ ID NO: 38021 - protein, 10 aa, Homo sapiens
  misc_feature: Table A; Target 38021; HLA-B*27:05; MAGEA11; ENSG00000185247; TAA
GRDPTSYPSL

SEQ ID NO: 38022 - protein, 10 aa, Homo sapiens
  misc_feature: Table A; Target 38022; HLA-B*38:01; MAGEA11; ENSG00000185247; TAA
GRDPTSYPSL

SEQ ID NO: 38023 - protein, 10 aa, Homo sapiens
  misc_feature: Table A; Target 38023; HLA-B*39:01; MAGEA11; ENSG00000185247; TAA
GRDPTSYPSL

SEQ ID NO: 38024 - protein, 11 aa, Homo sapiens
  misc_feature: Table A; Target 38024; HLA-A*01:01; MAGEA11; ENSG00000185247; TAA
GRDPTSYPSLY

SEQ ID NO: 38025 - protein, 9 aa, Homo sapiens
  misc_feature: Table A; Target 38025; HLA-A*01:01; MAGEA11; ENSG00000185247; TAA
GTDPACYEF

SEQ ID NO: 38026 - protein, 9 aa, Homo sapiens
  misc_feature: Table A; Target 38026; HLA-A*32:01; MAGEA11; ENSG00000185247; TAA
GTDPACYEF

SEQ ID NO: 38027 - protein, 9 aa, Homo sapiens
  misc_feature: Table A; Target 38027; HLA-B*57:01; MAGEA11; ENSG00000185247; TAA
GTDPACYEF

SEQ ID NO: 38028 - protein, 9 aa, Homo sapiens
  misc_feature: Table A; Target 38028; HLA-B*58:01; MAGEA11; ENSG00000185247; TAA
GTDPACYEF

SEQ ID NO: 38029 - protein, 9 aa, Homo sapiens
  misc_feature: Table A; Target 38029; HLA-C*04:01; MAGEA11; ENSG00000185247; TAA
GTDPACYEF

SEQ ID NO: 38030 - protein, 9 aa, Homo sapiens
  misc_feature: Table A; Target 38030; HLA-C*05:01; MAGEA11; ENSG00000185247; TAA
GTDPACYEF

SEQ ID NO: 38031 - protein, 9 aa, Homo sapiens
  misc_feature: Table A; Target 38031; HLA-A*02:01; MAGEA11; ENSG00000185247; TAA
GTLEELPAA

SEQ ID NO: 38032 - protein, 10 aa, Homo sapiens
  misc_feature: Table A; Target 38032; HLA-A*02:01; MAGEA11; ENSG00000185247; TAA
GVYAGREHFL

SEQ ID NO: 38033 - protein, 10 aa, Homo sapiens
  misc_feature: Table A; Target 38033; HLA-A*02:03; MAGEA11; ENSG00000185247; TAA
GVYAGREHFL

SEQ ID NO: 38034 - protein, 10 aa, Homo sapiens
  misc_feature: Table A; Target 38034; HLA-A*02:04; MAGEA11; ENSG00000185247; TAA
GVYAGREHFL

SEQ ID NO: 38035 - protein, 10 aa, Homo sapiens
  misc_feature: Table A; Target 38035; HLA-A*03:01; MAGEA11; ENSG00000185247; TAA
GVYAGREHFL

SEQ ID NO: 38036 - protein, 11 aa, Homo sapiens
  misc_feature: Table A; Target 38036; HLA-A*29:02; MAGEA11; ENSG00000185247; TAA
GVYAGREHFLF

SEQ ID NO: 38037 - protein, 8 aa, Homo sapiens
  misc_feature: Table A; Target 38037; HLA-B*37:01; MAGEA11; ENSG00000185247; TAA
HDKIIDLV

SEQ ID NO: 38038 - protein, 8 aa, Homo sapiens
  misc_feature: Table A; Target 38038; HLA-B*40:02; MAGEA11; ENSG00000185247; TAA
HDKIIDLV

SEQ ID NO: 38039 - protein, 9 aa, Homo sapiens
  misc_feature: Table A; Target 38039; HLA-A*25:01; MAGEA11; ENSG00000185247; TAA
HSYVLVTSL

SEQ ID NO: 38040 - protein, 9 aa, Homo sapiens
  misc_feature: Table A; Target 38040; HLA-A*30:01; MAGEA11; ENSG00000185247; TAA
HSYVLVTSL

SEQ ID NO: 38041 - protein, 9 aa, Homo sapiens
  misc_feature: Table A; Target 38041; HLA-A*32:01; MAGEA11; ENSG00000185247; TAA
HSYVLVTSL

SEQ ID NO: 38042 - protein, 9 aa, Homo sapiens
  misc_feature: Table A; Target 38042; HLA-A*68:02; MAGEA11; ENSG00000185247; TAA
HSYVLVTSL

SEQ ID NO: 38043 - protein, 9 aa, Homo sapiens
  misc_feature: Table A; Target 38043; HLA-B*08:01; MAGEA11; ENSG00000185247; TAA
HSYVLVTSL

SEQ ID NO: 38044 - protein, 9 aa, Homo sapiens
  misc_feature: Table A; Target 38044; HLA-B*13:02; MAGEA11; ENSG00000185247; TAA
HSYVLVTSL

SEQ ID NO: 38045 - protein, 9 aa, Homo sapiens
  misc_feature: Table A; Target 38045; HLA-B*15:03; MAGEA11; ENSG00000185247; TAA
HSYVLVTSL

SEQ ID NO: 38046 - protein, 9 aa, Homo sapiens
  misc_feature: Table A; Target 38046; HLA-B*18:01; MAGEA11; ENSG00000185247; TAA
HSYVLVTSL

SEQ ID NO: 38047 - protein, 9 aa, Homo sapiens
  misc_feature: Table A; Target 38047; HLA-B*35:01; MAGEA11; ENSG00000185247; TAA
HSYVLVTSL

SEQ ID NO: 38048 - protein, 9 aa, Homo sapiens
  misc_feature: Table A; Target 38048; HLA-B*39:01; MAGEA11; ENSG00000185247; TAA
HSYVLVTSL

SEQ ID NO: 38049 - protein, 9 aa, Homo sapiens
  misc_feature: Table A; Target 38049; HLA-B*40:01; MAGEA11; ENSG00000185247; TAA
HSYVLVTSL

SEQ ID NO: 38050 - protein, 9 aa, Homo sapiens
  misc_feature: Table A; Target 38050; HLA-B*40:02; MAGEA11; ENSG00000185247; TAA
HSYVLVTSL

SEQ ID NO: 38051 - protein, 9 aa, Homo sapiens
  misc_feature: Table A; Target 38051; HLA-B*46:01; MAGEA11; ENSG00000185247; TAA
HSYVLVTSL

SEQ ID NO: 38052 - protein, 9 aa, Homo sapiens
  misc_feature: Table A; Target 38052; HLA-B*51:01; MAGEA11; ENSG00000185247; TAA
HSYVLVTSL

SEQ ID NO: 38053 - protein, 9 aa, Homo sapiens
  misc_feature: Table A; Target 38053; HLA-B*54:01; MAGEA11; ENSG00000185247; TAA
HSYVLVTSL

SEQ ID NO: 38054 - protein, 9 aa, Homo sapiens
  misc_feature: Table A; Target 38054; HLA-B*58:01; MAGEA11; ENSG00000185247; TAA
HSYVLVTSL

SEQ ID NO: 38055 - protein, 9 aa, Homo sapiens
  misc_feature: Table A; Target 38055; HLA-C*01:02; MAGEA11; ENSG00000185247; TAA
HSYVLVTSL

SEQ ID NO: 38056 - protein, 9 aa, Homo sapiens
  misc_feature: Table A; Target 38056; HLA-C*02:02; MAGEA11; ENSG00000185247; TAA
HSYVLVTSL

SEQ ID NO: 38057 - protein, 9 aa, Homo sapiens
  misc_feature: Table A; Target 38057; HLA-C*03:03; MAGEA11; ENSG00000185247; TAA
HSYVLVTSL

SEQ ID NO: 38058 - protein, 9 aa, Homo sapiens
  misc_feature: Table A; Target 38058; HLA-C*03:04; MAGEA11; ENSG00000185247; TAA
HSYVLVTSL

SEQ ID NO: 38059 - protein, 9 aa, Homo sapiens
  misc_feature: Table A; Target 38059; HLA-C*05:01; MAGEA11; ENSG00000185247; TAA
HSYVLVTSL

SEQ ID NO: 38060 - protein, 9 aa, Homo sapiens
  misc_feature: Table A; Target 38060; HLA-C*07:06; MAGEA11; ENSG00000185247; TAA
HSYVLVTSL

SEQ ID NO: 38061 - protein, 9 aa, Homo sapiens
  misc_feature: Table A; Target 38061; HLA-C*12:03; MAGEA11; ENSG00000185247; TAA
HSYVLVTSL

SEQ ID NO: 38062 - protein, 9 aa, Homo sapiens
  misc_feature: Table A; Target 38062; HLA-C*16:04; MAGEA11; ENSG00000185247; TAA
HSYVLVTSL

SEQ ID NO: 38063 - protein, 9 aa, Homo sapiens
  misc_feature: Table A; Target 38063; HLA-C*16:02; MAGEA11; ENSG00000185247; TAA
IANANGRDP

SEQ ID NO: 38064 - protein, 8 aa, Homo sapiens
  misc_feature: Table A; Target 38064; HLA-B*37:01; MAGEA11; ENSG00000185247; TAA
IDLVHLLL

SEQ ID NO: 38065 - protein, 8 aa, Homo sapiens
  misc_feature: Table A; Target 38065; HLA-C*14:02; MAGEA11; ENSG00000185247; TAA
IFMEGNCI

SEQ ID NO: 38066 - protein, 9 aa, Homo sapiens
  misc_feature: Table A; Target 38066; HLA-C*14:02; MAGEA11; ENSG00000185247; TAA
IFREASVCM

SEQ ID NO: 38067 - protein, 8 aa, Homo sapiens
  misc_feature: Table A; Target 38067; HLA-A*02:07; MAGEA11; ENSG00000185247; TAA
IIDLVHLL

SEQ ID NO: 38068 - protein, 8 aa, Homo sapiens
  misc_feature: Table A; Target 38068; HLA-C*04:01; MAGEA11; ENSG00000185247; TAA
IIDLVHLL

SEQ ID NO: 38069 - protein, 8 aa, Homo sapiens
  misc_feature: Table A; Target 38069; HLA-C*05:01; MAGEA11; ENSG00000185247; TAA
IIDLVHLL

SEQ ID NO: 38070 - protein, 9 aa, Homo sapiens
  misc_feature: Table A; Target 38070; HLA-A*01:01; MAGEA11; ENSG00000185247; TAA
IIDLVHLLL

SEQ ID NO: 38071 - protein, 9 aa, Homo sapiens
  misc_feature: Table A; Target 38071; HLA-A*02:07; MAGEA11; ENSG00000185247; TAA
IIDLVHLLL

SEQ ID NO: 38072 - protein, 9 aa, Homo sapiens
  misc_feature: Table A; Target 38072; HLA-C*05:01; MAGEA11; ENSG00000185247; TAA
IIDLVHLLL

SEQ ID NO: 38073 - protein, 9 aa, Homo sapiens
  misc_feature: Table A; Target 38073; HLA-A*02:01; MAGEA11; ENSG00000185247; TAA
ILHDKIIDL

SEQ ID NO: 38074 - protein, 9 aa, Homo sapiens
  misc_feature: Table A; Target 38074; HLA-A*02:03; MAGEA11; ENSG00000185247; TAA
ILHDKIIDL

SEQ ID NO: 38075 - protein, 9 aa, Homo sapiens
  misc_feature: Table A; Target 38075; HLA-A*02:04; MAGEA11; ENSG00000185247; TAA
ILHDKIIDL

SEQ ID NO: 38076 - protein, 9 aa, Homo sapiens
  misc_feature: Table A; Target 38076; HLA-A*02:07; MAGEA11; ENSG00000185247; TAA
ILHDKIIDL

SEQ ID NO: 38077 - protein, 9 aa, Homo sapiens
  misc_feature: Table A; Target 38077; HLA-A*03:01; MAGEA11; ENSG00000185247; TAA
ILHDKIIDL

SEQ ID NO: 38078 - protein, 9 aa, Homo sapiens
  misc_feature: Table A; Target 38078; HLA-B*08:01; MAGEA11; ENSG00000185247; TAA
ILHDKIIDL

SEQ ID NO: 38079 - protein, 10 aa, Homo sapiens
  misc_feature: Table A; Target 38079; HLA-A*02:01; MAGEA11; ENSG00000185247; TAA
ILHDKIIDLV

SEQ ID NO: 38080 - protein, 10 aa, Homo sapiens
  misc_feature: Table A; Target 38080; HLA-A*02:03; MAGEA11; ENSG00000185247; TAA
ILHDKIIDLV

SEQ ID NO: 38081 - protein, 10 aa, Homo sapiens
  misc_feature: Table A; Target 38081; HLA-A*02:04; MAGEA11; ENSG00000185247; TAA
ILHDKIIDLV

SEQ ID NO: 38082 - protein, 10 aa, Homo sapiens
  misc_feature: Table A; Target 38082; HLA-A*02:07; MAGEA11; ENSG00000185247; TAA
ILHDKIIDLV

SEQ ID NO: 38083 - protein, 9 aa, Homo sapiens
  misc_feature: Table A; Target 38083; HLA-B*35:03; MAGEA11; ENSG00000185247; TAA
IPEEVMWEV

SEQ ID NO: 38084 - protein, 9 aa, Homo sapiens
  misc_feature: Table A; Target 38084; HLA-B*51:01; MAGEA11; ENSG00000185247; TAA
IPEEVMWEV

SEQ ID NO: 38085 - protein, 9 aa, Homo sapiens
  misc_feature: Table A; Target 38085; HLA-B*54:01; MAGEA11; ENSG00000185247; TAA
IPEEVMWEV

SEQ ID NO: 38086 - protein, 10 aa, Homo sapiens
  misc_feature: Table A; Target 38086; HLA-B*35:03; MAGEA11; ENSG00000185247; TAA
IPEEVMWEVL

SEQ ID NO: 38087 - protein, 10 aa, Homo sapiens
  misc_feature: Table A; Target 38087; HLA-A*03:02; MAGEA11; ENSG00000185247; TAA
IQCNEQSMPK

SEQ ID NO: 38088 - protein, 10 aa, Homo sapiens
  misc_feature: Table A; Target 38088; HLA-A*11:01; MAGEA11; ENSG00000185247; TAA
IQCNEQSMPK

SEQ ID NO: 38089 - protein, 10 aa, Homo sapiens
  misc_feature: Table A; Target 38089; HLA-B*27:02; MAGEA11; ENSG00000185247; TAA
IQCNEQSMPK

SEQ ID NO: 38090 - protein, 9 aa, Homo sapiens
  misc_feature: Table A; Target 38090; HLA-B*57:01; MAGEA11; ENSG00000185247; TAA
ITGGEQVLW

SEQ ID NO: 38091 - protein, 9 aa, Homo sapiens
  misc_feature: Table A; Target 38091; HLA-B*58:01; MAGEA11; ENSG00000185247; TAA
ITGGEQVLW

SEQ ID NO: 38092 - protein, 9 aa, Homo sapiens
  misc_feature: Table A; Target 38092; HLA-A*11:01; MAGEA11; ENSG00000185247; TAA
ITQIFPTVR

SEQ ID NO: 38093 - protein, 9 aa, Homo sapiens
  misc_feature: Table A; Target 38093; HLA-A*31:01; MAGEA11; ENSG00000185247; TAA
ITQIFPTVR

SEQ ID NO: 38094 - protein, 9 aa, Homo sapiens
  misc_feature: Table A; Target 38094; HLA-A*33:01; MAGEA11; ENSG00000185247; TAA
ITQIFPTVR

SEQ ID NO: 38095 - protein, 9 aa, Homo sapiens
  misc_feature: Table A; Target 38095; HLA-A*33:03; MAGEA11; ENSG00000185247; TAA
ITQIFPTVR

SEQ ID NO: 38096 - protein, 9 aa, Homo sapiens
  misc_feature: Table A; Target 38096; HLA-A*68:01; MAGEA11; ENSG00000185247; TAA
ITQIFPTVR

SEQ ID NO: 38097 - protein, 9 aa, Homo sapiens
  misc_feature: Table A; Target 38097; HLA-C*07:06; MAGEA11; ENSG00000185247; TAA
ITQIFPTVR

SEQ ID NO: 38098 - protein, 10 aa, Homo sapiens
  misc_feature: Table A; Target 38098; HLA-A*30:01; MAGEA11; ENSG00000185247; TAA
KEGPSTSPDL

SEQ ID NO: 38099 - protein, 10 aa, Homo sapiens
  misc_feature: Table A; Target 38099; HLA-B*40:01; MAGEA11; ENSG00000185247; TAA
KEGPSTSPDL

SEQ ID NO: 38100 - protein, 11 aa, Homo sapiens
  misc_feature: Table A; Target 38100; HLA-B*40:01; MAGEA11; ENSG00000185247; TAA
KEGPSTSPDLI

SEQ ID NO: 38101 - protein, 11 aa, Homo sapiens
  misc_feature: Table A; Target 38101; HLA-B*40:02; MAGEA11; ENSG00000185247; TAA
KEGPSTSPDLI

SEQ ID NO: 38102 - protein, 11 aa, Homo sapiens
  misc_feature: Table A; Target 38102; HLA-B*49:01; MAGEA11; ENSG00000185247; TAA
KEGPSTSPDLI

SEQ ID NO: 38103 - protein, 10 aa, Homo sapiens
  misc_feature: Table A; Target 38103; HLA-A*25:01; MAGEA11; ENSG00000185247; TAA
KEVDPTSHSY

SEQ ID NO: 38104 - protein, 10 aa, Homo sapiens
  misc_feature: Table A; Target 38104; HLA-A*26:01; MAGEA11; ENSG00000185247; TAA
KEVDPTSHSY

SEQ ID NO: 38105 - protein, 10 aa, Homo sapiens
  misc_feature: Table A; Target 38105; HLA-A*29:02; MAGEA11; ENSG00000185247; TAA
KEVDPTSHSY

SEQ ID NO: 38106 - protein, 10 aa, Homo sapiens
  misc_feature: Table A; Target 38106; HLA-A*30:01; MAGEA11; ENSG00000185247; TAA
KEVDPTSHSY

SEQ ID NO: 38107 - protein, 10 aa, Homo sapiens
  misc_feature: Table A; Target 38107; HLA-A*30:02; MAGEA11; ENSG00000185247; TAA
KEVDPTSHSY

SEQ ID NO: 38108 - protein, 10 aa, Homo sapiens
  misc_feature: Table A; Target 38108; HLA-A*32:01; MAGEA11; ENSG00000185247; TAA
KEVDPTSHSY

SEQ ID NO: 38109 - protein, 10 aa, Homo sapiens
  misc_feature: Table A; Target 38109; HLA-B*15:01; MAGEA11; ENSG00000185247; TAA
KEVDPTSHSY

SEQ ID NO: 38110 - protein, 10 aa, Homo sapiens
  misc_feature: Table A; Target 38110; HLA-B*15:03; MAGEA11; ENSG00000185247; TAA
KEVDPTSHSY

SEQ ID NO: 38111 - protein, 10 aa, Homo sapiens
  misc_feature: Table A; Target 38111; HLA-B*18:01; MAGEA11; ENSG00000185247; TAA
KEVDPTSHSY

SEQ ID NO: 38112 - protein, 10 aa, Homo sapiens
  misc_feature: Table A; Target 38112; HLA-B*27:02; MAGEA11; ENSG00000185247; TAA
KEVDPTSHSY

SEQ ID NO: 38113 - protein, 10 aa, Homo sapiens
  misc_feature: Table A; Target 38113; HLA-B*27:05; MAGEA11; ENSG00000185247; TAA
KEVDPTSHSY

SEQ ID NO: 38114 - protein, 10 aa, Homo sapiens
  misc_feature: Table A; Target 38114; HLA-B*37:01; MAGEA11; ENSG00000185247; TAA
KEVDPTSHSY

SEQ ID NO: 38115 - protein, 10 aa, Homo sapiens
  misc_feature: Table A; Target 38115; HLA-B*40:01; MAGEA11; ENSG00000185247; TAA
KEVDPTSHSY

SEQ ID NO: 38116 - protein, 10 aa, Homo sapiens
  misc_feature: Table A; Target 38116; HLA-B*40:02; MAGEA11; ENSG00000185247; TAA
KEVDPTSHSY

SEQ ID NO: 38117 - protein, 10 aa, Homo sapiens
  misc_feature: Table A; Target 38117; HLA-B*44:02; MAGEA11; ENSG00000185247; TAA
KEVDPTSHSY

SEQ ID NO: 38118 - protein, 10 aa, Homo sapiens
  misc_feature: Table A; Target 38118; HLA-B*44:03; MAGEA11; ENSG00000185247; TAA
KEVDPTSHSY

SEQ ID NO: 38119 - protein, 10 aa, Homo sapiens
  misc_feature: Table A; Target 38119; HLA-B*49:01; MAGEA11; ENSG00000185247; TAA
KEVDPTSHSY

SEQ ID NO: 38120 - protein, 10 aa, Homo sapiens
  misc_feature: Table A; Target 38120; HLA-B*57:01; MAGEA11; ENSG00000185247; TAA
KEVDPTSHSY

SEQ ID NO: 38121 - protein, 10 aa, Homo sapiens
  misc_feature: Table A; Target 38121; HLA-B*58:01; MAGEA11; ENSG00000185247; TAA
KEVDPTSHSY

SEQ ID NO: 38122 - protein, 10 aa, Homo sapiens
  misc_feature: Table A; Target 38122; HLA-C*02:02; MAGEA11; ENSG00000185247; TAA
KEVDPTSHSY

SEQ ID NO: 38123 - protein, 10 aa, Homo sapiens
  misc_feature: Table A; Target 38123; HLA-C*16:01; MAGEA11; ENSG00000185247; TAA
KEVDPTSHSY

SEQ ID NO: 38124 - protein, 10 aa, Homo sapiens
  misc_feature: Table A; Target 38124; HLA-C*16:02; MAGEA11; ENSG00000185247; TAA
KEVDPTSHSY

SEQ ID NO: 38125 - protein, 10 aa, Homo sapiens
  misc_feature: Table A; Target 38125; HLA-C*16:04; MAGEA11; ENSG00000185247; TAA
KEVDPTSHSY

SEQ ID NO: 38126 - protein, 11 aa, Homo sapiens
  misc_feature: Table A; Target 38126; HLA-B*40:01; MAGEA11; ENSG00000185247; TAA
KEVDPTSHSYV

SEQ ID NO: 38127 - protein, 11 aa, Homo sapiens
  misc_feature: Table A; Target 38127; HLA-B*49:01; MAGEA11; ENSG00000185247; TAA
KEVDPTSHSYV

SEQ ID NO: 38128 - protein, 8 aa, Homo sapiens
  misc_feature: Table A; Target 38128; HLA-A*02:04; MAGEA11; ENSG00000185247; TAA
KIIDLVHL

SEQ ID NO: 38129 - protein, 8 aa, Homo sapiens
  misc_feature: Table A; Target 38129; HLA-A*02:07; MAGEA11; ENSG00000185247; TAA
KIIDLVHL

SEQ ID NO: 38130 - protein, 9 aa, Homo sapiens
  misc_feature: Table A; Target 38130; HLA-A*02:01; MAGEA11; ENSG00000185247; TAA
KIIDLVHLL

SEQ ID NO: 38131 - protein, 9 aa, Homo sapiens
  misc_feature: Table A; Target 38131; HLA-A*02:03; MAGEA11; ENSG00000185247; TAA
KIIDLVHLL

SEQ ID NO: 38132 - protein, 9 aa, Homo sapiens
  misc_feature: Table A; Target 38132; HLA-A*02:04; MAGEA11; ENSG00000185247; TAA
KIIDLVHLL

SEQ ID NO: 38133 - protein, 9 aa, Homo sapiens
  misc_feature: Table A; Target 38133; HLA-A*02:07; MAGEA11; ENSG00000185247; TAA
KIIDLVHLL

SEQ ID NO: 38134 - protein, 9 aa, Homo sapiens
  misc_feature: Table A; Target 38134; HLA-A*23:01; MAGEA11; ENSG00000185247; TAA
KIIDLVHLL

SEQ ID NO: 38135 - protein, 9 aa, Homo sapiens
  misc_feature: Table A; Target 38135; HLA-A*24:02; MAGEA11; ENSG00000185247; TAA
KIIDLVHLL

SEQ ID NO: 38136 - protein, 9 aa, Homo sapiens
  misc_feature: Table A; Target 38136; HLA-A*31:01; MAGEA11; ENSG00000185247; TAA
KIIDLVHLL

SEQ ID NO: 38137 - protein, 9 aa, Homo sapiens
  misc_feature: Table A; Target 38137; HLA-A*32:01; MAGEA11; ENSG00000185247; TAA
KIIDLVHLL

SEQ ID NO: 38138 - protein, 9 aa, Homo sapiens
  misc_feature: Table A; Target 38138; HLA-A*68:02; MAGEA11; ENSG00000185247; TAA
KIIDLVHLL

SEQ ID NO: 38139 - protein, 9 aa, Homo sapiens
  misc_feature: Table A; Target 38139; HLA-B*57:01; MAGEA11; ENSG00000185247; TAA
KIIDLVHLL

SEQ ID NO: 38140 - protein, 9 aa, Homo sapiens
  misc_feature: Table A; Target 38140; HLA-B*58:01; MAGEA11; ENSG00000185247; TAA
KIIDLVHLL

SEQ ID NO: 38141 - protein, 9 aa, Homo sapiens
  misc_feature: Table A; Target 38141; HLA-C*02:02; MAGEA11; ENSG00000185247; TAA
KIIDLVHLL

SEQ ID NO: 38142 - protein, 10 aa, Homo sapiens
  misc_feature: Table A; Target 38142; HLA-A*02:01; MAGEA11; ENSG00000185247; TAA
KIIDLVHLLL

SEQ ID NO: 38143 - protein, 10 aa, Homo sapiens
  misc_feature: Table A; Target 38143; HLA-A*02:04; MAGEA11; ENSG00000185247; TAA
KIIDLVHLLL

SEQ ID NO: 38144 - protein, 10 aa, Homo sapiens
  misc_feature: Table A; Target 38144; HLA-A*02:07; MAGEA11; ENSG00000185247; TAA
KIIDLVHLLL

SEQ ID NO: 38145 - protein, 10 aa, Homo sapiens
  misc_feature: Table A; Target 38145; HLA-A*31:01; MAGEA11; ENSG00000185247; TAA
KIIDLVHLLL

SEQ ID NO: 38146 - protein, 11 aa, Homo sapiens
  misc_feature: Table A; Target 38146; HLA-A*31:01; MAGEA11; ENSG00000185247; TAA
KIIDLVHLLLR

SEQ ID NO: 38147 - protein, 9 aa, Homo sapiens
  misc_feature: Table A; Target 38147; HLA-A*02:01; MAGEA11; ENSG00000185247; TAA
KVLEYIANA

SEQ ID NO: 38148 - protein, 9 aa, Homo sapiens
  misc_feature: Table A; Target 38148; HLA-A*02:03; MAGEA11; ENSG00000185247; TAA
KVLEYIANA

SEQ ID NO: 38149 - protein, 9 aa, Homo sapiens
  misc_feature: Table A; Target 38149; HLA-A*02:04; MAGEA11; ENSG00000185247; TAA
KVLEYIANA

SEQ ID NO: 38150 - protein, 9 aa, Homo sapiens
  misc_feature: Table A; Target 38150; HLA-A*02:07; MAGEA11; ENSG00000185247; TAA
KVLEYIANA

SEQ ID NO: 38151 - protein, 9 aa, Homo sapiens
  misc_feature: Table A; Target 38151; HLA-A*31:01; MAGEA11; ENSG00000185247; TAA
KVLEYIANA

SEQ ID NO: 38152 - protein, 9 aa, Homo sapiens
  misc_feature: Table A; Target 38152; HLA-B*40:02; MAGEA11; ENSG00000185247; TAA
KVLEYIANA

SEQ ID NO: 38153 - protein, 9 aa, Homo sapiens
  misc_feature: Table A; Target 38153; HLA-B*55:01; MAGEA11; ENSG00000185247; TAA
KVLEYIANA

SEQ ID NO: 38154 - protein, 9 aa, Homo sapiens
  misc_feature: Table A; Target 38154; HLA-B*56:01; MAGEA11; ENSG00000185247; TAA
KVLEYIANA

SEQ ID NO: 38155 - protein, 11 aa, Homo sapiens
  misc_feature: Table A; Target 38155; HLA-C*04:01; MAGEA11; ENSG00000185247; TAA
KVLEYIANANG

SEQ ID NO: 38156 - protein, 10 aa, Homo sapiens
  misc_feature: Table A; Target 38156; HLA-B*27:02; MAGEA11; ENSG00000185247; TAA
LEYIANANGR

SEQ ID NO: 38157 - protein, 9 aa, Homo sapiens
  misc_feature: Table A; Target 38157; HLA-B*08:01; MAGEA11; ENSG00000185247; TAA
LGLVGAQAL

SEQ ID NO: 38158 - protein, 9 aa, Homo sapiens
  misc_feature: Table A; Target 38158; HLA-B*35:03; MAGEA11; ENSG00000185247; TAA
LGLVGAQAL

SEQ ID NO: 38159 - protein, 9 aa, Homo sapiens
  misc_feature: Table A; Target 38159; HLA-B*46:01; MAGEA11; ENSG00000185247; TAA
LGLVGAQAL

SEQ ID NO: 38160 - protein, 9 aa, Homo sapiens
  misc_feature: Table A; Target 38160; HLA-C*01:02; MAGEA11; ENSG00000185247; TAA
LGLVGAQAL

SEQ ID NO: 38161 - protein, 9 aa, Homo sapiens
  misc_feature: Table A; Target 38161; HLA-C*03:03; MAGEA11; ENSG00000185247; TAA
LGLVGAQAL

SEQ ID NO: 38162 - protein, 9 aa, Homo sapiens
  misc_feature: Table A; Target 38162; HLA-C*03:04; MAGEA11; ENSG00000185247; TAA
LGLVGAQAL

SEQ ID NO: 38163 - protein, 9 aa, Homo sapiens
  misc_feature: Table A; Target 38163; HLA-C*14:02; MAGEA11; ENSG00000185247; TAA
LGLVGAQAL

SEQ ID NO: 38164 - protein, 8 aa, Homo sapiens
  misc_feature: Table A; Target 38164; HLA-C*12:03; MAGEA11; ENSG00000185247; TAA
LGSVIKNY

SEQ ID NO: 38165 - protein, 8 aa, Homo sapiens
  misc_feature: Table A; Target 38165; HLA-C*16:01; MAGEA11; ENSG00000185247; TAA
LGSVIKNY

SEQ ID NO: 38166 - protein, 8 aa, Homo sapiens
  misc_feature: Table A; Target 38166; HLA-C*16:02; MAGEA11; ENSG00000185247; TAA
LGSVIKNY

SEQ ID NO: 38167 - protein, 10 aa, Homo sapiens
  misc_feature: Table A; Target 38167; HLA-A*02:01; MAGEA11; ENSG00000185247; TAA
LLFGIDVKEV

SEQ ID NO: 38168 - protein, 10 aa, Homo sapiens
  misc_feature: Table A; Target 38168; HLA-A*02:03; MAGEA11; ENSG00000185247; TAA
LLFGIDVKEV

SEQ ID NO: 38169 - protein, 10 aa, Homo sapiens
  misc_feature: Table A; Target 38169; HLA-A*02:04; MAGEA11; ENSG00000185247; TAA
LLFGIDVKEV

SEQ ID NO: 38170 - protein, 10 aa, Homo sapiens
  misc_feature: Table A; Target 38170; HLA-A*02:07; MAGEA11; ENSG00000185247; TAA
LLFGIDVKEV

SEQ ID NO: 38171 - protein, 9 aa, Homo sapiens
  misc_feature: Table A; Target 38171; HLA-C*01:02; MAGEA11; ENSG00000185247; TAA
LNVGTLEEL

SEQ ID NO: 38172 - protein, 9 aa, Homo sapiens
  misc_feature: Table A; Target 38172; HLA-B*55:01; MAGEA11; ENSG00000185247; TAA
LPAAESPSP

SEQ ID NO: 38173 - protein, 10 aa, Homo sapiens
  misc_feature: Table A; Target 38173; HLA-B*15:01; MAGEA11; ENSG00000185247; TAA
LQAEEQEAAF

SEQ ID NO: 38174 - protein, 10 aa, Homo sapiens
  misc_feature: Table A; Target 38174; HLA-B*27:05; MAGEA11; ENSG00000185247; TAA
LQAEEQEAAF

SEQ ID NO: 38175 - protein, 10 aa, Homo sapiens
  misc_feature: Table A; Target 38175; HLA-C*07:04; MAGEA11; ENSG00000185247; TAA
LQAEEQEAAF

SEQ ID NO: 38176 - protein, 11 aa, Homo sapiens
  misc_feature: Table A; Target 38176; HLA-B*27:05; MAGEA11; ENSG00000185247; TAA
LQAEEQEAAFF

SEQ ID NO: 38177 - protein, 11 aa, Homo sapiens
  misc_feature: Table A; Target 38177; HLA-B*38:01; MAGEA11; ENSG00000185247; TAA
LQAEEQEAAFF

SEQ ID NO: 38178 - protein, 10 aa, Homo sapiens
  misc_feature: Table A; Target 38178; HLA-B*27:05; MAGEA11; ENSG00000185247; TAA
LQAQEEDLGL

SEQ ID NO: 38179 - protein, 9 aa, Homo sapiens
  misc_feature: Table A; Target 38179; HLA-C*05:01; MAGEA11; ENSG00000185247; TAA
LSDEGSGSQ

SEQ ID NO: 38180 - protein, 10 aa, Homo sapiens
  misc_feature: Table A; Target 38180; HLA-A*01:01; MAGEA11; ENSG00000185247; TAA
LSDEGSGSQE

SEQ ID NO: 38181 - protein, 11 aa, Homo sapiens
  misc_feature: Table A; Target 38181; HLA-A*01:01; MAGEA11; ENSG00000185247; TAA
LSDEGSGSQEK

SEQ ID NO: 38182 - protein, 8 aa, Homo sapiens
  misc_feature: Table A; Target 38182; HLA-C*03:04; MAGEA11; ENSG00000185247; TAA
LSYDGIQC

SEQ ID NO: 38183 - protein, 9 aa, Homo sapiens
  misc_feature: Table A; Target 38183; HLA-A*03:02; MAGEA11; ENSG00000185247; TAA
LTQNWVQEK

SEQ ID NO: 38184 - protein, 9 aa, Homo sapiens
  misc_feature: Table A; Target 38184; HLA-A*11:01; MAGEA11; ENSG00000185247; TAA
LTQNWVQEK

SEQ ID NO: 38185 - protein, 10 aa, Homo sapiens
  misc_feature: Table A; Target 38185; HLA-A*01:01; MAGEA11; ENSG00000185247; TAA
LTQNWVQEKY

SEQ ID NO: 38186 - protein, 10 aa, Homo sapiens
  misc_feature: Table A; Target 38186; HLA-A*29:02; MAGEA11; ENSG00000185247; TAA
LTQNWVQEKY

SEQ ID NO: 38187 - protein, 10 aa, Homo sapiens
  misc_feature: Table A; Target 38187; HLA-A*30:02; MAGEA11; ENSG00000185247; TAA
LTQNWVQEKY

SEQ ID NO: 38188 - protein, 10 aa, Homo sapiens
  misc_feature: Table A; Target 38188; HLA-B*57:01; MAGEA11; ENSG00000185247; TAA
LTQNWVQEKY

SEQ ID NO: 38189 - protein, 10 aa, Homo sapiens
  misc_feature: Table A; Target 38189; HLA-B*58:01; MAGEA11; ENSG00000185247; TAA
LTQNWVQEKY

SEQ ID NO: 38190 - protein, 9 aa, Homo sapiens
  misc_feature: Table A; Target 38190; HLA-A*01:01; MAGEA11; ENSG00000185247; TAA
LVTSLNLSY

SEQ ID NO: 38191 - protein, 9 aa, Homo sapiens
  misc_feature: Table A; Target 38191; HLA-A*03:01; MAGEA11; ENSG00000185247; TAA
LVTSLNLSY

SEQ ID NO: 38192 - protein, 9 aa, Homo sapiens
  misc_feature: Table A; Target 38192; HLA-A*25:01; MAGEA11; ENSG00000185247; TAA
LVTSLNLSY

SEQ ID NO: 38193 - protein, 9 aa, Homo sapiens
  misc_feature: Table A; Target 38193; HLA-A*26:01; MAGEA11; ENSG00000185247; TAA
LVTSLNLSY

SEQ ID NO: 38194 - protein, 9 aa, Homo sapiens
  misc_feature: Table A; Target 38194; HLA-A*29:02; MAGEA11; ENSG00000185247; TAA
LVTSLNLSY

SEQ ID NO: 38195 - protein, 9 aa, Homo sapiens
  misc_feature: Table A; Target 38195; HLA-A*30:02; MAGEA11; ENSG00000185247; TAA
LVTSLNLSY

SEQ ID NO: 38196 - protein, 9 aa, Homo sapiens
  misc_feature: Table A; Target 38196; HLA-A*32:01; MAGEA11; ENSG00000185247; TAA
LVTSLNLSY

SEQ ID NO: 38197 - protein, 9 aa, Homo sapiens
  misc_feature: Table A; Target 38197; HLA-B*15:01; MAGEA11; ENSG00000185247; TAA
LVTSLNLSY

SEQ ID NO: 38198 - protein, 9 aa, Homo sapiens
  misc_feature: Table A; Target 38198; HLA-B*35:01; MAGEA11; ENSG00000185247; TAA
LVTSLNLSY

SEQ ID NO: 38199 - protein, 9 aa, Homo sapiens
  misc_feature: Table A; Target 38199; HLA-B*57:01; MAGEA11; ENSG00000185247; TAA
LVTSLNLSY

SEQ ID NO: 38200 - protein, 9 aa, Homo sapiens
  misc_feature: Table A; Target 38200; HLA-B*58:01; MAGEA11; ENSG00000185247; TAA
LVTSLNLSY

SEQ ID NO: 38201 - protein, 9 aa, Homo sapiens
  misc_feature: Table A; Target 38201; HLA-C*02:02; MAGEA11; ENSG00000185247; TAA
LVTSLNLSY

SEQ ID NO: 38202 - protein, 9 aa, Homo sapiens
  misc_feature: Table A; Target 38202; HLA-C*07:04; MAGEA11; ENSG00000185247; TAA
LVTSLNLSY

SEQ ID NO: 38203 - protein, 9 aa, Homo sapiens
  misc_feature: Table A; Target 38203; HLA-C*14:02; MAGEA11; ENSG00000185247; TAA
LVTSLNLSY

SEQ ID NO: 38204 - protein, 9 aa, Homo sapiens
  misc_feature: Table A; Target 38204; HLA-C*16:01; MAGEA11; ENSG00000185247; TAA
LVTSLNLSY

SEQ ID NO: 38205 - protein, 9 aa, Homo sapiens
  misc_feature: Table A; Target 38205; HLA-A*23:01; MAGEA11; ENSG00000185247; TAA
LWGPITQIF

SEQ ID NO: 38206 - protein, 9 aa, Homo sapiens
  misc_feature: Table A; Target 38206; HLA-A*24:02; MAGEA11; ENSG00000185247; TAA
LWGPITQIF

SEQ ID NO: 38207 - protein, 8 aa, Homo sapiens
  misc_feature: Table A; Target 38207; HLA-A*30:01; MAGEA11; ENSG00000185247; TAA
MDAIFGSL

SEQ ID NO: 38208 - protein, 8 aa, Homo sapiens
  misc_feature: Table A; Target 38208; HLA-B*18:01; MAGEA11; ENSG00000185247; TAA
MDAIFGSL

SEQ ID NO: 38209 - protein, 8 aa, Homo sapiens
  misc_feature: Table A; Target 38209; HLA-B*37:01; MAGEA11; ENSG00000185247; TAA
MDAIFGSL

SEQ ID NO: 38210 - protein, 8 aa, Homo sapiens
  misc_feature: Table A; Target 38210; HLA-B*40:01; MAGEA11; ENSG00000185247; TAA
MDAIFGSL

SEQ ID NO: 38211 - protein, 8 aa, Homo sapiens
  misc_feature: Table A; Target 38211; HLA-B*40:02; MAGEA11; ENSG00000185247; TAA
MDAIFGSL

SEQ ID NO: 38212 - protein, 8 aa, Homo sapiens
  misc_feature: Table A; Target 38212; HLA-C*04:01; MAGEA11; ENSG00000185247; TAA
MDAIFGSL

SEQ ID NO: 38213 - protein, 8 aa, Homo sapiens
  misc_feature: Table A; Target 38213; HLA-C*06:02; MAGEA11; ENSG00000185247; TAA
MDAIFGSL

SEQ ID NO: 38214 - protein, 8 aa, Homo sapiens
  misc_feature: Table A; Target 38214; HLA-C*07:01; MAGEA11; ENSG00000185247; TAA
MDAIFGSL

SEQ ID NO: 38215 - protein, 8 aa, Homo sapiens
  misc_feature: Table A; Target 38215; HLA-C*07:02; MAGEA11; ENSG00000185247; TAA
MDAIFGSL

SEQ ID NO: 38216 - protein, 8 aa, Homo sapiens
  misc_feature: Table A; Target 38216; HLA-C*12:03; MAGEA11; ENSG00000185247; TAA
MDAIFGSL

SEQ ID NO: 38217 - protein, 8 aa, Homo sapiens
  misc_feature: Table A; Target 38217; HLA-C*16:02; MAGEA11; ENSG00000185247; TAA
MDAIFGSL

SEQ ID NO: 38218 - protein, 9 aa, Homo sapiens
  misc_feature: Table A; Target 38218; HLA-A*03:01; MAGEA11; ENSG00000185247; TAA
MLGSVIKNY

SEQ ID NO: 38219 - protein, 9 aa, Homo sapiens
  misc_feature: Table A; Target 38219; HLA-A*03:02; MAGEA11; ENSG00000185247; TAA
MLGSVIKNY

SEQ ID NO: 38220 - protein, 9 aa, Homo sapiens
  misc_feature: Table A; Target 38220; HLA-A*29:02; MAGEA11; ENSG00000185247; TAA
MLGSVIKNY

SEQ ID NO: 38221 - protein, 9 aa, Homo sapiens
  misc_feature: Table A; Target 38221; HLA-A*30:02; MAGEA11; ENSG00000185247; TAA
MLGSVIKNY

SEQ ID NO: 38222 - protein, 9 aa, Homo sapiens
  misc_feature: Table A; Target 38222; HLA-A*32:01; MAGEA11; ENSG00000185247; TAA
MLGSVIKNY

SEQ ID NO: 38223 - protein, 9 aa, Homo sapiens
  misc_feature: Table A; Target 38223; HLA-B*35:01; MAGEA11; ENSG00000185247; TAA
MLGSVIKNY

SEQ ID NO: 38224 - protein, 9 aa, Homo sapiens
  misc_feature: Table A; Target 38224; HLA-B*44:02; MAGEA11; ENSG00000185247; TAA
MLGSVIKNY

SEQ ID NO: 38225 - protein, 9 aa, Homo sapiens
  misc_feature: Table A; Target 38225; HLA-B*44:03; MAGEA11; ENSG00000185247; TAA
MLGSVIKNY

SEQ ID NO: 38226 - protein, 9 aa, Homo sapiens
  misc_feature: Table A; Target 38226; HLA-C*07:01; MAGEA11; ENSG00000185247; TAA
MLGSVIKNY

SEQ ID NO: 38227 - protein, 9 aa, Homo sapiens
  misc_feature: Table A; Target 38227; HLA-C*07:04; MAGEA11; ENSG00000185247; TAA
MLGSVIKNY

SEQ ID NO: 38228 - protein, 9 aa, Homo sapiens
  misc_feature: Table A; Target 38228; HLA-C*12:03; MAGEA11; ENSG00000185247; TAA
MLGSVIKNY

SEQ ID NO: 38229 - protein, 9 aa, Homo sapiens
  misc_feature: Table A; Target 38229; HLA-C*16:01; MAGEA11; ENSG00000185247; TAA
MLGSVIKNY

SEQ ID NO: 38230 - protein, 9 aa, Homo sapiens
  misc_feature: Table A; Target 38230; HLA-C*16:02; MAGEA11; ENSG00000185247; TAA
MLGSVIKNY

SEQ ID NO: 38231 - protein, 8 aa, Homo sapiens
  misc_feature: Table A; Target 38231; HLA-B*51:01; MAGEA11; ENSG00000185247; TAA
MPKSGLLI

SEQ ID NO: 38232 - protein, 9 aa, Homo sapiens
  misc_feature: Table A; Target 38232; HLA-B*07:02; MAGEA11; ENSG00000185247; TAA
MPKSGLLII

SEQ ID NO: 38233 - protein, 9 aa, Homo sapiens
  misc_feature: Table A; Target 38233; HLA-B*35:03; MAGEA11; ENSG00000185247; TAA
MPKSGLLII

SEQ ID NO: 38234 - protein, 9 aa, Homo sapiens
  misc_feature: Table A; Target 38234; HLA-B*51:01; MAGEA11; ENSG00000185247; TAA
MPKSGLLII

SEQ ID NO: 38235 - protein, 9 aa, Homo sapiens
  misc_feature: Table A; Target 38235; HLA-B*54:01; MAGEA11; ENSG00000185247; TAA
MPKSGLLII

SEQ ID NO: 38236 - protein, 9 aa, Homo sapiens
  misc_feature: Table A; Target 38236; HLA-B*56:01; MAGEA11; ENSG00000185247; TAA
MPKSGLLII

SEQ ID NO: 38237 - protein, 9 aa, Homo sapiens
  misc_feature: Table A; Target 38237; HLA-C*07:02; MAGEA11; ENSG00000185247; TAA
MPKSGLLII

SEQ ID NO: 38238 - protein, 10 aa, Homo sapiens
  misc_feature: Table A; Target 38238; HLA-B*51:01; MAGEA11; ENSG00000185247; TAA
MPKSGLLIIV

SEQ ID NO: 38239 - protein, 10 aa, Homo sapiens
  misc_feature: Table A; Target 38239; HLA-B*54:01; MAGEA11; ENSG00000185247; TAA
MPKSGLLIIV

SEQ ID NO: 38240 - protein, 10 aa, Homo sapiens
  misc_feature: Table A; Target 38240; HLA-B*56:01; MAGEA11; ENSG00000185247; TAA
MPKSGLLIIV

SEQ ID NO: 38241 - protein, 11 aa, Homo sapiens
  misc_feature: Table A; Target 38241; HLA-B*54:01; MAGEA11; ENSG00000185247; TAA
MPKSGLLIIVL

SEQ ID NO: 38242 - protein, 10 aa, Homo sapiens
  misc_feature: Table A; Target 38242; HLA-B*54:01; MAGEA11; ENSG00000185247; TAA
MPLEQRSQHC

SEQ ID NO: 38243 - protein, 9 aa, Homo sapiens
  misc_feature: Table A; Target 38243; HLA-B*13:02; MAGEA11; ENSG00000185247; TAA
MQLLFGIDV

SEQ ID NO: 38244 - protein, 10 aa, Homo sapiens
  misc_feature: Table A; Target 38244; HLA-C*04:01; MAGEA11; ENSG00000185247; TAA
MWEVLSIMGV

SEQ ID NO: 38245 - protein, 10 aa, Homo sapiens
  misc_feature: Table A; Target 38245; HLA-A*25:01; MAGEA11; ENSG00000185247; TAA
NANGRDPTSY

SEQ ID NO: 38246 - protein, 10 aa, Homo sapiens
  misc_feature: Table A; Target 38246; HLA-A*30:02; MAGEA11; ENSG00000185247; TAA
NANGRDPTSY

SEQ ID NO: 38247 - protein, 10 aa, Homo sapiens
  misc_feature: Table A; Target 38247; HLA-B*35:01; MAGEA11; ENSG00000185247; TAA
NANGRDPTSY

SEQ ID NO: 38248 - protein, 10 aa, Homo sapiens
  misc_feature: Table A; Target 38248; HLA-B*40:01; MAGEA11; ENSG00000185247; TAA
NEQSMPKSGL

SEQ ID NO: 38249 - protein, 10 aa, Homo sapiens
  misc_feature: Table A; Target 38249; HLA-B*44:03; MAGEA11; ENSG00000185247; TAA
NEQSMPKSGL

SEQ ID NO: 38250 - protein, 11 aa, Homo sapiens
  misc_feature: Table A; Target 38250; HLA-B*40:01; MAGEA11; ENSG00000185247; TAA
NEQSMPKSGLL

SEQ ID NO: 38251 - protein, 10 aa, Homo sapiens
  misc_feature: Table A; Target 38251; HLA-A*33:01; MAGEA11; ENSG00000185247; TAA
NGRDPTSYPS

SEQ ID NO: 38252 - protein, 10 aa, Homo sapiens
  misc_feature: Table A; Target 38252; HLA-A*29:02; MAGEA11; ENSG00000185247; TAA
NWVQEKYLVY

SEQ ID NO: 38253 - protein, 9 aa, Homo sapiens
  misc_feature: Table A; Target 38253; HLA-A*23:01; MAGEA11; ENSG00000185247; TAA
NYEDYFPEI

SEQ ID NO: 38254 - protein, 9 aa, Homo sapiens
  misc_feature: Table A; Target 38254; HLA-A*24:02; MAGEA11; ENSG00000185247; TAA
NYEDYFPEI

SEQ ID NO: 38255 - protein, 10 aa, Homo sapiens
  misc_feature: Table A; Target 38255; HLA-A*24:02; MAGEA11; ENSG00000185247; TAA
NYEDYFPEIF

SEQ ID NO: 38256 - protein, 8 aa, Homo sapiens
  misc_feature: Table A; Target 38256; HLA-B*51:01; MAGEA11; ENSG00000185247; TAA
PADLTRVI

SEQ ID NO: 38257 - protein, 9 aa, Homo sapiens
  misc_feature: Table A; Target 38257; HLA-B*37:01; MAGEA11; ENSG00000185247; TAA
PDLIDPESF

SEQ ID NO: 38258 - protein, 9 aa, Homo sapiens
  misc_feature: Table A; Target 38258; HLA-B*37:01; MAGEA11; ENSG00000185247; TAA
PEIFREASV

SEQ ID NO: 38259 - protein, 9 aa, Homo sapiens
  misc_feature: Table A; Target 38259; HLA-B*40:02; MAGEA11; ENSG00000185247; TAA
PEIFREASV

SEQ ID NO: 38260 - protein, 9 aa, Homo sapiens
  misc_feature: Table A; Target 38260; HLA-B*49:01; MAGEA11; ENSG00000185247; TAA
PEIFREASV

SEQ ID NO: 38261 - protein, 9 aa, Homo sapiens
  misc_feature: Table A; Target 38261; HLA-B*15:01; MAGEA11; ENSG00000185247; TAA
PQSPQEESF

SEQ ID NO: 38262 - protein, 8 aa, Homo sapiens
  misc_feature: Table A; Target 38262; HLA-C*07:02; MAGEA11; ENSG00000185247; TAA
PTSHSYVL

SEQ ID NO: 38263 - protein, 8 aa, Homo sapiens
  misc_feature: Table A; Target 38263; HLA-A*01:01; MAGEA11; ENSG00000185247; TAA
PTSYPSLY

SEQ ID NO: 38264 - protein, 8 aa, Homo sapiens
  misc_feature: Table A; Target 38264; HLA-A*24:02; MAGEA11; ENSG00000185247; TAA
PYGPQLQW

SEQ ID NO: 38265 - protein, 8 aa, Homo sapiens
  misc_feature: Table A; Target 38265; HLA-C*07:01; MAGEA11; ENSG00000185247; TAA
PYGPQLQW

SEQ ID NO: 38266 - protein, 9 aa, Homo sapiens
  misc_feature: Table A; Target 38266; HLA-B*35:01; MAGEA11; ENSG00000185247; TAA
QAEEQEAAF

SEQ ID NO: 38267 - protein, 9 aa, Homo sapiens
  misc_feature: Table A; Target 38267; HLA-B*35:03; MAGEA11; ENSG00000185247; TAA
QAEEQEAAF

SEQ ID NO: 38268 - protein, 9 aa, Homo sapiens
  misc_feature: Table A; Target 38268; HLA-B*38:01; MAGEA11; ENSG00000185247; TAA
QAEEQEAAF

SEQ ID NO: 38269 - protein, 9 aa, Homo sapiens
  misc_feature: Table A; Target 38269; HLA-B*39:01; MAGEA11; ENSG00000185247; TAA
QAEEQEAAF

SEQ ID NO: 38270 - protein, 9 aa, Homo sapiens
  misc_feature: Table A; Target 38270; HLA-B*55:01; MAGEA11; ENSG00000185247; TAA
QAEEQEAAF

SEQ ID NO: 38271 - protein, 9 aa, Homo sapiens
  misc_feature: Table A; Target 38271; HLA-C*03:03; MAGEA11; ENSG00000185247; TAA
QAEEQEAAF

SEQ ID NO: 38272 - protein, 9 aa, Homo sapiens
  misc_feature: Table A; Target 38272; HLA-C*03:04; MAGEA11; ENSG00000185247; TAA
QAEEQEAAF

SEQ ID NO: 38273 - protein, 9 aa, Homo sapiens
  misc_feature: Table A; Target 38273; HLA-C*05:01; MAGEA11; ENSG00000185247; TAA
QAEEQEAAF

SEQ ID NO: 38274 - protein, 10 aa, Homo sapiens
  misc_feature: Table A; Target 38274; HLA-B*27:02; MAGEA11; ENSG00000185247; TAA
QAEEQEAAFF

SEQ ID NO: 38275 - protein, 10 aa, Homo sapiens
  misc_feature: Table A; Target 38275; HLA-B*27:05; MAGEA11; ENSG00000185247; TAA
QAEEQEAAFF

SEQ ID NO: 38276 - protein, 10 aa, Homo sapiens
  misc_feature: Table A; Target 38276; HLA-B*38:01; MAGEA11; ENSG00000185247; TAA
QAEEQEAAFF

SEQ ID NO: 38277 - protein, 10 aa, Homo sapiens
  misc_feature: Table A; Target 38277; HLA-C*05:01; MAGEA11; ENSG00000185247; TAA
QAEEQEAAFF

SEQ ID NO: 38278 - protein, 9 aa, Homo sapiens
  misc_feature: Table A; Target 38278; HLA-B*35:03; MAGEA11; ENSG00000185247; TAA
QAQEEDLGL

SEQ ID NO: 38279 - protein, 9 aa, Homo sapiens
  misc_feature: Table A; Target 38279; HLA-A*03:01; MAGEA11; ENSG00000185247; TAA
QCNEQSMPK

SEQ ID NO: 38280 - protein, 9 aa, Homo sapiens
  misc_feature: Table A; Target 38280; HLA-A*03:02; MAGEA11; ENSG00000185247; TAA
QCNEQSMPK

SEQ ID NO: 38281 - protein, 9 aa, Homo sapiens
  misc_feature: Table A; Target 38281; HLA-A*11:01; MAGEA11; ENSG00000185247; TAA
QCNEQSMPK

SEQ ID NO: 38282 - protein, 8 aa, Homo sapiens
  misc_feature: Table A; Target 38282; HLA-B*37:01; MAGEA11; ENSG00000185247; TAA
QDLPRVQV

SEQ ID NO: 38283 - protein, 9 aa, Homo sapiens
  misc_feature: Table A; Target 38283; HLA-A*23:01; MAGEA11; ENSG00000185247; TAA
QDLPRVQVF

SEQ ID NO: 38284 - protein, 9 aa, Homo sapiens
  misc_feature: Table A; Target 38284; HLA-A*24:02; MAGEA11; ENSG00000185247; TAA
QDLPRVQVF

SEQ ID NO: 38285 - protein, 9 aa, Homo sapiens
  misc_feature: Table A; Target 38285; HLA-A*30:01; MAGEA11; ENSG00000185247; TAA
QDLPRVQVF

SEQ ID NO: 38286 - protein, 9 aa, Homo sapiens
  misc_feature: Table A; Target 38286; HLA-A*32:01; MAGEA11; ENSG00000185247; TAA
QDLPRVQVF

SEQ ID NO: 38287 - protein, 9 aa, Homo sapiens
  misc_feature: Table A; Target 38287; HLA-B*08:01; MAGEA11; ENSG00000185247; TAA
QDLPRVQVF

SEQ ID NO: 38288 - protein, 9 aa, Homo sapiens
  misc_feature: Table A; Target 38288; HLA-B*15:03; MAGEA11; ENSG00000185247; TAA
QDLPRVQVF

SEQ ID NO: 38289 - protein, 9 aa, Homo sapiens
  misc_feature: Table A; Target 38289; HLA-B*18:01; MAGEA11; ENSG00000185247; TAA
QDLPRVQVF

SEQ ID NO: 38290 - protein, 9 aa, Homo sapiens
  misc_feature: Table A; Target 38290; HLA-B*37:01; MAGEA11; ENSG00000185247; TAA
QDLPRVQVF

SEQ ID NO: 38291 - protein, 9 aa, Homo sapiens
  misc_feature: Table A; Target 38291; HLA-B*38:01; MAGEA11; ENSG00000185247; TAA
QDLPRVQVF

SEQ ID NO: 38292 - protein, 9 aa, Homo sapiens
  misc_feature: Table A; Target 38292; HLA-B*40:02; MAGEA11; ENSG00000185247; TAA
QDLPRVQVF

SEQ ID NO: 38293 - protein, 9 aa, Homo sapiens
  misc_feature: Table A; Target 38293; HLA-B*44:02; MAGEA11; ENSG00000185247; TAA
QDLPRVQVF

SEQ ID NO: 38294 - protein, 9 aa, Homo sapiens
  misc_feature: Table A; Target 38294; HLA-B*44:03; MAGEA11; ENSG00000185247; TAA
QDLPRVQVF

SEQ ID NO: 38295 - protein, 9 aa, Homo sapiens
  misc_feature: Table A; Target 38295; HLA-B*57:01; MAGEA11; ENSG00000185247; TAA
QDLPRVQVF

SEQ ID NO: 38296 - protein, 9 aa, Homo sapiens
  misc_feature: Table A; Target 38296; HLA-C*07:01; MAGEA11; ENSG00000185247; TAA
QDLPRVQVF

SEQ ID NO: 38297 - protein, 9 aa, Homo sapiens
  misc_feature: Table A; Target 38297; HLA-C*07:04; MAGEA11; ENSG00000185247; TAA
QDLPRVQVF

SEQ ID NO: 38298 - protein, 9 aa, Homo sapiens
  misc_feature: Table A; Target 38298; HLA-C*12:03; MAGEA11; ENSG00000185247; TAA
QDLPRVQVF

SEQ ID NO: 38299 - protein, 9 aa, Homo sapiens
  misc_feature: Table A; Target 38299; HLA-C*16:01; MAGEA11; ENSG00000185247; TAA
QDLPRVQVF

SEQ ID NO: 38300 - protein, 9 aa, Homo sapiens
  misc_feature: Table A; Target 38300; HLA-C*16:04; MAGEA11; ENSG00000185247; TAA
QDLPRVQVF

SEQ ID NO: 38301 - protein, 10 aa, Homo sapiens
  misc_feature: Table A; Target 38301; HLA-A*31:01; MAGEA11; ENSG00000185247; TAA
QDLPRVQVFR

SEQ ID NO: 38302 - protein, 9 aa, Homo sapiens
  misc_feature: Table A; Target 38302; HLA-A*30:01; MAGEA11; ENSG00000185247; TAA
QEAAFFSST

SEQ ID NO: 38303 - protein, 9 aa, Homo sapiens
  misc_feature: Table A; Target 38303; HLA-B*18:01; MAGEA11; ENSG00000185247; TAA
QEAAFFSST

SEQ ID NO: 38304 - protein, 9 aa, Homo sapiens
  misc_feature: Table A; Target 38304; HLA-B*40:02; MAGEA11; ENSG00000185247; TAA
QEAAFFSST

SEQ ID NO: 38305 - protein, 9 aa, Homo sapiens
  misc_feature: Table A; Target 38305; HLA-B*49:01; MAGEA11; ENSG00000185247; TAA
QEAAFFSST

SEQ ID NO: 38306 - protein, 10 aa, Homo sapiens
  misc_feature: Table A; Target 38306; HLA-A*30:01; MAGEA11; ENSG00000185247; TAA
QEAAFFSSTL

SEQ ID NO: 38307 - protein, 10 aa, Homo sapiens
  misc_feature: Table A; Target 38307; HLA-B*18:01; MAGEA11; ENSG00000185247; TAA
QEAAFFSSTL

SEQ ID NO: 38308 - protein, 10 aa, Homo sapiens
  misc_feature: Table A; Target 38308; HLA-B*40:01; MAGEA11; ENSG00000185247; TAA
QEAAFFSSTL

SEQ ID NO: 38309 - protein, 10 aa, Homo sapiens
  misc_feature: Table A; Target 38309; HLA-B*40:02; MAGEA11; ENSG00000185247; TAA
QEAAFFSSTL

SEQ ID NO: 38310 - protein, 10 aa, Homo sapiens
  misc_feature: Table A; Target 38310; HLA-B*44:02; MAGEA11; ENSG00000185247; TAA
QEAAFFSSTL

SEQ ID NO: 38311 - protein, 10 aa, Homo sapiens
  misc_feature: Table A; Target 38311; HLA-B*44:03; MAGEA11; ENSG00000185247; TAA
QEAAFFSSTL

SEQ ID NO: 38312 - protein, 10 aa, Homo sapiens
  misc_feature: Table A; Target 38312; HLA-B*49:01; MAGEA11; ENSG00000185247; TAA
QEAAFFSSTL

SEQ ID NO: 38313 - protein, 10 aa, Homo sapiens
  misc_feature: Table A; Target 38313; HLA-A*30:01; MAGEA11; ENSG00000185247; TAA
QEEDLGLVGA

SEQ ID NO: 38314 - protein, 10 aa, Homo sapiens
  misc_feature: Table A; Target 38314; HLA-B*49:01; MAGEA11; ENSG00000185247; TAA
QEEDLGLVGA

SEQ ID NO: 38315 - protein, 9 aa, Homo sapiens
  misc_feature: Table A; Target 38315; HLA-B*49:01; MAGEA11; ENSG00000185247; TAA
QEESFSPTA

SEQ ID NO: 38316 - protein, 10 aa, Homo sapiens
  misc_feature: Table A; Target 38316; HLA-A*30:01; MAGEA11; ENSG00000185247; TAA
QEESFSPTAM

SEQ ID NO: 38317 - protein, 10 aa, Homo sapiens
  misc_feature: Table A; Target 38317; HLA-B*18:01; MAGEA11; ENSG00000185247; TAA
QEESFSPTAM

SEQ ID NO: 38318 - protein, 10 aa, Homo sapiens
  misc_feature: Table A; Target 38318; HLA-B*40:01; MAGEA11; ENSG00000185247; TAA
QEESFSPTAM

SEQ ID NO: 38319 - protein, 9 aa, Homo sapiens
  misc_feature: Table A; Target 38319; HLA-A*02:03; MAGEA11; ENSG00000185247; TAA
QIFPTVRPA

SEQ ID NO: 38320 - protein, 9 aa, Homo sapiens
  misc_feature: Table A; Target 38320; HLA-B*38:01; MAGEA11; ENSG00000185247; TAA
QRITGGEQV

SEQ ID NO: 38321 - protein, 9 aa, Homo sapiens
  misc_feature: Table A; Target 38321; HLA-B*39:01; MAGEA11; ENSG00000185247; TAA
QRITGGEQV

SEQ ID NO: 38322 - protein, 9 aa, Homo sapiens
  misc_feature: Table A; Target 38322; HLA-C*16:04; MAGEA11; ENSG00000185247; TAA
QRITGGEQV

SEQ ID NO: 38323 - protein, 10 aa, Homo sapiens
  misc_feature: Table A; Target 38323; HLA-B*38:01; MAGEA11; ENSG00000185247; TAA
QRITGGEQVL

SEQ ID NO: 38324 - protein, 10 aa, Homo sapiens
  misc_feature: Table A; Target 38324; HLA-B*39:01; MAGEA11; ENSG00000185247; TAA
QRITGGEQVL

SEQ ID NO: 38325 - protein, 8 aa, Homo sapiens
  misc_feature: Table A; Target 38325; HLA-B*08:01; MAGEA11; ENSG00000185247; TAA
QSMPKSGL

SEQ ID NO: 38326 - protein, 8 aa, Homo sapiens
  misc_feature: Table A; Target 38326; HLA-C*16:01; MAGEA11; ENSG00000185247; TAA
QSTERAPY

SEQ ID NO: 38327 - protein, 10 aa, Homo sapiens
  misc_feature: Table A; Target 38327; HLA-A*25:01; MAGEA11; ENSG00000185247; TAA
QVPGTDPACY

SEQ ID NO: 38328 - protein, 10 aa, Homo sapiens
  misc_feature: Table A; Target 38328; HLA-A*26:01; MAGEA11; ENSG00000185247; TAA
QVPGTDPACY

SEQ ID NO: 38329 - protein, 10 aa, Homo sapiens
  misc_feature: Table A; Target 38329; HLA-A*29:02; MAGEA11; ENSG00000185247; TAA
QVPGTDPACY

SEQ ID NO: 38330 - protein, 10 aa, Homo sapiens
  misc_feature: Table A; Target 38330; HLA-A*30:02; MAGEA11; ENSG00000185247; TAA
QVPGTDPACY

SEQ ID NO: 38331 - protein, 10 aa, Homo sapiens
  misc_feature: Table A; Target 38331; HLA-C*07:04; MAGEA11; ENSG00000185247; TAA
QVPGTDPACY

SEQ ID NO: 38332 - protein, 9 aa, Homo sapiens
  misc_feature: Table A; Target 38332; HLA-B*58:01; MAGEA11; ENSG00000185247; TAA
RAHAETSKM

SEQ ID NO: 38333 - protein, 8 aa, Homo sapiens
  misc_feature: Table A; Target 38333; HLA-C*01:02; MAGEA11; ENSG00000185247; TAA
RAPYGPQL

SEQ ID NO: 38334 - protein, 8 aa, Homo sapiens
  misc_feature: Table A; Target 38334; HLA-C*03:04; MAGEA11; ENSG00000185247; TAA
RAPYGPQL

SEQ ID NO: 38335 - protein, 8 aa, Homo sapiens
  misc_feature: Table A; Target 38335; HLA-C*16:01; MAGEA11; ENSG00000185247; TAA
RAPYGPQL

SEQ ID NO: 38336 - protein, 10 aa, Homo sapiens
  misc_feature: Table A; Target 38336; HLA-A*24:02; MAGEA11; ENSG00000185247; TAA
RAPYGPQLQW

SEQ ID NO: 38337 - protein, 10 aa, Homo sapiens
  misc_feature: Table A; Target 38337; HLA-B*57:01; MAGEA11; ENSG00000185247; TAA
RAPYGPQLQW

SEQ ID NO: 38338 - protein, 10 aa, Homo sapiens
  misc_feature: Table A; Target 38338; HLA-B*58:01; MAGEA11; ENSG00000185247; TAA
RAPYGPQLQW

SEQ ID NO: 38339 - protein, 9 aa, Homo sapiens
  misc_feature: Table A; Target 38339; HLA-B*37:01; MAGEA11; ENSG00000185247; TAA
RDPTSYPSL

SEQ ID NO: 38340 - protein, 9 aa, Homo sapiens
  misc_feature: Table A; Target 38340; HLA-C*01:02; MAGEA11; ENSG00000185247; TAA
RDPTSYPSL

SEQ ID NO: 38341 - protein, 9 aa, Homo sapiens
  misc_feature: Table A; Target 38341; HLA-A*30:01; MAGEA11; ENSG00000185247; TAA
REASVCMQL

SEQ ID NO: 38342 - protein, 9 aa, Homo sapiens
  misc_feature: Table A; Target 38342; HLA-B*40:01; MAGEA11; ENSG00000185247; TAA
REASVCMQL

SEQ ID NO: 38343 - protein, 9 aa, Homo sapiens
  misc_feature: Table A; Target 38343; HLA-B*44:03; MAGEA11; ENSG00000185247; TAA
REASVCMQL

SEQ ID NO: 38344 - protein, 10 aa, Homo sapiens
  misc_feature: Table A; Target 38344; HLA-B*40:01; MAGEA11; ENSG00000185247; TAA
REASVCMQLL

SEQ ID NO: 38345 - protein, 9 aa, Homo sapiens
  misc_feature: Table A; Target 38345; HLA-A*30:01; MAGEA11; ENSG00000185247; TAA
REDSGDFGL

SEQ ID NO: 38346 - protein, 9 aa, Homo sapiens
  misc_feature: Table A; Target 38346; HLA-B*37:01; MAGEA11; ENSG00000185247; TAA
REDSGDFGL

SEQ ID NO: 38347 - protein, 9 aa, Homo sapiens
  misc_feature: Table A; Target 38347; HLA-B*38:01; MAGEA11; ENSG00000185247; TAA
REDSGDFGL

SEQ ID NO: 38348 - protein, 9 aa, Homo sapiens
  misc_feature: Table A; Target 38348; HLA-B*40:01; MAGEA11; ENSG00000185247; TAA
REDSGDFGL

SEQ ID NO: 38349 - protein, 9 aa, Homo sapiens
  misc_feature: Table A; Target 38349; HLA-B*44:03; MAGEA11; ENSG00000185247; TAA
REDSGDFGL

SEQ ID NO: 38350 - protein, 11 aa, Homo sapiens
  misc_feature: Table A; Target 38350; HLA-B*49:01; MAGEA11; ENSG00000185247; TAA
REDSGDFGLQV

SEQ ID NO: 38351 - protein, 10 aa, Homo sapiens
  misc_feature: Table A; Target 38351; HLA-B*57:01; MAGEA11; ENSG00000185247; TAA
RITGGEQVLW

SEQ ID NO: 38352 - protein, 10 aa, Homo sapiens
  misc_feature: Table A; Target 38352; HLA-B*58:01; MAGEA11; ENSG00000185247; TAA
RITGGEQVLW

SEQ ID NO: 38353 - protein, 8 aa, Homo sapiens
  misc_feature: Table A; Target 38353; HLA-B*56:01; MAGEA11; ENSG00000185247; TAA
RPADLTRV

SEQ ID NO: 38354 - protein, 9 aa, Homo sapiens
  misc_feature: Table A; Target 38354; HLA-B*07:02; MAGEA11; ENSG00000185247; TAA
RPADLTRVI

SEQ ID NO: 38355 - protein, 9 aa, Homo sapiens
  misc_feature: Table A; Target 38355; HLA-B*51:01; MAGEA11; ENSG00000185247; TAA
RPADLTRVI

SEQ ID NO: 38356 - protein, 9 aa, Homo sapiens
  misc_feature: Table A; Target 38356; HLA-B*56:01; MAGEA11; ENSG00000185247; TAA
RPADLTRVI

SEQ ID NO: 38357 - protein, 9 aa, Homo sapiens
  misc_feature: Table A; Target 38357; HLA-C*07:02; MAGEA11; ENSG00000185247; TAA
RPADLTRVI

SEQ ID NO: 38358 - protein, 10 aa, Homo sapiens
  misc_feature: Table A; Target 38358; HLA-B*07:02; MAGEA11; ENSG00000185247; TAA
RPADLTRVIM

SEQ ID NO: 38359 - protein, 10 aa, Homo sapiens
  misc_feature: Table A; Target 38359; HLA-B*55:01; MAGEA11; ENSG00000185247; TAA
RPADLTRVIM

SEQ ID NO: 38360 - protein, 10 aa, Homo sapiens
  misc_feature: Table A; Target 38360; HLA-C*07:02; MAGEA11; ENSG00000185247; TAA
RPADLTRVIM

SEQ ID NO: 38361 - protein, 11 aa, Homo sapiens
  misc_feature: Table A; Target 38361; HLA-A*30:02; MAGEA11; ENSG00000185247; TAA
RQVPGTDPACY

SEQ ID NO: 38362 - protein, 11 aa, Homo sapiens
  misc_feature: Table A; Target 38362; HLA-A*32:01; MAGEA11; ENSG00000185247; TAA
RQVPGTDPACY

SEQ ID NO: 38363 - protein, 11 aa, Homo sapiens
  misc_feature: Table A; Target 38363; HLA-B*15:01; MAGEA11; ENSG00000185247; TAA
RQVPGTDPACY

SEQ ID NO: 38364 - protein, 11 aa, Homo sapiens
  misc_feature: Table A; Target 38364; HLA-B*15:03; MAGEA11; ENSG00000185247; TAA
RQVPGTDPACY

SEQ ID NO: 38365 - protein, 11 aa, Homo sapiens
  misc_feature: Table A; Target 38365; HLA-B*58:01; MAGEA11; ENSG00000185247; TAA
RQVPGTDPACY

SEQ ID NO: 38366 - protein, 11 aa, Homo sapiens
  misc_feature: Table A; Target 38366; HLA-C*07:04; MAGEA11; ENSG00000185247; TAA
RQVPGTDPACY

SEQ ID NO: 38367 - protein, 9 aa, Homo sapiens
  misc_feature: Table A; Target 38367; HLA-A*03:01; MAGEA11; ENSG00000185247; TAA
RVIMPLEQR

SEQ ID NO: 38368 - protein, 9 aa, Homo sapiens
  misc_feature: Table A; Target 38368; HLA-A*03:02; MAGEA11; ENSG00000185247; TAA
RVIMPLEQR

SEQ ID NO: 38369 - protein, 9 aa, Homo sapiens
  misc_feature: Table A; Target 38369; HLA-A*11:01; MAGEA11; ENSG00000185247; TAA
RVIMPLEQR

SEQ ID NO: 38370 - protein, 9 aa, Homo sapiens
  misc_feature: Table A; Target 38370; HLA-A*31:01; MAGEA11; ENSG00000185247; TAA
RVIMPLEQR

SEQ ID NO: 38371 - protein, 9 aa, Homo sapiens
  misc_feature: Table A; Target 38371; HLA-A*33:01; MAGEA11; ENSG00000185247; TAA
RVIMPLEQR

SEQ ID NO: 38372 - protein, 9 aa, Homo sapiens
  misc_feature: Table A; Target 38372; HLA-A*33:03; MAGEA11; ENSG00000185247; TAA
RVIMPLEQR

SEQ ID NO: 38373 - protein, 9 aa, Homo sapiens
  misc_feature: Table A; Target 38373; HLA-A*68:01; MAGEA11; ENSG00000185247; TAA
RVIMPLEQR

SEQ ID NO: 38374 - protein, 9 aa, Homo sapiens
  misc_feature: Table A; Target 38374; HLA-B*57:01; MAGEA11; ENSG00000185247; TAA
RVIMPLEQR

SEQ ID NO: 38375 - protein, 9 aa, Homo sapiens
  misc_feature: Table A; Target 38375; HLA-C*07:06; MAGEA11; ENSG00000185247; TAA
RVIMPLEQR

SEQ ID NO: 38376 - protein, 8 aa, Homo sapiens
  misc_feature: Table A; Target 38376; HLA-A*03:01; MAGEA11; ENSG00000185247; TAA
RVKGLITK

SEQ ID NO: 38377 - protein, 9 aa, Homo sapiens
  misc_feature: Table A; Target 38377; HLA-A*02:03; MAGEA11; ENSG00000185247; TAA
RVKGLITKA

SEQ ID NO: 38378 - protein, 10 aa, Homo sapiens
  misc_feature: Table A; Target 38378; HLA-C*07:06; MAGEA11; ENSG00000185247; TAA
SEDDFQSTER

SEQ ID NO: 38379 - protein, 8 aa, Homo sapiens
  misc_feature: Table A; Target 38379; HLA-C*05:01; MAGEA11; ENSG00000185247; TAA
SGDFGLQV

SEQ ID NO: 38380 - protein, 10 aa, Homo sapiens
  misc_feature: Table A; Target 38380; HLA-B*38:01; MAGEA11; ENSG00000185247; TAA
SHSYVLVTSL

SEQ ID NO: 38381 - protein, 9 aa, Homo sapiens
  misc_feature: Table A; Target 38381; HLA-A*03:02; MAGEA11; ENSG00000185247; TAA
SIMGVYAGR

SEQ ID NO: 38382 - protein, 9 aa, Homo sapiens
  misc_feature: Table A; Target 38382; HLA-A*11:01; MAGEA11; ENSG00000185247; TAA
SIMGVYAGR

SEQ ID NO: 38383 - protein, 9 aa, Homo sapiens
  misc_feature: Table A; Target 38383; HLA-A*31:01; MAGEA11; ENSG00000185247; TAA
SIMGVYAGR

SEQ ID NO: 38384 - protein, 9 aa, Homo sapiens
  misc_feature: Table A; Target 38384; HLA-A*33:01; MAGEA11; ENSG00000185247; TAA
SIMGVYAGR

SEQ ID NO: 38385 - protein, 9 aa, Homo sapiens
  misc_feature: Table A; Target 38385; HLA-A*33:03; MAGEA11; ENSG00000185247; TAA
SIMGVYAGR

SEQ ID NO: 38386 - protein, 9 aa, Homo sapiens
  misc_feature: Table A; Target 38386; HLA-A*68:01; MAGEA11; ENSG00000185247; TAA
SIMGVYAGR

SEQ ID NO: 38387 - protein, 9 aa, Homo sapiens
  misc_feature: Table A; Target 38387; HLA-C*07:06; MAGEA11; ENSG00000185247; TAA
SIMGVYAGR

SEQ ID NO: 38388 - protein, 8 aa, Homo sapiens
  misc_feature: Table A; Target 38388; HLA-B*15:03; MAGEA11; ENSG00000185247; TAA
SKMKVLEY

SEQ ID NO: 38389 - protein, 11 aa, Homo sapiens
  misc_feature: Table A; Target 38389; HLA-A*02:07; MAGEA11; ENSG00000185247; TAA
SMPKSGLLIIV

SEQ ID NO: 38390 - protein, 10 aa, Homo sapiens
  misc_feature: Table A; Target 38390; HLA-B*35:01; MAGEA11; ENSG00000185247; TAA
SPDLIDPESF

SEQ ID NO: 38391 - protein, 10 aa, Homo sapiens
  misc_feature: Table A; Target 38391; HLA-B*35:03; MAGEA11; ENSG00000185247; TAA
SPDLIDPESF

SEQ ID NO: 38392 - protein, 10 aa, Homo sapiens
  misc_feature: Table A; Target 38392; HLA-B*38:01; MAGEA11; ENSG00000185247; TAA
SPDLIDPESF

SEQ ID NO: 38393 - protein, 10 aa, Homo sapiens
  misc_feature: Table A; Target 38393; HLA-B*55:01; MAGEA11; ENSG00000185247; TAA
SPDLIDPESF

SEQ ID NO: 38394 - protein, 10 aa, Homo sapiens
  misc_feature: Table A; Target 38394; HLA-C*05:01; MAGEA11; ENSG00000185247; TAA
SPDLIDPESF

SEQ ID NO: 38395 - protein, 11 aa, Homo sapiens
  misc_feature: Table A; Target 38395; HLA-B*56:01; MAGEA11; ENSG00000185247; TAA
SPQEESFSPTA

SEQ ID NO: 38396 - protein, 8 aa, Homo sapiens
  misc_feature: Table A; Target 38396; HLA-B*56:01; MAGEA11; ENSG00000185247; TAA
SPTAMDAI

SEQ ID NO: 38397 - protein, 9 aa, Homo sapiens
  misc_feature: Table A; Target 38397; HLA-B*07:02; MAGEA11; ENSG00000185247; TAA
SPTAMDAIF

SEQ ID NO: 38398 - protein, 9 aa, Homo sapiens
  misc_feature: Table A; Target 38398; HLA-B*35:01; MAGEA11; ENSG00000185247; TAA
SPTAMDAIF

SEQ ID NO: 38399 - protein, 9 aa, Homo sapiens
  misc_feature: Table A; Target 38399; HLA-B*35:03; MAGEA11; ENSG00000185247; TAA
SPTAMDAIF

SEQ ID NO: 38400 - protein, 9 aa, Homo sapiens
  misc_feature: Table A; Target 38400; HLA-B*55:01; MAGEA11; ENSG00000185247; TAA
SPTAMDAIF

SEQ ID NO: 38401 - protein, 9 aa, Homo sapiens
  misc_feature: Table A; Target 38401; HLA-C*03:03; MAGEA11; ENSG00000185247; TAA
SPTAMDAIF

SEQ ID NO: 38402 - protein, 9 aa, Homo sapiens
  misc_feature: Table A; Target 38402; HLA-B*13:02; MAGEA11; ENSG00000185247; TAA
SQDILHDKI

SEQ ID NO: 38403 - protein, 9 aa, Homo sapiens
  misc_feature: Table A; Target 38403; HLA-B*38:01; MAGEA11; ENSG00000185247; TAA
SQDILHDKI

SEQ ID NO: 38404 - protein, 9 aa, Homo sapiens
  misc_feature: Table A; Target 38404; HLA-A*02:01; MAGEA11; ENSG00000185247; TAA
SQDLPRVQV

SEQ ID NO: 38405 - protein, 9 aa, Homo sapiens
  misc_feature: Table A; Target 38405; HLA-A*02:07; MAGEA11; ENSG00000185247; TAA
SQDLPRVQV

SEQ ID NO: 38406 - protein, 9 aa, Homo sapiens
  misc_feature: Table A; Target 38406; HLA-B*13:02; MAGEA11; ENSG00000185247; TAA
SQDLPRVQV

SEQ ID NO: 38407 - protein, 9 aa, Homo sapiens
  misc_feature: Table A; Target 38407; HLA-B*38:01; MAGEA11; ENSG00000185247; TAA
SQDLPRVQV

SEQ ID NO: 38408 - protein, 9 aa, Homo sapiens
  misc_feature: Table A; Target 38408; HLA-B*39:01; MAGEA11; ENSG00000185247; TAA
SQDLPRVQV

SEQ ID NO: 38409 - protein, 9 aa, Homo sapiens
  misc_feature: Table A; Target 38409; HLA-C*04:01; MAGEA11; ENSG00000185247; TAA
SQDLPRVQV

SEQ ID NO: 38410 - protein, 9 aa, Homo sapiens
  misc_feature: Table A; Target 38410; HLA-C*05:01; MAGEA11; ENSG00000185247; TAA
SQDLPRVQV

SEQ ID NO: 38411 - protein, 9 aa, Homo sapiens
  misc_feature: Table A; Target 38411; HLA-C*07:02; MAGEA11; ENSG00000185247; TAA
SQDLPRVQV

SEQ ID NO: 38412 - protein, 10 aa, Homo sapiens
  misc_feature: Table A; Target 38412; HLA-B*15:01; MAGEA11; ENSG00000185247; TAA
SQDLPRVQVF

SEQ ID NO: 38413 - protein, 10 aa, Homo sapiens
  misc_feature: Table A; Target 38413; HLA-B*15:03; MAGEA11; ENSG00000185247; TAA
SQDLPRVQVF

SEQ ID NO: 38414 - protein, 10 aa, Homo sapiens
  misc_feature: Table A; Target 38414; HLA-B*37:01; MAGEA11; ENSG00000185247; TAA
SQDLPRVQVF

SEQ ID NO: 38415 - protein, 10 aa, Homo sapiens
  misc_feature: Table A; Target 38415; HLA-B*38:01; MAGEA11; ENSG00000185247; TAA
SQDLPRVQVF

SEQ ID NO: 38416 - protein, 10 aa, Homo sapiens
  misc_feature: Table A; Target 38416; HLA-B*44:02; MAGEA11; ENSG00000185247; TAA
SQDLPRVQVF

SEQ ID NO: 38417 - protein, 10 aa, Homo sapiens
  misc_feature: Table A; Target 38417; HLA-B*44:03; MAGEA11; ENSG00000185247; TAA
SQDLPRVQVF

SEQ ID NO: 38418 - protein, 10 aa, Homo sapiens
  misc_feature: Table A; Target 38418; HLA-C*05:01; MAGEA11; ENSG00000185247; TAA
SQDLPRVQVF

SEQ ID NO: 38419 - protein, 10 aa, Homo sapiens
  misc_feature: Table A; Target 38419; HLA-C*16:04; MAGEA11; ENSG00000185247; TAA
SQDLPRVQVF

SEQ ID NO: 38420 - protein, 11 aa, Homo sapiens
  misc_feature: Table A; Target 38420; HLA-A*68:02; MAGEA11; ENSG00000185247; TAA
STLNVGTLEEL

SEQ ID NO: 38421 - protein, 9 aa, Homo sapiens
  misc_feature: Table A; Target 38421; HLA-A*25:01; MAGEA11; ENSG00000185247; TAA
SVIKNYEDY

SEQ ID NO: 38422 - protein, 9 aa, Homo sapiens
  misc_feature: Table A; Target 38422; HLA-A*26:01; MAGEA11; ENSG00000185247; TAA
SVIKNYEDY

SEQ ID NO: 38423 - protein, 9 aa, Homo sapiens
  misc_feature: Table A; Target 38423; HLA-A*29:02; MAGEA11; ENSG00000185247; TAA
SVIKNYEDY

SEQ ID NO: 38424 - protein, 9 aa, Homo sapiens
  misc_feature: Table A; Target 38424; HLA-A*30:02; MAGEA11; ENSG00000185247; TAA
SVIKNYEDY

SEQ ID NO: 38425 - protein, 9 aa, Homo sapiens
  misc_feature: Table A; Target 38425; HLA-A*32:01; MAGEA11; ENSG00000185247; TAA
SVIKNYEDY

SEQ ID NO: 38426 - protein, 9 aa, Homo sapiens
  misc_feature: Table A; Target 38426; HLA-B*15:01; MAGEA11; ENSG00000185247; TAA
SVIKNYEDY

SEQ ID NO: 38427 - protein, 9 aa, Homo sapiens
  misc_feature: Table A; Target 38427; HLA-B*35:01; MAGEA11; ENSG00000185247; TAA
SVIKNYEDY

SEQ ID NO: 38428 - protein, 9 aa, Homo sapiens
  misc_feature: Table A; Target 38428; HLA-B*46:01; MAGEA11; ENSG00000185247; TAA
SVIKNYEDY

SEQ ID NO: 38429 - protein, 9 aa, Homo sapiens
  misc_feature: Table A; Target 38429; HLA-B*58:01; MAGEA11; ENSG00000185247; TAA
SVIKNYEDY

SEQ ID NO: 38430 - protein, 9 aa, Homo sapiens
  misc_feature: Table A; Target 38430; HLA-C*07:04; MAGEA11; ENSG00000185247; TAA
SVIKNYEDY

SEQ ID NO: 38431 - protein, 10 aa, Homo sapiens
  misc_feature: Table A; Target 38431; HLA-B*57:01; MAGEA11; ENSG00000185247; TAA
SVIKNYEDYF

SEQ ID NO: 38432 - protein, 8 aa, Homo sapiens
  misc_feature: Table A; Target 38432; HLA-A*23:01; MAGEA11; ENSG00000185247; TAA
SYVLVTSL

SEQ ID NO: 38433 - protein, 8 aa, Homo sapiens
  misc_feature: Table A; Target 38433; HLA-A*24:02; MAGEA11; ENSG00000185247; TAA
SYVLVTSL

SEQ ID NO: 38434 - protein, 8 aa, Homo sapiens
  misc_feature: Table A; Target 38434; HLA-B*15:03; MAGEA11; ENSG00000185247; TAA
SYVLVTSL

SEQ ID NO: 38435 - protein, 8 aa, Homo sapiens
  misc_feature: Table A; Target 38435; HLA-B*37:01; MAGEA11; ENSG00000185247; TAA
SYVLVTSL

SEQ ID NO: 38436 - protein, 8 aa, Homo sapiens
  misc_feature: Table A; Target 38436; HLA-B*40:02; MAGEA11; ENSG00000185247; TAA
SYVLVTSL

SEQ ID NO: 38437 - protein, 8 aa, Homo sapiens
  misc_feature: Table A; Target 38437; HLA-C*01:02; MAGEA11; ENSG00000185247; TAA
SYVLVTSL

SEQ ID NO: 38438 - protein, 8 aa, Homo sapiens
  misc_feature: Table A; Target 38438; HLA-C*14:02; MAGEA11; ENSG00000185247; TAA
SYVLVTSL

SEQ ID NO: 38439 - protein, 10 aa, Homo sapiens
  misc_feature: Table A; Target 38439; HLA-A*23:01; MAGEA11; ENSG00000185247; TAA
SYVLVTSLNL

SEQ ID NO: 38440 - protein, 10 aa, Homo sapiens
  misc_feature: Table A; Target 38440; HLA-A*24:02; MAGEA11; ENSG00000185247; TAA
SYVLVTSLNL

SEQ ID NO: 38441 - protein, 10 aa, Homo sapiens
  misc_feature: Table A; Target 38441; HLA-A*23:01; MAGEA11; ENSG00000185247; TAA
TAMDAIFGSL

SEQ ID NO: 38442 - protein, 10 aa, Homo sapiens
  misc_feature: Table A; Target 38442; HLA-A*25:01; MAGEA11; ENSG00000185247; TAA
TAMDAIFGSL

SEQ ID NO: 38443 - protein, 10 aa, Homo sapiens
  misc_feature: Table A; Target 38443; HLA-A*26:01; MAGEA11; ENSG00000185247; TAA
TAMDAIFGSL

SEQ ID NO: 38444 - protein, 10 aa, Homo sapiens
  misc_feature: Table A; Target 38444; HLA-A*30:01; MAGEA11; ENSG00000185247; TAA
TAMDAIFGSL

SEQ ID NO: 38445 - protein, 10 aa, Homo sapiens
  misc_feature: Table A; Target 38445; HLA-A*30:02; MAGEA11; ENSG00000185247; TAA
TAMDAIFGSL

SEQ ID NO: 38446 - protein, 10 aa, Homo sapiens
  misc_feature: Table A; Target 38446; HLA-A*68:01; MAGEA11; ENSG00000185247; TAA
TAMDAIFGSL

SEQ ID NO: 38447 - protein, 10 aa, Homo sapiens
  misc_feature: Table A; Target 38447; HLA-A*68:02; MAGEA11; ENSG00000185247; TAA
TAMDAIFGSL

SEQ ID NO: 38448 - protein, 10 aa, Homo sapiens
  misc_feature: Table A; Target 38448; HLA-B*27:02; MAGEA11; ENSG00000185247; TAA
TAMDAIFGSL

SEQ ID NO: 38449 - protein, 10 aa, Homo sapiens
  misc_feature: Table A; Target 38449; HLA-B*35:01; MAGEA11; ENSG00000185247; TAA
TAMDAIFGSL

SEQ ID NO: 38450 - protein, 10 aa, Homo sapiens
  misc_feature: Table A; Target 38450; HLA-B*35:03; MAGEA11; ENSG00000185247; TAA
TAMDAIFGSL

SEQ ID NO: 38451 - protein, 10 aa, Homo sapiens
  misc_feature: Table A; Target 38451; HLA-B*38:01; MAGEA11; ENSG00000185247; TAA
TAMDAIFGSL

SEQ ID NO: 38452 - protein, 10 aa, Homo sapiens
  misc_feature: Table A; Target 38452; HLA-B*39:01; MAGEA11; ENSG00000185247; TAA
TAMDAIFGSL

SEQ ID NO: 38453 - protein, 10 aa, Homo sapiens
  misc_feature: Table A; Target 38453; HLA-B*40:01; MAGEA11; ENSG00000185247; TAA
TAMDAIFGSL

SEQ ID NO: 38454 - protein, 10 aa, Homo sapiens
  misc_feature: Table A; Target 38454; HLA-B*46:01; MAGEA11; ENSG00000185247; TAA
TAMDAIFGSL

SEQ ID NO: 38455 - protein, 10 aa, Homo sapiens
  misc_feature: Table A; Target 38455; HLA-B*58:01; MAGEA11; ENSG00000185247; TAA
TAMDAIFGSL

SEQ ID NO: 38456 - protein, 10 aa, Homo sapiens
  misc_feature: Table A; Target 38456; HLA-C*01:02; MAGEA11; ENSG00000185247; TAA
TAMDAIFGSL

SEQ ID NO: 38457 - protein, 10 aa, Homo sapiens
  misc_feature: Table A; Target 38457; HLA-C*02:02; MAGEA11; ENSG00000185247; TAA
TAMDAIFGSL

SEQ ID NO: 38458 - protein, 10 aa, Homo sapiens
  misc_feature: Table A; Target 38458; HLA-C*03:03; MAGEA11; ENSG00000185247; TAA
TAMDAIFGSL

SEQ ID NO: 38459 - protein, 10 aa, Homo sapiens
  misc_feature: Table A; Target 38459; HLA-C*03:04; MAGEA11; ENSG00000185247; TAA
TAMDAIFGSL

SEQ ID NO: 38460 - protein, 10 aa, Homo sapiens
  misc_feature: Table A; Target 38460; HLA-C*05:01; MAGEA11; ENSG00000185247; TAA
TAMDAIFGSL

SEQ ID NO: 38461 - protein, 10 aa, Homo sapiens
  misc_feature: Table A; Target 38461; HLA-C*07:02; MAGEA11; ENSG00000185247; TAA
TAMDAIFGSL

SEQ ID NO: 38462 - protein, 10 aa, Homo sapiens
  misc_feature: Table A; Target 38462; HLA-C*07:06; MAGEA11; ENSG00000185247; TAA
TAMDAIFGSL

SEQ ID NO: 38463 - protein, 10 aa, Homo sapiens
  misc_feature: Table A; Target 38463; HLA-C*12:03; MAGEA11; ENSG00000185247; TAA
TAMDAIFGSL

SEQ ID NO: 38464 - protein, 10 aa, Homo sapiens
  misc_feature: Table A; Target 38464; HLA-C*16:04; MAGEA11; ENSG00000185247; TAA
TAMDAIFGSL

SEQ ID NO: 38465 - protein, 8 aa, Homo sapiens
  misc_feature: Table A; Target 38465; HLA-B*37:01; MAGEA11; ENSG00000185247; TAA
TDPACYEF

SEQ ID NO: 38466 - protein, 10 aa, Homo sapiens
  misc_feature: Table A; Target 38466; HLA-A*30:01; MAGEA11; ENSG00000185247; TAA
TERAPYGPQL

SEQ ID NO: 38467 - protein, 10 aa, Homo sapiens
  misc_feature: Table A; Target 38467; HLA-B*40:01; MAGEA11; ENSG00000185247; TAA
TERAPYGPQL

SEQ ID NO: 38468 - protein, 10 aa, Homo sapiens
  misc_feature: Table A; Target 38468; HLA-B*40:02; MAGEA11; ENSG00000185247; TAA
TERAPYGPQL

SEQ ID NO: 38469 - protein, 9 aa, Homo sapiens
  misc_feature: Table A; Target 38469; HLA-A*29:02; MAGEA11; ENSG00000185247; TAA
TQNWVQEKY

SEQ ID NO: 38470 - protein, 9 aa, Homo sapiens
  misc_feature: Table A; Target 38470; HLA-A*30:02; MAGEA11; ENSG00000185247; TAA
TQNWVQEKY

SEQ ID NO: 38471 - protein, 9 aa, Homo sapiens
  misc_feature: Table A; Target 38471; HLA-A*32:01; MAGEA11; ENSG00000185247; TAA
TQNWVQEKY

SEQ ID NO: 38472 - protein, 9 aa, Homo sapiens
  misc_feature: Table A; Target 38472; HLA-B*15:01; MAGEA11; ENSG00000185247; TAA
TQNWVQEKY

SEQ ID NO: 38473 - protein, 9 aa, Homo sapiens
  misc_feature: Table A; Target 38473; HLA-B*15:03; MAGEA11; ENSG00000185247; TAA
TQNWVQEKY

SEQ ID NO: 38474 - protein, 9 aa, Homo sapiens
  misc_feature: Table A; Target 38474; HLA-C*02:02; MAGEA11; ENSG00000185247; TAA
TQNWVQEKY

SEQ ID NO: 38475 - protein, 9 aa, Homo sapiens
  misc_feature: Table A; Target 38475; HLA-C*07:04; MAGEA11; ENSG00000185247; TAA
TQNWVQEKY

SEQ ID NO: 38476 - protein, 9 aa, Homo sapiens
  misc_feature: Table A; Target 38476; HLA-C*16:04; MAGEA11; ENSG00000185247; TAA
TQNWVQEKY

SEQ ID NO: 38477 - protein, 9 aa, Homo sapiens
  misc_feature: Table A; Target 38477; HLA-C*06:02; MAGEA11; ENSG00000185247; TAA
TRVIMPLEQ

SEQ ID NO: 38478 - protein, 9 aa, Homo sapiens
  misc_feature: Table A; Target 38478; HLA-A*32:01; MAGEA11; ENSG00000185247; TAA
TSKMKVLEY

SEQ ID NO: 38479 - protein, 9 aa, Homo sapiens
  misc_feature: Table A; Target 38479; HLA-B*08:01; MAGEA11; ENSG00000185247; TAA
TSKMKVLEY

SEQ ID NO: 38480 - protein, 9 aa, Homo sapiens
  misc_feature: Table A; Target 38480; HLA-B*46:01; MAGEA11; ENSG00000185247; TAA
TSKMKVLEY

SEQ ID NO: 38481 - protein, 9 aa, Homo sapiens
  misc_feature: Table A; Target 38481; HLA-B*57:01; MAGEA11; ENSG00000185247; TAA
TSKMKVLEY

SEQ ID NO: 38482 - protein, 9 aa, Homo sapiens
  misc_feature: Table A; Target 38482; HLA-C*02:02; MAGEA11; ENSG00000185247; TAA
TSKMKVLEY

SEQ ID NO: 38483 - protein, 9 aa, Homo sapiens
  misc_feature: Table A; Target 38483; HLA-C*07:01; MAGEA11; ENSG00000185247; TAA
TSKMKVLEY

SEQ ID NO: 38484 - protein, 9 aa, Homo sapiens
  misc_feature: Table A; Target 38484; HLA-C*12:03; MAGEA11; ENSG00000185247; TAA
TSKMKVLEY

SEQ ID NO: 38485 - protein, 9 aa, Homo sapiens
  misc_feature: Table A; Target 38485; HLA-C*16:01; MAGEA11; ENSG00000185247; TAA
TSKMKVLEY

SEQ ID NO: 38486 - protein, 9 aa, Homo sapiens
  misc_feature: Table A; Target 38486; HLA-C*16:02; MAGEA11; ENSG00000185247; TAA
TSKMKVLEY

SEQ ID NO: 38487 - protein, 9 aa, Homo sapiens
  misc_feature: Table A; Target 38487; HLA-A*31:01; MAGEA11; ENSG00000185247; TAA
TVRPADLTR

SEQ ID NO: 38488 - protein, 9 aa, Homo sapiens
  misc_feature: Table A; Target 38488; HLA-A*33:03; MAGEA11; ENSG00000185247; TAA
TVRPADLTR

SEQ ID NO: 38489 - protein, 9 aa, Homo sapiens
  misc_feature: Table A; Target 38489; HLA-A*68:01; MAGEA11; ENSG00000185247; TAA
TVRPADLTR

SEQ ID NO: 38490 - protein, 8 aa, Homo sapiens
  misc_feature: Table A; Target 38490; HLA-A*30:02; MAGEA11; ENSG00000185247; TAA
VDPTSHSY

SEQ ID NO: 38491 - protein, 8 aa, Homo sapiens
  misc_feature: Table A; Target 38491; HLA-B*15:03; MAGEA11; ENSG00000185247; TAA
VDPTSHSY

SEQ ID NO: 38492 - protein, 8 aa, Homo sapiens
  misc_feature: Table A; Target 38492; HLA-B*37:01; MAGEA11; ENSG00000185247; TAA
VDPTSHSY

SEQ ID NO: 38493 - protein, 8 aa, Homo sapiens
  misc_feature: Table A; Target 38493; HLA-C*01:02; MAGEA11; ENSG00000185247; TAA
VDPTSHSY

SEQ ID NO: 38494 - protein, 8 aa, Homo sapiens
  misc_feature: Table A; Target 38494; HLA-C*04:01; MAGEA11; ENSG00000185247; TAA
VDPTSHSY

SEQ ID NO: 38495 - protein, 8 aa, Homo sapiens
  misc_feature: Table A; Target 38495; HLA-C*07:01; MAGEA11; ENSG00000185247; TAA
VDPTSHSY

SEQ ID NO: 38496 - protein, 8 aa, Homo sapiens
  misc_feature: Table A; Target 38496; HLA-C*14:02; MAGEA11; ENSG00000185247; TAA
VDPTSHSY

SEQ ID NO: 38497 - protein, 8 aa, Homo sapiens
  misc_feature: Table A; Target 38497; HLA-C*16:02; MAGEA11; ENSG00000185247; TAA
VDPTSHSY

SEQ ID NO: 38498 - protein, 9 aa, Homo sapiens
  misc_feature: Table A; Target 38498; HLA-C*02:02; MAGEA11; ENSG00000185247; TAA
VIKNYEDYF

SEQ ID NO: 38499 - protein, 8 aa, Homo sapiens
  misc_feature: Table A; Target 38499; HLA-A*31:01; MAGEA11; ENSG00000185247; TAA
VIMPLEQR

SEQ ID NO: 38500 - protein, 9 aa, Homo sapiens
  misc_feature: Table A; Target 38500; HLA-B*15:03; MAGEA11; ENSG00000185247; TAA
VKEVDPTSH

SEQ ID NO: 38501 - protein, 11 aa, Homo sapiens
  misc_feature: Table A; Target 38501; HLA-B*15:03; MAGEA11; ENSG00000185247; TAA
VKEVDPTSHSY

SEQ ID NO: 38502 - protein, 8 aa, Homo sapiens
  misc_feature: Table A; Target 38502; HLA-A*30:02; MAGEA11; ENSG00000185247; TAA
VLSIMGVY

SEQ ID NO: 38503 - protein, 8 aa, Homo sapiens
  misc_feature: Table A; Target 38503; HLA-B*15:01; MAGEA11; ENSG00000185247; TAA
VLSIMGVY

SEQ ID NO: 38504 - protein, 8 aa, Homo sapiens
  misc_feature: Table A; Target 38504; HLA-B*15:03; MAGEA11; ENSG00000185247; TAA
VLSIMGVY

SEQ ID NO: 38505 - protein, 8 aa, Homo sapiens
  misc_feature: Table A; Target 38505; HLA-B*39:01; MAGEA11; ENSG00000185247; TAA
VLSIMGVY

SEQ ID NO: 38506 - protein, 8 aa, Homo sapiens
  misc_feature: Table A; Target 38506; HLA-B*46:01; MAGEA11; ENSG00000185247; TAA
VLSIMGVY

SEQ ID NO: 38507 - protein, 8 aa, Homo sapiens
  misc_feature: Table A; Target 38507; HLA-C*07:01; MAGEA11; ENSG00000185247; TAA
VLSIMGVY

SEQ ID NO: 38508 - protein, 8 aa, Homo sapiens
  misc_feature: Table A; Target 38508; HLA-A*23:01; MAGEA11; ENSG00000185247; TAA
VLVTSLNL

SEQ ID NO: 38509 - protein, 10 aa, Homo sapiens
  misc_feature: Table A; Target 38509; HLA-A*01:01; MAGEA11; ENSG00000185247; TAA
VLVTSLNLSY

SEQ ID NO: 38510 - protein, 10 aa, Homo sapiens
  misc_feature: Table A; Target 38510; HLA-A*29:02; MAGEA11; ENSG00000185247; TAA
VLVTSLNLSY

SEQ ID NO: 38511 - protein, 10 aa, Homo sapiens
  misc_feature: Table A; Target 38511; HLA-A*30:02; MAGEA11; ENSG00000185247; TAA
VLVTSLNLSY

SEQ ID NO: 38512 - protein, 10 aa, Homo sapiens
  misc_feature: Table A; Target 38512; HLA-B*15:01; MAGEA11; ENSG00000185247; TAA
VLVTSLNLSY

SEQ ID NO: 38513 - protein, 10 aa, Homo sapiens
  misc_feature: Table A; Target 38513; HLA-B*15:03; MAGEA11; ENSG00000185247; TAA
VLVTSLNLSY

SEQ ID NO: 38514 - protein, 10 aa, Homo sapiens
  misc_feature: Table A; Target 38514; HLA-B*46:01; MAGEA11; ENSG00000185247; TAA
VLVTSLNLSY

SEQ ID NO: 38515 - protein, 9 aa, Homo sapiens
  misc_feature: Table A; Target 38515; HLA-A*02:01; MAGEA11; ENSG00000185247; TAA
VLWGPITQI

SEQ ID NO: 38516 - protein, 9 aa, Homo sapiens
  misc_feature: Table A; Target 38516; HLA-A*02:03; MAGEA11; ENSG00000185247; TAA
VLWGPITQI

SEQ ID NO: 38517 - protein, 9 aa, Homo sapiens
  misc_feature: Table A; Target 38517; HLA-A*02:04; MAGEA11; ENSG00000185247; TAA
VLWGPITQI

SEQ ID NO: 38518 - protein, 9 aa, Homo sapiens
  misc_feature: Table A; Target 38518; HLA-A*02:07; MAGEA11; ENSG00000185247; TAA
VLWGPITQI

SEQ ID NO: 38519 - protein, 9 aa, Homo sapiens
  misc_feature: Table A; Target 38519; HLA-A*23:01; MAGEA11; ENSG00000185247; TAA
VLWGPITQI

SEQ ID NO: 38520 - protein, 9 aa, Homo sapiens
  misc_feature: Table A; Target 38520; HLA-B*13:02; MAGEA11; ENSG00000185247; TAA
VLWGPITQI

SEQ ID NO: 38521 - protein, 9 aa, Homo sapiens
  misc_feature: Table A; Target 38521; HLA-B*55:01; MAGEA11; ENSG00000185247; TAA
VLWGPITQI

SEQ ID NO: 38522 - protein, 8 aa, Homo sapiens
  misc_feature: Table A; Target 38522; HLA-B*51:01; MAGEA11; ENSG00000185247; TAA
VMWEVLSI

SEQ ID NO: 38523 - protein, 11 aa, Homo sapiens
  misc_feature: Table A; Target 38523; HLA-A*02:01; MAGEA11; ENSG00000185247; TAA
VMWEVLSIMGV

SEQ ID NO: 38524 - protein, 11 aa, Homo sapiens
  misc_feature: Table A; Target 38524; HLA-A*02:07; MAGEA11; ENSG00000185247; TAA
VMWEVLSIMGV

SEQ ID NO: 38525 - protein, 8 aa, Homo sapiens
  misc_feature: Table A; Target 38525; HLA-B*55:01; MAGEA11; ENSG00000185247; TAA
VPGTDPAC

SEQ ID NO: 38526 - protein, 9 aa, Homo sapiens
  misc_feature: Table A; Target 38526; HLA-B*35:01; MAGEA11; ENSG00000185247; TAA
VPGTDPACY

SEQ ID NO: 38527 - protein, 9 aa, Homo sapiens
  misc_feature: Table A; Target 38527; HLA-B*55:01; MAGEA11; ENSG00000185247; TAA
VPGTDPACY

SEQ ID NO: 38528 - protein, 8 aa, Homo sapiens
  misc_feature: Table A; Target 38528; HLA-B*15:01; MAGEA11; ENSG00000185247; TAA
VQEKYLVY

SEQ ID NO: 38529 - protein, 8 aa, Homo sapiens
  misc_feature: Table A; Target 38529; HLA-B*15:03; MAGEA11; ENSG00000185247; TAA
VQEKYLVY

SEQ ID NO: 38530 - protein, 8 aa, Homo sapiens
  misc_feature: Table A; Target 38530; HLA-C*07:01; MAGEA11; ENSG00000185247; TAA
VQEKYLVY

SEQ ID NO: 38531 - protein, 9 aa, Homo sapiens
  misc_feature: Table A; Target 38531; HLA-A*31:01; MAGEA11; ENSG00000185247; TAA
VQEKYLVYR

SEQ ID NO: 38532 - protein, 8 aa, Homo sapiens
  misc_feature: Table A; Target 38532; HLA-A*01:01; MAGEA11; ENSG00000185247; TAA
VTSLNLSY

SEQ ID NO: 38533 - protein, 9 aa, Homo sapiens
  misc_feature: Table A; Target 38533; HLA-A*23:01; MAGEA11; ENSG00000185247; TAA
VYAGREHFL

SEQ ID NO: 38534 - protein, 9 aa, Homo sapiens
  misc_feature: Table A; Target 38534; HLA-A*24:02; MAGEA11; ENSG00000185247; TAA
VYAGREHFL

SEQ ID NO: 38535 - protein, 10 aa, Homo sapiens
  misc_feature: Table A; Target 38535; HLA-A*24:02; MAGEA11; ENSG00000185247; TAA
VYAGREHFLF

SEQ ID NO: 38536 - protein, 9 aa, Homo sapiens
  misc_feature: Table A; Target 38536; HLA-B*40:02; MAGEA11; ENSG00000185247; TAA
WEVLSIMGV

SEQ ID NO: 38537 - protein, 9 aa, Homo sapiens
  misc_feature: Table A; Target 38537; HLA-B*49:01; MAGEA11; ENSG00000185247; TAA
WEVLSIMGV

SEQ ID NO: 38538 - protein, 9 aa, Homo sapiens
  misc_feature: Table A; Target 38538; HLA-A*03:01; MAGEA11; ENSG00000185247; TAA
WVQEKYLVY

SEQ ID NO: 38539 - protein, 9 aa, Homo sapiens
  misc_feature: Table A; Target 38539; HLA-A*25:01; MAGEA11; ENSG00000185247; TAA
WVQEKYLVY

SEQ ID NO: 38540 - protein, 9 aa, Homo sapiens
  misc_feature: Table A; Target 38540; HLA-A*26:01; MAGEA11; ENSG00000185247; TAA
WVQEKYLVY

SEQ ID NO: 38541 - protein, 9 aa, Homo sapiens
  misc_feature: Table A; Target 38541; HLA-A*29:02; MAGEA11; ENSG00000185247; TAA
WVQEKYLVY

SEQ ID NO: 38542 - protein, 9 aa, Homo sapiens
  misc_feature: Table A; Target 38542; HLA-A*30:02; MAGEA11; ENSG00000185247; TAA
WVQEKYLVY

SEQ ID NO: 38543 - protein, 9 aa, Homo sapiens
  misc_feature: Table A; Target 38543; HLA-B*15:01; MAGEA11; ENSG00000185247; TAA
WVQEKYLVY

SEQ ID NO: 38544 - protein, 9 aa, Homo sapiens
  misc_feature: Table A; Target 38544; HLA-B*35:01; MAGEA11; ENSG00000185247; TAA
WVQEKYLVY

SEQ ID NO: 38545 - protein, 10 aa, Homo sapiens
  misc_feature: Table A; Target 38545; HLA-A*31:01; MAGEA11; ENSG00000185247; TAA
WVQEKYLVYR

SEQ ID NO: 38546 - protein, 10 aa, Homo sapiens
  misc_feature: Table A; Target 38546; HLA-A*33:01; MAGEA11; ENSG00000185247; TAA
WVQEKYLVYR

SEQ ID NO: 38547 - protein, 8 aa, Homo sapiens
  misc_feature: Table A; Target 38547; HLA-C*07:04; MAGEA11; ENSG00000185247; TAA
YAGREHFL

SEQ ID NO: 38548 - protein, 9 aa, Homo sapiens
  misc_feature: Table A; Target 38548; HLA-B*57:01; MAGEA11; ENSG00000185247; TAA
YAGREHFLF

SEQ ID NO: 38549 - protein, 10 aa, Homo sapiens
  misc_feature: Table A; Target 38549; HLA-C*07:01; MAGEA11; ENSG00000185247; TAA
YDGIQCNEQS

SEQ ID NO: 38550 - protein, 8 aa, Homo sapiens
  misc_feature: Table A; Target 38550; HLA-B*18:01; MAGEA11; ENSG00000185247; TAA
YEDYFPEI

SEQ ID NO: 38551 - protein, 8 aa, Homo sapiens
  misc_feature: Table A; Target 38551; HLA-B*49:01; MAGEA11; ENSG00000185247; TAA
YEDYFPEI

SEQ ID NO: 38552 - protein, 9 aa, Homo sapiens
  misc_feature: Table A; Target 38552; HLA-B*18:01; MAGEA11; ENSG00000185247; TAA
YEDYFPEIF

SEQ ID NO: 38553 - protein, 9 aa, Homo sapiens
  misc_feature: Table A; Target 38553; HLA-B*49:01; MAGEA11; ENSG00000185247; TAA
YEDYFPEIF

SEQ ID NO: 38554 - protein, 9 aa, Homo sapiens
  misc_feature: Table A; Target 38554; HLA-A*02:07; MAGEA11; ENSG00000185247; TAA
YFPEIFREA

SEQ ID NO: 38555 - protein, 9 aa, Homo sapiens
  misc_feature: Table A; Target 38555; HLA-A*29:02; MAGEA11; ENSG00000185247; TAA
YFPEIFREA

SEQ ID NO: 38556 - protein, 9 aa, Homo sapiens
  misc_feature: Table A; Target 38556; HLA-B*54:01; MAGEA11; ENSG00000185247; TAA
YFPEIFREA

SEQ ID NO: 38557 - protein, 9 aa, Homo sapiens
  misc_feature: Table A; Target 38557; HLA-B*27:05; MAGEA11; ENSG00000185247; TAA
YPSLYEDAL

SEQ ID NO: 38558 - protein, 9 aa, Homo sapiens
  misc_feature: Table A; Target 38558; HLA-B*35:01; MAGEA11; ENSG00000185247; TAA
YPSLYEDAL

SEQ ID NO: 38559 - protein, 9 aa, Homo sapiens
  misc_feature: Table A; Target 38559; HLA-B*35:03; MAGEA11; ENSG00000185247; TAA
YPSLYEDAL

SEQ ID NO: 38560 - protein, 9 aa, Homo sapiens
  misc_feature: Table A; Target 38560; HLA-B*38:01; MAGEA11; ENSG00000185247; TAA
YPSLYEDAL

SEQ ID NO: 38561 - protein, 9 aa, Homo sapiens
  misc_feature: Table A; Target 38561; HLA-B*39:01; MAGEA11; ENSG00000185247; TAA
YPSLYEDAL

SEQ ID NO: 38562 - protein, 9 aa, Homo sapiens
  misc_feature: Table A; Target 38562; HLA-B*55:01; MAGEA11; ENSG00000185247; TAA
YPSLYEDAL

SEQ ID NO: 38563 - protein, 9 aa, Homo sapiens
  misc_feature: Table A; Target 38563; HLA-C*03:03; MAGEA11; ENSG00000185247; TAA
YPSLYEDAL

SEQ ID NO: 38564 - protein, 9 aa, Homo sapiens
  misc_feature: Table A; Target 38564; HLA-B*27:05; MAGEA11; ENSG00000185247; TAA
YRVKGLITK

SEQ ID NO: 38565 - protein, 9 aa, Homo sapiens
  misc_feature: Table A; Target 38565; HLA-C*06:02; MAGEA11; ENSG00000185247; TAA
YRVKGLITK

SEQ ID NO: 38566 - protein, 9 aa, Homo sapiens
  misc_feature: Table A; Target 38566; HLA-C*07:01; MAGEA11; ENSG00000185247; TAA
YRVKGLITK

SEQ ID NO: 38567 - protein, 9 aa, Homo sapiens
  misc_feature: Table A; Target 38567; HLA-A*02:01; MAGEA11; ENSG00000185247; TAA
YVLVTSLNL

SEQ ID NO: 38568 - protein, 9 aa, Homo sapiens
  misc_feature: Table A; Target 38568; HLA-A*02:04; MAGEA11; ENSG00000185247; TAA
YVLVTSLNL

SEQ ID NO: 38569 - protein, 9 aa, Homo sapiens
  misc_feature: Table A; Target 38569; HLA-A*02:07; MAGEA11; ENSG00000185247; TAA
YVLVTSLNL

SEQ ID NO: 38570 - protein, 9 aa, Homo sapiens
  misc_feature: Table A; Target 38570; HLA-A*23:01; MAGEA11; ENSG00000185247; TAA
YVLVTSLNL

SEQ ID NO: 38571 - protein, 9 aa, Homo sapiens
  misc_feature: Table A; Target 38571; HLA-A*24:02; MAGEA11; ENSG00000185247; TAA
YVLVTSLNL

SEQ ID NO: 38572 - protein, 9 aa, Homo sapiens
  misc_feature: Table A; Target 38572; HLA-B*13:02; MAGEA11; ENSG00000185247; TAA
YVLVTSLNL

SEQ ID NO: 38573 - protein, 9 aa, Homo sapiens
  misc_feature: Table A; Target 38573; HLA-C*01:02; MAGEA11; ENSG00000185247; TAA
YVLVTSLNL

SEQ ID NO: 38574 - protein, 9 aa, Homo sapiens
  misc_feature: Table A; Target 38574; HLA-C*03:03; MAGEA11; ENSG00000185247; TAA
YVLVTSLNL

SEQ ID NO: 38575 - protein, 9 aa, Homo sapiens
  misc_feature: Table A; Target 38575; HLA-C*03:04; MAGEA11; ENSG00000185247; TAA
YVLVTSLNL

SEQ ID NO: 38576 - protein, 11 aa, Homo sapiens
  misc_feature: Table A; Target 38576; HLA-A*01:01; MAGEA11; ENSG00000185247; TAA
YVLVTSLNLSY

SEQ ID NO: 38577 - protein, 11 aa, Homo sapiens
  misc_feature: Table A; Target 38577; HLA-A*29:02; MAGEA11; ENSG00000185247; TAA
YVLVTSLNLSY

SEQ ID NO: 38578 - protein, 11 aa, Homo sapiens
  misc_feature: Table A; Target 38578; HLA-A*30:02; MAGEA11; ENSG00000185247; TAA
YVLVTSLNLSY

SEQ ID NO: 38579 - protein, 9 aa, Homo sapiens
  misc_feature: Table A; Target 38579; HLA-B*38:01; MAGEA11,MAGEA3,MAGEA6; ENSG00000185247,ENSG00000221867,ENSG00000197172; TAA,CTA,CTA
QHCKPEEGL

SEQ ID NO: 38580 - protein, 8 aa, Homo sapiens
  misc_feature: Table A; Target 38580; HLA-C*16:04; MAGEA11,MAGEA4; ENSG00000185247,ENSG00000147381; TAA,TAA
FGIDVKEV

SEQ ID NO: 38581 - protein, 8 aa, Homo sapiens
  misc_feature: Table A; Target 38581; HLA-B*46:01; MAGEA11,MAGEA8; ENSG00000185247,ENSG00000156009; TAA,TAA
FGIDVKEV

SEQ ID NO: 38582 - protein, 8 aa, Homo sapiens
  misc_feature: Table A; Target 38582; HLA-B*51:01; MAGEA11,MAGEA8; ENSG00000185247,ENSG00000156009; TAA,TAA
FGIDVKEV

SEQ ID NO: 38583 - protein, 8 aa, Homo sapiens
  misc_feature: Table A; Target 38583; HLA-C*12:03; MAGEA11,MAGEA8; ENSG00000185247,ENSG00000156009; TAA,TAA
FGIDVKEV

SEQ ID NO: 38584 - protein, 8 aa, Homo sapiens
  misc_feature: Table A; Target 38584; HLA-C*16:02; MAGEA11,MAGEA8; ENSG00000185247,ENSG00000156009; TAA,TAA
FGIDVKEV

SEQ ID NO: 38585 - protein, 8 aa, Homo sapiens
  misc_feature: Table A; Target 38585; HLA-B*37:01; MAGEA11,MAGEB2; ENSG00000185247,ENSG00000099399; TAA,CTA
AETSKMKV

SEQ ID NO: 38586 - protein, 8 aa, Homo sapiens
  misc_feature: Table A; Target 38586; HLA-B*49:01; MAGEA11,MAGEB2,MAGEB4; ENSG00000185247,ENSG00000099399,ENSG00000120289; TAA,CTA,CTA
AETSKMKV

SEQ ID NO: 38587 - protein, 9 aa, Homo sapiens
  misc_feature: Table A; Target 38587; HLA-A*30:01; MAGEA11,MAGEB2,MAGEB4; ENSG00000185247,ENSG00000099399,ENSG00000120289; TAA,CTA,CTA
AETSKMKVL

SEQ ID NO: 38588 - protein, 9 aa, Homo sapiens
  misc_feature: Table A; Target 38588; HLA-B*37:01; MAGEA11,MAGEB2,MAGEB4; ENSG00000185247,ENSG00000099399,ENSG00000120289; TAA,CTA,CTA
AETSKMKVL

SEQ ID NO: 38589 - protein, 9 aa, Homo sapiens
  misc_feature: Table A; Target 38589; HLA-B*40:01; MAGEA11,MAGEB2,MAGEB4; ENSG00000185247,ENSG00000099399,ENSG00000120289; TAA,CTA,CTA
AETSKMKVL

SEQ ID NO: 38590 - protein, 9 aa, Homo sapiens
  misc_feature: Table A; Target 38590; HLA-B*40:02; MAGEA11,MAGEB2,MAGEB4; ENSG00000185247,ENSG00000099399,ENSG00000120289; TAA,CTA,CTA
AETSKMKVL

SEQ ID NO: 38591 - protein, 9 aa, Homo sapiens
  misc_feature: Table A; Target 38591; HLA-B*44:02; MAGEA11,MAGEB2,MAGEB4; ENSG00000185247,ENSG00000099399,ENSG00000120289; TAA,CTA,CTA
AETSKMKVL

SEQ ID NO: 38592 - protein, 9 aa, Homo sapiens
  misc_feature: Table A; Target 38592; HLA-B*44:03; MAGEA11,MAGEB2,MAGEB4; ENSG00000185247,ENSG00000099399,ENSG00000120289; TAA,CTA,CTA
AETSKMKVL

SEQ ID NO: 38593 - protein, 9 aa, Homo sapiens
  misc_feature: Table A; Target 38593; HLA-B*49:01; MAGEA11,MAGEB2,MAGEB4; ENSG00000185247,ENSG00000099399,ENSG00000120289; TAA,CTA,CTA
AETSKMKVL

SEQ ID NO: 38594 - protein, 9 aa, Homo sapiens
  misc_feature: Table A; Target 38594; HLA-C*16:04; MAGEA11,MAGEB2,MAGEB4; ENSG00000185247,ENSG00000099399,ENSG00000120289; TAA,CTA,CTA
AETSKMKVL

SEQ ID NO: 38595 - protein, 8 aa, Homo sapiens
  misc_feature: Table A; Target 38595; HLA-B*08:01; MAGEA11,MAGEB2,MAGEB4; ENSG00000185247,ENSG00000099399,ENSG00000120289; TAA,CTA,CTA
ETSKMKVL

SEQ ID NO: 38596 - protein, 10 aa, Homo sapiens
  misc_feature: Table A; Target 38596; HLA-B*07:02; MAGEA11,MAGEB4; ENSG00000185247,ENSG00000120289; TAA,CTA
GPRAHAETSK

SEQ ID NO: 38597 - protein, 11 aa, Homo sapiens
  misc_feature: Table A; Target 38597; HLA-B*07:02; MAGEA11,MAGEB4; ENSG00000185247,ENSG00000120289; TAA,CTA
GPRAHAETSKM

SEQ ID NO: 38598 - protein, 9 aa, Homo sapiens
  misc_feature: Table A; Target 38598; HLA-C*03:04; MAGEA11,MAGEB4; ENSG00000185247,ENSG00000120289; TAA,CTA
RAHAETSKM

SEQ ID NO: 38599 - protein, 9 aa, Homo sapiens
  misc_feature: Table A; Target 38599; HLA-A*32:01; MAGEA11,MAGEC2; ENSG00000185247,ENSG00000046774; TAA,CTA
GVYAGREHF

SEQ ID NO: 38600 - protein, 9 aa, Homo sapiens
  misc_feature: Table A; Target 38600; HLA-B*15:01; MAGEA11,MAGEC2; ENSG00000185247,ENSG00000046774; TAA,CTA
GVYAGREHF

SEQ ID NO: 38601 - protein, 9 aa, Homo sapiens
  misc_feature: Table A; Target 38601; HLA-B*57:01; MAGEA11,MAGEC2; ENSG00000185247,ENSG00000046774; TAA,CTA
GVYAGREHF

SEQ ID NO: 38602 - protein, 9 aa, Homo sapiens
  misc_feature: Table A; Target 38602; HLA-C*16:01; MAGEA3; ENSG00000221867; CTA
AALSRKVAE

SEQ ID NO: 38603 - protein, 8 aa, Homo sapiens
  misc_feature: Table A; Target 38603; HLA-B*44:03; MAGEA3; ENSG00000221867; CTA
AELVHFLL

SEQ ID NO: 38604 - protein, 9 aa, Homo sapiens
  misc_feature: Table A; Target 38604; HLA-A*30:01; MAGEA3; ENSG00000221867; CTA
AELVHFLLL

SEQ ID NO: 38605 - protein, 9 aa, Homo sapiens
  misc_feature: Table A; Target 38605; HLA-B*37:01; MAGEA3; ENSG00000221867; CTA
AELVHFLLL

SEQ ID NO: 38606 - protein, 9 aa, Homo sapiens
  misc_feature: Table A; Target 38606; HLA-B*44:02; MAGEA3; ENSG00000221867; CTA
AELVHFLLL

SEQ ID NO: 38607 - protein, 9 aa, Homo sapiens
  misc_feature: Table A; Target 38607; HLA-B*44:03; MAGEA3; ENSG00000221867; CTA
AELVHFLLL

SEQ ID NO: 38608 - protein, 9 aa, Homo sapiens
  misc_feature: Table A; Target 38608; HLA-B*49:01; MAGEA3; ENSG00000221867; CTA
AELVHFLLL

SEQ ID NO: 38609 - protein, 11 aa, Homo sapiens
  misc_feature: Table A; Target 38609; HLA-B*44:02; MAGEA3; ENSG00000221867; CTA
AELVHFLLLKY

SEQ ID NO: 38610 - protein, 11 aa, Homo sapiens
  misc_feature: Table A; Target 38610; HLA-B*44:03; MAGEA3; ENSG00000221867; CTA
AELVHFLLLKY

SEQ ID NO: 38611 - protein, 9 aa, Homo sapiens
  misc_feature: Table A; Target 38611; HLA-B*49:01; MAGEA3; ENSG00000221867; CTA
AESPDPPQS

SEQ ID NO: 38612 - protein, 9 aa, Homo sapiens
  misc_feature: Table A; Target 38612; HLA-A*02:01; MAGEA3; ENSG00000221867; CTA
ALSRKVAEL

SEQ ID NO: 38613 - protein, 9 aa, Homo sapiens
  misc_feature: Table A; Target 38613; HLA-A*02:03; MAGEA3; ENSG00000221867; CTA
ALSRKVAEL

SEQ ID NO: 38614 - protein, 9 aa, Homo sapiens
  misc_feature: Table A; Target 38614; HLA-A*02:04; MAGEA3; ENSG00000221867; CTA
ALSRKVAEL

SEQ ID NO: 38615 - protein, 9 aa, Homo sapiens
  misc_feature: Table A; Target 38615; HLA-B*08:01; MAGEA3; ENSG00000221867; CTA
ALSRKVAEL

SEQ ID NO: 38616 - protein, 8 aa, Homo sapiens
  misc_feature: Table A; Target 38616; HLA-A*02:01; MAGEA3; ENSG00000221867; CTA
ALVETSYV

SEQ ID NO: 38617 - protein, 8 aa, Homo sapiens
  misc_feature: Table A; Target 38617; HLA-A*02:03; MAGEA3; ENSG00000221867; CTA
ALVETSYV

SEQ ID NO: 38618 - protein, 8 aa, Homo sapiens
  misc_feature: Table A; Target 38618; HLA-B*13:02; MAGEA3; ENSG00000221867; CTA
ALVETSYV

SEQ ID NO: 38619 - protein, 8 aa, Homo sapiens
  misc_feature: Table A; Target 38619; HLA-B*37:01; MAGEA3; ENSG00000221867; CTA
ALVETSYV

SEQ ID NO: 38620 - protein, 8 aa, Homo sapiens
  misc_feature: Table A; Target 38620; HLA-B*49:01; MAGEA3; ENSG00000221867; CTA
ALVETSYV

SEQ ID NO: 38621 - protein, 8 aa, Homo sapiens
  misc_feature: Table A; Target 38621; HLA-B*55:01; MAGEA3; ENSG00000221867; CTA
ALVETSYV

SEQ ID NO: 38622 - protein, 9 aa, Homo sapiens
  misc_feature: Table A; Target 38622; HLA-A*03:01; MAGEA3; ENSG00000221867; CTA
ALVETSYVK

SEQ ID NO: 38623 - protein, 9 aa, Homo sapiens
  misc_feature: Table A; Target 38623; HLA-A*03:02; MAGEA3; ENSG00000221867; CTA
ALVETSYVK

SEQ ID NO: 38624 - protein, 9 aa, Homo sapiens
  misc_feature: Table A; Target 38624; HLA-A*11:01; MAGEA3; ENSG00000221867; CTA
ALVETSYVK

SEQ ID NO: 38625 - protein, 9 aa, Homo sapiens
  misc_feature: Table A; Target 38625; HLA-B*27:02; MAGEA3; ENSG00000221867; CTA
ALVETSYVK

SEQ ID NO: 38626 - protein, 10 aa, Homo sapiens
  misc_feature: Table A; Target 38626; HLA-A*02:01; MAGEA3; ENSG00000221867; CTA
ALVETSYVKV

SEQ ID NO: 38627 - protein, 10 aa, Homo sapiens
  misc_feature: Table A; Target 38627; HLA-A*02:03; MAGEA3; ENSG00000221867; CTA
ALVETSYVKV

SEQ ID NO: 38628 - protein, 10 aa, Homo sapiens
  misc_feature: Table A; Target 38628; HLA-A*02:04; MAGEA3; ENSG00000221867; CTA
ALVETSYVKV

SEQ ID NO: 38629 - protein, 10 aa, Homo sapiens
  misc_feature: Table A; Target 38629; HLA-A*02:07; MAGEA3; ENSG00000221867; CTA
ALVETSYVKV

SEQ ID NO: 38630 - protein, 10 aa, Homo sapiens
  misc_feature: Table A; Target 38630; HLA-B*55:01; MAGEA3; ENSG00000221867; CTA
ALVETSYVKV

SEQ ID NO: 38631 - protein, 11 aa, Homo sapiens
  misc_feature: Table A; Target 38631; HLA-A*02:03; MAGEA3; ENSG00000221867; CTA
ALVETSYVKVL

SEQ ID NO: 38632 - protein, 11 aa, Homo sapiens
  misc_feature: Table A; Target 38632; HLA-A*02:04; MAGEA3; ENSG00000221867; CTA
ALVETSYVKVL

SEQ ID NO: 38633 - protein, 11 aa, Homo sapiens
  misc_feature: Table A; Target 38633; HLA-A*02:07; MAGEA3; ENSG00000221867; CTA
ALVETSYVKVL

SEQ ID NO: 38634 - protein, 9 aa, Homo sapiens
  misc_feature: Table A; Target 38634; HLA-A*01:01; MAGEA3; ENSG00000221867; CTA
ASSSLQLVF

SEQ ID NO: 38635 - protein, 9 aa, Homo sapiens
  misc_feature: Table A; Target 38635; HLA-A*03:01; MAGEA3; ENSG00000221867; CTA
ASSSLQLVF

SEQ ID NO: 38636 - protein, 9 aa, Homo sapiens
  misc_feature: Table A; Target 38636; HLA-A*11:01; MAGEA3; ENSG00000221867; CTA
ASSSLQLVF

SEQ ID NO: 38637 - protein, 9 aa, Homo sapiens
  misc_feature: Table A; Target 38637; HLA-A*23:01; MAGEA3; ENSG00000221867; CTA
ASSSLQLVF

SEQ ID NO: 38638 - protein, 9 aa, Homo sapiens
  misc_feature: Table A; Target 38638; HLA-A*24:02; MAGEA3; ENSG00000221867; CTA
ASSSLQLVF

SEQ ID NO: 38639 - protein, 9 aa, Homo sapiens
  misc_feature: Table A; Target 38639; HLA-A*29:02; MAGEA3; ENSG00000221867; CTA
ASSSLQLVF

SEQ ID NO: 38640 - protein, 9 aa, Homo sapiens
  misc_feature: Table A; Target 38640; HLA-A*30:02; MAGEA3; ENSG00000221867; CTA
ASSSLQLVF

SEQ ID NO: 38641 - protein, 9 aa, Homo sapiens
  misc_feature: Table A; Target 38641; HLA-A*32:01; MAGEA3; ENSG00000221867; CTA
ASSSLQLVF

SEQ ID NO: 38642 - protein, 9 aa, Homo sapiens
  misc_feature: Table A; Target 38642; HLA-B*15:01; MAGEA3; ENSG00000221867; CTA
ASSSLQLVF

SEQ ID NO: 38643 - protein, 9 aa, Homo sapiens
  misc_feature: Table A; Target 38643; HLA-B*15:03; MAGEA3; ENSG00000221867; CTA
ASSSLQLVF

SEQ ID NO: 38644 - protein, 9 aa, Homo sapiens
  misc_feature: Table A; Target 38644; HLA-B*27:02; MAGEA3; ENSG00000221867; CTA
ASSSLQLVF

SEQ ID NO: 38645 - protein, 9 aa, Homo sapiens
  misc_feature: Table A; Target 38645; HLA-B*44:02; MAGEA3; ENSG00000221867; CTA
ASSSLQLVF

SEQ ID NO: 38646 - protein, 9 aa, Homo sapiens
  misc_feature: Table A; Target 38646; HLA-B*44:03; MAGEA3; ENSG00000221867; CTA
ASSSLQLVF

SEQ ID NO: 38647 - protein, 9 aa, Homo sapiens
  misc_feature: Table A; Target 38647; HLA-B*57:01; MAGEA3; ENSG00000221867; CTA
ASSSLQLVF

SEQ ID NO: 38648 - protein, 9 aa, Homo sapiens
  misc_feature: Table A; Target 38648; HLA-B*58:01; MAGEA3; ENSG00000221867; CTA
ASSSLQLVF

SEQ ID NO: 38649 - protein, 9 aa, Homo sapiens
  misc_feature: Table A; Target 38649; HLA-C*02:02; MAGEA3; ENSG00000221867; CTA
ASSSLQLVF

SEQ ID NO: 38650 - protein, 9 aa, Homo sapiens
  misc_feature: Table A; Target 38650; HLA-C*07:04; MAGEA3; ENSG00000221867; CTA
ASSSLQLVF

SEQ ID NO: 38651 - protein, 9 aa, Homo sapiens
  misc_feature: Table A; Target 38651; HLA-C*07:06; MAGEA3; ENSG00000221867; CTA
ASSSLQLVF

SEQ ID NO: 38652 - protein, 9 aa, Homo sapiens
  misc_feature: Table A; Target 38652; HLA-C*12:03; MAGEA3; ENSG00000221867; CTA
ASSSLQLVF

SEQ ID NO: 38653 - protein, 9 aa, Homo sapiens
  misc_feature: Table A; Target 38653; HLA-C*16:01; MAGEA3; ENSG00000221867; CTA
ASSSLQLVF

SEQ ID NO: 38654 - protein, 9 aa, Homo sapiens
  misc_feature: Table A; Target 38654; HLA-C*16:02; MAGEA3; ENSG00000221867; CTA
ASSSLQLVF

SEQ ID NO: 38655 - protein, 9 aa, Homo sapiens
  misc_feature: Table A; Target 38655; HLA-C*16:04; MAGEA3; ENSG00000221867; CTA
ASSSLQLVF

SEQ ID NO: 38656 - protein, 10 aa, Homo sapiens
  misc_feature: Table A; Target 38656; HLA-C*07:01; MAGEA3; ENSG00000221867; CTA
DGLLGDNQIM

SEQ ID NO: 38657 - protein, 8 aa, Homo sapiens
  misc_feature: Table A; Target 38657; HLA-B*08:01; MAGEA3; ENSG00000221867; CTA
DPIGHLYI

SEQ ID NO: 38658 - protein, 8 aa, Homo sapiens
  misc_feature: Table A; Target 38658; HLA-B*51:01; MAGEA3; ENSG00000221867; CTA
DPIGHLYI

SEQ ID NO: 38659 - protein, 9 aa, Homo sapiens
  misc_feature: Table A; Target 38659; HLA-B*35:01; MAGEA3; ENSG00000221867; CTA
DPIGHLYIF

SEQ ID NO: 38660 - protein, 9 aa, Homo sapiens
  misc_feature: Table A; Target 38660; HLA-B*35:03; MAGEA3; ENSG00000221867; CTA
DPIGHLYIF

SEQ ID NO: 38661 - protein, 9 aa, Homo sapiens
  misc_feature: Table A; Target 38661; HLA-B*51:01; MAGEA3; ENSG00000221867; CTA
DPIGHLYIF

SEQ ID NO: 38662 - protein, 10 aa, Homo sapiens
  misc_feature: Table A; Target 38662; HLA-B*54:01; MAGEA3; ENSG00000221867; CTA
DPIGHLYIFA

SEQ ID NO: 38663 - protein, 8 aa, Homo sapiens
  misc_feature: Table A; Target 38663; HLA-B*27:02; MAGEA3; ENSG00000221867; CTA
DSILGDPK

SEQ ID NO: 38664 - protein, 10 aa, Homo sapiens
  misc_feature: Table A; Target 38664; HLA-A*68:01; MAGEA3; ENSG00000221867; CTA
EALGLVGAQA

SEQ ID NO: 38665 - protein, 9 aa, Homo sapiens
  misc_feature: Table A; Target 38665; HLA-B*27:02; MAGEA3; ENSG00000221867; CTA
EDSILGDPK

SEQ ID NO: 38666 - protein, 11 aa, Homo sapiens
  misc_feature: Table A; Target 38666; HLA-A*02:07; MAGEA3; ENSG00000221867; CTA
ELMEVDPIGHL

SEQ ID NO: 38667 - protein, 11 aa, Homo sapiens
  misc_feature: Table A; Target 38667; HLA-A*25:01; MAGEA3; ENSG00000221867; CTA
ELMEVDPIGHL

SEQ ID NO: 38668 - protein, 11 aa, Homo sapiens
  misc_feature: Table A; Target 38668; HLA-A*26:01; MAGEA3; ENSG00000221867; CTA
ELMEVDPIGHL

SEQ ID NO: 38669 - protein, 11 aa, Homo sapiens
  misc_feature: Table A; Target 38669; HLA-A*68:02; MAGEA3; ENSG00000221867; CTA
ELMEVDPIGHL

SEQ ID NO: 38670 - protein, 10 aa, Homo sapiens
  misc_feature: Table A; Target 38670; HLA-A*26:01; MAGEA3; ENSG00000221867; CTA
ELVHFLLLKY

SEQ ID NO: 38671 - protein, 10 aa, Homo sapiens
  misc_feature: Table A; Target 38671; HLA-A*29:02; MAGEA3; ENSG00000221867; CTA
ELVHFLLLKY

SEQ ID NO: 38672 - protein, 8 aa, Homo sapiens
  misc_feature: Table A; Target 38672; HLA-C*04:01; MAGEA3; ENSG00000221867; CTA
EVDPIGHL

SEQ ID NO: 38673 - protein, 8 aa, Homo sapiens
  misc_feature: Table A; Target 38673; HLA-C*05:01; MAGEA3; ENSG00000221867; CTA
EVDPIGHL

SEQ ID NO: 38674 - protein, 9 aa, Homo sapiens
  misc_feature: Table A; Target 38674; HLA-A*02:07; MAGEA3; ENSG00000221867; CTA
EVDPIGHLY

SEQ ID NO: 38675 - protein, 9 aa, Homo sapiens
  misc_feature: Table A; Target 38675; HLA-A*03:02; MAGEA3; ENSG00000221867; CTA
EVDPIGHLY

SEQ ID NO: 38676 - protein, 9 aa, Homo sapiens
  misc_feature: Table A; Target 38676; HLA-A*11:01; MAGEA3; ENSG00000221867; CTA
EVDPIGHLY

SEQ ID NO: 38677 - protein, 9 aa, Homo sapiens
  misc_feature: Table A; Target 38677; HLA-A*25:01; MAGEA3; ENSG00000221867; CTA
EVDPIGHLY

SEQ ID NO: 38678 - protein, 9 aa, Homo sapiens
  misc_feature: Table A; Target 38678; HLA-A*30:02; MAGEA3; ENSG00000221867; CTA
EVDPIGHLY

SEQ ID NO: 38679 - protein, 9 aa, Homo sapiens
  misc_feature: Table A; Target 38679; HLA-A*32:01; MAGEA3; ENSG00000221867; CTA
EVDPIGHLY

SEQ ID NO: 38680 - protein, 9 aa, Homo sapiens
  misc_feature: Table A; Target 38680; HLA-A*33:01; MAGEA3; ENSG00000221867; CTA
EVDPIGHLY

SEQ ID NO: 38681 - protein, 9 aa, Homo sapiens
  misc_feature: Table A; Target 38681; HLA-A*33:03; MAGEA3; ENSG00000221867; CTA
EVDPIGHLY

SEQ ID NO: 38682 - protein, 9 aa, Homo sapiens
  misc_feature: Table A; Target 38682; HLA-A*68:01; MAGEA3; ENSG00000221867; CTA
EVDPIGHLY

SEQ ID NO: 38683 - protein, 9 aa, Homo sapiens
  misc_feature: Table A; Target 38683; HLA-A*68:02; MAGEA3; ENSG00000221867; CTA
EVDPIGHLY

SEQ ID NO: 38684 - protein, 9 aa, Homo sapiens
  misc_feature: Table A; Target 38684; HLA-B*15:01; MAGEA3; ENSG00000221867; CTA
EVDPIGHLY

SEQ ID NO: 38685 - protein, 9 aa, Homo sapiens
  misc_feature: Table A; Target 38685; HLA-B*15:03; MAGEA3; ENSG00000221867; CTA
EVDPIGHLY

SEQ ID NO: 38686 - protein, 9 aa, Homo sapiens
  misc_feature: Table A; Target 38686; HLA-B*18:01; MAGEA3; ENSG00000221867; CTA
EVDPIGHLY

SEQ ID NO: 38687 - protein, 9 aa, Homo sapiens
  misc_feature: Table A; Target 38687; HLA-B*27:05; MAGEA3; ENSG00000221867; CTA
EVDPIGHLY

SEQ ID NO: 38688 - protein, 9 aa, Homo sapiens
  misc_feature: Table A; Target 38688; HLA-B*35:01; MAGEA3; ENSG00000221867; CTA
EVDPIGHLY

SEQ ID NO: 38689 - protein, 9 aa, Homo sapiens
  misc_feature: Table A; Target 38689; HLA-B*35:03; MAGEA3; ENSG00000221867; CTA
EVDPIGHLY

SEQ ID NO: 38690 - protein, 9 aa, Homo sapiens
  misc_feature: Table A; Target 38690; HLA-B*38:01; MAGEA3; ENSG00000221867; CTA
EVDPIGHLY

SEQ ID NO: 38691 - protein, 9 aa, Homo sapiens
  misc_feature: Table A; Target 38691; HLA-B*39:01; MAGEA3; ENSG00000221867; CTA
EVDPIGHLY

SEQ ID NO: 38692 - protein, 9 aa, Homo sapiens
  misc_feature: Table A; Target 38692; HLA-B*44:02; MAGEA3; ENSG00000221867; CTA
EVDPIGHLY

SEQ ID NO: 38693 - protein, 9 aa, Homo sapiens
  misc_feature: Table A; Target 38693; HLA-B*44:03; MAGEA3; ENSG00000221867; CTA
EVDPIGHLY

SEQ ID NO: 38694 - protein, 9 aa, Homo sapiens
  misc_feature: Table A; Target 38694; HLA-B*55:01; MAGEA3; ENSG00000221867; CTA
EVDPIGHLY

SEQ ID NO: 38695 - protein, 9 aa, Homo sapiens
  misc_feature: Table A; Target 38695; HLA-B*57:01; MAGEA3; ENSG00000221867; CTA
EVDPIGHLY

SEQ ID NO: 38696 - protein, 9 aa, Homo sapiens
  misc_feature: Table A; Target 38696; HLA-B*58:01; MAGEA3; ENSG00000221867; CTA
EVDPIGHLY

SEQ ID NO: 38697 - protein, 9 aa, Homo sapiens
  misc_feature: Table A; Target 38697; HLA-C*02:02; MAGEA3; ENSG00000221867; CTA
EVDPIGHLY

SEQ ID NO: 38698 - protein, 9 aa, Homo sapiens
  misc_feature: Table A; Target 38698; HLA-C*03:03; MAGEA3; ENSG00000221867; CTA
EVDPIGHLY

SEQ ID NO: 38699 - protein, 9 aa, Homo sapiens
  misc_feature: Table A; Target 38699; HLA-C*05:01; MAGEA3; ENSG00000221867; CTA
EVDPIGHLY

SEQ ID NO: 38700 - protein, 9 aa, Homo sapiens
  misc_feature: Table A; Target 38700; HLA-C*07:04; MAGEA3; ENSG00000221867; CTA
EVDPIGHLY

SEQ ID NO: 38701 - protein, 9 aa, Homo sapiens
  misc_feature: Table A; Target 38701; HLA-C*07:06; MAGEA3; ENSG00000221867; CTA
EVDPIGHLY

SEQ ID NO: 38702 - protein, 9 aa, Homo sapiens
  misc_feature: Table A; Target 38702; HLA-C*12:03; MAGEA3; ENSG00000221867; CTA
EVDPIGHLY

SEQ ID NO: 38703 - protein, 9 aa, Homo sapiens
  misc_feature: Table A; Target 38703; HLA-C*16:01; MAGEA3; ENSG00000221867; CTA
EVDPIGHLY

SEQ ID NO: 38704 - protein, 9 aa, Homo sapiens
  misc_feature: Table A; Target 38704; HLA-C*16:02; MAGEA3; ENSG00000221867; CTA
EVDPIGHLY

SEQ ID NO: 38705 - protein, 9 aa, Homo sapiens
  misc_feature: Table A; Target 38705; HLA-C*16:04; MAGEA3; ENSG00000221867; CTA
EVDPIGHLY

SEQ ID NO: 38706 - protein, 10 aa, Homo sapiens
  misc_feature: Table A; Target 38706; HLA-A*01:01; MAGEA3; ENSG00000221867; CTA
EVDPIGHLYI

SEQ ID NO: 38707 - protein, 10 aa, Homo sapiens
  misc_feature: Table A; Target 38707; HLA-A*02:07; MAGEA3; ENSG00000221867; CTA
EVDPIGHLYI

SEQ ID NO: 38708 - protein, 10 aa, Homo sapiens
  misc_feature: Table A; Target 38708; HLA-A*29:02; MAGEA3; ENSG00000221867; CTA
EVDPIGHLYI

SEQ ID NO: 38709 - protein, 10 aa, Homo sapiens
  misc_feature: Table A; Target 38709; HLA-B*38:01; MAGEA3; ENSG00000221867; CTA
EVDPIGHLYI

SEQ ID NO: 38710 - protein, 11 aa, Homo sapiens
  misc_feature: Table A; Target 38710; HLA-A*02:07; MAGEA3; ENSG00000221867; CTA
EVDPIGHLYIF

SEQ ID NO: 38711 - protein, 11 aa, Homo sapiens
  misc_feature: Table A; Target 38711; HLA-A*68:02; MAGEA3; ENSG00000221867; CTA
EVDPIGHLYIF

SEQ ID NO: 38712 - protein, 11 aa, Homo sapiens
  misc_feature: Table A; Target 38712; HLA-A*25:01; MAGEA3; ENSG00000221867; CTA
EVFEGREDSIL

SEQ ID NO: 38713 - protein, 11 aa, Homo sapiens
  misc_feature: Table A; Target 38713; HLA-A*26:01; MAGEA3; ENSG00000221867; CTA
EVFEGREDSIL

SEQ ID NO: 38714 - protein, 11 aa, Homo sapiens
  misc_feature: Table A; Target 38714; HLA-A*68:02; MAGEA3; ENSG00000221867; CTA
EVFEGREDSIL

SEQ ID NO: 38715 - protein, 11 aa, Homo sapiens
  misc_feature: Table A; Target 38715; HLA-B*27:05; MAGEA3; ENSG00000221867; CTA
EVFEGREDSIL

SEQ ID NO: 38716 - protein, 11 aa, Homo sapiens
  misc_feature: Table A; Target 38716; HLA-B*35:03; MAGEA3; ENSG00000221867; CTA
EVFEGREDSIL

SEQ ID NO: 38717 - protein, 9 aa, Homo sapiens
  misc_feature: Table A; Target 38717; HLA-B*40:01; MAGEA3; ENSG00000221867; CTA
FEGREDSIL

SEQ ID NO: 38718 - protein, 9 aa, Homo sapiens
  misc_feature: Table A; Target 38718; HLA-A*02:01; MAGEA3; ENSG00000221867; CTA
FLWGPRALV

SEQ ID NO: 38719 - protein, 9 aa, Homo sapiens
  misc_feature: Table A; Target 38719; HLA-A*02:03; MAGEA3; ENSG00000221867; CTA
FLWGPRALV

SEQ ID NO: 38720 - protein, 9 aa, Homo sapiens
  misc_feature: Table A; Target 38720; HLA-A*02:04; MAGEA3; ENSG00000221867; CTA
FLWGPRALV

SEQ ID NO: 38721 - protein, 9 aa, Homo sapiens
  misc_feature: Table A; Target 38721; HLA-A*02:07; MAGEA3; ENSG00000221867; CTA
FLWGPRALV

SEQ ID NO: 38722 - protein, 11 aa, Homo sapiens
  misc_feature: Table A; Target 38722; HLA-A*02:01; MAGEA3; ENSG00000221867; CTA
FLWGPRALVET

SEQ ID NO: 38723 - protein, 11 aa, Homo sapiens
  misc_feature: Table A; Target 38723; HLA-A*02:04; MAGEA3; ENSG00000221867; CTA
FLWGPRALVET

SEQ ID NO: 38724 - protein, 11 aa, Homo sapiens
  misc_feature: Table A; Target 38724; HLA-A*02:07; MAGEA3; ENSG00000221867; CTA
FLWGPRALVET

SEQ ID NO: 38725 - protein, 9 aa, Homo sapiens
  misc_feature: Table A; Target 38725; HLA-B*56:01; MAGEA3; ENSG00000221867; CTA
FPVIFSKAS

SEQ ID NO: 38726 - protein, 10 aa, Homo sapiens
  misc_feature: Table A; Target 38726; HLA-B*54:01; MAGEA3; ENSG00000221867; CTA
FPVIFSKASS

SEQ ID NO: 38727 - protein, 10 aa, Homo sapiens
  misc_feature: Table A; Target 38727; HLA-B*56:01; MAGEA3; ENSG00000221867; CTA
FPVIFSKASS

SEQ ID NO: 38728 - protein, 8 aa, Homo sapiens
  misc_feature: Table A; Target 38728; HLA-B*08:01; MAGEA3; ENSG00000221867; CTA
FSKASSSL

SEQ ID NO: 38729 - protein, 8 aa, Homo sapiens
  misc_feature: Table A; Target 38729; HLA-B*46:01; MAGEA3; ENSG00000221867; CTA
FSKASSSL

SEQ ID NO: 38730 - protein, 8 aa, Homo sapiens
  misc_feature: Table A; Target 38730; HLA-C*01:02; MAGEA3; ENSG00000221867; CTA
FSKASSSL

SEQ ID NO: 38731 - protein, 8 aa, Homo sapiens
  misc_feature: Table A; Target 38731; HLA-C*03:03; MAGEA3; ENSG00000221867; CTA
FSKASSSL

SEQ ID NO: 38732 - protein, 8 aa, Homo sapiens
  misc_feature: Table A; Target 38732; HLA-C*03:04; MAGEA3; ENSG00000221867; CTA
FSKASSSL

SEQ ID NO: 38733 - protein, 8 aa, Homo sapiens
  misc_feature: Table A; Target 38733; HLA-C*12:03; MAGEA3; ENSG00000221867; CTA
FSKASSSL

SEQ ID NO: 38734 - protein, 8 aa, Homo sapiens
  misc_feature: Table A; Target 38734; HLA-C*14:02; MAGEA3; ENSG00000221867; CTA
FSKASSSL

SEQ ID NO: 38735 - protein, 8 aa, Homo sapiens
  misc_feature: Table A; Target 38735; HLA-C*16:01; MAGEA3; ENSG00000221867; CTA
FSKASSSL

SEQ ID NO: 38736 - protein, 9 aa, Homo sapiens
  misc_feature: Table A; Target 38736; HLA-B*35:01; MAGEA3; ENSG00000221867; CTA
FVQENYLEY

SEQ ID NO: 38737 - protein, 8 aa, Homo sapiens
  misc_feature: Table A; Target 38737; HLA-A*03:02; MAGEA3; ENSG00000221867; CTA
GDNQIMPK

SEQ ID NO: 38738 - protein, 9 aa, Homo sapiens
  misc_feature: Table A; Target 38738; HLA-B*40:02; MAGEA3; ENSG00000221867; CTA
GDNQIMPKA

SEQ ID NO: 38739 - protein, 10 aa, Homo sapiens
  misc_feature: Table A; Target 38739; HLA-B*40:02; MAGEA3; ENSG00000221867; CTA
GEALGLVGAQ

SEQ ID NO: 38740 - protein, 9 aa, Homo sapiens
  misc_feature: Table A; Target 38740; HLA-A*02:01; MAGEA3; ENSG00000221867; CTA
GLLIIVLAI

SEQ ID NO: 38741 - protein, 9 aa, Homo sapiens
  misc_feature: Table A; Target 38741; HLA-A*02:03; MAGEA3; ENSG00000221867; CTA
GLLIIVLAI

SEQ ID NO: 38742 - protein, 9 aa, Homo sapiens
  misc_feature: Table A; Target 38742; HLA-A*02:04; MAGEA3; ENSG00000221867; CTA
GLLIIVLAI

SEQ ID NO: 38743 - protein, 9 aa, Homo sapiens
  misc_feature: Table A; Target 38743; HLA-B*13:02; MAGEA3; ENSG00000221867; CTA
GLLIIVLAI

SEQ ID NO: 38744 - protein, 9 aa, Homo sapiens
  misc_feature: Table A; Target 38744; HLA-B*07:02; MAGEA3; ENSG00000221867; CTA
GPHISYPPL

SEQ ID NO: 38745 - protein, 10 aa, Homo sapiens
  misc_feature: Table A; Target 38745; HLA-A*30:02; MAGEA3; ENSG00000221867; CTA
GPRALVETSY

SEQ ID NO: 38746 - protein, 10 aa, Homo sapiens
  misc_feature: Table A; Target 38746; HLA-B*07:02; MAGEA3; ENSG00000221867; CTA
GPRALVETSY

SEQ ID NO: 38747 - protein, 10 aa, Homo sapiens
  misc_feature: Table A; Target 38747; HLA-B*15:01; MAGEA3; ENSG00000221867; CTA
GPRALVETSY

SEQ ID NO: 38748 - protein, 10 aa, Homo sapiens
  misc_feature: Table A; Target 38748; HLA-B*15:03; MAGEA3; ENSG00000221867; CTA
GPRALVETSY

SEQ ID NO: 38749 - protein, 10 aa, Homo sapiens
  misc_feature: Table A; Target 38749; HLA-B*35:01; MAGEA3; ENSG00000221867; CTA
GPRALVETSY

SEQ ID NO: 38750 - protein, 10 aa, Homo sapiens
  misc_feature: Table A; Target 38750; HLA-B*55:01; MAGEA3; ENSG00000221867; CTA
GPRALVETSY

SEQ ID NO: 38751 - protein, 11 aa, Homo sapiens
  misc_feature: Table A; Target 38751; HLA-B*07:02; MAGEA3; ENSG00000221867; CTA
GPRALVETSYV

SEQ ID NO: 38752 - protein, 11 aa, Homo sapiens
  misc_feature: Table A; Target 38752; HLA-C*07:02; MAGEA3; ENSG00000221867; CTA
GPRALVETSYV

SEQ ID NO: 38753 - protein, 11 aa, Homo sapiens
  misc_feature: Table A; Target 38753; HLA-B*27:02; MAGEA3; ENSG00000221867; CTA
GREDSILGDPK

SEQ ID NO: 38754 - protein, 11 aa, Homo sapiens
  misc_feature: Table A; Target 38754; HLA-B*27:05; MAGEA3; ENSG00000221867; CTA
GREDSILGDPK

SEQ ID NO: 38755 - protein, 10 aa, Homo sapiens
  misc_feature: Table A; Target 38755; HLA-A*29:02; MAGEA3; ENSG00000221867; CTA
HFVQENYLEY

SEQ ID NO: 38756 - protein, 10 aa, Homo sapiens
  misc_feature: Table A; Target 38756; HLA-B*35:01; MAGEA3; ENSG00000221867; CTA
HFVQENYLEY

SEQ ID NO: 38757 - protein, 10 aa, Homo sapiens
  misc_feature: Table A; Target 38757; HLA-B*57:01; MAGEA3; ENSG00000221867; CTA
HISYPPLHEW

SEQ ID NO: 38758 - protein, 9 aa, Homo sapiens
  misc_feature: Table A; Target 38758; HLA-A*23:01; MAGEA3; ENSG00000221867; CTA
IFSKASSSL

SEQ ID NO: 38759 - protein, 9 aa, Homo sapiens
  misc_feature: Table A; Target 38759; HLA-C*01:02; MAGEA3; ENSG00000221867; CTA
IFSKASSSL

SEQ ID NO: 38760 - protein, 9 aa, Homo sapiens
  misc_feature: Table A; Target 38760; HLA-C*14:02; MAGEA3; ENSG00000221867; CTA
IFSKASSSL

SEQ ID NO: 38761 - protein, 9 aa, Homo sapiens
  misc_feature: Table A; Target 38761; HLA-A*31:01; MAGEA3; ENSG00000221867; CTA
IIVLAIIAR

SEQ ID NO: 38762 - protein, 9 aa, Homo sapiens
  misc_feature: Table A; Target 38762; HLA-A*33:03; MAGEA3; ENSG00000221867; CTA
IIVLAIIAR

SEQ ID NO: 38763 - protein, 9 aa, Homo sapiens
  misc_feature: Table A; Target 38763; HLA-A*68:01; MAGEA3; ENSG00000221867; CTA
IIVLAIIAR

SEQ ID NO: 38764 - protein, 9 aa, Homo sapiens
  misc_feature: Table A; Target 38764; HLA-C*07:06; MAGEA3; ENSG00000221867; CTA
IIVLAIIAR

SEQ ID NO: 38765 - protein, 8 aa, Homo sapiens
  misc_feature: Table A; Target 38765; HLA-A*02:03; MAGEA3; ENSG00000221867; CTA
ILGDPKKL

SEQ ID NO: 38766 - protein, 8 aa, Homo sapiens
  misc_feature: Table A; Target 38766; HLA-C*06:02; MAGEA3; ENSG00000221867; CTA
ILGDPKKL

SEQ ID NO: 38767 - protein, 9 aa, Homo sapiens
  misc_feature: Table A; Target 38767; HLA-A*02:01; MAGEA3; ENSG00000221867; CTA
ILGDPKKLL

SEQ ID NO: 38768 - protein, 9 aa, Homo sapiens
  misc_feature: Table A; Target 38768; HLA-A*02:03; MAGEA3; ENSG00000221867; CTA
ILGDPKKLL

SEQ ID NO: 38769 - protein, 9 aa, Homo sapiens
  misc_feature: Table A; Target 38769; HLA-A*02:04; MAGEA3; ENSG00000221867; CTA
ILGDPKKLL

SEQ ID NO: 38770 - protein, 9 aa, Homo sapiens
  misc_feature: Table A; Target 38770; HLA-A*02:07; MAGEA3; ENSG00000221867; CTA
ILGDPKKLL

SEQ ID NO: 38771 - protein, 9 aa, Homo sapiens
  misc_feature: Table A; Target 38771; HLA-A*03:01; MAGEA3; ENSG00000221867; CTA
ILGDPKKLL

SEQ ID NO: 38772 - protein, 9 aa, Homo sapiens
  misc_feature: Table A; Target 38772; HLA-A*24:02; MAGEA3; ENSG00000221867; CTA
IMPKAGLLI

SEQ ID NO: 38773 - protein, 10 aa, Homo sapiens
  misc_feature: Table A; Target 38773; HLA-A*02:07; MAGEA3; ENSG00000221867; CTA
IMPKAGLLII

SEQ ID NO: 38774 - protein, 10 aa, Homo sapiens
  misc_feature: Table A; Target 38774; HLA-A*24:02; MAGEA3; ENSG00000221867; CTA
IMPKAGLLII

SEQ ID NO: 38775 - protein, 11 aa, Homo sapiens
  misc_feature: Table A; Target 38775; HLA-A*02:07; MAGEA3; ENSG00000221867; CTA
IMPKAGLLIIV

SEQ ID NO: 38776 - protein, 9 aa, Homo sapiens
  misc_feature: Table A; Target 38776; HLA-A*01:01; MAGEA3; ENSG00000221867; CTA
ISGGPHISY

SEQ ID NO: 38777 - protein, 9 aa, Homo sapiens
  misc_feature: Table A; Target 38777; HLA-A*29:02; MAGEA3; ENSG00000221867; CTA
ISGGPHISY

SEQ ID NO: 38778 - protein, 9 aa, Homo sapiens
  misc_feature: Table A; Target 38778; HLA-A*30:02; MAGEA3; ENSG00000221867; CTA
ISGGPHISY

SEQ ID NO: 38779 - protein, 9 aa, Homo sapiens
  misc_feature: Table A; Target 38779; HLA-A*32:01; MAGEA3; ENSG00000221867; CTA
ISGGPHISY

SEQ ID NO: 38780 - protein, 9 aa, Homo sapiens
  misc_feature: Table A; Target 38780; HLA-B*15:01; MAGEA3; ENSG00000221867; CTA
ISGGPHISY

SEQ ID NO: 38781 - protein, 9 aa, Homo sapiens
  misc_feature: Table A; Target 38781; HLA-B*15:03; MAGEA3; ENSG00000221867; CTA
ISGGPHISY

SEQ ID NO: 38782 - protein, 9 aa, Homo sapiens
  misc_feature: Table A; Target 38782; HLA-B*35:01; MAGEA3; ENSG00000221867; CTA
ISGGPHISY

SEQ ID NO: 38783 - protein, 9 aa, Homo sapiens
  misc_feature: Table A; Target 38783; HLA-B*46:01; MAGEA3; ENSG00000221867; CTA
ISGGPHISY

SEQ ID NO: 38784 - protein, 9 aa, Homo sapiens
  misc_feature: Table A; Target 38784; HLA-B*57:01; MAGEA3; ENSG00000221867; CTA
ISGGPHISY

SEQ ID NO: 38785 - protein, 9 aa, Homo sapiens
  misc_feature: Table A; Target 38785; HLA-B*58:01; MAGEA3; ENSG00000221867; CTA
ISGGPHISY

SEQ ID NO: 38786 - protein, 9 aa, Homo sapiens
  misc_feature: Table A; Target 38786; HLA-C*01:02; MAGEA3; ENSG00000221867; CTA
ISGGPHISY

SEQ ID NO: 38787 - protein, 9 aa, Homo sapiens
  misc_feature: Table A; Target 38787; HLA-C*02:02; MAGEA3; ENSG00000221867; CTA
ISGGPHISY

SEQ ID NO: 38788 - protein, 9 aa, Homo sapiens
  misc_feature: Table A; Target 38788; HLA-C*03:04; MAGEA3; ENSG00000221867; CTA
ISGGPHISY

SEQ ID NO: 38789 - protein, 9 aa, Homo sapiens
  misc_feature: Table A; Target 38789; HLA-C*07:01; MAGEA3; ENSG00000221867; CTA
ISGGPHISY

SEQ ID NO: 38790 - protein, 9 aa, Homo sapiens
  misc_feature: Table A; Target 38790; HLA-C*07:04; MAGEA3; ENSG00000221867; CTA
ISGGPHISY

SEQ ID NO: 38791 - protein, 9 aa, Homo sapiens
  misc_feature: Table A; Target 38791; HLA-C*12:03; MAGEA3; ENSG00000221867; CTA
ISGGPHISY

SEQ ID NO: 38792 - protein, 9 aa, Homo sapiens
  misc_feature: Table A; Target 38792; HLA-C*14:02; MAGEA3; ENSG00000221867; CTA
ISGGPHISY

SEQ ID NO: 38793 - protein, 9 aa, Homo sapiens
  misc_feature: Table A; Target 38793; HLA-C*16:01; MAGEA3; ENSG00000221867; CTA
ISGGPHISY

SEQ ID NO: 38794 - protein, 9 aa, Homo sapiens
  misc_feature: Table A; Target 38794; HLA-C*16:02; MAGEA3; ENSG00000221867; CTA
ISGGPHISY

SEQ ID NO: 38795 - protein, 9 aa, Homo sapiens
  misc_feature: Table A; Target 38795; HLA-C*16:04; MAGEA3; ENSG00000221867; CTA
ISGGPHISY

SEQ ID NO: 38796 - protein, 9 aa, Homo sapiens
  misc_feature: Table A; Target 38796; HLA-A*24:02; MAGEA3; ENSG00000221867; CTA
ISYPPLHEW

SEQ ID NO: 38797 - protein, 9 aa, Homo sapiens
  misc_feature: Table A; Target 38797; HLA-A*25:01; MAGEA3; ENSG00000221867; CTA
ISYPPLHEW

SEQ ID NO: 38798 - protein, 9 aa, Homo sapiens
  misc_feature: Table A; Target 38798; HLA-A*30:02; MAGEA3; ENSG00000221867; CTA
ISYPPLHEW

SEQ ID NO: 38799 - protein, 9 aa, Homo sapiens
  misc_feature: Table A; Target 38799; HLA-A*31:01; MAGEA3; ENSG00000221867; CTA
ISYPPLHEW

SEQ ID NO: 38800 - protein, 9 aa, Homo sapiens
  misc_feature: Table A; Target 38800; HLA-A*32:01; MAGEA3; ENSG00000221867; CTA
ISYPPLHEW

SEQ ID NO: 38801 - protein, 9 aa, Homo sapiens
  misc_feature: Table A; Target 38801; HLA-A*33:01; MAGEA3; ENSG00000221867; CTA
ISYPPLHEW

SEQ ID NO: 38802 - protein, 9 aa, Homo sapiens
  misc_feature: Table A; Target 38802; HLA-B*58:01; MAGEA3; ENSG00000221867; CTA
ISYPPLHEW

SEQ ID NO: 38803 - protein, 9 aa, Homo sapiens
  misc_feature: Table A; Target 38803; HLA-C*02:02; MAGEA3; ENSG00000221867; CTA
ISYPPLHEW

SEQ ID NO: 38804 - protein, 8 aa, Homo sapiens
  misc_feature: Table A; Target 38804; HLA-A*11:01; MAGEA3; ENSG00000221867; CTA
IVLAIIAR

SEQ ID NO: 38805 - protein, 8 aa, Homo sapiens
  misc_feature: Table A; Target 38805; HLA-A*31:01; MAGEA3; ENSG00000221867; CTA
IVLAIIAR

SEQ ID NO: 38806 - protein, 8 aa, Homo sapiens
  misc_feature: Table A; Target 38806; HLA-A*33:03; MAGEA3; ENSG00000221867; CTA
IVLAIIAR

SEQ ID NO: 38807 - protein, 8 aa, Homo sapiens
  misc_feature: Table A; Target 38807; HLA-B*37:01; MAGEA3; ENSG00000221867; CTA
KASSSLQL

SEQ ID NO: 38808 - protein, 8 aa, Homo sapiens
  misc_feature: Table A; Target 38808; HLA-C*03:04; MAGEA3; ENSG00000221867; CTA
KASSSLQL

SEQ ID NO: 38809 - protein, 8 aa, Homo sapiens
  misc_feature: Table A; Target 38809; HLA-C*16:01; MAGEA3; ENSG00000221867; CTA
KASSSLQL

SEQ ID NO: 38810 - protein, 9 aa, Homo sapiens
  misc_feature: Table A; Target 38810; HLA-B*13:02; MAGEA3; ENSG00000221867; CTA
KASSSLQLV

SEQ ID NO: 38811 - protein, 9 aa, Homo sapiens
  misc_feature: Table A; Target 38811; HLA-B*58:01; MAGEA3; ENSG00000221867; CTA
KASSSLQLV

SEQ ID NO: 38812 - protein, 9 aa, Homo sapiens
  misc_feature: Table A; Target 38812; HLA-C*02:02; MAGEA3; ENSG00000221867; CTA
KASSSLQLV

SEQ ID NO: 38813 - protein, 9 aa, Homo sapiens
  misc_feature: Table A; Target 38813; HLA-C*12:03; MAGEA3; ENSG00000221867; CTA
KASSSLQLV

SEQ ID NO: 38814 - protein, 9 aa, Homo sapiens
  misc_feature: Table A; Target 38814; HLA-C*16:02; MAGEA3; ENSG00000221867; CTA
KASSSLQLV

SEQ ID NO: 38815 - protein, 10 aa, Homo sapiens
  misc_feature: Table A; Target 38815; HLA-A*23:01; MAGEA3; ENSG00000221867; CTA
KASSSLQLVF

SEQ ID NO: 38816 - protein, 10 aa, Homo sapiens
  misc_feature: Table A; Target 38816; HLA-A*24:02; MAGEA3; ENSG00000221867; CTA
KASSSLQLVF

SEQ ID NO: 38817 - protein, 10 aa, Homo sapiens
  misc_feature: Table A; Target 38817; HLA-A*29:02; MAGEA3; ENSG00000221867; CTA
KASSSLQLVF

SEQ ID NO: 38818 - protein, 10 aa, Homo sapiens
  misc_feature: Table A; Target 38818; HLA-A*30:02; MAGEA3; ENSG00000221867; CTA
KASSSLQLVF

SEQ ID NO: 38819 - protein, 10 aa, Homo sapiens
  misc_feature: Table A; Target 38819; HLA-A*32:01; MAGEA3; ENSG00000221867; CTA
KASSSLQLVF

SEQ ID NO: 38820 - protein, 10 aa, Homo sapiens
  misc_feature: Table A; Target 38820; HLA-B*15:03; MAGEA3; ENSG00000221867; CTA
KASSSLQLVF

SEQ ID NO: 38821 - protein, 10 aa, Homo sapiens
  misc_feature: Table A; Target 38821; HLA-B*27:02; MAGEA3; ENSG00000221867; CTA
KASSSLQLVF

SEQ ID NO: 38822 - protein, 10 aa, Homo sapiens
  misc_feature: Table A; Target 38822; HLA-B*57:01; MAGEA3; ENSG00000221867; CTA
KASSSLQLVF

SEQ ID NO: 38823 - protein, 10 aa, Homo sapiens
  misc_feature: Table A; Target 38823; HLA-B*58:01; MAGEA3; ENSG00000221867; CTA
KASSSLQLVF

SEQ ID NO: 38824 - protein, 10 aa, Homo sapiens
  misc_feature: Table A; Target 38824; HLA-C*02:02; MAGEA3; ENSG00000221867; CTA
KASSSLQLVF

SEQ ID NO: 38825 - protein, 10 aa, Homo sapiens
  misc_feature: Table A; Target 38825; HLA-C*07:02; MAGEA3; ENSG00000221867; CTA
KASSSLQLVF

SEQ ID NO: 38826 - protein, 10 aa, Homo sapiens
  misc_feature: Table A; Target 38826; HLA-C*12:03; MAGEA3; ENSG00000221867; CTA
KASSSLQLVF

SEQ ID NO: 38827 - protein, 10 aa, Homo sapiens
  misc_feature: Table A; Target 38827; HLA-C*16:04; MAGEA3; ENSG00000221867; CTA
KASSSLQLVF

SEQ ID NO: 38828 - protein, 10 aa, Homo sapiens
  misc_feature: Table A; Target 38828; HLA-A*03:01; MAGEA3; ENSG00000221867; CTA
KISGGPHISY

SEQ ID NO: 38829 - protein, 10 aa, Homo sapiens
  misc_feature: Table A; Target 38829; HLA-A*29:02; MAGEA3; ENSG00000221867; CTA
KISGGPHISY

SEQ ID NO: 38830 - protein, 10 aa, Homo sapiens
  misc_feature: Table A; Target 38830; HLA-A*30:02; MAGEA3; ENSG00000221867; CTA
KISGGPHISY

SEQ ID NO: 38831 - protein, 10 aa, Homo sapiens
  misc_feature: Table A; Target 38831; HLA-A*32:01; MAGEA3; ENSG00000221867; CTA
KISGGPHISY

SEQ ID NO: 38832 - protein, 10 aa, Homo sapiens
  misc_feature: Table A; Target 38832; HLA-B*15:01; MAGEA3; ENSG00000221867; CTA
KISGGPHISY

SEQ ID NO: 38833 - protein, 10 aa, Homo sapiens
  misc_feature: Table A; Target 38833; HLA-B*46:01; MAGEA3; ENSG00000221867; CTA
KISGGPHISY

SEQ ID NO: 38834 - protein, 10 aa, Homo sapiens
  misc_feature: Table A; Target 38834; HLA-C*02:02; MAGEA3; ENSG00000221867; CTA
KISGGPHISY

SEQ ID NO: 38835 - protein, 10 aa, Homo sapiens
  misc_feature: Table A; Target 38835; HLA-C*16:01; MAGEA3; ENSG00000221867; CTA
KISGGPHISY

SEQ ID NO: 38836 - protein, 10 aa, Homo sapiens
  misc_feature: Table A; Target 38836; HLA-C*16:04; MAGEA3; ENSG00000221867; CTA
KISGGPHISY

SEQ ID NO: 38837 - protein, 8 aa, Homo sapiens
  misc_feature: Table A; Target 38837; HLA-A*32:01; MAGEA3; ENSG00000221867; CTA
KVAELVHF

SEQ ID NO: 38838 - protein, 8 aa, Homo sapiens
  misc_feature: Table A; Target 38838; HLA-B*37:01; MAGEA3; ENSG00000221867; CTA
KVAELVHF

SEQ ID NO: 38839 - protein, 8 aa, Homo sapiens
  misc_feature: Table A; Target 38839; HLA-B*57:01; MAGEA3; ENSG00000221867; CTA
KVAELVHF

SEQ ID NO: 38840 - protein, 8 aa, Homo sapiens
  misc_feature: Table A; Target 38840; HLA-B*58:01; MAGEA3; ENSG00000221867; CTA
KVAELVHF

SEQ ID NO: 38841 - protein, 8 aa, Homo sapiens
  misc_feature: Table A; Target 38841; HLA-C*07:04; MAGEA3; ENSG00000221867; CTA
KVAELVHF

SEQ ID NO: 38842 - protein, 9 aa, Homo sapiens
  misc_feature: Table A; Target 38842; HLA-A*03:01; MAGEA3; ENSG00000221867; CTA
KVAELVHFL

SEQ ID NO: 38843 - protein, 9 aa, Homo sapiens
  misc_feature: Table A; Target 38843; HLA-A*03:02; MAGEA3; ENSG00000221867; CTA
KVAELVHFL

SEQ ID NO: 38844 - protein, 9 aa, Homo sapiens
  misc_feature: Table A; Target 38844; HLA-A*24:02; MAGEA3; ENSG00000221867; CTA
KVAELVHFL

SEQ ID NO: 38845 - protein, 9 aa, Homo sapiens
  misc_feature: Table A; Target 38845; HLA-A*25:01; MAGEA3; ENSG00000221867; CTA
KVAELVHFL

SEQ ID NO: 38846 - protein, 9 aa, Homo sapiens
  misc_feature: Table A; Target 38846; HLA-A*26:01; MAGEA3; ENSG00000221867; CTA
KVAELVHFL

SEQ ID NO: 38847 - protein, 9 aa, Homo sapiens
  misc_feature: Table A; Target 38847; HLA-B*13:02; MAGEA3; ENSG00000221867; CTA
KVAELVHFL

SEQ ID NO: 38848 - protein, 9 aa, Homo sapiens
  misc_feature: Table A; Target 38848; HLA-B*55:01; MAGEA3; ENSG00000221867; CTA
KVAELVHFL

SEQ ID NO: 38849 - protein, 9 aa, Homo sapiens
  misc_feature: Table A; Target 38849; HLA-C*02:02; MAGEA3; ENSG00000221867; CTA
KVAELVHFL

SEQ ID NO: 38850 - protein, 9 aa, Homo sapiens
  misc_feature: Table A; Target 38850; HLA-C*06:02; MAGEA3; ENSG00000221867; CTA
KVAELVHFL

SEQ ID NO: 38851 - protein, 9 aa, Homo sapiens
  misc_feature: Table A; Target 38851; HLA-C*07:04; MAGEA3; ENSG00000221867; CTA
KVAELVHFL

SEQ ID NO: 38852 - protein, 9 aa, Homo sapiens
  misc_feature: Table A; Target 38852; HLA-C*16:02; MAGEA3; ENSG00000221867; CTA
KVAELVHFL

SEQ ID NO: 38853 - protein, 10 aa, Homo sapiens
  misc_feature: Table A; Target 38853; HLA-B*57:01; MAGEA3; ENSG00000221867; CTA
KVAELVHFLL

SEQ ID NO: 38854 - protein, 11 aa, Homo sapiens
  misc_feature: Table A; Target 38854; HLA-A*02:04; MAGEA3; ENSG00000221867; CTA
KVAELVHFLLL

SEQ ID NO: 38855 - protein, 11 aa, Homo sapiens
  misc_feature: Table A; Target 38855; HLA-A*02:07; MAGEA3; ENSG00000221867; CTA
KVAELVHFLLL

SEQ ID NO: 38856 - protein, 11 aa, Homo sapiens
  misc_feature: Table A; Target 38856; HLA-A*03:01; MAGEA3; ENSG00000221867; CTA
KVAELVHFLLL

SEQ ID NO: 38857 - protein, 9 aa, Homo sapiens
  misc_feature: Table A; Target 38857; HLA-A*01:01; MAGEA3; ENSG00000221867; CTA
LGDNQIMPK

SEQ ID NO: 38858 - protein, 10 aa, Homo sapiens
  misc_feature: Table A; Target 38858; HLA-B*27:02; MAGEA3; ENSG00000221867; CTA
LIIVLAIIAR

SEQ ID NO: 38859 - protein, 11 aa, Homo sapiens
  misc_feature: Table A; Target 38859; HLA-A*02:01; MAGEA3; ENSG00000221867; CTA
LLGDNQIMPKA

SEQ ID NO: 38860 - protein, 9 aa, Homo sapiens
  misc_feature: Table A; Target 38860; HLA-A*02:04; MAGEA3; ENSG00000221867; CTA
LLIIVLAII

SEQ ID NO: 38861 - protein, 11 aa, Homo sapiens
  misc_feature: Table A; Target 38861; HLA-A*01:01; MAGEA3; ENSG00000221867; CTA
LMEVDPIGHLY

SEQ ID NO: 38862 - protein, 11 aa, Homo sapiens
  misc_feature: Table A; Target 38862; HLA-A*29:02; MAGEA3; ENSG00000221867; CTA
LMEVDPIGHLY

SEQ ID NO: 38863 - protein, 11 aa, Homo sapiens
  misc_feature: Table A; Target 38863; HLA-A*30:02; MAGEA3; ENSG00000221867; CTA
LMEVDPIGHLY

SEQ ID NO: 38864 - protein, 9 aa, Homo sapiens
  misc_feature: Table A; Target 38864; HLA-B*39:01; MAGEA3; ENSG00000221867; CTA
LQLVFGIEL

SEQ ID NO: 38865 - protein, 8 aa, Homo sapiens
  misc_feature: Table A; Target 38865; HLA-B*08:01; MAGEA3; ENSG00000221867; CTA
LSRKVAEL

SEQ ID NO: 38866 - protein, 10 aa, Homo sapiens
  misc_feature: Table A; Target 38866; HLA-A*01:01; MAGEA3; ENSG00000221867; CTA
LTQHFVQENY

SEQ ID NO: 38867 - protein, 10 aa, Homo sapiens
  misc_feature: Table A; Target 38867; HLA-A*29:02; MAGEA3; ENSG00000221867; CTA
LTQHFVQENY

SEQ ID NO: 38868 - protein, 10 aa, Homo sapiens
  misc_feature: Table A; Target 38868; HLA-A*30:02; MAGEA3; ENSG00000221867; CTA
LTQHFVQENY

SEQ ID NO: 38869 - protein, 10 aa, Homo sapiens
  misc_feature: Table A; Target 38869; HLA-A*32:01; MAGEA3; ENSG00000221867; CTA
LTQHFVQENY

SEQ ID NO: 38870 - protein, 10 aa, Homo sapiens
  misc_feature: Table A; Target 38870; HLA-B*57:01; MAGEA3; ENSG00000221867; CTA
LTQHFVQENY

SEQ ID NO: 38871 - protein, 10 aa, Homo sapiens
  misc_feature: Table A; Target 38871; HLA-C*07:01; MAGEA3; ENSG00000221867; CTA
LTQHFVQENY

SEQ ID NO: 38872 - protein, 8 aa, Homo sapiens
  misc_feature: Table A; Target 38872; HLA-A*03:02; MAGEA3; ENSG00000221867; CTA
LVETSYVK

SEQ ID NO: 38873 - protein, 8 aa, Homo sapiens
  misc_feature: Table A; Target 38873; HLA-B*27:02; MAGEA3; ENSG00000221867; CTA
LVETSYVK

SEQ ID NO: 38874 - protein, 9 aa, Homo sapiens
  misc_feature: Table A; Target 38874; HLA-A*02:07; MAGEA3; ENSG00000221867; CTA
LVETSYVKV

SEQ ID NO: 38875 - protein, 9 aa, Homo sapiens
  misc_feature: Table A; Target 38875; HLA-C*05:01; MAGEA3; ENSG00000221867; CTA
LVETSYVKV

SEQ ID NO: 38876 - protein, 8 aa, Homo sapiens
  misc_feature: Table A; Target 38876; HLA-A*23:01; MAGEA3; ENSG00000221867; CTA
LYIFATCL

SEQ ID NO: 38877 - protein, 8 aa, Homo sapiens
  misc_feature: Table A; Target 38877; HLA-C*14:02; MAGEA3; ENSG00000221867; CTA
LYIFATCL

SEQ ID NO: 38878 - protein, 9 aa, Homo sapiens
  misc_feature: Table A; Target 38878; HLA-A*23:01; MAGEA3; ENSG00000221867; CTA
MEVDPIGHL

SEQ ID NO: 38879 - protein, 9 aa, Homo sapiens
  misc_feature: Table A; Target 38879; HLA-A*25:01; MAGEA3; ENSG00000221867; CTA
MEVDPIGHL

SEQ ID NO: 38880 - protein, 9 aa, Homo sapiens
  misc_feature: Table A; Target 38880; HLA-A*68:02; MAGEA3; ENSG00000221867; CTA
MEVDPIGHL

SEQ ID NO: 38881 - protein, 9 aa, Homo sapiens
  misc_feature: Table A; Target 38881; HLA-B*18:01; MAGEA3; ENSG00000221867; CTA
MEVDPIGHL

SEQ ID NO: 38882 - protein, 9 aa, Homo sapiens
  misc_feature: Table A; Target 38882; HLA-B*27:02; MAGEA3; ENSG00000221867; CTA
MEVDPIGHL

SEQ ID NO: 38883 - protein, 9 aa, Homo sapiens
  misc_feature: Table A; Target 38883; HLA-B*27:05; MAGEA3; ENSG00000221867; CTA
MEVDPIGHL

SEQ ID NO: 38884 - protein, 9 aa, Homo sapiens
  misc_feature: Table A; Target 38884; HLA-B*37:01; MAGEA3; ENSG00000221867; CTA
MEVDPIGHL

SEQ ID NO: 38885 - protein, 9 aa, Homo sapiens
  misc_feature: Table A; Target 38885; HLA-B*38:01; MAGEA3; ENSG00000221867; CTA
MEVDPIGHL

SEQ ID NO: 38886 - protein, 9 aa, Homo sapiens
  misc_feature: Table A; Target 38886; HLA-B*39:01; MAGEA3; ENSG00000221867; CTA
MEVDPIGHL

SEQ ID NO: 38887 - protein, 9 aa, Homo sapiens
  misc_feature: Table A; Target 38887; HLA-B*40:02; MAGEA3; ENSG00000221867; CTA
MEVDPIGHL

SEQ ID NO: 38888 - protein, 9 aa, Homo sapiens
  misc_feature: Table A; Target 38888; HLA-B*44:02; MAGEA3; ENSG00000221867; CTA
MEVDPIGHL

SEQ ID NO: 38889 - protein, 9 aa, Homo sapiens
  misc_feature: Table A; Target 38889; HLA-C*02:02; MAGEA3; ENSG00000221867; CTA
MEVDPIGHL

SEQ ID NO: 38890 - protein, 9 aa, Homo sapiens
  misc_feature: Table A; Target 38890; HLA-C*03:03; MAGEA3; ENSG00000221867; CTA
MEVDPIGHL

SEQ ID NO: 38891 - protein, 9 aa, Homo sapiens
  misc_feature: Table A; Target 38891; HLA-C*03:04; MAGEA3; ENSG00000221867; CTA
MEVDPIGHL

SEQ ID NO: 38892 - protein, 9 aa, Homo sapiens
  misc_feature: Table A; Target 38892; HLA-C*07:04; MAGEA3; ENSG00000221867; CTA
MEVDPIGHL

SEQ ID NO: 38893 - protein, 9 aa, Homo sapiens
  misc_feature: Table A; Target 38893; HLA-C*07:06; MAGEA3; ENSG00000221867; CTA
MEVDPIGHL

SEQ ID NO: 38894 - protein, 9 aa, Homo sapiens
  misc_feature: Table A; Target 38894; HLA-C*16:04; MAGEA3; ENSG00000221867; CTA
MEVDPIGHL

SEQ ID NO: 38895 - protein, 10 aa, Homo sapiens
  misc_feature: Table A; Target 38895; HLA-A*01:01; MAGEA3; ENSG00000221867; CTA
MEVDPIGHLY

SEQ ID NO: 38896 - protein, 10 aa, Homo sapiens
  misc_feature: Table A; Target 38896; HLA-A*23:01; MAGEA3; ENSG00000221867; CTA
MEVDPIGHLY

SEQ ID NO: 38897 - protein, 10 aa, Homo sapiens
  misc_feature: Table A; Target 38897; HLA-A*25:01; MAGEA3; ENSG00000221867; CTA
MEVDPIGHLY

SEQ ID NO: 38898 - protein, 10 aa, Homo sapiens
  misc_feature: Table A; Target 38898; HLA-A*26:01; MAGEA3; ENSG00000221867; CTA
MEVDPIGHLY

SEQ ID NO: 38899 - protein, 10 aa, Homo sapiens
  misc_feature: Table A; Target 38899; HLA-A*29:02; MAGEA3; ENSG00000221867; CTA
MEVDPIGHLY

SEQ ID NO: 38900 - protein, 10 aa, Homo sapiens
  misc_feature: Table A; Target 38900; HLA-A*30:01; MAGEA3; ENSG00000221867; CTA
MEVDPIGHLY

SEQ ID NO: 38901 - protein, 10 aa, Homo sapiens
  misc_feature: Table A; Target 38901; HLA-A*30:02; MAGEA3; ENSG00000221867; CTA
MEVDPIGHLY

SEQ ID NO: 38902 - protein, 10 aa, Homo sapiens
  misc_feature: Table A; Target 38902; HLA-A*32:01; MAGEA3; ENSG00000221867; CTA
MEVDPIGHLY

SEQ ID NO: 38903 - protein, 10 aa, Homo sapiens
  misc_feature: Table A; Target 38903; HLA-A*33:03; MAGEA3; ENSG00000221867; CTA
MEVDPIGHLY

SEQ ID NO: 38904 - protein, 10 aa, Homo sapiens
  misc_feature: Table A; Target 38904; HLA-B*15:01; MAGEA3; ENSG00000221867; CTA
MEVDPIGHLY

SEQ ID NO: 38905 - protein, 10 aa, Homo sapiens
  misc_feature: Table A; Target 38905; HLA-B*15:03; MAGEA3; ENSG00000221867; CTA
MEVDPIGHLY

SEQ ID NO: 38906 - protein, 10 aa, Homo sapiens
  misc_feature: Table A; Target 38906; HLA-B*18:01; MAGEA3; ENSG00000221867; CTA
MEVDPIGHLY

SEQ ID NO: 38907 - protein, 10 aa, Homo sapiens
  misc_feature: Table A; Target 38907; HLA-B*27:02; MAGEA3; ENSG00000221867; CTA
MEVDPIGHLY

SEQ ID NO: 38908 - protein, 10 aa, Homo sapiens
  misc_feature: Table A; Target 38908; HLA-B*27:05; MAGEA3; ENSG00000221867; CTA
MEVDPIGHLY

SEQ ID NO: 38909 - protein, 10 aa, Homo sapiens
  misc_feature: Table A; Target 38909; HLA-B*35:01; MAGEA3; ENSG00000221867; CTA
MEVDPIGHLY

SEQ ID NO: 38910 - protein, 10 aa, Homo sapiens
  misc_feature: Table A; Target 38910; HLA-B*37:01; MAGEA3; ENSG00000221867; CTA
MEVDPIGHLY

SEQ ID NO: 38911 - protein, 10 aa, Homo sapiens
  misc_feature: Table A; Target 38911; HLA-B*40:01; MAGEA3; ENSG00000221867; CTA
MEVDPIGHLY

SEQ ID NO: 38912 - protein, 10 aa, Homo sapiens
  misc_feature: Table A; Target 38912; HLA-B*49:01; MAGEA3; ENSG00000221867; CTA
MEVDPIGHLY

SEQ ID NO: 38913 - protein, 10 aa, Homo sapiens
  misc_feature: Table A; Target 38913; HLA-B*57:01; MAGEA3; ENSG00000221867; CTA
MEVDPIGHLY

SEQ ID NO: 38914 - protein, 10 aa, Homo sapiens
  misc_feature: Table A; Target 38914; HLA-C*02:02; MAGEA3; ENSG00000221867; CTA
MEVDPIGHLY

SEQ ID NO: 38915 - protein, 10 aa, Homo sapiens
  misc_feature: Table A; Target 38915; HLA-C*07:01; MAGEA3; ENSG00000221867; CTA
MEVDPIGHLY

SEQ ID NO: 38916 - protein, 10 aa, Homo sapiens
  misc_feature: Table A; Target 38916; HLA-C*07:04; MAGEA3; ENSG00000221867; CTA
MEVDPIGHLY

SEQ ID NO: 38917 - protein, 10 aa, Homo sapiens
  misc_feature: Table A; Target 38917; HLA-C*07:06; MAGEA3; ENSG00000221867; CTA
MEVDPIGHLY

SEQ ID NO: 38918 - protein, 10 aa, Homo sapiens
  misc_feature: Table A; Target 38918; HLA-C*12:03; MAGEA3; ENSG00000221867; CTA
MEVDPIGHLY

SEQ ID NO: 38919 - protein, 10 aa, Homo sapiens
  misc_feature: Table A; Target 38919; HLA-C*16:01; MAGEA3; ENSG00000221867; CTA
MEVDPIGHLY

SEQ ID NO: 38920 - protein, 10 aa, Homo sapiens
  misc_feature: Table A; Target 38920; HLA-C*16:02; MAGEA3; ENSG00000221867; CTA
MEVDPIGHLY

SEQ ID NO: 38921 - protein, 10 aa, Homo sapiens
  misc_feature: Table A; Target 38921; HLA-C*16:04; MAGEA3; ENSG00000221867; CTA
MEVDPIGHLY

SEQ ID NO: 38922 - protein, 11 aa, Homo sapiens
  misc_feature: Table A; Target 38922; HLA-A*30:01; MAGEA3; ENSG00000221867; CTA
MEVDPIGHLYI

SEQ ID NO: 38923 - protein, 11 aa, Homo sapiens
  misc_feature: Table A; Target 38923; HLA-A*68:02; MAGEA3; ENSG00000221867; CTA
MEVDPIGHLYI

SEQ ID NO: 38924 - protein, 11 aa, Homo sapiens
  misc_feature: Table A; Target 38924; HLA-B*44:02; MAGEA3; ENSG00000221867; CTA
MEVDPIGHLYI

SEQ ID NO: 38925 - protein, 11 aa, Homo sapiens
  misc_feature: Table A; Target 38925; HLA-B*44:03; MAGEA3; ENSG00000221867; CTA
MEVDPIGHLYI

SEQ ID NO: 38926 - protein, 11 aa, Homo sapiens
  misc_feature: Table A; Target 38926; HLA-B*49:01; MAGEA3; ENSG00000221867; CTA
MEVDPIGHLYI

SEQ ID NO: 38927 - protein, 8 aa, Homo sapiens
  misc_feature: Table A; Target 38927; HLA-B*51:01; MAGEA3; ENSG00000221867; CTA
MPKAGLLI

SEQ ID NO: 38928 - protein, 9 aa, Homo sapiens
  misc_feature: Table A; Target 38928; HLA-B*07:02; MAGEA3; ENSG00000221867; CTA
MPKAGLLII

SEQ ID NO: 38929 - protein, 9 aa, Homo sapiens
  misc_feature: Table A; Target 38929; HLA-B*35:03; MAGEA3; ENSG00000221867; CTA
MPKAGLLII

SEQ ID NO: 38930 - protein, 9 aa, Homo sapiens
  misc_feature: Table A; Target 38930; HLA-B*51:01; MAGEA3; ENSG00000221867; CTA
MPKAGLLII

SEQ ID NO: 38931 - protein, 9 aa, Homo sapiens
  misc_feature: Table A; Target 38931; HLA-B*54:01; MAGEA3; ENSG00000221867; CTA
MPKAGLLII

SEQ ID NO: 38932 - protein, 9 aa, Homo sapiens
  misc_feature: Table A; Target 38932; HLA-B*56:01; MAGEA3; ENSG00000221867; CTA
MPKAGLLII

SEQ ID NO: 38933 - protein, 9 aa, Homo sapiens
  misc_feature: Table A; Target 38933; HLA-C*07:02; MAGEA3; ENSG00000221867; CTA
MPKAGLLII

SEQ ID NO: 38934 - protein, 10 aa, Homo sapiens
  misc_feature: Table A; Target 38934; HLA-B*54:01; MAGEA3; ENSG00000221867; CTA
MPKAGLLIIV

SEQ ID NO: 38935 - protein, 10 aa, Homo sapiens
  misc_feature: Table A; Target 38935; HLA-B*56:01; MAGEA3; ENSG00000221867; CTA
MPKAGLLIIV

SEQ ID NO: 38936 - protein, 11 aa, Homo sapiens
  misc_feature: Table A; Target 38936; HLA-B*54:01; MAGEA3; ENSG00000221867; CTA
MPKAGLLIIVL

SEQ ID NO: 38937 - protein, 9 aa, Homo sapiens
  misc_feature: Table A; Target 38937; HLA-C*04:01; MAGEA3; ENSG00000221867; CTA
MVKISGGPH

SEQ ID NO: 38938 - protein, 9 aa, Homo sapiens
  misc_feature: Table A; Target 38938; HLA-B*08:01; MAGEA3; ENSG00000221867; CTA
NQIMPKAGL

SEQ ID NO: 38939 - protein, 9 aa, Homo sapiens
  misc_feature: Table A; Target 38939; HLA-B*15:01; MAGEA3; ENSG00000221867; CTA
NQIMPKAGL

SEQ ID NO: 38940 - protein, 9 aa, Homo sapiens
  misc_feature: Table A; Target 38940; HLA-B*15:03; MAGEA3; ENSG00000221867; CTA
NQIMPKAGL

SEQ ID NO: 38941 - protein, 9 aa, Homo sapiens
  misc_feature: Table A; Target 38941; HLA-B*38:01; MAGEA3; ENSG00000221867; CTA
NQIMPKAGL

SEQ ID NO: 38942 - protein, 9 aa, Homo sapiens
  misc_feature: Table A; Target 38942; HLA-B*39:01; MAGEA3; ENSG00000221867; CTA
NQIMPKAGL

SEQ ID NO: 38943 - protein, 9 aa, Homo sapiens
  misc_feature: Table A; Target 38943; HLA-C*14:02; MAGEA3; ENSG00000221867; CTA
NQIMPKAGL

SEQ ID NO: 38944 - protein, 9 aa, Homo sapiens
  misc_feature: Table A; Target 38944; HLA-B*27:02; MAGEA3; ENSG00000221867; CTA
PRALVETSY

SEQ ID NO: 38945 - protein, 9 aa, Homo sapiens
  misc_feature: Table A; Target 38945; HLA-C*07:01; MAGEA3; ENSG00000221867; CTA
PRALVETSY

SEQ ID NO: 38946 - protein, 9 aa, Homo sapiens
  misc_feature: Table A; Target 38946; HLA-C*07:02; MAGEA3; ENSG00000221867; CTA
PRALVETSY

SEQ ID NO: 38947 - protein, 9 aa, Homo sapiens
  misc_feature: Table A; Target 38947; HLA-C*16:04; MAGEA3; ENSG00000221867; CTA
PRALVETSY

SEQ ID NO: 38948 - protein, 9 aa, Homo sapiens
  misc_feature: Table A; Target 38948; HLA-B*39:01; MAGEA3; ENSG00000221867; CTA
QHFVQENYL

SEQ ID NO: 38949 - protein, 8 aa, Homo sapiens
  misc_feature: Table A; Target 38949; HLA-B*08:01; MAGEA3; ENSG00000221867; CTA
QIMPKAGL

SEQ ID NO: 38950 - protein, 9 aa, Homo sapiens
  misc_feature: Table A; Target 38950; HLA-B*08:01; MAGEA3; ENSG00000221867; CTA
QIMPKAGLL

SEQ ID NO: 38951 - protein, 8 aa, Homo sapiens
  misc_feature: Table A; Target 38951; HLA-B*15:01; MAGEA3; ENSG00000221867; CTA
RALVETSY

SEQ ID NO: 38952 - protein, 8 aa, Homo sapiens
  misc_feature: Table A; Target 38952; HLA-B*15:03; MAGEA3; ENSG00000221867; CTA
RALVETSY

SEQ ID NO: 38953 - protein, 8 aa, Homo sapiens
  misc_feature: Table A; Target 38953; HLA-B*46:01; MAGEA3; ENSG00000221867; CTA
RALVETSY

SEQ ID NO: 38954 - protein, 10 aa, Homo sapiens
  misc_feature: Table A; Target 38954; HLA-B*27:02; MAGEA3; ENSG00000221867; CTA
RALVETSYVK

SEQ ID NO: 38955 - protein, 8 aa, Homo sapiens
  misc_feature: Table A; Target 38955; HLA-A*30:02; MAGEA3; ENSG00000221867; CTA
SGGPHISY

SEQ ID NO: 38956 - protein, 8 aa, Homo sapiens
  misc_feature: Table A; Target 38956; HLA-A*32:01; MAGEA3; ENSG00000221867; CTA
SGGPHISY

SEQ ID NO: 38957 - protein, 8 aa, Homo sapiens
  misc_feature: Table A; Target 38957; HLA-B*15:01; MAGEA3; ENSG00000221867; CTA
SGGPHISY

SEQ ID NO: 38958 - protein, 8 aa, Homo sapiens
  misc_feature: Table A; Target 38958; HLA-B*15:03; MAGEA3; ENSG00000221867; CTA
SGGPHISY

SEQ ID NO: 38959 - protein, 8 aa, Homo sapiens
  misc_feature: Table A; Target 38959; HLA-B*46:01; MAGEA3; ENSG00000221867; CTA
SGGPHISY

SEQ ID NO: 38960 - protein, 8 aa, Homo sapiens
  misc_feature: Table A; Target 38960; HLA-B*58:01; MAGEA3; ENSG00000221867; CTA
SGGPHISY

SEQ ID NO: 38961 - protein, 8 aa, Homo sapiens
  misc_feature: Table A; Target 38961; HLA-C*02:02; MAGEA3; ENSG00000221867; CTA
SGGPHISY

SEQ ID NO: 38962 - protein, 8 aa, Homo sapiens
  misc_feature: Table A; Target 38962; HLA-C*07:01; MAGEA3; ENSG00000221867; CTA
SGGPHISY

SEQ ID NO: 38963 - protein, 8 aa, Homo sapiens
  misc_feature: Table A; Target 38963; HLA-C*07:04; MAGEA3; ENSG00000221867; CTA
SGGPHISY

SEQ ID NO: 38964 - protein, 8 aa, Homo sapiens
  misc_feature: Table A; Target 38964; HLA-C*12:03; MAGEA3; ENSG00000221867; CTA
SGGPHISY

SEQ ID NO: 38965 - protein, 8 aa, Homo sapiens
  misc_feature: Table A; Target 38965; HLA-C*14:02; MAGEA3; ENSG00000221867; CTA
SGGPHISY

SEQ ID NO: 38966 - protein, 8 aa, Homo sapiens
  misc_feature: Table A; Target 38966; HLA-C*16:01; MAGEA3; ENSG00000221867; CTA
SGGPHISY

SEQ ID NO: 38967 - protein, 8 aa, Homo sapiens
  misc_feature: Table A; Target 38967; HLA-C*16:02; MAGEA3; ENSG00000221867; CTA
SGGPHISY

SEQ ID NO: 38968 - protein, 9 aa, Homo sapiens
  misc_feature: Table A; Target 38968; HLA-B*15:03; MAGEA3; ENSG00000221867; CTA
SKASSSLQL

SEQ ID NO: 38969 - protein, 11 aa, Homo sapiens
  misc_feature: Table A; Target 38969; HLA-B*15:03; MAGEA3; ENSG00000221867; CTA
SKASSSLQLVF

SEQ ID NO: 38970 - protein, 9 aa, Homo sapiens
  misc_feature: Table A; Target 38970; HLA-C*04:01; MAGEA3; ENSG00000221867; CTA
SSLPTTMNY

SEQ ID NO: 38971 - protein, 9 aa, Homo sapiens
  misc_feature: Table A; Target 38971; HLA-A*02:01; MAGEA3; ENSG00000221867; CTA
SSLQLVFGI

SEQ ID NO: 38972 - protein, 9 aa, Homo sapiens
  misc_feature: Table A; Target 38972; HLA-A*02:04; MAGEA3; ENSG00000221867; CTA
SSLQLVFGI

SEQ ID NO: 38973 - protein, 9 aa, Homo sapiens
  misc_feature: Table A; Target 38973; HLA-B*13:02; MAGEA3; ENSG00000221867; CTA
SSLQLVFGI

SEQ ID NO: 38974 - protein, 8 aa, Homo sapiens
  misc_feature: Table A; Target 38974; HLA-B*37:01; MAGEA3; ENSG00000221867; CTA
SSSLQLVF

SEQ ID NO: 38975 - protein, 8 aa, Homo sapiens
  misc_feature: Table A; Target 38975; HLA-B*58:01; MAGEA3; ENSG00000221867; CTA
SSSLQLVF

SEQ ID NO: 38976 - protein, 8 aa, Homo sapiens
  misc_feature: Table A; Target 38976; HLA-C*16:01; MAGEA3; ENSG00000221867; CTA
SSSLQLVF

SEQ ID NO: 38977 - protein, 8 aa, Homo sapiens
  misc_feature: Table A; Target 38977; HLA-A*24:02; MAGEA3; ENSG00000221867; CTA
SYPPLHEW

SEQ ID NO: 38978 - protein, 10 aa, Homo sapiens
  misc_feature: Table A; Target 38978; HLA-A*24:02; MAGEA3; ENSG00000221867; CTA
SYPPLHEWVL

SEQ ID NO: 38979 - protein, 9 aa, Homo sapiens
  misc_feature: Table A; Target 38979; HLA-A*31:01; MAGEA3; ENSG00000221867; CTA
SYVKVLHHM

SEQ ID NO: 38980 - protein, 8 aa, Homo sapiens
  misc_feature: Table A; Target 38980; HLA-C*07:04; MAGEA3; ENSG00000221867; CTA
TQHFVQEN

SEQ ID NO: 38981 - protein, 9 aa, Homo sapiens
  misc_feature: Table A; Target 38981; HLA-A*29:02; MAGEA3; ENSG00000221867; CTA
TQHFVQENY

SEQ ID NO: 38982 - protein, 9 aa, Homo sapiens
  misc_feature: Table A; Target 38982; HLA-A*32:01; MAGEA3; ENSG00000221867; CTA
TQHFVQENY

SEQ ID NO: 38983 - protein, 9 aa, Homo sapiens
  misc_feature: Table A; Target 38983; HLA-B*13:02; MAGEA3; ENSG00000221867; CTA
TQHFVQENY

SEQ ID NO: 38984 - protein, 9 aa, Homo sapiens
  misc_feature: Table A; Target 38984; HLA-B*15:03; MAGEA3; ENSG00000221867; CTA
TQHFVQENY

SEQ ID NO: 38985 - protein, 9 aa, Homo sapiens
  misc_feature: Table A; Target 38985; HLA-B*18:01; MAGEA3; ENSG00000221867; CTA
TQHFVQENY

SEQ ID NO: 38986 - protein, 9 aa, Homo sapiens
  misc_feature: Table A; Target 38986; HLA-B*27:02; MAGEA3; ENSG00000221867; CTA
TQHFVQENY

SEQ ID NO: 38987 - protein, 9 aa, Homo sapiens
  misc_feature: Table A; Target 38987; HLA-B*27:05; MAGEA3; ENSG00000221867; CTA
TQHFVQENY

SEQ ID NO: 38988 - protein, 9 aa, Homo sapiens
  misc_feature: Table A; Target 38988; HLA-B*35:01; MAGEA3; ENSG00000221867; CTA
TQHFVQENY

SEQ ID NO: 38989 - protein, 9 aa, Homo sapiens
  misc_feature: Table A; Target 38989; HLA-B*39:01; MAGEA3; ENSG00000221867; CTA
TQHFVQENY

SEQ ID NO: 38990 - protein, 9 aa, Homo sapiens
  misc_feature: Table A; Target 38990; HLA-B*44:02; MAGEA3; ENSG00000221867; CTA
TQHFVQENY

SEQ ID NO: 38991 - protein, 9 aa, Homo sapiens
  misc_feature: Table A; Target 38991; HLA-B*44:03; MAGEA3; ENSG00000221867; CTA
TQHFVQENY

SEQ ID NO: 38992 - protein, 9 aa, Homo sapiens
  misc_feature: Table A; Target 38992; HLA-B*46:01; MAGEA3; ENSG00000221867; CTA
TQHFVQENY

SEQ ID NO: 38993 - protein, 9 aa, Homo sapiens
  misc_feature: Table A; Target 38993; HLA-C*02:02; MAGEA3; ENSG00000221867; CTA
TQHFVQENY

SEQ ID NO: 38994 - protein, 9 aa, Homo sapiens
  misc_feature: Table A; Target 38994; HLA-C*04:01; MAGEA3; ENSG00000221867; CTA
TQHFVQENY

SEQ ID NO: 38995 - protein, 9 aa, Homo sapiens
  misc_feature: Table A; Target 38995; HLA-C*07:01; MAGEA3; ENSG00000221867; CTA
TQHFVQENY

SEQ ID NO: 38996 - protein, 9 aa, Homo sapiens
  misc_feature: Table A; Target 38996; HLA-C*07:04; MAGEA3; ENSG00000221867; CTA
TQHFVQENY

SEQ ID NO: 38997 - protein, 9 aa, Homo sapiens
  misc_feature: Table A; Target 38997; HLA-C*16:01; MAGEA3; ENSG00000221867; CTA
TQHFVQENY

SEQ ID NO: 38998 - protein, 9 aa, Homo sapiens
  misc_feature: Table A; Target 38998; HLA-C*16:04; MAGEA3; ENSG00000221867; CTA
TQHFVQENY

SEQ ID NO: 38999 - protein, 10 aa, Homo sapiens
  misc_feature: Table A; Target 38999; HLA-B*38:01; MAGEA3; ENSG00000221867; CTA
TQHFVQENYL

SEQ ID NO: 39000 - protein, 10 aa, Homo sapiens
  misc_feature: Table A; Target 39000; HLA-B*39:01; MAGEA3; ENSG00000221867; CTA
TQHFVQENYL

SEQ ID NO: 39001 - protein, 8 aa, Homo sapiens
  misc_feature: Table A; Target 39001; HLA-B*15:03; MAGEA3; ENSG00000221867; CTA
VDPIGHLY

SEQ ID NO: 39002 - protein, 8 aa, Homo sapiens
  misc_feature: Table A; Target 39002; HLA-B*18:01; MAGEA3; ENSG00000221867; CTA
VDPIGHLY

SEQ ID NO: 39003 - protein, 8 aa, Homo sapiens
  misc_feature: Table A; Target 39003; HLA-B*37:01; MAGEA3; ENSG00000221867; CTA
VDPIGHLY

SEQ ID NO: 39004 - protein, 8 aa, Homo sapiens
  misc_feature: Table A; Target 39004; HLA-C*01:02; MAGEA3; ENSG00000221867; CTA
VDPIGHLY

SEQ ID NO: 39005 - protein, 8 aa, Homo sapiens
  misc_feature: Table A; Target 39005; HLA-C*04:01; MAGEA3; ENSG00000221867; CTA
VDPIGHLY

SEQ ID NO: 39006 - protein, 8 aa, Homo sapiens
  misc_feature: Table A; Target 39006; HLA-C*06:02; MAGEA3; ENSG00000221867; CTA
VDPIGHLY

SEQ ID NO: 39007 - protein, 8 aa, Homo sapiens
  misc_feature: Table A; Target 39007; HLA-C*07:01; MAGEA3; ENSG00000221867; CTA
VDPIGHLY

SEQ ID NO: 39008 - protein, 8 aa, Homo sapiens
  misc_feature: Table A; Target 39008; HLA-C*07:04; MAGEA3; ENSG00000221867; CTA
VDPIGHLY

SEQ ID NO: 39009 - protein, 8 aa, Homo sapiens
  misc_feature: Table A; Target 39009; HLA-C*12:03; MAGEA3; ENSG00000221867; CTA
VDPIGHLY

SEQ ID NO: 39010 - protein, 10 aa, Homo sapiens
  misc_feature: Table A; Target 39010; HLA-A*24:02; MAGEA3; ENSG00000221867; CTA
VDPIGHLYIF

SEQ ID NO: 39011 - protein, 8 aa, Homo sapiens
  misc_feature: Table A; Target 39011; HLA-A*30:01; MAGEA3; ENSG00000221867; CTA
VETSYVKV

SEQ ID NO: 39012 - protein, 8 aa, Homo sapiens
  misc_feature: Table A; Target 39012; HLA-B*18:01; MAGEA3; ENSG00000221867; CTA
VETSYVKV

SEQ ID NO: 39013 - protein, 8 aa, Homo sapiens
  misc_feature: Table A; Target 39013; HLA-B*37:01; MAGEA3; ENSG00000221867; CTA
VETSYVKV

SEQ ID NO: 39014 - protein, 8 aa, Homo sapiens
  misc_feature: Table A; Target 39014; HLA-B*40:02; MAGEA3; ENSG00000221867; CTA
VETSYVKV

SEQ ID NO: 39015 - protein, 8 aa, Homo sapiens
  misc_feature: Table A; Target 39015; HLA-C*16:02; MAGEA3; ENSG00000221867; CTA
VETSYVKV

SEQ ID NO: 39016 - protein, 9 aa, Homo sapiens
  misc_feature: Table A; Target 39016; HLA-B*18:01; MAGEA3; ENSG00000221867; CTA
VETSYVKVL

SEQ ID NO: 39017 - protein, 9 aa, Homo sapiens
  misc_feature: Table A; Target 39017; HLA-B*27:02; MAGEA3; ENSG00000221867; CTA
VETSYVKVL

SEQ ID NO: 39018 - protein, 9 aa, Homo sapiens
  misc_feature: Table A; Target 39018; HLA-B*27:05; MAGEA3; ENSG00000221867; CTA
VETSYVKVL

SEQ ID NO: 39019 - protein, 9 aa, Homo sapiens
  misc_feature: Table A; Target 39019; HLA-B*37:01; MAGEA3; ENSG00000221867; CTA
VETSYVKVL

SEQ ID NO: 39020 - protein, 9 aa, Homo sapiens
  misc_feature: Table A; Target 39020; HLA-B*40:02; MAGEA3; ENSG00000221867; CTA
VETSYVKVL

SEQ ID NO: 39021 - protein, 9 aa, Homo sapiens
  misc_feature: Table A; Target 39021; HLA-B*44:02; MAGEA3; ENSG00000221867; CTA
VETSYVKVL

SEQ ID NO: 39022 - protein, 9 aa, Homo sapiens
  misc_feature: Table A; Target 39022; HLA-B*49:01; MAGEA3; ENSG00000221867; CTA
VETSYVKVL

SEQ ID NO: 39023 - protein, 9 aa, Homo sapiens
  misc_feature: Table A; Target 39023; HLA-C*02:02; MAGEA3; ENSG00000221867; CTA
VETSYVKVL

SEQ ID NO: 39024 - protein, 9 aa, Homo sapiens
  misc_feature: Table A; Target 39024; HLA-C*06:02; MAGEA3; ENSG00000221867; CTA
VETSYVKVL

SEQ ID NO: 39025 - protein, 9 aa, Homo sapiens
  misc_feature: Table A; Target 39025; HLA-C*07:01; MAGEA3; ENSG00000221867; CTA
VETSYVKVL

SEQ ID NO: 39026 - protein, 9 aa, Homo sapiens
  misc_feature: Table A; Target 39026; HLA-C*07:04; MAGEA3; ENSG00000221867; CTA
VETSYVKVL

SEQ ID NO: 39027 - protein, 9 aa, Homo sapiens
  misc_feature: Table A; Target 39027; HLA-C*16:01; MAGEA3; ENSG00000221867; CTA
VETSYVKVL

SEQ ID NO: 39028 - protein, 9 aa, Homo sapiens
  misc_feature: Table A; Target 39028; HLA-C*16:02; MAGEA3; ENSG00000221867; CTA
VETSYVKVL

SEQ ID NO: 39029 - protein, 9 aa, Homo sapiens
  misc_feature: Table A; Target 39029; HLA-C*16:04; MAGEA3; ENSG00000221867; CTA
VETSYVKVL

SEQ ID NO: 39030 - protein, 10 aa, Homo sapiens
  misc_feature: Table A; Target 39030; HLA-C*04:01; MAGEA3; ENSG00000221867; CTA
VETSYVKVLH

SEQ ID NO: 39031 - protein, 10 aa, Homo sapiens
  misc_feature: Table A; Target 39031; HLA-B*40:01; MAGEA3; ENSG00000221867; CTA
VEVTLGEVPA

SEQ ID NO: 39032 - protein, 10 aa, Homo sapiens
  misc_feature: Table A; Target 39032; HLA-B*07:02; MAGEA3; ENSG00000221867; CTA
VIFSKASSSL

SEQ ID NO: 39033 - protein, 10 aa, Homo sapiens
  misc_feature: Table A; Target 39033; HLA-B*46:01; MAGEA3; ENSG00000221867; CTA
VIFSKASSSL

SEQ ID NO: 39034 - protein, 10 aa, Homo sapiens
  misc_feature: Table A; Target 39034; HLA-C*01:02; MAGEA3; ENSG00000221867; CTA
VIFSKASSSL

SEQ ID NO: 39035 - protein, 9 aa, Homo sapiens
  misc_feature: Table A; Target 39035; HLA-B*15:03; MAGEA3; ENSG00000221867; CTA
VKISGGPHI

SEQ ID NO: 39036 - protein, 9 aa, Homo sapiens
  misc_feature: Table A; Target 39036; HLA-B*38:01; MAGEA3; ENSG00000221867; CTA
VKISGGPHI

SEQ ID NO: 39037 - protein, 11 aa, Homo sapiens
  misc_feature: Table A; Target 39037; HLA-B*15:03; MAGEA3; ENSG00000221867; CTA
VKISGGPHISY

SEQ ID NO: 39038 - protein, 11 aa, Homo sapiens
  misc_feature: Table A; Target 39038; HLA-C*12:03; MAGEA3; ENSG00000221867; CTA
VKISGGPHISY

SEQ ID NO: 39039 - protein, 9 aa, Homo sapiens
  misc_feature: Table A; Target 39039; HLA-A*68:02; MAGEA3; ENSG00000221867; CTA
YIFATCLGL

SEQ ID NO: 39040 - protein, 8 aa, Homo sapiens
  misc_feature: Table A; Target 39040; HLA-B*51:01; MAGEA3; ENSG00000221867; CTA
YPPLHEWV

SEQ ID NO: 39041 - protein, 9 aa, Homo sapiens
  misc_feature: Table A; Target 39041; HLA-A*24:02; MAGEA3; ENSG00000221867; CTA
YPPLHEWVL

SEQ ID NO: 39042 - protein, 9 aa, Homo sapiens
  misc_feature: Table A; Target 39042; HLA-B*35:01; MAGEA3; ENSG00000221867; CTA
YPPLHEWVL

SEQ ID NO: 39043 - protein, 9 aa, Homo sapiens
  misc_feature: Table A; Target 39043; HLA-B*35:03; MAGEA3; ENSG00000221867; CTA
YPPLHEWVL

SEQ ID NO: 39044 - protein, 9 aa, Homo sapiens
  misc_feature: Table A; Target 39044; HLA-B*51:01; MAGEA3; ENSG00000221867; CTA
YPPLHEWVL

SEQ ID NO: 39045 - protein, 9 aa, Homo sapiens
  misc_feature: Table A; Target 39045; HLA-B*54:01; MAGEA3; ENSG00000221867; CTA
YPPLHEWVL

SEQ ID NO: 39046 - protein, 8 aa, Homo sapiens
  misc_feature: Table A; Target 39046; HLA-C*12:03; MAGEA3,MAGEA4; ENSG00000221867,ENSG00000147381; CTA,TAA
ALGLVGAQ

SEQ ID NO: 39047 - protein, 8 aa, Homo sapiens
  misc_feature: Table A; Target 39047; HLA-B*08:01; MAGEA3,MAGEA4; ENSG00000221867,ENSG00000147381; CTA,TAA
ETSYVKVL

SEQ ID NO: 39048 - protein, 9 aa, Homo sapiens
  misc_feature: Table A; Target 39048; HLA-B*55:01; MAGEA3,MAGEA4,MAGEA6; ENSG00000221867,ENSG00000147381,ENSG00000197172; CTA,TAA,CTA
ALGLVGAQA

SEQ ID NO: 39049 - protein, 10 aa, Homo sapiens
  misc_feature: Table A; Target 39049; HLA-C*06:02; MAGEA3,MAGEA4,MAGEA6; ENSG00000221867,ENSG00000147381,ENSG00000197172; CTA,TAA,CTA
ALGLVGAQAP

SEQ ID NO: 39050 - protein, 9 aa, Homo sapiens
  misc_feature: Table A; Target 39050; HLA-B*27:05; MAGEA3,MAGEA4,MAGEA6; ENSG00000221867,ENSG00000147381,ENSG00000197172; CTA,TAA,CTA
EALGLVGAQ

SEQ ID NO: 39051 - protein, 9 aa, Homo sapiens
  misc_feature: Table A; Target 39051; HLA-C*06:02; MAGEA3,MAGEA4,MAGEA6; ENSG00000221867,ENSG00000147381,ENSG00000197172; CTA,TAA,CTA
EALGLVGAQ

SEQ ID NO: 39052 - protein, 9 aa, Homo sapiens
  misc_feature: Table A; Target 39052; HLA-C*07:06; MAGEA3,MAGEA4,MAGEA6; ENSG00000221867,ENSG00000147381,ENSG00000197172; CTA,TAA,CTA
EALGLVGAQ

SEQ ID NO: 39053 - protein, 10 aa, Homo sapiens
  misc_feature: Table A; Target 39053; HLA-B*49:01; MAGEA3,MAGEA4,MAGEA6; ENSG00000221867,ENSG00000147381,ENSG00000197172; CTA,TAA,CTA
QENYLEYRQV

SEQ ID NO: 39054 - protein, 8 aa, Homo sapiens
  misc_feature: Table A; Target 39054; HLA-B*46:01; MAGEA3,MAGEA4,MAGEA6; ENSG00000221867,ENSG00000147381,ENSG00000197172; CTA,TAA,CTA
VQENYLEY

SEQ ID NO: 39055 - protein, 8 aa, Homo sapiens
  misc_feature: Table A; Target 39055; HLA-C*04:01; MAGEA3,MAGEA4,MAGEA6; ENSG00000221867,ENSG00000147381,ENSG00000197172; CTA,TAA,CTA
VQENYLEY

SEQ ID NO: 39056 - protein, 8 aa, Homo sapiens
  misc_feature: Table A; Target 39056; HLA-C*05:01; MAGEA3,MAGEA4,MAGEA6; ENSG00000221867,ENSG00000147381,ENSG00000197172; CTA,TAA,CTA
VQENYLEY

SEQ ID NO: 39057 - protein, 8 aa, Homo sapiens
  misc_feature: Table A; Target 39057; HLA-B*27:05; MAGEA3,MAGEA4,MAGEA6,MAGEA8; ENSG00000221867,ENSG00000147381,ENSG00000197172,ENSG00000156009; CTA,TAA,CTA,TAA
VQENYLEY

SEQ ID NO: 39058 - protein, 8 aa, Homo sapiens
  misc_feature: Table A; Target 39058; HLA-C*07:04; MAGEA3,MAGEA4,MAGEA6,MAGEA8; ENSG00000221867,ENSG00000147381,ENSG00000197172,ENSG00000156009; CTA,TAA,CTA,TAA
VQENYLEY

SEQ ID NO: 39059 - protein, 8 aa, Homo sapiens
  misc_feature: Table A; Target 39059; HLA-C*14:02; MAGEA3,MAGEA4,MAGEA6,MAGEA8; ENSG00000221867,ENSG00000147381,ENSG00000197172,ENSG00000156009; CTA,TAA,CTA,TAA
VQENYLEY

SEQ ID NO: 39060 - protein, 9 aa, Homo sapiens
  misc_feature: Table A; Target 39060; HLA-A*31:01; MAGEA3,MAGEA4,MAGEA6,MAGEA8; ENSG00000221867,ENSG00000147381,ENSG00000197172,ENSG00000156009; CTA,TAA,CTA,TAA
VQENYLEYR

SEQ ID NO: 39061 - protein, 8 aa, Homo sapiens
  misc_feature: Table A; Target 39061; HLA-C*01:02; MAGEA3,MAGEA6; ENSG00000221867,ENSG00000197172; CTA,CTA
AASSSSTL

SEQ ID NO: 39062 - protein, 9 aa, Homo sapiens
  misc_feature: Table A; Target 39062; HLA-B*13:02; MAGEA3,MAGEA6; ENSG00000221867,ENSG00000197172; CTA,CTA
AASSSSTLV

SEQ ID NO: 39063 - protein, 9 aa, Homo sapiens
  misc_feature: Table A; Target 39063; HLA-C*02:02; MAGEA3,MAGEA6; ENSG00000221867,ENSG00000197172; CTA,CTA
AASSSSTLV

SEQ ID NO: 39064 - protein, 9 aa, Homo sapiens
  misc_feature: Table A; Target 39064; HLA-C*12:03; MAGEA3,MAGEA6; ENSG00000221867,ENSG00000197172; CTA,CTA
AASSSSTLV

SEQ ID NO: 39065 - protein, 9 aa, Homo sapiens
  misc_feature: Table A; Target 39065; HLA-C*16:02; MAGEA3,MAGEA6; ENSG00000221867,ENSG00000197172; CTA,CTA
AASSSSTLV

SEQ ID NO: 39066 - protein, 9 aa, Homo sapiens
  misc_feature: Table A; Target 39066; HLA-C*16:04; MAGEA3,MAGEA6; ENSG00000221867,ENSG00000197172; CTA,CTA
AASSSSTLV

SEQ ID NO: 39067 - protein, 8 aa, Homo sapiens
  misc_feature: Table A; Target 39067; HLA-A*30:01; MAGEA3,MAGEA6; ENSG00000221867,ENSG00000197172; CTA,CTA
AEMLGSVV

SEQ ID NO: 39068 - protein, 8 aa, Homo sapiens
  misc_feature: Table A; Target 39068; HLA-B*08:01; MAGEA3,MAGEA6; ENSG00000221867,ENSG00000197172; CTA,CTA
AEMLGSVV

SEQ ID NO: 39069 - protein, 8 aa, Homo sapiens
  misc_feature: Table A; Target 39069; HLA-B*13:02; MAGEA3,MAGEA6; ENSG00000221867,ENSG00000197172; CTA,CTA
AEMLGSVV

SEQ ID NO: 39070 - protein, 8 aa, Homo sapiens
  misc_feature: Table A; Target 39070; HLA-B*18:01; MAGEA3,MAGEA6; ENSG00000221867,ENSG00000197172; CTA,CTA
AEMLGSVV

SEQ ID NO: 39071 - protein, 8 aa, Homo sapiens
  misc_feature: Table A; Target 39071; HLA-B*37:01; MAGEA3,MAGEA6; ENSG00000221867,ENSG00000197172; CTA,CTA
AEMLGSVV

SEQ ID NO: 39072 - protein, 8 aa, Homo sapiens
  misc_feature: Table A; Target 39072; HLA-B*40:01; MAGEA3,MAGEA6; ENSG00000221867,ENSG00000197172; CTA,CTA
AEMLGSVV

SEQ ID NO: 39073 - protein, 8 aa, Homo sapiens
  misc_feature: Table A; Target 39073; HLA-B*40:02; MAGEA3,MAGEA6; ENSG00000221867,ENSG00000197172; CTA,CTA
AEMLGSVV

SEQ ID NO: 39074 - protein, 8 aa, Homo sapiens
  misc_feature: Table A; Target 39074; HLA-B*44:02; MAGEA3,MAGEA6; ENSG00000221867,ENSG00000197172; CTA,CTA
AEMLGSVV

SEQ ID NO: 39075 - protein, 8 aa, Homo sapiens
  misc_feature: Table A; Target 39075; HLA-B*44:03; MAGEA3,MAGEA6; ENSG00000221867,ENSG00000197172; CTA,CTA
AEMLGSVV

SEQ ID NO: 39076 - protein, 9 aa, Homo sapiens
  misc_feature: Table A; Target 39076; HLA-B*40:01; MAGEA3,MAGEA6; ENSG00000221867,ENSG00000197172; CTA,CTA
AEMLGSVVG

SEQ ID NO: 39077 - protein, 9 aa, Homo sapiens
  misc_feature: Table A; Target 39077; HLA-B*40:02; MAGEA3,MAGEA6; ENSG00000221867,ENSG00000197172; CTA,CTA
AEMLGSVVG

SEQ ID NO: 39078 - protein, 9 aa, Homo sapiens
  misc_feature: Table A; Target 39078; HLA-B*49:01; MAGEA3,MAGEA6; ENSG00000221867,ENSG00000197172; CTA,CTA
AEMLGSVVG

SEQ ID NO: 39079 - protein, 10 aa, Homo sapiens
  misc_feature: Table A; Target 39079; HLA-B*44:02; MAGEA3,MAGEA6; ENSG00000221867,ENSG00000197172; CTA,CTA
AEMLGSVVGN

SEQ ID NO: 39080 - protein, 10 aa, Homo sapiens
  misc_feature: Table A; Target 39080; HLA-B*49:01; MAGEA3,MAGEA6; ENSG00000221867,ENSG00000197172; CTA,CTA
AEMLGSVVGN

SEQ ID NO: 39081 - protein, 11 aa, Homo sapiens
  misc_feature: Table A; Target 39081; HLA-A*30:01; MAGEA3,MAGEA6; ENSG00000221867,ENSG00000197172; CTA,CTA
AEMLGSVVGNW

SEQ ID NO: 39082 - protein, 11 aa, Homo sapiens
  misc_feature: Table A; Target 39082; HLA-A*32:01; MAGEA3,MAGEA6; ENSG00000221867,ENSG00000197172; CTA,CTA
AEMLGSVVGNW

SEQ ID NO: 39083 - protein, 11 aa, Homo sapiens
  misc_feature: Table A; Target 39083; HLA-B*27:02; MAGEA3,MAGEA6; ENSG00000221867,ENSG00000197172; CTA,CTA
AEMLGSVVGNW

SEQ ID NO: 39084 - protein, 11 aa, Homo sapiens
  misc_feature: Table A; Target 39084; HLA-B*37:01; MAGEA3,MAGEA6; ENSG00000221867,ENSG00000197172; CTA,CTA
AEMLGSVVGNW

SEQ ID NO: 39085 - protein, 11 aa, Homo sapiens
  misc_feature: Table A; Target 39085; HLA-B*40:01; MAGEA3,MAGEA6; ENSG00000221867,ENSG00000197172; CTA,CTA
AEMLGSVVGNW

SEQ ID NO: 39086 - protein, 11 aa, Homo sapiens
  misc_feature: Table A; Target 39086; HLA-B*49:01; MAGEA3,MAGEA6; ENSG00000221867,ENSG00000197172; CTA,CTA
AEMLGSVVGNW

SEQ ID NO: 39087 - protein, 11 aa, Homo sapiens
  misc_feature: Table A; Target 39087; HLA-B*57:01; MAGEA3,MAGEA6; ENSG00000221867,ENSG00000197172; CTA,CTA
AEMLGSVVGNW

SEQ ID NO: 39088 - protein, 11 aa, Homo sapiens
  misc_feature: Table A; Target 39088; HLA-C*16:04; MAGEA3,MAGEA6; ENSG00000221867,ENSG00000197172; CTA,CTA
AEMLGSVVGNW

SEQ ID NO: 39089 - protein, 10 aa, Homo sapiens
  misc_feature: Table A; Target 39089; HLA-A*30:01; MAGEA3,MAGEA6; ENSG00000221867,ENSG00000197172; CTA,CTA
AESPDPPQSP

SEQ ID NO: 39090 - protein, 10 aa, Homo sapiens
  misc_feature: Table A; Target 39090; HLA-B*40:02; MAGEA3,MAGEA6; ENSG00000221867,ENSG00000197172; CTA,CTA
AESPDPPQSP

SEQ ID NO: 39091 - protein, 10 aa, Homo sapiens
  misc_feature: Table A; Target 39091; HLA-B*44:02; MAGEA3,MAGEA6; ENSG00000221867,ENSG00000197172; CTA,CTA
AESPDPPQSP

SEQ ID NO: 39092 - protein, 10 aa, Homo sapiens
  misc_feature: Table A; Target 39092; HLA-B*49:01; MAGEA3,MAGEA6; ENSG00000221867,ENSG00000197172; CTA,CTA
AESPDPPQSP

SEQ ID NO: 39093 - protein, 9 aa, Homo sapiens
  misc_feature: Table A; Target 39093; HLA-A*02:01; MAGEA3,MAGEA6; ENSG00000221867,ENSG00000197172; CTA,CTA
ALGLVGAQA

SEQ ID NO: 39094 - protein, 9 aa, Homo sapiens
  misc_feature: Table A; Target 39094; HLA-A*02:03; MAGEA3,MAGEA6; ENSG00000221867,ENSG00000197172; CTA,CTA
ALGLVGAQA

SEQ ID NO: 39095 - protein, 9 aa, Homo sapiens
  misc_feature: Table A; Target 39095; HLA-B*56:01; MAGEA3,MAGEA6; ENSG00000221867,ENSG00000197172; CTA,CTA
ALGLVGAQA

SEQ ID NO: 39096 - protein, 11 aa, Homo sapiens
  misc_feature: Table A; Target 39096; HLA-B*56:01; MAGEA3,MAGEA6; ENSG00000221867,ENSG00000197172; CTA,CTA
ALGLVGAQAPA

SEQ ID NO: 39097 - protein, 9 aa, Homo sapiens
  misc_feature: Table A; Target 39097; HLA-B*35:03; MAGEA3,MAGEA6; ENSG00000221867,ENSG00000197172; CTA,CTA
APATEEQEA

SEQ ID NO: 39098 - protein, 9 aa, Homo sapiens
  misc_feature: Table A; Target 39098; HLA-B*55:01; MAGEA3,MAGEA6; ENSG00000221867,ENSG00000197172; CTA,CTA
APATEEQEA

SEQ ID NO: 39099 - protein, 9 aa, Homo sapiens
  misc_feature: Table A; Target 39099; HLA-B*56:01; MAGEA3,MAGEA6; ENSG00000221867,ENSG00000197172; CTA,CTA
APATEEQEA

SEQ ID NO: 39100 - protein, 10 aa, Homo sapiens
  misc_feature: Table A; Target 39100; HLA-B*55:01; MAGEA3,MAGEA6; ENSG00000221867,ENSG00000197172; CTA,CTA
APATEEQEAA

SEQ ID NO: 39101 - protein, 10 aa, Homo sapiens
  misc_feature: Table A; Target 39101; HLA-B*56:01; MAGEA3,MAGEA6; ENSG00000221867,ENSG00000197172; CTA,CTA
APATEEQEAA

SEQ ID NO: 39102 - protein, 9 aa, Homo sapiens
  misc_feature: Table A; Target 39102; HLA-B*15:01; MAGEA3,MAGEA6; ENSG00000221867,ENSG00000197172; CTA,CTA
AQAPATEEQ

SEQ ID NO: 39103 - protein, 11 aa, Homo sapiens
  misc_feature: Table A; Target 39103; HLA-B*13:02; MAGEA3,MAGEA6; ENSG00000221867,ENSG00000197172; CTA,CTA
AQAPATEEQEA

SEQ ID NO: 39104 - protein, 11 aa, Homo sapiens
  misc_feature: Table A; Target 39104; HLA-B*27:05; MAGEA3,MAGEA6; ENSG00000221867,ENSG00000197172; CTA,CTA
AQAPATEEQEA

SEQ ID NO: 39105 - protein, 11 aa, Homo sapiens
  misc_feature: Table A; Target 39105; HLA-B*39:01; MAGEA3,MAGEA6; ENSG00000221867,ENSG00000197172; CTA,CTA
AQAPATEEQEA

SEQ ID NO: 39106 - protein, 8 aa, Homo sapiens
  misc_feature: Table A; Target 39106; HLA-B*37:01; MAGEA3,MAGEA6; ENSG00000221867,ENSG00000197172; CTA,CTA
ASSLPTTM

SEQ ID NO: 39107 - protein, 8 aa, Homo sapiens
  misc_feature: Table A; Target 39107; HLA-C*16:01; MAGEA3,MAGEA6; ENSG00000221867,ENSG00000197172; CTA,CTA
ASSLPTTM

SEQ ID NO: 39108 - protein, 10 aa, Homo sapiens
  misc_feature: Table A; Target 39108; HLA-A*01:01; MAGEA3,MAGEA6; ENSG00000221867,ENSG00000197172; CTA,CTA
ASSLPTTMNY

SEQ ID NO: 39109 - protein, 10 aa, Homo sapiens
  misc_feature: Table A; Target 39109; HLA-A*03:01; MAGEA3,MAGEA6; ENSG00000221867,ENSG00000197172; CTA,CTA
ASSLPTTMNY

SEQ ID NO: 39110 - protein, 10 aa, Homo sapiens
  misc_feature: Table A; Target 39110; HLA-A*11:01; MAGEA3,MAGEA6; ENSG00000221867,ENSG00000197172; CTA,CTA
ASSLPTTMNY

SEQ ID NO: 39111 - protein, 10 aa, Homo sapiens
  misc_feature: Table A; Target 39111; HLA-A*29:02; MAGEA3,MAGEA6; ENSG00000221867,ENSG00000197172; CTA,CTA
ASSLPTTMNY

SEQ ID NO: 39112 - protein, 10 aa, Homo sapiens
  misc_feature: Table A; Target 39112; HLA-A*30:02; MAGEA3,MAGEA6; ENSG00000221867,ENSG00000197172; CTA,CTA
ASSLPTTMNY

SEQ ID NO: 39113 - protein, 10 aa, Homo sapiens
  misc_feature: Table A; Target 39113; HLA-A*32:01; MAGEA3,MAGEA6; ENSG00000221867,ENSG00000197172; CTA,CTA
ASSLPTTMNY

SEQ ID NO: 39114 - protein, 10 aa, Homo sapiens
  misc_feature: Table A; Target 39114; HLA-B*15:01; MAGEA3,MAGEA6; ENSG00000221867,ENSG00000197172; CTA,CTA
ASSLPTTMNY

SEQ ID NO: 39115 - protein, 10 aa, Homo sapiens
  misc_feature: Table A; Target 39115; HLA-B*46:01; MAGEA3,MAGEA6; ENSG00000221867,ENSG00000197172; CTA,CTA
ASSLPTTMNY

SEQ ID NO: 39116 - protein, 10 aa, Homo sapiens
  misc_feature: Table A; Target 39116; HLA-B*58:01; MAGEA3,MAGEA6; ENSG00000221867,ENSG00000197172; CTA,CTA
ASSLPTTMNY

SEQ ID NO: 39117 - protein, 10 aa, Homo sapiens
  misc_feature: Table A; Target 39117; HLA-C*02:02; MAGEA3,MAGEA6; ENSG00000221867,ENSG00000197172; CTA,CTA
ASSLPTTMNY
